United States Patent Application Publication US 2015/0141320 A1 - sequence listing, part 23

SEQ ID NO: 785640 - DNA, 15 bp, Homo sapiens
gcgtgggaaagagag

SEQ ID NO: 785641 - DNA, 15 bp, Homo sapiens
cgtgggaaagagaga

SEQ ID NO: 785642 - DNA, 15 bp, Homo sapiens
gtgggaaagagagag

SEQ ID NO: 785643 - DNA, 15 bp, Homo sapiens
tgggaaagagagagg

SEQ ID NO: 785644 - DNA, 15 bp, Homo sapiens
gggaaagagagaggc

SEQ ID NO: 785645 - DNA, 15 bp, Homo sapiens
ggaaagagagaggcc

SEQ ID NO: 785646 - DNA, 15 bp, Homo sapiens
gaaagagagaggcct

SEQ ID NO: 785647 - DNA, 15 bp, Homo sapiens
aaagagagaggcctt

SEQ ID NO: 785648 - DNA, 15 bp, Homo sapiens
aagagagaggccttg

SEQ ID NO: 785649 - DNA, 15 bp, Homo sapiens
agagagaggccttgt

SEQ ID NO: 785650 - DNA, 15 bp, Homo sapiens
gagagaggccttgtc

SEQ ID NO: 785651 - DNA, 15 bp, Homo sapiens
agagaggccttgtca

SEQ ID NO: 785652 - DNA, 15 bp, Homo sapiens
gagaggccttgtcag

SEQ ID NO: 785653 - DNA, 15 bp, Homo sapiens
agaggccttgtcagc

SEQ ID NO: 785654 - DNA, 15 bp, Homo sapiens
gaggccttgtcagca

SEQ ID NO: 785655 - DNA, 15 bp, Homo sapiens
aggccttgtcagcag

SEQ ID NO: 785656 - DNA, 15 bp, Homo sapiens
ggccttgtcagcagg

SEQ ID NO: 785657 - DNA, 15 bp, Homo sapiens
gccttgtcagcaggt

SEQ ID NO: 785658 - DNA, 15 bp, Homo sapiens
ccttgtcagcaggtg

SEQ ID NO: 785659 - DNA, 15 bp, Homo sapiens
cttgtcagcaggtgg

SEQ ID NO: 785660 - DNA, 15 bp, Homo sapiens
ttgtcagcaggtggg

SEQ ID NO: 785661 - DNA, 15 bp, Homo sapiens
tgtcagcaggtgggg

SEQ ID NO: 785662 - DNA, 15 bp, Homo sapiens
gtcagcaggtggggg

SEQ ID NO: 785663 - DNA, 15 bp, Homo sapiens
tcagcaggtggggga

SEQ ID NO: 785664 - DNA, 15 bp, Homo sapiens
cagcaggtgggggag

SEQ ID NO: 785665 - DNA, 15 bp, Homo sapiens
agcaggtgggggagg

SEQ ID NO: 785666 - DNA, 15 bp, Homo sapiens
gcaggtgggggaggt

SEQ ID NO: 785667 - DNA, 15 bp, Homo sapiens
caggtgggggaggta

SEQ ID NO: 785668 - DNA, 15 bp, Homo sapiens
aggtgggggaggtag

SEQ ID NO: 785669 - DNA, 15 bp, Homo sapiens
ggtgggggaggtagg

SEQ ID NO: 785670 - DNA, 15 bp, Homo sapiens
gtgggggaggtagga

SEQ ID NO: 785671 - DNA, 15 bp, Homo sapiens
tgggggaggtaggaa

SEQ ID NO: 785672 - DNA, 15 bp, Homo sapiens
gggggaggtaggaaa

SEQ ID NO: 785673 - DNA, 15 bp, Homo sapiens
ggggaggtaggaaat

SEQ ID NO: 785674 - DNA, 15 bp, Homo sapiens
gggaggtaggaaatg

SEQ ID NO: 785675 - DNA, 15 bp, Homo sapiens
ggaggtaggaaatgc

SEQ ID NO: 785676 - DNA, 15 bp, Homo sapiens
gaggtaggaaatgct

SEQ ID NO: 785677 - DNA, 15 bp, Homo sapiens
aggtaggaaatgctg

SEQ ID NO: 785678 - DNA, 15 bp, Homo sapiens
ggtaggaaatgctgt

SEQ ID NO: 785679 - DNA, 15 bp, Homo sapiens
gtaggaaatgctgtt

SEQ ID NO: 785680 - DNA, 15 bp, Homo sapiens
taggaaatgctgttc

SEQ ID NO: 785681 - DNA, 15 bp, Homo sapiens
aggaaatgctgttct

SEQ ID NO: 785682 - DNA, 15 bp, Homo sapiens
ggaaatgctgttctc

SEQ ID NO: 785683 - DNA, 15 bp, Homo sapiens
gaaatgctgttctcc

SEQ ID NO: 785684 - DNA, 15 bp, Homo sapiens
aaatgctgttctcct

SEQ ID NO: 785685 - DNA, 15 bp, Homo sapiens
aatgctgttctcctg

SEQ ID NO: 785686 - DNA, 15 bp, Homo sapiens
atgctgttctcctgt

SEQ ID NO: 785687 - DNA, 15 bp, Homo sapiens
tgctgttctcctgtg

SEQ ID NO: 785688 - DNA, 15 bp, Homo sapiens
gctgttctcctgtgg

SEQ ID NO: 785689 - DNA, 15 bp, Homo sapiens
ctgttctcctgtggg

SEQ ID NO: 785690 - DNA, 15 bp, Homo sapiens
tgttctcctgtgggc

SEQ ID NO: 785691 - DNA, 15 bp, Homo sapiens
gttctcctgtgggct

SEQ ID NO: 785692 - DNA, 15 bp, Homo sapiens
ttctcctgtgggctg

SEQ ID NO: 785693 - DNA, 15 bp, Homo sapiens
tctcctgtgggctga

SEQ ID NO: 785694 - DNA, 15 bp, Homo sapiens
ctcctgtgggctgaa

SEQ ID NO: 785695 - DNA, 15 bp, Homo sapiens
tcctgtgggctgaag

SEQ ID NO: 785696 - DNA, 15 bp, Homo sapiens
cctgtgggctgaagg

SEQ ID NO: 785697 - DNA, 15 bp, Homo sapiens
ctgtgggctgaaggt

SEQ ID NO: 785698 - DNA, 15 bp, Homo sapiens
tgtgggctgaaggtc

SEQ ID NO: 785699 - DNA, 15 bp, Homo sapiens
gtgggctgaaggtca

SEQ ID NO: 785700 - DNA, 15 bp, Homo sapiens
tgggctgaaggtcag

SEQ ID NO: 785701 - DNA, 15 bp, Homo sapiens
gggctgaaggtcagt

SEQ ID NO: 785702 - DNA, 15 bp, Homo sapiens
ggctgaaggtcagtg

SEQ ID NO: 785703 - DNA, 15 bp, Homo sapiens
gctgaaggtcagtga

SEQ ID NO: 785704 - DNA, 15 bp, Homo sapiens
ctgaaggtcagtgaa

SEQ ID NO: 785705 - DNA, 15 bp, Homo sapiens
tgaaggtcagtgaaa

SEQ ID NO: 785706 - DNA, 15 bp, Homo sapiens
gaaggtcagtgaaag

SEQ ID NO: 785707 - DNA, 15 bp, Homo sapiens
aaggtcagtgaaagg

SEQ ID NO: 785708 - DNA, 15 bp, Homo sapiens
aggtcagtgaaaggt

SEQ ID NO: 785709 - DNA, 15 bp, Homo sapiens
ggtcagtgaaaggtg

SEQ ID NO: 785710 - DNA, 15 bp, Homo sapiens
gtcagtgaaaggtga

SEQ ID NO: 785711 - DNA, 15 bp, Homo sapiens
tcagtgaaaggtgag

SEQ ID NO: 785712 - DNA, 15 bp, Homo sapiens
cagtgaaaggtgagc

SEQ ID NO: 785713 - DNA, 15 bp, Homo sapiens
agtgaaaggtgagct

SEQ ID NO: 785714 - DNA, 15 bp, Homo sapiens
gtgaaaggtgagctg

SEQ ID NO: 785715 - DNA, 15 bp, Homo sapiens
tgaaaggtgagctgg

SEQ ID NO: 785716 - DNA, 15 bp, Homo sapiens
gaaaggtgagctggg

SEQ ID NO: 785717 - DNA, 15 bp, Homo sapiens
aaaggtgagctgggg

SEQ ID NO: 785718 - DNA, 15 bp, Homo sapiens
aaggtgagctggggc

SEQ ID NO: 785719 - DNA, 15 bp, Homo sapiens
aggtgagctggggct

SEQ ID NO: 785720 - DNA, 15 bp, Homo sapiens
ggtgagctggggctc

SEQ ID NO: 785721 - DNA, 15 bp, Homo sapiens
gtgagctggggctcc

SEQ ID NO: 785722 - DNA, 15 bp, Homo sapiens
tgagctggggctcct

SEQ ID NO: 785723 - DNA, 15 bp, Homo sapiens
gagctggggctcctg

SEQ ID NO: 785724 - DNA, 15 bp, Homo sapiens
agctggggctcctga

SEQ ID NO: 785725 - DNA, 15 bp, Homo sapiens
gctggggctcctgag

SEQ ID NO: 785726 - DNA, 15 bp, Homo sapiens
ctggggctcctgagg

SEQ ID NO: 785727 - DNA, 15 bp, Homo sapiens
tggggctcctgaggc

SEQ ID NO: 785728 - DNA, 15 bp, Homo sapiens
ggggctcctgaggcc

SEQ ID NO: 785729 - DNA, 15 bp, Homo sapiens
gggctcctgaggcca

SEQ ID NO: 785730 - DNA, 15 bp, Homo sapiens
ggctcctgaggccag

SEQ ID NO: 785731 - DNA, 15 bp, Homo sapiens
gctcctgaggccagc

SEQ ID NO: 785732 - DNA, 15 bp, Homo sapiens
ctcctgaggccagca

SEQ ID NO: 785733 - DNA, 15 bp, Homo sapiens
tcctgaggccagcag

SEQ ID NO: 785734 - DNA, 15 bp, Homo sapiens
cctgaggccagcagg

SEQ ID NO: 785735 - DNA, 15 bp, Homo sapiens
ctgaggccagcaggt

SEQ ID NO: 785736 - DNA, 15 bp, Homo sapiens
tgaggccagcaggtt

SEQ ID NO: 785737 - DNA, 15 bp, Homo sapiens
gaggccagcaggttc

SEQ ID NO: 785738 - DNA, 15 bp, Homo sapiens
aggccagcaggttct

SEQ ID NO: 785739 - DNA, 15 bp, Homo sapiens
ggccagcaggttctg

SEQ ID NO: 785740 - DNA, 15 bp, Homo sapiens
gccagcaggttctgg

SEQ ID NO: 785741 - DNA, 15 bp, Homo sapiens
ccagcaggttctggc

SEQ ID NO: 785742 - DNA, 15 bp, Homo sapiens
cagcaggttctggca

SEQ ID NO: 785743 - DNA, 15 bp, Homo sapiens
agcaggttctggcac

SEQ ID NO: 785744 - DNA, 15 bp, Homo sapiens
gcaggttctggcaca

SEQ ID NO: 785745 - DNA, 15 bp, Homo sapiens
caggttctggcacag

SEQ ID NO: 785746 - DNA, 15 bp, Homo sapiens
aggttctggcacaga

SEQ ID NO: 785747 - DNA, 15 bp, Homo sapiens
ggttctggcacagaa

SEQ ID NO: 785748 - DNA, 15 bp, Homo sapiens
gttctggcacagaag

SEQ ID NO: 785749 - DNA, 15 bp, Homo sapiens
ttctggcacagaagc

SEQ ID NO: 785750 - DNA, 15 bp, Homo sapiens
tctggcacagaagca

SEQ ID NO: 785751 - DNA, 15 bp, Homo sapiens
ctggcacagaagcag

SEQ ID NO: 785752 - DNA, 15 bp, Homo sapiens
tggcacagaagcagc

SEQ ID NO: 785753 - DNA, 15 bp, Homo sapiens
ggcacagaagcagcc

SEQ ID NO: 785754 - DNA, 15 bp, Homo sapiens
gcacagaagcagccc

SEQ ID NO: 785755 - DNA, 15 bp, Homo sapiens
cacagaagcagcccg

SEQ ID NO: 785756 - DNA, 15 bp, Homo sapiens
acagaagcagcccgg

SEQ ID NO: 785757 - DNA, 15 bp, Homo sapiens
cagaagcagcccggg

SEQ ID NO: 785758 - DNA, 15 bp, Homo sapiens
agaagcagcccggga

SEQ ID NO: 785759 - DNA, 15 bp, Homo sapiens
gaagcagcccgggag

SEQ ID NO: 785760 - DNA, 15 bp, Homo sapiens
aagcagcccgggagg

SEQ ID NO: 785761 - DNA, 15 bp, Homo sapiens
agcagcccgggagga

SEQ ID NO: 785762 - DNA, 15 bp, Homo sapiens
gcagcccgggaggaa

SEQ ID NO: 785763 - DNA, 15 bp, Homo sapiens
cagcccgggaggaag

SEQ ID NO: 785764 - DNA, 15 bp, Homo sapiens
agcccgggaggaagc

SEQ ID NO: 785765 - DNA, 15 bp, Homo sapiens
gcccgggaggaagct

SEQ ID NO: 785766 - DNA, 15 bp, Homo sapiens
cccgggaggaagctg

SEQ ID NO: 785767 - DNA, 15 bp, Homo sapiens
ccgggaggaagctgc

SEQ ID NO: 785768 - DNA, 15 bp, Homo sapiens
cgggaggaagctgcc

SEQ ID NO: 785769 - DNA, 15 bp, Homo sapiens
gggaggaagctgccc

SEQ ID NO: 785770 - DNA, 15 bp, Homo sapiens
ggaggaagctgccct

SEQ ID NO: 785771 - DNA, 15 bp, Homo sapiens
gaggaagctgccctg

SEQ ID NO: 785772 - DNA, 15 bp, Homo sapiens
aggaagctgccctgg

SEQ ID NO: 785773 - DNA, 15 bp, Homo sapiens
ggaagctgccctgga

SEQ ID NO: 785774 - DNA, 15 bp, Homo sapiens
gaagctgccctggaa

SEQ ID NO: 785775 - DNA, 15 bp, Homo sapiens
aagctgccctggaat

SEQ ID NO: 785776 - DNA, 15 bp, Homo sapiens
agctgccctggaatg

SEQ ID NO: 785777 - DNA, 15 bp, Homo sapiens
gctgccctggaatgt

SEQ ID NO: 785778 - DNA, 15 bp, Homo sapiens
ctgccctggaatgtg

SEQ ID NO: 785779 - DNA, 15 bp, Homo sapiens
tgccctggaatgtgc

SEQ ID NO: 785780 - DNA, 15 bp, Homo sapiens
gccctggaatgtgct

SEQ ID NO: 785781 - DNA, 15 bp, Homo sapiens
ccctggaatgtgctg

SEQ ID NO: 785782 - DNA, 15 bp, Homo sapiens
cctggaatgtgctgt

SEQ ID NO: 785783 - DNA, 15 bp, Homo sapiens
ctggaatgtgctgtg

SEQ ID NO: 785784 - DNA, 15 bp, Homo sapiens
tggaatgtgctgtgg

SEQ ID NO: 785785 - DNA, 15 bp, Homo sapiens
ggaatgtgctgtgga

SEQ ID NO: 785786 - DNA, 15 bp, Homo sapiens
gaatgtgctgtggac

SEQ ID NO: 785787 - DNA, 15 bp, Homo sapiens
aatgtgctgtggaca

SEQ ID NO: 785788 - DNA, 15 bp, Homo sapiens
atgtgctgtggacag

SEQ ID NO: 785789 - DNA, 15 bp, Homo sapiens
tgtgctgtggacaga

SEQ ID NO: 785790 - DNA, 15 bp, Homo sapiens
gtgctgtggacagac

SEQ ID NO: 785791 - DNA, 15 bp, Homo sapiens
tgctgtggacagacc

SEQ ID NO: 785792 - DNA, 15 bp, Homo sapiens
gctgtggacagacct

SEQ ID NO: 785793 - DNA, 15 bp, Homo sapiens
ctgtggacagacctg

SEQ ID NO: 785794 - DNA, 15 bp, Homo sapiens
tgtggacagacctgc

SEQ ID NO: 785795 - DNA, 15 bp, Homo sapiens
gtggacagacctgcg

SEQ ID NO: 785796 - DNA, 15 bp, Homo sapiens
tggacagacctgcgt

SEQ ID NO: 785797 - DNA, 15 bp, Homo sapiens
ggacagacctgcgta

SEQ ID NO: 785798 - DNA, 15 bp, Homo sapiens
gacagacctgcgtag

SEQ ID NO: 785799 - DNA, 15 bp, Homo sapiens
acagacctgcgtaga

SEQ ID NO: 785800 - DNA, 15 bp, Homo sapiens
cagacctgcgtagat

SEQ ID NO: 785801 - DNA, 15 bp, Homo sapiens
agacctgcgtagatc

SEQ ID NO: 785802 - DNA, 15 bp, Homo sapiens
gacctgcgtagatcc

SEQ ID NO: 785803 - DNA, 15 bp, Homo sapiens
acctgcgtagatccc

SEQ ID NO: 785804 - DNA, 15 bp, Homo sapiens
cctgcgtagatccct

SEQ ID NO: 785805 - DNA, 15 bp, Homo sapiens
ctgcgtagatccctt

SEQ ID NO: 785806 - DNA, 15 bp, Homo sapiens
tgcgtagatcccttc

SEQ ID NO: 785807 - DNA, 15 bp, Homo sapiens
gcgtagatcccttct

SEQ ID NO: 785808 - DNA, 15 bp, Homo sapiens
cgtagatcccttctt

SEQ ID NO: 785809 - DNA, 15 bp, Homo sapiens
gtagatcccttcttt

SEQ ID NO: 785810 - DNA, 15 bp, Homo sapiens
tagatcccttctttc

SEQ ID NO: 785811 - DNA, 15 bp, Homo sapiens
agatcccttctttcc

SEQ ID NO: 785812 - DNA, 15 bp, Homo sapiens
gatcccttctttccc

SEQ ID NO: 785813 - DNA, 15 bp, Homo sapiens
atcccttctttccca

SEQ ID NO: 785814 - DNA, 15 bp, Homo sapiens
tcccttctttcccac

SEQ ID NO: 785815 - DNA, 15 bp, Homo sapiens
cccttctttcccacg

SEQ ID NO: 785816 - DNA, 15 bp, Homo sapiens
ccttctttcccacgt

SEQ ID NO: 785817 - DNA, 15 bp, Homo sapiens
cttctttcccacgtc

SEQ ID NO: 785818 - DNA, 15 bp, Homo sapiens
ttctttcccacgtcc

SEQ ID NO: 785819 - DNA, 15 bp, Homo sapiens
tctttcccacgtcca

SEQ ID NO: 785820 - DNA, 15 bp, Homo sapiens
ctttcccacgtccag

SEQ ID NO: 785821 - DNA, 15 bp, Homo sapiens
tttcccacgtccagg

SEQ ID NO: 785822 - DNA, 15 bp, Homo sapiens
ttcccacgtccaggc

SEQ ID NO: 785823 - DNA, 15 bp, Homo sapiens
tcccacgtccaggct

SEQ ID NO: 785824 - DNA, 15 bp, Homo sapiens
cccacgtccaggctg

SEQ ID NO: 785825 - DNA, 15 bp, Homo sapiens
ccacgtccaggctgt

SEQ ID NO: 785826 - DNA, 15 bp, Homo sapiens
cacgtccaggctgtc

SEQ ID NO: 785827 - DNA, 15 bp, Homo sapiens
acgtccaggctgtcc

SEQ ID NO: 785828 - DNA, 15 bp, Homo sapiens
cgtccaggctgtccc

SEQ ID NO: 785829 - DNA, 15 bp, Homo sapiens
gtccaggctgtccca

SEQ ID NO: 785830 - DNA, 15 bp, Homo sapiens
tccaggctgtcccag

SEQ ID NO: 785831 - DNA, 15 bp, Homo sapiens
ccaggctgtcccagc

SEQ ID NO: 785832 - DNA, 15 bp, Homo sapiens
caggctgtcccagca

SEQ ID NO: 785833 - DNA, 15 bp, Homo sapiens
aggctgtcccagcat

SEQ ID NO: 785834 - DNA, 15 bp, Homo sapiens
ggctgtcccagcatc

SEQ ID NO: 785835 - DNA, 15 bp, Homo sapiens
gctgtcccagcatct

SEQ ID NO: 785836 - DNA, 15 bp, Homo sapiens
ctgtcccagcatctc

SEQ ID NO: 785837 - DNA, 15 bp, Homo sapiens
tgtcccagcatctct

SEQ ID NO: 785838 - DNA, 15 bp, Homo sapiens
gtcccagcatctctg

SEQ ID NO: 785839 - DNA, 15 bp, Homo sapiens
tcccagcatctctga

SEQ ID NO: 785840 - DNA, 15 bp, Homo sapiens
cccagcatctctgac

SEQ ID NO: 785841 - DNA, 15 bp, Homo sapiens
ccagcatctctgacc

SEQ ID NO: 785842 - DNA, 15 bp, Homo sapiens
cagcatctctgacca

SEQ ID NO: 785843 - DNA, 15 bp, Homo sapiens
agcatctctgaccag

SEQ ID NO: 785844 - DNA, 15 bp, Homo sapiens
gcatctctgaccagg

SEQ ID NO: 785845 - DNA, 15 bp, Homo sapiens
catctctgaccaggc

SEQ ID NO: 785846 - DNA, 15 bp, Homo sapiens
atctctgaccaggcc

SEQ ID NO: 785847 - DNA, 15 bp, Homo sapiens
tctctgaccaggcca

SEQ ID NO: 785848 - DNA, 15 bp, Homo sapiens
ctctgaccaggccaa

SEQ ID NO: 785849 - DNA, 15 bp, Homo sapiens
tctgaccaggccaag

SEQ ID NO: 785850 - DNA, 15 bp, Homo sapiens
ctgaccaggccaagg

SEQ ID NO: 785851 - DNA, 15 bp, Homo sapiens
tgaccaggccaaggt

SEQ ID NO: 785852 - DNA, 15 bp, Homo sapiens
gaccaggccaaggtc

SEQ ID NO: 785853 - DNA, 15 bp, Homo sapiens
accaggccaaggtca

SEQ ID NO: 785854 - DNA, 15 bp, Homo sapiens
ccaggccaaggtcac

SEQ ID NO: 785855 - DNA, 15 bp, Homo sapiens
caggccaaggtcacc

SEQ ID NO: 785856 - DNA, 15 bp, Homo sapiens
aggccaaggtcacct

SEQ ID NO: 785857 - DNA, 15 bp, Homo sapiens
ggccaaggtcaccta

SEQ ID NO: 785858 - DNA, 15 bp, Homo sapiens
gccaaggtcacctag

SEQ ID NO: 785859 - DNA, 15 bp, Homo sapiens
ccaaggtcacctagg

SEQ ID NO: 785860 - DNA, 15 bp, Homo sapiens
caaggtcacctaggc

SEQ ID NO: 785861 - DNA, 15 bp, Homo sapiens
aaggtcacctaggcg

SEQ ID NO: 785862 - DNA, 15 bp, Homo sapiens
aggtcacctaggcgc

SEQ ID NO: 785863 - DNA, 15 bp, Homo sapiens
ggtcacctaggcgca

SEQ ID NO: 785864 - DNA, 15 bp, Homo sapiens
gtcacctaggcgcag

SEQ ID NO: 785865 - DNA, 15 bp, Homo sapiens
tcacctaggcgcagg

SEQ ID NO: 785866 - DNA, 15 bp, Homo sapiens
cacctaggcgcaggc

SEQ ID NO: 785867 - DNA, 15 bp, Homo sapiens
acctaggcgcaggct

SEQ ID NO: 785868 - DNA, 15 bp, Homo sapiens
cctaggcgcaggctc

SEQ ID NO: 785869 - DNA, 15 bp, Homo sapiens
ctaggcgcaggctct

SEQ ID NO: 785870 - DNA, 15 bp, Homo sapiens
taggcgcaggctctt

SEQ ID NO: 785871 - DNA, 15 bp, Homo sapiens
aggcgcaggctcttc

SEQ ID NO: 785872 - DNA, 15 bp, Homo sapiens
ggcgcaggctcttct

SEQ ID NO: 785873 - DNA, 15 bp, Homo sapiens
gcgcaggctcttctc

SEQ ID NO: 785874 - DNA, 15 bp, Homo sapiens
cgcaggctcttctcc

SEQ ID NO: 785875 - DNA, 15 bp, Homo sapiens
gcaggctcttctcct

SEQ ID NO: 785876 - DNA, 15 bp, Homo sapiens
caggctcttctcctt

SEQ ID NO: 785877 - DNA, 15 bp, Homo sapiens
aggctcttctcctta

SEQ ID NO: 785878 - DNA, 15 bp, Homo sapiens
ggctcttctccttac

SEQ ID NO: 785879 - DNA, 15 bp, Homo sapiens
gctcttctccttacc

SEQ ID NO: 785880 - DNA, 15 bp, Homo sapiens
ctcttctccttacct

SEQ ID NO: 785881 - DNA, 15 bp, Homo sapiens
tcttctccttacctc

SEQ ID NO: 785882 - DNA, 15 bp, Homo sapiens
cttctccttacctca

SEQ ID NO: 785883 - DNA, 15 bp, Homo sapiens
ttctccttacctcac

SEQ ID NO: 785884 - DNA, 15 bp, Homo sapiens
tctccttacctcaca

SEQ ID NO: 785885 - DNA, 15 bp, Homo sapiens
ctccttacctcacag

SEQ ID NO: 785886 - DNA, 15 bp, Homo sapiens
tccttacctcacaga

SEQ ID NO: 785887 - DNA, 15 bp, Homo sapiens
ccttacctcacagac

SEQ ID NO: 785888 - DNA, 15 bp, Homo sapiens
cttacctcacagaca

SEQ ID NO: 785889 - DNA, 15 bp, Homo sapiens
ttacctcacagacaa

SEQ ID NO: 785890 - DNA, 15 bp, Homo sapiens
tacctcacagacaaa

SEQ ID NO: 785891 - DNA, 15 bp, Homo sapiens
acctcacagacaaaa

SEQ ID NO: 785892 - DNA, 15 bp, Homo sapiens
cctcacagacaaaaa

SEQ ID NO: 785893 - DNA, 15 bp, Homo sapiens
ctcacagacaaaaag

SEQ ID NO: 785894 - DNA, 15 bp, Homo sapiens
tcacagacaaaaaga

SEQ ID NO: 785895 - DNA, 15 bp, Homo sapiens
cacagacaaaaagaa

SEQ ID NO: 785896 - DNA, 15 bp, Homo sapiens
acagacaaaaagaac

SEQ ID NO: 785897 - DNA, 15 bp, Homo sapiens
cagacaaaaagaact

SEQ ID NO: 785898 - DNA, 15 bp, Homo sapiens
agacaaaaagaactt

SEQ ID NO: 785899 - DNA, 15 bp, Homo sapiens
gacaaaaagaactta

SEQ ID NO: 785900 - DNA, 15 bp, Homo sapiens
acaaaaagaacttag

SEQ ID NO: 785901 - DNA, 15 bp, Homo sapiens
caaaaagaacttagc

SEQ ID NO: 785902 - DNA, 15 bp, Homo sapiens
aaaaagaacttagca

SEQ ID NO: 785903 - DNA, 15 bp, Homo sapiens
aaaagaacttagcac

SEQ ID NO: 785904 - DNA, 15 bp, Homo sapiens
aaagaacttagcact

SEQ ID NO: 785905 - DNA, 15 bp, Homo sapiens
aagaacttagcactg

SEQ ID NO: 785906 - DNA, 15 bp, Homo sapiens
agaacttagcactgt

SEQ ID NO: 785907 - DNA, 15 bp, Homo sapiens
gaacttagcactgta

SEQ ID NO: 785908 - DNA, 15 bp, Homo sapiens
aacttagcactgtaa

SEQ ID NO: 785909 - DNA, 15 bp, Homo sapiens
acttagcactgtaat

SEQ ID NO: 785910 - DNA, 15 bp, Homo sapiens
cttagcactgtaatc

SEQ ID NO: 785911 - DNA, 15 bp, Homo sapiens
ttagcactgtaatct

SEQ ID NO: 785912 - DNA, 15 bp, Homo sapiens
tagcactgtaatcta

SEQ ID NO: 785913 - DNA, 15 bp, Homo sapiens
agcactgtaatctaa

SEQ ID NO: 785914 - DNA, 15 bp, Homo sapiens
gcactgtaatctaag

SEQ ID NO: 785915 - DNA, 15 bp, Homo sapiens
cactgtaatctaagt

SEQ ID NO: 785916 - DNA, 15 bp, Homo sapiens
actgtaatctaagtg

SEQ ID NO: 785917 - DNA, 15 bp, Homo sapiens
ctgtaatctaagtgt

SEQ ID NO: 785918 - DNA, 15 bp, Homo sapiens
tgtaatctaagtgtt

SEQ ID NO: 785919 - DNA, 15 bp, Homo sapiens
gtaatctaagtgttc

SEQ ID NO: 785920 - DNA, 15 bp, Homo sapiens
taatctaagtgttcc

SEQ ID NO: 785921 - DNA, 15 bp, Homo sapiens
aatctaagtgttccc

SEQ ID NO: 785922 - DNA, 15 bp, Homo sapiens
atctaagtgttccca

SEQ ID NO: 785923 - DNA, 15 bp, Homo sapiens
tctaagtgttcccac

SEQ ID NO: 785924 - DNA, 15 bp, Homo sapiens
ctaagtgttcccact

SEQ ID NO: 785925 - DNA, 15 bp, Homo sapiens
taagtgttcccactc

SEQ ID NO: 785926 - DNA, 15 bp, Homo sapiens
aagtgttcccactcc

SEQ ID NO: 785927 - DNA, 15 bp, Homo sapiens
agtgttcccactcct

SEQ ID NO: 785928 - DNA, 15 bp, Homo sapiens
gtgttcccactcctc

SEQ ID NO: 785929 - DNA, 15 bp, Homo sapiens
tgttcccactcctca

SEQ ID NO: 785930 - DNA, 15 bp, Homo sapiens
gttcccactcctcat

SEQ ID NO: 785931 - DNA, 15 bp, Homo sapiens
ttcccactcctcatt

SEQ ID NO: 785932 - DNA, 15 bp, Homo sapiens
tcccactcctcattt

SEQ ID NO: 785933 - DNA, 15 bp, Homo sapiens
cccactcctcatttg

SEQ ID NO: 785934 - DNA, 15 bp, Homo sapiens
ccactcctcatttga

SEQ ID NO: 785935 - DNA, 15 bp, Homo sapiens
cactcctcatttgaa

SEQ ID NO: 785936 - DNA, 15 bp, Homo sapiens
actcctcatttgaaa

SEQ ID NO: 785937 - DNA, 15 bp, Homo sapiens
ctcctcatttgaaaa

SEQ ID NO: 785938 - DNA, 15 bp, Homo sapiens
tcctcatttgaaaag

SEQ ID NO: 785939 - DNA, 15 bp, Homo sapiens
cctcatttgaaaagg

SEQ ID NO: 785940 - DNA, 15 bp, Homo sapiens
ctcatttgaaaaggg

SEQ ID NO: 785941 - DNA, 15 bp, Homo sapiens
tcatttgaaaaggga

SEQ ID NO: 785942 - DNA, 15 bp, Homo sapiens
catttgaaaagggaa

SEQ ID NO: 785943 - DNA, 15 bp, Homo sapiens
atttgaaaagggaag

SEQ ID NO: 785944 - DNA, 15 bp, Homo sapiens
tttgaaaagggaagc

SEQ ID NO: 785945 - DNA, 15 bp, Homo sapiens
ttgaaaagggaagca

SEQ ID NO: 785946 - DNA, 15 bp, Homo sapiens
tgaaaagggaagcat

SEQ ID NO: 785947 - DNA, 15 bp, Homo sapiens
gaaaagggaagcatt

SEQ ID NO: 785948 - DNA, 15 bp, Homo sapiens
aaaagggaagcattt

SEQ ID NO: 785949 - DNA, 15 bp, Homo sapiens
aaagggaagcatttc

SEQ ID NO: 785950 - DNA, 15 bp, Homo sapiens
aagggaagcatttca

SEQ ID NO: 785951 - DNA, 15 bp, Homo sapiens
agggaagcatttcat

SEQ ID NO: 785952 - DNA, 15 bp, Homo sapiens
gggaagcatttcatt

SEQ ID NO: 785953 - DNA, 15 bp, Homo sapiens
ggaagcatttcattt

SEQ ID NO: 785954 - DNA, 15 bp, Homo sapiens
gaagcatttcatttt

SEQ ID NO: 785955 - DNA, 15 bp, Homo sapiens
aagcatttcattttt

SEQ ID NO: 785956 - DNA, 15 bp, Homo sapiens
agcatttcattttta

SEQ ID NO: 785957 - DNA, 15 bp, Homo sapiens
gcatttcatttttat

SEQ ID NO: 785958 - DNA, 15 bp, Homo sapiens
catttcatttttatg

SEQ ID NO: 785959 - DNA, 15 bp, Homo sapiens
atttcatttttatgt

SEQ ID NO: 785960 - DNA, 15 bp, Homo sapiens
tttcatttttatgta

SEQ ID NO: 785961 - DNA, 15 bp, Homo sapiens
ttcatttttatgtat

SEQ ID NO: 785962 - DNA, 15 bp, Homo sapiens
tcatttttatgtatg

SEQ ID NO: 785963 - DNA, 15 bp, Homo sapiens
catttttatgtatgt

SEQ ID NO: 785964 - DNA, 15 bp, Homo sapiens
atttttatgtatgta

SEQ ID NO: 785965 - DNA, 15 bp, Homo sapiens
tttttatgtatgtat

SEQ ID NO: 785966 - DNA, 15 bp, Homo sapiens
ttttatgtatgtatg

SEQ ID NO: 785967 - DNA, 15 bp, Homo sapiens
tttatgtatgtatgt

SEQ ID NO: 785968 - DNA, 15 bp, Homo sapiens
ttatgtatgtatgta

SEQ ID NO: 785969 - DNA, 15 bp, Homo sapiens
tatgtatgtatgtat

SEQ ID NO: 785970 - DNA, 15 bp, Homo sapiens
atgtatgtatgtatg

SEQ ID NO: 785971 - DNA, 15 bp, Homo sapiens
tgtatgtatgtatgt

SEQ ID NO: 785972 - DNA, 15 bp, Homo sapiens
gtatgtatgtatgta

SEQ ID NO: 785973 - DNA, 15 bp, Homo sapiens
atgtatgtatgtatt

SEQ ID NO: 785974 - DNA, 15 bp, Homo sapiens
tgtatgtatgtattt

SEQ ID NO: 785975 - DNA, 15 bp, Homo sapiens
gtatgtatgtattta

SEQ ID NO: 785976 - DNA, 15 bp, Homo sapiens
tatgtatgtatttat

SEQ ID NO: 785977 - DNA, 15 bp, Homo sapiens
atgtatgtatttatt

SEQ ID NO: 785978 - DNA, 15 bp, Homo sapiens
tgtatgtatttattt

SEQ ID NO: 785979 - DNA, 15 bp, Homo sapiens
gtatgtatttattta

SEQ ID NO: 785980 - DNA, 15 bp, Homo sapiens
tatgtatttatttat

SEQ ID NO: 785981 - DNA, 15 bp, Homo sapiens
atgtatttatttatt

SEQ ID NO: 785982 - DNA, 15 bp, Homo sapiens
tgtatttatttattt

SEQ ID NO: 785983 - DNA, 15 bp, Homo sapiens
gtatttatttatttt

SEQ ID NO: 785984 - DNA, 15 bp, Homo sapiens
tatttattttgagag

SEQ ID NO: 785985 - DNA, 15 bp, Homo sapiens
atttattttgagagg

SEQ ID NO: 785986 - DNA, 15 bp, Homo sapiens
tttattttgagaggg

SEQ ID NO: 785987 - DNA, 15 bp, Homo sapiens
ttattttgagaggga

SEQ ID NO: 785988 - DNA, 15 bp, Homo sapiens
tattttgagagggaa

SEQ ID NO: 785989 - DNA, 15 bp, Homo sapiens
attttgagagggaat

SEQ ID NO: 785990 - DNA, 15 bp, Homo sapiens
ttttgagagggaatc

SEQ ID NO: 785991 - DNA, 15 bp, Homo sapiens
tttgagagggaatct

SEQ ID NO: 785992 - DNA, 15 bp, Homo sapiens
ttgagagggaatctt

SEQ ID NO: 785993 - DNA, 15 bp, Homo sapiens
tgagagggaatcttg

SEQ ID NO: 785994 - DNA, 15 bp, Homo sapiens
gagagggaatcttgc

SEQ ID NO: 785995 - DNA, 15 bp, Homo sapiens
agagggaatcttgct

SEQ ID NO: 785996 - DNA, 15 bp, Homo sapiens
gagggaatcttgctc

SEQ ID NO: 785997 - DNA, 15 bp, Homo sapiens
agggaatcttgctct

SEQ ID NO: 785998 - DNA, 15 bp, Homo sapiens
gggaatcttgctctg

SEQ ID NO: 785999 - DNA, 15 bp, Homo sapiens
ggaatcttgctctgt

SEQ ID NO: 786000 - DNA, 15 bp, Homo sapiens
gaatcttgctctgtc

SEQ ID NO: 786001 - DNA, 15 bp, Homo sapiens
aatcttgctctgtca

SEQ ID NO: 786002 - DNA, 15 bp, Homo sapiens
atcttgctctgtcac

SEQ ID NO: 786003 - DNA, 15 bp, Homo sapiens
cagtggcacgatctc

SEQ ID NO: 786004 - DNA, 15 bp, Homo sapiens
agtggcacgatctcg

SEQ ID NO: 786005 - DNA, 15 bp, Homo sapiens
gtggcacgatctcgg

SEQ ID NO: 786006 - DNA, 15 bp, Homo sapiens
tggcacgatctcggc

SEQ ID NO: 786007 - DNA, 15 bp, Homo sapiens
ggcacgatctcggct

SEQ ID NO: 786008 - DNA, 15 bp, Homo sapiens
gcacgatctcggctc

SEQ ID NO: 786009 - DNA, 15 bp, Homo sapiens
gatctcggctcacta

SEQ ID NO: 786010 - DNA, 15 bp, Homo sapiens
atctcggctcactac

SEQ ID NO: 786011 - DNA, 15 bp, Homo sapiens
tctcggctcactaca

SEQ ID NO: 786012 - DNA, 15 bp, Homo sapiens
ctcggctcactacaa

SEQ ID NO: 786013 - DNA, 15 bp, Homo sapiens
tcggctcactacaac

SEQ ID NO: 786014 - DNA, 15 bp, Homo sapiens
cggctcactacaacc

SEQ ID NO: 786015 - DNA, 15 bp, Homo sapiens
ggctcactacaacct

SEQ ID NO: 786016 - DNA, 15 bp, Homo sapiens
gctcactacaacctc

SEQ ID NO: 786017 - DNA, 15 bp, Homo sapiens
ctcactacaacctct

SEQ ID NO: 786018 - DNA, 15 bp, Homo sapiens
tcactacaacctctg

SEQ ID NO: 786019 - DNA, 15 bp, Homo sapiens
cactacaacctctgc

SEQ ID NO: 786020 - DNA, 15 bp, Homo sapiens
actacaacctctgcc

SEQ ID NO: 786021 - DNA, 15 bp, Homo sapiens
ctacaacctctgcct

SEQ ID NO: 786022 - DNA, 15 bp, Homo sapiens
tacaacctctgcctc

SEQ ID NO: 786023 - DNA, 15 bp, Homo sapiens
acaacctctgcctct

SEQ ID NO: 786024 - DNA, 15 bp, Homo sapiens
caacctctgcctctt

SEQ ID NO: 786025 - DNA, 15 bp, Homo sapiens
aacctctgcctcttg

SEQ ID NO: 786026 - DNA, 15 bp, Homo sapiens
acctctgcctcttgg

SEQ ID NO: 786027 - DNA, 15 bp, Homo sapiens
cctctgcctcttggg

SEQ ID NO: 786028 - DNA, 15 bp, Homo sapiens
ctctgcctcttgggt

SEQ ID NO: 786029 - DNA, 15 bp, Homo sapiens
tctgcctcttgggtt

SEQ ID NO: 786030 - DNA, 15 bp, Homo sapiens
ctgcctcttgggttc

SEQ ID NO: 786031 - DNA, 15 bp, Homo sapiens
tgcctcttgggttca

SEQ ID NO: 786032 - DNA, 15 bp, Homo sapiens
gcctcttgggttcaa

SEQ ID NO: 786033 - DNA, 15 bp, Homo sapiens
cctcttgggttcaag

SEQ ID NO: 786034 - DNA, 15 bp, Homo sapiens
ctcttgggttcaagt

SEQ ID NO: 786035 - DNA, 15 bp, Homo sapiens
tcttgggttcaagtg

SEQ ID NO: 786036 - DNA, 15 bp, Homo sapiens
cttgggttcaagtga

SEQ ID NO: 786037 - DNA, 15 bp, Homo sapiens
ttgggttcaagtgat

SEQ ID NO: 786038 - DNA, 15 bp, Homo sapiens
tcaagtgattctccc

SEQ ID NO: 786039 - DNA, 15 bp, Homo sapiens
caagtgattctccca

SEQ ID NO: 786040 - DNA, 15 bp, Homo sapiens
aagtgattctcccac

SEQ ID NO: 786041 - DNA, 15 bp, Homo sapiens
agtgattctcccacc

SEQ ID NO: 786042 - DNA, 15 bp, Homo sapiens
gtgattctcccacct

SEQ ID NO: 786043 - DNA, 15 bp, Homo sapiens
tgattctcccacctc

SEQ ID NO: 786044 - DNA, 15 bp, Homo sapiens
gattctcccacctca

SEQ ID NO: 786045 - DNA, 15 bp, Homo sapiens
attctcccacctcag

SEQ ID NO: 786046 - DNA, 15 bp, Homo sapiens
ttctcccacctcagc

SEQ ID NO: 786047 - DNA, 15 bp, Homo sapiens
gattacaggcatgcg

SEQ ID NO: 786048 - DNA, 15 bp, Homo sapiens
attacaggcatgcgc

SEQ ID NO: 786049 - DNA, 15 bp, Homo sapiens
caggcatgcgccacg

SEQ ID NO: 786050 - DNA, 15 bp, Homo sapiens
aggcatgcgccacga

SEQ ID NO: 786051 - DNA, 15 bp, Homo sapiens
ggcatgcgccacgac

SEQ ID NO: 786052 - DNA, 15 bp, Homo sapiens
gcatgcgccacgact

SEQ ID NO: 786053 - DNA, 15 bp, Homo sapiens
catgcgccacgactc

SEQ ID NO: 786054 - DNA, 15 bp, Homo sapiens
atgcgccacgactcc

SEQ ID NO: 786055 - DNA, 15 bp, Homo sapiens
tgcgccacgactcct

SEQ ID NO: 786056 - DNA, 15 bp, Homo sapiens
gcgccacgactcctg

SEQ ID NO: 786057 - DNA, 15 bp, Homo sapiens
cgccacgactcctgg

SEQ ID NO: 786058 - DNA, 15 bp, Homo sapiens
gccacgactcctggc

SEQ ID NO: 786059 - DNA, 15 bp, Homo sapiens
ccacgactcctggct

SEQ ID NO: 786060 - DNA, 15 bp, Homo sapiens
cacgactcctggcta

SEQ ID NO: 786061 - DNA, 15 bp, Homo sapiens
acgactcctggctaa

SEQ ID NO: 786062 - DNA, 15 bp, Homo sapiens
cgactcctggctaat

SEQ ID NO: 786063 - DNA, 15 bp, Homo sapiens
gactcctggctaatt

SEQ ID NO: 786064 - DNA, 15 bp, Homo sapiens
actcctggctaattt

SEQ ID NO: 786065 - DNA, 15 bp, Homo sapiens
ctcctggctaatttt

SEQ ID NO: 786066 - DNA, 15 bp, Homo sapiens
tcctggctaattttt

SEQ ID NO: 786067 - DNA, 15 bp, Homo sapiens
gtttcaccatgttga

SEQ ID NO: 786068 - DNA, 15 bp, Homo sapiens
tttcaccatgttgac

SEQ ID NO: 786069 - DNA, 15 bp, Homo sapiens
ttcaccatgttgacc

SEQ ID NO: 786070 - DNA, 15 bp, Homo sapiens
tcaccatgttgacca

SEQ ID NO: 786071 - DNA, 15 bp, Homo sapiens
caccatgttgaccaa

SEQ ID NO: 786072 - DNA, 15 bp, Homo sapiens
accatgttgaccaag

SEQ ID NO: 786073 - DNA, 15 bp, Homo sapiens
ccatgttgaccaagc

SEQ ID NO: 786074 - DNA, 15 bp, Homo sapiens
catgttgaccaagct

SEQ ID NO: 786075 - DNA, 15 bp, Homo sapiens
atgttgaccaagctg

SEQ ID NO: 786076 - DNA, 15 bp, Homo sapiens
tgttgaccaagctgg

SEQ ID NO: 786077 - DNA, 15 bp, Homo sapiens
gttgaccaagctggt

SEQ ID NO: 786078 - DNA, 15 bp, Homo sapiens
ttgaccaagctggtc

SEQ ID NO: 786079 - DNA, 15 bp, Homo sapiens
tgaccaagctggtct

SEQ ID NO: 786080 - DNA, 15 bp, Homo sapiens
gaccaagctggtctt

SEQ ID NO: 786081 - DNA, 15 bp, Homo sapiens
accaagctggtcttg

SEQ ID NO: 786082 - DNA, 15 bp, Homo sapiens
ccaagctggtcttga

SEQ ID NO: 786083 - DNA, 15 bp, Homo sapiens
caagctggtcttgaa

SEQ ID NO: 786084 - DNA, 15 bp, Homo sapiens
aagctggtcttgaat

SEQ ID NO: 786085 - DNA, 15 bp, Homo sapiens
agctggtcttgaata

SEQ ID NO: 786086 - DNA, 15 bp, Homo sapiens
gctggtcttgaatac

SEQ ID NO: 786087 - DNA, 15 bp, Homo sapiens
ctggtcttgaatacc

SEQ ID NO: 786088 - DNA, 15 bp, Homo sapiens
tggtcttgaatacct

SEQ ID NO: 786089 - DNA, 15 bp, Homo sapiens
ggtcttgaatacctg

SEQ ID NO: 786090 - DNA, 15 bp, Homo sapiens
gtcttgaatacctga

SEQ ID NO: 786091 - DNA, 15 bp, Homo sapiens
tcttgaatacctgac

SEQ ID NO: 786092 - DNA, 15 bp, Homo sapiens
cttgaatacctgacc

SEQ ID NO: 786093 - DNA, 15 bp, Homo sapiens
ttgaatacctgacct

SEQ ID NO: 786094 - DNA, 15 bp, Homo sapiens
tgaatacctgacctc

SEQ ID NO: 786095 - DNA, 15 bp, Homo sapiens
gaatacctgacctca

SEQ ID NO: 786096 - DNA, 15 bp, Homo sapiens
aatacctgacctcag

SEQ ID NO: 786097 - DNA, 15 bp, Homo sapiens
atacctgacctcagg

SEQ ID NO: 786098 - DNA, 15 bp, Homo sapiens
tacctgacctcaggt

SEQ ID NO: 786099 - DNA, 15 bp, Homo sapiens
acctgacctcaggtg

SEQ ID NO: 786100 - DNA, 15 bp, Homo sapiens
caggtgatccaccca

SEQ ID NO: 786101 - DNA, 15 bp, Homo sapiens
aggtgatccacccac

SEQ ID NO: 786102 - DNA, 15 bp, Homo sapiens
ggtgatccacccacc

SEQ ID NO: 786103 - DNA, 15 bp, Homo sapiens
gtgatccacccacct

SEQ ID NO: 786104 - DNA, 15 bp, Homo sapiens
tgatccacccacctt

SEQ ID NO: 786105 - DNA, 15 bp, Homo sapiens
gatccacccaccttg

SEQ ID NO: 786106 - DNA, 15 bp, Homo sapiens
atccacccaccttgg

SEQ ID NO: 786107 - DNA, 15 bp, Homo sapiens
tccacccaccttggc

SEQ ID NO: 786108 - DNA, 15 bp, Homo sapiens
ccacccaccttggcc

SEQ ID NO: 786109 - DNA, 15 bp, Homo sapiens
cacccaccttggcct

SEQ ID NO: 786110 - DNA, 15 bp, Homo sapiens
acccaccttggcctc

SEQ ID NO: 786111 - DNA, 15 bp, Homo sapiens
caggcatgagccact

SEQ ID NO: 786112 - DNA, 15 bp, Homo sapiens
aggcatgagccactg

SEQ ID NO: 786113 - DNA, 15 bp, Homo sapiens
ggcatgagccactgt

SEQ ID NO: 786114 - DNA, 15 bp, Homo sapiens
gcatgagccactgtg

SEQ ID NO: 786115 - DNA, 15 bp, Homo sapiens
catgagccactgtgc

SEQ ID NO: 786116 - DNA, 15 bp, Homo sapiens
atgagccactgtgcc

SEQ ID NO: 786117 - DNA, 15 bp, Homo sapiens
gagccactgtgcccg

SEQ ID NO: 786118 - DNA, 15 bp, Homo sapiens
ctgtgcccggcctca

SEQ ID NO: 786119 - DNA, 15 bp, Homo sapiens
tgtgcccggcctcat

SEQ ID NO: 786120 - DNA, 15 bp, Homo sapiens
gtgcccggcctcatt

SEQ ID NO: 786121 - DNA, 15 bp, Homo sapiens
tgcccggcctcattt

SEQ ID NO: 786122 - DNA, 15 bp, Homo sapiens
gcccggcctcatttt

SEQ ID NO: 786123 - DNA, 15 bp, Homo sapiens
cccggcctcattttt

SEQ ID NO: 786124 - DNA, 15 bp, Homo sapiens
ccggcctcatttttt

SEQ ID NO: 786125 - DNA, 15 bp, Homo sapiens
cggcctcattttttt

SEQ ID NO: 786126 - DNA, 15 bp, Homo sapiens
ggcctcatttttttt

SEQ ID NO: 786127 - DNA, 15 bp, Homo sapiens
gcctcattttttttt

SEQ ID NO: 786128 - DNA, 15 bp, Homo sapiens
cctcatttttttttt

SEQ ID NO: 786129 - DNA, 15 bp, Homo sapiens
ctcattttttttttt

SEQ ID NO: 786130 - DNA, 15 bp, Homo sapiens
tcatttttttttttt

SEQ ID NO: 786131 - DNA, 15 bp, Homo sapiens
catttttttttttta

SEQ ID NO: 786132 - DNA, 15 bp, Homo sapiens
ttttttttttaatga

SEQ ID NO: 786133 - DNA, 15 bp, Homo sapiens
tttttttttaatgaa

SEQ ID NO: 786134 - DNA, 15 bp, Homo sapiens
ttttttttaatgaat

SEQ ID NO: 786135 - DNA, 15 bp, Homo sapiens
tttttttaatgaatt

SEQ ID NO: 786136 - DNA, 15 bp, Homo sapiens
ttttttaatgaatta

SEQ ID NO: 786137 - DNA, 15 bp, Homo sapiens
tttttaatgaattaa

SEQ ID NO: 786138 - DNA, 15 bp, Homo sapiens
ttttaatgaattaaa

SEQ ID NO: 786139 - DNA, 15 bp, Homo sapiens
tttaatgaattaaaa

SEQ ID NO: 786140 - DNA, 15 bp, Homo sapiens
ttaatgaattaaaaa

SEQ ID NO: 786141 - DNA, 15 bp, Homo sapiens
taatgaattaaaaaa

SEQ ID NO: 786142 - DNA, 15 bp, Homo sapiens
aatgaattaaaaaaa

SEQ ID NO: 786143 - DNA, 15 bp, Homo sapiens
atgaattaaaaaaaa

SEQ ID NO: 786144 - DNA, 15 bp, Homo sapiens
tgaattaaaaaaaaa

SEQ ID NO: 786145 - DNA, 15 bp, Homo sapiens
gaattaaaaaaaaaa

SEQ ID NO: 786146 - DNA, 15 bp, Homo sapiens
aattaaaaaaaaaaa

SEQ ID NO: 786147 - DNA, 15 bp, Homo sapiens
attaaaaaaaaaaaa

SEQ ID NO: 786148 - DNA, 15 bp, Homo sapiens
taaaaaaaaaaaaac

SEQ ID NO: 786149 - DNA, 15 bp, Homo sapiens
aaaaaaaaaaaaact

SEQ ID NO: 786150 - DNA, 15 bp, Homo sapiens
aaaaaaaaaaaactt

SEQ ID NO: 786151 - DNA, 15 bp, Homo sapiens
aaaaaaaaaaactta

SEQ ID NO: 786152 - DNA, 15 bp, Homo sapiens
aaaaaaaaaacttat

SEQ ID NO: 786153 - DNA, 15 bp, Homo sapiens
aaaaaaaaacttatg

SEQ ID NO: 786154 - DNA, 15 bp, Homo sapiens
aaaaaaaacttatgt

SEQ ID NO: 786155 - DNA, 15 bp, Homo sapiens
aaaaaaacttatgtg

SEQ ID NO: 786156 - DNA, 15 bp, Homo sapiens
aaaaaacttatgtgg

SEQ ID NO: 786157 - DNA, 15 bp, Homo sapiens
aaaaacttatgtggc

SEQ ID NO: 786158 - DNA, 15 bp, Homo sapiens
aaaacttatgtggca

SEQ ID NO: 786159 - DNA, 15 bp, Homo sapiens
aaacttatgtggcag

SEQ ID NO: 786160 - DNA, 15 bp, Homo sapiens
aacttatgtggcagt

SEQ ID NO: 786161 - DNA, 15 bp, Homo sapiens
acttatgtggcagtt

SEQ ID NO: 786162 - DNA, 15 bp, Homo sapiens
cttatgtggcagttg

SEQ ID NO: 786163 - DNA, 15 bp, Homo sapiens
ttatgtggcagttga

SEQ ID NO: 786164 - DNA, 15 bp, Homo sapiens
tatgtggcagttgat

SEQ ID NO: 786165 - DNA, 15 bp, Homo sapiens
atgtggcagttgata

SEQ ID NO: 786166 - DNA, 15 bp, Homo sapiens
tgtggcagttgataa

SEQ ID NO: 786167 - DNA, 15 bp, Homo sapiens
gtggcagttgataaa

SEQ ID NO: 786168 - DNA, 15 bp, Homo sapiens
tggcagttgataaaa

SEQ ID NO: 786169 - DNA, 15 bp, Homo sapiens
ggcagttgataaaat

SEQ ID NO: 786170 - DNA, 15 bp, Homo sapiens
gcagttgataaaata

SEQ ID NO: 786171 - DNA, 15 bp, Homo sapiens
cagttgataaaataa

SEQ ID NO: 786172 - DNA, 15 bp, Homo sapiens
agttgataaaataat

SEQ ID NO: 786173 - DNA, 15 bp, Homo sapiens
gttgataaaataatt

SEQ ID NO: 786174 - DNA, 15 bp, Homo sapiens
ttgataaaataatta

SEQ ID NO: 786175 - DNA, 15 bp, Homo sapiens
tgataaaataattat

SEQ ID NO: 786176 - DNA, 15 bp, Homo sapiens
gataaaataattatt

SEQ ID NO: 786177 - DNA, 15 bp, Homo sapiens
ataaaataattattt

SEQ ID NO: 786178 - DNA, 15 bp, Homo sapiens
taaaataattatttt

SEQ ID NO: 786179 - DNA, 15 bp, Homo sapiens
aaaataattattttg

SEQ ID NO: 786180 - DNA, 15 bp, Homo sapiens
aaataattattttga

SEQ ID NO: 786181 - DNA, 15 bp, Homo sapiens
aataattattttgaa

SEQ ID NO: 786182 - DNA, 15 bp, Homo sapiens
ataattattttgaaa

SEQ ID NO: 786183 - DNA, 15 bp, Homo sapiens
taattattttgaaat

SEQ ID NO: 786184 - DNA, 15 bp, Homo sapiens
aattattttgaaatt

SEQ ID NO: 786185 - DNA, 15 bp, Homo sapiens
attattttgaaatta

SEQ ID NO: 786186 - DNA, 15 bp, Homo sapiens
ttattttgaaattag

SEQ ID NO: 786187 - DNA, 15 bp, Homo sapiens
tattttgaaattagc

SEQ ID NO: 786188 - DNA, 15 bp, Homo sapiens
attttgaaattagcc

SEQ ID NO: 786189 - DNA, 15 bp, Homo sapiens
ttttgaaattagcca

SEQ ID NO: 786190 - DNA, 15 bp, Homo sapiens
tttgaaattagccac

SEQ ID NO: 786191 - DNA, 15 bp, Homo sapiens
ttgaaattagccact

SEQ ID NO: 786192 - DNA, 15 bp, Homo sapiens
tgaaattagccactt

SEQ ID NO: 786193 - DNA, 15 bp, Homo sapiens
gaaattagccactta

SEQ ID NO: 786194 - DNA, 15 bp, Homo sapiens
aaattagccacttat

SEQ ID NO: 786195 - DNA, 15 bp, Homo sapiens
aattagccacttatc

SEQ ID NO: 786196 - DNA, 15 bp, Homo sapiens
attagccacttatct

SEQ ID NO: 786197 - DNA, 15 bp, Homo sapiens
ttagccacttatctt

SEQ ID NO: 786198 - DNA, 15 bp, Homo sapiens
tagccacttatcttc

SEQ ID NO: 786199 - DNA, 15 bp, Homo sapiens
agccacttatcttct

SEQ ID NO: 786200 - DNA, 15 bp, Homo sapiens
gccacttatcttcta

SEQ ID NO: 786201 - DNA, 15 bp, Homo sapiens
ccacttatcttctag

SEQ ID NO: 786202 - DNA, 15 bp, Homo sapiens
cacttatcttctaga

SEQ ID NO: 786203 - DNA, 15 bp, Homo sapiens
acttatcttctagaa

SEQ ID NO: 786204 - DNA, 15 bp, Homo sapiens
cttatcttctagaaa

SEQ ID NO: 786205 - DNA, 15 bp, Homo sapiens
ttatcttctagaaaa

SEQ ID NO: 786206 - DNA, 15 bp, Homo sapiens
tatcttctagaaaaa

SEQ ID NO: 786207 - DNA, 15 bp, Homo sapiens
atcttctagaaaaaa

SEQ ID NO: 786208 - DNA, 15 bp, Homo sapiens
tcttctagaaaaaaa

SEQ ID NO: 786209 - DNA, 15 bp, Homo sapiens
cttctagaaaaaaaa

SEQ ID NO: 786210 - DNA, 15 bp, Homo sapiens
ttctagaaaaaaaaa

SEQ ID NO: 786211 - DNA, 15 bp, Homo sapiens
tctagaaaaaaaaat

SEQ ID NO: 786212 - DNA, 15 bp, Homo sapiens
ctagaaaaaaaaatg

SEQ ID NO: 786213 - DNA, 15 bp, Homo sapiens
tagaaaaaaaaatgt

SEQ ID NO: 786214 - DNA, 15 bp, Homo sapiens
agaaaaaaaaatgtt

SEQ ID NO: 786215 - DNA, 15 bp, Homo sapiens
gaaaaaaaaatgttt

SEQ ID NO: 786216 - DNA, 15 bp, Homo sapiens
aaaaaaaaatgtttg

SEQ ID NO: 786217 - DNA, 15 bp, Homo sapiens
aaaaaaaatgtttgt

SEQ ID NO: 786218 - DNA, 15 bp, Homo sapiens
aaaaaaatgtttgtt

SEQ ID NO: 786219 - DNA, 15 bp, Homo sapiens
aaaaaatgtttgttg

SEQ ID NO: 786220 - DNA, 15 bp, Homo sapiens
aaaaatgtttgttgc

SEQ ID NO: 786221 - DNA, 15 bp, Homo sapiens
aaaatgtttgttgct

SEQ ID NO: 786222 - DNA, 15 bp, Homo sapiens
aaatgtttgttgctc

SEQ ID NO: 786223 - DNA, 15 bp, Homo sapiens
aatgtttgttgctct

SEQ ID NO: 786224 - DNA, 15 bp, Homo sapiens
atgtttgttgctctt

SEQ ID NO: 786225 - DNA, 15 bp, Homo sapiens
tgtttgttgctcttc

SEQ ID NO: 786226 - DNA, 15 bp, Homo sapiens
gtttgttgctcttct

SEQ ID NO: 786227 - DNA, 15 bp, Homo sapiens
tttgttgctcttctg

SEQ ID NO: 786228 - DNA, 15 bp, Homo sapiens
ttgttgctcttctga

SEQ ID NO: 786229 - DNA, 15 bp, Homo sapiens
tgttgctcttctgat

SEQ ID NO: 786230 - DNA, 15 bp, Homo sapiens
gttgctcttctgata

SEQ ID NO: 786231 - DNA, 15 bp, Homo sapiens
ttgctcttctgatat

SEQ ID NO: 786232 - DNA, 15 bp, Homo sapiens
tgctcttctgatatt

SEQ ID NO: 786233 - DNA, 15 bp, Homo sapiens
gctcttctgatattg

SEQ ID NO: 786234 - DNA, 15 bp, Homo sapiens
ctcttctgatattgg

SEQ ID NO: 786235 - DNA, 15 bp, Homo sapiens
tcttctgatattggt

SEQ ID NO: 786236 - DNA, 15 bp, Homo sapiens
cttctgatattggta

SEQ ID NO: 786237 - DNA, 15 bp, Homo sapiens
ttctgatattggtag

SEQ ID NO: 786238 - DNA, 15 bp, Homo sapiens
tctgatattggtagg

SEQ ID NO: 786239 - DNA, 15 bp, Homo sapiens
ctgatattggtagga

SEQ ID NO: 786240 - DNA, 15 bp, Homo sapiens
tgatattggtaggag

SEQ ID NO: 786241 - DNA, 15 bp, Homo sapiens
gatattggtaggagt

SEQ ID NO: 786242 - DNA, 15 bp, Homo sapiens
atattggtaggagtt

SEQ ID NO: 786243 - DNA, 15 bp, Homo sapiens
tattggtaggagttt

SEQ ID NO: 786244 - DNA, 15 bp, Homo sapiens
attggtaggagtttc

SEQ ID NO: 786245 - DNA, 15 bp, Homo sapiens
ttggtaggagtttct

SEQ ID NO: 786246 - DNA, 15 bp, Homo sapiens
tggtaggagtttctt

SEQ ID NO: 786247 - DNA, 15 bp, Homo sapiens
ggtaggagtttcttc

SEQ ID NO: 786248 - DNA, 15 bp, Homo sapiens
gtaggagtttcttcc

SEQ ID NO: 786249 - DNA, 15 bp, Homo sapiens
taggagtttcttcct

SEQ ID NO: 786250 - DNA, 15 bp, Homo sapiens
aggagtttcttcctc

SEQ ID NO: 786251 - DNA, 15 bp, Homo sapiens
ggagtttcttcctct

SEQ ID NO: 786252 - DNA, 15 bp, Homo sapiens
gagtttcttcctctt

SEQ ID NO: 786253 - DNA, 15 bp, Homo sapiens
agtttcttcctcttc

SEQ ID NO: 786254 - DNA, 15 bp, Homo sapiens
gtttcttcctcttcc

SEQ ID NO: 786255 - DNA, 15 bp, Homo sapiens
tttcttcctcttcca

SEQ ID NO: 786256 - DNA, 15 bp, Homo sapiens
ttcttcctcttccaa

SEQ ID NO: 786257 - DNA, 15 bp, Homo sapiens
tcttcctcttccaag

SEQ ID NO: 786258 - DNA, 15 bp, Homo sapiens
cttcctcttccaagg

SEQ ID NO: 786259 - DNA, 15 bp, Homo sapiens
ttcctcttccaaggt

SEQ ID NO: 786260 - DNA, 15 bp, Homo sapiens
tcctcttccaaggtg

SEQ ID NO: 786261 - DNA, 15 bp, Homo sapiens
cctcttccaaggtga

SEQ ID NO: 786262 - DNA, 15 bp, Homo sapiens
ctcttccaaggtgac

SEQ ID NO: 786263 - DNA, 15 bp, Homo sapiens
tcttccaaggtgact

SEQ ID NO: 786264 - DNA, 15 bp, Homo sapiens
cttccaaggtgactt

SEQ ID NO: 786265 - DNA, 15 bp, Homo sapiens
ttccaaggtgacttt

SEQ ID NO: 786266 - DNA, 15 bp, Homo sapiens
tccaaggtgactttt

SEQ ID NO: 786267 - DNA, 15 bp, Homo sapiens
ccaaggtgacttttt

SEQ ID NO: 786268 - DNA, 15 bp, Homo sapiens
caaggtgactttttg

SEQ ID NO: 786269 - DNA, 15 bp, Homo sapiens
aaggtgactttttgg

SEQ ID NO: 786270 - DNA, 15 bp, Homo sapiens
aggtgactttttgga

SEQ ID NO: 786271 - DNA, 15 bp, Homo sapiens
ggtgactttttggat

SEQ ID NO: 786272 - DNA, 15 bp, Homo sapiens
gtgactttttggata

SEQ ID NO: 786273 - DNA, 15 bp, Homo sapiens
tgactttttggataa

SEQ ID NO: 786274 - DNA, 15 bp, Homo sapiens
gactttttggataac

SEQ ID NO: 786275 - DNA, 15 bp, Homo sapiens
actttttggataaca

SEQ ID NO: 786276 - DNA, 15 bp, Homo sapiens
ctttttggataacac

SEQ ID NO: 786277 - DNA, 15 bp, Homo sapiens
tttttggataacacc

SEQ ID NO: 786278 - DNA, 15 bp, Homo sapiens
ttttggataacaccc

SEQ ID NO: 786279 - DNA, 15 bp, Homo sapiens
tttggataacaccct

SEQ ID NO: 786280 - DNA, 15 bp, Homo sapiens
ttggataacaccctg

SEQ ID NO: 786281 - DNA, 15 bp, Homo sapiens
tggataacaccctga

SEQ ID NO: 786282 - DNA, 15 bp, Homo sapiens
ggataacaccctgag

SEQ ID NO: 786283 - DNA, 15 bp, Homo sapiens
gataacaccctgagg

SEQ ID NO: 786284 - DNA, 15 bp, Homo sapiens
ataacaccctgaggg

SEQ ID NO: 786285 - DNA, 15 bp, Homo sapiens
taacaccctgagggg

SEQ ID NO: 786286 - DNA, 15 bp, Homo sapiens
aacaccctgagggga

SEQ ID NO: 786287 - DNA, 15 bp, Homo sapiens
acaccctgaggggac

SEQ ID NO: 786288 - DNA, 15 bp, Homo sapiens
caccctgaggggact

SEQ ID NO: 786289 - DNA, 15 bp, Homo sapiens
accctgaggggacta

SEQ ID NO: 786290 - DNA, 15 bp, Homo sapiens
ccctgaggggactac

SEQ ID NO: 786291 - DNA, 15 bp, Homo sapiens
cctgaggggactacc

SEQ ID NO: 786292 - DNA, 15 bp, Homo sapiens
ctgaggggactaccc

SEQ ID NO: 786293 - DNA, 15 bp, Homo sapiens
tgaggggactaccct

SEQ ID NO: 786294 - DNA, 15 bp, Homo sapiens
gaggggactaccctt

SEQ ID NO: 786295 - DNA, 15 bp, Homo sapiens
aggggactacccttc

SEQ ID NO: 786296 - DNA, 15 bp, Homo sapiens
ggggactacccttca

SEQ ID NO: 786297 - DNA, 15 bp, Homo sapiens
gggactacccttcat

SEQ ID NO: 786298 - DNA, 15 bp, Homo sapiens
ggactacccttcatc

SEQ ID NO: 786299 - DNA, 15 bp, Homo sapiens
gactacccttcatcc

SEQ ID NO: 786300 - DNA, 15 bp, Homo sapiens
actacccttcatcct

SEQ ID NO: 786301 - DNA, 15 bp, Homo sapiens
ctacccttcatcctt

SEQ ID NO: 786302 - DNA, 15 bp, Homo sapiens
tacccttcatccttt

SEQ ID NO: 786303 - DNA, 15 bp, Homo sapiens
acccttcatccttta

SEQ ID NO: 786304 - DNA, 15 bp, Homo sapiens
cccttcatcctttat

SEQ ID NO: 786305 - DNA, 15 bp, Homo sapiens
ccttcatcctttatc

SEQ ID NO: 786306 - DNA, 15 bp, Homo sapiens
cttcatcctttatct

SEQ ID NO: 786307 - DNA, 15 bp, Homo sapiens
ttcatcctttatctc

SEQ ID NO: 786308 - DNA, 15 bp, Homo sapiens
tcatcctttatctcc

SEQ ID NO: 786309 - DNA, 15 bp, Homo sapiens
catcctttatctcca

SEQ ID NO: 786310 - DNA, 15 bp, Homo sapiens
atcctttatctccat

SEQ ID NO: 786311 - DNA, 15 bp, Homo sapiens
tcctttatctccatc

SEQ ID NO: 786312 - DNA, 15 bp, Homo sapiens
cctttatctccatcg

SEQ ID NO: 786313 - DNA, 15 bp, Homo sapiens
ctttatctccatcgc

SEQ ID NO: 786314 - DNA, 15 bp, Homo sapiens
tttatctccatcgca

SEQ ID NO: 786315 - DNA, 15 bp, Homo sapiens
ttatctccatcgcag

SEQ ID NO: 786316 - DNA, 15 bp, Homo sapiens
tatctccatcgcagc

SEQ ID NO: 786317 - DNA, 15 bp, Homo sapiens
atctccatcgcagcc

SEQ ID NO: 786318 - DNA, 15 bp, Homo sapiens
tctccatcgcagcca

SEQ ID NO: 786319 - DNA, 15 bp, Homo sapiens
ctccatcgcagccat

SEQ ID NO: 786320 - DNA, 15 bp, Homo sapiens
tccatcgcagccatt

SEQ ID NO: 786321 - DNA, 15 bp, Homo sapiens
ccatcgcagccattc

SEQ ID NO: 786322 - DNA, 15 bp, Homo sapiens
catcgcagccattcc

SEQ ID NO: 786323 - DNA, 15 bp, Homo sapiens
atcgcagccattcca

SEQ ID NO: 786324 - DNA, 15 bp, Homo sapiens
tcgcagccattccag

SEQ ID NO: 786325 - DNA, 15 bp, Homo sapiens
cgcagccattccagg

SEQ ID NO: 786326 - DNA, 15 bp, Homo sapiens
gcagccattccaggc

SEQ ID NO: 786327 - DNA, 15 bp, Homo sapiens
cagccattccaggcc

SEQ ID NO: 786328 - DNA, 15 bp, Homo sapiens
agccattccaggcct

SEQ ID NO: 786329 - DNA, 15 bp, Homo sapiens
gccattccaggcctt

SEQ ID NO: 786330 - DNA, 15 bp, Homo sapiens
ccattccaggccttc

SEQ ID NO: 786331 - DNA, 15 bp, Homo sapiens
cattccaggccttct

SEQ ID NO: 786332 - DNA, 15 bp, Homo sapiens
attccaggccttctg

SEQ ID NO: 786333 - DNA, 15 bp, Homo sapiens
ttccaggccttctgt

SEQ ID NO: 786334 - DNA, 15 bp, Homo sapiens
tccaggccttctgtg

SEQ ID NO: 786335 - DNA, 15 bp, Homo sapiens
ccaggccttctgtga

SEQ ID NO: 786336 - DNA, 15 bp, Homo sapiens
caggccttctgtgac

SEQ ID NO: 786337 - DNA, 15 bp, Homo sapiens
aggccttctgtgact

SEQ ID NO: 786338 - DNA, 15 bp, Homo sapiens
ggccttctgtgactc

SEQ ID NO: 786339 - DNA, 15 bp, Homo sapiens
gccttctgtgactcc

SEQ ID NO: 786340 - DNA, 15 bp, Homo sapiens
ccttctgtgactcct

SEQ ID NO: 786341 - DNA, 15 bp, Homo sapiens
cttctgtgactcctg

SEQ ID NO: 786342 - DNA, 15 bp, Homo sapiens
ttctgtgactcctgg

SEQ ID NO: 786343 - DNA, 15 bp, Homo sapiens
tctgtgactcctggg

SEQ ID NO: 786344 - DNA, 15 bp, Homo sapiens
ctgtgactcctggga

SEQ ID NO: 786345 - DNA, 15 bp, Homo sapiens
tgtgactcctgggat

SEQ ID NO: 786346 - DNA, 15 bp, Homo sapiens
gtgactcctgggata

SEQ ID NO: 786347 - DNA, 15 bp, Homo sapiens
tgactcctgggataa

SEQ ID NO: 786348 - DNA, 15 bp, Homo sapiens
gactcctgggataaa

SEQ ID NO: 786349 - DNA, 15 bp, Homo sapiens
actcctgggataaaa

SEQ ID NO: 786350 - DNA, 15 bp, Homo sapiens
ctcctgggataaaat

SEQ ID NO: 786351 - DNA, 15 bp, Homo sapiens
tcctgggataaaata

SEQ ID NO: 786352 - DNA, 15 bp, Homo sapiens
cctgggataaaataa

SEQ ID NO: 786353 - DNA, 15 bp, Homo sapiens
ctgggataaaataaa

SEQ ID NO: 786354 - DNA, 15 bp, Homo sapiens
tgggataaaataaac

SEQ ID NO: 786355 - DNA, 15 bp, Homo sapiens
gggataaaataaaca

SEQ ID NO: 786356 - DNA, 15 bp, Homo sapiens
ggataaaataaacat

SEQ ID NO: 786357 - DNA, 15 bp, Homo sapiens
gataaaataaacatt

SEQ ID NO: 786358 - DNA, 15 bp, Homo sapiens
ataaaataaacatta

SEQ ID NO: 786359 - DNA, 15 bp, Homo sapiens
taaaataaacattag

SEQ ID NO: 786360 - DNA, 15 bp, Homo sapiens
aaaataaacattagt

SEQ ID NO: 786361 - DNA, 15 bp, Homo sapiens
aaataaacattagtg

SEQ ID NO: 786362 - DNA, 15 bp, Homo sapiens
aataaacattagtgg

SEQ ID NO: 786363 - DNA, 15 bp, Homo sapiens
ataaacattagtggg

SEQ ID NO: 786364 - DNA, 15 bp, Homo sapiens
taaacattagtgggc

SEQ ID NO: 786365 - DNA, 15 bp, Homo sapiens
aaacattagtgggca

SEQ ID NO: 786366 - DNA, 15 bp, Homo sapiens
aacattagtgggcac

SEQ ID NO: 786367 - DNA, 15 bp, Homo sapiens
acattagtgggcact

SEQ ID NO: 786368 - DNA, 15 bp, Homo sapiens
cattagtgggcactg

SEQ ID NO: 786369 - DNA, 15 bp, Homo sapiens
attagtgggcactgt

SEQ ID NO: 786370 - DNA, 15 bp, Homo sapiens
ttagtgggcactgtt

SEQ ID NO: 786371 - DNA, 15 bp, Homo sapiens
tagtgggcactgttc

SEQ ID NO: 786372 - DNA, 15 bp, Homo sapiens
agtgggcactgttcc

SEQ ID NO: 786373 - DNA, 15 bp, Homo sapiens
gtgggcactgttcca

SEQ ID NO: 786374 - DNA, 15 bp, Homo sapiens
tgggcactgttccat

SEQ ID NO: 786375 - DNA, 15 bp, Homo sapiens
gggcactgttccatt

SEQ ID NO: 786376 - DNA, 15 bp, Homo sapiens
ggcactgttccatta

SEQ ID NO: 786377 - DNA, 15 bp, Homo sapiens
gcactgttccattac

SEQ ID NO: 786378 - DNA, 15 bp, Homo sapiens
cactgttccattaca

SEQ ID NO: 786379 - DNA, 15 bp, Homo sapiens
actgttccattacag

SEQ ID NO: 786380 - DNA, 15 bp, Homo sapiens
ctgttccattacagg

SEQ ID NO: 786381 - DNA, 15 bp, Homo sapiens
tgttccattacaggg

SEQ ID NO: 786382 - DNA, 15 bp, Homo sapiens
gttccattacagggt

SEQ ID NO: 786383 - DNA, 15 bp, Homo sapiens
ttccattacagggtt

SEQ ID NO: 786384 - DNA, 15 bp, Homo sapiens
tccattacagggttc

SEQ ID NO: 786385 - DNA, 15 bp, Homo sapiens
ccattacagggttcc

SEQ ID NO: 786386 - DNA, 15 bp, Homo sapiens
cattacagggttccc

SEQ ID NO: 786387 - DNA, 15 bp, Homo sapiens
attacagggttccct

SEQ ID NO: 786388 - DNA, 15 bp, Homo sapiens
ttacagggttccctt

SEQ ID NO: 786389 - DNA, 15 bp, Homo sapiens
tacagggttcccttt

SEQ ID NO: 786390 - DNA, 15 bp, Homo sapiens
acagggttccctttt

SEQ ID NO: 786391 - DNA, 15 bp, Homo sapiens
cagggttcccttttg

SEQ ID NO: 786392 - DNA, 15 bp, Homo sapiens
agggttcccttttgg

SEQ ID NO: 786393 - DNA, 15 bp, Homo sapiens
gggttcccttttggt

SEQ ID NO: 786394 - DNA, 15 bp, Homo sapiens
ggttcccttttggtg

SEQ ID NO: 786395 - DNA, 15 bp, Homo sapiens
gttcccttttggtgt

SEQ ID NO: 786396 - DNA, 15 bp, Homo sapiens
ttcccttttggtgtg

SEQ ID NO: 786397 - DNA, 15 bp, Homo sapiens
tcccttttggtgtgt

SEQ ID NO: 786398 - DNA, 15 bp, Homo sapiens
cccttttggtgtgtt

SEQ ID NO: 786399 - DNA, 15 bp, Homo sapiens
ccttttggtgtgttc

SEQ ID NO: 786400 - DNA, 15 bp, Homo sapiens
cttttggtgtgttcc

SEQ ID NO: 786401 - DNA, 15 bp, Homo sapiens
ttttggtgtgttcca

SEQ ID NO: 786402 - DNA, 15 bp, Homo sapiens
tttggtgtgttccat

SEQ ID NO: 786403 - DNA, 15 bp, Homo sapiens
ttggtgtgttccatt

SEQ ID NO: 786404 - DNA, 15 bp, Homo sapiens
tggtgtgttccattg

SEQ ID NO: 786405 - DNA, 15 bp, Homo sapiens
ggtgtgttccattgt

SEQ ID NO: 786406 - DNA, 15 bp, Homo sapiens
gtgtgttccattgtt

SEQ ID NO: 786407 - DNA, 15 bp, Homo sapiens
tgtgttccattgtta

SEQ ID NO: 786408 - DNA, 15 bp, Homo sapiens
gtgttccattgttat

SEQ ID NO: 786409 - DNA, 15 bp, Homo sapiens
tgttccattgttatc

SEQ ID NO: 786410 - DNA, 15 bp, Homo sapiens
gttccattgttatct

SEQ ID NO: 786411 - DNA, 15 bp, Homo sapiens
ttccattgttatctc

SEQ ID NO: 786412 - DNA, 15 bp, Homo sapiens
tccattgttatctcc

SEQ ID NO: 786413 - DNA, 15 bp, Homo sapiens
ccattgttatctccc

SEQ ID NO: 786414 - DNA, 15 bp, Homo sapiens
cattgttatctcccc

SEQ ID NO: 786415 - DNA, 15 bp, Homo sapiens
attgttatctccccc

SEQ ID NO: 786416 - DNA, 15 bp, Homo sapiens
ttgttatctccccct

SEQ ID NO: 786417 - DNA, 15 bp, Homo sapiens
tgttatctccccctc

SEQ ID NO: 786418 - DNA, 15 bp, Homo sapiens
gttatctccccctct

SEQ ID NO: 786419 - DNA, 15 bp, Homo sapiens
ttatctccccctctc

SEQ ID NO: 786420 - DNA, 15 bp, Homo sapiens
tatctccccctctcc

SEQ ID NO: 786421 - DNA, 15 bp, Homo sapiens
atctccccctctccc

SEQ ID NO: 786422 - DNA, 15 bp, Homo sapiens
tctccccctctcccc

SEQ ID NO: 786423 - DNA, 15 bp, Homo sapiens
ctccccctctccccc

SEQ ID NO: 786424 - DNA, 15 bp, Homo sapiens
tccccctctccccca

SEQ ID NO: 786425 - DNA, 15 bp, Homo sapiens
ccccctctcccccag

SEQ ID NO: 786426 - DNA, 15 bp, Homo sapiens
cccctctcccccagg

SEQ ID NO: 786427 - DNA, 15 bp, Homo sapiens
ccctctcccccagga

SEQ ID NO: 786428 - DNA, 15 bp, Homo sapiens
cctctcccccaggac

SEQ ID NO: 786429 - DNA, 15 bp, Homo sapiens
ctctcccccaggacc

SEQ ID NO: 786430 - DNA, 15 bp, Homo sapiens
tctcccccaggacct

SEQ ID NO: 786431 - DNA, 15 bp, Homo sapiens
ctcccccaggaccta

SEQ ID NO: 786432 - DNA, 15 bp, Homo sapiens
tcccccaggacctat

SEQ ID NO: 786433 - DNA, 15 bp, Homo sapiens
cccccaggacctatt

SEQ ID NO: 786434 - DNA, 15 bp, Homo sapiens
ccccaggacctattc

SEQ ID NO: 786435 - DNA, 15 bp, Homo sapiens
cccaggacctattct

SEQ ID NO: 786436 - DNA, 15 bp, Homo sapiens
ccaggacctattctc

SEQ ID NO: 786437 - DNA, 15 bp, Homo sapiens
caggacctattctcc

SEQ ID NO: 786438 - DNA, 15 bp, Homo sapiens
aggacctattctccc

SEQ ID NO: 786439 - DNA, 15 bp, Homo sapiens
ggacctattctcccg

SEQ ID NO: 786440 - DNA, 15 bp, Homo sapiens
gacctattctcccgg

SEQ ID NO: 786441 - DNA, 15 bp, Homo sapiens
acctattctcccggg

SEQ ID NO: 786442 - DNA, 15 bp, Homo sapiens
cctattctcccggga

SEQ ID NO: 786443 - DNA, 15 bp, Homo sapiens
ctattctcccgggaa

SEQ ID NO: 786444 - DNA, 15 bp, Homo sapiens
tattctcccgggaaa

SEQ ID NO: 786445 - DNA, 15 bp, Homo sapiens
attctcccgggaaat

SEQ ID NO: 786446 - DNA, 15 bp, Homo sapiens
ttctcccgggaaatg

SEQ ID NO: 786447 - DNA, 15 bp, Homo sapiens
tctcccgggaaatga

SEQ ID NO: 786448 - DNA, 15 bp, Homo sapiens
ctcccgggaaatgat

SEQ ID NO: 786449 - DNA, 15 bp, Homo sapiens
tcccgggaaatgata

SEQ ID NO: 786450 - DNA, 15 bp, Homo sapiens
cccgggaaatgataa

SEQ ID NO: 786451 - DNA, 15 bp, Homo sapiens
ccgggaaatgataaa

SEQ ID NO: 786452 - DNA, 15 bp, Homo sapiens
cgggaaatgataaac

SEQ ID NO: 786453 - DNA, 15 bp, Homo sapiens
gggaaatgataaacc

SEQ ID NO: 786454 - DNA, 15 bp, Homo sapiens
ggaaatgataaacct

SEQ ID NO: 786455 - DNA, 15 bp, Homo sapiens
gaaatgataaacctg

SEQ ID NO: 786456 - DNA, 15 bp, Homo sapiens
aaatgataaacctgg

SEQ ID NO: 786457 - DNA, 15 bp, Homo sapiens
aatgataaacctggg

SEQ ID NO: 786458 - DNA, 15 bp, Homo sapiens
atgataaacctgggg

SEQ ID NO: 786459 - DNA, 15 bp, Homo sapiens
tgataaacctggggg

SEQ ID NO: 786460 - DNA, 15 bp, Homo sapiens
gataaacctgggggc

SEQ ID NO: 786461 - DNA, 15 bp, Homo sapiens
ataaacctgggggct

SEQ ID NO: 786462 - DNA, 15 bp, Homo sapiens
taaacctgggggctt

SEQ ID NO: 786463 - DNA, 15 bp, Homo sapiens
aaacctgggggcttt

SEQ ID NO: 786464 - DNA, 15 bp, Homo sapiens
aacctgggggcttta

SEQ ID NO: 786465 - DNA, 15 bp, Homo sapiens
acctgggggctttag

SEQ ID NO: 786466 - DNA, 15 bp, Homo sapiens
cctgggggctttagt

SEQ ID NO: 786467 - DNA, 15 bp, Homo sapiens
ctgggggctttagtg

SEQ ID NO: 786468 - DNA, 15 bp, Homo sapiens
tgggggctttagtgg

SEQ ID NO: 786469 - DNA, 15 bp, Homo sapiens
gggggctttagtggt

SEQ ID NO: 786470 - DNA, 15 bp, Homo sapiens
ggggctttagtggtg

SEQ ID NO: 786471 - DNA, 15 bp, Homo sapiens
gggctttagtggtgg

SEQ ID NO: 786472 - DNA, 15 bp, Homo sapiens
ggctttagtggtgga

SEQ ID NO: 786473 - DNA, 15 bp, Homo sapiens
gctttagtggtggag

SEQ ID NO: 786474 - DNA, 15 bp, Homo sapiens
ctttagtggtggaga

SEQ ID NO: 786475 - DNA, 15 bp, Homo sapiens
tttagtggtggagaa

SEQ ID NO: 786476 - DNA, 15 bp, Homo sapiens
ttagtggtggagaag

SEQ ID NO: 786477 - DNA, 15 bp, Homo sapiens
tagtggtggagaagg

SEQ ID NO: 786478 - DNA, 15 bp, Homo sapiens
agtggtggagaaggt

SEQ ID NO: 786479 - DNA, 15 bp, Homo sapiens
gtggtggagaaggtc

SEQ ID NO: 786480 - DNA, 15 bp, Homo sapiens
tggtggagaaggtct

SEQ ID NO: 786481 - DNA, 15 bp, Homo sapiens
ggtggagaaggtcta

SEQ ID NO: 786482 - DNA, 15 bp, Homo sapiens
gtggagaaggtctac

SEQ ID NO: 786483 - DNA, 15 bp, Homo sapiens
tggagaaggtctaca

SEQ ID NO: 786484 - DNA, 15 bp, Homo sapiens
ggagaaggtctacag

SEQ ID NO: 786485 - DNA, 15 bp, Homo sapiens
gagaaggtctacaga

SEQ ID NO: 786486 - DNA, 15 bp, Homo sapiens
agaaggtctacagag

SEQ ID NO: 786487 - DNA, 15 bp, Homo sapiens
gaaggtctacagagc

SEQ ID NO: 786488 - DNA, 15 bp, Homo sapiens
aaggtctacagagcc

SEQ ID NO: 786489 - DNA, 15 bp, Homo sapiens
aggtctacagagccc

SEQ ID NO: 786490 - DNA, 15 bp, Homo sapiens
ggtctacagagccca

SEQ ID NO: 786491 - DNA, 15 bp, Homo sapiens
gtctacagagcccaa

SEQ ID NO: 786492 - DNA, 15 bp, Homo sapiens
tctacagagcccaac

SEQ ID NO: 786493 - DNA, 15 bp, Homo sapiens
ctacagagcccaacc

SEQ ID NO: 786494 - DNA, 15 bp, Homo sapiens
tacagagcccaacct

SEQ ID NO: 786495 - DNA, 15 bp, Homo sapiens
acagagcccaacctc

SEQ ID NO: 786496 - DNA, 15 bp, Homo sapiens
cagagcccaacctca

SEQ ID NO: 786497 - DNA, 15 bp, Homo sapiens
agagcccaacctcaa

SEQ ID NO: 786498 - DNA, 15 bp, Homo sapiens
gagcccaacctcaac

SEQ ID NO: 786499 - DNA, 15 bp, Homo sapiens
agcccaacctcaact

SEQ ID NO: 786500 - DNA, 15 bp, Homo sapiens
gcccaacctcaactt

SEQ ID NO: 786501 - DNA, 15 bp, Homo sapiens
cccaacctcaactta

SEQ ID NO: 786502 - DNA, 15 bp, Homo sapiens
ccaacctcaacttaa

SEQ ID NO: 786503 - DNA, 15 bp, Homo sapiens
caacctcaacttaaa

SEQ ID NO: 786504 - DNA, 15 bp, Homo sapiens
aacctcaacttaaaa

SEQ ID NO: 786505 - DNA, 15 bp, Homo sapiens
acctcaacttaaaat

SEQ ID NO: 786506 - DNA, 15 bp, Homo sapiens
cctcaacttaaaatt

SEQ ID NO: 786507 - DNA, 15 bp, Homo sapiens
ctcaacttaaaattt

SEQ ID NO: 786508 - DNA, 15 bp, Homo sapiens
tcaacttaaaatttc

SEQ ID NO: 786509 - DNA, 15 bp, Homo sapiens
caacttaaaatttcc

SEQ ID NO: 786510 - DNA, 15 bp, Homo sapiens
aacttaaaatttccc

SEQ ID NO: 786511 - DNA, 15 bp, Homo sapiens
acttaaaatttcccc

SEQ ID NO: 786512 - DNA, 15 bp, Homo sapiens
cttaaaatttcccca

SEQ ID NO: 786513 - DNA, 15 bp, Homo sapiens
ttaaaatttccccag

SEQ ID NO: 786514 - DNA, 15 bp, Homo sapiens
taaaatttccccagc

SEQ ID NO: 786515 - DNA, 15 bp, Homo sapiens
aaaatttccccagcc

SEQ ID NO: 786516 - DNA, 15 bp, Homo sapiens
aaatttccccagcct

SEQ ID NO: 786517 - DNA, 15 bp, Homo sapiens
aatttccccagcctc

SEQ ID NO: 786518 - DNA, 15 bp, Homo sapiens
atttccccagcctct

SEQ ID NO: 786519 - DNA, 15 bp, Homo sapiens
tttccccagcctctt

SEQ ID NO: 786520 - DNA, 15 bp, Homo sapiens
ttccccagcctcttt

SEQ ID NO: 786521 - DNA, 15 bp, Homo sapiens
tccccagcctctttt

SEQ ID NO: 786522 - DNA, 15 bp, Homo sapiens
ccccagcctcttttg

SEQ ID NO: 786523 - DNA, 15 bp, Homo sapiens
cccagcctcttttgg

SEQ ID NO: 786524 - DNA, 15 bp, Homo sapiens
ccagcctcttttgga

SEQ ID NO: 786525 - DNA, 15 bp, Homo sapiens
cagcctcttttggaa

SEQ ID NO: 786526 - DNA, 15 bp, Homo sapiens
agcctcttttggaag

SEQ ID NO: 786527 - DNA, 15 bp, Homo sapiens
gcctcttttggaagc

SEQ ID NO: 786528 - DNA, 15 bp, Homo sapiens
cctcttttggaagcc

SEQ ID NO: 786529 - DNA, 15 bp, Homo sapiens
ctcttttggaagcca

SEQ ID NO: 786530 - DNA, 15 bp, Homo sapiens
tcttttggaagccaa

SEQ ID NO: 786531 - DNA, 15 bp, Homo sapiens
cttttggaagccaac

SEQ ID NO: 786532 - DNA, 15 bp, Homo sapiens
ttttggaagccaact

SEQ ID NO: 786533 - DNA, 15 bp, Homo sapiens
tttggaagccaacta

SEQ ID NO: 786534 - DNA, 15 bp, Homo sapiens
ttggaagccaactag

SEQ ID NO: 786535 - DNA, 15 bp, Homo sapiens
tggaagccaactagg

SEQ ID NO: 786536 - DNA, 15 bp, Homo sapiens
ggaagccaactaggt

SEQ ID NO: 786537 - DNA, 15 bp, Homo sapiens
gaagccaactaggta

SEQ ID NO: 786538 - DNA, 15 bp, Homo sapiens
aagccaactaggtac

SEQ ID NO: 786539 - DNA, 15 bp, Homo sapiens
agccaactaggtacc

SEQ ID NO: 786540 - DNA, 15 bp, Homo sapiens
gccaactaggtacct

SEQ ID NO: 786541 - DNA, 15 bp, Homo sapiens
ccaactaggtacctg

SEQ ID NO: 786542 - DNA, 15 bp, Homo sapiens
caactaggtacctga

SEQ ID NO: 786543 - DNA, 15 bp, Homo sapiens
aactaggtacctgat

SEQ ID NO: 786544 - DNA, 15 bp, Homo sapiens
actaggtacctgatt

SEQ ID NO: 786545 - DNA, 15 bp, Homo sapiens
ctaggtacctgattt

SEQ ID NO: 786546 - DNA, 15 bp, Homo sapiens
taggtacctgatttt

SEQ ID NO: 786547 - DNA, 15 bp, Homo sapiens
aggtacctgattttc

SEQ ID NO: 786548 - DNA, 15 bp, Homo sapiens
ggtacctgattttcc

SEQ ID NO: 786549 - DNA, 15 bp, Homo sapiens
gtacctgattttcct

SEQ ID NO: 786550 - DNA, 15 bp, Homo sapiens
tacctgattttcctg

SEQ ID NO: 786551 - DNA, 15 bp, Homo sapiens
acctgattttcctga

SEQ ID NO: 786552 - DNA, 15 bp, Homo sapiens
cctgattttcctgag

SEQ ID NO: 786553 - DNA, 15 bp, Homo sapiens
ctgattttcctgagt

SEQ ID NO: 786554 - DNA, 15 bp, Homo sapiens
tgattttcctgagtg

SEQ ID NO: 786555 - DNA, 15 bp, Homo sapiens
gattttcctgagtgg

SEQ ID NO: 786556 - DNA, 15 bp, Homo sapiens
attttcctgagtggg

SEQ ID NO: 786557 - DNA, 15 bp, Homo sapiens
ttttcctgagtggga

SEQ ID NO: 786558 - DNA, 15 bp, Homo sapiens
tttcctgagtgggac

SEQ ID NO: 786559 - DNA, 15 bp, Homo sapiens
ttcctgagtgggaca

SEQ ID NO: 786560 - DNA, 15 bp, Homo sapiens
tcctgagtgggacac

SEQ ID NO: 786561 - DNA, 15 bp, Homo sapiens
cctgagtgggacacg

SEQ ID NO: 786562 - DNA, 15 bp, Homo sapiens
ctgagtgggacacgg

SEQ ID NO: 786563 - DNA, 15 bp, Homo sapiens
tgagtgggacacggc

SEQ ID NO: 786564 - DNA, 15 bp, Homo sapiens
gagtgggacacggca

SEQ ID NO: 786565 - DNA, 15 bp, Homo sapiens
agtgggacacggcag

SEQ ID NO: 786566 - DNA, 15 bp, Homo sapiens
gtgggacacggcagc

SEQ ID NO: 786567 - DNA, 15 bp, Homo sapiens
tgggacacggcagcc

SEQ ID NO: 786568 - DNA, 15 bp, Homo sapiens
gggacacggcagccc

SEQ ID NO: 786569 - DNA, 15 bp, Homo sapiens
ggacacggcagcccc

SEQ ID NO: 786570 - DNA, 15 bp, Homo sapiens
gacacggcagccccc

SEQ ID NO: 786571 - DNA, 15 bp, Homo sapiens
acacggcagccccct

SEQ ID NO: 786572 - DNA, 15 bp, Homo sapiens
cacggcagccccctg

SEQ ID NO: 786573 - DNA, 15 bp, Homo sapiens
acggcagccccctgg

SEQ ID NO: 786574 - DNA, 15 bp, Homo sapiens
cggcagccccctggg

SEQ ID NO: 786575 - DNA, 15 bp, Homo sapiens
ggcagccccctgggt

SEQ ID NO: 786576 - DNA, 15 bp, Homo sapiens
gcagccccctgggtg

SEQ ID NO: 786577 - DNA, 15 bp, Homo sapiens
cagccccctgggtgg

SEQ ID NO: 786578 - DNA, 15 bp, Homo sapiens
agccccctgggtggt

SEQ ID NO: 786579 - DNA, 15 bp, Homo sapiens
gccccctgggtggtc

SEQ ID NO: 786580 - DNA, 15 bp, Homo sapiens
ccccctgggtggtca

SEQ ID NO: 786581 - DNA, 15 bp, Homo sapiens
cccctgggtggtcat

SEQ ID NO: 786582 - DNA, 15 bp, Homo sapiens
ccctgggtggtcata

SEQ ID NO: 786583 - DNA, 15 bp, Homo sapiens
cctgggtggtcatag

SEQ ID NO: 786584 - DNA, 15 bp, Homo sapiens
ctgggtggtcatagc

SEQ ID NO: 786585 - DNA, 15 bp, Homo sapiens
tgggtggtcatagca

SEQ ID NO: 786586 - DNA, 15 bp, Homo sapiens
gggtggtcatagcac

SEQ ID NO: 786587 - DNA, 15 bp, Homo sapiens
ggtggtcatagcacc

SEQ ID NO: 786588 - DNA, 15 bp, Homo sapiens
gtggtcatagcacca

SEQ ID NO: 786589 - DNA, 15 bp, Homo sapiens
tggtcatagcaccac

SEQ ID NO: 786590 - DNA, 15 bp, Homo sapiens
ggtcatagcaccaca

SEQ ID NO: 786591 - DNA, 15 bp, Homo sapiens
gtcatagcaccacag

SEQ ID NO: 786592 - DNA, 15 bp, Homo sapiens
tcatagcaccacagt

SEQ ID NO: 786593 - DNA, 15 bp, Homo sapiens
catagcaccacagta

SEQ ID NO: 786594 - DNA, 15 bp, Homo sapiens
atagcaccacagtat

SEQ ID NO: 786595 - DNA, 15 bp, Homo sapiens
tagcaccacagtata

SEQ ID NO: 786596 - DNA, 15 bp, Homo sapiens
agcaccacagtatac

SEQ ID NO: 786597 - DNA, 15 bp, Homo sapiens
gcaccacagtatact

SEQ ID NO: 786598 - DNA, 15 bp, Homo sapiens
caccacagtatactg

SEQ ID NO: 786599 - DNA, 15 bp, Homo sapiens
accacagtatactgt

SEQ ID NO: 786600 - DNA, 15 bp, Homo sapiens
ccacagtatactgtt

SEQ ID NO: 786601 - DNA, 15 bp, Homo sapiens
cacagtatactgttt

SEQ ID NO: 786602 - DNA, 15 bp, Homo sapiens
acagtatactgtttt

SEQ ID NO: 786603 - DNA, 15 bp, Homo sapiens
cagtatactgtttta

SEQ ID NO: 786604 - DNA, 15 bp, Homo sapiens
agtatactgttttac

SEQ ID NO: 786605 - DNA, 15 bp, Homo sapiens
gtatactgttttact

SEQ ID NO: 786606 - DNA, 15 bp, Homo sapiens
tatactgttttactt

SEQ ID NO: 786607 - DNA, 15 bp, Homo sapiens
atactgttttactta

SEQ ID NO: 786608 - DNA, 15 bp, Homo sapiens
tactgttttacttac

SEQ ID NO: 786609 - DNA, 15 bp, Homo sapiens
actgttttacttacc

SEQ ID NO: 786610 - DNA, 15 bp, Homo sapiens
ctgttttacttacct

SEQ ID NO: 786611 - DNA, 15 bp, Homo sapiens
tgttttacttacctg

SEQ ID NO: 786612 - DNA, 15 bp, Homo sapiens
gttttacttacctgt

SEQ ID NO: 786613 - DNA, 15 bp, Homo sapiens
ttttacttacctgta

SEQ ID NO: 786614 - DNA, 15 bp, Homo sapiens
tttacttacctgtat

SEQ ID NO: 786615 - DNA, 15 bp, Homo sapiens
ttacttacctgtatc

SEQ ID NO: 786616 - DNA, 15 bp, Homo sapiens
tacttacctgtatct

SEQ ID NO: 786617 - DNA, 15 bp, Homo sapiens
acttacctgtatctc

SEQ ID NO: 786618 - DNA, 15 bp, Homo sapiens
cttacctgtatctct

SEQ ID NO: 786619 - DNA, 15 bp, Homo sapiens
ttacctgtatctctt

SEQ ID NO: 786620 - DNA, 15 bp, Homo sapiens
tacctgtatctcttg

SEQ ID NO: 786621 - DNA, 15 bp, Homo sapiens
acctgtatctcttgg

SEQ ID NO: 786622 - DNA, 15 bp, Homo sapiens
cctgtatctcttggc

SEQ ID NO: 786623 - DNA, 15 bp, Homo sapiens
ctgtatctcttggcc

SEQ ID NO: 786624 - DNA, 15 bp, Homo sapiens
tgtatctcttggcca

SEQ ID NO: 786625 - DNA, 15 bp, Homo sapiens
gtatctcttggccat

SEQ ID NO: 786626 - DNA, 15 bp, Homo sapiens
tatctcttggccatg

SEQ ID NO: 786627 - DNA, 15 bp, Homo sapiens
atctcttggccatgc

SEQ ID NO: 786628 - DNA, 15 bp, Homo sapiens
tctcttggccatgcc

SEQ ID NO: 786629 - DNA, 15 bp, Homo sapiens
ctcttggccatgcca

SEQ ID NO: 786630 - DNA, 15 bp, Homo sapiens
tcttggccatgccag

SEQ ID NO: 786631 - DNA, 15 bp, Homo sapiens
cttggccatgccagc

SEQ ID NO: 786632 - DNA, 15 bp, Homo sapiens
ttggccatgccagca

SEQ ID NO: 786633 - DNA, 15 bp, Homo sapiens
tggccatgccagcag

SEQ ID NO: 786634 - DNA, 15 bp, Homo sapiens
ggccatgccagcagc

SEQ ID NO: 786635 - DNA, 15 bp, Homo sapiens
gccatgccagcagca

SEQ ID NO: 786636 - DNA, 15 bp, Homo sapiens
ccatgccagcagcaa

SEQ ID NO: 786637 - DNA, 15 bp, Homo sapiens
catgccagcagcaag

SEQ ID NO: 786638 - DNA, 15 bp, Homo sapiens
atgccagcagcaaga

SEQ ID NO: 786639 - DNA, 15 bp, Homo sapiens
tgccagcagcaagag

SEQ ID NO: 786640 - DNA, 15 bp, Homo sapiens
gccagcagcaagagc

SEQ ID NO: 786641 - DNA, 15 bp, Homo sapiens
ccagcagcaagagcc

SEQ ID NO: 786642 - DNA, 15 bp, Homo sapiens
cagcagcaagagcct

SEQ ID NO: 786643 - DNA, 15 bp, Homo sapiens
agcagcaagagcctc

SEQ ID NO: 786644 - DNA, 15 bp, Homo sapiens
gcagcaagagcctct

SEQ ID NO: 786645 - DNA, 15 bp, Homo sapiens
cagcaagagcctctt

SEQ ID NO: 786646 - DNA, 15 bp, Homo sapiens
agcaagagcctcttg

SEQ ID NO: 786647 - DNA, 15 bp, Homo sapiens
gcaagagcctcttgg

SEQ ID NO: 786648 - DNA, 15 bp, Homo sapiens
caagagcctcttgga

SEQ ID NO: 786649 - DNA, 15 bp, Homo sapiens
aagagcctcttggac

SEQ ID NO: 786650 - DNA, 15 bp, Homo sapiens
agagcctcttggacc

SEQ ID NO: 786651 - DNA, 15 bp, Homo sapiens
gagcctcttggacct

SEQ ID NO: 786652 - DNA, 15 bp, Homo sapiens
agcctcttggaccta

SEQ ID NO: 786653 - DNA, 15 bp, Homo sapiens
gcctcttggacctag

SEQ ID NO: 786654 - DNA, 15 bp, Homo sapiens
cctcttggacctaga

SEQ ID NO: 786655 - DNA, 15 bp, Homo sapiens
ctcttggacctagaa

SEQ ID NO: 786656 - DNA, 15 bp, Homo sapiens
tcttggacctagaat

SEQ ID NO: 786657 - DNA, 15 bp, Homo sapiens
cttggacctagaatg

SEQ ID NO: 786658 - DNA, 15 bp, Homo sapiens
ttggacctagaatga

SEQ ID NO: 786659 - DNA, 15 bp, Homo sapiens
tggacctagaatgac

SEQ ID NO: 786660 - DNA, 15 bp, Homo sapiens
ggacctagaatgacc

SEQ ID NO: 786661 - DNA, 15 bp, Homo sapiens
gacctagaatgacca

SEQ ID NO: 786662 - DNA, 15 bp, Homo sapiens
acctagaatgaccaa

SEQ ID NO: 786663 - DNA, 15 bp, Homo sapiens
cctagaatgaccaag

SEQ ID NO: 786664 - DNA, 15 bp, Homo sapiens
ctagaatgaccaagg

SEQ ID NO: 786665 - DNA, 15 bp, Homo sapiens
tagaatgaccaagga

SEQ ID NO: 786666 - DNA, 15 bp, Homo sapiens
agaatgaccaaggac

SEQ ID NO: 786667 - DNA, 15 bp, Homo sapiens
gaatgaccaaggacc

SEQ ID NO: 786668 - DNA, 15 bp, Homo sapiens
aatgaccaaggaccg

SEQ ID NO: 786669 - DNA, 15 bp, Homo sapiens
atgaccaaggaccgt

SEQ ID NO: 786670 - DNA, 15 bp, Homo sapiens
tgaccaaggaccgtg

SEQ ID NO: 786671 - DNA, 15 bp, Homo sapiens
gaccaaggaccgtgg

SEQ ID NO: 786672 - DNA, 15 bp, Homo sapiens
accaaggaccgtggc

SEQ ID NO: 786673 - DNA, 15 bp, Homo sapiens
ccaaggaccgtggcc

SEQ ID NO: 786674 - DNA, 15 bp, Homo sapiens
caaggaccgtggcct

SEQ ID NO: 786675 - DNA, 15 bp, Homo sapiens
aaggaccgtggcctg

SEQ ID NO: 786676 - DNA, 15 bp, Homo sapiens
aggaccgtggcctgt

SEQ ID NO: 786677 - DNA, 15 bp, Homo sapiens
ggaccgtggcctgtc

SEQ ID NO: 786678 - DNA, 15 bp, Homo sapiens
gaccgtggcctgtct

SEQ ID NO: 786679 - DNA, 15 bp, Homo sapiens
accgtggcctgtctg

SEQ ID NO: 786680 - DNA, 15 bp, Homo sapiens
ccgtggcctgtctga

SEQ ID NO: 786681 - DNA, 15 bp, Homo sapiens
cgtggcctgtctgag

SEQ ID NO: 786682 - DNA, 15 bp, Homo sapiens
gtggcctgtctgagt

SEQ ID NO: 786683 - DNA, 15 bp, Homo sapiens
tggcctgtctgagtt

SEQ ID NO: 786684 - DNA, 15 bp, Homo sapiens
ggcctgtctgagttt

SEQ ID NO: 786685 - DNA, 15 bp, Homo sapiens
gcctgtctgagtttt

SEQ ID NO: 786686 - DNA, 15 bp, Homo sapiens
cctgtctgagtttta

SEQ ID NO: 786687 - DNA, 15 bp, Homo sapiens
ctgtctgagttttaa

SEQ ID NO: 786688 - DNA, 15 bp, Homo sapiens
tgtctgagttttaac

SEQ ID NO: 786689 - DNA, 15 bp, Homo sapiens
gtctgagttttaact

SEQ ID NO: 786690 - DNA, 15 bp, Homo sapiens
tctgagttttaactc

SEQ ID NO: 786691 - DNA, 15 bp, Homo sapiens
ctgagttttaactct

SEQ ID NO: 786692 - DNA, 15 bp, Homo sapiens
tgagttttaactctg

SEQ ID NO: 786693 - DNA, 15 bp, Homo sapiens
gagttttaactctgg

SEQ ID NO: 786694 - DNA, 15 bp, Homo sapiens
agttttaactctgga

SEQ ID NO: 786695 - DNA, 15 bp, Homo sapiens
gttttaactctggat

SEQ ID NO: 786696 - DNA, 15 bp, Homo sapiens
ttttaactctggatt

SEQ ID NO: 786697 - DNA, 15 bp, Homo sapiens
tttaactctggattt

SEQ ID NO: 786698 - DNA, 15 bp, Homo sapiens
ttaactctggattta

SEQ ID NO: 786699 - DNA, 15 bp, Homo sapiens
taactctggatttag

SEQ ID NO: 786700 - DNA, 15 bp, Homo sapiens
aactctggatttaga

SEQ ID NO: 786701 - DNA, 15 bp, Homo sapiens
actctggatttagaa

SEQ ID NO: 786702 - DNA, 15 bp, Homo sapiens
ctctggatttagaag

SEQ ID NO: 786703 - DNA, 15 bp, Homo sapiens
tctggatttagaaga

SEQ ID NO: 786704 - DNA, 15 bp, Homo sapiens
ctggatttagaagat

SEQ ID NO: 786705 - DNA, 15 bp, Homo sapiens
tggatttagaagatt

SEQ ID NO: 786706 - DNA, 15 bp, Homo sapiens
ggatttagaagattg

SEQ ID NO: 786707 - DNA, 15 bp, Homo sapiens
gatttagaagattgg

SEQ ID NO: 786708 - DNA, 15 bp, Homo sapiens
atttagaagattggg

SEQ ID NO: 786709 - DNA, 15 bp, Homo sapiens
tttagaagattgggg

SEQ ID NO: 786710 - DNA, 15 bp, Homo sapiens
ttagaagattgggga

SEQ ID NO: 786711 - DNA, 15 bp, Homo sapiens
tagaagattggggat

SEQ ID NO: 786712 - DNA, 15 bp, Homo sapiens
agaagattggggatc

SEQ ID NO: 786713 - DNA, 15 bp, Homo sapiens
gaagattggggatct

SEQ ID NO: 786714 - DNA, 15 bp, Homo sapiens
aagattggggatctt

SEQ ID NO: 786715 - DNA, 15 bp, Homo sapiens
agattggggatcttg

SEQ ID NO: 786716 - DNA, 15 bp, Homo sapiens
gattggggatcttgt

SEQ ID NO: 786717 - DNA, 15 bp, Homo sapiens
attggggatcttgtt

SEQ ID NO: 786718 - DNA, 15 bp, Homo sapiens
ttggggatcttgttt

SEQ ID NO: 786719 - DNA, 15 bp, Homo sapiens
tggggatcttgtttc

SEQ ID NO: 786720 - DNA, 15 bp, Homo sapiens
ggggatcttgtttca

SEQ ID NO: 786721 - DNA, 15 bp, Homo sapiens
gggatcttgtttcag

SEQ ID NO: 786722 - DNA, 15 bp, Homo sapiens
ggatcttgtttcaga

SEQ ID NO: 786723 - DNA, 15 bp, Homo sapiens
gatcttgtttcagac

SEQ ID NO: 786724 - DNA, 15 bp, Homo sapiens
atcttgtttcagaca

SEQ ID NO: 786725 - DNA, 15 bp, Homo sapiens
tcttgtttcagacat

SEQ ID NO: 786726 - DNA, 15 bp, Homo sapiens
cttgtttcagacatt

SEQ ID NO: 786727 - DNA, 15 bp, Homo sapiens
ttgtttcagacattt

SEQ ID NO: 786728 - DNA, 15 bp, Homo sapiens
tgtttcagacattta

SEQ ID NO: 786729 - DNA, 15 bp, Homo sapiens
gtttcagacatttac

SEQ ID NO: 786730 - DNA, 15 bp, Homo sapiens
tttcagacatttact

SEQ ID NO: 786731 - DNA, 15 bp, Homo sapiens
ttcagacatttactc

SEQ ID NO: 786732 - DNA, 15 bp, Homo sapiens
tcagacatttactca

SEQ ID NO: 786733 - DNA, 15 bp, Homo sapiens
cagacatttactcat

SEQ ID NO: 786734 - DNA, 15 bp, Homo sapiens
agacatttactcatc

SEQ ID NO: 786735 - DNA, 15 bp, Homo sapiens
gacatttactcatca

SEQ ID NO: 786736 - DNA, 15 bp, Homo sapiens
acatttactcatcaa

SEQ ID NO: 786737 - DNA, 15 bp, Homo sapiens
catttactcatcaac

SEQ ID NO: 786738 - DNA, 15 bp, Homo sapiens
atttactcatcaaca

SEQ ID NO: 786739 - DNA, 15 bp, Homo sapiens
tttactcatcaacaa

SEQ ID NO: 786740 - DNA, 15 bp, Homo sapiens
ttactcatcaacaaa

SEQ ID NO: 786741 - DNA, 15 bp, Homo sapiens
tactcatcaacaaat

SEQ ID NO: 786742 - DNA, 15 bp, Homo sapiens
actcatcaacaaata

SEQ ID NO: 786743 - DNA, 15 bp, Homo sapiens
ctcatcaacaaatac

SEQ ID NO: 786744 - DNA, 15 bp, Homo sapiens
tcatcaacaaatacc

SEQ ID NO: 786745 - DNA, 15 bp, Homo sapiens
catcaacaaatacca

SEQ ID NO: 786746 - DNA, 15 bp, Homo sapiens
atcaacaaataccaa

SEQ ID NO: 786747 - DNA, 15 bp, Homo sapiens
tcaacaaataccaag

SEQ ID NO: 786748 - DNA, 15 bp, Homo sapiens
caacaaataccaagt

SEQ ID NO: 786749 - DNA, 15 bp, Homo sapiens
aacaaataccaagtt

SEQ ID NO: 786750 - DNA, 15 bp, Homo sapiens
acaaataccaagttc

SEQ ID NO: 786751 - DNA, 15 bp, Homo sapiens
caaataccaagttca

SEQ ID NO: 786752 - DNA, 15 bp, Homo sapiens
aaataccaagttcat

SEQ ID NO: 786753 - DNA, 15 bp, Homo sapiens
aataccaagttcatt

SEQ ID NO: 786754 - DNA, 15 bp, Homo sapiens
ataccaagttcattg

SEQ ID NO: 786755 - DNA, 15 bp, Homo sapiens
taccaagttcattgc

SEQ ID NO: 786756 - DNA, 15 bp, Homo sapiens
accaagttcattgca

SEQ ID NO: 786757 - DNA, 15 bp, Homo sapiens
ccaagttcattgcag

SEQ ID NO: 786758 - DNA, 15 bp, Homo sapiens
caagttcattgcagg

SEQ ID NO: 786759 - DNA, 15 bp, Homo sapiens
aagttcattgcaggt

SEQ ID NO: 786760 - DNA, 15 bp, Homo sapiens
agttcattgcaggta

SEQ ID NO: 786761 - DNA, 15 bp, Homo sapiens
gttcattgcaggtag

SEQ ID NO: 786762 - DNA, 15 bp, Homo sapiens
ttcattgcaggtagg

SEQ ID NO: 786763 - DNA, 15 bp, Homo sapiens
tcattgcaggtaggg

SEQ ID NO: 786764 - DNA, 15 bp, Homo sapiens
cattgcaggtagggt

SEQ ID NO: 786765 - DNA, 15 bp, Homo sapiens
attgcaggtagggtt

SEQ ID NO: 786766 - DNA, 15 bp, Homo sapiens
ttgcaggtagggttc

SEQ ID NO: 786767 - DNA, 15 bp, Homo sapiens
tgcaggtagggttct

SEQ ID NO: 786768 - DNA, 15 bp, Homo sapiens
gcaggtagggttctt

SEQ ID NO: 786769 - DNA, 15 bp, Homo sapiens
caggtagggttcttg

SEQ ID NO: 786770 - DNA, 15 bp, Homo sapiens
aggtagggttcttgg

SEQ ID NO: 786771 - DNA, 15 bp, Homo sapiens
ggtagggttcttgga

SEQ ID NO: 786772 - DNA, 15 bp, Homo sapiens
gtagggttcttggaa

SEQ ID NO: 786773 - DNA, 15 bp, Homo sapiens
tagggttcttggaag

SEQ ID NO: 786774 - DNA, 15 bp, Homo sapiens
agggttcttggaagg

SEQ ID NO: 786775 - DNA, 15 bp, Homo sapiens
gggttcttggaaggt

SEQ ID NO: 786776 - DNA, 15 bp, Homo sapiens
ggttcttggaaggta

SEQ ID NO: 786777 - DNA, 15 bp, Homo sapiens
gttcttggaaggtaa

SEQ ID NO: 786778 - DNA, 15 bp, Homo sapiens
ttcttggaaggtaag

SEQ ID NO: 786779 - DNA, 15 bp, Homo sapiens
tcttggaaggtaagc

SEQ ID NO: 786780 - DNA, 15 bp, Homo sapiens
cttggaaggtaagct

SEQ ID NO: 786781 - DNA, 15 bp, Homo sapiens
ttggaaggtaagctc

SEQ ID NO: 786782 - DNA, 15 bp, Homo sapiens
tggaaggtaagctct

SEQ ID NO: 786783 - DNA, 15 bp, Homo sapiens
ggaaggtaagctctg

SEQ ID NO: 786784 - DNA, 15 bp, Homo sapiens
gaaggtaagctctga

SEQ ID NO: 786785 - DNA, 15 bp, Homo sapiens
aaggtaagctctgac

SEQ ID NO: 786786 - DNA, 15 bp, Homo sapiens
aggtaagctctgaca

SEQ ID NO: 786787 - DNA, 15 bp, Homo sapiens
ggtaagctctgacac

SEQ ID NO: 786788 - DNA, 15 bp, Homo sapiens
gtaagctctgacacg

SEQ ID NO: 786789 - DNA, 15 bp, Homo sapiens
taagctctgacacga

SEQ ID NO: 786790 - DNA, 15 bp, Homo sapiens
aagctctgacacgaa

SEQ ID NO: 786791 - DNA, 15 bp, Homo sapiens
agctctgacacgaag

SEQ ID NO: 786792 - DNA, 15 bp, Homo sapiens
gctctgacacgaagt

SEQ ID NO: 786793 - DNA, 15 bp, Homo sapiens
ctctgacacgaagtt

SEQ ID NO: 786794 - DNA, 15 bp, Homo sapiens
tctgacacgaagttg

SEQ ID NO: 786795 - DNA, 15 bp, Homo sapiens
ctgacacgaagttga

SEQ ID NO: 786796 - DNA, 15 bp, Homo sapiens
tgacacgaagttgag

SEQ ID NO: 786797 - DNA, 15 bp, Homo sapiens
gacacgaagttgagt

SEQ ID NO: 786798 - DNA, 15 bp, Homo sapiens
acacgaagttgagtg

SEQ ID NO: 786799 - DNA, 15 bp, Homo sapiens
cacgaagttgagtgt

SEQ ID NO: 786800 - DNA, 15 bp, Homo sapiens
acgaagttgagtgtg

SEQ ID NO: 786801 - DNA, 15 bp, Homo sapiens
cgaagttgagtgtgc

SEQ ID NO: 786802 - DNA, 15 bp, Homo sapiens
gaagttgagtgtgct

SEQ ID NO: 786803 - DNA, 15 bp, Homo sapiens
aagttgagtgtgctg

SEQ ID NO: 786804 - DNA, 15 bp, Homo sapiens
agttgagtgtgctgg

SEQ ID NO: 786805 - DNA, 15 bp, Homo sapiens
gttgagtgtgctgga

SEQ ID NO: 786806 - DNA, 15 bp, Homo sapiens
ttgagtgtgctggag

SEQ ID NO: 786807 - DNA, 15 bp, Homo sapiens
tgagtgtgctggagg

SEQ ID NO: 786808 - DNA, 15 bp, Homo sapiens
gagtgtgctggaggc

SEQ ID NO: 786809 - DNA, 15 bp, Homo sapiens
agtgtgctggaggct

SEQ ID NO: 786810 - DNA, 15 bp, Homo sapiens
gtgtgctggaggctc

SEQ ID NO: 786811 - DNA, 15 bp, Homo sapiens
tgtgctggaggctca

SEQ ID NO: 786812 - DNA, 15 bp, Homo sapiens
gtgctggaggctcat

SEQ ID NO: 786813 - DNA, 15 bp, Homo sapiens
tgctggaggctcata

SEQ ID NO: 786814 - DNA, 15 bp, Homo sapiens
gctggaggctcatac

SEQ ID NO: 786815 - DNA, 15 bp, Homo sapiens
ctggaggctcatacc

SEQ ID NO: 786816 - DNA, 15 bp, Homo sapiens
tggaggctcataccc

SEQ ID NO: 786817 - DNA, 15 bp, Homo sapiens
ggaggctcataccca

SEQ ID NO: 786818 - DNA, 15 bp, Homo sapiens
gaggctcatacccac

SEQ ID NO: 786819 - DNA, 15 bp, Homo sapiens
aggctcatacccacg

SEQ ID NO: 786820 - DNA, 15 bp, Homo sapiens
ggctcatacccacgg

SEQ ID NO: 786821 - DNA, 15 bp, Homo sapiens
gctcatacccacggg

SEQ ID NO: 786822 - DNA, 15 bp, Homo sapiens
ctcatacccacggga

SEQ ID NO: 786823 - DNA, 15 bp, Homo sapiens
tcatacccacgggag

SEQ ID NO: 786824 - DNA, 15 bp, Homo sapiens
catacccacgggagg

SEQ ID NO: 786825 - DNA, 15 bp, Homo sapiens
atacccacgggagga

SEQ ID NO: 786826 - DNA, 15 bp, Homo sapiens
tacccacgggaggag

SEQ ID NO: 786827 - DNA, 15 bp, Homo sapiens
acccacgggaggagg

SEQ ID NO: 786828 - DNA, 15 bp, Homo sapiens
cccacgggaggaggg

SEQ ID NO: 786829 - DNA, 15 bp, Homo sapiens
ccacgggaggagggg

SEQ ID NO: 786830 - DNA, 15 bp, Homo sapiens
cacgggaggagggga

SEQ ID NO: 786831 - DNA, 15 bp, Homo sapiens
acgggaggaggggaa

SEQ ID NO: 786832 - DNA, 15 bp, Homo sapiens
cgggaggaggggaag

SEQ ID NO: 786833 - DNA, 15 bp, Homo sapiens
gggaggaggggaagg

SEQ ID NO: 786834 - DNA, 15 bp, Homo sapiens
ggaggaggggaaggc

SEQ ID NO: 786835 - DNA, 15 bp, Homo sapiens
gaggaggggaaggca

SEQ ID NO: 786836 - DNA, 15 bp, Homo sapiens
aggaggggaaggcag

SEQ ID NO: 786837 - DNA, 15 bp, Homo sapiens
ggaggggaaggcagc

SEQ ID NO: 786838 - DNA, 15 bp, Homo sapiens
gaggggaaggcagca

SEQ ID NO: 786839 - DNA, 15 bp, Homo sapiens
aggggaaggcagcag

SEQ ID NO: 786840 - DNA, 15 bp, Homo sapiens
ggggaaggcagcagg

SEQ ID NO: 786841 - DNA, 15 bp, Homo sapiens
gggaaggcagcagga

SEQ ID NO: 786842 - DNA, 15 bp, Homo sapiens
ggaaggcagcaggac

SEQ ID NO: 786843 - DNA, 15 bp, Homo sapiens
gaaggcagcaggact

SEQ ID NO: 786844 - DNA, 15 bp, Homo sapiens
aaggcagcaggactg

SEQ ID NO: 786845 - DNA, 15 bp, Homo sapiens
aggcagcaggactgt

SEQ ID NO: 786846 - DNA, 15 bp, Homo sapiens
ggcagcaggactgtg

SEQ ID NO: 786847 - DNA, 15 bp, Homo sapiens
gcagcaggactgtgc

SEQ ID NO: 786848 - DNA, 15 bp, Homo sapiens
cagcaggactgtgca

SEQ ID NO: 786849 - DNA, 15 bp, Homo sapiens
agcaggactgtgcag

SEQ ID NO: 786850 - DNA, 15 bp, Homo sapiens
gcaggactgtgcaga

SEQ ID NO: 786851 - DNA, 15 bp, Homo sapiens
caggactgtgcagag

SEQ ID NO: 786852 - DNA, 15 bp, Homo sapiens
aggactgtgcagagg

SEQ ID NO: 786853 - DNA, 15 bp, Homo sapiens
ggactgtgcagaggt

SEQ ID NO: 786854 - DNA, 15 bp, Homo sapiens
gactgtgcagaggtt

SEQ ID NO: 786855 - DNA, 15 bp, Homo sapiens
actgtgcagaggttg

SEQ ID NO: 786856 - DNA, 15 bp, Homo sapiens
ctgtgcagaggttga

SEQ ID NO: 786857 - DNA, 15 bp, Homo sapiens
tgtgcagaggttgag

SEQ ID NO: 786858 - DNA, 15 bp, Homo sapiens
gtgcagaggttgagt

SEQ ID NO: 786859 - DNA, 15 bp, Homo sapiens
tgcagaggttgagtc

SEQ ID NO: 786860 - DNA, 15 bp, Homo sapiens
gcagaggttgagtcg

SEQ ID NO: 786861 - DNA, 15 bp, Homo sapiens
cagaggttgagtcgt

SEQ ID NO: 786862 - DNA, 15 bp, Homo sapiens
agaggttgagtcgtg

SEQ ID NO: 786863 - DNA, 15 bp, Homo sapiens
gaggttgagtcgtga

SEQ ID NO: 786864 - DNA, 15 bp, Homo sapiens
aggttgagtcgtgat

SEQ ID NO: 786865 - DNA, 15 bp, Homo sapiens
ggttgagtcgtgatg

SEQ ID NO: 786866 - DNA, 15 bp, Homo sapiens
gttgagtcgtgatgc

SEQ ID NO: 786867 - DNA, 15 bp, Homo sapiens
ttgagtcgtgatgca

SEQ ID NO: 786868 - DNA, 15 bp, Homo sapiens
tgagtcgtgatgcag

SEQ ID NO: 786869 - DNA, 15 bp, Homo sapiens
gagtcgtgatgcagg

SEQ ID NO: 786870 - DNA, 15 bp, Homo sapiens
agtcgtgatgcaggc

SEQ ID NO: 786871 - DNA, 15 bp, Homo sapiens
gtcgtgatgcaggct

SEQ ID NO: 786872 - DNA, 15 bp, Homo sapiens
tcgtgatgcaggctg

SEQ ID NO: 786873 - DNA, 15 bp, Homo sapiens
cgtgatgcaggctgg

SEQ ID NO: 786874 - DNA, 15 bp, Homo sapiens
gtgatgcaggctgga

SEQ ID NO: 786875 - DNA, 15 bp, Homo sapiens
tgatgcaggctggat

SEQ ID NO: 786876 - DNA, 15 bp, Homo sapiens
gatgcaggctggatg

SEQ ID NO: 786877 - DNA, 15 bp, Homo sapiens
atgcaggctggatgc

SEQ ID NO: 786878 - DNA, 15 bp, Homo sapiens
tgcaggctggatgca

SEQ ID NO: 786879 - DNA, 15 bp, Homo sapiens
gcaggctggatgcag

SEQ ID NO: 786880 - DNA, 15 bp, Homo sapiens
caggctggatgcagc

SEQ ID NO: 786881 - DNA, 15 bp, Homo sapiens
aggctggatgcagcc

SEQ ID NO: 786882 - DNA, 15 bp, Homo sapiens
ggctggatgcagcca

SEQ ID NO: 786883 - DNA, 15 bp, Homo sapiens
gctggatgcagccac

SEQ ID NO: 786884 - DNA, 15 bp, Homo sapiens
ctggatgcagccaca

SEQ ID NO: 786885 - DNA, 15 bp, Homo sapiens
tggatgcagccacag

SEQ ID NO: 786886 - DNA, 15 bp, Homo sapiens
ggatgcagccacagc

SEQ ID NO: 786887 - DNA, 15 bp, Homo sapiens
gatgcagccacagcc

SEQ ID NO: 786888 - DNA, 15 bp, Homo sapiens
atgcagccacagcca

SEQ ID NO: 786889 - DNA, 15 bp, Homo sapiens
tgcagccacagccag

SEQ ID NO: 786890 - DNA, 15 bp, Homo sapiens
gcagccacagccagc

SEQ ID NO: 786891 - DNA, 15 bp, Homo sapiens
cagccacagccagcc

SEQ ID NO: 786892 - DNA, 15 bp, Homo sapiens
agccacagccagccc

SEQ ID NO: 786893 - DNA, 15 bp, Homo sapiens
gccacagccagcccc

SEQ ID NO: 786894 - DNA, 15 bp, Homo sapiens
ccacagccagcccca

SEQ ID NO: 786895 - DNA, 15 bp, Homo sapiens
cacagccagccccaa

SEQ ID NO: 786896 - DNA, 15 bp, Homo sapiens
acagccagccccaag

SEQ ID NO: 786897 - DNA, 15 bp, Homo sapiens
cagccagccccaaga

SEQ ID NO: 786898 - DNA, 15 bp, Homo sapiens
agccagccccaagag

SEQ ID NO: 786899 - DNA, 15 bp, Homo sapiens
gccagccccaagagc

SEQ ID NO: 786900 - DNA, 15 bp, Homo sapiens
ccagccccaagagca

SEQ ID NO: 786901 - DNA, 15 bp, Homo sapiens
cagccccaagagcac

SEQ ID NO: 786902 - DNA, 15 bp, Homo sapiens
agccccaagagcacc

SEQ ID NO: 786903 - DNA, 15 bp, Homo sapiens
gccccaagagcacca

SEQ ID NO: 786904 - DNA, 15 bp, Homo sapiens
ccccaagagcaccaa

SEQ ID NO: 786905 - DNA, 15 bp, Homo sapiens
cccaagagcaccaag

SEQ ID NO: 786906 - DNA, 15 bp, Homo sapiens
ccaagagcaccaaga

SEQ ID NO: 786907 - DNA, 15 bp, Homo sapiens
caagagcaccaagat

SEQ ID NO: 786908 - DNA, 15 bp, Homo sapiens
aagagcaccaagatg

SEQ ID NO: 786909 - DNA, 15 bp, Homo sapiens
agagcaccaagatgg

SEQ ID NO: 786910 - DNA, 15 bp, Homo sapiens
gagcaccaagatggc

SEQ ID NO: 786911 - DNA, 15 bp, Homo sapiens
agcaccaagatggcc

SEQ ID NO: 786912 - DNA, 15 bp, Homo sapiens
gcaccaagatggcct

SEQ ID NO: 786913 - DNA, 15 bp, Homo sapiens
caccaagatggcctg

SEQ ID NO: 786914 - DNA, 15 bp, Homo sapiens
accaagatggcctgc

SEQ ID NO: 786915 - DNA, 15 bp, Homo sapiens
ccaagatggcctgcc

SEQ ID NO: 786916 - DNA, 15 bp, Homo sapiens
caagatggcctgcca

SEQ ID NO: 786917 - DNA, 15 bp, Homo sapiens
aagatggcctgccag

SEQ ID NO: 786918 - DNA, 15 bp, Homo sapiens
agatggcctgccagc

SEQ ID NO: 786919 - DNA, 15 bp, Homo sapiens
gatggcctgccagca

SEQ ID NO: 786920 - DNA, 15 bp, Homo sapiens
atggcctgccagcat

SEQ ID NO: 786921 - DNA, 15 bp, Homo sapiens
tggcctgccagcatt

SEQ ID NO: 786922 - DNA, 15 bp, Homo sapiens
ggcctgccagcattg

SEQ ID NO: 786923 - DNA, 15 bp, Homo sapiens
gcctgccagcattgt

SEQ ID NO: 786924 - DNA, 15 bp, Homo sapiens
cctgccagcattgtg

SEQ ID NO: 786925 - DNA, 15 bp, Homo sapiens
ctgccagcattgtgc

SEQ ID NO: 786926 - DNA, 15 bp, Homo sapiens
tgccagcattgtgct

SEQ ID NO: 786927 - DNA, 15 bp, Homo sapiens
gccagcattgtgctg

SEQ ID NO: 786928 - DNA, 15 bp, Homo sapiens
ccagcattgtgctgg

SEQ ID NO: 786929 - DNA, 15 bp, Homo sapiens
cagcattgtgctgga

SEQ ID NO: 786930 - DNA, 15 bp, Homo sapiens
agcattgtgctggaa

SEQ ID NO: 786931 - DNA, 15 bp, Homo sapiens
gcattgtgctggaat

SEQ ID NO: 786932 - DNA, 15 bp, Homo sapiens
cattgtgctggaatg

SEQ ID NO: 786933 - DNA, 15 bp, Homo sapiens
attgtgctggaatga

SEQ ID NO: 786934 - DNA, 15 bp, Homo sapiens
ttgtgctggaatgag

SEQ ID NO: 786935 - DNA, 15 bp, Homo sapiens
tgtgctggaatgagt

SEQ ID NO: 786936 - DNA, 15 bp, Homo sapiens
gtgctggaatgagtg

SEQ ID NO: 786937 - DNA, 15 bp, Homo sapiens
tgctggaatgagtgc

SEQ ID NO: 786938 - DNA, 15 bp, Homo sapiens
gctggaatgagtgct

SEQ ID NO: 786939 - DNA, 15 bp, Homo sapiens
ctggaatgagtgctg

SEQ ID NO: 786940 - DNA, 15 bp, Homo sapiens
tggaatgagtgctgg

SEQ ID NO: 786941 - DNA, 15 bp, Homo sapiens
ggaatgagtgctggg

SEQ ID NO: 786942 - DNA, 15 bp, Homo sapiens
gaatgagtgctggga

SEQ ID NO: 786943 - DNA, 15 bp, Homo sapiens
aatgagtgctgggat

SEQ ID NO: 786944 - DNA, 15 bp, Homo sapiens
atgagtgctgggatg

SEQ ID NO: 786945 - DNA, 15 bp, Homo sapiens
tgagtgctgggatgg

SEQ ID NO: 786946 - DNA, 15 bp, Homo sapiens
gagtgctgggatggg

SEQ ID NO: 786947 - DNA, 15 bp, Homo sapiens
agtgctgggatgggc

SEQ ID NO: 786948 - DNA, 15 bp, Homo sapiens
gtgctgggatgggct

SEQ ID NO: 786949 - DNA, 15 bp, Homo sapiens
tgctgggatgggctg

SEQ ID NO: 786950 - DNA, 15 bp, Homo sapiens
gctgggatgggctga

SEQ ID NO: 786951 - DNA, 15 bp, Homo sapiens
ctgggatgggctgac

SEQ ID NO: 786952 - DNA, 15 bp, Homo sapiens
tgggatgggctgaca

SEQ ID NO: 786953 - DNA, 15 bp, Homo sapiens
gggatgggctgacat

SEQ ID NO: 786954 - DNA, 15 bp, Homo sapiens
ggatgggctgacatg

SEQ ID NO: 786955 - DNA, 15 bp, Homo sapiens
gatgggctgacatgg

SEQ ID NO: 786956 - DNA, 15 bp, Homo sapiens
atgggctgacatggg

SEQ ID NO: 786957 - DNA, 15 bp, Homo sapiens
tgggctgacatgggc

SEQ ID NO: 786958 - DNA, 15 bp, Homo sapiens
gggctgacatgggcc

SEQ ID NO: 786959 - DNA, 15 bp, Homo sapiens
ggctgacatgggcct

SEQ ID NO: 786960 - DNA, 15 bp, Homo sapiens
gctgacatgggcctt

SEQ ID NO: 786961 - DNA, 15 bp, Homo sapiens
ctgacatgggccttt

SEQ ID NO: 786962 - DNA, 15 bp, Homo sapiens
tgacatgggccttta

SEQ ID NO: 786963 - DNA, 15 bp, Homo sapiens
gacatgggcctttat

SEQ ID NO: 786964 - DNA, 15 bp, Homo sapiens
acatgggcctttatt

SEQ ID NO: 786965 - DNA, 15 bp, Homo sapiens
catgggcctttattc

SEQ ID NO: 786966 - DNA, 15 bp, Homo sapiens
atgggcctttattcc

SEQ ID NO: 786967 - DNA, 15 bp, Homo sapiens
tgggcctttattcca

SEQ ID NO: 786968 - DNA, 15 bp, Homo sapiens
gggcctttattccat

SEQ ID NO: 786969 - DNA, 15 bp, Homo sapiens
ggcctttattccatc

SEQ ID NO: 786970 - DNA, 15 bp, Homo sapiens
gcctttattccatca

SEQ ID NO: 786971 - DNA, 15 bp, Homo sapiens
cctttattccatcac

SEQ ID NO: 786972 - DNA, 15 bp, Homo sapiens
ctttattccatcact

SEQ ID NO: 786973 - DNA, 15 bp, Homo sapiens
tttattccatcactc

SEQ ID NO: 786974 - DNA, 15 bp, Homo sapiens
ttattccatcactcc

SEQ ID NO: 786975 - DNA, 15 bp, Homo sapiens
tattccatcactccc

SEQ ID NO: 786976 - DNA, 15 bp, Homo sapiens
attccatcactccca

SEQ ID NO: 786977 - DNA, 15 bp, Homo sapiens
ttccatcactcccat

SEQ ID NO: 786978 - DNA, 15 bp, Homo sapiens
tccatcactcccatc

SEQ ID NO: 786979 - DNA, 15 bp, Homo sapiens
ccatcactcccatca

SEQ ID NO: 786980 - DNA, 15 bp, Homo sapiens
catcactcccatcac

SEQ ID NO: 786981 - DNA, 15 bp, Homo sapiens
atcactcccatcact

SEQ ID NO: 786982 - DNA, 15 bp, Homo sapiens
tcactcccatcactc

SEQ ID NO: 786983 - DNA, 15 bp, Homo sapiens
cactcccatcactca

SEQ ID NO: 786984 - DNA, 15 bp, Homo sapiens
actcccatcactcag

SEQ ID NO: 786985 - DNA, 15 bp, Homo sapiens
ctcccatcactcaga

SEQ ID NO: 786986 - DNA, 15 bp, Homo sapiens
tcccatcactcagag

SEQ ID NO: 786987 - DNA, 15 bp, Homo sapiens
cccatcactcagagg

SEQ ID NO: 786988 - DNA, 15 bp, Homo sapiens
ccatcactcagagga

SEQ ID NO: 786989 - DNA, 15 bp, Homo sapiens
catcactcagaggag

SEQ ID NO: 786990 - DNA, 15 bp, Homo sapiens
atcactcagaggagg

SEQ ID NO: 786991 - DNA, 15 bp, Homo sapiens
tcactcagaggaggt

SEQ ID NO: 786992 - DNA, 15 bp, Homo sapiens
cactcagaggaggtg

SEQ ID NO: 786993 - DNA, 15 bp, Homo sapiens
actcagaggaggtgg

SEQ ID NO: 786994 - DNA, 15 bp, Homo sapiens
ctcagaggaggtggg

SEQ ID NO: 786995 - DNA, 15 bp, Homo sapiens
tcagaggaggtgggc

SEQ ID NO: 786996 - DNA, 15 bp, Homo sapiens
cagaggaggtgggct

SEQ ID NO: 786997 - DNA, 15 bp, Homo sapiens
agaggaggtgggctg

SEQ ID NO: 786998 - DNA, 15 bp, Homo sapiens
gaggaggtgggctgc

SEQ ID NO: 786999 - DNA, 15 bp, Homo sapiens
aggaggtgggctgcc

SEQ ID NO: 787000 - DNA, 15 bp, Homo sapiens
ggaggtgggctgccc

SEQ ID NO: 787001 - DNA, 15 bp, Homo sapiens
gaggtgggctgcccc

SEQ ID NO: 787002 - DNA, 15 bp, Homo sapiens
aggtgggctgcccct

SEQ ID NO: 787003 - DNA, 15 bp, Homo sapiens
ggtgggctgcccctg

SEQ ID NO: 787004 - DNA, 15 bp, Homo sapiens
gtgggctgcccctga

SEQ ID NO: 787005 - DNA, 15 bp, Homo sapiens
tgggctgcccctgaa

SEQ ID NO: 787006 - DNA, 15 bp, Homo sapiens
gggctgcccctgaag

SEQ ID NO: 787007 - DNA, 15 bp, Homo sapiens
ggctgcccctgaagg

SEQ ID NO: 787008 - DNA, 15 bp, Homo sapiens
gctgcccctgaaggg

SEQ ID NO: 787009 - DNA, 15 bp, Homo sapiens
ctgcccctgaagggc

SEQ ID NO: 787010 - DNA, 15 bp, Homo sapiens
tgcccctgaagggca

SEQ ID NO: 787011 - DNA, 15 bp, Homo sapiens
gcccctgaagggcat

SEQ ID NO: 787012 - DNA, 15 bp, Homo sapiens
cccctgaagggcatg

SEQ ID NO: 787013 - DNA, 15 bp, Homo sapiens
ccctgaagggcatga

SEQ ID NO: 787014 - DNA, 15 bp, Homo sapiens
cctgaagggcatgac

SEQ ID NO: 787015 - DNA, 15 bp, Homo sapiens
ctgaagggcatgacc

SEQ ID NO: 787016 - DNA, 15 bp, Homo sapiens
tgaagggcatgacct

SEQ ID NO: 787017 - DNA, 15 bp, Homo sapiens
gaagggcatgacctc

SEQ ID NO: 787018 - DNA, 15 bp, Homo sapiens
aagggcatgacctct

SEQ ID NO: 787019 - DNA, 15 bp, Homo sapiens
agggcatgacctctg

SEQ ID NO: 787020 - DNA, 15 bp, Homo sapiens
gggcatgacctctgg

SEQ ID NO: 787021 - DNA, 15 bp, Homo sapiens
ggcatgacctctggc

SEQ ID NO: 787022 - DNA, 15 bp, Homo sapiens
gcatgacctctggcc

SEQ ID NO: 787023 - DNA, 15 bp, Homo sapiens
catgacctctggcca

SEQ ID NO: 787024 - DNA, 15 bp, Homo sapiens
atgacctctggccag

SEQ ID NO: 787025 - DNA, 15 bp, Homo sapiens
tgacctctggccagg

SEQ ID NO: 787026 - DNA, 15 bp, Homo sapiens
gacctctggccaggt

SEQ ID NO: 787027 - DNA, 15 bp, Homo sapiens
acctctggccaggta

SEQ ID NO: 787028 - DNA, 15 bp, Homo sapiens
cctctggccaggtag

SEQ ID NO: 787029 - DNA, 15 bp, Homo sapiens
ctctggccaggtagc

SEQ ID NO: 787030 - DNA, 15 bp, Homo sapiens
tctggccaggtagct

SEQ ID NO: 787031 - DNA, 15 bp, Homo sapiens
ctggccaggtagctc

SEQ ID NO: 787032 - DNA, 15 bp, Homo sapiens
tggccaggtagctct

SEQ ID NO: 787033 - DNA, 15 bp, Homo sapiens
ggccaggtagctctc

SEQ ID NO: 787034 - DNA, 15 bp, Homo sapiens
gccaggtagctctct

SEQ ID NO: 787035 - DNA, 15 bp, Homo sapiens
ccaggtagctctctg

SEQ ID NO: 787036 - DNA, 15 bp, Homo sapiens
caggtagctctctgc

SEQ ID NO: 787037 - DNA, 15 bp, Homo sapiens
aggtagctctctgca

SEQ ID NO: 787038 - DNA, 15 bp, Homo sapiens
ggtagctctctgcaa

SEQ ID NO: 787039 - DNA, 15 bp, Homo sapiens
gtagctctctgcaac

SEQ ID NO: 787040 - DNA, 15 bp, Homo sapiens
tagctctctgcaact

SEQ ID NO: 787041 - DNA, 15 bp, Homo sapiens
agctctctgcaactg

SEQ ID NO: 787042 - DNA, 15 bp, Homo sapiens
gctctctgcaactga

SEQ ID NO: 787043 - DNA, 15 bp, Homo sapiens
ctctctgcaactgag

SEQ ID NO: 787044 - DNA, 15 bp, Homo sapiens
tctctgcaactgagc

SEQ ID NO: 787045 - DNA, 15 bp, Homo sapiens
ctctgcaactgagca

SEQ ID NO: 787046 - DNA, 15 bp, Homo sapiens
tctgcaactgagcaa

SEQ ID NO: 787047 - DNA, 15 bp, Homo sapiens
ctgcaactgagcaag

SEQ ID NO: 787048 - DNA, 15 bp, Homo sapiens
tgcaactgagcaagc

SEQ ID NO: 787049 - DNA, 15 bp, Homo sapiens
gcaactgagcaagcc

SEQ ID NO: 787050 - DNA, 15 bp, Homo sapiens
caactgagcaagccc

SEQ ID NO: 787051 - DNA, 15 bp, Homo sapiens
aactgagcaagccct

SEQ ID NO: 787052 - DNA, 15 bp, Homo sapiens
actgagcaagccctg

SEQ ID NO: 787053 - DNA, 15 bp, Homo sapiens
ctgagcaagccctga

SEQ ID NO: 787054 - DNA, 15 bp, Homo sapiens
tgagcaagccctgaa

SEQ ID NO: 787055 - DNA, 15 bp, Homo sapiens
gagcaagccctgaag

SEQ ID NO: 787056 - DNA, 15 bp, Homo sapiens
agcaagccctgaaga

SEQ ID NO: 787057 - DNA, 15 bp, Homo sapiens
gcaagccctgaagaa

SEQ ID NO: 787058 - DNA, 15 bp, Homo sapiens
caagccctgaagaag

SEQ ID NO: 787059 - DNA, 15 bp, Homo sapiens
aagccctgaagaagc

SEQ ID NO: 787060 - DNA, 15 bp, Homo sapiens
agccctgaagaagct

SEQ ID NO: 787061 - DNA, 15 bp, Homo sapiens
gccctgaagaagctg

SEQ ID NO: 787062 - DNA, 15 bp, Homo sapiens
ccctgaagaagctgc

SEQ ID NO: 787063 - DNA, 15 bp, Homo sapiens
cctgaagaagctgct

SEQ ID NO: 787064 - DNA, 15 bp, Homo sapiens
ctgaagaagctgctg

SEQ ID NO: 787065 - DNA, 15 bp, Homo sapiens
tgaagaagctgctga

SEQ ID NO: 787066 - DNA, 15 bp, Homo sapiens
gaagaagctgctgac

SEQ ID NO: 787067 - DNA, 15 bp, Homo sapiens
aagaagctgctgaca

SEQ ID NO: 787068 - DNA, 15 bp, Homo sapiens
agaagctgctgacaa

SEQ ID NO: 787069 - DNA, 15 bp, Homo sapiens
gaagctgctgacaac

SEQ ID NO: 787070 - DNA, 15 bp, Homo sapiens
aagctgctgacaacc

SEQ ID NO: 787071 - DNA, 15 bp, Homo sapiens
agctgctgacaaccc

SEQ ID NO: 787072 - DNA, 15 bp, Homo sapiens
gctgctgacaaccct

SEQ ID NO: 787073 - DNA, 15 bp, Homo sapiens
ctgctgacaaccctc

SEQ ID NO: 787074 - DNA, 15 bp, Homo sapiens
tgctgacaaccctct

SEQ ID NO: 787075 - DNA, 15 bp, Homo sapiens
gctgacaaccctctc

SEQ ID NO: 787076 - DNA, 15 bp, Homo sapiens
ctgacaaccctctca

SEQ ID NO: 787077 - DNA, 15 bp, Homo sapiens
tgacaaccctctcac

SEQ ID NO: 787078 - DNA, 15 bp, Homo sapiens
gacaaccctctcacg

SEQ ID NO: 787079 - DNA, 15 bp, Homo sapiens
acaaccctctcacga

SEQ ID NO: 787080 - DNA, 15 bp, Homo sapiens
caaccctctcacgag

SEQ ID NO: 787081 - DNA, 15 bp, Homo sapiens
aaccctctcacgagc

SEQ ID NO: 787082 - DNA, 15 bp, Homo sapiens
accctctcacgagct

SEQ ID NO: 787083 - DNA, 15 bp, Homo sapiens
ccctctcacgagctg

SEQ ID NO: 787084 - DNA, 15 bp, Homo sapiens
cctctcacgagctga

SEQ ID NO: 787085 - DNA, 15 bp, Homo sapiens
ctctcacgagctgag

SEQ ID NO: 787086 - DNA, 15 bp, Homo sapiens
tctcacgagctgagc

SEQ ID NO: 787087 - DNA, 15 bp, Homo sapiens
ctcacgagctgagca

SEQ ID NO: 787088 - DNA, 15 bp, Homo sapiens
tcacgagctgagcag

SEQ ID NO: 787089 - DNA, 15 bp, Homo sapiens
cacgagctgagcagc

SEQ ID NO: 787090 - DNA, 15 bp, Homo sapiens
acgagctgagcagca

SEQ ID NO: 787091 - DNA, 15 bp, Homo sapiens
cgagctgagcagcaa

SEQ ID NO: 787092 - DNA, 15 bp, Homo sapiens
gagctgagcagcaag

SEQ ID NO: 787093 - DNA, 15 bp, Homo sapiens
agctgagcagcaagt

SEQ ID NO: 787094 - DNA, 15 bp, Homo sapiens
gctgagcagcaagtc

SEQ ID NO: 787095 - DNA, 15 bp, Homo sapiens
ctgagcagcaagtcc

SEQ ID NO: 787096 - DNA, 15 bp, Homo sapiens
tgagcagcaagtcct

SEQ ID NO: 787097 - DNA, 15 bp, Homo sapiens
gagcagcaagtcctt

SEQ ID NO: 787098 - DNA, 15 bp, Homo sapiens
agcagcaagtccttc

SEQ ID NO: 787099 - DNA, 15 bp, Homo sapiens
gcagcaagtccttct

SEQ ID NO: 787100 - DNA, 15 bp, Homo sapiens
cagcaagtccttctt

SEQ ID NO: 787101 - DNA, 15 bp, Homo sapiens
agcaagtccttcttg

SEQ ID NO: 787102 - DNA, 15 bp, Homo sapiens
gcaagtccttcttga

SEQ ID NO: 787103 - DNA, 15 bp, Homo sapiens
caagtccttcttgaa

SEQ ID NO: 787104 - DNA, 15 bp, Homo sapiens
aagtccttcttgaag

SEQ ID NO: 787105 - DNA, 15 bp, Homo sapiens
agtccttcttgaagg

SEQ ID NO: 787106 - DNA, 15 bp, Homo sapiens
gtccttcttgaaggg

SEQ ID NO: 787107 - DNA, 15 bp, Homo sapiens
tccttcttgaagggg

SEQ ID NO: 787108 - DNA, 15 bp, Homo sapiens
ccttcttgaaggggg

SEQ ID NO: 787109 - DNA, 15 bp, Homo sapiens
cttcttgaagggggt

SEQ ID NO: 787110 - DNA, 15 bp, Homo sapiens
ttcttgaagggggtc

SEQ ID NO: 787111 - DNA, 15 bp, Homo sapiens
tcttgaagggggtct

SEQ ID NO: 787112 - DNA, 15 bp, Homo sapiens
cttgaagggggtctg

SEQ ID NO: 787113 - DNA, 15 bp, Homo sapiens
ttgaagggggtctgt

SEQ ID NO: 787114 - DNA, 15 bp, Homo sapiens
tgaagggggtctgtg

SEQ ID NO: 787115 - DNA, 15 bp, Homo sapiens
gaagggggtctgtgc

SEQ ID NO: 787116 - DNA, 15 bp, Homo sapiens
aagggggtctgtgcc

SEQ ID NO: 787117 - DNA, 15 bp, Homo sapiens
gggggtctgtgcctg

SEQ ID NO: 787118 - DNA, 15 bp, Homo sapiens
ggggtctgtgcctgt

SEQ ID NO: 787119 - DNA, 15 bp, Homo sapiens
gggtctgtgcctgtc

SEQ ID NO: 787120 - DNA, 15 bp, Homo sapiens
ggtctgtgcctgtca

SEQ ID NO: 787121 - DNA, 15 bp, Homo sapiens
gtctgtgcctgtcac

SEQ ID NO: 787122 - DNA, 15 bp, Homo sapiens
tctgtgcctgtcaca

SEQ ID NO: 787123 - DNA, 15 bp, Homo sapiens
ctgtgcctgtcacag

SEQ ID NO: 787124 - DNA, 15 bp, Homo sapiens
tgtgcctgtcacagg

SEQ ID NO: 787125 - DNA, 15 bp, Homo sapiens
gtgcctgtcacagga

SEQ ID NO: 787126 - DNA, 15 bp, Homo sapiens
tgcctgtcacaggat

SEQ ID NO: 787127 - DNA, 15 bp, Homo sapiens
gcctgtcacaggatt

SEQ ID NO: 787128 - DNA, 15 bp, Homo sapiens
cctgtcacaggattt

SEQ ID NO: 787129 - DNA, 15 bp, Homo sapiens
ctgtcacaggatttt

SEQ ID NO: 787130 - DNA, 15 bp, Homo sapiens
tgtcacaggattttc

SEQ ID NO: 787131 - DNA, 15 bp, Homo sapiens
gtcacaggattttct

SEQ ID NO: 787132 - DNA, 15 bp, Homo sapiens
tcacaggattttctc

SEQ ID NO: 787133 - DNA, 15 bp, Homo sapiens
cacaggattttctca

SEQ ID NO: 787134 - DNA, 15 bp, Homo sapiens
acaggattttctcaa

SEQ ID NO: 787135 - DNA, 15 bp, Homo sapiens
caggattttctcaat

SEQ ID NO: 787136 - DNA, 15 bp, Homo sapiens
aggattttctcaatg

SEQ ID NO: 787137 - DNA, 15 bp, Homo sapiens
ggattttctcaatgg

SEQ ID NO: 787138 - DNA, 15 bp, Homo sapiens
gattttctcaatggc

SEQ ID NO: 787139 - DNA, 15 bp, Homo sapiens
attttctcaatggct

SEQ ID NO: 787140 - DNA, 15 bp, Homo sapiens
ttttctcaatggctg

SEQ ID NO: 787141 - DNA, 15 bp, Homo sapiens
tttctcaatggctga

SEQ ID NO: 787142 - DNA, 15 bp, Homo sapiens
ttctcaatggctgag

SEQ ID NO: 787143 - DNA, 15 bp, Homo sapiens
tctcaatggctgagg

SEQ ID NO: 787144 - DNA, 15 bp, Homo sapiens
ctcaatggctgaggc

SEQ ID NO: 787145 - DNA, 15 bp, Homo sapiens
tcaatggctgaggca

SEQ ID NO: 787146 - DNA, 15 bp, Homo sapiens
caatggctgaggcac

SEQ ID NO: 787147 - DNA, 15 bp, Homo sapiens
aatggctgaggcact

SEQ ID NO: 787148 - DNA, 15 bp, Homo sapiens
atggctgaggcactg

SEQ ID NO: 787149 - DNA, 15 bp, Homo sapiens
tggctgaggcactgt

SEQ ID NO: 787150 - DNA, 15 bp, Homo sapiens
ggctgaggcactgtg

SEQ ID NO: 787151 - DNA, 15 bp, Homo sapiens
gctgaggcactgtgt

SEQ ID NO: 787152 - DNA, 15 bp, Homo sapiens
ctgaggcactgtgtt

SEQ ID NO: 787153 - DNA, 15 bp, Homo sapiens
tgaggcactgtgttg

SEQ ID NO: 787154 - DNA, 15 bp, Homo sapiens
gaggcactgtgttga

SEQ ID NO: 787155 - DNA, 15 bp, Homo sapiens
aggcactgtgttgaa

SEQ ID NO: 787156 - DNA, 15 bp, Homo sapiens
ggcactgtgttgaaa

SEQ ID NO: 787157 - DNA, 15 bp, Homo sapiens
gcactgtgttgaaac

SEQ ID NO: 787158 - DNA, 15 bp, Homo sapiens
cactgtgttgaaaca

SEQ ID NO: 787159 - DNA, 15 bp, Homo sapiens
actgtgttgaaacat

SEQ ID NO: 787160 - DNA, 15 bp, Homo sapiens
ctgtgttgaaacatg

SEQ ID NO: 787161 - DNA, 15 bp, Homo sapiens
tgtgttgaaacatgg

SEQ ID NO: 787162 - DNA, 15 bp, Homo sapiens
gtgttgaaacatggc

SEQ ID NO: 787163 - DNA, 15 bp, Homo sapiens
tgttgaaacatggca

SEQ ID NO: 787164 - DNA, 15 bp, Homo sapiens
gttgaaacatggcag

SEQ ID NO: 787165 - DNA, 15 bp, Homo sapiens
ttgaaacatggcaga

SEQ ID NO: 787166 - DNA, 15 bp, Homo sapiens
tgaaacatggcagat

SEQ ID NO: 787167 - DNA, 15 bp, Homo sapiens
gaaacatggcagatc

SEQ ID NO: 787168 - DNA, 15 bp, Homo sapiens
aaacatggcagatca

SEQ ID NO: 787169 - DNA, 15 bp, Homo sapiens
aacatggcagatcaa

SEQ ID NO: 787170 - DNA, 15 bp, Homo sapiens
acatggcagatcaag

SEQ ID NO: 787171 - DNA, 15 bp, Homo sapiens
catggcagatcaagt

SEQ ID NO: 787172 - DNA, 15 bp, Homo sapiens
atggcagatcaagtt

SEQ ID NO: 787173 - DNA, 15 bp, Homo sapiens
tggcagatcaagttg

SEQ ID NO: 787174 - DNA, 15 bp, Homo sapiens
ggcagatcaagttgg

SEQ ID NO: 787175 - DNA, 15 bp, Homo sapiens
gcagatcaagttgga

SEQ ID NO: 787176 - DNA, 15 bp, Homo sapiens
cagatcaagttggaa

SEQ ID NO: 787177 - DNA, 15 bp, Homo sapiens
agatcaagttggaaa

SEQ ID NO: 787178 - DNA, 15 bp, Homo sapiens
gatcaagttggaaag

SEQ ID NO: 787179 - DNA, 15 bp, Homo sapiens
atcaagttggaaagg

SEQ ID NO: 787180 - DNA, 15 bp, Homo sapiens
tcaagttggaaaggc

SEQ ID NO: 787181 - DNA, 15 bp, Homo sapiens
caagttggaaaggct

SEQ ID NO: 787182 - DNA, 15 bp, Homo sapiens
aagttggaaaggctt

SEQ ID NO: 787183 - DNA, 15 bp, Homo sapiens
agttggaaaggcttg

SEQ ID NO: 787184 - DNA, 15 bp, Homo sapiens
gttggaaaggcttgg

SEQ ID NO: 787185 - DNA, 15 bp, Homo sapiens
ttggaaaggcttggt

SEQ ID NO: 787186 - DNA, 15 bp, Homo sapiens
tggaaaggcttggtc

SEQ ID NO: 787187 - DNA, 15 bp, Homo sapiens
ggaaaggcttggtct

SEQ ID NO: 787188 - DNA, 15 bp, Homo sapiens
gaaaggcttggtctc

SEQ ID NO: 787189 - DNA, 15 bp, Homo sapiens
aaaggcttggtctct

SEQ ID NO: 787190 - DNA, 15 bp, Homo sapiens
aaggcttggtctctg

SEQ ID NO: 787191 - DNA, 15 bp, Homo sapiens
aggcttggtctctgt

SEQ ID NO: 787192 - DNA, 15 bp, Homo sapiens
ggcttggtctctgtc

SEQ ID NO: 787193 - DNA, 15 bp, Homo sapiens
gcttggtctctgtcc

SEQ ID NO: 787194 - DNA, 15 bp, Homo sapiens
cttggtctctgtcca

SEQ ID NO: 787195 - DNA, 15 bp, Homo sapiens
ttggtctctgtccat

SEQ ID NO: 787196 - DNA, 15 bp, Homo sapiens
tggtctctgtccatg

SEQ ID NO: 787197 - DNA, 15 bp, Homo sapiens
ggtctctgtccatga

SEQ ID NO: 787198 - DNA, 15 bp, Homo sapiens
gtctctgtccatgaa

SEQ ID NO: 787199 - DNA, 15 bp, Homo sapiens
tctctgtccatgaag

SEQ ID NO: 787200 - DNA, 15 bp, Homo sapiens
ctctgtccatgaagt

SEQ ID NO: 787201 - DNA, 15 bp, Homo sapiens
tctgtccatgaagtg

SEQ ID NO: 787202 - DNA, 15 bp, Homo sapiens
ctgtccatgaagtgc

SEQ ID NO: 787203 - DNA, 15 bp, Homo sapiens
tgtccatgaagtgct

SEQ ID NO: 787204 - DNA, 15 bp, Homo sapiens
gtccatgaagtgctt

SEQ ID NO: 787205 - DNA, 15 bp, Homo sapiens
tccatgaagtgcttg

SEQ ID NO: 787206 - DNA, 15 bp, Homo sapiens
ccatgaagtgcttgc

SEQ ID NO: 787207 - DNA, 15 bp, Homo sapiens
catgaagtgcttgca

SEQ ID NO: 787208 - DNA, 15 bp, Homo sapiens
atgaagtgcttgcag

SEQ ID NO: 787209 - DNA, 15 bp, Homo sapiens
tgaagtgcttgcagt

SEQ ID NO: 787210 - DNA, 15 bp, Homo sapiens
gaagtgcttgcagtg

SEQ ID NO: 787211 - DNA, 15 bp, Homo sapiens
aagtgcttgcagtgc

SEQ ID NO: 787212 - DNA, 15 bp, Homo sapiens
agtgcttgcagtgct

SEQ ID NO: 787213 - DNA, 15 bp, Homo sapiens
gtgcttgcagtgctg

SEQ ID NO: 787214 - DNA, 15 bp, Homo sapiens
tgcttgcagtgctgt

SEQ ID NO: 787215 - DNA, 15 bp, Homo sapiens
gcttgcagtgctgtt

SEQ ID NO: 787216 - DNA, 15 bp, Homo sapiens
cttgcagtgctgttg

SEQ ID NO: 787217 - DNA, 15 bp, Homo sapiens
ttgcagtgctgttgc

SEQ ID NO: 787218 - DNA, 15 bp, Homo sapiens
tgcagtgctgttgcc

SEQ ID NO: 787219 - DNA, 15 bp, Homo sapiens
gcagtgctgttgccc

SEQ ID NO: 787220 - DNA, 15 bp, Homo sapiens
cagtgctgttgccct

SEQ ID NO: 787221 - DNA, 15 bp, Homo sapiens
agtgctgttgccctg

SEQ ID NO: 787222 - DNA, 15 bp, Homo sapiens
gtgctgttgccctga

SEQ ID NO: 787223 - DNA, 15 bp, Homo sapiens
tgctgttgccctgac

SEQ ID NO: 787224 - DNA, 15 bp, Homo sapiens
gctgttgccctgact

SEQ ID NO: 787225 - DNA, 15 bp, Homo sapiens
ctgttgccctgactg

SEQ ID NO: 787226 - DNA, 15 bp, Homo sapiens
tgttgccctgactgc

SEQ ID NO: 787227 - DNA, 15 bp, Homo sapiens
gttgccctgactgca

SEQ ID NO: 787228 - DNA, 15 bp, Homo sapiens
ttgccctgactgcag

SEQ ID NO: 787229 - DNA, 15 bp, Homo sapiens
tgccctgactgcagt

SEQ ID NO: 787230 - DNA, 15 bp, Homo sapiens
gccctgactgcagtg

SEQ ID NO: 787231 - DNA, 15 bp, Homo sapiens
ccctgactgcagtgc

SEQ ID NO: 787232 - DNA, 15 bp, Homo sapiens
cctgactgcagtgcg

SEQ ID NO: 787233 - DNA, 15 bp, Homo sapiens
ctgactgcagtgcgg

SEQ ID NO: 787234 - DNA, 15 bp, Homo sapiens
tgactgcagtgcggt

SEQ ID NO: 787235 - DNA, 15 bp, Homo sapiens
gactgcagtgcggtg

SEQ ID NO: 787236 - DNA, 15 bp, Homo sapiens
actgcagtgcggtgg

SEQ ID NO: 787237 - DNA, 15 bp, Homo sapiens
ctgcagtgcggtgga

SEQ ID NO: 787238 - DNA, 15 bp, Homo sapiens
tgcagtgcggtggat

SEQ ID NO: 787239 - DNA, 15 bp, Homo sapiens
gcagtgcggtggatg

SEQ ID NO: 787240 - DNA, 15 bp, Homo sapiens
cagtgcggtggatgc

SEQ ID NO: 787241 - DNA, 15 bp, Homo sapiens
agtgcggtggatgct

SEQ ID NO: 787242 - DNA, 15 bp, Homo sapiens
gtgcggtggatgcta

SEQ ID NO: 787243 - DNA, 15 bp, Homo sapiens
tgcggtggatgctat

SEQ ID NO: 787244 - DNA, 15 bp, Homo sapiens
gcggtggatgctatt

SEQ ID NO: 787245 - DNA, 15 bp, Homo sapiens
cggtggatgctatta

SEQ ID NO: 787246 - DNA, 15 bp, Homo sapiens
ggtggatgctattat

SEQ ID NO: 787247 - DNA, 15 bp, Homo sapiens
gtggatgctattatg

SEQ ID NO: 787248 - DNA, 15 bp, Homo sapiens
tggatgctattatgg

SEQ ID NO: 787249 - DNA, 15 bp, Homo sapiens
ggatgctattatgga

SEQ ID NO: 787250 - DNA, 15 bp, Homo sapiens
gatgctattatggag

SEQ ID NO: 787251 - DNA, 15 bp, Homo sapiens
atgctattatggagg

SEQ ID NO: 787252 - DNA, 15 bp, Homo sapiens
tgctattatggagga

SEQ ID NO: 787253 - DNA, 15 bp, Homo sapiens
gctattatggaggac

SEQ ID NO: 787254 - DNA, 15 bp, Homo sapiens
ctattatggaggact

SEQ ID NO: 787255 - DNA, 15 bp, Homo sapiens
tattatggaggactc

SEQ ID NO: 787256 - DNA, 15 bp, Homo sapiens
attatggaggactct

SEQ ID NO: 787257 - DNA, 15 bp, Homo sapiens
ttatggaggactctt

SEQ ID NO: 787258 - DNA, 15 bp, Homo sapiens
tatggaggactcttg

SEQ ID NO: 787259 - DNA, 15 bp, Homo sapiens
atggaggactcttgt

SEQ ID NO: 787260 - DNA, 15 bp, Homo sapiens
tggaggactcttgtg

SEQ ID NO: 787261 - DNA, 15 bp, Homo sapiens
ggaggactcttgtgg

SEQ ID NO: 787262 - DNA, 15 bp, Homo sapiens
gaggactcttgtggt

SEQ ID NO: 787263 - DNA, 15 bp, Homo sapiens
aggactcttgtggtg

SEQ ID NO: 787264 - DNA, 15 bp, Homo sapiens
ggactcttgtggtgg

SEQ ID NO: 787265 - DNA, 15 bp, Homo sapiens
gactcttgtggtggc

SEQ ID NO: 787266 - DNA, 15 bp, Homo sapiens
actcttgtggtggct

SEQ ID NO: 787267 - DNA, 15 bp, Homo sapiens
ctcttgtggtggctg

SEQ ID NO: 787268 - DNA, 15 bp, Homo sapiens
tcttgtggtggctgc

SEQ ID NO: 787269 - DNA, 15 bp, Homo sapiens
cttgtggtggctgct

SEQ ID NO: 787270 - DNA, 15 bp, Homo sapiens
ttgtggtggctgctt

SEQ ID NO: 787271 - DNA, 15 bp, Homo sapiens
tgtggtggctgcttg

SEQ ID NO: 787272 - DNA, 15 bp, Homo sapiens
gtggtggctgcttgg

SEQ ID NO: 787273 - DNA, 15 bp, Homo sapiens
tggtggctgcttggt

SEQ ID NO: 787274 - DNA, 15 bp, Homo sapiens
ggtggctgcttggta

SEQ ID NO: 787275 - DNA, 15 bp, Homo sapiens
gtggctgcttggtag

SEQ ID NO: 787276 - DNA, 15 bp, Homo sapiens
tggctgcttggtagc

SEQ ID NO: 787277 - DNA, 15 bp, Homo sapiens
ggctgcttggtagcc

SEQ ID NO: 787278 - DNA, 15 bp, Homo sapiens
gctgcttggtagccc

SEQ ID NO: 787279 - DNA, 15 bp, Homo sapiens
ctgcttggtagcccc

SEQ ID NO: 787280 - DNA, 15 bp, Homo sapiens
tgcttggtagcccca

SEQ ID NO: 787281 - DNA, 15 bp, Homo sapiens
gcttggtagccccag

SEQ ID NO: 787282 - DNA, 15 bp, Homo sapiens
cttggtagccccagg

SEQ ID NO: 787283 - DNA, 15 bp, Homo sapiens
ttggtagccccaggc

SEQ ID NO: 787284 - DNA, 15 bp, Homo sapiens
tggtagccccaggca

SEQ ID NO: 787285 - DNA, 15 bp, Homo sapiens
ggtagccccaggcag

SEQ ID NO: 787286 - DNA, 15 bp, Homo sapiens
gtagccccaggcagg

SEQ ID NO: 787287 - DNA, 15 bp, Homo sapiens
tagccccaggcaggc

SEQ ID NO: 787288 - DNA, 15 bp, Homo sapiens
agccccaggcaggca

SEQ ID NO: 787289 - DNA, 15 bp, Homo sapiens
gccccaggcaggcac

SEQ ID NO: 787290 - DNA, 15 bp, Homo sapiens
ccccaggcaggcacc

SEQ ID NO: 787291 - DNA, 15 bp, Homo sapiens
cccaggcaggcacca

SEQ ID NO: 787292 - DNA, 15 bp, Homo sapiens
ccaggcaggcaccag

SEQ ID NO: 787293 - DNA, 15 bp, Homo sapiens
caggcaggcaccagg

SEQ ID NO: 787294 - DNA, 15 bp, Homo sapiens
aggcaggcaccaggt

SEQ ID NO: 787295 - DNA, 15 bp, Homo sapiens
ggcaggcaccaggtc

SEQ ID NO: 787296 - DNA, 15 bp, Homo sapiens
gcaggcaccaggtca

SEQ ID NO: 787297 - DNA, 15 bp, Homo sapiens
caggcaccaggtcat

SEQ ID NO: 787298 - DNA, 15 bp, Homo sapiens
aggcaccaggtcatt

SEQ ID NO: 787299 - DNA, 15 bp, Homo sapiens
ggcaccaggtcatta

SEQ ID NO: 787300 - DNA, 15 bp, Homo sapiens
gcaccaggtcattaa

SEQ ID NO: 787301 - DNA, 15 bp, Homo sapiens
caccaggtcattaac

SEQ ID NO: 787302 - DNA, 15 bp, Homo sapiens
accaggtcattaaca

SEQ ID NO: 787303 - DNA, 15 bp, Homo sapiens
ccaggtcattaacag

SEQ ID NO: 787304 - DNA, 15 bp, Homo sapiens
caggtcattaacagc

SEQ ID NO: 787305 - DNA, 15 bp, Homo sapiens
aggtcattaacagcc

SEQ ID NO: 787306 - DNA, 15 bp, Homo sapiens
ggtcattaacagccg

SEQ ID NO: 787307 - DNA, 15 bp, Homo sapiens
gtcattaacagccgc

SEQ ID NO: 787308 - DNA, 15 bp, Homo sapiens
tcattaacagccgcg

SEQ ID NO: 787309 - DNA, 15 bp, Homo sapiens
cattaacagccgcgt

SEQ ID NO: 787310 - DNA, 15 bp, Homo sapiens
attaacagccgcgtg

SEQ ID NO: 787311 - DNA, 15 bp, Homo sapiens
ttaacagccgcgtga

SEQ ID NO: 787312 - DNA, 15 bp, Homo sapiens
taacagccgcgtgaa

SEQ ID NO: 787313 - DNA, 15 bp, Homo sapiens
aacagccgcgtgaat

SEQ ID NO: 787314 - DNA, 15 bp, Homo sapiens
acagccgcgtgaatt

SEQ ID NO: 787315 - DNA, 15 bp, Homo sapiens
cagccgcgtgaattc

SEQ ID NO: 787316 - DNA, 15 bp, Homo sapiens
agccgcgtgaattcc

SEQ ID NO: 787317 - DNA, 15 bp, Homo sapiens
gccgcgtgaattccc

SEQ ID NO: 787318 - DNA, 15 bp, Homo sapiens
ccgcgtgaattccct

SEQ ID NO: 787319 - DNA, 15 bp, Homo sapiens
cgcgtgaattccctt

SEQ ID NO: 787320 - DNA, 15 bp, Homo sapiens
gcgtgaattcccttg

SEQ ID NO: 787321 - DNA, 15 bp, Homo sapiens
cgtgaattcccttgt

SEQ ID NO: 787322 - DNA, 15 bp, Homo sapiens
gtgaattcccttgtc

SEQ ID NO: 787323 - DNA, 15 bp, Homo sapiens
tgaattcccttgtca

SEQ ID NO: 787324 - DNA, 15 bp, Homo sapiens
gaattcccttgtcac

SEQ ID NO: 787325 - DNA, 15 bp, Homo sapiens
aattcccttgtcact

SEQ ID NO: 787326 - DNA, 15 bp, Homo sapiens
attcccttgtcactc

SEQ ID NO: 787327 - DNA, 15 bp, Homo sapiens
ttcccttgtcactcc

SEQ ID NO: 787328 - DNA, 15 bp, Homo sapiens
tcccttgtcactcct

SEQ ID NO: 787329 - DNA, 15 bp, Homo sapiens
cccttgtcactccta

SEQ ID NO: 787330 - DNA, 15 bp, Homo sapiens
ccttgtcactcctag

SEQ ID NO: 787331 - DNA, 15 bp, Homo sapiens
cttgtcactcctagg

SEQ ID NO: 787332 - DNA, 15 bp, Homo sapiens
ttgtcactcctagga

SEQ ID NO: 787333 - DNA, 15 bp, Homo sapiens
tgtcactcctaggag

SEQ ID NO: 787334 - DNA, 15 bp, Homo sapiens
gtcactcctaggaga

SEQ ID NO: 787335 - DNA, 15 bp, Homo sapiens
tcactcctaggagat

SEQ ID NO: 787336 - DNA, 15 bp, Homo sapiens
cactcctaggagata

SEQ ID NO: 787337 - DNA, 15 bp, Homo sapiens
actcctaggagatat

SEQ ID NO: 787338 - DNA, 15 bp, Homo sapiens
ctcctaggagatata

SEQ ID NO: 787339 - DNA, 15 bp, Homo sapiens
tcctaggagatatat

SEQ ID NO: 787340 - DNA, 15 bp, Homo sapiens
cctaggagatatata

SEQ ID NO: 787341 - DNA, 15 bp, Homo sapiens
ctaggagatatatac

SEQ ID NO: 787342 - DNA, 15 bp, Homo sapiens
taggagatatatacc

SEQ ID NO: 787343 - DNA, 15 bp, Homo sapiens
aggagatatatacct

SEQ ID NO: 787344 - DNA, 15 bp, Homo sapiens
ggagatatatacctg

SEQ ID NO: 787345 - DNA, 15 bp, Homo sapiens
gagatatatacctgc

SEQ ID NO: 787346 - DNA, 15 bp, Homo sapiens
agatatatacctgca

SEQ ID NO: 787347 - DNA, 15 bp, Homo sapiens
gatatatacctgcac

SEQ ID NO: 787348 - DNA, 15 bp, Homo sapiens
atatatacctgcacc

SEQ ID NO: 787349 - DNA, 15 bp, Homo sapiens
tatatacctgcacct

SEQ ID NO: 787350 - DNA, 15 bp, Homo sapiens
atatacctgcacctc

SEQ ID NO: 787351 - DNA, 15 bp, Homo sapiens
tatacctgcacctct

SEQ ID NO: 787352 - DNA, 15 bp, Homo sapiens
atacctgcacctctg

SEQ ID NO: 787353 - DNA, 15 bp, Homo sapiens
tacctgcacctctgt

SEQ ID NO: 787354 - DNA, 15 bp, Homo sapiens
acctgcacctctgtt

SEQ ID NO: 787355 - DNA, 15 bp, Homo sapiens
cctgcacctctgttt

SEQ ID NO: 787356 - DNA, 15 bp, Homo sapiens
ctgcacctctgtttt

SEQ ID NO: 787357 - DNA, 15 bp, Homo sapiens
tgcacctctgttttg

SEQ ID NO: 787358 - DNA, 15 bp, Homo sapiens
gcacctctgttttgc

SEQ ID NO: 787359 - DNA, 15 bp, Homo sapiens
cacctctgttttgct

SEQ ID NO: 787360 - DNA, 15 bp, Homo sapiens
acctctgttttgctg

SEQ ID NO: 787361 - DNA, 15 bp, Homo sapiens
cctctgttttgctga

SEQ ID NO: 787362 - DNA, 15 bp, Homo sapiens
ctctgttttgctgaa

SEQ ID NO: 787363 - DNA, 15 bp, Homo sapiens
tctgttttgctgaag

SEQ ID NO: 787364 - DNA, 15 bp, Homo sapiens
ctgttttgctgaaga

SEQ ID NO: 787365 - DNA, 15 bp, Homo sapiens
tgttttgctgaagaa

SEQ ID NO: 787366 - DNA, 15 bp, Homo sapiens
gttttgctgaagaag

SEQ ID NO: 787367 - DNA, 15 bp, Homo sapiens
ttttgctgaagaaga

SEQ ID NO: 787368 - DNA, 15 bp, Homo sapiens
tttgctgaagaagaa

SEQ ID NO: 787369 - DNA, 15 bp, Homo sapiens
ttgctgaagaagaaa

SEQ ID NO: 787370 - DNA, 15 bp, Homo sapiens
tgctgaagaagaaag

SEQ ID NO: 787371 - DNA, 15 bp, Homo sapiens
gctgaagaagaaagt

SEQ ID NO: 787372 - DNA, 15 bp, Homo sapiens
ctgaagaagaaagtg

SEQ ID NO: 787373 - DNA, 15 bp, Homo sapiens
tgaagaagaaagtga

SEQ ID NO: 787374 - DNA, 15 bp, Homo sapiens
aagaagaaagtgagg

SEQ ID NO: 787375 - DNA, 15 bp, Homo sapiens
agaagaaagtgaggt

SEQ ID NO: 787376 - DNA, 15 bp, Homo sapiens
gaagaaagtgaggtt

SEQ ID NO: 787377 - DNA, 15 bp, Homo sapiens
aagaaagtgaggttc

SEQ ID NO: 787378 - DNA, 15 bp, Homo sapiens
agaaagtgaggttct

SEQ ID NO: 787379 - DNA, 15 bp, Homo sapiens
gaaagtgaggttctg

SEQ ID NO: 787380 - DNA, 15 bp, Homo sapiens
aaagtgaggttctga

SEQ ID NO: 787381 - DNA, 15 bp, Homo sapiens
aagtgaggttctgaa

SEQ ID NO: 787382 - DNA, 15 bp, Homo sapiens
agtgaggttctgaag

SEQ ID NO: 787383 - DNA, 15 bp, Homo sapiens
gtgaggttctgaagt

SEQ ID NO: 787384 - DNA, 15 bp, Homo sapiens
tgaggttctgaagtg

SEQ ID NO: 787385 - DNA, 15 bp, Homo sapiens
gaggttctgaagtgt

SEQ ID NO: 787386 - DNA, 15 bp, Homo sapiens
aggttctgaagtgtt

SEQ ID NO: 787387 - DNA, 15 bp, Homo sapiens
ggttctgaagtgttg

SEQ ID NO: 787388 - DNA, 15 bp, Homo sapiens
gttctgaagtgttga

SEQ ID NO: 787389 - DNA, 15 bp, Homo sapiens
ttctgaagtgttgag

SEQ ID NO: 787390 - DNA, 15 bp, Homo sapiens
tctgaagtgttgagt

SEQ ID NO: 787391 - DNA, 15 bp, Homo sapiens
ctgaagtgttgagta

SEQ ID NO: 787392 - DNA, 15 bp, Homo sapiens
tgaagtgttgagtag

SEQ ID NO: 787393 - DNA, 15 bp, Homo sapiens
gaagtgttgagtagc

SEQ ID NO: 787394 - DNA, 15 bp, Homo sapiens
aagtgttgagtagct

SEQ ID NO: 787395 - DNA, 15 bp, Homo sapiens
agtgttgagtagctc

SEQ ID NO: 787396 - DNA, 15 bp, Homo sapiens
gtgttgagtagctcc

SEQ ID NO: 787397 - DNA, 15 bp, Homo sapiens
tgttgagtagctcct

SEQ ID NO: 787398 - DNA, 15 bp, Homo sapiens
gttgagtagctccta

SEQ ID NO: 787399 - DNA, 15 bp, Homo sapiens
ttgagtagctcctag

SEQ ID NO: 787400 - DNA, 15 bp, Homo sapiens
tgagtagctcctagg

SEQ ID NO: 787401 - DNA, 15 bp, Homo sapiens
gagtagctcctaggg

SEQ ID NO: 787402 - DNA, 15 bp, Homo sapiens
agtagctcctagggg

SEQ ID NO: 787403 - DNA, 15 bp, Homo sapiens
gtagctcctaggggt

SEQ ID NO: 787404 - DNA, 15 bp, Homo sapiens
tagctcctaggggta

SEQ ID NO: 787405 - DNA, 15 bp, Homo sapiens
agctcctaggggtaa

SEQ ID NO: 787406 - DNA, 15 bp, Homo sapiens
gctcctaggggtaat

SEQ ID NO: 787407 - DNA, 15 bp, Homo sapiens
ctcctaggggtaata

SEQ ID NO: 787408 - DNA, 15 bp, Homo sapiens
tcctaggggtaatac

SEQ ID NO: 787409 - DNA, 15 bp, Homo sapiens
cctaggggtaatacg

SEQ ID NO: 787410 - DNA, 15 bp, Homo sapiens
ctaggggtaatacgg

SEQ ID NO: 787411 - DNA, 15 bp, Homo sapiens
taggggtaatacggc

SEQ ID NO: 787412 - DNA, 15 bp, Homo sapiens
aggggtaatacggcc

SEQ ID NO: 787413 - DNA, 15 bp, Homo sapiens
ggggtaatacggcca

SEQ ID NO: 787414 - DNA, 15 bp, Homo sapiens
gggtaatacggccag

SEQ ID NO: 787415 - DNA, 15 bp, Homo sapiens
ggtaatacggccagc

SEQ ID NO: 787416 - DNA, 15 bp, Homo sapiens
gtaatacggccagct

SEQ ID NO: 787417 - DNA, 15 bp, Homo sapiens
taatacggccagctg

SEQ ID NO: 787418 - DNA, 15 bp, Homo sapiens
aatacggccagctgg

SEQ ID NO: 787419 - DNA, 15 bp, Homo sapiens
atacggccagctggg

SEQ ID NO: 787420 - DNA, 15 bp, Homo sapiens
tacggccagctggga

SEQ ID NO: 787421 - DNA, 15 bp, Homo sapiens
acggccagctgggaa

SEQ ID NO: 787422 - DNA, 15 bp, Homo sapiens
cggccagctgggaaa

SEQ ID NO: 787423 - DNA, 15 bp, Homo sapiens
ggccagctgggaaag

SEQ ID NO: 787424 - DNA, 15 bp, Homo sapiens
gccagctgggaaaga

SEQ ID NO: 787425 - DNA, 15 bp, Homo sapiens
ccagctgggaaagat

SEQ ID NO: 787426 - DNA, 15 bp, Homo sapiens
cagctgggaaagatg

SEQ ID NO: 787427 - DNA, 15 bp, Homo sapiens
agctgggaaagatgc

SEQ ID NO: 787428 - DNA, 15 bp, Homo sapiens
gctgggaaagatgcc

SEQ ID NO: 787429 - DNA, 15 bp, Homo sapiens
ctgggaaagatgcca

SEQ ID NO: 787430 - DNA, 15 bp, Homo sapiens
tgggaaagatgccag

SEQ ID NO: 787431 - DNA, 15 bp, Homo sapiens
gggaaagatgccagg

SEQ ID NO: 787432 - DNA, 15 bp, Homo sapiens
ggaaagatgccagga

SEQ ID NO: 787433 - DNA, 15 bp, Homo sapiens
gaaagatgccaggat

SEQ ID NO: 787434 - DNA, 15 bp, Homo sapiens
aaagatgccaggatt

SEQ ID NO: 787435 - DNA, 15 bp, Homo sapiens
aagatgccaggattc

SEQ ID NO: 787436 - DNA, 15 bp, Homo sapiens
agatgccaggattca

SEQ ID NO: 787437 - DNA, 15 bp, Homo sapiens
gatgccaggattcaa

SEQ ID NO: 787438 - DNA, 15 bp, Homo sapiens
atgccaggattcaaa

SEQ ID NO: 787439 - DNA, 15 bp, Homo sapiens
tgccaggattcaaac

SEQ ID NO: 787440 - DNA, 15 bp, Homo sapiens
gccaggattcaaact

SEQ ID NO: 787441 - DNA, 15 bp, Homo sapiens
ccaggattcaaactt

SEQ ID NO: 787442 - DNA, 15 bp, Homo sapiens
caggattcaaactta

SEQ ID NO: 787443 - DNA, 15 bp, Homo sapiens
aggattcaaacttag

SEQ ID NO: 787444 - DNA, 15 bp, Homo sapiens
ggattcaaacttagg

SEQ ID NO: 787445 - DNA, 15 bp, Homo sapiens
gattcaaacttaggt

SEQ ID NO: 787446 - DNA, 15 bp, Homo sapiens
attcaaacttaggtc

SEQ ID NO: 787447 - DNA, 15 bp, Homo sapiens
ttcaaacttaggtcg

SEQ ID NO: 787448 - DNA, 15 bp, Homo sapiens
tcaaacttaggtcgg

SEQ ID NO: 787449 - DNA, 15 bp, Homo sapiens
caaacttaggtcgga

SEQ ID NO: 787450 - DNA, 15 bp, Homo sapiens
aaacttaggtcggac

SEQ ID NO: 787451 - DNA, 15 bp, Homo sapiens
aacttaggtcggact

SEQ ID NO: 787452 - DNA, 15 bp, Homo sapiens
acttaggtcggactc

SEQ ID NO: 787453 - DNA, 15 bp, Homo sapiens
cttaggtcggactct

SEQ ID NO: 787454 - DNA, 15 bp, Homo sapiens
ttaggtcggactctg

SEQ ID NO: 787455 - DNA, 15 bp, Homo sapiens
taggtcggactctga

SEQ ID NO: 787456 - DNA, 15 bp, Homo sapiens
aggtcggactctgaa

SEQ ID NO: 787457 - DNA, 15 bp, Homo sapiens
ggtcggactctgaag

SEQ ID NO: 787458 - DNA, 15 bp, Homo sapiens
gtcggactctgaagg

SEQ ID NO: 787459 - DNA, 15 bp, Homo sapiens
tcggactctgaaggc

SEQ ID NO: 787460 - DNA, 15 bp, Homo sapiens
cggactctgaaggca

SEQ ID NO: 787461 - DNA, 15 bp, Homo sapiens
ggactctgaaggcag

SEQ ID NO: 787462 - DNA, 15 bp, Homo sapiens
gactctgaaggcagt

SEQ ID NO: 787463 - DNA, 15 bp, Homo sapiens
actctgaaggcagtg

SEQ ID NO: 787464 - DNA, 15 bp, Homo sapiens
ctctgaaggcagtgt

SEQ ID NO: 787465 - DNA, 15 bp, Homo sapiens
tctgaaggcagtgtg

SEQ ID NO: 787466 - DNA, 15 bp, Homo sapiens
ctgaaggcagtgtgc

SEQ ID NO: 787467 - DNA, 15 bp, Homo sapiens
tgaaggcagtgtgct

SEQ ID NO: 787468 - DNA, 15 bp, Homo sapiens
gaaggcagtgtgctt

SEQ ID NO: 787469 - DNA, 15 bp, Homo sapiens
aaggcagtgtgcttt

SEQ ID NO: 787470 - DNA, 15 bp, Homo sapiens
aggcagtgtgctttc

SEQ ID NO: 787471 - DNA, 15 bp, Homo sapiens
ggcagtgtgctttcc

SEQ ID NO: 787472 - DNA, 15 bp, Homo sapiens
gcagtgtgctttcct

SEQ ID NO: 787473 - DNA, 15 bp, Homo sapiens
cagtgtgctttcctt

SEQ ID NO: 787474 - DNA, 15 bp, Homo sapiens
agtgtgctttccttt

SEQ ID NO: 787475 - DNA, 15 bp, Homo sapiens
gtgtgctttccttta

SEQ ID NO: 787476 - DNA, 15 bp, Homo sapiens
tgtgctttcctttat

SEQ ID NO: 787477 - DNA, 15 bp, Homo sapiens
gtgctttcctttatt

SEQ ID NO: 787478 - DNA, 15 bp, Homo sapiens
tgctttcctttattc

SEQ ID NO: 787479 - DNA, 15 bp, Homo sapiens
gctttcctttattca

SEQ ID NO: 787480 - DNA, 15 bp, Homo sapiens
ctttcctttattcat

SEQ ID NO: 787481 - DNA, 15 bp, Homo sapiens
tttcctttattcata

SEQ ID NO: 787482 - DNA, 15 bp, Homo sapiens
ttcctttattcataa

SEQ ID NO: 787483 - DNA, 15 bp, Homo sapiens
tcctttattcataat

SEQ ID NO: 787484 - DNA, 15 bp, Homo sapiens
cctttattcataatt

SEQ ID NO: 787485 - DNA, 15 bp, Homo sapiens
ctttattcataattg

SEQ ID NO: 787486 - DNA, 15 bp, Homo sapiens
tttattcataattgc

SEQ ID NO: 787487 - DNA, 15 bp, Homo sapiens
ttattcataattgcc

SEQ ID NO: 787488 - DNA, 15 bp, Homo sapiens
tattcataattgcct

SEQ ID NO: 787489 - DNA, 15 bp, Homo sapiens
attcataattgcctt

SEQ ID NO: 787490 - DNA, 15 bp, Homo sapiens
ttcataattgccttt

SEQ ID NO: 787491 - DNA, 15 bp, Homo sapiens
tcataattgcctttg

SEQ ID NO: 787492 - DNA, 15 bp, Homo sapiens
cataattgcctttga

SEQ ID NO: 787493 - DNA, 15 bp, Homo sapiens
ataattgcctttgag

SEQ ID NO: 787494 - DNA, 15 bp, Homo sapiens
taattgcctttgaga

SEQ ID NO: 787495 - DNA, 15 bp, Homo sapiens
aattgcctttgagat

SEQ ID NO: 787496 - DNA, 15 bp, Homo sapiens
attgcctttgagatt

SEQ ID NO: 787497 - DNA, 15 bp, Homo sapiens
ttgcctttgagattg

SEQ ID NO: 787498 - DNA, 15 bp, Homo sapiens
tgcctttgagattga

SEQ ID NO: 787499 - DNA, 15 bp, Homo sapiens
gcctttgagattgaa

SEQ ID NO: 787500 - DNA, 15 bp, Homo sapiens
cctttgagattgaag

SEQ ID NO: 787501 - DNA, 15 bp, Homo sapiens
ctttgagattgaagg

SEQ ID NO: 787502 - DNA, 15 bp, Homo sapiens
tttgagattgaaggc

SEQ ID NO: 787503 - DNA, 15 bp, Homo sapiens
ttgagattgaaggca

SEQ ID NO: 787504 - DNA, 15 bp, Homo sapiens
tgagattgaaggcag

SEQ ID NO: 787505 - DNA, 15 bp, Homo sapiens
gagattgaaggcaga

SEQ ID NO: 787506 - DNA, 15 bp, Homo sapiens
agattgaaggcagag

SEQ ID NO: 787507 - DNA, 15 bp, Homo sapiens
gattgaaggcagagc

SEQ ID NO: 787508 - DNA, 15 bp, Homo sapiens
attgaaggcagagcc

SEQ ID NO: 787509 - DNA, 15 bp, Homo sapiens
ttgaaggcagagcca

SEQ ID NO: 787510 - DNA, 15 bp, Homo sapiens
tgaaggcagagccaa

SEQ ID NO: 787511 - DNA, 15 bp, Homo sapiens
gaaggcagagccaac

SEQ ID NO: 787512 - DNA, 15 bp, Homo sapiens
aaggcagagccaaca

SEQ ID NO: 787513 - DNA, 15 bp, Homo sapiens
aggcagagccaacag

SEQ ID NO: 787514 - DNA, 15 bp, Homo sapiens
ggcagagccaacagg

SEQ ID NO: 787515 - DNA, 15 bp, Homo sapiens
gcagagccaacagga

SEQ ID NO: 787516 - DNA, 15 bp, Homo sapiens
cagagccaacaggag

SEQ ID NO: 787517 - DNA, 15 bp, Homo sapiens
agagccaacaggagc

SEQ ID NO: 787518 - DNA, 15 bp, Homo sapiens
gagccaacaggagca

SEQ ID NO: 787519 - DNA, 15 bp, Homo sapiens
agccaacaggagcag

SEQ ID NO: 787520 - DNA, 15 bp, Homo sapiens
gccaacaggagcagg

SEQ ID NO: 787521 - DNA, 15 bp, Homo sapiens
ccaacaggagcagga

SEQ ID NO: 787522 - DNA, 15 bp, Homo sapiens
caacaggagcaggac

SEQ ID NO: 787523 - DNA, 15 bp, Homo sapiens
aacaggagcaggacc

SEQ ID NO: 787524 - DNA, 15 bp, Homo sapiens
acaggagcaggacca

SEQ ID NO: 787525 - DNA, 15 bp, Homo sapiens
caggagcaggaccat

SEQ ID NO: 787526 - DNA, 15 bp, Homo sapiens
aggagcaggaccatt

SEQ ID NO: 787527 - DNA, 15 bp, Homo sapiens
ggagcaggaccattg

SEQ ID NO: 787528 - DNA, 15 bp, Homo sapiens
gagcaggaccattgt

SEQ ID NO: 787529 - DNA, 15 bp, Homo sapiens
agcaggaccattgtg

SEQ ID NO: 787530 - DNA, 15 bp, Homo sapiens
gcaggaccattgtgg

SEQ ID NO: 787531 - DNA, 15 bp, Homo sapiens
caggaccattgtggg

SEQ ID NO: 787532 - DNA, 15 bp, Homo sapiens
aggaccattgtgggt

SEQ ID NO: 787533 - DNA, 15 bp, Homo sapiens
ggaccattgtgggtg

SEQ ID NO: 787534 - DNA, 15 bp, Homo sapiens
gaccattgtgggtgt

SEQ ID NO: 787535 - DNA, 15 bp, Homo sapiens
accattgtgggtgtt

SEQ ID NO: 787536 - DNA, 15 bp, Homo sapiens
ccattgtgggtgttc

SEQ ID NO: 787537 - DNA, 15 bp, Homo sapiens
cattgtgggtgttca

SEQ ID NO: 787538 - DNA, 15 bp, Homo sapiens
attgtgggtgttcag

SEQ ID NO: 787539 - DNA, 15 bp, Homo sapiens
ttgtgggtgttcagc

SEQ ID NO: 787540 - DNA, 15 bp, Homo sapiens
tgtgggtgttcagca

SEQ ID NO: 787541 - DNA, 15 bp, Homo sapiens
gtgggtgttcagcag

SEQ ID NO: 787542 - DNA, 15 bp, Homo sapiens
tgggtgttcagcagt

SEQ ID NO: 787543 - DNA, 15 bp, Homo sapiens
gggtgttcagcagtg

SEQ ID NO: 787544 - DNA, 15 bp, Homo sapiens
ggtgttcagcagtgt

SEQ ID NO: 787545 - DNA, 15 bp, Homo sapiens
gtgttcagcagtgtc

SEQ ID NO: 787546 - DNA, 15 bp, Homo sapiens
tgttcagcagtgtcc

SEQ ID NO: 787547 - DNA, 15 bp, Homo sapiens
gttcagcagtgtccc

SEQ ID NO: 787548 - DNA, 15 bp, Homo sapiens
ttcagcagtgtcccc

SEQ ID NO: 787549 - DNA, 15 bp, Homo sapiens
tcagcagtgtcccct

SEQ ID NO: 787550 - DNA, 15 bp, Homo sapiens
cagcagtgtcccctc

SEQ ID NO: 787551 - DNA, 15 bp, Homo sapiens
agcagtgtcccctct

SEQ ID NO: 787552 - DNA, 15 bp, Homo sapiens
gcagtgtcccctctc

SEQ ID NO: 787553 - DNA, 15 bp, Homo sapiens
cagtgtcccctctcc

SEQ ID NO: 787554 - DNA, 15 bp, Homo sapiens
agtgtcccctctcct

SEQ ID NO: 787555 - DNA, 15 bp, Homo sapiens
gtgtcccctctccta

SEQ ID NO: 787556 - DNA, 15 bp, Homo sapiens
tgtcccctctcctac

SEQ ID NO: 787557 - DNA, 15 bp, Homo sapiens
gtcccctctcctacc

SEQ ID NO: 787558 - DNA, 15 bp, Homo sapiens
tcccctctcctaccc

SEQ ID NO: 787559 - DNA, 15 bp, Homo sapiens
cccctctcctaccct

SEQ ID NO: 787560 - DNA, 15 bp, Homo sapiens
ccctctcctaccctt

SEQ ID NO: 787561 - DNA, 15 bp, Homo sapiens
cctctcctacccttg

SEQ ID NO: 787562 - DNA, 15 bp, Homo sapiens
ctctcctacccttgc

SEQ ID NO: 787563 - DNA, 15 bp, Homo sapiens
tctcctacccttgct

SEQ ID NO: 787564 - DNA, 15 bp, Homo sapiens
ctcctacccttgctc

SEQ ID NO: 787565 - DNA, 15 bp, Homo sapiens
tcctacccttgctca

SEQ ID NO: 787566 - DNA, 15 bp, Homo sapiens
cctacccttgctcat

SEQ ID NO: 787567 - DNA, 15 bp, Homo sapiens
ctacccttgctcata

SEQ ID NO: 787568 - DNA, 15 bp, Homo sapiens
tacccttgctcatac

SEQ ID NO: 787569 - DNA, 15 bp, Homo sapiens
acccttgctcatacc

SEQ ID NO: 787570 - DNA, 15 bp, Homo sapiens
cccttgctcataccc

SEQ ID NO: 787571 - DNA, 15 bp, Homo sapiens
ccttgctcataccca

SEQ ID NO: 787572 - DNA, 15 bp, Homo sapiens
cttgctcatacccag

SEQ ID NO: 787573 - DNA, 15 bp, Homo sapiens
ttgctcatacccagt

SEQ ID NO: 787574 - DNA, 15 bp, Homo sapiens
tgctcatacccagtt

SEQ ID NO: 787575 - DNA, 15 bp, Homo sapiens
gctcatacccagttt

SEQ ID NO: 787576 - DNA, 15 bp, Homo sapiens
ctcatacccagtttt

SEQ ID NO: 787577 - DNA, 15 bp, Homo sapiens
tcatacccagtttta

SEQ ID NO: 787578 - DNA, 15 bp, Homo sapiens
catacccagttttag

SEQ ID NO: 787579 - DNA, 15 bp, Homo sapiens
atacccagttttagc

SEQ ID NO: 787580 - DNA, 15 bp, Homo sapiens
tacccagttttagct

SEQ ID NO: 787581 - DNA, 15 bp, Homo sapiens
acccagttttagctc

SEQ ID NO: 787582 - DNA, 15 bp, Homo sapiens
cccagttttagctct

SEQ ID NO: 787583 - DNA, 15 bp, Homo sapiens
ccagttttagctctg

SEQ ID NO: 787584 - DNA, 15 bp, Homo sapiens
cagttttagctctgt

SEQ ID NO: 787585 - DNA, 15 bp, Homo sapiens
agttttagctctgtg

SEQ ID NO: 787586 - DNA, 15 bp, Homo sapiens
gttttagctctgtgc

SEQ ID NO: 787587 - DNA, 15 bp, Homo sapiens
ttttagctctgtgcc

SEQ ID NO: 787588 - DNA, 15 bp, Homo sapiens
tttagctctgtgcct

SEQ ID NO: 787589 - DNA, 15 bp, Homo sapiens
ttagctctgtgcctg

SEQ ID NO: 787590 - DNA, 15 bp, Homo sapiens
tagctctgtgcctgg

SEQ ID NO: 787591 - DNA, 15 bp, Homo sapiens
agctctgtgcctgga

SEQ ID NO: 787592 - DNA, 15 bp, Homo sapiens
gctctgtgcctggac

SEQ ID NO: 787593 - DNA, 15 bp, Homo sapiens
ctctgtgcctggact

SEQ ID NO: 787594 - DNA, 15 bp, Homo sapiens
tctgtgcctggactc

SEQ ID NO: 787595 - DNA, 15 bp, Homo sapiens
ctgtgcctggactct

SEQ ID NO: 787596 - DNA, 15 bp, Homo sapiens
tgtgcctggactcta

SEQ ID NO: 787597 - DNA, 15 bp, Homo sapiens
gtgcctggactctag

SEQ ID NO: 787598 - DNA, 15 bp, Homo sapiens
tgcctggactctagc

SEQ ID NO: 787599 - DNA, 15 bp, Homo sapiens
gcctggactctagct

SEQ ID NO: 787600 - DNA, 15 bp, Homo sapiens
cctggactctagctg

SEQ ID NO: 787601 - DNA, 15 bp, Homo sapiens
ctggactctagctgt

SEQ ID NO: 787602 - DNA, 15 bp, Homo sapiens
tggactctagctgtc

SEQ ID NO: 787603 - DNA, 15 bp, Homo sapiens
ggactctagctgtcc

SEQ ID NO: 787604 - DNA, 15 bp, Homo sapiens
gactctagctgtccc

SEQ ID NO: 787605 - DNA, 15 bp, Homo sapiens
actctagctgtcccc

SEQ ID NO: 787606 - DNA, 15 bp, Homo sapiens
ctctagctgtccccc

SEQ ID NO: 787607 - DNA, 15 bp, Homo sapiens
tctagctgtcccccg

SEQ ID NO: 787608 - DNA, 15 bp, Homo sapiens
ctagctgtcccccgc

SEQ ID NO: 787609 - DNA, 15 bp, Homo sapiens
tagctgtcccccgcc

SEQ ID NO: 787610 - DNA, 15 bp, Homo sapiens
agctgtcccccgcca

SEQ ID NO: 787611 - DNA, 15 bp, Homo sapiens
gctgtcccccgccaa

SEQ ID NO: 787612 - DNA, 15 bp, Homo sapiens
ctgtcccccgccaat

SEQ ID NO: 787613 - DNA, 15 bp, Homo sapiens
tgtcccccgccaatg

SEQ ID NO: 787614 - DNA, 15 bp, Homo sapiens
gtcccccgccaatgg

SEQ ID NO: 787615 - DNA, 15 bp, Homo sapiens
tcccccgccaatggt

SEQ ID NO: 787616 - DNA, 15 bp, Homo sapiens
cccccgccaatggtg

SEQ ID NO: 787617 - DNA, 15 bp, Homo sapiens
ccccgccaatggtgc

SEQ ID NO: 787618 - DNA, 15 bp, Homo sapiens
cccgccaatggtgcc

SEQ ID NO: 787619 - DNA, 15 bp, Homo sapiens
ccgccaatggtgcca

SEQ ID NO: 787620 - DNA, 15 bp, Homo sapiens
cgccaatggtgccac

SEQ ID NO: 787621 - DNA, 15 bp, Homo sapiens
gccaatggtgccaca

SEQ ID NO: 787622 - DNA, 15 bp, Homo sapiens
ccaatggtgccacag

SEQ ID NO: 787623 - DNA, 15 bp, Homo sapiens
caatggtgccacagc

SEQ ID NO: 787624 - DNA, 15 bp, Homo sapiens
aatggtgccacagct

SEQ ID NO: 787625 - DNA, 15 bp, Homo sapiens
atggtgccacagctc

SEQ ID NO: 787626 - DNA, 15 bp, Homo sapiens
tggtgccacagctcc

SEQ ID NO: 787627 - DNA, 15 bp, Homo sapiens
ggtgccacagctcca

SEQ ID NO: 787628 - DNA, 15 bp, Homo sapiens
gtgccacagctccat

SEQ ID NO: 787629 - DNA, 15 bp, Homo sapiens
tgccacagctccatg

SEQ ID NO: 787630 - DNA, 15 bp, Homo sapiens
gccacagctccatgc

SEQ ID NO: 787631 - DNA, 15 bp, Homo sapiens
ccacagctccatgcc

SEQ ID NO: 787632 - DNA, 15 bp, Homo sapiens
cacagctccatgcct

SEQ ID NO: 787633 - DNA, 15 bp, Homo sapiens
acagctccatgcctt

SEQ ID NO: 787634 - DNA, 15 bp, Homo sapiens
cagctccatgccttt

SEQ ID NO: 787635 - DNA, 15 bp, Homo sapiens
agctccatgcctttt

SEQ ID NO: 787636 - DNA, 15 bp, Homo sapiens
gctccatgccttttc

SEQ ID NO: 787637 - DNA, 15 bp, Homo sapiens
ctccatgccttttct

SEQ ID NO: 787638 - DNA, 15 bp, Homo sapiens
tccatgccttttctg

SEQ ID NO: 787639 - DNA, 15 bp, Homo sapiens
ccatgccttttctgt

SEQ ID NO: 787640 - DNA, 15 bp, Homo sapiens
catgccttttctgtg

SEQ ID NO: 787641 - DNA, 15 bp, Homo sapiens
atgccttttctgtga

SEQ ID NO: 787642 - DNA, 15 bp, Homo sapiens
tgccttttctgtgac

SEQ ID NO: 787643 - DNA, 15 bp, Homo sapiens
gccttttctgtgacc

SEQ ID NO: 787644 - DNA, 15 bp, Homo sapiens
ccttttctgtgacct

SEQ ID NO: 787645 - DNA, 15 bp, Homo sapiens
cttttctgtgacctt

SEQ ID NO: 787646 - DNA, 15 bp, Homo sapiens
ttttctgtgaccttc

SEQ ID NO: 787647 - DNA, 15 bp, Homo sapiens
tttctgtgaccttca

SEQ ID NO: 787648 - DNA, 15 bp, Homo sapiens
ttctgtgaccttcac

SEQ ID NO: 787649 - DNA, 15 bp, Homo sapiens
tctgtgaccttcacc

SEQ ID NO: 787650 - DNA, 15 bp, Homo sapiens
ctgtgaccttcacca

SEQ ID NO: 787651 - DNA, 15 bp, Homo sapiens
tgtgaccttcaccac

SEQ ID NO: 787652 - DNA, 15 bp, Homo sapiens
gtgaccttcaccact

SEQ ID NO: 787653 - DNA, 15 bp, Homo sapiens
tgaccttcaccactt

SEQ ID NO: 787654 - DNA, 15 bp, Homo sapiens
gaccttcaccacttt

SEQ ID NO: 787655 - DNA, 15 bp, Homo sapiens
accttcaccactttc

SEQ ID NO: 787656 - DNA, 15 bp, Homo sapiens
ccttcaccactttct

SEQ ID NO: 787657 - DNA, 15 bp, Homo sapiens
cttcaccactttctc

SEQ ID NO: 787658 - DNA, 15 bp, Homo sapiens
ttcaccactttctct

SEQ ID NO: 787659 - DNA, 15 bp, Homo sapiens
tcaccactttctctg

SEQ ID NO: 787660 - DNA, 15 bp, Homo sapiens
caccactttctctgc

SEQ ID NO: 787661 - DNA, 15 bp, Homo sapiens
accactttctctgcc

SEQ ID NO: 787662 - DNA, 15 bp, Homo sapiens
ccactttctctgccc

SEQ ID NO: 787663 - DNA, 15 bp, Homo sapiens
cactttctctgccct

SEQ ID NO: 787664 - DNA, 15 bp, Homo sapiens
actttctctgccctt

SEQ ID NO: 787665 - DNA, 15 bp, Homo sapiens
ctttctctgcccttg

SEQ ID NO: 787666 - DNA, 15 bp, Homo sapiens
tttctctgcccttgg

SEQ ID NO: 787667 - DNA, 15 bp, Homo sapiens
ttctctgcccttggg

SEQ ID NO: 787668 - DNA, 15 bp, Homo sapiens
tctctgcccttgggg

SEQ ID NO: 787669 - DNA, 15 bp, Homo sapiens
ctctgcccttggggc

SEQ ID NO: 787670 - DNA, 15 bp, Homo sapiens
tctgcccttggggct

SEQ ID NO: 787671 - DNA, 15 bp, Homo sapiens
ctgcccttggggctt

SEQ ID NO: 787672 - DNA, 15 bp, Homo sapiens
tgcccttggggcttc

SEQ ID NO: 787673 - DNA, 15 bp, Homo sapiens
gcccttggggcttcc

SEQ ID NO: 787674 - DNA, 15 bp, Homo sapiens
cccttggggcttcct

SEQ ID NO: 787675 - DNA, 15 bp, Homo sapiens
ccttggggcttcctc

SEQ ID NO: 787676 - DNA, 15 bp, Homo sapiens
cttggggcttcctct

SEQ ID NO: 787677 - DNA, 15 bp, Homo sapiens
ttggggcttcctctt

SEQ ID NO: 787678 - DNA, 15 bp, Homo sapiens
tggggcttcctcttc

SEQ ID NO: 787679 - DNA, 15 bp, Homo sapiens
ggggcttcctcttcc

SEQ ID NO: 787680 - DNA, 15 bp, Homo sapiens
gggcttcctcttcct

SEQ ID NO: 787681 - DNA, 15 bp, Homo sapiens
ggcttcctcttcctc

SEQ ID NO: 787682 - DNA, 15 bp, Homo sapiens
gcttcctcttcctct

SEQ ID NO: 787683 - DNA, 15 bp, Homo sapiens
cttcctcttcctctt

SEQ ID NO: 787684 - DNA, 15 bp, Homo sapiens
ttcctcttcctcttg

SEQ ID NO: 787685 - DNA, 15 bp, Homo sapiens
tcctcttcctcttga

SEQ ID NO: 787686 - DNA, 15 bp, Homo sapiens
cctcttcctcttgac

SEQ ID NO: 787687 - DNA, 15 bp, Homo sapiens
ctcttcctcttgact

SEQ ID NO: 787688 - DNA, 15 bp, Homo sapiens
tcttcctcttgactt

SEQ ID NO: 787689 - DNA, 15 bp, Homo sapiens
cttcctcttgacttt

SEQ ID NO: 787690 - DNA, 15 bp, Homo sapiens
ttcctcttgactttt

SEQ ID NO: 787691 - DNA, 15 bp, Homo sapiens
tcctcttgacttttc

SEQ ID NO: 787692 - DNA, 15 bp, Homo sapiens
cctcttgacttttct

SEQ ID NO: 787693 - DNA, 15 bp, Homo sapiens
ctcttgacttttctc

SEQ ID NO: 787694 - DNA, 15 bp, Homo sapiens
tcttgacttttctca

SEQ ID NO: 787695 - DNA, 15 bp, Homo sapiens
cttgacttttctcag

SEQ ID NO: 787696 - DNA, 15 bp, Homo sapiens
ttgacttttctcagc

SEQ ID NO: 787697 - DNA, 15 bp, Homo sapiens
tgacttttctcagca

SEQ ID NO: 787698 - DNA, 15 bp, Homo sapiens
gacttttctcagcac

SEQ ID NO: 787699 - DNA, 15 bp, Homo sapiens
acttttctcagcact

SEQ ID NO: 787700 - DNA, 15 bp, Homo sapiens
cttttctcagcactt

SEQ ID NO: 787701 - DNA, 15 bp, Homo sapiens
ttttctcagcactta

SEQ ID NO: 787702 - DNA, 15 bp, Homo sapiens
tttctcagcacttag

SEQ ID NO: 787703 - DNA, 15 bp, Homo sapiens
ttctcagcacttagg

SEQ ID NO: 787704 - DNA, 15 bp, Homo sapiens
tctcagcacttaggt

SEQ ID NO: 787705 - DNA, 15 bp, Homo sapiens
ctcagcacttaggtg

SEQ ID NO: 787706 - DNA, 15 bp, Homo sapiens
tcagcacttaggtgt

SEQ ID NO: 787707 - DNA, 15 bp, Homo sapiens
cagcacttaggtgtt

SEQ ID NO: 787708 - DNA, 15 bp, Homo sapiens
agcacttaggtgttg

SEQ ID NO: 787709 - DNA, 15 bp, Homo sapiens
gcacttaggtgttgg

SEQ ID NO: 787710 - DNA, 15 bp, Homo sapiens
cacttaggtgttggc

SEQ ID NO: 787711 - DNA, 15 bp, Homo sapiens
acttaggtgttggcc

SEQ ID NO: 787712 - DNA, 15 bp, Homo sapiens
cttaggtgttggcca

SEQ ID NO: 787713 - DNA, 15 bp, Homo sapiens
ttaggtgttggccat

SEQ ID NO: 787714 - DNA, 15 bp, Homo sapiens
taggtgttggccata

SEQ ID NO: 787715 - DNA, 15 bp, Homo sapiens
aggtgttggccataa

SEQ ID NO: 787716 - DNA, 15 bp, Homo sapiens
ggtgttggccataac

SEQ ID NO: 787717 - DNA, 15 bp, Homo sapiens
gtgttggccataact

SEQ ID NO: 787718 - DNA, 15 bp, Homo sapiens
tgttggccataactg

SEQ ID NO: 787719 - DNA, 15 bp, Homo sapiens
gttggccataactgt

SEQ ID NO: 787720 - DNA, 15 bp, Homo sapiens
ttggccataactgtt

SEQ ID NO: 787721 - DNA, 15 bp, Homo sapiens
tggccataactgttt

SEQ ID NO: 787722 - DNA, 15 bp, Homo sapiens
ggccataactgtttt

SEQ ID NO: 787723 - DNA, 15 bp, Homo sapiens
gccataactgttttt

SEQ ID NO: 787724 - DNA, 15 bp, Homo sapiens
ccataactgtttttg

SEQ ID NO: 787725 - DNA, 15 bp, Homo sapiens
cataactgtttttgg

SEQ ID NO: 787726 - DNA, 15 bp, Homo sapiens
ataactgtttttgga

SEQ ID NO: 787727 - DNA, 15 bp, Homo sapiens
taactgtttttggat

SEQ ID NO: 787728 - DNA, 15 bp, Homo sapiens
aactgtttttggatg

SEQ ID NO: 787729 - DNA, 15 bp, Homo sapiens
actgtttttggatga

SEQ ID NO: 787730 - DNA, 15 bp, Homo sapiens
ctgtttttggatgac

SEQ ID NO: 787731 - DNA, 15 bp, Homo sapiens
tgtttttggatgact

SEQ ID NO: 787732 - DNA, 15 bp, Homo sapiens
gtttttggatgactg

SEQ ID NO: 787733 - DNA, 15 bp, Homo sapiens
tttttggatgactgc

SEQ ID NO: 787734 - DNA, 15 bp, Homo sapiens
ttttggatgactgca

SEQ ID NO: 787735 - DNA, 15 bp, Homo sapiens
tttggatgactgcat

SEQ ID NO: 787736 - DNA, 15 bp, Homo sapiens
ttggatgactgcatt

SEQ ID NO: 787737 - DNA, 15 bp, Homo sapiens
tggatgactgcattg

SEQ ID NO: 787738 - DNA, 15 bp, Homo sapiens
ggatgactgcattgg

SEQ ID NO: 787739 - DNA, 15 bp, Homo sapiens
gatgactgcattggg

SEQ ID NO: 787740 - DNA, 15 bp, Homo sapiens
atgactgcattgggt

SEQ ID NO: 787741 - DNA, 15 bp, Homo sapiens
tgactgcattgggta

SEQ ID NO: 787742 - DNA, 15 bp, Homo sapiens
gactgcattgggtaa

SEQ ID NO: 787743 - DNA, 15 bp, Homo sapiens
actgcattgggtaag

SEQ ID NO: 787744 - DNA, 15 bp, Homo sapiens
ctgcattgggtaagt

SEQ ID NO: 787745 - DNA, 15 bp, Homo sapiens
tgcattgggtaagtc

SEQ ID NO: 787746 - DNA, 15 bp, Homo sapiens
gcattgggtaagtcc

SEQ ID NO: 787747 - DNA, 15 bp, Homo sapiens
cattgggtaagtccc

SEQ ID NO: 787748 - DNA, 15 bp, Homo sapiens
tgtgagattgcacct

SEQ ID NO: 787749 - DNA, 15 bp, Homo sapiens
gtgagattgcacctt

SEQ ID NO: 787750 - DNA, 15 bp, Homo sapiens
tgagattgcaccttc

SEQ ID NO: 787751 - DNA, 15 bp, Homo sapiens
gagattgcaccttcc

SEQ ID NO: 787752 - DNA, 15 bp, Homo sapiens
agattgcaccttccc

SEQ ID NO: 787753 - DNA, 15 bp, Homo sapiens
gattgcaccttccca

SEQ ID NO: 787754 - DNA, 15 bp, Homo sapiens
attgcaccttcccaa

SEQ ID NO: 787755 - DNA, 15 bp, Homo sapiens
ttgcaccttcccaaa

SEQ ID NO: 787756 - DNA, 15 bp, Homo sapiens
tgcaccttcccaaaa

SEQ ID NO: 787757 - DNA, 15 bp, Homo sapiens
gcaccttcccaaaag

SEQ ID NO: 787758 - DNA, 15 bp, Homo sapiens
caccttcccaaaagg

SEQ ID NO: 787759 - DNA, 15 bp, Homo sapiens
accttcccaaaaggc

SEQ ID NO: 787760 - DNA, 15 bp, Homo sapiens
ccttcccaaaaggca

SEQ ID NO: 787761 - DNA, 15 bp, Homo sapiens
cttcccaaaaggcaa

SEQ ID NO: 787762 - DNA, 15 bp, Homo sapiens
ttcccaaaaggcaag

SEQ ID NO: 787763 - DNA, 15 bp, Homo sapiens
tcccaaaaggcaagg

SEQ ID NO: 787764 - DNA, 15 bp, Homo sapiens
cccaaaaggcaagga

SEQ ID NO: 787765 - DNA, 15 bp, Homo sapiens
ccaaaaggcaaggaa

SEQ ID NO: 787766 - DNA, 15 bp, Homo sapiens
caaaaggcaaggaag

SEQ ID NO: 787767 - DNA, 15 bp, Homo sapiens
aaaaggcaaggaagt

SEQ ID NO: 787768 - DNA, 15 bp, Homo sapiens
aaaggcaaggaagtt

SEQ ID NO: 787769 - DNA, 15 bp, Homo sapiens
aaggcaaggaagttg

SEQ ID NO: 787770 - DNA, 15 bp, Homo sapiens
aggcaaggaagttgt

SEQ ID NO: 787771 - DNA, 15 bp, Homo sapiens
ggcaaggaagttgta

SEQ ID NO: 787772 - DNA, 15 bp, Homo sapiens
gcaaggaagttgtat

SEQ ID NO: 787773 - DNA, 15 bp, Homo sapiens
caaggaagttgtatg

SEQ ID NO: 787774 - DNA, 15 bp, Homo sapiens
aaggaagttgtatgg

SEQ ID NO: 787775 - DNA, 15 bp, Homo sapiens
aggaagttgtatgga

SEQ ID NO: 787776 - DNA, 15 bp, Homo sapiens
ggaagttgtatggaa

SEQ ID NO: 787777 - DNA, 15 bp, Homo sapiens
gaagttgtatggaaa

SEQ ID NO: 787778 - DNA, 15 bp, Homo sapiens
agttgtatggaaact

SEQ ID NO: 787779 - DNA, 15 bp, Homo sapiens
gttgtatggaaactg

SEQ ID NO: 787780 - DNA, 15 bp, Homo sapiens
ttgtatggaaactgg

SEQ ID NO: 787781 - DNA, 15 bp, Homo sapiens
tgtatggaaactggt

SEQ ID NO: 787782 - DNA, 15 bp, Homo sapiens
gtatggaaactggtt

SEQ ID NO: 787783 - DNA, 15 bp, Homo sapiens
tatggaaactggttt

SEQ ID NO: 787784 - DNA, 15 bp, Homo sapiens
atggaaactggttta

SEQ ID NO: 787785 - DNA, 15 bp, Homo sapiens
tggaaactggtttag

SEQ ID NO: 787786 - DNA, 15 bp, Homo sapiens
ggaaactggtttagg

SEQ ID NO: 787787 - DNA, 15 bp, Homo sapiens
gaaactggtttaggc

SEQ ID NO: 787788 - DNA, 15 bp, Homo sapiens
aaactggtttaggcc

SEQ ID NO: 787789 - DNA, 15 bp, Homo sapiens
aactggtttaggcct

SEQ ID NO: 787790 - DNA, 15 bp, Homo sapiens
actggtttaggcctt

SEQ ID NO: 787791 - DNA, 15 bp, Homo sapiens
ctggtttaggccttg

SEQ ID NO: 787792 - DNA, 15 bp, Homo sapiens
tggtttaggccttgt

SEQ ID NO: 787793 - DNA, 15 bp, Homo sapiens
ggtttaggccttgtg

SEQ ID NO: 787794 - DNA, 15 bp, Homo sapiens
gtttaggccttgtgt

SEQ ID NO: 787795 - DNA, 15 bp, Homo sapiens
tttaggccttgtgtg

SEQ ID NO: 787796 - DNA, 15 bp, Homo sapiens
ttaggccttgtgtga

SEQ ID NO: 787797 - DNA, 15 bp, Homo sapiens
taggccttgtgtgag

SEQ ID NO: 787798 - DNA, 15 bp, Homo sapiens
aggccttgtgtgaga

SEQ ID NO: 787799 - DNA, 15 bp, Homo sapiens
ggccttgtgtgagat

SEQ ID NO: 787800 - DNA, 15 bp, Homo sapiens
gccttgtgtgagatt

SEQ ID NO: 787801 - DNA, 15 bp, Homo sapiens
ccttgtgtgagattc

SEQ ID NO: 787802 - DNA, 15 bp, Homo sapiens
cttgtgtgagattcc

SEQ ID NO: 787803 - DNA, 15 bp, Homo sapiens
ttgtgtgagattcct

SEQ ID NO: 787804 - DNA, 15 bp, Homo sapiens
tgtgtgagattcctt

SEQ ID NO: 787805 - DNA, 15 bp, Homo sapiens
gtgtgagattccttt

SEQ ID NO: 787806 - DNA, 15 bp, Homo sapiens
tgtgagattcctttg

SEQ ID NO: 787807 - DNA, 15 bp, Homo sapiens
gtgagattcctttgc

SEQ ID NO: 787808 - DNA, 15 bp, Homo sapiens
tgagattcctttgct

SEQ ID NO: 787809 - DNA, 15 bp, Homo sapiens
gagattcctttgcta

SEQ ID NO: 787810 - DNA, 15 bp, Homo sapiens
agattcctttgctaa

SEQ ID NO: 787811 - DNA, 15 bp, Homo sapiens
gattcctttgctaac

SEQ ID NO: 787812 - DNA, 15 bp, Homo sapiens
attcctttgctaaca

SEQ ID NO: 787813 - DNA, 15 bp, Homo sapiens
ttcctttgctaacag

SEQ ID NO: 787814 - DNA, 15 bp, Homo sapiens
tcctttgctaacagt

SEQ ID NO: 787815 - DNA, 15 bp, Homo sapiens
cctttgctaacagtc

SEQ ID NO: 787816 - DNA, 15 bp, Homo sapiens
ctttgctaacagtcc

SEQ ID NO: 787817 - DNA, 15 bp, Homo sapiens
tttgctaacagtcca

SEQ ID NO: 787818 - DNA, 15 bp, Homo sapiens
ttgctaacagtccag

SEQ ID NO: 787819 - DNA, 15 bp, Homo sapiens
tgctaacagtccagg

SEQ ID NO: 787820 - DNA, 15 bp, Homo sapiens
gctaacagtccagga

SEQ ID NO: 787821 - DNA, 15 bp, Homo sapiens
ctaacagtccaggaa

SEQ ID NO: 787822 - DNA, 15 bp, Homo sapiens
taacagtccaggaag

SEQ ID NO: 787823 - DNA, 15 bp, Homo sapiens
aacagtccaggaagc

SEQ ID NO: 787824 - DNA, 15 bp, Homo sapiens
acagtccaggaagct

SEQ ID NO: 787825 - DNA, 15 bp, Homo sapiens
cagtccaggaagctg

SEQ ID NO: 787826 - DNA, 15 bp, Homo sapiens
agtccaggaagctgt

SEQ ID NO: 787827 - DNA, 15 bp, Homo sapiens
gtccaggaagctgtg

SEQ ID NO: 787828 - DNA, 15 bp, Homo sapiens
tccaggaagctgtgt

SEQ ID NO: 787829 - DNA, 15 bp, Homo sapiens
ccaggaagctgtgtc

SEQ ID NO: 787830 - DNA, 15 bp, Homo sapiens
caggaagctgtgtct

SEQ ID NO: 787831 - DNA, 15 bp, Homo sapiens
aggaagctgtgtctg

SEQ ID NO: 787832 - DNA, 15 bp, Homo sapiens
ggaagctgtgtctgg

SEQ ID NO: 787833 - DNA, 15 bp, Homo sapiens
gaagctgtgtctggg

SEQ ID NO: 787834 - DNA, 15 bp, Homo sapiens
aagctgtgtctgggg

SEQ ID NO: 787835 - DNA, 15 bp, Homo sapiens
agctgtgtctggggc

SEQ ID NO: 787836 - DNA, 15 bp, Homo sapiens
gctgtgtctggggca

SEQ ID NO: 787837 - DNA, 15 bp, Homo sapiens
ctgtgtctggggcag

SEQ ID NO: 787838 - DNA, 15 bp, Homo sapiens
tgtgtctggggcagc

SEQ ID NO: 787839 - DNA, 15 bp, Homo sapiens
gtgtctggggcagct

SEQ ID NO: 787840 - DNA, 15 bp, Homo sapiens
tgtctggggcagctt

SEQ ID NO: 787841 - DNA, 15 bp, Homo sapiens
gtctggggcagcttc

SEQ ID NO: 787842 - DNA, 15 bp, Homo sapiens
tctggggcagcttcc

SEQ ID NO: 787843 - DNA, 15 bp, Homo sapiens
ctggggcagcttcct

SEQ ID NO: 787844 - DNA, 15 bp, Homo sapiens
tggggcagcttcctt

SEQ ID NO: 787845 - DNA, 15 bp, Homo sapiens
ggggcagcttccttc

SEQ ID NO: 787846 - DNA, 15 bp, Homo sapiens
gggcagcttccttcc

SEQ ID NO: 787847 - DNA, 15 bp, Homo sapiens
ggcagcttccttccc

SEQ ID NO: 787848 - DNA, 15 bp, Homo sapiens
gcagcttccttcccc

SEQ ID NO: 787849 - DNA, 15 bp, Homo sapiens
cagcttccttccccc

SEQ ID NO: 787850 - DNA, 15 bp, Homo sapiens
agcttccttccccca

SEQ ID NO: 787851 - DNA, 15 bp, Homo sapiens
gcttccttcccccaa

SEQ ID NO: 787852 - DNA, 15 bp, Homo sapiens
cttccttcccccaaa

SEQ ID NO: 787853 - DNA, 15 bp, Homo sapiens
ttccttcccccaaat

SEQ ID NO: 787854 - DNA, 15 bp, Homo sapiens
tccttcccccaaata

SEQ ID NO: 787855 - DNA, 15 bp, Homo sapiens
ccttcccccaaatat

SEQ ID NO: 787856 - DNA, 15 bp, Homo sapiens
cttcccccaaatata

SEQ ID NO: 787857 - DNA, 15 bp, Homo sapiens
ttcccccaaatatag

SEQ ID NO: 787858 - DNA, 15 bp, Homo sapiens
tcccccaaatataga

SEQ ID NO: 787859 - DNA, 15 bp, Homo sapiens
cccccaaatatagat

SEQ ID NO: 787860 - DNA, 15 bp, Homo sapiens
ccccaaatatagata

SEQ ID NO: 787861 - DNA, 15 bp, Homo sapiens
cccaaatatagatac

SEQ ID NO: 787862 - DNA, 15 bp, Homo sapiens
ccaaatatagatact

SEQ ID NO: 787863 - DNA, 15 bp, Homo sapiens
caaatatagatactt

SEQ ID NO: 787864 - DNA, 15 bp, Homo sapiens
aaatatagatacttc

SEQ ID NO: 787865 - DNA, 15 bp, Homo sapiens
aatatagatacttct

SEQ ID NO: 787866 - DNA, 15 bp, Homo sapiens
atatagatacttctc

SEQ ID NO: 787867 - DNA, 15 bp, Homo sapiens
tatagatacttctcc

SEQ ID NO: 787868 - DNA, 15 bp, Homo sapiens
atagatacttctcca

SEQ ID NO: 787869 - DNA, 15 bp, Homo sapiens
tagatacttctccaa

SEQ ID NO: 787870 - DNA, 15 bp, Homo sapiens
agatacttctccaag

SEQ ID NO: 787871 - DNA, 15 bp, Homo sapiens
gatacttctccaagc

SEQ ID NO: 787872 - DNA, 15 bp, Homo sapiens
atacttctccaagct

SEQ ID NO: 787873 - DNA, 15 bp, Homo sapiens
tacttctccaagctt

SEQ ID NO: 787874 - DNA, 15 bp, Homo sapiens
acttctccaagcttc

SEQ ID NO: 787875 - DNA, 15 bp, Homo sapiens
cttctccaagcttcc

SEQ ID NO: 787876 - DNA, 15 bp, Homo sapiens
ttctccaagcttcct

SEQ ID NO: 787877 - DNA, 15 bp, Homo sapiens
tctccaagcttcctg

SEQ ID NO: 787878 - DNA, 15 bp, Homo sapiens
ctccaagcttcctgt

SEQ ID NO: 787879 - DNA, 15 bp, Homo sapiens
tccaagcttcctgtc

SEQ ID NO: 787880 - DNA, 15 bp, Homo sapiens
ccaagcttcctgtct

SEQ ID NO: 787881 - DNA, 15 bp, Homo sapiens
caagcttcctgtctg

SEQ ID NO: 787882 - DNA, 15 bp, Homo sapiens
aagcttcctgtctgg

SEQ ID NO: 787883 - DNA, 15 bp, Homo sapiens
agcttcctgtctgga

SEQ ID NO: 787884 - DNA, 15 bp, Homo sapiens
gcttcctgtctggaa

SEQ ID NO: 787885 - DNA, 15 bp, Homo sapiens
cttcctgtctggaat

SEQ ID NO: 787886 - DNA, 15 bp, Homo sapiens
ttcctgtctggaatc

SEQ ID NO: 787887 - DNA, 15 bp, Homo sapiens
tcctgtctggaatca

SEQ ID NO: 787888 - DNA, 15 bp, Homo sapiens
cctgtctggaatcag

SEQ ID NO: 787889 - DNA, 15 bp, Homo sapiens
ctgtctggaatcagg

SEQ ID NO: 787890 - DNA, 15 bp, Homo sapiens
tgtctggaatcaggg

SEQ ID NO: 787891 - DNA, 15 bp, Homo sapiens
gtctggaatcagggt

SEQ ID NO: 787892 - DNA, 15 bp, Homo sapiens
tctggaatcagggtg

SEQ ID NO: 787893 - DNA, 15 bp, Homo sapiens
ctggaatcagggtgt

SEQ ID NO: 787894 - DNA, 15 bp, Homo sapiens
tggaatcagggtgtt

SEQ ID NO: 787895 - DNA, 15 bp, Homo sapiens
ggaatcagggtgttg

SEQ ID NO: 787896 - DNA, 15 bp, Homo sapiens
gaatcagggtgttgt

SEQ ID NO: 787897 - DNA, 15 bp, Homo sapiens
aatcagggtgttgtg

SEQ ID NO: 787898 - DNA, 15 bp, Homo sapiens
atcagggtgttgtga

SEQ ID NO: 787899 - DNA, 15 bp, Homo sapiens
tcagggtgttgtgaa

SEQ ID NO: 787900 - DNA, 15 bp, Homo sapiens
cagggtgttgtgaaa

SEQ ID NO: 787901 - DNA, 15 bp, Homo sapiens
agggtgttgtgaaat

SEQ ID NO: 787902 - DNA, 15 bp, Homo sapiens
gggtgttgtgaaatg

SEQ ID NO: 787903 - DNA, 15 bp, Homo sapiens
ggtgttgtgaaatgt

SEQ ID NO: 787904 - DNA, 15 bp, Homo sapiens
gtgttgtgaaatgtg

SEQ ID NO: 787905 - DNA, 15 bp, Homo sapiens
tgttgtgaaatgtgg

SEQ ID NO: 787906 - DNA, 15 bp, Homo sapiens
gttgtgaaatgtggg

SEQ ID NO: 787907 - DNA, 15 bp, Homo sapiens
ttgtgaaatgtgggc

SEQ ID NO: 787908 - DNA, 15 bp, Homo sapiens
tgtgaaatgtgggca

SEQ ID NO: 787909 - DNA, 15 bp, Homo sapiens
gtgaaatgtgggcac

SEQ ID NO: 787910 - DNA, 15 bp, Homo sapiens
tgaaatgtgggcact

SEQ ID NO: 787911 - DNA, 15 bp, Homo sapiens
gaaatgtgggcactc

SEQ ID NO: 787912 - DNA, 15 bp, Homo sapiens
aaatgtgggcactca

SEQ ID NO: 787913 - DNA, 15 bp, Homo sapiens
aatgtgggcactcat

SEQ ID NO: 787914 - DNA, 15 bp, Homo sapiens
atgtgggcactcatt

SEQ ID NO: 787915 - DNA, 15 bp, Homo sapiens
tgtgggcactcattc

SEQ ID NO: 787916 - DNA, 15 bp, Homo sapiens
gtgggcactcattca

SEQ ID NO: 787917 - DNA, 15 bp, Homo sapiens
tgggcactcattcag

SEQ ID NO: 787918 - DNA, 15 bp, Homo sapiens
gggcactcattcagt

SEQ ID NO: 787919 - DNA, 15 bp, Homo sapiens
ggcactcattcagtc

SEQ ID NO: 787920 - DNA, 15 bp, Homo sapiens
gcactcattcagtcc

SEQ ID NO: 787921 - DNA, 15 bp, Homo sapiens
cactcattcagtcct

SEQ ID NO: 787922 - DNA, 15 bp, Homo sapiens
actcattcagtccta

SEQ ID NO: 787923 - DNA, 15 bp, Homo sapiens
ctcattcagtcctag

SEQ ID NO: 787924 - DNA, 15 bp, Homo sapiens
tcattcagtcctagg

SEQ ID NO: 787925 - DNA, 15 bp, Homo sapiens
cattcagtcctaggg

SEQ ID NO: 787926 - DNA, 15 bp, Homo sapiens
attcagtcctagggg

SEQ ID NO: 787927 - DNA, 15 bp, Homo sapiens
ttcagtcctaggggt

SEQ ID NO: 787928 - DNA, 15 bp, Homo sapiens
tcagtcctaggggtc

SEQ ID NO: 787929 - DNA, 15 bp, Homo sapiens
cagtcctaggggtca

SEQ ID NO: 787930 - DNA, 15 bp, Homo sapiens
agtcctaggggtcat

SEQ ID NO: 787931 - DNA, 15 bp, Homo sapiens
gtcctaggggtcatg

SEQ ID NO: 787932 - DNA, 15 bp, Homo sapiens
tcctaggggtcatgg

SEQ ID NO: 787933 - DNA, 15 bp, Homo sapiens
cctaggggtcatggg

SEQ ID NO: 787934 - DNA, 15 bp, Homo sapiens
ctaggggtcatgggg

SEQ ID NO: 787935 - DNA, 15 bp, Homo sapiens
taggggtcatgggga

SEQ ID NO: 787936 - DNA, 15 bp, Homo sapiens
aggggtcatggggaa

SEQ ID NO: 787937 - DNA, 15 bp, Homo sapiens
ggggtcatggggaac

SEQ ID NO: 787938 - DNA, 15 bp, Homo sapiens
gggtcatggggaacc

SEQ ID NO: 787939 - DNA, 15 bp, Homo sapiens
ggtcatggggaaccc

SEQ ID NO: 787940 - DNA, 15 bp, Homo sapiens
gtcatggggaaccct

SEQ ID NO: 787941 - DNA, 15 bp, Homo sapiens
tcatggggaacccta

SEQ ID NO: 787942 - DNA, 15 bp, Homo sapiens
catggggaaccctac

SEQ ID NO: 787943 - DNA, 15 bp, Homo sapiens
atggggaaccctacc

SEQ ID NO: 787944 - DNA, 15 bp, Homo sapiens
tggggaaccctacca

SEQ ID NO: 787945 - DNA, 15 bp, Homo sapiens
ggggaaccctaccag

SEQ ID NO: 787946 - DNA, 15 bp, Homo sapiens
gggaaccctaccagc

SEQ ID NO: 787947 - DNA, 15 bp, Homo sapiens
ggaaccctaccagct

SEQ ID NO: 787948 - DNA, 15 bp, Homo sapiens
gaaccctaccagctt

SEQ ID NO: 787949 - DNA, 15 bp, Homo sapiens
aaccctaccagcttt

SEQ ID NO: 787950 - DNA, 15 bp, Homo sapiens
accctaccagctttc

SEQ ID NO: 787951 - DNA, 15 bp, Homo sapiens
ccctaccagctttcc

SEQ ID NO: 787952 - DNA, 15 bp, Homo sapiens
cctaccagctttccc

SEQ ID NO: 787953 - DNA, 15 bp, Homo sapiens
ctaccagctttccca

SEQ ID NO: 787954 - DNA, 15 bp, Homo sapiens
taccagctttcccat

SEQ ID NO: 787955 - DNA, 15 bp, Homo sapiens
accagctttcccatt

SEQ ID NO: 787956 - DNA, 15 bp, Homo sapiens
ccagctttcccatta

SEQ ID NO: 787957 - DNA, 15 bp, Homo sapiens
cagctttcccattaa

SEQ ID NO: 787958 - DNA, 15 bp, Homo sapiens
agctttcccattaaa

SEQ ID NO: 787959 - DNA, 15 bp, Homo sapiens
gctttcccattaaac

SEQ ID NO: 787960 - DNA, 15 bp, Homo sapiens
ctttcccattaaacc

SEQ ID NO: 787961 - DNA, 15 bp, Homo sapiens
tttcccattaaaccc

SEQ ID NO: 787962 - DNA, 15 bp, Homo sapiens
ttcccattaaaccca

SEQ ID NO: 787963 - DNA, 15 bp, Homo sapiens
tcccattaaacccag

SEQ ID NO: 787964 - DNA, 15 bp, Homo sapiens
cccattaaacccagc

SEQ ID NO: 787965 - DNA, 15 bp, Homo sapiens
ccattaaacccagct

SEQ ID NO: 787966 - DNA, 15 bp, Homo sapiens
cattaaacccagctg

SEQ ID NO: 787967 - DNA, 15 bp, Homo sapiens
attaaacccagctgg

SEQ ID NO: 787968 - DNA, 15 bp, Homo sapiens
ttaaacccagctggt

SEQ ID NO: 787969 - DNA, 15 bp, Homo sapiens
taaacccagctggta

SEQ ID NO: 787970 - DNA, 15 bp, Homo sapiens
aaacccagctggtaa

SEQ ID NO: 787971 - DNA, 15 bp, Homo sapiens
aacccagctggtaaa

SEQ ID NO: 787972 - DNA, 15 bp, Homo sapiens
acccagctggtaaaa

SEQ ID NO: 787973 - DNA, 15 bp, Homo sapiens
cccagctggtaaaat

SEQ ID NO: 787974 - DNA, 15 bp, Homo sapiens
ccagctggtaaaatg

SEQ ID NO: 787975 - DNA, 15 bp, Homo sapiens
cagctggtaaaatgg

SEQ ID NO: 787976 - DNA, 15 bp, Homo sapiens
agctggtaaaatgga

SEQ ID NO: 787977 - DNA, 15 bp, Homo sapiens
gctggtaaaatggac

SEQ ID NO: 787978 - DNA, 15 bp, Homo sapiens
ctggtaaaatggact

SEQ ID NO: 787979 - DNA, 15 bp, Homo sapiens
tggtaaaatggactc

SEQ ID NO: 787980 - DNA, 15 bp, Homo sapiens
ggtaaaatggactca

SEQ ID NO: 787981 - DNA, 15 bp, Homo sapiens
gtaaaatggactcat

SEQ ID NO: 787982 - DNA, 15 bp, Homo sapiens
taaaatggactcatg

SEQ ID NO: 787983 - DNA, 15 bp, Homo sapiens
aaaatggactcatgt

SEQ ID NO: 787984 - DNA, 15 bp, Homo sapiens
aaatggactcatgtc

SEQ ID NO: 787985 - DNA, 15 bp, Homo sapiens
aatggactcatgtct

SEQ ID NO: 787986 - DNA, 15 bp, Homo sapiens
atggactcatgtctg

SEQ ID NO: 787987 - DNA, 15 bp, Homo sapiens
tggactcatgtctgt

SEQ ID NO: 787988 - DNA, 15 bp, Homo sapiens
ggactcatgtctgtt

SEQ ID NO: 787989 - DNA, 15 bp, Homo sapiens
gactcatgtctgttt

SEQ ID NO: 787990 - DNA, 15 bp, Homo sapiens
actcatgtctgtttg

SEQ ID NO: 787991 - DNA, 15 bp, Homo sapiens
ctcatgtctgtttgt

SEQ ID NO: 787992 - DNA, 15 bp, Homo sapiens
tcatgtctgtttgtt

SEQ ID NO: 787993 - DNA, 15 bp, Homo sapiens
catgtctgtttgttt

SEQ ID NO: 787994 - DNA, 15 bp, Homo sapiens
atgtctgtttgtttt

SEQ ID NO: 787995 - DNA, 15 bp, Homo sapiens
tgtctgtttgttttt

SEQ ID NO: 787996 - DNA, 15 bp, Homo sapiens
gtctgtttgtttttg

SEQ ID NO: 787997 - DNA, 15 bp, Homo sapiens
tctgtttgtttttgg

SEQ ID NO: 787998 - DNA, 15 bp, Homo sapiens
ctgtttgtttttggg

SEQ ID NO: 787999 - DNA, 15 bp, Homo sapiens
tgtttgtttttgggg

SEQ ID NO: 788000 - DNA, 15 bp, Homo sapiens
gtttgtttttggggt

SEQ ID NO: 788001 - DNA, 15 bp, Homo sapiens
tttgtttttggggtt

SEQ ID NO: 788002 - DNA, 15 bp, Homo sapiens
ttgtttttggggttt

SEQ ID NO: 788003 - DNA, 15 bp, Homo sapiens
tgtttttggggtttg

SEQ ID NO: 788004 - DNA, 15 bp, Homo sapiens
gtttttggggtttgt

SEQ ID NO: 788005 - DNA, 15 bp, Homo sapiens
tttttggggtttgta

SEQ ID NO: 788006 - DNA, 15 bp, Homo sapiens
ttttggggtttgtat

SEQ ID NO: 788007 - DNA, 15 bp, Homo sapiens
tttggggtttgtatt

SEQ ID NO: 788008 - DNA, 15 bp, Homo sapiens
ttggggtttgtattc

SEQ ID NO: 788009 - DNA, 15 bp, Homo sapiens
tggggtttgtattcc

SEQ ID NO: 788010 - DNA, 15 bp, Homo sapiens
ggggtttgtattccc

SEQ ID NO: 788011 - DNA, 15 bp, Homo sapiens
gggtttgtattccct

SEQ ID NO: 788012 - DNA, 15 bp, Homo sapiens
ggtttgtattccctc

SEQ ID NO: 788013 - DNA, 15 bp, Homo sapiens
gtttgtattccctcc

SEQ ID NO: 788014 - DNA, 15 bp, Homo sapiens
tttgtattccctcct

SEQ ID NO: 788015 - DNA, 15 bp, Homo sapiens
ttgtattccctccta

SEQ ID NO: 788016 - DNA, 15 bp, Homo sapiens
tgtattccctcctac

SEQ ID NO: 788017 - DNA, 15 bp, Homo sapiens
gtattccctcctacc

SEQ ID NO: 788018 - DNA, 15 bp, Homo sapiens
tattccctcctacct

SEQ ID NO: 788019 - DNA, 15 bp, Homo sapiens
attccctcctaccta

SEQ ID NO: 788020 - DNA, 15 bp, Homo sapiens
ttccctcctacctaa

SEQ ID NO: 788021 - DNA, 15 bp, Homo sapiens
tccctcctacctaaa

SEQ ID NO: 788022 - DNA, 15 bp, Homo sapiens
ccctcctacctaaag

SEQ ID NO: 788023 - DNA, 15 bp, Homo sapiens
cctcctacctaaaga

SEQ ID NO: 788024 - DNA, 15 bp, Homo sapiens
ctcctacctaaagaa

SEQ ID NO: 788025 - DNA, 15 bp, Homo sapiens
tcctacctaaagaaa

SEQ ID NO: 788026 - DNA, 15 bp, Homo sapiens
cctacctaaagaaac

SEQ ID NO: 788027 - DNA, 15 bp, Homo sapiens
ctacctaaagaaact

SEQ ID NO: 788028 - DNA, 15 bp, Homo sapiens
tacctaaagaaactg

SEQ ID NO: 788029 - DNA, 15 bp, Homo sapiens
acctaaagaaactgc

SEQ ID NO: 788030 - DNA, 15 bp, Homo sapiens
cctaaagaaactgca

SEQ ID NO: 788031 - DNA, 15 bp, Homo sapiens
ctaaagaaactgcaa

SEQ ID NO: 788032 - DNA, 15 bp, Homo sapiens
taaagaaactgcaag

SEQ ID NO: 788033 - DNA, 15 bp, Homo sapiens
aaagaaactgcaaga

SEQ ID NO: 788034 - DNA, 15 bp, Homo sapiens
aagaaactgcaagag

SEQ ID NO: 788035 - DNA, 15 bp, Homo sapiens
agaaactgcaagaga

SEQ ID NO: 788036 - DNA, 15 bp, Homo sapiens
gaaactgcaagagaa

SEQ ID NO: 788037 - DNA, 15 bp, Homo sapiens
aaactgcaagagaag

SEQ ID NO: 788038 - DNA, 15 bp, Homo sapiens
aactgcaagagaagg

SEQ ID NO: 788039 - DNA, 15 bp, Homo sapiens
actgcaagagaaggg

SEQ ID NO: 788040 - DNA, 15 bp, Homo sapiens
ctgcaagagaaggga

SEQ ID NO: 788041 - DNA, 15 bp, Homo sapiens
tgcaagagaagggat

SEQ ID NO: 788042 - DNA, 15 bp, Homo sapiens
gcaagagaagggata

SEQ ID NO: 788043 - DNA, 15 bp, Homo sapiens
caagagaagggatag

SEQ ID NO: 788044 - DNA, 15 bp, Homo sapiens
aagagaagggataga

SEQ ID NO: 788045 - DNA, 15 bp, Homo sapiens
agagaagggatagaa

SEQ ID NO: 788046 - DNA, 15 bp, Homo sapiens
gagaagggatagaaa

SEQ ID NO: 788047 - DNA, 15 bp, Homo sapiens
agaagggatagaaaa

SEQ ID NO: 788048 - DNA, 15 bp, Homo sapiens
gaagggatagaaaag

SEQ ID NO: 788049 - DNA, 15 bp, Homo sapiens
aagggatagaaaaga

SEQ ID NO: 788050 - DNA, 15 bp, Homo sapiens
agggatagaaaagac

SEQ ID NO: 788051 - DNA, 15 bp, Homo sapiens
gggatagaaaagacc

SEQ ID NO: 788052 - DNA, 15 bp, Homo sapiens
ggatagaaaagacca

SEQ ID NO: 788053 - DNA, 15 bp, Homo sapiens
gatagaaaagaccaa

SEQ ID NO: 788054 - DNA, 15 bp, Homo sapiens
atagaaaagaccaag

SEQ ID NO: 788055 - DNA, 15 bp, Homo sapiens
tagaaaagaccaagg

SEQ ID NO: 788056 - DNA, 15 bp, Homo sapiens
agaaaagaccaaggc

SEQ ID NO: 788057 - DNA, 15 bp, Homo sapiens
gaaaagaccaaggca

SEQ ID NO: 788058 - DNA, 15 bp, Homo sapiens
aaaagaccaaggcat

SEQ ID NO: 788059 - DNA, 15 bp, Homo sapiens
aaagaccaaggcatc

SEQ ID NO: 788060 - DNA, 15 bp, Homo sapiens
aagaccaaggcatca

SEQ ID NO: 788061 - DNA, 15 bp, Homo sapiens
agaccaaggcatcag

SEQ ID NO: 788062 - DNA, 15 bp, Homo sapiens
gaccaaggcatcagc

SEQ ID NO: 788063 - DNA, 15 bp, Homo sapiens
accaaggcatcagca

SEQ ID NO: 788064 - DNA, 15 bp, Homo sapiens
ccaaggcatcagcaa

SEQ ID NO: 788065 - DNA, 15 bp, Homo sapiens
caaggcatcagcaag

SEQ ID NO: 788066 - DNA, 15 bp, Homo sapiens
aaggcatcagcaagt

SEQ ID NO: 788067 - DNA, 15 bp, Homo sapiens
aggcatcagcaagtc

SEQ ID NO: 788068 - DNA, 15 bp, Homo sapiens
ggcatcagcaagtct

SEQ ID NO: 788069 - DNA, 15 bp, Homo sapiens
gcatcagcaagtctg

SEQ ID NO: 788070 - DNA, 15 bp, Homo sapiens
catcagcaagtctgt

SEQ ID NO: 788071 - DNA, 15 bp, Homo sapiens
atcagcaagtctgtg

SEQ ID NO: 788072 - DNA, 15 bp, Homo sapiens
tcagcaagtctgtgc

SEQ ID NO: 788073 - DNA, 15 bp, Homo sapiens
cagcaagtctgtgcc

SEQ ID NO: 788074 - DNA, 15 bp, Homo sapiens
agcaagtctgtgccc

SEQ ID NO: 788075 - DNA, 15 bp, Homo sapiens
gcaagtctgtgccca

SEQ ID NO: 788076 - DNA, 15 bp, Homo sapiens
caagtctgtgcccag

SEQ ID NO: 788077 - DNA, 15 bp, Homo sapiens
aagtctgtgcccagg

SEQ ID NO: 788078 - DNA, 15 bp, Homo sapiens
agtctgtgcccagga

SEQ ID NO: 788079 - DNA, 15 bp, Homo sapiens
gtctgtgcccaggag

SEQ ID NO: 788080 - DNA, 15 bp, Homo sapiens
tctgtgcccaggagt

SEQ ID NO: 788081 - DNA, 15 bp, Homo sapiens
ctgtgcccaggagtg

SEQ ID NO: 788082 - DNA, 15 bp, Homo sapiens
tgtgcccaggagtgc

SEQ ID NO: 788083 - DNA, 15 bp, Homo sapiens
gtgcccaggagtgca

SEQ ID NO: 788084 - DNA, 15 bp, Homo sapiens
tgcccaggagtgcaa

SEQ ID NO: 788085 - DNA, 15 bp, Homo sapiens
gcccaggagtgcaat

SEQ ID NO: 788086 - DNA, 15 bp, Homo sapiens
cccaggagtgcaata

SEQ ID NO: 788087 - DNA, 15 bp, Homo sapiens
ccaggagtgcaataa

SEQ ID NO: 788088 - DNA, 15 bp, Homo sapiens
caggagtgcaataat

SEQ ID NO: 788089 - DNA, 15 bp, Homo sapiens
aggagtgcaataatc

SEQ ID NO: 788090 - DNA, 15 bp, Homo sapiens
ggagtgcaataatcc

SEQ ID NO: 788091 - DNA, 15 bp, Homo sapiens
gagtgcaataatcct

SEQ ID NO: 788092 - DNA, 15 bp, Homo sapiens
agtgcaataatcctt

SEQ ID NO: 788093 - DNA, 15 bp, Homo sapiens
gtgcaataatccttg

SEQ ID NO: 788094 - DNA, 15 bp, Homo sapiens
tgcaataatccttgt

SEQ ID NO: 788095 - DNA, 15 bp, Homo sapiens
gcaataatccttgtg

SEQ ID NO: 788096 - DNA, 15 bp, Homo sapiens
caataatccttgtgt

SEQ ID NO: 788097 - DNA, 15 bp, Homo sapiens
aataatccttgtgtt

SEQ ID NO: 788098 - DNA, 15 bp, Homo sapiens
ataatccttgtgttt

SEQ ID NO: 788099 - DNA, 15 bp, Homo sapiens
taatccttgtgttta

SEQ ID NO: 788100 - DNA, 15 bp, Homo sapiens
aatccttgtgtttac

SEQ ID NO: 788101 - DNA, 15 bp, Homo sapiens
atccttgtgtttact

SEQ ID NO: 788102 - DNA, 15 bp, Homo sapiens
tccttgtgtttactg

SEQ ID NO: 788103 - DNA, 15 bp, Homo sapiens
ccttgtgtttactgg

SEQ ID NO: 788104 - DNA, 15 bp, Homo sapiens
cttgtgtttactgga

SEQ ID NO: 788105 - DNA, 15 bp, Homo sapiens
ttgtgtttactggaa

SEQ ID NO: 788106 - DNA, 15 bp, Homo sapiens
tgtgtttactggaag

SEQ ID NO: 788107 - DNA, 15 bp, Homo sapiens
gtgtttactggaagg

SEQ ID NO: 788108 - DNA, 15 bp, Homo sapiens
tgtttactggaaggg

SEQ ID NO: 788109 - DNA, 15 bp, Homo sapiens
gtttactggaagggg

SEQ ID NO: 788110 - DNA, 15 bp, Homo sapiens
tttactggaagggga

SEQ ID NO: 788111 - DNA, 15 bp, Homo sapiens
ttactggaaggggag

SEQ ID NO: 788112 - DNA, 15 bp, Homo sapiens
tactggaaggggagg

SEQ ID NO: 788113 - DNA, 15 bp, Homo sapiens
actggaaggggaggc

SEQ ID NO: 788114 - DNA, 15 bp, Homo sapiens
ctggaaggggaggct

SEQ ID NO: 788115 - DNA, 15 bp, Homo sapiens
tggaaggggaggctg

SEQ ID NO: 788116 - DNA, 15 bp, Homo sapiens
ggaaggggaggctgg

SEQ ID NO: 788117 - DNA, 15 bp, Homo sapiens
gaaggggaggctggc

SEQ ID NO: 788118 - DNA, 15 bp, Homo sapiens
aaggggaggctggca

SEQ ID NO: 788119 - DNA, 15 bp, Homo sapiens
aggggaggctggcat

SEQ ID NO: 788120 - DNA, 15 bp, Homo sapiens
ggggaggctggcatt

SEQ ID NO: 788121 - DNA, 15 bp, Homo sapiens
gggaggctggcattg

SEQ ID NO: 788122 - DNA, 15 bp, Homo sapiens
ggaggctggcattga

SEQ ID NO: 788123 - DNA, 15 bp, Homo sapiens
gaggctggcattgaa

SEQ ID NO: 788124 - DNA, 15 bp, Homo sapiens
aggctggcattgaac

SEQ ID NO: 788125 - DNA, 15 bp, Homo sapiens
ggctggcattgaacc

SEQ ID NO: 788126 - DNA, 15 bp, Homo sapiens
gctggcattgaaccc

SEQ ID NO: 788127 - DNA, 15 bp, Homo sapiens
ctggcattgaaccca

SEQ ID NO: 788128 - DNA, 15 bp, Homo sapiens
tggcattgaacccat

SEQ ID NO: 788129 - DNA, 15 bp, Homo sapiens
ggcattgaacccatg

SEQ ID NO: 788130 - DNA, 15 bp, Homo sapiens
gcattgaacccatgt

SEQ ID NO: 788131 - DNA, 15 bp, Homo sapiens
cattgaacccatgtc

SEQ ID NO: 788132 - DNA, 15 bp, Homo sapiens
attgaacccatgtca

SEQ ID NO: 788133 - DNA, 15 bp, Homo sapiens
ttgaacccatgtcaa

SEQ ID NO: 788134 - DNA, 15 bp, Homo sapiens
tgaacccatgtcaag

SEQ ID NO: 788135 - DNA, 15 bp, Homo sapiens
gaacccatgtcaaga

SEQ ID NO: 788136 - DNA, 15 bp, Homo sapiens
aacccatgtcaagat

SEQ ID NO: 788137 - DNA, 15 bp, Homo sapiens
acccatgtcaagata

SEQ ID NO: 788138 - DNA, 15 bp, Homo sapiens
cccatgtcaagatag

SEQ ID NO: 788139 - DNA, 15 bp, Homo sapiens
ccatgtcaagatagg

SEQ ID NO: 788140 - DNA, 15 bp, Homo sapiens
catgtcaagataggt

SEQ ID NO: 788141 - DNA, 15 bp, Homo sapiens
atgtcaagataggtt

SEQ ID NO: 788142 - DNA, 15 bp, Homo sapiens
tgtcaagataggttt

SEQ ID NO: 788143 - DNA, 15 bp, Homo sapiens
gtcaagataggtttg

SEQ ID NO: 788144 - DNA, 15 bp, Homo sapiens
tcaagataggtttgg

SEQ ID NO: 788145 - DNA, 15 bp, Homo sapiens
caagataggtttgga

SEQ ID NO: 788146 - DNA, 15 bp, Homo sapiens
aagataggtttggag

SEQ ID NO: 788147 - DNA, 15 bp, Homo sapiens
agataggtttggaga

SEQ ID NO: 788148 - DNA, 15 bp, Homo sapiens
gataggtttggagaa

SEQ ID NO: 788149 - DNA, 15 bp, Homo sapiens
ataggtttggagaaa

SEQ ID NO: 788150 - DNA, 15 bp, Homo sapiens
taggtttggagaaaa

SEQ ID NO: 788151 - DNA, 15 bp, Homo sapiens
aggtttggagaaaac

SEQ ID NO: 788152 - DNA, 15 bp, Homo sapiens
ggtttggagaaaacc

SEQ ID NO: 788153 - DNA, 15 bp, Homo sapiens
gtttggagaaaaccc

SEQ ID NO: 788154 - DNA, 15 bp, Homo sapiens
tttggagaaaaccca

SEQ ID NO: 788155 - DNA, 15 bp, Homo sapiens
ttggagaaaacccaa

SEQ ID NO: 788156 - DNA, 15 bp, Homo sapiens
tggagaaaacccaaa

SEQ ID NO: 788157 - DNA, 15 bp, Homo sapiens
ggagaaaacccaaag

SEQ ID NO: 788158 - DNA, 15 bp, Homo sapiens
gagaaaacccaaaga

SEQ ID NO: 788159 - DNA, 15 bp, Homo sapiens
agaaaacccaaagat

SEQ ID NO: 788160 - DNA, 15 bp, Homo sapiens
gaaaacccaaagatg

SEQ ID NO: 788161 - DNA, 15 bp, Homo sapiens
aaaacccaaagatgc

SEQ ID NO: 788162 - DNA, 15 bp, Homo sapiens
aaacccaaagatgcc

SEQ ID NO: 788163 - DNA, 15 bp, Homo sapiens
aacccaaagatgcca

SEQ ID NO: 788164 - DNA, 15 bp, Homo sapiens
acccaaagatgccaa

SEQ ID NO: 788165 - DNA, 15 bp, Homo sapiens
cccaaagatgccaag

SEQ ID NO: 788166 - DNA, 15 bp, Homo sapiens
ccaaagatgccaagg

SEQ ID NO: 788167 - DNA, 15 bp, Homo sapiens
caaagatgccaaggc

SEQ ID NO: 788168 - DNA, 15 bp, Homo sapiens
aaagatgccaaggcc

SEQ ID NO: 788169 - DNA, 15 bp, Homo sapiens
aagatgccaaggcct

SEQ ID NO: 788170 - DNA, 15 bp, Homo sapiens
agatgccaaggcctt

SEQ ID NO: 788171 - DNA, 15 bp, Homo sapiens
gatgccaaggccttg

SEQ ID NO: 788172 - DNA, 15 bp, Homo sapiens
atgccaaggccttgc

SEQ ID NO: 788173 - DNA, 15 bp, Homo sapiens
tgccaaggccttgcc

SEQ ID NO: 788174 - DNA, 15 bp, Homo sapiens
gccaaggccttgcct

SEQ ID NO: 788175 - DNA, 15 bp, Homo sapiens
ccaaggccttgcctt

SEQ ID NO: 788176 - DNA, 15 bp, Homo sapiens
caaggccttgccttc

SEQ ID NO: 788177 - DNA, 15 bp, Homo sapiens
aaggccttgccttcc

SEQ ID NO: 788178 - DNA, 15 bp, Homo sapiens
aggccttgccttcca

SEQ ID NO: 788179 - DNA, 15 bp, Homo sapiens
ggccttgccttccat

SEQ ID NO: 788180 - DNA, 15 bp, Homo sapiens
gccttgccttccatc

SEQ ID NO: 788181 - DNA, 15 bp, Homo sapiens
ccttgccttccatcc

SEQ ID NO: 788182 - DNA, 15 bp, Homo sapiens
cttgccttccatccc

SEQ ID NO: 788183 - DNA, 15 bp, Homo sapiens
ttgccttccatcccc

SEQ ID NO: 788184 - DNA, 15 bp, Homo sapiens
tgccttccatcccct

SEQ ID NO: 788185 - DNA, 15 bp, Homo sapiens
gccttccatcccctg

SEQ ID NO: 788186 - DNA, 15 bp, Homo sapiens
ccttccatcccctgt

SEQ ID NO: 788187 - DNA, 15 bp, Homo sapiens
cttccatcccctgtg

SEQ ID NO: 788188 - DNA, 15 bp, Homo sapiens
ttccatcccctgtga

SEQ ID NO: 788189 - DNA, 15 bp, Homo sapiens
tccatcccctgtgat

SEQ ID NO: 788190 - DNA, 15 bp, Homo sapiens
ccatcccctgtgatc

SEQ ID NO: 788191 - DNA, 15 bp, Homo sapiens
catcccctgtgatct

SEQ ID NO: 788192 - DNA, 15 bp, Homo sapiens
atcccctgtgatcta

SEQ ID NO: 788193 - DNA, 15 bp, Homo sapiens
tcccctgtgatctac

SEQ ID NO: 788194 - DNA, 15 bp, Homo sapiens
cccctgtgatctact

SEQ ID NO: 788195 - DNA, 15 bp, Homo sapiens
ccctgtgatctacta

SEQ ID NO: 788196 - DNA, 15 bp, Homo sapiens
cctgtgatctactac

SEQ ID NO: 788197 - DNA, 15 bp, Homo sapiens
ctgtgatctactact

SEQ ID NO: 788198 - DNA, 15 bp, Homo sapiens
tgtgatctactactt

SEQ ID NO: 788199 - DNA, 15 bp, Homo sapiens
gtgatctactactta

SEQ ID NO: 788200 - DNA, 15 bp, Homo sapiens
tgatctactacttaa

SEQ ID NO: 788201 - DNA, 15 bp, Homo sapiens
gatctactacttaat

SEQ ID NO: 788202 - DNA, 15 bp, Homo sapiens
atctactacttaatc

SEQ ID NO: 788203 - DNA, 15 bp, Homo sapiens
tctactacttaatca

SEQ ID NO: 788204 - DNA, 15 bp, Homo sapiens
ctactacttaatcaa

SEQ ID NO: 788205 - DNA, 15 bp, Homo sapiens
tactacttaatcaaa

SEQ ID NO: 788206 - DNA, 15 bp, Homo sapiens
actacttaatcaaat

SEQ ID NO: 788207 - DNA, 15 bp, Homo sapiens
ctacttaatcaaata

SEQ ID NO: 788208 - DNA, 15 bp, Homo sapiens
tacttaatcaaatag

SEQ ID NO: 788209 - DNA, 15 bp, Homo sapiens
acttaatcaaatagc

SEQ ID NO: 788210 - DNA, 15 bp, Homo sapiens
cttaatcaaatagcc

SEQ ID NO: 788211 - DNA, 15 bp, Homo sapiens
ttaatcaaatagcca

SEQ ID NO: 788212 - DNA, 15 bp, Homo sapiens
taatcaaatagccaa

SEQ ID NO: 788213 - DNA, 15 bp, Homo sapiens
aatcaaatagccaag

SEQ ID NO: 788214 - DNA, 15 bp, Homo sapiens
atcaaatagccaagg

SEQ ID NO: 788215 - DNA, 15 bp, Homo sapiens
tcaaatagccaagga

SEQ ID NO: 788216 - DNA, 15 bp, Homo sapiens
caaatagccaaggat

SEQ ID NO: 788217 - DNA, 15 bp, Homo sapiens
aaatagccaaggatg

SEQ ID NO: 788218 - DNA, 15 bp, Homo sapiens
aatagccaaggatgt

SEQ ID NO: 788219 - DNA, 15 bp, Homo sapiens
ctccctccctgtggc

SEQ ID NO: 788220 - DNA, 15 bp, Homo sapiens
tccctccctgtggcc

SEQ ID NO: 788221 - DNA, 15 bp, Homo sapiens
ccctccctgtggcct

SEQ ID NO: 788222 - DNA, 15 bp, Homo sapiens
cctccctgtggcctg

SEQ ID NO: 788223 - DNA, 15 bp, Homo sapiens
ctccctgtggcctgc

SEQ ID NO: 788224 - DNA, 15 bp, Homo sapiens
tccctgtggcctgca

SEQ ID NO: 788225 - DNA, 15 bp, Homo sapiens
ccctgtggcctgcag

SEQ ID NO: 788226 - DNA, 15 bp, Homo sapiens
cctgtggcctgcaga

SEQ ID NO: 788227 - DNA, 15 bp, Homo sapiens
ctgtggcctgcagag

SEQ ID NO: 788228 - DNA, 15 bp, Homo sapiens
tgtggcctgcagaga

SEQ ID NO: 788229 - DNA, 15 bp, Homo sapiens
gtggcctgcagagat

SEQ ID NO: 788230 - DNA, 15 bp, Homo sapiens
tggcctgcagagatt

SEQ ID NO: 788231 - DNA, 15 bp, Homo sapiens
ggcctgcagagattc

SEQ ID NO: 788232 - DNA, 15 bp, Homo sapiens
gcctgcagagattcc

SEQ ID NO: 788233 - DNA, 15 bp, Homo sapiens
cctgcagagattccg

SEQ ID NO: 788234 - DNA, 15 bp, Homo sapiens
ctgcagagattccga

SEQ ID NO: 788235 - DNA, 15 bp, Homo sapiens
tgcagagattccgac

SEQ ID NO: 788236 - DNA, 15 bp, Homo sapiens
gcagagattccgact

SEQ ID NO: 788237 - DNA, 15 bp, Homo sapiens
cagagattccgactg

SEQ ID NO: 788238 - DNA, 15 bp, Homo sapiens
agagattccgactgc

SEQ ID NO: 788239 - DNA, 15 bp, Homo sapiens
gagattccgactgct

SEQ ID NO: 788240 - DNA, 15 bp, Homo sapiens
agattccgactgctg

SEQ ID NO: 788241 - DNA, 15 bp, Homo sapiens
gattccgactgctgc

SEQ ID NO: 788242 - DNA, 15 bp, Homo sapiens
attccgactgctgct

SEQ ID NO: 788243 - DNA, 15 bp, Homo sapiens
ttccgactgctgctt

SEQ ID NO: 788244 - DNA, 15 bp, Homo sapiens
tccgactgctgcttt

SEQ ID NO: 788245 - DNA, 15 bp, Homo sapiens
ccgactgctgctttg

SEQ ID NO: 788246 - DNA, 15 bp, Homo sapiens
cgactgctgctttgt

SEQ ID NO: 788247 - DNA, 15 bp, Homo sapiens
gactgctgctttgtt

SEQ ID NO: 788248 - DNA, 15 bp, Homo sapiens
actgctgctttgttt

SEQ ID NO: 788249 - DNA, 15 bp, Homo sapiens
ctgctgctttgtttc

SEQ ID NO: 788250 - DNA, 15 bp, Homo sapiens
tgctgctttgtttca

SEQ ID NO: 788251 - DNA, 15 bp, Homo sapiens
gctgctttgtttcac

SEQ ID NO: 788252 - DNA, 15 bp, Homo sapiens
ctgctttgtttcacc

SEQ ID NO: 788253 - DNA, 15 bp, Homo sapiens
tgctttgtttcaccc

SEQ ID NO: 788254 - DNA, 15 bp, Homo sapiens
gctttgtttcaccca

SEQ ID NO: 788255 - DNA, 15 bp, Homo sapiens
ctttgtttcacccag

SEQ ID NO: 788256 - DNA, 15 bp, Homo sapiens
tttgtttcacccaga

SEQ ID NO: 788257 - DNA, 15 bp, Homo sapiens
ttgtttcacccagag

SEQ ID NO: 788258 - DNA, 15 bp, Homo sapiens
tgtttcacccagagc

SEQ ID NO: 788259 - DNA, 15 bp, Homo sapiens
gtttcacccagagca

SEQ ID NO: 788260 - DNA, 15 bp, Homo sapiens
tttcacccagagcac

SEQ ID NO: 788261 - DNA, 15 bp, Homo sapiens
ttcacccagagcacc

SEQ ID NO: 788262 - DNA, 15 bp, Homo sapiens
tcacccagagcacct

SEQ ID NO: 788263 - DNA, 15 bp, Homo sapiens
cacccagagcacctc

SEQ ID NO: 788264 - DNA, 15 bp, Homo sapiens
acccagagcacctct

SEQ ID NO: 788265 - DNA, 15 bp, Homo sapiens
cccagagcacctctt

SEQ ID NO: 788266 - DNA, 15 bp, Homo sapiens
ccagagcacctcttc

SEQ ID NO: 788267 - DNA, 15 bp, Homo sapiens
cagagcacctcttct

SEQ ID NO: 788268 - DNA, 15 bp, Homo sapiens
agagcacctcttctg

SEQ ID NO: 788269 - DNA, 15 bp, Homo sapiens
gagcacctcttctgg

SEQ ID NO: 788270 - DNA, 15 bp, Homo sapiens
agcacctcttctggg

SEQ ID NO: 788271 - DNA, 15 bp, Homo sapiens
gcacctcttctgggc

SEQ ID NO: 788272 - DNA, 15 bp, Homo sapiens
cacctcttctgggct

SEQ ID NO: 788273 - DNA, 15 bp, Homo sapiens
acctcttctgggctg

SEQ ID NO: 788274 - DNA, 15 bp, Homo sapiens
cctcttctgggctga

SEQ ID NO: 788275 - DNA, 15 bp, Homo sapiens
ctcttctgggctgag

SEQ ID NO: 788276 - DNA, 15 bp, Homo sapiens
tcttctgggctgagt

SEQ ID NO: 788277 - DNA, 15 bp, Homo sapiens
cttctgggctgagtg

SEQ ID NO: 788278 - DNA, 15 bp, Homo sapiens
ttctgggctgagtgc

SEQ ID NO: 788279 - DNA, 15 bp, Homo sapiens
tctgggctgagtgct

SEQ ID NO: 788280 - DNA, 15 bp, Homo sapiens
ctgggctgagtgctg

SEQ ID NO: 788281 - DNA, 15 bp, Homo sapiens
tgggctgagtgctgt

SEQ ID NO: 788282 - DNA, 15 bp, Homo sapiens
gggctgagtgctgtg

SEQ ID NO: 788283 - DNA, 15 bp, Homo sapiens
ggctgagtgctgtgg

SEQ ID NO: 788284 - DNA, 15 bp, Homo sapiens
gctgagtgctgtgga

SEQ ID NO: 788285 - DNA, 15 bp, Homo sapiens
ctgagtgctgtggaa

SEQ ID NO: 788286 - DNA, 15 bp, Homo sapiens
tgagtgctgtggaaa

SEQ ID NO: 788287 - DNA, 15 bp, Homo sapiens
gagtgctgtggaaag

SEQ ID NO: 788288 - DNA, 15 bp, Homo sapiens
agtgctgtggaaagg

SEQ ID NO: 788289 - DNA, 15 bp, Homo sapiens
gtgctgtggaaaggg

SEQ ID NO: 788290 - DNA, 15 bp, Homo sapiens
tgctgtggaaagggc

SEQ ID NO: 788291 - DNA, 15 bp, Homo sapiens
gctgtggaaagggcc

SEQ ID NO: 788292 - DNA, 15 bp, Homo sapiens
ctgtggaaagggcca

SEQ ID NO: 788293 - DNA, 15 bp, Homo sapiens
tgtggaaagggccag

SEQ ID NO: 788294 - DNA, 15 bp, Homo sapiens
gtggaaagggccagg

SEQ ID NO: 788295 - DNA, 15 bp, Homo sapiens
tggaaagggccaggt

SEQ ID NO: 788296 - DNA, 15 bp, Homo sapiens
ggaaagggccaggta

SEQ ID NO: 788297 - DNA, 15 bp, Homo sapiens
gaaagggccaggtag

SEQ ID NO: 788298 - DNA, 15 bp, Homo sapiens
aaagggccaggtagg

SEQ ID NO: 788299 - DNA, 15 bp, Homo sapiens
aagggccaggtagga

SEQ ID NO: 788300 - DNA, 15 bp, Homo sapiens
agggccaggtaggaa

SEQ ID NO: 788301 - DNA, 15 bp, Homo sapiens
gggccaggtaggaaa

SEQ ID NO: 788302 - DNA, 15 bp, Homo sapiens
ggccaggtaggaaag

SEQ ID NO: 788303 - DNA, 15 bp, Homo sapiens
gccaggtaggaaagg

SEQ ID NO: 788304 - DNA, 15 bp, Homo sapiens
ccaggtaggaaagga

SEQ ID NO: 788305 - DNA, 15 bp, Homo sapiens
caggtaggaaaggag

SEQ ID NO: 788306 - DNA, 15 bp, Homo sapiens
aggtaggaaaggaga

SEQ ID NO: 788307 - DNA, 15 bp, Homo sapiens
ggtaggaaaggagat

SEQ ID NO: 788308 - DNA, 15 bp, Homo sapiens
gtaggaaaggagatt

SEQ ID NO: 788309 - DNA, 15 bp, Homo sapiens
taggaaaggagattt

SEQ ID NO: 788310 - DNA, 15 bp, Homo sapiens
aggaaaggagattta

SEQ ID NO: 788311 - DNA, 15 bp, Homo sapiens
ggaaaggagatttaa

SEQ ID NO: 788312 - DNA, 15 bp, Homo sapiens
gaaaggagatttaaa

SEQ ID NO: 788313 - DNA, 15 bp, Homo sapiens
aaaggagatttaaag

SEQ ID NO: 788314 - DNA, 15 bp, Homo sapiens
aaggagatttaaagt

SEQ ID NO: 788315 - DNA, 15 bp, Homo sapiens
aggagatttaaagta

SEQ ID NO: 788316 - DNA, 15 bp, Homo sapiens
ggagatttaaagtag

SEQ ID NO: 788317 - DNA, 15 bp, Homo sapiens
gagatttaaagtagc

SEQ ID NO: 788318 - DNA, 15 bp, Homo sapiens
agatttaaagtagct

SEQ ID NO: 788319 - DNA, 15 bp, Homo sapiens
gatttaaagtagctt

SEQ ID NO: 788320 - DNA, 15 bp, Homo sapiens
atttaaagtagcttg

SEQ ID NO: 788321 - DNA, 15 bp, Homo sapiens
tttaaagtagcttga

SEQ ID NO: 788322 - DNA, 15 bp, Homo sapiens
ttaaagtagcttgac

SEQ ID NO: 788323 - DNA, 15 bp, Homo sapiens
taaagtagcttgact

SEQ ID NO: 788324 - DNA, 15 bp, Homo sapiens
aaagtagcttgactc

SEQ ID NO: 788325 - DNA, 15 bp, Homo sapiens
aagtagcttgactca

SEQ ID NO: 788326 - DNA, 15 bp, Homo sapiens
agtagcttgactcag

SEQ ID NO: 788327 - DNA, 15 bp, Homo sapiens
gtagcttgactcagt

SEQ ID NO: 788328 - DNA, 15 bp, Homo sapiens
tagcttgactcagtt

SEQ ID NO: 788329 - DNA, 15 bp, Homo sapiens
agcttgactcagttt

SEQ ID NO: 788330 - DNA, 15 bp, Homo sapiens
gcttgactcagtttc

SEQ ID NO: 788331 - DNA, 15 bp, Homo sapiens
cttgactcagtttct

SEQ ID NO: 788332 - DNA, 15 bp, Homo sapiens
ttgactcagtttctc

SEQ ID NO: 788333 - DNA, 15 bp, Homo sapiens
tgactcagtttctcc

SEQ ID NO: 788334 - DNA, 15 bp, Homo sapiens
gactcagtttctccc

SEQ ID NO: 788335 - DNA, 15 bp, Homo sapiens
actcagtttctcccc

SEQ ID NO: 788336 - DNA, 15 bp, Homo sapiens
ctcagtttctcccct

SEQ ID NO: 788337 - DNA, 15 bp, Homo sapiens
tcagtttctcccctg

SEQ ID NO: 788338 - DNA, 15 bp, Homo sapiens
cagtttctcccctga

SEQ ID NO: 788339 - DNA, 15 bp, Homo sapiens
agtttctcccctgag

SEQ ID NO: 788340 - DNA, 15 bp, Homo sapiens
gtttctcccctgagt

SEQ ID NO: 788341 - DNA, 15 bp, Homo sapiens
tttctcccctgagtt

SEQ ID NO: 788342 - DNA, 15 bp, Homo sapiens
ttctcccctgagttt

SEQ ID NO: 788343 - DNA, 15 bp, Homo sapiens
tctcccctgagtttc

SEQ ID NO: 788344 - DNA, 15 bp, Homo sapiens
ctcccctgagtttcc

SEQ ID NO: 788345 - DNA, 15 bp, Homo sapiens
tcccctgagtttccc

SEQ ID NO: 788346 - DNA, 15 bp, Homo sapiens
cccctgagtttccct

SEQ ID NO: 788347 - DNA, 15 bp, Homo sapiens
ccctgagtttccctt

SEQ ID NO: 788348 - DNA, 15 bp, Homo sapiens
cctgagtttcccttt

SEQ ID NO: 788349 - DNA, 15 bp, Homo sapiens
ctgagtttccctttg

SEQ ID NO: 788350 - DNA, 15 bp, Homo sapiens
tgagtttccctttgg

SEQ ID NO: 788351 - DNA, 15 bp, Homo sapiens
gagtttccctttgga

SEQ ID NO: 788352 - DNA, 15 bp, Homo sapiens
agtttccctttggag

SEQ ID NO: 788353 - DNA, 15 bp, Homo sapiens
gtttccctttggaga

SEQ ID NO: 788354 - DNA, 15 bp, Homo sapiens
tttccctttggagac

SEQ ID NO: 788355 - DNA, 15 bp, Homo sapiens
ttccctttggagacc

SEQ ID NO: 788356 - DNA, 15 bp, Homo sapiens
tccctttggagaccc

SEQ ID NO: 788357 - DNA, 15 bp, Homo sapiens
ccctttggagacccg

SEQ ID NO: 788358 - DNA, 15 bp, Homo sapiens
cctttggagacccga

SEQ ID NO: 788359 - DNA, 15 bp, Homo sapiens
ctttggagacccgag

SEQ ID NO: 788360 - DNA, 15 bp, Homo sapiens
tttggagacccgaga

SEQ ID NO: 788361 - DNA, 15 bp, Homo sapiens
ttggagacccgagaa

SEQ ID NO: 788362 - DNA, 15 bp, Homo sapiens
tggagacccgagaaa

SEQ ID NO: 788363 - DNA, 15 bp, Homo sapiens
ggagacccgagaaac

SEQ ID NO: 788364 - DNA, 15 bp, Homo sapiens
gagacccgagaaaca

SEQ ID NO: 788365 - DNA, 15 bp, Homo sapiens
agacccgagaaacac

SEQ ID NO: 788366 - DNA, 15 bp, Homo sapiens
gacccgagaaacaca

SEQ ID NO: 788367 - DNA, 15 bp, Homo sapiens
acccgagaaacacat

SEQ ID NO: 788368 - DNA, 15 bp, Homo sapiens
cccgagaaacacatc

SEQ ID NO: 788369 - DNA, 15 bp, Homo sapiens
ccgagaaacacatct

SEQ ID NO: 788370 - DNA, 15 bp, Homo sapiens
cgagaaacacatctg

SEQ ID NO: 788371 - DNA, 15 bp, Homo sapiens
gagaaacacatctgg

SEQ ID NO: 788372 - DNA, 15 bp, Homo sapiens
agaaacacatctggg

SEQ ID NO: 788373 - DNA, 15 bp, Homo sapiens
gaaacacatctggga

SEQ ID NO: 788374 - DNA, 15 bp, Homo sapiens
aaacacatctgggaa

SEQ ID NO: 788375 - DNA, 15 bp, Homo sapiens
aacacatctgggaag

SEQ ID NO: 788376 - DNA, 15 bp, Homo sapiens
acacatctgggaagt

SEQ ID NO: 788377 - DNA, 15 bp, Homo sapiens
cacatctgggaagtg

SEQ ID NO: 788378 - DNA, 15 bp, Homo sapiens
acatctgggaagtga

SEQ ID NO: 788379 - DNA, 15 bp, Homo sapiens
catctgggaagtgaa

SEQ ID NO: 788380 - DNA, 15 bp, Homo sapiens
atctgggaagtgaat

SEQ ID NO: 788381 - DNA, 15 bp, Homo sapiens
tctgggaagtgaatg

SEQ ID NO: 788382 - DNA, 15 bp, Homo sapiens
ctgggaagtgaatgg

SEQ ID NO: 788383 - DNA, 15 bp, Homo sapiens
tgggaagtgaatggg

SEQ ID NO: 788384 - DNA, 15 bp, Homo sapiens
gggaagtgaatggga

SEQ ID NO: 788385 - DNA, 15 bp, Homo sapiens
ggaagtgaatgggaa

SEQ ID NO: 788386 - DNA, 15 bp, Homo sapiens
gaagtgaatgggaag

SEQ ID NO: 788387 - DNA, 15 bp, Homo sapiens
aagtgaatgggaaga

SEQ ID NO: 788388 - DNA, 15 bp, Homo sapiens
agtgaatgggaagat

SEQ ID NO: 788389 - DNA, 15 bp, Homo sapiens
gtgaatgggaagatg

SEQ ID NO: 788390 - DNA, 15 bp, Homo sapiens
tgaatgggaagatga

SEQ ID NO: 788391 - DNA, 15 bp, Homo sapiens
gaatgggaagatgag

SEQ ID NO: 788392 - DNA, 15 bp, Homo sapiens
aatgggaagatgaga

SEQ ID NO: 788393 - DNA, 15 bp, Homo sapiens
atgggaagatgagaa

SEQ ID NO: 788394 - DNA, 15 bp, Homo sapiens
tgggaagatgagaag

SEQ ID NO: 788395 - DNA, 15 bp, Homo sapiens
gggaagatgagaaga

SEQ ID NO: 788396 - DNA, 15 bp, Homo sapiens
ggaagatgagaagaa

SEQ ID NO: 788397 - DNA, 15 bp, Homo sapiens
gaagatgagaagaag

SEQ ID NO: 788398 - DNA, 15 bp, Homo sapiens
aagatgagaagaagt

SEQ ID NO: 788399 - DNA, 15 bp, Homo sapiens
agatgagaagaagta

SEQ ID NO: 788400 - DNA, 15 bp, Homo sapiens
gatgagaagaagtaa

SEQ ID NO: 788401 - DNA, 15 bp, Homo sapiens
atgagaagaagtaag

SEQ ID NO: 788402 - DNA, 15 bp, Homo sapiens
tgagaagaagtaagc

SEQ ID NO: 788403 - DNA, 15 bp, Homo sapiens
gagaagaagtaagca

SEQ ID NO: 788404 - DNA, 15 bp, Homo sapiens
agaagaagtaagcaa

SEQ ID NO: 788405 - DNA, 15 bp, Homo sapiens
gaagaagtaagcaaa

SEQ ID NO: 788406 - DNA, 15 bp, Homo sapiens
aagaagtaagcaaaa

SEQ ID NO: 788407 - DNA, 15 bp, Homo sapiens
agaagtaagcaaaac

SEQ ID NO: 788408 - DNA, 15 bp, Homo sapiens
gaagtaagcaaaact

SEQ ID NO: 788409 - DNA, 15 bp, Homo sapiens
aagtaagcaaaactg

SEQ ID NO: 788410 - DNA, 15 bp, Homo sapiens
agtaagcaaaactgg

SEQ ID NO: 788411 - DNA, 15 bp, Homo sapiens
gtaagcaaaactggg

SEQ ID NO: 788412 - DNA, 15 bp, Homo sapiens
taagcaaaactggga

SEQ ID NO: 788413 - DNA, 15 bp, Homo sapiens
aagcaaaactgggaa

SEQ ID NO: 788414 - DNA, 15 bp, Homo sapiens
agcaaaactgggaag

SEQ ID NO: 788415 - DNA, 15 bp, Homo sapiens
gcaaaactgggaaga

SEQ ID NO: 788416 - DNA, 15 bp, Homo sapiens
caaaactgggaagag

SEQ ID NO: 788417 - DNA, 15 bp, Homo sapiens
aaaactgggaagagt

SEQ ID NO: 788418 - DNA, 15 bp, Homo sapiens
aaactgggaagagtg

SEQ ID NO: 788419 - DNA, 15 bp, Homo sapiens
aactgggaagagtga

SEQ ID NO: 788420 - DNA, 15 bp, Homo sapiens
actgggaagagtgaa

SEQ ID NO: 788421 - DNA, 15 bp, Homo sapiens
ctgggaagagtgaag

SEQ ID NO: 788422 - DNA, 15 bp, Homo sapiens
tgggaagagtgaagg

SEQ ID NO: 788423 - DNA, 15 bp, Homo sapiens
gggaagagtgaaggc

SEQ ID NO: 788424 - DNA, 15 bp, Homo sapiens
ggaagagtgaaggcc

SEQ ID NO: 788425 - DNA, 15 bp, Homo sapiens
gaagagtgaaggcct

SEQ ID NO: 788426 - DNA, 15 bp, Homo sapiens
aagagtgaaggcctt

SEQ ID NO: 788427 - DNA, 15 bp, Homo sapiens
agagtgaaggccttg

SEQ ID NO: 788428 - DNA, 15 bp, Homo sapiens
gagtgaaggccttgg

SEQ ID NO: 788429 - DNA, 15 bp, Homo sapiens
agtgaaggccttgga

SEQ ID NO: 788430 - DNA, 15 bp, Homo sapiens
gtgaaggccttggaa

SEQ ID NO: 788431 - DNA, 15 bp, Homo sapiens
tgaaggccttggaag

SEQ ID NO: 788432 - DNA, 15 bp, Homo sapiens
gaaggccttggaagt

SEQ ID NO: 788433 - DNA, 15 bp, Homo sapiens
aaggccttggaagtg

SEQ ID NO: 788434 - DNA, 15 bp, Homo sapiens
aggccttggaagtgc

SEQ ID NO: 788435 - DNA, 15 bp, Homo sapiens
ggccttggaagtgca

SEQ ID NO: 788436 - DNA, 15 bp, Homo sapiens
gccttggaagtgcag

SEQ ID NO: 788437 - DNA, 15 bp, Homo sapiens
ccttggaagtgcaga

SEQ ID NO: 788438 - DNA, 15 bp, Homo sapiens
cttggaagtgcagag

SEQ ID NO: 788439 - DNA, 15 bp, Homo sapiens
ttggaagtgcagagg

SEQ ID NO: 788440 - DNA, 15 bp, Homo sapiens
tggaagtgcagagga

SEQ ID NO: 788441 - DNA, 15 bp, Homo sapiens
ggaagtgcagaggat

SEQ ID NO: 788442 - DNA, 15 bp, Homo sapiens
gaagtgcagaggatg

SEQ ID NO: 788443 - DNA, 15 bp, Homo sapiens
aagtgcagaggatgc

SEQ ID NO: 788444 - DNA, 15 bp, Homo sapiens
agtgcagaggatgcc

SEQ ID NO: 788445 - DNA, 15 bp, Homo sapiens
gtgcagaggatgccg

SEQ ID NO: 788446 - DNA, 15 bp, Homo sapiens
tgcagaggatgccgg

SEQ ID NO: 788447 - DNA, 15 bp, Homo sapiens
gcagaggatgccggt

SEQ ID NO: 788448 - DNA, 15 bp, Homo sapiens
cagaggatgccggtc

SEQ ID NO: 788449 - DNA, 15 bp, Homo sapiens
agaggatgccggtcg

SEQ ID NO: 788450 - DNA, 15 bp, Homo sapiens
gaggatgccggtcgt

SEQ ID NO: 788451 - DNA, 15 bp, Homo sapiens
aggatgccggtcgtc

SEQ ID NO: 788452 - DNA, 15 bp, Homo sapiens
ggatgccggtcgtcc

SEQ ID NO: 788453 - DNA, 15 bp, Homo sapiens
gatgccggtcgtccc

SEQ ID NO: 788454 - DNA, 15 bp, Homo sapiens
atgccggtcgtccca

SEQ ID NO: 788455 - DNA, 15 bp, Homo sapiens
tgccggtcgtcccag

SEQ ID NO: 788456 - DNA, 15 bp, Homo sapiens
gccggtcgtcccagg

SEQ ID NO: 788457 - DNA, 15 bp, Homo sapiens
ccggtcgtcccaggt

SEQ ID NO: 788458 - DNA, 15 bp, Homo sapiens
cggtcgtcccaggtg

SEQ ID NO: 788459 - DNA, 15 bp, Homo sapiens
ggtcgtcccaggtgc

SEQ ID NO: 788460 - DNA, 15 bp, Homo sapiens
gtcgtcccaggtgct

SEQ ID NO: 788461 - DNA, 15 bp, Homo sapiens
tcgtcccaggtgctc

SEQ ID NO: 788462 - DNA, 15 bp, Homo sapiens
cgtcccaggtgctcc

SEQ ID NO: 788463 - DNA, 15 bp, Homo sapiens
gtcccaggtgctccg

SEQ ID NO: 788464 - DNA, 15 bp, Homo sapiens
tcccaggtgctccgg

SEQ ID NO: 788465 - DNA, 15 bp, Homo sapiens
cccaggtgctccggg

SEQ ID NO: 788466 - DNA, 15 bp, Homo sapiens
ccaggtgctccgggg

SEQ ID NO: 788467 - DNA, 15 bp, Homo sapiens
caggtgctccgggga

SEQ ID NO: 788468 - DNA, 15 bp, Homo sapiens
aggtgctccggggag

SEQ ID NO: 788469 - DNA, 15 bp, Homo sapiens
ggtgctccggggagt

SEQ ID NO: 788470 - DNA, 15 bp, Homo sapiens
gtgctccggggagta

SEQ ID NO: 788471 - DNA, 15 bp, Homo sapiens
tgctccggggagtat

SEQ ID NO: 788472 - DNA, 15 bp, Homo sapiens
gctccggggagtatt

SEQ ID NO: 788473 - DNA, 15 bp, Homo sapiens
ctccggggagtattt

SEQ ID NO: 788474 - DNA, 15 bp, Homo sapiens
tccggggagtatttc

SEQ ID NO: 788475 - DNA, 15 bp, Homo sapiens
ccggggagtatttct

SEQ ID NO: 788476 - DNA, 15 bp, Homo sapiens
cggggagtatttctg

SEQ ID NO: 788477 - DNA, 15 bp, Homo sapiens
ggggagtatttctgt

SEQ ID NO: 788478 - DNA, 15 bp, Homo sapiens
gggagtatttctgtt

SEQ ID NO: 788479 - DNA, 15 bp, Homo sapiens
ggagtatttctgttt

SEQ ID NO: 788480 - DNA, 15 bp, Homo sapiens
gagtatttctgttta

SEQ ID NO: 788481 - DNA, 15 bp, Homo sapiens
agtatttctgtttag

SEQ ID NO: 788482 - DNA, 15 bp, Homo sapiens
gtatttctgtttaga

SEQ ID NO: 788483 - DNA, 15 bp, Homo sapiens
tatttctgtttagag

SEQ ID NO: 788484 - DNA, 15 bp, Homo sapiens
atttctgtttagagt

SEQ ID NO: 788485 - DNA, 15 bp, Homo sapiens
tttctgtttagagtg

SEQ ID NO: 788486 - DNA, 15 bp, Homo sapiens
ttctgtttagagtgg

SEQ ID NO: 788487 - DNA, 15 bp, Homo sapiens
tctgtttagagtggc

SEQ ID NO: 788488 - DNA, 15 bp, Homo sapiens
ctgtttagagtggca

SEQ ID NO: 788489 - DNA, 15 bp, Homo sapiens
tgtttagagtggcat

SEQ ID NO: 788490 - DNA, 15 bp, Homo sapiens
gtttagagtggcatg

SEQ ID NO: 788491 - DNA, 15 bp, Homo sapiens
tttagagtggcatgt

SEQ ID NO: 788492 - DNA, 15 bp, Homo sapiens
ttagagtggcatgtg

SEQ ID NO: 788493 - DNA, 15 bp, Homo sapiens
tagagtggcatgtgg

SEQ ID NO: 788494 - DNA, 15 bp, Homo sapiens
gagtggcatgtggag

SEQ ID NO: 788495 - DNA, 15 bp, Homo sapiens
agtggcatgtggagg

SEQ ID NO: 788496 - DNA, 15 bp, Homo sapiens
gtggcatgtggaggg

SEQ ID NO: 788497 - DNA, 15 bp, Homo sapiens
tggcatgtggaggga

SEQ ID NO: 788498 - DNA, 15 bp, Homo sapiens
ggcatgtggagggag

SEQ ID NO: 788499 - DNA, 15 bp, Homo sapiens
gcatgtggagggagt

SEQ ID NO: 788500 - DNA, 15 bp, Homo sapiens
catgtggagggagtg

SEQ ID NO: 788501 - DNA, 15 bp, Homo sapiens
atgtggagggagtgc

SEQ ID NO: 788502 - DNA, 15 bp, Homo sapiens
tgtggagggagtgct

SEQ ID NO: 788503 - DNA, 15 bp, Homo sapiens
gtggagggagtgctc

SEQ ID NO: 788504 - DNA, 15 bp, Homo sapiens
tggagggagtgctct

SEQ ID NO: 788505 - DNA, 15 bp, Homo sapiens
ggagggagtgctctc

SEQ ID NO: 788506 - DNA, 15 bp, Homo sapiens
gagggagtgctctcc

SEQ ID NO: 788507 - DNA, 15 bp, Homo sapiens
agggagtgctctcct

SEQ ID NO: 788508 - DNA, 15 bp, Homo sapiens
gggagtgctctcctg

SEQ ID NO: 788509 - DNA, 15 bp, Homo sapiens
ggagtgctctcctgg

SEQ ID NO: 788510 - DNA, 15 bp, Homo sapiens
gagtgctctcctggt

SEQ ID NO: 788511 - DNA, 15 bp, Homo sapiens
agtgctctcctggta

SEQ ID NO: 788512 - DNA, 15 bp, Homo sapiens
gtgctctcctggtac

SEQ ID NO: 788513 - DNA, 15 bp, Homo sapiens
tgctctcctggtaca

SEQ ID NO: 788514 - DNA, 15 bp, Homo sapiens
gctctcctggtacag

SEQ ID NO: 788515 - DNA, 15 bp, Homo sapiens
ctctcctggtacagc

SEQ ID NO: 788516 - DNA, 15 bp, Homo sapiens
tctcctggtacagca

SEQ ID NO: 788517 - DNA, 15 bp, Homo sapiens
ctcctggtacagcag

SEQ ID NO: 788518 - DNA, 15 bp, Homo sapiens
tcctggtacagcagg

SEQ ID NO: 788519 - DNA, 15 bp, Homo sapiens
cctggtacagcaggc

SEQ ID NO: 788520 - DNA, 15 bp, Homo sapiens
ctggtacagcaggcg

SEQ ID NO: 788521 - DNA, 15 bp, Homo sapiens
tggtacagcaggcgt

SEQ ID NO: 788522 - DNA, 15 bp, Homo sapiens
ggtacagcaggcgtc

SEQ ID NO: 788523 - DNA, 15 bp, Homo sapiens
gtacagcaggcgtcc

SEQ ID NO: 788524 - DNA, 15 bp, Homo sapiens
tacagcaggcgtcca

SEQ ID NO: 788525 - DNA, 15 bp, Homo sapiens
acagcaggcgtccag

SEQ ID NO: 788526 - DNA, 15 bp, Homo sapiens
cagcaggcgtccagg

SEQ ID NO: 788527 - DNA, 15 bp, Homo sapiens
agcaggcgtccaggc

SEQ ID NO: 788528 - DNA, 15 bp, Homo sapiens
gcaggcgtccaggca

SEQ ID NO: 788529 - DNA, 15 bp, Homo sapiens
caggcgtccaggcag

SEQ ID NO: 788530 - DNA, 15 bp, Homo sapiens
aggcgtccaggcaga

SEQ ID NO: 788531 - DNA, 15 bp, Homo sapiens
ggcgtccaggcagag

SEQ ID NO: 788532 - DNA, 15 bp, Homo sapiens
gcgtccaggcagagt

SEQ ID NO: 788533 - DNA, 15 bp, Homo sapiens
cgtccaggcagagtg

SEQ ID NO: 788534 - DNA, 15 bp, Homo sapiens
gtccaggcagagtga

SEQ ID NO: 788535 - DNA, 15 bp, Homo sapiens
tccaggcagagtgag

SEQ ID NO: 788536 - DNA, 15 bp, Homo sapiens
ccaggcagagtgaga

SEQ ID NO: 788537 - DNA, 15 bp, Homo sapiens
caggcagagtgagac

SEQ ID NO: 788538 - DNA, 15 bp, Homo sapiens
agagtgagactctgc

SEQ ID NO: 788539 - DNA, 15 bp, Homo sapiens
gagtgagactctgct

SEQ ID NO: 788540 - DNA, 15 bp, Homo sapiens
agtgagactctgcta

SEQ ID NO: 788541 - DNA, 15 bp, Homo sapiens
gtgagactctgctag

SEQ ID NO: 788542 - DNA, 15 bp, Homo sapiens
tgagactctgctaga

SEQ ID NO: 788543 - DNA, 15 bp, Homo sapiens
gagactctgctagac

SEQ ID NO: 788544 - DNA, 15 bp, Homo sapiens
agactctgctagact

SEQ ID NO: 788545 - DNA, 15 bp, Homo sapiens
gactctgctagactc

SEQ ID NO: 788546 - DNA, 15 bp, Homo sapiens
actctgctagactca

SEQ ID NO: 788547 - DNA, 15 bp, Homo sapiens
ctctgctagactcaa

SEQ ID NO: 788548 - DNA, 15 bp, Homo sapiens
tctgctagactcaac

SEQ ID NO: 788549 - DNA, 15 bp, Homo sapiens
ctgctagactcaact

SEQ ID NO: 788550 - DNA, 15 bp, Homo sapiens
tgctagactcaactc

SEQ ID NO: 788551 - DNA, 15 bp, Homo sapiens
gctagactcaactct

SEQ ID NO: 788552 - DNA, 15 bp, Homo sapiens
ctagactcaactctt

SEQ ID NO: 788553 - DNA, 15 bp, Homo sapiens
tagactcaactcttt

SEQ ID NO: 788554 - DNA, 15 bp, Homo sapiens
agactcaactctttc

SEQ ID NO: 788555 - DNA, 15 bp, Homo sapiens
gactcaactctttct

SEQ ID NO: 788556 - DNA, 15 bp, Homo sapiens
actcaactctttctt

SEQ ID NO: 788557 - DNA, 15 bp, Homo sapiens
ctcaactctttcttc

SEQ ID NO: 788558 - DNA, 15 bp, Homo sapiens
tcaactctttcttct

SEQ ID NO: 788559 - DNA, 15 bp, Homo sapiens
caactctttcttctt

SEQ ID NO: 788560 - DNA, 15 bp, Homo sapiens
aactctttcttcttc

SEQ ID NO: 788561 - DNA, 15 bp, Homo sapiens
actctttcttcttct

SEQ ID NO: 788562 - DNA, 15 bp, Homo sapiens
ctctttcttcttctc

SEQ ID NO: 788563 - DNA, 15 bp, Homo sapiens
tctttcttcttctct

SEQ ID NO: 788564 - DNA, 15 bp, Homo sapiens
ctttcttcttctctg

SEQ ID NO: 788565 - DNA, 15 bp, Homo sapiens
tttcttcttctctga

SEQ ID NO: 788566 - DNA, 15 bp, Homo sapiens
ttcttcttctctgaa

SEQ ID NO: 788567 - DNA, 15 bp, Homo sapiens
tcttcttctctgaag

SEQ ID NO: 788568 - DNA, 15 bp, Homo sapiens
cttcttctctgaagg

SEQ ID NO: 788569 - DNA, 15 bp, Homo sapiens
ttcttctctgaagga

SEQ ID NO: 788570 - DNA, 15 bp, Homo sapiens
tcttctctgaaggaa

SEQ ID NO: 788571 - DNA, 15 bp, Homo sapiens
cttctctgaaggaat

SEQ ID NO: 788572 - DNA, 15 bp, Homo sapiens
ttctctgaaggaatc

SEQ ID NO: 788573 - DNA, 15 bp, Homo sapiens
tctctgaaggaatca

SEQ ID NO: 788574 - DNA, 15 bp, Homo sapiens
ctctgaaggaatcag

SEQ ID NO: 788575 - DNA, 15 bp, Homo sapiens
tctgaaggaatcaga

SEQ ID NO: 788576 - DNA, 15 bp, Homo sapiens
ctgaaggaatcagag

SEQ ID NO: 788577 - DNA, 15 bp, Homo sapiens
tgaaggaatcagaga

SEQ ID NO: 788578 - DNA, 15 bp, Homo sapiens
gaaggaatcagagac

SEQ ID NO: 788579 - DNA, 15 bp, Homo sapiens
aaggaatcagagact

SEQ ID NO: 788580 - DNA, 15 bp, Homo sapiens
aggaatcagagactg

SEQ ID NO: 788581 - DNA, 15 bp, Homo sapiens
ggaatcagagactga

SEQ ID NO: 788582 - DNA, 15 bp, Homo sapiens
gaatcagagactgaa

SEQ ID NO: 788583 - DNA, 15 bp, Homo sapiens
aatcagagactgaaa

SEQ ID NO: 788584 - DNA, 15 bp, Homo sapiens
atcagagactgaaac

SEQ ID NO: 788585 - DNA, 15 bp, Homo sapiens
tcagagactgaaaca

SEQ ID NO: 788586 - DNA, 15 bp, Homo sapiens
cagagactgaaacaa

SEQ ID NO: 788587 - DNA, 15 bp, Homo sapiens
agagactgaaacaag

SEQ ID NO: 788588 - DNA, 15 bp, Homo sapiens
gagactgaaacaagg

SEQ ID NO: 788589 - DNA, 15 bp, Homo sapiens
agactgaaacaagga

SEQ ID NO: 788590 - DNA, 15 bp, Homo sapiens
gactgaaacaaggat

SEQ ID NO: 788591 - DNA, 15 bp, Homo sapiens
actgaaacaaggatg

SEQ ID NO: 788592 - DNA, 15 bp, Homo sapiens
ctgaaacaaggatgg

SEQ ID NO: 788593 - DNA, 15 bp, Homo sapiens
tgaaacaaggatggc

SEQ ID NO: 788594 - DNA, 15 bp, Homo sapiens
gaaacaaggatggct

SEQ ID NO: 788595 - DNA, 15 bp, Homo sapiens
aaacaaggatggctt

SEQ ID NO: 788596 - DNA, 15 bp, Homo sapiens
aacaaggatggcttc

SEQ ID NO: 788597 - DNA, 15 bp, Homo sapiens
acaaggatggcttca

SEQ ID NO: 788598 - DNA, 15 bp, Homo sapiens
caaggatggcttcat

SEQ ID NO: 788599 - DNA, 15 bp, Homo sapiens
aaggatggcttcatc

SEQ ID NO: 788600 - DNA, 15 bp, Homo sapiens
aggatggcttcatca

SEQ ID NO: 788601 - DNA, 15 bp, Homo sapiens
ggatggcttcatcag

SEQ ID NO: 788602 - DNA, 15 bp, Homo sapiens
gatggcttcatcagt

SEQ ID NO: 788603 - DNA, 15 bp, Homo sapiens
atggcttcatcagtt

SEQ ID NO: 788604 - DNA, 15 bp, Homo sapiens
tggcttcatcagttt

SEQ ID NO: 788605 - DNA, 15 bp, Homo sapiens
ggcttcatcagtttg

SEQ ID NO: 788606 - DNA, 15 bp, Homo sapiens
gcttcatcagtttgg

SEQ ID NO: 788607 - DNA, 15 bp, Homo sapiens
cttcatcagtttggc

SEQ ID NO: 788608 - DNA, 15 bp, Homo sapiens
ttcatcagtttggcc

SEQ ID NO: 788609 - DNA, 15 bp, Homo sapiens
tcatcagtttggcca

SEQ ID NO: 788610 - DNA, 15 bp, Homo sapiens
catcagtttggccat

SEQ ID NO: 788611 - DNA, 15 bp, Homo sapiens
atcagtttggccata

SEQ ID NO: 788612 - DNA, 15 bp, Homo sapiens
tcagtttggccatag

SEQ ID NO: 788613 - DNA, 15 bp, Homo sapiens
cagtttggccatagc

SEQ ID NO: 788614 - DNA, 15 bp, Homo sapiens
agtttggccatagcc

SEQ ID NO: 788615 - DNA, 15 bp, Homo sapiens
gtttggccatagcct

SEQ ID NO: 788616 - DNA, 15 bp, Homo sapiens
tttggccatagcctg

SEQ ID NO: 788617 - DNA, 15 bp, Homo sapiens
ttggccatagcctgg

SEQ ID NO: 788618 - DNA, 15 bp, Homo sapiens
tggccatagcctgga

SEQ ID NO: 788619 - DNA, 15 bp, Homo sapiens
ggccatagcctggaa

SEQ ID NO: 788620 - DNA, 15 bp, Homo sapiens
gccatagcctggaaa

SEQ ID NO: 788621 - DNA, 15 bp, Homo sapiens
ccatagcctggaaag

SEQ ID NO: 788622 - DNA, 15 bp, Homo sapiens
catagcctggaaaga

SEQ ID NO: 788623 - DNA, 15 bp, Homo sapiens
atagcctggaaagac

SEQ ID NO: 788624 - DNA, 15 bp, Homo sapiens
tagcctggaaagact

SEQ ID NO: 788625 - DNA, 15 bp, Homo sapiens
agcctggaaagactg

SEQ ID NO: 788626 - DNA, 15 bp, Homo sapiens
gcctggaaagactgg

SEQ ID NO: 788627 - DNA, 15 bp, Homo sapiens
cctggaaagactggg

SEQ ID NO: 788628 - DNA, 15 bp, Homo sapiens
ctggaaagactggga

SEQ ID NO: 788629 - DNA, 15 bp, Homo sapiens
tggaaagactgggaa

SEQ ID NO: 788630 - DNA, 15 bp, Homo sapiens
ggaaagactgggaaa

SEQ ID NO: 788631 - DNA, 15 bp, Homo sapiens
gaaagactgggaaac

SEQ ID NO: 788632 - DNA, 15 bp, Homo sapiens
aaagactgggaaacc

SEQ ID NO: 788633 - DNA, 15 bp, Homo sapiens
aagactgggaaaccc

SEQ ID NO: 788634 - DNA, 15 bp, Homo sapiens
agactgggaaaccca

SEQ ID NO: 788635 - DNA, 15 bp, Homo sapiens
gactgggaaacccag

SEQ ID NO: 788636 - DNA, 15 bp, Homo sapiens
actgggaaacccagc

SEQ ID NO: 788637 - DNA, 15 bp, Homo sapiens
ctgggaaacccagca

SEQ ID NO: 788638 - DNA, 15 bp, Homo sapiens
tgggaaacccagcag

SEQ ID NO: 788639 - DNA, 15 bp, Homo sapiens
gggaaacccagcagc

SEQ ID NO: 788640 - DNA, 15 bp, Homo sapiens
ggaaacccagcagct

SEQ ID NO: 788641 - DNA, 15 bp, Homo sapiens
gaaacccagcagctc

SEQ ID NO: 788642 - DNA, 15 bp, Homo sapiens
aaacccagcagctct

SEQ ID NO: 788643 - DNA, 15 bp, Homo sapiens
aacccagcagctctc

SEQ ID NO: 788644 - DNA, 15 bp, Homo sapiens
acccagcagctctct

SEQ ID NO: 788645 - DNA, 15 bp, Homo sapiens
cccagcagctctctg

SEQ ID NO: 788646 - DNA, 15 bp, Homo sapiens
ccagcagctctctgg

SEQ ID NO: 788647 - DNA, 15 bp, Homo sapiens
cagcagctctctggc

SEQ ID NO: 788648 - DNA, 15 bp, Homo sapiens
agcagctctctggcc

SEQ ID NO: 788649 - DNA, 15 bp, Homo sapiens
gcagctctctggccc

SEQ ID NO: 788650 - DNA, 15 bp, Homo sapiens
cagctctctggcccc

SEQ ID NO: 788651 - DNA, 15 bp, Homo sapiens
agctctctggcccct

SEQ ID NO: 788652 - DNA, 15 bp, Homo sapiens
gctctctggcccctg

SEQ ID NO: 788653 - DNA, 15 bp, Homo sapiens
ctctctggcccctgg

SEQ ID NO: 788654 - DNA, 15 bp, Homo sapiens
tctctggcccctggg

SEQ ID NO: 788655 - DNA, 15 bp, Homo sapiens
ctctggcccctgggc

SEQ ID NO: 788656 - DNA, 15 bp, Homo sapiens
tctggcccctgggct

SEQ ID NO: 788657 - DNA, 15 bp, Homo sapiens
ctggcccctgggctc

SEQ ID NO: 788658 - DNA, 15 bp, Homo sapiens
tggcccctgggctca

SEQ ID NO: 788659 - DNA, 15 bp, Homo sapiens
ggcccctgggctcac

SEQ ID NO: 788660 - DNA, 15 bp, Homo sapiens
gcccctgggctcaca

SEQ ID NO: 788661 - DNA, 15 bp, Homo sapiens
cccctgggctcacag

SEQ ID NO: 788662 - DNA, 15 bp, Homo sapiens
ccctgggctcacaga

SEQ ID NO: 788663 - DNA, 15 bp, Homo sapiens
cctgggctcacagac

SEQ ID NO: 788664 - DNA, 15 bp, Homo sapiens
ctgggctcacagacg

SEQ ID NO: 788665 - DNA, 15 bp, Homo sapiens
tgggctcacagacga

SEQ ID NO: 788666 - DNA, 15 bp, Homo sapiens
gggctcacagacgac

SEQ ID NO: 788667 - DNA, 15 bp, Homo sapiens
ggctcacagacgaca

SEQ ID NO: 788668 - DNA, 15 bp, Homo sapiens
gctcacagacgacat

SEQ ID NO: 788669 - DNA, 15 bp, Homo sapiens
ctcacagacgacata

SEQ ID NO: 788670 - DNA, 15 bp, Homo sapiens
tcacagacgacatag

SEQ ID NO: 788671 - DNA, 15 bp, Homo sapiens
cacagacgacatagt

SEQ ID NO: 788672 - DNA, 15 bp, Homo sapiens
acagacgacatagtt

SEQ ID NO: 788673 - DNA, 15 bp, Homo sapiens
cagacgacatagttc

SEQ ID NO: 788674 - DNA, 15 bp, Homo sapiens
agacgacatagttct

SEQ ID NO: 788675 - DNA, 15 bp, Homo sapiens
gacgacatagttctt

SEQ ID NO: 788676 - DNA, 15 bp, Homo sapiens
acgacatagttcttg

SEQ ID NO: 788677 - DNA, 15 bp, Homo sapiens
cgacatagttcttgg

SEQ ID NO: 788678 - DNA, 15 bp, Homo sapiens
gacatagttcttgga

SEQ ID NO: 788679 - DNA, 15 bp, Homo sapiens
acatagttcttggaa

SEQ ID NO: 788680 - DNA, 15 bp, Homo sapiens
catagttcttggaag

SEQ ID NO: 788681 - DNA, 15 bp, Homo sapiens
atagttcttggaagc

SEQ ID NO: 788682 - DNA, 15 bp, Homo sapiens
tagttcttggaagct

SEQ ID NO: 788683 - DNA, 15 bp, Homo sapiens
agttcttggaagctg

SEQ ID NO: 788684 - DNA, 15 bp, Homo sapiens
gttcttggaagctgt

SEQ ID NO: 788685 - DNA, 15 bp, Homo sapiens
ttcttggaagctgtc

SEQ ID NO: 788686 - DNA, 15 bp, Homo sapiens
tcttggaagctgtca

SEQ ID NO: 788687 - DNA, 15 bp, Homo sapiens
cttggaagctgtcat

SEQ ID NO: 788688 - DNA, 15 bp, Homo sapiens
ttggaagctgtcatc

SEQ ID NO: 788689 - DNA, 15 bp, Homo sapiens
tggaagctgtcatcc

SEQ ID NO: 788690 - DNA, 15 bp, Homo sapiens
ggaagctgtcatccc

SEQ ID NO: 788691 - DNA, 15 bp, Homo sapiens
gaagctgtcatccct

SEQ ID NO: 788692 - DNA, 15 bp, Homo sapiens
aagctgtcatccctg

SEQ ID NO: 788693 - DNA, 15 bp, Homo sapiens
agctgtcatccctgc

SEQ ID NO: 788694 - DNA, 15 bp, Homo sapiens
gctgtcatccctgcc

SEQ ID NO: 788695 - DNA, 15 bp, Homo sapiens
ctgtcatccctgcct

SEQ ID NO: 788696 - DNA, 15 bp, Homo sapiens
tgtcatccctgcctg

SEQ ID NO: 788697 - DNA, 15 bp, Homo sapiens
gtcatccctgcctgt

SEQ ID NO: 788698 - DNA, 15 bp, Homo sapiens
tcatccctgcctgtg

SEQ ID NO: 788699 - DNA, 15 bp, Homo sapiens
catccctgcctgtga

SEQ ID NO: 788700 - DNA, 15 bp, Homo sapiens
atccctgcctgtgat

SEQ ID NO: 788701 - DNA, 15 bp, Homo sapiens
tccctgcctgtgatg

SEQ ID NO: 788702 - DNA, 15 bp, Homo sapiens
ccctgcctgtgatga

SEQ ID NO: 788703 - DNA, 15 bp, Homo sapiens
cctgcctgtgatgac

SEQ ID NO: 788704 - DNA, 15 bp, Homo sapiens
ctgcctgtgatgact

SEQ ID NO: 788705 - DNA, 15 bp, Homo sapiens
tgcctgtgatgactg

SEQ ID NO: 788706 - DNA, 15 bp, Homo sapiens
gcctgtgatgactga

SEQ ID NO: 788707 - DNA, 15 bp, Homo sapiens
cctgtgatgactgac

SEQ ID NO: 788708 - DNA, 15 bp, Homo sapiens
ctgtgatgactgacc

SEQ ID NO: 788709 - DNA, 15 bp, Homo sapiens
tgtgatgactgacct

SEQ ID NO: 788710 - DNA, 15 bp, Homo sapiens
gtgatgactgacctg

SEQ ID NO: 788711 - DNA, 15 bp, Homo sapiens
tgatgactgacctgc

SEQ ID NO: 788712 - DNA, 15 bp, Homo sapiens
gatgactgacctgcc

SEQ ID NO: 788713 - DNA, 15 bp, Homo sapiens
atgactgacctgcct

SEQ ID NO: 788714 - DNA, 15 bp, Homo sapiens
tgactgacctgcctc

SEQ ID NO: 788715 - DNA, 15 bp, Homo sapiens
gactgacctgcctct

SEQ ID NO: 788716 - DNA, 15 bp, Homo sapiens
actgacctgcctctt

SEQ ID NO: 788717 - DNA, 15 bp, Homo sapiens
ctgacctgcctcttg

SEQ ID NO: 788718 - DNA, 15 bp, Homo sapiens
tgacctgcctcttgc

SEQ ID NO: 788719 - DNA, 15 bp, Homo sapiens
gacctgcctcttgcc

SEQ ID NO: 788720 - DNA, 15 bp, Homo sapiens
acctgcctcttgcca

SEQ ID NO: 788721 - DNA, 15 bp, Homo sapiens
cctgcctcttgccag

SEQ ID NO: 788722 - DNA, 15 bp, Homo sapiens
ctgcctcttgccagg

SEQ ID NO: 788723 - DNA, 15 bp, Homo sapiens
tgcctcttgccaggc

SEQ ID NO: 788724 - DNA, 15 bp, Homo sapiens
gcctcttgccaggct

SEQ ID NO: 788725 - DNA, 15 bp, Homo sapiens
cctcttgccaggctt

SEQ ID NO: 788726 - DNA, 15 bp, Homo sapiens
ctcttgccaggcttc

SEQ ID NO: 788727 - DNA, 15 bp, Homo sapiens
tcttgccaggcttcc

SEQ ID NO: 788728 - DNA, 15 bp, Homo sapiens
cttgccaggcttcca

SEQ ID NO: 788729 - DNA, 15 bp, Homo sapiens
ttgccaggcttccat

SEQ ID NO: 788730 - DNA, 15 bp, Homo sapiens
tgccaggcttccatc

SEQ ID NO: 788731 - DNA, 15 bp, Homo sapiens
gccaggcttccatcc

SEQ ID NO: 788732 - DNA, 15 bp, Homo sapiens
ccaggcttccatcct

SEQ ID NO: 788733 - DNA, 15 bp, Homo sapiens
caggcttccatcctt

SEQ ID NO: 788734 - DNA, 15 bp, Homo sapiens
aggcttccatccttg

SEQ ID NO: 788735 - DNA, 15 bp, Homo sapiens
ggcttccatccttgc

SEQ ID NO: 788736 - DNA, 15 bp, Homo sapiens
gcttccatccttgct

SEQ ID NO: 788737 - DNA, 15 bp, Homo sapiens
cttccatccttgctt

SEQ ID NO: 788738 - DNA, 15 bp, Homo sapiens
ttccatccttgcttc

SEQ ID NO: 788739 - DNA, 15 bp, Homo sapiens
tccatccttgcttca

SEQ ID NO: 788740 - DNA, 15 bp, Homo sapiens
ccatccttgcttcaa

SEQ ID NO: 788741 - DNA, 15 bp, Homo sapiens
catccttgcttcaag

SEQ ID NO: 788742 - DNA, 15 bp, Homo sapiens
atccttgcttcaagg

SEQ ID NO: 788743 - DNA, 15 bp, Homo sapiens
tccttgcttcaaggc

SEQ ID NO: 788744 - DNA, 15 bp, Homo sapiens
ccttgcttcaaggcc

SEQ ID NO: 788745 - DNA, 15 bp, Homo sapiens
cttgcttcaaggcct

SEQ ID NO: 788746 - DNA, 15 bp, Homo sapiens
ttgcttcaaggcctg

SEQ ID NO: 788747 - DNA, 15 bp, Homo sapiens
tgcttcaaggcctgc

SEQ ID NO: 788748 - DNA, 15 bp, Homo sapiens
gcttcaaggcctgct

SEQ ID NO: 788749 - DNA, 15 bp, Homo sapiens
cttcaaggcctgcta

SEQ ID NO: 788750 - DNA, 15 bp, Homo sapiens
ttcaaggcctgctaa

SEQ ID NO: 788751 - DNA, 15 bp, Homo sapiens
tcaaggcctgctaat

SEQ ID NO: 788752 - DNA, 15 bp, Homo sapiens
caaggcctgctaatc

SEQ ID NO: 788753 - DNA, 15 bp, Homo sapiens
aaggcctgctaatca

SEQ ID NO: 788754 - DNA, 15 bp, Homo sapiens
aggcctgctaatcat

SEQ ID NO: 788755 - DNA, 15 bp, Homo sapiens
ggcctgctaatcatc

SEQ ID NO: 788756 - DNA, 15 bp, Homo sapiens
gcctgctaatcatca

SEQ ID NO: 788757 - DNA, 15 bp, Homo sapiens
cctgctaatcatcag

SEQ ID NO: 788758 - DNA, 15 bp, Homo sapiens
ctgctaatcatcagc

SEQ ID NO: 788759 - DNA, 15 bp, Homo sapiens
tgctaatcatcagct

SEQ ID NO: 788760 - DNA, 15 bp, Homo sapiens
gctaatcatcagctc

SEQ ID NO: 788761 - DNA, 15 bp, Homo sapiens
ctaatcatcagctcc

SEQ ID NO: 788762 - DNA, 15 bp, Homo sapiens
taatcatcagctcca

SEQ ID NO: 788763 - DNA, 15 bp, Homo sapiens
aatcatcagctccac

SEQ ID NO: 788764 - DNA, 15 bp, Homo sapiens
atcatcagctccact

SEQ ID NO: 788765 - DNA, 15 bp, Homo sapiens
tcatcagctccactg

SEQ ID NO: 788766 - DNA, 15 bp, Homo sapiens
catcagctccactgg

SEQ ID NO: 788767 - DNA, 15 bp, Homo sapiens
atcagctccactggg

SEQ ID NO: 788768 - DNA, 15 bp, Homo sapiens
tcagctccactggga

SEQ ID NO: 788769 - DNA, 15 bp, Homo sapiens
cagctccactgggag

SEQ ID NO: 788770 - DNA, 15 bp, Homo sapiens
agctccactgggaga

SEQ ID NO: 788771 - DNA, 15 bp, Homo sapiens
gctccactgggagat

SEQ ID NO: 788772 - DNA, 15 bp, Homo sapiens
ctccactgggagatc

SEQ ID NO: 788773 - DNA, 15 bp, Homo sapiens
tccactgggagatct

SEQ ID NO: 788774 - DNA, 15 bp, Homo sapiens
ccactgggagatctt

SEQ ID NO: 788775 - DNA, 15 bp, Homo sapiens
cactgggagatcttt

SEQ ID NO: 788776 - DNA, 15 bp, Homo sapiens
actgggagatctttg

SEQ ID NO: 788777 - DNA, 15 bp, Homo sapiens
ctgggagatctttgc

SEQ ID NO: 788778 - DNA, 15 bp, Homo sapiens
tgggagatctttgca

SEQ ID NO: 788779 - DNA, 15 bp, Homo sapiens
gggagatctttgcag

SEQ ID NO: 788780 - DNA, 15 bp, Homo sapiens
ggagatctttgcagg

SEQ ID NO: 788781 - DNA, 15 bp, Homo sapiens
gagatctttgcaggc

SEQ ID NO: 788782 - DNA, 15 bp, Homo sapiens
agatctttgcaggct

SEQ ID NO: 788783 - DNA, 15 bp, Homo sapiens
gatctttgcaggctg

SEQ ID NO: 788784 - DNA, 15 bp, Homo sapiens
atctttgcaggctgc

SEQ ID NO: 788785 - DNA, 15 bp, Homo sapiens
tctttgcaggctgcc

SEQ ID NO: 788786 - DNA, 15 bp, Homo sapiens
ctttgcaggctgccc

SEQ ID NO: 788787 - DNA, 15 bp, Homo sapiens
tttgcaggctgccct

SEQ ID NO: 788788 - DNA, 15 bp, Homo sapiens
ttgcaggctgccctg

SEQ ID NO: 788789 - DNA, 15 bp, Homo sapiens
tgcaggctgccctgg

SEQ ID NO: 788790 - DNA, 15 bp, Homo sapiens
gcaggctgccctgga

SEQ ID NO: 788791 - DNA, 15 bp, Homo sapiens
caggctgccctggaa

SEQ ID NO: 788792 - DNA, 15 bp, Homo sapiens
aggctgccctggaat

SEQ ID NO: 788793 - DNA, 15 bp, Homo sapiens
ggctgccctggaatc

SEQ ID NO: 788794 - DNA, 15 bp, Homo sapiens
gctgccctggaatca

SEQ ID NO: 788795 - DNA, 15 bp, Homo sapiens
ctgccctggaatcat

SEQ ID NO: 788796 - DNA, 15 bp, Homo sapiens
tgccctggaatcata

SEQ ID NO: 788797 - DNA, 15 bp, Homo sapiens
gccctggaatcatag

SEQ ID NO: 788798 - DNA, 15 bp, Homo sapiens
ccctggaatcatagc

SEQ ID NO: 788799 - DNA, 15 bp, Homo sapiens
cctggaatcatagct

SEQ ID NO: 788800 - DNA, 15 bp, Homo sapiens
ctggaatcatagctc

SEQ ID NO: 788801 - DNA, 15 bp, Homo sapiens
tggaatcatagctcc

SEQ ID NO: 788802 - DNA, 15 bp, Homo sapiens
ggaatcatagctcca

SEQ ID NO: 788803 - DNA, 15 bp, Homo sapiens
gaatcatagctccag

SEQ ID NO: 788804 - DNA, 15 bp, Homo sapiens
aatcatagctccagg

SEQ ID NO: 788805 - DNA, 15 bp, Homo sapiens
atcatagctccaggc

SEQ ID NO: 788806 - DNA, 15 bp, Homo sapiens
tcatagctccaggcc

SEQ ID NO: 788807 - DNA, 15 bp, Homo sapiens
catagctccaggcct

SEQ ID NO: 788808 - DNA, 15 bp, Homo sapiens
atagctccaggcctt

SEQ ID NO: 788809 - DNA, 15 bp, Homo sapiens
tagctccaggccttt

SEQ ID NO: 788810 - DNA, 15 bp, Homo sapiens
agctccaggcctttg

SEQ ID NO: 788811 - DNA, 15 bp, Homo sapiens
gctccaggcctttgt

SEQ ID NO: 788812 - DNA, 15 bp, Homo sapiens
ctccaggcctttgtt

SEQ ID NO: 788813 - DNA, 15 bp, Homo sapiens
tccaggcctttgttc

SEQ ID NO: 788814 - DNA, 15 bp, Homo sapiens
ccaggcctttgttct

SEQ ID NO: 788815 - DNA, 15 bp, Homo sapiens
caggcctttgttcta

SEQ ID NO: 788816 - DNA, 15 bp, Homo sapiens
aggcctttgttctag

SEQ ID NO: 788817 - DNA, 15 bp, Homo sapiens
ggcctttgttctaga

SEQ ID NO: 788818 - DNA, 15 bp, Homo sapiens
gcctttgttctagaa

SEQ ID NO: 788819 - DNA, 15 bp, Homo sapiens
cctttgttctagaac

SEQ ID NO: 788820 - DNA, 15 bp, Homo sapiens
ctttgttctagaaca

SEQ ID NO: 788821 - DNA, 15 bp, Homo sapiens
tttgttctagaacat

SEQ ID NO: 788822 - DNA, 15 bp, Homo sapiens
ttgttctagaacatc

SEQ ID NO: 788823 - DNA, 15 bp, Homo sapiens
tgttctagaacatct

SEQ ID NO: 788824 - DNA, 15 bp, Homo sapiens
gttctagaacatctg

SEQ ID NO: 788825 - DNA, 15 bp, Homo sapiens
ttctagaacatctgt

SEQ ID NO: 788826 - DNA, 15 bp, Homo sapiens
tctagaacatctgtt

SEQ ID NO: 788827 - DNA, 15 bp, Homo sapiens
ctagaacatctgttg

SEQ ID NO: 788828 - DNA, 15 bp, Homo sapiens
tagaacatctgttgc

SEQ ID NO: 788829 - DNA, 15 bp, Homo sapiens
agaacatctgttgca

SEQ ID NO: 788830 - DNA, 15 bp, Homo sapiens
gaacatctgttgcat

SEQ ID NO: 788831 - DNA, 15 bp, Homo sapiens
aacatctgttgcatt

SEQ ID NO: 788832 - DNA, 15 bp, Homo sapiens
acatctgttgcattg

SEQ ID NO: 788833 - DNA, 15 bp, Homo sapiens
catctgttgcattgt

SEQ ID NO: 788834 - DNA, 15 bp, Homo sapiens
atctgttgcattgta

SEQ ID NO: 788835 - DNA, 15 bp, Homo sapiens
tctgttgcattgtat

SEQ ID NO: 788836 - DNA, 15 bp, Homo sapiens
ctgttgcattgtatt

SEQ ID NO: 788837 - DNA, 15 bp, Homo sapiens
tgttgcattgtattg

SEQ ID NO: 788838 - DNA, 15 bp, Homo sapiens
gttgcattgtattgt

SEQ ID NO: 788839 - DNA, 15 bp, Homo sapiens
ttgcattgtattgta

SEQ ID NO: 788840 - DNA, 15 bp, Homo sapiens
tgcattgtattgtac

SEQ ID NO: 788841 - DNA, 15 bp, Homo sapiens
gcattgtattgtacc

SEQ ID NO: 788842 - DNA, 15 bp, Homo sapiens
cattgtattgtacct

SEQ ID NO: 788843 - DNA, 15 bp, Homo sapiens
attgtattgtaccta

SEQ ID NO: 788844 - DNA, 15 bp, Homo sapiens
ttgtattgtacctat

SEQ ID NO: 788845 - DNA, 15 bp, Homo sapiens
tgtattgtacctatt

SEQ ID NO: 788846 - DNA, 15 bp, Homo sapiens
gtattgtacctattg

SEQ ID NO: 788847 - DNA, 15 bp, Homo sapiens
tattgtacctattgc

SEQ ID NO: 788848 - DNA, 15 bp, Homo sapiens
attgtacctattgct

SEQ ID NO: 788849 - DNA, 15 bp, Homo sapiens
ttgtacctattgctt

SEQ ID NO: 788850 - DNA, 15 bp, Homo sapiens
tgtacctattgcttt

SEQ ID NO: 788851 - DNA, 15 bp, Homo sapiens
gtacctattgcttta

SEQ ID NO: 788852 - DNA, 15 bp, Homo sapiens
tacctattgctttat

SEQ ID NO: 788853 - DNA, 15 bp, Homo sapiens
acctattgctttata

SEQ ID NO: 788854 - DNA, 15 bp, Homo sapiens
cctattgctttatat

SEQ ID NO: 788855 - DNA, 15 bp, Homo sapiens
ctattgctttatata

SEQ ID NO: 788856 - DNA, 15 bp, Homo sapiens
tattgctttatatat

SEQ ID NO: 788857 - DNA, 15 bp, Homo sapiens
attgctttatatatt

SEQ ID NO: 788858 - DNA, 15 bp, Homo sapiens
ttgctttatatattt

SEQ ID NO: 788859 - DNA, 15 bp, Homo sapiens
tgctttatatatttt

SEQ ID NO: 788860 - DNA, 15 bp, Homo sapiens
gctttatatattttt

SEQ ID NO: 788861 - DNA, 15 bp, Homo sapiens
ctttatatatttttc

SEQ ID NO: 788862 - DNA, 15 bp, Homo sapiens
tttatatatttttct

SEQ ID NO: 788863 - DNA, 15 bp, Homo sapiens
ttatatatttttctt

SEQ ID NO: 788864 - DNA, 15 bp, Homo sapiens
tatatatttttcttc

SEQ ID NO: 788865 - DNA, 15 bp, Homo sapiens
atatatttttcttcc

SEQ ID NO: 788866 - DNA, 15 bp, Homo sapiens
tatatttttcttcct

SEQ ID NO: 788867 - DNA, 15 bp, Homo sapiens
atatttttcttcctt

SEQ ID NO: 788868 - DNA, 15 bp, Homo sapiens
tatttttcttccttt

SEQ ID NO: 788869 - DNA, 15 bp, Homo sapiens
atttttcttcctttt

SEQ ID NO: 788870 - DNA, 15 bp, Homo sapiens
tttttcttccttttc

SEQ ID NO: 788871 - DNA, 15 bp, Homo sapiens
ttttcttccttttct

SEQ ID NO: 788872 - DNA, 15 bp, Homo sapiens
tttcttccttttctc

SEQ ID NO: 788873 - DNA, 15 bp, Homo sapiens
ttcttccttttctcc

SEQ ID NO: 788874 - DNA, 15 bp, Homo sapiens
tcttccttttctcca

SEQ ID NO: 788875 - DNA, 15 bp, Homo sapiens
cttccttttctccaa

SEQ ID NO: 788876 - DNA, 15 bp, Homo sapiens
ttccttttctccaag

SEQ ID NO: 788877 - DNA, 15 bp, Homo sapiens
tccttttctccaaga

SEQ ID NO: 788878 - DNA, 15 bp, Homo sapiens
ccttttctccaagac

SEQ ID NO: 788879 - DNA, 15 bp, Homo sapiens
cttttctccaagaca

SEQ ID NO: 788880 - DNA, 15 bp, Homo sapiens
ttttctccaagacaa

SEQ ID NO: 788881 - DNA, 15 bp, Homo sapiens
tttctccaagacaag

SEQ ID NO: 788882 - DNA, 15 bp, Homo sapiens
ttctccaagacaaga

SEQ ID NO: 788883 - DNA, 15 bp, Homo sapiens
tctccaagacaagaa

SEQ ID NO: 788884 - DNA, 15 bp, Homo sapiens
ctccaagacaagaat

SEQ ID NO: 788885 - DNA, 15 bp, Homo sapiens
tccaagacaagaatg

SEQ ID NO: 788886 - DNA, 15 bp, Homo sapiens
ccaagacaagaatgt

SEQ ID NO: 788887 - DNA, 15 bp, Homo sapiens
caagacaagaatgtg

SEQ ID NO: 788888 - DNA, 15 bp, Homo sapiens
aagacaagaatgtgc

SEQ ID NO: 788889 - DNA, 15 bp, Homo sapiens
agacaagaatgtgca

SEQ ID NO: 788890 - DNA, 15 bp, Homo sapiens
gacaagaatgtgcac

SEQ ID NO: 788891 - DNA, 15 bp, Homo sapiens
acaagaatgtgcact

SEQ ID NO: 788892 - DNA, 15 bp, Homo sapiens
caagaatgtgcactc

SEQ ID NO: 788893 - DNA, 15 bp, Homo sapiens
aagaatgtgcactca

SEQ ID NO: 788894 - DNA, 15 bp, Homo sapiens
agaatgtgcactcat

SEQ ID NO: 788895 - DNA, 15 bp, Homo sapiens
gaatgtgcactcatt

SEQ ID NO: 788896 - DNA, 15 bp, Homo sapiens
aatgtgcactcattc

SEQ ID NO: 788897 - DNA, 15 bp, Homo sapiens
atgtgcactcattca

SEQ ID NO: 788898 - DNA, 15 bp, Homo sapiens
tgtgcactcattcaa

SEQ ID NO: 788899 - DNA, 15 bp, Homo sapiens
gtgcactcattcaag

SEQ ID NO: 788900 - DNA, 15 bp, Homo sapiens
tgcactcattcaagc

SEQ ID NO: 788901 - DNA, 15 bp, Homo sapiens
gcactcattcaagcc

SEQ ID NO: 788902 - DNA, 15 bp, Homo sapiens
cactcattcaagcct

SEQ ID NO: 788903 - DNA, 15 bp, Homo sapiens
actcattcaagcctg

SEQ ID NO: 788904 - DNA, 15 bp, Homo sapiens
ctcattcaagcctgg

SEQ ID NO: 788905 - DNA, 15 bp, Homo sapiens
tcattcaagcctggg

SEQ ID NO: 788906 - DNA, 15 bp, Homo sapiens
cattcaagcctggga

SEQ ID NO: 788907 - DNA, 15 bp, Homo sapiens
attcaagcctgggat

SEQ ID NO: 788908 - DNA, 15 bp, Homo sapiens
ttcaagcctgggatg

SEQ ID NO: 788909 - DNA, 15 bp, Homo sapiens
tcaagcctgggatgg

SEQ ID NO: 788910 - DNA, 15 bp, Homo sapiens
caagcctgggatggg

SEQ ID NO: 788911 - DNA, 15 bp, Homo sapiens
aagcctgggatgggc

SEQ ID NO: 788912 - DNA, 15 bp, Homo sapiens
agcctgggatgggct

SEQ ID NO: 788913 - DNA, 15 bp, Homo sapiens
gcctgggatgggctc

SEQ ID NO: 788914 - DNA, 15 bp, Homo sapiens
cctgggatgggctct

SEQ ID NO: 788915 - DNA, 15 bp, Homo sapiens
ctgggatgggctctt

SEQ ID NO: 788916 - DNA, 15 bp, Homo sapiens
tgggatgggctcttc

SEQ ID NO: 788917 - DNA, 15 bp, Homo sapiens
gggatgggctcttct

SEQ ID NO: 788918 - DNA, 15 bp, Homo sapiens
ggatgggctcttctt

SEQ ID NO: 788919 - DNA, 15 bp, Homo sapiens
gatgggctcttctta

SEQ ID NO: 788920 - DNA, 15 bp, Homo sapiens
atgggctcttcttat

SEQ ID NO: 788921 - DNA, 15 bp, Homo sapiens
tgggctcttcttatg

SEQ ID NO: 788922 - DNA, 15 bp, Homo sapiens
gggctcttcttatgt

SEQ ID NO: 788923 - DNA, 15 bp, Homo sapiens
ggctcttcttatgtg

SEQ ID NO: 788924 - DNA, 15 bp, Homo sapiens
gctcttcttatgtgc

SEQ ID NO: 788925 - DNA, 15 bp, Homo sapiens
ctcttcttatgtgca

SEQ ID NO: 788926 - DNA, 15 bp, Homo sapiens
tcttcttatgtgcat

SEQ ID NO: 788927 - DNA, 15 bp, Homo sapiens
cttcttatgtgcata

SEQ ID NO: 788928 - DNA, 15 bp, Homo sapiens
ttcttatgtgcatat

SEQ ID NO: 788929 - DNA, 15 bp, Homo sapiens
tcttatgtgcatatt

SEQ ID NO: 788930 - DNA, 15 bp, Homo sapiens
cttatgtgcatattc

SEQ ID NO: 788931 - DNA, 15 bp, Homo sapiens
ttatgtgcatattca

SEQ ID NO: 788932 - DNA, 15 bp, Homo sapiens
tatgtgcatattcag

SEQ ID NO: 788933 - DNA, 15 bp, Homo sapiens
atgtgcatattcagt

SEQ ID NO: 788934 - DNA, 15 bp, Homo sapiens
tgtgcatattcagtt

SEQ ID NO: 788935 - DNA, 15 bp, Homo sapiens
gtgcatattcagttc

SEQ ID NO: 788936 - DNA, 15 bp, Homo sapiens
tgcatattcagttcc

SEQ ID NO: 788937 - DNA, 15 bp, Homo sapiens
gcatattcagttcca

SEQ ID NO: 788938 - DNA, 15 bp, Homo sapiens
catattcagttccaa

SEQ ID NO: 788939 - DNA, 15 bp, Homo sapiens
atattcagttccaag

SEQ ID NO: 788940 - DNA, 15 bp, Homo sapiens
tattcagttccaaga

SEQ ID NO: 788941 - DNA, 15 bp, Homo sapiens
attcagttccaagaa

SEQ ID NO: 788942 - DNA, 15 bp, Homo sapiens
ttcagttccaagaaa

SEQ ID NO: 788943 - DNA, 15 bp, Homo sapiens
tcagttccaagaaat

SEQ ID NO: 788944 - DNA, 15 bp, Homo sapiens
cagttccaagaaata

SEQ ID NO: 788945 - DNA, 15 bp, Homo sapiens
agttccaagaaatat

SEQ ID NO: 788946 - DNA, 15 bp, Homo sapiens
gttccaagaaatatt

SEQ ID NO: 788947 - DNA, 15 bp, Homo sapiens
ttccaagaaatattt

SEQ ID NO: 788948 - DNA, 15 bp, Homo sapiens
tccaagaaatattta

SEQ ID NO: 788949 - DNA, 15 bp, Homo sapiens
ccaagaaatatttaa

SEQ ID NO: 788950 - DNA, 15 bp, Homo sapiens
caagaaatatttaaa

SEQ ID NO: 788951 - DNA, 15 bp, Homo sapiens
aagaaatatttaaac

SEQ ID NO: 788952 - DNA, 15 bp, Homo sapiens
agaaatatttaaact

SEQ ID NO: 788953 - DNA, 15 bp, Homo sapiens
gaaatatttaaacta

SEQ ID NO: 788954 - DNA, 15 bp, Homo sapiens
aaatatttaaactat

SEQ ID NO: 788955 - DNA, 15 bp, Homo sapiens
aatatttaaactatc

SEQ ID NO: 788956 - DNA, 15 bp, Homo sapiens
atatttaaactatca

SEQ ID NO: 788957 - DNA, 15 bp, Homo sapiens
tatttaaactatcac

SEQ ID NO: 788958 - DNA, 15 bp, Homo sapiens
atttaaactatcact

SEQ ID NO: 788959 - DNA, 15 bp, Homo sapiens
tttaaactatcacta

SEQ ID NO: 788960 - DNA, 15 bp, Homo sapiens
ttaaactatcactag

SEQ ID NO: 788961 - DNA, 15 bp, Homo sapiens
taaactatcactagt

SEQ ID NO: 788962 - DNA, 15 bp, Homo sapiens
aaactatcactagtg

SEQ ID NO: 788963 - DNA, 15 bp, Homo sapiens
aactatcactagtgt

SEQ ID NO: 788964 - DNA, 15 bp, Homo sapiens
actatcactagtgta

SEQ ID NO: 788965 - DNA, 15 bp, Homo sapiens
ctatcactagtgtaa

SEQ ID NO: 788966 - DNA, 15 bp, Homo sapiens
tatcactagtgtaat

SEQ ID NO: 788967 - DNA, 15 bp, Homo sapiens
atcactagtgtaatt

SEQ ID NO: 788968 - DNA, 15 bp, Homo sapiens
tcactagtgtaattc

SEQ ID NO: 788969 - DNA, 15 bp, Homo sapiens
cactagtgtaattca

SEQ ID NO: 788970 - DNA, 15 bp, Homo sapiens
actagtgtaattcag

SEQ ID NO: 788971 - DNA, 15 bp, Homo sapiens
ctagtgtaattcagc

SEQ ID NO: 788972 - DNA, 15 bp, Homo sapiens
tagtgtaattcagca

SEQ ID NO: 788973 - DNA, 15 bp, Homo sapiens
agtgtaattcagcat

SEQ ID NO: 788974 - DNA, 15 bp, Homo sapiens
gtgtaattcagcatc

SEQ ID NO: 788975 - DNA, 15 bp, Homo sapiens
tgtaattcagcatcc

SEQ ID NO: 788976 - DNA, 15 bp, Homo sapiens
gtaattcagcatcca

SEQ ID NO: 788977 - DNA, 15 bp, Homo sapiens
taattcagcatccat

SEQ ID NO: 788978 - DNA, 15 bp, Homo sapiens
aattcagcatccata

SEQ ID NO: 788979 - DNA, 15 bp, Homo sapiens
attcagcatccataa

SEQ ID NO: 788980 - DNA, 15 bp, Homo sapiens
ttcagcatccataat

SEQ ID NO: 788981 - DNA, 15 bp, Homo sapiens
tcagcatccataatg

SEQ ID NO: 788982 - DNA, 15 bp, Homo sapiens
cagcatccataatga

SEQ ID NO: 788983 - DNA, 15 bp, Homo sapiens
agcatccataatgag

SEQ ID NO: 788984 - DNA, 15 bp, Homo sapiens
gcatccataatgagt

SEQ ID NO: 788985 - DNA, 15 bp, Homo sapiens
catccataatgagtt

SEQ ID NO: 788986 - DNA, 15 bp, Homo sapiens
atccataatgagttt

SEQ ID NO: 788987 - DNA, 15 bp, Homo sapiens
tccataatgagttta

SEQ ID NO: 788988 - DNA, 15 bp, Homo sapiens
ccataatgagtttat

SEQ ID NO: 788989 - DNA, 15 bp, Homo sapiens
cataatgagtttata

SEQ ID NO: 788990 - DNA, 15 bp, Homo sapiens
ataatgagtttatac

SEQ ID NO: 788991 - DNA, 15 bp, Homo sapiens
taatgagtttatact

SEQ ID NO: 788992 - DNA, 15 bp, Homo sapiens
aatgagtttatactc

SEQ ID NO: 788993 - DNA, 15 bp, Homo sapiens
atgagtttatactct

SEQ ID NO: 788994 - DNA, 15 bp, Homo sapiens
tgagtttatactctt

SEQ ID NO: 788995 - DNA, 15 bp, Homo sapiens
gagtttatactcttg

SEQ ID NO: 788996 - DNA, 15 bp, Homo sapiens
agtttatactcttgt

SEQ ID NO: 788997 - DNA, 15 bp, Homo sapiens
gtttatactcttgtg

SEQ ID NO: 788998 - DNA, 15 bp, Homo sapiens
tttatactcttgtgt

SEQ ID NO: 788999 - DNA, 15 bp, Homo sapiens
ttatactcttgtgta

SEQ ID NO: 789000 - DNA, 15 bp, Homo sapiens
tatactcttgtgtat

SEQ ID NO: 789001 - DNA, 15 bp, Homo sapiens
atactcttgtgtatt

SEQ ID NO: 789002 - DNA, 15 bp, Homo sapiens
tactcttgtgtattg

SEQ ID NO: 789003 - DNA, 15 bp, Homo sapiens
actcttgtgtattga

SEQ ID NO: 789004 - DNA, 15 bp, Homo sapiens
ctcttgtgtattgaa

SEQ ID NO: 789005 - DNA, 15 bp, Homo sapiens
tcttgtgtattgaaa

SEQ ID NO: 789006 - DNA, 15 bp, Homo sapiens
cttgtgtattgaaat

SEQ ID NO: 789007 - DNA, 15 bp, Homo sapiens
ttgtgtattgaaatc

SEQ ID NO: 789008 - DNA, 15 bp, Homo sapiens
tgtgtattgaaatca

SEQ ID NO: 789009 - DNA, 15 bp, Homo sapiens
gtgtattgaaatcag

SEQ ID NO: 789010 - DNA, 15 bp, Homo sapiens
tgtattgaaatcaga

SEQ ID NO: 789011 - DNA, 15 bp, Homo sapiens
gtattgaaatcagat

SEQ ID NO: 789012 - DNA, 15 bp, Homo sapiens
tattgaaatcagatg

SEQ ID NO: 789013 - DNA, 15 bp, Homo sapiens
attgaaatcagatga

SEQ ID NO: 789014 - DNA, 15 bp, Homo sapiens
ttgaaatcagatgac

SEQ ID NO: 789015 - DNA, 15 bp, Homo sapiens
tgaaatcagatgact

SEQ ID NO: 789016 - DNA, 15 bp, Homo sapiens
gaaatcagatgactt

SEQ ID NO: 789017 - DNA, 15 bp, Homo sapiens
aaatcagatgacttt

SEQ ID NO: 789018 - DNA, 15 bp, Homo sapiens
aatcagatgactttc

SEQ ID NO: 789019 - DNA, 15 bp, Homo sapiens
atcagatgactttcc

SEQ ID NO: 789020 - DNA, 15 bp, Homo sapiens
tcagatgactttcct

SEQ ID NO: 789021 - DNA, 15 bp, Homo sapiens
cagatgactttcctg

SEQ ID NO: 789022 - DNA, 15 bp, Homo sapiens
agatgactttcctgt

SEQ ID NO: 789023 - DNA, 15 bp, Homo sapiens
gatgactttcctgtc

SEQ ID NO: 789024 - DNA, 15 bp, Homo sapiens
atgactttcctgtct

SEQ ID NO: 789025 - DNA, 15 bp, Homo sapiens
tgactttcctgtctt

SEQ ID NO: 789026 - DNA, 15 bp, Homo sapiens
gactttcctgtcttt

SEQ ID NO: 789027 - DNA, 15 bp, Homo sapiens
actttcctgtctttg

SEQ ID NO: 789028 - DNA, 15 bp, Homo sapiens
ctttcctgtctttgt

SEQ ID NO: 789029 - DNA, 15 bp, Homo sapiens
tttcctgtctttgtg

SEQ ID NO: 789030 - DNA, 15 bp, Homo sapiens
ttcctgtctttgtgg

SEQ ID NO: 789031 - DNA, 15 bp, Homo sapiens
tcctgtctttgtggt

SEQ ID NO: 789032 - DNA, 15 bp, Homo sapiens
cctgtctttgtggtt

SEQ ID NO: 789033 - DNA, 15 bp, Homo sapiens
ctgtctttgtggttc

SEQ ID NO: 789034 - DNA, 15 bp, Homo sapiens
tgtctttgtggttca

SEQ ID NO: 789035 - DNA, 15 bp, Homo sapiens
gtctttgtggttcat

SEQ ID NO: 789036 - DNA, 15 bp, Homo sapiens
tctttgtggttcata

SEQ ID NO: 789037 - DNA, 15 bp, Homo sapiens
ctttgtggttcatat

SEQ ID NO: 789038 - DNA, 15 bp, Homo sapiens
tttgtggttcatatt

SEQ ID NO: 789039 - DNA, 15 bp, Homo sapiens
ttgtggttcatatta

SEQ ID NO: 789040 - DNA, 15 bp, Homo sapiens
tgtggttcatattat

SEQ ID NO: 789041 - DNA, 15 bp, Homo sapiens
gtggttcatattatt

SEQ ID NO: 789042 - DNA, 15 bp, Homo sapiens
tggttcatattatta

SEQ ID NO: 789043 - DNA, 15 bp, Homo sapiens
ggttcatattattaa

SEQ ID NO: 789044 - DNA, 15 bp, Homo sapiens
gttcatattattaat

SEQ ID NO: 789045 - DNA, 15 bp, Homo sapiens
ttcatattattaata

SEQ ID NO: 789046 - DNA, 15 bp, Homo sapiens
tcatattattaatat

SEQ ID NO: 789047 - DNA, 15 bp, Homo sapiens
catattattaatatt

SEQ ID NO: 789048 - DNA, 15 bp, Homo sapiens
atattattaatattc

SEQ ID NO: 789049 - DNA, 15 bp, Homo sapiens
tattattaatattct

SEQ ID NO: 789050 - DNA, 15 bp, Homo sapiens
attattaatattctt

SEQ ID NO: 789051 - DNA, 15 bp, Homo sapiens
ttattaatattcttc

SEQ ID NO: 789052 - DNA, 15 bp, Homo sapiens
tattaatattcttct

SEQ ID NO: 789053 - DNA, 15 bp, Homo sapiens
attaatattcttctt

SEQ ID NO: 789054 - DNA, 15 bp, Homo sapiens
ttaatattcttctta

SEQ ID NO: 789055 - DNA, 15 bp, Homo sapiens
taatattcttcttat

SEQ ID NO: 789056 - DNA, 15 bp, Homo sapiens
aatattcttcttatc

SEQ ID NO: 789057 - DNA, 15 bp, Homo sapiens
atattcttcttatcg

SEQ ID NO: 789058 - DNA, 15 bp, Homo sapiens
tattcttcttatcgc

SEQ ID NO: 789059 - DNA, 15 bp, Homo sapiens
attcttcttatcgct

SEQ ID NO: 789060 - DNA, 15 bp, Homo sapiens
ttcttcttatcgctt

SEQ ID NO: 789061 - DNA, 15 bp, Homo sapiens
tcttcttatcgcttt

SEQ ID NO: 789062 - DNA, 15 bp, Homo sapiens
cttcttatcgctttg

SEQ ID NO: 789063 - DNA, 15 bp, Homo sapiens
ttcttatcgctttgc

SEQ ID NO: 789064 - DNA, 15 bp, Homo sapiens
tcttatcgctttgct

SEQ ID NO: 789065 - DNA, 15 bp, Homo sapiens
cttatcgctttgctc

SEQ ID NO: 789066 - DNA, 15 bp, Homo sapiens
ttatcgctttgctct

SEQ ID NO: 789067 - DNA, 15 bp, Homo sapiens
tatcgctttgctctg

SEQ ID NO: 789068 - DNA, 15 bp, Homo sapiens
atcgctttgctctgc

SEQ ID NO: 789069 - DNA, 15 bp, Homo sapiens
tcgctttgctctgct

SEQ ID NO: 789070 - DNA, 15 bp, Homo sapiens
cgctttgctctgctt

SEQ ID NO: 789071 - DNA, 15 bp, Homo sapiens
gctttgctctgctta

SEQ ID NO: 789072 - DNA, 15 bp, Homo sapiens
ctttgctctgcttag

SEQ ID NO: 789073 - DNA, 15 bp, Homo sapiens
tttgctctgcttagt

SEQ ID NO: 789074 - DNA, 15 bp, Homo sapiens
ttgctctgcttagtt

SEQ ID NO: 789075 - DNA, 15 bp, Homo sapiens
tgctctgcttagttc

SEQ ID NO: 789076 - DNA, 15 bp, Homo sapiens
gctctgcttagttct

SEQ ID NO: 789077 - DNA, 15 bp, Homo sapiens
ctctgcttagttctt

SEQ ID NO: 789078 - DNA, 15 bp, Homo sapiens
tctgcttagttcttt

SEQ ID NO: 789079 - DNA, 15 bp, Homo sapiens
ctgcttagttctttt

SEQ ID NO: 789080 - DNA, 15 bp, Homo sapiens
tgcttagttcttttt

SEQ ID NO: 789081 - DNA, 15 bp, Homo sapiens
gcttagttctttttt

SEQ ID NO: 789082 - DNA, 15 bp, Homo sapiens
cttagttcttttttt

SEQ ID NO: 789083 - DNA, 15 bp, Homo sapiens
ttagttcttttttta

SEQ ID NO: 789084 - DNA, 15 bp, Homo sapiens
tagttctttttttat

SEQ ID NO: 789085 - DNA, 15 bp, Homo sapiens
agttctttttttata

SEQ ID NO: 789086 - DNA, 15 bp, Homo sapiens
gttctttttttatac

SEQ ID NO: 789087 - DNA, 15 bp, Homo sapiens
ttctttttttataca

SEQ ID NO: 789088 - DNA, 15 bp, Homo sapiens
tctttttttatacat

SEQ ID NO: 789089 - DNA, 15 bp, Homo sapiens
ctttttttatacatc

SEQ ID NO: 789090 - DNA, 15 bp, Homo sapiens
tttttttatacatct

SEQ ID NO: 789091 - DNA, 15 bp, Homo sapiens
ttttttatacatctt

SEQ ID NO: 789092 - DNA, 15 bp, Homo sapiens
tttttatacatcttt

SEQ ID NO: 789093 - DNA, 15 bp, Homo sapiens
ttttatacatctttg

SEQ ID NO: 789094 - DNA, 15 bp, Homo sapiens
tttatacatctttgc

SEQ ID NO: 789095 - DNA, 15 bp, Homo sapiens
ttatacatctttgcc

SEQ ID NO: 789096 - DNA, 15 bp, Homo sapiens
tatacatctttgcct

SEQ ID NO: 789097 - DNA, 15 bp, Homo sapiens
atacatctttgcctc

SEQ ID NO: 789098 - DNA, 15 bp, Homo sapiens
tacatctttgcctct

SEQ ID NO: 789099 - DNA, 15 bp, Homo sapiens
acatctttgcctctc

SEQ ID NO: 789100 - DNA, 15 bp, Homo sapiens
catctttgcctctca

SEQ ID NO: 789101 - DNA, 15 bp, Homo sapiens
atctttgcctctcac

SEQ ID NO: 789102 - DNA, 15 bp, Homo sapiens
tctttgcctctcacc

SEQ ID NO: 789103 - DNA, 15 bp, Homo sapiens
ctttgcctctcaccc

SEQ ID NO: 789104 - DNA, 15 bp, Homo sapiens
tttgcctctcacccc

SEQ ID NO: 789105 - DNA, 15 bp, Homo sapiens
ttgcctctcaccccc

SEQ ID NO: 789106 - DNA, 15 bp, Homo sapiens
tgcctctcaccccca

SEQ ID NO: 789107 - DNA, 15 bp, Homo sapiens
gcctctcacccccat

SEQ ID NO: 789108 - DNA, 15 bp, Homo sapiens
cctctcacccccatt

SEQ ID NO: 789109 - DNA, 15 bp, Homo sapiens
ctctcacccccattt

SEQ ID NO: 789110 - DNA, 15 bp, Homo sapiens
tctcacccccatttt

SEQ ID NO: 789111 - DNA, 15 bp, Homo sapiens
ctcacccccattttc

SEQ ID NO: 789112 - DNA, 15 bp, Homo sapiens
tcacccccattttct

SEQ ID NO: 789113 - DNA, 15 bp, Homo sapiens
cacccccattttctg

SEQ ID NO: 789114 - DNA, 15 bp, Homo sapiens
acccccattttctgc

SEQ ID NO: 789115 - DNA, 15 bp, Homo sapiens
cccccattttctgcc

SEQ ID NO: 789116 - DNA, 15 bp, Homo sapiens
ccccattttctgcct

SEQ ID NO: 789117 - DNA, 15 bp, Homo sapiens
cccattttctgcctt

SEQ ID NO: 789118 - DNA, 15 bp, Homo sapiens
ccattttctgccttg

SEQ ID NO: 789119 - DNA, 15 bp, Homo sapiens
cattttctgccttgg

SEQ ID NO: 789120 - DNA, 15 bp, Homo sapiens
attttctgccttggc

SEQ ID NO: 789121 - DNA, 15 bp, Homo sapiens
ttttctgccttggca

SEQ ID NO: 789122 - DNA, 15 bp, Homo sapiens
tttctgccttggcat

SEQ ID NO: 789123 - DNA, 15 bp, Homo sapiens
ttctgccttggcatt

SEQ ID NO: 789124 - DNA, 15 bp, Homo sapiens
tctgccttggcattc

SEQ ID NO: 789125 - DNA, 15 bp, Homo sapiens
ctgccttggcattcg

SEQ ID NO: 789126 - DNA, 15 bp, Homo sapiens
tgccttggcattcgt

SEQ ID NO: 789127 - DNA, 15 bp, Homo sapiens
gccttggcattcgtt

SEQ ID NO: 789128 - DNA, 15 bp, Homo sapiens
ccttggcattcgttt

SEQ ID NO: 789129 - DNA, 15 bp, Homo sapiens
cttggcattcgtttg

SEQ ID NO: 789130 - DNA, 15 bp, Homo sapiens
ttggcattcgtttgt

SEQ ID NO: 789131 - DNA, 15 bp, Homo sapiens
tggcattcgtttgtt

SEQ ID NO: 789132 - DNA, 15 bp, Homo sapiens
ggcattcgtttgttc

SEQ ID NO: 789133 - DNA, 15 bp, Homo sapiens
gcattcgtttgttct

SEQ ID NO: 789134 - DNA, 15 bp, Homo sapiens
cattcgtttgttctt

SEQ ID NO: 789135 - DNA, 15 bp, Homo sapiens
attcgtttgttcttt

SEQ ID NO: 789136 - DNA, 15 bp, Homo sapiens
ttcgtttgttctttc

SEQ ID NO: 789137 - DNA, 15 bp, Homo sapiens
tcgtttgttctttca

SEQ ID NO: 789138 - DNA, 15 bp, Homo sapiens
cgtttgttctttcag

SEQ ID NO: 789139 - DNA, 15 bp, Homo sapiens
gtttgttctttcagc

SEQ ID NO: 789140 - DNA, 15 bp, Homo sapiens
tttgttctttcagcg

SEQ ID NO: 789141 - DNA, 15 bp, Homo sapiens
ttgttctttcagcga

SEQ ID NO: 789142 - DNA, 15 bp, Homo sapiens
tgttctttcagcgaa

SEQ ID NO: 789143 - DNA, 15 bp, Homo sapiens
gttctttcagcgaat

SEQ ID NO: 789144 - DNA, 15 bp, Homo sapiens
ttctttcagcgaatg

SEQ ID NO: 789145 - DNA, 15 bp, Homo sapiens
tctttcagcgaatgt

SEQ ID NO: 789146 - DNA, 15 bp, Homo sapiens
ctttcagcgaatgtc

SEQ ID NO: 789147 - DNA, 15 bp, Homo sapiens
tttcagcgaatgtcc

SEQ ID NO: 789148 - DNA, 15 bp, Homo sapiens
ttcagcgaatgtcca

SEQ ID NO: 789149 - DNA, 15 bp, Homo sapiens
tcagcgaatgtccac

SEQ ID NO: 789150 - DNA, 15 bp, Homo sapiens
cagcgaatgtccact

SEQ ID NO: 789151 - DNA, 15 bp, Homo sapiens
agcgaatgtccactg

SEQ ID NO: 789152 - DNA, 15 bp, Homo sapiens
gcgaatgtccactgg

SEQ ID NO: 789153 - DNA, 15 bp, Homo sapiens
cgaatgtccactggg

SEQ ID NO: 789154 - DNA, 15 bp, Homo sapiens
gaatgtccactgggc

SEQ ID NO: 789155 - DNA, 15 bp, Homo sapiens
aatgtccactgggca

SEQ ID NO: 789156 - DNA, 15 bp, Homo sapiens
atgtccactgggcac

SEQ ID NO: 789157 - DNA, 15 bp, Homo sapiens
tgtccactgggcacc

SEQ ID NO: 789158 - DNA, 15 bp, Homo sapiens
gtccactgggcacct

SEQ ID NO: 789159 - DNA, 15 bp, Homo sapiens
tccactgggcaccta

SEQ ID NO: 789160 - DNA, 15 bp, Homo sapiens
ccactgggcacctac

SEQ ID NO: 789161 - DNA, 15 bp, Homo sapiens
cactgggcacctact

SEQ ID NO: 789162 - DNA, 15 bp, Homo sapiens
actgggcacctactg

SEQ ID NO: 789163 - DNA, 15 bp, Homo sapiens
ctgggcacctactgt

SEQ ID NO: 789164 - DNA, 15 bp, Homo sapiens
tgggcacctactgtg

SEQ ID NO: 789165 - DNA, 15 bp, Homo sapiens
gggcacctactgtgt

SEQ ID NO: 789166 - DNA, 15 bp, Homo sapiens
ggcacctactgtgtg

SEQ ID NO: 789167 - DNA, 15 bp, Homo sapiens
gcacctactgtgtgc

SEQ ID NO: 789168 - DNA, 15 bp, Homo sapiens
cacctactgtgtgcc

SEQ ID NO: 789169 - DNA, 15 bp, Homo sapiens
acctactgtgtgcca

SEQ ID NO: 789170 - DNA, 15 bp, Homo sapiens
cctactgtgtgccag

SEQ ID NO: 789171 - DNA, 15 bp, Homo sapiens
ctactgtgtgccagg

SEQ ID NO: 789172 - DNA, 15 bp, Homo sapiens
tactgtgtgccaggc

SEQ ID NO: 789173 - DNA, 15 bp, Homo sapiens
actgtgtgccaggca

SEQ ID NO: 789174 - DNA, 15 bp, Homo sapiens
ctgtgtgccaggcac

SEQ ID NO: 789175 - DNA, 15 bp, Homo sapiens
tgtgtgccaggcact

SEQ ID NO: 789176 - DNA, 15 bp, Homo sapiens
gtgtgccaggcactg

SEQ ID NO: 789177 - DNA, 15 bp, Homo sapiens
tgtgccaggcactgt

SEQ ID NO: 789178 - DNA, 15 bp, Homo sapiens
gtgccaggcactgtt

SEQ ID NO: 789179 - DNA, 15 bp, Homo sapiens
tgccaggcactgttc

SEQ ID NO: 789180 - DNA, 15 bp, Homo sapiens
gccaggcactgttct

SEQ ID NO: 789181 - DNA, 15 bp, Homo sapiens
ccaggcactgttcta

SEQ ID NO: 789182 - DNA, 15 bp, Homo sapiens
caggcactgttctag

SEQ ID NO: 789183 - DNA, 15 bp, Homo sapiens
aggcactgttctagg

SEQ ID NO: 789184 - DNA, 15 bp, Homo sapiens
ggcactgttctaggt

SEQ ID NO: 789185 - DNA, 15 bp, Homo sapiens
gcactgttctaggtg

SEQ ID NO: 789186 - DNA, 15 bp, Homo sapiens
cactgttctaggtgc

SEQ ID NO: 789187 - DNA, 15 bp, Homo sapiens
actgttctaggtgct

SEQ ID NO: 789188 - DNA, 15 bp, Homo sapiens
ctgttctaggtgctg

SEQ ID NO: 789189 - DNA, 15 bp, Homo sapiens
tgttctaggtgctgg

SEQ ID NO: 789190 - DNA, 15 bp, Homo sapiens
gttctaggtgctggg

SEQ ID NO: 789191 - DNA, 15 bp, Homo sapiens
ttctaggtgctgggg

SEQ ID NO: 789192 - DNA, 15 bp, Homo sapiens
tctaggtgctgggga

SEQ ID NO: 789193 - DNA, 15 bp, Homo sapiens
taggtgctggggata

SEQ ID NO: 789194 - DNA, 15 bp, Homo sapiens
aggtgctggggatac

SEQ ID NO: 789195 - DNA, 15 bp, Homo sapiens
ggtgctggggataca

SEQ ID NO: 789196 - DNA, 15 bp, Homo sapiens
gtgctggggatacag

SEQ ID NO: 789197 - DNA, 15 bp, Homo sapiens
tgctggggatacaga

SEQ ID NO: 789198 - DNA, 15 bp, Homo sapiens
gctggggatacagaa

SEQ ID NO: 789199 - DNA, 15 bp, Homo sapiens
ctggggatacagaaa

SEQ ID NO: 789200 - DNA, 15 bp, Homo sapiens
tggggatacagaaat

SEQ ID NO: 789201 - DNA, 15 bp, Homo sapiens
ggggatacagaaatg

SEQ ID NO: 789202 - DNA, 15 bp, Homo sapiens
gggatacagaaatga

SEQ ID NO: 789203 - DNA, 15 bp, Homo sapiens
ggatacagaaatgaa

SEQ ID NO: 789204 - DNA, 15 bp, Homo sapiens
gatacagaaatgaac

SEQ ID NO: 789205 - DNA, 15 bp, Homo sapiens
atacagaaatgaaca

SEQ ID NO: 789206 - DNA, 15 bp, Homo sapiens
tacagaaatgaacag

SEQ ID NO: 789207 - DNA, 15 bp, Homo sapiens
acagaaatgaacagg

SEQ ID NO: 789208 - DNA, 15 bp, Homo sapiens
cagaaatgaacagga

SEQ ID NO: 789209 - DNA, 15 bp, Homo sapiens
agaaatgaacaggaa

SEQ ID NO: 789210 - DNA, 15 bp, Homo sapiens
gaaatgaacaggaaa

SEQ ID NO: 789211 - DNA, 15 bp, Homo sapiens
aaatgaacaggaaaa

SEQ ID NO: 789212 - DNA, 15 bp, Homo sapiens
aatgaacaggaaaat

SEQ ID NO: 789213 - DNA, 15 bp, Homo sapiens
atgaacaggaaaatt

SEQ ID NO: 789214 - DNA, 15 bp, Homo sapiens
tgaacaggaaaattg

SEQ ID NO: 789215 - DNA, 15 bp, Homo sapiens
gaacaggaaaattga

SEQ ID NO: 789216 - DNA, 15 bp, Homo sapiens
aacaggaaaattgat

SEQ ID NO: 789217 - DNA, 15 bp, Homo sapiens
acaggaaaattgatt

SEQ ID NO: 789218 - DNA, 15 bp, Homo sapiens
caggaaaattgattg

SEQ ID NO: 789219 - DNA, 15 bp, Homo sapiens
aggaaaattgattgg

SEQ ID NO: 789220 - DNA, 15 bp, Homo sapiens
ggaaaattgattggc

SEQ ID NO: 789221 - DNA, 15 bp, Homo sapiens
gaaaattgattggct

SEQ ID NO: 789222 - DNA, 15 bp, Homo sapiens
aaaattgattggctt

SEQ ID NO: 789223 - DNA, 15 bp, Homo sapiens
aaattgattggctta

SEQ ID NO: 789224 - DNA, 15 bp, Homo sapiens
aattgattggcttat

SEQ ID NO: 789225 - DNA, 15 bp, Homo sapiens
attgattggcttatt

SEQ ID NO: 789226 - DNA, 15 bp, Homo sapiens
ttgattggcttattt

SEQ ID NO: 789227 - DNA, 15 bp, Homo sapiens
tgattggcttattta

SEQ ID NO: 789228 - DNA, 15 bp, Homo sapiens
gattggcttatttat

SEQ ID NO: 789229 - DNA, 15 bp, Homo sapiens
attggcttatttatt

SEQ ID NO: 789230 - DNA, 15 bp, Homo sapiens
ttggcttatttattt

SEQ ID NO: 789231 - DNA, 15 bp, Homo sapiens
tggcttatttatttg

SEQ ID NO: 789232 - DNA, 15 bp, Homo sapiens
ggcttatttatttga

SEQ ID NO: 789233 - DNA, 15 bp, Homo sapiens
gcttatttatttgaa

SEQ ID NO: 789234 - DNA, 15 bp, Homo sapiens
cttatttatttgaaa

SEQ ID NO: 789235 - DNA, 15 bp, Homo sapiens
ttatttatttgaaaa

SEQ ID NO: 789236 - DNA, 15 bp, Homo sapiens
tatttatttgaaaaa

SEQ ID NO: 789237 - DNA, 15 bp, Homo sapiens
atttatttgaaaaac

SEQ ID NO: 789238 - DNA, 15 bp, Homo sapiens
tttatttgaaaaaca

SEQ ID NO: 789239 - DNA, 15 bp, Homo sapiens
ttatttgaaaaacac

SEQ ID NO: 789240 - DNA, 15 bp, Homo sapiens
tatttgaaaaacaca

SEQ ID NO: 789241 - DNA, 15 bp, Homo sapiens
atttgaaaaacacag

SEQ ID NO: 789242 - DNA, 15 bp, Homo sapiens
tttgaaaaacacaga

SEQ ID NO: 789243 - DNA, 15 bp, Homo sapiens
ttgaaaaacacagaa

SEQ ID NO: 789244 - DNA, 15 bp, Homo sapiens
tgaaaaacacagaat

SEQ ID NO: 789245 - DNA, 15 bp, Homo sapiens
gaaaaacacagaatt

SEQ ID NO: 789246 - DNA, 15 bp, Homo sapiens
aaaaacacagaatta

SEQ ID NO: 789247 - DNA, 15 bp, Homo sapiens
aaaacacagaattag

SEQ ID NO: 789248 - DNA, 15 bp, Homo sapiens
aaacacagaattagg

SEQ ID NO: 789249 - DNA, 15 bp, Homo sapiens
aacacagaattaggg

SEQ ID NO: 789250 - DNA, 15 bp, Homo sapiens
acacagaattagggt

SEQ ID NO: 789251 - DNA, 15 bp, Homo sapiens
cacagaattagggtt

SEQ ID NO: 789252 - DNA, 15 bp, Homo sapiens
acagaattagggttg

SEQ ID NO: 789253 - DNA, 15 bp, Homo sapiens
cagaattagggttga

SEQ ID NO: 789254 - DNA, 15 bp, Homo sapiens
agaattagggttgac

SEQ ID NO: 789255 - DNA, 15 bp, Homo sapiens
gaattagggttgact

SEQ ID NO: 789256 - DNA, 15 bp, Homo sapiens
aattagggttgactc

SEQ ID NO: 789257 - DNA, 15 bp, Homo sapiens
attagggttgactca

SEQ ID NO: 789258 - DNA, 15 bp, Homo sapiens
ttagggttgactcag

SEQ ID NO: 789259 - DNA, 15 bp, Homo sapiens
tagggttgactcagg

SEQ ID NO: 789260 - DNA, 15 bp, Homo sapiens
agggttgactcaggg

SEQ ID NO: 789261 - DNA, 15 bp, Homo sapiens
gggttgactcagggt

SEQ ID NO: 789262 - DNA, 15 bp, Homo sapiens
ggttgactcagggtg

SEQ ID NO: 789263 - DNA, 15 bp, Homo sapiens
gttgactcagggtga

SEQ ID NO: 789264 - DNA, 15 bp, Homo sapiens
ttgactcagggtgaa

SEQ ID NO: 789265 - DNA, 15 bp, Homo sapiens
tgactcagggtgaag

SEQ ID NO: 789266 - DNA, 15 bp, Homo sapiens
gactcagggtgaagc

SEQ ID NO: 789267 - DNA, 15 bp, Homo sapiens
actcagggtgaagct

SEQ ID NO: 789268 - DNA, 15 bp, Homo sapiens
ctcagggtgaagctt

SEQ ID NO: 789269 - DNA, 15 bp, Homo sapiens
tcagggtgaagcttg

SEQ ID NO: 789270 - DNA, 15 bp, Homo sapiens
cagggtgaagcttga

SEQ ID NO: 789271 - DNA, 15 bp, Homo sapiens
agggtgaagcttgat

SEQ ID NO: 789272 - DNA, 15 bp, Homo sapiens
gggtgaagcttgatc

SEQ ID NO: 789273 - DNA, 15 bp, Homo sapiens
ggtgaagcttgatcc

SEQ ID NO: 789274 - DNA, 15 bp, Homo sapiens
gtgaagcttgatcca

SEQ ID NO: 789275 - DNA, 15 bp, Homo sapiens
tgaagcttgatccac

SEQ ID NO: 789276 - DNA, 15 bp, Homo sapiens
gaagcttgatccact

SEQ ID NO: 789277 - DNA, 15 bp, Homo sapiens
aagcttgatccactg

SEQ ID NO: 789278 - DNA, 15 bp, Homo sapiens
agcttgatccactgg

SEQ ID NO: 789279 - DNA, 15 bp, Homo sapiens
gcttgatccactggc

SEQ ID NO: 789280 - DNA, 15 bp, Homo sapiens
cttgatccactggct

SEQ ID NO: 789281 - DNA, 15 bp, Homo sapiens
ttgatccactggctc

SEQ ID NO: 789282 - DNA, 15 bp, Homo sapiens
tgatccactggctca

SEQ ID NO: 789283 - DNA, 15 bp, Homo sapiens
gatccactggctcaa

SEQ ID NO: 789284 - DNA, 15 bp, Homo sapiens
atccactggctcaac

SEQ ID NO: 789285 - DNA, 15 bp, Homo sapiens
tccactggctcaaca

SEQ ID NO: 789286 - DNA, 15 bp, Homo sapiens
ccactggctcaacag

SEQ ID NO: 789287 - DNA, 15 bp, Homo sapiens
cactggctcaacagt

SEQ ID NO: 789288 - DNA, 15 bp, Homo sapiens
actggctcaacagtg

SEQ ID NO: 789289 - DNA, 15 bp, Homo sapiens
ctggctcaacagtgt

SEQ ID NO: 789290 - DNA, 15 bp, Homo sapiens
tggctcaacagtgtc

SEQ ID NO: 789291 - DNA, 15 bp, Homo sapiens
ggctcaacagtgtca

SEQ ID NO: 789292 - DNA, 15 bp, Homo sapiens
gctcaacagtgtcac

SEQ ID NO: 789293 - DNA, 15 bp, Homo sapiens
ctcaacagtgtcacc

SEQ ID NO: 789294 - DNA, 15 bp, Homo sapiens
tcaacagtgtcaccc

SEQ ID NO: 789295 - DNA, 15 bp, Homo sapiens
caacagtgtcacccc

SEQ ID NO: 789296 - DNA, 15 bp, Homo sapiens
aacagtgtcaccccc

SEQ ID NO: 789297 - DNA, 15 bp, Homo sapiens
acagtgtcaccccca

SEQ ID NO: 789298 - DNA, 15 bp, Homo sapiens
cagtgtcacccccag

SEQ ID NO: 789299 - DNA, 15 bp, Homo sapiens
agtgtcacccccaga

SEQ ID NO: 789300 - DNA, 15 bp, Homo sapiens
gtgtcacccccagag

SEQ ID NO: 789301 - DNA, 15 bp, Homo sapiens
tgtcacccccagagc

SEQ ID NO: 789302 - DNA, 15 bp, Homo sapiens
gtcacccccagagct

SEQ ID NO: 789303 - DNA, 15 bp, Homo sapiens
tcacccccagagctc

SEQ ID NO: 789304 - DNA, 15 bp, Homo sapiens
cacccccagagctcc

SEQ ID NO: 789305 - DNA, 15 bp, Homo sapiens
acccccagagctccc

SEQ ID NO: 789306 - DNA, 15 bp, Homo sapiens
cccccagagctccca

SEQ ID NO: 789307 - DNA, 15 bp, Homo sapiens
ccccagagctcccat

SEQ ID NO: 789308 - DNA, 15 bp, Homo sapiens
cccagagctcccatc

SEQ ID NO: 789309 - DNA, 15 bp, Homo sapiens
ccagagctcccatct

SEQ ID NO: 789310 - DNA, 15 bp, Homo sapiens
cagagctcccatctc

SEQ ID NO: 789311 - DNA, 15 bp, Homo sapiens
agagctcccatctcc

SEQ ID NO: 789312 - DNA, 15 bp, Homo sapiens
gagctcccatctccg

SEQ ID NO: 789313 - DNA, 15 bp, Homo sapiens
agctcccatctccgt

SEQ ID NO: 789314 - DNA, 15 bp, Homo sapiens
gctcccatctccgtg

SEQ ID NO: 789315 - DNA, 15 bp, Homo sapiens
ctcccatctccgtgg

SEQ ID NO: 789316 - DNA, 15 bp, Homo sapiens
tcccatctccgtggg

SEQ ID NO: 789317 - DNA, 15 bp, Homo sapiens
cccatctccgtgggc

SEQ ID NO: 789318 - DNA, 15 bp, Homo sapiens
ccatctccgtgggca

SEQ ID NO: 789319 - DNA, 15 bp, Homo sapiens
catctccgtgggcac

SEQ ID NO: 789320 - DNA, 15 bp, Homo sapiens
atctccgtgggcact

SEQ ID NO: 789321 - DNA, 15 bp, Homo sapiens
tctccgtgggcactc

SEQ ID NO: 789322 - DNA, 15 bp, Homo sapiens
ctccgtgggcactca

SEQ ID NO: 789323 - DNA, 15 bp, Homo sapiens
tccgtgggcactcac

SEQ ID NO: 789324 - DNA, 15 bp, Homo sapiens
ccgtgggcactcacc

SEQ ID NO: 789325 - DNA, 15 bp, Homo sapiens
cgtgggcactcaccc

SEQ ID NO: 789326 - DNA, 15 bp, Homo sapiens
gtgggcactcaccct

SEQ ID NO: 789327 - DNA, 15 bp, Homo sapiens
tgggcactcaccctg

SEQ ID NO: 789328 - DNA, 15 bp, Homo sapiens
gggcactcaccctgt

SEQ ID NO: 789329 - DNA, 15 bp, Homo sapiens
ggcactcaccctgtg

SEQ ID NO: 789330 - DNA, 15 bp, Homo sapiens
gcactcaccctgtgg

SEQ ID NO: 789331 - DNA, 15 bp, Homo sapiens
cactcaccctgtggg

SEQ ID NO: 789332 - DNA, 15 bp, Homo sapiens
actcaccctgtgggt

SEQ ID NO: 789333 - DNA, 15 bp, Homo sapiens
ctcaccctgtgggtt

SEQ ID NO: 789334 - DNA, 15 bp, Homo sapiens
tcaccctgtgggtta

SEQ ID NO: 789335 - DNA, 15 bp, Homo sapiens
caccctgtgggttaa

SEQ ID NO: 789336 - DNA, 15 bp, Homo sapiens
accctgtgggttaac

SEQ ID NO: 789337 - DNA, 15 bp, Homo sapiens
ccctgtgggttaact

SEQ ID NO: 789338 - DNA, 15 bp, Homo sapiens
cctgtgggttaactg

SEQ ID NO: 789339 - DNA, 15 bp, Homo sapiens
ctgtgggttaactgg

SEQ ID NO: 789340 - DNA, 15 bp, Homo sapiens
tgtgggttaactggg

SEQ ID NO: 789341 - DNA, 15 bp, Homo sapiens
gtgggttaactgggt

SEQ ID NO: 789342 - DNA, 15 bp, Homo sapiens
tgggttaactgggtc

SEQ ID NO: 789343 - DNA, 15 bp, Homo sapiens
gggttaactgggtct

SEQ ID NO: 789344 - DNA, 15 bp, Homo sapiens
ggttaactgggtctt

SEQ ID NO: 789345 - DNA, 15 bp, Homo sapiens
gttaactgggtcttt

SEQ ID NO: 789346 - DNA, 15 bp, Homo sapiens
ttaactgggtctttg

SEQ ID NO: 789347 - DNA, 15 bp, Homo sapiens
taactgggtctttgg

SEQ ID NO: 789348 - DNA, 15 bp, Homo sapiens
aactgggtctttggg

SEQ ID NO: 789349 - DNA, 15 bp, Homo sapiens
actgggtctttgggg

SEQ ID NO: 789350 - DNA, 15 bp, Homo sapiens
ctgggtctttggggc

SEQ ID NO: 789351 - DNA, 15 bp, Homo sapiens
tgggtctttggggcg

SEQ ID NO: 789352 - DNA, 15 bp, Homo sapiens
gggtctttggggcgc

SEQ ID NO: 789353 - DNA, 15 bp, Homo sapiens
ggtctttggggcgcc

SEQ ID NO: 789354 - DNA, 15 bp, Homo sapiens
gtctttggggcgcca

SEQ ID NO: 789355 - DNA, 15 bp, Homo sapiens
tctttggggcgccat

SEQ ID NO: 789356 - DNA, 15 bp, Homo sapiens
ctttggggcgccatt

SEQ ID NO: 789357 - DNA, 15 bp, Homo sapiens
tttggggcgccattt

SEQ ID NO: 789358 - DNA, 15 bp, Homo sapiens
ttggggcgccatttc

SEQ ID NO: 789359 - DNA, 15 bp, Homo sapiens
tggggcgccatttcc

SEQ ID NO: 789360 - DNA, 15 bp, Homo sapiens
ggggcgccatttcct

SEQ ID NO: 789361 - DNA, 15 bp, Homo sapiens
gggcgccatttcctg

SEQ ID NO: 789362 - DNA, 15 bp, Homo sapiens
ggcgccatttcctgg

SEQ ID NO: 789363 - DNA, 15 bp, Homo sapiens
gcgccatttcctgga

SEQ ID NO: 789364 - DNA, 15 bp, Homo sapiens
cgccatttcctggac

SEQ ID NO: 789365 - DNA, 15 bp, Homo sapiens
gccatttcctggaca

SEQ ID NO: 789366 - DNA, 15 bp, Homo sapiens
ccatttcctggacat

SEQ ID NO: 789367 - DNA, 15 bp, Homo sapiens
catttcctggacatg

SEQ ID NO: 789368 - DNA, 15 bp, Homo sapiens
atttcctggacatgc

SEQ ID NO: 789369 - DNA, 15 bp, Homo sapiens
tttcctggacatgcc

SEQ ID NO: 789370 - DNA, 15 bp, Homo sapiens
ttcctggacatgcct

SEQ ID NO: 789371 - DNA, 15 bp, Homo sapiens
tcctggacatgcctc

SEQ ID NO: 789372 - DNA, 15 bp, Homo sapiens
cctggacatgcctca

SEQ ID NO: 789373 - DNA, 15 bp, Homo sapiens
ctggacatgcctcaa

SEQ ID NO: 789374 - DNA, 15 bp, Homo sapiens
tggacatgcctcaag

SEQ ID NO: 789375 - DNA, 15 bp, Homo sapiens
ggacatgcctcaaga

SEQ ID NO: 789376 - DNA, 15 bp, Homo sapiens
gacatgcctcaagac

SEQ ID NO: 789377 - DNA, 15 bp, Homo sapiens
acatgcctcaagact

SEQ ID NO: 789378 - DNA, 15 bp, Homo sapiens
catgcctcaagactt

SEQ ID NO: 789379 - DNA, 15 bp, Homo sapiens
atgcctcaagacttc

SEQ ID NO: 789380 - DNA, 15 bp, Homo sapiens
tgcctcaagacttcc

SEQ ID NO: 789381 - DNA, 15 bp, Homo sapiens
gcctcaagacttccc

SEQ ID NO: 789382 - DNA, 15 bp, Homo sapiens
cctcaagacttccct

SEQ ID NO: 789383 - DNA, 15 bp, Homo sapiens
ctcaagacttccctg

SEQ ID NO: 789384 - DNA, 15 bp, Homo sapiens
tcaagacttccctga

SEQ ID NO: 789385 - DNA, 15 bp, Homo sapiens
caagacttccctgaa

SEQ ID NO: 789386 - DNA, 15 bp, Homo sapiens
aagacttccctgaat

SEQ ID NO: 789387 - DNA, 15 bp, Homo sapiens
agacttccctgaatg

SEQ ID NO: 789388 - DNA, 15 bp, Homo sapiens
gacttccctgaatga

SEQ ID NO: 789389 - DNA, 15 bp, Homo sapiens
acttccctgaatgag

SEQ ID NO: 789390 - DNA, 15 bp, Homo sapiens
cttccctgaatgagt

SEQ ID NO: 789391 - DNA, 15 bp, Homo sapiens
ttccctgaatgagtg

SEQ ID NO: 789392 - DNA, 15 bp, Homo sapiens
tccctgaatgagtgg

SEQ ID NO: 789393 - DNA, 15 bp, Homo sapiens
ccctgaatgagtggt

SEQ ID NO: 789394 - DNA, 15 bp, Homo sapiens
cctgaatgagtggtt

SEQ ID NO: 789395 - DNA, 15 bp, Homo sapiens
ctgaatgagtggttc

SEQ ID NO: 789396 - DNA, 15 bp, Homo sapiens
tgaatgagtggttca

SEQ ID NO: 789397 - DNA, 15 bp, Homo sapiens
gaatgagtggttcat

SEQ ID NO: 789398 - DNA, 15 bp, Homo sapiens
aatgagtggttcatc

SEQ ID NO: 789399 - DNA, 15 bp, Homo sapiens
atgagtggttcatct

SEQ ID NO: 789400 - DNA, 15 bp, Homo sapiens
tgagtggttcatctg

SEQ ID NO: 789401 - DNA, 15 bp, Homo sapiens
gagtggttcatctgg

SEQ ID NO: 789402 - DNA, 15 bp, Homo sapiens
agtggttcatctggt

SEQ ID NO: 789403 - DNA, 15 bp, Homo sapiens
gtggttcatctggta

SEQ ID NO: 789404 - DNA, 15 bp, Homo sapiens
tggttcatctggtaa

SEQ ID NO: 789405 - DNA, 15 bp, Homo sapiens
ggttcatctggtaat

SEQ ID NO: 789406 - DNA, 15 bp, Homo sapiens
gttcatctggtaatg

SEQ ID NO: 789407 - DNA, 15 bp, Homo sapiens
ttcatctggtaatga

SEQ ID NO: 789408 - DNA, 15 bp, Homo sapiens
tcatctggtaatgaa

SEQ ID NO: 789409 - DNA, 15 bp, Homo sapiens
catctggtaatgaat

SEQ ID NO: 789410 - DNA, 15 bp, Homo sapiens
atctggtaatgaatg

SEQ ID NO: 789411 - DNA, 15 bp, Homo sapiens
tctggtaatgaatga

SEQ ID NO: 789412 - DNA, 15 bp, Homo sapiens
ctggtaatgaatgag

SEQ ID NO: 789413 - DNA, 15 bp, Homo sapiens
tggtaatgaatgagg

SEQ ID NO: 789414 - DNA, 15 bp, Homo sapiens
ggtaatgaatgaggc

SEQ ID NO: 789415 - DNA, 15 bp, Homo sapiens
gtaatgaatgaggcc

SEQ ID NO: 789416 - DNA, 15 bp, Homo sapiens
taatgaatgaggcca

SEQ ID NO: 789417 - DNA, 15 bp, Homo sapiens
aatgaatgaggccac

SEQ ID NO: 789418 - DNA, 15 bp, Homo sapiens
atgaatgaggccaca

SEQ ID NO: 789419 - DNA, 15 bp, Homo sapiens
tgaatgaggccacac

SEQ ID NO: 789420 - DNA, 15 bp, Homo sapiens
gaatgaggccacaca

SEQ ID NO: 789421 - DNA, 15 bp, Homo sapiens
aatgaggccacacag

SEQ ID NO: 789422 - DNA, 15 bp, Homo sapiens
atgaggccacacagg

SEQ ID NO: 789423 - DNA, 15 bp, Homo sapiens
tgaggccacacaggc

SEQ ID NO: 789424 - DNA, 15 bp, Homo sapiens
gaggccacacaggct

SEQ ID NO: 789425 - DNA, 15 bp, Homo sapiens
aggccacacaggctc

SEQ ID NO: 789426 - DNA, 15 bp, Homo sapiens
ggccacacaggctcc

SEQ ID NO: 789427 - DNA, 15 bp, Homo sapiens
gccacacaggctccc

SEQ ID NO: 789428 - DNA, 15 bp, Homo sapiens
ccacacaggctccct

SEQ ID NO: 789429 - DNA, 15 bp, Homo sapiens
cacacaggctccctt

SEQ ID NO: 789430 - DNA, 15 bp, Homo sapiens
acacaggctccctta

SEQ ID NO: 789431 - DNA, 15 bp, Homo sapiens
cacaggctcccttat

SEQ ID NO: 789432 - DNA, 15 bp, Homo sapiens
acaggctcccttata

SEQ ID NO: 789433 - DNA, 15 bp, Homo sapiens
caggctcccttatac

SEQ ID NO: 789434 - DNA, 15 bp, Homo sapiens
aggctcccttatact

SEQ ID NO: 789435 - DNA, 15 bp, Homo sapiens
ggctcccttatactt

SEQ ID NO: 789436 - DNA, 15 bp, Homo sapiens
gctcccttatacttg

SEQ ID NO: 789437 - DNA, 15 bp, Homo sapiens
ctcccttatacttgt

SEQ ID NO: 789438 - DNA, 15 bp, Homo sapiens
tcccttatacttgtc

SEQ ID NO: 789439 - DNA, 15 bp, Homo sapiens
cccttatacttgtcc

SEQ ID NO: 789440 - DNA, 15 bp, Homo sapiens
ccttatacttgtccc

SEQ ID NO: 789441 - DNA, 15 bp, Homo sapiens
cttatacttgtccct

SEQ ID NO: 789442 - DNA, 15 bp, Homo sapiens
ttatacttgtccctg

SEQ ID NO: 789443 - DNA, 15 bp, Homo sapiens
tatacttgtccctgg

SEQ ID NO: 789444 - DNA, 15 bp, Homo sapiens
atacttgtccctggc

SEQ ID NO: 789445 - DNA, 15 bp, Homo sapiens
tacttgtccctggcg

SEQ ID NO: 789446 - DNA, 15 bp, Homo sapiens
acttgtccctggcgt

SEQ ID NO: 789447 - DNA, 15 bp, Homo sapiens
cttgtccctggcgtg

SEQ ID NO: 789448 - DNA, 15 bp, Homo sapiens
ttgtccctggcgtgg

SEQ ID NO: 789449 - DNA, 15 bp, Homo sapiens
tgtccctggcgtggg

SEQ ID NO: 789450 - DNA, 15 bp, Homo sapiens
gtccctggcgtggga

SEQ ID NO: 789451 - DNA, 15 bp, Homo sapiens
tccctggcgtgggag

SEQ ID NO: 789452 - DNA, 15 bp, Homo sapiens
ccctggcgtgggagc

SEQ ID NO: 789453 - DNA, 15 bp, Homo sapiens
cctggcgtgggagct

SEQ ID NO: 789454 - DNA, 15 bp, Homo sapiens
ctggcgtgggagctg

SEQ ID NO: 789455 - DNA, 15 bp, Homo sapiens
tggcgtgggagctgc

SEQ ID NO: 789456 - DNA, 15 bp, Homo sapiens
ggcgtgggagctgcc

SEQ ID NO: 789457 - DNA, 15 bp, Homo sapiens
gcgtgggagctgcct

SEQ ID NO: 789458 - DNA, 15 bp, Homo sapiens
cgtgggagctgcctt

SEQ ID NO: 789459 - DNA, 15 bp, Homo sapiens
gtgggagctgccttc

SEQ ID NO: 789460 - DNA, 15 bp, Homo sapiens
tgggagctgccttct

SEQ ID NO: 789461 - DNA, 15 bp, Homo sapiens
gggagctgccttcta

SEQ ID NO: 789462 - DNA, 15 bp, Homo sapiens
ggagctgccttctaa

SEQ ID NO: 789463 - DNA, 15 bp, Homo sapiens
gagctgccttctaag

SEQ ID NO: 789464 - DNA, 15 bp, Homo sapiens
agctgccttctaagg

SEQ ID NO: 789465 - DNA, 15 bp, Homo sapiens
gctgccttctaaggt

SEQ ID NO: 789466 - DNA, 15 bp, Homo sapiens
ctgccttctaaggtt

SEQ ID NO: 789467 - DNA, 15 bp, Homo sapiens
tgccttctaaggttt

SEQ ID NO: 789468 - DNA, 15 bp, Homo sapiens
gccttctaaggtttc

SEQ ID NO: 789469 - DNA, 15 bp, Homo sapiens
ccttctaaggtttca

SEQ ID NO: 789470 - DNA, 15 bp, Homo sapiens
cttctaaggtttcat

SEQ ID NO: 789471 - DNA, 15 bp, Homo sapiens
ttctaaggtttcata

SEQ ID NO: 789472 - DNA, 15 bp, Homo sapiens
tctaaggtttcataa

SEQ ID NO: 789473 - DNA, 15 bp, Homo sapiens
ctaaggtttcataat

SEQ ID NO: 789474 - DNA, 15 bp, Homo sapiens
taaggtttcataatg

SEQ ID NO: 789475 - DNA, 15 bp, Homo sapiens
aaggtttcataatga

SEQ ID NO: 789476 - DNA, 15 bp, Homo sapiens
aggtttcataatgag

SEQ ID NO: 789477 - DNA, 15 bp, Homo sapiens
ggtttcataatgaga

SEQ ID NO: 789478 - DNA, 15 bp, Homo sapiens
gtttcataatgagaa

SEQ ID NO: 789479 - DNA, 15 bp, Homo sapiens
tttcataatgagaac

SEQ ID NO: 789480 - DNA, 15 bp, Homo sapiens
ttcataatgagaaca

SEQ ID NO: 789481 - DNA, 15 bp, Homo sapiens
tcataatgagaacat

SEQ ID NO: 789482 - DNA, 15 bp, Homo sapiens
cataatgagaacatg

SEQ ID NO: 789483 - DNA, 15 bp, Homo sapiens
ataatgagaacatgc

SEQ ID NO: 789484 - DNA, 15 bp, Homo sapiens
taatgagaacatgct

SEQ ID NO: 789485 - DNA, 15 bp, Homo sapiens
aatgagaacatgctt

SEQ ID NO: 789486 - DNA, 15 bp, Homo sapiens
atgagaacatgcttt

SEQ ID NO: 789487 - DNA, 15 bp, Homo sapiens
tgagaacatgctttt

SEQ ID NO: 789488 - DNA, 15 bp, Homo sapiens
gagaacatgcttttt

SEQ ID NO: 789489 - DNA, 15 bp, Homo sapiens
agaacatgctttttt

SEQ ID NO: 789490 - DNA, 15 bp, Homo sapiens
gaacatgctttttta

SEQ ID NO: 789491 - DNA, 15 bp, Homo sapiens
aacatgcttttttag

SEQ ID NO: 789492 - DNA, 15 bp, Homo sapiens
acatgcttttttagg

SEQ ID NO: 789493 - DNA, 15 bp, Homo sapiens
catgcttttttaggg

SEQ ID NO: 789494 - DNA, 15 bp, Homo sapiens
atgcttttttagggg

SEQ ID NO: 789495 - DNA, 15 bp, Homo sapiens
tgcttttttagggga

SEQ ID NO: 789496 - DNA, 15 bp, Homo sapiens
gcttttttaggggag

SEQ ID NO: 789497 - DNA, 15 bp, Homo sapiens
cttttttaggggagc

SEQ ID NO: 789498 - DNA, 15 bp, Homo sapiens
ttttttaggggagca

SEQ ID NO: 789499 - DNA, 15 bp, Homo sapiens
tttttaggggagcag

SEQ ID NO: 789500 - DNA, 15 bp, Homo sapiens
ttttaggggagcagg

SEQ ID NO: 789501 - DNA, 15 bp, Homo sapiens
tttaggggagcaggt

SEQ ID NO: 789502 - DNA, 15 bp, Homo sapiens
ttaggggagcaggtg

SEQ ID NO: 789503 - DNA, 15 bp, Homo sapiens
taggggagcaggtgt

SEQ ID NO: 789504 - DNA, 15 bp, Homo sapiens
aggggagcaggtgtg

SEQ ID NO: 789505 - DNA, 15 bp, Homo sapiens
ggggagcaggtgtgt

SEQ ID NO: 789506 - DNA, 15 bp, Homo sapiens
gggagcaggtgtgtg

SEQ ID NO: 789507 - DNA, 15 bp, Homo sapiens
ggagcaggtgtgtgg

SEQ ID NO: 789508 - DNA, 15 bp, Homo sapiens
gagcaggtgtgtggt

SEQ ID NO: 789509 - DNA, 15 bp, Homo sapiens
agcaggtgtgtggta

SEQ ID NO: 789510 - DNA, 15 bp, Homo sapiens
gcaggtgtgtggtag

SEQ ID NO: 789511 - DNA, 15 bp, Homo sapiens
caggtgtgtggtaga

SEQ ID NO: 789512 - DNA, 15 bp, Homo sapiens
aggtgtgtggtagac

SEQ ID NO: 789513 - DNA, 15 bp, Homo sapiens
ggtgtgtggtagact

SEQ ID NO: 789514 - DNA, 15 bp, Homo sapiens
gtgtgtggtagactc

SEQ ID NO: 789515 - DNA, 15 bp, Homo sapiens
tgtgtggtagactct

SEQ ID NO: 789516 - DNA, 15 bp, Homo sapiens
gtgtggtagactctg

SEQ ID NO: 789517 - DNA, 15 bp, Homo sapiens
tgtggtagactctgg

SEQ ID NO: 789518 - DNA, 15 bp, Homo sapiens
gtggtagactctgga

SEQ ID NO: 789519 - DNA, 15 bp, Homo sapiens
tggtagactctggac

SEQ ID NO: 789520 - DNA, 15 bp, Homo sapiens
ggtagactctggact

SEQ ID NO: 789521 - DNA, 15 bp, Homo sapiens
gtagactctggactc

SEQ ID NO: 789522 - DNA, 15 bp, Homo sapiens
tagactctggactcc

SEQ ID NO: 789523 - DNA, 15 bp, Homo sapiens
agactctggactcct

SEQ ID NO: 789524 - DNA, 15 bp, Homo sapiens
gactctggactccta

SEQ ID NO: 789525 - DNA, 15 bp, Homo sapiens
actctggactcctac

SEQ ID NO: 789526 - DNA, 15 bp, Homo sapiens
ctctggactcctacg

SEQ ID NO: 789527 - DNA, 15 bp, Homo sapiens
tctggactcctacgc

SEQ ID NO: 789528 - DNA, 15 bp, Homo sapiens
ctggactcctacgct

SEQ ID NO: 789529 - DNA, 15 bp, Homo sapiens
tggactcctacgctg

SEQ ID NO: 789530 - DNA, 15 bp, Homo sapiens
ggactcctacgctgc

SEQ ID NO: 789531 - DNA, 15 bp, Homo sapiens
gactcctacgctgct

SEQ ID NO: 789532 - DNA, 15 bp, Homo sapiens
actcctacgctgctg

SEQ ID NO: 789533 - DNA, 15 bp, Homo sapiens
ctcctacgctgctgt

SEQ ID NO: 789534 - DNA, 15 bp, Homo sapiens
tcctacgctgctgtc

SEQ ID NO: 789535 - DNA, 15 bp, Homo sapiens
cctacgctgctgtct

SEQ ID NO: 789536 - DNA, 15 bp, Homo sapiens
ctacgctgctgtctt

SEQ ID NO: 789537 - DNA, 15 bp, Homo sapiens
tacgctgctgtcttc

SEQ ID NO: 789538 - DNA, 15 bp, Homo sapiens
acgctgctgtcttct

SEQ ID NO: 789539 - DNA, 15 bp, Homo sapiens
cgctgctgtcttctg

SEQ ID NO: 789540 - DNA, 15 bp, Homo sapiens
gctgctgtcttctga

SEQ ID NO: 789541 - DNA, 15 bp, Homo sapiens
ctgctgtcttctgat

SEQ ID NO: 789542 - DNA, 15 bp, Homo sapiens
tgctgtcttctgatt

SEQ ID NO: 789543 - DNA, 15 bp, Homo sapiens
gctgtcttctgatta

SEQ ID NO: 789544 - DNA, 15 bp, Homo sapiens
ctgtcttctgattat

SEQ ID NO: 789545 - DNA, 15 bp, Homo sapiens
tgtcttctgattatt

SEQ ID NO: 789546 - DNA, 15 bp, Homo sapiens
gtcttctgattattc

SEQ ID NO: 789547 - DNA, 15 bp, Homo sapiens
tcttctgattattcc

SEQ ID NO: 789548 - DNA, 15 bp, Homo sapiens
cttctgattattccc

SEQ ID NO: 789549 - DNA, 15 bp, Homo sapiens
ttctgattattccca

SEQ ID NO: 789550 - DNA, 15 bp, Homo sapiens
tctgattattcccag

SEQ ID NO: 789551 - DNA, 15 bp, Homo sapiens
ctgattattcccaga

SEQ ID NO: 789552 - DNA, 15 bp, Homo sapiens
tgattattcccagag

SEQ ID NO: 789553 - DNA, 15 bp, Homo sapiens
gattattcccagaga

SEQ ID NO: 789554 - DNA, 15 bp, Homo sapiens
attattcccagagaa

SEQ ID NO: 789555 - DNA, 15 bp, Homo sapiens
ttattcccagagaac

SEQ ID NO: 789556 - DNA, 15 bp, Homo sapiens
tattcccagagaact

SEQ ID NO: 789557 - DNA, 15 bp, Homo sapiens
attcccagagaactg

SEQ ID NO: 789558 - DNA, 15 bp, Homo sapiens
ttcccagagaactgc

SEQ ID NO: 789559 - DNA, 15 bp, Homo sapiens
tcccagagaactgca

SEQ ID NO: 789560 - DNA, 15 bp, Homo sapiens
cccagagaactgcac

SEQ ID NO: 789561 - DNA, 15 bp, Homo sapiens
ccagagaactgcacc

SEQ ID NO: 789562 - DNA, 15 bp, Homo sapiens
cagagaactgcacct

SEQ ID NO: 789563 - DNA, 15 bp, Homo sapiens
agagaactgcacctc

SEQ ID NO: 789564 - DNA, 15 bp, Homo sapiens
gagaactgcacctct

SEQ ID NO: 789565 - DNA, 15 bp, Homo sapiens
agaactgcacctctc

SEQ ID NO: 789566 - DNA, 15 bp, Homo sapiens
gaactgcacctctcc

SEQ ID NO: 789567 - DNA, 15 bp, Homo sapiens
aactgcacctctccg

SEQ ID NO: 789568 - DNA, 15 bp, Homo sapiens
actgcacctctccgc

SEQ ID NO: 789569 - DNA, 15 bp, Homo sapiens
ctgcacctctccgct

SEQ ID NO: 789570 - DNA, 15 bp, Homo sapiens
tgcacctctccgctc

SEQ ID NO: 789571 - DNA, 15 bp, Homo sapiens
gcacctctccgctct

SEQ ID NO: 789572 - DNA, 15 bp, Homo sapiens
cacctctccgctctg

SEQ ID NO: 789573 - DNA, 15 bp, Homo sapiens
acctctccgctctgg

SEQ ID NO: 789574 - DNA, 15 bp, Homo sapiens
cctctccgctctggt

SEQ ID NO: 789575 - DNA, 15 bp, Homo sapiens
ctctccgctctggtt

SEQ ID NO: 789576 - DNA, 15 bp, Homo sapiens
tctccgctctggttg

SEQ ID NO: 789577 - DNA, 15 bp, Homo sapiens
ctccgctctggttgg

SEQ ID NO: 789578 - DNA, 15 bp, Homo sapiens
tccgctctggttggg

SEQ ID NO: 789579 - DNA, 15 bp, Homo sapiens
ccgctctggttgggc

SEQ ID NO: 789580 - DNA, 15 bp, Homo sapiens
cgctctggttgggct

SEQ ID NO: 789581 - DNA, 15 bp, Homo sapiens
gctctggttgggctg

SEQ ID NO: 789582 - DNA, 15 bp, Homo sapiens
ctctggttgggctga

SEQ ID NO: 789583 - DNA, 15 bp, Homo sapiens
tctggttgggctgag

SEQ ID NO: 789584 - DNA, 15 bp, Homo sapiens
ctggttgggctgagg

SEQ ID NO: 789585 - DNA, 15 bp, Homo sapiens
tggttgggctgaggc

SEQ ID NO: 789586 - DNA, 15 bp, Homo sapiens
ggttgggctgaggct

SEQ ID NO: 789587 - DNA, 15 bp, Homo sapiens
gttgggctgaggctg

SEQ ID NO: 789588 - DNA, 15 bp, Homo sapiens
ttgggctgaggctgt

SEQ ID NO: 789589 - DNA, 15 bp, Homo sapiens
tgggctgaggctgtt

SEQ ID NO: 789590 - DNA, 15 bp, Homo sapiens
gggctgaggctgttt

SEQ ID NO: 789591 - DNA, 15 bp, Homo sapiens
ggctgaggctgtttt

SEQ ID NO: 789592 - DNA, 15 bp, Homo sapiens
gctgaggctgttttt

SEQ ID NO: 789593 - DNA, 15 bp, Homo sapiens
ctgaggctgtttttg

SEQ ID NO: 789594 - DNA, 15 bp, Homo sapiens
tgaggctgtttttgt

SEQ ID NO: 789595 - DNA, 15 bp, Homo sapiens
gaggctgtttttgtc

SEQ ID NO: 789596 - DNA, 15 bp, Homo sapiens
aggctgtttttgtca

SEQ ID NO: 789597 - DNA, 15 bp, Homo sapiens
ggctgtttttgtcac

SEQ ID NO: 789598 - DNA, 15 bp, Homo sapiens
gctgtttttgtcacc

SEQ ID NO: 789599 - DNA, 15 bp, Homo sapiens
ctgtttttgtcaccc

SEQ ID NO: 789600 - DNA, 15 bp, Homo sapiens
tgtttttgtcacccc

SEQ ID NO: 789601 - DNA, 15 bp, Homo sapiens
gtttttgtcacccca

SEQ ID NO: 789602 - DNA, 15 bp, Homo sapiens
tttttgtcaccccac

SEQ ID NO: 789603 - DNA, 15 bp, Homo sapiens
ttttgtcaccccaca

SEQ ID NO: 789604 - DNA, 15 bp, Homo sapiens
tttgtcaccccacag

SEQ ID NO: 789605 - DNA, 15 bp, Homo sapiens
ttgtcaccccacagg

SEQ ID NO: 789606 - DNA, 15 bp, Homo sapiens
tgtcaccccacaggc

SEQ ID NO: 789607 - DNA, 15 bp, Homo sapiens
gtcaccccacaggcc

SEQ ID NO: 789608 - DNA, 15 bp, Homo sapiens
tcaccccacaggcct

SEQ ID NO: 789609 - DNA, 15 bp, Homo sapiens
caccccacaggcctg

SEQ ID NO: 789610 - DNA, 15 bp, Homo sapiens
accccacaggcctgt

SEQ ID NO: 789611 - DNA, 15 bp, Homo sapiens
ccccacaggcctgtg

SEQ ID NO: 789612 - DNA, 15 bp, Homo sapiens
cccacaggcctgtgt

SEQ ID NO: 789613 - DNA, 15 bp, Homo sapiens
ccacaggcctgtgtt

SEQ ID NO: 789614 - DNA, 15 bp, Homo sapiens
cacaggcctgtgttg

SEQ ID NO: 789615 - DNA, 15 bp, Homo sapiens
acaggcctgtgttgt

SEQ ID NO: 789616 - DNA, 15 bp, Homo sapiens
caggcctgtgttgtt

SEQ ID NO: 789617 - DNA, 15 bp, Homo sapiens
aggcctgtgttgttt

SEQ ID NO: 789618 - DNA, 15 bp, Homo sapiens
ggcctgtgttgtttg

SEQ ID NO: 789619 - DNA, 15 bp, Homo sapiens
gcctgtgttgtttgt

SEQ ID NO: 789620 - DNA, 15 bp, Homo sapiens
cctgtgttgtttgtt

SEQ ID NO: 789621 - DNA, 15 bp, Homo sapiens
ctgtgttgtttgttc

SEQ ID NO: 789622 - DNA, 15 bp, Homo sapiens
tgtgttgtttgttca

SEQ ID NO: 789623 - DNA, 15 bp, Homo sapiens
gtgttgtttgttcat

SEQ ID NO: 789624 - DNA, 15 bp, Homo sapiens
tgttgtttgttcata

SEQ ID NO: 789625 - DNA, 15 bp, Homo sapiens
gttgtttgttcataa

SEQ ID NO: 789626 - DNA, 15 bp, Homo sapiens
ttgtttgttcataaa

SEQ ID NO: 789627 - DNA, 15 bp, Homo sapiens
tgtttgttcataaag

SEQ ID NO: 789628 - DNA, 15 bp, Homo sapiens
gtttgttcataaagc

SEQ ID NO: 789629 - DNA, 15 bp, Homo sapiens
tttgttcataaagca

SEQ ID NO: 789630 - DNA, 15 bp, Homo sapiens
ttgttcataaagcag

SEQ ID NO: 789631 - DNA, 15 bp, Homo sapiens
tgttcataaagcaga

SEQ ID NO: 789632 - DNA, 15 bp, Homo sapiens
gttcataaagcagag

SEQ ID NO: 789633 - DNA, 15 bp, Homo sapiens
ttcataaagcagaga

SEQ ID NO: 789634 - DNA, 15 bp, Homo sapiens
tcataaagcagagag

SEQ ID NO: 789635 - DNA, 15 bp, Homo sapiens
cataaagcagagaga

SEQ ID NO: 789636 - DNA, 15 bp, Homo sapiens
ataaagcagagagac

SEQ ID NO: 789637 - DNA, 15 bp, Homo sapiens
taaagcagagagaca

SEQ ID NO: 789638 - DNA, 15 bp, Homo sapiens
aaagcagagagacat

SEQ ID NO: 789639 - DNA, 15 bp, Homo sapiens
aagcagagagacatc

SEQ ID NO: 789640 - DNA, 15 bp, Homo sapiens
agcagagagacatct

SEQ ID NO: 789641 - DNA, 15 bp, Homo sapiens
gcagagagacatctg

SEQ ID NO: 789642 - DNA, 15 bp, Homo sapiens
cagagagacatctgt

SEQ ID NO: 789643 - DNA, 15 bp, Homo sapiens
agagagacatctgtc

SEQ ID NO: 789644 - DNA, 15 bp, Homo sapiens
gagagacatctgtca

SEQ ID NO: 789645 - DNA, 15 bp, Homo sapiens
agagacatctgtcat

SEQ ID NO: 789646 - DNA, 15 bp, Homo sapiens
gagacatctgtcatc

SEQ ID NO: 789647 - DNA, 15 bp, Homo sapiens
agacatctgtcatcc

SEQ ID NO: 789648 - DNA, 15 bp, Homo sapiens
gacatctgtcatcct

SEQ ID NO: 789649 - DNA, 15 bp, Homo sapiens
acatctgtcatcctc

SEQ ID NO: 789650 - DNA, 15 bp, Homo sapiens
catctgtcatcctca

SEQ ID NO: 789651 - DNA, 15 bp, Homo sapiens
atctgtcatcctcac

SEQ ID NO: 789652 - DNA, 15 bp, Homo sapiens
tctgtcatcctcact

SEQ ID NO: 789653 - DNA, 15 bp, Homo sapiens
ctgtcatcctcactg

SEQ ID NO: 789654 - DNA, 15 bp, Homo sapiens
tgtcatcctcactga

SEQ ID NO: 789655 - DNA, 15 bp, Homo sapiens
gtcatcctcactgag

SEQ ID NO: 789656 - DNA, 15 bp, Homo sapiens
tcatcctcactgagc

SEQ ID NO: 789657 - DNA, 15 bp, Homo sapiens
catcctcactgagcc

SEQ ID NO: 789658 - DNA, 15 bp, Homo sapiens
atcctcactgagccc

SEQ ID NO: 789659 - DNA, 15 bp, Homo sapiens
tcctcactgagcccg

SEQ ID NO: 789660 - DNA, 15 bp, Homo sapiens
cctcactgagcccga

SEQ ID NO: 789661 - DNA, 15 bp, Homo sapiens
ctcactgagcccgac

SEQ ID NO: 789662 - DNA, 15 bp, Homo sapiens
tcactgagcccgaca

SEQ ID NO: 789663 - DNA, 15 bp, Homo sapiens
cactgagcccgacag

SEQ ID NO: 789664 - DNA, 15 bp, Homo sapiens
actgagcccgacaga

SEQ ID NO: 789665 - DNA, 15 bp, Homo sapiens
ctgagcccgacagat

SEQ ID NO: 789666 - DNA, 15 bp, Homo sapiens
tgagcccgacagatg

SEQ ID NO: 789667 - DNA, 15 bp, Homo sapiens
gagcccgacagatgc

SEQ ID NO: 789668 - DNA, 15 bp, Homo sapiens
agcccgacagatgcc

SEQ ID NO: 789669 - DNA, 15 bp, Homo sapiens
gcccgacagatgcca

SEQ ID NO: 789670 - DNA, 15 bp, Homo sapiens
cccgacagatgccac

SEQ ID NO: 789671 - DNA, 15 bp, Homo sapiens
ccgacagatgccaca

SEQ ID NO: 789672 - DNA, 15 bp, Homo sapiens
cgacagatgccacat

SEQ ID NO: 789673 - DNA, 15 bp, Homo sapiens
gacagatgccacatt

SEQ ID NO: 789674 - DNA, 15 bp, Homo sapiens
acagatgccacattc

SEQ ID NO: 789675 - DNA, 15 bp, Homo sapiens
cagatgccacattca

SEQ ID NO: 789676 - DNA, 15 bp, Homo sapiens
agatgccacattcaa

SEQ ID NO: 789677 - DNA, 15 bp, Homo sapiens
gatgccacattcaaa

SEQ ID NO: 789678 - DNA, 15 bp, Homo sapiens
atgccacattcaaag

SEQ ID NO: 789679 - DNA, 15 bp, Homo sapiens
tgccacattcaaaga

SEQ ID NO: 789680 - DNA, 15 bp, Homo sapiens
gccacattcaaagac

SEQ ID NO: 789681 - DNA, 15 bp, Homo sapiens
ccacattcaaagacc

SEQ ID NO: 789682 - DNA, 15 bp, Homo sapiens
cacattcaaagaccc

SEQ ID NO: 789683 - DNA, 15 bp, Homo sapiens
acattcaaagaccca

SEQ ID NO: 789684 - DNA, 15 bp, Homo sapiens
cattcaaagacccag

SEQ ID NO: 789685 - DNA, 15 bp, Homo sapiens
attcaaagacccagc

SEQ ID NO: 789686 - DNA, 15 bp, Homo sapiens
ttcaaagacccagca

SEQ ID NO: 789687 - DNA, 15 bp, Homo sapiens
tcaaagacccagcac

SEQ ID NO: 789688 - DNA, 15 bp, Homo sapiens
caaagacccagcaca

SEQ ID NO: 789689 - DNA, 15 bp, Homo sapiens
aaagacccagcacat

SEQ ID NO: 789690 - DNA, 15 bp, Homo sapiens
aagacccagcacatg

SEQ ID NO: 789691 - DNA, 15 bp, Homo sapiens
agacccagcacatgc

SEQ ID NO: 789692 - DNA, 15 bp, Homo sapiens
gacccagcacatgca

SEQ ID NO: 789693 - DNA, 15 bp, Homo sapiens
acccagcacatgcag

SEQ ID NO: 789694 - DNA, 15 bp, Homo sapiens
cccagcacatgcagc

SEQ ID NO: 789695 - DNA, 15 bp, Homo sapiens
ccagcacatgcagca

SEQ ID NO: 789696 - DNA, 15 bp, Homo sapiens
cagcacatgcagcag

SEQ ID NO: 789697 - DNA, 15 bp, Homo sapiens
agcacatgcagcagc

SEQ ID NO: 789698 - DNA, 15 bp, Homo sapiens
gcacatgcagcagca

SEQ ID NO: 789699 - DNA, 15 bp, Homo sapiens
cacatgcagcagcag

SEQ ID NO: 789700 - DNA, 15 bp, Homo sapiens
acatgcagcagcagc

SEQ ID NO: 789701 - DNA, 15 bp, Homo sapiens
catgcagcagcagcg

SEQ ID NO: 789702 - DNA, 15 bp, Homo sapiens
atgcagcagcagcgg

SEQ ID NO: 789703 - DNA, 15 bp, Homo sapiens
tgcagcagcagcggt

SEQ ID NO: 789704 - DNA, 15 bp, Homo sapiens
gcagcagcagcggtg

SEQ ID NO: 789705 - DNA, 15 bp, Homo sapiens
cagcagcagcggtgg

SEQ ID NO: 789706 - DNA, 15 bp, Homo sapiens
agcagcagcggtggc

SEQ ID NO: 789707 - DNA, 15 bp, Homo sapiens
gcagcagcggtggca

SEQ ID NO: 789708 - DNA, 15 bp, Homo sapiens
cagcagcggtggcag

SEQ ID NO: 789709 - DNA, 15 bp, Homo sapiens
agcagcggtggcagc

SEQ ID NO: 789710 - DNA, 15 bp, Homo sapiens
gcagcggtggcagca

SEQ ID NO: 789711 - DNA, 15 bp, Homo sapiens
cagcggtggcagcac

SEQ ID NO: 789712 - DNA, 15 bp, Homo sapiens
agcggtggcagcact

SEQ ID NO: 789713 - DNA, 15 bp, Homo sapiens
gcggtggcagcactg

SEQ ID NO: 789714 - DNA, 15 bp, Homo sapiens
cggtggcagcactgt

SEQ ID NO: 789715 - DNA, 15 bp, Homo sapiens
ggtggcagcactgtc

SEQ ID NO: 789716 - DNA, 15 bp, Homo sapiens
gtggcagcactgtca

SEQ ID NO: 789717 - DNA, 15 bp, Homo sapiens
tggcagcactgtcat

SEQ ID NO: 789718 - DNA, 15 bp, Homo sapiens
ggcagcactgtcatt

SEQ ID NO: 789719 - DNA, 15 bp, Homo sapiens
gcagcactgtcattg

SEQ ID NO: 789720 - DNA, 15 bp, Homo sapiens
cagcactgtcattgc

SEQ ID NO: 789721 - DNA, 15 bp, Homo sapiens
agcactgtcattgcg

SEQ ID NO: 789722 - DNA, 15 bp, Homo sapiens
gcactgtcattgcgg

SEQ ID NO: 789723 - DNA, 15 bp, Homo sapiens
cactgtcattgcggc

SEQ ID NO: 789724 - DNA, 15 bp, Homo sapiens
actgtcattgcggcg

SEQ ID NO: 789725 - DNA, 15 bp, Homo sapiens
ctgtcattgcggcgc

SEQ ID NO: 789726 - DNA, 15 bp, Homo sapiens
tgtcattgcggcgct

SEQ ID NO: 789727 - DNA, 15 bp, Homo sapiens
gtcattgcggcgctc

SEQ ID NO: 789728 - DNA, 15 bp, Homo sapiens
tcattgcggcgctca

SEQ ID NO: 789729 - DNA, 15 bp, Homo sapiens
cattgcggcgctcac

SEQ ID NO: 789730 - DNA, 15 bp, Homo sapiens
attgcggcgctcaca

SEQ ID NO: 789731 - DNA, 15 bp, Homo sapiens
ttgcggcgctcacac

SEQ ID NO: 789732 - DNA, 15 bp, Homo sapiens
tgcggcgctcacaca

SEQ ID NO: 789733 - DNA, 15 bp, Homo sapiens
gcggcgctcacacac

SEQ ID NO: 789734 - DNA, 15 bp, Homo sapiens
cggcgctcacacaca

SEQ ID NO: 789735 - DNA, 15 bp, Homo sapiens
ggcgctcacacacac

SEQ ID NO: 789736 - DNA, 15 bp, Homo sapiens
gcgctcacacacaca

SEQ ID NO: 789737 - DNA, 15 bp, Homo sapiens
cgctcacacacacat

SEQ ID NO: 789738 - DNA, 15 bp, Homo sapiens
gctcacacacacata

SEQ ID NO: 789739 - DNA, 15 bp, Homo sapiens
ctcacacacacatac

SEQ ID NO: 789740 - DNA, 15 bp, Homo sapiens
tcacacacacatacc

SEQ ID NO: 789741 - DNA, 15 bp, Homo sapiens
cacacacacataccg

SEQ ID NO: 789742 - DNA, 15 bp, Homo sapiens
acacacacataccga

SEQ ID NO: 789743 - DNA, 15 bp, Homo sapiens
cacacacataccgac

SEQ ID NO: 789744 - DNA, 15 bp, Homo sapiens
acacacataccgaca

SEQ ID NO: 789745 - DNA, 15 bp, Homo sapiens
cacacataccgacac

SEQ ID NO: 789746 - DNA, 15 bp, Homo sapiens
acacataccgacaca

SEQ ID NO: 789747 - DNA, 15 bp, Homo sapiens
cacataccgacacac

SEQ ID NO: 789748 - DNA, 15 bp, Homo sapiens
acataccgacacact

SEQ ID NO: 789749 - DNA, 15 bp, Homo sapiens
cataccgacacactc

SEQ ID NO: 789750 - DNA, 15 bp, Homo sapiens
ataccgacacactcg

SEQ ID NO: 789751 - DNA, 15 bp, Homo sapiens
taccgacacactcgt

SEQ ID NO: 789752 - DNA, 15 bp, Homo sapiens
accgacacactcgtt

SEQ ID NO: 789753 - DNA, 15 bp, Homo sapiens
ccgacacactcgttt

SEQ ID NO: 789754 - DNA, 15 bp, Homo sapiens
cgacacactcgtttc

SEQ ID NO: 789755 - DNA, 15 bp, Homo sapiens
gacacactcgtttct

SEQ ID NO: 789756 - DNA, 15 bp, Homo sapiens
acacactcgtttctt

SEQ ID NO: 789757 - DNA, 15 bp, Homo sapiens
cacactcgtttcttc

SEQ ID NO: 789758 - DNA, 15 bp, Homo sapiens
acactcgtttcttct

SEQ ID NO: 789759 - DNA, 15 bp, Homo sapiens
cactcgtttcttctt

SEQ ID NO: 789760 - DNA, 15 bp, Homo sapiens
actcgtttcttcttc

SEQ ID NO: 789761 - DNA, 15 bp, Homo sapiens
ctcgtttcttcttcc

SEQ ID NO: 789762 - DNA, 15 bp, Homo sapiens
tcgtttcttcttcct

SEQ ID NO: 789763 - DNA, 15 bp, Homo sapiens
cgtttcttcttcctg

SEQ ID NO: 789764 - DNA, 15 bp, Homo sapiens
gtttcttcttcctgg

SEQ ID NO: 789765 - DNA, 15 bp, Homo sapiens
tttcttcttcctggc

SEQ ID NO: 789766 - DNA, 15 bp, Homo sapiens
ttcttcttcctggcg

SEQ ID NO: 789767 - DNA, 15 bp, Homo sapiens
tcttcttcctggcgg

SEQ ID NO: 789768 - DNA, 15 bp, Homo sapiens
cttcttcctggcgga

SEQ ID NO: 789769 - DNA, 15 bp, Homo sapiens
ttcttcctggcggac

SEQ ID NO: 789770 - DNA, 15 bp, Homo sapiens
tcttcctggcggaca

SEQ ID NO: 789771 - DNA, 15 bp, Homo sapiens
cttcctggcggacaa

SEQ ID NO: 789772 - DNA, 15 bp, Homo sapiens
ttcctggcggacaaa

SEQ ID NO: 789773 - DNA, 15 bp, Homo sapiens
tcctggcggacaaac

SEQ ID NO: 789774 - DNA, 15 bp, Homo sapiens
cctggcggacaaacc

SEQ ID NO: 789775 - DNA, 15 bp, Homo sapiens
ctggcggacaaacct

SEQ ID NO: 789776 - DNA, 15 bp, Homo sapiens
tggcggacaaacctt

SEQ ID NO: 789777 - DNA, 15 bp, Homo sapiens
ggcggacaaaccttc

SEQ ID NO: 789778 - DNA, 15 bp, Homo sapiens
gcggacaaaccttcc

SEQ ID NO: 789779 - DNA, 15 bp, Homo sapiens
cggacaaaccttcct

SEQ ID NO: 789780 - DNA, 15 bp, Homo sapiens
ggacaaaccttcctg

SEQ ID NO: 789781 - DNA, 15 bp, Homo sapiens
gacaaaccttcctgc

SEQ ID NO: 789782 - DNA, 15 bp, Homo sapiens
acaaaccttcctgcc

SEQ ID NO: 789783 - DNA, 15 bp, Homo sapiens
caaaccttcctgccc

SEQ ID NO: 789784 - DNA, 15 bp, Homo sapiens
aaaccttcctgcccc

SEQ ID NO: 789785 - DNA, 15 bp, Homo sapiens
aaccttcctgcccct

SEQ ID NO: 789786 - DNA, 15 bp, Homo sapiens
accttcctgcccctc

SEQ ID NO: 789787 - DNA, 15 bp, Homo sapiens
ccttcctgcccctcc

SEQ ID NO: 789788 - DNA, 15 bp, Homo sapiens
cttcctgcccctccc

SEQ ID NO: 789789 - DNA, 15 bp, Homo sapiens
ttcctgcccctcccc

SEQ ID NO: 789790 - DNA, 15 bp, Homo sapiens
tcctgcccctccccg

SEQ ID NO: 789791 - DNA, 15 bp, Homo sapiens
cctgcccctccccgc

SEQ ID NO: 789792 - DNA, 15 bp, Homo sapiens
ctgcccctccccgcc

SEQ ID NO: 789793 - DNA, 15 bp, Homo sapiens
tgcccctccccgcca

SEQ ID NO: 789794 - DNA, 15 bp, Homo sapiens
gcccctccccgccaa

SEQ ID NO: 789795 - DNA, 15 bp, Homo sapiens
cccctccccgccaac

SEQ ID NO: 789796 - DNA, 15 bp, Homo sapiens
ccctccccgccaaca

SEQ ID NO: 789797 - DNA, 15 bp, Homo sapiens
cctccccgccaacac

SEQ ID NO: 789798 - DNA, 15 bp, Homo sapiens
ctccccgccaacaca

SEQ ID NO: 789799 - DNA, 15 bp, Homo sapiens
tccccgccaacacat

SEQ ID NO: 789800 - DNA, 15 bp, Homo sapiens
ccccgccaacacatg

SEQ ID NO: 789801 - DNA, 15 bp, Homo sapiens
cccgccaacacatgc

SEQ ID NO: 789802 - DNA, 15 bp, Homo sapiens
ccgccaacacatgct

SEQ ID NO: 789803 - DNA, 15 bp, Homo sapiens
cgccaacacatgctt

SEQ ID NO: 789804 - DNA, 15 bp, Homo sapiens
gccaacacatgcttc

SEQ ID NO: 789805 - DNA, 15 bp, Homo sapiens
ccaacacatgcttcc

SEQ ID NO: 789806 - DNA, 15 bp, Homo sapiens
caacacatgcttcca

SEQ ID NO: 789807 - DNA, 15 bp, Homo sapiens
aacacatgcttccac

SEQ ID NO: 789808 - DNA, 15 bp, Homo sapiens
acacatgcttccaca

SEQ ID NO: 789809 - DNA, 15 bp, Homo sapiens
cacatgcttccacac

SEQ ID NO: 789810 - DNA, 15 bp, Homo sapiens
acatgcttccacacc

SEQ ID NO: 789811 - DNA, 15 bp, Homo sapiens
catgcttccacacct

SEQ ID NO: 789812 - DNA, 15 bp, Homo sapiens
atgcttccacaccta

SEQ ID NO: 789813 - DNA, 15 bp, Homo sapiens
tgcttccacacctat

SEQ ID NO: 789814 - DNA, 15 bp, Homo sapiens
gcttccacacctatg

SEQ ID NO: 789815 - DNA, 15 bp, Homo sapiens
cttccacacctatga

SEQ ID NO: 789816 - DNA, 15 bp, Homo sapiens
ttccacacctatgag

SEQ ID NO: 789817 - DNA, 15 bp, Homo sapiens
tccacacctatgaga

SEQ ID NO: 789818 - DNA, 15 bp, Homo sapiens
ccacacctatgagat

SEQ ID NO: 789819 - DNA, 15 bp, Homo sapiens
cacacctatgagatt

SEQ ID NO: 789820 - DNA, 15 bp, Homo sapiens
acacctatgagattc

SEQ ID NO: 789821 - DNA, 15 bp, Homo sapiens
cacctatgagattca

SEQ ID NO: 789822 - DNA, 15 bp, Homo sapiens
acctatgagattcaa

SEQ ID NO: 789823 - DNA, 15 bp, Homo sapiens
cctatgagattcaaa

SEQ ID NO: 789824 - DNA, 15 bp, Homo sapiens
ctatgagattcaaaa

SEQ ID NO: 789825 - DNA, 15 bp, Homo sapiens
tatgagattcaaaat

SEQ ID NO: 789826 - DNA, 15 bp, Homo sapiens
atgagattcaaaata

SEQ ID NO: 789827 - DNA, 15 bp, Homo sapiens
tgagattcaaaatag

SEQ ID NO: 789828 - DNA, 15 bp, Homo sapiens
gagattcaaaatagg

SEQ ID NO: 789829 - DNA, 15 bp, Homo sapiens
agattcaaaataggg

SEQ ID NO: 789830 - DNA, 15 bp, Homo sapiens
gattcaaaatagggt

SEQ ID NO: 789831 - DNA, 15 bp, Homo sapiens
attcaaaatagggta

SEQ ID NO: 789832 - DNA, 15 bp, Homo sapiens
ttcaaaatagggtaa

SEQ ID NO: 789833 - DNA, 15 bp, Homo sapiens
tcaaaatagggtaac

SEQ ID NO: 789834 - DNA, 15 bp, Homo sapiens
caaaatagggtaaca

SEQ ID NO: 789835 - DNA, 15 bp, Homo sapiens
aaaatagggtaacag

SEQ ID NO: 789836 - DNA, 15 bp, Homo sapiens
aaatagggtaacagc

SEQ ID NO: 789837 - DNA, 15 bp, Homo sapiens
aatagggtaacagca

SEQ ID NO: 789838 - DNA, 15 bp, Homo sapiens
atagggtaacagcag

SEQ ID NO: 789839 - DNA, 15 bp, Homo sapiens
tagggtaacagcaga

SEQ ID NO: 789840 - DNA, 15 bp, Homo sapiens
agggtaacagcagaa

SEQ ID NO: 789841 - DNA, 15 bp, Homo sapiens
gggtaacagcagaac

SEQ ID NO: 789842 - DNA, 15 bp, Homo sapiens
ggtaacagcagaact

SEQ ID NO: 789843 - DNA, 15 bp, Homo sapiens
gtaacagcagaactg

SEQ ID NO: 789844 - DNA, 15 bp, Homo sapiens
taacagcagaactgc

SEQ ID NO: 789845 - DNA, 15 bp, Homo sapiens
aacagcagaactgca

SEQ ID NO: 789846 - DNA, 15 bp, Homo sapiens
acagcagaactgcag

SEQ ID NO: 789847 - DNA, 15 bp, Homo sapiens
cagcagaactgcagg

SEQ ID NO: 789848 - DNA, 15 bp, Homo sapiens
agcagaactgcaggc

SEQ ID NO: 789849 - DNA, 15 bp, Homo sapiens
gcagaactgcaggcc

SEQ ID NO: 789850 - DNA, 15 bp, Homo sapiens
cagaactgcaggcct

SEQ ID NO: 789851 - DNA, 15 bp, Homo sapiens
agaactgcaggcctg

SEQ ID NO: 789852 - DNA, 15 bp, Homo sapiens
gaactgcaggcctga

SEQ ID NO: 789853 - DNA, 15 bp, Homo sapiens
aactgcaggcctgaa

SEQ ID NO: 789854 - DNA, 15 bp, Homo sapiens
actgcaggcctgaag

SEQ ID NO: 789855 - DNA, 15 bp, Homo sapiens
ctgcaggcctgaagc

SEQ ID NO: 789856 - DNA, 15 bp, Homo sapiens
tgcaggcctgaagca

SEQ ID NO: 789857 - DNA, 15 bp, Homo sapiens
gcaggcctgaagcac

SEQ ID NO: 789858 - DNA, 15 bp, Homo sapiens
caggcctgaagcact

SEQ ID NO: 789859 - DNA, 15 bp, Homo sapiens
aggcctgaagcactt

SEQ ID NO: 789860 - DNA, 15 bp, Homo sapiens
ggcctgaagcacttg

SEQ ID NO: 789861 - DNA, 15 bp, Homo sapiens
gcctgaagcacttgc

SEQ ID NO: 789862 - DNA, 15 bp, Homo sapiens
cctgaagcacttgct

SEQ ID NO: 789863 - DNA, 15 bp, Homo sapiens
ctgaagcacttgctg

SEQ ID NO: 789864 - DNA, 15 bp, Homo sapiens
tgaagcacttgctgg

SEQ ID NO: 789865 - DNA, 15 bp, Homo sapiens
gaagcacttgctgga

SEQ ID NO: 789866 - DNA, 15 bp, Homo sapiens
aagcacttgctggac

SEQ ID NO: 789867 - DNA, 15 bp, Homo sapiens
agcacttgctggaca

SEQ ID NO: 789868 - DNA, 15 bp, Homo sapiens
gcacttgctggacag

SEQ ID NO: 789869 - DNA, 15 bp, Homo sapiens
cacttgctggacagt

SEQ ID NO: 789870 - DNA, 15 bp, Homo sapiens
acttgctggacagtg

SEQ ID NO: 789871 - DNA, 15 bp, Homo sapiens
cttgctggacagtga

SEQ ID NO: 789872 - DNA, 15 bp, Homo sapiens
ttgctggacagtgag

SEQ ID NO: 789873 - DNA, 15 bp, Homo sapiens
tgctggacagtgagg

SEQ ID NO: 789874 - DNA, 15 bp, Homo sapiens
gctggacagtgagga

SEQ ID NO: 789875 - DNA, 15 bp, Homo sapiens
ctggacagtgaggac

SEQ ID NO: 789876 - DNA, 15 bp, Homo sapiens
tggacagtgaggaca

SEQ ID NO: 789877 - DNA, 15 bp, Homo sapiens
ggacagtgaggacac

SEQ ID NO: 789878 - DNA, 15 bp, Homo sapiens
gacagtgaggacacc

SEQ ID NO: 789879 - DNA, 15 bp, Homo sapiens
acagtgaggacacct

SEQ ID NO: 789880 - DNA, 15 bp, Homo sapiens
cagtgaggacacctc

SEQ ID NO: 789881 - DNA, 15 bp, Homo sapiens
agtgaggacacctct

SEQ ID NO: 789882 - DNA, 15 bp, Homo sapiens
gtgaggacacctctg

SEQ ID NO: 789883 - DNA, 15 bp, Homo sapiens
tgaggacacctctgg

SEQ ID NO: 789884 - DNA, 15 bp, Homo sapiens
gaggacacctctggg

SEQ ID NO: 789885 - DNA, 15 bp, Homo sapiens
aggacacctctgggt

SEQ ID NO: 789886 - DNA, 15 bp, Homo sapiens
ggacacctctgggtt

SEQ ID NO: 789887 - DNA, 15 bp, Homo sapiens
gacacctctgggttg

SEQ ID NO: 789888 - DNA, 15 bp, Homo sapiens
acacctctgggttga

SEQ ID NO: 789889 - DNA, 15 bp, Homo sapiens
cacctctgggttgag

SEQ ID NO: 789890 - DNA, 15 bp, Homo sapiens
acctctgggttgagg

SEQ ID NO: 789891 - DNA, 15 bp, Homo sapiens
cctctgggttgaggg

SEQ ID NO: 789892 - DNA, 15 bp, Homo sapiens
ctctgggttgagggg

SEQ ID NO: 789893 - DNA, 15 bp, Homo sapiens
tctgggttgagggga

SEQ ID NO: 789894 - DNA, 15 bp, Homo sapiens
ctgggttgaggggac

SEQ ID NO: 789895 - DNA, 15 bp, Homo sapiens
tgggttgaggggaca

SEQ ID NO: 789896 - DNA, 15 bp, Homo sapiens
gggttgaggggacag

SEQ ID NO: 789897 - DNA, 15 bp, Homo sapiens
ggttgaggggacagg

SEQ ID NO: 789898 - DNA, 15 bp, Homo sapiens
gttgaggggacaggg

SEQ ID NO: 789899 - DNA, 15 bp, Homo sapiens
ttgaggggacagggt

SEQ ID NO: 789900 - DNA, 15 bp, Homo sapiens
tgaggggacagggtt

SEQ ID NO: 789901 - DNA, 15 bp, Homo sapiens
gaggggacagggtta

SEQ ID NO: 789902 - DNA, 15 bp, Homo sapiens
aggggacagggttaa

SEQ ID NO: 789903 - DNA, 15 bp, Homo sapiens
ggggacagggttaaa

SEQ ID NO: 789904 - DNA, 15 bp, Homo sapiens
gggacagggttaaat

SEQ ID NO: 789905 - DNA, 15 bp, Homo sapiens
ggacagggttaaatg

SEQ ID NO: 789906 - DNA, 15 bp, Homo sapiens
gacagggttaaatgg

SEQ ID NO: 789907 - DNA, 15 bp, Homo sapiens
acagggttaaatggg

SEQ ID NO: 789908 - DNA, 15 bp, Homo sapiens
cagggttaaatgggg

SEQ ID NO: 789909 - DNA, 15 bp, Homo sapiens
agggttaaatggggt

SEQ ID NO: 789910 - DNA, 15 bp, Homo sapiens
gggttaaatggggta

SEQ ID NO: 789911 - DNA, 15 bp, Homo sapiens
ggttaaatggggtag

SEQ ID NO: 789912 - DNA, 15 bp, Homo sapiens
gttaaatggggtaga

SEQ ID NO: 789913 - DNA, 15 bp, Homo sapiens
ttaaatggggtagaa

SEQ ID NO: 789914 - DNA, 15 bp, Homo sapiens
taaatggggtagaac

SEQ ID NO: 789915 - DNA, 15 bp, Homo sapiens
aaatggggtagaaca

SEQ ID NO: 789916 - DNA, 15 bp, Homo sapiens
aatggggtagaacag

SEQ ID NO: 789917 - DNA, 15 bp, Homo sapiens
atggggtagaacagg

SEQ ID NO: 789918 - DNA, 15 bp, Homo sapiens
tggggtagaacagga

SEQ ID NO: 789919 - DNA, 15 bp, Homo sapiens
ggggtagaacaggaa

SEQ ID NO: 789920 - DNA, 15 bp, Homo sapiens
gggtagaacaggaag

SEQ ID NO: 789921 - DNA, 15 bp, Homo sapiens
ggtagaacaggaaga

SEQ ID NO: 789922 - DNA, 15 bp, Homo sapiens
gtagaacaggaagaa

SEQ ID NO: 789923 - DNA, 15 bp, Homo sapiens
tagaacaggaagaat

SEQ ID NO: 789924 - DNA, 15 bp, Homo sapiens
agaacaggaagaata

SEQ ID NO: 789925 - DNA, 15 bp, Homo sapiens
gaacaggaagaatat

SEQ ID NO: 789926 - DNA, 15 bp, Homo sapiens
aacaggaagaatatt

SEQ ID NO: 789927 - DNA, 15 bp, Homo sapiens
acaggaagaatattc

SEQ ID NO: 789928 - DNA, 15 bp, Homo sapiens
caggaagaatattcc

SEQ ID NO: 789929 - DNA, 15 bp, Homo sapiens
aggaagaatattcct

SEQ ID NO: 789930 - DNA, 15 bp, Homo sapiens
ggaagaatattcctc

SEQ ID NO: 789931 - DNA, 15 bp, Homo sapiens
gaagaatattcctcc

SEQ ID NO: 789932 - DNA, 15 bp, Homo sapiens
aagaatattcctcct

SEQ ID NO: 789933 - DNA, 15 bp, Homo sapiens
agaatattcctcctc

SEQ ID NO: 789934 - DNA, 15 bp, Homo sapiens
gaatattcctcctcc

SEQ ID NO: 789935 - DNA, 15 bp, Homo sapiens
aatattcctcctcct

SEQ ID NO: 789936 - DNA, 15 bp, Homo sapiens
atattcctcctcctg

SEQ ID NO: 789937 - DNA, 15 bp, Homo sapiens
tattcctcctcctgg

SEQ ID NO: 789938 - DNA, 15 bp, Homo sapiens
attcctcctcctggg

SEQ ID NO: 789939 - DNA, 15 bp, Homo sapiens
ttcctcctcctgggt

SEQ ID NO: 789940 - DNA, 15 bp, Homo sapiens
tcctcctcctgggtg

SEQ ID NO: 789941 - DNA, 15 bp, Homo sapiens
cctcctcctgggtgt

SEQ ID NO: 789942 - DNA, 15 bp, Homo sapiens
ctcctcctgggtgtg

SEQ ID NO: 789943 - DNA, 15 bp, Homo sapiens
tcctcctgggtgtga

SEQ ID NO: 789944 - DNA, 15 bp, Homo sapiens
cctcctgggtgtgaa

SEQ ID NO: 789945 - DNA, 15 bp, Homo sapiens
ctcctgggtgtgaac

SEQ ID NO: 789946 - DNA, 15 bp, Homo sapiens
tcctgggtgtgaacg

SEQ ID NO: 789947 - DNA, 15 bp, Homo sapiens
cctgggtgtgaacga

SEQ ID NO: 789948 - DNA, 15 bp, Homo sapiens
ctgggtgtgaacgag

SEQ ID NO: 789949 - DNA, 15 bp, Homo sapiens
tgggtgtgaacgagt

SEQ ID NO: 789950 - DNA, 15 bp, Homo sapiens
gggtgtgaacgagtc

SEQ ID NO: 789951 - DNA, 15 bp, Homo sapiens
ggtgtgaacgagtct

SEQ ID NO: 789952 - DNA, 15 bp, Homo sapiens
gtgtgaacgagtctc

SEQ ID NO: 789953 - DNA, 15 bp, Homo sapiens
tgtgaacgagtctcc

SEQ ID NO: 789954 - DNA, 15 bp, Homo sapiens
gtgaacgagtctcct

SEQ ID NO: 789955 - DNA, 15 bp, Homo sapiens
tgaacgagtctcctt

SEQ ID NO: 789956 - DNA, 15 bp, Homo sapiens
gaacgagtctccttt

SEQ ID NO: 789957 - DNA, 15 bp, Homo sapiens
aacgagtctcctttg

SEQ ID NO: 789958 - DNA, 15 bp, Homo sapiens
acgagtctcctttga

SEQ ID NO: 789959 - DNA, 15 bp, Homo sapiens
cgagtctcctttgat

SEQ ID NO: 789960 - DNA, 15 bp, Homo sapiens
gagtctcctttgatc

SEQ ID NO: 789961 - DNA, 15 bp, Homo sapiens
agtctcctttgatct

SEQ ID NO: 789962 - DNA, 15 bp, Homo sapiens
gtctcctttgatctc

SEQ ID NO: 789963 - DNA, 15 bp, Homo sapiens
tctcctttgatctct

SEQ ID NO: 789964 - DNA, 15 bp, Homo sapiens
ctcctttgatctctg

SEQ ID NO: 789965 - DNA, 15 bp, Homo sapiens
tcctttgatctctgc

SEQ ID NO: 789966 - DNA, 15 bp, Homo sapiens
cctttgatctctgca

SEQ ID NO: 789967 - DNA, 15 bp, Homo sapiens
ctttgatctctgcag

SEQ ID NO: 789968 - DNA, 15 bp, Homo sapiens
tttgatctctgcagg

SEQ ID NO: 789969 - DNA, 15 bp, Homo sapiens
ttgatctctgcagga

SEQ ID NO: 789970 - DNA, 15 bp, Homo sapiens
tgatctctgcaggaa

SEQ ID NO: 789971 - DNA, 15 bp, Homo sapiens
gatctctgcaggaag

SEQ ID NO: 789972 - DNA, 15 bp, Homo sapiens
atctctgcaggaagt

SEQ ID NO: 789973 - DNA, 15 bp, Homo sapiens
tctctgcaggaagtg

SEQ ID NO: 789974 - DNA, 15 bp, Homo sapiens
ctctgcaggaagtgc

SEQ ID NO: 789975 - DNA, 15 bp, Homo sapiens
tctgcaggaagtgcc

SEQ ID NO: 789976 - DNA, 15 bp, Homo sapiens
ctgcaggaagtgcct

SEQ ID NO: 789977 - DNA, 15 bp, Homo sapiens
tgcaggaagtgcctt

SEQ ID NO: 789978 - DNA, 15 bp, Homo sapiens
gcaggaagtgcctta

SEQ ID NO: 789979 - DNA, 15 bp, Homo sapiens
caggaagtgccttac

SEQ ID NO: 789980 - DNA, 15 bp, Homo sapiens
aggaagtgccttacc

SEQ ID NO: 789981 - DNA, 15 bp, Homo sapiens
ggaagtgccttaccc

SEQ ID NO: 789982 - DNA, 15 bp, Homo sapiens
gaagtgccttaccca

SEQ ID NO: 789983 - DNA, 15 bp, Homo sapiens
aagtgccttacccag

SEQ ID NO: 789984 - DNA, 15 bp, Homo sapiens
agtgccttacccagg

SEQ ID NO: 789985 - DNA, 15 bp, Homo sapiens
gtgccttacccaggc

SEQ ID NO: 789986 - DNA, 15 bp, Homo sapiens
tgccttacccaggcc

SEQ ID NO: 789987 - DNA, 15 bp, Homo sapiens
gccttacccaggccc

SEQ ID NO: 789988 - DNA, 15 bp, Homo sapiens
ccttacccaggccct

SEQ ID NO: 789989 - DNA, 15 bp, Homo sapiens
cttacccaggccctg

SEQ ID NO: 789990 - DNA, 15 bp, Homo sapiens
ttacccaggccctgt

SEQ ID NO: 789991 - DNA, 15 bp, Homo sapiens
tacccaggccctgtt

SEQ ID NO: 789992 - DNA, 15 bp, Homo sapiens
acccaggccctgtta

SEQ ID NO: 789993 - DNA, 15 bp, Homo sapiens
cccaggccctgttac

SEQ ID NO: 789994 - DNA, 15 bp, Homo sapiens
ccaggccctgttacc

SEQ ID NO: 789995 - DNA, 15 bp, Homo sapiens
caggccctgttacct

SEQ ID NO: 789996 - DNA, 15 bp, Homo sapiens
aggccctgttacctt

SEQ ID NO: 789997 - DNA, 15 bp, Homo sapiens
ggccctgttaccttt

SEQ ID NO: 789998 - DNA, 15 bp, Homo sapiens
gccctgttaccttta

SEQ ID NO: 789999 - DNA, 15 bp, Homo sapiens
ccctgttacctttag

SEQ ID NO: 790000 - DNA, 15 bp, Homo sapiens
cctgttacctttagg

SEQ ID NO: 790001 - DNA, 15 bp, Homo sapiens
ctgttacctttagga

SEQ ID NO: 790002 - DNA, 15 bp, Homo sapiens
tgttacctttaggag

SEQ ID NO: 790003 - DNA, 15 bp, Homo sapiens
gttacctttaggagc

SEQ ID NO: 790004 - DNA, 15 bp, Homo sapiens
ttacctttaggagca

SEQ ID NO: 790005 - DNA, 15 bp, Homo sapiens
tacctttaggagcaa

SEQ ID NO: 790006 - DNA, 15 bp, Homo sapiens
acctttaggagcaag

SEQ ID NO: 790007 - DNA, 15 bp, Homo sapiens
cctttaggagcaaga

SEQ ID NO: 790008 - DNA, 15 bp, Homo sapiens
ctttaggagcaagaa

SEQ ID NO: 790009 - DNA, 15 bp, Homo sapiens
tttaggagcaagaac

SEQ ID NO: 790010 - DNA, 15 bp, Homo sapiens
ttaggagcaagaact

SEQ ID NO: 790011 - DNA, 15 bp, Homo sapiens
taggagcaagaactt

SEQ ID NO: 790012 - DNA, 15 bp, Homo sapiens
aggagcaagaacttg

SEQ ID NO: 790013 - DNA, 15 bp, Homo sapiens
ggagcaagaacttga

SEQ ID NO: 790014 - DNA, 15 bp, Homo sapiens
gagcaagaacttgag

SEQ ID NO: 790015 - DNA, 15 bp, Homo sapiens
agcaagaacttgagg

SEQ ID NO: 790016 - DNA, 15 bp, Homo sapiens
gcaagaacttgagga

SEQ ID NO: 790017 - DNA, 15 bp, Homo sapiens
caagaacttgaggaa

SEQ ID NO: 790018 - DNA, 15 bp, Homo sapiens
aagaacttgaggaaa

SEQ ID NO: 790019 - DNA, 15 bp, Homo sapiens
agaacttgaggaaat

SEQ ID NO: 790020 - DNA, 15 bp, Homo sapiens
gaacttgaggaaatg

SEQ ID NO: 790021 - DNA, 15 bp, Homo sapiens
aacttgaggaaatgg

SEQ ID NO: 790022 - DNA, 15 bp, Homo sapiens
acttgaggaaatggt

SEQ ID NO: 790023 - DNA, 15 bp, Homo sapiens
cttgaggaaatggtg

SEQ ID NO: 790024 - DNA, 15 bp, Homo sapiens
ttgaggaaatggtgt

SEQ ID NO: 790025 - DNA, 15 bp, Homo sapiens
tgaggaaatggtgtg

SEQ ID NO: 790026 - DNA, 15 bp, Homo sapiens
gaggaaatggtgtgg

SEQ ID NO: 790027 - DNA, 15 bp, Homo sapiens
aggaaatggtgtggg

SEQ ID NO: 790028 - DNA, 15 bp, Homo sapiens
ggaaatggtgtgggc

SEQ ID NO: 790029 - DNA, 15 bp, Homo sapiens
gaaatggtgtgggca

SEQ ID NO: 790030 - DNA, 15 bp, Homo sapiens
aaatggtgtgggcac

SEQ ID NO: 790031 - DNA, 15 bp, Homo sapiens
aatggtgtgggcaca

SEQ ID NO: 790032 - DNA, 15 bp, Homo sapiens
atggtgtgggcacat

SEQ ID NO: 790033 - DNA, 15 bp, Homo sapiens
tggtgtgggcacatg

SEQ ID NO: 790034 - DNA, 15 bp, Homo sapiens
ggtgtgggcacatgc

SEQ ID NO: 790035 - DNA, 15 bp, Homo sapiens
gtgtgggcacatgca

SEQ ID NO: 790036 - DNA, 15 bp, Homo sapiens
tgtgggcacatgcac

SEQ ID NO: 790037 - DNA, 15 bp, Homo sapiens
gtgggcacatgcaca

SEQ ID NO: 790038 - DNA, 15 bp, Homo sapiens
tgggcacatgcacaa

SEQ ID NO: 790039 - DNA, 15 bp, Homo sapiens
gggcacatgcacaaa

SEQ ID NO: 790040 - DNA, 15 bp, Homo sapiens
ggcacatgcacaaaa

SEQ ID NO: 790041 - DNA, 15 bp, Homo sapiens
gcacatgcacaaaac

SEQ ID NO: 790042 - DNA, 15 bp, Homo sapiens
cacatgcacaaaaca

SEQ ID NO: 790043 - DNA, 15 bp, Homo sapiens
acatgcacaaaacat

SEQ ID NO: 790044 - DNA, 15 bp, Homo sapiens
catgcacaaaacatg

SEQ ID NO: 790045 - DNA, 15 bp, Homo sapiens
atgcacaaaacatgg

SEQ ID NO: 790046 - DNA, 15 bp, Homo sapiens
tgcacaaaacatggg

SEQ ID NO: 790047 - DNA, 15 bp, Homo sapiens
gcacaaaacatgggg

SEQ ID NO: 790048 - DNA, 15 bp, Homo sapiens
cacaaaacatggggc

SEQ ID NO: 790049 - DNA, 15 bp, Homo sapiens
acaaaacatggggct

SEQ ID NO: 790050 - DNA, 15 bp, Homo sapiens
caaaacatggggctt

SEQ ID NO: 790051 - DNA, 15 bp, Homo sapiens
aaaacatggggctta

SEQ ID NO: 790052 - DNA, 15 bp, Homo sapiens
aaacatggggcttac

SEQ ID NO: 790053 - DNA, 15 bp, Homo sapiens
aacatggggcttact

SEQ ID NO: 790054 - DNA, 15 bp, Homo sapiens
acatggggcttactt

SEQ ID NO: 790055 - DNA, 15 bp, Homo sapiens
catggggcttacttt

SEQ ID NO: 790056 - DNA, 15 bp, Homo sapiens
atggggcttactttt

SEQ ID NO: 790057 - DNA, 15 bp, Homo sapiens
tggggcttactttta

SEQ ID NO: 790058 - DNA, 15 bp, Homo sapiens
ggggcttacttttag

SEQ ID NO: 790059 - DNA, 15 bp, Homo sapiens
gggcttacttttagc

SEQ ID NO: 790060 - DNA, 15 bp, Homo sapiens
ggcttacttttagca

SEQ ID NO: 790061 - DNA, 15 bp, Homo sapiens
gcttacttttagcat

SEQ ID NO: 790062 - DNA, 15 bp, Homo sapiens
cttacttttagcatg

SEQ ID NO: 790063 - DNA, 15 bp, Homo sapiens
ttacttttagcatga

SEQ ID NO: 790064 - DNA, 15 bp, Homo sapiens
tacttttagcatgaa

SEQ ID NO: 790065 - DNA, 15 bp, Homo sapiens
acttttagcatgaag

SEQ ID NO: 790066 - DNA, 15 bp, Homo sapiens
cttttagcatgaagg

SEQ ID NO: 790067 - DNA, 15 bp, Homo sapiens
tttagcatgaagggg

SEQ ID NO: 790068 - DNA, 15 bp, Homo sapiens
ttagcatgaagggga

SEQ ID NO: 790069 - DNA, 15 bp, Homo sapiens
tagcatgaaggggaa

SEQ ID NO: 790070 - DNA, 15 bp, Homo sapiens
agcatgaaggggaaa

SEQ ID NO: 790071 - DNA, 15 bp, Homo sapiens
gcatgaaggggaaac

SEQ ID NO: 790072 - DNA, 15 bp, Homo sapiens
catgaaggggaaact

SEQ ID NO: 790073 - DNA, 15 bp, Homo sapiens
atgaaggggaaactg

SEQ ID NO: 790074 - DNA, 15 bp, Homo sapiens
tgaaggggaaactga

SEQ ID NO: 790075 - DNA, 15 bp, Homo sapiens
gaaggggaaactgag

SEQ ID NO: 790076 - DNA, 15 bp, Homo sapiens
aaggggaaactgagg

SEQ ID NO: 790077 - DNA, 15 bp, Homo sapiens
aggggaaactgagga

SEQ ID NO: 790078 - DNA, 15 bp, Homo sapiens
ggggaaactgaggat

SEQ ID NO: 790079 - DNA, 15 bp, Homo sapiens
gggaaactgaggatg

SEQ ID NO: 790080 - DNA, 15 bp, Homo sapiens
ggaaactgaggatgc

SEQ ID NO: 790081 - DNA, 15 bp, Homo sapiens
gaaactgaggatgcc

SEQ ID NO: 790082 - DNA, 15 bp, Homo sapiens
aaactgaggatgccc

SEQ ID NO: 790083 - DNA, 15 bp, Homo sapiens
aactgaggatgccca

SEQ ID NO: 790084 - DNA, 15 bp, Homo sapiens
actgaggatgcccag

SEQ ID NO: 790085 - DNA, 15 bp, Homo sapiens
ctgaggatgcccagc

SEQ ID NO: 790086 - DNA, 15 bp, Homo sapiens
tgaggatgcccagct

SEQ ID NO: 790087 - DNA, 15 bp, Homo sapiens
gaggatgcccagctc

SEQ ID NO: 790088 - DNA, 15 bp, Homo sapiens
aggatgcccagctca

SEQ ID NO: 790089 - DNA, 15 bp, Homo sapiens
ggatgcccagctcat

SEQ ID NO: 790090 - DNA, 15 bp, Homo sapiens
gatgcccagctcatt

SEQ ID NO: 790091 - DNA, 15 bp, Homo sapiens
atgcccagctcattg

SEQ ID NO: 790092 - DNA, 15 bp, Homo sapiens
tgcccagctcattgt

SEQ ID NO: 790093 - DNA, 15 bp, Homo sapiens
gcccagctcattgtg

SEQ ID NO: 790094 - DNA, 15 bp, Homo sapiens
cccagctcattgtgt

SEQ ID NO: 790095 - DNA, 15 bp, Homo sapiens
ccagctcattgtgta

SEQ ID NO: 790096 - DNA, 15 bp, Homo sapiens
cagctcattgtgtaa

SEQ ID NO: 790097 - DNA, 15 bp, Homo sapiens
agctcattgtgtaag

SEQ ID NO: 790098 - DNA, 15 bp, Homo sapiens
gctcattgtgtaaga

SEQ ID NO: 790099 - DNA, 15 bp, Homo sapiens
ctcattgtgtaagag

SEQ ID NO: 790100 - DNA, 15 bp, Homo sapiens
tcattgtgtaagaga

SEQ ID NO: 790101 - DNA, 15 bp, Homo sapiens
cattgtgtaagagag

SEQ ID NO: 790102 - DNA, 15 bp, Homo sapiens
attgtgtaagagagt

SEQ ID NO: 790103 - DNA, 15 bp, Homo sapiens
ttgtgtaagagagtg

SEQ ID NO: 790104 - DNA, 15 bp, Homo sapiens
tgtgtaagagagtga

SEQ ID NO: 790105 - DNA, 15 bp, Homo sapiens
gtgtaagagagtgaa

SEQ ID NO: 790106 - DNA, 15 bp, Homo sapiens
tgtaagagagtgaag

SEQ ID NO: 790107 - DNA, 15 bp, Homo sapiens
gtaagagagtgaagg

SEQ ID NO: 790108 - DNA, 15 bp, Homo sapiens
taagagagtgaaggt

SEQ ID NO: 790109 - DNA, 15 bp, Homo sapiens
aagagagtgaaggtt

SEQ ID NO: 790110 - DNA, 15 bp, Homo sapiens
agagagtgaaggttt

SEQ ID NO: 790111 - DNA, 15 bp, Homo sapiens
gagagtgaaggtttg

SEQ ID NO: 790112 - DNA, 15 bp, Homo sapiens
agagtgaaggtttga

SEQ ID NO: 790113 - DNA, 15 bp, Homo sapiens
gagtgaaggtttgac

SEQ ID NO: 790114 - DNA, 15 bp, Homo sapiens
agtgaaggtttgacc

SEQ ID NO: 790115 - DNA, 15 bp, Homo sapiens
gtgaaggtttgaccg

SEQ ID NO: 790116 - DNA, 15 bp, Homo sapiens
tgaaggtttgaccga

SEQ ID NO: 790117 - DNA, 15 bp, Homo sapiens
gaaggtttgaccgag

SEQ ID NO: 790118 - DNA, 15 bp, Homo sapiens
aaggtttgaccgagg

SEQ ID NO: 790119 - DNA, 15 bp, Homo sapiens
aggtttgaccgaggg

SEQ ID NO: 790120 - DNA, 15 bp, Homo sapiens
ggtttgaccgagggt

SEQ ID NO: 790121 - DNA, 15 bp, Homo sapiens
gtttgaccgagggtg

SEQ ID NO: 790122 - DNA, 15 bp, Homo sapiens
tttgaccgagggtgg

SEQ ID NO: 790123 - DNA, 15 bp, Homo sapiens
ttgaccgagggtggc

SEQ ID NO: 790124 - DNA, 15 bp, Homo sapiens
tgaccgagggtggct

SEQ ID NO: 790125 - DNA, 15 bp, Homo sapiens
gaccgagggtggctt

SEQ ID NO: 790126 - DNA, 15 bp, Homo sapiens
accgagggtggcttc

SEQ ID NO: 790127 - DNA, 15 bp, Homo sapiens
ccgagggtggcttct

SEQ ID NO: 790128 - DNA, 15 bp, Homo sapiens
cgagggtggcttcta

SEQ ID NO: 790129 - DNA, 15 bp, Homo sapiens
gagggtggcttctaa

SEQ ID NO: 790130 - DNA, 15 bp, Homo sapiens
agggtggcttctaaa

SEQ ID NO: 790131 - DNA, 15 bp, Homo sapiens
gggtggcttctaaag

SEQ ID NO: 790132 - DNA, 15 bp, Homo sapiens
ggtggcttctaaagc

SEQ ID NO: 790133 - DNA, 15 bp, Homo sapiens
gtggcttctaaagca

SEQ ID NO: 790134 - DNA, 15 bp, Homo sapiens
tggcttctaaagcaa

SEQ ID NO: 790135 - DNA, 15 bp, Homo sapiens
ggcttctaaagcaaa

SEQ ID NO: 790136 - DNA, 15 bp, Homo sapiens
gcttctaaagcaaaa

SEQ ID NO: 790137 - DNA, 15 bp, Homo sapiens
cttctaaagcaaaac

SEQ ID NO: 790138 - DNA, 15 bp, Homo sapiens
ttctaaagcaaaact

SEQ ID NO: 790139 - DNA, 15 bp, Homo sapiens
tctaaagcaaaactt

SEQ ID NO: 790140 - DNA, 15 bp, Homo sapiens
ctaaagcaaaactta

SEQ ID NO: 790141 - DNA, 15 bp, Homo sapiens
taaagcaaaacttag

SEQ ID NO: 790142 - DNA, 15 bp, Homo sapiens
aaagcaaaacttaga

SEQ ID NO: 790143 - DNA, 15 bp, Homo sapiens
aagcaaaacttagac

SEQ ID NO: 790144 - DNA, 15 bp, Homo sapiens
agcaaaacttagaca

SEQ ID NO: 790145 - DNA, 15 bp, Homo sapiens
gcaaaacttagacag

SEQ ID NO: 790146 - DNA, 15 bp, Homo sapiens
caaaacttagacaga

SEQ ID NO: 790147 - DNA, 15 bp, Homo sapiens
aaaacttagacagat

SEQ ID NO: 790148 - DNA, 15 bp, Homo sapiens
aaacttagacagatg

SEQ ID NO: 790149 - DNA, 15 bp, Homo sapiens
aacttagacagatga

SEQ ID NO: 790150 - DNA, 15 bp, Homo sapiens
acttagacagatgac

SEQ ID NO: 790151 - DNA, 15 bp, Homo sapiens
cttagacagatgacg

SEQ ID NO: 790152 - DNA, 15 bp, Homo sapiens
ttagacagatgacga

SEQ ID NO: 790153 - DNA, 15 bp, Homo sapiens
tagacagatgacgac

SEQ ID NO: 790154 - DNA, 15 bp, Homo sapiens
agacagatgacgaca

SEQ ID NO: 790155 - DNA, 15 bp, Homo sapiens
gacagatgacgacag

SEQ ID NO: 790156 - DNA, 15 bp, Homo sapiens
acagatgacgacagg

SEQ ID NO: 790157 - DNA, 15 bp, Homo sapiens
cagatgacgacaggg

SEQ ID NO: 790158 - DNA, 15 bp, Homo sapiens
agatgacgacaggga

SEQ ID NO: 790159 - DNA, 15 bp, Homo sapiens
gatgacgacagggat

SEQ ID NO: 790160 - DNA, 15 bp, Homo sapiens
atgacgacagggatg

SEQ ID NO: 790161 - DNA, 15 bp, Homo sapiens
tgacgacagggatga

SEQ ID NO: 790162 - DNA, 15 bp, Homo sapiens
gacgacagggatgag

SEQ ID NO: 790163 - DNA, 15 bp, Homo sapiens
acgacagggatgagg

SEQ ID NO: 790164 - DNA, 15 bp, Homo sapiens
cgacagggatgaggt

SEQ ID NO: 790165 - DNA, 15 bp, Homo sapiens
gacagggatgaggtg

SEQ ID NO: 790166 - DNA, 15 bp, Homo sapiens
acagggatgaggtgg

SEQ ID NO: 790167 - DNA, 15 bp, Homo sapiens
cagggatgaggtggc

SEQ ID NO: 790168 - DNA, 15 bp, Homo sapiens
agggatgaggtggca

SEQ ID NO: 790169 - DNA, 15 bp, Homo sapiens
gggatgaggtggcag

SEQ ID NO: 790170 - DNA, 15 bp, Homo sapiens
ggatgaggtggcagg

SEQ ID NO: 790171 - DNA, 15 bp, Homo sapiens
gatgaggtggcagga

SEQ ID NO: 790172 - DNA, 15 bp, Homo sapiens
atgaggtggcaggat

SEQ ID NO: 790173 - DNA, 15 bp, Homo sapiens
tgaggtggcaggatc

SEQ ID NO: 790174 - DNA, 15 bp, Homo sapiens
gaggtggcaggatcc

SEQ ID NO: 790175 - DNA, 15 bp, Homo sapiens
aggtggcaggatccg

SEQ ID NO: 790176 - DNA, 15 bp, Homo sapiens
ggtggcaggatccga

SEQ ID NO: 790177 - DNA, 15 bp, Homo sapiens
gtggcaggatccgaa

SEQ ID NO: 790178 - DNA, 15 bp, Homo sapiens
tggcaggatccgaag

SEQ ID NO: 790179 - DNA, 15 bp, Homo sapiens
ggcaggatccgaaga

SEQ ID NO: 790180 - DNA, 15 bp, Homo sapiens
gcaggatccgaagac

SEQ ID NO: 790181 - DNA, 15 bp, Homo sapiens
caggatccgaagaca

SEQ ID NO: 790182 - DNA, 15 bp, Homo sapiens
aggatccgaagacaa

SEQ ID NO: 790183 - DNA, 15 bp, Homo sapiens
ggatccgaagacaaa

SEQ ID NO: 790184 - DNA, 15 bp, Homo sapiens
gatccgaagacaaag

SEQ ID NO: 790185 - DNA, 15 bp, Homo sapiens
atccgaagacaaaga

SEQ ID NO: 790186 - DNA, 15 bp, Homo sapiens
tccgaagacaaagaa

SEQ ID NO: 790187 - DNA, 15 bp, Homo sapiens
ccgaagacaaagaag

SEQ ID NO: 790188 - DNA, 15 bp, Homo sapiens
cgaagacaaagaaga

SEQ ID NO: 790189 - DNA, 15 bp, Homo sapiens
gaagacaaagaagaa

SEQ ID NO: 790190 - DNA, 15 bp, Homo sapiens
aagacaaagaagaac

SEQ ID NO: 790191 - DNA, 15 bp, Homo sapiens
agacaaagaagaacc

SEQ ID NO: 790192 - DNA, 15 bp, Homo sapiens
gacaaagaagaacca

SEQ ID NO: 790193 - DNA, 15 bp, Homo sapiens
acaaagaagaaccag

SEQ ID NO: 790194 - DNA, 15 bp, Homo sapiens
caaagaagaaccagg

SEQ ID NO: 790195 - DNA, 15 bp, Homo sapiens
aaagaagaaccaggc

SEQ ID NO: 790196 - DNA, 15 bp, Homo sapiens
aagaagaaccaggca

SEQ ID NO: 790197 - DNA, 15 bp, Homo sapiens
agaagaaccaggcac

SEQ ID NO: 790198 - DNA, 15 bp, Homo sapiens
gaagaaccaggcacg

SEQ ID NO: 790199 - DNA, 15 bp, Homo sapiens
aagaaccaggcacgg

SEQ ID NO: 790200 - DNA, 15 bp, Homo sapiens
agaaccaggcacgga

SEQ ID NO: 790201 - DNA, 15 bp, Homo sapiens
gaaccaggcacggat

SEQ ID NO: 790202 - DNA, 15 bp, Homo sapiens
aaccaggcacggatt

SEQ ID NO: 790203 - DNA, 15 bp, Homo sapiens
accaggcacggattc

SEQ ID NO: 790204 - DNA, 15 bp, Homo sapiens
ccaggcacggattca

SEQ ID NO: 790205 - DNA, 15 bp, Homo sapiens
caggcacggattcac

SEQ ID NO: 790206 - DNA, 15 bp, Homo sapiens
aggcacggattcact

SEQ ID NO: 790207 - DNA, 15 bp, Homo sapiens
ggcacggattcactc

SEQ ID NO: 790208 - DNA, 15 bp, Homo sapiens
gcacggattcactcg

SEQ ID NO: 790209 - DNA, 15 bp, Homo sapiens
cacggattcactcgt

SEQ ID NO: 790210 - DNA, 15 bp, Homo sapiens
acggattcactcgta

SEQ ID NO: 790211 - DNA, 15 bp, Homo sapiens
cggattcactcgtac

SEQ ID NO: 790212 - DNA, 15 bp, Homo sapiens
ggattcactcgtact

SEQ ID NO: 790213 - DNA, 15 bp, Homo sapiens
gattcactcgtactt

SEQ ID NO: 790214 - DNA, 15 bp, Homo sapiens
attcactcgtacttg

SEQ ID NO: 790215 - DNA, 15 bp, Homo sapiens
ttcactcgtacttgt

SEQ ID NO: 790216 - DNA, 15 bp, Homo sapiens
tcactcgtacttgta

SEQ ID NO: 790217 - DNA, 15 bp, Homo sapiens
cactcgtacttgtag

SEQ ID NO: 790218 - DNA, 15 bp, Homo sapiens
actcgtacttgtagg

SEQ ID NO: 790219 - DNA, 15 bp, Homo sapiens
ctcgtacttgtagga

SEQ ID NO: 790220 - DNA, 15 bp, Homo sapiens
tcgtacttgtaggag

SEQ ID NO: 790221 - DNA, 15 bp, Homo sapiens
cgtacttgtaggagg

SEQ ID NO: 790222 - DNA, 15 bp, Homo sapiens
gtacttgtaggagga

SEQ ID NO: 790223 - DNA, 15 bp, Homo sapiens
tacttgtaggaggac

SEQ ID NO: 790224 - DNA, 15 bp, Homo sapiens
acttgtaggaggacc

SEQ ID NO: 790225 - DNA, 15 bp, Homo sapiens
cttgtaggaggacct

SEQ ID NO: 790226 - DNA, 15 bp, Homo sapiens
ttgtaggaggacctt

SEQ ID NO: 790227 - DNA, 15 bp, Homo sapiens
tgtaggaggaccttg

SEQ ID NO: 790228 - DNA, 15 bp, Homo sapiens
gtaggaggaccttgg

SEQ ID NO: 790229 - DNA, 15 bp, Homo sapiens
taggaggaccttgga

SEQ ID NO: 790230 - DNA, 15 bp, Homo sapiens
aggaggaccttggac

SEQ ID NO: 790231 - DNA, 15 bp, Homo sapiens
ggaggaccttggaca

SEQ ID NO: 790232 - DNA, 15 bp, Homo sapiens
gaggaccttggacat

SEQ ID NO: 790233 - DNA, 15 bp, Homo sapiens
aggaccttggacatg

SEQ ID NO: 790234 - DNA, 15 bp, Homo sapiens
ggaccttggacatgt

SEQ ID NO: 790235 - DNA, 15 bp, Homo sapiens
gaccttggacatgtt

SEQ ID NO: 790236 - DNA, 15 bp, Homo sapiens
accttggacatgttt

SEQ ID NO: 790237 - DNA, 15 bp, Homo sapiens
ccttggacatgtttt

SEQ ID NO: 790238 - DNA, 15 bp, Homo sapiens
cttggacatgtttta

SEQ ID NO: 790239 - DNA, 15 bp, Homo sapiens
ttggacatgttttat

SEQ ID NO: 790240 - DNA, 15 bp, Homo sapiens
tggacatgttttatg

SEQ ID NO: 790241 - DNA, 15 bp, Homo sapiens
ggacatgttttatgt

SEQ ID NO: 790242 - DNA, 15 bp, Homo sapiens
gacatgttttatgta

SEQ ID NO: 790243 - DNA, 15 bp, Homo sapiens
acatgttttatgtaa

SEQ ID NO: 790244 - DNA, 15 bp, Homo sapiens
catgttttatgtaat

SEQ ID NO: 790245 - DNA, 15 bp, Homo sapiens
atgttttatgtaata

SEQ ID NO: 790246 - DNA, 15 bp, Homo sapiens
tgttttatgtaatac

SEQ ID NO: 790247 - DNA, 15 bp, Homo sapiens
gttttatgtaataca

SEQ ID NO: 790248 - DNA, 15 bp, Homo sapiens
ttttatgtaatacag

SEQ ID NO: 790249 - DNA, 15 bp, Homo sapiens
tttatgtaatacaga

SEQ ID NO: 790250 - DNA, 15 bp, Homo sapiens
ttatgtaatacagaa

SEQ ID NO: 790251 - DNA, 15 bp, Homo sapiens
tatgtaatacagaac

SEQ ID NO: 790252 - DNA, 15 bp, Homo sapiens
atgtaatacagaaca

SEQ ID NO: 790253 - DNA, 15 bp, Homo sapiens
tgtaatacagaacat

SEQ ID NO: 790254 - DNA, 15 bp, Homo sapiens
gtaatacagaacatt

SEQ ID NO: 790255 - DNA, 15 bp, Homo sapiens
taatacagaacattt

SEQ ID NO: 790256 - DNA, 15 bp, Homo sapiens
aatacagaacatttc

SEQ ID NO: 790257 - DNA, 15 bp, Homo sapiens
atacagaacatttcc

SEQ ID NO: 790258 - DNA, 15 bp, Homo sapiens
tacagaacatttcct

SEQ ID NO: 790259 - DNA, 15 bp, Homo sapiens
acagaacatttcctc

SEQ ID NO: 790260 - DNA, 15 bp, Homo sapiens
cagaacatttcctct

SEQ ID NO: 790261 - DNA, 15 bp, Homo sapiens
agaacatttcctctt

SEQ ID NO: 790262 - DNA, 15 bp, Homo sapiens
gaacatttcctcttt

SEQ ID NO: 790263 - DNA, 15 bp, Homo sapiens
aacatttcctctttt

SEQ ID NO: 790264 - DNA, 15 bp, Homo sapiens
acatttcctctttta

SEQ ID NO: 790265 - DNA, 15 bp, Homo sapiens
catttcctcttttag

SEQ ID NO: 790266 - DNA, 15 bp, Homo sapiens
atttcctcttttagg

SEQ ID NO: 790267 - DNA, 15 bp, Homo sapiens
tttcctcttttagga

SEQ ID NO: 790268 - DNA, 15 bp, Homo sapiens
ttcctcttttaggat

SEQ ID NO: 790269 - DNA, 15 bp, Homo sapiens
tcctcttttaggatt

SEQ ID NO: 790270 - DNA, 15 bp, Homo sapiens
cctcttttaggattg

SEQ ID NO: 790271 - DNA, 15 bp, Homo sapiens
ctcttttaggattgt

SEQ ID NO: 790272 - DNA, 15 bp, Homo sapiens
tcttttaggattgta

SEQ ID NO: 790273 - DNA, 15 bp, Homo sapiens
cttttaggattgtaa

SEQ ID NO: 790274 - DNA, 15 bp, Homo sapiens
ttttaggattgtaag

SEQ ID NO: 790275 - DNA, 15 bp, Homo sapiens
tttaggattgtaagt

SEQ ID NO: 790276 - DNA, 15 bp, Homo sapiens
ttaggattgtaagta

SEQ ID NO: 790277 - DNA, 15 bp, Homo sapiens
taggattgtaagtaa

SEQ ID NO: 790278 - DNA, 15 bp, Homo sapiens
aggattgtaagtaat

SEQ ID NO: 790279 - DNA, 15 bp, Homo sapiens
ggattgtaagtaata

SEQ ID NO: 790280 - DNA, 15 bp, Homo sapiens
gattgtaagtaatat

SEQ ID NO: 790281 - DNA, 15 bp, Homo sapiens
attgtaagtaatatc

SEQ ID NO: 790282 - DNA, 15 bp, Homo sapiens
ttgtaagtaatatca

SEQ ID NO: 790283 - DNA, 15 bp, Homo sapiens
tgtaagtaatatcat

SEQ ID NO: 790284 - DNA, 15 bp, Homo sapiens
gtaagtaatatcatg

SEQ ID NO: 790285 - DNA, 15 bp, Homo sapiens
taagtaatatcatgg

SEQ ID NO: 790286 - DNA, 15 bp, Homo sapiens
aagtaatatcatggt

SEQ ID NO: 790287 - DNA, 15 bp, Homo sapiens
agtaatatcatggta

SEQ ID NO: 790288 - DNA, 15 bp, Homo sapiens
gtaatatcatggtag

SEQ ID NO: 790289 - DNA, 15 bp, Homo sapiens
taatatcatggtaga

SEQ ID NO: 790290 - DNA, 15 bp, Homo sapiens
aatatcatggtagat

SEQ ID NO: 790291 - DNA, 15 bp, Homo sapiens
atatcatggtagatg

SEQ ID NO: 790292 - DNA, 15 bp, Homo sapiens
tatcatggtagatgt

SEQ ID NO: 790293 - DNA, 15 bp, Homo sapiens
atcatggtagatgtt

SEQ ID NO: 790294 - DNA, 15 bp, Homo sapiens
tcatggtagatgtta

SEQ ID NO: 790295 - DNA, 15 bp, Homo sapiens
catggtagatgttac

SEQ ID NO: 790296 - DNA, 15 bp, Homo sapiens
atggtagatgttact

SEQ ID NO: 790297 - DNA, 15 bp, Homo sapiens
tggtagatgttactg

SEQ ID NO: 790298 - DNA, 15 bp, Homo sapiens
ggtagatgttactgg

SEQ ID NO: 790299 - DNA, 15 bp, Homo sapiens
gtagatgttactgga

SEQ ID NO: 790300 - DNA, 15 bp, Homo sapiens
tagatgttactggaa

SEQ ID NO: 790301 - DNA, 15 bp, Homo sapiens
agatgttactggaaa

SEQ ID NO: 790302 - DNA, 15 bp, Homo sapiens
gatgttactggaaat

SEQ ID NO: 790303 - DNA, 15 bp, Homo sapiens
atgttactggaaatt

SEQ ID NO: 790304 - DNA, 15 bp, Homo sapiens
tgttactggaaattt

SEQ ID NO: 790305 - DNA, 15 bp, Homo sapiens
gttactggaaatttt

SEQ ID NO: 790306 - DNA, 15 bp, Homo sapiens
ttactggaaatttta

SEQ ID NO: 790307 - DNA, 15 bp, Homo sapiens
tactggaaattttat

SEQ ID NO: 790308 - DNA, 15 bp, Homo sapiens
actggaaattttatc

SEQ ID NO: 790309 - DNA, 15 bp, Homo sapiens
ctggaaattttatca

SEQ ID NO: 790310 - DNA, 15 bp, Homo sapiens
tggaaattttatcac

SEQ ID NO: 790311 - DNA, 15 bp, Homo sapiens
ggaaattttatcact

SEQ ID NO: 790312 - DNA, 15 bp, Homo sapiens
gaaattttatcactc

SEQ ID NO: 790313 - DNA, 15 bp, Homo sapiens
aaattttatcactcc

SEQ ID NO: 790314 - DNA, 15 bp, Homo sapiens
aattttatcactccc

SEQ ID NO: 790315 - DNA, 15 bp, Homo sapiens
attttatcactccca

SEQ ID NO: 790316 - DNA, 15 bp, Homo sapiens
ttttatcactcccac

SEQ ID NO: 790317 - DNA, 15 bp, Homo sapiens
tttatcactcccacc

SEQ ID NO: 790318 - DNA, 15 bp, Homo sapiens
ttatcactcccaccc

SEQ ID NO: 790319 - DNA, 15 bp, Homo sapiens
tatcactcccaccct

SEQ ID NO: 790320 - DNA, 15 bp, Homo sapiens
atcactcccaccctg

SEQ ID NO: 790321 - DNA, 15 bp, Homo sapiens
tcactcccaccctgt

SEQ ID NO: 790322 - DNA, 15 bp, Homo sapiens
cactcccaccctgtg

SEQ ID NO: 790323 - DNA, 15 bp, Homo sapiens
actcccaccctgtgg

SEQ ID NO: 790324 - DNA, 15 bp, Homo sapiens
ctcccaccctgtggg

SEQ ID NO: 790325 - DNA, 15 bp, Homo sapiens
tcccaccctgtgggt

SEQ ID NO: 790326 - DNA, 15 bp, Homo sapiens
cccaccctgtgggtc

SEQ ID NO: 790327 - DNA, 15 bp, Homo sapiens
ccaccctgtgggtct

SEQ ID NO: 790328 - DNA, 15 bp, Homo sapiens
caccctgtgggtctt

SEQ ID NO: 790329 - DNA, 15 bp, Homo sapiens
accctgtgggtctta

SEQ ID NO: 790330 - DNA, 15 bp, Homo sapiens
ccctgtgggtcttag

SEQ ID NO: 790331 - DNA, 15 bp, Homo sapiens
cctgtgggtcttagc

SEQ ID NO: 790332 - DNA, 15 bp, Homo sapiens
ctgtgggtcttagca

SEQ ID NO: 790333 - DNA, 15 bp, Homo sapiens
tgtgggtcttagcag

SEQ ID NO: 790334 - DNA, 15 bp, Homo sapiens
gtgggtcttagcagg

SEQ ID NO: 790335 - DNA, 15 bp, Homo sapiens
tgggtcttagcagga

SEQ ID NO: 790336 - DNA, 15 bp, Homo sapiens
gggtcttagcaggaa

SEQ ID NO: 790337 - DNA, 15 bp, Homo sapiens
ggtcttagcaggaat

SEQ ID NO: 790338 - DNA, 15 bp, Homo sapiens
gtcttagcaggaatc

SEQ ID NO: 790339 - DNA, 15 bp, Homo sapiens
tcttagcaggaatca

SEQ ID NO: 790340 - DNA, 15 bp, Homo sapiens
cttagcaggaatcat

SEQ ID NO: 790341 - DNA, 15 bp, Homo sapiens
ttagcaggaatcatc

SEQ ID NO: 790342 - DNA, 15 bp, Homo sapiens
tagcaggaatcatcc

SEQ ID NO: 790343 - DNA, 15 bp, Homo sapiens
agcaggaatcatcct

SEQ ID NO: 790344 - DNA, 15 bp, Homo sapiens
gcaggaatcatcctg

SEQ ID NO: 790345 - DNA, 15 bp, Homo sapiens
caggaatcatcctga

SEQ ID NO: 790346 - DNA, 15 bp, Homo sapiens
aggaatcatcctgaa

SEQ ID NO: 790347 - DNA, 15 bp, Homo sapiens
ggaatcatcctgaat

SEQ ID NO: 790348 - DNA, 15 bp, Homo sapiens
gaatcatcctgaatg

SEQ ID NO: 790349 - DNA, 15 bp, Homo sapiens
aatcatcctgaatgg

SEQ ID NO: 790350 - DNA, 15 bp, Homo sapiens
atcatcctgaatggt

SEQ ID NO: 790351 - DNA, 15 bp, Homo sapiens
tcatcctgaatggtg

SEQ ID NO: 790352 - DNA, 15 bp, Homo sapiens
catcctgaatggtgt

SEQ ID NO: 790353 - DNA, 15 bp, Homo sapiens
atcctgaatggtgtt

SEQ ID NO: 790354 - DNA, 15 bp, Homo sapiens
tcctgaatggtgttt

SEQ ID NO: 790355 - DNA, 15 bp, Homo sapiens
cctgaatggtgtttg

SEQ ID NO: 790356 - DNA, 15 bp, Homo sapiens
ctgaatggtgtttgt

SEQ ID NO: 790357 - DNA, 15 bp, Homo sapiens
tgaatggtgtttgtg

SEQ ID NO: 790358 - DNA, 15 bp, Homo sapiens
gaatggtgtttgtgg

SEQ ID NO: 790359 - DNA, 15 bp, Homo sapiens
aatggtgtttgtgga

SEQ ID NO: 790360 - DNA, 15 bp, Homo sapiens
atggtgtttgtggac

SEQ ID NO: 790361 - DNA, 15 bp, Homo sapiens
tggtgtttgtggact

SEQ ID NO: 790362 - DNA, 15 bp, Homo sapiens
ggtgtttgtggactt

SEQ ID NO: 790363 - DNA, 15 bp, Homo sapiens
gtgtttgtggacttg

SEQ ID NO: 790364 - DNA, 15 bp, Homo sapiens
tgtttgtggacttgt

SEQ ID NO: 790365 - DNA, 15 bp, Homo sapiens
gtttgtggacttgtt

SEQ ID NO: 790366 - DNA, 15 bp, Homo sapiens
tttgtggacttgttt

SEQ ID NO: 790367 - DNA, 15 bp, Homo sapiens
ttgtggacttgtttt

SEQ ID NO: 790368 - DNA, 15 bp, Homo sapiens
tgtggacttgttttg

SEQ ID NO: 790369 - DNA, 15 bp, Homo sapiens
gtggacttgttttgg

SEQ ID NO: 790370 - DNA, 15 bp, Homo sapiens
tggacttgttttgga

SEQ ID NO: 790371 - DNA, 15 bp, Homo sapiens
ggacttgttttggag

SEQ ID NO: 790372 - DNA, 15 bp, Homo sapiens
gacttgttttggaga

SEQ ID NO: 790373 - DNA, 15 bp, Homo sapiens
acttgttttggagaa

SEQ ID NO: 790374 - DNA, 15 bp, Homo sapiens
cttgttttggagaag

SEQ ID NO: 790375 - DNA, 15 bp, Homo sapiens
ttgttttggagaagt

SEQ ID NO: 790376 - DNA, 15 bp, Homo sapiens
tgttttggagaagtc

SEQ ID NO: 790377 - DNA, 15 bp, Homo sapiens
gttttggagaagtct

SEQ ID NO: 790378 - DNA, 15 bp, Homo sapiens
ttttggagaagtctg

SEQ ID NO: 790379 - DNA, 15 bp, Homo sapiens
tttggagaagtctgt

SEQ ID NO: 790380 - DNA, 15 bp, Homo sapiens
ttggagaagtctgtg

SEQ ID NO: 790381 - DNA, 15 bp, Homo sapiens
tggagaagtctgtgt

SEQ ID NO: 790382 - DNA, 15 bp, Homo sapiens
ggagaagtctgtgtt

SEQ ID NO: 790383 - DNA, 15 bp, Homo sapiens
gagaagtctgtgttg

SEQ ID NO: 790384 - DNA, 15 bp, Homo sapiens
agaagtctgtgttga

SEQ ID NO: 790385 - DNA, 15 bp, Homo sapiens
gaagtctgtgttgag

SEQ ID NO: 790386 - DNA, 15 bp, Homo sapiens
aagtctgtgttgagg

SEQ ID NO: 790387 - DNA, 15 bp, Homo sapiens
agtctgtgttgaggg

SEQ ID NO: 790388 - DNA, 15 bp, Homo sapiens
gtctgtgttgagggc

SEQ ID NO: 790389 - DNA, 15 bp, Homo sapiens
tctgtgttgagggca

SEQ ID NO: 790390 - DNA, 15 bp, Homo sapiens
ctgtgttgagggcag

SEQ ID NO: 790391 - DNA, 15 bp, Homo sapiens
tgtgttgagggcagg

SEQ ID NO: 790392 - DNA, 15 bp, Homo sapiens
gtgttgagggcaggg

SEQ ID NO: 790393 - DNA, 15 bp, Homo sapiens
tgttgagggcagggg

SEQ ID NO: 790394 - DNA, 15 bp, Homo sapiens
gttgagggcaggggt

SEQ ID NO: 790395 - DNA, 15 bp, Homo sapiens
ttgagggcaggggtg

SEQ ID NO: 790396 - DNA, 15 bp, Homo sapiens
tgagggcaggggtgg

SEQ ID NO: 790397 - DNA, 15 bp, Homo sapiens
gagggcaggggtggt

SEQ ID NO: 790398 - DNA, 15 bp, Homo sapiens
agggcaggggtggta

SEQ ID NO: 790399 - DNA, 15 bp, Homo sapiens
gggcaggggtggtag

SEQ ID NO: 790400 - DNA, 15 bp, Homo sapiens
ggcaggggtggtagg

SEQ ID NO: 790401 - DNA, 15 bp, Homo sapiens
gcaggggtggtagga

SEQ ID NO: 790402 - DNA, 15 bp, Homo sapiens
caggggtggtaggac

SEQ ID NO: 790403 - DNA, 15 bp, Homo sapiens
aggggtggtaggact

SEQ ID NO: 790404 - DNA, 15 bp, Homo sapiens
ggggtggtaggactt

SEQ ID NO: 790405 - DNA, 15 bp, Homo sapiens
gggtggtaggacttt

SEQ ID NO: 790406 - DNA, 15 bp, Homo sapiens
ggtggtaggactttg

SEQ ID NO: 790407 - DNA, 15 bp, Homo sapiens
gtggtaggactttgt

SEQ ID NO: 790408 - DNA, 15 bp, Homo sapiens
tggtaggactttgtg

SEQ ID NO: 790409 - DNA, 15 bp, Homo sapiens
ggtaggactttgtgt

SEQ ID NO: 790410 - DNA, 15 bp, Homo sapiens
gtaggactttgtgtt

SEQ ID NO: 790411 - DNA, 15 bp, Homo sapiens
taggactttgtgttc

SEQ ID NO: 790412 - DNA, 15 bp, Homo sapiens
aggactttgtgttca

SEQ ID NO: 790413 - DNA, 15 bp, Homo sapiens
ggactttgtgttcaa

SEQ ID NO: 790414 - DNA, 15 bp, Homo sapiens
gactttgtgttcaac

SEQ ID NO: 790415 - DNA, 15 bp, Homo sapiens
actttgtgttcaact

SEQ ID NO: 790416 - DNA, 15 bp, Homo sapiens
ctttgtgttcaactt

SEQ ID NO: 790417 - DNA, 15 bp, Homo sapiens
tttgtgttcaacttg

SEQ ID NO: 790418 - DNA, 15 bp, Homo sapiens
ttgtgttcaacttgg

SEQ ID NO: 790419 - DNA, 15 bp, Homo sapiens
tgtgttcaacttggc

SEQ ID NO: 790420 - DNA, 15 bp, Homo sapiens
gtgttcaacttggca

SEQ ID NO: 790421 - DNA, 15 bp, Homo sapiens
tgttcaacttggcag

SEQ ID NO: 790422 - DNA, 15 bp, Homo sapiens
gttcaacttggcagg

SEQ ID NO: 790423 - DNA, 15 bp, Homo sapiens
ttcaacttggcaggc

SEQ ID NO: 790424 - DNA, 15 bp, Homo sapiens
tcaacttggcaggct

SEQ ID NO: 790425 - DNA, 15 bp, Homo sapiens
caacttggcaggctc

SEQ ID NO: 790426 - DNA, 15 bp, Homo sapiens
aacttggcaggctcc

SEQ ID NO: 790427 - DNA, 15 bp, Homo sapiens
acttggcaggctcct

SEQ ID NO: 790428 - DNA, 15 bp, Homo sapiens
cttggcaggctcctg

SEQ ID NO: 790429 - DNA, 15 bp, Homo sapiens
ttggcaggctcctgg

SEQ ID NO: 790430 - DNA, 15 bp, Homo sapiens
tggcaggctcctgga

SEQ ID NO: 790431 - DNA, 15 bp, Homo sapiens
ggcaggctcctggag

SEQ ID NO: 790432 - DNA, 15 bp, Homo sapiens
gcaggctcctggagg

SEQ ID NO: 790433 - DNA, 15 bp, Homo sapiens
caggctcctggaggg

SEQ ID NO: 790434 - DNA, 15 bp, Homo sapiens
aggctcctggaggga

SEQ ID NO: 790435 - DNA, 15 bp, Homo sapiens
ggctcctggagggag

SEQ ID NO: 790436 - DNA, 15 bp, Homo sapiens
gctcctggagggaga

SEQ ID NO: 790437 - DNA, 15 bp, Homo sapiens
ctcctggagggagag

SEQ ID NO: 790438 - DNA, 15 bp, Homo sapiens
tcctggagggagaga

SEQ ID NO: 790439 - DNA, 15 bp, Homo sapiens
cctggagggagagag

SEQ ID NO: 790440 - DNA, 15 bp, Homo sapiens
ctggagggagagagt

SEQ ID NO: 790441 - DNA, 15 bp, Homo sapiens
tggagggagagagtg

SEQ ID NO: 790442 - DNA, 15 bp, Homo sapiens
ggagggagagagtgg

SEQ ID NO: 790443 - DNA, 15 bp, Homo sapiens
gagggagagagtggt

SEQ ID NO: 790444 - DNA, 15 bp, Homo sapiens
agggagagagtggtc

SEQ ID NO: 790445 - DNA, 15 bp, Homo sapiens
gggagagagtggtct

SEQ ID NO: 790446 - DNA, 15 bp, Homo sapiens
ggagagagtggtctg

SEQ ID NO: 790447 - DNA, 15 bp, Homo sapiens
gagagagtggtctgg

SEQ ID NO: 790448 - DNA, 15 bp, Homo sapiens
agagagtggtctggg

SEQ ID NO: 790449 - DNA, 15 bp, Homo sapiens
gagagtggtctggga

SEQ ID NO: 790450 - DNA, 15 bp, Homo sapiens
agagtggtctgggac

SEQ ID NO: 790451 - DNA, 15 bp, Homo sapiens
gagtggtctgggaca

SEQ ID NO: 790452 - DNA, 15 bp, Homo sapiens
agtggtctgggacag

SEQ ID NO: 790453 - DNA, 15 bp, Homo sapiens
gtggtctgggacagg

SEQ ID NO: 790454 - DNA, 15 bp, Homo sapiens
tggtctgggacaggc

SEQ ID NO: 790455 - DNA, 15 bp, Homo sapiens
ggtctgggacaggcg

SEQ ID NO: 790456 - DNA, 15 bp, Homo sapiens
gtctgggacaggcgt

SEQ ID NO: 790457 - DNA, 15 bp, Homo sapiens
tctgggacaggcgtt

SEQ ID NO: 790458 - DNA, 15 bp, Homo sapiens
ctgggacaggcgtta

SEQ ID NO: 790459 - DNA, 15 bp, Homo sapiens
tgggacaggcgttag

SEQ ID NO: 790460 - DNA, 15 bp, Homo sapiens
gggacaggcgttaga

SEQ ID NO: 790461 - DNA, 15 bp, Homo sapiens
ggacaggcgttagag

SEQ ID NO: 790462 - DNA, 15 bp, Homo sapiens
gacaggcgttagagg

SEQ ID NO: 790463 - DNA, 15 bp, Homo sapiens
acaggcgttagaggg

SEQ ID NO: 790464 - DNA, 15 bp, Homo sapiens
caggcgttagagggt

SEQ ID NO: 790465 - DNA, 15 bp, Homo sapiens
aggcgttagagggtc

SEQ ID NO: 790466 - DNA, 15 bp, Homo sapiens
ggcgttagagggtca

SEQ ID NO: 790467 - DNA, 15 bp, Homo sapiens
gcgttagagggtcag

SEQ ID NO: 790468 - DNA, 15 bp, Homo sapiens
cgttagagggtcagg

SEQ ID NO: 790469 - DNA, 15 bp, Homo sapiens
gttagagggtcaggc

SEQ ID NO: 790470 - DNA, 15 bp, Homo sapiens
ttagagggtcaggcc

SEQ ID NO: 790471 - DNA, 15 bp, Homo sapiens
tagagggtcaggccc

SEQ ID NO: 790472 - DNA, 15 bp, Homo sapiens
agagggtcaggccct

SEQ ID NO: 790473 - DNA, 15 bp, Homo sapiens
gagggtcaggccctc

SEQ ID NO: 790474 - DNA, 15 bp, Homo sapiens
agggtcaggccctct

SEQ ID NO: 790475 - DNA, 15 bp, Homo sapiens
gggtcaggccctctg

SEQ ID NO: 790476 - DNA, 15 bp, Homo sapiens
ggtcaggccctctgg

SEQ ID NO: 790477 - DNA, 15 bp, Homo sapiens
gtcaggccctctggg

SEQ ID NO: 790478 - DNA, 15 bp, Homo sapiens
tcaggccctctgggc

SEQ ID NO: 790479 - DNA, 15 bp, Homo sapiens
caggccctctgggct

SEQ ID NO: 790480 - DNA, 15 bp, Homo sapiens
aggccctctgggctt

SEQ ID NO: 790481 - DNA, 15 bp, Homo sapiens
ggccctctgggctta

SEQ ID NO: 790482 - DNA, 15 bp, Homo sapiens
gccctctgggcttaa

SEQ ID NO: 790483 - DNA, 15 bp, Homo sapiens
ccctctgggcttaaa

SEQ ID NO: 790484 - DNA, 15 bp, Homo sapiens
cctctgggcttaaaa

SEQ ID NO: 790485 - DNA, 15 bp, Homo sapiens
ctctgggcttaaaag

SEQ ID NO: 790486 - DNA, 15 bp, Homo sapiens
tctgggcttaaaaga

SEQ ID NO: 790487 - DNA, 15 bp, Homo sapiens
ctgggcttaaaagag

SEQ ID NO: 790488 - DNA, 15 bp, Homo sapiens
tgggcttaaaagaga

SEQ ID NO: 790489 - DNA, 15 bp, Homo sapiens
gggcttaaaagagaa

SEQ ID NO: 790490 - DNA, 15 bp, Homo sapiens
ggcttaaaagagaaa

SEQ ID NO: 790491 - DNA, 15 bp, Homo sapiens
gcttaaaagagaaaa

SEQ ID NO: 790492 - DNA, 15 bp, Homo sapiens
cttaaaagagaaaaa

SEQ ID NO: 790493 - DNA, 15 bp, Homo sapiens
ttaaaagagaaaaag

SEQ ID NO: 790494 - DNA, 15 bp, Homo sapiens
taaaagagaaaaagg

SEQ ID NO: 790495 - DNA, 15 bp, Homo sapiens
aaaagagaaaaagga

SEQ ID NO: 790496 - DNA, 15 bp, Homo sapiens
aaagagaaaaaggaa

SEQ ID NO: 790497 - DNA, 15 bp, Homo sapiens
aagagaaaaaggaag

SEQ ID NO: 790498 - DNA, 15 bp, Homo sapiens
agagaaaaaggaaga

SEQ ID NO: 790499 - DNA, 15 bp, Homo sapiens
gagaaaaaggaagag

SEQ ID NO: 790500 - DNA, 15 bp, Homo sapiens
agaaaaaggaagagg

SEQ ID NO: 790501 - DNA, 15 bp, Homo sapiens
gaaaaaggaagaggg

SEQ ID NO: 790502 - DNA, 15 bp, Homo sapiens
aaaaaggaagagggg

SEQ ID NO: 790503 - DNA, 15 bp, Homo sapiens
aaaaggaagagggga

SEQ ID NO: 790504 - DNA, 15 bp, Homo sapiens
aaaggaagaggggaa

SEQ ID NO: 790505 - DNA, 15 bp, Homo sapiens
aaggaagaggggaat

SEQ ID NO: 790506 - DNA, 15 bp, Homo sapiens
aggaagaggggaatg

SEQ ID NO: 790507 - DNA, 15 bp, Homo sapiens
ggaagaggggaatgt

SEQ ID NO: 790508 - DNA, 15 bp, Homo sapiens
gaagaggggaatgtc

SEQ ID NO: 790509 - DNA, 15 bp, Homo sapiens
aagaggggaatgtct

SEQ ID NO: 790510 - DNA, 15 bp, Homo sapiens
agaggggaatgtctt

SEQ ID NO: 790511 - DNA, 15 bp, Homo sapiens
gaggggaatgtcttg

SEQ ID NO: 790512 - DNA, 15 bp, Homo sapiens
aggggaatgtcttgg

SEQ ID NO: 790513 - DNA, 15 bp, Homo sapiens
ggggaatgtcttgga

SEQ ID NO: 790514 - DNA, 15 bp, Homo sapiens
gggaatgtcttggag

SEQ ID NO: 790515 - DNA, 15 bp, Homo sapiens
ggaatgtcttggaga

SEQ ID NO: 790516 - DNA, 15 bp, Homo sapiens
gaatgtcttggagaa

SEQ ID NO: 790517 - DNA, 15 bp, Homo sapiens
aatgtcttggagaag

SEQ ID NO: 790518 - DNA, 15 bp, Homo sapiens
atgtcttggagaagg

SEQ ID NO: 790519 - DNA, 15 bp, Homo sapiens
tgtcttggagaagga

SEQ ID NO: 790520 - DNA, 15 bp, Homo sapiens
gtcttggagaaggag

SEQ ID NO: 790521 - DNA, 15 bp, Homo sapiens
tcttggagaaggagg

SEQ ID NO: 790522 - DNA, 15 bp, Homo sapiens
cttggagaaggaggg

SEQ ID NO: 790523 - DNA, 15 bp, Homo sapiens
ttggagaaggagggg

SEQ ID NO: 790524 - DNA, 15 bp, Homo sapiens
tggagaaggaggggc

SEQ ID NO: 790525 - DNA, 15 bp, Homo sapiens
ggagaaggaggggcc

SEQ ID NO: 790526 - DNA, 15 bp, Homo sapiens
gagaaggaggggcca

SEQ ID NO: 790527 - DNA, 15 bp, Homo sapiens
agaaggaggggccaa

SEQ ID NO: 790528 - DNA, 15 bp, Homo sapiens
gaaggaggggccaat

SEQ ID NO: 790529 - DNA, 15 bp, Homo sapiens
aaggaggggccaatc

SEQ ID NO: 790530 - DNA, 15 bp, Homo sapiens
aggaggggccaatca

SEQ ID NO: 790531 - DNA, 15 bp, Homo sapiens
ggaggggccaatcac

SEQ ID NO: 790532 - DNA, 15 bp, Homo sapiens
gaggggccaatcact

SEQ ID NO: 790533 - DNA, 15 bp, Homo sapiens
aggggccaatcactt

SEQ ID NO: 790534 - DNA, 15 bp, Homo sapiens
ggggccaatcacttg

SEQ ID NO: 790535 - DNA, 15 bp, Homo sapiens
gggccaatcacttgt

SEQ ID NO: 790536 - DNA, 15 bp, Homo sapiens
ggccaatcacttgtt

SEQ ID NO: 790537 - DNA, 15 bp, Homo sapiens
gccaatcacttgtta

SEQ ID NO: 790538 - DNA, 15 bp, Homo sapiens
ccaatcacttgttag

SEQ ID NO: 790539 - DNA, 15 bp, Homo sapiens
caatcacttgttagg

SEQ ID NO: 790540 - DNA, 15 bp, Homo sapiens
aatcacttgttaggt

SEQ ID NO: 790541 - DNA, 15 bp, Homo sapiens
atcacttgttaggtc

SEQ ID NO: 790542 - DNA, 15 bp, Homo sapiens
tcacttgttaggtcc

SEQ ID NO: 790543 - DNA, 15 bp, Homo sapiens
cacttgttaggtcct

SEQ ID NO: 790544 - DNA, 15 bp, Homo sapiens
acttgttaggtccta

SEQ ID NO: 790545 - DNA, 15 bp, Homo sapiens
cttgttaggtcctag

SEQ ID NO: 790546 - DNA, 15 bp, Homo sapiens
ttgttaggtcctagg

SEQ ID NO: 790547 - DNA, 15 bp, Homo sapiens
tgttaggtcctaggc

SEQ ID NO: 790548 - DNA, 15 bp, Homo sapiens
gttaggtcctaggca

SEQ ID NO: 790549 - DNA, 15 bp, Homo sapiens
ttaggtcctaggcag

SEQ ID NO: 790550 - DNA, 15 bp, Homo sapiens
taggtcctaggcagt

SEQ ID NO: 790551 - DNA, 15 bp, Homo sapiens
aggtcctaggcagtg

SEQ ID NO: 790552 - DNA, 15 bp, Homo sapiens
ggtcctaggcagtgt

SEQ ID NO: 790553 - DNA, 15 bp, Homo sapiens
gtcctaggcagtgtc

SEQ ID NO: 790554 - DNA, 15 bp, Homo sapiens
tcctaggcagtgtct

SEQ ID NO: 790555 - DNA, 15 bp, Homo sapiens
cctaggcagtgtctt

SEQ ID NO: 790556 - DNA, 15 bp, Homo sapiens
ctaggcagtgtcttg

SEQ ID NO: 790557 - DNA, 15 bp, Homo sapiens
taggcagtgtcttgg

SEQ ID NO: 790558 - DNA, 15 bp, Homo sapiens
aggcagtgtcttggt

SEQ ID NO: 790559 - DNA, 15 bp, Homo sapiens
ggcagtgtcttggtg

SEQ ID NO: 790560 - DNA, 15 bp, Homo sapiens
gcagtgtcttggtgc

SEQ ID NO: 790561 - DNA, 15 bp, Homo sapiens
cagtgtcttggtgcc

SEQ ID NO: 790562 - DNA, 15 bp, Homo sapiens
agtgtcttggtgcca

SEQ ID NO: 790563 - DNA, 15 bp, Homo sapiens
gtgtcttggtgccat

SEQ ID NO: 790564 - DNA, 15 bp, Homo sapiens
tgtcttggtgccatg

SEQ ID NO: 790565 - DNA, 15 bp, Homo sapiens
gtcttggtgccatgt

SEQ ID NO: 790566 - DNA, 15 bp, Homo sapiens
tcttggtgccatgta

SEQ ID NO: 790567 - DNA, 15 bp, Homo sapiens
cttggtgccatgtat

SEQ ID NO: 790568 - DNA, 15 bp, Homo sapiens
ttggtgccatgtatt

SEQ ID NO: 790569 - DNA, 15 bp, Homo sapiens
tggtgccatgtatta

SEQ ID NO: 790570 - DNA, 15 bp, Homo sapiens
ggtgccatgtattag

SEQ ID NO: 790571 - DNA, 15 bp, Homo sapiens
gtgccatgtattaga

SEQ ID NO: 790572 - DNA, 15 bp, Homo sapiens
tgccatgtattagaa

SEQ ID NO: 790573 - DNA, 15 bp, Homo sapiens
gccatgtattagaag

SEQ ID NO: 790574 - DNA, 15 bp, Homo sapiens
ccatgtattagaagg

SEQ ID NO: 790575 - DNA, 15 bp, Homo sapiens
catgtattagaaggg

SEQ ID NO: 790576 - DNA, 15 bp, Homo sapiens
atgtattagaaggga

SEQ ID NO: 790577 - DNA, 15 bp, Homo sapiens
tgtattagaagggag

SEQ ID NO: 790578 - DNA, 15 bp, Homo sapiens
gtattagaagggagg

SEQ ID NO: 790579 - DNA, 15 bp, Homo sapiens
tattagaagggaggt

SEQ ID NO: 790580 - DNA, 15 bp, Homo sapiens
attagaagggaggtg

SEQ ID NO: 790581 - DNA, 15 bp, Homo sapiens
ttagaagggaggtgg

SEQ ID NO: 790582 - DNA, 15 bp, Homo sapiens
tagaagggaggtgga

SEQ ID NO: 790583 - DNA, 15 bp, Homo sapiens
agaagggaggtggag

SEQ ID NO: 790584 - DNA, 15 bp, Homo sapiens
gaagggaggtggagg

SEQ ID NO: 790585 - DNA, 15 bp, Homo sapiens
aagggaggtggaggg

SEQ ID NO: 790586 - DNA, 15 bp, Homo sapiens
agggaggtggaggga

SEQ ID NO: 790587 - DNA, 15 bp, Homo sapiens
gggaggtggagggag

SEQ ID NO: 790588 - DNA, 15 bp, Homo sapiens
ggaggtggagggagt

SEQ ID NO: 790589 - DNA, 15 bp, Homo sapiens
gaggtggagggagtg

SEQ ID NO: 790590 - DNA, 15 bp, Homo sapiens
aggtggagggagtgg

SEQ ID NO: 790591 - DNA, 15 bp, Homo sapiens
ggtggagggagtggg

SEQ ID NO: 790592 - DNA, 15 bp, Homo sapiens
gtggagggagtgggg

SEQ ID NO: 790593 - DNA, 15 bp, Homo sapiens
tggagggagtgggga

SEQ ID NO: 790594 - DNA, 15 bp, Homo sapiens
ggagggagtggggag

SEQ ID NO: 790595 - DNA, 15 bp, Homo sapiens
gagggagtggggagg

SEQ ID NO: 790596 - DNA, 15 bp, Homo sapiens
agggagtggggaggt

SEQ ID NO: 790597 - DNA, 15 bp, Homo sapiens
gggagtggggaggta

SEQ ID NO: 790598 - DNA, 15 bp, Homo sapiens
ggagtggggaggtat

SEQ ID NO: 790599 - DNA, 15 bp, Homo sapiens
gagtggggaggtatc

SEQ ID NO: 790600 - DNA, 15 bp, Homo sapiens
agtggggaggtatca

SEQ ID NO: 790601 - DNA, 15 bp, Homo sapiens
gtggggaggtatcag

SEQ ID NO: 790602 - DNA, 15 bp, Homo sapiens
tggggaggtatcagc

SEQ ID NO: 790603 - DNA, 15 bp, Homo sapiens
ggggaggtatcagcc

SEQ ID NO: 790604 - DNA, 15 bp, Homo sapiens
gggaggtatcagcct

SEQ ID NO: 790605 - DNA, 15 bp, Homo sapiens
ggaggtatcagcctg

SEQ ID NO: 790606 - DNA, 15 bp, Homo sapiens
gaggtatcagcctgt

SEQ ID NO: 790607 - DNA, 15 bp, Homo sapiens
aggtatcagcctgta

SEQ ID NO: 790608 - DNA, 15 bp, Homo sapiens
ggtatcagcctgtag

SEQ ID NO: 790609 - DNA, 15 bp, Homo sapiens
gtatcagcctgtaga

SEQ ID NO: 790610 - DNA, 15 bp, Homo sapiens
tatcagcctgtagat

SEQ ID NO: 790611 - DNA, 15 bp, Homo sapiens
atcagcctgtagata

SEQ ID NO: 790612 - DNA, 15 bp, Homo sapiens
tcagcctgtagataa

SEQ ID NO: 790613 - DNA, 15 bp, Homo sapiens
cagcctgtagataac

SEQ ID NO: 790614 - DNA, 15 bp, Homo sapiens
agcctgtagataaca

SEQ ID NO: 790615 - DNA, 15 bp, Homo sapiens
gcctgtagataacat

SEQ ID NO: 790616 - DNA, 15 bp, Homo sapiens
cctgtagataacatc

SEQ ID NO: 790617 - DNA, 15 bp, Homo sapiens
ctgtagataacatcc

SEQ ID NO: 790618 - DNA, 15 bp, Homo sapiens
tgtagataacatcct

SEQ ID NO: 790619 - DNA, 15 bp, Homo sapiens
gtagataacatcctg

SEQ ID NO: 790620 - DNA, 15 bp, Homo sapiens
tagataacatcctgt

SEQ ID NO: 790621 - DNA, 15 bp, Homo sapiens
agataacatcctgtt

SEQ ID NO: 790622 - DNA, 15 bp, Homo sapiens
gataacatcctgttc

SEQ ID NO: 790623 - DNA, 15 bp, Homo sapiens
ataacatcctgttct

SEQ ID NO: 790624 - DNA, 15 bp, Homo sapiens
taacatcctgttcta

SEQ ID NO: 790625 - DNA, 15 bp, Homo sapiens
aacatcctgttctaa

SEQ ID NO: 790626 - DNA, 15 bp, Homo sapiens
acatcctgttctaat

SEQ ID NO: 790627 - DNA, 15 bp, Homo sapiens
catcctgttctaatg

SEQ ID NO: 790628 - DNA, 15 bp, Homo sapiens
atcctgttctaatgg

SEQ ID NO: 790629 - DNA, 15 bp, Homo sapiens
tcctgttctaatggg

SEQ ID NO: 790630 - DNA, 15 bp, Homo sapiens
cctgttctaatgggt

SEQ ID NO: 790631 - DNA, 15 bp, Homo sapiens
ctgttctaatgggtg

SEQ ID NO: 790632 - DNA, 15 bp, Homo sapiens
tgttctaatgggtgg

SEQ ID NO: 790633 - DNA, 15 bp, Homo sapiens
gttctaatgggtggg

SEQ ID NO: 790634 - DNA, 15 bp, Homo sapiens
ttctaatgggtgggt

SEQ ID NO: 790635 - DNA, 15 bp, Homo sapiens
tctaatgggtgggtg

SEQ ID NO: 790636 - DNA, 15 bp, Homo sapiens
ctaatgggtgggtgt

SEQ ID NO: 790637 - DNA, 15 bp, Homo sapiens
taatgggtgggtgtg

SEQ ID NO: 790638 - DNA, 15 bp, Homo sapiens
aatgggtgggtgtga

SEQ ID NO: 790639 - DNA, 15 bp, Homo sapiens
atgggtgggtgtgag

SEQ ID NO: 790640 - DNA, 15 bp, Homo sapiens
tgggtgggtgtgaga

SEQ ID NO: 790641 - DNA, 15 bp, Homo sapiens
gggtgggtgtgagaa

SEQ ID NO: 790642 - DNA, 15 bp, Homo sapiens
ggtgggtgtgagaag

SEQ ID NO: 790643 - DNA, 15 bp, Homo sapiens
gtgggtgtgagaagg

SEQ ID NO: 790644 - DNA, 15 bp, Homo sapiens
tgggtgtgagaaggt

SEQ ID NO: 790645 - DNA, 15 bp, Homo sapiens
gggtgtgagaaggtg

SEQ ID NO: 790646 - DNA, 15 bp, Homo sapiens
ggtgtgagaaggtgg

SEQ ID NO: 790647 - DNA, 15 bp, Homo sapiens
gtgtgagaaggtggg

SEQ ID NO: 790648 - DNA, 15 bp, Homo sapiens
tgtgagaaggtgggg

SEQ ID NO: 790649 - DNA, 15 bp, Homo sapiens
gtgagaaggtggggg

SEQ ID NO: 790650 - DNA, 15 bp, Homo sapiens
tgagaaggtggggga

SEQ ID NO: 790651 - DNA, 15 bp, Homo sapiens
gagaaggtgggggag

SEQ ID NO: 790652 - DNA, 15 bp, Homo sapiens
agaaggtgggggaga

SEQ ID NO: 790653 - DNA, 15 bp, Homo sapiens
gaaggtgggggagat

SEQ ID NO: 790654 - DNA, 15 bp, Homo sapiens
aaggtgggggagatg

SEQ ID NO: 790655 - DNA, 15 bp, Homo sapiens
aggtgggggagatgc

SEQ ID NO: 790656 - DNA, 15 bp, Homo sapiens
ggtgggggagatgct

SEQ ID NO: 790657 - DNA, 15 bp, Homo sapiens
gtgggggagatgctt

SEQ ID NO: 790658 - DNA, 15 bp, Homo sapiens
tgggggagatgcttt

SEQ ID NO: 790659 - DNA, 15 bp, Homo sapiens
gggggagatgctttg

SEQ ID NO: 790660 - DNA, 15 bp, Homo sapiens
ggggagatgctttga

SEQ ID NO: 790661 - DNA, 15 bp, Homo sapiens
gggagatgctttgag

SEQ ID NO: 790662 - DNA, 15 bp, Homo sapiens
ggagatgctttgaga

SEQ ID NO: 790663 - DNA, 15 bp, Homo sapiens
gagatgctttgagac

SEQ ID NO: 790664 - DNA, 15 bp, Homo sapiens
agatgctttgagaca

SEQ ID NO: 790665 - DNA, 15 bp, Homo sapiens
gatgctttgagacat

SEQ ID NO: 790666 - DNA, 15 bp, Homo sapiens
atgctttgagacata

SEQ ID NO: 790667 - DNA, 15 bp, Homo sapiens
tgctttgagacatat

SEQ ID NO: 790668 - DNA, 15 bp, Homo sapiens
gctttgagacatatt

SEQ ID NO: 790669 - DNA, 15 bp, Homo sapiens
ctttgagacatattt

SEQ ID NO: 790670 - DNA, 15 bp, Homo sapiens
tttgagacatattta

SEQ ID NO: 790671 - DNA, 15 bp, Homo sapiens
ttgagacatatttaa

SEQ ID NO: 790672 - DNA, 15 bp, Homo sapiens
tgagacatatttaat

SEQ ID NO: 790673 - DNA, 15 bp, Homo sapiens
gagacatatttaata

SEQ ID NO: 790674 - DNA, 15 bp, Homo sapiens
agacatatttaataa

SEQ ID NO: 790675 - DNA, 15 bp, Homo sapiens
gacatatttaataat

SEQ ID NO: 790676 - DNA, 15 bp, Homo sapiens
acatatttaataata

SEQ ID NO: 790677 - DNA, 15 bp, Homo sapiens
catatttaataatat

SEQ ID NO: 790678 - DNA, 15 bp, Homo sapiens
atatttaataatatc

SEQ ID NO: 790679 - DNA, 15 bp, Homo sapiens
tatttaataatatct

SEQ ID NO: 790680 - DNA, 15 bp, Homo sapiens
atttaataatatcta

SEQ ID NO: 790681 - DNA, 15 bp, Homo sapiens
tttaataatatctac

SEQ ID NO: 790682 - DNA, 15 bp, Homo sapiens
ttaataatatctact

SEQ ID NO: 790683 - DNA, 15 bp, Homo sapiens
taataatatctacta

SEQ ID NO: 790684 - DNA, 15 bp, Homo sapiens
aataatatctactac

SEQ ID NO: 790685 - DNA, 15 bp, Homo sapiens
ataatatctactaca

SEQ ID NO: 790686 - DNA, 15 bp, Homo sapiens
taatatctactacag

SEQ ID NO: 790687 - DNA, 15 bp, Homo sapiens
aatatctactacaga

SEQ ID NO: 790688 - DNA, 15 bp, Homo sapiens
atatctactacagat

SEQ ID NO: 790689 - DNA, 15 bp, Homo sapiens
tatctactacagata

SEQ ID NO: 790690 - DNA, 15 bp, Homo sapiens
atctactacagataa

SEQ ID NO: 790691 - DNA, 15 bp, Homo sapiens
tctactacagataag

SEQ ID NO: 790692 - DNA, 15 bp, Homo sapiens
ctactacagataagt

SEQ ID NO: 790693 - DNA, 15 bp, Homo sapiens
tactacagataagtc

SEQ ID NO: 790694 - DNA, 15 bp, Homo sapiens
actacagataagtca

SEQ ID NO: 790695 - DNA, 15 bp, Homo sapiens
ctacagataagtcag

SEQ ID NO: 790696 - DNA, 15 bp, Homo sapiens
tacagataagtcagt

SEQ ID NO: 790697 - DNA, 15 bp, Homo sapiens
acagataagtcagtg

SEQ ID NO: 790698 - DNA, 15 bp, Homo sapiens
cagataagtcagtga

SEQ ID NO: 790699 - DNA, 15 bp, Homo sapiens
agataagtcagtgaa

SEQ ID NO: 790700 - DNA, 15 bp, Homo sapiens
gataagtcagtgaat

SEQ ID NO: 790701 - DNA, 15 bp, Homo sapiens
ataagtcagtgaatc

SEQ ID NO: 790702 - DNA, 15 bp, Homo sapiens
taagtcagtgaatcc

SEQ ID NO: 790703 - DNA, 15 bp, Homo sapiens
aagtcagtgaatccc

SEQ ID NO: 790704 - DNA, 15 bp, Homo sapiens
agtcagtgaatccca

SEQ ID NO: 790705 - DNA, 15 bp, Homo sapiens
gtcagtgaatcccac

SEQ ID NO: 790706 - DNA, 15 bp, Homo sapiens
tcagtgaatcccact

SEQ ID NO: 790707 - DNA, 15 bp, Homo sapiens
cagtgaatcccactc

SEQ ID NO: 790708 - DNA, 15 bp, Homo sapiens
agtgaatcccactct

SEQ ID NO: 790709 - DNA, 15 bp, Homo sapiens
gtgaatcccactctt

SEQ ID NO: 790710 - DNA, 15 bp, Homo sapiens
tgaatcccactcttt

SEQ ID NO: 790711 - DNA, 15 bp, Homo sapiens
gaatcccactcttta

SEQ ID NO: 790712 - DNA, 15 bp, Homo sapiens
aatcccactctttac

SEQ ID NO: 790713 - DNA, 15 bp, Homo sapiens
atcccactctttacc

SEQ ID NO: 790714 - DNA, 15 bp, Homo sapiens
tcccactctttacca

SEQ ID NO: 790715 - DNA, 15 bp, Homo sapiens
tcatttggccttcca

SEQ ID NO: 790716 - DNA, 15 bp, Homo sapiens
catttggccttccaa

SEQ ID NO: 790717 - DNA, 15 bp, Homo sapiens
atttggccttccaac

SEQ ID NO: 790718 - DNA, 15 bp, Homo sapiens
tttggccttccaact

SEQ ID NO: 790719 - DNA, 15 bp, Homo sapiens
ttggccttccaactt

SEQ ID NO: 790720 - DNA, 15 bp, Homo sapiens
tggccttccaactta

SEQ ID NO: 790721 - DNA, 15 bp, Homo sapiens
ggccttccaacttag

SEQ ID NO: 790722 - DNA, 15 bp, Homo sapiens
gccttccaacttagt

SEQ ID NO: 790723 - DNA, 15 bp, Homo sapiens
ccttccaacttagtt

SEQ ID NO: 790724 - DNA, 15 bp, Homo sapiens
cttccaacttagttg

SEQ ID NO: 790725 - DNA, 15 bp, Homo sapiens
ttccaacttagttgg

SEQ ID NO: 790726 - DNA, 15 bp, Homo sapiens
tccaacttagttggg

SEQ ID NO: 790727 - DNA, 15 bp, Homo sapiens
ccaacttagttggga

SEQ ID NO: 790728 - DNA, 15 bp, Homo sapiens
caacttagttgggat

SEQ ID NO: 790729 - DNA, 15 bp, Homo sapiens
aacttagttgggatg

SEQ ID NO: 790730 - DNA, 15 bp, Homo sapiens
acttagttgggatga

SEQ ID NO: 790731 - DNA, 15 bp, Homo sapiens
cttagttgggatgat

SEQ ID NO: 790732 - DNA, 15 bp, Homo sapiens
ttagttgggatgatg

SEQ ID NO: 790733 - DNA, 15 bp, Homo sapiens
tagttgggatgatgg

SEQ ID NO: 790734 - DNA, 15 bp, Homo sapiens
agttgggatgatggt

SEQ ID NO: 790735 - DNA, 15 bp, Homo sapiens
gttgggatgatggtg

SEQ ID NO: 790736 - DNA, 15 bp, Homo sapiens
ttgggatgatggtgg

SEQ ID NO: 790737 - DNA, 15 bp, Homo sapiens
gggatgatggtggct

SEQ ID NO: 790738 - DNA, 15 bp, Homo sapiens
ggatgatggtggctg

SEQ ID NO: 790739 - DNA, 15 bp, Homo sapiens
gatgatggtggctgt

SEQ ID NO: 790740 - DNA, 15 bp, Homo sapiens
atgatggtggctgtc

SEQ ID NO: 790741 - DNA, 15 bp, Homo sapiens
tgatggtggctgtca

SEQ ID NO: 790742 - DNA, 15 bp, Homo sapiens
gatggtggctgtcac

SEQ ID NO: 790743 - DNA, 15 bp, Homo sapiens
atggtggctgtcact

SEQ ID NO: 790744 - DNA, 15 bp, Homo sapiens
tggtggctgtcactt

SEQ ID NO: 790745 - DNA, 15 bp, Homo sapiens
ggtggctgtcacttt

SEQ ID NO: 790746 - DNA, 15 bp, Homo sapiens
gtggctgtcacttta

SEQ ID NO: 790747 - DNA, 15 bp, Homo sapiens
tggctgtcactttat

SEQ ID NO: 790748 - DNA, 15 bp, Homo sapiens
ggctgtcactttatc

SEQ ID NO: 790749 - DNA, 15 bp, Homo sapiens
gctgtcactttatct

SEQ ID NO: 790750 - DNA, 15 bp, Homo sapiens
ctgtcactttatctc

SEQ ID NO: 790751 - DNA, 15 bp, Homo sapiens
tgtcactttatctct

SEQ ID NO: 790752 - DNA, 15 bp, Homo sapiens
gtcactttatctctt

SEQ ID NO: 790753 - DNA, 15 bp, Homo sapiens
tcactttatctcttt

SEQ ID NO: 790754 - DNA, 15 bp, Homo sapiens
cactttatctctttg

SEQ ID NO: 790755 - DNA, 15 bp, Homo sapiens
actttatctctttgg

SEQ ID NO: 790756 - DNA, 15 bp, Homo sapiens
ctttatctctttggc

SEQ ID NO: 790757 - DNA, 15 bp, Homo sapiens
tttatctctttggcc

SEQ ID NO: 790758 - DNA, 15 bp, Homo sapiens
ttatctctttggcct

SEQ ID NO: 790759 - DNA, 15 bp, Homo sapiens
tatctctttggcctc

SEQ ID NO: 790760 - DNA, 15 bp, Homo sapiens
atctctttggcctca

SEQ ID NO: 790761 - DNA, 15 bp, Homo sapiens
tctctttggcctcaa

SEQ ID NO: 790762 - DNA, 15 bp, Homo sapiens
ctctttggcctcaat

SEQ ID NO: 790763 - DNA, 15 bp, Homo sapiens
tctttggcctcaatt

SEQ ID NO: 790764 - DNA, 15 bp, Homo sapiens
ctttggcctcaattg

SEQ ID NO: 790765 - DNA, 15 bp, Homo sapiens
tttggcctcaattgt

SEQ ID NO: 790766 - DNA, 15 bp, Homo sapiens
ttggcctcaattgtt

SEQ ID NO: 790767 - DNA, 15 bp, Homo sapiens
tggcctcaattgttt

SEQ ID NO: 790768 - DNA, 15 bp, Homo sapiens
ggcctcaattgtttc

SEQ ID NO: 790769 - DNA, 15 bp, Homo sapiens
gcctcaattgtttca

SEQ ID NO: 790770 - DNA, 15 bp, Homo sapiens
cctcaattgtttcat

SEQ ID NO: 790771 - DNA, 15 bp, Homo sapiens
ctcaattgtttcatc

SEQ ID NO: 790772 - DNA, 15 bp, Homo sapiens
tcaattgtttcatct

SEQ ID NO: 790773 - DNA, 15 bp, Homo sapiens
caattgtttcatctg

SEQ ID NO: 790774 - DNA, 15 bp, Homo sapiens
aattgtttcatctgt

SEQ ID NO: 790775 - DNA, 15 bp, Homo sapiens
attgtttcatctgta

SEQ ID NO: 790776 - DNA, 15 bp, Homo sapiens
ttgtttcatctgtaa

SEQ ID NO: 790777 - DNA, 15 bp, Homo sapiens
tgtttcatctgtaaa

SEQ ID NO: 790778 - DNA, 15 bp, Homo sapiens
gtttcatctgtaaaa

SEQ ID NO: 790779 - DNA, 15 bp, Homo sapiens
tttcatctgtaaaat

SEQ ID NO: 790780 - DNA, 15 bp, Homo sapiens
ttcatctgtaaaata

SEQ ID NO: 790781 - DNA, 15 bp, Homo sapiens
tcatctgtaaaatat

SEQ ID NO: 790782 - DNA, 15 bp, Homo sapiens
catctgtaaaatatt

SEQ ID NO: 790783 - DNA, 15 bp, Homo sapiens
atctgtaaaatattg

SEQ ID NO: 790784 - DNA, 15 bp, Homo sapiens
tctgtaaaatattga

SEQ ID NO: 790785 - DNA, 15 bp, Homo sapiens
ctgtaaaatattgat

SEQ ID NO: 790786 - DNA, 15 bp, Homo sapiens
tgtaaaatattgata

SEQ ID NO: 790787 - DNA, 15 bp, Homo sapiens
gtaaaatattgatac

SEQ ID NO: 790788 - DNA, 15 bp, Homo sapiens
taaaatattgataca

SEQ ID NO: 790789 - DNA, 15 bp, Homo sapiens
aaaatattgatacaa

SEQ ID NO: 790790 - DNA, 15 bp, Homo sapiens
aaatattgatacaag

SEQ ID NO: 790791 - DNA, 15 bp, Homo sapiens
aatattgatacaagt

SEQ ID NO: 790792 - DNA, 15 bp, Homo sapiens
atattgatacaagta

SEQ ID NO: 790793 - DNA, 15 bp, Homo sapiens
tattgatacaagtaa

SEQ ID NO: 790794 - DNA, 15 bp, Homo sapiens
attgatacaagtaat

SEQ ID NO: 790795 - DNA, 15 bp, Homo sapiens
ttgatacaagtaatg

SEQ ID NO: 790796 - DNA, 15 bp, Homo sapiens
tgatacaagtaatgt

SEQ ID NO: 790797 - DNA, 15 bp, Homo sapiens
gatacaagtaatgtc

SEQ ID NO: 790798 - DNA, 15 bp, Homo sapiens
atacaagtaatgtcc

SEQ ID NO: 790799 - DNA, 15 bp, Homo sapiens
tacaagtaatgtcca

SEQ ID NO: 790800 - DNA, 15 bp, Homo sapiens
acaagtaatgtccac

SEQ ID NO: 790801 - DNA, 15 bp, Homo sapiens
caagtaatgtccaca

SEQ ID NO: 790802 - DNA, 15 bp, Homo sapiens
aagtaatgtccacat

SEQ ID NO: 790803 - DNA, 15 bp, Homo sapiens
agtaatgtccacatt

SEQ ID NO: 790804 - DNA, 15 bp, Homo sapiens
gtaatgtccacatta

SEQ ID NO: 790805 - DNA, 15 bp, Homo sapiens
taatgtccacattat

SEQ ID NO: 790806 - DNA, 15 bp, Homo sapiens
aatgtccacattata

SEQ ID NO: 790807 - DNA, 15 bp, Homo sapiens
atgtccacattatag

SEQ ID NO: 790808 - DNA, 15 bp, Homo sapiens
tgtccacattatagg

SEQ ID NO: 790809 - DNA, 15 bp, Homo sapiens
gtccacattataggt

SEQ ID NO: 790810 - DNA, 15 bp, Homo sapiens
tccacattataggtt

SEQ ID NO: 790811 - DNA, 15 bp, Homo sapiens
ccacattataggttg

SEQ ID NO: 790812 - DNA, 15 bp, Homo sapiens
cacattataggttgt

SEQ ID NO: 790813 - DNA, 15 bp, Homo sapiens
acattataggttgtt

SEQ ID NO: 790814 - DNA, 15 bp, Homo sapiens
cattataggttgttg

SEQ ID NO: 790815 - DNA, 15 bp, Homo sapiens
attataggttgttgt

SEQ ID NO: 790816 - DNA, 15 bp, Homo sapiens
ttataggttgttgta

SEQ ID NO: 790817 - DNA, 15 bp, Homo sapiens
tataggttgttgtaa

SEQ ID NO: 790818 - DNA, 15 bp, Homo sapiens
ataggttgttgtaag

SEQ ID NO: 790819 - DNA, 15 bp, Homo sapiens
taggttgttgtaagg

SEQ ID NO: 790820 - DNA, 15 bp, Homo sapiens
aggttgttgtaagga

SEQ ID NO: 790821 - DNA, 15 bp, Homo sapiens
ggttgttgtaaggat

SEQ ID NO: 790822 - DNA, 15 bp, Homo sapiens
gttgttgtaaggatt

SEQ ID NO: 790823 - DNA, 15 bp, Homo sapiens
ttgttgtaaggatta

SEQ ID NO: 790824 - DNA, 15 bp, Homo sapiens
tgttgtaaggattaa

SEQ ID NO: 790825 - DNA, 15 bp, Homo sapiens
gttgtaaggattaat

SEQ ID NO: 790826 - DNA, 15 bp, Homo sapiens
ttgtaaggattaatc

SEQ ID NO: 790827 - DNA, 15 bp, Homo sapiens
tgtaaggattaatcc

SEQ ID NO: 790828 - DNA, 15 bp, Homo sapiens
gtaaggattaatcct

SEQ ID NO: 790829 - DNA, 15 bp, Homo sapiens
taaggattaatcctc

SEQ ID NO: 790830 - DNA, 15 bp, Homo sapiens
aaggattaatcctca

SEQ ID NO: 790831 - DNA, 15 bp, Homo sapiens
aggattaatcctcat

SEQ ID NO: 790832 - DNA, 15 bp, Homo sapiens
ggattaatcctcatt

SEQ ID NO: 790833 - DNA, 15 bp, Homo sapiens
gattaatcctcattt

SEQ ID NO: 790834 - DNA, 15 bp, Homo sapiens
attaatcctcattta

SEQ ID NO: 790835 - DNA, 15 bp, Homo sapiens
ttaatcctcatttaa

SEQ ID NO: 790836 - DNA, 15 bp, Homo sapiens
taatcctcatttaac

SEQ ID NO: 790837 - DNA, 15 bp, Homo sapiens
aatcctcatttaact

SEQ ID NO: 790838 - DNA, 15 bp, Homo sapiens
atcctcatttaactc

SEQ ID NO: 790839 - DNA, 15 bp, Homo sapiens
tcctcatttaactca

SEQ ID NO: 790840 - DNA, 15 bp, Homo sapiens
cctcatttaactcat

SEQ ID NO: 790841 - DNA, 15 bp, Homo sapiens
ctcatttaactcatt

SEQ ID NO: 790842 - DNA, 15 bp, Homo sapiens
tcatttaactcattt

SEQ ID NO: 790843 - DNA, 15 bp, Homo sapiens
catttaactcattta

SEQ ID NO: 790844 - DNA, 15 bp, Homo sapiens
atttaactcatttac

SEQ ID NO: 790845 - DNA, 15 bp, Homo sapiens
tttaactcatttaca

SEQ ID NO: 790846 - DNA, 15 bp, Homo sapiens
ttaactcatttacaa

SEQ ID NO: 790847 - DNA, 15 bp, Homo sapiens
taactcatttacaaa

SEQ ID NO: 790848 - DNA, 15 bp, Homo sapiens
aactcatttacaaat

SEQ ID NO: 790849 - DNA, 15 bp, Homo sapiens
actcatttacaaatt

SEQ ID NO: 790850 - DNA, 15 bp, Homo sapiens
ctcatttacaaattt

SEQ ID NO: 790851 - DNA, 15 bp, Homo sapiens
tcatttacaaatttt

SEQ ID NO: 790852 - DNA, 15 bp, Homo sapiens
catttacaaatttta

SEQ ID NO: 790853 - DNA, 15 bp, Homo sapiens
atttacaaattttat

SEQ ID NO: 790854 - DNA, 15 bp, Homo sapiens
tttacaaattttatg

SEQ ID NO: 790855 - DNA, 15 bp, Homo sapiens
ttacaaattttatgc

SEQ ID NO: 790856 - DNA, 15 bp, Homo sapiens
tacaaattttatgca

SEQ ID NO: 790857 - DNA, 15 bp, Homo sapiens
acaaattttatgcat

SEQ ID NO: 790858 - DNA, 15 bp, Homo sapiens
caaattttatgcatt

SEQ ID NO: 790859 - DNA, 15 bp, Homo sapiens
aaattttatgcatta

SEQ ID NO: 790860 - DNA, 15 bp, Homo sapiens
aattttatgcattat

SEQ ID NO: 790861 - DNA, 15 bp, Homo sapiens
attttatgcattata

SEQ ID NO: 790862 - DNA, 15 bp, Homo sapiens
ttttatgcattatat

SEQ ID NO: 790863 - DNA, 15 bp, Homo sapiens
tttatgcattatata

SEQ ID NO: 790864 - DNA, 15 bp, Homo sapiens
ttatgcattatatat

SEQ ID NO: 790865 - DNA, 15 bp, Homo sapiens
tatgcattatatatg

SEQ ID NO: 790866 - DNA, 15 bp, Homo sapiens
atgcattatatatgt

SEQ ID NO: 790867 - DNA, 15 bp, Homo sapiens
tgcattatatatgta

SEQ ID NO: 790868 - DNA, 15 bp, Homo sapiens
gcattatatatgtat

SEQ ID NO: 790869 - DNA, 15 bp, Homo sapiens
atatatgtatatatt

SEQ ID NO: 790870 - DNA, 15 bp, Homo sapiens
tatatgtatatatta

SEQ ID NO: 790871 - DNA, 15 bp, Homo sapiens
atatgtatatattat

SEQ ID NO: 790872 - DNA, 15 bp, Homo sapiens
tatgtatatattata

SEQ ID NO: 790873 - DNA, 15 bp, Homo sapiens
atgtatatattatat

SEQ ID NO: 790874 - DNA, 15 bp, Homo sapiens
tgtatatattatata

SEQ ID NO: 790875 - DNA, 15 bp, Homo sapiens
gtatatattatatat

SEQ ID NO: 790876 - DNA, 15 bp, Homo sapiens
tatatattatatata

SEQ ID NO: 790877 - DNA, 15 bp, Homo sapiens
atatattatatatac

SEQ ID NO: 790878 - DNA, 15 bp, Homo sapiens
tatattatatatacc

SEQ ID NO: 790879 - DNA, 15 bp, Homo sapiens
atattatatatacct

SEQ ID NO: 790880 - DNA, 15 bp, Homo sapiens
tattatatatacctt

SEQ ID NO: 790881 - DNA, 15 bp, Homo sapiens
attatatataccttc

SEQ ID NO: 790882 - DNA, 15 bp, Homo sapiens
ttatatataccttca

SEQ ID NO: 790883 - DNA, 15 bp, Homo sapiens
tatatataccttcat

SEQ ID NO: 790884 - DNA, 15 bp, Homo sapiens
atatataccttcata

SEQ ID NO: 790885 - DNA, 15 bp, Homo sapiens
tatataccttcatat

SEQ ID NO: 790886 - DNA, 15 bp, Homo sapiens
atataccttcatata

SEQ ID NO: 790887 - DNA, 15 bp, Homo sapiens
tataccttcatatat

SEQ ID NO: 790888 - DNA, 15 bp, Homo sapiens
ataccttcatatata

SEQ ID NO: 790889 - DNA, 15 bp, Homo sapiens
taccttcatatatat

SEQ ID NO: 790890 - DNA, 15 bp, Homo sapiens
accttcatatatatg

SEQ ID NO: 790891 - DNA, 15 bp, Homo sapiens
ccttcatatatatgg

SEQ ID NO: 790892 - DNA, 15 bp, Homo sapiens
cttcatatatatgga

SEQ ID NO: 790893 - DNA, 15 bp, Homo sapiens
ttcatatatatggaa

SEQ ID NO: 790894 - DNA, 15 bp, Homo sapiens
tcatatatatggaaa

SEQ ID NO: 790895 - DNA, 15 bp, Homo sapiens
catatatatggaaaa

SEQ ID NO: 790896 - DNA, 15 bp, Homo sapiens
atatatatggaaaac

SEQ ID NO: 790897 - DNA, 15 bp, Homo sapiens
tatatatggaaaaca

SEQ ID NO: 790898 - DNA, 15 bp, Homo sapiens
atatatggaaaacac

SEQ ID NO: 790899 - DNA, 15 bp, Homo sapiens
tatatggaaaacact

SEQ ID NO: 790900 - DNA, 15 bp, Homo sapiens
atatggaaaacactt

SEQ ID NO: 790901 - DNA, 15 bp, Homo sapiens
tatggaaaacacttg

SEQ ID NO: 790902 - DNA, 15 bp, Homo sapiens
atggaaaacacttgt

SEQ ID NO: 790903 - DNA, 15 bp, Homo sapiens
tggaaaacacttgta

SEQ ID NO: 790904 - DNA, 15 bp, Homo sapiens
ggaaaacacttgtaa

SEQ ID NO: 790905 - DNA, 15 bp, Homo sapiens
gaaaacacttgtaac

SEQ ID NO: 790906 - DNA, 15 bp, Homo sapiens
aaaacacttgtaaca

SEQ ID NO: 790907 - DNA, 15 bp, Homo sapiens
aaacacttgtaacag

SEQ ID NO: 790908 - DNA, 15 bp, Homo sapiens
aacacttgtaacagc

SEQ ID NO: 790909 - DNA, 15 bp, Homo sapiens
acacttgtaacagca

SEQ ID NO: 790910 - DNA, 15 bp, Homo sapiens
cacttgtaacagcat

SEQ ID NO: 790911 - DNA, 15 bp, Homo sapiens
acttgtaacagcatc

SEQ ID NO: 790912 - DNA, 15 bp, Homo sapiens
cttgtaacagcatct

SEQ ID NO: 790913 - DNA, 15 bp, Homo sapiens
ttgtaacagcatcta

SEQ ID NO: 790914 - DNA, 15 bp, Homo sapiens
tgtaacagcatctag

SEQ ID NO: 790915 - DNA, 15 bp, Homo sapiens
gtaacagcatctagt

SEQ ID NO: 790916 - DNA, 15 bp, Homo sapiens
taacagcatctagta

SEQ ID NO: 790917 - DNA, 15 bp, Homo sapiens
aacagcatctagtaa

SEQ ID NO: 790918 - DNA, 15 bp, Homo sapiens
acagcatctagtaag

SEQ ID NO: 790919 - DNA, 15 bp, Homo sapiens
cagcatctagtaagc

SEQ ID NO: 790920 - DNA, 15 bp, Homo sapiens
agcatctagtaagca

SEQ ID NO: 790921 - DNA, 15 bp, Homo sapiens
gcatctagtaagcac

SEQ ID NO: 790922 - DNA, 15 bp, Homo sapiens
catctagtaagcacg

SEQ ID NO: 790923 - DNA, 15 bp, Homo sapiens
atctagtaagcacga

SEQ ID NO: 790924 - DNA, 15 bp, Homo sapiens
tctagtaagcacgaa

SEQ ID NO: 790925 - DNA, 15 bp, Homo sapiens
ctagtaagcacgaat

SEQ ID NO: 790926 - DNA, 15 bp, Homo sapiens
tagtaagcacgaatg

SEQ ID NO: 790927 - DNA, 15 bp, Homo sapiens
agtaagcacgaatga

SEQ ID NO: 790928 - DNA, 15 bp, Homo sapiens
gtaagcacgaatgat

SEQ ID NO: 790929 - DNA, 15 bp, Homo sapiens
taagcacgaatgatg

SEQ ID NO: 790930 - DNA, 15 bp, Homo sapiens
aagcacgaatgatgt

SEQ ID NO: 790931 - DNA, 15 bp, Homo sapiens
agcacgaatgatgtg

SEQ ID NO: 790932 - DNA, 15 bp, Homo sapiens
gcacgaatgatgtgg

SEQ ID NO: 790933 - DNA, 15 bp, Homo sapiens
cacgaatgatgtgga

SEQ ID NO: 790934 - DNA, 15 bp, Homo sapiens
acgaatgatgtggat

SEQ ID NO: 790935 - DNA, 15 bp, Homo sapiens
cgaatgatgtggata

SEQ ID NO: 790936 - DNA, 15 bp, Homo sapiens
gaatgatgtggatag

SEQ ID NO: 790937 - DNA, 15 bp, Homo sapiens
aatgatgtggataga

SEQ ID NO: 790938 - DNA, 15 bp, Homo sapiens
atgatgtggatagat

SEQ ID NO: 790939 - DNA, 15 bp, Homo sapiens
tgatgtggatagata

SEQ ID NO: 790940 - DNA, 15 bp, Homo sapiens
gatgtggatagatag

SEQ ID NO: 790941 - DNA, 15 bp, Homo sapiens
atgtggatagataga

SEQ ID NO: 790942 - DNA, 15 bp, Homo sapiens
tgtggatagatagac

SEQ ID NO: 790943 - DNA, 15 bp, Homo sapiens
gtggatagatagaca

SEQ ID NO: 790944 - DNA, 15 bp, Homo sapiens
tggatagatagacat

SEQ ID NO: 790945 - DNA, 15 bp, Homo sapiens
ggatagatagacata

SEQ ID NO: 790946 - DNA, 15 bp, Homo sapiens
gatagatagacatat

SEQ ID NO: 790947 - DNA, 15 bp, Homo sapiens
atagatagacatatc

SEQ ID NO: 790948 - DNA, 15 bp, Homo sapiens
tagatagacatatct

SEQ ID NO: 790949 - DNA, 15 bp, Homo sapiens
agatagacatatctt

SEQ ID NO: 790950 - DNA, 15 bp, Homo sapiens
gatagacatatctta

SEQ ID NO: 790951 - DNA, 15 bp, Homo sapiens
atagacatatcttat

SEQ ID NO: 790952 - DNA, 15 bp, Homo sapiens
tagacatatcttata

SEQ ID NO: 790953 - DNA, 15 bp, Homo sapiens
agacatatcttatag

SEQ ID NO: 790954 - DNA, 15 bp, Homo sapiens
gacatatcttatagg

SEQ ID NO: 790955 - DNA, 15 bp, Homo sapiens
acatatcttataggg

SEQ ID NO: 790956 - DNA, 15 bp, Homo sapiens
catatcttatagggt

SEQ ID NO: 790957 - DNA, 15 bp, Homo sapiens
atatcttatagggtt

SEQ ID NO: 790958 - DNA, 15 bp, Homo sapiens
tatcttatagggttg

SEQ ID NO: 790959 - DNA, 15 bp, Homo sapiens
atcttatagggttgc

SEQ ID NO: 790960 - DNA, 15 bp, Homo sapiens
tcttatagggttgct

SEQ ID NO: 790961 - DNA, 15 bp, Homo sapiens
cttatagggttgctg

SEQ ID NO: 790962 - DNA, 15 bp, Homo sapiens
ttatagggttgctgt

SEQ ID NO: 790963 - DNA, 15 bp, Homo sapiens
tatagggttgctgta

SEQ ID NO: 790964 - DNA, 15 bp, Homo sapiens
atagggttgctgtaa

SEQ ID NO: 790965 - DNA, 15 bp, Homo sapiens
tagggttgctgtaag

SEQ ID NO: 790966 - DNA, 15 bp, Homo sapiens
agggttgctgtaagc

SEQ ID NO: 790967 - DNA, 15 bp, Homo sapiens
gggttgctgtaagcc

SEQ ID NO: 790968 - DNA, 15 bp, Homo sapiens
ggttgctgtaagccc

SEQ ID NO: 790969 - DNA, 15 bp, Homo sapiens
gttgctgtaagccct

SEQ ID NO: 790970 - DNA, 15 bp, Homo sapiens
ttgctgtaagcccta

SEQ ID NO: 790971 - DNA, 15 bp, Homo sapiens
tgctgtaagccctag

SEQ ID NO: 790972 - DNA, 15 bp, Homo sapiens
gctgtaagccctaga

SEQ ID NO: 790973 - DNA, 15 bp, Homo sapiens
ctgtaagccctagag

SEQ ID NO: 790974 - DNA, 15 bp, Homo sapiens
tgtaagccctagaga

SEQ ID NO: 790975 - DNA, 15 bp, Homo sapiens
gtaagccctagagac

SEQ ID NO: 790976 - DNA, 15 bp, Homo sapiens
taagccctagagact

SEQ ID NO: 790977 - DNA, 15 bp, Homo sapiens
aagccctagagactt

SEQ ID NO: 790978 - DNA, 15 bp, Homo sapiens
agccctagagacttt

SEQ ID NO: 790979 - DNA, 15 bp, Homo sapiens
gccctagagactttg

SEQ ID NO: 790980 - DNA, 15 bp, Homo sapiens
ccctagagactttgc

SEQ ID NO: 790981 - DNA, 15 bp, Homo sapiens
cctagagactttgca

SEQ ID NO: 790982 - DNA, 15 bp, Homo sapiens
ctagagactttgcat

SEQ ID NO: 790983 - DNA, 15 bp, Homo sapiens
tagagactttgcata

SEQ ID NO: 790984 - DNA, 15 bp, Homo sapiens
agagactttgcatat

SEQ ID NO: 790985 - DNA, 15 bp, Homo sapiens
gagactttgcatata

SEQ ID NO: 790986 - DNA, 15 bp, Homo sapiens
agactttgcatatat

SEQ ID NO: 790987 - DNA, 15 bp, Homo sapiens
gactttgcatatata

SEQ ID NO: 790988 - DNA, 15 bp, Homo sapiens
actttgcatatatat

SEQ ID NO: 790989 - DNA, 15 bp, Homo sapiens
ctttgcatatatatt

SEQ ID NO: 790990 - DNA, 15 bp, Homo sapiens
tttgcatatatattg

SEQ ID NO: 790991 - DNA, 15 bp, Homo sapiens
ttgcatatatattgt

SEQ ID NO: 790992 - DNA, 15 bp, Homo sapiens
tgcatatatattgtc

SEQ ID NO: 790993 - DNA, 15 bp, Homo sapiens
gcatatatattgtct

SEQ ID NO: 790994 - DNA, 15 bp, Homo sapiens
catatatattgtctg

SEQ ID NO: 790995 - DNA, 15 bp, Homo sapiens
atatatattgtctgg

SEQ ID NO: 790996 - DNA, 15 bp, Homo sapiens
tatatattgtctggc

SEQ ID NO: 790997 - DNA, 15 bp, Homo sapiens
atatattgtctggca

SEQ ID NO: 790998 - DNA, 15 bp, Homo sapiens
tatattgtctggcaa

SEQ ID NO: 790999 - DNA, 15 bp, Homo sapiens
atattgtctggcaat

SEQ ID NO: 791000 - DNA, 15 bp, Homo sapiens
tattgtctggcaata

SEQ ID NO: 791001 - DNA, 15 bp, Homo sapiens
attgtctggcaatag

SEQ ID NO: 791002 - DNA, 15 bp, Homo sapiens
ttgtctggcaatagc

SEQ ID NO: 791003 - DNA, 15 bp, Homo sapiens
tgtctggcaatagca

SEQ ID NO: 791004 - DNA, 15 bp, Homo sapiens
gtctggcaatagcag

SEQ ID NO: 791005 - DNA, 15 bp, Homo sapiens
tctggcaatagcaga

SEQ ID NO: 791006 - DNA, 15 bp, Homo sapiens
ctggcaatagcagac

SEQ ID NO: 791007 - DNA, 15 bp, Homo sapiens
tggcaatagcagaca

SEQ ID NO: 791008 - DNA, 15 bp, Homo sapiens
ggcaatagcagacac

SEQ ID NO: 791009 - DNA, 15 bp, Homo sapiens
gcaatagcagacact

SEQ ID NO: 791010 - DNA, 15 bp, Homo sapiens
caatagcagacactg

SEQ ID NO: 791011 - DNA, 15 bp, Homo sapiens
aatagcagacactga

SEQ ID NO: 791012 - DNA, 15 bp, Homo sapiens
atagcagacactgaa

SEQ ID NO: 791013 - DNA, 15 bp, Homo sapiens
tagcagacactgaat

SEQ ID NO: 791014 - DNA, 15 bp, Homo sapiens
agcagacactgaata

SEQ ID NO: 791015 - DNA, 15 bp, Homo sapiens
gcagacactgaataa

SEQ ID NO: 791016 - DNA, 15 bp, Homo sapiens
cagacactgaataaa

SEQ ID NO: 791017 - DNA, 15 bp, Homo sapiens
agacactgaataaat

SEQ ID NO: 791018 - DNA, 15 bp, Homo sapiens
gacactgaataaatc

SEQ ID NO: 791019 - DNA, 15 bp, Homo sapiens
acactgaataaatct

SEQ ID NO: 791020 - DNA, 15 bp, Homo sapiens
cactgaataaatctt

SEQ ID NO: 791021 - DNA, 15 bp, Homo sapiens
actgaataaatctta

SEQ ID NO: 791022 - DNA, 15 bp, Homo sapiens
ctgaataaatcttag

SEQ ID NO: 791023 - DNA, 15 bp, Homo sapiens
tgaataaatcttagc

SEQ ID NO: 791024 - DNA, 15 bp, Homo sapiens
gaataaatcttagct

SEQ ID NO: 791025 - DNA, 15 bp, Homo sapiens
aataaatcttagcta

SEQ ID NO: 791026 - DNA, 15 bp, Homo sapiens
ataaatcttagctat

SEQ ID NO: 791027 - DNA, 15 bp, Homo sapiens
taaatcttagctatt

SEQ ID NO: 791028 - DNA, 15 bp, Homo sapiens
aaatcttagctatta

SEQ ID NO: 791029 - DNA, 15 bp, Homo sapiens
aatcttagctattat

SEQ ID NO: 791030 - DNA, 15 bp, Homo sapiens
atcttagctattatt

SEQ ID NO: 791031 - DNA, 15 bp, Homo sapiens
tcttagctattatta

SEQ ID NO: 791032 - DNA, 15 bp, Homo sapiens
cttagctattattaa

SEQ ID NO: 791033 - DNA, 15 bp, Homo sapiens
ttagctattattaat

SEQ ID NO: 791034 - DNA, 15 bp, Homo sapiens
tagctattattaata

SEQ ID NO: 791035 - DNA, 15 bp, Homo sapiens
agctattattaataa

SEQ ID NO: 791036 - DNA, 15 bp, Homo sapiens
gctattattaataat

SEQ ID NO: 791037 - DNA, 15 bp, Homo sapiens
ctattattaataatt

SEQ ID NO: 791038 - DNA, 15 bp, Homo sapiens
tattattaataatta

SEQ ID NO: 791039 - DNA, 15 bp, Homo sapiens
attattaataattat

SEQ ID NO: 791040 - DNA, 15 bp, Homo sapiens
ttattaataattatt

SEQ ID NO: 791041 - DNA, 15 bp, Homo sapiens
tattaataattatta

SEQ ID NO: 791042 - DNA, 15 bp, Homo sapiens
attaataattattat

SEQ ID NO: 791043 - DNA, 15 bp, Homo sapiens
ttaataattattatg

SEQ ID NO: 791044 - DNA, 15 bp, Homo sapiens
taataattattatgt

SEQ ID NO: 791045 - DNA, 15 bp, Homo sapiens
aataattattatgtt

SEQ ID NO: 791046 - DNA, 15 bp, Homo sapiens
ataattattatgttg

SEQ ID NO: 791047 - DNA, 15 bp, Homo sapiens
taattattatgttga

SEQ ID NO: 791048 - DNA, 15 bp, Homo sapiens
aattattatgttgat

SEQ ID NO: 791049 - DNA, 15 bp, Homo sapiens
attattatgttgatt

SEQ ID NO: 791050 - DNA, 15 bp, Homo sapiens
ttattatgttgattg

SEQ ID NO: 791051 - DNA, 15 bp, Homo sapiens
tattatgttgattga

SEQ ID NO: 791052 - DNA, 15 bp, Homo sapiens
attatgttgattgaa

SEQ ID NO: 791053 - DNA, 15 bp, Homo sapiens
ttatgttgattgaac

SEQ ID NO: 791054 - DNA, 15 bp, Homo sapiens
tatgttgattgaact

SEQ ID NO: 791055 - DNA, 15 bp, Homo sapiens
atgttgattgaactg

SEQ ID NO: 791056 - DNA, 15 bp, Homo sapiens
tgttgattgaactgt

SEQ ID NO: 791057 - DNA, 15 bp, Homo sapiens
gttgattgaactgtt

SEQ ID NO: 791058 - DNA, 15 bp, Homo sapiens
ttgattgaactgttt

SEQ ID NO: 791059 - DNA, 15 bp, Homo sapiens
tgattgaactgttta

SEQ ID NO: 791060 - DNA, 15 bp, Homo sapiens
gattgaactgtttaa

SEQ ID NO: 791061 - DNA, 15 bp, Homo sapiens
attgaactgtttaat

SEQ ID NO: 791062 - DNA, 15 bp, Homo sapiens
ttgaactgtttaata

SEQ ID NO: 791063 - DNA, 15 bp, Homo sapiens
tgaactgtttaataa

SEQ ID NO: 791064 - DNA, 15 bp, Homo sapiens
gaactgtttaataat

SEQ ID NO: 791065 - DNA, 15 bp, Homo sapiens
aactgtttaataata

SEQ ID NO: 791066 - DNA, 15 bp, Homo sapiens
actgtttaataataa

SEQ ID NO: 791067 - DNA, 15 bp, Homo sapiens
ctgtttaataataat

SEQ ID NO: 791068 - DNA, 15 bp, Homo sapiens
tgtttaataataatg

SEQ ID NO: 791069 - DNA, 15 bp, Homo sapiens
gtttaataataatgt

SEQ ID NO: 791070 - DNA, 15 bp, Homo sapiens
tttaataataatgtg

SEQ ID NO: 791071 - DNA, 15 bp, Homo sapiens
ttaataataatgtga

SEQ ID NO: 791072 - DNA, 15 bp, Homo sapiens
taataataatgtgat

SEQ ID NO: 791073 - DNA, 15 bp, Homo sapiens
aataataatgtgatt

SEQ ID NO: 791074 - DNA, 15 bp, Homo sapiens
ataataatgtgattc

SEQ ID NO: 791075 - DNA, 15 bp, Homo sapiens
taataatgtgattca

SEQ ID NO: 791076 - DNA, 15 bp, Homo sapiens
aataatgtgattcat

SEQ ID NO: 791077 - DNA, 15 bp, Homo sapiens
ataatgtgattcatc

SEQ ID NO: 791078 - DNA, 15 bp, Homo sapiens
taatgtgattcatct

SEQ ID NO: 791079 - DNA, 15 bp, Homo sapiens
aatgtgattcatcta

SEQ ID NO: 791080 - DNA, 15 bp, Homo sapiens
atgtgattcatctaa

SEQ ID NO: 791081 - DNA, 15 bp, Homo sapiens
tgtgattcatctaaa

SEQ ID NO: 791082 - DNA, 15 bp, Homo sapiens
gtgattcatctaaat

SEQ ID NO: 791083 - DNA, 15 bp, Homo sapiens
tgattcatctaaata

SEQ ID NO: 791084 - DNA, 15 bp, Homo sapiens
gattcatctaaatag

SEQ ID NO: 791085 - DNA, 15 bp, Homo sapiens
attcatctaaataga

SEQ ID NO: 791086 - DNA, 15 bp, Homo sapiens
ttcatctaaatagag

SEQ ID NO: 791087 - DNA, 15 bp, Homo sapiens
tcatctaaatagagc

SEQ ID NO: 791088 - DNA, 15 bp, Homo sapiens
catctaaatagagct

SEQ ID NO: 791089 - DNA, 15 bp, Homo sapiens
atctaaatagagctt

SEQ ID NO: 791090 - DNA, 15 bp, Homo sapiens
tctaaatagagcttt

SEQ ID NO: 791091 - DNA, 15 bp, Homo sapiens
ctaaatagagcttta

SEQ ID NO: 791092 - DNA, 15 bp, Homo sapiens
taaatagagctttat

SEQ ID NO: 791093 - DNA, 15 bp, Homo sapiens
aaatagagctttata

SEQ ID NO: 791094 - DNA, 15 bp, Homo sapiens
aatagagctttatag

SEQ ID NO: 791095 - DNA, 15 bp, Homo sapiens
atagagctttatagt

SEQ ID NO: 791096 - DNA, 15 bp, Homo sapiens
tagagctttatagtt

SEQ ID NO: 791097 - DNA, 15 bp, Homo sapiens
agagctttatagttt

SEQ ID NO: 791098 - DNA, 15 bp, Homo sapiens
gagctttatagtttc

SEQ ID NO: 791099 - DNA, 15 bp, Homo sapiens
agctttatagtttct

SEQ ID NO: 791100 - DNA, 15 bp, Homo sapiens
gctttatagtttctg

SEQ ID NO: 791101 - DNA, 15 bp, Homo sapiens
ctttatagtttctgg

SEQ ID NO: 791102 - DNA, 15 bp, Homo sapiens
tttatagtttctgga

SEQ ID NO: 791103 - DNA, 15 bp, Homo sapiens
ttatagtttctggag

SEQ ID NO: 791104 - DNA, 15 bp, Homo sapiens
tatagtttctggagt

SEQ ID NO: 791105 - DNA, 15 bp, Homo sapiens
atagtttctggagtt

SEQ ID NO: 791106 - DNA, 15 bp, Homo sapiens
tagtttctggagttc

SEQ ID NO: 791107 - DNA, 15 bp, Homo sapiens
agtttctggagttct

SEQ ID NO: 791108 - DNA, 15 bp, Homo sapiens
gtttctggagttctt

SEQ ID NO: 791109 - DNA, 15 bp, Homo sapiens
tttctggagttcttg

SEQ ID NO: 791110 - DNA, 15 bp, Homo sapiens
ttctggagttcttgc

SEQ ID NO: 791111 - DNA, 15 bp, Homo sapiens
tctggagttcttgct

SEQ ID NO: 791112 - DNA, 15 bp, Homo sapiens
ctggagttcttgctg

SEQ ID NO: 791113 - DNA, 15 bp, Homo sapiens
tggagttcttgctgc

SEQ ID NO: 791114 - DNA, 15 bp, Homo sapiens
ggagttcttgctgcc

SEQ ID NO: 791115 - DNA, 15 bp, Homo sapiens
gagttcttgctgcca

SEQ ID NO: 791116 - DNA, 15 bp, Homo sapiens
agttcttgctgccaa

SEQ ID NO: 791117 - DNA, 15 bp, Homo sapiens
gttcttgctgccaat

SEQ ID NO: 791118 - DNA, 15 bp, Homo sapiens
ttcttgctgccaata

SEQ ID NO: 791119 - DNA, 15 bp, Homo sapiens
tcttgctgccaatat

SEQ ID NO: 791120 - DNA, 15 bp, Homo sapiens
cttgctgccaatatg

SEQ ID NO: 791121 - DNA, 15 bp, Homo sapiens
ttgctgccaatatga

SEQ ID NO: 791122 - DNA, 15 bp, Homo sapiens
tgctgccaatatgat

SEQ ID NO: 791123 - DNA, 15 bp, Homo sapiens
gctgccaatatgatc

SEQ ID NO: 791124 - DNA, 15 bp, Homo sapiens
ctgccaatatgatcc

SEQ ID NO: 791125 - DNA, 15 bp, Homo sapiens
tgccaatatgatcct

SEQ ID NO: 791126 - DNA, 15 bp, Homo sapiens
gccaatatgatcctt

SEQ ID NO: 791127 - DNA, 15 bp, Homo sapiens
ccaatatgatccttc

SEQ ID NO: 791128 - DNA, 15 bp, Homo sapiens
caatatgatccttct

SEQ ID NO: 791129 - DNA, 15 bp, Homo sapiens
aatatgatccttctt

SEQ ID NO: 791130 - DNA, 15 bp, Homo sapiens
atatgatccttcttg

SEQ ID NO: 791131 - DNA, 15 bp, Homo sapiens
tatgatccttcttga

SEQ ID NO: 791132 - DNA, 15 bp, Homo sapiens
atgatccttcttgag

SEQ ID NO: 791133 - DNA, 15 bp, Homo sapiens
tgatccttcttgagc

SEQ ID NO: 791134 - DNA, 15 bp, Homo sapiens
gatccttcttgagcc

SEQ ID NO: 791135 - DNA, 15 bp, Homo sapiens
atccttcttgagccc

SEQ ID NO: 791136 - DNA, 15 bp, Homo sapiens
tccttcttgagccct

SEQ ID NO: 791137 - DNA, 15 bp, Homo sapiens
ccttcttgagcccta

SEQ ID NO: 791138 - DNA, 15 bp, Homo sapiens
cttcttgagccctac

SEQ ID NO: 791139 - DNA, 15 bp, Homo sapiens
ttcttgagccctaca

SEQ ID NO: 791140 - DNA, 15 bp, Homo sapiens
tcttgagccctacaa

SEQ ID NO: 791141 - DNA, 15 bp, Homo sapiens
cttgagccctacaac

SEQ ID NO: 791142 - DNA, 15 bp, Homo sapiens
ttgagccctacaacc

SEQ ID NO: 791143 - DNA, 15 bp, Homo sapiens
tgagccctacaacca

SEQ ID NO: 791144 - DNA, 15 bp, Homo sapiens
gagccctacaaccac

SEQ ID NO: 791145 - DNA, 15 bp, Homo sapiens
agccctacaaccact

SEQ ID NO: 791146 - DNA, 15 bp, Homo sapiens
gccctacaaccactc

SEQ ID NO: 791147 - DNA, 15 bp, Homo sapiens
ccctacaaccactca

SEQ ID NO: 791148 - DNA, 15 bp, Homo sapiens
cctacaaccactcag

SEQ ID NO: 791149 - DNA, 15 bp, Homo sapiens
ctacaaccactcagt

SEQ ID NO: 791150 - DNA, 15 bp, Homo sapiens
tacaaccactcagtg

SEQ ID NO: 791151 - DNA, 15 bp, Homo sapiens
acaaccactcagtga

SEQ ID NO: 791152 - DNA, 15 bp, Homo sapiens
caaccactcagtgat

SEQ ID NO: 791153 - DNA, 15 bp, Homo sapiens
aaccactcagtgatg

SEQ ID NO: 791154 - DNA, 15 bp, Homo sapiens
accactcagtgatgg

SEQ ID NO: 791155 - DNA, 15 bp, Homo sapiens
ccactcagtgatggg

SEQ ID NO: 791156 - DNA, 15 bp, Homo sapiens
cactcagtgatgggg

SEQ ID NO: 791157 - DNA, 15 bp, Homo sapiens
actcagtgatggggc

SEQ ID NO: 791158 - DNA, 15 bp, Homo sapiens
ctcagtgatggggct

SEQ ID NO: 791159 - DNA, 15 bp, Homo sapiens
tcagtgatggggctc

SEQ ID NO: 791160 - DNA, 15 bp, Homo sapiens
cagtgatggggctcc

SEQ ID NO: 791161 - DNA, 15 bp, Homo sapiens
agtgatggggctcct

SEQ ID NO: 791162 - DNA, 15 bp, Homo sapiens
gtgatggggctccta

SEQ ID NO: 791163 - DNA, 15 bp, Homo sapiens
tgatggggctcctat

SEQ ID NO: 791164 - DNA, 15 bp, Homo sapiens
gatggggctcctatt

SEQ ID NO: 791165 - DNA, 15 bp, Homo sapiens
atggggctcctattc

SEQ ID NO: 791166 - DNA, 15 bp, Homo sapiens
tggggctcctattcc

SEQ ID NO: 791167 - DNA, 15 bp, Homo sapiens
ggggctcctattcct

SEQ ID NO: 791168 - DNA, 15 bp, Homo sapiens
gggctcctattcctc

SEQ ID NO: 791169 - DNA, 15 bp, Homo sapiens
ggctcctattcctct

SEQ ID NO: 791170 - DNA, 15 bp, Homo sapiens
gctcctattcctctg

SEQ ID NO: 791171 - DNA, 15 bp, Homo sapiens
ctcctattcctctgt

SEQ ID NO: 791172 - DNA, 15 bp, Homo sapiens
tcctattcctctgtc

SEQ ID NO: 791173 - DNA, 15 bp, Homo sapiens
cctattcctctgtcc

SEQ ID NO: 791174 - DNA, 15 bp, Homo sapiens
ctattcctctgtcca

SEQ ID NO: 791175 - DNA, 15 bp, Homo sapiens
tattcctctgtccag

SEQ ID NO: 791176 - DNA, 15 bp, Homo sapiens
attcctctgtccagt

SEQ ID NO: 791177 - DNA, 15 bp, Homo sapiens
ttcctctgtccagtg

SEQ ID NO: 791178 - DNA, 15 bp, Homo sapiens
tcctctgtccagtgg

SEQ ID NO: 791179 - DNA, 15 bp, Homo sapiens
cctctgtccagtggc

SEQ ID NO: 791180 - DNA, 15 bp, Homo sapiens
ctctgtccagtggct

SEQ ID NO: 791181 - DNA, 15 bp, Homo sapiens
tctgtccagtggctc

SEQ ID NO: 791182 - DNA, 15 bp, Homo sapiens
ctgtccagtggctct

SEQ ID NO: 791183 - DNA, 15 bp, Homo sapiens
tgtccagtggctctc

SEQ ID NO: 791184 - DNA, 15 bp, Homo sapiens
gtccagtggctctca

SEQ ID NO: 791185 - DNA, 15 bp, Homo sapiens
tccagtggctctcag

SEQ ID NO: 791186 - DNA, 15 bp, Homo sapiens
ccagtggctctcagg

SEQ ID NO: 791187 - DNA, 15 bp, Homo sapiens
cagtggctctcaggg

SEQ ID NO: 791188 - DNA, 15 bp, Homo sapiens
agtggctctcaggga

SEQ ID NO: 791189 - DNA, 15 bp, Homo sapiens
gtggctctcagggaa

SEQ ID NO: 791190 - DNA, 15 bp, Homo sapiens
tggctctcagggaag

SEQ ID NO: 791191 - DNA, 15 bp, Homo sapiens
ggctctcagggaagg

SEQ ID NO: 791192 - DNA, 15 bp, Homo sapiens
gctctcagggaaggg

SEQ ID NO: 791193 - DNA, 15 bp, Homo sapiens
ctctcagggaagggt

SEQ ID NO: 791194 - DNA, 15 bp, Homo sapiens
tctcagggaagggtt

SEQ ID NO: 791195 - DNA, 15 bp, Homo sapiens
ctcagggaagggttg

SEQ ID NO: 791196 - DNA, 15 bp, Homo sapiens
tcagggaagggttgg

SEQ ID NO: 791197 - DNA, 15 bp, Homo sapiens
cagggaagggttgga

SEQ ID NO: 791198 - DNA, 15 bp, Homo sapiens
agggaagggttggat

SEQ ID NO: 791199 - DNA, 15 bp, Homo sapiens
gggaagggttggatg

SEQ ID NO: 791200 - DNA, 15 bp, Homo sapiens
ggaagggttggatgc

SEQ ID NO: 791201 - DNA, 15 bp, Homo sapiens
gaagggttggatgcc

SEQ ID NO: 791202 - DNA, 15 bp, Homo sapiens
aagggttggatgcct

SEQ ID NO: 791203 - DNA, 15 bp, Homo sapiens
agggttggatgcctc

SEQ ID NO: 791204 - DNA, 15 bp, Homo sapiens
gggttggatgcctct

SEQ ID NO: 791205 - DNA, 15 bp, Homo sapiens
ggttggatgcctctc

SEQ ID NO: 791206 - DNA, 15 bp, Homo sapiens
gttggatgcctctcc

SEQ ID NO: 791207 - DNA, 15 bp, Homo sapiens
ttggatgcctctcca

SEQ ID NO: 791208 - DNA, 15 bp, Homo sapiens
tggatgcctctccag

SEQ ID NO: 791209 - DNA, 15 bp, Homo sapiens
ggatgcctctccagg

SEQ ID NO: 791210 - DNA, 15 bp, Homo sapiens
gatgcctctccaggg

SEQ ID NO: 791211 - DNA, 15 bp, Homo sapiens
atgcctctccagggt

SEQ ID NO: 791212 - DNA, 15 bp, Homo sapiens
tgcctctccagggtc

SEQ ID NO: 791213 - DNA, 15 bp, Homo sapiens
gcctctccagggtct

SEQ ID NO: 791214 - DNA, 15 bp, Homo sapiens
cctctccagggtctc

SEQ ID NO: 791215 - DNA, 15 bp, Homo sapiens
ctctccagggtctcc

SEQ ID NO: 791216 - DNA, 15 bp, Homo sapiens
tctccagggtctcct

SEQ ID NO: 791217 - DNA, 15 bp, Homo sapiens
ctccagggtctcctg

SEQ ID NO: 791218 - DNA, 15 bp, Homo sapiens
tccagggtctcctgg

SEQ ID NO: 791219 - DNA, 15 bp, Homo sapiens
ccagggtctcctggc

SEQ ID NO: 791220 - DNA, 15 bp, Homo sapiens
cagggtctcctggcc

SEQ ID NO: 791221 - DNA, 15 bp, Homo sapiens
agggtctcctggcca

SEQ ID NO: 791222 - DNA, 15 bp, Homo sapiens
gggtctcctggccag

SEQ ID NO: 791223 - DNA, 15 bp, Homo sapiens
ggtctcctggccagg

SEQ ID NO: 791224 - DNA, 15 bp, Homo sapiens
gtctcctggccaggt

SEQ ID NO: 791225 - DNA, 15 bp, Homo sapiens
tctcctggccaggtg

SEQ ID NO: 791226 - DNA, 15 bp, Homo sapiens
ctcctggccaggtgg

SEQ ID NO: 791227 - DNA, 15 bp, Homo sapiens
tcctggccaggtggt

SEQ ID NO: 791228 - DNA, 15 bp, Homo sapiens
cctggccaggtggtc

SEQ ID NO: 791229 - DNA, 15 bp, Homo sapiens
ctggccaggtggtca

SEQ ID NO: 791230 - DNA, 15 bp, Homo sapiens
tggccaggtggtcat

SEQ ID NO: 791231 - DNA, 15 bp, Homo sapiens
ggccaggtggtcatt

SEQ ID NO: 791232 - DNA, 15 bp, Homo sapiens
gccaggtggtcatta

SEQ ID NO: 791233 - DNA, 15 bp, Homo sapiens
ccaggtggtcattag

SEQ ID NO: 791234 - DNA, 15 bp, Homo sapiens
caggtggtcattagc

SEQ ID NO: 791235 - DNA, 15 bp, Homo sapiens
aggtggtcattagca

SEQ ID NO: 791236 - DNA, 15 bp, Homo sapiens
ggtggtcattagcag

SEQ ID NO: 791237 - DNA, 15 bp, Homo sapiens
gtggtcattagcagg

SEQ ID NO: 791238 - DNA, 15 bp, Homo sapiens
tggtcattagcagga

SEQ ID NO: 791239 - DNA, 15 bp, Homo sapiens
ggtcattagcaggac

SEQ ID NO: 791240 - DNA, 15 bp, Homo sapiens
gtcattagcaggacc

SEQ ID NO: 791241 - DNA, 15 bp, Homo sapiens
tcattagcaggacca

SEQ ID NO: 791242 - DNA, 15 bp, Homo sapiens
cattagcaggaccag

SEQ ID NO: 791243 - DNA, 15 bp, Homo sapiens
attagcaggaccagg

SEQ ID NO: 791244 - DNA, 15 bp, Homo sapiens
ttagcaggaccaggg

SEQ ID NO: 791245 - DNA, 15 bp, Homo sapiens
tagcaggaccagggt

SEQ ID NO: 791246 - DNA, 15 bp, Homo sapiens
agcaggaccagggtg

SEQ ID NO: 791247 - DNA, 15 bp, Homo sapiens
gcaggaccagggtgt

SEQ ID NO: 791248 - DNA, 15 bp, Homo sapiens
caggaccagggtgtg

SEQ ID NO: 791249 - DNA, 15 bp, Homo sapiens
aggaccagggtgtga

SEQ ID NO: 791250 - DNA, 15 bp, Homo sapiens
ggaccagggtgtgaa

SEQ ID NO: 791251 - DNA, 15 bp, Homo sapiens
gaccagggtgtgaat

SEQ ID NO: 791252 - DNA, 15 bp, Homo sapiens
accagggtgtgaatc

SEQ ID NO: 791253 - DNA, 15 bp, Homo sapiens
ccagggtgtgaatca

SEQ ID NO: 791254 - DNA, 15 bp, Homo sapiens
cagggtgtgaatcat

SEQ ID NO: 791255 - DNA, 15 bp, Homo sapiens
agggtgtgaatcata

SEQ ID NO: 791256 - DNA, 15 bp, Homo sapiens
gggtgtgaatcatag

SEQ ID NO: 791257 - DNA, 15 bp, Homo sapiens
ggtgtgaatcatagt

SEQ ID NO: 791258 - DNA, 15 bp, Homo sapiens
gtgtgaatcatagtg

SEQ ID NO: 791259 - DNA, 15 bp, Homo sapiens
tgtgaatcatagtga

SEQ ID NO: 791260 - DNA, 15 bp, Homo sapiens
gtgaatcatagtgag

SEQ ID NO: 791261 - DNA, 15 bp, Homo sapiens
tgaatcatagtgagg

SEQ ID NO: 791262 - DNA, 15 bp, Homo sapiens
gaatcatagtgagga

SEQ ID NO: 791263 - DNA, 15 bp, Homo sapiens
aatcatagtgaggag

SEQ ID NO: 791264 - DNA, 15 bp, Homo sapiens
atcatagtgaggagc

SEQ ID NO: 791265 - DNA, 15 bp, Homo sapiens
tcatagtgaggagct

SEQ ID NO: 791266 - DNA, 15 bp, Homo sapiens
catagtgaggagctt

SEQ ID NO: 791267 - DNA, 15 bp, Homo sapiens
atagtgaggagcttc

SEQ ID NO: 791268 - DNA, 15 bp, Homo sapiens
tagtgaggagcttcc

SEQ ID NO: 791269 - DNA, 15 bp, Homo sapiens
agtgaggagcttccc

SEQ ID NO: 791270 - DNA, 15 bp, Homo sapiens
gtgaggagcttccca

SEQ ID NO: 791271 - DNA, 15 bp, Homo sapiens
tgaggagcttcccag

SEQ ID NO: 791272 - DNA, 15 bp, Homo sapiens
gaggagcttcccagt

SEQ ID NO: 791273 - DNA, 15 bp, Homo sapiens
aggagcttcccagtc

SEQ ID NO: 791274 - DNA, 15 bp, Homo sapiens
ggagcttcccagtcc

SEQ ID NO: 791275 - DNA, 15 bp, Homo sapiens
gagcttcccagtcca

SEQ ID NO: 791276 - DNA, 15 bp, Homo sapiens
agcttcccagtccag

SEQ ID NO: 791277 - DNA, 15 bp, Homo sapiens
gcttcccagtccagg

SEQ ID NO: 791278 - DNA, 15 bp, Homo sapiens
cttcccagtccaggg

SEQ ID NO: 791279 - DNA, 15 bp, Homo sapiens
ttcccagtccagggc

SEQ ID NO: 791280 - DNA, 15 bp, Homo sapiens
tcccagtccagggct

SEQ ID NO: 791281 - DNA, 15 bp, Homo sapiens
cccagtccagggctt

SEQ ID NO: 791282 - DNA, 15 bp, Homo sapiens
ccagtccagggcttg

SEQ ID NO: 791283 - DNA, 15 bp, Homo sapiens
cagtccagggcttgt

SEQ ID NO: 791284 - DNA, 15 bp, Homo sapiens
agtccagggcttgtt

SEQ ID NO: 791285 - DNA, 15 bp, Homo sapiens
gtccagggcttgttc

SEQ ID NO: 791286 - DNA, 15 bp, Homo sapiens
tccagggcttgttcc

SEQ ID NO: 791287 - DNA, 15 bp, Homo sapiens
ccagggcttgttcca

SEQ ID NO: 791288 - DNA, 15 bp, Homo sapiens
cagggcttgttccac

SEQ ID NO: 791289 - DNA, 15 bp, Homo sapiens
agggcttgttccaca

SEQ ID NO: 791290 - DNA, 15 bp, Homo sapiens
gggcttgttccacat

SEQ ID NO: 791291 - DNA, 15 bp, Homo sapiens
ggcttgttccacatc

SEQ ID NO: 791292 - DNA, 15 bp, Homo sapiens
gcttgttccacatcc

SEQ ID NO: 791293 - DNA, 15 bp, Homo sapiens
cttgttccacatcct

SEQ ID NO: 791294 - DNA, 15 bp, Homo sapiens
ttgttccacatcctc

SEQ ID NO: 791295 - DNA, 15 bp, Homo sapiens
tgttccacatcctct

SEQ ID NO: 791296 - DNA, 15 bp, Homo sapiens
gttccacatcctctc

SEQ ID NO: 791297 - DNA, 15 bp, Homo sapiens
ttccacatcctctct

SEQ ID NO: 791298 - DNA, 15 bp, Homo sapiens
tccacatcctctctt

SEQ ID NO: 791299 - DNA, 15 bp, Homo sapiens
ccacatcctctcttc

SEQ ID NO: 791300 - DNA, 15 bp, Homo sapiens
cacatcctctcttcc

SEQ ID NO: 791301 - DNA, 15 bp, Homo sapiens
acatcctctcttccc

SEQ ID NO: 791302 - DNA, 15 bp, Homo sapiens
catcctctcttcccc

SEQ ID NO: 791303 - DNA, 15 bp, Homo sapiens
atcctctcttccccc

SEQ ID NO: 791304 - DNA, 15 bp, Homo sapiens
tcctctcttccccca

SEQ ID NO: 791305 - DNA, 15 bp, Homo sapiens
cctctcttcccccat

SEQ ID NO: 791306 - DNA, 15 bp, Homo sapiens
ctctcttcccccatt

SEQ ID NO: 791307 - DNA, 15 bp, Homo sapiens
tctcttcccccattc

SEQ ID NO: 791308 - DNA, 15 bp, Homo sapiens
ctcttcccccattct

SEQ ID NO: 791309 - DNA, 15 bp, Homo sapiens
tcttcccccattcta

SEQ ID NO: 791310 - DNA, 15 bp, Homo sapiens
cttcccccattctaa

SEQ ID NO: 791311 - DNA, 15 bp, Homo sapiens
ttcccccattctaaa

SEQ ID NO: 791312 - DNA, 15 bp, Homo sapiens
tcccccattctaaag

SEQ ID NO: 791313 - DNA, 15 bp, Homo sapiens
cccccattctaaagg

SEQ ID NO: 791314 - DNA, 15 bp, Homo sapiens
ccccattctaaaggc

SEQ ID NO: 791315 - DNA, 15 bp, Homo sapiens
cccattctaaaggcc

SEQ ID NO: 791316 - DNA, 15 bp, Homo sapiens
ccattctaaaggcct

SEQ ID NO: 791317 - DNA, 15 bp, Homo sapiens
cattctaaaggcctc

SEQ ID NO: 791318 - DNA, 15 bp, Homo sapiens
attctaaaggcctcc

SEQ ID NO: 791319 - DNA, 15 bp, Homo sapiens
ttctaaaggcctccc

SEQ ID NO: 791320 - DNA, 15 bp, Homo sapiens
tctaaaggcctccca

SEQ ID NO: 791321 - DNA, 15 bp, Homo sapiens
ctaaaggcctcccag

SEQ ID NO: 791322 - DNA, 15 bp, Homo sapiens
taaaggcctcccagc

SEQ ID NO: 791323 - DNA, 15 bp, Homo sapiens
aaaggcctcccagcc

SEQ ID NO: 791324 - DNA, 15 bp, Homo sapiens
aaggcctcccagcca

SEQ ID NO: 791325 - DNA, 15 bp, Homo sapiens
aggcctcccagccat

SEQ ID NO: 791326 - DNA, 15 bp, Homo sapiens
ggcctcccagccatt

SEQ ID NO: 791327 - DNA, 15 bp, Homo sapiens
gcctcccagccattt

SEQ ID NO: 791328 - DNA, 15 bp, Homo sapiens
cctcccagccatttg

SEQ ID NO: 791329 - DNA, 15 bp, Homo sapiens
ctcccagccatttgt

SEQ ID NO: 791330 - DNA, 15 bp, Homo sapiens
tcccagccatttgtc

SEQ ID NO: 791331 - DNA, 15 bp, Homo sapiens
cccagccatttgtca

SEQ ID NO: 791332 - DNA, 15 bp, Homo sapiens
ccagccatttgtcac

SEQ ID NO: 791333 - DNA, 15 bp, Homo sapiens
cagccatttgtcaca

SEQ ID NO: 791334 - DNA, 15 bp, Homo sapiens
agccatttgtcacag

SEQ ID NO: 791335 - DNA, 15 bp, Homo sapiens
gccatttgtcacagc

SEQ ID NO: 791336 - DNA, 15 bp, Homo sapiens
ccatttgtcacagcc

SEQ ID NO: 791337 - DNA, 15 bp, Homo sapiens
catttgtcacagcct

SEQ ID NO: 791338 - DNA, 15 bp, Homo sapiens
atttgtcacagcctc

SEQ ID NO: 791339 - DNA, 15 bp, Homo sapiens
tttgtcacagcctca

SEQ ID NO: 791340 - DNA, 15 bp, Homo sapiens
ttgtcacagcctcat

SEQ ID NO: 791341 - DNA, 15 bp, Homo sapiens
tgtcacagcctcatt

SEQ ID NO: 791342 - DNA, 15 bp, Homo sapiens
gtcacagcctcattt

SEQ ID NO: 791343 - DNA, 15 bp, Homo sapiens
tcacagcctcatttg

SEQ ID NO: 791344 - DNA, 15 bp, Homo sapiens
cacagcctcatttga

SEQ ID NO: 791345 - DNA, 15 bp, Homo sapiens
acagcctcatttgaa

SEQ ID NO: 791346 - DNA, 15 bp, Homo sapiens
cagcctcatttgaaa

SEQ ID NO: 791347 - DNA, 15 bp, Homo sapiens
agcctcatttgaaat

SEQ ID NO: 791348 - DNA, 15 bp, Homo sapiens
gcctcatttgaaatg

SEQ ID NO: 791349 - DNA, 15 bp, Homo sapiens
cctcatttgaaatgc

SEQ ID NO: 791350 - DNA, 15 bp, Homo sapiens
ctcatttgaaatgcc

SEQ ID NO: 791351 - DNA, 15 bp, Homo sapiens
tcatttgaaatgcct

SEQ ID NO: 791352 - DNA, 15 bp, Homo sapiens
catttgaaatgcctg

SEQ ID NO: 791353 - DNA, 15 bp, Homo sapiens
atttgaaatgcctgt

SEQ ID NO: 791354 - DNA, 15 bp, Homo sapiens
tttgaaatgcctgtg

SEQ ID NO: 791355 - DNA, 15 bp, Homo sapiens
ttgaaatgcctgtgc

SEQ ID NO: 791356 - DNA, 15 bp, Homo sapiens
tgaaatgcctgtgct

SEQ ID NO: 791357 - DNA, 15 bp, Homo sapiens
gaaatgcctgtgctt

SEQ ID NO: 791358 - DNA, 15 bp, Homo sapiens
aaatgcctgtgcttc

SEQ ID NO: 791359 - DNA, 15 bp, Homo sapiens
aatgcctgtgcttct

SEQ ID NO: 791360 - DNA, 15 bp, Homo sapiens
atgcctgtgcttctc

SEQ ID NO: 791361 - DNA, 15 bp, Homo sapiens
tgcctgtgcttctca

SEQ ID NO: 791362 - DNA, 15 bp, Homo sapiens
gcctgtgcttctcat

SEQ ID NO: 791363 - DNA, 15 bp, Homo sapiens
cctgtgcttctcatc

SEQ ID NO: 791364 - DNA, 15 bp, Homo sapiens
ctgtgcttctcatct

SEQ ID NO: 791365 - DNA, 15 bp, Homo sapiens
tgtgcttctcatctg

SEQ ID NO: 791366 - DNA, 15 bp, Homo sapiens
gtgcttctcatctgt

SEQ ID NO: 791367 - DNA, 15 bp, Homo sapiens
tgcttctcatctgta

SEQ ID NO: 791368 - DNA, 15 bp, Homo sapiens
gcttctcatctgtaa

SEQ ID NO: 791369 - DNA, 15 bp, Homo sapiens
cttctcatctgtaat

SEQ ID NO: 791370 - DNA, 15 bp, Homo sapiens
ttctcatctgtaata

SEQ ID NO: 791371 - DNA, 15 bp, Homo sapiens
tctcatctgtaatat

SEQ ID NO: 791372 - DNA, 15 bp, Homo sapiens
ctcatctgtaatatc

SEQ ID NO: 791373 - DNA, 15 bp, Homo sapiens
tcatctgtaatatcc

SEQ ID NO: 791374 - DNA, 15 bp, Homo sapiens
catctgtaatatcct

SEQ ID NO: 791375 - DNA, 15 bp, Homo sapiens
atctgtaatatcctg

SEQ ID NO: 791376 - DNA, 15 bp, Homo sapiens
tctgtaatatcctga

SEQ ID NO: 791377 - DNA, 15 bp, Homo sapiens
ctgtaatatcctgat

SEQ ID NO: 791378 - DNA, 15 bp, Homo sapiens
tgtaatatcctgatt

SEQ ID NO: 791379 - DNA, 15 bp, Homo sapiens
gtaatatcctgattg

SEQ ID NO: 791380 - DNA, 15 bp, Homo sapiens
taatatcctgattgt

SEQ ID NO: 791381 - DNA, 15 bp, Homo sapiens
aatatcctgattgtc

SEQ ID NO: 791382 - DNA, 15 bp, Homo sapiens
atatcctgattgtcc

SEQ ID NO: 791383 - DNA, 15 bp, Homo sapiens
tatcctgattgtccc

SEQ ID NO: 791384 - DNA, 15 bp, Homo sapiens
atcctgattgtccca

SEQ ID NO: 791385 - DNA, 15 bp, Homo sapiens
tcctgattgtcccat

SEQ ID NO: 791386 - DNA, 15 bp, Homo sapiens
cctgattgtcccatt

SEQ ID NO: 791387 - DNA, 15 bp, Homo sapiens
ctgattgtcccatta

SEQ ID NO: 791388 - DNA, 15 bp, Homo sapiens
tgattgtcccattaa

SEQ ID NO: 791389 - DNA, 15 bp, Homo sapiens
gattgtcccattaat

SEQ ID NO: 791390 - DNA, 15 bp, Homo sapiens
attgtcccattaatc

SEQ ID NO: 791391 - DNA, 15 bp, Homo sapiens
ttgtcccattaatct

SEQ ID NO: 791392 - DNA, 15 bp, Homo sapiens
tgtcccattaatctc

SEQ ID NO: 791393 - DNA, 15 bp, Homo sapiens
gtcccattaatctcc

SEQ ID NO: 791394 - DNA, 15 bp, Homo sapiens
tcccattaatctcct

SEQ ID NO: 791395 - DNA, 15 bp, Homo sapiens
cccattaatctcctt

SEQ ID NO: 791396 - DNA, 15 bp, Homo sapiens
ccattaatctccttt

SEQ ID NO: 791397 - DNA, 15 bp, Homo sapiens
cattaatctccttta

SEQ ID NO: 791398 - DNA, 15 bp, Homo sapiens
attaatctcctttaa

SEQ ID NO: 791399 - DNA, 15 bp, Homo sapiens
ttaatctcctttaag

SEQ ID NO: 791400 - DNA, 15 bp, Homo sapiens
taatctcctttaagc

SEQ ID NO: 791401 - DNA, 15 bp, Homo sapiens
aatctcctttaagct

SEQ ID NO: 791402 - DNA, 15 bp, Homo sapiens
atctcctttaagctt

SEQ ID NO: 791403 - DNA, 15 bp, Homo sapiens
tctcctttaagcttc

SEQ ID NO: 791404 - DNA, 15 bp, Homo sapiens
ctcctttaagcttca

SEQ ID NO: 791405 - DNA, 15 bp, Homo sapiens
tcctttaagcttcat

SEQ ID NO: 791406 - DNA, 15 bp, Homo sapiens
cctttaagcttcatg

SEQ ID NO: 791407 - DNA, 15 bp, Homo sapiens
ctttaagcttcatga

SEQ ID NO: 791408 - DNA, 15 bp, Homo sapiens
tttaagcttcatgaa

SEQ ID NO: 791409 - DNA, 15 bp, Homo sapiens
ttaagcttcatgaaa

SEQ ID NO: 791410 - DNA, 15 bp, Homo sapiens
taagcttcatgaaaa

SEQ ID NO: 791411 - DNA, 15 bp, Homo sapiens
aagcttcatgaaaaa

SEQ ID NO: 791412 - DNA, 15 bp, Homo sapiens
agcttcatgaaaaat

SEQ ID NO: 791413 - DNA, 15 bp, Homo sapiens
gcttcatgaaaaata

SEQ ID NO: 791414 - DNA, 15 bp, Homo sapiens
cttcatgaaaaatac

SEQ ID NO: 791415 - DNA, 15 bp, Homo sapiens
ttcatgaaaaataca

SEQ ID NO: 791416 - DNA, 15 bp, Homo sapiens
tcatgaaaaatacaa

SEQ ID NO: 791417 - DNA, 15 bp, Homo sapiens
catgaaaaatacaag

SEQ ID NO: 791418 - DNA, 15 bp, Homo sapiens
atgaaaaatacaagg

SEQ ID NO: 791419 - DNA, 15 bp, Homo sapiens
tgaaaaatacaaggg

SEQ ID NO: 791420 - DNA, 15 bp, Homo sapiens
gaaaaatacaagggg

SEQ ID NO: 791421 - DNA, 15 bp, Homo sapiens
aaaaatacaaggggc

SEQ ID NO: 791422 - DNA, 15 bp, Homo sapiens
aaaatacaaggggct

SEQ ID NO: 791423 - DNA, 15 bp, Homo sapiens
aaatacaaggggctg

SEQ ID NO: 791424 - DNA, 15 bp, Homo sapiens
aatacaaggggctgg

SEQ ID NO: 791425 - DNA, 15 bp, Homo sapiens
atacaaggggctgga

SEQ ID NO: 791426 - DNA, 15 bp, Homo sapiens
tacaaggggctggat

SEQ ID NO: 791427 - DNA, 15 bp, Homo sapiens
acaaggggctggatc

SEQ ID NO: 791428 - DNA, 15 bp, Homo sapiens
caaggggctggatca

SEQ ID NO: 791429 - DNA, 15 bp, Homo sapiens
aaggggctggatcag

SEQ ID NO: 791430 - DNA, 15 bp, Homo sapiens
aggggctggatcagg

SEQ ID NO: 791431 - DNA, 15 bp, Homo sapiens
ggggctggatcagga

SEQ ID NO: 791432 - DNA, 15 bp, Homo sapiens
gggctggatcaggaa

SEQ ID NO: 791433 - DNA, 15 bp, Homo sapiens
ggctggatcaggaaa

SEQ ID NO: 791434 - DNA, 15 bp, Homo sapiens
gctggatcaggaaat

SEQ ID NO: 791435 - DNA, 15 bp, Homo sapiens
ctggatcaggaaata

SEQ ID NO: 791436 - DNA, 15 bp, Homo sapiens
tggatcaggaaatag

SEQ ID NO: 791437 - DNA, 15 bp, Homo sapiens
ggatcaggaaatagc

SEQ ID NO: 791438 - DNA, 15 bp, Homo sapiens
gatcaggaaatagcc

SEQ ID NO: 791439 - DNA, 15 bp, Homo sapiens
atcaggaaatagcca

SEQ ID NO: 791440 - DNA, 15 bp, Homo sapiens
tcaggaaatagccac

SEQ ID NO: 791441 - DNA, 15 bp, Homo sapiens
caggaaatagccacc

SEQ ID NO: 791442 - DNA, 15 bp, Homo sapiens
aggaaatagccacca

SEQ ID NO: 791443 - DNA, 15 bp, Homo sapiens
ggaaatagccaccaa

SEQ ID NO: 791444 - DNA, 15 bp, Homo sapiens
gaaatagccaccaag

SEQ ID NO: 791445 - DNA, 15 bp, Homo sapiens
aaatagccaccaagt

SEQ ID NO: 791446 - DNA, 15 bp, Homo sapiens
aatagccaccaagtt

SEQ ID NO: 791447 - DNA, 15 bp, Homo sapiens
atagccaccaagttc

SEQ ID NO: 791448 - DNA, 15 bp, Homo sapiens
tagccaccaagttct

SEQ ID NO: 791449 - DNA, 15 bp, Homo sapiens
agccaccaagttcta

SEQ ID NO: 791450 - DNA, 15 bp, Homo sapiens
gccaccaagttctaa

SEQ ID NO: 791451 - DNA, 15 bp, Homo sapiens
ccaccaagttctaat

SEQ ID NO: 791452 - DNA, 15 bp, Homo sapiens
caccaagttctaatt

SEQ ID NO: 791453 - DNA, 15 bp, Homo sapiens
accaagttctaattt

SEQ ID NO: 791454 - DNA, 15 bp, Homo sapiens
ccaagttctaatttt

SEQ ID NO: 791455 - DNA, 15 bp, Homo sapiens
caagttctaattttg

SEQ ID NO: 791456 - DNA, 15 bp, Homo sapiens
aagttctaattttgc

SEQ ID NO: 791457 - DNA, 15 bp, Homo sapiens
agttctaattttgca

SEQ ID NO: 791458 - DNA, 15 bp, Homo sapiens
gttctaattttgcat

SEQ ID NO: 791459 - DNA, 15 bp, Homo sapiens
ttctaattttgcatt

SEQ ID NO: 791460 - DNA, 15 bp, Homo sapiens
tctaattttgcattc

SEQ ID NO: 791461 - DNA, 15 bp, Homo sapiens
ctaattttgcattca

SEQ ID NO: 791462 - DNA, 15 bp, Homo sapiens
taattttgcattcag

SEQ ID NO: 791463 - DNA, 15 bp, Homo sapiens
aattttgcattcagg

SEQ ID NO: 791464 - DNA, 15 bp, Homo sapiens
attttgcattcaggg

SEQ ID NO: 791465 - DNA, 15 bp, Homo sapiens
ttttgcattcagggg

SEQ ID NO: 791466 - DNA, 15 bp, Homo sapiens
tttgcattcagggga

SEQ ID NO: 791467 - DNA, 15 bp, Homo sapiens
ttgcattcaggggat

SEQ ID NO: 791468 - DNA, 15 bp, Homo sapiens
tgcattcaggggatt

SEQ ID NO: 791469 - DNA, 15 bp, Homo sapiens
gcattcaggggattg

SEQ ID NO: 791470 - DNA, 15 bp, Homo sapiens
cattcaggggattgt

SEQ ID NO: 791471 - DNA, 15 bp, Homo sapiens
attcaggggattgtc

SEQ ID NO: 791472 - DNA, 15 bp, Homo sapiens
ttcaggggattgtct

SEQ ID NO: 791473 - DNA, 15 bp, Homo sapiens
tcaggggattgtctt

SEQ ID NO: 791474 - DNA, 15 bp, Homo sapiens
caggggattgtcttc

SEQ ID NO: 791475 - DNA, 15 bp, Homo sapiens
aggggattgtcttcc

SEQ ID NO: 791476 - DNA, 15 bp, Homo sapiens
ggggattgtcttcca

SEQ ID NO: 791477 - DNA, 15 bp, Homo sapiens
gggattgtcttccat

SEQ ID NO: 791478 - DNA, 15 bp, Homo sapiens
ggattgtcttccatg

SEQ ID NO: 791479 - DNA, 15 bp, Homo sapiens
gattgtcttccatgg

SEQ ID NO: 791480 - DNA, 15 bp, Homo sapiens
attgtcttccatgga

SEQ ID NO: 791481 - DNA, 15 bp, Homo sapiens
ttgtcttccatggac

SEQ ID NO: 791482 - DNA, 15 bp, Homo sapiens
tgtcttccatggacg

SEQ ID NO: 791483 - DNA, 15 bp, Homo sapiens
gtcttccatggacgt

SEQ ID NO: 791484 - DNA, 15 bp, Homo sapiens
tcttccatggacgtg

SEQ ID NO: 791485 - DNA, 15 bp, Homo sapiens
cttccatggacgtga

SEQ ID NO: 791486 - DNA, 15 bp, Homo sapiens
ttccatggacgtgaa

SEQ ID NO: 791487 - DNA, 15 bp, Homo sapiens
tccatggacgtgaag

SEQ ID NO: 791488 - DNA, 15 bp, Homo sapiens
ccatggacgtgaaga

SEQ ID NO: 791489 - DNA, 15 bp, Homo sapiens
catggacgtgaagag

SEQ ID NO: 791490 - DNA, 15 bp, Homo sapiens
atggacgtgaagaga

SEQ ID NO: 791491 - DNA, 15 bp, Homo sapiens
tggacgtgaagagac

SEQ ID NO: 791492 - DNA, 15 bp, Homo sapiens
ggacgtgaagagact

SEQ ID NO: 791493 - DNA, 15 bp, Homo sapiens
gacgtgaagagactg

SEQ ID NO: 791494 - DNA, 15 bp, Homo sapiens
acgtgaagagactga

SEQ ID NO: 791495 - DNA, 15 bp, Homo sapiens
cgtgaagagactgat

SEQ ID NO: 791496 - DNA, 15 bp, Homo sapiens
gtgaagagactgatg

SEQ ID NO: 791497 - DNA, 15 bp, Homo sapiens
tgaagagactgatgt

SEQ ID NO: 791498 - DNA, 15 bp, Homo sapiens
gaagagactgatgtt

SEQ ID NO: 791499 - DNA, 15 bp, Homo sapiens
aagagactgatgttt

SEQ ID NO: 791500 - DNA, 15 bp, Homo sapiens
agagactgatgtttc

SEQ ID NO: 791501 - DNA, 15 bp, Homo sapiens
gagactgatgtttcc

SEQ ID NO: 791502 - DNA, 15 bp, Homo sapiens
agactgatgtttccc

SEQ ID NO: 791503 - DNA, 15 bp, Homo sapiens
gactgatgtttccca

SEQ ID NO: 791504 - DNA, 15 bp, Homo sapiens
actgatgtttcccat

SEQ ID NO: 791505 - DNA, 15 bp, Homo sapiens
ctgatgtttcccatt

SEQ ID NO: 791506 - DNA, 15 bp, Homo sapiens
tgatgtttcccattt

SEQ ID NO: 791507 - DNA, 15 bp, Homo sapiens
gatgtttcccatttg

SEQ ID NO: 791508 - DNA, 15 bp, Homo sapiens
atgtttcccatttgg

SEQ ID NO: 791509 - DNA, 15 bp, Homo sapiens
tgtttcccatttggc

SEQ ID NO: 791510 - DNA, 15 bp, Homo sapiens
gtttcccatttggcc

SEQ ID NO: 791511 - DNA, 15 bp, Homo sapiens
tttcccatttggcct

SEQ ID NO: 791512 - DNA, 15 bp, Homo sapiens
ttcccatttggcctt

SEQ ID NO: 791513 - DNA, 15 bp, Homo sapiens
tcccatttggccttt

SEQ ID NO: 791514 - DNA, 15 bp, Homo sapiens
cccatttggcctttg

SEQ ID NO: 791515 - DNA, 15 bp, Homo sapiens
ccatttggcctttgc

SEQ ID NO: 791516 - DNA, 15 bp, Homo sapiens
catttggcctttgcc

SEQ ID NO: 791517 - DNA, 15 bp, Homo sapiens
atttggcctttgcct

SEQ ID NO: 791518 - DNA, 15 bp, Homo sapiens
tttggcctttgcctt

SEQ ID NO: 791519 - DNA, 15 bp, Homo sapiens
ttggcctttgccttt

SEQ ID NO: 791520 - DNA, 15 bp, Homo sapiens
tggcctttgcctttc

SEQ ID NO: 791521 - DNA, 15 bp, Homo sapiens
ggcctttgcctttcc

SEQ ID NO: 791522 - DNA, 15 bp, Homo sapiens
gcctttgcctttcca

SEQ ID NO: 791523 - DNA, 15 bp, Homo sapiens
cctttgcctttccaa

SEQ ID NO: 791524 - DNA, 15 bp, Homo sapiens
ctttgcctttccaac

SEQ ID NO: 791525 - DNA, 15 bp, Homo sapiens
tttgcctttccaact

SEQ ID NO: 791526 - DNA, 15 bp, Homo sapiens
ttgcctttccaacta

SEQ ID NO: 791527 - DNA, 15 bp, Homo sapiens
tgcctttccaactaa

SEQ ID NO: 791528 - DNA, 15 bp, Homo sapiens
gcctttccaactaag

SEQ ID NO: 791529 - DNA, 15 bp, Homo sapiens
cctttccaactaagt

SEQ ID NO: 791530 - DNA, 15 bp, Homo sapiens
ctttccaactaagtc

SEQ ID NO: 791531 - DNA, 15 bp, Homo sapiens
tttccaactaagtcg

SEQ ID NO: 791532 - DNA, 15 bp, Homo sapiens
ttccaactaagtcgg

SEQ ID NO: 791533 - DNA, 15 bp, Homo sapiens
tccaactaagtcggg

SEQ ID NO: 791534 - DNA, 15 bp, Homo sapiens
ccaactaagtcgggg

SEQ ID NO: 791535 - DNA, 15 bp, Homo sapiens
caactaagtcgggga

SEQ ID NO: 791536 - DNA, 15 bp, Homo sapiens
aactaagtcggggag

SEQ ID NO: 791537 - DNA, 15 bp, Homo sapiens
actaagtcggggaga

SEQ ID NO: 791538 - DNA, 15 bp, Homo sapiens
ctaagtcggggagag

SEQ ID NO: 791539 - DNA, 15 bp, Homo sapiens
taagtcggggagagc

SEQ ID NO: 791540 - DNA, 15 bp, Homo sapiens
aagtcggggagagct

SEQ ID NO: 791541 - DNA, 15 bp, Homo sapiens
agtcggggagagctg

SEQ ID NO: 791542 - DNA, 15 bp, Homo sapiens
gtcggggagagctgt

SEQ ID NO: 791543 - DNA, 15 bp, Homo sapiens
tcggggagagctgtc

SEQ ID NO: 791544 - DNA, 15 bp, Homo sapiens
cggggagagctgtca

SEQ ID NO: 791545 - DNA, 15 bp, Homo sapiens
ggggagagctgtcat

SEQ ID NO: 791546 - DNA, 15 bp, Homo sapiens
gggagagctgtcatt

SEQ ID NO: 791547 - DNA, 15 bp, Homo sapiens
ggagagctgtcattt

SEQ ID NO: 791548 - DNA, 15 bp, Homo sapiens
gagagctgtcatttt

SEQ ID NO: 791549 - DNA, 15 bp, Homo sapiens
agagctgtcattttc

SEQ ID NO: 791550 - DNA, 15 bp, Homo sapiens
gagctgtcattttct

SEQ ID NO: 791551 - DNA, 15 bp, Homo sapiens
agctgtcattttctg

SEQ ID NO: 791552 - DNA, 15 bp, Homo sapiens
gctgtcattttctga

SEQ ID NO: 791553 - DNA, 15 bp, Homo sapiens
ctgtcattttctgaa

SEQ ID NO: 791554 - DNA, 15 bp, Homo sapiens
tgtcattttctgaat

SEQ ID NO: 791555 - DNA, 15 bp, Homo sapiens
gtcattttctgaatt

SEQ ID NO: 791556 - DNA, 15 bp, Homo sapiens
tcattttctgaatta

SEQ ID NO: 791557 - DNA, 15 bp, Homo sapiens
cattttctgaattat

SEQ ID NO: 791558 - DNA, 15 bp, Homo sapiens
attttctgaattatc

SEQ ID NO: 791559 - DNA, 15 bp, Homo sapiens
ttttctgaattatca

SEQ ID NO: 791560 - DNA, 15 bp, Homo sapiens
tttctgaattatcaa

SEQ ID NO: 791561 - DNA, 15 bp, Homo sapiens
ttctgaattatcaac

SEQ ID NO: 791562 - DNA, 15 bp, Homo sapiens
tctgaattatcaacc

SEQ ID NO: 791563 - DNA, 15 bp, Homo sapiens
ctgaattatcaacca

SEQ ID NO: 791564 - DNA, 15 bp, Homo sapiens
tgaattatcaaccag

SEQ ID NO: 791565 - DNA, 15 bp, Homo sapiens
gaattatcaaccagt

SEQ ID NO: 791566 - DNA, 15 bp, Homo sapiens
aattatcaaccagtt

SEQ ID NO: 791567 - DNA, 15 bp, Homo sapiens
attatcaaccagttt

SEQ ID NO: 791568 - DNA, 15 bp, Homo sapiens
ttatcaaccagttta

SEQ ID NO: 791569 - DNA, 15 bp, Homo sapiens
tatcaaccagtttac

SEQ ID NO: 791570 - DNA, 15 bp, Homo sapiens
atcaaccagtttaca

SEQ ID NO: 791571 - DNA, 15 bp, Homo sapiens
tcaaccagtttacaa

SEQ ID NO: 791572 - DNA, 15 bp, Homo sapiens
caaccagtttacaag

SEQ ID NO: 791573 - DNA, 15 bp, Homo sapiens
aaccagtttacaagg

SEQ ID NO: 791574 - DNA, 15 bp, Homo sapiens
accagtttacaaggt

SEQ ID NO: 791575 - DNA, 15 bp, Homo sapiens
ccagtttacaaggtg

SEQ ID NO: 791576 - DNA, 15 bp, Homo sapiens
cagtttacaaggtgg

SEQ ID NO: 791577 - DNA, 15 bp, Homo sapiens
agtttacaaggtggc

SEQ ID NO: 791578 - DNA, 15 bp, Homo sapiens
gtttacaaggtggca

SEQ ID NO: 791579 - DNA, 15 bp, Homo sapiens
tttacaaggtggcat

SEQ ID NO: 791580 - DNA, 15 bp, Homo sapiens
ttacaaggtggcatc

SEQ ID NO: 791581 - DNA, 15 bp, Homo sapiens
tacaaggtggcatct

SEQ ID NO: 791582 - DNA, 15 bp, Homo sapiens
acaaggtggcatcta

SEQ ID NO: 791583 - DNA, 15 bp, Homo sapiens
caaggtggcatctat

SEQ ID NO: 791584 - DNA, 15 bp, Homo sapiens
aaggtggcatctata

SEQ ID NO: 791585 - DNA, 15 bp, Homo sapiens
aggtggcatctatat

SEQ ID NO: 791586 - DNA, 15 bp, Homo sapiens
ggtggcatctatatt

SEQ ID NO: 791587 - DNA, 15 bp, Homo sapiens
gtggcatctatattt

SEQ ID NO: 791588 - DNA, 15 bp, Homo sapiens
tggcatctatatttt

SEQ ID NO: 791589 - DNA, 15 bp, Homo sapiens
ggcatctatattttg

SEQ ID NO: 791590 - DNA, 15 bp, Homo sapiens
gcatctatattttgc

SEQ ID NO: 791591 - DNA, 15 bp, Homo sapiens
catctatattttgcc

SEQ ID NO: 791592 - DNA, 15 bp, Homo sapiens
atctatattttgcct

SEQ ID NO: 791593 - DNA, 15 bp, Homo sapiens
tctatattttgcctc

SEQ ID NO: 791594 - DNA, 15 bp, Homo sapiens
ctatattttgcctct

SEQ ID NO: 791595 - DNA, 15 bp, Homo sapiens
tatattttgcctcta

SEQ ID NO: 791596 - DNA, 15 bp, Homo sapiens
atattttgcctctaa

SEQ ID NO: 791597 - DNA, 15 bp, Homo sapiens
tattttgcctctaat

SEQ ID NO: 791598 - DNA, 15 bp, Homo sapiens
attttgcctctaatg

SEQ ID NO: 791599 - DNA, 15 bp, Homo sapiens
ttttgcctctaatgt

SEQ ID NO: 791600 - DNA, 15 bp, Homo sapiens
tttgcctctaatgtg

SEQ ID NO: 791601 - DNA, 15 bp, Homo sapiens
ttgcctctaatgtgt

SEQ ID NO: 791602 - DNA, 15 bp, Homo sapiens
tgcctctaatgtgtc

SEQ ID NO: 791603 - DNA, 15 bp, Homo sapiens
gcctctaatgtgtct

SEQ ID NO: 791604 - DNA, 15 bp, Homo sapiens
cctctaatgtgtctg

SEQ ID NO: 791605 - DNA, 15 bp, Homo sapiens
ctctaatgtgtctgt

SEQ ID NO: 791606 - DNA, 15 bp, Homo sapiens
tctaatgtgtctgta

SEQ ID NO: 791607 - DNA, 15 bp, Homo sapiens
ctaatgtgtctgtac

SEQ ID NO: 791608 - DNA, 15 bp, Homo sapiens
taatgtgtctgtact

SEQ ID NO: 791609 - DNA, 15 bp, Homo sapiens
aatgtgtctgtactt

SEQ ID NO: 791610 - DNA, 15 bp, Homo sapiens
atgtgtctgtacttt

SEQ ID NO: 791611 - DNA, 15 bp, Homo sapiens
tgtgtctgtactttt

SEQ ID NO: 791612 - DNA, 15 bp, Homo sapiens
gtgtctgtacttttg

SEQ ID NO: 791613 - DNA, 15 bp, Homo sapiens
tgtctgtacttttgt

SEQ ID NO: 791614 - DNA, 15 bp, Homo sapiens
gtctgtacttttgtt

SEQ ID NO: 791615 - DNA, 15 bp, Homo sapiens
tctgtacttttgttg

SEQ ID NO: 791616 - DNA, 15 bp, Homo sapiens
ctgtacttttgttgc

SEQ ID NO: 791617 - DNA, 15 bp, Homo sapiens
tgtacttttgttgct

SEQ ID NO: 791618 - DNA, 15 bp, Homo sapiens
gtacttttgttgctt

SEQ ID NO: 791619 - DNA, 15 bp, Homo sapiens
tacttttgttgcttc

SEQ ID NO: 791620 - DNA, 15 bp, Homo sapiens
acttttgttgcttct

SEQ ID NO: 791621 - DNA, 15 bp, Homo sapiens
cttttgttgcttctc

SEQ ID NO: 791622 - DNA, 15 bp, Homo sapiens
ttttgttgcttctct

SEQ ID NO: 791623 - DNA, 15 bp, Homo sapiens
tttgttgcttctcta

SEQ ID NO: 791624 - DNA, 15 bp, Homo sapiens
ttgttgcttctctat

SEQ ID NO: 791625 - DNA, 15 bp, Homo sapiens
tgttgcttctctatc

SEQ ID NO: 791626 - DNA, 15 bp, Homo sapiens
gttgcttctctatct

SEQ ID NO: 791627 - DNA, 15 bp, Homo sapiens
ttgcttctctatctt

SEQ ID NO: 791628 - DNA, 15 bp, Homo sapiens
tgcttctctatcttc

SEQ ID NO: 791629 - DNA, 15 bp, Homo sapiens
gcttctctatcttca

SEQ ID NO: 791630 - DNA, 15 bp, Homo sapiens
cttctctatcttcat

SEQ ID NO: 791631 - DNA, 15 bp, Homo sapiens
ttctctatcttcata

SEQ ID NO: 791632 - DNA, 15 bp, Homo sapiens
tctctatcttcatat

SEQ ID NO: 791633 - DNA, 15 bp, Homo sapiens
ctctatcttcatatc

SEQ ID NO: 791634 - DNA, 15 bp, Homo sapiens
tctatcttcatatca

SEQ ID NO: 791635 - DNA, 15 bp, Homo sapiens
ctatcttcatatcat

SEQ ID NO: 791636 - DNA, 15 bp, Homo sapiens
tatcttcatatcatc

SEQ ID NO: 791637 - DNA, 15 bp, Homo sapiens
atcttcatatcatcc

SEQ ID NO: 791638 - DNA, 15 bp, Homo sapiens
tcttcatatcatcct

SEQ ID NO: 791639 - DNA, 15 bp, Homo sapiens
cttcatatcatcctc

SEQ ID NO: 791640 - DNA, 15 bp, Homo sapiens
ttcatatcatcctct

SEQ ID NO: 791641 - DNA, 15 bp, Homo sapiens
tcatatcatcctctc

SEQ ID NO: 791642 - DNA, 15 bp, Homo sapiens
catatcatcctctcc

SEQ ID NO: 791643 - DNA, 15 bp, Homo sapiens
atatcatcctctccc

SEQ ID NO: 791644 - DNA, 15 bp, Homo sapiens
tatcatcctctccct

SEQ ID NO: 791645 - DNA, 15 bp, Homo sapiens
atcatcctctcccta

SEQ ID NO: 791646 - DNA, 15 bp, Homo sapiens
tcatcctctccctag

SEQ ID NO: 791647 - DNA, 15 bp, Homo sapiens
catcctctccctagt

SEQ ID NO: 791648 - DNA, 15 bp, Homo sapiens
atcctctccctagta

SEQ ID NO: 791649 - DNA, 15 bp, Homo sapiens
tcctctccctagtag

SEQ ID NO: 791650 - DNA, 15 bp, Homo sapiens
cctctccctagtaga

SEQ ID NO: 791651 - DNA, 15 bp, Homo sapiens
ctctccctagtagat

SEQ ID NO: 791652 - DNA, 15 bp, Homo sapiens
tctccctagtagatg

SEQ ID NO: 791653 - DNA, 15 bp, Homo sapiens
ctccctagtagatgt

SEQ ID NO: 791654 - DNA, 15 bp, Homo sapiens
tccctagtagatgtt

SEQ ID NO: 791655 - DNA, 15 bp, Homo sapiens
ccctagtagatgttc

SEQ ID NO: 791656 - DNA, 15 bp, Homo sapiens
cctagtagatgttct

SEQ ID NO: 791657 - DNA, 15 bp, Homo sapiens
ctagtagatgttcta

SEQ ID NO: 791658 - DNA, 15 bp, Homo sapiens
tagtagatgttctac

SEQ ID NO: 791659 - DNA, 15 bp, Homo sapiens
agtagatgttctaca

SEQ ID NO: 791660 - DNA, 15 bp, Homo sapiens
gtagatgttctacag

SEQ ID NO: 791661 - DNA, 15 bp, Homo sapiens
tagatgttctacagt

SEQ ID NO: 791662 - DNA, 15 bp, Homo sapiens
agatgttctacagta

SEQ ID NO: 791663 - DNA, 15 bp, Homo sapiens
gatgttctacagtac

SEQ ID NO: 791664 - DNA, 15 bp, Homo sapiens
atgttctacagtact

SEQ ID NO: 791665 - DNA, 15 bp, Homo sapiens
tgttctacagtactg

SEQ ID NO: 791666 - DNA, 15 bp, Homo sapiens
gttctacagtactgc

SEQ ID NO: 791667 - DNA, 15 bp, Homo sapiens
ttctacagtactgcc

SEQ ID NO: 791668 - DNA, 15 bp, Homo sapiens
tctacagtactgccc

SEQ ID NO: 791669 - DNA, 15 bp, Homo sapiens
ctacagtactgccca

SEQ ID NO: 791670 - DNA, 15 bp, Homo sapiens
tacagtactgcccag

SEQ ID NO: 791671 - DNA, 15 bp, Homo sapiens
acagtactgcccaga

SEQ ID NO: 791672 - DNA, 15 bp, Homo sapiens
cagtactgcccagag

SEQ ID NO: 791673 - DNA, 15 bp, Homo sapiens
agtactgcccagagg

SEQ ID NO: 791674 - DNA, 15 bp, Homo sapiens
gtactgcccagaggg

SEQ ID NO: 791675 - DNA, 15 bp, Homo sapiens
tactgcccagaggga

SEQ ID NO: 791676 - DNA, 15 bp, Homo sapiens
actgcccagagggag

SEQ ID NO: 791677 - DNA, 15 bp, Homo sapiens
ctgcccagagggagt

SEQ ID NO: 791678 - DNA, 15 bp, Homo sapiens
tgcccagagggagtg

SEQ ID NO: 791679 - DNA, 15 bp, Homo sapiens
gcccagagggagtgg

SEQ ID NO: 791680 - DNA, 15 bp, Homo sapiens
cccagagggagtggt

SEQ ID NO: 791681 - DNA, 15 bp, Homo sapiens
ccagagggagtggta

SEQ ID NO: 791682 - DNA, 15 bp, Homo sapiens
cagagggagtggtaa

SEQ ID NO: 791683 - DNA, 15 bp, Homo sapiens
agagggagtggtaag

SEQ ID NO: 791684 - DNA, 15 bp, Homo sapiens
gagggagtggtaaga

SEQ ID NO: 791685 - DNA, 15 bp, Homo sapiens
agggagtggtaagaa

SEQ ID NO: 791686 - DNA, 15 bp, Homo sapiens
gggagtggtaagaaa

SEQ ID NO: 791687 - DNA, 15 bp, Homo sapiens
ggagtggtaagaaat

SEQ ID NO: 791688 - DNA, 15 bp, Homo sapiens
gagtggtaagaaatg

SEQ ID NO: 791689 - DNA, 15 bp, Homo sapiens
agtggtaagaaatgt

SEQ ID NO: 791690 - DNA, 15 bp, Homo sapiens
gtggtaagaaatgtc

SEQ ID NO: 791691 - DNA, 15 bp, Homo sapiens
tggtaagaaatgtct

SEQ ID NO: 791692 - DNA, 15 bp, Homo sapiens
ggtaagaaatgtctt

SEQ ID NO: 791693 - DNA, 15 bp, Homo sapiens
gtaagaaatgtcttt

SEQ ID NO: 791694 - DNA, 15 bp, Homo sapiens
taagaaatgtctttt

SEQ ID NO: 791695 - DNA, 15 bp, Homo sapiens
aagaaatgtcttttg

SEQ ID NO: 791696 - DNA, 15 bp, Homo sapiens
agaaatgtcttttga

SEQ ID NO: 791697 - DNA, 15 bp, Homo sapiens
gaaatgtcttttgat

SEQ ID NO: 791698 - DNA, 15 bp, Homo sapiens
aaatgtcttttgata

SEQ ID NO: 791699 - DNA, 15 bp, Homo sapiens
aatgtcttttgataa

SEQ ID NO: 791700 - DNA, 15 bp, Homo sapiens
atgtcttttgataaa

SEQ ID NO: 791701 - DNA, 15 bp, Homo sapiens
tgtcttttgataaaa

SEQ ID NO: 791702 - DNA, 15 bp, Homo sapiens
gtcttttgataaaac

SEQ ID NO: 791703 - DNA, 15 bp, Homo sapiens
tcttttgataaaacc

SEQ ID NO: 791704 - DNA, 15 bp, Homo sapiens
cttttgataaaacct

SEQ ID NO: 791705 - DNA, 15 bp, Homo sapiens
ttttgataaaacctt

SEQ ID NO: 791706 - DNA, 15 bp, Homo sapiens
tttgataaaacctta

SEQ ID NO: 791707 - DNA, 15 bp, Homo sapiens
ttgataaaaccttaa

SEQ ID NO: 791708 - DNA, 15 bp, Homo sapiens
tgataaaaccttaaa

SEQ ID NO: 791709 - DNA, 15 bp, Homo sapiens
gataaaaccttaaaa

SEQ ID NO: 791710 - DNA, 15 bp, Homo sapiens
ataaaaccttaaaag

SEQ ID NO: 791711 - DNA, 15 bp, Homo sapiens
taaaaccttaaaagc

SEQ ID NO: 791712 - DNA, 15 bp, Homo sapiens
aaaaccttaaaagct

SEQ ID NO: 791713 - DNA, 15 bp, Homo sapiens
aaaccttaaaagctt

SEQ ID NO: 791714 - DNA, 15 bp, Homo sapiens
aaccttaaaagctta

SEQ ID NO: 791715 - DNA, 15 bp, Homo sapiens
accttaaaagcttaa

SEQ ID NO: 791716 - DNA, 15 bp, Homo sapiens
ccttaaaagcttaaa

SEQ ID NO: 791717 - DNA, 15 bp, Homo sapiens
cttaaaagcttaaaa

SEQ ID NO: 791718 - DNA, 15 bp, Homo sapiens
ttaaaagcttaaaac

SEQ ID NO: 791719 - DNA, 15 bp, Homo sapiens
taaaagcttaaaact

SEQ ID NO: 791720 - DNA, 15 bp, Homo sapiens
aaaagcttaaaactt

SEQ ID NO: 791721 - DNA, 15 bp, Homo sapiens
aaagcttaaaacttc

SEQ ID NO: 791722 - DNA, 15 bp, Homo sapiens
aagcttaaaacttcc

SEQ ID NO: 791723 - DNA, 15 bp, Homo sapiens
agcttaaaacttcca

SEQ ID NO: 791724 - DNA, 15 bp, Homo sapiens
gcttaaaacttccag

SEQ ID NO: 791725 - DNA, 15 bp, Homo sapiens
cttaaaacttccagt

SEQ ID NO: 791726 - DNA, 15 bp, Homo sapiens
ttaaaacttccagtc

SEQ ID NO: 791727 - DNA, 15 bp, Homo sapiens
taaaacttccagtca

SEQ ID NO: 791728 - DNA, 15 bp, Homo sapiens
aaaacttccagtcac

SEQ ID NO: 791729 - DNA, 15 bp, Homo sapiens
aaacttccagtcact

SEQ ID NO: 791730 - DNA, 15 bp, Homo sapiens
aacttccagtcactt

SEQ ID NO: 791731 - DNA, 15 bp, Homo sapiens
acttccagtcacttt

SEQ ID NO: 791732 - DNA, 15 bp, Homo sapiens
cttccagtcactttc

SEQ ID NO: 791733 - DNA, 15 bp, Homo sapiens
ttccagtcactttct

SEQ ID NO: 791734 - DNA, 15 bp, Homo sapiens
tccagtcactttctt

SEQ ID NO: 791735 - DNA, 15 bp, Homo sapiens
ccagtcactttcttt

SEQ ID NO: 791736 - DNA, 15 bp, Homo sapiens
cagtcactttctttt

SEQ ID NO: 791737 - DNA, 15 bp, Homo sapiens
agtcactttcttttg

SEQ ID NO: 791738 - DNA, 15 bp, Homo sapiens
gtcactttcttttgc

SEQ ID NO: 791739 - DNA, 15 bp, Homo sapiens
tcactttcttttgca

SEQ ID NO: 791740 - DNA, 15 bp, Homo sapiens
cactttcttttgcat

SEQ ID NO: 791741 - DNA, 15 bp, Homo sapiens
actttcttttgcata

SEQ ID NO: 791742 - DNA, 15 bp, Homo sapiens
ctttcttttgcatat

SEQ ID NO: 791743 - DNA, 15 bp, Homo sapiens
tttcttttgcatatt

SEQ ID NO: 791744 - DNA, 15 bp, Homo sapiens
ttcttttgcatattc

SEQ ID NO: 791745 - DNA, 15 bp, Homo sapiens
tcttttgcatattcc

SEQ ID NO: 791746 - DNA, 15 bp, Homo sapiens
cttttgcatattcct

SEQ ID NO: 791747 - DNA, 15 bp, Homo sapiens
ttttgcatattcctt

SEQ ID NO: 791748 - DNA, 15 bp, Homo sapiens
tttgcatattcctta

SEQ ID NO: 791749 - DNA, 15 bp, Homo sapiens
ttgcatattccttag

SEQ ID NO: 791750 - DNA, 15 bp, Homo sapiens
tgcatattccttaga

SEQ ID NO: 791751 - DNA, 15 bp, Homo sapiens
gcatattccttagac

SEQ ID NO: 791752 - DNA, 15 bp, Homo sapiens
catattccttagacc

SEQ ID NO: 791753 - DNA, 15 bp, Homo sapiens
atattccttagaccc

SEQ ID NO: 791754 - DNA, 15 bp, Homo sapiens
tattccttagaccct

SEQ ID NO: 791755 - DNA, 15 bp, Homo sapiens
attccttagaccctg

SEQ ID NO: 791756 - DNA, 15 bp, Homo sapiens
ttccttagaccctgg

SEQ ID NO: 791757 - DNA, 15 bp, Homo sapiens
tccttagaccctggc

SEQ ID NO: 791758 - DNA, 15 bp, Homo sapiens
ccttagaccctggcc

SEQ ID NO: 791759 - DNA, 15 bp, Homo sapiens
cttagaccctggcca

SEQ ID NO: 791760 - DNA, 15 bp, Homo sapiens
ttagaccctggccat

SEQ ID NO: 791761 - DNA, 15 bp, Homo sapiens
tagaccctggccata

SEQ ID NO: 791762 - DNA, 15 bp, Homo sapiens
agaccctggccatag

SEQ ID NO: 791763 - DNA, 15 bp, Homo sapiens
gaccctggccatagg

SEQ ID NO: 791764 - DNA, 15 bp, Homo sapiens
accctggccataggc

SEQ ID NO: 791765 - DNA, 15 bp, Homo sapiens
ccctggccataggcc

SEQ ID NO: 791766 - DNA, 15 bp, Homo sapiens
cctggccataggcca

SEQ ID NO: 791767 - DNA, 15 bp, Homo sapiens
ctggccataggccag

SEQ ID NO: 791768 - DNA, 15 bp, Homo sapiens
tggccataggccagt

SEQ ID NO: 791769 - DNA, 15 bp, Homo sapiens
ggccataggccagtg

SEQ ID NO: 791770 - DNA, 15 bp, Homo sapiens
gccataggccagtgc

SEQ ID NO: 791771 - DNA, 15 bp, Homo sapiens
ccataggccagtgct

SEQ ID NO: 791772 - DNA, 15 bp, Homo sapiens
cataggccagtgctc

SEQ ID NO: 791773 - DNA, 15 bp, Homo sapiens
taggccagtgctcac

SEQ ID NO: 791774 - DNA, 15 bp, Homo sapiens
aggccagtgctcact

SEQ ID NO: 791775 - DNA, 15 bp, Homo sapiens
ggccagtgctcacta

SEQ ID NO: 791776 - DNA, 15 bp, Homo sapiens
gccagtgctcactac

SEQ ID NO: 791777 - DNA, 15 bp, Homo sapiens
ccagtgctcactaca

SEQ ID NO: 791778 - DNA, 15 bp, Homo sapiens
cagtgctcactacag

SEQ ID NO: 791779 - DNA, 15 bp, Homo sapiens
agtgctcactacaga

SEQ ID NO: 791780 - DNA, 15 bp, Homo sapiens
gtgctcactacagaa

SEQ ID NO: 791781 - DNA, 15 bp, Homo sapiens
tgctcactacagaag

SEQ ID NO: 791782 - DNA, 15 bp, Homo sapiens
gctcactacagaagg

SEQ ID NO: 791783 - DNA, 15 bp, Homo sapiens
ctcactacagaagga

SEQ ID NO: 791784 - DNA, 15 bp, Homo sapiens
tcactacagaaggag

SEQ ID NO: 791785 - DNA, 15 bp, Homo sapiens
cactacagaaggagc

SEQ ID NO: 791786 - DNA, 15 bp, Homo sapiens
actacagaaggagca

SEQ ID NO: 791787 - DNA, 15 bp, Homo sapiens
ctacagaaggagcag

SEQ ID NO: 791788 - DNA, 15 bp, Homo sapiens
tacagaaggagcagt

SEQ ID NO: 791789 - DNA, 15 bp, Homo sapiens
acagaaggagcagtg

SEQ ID NO: 791790 - DNA, 15 bp, Homo sapiens
cagaaggagcagtgt

SEQ ID NO: 791791 - DNA, 15 bp, Homo sapiens
agaaggagcagtgtt

SEQ ID NO: 791792 - DNA, 15 bp, Homo sapiens
gaaggagcagtgttt

SEQ ID NO: 791793 - DNA, 15 bp, Homo sapiens
aaggagcagtgtttg

SEQ ID NO: 791794 - DNA, 15 bp, Homo sapiens
aggagcagtgtttgt

SEQ ID NO: 791795 - DNA, 15 bp, Homo sapiens
ggagcagtgtttgtt

SEQ ID NO: 791796 - DNA, 15 bp, Homo sapiens
gagcagtgtttgttt

SEQ ID NO: 791797 - DNA, 15 bp, Homo sapiens
agcagtgtttgtttt

SEQ ID NO: 791798 - DNA, 15 bp, Homo sapiens
gcagtgtttgttttg

SEQ ID NO: 791799 - DNA, 15 bp, Homo sapiens
cagtgtttgttttgt

SEQ ID NO: 791800 - DNA, 15 bp, Homo sapiens
agtgtttgttttgtt

SEQ ID NO: 791801 - DNA, 15 bp, Homo sapiens
gtgtttgttttgtta

SEQ ID NO: 791802 - DNA, 15 bp, Homo sapiens
tgtttgttttgttaa

SEQ ID NO: 791803 - DNA, 15 bp, Homo sapiens
gtttgttttgttaac

SEQ ID NO: 791804 - DNA, 15 bp, Homo sapiens
tttgttttgttaaca

SEQ ID NO: 791805 - DNA, 15 bp, Homo sapiens
ttgttttgttaacac

SEQ ID NO: 791806 - DNA, 15 bp, Homo sapiens
tgttttgttaacaca

SEQ ID NO: 791807 - DNA, 15 bp, Homo sapiens
gttttgttaacacac

SEQ ID NO: 791808 - DNA, 15 bp, Homo sapiens
ttttgttaacacaca

SEQ ID NO: 791809 - DNA, 15 bp, Homo sapiens
tttgttaacacacac

SEQ ID NO: 791810 - DNA, 15 bp, Homo sapiens
ttgttaacacacaca

SEQ ID NO: 791811 - DNA, 15 bp, Homo sapiens
tgttaacacacacac

SEQ ID NO: 791812 - DNA, 15 bp, Homo sapiens
gttaacacacacaca

SEQ ID NO: 791813 - DNA, 15 bp, Homo sapiens
ttaacacacacacac

SEQ ID NO: 791814 - DNA, 15 bp, Homo sapiens
aacacacacacacaa

SEQ ID NO: 791815 - DNA, 15 bp, Homo sapiens
acacacacacacaaa

SEQ ID NO: 791816 - DNA, 15 bp, Homo sapiens
cacacacacacaaac

SEQ ID NO: 791817 - DNA, 15 bp, Homo sapiens
acacacacacaaaca

SEQ ID NO: 791818 - DNA, 15 bp, Homo sapiens
cacacacacaaacac

SEQ ID NO: 791819 - DNA, 15 bp, Homo sapiens
acacacacaaacaca

SEQ ID NO: 791820 - DNA, 15 bp, Homo sapiens
cacacacaaacacac

SEQ ID NO: 791821 - DNA, 15 bp, Homo sapiens
acacacaaacacaca

SEQ ID NO: 791822 - DNA, 15 bp, Homo sapiens
cacacaaacacacac

SEQ ID NO: 791823 - DNA, 15 bp, Homo sapiens
acacaaacacacaca

SEQ ID NO: 791824 - DNA, 15 bp, Homo sapiens
cacaaacacacacac

SEQ ID NO: 791825 - DNA, 15 bp, Homo sapiens
acacacacacacacc

SEQ ID NO: 791826 - DNA, 15 bp, Homo sapiens
cacacacacaccctg

SEQ ID NO: 791827 - DNA, 15 bp, Homo sapiens
acacacacaccctgt

SEQ ID NO: 791828 - DNA, 15 bp, Homo sapiens
cacacacaccctgta

SEQ ID NO: 791829 - DNA, 15 bp, Homo sapiens
acacacaccctgtac

SEQ ID NO: 791830 - DNA, 15 bp, Homo sapiens
cacacaccctgtact

SEQ ID NO: 791831 - DNA, 15 bp, Homo sapiens
acacaccctgtactg

SEQ ID NO: 791832 - DNA, 15 bp, Homo sapiens
cacaccctgtactgc

SEQ ID NO: 791833 - DNA, 15 bp, Homo sapiens
acaccctgtactgca

SEQ ID NO: 791834 - DNA, 15 bp, Homo sapiens
caccctgtactgcaa

SEQ ID NO: 791835 - DNA, 15 bp, Homo sapiens
accctgtactgcaag

SEQ ID NO: 791836 - DNA, 15 bp, Homo sapiens
ccctgtactgcaaga

SEQ ID NO: 791837 - DNA, 15 bp, Homo sapiens
cctgtactgcaagat

SEQ ID NO: 791838 - DNA, 15 bp, Homo sapiens
ctgtactgcaagatc

SEQ ID NO: 791839 - DNA, 15 bp, Homo sapiens
tgtactgcaagatcc

SEQ ID NO: 791840 - DNA, 15 bp, Homo sapiens
gtactgcaagatcct

SEQ ID NO: 791841 - DNA, 15 bp, Homo sapiens
tactgcaagatccta

SEQ ID NO: 791842 - DNA, 15 bp, Homo sapiens
actgcaagatcctaa

SEQ ID NO: 791843 - DNA, 15 bp, Homo sapiens
ctgcaagatcctaaa

SEQ ID NO: 791844 - DNA, 15 bp, Homo sapiens
tgcaagatcctaaat

SEQ ID NO: 791845 - DNA, 15 bp, Homo sapiens
gcaagatcctaaatt

SEQ ID NO: 791846 - DNA, 15 bp, Homo sapiens
caagatcctaaattt

SEQ ID NO: 791847 - DNA, 15 bp, Homo sapiens
aagatcctaaatttt

SEQ ID NO: 791848 - DNA, 15 bp, Homo sapiens
agatcctaaatttta

SEQ ID NO: 791849 - DNA, 15 bp, Homo sapiens
gatcctaaattttag

SEQ ID NO: 791850 - DNA, 15 bp, Homo sapiens
atcctaaattttaga

SEQ ID NO: 791851 - DNA, 15 bp, Homo sapiens
tcctaaattttagac

SEQ ID NO: 791852 - DNA, 15 bp, Homo sapiens
cctaaattttagact

SEQ ID NO: 791853 - DNA, 15 bp, Homo sapiens
ctaaattttagactt

SEQ ID NO: 791854 - DNA, 15 bp, Homo sapiens
taaattttagactta

SEQ ID NO: 791855 - DNA, 15 bp, Homo sapiens
aaattttagacttag

SEQ ID NO: 791856 - DNA, 15 bp, Homo sapiens
aattttagacttagt

SEQ ID NO: 791857 - DNA, 15 bp, Homo sapiens
attttagacttagtt

SEQ ID NO: 791858 - DNA, 15 bp, Homo sapiens
ttttagacttagttc

SEQ ID NO: 791859 - DNA, 15 bp, Homo sapiens
tttagacttagttca

SEQ ID NO: 791860 - DNA, 15 bp, Homo sapiens
ttagacttagttcac

SEQ ID NO: 791861 - DNA, 15 bp, Homo sapiens
tagacttagttcact

SEQ ID NO: 791862 - DNA, 15 bp, Homo sapiens
agacttagttcactg

SEQ ID NO: 791863 - DNA, 15 bp, Homo sapiens
gacttagttcactgt

SEQ ID NO: 791864 - DNA, 15 bp, Homo sapiens
acttagttcactgtt

SEQ ID NO: 791865 - DNA, 15 bp, Homo sapiens
cttagttcactgttt

SEQ ID NO: 791866 - DNA, 15 bp, Homo sapiens
ttagttcactgtttt

SEQ ID NO: 791867 - DNA, 15 bp, Homo sapiens
tagttcactgtttta

SEQ ID NO: 791868 - DNA, 15 bp, Homo sapiens
agttcactgttttat

SEQ ID NO: 791869 - DNA, 15 bp, Homo sapiens
gttcactgttttata

SEQ ID NO: 791870 - DNA, 15 bp, Homo sapiens
ttcactgttttatat

SEQ ID NO: 791871 - DNA, 15 bp, Homo sapiens
tcactgttttatatg

SEQ ID NO: 791872 - DNA, 15 bp, Homo sapiens
cactgttttatatgg

SEQ ID NO: 791873 - DNA, 15 bp, Homo sapiens
actgttttatatggt

SEQ ID NO: 791874 - DNA, 15 bp, Homo sapiens
ctgttttatatggta

SEQ ID NO: 791875 - DNA, 15 bp, Homo sapiens
tgttttatatggtag

SEQ ID NO: 791876 - DNA, 15 bp, Homo sapiens
gttttatatggtagc

SEQ ID NO: 791877 - DNA, 15 bp, Homo sapiens
ttttatatggtagcc

SEQ ID NO: 791878 - DNA, 15 bp, Homo sapiens
tttatatggtagcca

SEQ ID NO: 791879 - DNA, 15 bp, Homo sapiens
ttatatggtagccac

SEQ ID NO: 791880 - DNA, 15 bp, Homo sapiens
tatatggtagccact

SEQ ID NO: 791881 - DNA, 15 bp, Homo sapiens
atatggtagccacta

SEQ ID NO: 791882 - DNA, 15 bp, Homo sapiens
tatggtagccactag

SEQ ID NO: 791883 - DNA, 15 bp, Homo sapiens
atggtagccactaga

SEQ ID NO: 791884 - DNA, 15 bp, Homo sapiens
tggtagccactagac

SEQ ID NO: 791885 - DNA, 15 bp, Homo sapiens
ggtagccactagaca

SEQ ID NO: 791886 - DNA, 15 bp, Homo sapiens
gtagccactagacac

SEQ ID NO: 791887 - DNA, 15 bp, Homo sapiens
tagccactagacacg

SEQ ID NO: 791888 - DNA, 15 bp, Homo sapiens
agccactagacacga

SEQ ID NO: 791889 - DNA, 15 bp, Homo sapiens
gccactagacacgag

SEQ ID NO: 791890 - DNA, 15 bp, Homo sapiens
ccactagacacgagt

SEQ ID NO: 791891 - DNA, 15 bp, Homo sapiens
cactagacacgagtg

SEQ ID NO: 791892 - DNA, 15 bp, Homo sapiens
actagacacgagtgg

SEQ ID NO: 791893 - DNA, 15 bp, Homo sapiens
ctagacacgagtggt

SEQ ID NO: 791894 - DNA, 15 bp, Homo sapiens
tagacacgagtggtt

SEQ ID NO: 791895 - DNA, 15 bp, Homo sapiens
agacacgagtggttg

SEQ ID NO: 791896 - DNA, 15 bp, Homo sapiens
gacacgagtggttgt

SEQ ID NO: 791897 - DNA, 15 bp, Homo sapiens
acacgagtggttgtt

SEQ ID NO: 791898 - DNA, 15 bp, Homo sapiens
cacgagtggttgttt

SEQ ID NO: 791899 - DNA, 15 bp, Homo sapiens
acgagtggttgttta

SEQ ID NO: 791900 - DNA, 15 bp, Homo sapiens
cgagtggttgtttaa

SEQ ID NO: 791901 - DNA, 15 bp, Homo sapiens
gagtggttgtttaag

SEQ ID NO: 791902 - DNA, 15 bp, Homo sapiens
agtggttgtttaagt

SEQ ID NO: 791903 - DNA, 15 bp, Homo sapiens
gtggttgtttaagtt

SEQ ID NO: 791904 - DNA, 15 bp, Homo sapiens
tggttgtttaagttt

SEQ ID NO: 791905 - DNA, 15 bp, Homo sapiens
ggttgtttaagttta

SEQ ID NO: 791906 - DNA, 15 bp, Homo sapiens
gttgtttaagtttaa

SEQ ID NO: 791907 - DNA, 15 bp, Homo sapiens
ttgtttaagtttaaa

SEQ ID NO: 791908 - DNA, 15 bp, Homo sapiens
tgtttaagtttaaat

SEQ ID NO: 791909 - DNA, 15 bp, Homo sapiens
gtttaagtttaaatg

SEQ ID NO: 791910 - DNA, 15 bp, Homo sapiens
tttaagtttaaatga

SEQ ID NO: 791911 - DNA, 15 bp, Homo sapiens
ttaagtttaaatgaa

SEQ ID NO: 791912 - DNA, 15 bp, Homo sapiens
taagtttaaatgaaa

SEQ ID NO: 791913 - DNA, 15 bp, Homo sapiens
aagtttaaatgaaat

SEQ ID NO: 791914 - DNA, 15 bp, Homo sapiens
agtttaaatgaaatt

SEQ ID NO: 791915 - DNA, 15 bp, Homo sapiens
gtttaaatgaaatta

SEQ ID NO: 791916 - DNA, 15 bp, Homo sapiens
tttaaatgaaattac

SEQ ID NO: 791917 - DNA, 15 bp, Homo sapiens
ttaaatgaaattaca

SEQ ID NO: 791918 - DNA, 15 bp, Homo sapiens
taaatgaaattacag

SEQ ID NO: 791919 - DNA, 15 bp, Homo sapiens
aaatgaaattacagg

SEQ ID NO: 791920 - DNA, 15 bp, Homo sapiens
aatgaaattacaggt

SEQ ID NO: 791921 - DNA, 15 bp, Homo sapiens
atgaaattacaggtt

SEQ ID NO: 791922 - DNA, 15 bp, Homo sapiens
tgaaattacaggttc

SEQ ID NO: 791923 - DNA, 15 bp, Homo sapiens
gaaattacaggttca

SEQ ID NO: 791924 - DNA, 15 bp, Homo sapiens
aaattacaggttcag

SEQ ID NO: 791925 - DNA, 15 bp, Homo sapiens
aattacaggttcagt

SEQ ID NO: 791926 - DNA, 15 bp, Homo sapiens
attacaggttcagtt

SEQ ID NO: 791927 - DNA, 15 bp, Homo sapiens
ttacaggttcagttt

SEQ ID NO: 791928 - DNA, 15 bp, Homo sapiens
tacaggttcagtttc

SEQ ID NO: 791929 - DNA, 15 bp, Homo sapiens
acaggttcagtttct

SEQ ID NO: 791930 - DNA, 15 bp, Homo sapiens
caggttcagtttctc

SEQ ID NO: 791931 - DNA, 15 bp, Homo sapiens
aggttcagtttctct

SEQ ID NO: 791932 - DNA, 15 bp, Homo sapiens
ggttcagtttctctt

SEQ ID NO: 791933 - DNA, 15 bp, Homo sapiens
gttcagtttctcttt

SEQ ID NO: 791934 - DNA, 15 bp, Homo sapiens
ttcagtttctctttg

SEQ ID NO: 791935 - DNA, 15 bp, Homo sapiens
tcagtttctctttgc

SEQ ID NO: 791936 - DNA, 15 bp, Homo sapiens
cagtttctctttgca

SEQ ID NO: 791937 - DNA, 15 bp, Homo sapiens
agtttctctttgcat

SEQ ID NO: 791938 - DNA, 15 bp, Homo sapiens
gtttctctttgcatt

SEQ ID NO: 791939 - DNA, 15 bp, Homo sapiens
tttctctttgcatta

SEQ ID NO: 791940 - DNA, 15 bp, Homo sapiens
ttctctttgcattag

SEQ ID NO: 791941 - DNA, 15 bp, Homo sapiens
tctctttgcattagc

SEQ ID NO: 791942 - DNA, 15 bp, Homo sapiens
ctctttgcattagcc

SEQ ID NO: 791943 - DNA, 15 bp, Homo sapiens
tctttgcattagcca

SEQ ID NO: 791944 - DNA, 15 bp, Homo sapiens
ctttgcattagccac

SEQ ID NO: 791945 - DNA, 15 bp, Homo sapiens
tttgcattagccacc

SEQ ID NO: 791946 - DNA, 15 bp, Homo sapiens
ttgcattagccacct

SEQ ID NO: 791947 - DNA, 15 bp, Homo sapiens
tgcattagccacctt

SEQ ID NO: 791948 - DNA, 15 bp, Homo sapiens
gcattagccaccttt

SEQ ID NO: 791949 - DNA, 15 bp, Homo sapiens
cattagccacctttt

SEQ ID NO: 791950 - DNA, 15 bp, Homo sapiens
attagccaccttttg

SEQ ID NO: 791951 - DNA, 15 bp, Homo sapiens
ttagccaccttttga

SEQ ID NO: 791952 - DNA, 15 bp, Homo sapiens
tagccaccttttgag

SEQ ID NO: 791953 - DNA, 15 bp, Homo sapiens
agccaccttttgagt

SEQ ID NO: 791954 - DNA, 15 bp, Homo sapiens
gccaccttttgagta

SEQ ID NO: 791955 - DNA, 15 bp, Homo sapiens
ccaccttttgagtac

SEQ ID NO: 791956 - DNA, 15 bp, Homo sapiens
caccttttgagtact

SEQ ID NO: 791957 - DNA, 15 bp, Homo sapiens
accttttgagtactc

SEQ ID NO: 791958 - DNA, 15 bp, Homo sapiens
ccttttgagtactca

SEQ ID NO: 791959 - DNA, 15 bp, Homo sapiens
cttttgagtactcaa

SEQ ID NO: 791960 - DNA, 15 bp, Homo sapiens
ttttgagtactcaat

SEQ ID NO: 791961 - DNA, 15 bp, Homo sapiens
tttgagtactcaata

SEQ ID NO: 791962 - DNA, 15 bp, Homo sapiens
ttgagtactcaatag

SEQ ID NO: 791963 - DNA, 15 bp, Homo sapiens
tgagtactcaatagc

SEQ ID NO: 791964 - DNA, 15 bp, Homo sapiens
gagtactcaatagcc

SEQ ID NO: 791965 - DNA, 15 bp, Homo sapiens
agtactcaatagcca

SEQ ID NO: 791966 - DNA, 15 bp, Homo sapiens
gtactcaatagccat

SEQ ID NO: 791967 - DNA, 15 bp, Homo sapiens
tactcaatagccatg

SEQ ID NO: 791968 - DNA, 15 bp, Homo sapiens
actcaatagccatgt

SEQ ID NO: 791969 - DNA, 15 bp, Homo sapiens
ctcaatagccatgtg

SEQ ID NO: 791970 - DNA, 15 bp, Homo sapiens
tcaatagccatgtgt

SEQ ID NO: 791971 - DNA, 15 bp, Homo sapiens
caatagccatgtgtg

SEQ ID NO: 791972 - DNA, 15 bp, Homo sapiens
aatagccatgtgtgg

SEQ ID NO: 791973 - DNA, 15 bp, Homo sapiens
atagccatgtgtggt

SEQ ID NO: 791974 - DNA, 15 bp, Homo sapiens
tagccatgtgtggtt

SEQ ID NO: 791975 - DNA, 15 bp, Homo sapiens
agccatgtgtggtta

SEQ ID NO: 791976 - DNA, 15 bp, Homo sapiens
gccatgtgtggttag

SEQ ID NO: 791977 - DNA, 15 bp, Homo sapiens
ccatgtgtggttagt

SEQ ID NO: 791978 - DNA, 15 bp, Homo sapiens
catgtgtggttagtg

SEQ ID NO: 791979 - DNA, 15 bp, Homo sapiens
atgtgtggttagtgg

SEQ ID NO: 791980 - DNA, 15 bp, Homo sapiens
tgtgtggttagtggc

SEQ ID NO: 791981 - DNA, 15 bp, Homo sapiens
gtgtggttagtggct

SEQ ID NO: 791982 - DNA, 15 bp, Homo sapiens
tgtggttagtggcta

SEQ ID NO: 791983 - DNA, 15 bp, Homo sapiens
gtggttagtggctac

SEQ ID NO: 791984 - DNA, 15 bp, Homo sapiens
tggttagtggctacc

SEQ ID NO: 791985 - DNA, 15 bp, Homo sapiens
ggttagtggctacca

SEQ ID NO: 791986 - DNA, 15 bp, Homo sapiens
gttagtggctaccat

SEQ ID NO: 791987 - DNA, 15 bp, Homo sapiens
ttagtggctaccata

SEQ ID NO: 791988 - DNA, 15 bp, Homo sapiens
tagtggctaccatat

SEQ ID NO: 791989 - DNA, 15 bp, Homo sapiens
agtggctaccatatt

SEQ ID NO: 791990 - DNA, 15 bp, Homo sapiens
gtggctaccatattg

SEQ ID NO: 791991 - DNA, 15 bp, Homo sapiens
tggctaccatattgg

SEQ ID NO: 791992 - DNA, 15 bp, Homo sapiens
ggctaccatattggg

SEQ ID NO: 791993 - DNA, 15 bp, Homo sapiens
gctaccatattgggc

SEQ ID NO: 791994 - DNA, 15 bp, Homo sapiens
ctaccatattgggca

SEQ ID NO: 791995 - DNA, 15 bp, Homo sapiens
taccatattgggcag

SEQ ID NO: 791996 - DNA, 15 bp, Homo sapiens
accatattgggcagc

SEQ ID NO: 791997 - DNA, 15 bp, Homo sapiens
ccatattgggcagca

SEQ ID NO: 791998 - DNA, 15 bp, Homo sapiens
catattgggcagcac

SEQ ID NO: 791999 - DNA, 15 bp, Homo sapiens
atattgggcagcaca

SEQ ID NO: 792000 - DNA, 15 bp, Homo sapiens
tattgggcagcacag

SEQ ID NO: 792001 - DNA, 15 bp, Homo sapiens
attgggcagcacaga

SEQ ID NO: 792002 - DNA, 15 bp, Homo sapiens
ttgggcagcacagat

SEQ ID NO: 792003 - DNA, 15 bp, Homo sapiens
tgggcagcacagata

SEQ ID NO: 792004 - DNA, 15 bp, Homo sapiens
gggcagcacagatag

SEQ ID NO: 792005 - DNA, 15 bp, Homo sapiens
ggcagcacagataga

SEQ ID NO: 792006 - DNA, 15 bp, Homo sapiens
gcagcacagatagag

SEQ ID NO: 792007 - DNA, 15 bp, Homo sapiens
cagcacagatagaga

SEQ ID NO: 792008 - DNA, 15 bp, Homo sapiens
agcacagatagagaa

SEQ ID NO: 792009 - DNA, 15 bp, Homo sapiens
gcacagatagagaac

SEQ ID NO: 792010 - DNA, 15 bp, Homo sapiens
cacagatagagaaca

SEQ ID NO: 792011 - DNA, 15 bp, Homo sapiens
acagatagagaacat

SEQ ID NO: 792012 - DNA, 15 bp, Homo sapiens
cagatagagaacatt

SEQ ID NO: 792013 - DNA, 15 bp, Homo sapiens
agatagagaacattt

SEQ ID NO: 792014 - DNA, 15 bp, Homo sapiens
gatagagaacatttc

SEQ ID NO: 792015 - DNA, 15 bp, Homo sapiens
atagagaacatttcc

SEQ ID NO: 792016 - DNA, 15 bp, Homo sapiens
tagagaacatttcca

SEQ ID NO: 792017 - DNA, 15 bp, Homo sapiens
agagaacatttccat

SEQ ID NO: 792018 - DNA, 15 bp, Homo sapiens
gagaacatttccatc

SEQ ID NO: 792019 - DNA, 15 bp, Homo sapiens
agaacatttccatca

SEQ ID NO: 792020 - DNA, 15 bp, Homo sapiens
gaacatttccatcaa

SEQ ID NO: 792021 - DNA, 15 bp, Homo sapiens
aacatttccatcaat

SEQ ID NO: 792022 - DNA, 15 bp, Homo sapiens
acatttccatcaatc

SEQ ID NO: 792023 - DNA, 15 bp, Homo sapiens
catttccatcaatca

SEQ ID NO: 792024 - DNA, 15 bp, Homo sapiens
atttccatcaatcac

SEQ ID NO: 792025 - DNA, 15 bp, Homo sapiens
tttccatcaatcaca

SEQ ID NO: 792026 - DNA, 15 bp, Homo sapiens
ttccatcaatcacaa

SEQ ID NO: 792027 - DNA, 15 bp, Homo sapiens
tccatcaatcacaaa

SEQ ID NO: 792028 - DNA, 15 bp, Homo sapiens
ccatcaatcacaaag

SEQ ID NO: 792029 - DNA, 15 bp, Homo sapiens
catcaatcacaaagt

SEQ ID NO: 792030 - DNA, 15 bp, Homo sapiens
atcaatcacaaagtc

SEQ ID NO: 792031 - DNA, 15 bp, Homo sapiens
tcaatcacaaagtca

SEQ ID NO: 792032 - DNA, 15 bp, Homo sapiens
caatcacaaagtcat

SEQ ID NO: 792033 - DNA, 15 bp, Homo sapiens
aatcacaaagtcata

SEQ ID NO: 792034 - DNA, 15 bp, Homo sapiens
atcacaaagtcatat

SEQ ID NO: 792035 - DNA, 15 bp, Homo sapiens
tcacaaagtcatatg

SEQ ID NO: 792036 - DNA, 15 bp, Homo sapiens
cacaaagtcatatgg

SEQ ID NO: 792037 - DNA, 15 bp, Homo sapiens
acaaagtcatatggg

SEQ ID NO: 792038 - DNA, 15 bp, Homo sapiens
caaagtcatatggga

SEQ ID NO: 792039 - DNA, 15 bp, Homo sapiens
aaagtcatatgggac

SEQ ID NO: 792040 - DNA, 15 bp, Homo sapiens
aagtcatatgggaca

SEQ ID NO: 792041 - DNA, 15 bp, Homo sapiens
agtcatatgggacaa

SEQ ID NO: 792042 - DNA, 15 bp, Homo sapiens
gtcatatgggacaac

SEQ ID NO: 792043 - DNA, 15 bp, Homo sapiens
tcatatgggacaaca

SEQ ID NO: 792044 - DNA, 15 bp, Homo sapiens
catatgggacaacat

SEQ ID NO: 792045 - DNA, 15 bp, Homo sapiens
atatgggacaacatt

SEQ ID NO: 792046 - DNA, 15 bp, Homo sapiens
tatgggacaacattt

SEQ ID NO: 792047 - DNA, 15 bp, Homo sapiens
atgggacaacattta

SEQ ID NO: 792048 - DNA, 15 bp, Homo sapiens
tgggacaacatttac

SEQ ID NO: 792049 - DNA, 15 bp, Homo sapiens
gggacaacatttacc

SEQ ID NO: 792050 - DNA, 15 bp, Homo sapiens
ggacaacatttacca

SEQ ID NO: 792051 - DNA, 15 bp, Homo sapiens
gacaacatttaccat

SEQ ID NO: 792052 - DNA, 15 bp, Homo sapiens
acaacatttaccata

SEQ ID NO: 792053 - DNA, 15 bp, Homo sapiens
caacatttaccataa

SEQ ID NO: 792054 - DNA, 15 bp, Homo sapiens
aacatttaccataaa

SEQ ID NO: 792055 - DNA, 15 bp, Homo sapiens
acatttaccataaag

SEQ ID NO: 792056 - DNA, 15 bp, Homo sapiens
catttaccataaagg

SEQ ID NO: 792057 - DNA, 15 bp, Homo sapiens
atttaccataaaggg

SEQ ID NO: 792058 - DNA, 15 bp, Homo sapiens
tttaccataaagggg

SEQ ID NO: 792059 - DNA, 15 bp, Homo sapiens
ttaccataaagggga

SEQ ID NO: 792060 - DNA, 15 bp, Homo sapiens
taccataaaggggaa

SEQ ID NO: 792061 - DNA, 15 bp, Homo sapiens
accataaaggggaaa

SEQ ID NO: 792062 - DNA, 15 bp, Homo sapiens
ccataaaggggaaag

SEQ ID NO: 792063 - DNA, 15 bp, Homo sapiens
cataaaggggaaagg

SEQ ID NO: 792064 - DNA, 15 bp, Homo sapiens
ataaaggggaaaggg

SEQ ID NO: 792065 - DNA, 15 bp, Homo sapiens
taaaggggaaaggga

SEQ ID NO: 792066 - DNA, 15 bp, Homo sapiens
aaaggggaaagggaa

SEQ ID NO: 792067 - DNA, 15 bp, Homo sapiens
aaggggaaagggaac

SEQ ID NO: 792068 - DNA, 15 bp, Homo sapiens
aggggaaagggaacg

SEQ ID NO: 792069 - DNA, 15 bp, Homo sapiens
ggggaaagggaacgg

SEQ ID NO: 792070 - DNA, 15 bp, Homo sapiens
gggaaagggaacggg

SEQ ID NO: 792071 - DNA, 15 bp, Homo sapiens
ggaaagggaacggga

SEQ ID NO: 792072 - DNA, 15 bp, Homo sapiens
gaaagggaacgggaa

SEQ ID NO: 792073 - DNA, 15 bp, Homo sapiens
aaagggaacgggaat

SEQ ID NO: 792074 - DNA, 15 bp, Homo sapiens
aagggaacgggaatg

SEQ ID NO: 792075 - DNA, 15 bp, Homo sapiens
agggaacgggaatgg

SEQ ID NO: 792076 - DNA, 15 bp, Homo sapiens
gggaacgggaatggg

SEQ ID NO: 792077 - DNA, 15 bp, Homo sapiens
ggaacgggaatgggc

SEQ ID NO: 792078 - DNA, 15 bp, Homo sapiens
gaacgggaatgggca

SEQ ID NO: 792079 - DNA, 15 bp, Homo sapiens
aacgggaatgggcac

SEQ ID NO: 792080 - DNA, 15 bp, Homo sapiens
acgggaatgggcaca

SEQ ID NO: 792081 - DNA, 15 bp, Homo sapiens
cgggaatgggcacat

SEQ ID NO: 792082 - DNA, 15 bp, Homo sapiens
gggaatgggcacatg

SEQ ID NO: 792083 - DNA, 15 bp, Homo sapiens
ggaatgggcacatga

SEQ ID NO: 792084 - DNA, 15 bp, Homo sapiens
gaatgggcacatgag

SEQ ID NO: 792085 - DNA, 15 bp, Homo sapiens
aatgggcacatgagt

SEQ ID NO: 792086 - DNA, 15 bp, Homo sapiens
atgggcacatgagtg

SEQ ID NO: 792087 - DNA, 15 bp, Homo sapiens
tgggcacatgagtgt

SEQ ID NO: 792088 - DNA, 15 bp, Homo sapiens
gggcacatgagtgta

SEQ ID NO: 792089 - DNA, 15 bp, Homo sapiens
ggcacatgagtgtag

SEQ ID NO: 792090 - DNA, 15 bp, Homo sapiens
gcacatgagtgtagt

SEQ ID NO: 792091 - DNA, 15 bp, Homo sapiens
cacatgagtgtagtg

SEQ ID NO: 792092 - DNA, 15 bp, Homo sapiens
acatgagtgtagtgt

SEQ ID NO: 792093 - DNA, 15 bp, Homo sapiens
catgagtgtagtgtt

SEQ ID NO: 792094 - DNA, 15 bp, Homo sapiens
atgagtgtagtgttc

SEQ ID NO: 792095 - DNA, 15 bp, Homo sapiens
tgagtgtagtgttca

SEQ ID NO: 792096 - DNA, 15 bp, Homo sapiens
gagtgtagtgttcag

SEQ ID NO: 792097 - DNA, 15 bp, Homo sapiens
agtgtagtgttcagt

SEQ ID NO: 792098 - DNA, 15 bp, Homo sapiens
gtgtagtgttcagtt

SEQ ID NO: 792099 - DNA, 15 bp, Homo sapiens
tgtagtgttcagtta

SEQ ID NO: 792100 - DNA, 15 bp, Homo sapiens
gtagtgttcagttaa

SEQ ID NO: 792101 - DNA, 15 bp, Homo sapiens
tagtgttcagttaag

SEQ ID NO: 792102 - DNA, 15 bp, Homo sapiens
agtgttcagttaagt

SEQ ID NO: 792103 - DNA, 15 bp, Homo sapiens
gtgttcagttaagta

SEQ ID NO: 792104 - DNA, 15 bp, Homo sapiens
tgttcagttaagtag

SEQ ID NO: 792105 - DNA, 15 bp, Homo sapiens
gttcagttaagtagc

SEQ ID NO: 792106 - DNA, 15 bp, Homo sapiens
ttcagttaagtagca

SEQ ID NO: 792107 - DNA, 15 bp, Homo sapiens
tcagttaagtagcat

SEQ ID NO: 792108 - DNA, 15 bp, Homo sapiens
cagttaagtagcatc

SEQ ID NO: 792109 - DNA, 15 bp, Homo sapiens
agttaagtagcatca

SEQ ID NO: 792110 - DNA, 15 bp, Homo sapiens
gttaagtagcatcac

SEQ ID NO: 792111 - DNA, 15 bp, Homo sapiens
ttaagtagcatcacg

SEQ ID NO: 792112 - DNA, 15 bp, Homo sapiens
taagtagcatcacgg

SEQ ID NO: 792113 - DNA, 15 bp, Homo sapiens
aagtagcatcacggg

SEQ ID NO: 792114 - DNA, 15 bp, Homo sapiens
agtagcatcacggga

SEQ ID NO: 792115 - DNA, 15 bp, Homo sapiens
gtagcatcacgggac

SEQ ID NO: 792116 - DNA, 15 bp, Homo sapiens
tagcatcacgggaca

SEQ ID NO: 792117 - DNA, 15 bp, Homo sapiens
agcatcacgggacaa

SEQ ID NO: 792118 - DNA, 15 bp, Homo sapiens
gcatcacgggacaac

SEQ ID NO: 792119 - DNA, 15 bp, Homo sapiens
catcacgggacaaca

SEQ ID NO: 792120 - DNA, 15 bp, Homo sapiens
atcacgggacaacag

SEQ ID NO: 792121 - DNA, 15 bp, Homo sapiens
tcacgggacaacaga

SEQ ID NO: 792122 - DNA, 15 bp, Homo sapiens
cacgggacaacagat

SEQ ID NO: 792123 - DNA, 15 bp, Homo sapiens
acgggacaacagatg

SEQ ID NO: 792124 - DNA, 15 bp, Homo sapiens
cgggacaacagatgt

SEQ ID NO: 792125 - DNA, 15 bp, Homo sapiens
gggacaacagatgtg

SEQ ID NO: 792126 - DNA, 15 bp, Homo sapiens
ggacaacagatgtga

SEQ ID NO: 792127 - DNA, 15 bp, Homo sapiens
gacaacagatgtgaa

SEQ ID NO: 792128 - DNA, 15 bp, Homo sapiens
acaacagatgtgaag

SEQ ID NO: 792129 - DNA, 15 bp, Homo sapiens
caacagatgtgaagt

SEQ ID NO: 792130 - DNA, 15 bp, Homo sapiens
aacagatgtgaagta

SEQ ID NO: 792131 - DNA, 15 bp, Homo sapiens
acagatgtgaagtag

SEQ ID NO: 792132 - DNA, 15 bp, Homo sapiens
cagatgtgaagtagt

SEQ ID NO: 792133 - DNA, 15 bp, Homo sapiens
agatgtgaagtagtc

SEQ ID NO: 792134 - DNA, 15 bp, Homo sapiens
gatgtgaagtagtcc

SEQ ID NO: 792135 - DNA, 15 bp, Homo sapiens
atgtgaagtagtcct

SEQ ID NO: 792136 - DNA, 15 bp, Homo sapiens
tgtgaagtagtcctc

SEQ ID NO: 792137 - DNA, 15 bp, Homo sapiens
gtgaagtagtcctct

SEQ ID NO: 792138 - DNA, 15 bp, Homo sapiens
tgaagtagtcctctt

SEQ ID NO: 792139 - DNA, 15 bp, Homo sapiens
gaagtagtcctctta

SEQ ID NO: 792140 - DNA, 15 bp, Homo sapiens
aagtagtcctcttaa

SEQ ID NO: 792141 - DNA, 15 bp, Homo sapiens
agtagtcctcttaac

SEQ ID NO: 792142 - DNA, 15 bp, Homo sapiens
gtagtcctcttaact

SEQ ID NO: 792143 - DNA, 15 bp, Homo sapiens
tagtcctcttaactc

SEQ ID NO: 792144 - DNA, 15 bp, Homo sapiens
agtcctcttaactct

SEQ ID NO: 792145 - DNA, 15 bp, Homo sapiens
gtcctcttaactctc

SEQ ID NO: 792146 - DNA, 15 bp, Homo sapiens
tcctcttaactctct

SEQ ID NO: 792147 - DNA, 15 bp, Homo sapiens
cctcttaactctctg

SEQ ID NO: 792148 - DNA, 15 bp, Homo sapiens
ctcttaactctctgc

SEQ ID NO: 792149 - DNA, 15 bp, Homo sapiens
tcttaactctctgca

SEQ ID NO: 792150 - DNA, 15 bp, Homo sapiens
cttaactctctgcat

SEQ ID NO: 792151 - DNA, 15 bp, Homo sapiens
ttaactctctgcatg

SEQ ID NO: 792152 - DNA, 15 bp, Homo sapiens
taactctctgcatgt

SEQ ID NO: 792153 - DNA, 15 bp, Homo sapiens
aactctctgcatgta

SEQ ID NO: 792154 - DNA, 15 bp, Homo sapiens
actctctgcatgtat

SEQ ID NO: 792155 - DNA, 15 bp, Homo sapiens
ctctctgcatgtatt

SEQ ID NO: 792156 - DNA, 15 bp, Homo sapiens
tctctgcatgtattt

SEQ ID NO: 792157 - DNA, 15 bp, Homo sapiens
ctctgcatgtatttc

SEQ ID NO: 792158 - DNA, 15 bp, Homo sapiens
tctgcatgtatttcc

SEQ ID NO: 792159 - DNA, 15 bp, Homo sapiens
ctgcatgtatttcct

SEQ ID NO: 792160 - DNA, 15 bp, Homo sapiens
tgcatgtatttcctc

SEQ ID NO: 792161 - DNA, 15 bp, Homo sapiens
gcatgtatttcctct

SEQ ID NO: 792162 - DNA, 15 bp, Homo sapiens
catgtatttcctctg

SEQ ID NO: 792163 - DNA, 15 bp, Homo sapiens
atgtatttcctctgt

SEQ ID NO: 792164 - DNA, 15 bp, Homo sapiens
tgtatttcctctgtg

SEQ ID NO: 792165 - DNA, 15 bp, Homo sapiens
gtatttcctctgtga

SEQ ID NO: 792166 - DNA, 15 bp, Homo sapiens
tatttcctctgtgat

SEQ ID NO: 792167 - DNA, 15 bp, Homo sapiens
atttcctctgtgatt

SEQ ID NO: 792168 - DNA, 15 bp, Homo sapiens
tttcctctgtgattt

SEQ ID NO: 792169 - DNA, 15 bp, Homo sapiens
ttcctctgtgatttc

SEQ ID NO: 792170 - DNA, 15 bp, Homo sapiens
tcctctgtgatttcc

SEQ ID NO: 792171 - DNA, 15 bp, Homo sapiens
cctctgtgatttcca

SEQ ID NO: 792172 - DNA, 15 bp, Homo sapiens
ctctgtgatttccaa

SEQ ID NO: 792173 - DNA, 15 bp, Homo sapiens
tctgtgatttccaaa

SEQ ID NO: 792174 - DNA, 15 bp, Homo sapiens
ctgtgatttccaaag

SEQ ID NO: 792175 - DNA, 15 bp, Homo sapiens
tgtgatttccaaagg

SEQ ID NO: 792176 - DNA, 15 bp, Homo sapiens
gtgatttccaaagga

SEQ ID NO: 792177 - DNA, 15 bp, Homo sapiens
tgatttccaaaggac

SEQ ID NO: 792178 - DNA, 15 bp, Homo sapiens
gatttccaaaggacc

SEQ ID NO: 792179 - DNA, 15 bp, Homo sapiens
atttccaaaggacca

SEQ ID NO: 792180 - DNA, 15 bp, Homo sapiens
tttccaaaggaccac

SEQ ID NO: 792181 - DNA, 15 bp, Homo sapiens
ttccaaaggaccact

SEQ ID NO: 792182 - DNA, 15 bp, Homo sapiens
tccaaaggaccacta

SEQ ID NO: 792183 - DNA, 15 bp, Homo sapiens
ccaaaggaccactaa

SEQ ID NO: 792184 - DNA, 15 bp, Homo sapiens
caaaggaccactaac

SEQ ID NO: 792185 - DNA, 15 bp, Homo sapiens
aaaggaccactaacc

SEQ ID NO: 792186 - DNA, 15 bp, Homo sapiens
aaggaccactaacca

SEQ ID NO: 792187 - DNA, 15 bp, Homo sapiens
aggaccactaaccag

SEQ ID NO: 792188 - DNA, 15 bp, Homo sapiens
ggaccactaaccagg

SEQ ID NO: 792189 - DNA, 15 bp, Homo sapiens
gaccactaaccagga

SEQ ID NO: 792190 - DNA, 15 bp, Homo sapiens
accactaaccaggag

SEQ ID NO: 792191 - DNA, 15 bp, Homo sapiens
ccactaaccaggaga

SEQ ID NO: 792192 - DNA, 15 bp, Homo sapiens
cactaaccaggagaa

SEQ ID NO: 792193 - DNA, 15 bp, Homo sapiens
actaaccaggagaaa

SEQ ID NO: 792194 - DNA, 15 bp, Homo sapiens
ctaaccaggagaaat

SEQ ID NO: 792195 - DNA, 15 bp, Homo sapiens
taaccaggagaaata

SEQ ID NO: 792196 - DNA, 15 bp, Homo sapiens
aaccaggagaaataa

SEQ ID NO: 792197 - DNA, 15 bp, Homo sapiens
accaggagaaataag

SEQ ID NO: 792198 - DNA, 15 bp, Homo sapiens
ccaggagaaataaga

SEQ ID NO: 792199 - DNA, 15 bp, Homo sapiens
caggagaaataagaa

SEQ ID NO: 792200 - DNA, 15 bp, Homo sapiens
aggagaaataagaaa

SEQ ID NO: 792201 - DNA, 15 bp, Homo sapiens
ggagaaataagaaac

SEQ ID NO: 792202 - DNA, 15 bp, Homo sapiens
gagaaataagaaact

SEQ ID NO: 792203 - DNA, 15 bp, Homo sapiens
agaaataagaaactg

SEQ ID NO: 792204 - DNA, 15 bp, Homo sapiens
gaaataagaaactgt

SEQ ID NO: 792205 - DNA, 15 bp, Homo sapiens
aaataagaaactgtt

SEQ ID NO: 792206 - DNA, 15 bp, Homo sapiens
aataagaaactgttg

SEQ ID NO: 792207 - DNA, 15 bp, Homo sapiens
ataagaaactgttgt

SEQ ID NO: 792208 - DNA, 15 bp, Homo sapiens
taagaaactgttgtt

SEQ ID NO: 792209 - DNA, 15 bp, Homo sapiens
aagaaactgttgttt

SEQ ID NO: 792210 - DNA, 15 bp, Homo sapiens
agaaactgttgtttt

SEQ ID NO: 792211 - DNA, 15 bp, Homo sapiens
gaaactgttgttttc

SEQ ID NO: 792212 - DNA, 15 bp, Homo sapiens
aaactgttgttttct

SEQ ID NO: 792213 - DNA, 15 bp, Homo sapiens
aactgttgttttctg

SEQ ID NO: 792214 - DNA, 15 bp, Homo sapiens
actgttgttttctga

SEQ ID NO: 792215 - DNA, 15 bp, Homo sapiens
ctgttgttttctgac

SEQ ID NO: 792216 - DNA, 15 bp, Homo sapiens
tgttgttttctgacc

SEQ ID NO: 792217 - DNA, 15 bp, Homo sapiens
gttgttttctgaccc

SEQ ID NO: 792218 - DNA, 15 bp, Homo sapiens
ttgttttctgaccca

SEQ ID NO: 792219 - DNA, 15 bp, Homo sapiens
tgttttctgacccaa

SEQ ID NO: 792220 - DNA, 15 bp, Homo sapiens
gttttctgacccaac

SEQ ID NO: 792221 - DNA, 15 bp, Homo sapiens
ttttctgacccaaca

SEQ ID NO: 792222 - DNA, 15 bp, Homo sapiens
tttctgacccaacac

SEQ ID NO: 792223 - DNA, 15 bp, Homo sapiens
ttctgacccaacacc

SEQ ID NO: 792224 - DNA, 15 bp, Homo sapiens
tctgacccaacacca

SEQ ID NO: 792225 - DNA, 15 bp, Homo sapiens
ctgacccaacaccag

SEQ ID NO: 792226 - DNA, 15 bp, Homo sapiens
tgacccaacaccagc

SEQ ID NO: 792227 - DNA, 15 bp, Homo sapiens
gacccaacaccagca

SEQ ID NO: 792228 - DNA, 15 bp, Homo sapiens
acccaacaccagcat

SEQ ID NO: 792229 - DNA, 15 bp, Homo sapiens
cccaacaccagcatg

SEQ ID NO: 792230 - DNA, 15 bp, Homo sapiens
ccaacaccagcatgc

SEQ ID NO: 792231 - DNA, 15 bp, Homo sapiens
caacaccagcatgca

SEQ ID NO: 792232 - DNA, 15 bp, Homo sapiens
aacaccagcatgcaa

SEQ ID NO: 792233 - DNA, 15 bp, Homo sapiens
acaccagcatgcaat

SEQ ID NO: 792234 - DNA, 15 bp, Homo sapiens
caccagcatgcaatg

SEQ ID NO: 792235 - DNA, 15 bp, Homo sapiens
accagcatgcaatga

SEQ ID NO: 792236 - DNA, 15 bp, Homo sapiens
ccagcatgcaatgaa

SEQ ID NO: 792237 - DNA, 15 bp, Homo sapiens
cagcatgcaatgaaa

SEQ ID NO: 792238 - DNA, 15 bp, Homo sapiens
agcatgcaatgaaag

SEQ ID NO: 792239 - DNA, 15 bp, Homo sapiens
gcatgcaatgaaagt

SEQ ID NO: 792240 - DNA, 15 bp, Homo sapiens
catgcaatgaaagta

SEQ ID NO: 792241 - DNA, 15 bp, Homo sapiens
atgcaatgaaagtag

SEQ ID NO: 792242 - DNA, 15 bp, Homo sapiens
tgcaatgaaagtagg

SEQ ID NO: 792243 - DNA, 15 bp, Homo sapiens
gcaatgaaagtagga

SEQ ID NO: 792244 - DNA, 15 bp, Homo sapiens
caatgaaagtaggat

SEQ ID NO: 792245 - DNA, 15 bp, Homo sapiens
aatgaaagtaggata

SEQ ID NO: 792246 - DNA, 15 bp, Homo sapiens
atgaaagtaggatat

SEQ ID NO: 792247 - DNA, 15 bp, Homo sapiens
tgaaagtaggatatt

SEQ ID NO: 792248 - DNA, 15 bp, Homo sapiens
gaaagtaggatattt

SEQ ID NO: 792249 - DNA, 15 bp, Homo sapiens
aaagtaggatatttt

SEQ ID NO: 792250 - DNA, 15 bp, Homo sapiens
aagtaggatattttt

SEQ ID NO: 792251 - DNA, 15 bp, Homo sapiens
agtaggatatttttc

SEQ ID NO: 792252 - DNA, 15 bp, Homo sapiens
gtaggatatttttca

SEQ ID NO: 792253 - DNA, 15 bp, Homo sapiens
taggatatttttcat

SEQ ID NO: 792254 - DNA, 15 bp, Homo sapiens
aggatatttttcatt

SEQ ID NO: 792255 - DNA, 15 bp, Homo sapiens
ggatatttttcattc

SEQ ID NO: 792256 - DNA, 15 bp, Homo sapiens
gatatttttcattct

SEQ ID NO: 792257 - DNA, 15 bp, Homo sapiens
atatttttcattcta

SEQ ID NO: 792258 - DNA, 15 bp, Homo sapiens
tatttttcattctat

SEQ ID NO: 792259 - DNA, 15 bp, Homo sapiens
atttttcattctata

SEQ ID NO: 792260 - DNA, 15 bp, Homo sapiens
tttttcattctatag

SEQ ID NO: 792261 - DNA, 15 bp, Homo sapiens
ttttcattctataga

SEQ ID NO: 792262 - DNA, 15 bp, Homo sapiens
tttcattctatagag

SEQ ID NO: 792263 - DNA, 15 bp, Homo sapiens
ttcattctatagaga

SEQ ID NO: 792264 - DNA, 15 bp, Homo sapiens
tcattctatagagaa

SEQ ID NO: 792265 - DNA, 15 bp, Homo sapiens
cattctatagagaac

SEQ ID NO: 792266 - DNA, 15 bp, Homo sapiens
attctatagagaacc

SEQ ID NO: 792267 - DNA, 15 bp, Homo sapiens
ttctatagagaaccg

SEQ ID NO: 792268 - DNA, 15 bp, Homo sapiens
tctatagagaaccgt

SEQ ID NO: 792269 - DNA, 15 bp, Homo sapiens
ctatagagaaccgtc

SEQ ID NO: 792270 - DNA, 15 bp, Homo sapiens
tatagagaaccgtca

SEQ ID NO: 792271 - DNA, 15 bp, Homo sapiens
atagagaaccgtcaa

SEQ ID NO: 792272 - DNA, 15 bp, Homo sapiens
tagagaaccgtcaat

SEQ ID NO: 792273 - DNA, 15 bp, Homo sapiens
agagaaccgtcaatg

SEQ ID NO: 792274 - DNA, 15 bp, Homo sapiens
gagaaccgtcaatgt

SEQ ID NO: 792275 - DNA, 15 bp, Homo sapiens
agaaccgtcaatgtg

SEQ ID NO: 792276 - DNA, 15 bp, Homo sapiens
gaaccgtcaatgtgt

SEQ ID NO: 792277 - DNA, 15 bp, Homo sapiens
aaccgtcaatgtgta

SEQ ID NO: 792278 - DNA, 15 bp, Homo sapiens
accgtcaatgtgtat

SEQ ID NO: 792279 - DNA, 15 bp, Homo sapiens
ccgtcaatgtgtatt

SEQ ID NO: 792280 - DNA, 15 bp, Homo sapiens
cgtcaatgtgtattt

SEQ ID NO: 792281 - DNA, 15 bp, Homo sapiens
gtcaatgtgtatttt

SEQ ID NO: 792282 - DNA, 15 bp, Homo sapiens
tcaatgtgtattttg

SEQ ID NO: 792283 - DNA, 15 bp, Homo sapiens
caatgtgtattttgt

SEQ ID NO: 792284 - DNA, 15 bp, Homo sapiens
aatgtgtattttgtt

SEQ ID NO: 792285 - DNA, 15 bp, Homo sapiens
atgtgtattttgtta

SEQ ID NO: 792286 - DNA, 15 bp, Homo sapiens
tgtgtattttgttat

SEQ ID NO: 792287 - DNA, 15 bp, Homo sapiens
gtgtattttgttatc

SEQ ID NO: 792288 - DNA, 15 bp, Homo sapiens
tgtattttgttatct

SEQ ID NO: 792289 - DNA, 15 bp, Homo sapiens
gtattttgttatctg

SEQ ID NO: 792290 - DNA, 15 bp, Homo sapiens
tattttgttatctga

SEQ ID NO: 792291 - DNA, 15 bp, Homo sapiens
attttgttatctgat

SEQ ID NO: 792292 - DNA, 15 bp, Homo sapiens
ttttgttatctgatt

SEQ ID NO: 792293 - DNA, 15 bp, Homo sapiens
tttgttatctgattt

SEQ ID NO: 792294 - DNA, 15 bp, Homo sapiens
ttgttatctgatttg

SEQ ID NO: 792295 - DNA, 15 bp, Homo sapiens
tgttatctgatttga

SEQ ID NO: 792296 - DNA, 15 bp, Homo sapiens
gttatctgatttgaa

SEQ ID NO: 792297 - DNA, 15 bp, Homo sapiens
ttatctgatttgaac

SEQ ID NO: 792298 - DNA, 15 bp, Homo sapiens
tatctgatttgaacc

SEQ ID NO: 792299 - DNA, 15 bp, Homo sapiens
atctgatttgaaccc

SEQ ID NO: 792300 - DNA, 15 bp, Homo sapiens
tctgatttgaaccct

SEQ ID NO: 792301 - DNA, 15 bp, Homo sapiens
ctgatttgaaccctg

SEQ ID NO: 792302 - DNA, 15 bp, Homo sapiens
tgatttgaaccctgc

SEQ ID NO: 792303 - DNA, 15 bp, Homo sapiens
gatttgaaccctgca

SEQ ID NO: 792304 - DNA, 15 bp, Homo sapiens
atttgaaccctgcac

SEQ ID NO: 792305 - DNA, 15 bp, Homo sapiens
tttgaaccctgcacg

SEQ ID NO: 792306 - DNA, 15 bp, Homo sapiens
ttgaaccctgcacgc

SEQ ID NO: 792307 - DNA, 15 bp, Homo sapiens
tgaaccctgcacgcg

SEQ ID NO: 792308 - DNA, 15 bp, Homo sapiens
gaaccctgcacgcgg

SEQ ID NO: 792309 - DNA, 15 bp, Homo sapiens
aaccctgcacgcgga

SEQ ID NO: 792310 - DNA, 15 bp, Homo sapiens
accctgcacgcggac

SEQ ID NO: 792311 - DNA, 15 bp, Homo sapiens
ccctgcacgcggaca

SEQ ID NO: 792312 - DNA, 15 bp, Homo sapiens
cctgcacgcggacag

SEQ ID NO: 792313 - DNA, 15 bp, Homo sapiens
ctgcacgcggacagc

SEQ ID NO: 792314 - DNA, 15 bp, Homo sapiens
tgcacgcggacagca

SEQ ID NO: 792315 - DNA, 15 bp, Homo sapiens
gcacgcggacagcac

SEQ ID NO: 792316 - DNA, 15 bp, Homo sapiens
cacgcggacagcaca

SEQ ID NO: 792317 - DNA, 15 bp, Homo sapiens
acgcggacagcacat

SEQ ID NO: 792318 - DNA, 15 bp, Homo sapiens
cgcggacagcacatt

SEQ ID NO: 792319 - DNA, 15 bp, Homo sapiens
gcggacagcacattt

SEQ ID NO: 792320 - DNA, 15 bp, Homo sapiens
cggacagcacatttc

SEQ ID NO: 792321 - DNA, 15 bp, Homo sapiens
ggacagcacatttca

SEQ ID NO: 792322 - DNA, 15 bp, Homo sapiens
gacagcacatttcac

SEQ ID NO: 792323 - DNA, 15 bp, Homo sapiens
acagcacatttcacg

SEQ ID NO: 792324 - DNA, 15 bp, Homo sapiens
cagcacatttcacgt

SEQ ID NO: 792325 - DNA, 15 bp, Homo sapiens
agcacatttcacgtg

SEQ ID NO: 792326 - DNA, 15 bp, Homo sapiens
gcacatttcacgtgt

SEQ ID NO: 792327 - DNA, 15 bp, Homo sapiens
cacatttcacgtgtt

SEQ ID NO: 792328 - DNA, 15 bp, Homo sapiens
acatttcacgtgttt

SEQ ID NO: 792329 - DNA, 15 bp, Homo sapiens
catttcacgtgtttt

SEQ ID NO: 792330 - DNA, 15 bp, Homo sapiens
atttcacgtgtttta

SEQ ID NO: 792331 - DNA, 15 bp, Homo sapiens
tttcacgtgttttag

SEQ ID NO: 792332 - DNA, 15 bp, Homo sapiens
ttcacgtgttttagc

SEQ ID NO: 792333 - DNA, 15 bp, Homo sapiens
tcacgtgttttagcc

SEQ ID NO: 792334 - DNA, 15 bp, Homo sapiens
cacgtgttttagccc

SEQ ID NO: 792335 - DNA, 15 bp, Homo sapiens
acgtgttttagccca

SEQ ID NO: 792336 - DNA, 15 bp, Homo sapiens
cgtgttttagcccat

SEQ ID NO: 792337 - DNA, 15 bp, Homo sapiens
gtgttttagcccatt

SEQ ID NO: 792338 - DNA, 15 bp, Homo sapiens
tgttttagcccattt

SEQ ID NO: 792339 - DNA, 15 bp, Homo sapiens
gttttagcccatttg

SEQ ID NO: 792340 - DNA, 15 bp, Homo sapiens
ttttagcccatttgt

SEQ ID NO: 792341 - DNA, 15 bp, Homo sapiens
tttagcccatttgtg

SEQ ID NO: 792342 - DNA, 15 bp, Homo sapiens
ttagcccatttgtgg

SEQ ID NO: 792343 - DNA, 15 bp, Homo sapiens
tagcccatttgtggc

SEQ ID NO: 792344 - DNA, 15 bp, Homo sapiens
agcccatttgtggct

SEQ ID NO: 792345 - DNA, 15 bp, Homo sapiens
gcccatttgtggctg

SEQ ID NO: 792346 - DNA, 15 bp, Homo sapiens
cccatttgtggctgg

SEQ ID NO: 792347 - DNA, 15 bp, Homo sapiens
ccatttgtggctggc

SEQ ID NO: 792348 - DNA, 15 bp, Homo sapiens
catttgtggctggca

SEQ ID NO: 792349 - DNA, 15 bp, Homo sapiens
atttgtggctggcac

SEQ ID NO: 792350 - DNA, 15 bp, Homo sapiens
tttgtggctggcaca

SEQ ID NO: 792351 - DNA, 15 bp, Homo sapiens
ttgtggctggcacag

SEQ ID NO: 792352 - DNA, 15 bp, Homo sapiens
tgtggctggcacagg

SEQ ID NO: 792353 - DNA, 15 bp, Homo sapiens
gtggctggcacaggt

SEQ ID NO: 792354 - DNA, 15 bp, Homo sapiens
tggctggcacaggtg

SEQ ID NO: 792355 - DNA, 15 bp, Homo sapiens
ggctggcacaggtgt

SEQ ID NO: 792356 - DNA, 15 bp, Homo sapiens
gctggcacaggtgtg

SEQ ID NO: 792357 - DNA, 15 bp, Homo sapiens
ctggcacaggtgtgg

SEQ ID NO: 792358 - DNA, 15 bp, Homo sapiens
tggcacaggtgtggc

SEQ ID NO: 792359 - DNA, 15 bp, Homo sapiens
ggcacaggtgtggcc

SEQ ID NO: 792360 - DNA, 15 bp, Homo sapiens
gcacaggtgtggcca

SEQ ID NO: 792361 - DNA, 15 bp, Homo sapiens
cacaggtgtggccag

SEQ ID NO: 792362 - DNA, 15 bp, Homo sapiens
acaggtgtggccaga

SEQ ID NO: 792363 - DNA, 15 bp, Homo sapiens
caggtgtggccagaa

SEQ ID NO: 792364 - DNA, 15 bp, Homo sapiens
aggtgtggccagaaa

SEQ ID NO: 792365 - DNA, 15 bp, Homo sapiens
ggtgtggccagaaag

SEQ ID NO: 792366 - DNA, 15 bp, Homo sapiens
gtgtggccagaaagc

SEQ ID NO: 792367 - DNA, 15 bp, Homo sapiens
tgtggccagaaagcc

SEQ ID NO: 792368 - DNA, 15 bp, Homo sapiens
gtggccagaaagcca

SEQ ID NO: 792369 - DNA, 15 bp, Homo sapiens
tggccagaaagccag

SEQ ID NO: 792370 - DNA, 15 bp, Homo sapiens
ggccagaaagccagc

SEQ ID NO: 792371 - DNA, 15 bp, Homo sapiens
gccagaaagccagca

SEQ ID NO: 792372 - DNA, 15 bp, Homo sapiens
ccagaaagccagcat

SEQ ID NO: 792373 - DNA, 15 bp, Homo sapiens
cagaaagccagcata

SEQ ID NO: 792374 - DNA, 15 bp, Homo sapiens
agaaagccagcatag

SEQ ID NO: 792375 - DNA, 15 bp, Homo sapiens
gaaagccagcatagg

SEQ ID NO: 792376 - DNA, 15 bp, Homo sapiens
aaagccagcatagga

SEQ ID NO: 792377 - DNA, 15 bp, Homo sapiens
aagccagcataggat

SEQ ID NO: 792378 - DNA, 15 bp, Homo sapiens
agccagcataggatc

SEQ ID NO: 792379 - DNA, 15 bp, Homo sapiens
gccagcataggatct

SEQ ID NO: 792380 - DNA, 15 bp, Homo sapiens
ccagcataggatctt

SEQ ID NO: 792381 - DNA, 15 bp, Homo sapiens
cagcataggatcttg

SEQ ID NO: 792382 - DNA, 15 bp, Homo sapiens
agcataggatcttgt

SEQ ID NO: 792383 - DNA, 15 bp, Homo sapiens
gcataggatcttgtt

SEQ ID NO: 792384 - DNA, 15 bp, Homo sapiens
cataggatcttgttt

SEQ ID NO: 792385 - DNA, 15 bp, Homo sapiens
ataggatcttgtttg

SEQ ID NO: 792386 - DNA, 15 bp, Homo sapiens
taggatcttgtttgt

SEQ ID NO: 792387 - DNA, 15 bp, Homo sapiens
aggatcttgtttgtg

SEQ ID NO: 792388 - DNA, 15 bp, Homo sapiens
ggatcttgtttgtgt

SEQ ID NO: 792389 - DNA, 15 bp, Homo sapiens
gatcttgtttgtgtt

SEQ ID NO: 792390 - DNA, 15 bp, Homo sapiens
atcttgtttgtgttt

SEQ ID NO: 792391 - DNA, 15 bp, Homo sapiens
tcttgtttgtgttta

SEQ ID NO: 792392 - DNA, 15 bp, Homo sapiens
cttgtttgtgtttaa

SEQ ID NO: 792393 - DNA, 15 bp, Homo sapiens
ttgtttgtgtttaag

SEQ ID NO: 792394 - DNA, 15 bp, Homo sapiens
tgtttgtgtttaaga

SEQ ID NO: 792395 - DNA, 15 bp, Homo sapiens
gtttgtgtttaagag

SEQ ID NO: 792396 - DNA, 15 bp, Homo sapiens
tttgtgtttaagaga

SEQ ID NO: 792397 - DNA, 15 bp, Homo sapiens
ttgtgtttaagagag

SEQ ID NO: 792398 - DNA, 15 bp, Homo sapiens
tgtgtttaagagaga

SEQ ID NO: 792399 - DNA, 15 bp, Homo sapiens
gtgtttaagagagaa

SEQ ID NO: 792400 - DNA, 15 bp, Homo sapiens
tgtttaagagagaag

SEQ ID NO: 792401 - DNA, 15 bp, Homo sapiens
gtttaagagagaagt

SEQ ID NO: 792402 - DNA, 15 bp, Homo sapiens
tttaagagagaagtt

SEQ ID NO: 792403 - DNA, 15 bp, Homo sapiens
ttaagagagaagttc

SEQ ID NO: 792404 - DNA, 15 bp, Homo sapiens
taagagagaagttca

SEQ ID NO: 792405 - DNA, 15 bp, Homo sapiens
aagagagaagttcag

SEQ ID NO: 792406 - DNA, 15 bp, Homo sapiens
agagagaagttcagg

SEQ ID NO: 792407 - DNA, 15 bp, Homo sapiens
gagagaagttcaggg

SEQ ID NO: 792408 - DNA, 15 bp, Homo sapiens
agagaagttcaggga

SEQ ID NO: 792409 - DNA, 15 bp, Homo sapiens
gagaagttcagggag

SEQ ID NO: 792410 - DNA, 15 bp, Homo sapiens
agaagttcagggaga

SEQ ID NO: 792411 - DNA, 15 bp, Homo sapiens
gaagttcagggagac

SEQ ID NO: 792412 - DNA, 15 bp, Homo sapiens
aagttcagggagact

SEQ ID NO: 792413 - DNA, 15 bp, Homo sapiens
agttcagggagacta

SEQ ID NO: 792414 - DNA, 15 bp, Homo sapiens
gttcagggagactat

SEQ ID NO: 792415 - DNA, 15 bp, Homo sapiens
ttcagggagactatt

SEQ ID NO: 792416 - DNA, 15 bp, Homo sapiens
tcagggagactattc

SEQ ID NO: 792417 - DNA, 15 bp, Homo sapiens
cagggagactattca

SEQ ID NO: 792418 - DNA, 15 bp, Homo sapiens
agggagactattcag

SEQ ID NO: 792419 - DNA, 15 bp, Homo sapiens
gggagactattcagg

SEQ ID NO: 792420 - DNA, 15 bp, Homo sapiens
ggagactattcaggc

SEQ ID NO: 792421 - DNA, 15 bp, Homo sapiens
gagactattcaggca

SEQ ID NO: 792422 - DNA, 15 bp, Homo sapiens
agactattcaggcac

SEQ ID NO: 792423 - DNA, 15 bp, Homo sapiens
gactattcaggcaca

SEQ ID NO: 792424 - DNA, 15 bp, Homo sapiens
actattcaggcacat

SEQ ID NO: 792425 - DNA, 15 bp, Homo sapiens
ctattcaggcacatt

SEQ ID NO: 792426 - DNA, 15 bp, Homo sapiens
tattcaggcacattg

SEQ ID NO: 792427 - DNA, 15 bp, Homo sapiens
attcaggcacattgt

SEQ ID NO: 792428 - DNA, 15 bp, Homo sapiens
ttcaggcacattgtc

SEQ ID NO: 792429 - DNA, 15 bp, Homo sapiens
tcaggcacattgtct

SEQ ID NO: 792430 - DNA, 15 bp, Homo sapiens
caggcacattgtctg

SEQ ID NO: 792431 - DNA, 15 bp, Homo sapiens
aggcacattgtctgg

SEQ ID NO: 792432 - DNA, 15 bp, Homo sapiens
ggcacattgtctggc

SEQ ID NO: 792433 - DNA, 15 bp, Homo sapiens
gcacattgtctggca

SEQ ID NO: 792434 - DNA, 15 bp, Homo sapiens
cacattgtctggcaa

SEQ ID NO: 792435 - DNA, 15 bp, Homo sapiens
acattgtctggcaag

SEQ ID NO: 792436 - DNA, 15 bp, Homo sapiens
cattgtctggcaagt

SEQ ID NO: 792437 - DNA, 15 bp, Homo sapiens
attgtctggcaagtc

SEQ ID NO: 792438 - DNA, 15 bp, Homo sapiens
ttgtctggcaagtct

SEQ ID NO: 792439 - DNA, 15 bp, Homo sapiens
tgtctggcaagtcta

SEQ ID NO: 792440 - DNA, 15 bp, Homo sapiens
gtctggcaagtctag

SEQ ID NO: 792441 - DNA, 15 bp, Homo sapiens
tctggcaagtctagc

SEQ ID NO: 792442 - DNA, 15 bp, Homo sapiens
ctggcaagtctagca

SEQ ID NO: 792443 - DNA, 15 bp, Homo sapiens
tggcaagtctagcac

SEQ ID NO: 792444 - DNA, 15 bp, Homo sapiens
ggcaagtctagcact

SEQ ID NO: 792445 - DNA, 15 bp, Homo sapiens
gcaagtctagcactg

SEQ ID NO: 792446 - DNA, 15 bp, Homo sapiens
caagtctagcactgg

SEQ ID NO: 792447 - DNA, 15 bp, Homo sapiens
aagtctagcactggt

SEQ ID NO: 792448 - DNA, 15 bp, Homo sapiens
agtctagcactggtc

SEQ ID NO: 792449 - DNA, 15 bp, Homo sapiens
gtctagcactggtca

SEQ ID NO: 792450 - DNA, 15 bp, Homo sapiens
tctagcactggtcaa

SEQ ID NO: 792451 - DNA, 15 bp, Homo sapiens
ctagcactggtcaaa

SEQ ID NO: 792452 - DNA, 15 bp, Homo sapiens
tagcactggtcaaac

SEQ ID NO: 792453 - DNA, 15 bp, Homo sapiens
agcactggtcaaacc

SEQ ID NO: 792454 - DNA, 15 bp, Homo sapiens
gcactggtcaaaccc

SEQ ID NO: 792455 - DNA, 15 bp, Homo sapiens
cactggtcaaaccct

SEQ ID NO: 792456 - DNA, 15 bp, Homo sapiens
actggtcaaaccctc

SEQ ID NO: 792457 - DNA, 15 bp, Homo sapiens
ctggtcaaaccctca

SEQ ID NO: 792458 - DNA, 15 bp, Homo sapiens
tggtcaaaccctcat

SEQ ID NO: 792459 - DNA, 15 bp, Homo sapiens
ggtcaaaccctcata

SEQ ID NO: 792460 - DNA, 15 bp, Homo sapiens
gtcaaaccctcataa

SEQ ID NO: 792461 - DNA, 15 bp, Homo sapiens
tcaaaccctcataaa

SEQ ID NO: 792462 - DNA, 15 bp, Homo sapiens
caaaccctcataaat

SEQ ID NO: 792463 - DNA, 15 bp, Homo sapiens
aaaccctcataaata

SEQ ID NO: 792464 - DNA, 15 bp, Homo sapiens
aaccctcataaatat

SEQ ID NO: 792465 - DNA, 15 bp, Homo sapiens
accctcataaatatt

SEQ ID NO: 792466 - DNA, 15 bp, Homo sapiens
ccctcataaatattc

SEQ ID NO: 792467 - DNA, 15 bp, Homo sapiens
cctcataaatattcc

SEQ ID NO: 792468 - DNA, 15 bp, Homo sapiens
ctcataaatattcct

SEQ ID NO: 792469 - DNA, 15 bp, Homo sapiens
tcataaatattcctg

SEQ ID NO: 792470 - DNA, 15 bp, Homo sapiens
cataaatattcctgt

SEQ ID NO: 792471 - DNA, 15 bp, Homo sapiens
ataaatattcctgtc

SEQ ID NO: 792472 - DNA, 15 bp, Homo sapiens
taaatattcctgtcc

SEQ ID NO: 792473 - DNA, 15 bp, Homo sapiens
aaatattcctgtcca

SEQ ID NO: 792474 - DNA, 15 bp, Homo sapiens
aatattcctgtccaa

SEQ ID NO: 792475 - DNA, 15 bp, Homo sapiens
atattcctgtccaat

SEQ ID NO: 792476 - DNA, 15 bp, Homo sapiens
tattcctgtccaatc

SEQ ID NO: 792477 - DNA, 15 bp, Homo sapiens
attcctgtccaatct

SEQ ID NO: 792478 - DNA, 15 bp, Homo sapiens
ttcctgtccaatctg

SEQ ID NO: 792479 - DNA, 15 bp, Homo sapiens
tcctgtccaatctga

SEQ ID NO: 792480 - DNA, 15 bp, Homo sapiens
cctgtccaatctgaa

SEQ ID NO: 792481 - DNA, 15 bp, Homo sapiens
ctgtccaatctgaac

SEQ ID NO: 792482 - DNA, 15 bp, Homo sapiens
tgtccaatctgaact

SEQ ID NO: 792483 - DNA, 15 bp, Homo sapiens
gtccaatctgaactt

SEQ ID NO: 792484 - DNA, 15 bp, Homo sapiens
tccaatctgaacttg

SEQ ID NO: 792485 - DNA, 15 bp, Homo sapiens
ccaatctgaacttga

SEQ ID NO: 792486 - DNA, 15 bp, Homo sapiens
caatctgaacttgaa

SEQ ID NO: 792487 - DNA, 15 bp, Homo sapiens
aatctgaacttgaaa

SEQ ID NO: 792488 - DNA, 15 bp, Homo sapiens
atctgaacttgaaat

SEQ ID NO: 792489 - DNA, 15 bp, Homo sapiens
tctgaacttgaaatg

SEQ ID NO: 792490 - DNA, 15 bp, Homo sapiens
ctgaacttgaaatgt

SEQ ID NO: 792491 - DNA, 15 bp, Homo sapiens
tgaacttgaaatgtt

SEQ ID NO: 792492 - DNA, 15 bp, Homo sapiens
gaacttgaaatgttc

SEQ ID NO: 792493 - DNA, 15 bp, Homo sapiens
aacttgaaatgttct

SEQ ID NO: 792494 - DNA, 15 bp, Homo sapiens
acttgaaatgttctt

SEQ ID NO: 792495 - DNA, 15 bp, Homo sapiens
cttgaaatgttcttg

SEQ ID NO: 792496 - DNA, 15 bp, Homo sapiens
ttgaaatgttcttgt

SEQ ID NO: 792497 - DNA, 15 bp, Homo sapiens
tgaaatgttcttgtt

SEQ ID NO: 792498 - DNA, 15 bp, Homo sapiens
gaaatgttcttgttg

SEQ ID NO: 792499 - DNA, 15 bp, Homo sapiens
aaatgttcttgttgt

SEQ ID NO: 792500 - DNA, 15 bp, Homo sapiens
aatgttcttgttgtg

SEQ ID NO: 792501 - DNA, 15 bp, Homo sapiens
atgttcttgttgtgg

SEQ ID NO: 792502 - DNA, 15 bp, Homo sapiens
tgttcttgttgtgga

SEQ ID NO: 792503 - DNA, 15 bp, Homo sapiens
gttcttgttgtggac

SEQ ID NO: 792504 - DNA, 15 bp, Homo sapiens
ttcttgttgtggaca

SEQ ID NO: 792505 - DNA, 15 bp, Homo sapiens
tcttgttgtggacac

SEQ ID NO: 792506 - DNA, 15 bp, Homo sapiens
cttgttgtggacacc

SEQ ID NO: 792507 - DNA, 15 bp, Homo sapiens
ttgttgtggacacct

SEQ ID NO: 792508 - DNA, 15 bp, Homo sapiens
tgttgtggacacctt

SEQ ID NO: 792509 - DNA, 15 bp, Homo sapiens
gttgtggacaccttt

SEQ ID NO: 792510 - DNA, 15 bp, Homo sapiens
ttgtggacacctttg

SEQ ID NO: 792511 - DNA, 15 bp, Homo sapiens
tgtggacacctttgg

SEQ ID NO: 792512 - DNA, 15 bp, Homo sapiens
gtggacacctttggt

SEQ ID NO: 792513 - DNA, 15 bp, Homo sapiens
tggacacctttggtg

SEQ ID NO: 792514 - DNA, 15 bp, Homo sapiens
ggacacctttggtga

SEQ ID NO: 792515 - DNA, 15 bp, Homo sapiens
gacacctttggtgag

SEQ ID NO: 792516 - DNA, 15 bp, Homo sapiens
acacctttggtgagc

SEQ ID NO: 792517 - DNA, 15 bp, Homo sapiens
cacctttggtgagcc

SEQ ID NO: 792518 - DNA, 15 bp, Homo sapiens
acctttggtgagcca

SEQ ID NO: 792519 - DNA, 15 bp, Homo sapiens
cctttggtgagccag

SEQ ID NO: 792520 - DNA, 15 bp, Homo sapiens
ctttggtgagccagt

SEQ ID NO: 792521 - DNA, 15 bp, Homo sapiens
tttggtgagccagtc

SEQ ID NO: 792522 - DNA, 15 bp, Homo sapiens
ttggtgagccagtct

SEQ ID NO: 792523 - DNA, 15 bp, Homo sapiens
tggtgagccagtcta

SEQ ID NO: 792524 - DNA, 15 bp, Homo sapiens
ggtgagccagtctac

SEQ ID NO: 792525 - DNA, 15 bp, Homo sapiens
gtgagccagtctact

SEQ ID NO: 792526 - DNA, 15 bp, Homo sapiens
tgagccagtctactt

SEQ ID NO: 792527 - DNA, 15 bp, Homo sapiens
gagccagtctacttg

SEQ ID NO: 792528 - DNA, 15 bp, Homo sapiens
agccagtctacttga

SEQ ID NO: 792529 - DNA, 15 bp, Homo sapiens
gccagtctacttgag

SEQ ID NO: 792530 - DNA, 15 bp, Homo sapiens
ccagtctacttgagg

SEQ ID NO: 792531 - DNA, 15 bp, Homo sapiens
cagtctacttgagga

SEQ ID NO: 792532 - DNA, 15 bp, Homo sapiens
agtctacttgaggac

SEQ ID NO: 792533 - DNA, 15 bp, Homo sapiens
gtctacttgaggaca

SEQ ID NO: 792534 - DNA, 15 bp, Homo sapiens
tctacttgaggacaa

SEQ ID NO: 792535 - DNA, 15 bp, Homo sapiens
ctacttgaggacaat

SEQ ID NO: 792536 - DNA, 15 bp, Homo sapiens
tacttgaggacaatc

SEQ ID NO: 792537 - DNA, 15 bp, Homo sapiens
acttgaggacaatcc

SEQ ID NO: 792538 - DNA, 15 bp, Homo sapiens
cttgaggacaatcca

SEQ ID NO: 792539 - DNA, 15 bp, Homo sapiens
ttgaggacaatccag

SEQ ID NO: 792540 - DNA, 15 bp, Homo sapiens
tgaggacaatccagt

SEQ ID NO: 792541 - DNA, 15 bp, Homo sapiens
gaggacaatccagtc

SEQ ID NO: 792542 - DNA, 15 bp, Homo sapiens
aggacaatccagtct

SEQ ID NO: 792543 - DNA, 15 bp, Homo sapiens
ggacaatccagtcta

SEQ ID NO: 792544 - DNA, 15 bp, Homo sapiens
gacaatccagtctac

SEQ ID NO: 792545 - DNA, 15 bp, Homo sapiens
acaatccagtctact

SEQ ID NO: 792546 - DNA, 15 bp, Homo sapiens
caatccagtctacta

SEQ ID NO: 792547 - DNA, 15 bp, Homo sapiens
aatccagtctactag

SEQ ID NO: 792548 - DNA, 15 bp, Homo sapiens
atccagtctactagt

SEQ ID NO: 792549 - DNA, 15 bp, Homo sapiens
tccagtctactagtt

SEQ ID NO: 792550 - DNA, 15 bp, Homo sapiens
ccagtctactagttt

SEQ ID NO: 792551 - DNA, 15 bp, Homo sapiens
cagtctactagttta

SEQ ID NO: 792552 - DNA, 15 bp, Homo sapiens
agtctactagtttag

SEQ ID NO: 792553 - DNA, 15 bp, Homo sapiens
gtctactagtttagc

SEQ ID NO: 792554 - DNA, 15 bp, Homo sapiens
tctactagtttagct

SEQ ID NO: 792555 - DNA, 15 bp, Homo sapiens
ctactagtttagctt

SEQ ID NO: 792556 - DNA, 15 bp, Homo sapiens
tactagtttagcttc

SEQ ID NO: 792557 - DNA, 15 bp, Homo sapiens
actagtttagcttca

SEQ ID NO: 792558 - DNA, 15 bp, Homo sapiens
ctagtttagcttcaa

SEQ ID NO: 792559 - DNA, 15 bp, Homo sapiens
tagtttagcttcaaa

SEQ ID NO: 792560 - DNA, 15 bp, Homo sapiens
agtttagcttcaaaa

SEQ ID NO: 792561 - DNA, 15 bp, Homo sapiens
gtttagcttcaaaaa

SEQ ID NO: 792562 - DNA, 15 bp, Homo sapiens
tttagcttcaaaaag

SEQ ID NO: 792563 - DNA, 15 bp, Homo sapiens
ttagcttcaaaaagc

SEQ ID NO: 792564 - DNA, 15 bp, Homo sapiens
tagcttcaaaaagca

SEQ ID NO: 792565 - DNA, 15 bp, Homo sapiens
agcttcaaaaagcat

SEQ ID NO: 792566 - DNA, 15 bp, Homo sapiens
gcttcaaaaagcatg

SEQ ID NO: 792567 - DNA, 15 bp, Homo sapiens
cttcaaaaagcatgc

SEQ ID NO: 792568 - DNA, 15 bp, Homo sapiens
ttcaaaaagcatgca

SEQ ID NO: 792569 - DNA, 15 bp, Homo sapiens
tcaaaaagcatgcac

SEQ ID NO: 792570 - DNA, 15 bp, Homo sapiens
caaaaagcatgcact

SEQ ID NO: 792571 - DNA, 15 bp, Homo sapiens
aaaaagcatgcacta

SEQ ID NO: 792572 - DNA, 15 bp, Homo sapiens
aaaagcatgcactag

SEQ ID NO: 792573 - DNA, 15 bp, Homo sapiens
aaagcatgcactaga

SEQ ID NO: 792574 - DNA, 15 bp, Homo sapiens
aagcatgcactagaa

SEQ ID NO: 792575 - DNA, 15 bp, Homo sapiens
agcatgcactagaaa

SEQ ID NO: 792576 - DNA, 15 bp, Homo sapiens
gcatgcactagaaac

SEQ ID NO: 792577 - DNA, 15 bp, Homo sapiens
catgcactagaaaca

SEQ ID NO: 792578 - DNA, 15 bp, Homo sapiens
atgcactagaaacaa

SEQ ID NO: 792579 - DNA, 15 bp, Homo sapiens
tgcactagaaacaat

SEQ ID NO: 792580 - DNA, 15 bp, Homo sapiens
gcactagaaacaatt

SEQ ID NO: 792581 - DNA, 15 bp, Homo sapiens
cactagaaacaatta

SEQ ID NO: 792582 - DNA, 15 bp, Homo sapiens
actagaaacaattag

SEQ ID NO: 792583 - DNA, 15 bp, Homo sapiens
ctagaaacaattaga

SEQ ID NO: 792584 - DNA, 15 bp, Homo sapiens
tagaaacaattagaa

SEQ ID NO: 792585 - DNA, 15 bp, Homo sapiens
agaaacaattagaag

SEQ ID NO: 792586 - DNA, 15 bp, Homo sapiens
gaaacaattagaaga

SEQ ID NO: 792587 - DNA, 15 bp, Homo sapiens
aaacaattagaagaa

SEQ ID NO: 792588 - DNA, 15 bp, Homo sapiens
aacaattagaagaac

SEQ ID NO: 792589 - DNA, 15 bp, Homo sapiens
acaattagaagaaca

SEQ ID NO: 792590 - DNA, 15 bp, Homo sapiens
caattagaagaacag

SEQ ID NO: 792591 - DNA, 15 bp, Homo sapiens
aattagaagaacagg

SEQ ID NO: 792592 - DNA, 15 bp, Homo sapiens
attagaagaacaggg

SEQ ID NO: 792593 - DNA, 15 bp, Homo sapiens
ttagaagaacagggt

SEQ ID NO: 792594 - DNA, 15 bp, Homo sapiens
tagaagaacagggtt

SEQ ID NO: 792595 - DNA, 15 bp, Homo sapiens
agaagaacagggttg

SEQ ID NO: 792596 - DNA, 15 bp, Homo sapiens
gaagaacagggttgc

SEQ ID NO: 792597 - DNA, 15 bp, Homo sapiens
aagaacagggttgct

SEQ ID NO: 792598 - DNA, 15 bp, Homo sapiens
agaacagggttgctt

SEQ ID NO: 792599 - DNA, 15 bp, Homo sapiens
gaacagggttgcttt

SEQ ID NO: 792600 - DNA, 15 bp, Homo sapiens
aacagggttgctttt

SEQ ID NO: 792601 - DNA, 15 bp, Homo sapiens
acagggttgctttta

SEQ ID NO: 792602 - DNA, 15 bp, Homo sapiens
cagggttgcttttaa

SEQ ID NO: 792603 - DNA, 15 bp, Homo sapiens
agggttgcttttaaa

SEQ ID NO: 792604 - DNA, 15 bp, Homo sapiens
gggttgcttttaaag

SEQ ID NO: 792605 - DNA, 15 bp, Homo sapiens
ggttgcttttaaagc

SEQ ID NO: 792606 - DNA, 15 bp, Homo sapiens
gttgcttttaaagct

SEQ ID NO: 792607 - DNA, 15 bp, Homo sapiens
ttgcttttaaagcta

SEQ ID NO: 792608 - DNA, 15 bp, Homo sapiens
tgcttttaaagctat

SEQ ID NO: 792609 - DNA, 15 bp, Homo sapiens
gcttttaaagctatc

SEQ ID NO: 792610 - DNA, 15 bp, Homo sapiens
cttttaaagctatca

SEQ ID NO: 792611 - DNA, 15 bp, Homo sapiens
ttttaaagctatcag

SEQ ID NO: 792612 - DNA, 15 bp, Homo sapiens
tttaaagctatcagg

SEQ ID NO: 792613 - DNA, 15 bp, Homo sapiens
ttaaagctatcagga

SEQ ID NO: 792614 - DNA, 15 bp, Homo sapiens
taaagctatcaggat

SEQ ID NO: 792615 - DNA, 15 bp, Homo sapiens
aaagctatcaggatg

SEQ ID NO: 792616 - DNA, 15 bp, Homo sapiens
aagctatcaggatgg

SEQ ID NO: 792617 - DNA, 15 bp, Homo sapiens
agctatcaggatggt

SEQ ID NO: 792618 - DNA, 15 bp, Homo sapiens
gctatcaggatggtg

SEQ ID NO: 792619 - DNA, 15 bp, Homo sapiens
ctatcaggatggtgt

SEQ ID NO: 792620 - DNA, 15 bp, Homo sapiens
tatcaggatggtgtt

SEQ ID NO: 792621 - DNA, 15 bp, Homo sapiens
atcaggatggtgttt

SEQ ID NO: 792622 - DNA, 15 bp, Homo sapiens
tcaggatggtgtttg

SEQ ID NO: 792623 - DNA, 15 bp, Homo sapiens
caggatggtgtttgc

SEQ ID NO: 792624 - DNA, 15 bp, Homo sapiens
aggatggtgtttgct

SEQ ID NO: 792625 - DNA, 15 bp, Homo sapiens
ggatggtgtttgctg

SEQ ID NO: 792626 - DNA, 15 bp, Homo sapiens
gatggtgtttgctgt

SEQ ID NO: 792627 - DNA, 15 bp, Homo sapiens
atggtgtttgctgtt

SEQ ID NO: 792628 - DNA, 15 bp, Homo sapiens
tggtgtttgctgttg

SEQ ID NO: 792629 - DNA, 15 bp, Homo sapiens
ggtgtttgctgttgt

SEQ ID NO: 792630 - DNA, 15 bp, Homo sapiens
gtgtttgctgttgtt

SEQ ID NO: 792631 - DNA, 15 bp, Homo sapiens
tgtttgctgttgttt

SEQ ID NO: 792632 - DNA, 15 bp, Homo sapiens
gtttgctgttgtttt

SEQ ID NO: 792633 - DNA, 15 bp, Homo sapiens
tttgctgttgttttg

SEQ ID NO: 792634 - DNA, 15 bp, Homo sapiens
ttgctgttgttttgt

SEQ ID NO: 792635 - DNA, 15 bp, Homo sapiens
tgctgttgttttgtt

SEQ ID NO: 792636 - DNA, 15 bp, Homo sapiens
gctgttgttttgttg

SEQ ID NO: 792637 - DNA, 15 bp, Homo sapiens
ctgttgttttgttgt

SEQ ID NO: 792638 - DNA, 15 bp, Homo sapiens
tgttgttttgttgtt

SEQ ID NO: 792639 - DNA, 15 bp, Homo sapiens
gttgttttgttgtta

SEQ ID NO: 792640 - DNA, 15 bp, Homo sapiens
ttgttttgttgttaa

SEQ ID NO: 792641 - DNA, 15 bp, Homo sapiens
tgttttgttgttaaa

SEQ ID NO: 792642 - DNA, 15 bp, Homo sapiens
gttttgttgttaaat

SEQ ID NO: 792643 - DNA, 15 bp, Homo sapiens
ttttgttgttaaata

SEQ ID NO: 792644 - DNA, 15 bp, Homo sapiens
tttgttgttaaatat

SEQ ID NO: 792645 - DNA, 15 bp, Homo sapiens
ttgttgttaaatatc

SEQ ID NO: 792646 - DNA, 15 bp, Homo sapiens
tgttgttaaatatca

SEQ ID NO: 792647 - DNA, 15 bp, Homo sapiens
gttgttaaatatcaa

SEQ ID NO: 792648 - DNA, 15 bp, Homo sapiens
ttgttaaatatcaat

SEQ ID NO: 792649 - DNA, 15 bp, Homo sapiens
tgttaaatatcaatg

SEQ ID NO: 792650 - DNA, 15 bp, Homo sapiens
gttaaatatcaatgg

SEQ ID NO: 792651 - DNA, 15 bp, Homo sapiens
ttaaatatcaatggg

SEQ ID NO: 792652 - DNA, 15 bp, Homo sapiens
taaatatcaatgggt

SEQ ID NO: 792653 - DNA, 15 bp, Homo sapiens
aaatatcaatgggtt

SEQ ID NO: 792654 - DNA, 15 bp, Homo sapiens
aatatcaatgggtta

SEQ ID NO: 792655 - DNA, 15 bp, Homo sapiens
atatcaatgggttac

SEQ ID NO: 792656 - DNA, 15 bp, Homo sapiens
tatcaatgggttact

SEQ ID NO: 792657 - DNA, 15 bp, Homo sapiens
atcaatgggttactc

SEQ ID NO: 792658 - DNA, 15 bp, Homo sapiens
tcaatgggttactca

SEQ ID NO: 792659 - DNA, 15 bp, Homo sapiens
caatgggttactcaa

SEQ ID NO: 792660 - DNA, 15 bp, Homo sapiens
aatgggttactcaat

SEQ ID NO: 792661 - DNA, 15 bp, Homo sapiens
atgggttactcaatg

SEQ ID NO: 792662 - DNA, 15 bp, Homo sapiens
tgggttactcaatgg

SEQ ID NO: 792663 - DNA, 15 bp, Homo sapiens
gggttactcaatggt

SEQ ID NO: 792664 - DNA, 15 bp, Homo sapiens
ggttactcaatggta

SEQ ID NO: 792665 - DNA, 15 bp, Homo sapiens
gttactcaatggtaa

SEQ ID NO: 792666 - DNA, 15 bp, Homo sapiens
ttactcaatggtaat

SEQ ID NO: 792667 - DNA, 15 bp, Homo sapiens
tactcaatggtaata

SEQ ID NO: 792668 - DNA, 15 bp, Homo sapiens
actcaatggtaatag

SEQ ID NO: 792669 - DNA, 15 bp, Homo sapiens
ctcaatggtaataga

SEQ ID NO: 792670 - DNA, 15 bp, Homo sapiens
tcaatggtaatagat

SEQ ID NO: 792671 - DNA, 15 bp, Homo sapiens
caatggtaatagatc

SEQ ID NO: 792672 - DNA, 15 bp, Homo sapiens
aatggtaatagatct

SEQ ID NO: 792673 - DNA, 15 bp, Homo sapiens
atggtaatagatcta

SEQ ID NO: 792674 - DNA, 15 bp, Homo sapiens
tggtaatagatctaa

SEQ ID NO: 792675 - DNA, 15 bp, Homo sapiens
ggtaatagatctaaa

SEQ ID NO: 792676 - DNA, 15 bp, Homo sapiens
gtaatagatctaaag

SEQ ID NO: 792677 - DNA, 15 bp, Homo sapiens
taatagatctaaaga

SEQ ID NO: 792678 - DNA, 15 bp, Homo sapiens
aatagatctaaagag

SEQ ID NO: 792679 - DNA, 15 bp, Homo sapiens
atagatctaaagaga

SEQ ID NO: 792680 - DNA, 15 bp, Homo sapiens
tagatctaaagagat

SEQ ID NO: 792681 - DNA, 15 bp, Homo sapiens
agatctaaagagatg

SEQ ID NO: 792682 - DNA, 15 bp, Homo sapiens
gatctaaagagatga

SEQ ID NO: 792683 - DNA, 15 bp, Homo sapiens
atctaaagagatgaa

SEQ ID NO: 792684 - DNA, 15 bp, Homo sapiens
tctaaagagatgaac

SEQ ID NO: 792685 - DNA, 15 bp, Homo sapiens
ctaaagagatgaaca

SEQ ID NO: 792686 - DNA, 15 bp, Homo sapiens
taaagagatgaacat

SEQ ID NO: 792687 - DNA, 15 bp, Homo sapiens
aaagagatgaacatt

SEQ ID NO: 792688 - DNA, 15 bp, Homo sapiens
aagagatgaacattg

SEQ ID NO: 792689 - DNA, 15 bp, Homo sapiens
agagatgaacattgt

SEQ ID NO: 792690 - DNA, 15 bp, Homo sapiens
gagatgaacattgtt

SEQ ID NO: 792691 - DNA, 15 bp, Homo sapiens
agatgaacattgtta

SEQ ID NO: 792692 - DNA, 15 bp, Homo sapiens
gatgaacattgttac

SEQ ID NO: 792693 - DNA, 15 bp, Homo sapiens
atgaacattgttaca

SEQ ID NO: 792694 - DNA, 15 bp, Homo sapiens
tgaacattgttacat

SEQ ID NO: 792695 - DNA, 15 bp, Homo sapiens
gaacattgttacatg

SEQ ID NO: 792696 - DNA, 15 bp, Homo sapiens
aacattgttacatga

SEQ ID NO: 792697 - DNA, 15 bp, Homo sapiens
acattgttacatgaa

SEQ ID NO: 792698 - DNA, 15 bp, Homo sapiens
cattgttacatgaat

SEQ ID NO: 792699 - DNA, 15 bp, Homo sapiens
attgttacatgaata

SEQ ID NO: 792700 - DNA, 15 bp, Homo sapiens
ttgttacatgaatat

SEQ ID NO: 792701 - DNA, 15 bp, Homo sapiens
tgttacatgaatatt

SEQ ID NO: 792702 - DNA, 15 bp, Homo sapiens
gttacatgaatattg

SEQ ID NO: 792703 - DNA, 15 bp, Homo sapiens
ttacatgaatattgc

SEQ ID NO: 792704 - DNA, 15 bp, Homo sapiens
acatgaatattgcaa

SEQ ID NO: 792705 - DNA, 15 bp, Homo sapiens
catgaatattgcaag

SEQ ID NO: 792706 - DNA, 15 bp, Homo sapiens
atgaatattgcaaga

SEQ ID NO: 792707 - DNA, 15 bp, Homo sapiens
tgaatattgcaagaa

SEQ ID NO: 792708 - DNA, 15 bp, Homo sapiens
gaatattgcaagaaa

SEQ ID NO: 792709 - DNA, 15 bp, Homo sapiens
aatattgcaagaaat

SEQ ID NO: 792710 - DNA, 15 bp, Homo sapiens
atattgcaagaaatt

SEQ ID NO: 792711 - DNA, 15 bp, Homo sapiens
tattgcaagaaattt

SEQ ID NO: 792712 - DNA, 15 bp, Homo sapiens
attgcaagaaatttg

SEQ ID NO: 792713 - DNA, 15 bp, Homo sapiens
ttgcaagaaatttgt

SEQ ID NO: 792714 - DNA, 15 bp, Homo sapiens
tgcaagaaatttgtg

SEQ ID NO: 792715 - DNA, 15 bp, Homo sapiens
gcaagaaatttgtgg

SEQ ID NO: 792716 - DNA, 15 bp, Homo sapiens
caagaaatttgtgga

SEQ ID NO: 792717 - DNA, 15 bp, Homo sapiens
aagaaatttgtggat

SEQ ID NO: 792718 - DNA, 15 bp, Homo sapiens
agaaatttgtggatc

SEQ ID NO: 792719 - DNA, 15 bp, Homo sapiens
gaaatttgtggatct

SEQ ID NO: 792720 - DNA, 15 bp, Homo sapiens
aaatttgtggatctc

SEQ ID NO: 792721 - DNA, 15 bp, Homo sapiens
aatttgtggatctct

SEQ ID NO: 792722 - DNA, 15 bp, Homo sapiens
atttgtggatctctt

SEQ ID NO: 792723 - DNA, 15 bp, Homo sapiens
tttgtggatctcttg

SEQ ID NO: 792724 - DNA, 15 bp, Homo sapiens
ttgtggatctcttgg

SEQ ID NO: 792725 - DNA, 15 bp, Homo sapiens
tgtggatctcttggg

SEQ ID NO: 792726 - DNA, 15 bp, Homo sapiens
gtggatctcttgggg

SEQ ID NO: 792727 - DNA, 15 bp, Homo sapiens
tggatctcttgggga

SEQ ID NO: 792728 - DNA, 15 bp, Homo sapiens
ggatctcttggggac

SEQ ID NO: 792729 - DNA, 15 bp, Homo sapiens
gatctcttggggacc

SEQ ID NO: 792730 - DNA, 15 bp, Homo sapiens
atctcttggggaccc

SEQ ID NO: 792731 - DNA, 15 bp, Homo sapiens
tctcttggggaccct

SEQ ID NO: 792732 - DNA, 15 bp, Homo sapiens
ctcttggggaccctc

SEQ ID NO: 792733 - DNA, 15 bp, Homo sapiens
tcttggggaccctcc

SEQ ID NO: 792734 - DNA, 15 bp, Homo sapiens
cttggggaccctcca

SEQ ID NO: 792735 - DNA, 15 bp, Homo sapiens
ttggggaccctccag

SEQ ID NO: 792736 - DNA, 15 bp, Homo sapiens
tggggaccctccaga

SEQ ID NO: 792737 - DNA, 15 bp, Homo sapiens
ggggaccctccagac

SEQ ID NO: 792738 - DNA, 15 bp, Homo sapiens
gggaccctccagacc

SEQ ID NO: 792739 - DNA, 15 bp, Homo sapiens
ggaccctccagacct

SEQ ID NO: 792740 - DNA, 15 bp, Homo sapiens
gaccctccagaccta

SEQ ID NO: 792741 - DNA, 15 bp, Homo sapiens
accctccagacctag

SEQ ID NO: 792742 - DNA, 15 bp, Homo sapiens
ccctccagacctagt

SEQ ID NO: 792743 - DNA, 15 bp, Homo sapiens
cctccagacctagtt

SEQ ID NO: 792744 - DNA, 15 bp, Homo sapiens
ctccagacctagttt

SEQ ID NO: 792745 - DNA, 15 bp, Homo sapiens
tccagacctagtttt

SEQ ID NO: 792746 - DNA, 15 bp, Homo sapiens
ccagacctagttttg

SEQ ID NO: 792747 - DNA, 15 bp, Homo sapiens
cagacctagttttga

SEQ ID NO: 792748 - DNA, 15 bp, Homo sapiens
agacctagttttgag

SEQ ID NO: 792749 - DNA, 15 bp, Homo sapiens
gacctagttttgaga

SEQ ID NO: 792750 - DNA, 15 bp, Homo sapiens
acctagttttgagaa

SEQ ID NO: 792751 - DNA, 15 bp, Homo sapiens
cctagttttgagaat

SEQ ID NO: 792752 - DNA, 15 bp, Homo sapiens
ctagttttgagaatg

SEQ ID NO: 792753 - DNA, 15 bp, Homo sapiens
tagttttgagaatga

SEQ ID NO: 792754 - DNA, 15 bp, Homo sapiens
agttttgagaatgac

SEQ ID NO: 792755 - DNA, 15 bp, Homo sapiens
gttttgagaatgact

SEQ ID NO: 792756 - DNA, 15 bp, Homo sapiens
ttttgagaatgactc

SEQ ID NO: 792757 - DNA, 15 bp, Homo sapiens
tttgagaatgactca

SEQ ID NO: 792758 - DNA, 15 bp, Homo sapiens
ttgagaatgactcat

SEQ ID NO: 792759 - DNA, 15 bp, Homo sapiens
tgagaatgactcata

SEQ ID NO: 792760 - DNA, 15 bp, Homo sapiens
gagaatgactcatat

SEQ ID NO: 792761 - DNA, 15 bp, Homo sapiens
agaatgactcatata

SEQ ID NO: 792762 - DNA, 15 bp, Homo sapiens
gaatgactcatataa

SEQ ID NO: 792763 - DNA, 15 bp, Homo sapiens
aatgactcatataaa

SEQ ID NO: 792764 - DNA, 15 bp, Homo sapiens
atgactcatataaac

SEQ ID NO: 792765 - DNA, 15 bp, Homo sapiens
tgactcatataaaca

SEQ ID NO: 792766 - DNA, 15 bp, Homo sapiens
gactcatataaacaa

SEQ ID NO: 792767 - DNA, 15 bp, Homo sapiens
actcatataaacaat

SEQ ID NO: 792768 - DNA, 15 bp, Homo sapiens
ctcatataaacaatt

SEQ ID NO: 792769 - DNA, 15 bp, Homo sapiens
tcatataaacaattt

SEQ ID NO: 792770 - DNA, 15 bp, Homo sapiens
catataaacaatttg

SEQ ID NO: 792771 - DNA, 15 bp, Homo sapiens
atataaacaatttgc

SEQ ID NO: 792772 - DNA, 15 bp, Homo sapiens
tataaacaatttgca

SEQ ID NO: 792773 - DNA, 15 bp, Homo sapiens
ataaacaatttgcag

SEQ ID NO: 792774 - DNA, 15 bp, Homo sapiens
taaacaatttgcaga

SEQ ID NO: 792775 - DNA, 15 bp, Homo sapiens
aaacaatttgcagag

SEQ ID NO: 792776 - DNA, 15 bp, Homo sapiens
aacaatttgcagagt

SEQ ID NO: 792777 - DNA, 15 bp, Homo sapiens
acaatttgcagagtc

SEQ ID NO: 792778 - DNA, 15 bp, Homo sapiens
caatttgcagagtct

SEQ ID NO: 792779 - DNA, 15 bp, Homo sapiens
aatttgcagagtcta

SEQ ID NO: 792780 - DNA, 15 bp, Homo sapiens
atttgcagagtctaa

SEQ ID NO: 792781 - DNA, 15 bp, Homo sapiens
tttgcagagtctaat

SEQ ID NO: 792782 - DNA, 15 bp, Homo sapiens
ttgcagagtctaatt

SEQ ID NO: 792783 - DNA, 15 bp, Homo sapiens
tgcagagtctaattc

SEQ ID NO: 792784 - DNA, 15 bp, Homo sapiens
gcagagtctaattca

SEQ ID NO: 792785 - DNA, 15 bp, Homo sapiens
cagagtctaattcat

SEQ ID NO: 792786 - DNA, 15 bp, Homo sapiens
agagtctaattcata

SEQ ID NO: 792787 - DNA, 15 bp, Homo sapiens
gagtctaattcatat

SEQ ID NO: 792788 - DNA, 15 bp, Homo sapiens
agtctaattcatata

SEQ ID NO: 792789 - DNA, 15 bp, Homo sapiens
gtctaattcatatac

SEQ ID NO: 792790 - DNA, 15 bp, Homo sapiens
tctaattcatatact

SEQ ID NO: 792791 - DNA, 15 bp, Homo sapiens
ctaattcatatactc

SEQ ID NO: 792792 - DNA, 15 bp, Homo sapiens
taattcatatactca

SEQ ID NO: 792793 - DNA, 15 bp, Homo sapiens
aattcatatactcag

SEQ ID NO: 792794 - DNA, 15 bp, Homo sapiens
attcatatactcaga

SEQ ID NO: 792795 - DNA, 15 bp, Homo sapiens
ttcatatactcagac

SEQ ID NO: 792796 - DNA, 15 bp, Homo sapiens
tcatatactcagact

SEQ ID NO: 792797 - DNA, 15 bp, Homo sapiens
catatactcagacta

SEQ ID NO: 792798 - DNA, 15 bp, Homo sapiens
atatactcagactag

SEQ ID NO: 792799 - DNA, 15 bp, Homo sapiens
tatactcagactagg

SEQ ID NO: 792800 - DNA, 15 bp, Homo sapiens
atactcagactaggg

SEQ ID NO: 792801 - DNA, 15 bp, Homo sapiens
tactcagactagggt

SEQ ID NO: 792802 - DNA, 15 bp, Homo sapiens
actcagactagggtt

SEQ ID NO: 792803 - DNA, 15 bp, Homo sapiens
ctcagactagggttc

SEQ ID NO: 792804 - DNA, 15 bp, Homo sapiens
tcagactagggttct

SEQ ID NO: 792805 - DNA, 15 bp, Homo sapiens
cagactagggttctg

SEQ ID NO: 792806 - DNA, 15 bp, Homo sapiens
agactagggttctga

SEQ ID NO: 792807 - DNA, 15 bp, Homo sapiens
gactagggttctgaa

SEQ ID NO: 792808 - DNA, 15 bp, Homo sapiens
actagggttctgaat

SEQ ID NO: 792809 - DNA, 15 bp, Homo sapiens
ctagggttctgaatt

SEQ ID NO: 792810 - DNA, 15 bp, Homo sapiens
tagggttctgaattc

SEQ ID NO: 792811 - DNA, 15 bp, Homo sapiens
agggttctgaattct

SEQ ID NO: 792812 - DNA, 15 bp, Homo sapiens
gggttctgaattctt

SEQ ID NO: 792813 - DNA, 15 bp, Homo sapiens
ggttctgaattcttt

SEQ ID NO: 792814 - DNA, 15 bp, Homo sapiens
gttctgaattctttt

SEQ ID NO: 792815 - DNA, 15 bp, Homo sapiens
ttctgaattcttttc

SEQ ID NO: 792816 - DNA, 15 bp, Homo sapiens
tctgaattcttttcc

SEQ ID NO: 792817 - DNA, 15 bp, Homo sapiens
ctgaattcttttccc

SEQ ID NO: 792818 - DNA, 15 bp, Homo sapiens
tgaattcttttcccc

SEQ ID NO: 792819 - DNA, 15 bp, Homo sapiens
gaattcttttccccc

SEQ ID NO: 792820 - DNA, 15 bp, Homo sapiens
aattcttttccccct

SEQ ID NO: 792821 - DNA, 15 bp, Homo sapiens
attcttttccccctg

SEQ ID NO: 792822 - DNA, 15 bp, Homo sapiens
ttcttttccccctgg

SEQ ID NO: 792823 - DNA, 15 bp, Homo sapiens
tcttttccccctggg

SEQ ID NO: 792824 - DNA, 15 bp, Homo sapiens
cttttccccctggga

SEQ ID NO: 792825 - DNA, 15 bp, Homo sapiens
ttttccccctgggag

SEQ ID NO: 792826 - DNA, 15 bp, Homo sapiens
tttccccctgggagg

SEQ ID NO: 792827 - DNA, 15 bp, Homo sapiens
ttccccctgggagga

SEQ ID NO: 792828 - DNA, 15 bp, Homo sapiens
tccccctgggaggaa

SEQ ID NO: 792829 - DNA, 15 bp, Homo sapiens
ccccctgggaggaag

SEQ ID NO: 792830 - DNA, 15 bp, Homo sapiens
ccctgggaggaagga

SEQ ID NO: 792831 - DNA, 15 bp, Homo sapiens
cctgggaggaaggaa

SEQ ID NO: 792832 - DNA, 15 bp, Homo sapiens
ctgggaggaaggaaa

SEQ ID NO: 792833 - DNA, 15 bp, Homo sapiens
tgggaggaaggaaaa

SEQ ID NO: 792834 - DNA, 15 bp, Homo sapiens
gggaggaaggaaaaa

SEQ ID NO: 792835 - DNA, 15 bp, Homo sapiens
ggaggaaggaaaaac

SEQ ID NO: 792836 - DNA, 15 bp, Homo sapiens
gaggaaggaaaaaca

SEQ ID NO: 792837 - DNA, 15 bp, Homo sapiens
aggaaggaaaaacag

SEQ ID NO: 792838 - DNA, 15 bp, Homo sapiens
ggaaggaaaaacaga

SEQ ID NO: 792839 - DNA, 15 bp, Homo sapiens
gaaggaaaaacagag

SEQ ID NO: 792840 - DNA, 15 bp, Homo sapiens
aaggaaaaacagagg

SEQ ID NO: 792841 - DNA, 15 bp, Homo sapiens
aggaaaaacagagga

SEQ ID NO: 792842 - DNA, 15 bp, Homo sapiens
ggaaaaacagaggat

SEQ ID NO: 792843 - DNA, 15 bp, Homo sapiens
gaaaaacagaggata

SEQ ID NO: 792844 - DNA, 15 bp, Homo sapiens
aaaaacagaggataa

SEQ ID NO: 792845 - DNA, 15 bp, Homo sapiens
aaaacagaggataac

SEQ ID NO: 792846 - DNA, 15 bp, Homo sapiens
aaacagaggataaca

SEQ ID NO: 792847 - DNA, 15 bp, Homo sapiens
aacagaggataacat

SEQ ID NO: 792848 - DNA, 15 bp, Homo sapiens
acagaggataacatt

SEQ ID NO: 792849 - DNA, 15 bp, Homo sapiens
cagaggataacattg

SEQ ID NO: 792850 - DNA, 15 bp, Homo sapiens
agaggataacattgg

SEQ ID NO: 792851 - DNA, 15 bp, Homo sapiens
gaggataacattggt

SEQ ID NO: 792852 - DNA, 15 bp, Homo sapiens
aggataacattggtt

SEQ ID NO: 792853 - DNA, 15 bp, Homo sapiens
ggataacattggtta

SEQ ID NO: 792854 - DNA, 15 bp, Homo sapiens
gataacattggttat

SEQ ID NO: 792855 - DNA, 15 bp, Homo sapiens
ataacattggttatc

SEQ ID NO: 792856 - DNA, 15 bp, Homo sapiens
taacattggttatct

SEQ ID NO: 792857 - DNA, 15 bp, Homo sapiens
aacattggttatctg

SEQ ID NO: 792858 - DNA, 15 bp, Homo sapiens
acattggttatctgg

SEQ ID NO: 792859 - DNA, 15 bp, Homo sapiens
cattggttatctggg

SEQ ID NO: 792860 - DNA, 15 bp, Homo sapiens
attggttatctgggg

SEQ ID NO: 792861 - DNA, 15 bp, Homo sapiens
ttggttatctggggt

SEQ ID NO: 792862 - DNA, 15 bp, Homo sapiens
tggttatctggggta

SEQ ID NO: 792863 - DNA, 15 bp, Homo sapiens
ggttatctggggtaa

SEQ ID NO: 792864 - DNA, 15 bp, Homo sapiens
gttatctggggtaat

SEQ ID NO: 792865 - DNA, 15 bp, Homo sapiens
ttatctggggtaata

SEQ ID NO: 792866 - DNA, 15 bp, Homo sapiens
tatctggggtaataa

SEQ ID NO: 792867 - DNA, 15 bp, Homo sapiens
atctggggtaataag

SEQ ID NO: 792868 - DNA, 15 bp, Homo sapiens
tctggggtaataaga

SEQ ID NO: 792869 - DNA, 15 bp, Homo sapiens
ctggggtaataagaa

SEQ ID NO: 792870 - DNA, 15 bp, Homo sapiens
tggggtaataagaaa

SEQ ID NO: 792871 - DNA, 15 bp, Homo sapiens
ggggtaataagaaag

SEQ ID NO: 792872 - DNA, 15 bp, Homo sapiens
gggtaataagaaagc

SEQ ID NO: 792873 - DNA, 15 bp, Homo sapiens
ggtaataagaaagca

SEQ ID NO: 792874 - DNA, 15 bp, Homo sapiens
gtaataagaaagcaa

SEQ ID NO: 792875 - DNA, 15 bp, Homo sapiens
taataagaaagcaag

SEQ ID NO: 792876 - DNA, 15 bp, Homo sapiens
aataagaaagcaagg

SEQ ID NO: 792877 - DNA, 15 bp, Homo sapiens
ataagaaagcaaggg

SEQ ID NO: 792878 - DNA, 15 bp, Homo sapiens
taagaaagcaagggg

SEQ ID NO: 792879 - DNA, 15 bp, Homo sapiens
aagaaagcaaggggc

SEQ ID NO: 792880 - DNA, 15 bp, Homo sapiens
agaaagcaaggggca

SEQ ID NO: 792881 - DNA, 15 bp, Homo sapiens
gaaagcaaggggcag

SEQ ID NO: 792882 - DNA, 15 bp, Homo sapiens
aaagcaaggggcaga

SEQ ID NO: 792883 - DNA, 15 bp, Homo sapiens
aagcaaggggcagac

SEQ ID NO: 792884 - DNA, 15 bp, Homo sapiens
agcaaggggcagact

SEQ ID NO: 792885 - DNA, 15 bp, Homo sapiens
gcaaggggcagacta

SEQ ID NO: 792886 - DNA, 15 bp, Homo sapiens
caaggggcagactac

SEQ ID NO: 792887 - DNA, 15 bp, Homo sapiens
aaggggcagactaca

SEQ ID NO: 792888 - DNA, 15 bp, Homo sapiens
aggggcagactacag

SEQ ID NO: 792889 - DNA, 15 bp, Homo sapiens
ggggcagactacagc

SEQ ID NO: 792890 - DNA, 15 bp, Homo sapiens
gggcagactacagct

SEQ ID NO: 792891 - DNA, 15 bp, Homo sapiens
ggcagactacagctg

SEQ ID NO: 792892 - DNA, 15 bp, Homo sapiens
gcagactacagctgc

SEQ ID NO: 792893 - DNA, 15 bp, Homo sapiens
cagactacagctgcc

SEQ ID NO: 792894 - DNA, 15 bp, Homo sapiens
agactacagctgccc

SEQ ID NO: 792895 - DNA, 15 bp, Homo sapiens
gactacagctgccct

SEQ ID NO: 792896 - DNA, 15 bp, Homo sapiens
actacagctgcccta

SEQ ID NO: 792897 - DNA, 15 bp, Homo sapiens
ctacagctgccctaa

SEQ ID NO: 792898 - DNA, 15 bp, Homo sapiens
tacagctgccctaag

SEQ ID NO: 792899 - DNA, 15 bp, Homo sapiens
acagctgccctaaga

SEQ ID NO: 792900 - DNA, 15 bp, Homo sapiens
cagctgccctaagat

SEQ ID NO: 792901 - DNA, 15 bp, Homo sapiens
agctgccctaagatc

SEQ ID NO: 792902 - DNA, 15 bp, Homo sapiens
gctgccctaagatct

SEQ ID NO: 792903 - DNA, 15 bp, Homo sapiens
ctgccctaagatctg

SEQ ID NO: 792904 - DNA, 15 bp, Homo sapiens
tgccctaagatctga

SEQ ID NO: 792905 - DNA, 15 bp, Homo sapiens
gccctaagatctgag

SEQ ID NO: 792906 - DNA, 15 bp, Homo sapiens
ccctaagatctgaga

SEQ ID NO: 792907 - DNA, 15 bp, Homo sapiens
cctaagatctgagat

SEQ ID NO: 792908 - DNA, 15 bp, Homo sapiens
ctaagatctgagatc

SEQ ID NO: 792909 - DNA, 15 bp, Homo sapiens
taagatctgagatct

SEQ ID NO: 792910 - DNA, 15 bp, Homo sapiens
aagatctgagatctg

SEQ ID NO: 792911 - DNA, 15 bp, Homo sapiens
agatctgagatctga

SEQ ID NO: 792912 - DNA, 15 bp, Homo sapiens
tctgtgggccttcat

SEQ ID NO: 792913 - DNA, 15 bp, Homo sapiens
ctgtgggccttcatt

SEQ ID NO: 792914 - DNA, 15 bp, Homo sapiens
tgtgggccttcattc

SEQ ID NO: 792915 - DNA, 15 bp, Homo sapiens
gtgggccttcattca

SEQ ID NO: 792916 - DNA, 15 bp, Homo sapiens
tgggccttcattcag

SEQ ID NO: 792917 - DNA, 15 bp, Homo sapiens
gggccttcattcagc

SEQ ID NO: 792918 - DNA, 15 bp, Homo sapiens
ggccttcattcagca

SEQ ID NO: 792919 - DNA, 15 bp, Homo sapiens
gccttcattcagcat

SEQ ID NO: 792920 - DNA, 15 bp, Homo sapiens
ccttcattcagcatg

SEQ ID NO: 792921 - DNA, 15 bp, Homo sapiens
cttcattcagcatgt

SEQ ID NO: 792922 - DNA, 15 bp, Homo sapiens
ttcattcagcatgtg

SEQ ID NO: 792923 - DNA, 15 bp, Homo sapiens
tcattcagcatgtgg

SEQ ID NO: 792924 - DNA, 15 bp, Homo sapiens
cattcagcatgtggc

SEQ ID NO: 792925 - DNA, 15 bp, Homo sapiens
attcagcatgtggct

SEQ ID NO: 792926 - DNA, 15 bp, Homo sapiens
ttcagcatgtggctt

SEQ ID NO: 792927 - DNA, 15 bp, Homo sapiens
tcagcatgtggcttg

SEQ ID NO: 792928 - DNA, 15 bp, Homo sapiens
cagcatgtggcttgc

SEQ ID NO: 792929 - DNA, 15 bp, Homo sapiens
agcatgtggcttgcg

SEQ ID NO: 792930 - DNA, 15 bp, Homo sapiens
gcatgtggcttgcgg

SEQ ID NO: 792931 - DNA, 15 bp, Homo sapiens
catgtggcttgcggg

SEQ ID NO: 792932 - DNA, 15 bp, Homo sapiens
atgtggcttgcgggt

SEQ ID NO: 792933 - DNA, 15 bp, Homo sapiens
tgtggcttgcgggtg

SEQ ID NO: 792934 - DNA, 15 bp, Homo sapiens
gtggcttgcgggtgt

SEQ ID NO: 792935 - DNA, 15 bp, Homo sapiens
tggcttgcgggtgtc

SEQ ID NO: 792936 - DNA, 15 bp, Homo sapiens
ggcttgcgggtgtcc

SEQ ID NO: 792937 - DNA, 15 bp, Homo sapiens
gcttgcgggtgtcca

SEQ ID NO: 792938 - DNA, 15 bp, Homo sapiens
cttgcgggtgtccag

SEQ ID NO: 792939 - DNA, 15 bp, Homo sapiens
ttgcgggtgtccagg

SEQ ID NO: 792940 - DNA, 15 bp, Homo sapiens
tgcgggtgtccaggt

SEQ ID NO: 792941 - DNA, 15 bp, Homo sapiens
gcgggtgtccaggtc

SEQ ID NO: 792942 - DNA, 15 bp, Homo sapiens
cgggtgtccaggtct

SEQ ID NO: 792943 - DNA, 15 bp, Homo sapiens
gggtgtccaggtctg

SEQ ID NO: 792944 - DNA, 15 bp, Homo sapiens
ggtgtccaggtctgc

SEQ ID NO: 792945 - DNA, 15 bp, Homo sapiens
gtgtccaggtctgca

SEQ ID NO: 792946 - DNA, 15 bp, Homo sapiens
tgtccaggtctgcag

SEQ ID NO: 792947 - DNA, 15 bp, Homo sapiens
gtccaggtctgcagg

SEQ ID NO: 792948 - DNA, 15 bp, Homo sapiens
tccaggtctgcaggc

SEQ ID NO: 792949 - DNA, 15 bp, Homo sapiens
ccaggtctgcaggca

SEQ ID NO: 792950 - DNA, 15 bp, Homo sapiens
caggtctgcaggcat

SEQ ID NO: 792951 - DNA, 15 bp, Homo sapiens
aggtctgcaggcata

SEQ ID NO: 792952 - DNA, 15 bp, Homo sapiens
ggtctgcaggcatac

SEQ ID NO: 792953 - DNA, 15 bp, Homo sapiens
gtctgcaggcataca

SEQ ID NO: 792954 - DNA, 15 bp, Homo sapiens
tctgcaggcatacac

SEQ ID NO: 792955 - DNA, 15 bp, Homo sapiens
ctgcaggcatacaca

SEQ ID NO: 792956 - DNA, 15 bp, Homo sapiens
tgcaggcatacacac

SEQ ID NO: 792957 - DNA, 15 bp, Homo sapiens
gcaggcatacacacc

SEQ ID NO: 792958 - DNA, 15 bp, Homo sapiens
caggcatacacacct

SEQ ID NO: 792959 - DNA, 15 bp, Homo sapiens
aggcatacacacctc

SEQ ID NO: 792960 - DNA, 15 bp, Homo sapiens
ggcatacacacctct

SEQ ID NO: 792961 - DNA, 15 bp, Homo sapiens
gcatacacacctctc

SEQ ID NO: 792962 - DNA, 15 bp, Homo sapiens
catacacacctctcc

SEQ ID NO: 792963 - DNA, 15 bp, Homo sapiens
atacacacctctcct

SEQ ID NO: 792964 - DNA, 15 bp, Homo sapiens
tacacacctctcctg

SEQ ID NO: 792965 - DNA, 15 bp, Homo sapiens
acacacctctcctga

SEQ ID NO: 792966 - DNA, 15 bp, Homo sapiens
cacacctctcctgat

SEQ ID NO: 792967 - DNA, 15 bp, Homo sapiens
acacctctcctgatc

SEQ ID NO: 792968 - DNA, 15 bp, Homo sapiens
cacctctcctgatct

SEQ ID NO: 792969 - DNA, 15 bp, Homo sapiens
acctctcctgatctg

SEQ ID NO: 792970 - DNA, 15 bp, Homo sapiens
cctctcctgatctga

SEQ ID NO: 792971 - DNA, 15 bp, Homo sapiens
ctctcctgatctgaa

SEQ ID NO: 792972 - DNA, 15 bp, Homo sapiens
tctcctgatctgaat

SEQ ID NO: 792973 - DNA, 15 bp, Homo sapiens
ctcctgatctgaatc

SEQ ID NO: 792974 - DNA, 15 bp, Homo sapiens
tcctgatctgaatca

SEQ ID NO: 792975 - DNA, 15 bp, Homo sapiens
cctgatctgaatcag

SEQ ID NO: 792976 - DNA, 15 bp, Homo sapiens
ctgatctgaatcaga

SEQ ID NO: 792977 - DNA, 15 bp, Homo sapiens
tgatctgaatcagag

SEQ ID NO: 792978 - DNA, 15 bp, Homo sapiens
gatctgaatcagaga

SEQ ID NO: 792979 - DNA, 15 bp, Homo sapiens
atctgaatcagagaa

SEQ ID NO: 792980 - DNA, 15 bp, Homo sapiens
tctgaatcagagaac

SEQ ID NO: 792981 - DNA, 15 bp, Homo sapiens
ctgaatcagagaaca

SEQ ID NO: 792982 - DNA, 15 bp, Homo sapiens
tgaatcagagaacaa

SEQ ID NO: 792983 - DNA, 15 bp, Homo sapiens
gaatcagagaacaaa

SEQ ID NO: 792984 - DNA, 15 bp, Homo sapiens
aatcagagaacaaaa

SEQ ID NO: 792985 - DNA, 15 bp, Homo sapiens
atcagagaacaaaag

SEQ ID NO: 792986 - DNA, 15 bp, Homo sapiens
tcagagaacaaaaga

SEQ ID NO: 792987 - DNA, 15 bp, Homo sapiens
cagagaacaaaagat

SEQ ID NO: 792988 - DNA, 15 bp, Homo sapiens
agagaacaaaagata

SEQ ID NO: 792989 - DNA, 15 bp, Homo sapiens
gagaacaaaagataa

SEQ ID NO: 792990 - DNA, 15 bp, Homo sapiens
agaacaaaagataaa

SEQ ID NO: 792991 - DNA, 15 bp, Homo sapiens
gaacaaaagataaag

SEQ ID NO: 792992 - DNA, 15 bp, Homo sapiens
aacaaaagataaagg

SEQ ID NO: 792993 - DNA, 15 bp, Homo sapiens
acaaaagataaagga

SEQ ID NO: 792994 - DNA, 15 bp, Homo sapiens
caaaagataaaggat

SEQ ID NO: 792995 - DNA, 15 bp, Homo sapiens
aaaagataaaggatc

SEQ ID NO: 792996 - DNA, 15 bp, Homo sapiens
aaagataaaggatcg

SEQ ID NO: 792997 - DNA, 15 bp, Homo sapiens
aagataaaggatcga

SEQ ID NO: 792998 - DNA, 15 bp, Homo sapiens
agataaaggatcgag

SEQ ID NO: 792999 - DNA, 15 bp, Homo sapiens
gataaaggatcgagg

SEQ ID NO: 793000 - DNA, 15 bp, Homo sapiens
ataaaggatcgagga

SEQ ID NO: 793001 - DNA, 15 bp, Homo sapiens
taaaggatcgaggac

SEQ ID NO: 793002 - DNA, 15 bp, Homo sapiens
aaaggatcgaggaca

SEQ ID NO: 793003 - DNA, 15 bp, Homo sapiens
aaggatcgaggacaa

SEQ ID NO: 793004 - DNA, 15 bp, Homo sapiens
aggatcgaggacaat

SEQ ID NO: 793005 - DNA, 15 bp, Homo sapiens
ggatcgaggacaatg

SEQ ID NO: 793006 - DNA, 15 bp, Homo sapiens
gatcgaggacaatgg

SEQ ID NO: 793007 - DNA, 15 bp, Homo sapiens
atcgaggacaatggc

SEQ ID NO: 793008 - DNA, 15 bp, Homo sapiens
tcgaggacaatggcc

SEQ ID NO: 793009 - DNA, 15 bp, Homo sapiens
cgaggacaatggcct

SEQ ID NO: 793010 - DNA, 15 bp, Homo sapiens
gaggacaatggcctc

SEQ ID NO: 793011 - DNA, 15 bp, Homo sapiens
aggacaatggcctct

SEQ ID NO: 793012 - DNA, 15 bp, Homo sapiens
ggacaatggcctctt

SEQ ID NO: 793013 - DNA, 15 bp, Homo sapiens
gacaatggcctcttc

SEQ ID NO: 793014 - DNA, 15 bp, Homo sapiens
acaatggcctcttca

SEQ ID NO: 793015 - DNA, 15 bp, Homo sapiens
caatggcctcttcac

SEQ ID NO: 793016 - DNA, 15 bp, Homo sapiens
aatggcctcttcact

SEQ ID NO: 793017 - DNA, 15 bp, Homo sapiens
atggcctcttcactt

SEQ ID NO: 793018 - DNA, 15 bp, Homo sapiens
tggcctcttcacttt

SEQ ID NO: 793019 - DNA, 15 bp, Homo sapiens
ggcctcttcactttt

SEQ ID NO: 793020 - DNA, 15 bp, Homo sapiens
gcctcttcacttttg

SEQ ID NO: 793021 - DNA, 15 bp, Homo sapiens
cctcttcacttttgc

SEQ ID NO: 793022 - DNA, 15 bp, Homo sapiens
ctcttcacttttgct

SEQ ID NO: 793023 - DNA, 15 bp, Homo sapiens
tcttcacttttgctt

SEQ ID NO: 793024 - DNA, 15 bp, Homo sapiens
cttcacttttgcttt

SEQ ID NO: 793025 - DNA, 15 bp, Homo sapiens
ttcacttttgctttc

SEQ ID NO: 793026 - DNA, 15 bp, Homo sapiens
tcacttttgctttct

SEQ ID NO: 793027 - DNA, 15 bp, Homo sapiens
cacttttgctttctc

SEQ ID NO: 793028 - DNA, 15 bp, Homo sapiens
acttttgctttctct

SEQ ID NO: 793029 - DNA, 15 bp, Homo sapiens
cttttgctttctctc

SEQ ID NO: 793030 - DNA, 15 bp, Homo sapiens
ttttgctttctctct

SEQ ID NO: 793031 - DNA, 15 bp, Homo sapiens
tttgctttctctctt

SEQ ID NO: 793032 - DNA, 15 bp, Homo sapiens
ttgctttctctcttc

SEQ ID NO: 793033 - DNA, 15 bp, Homo sapiens
tgctttctctcttct

SEQ ID NO: 793034 - DNA, 15 bp, Homo sapiens
gctttctctcttctt

SEQ ID NO: 793035 - DNA, 15 bp, Homo sapiens
ctttctctcttcttt

SEQ ID NO: 793036 - DNA, 15 bp, Homo sapiens
tttctctcttctttg

SEQ ID NO: 793037 - DNA, 15 bp, Homo sapiens
ttctctcttctttgg

SEQ ID NO: 793038 - DNA, 15 bp, Homo sapiens
tctctcttctttggg

SEQ ID NO: 793039 - DNA, 15 bp, Homo sapiens
ctctcttctttgggt

SEQ ID NO: 793040 - DNA, 15 bp, Homo sapiens
tctcttctttgggtt

SEQ ID NO: 793041 - DNA, 15 bp, Homo sapiens
ctcttctttgggttt

SEQ ID NO: 793042 - DNA, 15 bp, Homo sapiens
tcttctttgggtttt

SEQ ID NO: 793043 - DNA, 15 bp, Homo sapiens
cttctttgggtttta

SEQ ID NO: 793044 - DNA, 15 bp, Homo sapiens
ttctttgggttttac

SEQ ID NO: 793045 - DNA, 15 bp, Homo sapiens
tctttgggttttact

SEQ ID NO: 793046 - DNA, 15 bp, Homo sapiens
ctttgggttttactt

SEQ ID NO: 793047 - DNA, 15 bp, Homo sapiens
tttgggttttacttt

SEQ ID NO: 793048 - DNA, 15 bp, Homo sapiens
ttgggttttactttg

SEQ ID NO: 793049 - DNA, 15 bp, Homo sapiens
tgggttttactttgt

SEQ ID NO: 793050 - DNA, 15 bp, Homo sapiens
gggttttactttgtg

SEQ ID NO: 793051 - DNA, 15 bp, Homo sapiens
ggttttactttgtgt

SEQ ID NO: 793052 - DNA, 15 bp, Homo sapiens
gttttactttgtgtt

SEQ ID NO: 793053 - DNA, 15 bp, Homo sapiens
ttttactttgtgttt

SEQ ID NO: 793054 - DNA, 15 bp, Homo sapiens
tttactttgtgtttc

SEQ ID NO: 793055 - DNA, 15 bp, Homo sapiens
ttactttgtgtttcc

SEQ ID NO: 793056 - DNA, 15 bp, Homo sapiens
tactttgtgtttcca

SEQ ID NO: 793057 - DNA, 15 bp, Homo sapiens
actttgtgtttccaa

SEQ ID NO: 793058 - DNA, 15 bp, Homo sapiens
ctttgtgtttccaac

SEQ ID NO: 793059 - DNA, 15 bp, Homo sapiens
tttgtgtttccaaca

SEQ ID NO: 793060 - DNA, 15 bp, Homo sapiens
ttgtgtttccaacag

SEQ ID NO: 793061 - DNA, 15 bp, Homo sapiens
tgtgtttccaacagc

SEQ ID NO: 793062 - DNA, 15 bp, Homo sapiens
gtgtttccaacagcc

SEQ ID NO: 793063 - DNA, 15 bp, Homo sapiens
tgtttccaacagcca

SEQ ID NO: 793064 - DNA, 15 bp, Homo sapiens
gtttccaacagccaa

SEQ ID NO: 793065 - DNA, 15 bp, Homo sapiens
tttccaacagccaat

SEQ ID NO: 793066 - DNA, 15 bp, Homo sapiens
ttccaacagccaatg

SEQ ID NO: 793067 - DNA, 15 bp, Homo sapiens
tccaacagccaatgg

SEQ ID NO: 793068 - DNA, 15 bp, Homo sapiens
ccaacagccaatgga

SEQ ID NO: 793069 - DNA, 15 bp, Homo sapiens
caacagccaatggaa

SEQ ID NO: 793070 - DNA, 15 bp, Homo sapiens
aacagccaatggaag

SEQ ID NO: 793071 - DNA, 15 bp, Homo sapiens
acagccaatggaagg

SEQ ID NO: 793072 - DNA, 15 bp, Homo sapiens
cagccaatggaaggc

SEQ ID NO: 793073 - DNA, 15 bp, Homo sapiens
agccaatggaaggct

SEQ ID NO: 793074 - DNA, 15 bp, Homo sapiens
gccaatggaaggctg

SEQ ID NO: 793075 - DNA, 15 bp, Homo sapiens
ccaatggaaggctgt

SEQ ID NO: 793076 - DNA, 15 bp, Homo sapiens
caatggaaggctgtt

SEQ ID NO: 793077 - DNA, 15 bp, Homo sapiens
aatggaaggctgttc

SEQ ID NO: 793078 - DNA, 15 bp, Homo sapiens
atggaaggctgttct

SEQ ID NO: 793079 - DNA, 15 bp, Homo sapiens
tggaaggctgttcta

SEQ ID NO: 793080 - DNA, 15 bp, Homo sapiens
ggaaggctgttctat

SEQ ID NO: 793081 - DNA, 15 bp, Homo sapiens
gaaggctgttctatt

SEQ ID NO: 793082 - DNA, 15 bp, Homo sapiens
aaggctgttctattt

SEQ ID NO: 793083 - DNA, 15 bp, Homo sapiens
aggctgttctattta

SEQ ID NO: 793084 - DNA, 15 bp, Homo sapiens
ggctgttctatttag

SEQ ID NO: 793085 - DNA, 15 bp, Homo sapiens
gctgttctatttagg

SEQ ID NO: 793086 - DNA, 15 bp, Homo sapiens
ctgttctatttaggg

SEQ ID NO: 793087 - DNA, 15 bp, Homo sapiens
tgttctatttagggt

SEQ ID NO: 793088 - DNA, 15 bp, Homo sapiens
gttctatttagggta

SEQ ID NO: 793089 - DNA, 15 bp, Homo sapiens
ttctatttagggtaa

SEQ ID NO: 793090 - DNA, 15 bp, Homo sapiens
tctatttagggtaaa

SEQ ID NO: 793091 - DNA, 15 bp, Homo sapiens
ctatttagggtaaat

SEQ ID NO: 793092 - DNA, 15 bp, Homo sapiens
tatttagggtaaatg

SEQ ID NO: 793093 - DNA, 15 bp, Homo sapiens
atttagggtaaatga

SEQ ID NO: 793094 - DNA, 15 bp, Homo sapiens
tttagggtaaatgac

SEQ ID NO: 793095 - DNA, 15 bp, Homo sapiens
ttagggtaaatgact

SEQ ID NO: 793096 - DNA, 15 bp, Homo sapiens
tagggtaaatgactc

SEQ ID NO: 793097 - DNA, 15 bp, Homo sapiens
agggtaaatgactca

SEQ ID NO: 793098 - DNA, 15 bp, Homo sapiens
gggtaaatgactcag

SEQ ID NO: 793099 - DNA, 15 bp, Homo sapiens
ggtaaatgactcaga

SEQ ID NO: 793100 - DNA, 15 bp, Homo sapiens
gtaaatgactcagac

SEQ ID NO: 793101 - DNA, 15 bp, Homo sapiens
taaatgactcagact

SEQ ID NO: 793102 - DNA, 15 bp, Homo sapiens
aaatgactcagactt

SEQ ID NO: 793103 - DNA, 15 bp, Homo sapiens
aatgactcagacttg

SEQ ID NO: 793104 - DNA, 15 bp, Homo sapiens
atgactcagacttgg

SEQ ID NO: 793105 - DNA, 15 bp, Homo sapiens
tgactcagacttggt

SEQ ID NO: 793106 - DNA, 15 bp, Homo sapiens
gactcagacttggta

SEQ ID NO: 793107 - DNA, 15 bp, Homo sapiens
actcagacttggtac

SEQ ID NO: 793108 - DNA, 15 bp, Homo sapiens
ctcagacttggtaca

SEQ ID NO: 793109 - DNA, 15 bp, Homo sapiens
tcagacttggtacat

SEQ ID NO: 793110 - DNA, 15 bp, Homo sapiens
cagacttggtacatc

SEQ ID NO: 793111 - DNA, 15 bp, Homo sapiens
agacttggtacatct

SEQ ID NO: 793112 - DNA, 15 bp, Homo sapiens
gacttggtacatctc

SEQ ID NO: 793113 - DNA, 15 bp, Homo sapiens
acttggtacatctcg

SEQ ID NO: 793114 - DNA, 15 bp, Homo sapiens
cttggtacatctcga

SEQ ID NO: 793115 - DNA, 15 bp, Homo sapiens
ttggtacatctcgaa

SEQ ID NO: 793116 - DNA, 15 bp, Homo sapiens
tggtacatctcgaat

SEQ ID NO: 793117 - DNA, 15 bp, Homo sapiens
ggtacatctcgaatc

SEQ ID NO: 793118 - DNA, 15 bp, Homo sapiens
gtacatctcgaatcg

SEQ ID NO: 793119 - DNA, 15 bp, Homo sapiens
tacatctcgaatcgt

SEQ ID NO: 793120 - DNA, 15 bp, Homo sapiens
acatctcgaatcgta

SEQ ID NO: 793121 - DNA, 15 bp, Homo sapiens
catctcgaatcgtat

SEQ ID NO: 793122 - DNA, 15 bp, Homo sapiens
atctcgaatcgtatg

SEQ ID NO: 793123 - DNA, 15 bp, Homo sapiens
tctcgaatcgtatgt

SEQ ID NO: 793124 - DNA, 15 bp, Homo sapiens
ctcgaatcgtatgtc

SEQ ID NO: 793125 - DNA, 15 bp, Homo sapiens
tcgaatcgtatgtca

SEQ ID NO: 793126 - DNA, 15 bp, Homo sapiens
cgaatcgtatgtcag

SEQ ID NO: 793127 - DNA, 15 bp, Homo sapiens
gaatcgtatgtcaga

SEQ ID NO: 793128 - DNA, 15 bp, Homo sapiens
aatcgtatgtcagag

SEQ ID NO: 793129 - DNA, 15 bp, Homo sapiens
atcgtatgtcagagc

SEQ ID NO: 793130 - DNA, 15 bp, Homo sapiens
tcgtatgtcagagca

SEQ ID NO: 793131 - DNA, 15 bp, Homo sapiens
cgtatgtcagagcac

SEQ ID NO: 793132 - DNA, 15 bp, Homo sapiens
gtatgtcagagcaca

SEQ ID NO: 793133 - DNA, 15 bp, Homo sapiens
tatgtcagagcacac

SEQ ID NO: 793134 - DNA, 15 bp, Homo sapiens
atgtcagagcacact

SEQ ID NO: 793135 - DNA, 15 bp, Homo sapiens
tgtcagagcacactg

SEQ ID NO: 793136 - DNA, 15 bp, Homo sapiens
gtcagagcacactgt

SEQ ID NO: 793137 - DNA, 15 bp, Homo sapiens
tcagagcacactgtt

SEQ ID NO: 793138 - DNA, 15 bp, Homo sapiens
cagagcacactgttg

SEQ ID NO: 793139 - DNA, 15 bp, Homo sapiens
agagcacactgttgc

SEQ ID NO: 793140 - DNA, 15 bp, Homo sapiens
gagcacactgttgcc

SEQ ID NO: 793141 - DNA, 15 bp, Homo sapiens
agcacactgttgccc

SEQ ID NO: 793142 - DNA, 15 bp, Homo sapiens
gcacactgttgcccc

SEQ ID NO: 793143 - DNA, 15 bp, Homo sapiens
cacactgttgcccct

SEQ ID NO: 793144 - DNA, 15 bp, Homo sapiens
acactgttgcccctc

SEQ ID NO: 793145 - DNA, 15 bp, Homo sapiens
cactgttgcccctca

SEQ ID NO: 793146 - DNA, 15 bp, Homo sapiens
actgttgcccctcaa

SEQ ID NO: 793147 - DNA, 15 bp, Homo sapiens
ctgttgcccctcaaa

SEQ ID NO: 793148 - DNA, 15 bp, Homo sapiens
tgttgcccctcaaag

SEQ ID NO: 793149 - DNA, 15 bp, Homo sapiens
gttgcccctcaaagc

SEQ ID NO: 793150 - DNA, 15 bp, Homo sapiens
ttgcccctcaaagct

SEQ ID NO: 793151 - DNA, 15 bp, Homo sapiens
tgcccctcaaagctc

SEQ ID NO: 793152 - DNA, 15 bp, Homo sapiens
gcccctcaaagctca

SEQ ID NO: 793153 - DNA, 15 bp, Homo sapiens
cccctcaaagctcag

SEQ ID NO: 793154 - DNA, 15 bp, Homo sapiens
ccctcaaagctcagg

SEQ ID NO: 793155 - DNA, 15 bp, Homo sapiens
cctcaaagctcagga

SEQ ID NO: 793156 - DNA, 15 bp, Homo sapiens
ctcaaagctcaggaa

SEQ ID NO: 793157 - DNA, 15 bp, Homo sapiens
tcaaagctcaggaaa

SEQ ID NO: 793158 - DNA, 15 bp, Homo sapiens
caaagctcaggaaag

SEQ ID NO: 793159 - DNA, 15 bp, Homo sapiens
aaagctcaggaaagg

SEQ ID NO: 793160 - DNA, 15 bp, Homo sapiens
aagctcaggaaaggc

SEQ ID NO: 793161 - DNA, 15 bp, Homo sapiens
agctcaggaaaggct

SEQ ID NO: 793162 - DNA, 15 bp, Homo sapiens
gctcaggaaaggctg

SEQ ID NO: 793163 - DNA, 15 bp, Homo sapiens
ctcaggaaaggctgc

SEQ ID NO: 793164 - DNA, 15 bp, Homo sapiens
tcaggaaaggctgca

SEQ ID NO: 793165 - DNA, 15 bp, Homo sapiens
caggaaaggctgcat

SEQ ID NO: 793166 - DNA, 15 bp, Homo sapiens
aggaaaggctgcata

SEQ ID NO: 793167 - DNA, 15 bp, Homo sapiens
ggaaaggctgcatac

SEQ ID NO: 793168 - DNA, 15 bp, Homo sapiens
gaaaggctgcatact

SEQ ID NO: 793169 - DNA, 15 bp, Homo sapiens
aaaggctgcatactc

SEQ ID NO: 793170 - DNA, 15 bp, Homo sapiens
aaggctgcatactct

SEQ ID NO: 793171 - DNA, 15 bp, Homo sapiens
aggctgcatactcta

SEQ ID NO: 793172 - DNA, 15 bp, Homo sapiens
ggctgcatactctat

SEQ ID NO: 793173 - DNA, 15 bp, Homo sapiens
gctgcatactctatc

SEQ ID NO: 793174 - DNA, 15 bp, Homo sapiens
ctgcatactctatct

SEQ ID NO: 793175 - DNA, 15 bp, Homo sapiens
tgcatactctatctc

SEQ ID NO: 793176 - DNA, 15 bp, Homo sapiens
gcatactctatctcc

SEQ ID NO: 793177 - DNA, 15 bp, Homo sapiens
catactctatctccc

SEQ ID NO: 793178 - DNA, 15 bp, Homo sapiens
atactctatctccct

SEQ ID NO: 793179 - DNA, 15 bp, Homo sapiens
tactctatctccctc

SEQ ID NO: 793180 - DNA, 15 bp, Homo sapiens
actctatctccctct

SEQ ID NO: 793181 - DNA, 15 bp, Homo sapiens
ctctatctccctctt

SEQ ID NO: 793182 - DNA, 15 bp, Homo sapiens
tctatctccctcttg

SEQ ID NO: 793183 - DNA, 15 bp, Homo sapiens
ctatctccctcttga

SEQ ID NO: 793184 - DNA, 15 bp, Homo sapiens
tatctccctcttgat

SEQ ID NO: 793185 - DNA, 15 bp, Homo sapiens
atctccctcttgatg

SEQ ID NO: 793186 - DNA, 15 bp, Homo sapiens
tctccctcttgatgg

SEQ ID NO: 793187 - DNA, 15 bp, Homo sapiens
ctccctcttgatggt

SEQ ID NO: 793188 - DNA, 15 bp, Homo sapiens
tccctcttgatggtt

SEQ ID NO: 793189 - DNA, 15 bp, Homo sapiens
ccctcttgatggttt

SEQ ID NO: 793190 - DNA, 15 bp, Homo sapiens
cctcttgatggtttc

SEQ ID NO: 793191 - DNA, 15 bp, Homo sapiens
ctcttgatggtttcc

SEQ ID NO: 793192 - DNA, 15 bp, Homo sapiens
tcttgatggtttcct

SEQ ID NO: 793193 - DNA, 15 bp, Homo sapiens
cttgatggtttcctc

SEQ ID NO: 793194 - DNA, 15 bp, Homo sapiens
ttgatggtttcctcg

SEQ ID NO: 793195 - DNA, 15 bp, Homo sapiens
tgatggtttcctcgt

SEQ ID NO: 793196 - DNA, 15 bp, Homo sapiens
gatggtttcctcgta

SEQ ID NO: 793197 - DNA, 15 bp, Homo sapiens
atggtttcctcgtat

SEQ ID NO: 793198 - DNA, 15 bp, Homo sapiens
tggtttcctcgtatt

SEQ ID NO: 793199 - DNA, 15 bp, Homo sapiens
ggtttcctcgtattt

SEQ ID NO: 793200 - DNA, 15 bp, Homo sapiens
gtttcctcgtattta

SEQ ID NO: 793201 - DNA, 15 bp, Homo sapiens
tttcctcgtatttac

SEQ ID NO: 793202 - DNA, 15 bp, Homo sapiens
ttcctcgtatttaca

SEQ ID NO: 793203 - DNA, 15 bp, Homo sapiens
tcctcgtatttacaa

SEQ ID NO: 793204 - DNA, 15 bp, Homo sapiens
cctcgtatttacaag

SEQ ID NO: 793205 - DNA, 15 bp, Homo sapiens
ctcgtatttacaagt

SEQ ID NO: 793206 - DNA, 15 bp, Homo sapiens
tcgtatttacaagtt

SEQ ID NO: 793207 - DNA, 15 bp, Homo sapiens
cgtatttacaagtta

SEQ ID NO: 793208 - DNA, 15 bp, Homo sapiens
gtatttacaagttaa

SEQ ID NO: 793209 - DNA, 15 bp, Homo sapiens
tatttacaagttaaa

SEQ ID NO: 793210 - DNA, 15 bp, Homo sapiens
atttacaagttaaag

SEQ ID NO: 793211 - DNA, 15 bp, Homo sapiens
tttacaagttaaaga

SEQ ID NO: 793212 - DNA, 15 bp, Homo sapiens
ttacaagttaaagac

SEQ ID NO: 793213 - DNA, 15 bp, Homo sapiens
tacaagttaaagacc

SEQ ID NO: 793214 - DNA, 15 bp, Homo sapiens
acaagttaaagacca

SEQ ID NO: 793215 - DNA, 15 bp, Homo sapiens
caagttaaagaccat

SEQ ID NO: 793216 - DNA, 15 bp, Homo sapiens
aagttaaagaccata

SEQ ID NO: 793217 - DNA, 15 bp, Homo sapiens
agttaaagaccatag

SEQ ID NO: 793218 - DNA, 15 bp, Homo sapiens
gttaaagaccataga

SEQ ID NO: 793219 - DNA, 15 bp, Homo sapiens
ttaaagaccatagat

SEQ ID NO: 793220 - DNA, 15 bp, Homo sapiens
taaagaccatagatg

SEQ ID NO: 793221 - DNA, 15 bp, Homo sapiens
aaagaccatagatgt

SEQ ID NO: 793222 - DNA, 15 bp, Homo sapiens
aagaccatagatgtc

SEQ ID NO: 793223 - DNA, 15 bp, Homo sapiens
agaccatagatgtcc

SEQ ID NO: 793224 - DNA, 15 bp, Homo sapiens
gaccatagatgtcct

SEQ ID NO: 793225 - DNA, 15 bp, Homo sapiens
accatagatgtcctg

SEQ ID NO: 793226 - DNA, 15 bp, Homo sapiens
ccatagatgtcctgt

SEQ ID NO: 793227 - DNA, 15 bp, Homo sapiens
catagatgtcctgta

SEQ ID NO: 793228 - DNA, 15 bp, Homo sapiens
atagatgtcctgtag

SEQ ID NO: 793229 - DNA, 15 bp, Homo sapiens
tagatgtcctgtagt

SEQ ID NO: 793230 - DNA, 15 bp, Homo sapiens
agatgtcctgtagta

SEQ ID NO: 793231 - DNA, 15 bp, Homo sapiens
gatgtcctgtagtaa

SEQ ID NO: 793232 - DNA, 15 bp, Homo sapiens
atgtcctgtagtaaa

SEQ ID NO: 793233 - DNA, 15 bp, Homo sapiens
tgtcctgtagtaaag

SEQ ID NO: 793234 - DNA, 15 bp, Homo sapiens
gtcctgtagtaaagg

SEQ ID NO: 793235 - DNA, 15 bp, Homo sapiens
tcctgtagtaaaggg

SEQ ID NO: 793236 - DNA, 15 bp, Homo sapiens
cctgtagtaaagggg

SEQ ID NO: 793237 - DNA, 15 bp, Homo sapiens
ctgtagtaaaggggt

SEQ ID NO: 793238 - DNA, 15 bp, Homo sapiens
tgtagtaaaggggtt

SEQ ID NO: 793239 - DNA, 15 bp, Homo sapiens
gtagtaaaggggtta

SEQ ID NO: 793240 - DNA, 15 bp, Homo sapiens
tagtaaaggggttag

SEQ ID NO: 793241 - DNA, 15 bp, Homo sapiens
agtaaaggggttagc

SEQ ID NO: 793242 - DNA, 15 bp, Homo sapiens
gtaaaggggttagct

SEQ ID NO: 793243 - DNA, 15 bp, Homo sapiens
taaaggggttagctt

SEQ ID NO: 793244 - DNA, 15 bp, Homo sapiens
aaaggggttagcttg

SEQ ID NO: 793245 - DNA, 15 bp, Homo sapiens
aaggggttagcttgc

SEQ ID NO: 793246 - DNA, 15 bp, Homo sapiens
aggggttagcttgcc

SEQ ID NO: 793247 - DNA, 15 bp, Homo sapiens
ggggttagcttgcct

SEQ ID NO: 793248 - DNA, 15 bp, Homo sapiens
gggttagcttgcctc

SEQ ID NO: 793249 - DNA, 15 bp, Homo sapiens
ggttagcttgcctct

SEQ ID NO: 793250 - DNA, 15 bp, Homo sapiens
gttagcttgcctctg

SEQ ID NO: 793251 - DNA, 15 bp, Homo sapiens
ttagcttgcctctgt

SEQ ID NO: 793252 - DNA, 15 bp, Homo sapiens
tagcttgcctctgtt

SEQ ID NO: 793253 - DNA, 15 bp, Homo sapiens
agcttgcctctgttt

SEQ ID NO: 793254 - DNA, 15 bp, Homo sapiens
gcttgcctctgttta

SEQ ID NO: 793255 - DNA, 15 bp, Homo sapiens
cttgcctctgtttat

SEQ ID NO: 793256 - DNA, 15 bp, Homo sapiens
ttgcctctgtttatc

SEQ ID NO: 793257 - DNA, 15 bp, Homo sapiens
tgcctctgtttatcc

SEQ ID NO: 793258 - DNA, 15 bp, Homo sapiens
gcctctgtttatccc

SEQ ID NO: 793259 - DNA, 15 bp, Homo sapiens
cctctgtttatcccg

SEQ ID NO: 793260 - DNA, 15 bp, Homo sapiens
ctctgtttatcccgg

SEQ ID NO: 793261 - DNA, 15 bp, Homo sapiens
tctgtttatcccggt

SEQ ID NO: 793262 - DNA, 15 bp, Homo sapiens
ctgtttatcccggtg

SEQ ID NO: 793263 - DNA, 15 bp, Homo sapiens
tgtttatcccggtga

SEQ ID NO: 793264 - DNA, 15 bp, Homo sapiens
gtttatcccggtgat

SEQ ID NO: 793265 - DNA, 15 bp, Homo sapiens
tttatcccggtgatt

SEQ ID NO: 793266 - DNA, 15 bp, Homo sapiens
ttatcccggtgattc

SEQ ID NO: 793267 - DNA, 15 bp, Homo sapiens
tatcccggtgattct

SEQ ID NO: 793268 - DNA, 15 bp, Homo sapiens
atcccggtgattcta

SEQ ID NO: 793269 - DNA, 15 bp, Homo sapiens
tcccggtgattctag

SEQ ID NO: 793270 - DNA, 15 bp, Homo sapiens
cccggtgattctagt

SEQ ID NO: 793271 - DNA, 15 bp, Homo sapiens
ccggtgattctagtg

SEQ ID NO: 793272 - DNA, 15 bp, Homo sapiens
cggtgattctagtga

SEQ ID NO: 793273 - DNA, 15 bp, Homo sapiens
ggtgattctagtgaa

SEQ ID NO: 793274 - DNA, 15 bp, Homo sapiens
gtgattctagtgaaa

SEQ ID NO: 793275 - DNA, 15 bp, Homo sapiens
tgattctagtgaaac

SEQ ID NO: 793276 - DNA, 15 bp, Homo sapiens
gattctagtgaaact

SEQ ID NO: 793277 - DNA, 15 bp, Homo sapiens
attctagtgaaacta

SEQ ID NO: 793278 - DNA, 15 bp, Homo sapiens
ttctagtgaaactaa

SEQ ID NO: 793279 - DNA, 15 bp, Homo sapiens
tctagtgaaactaaa

SEQ ID NO: 793280 - DNA, 15 bp, Homo sapiens
ctagtgaaactaaaa

SEQ ID NO: 793281 - DNA, 15 bp, Homo sapiens
tagtgaaactaaaat

SEQ ID NO: 793282 - DNA, 15 bp, Homo sapiens
agtgaaactaaaatg

SEQ ID NO: 793283 - DNA, 15 bp, Homo sapiens
gtgaaactaaaatgc

SEQ ID NO: 793284 - DNA, 15 bp, Homo sapiens
tgaaactaaaatgct

SEQ ID NO: 793285 - DNA, 15 bp, Homo sapiens
gaaactaaaatgctt

SEQ ID NO: 793286 - DNA, 15 bp, Homo sapiens
aaactaaaatgcttg

SEQ ID NO: 793287 - DNA, 15 bp, Homo sapiens
aactaaaatgcttgt

SEQ ID NO: 793288 - DNA, 15 bp, Homo sapiens
actaaaatgcttgtt

SEQ ID NO: 793289 - DNA, 15 bp, Homo sapiens
ctaaaatgcttgttt

SEQ ID NO: 793290 - DNA, 15 bp, Homo sapiens
taaaatgcttgtttc

SEQ ID NO: 793291 - DNA, 15 bp, Homo sapiens
aaaatgcttgtttct

SEQ ID NO: 793292 - DNA, 15 bp, Homo sapiens
aaatgcttgtttcta

SEQ ID NO: 793293 - DNA, 15 bp, Homo sapiens
aatgcttgtttctat

SEQ ID NO: 793294 - DNA, 15 bp, Homo sapiens
atgcttgtttctatg

SEQ ID NO: 793295 - DNA, 15 bp, Homo sapiens
tgcttgtttctatgg

SEQ ID NO: 793296 - DNA, 15 bp, Homo sapiens
gcttgtttctatggg

SEQ ID NO: 793297 - DNA, 15 bp, Homo sapiens
cttgtttctatgggg

SEQ ID NO: 793298 - DNA, 15 bp, Homo sapiens
ttgtttctatggggc

SEQ ID NO: 793299 - DNA, 15 bp, Homo sapiens
tgtttctatggggca

SEQ ID NO: 793300 - DNA, 15 bp, Homo sapiens
gtttctatggggcac

SEQ ID NO: 793301 - DNA, 15 bp, Homo sapiens
tttctatggggcaca

SEQ ID NO: 793302 - DNA, 15 bp, Homo sapiens
ttctatggggcacag

SEQ ID NO: 793303 - DNA, 15 bp, Homo sapiens
tctatggggcacagt

SEQ ID NO: 793304 - DNA, 15 bp, Homo sapiens
ctatggggcacagtc

SEQ ID NO: 793305 - DNA, 15 bp, Homo sapiens
tatggggcacagtcc

SEQ ID NO: 793306 - DNA, 15 bp, Homo sapiens
atggggcacagtcca

SEQ ID NO: 793307 - DNA, 15 bp, Homo sapiens
tggggcacagtccag

SEQ ID NO: 793308 - DNA, 15 bp, Homo sapiens
ggggcacagtccaga

SEQ ID NO: 793309 - DNA, 15 bp, Homo sapiens
gggcacagtccagat

SEQ ID NO: 793310 - DNA, 15 bp, Homo sapiens
ggcacagtccagatg

SEQ ID NO: 793311 - DNA, 15 bp, Homo sapiens
gcacagtccagatgt

SEQ ID NO: 793312 - DNA, 15 bp, Homo sapiens
cacagtccagatgtg

SEQ ID NO: 793313 - DNA, 15 bp, Homo sapiens
acagtccagatgtgt

SEQ ID NO: 793314 - DNA, 15 bp, Homo sapiens
cagtccagatgtgtt

SEQ ID NO: 793315 - DNA, 15 bp, Homo sapiens
agtccagatgtgttg

SEQ ID NO: 793316 - DNA, 15 bp, Homo sapiens
gtccagatgtgttgt

SEQ ID NO: 793317 - DNA, 15 bp, Homo sapiens
tccagatgtgttgtt

SEQ ID NO: 793318 - DNA, 15 bp, Homo sapiens
ccagatgtgttgttc

SEQ ID NO: 793319 - DNA, 15 bp, Homo sapiens
cagatgtgttgttca

SEQ ID NO: 793320 - DNA, 15 bp, Homo sapiens
agatgtgttgttcac

SEQ ID NO: 793321 - DNA, 15 bp, Homo sapiens
gatgtgttgttcact

SEQ ID NO: 793322 - DNA, 15 bp, Homo sapiens
atgtgttgttcactt

SEQ ID NO: 793323 - DNA, 15 bp, Homo sapiens
tgtgttgttcacttg

SEQ ID NO: 793324 - DNA, 15 bp, Homo sapiens
gtgttgttcacttgg

SEQ ID NO: 793325 - DNA, 15 bp, Homo sapiens
tgttgttcacttgga

SEQ ID NO: 793326 - DNA, 15 bp, Homo sapiens
gttgttcacttggat

SEQ ID NO: 793327 - DNA, 15 bp, Homo sapiens
ttgttcacttggatt

SEQ ID NO: 793328 - DNA, 15 bp, Homo sapiens
tgttcacttggattg

SEQ ID NO: 793329 - DNA, 15 bp, Homo sapiens
gttcacttggattga

SEQ ID NO: 793330 - DNA, 15 bp, Homo sapiens
ttcacttggattgac

SEQ ID NO: 793331 - DNA, 15 bp, Homo sapiens
tcacttggattgacc

SEQ ID NO: 793332 - DNA, 15 bp, Homo sapiens
cacttggattgacca

SEQ ID NO: 793333 - DNA, 15 bp, Homo sapiens
acttggattgaccaa

SEQ ID NO: 793334 - DNA, 15 bp, Homo sapiens
cttggattgaccaat

SEQ ID NO: 793335 - DNA, 15 bp, Homo sapiens
ttggattgaccaatc

SEQ ID NO: 793336 - DNA, 15 bp, Homo sapiens
tggattgaccaatcc

SEQ ID NO: 793337 - DNA, 15 bp, Homo sapiens
ggattgaccaatcct

SEQ ID NO: 793338 - DNA, 15 bp, Homo sapiens
gattgaccaatcctt

SEQ ID NO: 793339 - DNA, 15 bp, Homo sapiens
attgaccaatccttt

SEQ ID NO: 793340 - DNA, 15 bp, Homo sapiens
ttgaccaatcctttc

SEQ ID NO: 793341 - DNA, 15 bp, Homo sapiens
tgaccaatcctttca

SEQ ID NO: 793342 - DNA, 15 bp, Homo sapiens
gaccaatcctttcaa

SEQ ID NO: 793343 - DNA, 15 bp, Homo sapiens
accaatcctttcaat

SEQ ID NO: 793344 - DNA, 15 bp, Homo sapiens
ccaatcctttcaata

SEQ ID NO: 793345 - DNA, 15 bp, Homo sapiens
caatcctttcaataa

SEQ ID NO: 793346 - DNA, 15 bp, Homo sapiens
aatcctttcaataaa

SEQ ID NO: 793347 - DNA, 15 bp, Homo sapiens
atcctttcaataaag

SEQ ID NO: 793348 - DNA, 15 bp, Homo sapiens
tcctttcaataaagt

SEQ ID NO: 793349 - DNA, 15 bp, Homo sapiens
cctttcaataaagtt

SEQ ID NO: 793350 - DNA, 15 bp, Homo sapiens
ctttcaataaagttt

SEQ ID NO: 793351 - DNA, 15 bp, Homo sapiens
tttcaataaagtttt

SEQ ID NO: 793352 - DNA, 15 bp, Homo sapiens
ttcaataaagttttg

SEQ ID NO: 793353 - DNA, 15 bp, Homo sapiens
tcaataaagttttga

SEQ ID NO: 793354 - DNA, 15 bp, Homo sapiens
caataaagttttgat

SEQ ID NO: 793355 - DNA, 15 bp, Homo sapiens
aataaagttttgatg

SEQ ID NO: 793356 - DNA, 15 bp, Homo sapiens
ataaagttttgatgc

SEQ ID NO: 793357 - DNA, 15 bp, Homo sapiens
taaagttttgatgca

SEQ ID NO: 793358 - DNA, 15 bp, Homo sapiens
aaagttttgatgcaa

SEQ ID NO: 793359 - DNA, 15 bp, Homo sapiens
aagttttgatgcaac

SEQ ID NO: 793360 - DNA, 15 bp, Homo sapiens
agttttgatgcaacc

SEQ ID NO: 793361 - DNA, 15 bp, Homo sapiens
gttttgatgcaacca

SEQ ID NO: 793362 - DNA, 15 bp, Homo sapiens
ttttgatgcaaccat

SEQ ID NO: 793363 - DNA, 15 bp, Homo sapiens
tttgatgcaaccatg

SEQ ID NO: 793364 - DNA, 15 bp, Homo sapiens
ttgatgcaaccatgt

SEQ ID NO: 793365 - DNA, 15 bp, Homo sapiens
tgatgcaaccatgtg

SEQ ID NO: 793366 - DNA, 15 bp, Homo sapiens
gatgcaaccatgtga

SEQ ID NO: 793367 - DNA, 15 bp, Homo sapiens
atgcaaccatgtgaa

SEQ ID NO: 793368 - DNA, 15 bp, Homo sapiens
tgcaaccatgtgaat

SEQ ID NO: 793369 - DNA, 15 bp, Homo sapiens
gcaaccatgtgaatc

SEQ ID NO: 793370 - DNA, 15 bp, Homo sapiens
caaccatgtgaatcc

SEQ ID NO: 793371 - DNA, 15 bp, Homo sapiens
aaccatgtgaatccc

SEQ ID NO: 793372 - DNA, 15 bp, Homo sapiens
accatgtgaatccca

SEQ ID NO: 793373 - DNA, 15 bp, Homo sapiens
ccatgtgaatcccaa

SEQ ID NO: 793374 - DNA, 15 bp, Homo sapiens
catgtgaatcccaag

SEQ ID NO: 793375 - DNA, 15 bp, Homo sapiens
atgtgaatcccaagt

SEQ ID NO: 793376 - DNA, 15 bp, Homo sapiens
tgtgaatcccaagtt

SEQ ID NO: 793377 - DNA, 15 bp, Homo sapiens
gtgaatcccaagttt

SEQ ID NO: 793378 - DNA, 15 bp, Homo sapiens
tgaatcccaagtttt

SEQ ID NO: 793379 - DNA, 15 bp, Homo sapiens
gaatcccaagttttc

SEQ ID NO: 793380 - DNA, 15 bp, Homo sapiens
aatcccaagttttca

SEQ ID NO: 793381 - DNA, 15 bp, Homo sapiens
atcccaagttttcag

SEQ ID NO: 793382 - DNA, 15 bp, Homo sapiens
tcccaagttttcagc

SEQ ID NO: 793383 - DNA, 15 bp, Homo sapiens
cccaagttttcagca

SEQ ID NO: 793384 - DNA, 15 bp, Homo sapiens
ccaagttttcagcac

SEQ ID NO: 793385 - DNA, 15 bp, Homo sapiens
caagttttcagcact

SEQ ID NO: 793386 - DNA, 15 bp, Homo sapiens
aagttttcagcactt

SEQ ID NO: 793387 - DNA, 15 bp, Homo sapiens
agttttcagcactta

SEQ ID NO: 793388 - DNA, 15 bp, Homo sapiens
gttttcagcacttag

SEQ ID NO: 793389 - DNA, 15 bp, Homo sapiens
ttttcagcacttagt

SEQ ID NO: 793390 - DNA, 15 bp, Homo sapiens
tttcagcacttagtt

SEQ ID NO: 793391 - DNA, 15 bp, Homo sapiens
ttcagcacttagttt

SEQ ID NO: 793392 - DNA, 15 bp, Homo sapiens
tcagcacttagtttt

SEQ ID NO: 793393 - DNA, 15 bp, Homo sapiens
cagcacttagttttg

SEQ ID NO: 793394 - DNA, 15 bp, Homo sapiens
agcacttagttttgt

SEQ ID NO: 793395 - DNA, 15 bp, Homo sapiens
gcacttagttttgtg

SEQ ID NO: 793396 - DNA, 15 bp, Homo sapiens
cacttagttttgtga

SEQ ID NO: 793397 - DNA, 15 bp, Homo sapiens
acttagttttgtgac

SEQ ID NO: 793398 - DNA, 15 bp, Homo sapiens
cttagttttgtgacc

SEQ ID NO: 793399 - DNA, 15 bp, Homo sapiens
ttagttttgtgacct

SEQ ID NO: 793400 - DNA, 15 bp, Homo sapiens
tagttttgtgacctt

SEQ ID NO: 793401 - DNA, 15 bp, Homo sapiens
agttttgtgaccttg

SEQ ID NO: 793402 - DNA, 15 bp, Homo sapiens
gttttgtgaccttga

SEQ ID NO: 793403 - DNA, 15 bp, Homo sapiens
ttttgtgaccttgag

SEQ ID NO: 793404 - DNA, 15 bp, Homo sapiens
tttgtgaccttgagc

SEQ ID NO: 793405 - DNA, 15 bp, Homo sapiens
ttgtgaccttgagca

SEQ ID NO: 793406 - DNA, 15 bp, Homo sapiens
tgtgaccttgagcaa

SEQ ID NO: 793407 - DNA, 15 bp, Homo sapiens
gtgaccttgagcaag

SEQ ID NO: 793408 - DNA, 15 bp, Homo sapiens
tgaccttgagcaagt

SEQ ID NO: 793409 - DNA, 15 bp, Homo sapiens
gaccttgagcaagtc

SEQ ID NO: 793410 - DNA, 15 bp, Homo sapiens
accttgagcaagtca

SEQ ID NO: 793411 - DNA, 15 bp, Homo sapiens
ccttgagcaagtcac

SEQ ID NO: 793412 - DNA, 15 bp, Homo sapiens
cttgagcaagtcacc

SEQ ID NO: 793413 - DNA, 15 bp, Homo sapiens
ttgagcaagtcacct

SEQ ID NO: 793414 - DNA, 15 bp, Homo sapiens
tgagcaagtcaccta

SEQ ID NO: 793415 - DNA, 15 bp, Homo sapiens
gagcaagtcacctaa

SEQ ID NO: 793416 - DNA, 15 bp, Homo sapiens
agcaagtcacctaat

SEQ ID NO: 793417 - DNA, 15 bp, Homo sapiens
gcaagtcacctaatc

SEQ ID NO: 793418 - DNA, 15 bp, Homo sapiens
caagtcacctaatca

SEQ ID NO: 793419 - DNA, 15 bp, Homo sapiens
aagtcacctaatcat

SEQ ID NO: 793420 - DNA, 15 bp, Homo sapiens
agtcacctaatcatt

SEQ ID NO: 793421 - DNA, 15 bp, Homo sapiens
gtcacctaatcatta

SEQ ID NO: 793422 - DNA, 15 bp, Homo sapiens
tcacctaatcattac

SEQ ID NO: 793423 - DNA, 15 bp, Homo sapiens
cacctaatcattaca

SEQ ID NO: 793424 - DNA, 15 bp, Homo sapiens
acctaatcattacat

SEQ ID NO: 793425 - DNA, 15 bp, Homo sapiens
cctaatcattacatg

SEQ ID NO: 793426 - DNA, 15 bp, Homo sapiens
ctaatcattacatgc

SEQ ID NO: 793427 - DNA, 15 bp, Homo sapiens
taatcattacatgcc

SEQ ID NO: 793428 - DNA, 15 bp, Homo sapiens
aatcattacatgcct

SEQ ID NO: 793429 - DNA, 15 bp, Homo sapiens
atcattacatgcctc

SEQ ID NO: 793430 - DNA, 15 bp, Homo sapiens
tcattacatgcctca

SEQ ID NO: 793431 - DNA, 15 bp, Homo sapiens
cattacatgcctcag

SEQ ID NO: 793432 - DNA, 15 bp, Homo sapiens
attacatgcctcagt

SEQ ID NO: 793433 - DNA, 15 bp, Homo sapiens
ttacatgcctcagtt

SEQ ID NO: 793434 - DNA, 15 bp, Homo sapiens
tacatgcctcagttt

SEQ ID NO: 793435 - DNA, 15 bp, Homo sapiens
acatgcctcagtttc

SEQ ID NO: 793436 - DNA, 15 bp, Homo sapiens
atgcctcagtttcct

SEQ ID NO: 793437 - DNA, 15 bp, Homo sapiens
agtttcctcatctgt

SEQ ID NO: 793438 - DNA, 15 bp, Homo sapiens
gtttcctcatctgta

SEQ ID NO: 793439 - DNA, 15 bp, Homo sapiens
tttcctcatctgtaa

SEQ ID NO: 793440 - DNA, 15 bp, Homo sapiens
ttcctcatctgtaaa

SEQ ID NO: 793441 - DNA, 15 bp, Homo sapiens
tcctcatctgtaaaa

SEQ ID NO: 793442 - DNA, 15 bp, Homo sapiens
cctcatctgtaaaag

SEQ ID NO: 793443 - DNA, 15 bp, Homo sapiens
ctcatctgtaaaagg

SEQ ID NO: 793444 - DNA, 15 bp, Homo sapiens
tcatctgtaaaaggg

SEQ ID NO: 793445 - DNA, 15 bp, Homo sapiens
catctgtaaaagggg

SEQ ID NO: 793446 - DNA, 15 bp, Homo sapiens
atctgtaaaagggga

SEQ ID NO: 793447 - DNA, 15 bp, Homo sapiens
tctgtaaaaggggat

SEQ ID NO: 793448 - DNA, 15 bp, Homo sapiens
ctgtaaaaggggata

SEQ ID NO: 793449 - DNA, 15 bp, Homo sapiens
tgtaaaaggggataa

SEQ ID NO: 793450 - DNA, 15 bp, Homo sapiens
gtaaaaggggataat

SEQ ID NO: 793451 - DNA, 15 bp, Homo sapiens
taaaaggggataata

SEQ ID NO: 793452 - DNA, 15 bp, Homo sapiens
aaaaggggataataa

SEQ ID NO: 793453 - DNA, 15 bp, Homo sapiens
aaaggggataataaa

SEQ ID NO: 793454 - DNA, 15 bp, Homo sapiens
aaggggataataaaa

SEQ ID NO: 793455 - DNA, 15 bp, Homo sapiens
aggggataataaaaa

SEQ ID NO: 793456 - DNA, 15 bp, Homo sapiens
ggggataataaaaag

SEQ ID NO: 793457 - DNA, 15 bp, Homo sapiens
gggataataaaaagc

SEQ ID NO: 793458 - DNA, 15 bp, Homo sapiens
ggataataaaaagca

SEQ ID NO: 793459 - DNA, 15 bp, Homo sapiens
gataataaaaagcat

SEQ ID NO: 793460 - DNA, 15 bp, Homo sapiens
ataataaaaagcatc

SEQ ID NO: 793461 - DNA, 15 bp, Homo sapiens
taataaaaagcatct

SEQ ID NO: 793462 - DNA, 15 bp, Homo sapiens
aataaaaagcatcta

SEQ ID NO: 793463 - DNA, 15 bp, Homo sapiens
ataaaaagcatctac

SEQ ID NO: 793464 - DNA, 15 bp, Homo sapiens
taaaaagcatctact

SEQ ID NO: 793465 - DNA, 15 bp, Homo sapiens
aaaaagcatctactt

SEQ ID NO: 793466 - DNA, 15 bp, Homo sapiens
aaaagcatctacttc

SEQ ID NO: 793467 - DNA, 15 bp, Homo sapiens
aaagcatctacttca

SEQ ID NO: 793468 - DNA, 15 bp, Homo sapiens
aagcatctacttcac

SEQ ID NO: 793469 - DNA, 15 bp, Homo sapiens
agcatctacttcaca

SEQ ID NO: 793470 - DNA, 15 bp, Homo sapiens
gcatctacttcacag

SEQ ID NO: 793471 - DNA, 15 bp, Homo sapiens
catctacttcacagg

SEQ ID NO: 793472 - DNA, 15 bp, Homo sapiens
atctacttcacaggg

SEQ ID NO: 793473 - DNA, 15 bp, Homo sapiens
tctacttcacagggt

SEQ ID NO: 793474 - DNA, 15 bp, Homo sapiens
ctacttcacagggtt

SEQ ID NO: 793475 - DNA, 15 bp, Homo sapiens
tacttcacagggttg

SEQ ID NO: 793476 - DNA, 15 bp, Homo sapiens
acttcacagggttgc

SEQ ID NO: 793477 - DNA, 15 bp, Homo sapiens
cttcacagggttgca

SEQ ID NO: 793478 - DNA, 15 bp, Homo sapiens
ttcacagggttgcat

SEQ ID NO: 793479 - DNA, 15 bp, Homo sapiens
tcacagggttgcatt

SEQ ID NO: 793480 - DNA, 15 bp, Homo sapiens
cacagggttgcattg

SEQ ID NO: 793481 - DNA, 15 bp, Homo sapiens
acagggttgcattga

SEQ ID NO: 793482 - DNA, 15 bp, Homo sapiens
cagggttgcattgag

SEQ ID NO: 793483 - DNA, 15 bp, Homo sapiens
agggttgcattgagg

SEQ ID NO: 793484 - DNA, 15 bp, Homo sapiens
gggttgcattgagga

SEQ ID NO: 793485 - DNA, 15 bp, Homo sapiens
ggttgcattgaggat

SEQ ID NO: 793486 - DNA, 15 bp, Homo sapiens
gttgcattgaggatt

SEQ ID NO: 793487 - DNA, 15 bp, Homo sapiens
ttgcattgaggatta

SEQ ID NO: 793488 - DNA, 15 bp, Homo sapiens
tgcattgaggattaa

SEQ ID NO: 793489 - DNA, 15 bp, Homo sapiens
gcattgaggattaag

SEQ ID NO: 793490 - DNA, 15 bp, Homo sapiens
cattgaggattaagt

SEQ ID NO: 793491 - DNA, 15 bp, Homo sapiens
attgaggattaagtg

SEQ ID NO: 793492 - DNA, 15 bp, Homo sapiens
ttgaggattaagtgc

SEQ ID NO: 793493 - DNA, 15 bp, Homo sapiens
tgaggattaagtgct

SEQ ID NO: 793494 - DNA, 15 bp, Homo sapiens
gaggattaagtgctt

SEQ ID NO: 793495 - DNA, 15 bp, Homo sapiens
aggattaagtgcttt

SEQ ID NO: 793496 - DNA, 15 bp, Homo sapiens
ggattaagtgcttta

SEQ ID NO: 793497 - DNA, 15 bp, Homo sapiens
gattaagtgctttaa

SEQ ID NO: 793498 - DNA, 15 bp, Homo sapiens
attaagtgctttaat

SEQ ID NO: 793499 - DNA, 15 bp, Homo sapiens
ttaagtgctttaatt

SEQ ID NO: 793500 - DNA, 15 bp, Homo sapiens
taagtgctttaatta

SEQ ID NO: 793501 - DNA, 15 bp, Homo sapiens
aagtgctttaattaa

SEQ ID NO: 793502 - DNA, 15 bp, Homo sapiens
agtgctttaattaag

SEQ ID NO: 793503 - DNA, 15 bp, Homo sapiens
gtgctttaattaagg

SEQ ID NO: 793504 - DNA, 15 bp, Homo sapiens
tgctttaattaaggt

SEQ ID NO: 793505 - DNA, 15 bp, Homo sapiens
gctttaattaaggtt

SEQ ID NO: 793506 - DNA, 15 bp, Homo sapiens
ctttaattaaggttt

SEQ ID NO: 793507 - DNA, 15 bp, Homo sapiens
tttaattaaggtttt

SEQ ID NO: 793508 - DNA, 15 bp, Homo sapiens
ttaattaaggtttta

SEQ ID NO: 793509 - DNA, 15 bp, Homo sapiens
taattaaggttttag

SEQ ID NO: 793510 - DNA, 15 bp, Homo sapiens
aattaaggttttagt

SEQ ID NO: 793511 - DNA, 15 bp, Homo sapiens
attaaggttttagta

SEQ ID NO: 793512 - DNA, 15 bp, Homo sapiens
ttaaggttttagtac

SEQ ID NO: 793513 - DNA, 15 bp, Homo sapiens
taaggttttagtaca

SEQ ID NO: 793514 - DNA, 15 bp, Homo sapiens
aaggttttagtacag

SEQ ID NO: 793515 - DNA, 15 bp, Homo sapiens
aggttttagtacagt

SEQ ID NO: 793516 - DNA, 15 bp, Homo sapiens
ggttttagtacagtt

SEQ ID NO: 793517 - DNA, 15 bp, Homo sapiens
gttttagtacagttt

SEQ ID NO: 793518 - DNA, 15 bp, Homo sapiens
ttttagtacagtttc

SEQ ID NO: 793519 - DNA, 15 bp, Homo sapiens
tttagtacagtttct

SEQ ID NO: 793520 - DNA, 15 bp, Homo sapiens
ttagtacagtttctg

SEQ ID NO: 793521 - DNA, 15 bp, Homo sapiens
tagtacagtttctga

SEQ ID NO: 793522 - DNA, 15 bp, Homo sapiens
agtacagtttctgaa

SEQ ID NO: 793523 - DNA, 15 bp, Homo sapiens
gtacagtttctgaaa

SEQ ID NO: 793524 - DNA, 15 bp, Homo sapiens
tacagtttctgaaat

SEQ ID NO: 793525 - DNA, 15 bp, Homo sapiens
acagtttctgaaata

SEQ ID NO: 793526 - DNA, 15 bp, Homo sapiens
cagtttctgaaatat

SEQ ID NO: 793527 - DNA, 15 bp, Homo sapiens
agtttctgaaatata

SEQ ID NO: 793528 - DNA, 15 bp, Homo sapiens
gtttctgaaatataa

SEQ ID NO: 793529 - DNA, 15 bp, Homo sapiens
tttctgaaatataat

SEQ ID NO: 793530 - DNA, 15 bp, Homo sapiens
ttctgaaatataatg

SEQ ID NO: 793531 - DNA, 15 bp, Homo sapiens
tctgaaatataatgt

SEQ ID NO: 793532 - DNA, 15 bp, Homo sapiens
ctgaaatataatgta

SEQ ID NO: 793533 - DNA, 15 bp, Homo sapiens
tgaaatataatgtat

SEQ ID NO: 793534 - DNA, 15 bp, Homo sapiens
gaaatataatgtatt

SEQ ID NO: 793535 - DNA, 15 bp, Homo sapiens
aaatataatgtattc

SEQ ID NO: 793536 - DNA, 15 bp, Homo sapiens
aatataatgtattct

SEQ ID NO: 793537 - DNA, 15 bp, Homo sapiens
atataatgtattcta

SEQ ID NO: 793538 - DNA, 15 bp, Homo sapiens
tataatgtattctat

SEQ ID NO: 793539 - DNA, 15 bp, Homo sapiens
ataatgtattctata

SEQ ID NO: 793540 - DNA, 15 bp, Homo sapiens
taatgtattctatat

SEQ ID NO: 793541 - DNA, 15 bp, Homo sapiens
aatgtattctatata

SEQ ID NO: 793542 - DNA, 15 bp, Homo sapiens
atgtattctatatat

SEQ ID NO: 793543 - DNA, 15 bp, Homo sapiens
tgtattctatatatg

SEQ ID NO: 793544 - DNA, 15 bp, Homo sapiens
gtattctatatatgg

SEQ ID NO: 793545 - DNA, 15 bp, Homo sapiens
tattctatatatggt

SEQ ID NO: 793546 - DNA, 15 bp, Homo sapiens
attctatatatggta

SEQ ID NO: 793547 - DNA, 15 bp, Homo sapiens
ttctatatatggtag

SEQ ID NO: 793548 - DNA, 15 bp, Homo sapiens
tctatatatggtagc

SEQ ID NO: 793549 - DNA, 15 bp, Homo sapiens
ctatatatggtagct

SEQ ID NO: 793550 - DNA, 15 bp, Homo sapiens
tatatatggtagcta

SEQ ID NO: 793551 - DNA, 15 bp, Homo sapiens
atatatggtagctat

SEQ ID NO: 793552 - DNA, 15 bp, Homo sapiens
tatatggtagctatt

SEQ ID NO: 793553 - DNA, 15 bp, Homo sapiens
atatggtagctatta

SEQ ID NO: 793554 - DNA, 15 bp, Homo sapiens
tatggtagctattat

SEQ ID NO: 793555 - DNA, 15 bp, Homo sapiens
atggtagctattatt

SEQ ID NO: 793556 - DNA, 15 bp, Homo sapiens
tggtagctattatta

SEQ ID NO: 793557 - DNA, 15 bp, Homo sapiens
ggtagctattattat

SEQ ID NO: 793558 - DNA, 15 bp, Homo sapiens
gtagctattattatg

SEQ ID NO: 793559 - DNA, 15 bp, Homo sapiens
tagctattattatgt

SEQ ID NO: 793560 - DNA, 15 bp, Homo sapiens
agctattattatgtt

SEQ ID NO: 793561 - DNA, 15 bp, Homo sapiens
gctattattatgtta

SEQ ID NO: 793562 - DNA, 15 bp, Homo sapiens
ctattattatgttag

SEQ ID NO: 793563 - DNA, 15 bp, Homo sapiens
tattattatgttagt

SEQ ID NO: 793564 - DNA, 15 bp, Homo sapiens
attattatgttagta

SEQ ID NO: 793565 - DNA, 15 bp, Homo sapiens
ttattatgttagtat

SEQ ID NO: 793566 - DNA, 15 bp, Homo sapiens
tattatgttagtatc

SEQ ID NO: 793567 - DNA, 15 bp, Homo sapiens
attatgttagtatcc

SEQ ID NO: 793568 - DNA, 15 bp, Homo sapiens
ttatgttagtatcca

SEQ ID NO: 793569 - DNA, 15 bp, Homo sapiens
tatgttagtatccat

SEQ ID NO: 793570 - DNA, 15 bp, Homo sapiens
atgttagtatccatt

SEQ ID NO: 793571 - DNA, 15 bp, Homo sapiens
tgttagtatccatta

SEQ ID NO: 793572 - DNA, 15 bp, Homo sapiens
gttagtatccattat

SEQ ID NO: 793573 - DNA, 15 bp, Homo sapiens
ttagtatccattatt

SEQ ID NO: 793574 - DNA, 15 bp, Homo sapiens
tagtatccattatta

SEQ ID NO: 793575 - DNA, 15 bp, Homo sapiens
agtatccattattat

SEQ ID NO: 793576 - DNA, 15 bp, Homo sapiens
gtatccattattatt

SEQ ID NO: 793577 - DNA, 15 bp, Homo sapiens
tatccattattattt

SEQ ID NO: 793578 - DNA, 15 bp, Homo sapiens
atccattattatttg

SEQ ID NO: 793579 - DNA, 15 bp, Homo sapiens
tccattattatttgc

SEQ ID NO: 793580 - DNA, 15 bp, Homo sapiens
ccattattatttgct

SEQ ID NO: 793581 - DNA, 15 bp, Homo sapiens
cattattatttgctg

SEQ ID NO: 793582 - DNA, 15 bp, Homo sapiens
attattatttgctgg

SEQ ID NO: 793583 - DNA, 15 bp, Homo sapiens
ttattatttgctgga

SEQ ID NO: 793584 - DNA, 15 bp, Homo sapiens
tattatttgctggaa

SEQ ID NO: 793585 - DNA, 15 bp, Homo sapiens
attatttgctggaat

SEQ ID NO: 793586 - DNA, 15 bp, Homo sapiens
ttatttgctggaatc

SEQ ID NO: 793587 - DNA, 15 bp, Homo sapiens
tatttgctggaatct

SEQ ID NO: 793588 - DNA, 15 bp, Homo sapiens
atttgctggaatctt

SEQ ID NO: 793589 - DNA, 15 bp, Homo sapiens
tttgctggaatcttt

SEQ ID NO: 793590 - DNA, 15 bp, Homo sapiens
ttgctggaatctttt

SEQ ID NO: 793591 - DNA, 15 bp, Homo sapiens
tgctggaatctttta

SEQ ID NO: 793592 - DNA, 15 bp, Homo sapiens
gctggaatcttttaa

SEQ ID NO: 793593 - DNA, 15 bp, Homo sapiens
ctggaatcttttaac

SEQ ID NO: 793594 - DNA, 15 bp, Homo sapiens
tggaatcttttaaca

SEQ ID NO: 793595 - DNA, 15 bp, Homo sapiens
ggaatcttttaacac

SEQ ID NO: 793596 - DNA, 15 bp, Homo sapiens
gaatcttttaacact

SEQ ID NO: 793597 - DNA, 15 bp, Homo sapiens
aatcttttaacactg

SEQ ID NO: 793598 - DNA, 15 bp, Homo sapiens
atcttttaacactgt

SEQ ID NO: 793599 - DNA, 15 bp, Homo sapiens
tcttttaacactgtg

SEQ ID NO: 793600 - DNA, 15 bp, Homo sapiens
cttttaacactgtgc

SEQ ID NO: 793601 - DNA, 15 bp, Homo sapiens
ttttaacactgtgct

SEQ ID NO: 793602 - DNA, 15 bp, Homo sapiens
tttaacactgtgctg

SEQ ID NO: 793603 - DNA, 15 bp, Homo sapiens
ttaacactgtgctga

SEQ ID NO: 793604 - DNA, 15 bp, Homo sapiens
taacactgtgctgag

SEQ ID NO: 793605 - DNA, 15 bp, Homo sapiens
aacactgtgctgagt

SEQ ID NO: 793606 - DNA, 15 bp, Homo sapiens
acactgtgctgagtg

SEQ ID NO: 793607 - DNA, 15 bp, Homo sapiens
cactgtgctgagtgt

SEQ ID NO: 793608 - DNA, 15 bp, Homo sapiens
actgtgctgagtgtt

SEQ ID NO: 793609 - DNA, 15 bp, Homo sapiens
ctgtgctgagtgttg

SEQ ID NO: 793610 - DNA, 15 bp, Homo sapiens
tgtgctgagtgttgg

SEQ ID NO: 793611 - DNA, 15 bp, Homo sapiens
gtgctgagtgttggt

SEQ ID NO: 793612 - DNA, 15 bp, Homo sapiens
tgctgagtgttggta

SEQ ID NO: 793613 - DNA, 15 bp, Homo sapiens
gctgagtgttggtac

SEQ ID NO: 793614 - DNA, 15 bp, Homo sapiens
ctgagtgttggtact

SEQ ID NO: 793615 - DNA, 15 bp, Homo sapiens
tgagtgttggtactg

SEQ ID NO: 793616 - DNA, 15 bp, Homo sapiens
gagtgttggtactgt

SEQ ID NO: 793617 - DNA, 15 bp, Homo sapiens
agtgttggtactgtc

SEQ ID NO: 793618 - DNA, 15 bp, Homo sapiens
gtgttggtactgtct

SEQ ID NO: 793619 - DNA, 15 bp, Homo sapiens
tgttggtactgtctt

SEQ ID NO: 793620 - DNA, 15 bp, Homo sapiens
gttggtactgtcttc

SEQ ID NO: 793621 - DNA, 15 bp, Homo sapiens
ttggtactgtcttct

SEQ ID NO: 793622 - DNA, 15 bp, Homo sapiens
tggtactgtcttctt

SEQ ID NO: 793623 - DNA, 15 bp, Homo sapiens
ggtactgtcttctta

SEQ ID NO: 793624 - DNA, 15 bp, Homo sapiens
gtactgtcttcttat

SEQ ID NO: 793625 - DNA, 15 bp, Homo sapiens
tactgtcttcttatc

SEQ ID NO: 793626 - DNA, 15 bp, Homo sapiens
actgtcttcttatca

SEQ ID NO: 793627 - DNA, 15 bp, Homo sapiens
ctgtcttcttatcat

SEQ ID NO: 793628 - DNA, 15 bp, Homo sapiens
tgtcttcttatcatg

SEQ ID NO: 793629 - DNA, 15 bp, Homo sapiens
gtcttcttatcatgt

SEQ ID NO: 793630 - DNA, 15 bp, Homo sapiens
tcttcttatcatgtc

SEQ ID NO: 793631 - DNA, 15 bp, Homo sapiens
cttcttatcatgtca

SEQ ID NO: 793632 - DNA, 15 bp, Homo sapiens
ttcttatcatgtcat

SEQ ID NO: 793633 - DNA, 15 bp, Homo sapiens
tcttatcatgtcata

SEQ ID NO: 793634 - DNA, 15 bp, Homo sapiens
cttatcatgtcatag

SEQ ID NO: 793635 - DNA, 15 bp, Homo sapiens
ttatcatgtcataga

SEQ ID NO: 793636 - DNA, 15 bp, Homo sapiens
tatcatgtcatagag

SEQ ID NO: 793637 - DNA, 15 bp, Homo sapiens
atcatgtcatagagc

SEQ ID NO: 793638 - DNA, 15 bp, Homo sapiens
tcatgtcatagagca

SEQ ID NO: 793639 - DNA, 15 bp, Homo sapiens
catgtcatagagcat

SEQ ID NO: 793640 - DNA, 15 bp, Homo sapiens
atgtcatagagcatg

SEQ ID NO: 793641 - DNA, 15 bp, Homo sapiens
tgtcatagagcatgg

SEQ ID NO: 793642 - DNA, 15 bp, Homo sapiens
gtcatagagcatggg

SEQ ID NO: 793643 - DNA, 15 bp, Homo sapiens
tcatagagcatgggg

SEQ ID NO: 793644 - DNA, 15 bp, Homo sapiens
catagagcatggggt

SEQ ID NO: 793645 - DNA, 15 bp, Homo sapiens
atagagcatggggta

SEQ ID NO: 793646 - DNA, 15 bp, Homo sapiens
tagagcatggggtag

SEQ ID NO: 793647 - DNA, 15 bp, Homo sapiens
agagcatggggtagt

SEQ ID NO: 793648 - DNA, 15 bp, Homo sapiens
gagcatggggtagta

SEQ ID NO: 793649 - DNA, 15 bp, Homo sapiens
agcatggggtagtat

SEQ ID NO: 793650 - DNA, 15 bp, Homo sapiens
gcatggggtagtata

SEQ ID NO: 793651 - DNA, 15 bp, Homo sapiens
catggggtagtataa

SEQ ID NO: 793652 - DNA, 15 bp, Homo sapiens
atggggtagtataag

SEQ ID NO: 793653 - DNA, 15 bp, Homo sapiens
tggggtagtataaga

SEQ ID NO: 793654 - DNA, 15 bp, Homo sapiens
ggggtagtataagaa

SEQ ID NO: 793655 - DNA, 15 bp, Homo sapiens
gggtagtataagaat

SEQ ID NO: 793656 - DNA, 15 bp, Homo sapiens
ggtagtataagaatc

SEQ ID NO: 793657 - DNA, 15 bp, Homo sapiens
gtagtataagaatcc

SEQ ID NO: 793658 - DNA, 15 bp, Homo sapiens
tagtataagaatcct

SEQ ID NO: 793659 - DNA, 15 bp, Homo sapiens
agtataagaatccta

SEQ ID NO: 793660 - DNA, 15 bp, Homo sapiens
gtataagaatcctac

SEQ ID NO: 793661 - DNA, 15 bp, Homo sapiens
tataagaatcctacc

SEQ ID NO: 793662 - DNA, 15 bp, Homo sapiens
ataagaatcctacct

SEQ ID NO: 793663 - DNA, 15 bp, Homo sapiens
taagaatcctacctt

SEQ ID NO: 793664 - DNA, 15 bp, Homo sapiens
aagaatcctacctta

SEQ ID NO: 793665 - DNA, 15 bp, Homo sapiens
agaatcctaccttag

SEQ ID NO: 793666 - DNA, 15 bp, Homo sapiens
gaatcctaccttagg

SEQ ID NO: 793667 - DNA, 15 bp, Homo sapiens
aatcctaccttaggt

SEQ ID NO: 793668 - DNA, 15 bp, Homo sapiens
atcctaccttaggtc

SEQ ID NO: 793669 - DNA, 15 bp, Homo sapiens
tcctaccttaggtca

SEQ ID NO: 793670 - DNA, 15 bp, Homo sapiens
cctaccttaggtcaa

SEQ ID NO: 793671 - DNA, 15 bp, Homo sapiens
ctaccttaggtcaaa

SEQ ID NO: 793672 - DNA, 15 bp, Homo sapiens
taccttaggtcaaag

SEQ ID NO: 793673 - DNA, 15 bp, Homo sapiens
accttaggtcaaagg

SEQ ID NO: 793674 - DNA, 15 bp, Homo sapiens
ccttaggtcaaaggt

SEQ ID NO: 793675 - DNA, 15 bp, Homo sapiens
cttaggtcaaaggtc

SEQ ID NO: 793676 - DNA, 15 bp, Homo sapiens
ttaggtcaaaggtca

SEQ ID NO: 793677 - DNA, 15 bp, Homo sapiens
taggtcaaaggtcac

SEQ ID NO: 793678 - DNA, 15 bp, Homo sapiens
aggtcaaaggtcaca

SEQ ID NO: 793679 - DNA, 15 bp, Homo sapiens
ggtcaaaggtcacaa

SEQ ID NO: 793680 - DNA, 15 bp, Homo sapiens
gtcaaaggtcacaaa

SEQ ID NO: 793681 - DNA, 15 bp, Homo sapiens
tcaaaggtcacaaag

SEQ ID NO: 793682 - DNA, 15 bp, Homo sapiens
caaaggtcacaaagc

SEQ ID NO: 793683 - DNA, 15 bp, Homo sapiens
aaaggtcacaaagcc

SEQ ID NO: 793684 - DNA, 15 bp, Homo sapiens
aaggtcacaaagccc

SEQ ID NO: 793685 - DNA, 15 bp, Homo sapiens
aggtcacaaagccct

SEQ ID NO: 793686 - DNA, 15 bp, Homo sapiens
ggtcacaaagcccta

SEQ ID NO: 793687 - DNA, 15 bp, Homo sapiens
gtcacaaagccctat

SEQ ID NO: 793688 - DNA, 15 bp, Homo sapiens
tcacaaagccctatt

SEQ ID NO: 793689 - DNA, 15 bp, Homo sapiens
cacaaagccctattg

SEQ ID NO: 793690 - DNA, 15 bp, Homo sapiens
acaaagccctattgt

SEQ ID NO: 793691 - DNA, 15 bp, Homo sapiens
caaagccctattgtt

SEQ ID NO: 793692 - DNA, 15 bp, Homo sapiens
aaagccctattgttt

SEQ ID NO: 793693 - DNA, 15 bp, Homo sapiens
aagccctattgtttt

SEQ ID NO: 793694 - DNA, 15 bp, Homo sapiens
agccctattgtttta

SEQ ID NO: 793695 - DNA, 15 bp, Homo sapiens
gccctattgttttat

SEQ ID NO: 793696 - DNA, 15 bp, Homo sapiens
ccctattgttttatt

SEQ ID NO: 793697 - DNA, 15 bp, Homo sapiens
cctattgttttattc

SEQ ID NO: 793698 - DNA, 15 bp, Homo sapiens
ctattgttttattcc

SEQ ID NO: 793699 - DNA, 15 bp, Homo sapiens
tattgttttattccc

SEQ ID NO: 793700 - DNA, 15 bp, Homo sapiens
attgttttattccca

SEQ ID NO: 793701 - DNA, 15 bp, Homo sapiens
ttgttttattcccaa

SEQ ID NO: 793702 - DNA, 15 bp, Homo sapiens
tgttttattcccaat

SEQ ID NO: 793703 - DNA, 15 bp, Homo sapiens
gttttattcccaata

SEQ ID NO: 793704 - DNA, 15 bp, Homo sapiens
ttttattcccaatag

SEQ ID NO: 793705 - DNA, 15 bp, Homo sapiens
tttattcccaatagt

SEQ ID NO: 793706 - DNA, 15 bp, Homo sapiens
ttattcccaatagtc

SEQ ID NO: 793707 - DNA, 15 bp, Homo sapiens
tattcccaatagtct

SEQ ID NO: 793708 - DNA, 15 bp, Homo sapiens
attcccaatagtctt

SEQ ID NO: 793709 - DNA, 15 bp, Homo sapiens
ttcccaatagtctta

SEQ ID NO: 793710 - DNA, 15 bp, Homo sapiens
tcccaatagtcttac

SEQ ID NO: 793711 - DNA, 15 bp, Homo sapiens
cccaatagtcttaca

SEQ ID NO: 793712 - DNA, 15 bp, Homo sapiens
ccaatagtcttacag

SEQ ID NO: 793713 - DNA, 15 bp, Homo sapiens
caatagtcttacagg

SEQ ID NO: 793714 - DNA, 15 bp, Homo sapiens
aatagtcttacaggg

SEQ ID NO: 793715 - DNA, 15 bp, Homo sapiens
atagtcttacaggga

SEQ ID NO: 793716 - DNA, 15 bp, Homo sapiens
tagtcttacagggaa

SEQ ID NO: 793717 - DNA, 15 bp, Homo sapiens
agtcttacagggaag

SEQ ID NO: 793718 - DNA, 15 bp, Homo sapiens
gtcttacagggaaga

SEQ ID NO: 793719 - DNA, 15 bp, Homo sapiens
tcttacagggaagat

SEQ ID NO: 793720 - DNA, 15 bp, Homo sapiens
cttacagggaagatg

SEQ ID NO: 793721 - DNA, 15 bp, Homo sapiens
ttacagggaagatgc

SEQ ID NO: 793722 - DNA, 15 bp, Homo sapiens
tacagggaagatgca

SEQ ID NO: 793723 - DNA, 15 bp, Homo sapiens
acagggaagatgcag

SEQ ID NO: 793724 - DNA, 15 bp, Homo sapiens
cagggaagatgcagt

SEQ ID NO: 793725 - DNA, 15 bp, Homo sapiens
agggaagatgcagtt

SEQ ID NO: 793726 - DNA, 15 bp, Homo sapiens
gggaagatgcagttg

SEQ ID NO: 793727 - DNA, 15 bp, Homo sapiens
ggaagatgcagttgt

SEQ ID NO: 793728 - DNA, 15 bp, Homo sapiens
gaagatgcagttgtc

SEQ ID NO: 793729 - DNA, 15 bp, Homo sapiens
aagatgcagttgtcc

SEQ ID NO: 793730 - DNA, 15 bp, Homo sapiens
agatgcagttgtcct

SEQ ID NO: 793731 - DNA, 15 bp, Homo sapiens
gatgcagttgtcctt

SEQ ID NO: 793732 - DNA, 15 bp, Homo sapiens
atgcagttgtccttg

SEQ ID NO: 793733 - DNA, 15 bp, Homo sapiens
tgcagttgtccttgt

SEQ ID NO: 793734 - DNA, 15 bp, Homo sapiens
gcagttgtccttgtc

SEQ ID NO: 793735 - DNA, 15 bp, Homo sapiens
cagttgtccttgtct

SEQ ID NO: 793736 - DNA, 15 bp, Homo sapiens
agttgtccttgtctt

SEQ ID NO: 793737 - DNA, 15 bp, Homo sapiens
gttgtccttgtctta

SEQ ID NO: 793738 - DNA, 15 bp, Homo sapiens
ttgtccttgtcttat

SEQ ID NO: 793739 - DNA, 15 bp, Homo sapiens
tgtccttgtcttatg

SEQ ID NO: 793740 - DNA, 15 bp, Homo sapiens
gtccttgtcttatgg

SEQ ID NO: 793741 - DNA, 15 bp, Homo sapiens
tccttgtcttatgga

SEQ ID NO: 793742 - DNA, 15 bp, Homo sapiens
ccttgtcttatggag

SEQ ID NO: 793743 - DNA, 15 bp, Homo sapiens
cttgtcttatggagg

SEQ ID NO: 793744 - DNA, 15 bp, Homo sapiens
ttgtcttatggagga

SEQ ID NO: 793745 - DNA, 15 bp, Homo sapiens
tgtcttatggaggaa

SEQ ID NO: 793746 - DNA, 15 bp, Homo sapiens
gtcttatggaggaag

SEQ ID NO: 793747 - DNA, 15 bp, Homo sapiens
tcttatggaggaagg

SEQ ID NO: 793748 - DNA, 15 bp, Homo sapiens
cttatggaggaagga

SEQ ID NO: 793749 - DNA, 15 bp, Homo sapiens
ttatggaggaaggag

SEQ ID NO: 793750 - DNA, 15 bp, Homo sapiens
tatggaggaaggagg

SEQ ID NO: 793751 - DNA, 15 bp, Homo sapiens
atggaggaaggaggt

SEQ ID NO: 793752 - DNA, 15 bp, Homo sapiens
tggaggaaggaggtg

SEQ ID NO: 793753 - DNA, 15 bp, Homo sapiens
ggaggaaggaggtga

SEQ ID NO: 793754 - DNA, 15 bp, Homo sapiens
gaggaaggaggtgaa

SEQ ID NO: 793755 - DNA, 15 bp, Homo sapiens
aggaaggaggtgaag

SEQ ID NO: 793756 - DNA, 15 bp, Homo sapiens
ggaaggaggtgaagc

SEQ ID NO: 793757 - DNA, 15 bp, Homo sapiens
gaaggaggtgaagca

SEQ ID NO: 793758 - DNA, 15 bp, Homo sapiens
aaggaggtgaagcac

SEQ ID NO: 793759 - DNA, 15 bp, Homo sapiens
aggaggtgaagcaca

SEQ ID NO: 793760 - DNA, 15 bp, Homo sapiens
ggaggtgaagcacac

SEQ ID NO: 793761 - DNA, 15 bp, Homo sapiens
gaggtgaagcacacc

SEQ ID NO: 793762 - DNA, 15 bp, Homo sapiens
aggtgaagcacaccc

SEQ ID NO: 793763 - DNA, 15 bp, Homo sapiens
ggtgaagcacacccg

SEQ ID NO: 793764 - DNA, 15 bp, Homo sapiens
gtgaagcacacccga

SEQ ID NO: 793765 - DNA, 15 bp, Homo sapiens
tgaagcacacccgag

SEQ ID NO: 793766 - DNA, 15 bp, Homo sapiens
gaagcacacccgagc

SEQ ID NO: 793767 - DNA, 15 bp, Homo sapiens
aagcacacccgagcg

SEQ ID NO: 793768 - DNA, 15 bp, Homo sapiens
agcacacccgagcgg

SEQ ID NO: 793769 - DNA, 15 bp, Homo sapiens
gcacacccgagcggt

SEQ ID NO: 793770 - DNA, 15 bp, Homo sapiens
cacacccgagcggta

SEQ ID NO: 793771 - DNA, 15 bp, Homo sapiens
acacccgagcggtaa

SEQ ID NO: 793772 - DNA, 15 bp, Homo sapiens
cacccgagcggtaaa

SEQ ID NO: 793773 - DNA, 15 bp, Homo sapiens
acccgagcggtaaag

SEQ ID NO: 793774 - DNA, 15 bp, Homo sapiens
cccgagcggtaaaga

SEQ ID NO: 793775 - DNA, 15 bp, Homo sapiens
ccgagcggtaaagag

SEQ ID NO: 793776 - DNA, 15 bp, Homo sapiens
cgagcggtaaagagg

SEQ ID NO: 793777 - DNA, 15 bp, Homo sapiens
gagcggtaaagaggc

SEQ ID NO: 793778 - DNA, 15 bp, Homo sapiens
agcggtaaagaggcc

SEQ ID NO: 793779 - DNA, 15 bp, Homo sapiens
gcggtaaagaggccc

SEQ ID NO: 793780 - DNA, 15 bp, Homo sapiens
cggtaaagaggcccc

SEQ ID NO: 793781 - DNA, 15 bp, Homo sapiens
ggtaaagaggcccct

SEQ ID NO: 793782 - DNA, 15 bp, Homo sapiens
gtaaagaggcccctg

SEQ ID NO: 793783 - DNA, 15 bp, Homo sapiens
taaagaggcccctgg

SEQ ID NO: 793784 - DNA, 15 bp, Homo sapiens
aaagaggcccctggt

SEQ ID NO: 793785 - DNA, 15 bp, Homo sapiens
aagaggcccctggtc

SEQ ID NO: 793786 - DNA, 15 bp, Homo sapiens
agaggcccctggtca

SEQ ID NO: 793787 - DNA, 15 bp, Homo sapiens
gaggcccctggtcac

SEQ ID NO: 793788 - DNA, 15 bp, Homo sapiens
aggcccctggtcaca

SEQ ID NO: 793789 - DNA, 15 bp, Homo sapiens
ggcccctggtcacac

SEQ ID NO: 793790 - DNA, 15 bp, Homo sapiens
gcccctggtcacaca

SEQ ID NO: 793791 - DNA, 15 bp, Homo sapiens
cccctggtcacacag

SEQ ID NO: 793792 - DNA, 15 bp, Homo sapiens
ccctggtcacacagc

SEQ ID NO: 793793 - DNA, 15 bp, Homo sapiens
cctggtcacacagcc

SEQ ID NO: 793794 - DNA, 15 bp, Homo sapiens
ctggtcacacagccc

SEQ ID NO: 793795 - DNA, 15 bp, Homo sapiens
tggtcacacagccca

SEQ ID NO: 793796 - DNA, 15 bp, Homo sapiens
ggtcacacagcccat

SEQ ID NO: 793797 - DNA, 15 bp, Homo sapiens
gtcacacagcccata

SEQ ID NO: 793798 - DNA, 15 bp, Homo sapiens
tcacacagcccatac

SEQ ID NO: 793799 - DNA, 15 bp, Homo sapiens
cacacagcccataca

SEQ ID NO: 793800 - DNA, 15 bp, Homo sapiens
acacagcccatacag

SEQ ID NO: 793801 - DNA, 15 bp, Homo sapiens
cacagcccatacagg

SEQ ID NO: 793802 - DNA, 15 bp, Homo sapiens
acagcccatacagga

SEQ ID NO: 793803 - DNA, 15 bp, Homo sapiens
cagcccatacaggag

SEQ ID NO: 793804 - DNA, 15 bp, Homo sapiens
agcccatacaggagt

SEQ ID NO: 793805 - DNA, 15 bp, Homo sapiens
gcccatacaggagtc

SEQ ID NO: 793806 - DNA, 15 bp, Homo sapiens
cccatacaggagtca

SEQ ID NO: 793807 - DNA, 15 bp, Homo sapiens
ccatacaggagtcaa

SEQ ID NO: 793808 - DNA, 15 bp, Homo sapiens
catacaggagtcaaa

SEQ ID NO: 793809 - DNA, 15 bp, Homo sapiens
atacaggagtcaaac

SEQ ID NO: 793810 - DNA, 15 bp, Homo sapiens
tacaggagtcaaacc

SEQ ID NO: 793811 - DNA, 15 bp, Homo sapiens
acaggagtcaaaccc

SEQ ID NO: 793812 - DNA, 15 bp, Homo sapiens
caggagtcaaaccct

SEQ ID NO: 793813 - DNA, 15 bp, Homo sapiens
aggagtcaaaccctg

SEQ ID NO: 793814 - DNA, 15 bp, Homo sapiens
ggagtcaaaccctgg

SEQ ID NO: 793815 - DNA, 15 bp, Homo sapiens
gagtcaaaccctggc

SEQ ID NO: 793816 - DNA, 15 bp, Homo sapiens
agtcaaaccctggcc

SEQ ID NO: 793817 - DNA, 15 bp, Homo sapiens
gtcaaaccctggcct

SEQ ID NO: 793818 - DNA, 15 bp, Homo sapiens
tcaaaccctggcctc

SEQ ID NO: 793819 - DNA, 15 bp, Homo sapiens
caaaccctggcctct

SEQ ID NO: 793820 - DNA, 15 bp, Homo sapiens
aaaccctggcctctg

SEQ ID NO: 793821 - DNA, 15 bp, Homo sapiens
aaccctggcctctgg

SEQ ID NO: 793822 - DNA, 15 bp, Homo sapiens
accctggcctctggc

SEQ ID NO: 793823 - DNA, 15 bp, Homo sapiens
ccctggcctctggct

SEQ ID NO: 793824 - DNA, 15 bp, Homo sapiens
cctggcctctggctg

SEQ ID NO: 793825 - DNA, 15 bp, Homo sapiens
ctggcctctggctgc

SEQ ID NO: 793826 - DNA, 15 bp, Homo sapiens
tggcctctggctgca

SEQ ID NO: 793827 - DNA, 15 bp, Homo sapiens
ggcctctggctgcaa

SEQ ID NO: 793828 - DNA, 15 bp, Homo sapiens
gcctctggctgcaag

SEQ ID NO: 793829 - DNA, 15 bp, Homo sapiens
cctctggctgcaagc

SEQ ID NO: 793830 - DNA, 15 bp, Homo sapiens
ctctggctgcaagcc

SEQ ID NO: 793831 - DNA, 15 bp, Homo sapiens
tctggctgcaagcct

SEQ ID NO: 793832 - DNA, 15 bp, Homo sapiens
ctggctgcaagcctg

SEQ ID NO: 793833 - DNA, 15 bp, Homo sapiens
tggctgcaagcctgc

SEQ ID NO: 793834 - DNA, 15 bp, Homo sapiens
ggctgcaagcctgcc

SEQ ID NO: 793835 - DNA, 15 bp, Homo sapiens
gctgcaagcctgcca

SEQ ID NO: 793836 - DNA, 15 bp, Homo sapiens
ctgcaagcctgccat

SEQ ID NO: 793837 - DNA, 15 bp, Homo sapiens
tgcaagcctgccatc

SEQ ID NO: 793838 - DNA, 15 bp, Homo sapiens
gcaagcctgccatcc

SEQ ID NO: 793839 - DNA, 15 bp, Homo sapiens
caagcctgccatccc

SEQ ID NO: 793840 - DNA, 15 bp, Homo sapiens
aagcctgccatcccc

SEQ ID NO: 793841 - DNA, 15 bp, Homo sapiens
agcctgccatcccca

SEQ ID NO: 793842 - DNA, 15 bp, Homo sapiens
gcctgccatccccaa

SEQ ID NO: 793843 - DNA, 15 bp, Homo sapiens
cctgccatccccaag

SEQ ID NO: 793844 - DNA, 15 bp, Homo sapiens
ctgccatccccaagc

SEQ ID NO: 793845 - DNA, 15 bp, Homo sapiens
tgccatccccaagcg

SEQ ID NO: 793846 - DNA, 15 bp, Homo sapiens
gccatccccaagcgt

SEQ ID NO: 793847 - DNA, 15 bp, Homo sapiens
ccatccccaagcgtc

SEQ ID NO: 793848 - DNA, 15 bp, Homo sapiens
catccccaagcgtct

SEQ ID NO: 793849 - DNA, 15 bp, Homo sapiens
atccccaagcgtctc

SEQ ID NO: 793850 - DNA, 15 bp, Homo sapiens
tccccaagcgtctct

SEQ ID NO: 793851 - DNA, 15 bp, Homo sapiens
ccccaagcgtctctc

SEQ ID NO: 793852 - DNA, 15 bp, Homo sapiens
cccaagcgtctctct

SEQ ID NO: 793853 - DNA, 15 bp, Homo sapiens
ccaagcgtctctcta

SEQ ID NO: 793854 - DNA, 15 bp, Homo sapiens
caagcgtctctctaa

SEQ ID NO: 793855 - DNA, 15 bp, Homo sapiens
aagcgtctctctaaa

SEQ ID NO: 793856 - DNA, 15 bp, Homo sapiens
agcgtctctctaaag

SEQ ID NO: 793857 - DNA, 15 bp, Homo sapiens
gcgtctctctaaagc

SEQ ID NO: 793858 - DNA, 15 bp, Homo sapiens
cgtctctctaaagct

SEQ ID NO: 793859 - DNA, 15 bp, Homo sapiens
gtctctctaaagctt

SEQ ID NO: 793860 - DNA, 15 bp, Homo sapiens
tctctctaaagcttc

SEQ ID NO: 793861 - DNA, 15 bp, Homo sapiens
ctctctaaagcttct

SEQ ID NO: 793862 - DNA, 15 bp, Homo sapiens
tctctaaagcttctt

SEQ ID NO: 793863 - DNA, 15 bp, Homo sapiens
ctctaaagcttcttg

SEQ ID NO: 793864 - DNA, 15 bp, Homo sapiens
tctaaagcttcttgt

SEQ ID NO: 793865 - DNA, 15 bp, Homo sapiens
ctaaagcttcttgtc

SEQ ID NO: 793866 - DNA, 15 bp, Homo sapiens
taaagcttcttgtca

SEQ ID NO: 793867 - DNA, 15 bp, Homo sapiens
aaagcttcttgtcaa

SEQ ID NO: 793868 - DNA, 15 bp, Homo sapiens
aagcttcttgtcaac

SEQ ID NO: 793869 - DNA, 15 bp, Homo sapiens
agcttcttgtcaacc

SEQ ID NO: 793870 - DNA, 15 bp, Homo sapiens
gcttcttgtcaacca

SEQ ID NO: 793871 - DNA, 15 bp, Homo sapiens
cttcttgtcaaccag

SEQ ID NO: 793872 - DNA, 15 bp, Homo sapiens
ttcttgtcaaccagc

SEQ ID NO: 793873 - DNA, 15 bp, Homo sapiens
tcttgtcaaccagcc

SEQ ID NO: 793874 - DNA, 15 bp, Homo sapiens
cttgtcaaccagcct

SEQ ID NO: 793875 - DNA, 15 bp, Homo sapiens
ttgtcaaccagcctc

SEQ ID NO: 793876 - DNA, 15 bp, Homo sapiens
tgtcaaccagcctca

SEQ ID NO: 793877 - DNA, 15 bp, Homo sapiens
gtcaaccagcctcag

SEQ ID NO: 793878 - DNA, 15 bp, Homo sapiens
tcaaccagcctcaga

SEQ ID NO: 793879 - DNA, 15 bp, Homo sapiens
caaccagcctcagac

SEQ ID NO: 793880 - DNA, 15 bp, Homo sapiens
aaccagcctcagaca

SEQ ID NO: 793881 - DNA, 15 bp, Homo sapiens
accagcctcagacag

SEQ ID NO: 793882 - DNA, 15 bp, Homo sapiens
ccagcctcagacagg

SEQ ID NO: 793883 - DNA, 15 bp, Homo sapiens
cagcctcagacaggg

SEQ ID NO: 793884 - DNA, 15 bp, Homo sapiens
agcctcagacagggg

SEQ ID NO: 793885 - DNA, 15 bp, Homo sapiens
gcctcagacaggggc

SEQ ID NO: 793886 - DNA, 15 bp, Homo sapiens
cctcagacaggggcc

SEQ ID NO: 793887 - DNA, 15 bp, Homo sapiens
ctcagacaggggccc

SEQ ID NO: 793888 - DNA, 15 bp, Homo sapiens
tcagacaggggccca

SEQ ID NO: 793889 - DNA, 15 bp, Homo sapiens
cagacaggggcccac

SEQ ID NO: 793890 - DNA, 15 bp, Homo sapiens
agacaggggcccaca

SEQ ID NO: 793891 - DNA, 15 bp, Homo sapiens
gacaggggcccacag

SEQ ID NO: 793892 - DNA, 15 bp, Homo sapiens
acaggggcccacaga

SEQ ID NO: 793893 - DNA, 15 bp, Homo sapiens
caggggcccacagac

SEQ ID NO: 793894 - DNA, 15 bp, Homo sapiens
aggggcccacagaca

SEQ ID NO: 793895 - DNA, 15 bp, Homo sapiens
ggggcccacagacac

SEQ ID NO: 793896 - DNA, 15 bp, Homo sapiens
gggcccacagacacg

SEQ ID NO: 793897 - DNA, 15 bp, Homo sapiens
ggcccacagacacga

SEQ ID NO: 793898 - DNA, 15 bp, Homo sapiens
gcccacagacacgaa

SEQ ID NO: 793899 - DNA, 15 bp, Homo sapiens
cccacagacacgaac

SEQ ID NO: 793900 - DNA, 15 bp, Homo sapiens
ccacagacacgaacc

SEQ ID NO: 793901 - DNA, 15 bp, Homo sapiens
cacagacacgaacct

SEQ ID NO: 793902 - DNA, 15 bp, Homo sapiens
acagacacgaacctc

SEQ ID NO: 793903 - DNA, 15 bp, Homo sapiens
cagacacgaacctca

SEQ ID NO: 793904 - DNA, 15 bp, Homo sapiens
agacacgaacctcat

SEQ ID NO: 793905 - DNA, 15 bp, Homo sapiens
gacacgaacctcatc

SEQ ID NO: 793906 - DNA, 15 bp, Homo sapiens
acacgaacctcatct

SEQ ID NO: 793907 - DNA, 15 bp, Homo sapiens
cacgaacctcatctc

SEQ ID NO: 793908 - DNA, 15 bp, Homo sapiens
acgaacctcatctca

SEQ ID NO: 793909 - DNA, 15 bp, Homo sapiens
cgaacctcatctcag

SEQ ID NO: 793910 - DNA, 15 bp, Homo sapiens
gaacctcatctcagc

SEQ ID NO: 793911 - DNA, 15 bp, Homo sapiens
aacctcatctcagcg

SEQ ID NO: 793912 - DNA, 15 bp, Homo sapiens
acctcatctcagcgt

SEQ ID NO: 793913 - DNA, 15 bp, Homo sapiens
cctcatctcagcgtt

SEQ ID NO: 793914 - DNA, 15 bp, Homo sapiens
ctcatctcagcgttg

SEQ ID NO: 793915 - DNA, 15 bp, Homo sapiens
tcatctcagcgttgg

SEQ ID NO: 793916 - DNA, 15 bp, Homo sapiens
catctcagcgttggt

SEQ ID NO: 793917 - DNA, 15 bp, Homo sapiens
atctcagcgttggta

SEQ ID NO: 793918 - DNA, 15 bp, Homo sapiens
tctcagcgttggtag

SEQ ID NO: 793919 - DNA, 15 bp, Homo sapiens
ctcagcgttggtagg

SEQ ID NO: 793920 - DNA, 15 bp, Homo sapiens
tcagcgttggtagga

SEQ ID NO: 793921 - DNA, 15 bp, Homo sapiens
cagcgttggtaggag

SEQ ID NO: 793922 - DNA, 15 bp, Homo sapiens
agcgttggtaggagg

SEQ ID NO: 793923 - DNA, 15 bp, Homo sapiens
gcgttggtaggaggc

SEQ ID NO: 793924 - DNA, 15 bp, Homo sapiens
cgttggtaggaggca

SEQ ID NO: 793925 - DNA, 15 bp, Homo sapiens
gttggtaggaggcac

SEQ ID NO: 793926 - DNA, 15 bp, Homo sapiens
ttggtaggaggcacc

SEQ ID NO: 793927 - DNA, 15 bp, Homo sapiens
tggtaggaggcacct

SEQ ID NO: 793928 - DNA, 15 bp, Homo sapiens
ggtaggaggcacctt

SEQ ID NO: 793929 - DNA, 15 bp, Homo sapiens
gtaggaggcaccttc

SEQ ID NO: 793930 - DNA, 15 bp, Homo sapiens
taggaggcaccttcc

SEQ ID NO: 793931 - DNA, 15 bp, Homo sapiens
aggaggcaccttcca

SEQ ID NO: 793932 - DNA, 15 bp, Homo sapiens
ggaggcaccttccac

SEQ ID NO: 793933 - DNA, 15 bp, Homo sapiens
gaggcaccttccact

SEQ ID NO: 793934 - DNA, 15 bp, Homo sapiens
aggcaccttccactt

SEQ ID NO: 793935 - DNA, 15 bp, Homo sapiens
ggcaccttccacttg

SEQ ID NO: 793936 - DNA, 15 bp, Homo sapiens
gcaccttccacttgg

SEQ ID NO: 793937 - DNA, 15 bp, Homo sapiens
caccttccacttgga

SEQ ID NO: 793938 - DNA, 15 bp, Homo sapiens
accttccacttggat

SEQ ID NO: 793939 - DNA, 15 bp, Homo sapiens
ccttccacttggatt

SEQ ID NO: 793940 - DNA, 15 bp, Homo sapiens
cttccacttggattc

SEQ ID NO: 793941 - DNA, 15 bp, Homo sapiens
ttccacttggattct

SEQ ID NO: 793942 - DNA, 15 bp, Homo sapiens
tccacttggattctc

SEQ ID NO: 793943 - DNA, 15 bp, Homo sapiens
ccacttggattctct

SEQ ID NO: 793944 - DNA, 15 bp, Homo sapiens
cacttggattctctt

SEQ ID NO: 793945 - DNA, 15 bp, Homo sapiens
acttggattctcttc

SEQ ID NO: 793946 - DNA, 15 bp, Homo sapiens
cttggattctcttca

SEQ ID NO: 793947 - DNA, 15 bp, Homo sapiens
ttggattctcttcat

SEQ ID NO: 793948 - DNA, 15 bp, Homo sapiens
tggattctcttcatg

SEQ ID NO: 793949 - DNA, 15 bp, Homo sapiens
ggattctcttcatgt

SEQ ID NO: 793950 - DNA, 15 bp, Homo sapiens
gattctcttcatgtg

SEQ ID NO: 793951 - DNA, 15 bp, Homo sapiens
attctcttcatgtgg

SEQ ID NO: 793952 - DNA, 15 bp, Homo sapiens
ttctcttcatgtggt

SEQ ID NO: 793953 - DNA, 15 bp, Homo sapiens
tctcttcatgtggtt

SEQ ID NO: 793954 - DNA, 15 bp, Homo sapiens
ctcttcatgtggtta

SEQ ID NO: 793955 - DNA, 15 bp, Homo sapiens
tcttcatgtggttaa

SEQ ID NO: 793956 - DNA, 15 bp, Homo sapiens
cttcatgtggttaag

SEQ ID NO: 793957 - DNA, 15 bp, Homo sapiens
ttcatgtggttaaga

SEQ ID NO: 793958 - DNA, 15 bp, Homo sapiens
tcatgtggttaagag

SEQ ID NO: 793959 - DNA, 15 bp, Homo sapiens
catgtggttaagaga

SEQ ID NO: 793960 - DNA, 15 bp, Homo sapiens
atgtggttaagagag

SEQ ID NO: 793961 - DNA, 15 bp, Homo sapiens
tgtggttaagagagt

SEQ ID NO: 793962 - DNA, 15 bp, Homo sapiens
gtggttaagagagtc

SEQ ID NO: 793963 - DNA, 15 bp, Homo sapiens
tggttaagagagtcc

SEQ ID NO: 793964 - DNA, 15 bp, Homo sapiens
ggttaagagagtcct

SEQ ID NO: 793965 - DNA, 15 bp, Homo sapiens
gttaagagagtcctg

SEQ ID NO: 793966 - DNA, 15 bp, Homo sapiens
ttaagagagtcctga

SEQ ID NO: 793967 - DNA, 15 bp, Homo sapiens
taagagagtcctgag

SEQ ID NO: 793968 - DNA, 15 bp, Homo sapiens
aagagagtcctgagt

SEQ ID NO: 793969 - DNA, 15 bp, Homo sapiens
agagagtcctgagtt

SEQ ID NO: 793970 - DNA, 15 bp, Homo sapiens
gagagtcctgagttc

SEQ ID NO: 793971 - DNA, 15 bp, Homo sapiens
agagtcctgagttcc

SEQ ID NO: 793972 - DNA, 15 bp, Homo sapiens
gagtcctgagttcca

SEQ ID NO: 793973 - DNA, 15 bp, Homo sapiens
agtcctgagttccaa

SEQ ID NO: 793974 - DNA, 15 bp, Homo sapiens
gtcctgagttccaat

SEQ ID NO: 793975 - DNA, 15 bp, Homo sapiens
tcctgagttccaatc

SEQ ID NO: 793976 - DNA, 15 bp, Homo sapiens
cctgagttccaatcc

SEQ ID NO: 793977 - DNA, 15 bp, Homo sapiens
ctgagttccaatcct

SEQ ID NO: 793978 - DNA, 15 bp, Homo sapiens
tgagttccaatccta

SEQ ID NO: 793979 - DNA, 15 bp, Homo sapiens
gagttccaatcctaa

SEQ ID NO: 793980 - DNA, 15 bp, Homo sapiens
agttccaatcctaag

SEQ ID NO: 793981 - DNA, 15 bp, Homo sapiens
gttccaatcctaagt

SEQ ID NO: 793982 - DNA, 15 bp, Homo sapiens
ttccaatcctaagtt

SEQ ID NO: 793983 - DNA, 15 bp, Homo sapiens
tccaatcctaagttc

SEQ ID NO: 793984 - DNA, 15 bp, Homo sapiens
ccaatcctaagttca

SEQ ID NO: 793985 - DNA, 15 bp, Homo sapiens
caatcctaagttcac

SEQ ID NO: 793986 - DNA, 15 bp, Homo sapiens
aatcctaagttcact

SEQ ID NO: 793987 - DNA, 15 bp, Homo sapiens
atcctaagttcactc

SEQ ID NO: 793988 - DNA, 15 bp, Homo sapiens
tcctaagttcactcg

SEQ ID NO: 793989 - DNA, 15 bp, Homo sapiens
cctaagttcactcgt

SEQ ID NO: 793990 - DNA, 15 bp, Homo sapiens
ctaagttcactcgtc

SEQ ID NO: 793991 - DNA, 15 bp, Homo sapiens
taagttcactcgtct

SEQ ID NO: 793992 - DNA, 15 bp, Homo sapiens
aagttcactcgtctc

SEQ ID NO: 793993 - DNA, 15 bp, Homo sapiens
agttcactcgtctct

SEQ ID NO: 793994 - DNA, 15 bp, Homo sapiens
gttcactcgtctcta

SEQ ID NO: 793995 - DNA, 15 bp, Homo sapiens
ttcactcgtctctac

SEQ ID NO: 793996 - DNA, 15 bp, Homo sapiens
tcactcgtctctacc

SEQ ID NO: 793997 - DNA, 15 bp, Homo sapiens
cactcgtctctacct

SEQ ID NO: 793998 - DNA, 15 bp, Homo sapiens
actcgtctctacctc

SEQ ID NO: 793999 - DNA, 15 bp, Homo sapiens
ctcgtctctacctcc

SEQ ID NO: 794000 - DNA, 15 bp, Homo sapiens
tcgtctctacctcct

SEQ ID NO: 794001 - DNA, 15 bp, Homo sapiens
cgtctctacctcctt

SEQ ID NO: 794002 - DNA, 15 bp, Homo sapiens
gtctctacctccttg

SEQ ID NO: 794003 - DNA, 15 bp, Homo sapiens
tctctacctccttgc

SEQ ID NO: 794004 - DNA, 15 bp, Homo sapiens
ctctacctccttgcc

SEQ ID NO: 794005 - DNA, 15 bp, Homo sapiens
tctacctccttgcct

SEQ ID NO: 794006 - DNA, 15 bp, Homo sapiens
ctacctccttgcctt

SEQ ID NO: 794007 - DNA, 15 bp, Homo sapiens
tacctccttgccttt

SEQ ID NO: 794008 - DNA, 15 bp, Homo sapiens
acctccttgcctttg

SEQ ID NO: 794009 - DNA, 15 bp, Homo sapiens
cctccttgcctttgt

SEQ ID NO: 794010 - DNA, 15 bp, Homo sapiens
ctccttgcctttgtg

SEQ ID NO: 794011 - DNA, 15 bp, Homo sapiens
tccttgcctttgtgc

SEQ ID NO: 794012 - DNA, 15 bp, Homo sapiens
ccttgcctttgtgca

SEQ ID NO: 794013 - DNA, 15 bp, Homo sapiens
cttgcctttgtgcag

SEQ ID NO: 794014 - DNA, 15 bp, Homo sapiens
ttgcctttgtgcagg

SEQ ID NO: 794015 - DNA, 15 bp, Homo sapiens
tgcctttgtgcaggt

SEQ ID NO: 794016 - DNA, 15 bp, Homo sapiens
gcctttgtgcaggtt

SEQ ID NO: 794017 - DNA, 15 bp, Homo sapiens
cctttgtgcaggtta

SEQ ID NO: 794018 - DNA, 15 bp, Homo sapiens
ctttgtgcaggttac

SEQ ID NO: 794019 - DNA, 15 bp, Homo sapiens
tttgtgcaggttact

SEQ ID NO: 794020 - DNA, 15 bp, Homo sapiens
ttgtgcaggttactt

SEQ ID NO: 794021 - DNA, 15 bp, Homo sapiens
tgtgcaggttactta

SEQ ID NO: 794022 - DNA, 15 bp, Homo sapiens
gtgcaggttacttaa

SEQ ID NO: 794023 - DNA, 15 bp, Homo sapiens
tgcaggttacttaac

SEQ ID NO: 794024 - DNA, 15 bp, Homo sapiens
gcaggttacttaact

SEQ ID NO: 794025 - DNA, 15 bp, Homo sapiens
caggttacttaactt

SEQ ID NO: 794026 - DNA, 15 bp, Homo sapiens
aggttacttaacttt

SEQ ID NO: 794027 - DNA, 15 bp, Homo sapiens
ggttacttaactttt

SEQ ID NO: 794028 - DNA, 15 bp, Homo sapiens
gttacttaacttttc

SEQ ID NO: 794029 - DNA, 15 bp, Homo sapiens
ttacttaacttttct

SEQ ID NO: 794030 - DNA, 15 bp, Homo sapiens
tacttaacttttctg

SEQ ID NO: 794031 - DNA, 15 bp, Homo sapiens
acttaacttttctga

SEQ ID NO: 794032 - DNA, 15 bp, Homo sapiens
cttaacttttctgac

SEQ ID NO: 794033 - DNA, 15 bp, Homo sapiens
ttaacttttctgacc

SEQ ID NO: 794034 - DNA, 15 bp, Homo sapiens
taacttttctgacca

SEQ ID NO: 794035 - DNA, 15 bp, Homo sapiens
aacttttctgaccat

SEQ ID NO: 794036 - DNA, 15 bp, Homo sapiens
acttttctgaccatc

SEQ ID NO: 794037 - DNA, 15 bp, Homo sapiens
cttttctgaccatca

SEQ ID NO: 794038 - DNA, 15 bp, Homo sapiens
ttttctgaccatcag

SEQ ID NO: 794039 - DNA, 15 bp, Homo sapiens
tttctgaccatcagt

SEQ ID NO: 794040 - DNA, 15 bp, Homo sapiens
ttctgaccatcagtc

SEQ ID NO: 794041 - DNA, 15 bp, Homo sapiens
tctgaccatcagtct

SEQ ID NO: 794042 - DNA, 15 bp, Homo sapiens
ctgaccatcagtctt

SEQ ID NO: 794043 - DNA, 15 bp, Homo sapiens
tgaccatcagtcttc

SEQ ID NO: 794044 - DNA, 15 bp, Homo sapiens
gaccatcagtcttct

SEQ ID NO: 794045 - DNA, 15 bp, Homo sapiens
accatcagtcttctc

SEQ ID NO: 794046 - DNA, 15 bp, Homo sapiens
ccatcagtcttctct

SEQ ID NO: 794047 - DNA, 15 bp, Homo sapiens
catcagtcttctctg

SEQ ID NO: 794048 - DNA, 15 bp, Homo sapiens
atcagtcttctctgt

SEQ ID NO: 794049 - DNA, 15 bp, Homo sapiens
tcagtcttctctgtt

SEQ ID NO: 794050 - DNA, 15 bp, Homo sapiens
cagtcttctctgttg

SEQ ID NO: 794051 - DNA, 15 bp, Homo sapiens
agtcttctctgttgt

SEQ ID NO: 794052 - DNA, 15 bp, Homo sapiens
gtcttctctgttgta

SEQ ID NO: 794053 - DNA, 15 bp, Homo sapiens
tcttctctgttgtaa

SEQ ID NO: 794054 - DNA, 15 bp, Homo sapiens
cttctctgttgtaac

SEQ ID NO: 794055 - DNA, 15 bp, Homo sapiens
ttctctgttgtaaca

SEQ ID NO: 794056 - DNA, 15 bp, Homo sapiens
tctctgttgtaacat

SEQ ID NO: 794057 - DNA, 15 bp, Homo sapiens
ctctgttgtaacata

SEQ ID NO: 794058 - DNA, 15 bp, Homo sapiens
tctgttgtaacatag

SEQ ID NO: 794059 - DNA, 15 bp, Homo sapiens
ctgttgtaacatagg

SEQ ID NO: 794060 - DNA, 15 bp, Homo sapiens
tgttgtaacataggg

SEQ ID NO: 794061 - DNA, 15 bp, Homo sapiens
gttgtaacataggga

SEQ ID NO: 794062 - DNA, 15 bp, Homo sapiens
ttgtaacatagggat

SEQ ID NO: 794063 - DNA, 15 bp, Homo sapiens
tgtaacatagggatg

SEQ ID NO: 794064 - DNA, 15 bp, Homo sapiens
gtaacatagggatgg

SEQ ID NO: 794065 - DNA, 15 bp, Homo sapiens
taacatagggatggt

SEQ ID NO: 794066 - DNA, 15 bp, Homo sapiens
aacatagggatggta

SEQ ID NO: 794067 - DNA, 15 bp, Homo sapiens
acatagggatggtaa

SEQ ID NO: 794068 - DNA, 15 bp, Homo sapiens
catagggatggtaac

SEQ ID NO: 794069 - DNA, 15 bp, Homo sapiens
atagggatggtaaca

SEQ ID NO: 794070 - DNA, 15 bp, Homo sapiens
tagggatggtaacac

SEQ ID NO: 794071 - DNA, 15 bp, Homo sapiens
agggatggtaacacc

SEQ ID NO: 794072 - DNA, 15 bp, Homo sapiens
gggatggtaacaccc

SEQ ID NO: 794073 - DNA, 15 bp, Homo sapiens
ggatggtaacaccca

SEQ ID NO: 794074 - DNA, 15 bp, Homo sapiens
gatggtaacacccat

SEQ ID NO: 794075 - DNA, 15 bp, Homo sapiens
atggtaacacccatt

SEQ ID NO: 794076 - DNA, 15 bp, Homo sapiens
tggtaacacccattt

SEQ ID NO: 794077 - DNA, 15 bp, Homo sapiens
ggtaacacccatttc

SEQ ID NO: 794078 - DNA, 15 bp, Homo sapiens
gtaacacccatttct

SEQ ID NO: 794079 - DNA, 15 bp, Homo sapiens
taacacccatttctt

SEQ ID NO: 794080 - DNA, 15 bp, Homo sapiens
aacacccatttctta

SEQ ID NO: 794081 - DNA, 15 bp, Homo sapiens
acacccatttcttat

SEQ ID NO: 794082 - DNA, 15 bp, Homo sapiens
cacccatttcttatg

SEQ ID NO: 794083 - DNA, 15 bp, Homo sapiens
acccatttcttatgc

SEQ ID NO: 794084 - DNA, 15 bp, Homo sapiens
cccatttcttatgca

SEQ ID NO: 794085 - DNA, 15 bp, Homo sapiens
ccatttcttatgcat

SEQ ID NO: 794086 - DNA, 15 bp, Homo sapiens
catttcttatgcatg

SEQ ID NO: 794087 - DNA, 15 bp, Homo sapiens
atttcttatgcatgc

SEQ ID NO: 794088 - DNA, 15 bp, Homo sapiens
tttcttatgcatgca

SEQ ID NO: 794089 - DNA, 15 bp, Homo sapiens
ttcttatgcatgcag

SEQ ID NO: 794090 - DNA, 15 bp, Homo sapiens
tcttatgcatgcagt

SEQ ID NO: 794091 - DNA, 15 bp, Homo sapiens
cttatgcatgcagtg

SEQ ID NO: 794092 - DNA, 15 bp, Homo sapiens
ttatgcatgcagtga

SEQ ID NO: 794093 - DNA, 15 bp, Homo sapiens
tatgcatgcagtgat

SEQ ID NO: 794094 - DNA, 15 bp, Homo sapiens
atgcatgcagtgatg

SEQ ID NO: 794095 - DNA, 15 bp, Homo sapiens
tgcatgcagtgatgc

SEQ ID NO: 794096 - DNA, 15 bp, Homo sapiens
gcatgcagtgatgct

SEQ ID NO: 794097 - DNA, 15 bp, Homo sapiens
catgcagtgatgctt

SEQ ID NO: 794098 - DNA, 15 bp, Homo sapiens
atgcagtgatgctta

SEQ ID NO: 794099 - DNA, 15 bp, Homo sapiens
tgcagtgatgcttaa

SEQ ID NO: 794100 - DNA, 15 bp, Homo sapiens
gcagtgatgcttaat

SEQ ID NO: 794101 - DNA, 15 bp, Homo sapiens
cagtgatgcttaatg

SEQ ID NO: 794102 - DNA, 15 bp, Homo sapiens
agtgatgcttaatga

SEQ ID NO: 794103 - DNA, 15 bp, Homo sapiens
gtgatgcttaatgac

SEQ ID NO: 794104 - DNA, 15 bp, Homo sapiens
tgatgcttaatgaca

SEQ ID NO: 794105 - DNA, 15 bp, Homo sapiens
gatgcttaatgacat

SEQ ID NO: 794106 - DNA, 15 bp, Homo sapiens
atgcttaatgacata

SEQ ID NO: 794107 - DNA, 15 bp, Homo sapiens
tgcttaatgacataa

SEQ ID NO: 794108 - DNA, 15 bp, Homo sapiens
gcttaatgacataat

SEQ ID NO: 794109 - DNA, 15 bp, Homo sapiens
cttaatgacataatg

SEQ ID NO: 794110 - DNA, 15 bp, Homo sapiens
ttaatgacataatgt

SEQ ID NO: 794111 - DNA, 15 bp, Homo sapiens
taatgacataatgta

SEQ ID NO: 794112 - DNA, 15 bp, Homo sapiens
aatgacataatgtag

SEQ ID NO: 794113 - DNA, 15 bp, Homo sapiens
atgacataatgtagg

SEQ ID NO: 794114 - DNA, 15 bp, Homo sapiens
tgacataatgtaggt

SEQ ID NO: 794115 - DNA, 15 bp, Homo sapiens
gacataatgtaggtg

SEQ ID NO: 794116 - DNA, 15 bp, Homo sapiens
acataatgtaggtgg

SEQ ID NO: 794117 - DNA, 15 bp, Homo sapiens
cataatgtaggtggg

SEQ ID NO: 794118 - DNA, 15 bp, Homo sapiens
ataatgtaggtgggg

SEQ ID NO: 794119 - DNA, 15 bp, Homo sapiens
taatgtaggtggggt

SEQ ID NO: 794120 - DNA, 15 bp, Homo sapiens
aatgtaggtggggtt

SEQ ID NO: 794121 - DNA, 15 bp, Homo sapiens
atgtaggtggggttc

SEQ ID NO: 794122 - DNA, 15 bp, Homo sapiens
tgtaggtggggttca

SEQ ID NO: 794123 - DNA, 15 bp, Homo sapiens
gtaggtggggttcat

SEQ ID NO: 794124 - DNA, 15 bp, Homo sapiens
taggtggggttcatg

SEQ ID NO: 794125 - DNA, 15 bp, Homo sapiens
aggtggggttcatgc

SEQ ID NO: 794126 - DNA, 15 bp, Homo sapiens
ggtggggttcatgca

SEQ ID NO: 794127 - DNA, 15 bp, Homo sapiens
gtggggttcatgcac

SEQ ID NO: 794128 - DNA, 15 bp, Homo sapiens
tggggttcatgcaca

SEQ ID NO: 794129 - DNA, 15 bp, Homo sapiens
ggggttcatgcacaa

SEQ ID NO: 794130 - DNA, 15 bp, Homo sapiens
gggttcatgcacaag

SEQ ID NO: 794131 - DNA, 15 bp, Homo sapiens
ggttcatgcacaagg

SEQ ID NO: 794132 - DNA, 15 bp, Homo sapiens
gttcatgcacaaggc

SEQ ID NO: 794133 - DNA, 15 bp, Homo sapiens
ttcatgcacaaggcc

SEQ ID NO: 794134 - DNA, 15 bp, Homo sapiens
tcatgcacaaggcct

SEQ ID NO: 794135 - DNA, 15 bp, Homo sapiens
catgcacaaggcctg

SEQ ID NO: 794136 - DNA, 15 bp, Homo sapiens
atgcacaaggcctgg

SEQ ID NO: 794137 - DNA, 15 bp, Homo sapiens
tgcacaaggcctggt

SEQ ID NO: 794138 - DNA, 15 bp, Homo sapiens
gcacaaggcctggta

SEQ ID NO: 794139 - DNA, 15 bp, Homo sapiens
cacaaggcctggtat

SEQ ID NO: 794140 - DNA, 15 bp, Homo sapiens
acaaggcctggtata

SEQ ID NO: 794141 - DNA, 15 bp, Homo sapiens
caaggcctggtatat

SEQ ID NO: 794142 - DNA, 15 bp, Homo sapiens
aaggcctggtatatg

SEQ ID NO: 794143 - DNA, 15 bp, Homo sapiens
aggcctggtatatga

SEQ ID NO: 794144 - DNA, 15 bp, Homo sapiens
ggcctggtatatgat

SEQ ID NO: 794145 - DNA, 15 bp, Homo sapiens
gcctggtatatgatg

SEQ ID NO: 794146 - DNA, 15 bp, Homo sapiens
cctggtatatgatga

SEQ ID NO: 794147 - DNA, 15 bp, Homo sapiens
ctggtatatgatgag

SEQ ID NO: 794148 - DNA, 15 bp, Homo sapiens
tggtatatgatgagt

SEQ ID NO: 794149 - DNA, 15 bp, Homo sapiens
ggtatatgatgagtg

SEQ ID NO: 794150 - DNA, 15 bp, Homo sapiens
gtatatgatgagtgc

SEQ ID NO: 794151 - DNA, 15 bp, Homo sapiens
tatatgatgagtgct

SEQ ID NO: 794152 - DNA, 15 bp, Homo sapiens
atatgatgagtgctg

SEQ ID NO: 794153 - DNA, 15 bp, Homo sapiens
tatgatgagtgctgg

SEQ ID NO: 794154 - DNA, 15 bp, Homo sapiens
atgatgagtgctggt

SEQ ID NO: 794155 - DNA, 15 bp, Homo sapiens
tgatgagtgctggta

SEQ ID NO: 794156 - DNA, 15 bp, Homo sapiens
gatgagtgctggtaa

SEQ ID NO: 794157 - DNA, 15 bp, Homo sapiens
atgagtgctggtaaa

SEQ ID NO: 794158 - DNA, 15 bp, Homo sapiens
tgagtgctggtaaat

SEQ ID NO: 794159 - DNA, 15 bp, Homo sapiens
gagtgctggtaaatc

SEQ ID NO: 794160 - DNA, 15 bp, Homo sapiens
agtgctggtaaatct

SEQ ID NO: 794161 - DNA, 15 bp, Homo sapiens
gtgctggtaaatctt

SEQ ID NO: 794162 - DNA, 15 bp, Homo sapiens
tgctggtaaatctta

SEQ ID NO: 794163 - DNA, 15 bp, Homo sapiens
gctggtaaatcttag

SEQ ID NO: 794164 - DNA, 15 bp, Homo sapiens
ctggtaaatcttagc

SEQ ID NO: 794165 - DNA, 15 bp, Homo sapiens
tggtaaatcttagct

SEQ ID NO: 794166 - DNA, 15 bp, Homo sapiens
ggtaaatcttagctc

SEQ ID NO: 794167 - DNA, 15 bp, Homo sapiens
gtaaatcttagctcc

SEQ ID NO: 794168 - DNA, 15 bp, Homo sapiens
taaatcttagctccc

SEQ ID NO: 794169 - DNA, 15 bp, Homo sapiens
aaatcttagctccca

SEQ ID NO: 794170 - DNA, 15 bp, Homo sapiens
aatcttagctcccaa

SEQ ID NO: 794171 - DNA, 15 bp, Homo sapiens
atcttagctcccaat

SEQ ID NO: 794172 - DNA, 15 bp, Homo sapiens
tcttagctcccaatg

SEQ ID NO: 794173 - DNA, 15 bp, Homo sapiens
cttagctcccaatga

SEQ ID NO: 794174 - DNA, 15 bp, Homo sapiens
ttagctcccaatgac

SEQ ID NO: 794175 - DNA, 15 bp, Homo sapiens
tagctcccaatgaca

SEQ ID NO: 794176 - DNA, 15 bp, Homo sapiens
agctcccaatgacac

SEQ ID NO: 794177 - DNA, 15 bp, Homo sapiens
gctcccaatgacact

SEQ ID NO: 794178 - DNA, 15 bp, Homo sapiens
ctcccaatgacactg

SEQ ID NO: 794179 - DNA, 15 bp, Homo sapiens
tcccaatgacactgt

SEQ ID NO: 794180 - DNA, 15 bp, Homo sapiens
cccaatgacactgta

SEQ ID NO: 794181 - DNA, 15 bp, Homo sapiens
ccaatgacactgtat

SEQ ID NO: 794182 - DNA, 15 bp, Homo sapiens
caatgacactgtatc

SEQ ID NO: 794183 - DNA, 15 bp, Homo sapiens
aatgacactgtatca

SEQ ID NO: 794184 - DNA, 15 bp, Homo sapiens
atgacactgtatcag

SEQ ID NO: 794185 - DNA, 15 bp, Homo sapiens
tgacactgtatcagg

SEQ ID NO: 794186 - DNA, 15 bp, Homo sapiens
gacactgtatcaggc

SEQ ID NO: 794187 - DNA, 15 bp, Homo sapiens
acactgtatcaggct

SEQ ID NO: 794188 - DNA, 15 bp, Homo sapiens
cactgtatcaggctc

SEQ ID NO: 794189 - DNA, 15 bp, Homo sapiens
actgtatcaggctct

SEQ ID NO: 794190 - DNA, 15 bp, Homo sapiens
ctgtatcaggctctg

SEQ ID NO: 794191 - DNA, 15 bp, Homo sapiens
tgtatcaggctctgt

SEQ ID NO: 794192 - DNA, 15 bp, Homo sapiens
gtatcaggctctgtg

SEQ ID NO: 794193 - DNA, 15 bp, Homo sapiens
tatcaggctctgtgc

SEQ ID NO: 794194 - DNA, 15 bp, Homo sapiens
atcaggctctgtgct

SEQ ID NO: 794195 - DNA, 15 bp, Homo sapiens
tcaggctctgtgcta

SEQ ID NO: 794196 - DNA, 15 bp, Homo sapiens
caggctctgtgctag

SEQ ID NO: 794197 - DNA, 15 bp, Homo sapiens
aggctctgtgctagg

SEQ ID NO: 794198 - DNA, 15 bp, Homo sapiens
ggctctgtgctaggg

SEQ ID NO: 794199 - DNA, 15 bp, Homo sapiens
gctctgtgctagggt

SEQ ID NO: 794200 - DNA, 15 bp, Homo sapiens
ctctgtgctagggtg

SEQ ID NO: 794201 - DNA, 15 bp, Homo sapiens
tctgtgctagggtgc

SEQ ID NO: 794202 - DNA, 15 bp, Homo sapiens
ctgtgctagggtgct

SEQ ID NO: 794203 - DNA, 15 bp, Homo sapiens
tgtgctagggtgctt

SEQ ID NO: 794204 - DNA, 15 bp, Homo sapiens
gtgctagggtgcttt

SEQ ID NO: 794205 - DNA, 15 bp, Homo sapiens
tgctagggtgcttta

SEQ ID NO: 794206 - DNA, 15 bp, Homo sapiens
gctagggtgctttac

SEQ ID NO: 794207 - DNA, 15 bp, Homo sapiens
ctagggtgctttacg

SEQ ID NO: 794208 - DNA, 15 bp, Homo sapiens
tagggtgctttacga

SEQ ID NO: 794209 - DNA, 15 bp, Homo sapiens
agggtgctttacgaa

SEQ ID NO: 794210 - DNA, 15 bp, Homo sapiens
gggtgctttacgaaa

SEQ ID NO: 794211 - DNA, 15 bp, Homo sapiens
ggtgctttacgaaaa

SEQ ID NO: 794212 - DNA, 15 bp, Homo sapiens
gtgctttacgaaaat

SEQ ID NO: 794213 - DNA, 15 bp, Homo sapiens
tgctttacgaaaatg

SEQ ID NO: 794214 - DNA, 15 bp, Homo sapiens
gctttacgaaaatga

SEQ ID NO: 794215 - DNA, 15 bp, Homo sapiens
ctttacgaaaatgat

SEQ ID NO: 794216 - DNA, 15 bp, Homo sapiens
tttacgaaaatgatc

SEQ ID NO: 794217 - DNA, 15 bp, Homo sapiens
ttacgaaaatgatct

SEQ ID NO: 794218 - DNA, 15 bp, Homo sapiens
tacgaaaatgatctc

SEQ ID NO: 794219 - DNA, 15 bp, Homo sapiens
acgaaaatgatctca

SEQ ID NO: 794220 - DNA, 15 bp, Homo sapiens
cgaaaatgatctcat

SEQ ID NO: 794221 - DNA, 15 bp, Homo sapiens
gaaaatgatctcatg

SEQ ID NO: 794222 - DNA, 15 bp, Homo sapiens
aaaatgatctcatgt

SEQ ID NO: 794223 - DNA, 15 bp, Homo sapiens
aaatgatctcatgta

SEQ ID NO: 794224 - DNA, 15 bp, Homo sapiens
aatgatctcatgtaa

SEQ ID NO: 794225 - DNA, 15 bp, Homo sapiens
atgatctcatgtaat

SEQ ID NO: 794226 - DNA, 15 bp, Homo sapiens
tgatctcatgtaatc

SEQ ID NO: 794227 - DNA, 15 bp, Homo sapiens
gatctcatgtaatcc

SEQ ID NO: 794228 - DNA, 15 bp, Homo sapiens
atctcatgtaatcct

SEQ ID NO: 794229 - DNA, 15 bp, Homo sapiens
tctcatgtaatcctc

SEQ ID NO: 794230 - DNA, 15 bp, Homo sapiens
ctcatgtaatcctca

SEQ ID NO: 794231 - DNA, 15 bp, Homo sapiens
tcatgtaatcctcac

SEQ ID NO: 794232 - DNA, 15 bp, Homo sapiens
catgtaatcctcaca

SEQ ID NO: 794233 - DNA, 15 bp, Homo sapiens
atgtaatcctcacaa

SEQ ID NO: 794234 - DNA, 15 bp, Homo sapiens
tgtaatcctcacaac

SEQ ID NO: 794235 - DNA, 15 bp, Homo sapiens
gtaatcctcacaaca

SEQ ID NO: 794236 - DNA, 15 bp, Homo sapiens
taatcctcacaacac

SEQ ID NO: 794237 - DNA, 15 bp, Homo sapiens
aatcctcacaacaca

SEQ ID NO: 794238 - DNA, 15 bp, Homo sapiens
atcctcacaacacat

SEQ ID NO: 794239 - DNA, 15 bp, Homo sapiens
tcctcacaacacatc

SEQ ID NO: 794240 - DNA, 15 bp, Homo sapiens
cctcacaacacatca

SEQ ID NO: 794241 - DNA, 15 bp, Homo sapiens
ctcacaacacatcag

SEQ ID NO: 794242 - DNA, 15 bp, Homo sapiens
tcacaacacatcagg

SEQ ID NO: 794243 - DNA, 15 bp, Homo sapiens
cacaacacatcagga

SEQ ID NO: 794244 - DNA, 15 bp, Homo sapiens
acaacacatcaggat

SEQ ID NO: 794245 - DNA, 15 bp, Homo sapiens
caacacatcaggata

SEQ ID NO: 794246 - DNA, 15 bp, Homo sapiens
aacacatcaggatat

SEQ ID NO: 794247 - DNA, 15 bp, Homo sapiens
acacatcaggatatt

SEQ ID NO: 794248 - DNA, 15 bp, Homo sapiens
cacatcaggatattg

SEQ ID NO: 794249 - DNA, 15 bp, Homo sapiens
acatcaggatattgg

SEQ ID NO: 794250 - DNA, 15 bp, Homo sapiens
catcaggatattggt

SEQ ID NO: 794251 - DNA, 15 bp, Homo sapiens
atcaggatattggta

SEQ ID NO: 794252 - DNA, 15 bp, Homo sapiens
tcaggatattggtac

SEQ ID NO: 794253 - DNA, 15 bp, Homo sapiens
caggatattggtact

SEQ ID NO: 794254 - DNA, 15 bp, Homo sapiens
aggatattggtactc

SEQ ID NO: 794255 - DNA, 15 bp, Homo sapiens
ggatattggtactct

SEQ ID NO: 794256 - DNA, 15 bp, Homo sapiens
gatattggtactctt

SEQ ID NO: 794257 - DNA, 15 bp, Homo sapiens
atattggtactcttc

SEQ ID NO: 794258 - DNA, 15 bp, Homo sapiens
tattggtactcttca

SEQ ID NO: 794259 - DNA, 15 bp, Homo sapiens
attggtactcttcat

SEQ ID NO: 794260 - DNA, 15 bp, Homo sapiens
ttggtactcttcatt

SEQ ID NO: 794261 - DNA, 15 bp, Homo sapiens
tggtactcttcattt

SEQ ID NO: 794262 - DNA, 15 bp, Homo sapiens
ggtactcttcatttt

SEQ ID NO: 794263 - DNA, 15 bp, Homo sapiens
gtactcttcatttta

SEQ ID NO: 794264 - DNA, 15 bp, Homo sapiens
tactcttcattttac

SEQ ID NO: 794265 - DNA, 15 bp, Homo sapiens
actcttcattttaca

SEQ ID NO: 794266 - DNA, 15 bp, Homo sapiens
ctcttcattttacag

SEQ ID NO: 794267 - DNA, 15 bp, Homo sapiens
tcttcattttacaga

SEQ ID NO: 794268 - DNA, 15 bp, Homo sapiens
tcattttacagatgg

SEQ ID NO: 794269 - DNA, 15 bp, Homo sapiens
cattttacagatggg

SEQ ID NO: 794270 - DNA, 15 bp, Homo sapiens
attttacagatgggg

SEQ ID NO: 794271 - DNA, 15 bp, Homo sapiens
ttttacagatgggga

SEQ ID NO: 794272 - DNA, 15 bp, Homo sapiens
tttacagatggggaa

SEQ ID NO: 794273 - DNA, 15 bp, Homo sapiens
ttacagatggggaaa

SEQ ID NO: 794274 - DNA, 15 bp, Homo sapiens
tacagatggggaaac

SEQ ID NO: 794275 - DNA, 15 bp, Homo sapiens
acagatggggaaact

SEQ ID NO: 794276 - DNA, 15 bp, Homo sapiens
cagatggggaaactg

SEQ ID NO: 794277 - DNA, 15 bp, Homo sapiens
agatggggaaactga

SEQ ID NO: 794278 - DNA, 15 bp, Homo sapiens
gatggggaaactgag

SEQ ID NO: 794279 - DNA, 15 bp, Homo sapiens
atggggaaactgagg

SEQ ID NO: 794280 - DNA, 15 bp, Homo sapiens
ggggaaactgaggct

SEQ ID NO: 794281 - DNA, 15 bp, Homo sapiens
gggaaactgaggctc

SEQ ID NO: 794282 - DNA, 15 bp, Homo sapiens
ggaaactgaggctct

SEQ ID NO: 794283 - DNA, 15 bp, Homo sapiens
gaaactgaggctctg

SEQ ID NO: 794284 - DNA, 15 bp, Homo sapiens
aaactgaggctctgt

SEQ ID NO: 794285 - DNA, 15 bp, Homo sapiens
aactgaggctctgtg

SEQ ID NO: 794286 - DNA, 15 bp, Homo sapiens
actgaggctctgtgg

SEQ ID NO: 794287 - DNA, 15 bp, Homo sapiens
ctgaggctctgtggg

SEQ ID NO: 794288 - DNA, 15 bp, Homo sapiens
tgaggctctgtggga

SEQ ID NO: 794289 - DNA, 15 bp, Homo sapiens
gaggctctgtgggat

SEQ ID NO: 794290 - DNA, 15 bp, Homo sapiens
aggctctgtgggatt

SEQ ID NO: 794291 - DNA, 15 bp, Homo sapiens
ggctctgtgggatta

SEQ ID NO: 794292 - DNA, 15 bp, Homo sapiens
gctctgtgggattaa

SEQ ID NO: 794293 - DNA, 15 bp, Homo sapiens
ctctgtgggattaag

SEQ ID NO: 794294 - DNA, 15 bp, Homo sapiens
tctgtgggattaagg

SEQ ID NO: 794295 - DNA, 15 bp, Homo sapiens
ctgtgggattaaggg

SEQ ID NO: 794296 - DNA, 15 bp, Homo sapiens
tgtgggattaaggga

SEQ ID NO: 794297 - DNA, 15 bp, Homo sapiens
gtgggattaagggac

SEQ ID NO: 794298 - DNA, 15 bp, Homo sapiens
tgggattaagggact

SEQ ID NO: 794299 - DNA, 15 bp, Homo sapiens
gggattaagggactc

SEQ ID NO: 794300 - DNA, 15 bp, Homo sapiens
ggattaagggactca

SEQ ID NO: 794301 - DNA, 15 bp, Homo sapiens
gattaagggactcac

SEQ ID NO: 794302 - DNA, 15 bp, Homo sapiens
attaagggactcacc

SEQ ID NO: 794303 - DNA, 15 bp, Homo sapiens
ttaagggactcaccc

SEQ ID NO: 794304 - DNA, 15 bp, Homo sapiens
taagggactcaccca

SEQ ID NO: 794305 - DNA, 15 bp, Homo sapiens
aagggactcacccaa

SEQ ID NO: 794306 - DNA, 15 bp, Homo sapiens
agggactcacccaag

SEQ ID NO: 794307 - DNA, 15 bp, Homo sapiens
gggactcacccaagg

SEQ ID NO: 794308 - DNA, 15 bp, Homo sapiens
ggactcacccaaggt

SEQ ID NO: 794309 - DNA, 15 bp, Homo sapiens
gactcacccaaggtc

SEQ ID NO: 794310 - DNA, 15 bp, Homo sapiens
actcacccaaggtca

SEQ ID NO: 794311 - DNA, 15 bp, Homo sapiens
ctcacccaaggtcat

SEQ ID NO: 794312 - DNA, 15 bp, Homo sapiens
tcacccaaggtcata

SEQ ID NO: 794313 - DNA, 15 bp, Homo sapiens
cacccaaggtcataa

SEQ ID NO: 794314 - DNA, 15 bp, Homo sapiens
acccaaggtcataaa

SEQ ID NO: 794315 - DNA, 15 bp, Homo sapiens
cccaaggtcataaag

SEQ ID NO: 794316 - DNA, 15 bp, Homo sapiens
ccaaggtcataaagc

SEQ ID NO: 794317 - DNA, 15 bp, Homo sapiens
caaggtcataaagcc

SEQ ID NO: 794318 - DNA, 15 bp, Homo sapiens
aaggtcataaagcca

SEQ ID NO: 794319 - DNA, 15 bp, Homo sapiens
aggtcataaagccag

SEQ ID NO: 794320 - DNA, 15 bp, Homo sapiens
ggtcataaagccaga

SEQ ID NO: 794321 - DNA, 15 bp, Homo sapiens
gtcataaagccagat

SEQ ID NO: 794322 - DNA, 15 bp, Homo sapiens
tcataaagccagatt

SEQ ID NO: 794323 - DNA, 15 bp, Homo sapiens
cataaagccagattg

SEQ ID NO: 794324 - DNA, 15 bp, Homo sapiens
ataaagccagattgt

SEQ ID NO: 794325 - DNA, 15 bp, Homo sapiens
taaagccagattgtg

SEQ ID NO: 794326 - DNA, 15 bp, Homo sapiens
aaagccagattgtga

SEQ ID NO: 794327 - DNA, 15 bp, Homo sapiens
aagccagattgtgac

SEQ ID NO: 794328 - DNA, 15 bp, Homo sapiens
agccagattgtgaca

SEQ ID NO: 794329 - DNA, 15 bp, Homo sapiens
gccagattgtgacat

SEQ ID NO: 794330 - DNA, 15 bp, Homo sapiens
ccagattgtgacatt

SEQ ID NO: 794331 - DNA, 15 bp, Homo sapiens
cagattgtgacattg

SEQ ID NO: 794332 - DNA, 15 bp, Homo sapiens
agattgtgacattga

SEQ ID NO: 794333 - DNA, 15 bp, Homo sapiens
gattgtgacattgag

SEQ ID NO: 794334 - DNA, 15 bp, Homo sapiens
attgtgacattgaga

SEQ ID NO: 794335 - DNA, 15 bp, Homo sapiens
ttgtgacattgagat

SEQ ID NO: 794336 - DNA, 15 bp, Homo sapiens
tgtgacattgagatt

SEQ ID NO: 794337 - DNA, 15 bp, Homo sapiens
gtgacattgagattc

SEQ ID NO: 794338 - DNA, 15 bp, Homo sapiens
tgacattgagattca

SEQ ID NO: 794339 - DNA, 15 bp, Homo sapiens
gacattgagattcaa

SEQ ID NO: 794340 - DNA, 15 bp, Homo sapiens
acattgagattcaaa

SEQ ID NO: 794341 - DNA, 15 bp, Homo sapiens
cattgagattcaaat

SEQ ID NO: 794342 - DNA, 15 bp, Homo sapiens
attgagattcaaatc

SEQ ID NO: 794343 - DNA, 15 bp, Homo sapiens
ttgagattcaaatct

SEQ ID NO: 794344 - DNA, 15 bp, Homo sapiens
tgagattcaaatctt

SEQ ID NO: 794345 - DNA, 15 bp, Homo sapiens
gagattcaaatcttg

SEQ ID NO: 794346 - DNA, 15 bp, Homo sapiens
agattcaaatcttgg

SEQ ID NO: 794347 - DNA, 15 bp, Homo sapiens
gattcaaatcttggc

SEQ ID NO: 794348 - DNA, 15 bp, Homo sapiens
attcaaatcttggca

SEQ ID NO: 794349 - DNA, 15 bp, Homo sapiens
ttcaaatcttggcaa

SEQ ID NO: 794350 - DNA, 15 bp, Homo sapiens
tcaaatcttggcaac

SEQ ID NO: 794351 - DNA, 15 bp, Homo sapiens
caaatcttggcaacc

SEQ ID NO: 794352 - DNA, 15 bp, Homo sapiens
aaatcttggcaacct

SEQ ID NO: 794353 - DNA, 15 bp, Homo sapiens
aatcttggcaacctt

SEQ ID NO: 794354 - DNA, 15 bp, Homo sapiens
atcttggcaacctta

SEQ ID NO: 794355 - DNA, 15 bp, Homo sapiens
tcttggcaaccttac

SEQ ID NO: 794356 - DNA, 15 bp, Homo sapiens
cttggcaaccttact

SEQ ID NO: 794357 - DNA, 15 bp, Homo sapiens
ttggcaaccttactt

SEQ ID NO: 794358 - DNA, 15 bp, Homo sapiens
tggcaaccttacttt

SEQ ID NO: 794359 - DNA, 15 bp, Homo sapiens
ggcaaccttactttc

SEQ ID NO: 794360 - DNA, 15 bp, Homo sapiens
gcaaccttactttct

SEQ ID NO: 794361 - DNA, 15 bp, Homo sapiens
caaccttactttctg

SEQ ID NO: 794362 - DNA, 15 bp, Homo sapiens
aaccttactttctgg

SEQ ID NO: 794363 - DNA, 15 bp, Homo sapiens
accttactttctgga

SEQ ID NO: 794364 - DNA, 15 bp, Homo sapiens
ccttactttctggaa

SEQ ID NO: 794365 - DNA, 15 bp, Homo sapiens
cttactttctggaaa

SEQ ID NO: 794366 - DNA, 15 bp, Homo sapiens
ttactttctggaaac

SEQ ID NO: 794367 - DNA, 15 bp, Homo sapiens
tactttctggaaaca

SEQ ID NO: 794368 - DNA, 15 bp, Homo sapiens
actttctggaaacac

SEQ ID NO: 794369 - DNA, 15 bp, Homo sapiens
ctttctggaaacact

SEQ ID NO: 794370 - DNA, 15 bp, Homo sapiens
tttctggaaacactt

SEQ ID NO: 794371 - DNA, 15 bp, Homo sapiens
ttctggaaacacttt

SEQ ID NO: 794372 - DNA, 15 bp, Homo sapiens
tctggaaacactttc

SEQ ID NO: 794373 - DNA, 15 bp, Homo sapiens
ctggaaacactttcc

SEQ ID NO: 794374 - DNA, 15 bp, Homo sapiens
tggaaacactttccc

SEQ ID NO: 794375 - DNA, 15 bp, Homo sapiens
ggaaacactttcccc

SEQ ID NO: 794376 - DNA, 15 bp, Homo sapiens
gaaacactttccccc

SEQ ID NO: 794377 - DNA, 15 bp, Homo sapiens
aaacactttccccct

SEQ ID NO: 794378 - DNA, 15 bp, Homo sapiens
aacactttccccctt

SEQ ID NO: 794379 - DNA, 15 bp, Homo sapiens
acactttcccccttc

SEQ ID NO: 794380 - DNA, 15 bp, Homo sapiens
cactttcccccttcc

SEQ ID NO: 794381 - DNA, 15 bp, Homo sapiens
actttcccccttcct

SEQ ID NO: 794382 - DNA, 15 bp, Homo sapiens
ctttcccccttcctc

SEQ ID NO: 794383 - DNA, 15 bp, Homo sapiens
tttcccccttcctct

SEQ ID NO: 794384 - DNA, 15 bp, Homo sapiens
ttcccccttcctctt

SEQ ID NO: 794385 - DNA, 15 bp, Homo sapiens
tcccccttcctcttc

SEQ ID NO: 794386 - DNA, 15 bp, Homo sapiens
cccccttcctcttct

SEQ ID NO: 794387 - DNA, 15 bp, Homo sapiens
ccccttcctcttctt

SEQ ID NO: 794388 - DNA, 15 bp, Homo sapiens
cccttcctcttcttt

SEQ ID NO: 794389 - DNA, 15 bp, Homo sapiens
ccttcctcttcttta

SEQ ID NO: 794390 - DNA, 15 bp, Homo sapiens
cttcctcttctttag

SEQ ID NO: 794391 - DNA, 15 bp, Homo sapiens
ttcctcttctttaga

SEQ ID NO: 794392 - DNA, 15 bp, Homo sapiens
tcctcttctttagac

SEQ ID NO: 794393 - DNA, 15 bp, Homo sapiens
cctcttctttagacc

SEQ ID NO: 794394 - DNA, 15 bp, Homo sapiens
ctcttctttagaccc

SEQ ID NO: 794395 - DNA, 15 bp, Homo sapiens
tcttctttagaccca

SEQ ID NO: 794396 - DNA, 15 bp, Homo sapiens
cttctttagacccac

SEQ ID NO: 794397 - DNA, 15 bp, Homo sapiens
ttctttagacccaca

SEQ ID NO: 794398 - DNA, 15 bp, Homo sapiens
tctttagacccacat

SEQ ID NO: 794399 - DNA, 15 bp, Homo sapiens
ctttagacccacatg

SEQ ID NO: 794400 - DNA, 15 bp, Homo sapiens
tttagacccacatgc

SEQ ID NO: 794401 - DNA, 15 bp, Homo sapiens
ttagacccacatgca

SEQ ID NO: 794402 - DNA, 15 bp, Homo sapiens
tagacccacatgcag

SEQ ID NO: 794403 - DNA, 15 bp, Homo sapiens
agacccacatgcagg

SEQ ID NO: 794404 - DNA, 15 bp, Homo sapiens
gacccacatgcaggc

SEQ ID NO: 794405 - DNA, 15 bp, Homo sapiens
acccacatgcaggct

SEQ ID NO: 794406 - DNA, 15 bp, Homo sapiens
cccacatgcaggctg

SEQ ID NO: 794407 - DNA, 15 bp, Homo sapiens
ccacatgcaggctgc

SEQ ID NO: 794408 - DNA, 15 bp, Homo sapiens
cacatgcaggctgct

SEQ ID NO: 794409 - DNA, 15 bp, Homo sapiens
acatgcaggctgctt

SEQ ID NO: 794410 - DNA, 15 bp, Homo sapiens
catgcaggctgcttg

SEQ ID NO: 794411 - DNA, 15 bp, Homo sapiens
atgcaggctgcttgc

SEQ ID NO: 794412 - DNA, 15 bp, Homo sapiens
tgcaggctgcttgca

SEQ ID NO: 794413 - DNA, 15 bp, Homo sapiens
gcaggctgcttgcag

SEQ ID NO: 794414 - DNA, 15 bp, Homo sapiens
caggctgcttgcaga

SEQ ID NO: 794415 - DNA, 15 bp, Homo sapiens
aggctgcttgcagac

SEQ ID NO: 794416 - DNA, 15 bp, Homo sapiens
ggctgcttgcagact

SEQ ID NO: 794417 - DNA, 15 bp, Homo sapiens
gctgcttgcagactc

SEQ ID NO: 794418 - DNA, 15 bp, Homo sapiens
ctgcttgcagactct

SEQ ID NO: 794419 - DNA, 15 bp, Homo sapiens
tgcttgcagactctg

SEQ ID NO: 794420 - DNA, 15 bp, Homo sapiens
gcttgcagactctgt

SEQ ID NO: 794421 - DNA, 15 bp, Homo sapiens
cttgcagactctgtg

SEQ ID NO: 794422 - DNA, 15 bp, Homo sapiens
ttgcagactctgtgc

SEQ ID NO: 794423 - DNA, 15 bp, Homo sapiens
tgcagactctgtgct

SEQ ID NO: 794424 - DNA, 15 bp, Homo sapiens
gcagactctgtgctt

SEQ ID NO: 794425 - DNA, 15 bp, Homo sapiens
cagactctgtgcttg

SEQ ID NO: 794426 - DNA, 15 bp, Homo sapiens
agactctgtgcttgg

SEQ ID NO: 794427 - DNA, 15 bp, Homo sapiens
gactctgtgcttggc

SEQ ID NO: 794428 - DNA, 15 bp, Homo sapiens
actctgtgcttggcc

SEQ ID NO: 794429 - DNA, 15 bp, Homo sapiens
ctctgtgcttggcca

SEQ ID NO: 794430 - DNA, 15 bp, Homo sapiens
tctgtgcttggccat

SEQ ID NO: 794431 - DNA, 15 bp, Homo sapiens
ctgtgcttggccatg

SEQ ID NO: 794432 - DNA, 15 bp, Homo sapiens
tgtgcttggccatgt

SEQ ID NO: 794433 - DNA, 15 bp, Homo sapiens
gtgcttggccatgtt

SEQ ID NO: 794434 - DNA, 15 bp, Homo sapiens
tgcttggccatgttt

SEQ ID NO: 794435 - DNA, 15 bp, Homo sapiens
gcttggccatgtttc

SEQ ID NO: 794436 - DNA, 15 bp, Homo sapiens
cttggccatgtttct

SEQ ID NO: 794437 - DNA, 15 bp, Homo sapiens
ttggccatgtttctt

SEQ ID NO: 794438 - DNA, 15 bp, Homo sapiens
tggccatgtttcttg

SEQ ID NO: 794439 - DNA, 15 bp, Homo sapiens
ggccatgtttcttgg

SEQ ID NO: 794440 - DNA, 15 bp, Homo sapiens
gccatgtttcttggt

SEQ ID NO: 794441 - DNA, 15 bp, Homo sapiens
ccatgtttcttggtc

SEQ ID NO: 794442 - DNA, 15 bp, Homo sapiens
catgtttcttggtca

SEQ ID NO: 794443 - DNA, 15 bp, Homo sapiens
atgtttcttggtcag

SEQ ID NO: 794444 - DNA, 15 bp, Homo sapiens
tgtttcttggtcagc

SEQ ID NO: 794445 - DNA, 15 bp, Homo sapiens
gtttcttggtcagca

SEQ ID NO: 794446 - DNA, 15 bp, Homo sapiens
tttcttggtcagcag

SEQ ID NO: 794447 - DNA, 15 bp, Homo sapiens
ttcttggtcagcagg

SEQ ID NO: 794448 - DNA, 15 bp, Homo sapiens
tcttggtcagcaggg

SEQ ID NO: 794449 - DNA, 15 bp, Homo sapiens
cttggtcagcagggc

SEQ ID NO: 794450 - DNA, 15 bp, Homo sapiens
ttggtcagcagggca

SEQ ID NO: 794451 - DNA, 15 bp, Homo sapiens
tggtcagcagggcag

SEQ ID NO: 794452 - DNA, 15 bp, Homo sapiens
ggtcagcagggcagt

SEQ ID NO: 794453 - DNA, 15 bp, Homo sapiens
gtcagcagggcagtc

SEQ ID NO: 794454 - DNA, 15 bp, Homo sapiens
tcagcagggcagtcg

SEQ ID NO: 794455 - DNA, 15 bp, Homo sapiens
cagcagggcagtcgg

SEQ ID NO: 794456 - DNA, 15 bp, Homo sapiens
agcagggcagtcggg

SEQ ID NO: 794457 - DNA, 15 bp, Homo sapiens
gcagggcagtcgggc

SEQ ID NO: 794458 - DNA, 15 bp, Homo sapiens
cagggcagtcgggca

SEQ ID NO: 794459 - DNA, 15 bp, Homo sapiens
agggcagtcgggcaa

SEQ ID NO: 794460 - DNA, 15 bp, Homo sapiens
gggcagtcgggcaat

SEQ ID NO: 794461 - DNA, 15 bp, Homo sapiens
ggcagtcgggcaatg

SEQ ID NO: 794462 - DNA, 15 bp, Homo sapiens
gcagtcgggcaatgg

SEQ ID NO: 794463 - DNA, 15 bp, Homo sapiens
cagtcgggcaatggg

SEQ ID NO: 794464 - DNA, 15 bp, Homo sapiens
agtcgggcaatgggc

SEQ ID NO: 794465 - DNA, 15 bp, Homo sapiens
gtcgggcaatgggca

SEQ ID NO: 794466 - DNA, 15 bp, Homo sapiens
tcgggcaatgggcat

SEQ ID NO: 794467 - DNA, 15 bp, Homo sapiens
cgggcaatgggcatt

SEQ ID NO: 794468 - DNA, 15 bp, Homo sapiens
gggcaatgggcattt

SEQ ID NO: 794469 - DNA, 15 bp, Homo sapiens
ggcaatgggcatttt

SEQ ID NO: 794470 - DNA, 15 bp, Homo sapiens
gcaatgggcatttta

SEQ ID NO: 794471 - DNA, 15 bp, Homo sapiens
caatgggcattttaa

SEQ ID NO: 794472 - DNA, 15 bp, Homo sapiens
aatgggcattttaat

SEQ ID NO: 794473 - DNA, 15 bp, Homo sapiens
atgggcattttaatc

SEQ ID NO: 794474 - DNA, 15 bp, Homo sapiens
tgggcattttaatca

SEQ ID NO: 794475 - DNA, 15 bp, Homo sapiens
gggcattttaatcat

SEQ ID NO: 794476 - DNA, 15 bp, Homo sapiens
ggcattttaatcatg

SEQ ID NO: 794477 - DNA, 15 bp, Homo sapiens
gcattttaatcatgt

SEQ ID NO: 794478 - DNA, 15 bp, Homo sapiens
cattttaatcatgtt

SEQ ID NO: 794479 - DNA, 15 bp, Homo sapiens
attttaatcatgttt

SEQ ID NO: 794480 - DNA, 15 bp, Homo sapiens
ttttaatcatgttta

SEQ ID NO: 794481 - DNA, 15 bp, Homo sapiens
tttaatcatgtttat

SEQ ID NO: 794482 - DNA, 15 bp, Homo sapiens
ttaatcatgtttatg

SEQ ID NO: 794483 - DNA, 15 bp, Homo sapiens
taatcatgtttatgc

SEQ ID NO: 794484 - DNA, 15 bp, Homo sapiens
aatcatgtttatgct

SEQ ID NO: 794485 - DNA, 15 bp, Homo sapiens
atcatgtttatgctg

SEQ ID NO: 794486 - DNA, 15 bp, Homo sapiens
tcatgtttatgctgg

SEQ ID NO: 794487 - DNA, 15 bp, Homo sapiens
catgtttatgctgga

SEQ ID NO: 794488 - DNA, 15 bp, Homo sapiens
atgtttatgctggac

SEQ ID NO: 794489 - DNA, 15 bp, Homo sapiens
tgtttatgctggaca

SEQ ID NO: 794490 - DNA, 15 bp, Homo sapiens
gtttatgctggacag

SEQ ID NO: 794491 - DNA, 15 bp, Homo sapiens
tttatgctggacagg

SEQ ID NO: 794492 - DNA, 15 bp, Homo sapiens
ttatgctggacaggg

SEQ ID NO: 794493 - DNA, 15 bp, Homo sapiens
tatgctggacagggc

SEQ ID NO: 794494 - DNA, 15 bp, Homo sapiens
atgctggacagggct

SEQ ID NO: 794495 - DNA, 15 bp, Homo sapiens
tgctggacagggctg

SEQ ID NO: 794496 - DNA, 15 bp, Homo sapiens
gctggacagggctgt

SEQ ID NO: 794497 - DNA, 15 bp, Homo sapiens
ctggacagggctgtc

SEQ ID NO: 794498 - DNA, 15 bp, Homo sapiens
tggacagggctgtcc

SEQ ID NO: 794499 - DNA, 15 bp, Homo sapiens
ggacagggctgtccc

SEQ ID NO: 794500 - DNA, 15 bp, Homo sapiens
acagggctgtccctt

SEQ ID NO: 794501 - DNA, 15 bp, Homo sapiens
cagggctgtcccttg

SEQ ID NO: 794502 - DNA, 15 bp, Homo sapiens
agggctgtcccttgg

SEQ ID NO: 794503 - DNA, 15 bp, Homo sapiens
gggctgtcccttggg

SEQ ID NO: 794504 - DNA, 15 bp, Homo sapiens
ggctgtcccttgggc

SEQ ID NO: 794505 - DNA, 15 bp, Homo sapiens
gctgtcccttgggct

SEQ ID NO: 794506 - DNA, 15 bp, Homo sapiens
ctgtcccttgggctt

SEQ ID NO: 794507 - DNA, 15 bp, Homo sapiens
tgtcccttgggcttg

SEQ ID NO: 794508 - DNA, 15 bp, Homo sapiens
gtcccttgggcttga

SEQ ID NO: 794509 - DNA, 15 bp, Homo sapiens
tcccttgggcttgag

SEQ ID NO: 794510 - DNA, 15 bp, Homo sapiens
cccttgggcttgagg

SEQ ID NO: 794511 - DNA, 15 bp, Homo sapiens
ccttgggcttgagga

SEQ ID NO: 794512 - DNA, 15 bp, Homo sapiens
cttgggcttgaggac

SEQ ID NO: 794513 - DNA, 15 bp, Homo sapiens
ttgggcttgaggaca

SEQ ID NO: 794514 - DNA, 15 bp, Homo sapiens
tgggcttgaggacaa

SEQ ID NO: 794515 - DNA, 15 bp, Homo sapiens
gggcttgaggacaat

SEQ ID NO: 794516 - DNA, 15 bp, Homo sapiens
ggcttgaggacaatg

SEQ ID NO: 794517 - DNA, 15 bp, Homo sapiens
gcttgaggacaatgt

SEQ ID NO: 794518 - DNA, 15 bp, Homo sapiens
cttgaggacaatgtt

SEQ ID NO: 794519 - DNA, 15 bp, Homo sapiens
ttgaggacaatgttc

SEQ ID NO: 794520 - DNA, 15 bp, Homo sapiens
tgaggacaatgttct

SEQ ID NO: 794521 - DNA, 15 bp, Homo sapiens
gaggacaatgttctt

SEQ ID NO: 794522 - DNA, 15 bp, Homo sapiens
aggacaatgttcttg

SEQ ID NO: 794523 - DNA, 15 bp, Homo sapiens
ggacaatgttcttga

SEQ ID NO: 794524 - DNA, 15 bp, Homo sapiens
gacaatgttcttgaa

SEQ ID NO: 794525 - DNA, 15 bp, Homo sapiens
acaatgttcttgaac

SEQ ID NO: 794526 - DNA, 15 bp, Homo sapiens
caatgttcttgaacc

SEQ ID NO: 794527 - DNA, 15 bp, Homo sapiens
aatgttcttgaacca

SEQ ID NO: 794528 - DNA, 15 bp, Homo sapiens
atgttcttgaaccag

SEQ ID NO: 794529 - DNA, 15 bp, Homo sapiens
tgttcttgaaccaga

SEQ ID NO: 794530 - DNA, 15 bp, Homo sapiens
gttcttgaaccagaa

SEQ ID NO: 794531 - DNA, 15 bp, Homo sapiens
ttcttgaaccagaag

SEQ ID NO: 794532 - DNA, 15 bp, Homo sapiens
tcttgaaccagaaga

SEQ ID NO: 794533 - DNA, 15 bp, Homo sapiens
cttgaaccagaagaa

SEQ ID NO: 794534 - DNA, 15 bp, Homo sapiens
ttgaaccagaagaat

SEQ ID NO: 794535 - DNA, 15 bp, Homo sapiens
tgaaccagaagaata

SEQ ID NO: 794536 - DNA, 15 bp, Homo sapiens
gaaccagaagaatat

SEQ ID NO: 794537 - DNA, 15 bp, Homo sapiens
aaccagaagaatatg

SEQ ID NO: 794538 - DNA, 15 bp, Homo sapiens
accagaagaatatgg

SEQ ID NO: 794539 - DNA, 15 bp, Homo sapiens
ccagaagaatatggc

SEQ ID NO: 794540 - DNA, 15 bp, Homo sapiens
cagaagaatatggca

SEQ ID NO: 794541 - DNA, 15 bp, Homo sapiens
agaagaatatggcag

SEQ ID NO: 794542 - DNA, 15 bp, Homo sapiens
gaagaatatggcaga

SEQ ID NO: 794543 - DNA, 15 bp, Homo sapiens
aagaatatggcagaa

SEQ ID NO: 794544 - DNA, 15 bp, Homo sapiens
agaatatggcagaag

SEQ ID NO: 794545 - DNA, 15 bp, Homo sapiens
gaatatggcagaagt

SEQ ID NO: 794546 - DNA, 15 bp, Homo sapiens
aatatggcagaagta

SEQ ID NO: 794547 - DNA, 15 bp, Homo sapiens
atatggcagaagtat

SEQ ID NO: 794548 - DNA, 15 bp, Homo sapiens
tatggcagaagtata

SEQ ID NO: 794549 - DNA, 15 bp, Homo sapiens
atggcagaagtataa

SEQ ID NO: 794550 - DNA, 15 bp, Homo sapiens
tggcagaagtataat

SEQ ID NO: 794551 - DNA, 15 bp, Homo sapiens
ggcagaagtataatg

SEQ ID NO: 794552 - DNA, 15 bp, Homo sapiens
gcagaagtataatgc

SEQ ID NO: 794553 - DNA, 15 bp, Homo sapiens
cagaagtataatgcc

SEQ ID NO: 794554 - DNA, 15 bp, Homo sapiens
agaagtataatgcca

SEQ ID NO: 794555 - DNA, 15 bp, Homo sapiens
gaagtataatgccat

SEQ ID NO: 794556 - DNA, 15 bp, Homo sapiens
aagtataatgccatt

SEQ ID NO: 794557 - DNA, 15 bp, Homo sapiens
agtataatgccattt

SEQ ID NO: 794558 - DNA, 15 bp, Homo sapiens
gtataatgccatttc

SEQ ID NO: 794559 - DNA, 15 bp, Homo sapiens
tataatgccatttca

SEQ ID NO: 794560 - DNA, 15 bp, Homo sapiens
ataatgccatttcac

SEQ ID NO: 794561 - DNA, 15 bp, Homo sapiens
taatgccatttcacc

SEQ ID NO: 794562 - DNA, 15 bp, Homo sapiens
aatgccatttcacca

SEQ ID NO: 794563 - DNA, 15 bp, Homo sapiens
atgccatttcaccag

SEQ ID NO: 794564 - DNA, 15 bp, Homo sapiens
tgccatttcaccagg

SEQ ID NO: 794565 - DNA, 15 bp, Homo sapiens
gccatttcaccagga

SEQ ID NO: 794566 - DNA, 15 bp, Homo sapiens
ccatttcaccaggac

SEQ ID NO: 794567 - DNA, 15 bp, Homo sapiens
catttcaccaggaca

SEQ ID NO: 794568 - DNA, 15 bp, Homo sapiens
atttcaccaggacag

SEQ ID NO: 794569 - DNA, 15 bp, Homo sapiens
tttcaccaggacaga

SEQ ID NO: 794570 - DNA, 15 bp, Homo sapiens
ttcaccaggacagat

SEQ ID NO: 794571 - DNA, 15 bp, Homo sapiens
tcaccaggacagatg

SEQ ID NO: 794572 - DNA, 15 bp, Homo sapiens
caccaggacagatgc

SEQ ID NO: 794573 - DNA, 15 bp, Homo sapiens
accaggacagatgca

SEQ ID NO: 794574 - DNA, 15 bp, Homo sapiens
ccaggacagatgcat

SEQ ID NO: 794575 - DNA, 15 bp, Homo sapiens
caggacagatgcatc

SEQ ID NO: 794576 - DNA, 15 bp, Homo sapiens
aggacagatgcatca

SEQ ID NO: 794577 - DNA, 15 bp, Homo sapiens
ggacagatgcatcaa

SEQ ID NO: 794578 - DNA, 15 bp, Homo sapiens
gacagatgcatcaaa

SEQ ID NO: 794579 - DNA, 15 bp, Homo sapiens
acagatgcatcaaat

SEQ ID NO: 794580 - DNA, 15 bp, Homo sapiens
cagatgcatcaaatt

SEQ ID NO: 794581 - DNA, 15 bp, Homo sapiens
agatgcatcaaattc

SEQ ID NO: 794582 - DNA, 15 bp, Homo sapiens
gatgcatcaaattcc

SEQ ID NO: 794583 - DNA, 15 bp, Homo sapiens
atgcatcaaattcca

SEQ ID NO: 794584 - DNA, 15 bp, Homo sapiens
tgcatcaaattccat

SEQ ID NO: 794585 - DNA, 15 bp, Homo sapiens
gcatcaaattccatc

SEQ ID NO: 794586 - DNA, 15 bp, Homo sapiens
catcaaattccatct

SEQ ID NO: 794587 - DNA, 15 bp, Homo sapiens
atcaaattccatctt

SEQ ID NO: 794588 - DNA, 15 bp, Homo sapiens
tcaaattccatcttg

SEQ ID NO: 794589 - DNA, 15 bp, Homo sapiens
caaattccatcttgg

SEQ ID NO: 794590 - DNA, 15 bp, Homo sapiens
aaattccatcttggg

SEQ ID NO: 794591 - DNA, 15 bp, Homo sapiens
aattccatcttgggt

SEQ ID NO: 794592 - DNA, 15 bp, Homo sapiens
attccatcttgggtc

SEQ ID NO: 794593 - DNA, 15 bp, Homo sapiens
ttccatcttgggtct

SEQ ID NO: 794594 - DNA, 15 bp, Homo sapiens
tccatcttgggtctg

SEQ ID NO: 794595 - DNA, 15 bp, Homo sapiens
ccatcttgggtctgg

SEQ ID NO: 794596 - DNA, 15 bp, Homo sapiens
catcttgggtctggt

SEQ ID NO: 794597 - DNA, 15 bp, Homo sapiens
atcttgggtctggta

SEQ ID NO: 794598 - DNA, 15 bp, Homo sapiens
tcttgggtctggtaa

SEQ ID NO: 794599 - DNA, 15 bp, Homo sapiens
cttgggtctggtaat

SEQ ID NO: 794600 - DNA, 15 bp, Homo sapiens
ttgggtctggtaatt

SEQ ID NO: 794601 - DNA, 15 bp, Homo sapiens
tgggtctggtaattc

SEQ ID NO: 794602 - DNA, 15 bp, Homo sapiens
gggtctggtaattct

SEQ ID NO: 794603 - DNA, 15 bp, Homo sapiens
ggtctggtaattctg

SEQ ID NO: 794604 - DNA, 15 bp, Homo sapiens
gtctggtaattctgc

SEQ ID NO: 794605 - DNA, 15 bp, Homo sapiens
tctggtaattctgcc

SEQ ID NO: 794606 - DNA, 15 bp, Homo sapiens
ctggtaattctgcca

SEQ ID NO: 794607 - DNA, 15 bp, Homo sapiens
tggtaattctgccac

SEQ ID NO: 794608 - DNA, 15 bp, Homo sapiens
ggtaattctgccaca

SEQ ID NO: 794609 - DNA, 15 bp, Homo sapiens
gtaattctgccacag

SEQ ID NO: 794610 - DNA, 15 bp, Homo sapiens
taattctgccacaga

SEQ ID NO: 794611 - DNA, 15 bp, Homo sapiens
aattctgccacagat

SEQ ID NO: 794612 - DNA, 15 bp, Homo sapiens
attctgccacagatg

SEQ ID NO: 794613 - DNA, 15 bp, Homo sapiens
ttctgccacagatgg

SEQ ID NO: 794614 - DNA, 15 bp, Homo sapiens
tctgccacagatggt

SEQ ID NO: 794615 - DNA, 15 bp, Homo sapiens
ctgccacagatggtg

SEQ ID NO: 794616 - DNA, 15 bp, Homo sapiens
tgccacagatggtgg

SEQ ID NO: 794617 - DNA, 15 bp, Homo sapiens
gccacagatggtggc

SEQ ID NO: 794618 - DNA, 15 bp, Homo sapiens
ccacagatggtggcc

SEQ ID NO: 794619 - DNA, 15 bp, Homo sapiens
cacagatggtggccc

SEQ ID NO: 794620 - DNA, 15 bp, Homo sapiens
acagatggtggccca

SEQ ID NO: 794621 - DNA, 15 bp, Homo sapiens
cagatggtggcccat

SEQ ID NO: 794622 - DNA, 15 bp, Homo sapiens
agatggtggcccatt

SEQ ID NO: 794623 - DNA, 15 bp, Homo sapiens
gatggtggcccattg

SEQ ID NO: 794624 - DNA, 15 bp, Homo sapiens
atggtggcccattga

SEQ ID NO: 794625 - DNA, 15 bp, Homo sapiens
tggtggcccattgat

SEQ ID NO: 794626 - DNA, 15 bp, Homo sapiens
ggtggcccattgata

SEQ ID NO: 794627 - DNA, 15 bp, Homo sapiens
gtggcccattgatat

SEQ ID NO: 794628 - DNA, 15 bp, Homo sapiens
tggcccattgatatg

SEQ ID NO: 794629 - DNA, 15 bp, Homo sapiens
ggcccattgatatgt

SEQ ID NO: 794630 - DNA, 15 bp, Homo sapiens
gcccattgatatgtg

SEQ ID NO: 794631 - DNA, 15 bp, Homo sapiens
cccattgatatgtgc

SEQ ID NO: 794632 - DNA, 15 bp, Homo sapiens
ccattgatatgtgca

SEQ ID NO: 794633 - DNA, 15 bp, Homo sapiens
cattgatatgtgcat

SEQ ID NO: 794634 - DNA, 15 bp, Homo sapiens
attgatatgtgcatg

SEQ ID NO: 794635 - DNA, 15 bp, Homo sapiens
ttgatatgtgcatgc

SEQ ID NO: 794636 - DNA, 15 bp, Homo sapiens
tgatatgtgcatgct

SEQ ID NO: 794637 - DNA, 15 bp, Homo sapiens
gatatgtgcatgctt

SEQ ID NO: 794638 - DNA, 15 bp, Homo sapiens
atatgtgcatgcttg

SEQ ID NO: 794639 - DNA, 15 bp, Homo sapiens
tatgtgcatgcttgg

SEQ ID NO: 794640 - DNA, 15 bp, Homo sapiens
atgtgcatgcttggc

SEQ ID NO: 794641 - DNA, 15 bp, Homo sapiens
tgtgcatgcttggct

SEQ ID NO: 794642 - DNA, 15 bp, Homo sapiens
gtgcatgcttggctg

SEQ ID NO: 794643 - DNA, 15 bp, Homo sapiens
tgcatgcttggctgg

SEQ ID NO: 794644 - DNA, 15 bp, Homo sapiens
gcatgcttggctggg

SEQ ID NO: 794645 - DNA, 15 bp, Homo sapiens
catgcttggctgggg

SEQ ID NO: 794646 - DNA, 15 bp, Homo sapiens
atgcttggctggggt

SEQ ID NO: 794647 - DNA, 15 bp, Homo sapiens
tgcttggctggggtg

SEQ ID NO: 794648 - DNA, 15 bp, Homo sapiens
gcttggctggggtga

SEQ ID NO: 794649 - DNA, 15 bp, Homo sapiens
cttggctggggtgag

SEQ ID NO: 794650 - DNA, 15 bp, Homo sapiens
ttggctggggtgaga

SEQ ID NO: 794651 - DNA, 15 bp, Homo sapiens
tggctggggtgagag

SEQ ID NO: 794652 - DNA, 15 bp, Homo sapiens
ggctggggtgagagt

SEQ ID NO: 794653 - DNA, 15 bp, Homo sapiens
gctggggtgagagtc

SEQ ID NO: 794654 - DNA, 15 bp, Homo sapiens
ctggggtgagagtct

SEQ ID NO: 794655 - DNA, 15 bp, Homo sapiens
tggggtgagagtctg

SEQ ID NO: 794656 - DNA, 15 bp, Homo sapiens
ggggtgagagtctgt

SEQ ID NO: 794657 - DNA, 15 bp, Homo sapiens
gggtgagagtctgtg

SEQ ID NO: 794658 - DNA, 15 bp, Homo sapiens
ggtgagagtctgtgc

SEQ ID NO: 794659 - DNA, 15 bp, Homo sapiens
gtgagagtctgtgcc

SEQ ID NO: 794660 - DNA, 15 bp, Homo sapiens
tgagagtctgtgcca

SEQ ID NO: 794661 - DNA, 15 bp, Homo sapiens
gagagtctgtgccaa

SEQ ID NO: 794662 - DNA, 15 bp, Homo sapiens
agagtctgtgccaat

SEQ ID NO: 794663 - DNA, 15 bp, Homo sapiens
gagtctgtgccaatg

SEQ ID NO: 794664 - DNA, 15 bp, Homo sapiens
agtctgtgccaatgt

SEQ ID NO: 794665 - DNA, 15 bp, Homo sapiens
gtctgtgccaatgtc

SEQ ID NO: 794666 - DNA, 15 bp, Homo sapiens
tctgtgccaatgtca

SEQ ID NO: 794667 - DNA, 15 bp, Homo sapiens
ctgtgccaatgtcac

SEQ ID NO: 794668 - DNA, 15 bp, Homo sapiens
tgtgccaatgtcaca

SEQ ID NO: 794669 - DNA, 15 bp, Homo sapiens
gtgccaatgtcacag

SEQ ID NO: 794670 - DNA, 15 bp, Homo sapiens
tgccaatgtcacagg

SEQ ID NO: 794671 - DNA, 15 bp, Homo sapiens
gccaatgtcacagga

SEQ ID NO: 794672 - DNA, 15 bp, Homo sapiens
ccaatgtcacaggac

SEQ ID NO: 794673 - DNA, 15 bp, Homo sapiens
caatgtcacaggaca

SEQ ID NO: 794674 - DNA, 15 bp, Homo sapiens
aatgtcacaggacac

SEQ ID NO: 794675 - DNA, 15 bp, Homo sapiens
atgtcacaggacaca

SEQ ID NO: 794676 - DNA, 15 bp, Homo sapiens
tgtcacaggacacag

SEQ ID NO: 794677 - DNA, 15 bp, Homo sapiens
gtcacaggacacagc

SEQ ID NO: 794678 - DNA, 15 bp, Homo sapiens
tcacaggacacagca

SEQ ID NO: 794679 - DNA, 15 bp, Homo sapiens
cacaggacacagcaa

SEQ ID NO: 794680 - DNA, 15 bp, Homo sapiens
acaggacacagcaac

SEQ ID NO: 794681 - DNA, 15 bp, Homo sapiens
caggacacagcaacc

SEQ ID NO: 794682 - DNA, 15 bp, Homo sapiens
aggacacagcaaccc

SEQ ID NO: 794683 - DNA, 15 bp, Homo sapiens
ggacacagcaacccc

SEQ ID NO: 794684 - DNA, 15 bp, Homo sapiens
gacacagcaacccca

SEQ ID NO: 794685 - DNA, 15 bp, Homo sapiens
acacagcaaccccaa

SEQ ID NO: 794686 - DNA, 15 bp, Homo sapiens
cacagcaaccccaat

SEQ ID NO: 794687 - DNA, 15 bp, Homo sapiens
acagcaaccccaatg

SEQ ID NO: 794688 - DNA, 15 bp, Homo sapiens
cagcaaccccaatga

SEQ ID NO: 794689 - DNA, 15 bp, Homo sapiens
agcaaccccaatgag

SEQ ID NO: 794690 - DNA, 15 bp, Homo sapiens
gcaaccccaatgagt

SEQ ID NO: 794691 - DNA, 15 bp, Homo sapiens
caaccccaatgagtc

SEQ ID NO: 794692 - DNA, 15 bp, Homo sapiens
aaccccaatgagtct

SEQ ID NO: 794693 - DNA, 15 bp, Homo sapiens
accccaatgagtctg

SEQ ID NO: 794694 - DNA, 15 bp, Homo sapiens
ccccaatgagtctgt

SEQ ID NO: 794695 - DNA, 15 bp, Homo sapiens
cccaatgagtctgtt

SEQ ID NO: 794696 - DNA, 15 bp, Homo sapiens
ccaatgagtctgttt

SEQ ID NO: 794697 - DNA, 15 bp, Homo sapiens
caatgagtctgttta

SEQ ID NO: 794698 - DNA, 15 bp, Homo sapiens
aatgagtctgtttac

SEQ ID NO: 794699 - DNA, 15 bp, Homo sapiens
atgagtctgtttact

SEQ ID NO: 794700 - DNA, 15 bp, Homo sapiens
tgagtctgtttactt

SEQ ID NO: 794701 - DNA, 15 bp, Homo sapiens
gagtctgtttactta

SEQ ID NO: 794702 - DNA, 15 bp, Homo sapiens
agtctgtttacttat

SEQ ID NO: 794703 - DNA, 15 bp, Homo sapiens
gtctgtttacttatt

SEQ ID NO: 794704 - DNA, 15 bp, Homo sapiens
tctgtttacttattt

SEQ ID NO: 794705 - DNA, 15 bp, Homo sapiens
ctgtttacttattta

SEQ ID NO: 794706 - DNA, 15 bp, Homo sapiens
tgtttacttatttaa

SEQ ID NO: 794707 - DNA, 15 bp, Homo sapiens
gtttacttatttaac

SEQ ID NO: 794708 - DNA, 15 bp, Homo sapiens
tttacttatttaaca

SEQ ID NO: 794709 - DNA, 15 bp, Homo sapiens
ttacttatttaacag

SEQ ID NO: 794710 - DNA, 15 bp, Homo sapiens
tacttatttaacagt

SEQ ID NO: 794711 - DNA, 15 bp, Homo sapiens
acttatttaacagtc

SEQ ID NO: 794712 - DNA, 15 bp, Homo sapiens
cttatttaacagtca

SEQ ID NO: 794713 - DNA, 15 bp, Homo sapiens
ttatttaacagtcaa

SEQ ID NO: 794714 - DNA, 15 bp, Homo sapiens
tatttaacagtcaag

SEQ ID NO: 794715 - DNA, 15 bp, Homo sapiens
atttaacagtcaagg

SEQ ID NO: 794716 - DNA, 15 bp, Homo sapiens
tttaacagtcaaggt

SEQ ID NO: 794717 - DNA, 15 bp, Homo sapiens
ttaacagtcaaggtg

SEQ ID NO: 794718 - DNA, 15 bp, Homo sapiens
taacagtcaaggtga

SEQ ID NO: 794719 - DNA, 15 bp, Homo sapiens
aacagtcaaggtgac

SEQ ID NO: 794720 - DNA, 15 bp, Homo sapiens
acagtcaaggtgacc

SEQ ID NO: 794721 - DNA, 15 bp, Homo sapiens
cagtcaaggtgacca

SEQ ID NO: 794722 - DNA, 15 bp, Homo sapiens
agtcaaggtgaccag

SEQ ID NO: 794723 - DNA, 15 bp, Homo sapiens
gtcaaggtgaccaga

SEQ ID NO: 794724 - DNA, 15 bp, Homo sapiens
tcaaggtgaccagaa

SEQ ID NO: 794725 - DNA, 15 bp, Homo sapiens
caaggtgaccagaag

SEQ ID NO: 794726 - DNA, 15 bp, Homo sapiens
aaggtgaccagaaga

SEQ ID NO: 794727 - DNA, 15 bp, Homo sapiens
aggtgaccagaagag

SEQ ID NO: 794728 - DNA, 15 bp, Homo sapiens
ggtgaccagaagaga

SEQ ID NO: 794729 - DNA, 15 bp, Homo sapiens
gtgaccagaagagac

SEQ ID NO: 794730 - DNA, 15 bp, Homo sapiens
tgaccagaagagaca

SEQ ID NO: 794731 - DNA, 15 bp, Homo sapiens
gaccagaagagacac

SEQ ID NO: 794732 - DNA, 15 bp, Homo sapiens
accagaagagacact

SEQ ID NO: 794733 - DNA, 15 bp, Homo sapiens
ccagaagagacactt

SEQ ID NO: 794734 - DNA, 15 bp, Homo sapiens
cagaagagacacttt

SEQ ID NO: 794735 - DNA, 15 bp, Homo sapiens
agaagagacactttc

SEQ ID NO: 794736 - DNA, 15 bp, Homo sapiens
gaagagacactttcc

SEQ ID NO: 794737 - DNA, 15 bp, Homo sapiens
aagagacactttcca

SEQ ID NO: 794738 - DNA, 15 bp, Homo sapiens
agagacactttccaa

SEQ ID NO: 794739 - DNA, 15 bp, Homo sapiens
gagacactttccaac

SEQ ID NO: 794740 - DNA, 15 bp, Homo sapiens
agacactttccaaca

SEQ ID NO: 794741 - DNA, 15 bp, Homo sapiens
gacactttccaacag

SEQ ID NO: 794742 - DNA, 15 bp, Homo sapiens
acactttccaacagg

SEQ ID NO: 794743 - DNA, 15 bp, Homo sapiens
cactttccaacagga

SEQ ID NO: 794744 - DNA, 15 bp, Homo sapiens
actttccaacaggac

SEQ ID NO: 794745 - DNA, 15 bp, Homo sapiens
ctttccaacaggaca

SEQ ID NO: 794746 - DNA, 15 bp, Homo sapiens
tttccaacaggacac

SEQ ID NO: 794747 - DNA, 15 bp, Homo sapiens
ttccaacaggacaca

SEQ ID NO: 794748 - DNA, 15 bp, Homo sapiens
tccaacaggacacaa

SEQ ID NO: 794749 - DNA, 15 bp, Homo sapiens
ccaacaggacacaat

SEQ ID NO: 794750 - DNA, 15 bp, Homo sapiens
caacaggacacaatg

SEQ ID NO: 794751 - DNA, 15 bp, Homo sapiens
aacaggacacaatga

SEQ ID NO: 794752 - DNA, 15 bp, Homo sapiens
acaggacacaatgag

SEQ ID NO: 794753 - DNA, 15 bp, Homo sapiens
caggacacaatgagg

SEQ ID NO: 794754 - DNA, 15 bp, Homo sapiens
aggacacaatgagga

SEQ ID NO: 794755 - DNA, 15 bp, Homo sapiens
ggacacaatgaggag

SEQ ID NO: 794756 - DNA, 15 bp, Homo sapiens
gacacaatgaggagg

SEQ ID NO: 794757 - DNA, 15 bp, Homo sapiens
acacaatgaggaggt

SEQ ID NO: 794758 - DNA, 15 bp, Homo sapiens
cacaatgaggaggta

SEQ ID NO: 794759 - DNA, 15 bp, Homo sapiens
acaatgaggaggtac

SEQ ID NO: 794760 - DNA, 15 bp, Homo sapiens
caatgaggaggtacc

SEQ ID NO: 794761 - DNA, 15 bp, Homo sapiens
aatgaggaggtaccc

SEQ ID NO: 794762 - DNA, 15 bp, Homo sapiens
atgaggaggtaccca

SEQ ID NO: 794763 - DNA, 15 bp, Homo sapiens
tgaggaggtacccag

SEQ ID NO: 794764 - DNA, 15 bp, Homo sapiens
gaggaggtacccagc

SEQ ID NO: 794765 - DNA, 15 bp, Homo sapiens
aggaggtacccagca

SEQ ID NO: 794766 - DNA, 15 bp, Homo sapiens
ggaggtacccagcaa

SEQ ID NO: 794767 - DNA, 15 bp, Homo sapiens
gaggtacccagcaag

SEQ ID NO: 794768 - DNA, 15 bp, Homo sapiens
aggtacccagcaagt

SEQ ID NO: 794769 - DNA, 15 bp, Homo sapiens
ggtacccagcaagtc

SEQ ID NO: 794770 - DNA, 15 bp, Homo sapiens
gtacccagcaagtct

SEQ ID NO: 794771 - DNA, 15 bp, Homo sapiens
tacccagcaagtctt

SEQ ID NO: 794772 - DNA, 15 bp, Homo sapiens
acccagcaagtcttc

SEQ ID NO: 794773 - DNA, 15 bp, Homo sapiens
cccagcaagtcttct

SEQ ID NO: 794774 - DNA, 15 bp, Homo sapiens
ccagcaagtcttcta

SEQ ID NO: 794775 - DNA, 15 bp, Homo sapiens
cagcaagtcttctag

SEQ ID NO: 794776 - DNA, 15 bp, Homo sapiens
agcaagtcttctagc

SEQ ID NO: 794777 - DNA, 15 bp, Homo sapiens
gcaagtcttctagct

SEQ ID NO: 794778 - DNA, 15 bp, Homo sapiens
caagtcttctagctg

SEQ ID NO: 794779 - DNA, 15 bp, Homo sapiens
aagtcttctagctga

SEQ ID NO: 794780 - DNA, 15 bp, Homo sapiens
agtcttctagctgat

SEQ ID NO: 794781 - DNA, 15 bp, Homo sapiens
gtcttctagctgatt

SEQ ID NO: 794782 - DNA, 15 bp, Homo sapiens
tcttctagctgattg

SEQ ID NO: 794783 - DNA, 15 bp, Homo sapiens
cttctagctgattgg

SEQ ID NO: 794784 - DNA, 15 bp, Homo sapiens
ttctagctgattggg

SEQ ID NO: 794785 - DNA, 15 bp, Homo sapiens
tctagctgattgggg

SEQ ID NO: 794786 - DNA, 15 bp, Homo sapiens
ctagctgattggggg

SEQ ID NO: 794787 - DNA, 15 bp, Homo sapiens
tagctgattggggga

SEQ ID NO: 794788 - DNA, 15 bp, Homo sapiens
agctgattgggggaa

SEQ ID NO: 794789 - DNA, 15 bp, Homo sapiens
gctgattgggggaag

SEQ ID NO: 794790 - DNA, 15 bp, Homo sapiens
ctgattgggggaaga

SEQ ID NO: 794791 - DNA, 15 bp, Homo sapiens
tgattgggggaagaa

SEQ ID NO: 794792 - DNA, 15 bp, Homo sapiens
gattgggggaagaaa

SEQ ID NO: 794793 - DNA, 15 bp, Homo sapiens
attgggggaagaaac

SEQ ID NO: 794794 - DNA, 15 bp, Homo sapiens
ttgggggaagaaacc

SEQ ID NO: 794795 - DNA, 15 bp, Homo sapiens
tgggggaagaaaccc

SEQ ID NO: 794796 - DNA, 15 bp, Homo sapiens
gggggaagaaaccca

SEQ ID NO: 794797 - DNA, 15 bp, Homo sapiens
ggggaagaaacccag

SEQ ID NO: 794798 - DNA, 15 bp, Homo sapiens
gggaagaaacccagt

SEQ ID NO: 794799 - DNA, 15 bp, Homo sapiens
ggaagaaacccagtg

SEQ ID NO: 794800 - DNA, 15 bp, Homo sapiens
gaagaaacccagtgt

SEQ ID NO: 794801 - DNA, 15 bp, Homo sapiens
aagaaacccagtgta

SEQ ID NO: 794802 - DNA, 15 bp, Homo sapiens
agaaacccagtgtat

SEQ ID NO: 794803 - DNA, 15 bp, Homo sapiens
gaaacccagtgtatt

SEQ ID NO: 794804 - DNA, 15 bp, Homo sapiens
aaacccagtgtatta

SEQ ID NO: 794805 - DNA, 15 bp, Homo sapiens
aacccagtgtattac

SEQ ID NO: 794806 - DNA, 15 bp, Homo sapiens
acccagtgtattaca

SEQ ID NO: 794807 - DNA, 15 bp, Homo sapiens
cccagtgtattacag

SEQ ID NO: 794808 - DNA, 15 bp, Homo sapiens
ccagtgtattacagg

SEQ ID NO: 794809 - DNA, 15 bp, Homo sapiens
cagtgtattacagga

SEQ ID NO: 794810 - DNA, 15 bp, Homo sapiens
agtgtattacaggaa

SEQ ID NO: 794811 - DNA, 15 bp, Homo sapiens
gtgtattacaggaaa

SEQ ID NO: 794812 - DNA, 15 bp, Homo sapiens
tgtattacaggaaaa

SEQ ID NO: 794813 - DNA, 15 bp, Homo sapiens
gtattacaggaaaat

SEQ ID NO: 794814 - DNA, 15 bp, Homo sapiens
tattacaggaaaatg

SEQ ID NO: 794815 - DNA, 15 bp, Homo sapiens
attacaggaaaatga

SEQ ID NO: 794816 - DNA, 15 bp, Homo sapiens
ttacaggaaaatgag

SEQ ID NO: 794817 - DNA, 15 bp, Homo sapiens
tacaggaaaatgaga

SEQ ID NO: 794818 - DNA, 15 bp, Homo sapiens
acaggaaaatgagag

SEQ ID NO: 794819 - DNA, 15 bp, Homo sapiens
caggaaaatgagaga

SEQ ID NO: 794820 - DNA, 15 bp, Homo sapiens
aggaaaatgagagag

SEQ ID NO: 794821 - DNA, 15 bp, Homo sapiens
ggaaaatgagagagt

SEQ ID NO: 794822 - DNA, 15 bp, Homo sapiens
gaaaatgagagagtg

SEQ ID NO: 794823 - DNA, 15 bp, Homo sapiens
aaaatgagagagtgc

SEQ ID NO: 794824 - DNA, 15 bp, Homo sapiens
aaatgagagagtgca

SEQ ID NO: 794825 - DNA, 15 bp, Homo sapiens
aatgagagagtgcat

SEQ ID NO: 794826 - DNA, 15 bp, Homo sapiens
atgagagagtgcatt

SEQ ID NO: 794827 - DNA, 15 bp, Homo sapiens
tgagagagtgcattt

SEQ ID NO: 794828 - DNA, 15 bp, Homo sapiens
gagagagtgcatttg

SEQ ID NO: 794829 - DNA, 15 bp, Homo sapiens
agagagtgcatttga

SEQ ID NO: 794830 - DNA, 15 bp, Homo sapiens
gagagtgcatttgaa

SEQ ID NO: 794831 - DNA, 15 bp, Homo sapiens
agagtgcatttgaat

SEQ ID NO: 794832 - DNA, 15 bp, Homo sapiens
gagtgcatttgaatt

SEQ ID NO: 794833 - DNA, 15 bp, Homo sapiens
agtgcatttgaattt

SEQ ID NO: 794834 - DNA, 15 bp, Homo sapiens
gtgcatttgaatttg

SEQ ID NO: 794835 - DNA, 15 bp, Homo sapiens
tgcatttgaatttgt

SEQ ID NO: 794836 - DNA, 15 bp, Homo sapiens
gcatttgaatttgtt

SEQ ID NO: 794837 - DNA, 15 bp, Homo sapiens
catttgaatttgttt

SEQ ID NO: 794838 - DNA, 15 bp, Homo sapiens
atttgaatttgtttc

SEQ ID NO: 794839 - DNA, 15 bp, Homo sapiens
tttgaatttgtttct

SEQ ID NO: 794840 - DNA, 15 bp, Homo sapiens
ttgaatttgtttcta

SEQ ID NO: 794841 - DNA, 15 bp, Homo sapiens
tgaatttgtttctaa

SEQ ID NO: 794842 - DNA, 15 bp, Homo sapiens
gaatttgtttctaat

SEQ ID NO: 794843 - DNA, 15 bp, Homo sapiens
aatttgtttctaatc

SEQ ID NO: 794844 - DNA, 15 bp, Homo sapiens
atttgtttctaatct

SEQ ID NO: 794845 - DNA, 15 bp, Homo sapiens
tttgtttctaatctg

SEQ ID NO: 794846 - DNA, 15 bp, Homo sapiens
ttgtttctaatctga

SEQ ID NO: 794847 - DNA, 15 bp, Homo sapiens
tgtttctaatctgaa

SEQ ID NO: 794848 - DNA, 15 bp, Homo sapiens
gtttctaatctgaat

SEQ ID NO: 794849 - DNA, 15 bp, Homo sapiens
tttctaatctgaatt

SEQ ID NO: 794850 - DNA, 15 bp, Homo sapiens
ttctaatctgaattt

SEQ ID NO: 794851 - DNA, 15 bp, Homo sapiens
tctaatctgaatttt

SEQ ID NO: 794852 - DNA, 15 bp, Homo sapiens
ctaatctgaattttc

SEQ ID NO: 794853 - DNA, 15 bp, Homo sapiens
taatctgaattttcc

SEQ ID NO: 794854 - DNA, 15 bp, Homo sapiens
aatctgaattttcca

SEQ ID NO: 794855 - DNA, 15 bp, Homo sapiens
atctgaattttccat

SEQ ID NO: 794856 - DNA, 15 bp, Homo sapiens
tctgaattttccata

SEQ ID NO: 794857 - DNA, 15 bp, Homo sapiens
ctgaattttccatat

SEQ ID NO: 794858 - DNA, 15 bp, Homo sapiens
tgaattttccatata

SEQ ID NO: 794859 - DNA, 15 bp, Homo sapiens
gaattttccatataa

SEQ ID NO: 794860 - DNA, 15 bp, Homo sapiens
aattttccatataaa

SEQ ID NO: 794861 - DNA, 15 bp, Homo sapiens
attttccatataaac

SEQ ID NO: 794862 - DNA, 15 bp, Homo sapiens
ttttccatataaact

SEQ ID NO: 794863 - DNA, 15 bp, Homo sapiens
tttccatataaactc

SEQ ID NO: 794864 - DNA, 15 bp, Homo sapiens
ttccatataaactct

SEQ ID NO: 794865 - DNA, 15 bp, Homo sapiens
tccatataaactcta

SEQ ID NO: 794866 - DNA, 15 bp, Homo sapiens
ccatataaactctag

SEQ ID NO: 794867 - DNA, 15 bp, Homo sapiens
catataaactctagt

SEQ ID NO: 794868 - DNA, 15 bp, Homo sapiens
atataaactctagtt

SEQ ID NO: 794869 - DNA, 15 bp, Homo sapiens
tataaactctagtta

SEQ ID NO: 794870 - DNA, 15 bp, Homo sapiens
ataaactctagttag

SEQ ID NO: 794871 - DNA, 15 bp, Homo sapiens
taaactctagttagc

SEQ ID NO: 794872 - DNA, 15 bp, Homo sapiens
aaactctagttagca

SEQ ID NO: 794873 - DNA, 15 bp, Homo sapiens
aactctagttagcag

SEQ ID NO: 794874 - DNA, 15 bp, Homo sapiens
actctagttagcagt

SEQ ID NO: 794875 - DNA, 15 bp, Homo sapiens
ctctagttagcagtt

SEQ ID NO: 794876 - DNA, 15 bp, Homo sapiens
tctagttagcagttt

SEQ ID NO: 794877 - DNA, 15 bp, Homo sapiens
ctagttagcagtttc

SEQ ID NO: 794878 - DNA, 15 bp, Homo sapiens
tagttagcagtttca

SEQ ID NO: 794879 - DNA, 15 bp, Homo sapiens
agttagcagtttcaa

SEQ ID NO: 794880 - DNA, 15 bp, Homo sapiens
gttagcagtttcaaa

SEQ ID NO: 794881 - DNA, 15 bp, Homo sapiens
ttagcagtttcaaaa

SEQ ID NO: 794882 - DNA, 15 bp, Homo sapiens
tagcagtttcaaaac

SEQ ID NO: 794883 - DNA, 15 bp, Homo sapiens
agcagtttcaaaact

SEQ ID NO: 794884 - DNA, 15 bp, Homo sapiens
gcagtttcaaaactg

SEQ ID NO: 794885 - DNA, 15 bp, Homo sapiens
cagtttcaaaactgt

SEQ ID NO: 794886 - DNA, 15 bp, Homo sapiens
agtttcaaaactgtg

SEQ ID NO: 794887 - DNA, 15 bp, Homo sapiens
gtttcaaaactgtgg

SEQ ID NO: 794888 - DNA, 15 bp, Homo sapiens
tttcaaaactgtgga

SEQ ID NO: 794889 - DNA, 15 bp, Homo sapiens
ttcaaaactgtggac

SEQ ID NO: 794890 - DNA, 15 bp, Homo sapiens
tcaaaactgtggacg

SEQ ID NO: 794891 - DNA, 15 bp, Homo sapiens
caaaactgtggacgc

SEQ ID NO: 794892 - DNA, 15 bp, Homo sapiens
aaaactgtggacgca

SEQ ID NO: 794893 - DNA, 15 bp, Homo sapiens
aaactgtggacgcac

SEQ ID NO: 794894 - DNA, 15 bp, Homo sapiens
aactgtggacgcact

SEQ ID NO: 794895 - DNA, 15 bp, Homo sapiens
actgtggacgcactt

SEQ ID NO: 794896 - DNA, 15 bp, Homo sapiens
ctgtggacgcacttc

SEQ ID NO: 794897 - DNA, 15 bp, Homo sapiens
tgtggacgcacttca

SEQ ID NO: 794898 - DNA, 15 bp, Homo sapiens
gtggacgcacttcag

SEQ ID NO: 794899 - DNA, 15 bp, Homo sapiens
tggacgcacttcagc

SEQ ID NO: 794900 - DNA, 15 bp, Homo sapiens
ggacgcacttcagcc

SEQ ID NO: 794901 - DNA, 15 bp, Homo sapiens
gacgcacttcagcct

SEQ ID NO: 794902 - DNA, 15 bp, Homo sapiens
acgcacttcagccta

SEQ ID NO: 794903 - DNA, 15 bp, Homo sapiens
cgcacttcagcctaa

SEQ ID NO: 794904 - DNA, 15 bp, Homo sapiens
gcacttcagcctaag

SEQ ID NO: 794905 - DNA, 15 bp, Homo sapiens
cacttcagcctaagg

SEQ ID NO: 794906 - DNA, 15 bp, Homo sapiens
acttcagcctaaggg

SEQ ID NO: 794907 - DNA, 15 bp, Homo sapiens
cttcagcctaaggga

SEQ ID NO: 794908 - DNA, 15 bp, Homo sapiens
ttcagcctaagggac

SEQ ID NO: 794909 - DNA, 15 bp, Homo sapiens
tcagcctaagggaca

SEQ ID NO: 794910 - DNA, 15 bp, Homo sapiens
cagcctaagggacaa

SEQ ID NO: 794911 - DNA, 15 bp, Homo sapiens
agcctaagggacaaa

SEQ ID NO: 794912 - DNA, 15 bp, Homo sapiens
gcctaagggacaaaa

SEQ ID NO: 794913 - DNA, 15 bp, Homo sapiens
cctaagggacaaaaa

SEQ ID NO: 794914 - DNA, 15 bp, Homo sapiens
ctaagggacaaaaac

SEQ ID NO: 794915 - DNA, 15 bp, Homo sapiens
taagggacaaaaaca

SEQ ID NO: 794916 - DNA, 15 bp, Homo sapiens
aagggacaaaaacaa

SEQ ID NO: 794917 - DNA, 15 bp, Homo sapiens
agggacaaaaacaaa

SEQ ID NO: 794918 - DNA, 15 bp, Homo sapiens
gggacaaaaacaaaa

SEQ ID NO: 794919 - DNA, 15 bp, Homo sapiens
ggacaaaaacaaaac

SEQ ID NO: 794920 - DNA, 15 bp, Homo sapiens
gacaaaaacaaaaca

SEQ ID NO: 794921 - DNA, 15 bp, Homo sapiens
acaaaaacaaaacaa

SEQ ID NO: 794922 - DNA, 15 bp, Homo sapiens
caaaaacaaaacaaa

SEQ ID NO: 794923 - DNA, 15 bp, Homo sapiens
aaaaacaaaacaaat

SEQ ID NO: 794924 - DNA, 15 bp, Homo sapiens
aaaacaaaacaaatg

SEQ ID NO: 794925 - DNA, 15 bp, Homo sapiens
aaacaaaacaaatga

SEQ ID NO: 794926 - DNA, 15 bp, Homo sapiens
aacaaaacaaatgac

SEQ ID NO: 794927 - DNA, 15 bp, Homo sapiens
acaaaacaaatgacc

SEQ ID NO: 794928 - DNA, 15 bp, Homo sapiens
caaaacaaatgaccc

SEQ ID NO: 794929 - DNA, 15 bp, Homo sapiens
aaaacaaatgaccca

SEQ ID NO: 794930 - DNA, 15 bp, Homo sapiens
aaacaaatgacccaa

SEQ ID NO: 794931 - DNA, 15 bp, Homo sapiens
aacaaatgacccaag

SEQ ID NO: 794932 - DNA, 15 bp, Homo sapiens
acaaatgacccaagg

SEQ ID NO: 794933 - DNA, 15 bp, Homo sapiens
caaatgacccaaggt

SEQ ID NO: 794934 - DNA, 15 bp, Homo sapiens
aaatgacccaaggta

SEQ ID NO: 794935 - DNA, 15 bp, Homo sapiens
aatgacccaaggtac

SEQ ID NO: 794936 - DNA, 15 bp, Homo sapiens
atgacccaaggtacc

SEQ ID NO: 794937 - DNA, 15 bp, Homo sapiens
tgacccaaggtacca

SEQ ID NO: 794938 - DNA, 15 bp, Homo sapiens
gacccaaggtaccag

SEQ ID NO: 794939 - DNA, 15 bp, Homo sapiens
acccaaggtaccagc

SEQ ID NO: 794940 - DNA, 15 bp, Homo sapiens
cccaaggtaccagct

SEQ ID NO: 794941 - DNA, 15 bp, Homo sapiens
ccaaggtaccagctg

SEQ ID NO: 794942 - DNA, 15 bp, Homo sapiens
caaggtaccagctgc

SEQ ID NO: 794943 - DNA, 15 bp, Homo sapiens
aaggtaccagctgca

SEQ ID NO: 794944 - DNA, 15 bp, Homo sapiens
aggtaccagctgcaa

SEQ ID NO: 794945 - DNA, 15 bp, Homo sapiens
ggtaccagctgcaag

SEQ ID NO: 794946 - DNA, 15 bp, Homo sapiens
gtaccagctgcaaga

SEQ ID NO: 794947 - DNA, 15 bp, Homo sapiens
taccagctgcaagat

SEQ ID NO: 794948 - DNA, 15 bp, Homo sapiens
accagctgcaagatg

SEQ ID NO: 794949 - DNA, 15 bp, Homo sapiens
ccagctgcaagatgc

SEQ ID NO: 794950 - DNA, 15 bp, Homo sapiens
cagctgcaagatgct

SEQ ID NO: 794951 - DNA, 15 bp, Homo sapiens
agctgcaagatgctg

SEQ ID NO: 794952 - DNA, 15 bp, Homo sapiens
gctgcaagatgctgg

SEQ ID NO: 794953 - DNA, 15 bp, Homo sapiens
ctgcaagatgctgga

SEQ ID NO: 794954 - DNA, 15 bp, Homo sapiens
tgcaagatgctggaa

SEQ ID NO: 794955 - DNA, 15 bp, Homo sapiens
gcaagatgctggaat

SEQ ID NO: 794956 - DNA, 15 bp, Homo sapiens
caagatgctggaata

SEQ ID NO: 794957 - DNA, 15 bp, Homo sapiens
aagatgctggaatag

SEQ ID NO: 794958 - DNA, 15 bp, Homo sapiens
agatgctggaatagg

SEQ ID NO: 794959 - DNA, 15 bp, Homo sapiens
gatgctggaatagga

SEQ ID NO: 794960 - DNA, 15 bp, Homo sapiens
atgctggaataggag

SEQ ID NO: 794961 - DNA, 15 bp, Homo sapiens
tgctggaataggagg

SEQ ID NO: 794962 - DNA, 15 bp, Homo sapiens
gctggaataggaggg

SEQ ID NO: 794963 - DNA, 15 bp, Homo sapiens
ctggaataggaggga

SEQ ID NO: 794964 - DNA, 15 bp, Homo sapiens
tggaataggagggag

SEQ ID NO: 794965 - DNA, 15 bp, Homo sapiens
ggaataggagggagg

SEQ ID NO: 794966 - DNA, 15 bp, Homo sapiens
gaataggagggaggg

SEQ ID NO: 794967 - DNA, 15 bp, Homo sapiens
aataggagggaggga

SEQ ID NO: 794968 - DNA, 15 bp, Homo sapiens
ataggagggagggag

SEQ ID NO: 794969 - DNA, 15 bp, Homo sapiens
taggagggagggagg

SEQ ID NO: 794970 - DNA, 15 bp, Homo sapiens
aggagggagggaggg

SEQ ID NO: 794971 - DNA, 15 bp, Homo sapiens
ggagggagggaggga

SEQ ID NO: 794972 - DNA, 15 bp, Homo sapiens
gagggagggagggaa

SEQ ID NO: 794973 - DNA, 15 bp, Homo sapiens
agggagggagggaag

SEQ ID NO: 794974 - DNA, 15 bp, Homo sapiens
gggagggagggaagg

SEQ ID NO: 794975 - DNA, 15 bp, Homo sapiens
ggagggagggaaggc

SEQ ID NO: 794976 - DNA, 15 bp, Homo sapiens
gagggagggaaggcc

SEQ ID NO: 794977 - DNA, 15 bp, Homo sapiens
ccaggcattgttcaa

SEQ ID NO: 794978 - DNA, 15 bp, Homo sapiens
caggcattgttcaag

SEQ ID NO: 794979 - DNA, 15 bp, Homo sapiens
aggcattgttcaagg

SEQ ID NO: 794980 - DNA, 15 bp, Homo sapiens
ggcattgttcaaggt

SEQ ID NO: 794981 - DNA, 15 bp, Homo sapiens
gcattgttcaaggtt

SEQ ID NO: 794982 - DNA, 15 bp, Homo sapiens
cattgttcaaggttc

SEQ ID NO: 794983 - DNA, 15 bp, Homo sapiens
attgttcaaggttca

SEQ ID NO: 794984 - DNA, 15 bp, Homo sapiens
ttgttcaaggttcaa

SEQ ID NO: 794985 - DNA, 15 bp, Homo sapiens
tgttcaaggttcaag

SEQ ID NO: 794986 - DNA, 15 bp, Homo sapiens
gttcaaggttcaagc

SEQ ID NO: 794987 - DNA, 15 bp, Homo sapiens
ttcaaggttcaagca

SEQ ID NO: 794988 - DNA, 15 bp, Homo sapiens
tcaaggttcaagcac

SEQ ID NO: 794989 - DNA, 15 bp, Homo sapiens
caaggttcaagcaca

SEQ ID NO: 794990 - DNA, 15 bp, Homo sapiens
aaggttcaagcacaa

SEQ ID NO: 794991 - DNA, 15 bp, Homo sapiens
aggttcaagcacaaa

SEQ ID NO: 794992 - DNA, 15 bp, Homo sapiens
ggttcaagcacaaag

SEQ ID NO: 794993 - DNA, 15 bp, Homo sapiens
gttcaagcacaaagc

SEQ ID NO: 794994 - DNA, 15 bp, Homo sapiens
ttcaagcacaaagcc

SEQ ID NO: 794995 - DNA, 15 bp, Homo sapiens
tcaagcacaaagccg

SEQ ID NO: 794996 - DNA, 15 bp, Homo sapiens
caagcacaaagccgt

SEQ ID NO: 794997 - DNA, 15 bp, Homo sapiens
aagcacaaagccgtg

SEQ ID NO: 794998 - DNA, 15 bp, Homo sapiens
agcacaaagccgtgt

SEQ ID NO: 794999 - DNA, 15 bp, Homo sapiens
gcacaaagccgtgtt

SEQ ID NO: 795000 - DNA, 15 bp, Homo sapiens
cacaaagccgtgttc

SEQ ID NO: 795001 - DNA, 15 bp, Homo sapiens
acaaagccgtgttca

SEQ ID NO: 795002 - DNA, 15 bp, Homo sapiens
caaagccgtgttcaa

SEQ ID NO: 795003 - DNA, 15 bp, Homo sapiens
aaagccgtgttcaat

SEQ ID NO: 795004 - DNA, 15 bp, Homo sapiens
aagccgtgttcaatg

SEQ ID NO: 795005 - DNA, 15 bp, Homo sapiens
agccgtgttcaatgg

SEQ ID NO: 795006 - DNA, 15 bp, Homo sapiens
gccgtgttcaatggg

SEQ ID NO: 795007 - DNA, 15 bp, Homo sapiens
ccgtgttcaatgggt

SEQ ID NO: 795008 - DNA, 15 bp, Homo sapiens
cgtgttcaatgggtt

SEQ ID NO: 795009 - DNA, 15 bp, Homo sapiens
gtgttcaatgggttc

SEQ ID NO: 795010 - DNA, 15 bp, Homo sapiens
tgttcaatgggttca

SEQ ID NO: 795011 - DNA, 15 bp, Homo sapiens
gttcaatgggttcag

SEQ ID NO: 795012 - DNA, 15 bp, Homo sapiens
ttcaatgggttcagg

SEQ ID NO: 795013 - DNA, 15 bp, Homo sapiens
tcaatgggttcaggt

SEQ ID NO: 795014 - DNA, 15 bp, Homo sapiens
caatgggttcaggta

SEQ ID NO: 795015 - DNA, 15 bp, Homo sapiens
aatgggttcaggtag

SEQ ID NO: 795016 - DNA, 15 bp, Homo sapiens
atgggttcaggtaga

SEQ ID NO: 795017 - DNA, 15 bp, Homo sapiens
tgggttcaggtagaa

SEQ ID NO: 795018 - DNA, 15 bp, Homo sapiens
gggttcaggtagaaa

SEQ ID NO: 795019 - DNA, 15 bp, Homo sapiens
ggttcaggtagaaac

SEQ ID NO: 795020 - DNA, 15 bp, Homo sapiens
gttcaggtagaaaca

SEQ ID NO: 795021 - DNA, 15 bp, Homo sapiens
ttcaggtagaaacat

SEQ ID NO: 795022 - DNA, 15 bp, Homo sapiens
tcaggtagaaacatg

SEQ ID NO: 795023 - DNA, 15 bp, Homo sapiens
caggtagaaacatgc

SEQ ID NO: 795024 - DNA, 15 bp, Homo sapiens
aggtagaaacatgca

SEQ ID NO: 795025 - DNA, 15 bp, Homo sapiens
ggtagaaacatgcac

SEQ ID NO: 795026 - DNA, 15 bp, Homo sapiens
gtagaaacatgcaca

SEQ ID NO: 795027 - DNA, 15 bp, Homo sapiens
tagaaacatgcacag

SEQ ID NO: 795028 - DNA, 15 bp, Homo sapiens
agaaacatgcacagt

SEQ ID NO: 795029 - DNA, 15 bp, Homo sapiens
gaaacatgcacagtt

SEQ ID NO: 795030 - DNA, 15 bp, Homo sapiens
aaacatgcacagtta

SEQ ID NO: 795031 - DNA, 15 bp, Homo sapiens
aacatgcacagttac

SEQ ID NO: 795032 - DNA, 15 bp, Homo sapiens
acatgcacagttaca

SEQ ID NO: 795033 - DNA, 15 bp, Homo sapiens
catgcacagttacat

SEQ ID NO: 795034 - DNA, 15 bp, Homo sapiens
atgcacagttacatc

SEQ ID NO: 795035 - DNA, 15 bp, Homo sapiens
tgcacagttacatca

SEQ ID NO: 795036 - DNA, 15 bp, Homo sapiens
gcacagttacatcac

SEQ ID NO: 795037 - DNA, 15 bp, Homo sapiens
cacagttacatcaca

SEQ ID NO: 795038 - DNA, 15 bp, Homo sapiens
acagttacatcacaa

SEQ ID NO: 795039 - DNA, 15 bp, Homo sapiens
cagttacatcacaac

SEQ ID NO: 795040 - DNA, 15 bp, Homo sapiens
agttacatcacaaca

SEQ ID NO: 795041 - DNA, 15 bp, Homo sapiens
gttacatcacaacag

SEQ ID NO: 795042 - DNA, 15 bp, Homo sapiens
ttacatcacaacaga

SEQ ID NO: 795043 - DNA, 15 bp, Homo sapiens
tacatcacaacagag

SEQ ID NO: 795044 - DNA, 15 bp, Homo sapiens
acatcacaacagagt

SEQ ID NO: 795045 - DNA, 15 bp, Homo sapiens
catcacaacagagta

SEQ ID NO: 795046 - DNA, 15 bp, Homo sapiens
atcacaacagagtaa

SEQ ID NO: 795047 - DNA, 15 bp, Homo sapiens
tcacaacagagtaaa

SEQ ID NO: 795048 - DNA, 15 bp, Homo sapiens
cacaacagagtaaac

SEQ ID NO: 795049 - DNA, 15 bp, Homo sapiens
acaacagagtaaacc

SEQ ID NO: 795050 - DNA, 15 bp, Homo sapiens
caacagagtaaacca

SEQ ID NO: 795051 - DNA, 15 bp, Homo sapiens
aacagagtaaaccat

SEQ ID NO: 795052 - DNA, 15 bp, Homo sapiens
acagagtaaaccatg

SEQ ID NO: 795053 - DNA, 15 bp, Homo sapiens
cagagtaaaccatgg

SEQ ID NO: 795054 - DNA, 15 bp, Homo sapiens
agagtaaaccatggg

SEQ ID NO: 795055 - DNA, 15 bp, Homo sapiens
gagtaaaccatggga

SEQ ID NO: 795056 - DNA, 15 bp, Homo sapiens
agtaaaccatgggaa

SEQ ID NO: 795057 - DNA, 15 bp, Homo sapiens
gtaaaccatgggaac

SEQ ID NO: 795058 - DNA, 15 bp, Homo sapiens
taaaccatgggaact

SEQ ID NO: 795059 - DNA, 15 bp, Homo sapiens
aaaccatgggaactg

SEQ ID NO: 795060 - DNA, 15 bp, Homo sapiens
aaccatgggaactgc

SEQ ID NO: 795061 - DNA, 15 bp, Homo sapiens
accatgggaactgca

SEQ ID NO: 795062 - DNA, 15 bp, Homo sapiens
ccatgggaactgcat

SEQ ID NO: 795063 - DNA, 15 bp, Homo sapiens
catgggaactgcatg

SEQ ID NO: 795064 - DNA, 15 bp, Homo sapiens
atgggaactgcatgg

SEQ ID NO: 795065 - DNA, 15 bp, Homo sapiens
tgggaactgcatggt

SEQ ID NO: 795066 - DNA, 15 bp, Homo sapiens
gggaactgcatggtg

SEQ ID NO: 795067 - DNA, 15 bp, Homo sapiens
ggaactgcatggtgc

SEQ ID NO: 795068 - DNA, 15 bp, Homo sapiens
gaactgcatggtgca

SEQ ID NO: 795069 - DNA, 15 bp, Homo sapiens
aactgcatggtgcag

SEQ ID NO: 795070 - DNA, 15 bp, Homo sapiens
actgcatggtgcaga

SEQ ID NO: 795071 - DNA, 15 bp, Homo sapiens
ctgcatggtgcagag

SEQ ID NO: 795072 - DNA, 15 bp, Homo sapiens
tgcatggtgcagagt

SEQ ID NO: 795073 - DNA, 15 bp, Homo sapiens
gcatggtgcagagta

SEQ ID NO: 795074 - DNA, 15 bp, Homo sapiens
catggtgcagagtag

SEQ ID NO: 795075 - DNA, 15 bp, Homo sapiens
atggtgcagagtagg

SEQ ID NO: 795076 - DNA, 15 bp, Homo sapiens
tggtgcagagtaggg

SEQ ID NO: 795077 - DNA, 15 bp, Homo sapiens
ggtgcagagtagggg

SEQ ID NO: 795078 - DNA, 15 bp, Homo sapiens
gtgcagagtaggggg

SEQ ID NO: 795079 - DNA, 15 bp, Homo sapiens
tgcagagtagggggt

SEQ ID NO: 795080 - DNA, 15 bp, Homo sapiens
gcagagtagggggta

SEQ ID NO: 795081 - DNA, 15 bp, Homo sapiens
cagagtagggggtat

SEQ ID NO: 795082 - DNA, 15 bp, Homo sapiens
agagtagggggtatt

SEQ ID NO: 795083 - DNA, 15 bp, Homo sapiens
gagtagggggtattt

SEQ ID NO: 795084 - DNA, 15 bp, Homo sapiens
agtagggggtatttg

SEQ ID NO: 795085 - DNA, 15 bp, Homo sapiens
gtagggggtatttgc

SEQ ID NO: 795086 - DNA, 15 bp, Homo sapiens
tagggggtatttgca

SEQ ID NO: 795087 - DNA, 15 bp, Homo sapiens
agggggtatttgcat

SEQ ID NO: 795088 - DNA, 15 bp, Homo sapiens
gggggtatttgcatg

SEQ ID NO: 795089 - DNA, 15 bp, Homo sapiens
ggggtatttgcatgg

SEQ ID NO: 795090 - DNA, 15 bp, Homo sapiens
gggtatttgcatggc

SEQ ID NO: 795091 - DNA, 15 bp, Homo sapiens
ggtatttgcatggca

SEQ ID NO: 795092 - DNA, 15 bp, Homo sapiens
gtatttgcatggcag

SEQ ID NO: 795093 - DNA, 15 bp, Homo sapiens
tatttgcatggcagt

SEQ ID NO: 795094 - DNA, 15 bp, Homo sapiens
atttgcatggcagtt

SEQ ID NO: 795095 - DNA, 15 bp, Homo sapiens
tttgcatggcagttg

SEQ ID NO: 795096 - DNA, 15 bp, Homo sapiens
ttgcatggcagttga

SEQ ID NO: 795097 - DNA, 15 bp, Homo sapiens
tgcatggcagttgaa

SEQ ID NO: 795098 - DNA, 15 bp, Homo sapiens
gcatggcagttgaag

SEQ ID NO: 795099 - DNA, 15 bp, Homo sapiens
catggcagttgaaga

SEQ ID NO: 795100 - DNA, 15 bp, Homo sapiens
atggcagttgaagac

SEQ ID NO: 795101 - DNA, 15 bp, Homo sapiens
tggcagttgaagacc

SEQ ID NO: 795102 - DNA, 15 bp, Homo sapiens
ggcagttgaagacct

SEQ ID NO: 795103 - DNA, 15 bp, Homo sapiens
gcagttgaagacctg

SEQ ID NO: 795104 - DNA, 15 bp, Homo sapiens
cagttgaagacctgt

SEQ ID NO: 795105 - DNA, 15 bp, Homo sapiens
agttgaagacctgtg

SEQ ID NO: 795106 - DNA, 15 bp, Homo sapiens
gttgaagacctgtgt

SEQ ID NO: 795107 - DNA, 15 bp, Homo sapiens
ttgaagacctgtgtc

SEQ ID NO: 795108 - DNA, 15 bp, Homo sapiens
tgaagacctgtgtcg

SEQ ID NO: 795109 - DNA, 15 bp, Homo sapiens
gaagacctgtgtcgg

SEQ ID NO: 795110 - DNA, 15 bp, Homo sapiens
aagacctgtgtcgga

SEQ ID NO: 795111 - DNA, 15 bp, Homo sapiens
agacctgtgtcggac

SEQ ID NO: 795112 - DNA, 15 bp, Homo sapiens
gacctgtgtcggacg

SEQ ID NO: 795113 - DNA, 15 bp, Homo sapiens
acctgtgtcggacgc

SEQ ID NO: 795114 - DNA, 15 bp, Homo sapiens
cctgtgtcggacgct

SEQ ID NO: 795115 - DNA, 15 bp, Homo sapiens
ctgtgtcggacgctg

SEQ ID NO: 795116 - DNA, 15 bp, Homo sapiens
tgtgtcggacgctga

SEQ ID NO: 795117 - DNA, 15 bp, Homo sapiens
gtgtcggacgctgat

SEQ ID NO: 795118 - DNA, 15 bp, Homo sapiens
tgtcggacgctgatg

SEQ ID NO: 795119 - DNA, 15 bp, Homo sapiens
gtcggacgctgatgc

SEQ ID NO: 795120 - DNA, 15 bp, Homo sapiens
tcggacgctgatgct

SEQ ID NO: 795121 - DNA, 15 bp, Homo sapiens
cggacgctgatgctt

SEQ ID NO: 795122 - DNA, 15 bp, Homo sapiens
ggacgctgatgcttc

SEQ ID NO: 795123 - DNA, 15 bp, Homo sapiens
gacgctgatgcttct

SEQ ID NO: 795124 - DNA, 15 bp, Homo sapiens
acgctgatgcttcta

SEQ ID NO: 795125 - DNA, 15 bp, Homo sapiens
cgctgatgcttctat

SEQ ID NO: 795126 - DNA, 15 bp, Homo sapiens
gctgatgcttctata

SEQ ID NO: 795127 - DNA, 15 bp, Homo sapiens
ctgatgcttctataa

SEQ ID NO: 795128 - DNA, 15 bp, Homo sapiens
tgatgcttctataat

SEQ ID NO: 795129 - DNA, 15 bp, Homo sapiens
gatgcttctataata

SEQ ID NO: 795130 - DNA, 15 bp, Homo sapiens
atgcttctataataa

SEQ ID NO: 795131 - DNA, 15 bp, Homo sapiens
tgcttctataataac

SEQ ID NO: 795132 - DNA, 15 bp, Homo sapiens
gcttctataataacc

SEQ ID NO: 795133 - DNA, 15 bp, Homo sapiens
cttctataataaccc

SEQ ID NO: 795134 - DNA, 15 bp, Homo sapiens
ttctataataaccca

SEQ ID NO: 795135 - DNA, 15 bp, Homo sapiens
tctataataacccaa

SEQ ID NO: 795136 - DNA, 15 bp, Homo sapiens
ctataataacccaac

SEQ ID NO: 795137 - DNA, 15 bp, Homo sapiens
tataataacccaact

SEQ ID NO: 795138 - DNA, 15 bp, Homo sapiens
ataataacccaactt

SEQ ID NO: 795139 - DNA, 15 bp, Homo sapiens
taataacccaacttg

SEQ ID NO: 795140 - DNA, 15 bp, Homo sapiens
aataacccaacttgg

SEQ ID NO: 795141 - DNA, 15 bp, Homo sapiens
ataacccaacttggt

SEQ ID NO: 795142 - DNA, 15 bp, Homo sapiens
taacccaacttggtt

SEQ ID NO: 795143 - DNA, 15 bp, Homo sapiens
aacccaacttggttc

SEQ ID NO: 795144 - DNA, 15 bp, Homo sapiens
acccaacttggttcc

SEQ ID NO: 795145 - DNA, 15 bp, Homo sapiens
cccaacttggttcct

SEQ ID NO: 795146 - DNA, 15 bp, Homo sapiens
ccaacttggttcctc

SEQ ID NO: 795147 - DNA, 15 bp, Homo sapiens
caacttggttcctct

SEQ ID NO: 795148 - DNA, 15 bp, Homo sapiens
aacttggttcctctc

SEQ ID NO: 795149 - DNA, 15 bp, Homo sapiens
acttggttcctctcc

SEQ ID NO: 795150 - DNA, 15 bp, Homo sapiens
cttggttcctctcca

SEQ ID NO: 795151 - DNA, 15 bp, Homo sapiens
ttggttcctctccac

SEQ ID NO: 795152 - DNA, 15 bp, Homo sapiens
tggttcctctccact

SEQ ID NO: 795153 - DNA, 15 bp, Homo sapiens
ggttcctctccactt

SEQ ID NO: 795154 - DNA, 15 bp, Homo sapiens
gttcctctccacttt

SEQ ID NO: 795155 - DNA, 15 bp, Homo sapiens
ttcctctccactttt

SEQ ID NO: 795156 - DNA, 15 bp, Homo sapiens
tcctctccactttta

SEQ ID NO: 795157 - DNA, 15 bp, Homo sapiens
cctctccacttttag

SEQ ID NO: 795158 - DNA, 15 bp, Homo sapiens
ctctccacttttaga

SEQ ID NO: 795159 - DNA, 15 bp, Homo sapiens
tctccacttttagag

SEQ ID NO: 795160 - DNA, 15 bp, Homo sapiens
ctccacttttagagc

SEQ ID NO: 795161 - DNA, 15 bp, Homo sapiens
tccacttttagagcc

SEQ ID NO: 795162 - DNA, 15 bp, Homo sapiens
ccacttttagagcca

SEQ ID NO: 795163 - DNA, 15 bp, Homo sapiens
cacttttagagccaa

SEQ ID NO: 795164 - DNA, 15 bp, Homo sapiens
acttttagagccaat

SEQ ID NO: 795165 - DNA, 15 bp, Homo sapiens
cttttagagccaatt

SEQ ID NO: 795166 - DNA, 15 bp, Homo sapiens
ttttagagccaatta

SEQ ID NO: 795167 - DNA, 15 bp, Homo sapiens
tttagagccaattaa

SEQ ID NO: 795168 - DNA, 15 bp, Homo sapiens
ttagagccaattaat

SEQ ID NO: 795169 - DNA, 15 bp, Homo sapiens
tagagccaattaatt

SEQ ID NO: 795170 - DNA, 15 bp, Homo sapiens
agagccaattaatta

SEQ ID NO: 795171 - DNA, 15 bp, Homo sapiens
gagccaattaattag

SEQ ID NO: 795172 - DNA, 15 bp, Homo sapiens
agccaattaattagg

SEQ ID NO: 795173 - DNA, 15 bp, Homo sapiens
gccaattaattagga

SEQ ID NO: 795174 - DNA, 15 bp, Homo sapiens
ccaattaattaggaa

SEQ ID NO: 795175 - DNA, 15 bp, Homo sapiens
caattaattaggaaa

SEQ ID NO: 795176 - DNA, 15 bp, Homo sapiens
aattaattaggaaaa

SEQ ID NO: 795177 - DNA, 15 bp, Homo sapiens
attaattaggaaaaa

SEQ ID NO: 795178 - DNA, 15 bp, Homo sapiens
ttaattaggaaaaac

SEQ ID NO: 795179 - DNA, 15 bp, Homo sapiens
taattaggaaaaaca

SEQ ID NO: 795180 - DNA, 15 bp, Homo sapiens
aattaggaaaaacac

SEQ ID NO: 795181 - DNA, 15 bp, Homo sapiens
attaggaaaaacact

SEQ ID NO: 795182 - DNA, 15 bp, Homo sapiens
ttaggaaaaacactt

SEQ ID NO: 795183 - DNA, 15 bp, Homo sapiens
taggaaaaacacttt

SEQ ID NO: 795184 - DNA, 15 bp, Homo sapiens
aggaaaaacactttc

SEQ ID NO: 795185 - DNA, 15 bp, Homo sapiens
ggaaaaacactttct

SEQ ID NO: 795186 - DNA, 15 bp, Homo sapiens
gaaaaacactttctt

SEQ ID NO: 795187 - DNA, 15 bp, Homo sapiens
aaaaacactttcttc

SEQ ID NO: 795188 - DNA, 15 bp, Homo sapiens
aaaacactttcttcc

SEQ ID NO: 795189 - DNA, 15 bp, Homo sapiens
aaacactttcttcct

SEQ ID NO: 795190 - DNA, 15 bp, Homo sapiens
aacactttcttcctt

SEQ ID NO: 795191 - DNA, 15 bp, Homo sapiens
acactttcttccttc

SEQ ID NO: 795192 - DNA, 15 bp, Homo sapiens
cactttcttccttcc

SEQ ID NO: 795193 - DNA, 15 bp, Homo sapiens
actttcttccttccc

SEQ ID NO: 795194 - DNA, 15 bp, Homo sapiens
ctttcttccttccct

SEQ ID NO: 795195 - DNA, 15 bp, Homo sapiens
tttcttccttccctc

SEQ ID NO: 795196 - DNA, 15 bp, Homo sapiens
ttcttccttccctct

SEQ ID NO: 795197 - DNA, 15 bp, Homo sapiens
tcttccttccctctc

SEQ ID NO: 795198 - DNA, 15 bp, Homo sapiens
cttccttccctctct

SEQ ID NO: 795199 - DNA, 15 bp, Homo sapiens
ttccttccctctctg

SEQ ID NO: 795200 - DNA, 15 bp, Homo sapiens
tccttccctctctgt

SEQ ID NO: 795201 - DNA, 15 bp, Homo sapiens
ccttccctctctgtc

SEQ ID NO: 795202 - DNA, 15 bp, Homo sapiens
cttccctctctgtca

SEQ ID NO: 795203 - DNA, 15 bp, Homo sapiens
ttccctctctgtcat

SEQ ID NO: 795204 - DNA, 15 bp, Homo sapiens
tccctctctgtcatt

SEQ ID NO: 795205 - DNA, 15 bp, Homo sapiens
ccctctctgtcattc

SEQ ID NO: 795206 - DNA, 15 bp, Homo sapiens
cctctctgtcattct

SEQ ID NO: 795207 - DNA, 15 bp, Homo sapiens
ctctctgtcattcta

SEQ ID NO: 795208 - DNA, 15 bp, Homo sapiens
tctctgtcattctat

SEQ ID NO: 795209 - DNA, 15 bp, Homo sapiens
ctctgtcattctatg

SEQ ID NO: 795210 - DNA, 15 bp, Homo sapiens
tctgtcattctatgt

SEQ ID NO: 795211 - DNA, 15 bp, Homo sapiens
ctgtcattctatgtt

SEQ ID NO: 795212 - DNA, 15 bp, Homo sapiens
tgtcattctatgttg

SEQ ID NO: 795213 - DNA, 15 bp, Homo sapiens
gtcattctatgttgg

SEQ ID NO: 795214 - DNA, 15 bp, Homo sapiens
tcattctatgttggc

SEQ ID NO: 795215 - DNA, 15 bp, Homo sapiens
cattctatgttggca

SEQ ID NO: 795216 - DNA, 15 bp, Homo sapiens
attctatgttggcat

SEQ ID NO: 795217 - DNA, 15 bp, Homo sapiens
ttctatgttggcatt

SEQ ID NO: 795218 - DNA, 15 bp, Homo sapiens
tctatgttggcattt

SEQ ID NO: 795219 - DNA, 15 bp, Homo sapiens
ctatgttggcatttg

SEQ ID NO: 795220 - DNA, 15 bp, Homo sapiens
tatgttggcatttgt

SEQ ID NO: 795221 - DNA, 15 bp, Homo sapiens
atgttggcatttgtc

SEQ ID NO: 795222 - DNA, 15 bp, Homo sapiens
tgttggcatttgtcc

SEQ ID NO: 795223 - DNA, 15 bp, Homo sapiens
gttggcatttgtccc

SEQ ID NO: 795224 - DNA, 15 bp, Homo sapiens
ttggcatttgtcccc

SEQ ID NO: 795225 - DNA, 15 bp, Homo sapiens
tggcatttgtccccc

SEQ ID NO: 795226 - DNA, 15 bp, Homo sapiens
ggcatttgtccccct

SEQ ID NO: 795227 - DNA, 15 bp, Homo sapiens
gcatttgtccccctt

SEQ ID NO: 795228 - DNA, 15 bp, Homo sapiens
catttgtcccccttg

SEQ ID NO: 795229 - DNA, 15 bp, Homo sapiens
atttgtcccccttgg

SEQ ID NO: 795230 - DNA, 15 bp, Homo sapiens
tttgtcccccttggg

SEQ ID NO: 795231 - DNA, 15 bp, Homo sapiens
ttgtcccccttgggt

SEQ ID NO: 795232 - DNA, 15 bp, Homo sapiens
tgtcccccttgggtt

SEQ ID NO: 795233 - DNA, 15 bp, Homo sapiens
gtcccccttgggttg

SEQ ID NO: 795234 - DNA, 15 bp, Homo sapiens
tcccccttgggttga

SEQ ID NO: 795235 - DNA, 15 bp, Homo sapiens
cccccttgggttgat

SEQ ID NO: 795236 - DNA, 15 bp, Homo sapiens
ccccttgggttgatg

SEQ ID NO: 795237 - DNA, 15 bp, Homo sapiens
cccttgggttgatgg

SEQ ID NO: 795238 - DNA, 15 bp, Homo sapiens
ccttgggttgatggg

SEQ ID NO: 795239 - DNA, 15 bp, Homo sapiens
cttgggttgatgggc

SEQ ID NO: 795240 - DNA, 15 bp, Homo sapiens
ttgggttgatgggca

SEQ ID NO: 795241 - DNA, 15 bp, Homo sapiens
tgggttgatgggcag

SEQ ID NO: 795242 - DNA, 15 bp, Homo sapiens
gggttgatgggcaga

SEQ ID NO: 795243 - DNA, 15 bp, Homo sapiens
ggttgatgggcagac

SEQ ID NO: 795244 - DNA, 15 bp, Homo sapiens
gttgatgggcagaca

SEQ ID NO: 795245 - DNA, 15 bp, Homo sapiens
ttgatgggcagacac

SEQ ID NO: 795246 - DNA, 15 bp, Homo sapiens
tgatgggcagacaca

SEQ ID NO: 795247 - DNA, 15 bp, Homo sapiens
gatgggcagacacag

SEQ ID NO: 795248 - DNA, 15 bp, Homo sapiens
atgggcagacacagg

SEQ ID NO: 795249 - DNA, 15 bp, Homo sapiens
tgggcagacacaggt

SEQ ID NO: 795250 - DNA, 15 bp, Homo sapiens
gggcagacacaggta

SEQ ID NO: 795251 - DNA, 15 bp, Homo sapiens
ggcagacacaggtat

SEQ ID NO: 795252 - DNA, 15 bp, Homo sapiens
gcagacacaggtatg

SEQ ID NO: 795253 - DNA, 15 bp, Homo sapiens
cagacacaggtatga

SEQ ID NO: 795254 - DNA, 15 bp, Homo sapiens
agacacaggtatgaa

SEQ ID NO: 795255 - DNA, 15 bp, Homo sapiens
gacacaggtatgaaa

SEQ ID NO: 795256 - DNA, 15 bp, Homo sapiens
acacaggtatgaaac

SEQ ID NO: 795257 - DNA, 15 bp, Homo sapiens
cacaggtatgaaacc

SEQ ID NO: 795258 - DNA, 15 bp, Homo sapiens
acaggtatgaaaccc

SEQ ID NO: 795259 - DNA, 15 bp, Homo sapiens
caggtatgaaaccca

SEQ ID NO: 795260 - DNA, 15 bp, Homo sapiens
aggtatgaaacccat

SEQ ID NO: 795261 - DNA, 15 bp, Homo sapiens
ggtatgaaacccata

SEQ ID NO: 795262 - DNA, 15 bp, Homo sapiens
gtatgaaacccataa

SEQ ID NO: 795263 - DNA, 15 bp, Homo sapiens
tatgaaacccataac

SEQ ID NO: 795264 - DNA, 15 bp, Homo sapiens
atgaaacccataact

SEQ ID NO: 795265 - DNA, 15 bp, Homo sapiens
tgaaacccataactt

SEQ ID NO: 795266 - DNA, 15 bp, Homo sapiens
gaaacccataacttc

SEQ ID NO: 795267 - DNA, 15 bp, Homo sapiens
aaacccataacttca

SEQ ID NO: 795268 - DNA, 15 bp, Homo sapiens
aacccataacttcat

SEQ ID NO: 795269 - DNA, 15 bp, Homo sapiens
acccataacttcatc

SEQ ID NO: 795270 - DNA, 15 bp, Homo sapiens
cccataacttcatct

SEQ ID NO: 795271 - DNA, 15 bp, Homo sapiens
ccataacttcatctc

SEQ ID NO: 795272 - DNA, 15 bp, Homo sapiens
cataacttcatctct

SEQ ID NO: 795273 - DNA, 15 bp, Homo sapiens
ataacttcatctctc

SEQ ID NO: 795274 - DNA, 15 bp, Homo sapiens
taacttcatctctct

SEQ ID NO: 795275 - DNA, 15 bp, Homo sapiens
aacttcatctctctg

SEQ ID NO: 795276 - DNA, 15 bp, Homo sapiens
acttcatctctctgg

SEQ ID NO: 795277 - DNA, 15 bp, Homo sapiens
cttcatctctctggg

SEQ ID NO: 795278 - DNA, 15 bp, Homo sapiens
ttcatctctctggga

SEQ ID NO: 795279 - DNA, 15 bp, Homo sapiens
tcatctctctgggat

SEQ ID NO: 795280 - DNA, 15 bp, Homo sapiens
catctctctgggatt

SEQ ID NO: 795281 - DNA, 15 bp, Homo sapiens
atctctctgggattc

SEQ ID NO: 795282 - DNA, 15 bp, Homo sapiens
tctctctgggattca

SEQ ID NO: 795283 - DNA, 15 bp, Homo sapiens
ctctctgggattcag

SEQ ID NO: 795284 - DNA, 15 bp, Homo sapiens
tctctgggattcagt

SEQ ID NO: 795285 - DNA, 15 bp, Homo sapiens
ctctgggattcagtt

SEQ ID NO: 795286 - DNA, 15 bp, Homo sapiens
tctgggattcagttt

SEQ ID NO: 795287 - DNA, 15 bp, Homo sapiens
ctgggattcagtttc

SEQ ID NO: 795288 - DNA, 15 bp, Homo sapiens
tgggattcagtttct

SEQ ID NO: 795289 - DNA, 15 bp, Homo sapiens
gggattcagtttctg

SEQ ID NO: 795290 - DNA, 15 bp, Homo sapiens
ggattcagtttctgg

SEQ ID NO: 795291 - DNA, 15 bp, Homo sapiens
gattcagtttctggg

SEQ ID NO: 795292 - DNA, 15 bp, Homo sapiens
attcagtttctgggc

SEQ ID NO: 795293 - DNA, 15 bp, Homo sapiens
ttcagtttctgggca

SEQ ID NO: 795294 - DNA, 15 bp, Homo sapiens
tcagtttctgggcag

SEQ ID NO: 795295 - DNA, 15 bp, Homo sapiens
cagtttctgggcaga

SEQ ID NO: 795296 - DNA, 15 bp, Homo sapiens
agtttctgggcagag

SEQ ID NO: 795297 - DNA, 15 bp, Homo sapiens
gtttctgggcagagt

SEQ ID NO: 795298 - DNA, 15 bp, Homo sapiens
tttctgggcagagtg

SEQ ID NO: 795299 - DNA, 15 bp, Homo sapiens
ttctgggcagagtgg

SEQ ID NO: 795300 - DNA, 15 bp, Homo sapiens
tctgggcagagtggg

SEQ ID NO: 795301 - DNA, 15 bp, Homo sapiens
ctgggcagagtgggc

SEQ ID NO: 795302 - DNA, 15 bp, Homo sapiens
tgggcagagtgggca

SEQ ID NO: 795303 - DNA, 15 bp, Homo sapiens
gggcagagtgggcaa

SEQ ID NO: 795304 - DNA, 15 bp, Homo sapiens
ggcagagtgggcaag

SEQ ID NO: 795305 - DNA, 15 bp, Homo sapiens
gcagagtgggcaagg

SEQ ID NO: 795306 - DNA, 15 bp, Homo sapiens
cagagtgggcaaggg

SEQ ID NO: 795307 - DNA, 15 bp, Homo sapiens
agagtgggcaaggga

SEQ ID NO: 795308 - DNA, 15 bp, Homo sapiens
gagtgggcaagggag

SEQ ID NO: 795309 - DNA, 15 bp, Homo sapiens
agtgggcaagggagg

SEQ ID NO: 795310 - DNA, 15 bp, Homo sapiens
gtgggcaagggaggc

SEQ ID NO: 795311 - DNA, 15 bp, Homo sapiens
tgggcaagggaggcc

SEQ ID NO: 795312 - DNA, 15 bp, Homo sapiens
gggcaagggaggcca

SEQ ID NO: 795313 - DNA, 15 bp, Homo sapiens
ggcaagggaggccag

SEQ ID NO: 795314 - DNA, 15 bp, Homo sapiens
gcaagggaggccagg

SEQ ID NO: 795315 - DNA, 15 bp, Homo sapiens
caagggaggccaggg

SEQ ID NO: 795316 - DNA, 15 bp, Homo sapiens
aagggaggccagggt

SEQ ID NO: 795317 - DNA, 15 bp, Homo sapiens
agggaggccagggtc

SEQ ID NO: 795318 - DNA, 15 bp, Homo sapiens
gggaggccagggtct

SEQ ID NO: 795319 - DNA, 15 bp, Homo sapiens
ggaggccagggtctt

SEQ ID NO: 795320 - DNA, 15 bp, Homo sapiens
gaggccagggtcttc

SEQ ID NO: 795321 - DNA, 15 bp, Homo sapiens
aggccagggtcttct

SEQ ID NO: 795322 - DNA, 15 bp, Homo sapiens
ggccagggtcttcta

SEQ ID NO: 795323 - DNA, 15 bp, Homo sapiens
gccagggtcttctag

SEQ ID NO: 795324 - DNA, 15 bp, Homo sapiens
ccagggtcttctaga

SEQ ID NO: 795325 - DNA, 15 bp, Homo sapiens
cagggtcttctagac

SEQ ID NO: 795326 - DNA, 15 bp, Homo sapiens
agggtcttctagact

SEQ ID NO: 795327 - DNA, 15 bp, Homo sapiens
gggtcttctagactc

SEQ ID NO: 795328 - DNA, 15 bp, Homo sapiens
ggtcttctagactca

SEQ ID NO: 795329 - DNA, 15 bp, Homo sapiens
gtcttctagactcac

SEQ ID NO: 795330 - DNA, 15 bp, Homo sapiens
tcttctagactcact

SEQ ID NO: 795331 - DNA, 15 bp, Homo sapiens
cttctagactcacta

SEQ ID NO: 795332 - DNA, 15 bp, Homo sapiens
ttctagactcactaa

SEQ ID NO: 795333 - DNA, 15 bp, Homo sapiens
tctagactcactaag

SEQ ID NO: 795334 - DNA, 15 bp, Homo sapiens
ctagactcactaagt

SEQ ID NO: 795335 - DNA, 15 bp, Homo sapiens
tagactcactaagtc

SEQ ID NO: 795336 - DNA, 15 bp, Homo sapiens
agactcactaagtca

SEQ ID NO: 795337 - DNA, 15 bp, Homo sapiens
gactcactaagtcag

SEQ ID NO: 795338 - DNA, 15 bp, Homo sapiens
actcactaagtcaga

SEQ ID NO: 795339 - DNA, 15 bp, Homo sapiens
ctcactaagtcagaa

SEQ ID NO: 795340 - DNA, 15 bp, Homo sapiens
tcactaagtcagaag

SEQ ID NO: 795341 - DNA, 15 bp, Homo sapiens
cactaagtcagaagc

SEQ ID NO: 795342 - DNA, 15 bp, Homo sapiens
actaagtcagaagca

SEQ ID NO: 795343 - DNA, 15 bp, Homo sapiens
ctaagtcagaagcat

SEQ ID NO: 795344 - DNA, 15 bp, Homo sapiens
taagtcagaagcatc

SEQ ID NO: 795345 - DNA, 15 bp, Homo sapiens
aagtcagaagcatct

SEQ ID NO: 795346 - DNA, 15 bp, Homo sapiens
agtcagaagcatctc

SEQ ID NO: 795347 - DNA, 15 bp, Homo sapiens
gtcagaagcatctcc

SEQ ID NO: 795348 - DNA, 15 bp, Homo sapiens
tcagaagcatctcct

SEQ ID NO: 795349 - DNA, 15 bp, Homo sapiens
cagaagcatctcctc

SEQ ID NO: 795350 - DNA, 15 bp, Homo sapiens
agaagcatctcctcc

SEQ ID NO: 795351 - DNA, 15 bp, Homo sapiens
gaagcatctcctcct

SEQ ID NO: 795352 - DNA, 15 bp, Homo sapiens
aagcatctcctcctg

SEQ ID NO: 795353 - DNA, 15 bp, Homo sapiens
agcatctcctcctga

SEQ ID NO: 795354 - DNA, 15 bp, Homo sapiens
gcatctcctcctgat

SEQ ID NO: 795355 - DNA, 15 bp, Homo sapiens
catctcctcctgatc

SEQ ID NO: 795356 - DNA, 15 bp, Homo sapiens
atctcctcctgatct

SEQ ID NO: 795357 - DNA, 15 bp, Homo sapiens
tctcctcctgatctt

SEQ ID NO: 795358 - DNA, 15 bp, Homo sapiens
ctcctcctgatcttt

SEQ ID NO: 795359 - DNA, 15 bp, Homo sapiens
tcctcctgatctttg

SEQ ID NO: 795360 - DNA, 15 bp, Homo sapiens
cctcctgatctttgg

SEQ ID NO: 795361 - DNA, 15 bp, Homo sapiens
ctcctgatctttggt

SEQ ID NO: 795362 - DNA, 15 bp, Homo sapiens
tcctgatctttggtt

SEQ ID NO: 795363 - DNA, 15 bp, Homo sapiens
cctgatctttggttt

SEQ ID NO: 795364 - DNA, 15 bp, Homo sapiens
ctgatctttggttta

SEQ ID NO: 795365 - DNA, 15 bp, Homo sapiens
tgatctttggtttaa

SEQ ID NO: 795366 - DNA, 15 bp, Homo sapiens
gatctttggtttaat

SEQ ID NO: 795367 - DNA, 15 bp, Homo sapiens
atctttggtttaatt

SEQ ID NO: 795368 - DNA, 15 bp, Homo sapiens
tctttggtttaattt

SEQ ID NO: 795369 - DNA, 15 bp, Homo sapiens
ctttggtttaatttt

SEQ ID NO: 795370 - DNA, 15 bp, Homo sapiens
tttggtttaattttt

SEQ ID NO: 795371 - DNA, 15 bp, Homo sapiens
ttggtttaatttttc

SEQ ID NO: 795372 - DNA, 15 bp, Homo sapiens
tggtttaatttttct

SEQ ID NO: 795373 - DNA, 15 bp, Homo sapiens
ggtttaatttttctt

SEQ ID NO: 795374 - DNA, 15 bp, Homo sapiens
gtttaatttttcttt

SEQ ID NO: 795375 - DNA, 15 bp, Homo sapiens
tttaatttttctttt

SEQ ID NO: 795376 - DNA, 15 bp, Homo sapiens
ttaatttttcttttg

SEQ ID NO: 795377 - DNA, 15 bp, Homo sapiens
taatttttcttttga

SEQ ID NO: 795378 - DNA, 15 bp, Homo sapiens
aatttttcttttgaa

SEQ ID NO: 795379 - DNA, 15 bp, Homo sapiens
atttttcttttgaag

SEQ ID NO: 795380 - DNA, 15 bp, Homo sapiens
tttttcttttgaagg

SEQ ID NO: 795381 - DNA, 15 bp, Homo sapiens
ttttcttttgaaggt

SEQ ID NO: 795382 - DNA, 15 bp, Homo sapiens
tttcttttgaaggta

SEQ ID NO: 795383 - DNA, 15 bp, Homo sapiens
ttcttttgaaggtac

SEQ ID NO: 795384 - DNA, 15 bp, Homo sapiens
tcttttgaaggtact

SEQ ID NO: 795385 - DNA, 15 bp, Homo sapiens
cttttgaaggtactc

SEQ ID NO: 795386 - DNA, 15 bp, Homo sapiens
ttttgaaggtactca

SEQ ID NO: 795387 - DNA, 15 bp, Homo sapiens
tttgaaggtactcag

SEQ ID NO: 795388 - DNA, 15 bp, Homo sapiens
ttgaaggtactcagt

SEQ ID NO: 795389 - DNA, 15 bp, Homo sapiens
tgaaggtactcagtc

SEQ ID NO: 795390 - DNA, 15 bp, Homo sapiens
gaaggtactcagtcc

SEQ ID NO: 795391 - DNA, 15 bp, Homo sapiens
aaggtactcagtcca

SEQ ID NO: 795392 - DNA, 15 bp, Homo sapiens
aggtactcagtccat

SEQ ID NO: 795393 - DNA, 15 bp, Homo sapiens
ggtactcagtccatg

SEQ ID NO: 795394 - DNA, 15 bp, Homo sapiens
gtactcagtccatga

SEQ ID NO: 795395 - DNA, 15 bp, Homo sapiens
tactcagtccatgat

SEQ ID NO: 795396 - DNA, 15 bp, Homo sapiens
actcagtccatgatt

SEQ ID NO: 795397 - DNA, 15 bp, Homo sapiens
ctcagtccatgattt

SEQ ID NO: 795398 - DNA, 15 bp, Homo sapiens
tcagtccatgatttc

SEQ ID NO: 795399 - DNA, 15 bp, Homo sapiens
cagtccatgatttca

SEQ ID NO: 795400 - DNA, 15 bp, Homo sapiens
agtccatgatttcag

SEQ ID NO: 795401 - DNA, 15 bp, Homo sapiens
gtccatgatttcaga

SEQ ID NO: 795402 - DNA, 15 bp, Homo sapiens
tccatgatttcagat

SEQ ID NO: 795403 - DNA, 15 bp, Homo sapiens
ccatgatttcagatt

SEQ ID NO: 795404 - DNA, 15 bp, Homo sapiens
catgatttcagatta

SEQ ID NO: 795405 - DNA, 15 bp, Homo sapiens
atgatttcagattag

SEQ ID NO: 795406 - DNA, 15 bp, Homo sapiens
tgatttcagattagg

SEQ ID NO: 795407 - DNA, 15 bp, Homo sapiens
gatttcagattaggg

SEQ ID NO: 795408 - DNA, 15 bp, Homo sapiens
atttcagattaggga

SEQ ID NO: 795409 - DNA, 15 bp, Homo sapiens
tttcagattagggag

SEQ ID NO: 795410 - DNA, 15 bp, Homo sapiens
ttcagattagggagg

SEQ ID NO: 795411 - DNA, 15 bp, Homo sapiens
tcagattagggaggc

SEQ ID NO: 795412 - DNA, 15 bp, Homo sapiens
cagattagggaggca

SEQ ID NO: 795413 - DNA, 15 bp, Homo sapiens
agattagggaggcac

SEQ ID NO: 795414 - DNA, 15 bp, Homo sapiens
gattagggaggcacc

SEQ ID NO: 795415 - DNA, 15 bp, Homo sapiens
attagggaggcacca

SEQ ID NO: 795416 - DNA, 15 bp, Homo sapiens
ttagggaggcaccac

SEQ ID NO: 795417 - DNA, 15 bp, Homo sapiens
tagggaggcaccacc

SEQ ID NO: 795418 - DNA, 15 bp, Homo sapiens
agggaggcaccacct

SEQ ID NO: 795419 - DNA, 15 bp, Homo sapiens
gggaggcaccacctg

SEQ ID NO: 795420 - DNA, 15 bp, Homo sapiens
ggaggcaccacctgg

SEQ ID NO: 795421 - DNA, 15 bp, Homo sapiens
gaggcaccacctggc

SEQ ID NO: 795422 - DNA, 15 bp, Homo sapiens
aggcaccacctggca

SEQ ID NO: 795423 - DNA, 15 bp, Homo sapiens
ggcaccacctggcaa

SEQ ID NO: 795424 - DNA, 15 bp, Homo sapiens
gcaccacctggcaaa

SEQ ID NO: 795425 - DNA, 15 bp, Homo sapiens
caccacctggcaaag

SEQ ID NO: 795426 - DNA, 15 bp, Homo sapiens
accacctggcaaagg

SEQ ID NO: 795427 - DNA, 15 bp, Homo sapiens
ccacctggcaaaggg

SEQ ID NO: 795428 - DNA, 15 bp, Homo sapiens
cacctggcaaagggg

SEQ ID NO: 795429 - DNA, 15 bp, Homo sapiens
acctggcaaaggggg

SEQ ID NO: 795430 - DNA, 15 bp, Homo sapiens
cctggcaaaggggga

SEQ ID NO: 795431 - DNA, 15 bp, Homo sapiens
ctggcaaagggggag

SEQ ID NO: 795432 - DNA, 15 bp, Homo sapiens
tggcaaagggggagc

SEQ ID NO: 795433 - DNA, 15 bp, Homo sapiens
ggcaaagggggagcc

SEQ ID NO: 795434 - DNA, 15 bp, Homo sapiens
gcaaagggggagcct

SEQ ID NO: 795435 - DNA, 15 bp, Homo sapiens
caaagggggagcctg

SEQ ID NO: 795436 - DNA, 15 bp, Homo sapiens
aaagggggagcctga

SEQ ID NO: 795437 - DNA, 15 bp, Homo sapiens
aagggggagcctgac

SEQ ID NO: 795438 - DNA, 15 bp, Homo sapiens
agggggagcctgaca

SEQ ID NO: 795439 - DNA, 15 bp, Homo sapiens
gggggagcctgacaa

SEQ ID NO: 795440 - DNA, 15 bp, Homo sapiens
ggggagcctgacaat

SEQ ID NO: 795441 - DNA, 15 bp, Homo sapiens
gggagcctgacaatg

SEQ ID NO: 795442 - DNA, 15 bp, Homo sapiens
ggagcctgacaatgc

SEQ ID NO: 795443 - DNA, 15 bp, Homo sapiens
gagcctgacaatgca

SEQ ID NO: 795444 - DNA, 15 bp, Homo sapiens
agcctgacaatgcag

SEQ ID NO: 795445 - DNA, 15 bp, Homo sapiens
gcctgacaatgcagg

SEQ ID NO: 795446 - DNA, 15 bp, Homo sapiens
cctgacaatgcaggg

SEQ ID NO: 795447 - DNA, 15 bp, Homo sapiens
ctgacaatgcagggc

SEQ ID NO: 795448 - DNA, 15 bp, Homo sapiens
tgacaatgcagggca

SEQ ID NO: 795449 - DNA, 15 bp, Homo sapiens
gacaatgcagggcag

SEQ ID NO: 795450 - DNA, 15 bp, Homo sapiens
acaatgcagggcagt

SEQ ID NO: 795451 - DNA, 15 bp, Homo sapiens
caatgcagggcagtt

SEQ ID NO: 795452 - DNA, 15 bp, Homo sapiens
aatgcagggcagttc

SEQ ID NO: 795453 - DNA, 15 bp, Homo sapiens
atgcagggcagttct

SEQ ID NO: 795454 - DNA, 15 bp, Homo sapiens
tgcagggcagttcta

SEQ ID NO: 795455 - DNA, 15 bp, Homo sapiens
gcagggcagttctaa

SEQ ID NO: 795456 - DNA, 15 bp, Homo sapiens
cagggcagttctaag

SEQ ID NO: 795457 - DNA, 15 bp, Homo sapiens
agggcagttctaagt

SEQ ID NO: 795458 - DNA, 15 bp, Homo sapiens
gggcagttctaagta

SEQ ID NO: 795459 - DNA, 15 bp, Homo sapiens
ggcagttctaagtac

SEQ ID NO: 795460 - DNA, 15 bp, Homo sapiens
gcagttctaagtacc

SEQ ID NO: 795461 - DNA, 15 bp, Homo sapiens
cagttctaagtacca

SEQ ID NO: 795462 - DNA, 15 bp, Homo sapiens
agttctaagtaccag

SEQ ID NO: 795463 - DNA, 15 bp, Homo sapiens
gttctaagtaccagg

SEQ ID NO: 795464 - DNA, 15 bp, Homo sapiens
ttctaagtaccaggc

SEQ ID NO: 795465 - DNA, 15 bp, Homo sapiens
tctaagtaccaggct

SEQ ID NO: 795466 - DNA, 15 bp, Homo sapiens
ctaagtaccaggctt

SEQ ID NO: 795467 - DNA, 15 bp, Homo sapiens
taagtaccaggcttg

SEQ ID NO: 795468 - DNA, 15 bp, Homo sapiens
aagtaccaggcttgg

SEQ ID NO: 795469 - DNA, 15 bp, Homo sapiens
agtaccaggcttggg

SEQ ID NO: 795470 - DNA, 15 bp, Homo sapiens
gtaccaggcttggga

SEQ ID NO: 795471 - DNA, 15 bp, Homo sapiens
taccaggcttgggac

SEQ ID NO: 795472 - DNA, 15 bp, Homo sapiens
accaggcttgggacc

SEQ ID NO: 795473 - DNA, 15 bp, Homo sapiens
ccaggcttgggaccg

SEQ ID NO: 795474 - DNA, 15 bp, Homo sapiens
caggcttgggaccga

SEQ ID NO: 795475 - DNA, 15 bp, Homo sapiens
aggcttgggaccgat

SEQ ID NO: 795476 - DNA, 15 bp, Homo sapiens
ggcttgggaccgatt

SEQ ID NO: 795477 - DNA, 15 bp, Homo sapiens
gcttgggaccgattc

SEQ ID NO: 795478 - DNA, 15 bp, Homo sapiens
cttgggaccgattct

SEQ ID NO: 795479 - DNA, 15 bp, Homo sapiens
ttgggaccgattcta

SEQ ID NO: 795480 - DNA, 15 bp, Homo sapiens
tgggaccgattctat

SEQ ID NO: 795481 - DNA, 15 bp, Homo sapiens
gggaccgattctatg

SEQ ID NO: 795482 - DNA, 15 bp, Homo sapiens
ggaccgattctatgg

SEQ ID NO: 795483 - DNA, 15 bp, Homo sapiens
gaccgattctatgga

SEQ ID NO: 795484 - DNA, 15 bp, Homo sapiens
accgattctatggag

SEQ ID NO: 795485 - DNA, 15 bp, Homo sapiens
ccgattctatggaga

SEQ ID NO: 795486 - DNA, 15 bp, Homo sapiens
cgattctatggagat

SEQ ID NO: 795487 - DNA, 15 bp, Homo sapiens
gattctatggagata

SEQ ID NO: 795488 - DNA, 15 bp, Homo sapiens
attctatggagatat

SEQ ID NO: 795489 - DNA, 15 bp, Homo sapiens
ttctatggagatatg

SEQ ID NO: 795490 - DNA, 15 bp, Homo sapiens
tctatggagatatgg

SEQ ID NO: 795491 - DNA, 15 bp, Homo sapiens
ctatggagatatggt

SEQ ID NO: 795492 - DNA, 15 bp, Homo sapiens
tatggagatatggta

SEQ ID NO: 795493 - DNA, 15 bp, Homo sapiens
atggagatatggtag

SEQ ID NO: 795494 - DNA, 15 bp, Homo sapiens
tggagatatggtaga

SEQ ID NO: 795495 - DNA, 15 bp, Homo sapiens
ggagatatggtagat

SEQ ID NO: 795496 - DNA, 15 bp, Homo sapiens
gagatatggtagatg

SEQ ID NO: 795497 - DNA, 15 bp, Homo sapiens
agatatggtagatgg

SEQ ID NO: 795498 - DNA, 15 bp, Homo sapiens
gatatggtagatggg

SEQ ID NO: 795499 - DNA, 15 bp, Homo sapiens
atatggtagatggga

SEQ ID NO: 795500 - DNA, 15 bp, Homo sapiens
tatggtagatgggac

SEQ ID NO: 795501 - DNA, 15 bp, Homo sapiens
atggtagatgggact

SEQ ID NO: 795502 - DNA, 15 bp, Homo sapiens
tggtagatgggacta

SEQ ID NO: 795503 - DNA, 15 bp, Homo sapiens
ggtagatgggactac

SEQ ID NO: 795504 - DNA, 15 bp, Homo sapiens
gtagatgggactacc

SEQ ID NO: 795505 - DNA, 15 bp, Homo sapiens
tagatgggactaccc

SEQ ID NO: 795506 - DNA, 15 bp, Homo sapiens
agatgggactaccct

SEQ ID NO: 795507 - DNA, 15 bp, Homo sapiens
gatgggactaccctc

SEQ ID NO: 795508 - DNA, 15 bp, Homo sapiens
atgggactaccctca

SEQ ID NO: 795509 - DNA, 15 bp, Homo sapiens
tgggactaccctcaa

SEQ ID NO: 795510 - DNA, 15 bp, Homo sapiens
gggactaccctcaac

SEQ ID NO: 795511 - DNA, 15 bp, Homo sapiens
ggactaccctcaact

SEQ ID NO: 795512 - DNA, 15 bp, Homo sapiens
gactaccctcaactg

SEQ ID NO: 795513 - DNA, 15 bp, Homo sapiens
actaccctcaactga

SEQ ID NO: 795514 - DNA, 15 bp, Homo sapiens
ctaccctcaactgaa

SEQ ID NO: 795515 - DNA, 15 bp, Homo sapiens
taccctcaactgaat

SEQ ID NO: 795516 - DNA, 15 bp, Homo sapiens
accctcaactgaata

SEQ ID NO: 795517 - DNA, 15 bp, Homo sapiens
ccctcaactgaataa

SEQ ID NO: 795518 - DNA, 15 bp, Homo sapiens
cctcaactgaataat

SEQ ID NO: 795519 - DNA, 15 bp, Homo sapiens
ctcaactgaataatg

SEQ ID NO: 795520 - DNA, 15 bp, Homo sapiens
tcaactgaataatgt

SEQ ID NO: 795521 - DNA, 15 bp, Homo sapiens
caactgaataatgtg

SEQ ID NO: 795522 - DNA, 15 bp, Homo sapiens
aactgaataatgtgt

SEQ ID NO: 795523 - DNA, 15 bp, Homo sapiens
actgaataatgtgtg

SEQ ID NO: 795524 - DNA, 15 bp, Homo sapiens
ctgaataatgtgtga

SEQ ID NO: 795525 - DNA, 15 bp, Homo sapiens
tgaataatgtgtgaa

SEQ ID NO: 795526 - DNA, 15 bp, Homo sapiens
gaataatgtgtgaag

SEQ ID NO: 795527 - DNA, 15 bp, Homo sapiens
aataatgtgtgaaga

SEQ ID NO: 795528 - DNA, 15 bp, Homo sapiens
ataatgtgtgaagag

SEQ ID NO: 795529 - DNA, 15 bp, Homo sapiens
taatgtgtgaagaga

SEQ ID NO: 795530 - DNA, 15 bp, Homo sapiens
aatgtgtgaagagaa

SEQ ID NO: 795531 - DNA, 15 bp, Homo sapiens
atgtgtgaagagaat

SEQ ID NO: 795532 - DNA, 15 bp, Homo sapiens
tgtgtgaagagaatt

SEQ ID NO: 795533 - DNA, 15 bp, Homo sapiens
gtgtgaagagaattt

SEQ ID NO: 795534 - DNA, 15 bp, Homo sapiens
tgtgaagagaattta

SEQ ID NO: 795535 - DNA, 15 bp, Homo sapiens
gtgaagagaatttaa

SEQ ID NO: 795536 - DNA, 15 bp, Homo sapiens
tgaagagaatttaag

SEQ ID NO: 795537 - DNA, 15 bp, Homo sapiens
gaagagaatttaaga

SEQ ID NO: 795538 - DNA, 15 bp, Homo sapiens
aagagaatttaagac

SEQ ID NO: 795539 - DNA, 15 bp, Homo sapiens
agagaatttaagacc

SEQ ID NO: 795540 - DNA, 15 bp, Homo sapiens
gagaatttaagacca

SEQ ID NO: 795541 - DNA, 15 bp, Homo sapiens
agaatttaagaccat

SEQ ID NO: 795542 - DNA, 15 bp, Homo sapiens
gaatttaagaccatg

SEQ ID NO: 795543 - DNA, 15 bp, Homo sapiens
aatttaagaccatgc

SEQ ID NO: 795544 - DNA, 15 bp, Homo sapiens
atttaagaccatgcc

SEQ ID NO: 795545 - DNA, 15 bp, Homo sapiens
tttaagaccatgcct

SEQ ID NO: 795546 - DNA, 15 bp, Homo sapiens
ttaagaccatgcctg

SEQ ID NO: 795547 - DNA, 15 bp, Homo sapiens
taagaccatgcctga

SEQ ID NO: 795548 - DNA, 15 bp, Homo sapiens
aagaccatgcctgat

SEQ ID NO: 795549 - DNA, 15 bp, Homo sapiens
agaccatgcctgata

SEQ ID NO: 795550 - DNA, 15 bp, Homo sapiens
gaccatgcctgatac

SEQ ID NO: 795551 - DNA, 15 bp, Homo sapiens
accatgcctgataca

SEQ ID NO: 795552 - DNA, 15 bp, Homo sapiens
ccatgcctgatacat

SEQ ID NO: 795553 - DNA, 15 bp, Homo sapiens
catgcctgatacata

SEQ ID NO: 795554 - DNA, 15 bp, Homo sapiens
atgcctgatacatag

SEQ ID NO: 795555 - DNA, 15 bp, Homo sapiens
tgcctgatacataga

SEQ ID NO: 795556 - DNA, 15 bp, Homo sapiens
gcctgatacatagag

SEQ ID NO: 795557 - DNA, 15 bp, Homo sapiens
cctgatacatagagg

SEQ ID NO: 795558 - DNA, 15 bp, Homo sapiens
ctgatacatagaggg

SEQ ID NO: 795559 - DNA, 15 bp, Homo sapiens
tgatacatagagggt

SEQ ID NO: 795560 - DNA, 15 bp, Homo sapiens
gatacatagagggtc

SEQ ID NO: 795561 - DNA, 15 bp, Homo sapiens
atacatagagggtcc

SEQ ID NO: 795562 - DNA, 15 bp, Homo sapiens
tacatagagggtcca

SEQ ID NO: 795563 - DNA, 15 bp, Homo sapiens
acatagagggtccag

SEQ ID NO: 795564 - DNA, 15 bp, Homo sapiens
catagagggtccagt

SEQ ID NO: 795565 - DNA, 15 bp, Homo sapiens
atagagggtccagtg

SEQ ID NO: 795566 - DNA, 15 bp, Homo sapiens
tagagggtccagtga

SEQ ID NO: 795567 - DNA, 15 bp, Homo sapiens
agagggtccagtgaa

SEQ ID NO: 795568 - DNA, 15 bp, Homo sapiens
gagggtccagtgaaa

SEQ ID NO: 795569 - DNA, 15 bp, Homo sapiens
agggtccagtgaaag

SEQ ID NO: 795570 - DNA, 15 bp, Homo sapiens
gggtccagtgaaagt

SEQ ID NO: 795571 - DNA, 15 bp, Homo sapiens
ggtccagtgaaagtt

SEQ ID NO: 795572 - DNA, 15 bp, Homo sapiens
gtccagtgaaagttg

SEQ ID NO: 795573 - DNA, 15 bp, Homo sapiens
tccagtgaaagttga

SEQ ID NO: 795574 - DNA, 15 bp, Homo sapiens
ccagtgaaagttgaa

SEQ ID NO: 795575 - DNA, 15 bp, Homo sapiens
cagtgaaagttgaag

SEQ ID NO: 795576 - DNA, 15 bp, Homo sapiens
agtgaaagttgaagg

SEQ ID NO: 795577 - DNA, 15 bp, Homo sapiens
gtgaaagttgaaggc

SEQ ID NO: 795578 - DNA, 15 bp, Homo sapiens
tgaaagttgaaggca

SEQ ID NO: 795579 - DNA, 15 bp, Homo sapiens
gaaagttgaaggcaa

SEQ ID NO: 795580 - DNA, 15 bp, Homo sapiens
aaagttgaaggcaaa

SEQ ID NO: 795581 - DNA, 15 bp, Homo sapiens
aagttgaaggcaaat

SEQ ID NO: 795582 - DNA, 15 bp, Homo sapiens
agttgaaggcaaata

SEQ ID NO: 795583 - DNA, 15 bp, Homo sapiens
gttgaaggcaaataa

SEQ ID NO: 795584 - DNA, 15 bp, Homo sapiens
ttgaaggcaaataac

SEQ ID NO: 795585 - DNA, 15 bp, Homo sapiens
tgaaggcaaataacc

SEQ ID NO: 795586 - DNA, 15 bp, Homo sapiens
gaaggcaaataaccc

SEQ ID NO: 795587 - DNA, 15 bp, Homo sapiens
aaggcaaataaccct

SEQ ID NO: 795588 - DNA, 15 bp, Homo sapiens
aggcaaataaccctg

SEQ ID NO: 795589 - DNA, 15 bp, Homo sapiens
ggcaaataaccctgg

SEQ ID NO: 795590 - DNA, 15 bp, Homo sapiens
gcaaataaccctggt

SEQ ID NO: 795591 - DNA, 15 bp, Homo sapiens
caaataaccctggta

SEQ ID NO: 795592 - DNA, 15 bp, Homo sapiens
aaataaccctggtaa

SEQ ID NO: 795593 - DNA, 15 bp, Homo sapiens
aataaccctggtaaa

SEQ ID NO: 795594 - DNA, 15 bp, Homo sapiens
ataaccctggtaaag

SEQ ID NO: 795595 - DNA, 15 bp, Homo sapiens
taaccctggtaaaga

SEQ ID NO: 795596 - DNA, 15 bp, Homo sapiens
aaccctggtaaagaa

SEQ ID NO: 795597 - DNA, 15 bp, Homo sapiens
accctggtaaagaag

SEQ ID NO: 795598 - DNA, 15 bp, Homo sapiens
ccctggtaaagaagg

SEQ ID NO: 795599 - DNA, 15 bp, Homo sapiens
cctggtaaagaaggc

SEQ ID NO: 795600 - DNA, 15 bp, Homo sapiens
ctggtaaagaaggca

SEQ ID NO: 795601 - DNA, 15 bp, Homo sapiens
tggtaaagaaggcag

SEQ ID NO: 795602 - DNA, 15 bp, Homo sapiens
ggtaaagaaggcagg

SEQ ID NO: 795603 - DNA, 15 bp, Homo sapiens
gtaaagaaggcagga

SEQ ID NO: 795604 - DNA, 15 bp, Homo sapiens
taaagaaggcaggaa

SEQ ID NO: 795605 - DNA, 15 bp, Homo sapiens
aaagaaggcaggaaa

SEQ ID NO: 795606 - DNA, 15 bp, Homo sapiens
aagaaggcaggaaac

SEQ ID NO: 795607 - DNA, 15 bp, Homo sapiens
agaaggcaggaaaca

SEQ ID NO: 795608 - DNA, 15 bp, Homo sapiens
gaaggcaggaaacac

SEQ ID NO: 795609 - DNA, 15 bp, Homo sapiens
aaggcaggaaacaca

SEQ ID NO: 795610 - DNA, 15 bp, Homo sapiens
aggcaggaaacacaa

SEQ ID NO: 795611 - DNA, 15 bp, Homo sapiens
ggcaggaaacacaag

SEQ ID NO: 795612 - DNA, 15 bp, Homo sapiens
gcaggaaacacaagg

SEQ ID NO: 795613 - DNA, 15 bp, Homo sapiens
caggaaacacaagga

SEQ ID NO: 795614 - DNA, 15 bp, Homo sapiens
aggaaacacaaggaa

SEQ ID NO: 795615 - DNA, 15 bp, Homo sapiens
ggaaacacaaggaag

SEQ ID NO: 795616 - DNA, 15 bp, Homo sapiens
gaaacacaaggaagc

SEQ ID NO: 795617 - DNA, 15 bp, Homo sapiens
aaacacaaggaagcc

SEQ ID NO: 795618 - DNA, 15 bp, Homo sapiens
aacacaaggaagcca

SEQ ID NO: 795619 - DNA, 15 bp, Homo sapiens
acacaaggaagccat

SEQ ID NO: 795620 - DNA, 15 bp, Homo sapiens
cacaaggaagccatt

SEQ ID NO: 795621 - DNA, 15 bp, Homo sapiens
acaaggaagccattc

SEQ ID NO: 795622 - DNA, 15 bp, Homo sapiens
caaggaagccattca

SEQ ID NO: 795623 - DNA, 15 bp, Homo sapiens
aaggaagccattcat

SEQ ID NO: 795624 - DNA, 15 bp, Homo sapiens
aggaagccattcatt

SEQ ID NO: 795625 - DNA, 15 bp, Homo sapiens
ggaagccattcattt

SEQ ID NO: 795626 - DNA, 15 bp, Homo sapiens
gaagccattcattta

SEQ ID NO: 795627 - DNA, 15 bp, Homo sapiens
aagccattcatttat

SEQ ID NO: 795628 - DNA, 15 bp, Homo sapiens
agccattcatttatt

SEQ ID NO: 795629 - DNA, 15 bp, Homo sapiens
gccattcatttattt

SEQ ID NO: 795630 - DNA, 15 bp, Homo sapiens
ccattcatttattta

SEQ ID NO: 795631 - DNA, 15 bp, Homo sapiens
cattcatttatttat

SEQ ID NO: 795632 - DNA, 15 bp, Homo sapiens
attcatttatttatt

SEQ ID NO: 795633 - DNA, 15 bp, Homo sapiens
tcatttatttattat

SEQ ID NO: 795634 - DNA, 15 bp, Homo sapiens
catttatttattatt

SEQ ID NO: 795635 - DNA, 15 bp, Homo sapiens
atttatttattattc

SEQ ID NO: 795636 - DNA, 15 bp, Homo sapiens
tttatttattattca

SEQ ID NO: 795637 - DNA, 15 bp, Homo sapiens
ttatttattattcat

SEQ ID NO: 795638 - DNA, 15 bp, Homo sapiens
tatttattattcatt

SEQ ID NO: 795639 - DNA, 15 bp, Homo sapiens
atttattattcattc

SEQ ID NO: 795640 - DNA, 15 bp, Homo sapiens
tttattattcattca

SEQ ID NO: 795641 - DNA, 15 bp, Homo sapiens
ttattattcattcaa

SEQ ID NO: 795642 - DNA, 15 bp, Homo sapiens
tattattcattcaat

SEQ ID NO: 795643 - DNA, 15 bp, Homo sapiens
attattcattcaatc

SEQ ID NO: 795644 - DNA, 15 bp, Homo sapiens
ttattcattcaatca

SEQ ID NO: 795645 - DNA, 15 bp, Homo sapiens
tattcattcaatcaa

SEQ ID NO: 795646 - DNA, 15 bp, Homo sapiens
attcattcaatcaac

SEQ ID NO: 795647 - DNA, 15 bp, Homo sapiens
ttcattcaatcaaca

SEQ ID NO: 795648 - DNA, 15 bp, Homo sapiens
tcattcaatcaacaa

SEQ ID NO: 795649 - DNA, 15 bp, Homo sapiens
cattcaatcaacaaa

SEQ ID NO: 795650 - DNA, 15 bp, Homo sapiens
attcaatcaacaaat

SEQ ID NO: 795651 - DNA, 15 bp, Homo sapiens
ttcaatcaacaaata

SEQ ID NO: 795652 - DNA, 15 bp, Homo sapiens
tcaatcaacaaatat

SEQ ID NO: 795653 - DNA, 15 bp, Homo sapiens
caatcaacaaatatt

SEQ ID NO: 795654 - DNA, 15 bp, Homo sapiens
aatcaacaaatattt

SEQ ID NO: 795655 - DNA, 15 bp, Homo sapiens
atcaacaaatatttc

SEQ ID NO: 795656 - DNA, 15 bp, Homo sapiens
tcaacaaatatttct

SEQ ID NO: 795657 - DNA, 15 bp, Homo sapiens
caacaaatatttctt

SEQ ID NO: 795658 - DNA, 15 bp, Homo sapiens
aacaaatatttctta

SEQ ID NO: 795659 - DNA, 15 bp, Homo sapiens
acaaatatttcttaa

SEQ ID NO: 795660 - DNA, 15 bp, Homo sapiens
caaatatttcttaaa

SEQ ID NO: 795661 - DNA, 15 bp, Homo sapiens
aaatatttcttaaat

SEQ ID NO: 795662 - DNA, 15 bp, Homo sapiens
aatatttcttaaata

SEQ ID NO: 795663 - DNA, 15 bp, Homo sapiens
atatttcttaaatat

SEQ ID NO: 795664 - DNA, 15 bp, Homo sapiens
tatttcttaaatatt

SEQ ID NO: 795665 - DNA, 15 bp, Homo sapiens
atttcttaaatattt

SEQ ID NO: 795666 - DNA, 15 bp, Homo sapiens
tttcttaaatattta

SEQ ID NO: 795667 - DNA, 15 bp, Homo sapiens
ttcttaaatatttat

SEQ ID NO: 795668 - DNA, 15 bp, Homo sapiens
tcttaaatatttata

SEQ ID NO: 795669 - DNA, 15 bp, Homo sapiens
cttaaatatttatac

SEQ ID NO: 795670 - DNA, 15 bp, Homo sapiens
ttaaatatttatacc

SEQ ID NO: 795671 - DNA, 15 bp, Homo sapiens
taaatatttatacca

SEQ ID NO: 795672 - DNA, 15 bp, Homo sapiens
aaatatttataccaa

SEQ ID NO: 795673 - DNA, 15 bp, Homo sapiens
aatatttataccaac

SEQ ID NO: 795674 - DNA, 15 bp, Homo sapiens
atatttataccaaca

SEQ ID NO: 795675 - DNA, 15 bp, Homo sapiens
tatttataccaacaa

SEQ ID NO: 795676 - DNA, 15 bp, Homo sapiens
atttataccaacaaa

SEQ ID NO: 795677 - DNA, 15 bp, Homo sapiens
tttataccaacaaag

SEQ ID NO: 795678 - DNA, 15 bp, Homo sapiens
ttataccaacaaagc

SEQ ID NO: 795679 - DNA, 15 bp, Homo sapiens
tataccaacaaagca

SEQ ID NO: 795680 - DNA, 15 bp, Homo sapiens
ataccaacaaagcat

SEQ ID NO: 795681 - DNA, 15 bp, Homo sapiens
taccaacaaagcatg

SEQ ID NO: 795682 - DNA, 15 bp, Homo sapiens
accaacaaagcatgg

SEQ ID NO: 795683 - DNA, 15 bp, Homo sapiens
ccaacaaagcatgga

SEQ ID NO: 795684 - DNA, 15 bp, Homo sapiens
caacaaagcatggaa

SEQ ID NO: 795685 - DNA, 15 bp, Homo sapiens
aacaaagcatggaac

SEQ ID NO: 795686 - DNA, 15 bp, Homo sapiens
acaaagcatggaacc

SEQ ID NO: 795687 - DNA, 15 bp, Homo sapiens
caaagcatggaacct

SEQ ID NO: 795688 - DNA, 15 bp, Homo sapiens
aaagcatggaacctc

SEQ ID NO: 795689 - DNA, 15 bp, Homo sapiens
aagcatggaacctct

SEQ ID NO: 795690 - DNA, 15 bp, Homo sapiens
agcatggaacctcta

SEQ ID NO: 795691 - DNA, 15 bp, Homo sapiens
gcatggaacctctag

SEQ ID NO: 795692 - DNA, 15 bp, Homo sapiens
catggaacctctagc

SEQ ID NO: 795693 - DNA, 15 bp, Homo sapiens
atggaacctctagcc

SEQ ID NO: 795694 - DNA, 15 bp, Homo sapiens
tggaacctctagcca

SEQ ID NO: 795695 - DNA, 15 bp, Homo sapiens
ggaacctctagccaa

SEQ ID NO: 795696 - DNA, 15 bp, Homo sapiens
gaacctctagccaaa

SEQ ID NO: 795697 - DNA, 15 bp, Homo sapiens
aacctctagccaaac

SEQ ID NO: 795698 - DNA, 15 bp, Homo sapiens
acctctagccaaact

SEQ ID NO: 795699 - DNA, 15 bp, Homo sapiens
cctctagccaaactc

SEQ ID NO: 795700 - DNA, 15 bp, Homo sapiens
ctctagccaaactct

SEQ ID NO: 795701 - DNA, 15 bp, Homo sapiens
tctagccaaactctc

SEQ ID NO: 795702 - DNA, 15 bp, Homo sapiens
ctagccaaactctct

SEQ ID NO: 795703 - DNA, 15 bp, Homo sapiens
tagccaaactctctg

SEQ ID NO: 795704 - DNA, 15 bp, Homo sapiens
agccaaactctctgg

SEQ ID NO: 795705 - DNA, 15 bp, Homo sapiens
gccaaactctctggt

SEQ ID NO: 795706 - DNA, 15 bp, Homo sapiens
ccaaactctctggtt

SEQ ID NO: 795707 - DNA, 15 bp, Homo sapiens
caaactctctggttt

SEQ ID NO: 795708 - DNA, 15 bp, Homo sapiens
aaactctctggtttc

SEQ ID NO: 795709 - DNA, 15 bp, Homo sapiens
aactctctggtttca

SEQ ID NO: 795710 - DNA, 15 bp, Homo sapiens
actctctggtttcaa

SEQ ID NO: 795711 - DNA, 15 bp, Homo sapiens
ctctctggtttcaaa

SEQ ID NO: 795712 - DNA, 15 bp, Homo sapiens
tctctggtttcaaat

SEQ ID NO: 795713 - DNA, 15 bp, Homo sapiens
ctctggtttcaaatc

SEQ ID NO: 795714 - DNA, 15 bp, Homo sapiens
tctggtttcaaatcc

SEQ ID NO: 795715 - DNA, 15 bp, Homo sapiens
ctggtttcaaatcct

SEQ ID NO: 795716 - DNA, 15 bp, Homo sapiens
tggtttcaaatcctg

SEQ ID NO: 795717 - DNA, 15 bp, Homo sapiens
ggtttcaaatcctgg

SEQ ID NO: 795718 - DNA, 15 bp, Homo sapiens
gtttcaaatcctggc

SEQ ID NO: 795719 - DNA, 15 bp, Homo sapiens
tttcaaatcctggct

SEQ ID NO: 795720 - DNA, 15 bp, Homo sapiens
ttcaaatcctggctg

SEQ ID NO: 795721 - DNA, 15 bp, Homo sapiens
tcaaatcctggctgt

SEQ ID NO: 795722 - DNA, 15 bp, Homo sapiens
caaatcctggctgtt

SEQ ID NO: 795723 - DNA, 15 bp, Homo sapiens
aaatcctggctgttt

SEQ ID NO: 795724 - DNA, 15 bp, Homo sapiens
aatcctggctgtttt

SEQ ID NO: 795725 - DNA, 15 bp, Homo sapiens
atcctggctgtttta

SEQ ID NO: 795726 - DNA, 15 bp, Homo sapiens
tcctggctgttttac

SEQ ID NO: 795727 - DNA, 15 bp, Homo sapiens
cctggctgttttaca

SEQ ID NO: 795728 - DNA, 15 bp, Homo sapiens
ctggctgttttacaa

SEQ ID NO: 795729 - DNA, 15 bp, Homo sapiens
tggctgttttacaat

SEQ ID NO: 795730 - DNA, 15 bp, Homo sapiens
ggctgttttacaata

SEQ ID NO: 795731 - DNA, 15 bp, Homo sapiens
gctgttttacaatat

SEQ ID NO: 795732 - DNA, 15 bp, Homo sapiens
ctgttttacaatatc

SEQ ID NO: 795733 - DNA, 15 bp, Homo sapiens
tgttttacaatatct

SEQ ID NO: 795734 - DNA, 15 bp, Homo sapiens
gttttacaatatctg

SEQ ID NO: 795735 - DNA, 15 bp, Homo sapiens
ttttacaatatctgt

SEQ ID NO: 795736 - DNA, 15 bp, Homo sapiens
tttacaatatctgta

SEQ ID NO: 795737 - DNA, 15 bp, Homo sapiens
ttacaatatctgtat

SEQ ID NO: 795738 - DNA, 15 bp, Homo sapiens
tacaatatctgtata

SEQ ID NO: 795739 - DNA, 15 bp, Homo sapiens
acaatatctgtataa

SEQ ID NO: 795740 - DNA, 15 bp, Homo sapiens
caatatctgtataac

SEQ ID NO: 795741 - DNA, 15 bp, Homo sapiens
aatatctgtataacc

SEQ ID NO: 795742 - DNA, 15 bp, Homo sapiens
atatctgtataacct

SEQ ID NO: 795743 - DNA, 15 bp, Homo sapiens
tatctgtataacctt

SEQ ID NO: 795744 - DNA, 15 bp, Homo sapiens
atctgtataaccttg

SEQ ID NO: 795745 - DNA, 15 bp, Homo sapiens
tctgtataaccttga

SEQ ID NO: 795746 - DNA, 15 bp, Homo sapiens
ctgtataaccttgag

SEQ ID NO: 795747 - DNA, 15 bp, Homo sapiens
tgtataaccttgagc

SEQ ID NO: 795748 - DNA, 15 bp, Homo sapiens
gtataaccttgagca

SEQ ID NO: 795749 - DNA, 15 bp, Homo sapiens
tataaccttgagcaa

SEQ ID NO: 795750 - DNA, 15 bp, Homo sapiens
ataaccttgagcaag

SEQ ID NO: 795751 - DNA, 15 bp, Homo sapiens
taaccttgagcaagt

SEQ ID NO: 795752 - DNA, 15 bp, Homo sapiens
aaccttgagcaagtt

SEQ ID NO: 795753 - DNA, 15 bp, Homo sapiens
accttgagcaagtta

SEQ ID NO: 795754 - DNA, 15 bp, Homo sapiens
ccttgagcaagttac

SEQ ID NO: 795755 - DNA, 15 bp, Homo sapiens
cttgagcaagttact

SEQ ID NO: 795756 - DNA, 15 bp, Homo sapiens
ttgagcaagttactt

SEQ ID NO: 795757 - DNA, 15 bp, Homo sapiens
tgagcaagttactta

SEQ ID NO: 795758 - DNA, 15 bp, Homo sapiens
gagcaagttacttaa

SEQ ID NO: 795759 - DNA, 15 bp, Homo sapiens
agcaagttacttaat

SEQ ID NO: 795760 - DNA, 15 bp, Homo sapiens
gcaagttacttaatt

SEQ ID NO: 795761 - DNA, 15 bp, Homo sapiens
caagttacttaatta

SEQ ID NO: 795762 - DNA, 15 bp, Homo sapiens
aagttacttaattat

SEQ ID NO: 795763 - DNA, 15 bp, Homo sapiens
agttacttaattatt

SEQ ID NO: 795764 - DNA, 15 bp, Homo sapiens
gttacttaattattc

SEQ ID NO: 795765 - DNA, 15 bp, Homo sapiens
ttacttaattattct

SEQ ID NO: 795766 - DNA, 15 bp, Homo sapiens
tacttaattattctc

SEQ ID NO: 795767 - DNA, 15 bp, Homo sapiens
acttaattattctct

SEQ ID NO: 795768 - DNA, 15 bp, Homo sapiens
cttaattattctctg

SEQ ID NO: 795769 - DNA, 15 bp, Homo sapiens
ttaattattctctgt

SEQ ID NO: 795770 - DNA, 15 bp, Homo sapiens
taattattctctgtg

SEQ ID NO: 795771 - DNA, 15 bp, Homo sapiens
aattattctctgtgc

SEQ ID NO: 795772 - DNA, 15 bp, Homo sapiens
attattctctgtgcc

SEQ ID NO: 795773 - DNA, 15 bp, Homo sapiens
ttattctctgtgcct

SEQ ID NO: 795774 - DNA, 15 bp, Homo sapiens
tattctctgtgcctc

SEQ ID NO: 795775 - DNA, 15 bp, Homo sapiens
attctctgtgcctcc

SEQ ID NO: 795776 - DNA, 15 bp, Homo sapiens
ttctctgtgcctcca

SEQ ID NO: 795777 - DNA, 15 bp, Homo sapiens
tctctgtgcctccat

SEQ ID NO: 795778 - DNA, 15 bp, Homo sapiens
ctctgtgcctccatt

SEQ ID NO: 795779 - DNA, 15 bp, Homo sapiens
tctgtgcctccattt

SEQ ID NO: 795780 - DNA, 15 bp, Homo sapiens
ctgtgcctccatttc

SEQ ID NO: 795781 - DNA, 15 bp, Homo sapiens
tgtgcctccatttct

SEQ ID NO: 795782 - DNA, 15 bp, Homo sapiens
gtgcctccatttctt

SEQ ID NO: 795783 - DNA, 15 bp, Homo sapiens
tgcctccatttcttc

SEQ ID NO: 795784 - DNA, 15 bp, Homo sapiens
gcctccatttcttca

SEQ ID NO: 795785 - DNA, 15 bp, Homo sapiens
cctccatttcttcat

SEQ ID NO: 795786 - DNA, 15 bp, Homo sapiens
ctccatttcttcatt

SEQ ID NO: 795787 - DNA, 15 bp, Homo sapiens
tccatttcttcattt

SEQ ID NO: 795788 - DNA, 15 bp, Homo sapiens
ccatttcttcatttg

SEQ ID NO: 795789 - DNA, 15 bp, Homo sapiens
catttcttcatttgt

SEQ ID NO: 795790 - DNA, 15 bp, Homo sapiens
atttcttcatttgta

SEQ ID NO: 795791 - DNA, 15 bp, Homo sapiens
tttcttcatttgtaa

SEQ ID NO: 795792 - DNA, 15 bp, Homo sapiens
ttcttcatttgtaac

SEQ ID NO: 795793 - DNA, 15 bp, Homo sapiens
tcttcatttgtaaca

SEQ ID NO: 795794 - DNA, 15 bp, Homo sapiens
cttcatttgtaacat

SEQ ID NO: 795795 - DNA, 15 bp, Homo sapiens
ttcatttgtaacatg

SEQ ID NO: 795796 - DNA, 15 bp, Homo sapiens
tcatttgtaacatgg

SEQ ID NO: 795797 - DNA, 15 bp, Homo sapiens
catttgtaacatggg

SEQ ID NO: 795798 - DNA, 15 bp, Homo sapiens
atttgtaacatggga

SEQ ID NO: 795799 - DNA, 15 bp, Homo sapiens
tttgtaacatgggaa

SEQ ID NO: 795800 - DNA, 15 bp, Homo sapiens
ttgtaacatgggaat

SEQ ID NO: 795801 - DNA, 15 bp, Homo sapiens
tgtaacatgggaata

SEQ ID NO: 795802 - DNA, 15 bp, Homo sapiens
gtaacatgggaataa

SEQ ID NO: 795803 - DNA, 15 bp, Homo sapiens
taacatgggaataat

SEQ ID NO: 795804 - DNA, 15 bp, Homo sapiens
aacatgggaataatc

SEQ ID NO: 795805 - DNA, 15 bp, Homo sapiens
acatgggaataatca

SEQ ID NO: 795806 - DNA, 15 bp, Homo sapiens
catgggaataatcaa

SEQ ID NO: 795807 - DNA, 15 bp, Homo sapiens
atgggaataatcaaa

SEQ ID NO: 795808 - DNA, 15 bp, Homo sapiens
tgggaataatcaaaa

SEQ ID NO: 795809 - DNA, 15 bp, Homo sapiens
gggaataatcaaaaa

SEQ ID NO: 795810 - DNA, 15 bp, Homo sapiens
ggaataatcaaaaag

SEQ ID NO: 795811 - DNA, 15 bp, Homo sapiens
gaataatcaaaaaga

SEQ ID NO: 795812 - DNA, 15 bp, Homo sapiens
aataatcaaaaagaa

SEQ ID NO: 795813 - DNA, 15 bp, Homo sapiens
ataatcaaaaagaat

SEQ ID NO: 795814 - DNA, 15 bp, Homo sapiens
taatcaaaaagaata

SEQ ID NO: 795815 - DNA, 15 bp, Homo sapiens
aatcaaaaagaataa

SEQ ID NO: 795816 - DNA, 15 bp, Homo sapiens
atcaaaaagaataaa

SEQ ID NO: 795817 - DNA, 15 bp, Homo sapiens
tcaaaaagaataaat

SEQ ID NO: 795818 - DNA, 15 bp, Homo sapiens
caaaaagaataaatg

SEQ ID NO: 795819 - DNA, 15 bp, Homo sapiens
aaaaagaataaatga

SEQ ID NO: 795820 - DNA, 15 bp, Homo sapiens
aaaagaataaatgaa

SEQ ID NO: 795821 - DNA, 15 bp, Homo sapiens
aaagaataaatgaag

SEQ ID NO: 795822 - DNA, 15 bp, Homo sapiens
aagaataaatgaaga

SEQ ID NO: 795823 - DNA, 15 bp, Homo sapiens
agaataaatgaagat

SEQ ID NO: 795824 - DNA, 15 bp, Homo sapiens
gaataaatgaagatt

SEQ ID NO: 795825 - DNA, 15 bp, Homo sapiens
aataaatgaagattg

SEQ ID NO: 795826 - DNA, 15 bp, Homo sapiens
ataaatgaagattgt

SEQ ID NO: 795827 - DNA, 15 bp, Homo sapiens
taaatgaagattgtt

SEQ ID NO: 795828 - DNA, 15 bp, Homo sapiens
aaatgaagattgtta

SEQ ID NO: 795829 - DNA, 15 bp, Homo sapiens
aatgaagattgttat

SEQ ID NO: 795830 - DNA, 15 bp, Homo sapiens
atgaagattgttatg

SEQ ID NO: 795831 - DNA, 15 bp, Homo sapiens
tgaagattgttatga

SEQ ID NO: 795832 - DNA, 15 bp, Homo sapiens
gaagattgttatgaa

SEQ ID NO: 795833 - DNA, 15 bp, Homo sapiens
aagattgttatgaag

SEQ ID NO: 795834 - DNA, 15 bp, Homo sapiens
agattgttatgaaga

SEQ ID NO: 795835 - DNA, 15 bp, Homo sapiens
gattgttatgaagac

SEQ ID NO: 795836 - DNA, 15 bp, Homo sapiens
attgttatgaagact

SEQ ID NO: 795837 - DNA, 15 bp, Homo sapiens
ttgttatgaagacta

SEQ ID NO: 795838 - DNA, 15 bp, Homo sapiens
tgttatgaagactaa

SEQ ID NO: 795839 - DNA, 15 bp, Homo sapiens
gttatgaagactaac

SEQ ID NO: 795840 - DNA, 15 bp, Homo sapiens
ttatgaagactaaca

SEQ ID NO: 795841 - DNA, 15 bp, Homo sapiens
tatgaagactaacac

SEQ ID NO: 795842 - DNA, 15 bp, Homo sapiens
atgaagactaacaca

SEQ ID NO: 795843 - DNA, 15 bp, Homo sapiens
tgaagactaacacat

SEQ ID NO: 795844 - DNA, 15 bp, Homo sapiens
gaagactaacacatg

SEQ ID NO: 795845 - DNA, 15 bp, Homo sapiens
aagactaacacatga

SEQ ID NO: 795846 - DNA, 15 bp, Homo sapiens
agactaacacatgat

SEQ ID NO: 795847 - DNA, 15 bp, Homo sapiens
gactaacacatgatt

SEQ ID NO: 795848 - DNA, 15 bp, Homo sapiens
actaacacatgattg

SEQ ID NO: 795849 - DNA, 15 bp, Homo sapiens
ctaacacatgattgt

SEQ ID NO: 795850 - DNA, 15 bp, Homo sapiens
taacacatgattgtt

SEQ ID NO: 795851 - DNA, 15 bp, Homo sapiens
aacacatgattgtta

SEQ ID NO: 795852 - DNA, 15 bp, Homo sapiens
acacatgattgttat

SEQ ID NO: 795853 - DNA, 15 bp, Homo sapiens
cacatgattgttatt

SEQ ID NO: 795854 - DNA, 15 bp, Homo sapiens
acatgattgttatta

SEQ ID NO: 795855 - DNA, 15 bp, Homo sapiens
catgattgttattat

SEQ ID NO: 795856 - DNA, 15 bp, Homo sapiens
atgattgttattatt

SEQ ID NO: 795857 - DNA, 15 bp, Homo sapiens
tgattgttattatta

SEQ ID NO: 795858 - DNA, 15 bp, Homo sapiens
gattgttattattat

SEQ ID NO: 795859 - DNA, 15 bp, Homo sapiens
attgttattattatc

SEQ ID NO: 795860 - DNA, 15 bp, Homo sapiens
ttgttattattatct

SEQ ID NO: 795861 - DNA, 15 bp, Homo sapiens
tgttattattatctt

SEQ ID NO: 795862 - DNA, 15 bp, Homo sapiens
gttattattatcttt

SEQ ID NO: 795863 - DNA, 15 bp, Homo sapiens
ttattattatctttt

SEQ ID NO: 795864 - DNA, 15 bp, Homo sapiens
tattattatcttttt

SEQ ID NO: 795865 - DNA, 15 bp, Homo sapiens
attattatctttttg

SEQ ID NO: 795866 - DNA, 15 bp, Homo sapiens
ttattatctttttgt

SEQ ID NO: 795867 - DNA, 15 bp, Homo sapiens
tattatctttttgtt

SEQ ID NO: 795868 - DNA, 15 bp, Homo sapiens
attatctttttgttc

SEQ ID NO: 795869 - DNA, 15 bp, Homo sapiens
ttatctttttgttca

SEQ ID NO: 795870 - DNA, 15 bp, Homo sapiens
tatctttttgttcat

SEQ ID NO: 795871 - DNA, 15 bp, Homo sapiens
atctttttgttcatt

SEQ ID NO: 795872 - DNA, 15 bp, Homo sapiens
tctttttgttcattt

SEQ ID NO: 795873 - DNA, 15 bp, Homo sapiens
ctttttgttcattta

SEQ ID NO: 795874 - DNA, 15 bp, Homo sapiens
tttttgttcatttat

SEQ ID NO: 795875 - DNA, 15 bp, Homo sapiens
ttttgttcatttatt

SEQ ID NO: 795876 - DNA, 15 bp, Homo sapiens
tgttcatttatttag

SEQ ID NO: 795877 - DNA, 15 bp, Homo sapiens
gttcatttatttagc

SEQ ID NO: 795878 - DNA, 15 bp, Homo sapiens
ttcatttatttagct

SEQ ID NO: 795879 - DNA, 15 bp, Homo sapiens
tcatttatttagctg

SEQ ID NO: 795880 - DNA, 15 bp, Homo sapiens
catttatttagctgt

SEQ ID NO: 795881 - DNA, 15 bp, Homo sapiens
atttatttagctgtg

SEQ ID NO: 795882 - DNA, 15 bp, Homo sapiens
tttatttagctgtgt

SEQ ID NO: 795883 - DNA, 15 bp, Homo sapiens
ttatttagctgtgtc

SEQ ID NO: 795884 - DNA, 15 bp, Homo sapiens
tatttagctgtgtcc

SEQ ID NO: 795885 - DNA, 15 bp, Homo sapiens
atttagctgtgtcct

SEQ ID NO: 795886 - DNA, 15 bp, Homo sapiens
tttagctgtgtcctt

SEQ ID NO: 795887 - DNA, 15 bp, Homo sapiens
ttagctgtgtcctta

SEQ ID NO: 795888 - DNA, 15 bp, Homo sapiens
tagctgtgtccttag

SEQ ID NO: 795889 - DNA, 15 bp, Homo sapiens
agctgtgtccttagt

SEQ ID NO: 795890 - DNA, 15 bp, Homo sapiens
gctgtgtccttagtc

SEQ ID NO: 795891 - DNA, 15 bp, Homo sapiens
ctgtgtccttagtct

SEQ ID NO: 795892 - DNA, 15 bp, Homo sapiens
tgtgtccttagtctg

SEQ ID NO: 795893 - DNA, 15 bp, Homo sapiens
gtgtccttagtctgt

SEQ ID NO: 795894 - DNA, 15 bp, Homo sapiens
tgtccttagtctgtt

SEQ ID NO: 795895 - DNA, 15 bp, Homo sapiens
gtccttagtctgttg

SEQ ID NO: 795896 - DNA, 15 bp, Homo sapiens
tccttagtctgttgc

SEQ ID NO: 795897 - DNA, 15 bp, Homo sapiens
ccttagtctgttgct

SEQ ID NO: 795898 - DNA, 15 bp, Homo sapiens
cttagtctgttgctt

SEQ ID NO: 795899 - DNA, 15 bp, Homo sapiens
ttagtctgttgcttg

SEQ ID NO: 795900 - DNA, 15 bp, Homo sapiens
tagtctgttgcttga

SEQ ID NO: 795901 - DNA, 15 bp, Homo sapiens
agtctgttgcttgat

SEQ ID NO: 795902 - DNA, 15 bp, Homo sapiens
gtctgttgcttgatt

SEQ ID NO: 795903 - DNA, 15 bp, Homo sapiens
tctgttgcttgattg

SEQ ID NO: 795904 - DNA, 15 bp, Homo sapiens
ctgttgcttgattgg

SEQ ID NO: 795905 - DNA, 15 bp, Homo sapiens
tgttgcttgattggt

SEQ ID NO: 795906 - DNA, 15 bp, Homo sapiens
gttgcttgattggtg

SEQ ID NO: 795907 - DNA, 15 bp, Homo sapiens
ttgcttgattggtgt

SEQ ID NO: 795908 - DNA, 15 bp, Homo sapiens
tgcttgattggtgtg

SEQ ID NO: 795909 - DNA, 15 bp, Homo sapiens
gcttgattggtgtgg

SEQ ID NO: 795910 - DNA, 15 bp, Homo sapiens
cttgattggtgtggt

SEQ ID NO: 795911 - DNA, 15 bp, Homo sapiens
ttgattggtgtggtg

SEQ ID NO: 795912 - DNA, 15 bp, Homo sapiens
tgattggtgtggtgt

SEQ ID NO: 795913 - DNA, 15 bp, Homo sapiens
gattggtgtggtgtt

SEQ ID NO: 795914 - DNA, 15 bp, Homo sapiens
attggtgtggtgttg

SEQ ID NO: 795915 - DNA, 15 bp, Homo sapiens
ttggtgtggtgttgg

SEQ ID NO: 795916 - DNA, 15 bp, Homo sapiens
tggtgtggtgttggg

SEQ ID NO: 795917 - DNA, 15 bp, Homo sapiens
ggtgtggtgttgggg

SEQ ID NO: 795918 - DNA, 15 bp, Homo sapiens
gtgtggtgttgggga

SEQ ID NO: 795919 - DNA, 15 bp, Homo sapiens
tgtggtgttggggat

SEQ ID NO: 795920 - DNA, 15 bp, Homo sapiens
gtggtgttggggatg

SEQ ID NO: 795921 - DNA, 15 bp, Homo sapiens
tggtgttggggatgt

SEQ ID NO: 795922 - DNA, 15 bp, Homo sapiens
ggtgttggggatgtg

SEQ ID NO: 795923 - DNA, 15 bp, Homo sapiens
gtgttggggatgtgg

SEQ ID NO: 795924 - DNA, 15 bp, Homo sapiens
tgttggggatgtggc

SEQ ID NO: 795925 - DNA, 15 bp, Homo sapiens
gttggggatgtggcc

SEQ ID NO: 795926 - DNA, 15 bp, Homo sapiens
ttggggatgtggcca

SEQ ID NO: 795927 - DNA, 15 bp, Homo sapiens
tggggatgtggccaa

SEQ ID NO: 795928 - DNA, 15 bp, Homo sapiens
ggggatgtggccaac

SEQ ID NO: 795929 - DNA, 15 bp, Homo sapiens
gggatgtggccaacg

SEQ ID NO: 795930 - DNA, 15 bp, Homo sapiens
ggatgtggccaacgg

SEQ ID NO: 795931 - DNA, 15 bp, Homo sapiens
gatgtggccaacgga

SEQ ID NO: 795932 - DNA, 15 bp, Homo sapiens
atgtggccaacggag

SEQ ID NO: 795933 - DNA, 15 bp, Homo sapiens
tgtggccaacggaga

SEQ ID NO: 795934 - DNA, 15 bp, Homo sapiens
gtggccaacggagac

SEQ ID NO: 795935 - DNA, 15 bp, Homo sapiens
tggccaacggagaca

SEQ ID NO: 795936 - DNA, 15 bp, Homo sapiens
ggccaacggagacag

SEQ ID NO: 795937 - DNA, 15 bp, Homo sapiens
gccaacggagacagg

SEQ ID NO: 795938 - DNA, 15 bp, Homo sapiens
ccaacggagacagga

SEQ ID NO: 795939 - DNA, 15 bp, Homo sapiens
caacggagacaggaa

SEQ ID NO: 795940 - DNA, 15 bp, Homo sapiens
aacggagacaggaaa

SEQ ID NO: 795941 - DNA, 15 bp, Homo sapiens
acggagacaggaaag

SEQ ID NO: 795942 - DNA, 15 bp, Homo sapiens
cggagacaggaaagg

SEQ ID NO: 795943 - DNA, 15 bp, Homo sapiens
ggagacaggaaaggt

SEQ ID NO: 795944 - DNA, 15 bp, Homo sapiens
gagacaggaaaggtc

SEQ ID NO: 795945 - DNA, 15 bp, Homo sapiens
agacaggaaaggtct

SEQ ID NO: 795946 - DNA, 15 bp, Homo sapiens
gacaggaaaggtctc

SEQ ID NO: 795947 - DNA, 15 bp, Homo sapiens
acaggaaaggtctcc

SEQ ID NO: 795948 - DNA, 15 bp, Homo sapiens
caggaaaggtctccg

SEQ ID NO: 795949 - DNA, 15 bp, Homo sapiens
aggaaaggtctccgt

SEQ ID NO: 795950 - DNA, 15 bp, Homo sapiens
ggaaaggtctccgtc

SEQ ID NO: 795951 - DNA, 15 bp, Homo sapiens
gaaaggtctccgtct

SEQ ID NO: 795952 - DNA, 15 bp, Homo sapiens
aaaggtctccgtctt

SEQ ID NO: 795953 - DNA, 15 bp, Homo sapiens
aaggtctccgtcttt

SEQ ID NO: 795954 - DNA, 15 bp, Homo sapiens
aggtctccgtcttta

SEQ ID NO: 795955 - DNA, 15 bp, Homo sapiens
ggtctccgtctttac

SEQ ID NO: 795956 - DNA, 15 bp, Homo sapiens
gtctccgtctttacc

SEQ ID NO: 795957 - DNA, 15 bp, Homo sapiens
tctccgtctttaccc

SEQ ID NO: 795958 - DNA, 15 bp, Homo sapiens
ctccgtctttaccca

SEQ ID NO: 795959 - DNA, 15 bp, Homo sapiens
tccgtctttacccac

SEQ ID NO: 795960 - DNA, 15 bp, Homo sapiens
ccgtctttacccacc

SEQ ID NO: 795961 - DNA, 15 bp, Homo sapiens
cgtctttacccacct

SEQ ID NO: 795962 - DNA, 15 bp, Homo sapiens
gtctttacccacctt

SEQ ID NO: 795963 - DNA, 15 bp, Homo sapiens
tctttacccacctta

SEQ ID NO: 795964 - DNA, 15 bp, Homo sapiens
ctttacccaccttat

SEQ ID NO: 795965 - DNA, 15 bp, Homo sapiens
tttacccaccttata

SEQ ID NO: 795966 - DNA, 15 bp, Homo sapiens
ttacccaccttatat

SEQ ID NO: 795967 - DNA, 15 bp, Homo sapiens
tacccaccttatatt

SEQ ID NO: 795968 - DNA, 15 bp, Homo sapiens
acccaccttatatta

SEQ ID NO: 795969 - DNA, 15 bp, Homo sapiens
cccaccttatattac

SEQ ID NO: 795970 - DNA, 15 bp, Homo sapiens
ccaccttatattaca

SEQ ID NO: 795971 - DNA, 15 bp, Homo sapiens
caccttatattacaa

SEQ ID NO: 795972 - DNA, 15 bp, Homo sapiens
accttatattacaat

SEQ ID NO: 795973 - DNA, 15 bp, Homo sapiens
ccttatattacaata

SEQ ID NO: 795974 - DNA, 15 bp, Homo sapiens
cttatattacaatag

SEQ ID NO: 795975 - DNA, 15 bp, Homo sapiens
ttatattacaataga

SEQ ID NO: 795976 - DNA, 15 bp, Homo sapiens
tatattacaatagaa

SEQ ID NO: 795977 - DNA, 15 bp, Homo sapiens
atattacaatagaag

SEQ ID NO: 795978 - DNA, 15 bp, Homo sapiens
tattacaatagaaga

SEQ ID NO: 795979 - DNA, 15 bp, Homo sapiens
attacaatagaagag

SEQ ID NO: 795980 - DNA, 15 bp, Homo sapiens
ttacaatagaagagt

SEQ ID NO: 795981 - DNA, 15 bp, Homo sapiens
tacaatagaagagtc

SEQ ID NO: 795982 - DNA, 15 bp, Homo sapiens
acaatagaagagtca

SEQ ID NO: 795983 - DNA, 15 bp, Homo sapiens
caatagaagagtcag

SEQ ID NO: 795984 - DNA, 15 bp, Homo sapiens
aatagaagagtcaga

SEQ ID NO: 795985 - DNA, 15 bp, Homo sapiens
atagaagagtcagat

SEQ ID NO: 795986 - DNA, 15 bp, Homo sapiens
tagaagagtcagatt

SEQ ID NO: 795987 - DNA, 15 bp, Homo sapiens
agaagagtcagatta

SEQ ID NO: 795988 - DNA, 15 bp, Homo sapiens
gaagagtcagattat

SEQ ID NO: 795989 - DNA, 15 bp, Homo sapiens
aagagtcagattata

SEQ ID NO: 795990 - DNA, 15 bp, Homo sapiens
agagtcagattataa

SEQ ID NO: 795991 - DNA, 15 bp, Homo sapiens
gagtcagattataaa

SEQ ID NO: 795992 - DNA, 15 bp, Homo sapiens
agtcagattataaaa

SEQ ID NO: 795993 - DNA, 15 bp, Homo sapiens
gtcagattataaaaa

SEQ ID NO: 795994 - DNA, 15 bp, Homo sapiens
tcagattataaaaaa

SEQ ID NO: 795995 - DNA, 15 bp, Homo sapiens
cagattataaaaaaa

SEQ ID NO: 795996 - DNA, 15 bp, Homo sapiens
agattataaaaaaat

SEQ ID NO: 795997 - DNA, 15 bp, Homo sapiens
gattataaaaaaata

SEQ ID NO: 795998 - DNA, 15 bp, Homo sapiens
attataaaaaaataa

SEQ ID NO: 795999 - DNA, 15 bp, Homo sapiens
ttataaaaaaataat

SEQ ID NO: 796000 - DNA, 15 bp, Homo sapiens
tataaaaaaataata

SEQ ID NO: 796001 - DNA, 15 bp, Homo sapiens
ataaaaaaataataa

SEQ ID NO: 796002 - DNA, 15 bp, Homo sapiens
taaaaaaataataaa

SEQ ID NO: 796003 - DNA, 15 bp, Homo sapiens
aaaaaaataataaat

SEQ ID NO: 796004 - DNA, 15 bp, Homo sapiens
aaaaaataataaatc

SEQ ID NO: 796005 - DNA, 15 bp, Homo sapiens
aaaaataataaatca

SEQ ID NO: 796006 - DNA, 15 bp, Homo sapiens
aaaataataaatcaa

SEQ ID NO: 796007 - DNA, 15 bp, Homo sapiens
aaataataaatcaat

SEQ ID NO: 796008 - DNA, 15 bp, Homo sapiens
aataataaatcaata

SEQ ID NO: 796009 - DNA, 15 bp, Homo sapiens
ataataaatcaataa

SEQ ID NO: 796010 - DNA, 15 bp, Homo sapiens
taataaatcaataaa

SEQ ID NO: 796011 - DNA, 15 bp, Homo sapiens
aataaatcaataaat

SEQ ID NO: 796012 - DNA, 15 bp, Homo sapiens
ataaatcaataaata

SEQ ID NO: 796013 - DNA, 15 bp, Homo sapiens
taaatcaataaataa

SEQ ID NO: 796014 - DNA, 15 bp, Homo sapiens
aaatcaataaataat

SEQ ID NO: 796015 - DNA, 15 bp, Homo sapiens
aatcaataaataata

SEQ ID NO: 796016 - DNA, 15 bp, Homo sapiens
atcaataaataatac

SEQ ID NO: 796017 - DNA, 15 bp, Homo sapiens
tcaataaataatact

SEQ ID NO: 796018 - DNA, 15 bp, Homo sapiens
caataaataatactt

SEQ ID NO: 796019 - DNA, 15 bp, Homo sapiens
aataaataatacttt

SEQ ID NO: 796020 - DNA, 15 bp, Homo sapiens
ataaataatacttta

SEQ ID NO: 796021 - DNA, 15 bp, Homo sapiens
taaataatactttaa

SEQ ID NO: 796022 - DNA, 15 bp, Homo sapiens
aaataatactttaag

SEQ ID NO: 796023 - DNA, 15 bp, Homo sapiens
aataatactttaagg

SEQ ID NO: 796024 - DNA, 15 bp, Homo sapiens
ataatactttaaggt

SEQ ID NO: 796025 - DNA, 15 bp, Homo sapiens
taatactttaaggta

SEQ ID NO: 796026 - DNA, 15 bp, Homo sapiens
aatactttaaggtag

SEQ ID NO: 796027 - DNA, 15 bp, Homo sapiens
atactttaaggtagt

SEQ ID NO: 796028 - DNA, 15 bp, Homo sapiens
tactttaaggtagtg

SEQ ID NO: 796029 - DNA, 15 bp, Homo sapiens
actttaaggtagtga

SEQ ID NO: 796030 - DNA, 15 bp, Homo sapiens
ctttaaggtagtgat

SEQ ID NO: 796031 - DNA, 15 bp, Homo sapiens
tttaaggtagtgatg

SEQ ID NO: 796032 - DNA, 15 bp, Homo sapiens
ttaaggtagtgatga

SEQ ID NO: 796033 - DNA, 15 bp, Homo sapiens
taaggtagtgatgag

SEQ ID NO: 796034 - DNA, 15 bp, Homo sapiens
aaggtagtgatgagt

SEQ ID NO: 796035 - DNA, 15 bp, Homo sapiens
aggtagtgatgagtg

SEQ ID NO: 796036 - DNA, 15 bp, Homo sapiens
ggtagtgatgagtga

SEQ ID NO: 796037 - DNA, 15 bp, Homo sapiens
gtagtgatgagtgat

SEQ ID NO: 796038 - DNA, 15 bp, Homo sapiens
tagtgatgagtgatg

SEQ ID NO: 796039 - DNA, 15 bp, Homo sapiens
agtgatgagtgatgc

SEQ ID NO: 796040 - DNA, 15 bp, Homo sapiens
gtgatgagtgatgca

SEQ ID NO: 796041 - DNA, 15 bp, Homo sapiens
tgatgagtgatgcag

SEQ ID NO: 796042 - DNA, 15 bp, Homo sapiens
gatgagtgatgcagg

SEQ ID NO: 796043 - DNA, 15 bp, Homo sapiens
atgagtgatgcagga

SEQ ID NO: 796044 - DNA, 15 bp, Homo sapiens
tgagtgatgcaggaa

SEQ ID NO: 796045 - DNA, 15 bp, Homo sapiens
gagtgatgcaggaaa

SEQ ID NO: 796046 - DNA, 15 bp, Homo sapiens
agtgatgcaggaaac

SEQ ID NO: 796047 - DNA, 15 bp, Homo sapiens
gtgatgcaggaaaca

SEQ ID NO: 796048 - DNA, 15 bp, Homo sapiens
tgatgcaggaaacaa

SEQ ID NO: 796049 - DNA, 15 bp, Homo sapiens
gatgcaggaaacaag

SEQ ID NO: 796050 - DNA, 15 bp, Homo sapiens
atgcaggaaacaaga

SEQ ID NO: 796051 - DNA, 15 bp, Homo sapiens
tgcaggaaacaagag

SEQ ID NO: 796052 - DNA, 15 bp, Homo sapiens
gcaggaaacaagaga

SEQ ID NO: 796053 - DNA, 15 bp, Homo sapiens
caggaaacaagagaa

SEQ ID NO: 796054 - DNA, 15 bp, Homo sapiens
aggaaacaagagaag

SEQ ID NO: 796055 - DNA, 15 bp, Homo sapiens
ggaaacaagagaaga

SEQ ID NO: 796056 - DNA, 15 bp, Homo sapiens
gaaacaagagaagat

SEQ ID NO: 796057 - DNA, 15 bp, Homo sapiens
aaacaagagaagatg

SEQ ID NO: 796058 - DNA, 15 bp, Homo sapiens
aacaagagaagatga

SEQ ID NO: 796059 - DNA, 15 bp, Homo sapiens
acaagagaagatgat

SEQ ID NO: 796060 - DNA, 15 bp, Homo sapiens
caagagaagatgatt

SEQ ID NO: 796061 - DNA, 15 bp, Homo sapiens
aagagaagatgattg

SEQ ID NO: 796062 - DNA, 15 bp, Homo sapiens
agagaagatgattgt

SEQ ID NO: 796063 - DNA, 15 bp, Homo sapiens
gagaagatgattgtg

SEQ ID NO: 796064 - DNA, 15 bp, Homo sapiens
agaagatgattgtgg

SEQ ID NO: 796065 - DNA, 15 bp, Homo sapiens
gaagatgattgtgga

SEQ ID NO: 796066 - DNA, 15 bp, Homo sapiens
aagatgattgtggag

SEQ ID NO: 796067 - DNA, 15 bp, Homo sapiens
agatgattgtggagt

SEQ ID NO: 796068 - DNA, 15 bp, Homo sapiens
gatgattgtggagtg

SEQ ID NO: 796069 - DNA, 15 bp, Homo sapiens
atgattgtggagtga

SEQ ID NO: 796070 - DNA, 15 bp, Homo sapiens
tgattgtggagtgag

SEQ ID NO: 796071 - DNA, 15 bp, Homo sapiens
gattgtggagtgagt

SEQ ID NO: 796072 - DNA, 15 bp, Homo sapiens
attgtggagtgagtg

SEQ ID NO: 796073 - DNA, 15 bp, Homo sapiens
ttgtggagtgagtga

SEQ ID NO: 796074 - DNA, 15 bp, Homo sapiens
tgtggagtgagtgat

SEQ ID NO: 796075 - DNA, 15 bp, Homo sapiens
gtggagtgagtgatt

SEQ ID NO: 796076 - DNA, 15 bp, Homo sapiens
tggagtgagtgatta

SEQ ID NO: 796077 - DNA, 15 bp, Homo sapiens
ggagtgagtgattac

SEQ ID NO: 796078 - DNA, 15 bp, Homo sapiens
gagtgagtgattact

SEQ ID NO: 796079 - DNA, 15 bp, Homo sapiens
agtgagtgattacta

SEQ ID NO: 796080 - DNA, 15 bp, Homo sapiens
gtgagtgattactac

SEQ ID NO: 796081 - DNA, 15 bp, Homo sapiens
tgagtgattactacg

SEQ ID NO: 796082 - DNA, 15 bp, Homo sapiens
gagtgattactacgg

SEQ ID NO: 796083 - DNA, 15 bp, Homo sapiens
agtgattactacggg

SEQ ID NO: 796084 - DNA, 15 bp, Homo sapiens
gtgattactacgggt

SEQ ID NO: 796085 - DNA, 15 bp, Homo sapiens
tgattactacgggtg

SEQ ID NO: 796086 - DNA, 15 bp, Homo sapiens
gattactacgggtga

SEQ ID NO: 796087 - DNA, 15 bp, Homo sapiens
attactacgggtgag

SEQ ID NO: 796088 - DNA, 15 bp, Homo sapiens
ttactacgggtgagg

SEQ ID NO: 796089 - DNA, 15 bp, Homo sapiens
tactacgggtgaggt

SEQ ID NO: 796090 - DNA, 15 bp, Homo sapiens
actacgggtgaggtc

SEQ ID NO: 796091 - DNA, 15 bp, Homo sapiens
ctacgggtgaggtcc

SEQ ID NO: 796092 - DNA, 15 bp, Homo sapiens
tacgggtgaggtcca

SEQ ID NO: 796093 - DNA, 15 bp, Homo sapiens
acgggtgaggtccaa

SEQ ID NO: 796094 - DNA, 15 bp, Homo sapiens
cgggtgaggtccaat

SEQ ID NO: 796095 - DNA, 15 bp, Homo sapiens
gggtgaggtccaatg

SEQ ID NO: 796096 - DNA, 15 bp, Homo sapiens
ggtgaggtccaatga

SEQ ID NO: 796097 - DNA, 15 bp, Homo sapiens
gtgaggtccaatgat

SEQ ID NO: 796098 - DNA, 15 bp, Homo sapiens
tgaggtccaatgata

SEQ ID NO: 796099 - DNA, 15 bp, Homo sapiens
gaggtccaatgatag

SEQ ID NO: 796100 - DNA, 15 bp, Homo sapiens
aggtccaatgataga

SEQ ID NO: 796101 - DNA, 15 bp, Homo sapiens
ggtccaatgatagag

SEQ ID NO: 796102 - DNA, 15 bp, Homo sapiens
gtccaatgatagaga

SEQ ID NO: 796103 - DNA, 15 bp, Homo sapiens
tccaatgatagagag

SEQ ID NO: 796104 - DNA, 15 bp, Homo sapiens
ccaatgatagagagg

SEQ ID NO: 796105 - DNA, 15 bp, Homo sapiens
caatgatagagagga

SEQ ID NO: 796106 - DNA, 15 bp, Homo sapiens
aatgatagagaggac

SEQ ID NO: 796107 - DNA, 15 bp, Homo sapiens
atgatagagaggact

SEQ ID NO: 796108 - DNA, 15 bp, Homo sapiens
tgatagagaggacta

SEQ ID NO: 796109 - DNA, 15 bp, Homo sapiens
gatagagaggactag

SEQ ID NO: 796110 - DNA, 15 bp, Homo sapiens
atagagaggactagt

SEQ ID NO: 796111 - DNA, 15 bp, Homo sapiens
tagagaggactagtg

SEQ ID NO: 796112 - DNA, 15 bp, Homo sapiens
agagaggactagtga

SEQ ID NO: 796113 - DNA, 15 bp, Homo sapiens
gagaggactagtgaa

SEQ ID NO: 796114 - DNA, 15 bp, Homo sapiens
agaggactagtgaag

SEQ ID NO: 796115 - DNA, 15 bp, Homo sapiens
gaggactagtgaaga

SEQ ID NO: 796116 - DNA, 15 bp, Homo sapiens
aggactagtgaagag

SEQ ID NO: 796117 - DNA, 15 bp, Homo sapiens
ggactagtgaagagg

SEQ ID NO: 796118 - DNA, 15 bp, Homo sapiens
gactagtgaagaggg

SEQ ID NO: 796119 - DNA, 15 bp, Homo sapiens
actagtgaagaggga

SEQ ID NO: 796120 - DNA, 15 bp, Homo sapiens
ctagtgaagagggaa

SEQ ID NO: 796121 - DNA, 15 bp, Homo sapiens
tagtgaagagggaag

SEQ ID NO: 796122 - DNA, 15 bp, Homo sapiens
agtgaagagggaaga

SEQ ID NO: 796123 - DNA, 15 bp, Homo sapiens
gtgaagagggaagac

SEQ ID NO: 796124 - DNA, 15 bp, Homo sapiens
tgaagagggaagaca

SEQ ID NO: 796125 - DNA, 15 bp, Homo sapiens
gaagagggaagacag

SEQ ID NO: 796126 - DNA, 15 bp, Homo sapiens
aagagggaagacagt

SEQ ID NO: 796127 - DNA, 15 bp, Homo sapiens
agagggaagacagtc

SEQ ID NO: 796128 - DNA, 15 bp, Homo sapiens
gagggaagacagtca

SEQ ID NO: 796129 - DNA, 15 bp, Homo sapiens
agggaagacagtcag

SEQ ID NO: 796130 - DNA, 15 bp, Homo sapiens
gggaagacagtcagt

SEQ ID NO: 796131 - DNA, 15 bp, Homo sapiens
ggaagacagtcagtc

SEQ ID NO: 796132 - DNA, 15 bp, Homo sapiens
gaagacagtcagtct

SEQ ID NO: 796133 - DNA, 15 bp, Homo sapiens
aagacagtcagtcta

SEQ ID NO: 796134 - DNA, 15 bp, Homo sapiens
agacagtcagtctac

SEQ ID NO: 796135 - DNA, 15 bp, Homo sapiens
gacagtcagtctaca

SEQ ID NO: 796136 - DNA, 15 bp, Homo sapiens
acagtcagtctacac

SEQ ID NO: 796137 - DNA, 15 bp, Homo sapiens
cagtcagtctacaca

SEQ ID NO: 796138 - DNA, 15 bp, Homo sapiens
agtcagtctacacaa

SEQ ID NO: 796139 - DNA, 15 bp, Homo sapiens
gtcagtctacacaaa

SEQ ID NO: 796140 - DNA, 15 bp, Homo sapiens
tcagtctacacaaag

SEQ ID NO: 796141 - DNA, 15 bp, Homo sapiens
cagtctacacaaaga

SEQ ID NO: 796142 - DNA, 15 bp, Homo sapiens
agtctacacaaagat

SEQ ID NO: 796143 - DNA, 15 bp, Homo sapiens
gtctacacaaagatc

SEQ ID NO: 796144 - DNA, 15 bp, Homo sapiens
tctacacaaagatca

SEQ ID NO: 796145 - DNA, 15 bp, Homo sapiens
ctacacaaagatcat

SEQ ID NO: 796146 - DNA, 15 bp, Homo sapiens
tacacaaagatcatc

SEQ ID NO: 796147 - DNA, 15 bp, Homo sapiens
acacaaagatcatcc

SEQ ID NO: 796148 - DNA, 15 bp, Homo sapiens
cacaaagatcatcct

SEQ ID NO: 796149 - DNA, 15 bp, Homo sapiens
acaaagatcatcctg

SEQ ID NO: 796150 - DNA, 15 bp, Homo sapiens
caaagatcatcctgt

SEQ ID NO: 796151 - DNA, 15 bp, Homo sapiens
aaagatcatcctgtt

SEQ ID NO: 796152 - DNA, 15 bp, Homo sapiens
aagatcatcctgttg

SEQ ID NO: 796153 - DNA, 15 bp, Homo sapiens
agatcatcctgttga

SEQ ID NO: 796154 - DNA, 15 bp, Homo sapiens
gatcatcctgttgaa

SEQ ID NO: 796155 - DNA, 15 bp, Homo sapiens
atcatcctgttgaaa

SEQ ID NO: 796156 - DNA, 15 bp, Homo sapiens
tcatcctgttgaaaa

SEQ ID NO: 796157 - DNA, 15 bp, Homo sapiens
catcctgttgaaaaa

SEQ ID NO: 796158 - DNA, 15 bp, Homo sapiens
atcctgttgaaaaat

SEQ ID NO: 796159 - DNA, 15 bp, Homo sapiens
tcctgttgaaaaata

SEQ ID NO: 796160 - DNA, 15 bp, Homo sapiens
cctgttgaaaaatat

SEQ ID NO: 796161 - DNA, 15 bp, Homo sapiens
ctgttgaaaaatatg

SEQ ID NO: 796162 - DNA, 15 bp, Homo sapiens
tgttgaaaaatatga

SEQ ID NO: 796163 - DNA, 15 bp, Homo sapiens
gttgaaaaatatgaa

SEQ ID NO: 796164 - DNA, 15 bp, Homo sapiens
ttgaaaaatatgaaa

SEQ ID NO: 796165 - DNA, 15 bp, Homo sapiens
tgaaaaatatgaaat

SEQ ID NO: 796166 - DNA, 15 bp, Homo sapiens
gaaaaatatgaaata

SEQ ID NO: 796167 - DNA, 15 bp, Homo sapiens
aaaaatatgaaatat

SEQ ID NO: 796168 - DNA, 15 bp, Homo sapiens
aaaatatgaaatatg

SEQ ID NO: 796169 - DNA, 15 bp, Homo sapiens
aaatatgaaatatgc

SEQ ID NO: 796170 - DNA, 15 bp, Homo sapiens
aatatgaaatatgca

SEQ ID NO: 796171 - DNA, 15 bp, Homo sapiens
atatgaaatatgcaa

SEQ ID NO: 796172 - DNA, 15 bp, Homo sapiens
tatgaaatatgcaag

SEQ ID NO: 796173 - DNA, 15 bp, Homo sapiens
atgaaatatgcaagt

SEQ ID NO: 796174 - DNA, 15 bp, Homo sapiens
tgaaatatgcaagtc

SEQ ID NO: 796175 - DNA, 15 bp, Homo sapiens
gaaatatgcaagtct

SEQ ID NO: 796176 - DNA, 15 bp, Homo sapiens
aaatatgcaagtctt

SEQ ID NO: 796177 - DNA, 15 bp, Homo sapiens
aatatgcaagtcttt

SEQ ID NO: 796178 - DNA, 15 bp, Homo sapiens
atatgcaagtctttg

SEQ ID NO: 796179 - DNA, 15 bp, Homo sapiens
tatgcaagtctttgg

SEQ ID NO: 796180 - DNA, 15 bp, Homo sapiens
atgcaagtctttgga

SEQ ID NO: 796181 - DNA, 15 bp, Homo sapiens
tgcaagtctttggaa

SEQ ID NO: 796182 - DNA, 15 bp, Homo sapiens
gcaagtctttggaat

SEQ ID NO: 796183 - DNA, 15 bp, Homo sapiens
caagtctttggaatt

SEQ ID NO: 796184 - DNA, 15 bp, Homo sapiens
aagtctttggaattt

SEQ ID NO: 796185 - DNA, 15 bp, Homo sapiens
agtctttggaattta

SEQ ID NO: 796186 - DNA, 15 bp, Homo sapiens
gtctttggaatttac

SEQ ID NO: 796187 - DNA, 15 bp, Homo sapiens
tctttggaatttacc

SEQ ID NO: 796188 - DNA, 15 bp, Homo sapiens
ctttggaatttaccc

SEQ ID NO: 796189 - DNA, 15 bp, Homo sapiens
tttggaatttaccca

SEQ ID NO: 796190 - DNA, 15 bp, Homo sapiens
ttggaatttacccaa

SEQ ID NO: 796191 - DNA, 15 bp, Homo sapiens
tggaatttacccaaa

SEQ ID NO: 796192 - DNA, 15 bp, Homo sapiens
ggaatttacccaaaa

SEQ ID NO: 796193 - DNA, 15 bp, Homo sapiens
gaatttacccaaaaa

SEQ ID NO: 796194 - DNA, 15 bp, Homo sapiens
aatttacccaaaaaa

SEQ ID NO: 796195 - DNA, 15 bp, Homo sapiens
atttacccaaaaaaa

SEQ ID NO: 796196 - DNA, 15 bp, Homo sapiens
tttacccaaaaaaaa

SEQ ID NO: 796197 - DNA, 15 bp, Homo sapiens
ttacccaaaaaaaaa

SEQ ID NO: 796198 - DNA, 15 bp, Homo sapiens
tacccaaaaaaaaaa

SEQ ID NO: 796199 - DNA, 15 bp, Homo sapiens
acccaaaaaaaaaaa

SEQ ID NO: 796200 - DNA, 15 bp, Homo sapiens
cccaaaaaaaaaaat

SEQ ID NO: 796201 - DNA, 15 bp, Homo sapiens
ccaaaaaaaaaaata

SEQ ID NO: 796202 - DNA, 15 bp, Homo sapiens
caaaaaaaaaaatag

SEQ ID NO: 796203 - DNA, 15 bp, Homo sapiens
aaaaaaaaaatagag

SEQ ID NO: 796204 - DNA, 15 bp, Homo sapiens
aaaaaaaaatagaga

SEQ ID NO: 796205 - DNA, 15 bp, Homo sapiens
aaaaaaaatagagaa

SEQ ID NO: 796206 - DNA, 15 bp, Homo sapiens
aaaaaaatagagaaa

SEQ ID NO: 796207 - DNA, 15 bp, Homo sapiens
aaaaaatagagaaag

SEQ ID NO: 796208 - DNA, 15 bp, Homo sapiens
aaaaatagagaaagc

SEQ ID NO: 796209 - DNA, 15 bp, Homo sapiens
aaaatagagaaagca

SEQ ID NO: 796210 - DNA, 15 bp, Homo sapiens
aaatagagaaagcat

SEQ ID NO: 796211 - DNA, 15 bp, Homo sapiens
aatagagaaagcatt

SEQ ID NO: 796212 - DNA, 15 bp, Homo sapiens
atagagaaagcattt

SEQ ID NO: 796213 - DNA, 15 bp, Homo sapiens
tagagaaagcatttc

SEQ ID NO: 796214 - DNA, 15 bp, Homo sapiens
agagaaagcatttct

SEQ ID NO: 796215 - DNA, 15 bp, Homo sapiens
gagaaagcatttctt

SEQ ID NO: 796216 - DNA, 15 bp, Homo sapiens
agaaagcatttcttg

SEQ ID NO: 796217 - DNA, 15 bp, Homo sapiens
gaaagcatttcttga

SEQ ID NO: 796218 - DNA, 15 bp, Homo sapiens
aaagcatttcttgag

SEQ ID NO: 796219 - DNA, 15 bp, Homo sapiens
aagcatttcttgagt

SEQ ID NO: 796220 - DNA, 15 bp, Homo sapiens
agcatttcttgagtt

SEQ ID NO: 796221 - DNA, 15 bp, Homo sapiens
gcatttcttgagttt

SEQ ID NO: 796222 - DNA, 15 bp, Homo sapiens
catttcttgagtttc

SEQ ID NO: 796223 - DNA, 15 bp, Homo sapiens
atttcttgagtttcc

SEQ ID NO: 796224 - DNA, 15 bp, Homo sapiens
tttcttgagtttcca

SEQ ID NO: 796225 - DNA, 15 bp, Homo sapiens
ttcttgagtttccaa

SEQ ID NO: 796226 - DNA, 15 bp, Homo sapiens
tcttgagtttccaag

SEQ ID NO: 796227 - DNA, 15 bp, Homo sapiens
cttgagtttccaaga

SEQ ID NO: 796228 - DNA, 15 bp, Homo sapiens
ttgagtttccaagag

SEQ ID NO: 796229 - DNA, 15 bp, Homo sapiens
tgagtttccaagaga

SEQ ID NO: 796230 - DNA, 15 bp, Homo sapiens
gagtttccaagagag

SEQ ID NO: 796231 - DNA, 15 bp, Homo sapiens
agtttccaagagagg

SEQ ID NO: 796232 - DNA, 15 bp, Homo sapiens
gtttccaagagaggc

SEQ ID NO: 796233 - DNA, 15 bp, Homo sapiens
tttccaagagaggca

SEQ ID NO: 796234 - DNA, 15 bp, Homo sapiens
ttccaagagaggcaa

SEQ ID NO: 796235 - DNA, 15 bp, Homo sapiens
tccaagagaggcaag

SEQ ID NO: 796236 - DNA, 15 bp, Homo sapiens
ccaagagaggcaagc

SEQ ID NO: 796237 - DNA, 15 bp, Homo sapiens
caagagaggcaagca

SEQ ID NO: 796238 - DNA, 15 bp, Homo sapiens
aagagaggcaagcag

SEQ ID NO: 796239 - DNA, 15 bp, Homo sapiens
agagaggcaagcagg

SEQ ID NO: 796240 - DNA, 15 bp, Homo sapiens
gagaggcaagcagga

SEQ ID NO: 796241 - DNA, 15 bp, Homo sapiens
agaggcaagcaggat

SEQ ID NO: 796242 - DNA, 15 bp, Homo sapiens
gaggcaagcaggatg

SEQ ID NO: 796243 - DNA, 15 bp, Homo sapiens
aggcaagcaggatga

SEQ ID NO: 796244 - DNA, 15 bp, Homo sapiens
ggcaagcaggatgag

SEQ ID NO: 796245 - DNA, 15 bp, Homo sapiens
gcaagcaggatgagc

SEQ ID NO: 796246 - DNA, 15 bp, Homo sapiens
caagcaggatgagcc

SEQ ID NO: 796247 - DNA, 15 bp, Homo sapiens
aagcaggatgagcca

SEQ ID NO: 796248 - DNA, 15 bp, Homo sapiens
agcaggatgagccac

SEQ ID NO: 796249 - DNA, 15 bp, Homo sapiens
gcaggatgagccacc

SEQ ID NO: 796250 - DNA, 15 bp, Homo sapiens
caggatgagccacca

SEQ ID NO: 796251 - DNA, 15 bp, Homo sapiens
aggatgagccaccaa

SEQ ID NO: 796252 - DNA, 15 bp, Homo sapiens
ggatgagccaccaaa

SEQ ID NO: 796253 - DNA, 15 bp, Homo sapiens
gatgagccaccaaaa

SEQ ID NO: 796254 - DNA, 15 bp, Homo sapiens
atgagccaccaaaaa

SEQ ID NO: 796255 - DNA, 15 bp, Homo sapiens
tgagccaccaaaaat

SEQ ID NO: 796256 - DNA, 15 bp, Homo sapiens
gagccaccaaaaata

SEQ ID NO: 796257 - DNA, 15 bp, Homo sapiens
agccaccaaaaataa

SEQ ID NO: 796258 - DNA, 15 bp, Homo sapiens
gccaccaaaaataag

SEQ ID NO: 796259 - DNA, 15 bp, Homo sapiens
ccaccaaaaataagt

SEQ ID NO: 796260 - DNA, 15 bp, Homo sapiens
caccaaaaataagta

SEQ ID NO: 796261 - DNA, 15 bp, Homo sapiens
accaaaaataagtac

SEQ ID NO: 796262 - DNA, 15 bp, Homo sapiens
ccaaaaataagtacg

SEQ ID NO: 796263 - DNA, 15 bp, Homo sapiens
caaaaataagtacgg

SEQ ID NO: 796264 - DNA, 15 bp, Homo sapiens
aaaaataagtacggt

SEQ ID NO: 796265 - DNA, 15 bp, Homo sapiens
aaaataagtacggtt

SEQ ID NO: 796266 - DNA, 15 bp, Homo sapiens
aaataagtacggtta

SEQ ID NO: 796267 - DNA, 15 bp, Homo sapiens
aataagtacggttaa

SEQ ID NO: 796268 - DNA, 15 bp, Homo sapiens
ataagtacggttaaa

SEQ ID NO: 796269 - DNA, 15 bp, Homo sapiens
taagtacggttaaat

SEQ ID NO: 796270 - DNA, 15 bp, Homo sapiens
aagtacggttaaata

SEQ ID NO: 796271 - DNA, 15 bp, Homo sapiens
agtacggttaaataa

SEQ ID NO: 796272 - DNA, 15 bp, Homo sapiens
gtacggttaaataaa

SEQ ID NO: 796273 - DNA, 15 bp, Homo sapiens
tacggttaaataaag

SEQ ID NO: 796274 - DNA, 15 bp, Homo sapiens
acggttaaataaaga

SEQ ID NO: 796275 - DNA, 15 bp, Homo sapiens
cggttaaataaagat

SEQ ID NO: 796276 - DNA, 15 bp, Homo sapiens
ggttaaataaagatt

SEQ ID NO: 796277 - DNA, 15 bp, Homo sapiens
gttaaataaagattg

SEQ ID NO: 796278 - DNA, 15 bp, Homo sapiens
ttaaataaagattga

SEQ ID NO: 796279 - DNA, 15 bp, Homo sapiens
taaataaagattgat

SEQ ID NO: 796280 - DNA, 15 bp, Homo sapiens
aaataaagattgatt

SEQ ID NO: 796281 - DNA, 15 bp, Homo sapiens
aataaagattgattc

SEQ ID NO: 796282 - DNA, 15 bp, Homo sapiens
ataaagattgattct

SEQ ID NO: 796283 - DNA, 15 bp, Homo sapiens
taaagattgattctg

SEQ ID NO: 796284 - DNA, 15 bp, Homo sapiens
aaagattgattctgg

SEQ ID NO: 796285 - DNA, 15 bp, Homo sapiens
aagattgattctggg

SEQ ID NO: 796286 - DNA, 15 bp, Homo sapiens
agattgattctggga

SEQ ID NO: 796287 - DNA, 15 bp, Homo sapiens
gattgattctgggac

SEQ ID NO: 796288 - DNA, 15 bp, Homo sapiens
attgattctgggacc

SEQ ID NO: 796289 - DNA, 15 bp, Homo sapiens
ttgattctgggacca

SEQ ID NO: 796290 - DNA, 15 bp, Homo sapiens
tgattctgggaccaa

SEQ ID NO: 796291 - DNA, 15 bp, Homo sapiens
gattctgggaccaaa

SEQ ID NO: 796292 - DNA, 15 bp, Homo sapiens
attctgggaccaaat

SEQ ID NO: 796293 - DNA, 15 bp, Homo sapiens
ttctgggaccaaata

SEQ ID NO: 796294 - DNA, 15 bp, Homo sapiens
tctgggaccaaataa

SEQ ID NO: 796295 - DNA, 15 bp, Homo sapiens
ctgggaccaaataag

SEQ ID NO: 796296 - DNA, 15 bp, Homo sapiens
tgggaccaaataagc

SEQ ID NO: 796297 - DNA, 15 bp, Homo sapiens
gggaccaaataagct

SEQ ID NO: 796298 - DNA, 15 bp, Homo sapiens
ggaccaaataagctt

SEQ ID NO: 796299 - DNA, 15 bp, Homo sapiens
gaccaaataagcttc

SEQ ID NO: 796300 - DNA, 15 bp, Homo sapiens
accaaataagcttca

SEQ ID NO: 796301 - DNA, 15 bp, Homo sapiens
ccaaataagcttcaa

SEQ ID NO: 796302 - DNA, 15 bp, Homo sapiens
caaataagcttcaag

SEQ ID NO: 796303 - DNA, 15 bp, Homo sapiens
aaataagcttcaaga

SEQ ID NO: 796304 - DNA, 15 bp, Homo sapiens
aataagcttcaagat

SEQ ID NO: 796305 - DNA, 15 bp, Homo sapiens
ataagcttcaagata

SEQ ID NO: 796306 - DNA, 15 bp, Homo sapiens
taagcttcaagataa

SEQ ID NO: 796307 - DNA, 15 bp, Homo sapiens
aagcttcaagataat

SEQ ID NO: 796308 - DNA, 15 bp, Homo sapiens
agcttcaagataatt

SEQ ID NO: 796309 - DNA, 15 bp, Homo sapiens
gcttcaagataatta

SEQ ID NO: 796310 - DNA, 15 bp, Homo sapiens
cttcaagataattat

SEQ ID NO: 796311 - DNA, 15 bp, Homo sapiens
ttcaagataattatt

SEQ ID NO: 796312 - DNA, 15 bp, Homo sapiens
tcaagataattattt

SEQ ID NO: 796313 - DNA, 15 bp, Homo sapiens
caagataattatttc

SEQ ID NO: 796314 - DNA, 15 bp, Homo sapiens
aagataattatttct

SEQ ID NO: 796315 - DNA, 15 bp, Homo sapiens
agataattatttctc

SEQ ID NO: 796316 - DNA, 15 bp, Homo sapiens
gataattatttctca

SEQ ID NO: 796317 - DNA, 15 bp, Homo sapiens
ataattatttctcat

SEQ ID NO: 796318 - DNA, 15 bp, Homo sapiens
taattatttctcatg

SEQ ID NO: 796319 - DNA, 15 bp, Homo sapiens
aattatttctcatgg

SEQ ID NO: 796320 - DNA, 15 bp, Homo sapiens
attatttctcatggt

SEQ ID NO: 796321 - DNA, 15 bp, Homo sapiens
ttatttctcatggta

SEQ ID NO: 796322 - DNA, 15 bp, Homo sapiens
tatttctcatggtag

SEQ ID NO: 796323 - DNA, 15 bp, Homo sapiens
atttctcatggtagt

SEQ ID NO: 796324 - DNA, 15 bp, Homo sapiens
tttctcatggtagtg

SEQ ID NO: 796325 - DNA, 15 bp, Homo sapiens
ttctcatggtagtga

SEQ ID NO: 796326 - DNA, 15 bp, Homo sapiens
tctcatggtagtgaa

SEQ ID NO: 796327 - DNA, 15 bp, Homo sapiens
ctcatggtagtgaat

SEQ ID NO: 796328 - DNA, 15 bp, Homo sapiens
tcatggtagtgaatc

SEQ ID NO: 796329 - DNA, 15 bp, Homo sapiens
catggtagtgaatca

SEQ ID NO: 796330 - DNA, 15 bp, Homo sapiens
atggtagtgaatcag

SEQ ID NO: 796331 - DNA, 15 bp, Homo sapiens
tggtagtgaatcagt

SEQ ID NO: 796332 - DNA, 15 bp, Homo sapiens
ggtagtgaatcagta

SEQ ID NO: 796333 - DNA, 15 bp, Homo sapiens
gtagtgaatcagtat

SEQ ID NO: 796334 - DNA, 15 bp, Homo sapiens
tagtgaatcagtatg

SEQ ID NO: 796335 - DNA, 15 bp, Homo sapiens
agtgaatcagtatgt

SEQ ID NO: 796336 - DNA, 15 bp, Homo sapiens
gtgaatcagtatgtc

SEQ ID NO: 796337 - DNA, 15 bp, Homo sapiens
tgaatcagtatgtct

SEQ ID NO: 796338 - DNA, 15 bp, Homo sapiens
gaatcagtatgtctc

SEQ ID NO: 796339 - DNA, 15 bp, Homo sapiens
aatcagtatgtctca

SEQ ID NO: 796340 - DNA, 15 bp, Homo sapiens
atcagtatgtctcac

SEQ ID NO: 796341 - DNA, 15 bp, Homo sapiens
tcagtatgtctcaca

SEQ ID NO: 796342 - DNA, 15 bp, Homo sapiens
cagtatgtctcacaa

SEQ ID NO: 796343 - DNA, 15 bp, Homo sapiens
agtatgtctcacaaa

SEQ ID NO: 796344 - DNA, 15 bp, Homo sapiens
gtatgtctcacaaat

SEQ ID NO: 796345 - DNA, 15 bp, Homo sapiens
tatgtctcacaaatg

SEQ ID NO: 796346 - DNA, 15 bp, Homo sapiens
atgtctcacaaatgc

SEQ ID NO: 796347 - DNA, 15 bp, Homo sapiens
tgtctcacaaatgca

SEQ ID NO: 796348 - DNA, 15 bp, Homo sapiens
gtctcacaaatgcat

SEQ ID NO: 796349 - DNA, 15 bp, Homo sapiens
tctcacaaatgcatt

SEQ ID NO: 796350 - DNA, 15 bp, Homo sapiens
ctcacaaatgcattc

SEQ ID NO: 796351 - DNA, 15 bp, Homo sapiens
tcacaaatgcattca

SEQ ID NO: 796352 - DNA, 15 bp, Homo sapiens
cacaaatgcattcat

SEQ ID NO: 796353 - DNA, 15 bp, Homo sapiens
acaaatgcattcatc

SEQ ID NO: 796354 - DNA, 15 bp, Homo sapiens
caaatgcattcatct

SEQ ID NO: 796355 - DNA, 15 bp, Homo sapiens
aaatgcattcatctt

SEQ ID NO: 796356 - DNA, 15 bp, Homo sapiens
aatgcattcatcttt

SEQ ID NO: 796357 - DNA, 15 bp, Homo sapiens
atgcattcatctttt

SEQ ID NO: 796358 - DNA, 15 bp, Homo sapiens
tgcattcatcttttc

SEQ ID NO: 796359 - DNA, 15 bp, Homo sapiens
gcattcatcttttca

SEQ ID NO: 796360 - DNA, 15 bp, Homo sapiens
cattcatcttttcat

SEQ ID NO: 796361 - DNA, 15 bp, Homo sapiens
attcatcttttcatg

SEQ ID NO: 796362 - DNA, 15 bp, Homo sapiens
ttcatcttttcatgt

SEQ ID NO: 796363 - DNA, 15 bp, Homo sapiens
tcatcttttcatgtt

SEQ ID NO: 796364 - DNA, 15 bp, Homo sapiens
catcttttcatgttt

SEQ ID NO: 796365 - DNA, 15 bp, Homo sapiens
atcttttcatgtttt

SEQ ID NO: 796366 - DNA, 15 bp, Homo sapiens
tcttttcatgttttc

SEQ ID NO: 796367 - DNA, 15 bp, Homo sapiens
cttttcatgttttca

SEQ ID NO: 796368 - DNA, 15 bp, Homo sapiens
ttttcatgttttcag

SEQ ID NO: 796369 - DNA, 15 bp, Homo sapiens
tttcatgttttcagt

SEQ ID NO: 796370 - DNA, 15 bp, Homo sapiens
ttcatgttttcagta

SEQ ID NO: 796371 - DNA, 15 bp, Homo sapiens
tcatgttttcagtac

SEQ ID NO: 796372 - DNA, 15 bp, Homo sapiens
catgttttcagtacc

SEQ ID NO: 796373 - DNA, 15 bp, Homo sapiens
atgttttcagtaccc

SEQ ID NO: 796374 - DNA, 15 bp, Homo sapiens
tgttttcagtaccca

SEQ ID NO: 796375 - DNA, 15 bp, Homo sapiens
gttttcagtacccaa

SEQ ID NO: 796376 - DNA, 15 bp, Homo sapiens
ttttcagtacccaag

SEQ ID NO: 796377 - DNA, 15 bp, Homo sapiens
tttcagtacccaagg

SEQ ID NO: 796378 - DNA, 15 bp, Homo sapiens
ttcagtacccaaggt

SEQ ID NO: 796379 - DNA, 15 bp, Homo sapiens
tcagtacccaaggtc

SEQ ID NO: 796380 - DNA, 15 bp, Homo sapiens
cagtacccaaggtcc

SEQ ID NO: 796381 - DNA, 15 bp, Homo sapiens
agtacccaaggtcct

SEQ ID NO: 796382 - DNA, 15 bp, Homo sapiens
gtacccaaggtcctt

SEQ ID NO: 796383 - DNA, 15 bp, Homo sapiens
tacccaaggtccttg

SEQ ID NO: 796384 - DNA, 15 bp, Homo sapiens
acccaaggtccttga

SEQ ID NO: 796385 - DNA, 15 bp, Homo sapiens
cccaaggtccttgat

SEQ ID NO: 796386 - DNA, 15 bp, Homo sapiens
ccaaggtccttgatg

SEQ ID NO: 796387 - DNA, 15 bp, Homo sapiens
caaggtccttgatgg

SEQ ID NO: 796388 - DNA, 15 bp, Homo sapiens
aaggtccttgatgga

SEQ ID NO: 796389 - DNA, 15 bp, Homo sapiens
aggtccttgatggat

SEQ ID NO: 796390 - DNA, 15 bp, Homo sapiens
ggtccttgatggatg

SEQ ID NO: 796391 - DNA, 15 bp, Homo sapiens
gtccttgatggatgg

SEQ ID NO: 796392 - DNA, 15 bp, Homo sapiens
tccttgatggatgga

SEQ ID NO: 796393 - DNA, 15 bp, Homo sapiens
ccttgatggatggat

SEQ ID NO: 796394 - DNA, 15 bp, Homo sapiens
cttgatggatggatt

SEQ ID NO: 796395 - DNA, 15 bp, Homo sapiens
ttgatggatggatta

SEQ ID NO: 796396 - DNA, 15 bp, Homo sapiens
tgatggatggattaa

SEQ ID NO: 796397 - DNA, 15 bp, Homo sapiens
gatggatggattaat

SEQ ID NO: 796398 - DNA, 15 bp, Homo sapiens
atggatggattaatc

SEQ ID NO: 796399 - DNA, 15 bp, Homo sapiens
tggatggattaatcc

SEQ ID NO: 796400 - DNA, 15 bp, Homo sapiens
ggatggattaatcct

SEQ ID NO: 796401 - DNA, 15 bp, Homo sapiens
gatggattaatcctc

SEQ ID NO: 796402 - DNA, 15 bp, Homo sapiens
atggattaatcctcc

SEQ ID NO: 796403 - DNA, 15 bp, Homo sapiens
tggattaatcctcct

SEQ ID NO: 796404 - DNA, 15 bp, Homo sapiens
ggattaatcctcctt

SEQ ID NO: 796405 - DNA, 15 bp, Homo sapiens
gattaatcctccttt

SEQ ID NO: 796406 - DNA, 15 bp, Homo sapiens
attaatcctcctttt

SEQ ID NO: 796407 - DNA, 15 bp, Homo sapiens
ttaatcctccttttc

SEQ ID NO: 796408 - DNA, 15 bp, Homo sapiens
taatcctccttttca

SEQ ID NO: 796409 - DNA, 15 bp, Homo sapiens
aatcctccttttcac

SEQ ID NO: 796410 - DNA, 15 bp, Homo sapiens
atcctccttttcacc

SEQ ID NO: 796411 - DNA, 15 bp, Homo sapiens
tcctccttttcacct

SEQ ID NO: 796412 - DNA, 15 bp, Homo sapiens
cctccttttcacctt

SEQ ID NO: 796413 - DNA, 15 bp, Homo sapiens
ctccttttcaccttg

SEQ ID NO: 796414 - DNA, 15 bp, Homo sapiens
tccttttcaccttgc

SEQ ID NO: 796415 - DNA, 15 bp, Homo sapiens
ccttttcaccttgct

SEQ ID NO: 796416 - DNA, 15 bp, Homo sapiens
cttttcaccttgctt

SEQ ID NO: 796417 - DNA, 15 bp, Homo sapiens
ttttcaccttgcttc

SEQ ID NO: 796418 - DNA, 15 bp, Homo sapiens
tttcaccttgcttcc

SEQ ID NO: 796419 - DNA, 15 bp, Homo sapiens
ttcaccttgcttcct

SEQ ID NO: 796420 - DNA, 15 bp, Homo sapiens
tcaccttgcttcctt

SEQ ID NO: 796421 - DNA, 15 bp, Homo sapiens
caccttgcttccttc

SEQ ID NO: 796422 - DNA, 15 bp, Homo sapiens
accttgcttccttca

SEQ ID NO: 796423 - DNA, 15 bp, Homo sapiens
ccttgcttccttcac

SEQ ID NO: 796424 - DNA, 15 bp, Homo sapiens
cttgcttccttcacc

SEQ ID NO: 796425 - DNA, 15 bp, Homo sapiens
ttgcttccttcacct

SEQ ID NO: 796426 - DNA, 15 bp, Homo sapiens
tgcttccttcacctg

SEQ ID NO: 796427 - DNA, 15 bp, Homo sapiens
gcttccttcacctga

SEQ ID NO: 796428 - DNA, 15 bp, Homo sapiens
cttccttcacctgat

SEQ ID NO: 796429 - DNA, 15 bp, Homo sapiens
ttccttcacctgatc

SEQ ID NO: 796430 - DNA, 15 bp, Homo sapiens
tccttcacctgatcc

SEQ ID NO: 796431 - DNA, 15 bp, Homo sapiens
ccttcacctgatccc

SEQ ID NO: 796432 - DNA, 15 bp, Homo sapiens
cttcacctgatccct

SEQ ID NO: 796433 - DNA, 15 bp, Homo sapiens
ttcacctgatccctc

SEQ ID NO: 796434 - DNA, 15 bp, Homo sapiens
tcacctgatccctca

SEQ ID NO: 796435 - DNA, 15 bp, Homo sapiens
cacctgatccctcac

SEQ ID NO: 796436 - DNA, 15 bp, Homo sapiens
acctgatccctcacc

SEQ ID NO: 796437 - DNA, 15 bp, Homo sapiens
cctgatccctcacct

SEQ ID NO: 796438 - DNA, 15 bp, Homo sapiens
ctgatccctcacctc

SEQ ID NO: 796439 - DNA, 15 bp, Homo sapiens
tgatccctcacctct

SEQ ID NO: 796440 - DNA, 15 bp, Homo sapiens
gatccctcacctctc

SEQ ID NO: 796441 - DNA, 15 bp, Homo sapiens
atccctcacctctca

SEQ ID NO: 796442 - DNA, 15 bp, Homo sapiens
tccctcacctctcaa

SEQ ID NO: 796443 - DNA, 15 bp, Homo sapiens
ccctcacctctcaat

SEQ ID NO: 796444 - DNA, 15 bp, Homo sapiens
cctcacctctcaatg

SEQ ID NO: 796445 - DNA, 15 bp, Homo sapiens
ctcacctctcaatga

SEQ ID NO: 796446 - DNA, 15 bp, Homo sapiens
tcacctctcaatgaa

SEQ ID NO: 796447 - DNA, 15 bp, Homo sapiens
cacctctcaatgaat

SEQ ID NO: 796448 - DNA, 15 bp, Homo sapiens
acctctcaatgaatt

SEQ ID NO: 796449 - DNA, 15 bp, Homo sapiens
cctctcaatgaattg

SEQ ID NO: 796450 - DNA, 15 bp, Homo sapiens
ctctcaatgaattga

SEQ ID NO: 796451 - DNA, 15 bp, Homo sapiens
tctcaatgaattgaa

SEQ ID NO: 796452 - DNA, 15 bp, Homo sapiens
ctcaatgaattgaaa

SEQ ID NO: 796453 - DNA, 15 bp, Homo sapiens
attatacccttgttg

SEQ ID NO: 796454 - DNA, 15 bp, Homo sapiens
ttatacccttgttga

SEQ ID NO: 796455 - DNA, 15 bp, Homo sapiens
tatacccttgttgag

SEQ ID NO: 796456 - DNA, 15 bp, Homo sapiens
atacccttgttgagt

SEQ ID NO: 796457 - DNA, 15 bp, Homo sapiens
tacccttgttgagtt

SEQ ID NO: 796458 - DNA, 15 bp, Homo sapiens
acccttgttgagttt

SEQ ID NO: 796459 - DNA, 15 bp, Homo sapiens
cccttgttgagtttc

SEQ ID NO: 796460 - DNA, 15 bp, Homo sapiens
ccttgttgagtttct

SEQ ID NO: 796461 - DNA, 15 bp, Homo sapiens
cttgttgagtttctc

SEQ ID NO: 796462 - DNA, 15 bp, Homo sapiens
ttgttgagtttctct

SEQ ID NO: 796463 - DNA, 15 bp, Homo sapiens
tgttgagtttctctt

SEQ ID NO: 796464 - DNA, 15 bp, Homo sapiens
gttgagtttctcttg

SEQ ID NO: 796465 - DNA, 15 bp, Homo sapiens
ttgagtttctcttga

SEQ ID NO: 796466 - DNA, 15 bp, Homo sapiens
tgagtttctcttgac

SEQ ID NO: 796467 - DNA, 15 bp, Homo sapiens
gagtttctcttgaca

SEQ ID NO: 796468 - DNA, 15 bp, Homo sapiens
agtttctcttgacag

SEQ ID NO: 796469 - DNA, 15 bp, Homo sapiens
gtttctcttgacagg

SEQ ID NO: 796470 - DNA, 15 bp, Homo sapiens
tttctcttgacagga

SEQ ID NO: 796471 - DNA, 15 bp, Homo sapiens
ttctcttgacaggaa

SEQ ID NO: 796472 - DNA, 15 bp, Homo sapiens
tctcttgacaggaag

SEQ ID NO: 796473 - DNA, 15 bp, Homo sapiens
ctcttgacaggaagg

SEQ ID NO: 796474 - DNA, 15 bp, Homo sapiens
tcttgacaggaagga

SEQ ID NO: 796475 - DNA, 15 bp, Homo sapiens
cttgacaggaaggaa

SEQ ID NO: 796476 - DNA, 15 bp, Homo sapiens
ttgacaggaaggaaa

SEQ ID NO: 796477 - DNA, 15 bp, Homo sapiens
tgacaggaaggaaat

SEQ ID NO: 796478 - DNA, 15 bp, Homo sapiens
gacaggaaggaaatg

SEQ ID NO: 796479 - DNA, 15 bp, Homo sapiens
acaggaaggaaatga

SEQ ID NO: 796480 - DNA, 15 bp, Homo sapiens
caggaaggaaatgaa

SEQ ID NO: 796481 - DNA, 15 bp, Homo sapiens
aggaaggaaatgaat

SEQ ID NO: 796482 - DNA, 15 bp, Homo sapiens
ggaaggaaatgaatt

SEQ ID NO: 796483 - DNA, 15 bp, Homo sapiens
gaaggaaatgaattt

SEQ ID NO: 796484 - DNA, 15 bp, Homo sapiens
aaggaaatgaattta

SEQ ID NO: 796485 - DNA, 15 bp, Homo sapiens
aggaaatgaatttac

SEQ ID NO: 796486 - DNA, 15 bp, Homo sapiens
ggaaatgaatttacc

SEQ ID NO: 796487 - DNA, 15 bp, Homo sapiens
gaaatgaatttacct

SEQ ID NO: 796488 - DNA, 15 bp, Homo sapiens
aaatgaatttacctc

SEQ ID NO: 796489 - DNA, 15 bp, Homo sapiens
aatgaatttacctcg

SEQ ID NO: 796490 - DNA, 15 bp, Homo sapiens
atgaatttacctcgt

SEQ ID NO: 796491 - DNA, 15 bp, Homo sapiens
tgaatttacctcgtg

SEQ ID NO: 796492 - DNA, 15 bp, Homo sapiens
gaatttacctcgtgt

SEQ ID NO: 796493 - DNA, 15 bp, Homo sapiens
aatttacctcgtgtc

SEQ ID NO: 796494 - DNA, 15 bp, Homo sapiens
atttacctcgtgtca

SEQ ID NO: 796495 - DNA, 15 bp, Homo sapiens
tttacctcgtgtcac

SEQ ID NO: 796496 - DNA, 15 bp, Homo sapiens
ttacctcgtgtcacc

SEQ ID NO: 796497 - DNA, 15 bp, Homo sapiens
tacctcgtgtcacct

SEQ ID NO: 796498 - DNA, 15 bp, Homo sapiens
acctcgtgtcacctc

SEQ ID NO: 796499 - DNA, 15 bp, Homo sapiens
cctcgtgtcacctct

SEQ ID NO: 796500 - DNA, 15 bp, Homo sapiens
ctcgtgtcacctctg

SEQ ID NO: 796501 - DNA, 15 bp, Homo sapiens
tcgtgtcacctctgt

SEQ ID NO: 796502 - DNA, 15 bp, Homo sapiens
cgtgtcacctctgta

SEQ ID NO: 796503 - DNA, 15 bp, Homo sapiens
gtgtcacctctgtag

SEQ ID NO: 796504 - DNA, 15 bp, Homo sapiens
tgtcacctctgtagt

SEQ ID NO: 796505 - DNA, 15 bp, Homo sapiens
gtcacctctgtagtt

SEQ ID NO: 796506 - DNA, 15 bp, Homo sapiens
tcacctctgtagttt

SEQ ID NO: 796507 - DNA, 15 bp, Homo sapiens
cacctctgtagtttg

SEQ ID NO: 796508 - DNA, 15 bp, Homo sapiens
acctctgtagtttgc

SEQ ID NO: 796509 - DNA, 15 bp, Homo sapiens
cctctgtagtttgca

SEQ ID NO: 796510 - DNA, 15 bp, Homo sapiens
ctctgtagtttgcaa

SEQ ID NO: 796511 - DNA, 15 bp, Homo sapiens
tctgtagtttgcaag

SEQ ID NO: 796512 - DNA, 15 bp, Homo sapiens
ctgtagtttgcaagc

SEQ ID NO: 796513 - DNA, 15 bp, Homo sapiens
tgtagtttgcaagca

SEQ ID NO: 796514 - DNA, 15 bp, Homo sapiens
gtagtttgcaagcag

SEQ ID NO: 796515 - DNA, 15 bp, Homo sapiens
tagtttgcaagcagg

SEQ ID NO: 796516 - DNA, 15 bp, Homo sapiens
agtttgcaagcaggc

SEQ ID NO: 796517 - DNA, 15 bp, Homo sapiens
gtttgcaagcaggca

SEQ ID NO: 796518 - DNA, 15 bp, Homo sapiens
tttgcaagcaggcat

SEQ ID NO: 796519 - DNA, 15 bp, Homo sapiens
ttgcaagcaggcatg

SEQ ID NO: 796520 - DNA, 15 bp, Homo sapiens
tgcaagcaggcatgg

SEQ ID NO: 796521 - DNA, 15 bp, Homo sapiens
gcaagcaggcatggc

SEQ ID NO: 796522 - DNA, 15 bp, Homo sapiens
caagcaggcatggct

SEQ ID NO: 796523 - DNA, 15 bp, Homo sapiens
aagcaggcatggctt

SEQ ID NO: 796524 - DNA, 15 bp, Homo sapiens
agcaggcatggcttc

SEQ ID NO: 796525 - DNA, 15 bp, Homo sapiens
gcaggcatggcttct

SEQ ID NO: 796526 - DNA, 15 bp, Homo sapiens
caggcatggcttctg

SEQ ID NO: 796527 - DNA, 15 bp, Homo sapiens
aggcatggcttctga

SEQ ID NO: 796528 - DNA, 15 bp, Homo sapiens
ggcatggcttctgat

SEQ ID NO: 796529 - DNA, 15 bp, Homo sapiens
gcatggcttctgata

SEQ ID NO: 796530 - DNA, 15 bp, Homo sapiens
catggcttctgataa

SEQ ID NO: 796531 - DNA, 15 bp, Homo sapiens
atggcttctgataat

SEQ ID NO: 796532 - DNA, 15 bp, Homo sapiens
tggcttctgataata

SEQ ID NO: 796533 - DNA, 15 bp, Homo sapiens
ggcttctgataatag

SEQ ID NO: 796534 - DNA, 15 bp, Homo sapiens
gcttctgataatagc

SEQ ID NO: 796535 - DNA, 15 bp, Homo sapiens
cttctgataatagca

SEQ ID NO: 796536 - DNA, 15 bp, Homo sapiens
ttctgataatagcac

SEQ ID NO: 796537 - DNA, 15 bp, Homo sapiens
tctgataatagcacc

SEQ ID NO: 796538 - DNA, 15 bp, Homo sapiens
ctgataatagcacct

SEQ ID NO: 796539 - DNA, 15 bp, Homo sapiens
tgataatagcacctt

SEQ ID NO: 796540 - DNA, 15 bp, Homo sapiens
gataatagcaccttt

SEQ ID NO: 796541 - DNA, 15 bp, Homo sapiens
ataatagcacctttc

SEQ ID NO: 796542 - DNA, 15 bp, Homo sapiens
taatagcacctttca

SEQ ID NO: 796543 - DNA, 15 bp, Homo sapiens
aatagcacctttcat

SEQ ID NO: 796544 - DNA, 15 bp, Homo sapiens
atagcacctttcatg

SEQ ID NO: 796545 - DNA, 15 bp, Homo sapiens
tagcacctttcatgt

SEQ ID NO: 796546 - DNA, 15 bp, Homo sapiens
agcacctttcatgtt

SEQ ID NO: 796547 - DNA, 15 bp, Homo sapiens
gcacctttcatgttt

SEQ ID NO: 796548 - DNA, 15 bp, Homo sapiens
cacctttcatgtttt

SEQ ID NO: 796549 - DNA, 15 bp, Homo sapiens
acctttcatgttttg

SEQ ID NO: 796550 - DNA, 15 bp, Homo sapiens
cctttcatgttttgt

SEQ ID NO: 796551 - DNA, 15 bp, Homo sapiens
ctttcatgttttgta

SEQ ID NO: 796552 - DNA, 15 bp, Homo sapiens
tttcatgttttgtaa

SEQ ID NO: 796553 - DNA, 15 bp, Homo sapiens
ttcatgttttgtaag

SEQ ID NO: 796554 - DNA, 15 bp, Homo sapiens
tcatgttttgtaaga

SEQ ID NO: 796555 - DNA, 15 bp, Homo sapiens
catgttttgtaagac

SEQ ID NO: 796556 - DNA, 15 bp, Homo sapiens
atgttttgtaagacc

SEQ ID NO: 796557 - DNA, 15 bp, Homo sapiens
tgttttgtaagacca

SEQ ID NO: 796558 - DNA, 15 bp, Homo sapiens
gttttgtaagaccaa

SEQ ID NO: 796559 - DNA, 15 bp, Homo sapiens
ttttgtaagaccaag

SEQ ID NO: 796560 - DNA, 15 bp, Homo sapiens
tttgtaagaccaagg

SEQ ID NO: 796561 - DNA, 15 bp, Homo sapiens
ttgtaagaccaagga

SEQ ID NO: 796562 - DNA, 15 bp, Homo sapiens
tgtaagaccaaggag

SEQ ID NO: 796563 - DNA, 15 bp, Homo sapiens
gtaagaccaaggaga

SEQ ID NO: 796564 - DNA, 15 bp, Homo sapiens
taagaccaaggagaa

SEQ ID NO: 796565 - DNA, 15 bp, Homo sapiens
aagaccaaggagaag

SEQ ID NO: 796566 - DNA, 15 bp, Homo sapiens
agaccaaggagaagc

SEQ ID NO: 796567 - DNA, 15 bp, Homo sapiens
gaccaaggagaagca

SEQ ID NO: 796568 - DNA, 15 bp, Homo sapiens
accaaggagaagcat

SEQ ID NO: 796569 - DNA, 15 bp, Homo sapiens
ccaaggagaagcatt

SEQ ID NO: 796570 - DNA, 15 bp, Homo sapiens
caaggagaagcattc

SEQ ID NO: 796571 - DNA, 15 bp, Homo sapiens
aaggagaagcattcg

SEQ ID NO: 796572 - DNA, 15 bp, Homo sapiens
aggagaagcattcgt

SEQ ID NO: 796573 - DNA, 15 bp, Homo sapiens
ggagaagcattcgtg

SEQ ID NO: 796574 - DNA, 15 bp, Homo sapiens
gagaagcattcgtgt

SEQ ID NO: 796575 - DNA, 15 bp, Homo sapiens
agaagcattcgtgtg

SEQ ID NO: 796576 - DNA, 15 bp, Homo sapiens
gaagcattcgtgtgg

SEQ ID NO: 796577 - DNA, 15 bp, Homo sapiens
aagcattcgtgtggt

SEQ ID NO: 796578 - DNA, 15 bp, Homo sapiens
agcattcgtgtggtg

SEQ ID NO: 796579 - DNA, 15 bp, Homo sapiens
gcattcgtgtggtgg

SEQ ID NO: 796580 - DNA, 15 bp, Homo sapiens
cattcgtgtggtggc

SEQ ID NO: 796581 - DNA, 15 bp, Homo sapiens
attcgtgtggtggcc

SEQ ID NO: 796582 - DNA, 15 bp, Homo sapiens
ttcgtgtggtggcca

SEQ ID NO: 796583 - DNA, 15 bp, Homo sapiens
tcgtgtggtggccag

SEQ ID NO: 796584 - DNA, 15 bp, Homo sapiens
cgtgtggtggccagt

SEQ ID NO: 796585 - DNA, 15 bp, Homo sapiens
gtgtggtggccagtc

SEQ ID NO: 796586 - DNA, 15 bp, Homo sapiens
tgtggtggccagtcc

SEQ ID NO: 796587 - DNA, 15 bp, Homo sapiens
gtggtggccagtcct

SEQ ID NO: 796588 - DNA, 15 bp, Homo sapiens
tggtggccagtcctt

SEQ ID NO: 796589 - DNA, 15 bp, Homo sapiens
ggtggccagtccttg

SEQ ID NO: 796590 - DNA, 15 bp, Homo sapiens
gtggccagtccttgg

SEQ ID NO: 796591 - DNA, 15 bp, Homo sapiens
tggccagtccttggt

SEQ ID NO: 796592 - DNA, 15 bp, Homo sapiens
ggccagtccttggtg

SEQ ID NO: 796593 - DNA, 15 bp, Homo sapiens
gccagtccttggtga

SEQ ID NO: 796594 - DNA, 15 bp, Homo sapiens
ccagtccttggtgac

SEQ ID NO: 796595 - DNA, 15 bp, Homo sapiens
cagtccttggtgacc

SEQ ID NO: 796596 - DNA, 15 bp, Homo sapiens
agtccttggtgaccc

SEQ ID NO: 796597 - DNA, 15 bp, Homo sapiens
gtccttggtgaccct

SEQ ID NO: 796598 - DNA, 15 bp, Homo sapiens
tccttggtgaccctt

SEQ ID NO: 796599 - DNA, 15 bp, Homo sapiens
ccttggtgacccttt

SEQ ID NO: 796600 - DNA, 15 bp, Homo sapiens
cttggtgaccctttg

SEQ ID NO: 796601 - DNA, 15 bp, Homo sapiens
ttggtgaccctttgt

SEQ ID NO: 796602 - DNA, 15 bp, Homo sapiens
tggtgaccctttgtc

SEQ ID NO: 796603 - DNA, 15 bp, Homo sapiens
ggtgaccctttgtct

SEQ ID NO: 796604 - DNA, 15 bp, Homo sapiens
gtgaccctttgtctc

SEQ ID NO: 796605 - DNA, 15 bp, Homo sapiens
tgaccctttgtctca

SEQ ID NO: 796606 - DNA, 15 bp, Homo sapiens
gaccctttgtctcag

SEQ ID NO: 796607 - DNA, 15 bp, Homo sapiens
accctttgtctcagc

SEQ ID NO: 796608 - DNA, 15 bp, Homo sapiens
ccctttgtctcagcc

SEQ ID NO: 796609 - DNA, 15 bp, Homo sapiens
cctttgtctcagcct

SEQ ID NO: 796610 - DNA, 15 bp, Homo sapiens
ctttgtctcagcctg

SEQ ID NO: 796611 - DNA, 15 bp, Homo sapiens
tttgtctcagcctgg

SEQ ID NO: 796612 - DNA, 15 bp, Homo sapiens
ttgtctcagcctgga

SEQ ID NO: 796613 - DNA, 15 bp, Homo sapiens
tgtctcagcctggag

SEQ ID NO: 796614 - DNA, 15 bp, Homo sapiens
gtctcagcctggagg

SEQ ID NO: 796615 - DNA, 15 bp, Homo sapiens
tctcagcctggaggt

SEQ ID NO: 796616 - DNA, 15 bp, Homo sapiens
ctcagcctggaggtg

SEQ ID NO: 796617 - DNA, 15 bp, Homo sapiens
tcagcctggaggtga

SEQ ID NO: 796618 - DNA, 15 bp, Homo sapiens
cagcctggaggtgag

SEQ ID NO: 796619 - DNA, 15 bp, Homo sapiens
agcctggaggtgagc

SEQ ID NO: 796620 - DNA, 15 bp, Homo sapiens
gcctggaggtgagct

SEQ ID NO: 796621 - DNA, 15 bp, Homo sapiens
cctggaggtgagctt

SEQ ID NO: 796622 - DNA, 15 bp, Homo sapiens
ctggaggtgagcttg

SEQ ID NO: 796623 - DNA, 15 bp, Homo sapiens
tggaggtgagcttga

SEQ ID NO: 796624 - DNA, 15 bp, Homo sapiens
ggaggtgagcttgag

SEQ ID NO: 796625 - DNA, 15 bp, Homo sapiens
gaggtgagcttgagc

SEQ ID NO: 796626 - DNA, 15 bp, Homo sapiens
aggtgagcttgagct

SEQ ID NO: 796627 - DNA, 15 bp, Homo sapiens
ggtgagcttgagctg

SEQ ID NO: 796628 - DNA, 15 bp, Homo sapiens
gtgagcttgagctga

SEQ ID NO: 796629 - DNA, 15 bp, Homo sapiens
tgagcttgagctgat

SEQ ID NO: 796630 - DNA, 15 bp, Homo sapiens
gagcttgagctgatt

SEQ ID NO: 796631 - DNA, 15 bp, Homo sapiens
agcttgagctgattc

SEQ ID NO: 796632 - DNA, 15 bp, Homo sapiens
gcttgagctgattct

SEQ ID NO: 796633 - DNA, 15 bp, Homo sapiens
cttgagctgattctt

SEQ ID NO: 796634 - DNA, 15 bp, Homo sapiens
ttgagctgattcttc

SEQ ID NO: 796635 - DNA, 15 bp, Homo sapiens
tgagctgattcttca

SEQ ID NO: 796636 - DNA, 15 bp, Homo sapiens
gagctgattcttcat

SEQ ID NO: 796637 - DNA, 15 bp, Homo sapiens
agctgattcttcatg

SEQ ID NO: 796638 - DNA, 15 bp, Homo sapiens
gctgattcttcatgg

SEQ ID NO: 796639 - DNA, 15 bp, Homo sapiens
ctgattcttcatggg

SEQ ID NO: 796640 - DNA, 15 bp, Homo sapiens
tgattcttcatggga

SEQ ID NO: 796641 - DNA, 15 bp, Homo sapiens
gattcttcatgggag

SEQ ID NO: 796642 - DNA, 15 bp, Homo sapiens
attcttcatgggagt

SEQ ID NO: 796643 - DNA, 15 bp, Homo sapiens
ttcttcatgggagtg

SEQ ID NO: 796644 - DNA, 15 bp, Homo sapiens
tcttcatgggagtgt

SEQ ID NO: 796645 - DNA, 15 bp, Homo sapiens
cttcatgggagtgtt

SEQ ID NO: 796646 - DNA, 15 bp, Homo sapiens
ttcatgggagtgttt

SEQ ID NO: 796647 - DNA, 15 bp, Homo sapiens
tcatgggagtgttta

SEQ ID NO: 796648 - DNA, 15 bp, Homo sapiens
catgggagtgtttac

SEQ ID NO: 796649 - DNA, 15 bp, Homo sapiens
atgggagtgtttact

SEQ ID NO: 796650 - DNA, 15 bp, Homo sapiens
tgggagtgtttactc

SEQ ID NO: 796651 - DNA, 15 bp, Homo sapiens
gggagtgtttactcc

SEQ ID NO: 796652 - DNA, 15 bp, Homo sapiens
ggagtgtttactcct

SEQ ID NO: 796653 - DNA, 15 bp, Homo sapiens
gagtgtttactcctg

SEQ ID NO: 796654 - DNA, 15 bp, Homo sapiens
agtgtttactcctgg

SEQ ID NO: 796655 - DNA, 15 bp, Homo sapiens
gtgtttactcctggg

SEQ ID NO: 796656 - DNA, 15 bp, Homo sapiens
tgtttactcctgggg

SEQ ID NO: 796657 - DNA, 15 bp, Homo sapiens
gtttactcctggggc

SEQ ID NO: 796658 - DNA, 15 bp, Homo sapiens
tttactcctggggct

SEQ ID NO: 796659 - DNA, 15 bp, Homo sapiens
ttactcctggggctt

SEQ ID NO: 796660 - DNA, 15 bp, Homo sapiens
tactcctggggcttg

SEQ ID NO: 796661 - DNA, 15 bp, Homo sapiens
actcctggggcttgt

SEQ ID NO: 796662 - DNA, 15 bp, Homo sapiens
ctcctggggcttgta

SEQ ID NO: 796663 - DNA, 15 bp, Homo sapiens
tcctggggcttgtag

SEQ ID NO: 796664 - DNA, 15 bp, Homo sapiens
cctggggcttgtagg

SEQ ID NO: 796665 - DNA, 15 bp, Homo sapiens
ctggggcttgtagga

SEQ ID NO: 796666 - DNA, 15 bp, Homo sapiens
tggggcttgtaggaa

SEQ ID NO: 796667 - DNA, 15 bp, Homo sapiens
ggggcttgtaggaat

SEQ ID NO: 796668 - DNA, 15 bp, Homo sapiens
gggcttgtaggaatc

SEQ ID NO: 796669 - DNA, 15 bp, Homo sapiens
ggcttgtaggaatct

SEQ ID NO: 796670 - DNA, 15 bp, Homo sapiens
gcttgtaggaatctg

SEQ ID NO: 796671 - DNA, 15 bp, Homo sapiens
cttgtaggaatctgg

SEQ ID NO: 796672 - DNA, 15 bp, Homo sapiens
ttgtaggaatctggc

SEQ ID NO: 796673 - DNA, 15 bp, Homo sapiens
tgtaggaatctggct

SEQ ID NO: 796674 - DNA, 15 bp, Homo sapiens
gtaggaatctggctg

SEQ ID NO: 796675 - DNA, 15 bp, Homo sapiens
taggaatctggctgg

SEQ ID NO: 796676 - DNA, 15 bp, Homo sapiens
aggaatctggctggg

SEQ ID NO: 796677 - DNA, 15 bp, Homo sapiens
ggaatctggctgggg

SEQ ID NO: 796678 - DNA, 15 bp, Homo sapiens
gaatctggctggggg

SEQ ID NO: 796679 - DNA, 15 bp, Homo sapiens
aatctggctgggggt

SEQ ID NO: 796680 - DNA, 15 bp, Homo sapiens
atctggctgggggtt

SEQ ID NO: 796681 - DNA, 15 bp, Homo sapiens
tctggctgggggttg

SEQ ID NO: 796682 - DNA, 15 bp, Homo sapiens
ctggctgggggttgg

SEQ ID NO: 796683 - DNA, 15 bp, Homo sapiens
tggctgggggttggg

SEQ ID NO: 796684 - DNA, 15 bp, Homo sapiens
ggctgggggttgggt

SEQ ID NO: 796685 - DNA, 15 bp, Homo sapiens
gctgggggttgggtg

SEQ ID NO: 796686 - DNA, 15 bp, Homo sapiens
ctgggggttgggtgg

SEQ ID NO: 796687 - DNA, 15 bp, Homo sapiens
tgggggttgggtggt

SEQ ID NO: 796688 - DNA, 15 bp, Homo sapiens
gggggttgggtggtc

SEQ ID NO: 796689 - DNA, 15 bp, Homo sapiens
ggggttgggtggtca

SEQ ID NO: 796690 - DNA, 15 bp, Homo sapiens
gggttgggtggtcag

SEQ ID NO: 796691 - DNA, 15 bp, Homo sapiens
ggttgggtggtcagc

SEQ ID NO: 796692 - DNA, 15 bp, Homo sapiens
gttgggtggtcagct

SEQ ID NO: 796693 - DNA, 15 bp, Homo sapiens
ttgggtggtcagctg

SEQ ID NO: 796694 - DNA, 15 bp, Homo sapiens
tgggtggtcagctgt

SEQ ID NO: 796695 - DNA, 15 bp, Homo sapiens
gggtggtcagctgtc

SEQ ID NO: 796696 - DNA, 15 bp, Homo sapiens
ggtggtcagctgtcc

SEQ ID NO: 796697 - DNA, 15 bp, Homo sapiens
gtggtcagctgtccc

SEQ ID NO: 796698 - DNA, 15 bp, Homo sapiens
tggtcagctgtccca

SEQ ID NO: 796699 - DNA, 15 bp, Homo sapiens
ggtcagctgtcccat

SEQ ID NO: 796700 - DNA, 15 bp, Homo sapiens
gtcagctgtcccata

SEQ ID NO: 796701 - DNA, 15 bp, Homo sapiens
tcagctgtcccataa

SEQ ID NO: 796702 - DNA, 15 bp, Homo sapiens
cagctgtcccataag

SEQ ID NO: 796703 - DNA, 15 bp, Homo sapiens
agctgtcccataaga

SEQ ID NO: 796704 - DNA, 15 bp, Homo sapiens
gctgtcccataagat

SEQ ID NO: 796705 - DNA, 15 bp, Homo sapiens
ctgtcccataagatt

SEQ ID NO: 796706 - DNA, 15 bp, Homo sapiens
tgtcccataagattg

SEQ ID NO: 796707 - DNA, 15 bp, Homo sapiens
gtcccataagattgt

SEQ ID NO: 796708 - DNA, 15 bp, Homo sapiens
tcccataagattgtg

SEQ ID NO: 796709 - DNA, 15 bp, Homo sapiens
cccataagattgtgg

SEQ ID NO: 796710 - DNA, 15 bp, Homo sapiens
ccataagattgtggg

SEQ ID NO: 796711 - DNA, 15 bp, Homo sapiens
cataagattgtgggc

SEQ ID NO: 796712 - DNA, 15 bp, Homo sapiens
ataagattgtgggcc

SEQ ID NO: 796713 - DNA, 15 bp, Homo sapiens
taagattgtgggcct

SEQ ID NO: 796714 - DNA, 15 bp, Homo sapiens
aagattgtgggcctt

SEQ ID NO: 796715 - DNA, 15 bp, Homo sapiens
agattgtgggccttg

SEQ ID NO: 796716 - DNA, 15 bp, Homo sapiens
gattgtgggccttgg

SEQ ID NO: 796717 - DNA, 15 bp, Homo sapiens
attgtgggccttggc

SEQ ID NO: 796718 - DNA, 15 bp, Homo sapiens
ttgtgggccttggcc

SEQ ID NO: 796719 - DNA, 15 bp, Homo sapiens
tgtgggccttggcca

SEQ ID NO: 796720 - DNA, 15 bp, Homo sapiens
gtgggccttggccac

SEQ ID NO: 796721 - DNA, 15 bp, Homo sapiens
tgggccttggccact

SEQ ID NO: 796722 - DNA, 15 bp, Homo sapiens
gggccttggccactg

SEQ ID NO: 796723 - DNA, 15 bp, Homo sapiens
ggccttggccactgc

SEQ ID NO: 796724 - DNA, 15 bp, Homo sapiens
gccttggccactgca

SEQ ID NO: 796725 - DNA, 15 bp, Homo sapiens
ccttggccactgcag

SEQ ID NO: 796726 - DNA, 15 bp, Homo sapiens
cttggccactgcagc

SEQ ID NO: 796727 - DNA, 15 bp, Homo sapiens
ttggccactgcagca

SEQ ID NO: 796728 - DNA, 15 bp, Homo sapiens
tggccactgcagcat

SEQ ID NO: 796729 - DNA, 15 bp, Homo sapiens
ggccactgcagcatg

SEQ ID NO: 796730 - DNA, 15 bp, Homo sapiens
gccactgcagcatgc

SEQ ID NO: 796731 - DNA, 15 bp, Homo sapiens
ccactgcagcatgca

SEQ ID NO: 796732 - DNA, 15 bp, Homo sapiens
cactgcagcatgcac

SEQ ID NO: 796733 - DNA, 15 bp, Homo sapiens
actgcagcatgcaca

SEQ ID NO: 796734 - DNA, 15 bp, Homo sapiens
ctgcagcatgcacat

SEQ ID NO: 796735 - DNA, 15 bp, Homo sapiens
tgcagcatgcacatc

SEQ ID NO: 796736 - DNA, 15 bp, Homo sapiens
gcagcatgcacatcc

SEQ ID NO: 796737 - DNA, 15 bp, Homo sapiens
cagcatgcacatccc

SEQ ID NO: 796738 - DNA, 15 bp, Homo sapiens
agcatgcacatccct

SEQ ID NO: 796739 - DNA, 15 bp, Homo sapiens
gcatgcacatccctg

SEQ ID NO: 796740 - DNA, 15 bp, Homo sapiens
catgcacatccctga

SEQ ID NO: 796741 - DNA, 15 bp, Homo sapiens
atgcacatccctgaa

SEQ ID NO: 796742 - DNA, 15 bp, Homo sapiens
tgcacatccctgaat

SEQ ID NO: 796743 - DNA, 15 bp, Homo sapiens
gcacatccctgaatc

SEQ ID NO: 796744 - DNA, 15 bp, Homo sapiens
cacatccctgaatcc

SEQ ID NO: 796745 - DNA, 15 bp, Homo sapiens
acatccctgaatcca

SEQ ID NO: 796746 - DNA, 15 bp, Homo sapiens
catccctgaatccac

SEQ ID NO: 796747 - DNA, 15 bp, Homo sapiens
atccctgaatccaca

SEQ ID NO: 796748 - DNA, 15 bp, Homo sapiens
tccctgaatccacac

SEQ ID NO: 796749 - DNA, 15 bp, Homo sapiens
ccctgaatccacact

SEQ ID NO: 796750 - DNA, 15 bp, Homo sapiens
cctgaatccacactc

SEQ ID NO: 796751 - DNA, 15 bp, Homo sapiens
ctgaatccacactct

SEQ ID NO: 796752 - DNA, 15 bp, Homo sapiens
tgaatccacactctt

SEQ ID NO: 796753 - DNA, 15 bp, Homo sapiens
gaatccacactctta

SEQ ID NO: 796754 - DNA, 15 bp, Homo sapiens
aatccacactcttat

SEQ ID NO: 796755 - DNA, 15 bp, Homo sapiens
atccacactcttatg

SEQ ID NO: 796756 - DNA, 15 bp, Homo sapiens
tccacactcttatgg

SEQ ID NO: 796757 - DNA, 15 bp, Homo sapiens
ccacactcttatggt

SEQ ID NO: 796758 - DNA, 15 bp, Homo sapiens
cacactcttatggta

SEQ ID NO: 796759 - DNA, 15 bp, Homo sapiens
acactcttatggtat

SEQ ID NO: 796760 - DNA, 15 bp, Homo sapiens
cactcttatggtatc

SEQ ID NO: 796761 - DNA, 15 bp, Homo sapiens
actcttatggtatcg

SEQ ID NO: 796762 - DNA, 15 bp, Homo sapiens
ctcttatggtatcga

SEQ ID NO: 796763 - DNA, 15 bp, Homo sapiens
tcttatggtatcgag

SEQ ID NO: 796764 - DNA, 15 bp, Homo sapiens
cttatggtatcgagg

SEQ ID NO: 796765 - DNA, 15 bp, Homo sapiens
ttatggtatcgaggc

SEQ ID NO: 796766 - DNA, 15 bp, Homo sapiens
tatggtatcgaggcc

SEQ ID NO: 796767 - DNA, 15 bp, Homo sapiens
atggtatcgaggcct

SEQ ID NO: 796768 - DNA, 15 bp, Homo sapiens
tggtatcgaggcctt

SEQ ID NO: 796769 - DNA, 15 bp, Homo sapiens
ggtatcgaggccttg

SEQ ID NO: 796770 - DNA, 15 bp, Homo sapiens
gtatcgaggccttgg

SEQ ID NO: 796771 - DNA, 15 bp, Homo sapiens
tatcgaggccttggg

SEQ ID NO: 796772 - DNA, 15 bp, Homo sapiens
atcgaggccttgggc

SEQ ID NO: 796773 - DNA, 15 bp, Homo sapiens
tcgaggccttgggca

SEQ ID NO: 796774 - DNA, 15 bp, Homo sapiens
cgaggccttgggcaa

SEQ ID NO: 796775 - DNA, 15 bp, Homo sapiens
gaggccttgggcaaa

SEQ ID NO: 796776 - DNA, 15 bp, Homo sapiens
aggccttgggcaaat

SEQ ID NO: 796777 - DNA, 15 bp, Homo sapiens
ggccttgggcaaatg

SEQ ID NO: 796778 - DNA, 15 bp, Homo sapiens
gccttgggcaaatga

SEQ ID NO: 796779 - DNA, 15 bp, Homo sapiens
ccttgggcaaatgac

SEQ ID NO: 796780 - DNA, 15 bp, Homo sapiens
cttgggcaaatgact

SEQ ID NO: 796781 - DNA, 15 bp, Homo sapiens
ttgggcaaatgactg

SEQ ID NO: 796782 - DNA, 15 bp, Homo sapiens
tgggcaaatgactga

SEQ ID NO: 796783 - DNA, 15 bp, Homo sapiens
gggcaaatgactgaa

SEQ ID NO: 796784 - DNA, 15 bp, Homo sapiens
ggcaaatgactgaat

SEQ ID NO: 796785 - DNA, 15 bp, Homo sapiens
gcaaatgactgaatt

SEQ ID NO: 796786 - DNA, 15 bp, Homo sapiens
caaatgactgaattt

SEQ ID NO: 796787 - DNA, 15 bp, Homo sapiens
aaatgactgaatttc

SEQ ID NO: 796788 - DNA, 15 bp, Homo sapiens
aatgactgaatttcc

SEQ ID NO: 796789 - DNA, 15 bp, Homo sapiens
atgactgaatttccc

SEQ ID NO: 796790 - DNA, 15 bp, Homo sapiens
tgactgaatttccct

SEQ ID NO: 796791 - DNA, 15 bp, Homo sapiens
gactgaatttccctt

SEQ ID NO: 796792 - DNA, 15 bp, Homo sapiens
actgaatttcccttg

SEQ ID NO: 796793 - DNA, 15 bp, Homo sapiens
ctgaatttcccttga

SEQ ID NO: 796794 - DNA, 15 bp, Homo sapiens
tgaatttcccttgac

SEQ ID NO: 796795 - DNA, 15 bp, Homo sapiens
gaatttcccttgacc

SEQ ID NO: 796796 - DNA, 15 bp, Homo sapiens
aatttcccttgacct

SEQ ID NO: 796797 - DNA, 15 bp, Homo sapiens
atttcccttgacctt

SEQ ID NO: 796798 - DNA, 15 bp, Homo sapiens
tttcccttgaccttc

SEQ ID NO: 796799 - DNA, 15 bp, Homo sapiens
ttcccttgaccttcc

SEQ ID NO: 796800 - DNA, 15 bp, Homo sapiens
tcccttgaccttccc

SEQ ID NO: 796801 - DNA, 15 bp, Homo sapiens
cccttgaccttccct

SEQ ID NO: 796802 - DNA, 15 bp, Homo sapiens
ccttgaccttccctt

SEQ ID NO: 796803 - DNA, 15 bp, Homo sapiens
cttgaccttcccttc

SEQ ID NO: 796804 - DNA, 15 bp, Homo sapiens
ttgaccttcccttcc

SEQ ID NO: 796805 - DNA, 15 bp, Homo sapiens
tgaccttcccttcca

SEQ ID NO: 796806 - DNA, 15 bp, Homo sapiens
gaccttcccttccac

SEQ ID NO: 796807 - DNA, 15 bp, Homo sapiens
accttcccttccacc

SEQ ID NO: 796808 - DNA, 15 bp, Homo sapiens
ccttcccttccacct

SEQ ID NO: 796809 - DNA, 15 bp, Homo sapiens
cttcccttccacctg

SEQ ID NO: 796810 - DNA, 15 bp, Homo sapiens
ttcccttccacctgt

SEQ ID NO: 796811 - DNA, 15 bp, Homo sapiens
tcccttccacctgta

SEQ ID NO: 796812 - DNA, 15 bp, Homo sapiens
cccttccacctgtaa

SEQ ID NO: 796813 - DNA, 15 bp, Homo sapiens
ccttccacctgtaaa

SEQ ID NO: 796814 - DNA, 15 bp, Homo sapiens
cttccacctgtaaaa

SEQ ID NO: 796815 - DNA, 15 bp, Homo sapiens
ttccacctgtaaaat

SEQ ID NO: 796816 - DNA, 15 bp, Homo sapiens
tccacctgtaaaatg

SEQ ID NO: 796817 - DNA, 15 bp, Homo sapiens
ccacctgtaaaatgg

SEQ ID NO: 796818 - DNA, 15 bp, Homo sapiens
cacctgtaaaatggg

SEQ ID NO: 796819 - DNA, 15 bp, Homo sapiens
ctgtaaaatggggac

SEQ ID NO: 796820 - DNA, 15 bp, Homo sapiens
tgtaaaatggggaca

SEQ ID NO: 796821 - DNA, 15 bp, Homo sapiens
gtaaaatggggacaa

SEQ ID NO: 796822 - DNA, 15 bp, Homo sapiens
taaaatggggacaat

SEQ ID NO: 796823 - DNA, 15 bp, Homo sapiens
aaaatggggacaatg

SEQ ID NO: 796824 - DNA, 15 bp, Homo sapiens
aaatggggacaatga

SEQ ID NO: 796825 - DNA, 15 bp, Homo sapiens
aatggggacaatgat

SEQ ID NO: 796826 - DNA, 15 bp, Homo sapiens
atggggacaatgata

SEQ ID NO: 796827 - DNA, 15 bp, Homo sapiens
tggggacaatgatag

SEQ ID NO: 796828 - DNA, 15 bp, Homo sapiens
ggggacaatgatagt

SEQ ID NO: 796829 - DNA, 15 bp, Homo sapiens
gggacaatgatagta

SEQ ID NO: 796830 - DNA, 15 bp, Homo sapiens
ggacaatgatagtag

SEQ ID NO: 796831 - DNA, 15 bp, Homo sapiens
gacaatgatagtagt

SEQ ID NO: 796832 - DNA, 15 bp, Homo sapiens
acaatgatagtagtt

SEQ ID NO: 796833 - DNA, 15 bp, Homo sapiens
caatgatagtagtta

SEQ ID NO: 796834 - DNA, 15 bp, Homo sapiens
aatgatagtagttat

SEQ ID NO: 796835 - DNA, 15 bp, Homo sapiens
atgatagtagttatc

SEQ ID NO: 796836 - DNA, 15 bp, Homo sapiens
tgatagtagttatct

SEQ ID NO: 796837 - DNA, 15 bp, Homo sapiens
gatagtagttatctc

SEQ ID NO: 796838 - DNA, 15 bp, Homo sapiens
atagtagttatctca

SEQ ID NO: 796839 - DNA, 15 bp, Homo sapiens
tagtagttatctcac

SEQ ID NO: 796840 - DNA, 15 bp, Homo sapiens
agtagttatctcaca

SEQ ID NO: 796841 - DNA, 15 bp, Homo sapiens
gtagttatctcacag

SEQ ID NO: 796842 - DNA, 15 bp, Homo sapiens
tagttatctcacagg

SEQ ID NO: 796843 - DNA, 15 bp, Homo sapiens
agttatctcacaggg

SEQ ID NO: 796844 - DNA, 15 bp, Homo sapiens
gttatctcacagggt

SEQ ID NO: 796845 - DNA, 15 bp, Homo sapiens
ttatctcacagggta

SEQ ID NO: 796846 - DNA, 15 bp, Homo sapiens
tatctcacagggtag

SEQ ID NO: 796847 - DNA, 15 bp, Homo sapiens
atctcacagggtagg

SEQ ID NO: 796848 - DNA, 15 bp, Homo sapiens
tctcacagggtaggc

SEQ ID NO: 796849 - DNA, 15 bp, Homo sapiens
ctcacagggtaggcg

SEQ ID NO: 796850 - DNA, 15 bp, Homo sapiens
tcacagggtaggcgt

SEQ ID NO: 796851 - DNA, 15 bp, Homo sapiens
cacagggtaggcgtc

SEQ ID NO: 796852 - DNA, 15 bp, Homo sapiens
acagggtaggcgtca

SEQ ID NO: 796853 - DNA, 15 bp, Homo sapiens
cagggtaggcgtcag

SEQ ID NO: 796854 - DNA, 15 bp, Homo sapiens
agggtaggcgtcaga

SEQ ID NO: 796855 - DNA, 15 bp, Homo sapiens
gggtaggcgtcagat

SEQ ID NO: 796856 - DNA, 15 bp, Homo sapiens
ggtaggcgtcagatt

SEQ ID NO: 796857 - DNA, 15 bp, Homo sapiens
gtaggcgtcagattt

SEQ ID NO: 796858 - DNA, 15 bp, Homo sapiens
taggcgtcagattta

SEQ ID NO: 796859 - DNA, 15 bp, Homo sapiens
aggcgtcagatttaa

SEQ ID NO: 796860 - DNA, 15 bp, Homo sapiens
ggcgtcagatttaat

SEQ ID NO: 796861 - DNA, 15 bp, Homo sapiens
gcgtcagatttaatg

SEQ ID NO: 796862 - DNA, 15 bp, Homo sapiens
cgtcagatttaatga

SEQ ID NO: 796863 - DNA, 15 bp, Homo sapiens
gtcagatttaatgag

SEQ ID NO: 796864 - DNA, 15 bp, Homo sapiens
tcagatttaatgagc

SEQ ID NO: 796865 - DNA, 15 bp, Homo sapiens
cagatttaatgagct

SEQ ID NO: 796866 - DNA, 15 bp, Homo sapiens
agatttaatgagcta

SEQ ID NO: 796867 - DNA, 15 bp, Homo sapiens
gatttaatgagctaa

SEQ ID NO: 796868 - DNA, 15 bp, Homo sapiens
atttaatgagctaat

SEQ ID NO: 796869 - DNA, 15 bp, Homo sapiens
tttaatgagctaata

SEQ ID NO: 796870 - DNA, 15 bp, Homo sapiens
ttaatgagctaatag

SEQ ID NO: 796871 - DNA, 15 bp, Homo sapiens
taatgagctaataga

SEQ ID NO: 796872 - DNA, 15 bp, Homo sapiens
aatgagctaatagat

SEQ ID NO: 796873 - DNA, 15 bp, Homo sapiens
atgagctaatagatg

SEQ ID NO: 796874 - DNA, 15 bp, Homo sapiens
tgagctaatagatgc

SEQ ID NO: 796875 - DNA, 15 bp, Homo sapiens
gagctaatagatgca

SEQ ID NO: 796876 - DNA, 15 bp, Homo sapiens
agctaatagatgcaa

SEQ ID NO: 796877 - DNA, 15 bp, Homo sapiens
gctaatagatgcaaa

SEQ ID NO: 796878 - DNA, 15 bp, Homo sapiens
ctaatagatgcaaag

SEQ ID NO: 796879 - DNA, 15 bp, Homo sapiens
taatagatgcaaagc

SEQ ID NO: 796880 - DNA, 15 bp, Homo sapiens
aatagatgcaaagcc

SEQ ID NO: 796881 - DNA, 15 bp, Homo sapiens
atagatgcaaagccc

SEQ ID NO: 796882 - DNA, 15 bp, Homo sapiens
tagatgcaaagccct

SEQ ID NO: 796883 - DNA, 15 bp, Homo sapiens
agatgcaaagccctt

SEQ ID NO: 796884 - DNA, 15 bp, Homo sapiens
gatgcaaagcccttg

SEQ ID NO: 796885 - DNA, 15 bp, Homo sapiens
atgcaaagcccttgc

SEQ ID NO: 796886 - DNA, 15 bp, Homo sapiens
tgcaaagcccttgca

SEQ ID NO: 796887 - DNA, 15 bp, Homo sapiens
gcaaagcccttgcat

SEQ ID NO: 796888 - DNA, 15 bp, Homo sapiens
caaagcccttgcatg

SEQ ID NO: 796889 - DNA, 15 bp, Homo sapiens
aaagcccttgcatgt

SEQ ID NO: 796890 - DNA, 15 bp, Homo sapiens
aagcccttgcatgtg

SEQ ID NO: 796891 - DNA, 15 bp, Homo sapiens
agcccttgcatgtgc

SEQ ID NO: 796892 - DNA, 15 bp, Homo sapiens
gcccttgcatgtgcc

SEQ ID NO: 796893 - DNA, 15 bp, Homo sapiens
cccttgcatgtgcct

SEQ ID NO: 796894 - DNA, 15 bp, Homo sapiens
ccttgcatgtgcctg

SEQ ID NO: 796895 - DNA, 15 bp, Homo sapiens
cttgcatgtgcctgg

SEQ ID NO: 796896 - DNA, 15 bp, Homo sapiens
ttgcatgtgcctggc

SEQ ID NO: 796897 - DNA, 15 bp, Homo sapiens
tgcatgtgcctggca

SEQ ID NO: 796898 - DNA, 15 bp, Homo sapiens
gcatgtgcctggcat

SEQ ID NO: 796899 - DNA, 15 bp, Homo sapiens
catgtgcctggcata

SEQ ID NO: 796900 - DNA, 15 bp, Homo sapiens
atgtgcctggcatat

SEQ ID NO: 796901 - DNA, 15 bp, Homo sapiens
tgtgcctggcatata

SEQ ID NO: 796902 - DNA, 15 bp, Homo sapiens
gtgcctggcatataa

SEQ ID NO: 796903 - DNA, 15 bp, Homo sapiens
tgcctggcatataat

SEQ ID NO: 796904 - DNA, 15 bp, Homo sapiens
gcctggcatataata

SEQ ID NO: 796905 - DNA, 15 bp, Homo sapiens
cctggcatataataa

SEQ ID NO: 796906 - DNA, 15 bp, Homo sapiens
ctggcatataataaa

SEQ ID NO: 796907 - DNA, 15 bp, Homo sapiens
tggcatataataaat

SEQ ID NO: 796908 - DNA, 15 bp, Homo sapiens
ggcatataataaatg

SEQ ID NO: 796909 - DNA, 15 bp, Homo sapiens
gcatataataaatgc

SEQ ID NO: 796910 - DNA, 15 bp, Homo sapiens
catataataaatgct

SEQ ID NO: 796911 - DNA, 15 bp, Homo sapiens
atataataaatgcta

SEQ ID NO: 796912 - DNA, 15 bp, Homo sapiens
tataataaatgctac

SEQ ID NO: 796913 - DNA, 15 bp, Homo sapiens
ataataaatgctaca

SEQ ID NO: 796914 - DNA, 15 bp, Homo sapiens
taataaatgctacat

SEQ ID NO: 796915 - DNA, 15 bp, Homo sapiens
aataaatgctacatt

SEQ ID NO: 796916 - DNA, 15 bp, Homo sapiens
ataaatgctacattg

SEQ ID NO: 796917 - DNA, 15 bp, Homo sapiens
taaatgctacattgt

SEQ ID NO: 796918 - DNA, 15 bp, Homo sapiens
aaatgctacattgtg

SEQ ID NO: 796919 - DNA, 15 bp, Homo sapiens
aatgctacattgtgt

SEQ ID NO: 796920 - DNA, 15 bp, Homo sapiens
atgctacattgtgtt

SEQ ID NO: 796921 - DNA, 15 bp, Homo sapiens
tgctacattgtgttt

SEQ ID NO: 796922 - DNA, 15 bp, Homo sapiens
gctacattgtgtttt

SEQ ID NO: 796923 - DNA, 15 bp, Homo sapiens
ctacattgtgttttt

SEQ ID NO: 796924 - DNA, 15 bp, Homo sapiens
tacattgtgttttta

SEQ ID NO: 796925 - DNA, 15 bp, Homo sapiens
acattgtgtttttat

SEQ ID NO: 796926 - DNA, 15 bp, Homo sapiens
cattgtgtttttatc

SEQ ID NO: 796927 - DNA, 15 bp, Homo sapiens
attgtgtttttatca

SEQ ID NO: 796928 - DNA, 15 bp, Homo sapiens
ttgtgtttttatcat

SEQ ID NO: 796929 - DNA, 15 bp, Homo sapiens
tgtgtttttatcatt

SEQ ID NO: 796930 - DNA, 15 bp, Homo sapiens
gtgtttttatcatta

SEQ ID NO: 796931 - DNA, 15 bp, Homo sapiens
tgtttttatcattaa

SEQ ID NO: 796932 - DNA, 15 bp, Homo sapiens
gtttttatcattaaa

SEQ ID NO: 796933 - DNA, 15 bp, Homo sapiens
tttttatcattaaaa

SEQ ID NO: 796934 - DNA, 15 bp, Homo sapiens
ttttatcattaaaat

SEQ ID NO: 796935 - DNA, 15 bp, Homo sapiens
tttatcattaaaatt

SEQ ID NO: 796936 - DNA, 15 bp, Homo sapiens
ttatcattaaaatta

SEQ ID NO: 796937 - DNA, 15 bp, Homo sapiens
tatcattaaaattat

SEQ ID NO: 796938 - DNA, 15 bp, Homo sapiens
atcattaaaattatc

SEQ ID NO: 796939 - DNA, 15 bp, Homo sapiens
tcattaaaattatct

SEQ ID NO: 796940 - DNA, 15 bp, Homo sapiens
cattaaaattatctt

SEQ ID NO: 796941 - DNA, 15 bp, Homo sapiens
attaaaattatctta

SEQ ID NO: 796942 - DNA, 15 bp, Homo sapiens
ttaaaattatcttaa

SEQ ID NO: 796943 - DNA, 15 bp, Homo sapiens
taaaattatcttaat

SEQ ID NO: 796944 - DNA, 15 bp, Homo sapiens
aaaattatcttaata

SEQ ID NO: 796945 - DNA, 15 bp, Homo sapiens
aaattatcttaatat

SEQ ID NO: 796946 - DNA, 15 bp, Homo sapiens
aattatcttaatatt

SEQ ID NO: 796947 - DNA, 15 bp, Homo sapiens
attatcttaatatta

SEQ ID NO: 796948 - DNA, 15 bp, Homo sapiens
ttatcttaatattat

SEQ ID NO: 796949 - DNA, 15 bp, Homo sapiens
tatcttaatattatt

SEQ ID NO: 796950 - DNA, 15 bp, Homo sapiens
atcttaatattattt

SEQ ID NO: 796951 - DNA, 15 bp, Homo sapiens
tcttaatattatttt

SEQ ID NO: 796952 - DNA, 15 bp, Homo sapiens
cttaatattattttg

SEQ ID NO: 796953 - DNA, 15 bp, Homo sapiens
ttaatattattttgc

SEQ ID NO: 796954 - DNA, 15 bp, Homo sapiens
taatattattttgct

SEQ ID NO: 796955 - DNA, 15 bp, Homo sapiens
aatattattttgctg

SEQ ID NO: 796956 - DNA, 15 bp, Homo sapiens
atattattttgctgt

SEQ ID NO: 796957 - DNA, 15 bp, Homo sapiens
tattattttgctgtt

SEQ ID NO: 796958 - DNA, 15 bp, Homo sapiens
attattttgctgttg

SEQ ID NO: 796959 - DNA, 15 bp, Homo sapiens
ttattttgctgttgc

SEQ ID NO: 796960 - DNA, 15 bp, Homo sapiens
tattttgctgttgct

SEQ ID NO: 796961 - DNA, 15 bp, Homo sapiens
attttgctgttgctg

SEQ ID NO: 796962 - DNA, 15 bp, Homo sapiens
ttttgctgttgctgt

SEQ ID NO: 796963 - DNA, 15 bp, Homo sapiens
tttgctgttgctgtt

SEQ ID NO: 796964 - DNA, 15 bp, Homo sapiens
ttgctgttgctgtta

SEQ ID NO: 796965 - DNA, 15 bp, Homo sapiens
tgctgttgctgttat

SEQ ID NO: 796966 - DNA, 15 bp, Homo sapiens
gctgttgctgttatt

SEQ ID NO: 796967 - DNA, 15 bp, Homo sapiens
ctgttgctgttatta

SEQ ID NO: 796968 - DNA, 15 bp, Homo sapiens
tgttgctgttattat

SEQ ID NO: 796969 - DNA, 15 bp, Homo sapiens
gttgctgttattatt

SEQ ID NO: 796970 - DNA, 15 bp, Homo sapiens
ttgctgttattattg

SEQ ID NO: 796971 - DNA, 15 bp, Homo sapiens
tgctgttattattgc

SEQ ID NO: 796972 - DNA, 15 bp, Homo sapiens
gctgttattattgct

SEQ ID NO: 796973 - DNA, 15 bp, Homo sapiens
ctgttattattgctg

SEQ ID NO: 796974 - DNA, 15 bp, Homo sapiens
tgttattattgctgt

SEQ ID NO: 796975 - DNA, 15 bp, Homo sapiens
gttattattgctgtt

SEQ ID NO: 796976 - DNA, 15 bp, Homo sapiens
ttattattgctgttg

SEQ ID NO: 796977 - DNA, 15 bp, Homo sapiens
tattattgctgttgt

SEQ ID NO: 796978 - DNA, 15 bp, Homo sapiens
attattgctgttgtt

SEQ ID NO: 796979 - DNA, 15 bp, Homo sapiens
ttattgctgttgtta

SEQ ID NO: 796980 - DNA, 15 bp, Homo sapiens
tattgctgttgttat

SEQ ID NO: 796981 - DNA, 15 bp, Homo sapiens
attgctgttgttatt

SEQ ID NO: 796982 - DNA, 15 bp, Homo sapiens
ttgctgttgttattg

SEQ ID NO: 796983 - DNA, 15 bp, Homo sapiens
tgctgttgttattgc

SEQ ID NO: 796984 - DNA, 15 bp, Homo sapiens
gctgttgttattgct

SEQ ID NO: 796985 - DNA, 15 bp, Homo sapiens
ctgttgttattgctt

SEQ ID NO: 796986 - DNA, 15 bp, Homo sapiens
tgttgttattgctta

SEQ ID NO: 796987 - DNA, 15 bp, Homo sapiens
gttgttattgcttag

SEQ ID NO: 796988 - DNA, 15 bp, Homo sapiens
ttgttattgcttaga

SEQ ID NO: 796989 - DNA, 15 bp, Homo sapiens
tgttattgcttagat

SEQ ID NO: 796990 - DNA, 15 bp, Homo sapiens
gttattgcttagatt

SEQ ID NO: 796991 - DNA, 15 bp, Homo sapiens
ttattgcttagattg

SEQ ID NO: 796992 - DNA, 15 bp, Homo sapiens
tattgcttagattgg

SEQ ID NO: 796993 - DNA, 15 bp, Homo sapiens
attgcttagattgga

SEQ ID NO: 796994 - DNA, 15 bp, Homo sapiens
ttgcttagattggaa

SEQ ID NO: 796995 - DNA, 15 bp, Homo sapiens
tgcttagattggaac

SEQ ID NO: 796996 - DNA, 15 bp, Homo sapiens
gcttagattggaaca

SEQ ID NO: 796997 - DNA, 15 bp, Homo sapiens
cttagattggaacat

SEQ ID NO: 796998 - DNA, 15 bp, Homo sapiens
ttagattggaacatg

SEQ ID NO: 796999 - DNA, 15 bp, Homo sapiens
tagattggaacatgt

SEQ ID NO: 797000 - DNA, 15 bp, Homo sapiens
agattggaacatgtc

SEQ ID NO: 797001 - DNA, 15 bp, Homo sapiens
gattggaacatgtct

SEQ ID NO: 797002 - DNA, 15 bp, Homo sapiens
attggaacatgtctt

SEQ ID NO: 797003 - DNA, 15 bp, Homo sapiens
ttggaacatgtcttt

SEQ ID NO: 797004 - DNA, 15 bp, Homo sapiens
tggaacatgtctttg

SEQ ID NO: 797005 - DNA, 15 bp, Homo sapiens
ggaacatgtctttgc

SEQ ID NO: 797006 - DNA, 15 bp, Homo sapiens
gaacatgtctttgct

SEQ ID NO: 797007 - DNA, 15 bp, Homo sapiens
aacatgtctttgcta

SEQ ID NO: 797008 - DNA, 15 bp, Homo sapiens
acatgtctttgctat

SEQ ID NO: 797009 - DNA, 15 bp, Homo sapiens
catgtctttgctatt

SEQ ID NO: 797010 - DNA, 15 bp, Homo sapiens
atgtctttgctattt

SEQ ID NO: 797011 - DNA, 15 bp, Homo sapiens
tgtctttgctattta

SEQ ID NO: 797012 - DNA, 15 bp, Homo sapiens
gtctttgctatttat

SEQ ID NO: 797013 - DNA, 15 bp, Homo sapiens
tctttgctatttata

SEQ ID NO: 797014 - DNA, 15 bp, Homo sapiens
ctttgctatttataa

SEQ ID NO: 797015 - DNA, 15 bp, Homo sapiens
tttgctatttataac

SEQ ID NO: 797016 - DNA, 15 bp, Homo sapiens
ttgctatttataact

SEQ ID NO: 797017 - DNA, 15 bp, Homo sapiens
tgctatttataactg

SEQ ID NO: 797018 - DNA, 15 bp, Homo sapiens
gctatttataactgt

SEQ ID NO: 797019 - DNA, 15 bp, Homo sapiens
ctatttataactgtg

SEQ ID NO: 797020 - DNA, 15 bp, Homo sapiens
tatttataactgtgt

SEQ ID NO: 797021 - DNA, 15 bp, Homo sapiens
atttataactgtgtg

SEQ ID NO: 797022 - DNA, 15 bp, Homo sapiens
tttataactgtgtga

SEQ ID NO: 797023 - DNA, 15 bp, Homo sapiens
taactgtgtgacctt

SEQ ID NO: 797024 - DNA, 15 bp, Homo sapiens
aactgtgtgaccttg

SEQ ID NO: 797025 - DNA, 15 bp, Homo sapiens
tgtgtgaccttgaac

SEQ ID NO: 797026 - DNA, 15 bp, Homo sapiens
gtgtgaccttgaaca

SEQ ID NO: 797027 - DNA, 15 bp, Homo sapiens
tgtgaccttgaacat

SEQ ID NO: 797028 - DNA, 15 bp, Homo sapiens
gtgaccttgaacata

SEQ ID NO: 797029 - DNA, 15 bp, Homo sapiens
tgaccttgaacatat

SEQ ID NO: 797030 - DNA, 15 bp, Homo sapiens
gaccttgaacatatc

SEQ ID NO: 797031 - DNA, 15 bp, Homo sapiens
accttgaacatatca

SEQ ID NO: 797032 - DNA, 15 bp, Homo sapiens
ccttgaacatatcac

SEQ ID NO: 797033 - DNA, 15 bp, Homo sapiens
cttgaacatatcact

SEQ ID NO: 797034 - DNA, 15 bp, Homo sapiens
ttgaacatatcactt

SEQ ID NO: 797035 - DNA, 15 bp, Homo sapiens
tgaacatatcactta

SEQ ID NO: 797036 - DNA, 15 bp, Homo sapiens
gaacatatcacttag

SEQ ID NO: 797037 - DNA, 15 bp, Homo sapiens
aacatatcacttagc

SEQ ID NO: 797038 - DNA, 15 bp, Homo sapiens
acatatcacttagcc

SEQ ID NO: 797039 - DNA, 15 bp, Homo sapiens
catatcacttagccc

SEQ ID NO: 797040 - DNA, 15 bp, Homo sapiens
atatcacttagcccc

SEQ ID NO: 797041 - DNA, 15 bp, Homo sapiens
tatcacttagccccc

SEQ ID NO: 797042 - DNA, 15 bp, Homo sapiens
atcacttagccccca

SEQ ID NO: 797043 - DNA, 15 bp, Homo sapiens
tcacttagcccccat

SEQ ID NO: 797044 - DNA, 15 bp, Homo sapiens
cacttagcccccatg

SEQ ID NO: 797045 - DNA, 15 bp, Homo sapiens
acttagcccccatgt

SEQ ID NO: 797046 - DNA, 15 bp, Homo sapiens
cttagcccccatgtg

SEQ ID NO: 797047 - DNA, 15 bp, Homo sapiens
ttagcccccatgtgc

SEQ ID NO: 797048 - DNA, 15 bp, Homo sapiens
tagcccccatgtgcc

SEQ ID NO: 797049 - DNA, 15 bp, Homo sapiens
agcccccatgtgcca

SEQ ID NO: 797050 - DNA, 15 bp, Homo sapiens
gcccccatgtgccat

SEQ ID NO: 797051 - DNA, 15 bp, Homo sapiens
cccccatgtgccatg

SEQ ID NO: 797052 - DNA, 15 bp, Homo sapiens
ccccatgtgccatga

SEQ ID NO: 797053 - DNA, 15 bp, Homo sapiens
cccatgtgccatgac

SEQ ID NO: 797054 - DNA, 15 bp, Homo sapiens
ccatgtgccatgaca

SEQ ID NO: 797055 - DNA, 15 bp, Homo sapiens
catgtgccatgacat

SEQ ID NO: 797056 - DNA, 15 bp, Homo sapiens
atgtgccatgacatt

SEQ ID NO: 797057 - DNA, 15 bp, Homo sapiens
tgtgccatgacattt

SEQ ID NO: 797058 - DNA, 15 bp, Homo sapiens
gtgccatgacatttg

SEQ ID NO: 797059 - DNA, 15 bp, Homo sapiens
tgccatgacatttgt

SEQ ID NO: 797060 - DNA, 15 bp, Homo sapiens
gccatgacatttgta

SEQ ID NO: 797061 - DNA, 15 bp, Homo sapiens
ccatgacatttgtaa

SEQ ID NO: 797062 - DNA, 15 bp, Homo sapiens
catgacatttgtaaa

SEQ ID NO: 797063 - DNA, 15 bp, Homo sapiens
atgacatttgtaaaa

SEQ ID NO: 797064 - DNA, 15 bp, Homo sapiens
tgacatttgtaaaat

SEQ ID NO: 797065 - DNA, 15 bp, Homo sapiens
gacatttgtaaaatg

SEQ ID NO: 797066 - DNA, 15 bp, Homo sapiens
acatttgtaaaatgg

SEQ ID NO: 797067 - DNA, 15 bp, Homo sapiens
catttgtaaaatggg

SEQ ID NO: 797068 - DNA, 15 bp, Homo sapiens
atttgtaaaatgggg

SEQ ID NO: 797069 - DNA, 15 bp, Homo sapiens
tttgtaaaatgggga

SEQ ID NO: 797070 - DNA, 15 bp, Homo sapiens
ttgtaaaatggggaa

SEQ ID NO: 797071 - DNA, 15 bp, Homo sapiens
tgtaaaatggggaaa

SEQ ID NO: 797072 - DNA, 15 bp, Homo sapiens
gtaaaatggggaaag

SEQ ID NO: 797073 - DNA, 15 bp, Homo sapiens
taaaatggggaaaga

SEQ ID NO: 797074 - DNA, 15 bp, Homo sapiens
aaaatggggaaagag

SEQ ID NO: 797075 - DNA, 15 bp, Homo sapiens
aaatggggaaagagg

SEQ ID NO: 797076 - DNA, 15 bp, Homo sapiens
aatggggaaagagga

SEQ ID NO: 797077 - DNA, 15 bp, Homo sapiens
atggggaaagaggag

SEQ ID NO: 797078 - DNA, 15 bp, Homo sapiens
tggggaaagaggagt

SEQ ID NO: 797079 - DNA, 15 bp, Homo sapiens
ggggaaagaggagtc

SEQ ID NO: 797080 - DNA, 15 bp, Homo sapiens
gggaaagaggagtct

SEQ ID NO: 797081 - DNA, 15 bp, Homo sapiens
ggaaagaggagtctg

SEQ ID NO: 797082 - DNA, 15 bp, Homo sapiens
gaaagaggagtctgt

SEQ ID NO: 797083 - DNA, 15 bp, Homo sapiens
aaagaggagtctgtt

SEQ ID NO: 797084 - DNA, 15 bp, Homo sapiens
aagaggagtctgttc

SEQ ID NO: 797085 - DNA, 15 bp, Homo sapiens
agaggagtctgttcc

SEQ ID NO: 797086 - DNA, 15 bp, Homo sapiens
gaggagtctgttcct

SEQ ID NO: 797087 - DNA, 15 bp, Homo sapiens
aggagtctgttcctt

SEQ ID NO: 797088 - DNA, 15 bp, Homo sapiens
ggagtctgttccttg

SEQ ID NO: 797089 - DNA, 15 bp, Homo sapiens
gagtctgttccttgg

SEQ ID NO: 797090 - DNA, 15 bp, Homo sapiens
agtctgttccttggt

SEQ ID NO: 797091 - DNA, 15 bp, Homo sapiens
gtctgttccttggtg

SEQ ID NO: 797092 - DNA, 15 bp, Homo sapiens
tctgttccttggtgc

SEQ ID NO: 797093 - DNA, 15 bp, Homo sapiens
ctgttccttggtgca

SEQ ID NO: 797094 - DNA, 15 bp, Homo sapiens
tgttccttggtgcag

SEQ ID NO: 797095 - DNA, 15 bp, Homo sapiens
gttccttggtgcagc

SEQ ID NO: 797096 - DNA, 15 bp, Homo sapiens
ttccttggtgcagct

SEQ ID NO: 797097 - DNA, 15 bp, Homo sapiens
tccttggtgcagctg

SEQ ID NO: 797098 - DNA, 15 bp, Homo sapiens
ccttggtgcagctgc

SEQ ID NO: 797099 - DNA, 15 bp, Homo sapiens
cttggtgcagctgca

SEQ ID NO: 797100 - DNA, 15 bp, Homo sapiens
ttggtgcagctgcaa

SEQ ID NO: 797101 - DNA, 15 bp, Homo sapiens
tggtgcagctgcaag

SEQ ID NO: 797102 - DNA, 15 bp, Homo sapiens
ggtgcagctgcaagg

SEQ ID NO: 797103 - DNA, 15 bp, Homo sapiens
gtgcagctgcaagga

SEQ ID NO: 797104 - DNA, 15 bp, Homo sapiens
tgcagctgcaaggat

SEQ ID NO: 797105 - DNA, 15 bp, Homo sapiens
gcagctgcaaggatg

SEQ ID NO: 797106 - DNA, 15 bp, Homo sapiens
cagctgcaaggatgt

SEQ ID NO: 797107 - DNA, 15 bp, Homo sapiens
agctgcaaggatgtc

SEQ ID NO: 797108 - DNA, 15 bp, Homo sapiens
gctgcaaggatgtca

SEQ ID NO: 797109 - DNA, 15 bp, Homo sapiens
ctgcaaggatgtcag

SEQ ID NO: 797110 - DNA, 15 bp, Homo sapiens
tgcaaggatgtcagt

SEQ ID NO: 797111 - DNA, 15 bp, Homo sapiens
gcaaggatgtcagta

SEQ ID NO: 797112 - DNA, 15 bp, Homo sapiens
caaggatgtcagtag

SEQ ID NO: 797113 - DNA, 15 bp, Homo sapiens
aaggatgtcagtagg

SEQ ID NO: 797114 - DNA, 15 bp, Homo sapiens
aggatgtcagtaggt

SEQ ID NO: 797115 - DNA, 15 bp, Homo sapiens
ggatgtcagtaggtt

SEQ ID NO: 797116 - DNA, 15 bp, Homo sapiens
gatgtcagtaggttg

SEQ ID NO: 797117 - DNA, 15 bp, Homo sapiens
atgtcagtaggttgg

SEQ ID NO: 797118 - DNA, 15 bp, Homo sapiens
tgtcagtaggttggc

SEQ ID NO: 797119 - DNA, 15 bp, Homo sapiens
gtcagtaggttggca

SEQ ID NO: 797120 - DNA, 15 bp, Homo sapiens
tcagtaggttggcac

SEQ ID NO: 797121 - DNA, 15 bp, Homo sapiens
cagtaggttggcaca

SEQ ID NO: 797122 - DNA, 15 bp, Homo sapiens
agtaggttggcacag

SEQ ID NO: 797123 - DNA, 15 bp, Homo sapiens
gtaggttggcacagg

SEQ ID NO: 797124 - DNA, 15 bp, Homo sapiens
taggttggcacagga

SEQ ID NO: 797125 - DNA, 15 bp, Homo sapiens
aggttggcacaggaa

SEQ ID NO: 797126 - DNA, 15 bp, Homo sapiens
ggttggcacaggaaa

SEQ ID NO: 797127 - DNA, 15 bp, Homo sapiens
gttggcacaggaaag

SEQ ID NO: 797128 - DNA, 15 bp, Homo sapiens
ttggcacaggaaagg

SEQ ID NO: 797129 - DNA, 15 bp, Homo sapiens
tggcacaggaaaggc

SEQ ID NO: 797130 - DNA, 15 bp, Homo sapiens
ggcacaggaaaggcc

SEQ ID NO: 797131 - DNA, 15 bp, Homo sapiens
gcacaggaaaggcct

SEQ ID NO: 797132 - DNA, 15 bp, Homo sapiens
cacaggaaaggcctt

SEQ ID NO: 797133 - DNA, 15 bp, Homo sapiens
acaggaaaggccttt

SEQ ID NO: 797134 - DNA, 15 bp, Homo sapiens
caggaaaggcctttg

SEQ ID NO: 797135 - DNA, 15 bp, Homo sapiens
aggaaaggcctttga

SEQ ID NO: 797136 - DNA, 15 bp, Homo sapiens
ggaaaggcctttgaa

SEQ ID NO: 797137 - DNA, 15 bp, Homo sapiens
gaaaggcctttgaag

SEQ ID NO: 797138 - DNA, 15 bp, Homo sapiens
aaaggcctttgaagc

SEQ ID NO: 797139 - DNA, 15 bp, Homo sapiens
aaggcctttgaagca

SEQ ID NO: 797140 - DNA, 15 bp, Homo sapiens
aggcctttgaagcag

SEQ ID NO: 797141 - DNA, 15 bp, Homo sapiens
ggcctttgaagcagc

SEQ ID NO: 797142 - DNA, 15 bp, Homo sapiens
gcctttgaagcagca

SEQ ID NO: 797143 - DNA, 15 bp, Homo sapiens
cctttgaagcagcat

SEQ ID NO: 797144 - DNA, 15 bp, Homo sapiens
ctttgaagcagcatc

SEQ ID NO: 797145 - DNA, 15 bp, Homo sapiens
tttgaagcagcatca

SEQ ID NO: 797146 - DNA, 15 bp, Homo sapiens
ttgaagcagcatcag

SEQ ID NO: 797147 - DNA, 15 bp, Homo sapiens
tgaagcagcatcagt

SEQ ID NO: 797148 - DNA, 15 bp, Homo sapiens
gaagcagcatcagtg

SEQ ID NO: 797149 - DNA, 15 bp, Homo sapiens
aagcagcatcagtgc

SEQ ID NO: 797150 - DNA, 15 bp, Homo sapiens
agcagcatcagtgca

SEQ ID NO: 797151 - DNA, 15 bp, Homo sapiens
gcagcatcagtgcag

SEQ ID NO: 797152 - DNA, 15 bp, Homo sapiens
cagcatcagtgcagg

SEQ ID NO: 797153 - DNA, 15 bp, Homo sapiens
agcatcagtgcaggg

SEQ ID NO: 797154 - DNA, 15 bp, Homo sapiens
gcatcagtgcagggc

SEQ ID NO: 797155 - DNA, 15 bp, Homo sapiens
catcagtgcagggca

SEQ ID NO: 797156 - DNA, 15 bp, Homo sapiens
atcagtgcagggcaa

SEQ ID NO: 797157 - DNA, 15 bp, Homo sapiens
tcagtgcagggcaag

SEQ ID NO: 797158 - DNA, 15 bp, Homo sapiens
cagtgcagggcaagt

SEQ ID NO: 797159 - DNA, 15 bp, Homo sapiens
agtgcagggcaagtg

SEQ ID NO: 797160 - DNA, 15 bp, Homo sapiens
gtgcagggcaagtgt

SEQ ID NO: 797161 - DNA, 15 bp, Homo sapiens
tgcagggcaagtgtt

SEQ ID NO: 797162 - DNA, 15 bp, Homo sapiens
gcagggcaagtgttg

SEQ ID NO: 797163 - DNA, 15 bp, Homo sapiens
cagggcaagtgttgt

SEQ ID NO: 797164 - DNA, 15 bp, Homo sapiens
agggcaagtgttgtg

SEQ ID NO: 797165 - DNA, 15 bp, Homo sapiens
gggcaagtgttgtgg

SEQ ID NO: 797166 - DNA, 15 bp, Homo sapiens
ggcaagtgttgtggg

SEQ ID NO: 797167 - DNA, 15 bp, Homo sapiens
gcaagtgttgtgggt

SEQ ID NO: 797168 - DNA, 15 bp, Homo sapiens
caagtgttgtgggtt

SEQ ID NO: 797169 - DNA, 15 bp, Homo sapiens
aagtgttgtgggtta

SEQ ID NO: 797170 - DNA, 15 bp, Homo sapiens
agtgttgtgggttat

SEQ ID NO: 797171 - DNA, 15 bp, Homo sapiens
gtgttgtgggttatt

SEQ ID NO: 797172 - DNA, 15 bp, Homo sapiens
tgttgtgggttatta

SEQ ID NO: 797173 - DNA, 15 bp, Homo sapiens
gttgtgggttattat

SEQ ID NO: 797174 - DNA, 15 bp, Homo sapiens
ttgtgggttattatt

SEQ ID NO: 797175 - DNA, 15 bp, Homo sapiens
tgtgggttattattg

SEQ ID NO: 797176 - DNA, 15 bp, Homo sapiens
gtgggttattattgg

SEQ ID NO: 797177 - DNA, 15 bp, Homo sapiens
tgggttattattggt

SEQ ID NO: 797178 - DNA, 15 bp, Homo sapiens
gggttattattggtg

SEQ ID NO: 797179 - DNA, 15 bp, Homo sapiens
ggttattattggtga

SEQ ID NO: 797180 - DNA, 15 bp, Homo sapiens
gttattattggtgac

SEQ ID NO: 797181 - DNA, 15 bp, Homo sapiens
ttattattggtgact

SEQ ID NO: 797182 - DNA, 15 bp, Homo sapiens
tattattggtgactt

SEQ ID NO: 797183 - DNA, 15 bp, Homo sapiens
attattggtgacttg

SEQ ID NO: 797184 - DNA, 15 bp, Homo sapiens
ttattggtgacttgc

SEQ ID NO: 797185 - DNA, 15 bp, Homo sapiens
tattggtgacttgct

SEQ ID NO: 797186 - DNA, 15 bp, Homo sapiens
attggtgacttgctc

SEQ ID NO: 797187 - DNA, 15 bp, Homo sapiens
ttggtgacttgctcc

SEQ ID NO: 797188 - DNA, 15 bp, Homo sapiens
tggtgacttgctccc

SEQ ID NO: 797189 - DNA, 15 bp, Homo sapiens
ggtgacttgctcccc

SEQ ID NO: 797190 - DNA, 15 bp, Homo sapiens
gtgacttgctcccct

SEQ ID NO: 797191 - DNA, 15 bp, Homo sapiens
tgacttgctcccctc

SEQ ID NO: 797192 - DNA, 15 bp, Homo sapiens
gacttgctcccctca

SEQ ID NO: 797193 - DNA, 15 bp, Homo sapiens
acttgctcccctcac

SEQ ID NO: 797194 - DNA, 15 bp, Homo sapiens
cttgctcccctcacc

SEQ ID NO: 797195 - DNA, 15 bp, Homo sapiens
ttgctcccctcacca

SEQ ID NO: 797196 - DNA, 15 bp, Homo sapiens
tgctcccctcaccag

SEQ ID NO: 797197 - DNA, 15 bp, Homo sapiens
gctcccctcaccaga

SEQ ID NO: 797198 - DNA, 15 bp, Homo sapiens
ctcccctcaccagag

SEQ ID NO: 797199 - DNA, 15 bp, Homo sapiens
tcccctcaccagagg

SEQ ID NO: 797200 - DNA, 15 bp, Homo sapiens
cccctcaccagaggg

SEQ ID NO: 797201 - DNA, 15 bp, Homo sapiens
ccctcaccagagggg

SEQ ID NO: 797202 - DNA, 15 bp, Homo sapiens
cctcaccagaggggt

SEQ ID NO: 797203 - DNA, 15 bp, Homo sapiens
ctcaccagaggggtc

SEQ ID NO: 797204 - DNA, 15 bp, Homo sapiens
tcaccagaggggtct

SEQ ID NO: 797205 - DNA, 15 bp, Homo sapiens
caccagaggggtctt

SEQ ID NO: 797206 - DNA, 15 bp, Homo sapiens
accagaggggtcttt

SEQ ID NO: 797207 - DNA, 15 bp, Homo sapiens
ccagaggggtctttt

SEQ ID NO: 797208 - DNA, 15 bp, Homo sapiens
cagaggggtcttttg

SEQ ID NO: 797209 - DNA, 15 bp, Homo sapiens
agaggggtcttttgg

SEQ ID NO: 797210 - DNA, 15 bp, Homo sapiens
gaggggtcttttggg

SEQ ID NO: 797211 - DNA, 15 bp, Homo sapiens
aggggtcttttgggt

SEQ ID NO: 797212 - DNA, 15 bp, Homo sapiens
ggggtcttttgggtg

SEQ ID NO: 797213 - DNA, 15 bp, Homo sapiens
gggtcttttgggtgc

SEQ ID NO: 797214 - DNA, 15 bp, Homo sapiens
ggtcttttgggtgct

SEQ ID NO: 797215 - DNA, 15 bp, Homo sapiens
gtcttttgggtgctg

SEQ ID NO: 797216 - DNA, 15 bp, Homo sapiens
tcttttgggtgctgt

SEQ ID NO: 797217 - DNA, 15 bp, Homo sapiens
cttttgggtgctgtg

SEQ ID NO: 797218 - DNA, 15 bp, Homo sapiens
ttttgggtgctgtgg

SEQ ID NO: 797219 - DNA, 15 bp, Homo sapiens
tttgggtgctgtgga

SEQ ID NO: 797220 - DNA, 15 bp, Homo sapiens
ttgggtgctgtggag

SEQ ID NO: 797221 - DNA, 15 bp, Homo sapiens
tgggtgctgtggagc

SEQ ID NO: 797222 - DNA, 15 bp, Homo sapiens
gggtgctgtggagcc

SEQ ID NO: 797223 - DNA, 15 bp, Homo sapiens
ggtgctgtggagcca

SEQ ID NO: 797224 - DNA, 15 bp, Homo sapiens
gtgctgtggagccag

SEQ ID NO: 797225 - DNA, 15 bp, Homo sapiens
tgctgtggagccaga

SEQ ID NO: 797226 - DNA, 15 bp, Homo sapiens
gctgtggagccagag

SEQ ID NO: 797227 - DNA, 15 bp, Homo sapiens
ctgtggagccagagg

SEQ ID NO: 797228 - DNA, 15 bp, Homo sapiens
tgtggagccagaggg

SEQ ID NO: 797229 - DNA, 15 bp, Homo sapiens
gtggagccagagggg

SEQ ID NO: 797230 - DNA, 15 bp, Homo sapiens
tggagccagaggggt

SEQ ID NO: 797231 - DNA, 15 bp, Homo sapiens
ggagccagaggggtc

SEQ ID NO: 797232 - DNA, 15 bp, Homo sapiens
gagccagaggggtct

SEQ ID NO: 797233 - DNA, 15 bp, Homo sapiens
agccagaggggtctg

SEQ ID NO: 797234 - DNA, 15 bp, Homo sapiens
gccagaggggtctgt

SEQ ID NO: 797235 - DNA, 15 bp, Homo sapiens
ccagaggggtctgtc

SEQ ID NO: 797236 - DNA, 15 bp, Homo sapiens
cagaggggtctgtcc

SEQ ID NO: 797237 - DNA, 15 bp, Homo sapiens
agaggggtctgtcca

SEQ ID NO: 797238 - DNA, 15 bp, Homo sapiens
gaggggtctgtccat

SEQ ID NO: 797239 - DNA, 15 bp, Homo sapiens
aggggtctgtccatg

SEQ ID NO: 797240 - DNA, 15 bp, Homo sapiens
ggggtctgtccatgg

SEQ ID NO: 797241 - DNA, 15 bp, Homo sapiens
gggtctgtccatggt

SEQ ID NO: 797242 - DNA, 15 bp, Homo sapiens
ggtctgtccatggtg

SEQ ID NO: 797243 - DNA, 15 bp, Homo sapiens
gtctgtccatggtgg

SEQ ID NO: 797244 - DNA, 15 bp, Homo sapiens
tctgtccatggtggg

SEQ ID NO: 797245 - DNA, 15 bp, Homo sapiens
ctgtccatggtgggt

SEQ ID NO: 797246 - DNA, 15 bp, Homo sapiens
tgtccatggtgggtt

SEQ ID NO: 797247 - DNA, 15 bp, Homo sapiens
gtccatggtgggtta

SEQ ID NO: 797248 - DNA, 15 bp, Homo sapiens
tccatggtgggttag

SEQ ID NO: 797249 - DNA, 15 bp, Homo sapiens
ccatggtgggttagg

SEQ ID NO: 797250 - DNA, 15 bp, Homo sapiens
catggtgggttagga

SEQ ID NO: 797251 - DNA, 15 bp, Homo sapiens
atggtgggttaggat

SEQ ID NO: 797252 - DNA, 15 bp, Homo sapiens
tggtgggttaggatt

SEQ ID NO: 797253 - DNA, 15 bp, Homo sapiens
ggtgggttaggatta

SEQ ID NO: 797254 - DNA, 15 bp, Homo sapiens
gtgggttaggattat

SEQ ID NO: 797255 - DNA, 15 bp, Homo sapiens
tgggttaggattatg

SEQ ID NO: 797256 - DNA, 15 bp, Homo sapiens
gggttaggattatgc

SEQ ID NO: 797257 - DNA, 15 bp, Homo sapiens
ggttaggattatgca

SEQ ID NO: 797258 - DNA, 15 bp, Homo sapiens
gttaggattatgcac

SEQ ID NO: 797259 - DNA, 15 bp, Homo sapiens
ttaggattatgcact

SEQ ID NO: 797260 - DNA, 15 bp, Homo sapiens
taggattatgcactt

SEQ ID NO: 797261 - DNA, 15 bp, Homo sapiens
aggattatgcactta

SEQ ID NO: 797262 - DNA, 15 bp, Homo sapiens
ggattatgcacttag

SEQ ID NO: 797263 - DNA, 15 bp, Homo sapiens
gattatgcacttagg

SEQ ID NO: 797264 - DNA, 15 bp, Homo sapiens
attatgcacttaggt

SEQ ID NO: 797265 - DNA, 15 bp, Homo sapiens
ttatgcacttaggtc

SEQ ID NO: 797266 - DNA, 15 bp, Homo sapiens
tatgcacttaggtct

SEQ ID NO: 797267 - DNA, 15 bp, Homo sapiens
atgcacttaggtctt

SEQ ID NO: 797268 - DNA, 15 bp, Homo sapiens
tgcacttaggtcttg

SEQ ID NO: 797269 - DNA, 15 bp, Homo sapiens
gcacttaggtcttgc

SEQ ID NO: 797270 - DNA, 15 bp, Homo sapiens
cacttaggtcttgct

SEQ ID NO: 797271 - DNA, 15 bp, Homo sapiens
acttaggtcttgctt

SEQ ID NO: 797272 - DNA, 15 bp, Homo sapiens
cttaggtcttgcttt

SEQ ID NO: 797273 - DNA, 15 bp, Homo sapiens
ttaggtcttgctttc

SEQ ID NO: 797274 - DNA, 15 bp, Homo sapiens
taggtcttgctttcc

SEQ ID NO: 797275 - DNA, 15 bp, Homo sapiens
aggtcttgctttcca

SEQ ID NO: 797276 - DNA, 15 bp, Homo sapiens
ggtcttgctttccat

SEQ ID NO: 797277 - DNA, 15 bp, Homo sapiens
gtcttgctttccatt

SEQ ID NO: 797278 - DNA, 15 bp, Homo sapiens
tcttgctttccattt

SEQ ID NO: 797279 - DNA, 15 bp, Homo sapiens
cttgctttccatttg

SEQ ID NO: 797280 - DNA, 15 bp, Homo sapiens
ttgctttccatttgg

SEQ ID NO: 797281 - DNA, 15 bp, Homo sapiens
tgctttccatttggg

SEQ ID NO: 797282 - DNA, 15 bp, Homo sapiens
gctttccatttggga

SEQ ID NO: 797283 - DNA, 15 bp, Homo sapiens
ctttccatttgggac

SEQ ID NO: 797284 - DNA, 15 bp, Homo sapiens
tttccatttgggaca

SEQ ID NO: 797285 - DNA, 15 bp, Homo sapiens
ttccatttgggacag

SEQ ID NO: 797286 - DNA, 15 bp, Homo sapiens
tccatttgggacagt

SEQ ID NO: 797287 - DNA, 15 bp, Homo sapiens
ccatttgggacagta

SEQ ID NO: 797288 - DNA, 15 bp, Homo sapiens
catttgggacagtaa

SEQ ID NO: 797289 - DNA, 15 bp, Homo sapiens
atttgggacagtaag

SEQ ID NO: 797290 - DNA, 15 bp, Homo sapiens
tttgggacagtaagc

SEQ ID NO: 797291 - DNA, 15 bp, Homo sapiens
ttgggacagtaagca

SEQ ID NO: 797292 - DNA, 15 bp, Homo sapiens
tgggacagtaagcat

SEQ ID NO: 797293 - DNA, 15 bp, Homo sapiens
gggacagtaagcatc

SEQ ID NO: 797294 - DNA, 15 bp, Homo sapiens
ggacagtaagcatct

SEQ ID NO: 797295 - DNA, 15 bp, Homo sapiens
gacagtaagcatctg

SEQ ID NO: 797296 - DNA, 15 bp, Homo sapiens
acagtaagcatctga

SEQ ID NO: 797297 - DNA, 15 bp, Homo sapiens
cagtaagcatctgag

SEQ ID NO: 797298 - DNA, 15 bp, Homo sapiens
agtaagcatctgaga

SEQ ID NO: 797299 - DNA, 15 bp, Homo sapiens
gtaagcatctgagag

SEQ ID NO: 797300 - DNA, 15 bp, Homo sapiens
taagcatctgagaga

SEQ ID NO: 797301 - DNA, 15 bp, Homo sapiens
aagcatctgagagaa

SEQ ID NO: 797302 - DNA, 15 bp, Homo sapiens
agcatctgagagaag

SEQ ID NO: 797303 - DNA, 15 bp, Homo sapiens
gcatctgagagaaga

SEQ ID NO: 797304 - DNA, 15 bp, Homo sapiens
catctgagagaagag

SEQ ID NO: 797305 - DNA, 15 bp, Homo sapiens
atctgagagaagagt

SEQ ID NO: 797306 - DNA, 15 bp, Homo sapiens
tctgagagaagagtt

SEQ ID NO: 797307 - DNA, 15 bp, Homo sapiens
ctgagagaagagttt

SEQ ID NO: 797308 - DNA, 15 bp, Homo sapiens
tgagagaagagtttg

SEQ ID NO: 797309 - DNA, 15 bp, Homo sapiens
gagagaagagtttgt

SEQ ID NO: 797310 - DNA, 15 bp, Homo sapiens
agagaagagtttgtc

SEQ ID NO: 797311 - DNA, 15 bp, Homo sapiens
gagaagagtttgtcc

SEQ ID NO: 797312 - DNA, 15 bp, Homo sapiens
agaagagtttgtccc

SEQ ID NO: 797313 - DNA, 15 bp, Homo sapiens
gaagagtttgtccct

SEQ ID NO: 797314 - DNA, 15 bp, Homo sapiens
aagagtttgtccctg

SEQ ID NO: 797315 - DNA, 15 bp, Homo sapiens
agagtttgtccctga

SEQ ID NO: 797316 - DNA, 15 bp, Homo sapiens
gagtttgtccctgac

SEQ ID NO: 797317 - DNA, 15 bp, Homo sapiens
agtttgtccctgact

SEQ ID NO: 797318 - DNA, 15 bp, Homo sapiens
gtttgtccctgacta

SEQ ID NO: 797319 - DNA, 15 bp, Homo sapiens
tttgtccctgactat

SEQ ID NO: 797320 - DNA, 15 bp, Homo sapiens
ttgtccctgactata

SEQ ID NO: 797321 - DNA, 15 bp, Homo sapiens
tgtccctgactatac

SEQ ID NO: 797322 - DNA, 15 bp, Homo sapiens
gtccctgactatacc

SEQ ID NO: 797323 - DNA, 15 bp, Homo sapiens
tccctgactatacca

SEQ ID NO: 797324 - DNA, 15 bp, Homo sapiens
ccctgactataccaa

SEQ ID NO: 797325 - DNA, 15 bp, Homo sapiens
cctgactataccaaa

SEQ ID NO: 797326 - DNA, 15 bp, Homo sapiens
ctgactataccaaat

SEQ ID NO: 797327 - DNA, 15 bp, Homo sapiens
tgactataccaaatt

SEQ ID NO: 797328 - DNA, 15 bp, Homo sapiens
gactataccaaattc

SEQ ID NO: 797329 - DNA, 15 bp, Homo sapiens
actataccaaattcc

SEQ ID NO: 797330 - DNA, 15 bp, Homo sapiens
ctataccaaattcca

SEQ ID NO: 797331 - DNA, 15 bp, Homo sapiens
tataccaaattccaa

SEQ ID NO: 797332 - DNA, 15 bp, Homo sapiens
ataccaaattccaag

SEQ ID NO: 797333 - DNA, 15 bp, Homo sapiens
taccaaattccaagt

SEQ ID NO: 797334 - DNA, 15 bp, Homo sapiens
accaaattccaagtt

SEQ ID NO: 797335 - DNA, 15 bp, Homo sapiens
ccaaattccaagttc

SEQ ID NO: 797336 - DNA, 15 bp, Homo sapiens
caaattccaagttct

SEQ ID NO: 797337 - DNA, 15 bp, Homo sapiens
aaattccaagttctg

SEQ ID NO: 797338 - DNA, 15 bp, Homo sapiens
aattccaagttctgc

SEQ ID NO: 797339 - DNA, 15 bp, Homo sapiens
attccaagttctgcc

SEQ ID NO: 797340 - DNA, 15 bp, Homo sapiens
ttccaagttctgcca

SEQ ID NO: 797341 - DNA, 15 bp, Homo sapiens
tccaagttctgccaa

SEQ ID NO: 797342 - DNA, 15 bp, Homo sapiens
ccaagttctgccaag

SEQ ID NO: 797343 - DNA, 15 bp, Homo sapiens
caagttctgccaagg

SEQ ID NO: 797344 - DNA, 15 bp, Homo sapiens
aagttctgccaagga

SEQ ID NO: 797345 - DNA, 15 bp, Homo sapiens
agttctgccaaggaa

SEQ ID NO: 797346 - DNA, 15 bp, Homo sapiens
gttctgccaaggaat

SEQ ID NO: 797347 - DNA, 15 bp, Homo sapiens
ttctgccaaggaatc

SEQ ID NO: 797348 - DNA, 15 bp, Homo sapiens
tctgccaaggaatcc

SEQ ID NO: 797349 - DNA, 15 bp, Homo sapiens
ctgccaaggaatcct

SEQ ID NO: 797350 - DNA, 15 bp, Homo sapiens
tgccaaggaatcctg

SEQ ID NO: 797351 - DNA, 15 bp, Homo sapiens
gccaaggaatcctgg

SEQ ID NO: 797352 - DNA, 15 bp, Homo sapiens
ccaaggaatcctggg

SEQ ID NO: 797353 - DNA, 15 bp, Homo sapiens
caaggaatcctgggg

SEQ ID NO: 797354 - DNA, 15 bp, Homo sapiens
aaggaatcctggggt

SEQ ID NO: 797355 - DNA, 15 bp, Homo sapiens
aggaatcctggggta

SEQ ID NO: 797356 - DNA, 15 bp, Homo sapiens
ggaatcctggggtag

SEQ ID NO: 797357 - DNA, 15 bp, Homo sapiens
gaatcctggggtagg

SEQ ID NO: 797358 - DNA, 15 bp, Homo sapiens
aatcctggggtaggc

SEQ ID NO: 797359 - DNA, 15 bp, Homo sapiens
atcctggggtaggcc

SEQ ID NO: 797360 - DNA, 15 bp, Homo sapiens
tcctggggtaggcca

SEQ ID NO: 797361 - DNA, 15 bp, Homo sapiens
cctggggtaggccag

SEQ ID NO: 797362 - DNA, 15 bp, Homo sapiens
ctggggtaggccaga

SEQ ID NO: 797363 - DNA, 15 bp, Homo sapiens
tggggtaggccagaa

SEQ ID NO: 797364 - DNA, 15 bp, Homo sapiens
ggggtaggccagaaa

SEQ ID NO: 797365 - DNA, 15 bp, Homo sapiens
gggtaggccagaaag

SEQ ID NO: 797366 - DNA, 15 bp, Homo sapiens
ggtaggccagaaagg

SEQ ID NO: 797367 - DNA, 15 bp, Homo sapiens
gtaggccagaaaggg

SEQ ID NO: 797368 - DNA, 15 bp, Homo sapiens
taggccagaaaggga

SEQ ID NO: 797369 - DNA, 15 bp, Homo sapiens
aggccagaaagggag

SEQ ID NO: 797370 - DNA, 15 bp, Homo sapiens
ggccagaaagggagg

SEQ ID NO: 797371 - DNA, 15 bp, Homo sapiens
gccagaaagggaggc

SEQ ID NO: 797372 - DNA, 15 bp, Homo sapiens
ccagaaagggaggca

SEQ ID NO: 797373 - DNA, 15 bp, Homo sapiens
cagaaagggaggcag

SEQ ID NO: 797374 - DNA, 15 bp, Homo sapiens
agaaagggaggcagg

SEQ ID NO: 797375 - DNA, 15 bp, Homo sapiens
gaaagggaggcagga

SEQ ID NO: 797376 - DNA, 15 bp, Homo sapiens
aaagggaggcaggaa

SEQ ID NO: 797377 - DNA, 15 bp, Homo sapiens
aagggaggcaggaat

SEQ ID NO: 797378 - DNA, 15 bp, Homo sapiens
agggaggcaggaatg

SEQ ID NO: 797379 - DNA, 15 bp, Homo sapiens
gggaggcaggaatgg

SEQ ID NO: 797380 - DNA, 15 bp, Homo sapiens
ggaggcaggaatgga

SEQ ID NO: 797381 - DNA, 15 bp, Homo sapiens
gaggcaggaatggag

SEQ ID NO: 797382 - DNA, 15 bp, Homo sapiens
aggcaggaatggagc

SEQ ID NO: 797383 - DNA, 15 bp, Homo sapiens
ggcaggaatggagcc

SEQ ID NO: 797384 - DNA, 15 bp, Homo sapiens
gcaggaatggagcca

SEQ ID NO: 797385 - DNA, 15 bp, Homo sapiens
caggaatggagccag

SEQ ID NO: 797386 - DNA, 15 bp, Homo sapiens
aggaatggagccagt

SEQ ID NO: 797387 - DNA, 15 bp, Homo sapiens
ggaatggagccagtg

SEQ ID NO: 797388 - DNA, 15 bp, Homo sapiens
gaatggagccagtgg

SEQ ID NO: 797389 - DNA, 15 bp, Homo sapiens
aatggagccagtggt

SEQ ID NO: 797390 - DNA, 15 bp, Homo sapiens
atggagccagtggtg

SEQ ID NO: 797391 - DNA, 15 bp, Homo sapiens
tggagccagtggtgg

SEQ ID NO: 797392 - DNA, 15 bp, Homo sapiens
ggagccagtggtgga

SEQ ID NO: 797393 - DNA, 15 bp, Homo sapiens
gagccagtggtggac

SEQ ID NO: 797394 - DNA, 15 bp, Homo sapiens
agccagtggtggacc

SEQ ID NO: 797395 - DNA, 15 bp, Homo sapiens
gccagtggtggaccc

SEQ ID NO: 797396 - DNA, 15 bp, Homo sapiens
ccagtggtggaccca

SEQ ID NO: 797397 - DNA, 15 bp, Homo sapiens
cagtggtggacccag

SEQ ID NO: 797398 - DNA, 15 bp, Homo sapiens
agtggtggacccagc

SEQ ID NO: 797399 - DNA, 15 bp, Homo sapiens
gtggtggacccagcg

SEQ ID NO: 797400 - DNA, 15 bp, Homo sapiens
tggtggacccagcgt

SEQ ID NO: 797401 - DNA, 15 bp, Homo sapiens
ggtggacccagcgtt

SEQ ID NO: 797402 - DNA, 15 bp, Homo sapiens
gtggacccagcgttt

SEQ ID NO: 797403 - DNA, 15 bp, Homo sapiens
tggacccagcgtttc

SEQ ID NO: 797404 - DNA, 15 bp, Homo sapiens
ggacccagcgtttcc

SEQ ID NO: 797405 - DNA, 15 bp, Homo sapiens
gacccagcgtttcct

SEQ ID NO: 797406 - DNA, 15 bp, Homo sapiens
acccagcgtttcctt

SEQ ID NO: 797407 - DNA, 15 bp, Homo sapiens
cccagcgtttccttc

SEQ ID NO: 797408 - DNA, 15 bp, Homo sapiens
ccagcgtttccttcc

SEQ ID NO: 797409 - DNA, 15 bp, Homo sapiens
cagcgtttccttcca

SEQ ID NO: 797410 - DNA, 15 bp, Homo sapiens
agcgtttccttccaa

SEQ ID NO: 797411 - DNA, 15 bp, Homo sapiens
gcgtttccttccaaa

SEQ ID NO: 797412 - DNA, 15 bp, Homo sapiens
cgtttccttccaaag

SEQ ID NO: 797413 - DNA, 15 bp, Homo sapiens
gtttccttccaaagc

SEQ ID NO: 797414 - DNA, 15 bp, Homo sapiens
tttccttccaaagct

SEQ ID NO: 797415 - DNA, 15 bp, Homo sapiens
ttccttccaaagctt

SEQ ID NO: 797416 - DNA, 15 bp, Homo sapiens
tccttccaaagcttt

SEQ ID NO: 797417 - DNA, 15 bp, Homo sapiens
ccttccaaagctttt

SEQ ID NO: 797418 - DNA, 15 bp, Homo sapiens
cttccaaagctttta

SEQ ID NO: 797419 - DNA, 15 bp, Homo sapiens
ttccaaagcttttag

SEQ ID NO: 797420 - DNA, 15 bp, Homo sapiens
tccaaagcttttaga

SEQ ID NO: 797421 - DNA, 15 bp, Homo sapiens
ccaaagcttttagac

SEQ ID NO: 797422 - DNA, 15 bp, Homo sapiens
caaagcttttagact

SEQ ID NO: 797423 - DNA, 15 bp, Homo sapiens
aaagcttttagactc

SEQ ID NO: 797424 - DNA, 15 bp, Homo sapiens
aagcttttagactca

SEQ ID NO: 797425 - DNA, 15 bp, Homo sapiens
agcttttagactcag

SEQ ID NO: 797426 - DNA, 15 bp, Homo sapiens
gcttttagactcagc

SEQ ID NO: 797427 - DNA, 15 bp, Homo sapiens
cttttagactcagct

SEQ ID NO: 797428 - DNA, 15 bp, Homo sapiens
ttttagactcagctg

SEQ ID NO: 797429 - DNA, 15 bp, Homo sapiens
tttagactcagctgc

SEQ ID NO: 797430 - DNA, 15 bp, Homo sapiens
ttagactcagctgct

SEQ ID NO: 797431 - DNA, 15 bp, Homo sapiens
tagactcagctgcta

SEQ ID NO: 797432 - DNA, 15 bp, Homo sapiens
agactcagctgctaa

SEQ ID NO: 797433 - DNA, 15 bp, Homo sapiens
gactcagctgctaaa

SEQ ID NO: 797434 - DNA, 15 bp, Homo sapiens
actcagctgctaaag

SEQ ID NO: 797435 - DNA, 15 bp, Homo sapiens
ctcagctgctaaagc

SEQ ID NO: 797436 - DNA, 15 bp, Homo sapiens
tcagctgctaaagcc

SEQ ID NO: 797437 - DNA, 15 bp, Homo sapiens
cagctgctaaagcca

SEQ ID NO: 797438 - DNA, 15 bp, Homo sapiens
agctgctaaagccag

SEQ ID NO: 797439 - DNA, 15 bp, Homo sapiens
gctgctaaagccagt

SEQ ID NO: 797440 - DNA, 15 bp, Homo sapiens
ctgctaaagccagtc

SEQ ID NO: 797441 - DNA, 15 bp, Homo sapiens
tgctaaagccagtca

SEQ ID NO: 797442 - DNA, 15 bp, Homo sapiens
gctaaagccagtcat

SEQ ID NO: 797443 - DNA, 15 bp, Homo sapiens
ctaaagccagtcatg

SEQ ID NO: 797444 - DNA, 15 bp, Homo sapiens
taaagccagtcatga

SEQ ID NO: 797445 - DNA, 15 bp, Homo sapiens
aaagccagtcatgaa

SEQ ID NO: 797446 - DNA, 15 bp, Homo sapiens
aagccagtcatgaag

SEQ ID NO: 797447 - DNA, 15 bp, Homo sapiens
agccagtcatgaagt

SEQ ID NO: 797448 - DNA, 15 bp, Homo sapiens
gccagtcatgaagtg

SEQ ID NO: 797449 - DNA, 15 bp, Homo sapiens
ccagtcatgaagtgg

SEQ ID NO: 797450 - DNA, 15 bp, Homo sapiens
cagtcatgaagtgga

SEQ ID NO: 797451 - DNA, 15 bp, Homo sapiens
agtcatgaagtggac

SEQ ID NO: 797452 - DNA, 15 bp, Homo sapiens
gtcatgaagtggacg

SEQ ID NO: 797453 - DNA, 15 bp, Homo sapiens
tcatgaagtggacgt

SEQ ID NO: 797454 - DNA, 15 bp, Homo sapiens
catgaagtggacgtg

SEQ ID NO: 797455 - DNA, 15 bp, Homo sapiens
atgaagtggacgtga

SEQ ID NO: 797456 - DNA, 15 bp, Homo sapiens
tgaagtggacgtgat

SEQ ID NO: 797457 - DNA, 15 bp, Homo sapiens
gaagtggacgtgatt

SEQ ID NO: 797458 - DNA, 15 bp, Homo sapiens
aagtggacgtgattc

SEQ ID NO: 797459 - DNA, 15 bp, Homo sapiens
agtggacgtgattcc

SEQ ID NO: 797460 - DNA, 15 bp, Homo sapiens
gtggacgtgattcct

SEQ ID NO: 797461 - DNA, 15 bp, Homo sapiens
tggacgtgattcctg

SEQ ID NO: 797462 - DNA, 15 bp, Homo sapiens
ggacgtgattcctga

SEQ ID NO: 797463 - DNA, 15 bp, Homo sapiens
gacgtgattcctgag

SEQ ID NO: 797464 - DNA, 15 bp, Homo sapiens
acgtgattcctgagg

SEQ ID NO: 797465 - DNA, 15 bp, Homo sapiens
cgtgattcctgaggc

SEQ ID NO: 797466 - DNA, 15 bp, Homo sapiens
gtgattcctgaggca

SEQ ID NO: 797467 - DNA, 15 bp, Homo sapiens
tgattcctgaggcag

SEQ ID NO: 797468 - DNA, 15 bp, Homo sapiens
gattcctgaggcagg

SEQ ID NO: 797469 - DNA, 15 bp, Homo sapiens
attcctgaggcaggg

SEQ ID NO: 797470 - DNA, 15 bp, Homo sapiens
ttcctgaggcagggc

SEQ ID NO: 797471 - DNA, 15 bp, Homo sapiens
tcctgaggcagggca

SEQ ID NO: 797472 - DNA, 15 bp, Homo sapiens
cctgaggcagggcag

SEQ ID NO: 797473 - DNA, 15 bp, Homo sapiens
ctgaggcagggcagc

SEQ ID NO: 797474 - DNA, 15 bp, Homo sapiens
tgaggcagggcagca

SEQ ID NO: 797475 - DNA, 15 bp, Homo sapiens
gaggcagggcagcag

SEQ ID NO: 797476 - DNA, 15 bp, Homo sapiens
aggcagggcagcagg

SEQ ID NO: 797477 - DNA, 15 bp, Homo sapiens
ggcagggcagcaggc

SEQ ID NO: 797478 - DNA, 15 bp, Homo sapiens
gcagggcagcaggcc

SEQ ID NO: 797479 - DNA, 15 bp, Homo sapiens
cagggcagcaggccc

SEQ ID NO: 797480 - DNA, 15 bp, Homo sapiens
agggcagcaggcccc

SEQ ID NO: 797481 - DNA, 15 bp, Homo sapiens
gggcagcaggcccct

SEQ ID NO: 797482 - DNA, 15 bp, Homo sapiens
ggcagcaggcccctc

SEQ ID NO: 797483 - DNA, 15 bp, Homo sapiens
gcagcaggcccctct

SEQ ID NO: 797484 - DNA, 15 bp, Homo sapiens
cagcaggcccctctc

SEQ ID NO: 797485 - DNA, 15 bp, Homo sapiens
agcaggcccctctct

SEQ ID NO: 797486 - DNA, 15 bp, Homo sapiens
gcaggcccctctctc

SEQ ID NO: 797487 - DNA, 15 bp, Homo sapiens
caggcccctctctca

SEQ ID NO: 797488 - DNA, 15 bp, Homo sapiens
aggcccctctctcac

SEQ ID NO: 797489 - DNA, 15 bp, Homo sapiens
ggcccctctctcact

SEQ ID NO: 797490 - DNA, 15 bp, Homo sapiens
gcccctctctcacta

SEQ ID NO: 797491 - DNA, 15 bp, Homo sapiens
cccctctctcactac

SEQ ID NO: 797492 - DNA, 15 bp, Homo sapiens
ccctctctcactacc

SEQ ID NO: 797493 - DNA, 15 bp, Homo sapiens
cctctctcactaccc

SEQ ID NO: 797494 - DNA, 15 bp, Homo sapiens
ctctctcactacccc

SEQ ID NO: 797495 - DNA, 15 bp, Homo sapiens
tctctcactaccccc

SEQ ID NO: 797496 - DNA, 15 bp, Homo sapiens
ctctcactaccccct

SEQ ID NO: 797497 - DNA, 15 bp, Homo sapiens
tctcactaccccctt

SEQ ID NO: 797498 - DNA, 15 bp, Homo sapiens
ctcactacccccttc

SEQ ID NO: 797499 - DNA, 15 bp, Homo sapiens
tcactacccccttca

SEQ ID NO: 797500 - DNA, 15 bp, Homo sapiens
cactacccccttcac

SEQ ID NO: 797501 - DNA, 15 bp, Homo sapiens
actacccccttcacc

SEQ ID NO: 797502 - DNA, 15 bp, Homo sapiens
ctacccccttcacca

SEQ ID NO: 797503 - DNA, 15 bp, Homo sapiens
tacccccttcaccag

SEQ ID NO: 797504 - DNA, 15 bp, Homo sapiens
acccccttcaccagc

SEQ ID NO: 797505 - DNA, 15 bp, Homo sapiens
cccccttcaccagcc

SEQ ID NO: 797506 - DNA, 15 bp, Homo sapiens
ccccttcaccagccc

SEQ ID NO: 797507 - DNA, 15 bp, Homo sapiens
cccttcaccagcccc

SEQ ID NO: 797508 - DNA, 15 bp, Homo sapiens
ccttcaccagcccca

SEQ ID NO: 797509 - DNA, 15 bp, Homo sapiens
cttcaccagccccaa

SEQ ID NO: 797510 - DNA, 15 bp, Homo sapiens
ttcaccagccccaac

SEQ ID NO: 797511 - DNA, 15 bp, Homo sapiens
tcaccagccccaacc

SEQ ID NO: 797512 - DNA, 15 bp, Homo sapiens
caccagccccaacct

SEQ ID NO: 797513 - DNA, 15 bp, Homo sapiens
accagccccaacctt

SEQ ID NO: 797514 - DNA, 15 bp, Homo sapiens
ccagccccaaccttc

SEQ ID NO: 797515 - DNA, 15 bp, Homo sapiens
cagccccaaccttca

SEQ ID NO: 797516 - DNA, 15 bp, Homo sapiens
agccccaaccttcag

SEQ ID NO: 797517 - DNA, 15 bp, Homo sapiens
gccccaaccttcagc

SEQ ID NO: 797518 - DNA, 15 bp, Homo sapiens
ccccaaccttcagca

SEQ ID NO: 797519 - DNA, 15 bp, Homo sapiens
cccaaccttcagcaa

SEQ ID NO: 797520 - DNA, 15 bp, Homo sapiens
ccaaccttcagcaac

SEQ ID NO: 797521 - DNA, 15 bp, Homo sapiens
caaccttcagcaact

SEQ ID NO: 797522 - DNA, 15 bp, Homo sapiens
aaccttcagcaactt

SEQ ID NO: 797523 - DNA, 15 bp, Homo sapiens
accttcagcaacttt

SEQ ID NO: 797524 - DNA, 15 bp, Homo sapiens
ccttcagcaactttt

SEQ ID NO: 797525 - DNA, 15 bp, Homo sapiens
cttcagcaacttttc

SEQ ID NO: 797526 - DNA, 15 bp, Homo sapiens
ttcagcaacttttcc

SEQ ID NO: 797527 - DNA, 15 bp, Homo sapiens
tcagcaacttttcct

SEQ ID NO: 797528 - DNA, 15 bp, Homo sapiens
cagcaacttttcctg

SEQ ID NO: 797529 - DNA, 15 bp, Homo sapiens
agcaacttttcctgg

SEQ ID NO: 797530 - DNA, 15 bp, Homo sapiens
gcaacttttcctggc

SEQ ID NO: 797531 - DNA, 15 bp, Homo sapiens
caacttttcctggca

SEQ ID NO: 797532 - DNA, 15 bp, Homo sapiens
aacttttcctggcag

SEQ ID NO: 797533 - DNA, 15 bp, Homo sapiens
acttttcctggcagg

SEQ ID NO: 797534 - DNA, 15 bp, Homo sapiens
cttttcctggcagga

SEQ ID NO: 797535 - DNA, 15 bp, Homo sapiens
ttttcctggcaggag

SEQ ID NO: 797536 - DNA, 15 bp, Homo sapiens
tttcctggcaggaga

SEQ ID NO: 797537 - DNA, 15 bp, Homo sapiens
ttcctggcaggagac

SEQ ID NO: 797538 - DNA, 15 bp, Homo sapiens
tcctggcaggagacc

SEQ ID NO: 797539 - DNA, 15 bp, Homo sapiens
cctggcaggagacca

SEQ ID NO: 797540 - DNA, 15 bp, Homo sapiens
ctggcaggagaccac

SEQ ID NO: 797541 - DNA, 15 bp, Homo sapiens
tggcaggagaccaca

SEQ ID NO: 797542 - DNA, 15 bp, Homo sapiens
ggcaggagaccacat

SEQ ID NO: 797543 - DNA, 15 bp, Homo sapiens
gcaggagaccacatc

SEQ ID NO: 797544 - DNA, 15 bp, Homo sapiens
caggagaccacatca

SEQ ID NO: 797545 - DNA, 15 bp, Homo sapiens
aggagaccacatcac

SEQ ID NO: 797546 - DNA, 15 bp, Homo sapiens
ggagaccacatcacc

SEQ ID NO: 797547 - DNA, 15 bp, Homo sapiens
gagaccacatcacca

SEQ ID NO: 797548 - DNA, 15 bp, Homo sapiens
agaccacatcaccat

SEQ ID NO: 797549 - DNA, 15 bp, Homo sapiens
gaccacatcaccatc

SEQ ID NO: 797550 - DNA, 15 bp, Homo sapiens
accacatcaccatcc

SEQ ID NO: 797551 - DNA, 15 bp, Homo sapiens
ccacatcaccatccc

SEQ ID NO: 797552 - DNA, 15 bp, Homo sapiens
cacatcaccatcccc

SEQ ID NO: 797553 - DNA, 15 bp, Homo sapiens
acatcaccatcccct

SEQ ID NO: 797554 - DNA, 15 bp, Homo sapiens
catcaccatcccctc

SEQ ID NO: 797555 - DNA, 15 bp, Homo sapiens
atcaccatcccctcc

SEQ ID NO: 797556 - DNA, 15 bp, Homo sapiens
tcaccatcccctccc

SEQ ID NO: 797557 - DNA, 15 bp, Homo sapiens
caccatcccctcccc

SEQ ID NO: 797558 - DNA, 15 bp, Homo sapiens
accatcccctcccct

SEQ ID NO: 797559 - DNA, 15 bp, Homo sapiens
ccatcccctcccctt

SEQ ID NO: 797560 - DNA, 15 bp, Homo sapiens
catcccctccccttc

SEQ ID NO: 797561 - DNA, 15 bp, Homo sapiens
atcccctccccttcc

SEQ ID NO: 797562 - DNA, 15 bp, Homo sapiens
tcccctccccttccc

SEQ ID NO: 797563 - DNA, 15 bp, Homo sapiens
cccctccccttccca

SEQ ID NO: 797564 - DNA, 15 bp, Homo sapiens
ccctccccttcccat

SEQ ID NO: 797565 - DNA, 15 bp, Homo sapiens
cctccccttcccatc

SEQ ID NO: 797566 - DNA, 15 bp, Homo sapiens
ctccccttcccatca

SEQ ID NO: 797567 - DNA, 15 bp, Homo sapiens
tccccttcccatcac

SEQ ID NO: 797568 - DNA, 15 bp, Homo sapiens
ccccttcccatcaca

SEQ ID NO: 797569 - DNA, 15 bp, Homo sapiens
cccttcccatcacag

SEQ ID NO: 797570 - DNA, 15 bp, Homo sapiens
ccttcccatcacagg

SEQ ID NO: 797571 - DNA, 15 bp, Homo sapiens
cttcccatcacaggc

SEQ ID NO: 797572 - DNA, 15 bp, Homo sapiens
ttcccatcacaggca

SEQ ID NO: 797573 - DNA, 15 bp, Homo sapiens
tcccatcacaggcat

SEQ ID NO: 797574 - DNA, 15 bp, Homo sapiens
cccatcacaggcatt

SEQ ID NO: 797575 - DNA, 15 bp, Homo sapiens
ccatcacaggcattt

SEQ ID NO: 797576 - DNA, 15 bp, Homo sapiens
catcacaggcatttc

SEQ ID NO: 797577 - DNA, 15 bp, Homo sapiens
atcacaggcatttca

SEQ ID NO: 797578 - DNA, 15 bp, Homo sapiens
tcacaggcatttcag

SEQ ID NO: 797579 - DNA, 15 bp, Homo sapiens
cacaggcatttcaga

SEQ ID NO: 797580 - DNA, 15 bp, Homo sapiens
acaggcatttcagaa

SEQ ID NO: 797581 - DNA, 15 bp, Homo sapiens
caggcatttcagaac

SEQ ID NO: 797582 - DNA, 15 bp, Homo sapiens
aggcatttcagaaca

SEQ ID NO: 797583 - DNA, 15 bp, Homo sapiens
ggcatttcagaacac

SEQ ID NO: 797584 - DNA, 15 bp, Homo sapiens
gcatttcagaacaca

SEQ ID NO: 797585 - DNA, 15 bp, Homo sapiens
catttcagaacacaa

SEQ ID NO: 797586 - DNA, 15 bp, Homo sapiens
atttcagaacacaag

SEQ ID NO: 797587 - DNA, 15 bp, Homo sapiens
tttcagaacacaagg

SEQ ID NO: 797588 - DNA, 15 bp, Homo sapiens
ttcagaacacaaggg

SEQ ID NO: 797589 - DNA, 15 bp, Homo sapiens
tcagaacacaagggg

SEQ ID NO: 797590 - DNA, 15 bp, Homo sapiens
cagaacacaagggga

SEQ ID NO: 797591 - DNA, 15 bp, Homo sapiens
agaacacaaggggat

SEQ ID NO: 797592 - DNA, 15 bp, Homo sapiens
gaacacaaggggatc

SEQ ID NO: 797593 - DNA, 15 bp, Homo sapiens
aacacaaggggatct

SEQ ID NO: 797594 - DNA, 15 bp, Homo sapiens
acacaaggggatctg

SEQ ID NO: 797595 - DNA, 15 bp, Homo sapiens
cacaaggggatctgg

SEQ ID NO: 797596 - DNA, 15 bp, Homo sapiens
acaaggggatctggg

SEQ ID NO: 797597 - DNA, 15 bp, Homo sapiens
caaggggatctgggg

SEQ ID NO: 797598 - DNA, 15 bp, Homo sapiens
aaggggatctggggg

SEQ ID NO: 797599 - DNA, 15 bp, Homo sapiens
aggggatctggggga

SEQ ID NO: 797600 - DNA, 15 bp, Homo sapiens
ggggatctgggggac

SEQ ID NO: 797601 - DNA, 15 bp, Homo sapiens
gggatctgggggacc

SEQ ID NO: 797602 - DNA, 15 bp, Homo sapiens
ggatctgggggaccc

SEQ ID NO: 797603 - DNA, 15 bp, Homo sapiens
gatctgggggaccca

SEQ ID NO: 797604 - DNA, 15 bp, Homo sapiens
atctgggggacccac

SEQ ID NO: 797605 - DNA, 15 bp, Homo sapiens
tctgggggacccacg

SEQ ID NO: 797606 - DNA, 15 bp, Homo sapiens
ctgggggacccacgt

SEQ ID NO: 797607 - DNA, 15 bp, Homo sapiens
tgggggacccacgtc

SEQ ID NO: 797608 - DNA, 15 bp, Homo sapiens
gggggacccacgtct

SEQ ID NO: 797609 - DNA, 15 bp, Homo sapiens
ggggacccacgtcta

SEQ ID NO: 797610 - DNA, 15 bp, Homo sapiens
gggacccacgtctaa

SEQ ID NO: 797611 - DNA, 15 bp, Homo sapiens
ggacccacgtctaag

SEQ ID NO: 797612 - DNA, 15 bp, Homo sapiens
gacccacgtctaagg

SEQ ID NO: 797613 - DNA, 15 bp, Homo sapiens
acccacgtctaagga

SEQ ID NO: 797614 - DNA, 15 bp, Homo sapiens
cccacgtctaaggaa

SEQ ID NO: 797615 - DNA, 15 bp, Homo sapiens
ccacgtctaaggaac

SEQ ID NO: 797616 - DNA, 15 bp, Homo sapiens
cacgtctaaggaact

SEQ ID NO: 797617 - DNA, 15 bp, Homo sapiens
acgtctaaggaactg

SEQ ID NO: 797618 - DNA, 15 bp, Homo sapiens
cgtctaaggaactgt

SEQ ID NO: 797619 - DNA, 15 bp, Homo sapiens
gtctaaggaactgtg

SEQ ID NO: 797620 - DNA, 15 bp, Homo sapiens
tctaaggaactgtga

SEQ ID NO: 797621 - DNA, 15 bp, Homo sapiens
ctaaggaactgtgac

SEQ ID NO: 797622 - DNA, 15 bp, Homo sapiens
taaggaactgtgact

SEQ ID NO: 797623 - DNA, 15 bp, Homo sapiens
aaggaactgtgactg

SEQ ID NO: 797624 - DNA, 15 bp, Homo sapiens
aggaactgtgactga

SEQ ID NO: 797625 - DNA, 15 bp, Homo sapiens
ggaactgtgactgag

SEQ ID NO: 797626 - DNA, 15 bp, Homo sapiens
gaactgtgactgaga

SEQ ID NO: 797627 - DNA, 15 bp, Homo sapiens
aactgtgactgagag

SEQ ID NO: 797628 - DNA, 15 bp, Homo sapiens
actgtgactgagagc

SEQ ID NO: 797629 - DNA, 15 bp, Homo sapiens
ctgtgactgagagcc

SEQ ID NO: 797630 - DNA, 15 bp, Homo sapiens
tgtgactgagagcct

SEQ ID NO: 797631 - DNA, 15 bp, Homo sapiens
gtgactgagagcctg

SEQ ID NO: 797632 - DNA, 15 bp, Homo sapiens
tgactgagagcctgg

SEQ ID NO: 797633 - DNA, 15 bp, Homo sapiens
gactgagagcctggg

SEQ ID NO: 797634 - DNA, 15 bp, Homo sapiens
actgagagcctggga

SEQ ID NO: 797635 - DNA, 15 bp, Homo sapiens
ctgagagcctgggaa

SEQ ID NO: 797636 - DNA, 15 bp, Homo sapiens
tgagagcctgggaag

SEQ ID NO: 797637 - DNA, 15 bp, Homo sapiens
gagagcctgggaagg

SEQ ID NO: 797638 - DNA, 15 bp, Homo sapiens
agagcctgggaaggg

SEQ ID NO: 797639 - DNA, 15 bp, Homo sapiens
gagcctgggaagggc

SEQ ID NO: 797640 - DNA, 15 bp, Homo sapiens
agcctgggaagggct

SEQ ID NO: 797641 - DNA, 15 bp, Homo sapiens
gcctgggaagggctt

SEQ ID NO: 797642 - DNA, 15 bp, Homo sapiens
cctgggaagggcttt

SEQ ID NO: 797643 - DNA, 15 bp, Homo sapiens
ctgggaagggctttc

SEQ ID NO: 797644 - DNA, 15 bp, Homo sapiens
tgggaagggctttct

SEQ ID NO: 797645 - DNA, 15 bp, Homo sapiens
gggaagggctttctc

SEQ ID NO: 797646 - DNA, 15 bp, Homo sapiens
ggaagggctttctct

SEQ ID NO: 797647 - DNA, 15 bp, Homo sapiens
gaagggctttctctt

SEQ ID NO: 797648 - DNA, 15 bp, Homo sapiens
aagggctttctcttg

SEQ ID NO: 797649 - DNA, 15 bp, Homo sapiens
agggctttctcttga

SEQ ID NO: 797650 - DNA, 15 bp, Homo sapiens
gggctttctcttgac

SEQ ID NO: 797651 - DNA, 15 bp, Homo sapiens
ggctttctcttgacc

SEQ ID NO: 797652 - DNA, 15 bp, Homo sapiens
gctttctcttgacct

SEQ ID NO: 797653 - DNA, 15 bp, Homo sapiens
ctttctcttgacctg

SEQ ID NO: 797654 - DNA, 15 bp, Homo sapiens
tttctcttgacctgg

SEQ ID NO: 797655 - DNA, 15 bp, Homo sapiens
ttctcttgacctggg

SEQ ID NO: 797656 - DNA, 15 bp, Homo sapiens
tctcttgacctggga

SEQ ID NO: 797657 - DNA, 15 bp, Homo sapiens
ctcttgacctgggag

SEQ ID NO: 797658 - DNA, 15 bp, Homo sapiens
tcttgacctgggaga

SEQ ID NO: 797659 - DNA, 15 bp, Homo sapiens
cttgacctgggagag

SEQ ID NO: 797660 - DNA, 15 bp, Homo sapiens
ttgacctgggagagg

SEQ ID NO: 797661 - DNA, 15 bp, Homo sapiens
tgacctgggagaggg

SEQ ID NO: 797662 - DNA, 15 bp, Homo sapiens
gacctgggagaggga

SEQ ID NO: 797663 - DNA, 15 bp, Homo sapiens
acctgggagagggaa

SEQ ID NO: 797664 - DNA, 15 bp, Homo sapiens
cctgggagagggaaa

SEQ ID NO: 797665 - DNA, 15 bp, Homo sapiens
ctgggagagggaaaa

SEQ ID NO: 797666 - DNA, 15 bp, Homo sapiens
tgggagagggaaaat

SEQ ID NO: 797667 - DNA, 15 bp, Homo sapiens
gggagagggaaaatt

SEQ ID NO: 797668 - DNA, 15 bp, Homo sapiens
ggagagggaaaatta

SEQ ID NO: 797669 - DNA, 15 bp, Homo sapiens
gagagggaaaattag

SEQ ID NO: 797670 - DNA, 15 bp, Homo sapiens
agagggaaaattagg

SEQ ID NO: 797671 - DNA, 15 bp, Homo sapiens
gagggaaaattaggc

SEQ ID NO: 797672 - DNA, 15 bp, Homo sapiens
agggaaaattaggca

SEQ ID NO: 797673 - DNA, 15 bp, Homo sapiens
gggaaaattaggcaa

SEQ ID NO: 797674 - DNA, 15 bp, Homo sapiens
ggaaaattaggcaaa

SEQ ID NO: 797675 - DNA, 15 bp, Homo sapiens
gaaaattaggcaaat

SEQ ID NO: 797676 - DNA, 15 bp, Homo sapiens
aaaattaggcaaatt

SEQ ID NO: 797677 - DNA, 15 bp, Homo sapiens
aaattaggcaaattg

SEQ ID NO: 797678 - DNA, 15 bp, Homo sapiens
aattaggcaaattgc

SEQ ID NO: 797679 - DNA, 15 bp, Homo sapiens
attaggcaaattgct

SEQ ID NO: 797680 - DNA, 15 bp, Homo sapiens
ttaggcaaattgctg

SEQ ID NO: 797681 - DNA, 15 bp, Homo sapiens
taggcaaattgctgt

SEQ ID NO: 797682 - DNA, 15 bp, Homo sapiens
aggcaaattgctgtg

SEQ ID NO: 797683 - DNA, 15 bp, Homo sapiens
ggcaaattgctgtgt

SEQ ID NO: 797684 - DNA, 15 bp, Homo sapiens
gcaaattgctgtgtt

SEQ ID NO: 797685 - DNA, 15 bp, Homo sapiens
caaattgctgtgttt

SEQ ID NO: 797686 - DNA, 15 bp, Homo sapiens
aaattgctgtgtttc

SEQ ID NO: 797687 - DNA, 15 bp, Homo sapiens
aattgctgtgtttct

SEQ ID NO: 797688 - DNA, 15 bp, Homo sapiens
attgctgtgtttctc

SEQ ID NO: 797689 - DNA, 15 bp, Homo sapiens
ttgctgtgtttctcc

SEQ ID NO: 797690 - DNA, 15 bp, Homo sapiens
tgctgtgtttctcca

SEQ ID NO: 797691 - DNA, 15 bp, Homo sapiens
gctgtgtttctccac

SEQ ID NO: 797692 - DNA, 15 bp, Homo sapiens
ctgtgtttctccact

SEQ ID NO: 797693 - DNA, 15 bp, Homo sapiens
tgtgtttctccactg

SEQ ID NO: 797694 - DNA, 15 bp, Homo sapiens
gtgtttctccactgt

SEQ ID NO: 797695 - DNA, 15 bp, Homo sapiens
tgtttctccactgta

SEQ ID NO: 797696 - DNA, 15 bp, Homo sapiens
gtttctccactgtaa

SEQ ID NO: 797697 - DNA, 15 bp, Homo sapiens
tttctccactgtaaa

SEQ ID NO: 797698 - DNA, 15 bp, Homo sapiens
ttctccactgtaaac

SEQ ID NO: 797699 - DNA, 15 bp, Homo sapiens
tctccactgtaaacc

SEQ ID NO: 797700 - DNA, 15 bp, Homo sapiens
ctccactgtaaacct

SEQ ID NO: 797701 - DNA, 15 bp, Homo sapiens
tccactgtaaacctg

SEQ ID NO: 797702 - DNA, 15 bp, Homo sapiens
ccactgtaaacctga

SEQ ID NO: 797703 - DNA, 15 bp, Homo sapiens
cactgtaaacctgaa

SEQ ID NO: 797704 - DNA, 15 bp, Homo sapiens
actgtaaacctgaat

SEQ ID NO: 797705 - DNA, 15 bp, Homo sapiens
ctgtaaacctgaatg

SEQ ID NO: 797706 - DNA, 15 bp, Homo sapiens
tgtaaacctgaatgg

SEQ ID NO: 797707 - DNA, 15 bp, Homo sapiens
gtaaacctgaatggg

SEQ ID NO: 797708 - DNA, 15 bp, Homo sapiens
taaacctgaatggga

SEQ ID NO: 797709 - DNA, 15 bp, Homo sapiens
aaacctgaatgggaa

SEQ ID NO: 797710 - DNA, 15 bp, Homo sapiens
aacctgaatgggaat

SEQ ID NO: 797711 - DNA, 15 bp, Homo sapiens
acctgaatgggaatg

SEQ ID NO: 797712 - DNA, 15 bp, Homo sapiens
cctgaatgggaatga

SEQ ID NO: 797713 - DNA, 15 bp, Homo sapiens
ctgaatgggaatgag

SEQ ID NO: 797714 - DNA, 15 bp, Homo sapiens
tgaatgggaatgagg

SEQ ID NO: 797715 - DNA, 15 bp, Homo sapiens
gaatgggaatgaggg

SEQ ID NO: 797716 - DNA, 15 bp, Homo sapiens
aatgggaatgaggga

SEQ ID NO: 797717 - DNA, 15 bp, Homo sapiens
atgggaatgagggag

SEQ ID NO: 797718 - DNA, 15 bp, Homo sapiens
tgggaatgagggagg

SEQ ID NO: 797719 - DNA, 15 bp, Homo sapiens
gggaatgagggagga

SEQ ID NO: 797720 - DNA, 15 bp, Homo sapiens
ggaatgagggaggag

SEQ ID NO: 797721 - DNA, 15 bp, Homo sapiens
gaatgagggaggagg

SEQ ID NO: 797722 - DNA, 15 bp, Homo sapiens
aatgagggaggaggg

SEQ ID NO: 797723 - DNA, 15 bp, Homo sapiens
atgagggaggaggga

SEQ ID NO: 797724 - DNA, 15 bp, Homo sapiens
tgagggaggagggag

SEQ ID NO: 797725 - DNA, 15 bp, Homo sapiens
gagggaggagggaga

SEQ ID NO: 797726 - DNA, 15 bp, Homo sapiens
agggaggagggagaa

SEQ ID NO: 797727 - DNA, 15 bp, Homo sapiens
gggaggagggagaaa

SEQ ID NO: 797728 - DNA, 15 bp, Homo sapiens
ggaggagggagaaaa

SEQ ID NO: 797729 - DNA, 15 bp, Homo sapiens
gaggagggagaaaaa

SEQ ID NO: 797730 - DNA, 15 bp, Homo sapiens
aggagggagaaaaag

SEQ ID NO: 797731 - DNA, 15 bp, Homo sapiens
ggagggagaaaaagc

SEQ ID NO: 797732 - DNA, 15 bp, Homo sapiens
gagggagaaaaagcc

SEQ ID NO: 797733 - DNA, 15 bp, Homo sapiens
agggagaaaaagcca

SEQ ID NO: 797734 - DNA, 15 bp, Homo sapiens
gggagaaaaagccag

SEQ ID NO: 797735 - DNA, 15 bp, Homo sapiens
ggagaaaaagccaga

SEQ ID NO: 797736 - DNA, 15 bp, Homo sapiens
gagaaaaagccagac

SEQ ID NO: 797737 - DNA, 15 bp, Homo sapiens
agaaaaagccagaca

SEQ ID NO: 797738 - DNA, 15 bp, Homo sapiens
gaaaaagccagacaa

SEQ ID NO: 797739 - DNA, 15 bp, Homo sapiens
aaaaagccagacaaa

SEQ ID NO: 797740 - DNA, 15 bp, Homo sapiens
aaaagccagacaaaa

SEQ ID NO: 797741 - DNA, 15 bp, Homo sapiens
aaagccagacaaaaa

SEQ ID NO: 797742 - DNA, 15 bp, Homo sapiens
aagccagacaaaaat

SEQ ID NO: 797743 - DNA, 15 bp, Homo sapiens
agccagacaaaaatg

SEQ ID NO: 797744 - DNA, 15 bp, Homo sapiens
gccagacaaaaatgg

SEQ ID NO: 797745 - DNA, 15 bp, Homo sapiens
ccagacaaaaatgga

SEQ ID NO: 797746 - DNA, 15 bp, Homo sapiens
cagacaaaaatggag

SEQ ID NO: 797747 - DNA, 15 bp, Homo sapiens
agacaaaaatggaga

SEQ ID NO: 797748 - DNA, 15 bp, Homo sapiens
gacaaaaatggagac

SEQ ID NO: 797749 - DNA, 15 bp, Homo sapiens
acaaaaatggagaca

SEQ ID NO: 797750 - DNA, 15 bp, Homo sapiens
caaaaatggagacac

SEQ ID NO: 797751 - DNA, 15 bp, Homo sapiens
aaaaatggagacaca

SEQ ID NO: 797752 - DNA, 15 bp, Homo sapiens
aaaatggagacacat

SEQ ID NO: 797753 - DNA, 15 bp, Homo sapiens
aaatggagacacatg

SEQ ID NO: 797754 - DNA, 15 bp, Homo sapiens
aatggagacacatgc

SEQ ID NO: 797755 - DNA, 15 bp, Homo sapiens
atggagacacatgca

SEQ ID NO: 797756 - DNA, 15 bp, Homo sapiens
tggagacacatgcag

SEQ ID NO: 797757 - DNA, 15 bp, Homo sapiens
ggagacacatgcaga

SEQ ID NO: 797758 - DNA, 15 bp, Homo sapiens
gagacacatgcagag

SEQ ID NO: 797759 - DNA, 15 bp, Homo sapiens
agacacatgcagaga

SEQ ID NO: 797760 - DNA, 15 bp, Homo sapiens
gacacatgcagagag

SEQ ID NO: 797761 - DNA, 15 bp, Homo sapiens
acacatgcagagaga

SEQ ID NO: 797762 - DNA, 15 bp, Homo sapiens
cacatgcagagagat

SEQ ID NO: 797763 - DNA, 15 bp, Homo sapiens
acatgcagagagatg

SEQ ID NO: 797764 - DNA, 15 bp, Homo sapiens
catgcagagagatgg

SEQ ID NO: 797765 - DNA, 15 bp, Homo sapiens
atgcagagagatgga

SEQ ID NO: 797766 - DNA, 15 bp, Homo sapiens
tgcagagagatggag

SEQ ID NO: 797767 - DNA, 15 bp, Homo sapiens
gcagagagatggaga

SEQ ID NO: 797768 - DNA, 15 bp, Homo sapiens
cagagagatggagaa

SEQ ID NO: 797769 - DNA, 15 bp, Homo sapiens
agagagatggagaaa

SEQ ID NO: 797770 - DNA, 15 bp, Homo sapiens
gagagatggagaaac

SEQ ID NO: 797771 - DNA, 15 bp, Homo sapiens
agagatggagaaaca

SEQ ID NO: 797772 - DNA, 15 bp, Homo sapiens
gagatggagaaacag

SEQ ID NO: 797773 - DNA, 15 bp, Homo sapiens
agatggagaaacaga

SEQ ID NO: 797774 - DNA, 15 bp, Homo sapiens
gatggagaaacagag

SEQ ID NO: 797775 - DNA, 15 bp, Homo sapiens
atggagaaacagaga

SEQ ID NO: 797776 - DNA, 15 bp, Homo sapiens
tggagaaacagagaa

SEQ ID NO: 797777 - DNA, 15 bp, Homo sapiens
ggagaaacagagaaa

SEQ ID NO: 797778 - DNA, 15 bp, Homo sapiens
gagaaacagagaaag

SEQ ID NO: 797779 - DNA, 15 bp, Homo sapiens
agaaacagagaaagg

SEQ ID NO: 797780 - DNA, 15 bp, Homo sapiens
gaaacagagaaagga

SEQ ID NO: 797781 - DNA, 15 bp, Homo sapiens
aaacagagaaaggag

SEQ ID NO: 797782 - DNA, 15 bp, Homo sapiens
aacagagaaaggaga

SEQ ID NO: 797783 - DNA, 15 bp, Homo sapiens
acagagaaaggagaa

SEQ ID NO: 797784 - DNA, 15 bp, Homo sapiens
cagagaaaggagaag

SEQ ID NO: 797785 - DNA, 15 bp, Homo sapiens
agagaaaggagaagg

SEQ ID NO: 797786 - DNA, 15 bp, Homo sapiens
gagaaaggagaagga

SEQ ID NO: 797787 - DNA, 15 bp, Homo sapiens
agaaaggagaaggaa

SEQ ID NO: 797788 - DNA, 15 bp, Homo sapiens
gaaaggagaaggaaa

SEQ ID NO: 797789 - DNA, 15 bp, Homo sapiens
aaaggagaaggaaag

SEQ ID NO: 797790 - DNA, 15 bp, Homo sapiens
aaggagaaggaaaga

SEQ ID NO: 797791 - DNA, 15 bp, Homo sapiens
aggagaaggaaagag

SEQ ID NO: 797792 - DNA, 15 bp, Homo sapiens
ggagaaggaaagagc

SEQ ID NO: 797793 - DNA, 15 bp, Homo sapiens
gagaaggaaagagct

SEQ ID NO: 797794 - DNA, 15 bp, Homo sapiens
agaaggaaagagcta

SEQ ID NO: 797795 - DNA, 15 bp, Homo sapiens
gaaggaaagagctac

SEQ ID NO: 797796 - DNA, 15 bp, Homo sapiens
aaggaaagagctaca

SEQ ID NO: 797797 - DNA, 15 bp, Homo sapiens
aggaaagagctacag

SEQ ID NO: 797798 - DNA, 15 bp, Homo sapiens
ggaaagagctacaga

SEQ ID NO: 797799 - DNA, 15 bp, Homo sapiens
gaaagagctacagag

SEQ ID NO: 797800 - DNA, 15 bp, Homo sapiens
aaagagctacagaga

SEQ ID NO: 797801 - DNA, 15 bp, Homo sapiens
aagagctacagagat

SEQ ID NO: 797802 - DNA, 15 bp, Homo sapiens
agagctacagagata

SEQ ID NO: 797803 - DNA, 15 bp, Homo sapiens
gagctacagagataa

SEQ ID NO: 797804 - DNA, 15 bp, Homo sapiens
agctacagagataag

SEQ ID NO: 797805 - DNA, 15 bp, Homo sapiens
gctacagagataagg

SEQ ID NO: 797806 - DNA, 15 bp, Homo sapiens
ctacagagataagga

SEQ ID NO: 797807 - DNA, 15 bp, Homo sapiens
tacagagataaggaa

SEQ ID NO: 797808 - DNA, 15 bp, Homo sapiens
acagagataaggaaa

SEQ ID NO: 797809 - DNA, 15 bp, Homo sapiens
cagagataaggaaat

SEQ ID NO: 797810 - DNA, 15 bp, Homo sapiens
agagataaggaaatg

SEQ ID NO: 797811 - DNA, 15 bp, Homo sapiens
gagataaggaaatga

SEQ ID NO: 797812 - DNA, 15 bp, Homo sapiens
agataaggaaatgag

SEQ ID NO: 797813 - DNA, 15 bp, Homo sapiens
gataaggaaatgaga

SEQ ID NO: 797814 - DNA, 15 bp, Homo sapiens
ataaggaaatgagaa

SEQ ID NO: 797815 - DNA, 15 bp, Homo sapiens
taaggaaatgagaaa

SEQ ID NO: 797816 - DNA, 15 bp, Homo sapiens
aaggaaatgagaaaa

SEQ ID NO: 797817 - DNA, 15 bp, Homo sapiens
aggaaatgagaaaac

SEQ ID NO: 797818 - DNA, 15 bp, Homo sapiens
ggaaatgagaaaaca

SEQ ID NO: 797819 - DNA, 15 bp, Homo sapiens
gaaatgagaaaacac

SEQ ID NO: 797820 - DNA, 15 bp, Homo sapiens
aaatgagaaaacact

SEQ ID NO: 797821 - DNA, 15 bp, Homo sapiens
aatgagaaaacactg

SEQ ID NO: 797822 - DNA, 15 bp, Homo sapiens
atgagaaaacactga

SEQ ID NO: 797823 - DNA, 15 bp, Homo sapiens
tgagaaaacactgag

SEQ ID NO: 797824 - DNA, 15 bp, Homo sapiens
gagaaaacactgaga

SEQ ID NO: 797825 - DNA, 15 bp, Homo sapiens
agaaaacactgagaa

SEQ ID NO: 797826 - DNA, 15 bp, Homo sapiens
gaaaacactgagaaa

SEQ ID NO: 797827 - DNA, 15 bp, Homo sapiens
aaaacactgagaaat

SEQ ID NO: 797828 - DNA, 15 bp, Homo sapiens
aaacactgagaaata

SEQ ID NO: 797829 - DNA, 15 bp, Homo sapiens
aacactgagaaataa

SEQ ID NO: 797830 - DNA, 15 bp, Homo sapiens
acactgagaaataat

SEQ ID NO: 797831 - DNA, 15 bp, Homo sapiens
cactgagaaataatt

SEQ ID NO: 797832 - DNA, 15 bp, Homo sapiens
actgagaaataattg

SEQ ID NO: 797833 - DNA, 15 bp, Homo sapiens
ctgagaaataattgg

SEQ ID NO: 797834 - DNA, 15 bp, Homo sapiens
tgagaaataattggg

SEQ ID NO: 797835 - DNA, 15 bp, Homo sapiens
gagaaataattggga

SEQ ID NO: 797836 - DNA, 15 bp, Homo sapiens
agaaataattgggaa

SEQ ID NO: 797837 - DNA, 15 bp, Homo sapiens
gaaataattgggaaa

SEQ ID NO: 797838 - DNA, 15 bp, Homo sapiens
aaataattgggaaat

SEQ ID NO: 797839 - DNA, 15 bp, Homo sapiens
aataattgggaaatg

SEQ ID NO: 797840 - DNA, 15 bp, Homo sapiens
ataattgggaaatga

SEQ ID NO: 797841 - DNA, 15 bp, Homo sapiens
taattgggaaatgag

SEQ ID NO: 797842 - DNA, 15 bp, Homo sapiens
aattgggaaatgaga

SEQ ID NO: 797843 - DNA, 15 bp, Homo sapiens
attgggaaatgagac

SEQ ID NO: 797844 - DNA, 15 bp, Homo sapiens
ttgggaaatgagaca

SEQ ID NO: 797845 - DNA, 15 bp, Homo sapiens
tgggaaatgagacag

SEQ ID NO: 797846 - DNA, 15 bp, Homo sapiens
gggaaatgagacaga

SEQ ID NO: 797847 - DNA, 15 bp, Homo sapiens
ggaaatgagacagac

SEQ ID NO: 797848 - DNA, 15 bp, Homo sapiens
gaaatgagacagaca

SEQ ID NO: 797849 - DNA, 15 bp, Homo sapiens
aaatgagacagacaa

SEQ ID NO: 797850 - DNA, 15 bp, Homo sapiens
aatgagacagacaag

SEQ ID NO: 797851 - DNA, 15 bp, Homo sapiens
atgagacagacaagc

SEQ ID NO: 797852 - DNA, 15 bp, Homo sapiens
tgagacagacaagct

SEQ ID NO: 797853 - DNA, 15 bp, Homo sapiens
gagacagacaagctc

SEQ ID NO: 797854 - DNA, 15 bp, Homo sapiens
agacagacaagctca

SEQ ID NO: 797855 - DNA, 15 bp, Homo sapiens
gacagacaagctcat

SEQ ID NO: 797856 - DNA, 15 bp, Homo sapiens
acagacaagctcata

SEQ ID NO: 797857 - DNA, 15 bp, Homo sapiens
cagacaagctcatag

SEQ ID NO: 797858 - DNA, 15 bp, Homo sapiens
agacaagctcataga

SEQ ID NO: 797859 - DNA, 15 bp, Homo sapiens
gacaagctcatagaa

SEQ ID NO: 797860 - DNA, 15 bp, Homo sapiens
acaagctcatagaag

SEQ ID NO: 797861 - DNA, 15 bp, Homo sapiens
caagctcatagaagg

SEQ ID NO: 797862 - DNA, 15 bp, Homo sapiens
aagctcatagaagga

SEQ ID NO: 797863 - DNA, 15 bp, Homo sapiens
agctcatagaaggac

SEQ ID NO: 797864 - DNA, 15 bp, Homo sapiens
gctcatagaaggact

SEQ ID NO: 797865 - DNA, 15 bp, Homo sapiens
ctcatagaaggactt

SEQ ID NO: 797866 - DNA, 15 bp, Homo sapiens
tcatagaaggactta

SEQ ID NO: 797867 - DNA, 15 bp, Homo sapiens
catagaaggacttag

SEQ ID NO: 797868 - DNA, 15 bp, Homo sapiens
atagaaggacttaga

SEQ ID NO: 797869 - DNA, 15 bp, Homo sapiens
tagaaggacttagac

SEQ ID NO: 797870 - DNA, 15 bp, Homo sapiens
agaaggacttagacc

SEQ ID NO: 797871 - DNA, 15 bp, Homo sapiens
gaaggacttagaccc

SEQ ID NO: 797872 - DNA, 15 bp, Homo sapiens
aaggacttagaccca

SEQ ID NO: 797873 - DNA, 15 bp, Homo sapiens
aggacttagacccag

SEQ ID NO: 797874 - DNA, 15 bp, Homo sapiens
ggacttagacccaga

SEQ ID NO: 797875 - DNA, 15 bp, Homo sapiens
gacttagacccagaa

SEQ ID NO: 797876 - DNA, 15 bp, Homo sapiens
acttagacccagaaa

SEQ ID NO: 797877 - DNA, 15 bp, Homo sapiens
cttagacccagaaag

SEQ ID NO: 797878 - DNA, 15 bp, Homo sapiens
ttagacccagaaagg

SEQ ID NO: 797879 - DNA, 15 bp, Homo sapiens
tagacccagaaaggg

SEQ ID NO: 797880 - DNA, 15 bp, Homo sapiens
agacccagaaaggga

SEQ ID NO: 797881 - DNA, 15 bp, Homo sapiens
gacccagaaagggaa

SEQ ID NO: 797882 - DNA, 15 bp, Homo sapiens
acccagaaagggaaa

SEQ ID NO: 797883 - DNA, 15 bp, Homo sapiens
cccagaaagggaaag

SEQ ID NO: 797884 - DNA, 15 bp, Homo sapiens
ccagaaagggaaagt

SEQ ID NO: 797885 - DNA, 15 bp, Homo sapiens
cagaaagggaaagtg

SEQ ID NO: 797886 - DNA, 15 bp, Homo sapiens
agaaagggaaagtgg

SEQ ID NO: 797887 - DNA, 15 bp, Homo sapiens
gaaagggaaagtgga

SEQ ID NO: 797888 - DNA, 15 bp, Homo sapiens
aaagggaaagtggaa

SEQ ID NO: 797889 - DNA, 15 bp, Homo sapiens
aagggaaagtggaaa

SEQ ID NO: 797890 - DNA, 15 bp, Homo sapiens
agggaaagtggaaaa

SEQ ID NO: 797891 - DNA, 15 bp, Homo sapiens
gggaaagtggaaaat

SEQ ID NO: 797892 - DNA, 15 bp, Homo sapiens
ggaaagtggaaaatt

SEQ ID NO: 797893 - DNA, 15 bp, Homo sapiens
gaaagtggaaaatta

SEQ ID NO: 797894 - DNA, 15 bp, Homo sapiens
aaagtggaaaattat

SEQ ID NO: 797895 - DNA, 15 bp, Homo sapiens
aagtggaaaattatc

SEQ ID NO: 797896 - DNA, 15 bp, Homo sapiens
agtggaaaattatct

SEQ ID NO: 797897 - DNA, 15 bp, Homo sapiens
gtggaaaattatctt

SEQ ID NO: 797898 - DNA, 15 bp, Homo sapiens
tggaaaattatcttg

SEQ ID NO: 797899 - DNA, 15 bp, Homo sapiens
ggaaaattatcttga

SEQ ID NO: 797900 - DNA, 15 bp, Homo sapiens
gaaaattatcttgac

SEQ ID NO: 797901 - DNA, 15 bp, Homo sapiens
aaaattatcttgaca

SEQ ID NO: 797902 - DNA, 15 bp, Homo sapiens
aaattatcttgacag

SEQ ID NO: 797903 - DNA, 15 bp, Homo sapiens
aattatcttgacagc

SEQ ID NO: 797904 - DNA, 15 bp, Homo sapiens
attatcttgacagct

SEQ ID NO: 797905 - DNA, 15 bp, Homo sapiens
ttatcttgacagcta

SEQ ID NO: 797906 - DNA, 15 bp, Homo sapiens
tatcttgacagctaa

SEQ ID NO: 797907 - DNA, 15 bp, Homo sapiens
atcttgacagctaac

SEQ ID NO: 797908 - DNA, 15 bp, Homo sapiens
tcttgacagctaaca

SEQ ID NO: 797909 - DNA, 15 bp, Homo sapiens
cttgacagctaacac

SEQ ID NO: 797910 - DNA, 15 bp, Homo sapiens
ttgacagctaacacg

SEQ ID NO: 797911 - DNA, 15 bp, Homo sapiens
tgacagctaacacgt

SEQ ID NO: 797912 - DNA, 15 bp, Homo sapiens
gacagctaacacgta

SEQ ID NO: 797913 - DNA, 15 bp, Homo sapiens
acagctaacacgtat

SEQ ID NO: 797914 - DNA, 15 bp, Homo sapiens
cagctaacacgtatt

SEQ ID NO: 797915 - DNA, 15 bp, Homo sapiens
agctaacacgtattg

SEQ ID NO: 797916 - DNA, 15 bp, Homo sapiens
gctaacacgtattga

SEQ ID NO: 797917 - DNA, 15 bp, Homo sapiens
ctaacacgtattgag

SEQ ID NO: 797918 - DNA, 15 bp, Homo sapiens
taacacgtattgaga

SEQ ID NO: 797919 - DNA, 15 bp, Homo sapiens
aacacgtattgagaa

SEQ ID NO: 797920 - DNA, 15 bp, Homo sapiens
acacgtattgagaag

SEQ ID NO: 797921 - DNA, 15 bp, Homo sapiens
cacgtattgagaaga

SEQ ID NO: 797922 - DNA, 15 bp, Homo sapiens
acgtattgagaagac

SEQ ID NO: 797923 - DNA, 15 bp, Homo sapiens
cgtattgagaagaca

SEQ ID NO: 797924 - DNA, 15 bp, Homo sapiens
gtattgagaagacag

SEQ ID NO: 797925 - DNA, 15 bp, Homo sapiens
tattgagaagacagt

SEQ ID NO: 797926 - DNA, 15 bp, Homo sapiens
attgagaagacagta

SEQ ID NO: 797927 - DNA, 15 bp, Homo sapiens
ttgagaagacagtat

SEQ ID NO: 797928 - DNA, 15 bp, Homo sapiens
tgagaagacagtatg

SEQ ID NO: 797929 - DNA, 15 bp, Homo sapiens
gagaagacagtatgt

SEQ ID NO: 797930 - DNA, 15 bp, Homo sapiens
agaagacagtatgtg

SEQ ID NO: 797931 - DNA, 15 bp, Homo sapiens
gaagacagtatgtgc

SEQ ID NO: 797932 - DNA, 15 bp, Homo sapiens
aagacagtatgtgcc

SEQ ID NO: 797933 - DNA, 15 bp, Homo sapiens
agacagtatgtgcca

SEQ ID NO: 797934 - DNA, 15 bp, Homo sapiens
gacagtatgtgccag

SEQ ID NO: 797935 - DNA, 15 bp, Homo sapiens
acagtatgtgccagg

SEQ ID NO: 797936 - DNA, 15 bp, Homo sapiens
cagtatgtgccaggc

SEQ ID NO: 797937 - DNA, 15 bp, Homo sapiens
agtatgtgccaggca

SEQ ID NO: 797938 - DNA, 15 bp, Homo sapiens
gtatgtgccaggcac

SEQ ID NO: 797939 - DNA, 15 bp, Homo sapiens
tatgtgccaggcact

SEQ ID NO: 797940 - DNA, 15 bp, Homo sapiens
atgtgccaggcactg

SEQ ID NO: 797941 - DNA, 15 bp, Homo sapiens
tgtgccaggcactga

SEQ ID NO: 797942 - DNA, 15 bp, Homo sapiens
gtgccaggcactgag

SEQ ID NO: 797943 - DNA, 15 bp, Homo sapiens
tgccaggcactgaga

SEQ ID NO: 797944 - DNA, 15 bp, Homo sapiens
gccaggcactgagat

SEQ ID NO: 797945 - DNA, 15 bp, Homo sapiens
ccaggcactgagatt

SEQ ID NO: 797946 - DNA, 15 bp, Homo sapiens
caggcactgagatta

SEQ ID NO: 797947 - DNA, 15 bp, Homo sapiens
aggcactgagattag

SEQ ID NO: 797948 - DNA, 15 bp, Homo sapiens
ggcactgagattagt

SEQ ID NO: 797949 - DNA, 15 bp, Homo sapiens
gcactgagattagtg

SEQ ID NO: 797950 - DNA, 15 bp, Homo sapiens
cactgagattagtgt

SEQ ID NO: 797951 - DNA, 15 bp, Homo sapiens
actgagattagtgtg

SEQ ID NO: 797952 - DNA, 15 bp, Homo sapiens
ctgagattagtgtgt

SEQ ID NO: 797953 - DNA, 15 bp, Homo sapiens
tgagattagtgtgtg

SEQ ID NO: 797954 - DNA, 15 bp, Homo sapiens
gagattagtgtgtga

SEQ ID NO: 797955 - DNA, 15 bp, Homo sapiens
agattagtgtgtgat

SEQ ID NO: 797956 - DNA, 15 bp, Homo sapiens
gattagtgtgtgata

SEQ ID NO: 797957 - DNA, 15 bp, Homo sapiens
attagtgtgtgatat

SEQ ID NO: 797958 - DNA, 15 bp, Homo sapiens
ttagtgtgtgatata

SEQ ID NO: 797959 - DNA, 15 bp, Homo sapiens
tagtgtgtgatatat

SEQ ID NO: 797960 - DNA, 15 bp, Homo sapiens
agtgtgtgatatatc

SEQ ID NO: 797961 - DNA, 15 bp, Homo sapiens
gtgtgtgatatatct

SEQ ID NO: 797962 - DNA, 15 bp, Homo sapiens
tgtgtgatatatctc

SEQ ID NO: 797963 - DNA, 15 bp, Homo sapiens
gtgtgatatatctca

SEQ ID NO: 797964 - DNA, 15 bp, Homo sapiens
tgtgatatatctcat

SEQ ID NO: 797965 - DNA, 15 bp, Homo sapiens
gtgatatatctcatt

SEQ ID NO: 797966 - DNA, 15 bp, Homo sapiens
tgatatatctcattt

SEQ ID NO: 797967 - DNA, 15 bp, Homo sapiens
gatatatctcattta

SEQ ID NO: 797968 - DNA, 15 bp, Homo sapiens
atatatctcatttaa

SEQ ID NO: 797969 - DNA, 15 bp, Homo sapiens
tatatctcatttaat

SEQ ID NO: 797970 - DNA, 15 bp, Homo sapiens
atatctcatttaatc

SEQ ID NO: 797971 - DNA, 15 bp, Homo sapiens
tatctcatttaatct

SEQ ID NO: 797972 - DNA, 15 bp, Homo sapiens
atctcatttaatctt

SEQ ID NO: 797973 - DNA, 15 bp, Homo sapiens
tctcatttaatcttt

SEQ ID NO: 797974 - DNA, 15 bp, Homo sapiens
ctcatttaatctttg

SEQ ID NO: 797975 - DNA, 15 bp, Homo sapiens
tcatttaatctttgc

SEQ ID NO: 797976 - DNA, 15 bp, Homo sapiens
catttaatctttgca

SEQ ID NO: 797977 - DNA, 15 bp, Homo sapiens
atttaatctttgcaa

SEQ ID NO: 797978 - DNA, 15 bp, Homo sapiens
tttaatctttgcaac

SEQ ID NO: 797979 - DNA, 15 bp, Homo sapiens
ttaatctttgcaaca

SEQ ID NO: 797980 - DNA, 15 bp, Homo sapiens
taatctttgcaacaa

SEQ ID NO: 797981 - DNA, 15 bp, Homo sapiens
aatctttgcaacaat

SEQ ID NO: 797982 - DNA, 15 bp, Homo sapiens
atctttgcaacaatt

SEQ ID NO: 797983 - DNA, 15 bp, Homo sapiens
tctttgcaacaattc

SEQ ID NO: 797984 - DNA, 15 bp, Homo sapiens
ctttgcaacaattct

SEQ ID NO: 797985 - DNA, 15 bp, Homo sapiens
tttgcaacaattcta

SEQ ID NO: 797986 - DNA, 15 bp, Homo sapiens
ttgcaacaattctat

SEQ ID NO: 797987 - DNA, 15 bp, Homo sapiens
tgcaacaattctatg

SEQ ID NO: 797988 - DNA, 15 bp, Homo sapiens
gcaacaattctatga

SEQ ID NO: 797989 - DNA, 15 bp, Homo sapiens
caacaattctatgag

SEQ ID NO: 797990 - DNA, 15 bp, Homo sapiens
aacaattctatgaga

SEQ ID NO: 797991 - DNA, 15 bp, Homo sapiens
acaattctatgagat

SEQ ID NO: 797992 - DNA, 15 bp, Homo sapiens
caattctatgagata

SEQ ID NO: 797993 - DNA, 15 bp, Homo sapiens
aattctatgagataa

SEQ ID NO: 797994 - DNA, 15 bp, Homo sapiens
attctatgagataag

SEQ ID NO: 797995 - DNA, 15 bp, Homo sapiens
ttctatgagataagt

SEQ ID NO: 797996 - DNA, 15 bp, Homo sapiens
tctatgagataagtg

SEQ ID NO: 797997 - DNA, 15 bp, Homo sapiens
ctatgagataagtgc

SEQ ID NO: 797998 - DNA, 15 bp, Homo sapiens
tatgagataagtgct

SEQ ID NO: 797999 - DNA, 15 bp, Homo sapiens
atgagataagtgctg

SEQ ID NO: 798000 - DNA, 15 bp, Homo sapiens
tgagataagtgctgt

SEQ ID NO: 798001 - DNA, 15 bp, Homo sapiens
gagataagtgctgtt

SEQ ID NO: 798002 - DNA, 15 bp, Homo sapiens
agataagtgctgttg

SEQ ID NO: 798003 - DNA, 15 bp, Homo sapiens
gataagtgctgttgt

SEQ ID NO: 798004 - DNA, 15 bp, Homo sapiens
ataagtgctgttgtc

SEQ ID NO: 798005 - DNA, 15 bp, Homo sapiens
taagtgctgttgtca

SEQ ID NO: 798006 - DNA, 15 bp, Homo sapiens
aagtgctgttgtcaa

SEQ ID NO: 798007 - DNA, 15 bp, Homo sapiens
agtgctgttgtcaac

SEQ ID NO: 798008 - DNA, 15 bp, Homo sapiens
gtgctgttgtcaact

SEQ ID NO: 798009 - DNA, 15 bp, Homo sapiens
tgctgttgtcaactt

SEQ ID NO: 798010 - DNA, 15 bp, Homo sapiens
gctgttgtcaacttc

SEQ ID NO: 798011 - DNA, 15 bp, Homo sapiens
ctgttgtcaacttca

SEQ ID NO: 798012 - DNA, 15 bp, Homo sapiens
tgttgtcaacttcat

SEQ ID NO: 798013 - DNA, 15 bp, Homo sapiens
gttgtcaacttcatt

SEQ ID NO: 798014 - DNA, 15 bp, Homo sapiens
ttgtcaacttcattc

SEQ ID NO: 798015 - DNA, 15 bp, Homo sapiens
tgtcaacttcattct

SEQ ID NO: 798016 - DNA, 15 bp, Homo sapiens
gtcaacttcattcta

SEQ ID NO: 798017 - DNA, 15 bp, Homo sapiens
tcaacttcattctac

SEQ ID NO: 798018 - DNA, 15 bp, Homo sapiens
caacttcattctaca

SEQ ID NO: 798019 - DNA, 15 bp, Homo sapiens
aacttcattctacag

SEQ ID NO: 798020 - DNA, 15 bp, Homo sapiens
acttcattctacagt

SEQ ID NO: 798021 - DNA, 15 bp, Homo sapiens
cttcattctacagtg

SEQ ID NO: 798022 - DNA, 15 bp, Homo sapiens
ttcattctacagtga

SEQ ID NO: 798023 - DNA, 15 bp, Homo sapiens
tcattctacagtgaa

SEQ ID NO: 798024 - DNA, 15 bp, Homo sapiens
cattctacagtgaaa

SEQ ID NO: 798025 - DNA, 15 bp, Homo sapiens
attctacagtgaaaa

SEQ ID NO: 798026 - DNA, 15 bp, Homo sapiens
ttctacagtgaaaac

SEQ ID NO: 798027 - DNA, 15 bp, Homo sapiens
tctacagtgaaaaca

SEQ ID NO: 798028 - DNA, 15 bp, Homo sapiens
ctacagtgaaaacaa

SEQ ID NO: 798029 - DNA, 15 bp, Homo sapiens
tacagtgaaaacaac

SEQ ID NO: 798030 - DNA, 15 bp, Homo sapiens
acagtgaaaacaacg

SEQ ID NO: 798031 - DNA, 15 bp, Homo sapiens
cagtgaaaacaacgg

SEQ ID NO: 798032 - DNA, 15 bp, Homo sapiens
agtgaaaacaacgga

SEQ ID NO: 798033 - DNA, 15 bp, Homo sapiens
gtgaaaacaacggac

SEQ ID NO: 798034 - DNA, 15 bp, Homo sapiens
tgaaaacaacggaca

SEQ ID NO: 798035 - DNA, 15 bp, Homo sapiens
gaaaacaacggacat

SEQ ID NO: 798036 - DNA, 15 bp, Homo sapiens
aaaacaacggacata

SEQ ID NO: 798037 - DNA, 15 bp, Homo sapiens
aaacaacggacatac

SEQ ID NO: 798038 - DNA, 15 bp, Homo sapiens
aacaacggacataca

SEQ ID NO: 798039 - DNA, 15 bp, Homo sapiens
acaacggacatacag

SEQ ID NO: 798040 - DNA, 15 bp, Homo sapiens
caacggacatacaga

SEQ ID NO: 798041 - DNA, 15 bp, Homo sapiens
aacggacatacagaa

SEQ ID NO: 798042 - DNA, 15 bp, Homo sapiens
acggacatacagaac

SEQ ID NO: 798043 - DNA, 15 bp, Homo sapiens
cggacatacagaacg

SEQ ID NO: 798044 - DNA, 15 bp, Homo sapiens
ggacatacagaacgg

SEQ ID NO: 798045 - DNA, 15 bp, Homo sapiens
gacatacagaacggt

SEQ ID NO: 798046 - DNA, 15 bp, Homo sapiens
acatacagaacggtg

SEQ ID NO: 798047 - DNA, 15 bp, Homo sapiens
catacagaacggtga

SEQ ID NO: 798048 - DNA, 15 bp, Homo sapiens
atacagaacggtgag

SEQ ID NO: 798049 - DNA, 15 bp, Homo sapiens
tacagaacggtgagg

SEQ ID NO: 798050 - DNA, 15 bp, Homo sapiens
acagaacggtgaggt

SEQ ID NO: 798051 - DNA, 15 bp, Homo sapiens
cagaacggtgaggtg

SEQ ID NO: 798052 - DNA, 15 bp, Homo sapiens
agaacggtgaggtgt

SEQ ID NO: 798053 - DNA, 15 bp, Homo sapiens
gaacggtgaggtgtc

SEQ ID NO: 798054 - DNA, 15 bp, Homo sapiens
aacggtgaggtgtct

SEQ ID NO: 798055 - DNA, 15 bp, Homo sapiens
acggtgaggtgtcta

SEQ ID NO: 798056 - DNA, 15 bp, Homo sapiens
cggtgaggtgtctaa

SEQ ID NO: 798057 - DNA, 15 bp, Homo sapiens
ggtgaggtgtctaag

SEQ ID NO: 798058 - DNA, 15 bp, Homo sapiens
gtgaggtgtctaaga

SEQ ID NO: 798059 - DNA, 15 bp, Homo sapiens
tgaggtgtctaagat

SEQ ID NO: 798060 - DNA, 15 bp, Homo sapiens
gaggtgtctaagatc

SEQ ID NO: 798061 - DNA, 15 bp, Homo sapiens
aggtgtctaagatca

SEQ ID NO: 798062 - DNA, 15 bp, Homo sapiens
ggtgtctaagatcac

SEQ ID NO: 798063 - DNA, 15 bp, Homo sapiens
gtgtctaagatcaca

SEQ ID NO: 798064 - DNA, 15 bp, Homo sapiens
tgtctaagatcacac

SEQ ID NO: 798065 - DNA, 15 bp, Homo sapiens
gtctaagatcacaca

SEQ ID NO: 798066 - DNA, 15 bp, Homo sapiens
tctaagatcacacag

SEQ ID NO: 798067 - DNA, 15 bp, Homo sapiens
ctaagatcacacagc

SEQ ID NO: 798068 - DNA, 15 bp, Homo sapiens
taagatcacacagct

SEQ ID NO: 798069 - DNA, 15 bp, Homo sapiens
aagatcacacagctt

SEQ ID NO: 798070 - DNA, 15 bp, Homo sapiens
agatcacacagcttt

SEQ ID NO: 798071 - DNA, 15 bp, Homo sapiens
gatcacacagctttt

SEQ ID NO: 798072 - DNA, 15 bp, Homo sapiens
atcacacagcttttg

SEQ ID NO: 798073 - DNA, 15 bp, Homo sapiens
tcacacagcttttgt

SEQ ID NO: 798074 - DNA, 15 bp, Homo sapiens
cacacagcttttgtg

SEQ ID NO: 798075 - DNA, 15 bp, Homo sapiens
acacagcttttgtgg

SEQ ID NO: 798076 - DNA, 15 bp, Homo sapiens
cacagcttttgtgga

SEQ ID NO: 798077 - DNA, 15 bp, Homo sapiens
acagcttttgtggag

SEQ ID NO: 798078 - DNA, 15 bp, Homo sapiens
cagcttttgtggagg

SEQ ID NO: 798079 - DNA, 15 bp, Homo sapiens
agcttttgtggagga

SEQ ID NO: 798080 - DNA, 15 bp, Homo sapiens
gcttttgtggaggag

SEQ ID NO: 798081 - DNA, 15 bp, Homo sapiens
cttttgtggaggagt

SEQ ID NO: 798082 - DNA, 15 bp, Homo sapiens
ttttgtggaggagtt

SEQ ID NO: 798083 - DNA, 15 bp, Homo sapiens
tttgtggaggagtta

SEQ ID NO: 798084 - DNA, 15 bp, Homo sapiens
ttgtggaggagttag

SEQ ID NO: 798085 - DNA, 15 bp, Homo sapiens
tgtggaggagttagg

SEQ ID NO: 798086 - DNA, 15 bp, Homo sapiens
gtggaggagttagga

SEQ ID NO: 798087 - DNA, 15 bp, Homo sapiens
tggaggagttaggac

SEQ ID NO: 798088 - DNA, 15 bp, Homo sapiens
ggaggagttaggact

SEQ ID NO: 798089 - DNA, 15 bp, Homo sapiens
gaggagttaggacta

SEQ ID NO: 798090 - DNA, 15 bp, Homo sapiens
aggagttaggactag

SEQ ID NO: 798091 - DNA, 15 bp, Homo sapiens
ggagttaggactaga

SEQ ID NO: 798092 - DNA, 15 bp, Homo sapiens
gagttaggactagaa

SEQ ID NO: 798093 - DNA, 15 bp, Homo sapiens
agttaggactagaat

SEQ ID NO: 798094 - DNA, 15 bp, Homo sapiens
gttaggactagaatc

SEQ ID NO: 798095 - DNA, 15 bp, Homo sapiens
ttaggactagaatcc

SEQ ID NO: 798096 - DNA, 15 bp, Homo sapiens
taggactagaatcca

SEQ ID NO: 798097 - DNA, 15 bp, Homo sapiens
aggactagaatccag

SEQ ID NO: 798098 - DNA, 15 bp, Homo sapiens
ggactagaatccagg

SEQ ID NO: 798099 - DNA, 15 bp, Homo sapiens
gactagaatccaggt

SEQ ID NO: 798100 - DNA, 15 bp, Homo sapiens
actagaatccaggtc

SEQ ID NO: 798101 - DNA, 15 bp, Homo sapiens
ctagaatccaggtca

SEQ ID NO: 798102 - DNA, 15 bp, Homo sapiens
tagaatccaggtcaa

SEQ ID NO: 798103 - DNA, 15 bp, Homo sapiens
agaatccaggtcaat

SEQ ID NO: 798104 - DNA, 15 bp, Homo sapiens
gaatccaggtcaatt

SEQ ID NO: 798105 - DNA, 15 bp, Homo sapiens
aatccaggtcaattt

SEQ ID NO: 798106 - DNA, 15 bp, Homo sapiens
atccaggtcaatttg

SEQ ID NO: 798107 - DNA, 15 bp, Homo sapiens
tccaggtcaatttga

SEQ ID NO: 798108 - DNA, 15 bp, Homo sapiens
ccaggtcaatttgag

SEQ ID NO: 798109 - DNA, 15 bp, Homo sapiens
caggtcaatttgagt

SEQ ID NO: 798110 - DNA, 15 bp, Homo sapiens
aggtcaatttgagtg

SEQ ID NO: 798111 - DNA, 15 bp, Homo sapiens
ggtcaatttgagtgc

SEQ ID NO: 798112 - DNA, 15 bp, Homo sapiens
gtcaatttgagtgca

SEQ ID NO: 798113 - DNA, 15 bp, Homo sapiens
tcaatttgagtgcaa

SEQ ID NO: 798114 - DNA, 15 bp, Homo sapiens
caatttgagtgcaaa

SEQ ID NO: 798115 - DNA, 15 bp, Homo sapiens
aatttgagtgcaaag

SEQ ID NO: 798116 - DNA, 15 bp, Homo sapiens
atttgagtgcaaagc

SEQ ID NO: 798117 - DNA, 15 bp, Homo sapiens
tttgagtgcaaagcc

SEQ ID NO: 798118 - DNA, 15 bp, Homo sapiens
ttgagtgcaaagccc

SEQ ID NO: 798119 - DNA, 15 bp, Homo sapiens
tgagtgcaaagccca

SEQ ID NO: 798120 - DNA, 15 bp, Homo sapiens
gagtgcaaagcccat

SEQ ID NO: 798121 - DNA, 15 bp, Homo sapiens
agtgcaaagcccatg

SEQ ID NO: 798122 - DNA, 15 bp, Homo sapiens
gtgcaaagcccatgt

SEQ ID NO: 798123 - DNA, 15 bp, Homo sapiens
tgcaaagcccatgtg

SEQ ID NO: 798124 - DNA, 15 bp, Homo sapiens
gcaaagcccatgtgc

SEQ ID NO: 798125 - DNA, 15 bp, Homo sapiens
caaagcccatgtgct

SEQ ID NO: 798126 - DNA, 15 bp, Homo sapiens
aaagcccatgtgctt

SEQ ID NO: 798127 - DNA, 15 bp, Homo sapiens
aagcccatgtgctta

SEQ ID NO: 798128 - DNA, 15 bp, Homo sapiens
agcccatgtgcttaa

SEQ ID NO: 798129 - DNA, 15 bp, Homo sapiens
gcccatgtgcttaac

SEQ ID NO: 798130 - DNA, 15 bp, Homo sapiens
cccatgtgcttaacc

SEQ ID NO: 798131 - DNA, 15 bp, Homo sapiens
ccatgtgcttaaccc

SEQ ID NO: 798132 - DNA, 15 bp, Homo sapiens
catgtgcttaacccc

SEQ ID NO: 798133 - DNA, 15 bp, Homo sapiens
atgtgcttaaccccc

SEQ ID NO: 798134 - DNA, 15 bp, Homo sapiens
tgtgcttaaccccct

SEQ ID NO: 798135 - DNA, 15 bp, Homo sapiens
gtgcttaaccccctg

SEQ ID NO: 798136 - DNA, 15 bp, Homo sapiens
tgcttaaccccctgc

SEQ ID NO: 798137 - DNA, 15 bp, Homo sapiens
gcttaaccccctgca

SEQ ID NO: 798138 - DNA, 15 bp, Homo sapiens
cttaaccccctgcag

SEQ ID NO: 798139 - DNA, 15 bp, Homo sapiens
ttaaccccctgcaga

SEQ ID NO: 798140 - DNA, 15 bp, Homo sapiens
taaccccctgcagag

SEQ ID NO: 798141 - DNA, 15 bp, Homo sapiens
aaccccctgcagaga

SEQ ID NO: 798142 - DNA, 15 bp, Homo sapiens
accccctgcagagag

SEQ ID NO: 798143 - DNA, 15 bp, Homo sapiens
ccccctgcagagagg

SEQ ID NO: 798144 - DNA, 15 bp, Homo sapiens
cccctgcagagaggc

SEQ ID NO: 798145 - DNA, 15 bp, Homo sapiens
ccctgcagagaggcc

SEQ ID NO: 798146 - DNA, 15 bp, Homo sapiens
cctgcagagaggcca

SEQ ID NO: 798147 - DNA, 15 bp, Homo sapiens
ctgcagagaggccat

SEQ ID NO: 798148 - DNA, 15 bp, Homo sapiens
tgcagagaggccatg

SEQ ID NO: 798149 - DNA, 15 bp, Homo sapiens
gcagagaggccatga

SEQ ID NO: 798150 - DNA, 15 bp, Homo sapiens
cagagaggccatgac

SEQ ID NO: 798151 - DNA, 15 bp, Homo sapiens
agagaggccatgacc

SEQ ID NO: 798152 - DNA, 15 bp, Homo sapiens
gagaggccatgaccc

SEQ ID NO: 798153 - DNA, 15 bp, Homo sapiens
agaggccatgaccct

SEQ ID NO: 798154 - DNA, 15 bp, Homo sapiens
gaggccatgaccctg

SEQ ID NO: 798155 - DNA, 15 bp, Homo sapiens
aggccatgaccctgg

SEQ ID NO: 798156 - DNA, 15 bp, Homo sapiens
ggccatgaccctggg

SEQ ID NO: 798157 - DNA, 15 bp, Homo sapiens
gccatgaccctggga

SEQ ID NO: 798158 - DNA, 15 bp, Homo sapiens
ccatgaccctgggac

SEQ ID NO: 798159 - DNA, 15 bp, Homo sapiens
catgaccctgggacc

SEQ ID NO: 798160 - DNA, 15 bp, Homo sapiens
atgaccctgggacct

SEQ ID NO: 798161 - DNA, 15 bp, Homo sapiens
tgaccctgggaccta

SEQ ID NO: 798162 - DNA, 15 bp, Homo sapiens
gaccctgggacctaa

SEQ ID NO: 798163 - DNA, 15 bp, Homo sapiens
accctgggacctaaa

SEQ ID NO: 798164 - DNA, 15 bp, Homo sapiens
ccctgggacctaaag

SEQ ID NO: 798165 - DNA, 15 bp, Homo sapiens
cctgggacctaaagc

SEQ ID NO: 798166 - DNA, 15 bp, Homo sapiens
ctgggacctaaagca

SEQ ID NO: 798167 - DNA, 15 bp, Homo sapiens
tgggacctaaagcat

SEQ ID NO: 798168 - DNA, 15 bp, Homo sapiens
gggacctaaagcatg

SEQ ID NO: 798169 - DNA, 15 bp, Homo sapiens
ggacctaaagcatgg

SEQ ID NO: 798170 - DNA, 15 bp, Homo sapiens
gacctaaagcatggc

SEQ ID NO: 798171 - DNA, 15 bp, Homo sapiens
acctaaagcatggca

SEQ ID NO: 798172 - DNA, 15 bp, Homo sapiens
cctaaagcatggcag

SEQ ID NO: 798173 - DNA, 15 bp, Homo sapiens
ctaaagcatggcaga

SEQ ID NO: 798174 - DNA, 15 bp, Homo sapiens
taaagcatggcagag

SEQ ID NO: 798175 - DNA, 15 bp, Homo sapiens
aaagcatggcagagc

SEQ ID NO: 798176 - DNA, 15 bp, Homo sapiens
aagcatggcagagca

SEQ ID NO: 798177 - DNA, 15 bp, Homo sapiens
agcatggcagagcat

SEQ ID NO: 798178 - DNA, 15 bp, Homo sapiens
gcatggcagagcatc

SEQ ID NO: 798179 - DNA, 15 bp, Homo sapiens
catggcagagcatct

SEQ ID NO: 798180 - DNA, 15 bp, Homo sapiens
atggcagagcatctc

SEQ ID NO: 798181 - DNA, 15 bp, Homo sapiens
tggcagagcatctct

SEQ ID NO: 798182 - DNA, 15 bp, Homo sapiens
ggcagagcatctctg

SEQ ID NO: 798183 - DNA, 15 bp, Homo sapiens
gcagagcatctctga

SEQ ID NO: 798184 - DNA, 15 bp, Homo sapiens
cagagcatctctgag

SEQ ID NO: 798185 - DNA, 15 bp, Homo sapiens
agagcatctctgagt

SEQ ID NO: 798186 - DNA, 15 bp, Homo sapiens
gagcatctctgagtc

SEQ ID NO: 798187 - DNA, 15 bp, Homo sapiens
agcatctctgagtct

SEQ ID NO: 798188 - DNA, 15 bp, Homo sapiens
gcatctctgagtctc

SEQ ID NO: 798189 - DNA, 15 bp, Homo sapiens
catctctgagtctcc

SEQ ID NO: 798190 - DNA, 15 bp, Homo sapiens
atctctgagtctccc

SEQ ID NO: 798191 - DNA, 15 bp, Homo sapiens
tctctgagtctccct

SEQ ID NO: 798192 - DNA, 15 bp, Homo sapiens
ctctgagtctccctg

SEQ ID NO: 798193 - DNA, 15 bp, Homo sapiens
tctgagtctccctgc

SEQ ID NO: 798194 - DNA, 15 bp, Homo sapiens
ctgagtctccctgca

SEQ ID NO: 798195 - DNA, 15 bp, Homo sapiens
tgagtctccctgcac

SEQ ID NO: 798196 - DNA, 15 bp, Homo sapiens
gagtctccctgcact

SEQ ID NO: 798197 - DNA, 15 bp, Homo sapiens
agtctccctgcactc

SEQ ID NO: 798198 - DNA, 15 bp, Homo sapiens
gtctccctgcactct

SEQ ID NO: 798199 - DNA, 15 bp, Homo sapiens
tctccctgcactctg

SEQ ID NO: 798200 - DNA, 15 bp, Homo sapiens
ctccctgcactctgg

SEQ ID NO: 798201 - DNA, 15 bp, Homo sapiens
tccctgcactctgga

SEQ ID NO: 798202 - DNA, 15 bp, Homo sapiens
ccctgcactctggac

SEQ ID NO: 798203 - DNA, 15 bp, Homo sapiens
cctgcactctggaca

SEQ ID NO: 798204 - DNA, 15 bp, Homo sapiens
ctgcactctggacat

SEQ ID NO: 798205 - DNA, 15 bp, Homo sapiens
tgcactctggacatt

SEQ ID NO: 798206 - DNA, 15 bp, Homo sapiens
gcactctggacattg

SEQ ID NO: 798207 - DNA, 15 bp, Homo sapiens
cactctggacattga

SEQ ID NO: 798208 - DNA, 15 bp, Homo sapiens
actctggacattgag

SEQ ID NO: 798209 - DNA, 15 bp, Homo sapiens
ctctggacattgaga

SEQ ID NO: 798210 - DNA, 15 bp, Homo sapiens
tctggacattgagaa

SEQ ID NO: 798211 - DNA, 15 bp, Homo sapiens
ctggacattgagaag

SEQ ID NO: 798212 - DNA, 15 bp, Homo sapiens
tggacattgagaagc

SEQ ID NO: 798213 - DNA, 15 bp, Homo sapiens
ggacattgagaagca

SEQ ID NO: 798214 - DNA, 15 bp, Homo sapiens
gacattgagaagcac

SEQ ID NO: 798215 - DNA, 15 bp, Homo sapiens
acattgagaagcact

SEQ ID NO: 798216 - DNA, 15 bp, Homo sapiens
cattgagaagcacta

SEQ ID NO: 798217 - DNA, 15 bp, Homo sapiens
attgagaagcactag

SEQ ID NO: 798218 - DNA, 15 bp, Homo sapiens
ttgagaagcactagt

SEQ ID NO: 798219 - DNA, 15 bp, Homo sapiens
tgagaagcactagtc

SEQ ID NO: 798220 - DNA, 15 bp, Homo sapiens
gagaagcactagtca

SEQ ID NO: 798221 - DNA, 15 bp, Homo sapiens
agaagcactagtcat

SEQ ID NO: 798222 - DNA, 15 bp, Homo sapiens
gaagcactagtcatt

SEQ ID NO: 798223 - DNA, 15 bp, Homo sapiens
aagcactagtcattc

SEQ ID NO: 798224 - DNA, 15 bp, Homo sapiens
agcactagtcattct

SEQ ID NO: 798225 - DNA, 15 bp, Homo sapiens
gcactagtcattctg

SEQ ID NO: 798226 - DNA, 15 bp, Homo sapiens
cactagtcattctgt

SEQ ID NO: 798227 - DNA, 15 bp, Homo sapiens
actagtcattctgtt

SEQ ID NO: 798228 - DNA, 15 bp, Homo sapiens
ctagtcattctgttt

SEQ ID NO: 798229 - DNA, 15 bp, Homo sapiens
tagtcattctgtttt

SEQ ID NO: 798230 - DNA, 15 bp, Homo sapiens
agtcattctgttttg

SEQ ID NO: 798231 - DNA, 15 bp, Homo sapiens
gtcattctgttttgt

SEQ ID NO: 798232 - DNA, 15 bp, Homo sapiens
tcattctgttttgta

SEQ ID NO: 798233 - DNA, 15 bp, Homo sapiens
cattctgttttgtag

SEQ ID NO: 798234 - DNA, 15 bp, Homo sapiens
attctgttttgtagt

SEQ ID NO: 798235 - DNA, 15 bp, Homo sapiens
ttctgttttgtagta

SEQ ID NO: 798236 - DNA, 15 bp, Homo sapiens
tctgttttgtagtac

SEQ ID NO: 798237 - DNA, 15 bp, Homo sapiens
ctgttttgtagtaca

SEQ ID NO: 798238 - DNA, 15 bp, Homo sapiens
tgttttgtagtacag

SEQ ID NO: 798239 - DNA, 15 bp, Homo sapiens
gttttgtagtacaga

SEQ ID NO: 798240 - DNA, 15 bp, Homo sapiens
ttttgtagtacagat

SEQ ID NO: 798241 - DNA, 15 bp, Homo sapiens
tttgtagtacagatg

SEQ ID NO: 798242 - DNA, 15 bp, Homo sapiens
ttgtagtacagatgt

SEQ ID NO: 798243 - DNA, 15 bp, Homo sapiens
tgtagtacagatgtg

SEQ ID NO: 798244 - DNA, 15 bp, Homo sapiens
gtagtacagatgtgt

SEQ ID NO: 798245 - DNA, 15 bp, Homo sapiens
tagtacagatgtgtt

SEQ ID NO: 798246 - DNA, 15 bp, Homo sapiens
agtacagatgtgttt

SEQ ID NO: 798247 - DNA, 15 bp, Homo sapiens
gtacagatgtgttta

SEQ ID NO: 798248 - DNA, 15 bp, Homo sapiens
tacagatgtgtttat

SEQ ID NO: 798249 - DNA, 15 bp, Homo sapiens
acagatgtgtttata

SEQ ID NO: 798250 - DNA, 15 bp, Homo sapiens
cagatgtgtttataa

SEQ ID NO: 798251 - DNA, 15 bp, Homo sapiens
agatgtgtttataaa

SEQ ID NO: 798252 - DNA, 15 bp, Homo sapiens
gatgtgtttataaag

SEQ ID NO: 798253 - DNA, 15 bp, Homo sapiens
atgtgtttataaaga

SEQ ID NO: 798254 - DNA, 15 bp, Homo sapiens
tgtgtttataaagag

SEQ ID NO: 798255 - DNA, 15 bp, Homo sapiens
gtgtttataaagaga

SEQ ID NO: 798256 - DNA, 15 bp, Homo sapiens
tgtttataaagagac

SEQ ID NO: 798257 - DNA, 15 bp, Homo sapiens
gtttataaagagact

SEQ ID NO: 798258 - DNA, 15 bp, Homo sapiens
tttataaagagactc

SEQ ID NO: 798259 - DNA, 15 bp, Homo sapiens
ttataaagagactcc

SEQ ID NO: 798260 - DNA, 15 bp, Homo sapiens
tataaagagactcca

SEQ ID NO: 798261 - DNA, 15 bp, Homo sapiens
ataaagagactccag

SEQ ID NO: 798262 - DNA, 15 bp, Homo sapiens
taaagagactccagg

SEQ ID NO: 798263 - DNA, 15 bp, Homo sapiens
aaagagactccaggg

SEQ ID NO: 798264 - DNA, 15 bp, Homo sapiens
aagagactccaggga

SEQ ID NO: 798265 - DNA, 15 bp, Homo sapiens
agagactccagggaa

SEQ ID NO: 798266 - DNA, 15 bp, Homo sapiens
gagactccagggaag

SEQ ID NO: 798267 - DNA, 15 bp, Homo sapiens
agactccagggaagt

SEQ ID NO: 798268 - DNA, 15 bp, Homo sapiens
gactccagggaagtc

SEQ ID NO: 798269 - DNA, 15 bp, Homo sapiens
actccagggaagtca

SEQ ID NO: 798270 - DNA, 15 bp, Homo sapiens
ctccagggaagtcag

SEQ ID NO: 798271 - DNA, 15 bp, Homo sapiens
tccagggaagtcaga

SEQ ID NO: 798272 - DNA, 15 bp, Homo sapiens
ccagggaagtcagat

SEQ ID NO: 798273 - DNA, 15 bp, Homo sapiens
cagggaagtcagatg

SEQ ID NO: 798274 - DNA, 15 bp, Homo sapiens
agggaagtcagatgg

SEQ ID NO: 798275 - DNA, 15 bp, Homo sapiens
gggaagtcagatggg

SEQ ID NO: 798276 - DNA, 15 bp, Homo sapiens
ggaagtcagatgggt

SEQ ID NO: 798277 - DNA, 15 bp, Homo sapiens
gaagtcagatgggta

SEQ ID NO: 798278 - DNA, 15 bp, Homo sapiens
aagtcagatgggtaa

SEQ ID NO: 798279 - DNA, 15 bp, Homo sapiens
agtcagatgggtaag

SEQ ID NO: 798280 - DNA, 15 bp, Homo sapiens
gtcagatgggtaagg

SEQ ID NO: 798281 - DNA, 15 bp, Homo sapiens
tcagatgggtaagga

SEQ ID NO: 798282 - DNA, 15 bp, Homo sapiens
cagatgggtaaggat

SEQ ID NO: 798283 - DNA, 15 bp, Homo sapiens
agatgggtaaggatt

SEQ ID NO: 798284 - DNA, 15 bp, Homo sapiens
gatgggtaaggatta

SEQ ID NO: 798285 - DNA, 15 bp, Homo sapiens
atgggtaaggattat

SEQ ID NO: 798286 - DNA, 15 bp, Homo sapiens
tgggtaaggattatg

SEQ ID NO: 798287 - DNA, 15 bp, Homo sapiens
gggtaaggattatgc

SEQ ID NO: 798288 - DNA, 15 bp, Homo sapiens
ggtaaggattatgcc

SEQ ID NO: 798289 - DNA, 15 bp, Homo sapiens
gtaaggattatgcct

SEQ ID NO: 798290 - DNA, 15 bp, Homo sapiens
taaggattatgcctg

SEQ ID NO: 798291 - DNA, 15 bp, Homo sapiens
aaggattatgcctgt

SEQ ID NO: 798292 - DNA, 15 bp, Homo sapiens
aggattatgcctgtc

SEQ ID NO: 798293 - DNA, 15 bp, Homo sapiens
ggattatgcctgtca

SEQ ID NO: 798294 - DNA, 15 bp, Homo sapiens
gattatgcctgtcac

SEQ ID NO: 798295 - DNA, 15 bp, Homo sapiens
attatgcctgtcact

SEQ ID NO: 798296 - DNA, 15 bp, Homo sapiens
ttatgcctgtcactc

SEQ ID NO: 798297 - DNA, 15 bp, Homo sapiens
tatgcctgtcactct

SEQ ID NO: 798298 - DNA, 15 bp, Homo sapiens
atgcctgtcactctt

SEQ ID NO: 798299 - DNA, 15 bp, Homo sapiens
tgcctgtcactcttt

SEQ ID NO: 798300 - DNA, 15 bp, Homo sapiens
gcctgtcactctttt

SEQ ID NO: 798301 - DNA, 15 bp, Homo sapiens
cctgtcactcttttt

SEQ ID NO: 798302 - DNA, 15 bp, Homo sapiens
ctgtcactctttttt

SEQ ID NO: 798303 - DNA, 15 bp, Homo sapiens
tgtcactcttttttt

SEQ ID NO: 798304 - DNA, 15 bp, Homo sapiens
gtcactctttttttt

SEQ ID NO: 798305 - DNA, 15 bp, Homo sapiens
tcactcttttttttt

SEQ ID NO: 798306 - DNA, 15 bp, Homo sapiens
cactctttttttttt

SEQ ID NO: 798307 - DNA, 15 bp, Homo sapiens
ttttttttttttggc

SEQ ID NO: 798308 - DNA, 15 bp, Homo sapiens
tttttttttttggca

SEQ ID NO: 798309 - DNA, 15 bp, Homo sapiens
ttttttttttggcat

SEQ ID NO: 798310 - DNA, 15 bp, Homo sapiens
tttttttttggcatt

SEQ ID NO: 798311 - DNA, 15 bp, Homo sapiens
ttttttttggcattt

SEQ ID NO: 798312 - DNA, 15 bp, Homo sapiens
tttttttggcatttt

SEQ ID NO: 798313 - DNA, 15 bp, Homo sapiens
ttttttggcattttt

SEQ ID NO: 798314 - DNA, 15 bp, Homo sapiens
tttttggcatttttt

SEQ ID NO: 798315 - DNA, 15 bp, Homo sapiens
ttttggcatttttta

SEQ ID NO: 798316 - DNA, 15 bp, Homo sapiens
tttggcattttttaa

SEQ ID NO: 798317 - DNA, 15 bp, Homo sapiens
ttggcattttttaaa

SEQ ID NO: 798318 - DNA, 15 bp, Homo sapiens
tggcattttttaaat

SEQ ID NO: 798319 - DNA, 15 bp, Homo sapiens
ggcattttttaaatt

SEQ ID NO: 798320 - DNA, 15 bp, Homo sapiens
gcattttttaaatta

SEQ ID NO: 798321 - DNA, 15 bp, Homo sapiens
cattttttaaattat

SEQ ID NO: 798322 - DNA, 15 bp, Homo sapiens
attttttaaattata

SEQ ID NO: 798323 - DNA, 15 bp, Homo sapiens
ttttttaaattatac

SEQ ID NO: 798324 - DNA, 15 bp, Homo sapiens
tttttaaattatact

SEQ ID NO: 798325 - DNA, 15 bp, Homo sapiens
ttttaaattatactt

SEQ ID NO: 798326 - DNA, 15 bp, Homo sapiens
tttaaattatacttt

SEQ ID NO: 798327 - DNA, 15 bp, Homo sapiens
ttaaattatacttta

SEQ ID NO: 798328 - DNA, 15 bp, Homo sapiens
taaattatactttaa

SEQ ID NO: 798329 - DNA, 15 bp, Homo sapiens
aaattatactttaag

SEQ ID NO: 798330 - DNA, 15 bp, Homo sapiens
aattatactttaagt

SEQ ID NO: 798331 - DNA, 15 bp, Homo sapiens
ttatactttaagttc

SEQ ID NO: 798332 - DNA, 15 bp, Homo sapiens
tatactttaagttct

SEQ ID NO: 798333 - DNA, 15 bp, Homo sapiens
atactttaagttcta

SEQ ID NO: 798334 - DNA, 15 bp, Homo sapiens
tactttaagttctag

SEQ ID NO: 798335 - DNA, 15 bp, Homo sapiens
actttaagttctagg

SEQ ID NO: 798336 - DNA, 15 bp, Homo sapiens
ctttaagttctaggg

SEQ ID NO: 798337 - DNA, 15 bp, Homo sapiens
tttaagttctagggt

SEQ ID NO: 798338 - DNA, 15 bp, Homo sapiens
ttaagttctagggta

SEQ ID NO: 798339 - DNA, 15 bp, Homo sapiens
taagttctagggtac

SEQ ID NO: 798340 - DNA, 15 bp, Homo sapiens
aagttctagggtaca

SEQ ID NO: 798341 - DNA, 15 bp, Homo sapiens
agttctagggtacat

SEQ ID NO: 798342 - DNA, 15 bp, Homo sapiens
gttctagggtacatg

SEQ ID NO: 798343 - DNA, 15 bp, Homo sapiens
ttctagggtacatgt

SEQ ID NO: 798344 - DNA, 15 bp, Homo sapiens
tctagggtacatgtg

SEQ ID NO: 798345 - DNA, 15 bp, Homo sapiens
ctagggtacatgtgc

SEQ ID NO: 798346 - DNA, 15 bp, Homo sapiens
gtacatgtgcacaac

SEQ ID NO: 798347 - DNA, 15 bp, Homo sapiens
tacatgtgcacaaca

SEQ ID NO: 798348 - DNA, 15 bp, Homo sapiens
acatgtgcacaacat

SEQ ID NO: 798349 - DNA, 15 bp, Homo sapiens
catgtgcacaacatg

SEQ ID NO: 798350 - DNA, 15 bp, Homo sapiens
atgtgcacaacatgc

SEQ ID NO: 798351 - DNA, 15 bp, Homo sapiens
tgtgcacaacatgca

SEQ ID NO: 798352 - DNA, 15 bp, Homo sapiens
gtgcacaacatgcag

SEQ ID NO: 798353 - DNA, 15 bp, Homo sapiens
tgcacaacatgcagg

SEQ ID NO: 798354 - DNA, 15 bp, Homo sapiens
gcacaacatgcaggt

SEQ ID NO: 798355 - DNA, 15 bp, Homo sapiens
cacaacatgcaggtt

SEQ ID NO: 798356 - DNA, 15 bp, Homo sapiens
acaacatgcaggttt

SEQ ID NO: 798357 - DNA, 15 bp, Homo sapiens
caacatgcaggtttg

SEQ ID NO: 798358 - DNA, 15 bp, Homo sapiens
aggtttgttacatat

SEQ ID NO: 798359 - DNA, 15 bp, Homo sapiens
ggtttgttacatatg

SEQ ID NO: 798360 - DNA, 15 bp, Homo sapiens
gtttgttacatatgt

SEQ ID NO: 798361 - DNA, 15 bp, Homo sapiens
tttgttacatatgta

SEQ ID NO: 798362 - DNA, 15 bp, Homo sapiens
ttgttacatatgtat

SEQ ID NO: 798363 - DNA, 15 bp, Homo sapiens
tgttacatatgtata

SEQ ID NO: 798364 - DNA, 15 bp, Homo sapiens
tgtatacatgtgccg

SEQ ID NO: 798365 - DNA, 15 bp, Homo sapiens
gtatacatgtgccgt

SEQ ID NO: 798366 - DNA, 15 bp, Homo sapiens
tatacatgtgccgtg

SEQ ID NO: 798367 - DNA, 15 bp, Homo sapiens
atacatgtgccgtgt

SEQ ID NO: 798368 - DNA, 15 bp, Homo sapiens
tacatgtgccgtgtt

SEQ ID NO: 798369 - DNA, 15 bp, Homo sapiens
acatgtgccgtgttg

SEQ ID NO: 798370 - DNA, 15 bp, Homo sapiens
catgtgccgtgttgg

SEQ ID NO: 798371 - DNA, 15 bp, Homo sapiens
atgtgccgtgttggt

SEQ ID NO: 798372 - DNA, 15 bp, Homo sapiens
tgtgccgtgttggtg

SEQ ID NO: 798373 - DNA, 15 bp, Homo sapiens
gtgccgtgttggtgt

SEQ ID NO: 798374 - DNA, 15 bp, Homo sapiens
tgccgtgttggtgtg

SEQ ID NO: 798375 - DNA, 15 bp, Homo sapiens
gccgtgttggtgtgc

SEQ ID NO: 798376 - DNA, 15 bp, Homo sapiens
ccgtgttggtgtgct

SEQ ID NO: 798377 - DNA, 15 bp, Homo sapiens
cgtgttggtgtgctg

SEQ ID NO: 798378 - DNA, 15 bp, Homo sapiens
gtgttggtgtgctgc

SEQ ID NO: 798379 - DNA, 15 bp, Homo sapiens
tgttggtgtgctgca

SEQ ID NO: 798380 - DNA, 15 bp, Homo sapiens
gttggtgtgctgcac

SEQ ID NO: 798381 - DNA, 15 bp, Homo sapiens
ttggtgtgctgcacc

SEQ ID NO: 798382 - DNA, 15 bp, Homo sapiens
tggtgtgctgcaccc

SEQ ID NO: 798383 - DNA, 15 bp, Homo sapiens
ggtgtgctgcaccca

SEQ ID NO: 798384 - DNA, 15 bp, Homo sapiens
gtgtgctgcacccat

SEQ ID NO: 798385 - DNA, 15 bp, Homo sapiens
tgtgctgcacccatt

SEQ ID NO: 798386 - DNA, 15 bp, Homo sapiens
gtgctgcacccatta

SEQ ID NO: 798387 - DNA, 15 bp, Homo sapiens
tgctgcacccattaa

SEQ ID NO: 798388 - DNA, 15 bp, Homo sapiens
gctgcacccattaac

SEQ ID NO: 798389 - DNA, 15 bp, Homo sapiens
ctgcacccattaact

SEQ ID NO: 798390 - DNA, 15 bp, Homo sapiens
tgcacccattaactc

SEQ ID NO: 798391 - DNA, 15 bp, Homo sapiens
gcacccattaactca

SEQ ID NO: 798392 - DNA, 15 bp, Homo sapiens
cacccattaactcat

SEQ ID NO: 798393 - DNA, 15 bp, Homo sapiens
acccattaactcatc

SEQ ID NO: 798394 - DNA, 15 bp, Homo sapiens
cccattaactcatca

SEQ ID NO: 798395 - DNA, 15 bp, Homo sapiens
ccattaactcatcat

SEQ ID NO: 798396 - DNA, 15 bp, Homo sapiens
cattaactcatcatt

SEQ ID NO: 798397 - DNA, 15 bp, Homo sapiens
attaactcatcattt

SEQ ID NO: 798398 - DNA, 15 bp, Homo sapiens
ttaactcatcattta

SEQ ID NO: 798399 - DNA, 15 bp, Homo sapiens
taactcatcatttac

SEQ ID NO: 798400 - DNA, 15 bp, Homo sapiens
aactcatcatttaca

SEQ ID NO: 798401 - DNA, 15 bp, Homo sapiens
actcatcatttacat

SEQ ID NO: 798402 - DNA, 15 bp, Homo sapiens
ctcatcatttacatt

SEQ ID NO: 798403 - DNA, 15 bp, Homo sapiens
tcatcatttacatta

SEQ ID NO: 798404 - DNA, 15 bp, Homo sapiens
catcatttacattag

SEQ ID NO: 798405 - DNA, 15 bp, Homo sapiens
atcatttacattagg

SEQ ID NO: 798406 - DNA, 15 bp, Homo sapiens
tcatttacattaggt

SEQ ID NO: 798407 - DNA, 15 bp, Homo sapiens
catttacattaggta

SEQ ID NO: 798408 - DNA, 15 bp, Homo sapiens
atttacattaggtat

SEQ ID NO: 798409 - DNA, 15 bp, Homo sapiens
tttacattaggtata

SEQ ID NO: 798410 - DNA, 15 bp, Homo sapiens
ttacattaggtatat

SEQ ID NO: 798411 - DNA, 15 bp, Homo sapiens
tacattaggtatatc

SEQ ID NO: 798412 - DNA, 15 bp, Homo sapiens
acattaggtatatct

SEQ ID NO: 798413 - DNA, 15 bp, Homo sapiens
ttaggtatatctcct

SEQ ID NO: 798414 - DNA, 15 bp, Homo sapiens
taggtatatctccta

SEQ ID NO: 798415 - DNA, 15 bp, Homo sapiens
aggtatatctcctaa

SEQ ID NO: 798416 - DNA, 15 bp, Homo sapiens
ggtatatctcctaat

SEQ ID NO: 798417 - DNA, 15 bp, Homo sapiens
gtatatctcctaatg

SEQ ID NO: 798418 - DNA, 15 bp, Homo sapiens
tatatctcctaatgc

SEQ ID NO: 798419 - DNA, 15 bp, Homo sapiens
atatctcctaatgct

SEQ ID NO: 798420 - DNA, 15 bp, Homo sapiens
tatctcctaatgcta

SEQ ID NO: 798421 - DNA, 15 bp, Homo sapiens
atctcctaatgctat

SEQ ID NO: 798422 - DNA, 15 bp, Homo sapiens
tctcctaatgctatc

SEQ ID NO: 798423 - DNA, 15 bp, Homo sapiens
ctcctaatgctatcc

SEQ ID NO: 798424 - DNA, 15 bp, Homo sapiens
tcctaatgctatccc

SEQ ID NO: 798425 - DNA, 15 bp, Homo sapiens
cctaatgctatccct

SEQ ID NO: 798426 - DNA, 15 bp, Homo sapiens
ctaatgctatccctg

SEQ ID NO: 798427 - DNA, 15 bp, Homo sapiens
taatgctatccctgc

SEQ ID NO: 798428 - DNA, 15 bp, Homo sapiens
aatgctatccctgcc

SEQ ID NO: 798429 - DNA, 15 bp, Homo sapiens
atgctatccctgccc

SEQ ID NO: 798430 - DNA, 15 bp, Homo sapiens
tgctatccctgcccc

SEQ ID NO: 798431 - DNA, 15 bp, Homo sapiens
gctatccctgccccc

SEQ ID NO: 798432 - DNA, 15 bp, Homo sapiens
ctatccctgccccct

SEQ ID NO: 798433 - DNA, 15 bp, Homo sapiens
tatccctgccccctc

SEQ ID NO: 798434 - DNA, 15 bp, Homo sapiens
atccctgccccctcc

SEQ ID NO: 798435 - DNA, 15 bp, Homo sapiens
tccctgccccctccc

SEQ ID NO: 798436 - DNA, 15 bp, Homo sapiens
ccctgccccctcccc

SEQ ID NO: 798437 - DNA, 15 bp, Homo sapiens
cctgccccctccccc

SEQ ID NO: 798438 - DNA, 15 bp, Homo sapiens
ctgccccctcccccc

SEQ ID NO: 798439 - DNA, 15 bp, Homo sapiens
tgccccctccccccg

SEQ ID NO: 798440 - DNA, 15 bp, Homo sapiens
gccccctccccccga

SEQ ID NO: 798441 - DNA, 15 bp, Homo sapiens
ccccctccccccgac

SEQ ID NO: 798442 - DNA, 15 bp, Homo sapiens
cccctccccccgacc

SEQ ID NO: 798443 - DNA, 15 bp, Homo sapiens
ccctccccccgaccc

SEQ ID NO: 798444 - DNA, 15 bp, Homo sapiens
cctccccccgacccc

SEQ ID NO: 798445 - DNA, 15 bp, Homo sapiens
ctccccccgacccca

SEQ ID NO: 798446 - DNA, 15 bp, Homo sapiens
tccccccgaccccac

SEQ ID NO: 798447 - DNA, 15 bp, Homo sapiens
ccccccgaccccacg

SEQ ID NO: 798448 - DNA, 15 bp, Homo sapiens
cccccgaccccacga

SEQ ID NO: 798449 - DNA, 15 bp, Homo sapiens
ccccgaccccacgac

SEQ ID NO: 798450 - DNA, 15 bp, Homo sapiens
cccgaccccacgaca

SEQ ID NO: 798451 - DNA, 15 bp, Homo sapiens
ccgaccccacgacag

SEQ ID NO: 798452 - DNA, 15 bp, Homo sapiens
cgaccccacgacagg

SEQ ID NO: 798453 - DNA, 15 bp, Homo sapiens
gaccccacgacaggc

SEQ ID NO: 798454 - DNA, 15 bp, Homo sapiens
accccacgacaggcc

SEQ ID NO: 798455 - DNA, 15 bp, Homo sapiens
ccccacgacaggccc

SEQ ID NO: 798456 - DNA, 15 bp, Homo sapiens
cccacgacaggcccc

SEQ ID NO: 798457 - DNA, 15 bp, Homo sapiens
ccacgacaggcccca

SEQ ID NO: 798458 - DNA, 15 bp, Homo sapiens
cacgacaggccccag

SEQ ID NO: 798459 - DNA, 15 bp, Homo sapiens
acgacaggccccagt

SEQ ID NO: 798460 - DNA, 15 bp, Homo sapiens
cgacaggccccagtg

SEQ ID NO: 798461 - DNA, 15 bp, Homo sapiens
gacaggccccagtgt

SEQ ID NO: 798462 - DNA, 15 bp, Homo sapiens
acaggccccagtgtg

SEQ ID NO: 798463 - DNA, 15 bp, Homo sapiens
caggccccagtgtgt

SEQ ID NO: 798464 - DNA, 15 bp, Homo sapiens
aggccccagtgtgtg

SEQ ID NO: 798465 - DNA, 15 bp, Homo sapiens
ggccccagtgtgtga

SEQ ID NO: 798466 - DNA, 15 bp, Homo sapiens
gccccagtgtgtgat

SEQ ID NO: 798467 - DNA, 15 bp, Homo sapiens
ccccagtgtgtgatg

SEQ ID NO: 798468 - DNA, 15 bp, Homo sapiens
cccagtgtgtgatgt

SEQ ID NO: 798469 - DNA, 15 bp, Homo sapiens
ccagtgtgtgatgtt

SEQ ID NO: 798470 - DNA, 15 bp, Homo sapiens
cagtgtgtgatgttc

SEQ ID NO: 798471 - DNA, 15 bp, Homo sapiens
agtgtgtgatgttcc

SEQ ID NO: 798472 - DNA, 15 bp, Homo sapiens
gtgtgtgatgttccc

SEQ ID NO: 798473 - DNA, 15 bp, Homo sapiens
tgtgtgatgttccct

SEQ ID NO: 798474 - DNA, 15 bp, Homo sapiens
gtgtgatgttccctt

SEQ ID NO: 798475 - DNA, 15 bp, Homo sapiens
tgtgatgttcccttt

SEQ ID NO: 798476 - DNA, 15 bp, Homo sapiens
gtgatgttccctttc

SEQ ID NO: 798477 - DNA, 15 bp, Homo sapiens
tgatgttccctttcc

SEQ ID NO: 798478 - DNA, 15 bp, Homo sapiens
gatgttccctttcct

SEQ ID NO: 798479 - DNA, 15 bp, Homo sapiens
atgttccctttcctg

SEQ ID NO: 798480 - DNA, 15 bp, Homo sapiens
tgttccctttcctgt

SEQ ID NO: 798481 - DNA, 15 bp, Homo sapiens
gttccctttcctgtg

SEQ ID NO: 798482 - DNA, 15 bp, Homo sapiens
ttccctttcctgtgt

SEQ ID NO: 798483 - DNA, 15 bp, Homo sapiens
tccctttcctgtgtc

SEQ ID NO: 798484 - DNA, 15 bp, Homo sapiens
ccctttcctgtgtcc

SEQ ID NO: 798485 - DNA, 15 bp, Homo sapiens
cctttcctgtgtcca

SEQ ID NO: 798486 - DNA, 15 bp, Homo sapiens
ctttcctgtgtccaa

SEQ ID NO: 798487 - DNA, 15 bp, Homo sapiens
tttcctgtgtccaag

SEQ ID NO: 798488 - DNA, 15 bp, Homo sapiens
ttcctgtgtccaagt

SEQ ID NO: 798489 - DNA, 15 bp, Homo sapiens
tcctgtgtccaagtg

SEQ ID NO: 798490 - DNA, 15 bp, Homo sapiens
cctgtgtccaagtgt

SEQ ID NO: 798491 - DNA, 15 bp, Homo sapiens
ctgtgtccaagtgtt

SEQ ID NO: 798492 - DNA, 15 bp, Homo sapiens
tgtgtccaagtgttc

SEQ ID NO: 798493 - DNA, 15 bp, Homo sapiens
gtgtccaagtgttct

SEQ ID NO: 798494 - DNA, 15 bp, Homo sapiens
tgtccaagtgttctc

SEQ ID NO: 798495 - DNA, 15 bp, Homo sapiens
gtccaagtgttctca

SEQ ID NO: 798496 - DNA, 15 bp, Homo sapiens
tccaagtgttctcat

SEQ ID NO: 798497 - DNA, 15 bp, Homo sapiens
ccaagtgttctcatt

SEQ ID NO: 798498 - DNA, 15 bp, Homo sapiens
caagtgttctcattg

SEQ ID NO: 798499 - DNA, 15 bp, Homo sapiens
aagtgttctcattgt

SEQ ID NO: 798500 - DNA, 15 bp, Homo sapiens
agtgttctcattgtt

SEQ ID NO: 798501 - DNA, 15 bp, Homo sapiens
ttcaattcccaccta

SEQ ID NO: 798502 - DNA, 15 bp, Homo sapiens
tcaattcccacctat

SEQ ID NO: 798503 - DNA, 15 bp, Homo sapiens
caattcccacctatg

SEQ ID NO: 798504 - DNA, 15 bp, Homo sapiens
aattcccacctatga

SEQ ID NO: 798505 - DNA, 15 bp, Homo sapiens
attcccacctatgag

SEQ ID NO: 798506 - DNA, 15 bp, Homo sapiens
ttcccacctatgagt

SEQ ID NO: 798507 - DNA, 15 bp, Homo sapiens
tcccacctatgagtg

SEQ ID NO: 798508 - DNA, 15 bp, Homo sapiens
cccacctatgagtga

SEQ ID NO: 798509 - DNA, 15 bp, Homo sapiens
ccacctatgagtgag

SEQ ID NO: 798510 - DNA, 15 bp, Homo sapiens
cacctatgagtgaga

SEQ ID NO: 798511 - DNA, 15 bp, Homo sapiens
acctatgagtgagaa

SEQ ID NO: 798512 - DNA, 15 bp, Homo sapiens
cctatgagtgagaac

SEQ ID NO: 798513 - DNA, 15 bp, Homo sapiens
ctatgagtgagaaca

SEQ ID NO: 798514 - DNA, 15 bp, Homo sapiens
tatgagtgagaacat

SEQ ID NO: 798515 - DNA, 15 bp, Homo sapiens
atgagtgagaacatg

SEQ ID NO: 798516 - DNA, 15 bp, Homo sapiens
tgagtgagaacatgc

SEQ ID NO: 798517 - DNA, 15 bp, Homo sapiens
gagtgagaacatgca

SEQ ID NO: 798518 - DNA, 15 bp, Homo sapiens
agtgagaacatgcag

SEQ ID NO: 798519 - DNA, 15 bp, Homo sapiens
gtgagaacatgcagt

SEQ ID NO: 798520 - DNA, 15 bp, Homo sapiens
tgagaacatgcagtg

SEQ ID NO: 798521 - DNA, 15 bp, Homo sapiens
gagaacatgcagtgt

SEQ ID NO: 798522 - DNA, 15 bp, Homo sapiens
agaacatgcagtgtt

SEQ ID NO: 798523 - DNA, 15 bp, Homo sapiens
gaacatgcagtgttt

SEQ ID NO: 798524 - DNA, 15 bp, Homo sapiens
aacatgcagtgtttg

SEQ ID NO: 798525 - DNA, 15 bp, Homo sapiens
acatgcagtgtttgg

SEQ ID NO: 798526 - DNA, 15 bp, Homo sapiens
catgcagtgtttggt

SEQ ID NO: 798527 - DNA, 15 bp, Homo sapiens
atgcagtgtttggtt

SEQ ID NO: 798528 - DNA, 15 bp, Homo sapiens
tgcagtgtttggttt

SEQ ID NO: 798529 - DNA, 15 bp, Homo sapiens
gcagtgtttggtttt

SEQ ID NO: 798530 - DNA, 15 bp, Homo sapiens
cagtgtttggttttt

SEQ ID NO: 798531 - DNA, 15 bp, Homo sapiens
agtgtttggtttttg

SEQ ID NO: 798532 - DNA, 15 bp, Homo sapiens
gtgtttggtttttgt

SEQ ID NO: 798533 - DNA, 15 bp, Homo sapiens
tgtttggtttttgtc

SEQ ID NO: 798534 - DNA, 15 bp, Homo sapiens
gtttggtttttgtcc

SEQ ID NO: 798535 - DNA, 15 bp, Homo sapiens
tttggtttttgtcct

SEQ ID NO: 798536 - DNA, 15 bp, Homo sapiens
ttggtttttgtcctt

SEQ ID NO: 798537 - DNA, 15 bp, Homo sapiens
tggtttttgtccttg

SEQ ID NO: 798538 - DNA, 15 bp, Homo sapiens
ggtttttgtccttgc

SEQ ID NO: 798539 - DNA, 15 bp, Homo sapiens
gtttttgtccttgcg

SEQ ID NO: 798540 - DNA, 15 bp, Homo sapiens
tttttgtccttgcga

SEQ ID NO: 798541 - DNA, 15 bp, Homo sapiens
ttttgtccttgcgat

SEQ ID NO: 798542 - DNA, 15 bp, Homo sapiens
tttgtccttgcgata

SEQ ID NO: 798543 - DNA, 15 bp, Homo sapiens
ttgtccttgcgatag

SEQ ID NO: 798544 - DNA, 15 bp, Homo sapiens
tgtccttgcgatagt

SEQ ID NO: 798545 - DNA, 15 bp, Homo sapiens
gtccttgcgatagtt

SEQ ID NO: 798546 - DNA, 15 bp, Homo sapiens
tccttgcgatagttt

SEQ ID NO: 798547 - DNA, 15 bp, Homo sapiens
ccttgcgatagtttg

SEQ ID NO: 798548 - DNA, 15 bp, Homo sapiens
cttgcgatagtttgc

SEQ ID NO: 798549 - DNA, 15 bp, Homo sapiens
ttgcgatagtttgct

SEQ ID NO: 798550 - DNA, 15 bp, Homo sapiens
tgcgatagtttgctg

SEQ ID NO: 798551 - DNA, 15 bp, Homo sapiens
gcgatagtttgctga

SEQ ID NO: 798552 - DNA, 15 bp, Homo sapiens
cgatagtttgctgag

SEQ ID NO: 798553 - DNA, 15 bp, Homo sapiens
gatagtttgctgaga

SEQ ID NO: 798554 - DNA, 15 bp, Homo sapiens
atagtttgctgagaa

SEQ ID NO: 798555 - DNA, 15 bp, Homo sapiens
tagtttgctgagaat

SEQ ID NO: 798556 - DNA, 15 bp, Homo sapiens
agtttgctgagaatg

SEQ ID NO: 798557 - DNA, 15 bp, Homo sapiens
gtttgctgagaatga

SEQ ID NO: 798558 - DNA, 15 bp, Homo sapiens
tttgctgagaatgac

SEQ ID NO: 798559 - DNA, 15 bp, Homo sapiens
ttgctgagaatgacg

SEQ ID NO: 798560 - DNA, 15 bp, Homo sapiens
tgctgagaatgacgg

SEQ ID NO: 798561 - DNA, 15 bp, Homo sapiens
gctgagaatgacggt

SEQ ID NO: 798562 - DNA, 15 bp, Homo sapiens
ctgagaatgacggtt

SEQ ID NO: 798563 - DNA, 15 bp, Homo sapiens
tgagaatgacggttt

SEQ ID NO: 798564 - DNA, 15 bp, Homo sapiens
gagaatgacggtttc

SEQ ID NO: 798565 - DNA, 15 bp, Homo sapiens
agaatgacggtttcc

SEQ ID NO: 798566 - DNA, 15 bp, Homo sapiens
gaatgacggtttcca

SEQ ID NO: 798567 - DNA, 15 bp, Homo sapiens
aatgacggtttccag

SEQ ID NO: 798568 - DNA, 15 bp, Homo sapiens
atgacggtttccagc

SEQ ID NO: 798569 - DNA, 15 bp, Homo sapiens
tgacggtttccagct

SEQ ID NO: 798570 - DNA, 15 bp, Homo sapiens
gacggtttccagctt

SEQ ID NO: 798571 - DNA, 15 bp, Homo sapiens
acggtttccagcttc

SEQ ID NO: 798572 - DNA, 15 bp, Homo sapiens
cggtttccagcttca

SEQ ID NO: 798573 - DNA, 15 bp, Homo sapiens
ggtttccagcttcat

SEQ ID NO: 798574 - DNA, 15 bp, Homo sapiens
gtttccagcttcatc

SEQ ID NO: 798575 - DNA, 15 bp, Homo sapiens
tttccagcttcatcc

SEQ ID NO: 798576 - DNA, 15 bp, Homo sapiens
ttccagcttcatcca

SEQ ID NO: 798577 - DNA, 15 bp, Homo sapiens
tccagcttcatccat

SEQ ID NO: 798578 - DNA, 15 bp, Homo sapiens
ccagcttcatccatg

SEQ ID NO: 798579 - DNA, 15 bp, Homo sapiens
cagcttcatccatgt

SEQ ID NO: 798580 - DNA, 15 bp, Homo sapiens
agcttcatccatgtc

SEQ ID NO: 798581 - DNA, 15 bp, Homo sapiens
gcttcatccatgtcc

SEQ ID NO: 798582 - DNA, 15 bp, Homo sapiens
cttcatccatgtccc

SEQ ID NO: 798583 - DNA, 15 bp, Homo sapiens
ggacatgaactcatc

SEQ ID NO: 798584 - DNA, 15 bp, Homo sapiens
gacatgaactcatcc

SEQ ID NO: 798585 - DNA, 15 bp, Homo sapiens
acatgaactcatcct

SEQ ID NO: 798586 - DNA, 15 bp, Homo sapiens
catgaactcatcctt

SEQ ID NO: 798587 - DNA, 15 bp, Homo sapiens
atgaactcatccttt

SEQ ID NO: 798588 - DNA, 15 bp, Homo sapiens
tgaactcatcctttt

SEQ ID NO: 798589 - DNA, 15 bp, Homo sapiens
gaactcatccttttt

SEQ ID NO: 798590 - DNA, 15 bp, Homo sapiens
aactcatcctttttt

SEQ ID NO: 798591 - DNA, 15 bp, Homo sapiens
actcatccttttttt

SEQ ID NO: 798592 - DNA, 15 bp, Homo sapiens
ctcatccttttttta

SEQ ID NO: 798593 - DNA, 15 bp, Homo sapiens
tcatcctttttttat

SEQ ID NO: 798594 - DNA, 15 bp, Homo sapiens
catcctttttttatg

SEQ ID NO: 798595 - DNA, 15 bp, Homo sapiens
atcctttttttatgg

SEQ ID NO: 798596 - DNA, 15 bp, Homo sapiens
tcctttttttatggc

SEQ ID NO: 798597 - DNA, 15 bp, Homo sapiens
cctttttttatggct

SEQ ID NO: 798598 - DNA, 15 bp, Homo sapiens
ctttttttatggctg

SEQ ID NO: 798599 - DNA, 15 bp, Homo sapiens
tttttttatggctgc

SEQ ID NO: 798600 - DNA, 15 bp, Homo sapiens
ttttttatggctgca

SEQ ID NO: 798601 - DNA, 15 bp, Homo sapiens
tttttatggctgcat

SEQ ID NO: 798602 - DNA, 15 bp, Homo sapiens
ttttatggctgcata

SEQ ID NO: 798603 - DNA, 15 bp, Homo sapiens
tttatggctgcatag

SEQ ID NO: 798604 - DNA, 15 bp, Homo sapiens
ttatggctgcatagt

SEQ ID NO: 798605 - DNA, 15 bp, Homo sapiens
tatggctgcatagtg

SEQ ID NO: 798606 - DNA, 15 bp, Homo sapiens
atggctgcatagtgt

SEQ ID NO: 798607 - DNA, 15 bp, Homo sapiens
tggctgcatagtgtt

SEQ ID NO: 798608 - DNA, 15 bp, Homo sapiens
ggctgcatagtgttc

SEQ ID NO: 798609 - DNA, 15 bp, Homo sapiens
gctgcatagtgttcc

SEQ ID NO: 798610 - DNA, 15 bp, Homo sapiens
ctgcatagtgttcca

SEQ ID NO: 798611 - DNA, 15 bp, Homo sapiens
tgcatagtgttccat

SEQ ID NO: 798612 - DNA, 15 bp, Homo sapiens
gcatagtgttccatg

SEQ ID NO: 798613 - DNA, 15 bp, Homo sapiens
catagtgttccatgg

SEQ ID NO: 798614 - DNA, 15 bp, Homo sapiens
atagtgttccatggt

SEQ ID NO: 798615 - DNA, 15 bp, Homo sapiens
tagtgttccatggtg

SEQ ID NO: 798616 - DNA, 15 bp, Homo sapiens
agtgttccatggtgt

SEQ ID NO: 798617 - DNA, 15 bp, Homo sapiens
gtgttccatggtgta

SEQ ID NO: 798618 - DNA, 15 bp, Homo sapiens
tgttccatggtgtat

SEQ ID NO: 798619 - DNA, 15 bp, Homo sapiens
gttccatggtgtata

SEQ ID NO: 798620 - DNA, 15 bp, Homo sapiens
tggtgtatatgtgca

SEQ ID NO: 798621 - DNA, 15 bp, Homo sapiens
ggtgtatatgtgcac

SEQ ID NO: 798622 - DNA, 15 bp, Homo sapiens
gtgtatatgtgcaca

SEQ ID NO: 798623 - DNA, 15 bp, Homo sapiens
tgtatatgtgcacat

SEQ ID NO: 798624 - DNA, 15 bp, Homo sapiens
gtatatgtgcacatt

SEQ ID NO: 798625 - DNA, 15 bp, Homo sapiens
tatatgtgcacattt

SEQ ID NO: 798626 - DNA, 15 bp, Homo sapiens
atatgtgcacatttt

SEQ ID NO: 798627 - DNA, 15 bp, Homo sapiens
tatgtgcacattttc

SEQ ID NO: 798628 - DNA, 15 bp, Homo sapiens
atgtgcacattttct

SEQ ID NO: 798629 - DNA, 15 bp, Homo sapiens
tgtgcacattttctt

SEQ ID NO: 798630 - DNA, 15 bp, Homo sapiens
gtgcacattttctta

SEQ ID NO: 798631 - DNA, 15 bp, Homo sapiens
tgcacattttcttaa

SEQ ID NO: 798632 - DNA, 15 bp, Homo sapiens
gcacattttcttaat

SEQ ID NO: 798633 - DNA, 15 bp, Homo sapiens
ccagtctatcattga

SEQ ID NO: 798634 - DNA, 15 bp, Homo sapiens
cagtctatcattgat

SEQ ID NO: 798635 - DNA, 15 bp, Homo sapiens
agtctatcattgatg

SEQ ID NO: 798636 - DNA, 15 bp, Homo sapiens
gtctatcattgatgg

SEQ ID NO: 798637 - DNA, 15 bp, Homo sapiens
tctatcattgatgga

SEQ ID NO: 798638 - DNA, 15 bp, Homo sapiens
ctatcattgatggac

SEQ ID NO: 798639 - DNA, 15 bp, Homo sapiens
tatcattgatggacg

SEQ ID NO: 798640 - DNA, 15 bp, Homo sapiens
atcattgatggacgt

SEQ ID NO: 798641 - DNA, 15 bp, Homo sapiens
tcattgatggacgtt

SEQ ID NO: 798642 - DNA, 15 bp, Homo sapiens
cattgatggacgttt

SEQ ID NO: 798643 - DNA, 15 bp, Homo sapiens
attgatggacgtttg

SEQ ID NO: 798644 - DNA, 15 bp, Homo sapiens
ttgatggacgtttgg

SEQ ID NO: 798645 - DNA, 15 bp, Homo sapiens
tgatggacgtttggg

SEQ ID NO: 798646 - DNA, 15 bp, Homo sapiens
gatggacgtttgggt

SEQ ID NO: 798647 - DNA, 15 bp, Homo sapiens
atggacgtttgggtt

SEQ ID NO: 798648 - DNA, 15 bp, Homo sapiens
tggacgtttgggttg

SEQ ID NO: 798649 - DNA, 15 bp, Homo sapiens
ggacgtttgggttgg

SEQ ID NO: 798650 - DNA, 15 bp, Homo sapiens
gacgtttgggttggt

SEQ ID NO: 798651 - DNA, 15 bp, Homo sapiens
acgtttgggttggtt

SEQ ID NO: 798652 - DNA, 15 bp, Homo sapiens
cgtttgggttggttc

SEQ ID NO: 798653 - DNA, 15 bp, Homo sapiens
gtttgggttggttcc

SEQ ID NO: 798654 - DNA, 15 bp, Homo sapiens
gttggttccaagtcc

SEQ ID NO: 798655 - DNA, 15 bp, Homo sapiens
ttggttccaagtccg

SEQ ID NO: 798656 - DNA, 15 bp, Homo sapiens
tggttccaagtccgt

SEQ ID NO: 798657 - DNA, 15 bp, Homo sapiens
ggttccaagtccgtg

SEQ ID NO: 798658 - DNA, 15 bp, Homo sapiens
gttccaagtccgtgc

SEQ ID NO: 798659 - DNA, 15 bp, Homo sapiens
ttccaagtccgtgct

SEQ ID NO: 798660 - DNA, 15 bp, Homo sapiens
tccaagtccgtgcta

SEQ ID NO: 798661 - DNA, 15 bp, Homo sapiens
ccaagtccgtgctat

SEQ ID NO: 798662 - DNA, 15 bp, Homo sapiens
caagtccgtgctatt

SEQ ID NO: 798663 - DNA, 15 bp, Homo sapiens
aagtccgtgctattg

SEQ ID NO: 798664 - DNA, 15 bp, Homo sapiens
agtccgtgctattgt

SEQ ID NO: 798665 - DNA, 15 bp, Homo sapiens
gtccgtgctattgtg

SEQ ID NO: 798666 - DNA, 15 bp, Homo sapiens
tccgtgctattgtga

SEQ ID NO: 798667 - DNA, 15 bp, Homo sapiens
ccgtgctattgtgat

SEQ ID NO: 798668 - DNA, 15 bp, Homo sapiens
cgtgctattgtgatt

SEQ ID NO: 798669 - DNA, 15 bp, Homo sapiens
gtgctattgtgatta

SEQ ID NO: 798670 - DNA, 15 bp, Homo sapiens
tgctattgtgattag

SEQ ID NO: 798671 - DNA, 15 bp, Homo sapiens
gctattgtgattagt

SEQ ID NO: 798672 - DNA, 15 bp, Homo sapiens
ctattgtgattagtg

SEQ ID NO: 798673 - DNA, 15 bp, Homo sapiens
tattgtgattagtgc

SEQ ID NO: 798674 - DNA, 15 bp, Homo sapiens
attgtgattagtgcc

SEQ ID NO: 798675 - DNA, 15 bp, Homo sapiens
ttgtgattagtgcca

SEQ ID NO: 798676 - DNA, 15 bp, Homo sapiens
tgtgattagtgccac

SEQ ID NO: 798677 - DNA, 15 bp, Homo sapiens
gtgattagtgccaca

SEQ ID NO: 798678 - DNA, 15 bp, Homo sapiens
tgattagtgccacaa

SEQ ID NO: 798679 - DNA, 15 bp, Homo sapiens
gattagtgccacaat

SEQ ID NO: 798680 - DNA, 15 bp, Homo sapiens
attagtgccacaata

SEQ ID NO: 798681 - DNA, 15 bp, Homo sapiens
ttagtgccacaataa

SEQ ID NO: 798682 - DNA, 15 bp, Homo sapiens
tagtgccacaataaa

SEQ ID NO: 798683 - DNA, 15 bp, Homo sapiens
agtgccacaataaac

SEQ ID NO: 798684 - DNA, 15 bp, Homo sapiens
gtgccacaataaaca

SEQ ID NO: 798685 - DNA, 15 bp, Homo sapiens
tgccacaataaacat

SEQ ID NO: 798686 - DNA, 15 bp, Homo sapiens
gccacaataaacata

SEQ ID NO: 798687 - DNA, 15 bp, Homo sapiens
ccacaataaacatac

SEQ ID NO: 798688 - DNA, 15 bp, Homo sapiens
cacaataaacataca

SEQ ID NO: 798689 - DNA, 15 bp, Homo sapiens
acaataaacatacat

SEQ ID NO: 798690 - DNA, 15 bp, Homo sapiens
caataaacatacatg

SEQ ID NO: 798691 - DNA, 15 bp, Homo sapiens
aataaacatacatgt

SEQ ID NO: 798692 - DNA, 15 bp, Homo sapiens
ataaacatacatgtg

SEQ ID NO: 798693 - DNA, 15 bp, Homo sapiens
taaacatacatgtgc

SEQ ID NO: 798694 - DNA, 15 bp, Homo sapiens
aaacatacatgtgca

SEQ ID NO: 798695 - DNA, 15 bp, Homo sapiens
aacatacatgtgcat

SEQ ID NO: 798696 - DNA, 15 bp, Homo sapiens
acatacatgtgcatg

SEQ ID NO: 798697 - DNA, 15 bp, Homo sapiens
catacatgtgcatgt

SEQ ID NO: 798698 - DNA, 15 bp, Homo sapiens
atacatgtgcatgtg

SEQ ID NO: 798699 - DNA, 15 bp, Homo sapiens
tacatgtgcatgtgt

SEQ ID NO: 798700 - DNA, 15 bp, Homo sapiens
acatgtgcatgtgtc

SEQ ID NO: 798701 - DNA, 15 bp, Homo sapiens
catgtgcatgtgtct

SEQ ID NO: 798702 - DNA, 15 bp, Homo sapiens
atgtgcatgtgtctt

SEQ ID NO: 798703 - DNA, 15 bp, Homo sapiens
tgtgcatgtgtctta

SEQ ID NO: 798704 - DNA, 15 bp, Homo sapiens
gtgcatgtgtcttaa

SEQ ID NO: 798705 - DNA, 15 bp, Homo sapiens
tgcatgtgtcttaat

SEQ ID NO: 798706 - DNA, 15 bp, Homo sapiens
gcatgtgtcttaata

SEQ ID NO: 798707 - DNA, 15 bp, Homo sapiens
catgtgtcttaatag

SEQ ID NO: 798708 - DNA, 15 bp, Homo sapiens
atgtgtcttaatagc

SEQ ID NO: 798709 - DNA, 15 bp, Homo sapiens
tgtgtcttaatagca

SEQ ID NO: 798710 - DNA, 15 bp, Homo sapiens
gtgtcttaatagcag

SEQ ID NO: 798711 - DNA, 15 bp, Homo sapiens
tgtcttaatagcagc

SEQ ID NO: 798712 - DNA, 15 bp, Homo sapiens
gtcttaatagcagca

SEQ ID NO: 798713 - DNA, 15 bp, Homo sapiens
tcttaatagcagcat

SEQ ID NO: 798714 - DNA, 15 bp, Homo sapiens
cttaatagcagcata

SEQ ID NO: 798715 - DNA, 15 bp, Homo sapiens
ttaatagcagcataa

SEQ ID NO: 798716 - DNA, 15 bp, Homo sapiens
taatagcagcataat

SEQ ID NO: 798717 - DNA, 15 bp, Homo sapiens
aatagcagcataatt

SEQ ID NO: 798718 - DNA, 15 bp, Homo sapiens
atagcagcataattt

SEQ ID NO: 798719 - DNA, 15 bp, Homo sapiens
tagcagcataattta

SEQ ID NO: 798720 - DNA, 15 bp, Homo sapiens
agcagcataatttat

SEQ ID NO: 798721 - DNA, 15 bp, Homo sapiens
gcagcataatttata

SEQ ID NO: 798722 - DNA, 15 bp, Homo sapiens
cagcataatttataa

SEQ ID NO: 798723 - DNA, 15 bp, Homo sapiens
agcataatttataat

SEQ ID NO: 798724 - DNA, 15 bp, Homo sapiens
gcataatttataatc

SEQ ID NO: 798725 - DNA, 15 bp, Homo sapiens
cataatttataatcc

SEQ ID NO: 798726 - DNA, 15 bp, Homo sapiens
ataatttataatcct

SEQ ID NO: 798727 - DNA, 15 bp, Homo sapiens
taatttataatcctt

SEQ ID NO: 798728 - DNA, 15 bp, Homo sapiens
aatttataatccttt

SEQ ID NO: 798729 - DNA, 15 bp, Homo sapiens
atttataatcctttg

SEQ ID NO: 798730 - DNA, 15 bp, Homo sapiens
tttataatcctttgg

SEQ ID NO: 798731 - DNA, 15 bp, Homo sapiens
ttataatcctttggg

SEQ ID NO: 798732 - DNA, 15 bp, Homo sapiens
tataatcctttgggt

SEQ ID NO: 798733 - DNA, 15 bp, Homo sapiens
ataatcctttgggta

SEQ ID NO: 798734 - DNA, 15 bp, Homo sapiens
taatcctttgggtat

SEQ ID NO: 798735 - DNA, 15 bp, Homo sapiens
aatcctttgggtata

SEQ ID NO: 798736 - DNA, 15 bp, Homo sapiens
atcctttgggtatat

SEQ ID NO: 798737 - DNA, 15 bp, Homo sapiens
cctttgggtatatat

SEQ ID NO: 798738 - DNA, 15 bp, Homo sapiens
ctttgggtatatata

SEQ ID NO: 798739 - DNA, 15 bp, Homo sapiens
tttgggtatatatac

SEQ ID NO: 798740 - DNA, 15 bp, Homo sapiens
ttgggtatatataca

SEQ ID NO: 798741 - DNA, 15 bp, Homo sapiens
tgggtatatatacag

SEQ ID NO: 798742 - DNA, 15 bp, Homo sapiens
gggtatatatacagt

SEQ ID NO: 798743 - DNA, 15 bp, Homo sapiens
ggtatatatacagta

SEQ ID NO: 798744 - DNA, 15 bp, Homo sapiens
gtatatatacagtaa

SEQ ID NO: 798745 - DNA, 15 bp, Homo sapiens
tatatatacagtaat

SEQ ID NO: 798746 - DNA, 15 bp, Homo sapiens
atatatacagtaatg

SEQ ID NO: 798747 - DNA, 15 bp, Homo sapiens
tatatacagtaatgg

SEQ ID NO: 798748 - DNA, 15 bp, Homo sapiens
atatacagtaatggg

SEQ ID NO: 798749 - DNA, 15 bp, Homo sapiens
tatacagtaatggga

SEQ ID NO: 798750 - DNA, 15 bp, Homo sapiens
atacagtaatgggat

SEQ ID NO: 798751 - DNA, 15 bp, Homo sapiens
tacagtaatgggatg

SEQ ID NO: 798752 - DNA, 15 bp, Homo sapiens
acagtaatgggatgg

SEQ ID NO: 798753 - DNA, 15 bp, Homo sapiens
ttctagttctagatg

SEQ ID NO: 798754 - DNA, 15 bp, Homo sapiens
tctagttctagatgc

SEQ ID NO: 798755 - DNA, 15 bp, Homo sapiens
ctagttctagatgct

SEQ ID NO: 798756 - DNA, 15 bp, Homo sapiens
tagttctagatgctt

SEQ ID NO: 798757 - DNA, 15 bp, Homo sapiens
agttctagatgcttg

SEQ ID NO: 798758 - DNA, 15 bp, Homo sapiens
gttctagatgcttga

SEQ ID NO: 798759 - DNA, 15 bp, Homo sapiens
ttctagatgcttgaa

SEQ ID NO: 798760 - DNA, 15 bp, Homo sapiens
tctagatgcttgaag

SEQ ID NO: 798761 - DNA, 15 bp, Homo sapiens
ctagatgcttgaaga

SEQ ID NO: 798762 - DNA, 15 bp, Homo sapiens
tagatgcttgaagaa

SEQ ID NO: 798763 - DNA, 15 bp, Homo sapiens
agatgcttgaagaat

SEQ ID NO: 798764 - DNA, 15 bp, Homo sapiens
gatgcttgaagaatt

SEQ ID NO: 798765 - DNA, 15 bp, Homo sapiens
atgcttgaagaattg

SEQ ID NO: 798766 - DNA, 15 bp, Homo sapiens
tgcttgaagaattgc

SEQ ID NO: 798767 - DNA, 15 bp, Homo sapiens
gcttgaagaattgcc

SEQ ID NO: 798768 - DNA, 15 bp, Homo sapiens
cttgaagaattgcca

SEQ ID NO: 798769 - DNA, 15 bp, Homo sapiens
ttgaagaattgccac

SEQ ID NO: 798770 - DNA, 15 bp, Homo sapiens
tgaagaattgccaca

SEQ ID NO: 798771 - DNA, 15 bp, Homo sapiens
gaagaattgccacac

SEQ ID NO: 798772 - DNA, 15 bp, Homo sapiens
aagaattgccacact

SEQ ID NO: 798773 - DNA, 15 bp, Homo sapiens
agaattgccacactg

SEQ ID NO: 798774 - DNA, 15 bp, Homo sapiens
gaattgccacactgt

SEQ ID NO: 798775 - DNA, 15 bp, Homo sapiens
aattgccacactgtc

SEQ ID NO: 798776 - DNA, 15 bp, Homo sapiens
attgccacactgtct

SEQ ID NO: 798777 - DNA, 15 bp, Homo sapiens
ttgccacactgtctt

SEQ ID NO: 798778 - DNA, 15 bp, Homo sapiens
tgccacactgtcttc

SEQ ID NO: 798779 - DNA, 15 bp, Homo sapiens
gccacactgtcttcc

SEQ ID NO: 798780 - DNA, 15 bp, Homo sapiens
ccacactgtcttcca

SEQ ID NO: 798781 - DNA, 15 bp, Homo sapiens
cacactgtcttccac

SEQ ID NO: 798782 - DNA, 15 bp, Homo sapiens
acactgtcttccaca

SEQ ID NO: 798783 - DNA, 15 bp, Homo sapiens
cactgtcttccacaa

SEQ ID NO: 798784 - DNA, 15 bp, Homo sapiens
actgtcttccacaat

SEQ ID NO: 798785 - DNA, 15 bp, Homo sapiens
aaacaatagtgagta

SEQ ID NO: 798786 - DNA, 15 bp, Homo sapiens
aacaatagtgagtaa

SEQ ID NO: 798787 - DNA, 15 bp, Homo sapiens
acaatagtgagtaac

SEQ ID NO: 798788 - DNA, 15 bp, Homo sapiens
caatagtgagtaaca

SEQ ID NO: 798789 - DNA, 15 bp, Homo sapiens
aatagtgagtaacat

SEQ ID NO: 798790 - DNA, 15 bp, Homo sapiens
atagtgagtaacatt

SEQ ID NO: 798791 - DNA, 15 bp, Homo sapiens
tagtgagtaacattt

SEQ ID NO: 798792 - DNA, 15 bp, Homo sapiens
agtgagtaacattta

SEQ ID NO: 798793 - DNA, 15 bp, Homo sapiens
gtgagtaacatttac

SEQ ID NO: 798794 - DNA, 15 bp, Homo sapiens
tgagtaacatttacc

SEQ ID NO: 798795 - DNA, 15 bp, Homo sapiens
gagtaacatttaccc

SEQ ID NO: 798796 - DNA, 15 bp, Homo sapiens
agtaacatttaccca

SEQ ID NO: 798797 - DNA, 15 bp, Homo sapiens
gtaacatttacccaa

SEQ ID NO: 798798 - DNA, 15 bp, Homo sapiens
taacatttacccaag

SEQ ID NO: 798799 - DNA, 15 bp, Homo sapiens
aacatttacccaaga

SEQ ID NO: 798800 - DNA, 15 bp, Homo sapiens
acatttacccaagac

SEQ ID NO: 798801 - DNA, 15 bp, Homo sapiens
catttacccaagact

SEQ ID NO: 798802 - DNA, 15 bp, Homo sapiens
atttacccaagactt

SEQ ID NO: 798803 - DNA, 15 bp, Homo sapiens
tttacccaagacttt

SEQ ID NO: 798804 - DNA, 15 bp, Homo sapiens
ttacccaagacttta

SEQ ID NO: 798805 - DNA, 15 bp, Homo sapiens
tacccaagactttat

SEQ ID NO: 798806 - DNA, 15 bp, Homo sapiens
acccaagactttatt

SEQ ID NO: 798807 - DNA, 15 bp, Homo sapiens
cccaagactttattt

SEQ ID NO: 798808 - DNA, 15 bp, Homo sapiens
ccaagactttatttt

SEQ ID NO: 798809 - DNA, 15 bp, Homo sapiens
caagactttattttg

SEQ ID NO: 798810 - DNA, 15 bp, Homo sapiens
aagactttattttgt

SEQ ID NO: 798811 - DNA, 15 bp, Homo sapiens
agactttattttgta

SEQ ID NO: 798812 - DNA, 15 bp, Homo sapiens
gactttattttgtaa

SEQ ID NO: 798813 - DNA, 15 bp, Homo sapiens
actttattttgtaaa

SEQ ID NO: 798814 - DNA, 15 bp, Homo sapiens
ctttattttgtaaat

SEQ ID NO: 798815 - DNA, 15 bp, Homo sapiens
tttattttgtaaatg

SEQ ID NO: 798816 - DNA, 15 bp, Homo sapiens
ttattttgtaaatgc

SEQ ID NO: 798817 - DNA, 15 bp, Homo sapiens
tattttgtaaatgcc

SEQ ID NO: 798818 - DNA, 15 bp, Homo sapiens
attttgtaaatgcct

SEQ ID NO: 798819 - DNA, 15 bp, Homo sapiens
ttttgtaaatgcctc

SEQ ID NO: 798820 - DNA, 15 bp, Homo sapiens
tttgtaaatgcctct

SEQ ID NO: 798821 - DNA, 15 bp, Homo sapiens
ttgtaaatgcctctc

SEQ ID NO: 798822 - DNA, 15 bp, Homo sapiens
tgtaaatgcctctct

SEQ ID NO: 798823 - DNA, 15 bp, Homo sapiens
gtaaatgcctctctt

SEQ ID NO: 798824 - DNA, 15 bp, Homo sapiens
taaatgcctctcttc

SEQ ID NO: 798825 - DNA, 15 bp, Homo sapiens
aaatgcctctcttcc

SEQ ID NO: 798826 - DNA, 15 bp, Homo sapiens
aatgcctctcttcca

SEQ ID NO: 798827 - DNA, 15 bp, Homo sapiens
atgcctctcttccat

SEQ ID NO: 798828 - DNA, 15 bp, Homo sapiens
tgcctctcttccatc

SEQ ID NO: 798829 - DNA, 15 bp, Homo sapiens
gcctctcttccatca

SEQ ID NO: 798830 - DNA, 15 bp, Homo sapiens
cctctcttccatcac

SEQ ID NO: 798831 - DNA, 15 bp, Homo sapiens
ctctcttccatcact

SEQ ID NO: 798832 - DNA, 15 bp, Homo sapiens
tctcttccatcacta

SEQ ID NO: 798833 - DNA, 15 bp, Homo sapiens
ctcttccatcactac

SEQ ID NO: 798834 - DNA, 15 bp, Homo sapiens
tcttccatcactact

SEQ ID NO: 798835 - DNA, 15 bp, Homo sapiens
cttccatcactactg

SEQ ID NO: 798836 - DNA, 15 bp, Homo sapiens
ttccatcactactgc

SEQ ID NO: 798837 - DNA, 15 bp, Homo sapiens
tccatcactactgcc

SEQ ID NO: 798838 - DNA, 15 bp, Homo sapiens
ccatcactactgcct

SEQ ID NO: 798839 - DNA, 15 bp, Homo sapiens
catcactactgcctc

SEQ ID NO: 798840 - DNA, 15 bp, Homo sapiens
atcactactgcctca

SEQ ID NO: 798841 - DNA, 15 bp, Homo sapiens
tcactactgcctcac

SEQ ID NO: 798842 - DNA, 15 bp, Homo sapiens
cactactgcctcact

SEQ ID NO: 798843 - DNA, 15 bp, Homo sapiens
actactgcctcactt

SEQ ID NO: 798844 - DNA, 15 bp, Homo sapiens
ctactgcctcacttg

SEQ ID NO: 798845 - DNA, 15 bp, Homo sapiens
tactgcctcacttgg

SEQ ID NO: 798846 - DNA, 15 bp, Homo sapiens
actgcctcacttggg

SEQ ID NO: 798847 - DNA, 15 bp, Homo sapiens
ctgcctcacttgggg

SEQ ID NO: 798848 - DNA, 15 bp, Homo sapiens
tgcctcacttggggc

SEQ ID NO: 798849 - DNA, 15 bp, Homo sapiens
gcctcacttggggca

SEQ ID NO: 798850 - DNA, 15 bp, Homo sapiens
cctcacttggggcac

SEQ ID NO: 798851 - DNA, 15 bp, Homo sapiens
ctcacttggggcacc

SEQ ID NO: 798852 - DNA, 15 bp, Homo sapiens
tcacttggggcacct

SEQ ID NO: 798853 - DNA, 15 bp, Homo sapiens
cacttggggcacctg

SEQ ID NO: 798854 - DNA, 15 bp, Homo sapiens
acttggggcacctgg

SEQ ID NO: 798855 - DNA, 15 bp, Homo sapiens
cttggggcacctggg

SEQ ID NO: 798856 - DNA, 15 bp, Homo sapiens
ttggggcacctggga

SEQ ID NO: 798857 - DNA, 15 bp, Homo sapiens
tggggcacctgggag

SEQ ID NO: 798858 - DNA, 15 bp, Homo sapiens
ggggcacctgggagt

SEQ ID NO: 798859 - DNA, 15 bp, Homo sapiens
gggcacctgggagta

SEQ ID NO: 798860 - DNA, 15 bp, Homo sapiens
ggcacctgggagtat

SEQ ID NO: 798861 - DNA, 15 bp, Homo sapiens
gcacctgggagtatc

SEQ ID NO: 798862 - DNA, 15 bp, Homo sapiens
cacctgggagtatcc

SEQ ID NO: 798863 - DNA, 15 bp, Homo sapiens
acctgggagtatcca

SEQ ID NO: 798864 - DNA, 15 bp, Homo sapiens
cctgggagtatccag

SEQ ID NO: 798865 - DNA, 15 bp, Homo sapiens
ctgggagtatccagg

SEQ ID NO: 798866 - DNA, 15 bp, Homo sapiens
tgggagtatccaggt

SEQ ID NO: 798867 - DNA, 15 bp, Homo sapiens
gggagtatccaggtt

SEQ ID NO: 798868 - DNA, 15 bp, Homo sapiens
ggagtatccaggttg

SEQ ID NO: 798869 - DNA, 15 bp, Homo sapiens
gagtatccaggttga

SEQ ID NO: 798870 - DNA, 15 bp, Homo sapiens
agtatccaggttgaa

SEQ ID NO: 798871 - DNA, 15 bp, Homo sapiens
gtatccaggttgaag

SEQ ID NO: 798872 - DNA, 15 bp, Homo sapiens
tatccaggttgaaga

SEQ ID NO: 798873 - DNA, 15 bp, Homo sapiens
atccaggttgaagat

SEQ ID NO: 798874 - DNA, 15 bp, Homo sapiens
tccaggttgaagatg

SEQ ID NO: 798875 - DNA, 15 bp, Homo sapiens
ccaggttgaagatgc

SEQ ID NO: 798876 - DNA, 15 bp, Homo sapiens
caggttgaagatgcg

SEQ ID NO: 798877 - DNA, 15 bp, Homo sapiens
aggttgaagatgcgg

SEQ ID NO: 798878 - DNA, 15 bp, Homo sapiens
ggttgaagatgcggg

SEQ ID NO: 798879 - DNA, 15 bp, Homo sapiens
gttgaagatgcgggc

SEQ ID NO: 798880 - DNA, 15 bp, Homo sapiens
ttgaagatgcgggct

SEQ ID NO: 798881 - DNA, 15 bp, Homo sapiens
tgaagatgcgggctc

SEQ ID NO: 798882 - DNA, 15 bp, Homo sapiens
gaagatgcgggctca

SEQ ID NO: 798883 - DNA, 15 bp, Homo sapiens
aagatgcgggctcaa

SEQ ID NO: 798884 - DNA, 15 bp, Homo sapiens
agatgcgggctcaac

SEQ ID NO: 798885 - DNA, 15 bp, Homo sapiens
gatgcgggctcaacc

SEQ ID NO: 798886 - DNA, 15 bp, Homo sapiens
atgcgggctcaaccc

SEQ ID NO: 798887 - DNA, 15 bp, Homo sapiens
tgcgggctcaaccca

SEQ ID NO: 798888 - DNA, 15 bp, Homo sapiens
gcgggctcaacccag

SEQ ID NO: 798889 - DNA, 15 bp, Homo sapiens
cgggctcaacccagg

SEQ ID NO: 798890 - DNA, 15 bp, Homo sapiens
gggctcaacccagga

SEQ ID NO: 798891 - DNA, 15 bp, Homo sapiens
ggctcaacccaggag

SEQ ID NO: 798892 - DNA, 15 bp, Homo sapiens
gctcaacccaggagt

SEQ ID NO: 798893 - DNA, 15 bp, Homo sapiens
ctcaacccaggagtc

SEQ ID NO: 798894 - DNA, 15 bp, Homo sapiens
tcaacccaggagtca

SEQ ID NO: 798895 - DNA, 15 bp, Homo sapiens
caacccaggagtcaa

SEQ ID NO: 798896 - DNA, 15 bp, Homo sapiens
aacccaggagtcaag

SEQ ID NO: 798897 - DNA, 15 bp, Homo sapiens
acccaggagtcaagc

SEQ ID NO: 798898 - DNA, 15 bp, Homo sapiens
cccaggagtcaagca

SEQ ID NO: 798899 - DNA, 15 bp, Homo sapiens
ccaggagtcaagcaa

SEQ ID NO: 798900 - DNA, 15 bp, Homo sapiens
caggagtcaagcaaa

SEQ ID NO: 798901 - DNA, 15 bp, Homo sapiens
aggagtcaagcaaac

SEQ ID NO: 798902 - DNA, 15 bp, Homo sapiens
ggagtcaagcaaaca

SEQ ID NO: 798903 - DNA, 15 bp, Homo sapiens
gagtcaagcaaacaa

SEQ ID NO: 798904 - DNA, 15 bp, Homo sapiens
agtcaagcaaacaat

SEQ ID NO: 798905 - DNA, 15 bp, Homo sapiens
gtcaagcaaacaatt

SEQ ID NO: 798906 - DNA, 15 bp, Homo sapiens
tcaagcaaacaattt

SEQ ID NO: 798907 - DNA, 15 bp, Homo sapiens
caagcaaacaatttc

SEQ ID NO: 798908 - DNA, 15 bp, Homo sapiens
aagcaaacaatttct

SEQ ID NO: 798909 - DNA, 15 bp, Homo sapiens
agcaaacaatttcta

SEQ ID NO: 798910 - DNA, 15 bp, Homo sapiens
gcaaacaatttctag

SEQ ID NO: 798911 - DNA, 15 bp, Homo sapiens
caaacaatttctagt

SEQ ID NO: 798912 - DNA, 15 bp, Homo sapiens
aaacaatttctagtt

SEQ ID NO: 798913 - DNA, 15 bp, Homo sapiens
aacaatttctagttt

SEQ ID NO: 798914 - DNA, 15 bp, Homo sapiens
acaatttctagtttt

SEQ ID NO: 798915 - DNA, 15 bp, Homo sapiens
caatttctagttttt

SEQ ID NO: 798916 - DNA, 15 bp, Homo sapiens
aatttctagtttttg

SEQ ID NO: 798917 - DNA, 15 bp, Homo sapiens
atttctagtttttgg

SEQ ID NO: 798918 - DNA, 15 bp, Homo sapiens
tttctagtttttggg

SEQ ID NO: 798919 - DNA, 15 bp, Homo sapiens
ttctagtttttggga

SEQ ID NO: 798920 - DNA, 15 bp, Homo sapiens
tctagtttttgggat

SEQ ID NO: 798921 - DNA, 15 bp, Homo sapiens
ctagtttttgggatg

SEQ ID NO: 798922 - DNA, 15 bp, Homo sapiens
tagtttttgggatgc

SEQ ID NO: 798923 - DNA, 15 bp, Homo sapiens
agtttttgggatgcc

SEQ ID NO: 798924 - DNA, 15 bp, Homo sapiens
gtttttgggatgcct

SEQ ID NO: 798925 - DNA, 15 bp, Homo sapiens
tttttgggatgcctt

SEQ ID NO: 798926 - DNA, 15 bp, Homo sapiens
ttttgggatgcctta

SEQ ID NO: 798927 - DNA, 15 bp, Homo sapiens
tttgggatgccttaa

SEQ ID NO: 798928 - DNA, 15 bp, Homo sapiens
ttgggatgccttaaa

SEQ ID NO: 798929 - DNA, 15 bp, Homo sapiens
tgggatgccttaaac

SEQ ID NO: 798930 - DNA, 15 bp, Homo sapiens
gggatgccttaaaca

SEQ ID NO: 798931 - DNA, 15 bp, Homo sapiens
ggatgccttaaacaa

SEQ ID NO: 798932 - DNA, 15 bp, Homo sapiens
gatgccttaaacaaa

SEQ ID NO: 798933 - DNA, 15 bp, Homo sapiens
atgccttaaacaaaa

SEQ ID NO: 798934 - DNA, 15 bp, Homo sapiens
tgccttaaacaaaac

SEQ ID NO: 798935 - DNA, 15 bp, Homo sapiens
gccttaaacaaaacc

SEQ ID NO: 798936 - DNA, 15 bp, Homo sapiens
ccttaaacaaaaccg

SEQ ID NO: 798937 - DNA, 15 bp, Homo sapiens
cttaaacaaaaccgt

SEQ ID NO: 798938 - DNA, 15 bp, Homo sapiens
ttaaacaaaaccgtg

SEQ ID NO: 798939 - DNA, 15 bp, Homo sapiens
taaacaaaaccgtga

SEQ ID NO: 798940 - DNA, 15 bp, Homo sapiens
aaacaaaaccgtgaa

SEQ ID NO: 798941 - DNA, 15 bp, Homo sapiens
aacaaaaccgtgaat

SEQ ID NO: 798942 - DNA, 15 bp, Homo sapiens
acaaaaccgtgaatc

SEQ ID NO: 798943 - DNA, 15 bp, Homo sapiens
caaaaccgtgaatct

SEQ ID NO: 798944 - DNA, 15 bp, Homo sapiens
aaaaccgtgaatctc

SEQ ID NO: 798945 - DNA, 15 bp, Homo sapiens
aaaccgtgaatctct

SEQ ID NO: 798946 - DNA, 15 bp, Homo sapiens
aaccgtgaatctcta

SEQ ID NO: 798947 - DNA, 15 bp, Homo sapiens
accgtgaatctctaa

SEQ ID NO: 798948 - DNA, 15 bp, Homo sapiens
ccgtgaatctctaag

SEQ ID NO: 798949 - DNA, 15 bp, Homo sapiens
cgtgaatctctaagc

SEQ ID NO: 798950 - DNA, 15 bp, Homo sapiens
gtgaatctctaagct

SEQ ID NO: 798951 - DNA, 15 bp, Homo sapiens
tgaatctctaagctc

SEQ ID NO: 798952 - DNA, 15 bp, Homo sapiens
gaatctctaagctcc

SEQ ID NO: 798953 - DNA, 15 bp, Homo sapiens
aatctctaagctcct

SEQ ID NO: 798954 - DNA, 15 bp, Homo sapiens
atctctaagctcctc

SEQ ID NO: 798955 - DNA, 15 bp, Homo sapiens
tctctaagctcctca

SEQ ID NO: 798956 - DNA, 15 bp, Homo sapiens
ctctaagctcctcag

SEQ ID NO: 798957 - DNA, 15 bp, Homo sapiens
tctaagctcctcagg

SEQ ID NO: 798958 - DNA, 15 bp, Homo sapiens
ctaagctcctcaggc

SEQ ID NO: 798959 - DNA, 15 bp, Homo sapiens
taagctcctcaggct

SEQ ID NO: 798960 - DNA, 15 bp, Homo sapiens
aagctcctcaggctg

SEQ ID NO: 798961 - DNA, 15 bp, Homo sapiens
agctcctcaggctgg

SEQ ID NO: 798962 - DNA, 15 bp, Homo sapiens
gctcctcaggctgga

SEQ ID NO: 798963 - DNA, 15 bp, Homo sapiens
ctcctcaggctggaa

SEQ ID NO: 798964 - DNA, 15 bp, Homo sapiens
tcctcaggctggaaa

SEQ ID NO: 798965 - DNA, 15 bp, Homo sapiens
cctcaggctggaaat

SEQ ID NO: 798966 - DNA, 15 bp, Homo sapiens
ctcaggctggaaatg

SEQ ID NO: 798967 - DNA, 15 bp, Homo sapiens
tcaggctggaaatgg

SEQ ID NO: 798968 - DNA, 15 bp, Homo sapiens
caggctggaaatggc

SEQ ID NO: 798969 - DNA, 15 bp, Homo sapiens
aggctggaaatggct

SEQ ID NO: 798970 - DNA, 15 bp, Homo sapiens
ggctggaaatggctc

SEQ ID NO: 798971 - DNA, 15 bp, Homo sapiens
gctggaaatggctca

SEQ ID NO: 798972 - DNA, 15 bp, Homo sapiens
ctggaaatggctcac

SEQ ID NO: 798973 - DNA, 15 bp, Homo sapiens
tggaaatggctcact

SEQ ID NO: 798974 - DNA, 15 bp, Homo sapiens
ggaaatggctcactg

SEQ ID NO: 798975 - DNA, 15 bp, Homo sapiens
gaaatggctcactgc

SEQ ID NO: 798976 - DNA, 15 bp, Homo sapiens
aaatggctcactgct

SEQ ID NO: 798977 - DNA, 15 bp, Homo sapiens
aatggctcactgctg

SEQ ID NO: 798978 - DNA, 15 bp, Homo sapiens
atggctcactgctgg

SEQ ID NO: 798979 - DNA, 15 bp, Homo sapiens
tggctcactgctggt

SEQ ID NO: 798980 - DNA, 15 bp, Homo sapiens
ggctcactgctggtg

SEQ ID NO: 798981 - DNA, 15 bp, Homo sapiens
gctcactgctggtgg

SEQ ID NO: 798982 - DNA, 15 bp, Homo sapiens
ctcactgctggtgga

SEQ ID NO: 798983 - DNA, 15 bp, Homo sapiens
tcactgctggtggaa

SEQ ID NO: 798984 - DNA, 15 bp, Homo sapiens
cactgctggtggaat

SEQ ID NO: 798985 - DNA, 15 bp, Homo sapiens
actgctggtggaatc

SEQ ID NO: 798986 - DNA, 15 bp, Homo sapiens
ctgctggtggaatca

SEQ ID NO: 798987 - DNA, 15 bp, Homo sapiens
tgctggtggaatcat

SEQ ID NO: 798988 - DNA, 15 bp, Homo sapiens
gctggtggaatcatt

SEQ ID NO: 798989 - DNA, 15 bp, Homo sapiens
ctggtggaatcatta

SEQ ID NO: 798990 - DNA, 15 bp, Homo sapiens
tggtggaatcattaa

SEQ ID NO: 798991 - DNA, 15 bp, Homo sapiens
ggtggaatcattaag

SEQ ID NO: 798992 - DNA, 15 bp, Homo sapiens
gtggaatcattaaga

SEQ ID NO: 798993 - DNA, 15 bp, Homo sapiens
tggaatcattaagag

SEQ ID NO: 798994 - DNA, 15 bp, Homo sapiens
ggaatcattaagagt

SEQ ID NO: 798995 - DNA, 15 bp, Homo sapiens
gaatcattaagagtg

SEQ ID NO: 798996 - DNA, 15 bp, Homo sapiens
aatcattaagagtgc

SEQ ID NO: 798997 - DNA, 15 bp, Homo sapiens
atcattaagagtgcc

SEQ ID NO: 798998 - DNA, 15 bp, Homo sapiens
tcattaagagtgcca

SEQ ID NO: 798999 - DNA, 15 bp, Homo sapiens
cattaagagtgccag

SEQ ID NO: 799000 - DNA, 15 bp, Homo sapiens
attaagagtgccagc

SEQ ID NO: 799001 - DNA, 15 bp, Homo sapiens
ttaagagtgccagcc

SEQ ID NO: 799002 - DNA, 15 bp, Homo sapiens
taagagtgccagcca

SEQ ID NO: 799003 - DNA, 15 bp, Homo sapiens
aagagtgccagccag

SEQ ID NO: 799004 - DNA, 15 bp, Homo sapiens
agagtgccagccaga

SEQ ID NO: 799005 - DNA, 15 bp, Homo sapiens
gagtgccagccagat

SEQ ID NO: 799006 - DNA, 15 bp, Homo sapiens
agtgccagccagatc

SEQ ID NO: 799007 - DNA, 15 bp, Homo sapiens
gtgccagccagatct

SEQ ID NO: 799008 - DNA, 15 bp, Homo sapiens
tgccagccagatctg

SEQ ID NO: 799009 - DNA, 15 bp, Homo sapiens
gccagccagatctga

SEQ ID NO: 799010 - DNA, 15 bp, Homo sapiens
ccagccagatctgat

SEQ ID NO: 799011 - DNA, 15 bp, Homo sapiens
cagccagatctgatt

SEQ ID NO: 799012 - DNA, 15 bp, Homo sapiens
agccagatctgattg

SEQ ID NO: 799013 - DNA, 15 bp, Homo sapiens
gccagatctgattgc

SEQ ID NO: 799014 - DNA, 15 bp, Homo sapiens
ccagatctgattgct

SEQ ID NO: 799015 - DNA, 15 bp, Homo sapiens
cagatctgattgctg

SEQ ID NO: 799016 - DNA, 15 bp, Homo sapiens
agatctgattgctgc

SEQ ID NO: 799017 - DNA, 15 bp, Homo sapiens
gatctgattgctgca

SEQ ID NO: 799018 - DNA, 15 bp, Homo sapiens
atctgattgctgcat

SEQ ID NO: 799019 - DNA, 15 bp, Homo sapiens
tctgattgctgcatt

SEQ ID NO: 799020 - DNA, 15 bp, Homo sapiens
ctgattgctgcattc

SEQ ID NO: 799021 - DNA, 15 bp, Homo sapiens
tgattgctgcattca

SEQ ID NO: 799022 - DNA, 15 bp, Homo sapiens
gattgctgcattcag

SEQ ID NO: 799023 - DNA, 15 bp, Homo sapiens
attgctgcattcaga

SEQ ID NO: 799024 - DNA, 15 bp, Homo sapiens
ttgctgcattcagag

SEQ ID NO: 799025 - DNA, 15 bp, Homo sapiens
tgctgcattcagagg

SEQ ID NO: 799026 - DNA, 15 bp, Homo sapiens
gctgcattcagaggt

SEQ ID NO: 799027 - DNA, 15 bp, Homo sapiens
ctgcattcagaggtt

SEQ ID NO: 799028 - DNA, 15 bp, Homo sapiens
tgcattcagaggttt

SEQ ID NO: 799029 - DNA, 15 bp, Homo sapiens
gcattcagaggttta

SEQ ID NO: 799030 - DNA, 15 bp, Homo sapiens
cattcagaggtttat

SEQ ID NO: 799031 - DNA, 15 bp, Homo sapiens
attcagaggtttatt

SEQ ID NO: 799032 - DNA, 15 bp, Homo sapiens
ttcagaggtttatta

SEQ ID NO: 799033 - DNA, 15 bp, Homo sapiens
tcagaggtttattaa

SEQ ID NO: 799034 - DNA, 15 bp, Homo sapiens
cagaggtttattaat

SEQ ID NO: 799035 - DNA, 15 bp, Homo sapiens
agaggtttattaata

SEQ ID NO: 799036 - DNA, 15 bp, Homo sapiens
gaggtttattaatat

SEQ ID NO: 799037 - DNA, 15 bp, Homo sapiens
aggtttattaatatc

SEQ ID NO: 799038 - DNA, 15 bp, Homo sapiens
ggtttattaatatca

SEQ ID NO: 799039 - DNA, 15 bp, Homo sapiens
gtttattaatatcac

SEQ ID NO: 799040 - DNA, 15 bp, Homo sapiens
tttattaatatcacc

SEQ ID NO: 799041 - DNA, 15 bp, Homo sapiens
ttattaatatcacct

SEQ ID NO: 799042 - DNA, 15 bp, Homo sapiens
tattaatatcacctc

SEQ ID NO: 799043 - DNA, 15 bp, Homo sapiens
attaatatcacctcg

SEQ ID NO: 799044 - DNA, 15 bp, Homo sapiens
ttaatatcacctcga

SEQ ID NO: 799045 - DNA, 15 bp, Homo sapiens
taatatcacctcgaa

SEQ ID NO: 799046 - DNA, 15 bp, Homo sapiens
aatatcacctcgaat

SEQ ID NO: 799047 - DNA, 15 bp, Homo sapiens
atatcacctcgaatt

SEQ ID NO: 799048 - DNA, 15 bp, Homo sapiens
tatcacctcgaattt

SEQ ID NO: 799049 - DNA, 15 bp, Homo sapiens
atcacctcgaattta

SEQ ID NO: 799050 - DNA, 15 bp, Homo sapiens
tcacctcgaatttat

SEQ ID NO: 799051 - DNA, 15 bp, Homo sapiens
cacctcgaatttatc

SEQ ID NO: 799052 - DNA, 15 bp, Homo sapiens
acctcgaatttatct

SEQ ID NO: 799053 - DNA, 15 bp, Homo sapiens
cctcgaatttatctt

SEQ ID NO: 799054 - DNA, 15 bp, Homo sapiens
ctcgaatttatcttc

SEQ ID NO: 799055 - DNA, 15 bp, Homo sapiens
tcgaatttatcttcc

SEQ ID NO: 799056 - DNA, 15 bp, Homo sapiens
cgaatttatcttccc

SEQ ID NO: 799057 - DNA, 15 bp, Homo sapiens
gaatttatcttccct

SEQ ID NO: 799058 - DNA, 15 bp, Homo sapiens
aatttatcttccctg

SEQ ID NO: 799059 - DNA, 15 bp, Homo sapiens
atttatcttccctga

SEQ ID NO: 799060 - DNA, 15 bp, Homo sapiens
tttatcttccctgat

SEQ ID NO: 799061 - DNA, 15 bp, Homo sapiens
ttatcttccctgatg

SEQ ID NO: 799062 - DNA, 15 bp, Homo sapiens
tatcttccctgatga

SEQ ID NO: 799063 - DNA, 15 bp, Homo sapiens
atcttccctgatgag

SEQ ID NO: 799064 - DNA, 15 bp, Homo sapiens
tcttccctgatgagg

SEQ ID NO: 799065 - DNA, 15 bp, Homo sapiens
cttccctgatgagga

SEQ ID NO: 799066 - DNA, 15 bp, Homo sapiens
ttccctgatgaggaa

SEQ ID NO: 799067 - DNA, 15 bp, Homo sapiens
tccctgatgaggaaa

SEQ ID NO: 799068 - DNA, 15 bp, Homo sapiens
ccctgatgaggaaat

SEQ ID NO: 799069 - DNA, 15 bp, Homo sapiens
cctgatgaggaaatt

SEQ ID NO: 799070 - DNA, 15 bp, Homo sapiens
ctgatgaggaaattt

SEQ ID NO: 799071 - DNA, 15 bp, Homo sapiens
tgatgaggaaatttt

SEQ ID NO: 799072 - DNA, 15 bp, Homo sapiens
gatgaggaaattttg

SEQ ID NO: 799073 - DNA, 15 bp, Homo sapiens
atgaggaaattttgc

SEQ ID NO: 799074 - DNA, 15 bp, Homo sapiens
tgaggaaattttgcc

SEQ ID NO: 799075 - DNA, 15 bp, Homo sapiens
gaggaaattttgcca

SEQ ID NO: 799076 - DNA, 15 bp, Homo sapiens
aggaaattttgccag

SEQ ID NO: 799077 - DNA, 15 bp, Homo sapiens
ggaaattttgccagc

SEQ ID NO: 799078 - DNA, 15 bp, Homo sapiens
gaaattttgccagca

SEQ ID NO: 799079 - DNA, 15 bp, Homo sapiens
aaattttgccagcat

SEQ ID NO: 799080 - DNA, 15 bp, Homo sapiens
aattttgccagcatc

SEQ ID NO: 799081 - DNA, 15 bp, Homo sapiens
attttgccagcatct

SEQ ID NO: 799082 - DNA, 15 bp, Homo sapiens
ttttgccagcatctg

SEQ ID NO: 799083 - DNA, 15 bp, Homo sapiens
tttgccagcatctga

SEQ ID NO: 799084 - DNA, 15 bp, Homo sapiens
ttgccagcatctgac

SEQ ID NO: 799085 - DNA, 15 bp, Homo sapiens
tgccagcatctgaca

SEQ ID NO: 799086 - DNA, 15 bp, Homo sapiens
gccagcatctgacaa

SEQ ID NO: 799087 - DNA, 15 bp, Homo sapiens
ccagcatctgacaaa

SEQ ID NO: 799088 - DNA, 15 bp, Homo sapiens
cagcatctgacaaaa

SEQ ID NO: 799089 - DNA, 15 bp, Homo sapiens
agcatctgacaaaaa

SEQ ID NO: 799090 - DNA, 15 bp, Homo sapiens
gcatctgacaaaaat

SEQ ID NO: 799091 - DNA, 15 bp, Homo sapiens
catctgacaaaaatg

SEQ ID NO: 799092 - DNA, 15 bp, Homo sapiens
atctgacaaaaatga

SEQ ID NO: 799093 - DNA, 15 bp, Homo sapiens
tctgacaaaaatgaa

SEQ ID NO: 799094 - DNA, 15 bp, Homo sapiens
ctgacaaaaatgaaa

SEQ ID NO: 799095 - DNA, 15 bp, Homo sapiens
tgacaaaaatgaaat

SEQ ID NO: 799096 - DNA, 15 bp, Homo sapiens
gacaaaaatgaaatg

SEQ ID NO: 799097 - DNA, 15 bp, Homo sapiens
acaaaaatgaaatgt

SEQ ID NO: 799098 - DNA, 15 bp, Homo sapiens
caaaaatgaaatgta

SEQ ID NO: 799099 - DNA, 15 bp, Homo sapiens
aaaaatgaaatgtac

SEQ ID NO: 799100 - DNA, 15 bp, Homo sapiens
aaaatgaaatgtaca

SEQ ID NO: 799101 - DNA, 15 bp, Homo sapiens
aaatgaaatgtacag

SEQ ID NO: 799102 - DNA, 15 bp, Homo sapiens
aatgaaatgtacagc

SEQ ID NO: 799103 - DNA, 15 bp, Homo sapiens
atgaaatgtacagcg

SEQ ID NO: 799104 - DNA, 15 bp, Homo sapiens
tgaaatgtacagcgg

SEQ ID NO: 799105 - DNA, 15 bp, Homo sapiens
gaaatgtacagcggc

SEQ ID NO: 799106 - DNA, 15 bp, Homo sapiens
aaatgtacagcggcc

SEQ ID NO: 799107 - DNA, 15 bp, Homo sapiens
aatgtacagcggcct

SEQ ID NO: 799108 - DNA, 15 bp, Homo sapiens
atgtacagcggcctt

SEQ ID NO: 799109 - DNA, 15 bp, Homo sapiens
tgtacagcggccttg

SEQ ID NO: 799110 - DNA, 15 bp, Homo sapiens
gtacagcggccttgt

SEQ ID NO: 799111 - DNA, 15 bp, Homo sapiens
tacagcggccttgtg

SEQ ID NO: 799112 - DNA, 15 bp, Homo sapiens
acagcggccttgtgc

SEQ ID NO: 799113 - DNA, 15 bp, Homo sapiens
cagcggccttgtgcc

SEQ ID NO: 799114 - DNA, 15 bp, Homo sapiens
agcggccttgtgcca

SEQ ID NO: 799115 - DNA, 15 bp, Homo sapiens
gcggccttgtgccaa

SEQ ID NO: 799116 - DNA, 15 bp, Homo sapiens
cggccttgtgccaac

SEQ ID NO: 799117 - DNA, 15 bp, Homo sapiens
ggccttgtgccaaca

SEQ ID NO: 799118 - DNA, 15 bp, Homo sapiens
gccttgtgccaacaa

SEQ ID NO: 799119 - DNA, 15 bp, Homo sapiens
ccttgtgccaacaag

SEQ ID NO: 799120 - DNA, 15 bp, Homo sapiens
cttgtgccaacaagc

SEQ ID NO: 799121 - DNA, 15 bp, Homo sapiens
ttgtgccaacaagca

SEQ ID NO: 799122 - DNA, 15 bp, Homo sapiens
tgtgccaacaagcat

SEQ ID NO: 799123 - DNA, 15 bp, Homo sapiens
gtgccaacaagcatc

SEQ ID NO: 799124 - DNA, 15 bp, Homo sapiens
tgccaacaagcatcc

SEQ ID NO: 799125 - DNA, 15 bp, Homo sapiens
gccaacaagcatcct

SEQ ID NO: 799126 - DNA, 15 bp, Homo sapiens
ccaacaagcatcctc

SEQ ID NO: 799127 - DNA, 15 bp, Homo sapiens
caacaagcatcctct

SEQ ID NO: 799128 - DNA, 15 bp, Homo sapiens
aacaagcatcctctc

SEQ ID NO: 799129 - DNA, 15 bp, Homo sapiens
acaagcatcctctcc

SEQ ID NO: 799130 - DNA, 15 bp, Homo sapiens
caagcatcctctccc

SEQ ID NO: 799131 - DNA, 15 bp, Homo sapiens
aagcatcctctccct

SEQ ID NO: 799132 - DNA, 15 bp, Homo sapiens
agcatcctctccctg

SEQ ID NO: 799133 - DNA, 15 bp, Homo sapiens
gcatcctctccctgc

SEQ ID NO: 799134 - DNA, 15 bp, Homo sapiens
catcctctccctgcc

SEQ ID NO: 799135 - DNA, 15 bp, Homo sapiens
atcctctccctgcca

SEQ ID NO: 799136 - DNA, 15 bp, Homo sapiens
tcctctccctgccat

SEQ ID NO: 799137 - DNA, 15 bp, Homo sapiens
cctctccctgccatc

SEQ ID NO: 799138 - DNA, 15 bp, Homo sapiens
ctctccctgccatcg

SEQ ID NO: 799139 - DNA, 15 bp, Homo sapiens
tctccctgccatcgg

SEQ ID NO: 799140 - DNA, 15 bp, Homo sapiens
ctccctgccatcggc

SEQ ID NO: 799141 - DNA, 15 bp, Homo sapiens
tccctgccatcggct

SEQ ID NO: 799142 - DNA, 15 bp, Homo sapiens
ccctgccatcggctg

SEQ ID NO: 799143 - DNA, 15 bp, Homo sapiens
cctgccatcggctgt

SEQ ID NO: 799144 - DNA, 15 bp, Homo sapiens
ctgccatcggctgtt

SEQ ID NO: 799145 - DNA, 15 bp, Homo sapiens
tgccatcggctgtta

SEQ ID NO: 799146 - DNA, 15 bp, Homo sapiens
gccatcggctgttag

SEQ ID NO: 799147 - DNA, 15 bp, Homo sapiens
ccatcggctgttagc

SEQ ID NO: 799148 - DNA, 15 bp, Homo sapiens
catcggctgttagca

SEQ ID NO: 799149 - DNA, 15 bp, Homo sapiens
atcggctgttagcag

SEQ ID NO: 799150 - DNA, 15 bp, Homo sapiens
tcggctgttagcaga

SEQ ID NO: 799151 - DNA, 15 bp, Homo sapiens
cggctgttagcagaa

SEQ ID NO: 799152 - DNA, 15 bp, Homo sapiens
ggctgttagcagaaa

SEQ ID NO: 799153 - DNA, 15 bp, Homo sapiens
gctgttagcagaaag

SEQ ID NO: 799154 - DNA, 15 bp, Homo sapiens
ctgttagcagaaagc

SEQ ID NO: 799155 - DNA, 15 bp, Homo sapiens
tgttagcagaaagcc

SEQ ID NO: 799156 - DNA, 15 bp, Homo sapiens
gttagcagaaagcca

SEQ ID NO: 799157 - DNA, 15 bp, Homo sapiens
ttagcagaaagccag

SEQ ID NO: 799158 - DNA, 15 bp, Homo sapiens
tagcagaaagccagt

SEQ ID NO: 799159 - DNA, 15 bp, Homo sapiens
agcagaaagccagtg

SEQ ID NO: 799160 - DNA, 15 bp, Homo sapiens
gcagaaagccagtgc

SEQ ID NO: 799161 - DNA, 15 bp, Homo sapiens
cagaaagccagtgca

SEQ ID NO: 799162 - DNA, 15 bp, Homo sapiens
agaaagccagtgcag

SEQ ID NO: 799163 - DNA, 15 bp, Homo sapiens
gaaagccagtgcagt

SEQ ID NO: 799164 - DNA, 15 bp, Homo sapiens
aaagccagtgcagtg

SEQ ID NO: 799165 - DNA, 15 bp, Homo sapiens
aagccagtgcagtgg

SEQ ID NO: 799166 - DNA, 15 bp, Homo sapiens
agccagtgcagtggg

SEQ ID NO: 799167 - DNA, 15 bp, Homo sapiens
gccagtgcagtgggc

SEQ ID NO: 799168 - DNA, 15 bp, Homo sapiens
ccagtgcagtgggct

SEQ ID NO: 799169 - DNA, 15 bp, Homo sapiens
cagtgcagtgggctg

SEQ ID NO: 799170 - DNA, 15 bp, Homo sapiens
agtgcagtgggctgc

SEQ ID NO: 799171 - DNA, 15 bp, Homo sapiens
gtgcagtgggctgct

SEQ ID NO: 799172 - DNA, 15 bp, Homo sapiens
tgcagtgggctgcta

SEQ ID NO: 799173 - DNA, 15 bp, Homo sapiens
gcagtgggctgctat

SEQ ID NO: 799174 - DNA, 15 bp, Homo sapiens
cagtgggctgctatg

SEQ ID NO: 799175 - DNA, 15 bp, Homo sapiens
agtgggctgctatgg

SEQ ID NO: 799176 - DNA, 15 bp, Homo sapiens
gtgggctgctatggg

SEQ ID NO: 799177 - DNA, 15 bp, Homo sapiens
tgggctgctatgggg

SEQ ID NO: 799178 - DNA, 15 bp, Homo sapiens
gggctgctatggggc

SEQ ID NO: 799179 - DNA, 15 bp, Homo sapiens
ggctgctatggggct

SEQ ID NO: 799180 - DNA, 15 bp, Homo sapiens
gctgctatggggcta

SEQ ID NO: 799181 - DNA, 15 bp, Homo sapiens
ctgctatggggctaa

SEQ ID NO: 799182 - DNA, 15 bp, Homo sapiens
tgctatggggctaat

SEQ ID NO: 799183 - DNA, 15 bp, Homo sapiens
gctatggggctaata

SEQ ID NO: 799184 - DNA, 15 bp, Homo sapiens
ctatggggctaataa

SEQ ID NO: 799185 - DNA, 15 bp, Homo sapiens
tatggggctaataaa

SEQ ID NO: 799186 - DNA, 15 bp, Homo sapiens
atggggctaataaaa

SEQ ID NO: 799187 - DNA, 15 bp, Homo sapiens
tggggctaataaaaa

SEQ ID NO: 799188 - DNA, 15 bp, Homo sapiens
ggggctaataaaaat

SEQ ID NO: 799189 - DNA, 15 bp, Homo sapiens
gggctaataaaaata

SEQ ID NO: 799190 - DNA, 15 bp, Homo sapiens
ggctaataaaaatat

SEQ ID NO: 799191 - DNA, 15 bp, Homo sapiens
gctaataaaaatata

SEQ ID NO: 799192 - DNA, 15 bp, Homo sapiens
ctaataaaaatataa

SEQ ID NO: 799193 - DNA, 15 bp, Homo sapiens
taataaaaatataag

SEQ ID NO: 799194 - DNA, 15 bp, Homo sapiens
aataaaaatataaga

SEQ ID NO: 799195 - DNA, 15 bp, Homo sapiens
ataaaaatataagat

SEQ ID NO: 799196 - DNA, 15 bp, Homo sapiens
taaaaatataagatg

SEQ ID NO: 799197 - DNA, 15 bp, Homo sapiens
aaaaatataagatga

SEQ ID NO: 799198 - DNA, 15 bp, Homo sapiens
aaaatataagatgaa

SEQ ID NO: 799199 - DNA, 15 bp, Homo sapiens
aaatataagatgaaa

SEQ ID NO: 799200 - DNA, 15 bp, Homo sapiens
aatataagatgaaaa

SEQ ID NO: 799201 - DNA, 15 bp, Homo sapiens
atataagatgaaaat

SEQ ID NO: 799202 - DNA, 15 bp, Homo sapiens
tataagatgaaaatg

SEQ ID NO: 799203 - DNA, 15 bp, Homo sapiens
ataagatgaaaatgg

SEQ ID NO: 799204 - DNA, 15 bp, Homo sapiens
taagatgaaaatggg

SEQ ID NO: 799205 - DNA, 15 bp, Homo sapiens
aagatgaaaatgggc

SEQ ID NO: 799206 - DNA, 15 bp, Homo sapiens
agatgaaaatgggct

SEQ ID NO: 799207 - DNA, 15 bp, Homo sapiens
gatgaaaatgggctt

SEQ ID NO: 799208 - DNA, 15 bp, Homo sapiens
atgaaaatgggcttc

SEQ ID NO: 799209 - DNA, 15 bp, Homo sapiens
tgaaaatgggcttcg

SEQ ID NO: 799210 - DNA, 15 bp, Homo sapiens
gaaaatgggcttcgc

SEQ ID NO: 799211 - DNA, 15 bp, Homo sapiens
aaaatgggcttcgca

SEQ ID NO: 799212 - DNA, 15 bp, Homo sapiens
aaatgggcttcgcat

SEQ ID NO: 799213 - DNA, 15 bp, Homo sapiens
aatgggcttcgcatc

SEQ ID NO: 799214 - DNA, 15 bp, Homo sapiens
atgggcttcgcatct

SEQ ID NO: 799215 - DNA, 15 bp, Homo sapiens
tgggcttcgcatctt

SEQ ID NO: 799216 - DNA, 15 bp, Homo sapiens
gggcttcgcatcttc

SEQ ID NO: 799217 - DNA, 15 bp, Homo sapiens
ggcttcgcatcttca

SEQ ID NO: 799218 - DNA, 15 bp, Homo sapiens
gcttcgcatcttcaa

SEQ ID NO: 799219 - DNA, 15 bp, Homo sapiens
cttcgcatcttcaat

SEQ ID NO: 799220 - DNA, 15 bp, Homo sapiens
ttcgcatcttcaatt

SEQ ID NO: 799221 - DNA, 15 bp, Homo sapiens
tcgcatcttcaatta

SEQ ID NO: 799222 - DNA, 15 bp, Homo sapiens
cgcatcttcaattag

SEQ ID NO: 799223 - DNA, 15 bp, Homo sapiens
gcatcttcaattagg

SEQ ID NO: 799224 - DNA, 15 bp, Homo sapiens
catcttcaattagga

SEQ ID NO: 799225 - DNA, 15 bp, Homo sapiens
atcttcaattaggaa

SEQ ID NO: 799226 - DNA, 15 bp, Homo sapiens
tcttcaattaggaat

SEQ ID NO: 799227 - DNA, 15 bp, Homo sapiens
cttcaattaggaatt

SEQ ID NO: 799228 - DNA, 15 bp, Homo sapiens
ttcaattaggaattt

SEQ ID NO: 799229 - DNA, 15 bp, Homo sapiens
tcaattaggaatttg

SEQ ID NO: 799230 - DNA, 15 bp, Homo sapiens
caattaggaatttgg

SEQ ID NO: 799231 - DNA, 15 bp, Homo sapiens
aattaggaatttggg

SEQ ID NO: 799232 - DNA, 15 bp, Homo sapiens
attaggaatttgggc

SEQ ID NO: 799233 - DNA, 15 bp, Homo sapiens
ttaggaatttgggct

SEQ ID NO: 799234 - DNA, 15 bp, Homo sapiens
taggaatttgggctt

SEQ ID NO: 799235 - DNA, 15 bp, Homo sapiens
aggaatttgggcttc

SEQ ID NO: 799236 - DNA, 15 bp, Homo sapiens
ggaatttgggcttcc

SEQ ID NO: 799237 - DNA, 15 bp, Homo sapiens
gaatttgggcttcca

SEQ ID NO: 799238 - DNA, 15 bp, Homo sapiens
aatttgggcttccaa

SEQ ID NO: 799239 - DNA, 15 bp, Homo sapiens
atttgggcttccaac

SEQ ID NO: 799240 - DNA, 15 bp, Homo sapiens
tttgggcttccaacc

SEQ ID NO: 799241 - DNA, 15 bp, Homo sapiens
ttgggcttccaaccc

SEQ ID NO: 799242 - DNA, 15 bp, Homo sapiens
tgggcttccaaccct

SEQ ID NO: 799243 - DNA, 15 bp, Homo sapiens
gggcttccaaccctc

SEQ ID NO: 799244 - DNA, 15 bp, Homo sapiens
ggcttccaaccctcc

SEQ ID NO: 799245 - DNA, 15 bp, Homo sapiens
gcttccaaccctcct

SEQ ID NO: 799246 - DNA, 15 bp, Homo sapiens
cttccaaccctcctc

SEQ ID NO: 799247 - DNA, 15 bp, Homo sapiens
ttccaaccctcctcc

SEQ ID NO: 799248 - DNA, 15 bp, Homo sapiens
tccaaccctcctcct

SEQ ID NO: 799249 - DNA, 15 bp, Homo sapiens
ccaaccctcctcctg

SEQ ID NO: 799250 - DNA, 15 bp, Homo sapiens
caaccctcctcctga

SEQ ID NO: 799251 - DNA, 15 bp, Homo sapiens
aaccctcctcctgag

SEQ ID NO: 799252 - DNA, 15 bp, Homo sapiens
accctcctcctgagg

SEQ ID NO: 799253 - DNA, 15 bp, Homo sapiens
ccctcctcctgaggc

SEQ ID NO: 799254 - DNA, 15 bp, Homo sapiens
cctcctcctgaggct

SEQ ID NO: 799255 - DNA, 15 bp, Homo sapiens
ctcctcctgaggctc

SEQ ID NO: 799256 - DNA, 15 bp, Homo sapiens
tcctcctgaggctcc

SEQ ID NO: 799257 - DNA, 15 bp, Homo sapiens
cctcctgaggctccc

SEQ ID NO: 799258 - DNA, 15 bp, Homo sapiens
ctcctgaggctccct

SEQ ID NO: 799259 - DNA, 15 bp, Homo sapiens
tcctgaggctccctt

SEQ ID NO: 799260 - DNA, 15 bp, Homo sapiens
cctgaggctcccttc

SEQ ID NO: 799261 - DNA, 15 bp, Homo sapiens
ctgaggctcccttcc

SEQ ID NO: 799262 - DNA, 15 bp, Homo sapiens
tgaggctcccttccc

SEQ ID NO: 799263 - DNA, 15 bp, Homo sapiens
gaggctcccttcccc

SEQ ID NO: 799264 - DNA, 15 bp, Homo sapiens
aggctcccttcccca

SEQ ID NO: 799265 - DNA, 15 bp, Homo sapiens
ggctcccttccccac

SEQ ID NO: 799266 - DNA, 15 bp, Homo sapiens
gctcccttccccaca

SEQ ID NO: 799267 - DNA, 15 bp, Homo sapiens
ctcccttccccacaa

SEQ ID NO: 799268 - DNA, 15 bp, Homo sapiens
tcccttccccacaac

SEQ ID NO: 799269 - DNA, 15 bp, Homo sapiens
cccttccccacaacc

SEQ ID NO: 799270 - DNA, 15 bp, Homo sapiens
ccttccccacaacca

SEQ ID NO: 799271 - DNA, 15 bp, Homo sapiens
cttccccacaaccag

SEQ ID NO: 799272 - DNA, 15 bp, Homo sapiens
ttccccacaaccagg

SEQ ID NO: 799273 - DNA, 15 bp, Homo sapiens
tccccacaaccaggc

SEQ ID NO: 799274 - DNA, 15 bp, Homo sapiens
ccccacaaccaggct

SEQ ID NO: 799275 - DNA, 15 bp, Homo sapiens
cccacaaccaggcta

SEQ ID NO: 799276 - DNA, 15 bp, Homo sapiens
ccacaaccaggctat

SEQ ID NO: 799277 - DNA, 15 bp, Homo sapiens
cacaaccaggctatg

SEQ ID NO: 799278 - DNA, 15 bp, Homo sapiens
acaaccaggctatga

SEQ ID NO: 799279 - DNA, 15 bp, Homo sapiens
caaccaggctatgat

SEQ ID NO: 799280 - DNA, 15 bp, Homo sapiens
aaccaggctatgata

SEQ ID NO: 799281 - DNA, 15 bp, Homo sapiens
accaggctatgataa

SEQ ID NO: 799282 - DNA, 15 bp, Homo sapiens
ccaggctatgataat

SEQ ID NO: 799283 - DNA, 15 bp, Homo sapiens
caggctatgataata

SEQ ID NO: 799284 - DNA, 15 bp, Homo sapiens
aggctatgataataa

SEQ ID NO: 799285 - DNA, 15 bp, Homo sapiens
ggctatgataataaa

SEQ ID NO: 799286 - DNA, 15 bp, Homo sapiens
gctatgataataaat

SEQ ID NO: 799287 - DNA, 15 bp, Homo sapiens
ctatgataataaatt

SEQ ID NO: 799288 - DNA, 15 bp, Homo sapiens
tatgataataaattt

SEQ ID NO: 799289 - DNA, 15 bp, Homo sapiens
atgataataaatttc

SEQ ID NO: 799290 - DNA, 15 bp, Homo sapiens
tgataataaatttca

SEQ ID NO: 799291 - DNA, 15 bp, Homo sapiens
gataataaatttcag

SEQ ID NO: 799292 - DNA, 15 bp, Homo sapiens
ataataaatttcaga

SEQ ID NO: 799293 - DNA, 15 bp, Homo sapiens
taataaatttcagaa

SEQ ID NO: 799294 - DNA, 15 bp, Homo sapiens
aataaatttcagaac

SEQ ID NO: 799295 - DNA, 15 bp, Homo sapiens
ataaatttcagaacc

SEQ ID NO: 799296 - DNA, 15 bp, Homo sapiens
taaatttcagaacct

SEQ ID NO: 799297 - DNA, 15 bp, Homo sapiens
aaatttcagaacctc

SEQ ID NO: 799298 - DNA, 15 bp, Homo sapiens
aatttcagaacctca

SEQ ID NO: 799299 - DNA, 15 bp, Homo sapiens
atttcagaacctcat

SEQ ID NO: 799300 - DNA, 15 bp, Homo sapiens
tttcagaacctcatc

SEQ ID NO: 799301 - DNA, 15 bp, Homo sapiens
ttcagaacctcatct

SEQ ID NO: 799302 - DNA, 15 bp, Homo sapiens
tcagaacctcatctc

SEQ ID NO: 799303 - DNA, 15 bp, Homo sapiens
cagaacctcatctcc

SEQ ID NO: 799304 - DNA, 15 bp, Homo sapiens
agaacctcatctccc

SEQ ID NO: 799305 - DNA, 15 bp, Homo sapiens
gaacctcatctccct

SEQ ID NO: 799306 - DNA, 15 bp, Homo sapiens
aacctcatctccctc

SEQ ID NO: 799307 - DNA, 15 bp, Homo sapiens
acctcatctccctct

SEQ ID NO: 799308 - DNA, 15 bp, Homo sapiens
cctcatctccctctg

SEQ ID NO: 799309 - DNA, 15 bp, Homo sapiens
ctcatctccctctgc

SEQ ID NO: 799310 - DNA, 15 bp, Homo sapiens
tcatctccctctgcg

SEQ ID NO: 799311 - DNA, 15 bp, Homo sapiens
catctccctctgcga

SEQ ID NO: 799312 - DNA, 15 bp, Homo sapiens
atctccctctgcgag

SEQ ID NO: 799313 - DNA, 15 bp, Homo sapiens
tctccctctgcgagt

SEQ ID NO: 799314 - DNA, 15 bp, Homo sapiens
ctccctctgcgagtg

SEQ ID NO: 799315 - DNA, 15 bp, Homo sapiens
tccctctgcgagtgt

SEQ ID NO: 799316 - DNA, 15 bp, Homo sapiens
ccctctgcgagtgtg

SEQ ID NO: 799317 - DNA, 15 bp, Homo sapiens
cctctgcgagtgtgg

SEQ ID NO: 799318 - DNA, 15 bp, Homo sapiens
ctctgcgagtgtgga

SEQ ID NO: 799319 - DNA, 15 bp, Homo sapiens
tctgcgagtgtggat

SEQ ID NO: 799320 - DNA, 15 bp, Homo sapiens
ctgcgagtgtggatt

SEQ ID NO: 799321 - DNA, 15 bp, Homo sapiens
tgcgagtgtggattc

SEQ ID NO: 799322 - DNA, 15 bp, Homo sapiens
gcgagtgtggattct

SEQ ID NO: 799323 - DNA, 15 bp, Homo sapiens
cgagtgtggattctc

SEQ ID NO: 799324 - DNA, 15 bp, Homo sapiens
gagtgtggattctct

SEQ ID NO: 799325 - DNA, 15 bp, Homo sapiens
agtgtggattctctc

SEQ ID NO: 799326 - DNA, 15 bp, Homo sapiens
gtgtggattctctcc

SEQ ID NO: 799327 - DNA, 15 bp, Homo sapiens
tgtggattctctccc

SEQ ID NO: 799328 - DNA, 15 bp, Homo sapiens
gtggattctctcccc

SEQ ID NO: 799329 - DNA, 15 bp, Homo sapiens
tggattctctcccca

SEQ ID NO: 799330 - DNA, 15 bp, Homo sapiens
ggattctctccccaa

SEQ ID NO: 799331 - DNA, 15 bp, Homo sapiens
gattctctccccaac

SEQ ID NO: 799332 - DNA, 15 bp, Homo sapiens
attctctccccaact

SEQ ID NO: 799333 - DNA, 15 bp, Homo sapiens
ttctctccccaacta

SEQ ID NO: 799334 - DNA, 15 bp, Homo sapiens
tctctccccaactaa

SEQ ID NO: 799335 - DNA, 15 bp, Homo sapiens
ctctccccaactaat

SEQ ID NO: 799336 - DNA, 15 bp, Homo sapiens
tctccccaactaatc

SEQ ID NO: 799337 - DNA, 15 bp, Homo sapiens
ctccccaactaatcc

SEQ ID NO: 799338 - DNA, 15 bp, Homo sapiens
tccccaactaatcct

SEQ ID NO: 799339 - DNA, 15 bp, Homo sapiens
ccccaactaatcctc

SEQ ID NO: 799340 - DNA, 15 bp, Homo sapiens
cccaactaatcctcc

SEQ ID NO: 799341 - DNA, 15 bp, Homo sapiens
ccaactaatcctcca

SEQ ID NO: 799342 - DNA, 15 bp, Homo sapiens
caactaatcctccaa

SEQ ID NO: 799343 - DNA, 15 bp, Homo sapiens
aactaatcctccaat

SEQ ID NO: 799344 - DNA, 15 bp, Homo sapiens
actaatcctccaata

SEQ ID NO: 799345 - DNA, 15 bp, Homo sapiens
ctaatcctccaatac

SEQ ID NO: 799346 - DNA, 15 bp, Homo sapiens
taatcctccaatact

SEQ ID NO: 799347 - DNA, 15 bp, Homo sapiens
aatcctccaatactc

SEQ ID NO: 799348 - DNA, 15 bp, Homo sapiens
atcctccaatactca

SEQ ID NO: 799349 - DNA, 15 bp, Homo sapiens
tcctccaatactcat

SEQ ID NO: 799350 - DNA, 15 bp, Homo sapiens
cctccaatactcatc

SEQ ID NO: 799351 - DNA, 15 bp, Homo sapiens
ctccaatactcatct

SEQ ID NO: 799352 - DNA, 15 bp, Homo sapiens
tccaatactcatctg

SEQ ID NO: 799353 - DNA, 15 bp, Homo sapiens
ccaatactcatctga

SEQ ID NO: 799354 - DNA, 15 bp, Homo sapiens
caatactcatctgag

SEQ ID NO: 799355 - DNA, 15 bp, Homo sapiens
aatactcatctgagc

SEQ ID NO: 799356 - DNA, 15 bp, Homo sapiens
atactcatctgagca

SEQ ID NO: 799357 - DNA, 15 bp, Homo sapiens
tactcatctgagcat

SEQ ID NO: 799358 - DNA, 15 bp, Homo sapiens
actcatctgagcata

SEQ ID NO: 799359 - DNA, 15 bp, Homo sapiens
ctcatctgagcataa

SEQ ID NO: 799360 - DNA, 15 bp, Homo sapiens
tcatctgagcataac

SEQ ID NO: 799361 - DNA, 15 bp, Homo sapiens
catctgagcataaca

SEQ ID NO: 799362 - DNA, 15 bp, Homo sapiens
atctgagcataacac

SEQ ID NO: 799363 - DNA, 15 bp, Homo sapiens
tctgagcataacact

SEQ ID NO: 799364 - DNA, 15 bp, Homo sapiens
ctgagcataacactc

SEQ ID NO: 799365 - DNA, 15 bp, Homo sapiens
tgagcataacactcc

SEQ ID NO: 799366 - DNA, 15 bp, Homo sapiens
gagcataacactccc

SEQ ID NO: 799367 - DNA, 15 bp, Homo sapiens
agcataacactcccg

SEQ ID NO: 799368 - DNA, 15 bp, Homo sapiens
gcataacactcccga

SEQ ID NO: 799369 - DNA, 15 bp, Homo sapiens
cataacactcccgat

SEQ ID NO: 799370 - DNA, 15 bp, Homo sapiens
ataacactcccgatg

SEQ ID NO: 799371 - DNA, 15 bp, Homo sapiens
taacactcccgatga

SEQ ID NO: 799372 - DNA, 15 bp, Homo sapiens
aacactcccgatgaa

SEQ ID NO: 799373 - DNA, 15 bp, Homo sapiens
acactcccgatgaaa

SEQ ID NO: 799374 - DNA, 15 bp, Homo sapiens
cactcccgatgaaac

SEQ ID NO: 799375 - DNA, 15 bp, Homo sapiens
actcccgatgaaacc

SEQ ID NO: 799376 - DNA, 15 bp, Homo sapiens
ctcccgatgaaacca

SEQ ID NO: 799377 - DNA, 15 bp, Homo sapiens
tcccgatgaaaccac

SEQ ID NO: 799378 - DNA, 15 bp, Homo sapiens
cccgatgaaaccaca

SEQ ID NO: 799379 - DNA, 15 bp, Homo sapiens
ccgatgaaaccacac

SEQ ID NO: 799380 - DNA, 15 bp, Homo sapiens
cgatgaaaccacact

SEQ ID NO: 799381 - DNA, 15 bp, Homo sapiens
gatgaaaccacactt

SEQ ID NO: 799382 - DNA, 15 bp, Homo sapiens
atgaaaccacacttg

SEQ ID NO: 799383 - DNA, 15 bp, Homo sapiens
tgaaaccacacttgt

SEQ ID NO: 799384 - DNA, 15 bp, Homo sapiens
gaaaccacacttgtc

SEQ ID NO: 799385 - DNA, 15 bp, Homo sapiens
aaaccacacttgtcc

SEQ ID NO: 799386 - DNA, 15 bp, Homo sapiens
aaccacacttgtccc

SEQ ID NO: 799387 - DNA, 15 bp, Homo sapiens
accacacttgtccct

SEQ ID NO: 799388 - DNA, 15 bp, Homo sapiens
ccacacttgtccctt

SEQ ID NO: 799389 - DNA, 15 bp, Homo sapiens
cacacttgtcccttc

SEQ ID NO: 799390 - DNA, 15 bp, Homo sapiens
acacttgtcccttct

SEQ ID NO: 799391 - DNA, 15 bp, Homo sapiens
cacttgtcccttcta

SEQ ID NO: 799392 - DNA, 15 bp, Homo sapiens
acttgtcccttctaa

SEQ ID NO: 799393 - DNA, 15 bp, Homo sapiens
cttgtcccttctaaa

SEQ ID NO: 799394 - DNA, 15 bp, Homo sapiens
ttgtcccttctaaac

SEQ ID NO: 799395 - DNA, 15 bp, Homo sapiens
tgtcccttctaaaca

SEQ ID NO: 799396 - DNA, 15 bp, Homo sapiens
gtcccttctaaacac

SEQ ID NO: 799397 - DNA, 15 bp, Homo sapiens
tcccttctaaacact

SEQ ID NO: 799398 - DNA, 15 bp, Homo sapiens
cccttctaaacactt

SEQ ID NO: 799399 - DNA, 15 bp, Homo sapiens
ccttctaaacacttc

SEQ ID NO: 799400 - DNA, 15 bp, Homo sapiens
cttctaaacacttca

SEQ ID NO: 799401 - DNA, 15 bp, Homo sapiens
ttctaaacacttcaa

SEQ ID NO: 799402 - DNA, 15 bp, Homo sapiens
tctaaacacttcaat

SEQ ID NO: 799403 - DNA, 15 bp, Homo sapiens
ctaaacacttcaatg

SEQ ID NO: 799404 - DNA, 15 bp, Homo sapiens
taaacacttcaatga

SEQ ID NO: 799405 - DNA, 15 bp, Homo sapiens
aaacacttcaatgaa

SEQ ID NO: 799406 - DNA, 15 bp, Homo sapiens
aacacttcaatgaat

SEQ ID NO: 799407 - DNA, 15 bp, Homo sapiens
acacttcaatgaatt

SEQ ID NO: 799408 - DNA, 15 bp, Homo sapiens
cacttcaatgaattc

SEQ ID NO: 799409 - DNA, 15 bp, Homo sapiens
acttcaatgaattcc

SEQ ID NO: 799410 - DNA, 15 bp, Homo sapiens
cttcaatgaattccc

SEQ ID NO: 799411 - DNA, 15 bp, Homo sapiens
ttcaatgaattccct

SEQ ID NO: 799412 - DNA, 15 bp, Homo sapiens
tcaatgaattccctt

SEQ ID NO: 799413 - DNA, 15 bp, Homo sapiens
caatgaattccctta

SEQ ID NO: 799414 - DNA, 15 bp, Homo sapiens
aatgaattcccttat

SEQ ID NO: 799415 - DNA, 15 bp, Homo sapiens
atgaattcccttatc

SEQ ID NO: 799416 - DNA, 15 bp, Homo sapiens
tgaattcccttatct

SEQ ID NO: 799417 - DNA, 15 bp, Homo sapiens
gaattcccttatctt

SEQ ID NO: 799418 - DNA, 15 bp, Homo sapiens
aattcccttatcttc

SEQ ID NO: 799419 - DNA, 15 bp, Homo sapiens
attcccttatcttcc

SEQ ID NO: 799420 - DNA, 15 bp, Homo sapiens
ttcccttatcttcca

SEQ ID NO: 799421 - DNA, 15 bp, Homo sapiens
tcccttatcttccag

SEQ ID NO: 799422 - DNA, 15 bp, Homo sapiens
cccttatcttccagt

SEQ ID NO: 799423 - DNA, 15 bp, Homo sapiens
ccttatcttccagtc

SEQ ID NO: 799424 - DNA, 15 bp, Homo sapiens
cttatcttccagtct

SEQ ID NO: 799425 - DNA, 15 bp, Homo sapiens
ttatcttccagtctg

SEQ ID NO: 799426 - DNA, 15 bp, Homo sapiens
tatcttccagtctgg

SEQ ID NO: 799427 - DNA, 15 bp, Homo sapiens
atcttccagtctgga

SEQ ID NO: 799428 - DNA, 15 bp, Homo sapiens
tcttccagtctggaa

SEQ ID NO: 799429 - DNA, 15 bp, Homo sapiens
cttccagtctggaat

SEQ ID NO: 799430 - DNA, 15 bp, Homo sapiens
ttccagtctggaatg

SEQ ID NO: 799431 - DNA, 15 bp, Homo sapiens
tccagtctggaatgt

SEQ ID NO: 799432 - DNA, 15 bp, Homo sapiens
ccagtctggaatgta

SEQ ID NO: 799433 - DNA, 15 bp, Homo sapiens
cagtctggaatgtaa

SEQ ID NO: 799434 - DNA, 15 bp, Homo sapiens
agtctggaatgtaac

SEQ ID NO: 799435 - DNA, 15 bp, Homo sapiens
gtctggaatgtaacc

SEQ ID NO: 799436 - DNA, 15 bp, Homo sapiens
tctggaatgtaacca

SEQ ID NO: 799437 - DNA, 15 bp, Homo sapiens
ctggaatgtaaccac

SEQ ID NO: 799438 - DNA, 15 bp, Homo sapiens
tggaatgtaaccaca

SEQ ID NO: 799439 - DNA, 15 bp, Homo sapiens
ggaatgtaaccacaa

SEQ ID NO: 799440 - DNA, 15 bp, Homo sapiens
gaatgtaaccacaaa

SEQ ID NO: 799441 - DNA, 15 bp, Homo sapiens
aatgtaaccacaaaa

SEQ ID NO: 799442 - DNA, 15 bp, Homo sapiens
atgtaaccacaaaag

SEQ ID NO: 799443 - DNA, 15 bp, Homo sapiens
tgtaaccacaaaaga

SEQ ID NO: 799444 - DNA, 15 bp, Homo sapiens
gtaaccacaaaagaa

SEQ ID NO: 799445 - DNA, 15 bp, Homo sapiens
taaccacaaaagaat

SEQ ID NO: 799446 - DNA, 15 bp, Homo sapiens
aaccacaaaagaata

SEQ ID NO: 799447 - DNA, 15 bp, Homo sapiens
accacaaaagaatat

SEQ ID NO: 799448 - DNA, 15 bp, Homo sapiens
ccacaaaagaatatc

SEQ ID NO: 799449 - DNA, 15 bp, Homo sapiens
cacaaaagaatatca

SEQ ID NO: 799450 - DNA, 15 bp, Homo sapiens
acaaaagaatatcaa

SEQ ID NO: 799451 - DNA, 15 bp, Homo sapiens
caaaagaatatcaat

SEQ ID NO: 799452 - DNA, 15 bp, Homo sapiens
aaaagaatatcaatg

SEQ ID NO: 799453 - DNA, 15 bp, Homo sapiens
aaagaatatcaatga

SEQ ID NO: 799454 - DNA, 15 bp, Homo sapiens
aagaatatcaatgag

SEQ ID NO: 799455 - DNA, 15 bp, Homo sapiens
agaatatcaatgaga

SEQ ID NO: 799456 - DNA, 15 bp, Homo sapiens
gaatatcaatgagag

SEQ ID NO: 799457 - DNA, 15 bp, Homo sapiens
aatatcaatgagagg

SEQ ID NO: 799458 - DNA, 15 bp, Homo sapiens
atatcaatgagaggc

SEQ ID NO: 799459 - DNA, 15 bp, Homo sapiens
tatcaatgagaggca

SEQ ID NO: 799460 - DNA, 15 bp, Homo sapiens
atcaatgagaggcat

SEQ ID NO: 799461 - DNA, 15 bp, Homo sapiens
tcaatgagaggcatg

SEQ ID NO: 799462 - DNA, 15 bp, Homo sapiens
caatgagaggcatga

SEQ ID NO: 799463 - DNA, 15 bp, Homo sapiens
aatgagaggcatgag

SEQ ID NO: 799464 - DNA, 15 bp, Homo sapiens
atgagaggcatgagt

SEQ ID NO: 799465 - DNA, 15 bp, Homo sapiens
tgagaggcatgagtg

SEQ ID NO: 799466 - DNA, 15 bp, Homo sapiens
gagaggcatgagtgg

SEQ ID NO: 799467 - DNA, 15 bp, Homo sapiens
agaggcatgagtgga

SEQ ID NO: 799468 - DNA, 15 bp, Homo sapiens
gaggcatgagtggag

SEQ ID NO: 799469 - DNA, 15 bp, Homo sapiens
aggcatgagtggagc

SEQ ID NO: 799470 - DNA, 15 bp, Homo sapiens
ggcatgagtggagct

SEQ ID NO: 799471 - DNA, 15 bp, Homo sapiens
gcatgagtggagctg

SEQ ID NO: 799472 - DNA, 15 bp, Homo sapiens
catgagtggagctgg

SEQ ID NO: 799473 - DNA, 15 bp, Homo sapiens
atgagtggagctggc

SEQ ID NO: 799474 - DNA, 15 bp, Homo sapiens
tgagtggagctggct

SEQ ID NO: 799475 - DNA, 15 bp, Homo sapiens
gagtggagctggcta

SEQ ID NO: 799476 - DNA, 15 bp, Homo sapiens
agtggagctggctac

SEQ ID NO: 799477 - DNA, 15 bp, Homo sapiens
gtggagctggctaca

SEQ ID NO: 799478 - DNA, 15 bp, Homo sapiens
tggagctggctacaa

SEQ ID NO: 799479 - DNA, 15 bp, Homo sapiens
ggagctggctacaaa

SEQ ID NO: 799480 - DNA, 15 bp, Homo sapiens
gagctggctacaaat

SEQ ID NO: 799481 - DNA, 15 bp, Homo sapiens
agctggctacaaatg

SEQ ID NO: 799482 - DNA, 15 bp, Homo sapiens
gctggctacaaatga

SEQ ID NO: 799483 - DNA, 15 bp, Homo sapiens
ctggctacaaatgaa

SEQ ID NO: 799484 - DNA, 15 bp, Homo sapiens
tggctacaaatgaaa

SEQ ID NO: 799485 - DNA, 15 bp, Homo sapiens
ggctacaaatgaaac

SEQ ID NO: 799486 - DNA, 15 bp, Homo sapiens
gctacaaatgaaacg

SEQ ID NO: 799487 - DNA, 15 bp, Homo sapiens
ctacaaatgaaacgt

SEQ ID NO: 799488 - DNA, 15 bp, Homo sapiens
tacaaatgaaacgtg

SEQ ID NO: 799489 - DNA, 15 bp, Homo sapiens
acaaatgaaacgtga

SEQ ID NO: 799490 - DNA, 15 bp, Homo sapiens
caaatgaaacgtgaa

SEQ ID NO: 799491 - DNA, 15 bp, Homo sapiens
aaatgaaacgtgaac

SEQ ID NO: 799492 - DNA, 15 bp, Homo sapiens
aatgaaacgtgaaca

SEQ ID NO: 799493 - DNA, 15 bp, Homo sapiens
atgaaacgtgaacaa

SEQ ID NO: 799494 - DNA, 15 bp, Homo sapiens
tgaaacgtgaacaaa

SEQ ID NO: 799495 - DNA, 15 bp, Homo sapiens
gaaacgtgaacaaaa

SEQ ID NO: 799496 - DNA, 15 bp, Homo sapiens
aaacgtgaacaaaat

SEQ ID NO: 799497 - DNA, 15 bp, Homo sapiens
aacgtgaacaaaatc

SEQ ID NO: 799498 - DNA, 15 bp, Homo sapiens
acgtgaacaaaatct

SEQ ID NO: 799499 - DNA, 15 bp, Homo sapiens
cgtgaacaaaatctt

SEQ ID NO: 799500 - DNA, 15 bp, Homo sapiens
gtgaacaaaatcttg

SEQ ID NO: 799501 - DNA, 15 bp, Homo sapiens
tgaacaaaatcttgg

SEQ ID NO: 799502 - DNA, 15 bp, Homo sapiens
gaacaaaatcttggt

SEQ ID NO: 799503 - DNA, 15 bp, Homo sapiens
aacaaaatcttggtg

SEQ ID NO: 799504 - DNA, 15 bp, Homo sapiens
acaaaatcttggtgg

SEQ ID NO: 799505 - DNA, 15 bp, Homo sapiens
caaaatcttggtgga

SEQ ID NO: 799506 - DNA, 15 bp, Homo sapiens
aaaatcttggtggag

SEQ ID NO: 799507 - DNA, 15 bp, Homo sapiens
aaatcttggtggagt

SEQ ID NO: 799508 - DNA, 15 bp, Homo sapiens
aatcttggtggagtg

SEQ ID NO: 799509 - DNA, 15 bp, Homo sapiens
atcttggtggagtgc

SEQ ID NO: 799510 - DNA, 15 bp, Homo sapiens
tcttggtggagtgca

SEQ ID NO: 799511 - DNA, 15 bp, Homo sapiens
cttggtggagtgcaa

SEQ ID NO: 799512 - DNA, 15 bp, Homo sapiens
ttggtggagtgcaat

SEQ ID NO: 799513 - DNA, 15 bp, Homo sapiens
tggtggagtgcaata

SEQ ID NO: 799514 - DNA, 15 bp, Homo sapiens
ggtggagtgcaatag

SEQ ID NO: 799515 - DNA, 15 bp, Homo sapiens
gtggagtgcaatagg

SEQ ID NO: 799516 - DNA, 15 bp, Homo sapiens
tggagtgcaataggg

SEQ ID NO: 799517 - DNA, 15 bp, Homo sapiens
ggagtgcaatagggt

SEQ ID NO: 799518 - DNA, 15 bp, Homo sapiens
gagtgcaatagggtt

SEQ ID NO: 799519 - DNA, 15 bp, Homo sapiens
agtgcaatagggttt

SEQ ID NO: 799520 - DNA, 15 bp, Homo sapiens
gtgcaatagggtttc

SEQ ID NO: 799521 - DNA, 15 bp, Homo sapiens
tgcaatagggtttca

SEQ ID NO: 799522 - DNA, 15 bp, Homo sapiens
gcaatagggtttcag

SEQ ID NO: 799523 - DNA, 15 bp, Homo sapiens
caatagggtttcagc

SEQ ID NO: 799524 - DNA, 15 bp, Homo sapiens
aatagggtttcagca

SEQ ID NO: 799525 - DNA, 15 bp, Homo sapiens
atagggtttcagcaa

SEQ ID NO: 799526 - DNA, 15 bp, Homo sapiens
tagggtttcagcaag

SEQ ID NO: 799527 - DNA, 15 bp, Homo sapiens
agggtttcagcaaga

SEQ ID NO: 799528 - DNA, 15 bp, Homo sapiens
gggtttcagcaagaa

SEQ ID NO: 799529 - DNA, 15 bp, Homo sapiens
ggtttcagcaagaag

SEQ ID NO: 799530 - DNA, 15 bp, Homo sapiens
gtttcagcaagaagg

SEQ ID NO: 799531 - DNA, 15 bp, Homo sapiens
tttcagcaagaagga

SEQ ID NO: 799532 - DNA, 15 bp, Homo sapiens
ttcagcaagaaggat

SEQ ID NO: 799533 - DNA, 15 bp, Homo sapiens
tcagcaagaaggatc

SEQ ID NO: 799534 - DNA, 15 bp, Homo sapiens
cagcaagaaggatcc

SEQ ID NO: 799535 - DNA, 15 bp, Homo sapiens
agcaagaaggatccc

SEQ ID NO: 799536 - DNA, 15 bp, Homo sapiens
gcaagaaggatccca

SEQ ID NO: 799537 - DNA, 15 bp, Homo sapiens
caagaaggatcccag

SEQ ID NO: 799538 - DNA, 15 bp, Homo sapiens
aagaaggatcccagg

SEQ ID NO: 799539 - DNA, 15 bp, Homo sapiens
agaaggatcccaggt

SEQ ID NO: 799540 - DNA, 15 bp, Homo sapiens
gaaggatcccaggtt

SEQ ID NO: 799541 - DNA, 15 bp, Homo sapiens
aaggatcccaggttg

SEQ ID NO: 799542 - DNA, 15 bp, Homo sapiens
aggatcccaggttgc

SEQ ID NO: 799543 - DNA, 15 bp, Homo sapiens
ggatcccaggttgca

SEQ ID NO: 799544 - DNA, 15 bp, Homo sapiens
gatcccaggttgcac

SEQ ID NO: 799545 - DNA, 15 bp, Homo sapiens
atcccaggttgcact

SEQ ID NO: 799546 - DNA, 15 bp, Homo sapiens
tcccaggttgcactt

SEQ ID NO: 799547 - DNA, 15 bp, Homo sapiens
cccaggttgcacttc

SEQ ID NO: 799548 - DNA, 15 bp, Homo sapiens
ccaggttgcacttcc

SEQ ID NO: 799549 - DNA, 15 bp, Homo sapiens
caggttgcacttccc

SEQ ID NO: 799550 - DNA, 15 bp, Homo sapiens
aggttgcacttccca

SEQ ID NO: 799551 - DNA, 15 bp, Homo sapiens
ggttgcacttcccag

SEQ ID NO: 799552 - DNA, 15 bp, Homo sapiens
gttgcacttcccagg

SEQ ID NO: 799553 - DNA, 15 bp, Homo sapiens
ttgcacttcccaggt

SEQ ID NO: 799554 - DNA, 15 bp, Homo sapiens
tgcacttcccaggtg

SEQ ID NO: 799555 - DNA, 15 bp, Homo sapiens
gcacttcccaggtgg

SEQ ID NO: 799556 - DNA, 15 bp, Homo sapiens
cacttcccaggtgga

SEQ ID NO: 799557 - DNA, 15 bp, Homo sapiens
acttcccaggtggaa

SEQ ID NO: 799558 - DNA, 15 bp, Homo sapiens
cttcccaggtggaag

SEQ ID NO: 799559 - DNA, 15 bp, Homo sapiens
ttcccaggtggaagt

SEQ ID NO: 799560 - DNA, 15 bp, Homo sapiens
tcccaggtggaagtg

SEQ ID NO: 799561 - DNA, 15 bp, Homo sapiens
cccaggtggaagtgg

SEQ ID NO: 799562 - DNA, 15 bp, Homo sapiens
ccaggtggaagtggg

SEQ ID NO: 799563 - DNA, 15 bp, Homo sapiens
caggtggaagtgggt

SEQ ID NO: 799564 - DNA, 15 bp, Homo sapiens
aggtggaagtgggtt

SEQ ID NO: 799565 - DNA, 15 bp, Homo sapiens
ggtggaagtgggttc

SEQ ID NO: 799566 - DNA, 15 bp, Homo sapiens
gtggaagtgggttcc

SEQ ID NO: 799567 - DNA, 15 bp, Homo sapiens
tggaagtgggttcct

SEQ ID NO: 799568 - DNA, 15 bp, Homo sapiens
ggaagtgggttcctt

SEQ ID NO: 799569 - DNA, 15 bp, Homo sapiens
gaagtgggttcctta

SEQ ID NO: 799570 - DNA, 15 bp, Homo sapiens
aagtgggttccttag

SEQ ID NO: 799571 - DNA, 15 bp, Homo sapiens
agtgggttccttaga

SEQ ID NO: 799572 - DNA, 15 bp, Homo sapiens
gtgggttccttagac

SEQ ID NO: 799573 - DNA, 15 bp, Homo sapiens
tgggttccttagact

SEQ ID NO: 799574 - DNA, 15 bp, Homo sapiens
gggttccttagacta

SEQ ID NO: 799575 - DNA, 15 bp, Homo sapiens
ggttccttagactac

SEQ ID NO: 799576 - DNA, 15 bp, Homo sapiens
gttccttagactaca

SEQ ID NO: 799577 - DNA, 15 bp, Homo sapiens
ttccttagactacat

SEQ ID NO: 799578 - DNA, 15 bp, Homo sapiens
tccttagactacatt

SEQ ID NO: 799579 - DNA, 15 bp, Homo sapiens
ccttagactacattc

SEQ ID NO: 799580 - DNA, 15 bp, Homo sapiens
cttagactacattcg

SEQ ID NO: 799581 - DNA, 15 bp, Homo sapiens
ttagactacattcgg

SEQ ID NO: 799582 - DNA, 15 bp, Homo sapiens
tagactacattcggt

SEQ ID NO: 799583 - DNA, 15 bp, Homo sapiens
agactacattcggtg

SEQ ID NO: 799584 - DNA, 15 bp, Homo sapiens
gactacattcggtga

SEQ ID NO: 799585 - DNA, 15 bp, Homo sapiens
actacattcggtgag

SEQ ID NO: 799586 - DNA, 15 bp, Homo sapiens
ctacattcggtgagt

SEQ ID NO: 799587 - DNA, 15 bp, Homo sapiens
tacattcggtgagtc

SEQ ID NO: 799588 - DNA, 15 bp, Homo sapiens
acattcggtgagtca

SEQ ID NO: 799589 - DNA, 15 bp, Homo sapiens
cattcggtgagtcag

SEQ ID NO: 799590 - DNA, 15 bp, Homo sapiens
attcggtgagtcagg

SEQ ID NO: 799591 - DNA, 15 bp, Homo sapiens
ttcggtgagtcaggt

SEQ ID NO: 799592 - DNA, 15 bp, Homo sapiens
tcggtgagtcaggtg

SEQ ID NO: 799593 - DNA, 15 bp, Homo sapiens
cggtgagtcaggtgg

SEQ ID NO: 799594 - DNA, 15 bp, Homo sapiens
ggtgagtcaggtggt

SEQ ID NO: 799595 - DNA, 15 bp, Homo sapiens
gtgagtcaggtggtc

SEQ ID NO: 799596 - DNA, 15 bp, Homo sapiens
tgagtcaggtggtca

SEQ ID NO: 799597 - DNA, 15 bp, Homo sapiens
gagtcaggtggtcac

SEQ ID NO: 799598 - DNA, 15 bp, Homo sapiens
agtcaggtggtcacc

SEQ ID NO: 799599 - DNA, 15 bp, Homo sapiens
gtcaggtggtcacct

SEQ ID NO: 799600 - DNA, 15 bp, Homo sapiens
tcaggtggtcacctg

SEQ ID NO: 799601 - DNA, 15 bp, Homo sapiens
caggtggtcacctgt

SEQ ID NO: 799602 - DNA, 15 bp, Homo sapiens
aggtggtcacctgtg

SEQ ID NO: 799603 - DNA, 15 bp, Homo sapiens
ggtggtcacctgtgg

SEQ ID NO: 799604 - DNA, 15 bp, Homo sapiens
gtggtcacctgtggc

SEQ ID NO: 799605 - DNA, 15 bp, Homo sapiens
tggtcacctgtggcc

SEQ ID NO: 799606 - DNA, 15 bp, Homo sapiens
ggtcacctgtggcca

SEQ ID NO: 799607 - DNA, 15 bp, Homo sapiens
gtcacctgtggccaa

SEQ ID NO: 799608 - DNA, 15 bp, Homo sapiens
tcacctgtggccaag

SEQ ID NO: 799609 - DNA, 15 bp, Homo sapiens
cacctgtggccaagt

SEQ ID NO: 799610 - DNA, 15 bp, Homo sapiens
acctgtggccaagtg

SEQ ID NO: 799611 - DNA, 15 bp, Homo sapiens
cctgtggccaagtgg

SEQ ID NO: 799612 - DNA, 15 bp, Homo sapiens
ctgtggccaagtgga

SEQ ID NO: 799613 - DNA, 15 bp, Homo sapiens
tgtggccaagtggaa

SEQ ID NO: 799614 - DNA, 15 bp, Homo sapiens
gtggccaagtggaaa

SEQ ID NO: 799615 - DNA, 15 bp, Homo sapiens
tggccaagtggaaag

SEQ ID NO: 799616 - DNA, 15 bp, Homo sapiens
ggccaagtggaaaga

SEQ ID NO: 799617 - DNA, 15 bp, Homo sapiens
gccaagtggaaagac

SEQ ID NO: 799618 - DNA, 15 bp, Homo sapiens
ccaagtggaaagacc

SEQ ID NO: 799619 - DNA, 15 bp, Homo sapiens
caagtggaaagaccc

SEQ ID NO: 799620 - DNA, 15 bp, Homo sapiens
aagtggaaagaccct

SEQ ID NO: 799621 - DNA, 15 bp, Homo sapiens
agtggaaagaccctt

SEQ ID NO: 799622 - DNA, 15 bp, Homo sapiens
gtggaaagacccttc

SEQ ID NO: 799623 - DNA, 15 bp, Homo sapiens
tggaaagacccttca

SEQ ID NO: 799624 - DNA, 15 bp, Homo sapiens
ggaaagacccttcaa

SEQ ID NO: 799625 - DNA, 15 bp, Homo sapiens
gaaagacccttcaag

SEQ ID NO: 799626 - DNA, 15 bp, Homo sapiens
aaagacccttcaagg

SEQ ID NO: 799627 - DNA, 15 bp, Homo sapiens
aagacccttcaaggc

SEQ ID NO: 799628 - DNA, 15 bp, Homo sapiens
agacccttcaaggcc

SEQ ID NO: 799629 - DNA, 15 bp, Homo sapiens
gacccttcaaggcca

SEQ ID NO: 799630 - DNA, 15 bp, Homo sapiens
acccttcaaggccaa

SEQ ID NO: 799631 - DNA, 15 bp, Homo sapiens
cccttcaaggccaag

SEQ ID NO: 799632 - DNA, 15 bp, Homo sapiens
ccttcaaggccaagg

SEQ ID NO: 799633 - DNA, 15 bp, Homo sapiens
cttcaaggccaagga

SEQ ID NO: 799634 - DNA, 15 bp, Homo sapiens
ttcaaggccaaggaa

SEQ ID NO: 799635 - DNA, 15 bp, Homo sapiens
tcaaggccaaggaac

SEQ ID NO: 799636 - DNA, 15 bp, Homo sapiens
caaggccaaggaacc

SEQ ID NO: 799637 - DNA, 15 bp, Homo sapiens
aaggccaaggaacca

SEQ ID NO: 799638 - DNA, 15 bp, Homo sapiens
aggccaaggaaccag

SEQ ID NO: 799639 - DNA, 15 bp, Homo sapiens
ggccaaggaaccaga

SEQ ID NO: 799640 - DNA, 15 bp, Homo sapiens
gccaaggaaccagac

SEQ ID NO: 799641 - DNA, 15 bp, Homo sapiens
ccaaggaaccagaca

SEQ ID NO: 799642 - DNA, 15 bp, Homo sapiens
caaggaaccagacaa

SEQ ID NO: 799643 - DNA, 15 bp, Homo sapiens
aaggaaccagacaat

SEQ ID NO: 799644 - DNA, 15 bp, Homo sapiens
aggaaccagacaatg

SEQ ID NO: 799645 - DNA, 15 bp, Homo sapiens
ggaaccagacaatgt

SEQ ID NO: 799646 - DNA, 15 bp, Homo sapiens
gaaccagacaatgtc

SEQ ID NO: 799647 - DNA, 15 bp, Homo sapiens
aaccagacaatgtct

SEQ ID NO: 799648 - DNA, 15 bp, Homo sapiens
accagacaatgtctt

SEQ ID NO: 799649 - DNA, 15 bp, Homo sapiens
ccagacaatgtcttc

SEQ ID NO: 799650 - DNA, 15 bp, Homo sapiens
cagacaatgtcttca

SEQ ID NO: 799651 - DNA, 15 bp, Homo sapiens
agacaatgtcttcaa

SEQ ID NO: 799652 - DNA, 15 bp, Homo sapiens
gacaatgtcttcaag

SEQ ID NO: 799653 - DNA, 15 bp, Homo sapiens
acaatgtcttcaagg

SEQ ID NO: 799654 - DNA, 15 bp, Homo sapiens
caatgtcttcaaggc

SEQ ID NO: 799655 - DNA, 15 bp, Homo sapiens
aatgtcttcaaggca

SEQ ID NO: 799656 - DNA, 15 bp, Homo sapiens
atgtcttcaaggcag

SEQ ID NO: 799657 - DNA, 15 bp, Homo sapiens
tgtcttcaaggcagt

SEQ ID NO: 799658 - DNA, 15 bp, Homo sapiens
gtcttcaaggcagtc

SEQ ID NO: 799659 - DNA, 15 bp, Homo sapiens
tcttcaaggcagtct

SEQ ID NO: 799660 - DNA, 15 bp, Homo sapiens
cttcaaggcagtctt

SEQ ID NO: 799661 - DNA, 15 bp, Homo sapiens
ttcaaggcagtcttg

SEQ ID NO: 799662 - DNA, 15 bp, Homo sapiens
tcaaggcagtcttga

SEQ ID NO: 799663 - DNA, 15 bp, Homo sapiens
caaggcagtcttgag

SEQ ID NO: 799664 - DNA, 15 bp, Homo sapiens
aaggcagtcttgagt

SEQ ID NO: 799665 - DNA, 15 bp, Homo sapiens
aggcagtcttgagtt

SEQ ID NO: 799666 - DNA, 15 bp, Homo sapiens
ggcagtcttgagtta

SEQ ID NO: 799667 - DNA, 15 bp, Homo sapiens
gcagtcttgagttat

SEQ ID NO: 799668 - DNA, 15 bp, Homo sapiens
cagtcttgagttatc

SEQ ID NO: 799669 - DNA, 15 bp, Homo sapiens
agtcttgagttatcc

SEQ ID NO: 799670 - DNA, 15 bp, Homo sapiens
gtcttgagttatcct

SEQ ID NO: 799671 - DNA, 15 bp, Homo sapiens
tcttgagttatcctg

SEQ ID NO: 799672 - DNA, 15 bp, Homo sapiens
cttgagttatcctgc

SEQ ID NO: 799673 - DNA, 15 bp, Homo sapiens
ttgagttatcctgct

SEQ ID NO: 799674 - DNA, 15 bp, Homo sapiens
tgagttatcctgctg

SEQ ID NO: 799675 - DNA, 15 bp, Homo sapiens
gagttatcctgctgg

SEQ ID NO: 799676 - DNA, 15 bp, Homo sapiens
agttatcctgctggg

SEQ ID NO: 799677 - DNA, 15 bp, Homo sapiens
gttatcctgctgggg

SEQ ID NO: 799678 - DNA, 15 bp, Homo sapiens
ttatcctgctggggc

SEQ ID NO: 799679 - DNA, 15 bp, Homo sapiens
tatcctgctggggcc

SEQ ID NO: 799680 - DNA, 15 bp, Homo sapiens
atcctgctggggcct

SEQ ID NO: 799681 - DNA, 15 bp, Homo sapiens
tcctgctggggcctg

SEQ ID NO: 799682 - DNA, 15 bp, Homo sapiens
cctgctggggcctgg

SEQ ID NO: 799683 - DNA, 15 bp, Homo sapiens
ctgctggggcctggc

SEQ ID NO: 799684 - DNA, 15 bp, Homo sapiens
tgctggggcctggca

SEQ ID NO: 799685 - DNA, 15 bp, Homo sapiens
gctggggcctggcag

SEQ ID NO: 799686 - DNA, 15 bp, Homo sapiens
ctggggcctggcagt

SEQ ID NO: 799687 - DNA, 15 bp, Homo sapiens
tggggcctggcagtt

SEQ ID NO: 799688 - DNA, 15 bp, Homo sapiens
ggggcctggcagttg

SEQ ID NO: 799689 - DNA, 15 bp, Homo sapiens
gggcctggcagttgg

SEQ ID NO: 799690 - DNA, 15 bp, Homo sapiens
ggcctggcagttggc

SEQ ID NO: 799691 - DNA, 15 bp, Homo sapiens
gcctggcagttggca

SEQ ID NO: 799692 - DNA, 15 bp, Homo sapiens
cctggcagttggcag

SEQ ID NO: 799693 - DNA, 15 bp, Homo sapiens
ctggcagttggcagt

SEQ ID NO: 799694 - DNA, 15 bp, Homo sapiens
tggcagttggcagtc

SEQ ID NO: 799695 - DNA, 15 bp, Homo sapiens
ggcagttggcagtct

SEQ ID NO: 799696 - DNA, 15 bp, Homo sapiens
gcagttggcagtcta

SEQ ID NO: 799697 - DNA, 15 bp, Homo sapiens
cagttggcagtctaa

SEQ ID NO: 799698 - DNA, 15 bp, Homo sapiens
agttggcagtctaag

SEQ ID NO: 799699 - DNA, 15 bp, Homo sapiens
gttggcagtctaagt

SEQ ID NO: 799700 - DNA, 15 bp, Homo sapiens
ttggcagtctaagtg

SEQ ID NO: 799701 - DNA, 15 bp, Homo sapiens
tggcagtctaagtgg

SEQ ID NO: 799702 - DNA, 15 bp, Homo sapiens
ggcagtctaagtggt

SEQ ID NO: 799703 - DNA, 15 bp, Homo sapiens
gcagtctaagtggta

SEQ ID NO: 799704 - DNA, 15 bp, Homo sapiens
cagtctaagtggtag

SEQ ID NO: 799705 - DNA, 15 bp, Homo sapiens
agtctaagtggtagg

SEQ ID NO: 799706 - DNA, 15 bp, Homo sapiens
gtctaagtggtaggg

SEQ ID NO: 799707 - DNA, 15 bp, Homo sapiens
tctaagtggtagggg

SEQ ID NO: 799708 - DNA, 15 bp, Homo sapiens
ctaagtggtaggggg

SEQ ID NO: 799709 - DNA, 15 bp, Homo sapiens
taagtggtagggggt

SEQ ID NO: 799710 - DNA, 15 bp, Homo sapiens
aagtggtagggggtg

SEQ ID NO: 799711 - DNA, 15 bp, Homo sapiens
agtggtagggggtga

SEQ ID NO: 799712 - DNA, 15 bp, Homo sapiens
gtggtagggggtgat

SEQ ID NO: 799713 - DNA, 15 bp, Homo sapiens
tggtagggggtgatt

SEQ ID NO: 799714 - DNA, 15 bp, Homo sapiens
ggtagggggtgattg

SEQ ID NO: 799715 - DNA, 15 bp, Homo sapiens
gtagggggtgattgg

SEQ ID NO: 799716 - DNA, 15 bp, Homo sapiens
tagggggtgattggg

SEQ ID NO: 799717 - DNA, 15 bp, Homo sapiens
agggggtgattggga

SEQ ID NO: 799718 - DNA, 15 bp, Homo sapiens
gggggtgattgggaa

SEQ ID NO: 799719 - DNA, 15 bp, Homo sapiens
ggggtgattgggaag

SEQ ID NO: 799720 - DNA, 15 bp, Homo sapiens
gggtgattgggaagg

SEQ ID NO: 799721 - DNA, 15 bp, Homo sapiens
ggtgattgggaaggc

SEQ ID NO: 799722 - DNA, 15 bp, Homo sapiens
gtgattgggaaggca

SEQ ID NO: 799723 - DNA, 15 bp, Homo sapiens
tgattgggaaggcac

SEQ ID NO: 799724 - DNA, 15 bp, Homo sapiens
gattgggaaggcact

SEQ ID NO: 799725 - DNA, 15 bp, Homo sapiens
attgggaaggcacta

SEQ ID NO: 799726 - DNA, 15 bp, Homo sapiens
ttgggaaggcactac

SEQ ID NO: 799727 - DNA, 15 bp, Homo sapiens
tgggaaggcactaca

SEQ ID NO: 799728 - DNA, 15 bp, Homo sapiens
gggaaggcactacag

SEQ ID NO: 799729 - DNA, 15 bp, Homo sapiens
ggaaggcactacagg

SEQ ID NO: 799730 - DNA, 15 bp, Homo sapiens
gaaggcactacaggt

SEQ ID NO: 799731 - DNA, 15 bp, Homo sapiens
aaggcactacaggta

SEQ ID NO: 799732 - DNA, 15 bp, Homo sapiens
aggcactacaggtac

SEQ ID NO: 799733 - DNA, 15 bp, Homo sapiens
ggcactacaggtacg

SEQ ID NO: 799734 - DNA, 15 bp, Homo sapiens
gcactacaggtacgt

SEQ ID NO: 799735 - DNA, 15 bp, Homo sapiens
cactacaggtacgtg

SEQ ID NO: 799736 - DNA, 15 bp, Homo sapiens
actacaggtacgtga

SEQ ID NO: 799737 - DNA, 15 bp, Homo sapiens
ctacaggtacgtgac

SEQ ID NO: 799738 - DNA, 15 bp, Homo sapiens
tacaggtacgtgacg

SEQ ID NO: 799739 - DNA, 15 bp, Homo sapiens
acaggtacgtgacgc

SEQ ID NO: 799740 - DNA, 15 bp, Homo sapiens
caggtacgtgacgct

SEQ ID NO: 799741 - DNA, 15 bp, Homo sapiens
aggtacgtgacgctg

SEQ ID NO: 799742 - DNA, 15 bp, Homo sapiens
ggtacgtgacgctgt

SEQ ID NO: 799743 - DNA, 15 bp, Homo sapiens
gtacgtgacgctgtg

SEQ ID NO: 799744 - DNA, 15 bp, Homo sapiens
tacgtgacgctgtgt

SEQ ID NO: 799745 - DNA, 15 bp, Homo sapiens
acgtgacgctgtgtg

SEQ ID NO: 799746 - DNA, 15 bp, Homo sapiens
cgtgacgctgtgtga

SEQ ID NO: 799747 - DNA, 15 bp, Homo sapiens
gtgacgctgtgtgat

SEQ ID NO: 799748 - DNA, 15 bp, Homo sapiens
tgacgctgtgtgata

SEQ ID NO: 799749 - DNA, 15 bp, Homo sapiens
gacgctgtgtgatag

SEQ ID NO: 799750 - DNA, 15 bp, Homo sapiens
acgctgtgtgataga

SEQ ID NO: 799751 - DNA, 15 bp, Homo sapiens
cgctgtgtgatagag

SEQ ID NO: 799752 - DNA, 15 bp, Homo sapiens
gctgtgtgatagagt

SEQ ID NO: 799753 - DNA, 15 bp, Homo sapiens
ctgtgtgatagagtc

SEQ ID NO: 799754 - DNA, 15 bp, Homo sapiens
tgtgtgatagagtca

SEQ ID NO: 799755 - DNA, 15 bp, Homo sapiens
gtgtgatagagtcag

SEQ ID NO: 799756 - DNA, 15 bp, Homo sapiens
tgtgatagagtcagg

SEQ ID NO: 799757 - DNA, 15 bp, Homo sapiens
gtgatagagtcagga

SEQ ID NO: 799758 - DNA, 15 bp, Homo sapiens
tgatagagtcaggag

SEQ ID NO: 799759 - DNA, 15 bp, Homo sapiens
gatagagtcaggagc

SEQ ID NO: 799760 - DNA, 15 bp, Homo sapiens
atagagtcaggagca

SEQ ID NO: 799761 - DNA, 15 bp, Homo sapiens
tagagtcaggagcaa

SEQ ID NO: 799762 - DNA, 15 bp, Homo sapiens
agagtcaggagcaag

SEQ ID NO: 799763 - DNA, 15 bp, Homo sapiens
gagtcaggagcaagg

SEQ ID NO: 799764 - DNA, 15 bp, Homo sapiens
agtcaggagcaagga

SEQ ID NO: 799765 - DNA, 15 bp, Homo sapiens
gtcaggagcaaggag

SEQ ID NO: 799766 - DNA, 15 bp, Homo sapiens
tcaggagcaaggagc

SEQ ID NO: 799767 - DNA, 15 bp, Homo sapiens
caggagcaaggagct

SEQ ID NO: 799768 - DNA, 15 bp, Homo sapiens
aggagcaaggagctt

SEQ ID NO: 799769 - DNA, 15 bp, Homo sapiens
ggagcaaggagcttt

SEQ ID NO: 799770 - DNA, 15 bp, Homo sapiens
gagcaaggagctttg

SEQ ID NO: 799771 - DNA, 15 bp, Homo sapiens
agcaaggagctttgg

SEQ ID NO: 799772 - DNA, 15 bp, Homo sapiens
gcaaggagctttgga

SEQ ID NO: 799773 - DNA, 15 bp, Homo sapiens
caaggagctttggaa

SEQ ID NO: 799774 - DNA, 15 bp, Homo sapiens
aaggagctttggaag

SEQ ID NO: 799775 - DNA, 15 bp, Homo sapiens
aggagctttggaagc

SEQ ID NO: 799776 - DNA, 15 bp, Homo sapiens
ggagctttggaagct

SEQ ID NO: 799777 - DNA, 15 bp, Homo sapiens
gagctttggaagctt

SEQ ID NO: 799778 - DNA, 15 bp, Homo sapiens
agctttggaagcttc

SEQ ID NO: 799779 - DNA, 15 bp, Homo sapiens
gctttggaagcttct

SEQ ID NO: 799780 - DNA, 15 bp, Homo sapiens
ctttggaagcttcta

SEQ ID NO: 799781 - DNA, 15 bp, Homo sapiens
tttggaagcttctag

SEQ ID NO: 799782 - DNA, 15 bp, Homo sapiens
ttggaagcttctagc

SEQ ID NO: 799783 - DNA, 15 bp, Homo sapiens
tggaagcttctagcg

SEQ ID NO: 799784 - DNA, 15 bp, Homo sapiens
ggaagcttctagcgc

SEQ ID NO: 799785 - DNA, 15 bp, Homo sapiens
gaagcttctagcgcc

SEQ ID NO: 799786 - DNA, 15 bp, Homo sapiens
aagcttctagcgcca

SEQ ID NO: 799787 - DNA, 15 bp, Homo sapiens
agcttctagcgccaa

SEQ ID NO: 799788 - DNA, 15 bp, Homo sapiens
gcttctagcgccaag

SEQ ID NO: 799789 - DNA, 15 bp, Homo sapiens
cttctagcgccaagg

SEQ ID NO: 799790 - DNA, 15 bp, Homo sapiens
ttctagcgccaaggc

SEQ ID NO: 799791 - DNA, 15 bp, Homo sapiens
tctagcgccaaggca

SEQ ID NO: 799792 - DNA, 15 bp, Homo sapiens
ctagcgccaaggcac

SEQ ID NO: 799793 - DNA, 15 bp, Homo sapiens
tagcgccaaggcacc

SEQ ID NO: 799794 - DNA, 15 bp, Homo sapiens
agcgccaaggcacct

SEQ ID NO: 799795 - DNA, 15 bp, Homo sapiens
gcgccaaggcacctt

SEQ ID NO: 799796 - DNA, 15 bp, Homo sapiens
cgccaaggcaccttc

SEQ ID NO: 799797 - DNA, 15 bp, Homo sapiens
gccaaggcaccttca

SEQ ID NO: 799798 - DNA, 15 bp, Homo sapiens
ccaaggcaccttcag

SEQ ID NO: 799799 - DNA, 15 bp, Homo sapiens
caaggcaccttcagt

SEQ ID NO: 799800 - DNA, 15 bp, Homo sapiens
aaggcaccttcagtc

SEQ ID NO: 799801 - DNA, 15 bp, Homo sapiens
aggcaccttcagtcc

SEQ ID NO: 799802 - DNA, 15 bp, Homo sapiens
ggcaccttcagtcca

SEQ ID NO: 799803 - DNA, 15 bp, Homo sapiens
gcaccttcagtccat

SEQ ID NO: 799804 - DNA, 15 bp, Homo sapiens
caccttcagtccatt

SEQ ID NO: 799805 - DNA, 15 bp, Homo sapiens
accttcagtccatta

SEQ ID NO: 799806 - DNA, 15 bp, Homo sapiens
ccttcagtccattat

SEQ ID NO: 799807 - DNA, 15 bp, Homo sapiens
cttcagtccattata

SEQ ID NO: 799808 - DNA, 15 bp, Homo sapiens
ttcagtccattatag

SEQ ID NO: 799809 - DNA, 15 bp, Homo sapiens
tcagtccattataga

SEQ ID NO: 799810 - DNA, 15 bp, Homo sapiens
cagtccattatagaa

SEQ ID NO: 799811 - DNA, 15 bp, Homo sapiens
agtccattatagaat

SEQ ID NO: 799812 - DNA, 15 bp, Homo sapiens
gtccattatagaatg

SEQ ID NO: 799813 - DNA, 15 bp, Homo sapiens
tccattatagaatgt

SEQ ID NO: 799814 - DNA, 15 bp, Homo sapiens
ccattatagaatgtc

SEQ ID NO: 799815 - DNA, 15 bp, Homo sapiens
cattatagaatgtcc

SEQ ID NO: 799816 - DNA, 15 bp, Homo sapiens
attatagaatgtcca

SEQ ID NO: 799817 - DNA, 15 bp, Homo sapiens
ttatagaatgtccag

SEQ ID NO: 799818 - DNA, 15 bp, Homo sapiens
tatagaatgtccagt

SEQ ID NO: 799819 - DNA, 15 bp, Homo sapiens
atagaatgtccagtg

SEQ ID NO: 799820 - DNA, 15 bp, Homo sapiens
tagaatgtccagtgt

SEQ ID NO: 799821 - DNA, 15 bp, Homo sapiens
agaatgtccagtgtc

SEQ ID NO: 799822 - DNA, 15 bp, Homo sapiens
gaatgtccagtgtcc

SEQ ID NO: 799823 - DNA, 15 bp, Homo sapiens
aatgtccagtgtccc

SEQ ID NO: 799824 - DNA, 15 bp, Homo sapiens
atgtccagtgtcccc

SEQ ID NO: 799825 - DNA, 15 bp, Homo sapiens
tgtccagtgtcccca

SEQ ID NO: 799826 - DNA, 15 bp, Homo sapiens
gtccagtgtccccat

SEQ ID NO: 799827 - DNA, 15 bp, Homo sapiens
tccagtgtccccatt

SEQ ID NO: 799828 - DNA, 15 bp, Homo sapiens
ccagtgtccccattt

SEQ ID NO: 799829 - DNA, 15 bp, Homo sapiens
cagtgtccccatttt

SEQ ID NO: 799830 - DNA, 15 bp, Homo sapiens
agtgtccccatttta

SEQ ID NO: 799831 - DNA, 15 bp, Homo sapiens
gtgtccccattttat

SEQ ID NO: 799832 - DNA, 15 bp, Homo sapiens
tgtccccattttatg

SEQ ID NO: 799833 - DNA, 15 bp, Homo sapiens
gtccccattttatga

SEQ ID NO: 799834 - DNA, 15 bp, Homo sapiens
tccccattttatgaa

SEQ ID NO: 799835 - DNA, 15 bp, Homo sapiens
ccccattttatgaat

SEQ ID NO: 799836 - DNA, 15 bp, Homo sapiens
cccattttatgaatg

SEQ ID NO: 799837 - DNA, 15 bp, Homo sapiens
ccattttatgaatga

SEQ ID NO: 799838 - DNA, 15 bp, Homo sapiens
cattttatgaatgag

SEQ ID NO: 799839 - DNA, 15 bp, Homo sapiens
attttatgaatgagg

SEQ ID NO: 799840 - DNA, 15 bp, Homo sapiens
ttttatgaatgaggg

SEQ ID NO: 799841 - DNA, 15 bp, Homo sapiens
tttatgaatgagggc

SEQ ID NO: 799842 - DNA, 15 bp, Homo sapiens
ttatgaatgagggca

SEQ ID NO: 799843 - DNA, 15 bp, Homo sapiens
tatgaatgagggcat

SEQ ID NO: 799844 - DNA, 15 bp, Homo sapiens
atgaatgagggcatg

SEQ ID NO: 799845 - DNA, 15 bp, Homo sapiens
tgaatgagggcatga

SEQ ID NO: 799846 - DNA, 15 bp, Homo sapiens
gaatgagggcatgac

SEQ ID NO: 799847 - DNA, 15 bp, Homo sapiens
aatgagggcatgacc

SEQ ID NO: 799848 - DNA, 15 bp, Homo sapiens
atgagggcatgaccc

SEQ ID NO: 799849 - DNA, 15 bp, Homo sapiens
tgagggcatgaccca

SEQ ID NO: 799850 - DNA, 15 bp, Homo sapiens
gagggcatgacccag

SEQ ID NO: 799851 - DNA, 15 bp, Homo sapiens
agggcatgacccaga

SEQ ID NO: 799852 - DNA, 15 bp, Homo sapiens
gggcatgacccagaa

SEQ ID NO: 799853 - DNA, 15 bp, Homo sapiens
ggcatgacccagaaa

SEQ ID NO: 799854 - DNA, 15 bp, Homo sapiens
gcatgacccagaaag

SEQ ID NO: 799855 - DNA, 15 bp, Homo sapiens
catgacccagaaaga

SEQ ID NO: 799856 - DNA, 15 bp, Homo sapiens
atgacccagaaagaa

SEQ ID NO: 799857 - DNA, 15 bp, Homo sapiens
tgacccagaaagaag

SEQ ID NO: 799858 - DNA, 15 bp, Homo sapiens
gacccagaaagaagt

SEQ ID NO: 799859 - DNA, 15 bp, Homo sapiens
acccagaaagaagtc

SEQ ID NO: 799860 - DNA, 15 bp, Homo sapiens
cccagaaagaagtca

SEQ ID NO: 799861 - DNA, 15 bp, Homo sapiens
ccagaaagaagtcac

SEQ ID NO: 799862 - DNA, 15 bp, Homo sapiens
cagaaagaagtcact

SEQ ID NO: 799863 - DNA, 15 bp, Homo sapiens
agaaagaagtcactt

SEQ ID NO: 799864 - DNA, 15 bp, Homo sapiens
gaaagaagtcacttg

SEQ ID NO: 799865 - DNA, 15 bp, Homo sapiens
aaagaagtcacttgt

SEQ ID NO: 799866 - DNA, 15 bp, Homo sapiens
aagaagtcacttgtc

SEQ ID NO: 799867 - DNA, 15 bp, Homo sapiens
agaagtcacttgtcc

SEQ ID NO: 799868 - DNA, 15 bp, Homo sapiens
gaagtcacttgtcca

SEQ ID NO: 799869 - DNA, 15 bp, Homo sapiens
aagtcacttgtccag

SEQ ID NO: 799870 - DNA, 15 bp, Homo sapiens
agtcacttgtccagg

SEQ ID NO: 799871 - DNA, 15 bp, Homo sapiens
gtcacttgtccaggg

SEQ ID NO: 799872 - DNA, 15 bp, Homo sapiens
tcacttgtccagggt

SEQ ID NO: 799873 - DNA, 15 bp, Homo sapiens
cacttgtccagggtc

SEQ ID NO: 799874 - DNA, 15 bp, Homo sapiens
acttgtccagggtca

SEQ ID NO: 799875 - DNA, 15 bp, Homo sapiens
cttgtccagggtcac

SEQ ID NO: 799876 - DNA, 15 bp, Homo sapiens
ttgtccagggtcaca

SEQ ID NO: 799877 - DNA, 15 bp, Homo sapiens
tgtccagggtcacac

SEQ ID NO: 799878 - DNA, 15 bp, Homo sapiens
gtccagggtcacaca

SEQ ID NO: 799879 - DNA, 15 bp, Homo sapiens
tccagggtcacacag

SEQ ID NO: 799880 - DNA, 15 bp, Homo sapiens
ccagggtcacacagc

SEQ ID NO: 799881 - DNA, 15 bp, Homo sapiens
cagggtcacacagca

SEQ ID NO: 799882 - DNA, 15 bp, Homo sapiens
agggtcacacagcaa

SEQ ID NO: 799883 - DNA, 15 bp, Homo sapiens
gggtcacacagcaag

SEQ ID NO: 799884 - DNA, 15 bp, Homo sapiens
ggtcacacagcaagt

SEQ ID NO: 799885 - DNA, 15 bp, Homo sapiens
gtcacacagcaagtc

SEQ ID NO: 799886 - DNA, 15 bp, Homo sapiens
tcacacagcaagtca

SEQ ID NO: 799887 - DNA, 15 bp, Homo sapiens
cacacagcaagtcag

SEQ ID NO: 799888 - DNA, 15 bp, Homo sapiens
acacagcaagtcagg

SEQ ID NO: 799889 - DNA, 15 bp, Homo sapiens
cacagcaagtcaggg

SEQ ID NO: 799890 - DNA, 15 bp, Homo sapiens
acagcaagtcagggt

SEQ ID NO: 799891 - DNA, 15 bp, Homo sapiens
cagcaagtcagggtc

SEQ ID NO: 799892 - DNA, 15 bp, Homo sapiens
agcaagtcagggtcg

SEQ ID NO: 799893 - DNA, 15 bp, Homo sapiens
gcaagtcagggtcgc

SEQ ID NO: 799894 - DNA, 15 bp, Homo sapiens
caagtcagggtcgca

SEQ ID NO: 799895 - DNA, 15 bp, Homo sapiens
aagtcagggtcgcag

SEQ ID NO: 799896 - DNA, 15 bp, Homo sapiens
agtcagggtcgcagg

SEQ ID NO: 799897 - DNA, 15 bp, Homo sapiens
gtcagggtcgcaggg

SEQ ID NO: 799898 - DNA, 15 bp, Homo sapiens
tcagggtcgcagggc

SEQ ID NO: 799899 - DNA, 15 bp, Homo sapiens
cagggtcgcagggct

SEQ ID NO: 799900 - DNA, 15 bp, Homo sapiens
agggtcgcagggcta

SEQ ID NO: 799901 - DNA, 15 bp, Homo sapiens
gggtcgcagggctag

SEQ ID NO: 799902 - DNA, 15 bp, Homo sapiens
ggtcgcagggctaga

SEQ ID NO: 799903 - DNA, 15 bp, Homo sapiens
gtcgcagggctagag

SEQ ID NO: 799904 - DNA, 15 bp, Homo sapiens
tcgcagggctagagc

SEQ ID NO: 799905 - DNA, 15 bp, Homo sapiens
cgcagggctagagct

SEQ ID NO: 799906 - DNA, 15 bp, Homo sapiens
gcagggctagagcta

SEQ ID NO: 799907 - DNA, 15 bp, Homo sapiens
cagggctagagctag

SEQ ID NO: 799908 - DNA, 15 bp, Homo sapiens
agggctagagctaga

SEQ ID NO: 799909 - DNA, 15 bp, Homo sapiens
gggctagagctagaa

SEQ ID NO: 799910 - DNA, 15 bp, Homo sapiens
ggctagagctagaat

SEQ ID NO: 799911 - DNA, 15 bp, Homo sapiens
gctagagctagaatg

SEQ ID NO: 799912 - DNA, 15 bp, Homo sapiens
ctagagctagaatgc

SEQ ID NO: 799913 - DNA, 15 bp, Homo sapiens
tagagctagaatgca

SEQ ID NO: 799914 - DNA, 15 bp, Homo sapiens
agagctagaatgcat

SEQ ID NO: 799915 - DNA, 15 bp, Homo sapiens
gagctagaatgcata

SEQ ID NO: 799916 - DNA, 15 bp, Homo sapiens
agctagaatgcatat

SEQ ID NO: 799917 - DNA, 15 bp, Homo sapiens
gctagaatgcatatc

SEQ ID NO: 799918 - DNA, 15 bp, Homo sapiens
ctagaatgcatatct

SEQ ID NO: 799919 - DNA, 15 bp, Homo sapiens
tagaatgcatatctg

SEQ ID NO: 799920 - DNA, 15 bp, Homo sapiens
agaatgcatatctgg

SEQ ID NO: 799921 - DNA, 15 bp, Homo sapiens
gaatgcatatctggc

SEQ ID NO: 799922 - DNA, 15 bp, Homo sapiens
aatgcatatctggct

SEQ ID NO: 799923 - DNA, 15 bp, Homo sapiens
atgcatatctggctt

SEQ ID NO: 799924 - DNA, 15 bp, Homo sapiens
tgcatatctggcttc

SEQ ID NO: 799925 - DNA, 15 bp, Homo sapiens
gcatatctggcttct

SEQ ID NO: 799926 - DNA, 15 bp, Homo sapiens
catatctggcttctc

SEQ ID NO: 799927 - DNA, 15 bp, Homo sapiens
atatctggcttctct

SEQ ID NO: 799928 - DNA, 15 bp, Homo sapiens
tatctggcttctctg

SEQ ID NO: 799929 - DNA, 15 bp, Homo sapiens
atctggcttctctga

SEQ ID NO: 799930 - DNA, 15 bp, Homo sapiens
tctggcttctctgac

SEQ ID NO: 799931 - DNA, 15 bp, Homo sapiens
ctggcttctctgacc

SEQ ID NO: 799932 - DNA, 15 bp, Homo sapiens
tggcttctctgacca

SEQ ID NO: 799933 - DNA, 15 bp, Homo sapiens
ggcttctctgaccag

SEQ ID NO: 799934 - DNA, 15 bp, Homo sapiens
gcttctctgaccagc

SEQ ID NO: 799935 - DNA, 15 bp, Homo sapiens
cttctctgaccagca

SEQ ID NO: 799936 - DNA, 15 bp, Homo sapiens
ttctctgaccagcag

SEQ ID NO: 799937 - DNA, 15 bp, Homo sapiens
tctctgaccagcagt

SEQ ID NO: 799938 - DNA, 15 bp, Homo sapiens
ctctgaccagcagtc

SEQ ID NO: 799939 - DNA, 15 bp, Homo sapiens
tctgaccagcagtct

SEQ ID NO: 799940 - DNA, 15 bp, Homo sapiens
ctgaccagcagtctt

SEQ ID NO: 799941 - DNA, 15 bp, Homo sapiens
tgaccagcagtcttt

SEQ ID NO: 799942 - DNA, 15 bp, Homo sapiens
gaccagcagtctttc

SEQ ID NO: 799943 - DNA, 15 bp, Homo sapiens
accagcagtctttcc

SEQ ID NO: 799944 - DNA, 15 bp, Homo sapiens
ccagcagtctttccc

SEQ ID NO: 799945 - DNA, 15 bp, Homo sapiens
cagcagtctttcccc

SEQ ID NO: 799946 - DNA, 15 bp, Homo sapiens
agcagtctttccccc

SEQ ID NO: 799947 - DNA, 15 bp, Homo sapiens
gcagtctttccccca

SEQ ID NO: 799948 - DNA, 15 bp, Homo sapiens
cagtctttcccccag

SEQ ID NO: 799949 - DNA, 15 bp, Homo sapiens
agtctttcccccaga

SEQ ID NO: 799950 - DNA, 15 bp, Homo sapiens
gtctttcccccagac

SEQ ID NO: 799951 - DNA, 15 bp, Homo sapiens
tctttcccccagacc

SEQ ID NO: 799952 - DNA, 15 bp, Homo sapiens
ctttcccccagacca

SEQ ID NO: 799953 - DNA, 15 bp, Homo sapiens
tttcccccagaccat

SEQ ID NO: 799954 - DNA, 15 bp, Homo sapiens
ttcccccagaccata

SEQ ID NO: 799955 - DNA, 15 bp, Homo sapiens
tcccccagaccatat

SEQ ID NO: 799956 - DNA, 15 bp, Homo sapiens
cccccagaccatatc

SEQ ID NO: 799957 - DNA, 15 bp, Homo sapiens
ccccagaccatatcc

SEQ ID NO: 799958 - DNA, 15 bp, Homo sapiens
cccagaccatatccc

SEQ ID NO: 799959 - DNA, 15 bp, Homo sapiens
ccagaccatatccct

SEQ ID NO: 799960 - DNA, 15 bp, Homo sapiens
cagaccatatcccta

SEQ ID NO: 799961 - DNA, 15 bp, Homo sapiens
agaccatatccctac

SEQ ID NO: 799962 - DNA, 15 bp, Homo sapiens
gaccatatccctact

SEQ ID NO: 799963 - DNA, 15 bp, Homo sapiens
accatatccctactt

SEQ ID NO: 799964 - DNA, 15 bp, Homo sapiens
ccatatccctacttt

SEQ ID NO: 799965 - DNA, 15 bp, Homo sapiens
catatccctactttc

SEQ ID NO: 799966 - DNA, 15 bp, Homo sapiens
atatccctactttcc

SEQ ID NO: 799967 - DNA, 15 bp, Homo sapiens
tatccctactttcct

SEQ ID NO: 799968 - DNA, 15 bp, Homo sapiens
atccctactttcctt

SEQ ID NO: 799969 - DNA, 15 bp, Homo sapiens
tccctactttccttt

SEQ ID NO: 799970 - DNA, 15 bp, Homo sapiens
ccctactttccttta

SEQ ID NO: 799971 - DNA, 15 bp, Homo sapiens
cctactttcctttat

SEQ ID NO: 799972 - DNA, 15 bp, Homo sapiens
ctactttcctttatg

SEQ ID NO: 799973 - DNA, 15 bp, Homo sapiens
tactttcctttatgt

SEQ ID NO: 799974 - DNA, 15 bp, Homo sapiens
actttcctttatgtg

SEQ ID NO: 799975 - DNA, 15 bp, Homo sapiens
ctttcctttatgtgg

SEQ ID NO: 799976 - DNA, 15 bp, Homo sapiens
tttcctttatgtggt

SEQ ID NO: 799977 - DNA, 15 bp, Homo sapiens
ttcctttatgtggtt

SEQ ID NO: 799978 - DNA, 15 bp, Homo sapiens
tcctttatgtggtta

SEQ ID NO: 799979 - DNA, 15 bp, Homo sapiens
cctttatgtggttaa

SEQ ID NO: 799980 - DNA, 15 bp, Homo sapiens
ctttatgtggttaac

SEQ ID NO: 799981 - DNA, 15 bp, Homo sapiens
tttatgtggttaact

SEQ ID NO: 799982 - DNA, 15 bp, Homo sapiens
ttatgtggttaactt

SEQ ID NO: 799983 - DNA, 15 bp, Homo sapiens
tatgtggttaacttt

SEQ ID NO: 799984 - DNA, 15 bp, Homo sapiens
atgtggttaacttta

SEQ ID NO: 799985 - DNA, 15 bp, Homo sapiens
tgtggttaactttaa

SEQ ID NO: 799986 - DNA, 15 bp, Homo sapiens
gtggttaactttaat

SEQ ID NO: 799987 - DNA, 15 bp, Homo sapiens
tggttaactttaatt

SEQ ID NO: 799988 - DNA, 15 bp, Homo sapiens
ggttaactttaatta

SEQ ID NO: 799989 - DNA, 15 bp, Homo sapiens
gttaactttaattaa

SEQ ID NO: 799990 - DNA, 15 bp, Homo sapiens
ttaactttaattaag

SEQ ID NO: 799991 - DNA, 15 bp, Homo sapiens
taactttaattaagc

SEQ ID NO: 799992 - DNA, 15 bp, Homo sapiens
aactttaattaagct

SEQ ID NO: 799993 - DNA, 15 bp, Homo sapiens
actttaattaagctc

SEQ ID NO: 799994 - DNA, 15 bp, Homo sapiens
ctttaattaagctct

SEQ ID NO: 799995 - DNA, 15 bp, Homo sapiens
tttaattaagctctt

SEQ ID NO: 799996 - DNA, 15 bp, Homo sapiens
ttaattaagctcttt

SEQ ID NO: 799997 - DNA, 15 bp, Homo sapiens
taattaagctctttc

SEQ ID NO: 799998 - DNA, 15 bp, Homo sapiens
aattaagctctttct

SEQ ID NO: 799999 - DNA, 15 bp, Homo sapiens
attaagctctttcta

SEQ ID NO: 800000 - DNA, 15 bp, Homo sapiens
ttaagctctttctac

SEQ ID NO: 800001 - DNA, 15 bp, Homo sapiens
taagctctttctacc

SEQ ID NO: 800002 - DNA, 15 bp, Homo sapiens
aagctctttctacct

SEQ ID NO: 800003 - DNA, 15 bp, Homo sapiens
agctctttctaccta

SEQ ID NO: 800004 - DNA, 15 bp, Homo sapiens
gctctttctacctac

SEQ ID NO: 800005 - DNA, 15 bp, Homo sapiens
ctctttctacctacc

SEQ ID NO: 800006 - DNA, 15 bp, Homo sapiens
tctttctacctacca

SEQ ID NO: 800007 - DNA, 15 bp, Homo sapiens
ctttctacctaccaa

SEQ ID NO: 800008 - DNA, 15 bp, Homo sapiens
tttctacctaccaag

SEQ ID NO: 800009 - DNA, 15 bp, Homo sapiens
ttctacctaccaagc

SEQ ID NO: 800010 - DNA, 15 bp, Homo sapiens
tctacctaccaagca

SEQ ID NO: 800011 - DNA, 15 bp, Homo sapiens
ctacctaccaagcac

SEQ ID NO: 800012 - DNA, 15 bp, Homo sapiens
tacctaccaagcaca

SEQ ID NO: 800013 - DNA, 15 bp, Homo sapiens
acctaccaagcacac

SEQ ID NO: 800014 - DNA, 15 bp, Homo sapiens
cctaccaagcacacc

SEQ ID NO: 800015 - DNA, 15 bp, Homo sapiens
ctaccaagcacaccc

SEQ ID NO: 800016 - DNA, 15 bp, Homo sapiens
taccaagcacacccc

SEQ ID NO: 800017 - DNA, 15 bp, Homo sapiens
accaagcacacccct

SEQ ID NO: 800018 - DNA, 15 bp, Homo sapiens
ccaagcacaccccta

SEQ ID NO: 800019 - DNA, 15 bp, Homo sapiens
caagcacacccctaa

SEQ ID NO: 800020 - DNA, 15 bp, Homo sapiens
aagcacacccctaag

SEQ ID NO: 800021 - DNA, 15 bp, Homo sapiens
agcacacccctaagc

SEQ ID NO: 800022 - DNA, 15 bp, Homo sapiens
gcacacccctaagca

SEQ ID NO: 800023 - DNA, 15 bp, Homo sapiens
cacacccctaagcag

SEQ ID NO: 800024 - DNA, 15 bp, Homo sapiens
acacccctaagcagt

SEQ ID NO: 800025 - DNA, 15 bp, Homo sapiens
cacccctaagcagtg

SEQ ID NO: 800026 - DNA, 15 bp, Homo sapiens
acccctaagcagtgg

SEQ ID NO: 800027 - DNA, 15 bp, Homo sapiens
cccctaagcagtggg

SEQ ID NO: 800028 - DNA, 15 bp, Homo sapiens
ccctaagcagtgggt

SEQ ID NO: 800029 - DNA, 15 bp, Homo sapiens
cctaagcagtgggtg

SEQ ID NO: 800030 - DNA, 15 bp, Homo sapiens
ctaagcagtgggtgt

SEQ ID NO: 800031 - DNA, 15 bp, Homo sapiens
taagcagtgggtgtc

SEQ ID NO: 800032 - DNA, 15 bp, Homo sapiens
aagcagtgggtgtcc

SEQ ID NO: 800033 - DNA, 15 bp, Homo sapiens
agcagtgggtgtcct

SEQ ID NO: 800034 - DNA, 15 bp, Homo sapiens
gcagtgggtgtcctc

SEQ ID NO: 800035 - DNA, 15 bp, Homo sapiens
cagtgggtgtcctcc

SEQ ID NO: 800036 - DNA, 15 bp, Homo sapiens
agtgggtgtcctcct

SEQ ID NO: 800037 - DNA, 15 bp, Homo sapiens
gtgggtgtcctcctt

SEQ ID NO: 800038 - DNA, 15 bp, Homo sapiens
tgggtgtcctccttt

SEQ ID NO: 800039 - DNA, 15 bp, Homo sapiens
gggtgtcctcctttg

SEQ ID NO: 800040 - DNA, 15 bp, Homo sapiens
ggtgtcctcctttga

SEQ ID NO: 800041 - DNA, 15 bp, Homo sapiens
gtgtcctcctttgac

SEQ ID NO: 800042 - DNA, 15 bp, Homo sapiens
tgtcctcctttgacc

SEQ ID NO: 800043 - DNA, 15 bp, Homo sapiens
gtcctcctttgacct

SEQ ID NO: 800044 - DNA, 15 bp, Homo sapiens
tcctcctttgacctt

SEQ ID NO: 800045 - DNA, 15 bp, Homo sapiens
cctcctttgaccttc

SEQ ID NO: 800046 - DNA, 15 bp, Homo sapiens
ctcctttgaccttca

SEQ ID NO: 800047 - DNA, 15 bp, Homo sapiens
tcctttgaccttcat

SEQ ID NO: 800048 - DNA, 15 bp, Homo sapiens
cctttgaccttcata

SEQ ID NO: 800049 - DNA, 15 bp, Homo sapiens
ctttgaccttcataa

SEQ ID NO: 800050 - DNA, 15 bp, Homo sapiens
tttgaccttcataac

SEQ ID NO: 800051 - DNA, 15 bp, Homo sapiens
ttgaccttcataaca

SEQ ID NO: 800052 - DNA, 15 bp, Homo sapiens
tgaccttcataacaa

SEQ ID NO: 800053 - DNA, 15 bp, Homo sapiens
gaccttcataacaat

SEQ ID NO: 800054 - DNA, 15 bp, Homo sapiens
accttcataacaatc

SEQ ID NO: 800055 - DNA, 15 bp, Homo sapiens
ccttcataacaatct

SEQ ID NO: 800056 - DNA, 15 bp, Homo sapiens
cttcataacaatctc

SEQ ID NO: 800057 - DNA, 15 bp, Homo sapiens
ttcataacaatctcg

SEQ ID NO: 800058 - DNA, 15 bp, Homo sapiens
tcataacaatctcgt

SEQ ID NO: 800059 - DNA, 15 bp, Homo sapiens
cataacaatctcgtg

SEQ ID NO: 800060 - DNA, 15 bp, Homo sapiens
ataacaatctcgtga

SEQ ID NO: 800061 - DNA, 15 bp, Homo sapiens
taacaatctcgtgag

SEQ ID NO: 800062 - DNA, 15 bp, Homo sapiens
aacaatctcgtgaga

SEQ ID NO: 800063 - DNA, 15 bp, Homo sapiens
acaatctcgtgagaa

SEQ ID NO: 800064 - DNA, 15 bp, Homo sapiens
caatctcgtgagaaa

SEQ ID NO: 800065 - DNA, 15 bp, Homo sapiens
aatctcgtgagaaag

SEQ ID NO: 800066 - DNA, 15 bp, Homo sapiens
atctcgtgagaaaga

SEQ ID NO: 800067 - DNA, 15 bp, Homo sapiens
tctcgtgagaaagat

SEQ ID NO: 800068 - DNA, 15 bp, Homo sapiens
ctcgtgagaaagatc

SEQ ID NO: 800069 - DNA, 15 bp, Homo sapiens
tcgtgagaaagatcc

SEQ ID NO: 800070 - DNA, 15 bp, Homo sapiens
cgtgagaaagatcct

SEQ ID NO: 800071 - DNA, 15 bp, Homo sapiens
gtgagaaagatcctc

SEQ ID NO: 800072 - DNA, 15 bp, Homo sapiens
tgagaaagatcctct

SEQ ID NO: 800073 - DNA, 15 bp, Homo sapiens
gagaaagatcctctt

SEQ ID NO: 800074 - DNA, 15 bp, Homo sapiens
agaaagatcctcttg

SEQ ID NO: 800075 - DNA, 15 bp, Homo sapiens
gaaagatcctcttgg

SEQ ID NO: 800076 - DNA, 15 bp, Homo sapiens
aaagatcctcttggt

SEQ ID NO: 800077 - DNA, 15 bp, Homo sapiens
aagatcctcttggtg

SEQ ID NO: 800078 - DNA, 15 bp, Homo sapiens
agatcctcttggtgc

SEQ ID NO: 800079 - DNA, 15 bp, Homo sapiens
gatcctcttggtgct

SEQ ID NO: 800080 - DNA, 15 bp, Homo sapiens
atcctcttggtgctt

SEQ ID NO: 800081 - DNA, 15 bp, Homo sapiens
tcctcttggtgcttt

SEQ ID NO: 800082 - DNA, 15 bp, Homo sapiens
cctcttggtgctttg

SEQ ID NO: 800083 - DNA, 15 bp, Homo sapiens
ctcttggtgctttgg

SEQ ID NO: 800084 - DNA, 15 bp, Homo sapiens
tcttggtgctttggt

SEQ ID NO: 800085 - DNA, 15 bp, Homo sapiens
cttggtgctttggtt

SEQ ID NO: 800086 - DNA, 15 bp, Homo sapiens
ttggtgctttggttt

SEQ ID NO: 800087 - DNA, 15 bp, Homo sapiens
tggtgctttggtttg

SEQ ID NO: 800088 - DNA, 15 bp, Homo sapiens
ggtgctttggtttga

SEQ ID NO: 800089 - DNA, 15 bp, Homo sapiens
gtgctttggtttgac

SEQ ID NO: 800090 - DNA, 15 bp, Homo sapiens
tgctttggtttgaca

SEQ ID NO: 800091 - DNA, 15 bp, Homo sapiens
gctttggtttgacac

SEQ ID NO: 800092 - DNA, 15 bp, Homo sapiens
ctttggtttgacact

SEQ ID NO: 800093 - DNA, 15 bp, Homo sapiens
tttggtttgacactt

SEQ ID NO: 800094 - DNA, 15 bp, Homo sapiens
ttggtttgacacttg

SEQ ID NO: 800095 - DNA, 15 bp, Homo sapiens
tggtttgacacttgc

SEQ ID NO: 800096 - DNA, 15 bp, Homo sapiens
ggtttgacacttgca

SEQ ID NO: 800097 - DNA, 15 bp, Homo sapiens
gtttgacacttgcat

SEQ ID NO: 800098 - DNA, 15 bp, Homo sapiens
tttgacacttgcatc

SEQ ID NO: 800099 - DNA, 15 bp, Homo sapiens
ttgacacttgcatct

SEQ ID NO: 800100 - DNA, 15 bp, Homo sapiens
tgacacttgcatctt

SEQ ID NO: 800101 - DNA, 15 bp, Homo sapiens
gacacttgcatcttg

SEQ ID NO: 800102 - DNA, 15 bp, Homo sapiens
acacttgcatcttgg

SEQ ID NO: 800103 - DNA, 15 bp, Homo sapiens
cacttgcatcttggg

SEQ ID NO: 800104 - DNA, 15 bp, Homo sapiens
acttgcatcttgggg

SEQ ID NO: 800105 - DNA, 15 bp, Homo sapiens
cttgcatcttgggga

SEQ ID NO: 800106 - DNA, 15 bp, Homo sapiens
ttgcatcttggggat

SEQ ID NO: 800107 - DNA, 15 bp, Homo sapiens
tgcatcttggggatg

SEQ ID NO: 800108 - DNA, 15 bp, Homo sapiens
gcatcttggggatgg

SEQ ID NO: 800109 - DNA, 15 bp, Homo sapiens
catcttggggatggg

SEQ ID NO: 800110 - DNA, 15 bp, Homo sapiens
atcttggggatggga

SEQ ID NO: 800111 - DNA, 15 bp, Homo sapiens
tcttggggatgggaa

SEQ ID NO: 800112 - DNA, 15 bp, Homo sapiens
cttggggatgggaaa

SEQ ID NO: 800113 - DNA, 15 bp, Homo sapiens
ttggggatgggaaag

SEQ ID NO: 800114 - DNA, 15 bp, Homo sapiens
tggggatgggaaagt

SEQ ID NO: 800115 - DNA, 15 bp, Homo sapiens
ggggatgggaaagtt

SEQ ID NO: 800116 - DNA, 15 bp, Homo sapiens
gggatgggaaagttt

SEQ ID NO: 800117 - DNA, 15 bp, Homo sapiens
ggatgggaaagttta

SEQ ID NO: 800118 - DNA, 15 bp, Homo sapiens
gatgggaaagtttaa

SEQ ID NO: 800119 - DNA, 15 bp, Homo sapiens
atgggaaagtttaaa

SEQ ID NO: 800120 - DNA, 15 bp, Homo sapiens
tgggaaagtttaaat

SEQ ID NO: 800121 - DNA, 15 bp, Homo sapiens
gggaaagtttaaatg

SEQ ID NO: 800122 - DNA, 15 bp, Homo sapiens
ggaaagtttaaatga

SEQ ID NO: 800123 - DNA, 15 bp, Homo sapiens
gaaagtttaaatgac

SEQ ID NO: 800124 - DNA, 15 bp, Homo sapiens
aaagtttaaatgact

SEQ ID NO: 800125 - DNA, 15 bp, Homo sapiens
aagtttaaatgactt

SEQ ID NO: 800126 - DNA, 15 bp, Homo sapiens
agtttaaatgacttg

SEQ ID NO: 800127 - DNA, 15 bp, Homo sapiens
gtttaaatgacttgc

SEQ ID NO: 800128 - DNA, 15 bp, Homo sapiens
tttaaatgacttgcc

SEQ ID NO: 800129 - DNA, 15 bp, Homo sapiens
ttaaatgacttgcct

SEQ ID NO: 800130 - DNA, 15 bp, Homo sapiens
taaatgacttgccta

SEQ ID NO: 800131 - DNA, 15 bp, Homo sapiens
aaatgacttgcctaa

SEQ ID NO: 800132 - DNA, 15 bp, Homo sapiens
aatgacttgcctaaa

SEQ ID NO: 800133 - DNA, 15 bp, Homo sapiens
atgacttgcctaaaa

SEQ ID NO: 800134 - DNA, 15 bp, Homo sapiens
tgacttgcctaaaat

SEQ ID NO: 800135 - DNA, 15 bp, Homo sapiens
gacttgcctaaaatt

SEQ ID NO: 800136 - DNA, 15 bp, Homo sapiens
acttgcctaaaatta

SEQ ID NO: 800137 - DNA, 15 bp, Homo sapiens
cttgcctaaaattat

SEQ ID NO: 800138 - DNA, 15 bp, Homo sapiens
ttgcctaaaattatt

SEQ ID NO: 800139 - DNA, 15 bp, Homo sapiens
tgcctaaaattattg

SEQ ID NO: 800140 - DNA, 15 bp, Homo sapiens
gcctaaaattattgg

SEQ ID NO: 800141 - DNA, 15 bp, Homo sapiens
cctaaaattattggc

SEQ ID NO: 800142 - DNA, 15 bp, Homo sapiens
ctaaaattattggct

SEQ ID NO: 800143 - DNA, 15 bp, Homo sapiens
taaaattattggctg

SEQ ID NO: 800144 - DNA, 15 bp, Homo sapiens
aaaattattggctga

SEQ ID NO: 800145 - DNA, 15 bp, Homo sapiens
aaattattggctgag

SEQ ID NO: 800146 - DNA, 15 bp, Homo sapiens
aattattggctgagg

SEQ ID NO: 800147 - DNA, 15 bp, Homo sapiens
attattggctgaggt

SEQ ID NO: 800148 - DNA, 15 bp, Homo sapiens
ttattggctgaggtg

SEQ ID NO: 800149 - DNA, 15 bp, Homo sapiens
tattggctgaggtgg

SEQ ID NO: 800150 - DNA, 15 bp, Homo sapiens
attggctgaggtggt

SEQ ID NO: 800151 - DNA, 15 bp, Homo sapiens
ttggctgaggtggtg

SEQ ID NO: 800152 - DNA, 15 bp, Homo sapiens
tggctgaggtggtgg

SEQ ID NO: 800153 - DNA, 15 bp, Homo sapiens
ggctgaggtggtggg

SEQ ID NO: 800154 - DNA, 15 bp, Homo sapiens
gctgaggtggtgggt

SEQ ID NO: 800155 - DNA, 15 bp, Homo sapiens
ctgaggtggtgggtt

SEQ ID NO: 800156 - DNA, 15 bp, Homo sapiens
tgaggtggtgggttc

SEQ ID NO: 800157 - DNA, 15 bp, Homo sapiens
gaggtggtgggttca

SEQ ID NO: 800158 - DNA, 15 bp, Homo sapiens
aggtggtgggttcag

SEQ ID NO: 800159 - DNA, 15 bp, Homo sapiens
ggtggtgggttcagg

SEQ ID NO: 800160 - DNA, 15 bp, Homo sapiens
gtggtgggttcaggg

SEQ ID NO: 800161 - DNA, 15 bp, Homo sapiens
tggtgggttcagggt

SEQ ID NO: 800162 - DNA, 15 bp, Homo sapiens
ggtgggttcagggtt

SEQ ID NO: 800163 - DNA, 15 bp, Homo sapiens
gtgggttcagggttc

SEQ ID NO: 800164 - DNA, 15 bp, Homo sapiens
tgggttcagggttcc

SEQ ID NO: 800165 - DNA, 15 bp, Homo sapiens
gggttcagggttcca

SEQ ID NO: 800166 - DNA, 15 bp, Homo sapiens
ggttcagggttccag

SEQ ID NO: 800167 - DNA, 15 bp, Homo sapiens
gttcagggttccagc

SEQ ID NO: 800168 - DNA, 15 bp, Homo sapiens
ttcagggttccagca

SEQ ID NO: 800169 - DNA, 15 bp, Homo sapiens
tcagggttccagcat

SEQ ID NO: 800170 - DNA, 15 bp, Homo sapiens
cagggttccagcata

SEQ ID NO: 800171 - DNA, 15 bp, Homo sapiens
agggttccagcatag

SEQ ID NO: 800172 - DNA, 15 bp, Homo sapiens
gggttccagcataga

SEQ ID NO: 800173 - DNA, 15 bp, Homo sapiens
ggttccagcatagat

SEQ ID NO: 800174 - DNA, 15 bp, Homo sapiens
gttccagcatagata

SEQ ID NO: 800175 - DNA, 15 bp, Homo sapiens
ttccagcatagatag

SEQ ID NO: 800176 - DNA, 15 bp, Homo sapiens
tccagcatagatagc

SEQ ID NO: 800177 - DNA, 15 bp, Homo sapiens
ccagcatagatagcc

SEQ ID NO: 800178 - DNA, 15 bp, Homo sapiens
cagcatagatagcca

SEQ ID NO: 800179 - DNA, 15 bp, Homo sapiens
agcatagatagccag

SEQ ID NO: 800180 - DNA, 15 bp, Homo sapiens
gcatagatagccagc

SEQ ID NO: 800181 - DNA, 15 bp, Homo sapiens
catagatagccagct

SEQ ID NO: 800182 - DNA, 15 bp, Homo sapiens
atagatagccagctc

SEQ ID NO: 800183 - DNA, 15 bp, Homo sapiens
tagatagccagctct

SEQ ID NO: 800184 - DNA, 15 bp, Homo sapiens
agatagccagctcta

SEQ ID NO: 800185 - DNA, 15 bp, Homo sapiens
gatagccagctctag

SEQ ID NO: 800186 - DNA, 15 bp, Homo sapiens
atagccagctctaga

SEQ ID NO: 800187 - DNA, 15 bp, Homo sapiens
tagccagctctagag

SEQ ID NO: 800188 - DNA, 15 bp, Homo sapiens
agccagctctagagc

SEQ ID NO: 800189 - DNA, 15 bp, Homo sapiens
gccagctctagagcc

SEQ ID NO: 800190 - DNA, 15 bp, Homo sapiens
ccagctctagagcct

SEQ ID NO: 800191 - DNA, 15 bp, Homo sapiens
cagctctagagcctt

SEQ ID NO: 800192 - DNA, 15 bp, Homo sapiens
agctctagagccttg

SEQ ID NO: 800193 - DNA, 15 bp, Homo sapiens
gctctagagccttgc

SEQ ID NO: 800194 - DNA, 15 bp, Homo sapiens
ctctagagccttgct

SEQ ID NO: 800195 - DNA, 15 bp, Homo sapiens
tctagagccttgctt

SEQ ID NO: 800196 - DNA, 15 bp, Homo sapiens
ctagagccttgcttg

SEQ ID NO: 800197 - DNA, 15 bp, Homo sapiens
tagagccttgcttgt

SEQ ID NO: 800198 - DNA, 15 bp, Homo sapiens
agagccttgcttgta

SEQ ID NO: 800199 - DNA, 15 bp, Homo sapiens
gagccttgcttgtaa

SEQ ID NO: 800200 - DNA, 15 bp, Homo sapiens
agccttgcttgtaat

SEQ ID NO: 800201 - DNA, 15 bp, Homo sapiens
gccttgcttgtaata

SEQ ID NO: 800202 - DNA, 15 bp, Homo sapiens
ccttgcttgtaataa

SEQ ID NO: 800203 - DNA, 15 bp, Homo sapiens
cttgcttgtaataag

SEQ ID NO: 800204 - DNA, 15 bp, Homo sapiens
ttgcttgtaataagc

SEQ ID NO: 800205 - DNA, 15 bp, Homo sapiens
tgcttgtaataagca

SEQ ID NO: 800206 - DNA, 15 bp, Homo sapiens
gcttgtaataagcag

SEQ ID NO: 800207 - DNA, 15 bp, Homo sapiens
cttgtaataagcagg

SEQ ID NO: 800208 - DNA, 15 bp, Homo sapiens
ttgtaataagcaggc

SEQ ID NO: 800209 - DNA, 15 bp, Homo sapiens
tgtaataagcaggct

SEQ ID NO: 800210 - DNA, 15 bp, Homo sapiens
gtaataagcaggcta

SEQ ID NO: 800211 - DNA, 15 bp, Homo sapiens
taataagcaggctaa

SEQ ID NO: 800212 - DNA, 15 bp, Homo sapiens
aataagcaggctaaa

SEQ ID NO: 800213 - DNA, 15 bp, Homo sapiens
ataagcaggctaaac

SEQ ID NO: 800214 - DNA, 15 bp, Homo sapiens
taagcaggctaaacc

SEQ ID NO: 800215 - DNA, 15 bp, Homo sapiens
aagcaggctaaacca

SEQ ID NO: 800216 - DNA, 15 bp, Homo sapiens
agcaggctaaaccaa

SEQ ID NO: 800217 - DNA, 15 bp, Homo sapiens
gcaggctaaaccaat

SEQ ID NO: 800218 - DNA, 15 bp, Homo sapiens
caggctaaaccaatg

SEQ ID NO: 800219 - DNA, 15 bp, Homo sapiens
aggctaaaccaatgc

SEQ ID NO: 800220 - DNA, 15 bp, Homo sapiens
ggctaaaccaatgct

SEQ ID NO: 800221 - DNA, 15 bp, Homo sapiens
gctaaaccaatgctt

SEQ ID NO: 800222 - DNA, 15 bp, Homo sapiens
ctaaaccaatgcttc

SEQ ID NO: 800223 - DNA, 15 bp, Homo sapiens
taaaccaatgcttct

SEQ ID NO: 800224 - DNA, 15 bp, Homo sapiens
aaaccaatgcttctc

SEQ ID NO: 800225 - DNA, 15 bp, Homo sapiens
aaccaatgcttctca

SEQ ID NO: 800226 - DNA, 15 bp, Homo sapiens
accaatgcttctcaa

SEQ ID NO: 800227 - DNA, 15 bp, Homo sapiens
ccaatgcttctcaaa

SEQ ID NO: 800228 - DNA, 15 bp, Homo sapiens
caatgcttctcaaag

SEQ ID NO: 800229 - DNA, 15 bp, Homo sapiens
aatgcttctcaaagt

SEQ ID NO: 800230 - DNA, 15 bp, Homo sapiens
atgcttctcaaagtg

SEQ ID NO: 800231 - DNA, 15 bp, Homo sapiens
tgcttctcaaagtgg

SEQ ID NO: 800232 - DNA, 15 bp, Homo sapiens
gcttctcaaagtggg

SEQ ID NO: 800233 - DNA, 15 bp, Homo sapiens
cttctcaaagtgggg

SEQ ID NO: 800234 - DNA, 15 bp, Homo sapiens
ttctcaaagtggggt

SEQ ID NO: 800235 - DNA, 15 bp, Homo sapiens
tctcaaagtggggtg

SEQ ID NO: 800236 - DNA, 15 bp, Homo sapiens
ctcaaagtggggtgc

SEQ ID NO: 800237 - DNA, 15 bp, Homo sapiens
tcaaagtggggtgcc

SEQ ID NO: 800238 - DNA, 15 bp, Homo sapiens
caaagtggggtgcct

SEQ ID NO: 800239 - DNA, 15 bp, Homo sapiens
aaagtggggtgcctg

SEQ ID NO: 800240 - DNA, 15 bp, Homo sapiens
aagtggggtgcctgg

SEQ ID NO: 800241 - DNA, 15 bp, Homo sapiens
agtggggtgcctgga

SEQ ID NO: 800242 - DNA, 15 bp, Homo sapiens
gtggggtgcctggag

SEQ ID NO: 800243 - DNA, 15 bp, Homo sapiens
tggggtgcctggagg

SEQ ID NO: 800244 - DNA, 15 bp, Homo sapiens
ggggtgcctggagga

SEQ ID NO: 800245 - DNA, 15 bp, Homo sapiens
gggtgcctggaggag

SEQ ID NO: 800246 - DNA, 15 bp, Homo sapiens
ggtgcctggaggagc

SEQ ID NO: 800247 - DNA, 15 bp, Homo sapiens
gtgcctggaggagca

SEQ ID NO: 800248 - DNA, 15 bp, Homo sapiens
tgcctggaggagcag

SEQ ID NO: 800249 - DNA, 15 bp, Homo sapiens
gcctggaggagcagc

SEQ ID NO: 800250 - DNA, 15 bp, Homo sapiens
cctggaggagcagcg

SEQ ID NO: 800251 - DNA, 15 bp, Homo sapiens
ctggaggagcagcgt

SEQ ID NO: 800252 - DNA, 15 bp, Homo sapiens
tggaggagcagcgtt

SEQ ID NO: 800253 - DNA, 15 bp, Homo sapiens
ggaggagcagcgtta

SEQ ID NO: 800254 - DNA, 15 bp, Homo sapiens
gaggagcagcgttac

SEQ ID NO: 800255 - DNA, 15 bp, Homo sapiens
aggagcagcgttacc

SEQ ID NO: 800256 - DNA, 15 bp, Homo sapiens
ggagcagcgttacct

SEQ ID NO: 800257 - DNA, 15 bp, Homo sapiens
gagcagcgttacctg

SEQ ID NO: 800258 - DNA, 15 bp, Homo sapiens
agcagcgttacctgg

SEQ ID NO: 800259 - DNA, 15 bp, Homo sapiens
gcagcgttacctgga

SEQ ID NO: 800260 - DNA, 15 bp, Homo sapiens
cagcgttacctggat

SEQ ID NO: 800261 - DNA, 15 bp, Homo sapiens
agcgttacctggatc

SEQ ID NO: 800262 - DNA, 15 bp, Homo sapiens
gcgttacctggatct

SEQ ID NO: 800263 - DNA, 15 bp, Homo sapiens
cgttacctggatctt

SEQ ID NO: 800264 - DNA, 15 bp, Homo sapiens
gttacctggatctta

SEQ ID NO: 800265 - DNA, 15 bp, Homo sapiens
ttacctggatcttag

SEQ ID NO: 800266 - DNA, 15 bp, Homo sapiens
tacctggatcttaga

SEQ ID NO: 800267 - DNA, 15 bp, Homo sapiens
acctggatcttagag

SEQ ID NO: 800268 - DNA, 15 bp, Homo sapiens
cctggatcttagagg

SEQ ID NO: 800269 - DNA, 15 bp, Homo sapiens
ctggatcttagaggt

SEQ ID NO: 800270 - DNA, 15 bp, Homo sapiens
tggatcttagaggtg

SEQ ID NO: 800271 - DNA, 15 bp, Homo sapiens
ggatcttagaggtgc

SEQ ID NO: 800272 - DNA, 15 bp, Homo sapiens
gatcttagaggtgca

SEQ ID NO: 800273 - DNA, 15 bp, Homo sapiens
atcttagaggtgcag

SEQ ID NO: 800274 - DNA, 15 bp, Homo sapiens
tcttagaggtgcaga

SEQ ID NO: 800275 - DNA, 15 bp, Homo sapiens
cttagaggtgcagat

SEQ ID NO: 800276 - DNA, 15 bp, Homo sapiens
ttagaggtgcagatt

SEQ ID NO: 800277 - DNA, 15 bp, Homo sapiens
tagaggtgcagattc

SEQ ID NO: 800278 - DNA, 15 bp, Homo sapiens
agaggtgcagattcc

SEQ ID NO: 800279 - DNA, 15 bp, Homo sapiens
gaggtgcagattcct

SEQ ID NO: 800280 - DNA, 15 bp, Homo sapiens
aggtgcagattcctg

SEQ ID NO: 800281 - DNA, 15 bp, Homo sapiens
ggtgcagattcctga

SEQ ID NO: 800282 - DNA, 15 bp, Homo sapiens
gtgcagattcctgaa

SEQ ID NO: 800283 - DNA, 15 bp, Homo sapiens
tgcagattcctgaat

SEQ ID NO: 800284 - DNA, 15 bp, Homo sapiens
gcagattcctgaatc

SEQ ID NO: 800285 - DNA, 15 bp, Homo sapiens
cagattcctgaatca

SEQ ID NO: 800286 - DNA, 15 bp, Homo sapiens
agattcctgaatcag

SEQ ID NO: 800287 - DNA, 15 bp, Homo sapiens
gattcctgaatcaga

SEQ ID NO: 800288 - DNA, 15 bp, Homo sapiens
attcctgaatcagaa

SEQ ID NO: 800289 - DNA, 15 bp, Homo sapiens
ttcctgaatcagaaa

SEQ ID NO: 800290 - DNA, 15 bp, Homo sapiens
tcctgaatcagaaac

SEQ ID NO: 800291 - DNA, 15 bp, Homo sapiens
cctgaatcagaaact

SEQ ID NO: 800292 - DNA, 15 bp, Homo sapiens
ctgaatcagaaactc

SEQ ID NO: 800293 - DNA, 15 bp, Homo sapiens
tgaatcagaaactct

SEQ ID NO: 800294 - DNA, 15 bp, Homo sapiens
gaatcagaaactctg

SEQ ID NO: 800295 - DNA, 15 bp, Homo sapiens
aatcagaaactctga

SEQ ID NO: 800296 - DNA, 15 bp, Homo sapiens
atcagaaactctgag

SEQ ID NO: 800297 - DNA, 15 bp, Homo sapiens
tcagaaactctgagg

SEQ ID NO: 800298 - DNA, 15 bp, Homo sapiens
cagaaactctgaggg

SEQ ID NO: 800299 - DNA, 15 bp, Homo sapiens
agaaactctgagggt

SEQ ID NO: 800300 - DNA, 15 bp, Homo sapiens
gaaactctgagggtg

SEQ ID NO: 800301 - DNA, 15 bp, Homo sapiens
aaactctgagggtga

SEQ ID NO: 800302 - DNA, 15 bp, Homo sapiens
aactctgagggtgaa

SEQ ID NO: 800303 - DNA, 15 bp, Homo sapiens
actctgagggtgaag

SEQ ID NO: 800304 - DNA, 15 bp, Homo sapiens
ctctgagggtgaagc

SEQ ID NO: 800305 - DNA, 15 bp, Homo sapiens
tctgagggtgaagcc

SEQ ID NO: 800306 - DNA, 15 bp, Homo sapiens
ctgagggtgaagcca

SEQ ID NO: 800307 - DNA, 15 bp, Homo sapiens
tgagggtgaagccaa

SEQ ID NO: 800308 - DNA, 15 bp, Homo sapiens
gagggtgaagccaac

SEQ ID NO: 800309 - DNA, 15 bp, Homo sapiens
agggtgaagccaacc

SEQ ID NO: 800310 - DNA, 15 bp, Homo sapiens
gggtgaagccaaccc

SEQ ID NO: 800311 - DNA, 15 bp, Homo sapiens
ggtgaagccaaccct

SEQ ID NO: 800312 - DNA, 15 bp, Homo sapiens
gtgaagccaaccctc

SEQ ID NO: 800313 - DNA, 15 bp, Homo sapiens
tgaagccaaccctct

SEQ ID NO: 800314 - DNA, 15 bp, Homo sapiens
gaagccaaccctctg

SEQ ID NO: 800315 - DNA, 15 bp, Homo sapiens
aagccaaccctctgt

SEQ ID NO: 800316 - DNA, 15 bp, Homo sapiens
agccaaccctctgtg

SEQ ID NO: 800317 - DNA, 15 bp, Homo sapiens
gccaaccctctgtgc

SEQ ID NO: 800318 - DNA, 15 bp, Homo sapiens
ccaaccctctgtgct

SEQ ID NO: 800319 - DNA, 15 bp, Homo sapiens
caaccctctgtgctt

SEQ ID NO: 800320 - DNA, 15 bp, Homo sapiens
aaccctctgtgcttg

SEQ ID NO: 800321 - DNA, 15 bp, Homo sapiens
accctctgtgcttga

SEQ ID NO: 800322 - DNA, 15 bp, Homo sapiens
ccctctgtgcttgaa

SEQ ID NO: 800323 - DNA, 15 bp, Homo sapiens
cctctgtgcttgaac

SEQ ID NO: 800324 - DNA, 15 bp, Homo sapiens
ctctgtgcttgaaca

SEQ ID NO: 800325 - DNA, 15 bp, Homo sapiens
tctgtgcttgaacaa

SEQ ID NO: 800326 - DNA, 15 bp, Homo sapiens
ctgtgcttgaacaat

SEQ ID NO: 800327 - DNA, 15 bp, Homo sapiens
tgtgcttgaacaatc

SEQ ID NO: 800328 - DNA, 15 bp, Homo sapiens
gtgcttgaacaatcc

SEQ ID NO: 800329 - DNA, 15 bp, Homo sapiens
tgcttgaacaatccc

SEQ ID NO: 800330 - DNA, 15 bp, Homo sapiens
gcttgaacaatccct

SEQ ID NO: 800331 - DNA, 15 bp, Homo sapiens
cttgaacaatccctc

SEQ ID NO: 800332 - DNA, 15 bp, Homo sapiens
ttgaacaatccctcc

SEQ ID NO: 800333 - DNA, 15 bp, Homo sapiens
tgaacaatccctcca

SEQ ID NO: 800334 - DNA, 15 bp, Homo sapiens
gaacaatccctccag

SEQ ID NO: 800335 - DNA, 15 bp, Homo sapiens
aacaatccctccagg

SEQ ID NO: 800336 - DNA, 15 bp, Homo sapiens
acaatccctccagga

SEQ ID NO: 800337 - DNA, 15 bp, Homo sapiens
caatccctccaggag

SEQ ID NO: 800338 - DNA, 15 bp, Homo sapiens
aatccctccaggaga

SEQ ID NO: 800339 - DNA, 15 bp, Homo sapiens
atccctccaggagag

SEQ ID NO: 800340 - DNA, 15 bp, Homo sapiens
tccctccaggagagt

SEQ ID NO: 800341 - DNA, 15 bp, Homo sapiens
ccctccaggagagtc

SEQ ID NO: 800342 - DNA, 15 bp, Homo sapiens
cctccaggagagtcc

SEQ ID NO: 800343 - DNA, 15 bp, Homo sapiens
ctccaggagagtccc

SEQ ID NO: 800344 - DNA, 15 bp, Homo sapiens
tccaggagagtcccg

SEQ ID NO: 800345 - DNA, 15 bp, Homo sapiens
ccaggagagtcccgt

SEQ ID NO: 800346 - DNA, 15 bp, Homo sapiens
caggagagtcccgtg

SEQ ID NO: 800347 - DNA, 15 bp, Homo sapiens
aggagagtcccgtgc

SEQ ID NO: 800348 - DNA, 15 bp, Homo sapiens
ggagagtcccgtgca

SEQ ID NO: 800349 - DNA, 15 bp, Homo sapiens
gagagtcccgtgcag

SEQ ID NO: 800350 - DNA, 15 bp, Homo sapiens
agagtcccgtgcagg

SEQ ID NO: 800351 - DNA, 15 bp, Homo sapiens
gagtcccgtgcaggc

SEQ ID NO: 800352 - DNA, 15 bp, Homo sapiens
agtcccgtgcaggct

SEQ ID NO: 800353 - DNA, 15 bp, Homo sapiens
gtcccgtgcaggctc

SEQ ID NO: 800354 - DNA, 15 bp, Homo sapiens
tcccgtgcaggctca

SEQ ID NO: 800355 - DNA, 15 bp, Homo sapiens
cccgtgcaggctcaa

SEQ ID NO: 800356 - DNA, 15 bp, Homo sapiens
ccgtgcaggctcaag

SEQ ID NO: 800357 - DNA, 15 bp, Homo sapiens
cgtgcaggctcaagc

SEQ ID NO: 800358 - DNA, 15 bp, Homo sapiens
gtgcaggctcaagct

SEQ ID NO: 800359 - DNA, 15 bp, Homo sapiens
tgcaggctcaagctc

SEQ ID NO: 800360 - DNA, 15 bp, Homo sapiens
gcaggctcaagctca

SEQ ID NO: 800361 - DNA, 15 bp, Homo sapiens
caggctcaagctcaa

SEQ ID NO: 800362 - DNA, 15 bp, Homo sapiens
aggctcaagctcaag

SEQ ID NO: 800363 - DNA, 15 bp, Homo sapiens
ggctcaagctcaagt

SEQ ID NO: 800364 - DNA, 15 bp, Homo sapiens
gctcaagctcaagtt

SEQ ID NO: 800365 - DNA, 15 bp, Homo sapiens
ctcaagctcaagttt

SEQ ID NO: 800366 - DNA, 15 bp, Homo sapiens
tcaagctcaagtttg

SEQ ID NO: 800367 - DNA, 15 bp, Homo sapiens
caagctcaagtttga

SEQ ID NO: 800368 - DNA, 15 bp, Homo sapiens
aagctcaagtttgag

SEQ ID NO: 800369 - DNA, 15 bp, Homo sapiens
agctcaagtttgagt

SEQ ID NO: 800370 - DNA, 15 bp, Homo sapiens
gctcaagtttgagtt

SEQ ID NO: 800371 - DNA, 15 bp, Homo sapiens
ctcaagtttgagttg

SEQ ID NO: 800372 - DNA, 15 bp, Homo sapiens
tcaagtttgagttgg

SEQ ID NO: 800373 - DNA, 15 bp, Homo sapiens
caagtttgagttggt

SEQ ID NO: 800374 - DNA, 15 bp, Homo sapiens
aagtttgagttggtc

SEQ ID NO: 800375 - DNA, 15 bp, Homo sapiens
agtttgagttggtct

SEQ ID NO: 800376 - DNA, 15 bp, Homo sapiens
gtttgagttggtcta

SEQ ID NO: 800377 - DNA, 15 bp, Homo sapiens
tttgagttggtctaa

SEQ ID NO: 800378 - DNA, 15 bp, Homo sapiens
ttgagttggtctaaa

SEQ ID NO: 800379 - DNA, 15 bp, Homo sapiens
tgagttggtctaaac

SEQ ID NO: 800380 - DNA, 15 bp, Homo sapiens
gagttggtctaaact

SEQ ID NO: 800381 - DNA, 15 bp, Homo sapiens
agttggtctaaacta

SEQ ID NO: 800382 - DNA, 15 bp, Homo sapiens
gttggtctaaactac

SEQ ID NO: 800383 - DNA, 15 bp, Homo sapiens
ttggtctaaactact

SEQ ID NO: 800384 - DNA, 15 bp, Homo sapiens
tggtctaaactactt

SEQ ID NO: 800385 - DNA, 15 bp, Homo sapiens
ggtctaaactactta

SEQ ID NO: 800386 - DNA, 15 bp, Homo sapiens
gtctaaactacttaa

SEQ ID NO: 800387 - DNA, 15 bp, Homo sapiens
tctaaactacttaag

SEQ ID NO: 800388 - DNA, 15 bp, Homo sapiens
ctaaactacttaagc

SEQ ID NO: 800389 - DNA, 15 bp, Homo sapiens
taaactacttaagct

SEQ ID NO: 800390 - DNA, 15 bp, Homo sapiens
aaactacttaagctg

SEQ ID NO: 800391 - DNA, 15 bp, Homo sapiens
aactacttaagctgg

SEQ ID NO: 800392 - DNA, 15 bp, Homo sapiens
actacttaagctggt

SEQ ID NO: 800393 - DNA, 15 bp, Homo sapiens
ctacttaagctggta

SEQ ID NO: 800394 - DNA, 15 bp, Homo sapiens
tacttaagctggtaa

SEQ ID NO: 800395 - DNA, 15 bp, Homo sapiens
acttaagctggtaaa

SEQ ID NO: 800396 - DNA, 15 bp, Homo sapiens
cttaagctggtaaat

SEQ ID NO: 800397 - DNA, 15 bp, Homo sapiens
ttaagctggtaaatc

SEQ ID NO: 800398 - DNA, 15 bp, Homo sapiens
taagctggtaaatct

SEQ ID NO: 800399 - DNA, 15 bp, Homo sapiens
aagctggtaaatctt

SEQ ID NO: 800400 - DNA, 15 bp, Homo sapiens
agctggtaaatcttc

SEQ ID NO: 800401 - DNA, 15 bp, Homo sapiens
gctggtaaatcttct

SEQ ID NO: 800402 - DNA, 15 bp, Homo sapiens
ctggtaaatcttctg

SEQ ID NO: 800403 - DNA, 15 bp, Homo sapiens
tggtaaatcttctgt

SEQ ID NO: 800404 - DNA, 15 bp, Homo sapiens
ggtaaatcttctgta

SEQ ID NO: 800405 - DNA, 15 bp, Homo sapiens
gtaaatcttctgtat

SEQ ID NO: 800406 - DNA, 15 bp, Homo sapiens
taaatcttctgtatt

SEQ ID NO: 800407 - DNA, 15 bp, Homo sapiens
aaatcttctgtattt

SEQ ID NO: 800408 - DNA, 15 bp, Homo sapiens
aatcttctgtatttt

SEQ ID NO: 800409 - DNA, 15 bp, Homo sapiens
atcttctgtatttta

SEQ ID NO: 800410 - DNA, 15 bp, Homo sapiens
tcttctgtattttac

SEQ ID NO: 800411 - DNA, 15 bp, Homo sapiens
cttctgtattttaca

SEQ ID NO: 800412 - DNA, 15 bp, Homo sapiens
ttctgtattttacaa

SEQ ID NO: 800413 - DNA, 15 bp, Homo sapiens
tctgtattttacaac

SEQ ID NO: 800414 - DNA, 15 bp, Homo sapiens
ctgtattttacaacg

SEQ ID NO: 800415 - DNA, 15 bp, Homo sapiens
tgtattttacaacga

SEQ ID NO: 800416 - DNA, 15 bp, Homo sapiens
gtattttacaacgag

SEQ ID NO: 800417 - DNA, 15 bp, Homo sapiens
tattttacaacgagt

SEQ ID NO: 800418 - DNA, 15 bp, Homo sapiens
attttacaacgagtc

SEQ ID NO: 800419 - DNA, 15 bp, Homo sapiens
ttttacaacgagtct

SEQ ID NO: 800420 - DNA, 15 bp, Homo sapiens
tttacaacgagtctt

SEQ ID NO: 800421 - DNA, 15 bp, Homo sapiens
ttacaacgagtcttc

SEQ ID NO: 800422 - DNA, 15 bp, Homo sapiens
tacaacgagtcttcc

SEQ ID NO: 800423 - DNA, 15 bp, Homo sapiens
acaacgagtcttcct

SEQ ID NO: 800424 - DNA, 15 bp, Homo sapiens
caacgagtcttcctt

SEQ ID NO: 800425 - DNA, 15 bp, Homo sapiens
aacgagtcttccttt

SEQ ID NO: 800426 - DNA, 15 bp, Homo sapiens
acgagtcttcctttt

SEQ ID NO: 800427 - DNA, 15 bp, Homo sapiens
cgagtcttccttttc

SEQ ID NO: 800428 - DNA, 15 bp, Homo sapiens
gagtcttccttttca

SEQ ID NO: 800429 - DNA, 15 bp, Homo sapiens
agtcttccttttcat

SEQ ID NO: 800430 - DNA, 15 bp, Homo sapiens
gtcttccttttcatg

SEQ ID NO: 800431 - DNA, 15 bp, Homo sapiens
tcttccttttcatgc

SEQ ID NO: 800432 - DNA, 15 bp, Homo sapiens
cttccttttcatgct

SEQ ID NO: 800433 - DNA, 15 bp, Homo sapiens
ttccttttcatgctt

SEQ ID NO: 800434 - DNA, 15 bp, Homo sapiens
tccttttcatgcttt

SEQ ID NO: 800435 - DNA, 15 bp, Homo sapiens
ccttttcatgctttg

SEQ ID NO: 800436 - DNA, 15 bp, Homo sapiens
cttttcatgctttgt

SEQ ID NO: 800437 - DNA, 15 bp, Homo sapiens
ttttcatgctttgta

SEQ ID NO: 800438 - DNA, 15 bp, Homo sapiens
tttcatgctttgtaa

SEQ ID NO: 800439 - DNA, 15 bp, Homo sapiens
ttcatgctttgtaaa

SEQ ID NO: 800440 - DNA, 15 bp, Homo sapiens
tcatgctttgtaaac

SEQ ID NO: 800441 - DNA, 15 bp, Homo sapiens
catgctttgtaaacc

SEQ ID NO: 800442 - DNA, 15 bp, Homo sapiens
atgctttgtaaacca

SEQ ID NO: 800443 - DNA, 15 bp, Homo sapiens
tgctttgtaaaccaa

SEQ ID NO: 800444 - DNA, 15 bp, Homo sapiens
gctttgtaaaccaaa

SEQ ID NO: 800445 - DNA, 15 bp, Homo sapiens
ctttgtaaaccaaat

SEQ ID NO: 800446 - DNA, 15 bp, Homo sapiens
tttgtaaaccaaatt

SEQ ID NO: 800447 - DNA, 15 bp, Homo sapiens
ttgtaaaccaaattg

SEQ ID NO: 800448 - DNA, 15 bp, Homo sapiens
tgtaaaccaaattgc

SEQ ID NO: 800449 - DNA, 15 bp, Homo sapiens
gtaaaccaaattgct

SEQ ID NO: 800450 - DNA, 15 bp, Homo sapiens
taaaccaaattgctg

SEQ ID NO: 800451 - DNA, 15 bp, Homo sapiens
aaaccaaattgctga

SEQ ID NO: 800452 - DNA, 15 bp, Homo sapiens
aaccaaattgctgac

SEQ ID NO: 800453 - DNA, 15 bp, Homo sapiens
accaaattgctgact

SEQ ID NO: 800454 - DNA, 15 bp, Homo sapiens
ccaaattgctgactt

SEQ ID NO: 800455 - DNA, 15 bp, Homo sapiens
caaattgctgacttc

SEQ ID NO: 800456 - DNA, 15 bp, Homo sapiens
aaattgctgacttcc

SEQ ID NO: 800457 - DNA, 15 bp, Homo sapiens
aattgctgacttccc

SEQ ID NO: 800458 - DNA, 15 bp, Homo sapiens
attgctgacttccca

SEQ ID NO: 800459 - DNA, 15 bp, Homo sapiens
ttgctgacttcccaa

SEQ ID NO: 800460 - DNA, 15 bp, Homo sapiens
tgctgacttcccaaa

SEQ ID NO: 800461 - DNA, 15 bp, Homo sapiens
gctgacttcccaaac

SEQ ID NO: 800462 - DNA, 15 bp, Homo sapiens
ctgacttcccaaacc

SEQ ID NO: 800463 - DNA, 15 bp, Homo sapiens
tgacttcccaaacct

SEQ ID NO: 800464 - DNA, 15 bp, Homo sapiens
gacttcccaaacctg

SEQ ID NO: 800465 - DNA, 15 bp, Homo sapiens
acttcccaaacctga

SEQ ID NO: 800466 - DNA, 15 bp, Homo sapiens
cttcccaaacctgag

SEQ ID NO: 800467 - DNA, 15 bp, Homo sapiens
ttcccaaacctgagg

SEQ ID NO: 800468 - DNA, 15 bp, Homo sapiens
tcccaaacctgagga

SEQ ID NO: 800469 - DNA, 15 bp, Homo sapiens
cccaaacctgaggac

SEQ ID NO: 800470 - DNA, 15 bp, Homo sapiens
ccaaacctgaggaca

SEQ ID NO: 800471 - DNA, 15 bp, Homo sapiens
caaacctgaggacat

SEQ ID NO: 800472 - DNA, 15 bp, Homo sapiens
aaacctgaggacatt

SEQ ID NO: 800473 - DNA, 15 bp, Homo sapiens
aacctgaggacattt

SEQ ID NO: 800474 - DNA, 15 bp, Homo sapiens
acctgaggacatttc

SEQ ID NO: 800475 - DNA, 15 bp, Homo sapiens
cctgaggacatttcc

SEQ ID NO: 800476 - DNA, 15 bp, Homo sapiens
ctgaggacatttcca

SEQ ID NO: 800477 - DNA, 15 bp, Homo sapiens
tgaggacatttccaa

SEQ ID NO: 800478 - DNA, 15 bp, Homo sapiens
gaggacatttccaag

SEQ ID NO: 800479 - DNA, 15 bp, Homo sapiens
aggacatttccaagg

SEQ ID NO: 800480 - DNA, 15 bp, Homo sapiens
ggacatttccaaggt

SEQ ID NO: 800481 - DNA, 15 bp, Homo sapiens
gacatttccaaggtc

SEQ ID NO: 800482 - DNA, 15 bp, Homo sapiens
acatttccaaggtca

SEQ ID NO: 800483 - DNA, 15 bp, Homo sapiens
catttccaaggtcat

SEQ ID NO: 800484 - DNA, 15 bp, Homo sapiens
atttccaaggtcatc

SEQ ID NO: 800485 - DNA, 15 bp, Homo sapiens
tttccaaggtcatcg

SEQ ID NO: 800486 - DNA, 15 bp, Homo sapiens
ttccaaggtcatcgt

SEQ ID NO: 800487 - DNA, 15 bp, Homo sapiens
tccaaggtcatcgtt

SEQ ID NO: 800488 - DNA, 15 bp, Homo sapiens
ccaaggtcatcgtta

SEQ ID NO: 800489 - DNA, 15 bp, Homo sapiens
caaggtcatcgttac

SEQ ID NO: 800490 - DNA, 15 bp, Homo sapiens
aaggtcatcgttacc

SEQ ID NO: 800491 - DNA, 15 bp, Homo sapiens
aggtcatcgttacct

SEQ ID NO: 800492 - DNA, 15 bp, Homo sapiens
ggtcatcgttacctc

SEQ ID NO: 800493 - DNA, 15 bp, Homo sapiens
gtcatcgttacctct

SEQ ID NO: 800494 - DNA, 15 bp, Homo sapiens
tcatcgttacctctc

SEQ ID NO: 800495 - DNA, 15 bp, Homo sapiens
catcgttacctctca

SEQ ID NO: 800496 - DNA, 15 bp, Homo sapiens
atcgttacctctcag

SEQ ID NO: 800497 - DNA, 15 bp, Homo sapiens
tcgttacctctcagc

SEQ ID NO: 800498 - DNA, 15 bp, Homo sapiens
cgttacctctcagca

SEQ ID NO: 800499 - DNA, 15 bp, Homo sapiens
gttacctctcagcag

SEQ ID NO: 800500 - DNA, 15 bp, Homo sapiens
ttacctctcagcagc

SEQ ID NO: 800501 - DNA, 15 bp, Homo sapiens
tacctctcagcagcc

SEQ ID NO: 800502 - DNA, 15 bp, Homo sapiens
acctctcagcagccc

SEQ ID NO: 800503 - DNA, 15 bp, Homo sapiens
cctctcagcagccca

SEQ ID NO: 800504 - DNA, 15 bp, Homo sapiens
ctctcagcagcccat

SEQ ID NO: 800505 - DNA, 15 bp, Homo sapiens
tctcagcagcccatt

SEQ ID NO: 800506 - DNA, 15 bp, Homo sapiens
ctcagcagcccattt

SEQ ID NO: 800507 - DNA, 15 bp, Homo sapiens
tcagcagcccatttt

SEQ ID NO: 800508 - DNA, 15 bp, Homo sapiens
cagcagcccattttc

SEQ ID NO: 800509 - DNA, 15 bp, Homo sapiens
agcagcccattttca

SEQ ID NO: 800510 - DNA, 15 bp, Homo sapiens
gcagcccattttcag

SEQ ID NO: 800511 - DNA, 15 bp, Homo sapiens
cagcccattttcagg

SEQ ID NO: 800512 - DNA, 15 bp, Homo sapiens
agcccattttcaggt

SEQ ID NO: 800513 - DNA, 15 bp, Homo sapiens
gcccattttcaggtg

SEQ ID NO: 800514 - DNA, 15 bp, Homo sapiens
cccattttcaggtgg

SEQ ID NO: 800515 - DNA, 15 bp, Homo sapiens
ccattttcaggtggc

SEQ ID NO: 800516 - DNA, 15 bp, Homo sapiens
cattttcaggtggcc

SEQ ID NO: 800517 - DNA, 15 bp, Homo sapiens
attttcaggtggcct

SEQ ID NO: 800518 - DNA, 15 bp, Homo sapiens
ttttcaggtggcctc

SEQ ID NO: 800519 - DNA, 15 bp, Homo sapiens
tttcaggtggcctct

SEQ ID NO: 800520 - DNA, 15 bp, Homo sapiens
ttcaggtggcctctt

SEQ ID NO: 800521 - DNA, 15 bp, Homo sapiens
tcaggtggcctcttt

SEQ ID NO: 800522 - DNA, 15 bp, Homo sapiens
caggtggcctctttt

SEQ ID NO: 800523 - DNA, 15 bp, Homo sapiens
aggtggcctctttta

SEQ ID NO: 800524 - DNA, 15 bp, Homo sapiens
ggtggcctcttttaa

SEQ ID NO: 800525 - DNA, 15 bp, Homo sapiens
gtggcctcttttaac

SEQ ID NO: 800526 - DNA, 15 bp, Homo sapiens
tggcctcttttaact

SEQ ID NO: 800527 - DNA, 15 bp, Homo sapiens
ggcctcttttaactg

SEQ ID NO: 800528 - DNA, 15 bp, Homo sapiens
gcctcttttaactgt

SEQ ID NO: 800529 - DNA, 15 bp, Homo sapiens
cctcttttaactgtg

SEQ ID NO: 800530 - DNA, 15 bp, Homo sapiens
ctcttttaactgtgg

SEQ ID NO: 800531 - DNA, 15 bp, Homo sapiens
tcttttaactgtggg

SEQ ID NO: 800532 - DNA, 15 bp, Homo sapiens
cttttaactgtggga

SEQ ID NO: 800533 - DNA, 15 bp, Homo sapiens
ttttaactgtgggat

SEQ ID NO: 800534 - DNA, 15 bp, Homo sapiens
tttaactgtgggatt

SEQ ID NO: 800535 - DNA, 15 bp, Homo sapiens
ttaactgtgggattc

SEQ ID NO: 800536 - DNA, 15 bp, Homo sapiens
taactgtgggattct

SEQ ID NO: 800537 - DNA, 15 bp, Homo sapiens
aactgtgggattctt

SEQ ID NO: 800538 - DNA, 15 bp, Homo sapiens
actgtgggattcttt

SEQ ID NO: 800539 - DNA, 15 bp, Homo sapiens
ctgtgggattcttta

SEQ ID NO: 800540 - DNA, 15 bp, Homo sapiens
tgtgggattctttag

SEQ ID NO: 800541 - DNA, 15 bp, Homo sapiens
gtgggattctttagg

SEQ ID NO: 800542 - DNA, 15 bp, Homo sapiens
tgggattctttagga

SEQ ID NO: 800543 - DNA, 15 bp, Homo sapiens
gggattctttaggaa

SEQ ID NO: 800544 - DNA, 15 bp, Homo sapiens
ggattctttaggaag

SEQ ID NO: 800545 - DNA, 15 bp, Homo sapiens
gattctttaggaaga

SEQ ID NO: 800546 - DNA, 15 bp, Homo sapiens
attctttaggaagac

SEQ ID NO: 800547 - DNA, 15 bp, Homo sapiens
ttctttaggaagact

SEQ ID NO: 800548 - DNA, 15 bp, Homo sapiens
tctttaggaagactg

SEQ ID NO: 800549 - DNA, 15 bp, Homo sapiens
ctttaggaagactga

SEQ ID NO: 800550 - DNA, 15 bp, Homo sapiens
tttaggaagactgag

SEQ ID NO: 800551 - DNA, 15 bp, Homo sapiens
ttaggaagactgaga

SEQ ID NO: 800552 - DNA, 15 bp, Homo sapiens
taggaagactgagat

SEQ ID NO: 800553 - DNA, 15 bp, Homo sapiens
aggaagactgagatt

SEQ ID NO: 800554 - DNA, 15 bp, Homo sapiens
ggaagactgagattg

SEQ ID NO: 800555 - DNA, 15 bp, Homo sapiens
gaagactgagattgg

SEQ ID NO: 800556 - DNA, 15 bp, Homo sapiens
aagactgagattggc

SEQ ID NO: 800557 - DNA, 15 bp, Homo sapiens
agactgagattggca

SEQ ID NO: 800558 - DNA, 15 bp, Homo sapiens
gactgagattggcac

SEQ ID NO: 800559 - DNA, 15 bp, Homo sapiens
actgagattggcaca

SEQ ID NO: 800560 - DNA, 15 bp, Homo sapiens
ctgagattggcacag

SEQ ID NO: 800561 - DNA, 15 bp, Homo sapiens
tgagattggcacagg

SEQ ID NO: 800562 - DNA, 15 bp, Homo sapiens
gagattggcacaggt

SEQ ID NO: 800563 - DNA, 15 bp, Homo sapiens
agattggcacaggtt

SEQ ID NO: 800564 - DNA, 15 bp, Homo sapiens
gattggcacaggttc

SEQ ID NO: 800565 - DNA, 15 bp, Homo sapiens
attggcacaggttcc

SEQ ID NO: 800566 - DNA, 15 bp, Homo sapiens
ttggcacaggttccc

SEQ ID NO: 800567 - DNA, 15 bp, Homo sapiens
tggcacaggttccct

SEQ ID NO: 800568 - DNA, 15 bp, Homo sapiens
ggcacaggttccctg

SEQ ID NO: 800569 - DNA, 15 bp, Homo sapiens
gcacaggttccctgc

SEQ ID NO: 800570 - DNA, 15 bp, Homo sapiens
cacaggttccctgct

SEQ ID NO: 800571 - DNA, 15 bp, Homo sapiens
acaggttccctgctg

SEQ ID NO: 800572 - DNA, 15 bp, Homo sapiens
caggttccctgctgc

SEQ ID NO: 800573 - DNA, 15 bp, Homo sapiens
aggttccctgctgcc

SEQ ID NO: 800574 - DNA, 15 bp, Homo sapiens
ggttccctgctgccc

SEQ ID NO: 800575 - DNA, 15 bp, Homo sapiens
gttccctgctgccca

SEQ ID NO: 800576 - DNA, 15 bp, Homo sapiens
ttccctgctgcccag

SEQ ID NO: 800577 - DNA, 15 bp, Homo sapiens
tccctgctgcccagc

SEQ ID NO: 800578 - DNA, 15 bp, Homo sapiens
ccctgctgcccagca

SEQ ID NO: 800579 - DNA, 15 bp, Homo sapiens
cctgctgcccagcag

SEQ ID NO: 800580 - DNA, 15 bp, Homo sapiens
ctgctgcccagcagg

SEQ ID NO: 800581 - DNA, 15 bp, Homo sapiens
tgctgcccagcaggg

SEQ ID NO: 800582 - DNA, 15 bp, Homo sapiens
gctgcccagcagggc

SEQ ID NO: 800583 - DNA, 15 bp, Homo sapiens
ctgcccagcagggct

SEQ ID NO: 800584 - DNA, 15 bp, Homo sapiens
tgcccagcagggctc

SEQ ID NO: 800585 - DNA, 15 bp, Homo sapiens
gcccagcagggctcc

SEQ ID NO: 800586 - DNA, 15 bp, Homo sapiens
cccagcagggctcct

SEQ ID NO: 800587 - DNA, 15 bp, Homo sapiens
ccagcagggctcctg

SEQ ID NO: 800588 - DNA, 15 bp, Homo sapiens
cagcagggctcctga

SEQ ID NO: 800589 - DNA, 15 bp, Homo sapiens
agcagggctcctgag

SEQ ID NO: 800590 - DNA, 15 bp, Homo sapiens
gcagggctcctgagc

SEQ ID NO: 800591 - DNA, 15 bp, Homo sapiens
cagggctcctgagct

SEQ ID NO: 800592 - DNA, 15 bp, Homo sapiens
agggctcctgagctt

SEQ ID NO: 800593 - DNA, 15 bp, Homo sapiens
gggctcctgagcttg

SEQ ID NO: 800594 - DNA, 15 bp, Homo sapiens
ggctcctgagcttga

SEQ ID NO: 800595 - DNA, 15 bp, Homo sapiens
gctcctgagcttgaa

SEQ ID NO: 800596 - DNA, 15 bp, Homo sapiens
ctcctgagcttgaag

SEQ ID NO: 800597 - DNA, 15 bp, Homo sapiens
tcctgagcttgaaga

SEQ ID NO: 800598 - DNA, 15 bp, Homo sapiens
cctgagcttgaagac

SEQ ID NO: 800599 - DNA, 15 bp, Homo sapiens
ctgagcttgaagaca

SEQ ID NO: 800600 - DNA, 15 bp, Homo sapiens
tgagcttgaagacag

SEQ ID NO: 800601 - DNA, 15 bp, Homo sapiens
gagcttgaagacagc

SEQ ID NO: 800602 - DNA, 15 bp, Homo sapiens
agcttgaagacagca

SEQ ID NO: 800603 - DNA, 15 bp, Homo sapiens
gcttgaagacagcaa

SEQ ID NO: 800604 - DNA, 15 bp, Homo sapiens
cttgaagacagcaaa

SEQ ID NO: 800605 - DNA, 15 bp, Homo sapiens
ttgaagacagcaaaa

SEQ ID NO: 800606 - DNA, 15 bp, Homo sapiens
tgaagacagcaaaat

SEQ ID NO: 800607 - DNA, 15 bp, Homo sapiens
gaagacagcaaaatt

SEQ ID NO: 800608 - DNA, 15 bp, Homo sapiens
aagacagcaaaattg

SEQ ID NO: 800609 - DNA, 15 bp, Homo sapiens
agacagcaaaattgg

SEQ ID NO: 800610 - DNA, 15 bp, Homo sapiens
gacagcaaaattggt

SEQ ID NO: 800611 - DNA, 15 bp, Homo sapiens
acagcaaaattggtg

SEQ ID NO: 800612 - DNA, 15 bp, Homo sapiens
cagcaaaattggtgt

SEQ ID NO: 800613 - DNA, 15 bp, Homo sapiens
agcaaaattggtgtt

SEQ ID NO: 800614 - DNA, 15 bp, Homo sapiens
gcaaaattggtgttg

SEQ ID NO: 800615 - DNA, 15 bp, Homo sapiens
caaaattggtgttgt

SEQ ID NO: 800616 - DNA, 15 bp, Homo sapiens
aaaattggtgttgtt

SEQ ID NO: 800617 - DNA, 15 bp, Homo sapiens
aaattggtgttgttg

SEQ ID NO: 800618 - DNA, 15 bp, Homo sapiens
aattggtgttgttga

SEQ ID NO: 800619 - DNA, 15 bp, Homo sapiens
attggtgttgttgaa

SEQ ID NO: 800620 - DNA, 15 bp, Homo sapiens
ttggtgttgttgaac

SEQ ID NO: 800621 - DNA, 15 bp, Homo sapiens
tggtgttgttgaacc

SEQ ID NO: 800622 - DNA, 15 bp, Homo sapiens
ggtgttgttgaacct

SEQ ID NO: 800623 - DNA, 15 bp, Homo sapiens
gtgttgttgaacctt

SEQ ID NO: 800624 - DNA, 15 bp, Homo sapiens
tgttgttgaaccttc

SEQ ID NO: 800625 - DNA, 15 bp, Homo sapiens
gttgttgaaccttct

SEQ ID NO: 800626 - DNA, 15 bp, Homo sapiens
ttgttgaaccttctg

SEQ ID NO: 800627 - DNA, 15 bp, Homo sapiens
tgttgaaccttctgt

SEQ ID NO: 800628 - DNA, 15 bp, Homo sapiens
gttgaaccttctgtt

SEQ ID NO: 800629 - DNA, 15 bp, Homo sapiens
ttgaaccttctgttg

SEQ ID NO: 800630 - DNA, 15 bp, Homo sapiens
tgaaccttctgttgg

SEQ ID NO: 800631 - DNA, 15 bp, Homo sapiens
gaaccttctgttggc

SEQ ID NO: 800632 - DNA, 15 bp, Homo sapiens
aaccttctgttggcc

SEQ ID NO: 800633 - DNA, 15 bp, Homo sapiens
accttctgttggcca

SEQ ID NO: 800634 - DNA, 15 bp, Homo sapiens
ccttctgttggccag

SEQ ID NO: 800635 - DNA, 15 bp, Homo sapiens
cttctgttggccaga

SEQ ID NO: 800636 - DNA, 15 bp, Homo sapiens
ttctgttggccagag

SEQ ID NO: 800637 - DNA, 15 bp, Homo sapiens
tctgttggccagagg

SEQ ID NO: 800638 - DNA, 15 bp, Homo sapiens
ctgttggccagaggg

SEQ ID NO: 800639 - DNA, 15 bp, Homo sapiens
tgttggccagagggg

SEQ ID NO: 800640 - DNA, 15 bp, Homo sapiens
gttggccagagggga

SEQ ID NO: 800641 - DNA, 15 bp, Homo sapiens
ttggccagaggggat

SEQ ID NO: 800642 - DNA, 15 bp, Homo sapiens
tggccagaggggatt

SEQ ID NO: 800643 - DNA, 15 bp, Homo sapiens
ggccagaggggattt

SEQ ID NO: 800644 - DNA, 15 bp, Homo sapiens
gccagaggggatttt

SEQ ID NO: 800645 - DNA, 15 bp, Homo sapiens
ccagaggggattttg

SEQ ID NO: 800646 - DNA, 15 bp, Homo sapiens
cagaggggattttga

SEQ ID NO: 800647 - DNA, 15 bp, Homo sapiens
agaggggattttgag

SEQ ID NO: 800648 - DNA, 15 bp, Homo sapiens
gaggggattttgaga

SEQ ID NO: 800649 - DNA, 15 bp, Homo sapiens
aggggattttgagag

SEQ ID NO: 800650 - DNA, 15 bp, Homo sapiens
ggggattttgagagt

SEQ ID NO: 800651 - DNA, 15 bp, Homo sapiens
gggattttgagagtc

SEQ ID NO: 800652 - DNA, 15 bp, Homo sapiens
ggattttgagagtcc

SEQ ID NO: 800653 - DNA, 15 bp, Homo sapiens
gattttgagagtcct

SEQ ID NO: 800654 - DNA, 15 bp, Homo sapiens
attttgagagtcctg

SEQ ID NO: 800655 - DNA, 15 bp, Homo sapiens
ttttgagagtcctgt

SEQ ID NO: 800656 - DNA, 15 bp, Homo sapiens
tttgagagtcctgtc

SEQ ID NO: 800657 - DNA, 15 bp, Homo sapiens
ttgagagtcctgtct

SEQ ID NO: 800658 - DNA, 15 bp, Homo sapiens
tgagagtcctgtctg

SEQ ID NO: 800659 - DNA, 15 bp, Homo sapiens
gagagtcctgtctgc

SEQ ID NO: 800660 - DNA, 15 bp, Homo sapiens
agagtcctgtctgct

SEQ ID NO: 800661 - DNA, 15 bp, Homo sapiens
gagtcctgtctgcta

SEQ ID NO: 800662 - DNA, 15 bp, Homo sapiens
agtcctgtctgctat

SEQ ID NO: 800663 - DNA, 15 bp, Homo sapiens
gtcctgtctgctatc

SEQ ID NO: 800664 - DNA, 15 bp, Homo sapiens
tcctgtctgctatca

SEQ ID NO: 800665 - DNA, 15 bp, Homo sapiens
cctgtctgctatcac

SEQ ID NO: 800666 - DNA, 15 bp, Homo sapiens
ctgtctgctatcacg

SEQ ID NO: 800667 - DNA, 15 bp, Homo sapiens
tgtctgctatcacgt

SEQ ID NO: 800668 - DNA, 15 bp, Homo sapiens
gtctgctatcacgtg

SEQ ID NO: 800669 - DNA, 15 bp, Homo sapiens
tctgctatcacgtgg

SEQ ID NO: 800670 - DNA, 15 bp, Homo sapiens
ctgctatcacgtgga

SEQ ID NO: 800671 - DNA, 15 bp, Homo sapiens
tgctatcacgtggac

SEQ ID NO: 800672 - DNA, 15 bp, Homo sapiens
gctatcacgtggact

SEQ ID NO: 800673 - DNA, 15 bp, Homo sapiens
ctatcacgtggactt

SEQ ID NO: 800674 - DNA, 15 bp, Homo sapiens
tatcacgtggacttg

SEQ ID NO: 800675 - DNA, 15 bp, Homo sapiens
atcacgtggacttgg

SEQ ID NO: 800676 - DNA, 15 bp, Homo sapiens
tcacgtggacttgga

SEQ ID NO: 800677 - DNA, 15 bp, Homo sapiens
cacgtggacttggaa

SEQ ID NO: 800678 - DNA, 15 bp, Homo sapiens
acgtggacttggaaa

SEQ ID NO: 800679 - DNA, 15 bp, Homo sapiens
cgtggacttggaaaa

SEQ ID NO: 800680 - DNA, 15 bp, Homo sapiens
gtggacttggaaaat

SEQ ID NO: 800681 - DNA, 15 bp, Homo sapiens
tggacttggaaaatt

SEQ ID NO: 800682 - DNA, 15 bp, Homo sapiens
ggacttggaaaattt

SEQ ID NO: 800683 - DNA, 15 bp, Homo sapiens
gacttggaaaatttg

SEQ ID NO: 800684 - DNA, 15 bp, Homo sapiens
acttggaaaatttgg

SEQ ID NO: 800685 - DNA, 15 bp, Homo sapiens
cttggaaaatttggt

SEQ ID NO: 800686 - DNA, 15 bp, Homo sapiens
ttggaaaatttggtc

SEQ ID NO: 800687 - DNA, 15 bp, Homo sapiens
tggaaaatttggtcc

SEQ ID NO: 800688 - DNA, 15 bp, Homo sapiens
ggaaaatttggtcca

SEQ ID NO: 800689 - DNA, 15 bp, Homo sapiens
gaaaatttggtccag

SEQ ID NO: 800690 - DNA, 15 bp, Homo sapiens
aaaatttggtccagt

SEQ ID NO: 800691 - DNA, 15 bp, Homo sapiens
aaatttggtccagtc

SEQ ID NO: 800692 - DNA, 15 bp, Homo sapiens
aatttggtccagtca

SEQ ID NO: 800693 - DNA, 15 bp, Homo sapiens
atttggtccagtcaa

SEQ ID NO: 800694 - DNA, 15 bp, Homo sapiens
tttggtccagtcaag

SEQ ID NO: 800695 - DNA, 15 bp, Homo sapiens
ttggtccagtcaagt

SEQ ID NO: 800696 - DNA, 15 bp, Homo sapiens
tggtccagtcaagtg

SEQ ID NO: 800697 - DNA, 15 bp, Homo sapiens
ggtccagtcaagtgg

SEQ ID NO: 800698 - DNA, 15 bp, Homo sapiens
gtccagtcaagtgga

SEQ ID NO: 800699 - DNA, 15 bp, Homo sapiens
tccagtcaagtggaa

SEQ ID NO: 800700 - DNA, 15 bp, Homo sapiens
ccagtcaagtggaaa

SEQ ID NO: 800701 - DNA, 15 bp, Homo sapiens
cagtcaagtggaaaa

SEQ ID NO: 800702 - DNA, 15 bp, Homo sapiens
agtcaagtggaaaat

SEQ ID NO: 800703 - DNA, 15 bp, Homo sapiens
gtcaagtggaaaatt

SEQ ID NO: 800704 - DNA, 15 bp, Homo sapiens
tcaagtggaaaatta

SEQ ID NO: 800705 - DNA, 15 bp, Homo sapiens
caagtggaaaattaa

SEQ ID NO: 800706 - DNA, 15 bp, Homo sapiens
aagtggaaaattaat

SEQ ID NO: 800707 - DNA, 15 bp, Homo sapiens
agtggaaaattaata

SEQ ID NO: 800708 - DNA, 15 bp, Homo sapiens
gtggaaaattaataa

SEQ ID NO: 800709 - DNA, 15 bp, Homo sapiens
tggaaaattaataaa

SEQ ID NO: 800710 - DNA, 15 bp, Homo sapiens
ggaaaattaataaac

SEQ ID NO: 800711 - DNA, 15 bp, Homo sapiens
gaaaattaataaacc

SEQ ID NO: 800712 - DNA, 15 bp, Homo sapiens
aaaattaataaacca

SEQ ID NO: 800713 - DNA, 15 bp, Homo sapiens
aaattaataaaccag

SEQ ID NO: 800714 - DNA, 15 bp, Homo sapiens
aattaataaaccaga

SEQ ID NO: 800715 - DNA, 15 bp, Homo sapiens
attaataaaccagaa

SEQ ID NO: 800716 - DNA, 15 bp, Homo sapiens
ttaataaaccagaaa

SEQ ID NO: 800717 - DNA, 15 bp, Homo sapiens
taataaaccagaaag

SEQ ID NO: 800718 - DNA, 15 bp, Homo sapiens
aataaaccagaaagg

SEQ ID NO: 800719 - DNA, 15 bp, Homo sapiens
ataaaccagaaagga

SEQ ID NO: 800720 - DNA, 15 bp, Homo sapiens
taaaccagaaaggaa

SEQ ID NO: 800721 - DNA, 15 bp, Homo sapiens
aaaccagaaaggaaa

SEQ ID NO: 800722 - DNA, 15 bp, Homo sapiens
aaccagaaaggaaag

SEQ ID NO: 800723 - DNA, 15 bp, Homo sapiens
accagaaaggaaagg

SEQ ID NO: 800724 - DNA, 15 bp, Homo sapiens
ccagaaaggaaaggg

SEQ ID NO: 800725 - DNA, 15 bp, Homo sapiens
cagaaaggaaaggga

SEQ ID NO: 800726 - DNA, 15 bp, Homo sapiens
agaaaggaaagggac

SEQ ID NO: 800727 - DNA, 15 bp, Homo sapiens
gaaaggaaagggaca

SEQ ID NO: 800728 - DNA, 15 bp, Homo sapiens
aaaggaaagggacac

SEQ ID NO: 800729 - DNA, 15 bp, Homo sapiens
aaggaaagggacaca

SEQ ID NO: 800730 - DNA, 15 bp, Homo sapiens
ggaaagggacacagt

SEQ ID NO: 800731 - DNA, 15 bp, Homo sapiens
gaaagggacacagta

SEQ ID NO: 800732 - DNA, 15 bp, Homo sapiens
aaagggacacagtat

SEQ ID NO: 800733 - DNA, 15 bp, Homo sapiens
aagggacacagtatt

SEQ ID NO: 800734 - DNA, 15 bp, Homo sapiens
agggacacagtattc

SEQ ID NO: 800735 - DNA, 15 bp, Homo sapiens
gggacacagtattca

SEQ ID NO: 800736 - DNA, 15 bp, Homo sapiens
ggacacagtattcaa

SEQ ID NO: 800737 - DNA, 15 bp, Homo sapiens
gacacagtattcaag

SEQ ID NO: 800738 - DNA, 15 bp, Homo sapiens
acacagtattcaaga

SEQ ID NO: 800739 - DNA, 15 bp, Homo sapiens
cacagtattcaagac

SEQ ID NO: 800740 - DNA, 15 bp, Homo sapiens
acagtattcaagaca

SEQ ID NO: 800741 - DNA, 15 bp, Homo sapiens
cagtattcaagacac

SEQ ID NO: 800742 - DNA, 15 bp, Homo sapiens
agtattcaagacact

SEQ ID NO: 800743 - DNA, 15 bp, Homo sapiens
gtattcaagacacta

SEQ ID NO: 800744 - DNA, 15 bp, Homo sapiens
tattcaagacactaa

SEQ ID NO: 800745 - DNA, 15 bp, Homo sapiens
attcaagacactaaa

SEQ ID NO: 800746 - DNA, 15 bp, Homo sapiens
ttcaagacactaaat

SEQ ID NO: 800747 - DNA, 15 bp, Homo sapiens
tcaagacactaaatg

SEQ ID NO: 800748 - DNA, 15 bp, Homo sapiens
caagacactaaatgc

SEQ ID NO: 800749 - DNA, 15 bp, Homo sapiens
aagacactaaatgct

SEQ ID NO: 800750 - DNA, 15 bp, Homo sapiens
agacactaaatgctc

SEQ ID NO: 800751 - DNA, 15 bp, Homo sapiens
gacactaaatgctca

SEQ ID NO: 800752 - DNA, 15 bp, Homo sapiens
acactaaatgctcat

SEQ ID NO: 800753 - DNA, 15 bp, Homo sapiens
cactaaatgctcatt

SEQ ID NO: 800754 - DNA, 15 bp, Homo sapiens
actaaatgctcattg

SEQ ID NO: 800755 - DNA, 15 bp, Homo sapiens
ctaaatgctcattgc

SEQ ID NO: 800756 - DNA, 15 bp, Homo sapiens
taaatgctcattgca

SEQ ID NO: 800757 - DNA, 15 bp, Homo sapiens
aaatgctcattgcaa

SEQ ID NO: 800758 - DNA, 15 bp, Homo sapiens
aatgctcattgcaac

SEQ ID NO: 800759 - DNA, 15 bp, Homo sapiens
atgctcattgcaacc

SEQ ID NO: 800760 - DNA, 15 bp, Homo sapiens
tgctcattgcaacca

SEQ ID NO: 800761 - DNA, 15 bp, Homo sapiens
gctcattgcaaccag

SEQ ID NO: 800762 - DNA, 15 bp, Homo sapiens
ctcattgcaaccagg

SEQ ID NO: 800763 - DNA, 15 bp, Homo sapiens
tcattgcaaccaggg

SEQ ID NO: 800764 - DNA, 15 bp, Homo sapiens
cattgcaaccaggga

SEQ ID NO: 800765 - DNA, 15 bp, Homo sapiens
attgcaaccagggag

SEQ ID NO: 800766 - DNA, 15 bp, Homo sapiens
ttgcaaccagggagc

SEQ ID NO: 800767 - DNA, 15 bp, Homo sapiens
tgcaaccagggagcc

SEQ ID NO: 800768 - DNA, 15 bp, Homo sapiens
gcaaccagggagcct

SEQ ID NO: 800769 - DNA, 15 bp, Homo sapiens
caaccagggagcctc

SEQ ID NO: 800770 - DNA, 15 bp, Homo sapiens
aaccagggagcctcc

SEQ ID NO: 800771 - DNA, 15 bp, Homo sapiens
accagggagcctcca

SEQ ID NO: 800772 - DNA, 15 bp, Homo sapiens
ccagggagcctccag

SEQ ID NO: 800773 - DNA, 15 bp, Homo sapiens
cagggagcctccagg

SEQ ID NO: 800774 - DNA, 15 bp, Homo sapiens
agggagcctccaggt

SEQ ID NO: 800775 - DNA, 15 bp, Homo sapiens
gggagcctccaggtt

SEQ ID NO: 800776 - DNA, 15 bp, Homo sapiens
ggagcctccaggttt

SEQ ID NO: 800777 - DNA, 15 bp, Homo sapiens
gagcctccaggtttc

SEQ ID NO: 800778 - DNA, 15 bp, Homo sapiens
agcctccaggtttct

SEQ ID NO: 800779 - DNA, 15 bp, Homo sapiens
gcctccaggtttcta

SEQ ID NO: 800780 - DNA, 15 bp, Homo sapiens
cctccaggtttctaa

SEQ ID NO: 800781 - DNA, 15 bp, Homo sapiens
ctccaggtttctaag

SEQ ID NO: 800782 - DNA, 15 bp, Homo sapiens
tccaggtttctaagc

SEQ ID NO: 800783 - DNA, 15 bp, Homo sapiens
ccaggtttctaagca

SEQ ID NO: 800784 - DNA, 15 bp, Homo sapiens
caggtttctaagcat

SEQ ID NO: 800785 - DNA, 15 bp, Homo sapiens
aggtttctaagcatt

SEQ ID NO: 800786 - DNA, 15 bp, Homo sapiens
ggtttctaagcattg

SEQ ID NO: 800787 - DNA, 15 bp, Homo sapiens
gtttctaagcattgc

SEQ ID NO: 800788 - DNA, 15 bp, Homo sapiens
tttctaagcattgct

SEQ ID NO: 800789 - DNA, 15 bp, Homo sapiens
ttctaagcattgctc

SEQ ID NO: 800790 - DNA, 15 bp, Homo sapiens
tctaagcattgctct

SEQ ID NO: 800791 - DNA, 15 bp, Homo sapiens
ctaagcattgctctt

SEQ ID NO: 800792 - DNA, 15 bp, Homo sapiens
taagcattgctcttc

SEQ ID NO: 800793 - DNA, 15 bp, Homo sapiens
aagcattgctcttct

SEQ ID NO: 800794 - DNA, 15 bp, Homo sapiens
agcattgctcttctg

SEQ ID NO: 800795 - DNA, 15 bp, Homo sapiens
gcattgctcttctga

SEQ ID NO: 800796 - DNA, 15 bp, Homo sapiens
cattgctcttctgaa

SEQ ID NO: 800797 - DNA, 15 bp, Homo sapiens
attgctcttctgaat

SEQ ID NO: 800798 - DNA, 15 bp, Homo sapiens
ttgctcttctgaatc

SEQ ID NO: 800799 - DNA, 15 bp, Homo sapiens
tgctcttctgaatcc

SEQ ID NO: 800800 - DNA, 15 bp, Homo sapiens
gctcttctgaatccc

SEQ ID NO: 800801 - DNA, 15 bp, Homo sapiens
ctcttctgaatccca

SEQ ID NO: 800802 - DNA, 15 bp, Homo sapiens
tcttctgaatcccac

SEQ ID NO: 800803 - DNA, 15 bp, Homo sapiens
cttctgaatcccaca

SEQ ID NO: 800804 - DNA, 15 bp, Homo sapiens
ttctgaatcccacac

SEQ ID NO: 800805 - DNA, 15 bp, Homo sapiens
tctgaatcccacact

SEQ ID NO: 800806 - DNA, 15 bp, Homo sapiens
ctgaatcccacactg

SEQ ID NO: 800807 - DNA, 15 bp, Homo sapiens
tgaatcccacactgg

SEQ ID NO: 800808 - DNA, 15 bp, Homo sapiens
gaatcccacactgga

SEQ ID NO: 800809 - DNA, 15 bp, Homo sapiens
aatcccacactggag

SEQ ID NO: 800810 - DNA, 15 bp, Homo sapiens
atcccacactggaga

SEQ ID NO: 800811 - DNA, 15 bp, Homo sapiens
tcccacactggagat

SEQ ID NO: 800812 - DNA, 15 bp, Homo sapiens
cccacactggagata

SEQ ID NO: 800813 - DNA, 15 bp, Homo sapiens
ccacactggagatat

SEQ ID NO: 800814 - DNA, 15 bp, Homo sapiens
cacactggagatatt

SEQ ID NO: 800815 - DNA, 15 bp, Homo sapiens
acactggagatattt

SEQ ID NO: 800816 - DNA, 15 bp, Homo sapiens
cactggagatatttt

SEQ ID NO: 800817 - DNA, 15 bp, Homo sapiens
actggagatattttc

SEQ ID NO: 800818 - DNA, 15 bp, Homo sapiens
ctggagatattttcc

SEQ ID NO: 800819 - DNA, 15 bp, Homo sapiens
tggagatattttcct

SEQ ID NO: 800820 - DNA, 15 bp, Homo sapiens
ggagatattttcctc

SEQ ID NO: 800821 - DNA, 15 bp, Homo sapiens
gagatattttcctct

SEQ ID NO: 800822 - DNA, 15 bp, Homo sapiens
agatattttcctctt

SEQ ID NO: 800823 - DNA, 15 bp, Homo sapiens
gatattttcctctta

SEQ ID NO: 800824 - DNA, 15 bp, Homo sapiens
atattttcctcttaa

SEQ ID NO: 800825 - DNA, 15 bp, Homo sapiens
tattttcctcttaat

SEQ ID NO: 800826 - DNA, 15 bp, Homo sapiens
attttcctcttaatt

SEQ ID NO: 800827 - DNA, 15 bp, Homo sapiens
ttttcctcttaattc

SEQ ID NO: 800828 - DNA, 15 bp, Homo sapiens
tttcctcttaattca

SEQ ID NO: 800829 - DNA, 15 bp, Homo sapiens
ttcctcttaattcaa

SEQ ID NO: 800830 - DNA, 15 bp, Homo sapiens
tcctcttaattcaat

SEQ ID NO: 800831 - DNA, 15 bp, Homo sapiens
cctcttaattcaata

SEQ ID NO: 800832 - DNA, 15 bp, Homo sapiens
ctcttaattcaatag

SEQ ID NO: 800833 - DNA, 15 bp, Homo sapiens
tcttaattcaataga

SEQ ID NO: 800834 - DNA, 15 bp, Homo sapiens
cttaattcaatagat

SEQ ID NO: 800835 - DNA, 15 bp, Homo sapiens
ttaattcaatagatg

SEQ ID NO: 800836 - DNA, 15 bp, Homo sapiens
taattcaatagatgt

SEQ ID NO: 800837 - DNA, 15 bp, Homo sapiens
aattcaatagatgtt

SEQ ID NO: 800838 - DNA, 15 bp, Homo sapiens
attcaatagatgttt

SEQ ID NO: 800839 - DNA, 15 bp, Homo sapiens
ttcaatagatgttta

SEQ ID NO: 800840 - DNA, 15 bp, Homo sapiens
tcaatagatgtttat

SEQ ID NO: 800841 - DNA, 15 bp, Homo sapiens
caatagatgtttatc

SEQ ID NO: 800842 - DNA, 15 bp, Homo sapiens
aatagatgtttatct

SEQ ID NO: 800843 - DNA, 15 bp, Homo sapiens
atagatgtttatctt

SEQ ID NO: 800844 - DNA, 15 bp, Homo sapiens
tagatgtttatcttg

SEQ ID NO: 800845 - DNA, 15 bp, Homo sapiens
agatgtttatcttgc

SEQ ID NO: 800846 - DNA, 15 bp, Homo sapiens
gatgtttatcttgcg

SEQ ID NO: 800847 - DNA, 15 bp, Homo sapiens
atgtttatcttgcgc

SEQ ID NO: 800848 - DNA, 15 bp, Homo sapiens
tgtttatcttgcgcc

SEQ ID NO: 800849 - DNA, 15 bp, Homo sapiens
gtttatcttgcgccc

SEQ ID NO: 800850 - DNA, 15 bp, Homo sapiens
tttatcttgcgccca

SEQ ID NO: 800851 - DNA, 15 bp, Homo sapiens
ttatcttgcgcccac

SEQ ID NO: 800852 - DNA, 15 bp, Homo sapiens
tatcttgcgcccacc

SEQ ID NO: 800853 - DNA, 15 bp, Homo sapiens
atcttgcgcccacca

SEQ ID NO: 800854 - DNA, 15 bp, Homo sapiens
tcttgcgcccaccaa

SEQ ID NO: 800855 - DNA, 15 bp, Homo sapiens
cttgcgcccaccaat

SEQ ID NO: 800856 - DNA, 15 bp, Homo sapiens
ttgcgcccaccaatg

SEQ ID NO: 800857 - DNA, 15 bp, Homo sapiens
tgcgcccaccaatgc

SEQ ID NO: 800858 - DNA, 15 bp, Homo sapiens
gcgcccaccaatgct

SEQ ID NO: 800859 - DNA, 15 bp, Homo sapiens
cgcccaccaatgctg

SEQ ID NO: 800860 - DNA, 15 bp, Homo sapiens
gcccaccaatgctga

SEQ ID NO: 800861 - DNA, 15 bp, Homo sapiens
cccaccaatgctgag

SEQ ID NO: 800862 - DNA, 15 bp, Homo sapiens
ccaccaatgctgagt

SEQ ID NO: 800863 - DNA, 15 bp, Homo sapiens
caccaatgctgagta

SEQ ID NO: 800864 - DNA, 15 bp, Homo sapiens
accaatgctgagtac

SEQ ID NO: 800865 - DNA, 15 bp, Homo sapiens
ccaatgctgagtact

SEQ ID NO: 800866 - DNA, 15 bp, Homo sapiens
caatgctgagtactt

SEQ ID NO: 800867 - DNA, 15 bp, Homo sapiens
aatgctgagtacttt

SEQ ID NO: 800868 - DNA, 15 bp, Homo sapiens
atgctgagtactttg

SEQ ID NO: 800869 - DNA, 15 bp, Homo sapiens
tgctgagtactttgc

SEQ ID NO: 800870 - DNA, 15 bp, Homo sapiens
gctgagtactttgct

SEQ ID NO: 800871 - DNA, 15 bp, Homo sapiens
ctgagtactttgctt

SEQ ID NO: 800872 - DNA, 15 bp, Homo sapiens
tgagtactttgctta

SEQ ID NO: 800873 - DNA, 15 bp, Homo sapiens
gagtactttgcttag

SEQ ID NO: 800874 - DNA, 15 bp, Homo sapiens
agtactttgcttagc

SEQ ID NO: 800875 - DNA, 15 bp, Homo sapiens
gtactttgcttagca

SEQ ID NO: 800876 - DNA, 15 bp, Homo sapiens
tactttgcttagcac

SEQ ID NO: 800877 - DNA, 15 bp, Homo sapiens
actttgcttagcact

SEQ ID NO: 800878 - DNA, 15 bp, Homo sapiens
ctttgcttagcactg

SEQ ID NO: 800879 - DNA, 15 bp, Homo sapiens
tttgcttagcactgg

SEQ ID NO: 800880 - DNA, 15 bp, Homo sapiens
ttgcttagcactggg

SEQ ID NO: 800881 - DNA, 15 bp, Homo sapiens
tgcttagcactggga

SEQ ID NO: 800882 - DNA, 15 bp, Homo sapiens
gcttagcactgggaa

SEQ ID NO: 800883 - DNA, 15 bp, Homo sapiens
cttagcactgggaat

SEQ ID NO: 800884 - DNA, 15 bp, Homo sapiens
ttagcactgggaata

SEQ ID NO: 800885 - DNA, 15 bp, Homo sapiens
tagcactgggaatat

SEQ ID NO: 800886 - DNA, 15 bp, Homo sapiens
agcactgggaatata

SEQ ID NO: 800887 - DNA, 15 bp, Homo sapiens
gcactgggaatataa

SEQ ID NO: 800888 - DNA, 15 bp, Homo sapiens
cactgggaatataaa

SEQ ID NO: 800889 - DNA, 15 bp, Homo sapiens
actgggaatataaag

SEQ ID NO: 800890 - DNA, 15 bp, Homo sapiens
ctgggaatataaaga

SEQ ID NO: 800891 - DNA, 15 bp, Homo sapiens
tgggaatataaagat

SEQ ID NO: 800892 - DNA, 15 bp, Homo sapiens
gggaatataaagatg

SEQ ID NO: 800893 - DNA, 15 bp, Homo sapiens
ggaatataaagatga

SEQ ID NO: 800894 - DNA, 15 bp, Homo sapiens
gaatataaagatgaa

SEQ ID NO: 800895 - DNA, 15 bp, Homo sapiens
aatataaagatgaag

SEQ ID NO: 800896 - DNA, 15 bp, Homo sapiens
atataaagatgaagg

SEQ ID NO: 800897 - DNA, 15 bp, Homo sapiens
tataaagatgaaggg

SEQ ID NO: 800898 - DNA, 15 bp, Homo sapiens
ataaagatgaaggga

SEQ ID NO: 800899 - DNA, 15 bp, Homo sapiens
taaagatgaagggat

SEQ ID NO: 800900 - DNA, 15 bp, Homo sapiens
aaagatgaagggatg

SEQ ID NO: 800901 - DNA, 15 bp, Homo sapiens
aagatgaagggatgt

SEQ ID NO: 800902 - DNA, 15 bp, Homo sapiens
agatgaagggatgtg

SEQ ID NO: 800903 - DNA, 15 bp, Homo sapiens
gatgaagggatgtgg

SEQ ID NO: 800904 - DNA, 15 bp, Homo sapiens
atgaagggatgtggt

SEQ ID NO: 800905 - DNA, 15 bp, Homo sapiens
tgaagggatgtggtc

SEQ ID NO: 800906 - DNA, 15 bp, Homo sapiens
gaagggatgtggtcc

SEQ ID NO: 800907 - DNA, 15 bp, Homo sapiens
aagggatgtggtccc

SEQ ID NO: 800908 - DNA, 15 bp, Homo sapiens
agggatgtggtccct

SEQ ID NO: 800909 - DNA, 15 bp, Homo sapiens
gggatgtggtccctg

SEQ ID NO: 800910 - DNA, 15 bp, Homo sapiens
ggatgtggtccctgc

SEQ ID NO: 800911 - DNA, 15 bp, Homo sapiens
gatgtggtccctgcc

SEQ ID NO: 800912 - DNA, 15 bp, Homo sapiens
atgtggtccctgccc

SEQ ID NO: 800913 - DNA, 15 bp, Homo sapiens
tgtggtccctgccca

SEQ ID NO: 800914 - DNA, 15 bp, Homo sapiens
gtggtccctgcccac

SEQ ID NO: 800915 - DNA, 15 bp, Homo sapiens
tggtccctgcccaca

SEQ ID NO: 800916 - DNA, 15 bp, Homo sapiens
ggtccctgcccacag

SEQ ID NO: 800917 - DNA, 15 bp, Homo sapiens
gtccctgcccacaga

SEQ ID NO: 800918 - DNA, 15 bp, Homo sapiens
tccctgcccacagag

SEQ ID NO: 800919 - DNA, 15 bp, Homo sapiens
ccctgcccacagaga

SEQ ID NO: 800920 - DNA, 15 bp, Homo sapiens
cctgcccacagagaa

SEQ ID NO: 800921 - DNA, 15 bp, Homo sapiens
ctgcccacagagaac

SEQ ID NO: 800922 - DNA, 15 bp, Homo sapiens
tgcccacagagaacc

SEQ ID NO: 800923 - DNA, 15 bp, Homo sapiens
gcccacagagaaccc

SEQ ID NO: 800924 - DNA, 15 bp, Homo sapiens
cccacagagaaccca

SEQ ID NO: 800925 - DNA, 15 bp, Homo sapiens
ccacagagaacccac

SEQ ID NO: 800926 - DNA, 15 bp, Homo sapiens
cacagagaacccaca

SEQ ID NO: 800927 - DNA, 15 bp, Homo sapiens
acagagaacccacag

SEQ ID NO: 800928 - DNA, 15 bp, Homo sapiens
cagagaacccacagt

SEQ ID NO: 800929 - DNA, 15 bp, Homo sapiens
agagaacccacagtc

SEQ ID NO: 800930 - DNA, 15 bp, Homo sapiens
gagaacccacagtct

SEQ ID NO: 800931 - DNA, 15 bp, Homo sapiens
agaacccacagtcta

SEQ ID NO: 800932 - DNA, 15 bp, Homo sapiens
gaacccacagtctag

SEQ ID NO: 800933 - DNA, 15 bp, Homo sapiens
aacccacagtctaga

SEQ ID NO: 800934 - DNA, 15 bp, Homo sapiens
acccacagtctagaa

SEQ ID NO: 800935 - DNA, 15 bp, Homo sapiens
cccacagtctagaat

SEQ ID NO: 800936 - DNA, 15 bp, Homo sapiens
ccacagtctagaatg

SEQ ID NO: 800937 - DNA, 15 bp, Homo sapiens
cacagtctagaatga

SEQ ID NO: 800938 - DNA, 15 bp, Homo sapiens
acagtctagaatgat

SEQ ID NO: 800939 - DNA, 15 bp, Homo sapiens
cagtctagaatgatt

SEQ ID NO: 800940 - DNA, 15 bp, Homo sapiens
agtctagaatgatta

SEQ ID NO: 800941 - DNA, 15 bp, Homo sapiens
gtctagaatgattat

SEQ ID NO: 800942 - DNA, 15 bp, Homo sapiens
tctagaatgattatg

SEQ ID NO: 800943 - DNA, 15 bp, Homo sapiens
ctagaatgattatgt

SEQ ID NO: 800944 - DNA, 15 bp, Homo sapiens
tagaatgattatgtg

SEQ ID NO: 800945 - DNA, 15 bp, Homo sapiens
agaatgattatgtgg

SEQ ID NO: 800946 - DNA, 15 bp, Homo sapiens
gaatgattatgtggt

SEQ ID NO: 800947 - DNA, 15 bp, Homo sapiens
aatgattatgtggtg

SEQ ID NO: 800948 - DNA, 15 bp, Homo sapiens
atgattatgtggtga

SEQ ID NO: 800949 - DNA, 15 bp, Homo sapiens
tgattatgtggtgat

SEQ ID NO: 800950 - DNA, 15 bp, Homo sapiens
gattatgtggtgatg

SEQ ID NO: 800951 - DNA, 15 bp, Homo sapiens
attatgtggtgatgg

SEQ ID NO: 800952 - DNA, 15 bp, Homo sapiens
ttatgtggtgatggg

SEQ ID NO: 800953 - DNA, 15 bp, Homo sapiens
tatgtggtgatggga

SEQ ID NO: 800954 - DNA, 15 bp, Homo sapiens
atgtggtgatgggat

SEQ ID NO: 800955 - DNA, 15 bp, Homo sapiens
tgtggtgatgggatc

SEQ ID NO: 800956 - DNA, 15 bp, Homo sapiens
gtggtgatgggatcc

SEQ ID NO: 800957 - DNA, 15 bp, Homo sapiens
tggtgatgggatcct

SEQ ID NO: 800958 - DNA, 15 bp, Homo sapiens
ggtgatgggatcctc

SEQ ID NO: 800959 - DNA, 15 bp, Homo sapiens
gtgatgggatcctcc

SEQ ID NO: 800960 - DNA, 15 bp, Homo sapiens
tgatgggatcctcca

SEQ ID NO: 800961 - DNA, 15 bp, Homo sapiens
gatgggatcctccac

SEQ ID NO: 800962 - DNA, 15 bp, Homo sapiens
atgggatcctccact

SEQ ID NO: 800963 - DNA, 15 bp, Homo sapiens
tgggatcctccactg

SEQ ID NO: 800964 - DNA, 15 bp, Homo sapiens
gggatcctccactgg

SEQ ID NO: 800965 - DNA, 15 bp, Homo sapiens
ggatcctccactggg

SEQ ID NO: 800966 - DNA, 15 bp, Homo sapiens
gatcctccactgggg

SEQ ID NO: 800967 - DNA, 15 bp, Homo sapiens
atcctccactgggga

SEQ ID NO: 800968 - DNA, 15 bp, Homo sapiens
tcctccactggggaa

SEQ ID NO: 800969 - DNA, 15 bp, Homo sapiens
cctccactggggaaa

SEQ ID NO: 800970 - DNA, 15 bp, Homo sapiens
ctccactggggaaaa

SEQ ID NO: 800971 - DNA, 15 bp, Homo sapiens
tccactggggaaaat

SEQ ID NO: 800972 - DNA, 15 bp, Homo sapiens
ccactggggaaaatg

SEQ ID NO: 800973 - DNA, 15 bp, Homo sapiens
cactggggaaaatgc

SEQ ID NO: 800974 - DNA, 15 bp, Homo sapiens
actggggaaaatgca

SEQ ID NO: 800975 - DNA, 15 bp, Homo sapiens
ctggggaaaatgcag

SEQ ID NO: 800976 - DNA, 15 bp, Homo sapiens
tggggaaaatgcagt

SEQ ID NO: 800977 - DNA, 15 bp, Homo sapiens
ggggaaaatgcagtg

SEQ ID NO: 800978 - DNA, 15 bp, Homo sapiens
gggaaaatgcagtgg

SEQ ID NO: 800979 - DNA, 15 bp, Homo sapiens
ggaaaatgcagtggc

SEQ ID NO: 800980 - DNA, 15 bp, Homo sapiens
gaaaatgcagtggct

SEQ ID NO: 800981 - DNA, 15 bp, Homo sapiens
aaaatgcagtggctt

SEQ ID NO: 800982 - DNA, 15 bp, Homo sapiens
aaatgcagtggcttt

SEQ ID NO: 800983 - DNA, 15 bp, Homo sapiens
aatgcagtggctttt

SEQ ID NO: 800984 - DNA, 15 bp, Homo sapiens
atgcagtggctttta

SEQ ID NO: 800985 - DNA, 15 bp, Homo sapiens
tgcagtggcttttac

SEQ ID NO: 800986 - DNA, 15 bp, Homo sapiens
gcagtggcttttact

SEQ ID NO: 800987 - DNA, 15 bp, Homo sapiens
cagtggcttttactt

SEQ ID NO: 800988 - DNA, 15 bp, Homo sapiens
agtggcttttacttg

SEQ ID NO: 800989 - DNA, 15 bp, Homo sapiens
gtggcttttacttga

SEQ ID NO: 800990 - DNA, 15 bp, Homo sapiens
tggcttttacttgat

SEQ ID NO: 800991 - DNA, 15 bp, Homo sapiens
ggcttttacttgatg

SEQ ID NO: 800992 - DNA, 15 bp, Homo sapiens
gcttttacttgatgc

SEQ ID NO: 800993 - DNA, 15 bp, Homo sapiens
cttttacttgatgca

SEQ ID NO: 800994 - DNA, 15 bp, Homo sapiens
ttttacttgatgcag

SEQ ID NO: 800995 - DNA, 15 bp, Homo sapiens
tttacttgatgcagt

SEQ ID NO: 800996 - DNA, 15 bp, Homo sapiens
ttacttgatgcagtt

SEQ ID NO: 800997 - DNA, 15 bp, Homo sapiens
tacttgatgcagttt

SEQ ID NO: 800998 - DNA, 15 bp, Homo sapiens
acttgatgcagttta

SEQ ID NO: 800999 - DNA, 15 bp, Homo sapiens
cttgatgcagtttat

SEQ ID NO: 801000 - DNA, 15 bp, Homo sapiens
ttgatgcagtttatg

SEQ ID NO: 801001 - DNA, 15 bp, Homo sapiens
tgatgcagtttatga

SEQ ID NO: 801002 - DNA, 15 bp, Homo sapiens
gatgcagtttatgat

SEQ ID NO: 801003 - DNA, 15 bp, Homo sapiens
atgcagtttatgatg

SEQ ID NO: 801004 - DNA, 15 bp, Homo sapiens
tgcagtttatgatgt

SEQ ID NO: 801005 - DNA, 15 bp, Homo sapiens
gcagtttatgatgtt

SEQ ID NO: 801006 - DNA, 15 bp, Homo sapiens
cagtttatgatgttt

SEQ ID NO: 801007 - DNA, 15 bp, Homo sapiens
agtttatgatgtttg

SEQ ID NO: 801008 - DNA, 15 bp, Homo sapiens
gtttatgatgtttgg

SEQ ID NO: 801009 - DNA, 15 bp, Homo sapiens
tttatgatgtttggt

SEQ ID NO: 801010 - DNA, 15 bp, Homo sapiens
ttatgatgtttggtt

SEQ ID NO: 801011 - DNA, 15 bp, Homo sapiens
tatgatgtttggtta

SEQ ID NO: 801012 - DNA, 15 bp, Homo sapiens
atgatgtttggttaa

SEQ ID NO: 801013 - DNA, 15 bp, Homo sapiens
tgatgtttggttaat

SEQ ID NO: 801014 - DNA, 15 bp, Homo sapiens
gatgtttggttaata

SEQ ID NO: 801015 - DNA, 15 bp, Homo sapiens
atgtttggttaatag

SEQ ID NO: 801016 - DNA, 15 bp, Homo sapiens
tgtttggttaataga

SEQ ID NO: 801017 - DNA, 15 bp, Homo sapiens
gtttggttaatagaa

SEQ ID NO: 801018 - DNA, 15 bp, Homo sapiens
tttggttaatagaat

SEQ ID NO: 801019 - DNA, 15 bp, Homo sapiens
ttggttaatagaatg

SEQ ID NO: 801020 - DNA, 15 bp, Homo sapiens
tggttaatagaatgt

SEQ ID NO: 801021 - DNA, 15 bp, Homo sapiens
ggttaatagaatgtc

SEQ ID NO: 801022 - DNA, 15 bp, Homo sapiens
gttaatagaatgtca

SEQ ID NO: 801023 - DNA, 15 bp, Homo sapiens
ttaatagaatgtcac

SEQ ID NO: 801024 - DNA, 15 bp, Homo sapiens
taatagaatgtcaca

SEQ ID NO: 801025 - DNA, 15 bp, Homo sapiens
aatagaatgtcacat

SEQ ID NO: 801026 - DNA, 15 bp, Homo sapiens
atagaatgtcacata

SEQ ID NO: 801027 - DNA, 15 bp, Homo sapiens
tagaatgtcacataa

SEQ ID NO: 801028 - DNA, 15 bp, Homo sapiens
agaatgtcacataaa

SEQ ID NO: 801029 - DNA, 15 bp, Homo sapiens
gaatgtcacataaaa

SEQ ID NO: 801030 - DNA, 15 bp, Homo sapiens
aatgtcacataaaaa

SEQ ID NO: 801031 - DNA, 15 bp, Homo sapiens
atgtcacataaaaac

SEQ ID NO: 801032 - DNA, 15 bp, Homo sapiens
tgtcacataaaaaca

SEQ ID NO: 801033 - DNA, 15 bp, Homo sapiens
gtcacataaaaacaa

SEQ ID NO: 801034 - DNA, 15 bp, Homo sapiens
tcacataaaaacaaa

SEQ ID NO: 801035 - DNA, 15 bp, Homo sapiens
cacataaaaacaaat

SEQ ID NO: 801036 - DNA, 15 bp, Homo sapiens
acataaaaacaaatc

SEQ ID NO: 801037 - DNA, 15 bp, Homo sapiens
cataaaaacaaatcc

SEQ ID NO: 801038 - DNA, 15 bp, Homo sapiens
ataaaaacaaatccc

SEQ ID NO: 801039 - DNA, 15 bp, Homo sapiens
taaaaacaaatcccc

SEQ ID NO: 801040 - DNA, 15 bp, Homo sapiens
aaaaacaaatcccct

SEQ ID NO: 801041 - DNA, 15 bp, Homo sapiens
aaaacaaatcccctg

SEQ ID NO: 801042 - DNA, 15 bp, Homo sapiens
aaacaaatcccctga

SEQ ID NO: 801043 - DNA, 15 bp, Homo sapiens
aacaaatcccctgat

SEQ ID NO: 801044 - DNA, 15 bp, Homo sapiens
acaaatcccctgatt

SEQ ID NO: 801045 - DNA, 15 bp, Homo sapiens
caaatcccctgatta

SEQ ID NO: 801046 - DNA, 15 bp, Homo sapiens
aaatcccctgattat

SEQ ID NO: 801047 - DNA, 15 bp, Homo sapiens
aatcccctgattatc

SEQ ID NO: 801048 - DNA, 15 bp, Homo sapiens
atcccctgattatcc

SEQ ID NO: 801049 - DNA, 15 bp, Homo sapiens
tcccctgattatccc

SEQ ID NO: 801050 - DNA, 15 bp, Homo sapiens
cccctgattatccca

SEQ ID NO: 801051 - DNA, 15 bp, Homo sapiens
ccctgattatcccac

SEQ ID NO: 801052 - DNA, 15 bp, Homo sapiens
cctgattatcccact

SEQ ID NO: 801053 - DNA, 15 bp, Homo sapiens
ctgattatcccactg

SEQ ID NO: 801054 - DNA, 15 bp, Homo sapiens
tgattatcccactgc

SEQ ID NO: 801055 - DNA, 15 bp, Homo sapiens
gattatcccactgcc

SEQ ID NO: 801056 - DNA, 15 bp, Homo sapiens
attatcccactgcca

SEQ ID NO: 801057 - DNA, 15 bp, Homo sapiens
ttatcccactgccaa

SEQ ID NO: 801058 - DNA, 15 bp, Homo sapiens
tatcccactgccaat

SEQ ID NO: 801059 - DNA, 15 bp, Homo sapiens
atcccactgccaatg

SEQ ID NO: 801060 - DNA, 15 bp, Homo sapiens
tcccactgccaatgg

SEQ ID NO: 801061 - DNA, 15 bp, Homo sapiens
cccactgccaatggg

SEQ ID NO: 801062 - DNA, 15 bp, Homo sapiens
ccactgccaatgggt

SEQ ID NO: 801063 - DNA, 15 bp, Homo sapiens
cactgccaatgggtg

SEQ ID NO: 801064 - DNA, 15 bp, Homo sapiens
actgccaatgggtgg

SEQ ID NO: 801065 - DNA, 15 bp, Homo sapiens
ctgccaatgggtggc

SEQ ID NO: 801066 - DNA, 15 bp, Homo sapiens
tgccaatgggtggca

SEQ ID NO: 801067 - DNA, 15 bp, Homo sapiens
gccaatgggtggcac

SEQ ID NO: 801068 - DNA, 15 bp, Homo sapiens
ccaatgggtggcact

SEQ ID NO: 801069 - DNA, 15 bp, Homo sapiens
caatgggtggcactg

SEQ ID NO: 801070 - DNA, 15 bp, Homo sapiens
aatgggtggcactgc

SEQ ID NO: 801071 - DNA, 15 bp, Homo sapiens
atgggtggcactgca

SEQ ID NO: 801072 - DNA, 15 bp, Homo sapiens
tgggtggcactgcat

SEQ ID NO: 801073 - DNA, 15 bp, Homo sapiens
gggtggcactgcatt

SEQ ID NO: 801074 - DNA, 15 bp, Homo sapiens
ggtggcactgcattc

SEQ ID NO: 801075 - DNA, 15 bp, Homo sapiens
gtggcactgcattct

SEQ ID NO: 801076 - DNA, 15 bp, Homo sapiens
tggcactgcattcta

SEQ ID NO: 801077 - DNA, 15 bp, Homo sapiens
ggcactgcattctaa

SEQ ID NO: 801078 - DNA, 15 bp, Homo sapiens
gcactgcattctaat

SEQ ID NO: 801079 - DNA, 15 bp, Homo sapiens
cactgcattctaata

SEQ ID NO: 801080 - DNA, 15 bp, Homo sapiens
actgcattctaataa

SEQ ID NO: 801081 - DNA, 15 bp, Homo sapiens
ctgcattctaataaa

SEQ ID NO: 801082 - DNA, 15 bp, Homo sapiens
tgcattctaataaag

SEQ ID NO: 801083 - DNA, 15 bp, Homo sapiens
gcattctaataaagg

SEQ ID NO: 801084 - DNA, 15 bp, Homo sapiens
cattctaataaaggc

SEQ ID NO: 801085 - DNA, 15 bp, Homo sapiens
attctaataaaggca

SEQ ID NO: 801086 - DNA, 15 bp, Homo sapiens
ttctaataaaggcag

SEQ ID NO: 801087 - DNA, 15 bp, Homo sapiens
tctaataaaggcagc

SEQ ID NO: 801088 - DNA, 15 bp, Homo sapiens
ctaataaaggcagca

SEQ ID NO: 801089 - DNA, 15 bp, Homo sapiens
taataaaggcagcac

SEQ ID NO: 801090 - DNA, 15 bp, Homo sapiens
aataaaggcagcact

SEQ ID NO: 801091 - DNA, 15 bp, Homo sapiens
ataaaggcagcactt

SEQ ID NO: 801092 - DNA, 15 bp, Homo sapiens
taaaggcagcacttc

SEQ ID NO: 801093 - DNA, 15 bp, Homo sapiens
aaaggcagcacttct

SEQ ID NO: 801094 - DNA, 15 bp, Homo sapiens
aaggcagcacttctt

SEQ ID NO: 801095 - DNA, 15 bp, Homo sapiens
aggcagcacttcttt

SEQ ID NO: 801096 - DNA, 15 bp, Homo sapiens
ggcagcacttctttg

SEQ ID NO: 801097 - DNA, 15 bp, Homo sapiens
gcagcacttctttgg

SEQ ID NO: 801098 - DNA, 15 bp, Homo sapiens
cagcacttctttggt

SEQ ID NO: 801099 - DNA, 15 bp, Homo sapiens
agcacttctttggtg

SEQ ID NO: 801100 - DNA, 15 bp, Homo sapiens
gcacttctttggtgg

SEQ ID NO: 801101 - DNA, 15 bp, Homo sapiens
cacttctttggtggt

SEQ ID NO: 801102 - DNA, 15 bp, Homo sapiens
acttctttggtggtg

SEQ ID NO: 801103 - DNA, 15 bp, Homo sapiens
cttctttggtggtgt

SEQ ID NO: 801104 - DNA, 15 bp, Homo sapiens
ttctttggtggtgtg

SEQ ID NO: 801105 - DNA, 15 bp, Homo sapiens
tctttggtggtgtgg

SEQ ID NO: 801106 - DNA, 15 bp, Homo sapiens
ctttggtggtgtggg

SEQ ID NO: 801107 - DNA, 15 bp, Homo sapiens
tttggtggtgtgggg

SEQ ID NO: 801108 - DNA, 15 bp, Homo sapiens
ttggtggtgtggggg

SEQ ID NO: 801109 - DNA, 15 bp, Homo sapiens
tggtggtgtggggga

SEQ ID NO: 801110 - DNA, 15 bp, Homo sapiens
ggtggtgtgggggaa

SEQ ID NO: 801111 - DNA, 15 bp, Homo sapiens
gtggtgtgggggaaa

SEQ ID NO: 801112 - DNA, 15 bp, Homo sapiens
tggtgtgggggaaaa

SEQ ID NO: 801113 - DNA, 15 bp, Homo sapiens
ggtgtgggggaaaag

SEQ ID NO: 801114 - DNA, 15 bp, Homo sapiens
gtgtgggggaaaaga

SEQ ID NO: 801115 - DNA, 15 bp, Homo sapiens
tgtgggggaaaagaa

SEQ ID NO: 801116 - DNA, 15 bp, Homo sapiens
gtgggggaaaagaat

SEQ ID NO: 801117 - DNA, 15 bp, Homo sapiens
tgggggaaaagaatt

SEQ ID NO: 801118 - DNA, 15 bp, Homo sapiens
gggggaaaagaattg

SEQ ID NO: 801119 - DNA, 15 bp, Homo sapiens
ggggaaaagaattgc

SEQ ID NO: 801120 - DNA, 15 bp, Homo sapiens
gggaaaagaattgca

SEQ ID NO: 801121 - DNA, 15 bp, Homo sapiens
ggaaaagaattgcag

SEQ ID NO: 801122 - DNA, 15 bp, Homo sapiens
gaaaagaattgcagc

SEQ ID NO: 801123 - DNA, 15 bp, Homo sapiens
aaaagaattgcagcc

SEQ ID NO: 801124 - DNA, 15 bp, Homo sapiens
aaagaattgcagccc

SEQ ID NO: 801125 - DNA, 15 bp, Homo sapiens
aagaattgcagccca

SEQ ID NO: 801126 - DNA, 15 bp, Homo sapiens
agaattgcagcccag

SEQ ID NO: 801127 - DNA, 15 bp, Homo sapiens
gaattgcagcccagt

SEQ ID NO: 801128 - DNA, 15 bp, Homo sapiens
aattgcagcccagtg

SEQ ID NO: 801129 - DNA, 15 bp, Homo sapiens
attgcagcccagtgc

SEQ ID NO: 801130 - DNA, 15 bp, Homo sapiens
ttgcagcccagtgca

SEQ ID NO: 801131 - DNA, 15 bp, Homo sapiens
tgcagcccagtgcag

SEQ ID NO: 801132 - DNA, 15 bp, Homo sapiens
gcagcccagtgcagg

SEQ ID NO: 801133 - DNA, 15 bp, Homo sapiens
cagcccagtgcagga

SEQ ID NO: 801134 - DNA, 15 bp, Homo sapiens
agcccagtgcaggag

SEQ ID NO: 801135 - DNA, 15 bp, Homo sapiens
gcccagtgcaggaga

SEQ ID NO: 801136 - DNA, 15 bp, Homo sapiens
cccagtgcaggagag

SEQ ID NO: 801137 - DNA, 15 bp, Homo sapiens
ccagtgcaggagagc

SEQ ID NO: 801138 - DNA, 15 bp, Homo sapiens
cagtgcaggagagcc

SEQ ID NO: 801139 - DNA, 15 bp, Homo sapiens
agtgcaggagagcct

SEQ ID NO: 801140 - DNA, 15 bp, Homo sapiens
gtgcaggagagcctg

SEQ ID NO: 801141 - DNA, 15 bp, Homo sapiens
tgcaggagagcctga

SEQ ID NO: 801142 - DNA, 15 bp, Homo sapiens
gcaggagagcctgat

SEQ ID NO: 801143 - DNA, 15 bp, Homo sapiens
caggagagcctgatg

SEQ ID NO: 801144 - DNA, 15 bp, Homo sapiens
aggagagcctgatga

SEQ ID NO: 801145 - DNA, 15 bp, Homo sapiens
ggagagcctgatgaa

SEQ ID NO: 801146 - DNA, 15 bp, Homo sapiens
gagagcctgatgaag

SEQ ID NO: 801147 - DNA, 15 bp, Homo sapiens
agagcctgatgaaga

SEQ ID NO: 801148 - DNA, 15 bp, Homo sapiens
gagcctgatgaagac

SEQ ID NO: 801149 - DNA, 15 bp, Homo sapiens
agcctgatgaagact

SEQ ID NO: 801150 - DNA, 15 bp, Homo sapiens
gcctgatgaagactt

SEQ ID NO: 801151 - DNA, 15 bp, Homo sapiens
cctgatgaagacttt

SEQ ID NO: 801152 - DNA, 15 bp, Homo sapiens
ctgatgaagacttta

SEQ ID NO: 801153 - DNA, 15 bp, Homo sapiens
tgatgaagactttat

SEQ ID NO: 801154 - DNA, 15 bp, Homo sapiens
gatgaagactttatt

SEQ ID NO: 801155 - DNA, 15 bp, Homo sapiens
atgaagactttatta

SEQ ID NO: 801156 - DNA, 15 bp, Homo sapiens
tgaagactttattat

SEQ ID NO: 801157 - DNA, 15 bp, Homo sapiens
gaagactttattatt

SEQ ID NO: 801158 - DNA, 15 bp, Homo sapiens
aagactttattattt

SEQ ID NO: 801159 - DNA, 15 bp, Homo sapiens
agactttattattta

SEQ ID NO: 801160 - DNA, 15 bp, Homo sapiens
gactttattatttaa

SEQ ID NO: 801161 - DNA, 15 bp, Homo sapiens
actttattatttaat

SEQ ID NO: 801162 - DNA, 15 bp, Homo sapiens
ctttattatttaatg

SEQ ID NO: 801163 - DNA, 15 bp, Homo sapiens
tttattatttaatga

SEQ ID NO: 801164 - DNA, 15 bp, Homo sapiens
ttattatttaatgaa

SEQ ID NO: 801165 - DNA, 15 bp, Homo sapiens
tattatttaatgaac

SEQ ID NO: 801166 - DNA, 15 bp, Homo sapiens
attatttaatgaacc

SEQ ID NO: 801167 - DNA, 15 bp, Homo sapiens
ttatttaatgaacca

SEQ ID NO: 801168 - DNA, 15 bp, Homo sapiens
tatttaatgaaccat

SEQ ID NO: 801169 - DNA, 15 bp, Homo sapiens
atttaatgaaccatg

SEQ ID NO: 801170 - DNA, 15 bp, Homo sapiens
tttaatgaaccatgt

SEQ ID NO: 801171 - DNA, 15 bp, Homo sapiens
ttaatgaaccatgtc

SEQ ID NO: 801172 - DNA, 15 bp, Homo sapiens
taatgaaccatgtca

SEQ ID NO: 801173 - DNA, 15 bp, Homo sapiens
aatgaaccatgtcat

SEQ ID NO: 801174 - DNA, 15 bp, Homo sapiens
atgaaccatgtcata

SEQ ID NO: 801175 - DNA, 15 bp, Homo sapiens
tgaaccatgtcatat

SEQ ID NO: 801176 - DNA, 15 bp, Homo sapiens
gaaccatgtcatatg

SEQ ID NO: 801177 - DNA, 15 bp, Homo sapiens
aaccatgtcatatga

SEQ ID NO: 801178 - DNA, 15 bp, Homo sapiens
accatgtcatatgaa

SEQ ID NO: 801179 - DNA, 15 bp, Homo sapiens
ccatgtcatatgaac

SEQ ID NO: 801180 - DNA, 15 bp, Homo sapiens
catgtcatatgaaca

SEQ ID NO: 801181 - DNA, 15 bp, Homo sapiens
atgtcatatgaacag

SEQ ID NO: 801182 - DNA, 15 bp, Homo sapiens
tgtcatatgaacagc

SEQ ID NO: 801183 - DNA, 15 bp, Homo sapiens
gtcatatgaacagct

SEQ ID NO: 801184 - DNA, 15 bp, Homo sapiens
tcatatgaacagctg

SEQ ID NO: 801185 - DNA, 15 bp, Homo sapiens
catatgaacagctgt

SEQ ID NO: 801186 - DNA, 15 bp, Homo sapiens
atatgaacagctgtg

SEQ ID NO: 801187 - DNA, 15 bp, Homo sapiens
tatgaacagctgtgg

SEQ ID NO: 801188 - DNA, 15 bp, Homo sapiens
atgaacagctgtggt

SEQ ID NO: 801189 - DNA, 15 bp, Homo sapiens
tgaacagctgtggtg

SEQ ID NO: 801190 - DNA, 15 bp, Homo sapiens
gaacagctgtggtgt

SEQ ID NO: 801191 - DNA, 15 bp, Homo sapiens
aacagctgtggtgta

SEQ ID NO: 801192 - DNA, 15 bp, Homo sapiens
acagctgtggtgtaa

SEQ ID NO: 801193 - DNA, 15 bp, Homo sapiens
cagctgtggtgtaaa

SEQ ID NO: 801194 - DNA, 15 bp, Homo sapiens
agctgtggtgtaaac

SEQ ID NO: 801195 - DNA, 15 bp, Homo sapiens
gctgtggtgtaaacc

SEQ ID NO: 801196 - DNA, 15 bp, Homo sapiens
ctgtggtgtaaacca

SEQ ID NO: 801197 - DNA, 15 bp, Homo sapiens
tgtggtgtaaaccag

SEQ ID NO: 801198 - DNA, 15 bp, Homo sapiens
gtggtgtaaaccagc

SEQ ID NO: 801199 - DNA, 15 bp, Homo sapiens
tggtgtaaaccagcc

SEQ ID NO: 801200 - DNA, 15 bp, Homo sapiens
ggtgtaaaccagcca

SEQ ID NO: 801201 - DNA, 15 bp, Homo sapiens
gtgtaaaccagccag

SEQ ID NO: 801202 - DNA, 15 bp, Homo sapiens
tgtaaaccagccagg

SEQ ID NO: 801203 - DNA, 15 bp, Homo sapiens
gtaaaccagccagga

SEQ ID NO: 801204 - DNA, 15 bp, Homo sapiens
taaaccagccaggac

SEQ ID NO: 801205 - DNA, 15 bp, Homo sapiens
aaaccagccaggaca

SEQ ID NO: 801206 - DNA, 15 bp, Homo sapiens
aaccagccaggacaa

SEQ ID NO: 801207 - DNA, 15 bp, Homo sapiens
accagccaggacaat

SEQ ID NO: 801208 - DNA, 15 bp, Homo sapiens
ccagccaggacaatt

SEQ ID NO: 801209 - DNA, 15 bp, Homo sapiens
cagccaggacaatta

SEQ ID NO: 801210 - DNA, 15 bp, Homo sapiens
agccaggacaattat

SEQ ID NO: 801211 - DNA, 15 bp, Homo sapiens
gccaggacaattatg

SEQ ID NO: 801212 - DNA, 15 bp, Homo sapiens
ccaggacaattatgc

SEQ ID NO: 801213 - DNA, 15 bp, Homo sapiens
caggacaattatgca

SEQ ID NO: 801214 - DNA, 15 bp, Homo sapiens
aggacaattatgcaa

SEQ ID NO: 801215 - DNA, 15 bp, Homo sapiens
ggacaattatgcaag

SEQ ID NO: 801216 - DNA, 15 bp, Homo sapiens
gacaattatgcaagt

SEQ ID NO: 801217 - DNA, 15 bp, Homo sapiens
acaattatgcaagtt

SEQ ID NO: 801218 - DNA, 15 bp, Homo sapiens
caattatgcaagttg

SEQ ID NO: 801219 - DNA, 15 bp, Homo sapiens
aattatgcaagttgg

SEQ ID NO: 801220 - DNA, 15 bp, Homo sapiens
attatgcaagttgga

SEQ ID NO: 801221 - DNA, 15 bp, Homo sapiens
ttatgcaagttggat

SEQ ID NO: 801222 - DNA, 15 bp, Homo sapiens
tatgcaagttggatt

SEQ ID NO: 801223 - DNA, 15 bp, Homo sapiens
atgcaagttggatta

SEQ ID NO: 801224 - DNA, 15 bp, Homo sapiens
tgcaagttggattat

SEQ ID NO: 801225 - DNA, 15 bp, Homo sapiens
gcaagttggattatg

SEQ ID NO: 801226 - DNA, 15 bp, Homo sapiens
caagttggattatgt

SEQ ID NO: 801227 - DNA, 15 bp, Homo sapiens
aagttggattatgtc

SEQ ID NO: 801228 - DNA, 15 bp, Homo sapiens
agttggattatgtct

SEQ ID NO: 801229 - DNA, 15 bp, Homo sapiens
gttggattatgtctc

SEQ ID NO: 801230 - DNA, 15 bp, Homo sapiens
ttggattatgtctcc

SEQ ID NO: 801231 - DNA, 15 bp, Homo sapiens
tggattatgtctcca

SEQ ID NO: 801232 - DNA, 15 bp, Homo sapiens
ggattatgtctccag

SEQ ID NO: 801233 - DNA, 15 bp, Homo sapiens
gattatgtctccagt

SEQ ID NO: 801234 - DNA, 15 bp, Homo sapiens
attatgtctccagta

SEQ ID NO: 801235 - DNA, 15 bp, Homo sapiens
ttatgtctccagtaa

SEQ ID NO: 801236 - DNA, 15 bp, Homo sapiens
tatgtctccagtaaa

SEQ ID NO: 801237 - DNA, 15 bp, Homo sapiens
atgtctccagtaaat

SEQ ID NO: 801238 - DNA, 15 bp, Homo sapiens
tgtctccagtaaatt

SEQ ID NO: 801239 - DNA, 15 bp, Homo sapiens
gtctccagtaaattg

SEQ ID NO: 801240 - DNA, 15 bp, Homo sapiens
tctccagtaaattga

SEQ ID NO: 801241 - DNA, 15 bp, Homo sapiens
ctccagtaaattgat

SEQ ID NO: 801242 - DNA, 15 bp, Homo sapiens
tccagtaaattgatg

SEQ ID NO: 801243 - DNA, 15 bp, Homo sapiens
ccagtaaattgatgc

SEQ ID NO: 801244 - DNA, 15 bp, Homo sapiens
cagtaaattgatgct

SEQ ID NO: 801245 - DNA, 15 bp, Homo sapiens
agtaaattgatgcta

SEQ ID NO: 801246 - DNA, 15 bp, Homo sapiens
gtaaattgatgctac

SEQ ID NO: 801247 - DNA, 15 bp, Homo sapiens
taaattgatgctact

SEQ ID NO: 801248 - DNA, 15 bp, Homo sapiens
aaattgatgctactt

SEQ ID NO: 801249 - DNA, 15 bp, Homo sapiens
aattgatgctacttt

SEQ ID NO: 801250 - DNA, 15 bp, Homo sapiens
attgatgctacttta

SEQ ID NO: 801251 - DNA, 15 bp, Homo sapiens
ttgatgctactttat

SEQ ID NO: 801252 - DNA, 15 bp, Homo sapiens
tgatgctactttatt

SEQ ID NO: 801253 - DNA, 15 bp, Homo sapiens
gatgctactttattt

SEQ ID NO: 801254 - DNA, 15 bp, Homo sapiens
atgctactttatttg

SEQ ID NO: 801255 - DNA, 15 bp, Homo sapiens
tgctactttatttga

SEQ ID NO: 801256 - DNA, 15 bp, Homo sapiens
gctactttatttgat

SEQ ID NO: 801257 - DNA, 15 bp, Homo sapiens
ctactttatttgatt

SEQ ID NO: 801258 - DNA, 15 bp, Homo sapiens
tactttatttgatta

SEQ ID NO: 801259 - DNA, 15 bp, Homo sapiens
actttatttgattag

SEQ ID NO: 801260 - DNA, 15 bp, Homo sapiens
ctttatttgattagg

SEQ ID NO: 801261 - DNA, 15 bp, Homo sapiens
tttatttgattaggt

SEQ ID NO: 801262 - DNA, 15 bp, Homo sapiens
ttatttgattaggtt

SEQ ID NO: 801263 - DNA, 15 bp, Homo sapiens
tatttgattaggttg

SEQ ID NO: 801264 - DNA, 15 bp, Homo sapiens
atttgattaggttgg

SEQ ID NO: 801265 - DNA, 15 bp, Homo sapiens
tttgattaggttggt

SEQ ID NO: 801266 - DNA, 15 bp, Homo sapiens
ttgattaggttggtt

SEQ ID NO: 801267 - DNA, 15 bp, Homo sapiens
tgattaggttggttc

SEQ ID NO: 801268 - DNA, 15 bp, Homo sapiens
gattaggttggttct

SEQ ID NO: 801269 - DNA, 15 bp, Homo sapiens
attaggttggttctc

SEQ ID NO: 801270 - DNA, 15 bp, Homo sapiens
ttaggttggttctcc

SEQ ID NO: 801271 - DNA, 15 bp, Homo sapiens
taggttggttctcca

SEQ ID NO: 801272 - DNA, 15 bp, Homo sapiens
aggttggttctccaa

SEQ ID NO: 801273 - DNA, 15 bp, Homo sapiens
ggttggttctccaaa

SEQ ID NO: 801274 - DNA, 15 bp, Homo sapiens
gttggttctccaaag

SEQ ID NO: 801275 - DNA, 15 bp, Homo sapiens
ttggttctccaaaga

SEQ ID NO: 801276 - DNA, 15 bp, Homo sapiens
tggttctccaaagac

SEQ ID NO: 801277 - DNA, 15 bp, Homo sapiens
ggttctccaaagaca

SEQ ID NO: 801278 - DNA, 15 bp, Homo sapiens
gttctccaaagacaa

SEQ ID NO: 801279 - DNA, 15 bp, Homo sapiens
ttctccaaagacaaa

SEQ ID NO: 801280 - DNA, 15 bp, Homo sapiens
tctccaaagacaaat

SEQ ID NO: 801281 - DNA, 15 bp, Homo sapiens
ctccaaagacaaatt

SEQ ID NO: 801282 - DNA, 15 bp, Homo sapiens
tccaaagacaaattc

SEQ ID NO: 801283 - DNA, 15 bp, Homo sapiens
ccaaagacaaattct

SEQ ID NO: 801284 - DNA, 15 bp, Homo sapiens
caaagacaaattctt

SEQ ID NO: 801285 - DNA, 15 bp, Homo sapiens
aaagacaaattcttc

SEQ ID NO: 801286 - DNA, 15 bp, Homo sapiens
aagacaaattcttcc

SEQ ID NO: 801287 - DNA, 15 bp, Homo sapiens
agacaaattcttcca

SEQ ID NO: 801288 - DNA, 15 bp, Homo sapiens
gacaaattcttccaa

SEQ ID NO: 801289 - DNA, 15 bp, Homo sapiens
acaaattcttccaag

SEQ ID NO: 801290 - DNA, 15 bp, Homo sapiens
caaattcttccaagt

SEQ ID NO: 801291 - DNA, 15 bp, Homo sapiens
aaattcttccaagtt

SEQ ID NO: 801292 - DNA, 15 bp, Homo sapiens
aattcttccaagttg

SEQ ID NO: 801293 - DNA, 15 bp, Homo sapiens
attcttccaagttgg

SEQ ID NO: 801294 - DNA, 15 bp, Homo sapiens
ttcttccaagttggg

SEQ ID NO: 801295 - DNA, 15 bp, Homo sapiens
tcttccaagttgggt

SEQ ID NO: 801296 - DNA, 15 bp, Homo sapiens
cttccaagttgggtt

SEQ ID NO: 801297 - DNA, 15 bp, Homo sapiens
ttccaagttgggttg

SEQ ID NO: 801298 - DNA, 15 bp, Homo sapiens
tccaagttgggttgg

SEQ ID NO: 801299 - DNA, 15 bp, Homo sapiens
ccaagttgggttggg

SEQ ID NO: 801300 - DNA, 15 bp, Homo sapiens
caagttgggttgggg

SEQ ID NO: 801301 - DNA, 15 bp, Homo sapiens
aagttgggttggggg

SEQ ID NO: 801302 - DNA, 15 bp, Homo sapiens
agttgggttggggga

SEQ ID NO: 801303 - DNA, 15 bp, Homo sapiens
gttgggttgggggaa

SEQ ID NO: 801304 - DNA, 15 bp, Homo sapiens
ttgggttgggggaaa

SEQ ID NO: 801305 - DNA, 15 bp, Homo sapiens
tgggttgggggaaaa

SEQ ID NO: 801306 - DNA, 15 bp, Homo sapiens
gggttgggggaaaaa

SEQ ID NO: 801307 - DNA, 15 bp, Homo sapiens
ggttgggggaaaaaa

SEQ ID NO: 801308 - DNA, 15 bp, Homo sapiens
gttgggggaaaaaaa

SEQ ID NO: 801309 - DNA, 15 bp, Homo sapiens
ttgggggaaaaaaat

SEQ ID NO: 801310 - DNA, 15 bp, Homo sapiens
tgggggaaaaaaatc

SEQ ID NO: 801311 - DNA, 15 bp, Homo sapiens
gggggaaaaaaatca

SEQ ID NO: 801312 - DNA, 15 bp, Homo sapiens
ggggaaaaaaatcac

SEQ ID NO: 801313 - DNA, 15 bp, Homo sapiens
gggaaaaaaatcacc

SEQ ID NO: 801314 - DNA, 15 bp, Homo sapiens
ggaaaaaaatcacca

SEQ ID NO: 801315 - DNA, 15 bp, Homo sapiens
gaaaaaaatcaccat

SEQ ID NO: 801316 - DNA, 15 bp, Homo sapiens
aaaaaaatcaccatt

SEQ ID NO: 801317 - DNA, 15 bp, Homo sapiens
aaaaaatcaccattc

SEQ ID NO: 801318 - DNA, 15 bp, Homo sapiens
aaaaatcaccattct

SEQ ID NO: 801319 - DNA, 15 bp, Homo sapiens
aaaatcaccattcta

SEQ ID NO: 801320 - DNA, 15 bp, Homo sapiens
aaatcaccattctaa

SEQ ID NO: 801321 - DNA, 15 bp, Homo sapiens
aatcaccattctaac

SEQ ID NO: 801322 - DNA, 15 bp, Homo sapiens
tcaccattctaactt

SEQ ID NO: 801323 - DNA, 15 bp, Homo sapiens
caccattctaacttt

SEQ ID NO: 801324 - DNA, 15 bp, Homo sapiens
accattctaactttg

SEQ ID NO: 801325 - DNA, 15 bp, Homo sapiens
ccattctaactttgc

SEQ ID NO: 801326 - DNA, 15 bp, Homo sapiens
cattctaactttgct

SEQ ID NO: 801327 - DNA, 15 bp, Homo sapiens
attctaactttgctt

SEQ ID NO: 801328 - DNA, 15 bp, Homo sapiens
ttctaactttgcttc

SEQ ID NO: 801329 - DNA, 15 bp, Homo sapiens
tctaactttgcttct

SEQ ID NO: 801330 - DNA, 15 bp, Homo sapiens
ctaactttgcttctg

SEQ ID NO: 801331 - DNA, 15 bp, Homo sapiens
taactttgcttctga

SEQ ID NO: 801332 - DNA, 15 bp, Homo sapiens
aactttgcttctgac

SEQ ID NO: 801333 - DNA, 15 bp, Homo sapiens
actttgcttctgact

SEQ ID NO: 801334 - DNA, 15 bp, Homo sapiens
ctttgcttctgactt

SEQ ID NO: 801335 - DNA, 15 bp, Homo sapiens
tttgcttctgacttt

SEQ ID NO: 801336 - DNA, 15 bp, Homo sapiens
ttgcttctgactttc

SEQ ID NO: 801337 - DNA, 15 bp, Homo sapiens
tgcttctgactttca

SEQ ID NO: 801338 - DNA, 15 bp, Homo sapiens
gcttctgactttcaa

SEQ ID NO: 801339 - DNA, 15 bp, Homo sapiens
cttctgactttcaat

SEQ ID NO: 801340 - DNA, 15 bp, Homo sapiens
ttctgactttcaatc

SEQ ID NO: 801341 - DNA, 15 bp, Homo sapiens
tctgactttcaatct

SEQ ID NO: 801342 - DNA, 15 bp, Homo sapiens
ctgactttcaatctt

SEQ ID NO: 801343 - DNA, 15 bp, Homo sapiens
tgactttcaatcttc

SEQ ID NO: 801344 - DNA, 15 bp, Homo sapiens
gactttcaatcttca

SEQ ID NO: 801345 - DNA, 15 bp, Homo sapiens
actttcaatcttcag

SEQ ID NO: 801346 - DNA, 15 bp, Homo sapiens
ctttcaatcttcaga

SEQ ID NO: 801347 - DNA, 15 bp, Homo sapiens
tttcaatcttcagat

SEQ ID NO: 801348 - DNA, 15 bp, Homo sapiens
ttcaatcttcagatt

SEQ ID NO: 801349 - DNA, 15 bp, Homo sapiens
tcaatcttcagattg

SEQ ID NO: 801350 - DNA, 15 bp, Homo sapiens
caatcttcagattgc

SEQ ID NO: 801351 - DNA, 15 bp, Homo sapiens
aatcttcagattgct

SEQ ID NO: 801352 - DNA, 15 bp, Homo sapiens
atcttcagattgctt

SEQ ID NO: 801353 - DNA, 15 bp, Homo sapiens
tcttcagattgcttt

SEQ ID NO: 801354 - DNA, 15 bp, Homo sapiens
cttcagattgctttt

SEQ ID NO: 801355 - DNA, 15 bp, Homo sapiens
ttcagattgcttttg

SEQ ID NO: 801356 - DNA, 15 bp, Homo sapiens
tcagattgcttttgc

SEQ ID NO: 801357 - DNA, 15 bp, Homo sapiens
cagattgcttttgct

SEQ ID NO: 801358 - DNA, 15 bp, Homo sapiens
agattgcttttgctt

SEQ ID NO: 801359 - DNA, 15 bp, Homo sapiens
gattgcttttgcttt

SEQ ID NO: 801360 - DNA, 15 bp, Homo sapiens
attgcttttgctttc

SEQ ID NO: 801361 - DNA, 15 bp, Homo sapiens
ttgcttttgctttct

SEQ ID NO: 801362 - DNA, 15 bp, Homo sapiens
tgcttttgctttcta

SEQ ID NO: 801363 - DNA, 15 bp, Homo sapiens
gcttttgctttctaa

SEQ ID NO: 801364 - DNA, 15 bp, Homo sapiens
cttttgctttctaat

SEQ ID NO: 801365 - DNA, 15 bp, Homo sapiens
ttttgctttctaatc

SEQ ID NO: 801366 - DNA, 15 bp, Homo sapiens
tttgctttctaatcc

SEQ ID NO: 801367 - DNA, 15 bp, Homo sapiens
ttgctttctaatcct

SEQ ID NO: 801368 - DNA, 15 bp, Homo sapiens
tgctttctaatccta

SEQ ID NO: 801369 - DNA, 15 bp, Homo sapiens
gctttctaatcctaa

SEQ ID NO: 801370 - DNA, 15 bp, Homo sapiens
ctttctaatcctaag

SEQ ID NO: 801371 - DNA, 15 bp, Homo sapiens
tttctaatcctaaga

SEQ ID NO: 801372 - DNA, 15 bp, Homo sapiens
ttctaatcctaagag

SEQ ID NO: 801373 - DNA, 15 bp, Homo sapiens
tctaatcctaagagg

SEQ ID NO: 801374 - DNA, 15 bp, Homo sapiens
ctaatcctaagagga

SEQ ID NO: 801375 - DNA, 15 bp, Homo sapiens
taatcctaagaggaa

SEQ ID NO: 801376 - DNA, 15 bp, Homo sapiens
aatcctaagaggaaa

SEQ ID NO: 801377 - DNA, 15 bp, Homo sapiens
atcctaagaggaaac

SEQ ID NO: 801378 - DNA, 15 bp, Homo sapiens
tcctaagaggaaaca

SEQ ID NO: 801379 - DNA, 15 bp, Homo sapiens
cctaagaggaaacaa

SEQ ID NO: 801380 - DNA, 15 bp, Homo sapiens
ctaagaggaaacaaa

SEQ ID NO: 801381 - DNA, 15 bp, Homo sapiens
taagaggaaacaaac

SEQ ID NO: 801382 - DNA, 15 bp, Homo sapiens
aagaggaaacaaaca

SEQ ID NO: 801383 - DNA, 15 bp, Homo sapiens
agaggaaacaaacac

SEQ ID NO: 801384 - DNA, 15 bp, Homo sapiens
gaggaaacaaacaca

SEQ ID NO: 801385 - DNA, 15 bp, Homo sapiens
aggaaacaaacacaa

SEQ ID NO: 801386 - DNA, 15 bp, Homo sapiens
ggaaacaaacacaag

SEQ ID NO: 801387 - DNA, 15 bp, Homo sapiens
gaaacaaacacaaga

SEQ ID NO: 801388 - DNA, 15 bp, Homo sapiens
aaacaaacacaagat

SEQ ID NO: 801389 - DNA, 15 bp, Homo sapiens
aacaaacacaagatg

SEQ ID NO: 801390 - DNA, 15 bp, Homo sapiens
acaaacacaagatgg

SEQ ID NO: 801391 - DNA, 15 bp, Homo sapiens
caaacacaagatggc

SEQ ID NO: 801392 - DNA, 15 bp, Homo sapiens
aaacacaagatggca

SEQ ID NO: 801393 - DNA, 15 bp, Homo sapiens
aacacaagatggcag

SEQ ID NO: 801394 - DNA, 15 bp, Homo sapiens
acacaagatggcagc

SEQ ID NO: 801395 - DNA, 15 bp, Homo sapiens
cacaagatggcagct

SEQ ID NO: 801396 - DNA, 15 bp, Homo sapiens
acaagatggcagcta

SEQ ID NO: 801397 - DNA, 15 bp, Homo sapiens
caagatggcagctat

SEQ ID NO: 801398 - DNA, 15 bp, Homo sapiens
aagatggcagctatg

SEQ ID NO: 801399 - DNA, 15 bp, Homo sapiens
agatggcagctatgt

SEQ ID NO: 801400 - DNA, 15 bp, Homo sapiens
gatggcagctatgtt

SEQ ID NO: 801401 - DNA, 15 bp, Homo sapiens
atggcagctatgttg

SEQ ID NO: 801402 - DNA, 15 bp, Homo sapiens
tggcagctatgttgt

SEQ ID NO: 801403 - DNA, 15 bp, Homo sapiens
ggcagctatgttgtt

SEQ ID NO: 801404 - DNA, 15 bp, Homo sapiens
gcagctatgttgtta

SEQ ID NO: 801405 - DNA, 15 bp, Homo sapiens
cagctatgttgttat

SEQ ID NO: 801406 - DNA, 15 bp, Homo sapiens
agctatgttgttatc

SEQ ID NO: 801407 - DNA, 15 bp, Homo sapiens
gctatgttgttatca

SEQ ID NO: 801408 - DNA, 15 bp, Homo sapiens
ctatgttgttatcat

SEQ ID NO: 801409 - DNA, 15 bp, Homo sapiens
tatgttgttatcatc

SEQ ID NO: 801410 - DNA, 15 bp, Homo sapiens
atgttgttatcatca

SEQ ID NO: 801411 - DNA, 15 bp, Homo sapiens
tgttgttatcatcaa

SEQ ID NO: 801412 - DNA, 15 bp, Homo sapiens
gttgttatcatcaac

SEQ ID NO: 801413 - DNA, 15 bp, Homo sapiens
ttgttatcatcaaca

SEQ ID NO: 801414 - DNA, 15 bp, Homo sapiens
tgttatcatcaacag

SEQ ID NO: 801415 - DNA, 15 bp, Homo sapiens
gttatcatcaacaga

SEQ ID NO: 801416 - DNA, 15 bp, Homo sapiens
ttatcatcaacagaa

SEQ ID NO: 801417 - DNA, 15 bp, Homo sapiens
tatcatcaacagaac

SEQ ID NO: 801418 - DNA, 15 bp, Homo sapiens
atcatcaacagaacc

SEQ ID NO: 801419 - DNA, 15 bp, Homo sapiens
tcatcaacagaaccg

SEQ ID NO: 801420 - DNA, 15 bp, Homo sapiens
catcaacagaaccga

SEQ ID NO: 801421 - DNA, 15 bp, Homo sapiens
atcaacagaaccgag

SEQ ID NO: 801422 - DNA, 15 bp, Homo sapiens
tcaacagaaccgaga

SEQ ID NO: 801423 - DNA, 15 bp, Homo sapiens
caacagaaccgagaa

SEQ ID NO: 801424 - DNA, 15 bp, Homo sapiens
aacagaaccgagaat

SEQ ID NO: 801425 - DNA, 15 bp, Homo sapiens
acagaaccgagaata

SEQ ID NO: 801426 - DNA, 15 bp, Homo sapiens
cagaaccgagaataa

SEQ ID NO: 801427 - DNA, 15 bp, Homo sapiens
agaaccgagaataat

SEQ ID NO: 801428 - DNA, 15 bp, Homo sapiens
gaaccgagaataatc

SEQ ID NO: 801429 - DNA, 15 bp, Homo sapiens
aaccgagaataatca

SEQ ID NO: 801430 - DNA, 15 bp, Homo sapiens
accgagaataatcac

SEQ ID NO: 801431 - DNA, 15 bp, Homo sapiens
ccgagaataatcacg

SEQ ID NO: 801432 - DNA, 15 bp, Homo sapiens
cgagaataatcacgt

SEQ ID NO: 801433 - DNA, 15 bp, Homo sapiens
gagaataatcacgta

SEQ ID NO: 801434 - DNA, 15 bp, Homo sapiens
agaataatcacgtat

SEQ ID NO: 801435 - DNA, 15 bp, Homo sapiens
gaataatcacgtatc

SEQ ID NO: 801436 - DNA, 15 bp, Homo sapiens
aataatcacgtatct

SEQ ID NO: 801437 - DNA, 15 bp, Homo sapiens
ataatcacgtatctg

SEQ ID NO: 801438 - DNA, 15 bp, Homo sapiens
taatcacgtatctgt

SEQ ID NO: 801439 - DNA, 15 bp, Homo sapiens
aatcacgtatctgta

SEQ ID NO: 801440 - DNA, 15 bp, Homo sapiens
atcacgtatctgtaa

SEQ ID NO: 801441 - DNA, 15 bp, Homo sapiens
tcacgtatctgtaat

SEQ ID NO: 801442 - DNA, 15 bp, Homo sapiens
cacgtatctgtaata

SEQ ID NO: 801443 - DNA, 15 bp, Homo sapiens
acgtatctgtaatag

SEQ ID NO: 801444 - DNA, 15 bp, Homo sapiens
cgtatctgtaatagt

SEQ ID NO: 801445 - DNA, 15 bp, Homo sapiens
gtatctgtaatagtt

SEQ ID NO: 801446 - DNA, 15 bp, Homo sapiens
tatctgtaatagtta

SEQ ID NO: 801447 - DNA, 15 bp, Homo sapiens
atctgtaatagttat

SEQ ID NO: 801448 - DNA, 15 bp, Homo sapiens
tctgtaatagttatc

SEQ ID NO: 801449 - DNA, 15 bp, Homo sapiens
ctgtaatagttatca

SEQ ID NO: 801450 - DNA, 15 bp, Homo sapiens
tgtaatagttatcag

SEQ ID NO: 801451 - DNA, 15 bp, Homo sapiens
gtaatagttatcagc

SEQ ID NO: 801452 - DNA, 15 bp, Homo sapiens
taatagttatcagca

SEQ ID NO: 801453 - DNA, 15 bp, Homo sapiens
aatagttatcagcat

SEQ ID NO: 801454 - DNA, 15 bp, Homo sapiens
atagttatcagcatg

SEQ ID NO: 801455 - DNA, 15 bp, Homo sapiens
tagttatcagcatgc

SEQ ID NO: 801456 - DNA, 15 bp, Homo sapiens
agttatcagcatgct

SEQ ID NO: 801457 - DNA, 15 bp, Homo sapiens
gttatcagcatgctc

SEQ ID NO: 801458 - DNA, 15 bp, Homo sapiens
ttatcagcatgctct

SEQ ID NO: 801459 - DNA, 15 bp, Homo sapiens
tatcagcatgctctg

SEQ ID NO: 801460 - DNA, 15 bp, Homo sapiens
atcagcatgctctgt

SEQ ID NO: 801461 - DNA, 15 bp, Homo sapiens
tcagcatgctctgta

SEQ ID NO: 801462 - DNA, 15 bp, Homo sapiens
cagcatgctctgtac

SEQ ID NO: 801463 - DNA, 15 bp, Homo sapiens
agcatgctctgtacg

SEQ ID NO: 801464 - DNA, 15 bp, Homo sapiens
gcatgctctgtacga

SEQ ID NO: 801465 - DNA, 15 bp, Homo sapiens
catgctctgtacgag

SEQ ID NO: 801466 - DNA, 15 bp, Homo sapiens
atgctctgtacgaga

SEQ ID NO: 801467 - DNA, 15 bp, Homo sapiens
tgctctgtacgagac

SEQ ID NO: 801468 - DNA, 15 bp, Homo sapiens
gctctgtacgagact

SEQ ID NO: 801469 - DNA, 15 bp, Homo sapiens
ctctgtacgagactc

SEQ ID NO: 801470 - DNA, 15 bp, Homo sapiens
tctgtacgagactca

SEQ ID NO: 801471 - DNA, 15 bp, Homo sapiens
ctgtacgagactcac

SEQ ID NO: 801472 - DNA, 15 bp, Homo sapiens
tgtacgagactcaca

SEQ ID NO: 801473 - DNA, 15 bp, Homo sapiens
gtacgagactcacac

SEQ ID NO: 801474 - DNA, 15 bp, Homo sapiens
tacgagactcacact

SEQ ID NO: 801475 - DNA, 15 bp, Homo sapiens
acgagactcacactg

SEQ ID NO: 801476 - DNA, 15 bp, Homo sapiens
cgagactcacactgt

SEQ ID NO: 801477 - DNA, 15 bp, Homo sapiens
gagactcacactgtc

SEQ ID NO: 801478 - DNA, 15 bp, Homo sapiens
agactcacactgtct

SEQ ID NO: 801479 - DNA, 15 bp, Homo sapiens
gactcacactgtctt

SEQ ID NO: 801480 - DNA, 15 bp, Homo sapiens
actcacactgtcttt

SEQ ID NO: 801481 - DNA, 15 bp, Homo sapiens
ctcacactgtctttt

SEQ ID NO: 801482 - DNA, 15 bp, Homo sapiens
tcacactgtcttttc

SEQ ID NO: 801483 - DNA, 15 bp, Homo sapiens
cacactgtcttttct

SEQ ID NO: 801484 - DNA, 15 bp, Homo sapiens
acactgtcttttctc

SEQ ID NO: 801485 - DNA, 15 bp, Homo sapiens
cactgtcttttctca

SEQ ID NO: 801486 - DNA, 15 bp, Homo sapiens
actgtcttttctcaa

SEQ ID NO: 801487 - DNA, 15 bp, Homo sapiens
ctgtcttttctcaat

SEQ ID NO: 801488 - DNA, 15 bp, Homo sapiens
tgtcttttctcaatg

SEQ ID NO: 801489 - DNA, 15 bp, Homo sapiens
gtcttttctcaatga

SEQ ID NO: 801490 - DNA, 15 bp, Homo sapiens
tcttttctcaatgag

SEQ ID NO: 801491 - DNA, 15 bp, Homo sapiens
cttttctcaatgagc

SEQ ID NO: 801492 - DNA, 15 bp, Homo sapiens
ttttctcaatgagct

SEQ ID NO: 801493 - DNA, 15 bp, Homo sapiens
tttctcaatgagctt

SEQ ID NO: 801494 - DNA, 15 bp, Homo sapiens
ttctcaatgagcttg

SEQ ID NO: 801495 - DNA, 15 bp, Homo sapiens
tctcaatgagcttgc

SEQ ID NO: 801496 - DNA, 15 bp, Homo sapiens
ctcaatgagcttgcc

SEQ ID NO: 801497 - DNA, 15 bp, Homo sapiens
tcaatgagcttgcct

SEQ ID NO: 801498 - DNA, 15 bp, Homo sapiens
caatgagcttgcctg

SEQ ID NO: 801499 - DNA, 15 bp, Homo sapiens
aatgagcttgcctgg

SEQ ID NO: 801500 - DNA, 15 bp, Homo sapiens
atgagcttgcctggg

SEQ ID NO: 801501 - DNA, 15 bp, Homo sapiens
tgagcttgcctgggg

SEQ ID NO: 801502 - DNA, 15 bp, Homo sapiens
gagcttgcctggggg

SEQ ID NO: 801503 - DNA, 15 bp, Homo sapiens
agcttgcctgggggg

SEQ ID NO: 801504 - DNA, 15 bp, Homo sapiens
gcttgcctggggggc

SEQ ID NO: 801505 - DNA, 15 bp, Homo sapiens
cttgcctggggggca

SEQ ID NO: 801506 - DNA, 15 bp, Homo sapiens
ttgcctggggggcaa

SEQ ID NO: 801507 - DNA, 15 bp, Homo sapiens
tgcctggggggcaat

SEQ ID NO: 801508 - DNA, 15 bp, Homo sapiens
gcctggggggcaata

SEQ ID NO: 801509 - DNA, 15 bp, Homo sapiens
cctggggggcaataa

SEQ ID NO: 801510 - DNA, 15 bp, Homo sapiens
ctggggggcaataag

SEQ ID NO: 801511 - DNA, 15 bp, Homo sapiens
tggggggcaataaga

SEQ ID NO: 801512 - DNA, 15 bp, Homo sapiens
ggggggcaataagag

SEQ ID NO: 801513 - DNA, 15 bp, Homo sapiens
gggggcaataagaga

SEQ ID NO: 801514 - DNA, 15 bp, Homo sapiens
ggggcaataagagac

SEQ ID NO: 801515 - DNA, 15 bp, Homo sapiens
gggcaataagagaca

SEQ ID NO: 801516 - DNA, 15 bp, Homo sapiens
ggcaataagagacag

SEQ ID NO: 801517 - DNA, 15 bp, Homo sapiens
gcaataagagacagg

SEQ ID NO: 801518 - DNA, 15 bp, Homo sapiens
caataagagacaggc

SEQ ID NO: 801519 - DNA, 15 bp, Homo sapiens
aataagagacaggca

SEQ ID NO: 801520 - DNA, 15 bp, Homo sapiens
ataagagacaggcag

SEQ ID NO: 801521 - DNA, 15 bp, Homo sapiens
taagagacaggcagg

SEQ ID NO: 801522 - DNA, 15 bp, Homo sapiens
aagagacaggcagga

SEQ ID NO: 801523 - DNA, 15 bp, Homo sapiens
agagacaggcaggaa

SEQ ID NO: 801524 - DNA, 15 bp, Homo sapiens
gagacaggcaggaaa

SEQ ID NO: 801525 - DNA, 15 bp, Homo sapiens
agacaggcaggaaac

SEQ ID NO: 801526 - DNA, 15 bp, Homo sapiens
gacaggcaggaaact

SEQ ID NO: 801527 - DNA, 15 bp, Homo sapiens
acaggcaggaaactg

SEQ ID NO: 801528 - DNA, 15 bp, Homo sapiens
caggcaggaaactgt

SEQ ID NO: 801529 - DNA, 15 bp, Homo sapiens
aggcaggaaactgtg

SEQ ID NO: 801530 - DNA, 15 bp, Homo sapiens
ggcaggaaactgtga

SEQ ID NO: 801531 - DNA, 15 bp, Homo sapiens
gcaggaaactgtgac

SEQ ID NO: 801532 - DNA, 15 bp, Homo sapiens
caggaaactgtgacc

SEQ ID NO: 801533 - DNA, 15 bp, Homo sapiens
aggaaactgtgacca

SEQ ID NO: 801534 - DNA, 15 bp, Homo sapiens
ggaaactgtgaccat

SEQ ID NO: 801535 - DNA, 15 bp, Homo sapiens
gaaactgtgaccatt

SEQ ID NO: 801536 - DNA, 15 bp, Homo sapiens
aaactgtgaccattc

SEQ ID NO: 801537 - DNA, 15 bp, Homo sapiens
aactgtgaccattcc

SEQ ID NO: 801538 - DNA, 15 bp, Homo sapiens
actgtgaccattcct

SEQ ID NO: 801539 - DNA, 15 bp, Homo sapiens
ctgtgaccattcctt

SEQ ID NO: 801540 - DNA, 15 bp, Homo sapiens
tgtgaccattccttt

SEQ ID NO: 801541 - DNA, 15 bp, Homo sapiens
gtgaccattcctttg

SEQ ID NO: 801542 - DNA, 15 bp, Homo sapiens
tgaccattcctttgt

SEQ ID NO: 801543 - DNA, 15 bp, Homo sapiens
gaccattcctttgtg

SEQ ID NO: 801544 - DNA, 15 bp, Homo sapiens
accattcctttgtga

SEQ ID NO: 801545 - DNA, 15 bp, Homo sapiens
ccattcctttgtgag

SEQ ID NO: 801546 - DNA, 15 bp, Homo sapiens
cattcctttgtgagt

SEQ ID NO: 801547 - DNA, 15 bp, Homo sapiens
attcctttgtgagtc

SEQ ID NO: 801548 - DNA, 15 bp, Homo sapiens
ttcctttgtgagtcc

SEQ ID NO: 801549 - DNA, 15 bp, Homo sapiens
tcctttgtgagtccc

SEQ ID NO: 801550 - DNA, 15 bp, Homo sapiens
cctttgtgagtcccc

SEQ ID NO: 801551 - DNA, 15 bp, Homo sapiens
ctttgtgagtcccca

SEQ ID NO: 801552 - DNA, 15 bp, Homo sapiens
tttgtgagtccccaa

SEQ ID NO: 801553 - DNA, 15 bp, Homo sapiens
ttgtgagtccccaaa

SEQ ID NO: 801554 - DNA, 15 bp, Homo sapiens
tgtgagtccccaaaa

SEQ ID NO: 801555 - DNA, 15 bp, Homo sapiens
gtgagtccccaaaac

SEQ ID NO: 801556 - DNA, 15 bp, Homo sapiens
tgagtccccaaaaca

SEQ ID NO: 801557 - DNA, 15 bp, Homo sapiens
gagtccccaaaacag

SEQ ID NO: 801558 - DNA, 15 bp, Homo sapiens
agtccccaaaacagc

SEQ ID NO: 801559 - DNA, 15 bp, Homo sapiens
gtccccaaaacagcc

SEQ ID NO: 801560 - DNA, 15 bp, Homo sapiens
tccccaaaacagcct

SEQ ID NO: 801561 - DNA, 15 bp, Homo sapiens
ccccaaaacagcctg

SEQ ID NO: 801562 - DNA, 15 bp, Homo sapiens
cccaaaacagcctgg

SEQ ID NO: 801563 - DNA, 15 bp, Homo sapiens
ccaaaacagcctggc

SEQ ID NO: 801564 - DNA, 15 bp, Homo sapiens
caaaacagcctggct

SEQ ID NO: 801565 - DNA, 15 bp, Homo sapiens
aaaacagcctggctg

SEQ ID NO: 801566 - DNA, 15 bp, Homo sapiens
aaacagcctggctgc

SEQ ID NO: 801567 - DNA, 15 bp, Homo sapiens
aacagcctggctgca

SEQ ID NO: 801568 - DNA, 15 bp, Homo sapiens
acagcctggctgcag

SEQ ID NO: 801569 - DNA, 15 bp, Homo sapiens
cagcctggctgcagc

SEQ ID NO: 801570 - DNA, 15 bp, Homo sapiens
agcctggctgcagct

SEQ ID NO: 801571 - DNA, 15 bp, Homo sapiens
gcctggctgcagctc

SEQ ID NO: 801572 - DNA, 15 bp, Homo sapiens
cctggctgcagctca

SEQ ID NO: 801573 - DNA, 15 bp, Homo sapiens
ctggctgcagctcac

SEQ ID NO: 801574 - DNA, 15 bp, Homo sapiens
tggctgcagctcact

SEQ ID NO: 801575 - DNA, 15 bp, Homo sapiens
ggctgcagctcacta

SEQ ID NO: 801576 - DNA, 15 bp, Homo sapiens
gctgcagctcactaa

SEQ ID NO: 801577 - DNA, 15 bp, Homo sapiens
ctgcagctcactaag

SEQ ID NO: 801578 - DNA, 15 bp, Homo sapiens
tgcagctcactaagc

SEQ ID NO: 801579 - DNA, 15 bp, Homo sapiens
gcagctcactaagcc

SEQ ID NO: 801580 - DNA, 15 bp, Homo sapiens
cagctcactaagcca

SEQ ID NO: 801581 - DNA, 15 bp, Homo sapiens
agctcactaagccat

SEQ ID NO: 801582 - DNA, 15 bp, Homo sapiens
gctcactaagccatt

SEQ ID NO: 801583 - DNA, 15 bp, Homo sapiens
ctcactaagccattg

SEQ ID NO: 801584 - DNA, 15 bp, Homo sapiens
tcactaagccattgt

SEQ ID NO: 801585 - DNA, 15 bp, Homo sapiens
cactaagccattgtc

SEQ ID NO: 801586 - DNA, 15 bp, Homo sapiens
actaagccattgtct

SEQ ID NO: 801587 - DNA, 15 bp, Homo sapiens
ctaagccattgtctt

SEQ ID NO: 801588 - DNA, 15 bp, Homo sapiens
taagccattgtcttc

SEQ ID NO: 801589 - DNA, 15 bp, Homo sapiens
aagccattgtcttcc

SEQ ID NO: 801590 - DNA, 15 bp, Homo sapiens
agccattgtcttcct

SEQ ID NO: 801591 - DNA, 15 bp, Homo sapiens
gccattgtcttcctt

SEQ ID NO: 801592 - DNA, 15 bp, Homo sapiens
ccattgtcttccttt

SEQ ID NO: 801593 - DNA, 15 bp, Homo sapiens
cattgtcttccttta

SEQ ID NO: 801594 - DNA, 15 bp, Homo sapiens
attgtcttcctttac

SEQ ID NO: 801595 - DNA, 15 bp, Homo sapiens
ttgtcttcctttaca

SEQ ID NO: 801596 - DNA, 15 bp, Homo sapiens
tgtcttcctttacac

SEQ ID NO: 801597 - DNA, 15 bp, Homo sapiens
gtcttcctttacaca

SEQ ID NO: 801598 - DNA, 15 bp, Homo sapiens
tcttcctttacacac

SEQ ID NO: 801599 - DNA, 15 bp, Homo sapiens
cttcctttacacaca

SEQ ID NO: 801600 - DNA, 15 bp, Homo sapiens
ttcctttacacacaa

SEQ ID NO: 801601 - DNA, 15 bp, Homo sapiens
tcctttacacacaac

SEQ ID NO: 801602 - DNA, 15 bp, Homo sapiens
cctttacacacaacc

SEQ ID NO: 801603 - DNA, 15 bp, Homo sapiens
ctttacacacaacca

SEQ ID NO: 801604 - DNA, 15 bp, Homo sapiens
tttacacacaaccaa

SEQ ID NO: 801605 - DNA, 15 bp, Homo sapiens
ttacacacaaccaaa

SEQ ID NO: 801606 - DNA, 15 bp, Homo sapiens
tacacacaaccaaac

SEQ ID NO: 801607 - DNA, 15 bp, Homo sapiens
acacacaaccaaacg

SEQ ID NO: 801608 - DNA, 15 bp, Homo sapiens
cacacaaccaaacgt

SEQ ID NO: 801609 - DNA, 15 bp, Homo sapiens
acacaaccaaacgta

SEQ ID NO: 801610 - DNA, 15 bp, Homo sapiens
cacaaccaaacgtag

SEQ ID NO: 801611 - DNA, 15 bp, Homo sapiens
acaaccaaacgtagg

SEQ ID NO: 801612 - DNA, 15 bp, Homo sapiens
caaccaaacgtaggc

SEQ ID NO: 801613 - DNA, 15 bp, Homo sapiens
aaccaaacgtaggca

SEQ ID NO: 801614 - DNA, 15 bp, Homo sapiens
accaaacgtaggcac

SEQ ID NO: 801615 - DNA, 15 bp, Homo sapiens
ccaaacgtaggcaca

SEQ ID NO: 801616 - DNA, 15 bp, Homo sapiens
caaacgtaggcacat

SEQ ID NO: 801617 - DNA, 15 bp, Homo sapiens
aaacgtaggcacatg

SEQ ID NO: 801618 - DNA, 15 bp, Homo sapiens
aacgtaggcacatgg

SEQ ID NO: 801619 - DNA, 15 bp, Homo sapiens
acgtaggcacatggc

SEQ ID NO: 801620 - DNA, 15 bp, Homo sapiens
cgtaggcacatggct

SEQ ID NO: 801621 - DNA, 15 bp, Homo sapiens
gtaggcacatggcta

SEQ ID NO: 801622 - DNA, 15 bp, Homo sapiens
taggcacatggctaa

SEQ ID NO: 801623 - DNA, 15 bp, Homo sapiens
aggcacatggctaaa

SEQ ID NO: 801624 - DNA, 15 bp, Homo sapiens
ggcacatggctaaat

SEQ ID NO: 801625 - DNA, 15 bp, Homo sapiens
gcacatggctaaata

SEQ ID NO: 801626 - DNA, 15 bp, Homo sapiens
cacatggctaaataa

SEQ ID NO: 801627 - DNA, 15 bp, Homo sapiens
acatggctaaataaa

SEQ ID NO: 801628 - DNA, 15 bp, Homo sapiens
catggctaaataaac

SEQ ID NO: 801629 - DNA, 15 bp, Homo sapiens
atggctaaataaaca

SEQ ID NO: 801630 - DNA, 15 bp, Homo sapiens
tggctaaataaacat

SEQ ID NO: 801631 - DNA, 15 bp, Homo sapiens
ggctaaataaacata

SEQ ID NO: 801632 - DNA, 15 bp, Homo sapiens
gctaaataaacataa

SEQ ID NO: 801633 - DNA, 15 bp, Homo sapiens
ctaaataaacataat

SEQ ID NO: 801634 - DNA, 15 bp, Homo sapiens
taaataaacataatg

SEQ ID NO: 801635 - DNA, 15 bp, Homo sapiens
aaataaacataatga

SEQ ID NO: 801636 - DNA, 15 bp, Homo sapiens
aataaacataatgaa

SEQ ID NO: 801637 - DNA, 15 bp, Homo sapiens
ataaacataatgaaa

SEQ ID NO: 801638 - DNA, 15 bp, Homo sapiens
taaacataatgaaaa

SEQ ID NO: 801639 - DNA, 15 bp, Homo sapiens
aaacataatgaaaag

SEQ ID NO: 801640 - DNA, 15 bp, Homo sapiens
aacataatgaaaaga

SEQ ID NO: 801641 - DNA, 15 bp, Homo sapiens
acataatgaaaagaa

SEQ ID NO: 801642 - DNA, 15 bp, Homo sapiens
cataatgaaaagaaa

SEQ ID NO: 801643 - DNA, 15 bp, Homo sapiens
ataatgaaaagaaat

SEQ ID NO: 801644 - DNA, 15 bp, Homo sapiens
taatgaaaagaaatg

SEQ ID NO: 801645 - DNA, 15 bp, Homo sapiens
aatgaaaagaaatgg

SEQ ID NO: 801646 - DNA, 15 bp, Homo sapiens
atgaaaagaaatggg

SEQ ID NO: 801647 - DNA, 15 bp, Homo sapiens
tgaaaagaaatgggc

SEQ ID NO: 801648 - DNA, 15 bp, Homo sapiens
gaaaagaaatgggct

SEQ ID NO: 801649 - DNA, 15 bp, Homo sapiens
aaaagaaatgggctt

SEQ ID NO: 801650 - DNA, 15 bp, Homo sapiens
aaagaaatgggcttg

SEQ ID NO: 801651 - DNA, 15 bp, Homo sapiens
aagaaatgggcttgg

SEQ ID NO: 801652 - DNA, 15 bp, Homo sapiens
agaaatgggcttggt

SEQ ID NO: 801653 - DNA, 15 bp, Homo sapiens
gaaatgggcttggtg

SEQ ID NO: 801654 - DNA, 15 bp, Homo sapiens
aaatgggcttggtgt

SEQ ID NO: 801655 - DNA, 15 bp, Homo sapiens
aatgggcttggtgtg

SEQ ID NO: 801656 - DNA, 15 bp, Homo sapiens
atgggcttggtgtga

SEQ ID NO: 801657 - DNA, 15 bp, Homo sapiens
tgggcttggtgtgaa

SEQ ID NO: 801658 - DNA, 15 bp, Homo sapiens
gggcttggtgtgaaa

SEQ ID NO: 801659 - DNA, 15 bp, Homo sapiens
ggcttggtgtgaaat

SEQ ID NO: 801660 - DNA, 15 bp, Homo sapiens
gcttggtgtgaaatt

SEQ ID NO: 801661 - DNA, 15 bp, Homo sapiens
cttggtgtgaaattc

SEQ ID NO: 801662 - DNA, 15 bp, Homo sapiens
ttggtgtgaaattct

SEQ ID NO: 801663 - DNA, 15 bp, Homo sapiens
tggtgtgaaattctt

SEQ ID NO: 801664 - DNA, 15 bp, Homo sapiens
ggtgtgaaattcttc

SEQ ID NO: 801665 - DNA, 15 bp, Homo sapiens
gtgtgaaattcttcc

SEQ ID NO: 801666 - DNA, 15 bp, Homo sapiens
tgtgaaattcttccc

SEQ ID NO: 801667 - DNA, 15 bp, Homo sapiens
gtgaaattcttccca

SEQ ID NO: 801668 - DNA, 15 bp, Homo sapiens
tgaaattcttcccag

SEQ ID NO: 801669 - DNA, 15 bp, Homo sapiens
gaaattcttcccaga

SEQ ID NO: 801670 - DNA, 15 bp, Homo sapiens
aaattcttcccagat

SEQ ID NO: 801671 - DNA, 15 bp, Homo sapiens
aattcttcccagatg

SEQ ID NO: 801672 - DNA, 15 bp, Homo sapiens
attcttcccagatgc

SEQ ID NO: 801673 - DNA, 15 bp, Homo sapiens
ttcttcccagatgcc

SEQ ID NO: 801674 - DNA, 15 bp, Homo sapiens
tcttcccagatgccc

SEQ ID NO: 801675 - DNA, 15 bp, Homo sapiens
cttcccagatgccct

SEQ ID NO: 801676 - DNA, 15 bp, Homo sapiens
ttcccagatgccctt

SEQ ID NO: 801677 - DNA, 15 bp, Homo sapiens
tcccagatgcccttc

SEQ ID NO: 801678 - DNA, 15 bp, Homo sapiens
cccagatgcccttcc

SEQ ID NO: 801679 - DNA, 15 bp, Homo sapiens
ccagatgcccttccc

SEQ ID NO: 801680 - DNA, 15 bp, Homo sapiens
cagatgcccttccct

SEQ ID NO: 801681 - DNA, 15 bp, Homo sapiens
agatgcccttccctg

SEQ ID NO: 801682 - DNA, 15 bp, Homo sapiens
gatgcccttccctgc

SEQ ID NO: 801683 - DNA, 15 bp, Homo sapiens
atgcccttccctgcc

SEQ ID NO: 801684 - DNA, 15 bp, Homo sapiens
tgcccttccctgcct

SEQ ID NO: 801685 - DNA, 15 bp, Homo sapiens
gcccttccctgcctt

SEQ ID NO: 801686 - DNA, 15 bp, Homo sapiens
cccttccctgccttt

SEQ ID NO: 801687 - DNA, 15 bp, Homo sapiens
ccttccctgcctttt

SEQ ID NO: 801688 - DNA, 15 bp, Homo sapiens
cttccctgccttttc

SEQ ID NO: 801689 - DNA, 15 bp, Homo sapiens
ttccctgccttttca

SEQ ID NO: 801690 - DNA, 15 bp, Homo sapiens
tccctgccttttcag

SEQ ID NO: 801691 - DNA, 15 bp, Homo sapiens
ccctgccttttcaga

SEQ ID NO: 801692 - DNA, 15 bp, Homo sapiens
cctgccttttcagat

SEQ ID NO: 801693 - DNA, 15 bp, Homo sapiens
ctgccttttcagatt

SEQ ID NO: 801694 - DNA, 15 bp, Homo sapiens
tgccttttcagatta

SEQ ID NO: 801695 - DNA, 15 bp, Homo sapiens
gccttttcagattat

SEQ ID NO: 801696 - DNA, 15 bp, Homo sapiens
ccttttcagattatt

SEQ ID NO: 801697 - DNA, 15 bp, Homo sapiens
cttttcagattatta

SEQ ID NO: 801698 - DNA, 15 bp, Homo sapiens
ttttcagattattag

SEQ ID NO: 801699 - DNA, 15 bp, Homo sapiens
tttcagattattagg

SEQ ID NO: 801700 - DNA, 15 bp, Homo sapiens
ttcagattattaggt

SEQ ID NO: 801701 - DNA, 15 bp, Homo sapiens
tcagattattaggta

SEQ ID NO: 801702 - DNA, 15 bp, Homo sapiens
cagattattaggtac

SEQ ID NO: 801703 - DNA, 15 bp, Homo sapiens
agattattaggtact

SEQ ID NO: 801704 - DNA, 15 bp, Homo sapiens
gattattaggtacta

SEQ ID NO: 801705 - DNA, 15 bp, Homo sapiens
attattaggtactat

SEQ ID NO: 801706 - DNA, 15 bp, Homo sapiens
ttattaggtactatc

SEQ ID NO: 801707 - DNA, 15 bp, Homo sapiens
tattaggtactatct

SEQ ID NO: 801708 - DNA, 15 bp, Homo sapiens
attaggtactatcta

SEQ ID NO: 801709 - DNA, 15 bp, Homo sapiens
ttaggtactatctag

SEQ ID NO: 801710 - DNA, 15 bp, Homo sapiens
taggtactatctagt

SEQ ID NO: 801711 - DNA, 15 bp, Homo sapiens
aggtactatctagtt

SEQ ID NO: 801712 - DNA, 15 bp, Homo sapiens
ggtactatctagttc

SEQ ID NO: 801713 - DNA, 15 bp, Homo sapiens
gtactatctagttca

SEQ ID NO: 801714 - DNA, 15 bp, Homo sapiens
tactatctagttcag

SEQ ID NO: 801715 - DNA, 15 bp, Homo sapiens
actatctagttcagt

SEQ ID NO: 801716 - DNA, 15 bp, Homo sapiens
ctatctagttcagtg

SEQ ID NO: 801717 - DNA, 15 bp, Homo sapiens
tatctagttcagtgt

SEQ ID NO: 801718 - DNA, 15 bp, Homo sapiens
atctagttcagtgtc

SEQ ID NO: 801719 - DNA, 15 bp, Homo sapiens
tctagttcagtgtca

SEQ ID NO: 801720 - DNA, 15 bp, Homo sapiens
ctagttcagtgtcac

SEQ ID NO: 801721 - DNA, 15 bp, Homo sapiens
tagttcagtgtcact

SEQ ID NO: 801722 - DNA, 15 bp, Homo sapiens
agttcagtgtcactg

SEQ ID NO: 801723 - DNA, 15 bp, Homo sapiens
gttcagtgtcactgt

SEQ ID NO: 801724 - DNA, 15 bp, Homo sapiens
ttcagtgtcactgtg

SEQ ID NO: 801725 - DNA, 15 bp, Homo sapiens
tcagtgtcactgtgg

SEQ ID NO: 801726 - DNA, 15 bp, Homo sapiens
cagtgtcactgtggg

SEQ ID NO: 801727 - DNA, 15 bp, Homo sapiens
agtgtcactgtgggt

SEQ ID NO: 801728 - DNA, 15 bp, Homo sapiens
gtgtcactgtgggtc

SEQ ID NO: 801729 - DNA, 15 bp, Homo sapiens
tgtcactgtgggtca

SEQ ID NO: 801730 - DNA, 15 bp, Homo sapiens
gtcactgtgggtcat

SEQ ID NO: 801731 - DNA, 15 bp, Homo sapiens
tcactgtgggtcatg

SEQ ID NO: 801732 - DNA, 15 bp, Homo sapiens
cactgtgggtcatgg

SEQ ID NO: 801733 - DNA, 15 bp, Homo sapiens
actgtgggtcatggt

SEQ ID NO: 801734 - DNA, 15 bp, Homo sapiens
ctgtgggtcatggtc

SEQ ID NO: 801735 - DNA, 15 bp, Homo sapiens
tgtgggtcatggtcc

SEQ ID NO: 801736 - DNA, 15 bp, Homo sapiens
gtgggtcatggtcca

SEQ ID NO: 801737 - DNA, 15 bp, Homo sapiens
tgggtcatggtccat

SEQ ID NO: 801738 - DNA, 15 bp, Homo sapiens
gggtcatggtccatc

SEQ ID NO: 801739 - DNA, 15 bp, Homo sapiens
ggtcatggtccatca

SEQ ID NO: 801740 - DNA, 15 bp, Homo sapiens
gtcatggtccatcag

SEQ ID NO: 801741 - DNA, 15 bp, Homo sapiens
tcatggtccatcagt

SEQ ID NO: 801742 - DNA, 15 bp, Homo sapiens
catggtccatcagta

SEQ ID NO: 801743 - DNA, 15 bp, Homo sapiens
atggtccatcagtag

SEQ ID NO: 801744 - DNA, 15 bp, Homo sapiens
tggtccatcagtagc

SEQ ID NO: 801745 - DNA, 15 bp, Homo sapiens
ggtccatcagtagct

SEQ ID NO: 801746 - DNA, 15 bp, Homo sapiens
gtccatcagtagctt

SEQ ID NO: 801747 - DNA, 15 bp, Homo sapiens
tccatcagtagcttg

SEQ ID NO: 801748 - DNA, 15 bp, Homo sapiens
ccatcagtagcttgt

SEQ ID NO: 801749 - DNA, 15 bp, Homo sapiens
catcagtagcttgtg

SEQ ID NO: 801750 - DNA, 15 bp, Homo sapiens
atcagtagcttgtga

SEQ ID NO: 801751 - DNA, 15 bp, Homo sapiens
tcagtagcttgtgaa

SEQ ID NO: 801752 - DNA, 15 bp, Homo sapiens
cagtagcttgtgaaa

SEQ ID NO: 801753 - DNA, 15 bp, Homo sapiens
agtagcttgtgaaat

SEQ ID NO: 801754 - DNA, 15 bp, Homo sapiens
gtagcttgtgaaatc

SEQ ID NO: 801755 - DNA, 15 bp, Homo sapiens
tagcttgtgaaatct

SEQ ID NO: 801756 - DNA, 15 bp, Homo sapiens
agcttgtgaaatcta

SEQ ID NO: 801757 - DNA, 15 bp, Homo sapiens
gcttgtgaaatctat

SEQ ID NO: 801758 - DNA, 15 bp, Homo sapiens
cttgtgaaatctatt

SEQ ID NO: 801759 - DNA, 15 bp, Homo sapiens
ttgtgaaatctattt

SEQ ID NO: 801760 - DNA, 15 bp, Homo sapiens
tgtgaaatctattta

SEQ ID NO: 801761 - DNA, 15 bp, Homo sapiens
gtgaaatctatttaa

SEQ ID NO: 801762 - DNA, 15 bp, Homo sapiens
tgaaatctatttaat

SEQ ID NO: 801763 - DNA, 15 bp, Homo sapiens
gaaatctatttaatg

SEQ ID NO: 801764 - DNA, 15 bp, Homo sapiens
aaatctatttaatgg

SEQ ID NO: 801765 - DNA, 15 bp, Homo sapiens
aatctatttaatggg

SEQ ID NO: 801766 - DNA, 15 bp, Homo sapiens
atctatttaatgggt

SEQ ID NO: 801767 - DNA, 15 bp, Homo sapiens
tctatttaatgggtc

SEQ ID NO: 801768 - DNA, 15 bp, Homo sapiens
ctatttaatgggtca

SEQ ID NO: 801769 - DNA, 15 bp, Homo sapiens
tatttaatgggtcat

SEQ ID NO: 801770 - DNA, 15 bp, Homo sapiens
atttaatgggtcatc

SEQ ID NO: 801771 - DNA, 15 bp, Homo sapiens
tttaatgggtcatca

SEQ ID NO: 801772 - DNA, 15 bp, Homo sapiens
ttaatgggtcatcac

SEQ ID NO: 801773 - DNA, 15 bp, Homo sapiens
taatgggtcatcacc

SEQ ID NO: 801774 - DNA, 15 bp, Homo sapiens
aatgggtcatcacca

SEQ ID NO: 801775 - DNA, 15 bp, Homo sapiens
atgggtcatcaccaa

SEQ ID NO: 801776 - DNA, 15 bp, Homo sapiens
tgggtcatcaccaac

SEQ ID NO: 801777 - DNA, 15 bp, Homo sapiens
gggtcatcaccaaca

SEQ ID NO: 801778 - DNA, 15 bp, Homo sapiens
ggtcatcaccaacat

SEQ ID NO: 801779 - DNA, 15 bp, Homo sapiens
gtcatcaccaacatc

SEQ ID NO: 801780 - DNA, 15 bp, Homo sapiens
tcatcaccaacatca

SEQ ID NO: 801781 - DNA, 15 bp, Homo sapiens
catcaccaacatcat

SEQ ID NO: 801782 - DNA, 15 bp, Homo sapiens
atcaccaacatcata

SEQ ID NO: 801783 - DNA, 15 bp, Homo sapiens
tcaccaacatcataa

SEQ ID NO: 801784 - DNA, 15 bp, Homo sapiens
caccaacatcataag

SEQ ID NO: 801785 - DNA, 15 bp, Homo sapiens
accaacatcataaga

SEQ ID NO: 801786 - DNA, 15 bp, Homo sapiens
ccaacatcataagaa

SEQ ID NO: 801787 - DNA, 15 bp, Homo sapiens
caacatcataagaaa

SEQ ID NO: 801788 - DNA, 15 bp, Homo sapiens
aacatcataagaaat

SEQ ID NO: 801789 - DNA, 15 bp, Homo sapiens
acatcataagaaatg

SEQ ID NO: 801790 - DNA, 15 bp, Homo sapiens
catcataagaaatga

SEQ ID NO: 801791 - DNA, 15 bp, Homo sapiens
atcataagaaatgaa

SEQ ID NO: 801792 - DNA, 15 bp, Homo sapiens
tcataagaaatgaag

SEQ ID NO: 801793 - DNA, 15 bp, Homo sapiens
cataagaaatgaagc

SEQ ID NO: 801794 - DNA, 15 bp, Homo sapiens
ataagaaatgaagca

SEQ ID NO: 801795 - DNA, 15 bp, Homo sapiens
taagaaatgaagcag

SEQ ID NO: 801796 - DNA, 15 bp, Homo sapiens
aagaaatgaagcaga

SEQ ID NO: 801797 - DNA, 15 bp, Homo sapiens
agaaatgaagcagaa

SEQ ID NO: 801798 - DNA, 15 bp, Homo sapiens
gaaatgaagcagaat

SEQ ID NO: 801799 - DNA, 15 bp, Homo sapiens
aaatgaagcagaata

SEQ ID NO: 801800 - DNA, 15 bp, Homo sapiens
aatgaagcagaatag

SEQ ID NO: 801801 - DNA, 15 bp, Homo sapiens
atgaagcagaataga

SEQ ID NO: 801802 - DNA, 15 bp, Homo sapiens
tgaagcagaatagaa

SEQ ID NO: 801803 - DNA, 15 bp, Homo sapiens
gaagcagaatagaat

SEQ ID NO: 801804 - DNA, 15 bp, Homo sapiens
aagcagaatagaata

SEQ ID NO: 801805 - DNA, 15 bp, Homo sapiens
agcagaatagaataa

SEQ ID NO: 801806 - DNA, 15 bp, Homo sapiens
gcagaatagaataaa

SEQ ID NO: 801807 - DNA, 15 bp, Homo sapiens
cagaatagaataaaa

SEQ ID NO: 801808 - DNA, 15 bp, Homo sapiens
agaatagaataaaac

SEQ ID NO: 801809 - DNA, 15 bp, Homo sapiens
gaatagaataaaaca

SEQ ID NO: 801810 - DNA, 15 bp, Homo sapiens
aatagaataaaacat

SEQ ID NO: 801811 - DNA, 15 bp, Homo sapiens
atagaataaaacatc

SEQ ID NO: 801812 - DNA, 15 bp, Homo sapiens
tagaataaaacatca

SEQ ID NO: 801813 - DNA, 15 bp, Homo sapiens
agaataaaacatcat

SEQ ID NO: 801814 - DNA, 15 bp, Homo sapiens
gaataaaacatcata

SEQ ID NO: 801815 - DNA, 15 bp, Homo sapiens
aataaaacatcatag

SEQ ID NO: 801816 - DNA, 15 bp, Homo sapiens
ataaaacatcatagt

SEQ ID NO: 801817 - DNA, 15 bp, Homo sapiens
taaaacatcatagta

SEQ ID NO: 801818 - DNA, 15 bp, Homo sapiens
aaaacatcatagtac

SEQ ID NO: 801819 - DNA, 15 bp, Homo sapiens
aaacatcatagtaca

SEQ ID NO: 801820 - DNA, 15 bp, Homo sapiens
aacatcatagtacat

SEQ ID NO: 801821 - DNA, 15 bp, Homo sapiens
acatcatagtacatc

SEQ ID NO: 801822 - DNA, 15 bp, Homo sapiens
catcatagtacatcc

SEQ ID NO: 801823 - DNA, 15 bp, Homo sapiens
atcatagtacatccc

SEQ ID NO: 801824 - DNA, 15 bp, Homo sapiens
tcatagtacatccca

SEQ ID NO: 801825 - DNA, 15 bp, Homo sapiens
catagtacatcccat

SEQ ID NO: 801826 - DNA, 15 bp, Homo sapiens
atagtacatcccatt

SEQ ID NO: 801827 - DNA, 15 bp, Homo sapiens
tagtacatcccatta

SEQ ID NO: 801828 - DNA, 15 bp, Homo sapiens
agtacatcccattat

SEQ ID NO: 801829 - DNA, 15 bp, Homo sapiens
gtacatcccattata

SEQ ID NO: 801830 - DNA, 15 bp, Homo sapiens
tacatcccattatat

SEQ ID NO: 801831 - DNA, 15 bp, Homo sapiens
acatcccattatata

SEQ ID NO: 801832 - DNA, 15 bp, Homo sapiens
catcccattatatat

SEQ ID NO: 801833 - DNA, 15 bp, Homo sapiens
atcccattatatata

SEQ ID NO: 801834 - DNA, 15 bp, Homo sapiens
tcccattatatatag

SEQ ID NO: 801835 - DNA, 15 bp, Homo sapiens
cccattatatatagt

SEQ ID NO: 801836 - DNA, 15 bp, Homo sapiens
ccattatatatagta

SEQ ID NO: 801837 - DNA, 15 bp, Homo sapiens
cattatatatagtaa

SEQ ID NO: 801838 - DNA, 15 bp, Homo sapiens
attatatatagtaaa

SEQ ID NO: 801839 - DNA, 15 bp, Homo sapiens
ttatatatagtaaag

SEQ ID NO: 801840 - DNA, 15 bp, Homo sapiens
tatatatagtaaagg

SEQ ID NO: 801841 - DNA, 15 bp, Homo sapiens
atatatagtaaaggt

SEQ ID NO: 801842 - DNA, 15 bp, Homo sapiens
tatatagtaaaggta

SEQ ID NO: 801843 - DNA, 15 bp, Homo sapiens
atatagtaaaggtaa

SEQ ID NO: 801844 - DNA, 15 bp, Homo sapiens
tatagtaaaggtaaa

SEQ ID NO: 801845 - DNA, 15 bp, Homo sapiens
atagtaaaggtaaac

SEQ ID NO: 801846 - DNA, 15 bp, Homo sapiens
tagtaaaggtaaaca

SEQ ID NO: 801847 - DNA, 15 bp, Homo sapiens
agtaaaggtaaacat

SEQ ID NO: 801848 - DNA, 15 bp, Homo sapiens
gtaaaggtaaacatt

SEQ ID NO: 801849 - DNA, 15 bp, Homo sapiens
taaaggtaaacattg

SEQ ID NO: 801850 - DNA, 15 bp, Homo sapiens
aaaggtaaacattgc

SEQ ID NO: 801851 - DNA, 15 bp, Homo sapiens
aaggtaaacattgct

SEQ ID NO: 801852 - DNA, 15 bp, Homo sapiens
aggtaaacattgctt

SEQ ID NO: 801853 - DNA, 15 bp, Homo sapiens
ggtaaacattgcttc

SEQ ID NO: 801854 - DNA, 15 bp, Homo sapiens
gtaaacattgcttcg

SEQ ID NO: 801855 - DNA, 15 bp, Homo sapiens
taaacattgcttcgt

SEQ ID NO: 801856 - DNA, 15 bp, Homo sapiens
aaacattgcttcgtg

SEQ ID NO: 801857 - DNA, 15 bp, Homo sapiens
aacattgcttcgtgt

SEQ ID NO: 801858 - DNA, 15 bp, Homo sapiens
acattgcttcgtgtg

SEQ ID NO: 801859 - DNA, 15 bp, Homo sapiens
cattgcttcgtgtgt

SEQ ID NO: 801860 - DNA, 15 bp, Homo sapiens
attgcttcgtgtgtg

SEQ ID NO: 801861 - DNA, 15 bp, Homo sapiens
ttgcttcgtgtgtgt

SEQ ID NO: 801862 - DNA, 15 bp, Homo sapiens
tgcttcgtgtgtgtg

SEQ ID NO: 801863 - DNA, 15 bp, Homo sapiens
gcttcgtgtgtgtgt

SEQ ID NO: 801864 - DNA, 15 bp, Homo sapiens
cttcgtgtgtgtgtg

SEQ ID NO: 801865 - DNA, 15 bp, Homo sapiens
ttcgtgtgtgtgtgt

SEQ ID NO: 801866 - DNA, 15 bp, Homo sapiens
tgtgtgtgtgtgttg

SEQ ID NO: 801867 - DNA, 15 bp, Homo sapiens
gtgtgtgtgtgttgg

SEQ ID NO: 801868 - DNA, 15 bp, Homo sapiens
tgtgtgtgtgttggg

SEQ ID NO: 801869 - DNA, 15 bp, Homo sapiens
gtgtgtgtgttgggg

SEQ ID NO: 801870 - DNA, 15 bp, Homo sapiens
tgtgtgtgttggggg

SEQ ID NO: 801871 - DNA, 15 bp, Homo sapiens
gtgtgtgttgggggt

SEQ ID NO: 801872 - DNA, 15 bp, Homo sapiens
tgtgtgttgggggtg

SEQ ID NO: 801873 - DNA, 15 bp, Homo sapiens
gtgtgttgggggtgt

SEQ ID NO: 801874 - DNA, 15 bp, Homo sapiens
tgtgttgggggtgtg

SEQ ID NO: 801875 - DNA, 15 bp, Homo sapiens
gtgttgggggtgtgg

SEQ ID NO: 801876 - DNA, 15 bp, Homo sapiens
tgttgggggtgtggt

SEQ ID NO: 801877 - DNA, 15 bp, Homo sapiens
gttgggggtgtggtg

SEQ ID NO: 801878 - DNA, 15 bp, Homo sapiens
ttgggggtgtggtgg

SEQ ID NO: 801879 - DNA, 15 bp, Homo sapiens
tgggggtgtggtggt

SEQ ID NO: 801880 - DNA, 15 bp, Homo sapiens
gggggtgtggtggtg

SEQ ID NO: 801881 - DNA, 15 bp, Homo sapiens
ggggtgtggtggtgt

SEQ ID NO: 801882 - DNA, 15 bp, Homo sapiens
gggtgtggtggtgtc

SEQ ID NO: 801883 - DNA, 15 bp, Homo sapiens
ggtgtggtggtgtct

SEQ ID NO: 801884 - DNA, 15 bp, Homo sapiens
gtgtggtggtgtctt

SEQ ID NO: 801885 - DNA, 15 bp, Homo sapiens
tgtggtggtgtcttc

SEQ ID NO: 801886 - DNA, 15 bp, Homo sapiens
gtggtggtgtcttct

SEQ ID NO: 801887 - DNA, 15 bp, Homo sapiens
tggtggtgtcttctg

SEQ ID NO: 801888 - DNA, 15 bp, Homo sapiens
ggtggtgtcttctga

SEQ ID NO: 801889 - DNA, 15 bp, Homo sapiens
gtggtgtcttctgaa

SEQ ID NO: 801890 - DNA, 15 bp, Homo sapiens
tggtgtcttctgaac

SEQ ID NO: 801891 - DNA, 15 bp, Homo sapiens
ggtgtcttctgaacc

SEQ ID NO: 801892 - DNA, 15 bp, Homo sapiens
gtgtcttctgaacca

SEQ ID NO: 801893 - DNA, 15 bp, Homo sapiens
tgtcttctgaaccat

SEQ ID NO: 801894 - DNA, 15 bp, Homo sapiens
gtcttctgaaccatg

SEQ ID NO: 801895 - DNA, 15 bp, Homo sapiens
tcttctgaaccatgt

SEQ ID NO: 801896 - DNA, 15 bp, Homo sapiens
cttctgaaccatgtt

SEQ ID NO: 801897 - DNA, 15 bp, Homo sapiens
ttctgaaccatgttg

SEQ ID NO: 801898 - DNA, 15 bp, Homo sapiens
tctgaaccatgttgt

SEQ ID NO: 801899 - DNA, 15 bp, Homo sapiens
ctgaaccatgttgta

SEQ ID NO: 801900 - DNA, 15 bp, Homo sapiens
tgaaccatgttgtaa

SEQ ID NO: 801901 - DNA, 15 bp, Homo sapiens
gaaccatgttgtaaa

SEQ ID NO: 801902 - DNA, 15 bp, Homo sapiens
aaccatgttgtaaag

SEQ ID NO: 801903 - DNA, 15 bp, Homo sapiens
accatgttgtaaagt

SEQ ID NO: 801904 - DNA, 15 bp, Homo sapiens
ccatgttgtaaagta

SEQ ID NO: 801905 - DNA, 15 bp, Homo sapiens
catgttgtaaagtac

SEQ ID NO: 801906 - DNA, 15 bp, Homo sapiens
atgttgtaaagtaca

SEQ ID NO: 801907 - DNA, 15 bp, Homo sapiens
tgttgtaaagtacat

SEQ ID NO: 801908 - DNA, 15 bp, Homo sapiens
gttgtaaagtacatt

SEQ ID NO: 801909 - DNA, 15 bp, Homo sapiens
ttgtaaagtacattt

SEQ ID NO: 801910 - DNA, 15 bp, Homo sapiens
tgtaaagtacatttc

SEQ ID NO: 801911 - DNA, 15 bp, Homo sapiens
gtaaagtacatttct

SEQ ID NO: 801912 - DNA, 15 bp, Homo sapiens
taaagtacatttctt

SEQ ID NO: 801913 - DNA, 15 bp, Homo sapiens
aaagtacatttcttc

SEQ ID NO: 801914 - DNA, 15 bp, Homo sapiens
aagtacatttcttcc

SEQ ID NO: 801915 - DNA, 15 bp, Homo sapiens
agtacatttcttcct

SEQ ID NO: 801916 - DNA, 15 bp, Homo sapiens
gtacatttcttcctg

SEQ ID NO: 801917 - DNA, 15 bp, Homo sapiens
tacatttcttcctga

SEQ ID NO: 801918 - DNA, 15 bp, Homo sapiens
acatttcttcctgag

SEQ ID NO: 801919 - DNA, 15 bp, Homo sapiens
catttcttcctgagg

SEQ ID NO: 801920 - DNA, 15 bp, Homo sapiens
atttcttcctgaggg

SEQ ID NO: 801921 - DNA, 15 bp, Homo sapiens
tttcttcctgagggt

SEQ ID NO: 801922 - DNA, 15 bp, Homo sapiens
ttcttcctgagggtt

SEQ ID NO: 801923 - DNA, 15 bp, Homo sapiens
tcttcctgagggttg

SEQ ID NO: 801924 - DNA, 15 bp, Homo sapiens
cttcctgagggttgt

SEQ ID NO: 801925 - DNA, 15 bp, Homo sapiens
ttcctgagggttgtg

SEQ ID NO: 801926 - DNA, 15 bp, Homo sapiens
tcctgagggttgtgg

SEQ ID NO: 801927 - DNA, 15 bp, Homo sapiens
cctgagggttgtggt

SEQ ID NO: 801928 - DNA, 15 bp, Homo sapiens
ctgagggttgtggtc

SEQ ID NO: 801929 - DNA, 15 bp, Homo sapiens
tgagggttgtggtca

SEQ ID NO: 801930 - DNA, 15 bp, Homo sapiens
gagggttgtggtcaa

SEQ ID NO: 801931 - DNA, 15 bp, Homo sapiens
agggttgtggtcaaa

SEQ ID NO: 801932 - DNA, 15 bp, Homo sapiens
gggttgtggtcaaaa

SEQ ID NO: 801933 - DNA, 15 bp, Homo sapiens
ggttgtggtcaaaaa

SEQ ID NO: 801934 - DNA, 15 bp, Homo sapiens
gttgtggtcaaaaac

SEQ ID NO: 801935 - DNA, 15 bp, Homo sapiens
ttgtggtcaaaaaca

SEQ ID NO: 801936 - DNA, 15 bp, Homo sapiens
tgtggtcaaaaacat

SEQ ID NO: 801937 - DNA, 15 bp, Homo sapiens
gtggtcaaaaacatt

SEQ ID NO: 801938 - DNA, 15 bp, Homo sapiens
tggtcaaaaacattt

SEQ ID NO: 801939 - DNA, 15 bp, Homo sapiens
ggtcaaaaacatttg

SEQ ID NO: 801940 - DNA, 15 bp, Homo sapiens
gtcaaaaacatttga

SEQ ID NO: 801941 - DNA, 15 bp, Homo sapiens
tcaaaaacatttgaa

SEQ ID NO: 801942 - DNA, 15 bp, Homo sapiens
caaaaacatttgaaa

SEQ ID NO: 801943 - DNA, 15 bp, Homo sapiens
aaaaacatttgaaaa

SEQ ID NO: 801944 - DNA, 15 bp, Homo sapiens
aaaacatttgaaaaa

SEQ ID NO: 801945 - DNA, 15 bp, Homo sapiens
aaacatttgaaaaat

SEQ ID NO: 801946 - DNA, 15 bp, Homo sapiens
aacatttgaaaaata

SEQ ID NO: 801947 - DNA, 15 bp, Homo sapiens
acatttgaaaaatac

SEQ ID NO: 801948 - DNA, 15 bp, Homo sapiens
catttgaaaaatact

SEQ ID NO: 801949 - DNA, 15 bp, Homo sapiens
atttgaaaaatacta

SEQ ID NO: 801950 - DNA, 15 bp, Homo sapiens
tttgaaaaatactat

SEQ ID NO: 801951 - DNA, 15 bp, Homo sapiens
ttgaaaaatactatt

SEQ ID NO: 801952 - DNA, 15 bp, Homo sapiens
tgaaaaatactatta

SEQ ID NO: 801953 - DNA, 15 bp, Homo sapiens
gaaaaatactattag

SEQ ID NO: 801954 - DNA, 15 bp, Homo sapiens
aaaaatactattagt

SEQ ID NO: 801955 - DNA, 15 bp, Homo sapiens
aaaatactattagtt

SEQ ID NO: 801956 - DNA, 15 bp, Homo sapiens
aaatactattagttc

SEQ ID NO: 801957 - DNA, 15 bp, Homo sapiens
aatactattagttca

SEQ ID NO: 801958 - DNA, 15 bp, Homo sapiens
atactattagttcaa

SEQ ID NO: 801959 - DNA, 15 bp, Homo sapiens
tactattagttcaag

SEQ ID NO: 801960 - DNA, 15 bp, Homo sapiens
actattagttcaagc

SEQ ID NO: 801961 - DNA, 15 bp, Homo sapiens
ctattagttcaagct

SEQ ID NO: 801962 - DNA, 15 bp, Homo sapiens
tattagttcaagctg

SEQ ID NO: 801963 - DNA, 15 bp, Homo sapiens
attagttcaagctgt

SEQ ID NO: 801964 - DNA, 15 bp, Homo sapiens
ttagttcaagctgtt

SEQ ID NO: 801965 - DNA, 15 bp, Homo sapiens
tagttcaagctgttt

SEQ ID NO: 801966 - DNA, 15 bp, Homo sapiens
agttcaagctgttta

SEQ ID NO: 801967 - DNA, 15 bp, Homo sapiens
gttcaagctgtttat

SEQ ID NO: 801968 - DNA, 15 bp, Homo sapiens
ttcaagctgtttatt

SEQ ID NO: 801969 - DNA, 15 bp, Homo sapiens
tcaagctgtttattc

SEQ ID NO: 801970 - DNA, 15 bp, Homo sapiens
caagctgtttattca

SEQ ID NO: 801971 - DNA, 15 bp, Homo sapiens
aagctgtttattcac

SEQ ID NO: 801972 - DNA, 15 bp, Homo sapiens
agctgtttattcaca

SEQ ID NO: 801973 - DNA, 15 bp, Homo sapiens
gctgtttattcacag

SEQ ID NO: 801974 - DNA, 15 bp, Homo sapiens
ctgtttattcacaga

SEQ ID NO: 801975 - DNA, 15 bp, Homo sapiens
tgtttattcacagac

SEQ ID NO: 801976 - DNA, 15 bp, Homo sapiens
gtttattcacagacg

SEQ ID NO: 801977 - DNA, 15 bp, Homo sapiens
tttattcacagacga

SEQ ID NO: 801978 - DNA, 15 bp, Homo sapiens
ttattcacagacgag

SEQ ID NO: 801979 - DNA, 15 bp, Homo sapiens
tattcacagacgaga

SEQ ID NO: 801980 - DNA, 15 bp, Homo sapiens
attcacagacgagag

SEQ ID NO: 801981 - DNA, 15 bp, Homo sapiens
ttcacagacgagagg

SEQ ID NO: 801982 - DNA, 15 bp, Homo sapiens
tcacagacgagaggg

SEQ ID NO: 801983 - DNA, 15 bp, Homo sapiens
cacagacgagagggc

SEQ ID NO: 801984 - DNA, 15 bp, Homo sapiens
acagacgagagggca

SEQ ID NO: 801985 - DNA, 15 bp, Homo sapiens
cagacgagagggcag

SEQ ID NO: 801986 - DNA, 15 bp, Homo sapiens
agacgagagggcagg

SEQ ID NO: 801987 - DNA, 15 bp, Homo sapiens
gacgagagggcaggg

SEQ ID NO: 801988 - DNA, 15 bp, Homo sapiens
acgagagggcaggga

SEQ ID NO: 801989 - DNA, 15 bp, Homo sapiens
cgagagggcagggat

SEQ ID NO: 801990 - DNA, 15 bp, Homo sapiens
gagagggcagggatg

SEQ ID NO: 801991 - DNA, 15 bp, Homo sapiens
agagggcagggatga

SEQ ID NO: 801992 - DNA, 15 bp, Homo sapiens
gagggcagggatgat

SEQ ID NO: 801993 - DNA, 15 bp, Homo sapiens
agggcagggatgatg

SEQ ID NO: 801994 - DNA, 15 bp, Homo sapiens
gggcagggatgatga

SEQ ID NO: 801995 - DNA, 15 bp, Homo sapiens
ggcagggatgatgaa

SEQ ID NO: 801996 - DNA, 15 bp, Homo sapiens
gcagggatgatgaaa

SEQ ID NO: 801997 - DNA, 15 bp, Homo sapiens
cagggatgatgaaat

SEQ ID NO: 801998 - DNA, 15 bp, Homo sapiens
agggatgatgaaatt

SEQ ID NO: 801999 - DNA, 15 bp, Homo sapiens
gggatgatgaaatta

SEQ ID NO: 802000 - DNA, 15 bp, Homo sapiens
ggatgatgaaattac

SEQ ID NO: 802001 - DNA, 15 bp, Homo sapiens
gatgatgaaattacc

SEQ ID NO: 802002 - DNA, 15 bp, Homo sapiens
atgatgaaattaccc

SEQ ID NO: 802003 - DNA, 15 bp, Homo sapiens
tgatgaaattaccct

SEQ ID NO: 802004 - DNA, 15 bp, Homo sapiens
gatgaaattaccctg

SEQ ID NO: 802005 - DNA, 15 bp, Homo sapiens
atgaaattaccctgc

SEQ ID NO: 802006 - DNA, 15 bp, Homo sapiens
tgaaattaccctgct

SEQ ID NO: 802007 - DNA, 15 bp, Homo sapiens
gaaattaccctgcta

SEQ ID NO: 802008 - DNA, 15 bp, Homo sapiens
aaattaccctgctag

SEQ ID NO: 802009 - DNA, 15 bp, Homo sapiens
aattaccctgctagg

SEQ ID NO: 802010 - DNA, 15 bp, Homo sapiens
attaccctgctaggt

SEQ ID NO: 802011 - DNA, 15 bp, Homo sapiens
ttaccctgctaggtg

SEQ ID NO: 802012 - DNA, 15 bp, Homo sapiens
taccctgctaggtgg

SEQ ID NO: 802013 - DNA, 15 bp, Homo sapiens
accctgctaggtgga

SEQ ID NO: 802014 - DNA, 15 bp, Homo sapiens
ccctgctaggtggat

SEQ ID NO: 802015 - DNA, 15 bp, Homo sapiens
cctgctaggtggatg

SEQ ID NO: 802016 - DNA, 15 bp, Homo sapiens
ctgctaggtggatgc

SEQ ID NO: 802017 - DNA, 15 bp, Homo sapiens
tgctaggtggatgca

SEQ ID NO: 802018 - DNA, 15 bp, Homo sapiens
gctaggtggatgcag

SEQ ID NO: 802019 - DNA, 15 bp, Homo sapiens
ctaggtggatgcagg

SEQ ID NO: 802020 - DNA, 15 bp, Homo sapiens
taggtggatgcaggc

SEQ ID NO: 802021 - DNA, 15 bp, Homo sapiens
aggtggatgcaggct

SEQ ID NO: 802022 - DNA, 15 bp, Homo sapiens
ggtggatgcaggctt

SEQ ID NO: 802023 - DNA, 15 bp, Homo sapiens
gtggatgcaggcttt

SEQ ID NO: 802024 - DNA, 15 bp, Homo sapiens
tggatgcaggctttt

SEQ ID NO: 802025 - DNA, 15 bp, Homo sapiens
ggatgcaggcttttg

SEQ ID NO: 802026 - DNA, 15 bp, Homo sapiens
gatgcaggcttttga

SEQ ID NO: 802027 - DNA, 15 bp, Homo sapiens
atgcaggcttttgaa

SEQ ID NO: 802028 - DNA, 15 bp, Homo sapiens
tgcaggcttttgaac

SEQ ID NO: 802029 - DNA, 15 bp, Homo sapiens
gcaggcttttgaaca

SEQ ID NO: 802030 - DNA, 15 bp, Homo sapiens
caggcttttgaacag

SEQ ID NO: 802031 - DNA, 15 bp, Homo sapiens
aggcttttgaacaga

SEQ ID NO: 802032 - DNA, 15 bp, Homo sapiens
ggcttttgaacagat

SEQ ID NO: 802033 - DNA, 15 bp, Homo sapiens
gcttttgaacagata

SEQ ID NO: 802034 - DNA, 15 bp, Homo sapiens
cttttgaacagataa

SEQ ID NO: 802035 - DNA, 15 bp, Homo sapiens
ttttgaacagataat

SEQ ID NO: 802036 - DNA, 15 bp, Homo sapiens
tttgaacagataatg

SEQ ID NO: 802037 - DNA, 15 bp, Homo sapiens
ttgaacagataatgt

SEQ ID NO: 802038 - DNA, 15 bp, Homo sapiens
tgaacagataatgtg

SEQ ID NO: 802039 - DNA, 15 bp, Homo sapiens
gaacagataatgtga

SEQ ID NO: 802040 - DNA, 15 bp, Homo sapiens
aacagataatgtgag

SEQ ID NO: 802041 - DNA, 15 bp, Homo sapiens
acagataatgtgaga

SEQ ID NO: 802042 - DNA, 15 bp, Homo sapiens
cagataatgtgagag

SEQ ID NO: 802043 - DNA, 15 bp, Homo sapiens
agataatgtgagagc

SEQ ID NO: 802044 - DNA, 15 bp, Homo sapiens
gataatgtgagagct

SEQ ID NO: 802045 - DNA, 15 bp, Homo sapiens
ataatgtgagagctt

SEQ ID NO: 802046 - DNA, 15 bp, Homo sapiens
taatgtgagagcttt

SEQ ID NO: 802047 - DNA, 15 bp, Homo sapiens
aatgtgagagctttt

SEQ ID NO: 802048 - DNA, 15 bp, Homo sapiens
atgtgagagctttta

SEQ ID NO: 802049 - DNA, 15 bp, Homo sapiens
tgtgagagcttttag

SEQ ID NO: 802050 - DNA, 15 bp, Homo sapiens
gtgagagcttttagg

SEQ ID NO: 802051 - DNA, 15 bp, Homo sapiens
tgagagcttttagga

SEQ ID NO: 802052 - DNA, 15 bp, Homo sapiens
gagagcttttaggaa

SEQ ID NO: 802053 - DNA, 15 bp, Homo sapiens
agagcttttaggaag

SEQ ID NO: 802054 - DNA, 15 bp, Homo sapiens
gagcttttaggaaga

SEQ ID NO: 802055 - DNA, 15 bp, Homo sapiens
agcttttaggaagag

SEQ ID NO: 802056 - DNA, 15 bp, Homo sapiens
gcttttaggaagaga

SEQ ID NO: 802057 - DNA, 15 bp, Homo sapiens
cttttaggaagagag

SEQ ID NO: 802058 - DNA, 15 bp, Homo sapiens
ttttaggaagagagt

SEQ ID NO: 802059 - DNA, 15 bp, Homo sapiens
tttaggaagagagtt

SEQ ID NO: 802060 - DNA, 15 bp, Homo sapiens
ttaggaagagagttg

SEQ ID NO: 802061 - DNA, 15 bp, Homo sapiens
taggaagagagttgg

SEQ ID NO: 802062 - DNA, 15 bp, Homo sapiens
aggaagagagttggt

SEQ ID NO: 802063 - DNA, 15 bp, Homo sapiens
ggaagagagttggtg

SEQ ID NO: 802064 - DNA, 15 bp, Homo sapiens
gaagagagttggtga

SEQ ID NO: 802065 - DNA, 15 bp, Homo sapiens
aagagagttggtgag

SEQ ID NO: 802066 - DNA, 15 bp, Homo sapiens
agagagttggtgagc

SEQ ID NO: 802067 - DNA, 15 bp, Homo sapiens
gagagttggtgagca

SEQ ID NO: 802068 - DNA, 15 bp, Homo sapiens
agagttggtgagcac

SEQ ID NO: 802069 - DNA, 15 bp, Homo sapiens
gagttggtgagcacc

SEQ ID NO: 802070 - DNA, 15 bp, Homo sapiens
agttggtgagcacca

SEQ ID NO: 802071 - DNA, 15 bp, Homo sapiens
gttggtgagcaccag

SEQ ID NO: 802072 - DNA, 15 bp, Homo sapiens
ttggtgagcaccagg

SEQ ID NO: 802073 - DNA, 15 bp, Homo sapiens
tggtgagcaccagga

SEQ ID NO: 802074 - DNA, 15 bp, Homo sapiens
ggtgagcaccaggag

SEQ ID NO: 802075 - DNA, 15 bp, Homo sapiens
gtgagcaccaggagc

SEQ ID NO: 802076 - DNA, 15 bp, Homo sapiens
tgagcaccaggagct

SEQ ID NO: 802077 - DNA, 15 bp, Homo sapiens
gagcaccaggagcta

SEQ ID NO: 802078 - DNA, 15 bp, Homo sapiens
agcaccaggagctaa

SEQ ID NO: 802079 - DNA, 15 bp, Homo sapiens
gcaccaggagctaac

SEQ ID NO: 802080 - DNA, 15 bp, Homo sapiens
caccaggagctaaca

SEQ ID NO: 802081 - DNA, 15 bp, Homo sapiens
accaggagctaacat

SEQ ID NO: 802082 - DNA, 15 bp, Homo sapiens
ccaggagctaacatg

SEQ ID NO: 802083 - DNA, 15 bp, Homo sapiens
caggagctaacatgg

SEQ ID NO: 802084 - DNA, 15 bp, Homo sapiens
aggagctaacatggg

SEQ ID NO: 802085 - DNA, 15 bp, Homo sapiens
ggagctaacatgggt

SEQ ID NO: 802086 - DNA, 15 bp, Homo sapiens
gagctaacatgggtt

SEQ ID NO: 802087 - DNA, 15 bp, Homo sapiens
agctaacatgggttc

SEQ ID NO: 802088 - DNA, 15 bp, Homo sapiens
gctaacatgggttca

SEQ ID NO: 802089 - DNA, 15 bp, Homo sapiens
ctaacatgggttcac

SEQ ID NO: 802090 - DNA, 15 bp, Homo sapiens
taacatgggttcacc

SEQ ID NO: 802091 - DNA, 15 bp, Homo sapiens
aacatgggttcacct

SEQ ID NO: 802092 - DNA, 15 bp, Homo sapiens
acatgggttcacctc

SEQ ID NO: 802093 - DNA, 15 bp, Homo sapiens
catgggttcacctca

SEQ ID NO: 802094 - DNA, 15 bp, Homo sapiens
atgggttcacctcag

SEQ ID NO: 802095 - DNA, 15 bp, Homo sapiens
tgggttcacctcagc

SEQ ID NO: 802096 - DNA, 15 bp, Homo sapiens
gggttcacctcagcc

SEQ ID NO: 802097 - DNA, 15 bp, Homo sapiens
ggttcacctcagcca

SEQ ID NO: 802098 - DNA, 15 bp, Homo sapiens
gttcacctcagccat

SEQ ID NO: 802099 - DNA, 15 bp, Homo sapiens
ttcacctcagccatc

SEQ ID NO: 802100 - DNA, 15 bp, Homo sapiens
tcacctcagccatca

SEQ ID NO: 802101 - DNA, 15 bp, Homo sapiens
cacctcagccatcac

SEQ ID NO: 802102 - DNA, 15 bp, Homo sapiens
acctcagccatcacc

SEQ ID NO: 802103 - DNA, 15 bp, Homo sapiens
cctcagccatcaccc

SEQ ID NO: 802104 - DNA, 15 bp, Homo sapiens
ctcagccatcaccca

SEQ ID NO: 802105 - DNA, 15 bp, Homo sapiens
tcagccatcacccag

SEQ ID NO: 802106 - DNA, 15 bp, Homo sapiens
cagccatcacccaga

SEQ ID NO: 802107 - DNA, 15 bp, Homo sapiens
agccatcacccagac

SEQ ID NO: 802108 - DNA, 15 bp, Homo sapiens
gccatcacccagaca

SEQ ID NO: 802109 - DNA, 15 bp, Homo sapiens
ccatcacccagacaa

SEQ ID NO: 802110 - DNA, 15 bp, Homo sapiens
catcacccagacaag

SEQ ID NO: 802111 - DNA, 15 bp, Homo sapiens
atcacccagacaagc

SEQ ID NO: 802112 - DNA, 15 bp, Homo sapiens
tcacccagacaagct

SEQ ID NO: 802113 - DNA, 15 bp, Homo sapiens
cacccagacaagctt

SEQ ID NO: 802114 - DNA, 15 bp, Homo sapiens
acccagacaagcttc

SEQ ID NO: 802115 - DNA, 15 bp, Homo sapiens
cccagacaagcttca

SEQ ID NO: 802116 - DNA, 15 bp, Homo sapiens
ccagacaagcttcag

SEQ ID NO: 802117 - DNA, 15 bp, Homo sapiens
cagacaagcttcaga

SEQ ID NO: 802118 - DNA, 15 bp, Homo sapiens
agacaagcttcagac

SEQ ID NO: 802119 - DNA, 15 bp, Homo sapiens
gacaagcttcagacc

SEQ ID NO: 802120 - DNA, 15 bp, Homo sapiens
acaagcttcagacca

SEQ ID NO: 802121 - DNA, 15 bp, Homo sapiens
caagcttcagaccag

SEQ ID NO: 802122 - DNA, 15 bp, Homo sapiens
aagcttcagaccaga

SEQ ID NO: 802123 - DNA, 15 bp, Homo sapiens
agcttcagaccagac

SEQ ID NO: 802124 - DNA, 15 bp, Homo sapiens
gcttcagaccagact

SEQ ID NO: 802125 - DNA, 15 bp, Homo sapiens
cttcagaccagactc

SEQ ID NO: 802126 - DNA, 15 bp, Homo sapiens
ttcagaccagactca

SEQ ID NO: 802127 - DNA, 15 bp, Homo sapiens
tcagaccagactcaa

SEQ ID NO: 802128 - DNA, 15 bp, Homo sapiens
cagaccagactcaaa

SEQ ID NO: 802129 - DNA, 15 bp, Homo sapiens
agaccagactcaaat

SEQ ID NO: 802130 - DNA, 15 bp, Homo sapiens
gaccagactcaaatg

SEQ ID NO: 802131 - DNA, 15 bp, Homo sapiens
accagactcaaatgt

SEQ ID NO: 802132 - DNA, 15 bp, Homo sapiens
ccagactcaaatgtg

SEQ ID NO: 802133 - DNA, 15 bp, Homo sapiens
cagactcaaatgtga

SEQ ID NO: 802134 - DNA, 15 bp, Homo sapiens
agactcaaatgtgat

SEQ ID NO: 802135 - DNA, 15 bp, Homo sapiens
gactcaaatgtgatg

SEQ ID NO: 802136 - DNA, 15 bp, Homo sapiens
actcaaatgtgatgg

SEQ ID NO: 802137 - DNA, 15 bp, Homo sapiens
ctcaaatgtgatggt

SEQ ID NO: 802138 - DNA, 15 bp, Homo sapiens
tcaaatgtgatggtc

SEQ ID NO: 802139 - DNA, 15 bp, Homo sapiens
caaatgtgatggtct

SEQ ID NO: 802140 - DNA, 15 bp, Homo sapiens
aaatgtgatggtctt

SEQ ID NO: 802141 - DNA, 15 bp, Homo sapiens
aatgtgatggtcttc

SEQ ID NO: 802142 - DNA, 15 bp, Homo sapiens
atgtgatggtcttca

SEQ ID NO: 802143 - DNA, 15 bp, Homo sapiens
tgtgatggtcttcat

SEQ ID NO: 802144 - DNA, 15 bp, Homo sapiens
gtgatggtcttcatg

SEQ ID NO: 802145 - DNA, 15 bp, Homo sapiens
tgatggtcttcatgc

SEQ ID NO: 802146 - DNA, 15 bp, Homo sapiens
gatggtcttcatgcc

SEQ ID NO: 802147 - DNA, 15 bp, Homo sapiens
atggtcttcatgcca

SEQ ID NO: 802148 - DNA, 15 bp, Homo sapiens
tggtcttcatgccac

SEQ ID NO: 802149 - DNA, 15 bp, Homo sapiens
ggtcttcatgccaca

SEQ ID NO: 802150 - DNA, 15 bp, Homo sapiens
gtcttcatgccacac

SEQ ID NO: 802151 - DNA, 15 bp, Homo sapiens
tcttcatgccacaca

SEQ ID NO: 802152 - DNA, 15 bp, Homo sapiens
cttcatgccacacac

SEQ ID NO: 802153 - DNA, 15 bp, Homo sapiens
ttcatgccacacacc

SEQ ID NO: 802154 - DNA, 15 bp, Homo sapiens
tcatgccacacacca

SEQ ID NO: 802155 - DNA, 15 bp, Homo sapiens
catgccacacaccag

SEQ ID NO: 802156 - DNA, 15 bp, Homo sapiens
atgccacacaccagg

SEQ ID NO: 802157 - DNA, 15 bp, Homo sapiens
tgccacacaccaggg

SEQ ID NO: 802158 - DNA, 15 bp, Homo sapiens
gccacacaccagggg

SEQ ID NO: 802159 - DNA, 15 bp, Homo sapiens
ccacacaccaggggt

SEQ ID NO: 802160 - DNA, 15 bp, Homo sapiens
cacacaccaggggtc

SEQ ID NO: 802161 - DNA, 15 bp, Homo sapiens
acacaccaggggtca

SEQ ID NO: 802162 - DNA, 15 bp, Homo sapiens
cacaccaggggtcat

SEQ ID NO: 802163 - DNA, 15 bp, Homo sapiens
acaccaggggtcatg

SEQ ID NO: 802164 - DNA, 15 bp, Homo sapiens
caccaggggtcatga

SEQ ID NO: 802165 - DNA, 15 bp, Homo sapiens
accaggggtcatgaa

SEQ ID NO: 802166 - DNA, 15 bp, Homo sapiens
ccaggggtcatgaat

SEQ ID NO: 802167 - DNA, 15 bp, Homo sapiens
caggggtcatgaatg

SEQ ID NO: 802168 - DNA, 15 bp, Homo sapiens
aggggtcatgaatgg

SEQ ID NO: 802169 - DNA, 15 bp, Homo sapiens
ggggtcatgaatggg

SEQ ID NO: 802170 - DNA, 15 bp, Homo sapiens
gggtcatgaatgggc

SEQ ID NO: 802171 - DNA, 15 bp, Homo sapiens
ggtcatgaatgggct

SEQ ID NO: 802172 - DNA, 15 bp, Homo sapiens
gtcatgaatgggctg

SEQ ID NO: 802173 - DNA, 15 bp, Homo sapiens
tcatgaatgggctgg

SEQ ID NO: 802174 - DNA, 15 bp, Homo sapiens
catgaatgggctgga

SEQ ID NO: 802175 - DNA, 15 bp, Homo sapiens
atgaatgggctggaa

SEQ ID NO: 802176 - DNA, 15 bp, Homo sapiens
tgaatgggctggaac

SEQ ID NO: 802177 - DNA, 15 bp, Homo sapiens
gaatgggctggaact

SEQ ID NO: 802178 - DNA, 15 bp, Homo sapiens
aatgggctggaactt

SEQ ID NO: 802179 - DNA, 15 bp, Homo sapiens
atgggctggaactta

SEQ ID NO: 802180 - DNA, 15 bp, Homo sapiens
tgggctggaacttac

SEQ ID NO: 802181 - DNA, 15 bp, Homo sapiens
gggctggaacttaca

SEQ ID NO: 802182 - DNA, 15 bp, Homo sapiens
ggctggaacttacat

SEQ ID NO: 802183 - DNA, 15 bp, Homo sapiens
gctggaacttacata

SEQ ID NO: 802184 - DNA, 15 bp, Homo sapiens
ctggaacttacataa

SEQ ID NO: 802185 - DNA, 15 bp, Homo sapiens
tggaacttacataaa

SEQ ID NO: 802186 - DNA, 15 bp, Homo sapiens
ggaacttacataaac

SEQ ID NO: 802187 - DNA, 15 bp, Homo sapiens
gaacttacataaaca

SEQ ID NO: 802188 - DNA, 15 bp, Homo sapiens
aacttacataaacac

SEQ ID NO: 802189 - DNA, 15 bp, Homo sapiens
acttacataaacaca

SEQ ID NO: 802190 - DNA, 15 bp, Homo sapiens
cttacataaacacaa

SEQ ID NO: 802191 - DNA, 15 bp, Homo sapiens
ttacataaacacaat

SEQ ID NO: 802192 - DNA, 15 bp, Homo sapiens
tacataaacacaatc

SEQ ID NO: 802193 - DNA, 15 bp, Homo sapiens
acataaacacaatca

SEQ ID NO: 802194 - DNA, 15 bp, Homo sapiens
cataaacacaatcaa

SEQ ID NO: 802195 - DNA, 15 bp, Homo sapiens
ataaacacaatcaag

SEQ ID NO: 802196 - DNA, 15 bp, Homo sapiens
taaacacaatcaaga

SEQ ID NO: 802197 - DNA, 15 bp, Homo sapiens
aaacacaatcaagat

SEQ ID NO: 802198 - DNA, 15 bp, Homo sapiens
aacacaatcaagatg

SEQ ID NO: 802199 - DNA, 15 bp, Homo sapiens
acacaatcaagatgg

SEQ ID NO: 802200 - DNA, 15 bp, Homo sapiens
cacaatcaagatgga

SEQ ID NO: 802201 - DNA, 15 bp, Homo sapiens
acaatcaagatggat

SEQ ID NO: 802202 - DNA, 15 bp, Homo sapiens
caatcaagatggata

SEQ ID NO: 802203 - DNA, 15 bp, Homo sapiens
aatcaagatggataa

SEQ ID NO: 802204 - DNA, 15 bp, Homo sapiens
atcaagatggataac

SEQ ID NO: 802205 - DNA, 15 bp, Homo sapiens
tcaagatggataacg

SEQ ID NO: 802206 - DNA, 15 bp, Homo sapiens
caagatggataacga

SEQ ID NO: 802207 - DNA, 15 bp, Homo sapiens
aagatggataacgag

SEQ ID NO: 802208 - DNA, 15 bp, Homo sapiens
agatggataacgagc

SEQ ID NO: 802209 - DNA, 15 bp, Homo sapiens
gatggataacgagca

SEQ ID NO: 802210 - DNA, 15 bp, Homo sapiens
atggataacgagcag

SEQ ID NO: 802211 - DNA, 15 bp, Homo sapiens
tggataacgagcagg

SEQ ID NO: 802212 - DNA, 15 bp, Homo sapiens
ggataacgagcaggt

SEQ ID NO: 802213 - DNA, 15 bp, Homo sapiens
gataacgagcaggta

SEQ ID NO: 802214 - DNA, 15 bp, Homo sapiens
ataacgagcaggtac

SEQ ID NO: 802215 - DNA, 15 bp, Homo sapiens
taacgagcaggtaca

SEQ ID NO: 802216 - DNA, 15 bp, Homo sapiens
aacgagcaggtacaa

SEQ ID NO: 802217 - DNA, 15 bp, Homo sapiens
acgagcaggtacaaa

SEQ ID NO: 802218 - DNA, 15 bp, Homo sapiens
cgagcaggtacaaag

SEQ ID NO: 802219 - DNA, 15 bp, Homo sapiens
gagcaggtacaaagc

SEQ ID NO: 802220 - DNA, 15 bp, Homo sapiens
agcaggtacaaagca

SEQ ID NO: 802221 - DNA, 15 bp, Homo sapiens
gcaggtacaaagcaa

SEQ ID NO: 802222 - DNA, 15 bp, Homo sapiens
caggtacaaagcaac

SEQ ID NO: 802223 - DNA, 15 bp, Homo sapiens
aggtacaaagcaaca

SEQ ID NO: 802224 - DNA, 15 bp, Homo sapiens
ggtacaaagcaacat

SEQ ID NO: 802225 - DNA, 15 bp, Homo sapiens
gtacaaagcaacatc

SEQ ID NO: 802226 - DNA, 15 bp, Homo sapiens
tacaaagcaacatct

SEQ ID NO: 802227 - DNA, 15 bp, Homo sapiens
acaaagcaacatctt

SEQ ID NO: 802228 - DNA, 15 bp, Homo sapiens
caaagcaacatctta

SEQ ID NO: 802229 - DNA, 15 bp, Homo sapiens
aaagcaacatcttag

SEQ ID NO: 802230 - DNA, 15 bp, Homo sapiens
aagcaacatcttagg

SEQ ID NO: 802231 - DNA, 15 bp, Homo sapiens
agcaacatcttagga

SEQ ID NO: 802232 - DNA, 15 bp, Homo sapiens
gcaacatcttaggag

SEQ ID NO: 802233 - DNA, 15 bp, Homo sapiens
caacatcttaggagc

SEQ ID NO: 802234 - DNA, 15 bp, Homo sapiens
aacatcttaggagca

SEQ ID NO: 802235 - DNA, 15 bp, Homo sapiens
acatcttaggagcaa

SEQ ID NO: 802236 - DNA, 15 bp, Homo sapiens
catcttaggagcaat

SEQ ID NO: 802237 - DNA, 15 bp, Homo sapiens
atcttaggagcaatt

SEQ ID NO: 802238 - DNA, 15 bp, Homo sapiens
tcttaggagcaattg

SEQ ID NO: 802239 - DNA, 15 bp, Homo sapiens
cttaggagcaattgt

SEQ ID NO: 802240 - DNA, 15 bp, Homo sapiens
ttaggagcaattgtt

SEQ ID NO: 802241 - DNA, 15 bp, Homo sapiens
taggagcaattgtta

SEQ ID NO: 802242 - DNA, 15 bp, Homo sapiens
aggagcaattgttag

SEQ ID NO: 802243 - DNA, 15 bp, Homo sapiens
ggagcaattgttagg

SEQ ID NO: 802244 - DNA, 15 bp, Homo sapiens
gagcaattgttagga

SEQ ID NO: 802245 - DNA, 15 bp, Homo sapiens
agcaattgttaggat

SEQ ID NO: 802246 - DNA, 15 bp, Homo sapiens
gcaattgttaggata

SEQ ID NO: 802247 - DNA, 15 bp, Homo sapiens
caattgttaggataa

SEQ ID NO: 802248 - DNA, 15 bp, Homo sapiens
aattgttaggataac

SEQ ID NO: 802249 - DNA, 15 bp, Homo sapiens
attgttaggataact

SEQ ID NO: 802250 - DNA, 15 bp, Homo sapiens
ttgttaggataacta

SEQ ID NO: 802251 - DNA, 15 bp, Homo sapiens
tgttaggataactag

SEQ ID NO: 802252 - DNA, 15 bp, Homo sapiens
gttaggataactaga

SEQ ID NO: 802253 - DNA, 15 bp, Homo sapiens
ttaggataactagaa

SEQ ID NO: 802254 - DNA, 15 bp, Homo sapiens
taggataactagaac

SEQ ID NO: 802255 - DNA, 15 bp, Homo sapiens
aggataactagaact

SEQ ID NO: 802256 - DNA, 15 bp, Homo sapiens
ggataactagaacta

SEQ ID NO: 802257 - DNA, 15 bp, Homo sapiens
gataactagaactat

SEQ ID NO: 802258 - DNA, 15 bp, Homo sapiens
ataactagaactatt

SEQ ID NO: 802259 - DNA, 15 bp, Homo sapiens
taactagaactattc

SEQ ID NO: 802260 - DNA, 15 bp, Homo sapiens
aactagaactattcc

SEQ ID NO: 802261 - DNA, 15 bp, Homo sapiens
actagaactattcct

SEQ ID NO: 802262 - DNA, 15 bp, Homo sapiens
ctagaactattcctg

SEQ ID NO: 802263 - DNA, 15 bp, Homo sapiens
tagaactattcctgc

SEQ ID NO: 802264 - DNA, 15 bp, Homo sapiens
agaactattcctgct

SEQ ID NO: 802265 - DNA, 15 bp, Homo sapiens
gaactattcctgctc

SEQ ID NO: 802266 - DNA, 15 bp, Homo sapiens
aactattcctgctct

SEQ ID NO: 802267 - DNA, 15 bp, Homo sapiens
actattcctgctctt

SEQ ID NO: 802268 - DNA, 15 bp, Homo sapiens
ctattcctgctcttc

SEQ ID NO: 802269 - DNA, 15 bp, Homo sapiens
tattcctgctcttct

SEQ ID NO: 802270 - DNA, 15 bp, Homo sapiens
attcctgctcttctc

SEQ ID NO: 802271 - DNA, 15 bp, Homo sapiens
ttcctgctcttctcc

SEQ ID NO: 802272 - DNA, 15 bp, Homo sapiens
tcctgctcttctcca

SEQ ID NO: 802273 - DNA, 15 bp, Homo sapiens
cctgctcttctccaa

SEQ ID NO: 802274 - DNA, 15 bp, Homo sapiens
ctgctcttctccaag

SEQ ID NO: 802275 - DNA, 15 bp, Homo sapiens
tgctcttctccaagc

SEQ ID NO: 802276 - DNA, 15 bp, Homo sapiens
gctcttctccaagcc

SEQ ID NO: 802277 - DNA, 15 bp, Homo sapiens
ctcttctccaagcca

SEQ ID NO: 802278 - DNA, 15 bp, Homo sapiens
tcttctccaagccat

SEQ ID NO: 802279 - DNA, 15 bp, Homo sapiens
cttctccaagccatt

SEQ ID NO: 802280 - DNA, 15 bp, Homo sapiens
ttctccaagccattc

SEQ ID NO: 802281 - DNA, 15 bp, Homo sapiens
tctccaagccattca

SEQ ID NO: 802282 - DNA, 15 bp, Homo sapiens
ctccaagccattcag

SEQ ID NO: 802283 - DNA, 15 bp, Homo sapiens
tccaagccattcagc

SEQ ID NO: 802284 - DNA, 15 bp, Homo sapiens
ccaagccattcagca

SEQ ID NO: 802285 - DNA, 15 bp, Homo sapiens
caagccattcagcag

SEQ ID NO: 802286 - DNA, 15 bp, Homo sapiens
aagccattcagcagg

SEQ ID NO: 802287 - DNA, 15 bp, Homo sapiens
agccattcagcaggg

SEQ ID NO: 802288 - DNA, 15 bp, Homo sapiens
gccattcagcagggg

SEQ ID NO: 802289 - DNA, 15 bp, Homo sapiens
ccattcagcaggggc

SEQ ID NO: 802290 - DNA, 15 bp, Homo sapiens
cattcagcaggggcg

SEQ ID NO: 802291 - DNA, 15 bp, Homo sapiens
attcagcaggggcgc

SEQ ID NO: 802292 - DNA, 15 bp, Homo sapiens
ttcagcaggggcgca

SEQ ID NO: 802293 - DNA, 15 bp, Homo sapiens
tcagcaggggcgcaa

SEQ ID NO: 802294 - DNA, 15 bp, Homo sapiens
cagcaggggcgcaat

SEQ ID NO: 802295 - DNA, 15 bp, Homo sapiens
agcaggggcgcaatt

SEQ ID NO: 802296 - DNA, 15 bp, Homo sapiens
gcaggggcgcaattg

SEQ ID NO: 802297 - DNA, 15 bp, Homo sapiens
caggggcgcaattga

SEQ ID NO: 802298 - DNA, 15 bp, Homo sapiens
aggggcgcaattgac

SEQ ID NO: 802299 - DNA, 15 bp, Homo sapiens
ggggcgcaattgaca

SEQ ID NO: 802300 - DNA, 15 bp, Homo sapiens
gggcgcaattgacat

SEQ ID NO: 802301 - DNA, 15 bp, Homo sapiens
ggcgcaattgacatt

SEQ ID NO: 802302 - DNA, 15 bp, Homo sapiens
gcgcaattgacattc

SEQ ID NO: 802303 - DNA, 15 bp, Homo sapiens
cgcaattgacattct

SEQ ID NO: 802304 - DNA, 15 bp, Homo sapiens
gcaattgacattcta

SEQ ID NO: 802305 - DNA, 15 bp, Homo sapiens
caattgacattctaa

SEQ ID NO: 802306 - DNA, 15 bp, Homo sapiens
aattgacattctaaa

SEQ ID NO: 802307 - DNA, 15 bp, Homo sapiens
attgacattctaaaa

SEQ ID NO: 802308 - DNA, 15 bp, Homo sapiens
ttgacattctaaaat

SEQ ID NO: 802309 - DNA, 15 bp, Homo sapiens
tgacattctaaaatc

SEQ ID NO: 802310 - DNA, 15 bp, Homo sapiens
gacattctaaaatct

SEQ ID NO: 802311 - DNA, 15 bp, Homo sapiens
acattctaaaatctt

SEQ ID NO: 802312 - DNA, 15 bp, Homo sapiens
cattctaaaatcttt

SEQ ID NO: 802313 - DNA, 15 bp, Homo sapiens
attctaaaatctttg

SEQ ID NO: 802314 - DNA, 15 bp, Homo sapiens
ttctaaaatctttga

SEQ ID NO: 802315 - DNA, 15 bp, Homo sapiens
tctaaaatctttgaa

SEQ ID NO: 802316 - DNA, 15 bp, Homo sapiens
ctaaaatctttgaat

SEQ ID NO: 802317 - DNA, 15 bp, Homo sapiens
taaaatctttgaatg

SEQ ID NO: 802318 - DNA, 15 bp, Homo sapiens
aaaatctttgaatgt

SEQ ID NO: 802319 - DNA, 15 bp, Homo sapiens
aaatctttgaatgtt

SEQ ID NO: 802320 - DNA, 15 bp, Homo sapiens
aatctttgaatgttt

SEQ ID NO: 802321 - DNA, 15 bp, Homo sapiens
atctttgaatgtttg

SEQ ID NO: 802322 - DNA, 15 bp, Homo sapiens
tctttgaatgtttgt

SEQ ID NO: 802323 - DNA, 15 bp, Homo sapiens
ctttgaatgtttgtc

SEQ ID NO: 802324 - DNA, 15 bp, Homo sapiens
tttgaatgtttgtca

SEQ ID NO: 802325 - DNA, 15 bp, Homo sapiens
ttgaatgtttgtcat

SEQ ID NO: 802326 - DNA, 15 bp, Homo sapiens
tgaatgtttgtcatg

SEQ ID NO: 802327 - DNA, 15 bp, Homo sapiens
gaatgtttgtcatgt

SEQ ID NO: 802328 - DNA, 15 bp, Homo sapiens
aatgtttgtcatgtg

SEQ ID NO: 802329 - DNA, 15 bp, Homo sapiens
atgtttgtcatgtgg

SEQ ID NO: 802330 - DNA, 15 bp, Homo sapiens
tgtttgtcatgtgga

SEQ ID NO: 802331 - DNA, 15 bp, Homo sapiens
gtttgtcatgtggaa

SEQ ID NO: 802332 - DNA, 15 bp, Homo sapiens
tttgtcatgtggaaa

SEQ ID NO: 802333 - DNA, 15 bp, Homo sapiens
ttgtcatgtggaaaa

SEQ ID NO: 802334 - DNA, 15 bp, Homo sapiens
tgtcatgtggaaaat

SEQ ID NO: 802335 - DNA, 15 bp, Homo sapiens
gtcatgtggaaaatg

SEQ ID NO: 802336 - DNA, 15 bp, Homo sapiens
tcatgtggaaaatgg

SEQ ID NO: 802337 - DNA, 15 bp, Homo sapiens
catgtggaaaatgga

SEQ ID NO: 802338 - DNA, 15 bp, Homo sapiens
atgtggaaaatggaa

SEQ ID NO: 802339 - DNA, 15 bp, Homo sapiens
tgtggaaaatggaat

SEQ ID NO: 802340 - DNA, 15 bp, Homo sapiens
gtggaaaatggaatc

SEQ ID NO: 802341 - DNA, 15 bp, Homo sapiens
tggaaaatggaatcg

SEQ ID NO: 802342 - DNA, 15 bp, Homo sapiens
ggaaaatggaatcga

SEQ ID NO: 802343 - DNA, 15 bp, Homo sapiens
gaaaatggaatcgat

SEQ ID NO: 802344 - DNA, 15 bp, Homo sapiens
aaaatggaatcgatc

SEQ ID NO: 802345 - DNA, 15 bp, Homo sapiens
aaatggaatcgatct

SEQ ID NO: 802346 - DNA, 15 bp, Homo sapiens
aatggaatcgatctc

SEQ ID NO: 802347 - DNA, 15 bp, Homo sapiens
atggaatcgatctca

SEQ ID NO: 802348 - DNA, 15 bp, Homo sapiens
tggaatcgatctcat

SEQ ID NO: 802349 - DNA, 15 bp, Homo sapiens
ggaatcgatctcatc

SEQ ID NO: 802350 - DNA, 15 bp, Homo sapiens
gaatcgatctcatct

SEQ ID NO: 802351 - DNA, 15 bp, Homo sapiens
aatcgatctcatctc

SEQ ID NO: 802352 - DNA, 15 bp, Homo sapiens
atcgatctcatctct

SEQ ID NO: 802353 - DNA, 15 bp, Homo sapiens
tcgatctcatctcta

SEQ ID NO: 802354 - DNA, 15 bp, Homo sapiens
cgatctcatctctat

SEQ ID NO: 802355 - DNA, 15 bp, Homo sapiens
gatctcatctctatg

SEQ ID NO: 802356 - DNA, 15 bp, Homo sapiens
atctcatctctatgg

SEQ ID NO: 802357 - DNA, 15 bp, Homo sapiens
tctcatctctatggc

SEQ ID NO: 802358 - DNA, 15 bp, Homo sapiens
ctcatctctatggcc

SEQ ID NO: 802359 - DNA, 15 bp, Homo sapiens
tcatctctatggccc

SEQ ID NO: 802360 - DNA, 15 bp, Homo sapiens
catctctatggcccc

SEQ ID NO: 802361 - DNA, 15 bp, Homo sapiens
atctctatggcccca

SEQ ID NO: 802362 - DNA, 15 bp, Homo sapiens
tctctatggccccag

SEQ ID NO: 802363 - DNA, 15 bp, Homo sapiens
ctctatggccccagc

SEQ ID NO: 802364 - DNA, 15 bp, Homo sapiens
tctatggccccagca

SEQ ID NO: 802365 - DNA, 15 bp, Homo sapiens
ctatggccccagcac

SEQ ID NO: 802366 - DNA, 15 bp, Homo sapiens
tatggccccagcact

SEQ ID NO: 802367 - DNA, 15 bp, Homo sapiens
atggccccagcactt

SEQ ID NO: 802368 - DNA, 15 bp, Homo sapiens
tggccccagcactta

SEQ ID NO: 802369 - DNA, 15 bp, Homo sapiens
ggccccagcacttag

SEQ ID NO: 802370 - DNA, 15 bp, Homo sapiens
gccccagcacttaga

SEQ ID NO: 802371 - DNA, 15 bp, Homo sapiens
ccccagcacttagat

SEQ ID NO: 802372 - DNA, 15 bp, Homo sapiens
cccagcacttagatg

SEQ ID NO: 802373 - DNA, 15 bp, Homo sapiens
ccagcacttagatgg

SEQ ID NO: 802374 - DNA, 15 bp, Homo sapiens
cagcacttagatggg

SEQ ID NO: 802375 - DNA, 15 bp, Homo sapiens
agcacttagatgggt

SEQ ID NO: 802376 - DNA, 15 bp, Homo sapiens
gcacttagatgggtg

SEQ ID NO: 802377 - DNA, 15 bp, Homo sapiens
cacttagatgggtgt

SEQ ID NO: 802378 - DNA, 15 bp, Homo sapiens
acttagatgggtgtt

SEQ ID NO: 802379 - DNA, 15 bp, Homo sapiens
cttagatgggtgttt

SEQ ID NO: 802380 - DNA, 15 bp, Homo sapiens
ttagatgggtgtttt

SEQ ID NO: 802381 - DNA, 15 bp, Homo sapiens
tagatgggtgttttg

SEQ ID NO: 802382 - DNA, 15 bp, Homo sapiens
agatgggtgttttga

SEQ ID NO: 802383 - DNA, 15 bp, Homo sapiens
gatgggtgttttgat

SEQ ID NO: 802384 - DNA, 15 bp, Homo sapiens
atgggtgttttgatc

SEQ ID NO: 802385 - DNA, 15 bp, Homo sapiens
tgggtgttttgatct

SEQ ID NO: 802386 - DNA, 15 bp, Homo sapiens
gggtgttttgatcta

SEQ ID NO: 802387 - DNA, 15 bp, Homo sapiens
ggtgttttgatctag

SEQ ID NO: 802388 - DNA, 15 bp, Homo sapiens
gtgttttgatctagg

SEQ ID NO: 802389 - DNA, 15 bp, Homo sapiens
tgttttgatctagga

SEQ ID NO: 802390 - DNA, 15 bp, Homo sapiens
gttttgatctaggaa

SEQ ID NO: 802391 - DNA, 15 bp, Homo sapiens
ttttgatctaggaaa

SEQ ID NO: 802392 - DNA, 15 bp, Homo sapiens
tttgatctaggaaac

SEQ ID NO: 802393 - DNA, 15 bp, Homo sapiens
ttgatctaggaaaca

SEQ ID NO: 802394 - DNA, 15 bp, Homo sapiens
tgatctaggaaacat

SEQ ID NO: 802395 - DNA, 15 bp, Homo sapiens
gatctaggaaacatt

SEQ ID NO: 802396 - DNA, 15 bp, Homo sapiens
atctaggaaacattt

SEQ ID NO: 802397 - DNA, 15 bp, Homo sapiens
tctaggaaacatttt

SEQ ID NO: 802398 - DNA, 15 bp, Homo sapiens
ctaggaaacattttc

SEQ ID NO: 802399 - DNA, 15 bp, Homo sapiens
taggaaacattttct

SEQ ID NO: 802400 - DNA, 15 bp, Homo sapiens
aggaaacattttctt

SEQ ID NO: 802401 - DNA, 15 bp, Homo sapiens
ggaaacattttcttt

SEQ ID NO: 802402 - DNA, 15 bp, Homo sapiens
gaaacattttctttt

SEQ ID NO: 802403 - DNA, 15 bp, Homo sapiens
aaacattttcttttt

SEQ ID NO: 802404 - DNA, 15 bp, Homo sapiens
aacattttctttttc

SEQ ID NO: 802405 - DNA, 15 bp, Homo sapiens
acattttctttttct

SEQ ID NO: 802406 - DNA, 15 bp, Homo sapiens
cattttctttttctt

SEQ ID NO: 802407 - DNA, 15 bp, Homo sapiens
ttttctttttctttc

SEQ ID NO: 802408 - DNA, 15 bp, Homo sapiens
tttctttttctttct

SEQ ID NO: 802409 - DNA, 15 bp, Homo sapiens
ttctttttctttcta

SEQ ID NO: 802410 - DNA, 15 bp, Homo sapiens
tctttttctttctat

SEQ ID NO: 802411 - DNA, 15 bp, Homo sapiens
ctttttctttctata

SEQ ID NO: 802412 - DNA, 15 bp, Homo sapiens
tttttctttctataa

SEQ ID NO: 802413 - DNA, 15 bp, Homo sapiens
ttttctttctataac

SEQ ID NO: 802414 - DNA, 15 bp, Homo sapiens
tttctttctataaca

SEQ ID NO: 802415 - DNA, 15 bp, Homo sapiens
ttctttctataacat

SEQ ID NO: 802416 - DNA, 15 bp, Homo sapiens
tctttctataacatc

SEQ ID NO: 802417 - DNA, 15 bp, Homo sapiens
ctttctataacatct

SEQ ID NO: 802418 - DNA, 15 bp, Homo sapiens
tttctataacatctc

SEQ ID NO: 802419 - DNA, 15 bp, Homo sapiens
ttctataacatctct

SEQ ID NO: 802420 - DNA, 15 bp, Homo sapiens
tctataacatctctg

SEQ ID NO: 802421 - DNA, 15 bp, Homo sapiens
ctataacatctctga

SEQ ID NO: 802422 - DNA, 15 bp, Homo sapiens
tataacatctctgat

SEQ ID NO: 802423 - DNA, 15 bp, Homo sapiens
ataacatctctgatt

SEQ ID NO: 802424 - DNA, 15 bp, Homo sapiens
taacatctctgattt

SEQ ID NO: 802425 - DNA, 15 bp, Homo sapiens
aacatctctgatttg

SEQ ID NO: 802426 - DNA, 15 bp, Homo sapiens
acatctctgatttgc

SEQ ID NO: 802427 - DNA, 15 bp, Homo sapiens
catctctgatttgcc

SEQ ID NO: 802428 - DNA, 15 bp, Homo sapiens
atctctgatttgccc

SEQ ID NO: 802429 - DNA, 15 bp, Homo sapiens
tctctgatttgccct

SEQ ID NO: 802430 - DNA, 15 bp, Homo sapiens
ctctgatttgcccta

SEQ ID NO: 802431 - DNA, 15 bp, Homo sapiens
tctgatttgccctaa

SEQ ID NO: 802432 - DNA, 15 bp, Homo sapiens
ctgatttgccctaat

SEQ ID NO: 802433 - DNA, 15 bp, Homo sapiens
tgatttgccctaatt

SEQ ID NO: 802434 - DNA, 15 bp, Homo sapiens
gatttgccctaattc

SEQ ID NO: 802435 - DNA, 15 bp, Homo sapiens
atttgccctaattcc

SEQ ID NO: 802436 - DNA, 15 bp, Homo sapiens
tttgccctaattcct

SEQ ID NO: 802437 - DNA, 15 bp, Homo sapiens
ttgccctaattcctg

SEQ ID NO: 802438 - DNA, 15 bp, Homo sapiens
tgccctaattcctgc

SEQ ID NO: 802439 - DNA, 15 bp, Homo sapiens
gccctaattcctgca

SEQ ID NO: 802440 - DNA, 15 bp, Homo sapiens
ccctaattcctgcag

SEQ ID NO: 802441 - DNA, 15 bp, Homo sapiens
cctaattcctgcagc

SEQ ID NO: 802442 - DNA, 15 bp, Homo sapiens
ctaattcctgcagcc

SEQ ID NO: 802443 - DNA, 15 bp, Homo sapiens
taattcctgcagcca

SEQ ID NO: 802444 - DNA, 15 bp, Homo sapiens
aattcctgcagccag

SEQ ID NO: 802445 - DNA, 15 bp, Homo sapiens
attcctgcagccaga

SEQ ID NO: 802446 - DNA, 15 bp, Homo sapiens
ttcctgcagccagac

SEQ ID NO: 802447 - DNA, 15 bp, Homo sapiens
tcctgcagccagaca

SEQ ID NO: 802448 - DNA, 15 bp, Homo sapiens
cctgcagccagacag

SEQ ID NO: 802449 - DNA, 15 bp, Homo sapiens
ctgcagccagacagt

SEQ ID NO: 802450 - DNA, 15 bp, Homo sapiens
tgcagccagacagtc

SEQ ID NO: 802451 - DNA, 15 bp, Homo sapiens
gcagccagacagtct

SEQ ID NO: 802452 - DNA, 15 bp, Homo sapiens
cagccagacagtctg

SEQ ID NO: 802453 - DNA, 15 bp, Homo sapiens
agccagacagtctgt

SEQ ID NO: 802454 - DNA, 15 bp, Homo sapiens
gccagacagtctgta

SEQ ID NO: 802455 - DNA, 15 bp, Homo sapiens
ccagacagtctgtaa

SEQ ID NO: 802456 - DNA, 15 bp, Homo sapiens
cagacagtctgtaag

SEQ ID NO: 802457 - DNA, 15 bp, Homo sapiens
agacagtctgtaagt

SEQ ID NO: 802458 - DNA, 15 bp, Homo sapiens
gacagtctgtaagtg

SEQ ID NO: 802459 - DNA, 15 bp, Homo sapiens
acagtctgtaagtga

SEQ ID NO: 802460 - DNA, 15 bp, Homo sapiens
cagtctgtaagtgaa

SEQ ID NO: 802461 - DNA, 15 bp, Homo sapiens
agtctgtaagtgaaa

SEQ ID NO: 802462 - DNA, 15 bp, Homo sapiens
gtctgtaagtgaaac

SEQ ID NO: 802463 - DNA, 15 bp, Homo sapiens
tctgtaagtgaaaca

SEQ ID NO: 802464 - DNA, 15 bp, Homo sapiens
ctgtaagtgaaacag

SEQ ID NO: 802465 - DNA, 15 bp, Homo sapiens
tgtaagtgaaacagg

SEQ ID NO: 802466 - DNA, 15 bp, Homo sapiens
gtaagtgaaacaggc

SEQ ID NO: 802467 - DNA, 15 bp, Homo sapiens
taagtgaaacaggct

SEQ ID NO: 802468 - DNA, 15 bp, Homo sapiens
aagtgaaacaggctg

SEQ ID NO: 802469 - DNA, 15 bp, Homo sapiens
agtgaaacaggctgc

SEQ ID NO: 802470 - DNA, 15 bp, Homo sapiens
gtgaaacaggctgct

SEQ ID NO: 802471 - DNA, 15 bp, Homo sapiens
tgaaacaggctgctt

SEQ ID NO: 802472 - DNA, 15 bp, Homo sapiens
gaaacaggctgcttc

SEQ ID NO: 802473 - DNA, 15 bp, Homo sapiens
aaacaggctgcttct

SEQ ID NO: 802474 - DNA, 15 bp, Homo sapiens
aacaggctgcttctg

SEQ ID NO: 802475 - DNA, 15 bp, Homo sapiens
acaggctgcttctgg

SEQ ID NO: 802476 - DNA, 15 bp, Homo sapiens
caggctgcttctgga

SEQ ID NO: 802477 - DNA, 15 bp, Homo sapiens
aggctgcttctggat

SEQ ID NO: 802478 - DNA, 15 bp, Homo sapiens
ggctgcttctggatg

SEQ ID NO: 802479 - DNA, 15 bp, Homo sapiens
gctgcttctggatga

SEQ ID NO: 802480 - DNA, 15 bp, Homo sapiens
ctgcttctggatgaa

SEQ ID NO: 802481 - DNA, 15 bp, Homo sapiens
tgcttctggatgaaa

SEQ ID NO: 802482 - DNA, 15 bp, Homo sapiens
gcttctggatgaaat

SEQ ID NO: 802483 - DNA, 15 bp, Homo sapiens
cttctggatgaaatt

SEQ ID NO: 802484 - DNA, 15 bp, Homo sapiens
ttctggatgaaattc

SEQ ID NO: 802485 - DNA, 15 bp, Homo sapiens
tctggatgaaattca

SEQ ID NO: 802486 - DNA, 15 bp, Homo sapiens
ctggatgaaattcat

SEQ ID NO: 802487 - DNA, 15 bp, Homo sapiens
tggatgaaattcatt

SEQ ID NO: 802488 - DNA, 15 bp, Homo sapiens
ggatgaaattcattt

SEQ ID NO: 802489 - DNA, 15 bp, Homo sapiens
gatgaaattcatttc

SEQ ID NO: 802490 - DNA, 15 bp, Homo sapiens
atgaaattcatttcc

SEQ ID NO: 802491 - DNA, 15 bp, Homo sapiens
tgaaattcatttcct

SEQ ID NO: 802492 - DNA, 15 bp, Homo sapiens
gaaattcatttcctg

SEQ ID NO: 802493 - DNA, 15 bp, Homo sapiens
aaattcatttcctgt

SEQ ID NO: 802494 - DNA, 15 bp, Homo sapiens
aattcatttcctgta

SEQ ID NO: 802495 - DNA, 15 bp, Homo sapiens
attcatttcctgtaa

SEQ ID NO: 802496 - DNA, 15 bp, Homo sapiens
ttcatttcctgtaac

SEQ ID NO: 802497 - DNA, 15 bp, Homo sapiens
tcatttcctgtaaca

SEQ ID NO: 802498 - DNA, 15 bp, Homo sapiens
catttcctgtaacaa

SEQ ID NO: 802499 - DNA, 15 bp, Homo sapiens
atttcctgtaacaag

SEQ ID NO: 802500 - DNA, 15 bp, Homo sapiens
tttcctgtaacaaga

SEQ ID NO: 802501 - DNA, 15 bp, Homo sapiens
ttcctgtaacaagag

SEQ ID NO: 802502 - DNA, 15 bp, Homo sapiens
tcctgtaacaagagg

SEQ ID NO: 802503 - DNA, 15 bp, Homo sapiens
cctgtaacaagaggg

SEQ ID NO: 802504 - DNA, 15 bp, Homo sapiens
ctgtaacaagagggg

SEQ ID NO: 802505 - DNA, 15 bp, Homo sapiens
tgtaacaagagggga

SEQ ID NO: 802506 - DNA, 15 bp, Homo sapiens
gtaacaagaggggat

SEQ ID NO: 802507 - DNA, 15 bp, Homo sapiens
taacaagaggggatc

SEQ ID NO: 802508 - DNA, 15 bp, Homo sapiens
aacaagaggggatca

SEQ ID NO: 802509 - DNA, 15 bp, Homo sapiens
acaagaggggatcaa

SEQ ID NO: 802510 - DNA, 15 bp, Homo sapiens
caagaggggatcaaa

SEQ ID NO: 802511 - DNA, 15 bp, Homo sapiens
aagaggggatcaaaa

SEQ ID NO: 802512 - DNA, 15 bp, Homo sapiens
agaggggatcaaaaa

SEQ ID NO: 802513 - DNA, 15 bp, Homo sapiens
gaggggatcaaaaag

SEQ ID NO: 802514 - DNA, 15 bp, Homo sapiens
aggggatcaaaaagg

SEQ ID NO: 802515 - DNA, 15 bp, Homo sapiens
ggggatcaaaaagga

SEQ ID NO: 802516 - DNA, 15 bp, Homo sapiens
gggatcaaaaaggaa

SEQ ID NO: 802517 - DNA, 15 bp, Homo sapiens
ggatcaaaaaggaaa

SEQ ID NO: 802518 - DNA, 15 bp, Homo sapiens
gatcaaaaaggaaaa

SEQ ID NO: 802519 - DNA, 15 bp, Homo sapiens
atcaaaaaggaaaat

SEQ ID NO: 802520 - DNA, 15 bp, Homo sapiens
tcaaaaaggaaaatt

SEQ ID NO: 802521 - DNA, 15 bp, Homo sapiens
caaaaaggaaaatta

SEQ ID NO: 802522 - DNA, 15 bp, Homo sapiens
aaaaaggaaaattat

SEQ ID NO: 802523 - DNA, 15 bp, Homo sapiens
aaaaggaaaattatt

SEQ ID NO: 802524 - DNA, 15 bp, Homo sapiens
aaaggaaaattattt

SEQ ID NO: 802525 - DNA, 15 bp, Homo sapiens
aaggaaaattatttg

SEQ ID NO: 802526 - DNA, 15 bp, Homo sapiens
aggaaaattatttgt

SEQ ID NO: 802527 - DNA, 15 bp, Homo sapiens
ggaaaattatttgtc

SEQ ID NO: 802528 - DNA, 15 bp, Homo sapiens
gaaaattatttgtcc

SEQ ID NO: 802529 - DNA, 15 bp, Homo sapiens
aaaattatttgtccc

SEQ ID NO: 802530 - DNA, 15 bp, Homo sapiens
aaattatttgtccct

SEQ ID NO: 802531 - DNA, 15 bp, Homo sapiens
aattatttgtccctg

SEQ ID NO: 802532 - DNA, 15 bp, Homo sapiens
attatttgtccctga

SEQ ID NO: 802533 - DNA, 15 bp, Homo sapiens
ttatttgtccctgat

SEQ ID NO: 802534 - DNA, 15 bp, Homo sapiens
tatttgtccctgatg

SEQ ID NO: 802535 - DNA, 15 bp, Homo sapiens
atttgtccctgatgt

SEQ ID NO: 802536 - DNA, 15 bp, Homo sapiens
tttgtccctgatgtg

SEQ ID NO: 802537 - DNA, 15 bp, Homo sapiens
ttgtccctgatgtgg

SEQ ID NO: 802538 - DNA, 15 bp, Homo sapiens
tgtccctgatgtggc

SEQ ID NO: 802539 - DNA, 15 bp, Homo sapiens
gtccctgatgtggcc

SEQ ID NO: 802540 - DNA, 15 bp, Homo sapiens
tccctgatgtggcct

SEQ ID NO: 802541 - DNA, 15 bp, Homo sapiens
ccctgatgtggcctc

SEQ ID NO: 802542 - DNA, 15 bp, Homo sapiens
cctgatgtggcctct

SEQ ID NO: 802543 - DNA, 15 bp, Homo sapiens
ctgatgtggcctctg

SEQ ID NO: 802544 - DNA, 15 bp, Homo sapiens
tgatgtggcctctga

SEQ ID NO: 802545 - DNA, 15 bp, Homo sapiens
gatgtggcctctgag

SEQ ID NO: 802546 - DNA, 15 bp, Homo sapiens
atgtggcctctgagg

SEQ ID NO: 802547 - DNA, 15 bp, Homo sapiens
tgtggcctctgaggg

SEQ ID NO: 802548 - DNA, 15 bp, Homo sapiens
gtggcctctgagggc

SEQ ID NO: 802549 - DNA, 15 bp, Homo sapiens
tggcctctgagggca

SEQ ID NO: 802550 - DNA, 15 bp, Homo sapiens
ggcctctgagggcag

SEQ ID NO: 802551 - DNA, 15 bp, Homo sapiens
gcctctgagggcagt

SEQ ID NO: 802552 - DNA, 15 bp, Homo sapiens
cctctgagggcagtg

SEQ ID NO: 802553 - DNA, 15 bp, Homo sapiens
ctctgagggcagtga

SEQ ID NO: 802554 - DNA, 15 bp, Homo sapiens
tctgagggcagtgaa

SEQ ID NO: 802555 - DNA, 15 bp, Homo sapiens
ctgagggcagtgaaa

SEQ ID NO: 802556 - DNA, 15 bp, Homo sapiens
tgagggcagtgaaaa

SEQ ID NO: 802557 - DNA, 15 bp, Homo sapiens
gagggcagtgaaaat

SEQ ID NO: 802558 - DNA, 15 bp, Homo sapiens
agggcagtgaaaatc

SEQ ID NO: 802559 - DNA, 15 bp, Homo sapiens
gggcagtgaaaatca

SEQ ID NO: 802560 - DNA, 15 bp, Homo sapiens
ggcagtgaaaatcac

SEQ ID NO: 802561 - DNA, 15 bp, Homo sapiens
gcagtgaaaatcact

SEQ ID NO: 802562 - DNA, 15 bp, Homo sapiens
cagtgaaaatcactg

SEQ ID NO: 802563 - DNA, 15 bp, Homo sapiens
agtgaaaatcactgg

SEQ ID NO: 802564 - DNA, 15 bp, Homo sapiens
gtgaaaatcactgga

SEQ ID NO: 802565 - DNA, 15 bp, Homo sapiens
tgaaaatcactggat

SEQ ID NO: 802566 - DNA, 15 bp, Homo sapiens
gaaaatcactggatg

SEQ ID NO: 802567 - DNA, 15 bp, Homo sapiens
aaaatcactggatga

SEQ ID NO: 802568 - DNA, 15 bp, Homo sapiens
aaatcactggatgaa

SEQ ID NO: 802569 - DNA, 15 bp, Homo sapiens
aatcactggatgaat

SEQ ID NO: 802570 - DNA, 15 bp, Homo sapiens
atcactggatgaatg

SEQ ID NO: 802571 - DNA, 15 bp, Homo sapiens
tcactggatgaatgg

SEQ ID NO: 802572 - DNA, 15 bp, Homo sapiens
cactggatgaatggt

SEQ ID NO: 802573 - DNA, 15 bp, Homo sapiens
actggatgaatggtt

SEQ ID NO: 802574 - DNA, 15 bp, Homo sapiens
ctggatgaatggtta

SEQ ID NO: 802575 - DNA, 15 bp, Homo sapiens
tggatgaatggttag

SEQ ID NO: 802576 - DNA, 15 bp, Homo sapiens
ggatgaatggttaga

SEQ ID NO: 802577 - DNA, 15 bp, Homo sapiens
gatgaatggttagat

SEQ ID NO: 802578 - DNA, 15 bp, Homo sapiens
atgaatggttagatt

SEQ ID NO: 802579 - DNA, 15 bp, Homo sapiens
tgaatggttagattc

SEQ ID NO: 802580 - DNA, 15 bp, Homo sapiens
gaatggttagattca

SEQ ID NO: 802581 - DNA, 15 bp, Homo sapiens
aatggttagattcat

SEQ ID NO: 802582 - DNA, 15 bp, Homo sapiens
atggttagattcatc

SEQ ID NO: 802583 - DNA, 15 bp, Homo sapiens
tggttagattcatca

SEQ ID NO: 802584 - DNA, 15 bp, Homo sapiens
ggttagattcatcag

SEQ ID NO: 802585 - DNA, 15 bp, Homo sapiens
gttagattcatcagt

SEQ ID NO: 802586 - DNA, 15 bp, Homo sapiens
ttagattcatcagtg

SEQ ID NO: 802587 - DNA, 15 bp, Homo sapiens
tagattcatcagtgg

SEQ ID NO: 802588 - DNA, 15 bp, Homo sapiens
agattcatcagtggc

SEQ ID NO: 802589 - DNA, 15 bp, Homo sapiens
gattcatcagtggct

SEQ ID NO: 802590 - DNA, 15 bp, Homo sapiens
attcatcagtggctt

SEQ ID NO: 802591 - DNA, 15 bp, Homo sapiens
ttcatcagtggcttt

SEQ ID NO: 802592 - DNA, 15 bp, Homo sapiens
tcatcagtggctttt

SEQ ID NO: 802593 - DNA, 15 bp, Homo sapiens
catcagtggcttttg

SEQ ID NO: 802594 - DNA, 15 bp, Homo sapiens
atcagtggcttttgg

SEQ ID NO: 802595 - DNA, 15 bp, Homo sapiens
tcagtggcttttggc

SEQ ID NO: 802596 - DNA, 15 bp, Homo sapiens
cagtggcttttggcc

SEQ ID NO: 802597 - DNA, 15 bp, Homo sapiens
agtggcttttggcct

SEQ ID NO: 802598 - DNA, 15 bp, Homo sapiens
gtggcttttggcctt

SEQ ID NO: 802599 - DNA, 15 bp, Homo sapiens
tggcttttggcctta

SEQ ID NO: 802600 - DNA, 15 bp, Homo sapiens
ggcttttggccttaa

SEQ ID NO: 802601 - DNA, 15 bp, Homo sapiens
gcttttggccttaag

SEQ ID NO: 802602 - DNA, 15 bp, Homo sapiens
cttttggccttaaga

SEQ ID NO: 802603 - DNA, 15 bp, Homo sapiens
ttttggccttaagac

SEQ ID NO: 802604 - DNA, 15 bp, Homo sapiens
tttggccttaagaca

SEQ ID NO: 802605 - DNA, 15 bp, Homo sapiens
ttggccttaagacac

SEQ ID NO: 802606 - DNA, 15 bp, Homo sapiens
tggccttaagacact

SEQ ID NO: 802607 - DNA, 15 bp, Homo sapiens
ggccttaagacactg

SEQ ID NO: 802608 - DNA, 15 bp, Homo sapiens
gccttaagacactgt

SEQ ID NO: 802609 - DNA, 15 bp, Homo sapiens
ccttaagacactgta

SEQ ID NO: 802610 - DNA, 15 bp, Homo sapiens
cttaagacactgtac

SEQ ID NO: 802611 - DNA, 15 bp, Homo sapiens
ttaagacactgtaca

SEQ ID NO: 802612 - DNA, 15 bp, Homo sapiens
taagacactgtacac

SEQ ID NO: 802613 - DNA, 15 bp, Homo sapiens
aagacactgtacacc

SEQ ID NO: 802614 - DNA, 15 bp, Homo sapiens
agacactgtacaccc

SEQ ID NO: 802615 - DNA, 15 bp, Homo sapiens
gacactgtacaccca

SEQ ID NO: 802616 - DNA, 15 bp, Homo sapiens
acactgtacacccaa

SEQ ID NO: 802617 - DNA, 15 bp, Homo sapiens
cactgtacacccaat

SEQ ID NO: 802618 - DNA, 15 bp, Homo sapiens
actgtacacccaata

SEQ ID NO: 802619 - DNA, 15 bp, Homo sapiens
ctgtacacccaatag

SEQ ID NO: 802620 - DNA, 15 bp, Homo sapiens
tgtacacccaataga

SEQ ID NO: 802621 - DNA, 15 bp, Homo sapiens
gtacacccaatagac

SEQ ID NO: 802622 - DNA, 15 bp, Homo sapiens
tacacccaatagaca

SEQ ID NO: 802623 - DNA, 15 bp, Homo sapiens
acacccaatagacac

SEQ ID NO: 802624 - DNA, 15 bp, Homo sapiens
cacccaatagacaca

SEQ ID NO: 802625 - DNA, 15 bp, Homo sapiens
acccaatagacacac

SEQ ID NO: 802626 - DNA, 15 bp, Homo sapiens
cccaatagacacaca

SEQ ID NO: 802627 - DNA, 15 bp, Homo sapiens
ccaatagacacacac

SEQ ID NO: 802628 - DNA, 15 bp, Homo sapiens
caatagacacacact

SEQ ID NO: 802629 - DNA, 15 bp, Homo sapiens
aatagacacacactc

SEQ ID NO: 802630 - DNA, 15 bp, Homo sapiens
atagacacacactca

SEQ ID NO: 802631 - DNA, 15 bp, Homo sapiens
tagacacacactcat

SEQ ID NO: 802632 - DNA, 15 bp, Homo sapiens
agacacacactcatg

SEQ ID NO: 802633 - DNA, 15 bp, Homo sapiens
gacacacactcatgc

SEQ ID NO: 802634 - DNA, 15 bp, Homo sapiens
acacacactcatgcc

SEQ ID NO: 802635 - DNA, 15 bp, Homo sapiens
cacacactcatgccc

SEQ ID NO: 802636 - DNA, 15 bp, Homo sapiens
acacactcatgccct

SEQ ID NO: 802637 - DNA, 15 bp, Homo sapiens
cacactcatgccctg

SEQ ID NO: 802638 - DNA, 15 bp, Homo sapiens
acactcatgccctgc

SEQ ID NO: 802639 - DNA, 15 bp, Homo sapiens
cactcatgccctgca

SEQ ID NO: 802640 - DNA, 15 bp, Homo sapiens
actcatgccctgcaa

SEQ ID NO: 802641 - DNA, 15 bp, Homo sapiens
ctcatgccctgcaag

SEQ ID NO: 802642 - DNA, 15 bp, Homo sapiens
tcatgccctgcaagt

SEQ ID NO: 802643 - DNA, 15 bp, Homo sapiens
catgccctgcaagta

SEQ ID NO: 802644 - DNA, 15 bp, Homo sapiens
atgccctgcaagtac

SEQ ID NO: 802645 - DNA, 15 bp, Homo sapiens
tgccctgcaagtaca

SEQ ID NO: 802646 - DNA, 15 bp, Homo sapiens
gccctgcaagtacaa

SEQ ID NO: 802647 - DNA, 15 bp, Homo sapiens
ccctgcaagtacaag

SEQ ID NO: 802648 - DNA, 15 bp, Homo sapiens
cctgcaagtacaagc

SEQ ID NO: 802649 - DNA, 15 bp, Homo sapiens
ctgcaagtacaagcc

SEQ ID NO: 802650 - DNA, 15 bp, Homo sapiens
tgcaagtacaagcct

SEQ ID NO: 802651 - DNA, 15 bp, Homo sapiens
gcaagtacaagccta

SEQ ID NO: 802652 - DNA, 15 bp, Homo sapiens
caagtacaagcctaa

SEQ ID NO: 802653 - DNA, 15 bp, Homo sapiens
aagtacaagcctaat

SEQ ID NO: 802654 - DNA, 15 bp, Homo sapiens
agtacaagcctaatt

SEQ ID NO: 802655 - DNA, 15 bp, Homo sapiens
gtacaagcctaattt

SEQ ID NO: 802656 - DNA, 15 bp, Homo sapiens
tacaagcctaatttt

SEQ ID NO: 802657 - DNA, 15 bp, Homo sapiens
acaagcctaattttc

SEQ ID NO: 802658 - DNA, 15 bp, Homo sapiens
caagcctaattttcc

SEQ ID NO: 802659 - DNA, 15 bp, Homo sapiens
aagcctaattttcct

SEQ ID NO: 802660 - DNA, 15 bp, Homo sapiens
agcctaattttcctg

SEQ ID NO: 802661 - DNA, 15 bp, Homo sapiens
gcctaattttcctgt

SEQ ID NO: 802662 - DNA, 15 bp, Homo sapiens
cctaattttcctgta

SEQ ID NO: 802663 - DNA, 15 bp, Homo sapiens
ctaattttcctgtac

SEQ ID NO: 802664 - DNA, 15 bp, Homo sapiens
taattttcctgtact

SEQ ID NO: 802665 - DNA, 15 bp, Homo sapiens
aattttcctgtactc

SEQ ID NO: 802666 - DNA, 15 bp, Homo sapiens
attttcctgtactca

SEQ ID NO: 802667 - DNA, 15 bp, Homo sapiens
ttttcctgtactcac

SEQ ID NO: 802668 - DNA, 15 bp, Homo sapiens
tttcctgtactcacc

SEQ ID NO: 802669 - DNA, 15 bp, Homo sapiens
ttcctgtactcacct

SEQ ID NO: 802670 - DNA, 15 bp, Homo sapiens
tcctgtactcacctt

SEQ ID NO: 802671 - DNA, 15 bp, Homo sapiens
cctgtactcaccttt

SEQ ID NO: 802672 - DNA, 15 bp, Homo sapiens
ctgtactcaccttta

SEQ ID NO: 802673 - DNA, 15 bp, Homo sapiens
tgtactcacctttac

SEQ ID NO: 802674 - DNA, 15 bp, Homo sapiens
gtactcacctttact

SEQ ID NO: 802675 - DNA, 15 bp, Homo sapiens
tactcacctttacta

SEQ ID NO: 802676 - DNA, 15 bp, Homo sapiens
actcacctttactac

SEQ ID NO: 802677 - DNA, 15 bp, Homo sapiens
ctcacctttactaca

SEQ ID NO: 802678 - DNA, 15 bp, Homo sapiens
tcacctttactacat

SEQ ID NO: 802679 - DNA, 15 bp, Homo sapiens
cacctttactacatg

SEQ ID NO: 802680 - DNA, 15 bp, Homo sapiens
acctttactacatgt

SEQ ID NO: 802681 - DNA, 15 bp, Homo sapiens
cctttactacatgtg

SEQ ID NO: 802682 - DNA, 15 bp, Homo sapiens
ctttactacatgtga

SEQ ID NO: 802683 - DNA, 15 bp, Homo sapiens
tttactacatgtgat

SEQ ID NO: 802684 - DNA, 15 bp, Homo sapiens
ttactacatgtgatg

SEQ ID NO: 802685 - DNA, 15 bp, Homo sapiens
tactacatgtgatgt

SEQ ID NO: 802686 - DNA, 15 bp, Homo sapiens
actacatgtgatgta

SEQ ID NO: 802687 - DNA, 15 bp, Homo sapiens
ctacatgtgatgtac

SEQ ID NO: 802688 - DNA, 15 bp, Homo sapiens
tacatgtgatgtact

SEQ ID NO: 802689 - DNA, 15 bp, Homo sapiens
acatgtgatgtactt

SEQ ID NO: 802690 - DNA, 15 bp, Homo sapiens
catgtgatgtacttt

SEQ ID NO: 802691 - DNA, 15 bp, Homo sapiens
atgtgatgtactttg

SEQ ID NO: 802692 - DNA, 15 bp, Homo sapiens
tgtgatgtactttga

SEQ ID NO: 802693 - DNA, 15 bp, Homo sapiens
gtgatgtactttgat

SEQ ID NO: 802694 - DNA, 15 bp, Homo sapiens
tgatgtactttgata

SEQ ID NO: 802695 - DNA, 15 bp, Homo sapiens
gatgtactttgatag

SEQ ID NO: 802696 - DNA, 15 bp, Homo sapiens
atgtactttgatagt

SEQ ID NO: 802697 - DNA, 15 bp, Homo sapiens
tgtactttgatagtt

SEQ ID NO: 802698 - DNA, 15 bp, Homo sapiens
gtactttgatagttt

SEQ ID NO: 802699 - DNA, 15 bp, Homo sapiens
tactttgatagtttc

SEQ ID NO: 802700 - DNA, 15 bp, Homo sapiens
actttgatagtttct

SEQ ID NO: 802701 - DNA, 15 bp, Homo sapiens
ctttgatagtttcta

SEQ ID NO: 802702 - DNA, 15 bp, Homo sapiens
tttgatagtttctat

SEQ ID NO: 802703 - DNA, 15 bp, Homo sapiens
ttgatagtttctatt

SEQ ID NO: 802704 - DNA, 15 bp, Homo sapiens
tgatagtttctattc

SEQ ID NO: 802705 - DNA, 15 bp, Homo sapiens
gatagtttctattct

SEQ ID NO: 802706 - DNA, 15 bp, Homo sapiens
atagtttctattctg

SEQ ID NO: 802707 - DNA, 15 bp, Homo sapiens
tagtttctattctgg

SEQ ID NO: 802708 - DNA, 15 bp, Homo sapiens
agtttctattctgga

SEQ ID NO: 802709 - DNA, 15 bp, Homo sapiens
gtttctattctggaa

SEQ ID NO: 802710 - DNA, 15 bp, Homo sapiens
tttctattctggaat

SEQ ID NO: 802711 - DNA, 15 bp, Homo sapiens
ttctattctggaata

SEQ ID NO: 802712 - DNA, 15 bp, Homo sapiens
tctattctggaatat

SEQ ID NO: 802713 - DNA, 15 bp, Homo sapiens
ctattctggaatatt

SEQ ID NO: 802714 - DNA, 15 bp, Homo sapiens
tattctggaatattc

SEQ ID NO: 802715 - DNA, 15 bp, Homo sapiens
attctggaatattct

SEQ ID NO: 802716 - DNA, 15 bp, Homo sapiens
ttctggaatattcta

SEQ ID NO: 802717 - DNA, 15 bp, Homo sapiens
tctggaatattctat

SEQ ID NO: 802718 - DNA, 15 bp, Homo sapiens
ctggaatattctatt

SEQ ID NO: 802719 - DNA, 15 bp, Homo sapiens
tggaatattctatta

SEQ ID NO: 802720 - DNA, 15 bp, Homo sapiens
ggaatattctattat

SEQ ID NO: 802721 - DNA, 15 bp, Homo sapiens
gaatattctattatt

SEQ ID NO: 802722 - DNA, 15 bp, Homo sapiens
aatattctattattt

SEQ ID NO: 802723 - DNA, 15 bp, Homo sapiens
atattctattatttc

SEQ ID NO: 802724 - DNA, 15 bp, Homo sapiens
tattctattatttcc

SEQ ID NO: 802725 - DNA, 15 bp, Homo sapiens
attctattatttcct

SEQ ID NO: 802726 - DNA, 15 bp, Homo sapiens
ttctattatttcctg

SEQ ID NO: 802727 - DNA, 15 bp, Homo sapiens
tctattatttcctgc

SEQ ID NO: 802728 - DNA, 15 bp, Homo sapiens
ctattatttcctgct

SEQ ID NO: 802729 - DNA, 15 bp, Homo sapiens
tattatttcctgcta

SEQ ID NO: 802730 - DNA, 15 bp, Homo sapiens
attatttcctgctag

SEQ ID NO: 802731 - DNA, 15 bp, Homo sapiens
ttatttcctgctagt

SEQ ID NO: 802732 - DNA, 15 bp, Homo sapiens
tatttcctgctagtt

SEQ ID NO: 802733 - DNA, 15 bp, Homo sapiens
atttcctgctagttc

SEQ ID NO: 802734 - DNA, 15 bp, Homo sapiens
tttcctgctagttcc

SEQ ID NO: 802735 - DNA, 15 bp, Homo sapiens
ttcctgctagttcca

SEQ ID NO: 802736 - DNA, 15 bp, Homo sapiens
tcctgctagttccat

SEQ ID NO: 802737 - DNA, 15 bp, Homo sapiens
cctgctagttccatc

SEQ ID NO: 802738 - DNA, 15 bp, Homo sapiens
ctgctagttccatct

SEQ ID NO: 802739 - DNA, 15 bp, Homo sapiens
tgctagttccatctc

SEQ ID NO: 802740 - DNA, 15 bp, Homo sapiens
gctagttccatctca

SEQ ID NO: 802741 - DNA, 15 bp, Homo sapiens
ctagttccatctcat

SEQ ID NO: 802742 - DNA, 15 bp, Homo sapiens
tagttccatctcatt

SEQ ID NO: 802743 - DNA, 15 bp, Homo sapiens
agttccatctcattc

SEQ ID NO: 802744 - DNA, 15 bp, Homo sapiens
gttccatctcattcc

SEQ ID NO: 802745 - DNA, 15 bp, Homo sapiens
ttccatctcattcca

SEQ ID NO: 802746 - DNA, 15 bp, Homo sapiens
tccatctcattccat

SEQ ID NO: 802747 - DNA, 15 bp, Homo sapiens
ccatctcattccatc

SEQ ID NO: 802748 - DNA, 15 bp, Homo sapiens
catctcattccatcc

SEQ ID NO: 802749 - DNA, 15 bp, Homo sapiens
atctcattccatccc

SEQ ID NO: 802750 - DNA, 15 bp, Homo sapiens
tctcattccatccca

SEQ ID NO: 802751 - DNA, 15 bp, Homo sapiens
ctcattccatcccac

SEQ ID NO: 802752 - DNA, 15 bp, Homo sapiens
tcattccatcccact

SEQ ID NO: 802753 - DNA, 15 bp, Homo sapiens
cattccatcccactc

SEQ ID NO: 802754 - DNA, 15 bp, Homo sapiens
attccatcccactcc

SEQ ID NO: 802755 - DNA, 15 bp, Homo sapiens
ttccatcccactcca

SEQ ID NO: 802756 - DNA, 15 bp, Homo sapiens
tccatcccactccac

SEQ ID NO: 802757 - DNA, 15 bp, Homo sapiens
ccatcccactccact

SEQ ID NO: 802758 - DNA, 15 bp, Homo sapiens
catcccactccactc

SEQ ID NO: 802759 - DNA, 15 bp, Homo sapiens
atcccactccactcc

SEQ ID NO: 802760 - DNA, 15 bp, Homo sapiens
tcccactccactcca

SEQ ID NO: 802761 - DNA, 15 bp, Homo sapiens
cccactccactccac

SEQ ID NO: 802762 - DNA, 15 bp, Homo sapiens
ccactccactccact

SEQ ID NO: 802763 - DNA, 15 bp, Homo sapiens
cactccactccactt

SEQ ID NO: 802764 - DNA, 15 bp, Homo sapiens
actccactccacttc

SEQ ID NO: 802765 - DNA, 15 bp, Homo sapiens
ctccactccacttca

SEQ ID NO: 802766 - DNA, 15 bp, Homo sapiens
tccactccacttcat

SEQ ID NO: 802767 - DNA, 15 bp, Homo sapiens
ccactccacttcatt

SEQ ID NO: 802768 - DNA, 15 bp, Homo sapiens
cactccacttcattt

SEQ ID NO: 802769 - DNA, 15 bp, Homo sapiens
actccacttcatttc

SEQ ID NO: 802770 - DNA, 15 bp, Homo sapiens
ctccacttcatttca

SEQ ID NO: 802771 - DNA, 15 bp, Homo sapiens
tccacttcatttcat

SEQ ID NO: 802772 - DNA, 15 bp, Homo sapiens
ccacttcatttcatt

SEQ ID NO: 802773 - DNA, 15 bp, Homo sapiens
cacttcatttcattc

SEQ ID NO: 802774 - DNA, 15 bp, Homo sapiens
acttcatttcattcc

SEQ ID NO: 802775 - DNA, 15 bp, Homo sapiens
cttcatttcattcca

SEQ ID NO: 802776 - DNA, 15 bp, Homo sapiens
ttcatttcattccat

SEQ ID NO: 802777 - DNA, 15 bp, Homo sapiens
tcatttcattccatt

SEQ ID NO: 802778 - DNA, 15 bp, Homo sapiens
catttcattccattc

SEQ ID NO: 802779 - DNA, 15 bp, Homo sapiens
atttcattccattct

SEQ ID NO: 802780 - DNA, 15 bp, Homo sapiens
tttcattccattctc

SEQ ID NO: 802781 - DNA, 15 bp, Homo sapiens
ttcattccattctca

SEQ ID NO: 802782 - DNA, 15 bp, Homo sapiens
tcattccattctcat

SEQ ID NO: 802783 - DNA, 15 bp, Homo sapiens
cattccattctcatt

SEQ ID NO: 802784 - DNA, 15 bp, Homo sapiens
attccattctcattt

SEQ ID NO: 802785 - DNA, 15 bp, Homo sapiens
ttccattctcatttc

SEQ ID NO: 802786 - DNA, 15 bp, Homo sapiens
tccattctcatttca

SEQ ID NO: 802787 - DNA, 15 bp, Homo sapiens
ccattctcatttcat

SEQ ID NO: 802788 - DNA, 15 bp, Homo sapiens
cattctcatttcatt

SEQ ID NO: 802789 - DNA, 15 bp, Homo sapiens
attctcatttcattt

SEQ ID NO: 802790 - DNA, 15 bp, Homo sapiens
ttctcatttcattta

SEQ ID NO: 802791 - DNA, 15 bp, Homo sapiens
tctcatttcatttat

SEQ ID NO: 802792 - DNA, 15 bp, Homo sapiens
ctcatttcatttata

SEQ ID NO: 802793 - DNA, 15 bp, Homo sapiens
tcatttcatttataa

SEQ ID NO: 802794 - DNA, 15 bp, Homo sapiens
catttcatttataaa

SEQ ID NO: 802795 - DNA, 15 bp, Homo sapiens
atttcatttataaaa

SEQ ID NO: 802796 - DNA, 15 bp, Homo sapiens
tttcatttataaaat

SEQ ID NO: 802797 - DNA, 15 bp, Homo sapiens
ttcatttataaaatg

SEQ ID NO: 802798 - DNA, 15 bp, Homo sapiens
tcatttataaaatga

SEQ ID NO: 802799 - DNA, 15 bp, Homo sapiens
catttataaaatgac

SEQ ID NO: 802800 - DNA, 15 bp, Homo sapiens
atttataaaatgacg

SEQ ID NO: 802801 - DNA, 15 bp, Homo sapiens
tttataaaatgacgg

SEQ ID NO: 802802 - DNA, 15 bp, Homo sapiens
ttataaaatgacggt

SEQ ID NO: 802803 - DNA, 15 bp, Homo sapiens
tataaaatgacggtc

SEQ ID NO: 802804 - DNA, 15 bp, Homo sapiens
ataaaatgacggtca

SEQ ID NO: 802805 - DNA, 15 bp, Homo sapiens
taaaatgacggtcag

SEQ ID NO: 802806 - DNA, 15 bp, Homo sapiens
aaaatgacggtcagg

SEQ ID NO: 802807 - DNA, 15 bp, Homo sapiens
aaatgacggtcagga

SEQ ID NO: 802808 - DNA, 15 bp, Homo sapiens
aatgacggtcaggac

SEQ ID NO: 802809 - DNA, 15 bp, Homo sapiens
atgacggtcaggact

SEQ ID NO: 802810 - DNA, 15 bp, Homo sapiens
tgacggtcaggactc

SEQ ID NO: 802811 - DNA, 15 bp, Homo sapiens
gacggtcaggactca

SEQ ID NO: 802812 - DNA, 15 bp, Homo sapiens
acggtcaggactcat

SEQ ID NO: 802813 - DNA, 15 bp, Homo sapiens
cggtcaggactcatg

SEQ ID NO: 802814 - DNA, 15 bp, Homo sapiens
ggtcaggactcatga

SEQ ID NO: 802815 - DNA, 15 bp, Homo sapiens
gtcaggactcatgaa

SEQ ID NO: 802816 - DNA, 15 bp, Homo sapiens
tcaggactcatgaaa

SEQ ID NO: 802817 - DNA, 15 bp, Homo sapiens
caggactcatgaaac

SEQ ID NO: 802818 - DNA, 15 bp, Homo sapiens
aggactcatgaaact

SEQ ID NO: 802819 - DNA, 15 bp, Homo sapiens
ggactcatgaaactg

SEQ ID NO: 802820 - DNA, 15 bp, Homo sapiens
gactcatgaaactga

SEQ ID NO: 802821 - DNA, 15 bp, Homo sapiens
actcatgaaactgat

SEQ ID NO: 802822 - DNA, 15 bp, Homo sapiens
ctcatgaaactgatc

SEQ ID NO: 802823 - DNA, 15 bp, Homo sapiens
tcatgaaactgatct

SEQ ID NO: 802824 - DNA, 15 bp, Homo sapiens
catgaaactgatctc

SEQ ID NO: 802825 - DNA, 15 bp, Homo sapiens
atgaaactgatctca

SEQ ID NO: 802826 - DNA, 15 bp, Homo sapiens
tgaaactgatctcat

SEQ ID NO: 802827 - DNA, 15 bp, Homo sapiens
gaaactgatctcatg

SEQ ID NO: 802828 - DNA, 15 bp, Homo sapiens
aaactgatctcatgg

SEQ ID NO: 802829 - DNA, 15 bp, Homo sapiens
aactgatctcatggt

SEQ ID NO: 802830 - DNA, 15 bp, Homo sapiens
actgatctcatggtc

SEQ ID NO: 802831 - DNA, 15 bp, Homo sapiens
ctgatctcatggtcc

SEQ ID NO: 802832 - DNA, 15 bp, Homo sapiens
tgatctcatggtcca

SEQ ID NO: 802833 - DNA, 15 bp, Homo sapiens
gatctcatggtccac

SEQ ID NO: 802834 - DNA, 15 bp, Homo sapiens
atctcatggtccact

SEQ ID NO: 802835 - DNA, 15 bp, Homo sapiens
tctcatggtccacta

SEQ ID NO: 802836 - DNA, 15 bp, Homo sapiens
ctcatggtccactaa

SEQ ID NO: 802837 - DNA, 15 bp, Homo sapiens
tcatggtccactaat

SEQ ID NO: 802838 - DNA, 15 bp, Homo sapiens
catggtccactaata

SEQ ID NO: 802839 - DNA, 15 bp, Homo sapiens
atggtccactaatag

SEQ ID NO: 802840 - DNA, 15 bp, Homo sapiens
tggtccactaatagg

SEQ ID NO: 802841 - DNA, 15 bp, Homo sapiens
ggtccactaataggt

SEQ ID NO: 802842 - DNA, 15 bp, Homo sapiens
gtccactaataggtt

SEQ ID NO: 802843 - DNA, 15 bp, Homo sapiens
tccactaataggttg

SEQ ID NO: 802844 - DNA, 15 bp, Homo sapiens
ccactaataggttgc

SEQ ID NO: 802845 - DNA, 15 bp, Homo sapiens
cactaataggttgca

SEQ ID NO: 802846 - DNA, 15 bp, Homo sapiens
actaataggttgcaa

SEQ ID NO: 802847 - DNA, 15 bp, Homo sapiens
ctaataggttgcaac

SEQ ID NO: 802848 - DNA, 15 bp, Homo sapiens
taataggttgcaacc

SEQ ID NO: 802849 - DNA, 15 bp, Homo sapiens
aataggttgcaacct

SEQ ID NO: 802850 - DNA, 15 bp, Homo sapiens
ataggttgcaacctg

SEQ ID NO: 802851 - DNA, 15 bp, Homo sapiens
taggttgcaacctgt

SEQ ID NO: 802852 - DNA, 15 bp, Homo sapiens
aggttgcaacctgtg

SEQ ID NO: 802853 - DNA, 15 bp, Homo sapiens
ggttgcaacctgtga

SEQ ID NO: 802854 - DNA, 15 bp, Homo sapiens
gttgcaacctgtgat

SEQ ID NO: 802855 - DNA, 15 bp, Homo sapiens
ttgcaacctgtgatt

SEQ ID NO: 802856 - DNA, 15 bp, Homo sapiens
tgcaacctgtgattt

SEQ ID NO: 802857 - DNA, 15 bp, Homo sapiens
gcaacctgtgatttt

SEQ ID NO: 802858 - DNA, 15 bp, Homo sapiens
caacctgtgatttta

SEQ ID NO: 802859 - DNA, 15 bp, Homo sapiens
aacctgtgattttaa

SEQ ID NO: 802860 - DNA, 15 bp, Homo sapiens
acctgtgattttaaa

SEQ ID NO: 802861 - DNA, 15 bp, Homo sapiens
cctgtgattttaaaa

SEQ ID NO: 802862 - DNA, 15 bp, Homo sapiens
ctgtgattttaaaaa

SEQ ID NO: 802863 - DNA, 15 bp, Homo sapiens
tgtgattttaaaaat

SEQ ID NO: 802864 - DNA, 15 bp, Homo sapiens
gtgattttaaaaata

SEQ ID NO: 802865 - DNA, 15 bp, Homo sapiens
tgattttaaaaatac

SEQ ID NO: 802866 - DNA, 15 bp, Homo sapiens
gattttaaaaatacc

SEQ ID NO: 802867 - DNA, 15 bp, Homo sapiens
attttaaaaatacca

SEQ ID NO: 802868 - DNA, 15 bp, Homo sapiens
ttttaaaaataccag

SEQ ID NO: 802869 - DNA, 15 bp, Homo sapiens
tttaaaaataccaga

SEQ ID NO: 802870 - DNA, 15 bp, Homo sapiens
ttaaaaataccagat

SEQ ID NO: 802871 - DNA, 15 bp, Homo sapiens
taaaaataccagatt

SEQ ID NO: 802872 - DNA, 15 bp, Homo sapiens
aaaaataccagattg

SEQ ID NO: 802873 - DNA, 15 bp, Homo sapiens
aaaataccagattgg

SEQ ID NO: 802874 - DNA, 15 bp, Homo sapiens
aaataccagattggg

SEQ ID NO: 802875 - DNA, 15 bp, Homo sapiens
aataccagattgggt

SEQ ID NO: 802876 - DNA, 15 bp, Homo sapiens
ataccagattgggtt

SEQ ID NO: 802877 - DNA, 15 bp, Homo sapiens
taccagattgggtta

SEQ ID NO: 802878 - DNA, 15 bp, Homo sapiens
accagattgggttat

SEQ ID NO: 802879 - DNA, 15 bp, Homo sapiens
ccagattgggttata

SEQ ID NO: 802880 - DNA, 15 bp, Homo sapiens
cagattgggttatat

SEQ ID NO: 802881 - DNA, 15 bp, Homo sapiens
agattgggttatatt

SEQ ID NO: 802882 - DNA, 15 bp, Homo sapiens
gattgggttatattc

SEQ ID NO: 802883 - DNA, 15 bp, Homo sapiens
attgggttatattca

SEQ ID NO: 802884 - DNA, 15 bp, Homo sapiens
ttgggttatattcaa

SEQ ID NO: 802885 - DNA, 15 bp, Homo sapiens
tgggttatattcaaa

SEQ ID NO: 802886 - DNA, 15 bp, Homo sapiens
gggttatattcaaat

SEQ ID NO: 802887 - DNA, 15 bp, Homo sapiens
ggttatattcaaatt

SEQ ID NO: 802888 - DNA, 15 bp, Homo sapiens
gttatattcaaattc

SEQ ID NO: 802889 - DNA, 15 bp, Homo sapiens
ttatattcaaattcc

SEQ ID NO: 802890 - DNA, 15 bp, Homo sapiens
tatattcaaattccc

SEQ ID NO: 802891 - DNA, 15 bp, Homo sapiens
atattcaaattccct

SEQ ID NO: 802892 - DNA, 15 bp, Homo sapiens
tattcaaattccctt

SEQ ID NO: 802893 - DNA, 15 bp, Homo sapiens
attcaaattcccttt

SEQ ID NO: 802894 - DNA, 15 bp, Homo sapiens
ttcaaattcccttta

SEQ ID NO: 802895 - DNA, 15 bp, Homo sapiens
tcaaattccctttaa

SEQ ID NO: 802896 - DNA, 15 bp, Homo sapiens
caaattccctttaac

SEQ ID NO: 802897 - DNA, 15 bp, Homo sapiens
aaattccctttaacc

SEQ ID NO: 802898 - DNA, 15 bp, Homo sapiens
aattccctttaaccc

SEQ ID NO: 802899 - DNA, 15 bp, Homo sapiens
attccctttaacccc

SEQ ID NO: 802900 - DNA, 15 bp, Homo sapiens
ttccctttaaccccc

SEQ ID NO: 802901 - DNA, 15 bp, Homo sapiens
tccctttaaccccca

SEQ ID NO: 802902 - DNA, 15 bp, Homo sapiens
ccctttaacccccaa

SEQ ID NO: 802903 - DNA, 15 bp, Homo sapiens
cctttaacccccaaa

SEQ ID NO: 802904 - DNA, 15 bp, Homo sapiens
ctttaacccccaaat

SEQ ID NO: 802905 - DNA, 15 bp, Homo sapiens
tttaacccccaaatc

SEQ ID NO: 802906 - DNA, 15 bp, Homo sapiens
ttaacccccaaatcc

SEQ ID NO: 802907 - DNA, 15 bp, Homo sapiens
taacccccaaatcct

SEQ ID NO: 802908 - DNA, 15 bp, Homo sapiens
aacccccaaatcctg

SEQ ID NO: 802909 - DNA, 15 bp, Homo sapiens
acccccaaatcctgt

SEQ ID NO: 802910 - DNA, 15 bp, Homo sapiens
cccccaaatcctgtg

SEQ ID NO: 802911 - DNA, 15 bp, Homo sapiens
ccccaaatcctgtga

SEQ ID NO: 802912 - DNA, 15 bp, Homo sapiens
cccaaatcctgtgag

SEQ ID NO: 802913 - DNA, 15 bp, Homo sapiens
ccaaatcctgtgagt

SEQ ID NO: 802914 - DNA, 15 bp, Homo sapiens
caaatcctgtgagtc

SEQ ID NO: 802915 - DNA, 15 bp, Homo sapiens
aaatcctgtgagtcc

SEQ ID NO: 802916 - DNA, 15 bp, Homo sapiens
aatcctgtgagtcca

SEQ ID NO: 802917 - DNA, 15 bp, Homo sapiens
atcctgtgagtccaa

SEQ ID NO: 802918 - DNA, 15 bp, Homo sapiens
tcctgtgagtccaat

SEQ ID NO: 802919 - DNA, 15 bp, Homo sapiens
cctgtgagtccaatg

SEQ ID NO: 802920 - DNA, 15 bp, Homo sapiens
ctgtgagtccaatgt

SEQ ID NO: 802921 - DNA, 15 bp, Homo sapiens
tgtgagtccaatgta

SEQ ID NO: 802922 - DNA, 15 bp, Homo sapiens
gtgagtccaatgtaa

SEQ ID NO: 802923 - DNA, 15 bp, Homo sapiens
tgagtccaatgtaaa

SEQ ID NO: 802924 - DNA, 15 bp, Homo sapiens
gagtccaatgtaaat

SEQ ID NO: 802925 - DNA, 15 bp, Homo sapiens
agtccaatgtaaatt

SEQ ID NO: 802926 - DNA, 15 bp, Homo sapiens
gtccaatgtaaattg

SEQ ID NO: 802927 - DNA, 15 bp, Homo sapiens
tccaatgtaaattgc

SEQ ID NO: 802928 - DNA, 15 bp, Homo sapiens
ccaatgtaaattgct

SEQ ID NO: 802929 - DNA, 15 bp, Homo sapiens
caatgtaaattgcta

SEQ ID NO: 802930 - DNA, 15 bp, Homo sapiens
aatgtaaattgctac

SEQ ID NO: 802931 - DNA, 15 bp, Homo sapiens
atgtaaattgctact

SEQ ID NO: 802932 - DNA, 15 bp, Homo sapiens
tgtaaattgctacta

SEQ ID NO: 802933 - DNA, 15 bp, Homo sapiens
gtaaattgctactac

SEQ ID NO: 802934 - DNA, 15 bp, Homo sapiens
taaattgctactaca

SEQ ID NO: 802935 - DNA, 15 bp, Homo sapiens
aaattgctactacag

SEQ ID NO: 802936 - DNA, 15 bp, Homo sapiens
aattgctactacagt

SEQ ID NO: 802937 - DNA, 15 bp, Homo sapiens
attgctactacagta

SEQ ID NO: 802938 - DNA, 15 bp, Homo sapiens
ttgctactacagtat

SEQ ID NO: 802939 - DNA, 15 bp, Homo sapiens
tgctactacagtatt

SEQ ID NO: 802940 - DNA, 15 bp, Homo sapiens
gctactacagtatta

SEQ ID NO: 802941 - DNA, 15 bp, Homo sapiens
ctactacagtattag

SEQ ID NO: 802942 - DNA, 15 bp, Homo sapiens
tactacagtattagg

SEQ ID NO: 802943 - DNA, 15 bp, Homo sapiens
actacagtattaggg

SEQ ID NO: 802944 - DNA, 15 bp, Homo sapiens
ctacagtattagggt

SEQ ID NO: 802945 - DNA, 15 bp, Homo sapiens
tacagtattagggta

SEQ ID NO: 802946 - DNA, 15 bp, Homo sapiens
acagtattagggtac

SEQ ID NO: 802947 - DNA, 15 bp, Homo sapiens
cagtattagggtaca

SEQ ID NO: 802948 - DNA, 15 bp, Homo sapiens
agtattagggtacaa

SEQ ID NO: 802949 - DNA, 15 bp, Homo sapiens
gtattagggtacaaa

SEQ ID NO: 802950 - DNA, 15 bp, Homo sapiens
tattagggtacaaaa

SEQ ID NO: 802951 - DNA, 15 bp, Homo sapiens
attagggtacaaaat

SEQ ID NO: 802952 - DNA, 15 bp, Homo sapiens
ttagggtacaaaatt

SEQ ID NO: 802953 - DNA, 15 bp, Homo sapiens
tagggtacaaaattc

SEQ ID NO: 802954 - DNA, 15 bp, Homo sapiens
agggtacaaaattct

SEQ ID NO: 802955 - DNA, 15 bp, Homo sapiens
gggtacaaaattctg

SEQ ID NO: 802956 - DNA, 15 bp, Homo sapiens
ggtacaaaattctgt

SEQ ID NO: 802957 - DNA, 15 bp, Homo sapiens
gtacaaaattctgtg

SEQ ID NO: 802958 - DNA, 15 bp, Homo sapiens
tacaaaattctgtgc

SEQ ID NO: 802959 - DNA, 15 bp, Homo sapiens
acaaaattctgtgca

SEQ ID NO: 802960 - DNA, 15 bp, Homo sapiens
caaaattctgtgcac

SEQ ID NO: 802961 - DNA, 15 bp, Homo sapiens
aaaattctgtgcaca

SEQ ID NO: 802962 - DNA, 15 bp, Homo sapiens
aaattctgtgcacag

SEQ ID NO: 802963 - DNA, 15 bp, Homo sapiens
aattctgtgcacagc

SEQ ID NO: 802964 - DNA, 15 bp, Homo sapiens
attctgtgcacagca

SEQ ID NO: 802965 - DNA, 15 bp, Homo sapiens
ttctgtgcacagcag

SEQ ID NO: 802966 - DNA, 15 bp, Homo sapiens
tctgtgcacagcagg

SEQ ID NO: 802967 - DNA, 15 bp, Homo sapiens
ctgtgcacagcaggc

SEQ ID NO: 802968 - DNA, 15 bp, Homo sapiens
tgtgcacagcaggct

SEQ ID NO: 802969 - DNA, 15 bp, Homo sapiens
gtgcacagcaggctc

SEQ ID NO: 802970 - DNA, 15 bp, Homo sapiens
tgcacagcaggctca

SEQ ID NO: 802971 - DNA, 15 bp, Homo sapiens
gcacagcaggctcac

SEQ ID NO: 802972 - DNA, 15 bp, Homo sapiens
cacagcaggctcaca

SEQ ID NO: 802973 - DNA, 15 bp, Homo sapiens
acagcaggctcacag

SEQ ID NO: 802974 - DNA, 15 bp, Homo sapiens
cagcaggctcacaga

SEQ ID NO: 802975 - DNA, 15 bp, Homo sapiens
agcaggctcacagat

SEQ ID NO: 802976 - DNA, 15 bp, Homo sapiens
gcaggctcacagata

SEQ ID NO: 802977 - DNA, 15 bp, Homo sapiens
caggctcacagataa

SEQ ID NO: 802978 - DNA, 15 bp, Homo sapiens
aggctcacagataaa

SEQ ID NO: 802979 - DNA, 15 bp, Homo sapiens
ggctcacagataaag

SEQ ID NO: 802980 - DNA, 15 bp, Homo sapiens
gctcacagataaagt

SEQ ID NO: 802981 - DNA, 15 bp, Homo sapiens
ctcacagataaagtt

SEQ ID NO: 802982 - DNA, 15 bp, Homo sapiens
tcacagataaagttt

SEQ ID NO: 802983 - DNA, 15 bp, Homo sapiens
cacagataaagtttt

SEQ ID NO: 802984 - DNA, 15 bp, Homo sapiens
acagataaagttttt

SEQ ID NO: 802985 - DNA, 15 bp, Homo sapiens
cagataaagtttttg

SEQ ID NO: 802986 - DNA, 15 bp, Homo sapiens
agataaagtttttga

SEQ ID NO: 802987 - DNA, 15 bp, Homo sapiens
gataaagtttttgac

SEQ ID NO: 802988 - DNA, 15 bp, Homo sapiens
ataaagtttttgaca

SEQ ID NO: 802989 - DNA, 15 bp, Homo sapiens
taaagtttttgacaa

SEQ ID NO: 802990 - DNA, 15 bp, Homo sapiens
aaagtttttgacaaa

SEQ ID NO: 802991 - DNA, 15 bp, Homo sapiens
aagtttttgacaaac

SEQ ID NO: 802992 - DNA, 15 bp, Homo sapiens
agtttttgacaaact

SEQ ID NO: 802993 - DNA, 15 bp, Homo sapiens
gtttttgacaaactg

SEQ ID NO: 802994 - DNA, 15 bp, Homo sapiens
tttttgacaaactga

SEQ ID NO: 802995 - DNA, 15 bp, Homo sapiens
ttttgacaaactgaa

SEQ ID NO: 802996 - DNA, 15 bp, Homo sapiens
tttgacaaactgaaa

SEQ ID NO: 802997 - DNA, 15 bp, Homo sapiens
ttgacaaactgaaaa

SEQ ID NO: 802998 - DNA, 15 bp, Homo sapiens
tgacaaactgaaaac

SEQ ID NO: 802999 - DNA, 15 bp, Homo sapiens
gacaaactgaaaacc

SEQ ID NO: 803000 - DNA, 15 bp, Homo sapiens
acaaactgaaaacca

SEQ ID NO: 803001 - DNA, 15 bp, Homo sapiens
caaactgaaaaccat

SEQ ID NO: 803002 - DNA, 15 bp, Homo sapiens
aaactgaaaaccatg

SEQ ID NO: 803003 - DNA, 15 bp, Homo sapiens
aactgaaaaccatgt

SEQ ID NO: 803004 - DNA, 15 bp, Homo sapiens
actgaaaaccatgtg

SEQ ID NO: 803005 - DNA, 15 bp, Homo sapiens
ctgaaaaccatgtgt

SEQ ID NO: 803006 - DNA, 15 bp, Homo sapiens
tgaaaaccatgtgtt

SEQ ID NO: 803007 - DNA, 15 bp, Homo sapiens
gaaaaccatgtgtta

SEQ ID NO: 803008 - DNA, 15 bp, Homo sapiens
aaaaccatgtgttat

SEQ ID NO: 803009 - DNA, 15 bp, Homo sapiens
aaaccatgtgttatt

SEQ ID NO: 803010 - DNA, 15 bp, Homo sapiens
aaccatgtgttatta

SEQ ID NO: 803011 - DNA, 15 bp, Homo sapiens
accatgtgttattaa

SEQ ID NO: 803012 - DNA, 15 bp, Homo sapiens
ccatgtgttattaat

SEQ ID NO: 803013 - DNA, 15 bp, Homo sapiens
catgtgttattaatt

SEQ ID NO: 803014 - DNA, 15 bp, Homo sapiens
atgtgttattaattc

SEQ ID NO: 803015 - DNA, 15 bp, Homo sapiens
tgtgttattaattca

SEQ ID NO: 803016 - DNA, 15 bp, Homo sapiens
gtgttattaattcac

SEQ ID NO: 803017 - DNA, 15 bp, Homo sapiens
tgttattaattcact

SEQ ID NO: 803018 - DNA, 15 bp, Homo sapiens
gttattaattcactt

SEQ ID NO: 803019 - DNA, 15 bp, Homo sapiens
ttattaattcactta

SEQ ID NO: 803020 - DNA, 15 bp, Homo sapiens
tattaattcacttac

SEQ ID NO: 803021 - DNA, 15 bp, Homo sapiens
attaattcacttact

SEQ ID NO: 803022 - DNA, 15 bp, Homo sapiens
ttaattcacttactc

SEQ ID NO: 803023 - DNA, 15 bp, Homo sapiens
taattcacttactca

SEQ ID NO: 803024 - DNA, 15 bp, Homo sapiens
aattcacttactcat

SEQ ID NO: 803025 - DNA, 15 bp, Homo sapiens
attcacttactcatt

SEQ ID NO: 803026 - DNA, 15 bp, Homo sapiens
ttcacttactcattg

SEQ ID NO: 803027 - DNA, 15 bp, Homo sapiens
tcacttactcattga

SEQ ID NO: 803028 - DNA, 15 bp, Homo sapiens
cacttactcattgat

SEQ ID NO: 803029 - DNA, 15 bp, Homo sapiens
acttactcattgatt

SEQ ID NO: 803030 - DNA, 15 bp, Homo sapiens
cttactcattgattc

SEQ ID NO: 803031 - DNA, 15 bp, Homo sapiens
ttactcattgattca

SEQ ID NO: 803032 - DNA, 15 bp, Homo sapiens
tactcattgattcac

SEQ ID NO: 803033 - DNA, 15 bp, Homo sapiens
actcattgattcact

SEQ ID NO: 803034 - DNA, 15 bp, Homo sapiens
ctcattgattcactt

SEQ ID NO: 803035 - DNA, 15 bp, Homo sapiens
tcattgattcacttc

SEQ ID NO: 803036 - DNA, 15 bp, Homo sapiens
cattgattcacttcc

SEQ ID NO: 803037 - DNA, 15 bp, Homo sapiens
attgattcacttcct

SEQ ID NO: 803038 - DNA, 15 bp, Homo sapiens
ttgattcacttcctc

SEQ ID NO: 803039 - DNA, 15 bp, Homo sapiens
tgattcacttcctca

SEQ ID NO: 803040 - DNA, 15 bp, Homo sapiens
gattcacttcctcat

SEQ ID NO: 803041 - DNA, 15 bp, Homo sapiens
attcacttcctcatc

SEQ ID NO: 803042 - DNA, 15 bp, Homo sapiens
ttcacttcctcatcc

SEQ ID NO: 803043 - DNA, 15 bp, Homo sapiens
tcacttcctcatcca

SEQ ID NO: 803044 - DNA, 15 bp, Homo sapiens
cacttcctcatccat

SEQ ID NO: 803045 - DNA, 15 bp, Homo sapiens
acttcctcatccatc

SEQ ID NO: 803046 - DNA, 15 bp, Homo sapiens
cttcctcatccatcc

SEQ ID NO: 803047 - DNA, 15 bp, Homo sapiens
ttcctcatccatccc

SEQ ID NO: 803048 - DNA, 15 bp, Homo sapiens
tcctcatccatcccg

SEQ ID NO: 803049 - DNA, 15 bp, Homo sapiens
cctcatccatcccgt

SEQ ID NO: 803050 - DNA, 15 bp, Homo sapiens
ctcatccatcccgtt

SEQ ID NO: 803051 - DNA, 15 bp, Homo sapiens
tcatccatcccgttc

SEQ ID NO: 803052 - DNA, 15 bp, Homo sapiens
catccatcccgttca

SEQ ID NO: 803053 - DNA, 15 bp, Homo sapiens
atccatcccgttcat

SEQ ID NO: 803054 - DNA, 15 bp, Homo sapiens
tccatcccgttcatt

SEQ ID NO: 803055 - DNA, 15 bp, Homo sapiens
ccatcccgttcatta

SEQ ID NO: 803056 - DNA, 15 bp, Homo sapiens
catcccgttcattac

SEQ ID NO: 803057 - DNA, 15 bp, Homo sapiens
atcccgttcattact

SEQ ID NO: 803058 - DNA, 15 bp, Homo sapiens
tcccgttcattactt

SEQ ID NO: 803059 - DNA, 15 bp, Homo sapiens
cccgttcattactta

SEQ ID NO: 803060 - DNA, 15 bp, Homo sapiens
ccgttcattacttac

SEQ ID NO: 803061 - DNA, 15 bp, Homo sapiens
cgttcattacttacc

SEQ ID NO: 803062 - DNA, 15 bp, Homo sapiens
gttcattacttacca

SEQ ID NO: 803063 - DNA, 15 bp, Homo sapiens
ttcattacttaccat

SEQ ID NO: 803064 - DNA, 15 bp, Homo sapiens
tcattacttaccatg

SEQ ID NO: 803065 - DNA, 15 bp, Homo sapiens
cattacttaccatgt

SEQ ID NO: 803066 - DNA, 15 bp, Homo sapiens
attacttaccatgtg

SEQ ID NO: 803067 - DNA, 15 bp, Homo sapiens
ttacttaccatgtgc

SEQ ID NO: 803068 - DNA, 15 bp, Homo sapiens
tacttaccatgtgcc

SEQ ID NO: 803069 - DNA, 15 bp, Homo sapiens
acttaccatgtgcca

SEQ ID NO: 803070 - DNA, 15 bp, Homo sapiens
cttaccatgtgccag

SEQ ID NO: 803071 - DNA, 15 bp, Homo sapiens
ttaccatgtgccagg

SEQ ID NO: 803072 - DNA, 15 bp, Homo sapiens
taccatgtgccaggt

SEQ ID NO: 803073 - DNA, 15 bp, Homo sapiens
accatgtgccaggta

SEQ ID NO: 803074 - DNA, 15 bp, Homo sapiens
ccatgtgccaggtac

SEQ ID NO: 803075 - DNA, 15 bp, Homo sapiens
catgtgccaggtact

SEQ ID NO: 803076 - DNA, 15 bp, Homo sapiens
atgtgccaggtactg

SEQ ID NO: 803077 - DNA, 15 bp, Homo sapiens
tgtgccaggtactgt

SEQ ID NO: 803078 - DNA, 15 bp, Homo sapiens
gtgccaggtactgtg

SEQ ID NO: 803079 - DNA, 15 bp, Homo sapiens
tgccaggtactgtgc

SEQ ID NO: 803080 - DNA, 15 bp, Homo sapiens
gccaggtactgtgct

SEQ ID NO: 803081 - DNA, 15 bp, Homo sapiens
ccaggtactgtgcta

SEQ ID NO: 803082 - DNA, 15 bp, Homo sapiens
caggtactgtgctag

SEQ ID NO: 803083 - DNA, 15 bp, Homo sapiens
aggtactgtgctagg

SEQ ID NO: 803084 - DNA, 15 bp, Homo sapiens
ggtactgtgctaggc

SEQ ID NO: 803085 - DNA, 15 bp, Homo sapiens
gtactgtgctaggcc

SEQ ID NO: 803086 - DNA, 15 bp, Homo sapiens
tactgtgctaggcca

SEQ ID NO: 803087 - DNA, 15 bp, Homo sapiens
actgtgctaggccac

SEQ ID NO: 803088 - DNA, 15 bp, Homo sapiens
ctgtgctaggccaca

SEQ ID NO: 803089 - DNA, 15 bp, Homo sapiens
tgtgctaggccacat

SEQ ID NO: 803090 - DNA, 15 bp, Homo sapiens
gtgctaggccacatt

SEQ ID NO: 803091 - DNA, 15 bp, Homo sapiens
tgctaggccacattg

SEQ ID NO: 803092 - DNA, 15 bp, Homo sapiens
gctaggccacattga

SEQ ID NO: 803093 - DNA, 15 bp, Homo sapiens
ctaggccacattgat

SEQ ID NO: 803094 - DNA, 15 bp, Homo sapiens
taggccacattgata

SEQ ID NO: 803095 - DNA, 15 bp, Homo sapiens
aggccacattgatat

SEQ ID NO: 803096 - DNA, 15 bp, Homo sapiens
ggccacattgatata

SEQ ID NO: 803097 - DNA, 15 bp, Homo sapiens
gccacattgatataa

SEQ ID NO: 803098 - DNA, 15 bp, Homo sapiens
ccacattgatataag

SEQ ID NO: 803099 - DNA, 15 bp, Homo sapiens
cacattgatataagg

SEQ ID NO: 803100 - DNA, 15 bp, Homo sapiens
acattgatataaggt

SEQ ID NO: 803101 - DNA, 15 bp, Homo sapiens
cattgatataaggta

SEQ ID NO: 803102 - DNA, 15 bp, Homo sapiens
attgatataaggtaa

SEQ ID NO: 803103 - DNA, 15 bp, Homo sapiens
ttgatataaggtaaa

SEQ ID NO: 803104 - DNA, 15 bp, Homo sapiens
tgatataaggtaaat

SEQ ID NO: 803105 - DNA, 15 bp, Homo sapiens
gatataaggtaaata

SEQ ID NO: 803106 - DNA, 15 bp, Homo sapiens
atataaggtaaataa

SEQ ID NO: 803107 - DNA, 15 bp, Homo sapiens
tataaggtaaataag

SEQ ID NO: 803108 - DNA, 15 bp, Homo sapiens
ataaggtaaataaga

SEQ ID NO: 803109 - DNA, 15 bp, Homo sapiens
taaggtaaataagac

SEQ ID NO: 803110 - DNA, 15 bp, Homo sapiens
aaggtaaataagaca

SEQ ID NO: 803111 - DNA, 15 bp, Homo sapiens
aggtaaataagacac

SEQ ID NO: 803112 - DNA, 15 bp, Homo sapiens
ggtaaataagacaca

SEQ ID NO: 803113 - DNA, 15 bp, Homo sapiens
gtaaataagacacag

SEQ ID NO: 803114 - DNA, 15 bp, Homo sapiens
taaataagacacagc

SEQ ID NO: 803115 - DNA, 15 bp, Homo sapiens
aaataagacacagcc

SEQ ID NO: 803116 - DNA, 15 bp, Homo sapiens
aataagacacagccc

SEQ ID NO: 803117 - DNA, 15 bp, Homo sapiens
ataagacacagcccc

SEQ ID NO: 803118 - DNA, 15 bp, Homo sapiens
taagacacagcccct

SEQ ID NO: 803119 - DNA, 15 bp, Homo sapiens
aagacacagcccctg

SEQ ID NO: 803120 - DNA, 15 bp, Homo sapiens
agacacagcccctgt

SEQ ID NO: 803121 - DNA, 15 bp, Homo sapiens
gacacagcccctgtt

SEQ ID NO: 803122 - DNA, 15 bp, Homo sapiens
acacagcccctgttc

SEQ ID NO: 803123 - DNA, 15 bp, Homo sapiens
cacagcccctgttct

SEQ ID NO: 803124 - DNA, 15 bp, Homo sapiens
acagcccctgttctc

SEQ ID NO: 803125 - DNA, 15 bp, Homo sapiens
cagcccctgttctca

SEQ ID NO: 803126 - DNA, 15 bp, Homo sapiens
agcccctgttctcaa

SEQ ID NO: 803127 - DNA, 15 bp, Homo sapiens
gcccctgttctcaaa

SEQ ID NO: 803128 - DNA, 15 bp, Homo sapiens
cccctgttctcaaag

SEQ ID NO: 803129 - DNA, 15 bp, Homo sapiens
ccctgttctcaaaga

SEQ ID NO: 803130 - DNA, 15 bp, Homo sapiens
cctgttctcaaagag

SEQ ID NO: 803131 - DNA, 15 bp, Homo sapiens
ctgttctcaaagagc

SEQ ID NO: 803132 - DNA, 15 bp, Homo sapiens
tgttctcaaagagct

SEQ ID NO: 803133 - DNA, 15 bp, Homo sapiens
gttctcaaagagctc

SEQ ID NO: 803134 - DNA, 15 bp, Homo sapiens
ttctcaaagagctct

SEQ ID NO: 803135 - DNA, 15 bp, Homo sapiens
tctcaaagagctctt

SEQ ID NO: 803136 - DNA, 15 bp, Homo sapiens
ctcaaagagctcttg

SEQ ID NO: 803137 - DNA, 15 bp, Homo sapiens
tcaaagagctcttgg

SEQ ID NO: 803138 - DNA, 15 bp, Homo sapiens
caaagagctcttggt

SEQ ID NO: 803139 - DNA, 15 bp, Homo sapiens
aaagagctcttggtt

SEQ ID NO: 803140 - DNA, 15 bp, Homo sapiens
aagagctcttggtta

SEQ ID NO: 803141 - DNA, 15 bp, Homo sapiens
agagctcttggttac

SEQ ID NO: 803142 - DNA, 15 bp, Homo sapiens
gagctcttggttaca

SEQ ID NO: 803143 - DNA, 15 bp, Homo sapiens
agctcttggttacag

SEQ ID NO: 803144 - DNA, 15 bp, Homo sapiens
gctcttggttacagg

SEQ ID NO: 803145 - DNA, 15 bp, Homo sapiens
ctcttggttacaggg

SEQ ID NO: 803146 - DNA, 15 bp, Homo sapiens
tcttggttacaggga

SEQ ID NO: 803147 - DNA, 15 bp, Homo sapiens
cttggttacagggac

SEQ ID NO: 803148 - DNA, 15 bp, Homo sapiens
ttggttacagggaca

SEQ ID NO: 803149 - DNA, 15 bp, Homo sapiens
tggttacagggacac

SEQ ID NO: 803150 - DNA, 15 bp, Homo sapiens
ggttacagggacact

SEQ ID NO: 803151 - DNA, 15 bp, Homo sapiens
gttacagggacactg

SEQ ID NO: 803152 - DNA, 15 bp, Homo sapiens
ttacagggacactga

SEQ ID NO: 803153 - DNA, 15 bp, Homo sapiens
tacagggacactgat

SEQ ID NO: 803154 - DNA, 15 bp, Homo sapiens
acagggacactgatt

SEQ ID NO: 803155 - DNA, 15 bp, Homo sapiens
cagggacactgatta

SEQ ID NO: 803156 - DNA, 15 bp, Homo sapiens
agggacactgattag

SEQ ID NO: 803157 - DNA, 15 bp, Homo sapiens
gggacactgattagg

SEQ ID NO: 803158 - DNA, 15 bp, Homo sapiens
ggacactgattaggt

SEQ ID NO: 803159 - DNA, 15 bp, Homo sapiens
gacactgattaggtt

SEQ ID NO: 803160 - DNA, 15 bp, Homo sapiens
acactgattaggttt

SEQ ID NO: 803161 - DNA, 15 bp, Homo sapiens
cactgattaggtttc

SEQ ID NO: 803162 - DNA, 15 bp, Homo sapiens
actgattaggtttcc

SEQ ID NO: 803163 - DNA, 15 bp, Homo sapiens
ctgattaggtttcct

SEQ ID NO: 803164 - DNA, 15 bp, Homo sapiens
tgattaggtttcctg

SEQ ID NO: 803165 - DNA, 15 bp, Homo sapiens
gattaggtttcctgg

SEQ ID NO: 803166 - DNA, 15 bp, Homo sapiens
attaggtttcctggg

SEQ ID NO: 803167 - DNA, 15 bp, Homo sapiens
ttaggtttcctgggg

SEQ ID NO: 803168 - DNA, 15 bp, Homo sapiens
taggtttcctggggt

SEQ ID NO: 803169 - DNA, 15 bp, Homo sapiens
aggtttcctggggtt

SEQ ID NO: 803170 - DNA, 15 bp, Homo sapiens
ggtttcctggggttg

SEQ ID NO: 803171 - DNA, 15 bp, Homo sapiens
gtttcctggggttgc

SEQ ID NO: 803172 - DNA, 15 bp, Homo sapiens
tttcctggggttgcc

SEQ ID NO: 803173 - DNA, 15 bp, Homo sapiens
ttcctggggttgcca

SEQ ID NO: 803174 - DNA, 15 bp, Homo sapiens
tcctggggttgccag

SEQ ID NO: 803175 - DNA, 15 bp, Homo sapiens
cctggggttgccagg

SEQ ID NO: 803176 - DNA, 15 bp, Homo sapiens
ctggggttgccagga

SEQ ID NO: 803177 - DNA, 15 bp, Homo sapiens
tggggttgccaggat

SEQ ID NO: 803178 - DNA, 15 bp, Homo sapiens
ggggttgccaggatc

SEQ ID NO: 803179 - DNA, 15 bp, Homo sapiens
gggttgccaggatcc

SEQ ID NO: 803180 - DNA, 15 bp, Homo sapiens
ggttgccaggatcct

SEQ ID NO: 803181 - DNA, 15 bp, Homo sapiens
gttgccaggatccta

SEQ ID NO: 803182 - DNA, 15 bp, Homo sapiens
ttgccaggatcctag

SEQ ID NO: 803183 - DNA, 15 bp, Homo sapiens
tgccaggatcctagc

SEQ ID NO: 803184 - DNA, 15 bp, Homo sapiens
gccaggatcctagca

SEQ ID NO: 803185 - DNA, 15 bp, Homo sapiens
ccaggatcctagcat

SEQ ID NO: 803186 - DNA, 15 bp, Homo sapiens
caggatcctagcatc

SEQ ID NO: 803187 - DNA, 15 bp, Homo sapiens
aggatcctagcatct

SEQ ID NO: 803188 - DNA, 15 bp, Homo sapiens
ggatcctagcatctg

SEQ ID NO: 803189 - DNA, 15 bp, Homo sapiens
gatcctagcatctgc

SEQ ID NO: 803190 - DNA, 15 bp, Homo sapiens
atcctagcatctgct

SEQ ID NO: 803191 - DNA, 15 bp, Homo sapiens
tcctagcatctgctt

SEQ ID NO: 803192 - DNA, 15 bp, Homo sapiens
cctagcatctgcttt

SEQ ID NO: 803193 - DNA, 15 bp, Homo sapiens
ctagcatctgctttc

SEQ ID NO: 803194 - DNA, 15 bp, Homo sapiens
tagcatctgctttcc

SEQ ID NO: 803195 - DNA, 15 bp, Homo sapiens
agcatctgctttccc

SEQ ID NO: 803196 - DNA, 15 bp, Homo sapiens
gcatctgctttccct

SEQ ID NO: 803197 - DNA, 15 bp, Homo sapiens
catctgctttccctg

SEQ ID NO: 803198 - DNA, 15 bp, Homo sapiens
atctgctttccctga

SEQ ID NO: 803199 - DNA, 15 bp, Homo sapiens
tctgctttccctgag

SEQ ID NO: 803200 - DNA, 15 bp, Homo sapiens
ctgctttccctgagt

SEQ ID NO: 803201 - DNA, 15 bp, Homo sapiens
tgctttccctgagtt

SEQ ID NO: 803202 - DNA, 15 bp, Homo sapiens
gctttccctgagttt

SEQ ID NO: 803203 - DNA, 15 bp, Homo sapiens
ctttccctgagtttc

SEQ ID NO: 803204 - DNA, 15 bp, Homo sapiens
tttccctgagtttcc

SEQ ID NO: 803205 - DNA, 15 bp, Homo sapiens
ttccctgagtttcct

SEQ ID NO: 803206 - DNA, 15 bp, Homo sapiens
tccctgagtttcctt

SEQ ID NO: 803207 - DNA, 15 bp, Homo sapiens
ccctgagtttccttg

SEQ ID NO: 803208 - DNA, 15 bp, Homo sapiens
cctgagtttccttgg

SEQ ID NO: 803209 - DNA, 15 bp, Homo sapiens
ctgagtttccttgga

SEQ ID NO: 803210 - DNA, 15 bp, Homo sapiens
tgagtttccttggaa

SEQ ID NO: 803211 - DNA, 15 bp, Homo sapiens
gagtttccttggaag

SEQ ID NO: 803212 - DNA, 15 bp, Homo sapiens
agtttccttggaagg

SEQ ID NO: 803213 - DNA, 15 bp, Homo sapiens
gtttccttggaagga

SEQ ID NO: 803214 - DNA, 15 bp, Homo sapiens
tttccttggaaggaa

SEQ ID NO: 803215 - DNA, 15 bp, Homo sapiens
ttccttggaaggaag

SEQ ID NO: 803216 - DNA, 15 bp, Homo sapiens
tccttggaaggaagg

SEQ ID NO: 803217 - DNA, 15 bp, Homo sapiens
ccttggaaggaaggt

SEQ ID NO: 803218 - DNA, 15 bp, Homo sapiens
cttggaaggaaggtc

SEQ ID NO: 803219 - DNA, 15 bp, Homo sapiens
ttggaaggaaggtcc

SEQ ID NO: 803220 - DNA, 15 bp, Homo sapiens
tggaaggaaggtccc

SEQ ID NO: 803221 - DNA, 15 bp, Homo sapiens
ggaaggaaggtccca

SEQ ID NO: 803222 - DNA, 15 bp, Homo sapiens
gaaggaaggtcccat

SEQ ID NO: 803223 - DNA, 15 bp, Homo sapiens
aaggaaggtcccatg

SEQ ID NO: 803224 - DNA, 15 bp, Homo sapiens
aggaaggtcccatgc

SEQ ID NO: 803225 - DNA, 15 bp, Homo sapiens
ggaaggtcccatgca

SEQ ID NO: 803226 - DNA, 15 bp, Homo sapiens
gaaggtcccatgcat

SEQ ID NO: 803227 - DNA, 15 bp, Homo sapiens
aaggtcccatgcatg

SEQ ID NO: 803228 - DNA, 15 bp, Homo sapiens
aggtcccatgcatga

SEQ ID NO: 803229 - DNA, 15 bp, Homo sapiens
ggtcccatgcatgac

SEQ ID NO: 803230 - DNA, 15 bp, Homo sapiens
gtcccatgcatgaca

SEQ ID NO: 803231 - DNA, 15 bp, Homo sapiens
tcccatgcatgacac

SEQ ID NO: 803232 - DNA, 15 bp, Homo sapiens
cccatgcatgacaca

SEQ ID NO: 803233 - DNA, 15 bp, Homo sapiens
ccatgcatgacacat

SEQ ID NO: 803234 - DNA, 15 bp, Homo sapiens
catgcatgacacatc

SEQ ID NO: 803235 - DNA, 15 bp, Homo sapiens
atgcatgacacatcc

SEQ ID NO: 803236 - DNA, 15 bp, Homo sapiens
tgcatgacacatcct

SEQ ID NO: 803237 - DNA, 15 bp, Homo sapiens
gcatgacacatcctg

SEQ ID NO: 803238 - DNA, 15 bp, Homo sapiens
catgacacatcctgt

SEQ ID NO: 803239 - DNA, 15 bp, Homo sapiens
atgacacatcctgtt

SEQ ID NO: 803240 - DNA, 15 bp, Homo sapiens
tgacacatcctgttc

SEQ ID NO: 803241 - DNA, 15 bp, Homo sapiens
gacacatcctgttcg

SEQ ID NO: 803242 - DNA, 15 bp, Homo sapiens
acacatcctgttcgc

SEQ ID NO: 803243 - DNA, 15 bp, Homo sapiens
cacatcctgttcgct

SEQ ID NO: 803244 - DNA, 15 bp, Homo sapiens
acatcctgttcgctg

SEQ ID NO: 803245 - DNA, 15 bp, Homo sapiens
catcctgttcgctgt

SEQ ID NO: 803246 - DNA, 15 bp, Homo sapiens
atcctgttcgctgtt

SEQ ID NO: 803247 - DNA, 15 bp, Homo sapiens
tcctgttcgctgttc

SEQ ID NO: 803248 - DNA, 15 bp, Homo sapiens
cctgttcgctgttct

SEQ ID NO: 803249 - DNA, 15 bp, Homo sapiens
ctgttcgctgttctt

SEQ ID NO: 803250 - DNA, 15 bp, Homo sapiens
tgttcgctgttcttg

SEQ ID NO: 803251 - DNA, 15 bp, Homo sapiens
gttcgctgttcttgg

SEQ ID NO: 803252 - DNA, 15 bp, Homo sapiens
ttcgctgttcttggg

SEQ ID NO: 803253 - DNA, 15 bp, Homo sapiens
tcgctgttcttgggt

SEQ ID NO: 803254 - DNA, 15 bp, Homo sapiens
cgctgttcttgggtg

SEQ ID NO: 803255 - DNA, 15 bp, Homo sapiens
gctgttcttgggtga

SEQ ID NO: 803256 - DNA, 15 bp, Homo sapiens
ctgttcttgggtgac

SEQ ID NO: 803257 - DNA, 15 bp, Homo sapiens
tgttcttgggtgacg

SEQ ID NO: 803258 - DNA, 15 bp, Homo sapiens
gttcttgggtgacgt

SEQ ID NO: 803259 - DNA, 15 bp, Homo sapiens
ttcttgggtgacgta

SEQ ID NO: 803260 - DNA, 15 bp, Homo sapiens
tcttgggtgacgtat

SEQ ID NO: 803261 - DNA, 15 bp, Homo sapiens
cttgggtgacgtatg

SEQ ID NO: 803262 - DNA, 15 bp, Homo sapiens
ttgggtgacgtatgt

SEQ ID NO: 803263 - DNA, 15 bp, Homo sapiens
tgggtgacgtatgta

SEQ ID NO: 803264 - DNA, 15 bp, Homo sapiens
gggtgacgtatgtag

SEQ ID NO: 803265 - DNA, 15 bp, Homo sapiens
ggtgacgtatgtagc

SEQ ID NO: 803266 - DNA, 15 bp, Homo sapiens
gtgacgtatgtagcc

SEQ ID NO: 803267 - DNA, 15 bp, Homo sapiens
tgacgtatgtagccc

SEQ ID NO: 803268 - DNA, 15 bp, Homo sapiens
gacgtatgtagccct

SEQ ID NO: 803269 - DNA, 15 bp, Homo sapiens
acgtatgtagcccta

SEQ ID NO: 803270 - DNA, 15 bp, Homo sapiens
cgtatgtagccctaa

SEQ ID NO: 803271 - DNA, 15 bp, Homo sapiens
gtatgtagccctaaa

SEQ ID NO: 803272 - DNA, 15 bp, Homo sapiens
tatgtagccctaaag

SEQ ID NO: 803273 - DNA, 15 bp, Homo sapiens
atgtagccctaaagt

SEQ ID NO: 803274 - DNA, 15 bp, Homo sapiens
tgtagccctaaagtc

SEQ ID NO: 803275 - DNA, 15 bp, Homo sapiens
gtagccctaaagtct

SEQ ID NO: 803276 - DNA, 15 bp, Homo sapiens
tagccctaaagtctt

SEQ ID NO: 803277 - DNA, 15 bp, Homo sapiens
agccctaaagtcttg

SEQ ID NO: 803278 - DNA, 15 bp, Homo sapiens
gccctaaagtcttgg

SEQ ID NO: 803279 - DNA, 15 bp, Homo sapiens
ccctaaagtcttggc

SEQ ID NO: 803280 - DNA, 15 bp, Homo sapiens
cctaaagtcttggcc

SEQ ID NO: 803281 - DNA, 15 bp, Homo sapiens
ctaaagtcttggccc

SEQ ID NO: 803282 - DNA, 15 bp, Homo sapiens
taaagtcttggccca

SEQ ID NO: 803283 - DNA, 15 bp, Homo sapiens
aaagtcttggcccag

SEQ ID NO: 803284 - DNA, 15 bp, Homo sapiens
aagtcttggcccagt

SEQ ID NO: 803285 - DNA, 15 bp, Homo sapiens
agtcttggcccagta

SEQ ID NO: 803286 - DNA, 15 bp, Homo sapiens
gtcttggcccagtag

SEQ ID NO: 803287 - DNA, 15 bp, Homo sapiens
tcttggcccagtagc

SEQ ID NO: 803288 - DNA, 15 bp, Homo sapiens
cttggcccagtagca

SEQ ID NO: 803289 - DNA, 15 bp, Homo sapiens
ttggcccagtagcag

SEQ ID NO: 803290 - DNA, 15 bp, Homo sapiens
tggcccagtagcaga

SEQ ID NO: 803291 - DNA, 15 bp, Homo sapiens
ggcccagtagcagag

SEQ ID NO: 803292 - DNA, 15 bp, Homo sapiens
gcccagtagcagaga

SEQ ID NO: 803293 - DNA, 15 bp, Homo sapiens
cccagtagcagagaa

SEQ ID NO: 803294 - DNA, 15 bp, Homo sapiens
ccagtagcagagaat

SEQ ID NO: 803295 - DNA, 15 bp, Homo sapiens
cagtagcagagaatt

SEQ ID NO: 803296 - DNA, 15 bp, Homo sapiens
agtagcagagaattt

SEQ ID NO: 803297 - DNA, 15 bp, Homo sapiens
gtagcagagaatttc

SEQ ID NO: 803298 - DNA, 15 bp, Homo sapiens
tagcagagaatttca

SEQ ID NO: 803299 - DNA, 15 bp, Homo sapiens
agcagagaatttcac

SEQ ID NO: 803300 - DNA, 15 bp, Homo sapiens
gcagagaatttcaca

SEQ ID NO: 803301 - DNA, 15 bp, Homo sapiens
cagagaatttcacat

SEQ ID NO: 803302 - DNA, 15 bp, Homo sapiens
agagaatttcacatc

SEQ ID NO: 803303 - DNA, 15 bp, Homo sapiens
gagaatttcacatcc

SEQ ID NO: 803304 - DNA, 15 bp, Homo sapiens
agaatttcacatcct

SEQ ID NO: 803305 - DNA, 15 bp, Homo sapiens
gaatttcacatcctt

SEQ ID NO: 803306 - DNA, 15 bp, Homo sapiens
aatttcacatccttc

SEQ ID NO: 803307 - DNA, 15 bp, Homo sapiens
atttcacatccttca

SEQ ID NO: 803308 - DNA, 15 bp, Homo sapiens
tttcacatccttcag

SEQ ID NO: 803309 - DNA, 15 bp, Homo sapiens
ttcacatccttcagt

SEQ ID NO: 803310 - DNA, 15 bp, Homo sapiens
tcacatccttcagta

SEQ ID NO: 803311 - DNA, 15 bp, Homo sapiens
cacatccttcagtaa

SEQ ID NO: 803312 - DNA, 15 bp, Homo sapiens
acatccttcagtaaa

SEQ ID NO: 803313 - DNA, 15 bp, Homo sapiens
catccttcagtaaat

SEQ ID NO: 803314 - DNA, 15 bp, Homo sapiens
atccttcagtaaata

SEQ ID NO: 803315 - DNA, 15 bp, Homo sapiens
tccttcagtaaataa

SEQ ID NO: 803316 - DNA, 15 bp, Homo sapiens
ccttcagtaaataaa

SEQ ID NO: 803317 - DNA, 15 bp, Homo sapiens
cttcagtaaataaaa

SEQ ID NO: 803318 - DNA, 15 bp, Homo sapiens
ttcagtaaataaaaa

SEQ ID NO: 803319 - DNA, 15 bp, Homo sapiens
tcagtaaataaaaac

SEQ ID NO: 803320 - DNA, 15 bp, Homo sapiens
cagtaaataaaaacc

SEQ ID NO: 803321 - DNA, 15 bp, Homo sapiens
agtaaataaaaacca

SEQ ID NO: 803322 - DNA, 15 bp, Homo sapiens
gtaaataaaaaccaa

SEQ ID NO: 803323 - DNA, 15 bp, Homo sapiens
taaataaaaaccaaa

SEQ ID NO: 803324 - DNA, 15 bp, Homo sapiens
aaataaaaaccaaag

SEQ ID NO: 803325 - DNA, 15 bp, Homo sapiens
aataaaaaccaaagt

SEQ ID NO: 803326 - DNA, 15 bp, Homo sapiens
ataaaaaccaaagtc

SEQ ID NO: 803327 - DNA, 15 bp, Homo sapiens
taaaaaccaaagtca

SEQ ID NO: 803328 - DNA, 15 bp, Homo sapiens
aaaaaccaaagtcaa

SEQ ID NO: 803329 - DNA, 15 bp, Homo sapiens
aaaaccaaagtcaaa

SEQ ID NO: 803330 - DNA, 15 bp, Homo sapiens
aaaccaaagtcaaaa

SEQ ID NO: 803331 - DNA, 15 bp, Homo sapiens
aaccaaagtcaaaat

SEQ ID NO: 803332 - DNA, 15 bp, Homo sapiens
accaaagtcaaaatg

SEQ ID NO: 803333 - DNA, 15 bp, Homo sapiens
ccaaagtcaaaatga

SEQ ID NO: 803334 - DNA, 15 bp, Homo sapiens
caaagtcaaaatgaa

SEQ ID NO: 803335 - DNA, 15 bp, Homo sapiens
aaagtcaaaatgaac

SEQ ID NO: 803336 - DNA, 15 bp, Homo sapiens
aagtcaaaatgaaca

SEQ ID NO: 803337 - DNA, 15 bp, Homo sapiens
agtcaaaatgaacat

SEQ ID NO: 803338 - DNA, 15 bp, Homo sapiens
gtcaaaatgaacata

SEQ ID NO: 803339 - DNA, 15 bp, Homo sapiens
tcaaaatgaacatat

SEQ ID NO: 803340 - DNA, 15 bp, Homo sapiens
caaaatgaacatatg

SEQ ID NO: 803341 - DNA, 15 bp, Homo sapiens
aaaatgaacatatgc

SEQ ID NO: 803342 - DNA, 15 bp, Homo sapiens
aaatgaacatatgct

SEQ ID NO: 803343 - DNA, 15 bp, Homo sapiens
aatgaacatatgcta

SEQ ID NO: 803344 - DNA, 15 bp, Homo sapiens
atgaacatatgctag

SEQ ID NO: 803345 - DNA, 15 bp, Homo sapiens
tgaacatatgctaga

SEQ ID NO: 803346 - DNA, 15 bp, Homo sapiens
gaacatatgctagaa

SEQ ID NO: 803347 - DNA, 15 bp, Homo sapiens
aacatatgctagaaa

SEQ ID NO: 803348 - DNA, 15 bp, Homo sapiens
acatatgctagaaaa

SEQ ID NO: 803349 - DNA, 15 bp, Homo sapiens
catatgctagaaaac

SEQ ID NO: 803350 - DNA, 15 bp, Homo sapiens
atatgctagaaaaca

SEQ ID NO: 803351 - DNA, 15 bp, Homo sapiens
tatgctagaaaacag

SEQ ID NO: 803352 - DNA, 15 bp, Homo sapiens
atgctagaaaacaga

SEQ ID NO: 803353 - DNA, 15 bp, Homo sapiens
tgctagaaaacagag

SEQ ID NO: 803354 - DNA, 15 bp, Homo sapiens
gctagaaaacagaga

SEQ ID NO: 803355 - DNA, 15 bp, Homo sapiens
ctagaaaacagagac

SEQ ID NO: 803356 - DNA, 15 bp, Homo sapiens
tagaaaacagagact

SEQ ID NO: 803357 - DNA, 15 bp, Homo sapiens
agaaaacagagactg

SEQ ID NO: 803358 - DNA, 15 bp, Homo sapiens
gaaaacagagactgg

SEQ ID NO: 803359 - DNA, 15 bp, Homo sapiens
aaaacagagactggc

SEQ ID NO: 803360 - DNA, 15 bp, Homo sapiens
aaacagagactggca

SEQ ID NO: 803361 - DNA, 15 bp, Homo sapiens
aacagagactggcag

SEQ ID NO: 803362 - DNA, 15 bp, Homo sapiens
acagagactggcagt

SEQ ID NO: 803363 - DNA, 15 bp, Homo sapiens
cagagactggcagtg

SEQ ID NO: 803364 - DNA, 15 bp, Homo sapiens
agagactggcagtgc

SEQ ID NO: 803365 - DNA, 15 bp, Homo sapiens
gagactggcagtgct

SEQ ID NO: 803366 - DNA, 15 bp, Homo sapiens
agactggcagtgctg

SEQ ID NO: 803367 - DNA, 15 bp, Homo sapiens
gactggcagtgctgt

SEQ ID NO: 803368 - DNA, 15 bp, Homo sapiens
actggcagtgctgtg

SEQ ID NO: 803369 - DNA, 15 bp, Homo sapiens
ctggcagtgctgtga

SEQ ID NO: 803370 - DNA, 15 bp, Homo sapiens
tggcagtgctgtgaa

SEQ ID NO: 803371 - DNA, 15 bp, Homo sapiens
ggcagtgctgtgaag

SEQ ID NO: 803372 - DNA, 15 bp, Homo sapiens
gcagtgctgtgaagg

SEQ ID NO: 803373 - DNA, 15 bp, Homo sapiens
cagtgctgtgaaggc

SEQ ID NO: 803374 - DNA, 15 bp, Homo sapiens
agtgctgtgaaggcc

SEQ ID NO: 803375 - DNA, 15 bp, Homo sapiens
gtgctgtgaaggccc

SEQ ID NO: 803376 - DNA, 15 bp, Homo sapiens
tgctgtgaaggccct

SEQ ID NO: 803377 - DNA, 15 bp, Homo sapiens
gctgtgaaggccctg

SEQ ID NO: 803378 - DNA, 15 bp, Homo sapiens
ctgtgaaggccctgt

SEQ ID NO: 803379 - DNA, 15 bp, Homo sapiens
tgtgaaggccctgtc

SEQ ID NO: 803380 - DNA, 15 bp, Homo sapiens
gtgaaggccctgtcc

SEQ ID NO: 803381 - DNA, 15 bp, Homo sapiens
tgaaggccctgtccc

SEQ ID NO: 803382 - DNA, 15 bp, Homo sapiens
gaaggccctgtcccc

SEQ ID NO: 803383 - DNA, 15 bp, Homo sapiens
aaggccctgtcccct

SEQ ID NO: 803384 - DNA, 15 bp, Homo sapiens
aggccctgtcccctc

SEQ ID NO: 803385 - DNA, 15 bp, Homo sapiens
ggccctgtcccctca

SEQ ID NO: 803386 - DNA, 15 bp, Homo sapiens
gccctgtcccctcat

SEQ ID NO: 803387 - DNA, 15 bp, Homo sapiens
ccctgtcccctcatg

SEQ ID NO: 803388 - DNA, 15 bp, Homo sapiens
cctgtcccctcatgg

SEQ ID NO: 803389 - DNA, 15 bp, Homo sapiens
ctgtcccctcatgga

SEQ ID NO: 803390 - DNA, 15 bp, Homo sapiens
tgtcccctcatggac

SEQ ID NO: 803391 - DNA, 15 bp, Homo sapiens
gtcccctcatggact

SEQ ID NO: 803392 - DNA, 15 bp, Homo sapiens
tcccctcatggactc

SEQ ID NO: 803393 - DNA, 15 bp, Homo sapiens
cccctcatggactct

SEQ ID NO: 803394 - DNA, 15 bp, Homo sapiens
ccctcatggactctg

SEQ ID NO: 803395 - DNA, 15 bp, Homo sapiens
cctcatggactctgt

SEQ ID NO: 803396 - DNA, 15 bp, Homo sapiens
ctcatggactctgtc

SEQ ID NO: 803397 - DNA, 15 bp, Homo sapiens
tcatggactctgtcg

SEQ ID NO: 803398 - DNA, 15 bp, Homo sapiens
catggactctgtcgt

SEQ ID NO: 803399 - DNA, 15 bp, Homo sapiens
atggactctgtcgtg

SEQ ID NO: 803400 - DNA, 15 bp, Homo sapiens
tggactctgtcgtga

SEQ ID NO: 803401 - DNA, 15 bp, Homo sapiens
ggactctgtcgtgag

SEQ ID NO: 803402 - DNA, 15 bp, Homo sapiens
gactctgtcgtgagt

SEQ ID NO: 803403 - DNA, 15 bp, Homo sapiens
actctgtcgtgagtg

SEQ ID NO: 803404 - DNA, 15 bp, Homo sapiens
ctctgtcgtgagtgg

SEQ ID NO: 803405 - DNA, 15 bp, Homo sapiens
tctgtcgtgagtggc

SEQ ID NO: 803406 - DNA, 15 bp, Homo sapiens
ctgtcgtgagtggct

SEQ ID NO: 803407 - DNA, 15 bp, Homo sapiens
tgtcgtgagtggctt

SEQ ID NO: 803408 - DNA, 15 bp, Homo sapiens
gtcgtgagtggctta

SEQ ID NO: 803409 - DNA, 15 bp, Homo sapiens
tcgtgagtggcttaa

SEQ ID NO: 803410 - DNA, 15 bp, Homo sapiens
cgtgagtggcttaag

SEQ ID NO: 803411 - DNA, 15 bp, Homo sapiens
gtgagtggcttaagg

SEQ ID NO: 803412 - DNA, 15 bp, Homo sapiens
tgagtggcttaaggg

SEQ ID NO: 803413 - DNA, 15 bp, Homo sapiens
gagtggcttaagggg

SEQ ID NO: 803414 - DNA, 15 bp, Homo sapiens
agtggcttaagggga

SEQ ID NO: 803415 - DNA, 15 bp, Homo sapiens
gtggcttaaggggaa

SEQ ID NO: 803416 - DNA, 15 bp, Homo sapiens
tggcttaaggggaag

SEQ ID NO: 803417 - DNA, 15 bp, Homo sapiens
ggcttaaggggaaga

SEQ ID NO: 803418 - DNA, 15 bp, Homo sapiens
gcttaaggggaagag

SEQ ID NO: 803419 - DNA, 15 bp, Homo sapiens
cttaaggggaagaga

SEQ ID NO: 803420 - DNA, 15 bp, Homo sapiens
ttaaggggaagagaa

SEQ ID NO: 803421 - DNA, 15 bp, Homo sapiens
taaggggaagagaag

SEQ ID NO: 803422 - DNA, 15 bp, Homo sapiens
aaggggaagagaagt

SEQ ID NO: 803423 - DNA, 15 bp, Homo sapiens
aggggaagagaagtg

SEQ ID NO: 803424 - DNA, 15 bp, Homo sapiens
ggggaagagaagtgc

SEQ ID NO: 803425 - DNA, 15 bp, Homo sapiens
gggaagagaagtgct

SEQ ID NO: 803426 - DNA, 15 bp, Homo sapiens
ggaagagaagtgctc

SEQ ID NO: 803427 - DNA, 15 bp, Homo sapiens
gaagagaagtgctcc

SEQ ID NO: 803428 - DNA, 15 bp, Homo sapiens
aagagaagtgctcct

SEQ ID NO: 803429 - DNA, 15 bp, Homo sapiens
agagaagtgctcctc

SEQ ID NO: 803430 - DNA, 15 bp, Homo sapiens
gagaagtgctcctct

SEQ ID NO: 803431 - DNA, 15 bp, Homo sapiens
agaagtgctcctctt

SEQ ID NO: 803432 - DNA, 15 bp, Homo sapiens
gaagtgctcctctta

SEQ ID NO: 803433 - DNA, 15 bp, Homo sapiens
aagtgctcctcttac

SEQ ID NO: 803434 - DNA, 15 bp, Homo sapiens
agtgctcctcttacc

SEQ ID NO: 803435 - DNA, 15 bp, Homo sapiens
gtgctcctcttaccg

SEQ ID NO: 803436 - DNA, 15 bp, Homo sapiens
tgctcctcttaccgg

SEQ ID NO: 803437 - DNA, 15 bp, Homo sapiens
gctcctcttaccggc

SEQ ID NO: 803438 - DNA, 15 bp, Homo sapiens
ctcctcttaccggca

SEQ ID NO: 803439 - DNA, 15 bp, Homo sapiens
tcctcttaccggcat

SEQ ID NO: 803440 - DNA, 15 bp, Homo sapiens
cctcttaccggcatc

SEQ ID NO: 803441 - DNA, 15 bp, Homo sapiens
ctcttaccggcatca

SEQ ID NO: 803442 - DNA, 15 bp, Homo sapiens
tcttaccggcatcag

SEQ ID NO: 803443 - DNA, 15 bp, Homo sapiens
cttaccggcatcagg

SEQ ID NO: 803444 - DNA, 15 bp, Homo sapiens
ttaccggcatcagga

SEQ ID NO: 803445 - DNA, 15 bp, Homo sapiens
taccggcatcaggag

SEQ ID NO: 803446 - DNA, 15 bp, Homo sapiens
accggcatcaggagc

SEQ ID NO: 803447 - DNA, 15 bp, Homo sapiens
ccggcatcaggagcc

SEQ ID NO: 803448 - DNA, 15 bp, Homo sapiens
cggcatcaggagccc

SEQ ID NO: 803449 - DNA, 15 bp, Homo sapiens
ggcatcaggagccct

SEQ ID NO: 803450 - DNA, 15 bp, Homo sapiens
gcatcaggagcccta

SEQ ID NO: 803451 - DNA, 15 bp, Homo sapiens
catcaggagccctaa

SEQ ID NO: 803452 - DNA, 15 bp, Homo sapiens
atcaggagccctaat

SEQ ID NO: 803453 - DNA, 15 bp, Homo sapiens
tcaggagccctaatt

SEQ ID NO: 803454 - DNA, 15 bp, Homo sapiens
caggagccctaatta

SEQ ID NO: 803455 - DNA, 15 bp, Homo sapiens
aggagccctaattac

SEQ ID NO: 803456 - DNA, 15 bp, Homo sapiens
ggagccctaattact

SEQ ID NO: 803457 - DNA, 15 bp, Homo sapiens
gagccctaattactg

SEQ ID NO: 803458 - DNA, 15 bp, Homo sapiens
agccctaattactgt

SEQ ID NO: 803459 - DNA, 15 bp, Homo sapiens
gccctaattactgtt

SEQ ID NO: 803460 - DNA, 15 bp, Homo sapiens
ccctaattactgttg

SEQ ID NO: 803461 - DNA, 15 bp, Homo sapiens
cctaattactgttgt

SEQ ID NO: 803462 - DNA, 15 bp, Homo sapiens
ctaattactgttgta

SEQ ID NO: 803463 - DNA, 15 bp, Homo sapiens
taattactgttgtat

SEQ ID NO: 803464 - DNA, 15 bp, Homo sapiens
aattactgttgtata

SEQ ID NO: 803465 - DNA, 15 bp, Homo sapiens
attactgttgtatat

SEQ ID NO: 803466 - DNA, 15 bp, Homo sapiens
ttactgttgtatatt

SEQ ID NO: 803467 - DNA, 15 bp, Homo sapiens
tactgttgtatattg

SEQ ID NO: 803468 - DNA, 15 bp, Homo sapiens
actgttgtatattga

SEQ ID NO: 803469 - DNA, 15 bp, Homo sapiens
ctgttgtatattgat

SEQ ID NO: 803470 - DNA, 15 bp, Homo sapiens
tgttgtatattgatt

SEQ ID NO: 803471 - DNA, 15 bp, Homo sapiens
gttgtatattgattc

SEQ ID NO: 803472 - DNA, 15 bp, Homo sapiens
ttgtatattgattcc

SEQ ID NO: 803473 - DNA, 15 bp, Homo sapiens
tgtatattgattcct

SEQ ID NO: 803474 - DNA, 15 bp, Homo sapiens
gtatattgattcctt

SEQ ID NO: 803475 - DNA, 15 bp, Homo sapiens
tatattgattccttt

SEQ ID NO: 803476 - DNA, 15 bp, Homo sapiens
atattgattcctttc

SEQ ID NO: 803477 - DNA, 15 bp, Homo sapiens
tattgattcctttct

SEQ ID NO: 803478 - DNA, 15 bp, Homo sapiens
attgattcctttctt

SEQ ID NO: 803479 - DNA, 15 bp, Homo sapiens
ttgattcctttcttc

SEQ ID NO: 803480 - DNA, 15 bp, Homo sapiens
tgattcctttcttcc

SEQ ID NO: 803481 - DNA, 15 bp, Homo sapiens
gattcctttcttccg

SEQ ID NO: 803482 - DNA, 15 bp, Homo sapiens
attcctttcttccgc

SEQ ID NO: 803483 - DNA, 15 bp, Homo sapiens
ttcctttcttccgca

SEQ ID NO: 803484 - DNA, 15 bp, Homo sapiens
tcctttcttccgcag

SEQ ID NO: 803485 - DNA, 15 bp, Homo sapiens
cctttcttccgcaga

SEQ ID NO: 803486 - DNA, 15 bp, Homo sapiens
ctttcttccgcagac

SEQ ID NO: 803487 - DNA, 15 bp, Homo sapiens
tttcttccgcagacc

SEQ ID NO: 803488 - DNA, 15 bp, Homo sapiens
ttcttccgcagaccg

SEQ ID NO: 803489 - DNA, 15 bp, Homo sapiens
tcttccgcagaccgc

SEQ ID NO: 803490 - DNA, 15 bp, Homo sapiens
cttccgcagaccgct

SEQ ID NO: 803491 - DNA, 15 bp, Homo sapiens
ttccgcagaccgcta

SEQ ID NO: 803492 - DNA, 15 bp, Homo sapiens
tccgcagaccgctaa

SEQ ID NO: 803493 - DNA, 15 bp, Homo sapiens
ccgcagaccgctaat

SEQ ID NO: 803494 - DNA, 15 bp, Homo sapiens
cgcagaccgctaatc

SEQ ID NO: 803495 - DNA, 15 bp, Homo sapiens
gcagaccgctaatcc

SEQ ID NO: 803496 - DNA, 15 bp, Homo sapiens
cagaccgctaatcct

SEQ ID NO: 803497 - DNA, 15 bp, Homo sapiens
agaccgctaatcctg

SEQ ID NO: 803498 - DNA, 15 bp, Homo sapiens
gaccgctaatcctgc

SEQ ID NO: 803499 - DNA, 15 bp, Homo sapiens
accgctaatcctgca

SEQ ID NO: 803500 - DNA, 15 bp, Homo sapiens
ccgctaatcctgcag

SEQ ID NO: 803501 - DNA, 15 bp, Homo sapiens
cgctaatcctgcaga

SEQ ID NO: 803502 - DNA, 15 bp, Homo sapiens
gctaatcctgcagag

SEQ ID NO: 803503 - DNA, 15 bp, Homo sapiens
ctaatcctgcagagc

SEQ ID NO: 803504 - DNA, 15 bp, Homo sapiens
taatcctgcagagca

SEQ ID NO: 803505 - DNA, 15 bp, Homo sapiens
aatcctgcagagcaa

SEQ ID NO: 803506 - DNA, 15 bp, Homo sapiens
atcctgcagagcaac

SEQ ID NO: 803507 - DNA, 15 bp, Homo sapiens
tcctgcagagcaact

SEQ ID NO: 803508 - DNA, 15 bp, Homo sapiens
cctgcagagcaactt

SEQ ID NO: 803509 - DNA, 15 bp, Homo sapiens
ctgcagagcaacttg

SEQ ID NO: 803510 - DNA, 15 bp, Homo sapiens
tgcagagcaacttgc

SEQ ID NO: 803511 - DNA, 15 bp, Homo sapiens
gcagagcaacttgca

SEQ ID NO: 803512 - DNA, 15 bp, Homo sapiens
cagagcaacttgcag

SEQ ID NO: 803513 - DNA, 15 bp, Homo sapiens
agagcaacttgcagg

SEQ ID NO: 803514 - DNA, 15 bp, Homo sapiens
gagcaacttgcaggg

SEQ ID NO: 803515 - DNA, 15 bp, Homo sapiens
agcaacttgcagggc

SEQ ID NO: 803516 - DNA, 15 bp, Homo sapiens
gcaacttgcagggca

SEQ ID NO: 803517 - DNA, 15 bp, Homo sapiens
caacttgcagggcat

SEQ ID NO: 803518 - DNA, 15 bp, Homo sapiens
aacttgcagggcata

SEQ ID NO: 803519 - DNA, 15 bp, Homo sapiens
acttgcagggcataa

SEQ ID NO: 803520 - DNA, 15 bp, Homo sapiens
cttgcagggcataat

SEQ ID NO: 803521 - DNA, 15 bp, Homo sapiens
ttgcagggcataata

SEQ ID NO: 803522 - DNA, 15 bp, Homo sapiens
tgcagggcataataa

SEQ ID NO: 803523 - DNA, 15 bp, Homo sapiens
gcagggcataataat

SEQ ID NO: 803524 - DNA, 15 bp, Homo sapiens
cagggcataataatt

SEQ ID NO: 803525 - DNA, 15 bp, Homo sapiens
agggcataataattg

SEQ ID NO: 803526 - DNA, 15 bp, Homo sapiens
gggcataataattgg

SEQ ID NO: 803527 - DNA, 15 bp, Homo sapiens
ggcataataattggg

SEQ ID NO: 803528 - DNA, 15 bp, Homo sapiens
gcataataattggga

SEQ ID NO: 803529 - DNA, 15 bp, Homo sapiens
cataataattgggat

SEQ ID NO: 803530 - DNA, 15 bp, Homo sapiens
ataataattgggatt

SEQ ID NO: 803531 - DNA, 15 bp, Homo sapiens
taataattgggattg

SEQ ID NO: 803532 - DNA, 15 bp, Homo sapiens
aataattgggattgc

SEQ ID NO: 803533 - DNA, 15 bp, Homo sapiens
ataattgggattgcc

SEQ ID NO: 803534 - DNA, 15 bp, Homo sapiens
taattgggattgccc

SEQ ID NO: 803535 - DNA, 15 bp, Homo sapiens
aattgggattgccca

SEQ ID NO: 803536 - DNA, 15 bp, Homo sapiens
attgggattgcccaa

SEQ ID NO: 803537 - DNA, 15 bp, Homo sapiens
ttgggattgcccaat

SEQ ID NO: 803538 - DNA, 15 bp, Homo sapiens
tgggattgcccaatg

SEQ ID NO: 803539 - DNA, 15 bp, Homo sapiens
gggattgcccaatgc

SEQ ID NO: 803540 - DNA, 15 bp, Homo sapiens
ggattgcccaatgct

SEQ ID NO: 803541 - DNA, 15 bp, Homo sapiens
gattgcccaatgctg

SEQ ID NO: 803542 - DNA, 15 bp, Homo sapiens
attgcccaatgctgg

SEQ ID NO: 803543 - DNA, 15 bp, Homo sapiens
ttgcccaatgctggg

SEQ ID NO: 803544 - DNA, 15 bp, Homo sapiens
tgcccaatgctggga

SEQ ID NO: 803545 - DNA, 15 bp, Homo sapiens
gcccaatgctgggag

SEQ ID NO: 803546 - DNA, 15 bp, Homo sapiens
cccaatgctgggagc

SEQ ID NO: 803547 - DNA, 15 bp, Homo sapiens
ccaatgctgggagct

SEQ ID NO: 803548 - DNA, 15 bp, Homo sapiens
caatgctgggagcta

SEQ ID NO: 803549 - DNA, 15 bp, Homo sapiens
aatgctgggagctaa

SEQ ID NO: 803550 - DNA, 15 bp, Homo sapiens
atgctgggagctaat

SEQ ID NO: 803551 - DNA, 15 bp, Homo sapiens
tgctgggagctaatc

SEQ ID NO: 803552 - DNA, 15 bp, Homo sapiens
gctgggagctaatca

SEQ ID NO: 803553 - DNA, 15 bp, Homo sapiens
ctgggagctaatcag

SEQ ID NO: 803554 - DNA, 15 bp, Homo sapiens
tgggagctaatcaga

SEQ ID NO: 803555 - DNA, 15 bp, Homo sapiens
gggagctaatcagat

SEQ ID NO: 803556 - DNA, 15 bp, Homo sapiens
ggagctaatcagatt

SEQ ID NO: 803557 - DNA, 15 bp, Homo sapiens
gagctaatcagattt

SEQ ID NO: 803558 - DNA, 15 bp, Homo sapiens
agctaatcagatttc

SEQ ID NO: 803559 - DNA, 15 bp, Homo sapiens
gctaatcagatttct

SEQ ID NO: 803560 - DNA, 15 bp, Homo sapiens
ctaatcagatttctt

SEQ ID NO: 803561 - DNA, 15 bp, Homo sapiens
taatcagatttctta

SEQ ID NO: 803562 - DNA, 15 bp, Homo sapiens
aatcagatttcttat

SEQ ID NO: 803563 - DNA, 15 bp, Homo sapiens
atcagatttcttatg

SEQ ID NO: 803564 - DNA, 15 bp, Homo sapiens
tcagatttcttatgt

SEQ ID NO: 803565 - DNA, 15 bp, Homo sapiens
cagatttcttatgtg

SEQ ID NO: 803566 - DNA, 15 bp, Homo sapiens
agatttcttatgtgt

SEQ ID NO: 803567 - DNA, 15 bp, Homo sapiens
gatttcttatgtgta

SEQ ID NO: 803568 - DNA, 15 bp, Homo sapiens
atttcttatgtgtag

SEQ ID NO: 803569 - DNA, 15 bp, Homo sapiens
tttcttatgtgtaga

SEQ ID NO: 803570 - DNA, 15 bp, Homo sapiens
ttcttatgtgtagac

SEQ ID NO: 803571 - DNA, 15 bp, Homo sapiens
tcttatgtgtagacc

SEQ ID NO: 803572 - DNA, 15 bp, Homo sapiens
cttatgtgtagacca

SEQ ID NO: 803573 - DNA, 15 bp, Homo sapiens
ttatgtgtagaccag

SEQ ID NO: 803574 - DNA, 15 bp, Homo sapiens
tatgtgtagaccagc

SEQ ID NO: 803575 - DNA, 15 bp, Homo sapiens
atgtgtagaccagct

SEQ ID NO: 803576 - DNA, 15 bp, Homo sapiens
tgtgtagaccagctt

SEQ ID NO: 803577 - DNA, 15 bp, Homo sapiens
gtgtagaccagcttt

SEQ ID NO: 803578 - DNA, 15 bp, Homo sapiens
tgtagaccagcttta

SEQ ID NO: 803579 - DNA, 15 bp, Homo sapiens
gtagaccagctttat

SEQ ID NO: 803580 - DNA, 15 bp, Homo sapiens
tagaccagctttatg

SEQ ID NO: 803581 - DNA, 15 bp, Homo sapiens
agaccagctttatgc

SEQ ID NO: 803582 - DNA, 15 bp, Homo sapiens
gaccagctttatgct

SEQ ID NO: 803583 - DNA, 15 bp, Homo sapiens
accagctttatgcta

SEQ ID NO: 803584 - DNA, 15 bp, Homo sapiens
ccagctttatgctag

SEQ ID NO: 803585 - DNA, 15 bp, Homo sapiens
cagctttatgctagc

SEQ ID NO: 803586 - DNA, 15 bp, Homo sapiens
agctttatgctagcg

SEQ ID NO: 803587 - DNA, 15 bp, Homo sapiens
gctttatgctagcgt

SEQ ID NO: 803588 - DNA, 15 bp, Homo sapiens
ctttatgctagcgtt

SEQ ID NO: 803589 - DNA, 15 bp, Homo sapiens
tttatgctagcgttt

SEQ ID NO: 803590 - DNA, 15 bp, Homo sapiens
ttatgctagcgttta

SEQ ID NO: 803591 - DNA, 15 bp, Homo sapiens
tatgctagcgtttaa

SEQ ID NO: 803592 - DNA, 15 bp, Homo sapiens
atgctagcgtttaag

SEQ ID NO: 803593 - DNA, 15 bp, Homo sapiens
tgctagcgtttaagg

SEQ ID NO: 803594 - DNA, 15 bp, Homo sapiens
gctagcgtttaagga

SEQ ID NO: 803595 - DNA, 15 bp, Homo sapiens
ctagcgtttaaggaa

SEQ ID NO: 803596 - DNA, 15 bp, Homo sapiens
tagcgtttaaggaag

SEQ ID NO: 803597 - DNA, 15 bp, Homo sapiens
agcgtttaaggaagc

SEQ ID NO: 803598 - DNA, 15 bp, Homo sapiens
gcgtttaaggaagct

SEQ ID NO: 803599 - DNA, 15 bp, Homo sapiens
cgtttaaggaagctc

SEQ ID NO: 803600 - DNA, 15 bp, Homo sapiens
gtttaaggaagctcc

SEQ ID NO: 803601 - DNA, 15 bp, Homo sapiens
tttaaggaagctcct

SEQ ID NO: 803602 - DNA, 15 bp, Homo sapiens
ttaaggaagctcctg

SEQ ID NO: 803603 - DNA, 15 bp, Homo sapiens
taaggaagctcctga

SEQ ID NO: 803604 - DNA, 15 bp, Homo sapiens
aaggaagctcctgat

SEQ ID NO: 803605 - DNA, 15 bp, Homo sapiens
aggaagctcctgatt

SEQ ID NO: 803606 - DNA, 15 bp, Homo sapiens
ggaagctcctgattc

SEQ ID NO: 803607 - DNA, 15 bp, Homo sapiens
gaagctcctgattca

SEQ ID NO: 803608 - DNA, 15 bp, Homo sapiens
aagctcctgattcaa

SEQ ID NO: 803609 - DNA, 15 bp, Homo sapiens
agctcctgattcaag

SEQ ID NO: 803610 - DNA, 15 bp, Homo sapiens
gctcctgattcaagc

SEQ ID NO: 803611 - DNA, 15 bp, Homo sapiens
ctcctgattcaagca

SEQ ID NO: 803612 - DNA, 15 bp, Homo sapiens
tcctgattcaagcac

SEQ ID NO: 803613 - DNA, 15 bp, Homo sapiens
cctgattcaagcaca

SEQ ID NO: 803614 - DNA, 15 bp, Homo sapiens
ctgattcaagcacag

SEQ ID NO: 803615 - DNA, 15 bp, Homo sapiens
tgattcaagcacaga

SEQ ID NO: 803616 - DNA, 15 bp, Homo sapiens
gattcaagcacagaa

SEQ ID NO: 803617 - DNA, 15 bp, Homo sapiens
attcaagcacagaaa

SEQ ID NO: 803618 - DNA, 15 bp, Homo sapiens
ttcaagcacagaaat

SEQ ID NO: 803619 - DNA, 15 bp, Homo sapiens
tcaagcacagaaatg

SEQ ID NO: 803620 - DNA, 15 bp, Homo sapiens
caagcacagaaatga

SEQ ID NO: 803621 - DNA, 15 bp, Homo sapiens
aagcacagaaatgaa

SEQ ID NO: 803622 - DNA, 15 bp, Homo sapiens
agcacagaaatgaac

SEQ ID NO: 803623 - DNA, 15 bp, Homo sapiens
gcacagaaatgaact

SEQ ID NO: 803624 - DNA, 15 bp, Homo sapiens
cacagaaatgaactg

SEQ ID NO: 803625 - DNA, 15 bp, Homo sapiens
acagaaatgaactgt

SEQ ID NO: 803626 - DNA, 15 bp, Homo sapiens
cagaaatgaactgtt

SEQ ID NO: 803627 - DNA, 15 bp, Homo sapiens
agaaatgaactgttt

SEQ ID NO: 803628 - DNA, 15 bp, Homo sapiens
gaaatgaactgttta

SEQ ID NO: 803629 - DNA, 15 bp, Homo sapiens
aaatgaactgtttaa

SEQ ID NO: 803630 - DNA, 15 bp, Homo sapiens
aatgaactgtttaac

SEQ ID NO: 803631 - DNA, 15 bp, Homo sapiens
atgaactgtttaacc

SEQ ID NO: 803632 - DNA, 15 bp, Homo sapiens
tgaactgtttaacca

SEQ ID NO: 803633 - DNA, 15 bp, Homo sapiens
gaactgtttaaccat

SEQ ID NO: 803634 - DNA, 15 bp, Homo sapiens
aactgtttaaccatt

SEQ ID NO: 803635 - DNA, 15 bp, Homo sapiens
actgtttaaccattt

SEQ ID NO: 803636 - DNA, 15 bp, Homo sapiens
ctgtttaaccatttc

SEQ ID NO: 803637 - DNA, 15 bp, Homo sapiens
tgtttaaccatttcc

SEQ ID NO: 803638 - DNA, 15 bp, Homo sapiens
gtttaaccatttccg

SEQ ID NO: 803639 - DNA, 15 bp, Homo sapiens
tttaaccatttccga

SEQ ID NO: 803640 - DNA, 15 bp, Homo sapiens
ttaaccatttccgag

SEQ ID NO: 803641 - DNA, 15 bp, Homo sapiens
taaccatttccgagc

SEQ ID NO: 803642 - DNA, 15 bp, Homo sapiens
aaccatttccgagcc

SEQ ID NO: 803643 - DNA, 15 bp, Homo sapiens
accatttccgagcca

SEQ ID NO: 803644 - DNA, 15 bp, Homo sapiens
ccatttccgagccag

SEQ ID NO: 803645 - DNA, 15 bp, Homo sapiens
catttccgagccaga

SEQ ID NO: 803646 - DNA, 15 bp, Homo sapiens
atttccgagccagag

SEQ ID NO: 803647 - DNA, 15 bp, Homo sapiens
tttccgagccagaga

SEQ ID NO: 803648 - DNA, 15 bp, Homo sapiens
ttccgagccagagat

SEQ ID NO: 803649 - DNA, 15 bp, Homo sapiens
tccgagccagagatg

SEQ ID NO: 803650 - DNA, 15 bp, Homo sapiens
ccgagccagagatga

SEQ ID NO: 803651 - DNA, 15 bp, Homo sapiens
cgagccagagatgag

SEQ ID NO: 803652 - DNA, 15 bp, Homo sapiens
gagccagagatgagc

SEQ ID NO: 803653 - DNA, 15 bp, Homo sapiens
agccagagatgagcc

SEQ ID NO: 803654 - DNA, 15 bp, Homo sapiens
gccagagatgagcca

SEQ ID NO: 803655 - DNA, 15 bp, Homo sapiens
ccagagatgagccat

SEQ ID NO: 803656 - DNA, 15 bp, Homo sapiens
cagagatgagccatc

SEQ ID NO: 803657 - DNA, 15 bp, Homo sapiens
agagatgagccatca

SEQ ID NO: 803658 - DNA, 15 bp, Homo sapiens
gagatgagccatcac

SEQ ID NO: 803659 - DNA, 15 bp, Homo sapiens
agatgagccatcaca

SEQ ID NO: 803660 - DNA, 15 bp, Homo sapiens
gatgagccatcacag

SEQ ID NO: 803661 - DNA, 15 bp, Homo sapiens
atgagccatcacaga

SEQ ID NO: 803662 - DNA, 15 bp, Homo sapiens
tgagccatcacagac

SEQ ID NO: 803663 - DNA, 15 bp, Homo sapiens
gagccatcacagacc

SEQ ID NO: 803664 - DNA, 15 bp, Homo sapiens
agccatcacagacca

SEQ ID NO: 803665 - DNA, 15 bp, Homo sapiens
gccatcacagaccaa

SEQ ID NO: 803666 - DNA, 15 bp, Homo sapiens
ccatcacagaccaac

SEQ ID NO: 803667 - DNA, 15 bp, Homo sapiens
catcacagaccaacg

SEQ ID NO: 803668 - DNA, 15 bp, Homo sapiens
atcacagaccaacgc

SEQ ID NO: 803669 - DNA, 15 bp, Homo sapiens
tcacagaccaacgcg

SEQ ID NO: 803670 - DNA, 15 bp, Homo sapiens
cacagaccaacgcgg

SEQ ID NO: 803671 - DNA, 15 bp, Homo sapiens
acagaccaacgcgga

SEQ ID NO: 803672 - DNA, 15 bp, Homo sapiens
cagaccaacgcggag

SEQ ID NO: 803673 - DNA, 15 bp, Homo sapiens
agaccaacgcggagt

SEQ ID NO: 803674 - DNA, 15 bp, Homo sapiens
gaccaacgcggagtc

SEQ ID NO: 803675 - DNA, 15 bp, Homo sapiens
accaacgcggagtct

SEQ ID NO: 803676 - DNA, 15 bp, Homo sapiens
ccaacgcggagtctg

SEQ ID NO: 803677 - DNA, 15 bp, Homo sapiens
caacgcggagtctga

SEQ ID NO: 803678 - DNA, 15 bp, Homo sapiens
aacgcggagtctgat

SEQ ID NO: 803679 - DNA, 15 bp, Homo sapiens
acgcggagtctgata

SEQ ID NO: 803680 - DNA, 15 bp, Homo sapiens
cgcggagtctgatag

SEQ ID NO: 803681 - DNA, 15 bp, Homo sapiens
gcggagtctgatagg

SEQ ID NO: 803682 - DNA, 15 bp, Homo sapiens
cggagtctgataggt

SEQ ID NO: 803683 - DNA, 15 bp, Homo sapiens
ggagtctgataggtt

SEQ ID NO: 803684 - DNA, 15 bp, Homo sapiens
gagtctgataggtta

SEQ ID NO: 803685 - DNA, 15 bp, Homo sapiens
agtctgataggttag

SEQ ID NO: 803686 - DNA, 15 bp, Homo sapiens
gtctgataggttagg

SEQ ID NO: 803687 - DNA, 15 bp, Homo sapiens
tctgataggttaggg

SEQ ID NO: 803688 - DNA, 15 bp, Homo sapiens
ctgataggttagggg

SEQ ID NO: 803689 - DNA, 15 bp, Homo sapiens
tgataggttaggggt

SEQ ID NO: 803690 - DNA, 15 bp, Homo sapiens
gataggttaggggtg

SEQ ID NO: 803691 - DNA, 15 bp, Homo sapiens
ataggttaggggtga

SEQ ID NO: 803692 - DNA, 15 bp, Homo sapiens
taggttaggggtgaa

SEQ ID NO: 803693 - DNA, 15 bp, Homo sapiens
aggttaggggtgaat

SEQ ID NO: 803694 - DNA, 15 bp, Homo sapiens
ggttaggggtgaatt

SEQ ID NO: 803695 - DNA, 15 bp, Homo sapiens
gttaggggtgaattg

SEQ ID NO: 803696 - DNA, 15 bp, Homo sapiens
ttaggggtgaattgc

SEQ ID NO: 803697 - DNA, 15 bp, Homo sapiens
taggggtgaattgcg

SEQ ID NO: 803698 - DNA, 15 bp, Homo sapiens
aggggtgaattgcgc

SEQ ID NO: 803699 - DNA, 15 bp, Homo sapiens
ggggtgaattgcgct

SEQ ID NO: 803700 - DNA, 15 bp, Homo sapiens
gggtgaattgcgctg

SEQ ID NO: 803701 - DNA, 15 bp, Homo sapiens
ggtgaattgcgctgg

SEQ ID NO: 803702 - DNA, 15 bp, Homo sapiens
gtgaattgcgctgga

SEQ ID NO: 803703 - DNA, 15 bp, Homo sapiens
tgaattgcgctggag

SEQ ID NO: 803704 - DNA, 15 bp, Homo sapiens
gaattgcgctggaga

SEQ ID NO: 803705 - DNA, 15 bp, Homo sapiens
aattgcgctggagag

SEQ ID NO: 803706 - DNA, 15 bp, Homo sapiens
attgcgctggagagg

SEQ ID NO: 803707 - DNA, 15 bp, Homo sapiens
ttgcgctggagaggc

SEQ ID NO: 803708 - DNA, 15 bp, Homo sapiens
tgcgctggagaggct

SEQ ID NO: 803709 - DNA, 15 bp, Homo sapiens
gcgctggagaggctg

SEQ ID NO: 803710 - DNA, 15 bp, Homo sapiens
cgctggagaggctga

SEQ ID NO: 803711 - DNA, 15 bp, Homo sapiens
gctggagaggctgaa

SEQ ID NO: 803712 - DNA, 15 bp, Homo sapiens
ctggagaggctgaac

SEQ ID NO: 803713 - DNA, 15 bp, Homo sapiens
tggagaggctgaacg

SEQ ID NO: 803714 - DNA, 15 bp, Homo sapiens
ggagaggctgaacgt

SEQ ID NO: 803715 - DNA, 15 bp, Homo sapiens
gagaggctgaacgtt

SEQ ID NO: 803716 - DNA, 15 bp, Homo sapiens
agaggctgaacgttt

SEQ ID NO: 803717 - DNA, 15 bp, Homo sapiens
gaggctgaacgtttc

SEQ ID NO: 803718 - DNA, 15 bp, Homo sapiens
aggctgaacgtttct

SEQ ID NO: 803719 - DNA, 15 bp, Homo sapiens
ggctgaacgtttctt

SEQ ID NO: 803720 - DNA, 15 bp, Homo sapiens
gctgaacgtttctta

SEQ ID NO: 803721 - DNA, 15 bp, Homo sapiens
ctgaacgtttcttaa

SEQ ID NO: 803722 - DNA, 15 bp, Homo sapiens
tgaacgtttcttaaa

SEQ ID NO: 803723 - DNA, 15 bp, Homo sapiens
gaacgtttcttaaag

SEQ ID NO: 803724 - DNA, 15 bp, Homo sapiens
aacgtttcttaaagt

SEQ ID NO: 803725 - DNA, 15 bp, Homo sapiens
acgtttcttaaagtc

SEQ ID NO: 803726 - DNA, 15 bp, Homo sapiens
cgtttcttaaagtcc

SEQ ID NO: 803727 - DNA, 15 bp, Homo sapiens
gtttcttaaagtcca

SEQ ID NO: 803728 - DNA, 15 bp, Homo sapiens
tttcttaaagtccac

SEQ ID NO: 803729 - DNA, 15 bp, Homo sapiens
ttcttaaagtccact

SEQ ID NO: 803730 - DNA, 15 bp, Homo sapiens
tcttaaagtccactg

SEQ ID NO: 803731 - DNA, 15 bp, Homo sapiens
cttaaagtccactgg

SEQ ID NO: 803732 - DNA, 15 bp, Homo sapiens
ttaaagtccactggc

SEQ ID NO: 803733 - DNA, 15 bp, Homo sapiens
taaagtccactggca

SEQ ID NO: 803734 - DNA, 15 bp, Homo sapiens
aaagtccactggcaa

SEQ ID NO: 803735 - DNA, 15 bp, Homo sapiens
aagtccactggcaac

SEQ ID NO: 803736 - DNA, 15 bp, Homo sapiens
agtccactggcaaca

SEQ ID NO: 803737 - DNA, 15 bp, Homo sapiens
gtccactggcaacag

SEQ ID NO: 803738 - DNA, 15 bp, Homo sapiens
tccactggcaacagg

SEQ ID NO: 803739 - DNA, 15 bp, Homo sapiens
ccactggcaacagga

SEQ ID NO: 803740 - DNA, 15 bp, Homo sapiens
cactggcaacaggaa

SEQ ID NO: 803741 - DNA, 15 bp, Homo sapiens
actggcaacaggaag

SEQ ID NO: 803742 - DNA, 15 bp, Homo sapiens
ctggcaacaggaagt

SEQ ID NO: 803743 - DNA, 15 bp, Homo sapiens
tggcaacaggaagtc

SEQ ID NO: 803744 - DNA, 15 bp, Homo sapiens
ggcaacaggaagtcc

SEQ ID NO: 803745 - DNA, 15 bp, Homo sapiens
gcaacaggaagtcct

SEQ ID NO: 803746 - DNA, 15 bp, Homo sapiens
caacaggaagtcctc

SEQ ID NO: 803747 - DNA, 15 bp, Homo sapiens
aacaggaagtcctca

SEQ ID NO: 803748 - DNA, 15 bp, Homo sapiens
acaggaagtcctcag

SEQ ID NO: 803749 - DNA, 15 bp, Homo sapiens
caggaagtcctcaga

SEQ ID NO: 803750 - DNA, 15 bp, Homo sapiens
aggaagtcctcagaa

SEQ ID NO: 803751 - DNA, 15 bp, Homo sapiens
ggaagtcctcagaag

SEQ ID NO: 803752 - DNA, 15 bp, Homo sapiens
gaagtcctcagaagt

SEQ ID NO: 803753 - DNA, 15 bp, Homo sapiens
aagtcctcagaagtc

SEQ ID NO: 803754 - DNA, 15 bp, Homo sapiens
agtcctcagaagtcc

SEQ ID NO: 803755 - DNA, 15 bp, Homo sapiens
gtcctcagaagtcca

SEQ ID NO: 803756 - DNA, 15 bp, Homo sapiens
tcctcagaagtccaa

SEQ ID NO: 803757 - DNA, 15 bp, Homo sapiens
cctcagaagtccaat

SEQ ID NO: 803758 - DNA, 15 bp, Homo sapiens
ctcagaagtccaatt

SEQ ID NO: 803759 - DNA, 15 bp, Homo sapiens
tcagaagtccaattt

SEQ ID NO: 803760 - DNA, 15 bp, Homo sapiens
cagaagtccaatttg

SEQ ID NO: 803761 - DNA, 15 bp, Homo sapiens
agaagtccaatttgt

SEQ ID NO: 803762 - DNA, 15 bp, Homo sapiens
gaagtccaatttgtt

SEQ ID NO: 803763 - DNA, 15 bp, Homo sapiens
aagtccaatttgttg

SEQ ID NO: 803764 - DNA, 15 bp, Homo sapiens
agtccaatttgttgt

SEQ ID NO: 803765 - DNA, 15 bp, Homo sapiens
gtccaatttgttgtt

SEQ ID NO: 803766 - DNA, 15 bp, Homo sapiens
tccaatttgttgttg

SEQ ID NO: 803767 - DNA, 15 bp, Homo sapiens
ccaatttgttgttgt

SEQ ID NO: 803768 - DNA, 15 bp, Homo sapiens
caatttgttgttgtt

SEQ ID NO: 803769 - DNA, 15 bp, Homo sapiens
aatttgttgttgttc

SEQ ID NO: 803770 - DNA, 15 bp, Homo sapiens
atttgttgttgttcc

SEQ ID NO: 803771 - DNA, 15 bp, Homo sapiens
tttgttgttgttcct

SEQ ID NO: 803772 - DNA, 15 bp, Homo sapiens
ttgttgttgttcctc

SEQ ID NO: 803773 - DNA, 15 bp, Homo sapiens
tgttgttgttcctcc

SEQ ID NO: 803774 - DNA, 15 bp, Homo sapiens
gttgttgttcctccc

SEQ ID NO: 803775 - DNA, 15 bp, Homo sapiens
ttgttgttcctccct

SEQ ID NO: 803776 - DNA, 15 bp, Homo sapiens
tgttgttcctccctg

SEQ ID NO: 803777 - DNA, 15 bp, Homo sapiens
gttgttcctccctga

SEQ ID NO: 803778 - DNA, 15 bp, Homo sapiens
ttgttcctccctgaa

SEQ ID NO: 803779 - DNA, 15 bp, Homo sapiens
tgttcctccctgaac

SEQ ID NO: 803780 - DNA, 15 bp, Homo sapiens
gttcctccctgaact

SEQ ID NO: 803781 - DNA, 15 bp, Homo sapiens
ttcctccctgaactt

SEQ ID NO: 803782 - DNA, 15 bp, Homo sapiens
tcctccctgaacttc

SEQ ID NO: 803783 - DNA, 15 bp, Homo sapiens
cctccctgaacttct

SEQ ID NO: 803784 - DNA, 15 bp, Homo sapiens
ctccctgaacttctg

SEQ ID NO: 803785 - DNA, 15 bp, Homo sapiens
tccctgaacttctgg

SEQ ID NO: 803786 - DNA, 15 bp, Homo sapiens
ccctgaacttctgga

SEQ ID NO: 803787 - DNA, 15 bp, Homo sapiens
cctgaacttctggat

SEQ ID NO: 803788 - DNA, 15 bp, Homo sapiens
ctgaacttctggatt

SEQ ID NO: 803789 - DNA, 15 bp, Homo sapiens
tgaacttctggattt

SEQ ID NO: 803790 - DNA, 15 bp, Homo sapiens
gaacttctggatttc

SEQ ID NO: 803791 - DNA, 15 bp, Homo sapiens
aacttctggatttct

SEQ ID NO: 803792 - DNA, 15 bp, Homo sapiens
acttctggatttctg

SEQ ID NO: 803793 - DNA, 15 bp, Homo sapiens
cttctggatttctga

SEQ ID NO: 803794 - DNA, 15 bp, Homo sapiens
ttctggatttctgag

SEQ ID NO: 803795 - DNA, 15 bp, Homo sapiens
tctggatttctgagg

SEQ ID NO: 803796 - DNA, 15 bp, Homo sapiens
ctggatttctgagga

SEQ ID NO: 803797 - DNA, 15 bp, Homo sapiens
tggatttctgaggat

SEQ ID NO: 803798 - DNA, 15 bp, Homo sapiens
ggatttctgaggatg

SEQ ID NO: 803799 - DNA, 15 bp, Homo sapiens
gatttctgaggatgg

SEQ ID NO: 803800 - DNA, 15 bp, Homo sapiens
atttctgaggatggt

SEQ ID NO: 803801 - DNA, 15 bp, Homo sapiens
tttctgaggatggtt

SEQ ID NO: 803802 - DNA, 15 bp, Homo sapiens
ttctgaggatggttg

SEQ ID NO: 803803 - DNA, 15 bp, Homo sapiens
tctgaggatggttgt

SEQ ID NO: 803804 - DNA, 15 bp, Homo sapiens
ctgaggatggttgtg

SEQ ID NO: 803805 - DNA, 15 bp, Homo sapiens
tgaggatggttgtga

SEQ ID NO: 803806 - DNA, 15 bp, Homo sapiens
gaggatggttgtgag

SEQ ID NO: 803807 - DNA, 15 bp, Homo sapiens
aggatggttgtgaga

SEQ ID NO: 803808 - DNA, 15 bp, Homo sapiens
ggatggttgtgagag

SEQ ID NO: 803809 - DNA, 15 bp, Homo sapiens
gatggttgtgagagt

SEQ ID NO: 803810 - DNA, 15 bp, Homo sapiens
atggttgtgagagtg

SEQ ID NO: 803811 - DNA, 15 bp, Homo sapiens
tggttgtgagagtgg

SEQ ID NO: 803812 - DNA, 15 bp, Homo sapiens
ggttgtgagagtggc

SEQ ID NO: 803813 - DNA, 15 bp, Homo sapiens
gttgtgagagtggcc

SEQ ID NO: 803814 - DNA, 15 bp, Homo sapiens
ttgtgagagtggccg

SEQ ID NO: 803815 - DNA, 15 bp, Homo sapiens
tgtgagagtggccgt

SEQ ID NO: 803816 - DNA, 15 bp, Homo sapiens
gtgagagtggccgtg

SEQ ID NO: 803817 - DNA, 15 bp, Homo sapiens
tgagagtggccgtgt

SEQ ID NO: 803818 - DNA, 15 bp, Homo sapiens
gagagtggccgtgtg

SEQ ID NO: 803819 - DNA, 15 bp, Homo sapiens
agagtggccgtgtgt

SEQ ID NO: 803820 - DNA, 15 bp, Homo sapiens
gagtggccgtgtgtc

SEQ ID NO: 803821 - DNA, 15 bp, Homo sapiens
agtggccgtgtgtca

SEQ ID NO: 803822 - DNA, 15 bp, Homo sapiens
gtggccgtgtgtcaa

SEQ ID NO: 803823 - DNA, 15 bp, Homo sapiens
tggccgtgtgtcaat

SEQ ID NO: 803824 - DNA, 15 bp, Homo sapiens
ggccgtgtgtcaatt

SEQ ID NO: 803825 - DNA, 15 bp, Homo sapiens
gccgtgtgtcaattt

SEQ ID NO: 803826 - DNA, 15 bp, Homo sapiens
ccgtgtgtcaatttt

SEQ ID NO: 803827 - DNA, 15 bp, Homo sapiens
cgtgtgtcaattttt

SEQ ID NO: 803828 - DNA, 15 bp, Homo sapiens
gtgtgtcaattttta

SEQ ID NO: 803829 - DNA, 15 bp, Homo sapiens
tgtgtcaatttttaa

SEQ ID NO: 803830 - DNA, 15 bp, Homo sapiens
gtgtcaatttttaaa

SEQ ID NO: 803831 - DNA, 15 bp, Homo sapiens
tgtcaatttttaaat

SEQ ID NO: 803832 - DNA, 15 bp, Homo sapiens
gtcaatttttaaatc

SEQ ID NO: 803833 - DNA, 15 bp, Homo sapiens
tcaatttttaaatca

SEQ ID NO: 803834 - DNA, 15 bp, Homo sapiens
caatttttaaatcat

SEQ ID NO: 803835 - DNA, 15 bp, Homo sapiens
aatttttaaatcatg

SEQ ID NO: 803836 - DNA, 15 bp, Homo sapiens
atttttaaatcatgt

SEQ ID NO: 803837 - DNA, 15 bp, Homo sapiens
tttttaaatcatgtg

SEQ ID NO: 803838 - DNA, 15 bp, Homo sapiens
ttttaaatcatgtgg

SEQ ID NO: 803839 - DNA, 15 bp, Homo sapiens
tttaaatcatgtggt

SEQ ID NO: 803840 - DNA, 15 bp, Homo sapiens
ttaaatcatgtggta

SEQ ID NO: 803841 - DNA, 15 bp, Homo sapiens
taaatcatgtggtaa

SEQ ID NO: 803842 - DNA, 15 bp, Homo sapiens
aaatcatgtggtaat

SEQ ID NO: 803843 - DNA, 15 bp, Homo sapiens
aatcatgtggtaatt

SEQ ID NO: 803844 - DNA, 15 bp, Homo sapiens
atcatgtggtaattt

SEQ ID NO: 803845 - DNA, 15 bp, Homo sapiens
tcatgtggtaatttg

SEQ ID NO: 803846 - DNA, 15 bp, Homo sapiens
catgtggtaatttgt

SEQ ID NO: 803847 - DNA, 15 bp, Homo sapiens
atgtggtaatttgtc

SEQ ID NO: 803848 - DNA, 15 bp, Homo sapiens
tgtggtaatttgtcc

SEQ ID NO: 803849 - DNA, 15 bp, Homo sapiens
gtggtaatttgtcca

SEQ ID NO: 803850 - DNA, 15 bp, Homo sapiens
tggtaatttgtccat

SEQ ID NO: 803851 - DNA, 15 bp, Homo sapiens
ggtaatttgtccatg

SEQ ID NO: 803852 - DNA, 15 bp, Homo sapiens
gtaatttgtccatga

SEQ ID NO: 803853 - DNA, 15 bp, Homo sapiens
taatttgtccatgat

SEQ ID NO: 803854 - DNA, 15 bp, Homo sapiens
aatttgtccatgatt

SEQ ID NO: 803855 - DNA, 15 bp, Homo sapiens
atttgtccatgattg

SEQ ID NO: 803856 - DNA, 15 bp, Homo sapiens
tttgtccatgattgt

SEQ ID NO: 803857 - DNA, 15 bp, Homo sapiens
ttgtccatgattgtt

SEQ ID NO: 803858 - DNA, 15 bp, Homo sapiens
tgtccatgattgttt

SEQ ID NO: 803859 - DNA, 15 bp, Homo sapiens
gtccatgattgttta

SEQ ID NO: 803860 - DNA, 15 bp, Homo sapiens
tccatgattgtttat

SEQ ID NO: 803861 - DNA, 15 bp, Homo sapiens
ccatgattgtttatt

SEQ ID NO: 803862 - DNA, 15 bp, Homo sapiens
catgattgtttattt

SEQ ID NO: 803863 - DNA, 15 bp, Homo sapiens
atgattgtttatttt

SEQ ID NO: 803864 - DNA, 15 bp, Homo sapiens
tgattgtttattttg

SEQ ID NO: 803865 - DNA, 15 bp, Homo sapiens
gattgtttattttgt

SEQ ID NO: 803866 - DNA, 15 bp, Homo sapiens
attgtttattttgtc

SEQ ID NO: 803867 - DNA, 15 bp, Homo sapiens
ttgtttattttgtcc

SEQ ID NO: 803868 - DNA, 15 bp, Homo sapiens
tgtttattttgtccc

SEQ ID NO: 803869 - DNA, 15 bp, Homo sapiens
gtttattttgtcccc

SEQ ID NO: 803870 - DNA, 15 bp, Homo sapiens
tttattttgtccccc

SEQ ID NO: 803871 - DNA, 15 bp, Homo sapiens
ttattttgtccccca

SEQ ID NO: 803872 - DNA, 15 bp, Homo sapiens
tattttgtcccccag

SEQ ID NO: 803873 - DNA, 15 bp, Homo sapiens
attttgtcccccagc

SEQ ID NO: 803874 - DNA, 15 bp, Homo sapiens
ttttgtcccccagca

SEQ ID NO: 803875 - DNA, 15 bp, Homo sapiens
tttgtcccccagcaa

SEQ ID NO: 803876 - DNA, 15 bp, Homo sapiens
ttgtcccccagcaag

SEQ ID NO: 803877 - DNA, 15 bp, Homo sapiens
tgtcccccagcaaga

SEQ ID NO: 803878 - DNA, 15 bp, Homo sapiens
gtcccccagcaagat

SEQ ID NO: 803879 - DNA, 15 bp, Homo sapiens
tcccccagcaagatt

SEQ ID NO: 803880 - DNA, 15 bp, Homo sapiens
cccccagcaagattg

SEQ ID NO: 803881 - DNA, 15 bp, Homo sapiens
ccccagcaagattgt

SEQ ID NO: 803882 - DNA, 15 bp, Homo sapiens
cccagcaagattgta

SEQ ID NO: 803883 - DNA, 15 bp, Homo sapiens
ccagcaagattgtat

SEQ ID NO: 803884 - DNA, 15 bp, Homo sapiens
cagcaagattgtata

SEQ ID NO: 803885 - DNA, 15 bp, Homo sapiens
agcaagattgtatac

SEQ ID NO: 803886 - DNA, 15 bp, Homo sapiens
gcaagattgtatact

SEQ ID NO: 803887 - DNA, 15 bp, Homo sapiens
caagattgtatactc

SEQ ID NO: 803888 - DNA, 15 bp, Homo sapiens
aagattgtatactcc

SEQ ID NO: 803889 - DNA, 15 bp, Homo sapiens
agattgtatactcca

SEQ ID NO: 803890 - DNA, 15 bp, Homo sapiens
gattgtatactccag

SEQ ID NO: 803891 - DNA, 15 bp, Homo sapiens
attgtatactccaga

SEQ ID NO: 803892 - DNA, 15 bp, Homo sapiens
ttgtatactccagaa

SEQ ID NO: 803893 - DNA, 15 bp, Homo sapiens
tgtatactccagaaa

SEQ ID NO: 803894 - DNA, 15 bp, Homo sapiens
gtatactccagaaaa

SEQ ID NO: 803895 - DNA, 15 bp, Homo sapiens
tatactccagaaaag

SEQ ID NO: 803896 - DNA, 15 bp, Homo sapiens
atactccagaaaagg

SEQ ID NO: 803897 - DNA, 15 bp, Homo sapiens
tactccagaaaaggg

SEQ ID NO: 803898 - DNA, 15 bp, Homo sapiens
actccagaaaagggg

SEQ ID NO: 803899 - DNA, 15 bp, Homo sapiens
ctccagaaaaggggt

SEQ ID NO: 803900 - DNA, 15 bp, Homo sapiens
tccagaaaaggggta

SEQ ID NO: 803901 - DNA, 15 bp, Homo sapiens
ccagaaaaggggtag

SEQ ID NO: 803902 - DNA, 15 bp, Homo sapiens
cagaaaaggggtagc

SEQ ID NO: 803903 - DNA, 15 bp, Homo sapiens
agaaaaggggtagct

SEQ ID NO: 803904 - DNA, 15 bp, Homo sapiens
gaaaaggggtagctg

SEQ ID NO: 803905 - DNA, 15 bp, Homo sapiens
aaaaggggtagctga

SEQ ID NO: 803906 - DNA, 15 bp, Homo sapiens
aaaggggtagctgac

SEQ ID NO: 803907 - DNA, 15 bp, Homo sapiens
aaggggtagctgacc

SEQ ID NO: 803908 - DNA, 15 bp, Homo sapiens
aggggtagctgacct

SEQ ID NO: 803909 - DNA, 15 bp, Homo sapiens
ggggtagctgaccta

SEQ ID NO: 803910 - DNA, 15 bp, Homo sapiens
gggtagctgacctac

SEQ ID NO: 803911 - DNA, 15 bp, Homo sapiens
ggtagctgacctact

SEQ ID NO: 803912 - DNA, 15 bp, Homo sapiens
gtagctgacctacta

SEQ ID NO: 803913 - DNA, 15 bp, Homo sapiens
tagctgacctactag

SEQ ID NO: 803914 - DNA, 15 bp, Homo sapiens
agctgacctactagg

SEQ ID NO: 803915 - DNA, 15 bp, Homo sapiens
gctgacctactaggt

SEQ ID NO: 803916 - DNA, 15 bp, Homo sapiens
ctgacctactaggtg

SEQ ID NO: 803917 - DNA, 15 bp, Homo sapiens
tgacctactaggtga

SEQ ID NO: 803918 - DNA, 15 bp, Homo sapiens
gacctactaggtgaa

SEQ ID NO: 803919 - DNA, 15 bp, Homo sapiens
acctactaggtgaaa

SEQ ID NO: 803920 - DNA, 15 bp, Homo sapiens
cctactaggtgaaat

SEQ ID NO: 803921 - DNA, 15 bp, Homo sapiens
ctactaggtgaaatc

SEQ ID NO: 803922 - DNA, 15 bp, Homo sapiens
tactaggtgaaatca

SEQ ID NO: 803923 - DNA, 15 bp, Homo sapiens
actaggtgaaatcat

SEQ ID NO: 803924 - DNA, 15 bp, Homo sapiens
ctaggtgaaatcatg

SEQ ID NO: 803925 - DNA, 15 bp, Homo sapiens
taggtgaaatcatgc

SEQ ID NO: 803926 - DNA, 15 bp, Homo sapiens
aggtgaaatcatgct

SEQ ID NO: 803927 - DNA, 15 bp, Homo sapiens
ggtgaaatcatgctg

SEQ ID NO: 803928 - DNA, 15 bp, Homo sapiens
gtgaaatcatgctgt

SEQ ID NO: 803929 - DNA, 15 bp, Homo sapiens
tgaaatcatgctgta

SEQ ID NO: 803930 - DNA, 15 bp, Homo sapiens
gaaatcatgctgtag

SEQ ID NO: 803931 - DNA, 15 bp, Homo sapiens
aaatcatgctgtagt

SEQ ID NO: 803932 - DNA, 15 bp, Homo sapiens
aatcatgctgtagtt

SEQ ID NO: 803933 - DNA, 15 bp, Homo sapiens
atcatgctgtagttc

SEQ ID NO: 803934 - DNA, 15 bp, Homo sapiens
tcatgctgtagttct

SEQ ID NO: 803935 - DNA, 15 bp, Homo sapiens
catgctgtagttctg

SEQ ID NO: 803936 - DNA, 15 bp, Homo sapiens
atgctgtagttctga

SEQ ID NO: 803937 - DNA, 15 bp, Homo sapiens
tgctgtagttctgag

SEQ ID NO: 803938 - DNA, 15 bp, Homo sapiens
gctgtagttctgagt

SEQ ID NO: 803939 - DNA, 15 bp, Homo sapiens
ctgtagttctgagtt

SEQ ID NO: 803940 - DNA, 15 bp, Homo sapiens
tgtagttctgagttg

SEQ ID NO: 803941 - DNA, 15 bp, Homo sapiens
gtagttctgagttgc

SEQ ID NO: 803942 - DNA, 15 bp, Homo sapiens
tagttctgagttgct

SEQ ID NO: 803943 - DNA, 15 bp, Homo sapiens
agttctgagttgctg

SEQ ID NO: 803944 - DNA, 15 bp, Homo sapiens
gttctgagttgctgc

SEQ ID NO: 803945 - DNA, 15 bp, Homo sapiens
ttctgagttgctgct

SEQ ID NO: 803946 - DNA, 15 bp, Homo sapiens
tctgagttgctgctt

SEQ ID NO: 803947 - DNA, 15 bp, Homo sapiens
ctgagttgctgcttc

SEQ ID NO: 803948 - DNA, 15 bp, Homo sapiens
tgagttgctgcttct

SEQ ID NO: 803949 - DNA, 15 bp, Homo sapiens
gagttgctgcttctt

SEQ ID NO: 803950 - DNA, 15 bp, Homo sapiens
agttgctgcttcttc

SEQ ID NO: 803951 - DNA, 15 bp, Homo sapiens
gttgctgcttcttca

SEQ ID NO: 803952 - DNA, 15 bp, Homo sapiens
ttgctgcttcttcat

SEQ ID NO: 803953 - DNA, 15 bp, Homo sapiens
tgctgcttcttcatg

SEQ ID NO: 803954 - DNA, 15 bp, Homo sapiens
gctgcttcttcatgc

SEQ ID NO: 803955 - DNA, 15 bp, Homo sapiens
ctgcttcttcatgca

SEQ ID NO: 803956 - DNA, 15 bp, Homo sapiens
tgcttcttcatgcat

SEQ ID NO: 803957 - DNA, 15 bp, Homo sapiens
gcttcttcatgcata

SEQ ID NO: 803958 - DNA, 15 bp, Homo sapiens
cttcttcatgcatac

SEQ ID NO: 803959 - DNA, 15 bp, Homo sapiens
ttcttcatgcataca

SEQ ID NO: 803960 - DNA, 15 bp, Homo sapiens
tcttcatgcatacaa

SEQ ID NO: 803961 - DNA, 15 bp, Homo sapiens
cttcatgcatacaat

SEQ ID NO: 803962 - DNA, 15 bp, Homo sapiens
ttcatgcatacaatg

SEQ ID NO: 803963 - DNA, 15 bp, Homo sapiens
tcatgcatacaatgg

SEQ ID NO: 803964 - DNA, 15 bp, Homo sapiens
catgcatacaatgga

SEQ ID NO: 803965 - DNA, 15 bp, Homo sapiens
atgcatacaatggaa

SEQ ID NO: 803966 - DNA, 15 bp, Homo sapiens
tgcatacaatggaaa

SEQ ID NO: 803967 - DNA, 15 bp, Homo sapiens
gcatacaatggaaac

SEQ ID NO: 803968 - DNA, 15 bp, Homo sapiens
catacaatggaaaca

SEQ ID NO: 803969 - DNA, 15 bp, Homo sapiens
atacaatggaaacaa

SEQ ID NO: 803970 - DNA, 15 bp, Homo sapiens
tacaatggaaacaag

SEQ ID NO: 803971 - DNA, 15 bp, Homo sapiens
acaatggaaacaagt

SEQ ID NO: 803972 - DNA, 15 bp, Homo sapiens
caatggaaacaagta

SEQ ID NO: 803973 - DNA, 15 bp, Homo sapiens
aatggaaacaagtac

SEQ ID NO: 803974 - DNA, 15 bp, Homo sapiens
atggaaacaagtaca

SEQ ID NO: 803975 - DNA, 15 bp, Homo sapiens
tggaaacaagtacac

SEQ ID NO: 803976 - DNA, 15 bp, Homo sapiens
ggaaacaagtacacc

SEQ ID NO: 803977 - DNA, 15 bp, Homo sapiens
gaaacaagtacaccc

SEQ ID NO: 803978 - DNA, 15 bp, Homo sapiens
aaacaagtacacccc

SEQ ID NO: 803979 - DNA, 15 bp, Homo sapiens
aacaagtacaccccc

SEQ ID NO: 803980 - DNA, 15 bp, Homo sapiens
acaagtacaccccca

SEQ ID NO: 803981 - DNA, 15 bp, Homo sapiens
caagtacacccccac

SEQ ID NO: 803982 - DNA, 15 bp, Homo sapiens
aagtacacccccacc

SEQ ID NO: 803983 - DNA, 15 bp, Homo sapiens
agtacacccccacca

SEQ ID NO: 803984 - DNA, 15 bp, Homo sapiens
gtacacccccaccag

SEQ ID NO: 803985 - DNA, 15 bp, Homo sapiens
tacacccccaccagg

SEQ ID NO: 803986 - DNA, 15 bp, Homo sapiens
acacccccaccaggc

SEQ ID NO: 803987 - DNA, 15 bp, Homo sapiens
cacccccaccaggct

SEQ ID NO: 803988 - DNA, 15 bp, Homo sapiens
acccccaccaggctc

SEQ ID NO: 803989 - DNA, 15 bp, Homo sapiens
cccccaccaggctca

SEQ ID NO: 803990 - DNA, 15 bp, Homo sapiens
ccccaccaggctcat

SEQ ID NO: 803991 - DNA, 15 bp, Homo sapiens
cccaccaggctcatg

SEQ ID NO: 803992 - DNA, 15 bp, Homo sapiens
ccaccaggctcatgt

SEQ ID NO: 803993 - DNA, 15 bp, Homo sapiens
caccaggctcatgtg

SEQ ID NO: 803994 - DNA, 15 bp, Homo sapiens
accaggctcatgtgg

SEQ ID NO: 803995 - DNA, 15 bp, Homo sapiens
ccaggctcatgtgga

SEQ ID NO: 803996 - DNA, 15 bp, Homo sapiens
caggctcatgtggag

SEQ ID NO: 803997 - DNA, 15 bp, Homo sapiens
aggctcatgtggagg

SEQ ID NO: 803998 - DNA, 15 bp, Homo sapiens
ggctcatgtggaggg

SEQ ID NO: 803999 - DNA, 15 bp, Homo sapiens
gctcatgtggagggc

SEQ ID NO: 804000 - DNA, 15 bp, Homo sapiens
ctcatgtggagggct

SEQ ID NO: 804001 - DNA, 15 bp, Homo sapiens
tcatgtggagggctc

SEQ ID NO: 804002 - DNA, 15 bp, Homo sapiens
catgtggagggctca

SEQ ID NO: 804003 - DNA, 15 bp, Homo sapiens
atgtggagggctcag

SEQ ID NO: 804004 - DNA, 15 bp, Homo sapiens
tgtggagggctcagt

SEQ ID NO: 804005 - DNA, 15 bp, Homo sapiens
gtggagggctcagtg

SEQ ID NO: 804006 - DNA, 15 bp, Homo sapiens
tggagggctcagtga

SEQ ID NO: 804007 - DNA, 15 bp, Homo sapiens
ggagggctcagtgac

SEQ ID NO: 804008 - DNA, 15 bp, Homo sapiens
gagggctcagtgact

SEQ ID NO: 804009 - DNA, 15 bp, Homo sapiens
agggctcagtgacta

SEQ ID NO: 804010 - DNA, 15 bp, Homo sapiens
gggctcagtgactaa

SEQ ID NO: 804011 - DNA, 15 bp, Homo sapiens
ggctcagtgactaac

SEQ ID NO: 804012 - DNA, 15 bp, Homo sapiens
gctcagtgactaacc

SEQ ID NO: 804013 - DNA, 15 bp, Homo sapiens
ctcagtgactaacct

SEQ ID NO: 804014 - DNA, 15 bp, Homo sapiens
tcagtgactaacctg

SEQ ID NO: 804015 - DNA, 15 bp, Homo sapiens
cagtgactaacctgg

SEQ ID NO: 804016 - DNA, 15 bp, Homo sapiens
agtgactaacctggc

SEQ ID NO: 804017 - DNA, 15 bp, Homo sapiens
gtgactaacctggcc

SEQ ID NO: 804018 - DNA, 15 bp, Homo sapiens
tgactaacctggccc

SEQ ID NO: 804019 - DNA, 15 bp, Homo sapiens
gactaacctggccct

SEQ ID NO: 804020 - DNA, 15 bp, Homo sapiens
actaacctggccctc

SEQ ID NO: 804021 - DNA, 15 bp, Homo sapiens
ctaacctggccctca

SEQ ID NO: 804022 - DNA, 15 bp, Homo sapiens
taacctggccctcag

SEQ ID NO: 804023 - DNA, 15 bp, Homo sapiens
aacctggccctcagc

SEQ ID NO: 804024 - DNA, 15 bp, Homo sapiens
acctggccctcagct

SEQ ID NO: 804025 - DNA, 15 bp, Homo sapiens
cctggccctcagcta

SEQ ID NO: 804026 - DNA, 15 bp, Homo sapiens
ctggccctcagctat

SEQ ID NO: 804027 - DNA, 15 bp, Homo sapiens
tggccctcagctatc

SEQ ID NO: 804028 - DNA, 15 bp, Homo sapiens
ggccctcagctatcc

SEQ ID NO: 804029 - DNA, 15 bp, Homo sapiens
gccctcagctatccc

SEQ ID NO: 804030 - DNA, 15 bp, Homo sapiens
ccctcagctatcccc

SEQ ID NO: 804031 - DNA, 15 bp, Homo sapiens
cctcagctatcccct

SEQ ID NO: 804032 - DNA, 15 bp, Homo sapiens
ctcagctatcccctg

SEQ ID NO: 804033 - DNA, 15 bp, Homo sapiens
tcagctatcccctgc

SEQ ID NO: 804034 - DNA, 15 bp, Homo sapiens
cagctatcccctgct

SEQ ID NO: 804035 - DNA, 15 bp, Homo sapiens
agctatcccctgcta

SEQ ID NO: 804036 - DNA, 15 bp, Homo sapiens
gctatcccctgctac

SEQ ID NO: 804037 - DNA, 15 bp, Homo sapiens
ctatcccctgctact

SEQ ID NO: 804038 - DNA, 15 bp, Homo sapiens
tatcccctgctactc

SEQ ID NO: 804039 - DNA, 15 bp, Homo sapiens
atcccctgctactcc

SEQ ID NO: 804040 - DNA, 15 bp, Homo sapiens
tcccctgctactccc

SEQ ID NO: 804041 - DNA, 15 bp, Homo sapiens
cccctgctactccca

SEQ ID NO: 804042 - DNA, 15 bp, Homo sapiens
ccctgctactcccat

SEQ ID NO: 804043 - DNA, 15 bp, Homo sapiens
cctgctactcccata

SEQ ID NO: 804044 - DNA, 15 bp, Homo sapiens
ctgctactcccataa

SEQ ID NO: 804045 - DNA, 15 bp, Homo sapiens
tgctactcccataaa

SEQ ID NO: 804046 - DNA, 15 bp, Homo sapiens
gctactcccataaaa

SEQ ID NO: 804047 - DNA, 15 bp, Homo sapiens
ctactcccataaaag

SEQ ID NO: 804048 - DNA, 15 bp, Homo sapiens
tactcccataaaagc

SEQ ID NO: 804049 - DNA, 15 bp, Homo sapiens
actcccataaaagct

SEQ ID NO: 804050 - DNA, 15 bp, Homo sapiens
ctcccataaaagcta

SEQ ID NO: 804051 - DNA, 15 bp, Homo sapiens
tcccataaaagctag

SEQ ID NO: 804052 - DNA, 15 bp, Homo sapiens
cccataaaagctagc

SEQ ID NO: 804053 - DNA, 15 bp, Homo sapiens
ccataaaagctagca

SEQ ID NO: 804054 - DNA, 15 bp, Homo sapiens
cataaaagctagcac

SEQ ID NO: 804055 - DNA, 15 bp, Homo sapiens
ataaaagctagcact

SEQ ID NO: 804056 - DNA, 15 bp, Homo sapiens
taaaagctagcactg

SEQ ID NO: 804057 - DNA, 15 bp, Homo sapiens
aaaagctagcactgg

SEQ ID NO: 804058 - DNA, 15 bp, Homo sapiens
aaagctagcactggg

SEQ ID NO: 804059 - DNA, 15 bp, Homo sapiens
aagctagcactgggc

SEQ ID NO: 804060 - DNA, 15 bp, Homo sapiens
agctagcactgggca

SEQ ID NO: 804061 - DNA, 15 bp, Homo sapiens
gctagcactgggcat

SEQ ID NO: 804062 - DNA, 15 bp, Homo sapiens
ctagcactgggcatg

SEQ ID NO: 804063 - DNA, 15 bp, Homo sapiens
tagcactgggcatgt

SEQ ID NO: 804064 - DNA, 15 bp, Homo sapiens
agcactgggcatgtg

SEQ ID NO: 804065 - DNA, 15 bp, Homo sapiens
gcactgggcatgtgg

SEQ ID NO: 804066 - DNA, 15 bp, Homo sapiens
cactgggcatgtggc

SEQ ID NO: 804067 - DNA, 15 bp, Homo sapiens
actgggcatgtggct

SEQ ID NO: 804068 - DNA, 15 bp, Homo sapiens
ctgggcatgtggctt

SEQ ID NO: 804069 - DNA, 15 bp, Homo sapiens
tgggcatgtggcttg

SEQ ID NO: 804070 - DNA, 15 bp, Homo sapiens
gggcatgtggcttgt

SEQ ID NO: 804071 - DNA, 15 bp, Homo sapiens
ggcatgtggcttgta

SEQ ID NO: 804072 - DNA, 15 bp, Homo sapiens
gcatgtggcttgtac

SEQ ID NO: 804073 - DNA, 15 bp, Homo sapiens
catgtggcttgtact

SEQ ID NO: 804074 - DNA, 15 bp, Homo sapiens
atgtggcttgtactt

SEQ ID NO: 804075 - DNA, 15 bp, Homo sapiens
tgtggcttgtacttc

SEQ ID NO: 804076 - DNA, 15 bp, Homo sapiens
gtggcttgtacttcc

SEQ ID NO: 804077 - DNA, 15 bp, Homo sapiens
tggcttgtacttcca

SEQ ID NO: 804078 - DNA, 15 bp, Homo sapiens
ggcttgtacttccaa

SEQ ID NO: 804079 - DNA, 15 bp, Homo sapiens
gcttgtacttccaac

SEQ ID NO: 804080 - DNA, 15 bp, Homo sapiens
cttgtacttccaaca

SEQ ID NO: 804081 - DNA, 15 bp, Homo sapiens
ttgtacttccaacaa

SEQ ID NO: 804082 - DNA, 15 bp, Homo sapiens
tgtacttccaacaat

SEQ ID NO: 804083 - DNA, 15 bp, Homo sapiens
gtacttccaacaatg

SEQ ID NO: 804084 - DNA, 15 bp, Homo sapiens
tacttccaacaatga

SEQ ID NO: 804085 - DNA, 15 bp, Homo sapiens
acttccaacaatgag

SEQ ID NO: 804086 - DNA, 15 bp, Homo sapiens
cttccaacaatgagt

SEQ ID NO: 804087 - DNA, 15 bp, Homo sapiens
ttccaacaatgagta

SEQ ID NO: 804088 - DNA, 15 bp, Homo sapiens
tccaacaatgagtac

SEQ ID NO: 804089 - DNA, 15 bp, Homo sapiens
ccaacaatgagtact

SEQ ID NO: 804090 - DNA, 15 bp, Homo sapiens
caacaatgagtactc

SEQ ID NO: 804091 - DNA, 15 bp, Homo sapiens
aacaatgagtactcc

SEQ ID NO: 804092 - DNA, 15 bp, Homo sapiens
acaatgagtactccc

SEQ ID NO: 804093 - DNA, 15 bp, Homo sapiens
caatgagtactccct

SEQ ID NO: 804094 - DNA, 15 bp, Homo sapiens
aatgagtactccctt

SEQ ID NO: 804095 - DNA, 15 bp, Homo sapiens
atgagtactcccttt

SEQ ID NO: 804096 - DNA, 15 bp, Homo sapiens
tgagtactccctttt

SEQ ID NO: 804097 - DNA, 15 bp, Homo sapiens
gagtactcccttttc

SEQ ID NO: 804098 - DNA, 15 bp, Homo sapiens
agtactcccttttct

SEQ ID NO: 804099 - DNA, 15 bp, Homo sapiens
gtactcccttttctc

SEQ ID NO: 804100 - DNA, 15 bp, Homo sapiens
tactcccttttctcc

SEQ ID NO: 804101 - DNA, 15 bp, Homo sapiens
actcccttttctccc

SEQ ID NO: 804102 - DNA, 15 bp, Homo sapiens
ctcccttttctcccc

SEQ ID NO: 804103 - DNA, 15 bp, Homo sapiens
tcccttttctcccct

SEQ ID NO: 804104 - DNA, 15 bp, Homo sapiens
cccttttctccccta

SEQ ID NO: 804105 - DNA, 15 bp, Homo sapiens
ccttttctcccctaa

SEQ ID NO: 804106 - DNA, 15 bp, Homo sapiens
cttttctcccctaaa

SEQ ID NO: 804107 - DNA, 15 bp, Homo sapiens
ttttctcccctaaat

SEQ ID NO: 804108 - DNA, 15 bp, Homo sapiens
tttctcccctaaatc

SEQ ID NO: 804109 - DNA, 15 bp, Homo sapiens
ttctcccctaaatcc

SEQ ID NO: 804110 - DNA, 15 bp, Homo sapiens
tctcccctaaatcca

SEQ ID NO: 804111 - DNA, 15 bp, Homo sapiens
ctcccctaaatccag

SEQ ID NO: 804112 - DNA, 15 bp, Homo sapiens
tcccctaaatccagc

SEQ ID NO: 804113 - DNA, 15 bp, Homo sapiens
cccctaaatccagcc

SEQ ID NO: 804114 - DNA, 15 bp, Homo sapiens
ccctaaatccagccc

SEQ ID NO: 804115 - DNA, 15 bp, Homo sapiens
cctaaatccagccct

SEQ ID NO: 804116 - DNA, 15 bp, Homo sapiens
ctaaatccagccctg

SEQ ID NO: 804117 - DNA, 15 bp, Homo sapiens
taaatccagccctgg

SEQ ID NO: 804118 - DNA, 15 bp, Homo sapiens
aaatccagccctgga

SEQ ID NO: 804119 - DNA, 15 bp, Homo sapiens
aatccagccctggaa

SEQ ID NO: 804120 - DNA, 15 bp, Homo sapiens
atccagccctggaag

SEQ ID NO: 804121 - DNA, 15 bp, Homo sapiens
tccagccctggaagc

SEQ ID NO: 804122 - DNA, 15 bp, Homo sapiens
ccagccctggaagca

SEQ ID NO: 804123 - DNA, 15 bp, Homo sapiens
cagccctggaagcat

SEQ ID NO: 804124 - DNA, 15 bp, Homo sapiens
agccctggaagcatt

SEQ ID NO: 804125 - DNA, 15 bp, Homo sapiens
gccctggaagcattg

SEQ ID NO: 804126 - DNA, 15 bp, Homo sapiens
ccctggaagcattgc

SEQ ID NO: 804127 - DNA, 15 bp, Homo sapiens
cctggaagcattgcc

SEQ ID NO: 804128 - DNA, 15 bp, Homo sapiens
ctggaagcattgccg

SEQ ID NO: 804129 - DNA, 15 bp, Homo sapiens
tggaagcattgccgt

SEQ ID NO: 804130 - DNA, 15 bp, Homo sapiens
ggaagcattgccgtg

SEQ ID NO: 804131 - DNA, 15 bp, Homo sapiens
gaagcattgccgtgt

SEQ ID NO: 804132 - DNA, 15 bp, Homo sapiens
aagcattgccgtgtt

SEQ ID NO: 804133 - DNA, 15 bp, Homo sapiens
agcattgccgtgttt

SEQ ID NO: 804134 - DNA, 15 bp, Homo sapiens
gcattgccgtgtttt

SEQ ID NO: 804135 - DNA, 15 bp, Homo sapiens
cattgccgtgttttt

SEQ ID NO: 804136 - DNA, 15 bp, Homo sapiens
attgccgtgttttta

SEQ ID NO: 804137 - DNA, 15 bp, Homo sapiens
ttgccgtgtttttat

SEQ ID NO: 804138 - DNA, 15 bp, Homo sapiens
tgccgtgtttttatg

SEQ ID NO: 804139 - DNA, 15 bp, Homo sapiens
gccgtgtttttatgc

SEQ ID NO: 804140 - DNA, 15 bp, Homo sapiens
ccgtgtttttatgcc

SEQ ID NO: 804141 - DNA, 15 bp, Homo sapiens
cgtgtttttatgcct

SEQ ID NO: 804142 - DNA, 15 bp, Homo sapiens
gtgtttttatgcctc

SEQ ID NO: 804143 - DNA, 15 bp, Homo sapiens
tgtttttatgcctct

SEQ ID NO: 804144 - DNA, 15 bp, Homo sapiens
gtttttatgcctctt

SEQ ID NO: 804145 - DNA, 15 bp, Homo sapiens
tttttatgcctcttg

SEQ ID NO: 804146 - DNA, 15 bp, Homo sapiens
ttttatgcctcttgg

SEQ ID NO: 804147 - DNA, 15 bp, Homo sapiens
tttatgcctcttggc

SEQ ID NO: 804148 - DNA, 15 bp, Homo sapiens
ttatgcctcttggca

SEQ ID NO: 804149 - DNA, 15 bp, Homo sapiens
tatgcctcttggcat

SEQ ID NO: 804150 - DNA, 15 bp, Homo sapiens
atgcctcttggcatt

SEQ ID NO: 804151 - DNA, 15 bp, Homo sapiens
tgcctcttggcattc

SEQ ID NO: 804152 - DNA, 15 bp, Homo sapiens
gcctcttggcattct

SEQ ID NO: 804153 - DNA, 15 bp, Homo sapiens
cctcttggcattctt

SEQ ID NO: 804154 - DNA, 15 bp, Homo sapiens
ctcttggcattcttt

SEQ ID NO: 804155 - DNA, 15 bp, Homo sapiens
tcttggcattcttta

SEQ ID NO: 804156 - DNA, 15 bp, Homo sapiens
cttggcattctttat

SEQ ID NO: 804157 - DNA, 15 bp, Homo sapiens
ttggcattctttatt

SEQ ID NO: 804158 - DNA, 15 bp, Homo sapiens
tggcattctttattt

SEQ ID NO: 804159 - DNA, 15 bp, Homo sapiens
ggcattctttatttt

SEQ ID NO: 804160 - DNA, 15 bp, Homo sapiens
gcattctttattttt

SEQ ID NO: 804161 - DNA, 15 bp, Homo sapiens
cattctttatttttt

SEQ ID NO: 804162 - DNA, 15 bp, Homo sapiens
attctttattttttg

SEQ ID NO: 804163 - DNA, 15 bp, Homo sapiens
ttctttattttttga

SEQ ID NO: 804164 - DNA, 15 bp, Homo sapiens
tctttattttttgag

SEQ ID NO: 804165 - DNA, 15 bp, Homo sapiens
ctttattttttgaga

SEQ ID NO: 804166 - DNA, 15 bp, Homo sapiens
tttattttttgagac

SEQ ID NO: 804167 - DNA, 15 bp, Homo sapiens
ttattttttgagaca

SEQ ID NO: 804168 - DNA, 15 bp, Homo sapiens
tattttttgagacag

SEQ ID NO: 804169 - DNA, 15 bp, Homo sapiens
attttttgagacaga

SEQ ID NO: 804170 - DNA, 15 bp, Homo sapiens
ttttttgagacagaa

SEQ ID NO: 804171 - DNA, 15 bp, Homo sapiens
tttttgagacagaat

SEQ ID NO: 804172 - DNA, 15 bp, Homo sapiens
ttttgagacagaatc

SEQ ID NO: 804173 - DNA, 15 bp, Homo sapiens
tttgagacagaatct

SEQ ID NO: 804174 - DNA, 15 bp, Homo sapiens
ttgagacagaatctc

SEQ ID NO: 804175 - DNA, 15 bp, Homo sapiens
tgagacagaatctcg

SEQ ID NO: 804176 - DNA, 15 bp, Homo sapiens
gagacagaatctcgc

SEQ ID NO: 804177 - DNA, 15 bp, Homo sapiens
agacagaatctcgct

SEQ ID NO: 804178 - DNA, 15 bp, Homo sapiens
gacagaatctcgctc

SEQ ID NO: 804179 - DNA, 15 bp, Homo sapiens
acagaatctcgctct

SEQ ID NO: 804180 - DNA, 15 bp, Homo sapiens
cagaatctcgctctg

SEQ ID NO: 804181 - DNA, 15 bp, Homo sapiens
agaatctcgctctgt

SEQ ID NO: 804182 - DNA, 15 bp, Homo sapiens
gaatctcgctctgtt

SEQ ID NO: 804183 - DNA, 15 bp, Homo sapiens
aatctcgctctgttg

SEQ ID NO: 804184 - DNA, 15 bp, Homo sapiens
atctcgctctgttgc

SEQ ID NO: 804185 - DNA, 15 bp, Homo sapiens
ctcgctctgttgccc

SEQ ID NO: 804186 - DNA, 15 bp, Homo sapiens
tcgctctgttgccca

SEQ ID NO: 804187 - DNA, 15 bp, Homo sapiens
cgctctgttgcccaa

SEQ ID NO: 804188 - DNA, 15 bp, Homo sapiens
gctctgttgcccaaa

SEQ ID NO: 804189 - DNA, 15 bp, Homo sapiens
ctctgttgcccaaac

SEQ ID NO: 804190 - DNA, 15 bp, Homo sapiens
tctgttgcccaaact

SEQ ID NO: 804191 - DNA, 15 bp, Homo sapiens
ctgttgcccaaactg

SEQ ID NO: 804192 - DNA, 15 bp, Homo sapiens
tgttgcccaaactgg

SEQ ID NO: 804193 - DNA, 15 bp, Homo sapiens
gttgcccaaactgga

SEQ ID NO: 804194 - DNA, 15 bp, Homo sapiens
ttgcccaaactggag

SEQ ID NO: 804195 - DNA, 15 bp, Homo sapiens
tgcccaaactggagt

SEQ ID NO: 804196 - DNA, 15 bp, Homo sapiens
gcccaaactggagtg

SEQ ID NO: 804197 - DNA, 15 bp, Homo sapiens
cccaaactggagtgc

SEQ ID NO: 804198 - DNA, 15 bp, Homo sapiens
ccaaactggagtgca

SEQ ID NO: 804199 - DNA, 15 bp, Homo sapiens
caaactggagtgcag

SEQ ID NO: 804200 - DNA, 15 bp, Homo sapiens
aaactggagtgcagt

SEQ ID NO: 804201 - DNA, 15 bp, Homo sapiens
aactggagtgcagtg

SEQ ID NO: 804202 - DNA, 15 bp, Homo sapiens
actggagtgcagtgt

SEQ ID NO: 804203 - DNA, 15 bp, Homo sapiens
ctggagtgcagtgtc

SEQ ID NO: 804204 - DNA, 15 bp, Homo sapiens
tggagtgcagtgtca

SEQ ID NO: 804205 - DNA, 15 bp, Homo sapiens
ggagtgcagtgtcac

SEQ ID NO: 804206 - DNA, 15 bp, Homo sapiens
gagtgcagtgtcacg

SEQ ID NO: 804207 - DNA, 15 bp, Homo sapiens
agtgcagtgtcacga

SEQ ID NO: 804208 - DNA, 15 bp, Homo sapiens
tgcagtgtcacgatt

SEQ ID NO: 804209 - DNA, 15 bp, Homo sapiens
gcagtgtcacgattt

SEQ ID NO: 804210 - DNA, 15 bp, Homo sapiens
cagtgtcacgatttc

SEQ ID NO: 804211 - DNA, 15 bp, Homo sapiens
agtgtcacgatttca

SEQ ID NO: 804212 - DNA, 15 bp, Homo sapiens
gtgtcacgatttcag

SEQ ID NO: 804213 - DNA, 15 bp, Homo sapiens
tgtcacgatttcagc

SEQ ID NO: 804214 - DNA, 15 bp, Homo sapiens
gtcacgatttcagct

SEQ ID NO: 804215 - DNA, 15 bp, Homo sapiens
tcacgatttcagctc

SEQ ID NO: 804216 - DNA, 15 bp, Homo sapiens
cacgatttcagctca

SEQ ID NO: 804217 - DNA, 15 bp, Homo sapiens
acgatttcagctcac

SEQ ID NO: 804218 - DNA, 15 bp, Homo sapiens
cgatttcagctcact

SEQ ID NO: 804219 - DNA, 15 bp, Homo sapiens
gatttcagctcacta

SEQ ID NO: 804220 - DNA, 15 bp, Homo sapiens
atttcagctcactac

SEQ ID NO: 804221 - DNA, 15 bp, Homo sapiens
tttcagctcactaca

SEQ ID NO: 804222 - DNA, 15 bp, Homo sapiens
ttcagctcactacaa

SEQ ID NO: 804223 - DNA, 15 bp, Homo sapiens
tcagctcactacaat

SEQ ID NO: 804224 - DNA, 15 bp, Homo sapiens
cagctcactacaatc

SEQ ID NO: 804225 - DNA, 15 bp, Homo sapiens
agctcactacaatct

SEQ ID NO: 804226 - DNA, 15 bp, Homo sapiens
gctcactacaatctc

SEQ ID NO: 804227 - DNA, 15 bp, Homo sapiens
ctcactacaatctcc

SEQ ID NO: 804228 - DNA, 15 bp, Homo sapiens
tcactacaatctccg

SEQ ID NO: 804229 - DNA, 15 bp, Homo sapiens
cactacaatctccgt

SEQ ID NO: 804230 - DNA, 15 bp, Homo sapiens
actacaatctccgtc

SEQ ID NO: 804231 - DNA, 15 bp, Homo sapiens
ctacaatctccgtct

SEQ ID NO: 804232 - DNA, 15 bp, Homo sapiens
tacaatctccgtctc

SEQ ID NO: 804233 - DNA, 15 bp, Homo sapiens
acaatctccgtctcc

SEQ ID NO: 804234 - DNA, 15 bp, Homo sapiens
caatctccgtctccc

SEQ ID NO: 804235 - DNA, 15 bp, Homo sapiens
aatctccgtctccca

SEQ ID NO: 804236 - DNA, 15 bp, Homo sapiens
atctccgtctcccaa

SEQ ID NO: 804237 - DNA, 15 bp, Homo sapiens
tctccgtctcccaag

SEQ ID NO: 804238 - DNA, 15 bp, Homo sapiens
ctccgtctcccaagt

SEQ ID NO: 804239 - DNA, 15 bp, Homo sapiens
tccgtctcccaagtt

SEQ ID NO: 804240 - DNA, 15 bp, Homo sapiens
ccgtctcccaagttc

SEQ ID NO: 804241 - DNA, 15 bp, Homo sapiens
cgtctcccaagttca

SEQ ID NO: 804242 - DNA, 15 bp, Homo sapiens
gtctcccaagttcaa

SEQ ID NO: 804243 - DNA, 15 bp, Homo sapiens
tctcccaagttcaag

SEQ ID NO: 804244 - DNA, 15 bp, Homo sapiens
ctcccaagttcaagc

SEQ ID NO: 804245 - DNA, 15 bp, Homo sapiens
tcccaagttcaagca

SEQ ID NO: 804246 - DNA, 15 bp, Homo sapiens
cccaagttcaagcag

SEQ ID NO: 804247 - DNA, 15 bp, Homo sapiens
ccaagttcaagcagt

SEQ ID NO: 804248 - DNA, 15 bp, Homo sapiens
caagttcaagcagtc

SEQ ID NO: 804249 - DNA, 15 bp, Homo sapiens
aagttcaagcagtcc

SEQ ID NO: 804250 - DNA, 15 bp, Homo sapiens
agttcaagcagtcct

SEQ ID NO: 804251 - DNA, 15 bp, Homo sapiens
gttcaagcagtcctc

SEQ ID NO: 804252 - DNA, 15 bp, Homo sapiens
ttcaagcagtcctcc

SEQ ID NO: 804253 - DNA, 15 bp, Homo sapiens
tcaagcagtcctcct

SEQ ID NO: 804254 - DNA, 15 bp, Homo sapiens
caagcagtcctcctc

SEQ ID NO: 804255 - DNA, 15 bp, Homo sapiens
aagcagtcctcctct

SEQ ID NO: 804256 - DNA, 15 bp, Homo sapiens
agcagtcctcctctc

SEQ ID NO: 804257 - DNA, 15 bp, Homo sapiens
gcagtcctcctctct

SEQ ID NO: 804258 - DNA, 15 bp, Homo sapiens
cagtcctcctctctc

SEQ ID NO: 804259 - DNA, 15 bp, Homo sapiens
agtcctcctctctca

SEQ ID NO: 804260 - DNA, 15 bp, Homo sapiens
gtcctcctctctcag

SEQ ID NO: 804261 - DNA, 15 bp, Homo sapiens
tcctcctctctcagc

SEQ ID NO: 804262 - DNA, 15 bp, Homo sapiens
cctcctctctcagcc

SEQ ID NO: 804263 - DNA, 15 bp, Homo sapiens
ctcctctctcagcct

SEQ ID NO: 804264 - DNA, 15 bp, Homo sapiens
cctctctcagcctcc

SEQ ID NO: 804265 - DNA, 15 bp, Homo sapiens
ctctctcagcctccc

SEQ ID NO: 804266 - DNA, 15 bp, Homo sapiens
tctctcagcctccca

SEQ ID NO: 804267 - DNA, 15 bp, Homo sapiens
ctctcagcctcccaa

SEQ ID NO: 804268 - DNA, 15 bp, Homo sapiens
tagctgggattacaa

SEQ ID NO: 804269 - DNA, 15 bp, Homo sapiens
agctgggattacaaa

SEQ ID NO: 804270 - DNA, 15 bp, Homo sapiens
gctgggattacaaat

SEQ ID NO: 804271 - DNA, 15 bp, Homo sapiens
ctgggattacaaatg

SEQ ID NO: 804272 - DNA, 15 bp, Homo sapiens
tgggattacaaatgt

SEQ ID NO: 804273 - DNA, 15 bp, Homo sapiens
gggattacaaatgtg

SEQ ID NO: 804274 - DNA, 15 bp, Homo sapiens
ggattacaaatgtgc

SEQ ID NO: 804275 - DNA, 15 bp, Homo sapiens
gattacaaatgtgca

SEQ ID NO: 804276 - DNA, 15 bp, Homo sapiens
attacaaatgtgcat

SEQ ID NO: 804277 - DNA, 15 bp, Homo sapiens
ttacaaatgtgcatc

SEQ ID NO: 804278 - DNA, 15 bp, Homo sapiens
tacaaatgtgcatca

SEQ ID NO: 804279 - DNA, 15 bp, Homo sapiens
acaaatgtgcatcac

SEQ ID NO: 804280 - DNA, 15 bp, Homo sapiens
caaatgtgcatcacc

SEQ ID NO: 804281 - DNA, 15 bp, Homo sapiens
aaatgtgcatcacca

SEQ ID NO: 804282 - DNA, 15 bp, Homo sapiens
aatgtgcatcaccat

SEQ ID NO: 804283 - DNA, 15 bp, Homo sapiens
atgtgcatcaccatt

SEQ ID NO: 804284 - DNA, 15 bp, Homo sapiens
tgtgcatcaccattc

SEQ ID NO: 804285 - DNA, 15 bp, Homo sapiens
gtgcatcaccattcc

SEQ ID NO: 804286 - DNA, 15 bp, Homo sapiens
tgcatcaccattccc

SEQ ID NO: 804287 - DNA, 15 bp, Homo sapiens
gcatcaccattccca

SEQ ID NO: 804288 - DNA, 15 bp, Homo sapiens
catcaccattcccag

SEQ ID NO: 804289 - DNA, 15 bp, Homo sapiens
atcaccattcccagt

SEQ ID NO: 804290 - DNA, 15 bp, Homo sapiens
tcaccattcccagtt

SEQ ID NO: 804291 - DNA, 15 bp, Homo sapiens
caccattcccagtta

SEQ ID NO: 804292 - DNA, 15 bp, Homo sapiens
accattcccagttat

SEQ ID NO: 804293 - DNA, 15 bp, Homo sapiens
ccattcccagttatt

SEQ ID NO: 804294 - DNA, 15 bp, Homo sapiens
cattcccagttattt

SEQ ID NO: 804295 - DNA, 15 bp, Homo sapiens
attcccagttatttt

SEQ ID NO: 804296 - DNA, 15 bp, Homo sapiens
ttcccagttattttt

SEQ ID NO: 804297 - DNA, 15 bp, Homo sapiens
tcccagttatttttt

SEQ ID NO: 804298 - DNA, 15 bp, Homo sapiens
cccagttattttttg

SEQ ID NO: 804299 - DNA, 15 bp, Homo sapiens
ccagttattttttgt

SEQ ID NO: 804300 - DNA, 15 bp, Homo sapiens
cagttattttttgta

SEQ ID NO: 804301 - DNA, 15 bp, Homo sapiens
agttattttttgtat

SEQ ID NO: 804302 - DNA, 15 bp, Homo sapiens
gttattttttgtatc

SEQ ID NO: 804303 - DNA, 15 bp, Homo sapiens
ttattttttgtatct

SEQ ID NO: 804304 - DNA, 15 bp, Homo sapiens
tattttttgtatctt

SEQ ID NO: 804305 - DNA, 15 bp, Homo sapiens
attttttgtatcttt

SEQ ID NO: 804306 - DNA, 15 bp, Homo sapiens
ttttttgtatcttta

SEQ ID NO: 804307 - DNA, 15 bp, Homo sapiens
tttttgtatctttag

SEQ ID NO: 804308 - DNA, 15 bp, Homo sapiens
ttttgtatctttagt

SEQ ID NO: 804309 - DNA, 15 bp, Homo sapiens
tttgtatctttagta

SEQ ID NO: 804310 - DNA, 15 bp, Homo sapiens
ttgtatctttagtag

SEQ ID NO: 804311 - DNA, 15 bp, Homo sapiens
tgtatctttagtaga

SEQ ID NO: 804312 - DNA, 15 bp, Homo sapiens
gtatctttagtagag

SEQ ID NO: 804313 - DNA, 15 bp, Homo sapiens
tatctttagtagaga

SEQ ID NO: 804314 - DNA, 15 bp, Homo sapiens
atctttagtagagat

SEQ ID NO: 804315 - DNA, 15 bp, Homo sapiens
tctttagtagagatg

SEQ ID NO: 804316 - DNA, 15 bp, Homo sapiens
ctttagtagagatgg

SEQ ID NO: 804317 - DNA, 15 bp, Homo sapiens
tcaggtgatccgcct

SEQ ID NO: 804318 - DNA, 15 bp, Homo sapiens
caggtgatccgcctg

SEQ ID NO: 804319 - DNA, 15 bp, Homo sapiens
aggtgatccgcctgc

SEQ ID NO: 804320 - DNA, 15 bp, Homo sapiens
ggtgatccgcctgcc

SEQ ID NO: 804321 - DNA, 15 bp, Homo sapiens
gtgatccgcctgcct

SEQ ID NO: 804322 - DNA, 15 bp, Homo sapiens
tgatccgcctgcctt

SEQ ID NO: 804323 - DNA, 15 bp, Homo sapiens
gatccgcctgccttg

SEQ ID NO: 804324 - DNA, 15 bp, Homo sapiens
atccgcctgccttgg

SEQ ID NO: 804325 - DNA, 15 bp, Homo sapiens
tccgcctgccttggc

SEQ ID NO: 804326 - DNA, 15 bp, Homo sapiens
ccgcctgccttggcc

SEQ ID NO: 804327 - DNA, 15 bp, Homo sapiens
cgcctgccttggcct

SEQ ID NO: 804328 - DNA, 15 bp, Homo sapiens
gcctgccttggcctc

SEQ ID NO: 804329 - DNA, 15 bp, Homo sapiens
ctgggattacgggca

SEQ ID NO: 804330 - DNA, 15 bp, Homo sapiens
tgggattacgggcat

SEQ ID NO: 804331 - DNA, 15 bp, Homo sapiens
gggattacgggcatg

SEQ ID NO: 804332 - DNA, 15 bp, Homo sapiens
ggattacgggcatga

SEQ ID NO: 804333 - DNA, 15 bp, Homo sapiens
gattacgggcatgag

SEQ ID NO: 804334 - DNA, 15 bp, Homo sapiens
attacgggcatgagc

SEQ ID NO: 804335 - DNA, 15 bp, Homo sapiens
ttacgggcatgagcc

SEQ ID NO: 804336 - DNA, 15 bp, Homo sapiens
tacgggcatgagcca

SEQ ID NO: 804337 - DNA, 15 bp, Homo sapiens
acgggcatgagccac

SEQ ID NO: 804338 - DNA, 15 bp, Homo sapiens
cgggcatgagccacc

SEQ ID NO: 804339 - DNA, 15 bp, Homo sapiens
gggcatgagccaccg

SEQ ID NO: 804340 - DNA, 15 bp, Homo sapiens
catgagccaccgcgg

SEQ ID NO: 804341 - DNA, 15 bp, Homo sapiens
atgagccaccgcggc

SEQ ID NO: 804342 - DNA, 15 bp, Homo sapiens
tgagccaccgcggcc

SEQ ID NO: 804343 - DNA, 15 bp, Homo sapiens
gagccaccgcggccg

SEQ ID NO: 804344 - DNA, 15 bp, Homo sapiens
agccaccgcggccgg

SEQ ID NO: 804345 - DNA, 15 bp, Homo sapiens
gccaccgcggccggc

SEQ ID NO: 804346 - DNA, 15 bp, Homo sapiens
ccaccgcggccggcc

SEQ ID NO: 804347 - DNA, 15 bp, Homo sapiens
caccgcggccggcca

SEQ ID NO: 804348 - DNA, 15 bp, Homo sapiens
accgcggccggccat

SEQ ID NO: 804349 - DNA, 15 bp, Homo sapiens
ccgcggccggccatc

SEQ ID NO: 804350 - DNA, 15 bp, Homo sapiens
cgcggccggccatct

SEQ ID NO: 804351 - DNA, 15 bp, Homo sapiens
gcggccggccatctc

SEQ ID NO: 804352 - DNA, 15 bp, Homo sapiens
cggccggccatctcc

SEQ ID NO: 804353 - DNA, 15 bp, Homo sapiens
ggccggccatctcct

SEQ ID NO: 804354 - DNA, 15 bp, Homo sapiens
gccggccatctcctg

SEQ ID NO: 804355 - DNA, 15 bp, Homo sapiens
ccggccatctcctgg

SEQ ID NO: 804356 - DNA, 15 bp, Homo sapiens
cggccatctcctgga

SEQ ID NO: 804357 - DNA, 15 bp, Homo sapiens
ggccatctcctggaa

SEQ ID NO: 804358 - DNA, 15 bp, Homo sapiens
gccatctcctggaat

SEQ ID NO: 804359 - DNA, 15 bp, Homo sapiens
ccatctcctggaatt

SEQ ID NO: 804360 - DNA, 15 bp, Homo sapiens
catctcctggaattc

SEQ ID NO: 804361 - DNA, 15 bp, Homo sapiens
atctcctggaattct

SEQ ID NO: 804362 - DNA, 15 bp, Homo sapiens
tctcctggaattctt

SEQ ID NO: 804363 - DNA, 15 bp, Homo sapiens
ctcctggaattcttt

SEQ ID NO: 804364 - DNA, 15 bp, Homo sapiens
tcctggaattctttg

SEQ ID NO: 804365 - DNA, 15 bp, Homo sapiens
cctggaattctttgt

SEQ ID NO: 804366 - DNA, 15 bp, Homo sapiens
ctggaattctttgtc

SEQ ID NO: 804367 - DNA, 15 bp, Homo sapiens
tggaattctttgtcc

SEQ ID NO: 804368 - DNA, 15 bp, Homo sapiens
ggaattctttgtcca

SEQ ID NO: 804369 - DNA, 15 bp, Homo sapiens
gaattctttgtccac

SEQ ID NO: 804370 - DNA, 15 bp, Homo sapiens
aattctttgtccact

SEQ ID NO: 804371 - DNA, 15 bp, Homo sapiens
attctttgtccactt

SEQ ID NO: 804372 - DNA, 15 bp, Homo sapiens
ttctttgtccacttt

SEQ ID NO: 804373 - DNA, 15 bp, Homo sapiens
tctttgtccactttt

SEQ ID NO: 804374 - DNA, 15 bp, Homo sapiens
ctttgtccacttttc

SEQ ID NO: 804375 - DNA, 15 bp, Homo sapiens
tttgtccacttttct

SEQ ID NO: 804376 - DNA, 15 bp, Homo sapiens
ttgtccacttttctg

SEQ ID NO: 804377 - DNA, 15 bp, Homo sapiens
tgtccacttttctgt

SEQ ID NO: 804378 - DNA, 15 bp, Homo sapiens
gtccacttttctgtc

SEQ ID NO: 804379 - DNA, 15 bp, Homo sapiens
tccacttttctgtcc

SEQ ID NO: 804380 - DNA, 15 bp, Homo sapiens
ccacttttctgtcct

SEQ ID NO: 804381 - DNA, 15 bp, Homo sapiens
cacttttctgtcctt

SEQ ID NO: 804382 - DNA, 15 bp, Homo sapiens
acttttctgtccttc

SEQ ID NO: 804383 - DNA, 15 bp, Homo sapiens
cttttctgtccttcc

SEQ ID NO: 804384 - DNA, 15 bp, Homo sapiens
ttttctgtccttcct

SEQ ID NO: 804385 - DNA, 15 bp, Homo sapiens
tttctgtccttcctc

SEQ ID NO: 804386 - DNA, 15 bp, Homo sapiens
ttctgtccttcctct

SEQ ID NO: 804387 - DNA, 15 bp, Homo sapiens
tctgtccttcctctc

SEQ ID NO: 804388 - DNA, 15 bp, Homo sapiens
ctgtccttcctctct

SEQ ID NO: 804389 - DNA, 15 bp, Homo sapiens
tgtccttcctctctt

SEQ ID NO: 804390 - DNA, 15 bp, Homo sapiens
gtccttcctctcttc

SEQ ID NO: 804391 - DNA, 15 bp, Homo sapiens
tccttcctctcttcc

SEQ ID NO: 804392 - DNA, 15 bp, Homo sapiens
ccttcctctcttccc

SEQ ID NO: 804393 - DNA, 15 bp, Homo sapiens
cttcctctcttccct

SEQ ID NO: 804394 - DNA, 15 bp, Homo sapiens
ttcctctcttccctt

SEQ ID NO: 804395 - DNA, 15 bp, Homo sapiens
tcctctcttcccttc

SEQ ID NO: 804396 - DNA, 15 bp, Homo sapiens
cctctcttcccttct

SEQ ID NO: 804397 - DNA, 15 bp, Homo sapiens
ctctcttcccttctc

SEQ ID NO: 804398 - DNA, 15 bp, Homo sapiens
tctcttcccttctct

SEQ ID NO: 804399 - DNA, 15 bp, Homo sapiens
ctcttcccttctctc

SEQ ID NO: 804400 - DNA, 15 bp, Homo sapiens
tcttcccttctctca

SEQ ID NO: 804401 - DNA, 15 bp, Homo sapiens
cttcccttctctcat

SEQ ID NO: 804402 - DNA, 15 bp, Homo sapiens
ttcccttctctcatg

SEQ ID NO: 804403 - DNA, 15 bp, Homo sapiens
tcccttctctcatgc

SEQ ID NO: 804404 - DNA, 15 bp, Homo sapiens
cccttctctcatgct

SEQ ID NO: 804405 - DNA, 15 bp, Homo sapiens
ccttctctcatgcta

SEQ ID NO: 804406 - DNA, 15 bp, Homo sapiens
cttctctcatgctac

SEQ ID NO: 804407 - DNA, 15 bp, Homo sapiens
ttctctcatgctaca

SEQ ID NO: 804408 - DNA, 15 bp, Homo sapiens
tctctcatgctacac

SEQ ID NO: 804409 - DNA, 15 bp, Homo sapiens
ctctcatgctacact

SEQ ID NO: 804410 - DNA, 15 bp, Homo sapiens
tctcatgctacactc

SEQ ID NO: 804411 - DNA, 15 bp, Homo sapiens
ctcatgctacactcc

SEQ ID NO: 804412 - DNA, 15 bp, Homo sapiens
tcatgctacactcct

SEQ ID NO: 804413 - DNA, 15 bp, Homo sapiens
catgctacactcctc

SEQ ID NO: 804414 - DNA, 15 bp, Homo sapiens
atgctacactcctct

SEQ ID NO: 804415 - DNA, 15 bp, Homo sapiens
tgctacactcctctt

SEQ ID NO: 804416 - DNA, 15 bp, Homo sapiens
gctacactcctcttt

SEQ ID NO: 804417 - DNA, 15 bp, Homo sapiens
ctacactcctctttc

SEQ ID NO: 804418 - DNA, 15 bp, Homo sapiens
tacactcctctttcc

SEQ ID NO: 804419 - DNA, 15 bp, Homo sapiens
acactcctctttcca

SEQ ID NO: 804420 - DNA, 15 bp, Homo sapiens
cactcctctttccac

SEQ ID NO: 804421 - DNA, 15 bp, Homo sapiens
actcctctttccact

SEQ ID NO: 804422 - DNA, 15 bp, Homo sapiens
tctctgctggatctg

SEQ ID NO: 804423 - DNA, 15 bp, Homo sapiens
ctctgctggatctgt

SEQ ID NO: 804424 - DNA, 15 bp, Homo sapiens
tctgctggatctgtg

SEQ ID NO: 804425 - DNA, 15 bp, Homo sapiens
ctgctggatctgtgc

SEQ ID NO: 804426 - DNA, 15 bp, Homo sapiens
tgctggatctgtgct

SEQ ID NO: 804427 - DNA, 15 bp, Homo sapiens
gctggatctgtgctg

SEQ ID NO: 804428 - DNA, 15 bp, Homo sapiens
ctggatctgtgctgc

SEQ ID NO: 804429 - DNA, 15 bp, Homo sapiens
tggatctgtgctgca

SEQ ID NO: 804430 - DNA, 15 bp, Homo sapiens
ggatctgtgctgcac

SEQ ID NO: 804431 - DNA, 15 bp, Homo sapiens
gatctgtgctgcaca

SEQ ID NO: 804432 - DNA, 15 bp, Homo sapiens
atctgtgctgcacac

SEQ ID NO: 804433 - DNA, 15 bp, Homo sapiens
tctgtgctgcacacg

SEQ ID NO: 804434 - DNA, 15 bp, Homo sapiens
ctgtgctgcacacgg

SEQ ID NO: 804435 - DNA, 15 bp, Homo sapiens
tgtgctgcacacggg

SEQ ID NO: 804436 - DNA, 15 bp, Homo sapiens
gtgctgcacacgggg

SEQ ID NO: 804437 - DNA, 15 bp, Homo sapiens
tgctgcacacggggt

SEQ ID NO: 804438 - DNA, 15 bp, Homo sapiens
gctgcacacggggtg

SEQ ID NO: 804439 - DNA, 15 bp, Homo sapiens
ctgcacacggggtgt

SEQ ID NO: 804440 - DNA, 15 bp, Homo sapiens
tgcacacggggtgtg

SEQ ID NO: 804441 - DNA, 15 bp, Homo sapiens
gcacacggggtgtgg

SEQ ID NO: 804442 - DNA, 15 bp, Homo sapiens
cacacggggtgtggg

SEQ ID NO: 804443 - DNA, 15 bp, Homo sapiens
acacggggtgtggga

SEQ ID NO: 804444 - DNA, 15 bp, Homo sapiens
cacggggtgtgggaa

SEQ ID NO: 804445 - DNA, 15 bp, Homo sapiens
acggggtgtgggaat

SEQ ID NO: 804446 - DNA, 15 bp, Homo sapiens
cggggtgtgggaatc

SEQ ID NO: 804447 - DNA, 15 bp, Homo sapiens
ggggtgtgggaatct

SEQ ID NO: 804448 - DNA, 15 bp, Homo sapiens
gggtgtgggaatctc

SEQ ID NO: 804449 - DNA, 15 bp, Homo sapiens
ggtgtgggaatctct

SEQ ID NO: 804450 - DNA, 15 bp, Homo sapiens
gtgtgggaatctctg

SEQ ID NO: 804451 - DNA, 15 bp, Homo sapiens
tgtgggaatctctgg

SEQ ID NO: 804452 - DNA, 15 bp, Homo sapiens
gtgggaatctctggg

SEQ ID NO: 804453 - DNA, 15 bp, Homo sapiens
tgggaatctctgggc

SEQ ID NO: 804454 - DNA, 15 bp, Homo sapiens
gggaatctctgggca

SEQ ID NO: 804455 - DNA, 15 bp, Homo sapiens
ggaatctctgggcaa

SEQ ID NO: 804456 - DNA, 15 bp, Homo sapiens
gaatctctgggcaac

SEQ ID NO: 804457 - DNA, 15 bp, Homo sapiens
aatctctgggcaacc

SEQ ID NO: 804458 - DNA, 15 bp, Homo sapiens
atctctgggcaacca

SEQ ID NO: 804459 - DNA, 15 bp, Homo sapiens
tctctgggcaaccag

SEQ ID NO: 804460 - DNA, 15 bp, Homo sapiens
ctctgggcaaccaga

SEQ ID NO: 804461 - DNA, 15 bp, Homo sapiens
tctgggcaaccagaa

SEQ ID NO: 804462 - DNA, 15 bp, Homo sapiens
ctgggcaaccagaag

SEQ ID NO: 804463 - DNA, 15 bp, Homo sapiens
tgggcaaccagaaga

SEQ ID NO: 804464 - DNA, 15 bp, Homo sapiens
gggcaaccagaagag

SEQ ID NO: 804465 - DNA, 15 bp, Homo sapiens
ggcaaccagaagagc

SEQ ID NO: 804466 - DNA, 15 bp, Homo sapiens
gcaaccagaagagca

SEQ ID NO: 804467 - DNA, 15 bp, Homo sapiens
caaccagaagagcag

SEQ ID NO: 804468 - DNA, 15 bp, Homo sapiens
aaccagaagagcagt

SEQ ID NO: 804469 - DNA, 15 bp, Homo sapiens
accagaagagcagta

SEQ ID NO: 804470 - DNA, 15 bp, Homo sapiens
ccagaagagcagtag

SEQ ID NO: 804471 - DNA, 15 bp, Homo sapiens
cagaagagcagtagt

SEQ ID NO: 804472 - DNA, 15 bp, Homo sapiens
agaagagcagtagta

SEQ ID NO: 804473 - DNA, 15 bp, Homo sapiens
gaagagcagtagtaa

SEQ ID NO: 804474 - DNA, 15 bp, Homo sapiens
aagagcagtagtaac

SEQ ID NO: 804475 - DNA, 15 bp, Homo sapiens
agagcagtagtaaca

SEQ ID NO: 804476 - DNA, 15 bp, Homo sapiens
gagcagtagtaacat

SEQ ID NO: 804477 - DNA, 15 bp, Homo sapiens
agcagtagtaacatc

SEQ ID NO: 804478 - DNA, 15 bp, Homo sapiens
gcagtagtaacatct

SEQ ID NO: 804479 - DNA, 15 bp, Homo sapiens
cagtagtaacatctt

SEQ ID NO: 804480 - DNA, 15 bp, Homo sapiens
agtagtaacatcttt

SEQ ID NO: 804481 - DNA, 15 bp, Homo sapiens
gtagtaacatcttta

SEQ ID NO: 804482 - DNA, 15 bp, Homo sapiens
tagtaacatctttag

SEQ ID NO: 804483 - DNA, 15 bp, Homo sapiens
agtaacatctttagg

SEQ ID NO: 804484 - DNA, 15 bp, Homo sapiens
gtaacatctttaggt

SEQ ID NO: 804485 - DNA, 15 bp, Homo sapiens
taacatctttaggta

SEQ ID NO: 804486 - DNA, 15 bp, Homo sapiens
aacatctttaggtaa

SEQ ID NO: 804487 - DNA, 15 bp, Homo sapiens
acatctttaggtaac

SEQ ID NO: 804488 - DNA, 15 bp, Homo sapiens
catctttaggtaact

SEQ ID NO: 804489 - DNA, 15 bp, Homo sapiens
atctttaggtaactg

SEQ ID NO: 804490 - DNA, 15 bp, Homo sapiens
tctttaggtaactga

SEQ ID NO: 804491 - DNA, 15 bp, Homo sapiens
ctttaggtaactgaa

SEQ ID NO: 804492 - DNA, 15 bp, Homo sapiens
tttaggtaactgaag

SEQ ID NO: 804493 - DNA, 15 bp, Homo sapiens
ttaggtaactgaagt

SEQ ID NO: 804494 - DNA, 15 bp, Homo sapiens
taggtaactgaagtc

SEQ ID NO: 804495 - DNA, 15 bp, Homo sapiens
aggtaactgaagtca

SEQ ID NO: 804496 - DNA, 15 bp, Homo sapiens
ggtaactgaagtcaa

SEQ ID NO: 804497 - DNA, 15 bp, Homo sapiens
gtaactgaagtcaat

SEQ ID NO: 804498 - DNA, 15 bp, Homo sapiens
taactgaagtcaatc

SEQ ID NO: 804499 - DNA, 15 bp, Homo sapiens
aactgaagtcaatcc

SEQ ID NO: 804500 - DNA, 15 bp, Homo sapiens
actgaagtcaatcct

SEQ ID NO: 804501 - DNA, 15 bp, Homo sapiens
ctgaagtcaatcctg

SEQ ID NO: 804502 - DNA, 15 bp, Homo sapiens
tgaagtcaatcctgc

SEQ ID NO: 804503 - DNA, 15 bp, Homo sapiens
gaagtcaatcctgcc

SEQ ID NO: 804504 - DNA, 15 bp, Homo sapiens
aagtcaatcctgccc

SEQ ID NO: 804505 - DNA, 15 bp, Homo sapiens
agtcaatcctgccca

SEQ ID NO: 804506 - DNA, 15 bp, Homo sapiens
gtcaatcctgcccac

SEQ ID NO: 804507 - DNA, 15 bp, Homo sapiens
tcaatcctgcccact

SEQ ID NO: 804508 - DNA, 15 bp, Homo sapiens
caatcctgcccactg

SEQ ID NO: 804509 - DNA, 15 bp, Homo sapiens
aatcctgcccactgg

SEQ ID NO: 804510 - DNA, 15 bp, Homo sapiens
atcctgcccactggg

SEQ ID NO: 804511 - DNA, 15 bp, Homo sapiens
tcctgcccactgggc

SEQ ID NO: 804512 - DNA, 15 bp, Homo sapiens
cctgcccactgggca

SEQ ID NO: 804513 - DNA, 15 bp, Homo sapiens
ctgcccactgggcaa

SEQ ID NO: 804514 - DNA, 15 bp, Homo sapiens
tgcccactgggcaaa

SEQ ID NO: 804515 - DNA, 15 bp, Homo sapiens
gcccactgggcaaat

SEQ ID NO: 804516 - DNA, 15 bp, Homo sapiens
cccactgggcaaata

SEQ ID NO: 804517 - DNA, 15 bp, Homo sapiens
ccactgggcaaatat

SEQ ID NO: 804518 - DNA, 15 bp, Homo sapiens
cactgggcaaatatt

SEQ ID NO: 804519 - DNA, 15 bp, Homo sapiens
actgggcaaatatta

SEQ ID NO: 804520 - DNA, 15 bp, Homo sapiens
ctgggcaaatattaa

SEQ ID NO: 804521 - DNA, 15 bp, Homo sapiens
tgggcaaatattaat

SEQ ID NO: 804522 - DNA, 15 bp, Homo sapiens
gggcaaatattaatt

SEQ ID NO: 804523 - DNA, 15 bp, Homo sapiens
ggcaaatattaattg

SEQ ID NO: 804524 - DNA, 15 bp, Homo sapiens
gcaaatattaattgg

SEQ ID NO: 804525 - DNA, 15 bp, Homo sapiens
caaatattaattggt

SEQ ID NO: 804526 - DNA, 15 bp, Homo sapiens
aaatattaattggtt

SEQ ID NO: 804527 - DNA, 15 bp, Homo sapiens
aatattaattggttg

SEQ ID NO: 804528 - DNA, 15 bp, Homo sapiens
atattaattggttgc

SEQ ID NO: 804529 - DNA, 15 bp, Homo sapiens
tattaattggttgct

SEQ ID NO: 804530 - DNA, 15 bp, Homo sapiens
attaattggttgctc

SEQ ID NO: 804531 - DNA, 15 bp, Homo sapiens
ttaattggttgctca

SEQ ID NO: 804532 - DNA, 15 bp, Homo sapiens
taattggttgctcag

SEQ ID NO: 804533 - DNA, 15 bp, Homo sapiens
aattggttgctcagg

SEQ ID NO: 804534 - DNA, 15 bp, Homo sapiens
attggttgctcaggg

SEQ ID NO: 804535 - DNA, 15 bp, Homo sapiens
ttggttgctcagggc

SEQ ID NO: 804536 - DNA, 15 bp, Homo sapiens
tggttgctcagggct

SEQ ID NO: 804537 - DNA, 15 bp, Homo sapiens
ggttgctcagggctg

SEQ ID NO: 804538 - DNA, 15 bp, Homo sapiens
gttgctcagggctgc

SEQ ID NO: 804539 - DNA, 15 bp, Homo sapiens
ttgctcagggctgca

SEQ ID NO: 804540 - DNA, 15 bp, Homo sapiens
tgctcagggctgcac

SEQ ID NO: 804541 - DNA, 15 bp, Homo sapiens
gctcagggctgcact

SEQ ID NO: 804542 - DNA, 15 bp, Homo sapiens
ctcagggctgcactg

SEQ ID NO: 804543 - DNA, 15 bp, Homo sapiens
tcagggctgcactga

SEQ ID NO: 804544 - DNA, 15 bp, Homo sapiens
cagggctgcactgag

SEQ ID NO: 804545 - DNA, 15 bp, Homo sapiens
agggctgcactgagt

SEQ ID NO: 804546 - DNA, 15 bp, Homo sapiens
gggctgcactgagtt

SEQ ID NO: 804547 - DNA, 15 bp, Homo sapiens
ggctgcactgagttc

SEQ ID NO: 804548 - DNA, 15 bp, Homo sapiens
gctgcactgagttca

SEQ ID NO: 804549 - DNA, 15 bp, Homo sapiens
ctgcactgagttcaa

SEQ ID NO: 804550 - DNA, 15 bp, Homo sapiens
tgcactgagttcaaa

SEQ ID NO: 804551 - DNA, 15 bp, Homo sapiens
gcactgagttcaaat

SEQ ID NO: 804552 - DNA, 15 bp, Homo sapiens
cactgagttcaaata

SEQ ID NO: 804553 - DNA, 15 bp, Homo sapiens
actgagttcaaatac

SEQ ID NO: 804554 - DNA, 15 bp, Homo sapiens
ctgagttcaaatact

SEQ ID NO: 804555 - DNA, 15 bp, Homo sapiens
tgagttcaaatactg

SEQ ID NO: 804556 - DNA, 15 bp, Homo sapiens
gagttcaaatactga

SEQ ID NO: 804557 - DNA, 15 bp, Homo sapiens
agttcaaatactgag

SEQ ID NO: 804558 - DNA, 15 bp, Homo sapiens
gttcaaatactgagc

SEQ ID NO: 804559 - DNA, 15 bp, Homo sapiens
ttcaaatactgagcc

SEQ ID NO: 804560 - DNA, 15 bp, Homo sapiens
tcaaatactgagcca

SEQ ID NO: 804561 - DNA, 15 bp, Homo sapiens
caaatactgagccac

SEQ ID NO: 804562 - DNA, 15 bp, Homo sapiens
aaatactgagccact

SEQ ID NO: 804563 - DNA, 15 bp, Homo sapiens
aatactgagccactc

SEQ ID NO: 804564 - DNA, 15 bp, Homo sapiens
atactgagccactca

SEQ ID NO: 804565 - DNA, 15 bp, Homo sapiens
tactgagccactcag

SEQ ID NO: 804566 - DNA, 15 bp, Homo sapiens
actgagccactcagg

SEQ ID NO: 804567 - DNA, 15 bp, Homo sapiens
ctgagccactcaggg

SEQ ID NO: 804568 - DNA, 15 bp, Homo sapiens
tgagccactcagggg

SEQ ID NO: 804569 - DNA, 15 bp, Homo sapiens
gagccactcaggggc

SEQ ID NO: 804570 - DNA, 15 bp, Homo sapiens
agccactcaggggct

SEQ ID NO: 804571 - DNA, 15 bp, Homo sapiens
gccactcaggggctt

SEQ ID NO: 804572 - DNA, 15 bp, Homo sapiens
ccactcaggggcttc

SEQ ID NO: 804573 - DNA, 15 bp, Homo sapiens
cactcaggggcttcg

SEQ ID NO: 804574 - DNA, 15 bp, Homo sapiens
actcaggggcttcga

SEQ ID NO: 804575 - DNA, 15 bp, Homo sapiens
ctcaggggcttcgaa

SEQ ID NO: 804576 - DNA, 15 bp, Homo sapiens
tcaggggcttcgaac

SEQ ID NO: 804577 - DNA, 15 bp, Homo sapiens
caggggcttcgaacg

SEQ ID NO: 804578 - DNA, 15 bp, Homo sapiens
aggggcttcgaacga

SEQ ID NO: 804579 - DNA, 15 bp, Homo sapiens
ggggcttcgaacgac

SEQ ID NO: 804580 - DNA, 15 bp, Homo sapiens
gggcttcgaacgacc

SEQ ID NO: 804581 - DNA, 15 bp, Homo sapiens
ggcttcgaacgacca

SEQ ID NO: 804582 - DNA, 15 bp, Homo sapiens
gcttcgaacgaccaa

SEQ ID NO: 804583 - DNA, 15 bp, Homo sapiens
cttcgaacgaccaag

SEQ ID NO: 804584 - DNA, 15 bp, Homo sapiens
ttcgaacgaccaaga

SEQ ID NO: 804585 - DNA, 15 bp, Homo sapiens
tcgaacgaccaagat

SEQ ID NO: 804586 - DNA, 15 bp, Homo sapiens
cgaacgaccaagatc

SEQ ID NO: 804587 - DNA, 15 bp, Homo sapiens
gaacgaccaagatca

SEQ ID NO: 804588 - DNA, 15 bp, Homo sapiens
aacgaccaagatcag

SEQ ID NO: 804589 - DNA, 15 bp, Homo sapiens
acgaccaagatcagg

SEQ ID NO: 804590 - DNA, 15 bp, Homo sapiens
cgaccaagatcaggc

SEQ ID NO: 804591 - DNA, 15 bp, Homo sapiens
gaccaagatcaggca

SEQ ID NO: 804592 - DNA, 15 bp, Homo sapiens
accaagatcaggcag

SEQ ID NO: 804593 - DNA, 15 bp, Homo sapiens
ccaagatcaggcagt

SEQ ID NO: 804594 - DNA, 15 bp, Homo sapiens
caagatcaggcagtt

SEQ ID NO: 804595 - DNA, 15 bp, Homo sapiens
aagatcaggcagttt

SEQ ID NO: 804596 - DNA, 15 bp, Homo sapiens
agatcaggcagtttt

SEQ ID NO: 804597 - DNA, 15 bp, Homo sapiens
gatcaggcagttttc

SEQ ID NO: 804598 - DNA, 15 bp, Homo sapiens
atcaggcagttttca

SEQ ID NO: 804599 - DNA, 15 bp, Homo sapiens
tcaggcagttttcaa

SEQ ID NO: 804600 - DNA, 15 bp, Homo sapiens
caggcagttttcaac

SEQ ID NO: 804601 - DNA, 15 bp, Homo sapiens
aggcagttttcaacc

SEQ ID NO: 804602 - DNA, 15 bp, Homo sapiens
ggcagttttcaacct

SEQ ID NO: 804603 - DNA, 15 bp, Homo sapiens
gcagttttcaacctg

SEQ ID NO: 804604 - DNA, 15 bp, Homo sapiens
cagttttcaacctgt

SEQ ID NO: 804605 - DNA, 15 bp, Homo sapiens
agttttcaacctgtg

SEQ ID NO: 804606 - DNA, 15 bp, Homo sapiens
gttttcaacctgtga

SEQ ID NO: 804607 - DNA, 15 bp, Homo sapiens
ttttcaacctgtgat

SEQ ID NO: 804608 - DNA, 15 bp, Homo sapiens
tttcaacctgtgatc

SEQ ID NO: 804609 - DNA, 15 bp, Homo sapiens
ttcaacctgtgatcc

SEQ ID NO: 804610 - DNA, 15 bp, Homo sapiens
tcaacctgtgatcca

SEQ ID NO: 804611 - DNA, 15 bp, Homo sapiens
caacctgtgatccac

SEQ ID NO: 804612 - DNA, 15 bp, Homo sapiens
aacctgtgatccact

SEQ ID NO: 804613 - DNA, 15 bp, Homo sapiens
acctgtgatccactt

SEQ ID NO: 804614 - DNA, 15 bp, Homo sapiens
cctgtgatccacttt

SEQ ID NO: 804615 - DNA, 15 bp, Homo sapiens
ctgtgatccactttt

SEQ ID NO: 804616 - DNA, 15 bp, Homo sapiens
tgtgatccacttttg

SEQ ID NO: 804617 - DNA, 15 bp, Homo sapiens
gtgatccacttttgg

SEQ ID NO: 804618 - DNA, 15 bp, Homo sapiens
tgatccacttttggt

SEQ ID NO: 804619 - DNA, 15 bp, Homo sapiens
gatccacttttggta

SEQ ID NO: 804620 - DNA, 15 bp, Homo sapiens
atccacttttggtag

SEQ ID NO: 804621 - DNA, 15 bp, Homo sapiens
tccacttttggtaga

SEQ ID NO: 804622 - DNA, 15 bp, Homo sapiens
ccacttttggtagat

SEQ ID NO: 804623 - DNA, 15 bp, Homo sapiens
cacttttggtagatt

SEQ ID NO: 804624 - DNA, 15 bp, Homo sapiens
acttttggtagattt

SEQ ID NO: 804625 - DNA, 15 bp, Homo sapiens
cttttggtagattta

SEQ ID NO: 804626 - DNA, 15 bp, Homo sapiens
ttttggtagatttaa

SEQ ID NO: 804627 - DNA, 15 bp, Homo sapiens
tttggtagatttaag

SEQ ID NO: 804628 - DNA, 15 bp, Homo sapiens
ttggtagatttaagg

SEQ ID NO: 804629 - DNA, 15 bp, Homo sapiens
tggtagatttaaggc

SEQ ID NO: 804630 - DNA, 15 bp, Homo sapiens
ggtagatttaaggca

SEQ ID NO: 804631 - DNA, 15 bp, Homo sapiens
gtagatttaaggcaa

SEQ ID NO: 804632 - DNA, 15 bp, Homo sapiens
tagatttaaggcaaa

SEQ ID NO: 804633 - DNA, 15 bp, Homo sapiens
agatttaaggcaaaa

SEQ ID NO: 804634 - DNA, 15 bp, Homo sapiens
gatttaaggcaaaag

SEQ ID NO: 804635 - DNA, 15 bp, Homo sapiens
atttaaggcaaaagc

SEQ ID NO: 804636 - DNA, 15 bp, Homo sapiens
tttaaggcaaaagca

SEQ ID NO: 804637 - DNA, 15 bp, Homo sapiens
ttaaggcaaaagcaa

SEQ ID NO: 804638 - DNA, 15 bp, Homo sapiens
taaggcaaaagcaaa

SEQ ID NO: 804639 - DNA, 15 bp, Homo sapiens
aaggcaaaagcaaat

SEQ ID NO: 804640 - DNA, 15 bp, Homo sapiens
aggcaaaagcaaata

SEQ ID NO: 804641 - DNA, 15 bp, Homo sapiens
ggcaaaagcaaatat

SEQ ID NO: 804642 - DNA, 15 bp, Homo sapiens
gcaaaagcaaatatt

SEQ ID NO: 804643 - DNA, 15 bp, Homo sapiens
caaaagcaaatattt

SEQ ID NO: 804644 - DNA, 15 bp, Homo sapiens
aaaagcaaatatttt

SEQ ID NO: 804645 - DNA, 15 bp, Homo sapiens
aaagcaaatattttt

SEQ ID NO: 804646 - DNA, 15 bp, Homo sapiens
aagcaaatatttttt

SEQ ID NO: 804647 - DNA, 15 bp, Homo sapiens
agcaaatattttttg

SEQ ID NO: 804648 - DNA, 15 bp, Homo sapiens
gcaaatattttttgc

SEQ ID NO: 804649 - DNA, 15 bp, Homo sapiens
caaatattttttgcc

SEQ ID NO: 804650 - DNA, 15 bp, Homo sapiens
aaatattttttgcca

SEQ ID NO: 804651 - DNA, 15 bp, Homo sapiens
aatattttttgccat

SEQ ID NO: 804652 - DNA, 15 bp, Homo sapiens
atattttttgccatt

SEQ ID NO: 804653 - DNA, 15 bp, Homo sapiens
tattttttgccattt

SEQ ID NO: 804654 - DNA, 15 bp, Homo sapiens
attttttgccatttt

SEQ ID NO: 804655 - DNA, 15 bp, Homo sapiens
ttttttgccattttt

SEQ ID NO: 804656 - DNA, 15 bp, Homo sapiens
tttttgccatttttt

SEQ ID NO: 804657 - DNA, 15 bp, Homo sapiens
ttttgccattttttc

SEQ ID NO: 804658 - DNA, 15 bp, Homo sapiens
tttgccattttttcc

SEQ ID NO: 804659 - DNA, 15 bp, Homo sapiens
ttgccattttttccc

SEQ ID NO: 804660 - DNA, 15 bp, Homo sapiens
tgccattttttccca

SEQ ID NO: 804661 - DNA, 15 bp, Homo sapiens
gccattttttcccaa

SEQ ID NO: 804662 - DNA, 15 bp, Homo sapiens
ccattttttcccaaa

SEQ ID NO: 804663 - DNA, 15 bp, Homo sapiens
cattttttcccaaat

SEQ ID NO: 804664 - DNA, 15 bp, Homo sapiens
attttttcccaaatt

SEQ ID NO: 804665 - DNA, 15 bp, Homo sapiens
ttttttcccaaatta

SEQ ID NO: 804666 - DNA, 15 bp, Homo sapiens
tttttcccaaattat

SEQ ID NO: 804667 - DNA, 15 bp, Homo sapiens
ttttcccaaattatt

SEQ ID NO: 804668 - DNA, 15 bp, Homo sapiens
tttcccaaattattt

SEQ ID NO: 804669 - DNA, 15 bp, Homo sapiens
ttcccaaattatttt

SEQ ID NO: 804670 - DNA, 15 bp, Homo sapiens
tcccaaattatttta

SEQ ID NO: 804671 - DNA, 15 bp, Homo sapiens
cccaaattattttac

SEQ ID NO: 804672 - DNA, 15 bp, Homo sapiens
ccaaattattttacc

SEQ ID NO: 804673 - DNA, 15 bp, Homo sapiens
caaattattttacca

SEQ ID NO: 804674 - DNA, 15 bp, Homo sapiens
aaattattttaccat

SEQ ID NO: 804675 - DNA, 15 bp, Homo sapiens
aattattttaccatt

SEQ ID NO: 804676 - DNA, 15 bp, Homo sapiens
attattttaccatta

SEQ ID NO: 804677 - DNA, 15 bp, Homo sapiens
ttattttaccattat

SEQ ID NO: 804678 - DNA, 15 bp, Homo sapiens
tattttaccattatg

SEQ ID NO: 804679 - DNA, 15 bp, Homo sapiens
attttaccattatgg

SEQ ID NO: 804680 - DNA, 15 bp, Homo sapiens
ttttaccattatggc

SEQ ID NO: 804681 - DNA, 15 bp, Homo sapiens
tttaccattatggca

SEQ ID NO: 804682 - DNA, 15 bp, Homo sapiens
ttaccattatggcac

SEQ ID NO: 804683 - DNA, 15 bp, Homo sapiens
taccattatggcacg

SEQ ID NO: 804684 - DNA, 15 bp, Homo sapiens
accattatggcacgt

SEQ ID NO: 804685 - DNA, 15 bp, Homo sapiens
ccattatggcacgtg

SEQ ID NO: 804686 - DNA, 15 bp, Homo sapiens
cattatggcacgtgt

SEQ ID NO: 804687 - DNA, 15 bp, Homo sapiens
attatggcacgtgtt

SEQ ID NO: 804688 - DNA, 15 bp, Homo sapiens
ttatggcacgtgttg

SEQ ID NO: 804689 - DNA, 15 bp, Homo sapiens
tatggcacgtgttgc

SEQ ID NO: 804690 - DNA, 15 bp, Homo sapiens
atggcacgtgttgct

SEQ ID NO: 804691 - DNA, 15 bp, Homo sapiens
tggcacgtgttgctc

SEQ ID NO: 804692 - DNA, 15 bp, Homo sapiens
ggcacgtgttgctcc

SEQ ID NO: 804693 - DNA, 15 bp, Homo sapiens
gcacgtgttgctcct

SEQ ID NO: 804694 - DNA, 15 bp, Homo sapiens
cacgtgttgctcctg

SEQ ID NO: 804695 - DNA, 15 bp, Homo sapiens
acgtgttgctcctgc

SEQ ID NO: 804696 - DNA, 15 bp, Homo sapiens
cgtgttgctcctgcc

SEQ ID NO: 804697 - DNA, 15 bp, Homo sapiens
gtgttgctcctgcct

SEQ ID NO: 804698 - DNA, 15 bp, Homo sapiens
tgttgctcctgccta

SEQ ID NO: 804699 - DNA, 15 bp, Homo sapiens
gttgctcctgcctag

SEQ ID NO: 804700 - DNA, 15 bp, Homo sapiens
ttgctcctgcctagg

SEQ ID NO: 804701 - DNA, 15 bp, Homo sapiens
tgctcctgcctagga

SEQ ID NO: 804702 - DNA, 15 bp, Homo sapiens
gctcctgcctaggag

SEQ ID NO: 804703 - DNA, 15 bp, Homo sapiens
ctcctgcctaggaga

SEQ ID NO: 804704 - DNA, 15 bp, Homo sapiens
tcctgcctaggagat

SEQ ID NO: 804705 - DNA, 15 bp, Homo sapiens
cctgcctaggagatg

SEQ ID NO: 804706 - DNA, 15 bp, Homo sapiens
ctgcctaggagatgc

SEQ ID NO: 804707 - DNA, 15 bp, Homo sapiens
tgcctaggagatgca

SEQ ID NO: 804708 - DNA, 15 bp, Homo sapiens
gcctaggagatgcat

SEQ ID NO: 804709 - DNA, 15 bp, Homo sapiens
cctaggagatgcatt

SEQ ID NO: 804710 - DNA, 15 bp, Homo sapiens
ctaggagatgcattc

SEQ ID NO: 804711 - DNA, 15 bp, Homo sapiens
taggagatgcattcc

SEQ ID NO: 804712 - DNA, 15 bp, Homo sapiens
aggagatgcattccc

SEQ ID NO: 804713 - DNA, 15 bp, Homo sapiens
ggagatgcattcccc

SEQ ID NO: 804714 - DNA, 15 bp, Homo sapiens
gagatgcattcccca

SEQ ID NO: 804715 - DNA, 15 bp, Homo sapiens
agatgcattccccag

SEQ ID NO: 804716 - DNA, 15 bp, Homo sapiens
gatgcattccccaga

SEQ ID NO: 804717 - DNA, 15 bp, Homo sapiens
atgcattccccagaa

SEQ ID NO: 804718 - DNA, 15 bp, Homo sapiens
tgcattccccagaac

SEQ ID NO: 804719 - DNA, 15 bp, Homo sapiens
gcattccccagaacc

SEQ ID NO: 804720 - DNA, 15 bp, Homo sapiens
cattccccagaacca

SEQ ID NO: 804721 - DNA, 15 bp, Homo sapiens
attccccagaaccaa

SEQ ID NO: 804722 - DNA, 15 bp, Homo sapiens
ttccccagaaccaag

SEQ ID NO: 804723 - DNA, 15 bp, Homo sapiens
tccccagaaccaagc

SEQ ID NO: 804724 - DNA, 15 bp, Homo sapiens
ccccagaaccaagca

SEQ ID NO: 804725 - DNA, 15 bp, Homo sapiens
cccagaaccaagcaa

SEQ ID NO: 804726 - DNA, 15 bp, Homo sapiens
ccagaaccaagcaaa

SEQ ID NO: 804727 - DNA, 15 bp, Homo sapiens
cagaaccaagcaaac

SEQ ID NO: 804728 - DNA, 15 bp, Homo sapiens
agaaccaagcaaaca

SEQ ID NO: 804729 - DNA, 15 bp, Homo sapiens
gaaccaagcaaacaa

SEQ ID NO: 804730 - DNA, 15 bp, Homo sapiens
aaccaagcaaacaag

SEQ ID NO: 804731 - DNA, 15 bp, Homo sapiens
accaagcaaacaaga

SEQ ID NO: 804732 - DNA, 15 bp, Homo sapiens
ccaagcaaacaagaa

SEQ ID NO: 804733 - DNA, 15 bp, Homo sapiens
caagcaaacaagaag

SEQ ID NO: 804734 - DNA, 15 bp, Homo sapiens
aagcaaacaagaaga

SEQ ID NO: 804735 - DNA, 15 bp, Homo sapiens
agcaaacaagaagaa

SEQ ID NO: 804736 - DNA, 15 bp, Homo sapiens
gcaaacaagaagaag

SEQ ID NO: 804737 - DNA, 15 bp, Homo sapiens
caaacaagaagaagg

SEQ ID NO: 804738 - DNA, 15 bp, Homo sapiens
aaacaagaagaaggt

SEQ ID NO: 804739 - DNA, 15 bp, Homo sapiens
aacaagaagaaggtc

SEQ ID NO: 804740 - DNA, 15 bp, Homo sapiens
acaagaagaaggtcc

SEQ ID NO: 804741 - DNA, 15 bp, Homo sapiens
caagaagaaggtcct

SEQ ID NO: 804742 - DNA, 15 bp, Homo sapiens
aagaagaaggtcctc

SEQ ID NO: 804743 - DNA, 15 bp, Homo sapiens
agaagaaggtcctcc

SEQ ID NO: 804744 - DNA, 15 bp, Homo sapiens
gaagaaggtcctcct

SEQ ID NO: 804745 - DNA, 15 bp, Homo sapiens
aagaaggtcctcctt

SEQ ID NO: 804746 - DNA, 15 bp, Homo sapiens
agaaggtcctccttc

SEQ ID NO: 804747 - DNA, 15 bp, Homo sapiens
gaaggtcctccttca

SEQ ID NO: 804748 - DNA, 15 bp, Homo sapiens
aaggtcctccttcag

SEQ ID NO: 804749 - DNA, 15 bp, Homo sapiens
aggtcctccttcagt

SEQ ID NO: 804750 - DNA, 15 bp, Homo sapiens
ggtcctccttcagtg

SEQ ID NO: 804751 - DNA, 15 bp, Homo sapiens
gtcctccttcagtgg

SEQ ID NO: 804752 - DNA, 15 bp, Homo sapiens
tcctccttcagtggg

SEQ ID NO: 804753 - DNA, 15 bp, Homo sapiens
cctccttcagtgggc

SEQ ID NO: 804754 - DNA, 15 bp, Homo sapiens
ctccttcagtgggct

SEQ ID NO: 804755 - DNA, 15 bp, Homo sapiens
tccttcagtgggctg

SEQ ID NO: 804756 - DNA, 15 bp, Homo sapiens
ccttcagtgggctgt

SEQ ID NO: 804757 - DNA, 15 bp, Homo sapiens
cttcagtgggctgtc

SEQ ID NO: 804758 - DNA, 15 bp, Homo sapiens
ttcagtgggctgtca

SEQ ID NO: 804759 - DNA, 15 bp, Homo sapiens
tcagtgggctgtcat

SEQ ID NO: 804760 - DNA, 15 bp, Homo sapiens
cagtgggctgtcatc

SEQ ID NO: 804761 - DNA, 15 bp, Homo sapiens
agtgggctgtcatcg

SEQ ID NO: 804762 - DNA, 15 bp, Homo sapiens
gtgggctgtcatcga

SEQ ID NO: 804763 - DNA, 15 bp, Homo sapiens
tgggctgtcatcgat

SEQ ID NO: 804764 - DNA, 15 bp, Homo sapiens
gggctgtcatcgatc

SEQ ID NO: 804765 - DNA, 15 bp, Homo sapiens
ggctgtcatcgatca

SEQ ID NO: 804766 - DNA, 15 bp, Homo sapiens
gctgtcatcgatcat

SEQ ID NO: 804767 - DNA, 15 bp, Homo sapiens
ctgtcatcgatcatt

SEQ ID NO: 804768 - DNA, 15 bp, Homo sapiens
tgtcatcgatcattc

SEQ ID NO: 804769 - DNA, 15 bp, Homo sapiens
gtcatcgatcattcc

SEQ ID NO: 804770 - DNA, 15 bp, Homo sapiens
tcatcgatcattccc

SEQ ID NO: 804771 - DNA, 15 bp, Homo sapiens
catcgatcattcccc

SEQ ID NO: 804772 - DNA, 15 bp, Homo sapiens
atcgatcattccccg

SEQ ID NO: 804773 - DNA, 15 bp, Homo sapiens
tcgatcattccccgt

SEQ ID NO: 804774 - DNA, 15 bp, Homo sapiens
cgatcattccccgtt

SEQ ID NO: 804775 - DNA, 15 bp, Homo sapiens
gatcattccccgttc

SEQ ID NO: 804776 - DNA, 15 bp, Homo sapiens
atcattccccgttcc

SEQ ID NO: 804777 - DNA, 15 bp, Homo sapiens
tcattccccgttcca

SEQ ID NO: 804778 - DNA, 15 bp, Homo sapiens
cattccccgttccat

SEQ ID NO: 804779 - DNA, 15 bp, Homo sapiens
attccccgttccatg

SEQ ID NO: 804780 - DNA, 15 bp, Homo sapiens
ttccccgttccatgg

SEQ ID NO: 804781 - DNA, 15 bp, Homo sapiens
tccccgttccatggc

SEQ ID NO: 804782 - DNA, 15 bp, Homo sapiens
ccccgttccatggcc

SEQ ID NO: 804783 - DNA, 15 bp, Homo sapiens
cccgttccatggcca

SEQ ID NO: 804784 - DNA, 15 bp, Homo sapiens
ccgttccatggccac

SEQ ID NO: 804785 - DNA, 15 bp, Homo sapiens
cgttccatggccaca

SEQ ID NO: 804786 - DNA, 15 bp, Homo sapiens
gttccatggccacag

SEQ ID NO: 804787 - DNA, 15 bp, Homo sapiens
ttccatggccacagg

SEQ ID NO: 804788 - DNA, 15 bp, Homo sapiens
tccatggccacagga

SEQ ID NO: 804789 - DNA, 15 bp, Homo sapiens
ccatggccacaggac

SEQ ID NO: 804790 - DNA, 15 bp, Homo sapiens
catggccacaggact

SEQ ID NO: 804791 - DNA, 15 bp, Homo sapiens
atggccacaggactg

SEQ ID NO: 804792 - DNA, 15 bp, Homo sapiens
tggccacaggactga

SEQ ID NO: 804793 - DNA, 15 bp, Homo sapiens
ggccacaggactgac

SEQ ID NO: 804794 - DNA, 15 bp, Homo sapiens
gccacaggactgact

SEQ ID NO: 804795 - DNA, 15 bp, Homo sapiens
ccacaggactgactg

SEQ ID NO: 804796 - DNA, 15 bp, Homo sapiens
cacaggactgactgc

SEQ ID NO: 804797 - DNA, 15 bp, Homo sapiens
acaggactgactgct

SEQ ID NO: 804798 - DNA, 15 bp, Homo sapiens
caggactgactgctg

SEQ ID NO: 804799 - DNA, 15 bp, Homo sapiens
aggactgactgctga

SEQ ID NO: 804800 - DNA, 15 bp, Homo sapiens
ggactgactgctgat

SEQ ID NO: 804801 - DNA, 15 bp, Homo sapiens
gactgactgctgatg

SEQ ID NO: 804802 - DNA, 15 bp, Homo sapiens
actgactgctgatga

SEQ ID NO: 804803 - DNA, 15 bp, Homo sapiens
ctgactgctgatgaa

SEQ ID NO: 804804 - DNA, 15 bp, Homo sapiens
tgactgctgatgaaa

SEQ ID NO: 804805 - DNA, 15 bp, Homo sapiens
gactgctgatgaaat

SEQ ID NO: 804806 - DNA, 15 bp, Homo sapiens
actgctgatgaaatc

SEQ ID NO: 804807 - DNA, 15 bp, Homo sapiens
ctgctgatgaaatct

SEQ ID NO: 804808 - DNA, 15 bp, Homo sapiens
tgctgatgaaatcta

SEQ ID NO: 804809 - DNA, 15 bp, Homo sapiens
gctgatgaaatctaa

SEQ ID NO: 804810 - DNA, 15 bp, Homo sapiens
ctgatgaaatctaaa

SEQ ID NO: 804811 - DNA, 15 bp, Homo sapiens
tgatgaaatctaaaa

SEQ ID NO: 804812 - DNA, 15 bp, Homo sapiens
gatgaaatctaaaag

SEQ ID NO: 804813 - DNA, 15 bp, Homo sapiens
atgaaatctaaaaga

SEQ ID NO: 804814 - DNA, 15 bp, Homo sapiens
tgaaatctaaaagac

SEQ ID NO: 804815 - DNA, 15 bp, Homo sapiens
gaaatctaaaagacc

SEQ ID NO: 804816 - DNA, 15 bp, Homo sapiens
aaatctaaaagacca

SEQ ID NO: 804817 - DNA, 15 bp, Homo sapiens
aatctaaaagaccag

SEQ ID NO: 804818 - DNA, 15 bp, Homo sapiens
atctaaaagaccagc

SEQ ID NO: 804819 - DNA, 15 bp, Homo sapiens
tctaaaagaccagct

SEQ ID NO: 804820 - DNA, 15 bp, Homo sapiens
ctaaaagaccagctt

SEQ ID NO: 804821 - DNA, 15 bp, Homo sapiens
taaaagaccagcttg

SEQ ID NO: 804822 - DNA, 15 bp, Homo sapiens
aaaagaccagcttgc

SEQ ID NO: 804823 - DNA, 15 bp, Homo sapiens
aaagaccagcttgca

SEQ ID NO: 804824 - DNA, 15 bp, Homo sapiens
aagaccagcttgcag

SEQ ID NO: 804825 - DNA, 15 bp, Homo sapiens
agaccagcttgcaga

SEQ ID NO: 804826 - DNA, 15 bp, Homo sapiens
gaccagcttgcagaa

SEQ ID NO: 804827 - DNA, 15 bp, Homo sapiens
accagcttgcagaag

SEQ ID NO: 804828 - DNA, 15 bp, Homo sapiens
ccagcttgcagaagg

SEQ ID NO: 804829 - DNA, 15 bp, Homo sapiens
cagcttgcagaaggc

SEQ ID NO: 804830 - DNA, 15 bp, Homo sapiens
agcttgcagaaggca

SEQ ID NO: 804831 - DNA, 15 bp, Homo sapiens
gcttgcagaaggcat

SEQ ID NO: 804832 - DNA, 15 bp, Homo sapiens
cttgcagaaggcatg

SEQ ID NO: 804833 - DNA, 15 bp, Homo sapiens
ttgcagaaggcatgg

SEQ ID NO: 804834 - DNA, 15 bp, Homo sapiens
tgcagaaggcatgga

SEQ ID NO: 804835 - DNA, 15 bp, Homo sapiens
gcagaaggcatggaa

SEQ ID NO: 804836 - DNA, 15 bp, Homo sapiens
cagaaggcatggaaa

SEQ ID NO: 804837 - DNA, 15 bp, Homo sapiens
agaaggcatggaaat

SEQ ID NO: 804838 - DNA, 15 bp, Homo sapiens
gaaggcatggaaatc

SEQ ID NO: 804839 - DNA, 15 bp, Homo sapiens
aaggcatggaaatcc

SEQ ID NO: 804840 - DNA, 15 bp, Homo sapiens
aggcatggaaatcct

SEQ ID NO: 804841 - DNA, 15 bp, Homo sapiens
ggcatggaaatcctg

SEQ ID NO: 804842 - DNA, 15 bp, Homo sapiens
gcatggaaatcctgg

SEQ ID NO: 804843 - DNA, 15 bp, Homo sapiens
catggaaatcctggg

SEQ ID NO: 804844 - DNA, 15 bp, Homo sapiens
atggaaatcctgggg

SEQ ID NO: 804845 - DNA, 15 bp, Homo sapiens
tggaaatcctggggt

SEQ ID NO: 804846 - DNA, 15 bp, Homo sapiens
ggaaatcctggggtt

SEQ ID NO: 804847 - DNA, 15 bp, Homo sapiens
gaaatcctggggtta

SEQ ID NO: 804848 - DNA, 15 bp, Homo sapiens
aaatcctggggttag

SEQ ID NO: 804849 - DNA, 15 bp, Homo sapiens
aatcctggggttagg

SEQ ID NO: 804850 - DNA, 15 bp, Homo sapiens
atcctggggttaggg

SEQ ID NO: 804851 - DNA, 15 bp, Homo sapiens
tcctggggttagggg

SEQ ID NO: 804852 - DNA, 15 bp, Homo sapiens
cctggggttaggggc

SEQ ID NO: 804853 - DNA, 15 bp, Homo sapiens
ctggggttaggggcc

SEQ ID NO: 804854 - DNA, 15 bp, Homo sapiens
tggggttaggggccc

SEQ ID NO: 804855 - DNA, 15 bp, Homo sapiens
ggggttaggggcccc

SEQ ID NO: 804856 - DNA, 15 bp, Homo sapiens
gggttaggggcccct

SEQ ID NO: 804857 - DNA, 15 bp, Homo sapiens
ggttaggggcccctc

SEQ ID NO: 804858 - DNA, 15 bp, Homo sapiens
gttaggggcccctct

SEQ ID NO: 804859 - DNA, 15 bp, Homo sapiens
ttaggggcccctctg

SEQ ID NO: 804860 - DNA, 15 bp, Homo sapiens
taggggcccctctgc

SEQ ID NO: 804861 - DNA, 15 bp, Homo sapiens
aggggcccctctgct

SEQ ID NO: 804862 - DNA, 15 bp, Homo sapiens
ggggcccctctgcta

SEQ ID NO: 804863 - DNA, 15 bp, Homo sapiens
gggcccctctgctat

SEQ ID NO: 804864 - DNA, 15 bp, Homo sapiens
ggcccctctgctatg

SEQ ID NO: 804865 - DNA, 15 bp, Homo sapiens
gcccctctgctatgg

SEQ ID NO: 804866 - DNA, 15 bp, Homo sapiens
cccctctgctatgga

SEQ ID NO: 804867 - DNA, 15 bp, Homo sapiens
ccctctgctatggag

SEQ ID NO: 804868 - DNA, 15 bp, Homo sapiens
cctctgctatggagg

SEQ ID NO: 804869 - DNA, 15 bp, Homo sapiens
ctctgctatggaggt

SEQ ID NO: 804870 - DNA, 15 bp, Homo sapiens
tctgctatggaggta

SEQ ID NO: 804871 - DNA, 15 bp, Homo sapiens
ctgctatggaggtat

SEQ ID NO: 804872 - DNA, 15 bp, Homo sapiens
tgctatggaggtatg

SEQ ID NO: 804873 - DNA, 15 bp, Homo sapiens
gctatggaggtatga

SEQ ID NO: 804874 - DNA, 15 bp, Homo sapiens
ctatggaggtatgac

SEQ ID NO: 804875 - DNA, 15 bp, Homo sapiens
tatggaggtatgact

SEQ ID NO: 804876 - DNA, 15 bp, Homo sapiens
atggaggtatgactc

SEQ ID NO: 804877 - DNA, 15 bp, Homo sapiens
tggaggtatgactca

SEQ ID NO: 804878 - DNA, 15 bp, Homo sapiens
ggaggtatgactcac

SEQ ID NO: 804879 - DNA, 15 bp, Homo sapiens
gaggtatgactcaca

SEQ ID NO: 804880 - DNA, 15 bp, Homo sapiens
aggtatgactcacag

SEQ ID NO: 804881 - DNA, 15 bp, Homo sapiens
ggtatgactcacagt

SEQ ID NO: 804882 - DNA, 15 bp, Homo sapiens
gtatgactcacagtg

SEQ ID NO: 804883 - DNA, 15 bp, Homo sapiens
tatgactcacagtgg

SEQ ID NO: 804884 - DNA, 15 bp, Homo sapiens
atgactcacagtggg

SEQ ID NO: 804885 - DNA, 15 bp, Homo sapiens
tgactcacagtgggt

SEQ ID NO: 804886 - DNA, 15 bp, Homo sapiens
gactcacagtgggtc

SEQ ID NO: 804887 - DNA, 15 bp, Homo sapiens
actcacagtgggtca

SEQ ID NO: 804888 - DNA, 15 bp, Homo sapiens
ctcacagtgggtcag

SEQ ID NO: 804889 - DNA, 15 bp, Homo sapiens
tcacagtgggtcagg

SEQ ID NO: 804890 - DNA, 15 bp, Homo sapiens
cacagtgggtcaggg

SEQ ID NO: 804891 - DNA, 15 bp, Homo sapiens
acagtgggtcaggga

SEQ ID NO: 804892 - DNA, 15 bp, Homo sapiens
cagtgggtcagggaa

SEQ ID NO: 804893 - DNA, 15 bp, Homo sapiens
agtgggtcagggaac

SEQ ID NO: 804894 - DNA, 15 bp, Homo sapiens
gtgggtcagggaacc

SEQ ID NO: 804895 - DNA, 15 bp, Homo sapiens
tgggtcagggaacct

SEQ ID NO: 804896 - DNA, 15 bp, Homo sapiens
gggtcagggaacctg

SEQ ID NO: 804897 - DNA, 15 bp, Homo sapiens
ggtcagggaacctga

SEQ ID NO: 804898 - DNA, 15 bp, Homo sapiens
gtcagggaacctgag

SEQ ID NO: 804899 - DNA, 15 bp, Homo sapiens
tcagggaacctgagt

SEQ ID NO: 804900 - DNA, 15 bp, Homo sapiens
cagggaacctgagtg

SEQ ID NO: 804901 - DNA, 15 bp, Homo sapiens
agggaacctgagtgg

SEQ ID NO: 804902 - DNA, 15 bp, Homo sapiens
gggaacctgagtggg

SEQ ID NO: 804903 - DNA, 15 bp, Homo sapiens
ggaacctgagtggga

SEQ ID NO: 804904 - DNA, 15 bp, Homo sapiens
gaacctgagtgggat

SEQ ID NO: 804905 - DNA, 15 bp, Homo sapiens
aacctgagtgggatc

SEQ ID NO: 804906 - DNA, 15 bp, Homo sapiens
acctgagtgggatca

SEQ ID NO: 804907 - DNA, 15 bp, Homo sapiens
cctgagtgggatcat

SEQ ID NO: 804908 - DNA, 15 bp, Homo sapiens
ctgagtgggatcatc

SEQ ID NO: 804909 - DNA, 15 bp, Homo sapiens
tgagtgggatcatcc

SEQ ID NO: 804910 - DNA, 15 bp, Homo sapiens
gagtgggatcatccc

SEQ ID NO: 804911 - DNA, 15 bp, Homo sapiens
agtgggatcatccct

SEQ ID NO: 804912 - DNA, 15 bp, Homo sapiens
gtgggatcatccctg

SEQ ID NO: 804913 - DNA, 15 bp, Homo sapiens
tgggatcatccctgg

SEQ ID NO: 804914 - DNA, 15 bp, Homo sapiens
gggatcatccctgga

SEQ ID NO: 804915 - DNA, 15 bp, Homo sapiens
ggatcatccctggaa

SEQ ID NO: 804916 - DNA, 15 bp, Homo sapiens
gatcatccctggaac

SEQ ID NO: 804917 - DNA, 15 bp, Homo sapiens
atcatccctggaact

SEQ ID NO: 804918 - DNA, 15 bp, Homo sapiens
tcatccctggaactc

SEQ ID NO: 804919 - DNA, 15 bp, Homo sapiens
catccctggaactca

SEQ ID NO: 804920 - DNA, 15 bp, Homo sapiens
atccctggaactcag

SEQ ID NO: 804921 - DNA, 15 bp, Homo sapiens
tccctggaactcaga

SEQ ID NO: 804922 - DNA, 15 bp, Homo sapiens
ccctggaactcagaa

SEQ ID NO: 804923 - DNA, 15 bp, Homo sapiens
cctggaactcagaat

SEQ ID NO: 804924 - DNA, 15 bp, Homo sapiens
ctggaactcagaatc

SEQ ID NO: 804925 - DNA, 15 bp, Homo sapiens
tggaactcagaatct

SEQ ID NO: 804926 - DNA, 15 bp, Homo sapiens
ggaactcagaatctc

SEQ ID NO: 804927 - DNA, 15 bp, Homo sapiens
gaactcagaatctct

SEQ ID NO: 804928 - DNA, 15 bp, Homo sapiens
aactcagaatctcta

SEQ ID NO: 804929 - DNA, 15 bp, Homo sapiens
actcagaatctctaa

SEQ ID NO: 804930 - DNA, 15 bp, Homo sapiens
ctcagaatctctaag

SEQ ID NO: 804931 - DNA, 15 bp, Homo sapiens
tcagaatctctaaga

SEQ ID NO: 804932 - DNA, 15 bp, Homo sapiens
cagaatctctaagac

SEQ ID NO: 804933 - DNA, 15 bp, Homo sapiens
agaatctctaagaca

SEQ ID NO: 804934 - DNA, 15 bp, Homo sapiens
gaatctctaagacac

SEQ ID NO: 804935 - DNA, 15 bp, Homo sapiens
aatctctaagacaca

SEQ ID NO: 804936 - DNA, 15 bp, Homo sapiens
atctctaagacacac

SEQ ID NO: 804937 - DNA, 15 bp, Homo sapiens
tctctaagacacact

SEQ ID NO: 804938 - DNA, 15 bp, Homo sapiens
ctctaagacacactt

SEQ ID NO: 804939 - DNA, 15 bp, Homo sapiens
tctaagacacactta

SEQ ID NO: 804940 - DNA, 15 bp, Homo sapiens
ctaagacacacttat

SEQ ID NO: 804941 - DNA, 15 bp, Homo sapiens
taagacacacttatt

SEQ ID NO: 804942 - DNA, 15 bp, Homo sapiens
aagacacacttattg

SEQ ID NO: 804943 - DNA, 15 bp, Homo sapiens
agacacacttattgg

SEQ ID NO: 804944 - DNA, 15 bp, Homo sapiens
gacacacttattggc

SEQ ID NO: 804945 - DNA, 15 bp, Homo sapiens
acacacttattggct

SEQ ID NO: 804946 - DNA, 15 bp, Homo sapiens
cacacttattggctc

SEQ ID NO: 804947 - DNA, 15 bp, Homo sapiens
acacttattggctct

SEQ ID NO: 804948 - DNA, 15 bp, Homo sapiens
cacttattggctctc

SEQ ID NO: 804949 - DNA, 15 bp, Homo sapiens
acttattggctctct

SEQ ID NO: 804950 - DNA, 15 bp, Homo sapiens
cttattggctctcta

SEQ ID NO: 804951 - DNA, 15 bp, Homo sapiens
ttattggctctctat

SEQ ID NO: 804952 - DNA, 15 bp, Homo sapiens
tattggctctctata

SEQ ID NO: 804953 - DNA, 15 bp, Homo sapiens
attggctctctataa

SEQ ID NO: 804954 - DNA, 15 bp, Homo sapiens
ttggctctctataag

SEQ ID NO: 804955 - DNA, 15 bp, Homo sapiens
tggctctctataagc

SEQ ID NO: 804956 - DNA, 15 bp, Homo sapiens
ggctctctataagca

SEQ ID NO: 804957 - DNA, 15 bp, Homo sapiens
gctctctataagcaa

SEQ ID NO: 804958 - DNA, 15 bp, Homo sapiens
ctctctataagcaat

SEQ ID NO: 804959 - DNA, 15 bp, Homo sapiens
tctctataagcaata

SEQ ID NO: 804960 - DNA, 15 bp, Homo sapiens
ctctataagcaataa

SEQ ID NO: 804961 - DNA, 15 bp, Homo sapiens
tctataagcaataac

SEQ ID NO: 804962 - DNA, 15 bp, Homo sapiens
ctataagcaataaca

SEQ ID NO: 804963 - DNA, 15 bp, Homo sapiens
tataagcaataacag

SEQ ID NO: 804964 - DNA, 15 bp, Homo sapiens
ataagcaataacaga

SEQ ID NO: 804965 - DNA, 15 bp, Homo sapiens
taagcaataacagat

SEQ ID NO: 804966 - DNA, 15 bp, Homo sapiens
aagcaataacagatg

SEQ ID NO: 804967 - DNA, 15 bp, Homo sapiens
agcaataacagatgg

SEQ ID NO: 804968 - DNA, 15 bp, Homo sapiens
gcaataacagatggc

SEQ ID NO: 804969 - DNA, 15 bp, Homo sapiens
caataacagatggca

SEQ ID NO: 804970 - DNA, 15 bp, Homo sapiens
aataacagatggcaa

SEQ ID NO: 804971 - DNA, 15 bp, Homo sapiens
ataacagatggcaag

SEQ ID NO: 804972 - DNA, 15 bp, Homo sapiens
taacagatggcaaga

SEQ ID NO: 804973 - DNA, 15 bp, Homo sapiens
aacagatggcaagat

SEQ ID NO: 804974 - DNA, 15 bp, Homo sapiens
acagatggcaagata

SEQ ID NO: 804975 - DNA, 15 bp, Homo sapiens
cagatggcaagataa

SEQ ID NO: 804976 - DNA, 15 bp, Homo sapiens
agatggcaagataat

SEQ ID NO: 804977 - DNA, 15 bp, Homo sapiens
gatggcaagataata

SEQ ID NO: 804978 - DNA, 15 bp, Homo sapiens
atggcaagataatat

SEQ ID NO: 804979 - DNA, 15 bp, Homo sapiens
tggcaagataatatt

SEQ ID NO: 804980 - DNA, 15 bp, Homo sapiens
ggcaagataatatta

SEQ ID NO: 804981 - DNA, 15 bp, Homo sapiens
gcaagataatattat

SEQ ID NO: 804982 - DNA, 15 bp, Homo sapiens
caagataatattatt

SEQ ID NO: 804983 - DNA, 15 bp, Homo sapiens
aagataatattattc

SEQ ID NO: 804984 - DNA, 15 bp, Homo sapiens
agataatattattct

SEQ ID NO: 804985 - DNA, 15 bp, Homo sapiens
gataatattattctt

SEQ ID NO: 804986 - DNA, 15 bp, Homo sapiens
ataatattattcttc

SEQ ID NO: 804987 - DNA, 15 bp, Homo sapiens
taatattattcttct

SEQ ID NO: 804988 - DNA, 15 bp, Homo sapiens
aatattattcttcta

SEQ ID NO: 804989 - DNA, 15 bp, Homo sapiens
atattattcttctaa

SEQ ID NO: 804990 - DNA, 15 bp, Homo sapiens
tattattcttctaat

SEQ ID NO: 804991 - DNA, 15 bp, Homo sapiens
attattcttctaatc

SEQ ID NO: 804992 - DNA, 15 bp, Homo sapiens
ttattcttctaatct

SEQ ID NO: 804993 - DNA, 15 bp, Homo sapiens
tattcttctaatctt

SEQ ID NO: 804994 - DNA, 15 bp, Homo sapiens
attcttctaatcttt

SEQ ID NO: 804995 - DNA, 15 bp, Homo sapiens
ttcttctaatctttt

SEQ ID NO: 804996 - DNA, 15 bp, Homo sapiens
tcttctaatcttttg

SEQ ID NO: 804997 - DNA, 15 bp, Homo sapiens
cttctaatcttttgc

SEQ ID NO: 804998 - DNA, 15 bp, Homo sapiens
ttctaatcttttgct

SEQ ID NO: 804999 - DNA, 15 bp, Homo sapiens
tctaatcttttgcta

SEQ ID NO: 805000 - DNA, 15 bp, Homo sapiens
ctaatcttttgctaa

SEQ ID NO: 805001 - DNA, 15 bp, Homo sapiens
taatcttttgctaaa

SEQ ID NO: 805002 - DNA, 15 bp, Homo sapiens
aatcttttgctaaaa

SEQ ID NO: 805003 - DNA, 15 bp, Homo sapiens
atcttttgctaaaaa

SEQ ID NO: 805004 - DNA, 15 bp, Homo sapiens
tcttttgctaaaaac

SEQ ID NO: 805005 - DNA, 15 bp, Homo sapiens
cttttgctaaaaaca

SEQ ID NO: 805006 - DNA, 15 bp, Homo sapiens
ttttgctaaaaacat

SEQ ID NO: 805007 - DNA, 15 bp, Homo sapiens
tttgctaaaaacatt

SEQ ID NO: 805008 - DNA, 15 bp, Homo sapiens
ttgctaaaaacattc

SEQ ID NO: 805009 - DNA, 15 bp, Homo sapiens
tgctaaaaacattca

SEQ ID NO: 805010 - DNA, 15 bp, Homo sapiens
gctaaaaacattcag

SEQ ID NO: 805011 - DNA, 15 bp, Homo sapiens
ctaaaaacattcagt

SEQ ID NO: 805012 - DNA, 15 bp, Homo sapiens
taaaaacattcagtc

SEQ ID NO: 805013 - DNA, 15 bp, Homo sapiens
aaaaacattcagtca

SEQ ID NO: 805014 - DNA, 15 bp, Homo sapiens
aaaacattcagtcat

SEQ ID NO: 805015 - DNA, 15 bp, Homo sapiens
aaacattcagtcatt

SEQ ID NO: 805016 - DNA, 15 bp, Homo sapiens
aacattcagtcattt

SEQ ID NO: 805017 - DNA, 15 bp, Homo sapiens
acattcagtcatttc

SEQ ID NO: 805018 - DNA, 15 bp, Homo sapiens
cattcagtcatttct

SEQ ID NO: 805019 - DNA, 15 bp, Homo sapiens
attcagtcatttctc

SEQ ID NO: 805020 - DNA, 15 bp, Homo sapiens
ttcagtcatttctca

SEQ ID NO: 805021 - DNA, 15 bp, Homo sapiens
tcagtcatttctcag

SEQ ID NO: 805022 - DNA, 15 bp, Homo sapiens
cagtcatttctcagg

SEQ ID NO: 805023 - DNA, 15 bp, Homo sapiens
agtcatttctcaggg

SEQ ID NO: 805024 - DNA, 15 bp, Homo sapiens
gtcatttctcagggg

SEQ ID NO: 805025 - DNA, 15 bp, Homo sapiens
tcatttctcaggggc

SEQ ID NO: 805026 - DNA, 15 bp, Homo sapiens
catttctcaggggcc

SEQ ID NO: 805027 - DNA, 15 bp, Homo sapiens
atttctcaggggcct

SEQ ID NO: 805028 - DNA, 15 bp, Homo sapiens
tttctcaggggcctc

SEQ ID NO: 805029 - DNA, 15 bp, Homo sapiens
ttctcaggggcctcc

SEQ ID NO: 805030 - DNA, 15 bp, Homo sapiens
tctcaggggcctccc

SEQ ID NO: 805031 - DNA, 15 bp, Homo sapiens
ctcaggggcctccct

SEQ ID NO: 805032 - DNA, 15 bp, Homo sapiens
tcaggggcctcccta

SEQ ID NO: 805033 - DNA, 15 bp, Homo sapiens
caggggcctccctag

SEQ ID NO: 805034 - DNA, 15 bp, Homo sapiens
aggggcctccctagt

SEQ ID NO: 805035 - DNA, 15 bp, Homo sapiens
ggggcctccctagta

SEQ ID NO: 805036 - DNA, 15 bp, Homo sapiens
gggcctccctagtag

SEQ ID NO: 805037 - DNA, 15 bp, Homo sapiens
ggcctccctagtaga

SEQ ID NO: 805038 - DNA, 15 bp, Homo sapiens
gcctccctagtagag

SEQ ID NO: 805039 - DNA, 15 bp, Homo sapiens
cctccctagtagagg

SEQ ID NO: 805040 - DNA, 15 bp, Homo sapiens
ctccctagtagagga

SEQ ID NO: 805041 - DNA, 15 bp, Homo sapiens
tccctagtagaggaa

SEQ ID NO: 805042 - DNA, 15 bp, Homo sapiens
ccctagtagaggaag

SEQ ID NO: 805043 - DNA, 15 bp, Homo sapiens
cctagtagaggaaga

SEQ ID NO: 805044 - DNA, 15 bp, Homo sapiens
ctagtagaggaagac

SEQ ID NO: 805045 - DNA, 15 bp, Homo sapiens
tagtagaggaagaca

SEQ ID NO: 805046 - DNA, 15 bp, Homo sapiens
agtagaggaagacac

SEQ ID NO: 805047 - DNA, 15 bp, Homo sapiens
gtagaggaagacacc

SEQ ID NO: 805048 - DNA, 15 bp, Homo sapiens
tagaggaagacacct

SEQ ID NO: 805049 - DNA, 15 bp, Homo sapiens
agaggaagacacctg

SEQ ID NO: 805050 - DNA, 15 bp, Homo sapiens
gaggaagacacctgc

SEQ ID NO: 805051 - DNA, 15 bp, Homo sapiens
aggaagacacctgca

SEQ ID NO: 805052 - DNA, 15 bp, Homo sapiens
ggaagacacctgcag

SEQ ID NO: 805053 - DNA, 15 bp, Homo sapiens
gaagacacctgcagg

SEQ ID NO: 805054 - DNA, 15 bp, Homo sapiens
aagacacctgcaggg

SEQ ID NO: 805055 - DNA, 15 bp, Homo sapiens
agacacctgcagggt

SEQ ID NO: 805056 - DNA, 15 bp, Homo sapiens
gacacctgcagggta

SEQ ID NO: 805057 - DNA, 15 bp, Homo sapiens
acacctgcagggtat

SEQ ID NO: 805058 - DNA, 15 bp, Homo sapiens
cacctgcagggtatc

SEQ ID NO: 805059 - DNA, 15 bp, Homo sapiens
acctgcagggtatct

SEQ ID NO: 805060 - DNA, 15 bp, Homo sapiens
cctgcagggtatctc

SEQ ID NO: 805061 - DNA, 15 bp, Homo sapiens
ctgcagggtatctca

SEQ ID NO: 805062 - DNA, 15 bp, Homo sapiens
tgcagggtatctcat

SEQ ID NO: 805063 - DNA, 15 bp, Homo sapiens
gcagggtatctcatt

SEQ ID NO: 805064 - DNA, 15 bp, Homo sapiens
cagggtatctcattc

SEQ ID NO: 805065 - DNA, 15 bp, Homo sapiens
agggtatctcattct

SEQ ID NO: 805066 - DNA, 15 bp, Homo sapiens
gggtatctcattctt

SEQ ID NO: 805067 - DNA, 15 bp, Homo sapiens
ggtatctcattcttt

SEQ ID NO: 805068 - DNA, 15 bp, Homo sapiens
gtatctcattctttc

SEQ ID NO: 805069 - DNA, 15 bp, Homo sapiens
tatctcattctttct

SEQ ID NO: 805070 - DNA, 15 bp, Homo sapiens
atctcattctttctt

SEQ ID NO: 805071 - DNA, 15 bp, Homo sapiens
tctcattctttcttg

SEQ ID NO: 805072 - DNA, 15 bp, Homo sapiens
ctcattctttcttgt

SEQ ID NO: 805073 - DNA, 15 bp, Homo sapiens
tcattctttcttgtt

SEQ ID NO: 805074 - DNA, 15 bp, Homo sapiens
cattctttcttgttc

SEQ ID NO: 805075 - DNA, 15 bp, Homo sapiens
attctttcttgttct

SEQ ID NO: 805076 - DNA, 15 bp, Homo sapiens
ttctttcttgttctc

SEQ ID NO: 805077 - DNA, 15 bp, Homo sapiens
tctttcttgttctca

SEQ ID NO: 805078 - DNA, 15 bp, Homo sapiens
ctttcttgttctcat

SEQ ID NO: 805079 - DNA, 15 bp, Homo sapiens
tttcttgttctcatt

SEQ ID NO: 805080 - DNA, 15 bp, Homo sapiens
ttcttgttctcattt

SEQ ID NO: 805081 - DNA, 15 bp, Homo sapiens
tcttgttctcatttt

SEQ ID NO: 805082 - DNA, 15 bp, Homo sapiens
cttgttctcattttc

SEQ ID NO: 805083 - DNA, 15 bp, Homo sapiens
ttgttctcattttcc

SEQ ID NO: 805084 - DNA, 15 bp, Homo sapiens
tgttctcattttccc

SEQ ID NO: 805085 - DNA, 15 bp, Homo sapiens
gttctcattttccct

SEQ ID NO: 805086 - DNA, 15 bp, Homo sapiens
ttctcattttccctt

SEQ ID NO: 805087 - DNA, 15 bp, Homo sapiens
tctcattttcccttc

SEQ ID NO: 805088 - DNA, 15 bp, Homo sapiens
ctcattttcccttct

SEQ ID NO: 805089 - DNA, 15 bp, Homo sapiens
tcattttcccttcta

SEQ ID NO: 805090 - DNA, 15 bp, Homo sapiens
cattttcccttctac

SEQ ID NO: 805091 - DNA, 15 bp, Homo sapiens
attttcccttctacc

SEQ ID NO: 805092 - DNA, 15 bp, Homo sapiens
ttttcccttctacca

SEQ ID NO: 805093 - DNA, 15 bp, Homo sapiens
tttcccttctaccat

SEQ ID NO: 805094 - DNA, 15 bp, Homo sapiens
ttcccttctaccatt

SEQ ID NO: 805095 - DNA, 15 bp, Homo sapiens
tcccttctaccattt

SEQ ID NO: 805096 - DNA, 15 bp, Homo sapiens
cccttctaccatttt

SEQ ID NO: 805097 - DNA, 15 bp, Homo sapiens
ccttctaccattttc

SEQ ID NO: 805098 - DNA, 15 bp, Homo sapiens
cttctaccattttcc

SEQ ID NO: 805099 - DNA, 15 bp, Homo sapiens
ttctaccattttccc

SEQ ID NO: 805100 - DNA, 15 bp, Homo sapiens
tctaccattttcccc

SEQ ID NO: 805101 - DNA, 15 bp, Homo sapiens
ctaccattttcccct

SEQ ID NO: 805102 - DNA, 15 bp, Homo sapiens
taccattttcccctt

SEQ ID NO: 805103 - DNA, 15 bp, Homo sapiens
accattttcccctta

SEQ ID NO: 805104 - DNA, 15 bp, Homo sapiens
ccattttccccttag

SEQ ID NO: 805105 - DNA, 15 bp, Homo sapiens
cattttccccttagt

SEQ ID NO: 805106 - DNA, 15 bp, Homo sapiens
attttccccttagta

SEQ ID NO: 805107 - DNA, 15 bp, Homo sapiens
ttttccccttagtat

SEQ ID NO: 805108 - DNA, 15 bp, Homo sapiens
tttccccttagtata

SEQ ID NO: 805109 - DNA, 15 bp, Homo sapiens
ttccccttagtatat

SEQ ID NO: 805110 - DNA, 15 bp, Homo sapiens
tccccttagtatatt

SEQ ID NO: 805111 - DNA, 15 bp, Homo sapiens
ccccttagtatattt

SEQ ID NO: 805112 - DNA, 15 bp, Homo sapiens
cccttagtatatttc

SEQ ID NO: 805113 - DNA, 15 bp, Homo sapiens
ccttagtatatttct

SEQ ID NO: 805114 - DNA, 15 bp, Homo sapiens
cttagtatatttctg

SEQ ID NO: 805115 - DNA, 15 bp, Homo sapiens
ttagtatatttctgg

SEQ ID NO: 805116 - DNA, 15 bp, Homo sapiens
tagtatatttctggc

SEQ ID NO: 805117 - DNA, 15 bp, Homo sapiens
agtatatttctggcc

SEQ ID NO: 805118 - DNA, 15 bp, Homo sapiens
gtatatttctggccc

SEQ ID NO: 805119 - DNA, 15 bp, Homo sapiens
tatatttctggccct

SEQ ID NO: 805120 - DNA, 15 bp, Homo sapiens
atatttctggcccta

SEQ ID NO: 805121 - DNA, 15 bp, Homo sapiens
tatttctggccctat

SEQ ID NO: 805122 - DNA, 15 bp, Homo sapiens
atttctggccctatg

SEQ ID NO: 805123 - DNA, 15 bp, Homo sapiens
tttctggccctatgt

SEQ ID NO: 805124 - DNA, 15 bp, Homo sapiens
ttctggccctatgtg

SEQ ID NO: 805125 - DNA, 15 bp, Homo sapiens
tctggccctatgtgc

SEQ ID NO: 805126 - DNA, 15 bp, Homo sapiens
ctggccctatgtgca

SEQ ID NO: 805127 - DNA, 15 bp, Homo sapiens
tggccctatgtgcag

SEQ ID NO: 805128 - DNA, 15 bp, Homo sapiens
ggccctatgtgcagg

SEQ ID NO: 805129 - DNA, 15 bp, Homo sapiens
gccctatgtgcagga

SEQ ID NO: 805130 - DNA, 15 bp, Homo sapiens
cctatgtgcaggaaa

SEQ ID NO: 805131 - DNA, 15 bp, Homo sapiens
ctatgtgcaggaaat

SEQ ID NO: 805132 - DNA, 15 bp, Homo sapiens
tatgtgcaggaaatc

SEQ ID NO: 805133 - DNA, 15 bp, Homo sapiens
atgtgcaggaaatca

SEQ ID NO: 805134 - DNA, 15 bp, Homo sapiens
tgtgcaggaaatcag

SEQ ID NO: 805135 - DNA, 15 bp, Homo sapiens
gtgcaggaaatcagg

SEQ ID NO: 805136 - DNA, 15 bp, Homo sapiens
tgcaggaaatcaggt

SEQ ID NO: 805137 - DNA, 15 bp, Homo sapiens
gcaggaaatcaggta

SEQ ID NO: 805138 - DNA, 15 bp, Homo sapiens
caggaaatcaggtag

SEQ ID NO: 805139 - DNA, 15 bp, Homo sapiens
aggaaatcaggtagc

SEQ ID NO: 805140 - DNA, 15 bp, Homo sapiens
ggaaatcaggtagct

SEQ ID NO: 805141 - DNA, 15 bp, Homo sapiens
gaaatcaggtagctg

SEQ ID NO: 805142 - DNA, 15 bp, Homo sapiens
aaatcaggtagctga

SEQ ID NO: 805143 - DNA, 15 bp, Homo sapiens
aatcaggtagctgag

SEQ ID NO: 805144 - DNA, 15 bp, Homo sapiens
atcaggtagctgagg

SEQ ID NO: 805145 - DNA, 15 bp, Homo sapiens
tcaggtagctgaggt

SEQ ID NO: 805146 - DNA, 15 bp, Homo sapiens
caggtagctgaggtg

SEQ ID NO: 805147 - DNA, 15 bp, Homo sapiens
aggtagctgaggtgt

SEQ ID NO: 805148 - DNA, 15 bp, Homo sapiens
ggtagctgaggtgtg

SEQ ID NO: 805149 - DNA, 15 bp, Homo sapiens
gtagctgaggtgtgg

SEQ ID NO: 805150 - DNA, 15 bp, Homo sapiens
tagctgaggtgtggt

SEQ ID NO: 805151 - DNA, 15 bp, Homo sapiens
agctgaggtgtggtt

SEQ ID NO: 805152 - DNA, 15 bp, Homo sapiens
gctgaggtgtggttt

SEQ ID NO: 805153 - DNA, 15 bp, Homo sapiens
ctgaggtgtggttta

SEQ ID NO: 805154 - DNA, 15 bp, Homo sapiens
tgaggtgtggtttaa

SEQ ID NO: 805155 - DNA, 15 bp, Homo sapiens
gaggtgtggtttaag

SEQ ID NO: 805156 - DNA, 15 bp, Homo sapiens
aggtgtggtttaagg

SEQ ID NO: 805157 - DNA, 15 bp, Homo sapiens
ggtgtggtttaaggg

SEQ ID NO: 805158 - DNA, 15 bp, Homo sapiens
gtgtggtttaaggga

SEQ ID NO: 805159 - DNA, 15 bp, Homo sapiens
tgtggtttaagggac

SEQ ID NO: 805160 - DNA, 15 bp, Homo sapiens
gtggtttaagggacc

SEQ ID NO: 805161 - DNA, 15 bp, Homo sapiens
tggtttaagggaccc

SEQ ID NO: 805162 - DNA, 15 bp, Homo sapiens
ggtttaagggaccca

SEQ ID NO: 805163 - DNA, 15 bp, Homo sapiens
gtttaagggacccat

SEQ ID NO: 805164 - DNA, 15 bp, Homo sapiens
tttaagggacccatt

SEQ ID NO: 805165 - DNA, 15 bp, Homo sapiens
ttaagggacccattg

SEQ ID NO: 805166 - DNA, 15 bp, Homo sapiens
taagggacccattgt

SEQ ID NO: 805167 - DNA, 15 bp, Homo sapiens
aagggacccattgtg

SEQ ID NO: 805168 - DNA, 15 bp, Homo sapiens
agggacccattgtgg

SEQ ID NO: 805169 - DNA, 15 bp, Homo sapiens
gggacccattgtggt

SEQ ID NO: 805170 - DNA, 15 bp, Homo sapiens
ggacccattgtggtt

SEQ ID NO: 805171 - DNA, 15 bp, Homo sapiens
gacccattgtggttc

SEQ ID NO: 805172 - DNA, 15 bp, Homo sapiens
acccattgtggttct

SEQ ID NO: 805173 - DNA, 15 bp, Homo sapiens
cccattgtggttctt

SEQ ID NO: 805174 - DNA, 15 bp, Homo sapiens
ccattgtggttctta

SEQ ID NO: 805175 - DNA, 15 bp, Homo sapiens
cattgtggttcttat

SEQ ID NO: 805176 - DNA, 15 bp, Homo sapiens
attgtggttcttatg

SEQ ID NO: 805177 - DNA, 15 bp, Homo sapiens
ttgtggttcttatgg

SEQ ID NO: 805178 - DNA, 15 bp, Homo sapiens
tgtggttcttatggc

SEQ ID NO: 805179 - DNA, 15 bp, Homo sapiens
gtggttcttatggcc

SEQ ID NO: 805180 - DNA, 15 bp, Homo sapiens
tggttcttatggccc

SEQ ID NO: 805181 - DNA, 15 bp, Homo sapiens
ggttcttatggccca

SEQ ID NO: 805182 - DNA, 15 bp, Homo sapiens
gttcttatggcccat

SEQ ID NO: 805183 - DNA, 15 bp, Homo sapiens
ttcttatggcccatc

SEQ ID NO: 805184 - DNA, 15 bp, Homo sapiens
tcttatggcccatca

SEQ ID NO: 805185 - DNA, 15 bp, Homo sapiens
cttatggcccatcaa

SEQ ID NO: 805186 - DNA, 15 bp, Homo sapiens
ttatggcccatcaac

SEQ ID NO: 805187 - DNA, 15 bp, Homo sapiens
tatggcccatcaaca

SEQ ID NO: 805188 - DNA, 15 bp, Homo sapiens
atggcccatcaacac

SEQ ID NO: 805189 - DNA, 15 bp, Homo sapiens
tggcccatcaacaca

SEQ ID NO: 805190 - DNA, 15 bp, Homo sapiens
ggcccatcaacacaa

SEQ ID NO: 805191 - DNA, 15 bp, Homo sapiens
gcccatcaacacaat

SEQ ID NO: 805192 - DNA, 15 bp, Homo sapiens
cccatcaacacaatt

SEQ ID NO: 805193 - DNA, 15 bp, Homo sapiens
ccatcaacacaattc

SEQ ID NO: 805194 - DNA, 15 bp, Homo sapiens
catcaacacaattcc

SEQ ID NO: 805195 - DNA, 15 bp, Homo sapiens
atcaacacaattcct

SEQ ID NO: 805196 - DNA, 15 bp, Homo sapiens
tcaacacaattcctt

SEQ ID NO: 805197 - DNA, 15 bp, Homo sapiens
caacacaattccttc

SEQ ID NO: 805198 - DNA, 15 bp, Homo sapiens
aacacaattccttcg

SEQ ID NO: 805199 - DNA, 15 bp, Homo sapiens
acacaattccttcgt

SEQ ID NO: 805200 - DNA, 15 bp, Homo sapiens
cacaattccttcgtg

SEQ ID NO: 805201 - DNA, 15 bp, Homo sapiens
acaattccttcgtgt

SEQ ID NO: 805202 - DNA, 15 bp, Homo sapiens
caattccttcgtgtt

SEQ ID NO: 805203 - DNA, 15 bp, Homo sapiens
aattccttcgtgttg

SEQ ID NO: 805204 - DNA, 15 bp, Homo sapiens
attccttcgtgttgg

SEQ ID NO: 805205 - DNA, 15 bp, Homo sapiens
ttccttcgtgttggc

SEQ ID NO: 805206 - DNA, 15 bp, Homo sapiens
tccttcgtgttggcc

SEQ ID NO: 805207 - DNA, 15 bp, Homo sapiens
ccttcgtgttggcct

SEQ ID NO: 805208 - DNA, 15 bp, Homo sapiens
cttcgtgttggcctg

SEQ ID NO: 805209 - DNA, 15 bp, Homo sapiens
ttcgtgttggcctgc

SEQ ID NO: 805210 - DNA, 15 bp, Homo sapiens
tcgtgttggcctgca

SEQ ID NO: 805211 - DNA, 15 bp, Homo sapiens
cgtgttggcctgcag

SEQ ID NO: 805212 - DNA, 15 bp, Homo sapiens
gtgttggcctgcagt

SEQ ID NO: 805213 - DNA, 15 bp, Homo sapiens
tgttggcctgcagta

SEQ ID NO: 805214 - DNA, 15 bp, Homo sapiens
gttggcctgcagtat

SEQ ID NO: 805215 - DNA, 15 bp, Homo sapiens
ttggcctgcagtatc

SEQ ID NO: 805216 - DNA, 15 bp, Homo sapiens
tggcctgcagtatcc

SEQ ID NO: 805217 - DNA, 15 bp, Homo sapiens
ggcctgcagtatcca

SEQ ID NO: 805218 - DNA, 15 bp, Homo sapiens
gcctgcagtatccat

SEQ ID NO: 805219 - DNA, 15 bp, Homo sapiens
cctgcagtatccatg

SEQ ID NO: 805220 - DNA, 15 bp, Homo sapiens
ctgcagtatccatgt

SEQ ID NO: 805221 - DNA, 15 bp, Homo sapiens
tgcagtatccatgtt

SEQ ID NO: 805222 - DNA, 15 bp, Homo sapiens
gcagtatccatgttt

SEQ ID NO: 805223 - DNA, 15 bp, Homo sapiens
cagtatccatgtttg

SEQ ID NO: 805224 - DNA, 15 bp, Homo sapiens
agtatccatgtttgt

SEQ ID NO: 805225 - DNA, 15 bp, Homo sapiens
gtatccatgtttgtt

SEQ ID NO: 805226 - DNA, 15 bp, Homo sapiens
tatccatgtttgtta

SEQ ID NO: 805227 - DNA, 15 bp, Homo sapiens
atccatgtttgttac

SEQ ID NO: 805228 - DNA, 15 bp, Homo sapiens
tccatgtttgttacc

SEQ ID NO: 805229 - DNA, 15 bp, Homo sapiens
ccatgtttgttaccc

SEQ ID NO: 805230 - DNA, 15 bp, Homo sapiens
catgtttgttaccct

SEQ ID NO: 805231 - DNA, 15 bp, Homo sapiens
atgtttgttaccctt

SEQ ID NO: 805232 - DNA, 15 bp, Homo sapiens
tgtttgttacccttt

SEQ ID NO: 805233 - DNA, 15 bp, Homo sapiens
gtttgttaccctttt

SEQ ID NO: 805234 - DNA, 15 bp, Homo sapiens
tttgttacccttttg

SEQ ID NO: 805235 - DNA, 15 bp, Homo sapiens
ttgttacccttttgg

SEQ ID NO: 805236 - DNA, 15 bp, Homo sapiens
tgttacccttttggg

SEQ ID NO: 805237 - DNA, 15 bp, Homo sapiens
gttacccttttgggt

SEQ ID NO: 805238 - DNA, 15 bp, Homo sapiens
ttacccttttgggtc

SEQ ID NO: 805239 - DNA, 15 bp, Homo sapiens
tacccttttgggtca

SEQ ID NO: 805240 - DNA, 15 bp, Homo sapiens
acccttttgggtcaa

SEQ ID NO: 805241 - DNA, 15 bp, Homo sapiens
cccttttgggtcaag

SEQ ID NO: 805242 - DNA, 15 bp, Homo sapiens
ccttttgggtcaagg

SEQ ID NO: 805243 - DNA, 15 bp, Homo sapiens
cttttgggtcaaggc

SEQ ID NO: 805244 - DNA, 15 bp, Homo sapiens
ttttgggtcaaggca

SEQ ID NO: 805245 - DNA, 15 bp, Homo sapiens
tttgggtcaaggcat

SEQ ID NO: 805246 - DNA, 15 bp, Homo sapiens
ttgggtcaaggcatg

SEQ ID NO: 805247 - DNA, 15 bp, Homo sapiens
tgggtcaaggcatga

SEQ ID NO: 805248 - DNA, 15 bp, Homo sapiens
gggtcaaggcatgaa

SEQ ID NO: 805249 - DNA, 15 bp, Homo sapiens
ggtcaaggcatgaaa

SEQ ID NO: 805250 - DNA, 15 bp, Homo sapiens
gtcaaggcatgaaaa

SEQ ID NO: 805251 - DNA, 15 bp, Homo sapiens
tcaaggcatgaaaac

SEQ ID NO: 805252 - DNA, 15 bp, Homo sapiens
caaggcatgaaaaca

SEQ ID NO: 805253 - DNA, 15 bp, Homo sapiens
aaggcatgaaaacat

SEQ ID NO: 805254 - DNA, 15 bp, Homo sapiens
aggcatgaaaacatc

SEQ ID NO: 805255 - DNA, 15 bp, Homo sapiens
ggcatgaaaacatct

SEQ ID NO: 805256 - DNA, 15 bp, Homo sapiens
gcatgaaaacatctg

SEQ ID NO: 805257 - DNA, 15 bp, Homo sapiens
catgaaaacatctgt

SEQ ID NO: 805258 - DNA, 15 bp, Homo sapiens
atgaaaacatctgtc

SEQ ID NO: 805259 - DNA, 15 bp, Homo sapiens
tgaaaacatctgtcc

SEQ ID NO: 805260 - DNA, 15 bp, Homo sapiens
gaaaacatctgtcca

SEQ ID NO: 805261 - DNA, 15 bp, Homo sapiens
aaaacatctgtccac

SEQ ID NO: 805262 - DNA, 15 bp, Homo sapiens
aaacatctgtccaca

SEQ ID NO: 805263 - DNA, 15 bp, Homo sapiens
aacatctgtccacaa

SEQ ID NO: 805264 - DNA, 15 bp, Homo sapiens
acatctgtccacaat

SEQ ID NO: 805265 - DNA, 15 bp, Homo sapiens
catctgtccacaatg

SEQ ID NO: 805266 - DNA, 15 bp, Homo sapiens
atctgtccacaatgc

SEQ ID NO: 805267 - DNA, 15 bp, Homo sapiens
tctgtccacaatgcc

SEQ ID NO: 805268 - DNA, 15 bp, Homo sapiens
ctgtccacaatgcca

SEQ ID NO: 805269 - DNA, 15 bp, Homo sapiens
tgtccacaatgccag

SEQ ID NO: 805270 - DNA, 15 bp, Homo sapiens
gtccacaatgccagt

SEQ ID NO: 805271 - DNA, 15 bp, Homo sapiens
tccacaatgccagtc

SEQ ID NO: 805272 - DNA, 15 bp, Homo sapiens
ccacaatgccagtct

SEQ ID NO: 805273 - DNA, 15 bp, Homo sapiens
cacaatgccagtctt

SEQ ID NO: 805274 - DNA, 15 bp, Homo sapiens
acaatgccagtctta

SEQ ID NO: 805275 - DNA, 15 bp, Homo sapiens
caatgccagtcttac

SEQ ID NO: 805276 - DNA, 15 bp, Homo sapiens
aatgccagtcttacc

SEQ ID NO: 805277 - DNA, 15 bp, Homo sapiens
atgccagtcttacct

SEQ ID NO: 805278 - DNA, 15 bp, Homo sapiens
tgccagtcttacctc

SEQ ID NO: 805279 - DNA, 15 bp, Homo sapiens
gccagtcttacctct

SEQ ID NO: 805280 - DNA, 15 bp, Homo sapiens
ccagtcttacctctg

SEQ ID NO: 805281 - DNA, 15 bp, Homo sapiens
cagtcttacctctga

SEQ ID NO: 805282 - DNA, 15 bp, Homo sapiens
agtcttacctctgat

SEQ ID NO: 805283 - DNA, 15 bp, Homo sapiens
gtcttacctctgata

SEQ ID NO: 805284 - DNA, 15 bp, Homo sapiens
tcttacctctgatat

SEQ ID NO: 805285 - DNA, 15 bp, Homo sapiens
cttacctctgatatc

SEQ ID NO: 805286 - DNA, 15 bp, Homo sapiens
ttacctctgatatca

SEQ ID NO: 805287 - DNA, 15 bp, Homo sapiens
tacctctgatatcaa

SEQ ID NO: 805288 - DNA, 15 bp, Homo sapiens
acctctgatatcaaa

SEQ ID NO: 805289 - DNA, 15 bp, Homo sapiens
cctctgatatcaaag

SEQ ID NO: 805290 - DNA, 15 bp, Homo sapiens
ctctgatatcaaaga

SEQ ID NO: 805291 - DNA, 15 bp, Homo sapiens
tctgatatcaaagat

SEQ ID NO: 805292 - DNA, 15 bp, Homo sapiens
ctgatatcaaagata

SEQ ID NO: 805293 - DNA, 15 bp, Homo sapiens
tgatatcaaagatag

SEQ ID NO: 805294 - DNA, 15 bp, Homo sapiens
gatatcaaagatagt

SEQ ID NO: 805295 - DNA, 15 bp, Homo sapiens
atatcaaagatagta

SEQ ID NO: 805296 - DNA, 15 bp, Homo sapiens
tatcaaagatagtat

SEQ ID NO: 805297 - DNA, 15 bp, Homo sapiens
atcaaagatagtatc

SEQ ID NO: 805298 - DNA, 15 bp, Homo sapiens
tcaaagatagtatct

SEQ ID NO: 805299 - DNA, 15 bp, Homo sapiens
caaagatagtatctg

SEQ ID NO: 805300 - DNA, 15 bp, Homo sapiens
aaagatagtatctga

SEQ ID NO: 805301 - DNA, 15 bp, Homo sapiens
aagatagtatctgag

SEQ ID NO: 805302 - DNA, 15 bp, Homo sapiens
agatagtatctgaga

SEQ ID NO: 805303 - DNA, 15 bp, Homo sapiens
gatagtatctgagac

SEQ ID NO: 805304 - DNA, 15 bp, Homo sapiens
atagtatctgagacg

SEQ ID NO: 805305 - DNA, 15 bp, Homo sapiens
tagtatctgagacgg

SEQ ID NO: 805306 - DNA, 15 bp, Homo sapiens
agtatctgagacggg

SEQ ID NO: 805307 - DNA, 15 bp, Homo sapiens
gtatctgagacgggt

SEQ ID NO: 805308 - DNA, 15 bp, Homo sapiens
tatctgagacgggtg

SEQ ID NO: 805309 - DNA, 15 bp, Homo sapiens
atctgagacgggtga

SEQ ID NO: 805310 - DNA, 15 bp, Homo sapiens
tctgagacgggtgat

SEQ ID NO: 805311 - DNA, 15 bp, Homo sapiens
ctgagacgggtgata

SEQ ID NO: 805312 - DNA, 15 bp, Homo sapiens
tgagacgggtgataa

SEQ ID NO: 805313 - DNA, 15 bp, Homo sapiens
gagacgggtgataaa

SEQ ID NO: 805314 - DNA, 15 bp, Homo sapiens
agacgggtgataaac

SEQ ID NO: 805315 - DNA, 15 bp, Homo sapiens
gacgggtgataaaca

SEQ ID NO: 805316 - DNA, 15 bp, Homo sapiens
acgggtgataaacaa

SEQ ID NO: 805317 - DNA, 15 bp, Homo sapiens
cgggtgataaacaaa

SEQ ID NO: 805318 - DNA, 15 bp, Homo sapiens
gggtgataaacaaat

SEQ ID NO: 805319 - DNA, 15 bp, Homo sapiens
ggtgataaacaaatt

SEQ ID NO: 805320 - DNA, 15 bp, Homo sapiens
gtgataaacaaattt

SEQ ID NO: 805321 - DNA, 15 bp, Homo sapiens
tgataaacaaattta

SEQ ID NO: 805322 - DNA, 15 bp, Homo sapiens
gataaacaaatttaa

SEQ ID NO: 805323 - DNA, 15 bp, Homo sapiens
ataaacaaatttaat

SEQ ID NO: 805324 - DNA, 15 bp, Homo sapiens
taaacaaatttaatg

SEQ ID NO: 805325 - DNA, 15 bp, Homo sapiens
aaacaaatttaatgt

SEQ ID NO: 805326 - DNA, 15 bp, Homo sapiens
aacaaatttaatgtg

SEQ ID NO: 805327 - DNA, 15 bp, Homo sapiens
acaaatttaatgtga

SEQ ID NO: 805328 - DNA, 15 bp, Homo sapiens
caaatttaatgtgaa

SEQ ID NO: 805329 - DNA, 15 bp, Homo sapiens
aaatttaatgtgaaa

SEQ ID NO: 805330 - DNA, 15 bp, Homo sapiens
aatttaatgtgaaaa

SEQ ID NO: 805331 - DNA, 15 bp, Homo sapiens
atttaatgtgaaaag

SEQ ID NO: 805332 - DNA, 15 bp, Homo sapiens
tttaatgtgaaaagc

SEQ ID NO: 805333 - DNA, 15 bp, Homo sapiens
ttaatgtgaaaagct

SEQ ID NO: 805334 - DNA, 15 bp, Homo sapiens
taatgtgaaaagctg

SEQ ID NO: 805335 - DNA, 15 bp, Homo sapiens
aatgtgaaaagctga

SEQ ID NO: 805336 - DNA, 15 bp, Homo sapiens
atgtgaaaagctgat

SEQ ID NO: 805337 - DNA, 15 bp, Homo sapiens
tgtgaaaagctgatg

SEQ ID NO: 805338 - DNA, 15 bp, Homo sapiens
gtgaaaagctgatga

SEQ ID NO: 805339 - DNA, 15 bp, Homo sapiens
tgaaaagctgatgat

SEQ ID NO: 805340 - DNA, 15 bp, Homo sapiens
gaaaagctgatgatg

SEQ ID NO: 805341 - DNA, 15 bp, Homo sapiens
aaaagctgatgatgt

SEQ ID NO: 805342 - DNA, 15 bp, Homo sapiens
aaagctgatgatgtt

SEQ ID NO: 805343 - DNA, 15 bp, Homo sapiens
aagctgatgatgttt

SEQ ID NO: 805344 - DNA, 15 bp, Homo sapiens
agctgatgatgtttt

SEQ ID NO: 805345 - DNA, 15 bp, Homo sapiens
gctgatgatgttttg

SEQ ID NO: 805346 - DNA, 15 bp, Homo sapiens
ctgatgatgttttga

SEQ ID NO: 805347 - DNA, 15 bp, Homo sapiens
tgatgatgttttgaa

SEQ ID NO: 805348 - DNA, 15 bp, Homo sapiens
gatgatgttttgaag

SEQ ID NO: 805349 - DNA, 15 bp, Homo sapiens
atgatgttttgaagt

SEQ ID NO: 805350 - DNA, 15 bp, Homo sapiens
tgatgttttgaagtc

SEQ ID NO: 805351 - DNA, 15 bp, Homo sapiens
gatgttttgaagtca

SEQ ID NO: 805352 - DNA, 15 bp, Homo sapiens
atgttttgaagtcag

SEQ ID NO: 805353 - DNA, 15 bp, Homo sapiens
tgttttgaagtcagt

SEQ ID NO: 805354 - DNA, 15 bp, Homo sapiens
gttttgaagtcagta

SEQ ID NO: 805355 - DNA, 15 bp, Homo sapiens
ttttgaagtcagtag

SEQ ID NO: 805356 - DNA, 15 bp, Homo sapiens
tttgaagtcagtaga

SEQ ID NO: 805357 - DNA, 15 bp, Homo sapiens
ttgaagtcagtagag

SEQ ID NO: 805358 - DNA, 15 bp, Homo sapiens
tgaagtcagtagagg

SEQ ID NO: 805359 - DNA, 15 bp, Homo sapiens
gaagtcagtagagga

SEQ ID NO: 805360 - DNA, 15 bp, Homo sapiens
aagtcagtagaggac

SEQ ID NO: 805361 - DNA, 15 bp, Homo sapiens
agtcagtagaggacg

SEQ ID NO: 805362 - DNA, 15 bp, Homo sapiens
gtcagtagaggacgg

SEQ ID NO: 805363 - DNA, 15 bp, Homo sapiens
tcagtagaggacgga

SEQ ID NO: 805364 - DNA, 15 bp, Homo sapiens
cagtagaggacggag

SEQ ID NO: 805365 - DNA, 15 bp, Homo sapiens
agtagaggacggagc

SEQ ID NO: 805366 - DNA, 15 bp, Homo sapiens
gtagaggacggagct

SEQ ID NO: 805367 - DNA, 15 bp, Homo sapiens
tagaggacggagctg

SEQ ID NO: 805368 - DNA, 15 bp, Homo sapiens
agaggacggagctga

SEQ ID NO: 805369 - DNA, 15 bp, Homo sapiens
gaggacggagctgac

SEQ ID NO: 805370 - DNA, 15 bp, Homo sapiens
aggacggagctgaca

SEQ ID NO: 805371 - DNA, 15 bp, Homo sapiens
ggacggagctgacaa

SEQ ID NO: 805372 - DNA, 15 bp, Homo sapiens
gacggagctgacaat

SEQ ID NO: 805373 - DNA, 15 bp, Homo sapiens
acggagctgacaatg

SEQ ID NO: 805374 - DNA, 15 bp, Homo sapiens
cggagctgacaatga

SEQ ID NO: 805375 - DNA, 15 bp, Homo sapiens
ggagctgacaatgag

SEQ ID NO: 805376 - DNA, 15 bp, Homo sapiens
gagctgacaatgagc

SEQ ID NO: 805377 - DNA, 15 bp, Homo sapiens
agctgacaatgagcg

SEQ ID NO: 805378 - DNA, 15 bp, Homo sapiens
gctgacaatgagcgt

SEQ ID NO: 805379 - DNA, 15 bp, Homo sapiens
ctgacaatgagcgtc

SEQ ID NO: 805380 - DNA, 15 bp, Homo sapiens
tgacaatgagcgtct

SEQ ID NO: 805381 - DNA, 15 bp, Homo sapiens
gacaatgagcgtctt

SEQ ID NO: 805382 - DNA, 15 bp, Homo sapiens
acaatgagcgtcttg

SEQ ID NO: 805383 - DNA, 15 bp, Homo sapiens
caatgagcgtcttgc

SEQ ID NO: 805384 - DNA, 15 bp, Homo sapiens
aatgagcgtcttgca

SEQ ID NO: 805385 - DNA, 15 bp, Homo sapiens
atgagcgtcttgcaa

SEQ ID NO: 805386 - DNA, 15 bp, Homo sapiens
tgagcgtcttgcaat

SEQ ID NO: 805387 - DNA, 15 bp, Homo sapiens
gagcgtcttgcaatg

SEQ ID NO: 805388 - DNA, 15 bp, Homo sapiens
agcgtcttgcaatga

SEQ ID NO: 805389 - DNA, 15 bp, Homo sapiens
gcgtcttgcaatgag

SEQ ID NO: 805390 - DNA, 15 bp, Homo sapiens
cgtcttgcaatgagt

SEQ ID NO: 805391 - DNA, 15 bp, Homo sapiens
gtcttgcaatgagtc

SEQ ID NO: 805392 - DNA, 15 bp, Homo sapiens
tcttgcaatgagtct

SEQ ID NO: 805393 - DNA, 15 bp, Homo sapiens
cttgcaatgagtctg

SEQ ID NO: 805394 - DNA, 15 bp, Homo sapiens
ttgcaatgagtctgt

SEQ ID NO: 805395 - DNA, 15 bp, Homo sapiens
tgcaatgagtctgtt

SEQ ID NO: 805396 - DNA, 15 bp, Homo sapiens
gcaatgagtctgttc

SEQ ID NO: 805397 - DNA, 15 bp, Homo sapiens
caatgagtctgttct

SEQ ID NO: 805398 - DNA, 15 bp, Homo sapiens
aatgagtctgttctc

SEQ ID NO: 805399 - DNA, 15 bp, Homo sapiens
atgagtctgttctca

SEQ ID NO: 805400 - DNA, 15 bp, Homo sapiens
tgagtctgttctcaa

SEQ ID NO: 805401 - DNA, 15 bp, Homo sapiens
gagtctgttctcaat

SEQ ID NO: 805402 - DNA, 15 bp, Homo sapiens
agtctgttctcaatt

SEQ ID NO: 805403 - DNA, 15 bp, Homo sapiens
gtctgttctcaattt

SEQ ID NO: 805404 - DNA, 15 bp, Homo sapiens
tctgttctcaatttc

SEQ ID NO: 805405 - DNA, 15 bp, Homo sapiens
ctgttctcaatttca

SEQ ID NO: 805406 - DNA, 15 bp, Homo sapiens
tgttctcaatttcat

SEQ ID NO: 805407 - DNA, 15 bp, Homo sapiens
gttctcaatttcatt

SEQ ID NO: 805408 - DNA, 15 bp, Homo sapiens
ttctcaatttcattg

SEQ ID NO: 805409 - DNA, 15 bp, Homo sapiens
tctcaatttcattgc

SEQ ID NO: 805410 - DNA, 15 bp, Homo sapiens
ctcaatttcattgct

SEQ ID NO: 805411 - DNA, 15 bp, Homo sapiens
tcaatttcattgctg

SEQ ID NO: 805412 - DNA, 15 bp, Homo sapiens
caatttcattgctga

SEQ ID NO: 805413 - DNA, 15 bp, Homo sapiens
aatttcattgctgat

SEQ ID NO: 805414 - DNA, 15 bp, Homo sapiens
atttcattgctgata

SEQ ID NO: 805415 - DNA, 15 bp, Homo sapiens
tttcattgctgataa

SEQ ID NO: 805416 - DNA, 15 bp, Homo sapiens
ttcattgctgataaa

SEQ ID NO: 805417 - DNA, 15 bp, Homo sapiens
tcattgctgataaag

SEQ ID NO: 805418 - DNA, 15 bp, Homo sapiens
cattgctgataaaga

SEQ ID NO: 805419 - DNA, 15 bp, Homo sapiens
attgctgataaagag

SEQ ID NO: 805420 - DNA, 15 bp, Homo sapiens
ttgctgataaagaga

SEQ ID NO: 805421 - DNA, 15 bp, Homo sapiens
tgctgataaagagaa

SEQ ID NO: 805422 - DNA, 15 bp, Homo sapiens
gctgataaagagaaa

SEQ ID NO: 805423 - DNA, 15 bp, Homo sapiens
ctgataaagagaaac

SEQ ID NO: 805424 - DNA, 15 bp, Homo sapiens
tgataaagagaaaca

SEQ ID NO: 805425 - DNA, 15 bp, Homo sapiens
gataaagagaaacag

SEQ ID NO: 805426 - DNA, 15 bp, Homo sapiens
ataaagagaaacagt

SEQ ID NO: 805427 - DNA, 15 bp, Homo sapiens
taaagagaaacagtg

SEQ ID NO: 805428 - DNA, 15 bp, Homo sapiens
aaagagaaacagtgt

SEQ ID NO: 805429 - DNA, 15 bp, Homo sapiens
aagagaaacagtgta

SEQ ID NO: 805430 - DNA, 15 bp, Homo sapiens
agagaaacagtgtag

SEQ ID NO: 805431 - DNA, 15 bp, Homo sapiens
gagaaacagtgtagt

SEQ ID NO: 805432 - DNA, 15 bp, Homo sapiens
agaaacagtgtagtg

SEQ ID NO: 805433 - DNA, 15 bp, Homo sapiens
gaaacagtgtagtgt

SEQ ID NO: 805434 - DNA, 15 bp, Homo sapiens
aaacagtgtagtgtg

SEQ ID NO: 805435 - DNA, 15 bp, Homo sapiens
aacagtgtagtgtgg

SEQ ID NO: 805436 - DNA, 15 bp, Homo sapiens
acagtgtagtgtggt

SEQ ID NO: 805437 - DNA, 15 bp, Homo sapiens
cagtgtagtgtggtg

SEQ ID NO: 805438 - DNA, 15 bp, Homo sapiens
agtgtagtgtggtgg

SEQ ID NO: 805439 - DNA, 15 bp, Homo sapiens
gtgtagtgtggtggc

SEQ ID NO: 805440 - DNA, 15 bp, Homo sapiens
tgtagtgtggtggcg

SEQ ID NO: 805441 - DNA, 15 bp, Homo sapiens
gtagtgtggtggcga

SEQ ID NO: 805442 - DNA, 15 bp, Homo sapiens
tagtgtggtggcgaa

SEQ ID NO: 805443 - DNA, 15 bp, Homo sapiens
agtgtggtggcgaag

SEQ ID NO: 805444 - DNA, 15 bp, Homo sapiens
gtgtggtggcgaaga

SEQ ID NO: 805445 - DNA, 15 bp, Homo sapiens
tgtggtggcgaagag

SEQ ID NO: 805446 - DNA, 15 bp, Homo sapiens
gtggtggcgaagagc

SEQ ID NO: 805447 - DNA, 15 bp, Homo sapiens
tggtggcgaagagca

SEQ ID NO: 805448 - DNA, 15 bp, Homo sapiens
ggtggcgaagagcac

SEQ ID NO: 805449 - DNA, 15 bp, Homo sapiens
gtggcgaagagcaca

SEQ ID NO: 805450 - DNA, 15 bp, Homo sapiens
tggcgaagagcacag

SEQ ID NO: 805451 - DNA, 15 bp, Homo sapiens
ggcgaagagcacaga

SEQ ID NO: 805452 - DNA, 15 bp, Homo sapiens
gcgaagagcacagac

SEQ ID NO: 805453 - DNA, 15 bp, Homo sapiens
cgaagagcacagacc

SEQ ID NO: 805454 - DNA, 15 bp, Homo sapiens
gaagagcacagaccc

SEQ ID NO: 805455 - DNA, 15 bp, Homo sapiens
aagagcacagaccct

SEQ ID NO: 805456 - DNA, 15 bp, Homo sapiens
agagcacagaccctg

SEQ ID NO: 805457 - DNA, 15 bp, Homo sapiens
gagcacagaccctga

SEQ ID NO: 805458 - DNA, 15 bp, Homo sapiens
agcacagaccctgaa

SEQ ID NO: 805459 - DNA, 15 bp, Homo sapiens
gcacagaccctgaag

SEQ ID NO: 805460 - DNA, 15 bp, Homo sapiens
cacagaccctgaagc

SEQ ID NO: 805461 - DNA, 15 bp, Homo sapiens
acagaccctgaagca

SEQ ID NO: 805462 - DNA, 15 bp, Homo sapiens
cagaccctgaagcaa

SEQ ID NO: 805463 - DNA, 15 bp, Homo sapiens
agaccctgaagcaag

SEQ ID NO: 805464 - DNA, 15 bp, Homo sapiens
gaccctgaagcaaga

SEQ ID NO: 805465 - DNA, 15 bp, Homo sapiens
accctgaagcaagaa

SEQ ID NO: 805466 - DNA, 15 bp, Homo sapiens
ccctgaagcaagaat

SEQ ID NO: 805467 - DNA, 15 bp, Homo sapiens
cctgaagcaagaatc

SEQ ID NO: 805468 - DNA, 15 bp, Homo sapiens
ctgaagcaagaatcc

SEQ ID NO: 805469 - DNA, 15 bp, Homo sapiens
tgaagcaagaatcca

SEQ ID NO: 805470 - DNA, 15 bp, Homo sapiens
gaagcaagaatccat

SEQ ID NO: 805471 - DNA, 15 bp, Homo sapiens
aagcaagaatccatg

SEQ ID NO: 805472 - DNA, 15 bp, Homo sapiens
agcaagaatccatgg

SEQ ID NO: 805473 - DNA, 15 bp, Homo sapiens
gcaagaatccatggg

SEQ ID NO: 805474 - DNA, 15 bp, Homo sapiens
caagaatccatgggc

SEQ ID NO: 805475 - DNA, 15 bp, Homo sapiens
aagaatccatgggct

SEQ ID NO: 805476 - DNA, 15 bp, Homo sapiens
agaatccatgggctc

SEQ ID NO: 805477 - DNA, 15 bp, Homo sapiens
gaatccatgggctca

SEQ ID NO: 805478 - DNA, 15 bp, Homo sapiens
aatccatgggctcaa

SEQ ID NO: 805479 - DNA, 15 bp, Homo sapiens
atccatgggctcaaa

SEQ ID NO: 805480 - DNA, 15 bp, Homo sapiens
tccatgggctcaaat

SEQ ID NO: 805481 - DNA, 15 bp, Homo sapiens
ccatgggctcaaatt

SEQ ID NO: 805482 - DNA, 15 bp, Homo sapiens
catgggctcaaattc

SEQ ID NO: 805483 - DNA, 15 bp, Homo sapiens
atgggctcaaattct

SEQ ID NO: 805484 - DNA, 15 bp, Homo sapiens
tgggctcaaattctg

SEQ ID NO: 805485 - DNA, 15 bp, Homo sapiens
gggctcaaattctga

SEQ ID NO: 805486 - DNA, 15 bp, Homo sapiens
ggctcaaattctgag

SEQ ID NO: 805487 - DNA, 15 bp, Homo sapiens
gctcaaattctgagt

SEQ ID NO: 805488 - DNA, 15 bp, Homo sapiens
ctcaaattctgagtc

SEQ ID NO: 805489 - DNA, 15 bp, Homo sapiens
tcaaattctgagtct

SEQ ID NO: 805490 - DNA, 15 bp, Homo sapiens
caaattctgagtctt

SEQ ID NO: 805491 - DNA, 15 bp, Homo sapiens
aaattctgagtcttt

SEQ ID NO: 805492 - DNA, 15 bp, Homo sapiens
aattctgagtcttta

SEQ ID NO: 805493 - DNA, 15 bp, Homo sapiens
attctgagtctttaa

SEQ ID NO: 805494 - DNA, 15 bp, Homo sapiens
ttctgagtctttaag

SEQ ID NO: 805495 - DNA, 15 bp, Homo sapiens
tctgagtctttaagt

SEQ ID NO: 805496 - DNA, 15 bp, Homo sapiens
ctgagtctttaagtc

SEQ ID NO: 805497 - DNA, 15 bp, Homo sapiens
tgagtctttaagtct

SEQ ID NO: 805498 - DNA, 15 bp, Homo sapiens
gagtctttaagtctg

SEQ ID NO: 805499 - DNA, 15 bp, Homo sapiens
agtctttaagtctgt

SEQ ID NO: 805500 - DNA, 15 bp, Homo sapiens
gtctttaagtctgtg

SEQ ID NO: 805501 - DNA, 15 bp, Homo sapiens
tctttaagtctgtgg

SEQ ID NO: 805502 - DNA, 15 bp, Homo sapiens
ctttaagtctgtggc

SEQ ID NO: 805503 - DNA, 15 bp, Homo sapiens
tttaagtctgtggcc

SEQ ID NO: 805504 - DNA, 15 bp, Homo sapiens
ttaagtctgtggccc

SEQ ID NO: 805505 - DNA, 15 bp, Homo sapiens
taagtctgtggccca

SEQ ID NO: 805506 - DNA, 15 bp, Homo sapiens
aagtctgtggcccaa

SEQ ID NO: 805507 - DNA, 15 bp, Homo sapiens
agtctgtggcccaag

SEQ ID NO: 805508 - DNA, 15 bp, Homo sapiens
gtctgtggcccaaga

SEQ ID NO: 805509 - DNA, 15 bp, Homo sapiens
tctgtggcccaagaa

SEQ ID NO: 805510 - DNA, 15 bp, Homo sapiens
ctgtggcccaagaat

SEQ ID NO: 805511 - DNA, 15 bp, Homo sapiens
tgtggcccaagaatt

SEQ ID NO: 805512 - DNA, 15 bp, Homo sapiens
gtggcccaagaattc

SEQ ID NO: 805513 - DNA, 15 bp, Homo sapiens
tggcccaagaattca

SEQ ID NO: 805514 - DNA, 15 bp, Homo sapiens
ggcccaagaattcac

SEQ ID NO: 805515 - DNA, 15 bp, Homo sapiens
gcccaagaattcaca

SEQ ID NO: 805516 - DNA, 15 bp, Homo sapiens
cccaagaattcacat

SEQ ID NO: 805517 - DNA, 15 bp, Homo sapiens
ccaagaattcacatt

SEQ ID NO: 805518 - DNA, 15 bp, Homo sapiens
caagaattcacattt

SEQ ID NO: 805519 - DNA, 15 bp, Homo sapiens
aagaattcacatttc

SEQ ID NO: 805520 - DNA, 15 bp, Homo sapiens
agaattcacatttct

SEQ ID NO: 805521 - DNA, 15 bp, Homo sapiens
gaattcacatttcta

SEQ ID NO: 805522 - DNA, 15 bp, Homo sapiens
aattcacatttctaa

SEQ ID NO: 805523 - DNA, 15 bp, Homo sapiens
attcacatttctaac

SEQ ID NO: 805524 - DNA, 15 bp, Homo sapiens
ttcacatttctaact

SEQ ID NO: 805525 - DNA, 15 bp, Homo sapiens
tcacatttctaactg

SEQ ID NO: 805526 - DNA, 15 bp, Homo sapiens
cacatttctaactga

SEQ ID NO: 805527 - DNA, 15 bp, Homo sapiens
acatttctaactgac

SEQ ID NO: 805528 - DNA, 15 bp, Homo sapiens
catttctaactgact

SEQ ID NO: 805529 - DNA, 15 bp, Homo sapiens
atttctaactgactt

SEQ ID NO: 805530 - DNA, 15 bp, Homo sapiens
tttctaactgacttc

SEQ ID NO: 805531 - DNA, 15 bp, Homo sapiens
ttctaactgacttcc

SEQ ID NO: 805532 - DNA, 15 bp, Homo sapiens
tctaactgacttcct

SEQ ID NO: 805533 - DNA, 15 bp, Homo sapiens
ctaactgacttcctg

SEQ ID NO: 805534 - DNA, 15 bp, Homo sapiens
taactgacttcctgg

SEQ ID NO: 805535 - DNA, 15 bp, Homo sapiens
aactgacttcctggg

SEQ ID NO: 805536 - DNA, 15 bp, Homo sapiens
actgacttcctgggt

SEQ ID NO: 805537 - DNA, 15 bp, Homo sapiens
ctgacttcctgggta

SEQ ID NO: 805538 - DNA, 15 bp, Homo sapiens
tgacttcctgggtat

SEQ ID NO: 805539 - DNA, 15 bp, Homo sapiens
gacttcctgggtatg

SEQ ID NO: 805540 - DNA, 15 bp, Homo sapiens
acttcctgggtatgc

SEQ ID NO: 805541 - DNA, 15 bp, Homo sapiens
cttcctgggtatgct

SEQ ID NO: 805542 - DNA, 15 bp, Homo sapiens
ttcctgggtatgctg

SEQ ID NO: 805543 - DNA, 15 bp, Homo sapiens
tcctgggtatgctga

SEQ ID NO: 805544 - DNA, 15 bp, Homo sapiens
cctgggtatgctgat

SEQ ID NO: 805545 - DNA, 15 bp, Homo sapiens
ctgggtatgctgatg

SEQ ID NO: 805546 - DNA, 15 bp, Homo sapiens
tgggtatgctgatgc

SEQ ID NO: 805547 - DNA, 15 bp, Homo sapiens
gggtatgctgatgct

SEQ ID NO: 805548 - DNA, 15 bp, Homo sapiens
ggtatgctgatgctg

SEQ ID NO: 805549 - DNA, 15 bp, Homo sapiens
gtatgctgatgctgc

SEQ ID NO: 805550 - DNA, 15 bp, Homo sapiens
tatgctgatgctgct

SEQ ID NO: 805551 - DNA, 15 bp, Homo sapiens
atgctgatgctgctg

SEQ ID NO: 805552 - DNA, 15 bp, Homo sapiens
tgctgatgctgctgg

SEQ ID NO: 805553 - DNA, 15 bp, Homo sapiens
gctgatgctgctggt

SEQ ID NO: 805554 - DNA, 15 bp, Homo sapiens
ctgatgctgctggtc

SEQ ID NO: 805555 - DNA, 15 bp, Homo sapiens
tgatgctgctggtct

SEQ ID NO: 805556 - DNA, 15 bp, Homo sapiens
gatgctgctggtctg

SEQ ID NO: 805557 - DNA, 15 bp, Homo sapiens
atgctgctggtctgc

SEQ ID NO: 805558 - DNA, 15 bp, Homo sapiens
tgctgctggtctgca

SEQ ID NO: 805559 - DNA, 15 bp, Homo sapiens
gctgctggtctgcag

SEQ ID NO: 805560 - DNA, 15 bp, Homo sapiens
ctgctggtctgcagg

SEQ ID NO: 805561 - DNA, 15 bp, Homo sapiens
tgctggtctgcaggt

SEQ ID NO: 805562 - DNA, 15 bp, Homo sapiens
gctggtctgcaggtc

SEQ ID NO: 805563 - DNA, 15 bp, Homo sapiens
ctggtctgcaggtca

SEQ ID NO: 805564 - DNA, 15 bp, Homo sapiens
tggtctgcaggtcac

SEQ ID NO: 805565 - DNA, 15 bp, Homo sapiens
ggtctgcaggtcaca

SEQ ID NO: 805566 - DNA, 15 bp, Homo sapiens
gtctgcaggtcacac

SEQ ID NO: 805567 - DNA, 15 bp, Homo sapiens
tctgcaggtcacact

SEQ ID NO: 805568 - DNA, 15 bp, Homo sapiens
ctgcaggtcacactc

SEQ ID NO: 805569 - DNA, 15 bp, Homo sapiens
tgcaggtcacactca

SEQ ID NO: 805570 - DNA, 15 bp, Homo sapiens
gcaggtcacactcag

SEQ ID NO: 805571 - DNA, 15 bp, Homo sapiens
caggtcacactcagg

SEQ ID NO: 805572 - DNA, 15 bp, Homo sapiens
aggtcacactcaggg

SEQ ID NO: 805573 - DNA, 15 bp, Homo sapiens
ggtcacactcagggt

SEQ ID NO: 805574 - DNA, 15 bp, Homo sapiens
gtcacactcagggtg

SEQ ID NO: 805575 - DNA, 15 bp, Homo sapiens
tcacactcagggtgg

SEQ ID NO: 805576 - DNA, 15 bp, Homo sapiens
cacactcagggtggc

SEQ ID NO: 805577 - DNA, 15 bp, Homo sapiens
acactcagggtggca

SEQ ID NO: 805578 - DNA, 15 bp, Homo sapiens
cactcagggtggcaa

SEQ ID NO: 805579 - DNA, 15 bp, Homo sapiens
actcagggtggcaag

SEQ ID NO: 805580 - DNA, 15 bp, Homo sapiens
ctcagggtggcaagg

SEQ ID NO: 805581 - DNA, 15 bp, Homo sapiens
tcagggtggcaaggt

SEQ ID NO: 805582 - DNA, 15 bp, Homo sapiens
cagggtggcaaggtc

SEQ ID NO: 805583 - DNA, 15 bp, Homo sapiens
agggtggcaaggtca

SEQ ID NO: 805584 - DNA, 15 bp, Homo sapiens
gggtggcaaggtcag

SEQ ID NO: 805585 - DNA, 15 bp, Homo sapiens
ggtggcaaggtcagg

SEQ ID NO: 805586 - DNA, 15 bp, Homo sapiens
gtggcaaggtcaggc

SEQ ID NO: 805587 - DNA, 15 bp, Homo sapiens
tggcaaggtcaggca

SEQ ID NO: 805588 - DNA, 15 bp, Homo sapiens
ggcaaggtcaggcaa

SEQ ID NO: 805589 - DNA, 15 bp, Homo sapiens
gcaaggtcaggcaag

SEQ ID NO: 805590 - DNA, 15 bp, Homo sapiens
caaggtcaggcaagg

SEQ ID NO: 805591 - DNA, 15 bp, Homo sapiens
aaggtcaggcaaggt

SEQ ID NO: 805592 - DNA, 15 bp, Homo sapiens
aggtcaggcaaggtc

SEQ ID NO: 805593 - DNA, 15 bp, Homo sapiens
ggtcaggcaaggtca

SEQ ID NO: 805594 - DNA, 15 bp, Homo sapiens
gtcaggcaaggtcag

SEQ ID NO: 805595 - DNA, 15 bp, Homo sapiens
tcaggcaaggtcaga

SEQ ID NO: 805596 - DNA, 15 bp, Homo sapiens
caggcaaggtcagag

SEQ ID NO: 805597 - DNA, 15 bp, Homo sapiens
aggcaaggtcagagc

SEQ ID NO: 805598 - DNA, 15 bp, Homo sapiens
ggcaaggtcagagca

SEQ ID NO: 805599 - DNA, 15 bp, Homo sapiens
gcaaggtcagagcac

SEQ ID NO: 805600 - DNA, 15 bp, Homo sapiens
caaggtcagagcaca

SEQ ID NO: 805601 - DNA, 15 bp, Homo sapiens
aaggtcagagcacag

SEQ ID NO: 805602 - DNA, 15 bp, Homo sapiens
aggtcagagcacagc

SEQ ID NO: 805603 - DNA, 15 bp, Homo sapiens
ggtcagagcacagca

SEQ ID NO: 805604 - DNA, 15 bp, Homo sapiens
gtcagagcacagcat

SEQ ID NO: 805605 - DNA, 15 bp, Homo sapiens
tcagagcacagcatg

SEQ ID NO: 805606 - DNA, 15 bp, Homo sapiens
cagagcacagcatgg

SEQ ID NO: 805607 - DNA, 15 bp, Homo sapiens
agagcacagcatggg

SEQ ID NO: 805608 - DNA, 15 bp, Homo sapiens
gagcacagcatggga

SEQ ID NO: 805609 - DNA, 15 bp, Homo sapiens
agcacagcatgggag

SEQ ID NO: 805610 - DNA, 15 bp, Homo sapiens
gcacagcatgggagg

SEQ ID NO: 805611 - DNA, 15 bp, Homo sapiens
cacagcatgggaggg

SEQ ID NO: 805612 - DNA, 15 bp, Homo sapiens
acagcatgggaggga

SEQ ID NO: 805613 - DNA, 15 bp, Homo sapiens
cagcatgggagggac

SEQ ID NO: 805614 - DNA, 15 bp, Homo sapiens
agcatgggagggact

SEQ ID NO: 805615 - DNA, 15 bp, Homo sapiens
gcatgggagggactg

SEQ ID NO: 805616 - DNA, 15 bp, Homo sapiens
catgggagggactgt

SEQ ID NO: 805617 - DNA, 15 bp, Homo sapiens
atgggagggactgtg

SEQ ID NO: 805618 - DNA, 15 bp, Homo sapiens
tgggagggactgtgc

SEQ ID NO: 805619 - DNA, 15 bp, Homo sapiens
gggagggactgtgct

SEQ ID NO: 805620 - DNA, 15 bp, Homo sapiens
ggagggactgtgctg

SEQ ID NO: 805621 - DNA, 15 bp, Homo sapiens
gagggactgtgctgc

SEQ ID NO: 805622 - DNA, 15 bp, Homo sapiens
agggactgtgctgcc

SEQ ID NO: 805623 - DNA, 15 bp, Homo sapiens
gggactgtgctgcct

SEQ ID NO: 805624 - DNA, 15 bp, Homo sapiens
ggactgtgctgcctg

SEQ ID NO: 805625 - DNA, 15 bp, Homo sapiens
gactgtgctgcctgt

SEQ ID NO: 805626 - DNA, 15 bp, Homo sapiens
actgtgctgcctgta

SEQ ID NO: 805627 - DNA, 15 bp, Homo sapiens
ctgtgctgcctgtag

SEQ ID NO: 805628 - DNA, 15 bp, Homo sapiens
tgtgctgcctgtagt

SEQ ID NO: 805629 - DNA, 15 bp, Homo sapiens
gtgctgcctgtagta

SEQ ID NO: 805630 - DNA, 15 bp, Homo sapiens
tgctgcctgtagtac

SEQ ID NO: 805631 - DNA, 15 bp, Homo sapiens
gctgcctgtagtaca

SEQ ID NO: 805632 - DNA, 15 bp, Homo sapiens
ctgcctgtagtacac

SEQ ID NO: 805633 - DNA, 15 bp, Homo sapiens
tgcctgtagtacaca

SEQ ID NO: 805634 - DNA, 15 bp, Homo sapiens
gcctgtagtacacag

SEQ ID NO: 805635 - DNA, 15 bp, Homo sapiens
cctgtagtacacagt

SEQ ID NO: 805636 - DNA, 15 bp, Homo sapiens
ctgtagtacacagtg

SEQ ID NO: 805637 - DNA, 15 bp, Homo sapiens
tgtagtacacagtgg

SEQ ID NO: 805638 - DNA, 15 bp, Homo sapiens
gtagtacacagtgga

SEQ ID NO: 805639 - DNA, 15 bp, Homo sapiens
tagtacacagtggaa

SEQ ID NO: 805640 - DNA, 15 bp, Homo sapiens
agtacacagtggaag

SEQ ID NO: 805641 - DNA, 15 bp, Homo sapiens
gtacacagtggaagg

SEQ ID NO: 805642 - DNA, 15 bp, Homo sapiens
tacacagtggaaggt

SEQ ID NO: 805643 - DNA, 15 bp, Homo sapiens
acacagtggaaggtg

SEQ ID NO: 805644 - DNA, 15 bp, Homo sapiens
cacagtggaaggtgg

SEQ ID NO: 805645 - DNA, 15 bp, Homo sapiens
acagtggaaggtgga

SEQ ID NO: 805646 - DNA, 15 bp, Homo sapiens
cagtggaaggtggag

SEQ ID NO: 805647 - DNA, 15 bp, Homo sapiens
agtggaaggtggagg

SEQ ID NO: 805648 - DNA, 15 bp, Homo sapiens
gtggaaggtggagga

SEQ ID NO: 805649 - DNA, 15 bp, Homo sapiens
tggaaggtggaggaa

SEQ ID NO: 805650 - DNA, 15 bp, Homo sapiens
ggaaggtggaggaag

SEQ ID NO: 805651 - DNA, 15 bp, Homo sapiens
gaaggtggaggaagc

SEQ ID NO: 805652 - DNA, 15 bp, Homo sapiens
aaggtggaggaagcc

SEQ ID NO: 805653 - DNA, 15 bp, Homo sapiens
aggtggaggaagccc

SEQ ID NO: 805654 - DNA, 15 bp, Homo sapiens
ggtggaggaagccca

SEQ ID NO: 805655 - DNA, 15 bp, Homo sapiens
gtggaggaagcccag

SEQ ID NO: 805656 - DNA, 15 bp, Homo sapiens
tggaggaagcccagg

SEQ ID NO: 805657 - DNA, 15 bp, Homo sapiens
ggaggaagcccaggg

SEQ ID NO: 805658 - DNA, 15 bp, Homo sapiens
gaggaagcccagggg

SEQ ID NO: 805659 - DNA, 15 bp, Homo sapiens
aggaagcccaggggt

SEQ ID NO: 805660 - DNA, 15 bp, Homo sapiens
ggaagcccaggggtg

SEQ ID NO: 805661 - DNA, 15 bp, Homo sapiens
gaagcccaggggtga

SEQ ID NO: 805662 - DNA, 15 bp, Homo sapiens
aagcccaggggtgac

SEQ ID NO: 805663 - DNA, 15 bp, Homo sapiens
agcccaggggtgaca

SEQ ID NO: 805664 - DNA, 15 bp, Homo sapiens
gcccaggggtgacat

SEQ ID NO: 805665 - DNA, 15 bp, Homo sapiens
cccaggggtgacatg

SEQ ID NO: 805666 - DNA, 15 bp, Homo sapiens
ccaggggtgacatgg

SEQ ID NO: 805667 - DNA, 15 bp, Homo sapiens
caggggtgacatggc

SEQ ID NO: 805668 - DNA, 15 bp, Homo sapiens
aggggtgacatggct

SEQ ID NO: 805669 - DNA, 15 bp, Homo sapiens
ggggtgacatggctt

SEQ ID NO: 805670 - DNA, 15 bp, Homo sapiens
gggtgacatggctta

SEQ ID NO: 805671 - DNA, 15 bp, Homo sapiens
ggtgacatggcttac

SEQ ID NO: 805672 - DNA, 15 bp, Homo sapiens
gtgacatggcttact

SEQ ID NO: 805673 - DNA, 15 bp, Homo sapiens
tgacatggcttactt

SEQ ID NO: 805674 - DNA, 15 bp, Homo sapiens
gacatggcttactta

SEQ ID NO: 805675 - DNA, 15 bp, Homo sapiens
acatggcttacttat

SEQ ID NO: 805676 - DNA, 15 bp, Homo sapiens
catggcttacttata

SEQ ID NO: 805677 - DNA, 15 bp, Homo sapiens
atggcttacttatat

SEQ ID NO: 805678 - DNA, 15 bp, Homo sapiens
tggcttacttatatc

SEQ ID NO: 805679 - DNA, 15 bp, Homo sapiens
ggcttacttatatca

SEQ ID NO: 805680 - DNA, 15 bp, Homo sapiens
gcttacttatatcat

SEQ ID NO: 805681 - DNA, 15 bp, Homo sapiens
cttacttatatcatc

SEQ ID NO: 805682 - DNA, 15 bp, Homo sapiens
ttacttatatcatct

SEQ ID NO: 805683 - DNA, 15 bp, Homo sapiens
tacttatatcatcta

SEQ ID NO: 805684 - DNA, 15 bp, Homo sapiens
acttatatcatctat

SEQ ID NO: 805685 - DNA, 15 bp, Homo sapiens
cttatatcatctatg

SEQ ID NO: 805686 - DNA, 15 bp, Homo sapiens
ttatatcatctatga

SEQ ID NO: 805687 - DNA, 15 bp, Homo sapiens
tatatcatctatgag

SEQ ID NO: 805688 - DNA, 15 bp, Homo sapiens
atatcatctatgagt

SEQ ID NO: 805689 - DNA, 15 bp, Homo sapiens
tatcatctatgagtt

SEQ ID NO: 805690 - DNA, 15 bp, Homo sapiens
atcatctatgagttt

SEQ ID NO: 805691 - DNA, 15 bp, Homo sapiens
tcatctatgagtttt

SEQ ID NO: 805692 - DNA, 15 bp, Homo sapiens
catctatgagttttt

SEQ ID NO: 805693 - DNA, 15 bp, Homo sapiens
atctatgagtttttt

SEQ ID NO: 805694 - DNA, 15 bp, Homo sapiens
tctatgagttttttg

SEQ ID NO: 805695 - DNA, 15 bp, Homo sapiens
ctatgagttttttgt

SEQ ID NO: 805696 - DNA, 15 bp, Homo sapiens
tatgagttttttgtt

SEQ ID NO: 805697 - DNA, 15 bp, Homo sapiens
atgagttttttgttt

SEQ ID NO: 805698 - DNA, 15 bp, Homo sapiens
tgagttttttgtttc

SEQ ID NO: 805699 - DNA, 15 bp, Homo sapiens
gagttttttgtttcc

SEQ ID NO: 805700 - DNA, 15 bp, Homo sapiens
agttttttgtttcct

SEQ ID NO: 805701 - DNA, 15 bp, Homo sapiens
gttttttgtttcctt

SEQ ID NO: 805702 - DNA, 15 bp, Homo sapiens
ttttttgtttccttt

SEQ ID NO: 805703 - DNA, 15 bp, Homo sapiens
tttttgtttccttta

SEQ ID NO: 805704 - DNA, 15 bp, Homo sapiens
ttttgtttcctttag

SEQ ID NO: 805705 - DNA, 15 bp, Homo sapiens
tttgtttcctttagg

SEQ ID NO: 805706 - DNA, 15 bp, Homo sapiens
ttgtttcctttagga

SEQ ID NO: 805707 - DNA, 15 bp, Homo sapiens
tgtttcctttaggaa

SEQ ID NO: 805708 - DNA, 15 bp, Homo sapiens
gtttcctttaggaaa

SEQ ID NO: 805709 - DNA, 15 bp, Homo sapiens
tttcctttaggaaat

SEQ ID NO: 805710 - DNA, 15 bp, Homo sapiens
ttcctttaggaaatt

SEQ ID NO: 805711 - DNA, 15 bp, Homo sapiens
tcctttaggaaattt

SEQ ID NO: 805712 - DNA, 15 bp, Homo sapiens
cctttaggaaattta

SEQ ID NO: 805713 - DNA, 15 bp, Homo sapiens
ctttaggaaatttac

SEQ ID NO: 805714 - DNA, 15 bp, Homo sapiens
tttaggaaatttact

SEQ ID NO: 805715 - DNA, 15 bp, Homo sapiens
ttaggaaatttactg

SEQ ID NO: 805716 - DNA, 15 bp, Homo sapiens
taggaaatttactga

SEQ ID NO: 805717 - DNA, 15 bp, Homo sapiens
aggaaatttactgaa

SEQ ID NO: 805718 - DNA, 15 bp, Homo sapiens
ggaaatttactgaaa

SEQ ID NO: 805719 - DNA, 15 bp, Homo sapiens
gaaatttactgaaac

SEQ ID NO: 805720 - DNA, 15 bp, Homo sapiens
aaatttactgaaaca

SEQ ID NO: 805721 - DNA, 15 bp, Homo sapiens
aatttactgaaacat

SEQ ID NO: 805722 - DNA, 15 bp, Homo sapiens
atttactgaaacatt

SEQ ID NO: 805723 - DNA, 15 bp, Homo sapiens
tttactgaaacattc

SEQ ID NO: 805724 - DNA, 15 bp, Homo sapiens
ttactgaaacattct

SEQ ID NO: 805725 - DNA, 15 bp, Homo sapiens
tactgaaacattctt

SEQ ID NO: 805726 - DNA, 15 bp, Homo sapiens
actgaaacattcttc

SEQ ID NO: 805727 - DNA, 15 bp, Homo sapiens
ctgaaacattcttca

SEQ ID NO: 805728 - DNA, 15 bp, Homo sapiens
tgaaacattcttcat

SEQ ID NO: 805729 - DNA, 15 bp, Homo sapiens
gaaacattcttcatt

SEQ ID NO: 805730 - DNA, 15 bp, Homo sapiens
aaacattcttcattg

SEQ ID NO: 805731 - DNA, 15 bp, Homo sapiens
aacattcttcattgc

SEQ ID NO: 805732 - DNA, 15 bp, Homo sapiens
acattcttcattgca

SEQ ID NO: 805733 - DNA, 15 bp, Homo sapiens
cattcttcattgcaa

SEQ ID NO: 805734 - DNA, 15 bp, Homo sapiens
attcttcattgcaaa

SEQ ID NO: 805735 - DNA, 15 bp, Homo sapiens
ttcttcattgcaaag

SEQ ID NO: 805736 - DNA, 15 bp, Homo sapiens
tcttcattgcaaagt

SEQ ID NO: 805737 - DNA, 15 bp, Homo sapiens
cttcattgcaaagta

SEQ ID NO: 805738 - DNA, 15 bp, Homo sapiens
ttcattgcaaagtat

SEQ ID NO: 805739 - DNA, 15 bp, Homo sapiens
tcattgcaaagtata

SEQ ID NO: 805740 - DNA, 15 bp, Homo sapiens
cattgcaaagtataa

SEQ ID NO: 805741 - DNA, 15 bp, Homo sapiens
attgcaaagtataaa

SEQ ID NO: 805742 - DNA, 15 bp, Homo sapiens
ttgcaaagtataaaa

SEQ ID NO: 805743 - DNA, 15 bp, Homo sapiens
tgcaaagtataaaaa

SEQ ID NO: 805744 - DNA, 15 bp, Homo sapiens
gcaaagtataaaaac

SEQ ID NO: 805745 - DNA, 15 bp, Homo sapiens
caaagtataaaaaca

SEQ ID NO: 805746 - DNA, 15 bp, Homo sapiens
aaagtataaaaacaa

SEQ ID NO: 805747 - DNA, 15 bp, Homo sapiens
aagtataaaaacaaa

SEQ ID NO: 805748 - DNA, 15 bp, Homo sapiens
agtataaaaacaaat

SEQ ID NO: 805749 - DNA, 15 bp, Homo sapiens
gtataaaaacaaata

SEQ ID NO: 805750 - DNA, 15 bp, Homo sapiens
tataaaaacaaatat

SEQ ID NO: 805751 - DNA, 15 bp, Homo sapiens
ataaaaacaaatata

SEQ ID NO: 805752 - DNA, 15 bp, Homo sapiens
taaaaacaaatataa

SEQ ID NO: 805753 - DNA, 15 bp, Homo sapiens
aaaaacaaatataaa

SEQ ID NO: 805754 - DNA, 15 bp, Homo sapiens
aaaacaaatataaaa

SEQ ID NO: 805755 - DNA, 15 bp, Homo sapiens
aaacaaatataaaat

SEQ ID NO: 805756 - DNA, 15 bp, Homo sapiens
aacaaatataaaata

SEQ ID NO: 805757 - DNA, 15 bp, Homo sapiens
acaaatataaaatat

SEQ ID NO: 805758 - DNA, 15 bp, Homo sapiens
caaatataaaatatt

SEQ ID NO: 805759 - DNA, 15 bp, Homo sapiens
aaatataaaatattc

SEQ ID NO: 805760 - DNA, 15 bp, Homo sapiens
aatataaaatattca

SEQ ID NO: 805761 - DNA, 15 bp, Homo sapiens
atataaaatattcaa

SEQ ID NO: 805762 - DNA, 15 bp, Homo sapiens
tataaaatattcaat

SEQ ID NO: 805763 - DNA, 15 bp, Homo sapiens
ataaaatattcaatg

SEQ ID NO: 805764 - DNA, 15 bp, Homo sapiens
taaaatattcaatgg

SEQ ID NO: 805765 - DNA, 15 bp, Homo sapiens
aaaatattcaatggg

SEQ ID NO: 805766 - DNA, 15 bp, Homo sapiens
aaatattcaatgggt

SEQ ID NO: 805767 - DNA, 15 bp, Homo sapiens
aatattcaatgggta

SEQ ID NO: 805768 - DNA, 15 bp, Homo sapiens
atattcaatgggtat

SEQ ID NO: 805769 - DNA, 15 bp, Homo sapiens
tattcaatgggtatt

SEQ ID NO: 805770 - DNA, 15 bp, Homo sapiens
attcaatgggtatta

SEQ ID NO: 805771 - DNA, 15 bp, Homo sapiens
ttcaatgggtattag

SEQ ID NO: 805772 - DNA, 15 bp, Homo sapiens
tcaatgggtattaga

SEQ ID NO: 805773 - DNA, 15 bp, Homo sapiens
caatgggtattagaa

SEQ ID NO: 805774 - DNA, 15 bp, Homo sapiens
aatgggtattagaaa

SEQ ID NO: 805775 - DNA, 15 bp, Homo sapiens
atgggtattagaaaa

SEQ ID NO: 805776 - DNA, 15 bp, Homo sapiens
tgggtattagaaaat

SEQ ID NO: 805777 - DNA, 15 bp, Homo sapiens
gggtattagaaaatc

SEQ ID NO: 805778 - DNA, 15 bp, Homo sapiens
ggtattagaaaatca

SEQ ID NO: 805779 - DNA, 15 bp, Homo sapiens
gtattagaaaatcag

SEQ ID NO: 805780 - DNA, 15 bp, Homo sapiens
tattagaaaatcagg

SEQ ID NO: 805781 - DNA, 15 bp, Homo sapiens
attagaaaatcaggt

SEQ ID NO: 805782 - DNA, 15 bp, Homo sapiens
ttagaaaatcaggta

SEQ ID NO: 805783 - DNA, 15 bp, Homo sapiens
tagaaaatcaggtat

SEQ ID NO: 805784 - DNA, 15 bp, Homo sapiens
agaaaatcaggtata

SEQ ID NO: 805785 - DNA, 15 bp, Homo sapiens
gaaaatcaggtatac

SEQ ID NO: 805786 - DNA, 15 bp, Homo sapiens
aaaatcaggtatact

SEQ ID NO: 805787 - DNA, 15 bp, Homo sapiens
aaatcaggtatactc

SEQ ID NO: 805788 - DNA, 15 bp, Homo sapiens
aatcaggtatactct

SEQ ID NO: 805789 - DNA, 15 bp, Homo sapiens
atcaggtatactctg

SEQ ID NO: 805790 - DNA, 15 bp, Homo sapiens
tcaggtatactctgt

SEQ ID NO: 805791 - DNA, 15 bp, Homo sapiens
caggtatactctgtt

SEQ ID NO: 805792 - DNA, 15 bp, Homo sapiens
aggtatactctgttt

SEQ ID NO: 805793 - DNA, 15 bp, Homo sapiens
ggtatactctgttta

SEQ ID NO: 805794 - DNA, 15 bp, Homo sapiens
gtatactctgtttac

SEQ ID NO: 805795 - DNA, 15 bp, Homo sapiens
tatactctgtttacc

SEQ ID NO: 805796 - DNA, 15 bp, Homo sapiens
atactctgtttacct

SEQ ID NO: 805797 - DNA, 15 bp, Homo sapiens
tactctgtttaccta

SEQ ID NO: 805798 - DNA, 15 bp, Homo sapiens
actctgtttacctat

SEQ ID NO: 805799 - DNA, 15 bp, Homo sapiens
ctctgtttacctatg

SEQ ID NO: 805800 - DNA, 15 bp, Homo sapiens
tctgtttacctatgg

SEQ ID NO: 805801 - DNA, 15 bp, Homo sapiens
ctgtttacctatggg

SEQ ID NO: 805802 - DNA, 15 bp, Homo sapiens
tgtttacctatgggt

SEQ ID NO: 805803 - DNA, 15 bp, Homo sapiens
gtttacctatgggtt

SEQ ID NO: 805804 - DNA, 15 bp, Homo sapiens
tttacctatgggttt

SEQ ID NO: 805805 - DNA, 15 bp, Homo sapiens
ttacctatgggtttt

SEQ ID NO: 805806 - DNA, 15 bp, Homo sapiens
tacctatgggttttt

SEQ ID NO: 805807 - DNA, 15 bp, Homo sapiens
acctatgggtttttc

SEQ ID NO: 805808 - DNA, 15 bp, Homo sapiens
cctatgggtttttct

SEQ ID NO: 805809 - DNA, 15 bp, Homo sapiens
ctatgggtttttcta

SEQ ID NO: 805810 - DNA, 15 bp, Homo sapiens
tatgggtttttctag

SEQ ID NO: 805811 - DNA, 15 bp, Homo sapiens
atgggtttttctaga

SEQ ID NO: 805812 - DNA, 15 bp, Homo sapiens
tgggtttttctagaa

SEQ ID NO: 805813 - DNA, 15 bp, Homo sapiens
gggtttttctagaat

SEQ ID NO: 805814 - DNA, 15 bp, Homo sapiens
ggtttttctagaatg

SEQ ID NO: 805815 - DNA, 15 bp, Homo sapiens
gtttttctagaatgg

SEQ ID NO: 805816 - DNA, 15 bp, Homo sapiens
tttttctagaatggg

SEQ ID NO: 805817 - DNA, 15 bp, Homo sapiens
ttttctagaatgggg

SEQ ID NO: 805818 - DNA, 15 bp, Homo sapiens
tttctagaatggggt

SEQ ID NO: 805819 - DNA, 15 bp, Homo sapiens
ttctagaatggggtt

SEQ ID NO: 805820 - DNA, 15 bp, Homo sapiens
tctagaatggggtta

SEQ ID NO: 805821 - DNA, 15 bp, Homo sapiens
ctagaatggggttaa

SEQ ID NO: 805822 - DNA, 15 bp, Homo sapiens
tagaatggggttaag

SEQ ID NO: 805823 - DNA, 15 bp, Homo sapiens
agaatggggttaagg

SEQ ID NO: 805824 - DNA, 15 bp, Homo sapiens
gaatggggttaaggg

SEQ ID NO: 805825 - DNA, 15 bp, Homo sapiens
aatggggttaagggt

SEQ ID NO: 805826 - DNA, 15 bp, Homo sapiens
atggggttaagggtg

SEQ ID NO: 805827 - DNA, 15 bp, Homo sapiens
tggggttaagggtgg

SEQ ID NO: 805828 - DNA, 15 bp, Homo sapiens
ggggttaagggtggg

SEQ ID NO: 805829 - DNA, 15 bp, Homo sapiens
gggttaagggtggga

SEQ ID NO: 805830 - DNA, 15 bp, Homo sapiens
ggttaagggtgggaa

SEQ ID NO: 805831 - DNA, 15 bp, Homo sapiens
gttaagggtgggaaa

SEQ ID NO: 805832 - DNA, 15 bp, Homo sapiens
ttaagggtgggaaag

SEQ ID NO: 805833 - DNA, 15 bp, Homo sapiens
taagggtgggaaagt

SEQ ID NO: 805834 - DNA, 15 bp, Homo sapiens
aagggtgggaaagtg

SEQ ID NO: 805835 - DNA, 15 bp, Homo sapiens
agggtgggaaagtga

SEQ ID NO: 805836 - DNA, 15 bp, Homo sapiens
gggtgggaaagtgat

SEQ ID NO: 805837 - DNA, 15 bp, Homo sapiens
ggtgggaaagtgatg

SEQ ID NO: 805838 - DNA, 15 bp, Homo sapiens
gtgggaaagtgatgg

SEQ ID NO: 805839 - DNA, 15 bp, Homo sapiens
tgggaaagtgatggg

SEQ ID NO: 805840 - DNA, 15 bp, Homo sapiens
gggaaagtgatggga

SEQ ID NO: 805841 - DNA, 15 bp, Homo sapiens
ggaaagtgatgggag

SEQ ID NO: 805842 - DNA, 15 bp, Homo sapiens
gaaagtgatgggaga

SEQ ID NO: 805843 - DNA, 15 bp, Homo sapiens
aaagtgatgggagac

SEQ ID NO: 805844 - DNA, 15 bp, Homo sapiens
aagtgatgggagact

SEQ ID NO: 805845 - DNA, 15 bp, Homo sapiens
agtgatgggagactt

SEQ ID NO: 805846 - DNA, 15 bp, Homo sapiens
gtgatgggagactta

SEQ ID NO: 805847 - DNA, 15 bp, Homo sapiens
tgatgggagacttaa

SEQ ID NO: 805848 - DNA, 15 bp, Homo sapiens
gatgggagacttaag

SEQ ID NO: 805849 - DNA, 15 bp, Homo sapiens
atgggagacttaagt

SEQ ID NO: 805850 - DNA, 15 bp, Homo sapiens
tgggagacttaagta

SEQ ID NO: 805851 - DNA, 15 bp, Homo sapiens
gggagacttaagtag

SEQ ID NO: 805852 - DNA, 15 bp, Homo sapiens
ggagacttaagtagt

SEQ ID NO: 805853 - DNA, 15 bp, Homo sapiens
gagacttaagtagta

SEQ ID NO: 805854 - DNA, 15 bp, Homo sapiens
agacttaagtagtag

SEQ ID NO: 805855 - DNA, 15 bp, Homo sapiens
gacttaagtagtaga

SEQ ID NO: 805856 - DNA, 15 bp, Homo sapiens
acttaagtagtagaa

SEQ ID NO: 805857 - DNA, 15 bp, Homo sapiens
cttaagtagtagaag

SEQ ID NO: 805858 - DNA, 15 bp, Homo sapiens
ttaagtagtagaagt

SEQ ID NO: 805859 - DNA, 15 bp, Homo sapiens
taagtagtagaagtc

SEQ ID NO: 805860 - DNA, 15 bp, Homo sapiens
aagtagtagaagtct

SEQ ID NO: 805861 - DNA, 15 bp, Homo sapiens
agtagtagaagtcta

SEQ ID NO: 805862 - DNA, 15 bp, Homo sapiens
gtagtagaagtctat

SEQ ID NO: 805863 - DNA, 15 bp, Homo sapiens
tagtagaagtctatc

SEQ ID NO: 805864 - DNA, 15 bp, Homo sapiens
agtagaagtctatca

SEQ ID NO: 805865 - DNA, 15 bp, Homo sapiens
gtagaagtctatcag

SEQ ID NO: 805866 - DNA, 15 bp, Homo sapiens
tagaagtctatcaga

SEQ ID NO: 805867 - DNA, 15 bp, Homo sapiens
agaagtctatcagag

SEQ ID NO: 805868 - DNA, 15 bp, Homo sapiens
gaagtctatcagagg

SEQ ID NO: 805869 - DNA, 15 bp, Homo sapiens
aagtctatcagaggc

SEQ ID NO: 805870 - DNA, 15 bp, Homo sapiens
agtctatcagaggcc

SEQ ID NO: 805871 - DNA, 15 bp, Homo sapiens
gtctatcagaggccc

SEQ ID NO: 805872 - DNA, 15 bp, Homo sapiens
tctatcagaggcccc

SEQ ID NO: 805873 - DNA, 15 bp, Homo sapiens
ctatcagaggcccct

SEQ ID NO: 805874 - DNA, 15 bp, Homo sapiens
tatcagaggcccctt

SEQ ID NO: 805875 - DNA, 15 bp, Homo sapiens
atcagaggccccttc

SEQ ID NO: 805876 - DNA, 15 bp, Homo sapiens
tcagaggccccttca

SEQ ID NO: 805877 - DNA, 15 bp, Homo sapiens
cagaggccccttcag

SEQ ID NO: 805878 - DNA, 15 bp, Homo sapiens
agaggccccttcaga

SEQ ID NO: 805879 - DNA, 15 bp, Homo sapiens
gaggccccttcagat

SEQ ID NO: 805880 - DNA, 15 bp, Homo sapiens
aggccccttcagatt

SEQ ID NO: 805881 - DNA, 15 bp, Homo sapiens
ggccccttcagatta

SEQ ID NO: 805882 - DNA, 15 bp, Homo sapiens
gccccttcagattag

SEQ ID NO: 805883 - DNA, 15 bp, Homo sapiens
ccccttcagattagg

SEQ ID NO: 805884 - DNA, 15 bp, Homo sapiens
cccttcagattagga

SEQ ID NO: 805885 - DNA, 15 bp, Homo sapiens
ccttcagattaggaa

SEQ ID NO: 805886 - DNA, 15 bp, Homo sapiens
cttcagattaggaaa

SEQ ID NO: 805887 - DNA, 15 bp, Homo sapiens
ttcagattaggaaat

SEQ ID NO: 805888 - DNA, 15 bp, Homo sapiens
tcagattaggaaatg

SEQ ID NO: 805889 - DNA, 15 bp, Homo sapiens
cagattaggaaatgc

SEQ ID NO: 805890 - DNA, 15 bp, Homo sapiens
agattaggaaatgcc

SEQ ID NO: 805891 - DNA, 15 bp, Homo sapiens
gattaggaaatgccc

SEQ ID NO: 805892 - DNA, 15 bp, Homo sapiens
attaggaaatgccct

SEQ ID NO: 805893 - DNA, 15 bp, Homo sapiens
ttaggaaatgccctc

SEQ ID NO: 805894 - DNA, 15 bp, Homo sapiens
taggaaatgccctca

SEQ ID NO: 805895 - DNA, 15 bp, Homo sapiens
aggaaatgccctcaa

SEQ ID NO: 805896 - DNA, 15 bp, Homo sapiens
ggaaatgccctcaat

SEQ ID NO: 805897 - DNA, 15 bp, Homo sapiens
gaaatgccctcaatg

SEQ ID NO: 805898 - DNA, 15 bp, Homo sapiens
aaatgccctcaatgg

SEQ ID NO: 805899 - DNA, 15 bp, Homo sapiens
aatgccctcaatggg

SEQ ID NO: 805900 - DNA, 15 bp, Homo sapiens
atgccctcaatgggc

SEQ ID NO: 805901 - DNA, 15 bp, Homo sapiens
tgccctcaatgggct

SEQ ID NO: 805902 - DNA, 15 bp, Homo sapiens
gccctcaatgggctt

SEQ ID NO: 805903 - DNA, 15 bp, Homo sapiens
ccctcaatgggcttc

SEQ ID NO: 805904 - DNA, 15 bp, Homo sapiens
cctcaatgggcttca

SEQ ID NO: 805905 - DNA, 15 bp, Homo sapiens
ctcaatgggcttcag

SEQ ID NO: 805906 - DNA, 15 bp, Homo sapiens
tcaatgggcttcagt

SEQ ID NO: 805907 - DNA, 15 bp, Homo sapiens
caatgggcttcagta

SEQ ID NO: 805908 - DNA, 15 bp, Homo sapiens
aatgggcttcagtat

SEQ ID NO: 805909 - DNA, 15 bp, Homo sapiens
atgggcttcagtatc

SEQ ID NO: 805910 - DNA, 15 bp, Homo sapiens
tgggcttcagtatcc

SEQ ID NO: 805911 - DNA, 15 bp, Homo sapiens
gggcttcagtatcct

SEQ ID NO: 805912 - DNA, 15 bp, Homo sapiens
ggcttcagtatcctt

SEQ ID NO: 805913 - DNA, 15 bp, Homo sapiens
gcttcagtatccttt

SEQ ID NO: 805914 - DNA, 15 bp, Homo sapiens
cttcagtatccttta

SEQ ID NO: 805915 - DNA, 15 bp, Homo sapiens
ttcagtatcctttat

SEQ ID NO: 805916 - DNA, 15 bp, Homo sapiens
tcagtatcctttatg

SEQ ID NO: 805917 - DNA, 15 bp, Homo sapiens
cagtatcctttatga

SEQ ID NO: 805918 - DNA, 15 bp, Homo sapiens
agtatcctttatgag

SEQ ID NO: 805919 - DNA, 15 bp, Homo sapiens
gtatcctttatgaga

SEQ ID NO: 805920 - DNA, 15 bp, Homo sapiens
tatcctttatgagat

SEQ ID NO: 805921 - DNA, 15 bp, Homo sapiens
atcctttatgagata

SEQ ID NO: 805922 - DNA, 15 bp, Homo sapiens
tcctttatgagataa

SEQ ID NO: 805923 - DNA, 15 bp, Homo sapiens
cctttatgagataat

SEQ ID NO: 805924 - DNA, 15 bp, Homo sapiens
ctttatgagataatg

SEQ ID NO: 805925 - DNA, 15 bp, Homo sapiens
tttatgagataatgc

SEQ ID NO: 805926 - DNA, 15 bp, Homo sapiens
ttatgagataatgca

SEQ ID NO: 805927 - DNA, 15 bp, Homo sapiens
tatgagataatgcat

SEQ ID NO: 805928 - DNA, 15 bp, Homo sapiens
atgagataatgcata

SEQ ID NO: 805929 - DNA, 15 bp, Homo sapiens
tgagataatgcataa

SEQ ID NO: 805930 - DNA, 15 bp, Homo sapiens
gagataatgcataag

SEQ ID NO: 805931 - DNA, 15 bp, Homo sapiens
agataatgcataagt

SEQ ID NO: 805932 - DNA, 15 bp, Homo sapiens
gataatgcataagtg

SEQ ID NO: 805933 - DNA, 15 bp, Homo sapiens
ataatgcataagtga

SEQ ID NO: 805934 - DNA, 15 bp, Homo sapiens
taatgcataagtgag

SEQ ID NO: 805935 - DNA, 15 bp, Homo sapiens
aatgcataagtgagt

SEQ ID NO: 805936 - DNA, 15 bp, Homo sapiens
atgcataagtgagtg

SEQ ID NO: 805937 - DNA, 15 bp, Homo sapiens
tgcataagtgagtgg

SEQ ID NO: 805938 - DNA, 15 bp, Homo sapiens
gcataagtgagtgga

SEQ ID NO: 805939 - DNA, 15 bp, Homo sapiens
cataagtgagtggac

SEQ ID NO: 805940 - DNA, 15 bp, Homo sapiens
ataagtgagtggacc

SEQ ID NO: 805941 - DNA, 15 bp, Homo sapiens
taagtgagtggaccc

SEQ ID NO: 805942 - DNA, 15 bp, Homo sapiens
aagtgagtggaccct

SEQ ID NO: 805943 - DNA, 15 bp, Homo sapiens
agtgagtggaccctg

SEQ ID NO: 805944 - DNA, 15 bp, Homo sapiens
gtgagtggaccctga

SEQ ID NO: 805945 - DNA, 15 bp, Homo sapiens
tgagtggaccctgag

SEQ ID NO: 805946 - DNA, 15 bp, Homo sapiens
gagtggaccctgagg

SEQ ID NO: 805947 - DNA, 15 bp, Homo sapiens
agtggaccctgagga

SEQ ID NO: 805948 - DNA, 15 bp, Homo sapiens
gtggaccctgaggag

SEQ ID NO: 805949 - DNA, 15 bp, Homo sapiens
tggaccctgaggaga

SEQ ID NO: 805950 - DNA, 15 bp, Homo sapiens
ggaccctgaggagag

SEQ ID NO: 805951 - DNA, 15 bp, Homo sapiens
gaccctgaggagagg

SEQ ID NO: 805952 - DNA, 15 bp, Homo sapiens
accctgaggagagga

SEQ ID NO: 805953 - DNA, 15 bp, Homo sapiens
ccctgaggagaggag

SEQ ID NO: 805954 - DNA, 15 bp, Homo sapiens
cctgaggagaggaga

SEQ ID NO: 805955 - DNA, 15 bp, Homo sapiens
ctgaggagaggagag

SEQ ID NO: 805956 - DNA, 15 bp, Homo sapiens
tgaggagaggagaga

SEQ ID NO: 805957 - DNA, 15 bp, Homo sapiens
gaggagaggagagaa

SEQ ID NO: 805958 - DNA, 15 bp, Homo sapiens
aggagaggagagaag

SEQ ID NO: 805959 - DNA, 15 bp, Homo sapiens
ggagaggagagaaga

SEQ ID NO: 805960 - DNA, 15 bp, Homo sapiens
gagaggagagaagaa

SEQ ID NO: 805961 - DNA, 15 bp, Homo sapiens
agaggagagaagaac

SEQ ID NO: 805962 - DNA, 15 bp, Homo sapiens
gaggagagaagaaca

SEQ ID NO: 805963 - DNA, 15 bp, Homo sapiens
ggagagaagaacaag

SEQ ID NO: 805964 - DNA, 15 bp, Homo sapiens
gagagaagaacaaga

SEQ ID NO: 805965 - DNA, 15 bp, Homo sapiens
agagaagaacaagac

SEQ ID NO: 805966 - DNA, 15 bp, Homo sapiens
gagaagaacaagacc

SEQ ID NO: 805967 - DNA, 15 bp, Homo sapiens
agaagaacaagacct

SEQ ID NO: 805968 - DNA, 15 bp, Homo sapiens
gaagaacaagacctt

SEQ ID NO: 805969 - DNA, 15 bp, Homo sapiens
aagaacaagaccttc

SEQ ID NO: 805970 - DNA, 15 bp, Homo sapiens
agaacaagaccttcc

SEQ ID NO: 805971 - DNA, 15 bp, Homo sapiens
gaacaagaccttccc

SEQ ID NO: 805972 - DNA, 15 bp, Homo sapiens
aacaagaccttcccc

SEQ ID NO: 805973 - DNA, 15 bp, Homo sapiens
acaagaccttcccct

SEQ ID NO: 805974 - DNA, 15 bp, Homo sapiens
caagaccttccccta

SEQ ID NO: 805975 - DNA, 15 bp, Homo sapiens
aagaccttcccctaa

SEQ ID NO: 805976 - DNA, 15 bp, Homo sapiens
agaccttcccctaag

SEQ ID NO: 805977 - DNA, 15 bp, Homo sapiens
gaccttcccctaagg

SEQ ID NO: 805978 - DNA, 15 bp, Homo sapiens
accttcccctaagga

SEQ ID NO: 805979 - DNA, 15 bp, Homo sapiens
ccttcccctaaggac

SEQ ID NO: 805980 - DNA, 15 bp, Homo sapiens
cttcccctaaggact

SEQ ID NO: 805981 - DNA, 15 bp, Homo sapiens
ttcccctaaggacta

SEQ ID NO: 805982 - DNA, 15 bp, Homo sapiens
tcccctaaggactat

SEQ ID NO: 805983 - DNA, 15 bp, Homo sapiens
cccctaaggactata

SEQ ID NO: 805984 - DNA, 15 bp, Homo sapiens
ccctaaggactatac

SEQ ID NO: 805985 - DNA, 15 bp, Homo sapiens
cctaaggactataca

SEQ ID NO: 805986 - DNA, 15 bp, Homo sapiens
ctaaggactatacaa

SEQ ID NO: 805987 - DNA, 15 bp, Homo sapiens
taaggactatacaag

SEQ ID NO: 805988 - DNA, 15 bp, Homo sapiens
aaggactatacaaga

SEQ ID NO: 805989 - DNA, 15 bp, Homo sapiens
aggactatacaagac

SEQ ID NO: 805990 - DNA, 15 bp, Homo sapiens
ggactatacaagaca

SEQ ID NO: 805991 - DNA, 15 bp, Homo sapiens
gactatacaagacat

SEQ ID NO: 805992 - DNA, 15 bp, Homo sapiens
actatacaagacatg

SEQ ID NO: 805993 - DNA, 15 bp, Homo sapiens
ctatacaagacatgt

SEQ ID NO: 805994 - DNA, 15 bp, Homo sapiens
tatacaagacatgta

SEQ ID NO: 805995 - DNA, 15 bp, Homo sapiens
atacaagacatgtac

SEQ ID NO: 805996 - DNA, 15 bp, Homo sapiens
tacaagacatgtacc

SEQ ID NO: 805997 - DNA, 15 bp, Homo sapiens
acaagacatgtaccc

SEQ ID NO: 805998 - DNA, 15 bp, Homo sapiens
caagacatgtaccca

SEQ ID NO: 805999 - DNA, 15 bp, Homo sapiens
aagacatgtacccat

SEQ ID NO: 806000 - DNA, 15 bp, Homo sapiens
agacatgtacccatg

SEQ ID NO: 806001 - DNA, 15 bp, Homo sapiens
gacatgtacccatgg

SEQ ID NO: 806002 - DNA, 15 bp, Homo sapiens
acatgtacccatgga

SEQ ID NO: 806003 - DNA, 15 bp, Homo sapiens
catgtacccatggaa

SEQ ID NO: 806004 - DNA, 15 bp, Homo sapiens
atgtacccatggaaa

SEQ ID NO: 806005 - DNA, 15 bp, Homo sapiens
tgtacccatggaaag

SEQ ID NO: 806006 - DNA, 15 bp, Homo sapiens
gtacccatggaaaga

SEQ ID NO: 806007 - DNA, 15 bp, Homo sapiens
tacccatggaaagat

SEQ ID NO: 806008 - DNA, 15 bp, Homo sapiens
acccatggaaagatg

SEQ ID NO: 806009 - DNA, 15 bp, Homo sapiens
cccatggaaagatgg

SEQ ID NO: 806010 - DNA, 15 bp, Homo sapiens
ccatggaaagatgga

SEQ ID NO: 806011 - DNA, 15 bp, Homo sapiens
catggaaagatggat

SEQ ID NO: 806012 - DNA, 15 bp, Homo sapiens
atggaaagatggatg

SEQ ID NO: 806013 - DNA, 15 bp, Homo sapiens
tggaaagatggatgc

SEQ ID NO: 806014 - DNA, 15 bp, Homo sapiens
ggaaagatggatgcc

SEQ ID NO: 806015 - DNA, 15 bp, Homo sapiens
gaaagatggatgcca

SEQ ID NO: 806016 - DNA, 15 bp, Homo sapiens
aaagatggatgccat

SEQ ID NO: 806017 - DNA, 15 bp, Homo sapiens
aagatggatgccatg

SEQ ID NO: 806018 - DNA, 15 bp, Homo sapiens
agatggatgccatga

SEQ ID NO: 806019 - DNA, 15 bp, Homo sapiens
gatggatgccatgat

SEQ ID NO: 806020 - DNA, 15 bp, Homo sapiens
atggatgccatgata

SEQ ID NO: 806021 - DNA, 15 bp, Homo sapiens
tggatgccatgatac

SEQ ID NO: 806022 - DNA, 15 bp, Homo sapiens
ggatgccatgataca

SEQ ID NO: 806023 - DNA, 15 bp, Homo sapiens
gatgccatgatacag

SEQ ID NO: 806024 - DNA, 15 bp, Homo sapiens
atgccatgatacagt

SEQ ID NO: 806025 - DNA, 15 bp, Homo sapiens
tgccatgatacagtg

SEQ ID NO: 806026 - DNA, 15 bp, Homo sapiens
gccatgatacagtga

SEQ ID NO: 806027 - DNA, 15 bp, Homo sapiens
ccatgatacagtgac

SEQ ID NO: 806028 - DNA, 15 bp, Homo sapiens
catgatacagtgacc

SEQ ID NO: 806029 - DNA, 15 bp, Homo sapiens
atgatacagtgaccc

SEQ ID NO: 806030 - DNA, 15 bp, Homo sapiens
tgatacagtgaccct

SEQ ID NO: 806031 - DNA, 15 bp, Homo sapiens
gatacagtgaccctg

SEQ ID NO: 806032 - DNA, 15 bp, Homo sapiens
atacagtgaccctgt

SEQ ID NO: 806033 - DNA, 15 bp, Homo sapiens
tacagtgaccctgtg

SEQ ID NO: 806034 - DNA, 15 bp, Homo sapiens
acagtgaccctgtga

SEQ ID NO: 806035 - DNA, 15 bp, Homo sapiens
cagtgaccctgtgag

SEQ ID NO: 806036 - DNA, 15 bp, Homo sapiens
agtgaccctgtgaga

SEQ ID NO: 806037 - DNA, 15 bp, Homo sapiens
gtgaccctgtgagac

SEQ ID NO: 806038 - DNA, 15 bp, Homo sapiens
tgaccctgtgagaca

SEQ ID NO: 806039 - DNA, 15 bp, Homo sapiens
gaccctgtgagacag

SEQ ID NO: 806040 - DNA, 15 bp, Homo sapiens
accctgtgagacagt

SEQ ID NO: 806041 - DNA, 15 bp, Homo sapiens
ccctgtgagacagta

SEQ ID NO: 806042 - DNA, 15 bp, Homo sapiens
cctgtgagacagtac

SEQ ID NO: 806043 - DNA, 15 bp, Homo sapiens
ctgtgagacagtact

SEQ ID NO: 806044 - DNA, 15 bp, Homo sapiens
tgtgagacagtactg

SEQ ID NO: 806045 - DNA, 15 bp, Homo sapiens
gtgagacagtactgg

SEQ ID NO: 806046 - DNA, 15 bp, Homo sapiens
tgagacagtactggt

SEQ ID NO: 806047 - DNA, 15 bp, Homo sapiens
gagacagtactggtg

SEQ ID NO: 806048 - DNA, 15 bp, Homo sapiens
agacagtactggtgg

SEQ ID NO: 806049 - DNA, 15 bp, Homo sapiens
gacagtactggtgga

SEQ ID NO: 806050 - DNA, 15 bp, Homo sapiens
acagtactggtggag

SEQ ID NO: 806051 - DNA, 15 bp, Homo sapiens
cagtactggtggagt

SEQ ID NO: 806052 - DNA, 15 bp, Homo sapiens
agtactggtggagtc

SEQ ID NO: 806053 - DNA, 15 bp, Homo sapiens
gtactggtggagtca

SEQ ID NO: 806054 - DNA, 15 bp, Homo sapiens
tactggtggagtcaa

SEQ ID NO: 806055 - DNA, 15 bp, Homo sapiens
actggtggagtcaat

SEQ ID NO: 806056 - DNA, 15 bp, Homo sapiens
ctggtggagtcaata

SEQ ID NO: 806057 - DNA, 15 bp, Homo sapiens
tggtggagtcaatat

SEQ ID NO: 806058 - DNA, 15 bp, Homo sapiens
ggtggagtcaatatg

SEQ ID NO: 806059 - DNA, 15 bp, Homo sapiens
gtggagtcaatatga

SEQ ID NO: 806060 - DNA, 15 bp, Homo sapiens
tggagtcaatatgaa

SEQ ID NO: 806061 - DNA, 15 bp, Homo sapiens
ggagtcaatatgaat

SEQ ID NO: 806062 - DNA, 15 bp, Homo sapiens
gagtcaatatgaata

SEQ ID NO: 806063 - DNA, 15 bp, Homo sapiens
agtcaatatgaataa

SEQ ID NO: 806064 - DNA, 15 bp, Homo sapiens
gtcaatatgaataat

SEQ ID NO: 806065 - DNA, 15 bp, Homo sapiens
tcaatatgaataatg

SEQ ID NO: 806066 - DNA, 15 bp, Homo sapiens
caatatgaataatgg

SEQ ID NO: 806067 - DNA, 15 bp, Homo sapiens
aatatgaataatggg

SEQ ID NO: 806068 - DNA, 15 bp, Homo sapiens
atatgaataatggga

SEQ ID NO: 806069 - DNA, 15 bp, Homo sapiens
tatgaataatgggag

SEQ ID NO: 806070 - DNA, 15 bp, Homo sapiens
atgaataatgggaga

SEQ ID NO: 806071 - DNA, 15 bp, Homo sapiens
tgaataatgggagaa

SEQ ID NO: 806072 - DNA, 15 bp, Homo sapiens
gaataatgggagaag

SEQ ID NO: 806073 - DNA, 15 bp, Homo sapiens
aataatgggagaagg

SEQ ID NO: 806074 - DNA, 15 bp, Homo sapiens
ataatgggagaagga

SEQ ID NO: 806075 - DNA, 15 bp, Homo sapiens
taatgggagaaggaa

SEQ ID NO: 806076 - DNA, 15 bp, Homo sapiens
aatgggagaaggaac

SEQ ID NO: 806077 - DNA, 15 bp, Homo sapiens
atgggagaaggaaca

SEQ ID NO: 806078 - DNA, 15 bp, Homo sapiens
tgggagaaggaacat

SEQ ID NO: 806079 - DNA, 15 bp, Homo sapiens
gggagaaggaacatt

SEQ ID NO: 806080 - DNA, 15 bp, Homo sapiens
ggagaaggaacattc

SEQ ID NO: 806081 - DNA, 15 bp, Homo sapiens
gagaaggaacattca

SEQ ID NO: 806082 - DNA, 15 bp, Homo sapiens
agaaggaacattcac

SEQ ID NO: 806083 - DNA, 15 bp, Homo sapiens
gaaggaacattcact

SEQ ID NO: 806084 - DNA, 15 bp, Homo sapiens
aaggaacattcactt

SEQ ID NO: 806085 - DNA, 15 bp, Homo sapiens
aggaacattcacttc

SEQ ID NO: 806086 - DNA, 15 bp, Homo sapiens
ggaacattcacttct

SEQ ID NO: 806087 - DNA, 15 bp, Homo sapiens
gaacattcacttctg

SEQ ID NO: 806088 - DNA, 15 bp, Homo sapiens
aacattcacttctgt

SEQ ID NO: 806089 - DNA, 15 bp, Homo sapiens
acattcacttctgtc

SEQ ID NO: 806090 - DNA, 15 bp, Homo sapiens
cattcacttctgtcc

SEQ ID NO: 806091 - DNA, 15 bp, Homo sapiens
attcacttctgtcca

SEQ ID NO: 806092 - DNA, 15 bp, Homo sapiens
ttcacttctgtccac

SEQ ID NO: 806093 - DNA, 15 bp, Homo sapiens
tcacttctgtccact

SEQ ID NO: 806094 - DNA, 15 bp, Homo sapiens
cacttctgtccactc

SEQ ID NO: 806095 - DNA, 15 bp, Homo sapiens
acttctgtccactct

SEQ ID NO: 806096 - DNA, 15 bp, Homo sapiens
cttctgtccactctt

SEQ ID NO: 806097 - DNA, 15 bp, Homo sapiens
ttctgtccactcttc

SEQ ID NO: 806098 - DNA, 15 bp, Homo sapiens
tctgtccactcttct

SEQ ID NO: 806099 - DNA, 15 bp, Homo sapiens
ctgtccactcttcta

SEQ ID NO: 806100 - DNA, 15 bp, Homo sapiens
tgtccactcttctaa

SEQ ID NO: 806101 - DNA, 15 bp, Homo sapiens
gtccactcttctaaa

SEQ ID NO: 806102 - DNA, 15 bp, Homo sapiens
tccactcttctaaat

SEQ ID NO: 806103 - DNA, 15 bp, Homo sapiens
ccactcttctaaatg

SEQ ID NO: 806104 - DNA, 15 bp, Homo sapiens
cactcttctaaatgc

SEQ ID NO: 806105 - DNA, 15 bp, Homo sapiens
actcttctaaatgcc

SEQ ID NO: 806106 - DNA, 15 bp, Homo sapiens
ctcttctaaatgcca

SEQ ID NO: 806107 - DNA, 15 bp, Homo sapiens
tcttctaaatgccat

SEQ ID NO: 806108 - DNA, 15 bp, Homo sapiens
cttctaaatgccatc

SEQ ID NO: 806109 - DNA, 15 bp, Homo sapiens
ttctaaatgccatcg

SEQ ID NO: 806110 - DNA, 15 bp, Homo sapiens
tctaaatgccatcgt

SEQ ID NO: 806111 - DNA, 15 bp, Homo sapiens
ctaaatgccatcgta

SEQ ID NO: 806112 - DNA, 15 bp, Homo sapiens
taaatgccatcgtaa

SEQ ID NO: 806113 - DNA, 15 bp, Homo sapiens
aaatgccatcgtaaa

SEQ ID NO: 806114 - DNA, 15 bp, Homo sapiens
aatgccatcgtaaat

SEQ ID NO: 806115 - DNA, 15 bp, Homo sapiens
atgccatcgtaaatg

SEQ ID NO: 806116 - DNA, 15 bp, Homo sapiens
tgccatcgtaaatga

SEQ ID NO: 806117 - DNA, 15 bp, Homo sapiens
gccatcgtaaatgag

SEQ ID NO: 806118 - DNA, 15 bp, Homo sapiens
ccatcgtaaatgagc

SEQ ID NO: 806119 - DNA, 15 bp, Homo sapiens
catcgtaaatgagct

SEQ ID NO: 806120 - DNA, 15 bp, Homo sapiens
atcgtaaatgagctc

SEQ ID NO: 806121 - DNA, 15 bp, Homo sapiens
tcgtaaatgagctca

SEQ ID NO: 806122 - DNA, 15 bp, Homo sapiens
cgtaaatgagctcat

SEQ ID NO: 806123 - DNA, 15 bp, Homo sapiens
gtaaatgagctcatt

SEQ ID NO: 806124 - DNA, 15 bp, Homo sapiens
taaatgagctcattt

SEQ ID NO: 806125 - DNA, 15 bp, Homo sapiens
aaatgagctcattta

SEQ ID NO: 806126 - DNA, 15 bp, Homo sapiens
aatgagctcatttag

SEQ ID NO: 806127 - DNA, 15 bp, Homo sapiens
atgagctcatttagt

SEQ ID NO: 806128 - DNA, 15 bp, Homo sapiens
tgagctcatttagtg

SEQ ID NO: 806129 - DNA, 15 bp, Homo sapiens
gagctcatttagtgt

SEQ ID NO: 806130 - DNA, 15 bp, Homo sapiens
agctcatttagtgtt

SEQ ID NO: 806131 - DNA, 15 bp, Homo sapiens
gctcatttagtgttc

SEQ ID NO: 806132 - DNA, 15 bp, Homo sapiens
ctcatttagtgttca

SEQ ID NO: 806133 - DNA, 15 bp, Homo sapiens
tcatttagtgttcag

SEQ ID NO: 806134 - DNA, 15 bp, Homo sapiens
catttagtgttcaga

SEQ ID NO: 806135 - DNA, 15 bp, Homo sapiens
atttagtgttcagag

SEQ ID NO: 806136 - DNA, 15 bp, Homo sapiens
tttagtgttcagagc

SEQ ID NO: 806137 - DNA, 15 bp, Homo sapiens
ttagtgttcagagca

SEQ ID NO: 806138 - DNA, 15 bp, Homo sapiens
tagtgttcagagcag

SEQ ID NO: 806139 - DNA, 15 bp, Homo sapiens
agtgttcagagcaga

SEQ ID NO: 806140 - DNA, 15 bp, Homo sapiens
gtgttcagagcagag

SEQ ID NO: 806141 - DNA, 15 bp, Homo sapiens
tgttcagagcagagt

SEQ ID NO: 806142 - DNA, 15 bp, Homo sapiens
gttcagagcagagta

SEQ ID NO: 806143 - DNA, 15 bp, Homo sapiens
ttcagagcagagtag

SEQ ID NO: 806144 - DNA, 15 bp, Homo sapiens
tcagagcagagtagg

SEQ ID NO: 806145 - DNA, 15 bp, Homo sapiens
cagagcagagtaggt

SEQ ID NO: 806146 - DNA, 15 bp, Homo sapiens
agagcagagtaggta

SEQ ID NO: 806147 - DNA, 15 bp, Homo sapiens
gagcagagtaggtat

SEQ ID NO: 806148 - DNA, 15 bp, Homo sapiens
agcagagtaggtatt

SEQ ID NO: 806149 - DNA, 15 bp, Homo sapiens
gcagagtaggtatta

SEQ ID NO: 806150 - DNA, 15 bp, Homo sapiens
cagagtaggtattat

SEQ ID NO: 806151 - DNA, 15 bp, Homo sapiens
agagtaggtattatt

SEQ ID NO: 806152 - DNA, 15 bp, Homo sapiens
gagtaggtattatta

SEQ ID NO: 806153 - DNA, 15 bp, Homo sapiens
agtaggtattattat

SEQ ID NO: 806154 - DNA, 15 bp, Homo sapiens
gtaggtattattatt

SEQ ID NO: 806155 - DNA, 15 bp, Homo sapiens
taggtattattattt

SEQ ID NO: 806156 - DNA, 15 bp, Homo sapiens
aggtattattatttc

SEQ ID NO: 806157 - DNA, 15 bp, Homo sapiens
ggtattattatttcc

SEQ ID NO: 806158 - DNA, 15 bp, Homo sapiens
gtattattatttcca

SEQ ID NO: 806159 - DNA, 15 bp, Homo sapiens
tattattatttccac

SEQ ID NO: 806160 - DNA, 15 bp, Homo sapiens
attattatttccacc

SEQ ID NO: 806161 - DNA, 15 bp, Homo sapiens
ttattatttccacct

SEQ ID NO: 806162 - DNA, 15 bp, Homo sapiens
tattatttccacctc

SEQ ID NO: 806163 - DNA, 15 bp, Homo sapiens
attatttccacctca

SEQ ID NO: 806164 - DNA, 15 bp, Homo sapiens
ttatttccacctcaa

SEQ ID NO: 806165 - DNA, 15 bp, Homo sapiens
tatttccacctcaaa

SEQ ID NO: 806166 - DNA, 15 bp, Homo sapiens
atttccacctcaaac

SEQ ID NO: 806167 - DNA, 15 bp, Homo sapiens
tttccacctcaaaca

SEQ ID NO: 806168 - DNA, 15 bp, Homo sapiens
ttccacctcaaacat

SEQ ID NO: 806169 - DNA, 15 bp, Homo sapiens
tccacctcaaacatg

SEQ ID NO: 806170 - DNA, 15 bp, Homo sapiens
ccacctcaaacatgg

SEQ ID NO: 806171 - DNA, 15 bp, Homo sapiens
cacctcaaacatgga

SEQ ID NO: 806172 - DNA, 15 bp, Homo sapiens
acctcaaacatggag

SEQ ID NO: 806173 - DNA, 15 bp, Homo sapiens
cctcaaacatggaga

SEQ ID NO: 806174 - DNA, 15 bp, Homo sapiens
ctcaaacatggagaa

SEQ ID NO: 806175 - DNA, 15 bp, Homo sapiens
tcaaacatggagaaa

SEQ ID NO: 806176 - DNA, 15 bp, Homo sapiens
caaacatggagaaac

SEQ ID NO: 806177 - DNA, 15 bp, Homo sapiens
aaacatggagaaact

SEQ ID NO: 806178 - DNA, 15 bp, Homo sapiens
aacatggagaaactg

SEQ ID NO: 806179 - DNA, 15 bp, Homo sapiens
acatggagaaactga

SEQ ID NO: 806180 - DNA, 15 bp, Homo sapiens
catggagaaactgag

SEQ ID NO: 806181 - DNA, 15 bp, Homo sapiens
atggagaaactgagg

SEQ ID NO: 806182 - DNA, 15 bp, Homo sapiens
tggagaaactgaggc

SEQ ID NO: 806183 - DNA, 15 bp, Homo sapiens
ggagaaactgaggcc

SEQ ID NO: 806184 - DNA, 15 bp, Homo sapiens
gagaaactgaggcca

SEQ ID NO: 806185 - DNA, 15 bp, Homo sapiens
agaaactgaggccag

SEQ ID NO: 806186 - DNA, 15 bp, Homo sapiens
gaaactgaggccaga

SEQ ID NO: 806187 - DNA, 15 bp, Homo sapiens
aaactgaggccagag

SEQ ID NO: 806188 - DNA, 15 bp, Homo sapiens
aactgaggccagaga

SEQ ID NO: 806189 - DNA, 15 bp, Homo sapiens
actgaggccagagag

SEQ ID NO: 806190 - DNA, 15 bp, Homo sapiens
ctgaggccagagagg

SEQ ID NO: 806191 - DNA, 15 bp, Homo sapiens
tgaggccagagaggt

SEQ ID NO: 806192 - DNA, 15 bp, Homo sapiens
gaggccagagaggtt

SEQ ID NO: 806193 - DNA, 15 bp, Homo sapiens
aggccagagaggtta

SEQ ID NO: 806194 - DNA, 15 bp, Homo sapiens
ggccagagaggttag

SEQ ID NO: 806195 - DNA, 15 bp, Homo sapiens
gccagagaggttagt

SEQ ID NO: 806196 - DNA, 15 bp, Homo sapiens
ccagagaggttagta

SEQ ID NO: 806197 - DNA, 15 bp, Homo sapiens
cagagaggttagtaa

SEQ ID NO: 806198 - DNA, 15 bp, Homo sapiens
agagaggttagtaat

SEQ ID NO: 806199 - DNA, 15 bp, Homo sapiens
gagaggttagtaatt

SEQ ID NO: 806200 - DNA, 15 bp, Homo sapiens
agaggttagtaattt

SEQ ID NO: 806201 - DNA, 15 bp, Homo sapiens
gaggttagtaatttt

SEQ ID NO: 806202 - DNA, 15 bp, Homo sapiens
aggttagtaattttc

SEQ ID NO: 806203 - DNA, 15 bp, Homo sapiens
ggttagtaattttcc

SEQ ID NO: 806204 - DNA, 15 bp, Homo sapiens
gttagtaattttccc

SEQ ID NO: 806205 - DNA, 15 bp, Homo sapiens
ttagtaattttccca

SEQ ID NO: 806206 - DNA, 15 bp, Homo sapiens
tagtaattttcccaa

SEQ ID NO: 806207 - DNA, 15 bp, Homo sapiens
agtaattttcccaag

SEQ ID NO: 806208 - DNA, 15 bp, Homo sapiens
gtaattttcccaagg

SEQ ID NO: 806209 - DNA, 15 bp, Homo sapiens
taattttcccaaggc

SEQ ID NO: 806210 - DNA, 15 bp, Homo sapiens
aattttcccaaggct

SEQ ID NO: 806211 - DNA, 15 bp, Homo sapiens
attttcccaaggcta

SEQ ID NO: 806212 - DNA, 15 bp, Homo sapiens
ttttcccaaggctac

SEQ ID NO: 806213 - DNA, 15 bp, Homo sapiens
tttcccaaggctaca

SEQ ID NO: 806214 - DNA, 15 bp, Homo sapiens
ttcccaaggctacac

SEQ ID NO: 806215 - DNA, 15 bp, Homo sapiens
tcccaaggctacaca

SEQ ID NO: 806216 - DNA, 15 bp, Homo sapiens
cccaaggctacacag

SEQ ID NO: 806217 - DNA, 15 bp, Homo sapiens
ccaaggctacacagc

SEQ ID NO: 806218 - DNA, 15 bp, Homo sapiens
caaggctacacagct

SEQ ID NO: 806219 - DNA, 15 bp, Homo sapiens
aaggctacacagctg

SEQ ID NO: 806220 - DNA, 15 bp, Homo sapiens
aggctacacagctgg

SEQ ID NO: 806221 - DNA, 15 bp, Homo sapiens
ggctacacagctggc

SEQ ID NO: 806222 - DNA, 15 bp, Homo sapiens
gctacacagctggca

SEQ ID NO: 806223 - DNA, 15 bp, Homo sapiens
ctacacagctggcaa

SEQ ID NO: 806224 - DNA, 15 bp, Homo sapiens
tacacagctggcaag

SEQ ID NO: 806225 - DNA, 15 bp, Homo sapiens
acacagctggcaagt

SEQ ID NO: 806226 - DNA, 15 bp, Homo sapiens
cacagctggcaagtg

SEQ ID NO: 806227 - DNA, 15 bp, Homo sapiens
acagctggcaagtgg

SEQ ID NO: 806228 - DNA, 15 bp, Homo sapiens
cagctggcaagtggt

SEQ ID NO: 806229 - DNA, 15 bp, Homo sapiens
agctggcaagtggta

SEQ ID NO: 806230 - DNA, 15 bp, Homo sapiens
gctggcaagtggtag

SEQ ID NO: 806231 - DNA, 15 bp, Homo sapiens
ctggcaagtggtaga

SEQ ID NO: 806232 - DNA, 15 bp, Homo sapiens
tggcaagtggtagaa

SEQ ID NO: 806233 - DNA, 15 bp, Homo sapiens
ggcaagtggtagaat

SEQ ID NO: 806234 - DNA, 15 bp, Homo sapiens
gcaagtggtagaatg

SEQ ID NO: 806235 - DNA, 15 bp, Homo sapiens
caagtggtagaatgg

SEQ ID NO: 806236 - DNA, 15 bp, Homo sapiens
aagtggtagaatggg

SEQ ID NO: 806237 - DNA, 15 bp, Homo sapiens
agtggtagaatgggg

SEQ ID NO: 806238 - DNA, 15 bp, Homo sapiens
gtggtagaatgggga

SEQ ID NO: 806239 - DNA, 15 bp, Homo sapiens
tggtagaatggggat

SEQ ID NO: 806240 - DNA, 15 bp, Homo sapiens
ggtagaatggggatt

SEQ ID NO: 806241 - DNA, 15 bp, Homo sapiens
gtagaatggggattt

SEQ ID NO: 806242 - DNA, 15 bp, Homo sapiens
tagaatggggatttg

SEQ ID NO: 806243 - DNA, 15 bp, Homo sapiens
agaatggggatttga

SEQ ID NO: 806244 - DNA, 15 bp, Homo sapiens
gaatggggatttgaa

SEQ ID NO: 806245 - DNA, 15 bp, Homo sapiens
aatggggatttgaac

SEQ ID NO: 806246 - DNA, 15 bp, Homo sapiens
atggggatttgaact

SEQ ID NO: 806247 - DNA, 15 bp, Homo sapiens
tggggatttgaactc

SEQ ID NO: 806248 - DNA, 15 bp, Homo sapiens
ggggatttgaactca

SEQ ID NO: 806249 - DNA, 15 bp, Homo sapiens
gggatttgaactcag

SEQ ID NO: 806250 - DNA, 15 bp, Homo sapiens
ggatttgaactcagt

SEQ ID NO: 806251 - DNA, 15 bp, Homo sapiens
gatttgaactcagtg

SEQ ID NO: 806252 - DNA, 15 bp, Homo sapiens
tttgaactcagtgat

SEQ ID NO: 806253 - DNA, 15 bp, Homo sapiens
ttgaactcagtgata

SEQ ID NO: 806254 - DNA, 15 bp, Homo sapiens
tgaactcagtgatac

SEQ ID NO: 806255 - DNA, 15 bp, Homo sapiens
gaactcagtgataca

SEQ ID NO: 806256 - DNA, 15 bp, Homo sapiens
aactcagtgatacag

SEQ ID NO: 806257 - DNA, 15 bp, Homo sapiens
actcagtgatacagc

SEQ ID NO: 806258 - DNA, 15 bp, Homo sapiens
ctcagtgatacagca

SEQ ID NO: 806259 - DNA, 15 bp, Homo sapiens
tcagtgatacagcag

SEQ ID NO: 806260 - DNA, 15 bp, Homo sapiens
cagtgatacagcagg

SEQ ID NO: 806261 - DNA, 15 bp, Homo sapiens
agtgatacagcagga

SEQ ID NO: 806262 - DNA, 15 bp, Homo sapiens
gtgatacagcaggag

SEQ ID NO: 806263 - DNA, 15 bp, Homo sapiens
tgatacagcaggagg

SEQ ID NO: 806264 - DNA, 15 bp, Homo sapiens
gatacagcaggaggt

SEQ ID NO: 806265 - DNA, 15 bp, Homo sapiens
atacagcaggaggta

SEQ ID NO: 806266 - DNA, 15 bp, Homo sapiens
tacagcaggaggtag

SEQ ID NO: 806267 - DNA, 15 bp, Homo sapiens
acagcaggaggtaga

SEQ ID NO: 806268 - DNA, 15 bp, Homo sapiens
cagcaggaggtagac

SEQ ID NO: 806269 - DNA, 15 bp, Homo sapiens
agcaggaggtagaca

SEQ ID NO: 806270 - DNA, 15 bp, Homo sapiens
gcaggaggtagacaa

SEQ ID NO: 806271 - DNA, 15 bp, Homo sapiens
caggaggtagacaaa

SEQ ID NO: 806272 - DNA, 15 bp, Homo sapiens
aggaggtagacaaat

SEQ ID NO: 806273 - DNA, 15 bp, Homo sapiens
ggaggtagacaaatc

SEQ ID NO: 806274 - DNA, 15 bp, Homo sapiens
gaggtagacaaatcc

SEQ ID NO: 806275 - DNA, 15 bp, Homo sapiens
aggtagacaaatccc

SEQ ID NO: 806276 - DNA, 15 bp, Homo sapiens
ggtagacaaatccct

SEQ ID NO: 806277 - DNA, 15 bp, Homo sapiens
gtagacaaatcccta

SEQ ID NO: 806278 - DNA, 15 bp, Homo sapiens
tagacaaatccctag

SEQ ID NO: 806279 - DNA, 15 bp, Homo sapiens
agacaaatccctagg

SEQ ID NO: 806280 - DNA, 15 bp, Homo sapiens
gacaaatccctaggc

SEQ ID NO: 806281 - DNA, 15 bp, Homo sapiens
acaaatccctaggca

SEQ ID NO: 806282 - DNA, 15 bp, Homo sapiens
caaatccctaggcaa

SEQ ID NO: 806283 - DNA, 15 bp, Homo sapiens
aaatccctaggcaaa

SEQ ID NO: 806284 - DNA, 15 bp, Homo sapiens
aatccctaggcaaac

SEQ ID NO: 806285 - DNA, 15 bp, Homo sapiens
atccctaggcaaaca

SEQ ID NO: 806286 - DNA, 15 bp, Homo sapiens
tccctaggcaaacac

SEQ ID NO: 806287 - DNA, 15 bp, Homo sapiens
ccctaggcaaacaca

SEQ ID NO: 806288 - DNA, 15 bp, Homo sapiens
cctaggcaaacacag

SEQ ID NO: 806289 - DNA, 15 bp, Homo sapiens
ctaggcaaacacagg

SEQ ID NO: 806290 - DNA, 15 bp, Homo sapiens
taggcaaacacaggt

SEQ ID NO: 806291 - DNA, 15 bp, Homo sapiens
aggcaaacacaggtg

SEQ ID NO: 806292 - DNA, 15 bp, Homo sapiens
ggcaaacacaggtga

SEQ ID NO: 806293 - DNA, 15 bp, Homo sapiens
gcaaacacaggtgag

SEQ ID NO: 806294 - DNA, 15 bp, Homo sapiens
caaacacaggtgagt

SEQ ID NO: 806295 - DNA, 15 bp, Homo sapiens
aaacacaggtgagtc

SEQ ID NO: 806296 - DNA, 15 bp, Homo sapiens
aacacaggtgagtcc

SEQ ID NO: 806297 - DNA, 15 bp, Homo sapiens
acacaggtgagtccc

SEQ ID NO: 806298 - DNA, 15 bp, Homo sapiens
cacaggtgagtcccc

SEQ ID NO: 806299 - DNA, 15 bp, Homo sapiens
acaggtgagtcccca

SEQ ID NO: 806300 - DNA, 15 bp, Homo sapiens
caggtgagtccccag

SEQ ID NO: 806301 - DNA, 15 bp, Homo sapiens
aggtgagtccccagt

SEQ ID NO: 806302 - DNA, 15 bp, Homo sapiens
ggtgagtccccagtg

SEQ ID NO: 806303 - DNA, 15 bp, Homo sapiens
gtgagtccccagtga

SEQ ID NO: 806304 - DNA, 15 bp, Homo sapiens
tgagtccccagtgaa

SEQ ID NO: 806305 - DNA, 15 bp, Homo sapiens
gagtccccagtgaaa

SEQ ID NO: 806306 - DNA, 15 bp, Homo sapiens
agtccccagtgaaac

SEQ ID NO: 806307 - DNA, 15 bp, Homo sapiens
gtccccagtgaaacc

SEQ ID NO: 806308 - DNA, 15 bp, Homo sapiens
tccccagtgaaaccc

SEQ ID NO: 806309 - DNA, 15 bp, Homo sapiens
ccccagtgaaacccc

SEQ ID NO: 806310 - DNA, 15 bp, Homo sapiens
cccagtgaaaccccc

SEQ ID NO: 806311 - DNA, 15 bp, Homo sapiens
ccagtgaaacccccc

SEQ ID NO: 806312 - DNA, 15 bp, Homo sapiens
cagtgaaaccccccc

SEQ ID NO: 806313 - DNA, 15 bp, Homo sapiens
agtgaaacccccccc

SEQ ID NO: 806314 - DNA, 15 bp, Homo sapiens
gtgaaacccccccct

SEQ ID NO: 806315 - DNA, 15 bp, Homo sapiens
tgaaacccccccctg

SEQ ID NO: 806316 - DNA, 15 bp, Homo sapiens
gaaacccccccctgc

SEQ ID NO: 806317 - DNA, 15 bp, Homo sapiens
aaacccccccctgca

SEQ ID NO: 806318 - DNA, 15 bp, Homo sapiens
aacccccccctgcaa

SEQ ID NO: 806319 - DNA, 15 bp, Homo sapiens
acccccccctgcaaa

SEQ ID NO: 806320 - DNA, 15 bp, Homo sapiens
cccccccctgcaaac

SEQ ID NO: 806321 - DNA, 15 bp, Homo sapiens
ccccccctgcaaacc

SEQ ID NO: 806322 - DNA, 15 bp, Homo sapiens
cccccctgcaaacca

SEQ ID NO: 806323 - DNA, 15 bp, Homo sapiens
ccccctgcaaaccaa

SEQ ID NO: 806324 - DNA, 15 bp, Homo sapiens
cccctgcaaaccaaa

SEQ ID NO: 806325 - DNA, 15 bp, Homo sapiens
ccctgcaaaccaaag

SEQ ID NO: 806326 - DNA, 15 bp, Homo sapiens
cctgcaaaccaaagc

SEQ ID NO: 806327 - DNA, 15 bp, Homo sapiens
ctgcaaaccaaagcc

SEQ ID NO: 806328 - DNA, 15 bp, Homo sapiens
tgcaaaccaaagcca

SEQ ID NO: 806329 - DNA, 15 bp, Homo sapiens
gcaaaccaaagccag

SEQ ID NO: 806330 - DNA, 15 bp, Homo sapiens
caaaccaaagccagt

SEQ ID NO: 806331 - DNA, 15 bp, Homo sapiens
aaaccaaagccagtt

SEQ ID NO: 806332 - DNA, 15 bp, Homo sapiens
aaccaaagccagttt

SEQ ID NO: 806333 - DNA, 15 bp, Homo sapiens
accaaagccagttta

SEQ ID NO: 806334 - DNA, 15 bp, Homo sapiens
ccaaagccagtttaa

SEQ ID NO: 806335 - DNA, 15 bp, Homo sapiens
caaagccagtttaaa

SEQ ID NO: 806336 - DNA, 15 bp, Homo sapiens
aaagccagtttaaag

SEQ ID NO: 806337 - DNA, 15 bp, Homo sapiens
aagccagtttaaagt

SEQ ID NO: 806338 - DNA, 15 bp, Homo sapiens
agccagtttaaagtc

SEQ ID NO: 806339 - DNA, 15 bp, Homo sapiens
gccagtttaaagtct

SEQ ID NO: 806340 - DNA, 15 bp, Homo sapiens
ccagtttaaagtctg

SEQ ID NO: 806341 - DNA, 15 bp, Homo sapiens
cagtttaaagtctga

SEQ ID NO: 806342 - DNA, 15 bp, Homo sapiens
agtttaaagtctgaa

SEQ ID NO: 806343 - DNA, 15 bp, Homo sapiens
gtttaaagtctgaaa

SEQ ID NO: 806344 - DNA, 15 bp, Homo sapiens
tttaaagtctgaaag

SEQ ID NO: 806345 - DNA, 15 bp, Homo sapiens
ttaaagtctgaaagc

SEQ ID NO: 806346 - DNA, 15 bp, Homo sapiens
taaagtctgaaagcc

SEQ ID NO: 806347 - DNA, 15 bp, Homo sapiens
aaagtctgaaagcca

SEQ ID NO: 806348 - DNA, 15 bp, Homo sapiens
aagtctgaaagccaa

SEQ ID NO: 806349 - DNA, 15 bp, Homo sapiens
agtctgaaagccaag

SEQ ID NO: 806350 - DNA, 15 bp, Homo sapiens
gtctgaaagccaagc

SEQ ID NO: 806351 - DNA, 15 bp, Homo sapiens
tctgaaagccaagct

SEQ ID NO: 806352 - DNA, 15 bp, Homo sapiens
ctgaaagccaagcta

SEQ ID NO: 806353 - DNA, 15 bp, Homo sapiens
tgaaagccaagctac

SEQ ID NO: 806354 - DNA, 15 bp, Homo sapiens
gaaagccaagctaca

SEQ ID NO: 806355 - DNA, 15 bp, Homo sapiens
aaagccaagctacaa

SEQ ID NO: 806356 - DNA, 15 bp, Homo sapiens
aagccaagctacaag

SEQ ID NO: 806357 - DNA, 15 bp, Homo sapiens
agccaagctacaagt

SEQ ID NO: 806358 - DNA, 15 bp, Homo sapiens
gccaagctacaagtc

SEQ ID NO: 806359 - DNA, 15 bp, Homo sapiens
ccaagctacaagtct

SEQ ID NO: 806360 - DNA, 15 bp, Homo sapiens
caagctacaagtctt

SEQ ID NO: 806361 - DNA, 15 bp, Homo sapiens
aagctacaagtcttg

SEQ ID NO: 806362 - DNA, 15 bp, Homo sapiens
agctacaagtcttgg

SEQ ID NO: 806363 - DNA, 15 bp, Homo sapiens
gctacaagtcttgga

SEQ ID NO: 806364 - DNA, 15 bp, Homo sapiens
ctacaagtcttggat

SEQ ID NO: 806365 - DNA, 15 bp, Homo sapiens
tacaagtcttggata

SEQ ID NO: 806366 - DNA, 15 bp, Homo sapiens
acaagtcttggataa

SEQ ID NO: 806367 - DNA, 15 bp, Homo sapiens
caagtcttggataaa

SEQ ID NO: 806368 - DNA, 15 bp, Homo sapiens
aagtcttggataaat

SEQ ID NO: 806369 - DNA, 15 bp, Homo sapiens
agtcttggataaatc

SEQ ID NO: 806370 - DNA, 15 bp, Homo sapiens
gtcttggataaatcc

SEQ ID NO: 806371 - DNA, 15 bp, Homo sapiens
tcttggataaatcca

SEQ ID NO: 806372 - DNA, 15 bp, Homo sapiens
cttggataaatccac

SEQ ID NO: 806373 - DNA, 15 bp, Homo sapiens
ttggataaatccaca

SEQ ID NO: 806374 - DNA, 15 bp, Homo sapiens
tggataaatccacag

SEQ ID NO: 806375 - DNA, 15 bp, Homo sapiens
ggataaatccacaga

SEQ ID NO: 806376 - DNA, 15 bp, Homo sapiens
gataaatccacagac

SEQ ID NO: 806377 - DNA, 15 bp, Homo sapiens
ataaatccacagact

SEQ ID NO: 806378 - DNA, 15 bp, Homo sapiens
taaatccacagactg

SEQ ID NO: 806379 - DNA, 15 bp, Homo sapiens
aaatccacagactgg

SEQ ID NO: 806380 - DNA, 15 bp, Homo sapiens
aatccacagactgga

SEQ ID NO: 806381 - DNA, 15 bp, Homo sapiens
atccacagactggat

SEQ ID NO: 806382 - DNA, 15 bp, Homo sapiens
tccacagactggatt

SEQ ID NO: 806383 - DNA, 15 bp, Homo sapiens
ccacagactggattg

SEQ ID NO: 806384 - DNA, 15 bp, Homo sapiens
cacagactggattga

SEQ ID NO: 806385 - DNA, 15 bp, Homo sapiens
acagactggattgag

SEQ ID NO: 806386 - DNA, 15 bp, Homo sapiens
cagactggattgaga

SEQ ID NO: 806387 - DNA, 15 bp, Homo sapiens
agactggattgagaa

SEQ ID NO: 806388 - DNA, 15 bp, Homo sapiens
gactggattgagaac

SEQ ID NO: 806389 - DNA, 15 bp, Homo sapiens
actggattgagaacc

SEQ ID NO: 806390 - DNA, 15 bp, Homo sapiens
ctggattgagaacct

SEQ ID NO: 806391 - DNA, 15 bp, Homo sapiens
tggattgagaacctc

SEQ ID NO: 806392 - DNA, 15 bp, Homo sapiens
ggattgagaacctct

SEQ ID NO: 806393 - DNA, 15 bp, Homo sapiens
gattgagaacctctc

SEQ ID NO: 806394 - DNA, 15 bp, Homo sapiens
attgagaacctctct

SEQ ID NO: 806395 - DNA, 15 bp, Homo sapiens
ttgagaacctctctt

SEQ ID NO: 806396 - DNA, 15 bp, Homo sapiens
tgagaacctctcttc

SEQ ID NO: 806397 - DNA, 15 bp, Homo sapiens
gagaacctctcttcc

SEQ ID NO: 806398 - DNA, 15 bp, Homo sapiens
agaacctctcttccc

SEQ ID NO: 806399 - DNA, 15 bp, Homo sapiens
gaacctctcttccca

SEQ ID NO: 806400 - DNA, 15 bp, Homo sapiens
aacctctcttcccat

SEQ ID NO: 806401 - DNA, 15 bp, Homo sapiens
acctctcttcccatt

SEQ ID NO: 806402 - DNA, 15 bp, Homo sapiens
cctctcttcccattt

SEQ ID NO: 806403 - DNA, 15 bp, Homo sapiens
ctctcttcccatttg

SEQ ID NO: 806404 - DNA, 15 bp, Homo sapiens
tctcttcccatttgg

SEQ ID NO: 806405 - DNA, 15 bp, Homo sapiens
ctcttcccatttggc

SEQ ID NO: 806406 - DNA, 15 bp, Homo sapiens
tcttcccatttggca

SEQ ID NO: 806407 - DNA, 15 bp, Homo sapiens
cttcccatttggcat

SEQ ID NO: 806408 - DNA, 15 bp, Homo sapiens
ttcccatttggcatg

SEQ ID NO: 806409 - DNA, 15 bp, Homo sapiens
tcccatttggcatgc

SEQ ID NO: 806410 - DNA, 15 bp, Homo sapiens
cccatttggcatgct

SEQ ID NO: 806411 - DNA, 15 bp, Homo sapiens
ccatttggcatgctt

SEQ ID NO: 806412 - DNA, 15 bp, Homo sapiens
catttggcatgcttt

SEQ ID NO: 806413 - DNA, 15 bp, Homo sapiens
atttggcatgctttc

SEQ ID NO: 806414 - DNA, 15 bp, Homo sapiens
tttggcatgctttcc

SEQ ID NO: 806415 - DNA, 15 bp, Homo sapiens
ttggcatgctttcct

SEQ ID NO: 806416 - DNA, 15 bp, Homo sapiens
tggcatgctttcctc

SEQ ID NO: 806417 - DNA, 15 bp, Homo sapiens
ggcatgctttcctct

SEQ ID NO: 806418 - DNA, 15 bp, Homo sapiens
gcatgctttcctctg

SEQ ID NO: 806419 - DNA, 15 bp, Homo sapiens
catgctttcctctga

SEQ ID NO: 806420 - DNA, 15 bp, Homo sapiens
atgctttcctctgat

SEQ ID NO: 806421 - DNA, 15 bp, Homo sapiens
tgctttcctctgatt

SEQ ID NO: 806422 - DNA, 15 bp, Homo sapiens
gctttcctctgatta

SEQ ID NO: 806423 - DNA, 15 bp, Homo sapiens
ctttcctctgattaa

SEQ ID NO: 806424 - DNA, 15 bp, Homo sapiens
tttcctctgattaac

SEQ ID NO: 806425 - DNA, 15 bp, Homo sapiens
ttcctctgattaacc

SEQ ID NO: 806426 - DNA, 15 bp, Homo sapiens
tcctctgattaaccc

SEQ ID NO: 806427 - DNA, 15 bp, Homo sapiens
cctctgattaacccc

SEQ ID NO: 806428 - DNA, 15 bp, Homo sapiens
ctctgattaaccccc

SEQ ID NO: 806429 - DNA, 15 bp, Homo sapiens
tctgattaaccccca

SEQ ID NO: 806430 - DNA, 15 bp, Homo sapiens
ctgattaacccccac

SEQ ID NO: 806431 - DNA, 15 bp, Homo sapiens
tgattaacccccacc

SEQ ID NO: 806432 - DNA, 15 bp, Homo sapiens
gattaacccccacct

SEQ ID NO: 806433 - DNA, 15 bp, Homo sapiens
attaacccccacctc

SEQ ID NO: 806434 - DNA, 15 bp, Homo sapiens
ttaacccccacctct

SEQ ID NO: 806435 - DNA, 15 bp, Homo sapiens
taacccccacctctt

SEQ ID NO: 806436 - DNA, 15 bp, Homo sapiens
aacccccacctcttc

SEQ ID NO: 806437 - DNA, 15 bp, Homo sapiens
acccccacctcttca

SEQ ID NO: 806438 - DNA, 15 bp, Homo sapiens
cccccacctcttcac

SEQ ID NO: 806439 - DNA, 15 bp, Homo sapiens
ccccacctcttcacc

SEQ ID NO: 806440 - DNA, 15 bp, Homo sapiens
cccacctcttcacct

SEQ ID NO: 806441 - DNA, 15 bp, Homo sapiens
ccacctcttcaccta

SEQ ID NO: 806442 - DNA, 15 bp, Homo sapiens
cacctcttcacctat

SEQ ID NO: 806443 - DNA, 15 bp, Homo sapiens
acctcttcacctata

SEQ ID NO: 806444 - DNA, 15 bp, Homo sapiens
cctcttcacctatac

SEQ ID NO: 806445 - DNA, 15 bp, Homo sapiens
ctcttcacctatacc

SEQ ID NO: 806446 - DNA, 15 bp, Homo sapiens
tcttcacctataccc

SEQ ID NO: 806447 - DNA, 15 bp, Homo sapiens
cttcacctataccca

SEQ ID NO: 806448 - DNA, 15 bp, Homo sapiens
ttcacctatacccac

SEQ ID NO: 806449 - DNA, 15 bp, Homo sapiens
tcacctatacccacc

SEQ ID NO: 806450 - DNA, 15 bp, Homo sapiens
cacctatacccaccc

SEQ ID NO: 806451 - DNA, 15 bp, Homo sapiens
acctatacccaccct

SEQ ID NO: 806452 - DNA, 15 bp, Homo sapiens
cctatacccaccctt

SEQ ID NO: 806453 - DNA, 15 bp, Homo sapiens
ctatacccacccttc

SEQ ID NO: 806454 - DNA, 15 bp, Homo sapiens
tatacccacccttcc

SEQ ID NO: 806455 - DNA, 15 bp, Homo sapiens
atacccacccttccc

SEQ ID NO: 806456 - DNA, 15 bp, Homo sapiens
tacccacccttcccc

SEQ ID NO: 806457 - DNA, 15 bp, Homo sapiens
acccacccttcccca

SEQ ID NO: 806458 - DNA, 15 bp, Homo sapiens
cccacccttccccaa

SEQ ID NO: 806459 - DNA, 15 bp, Homo sapiens
ccacccttccccaat

SEQ ID NO: 806460 - DNA, 15 bp, Homo sapiens
cacccttccccaatt

SEQ ID NO: 806461 - DNA, 15 bp, Homo sapiens
acccttccccaattg

SEQ ID NO: 806462 - DNA, 15 bp, Homo sapiens
cccttccccaattgg

SEQ ID NO: 806463 - DNA, 15 bp, Homo sapiens
ccttccccaattggt

SEQ ID NO: 806464 - DNA, 15 bp, Homo sapiens
cttccccaattggtt

SEQ ID NO: 806465 - DNA, 15 bp, Homo sapiens
ttccccaattggttt

SEQ ID NO: 806466 - DNA, 15 bp, Homo sapiens
tccccaattggtttt

SEQ ID NO: 806467 - DNA, 15 bp, Homo sapiens
ccccaattggttttt

SEQ ID NO: 806468 - DNA, 15 bp, Homo sapiens
cccaattggttttta

SEQ ID NO: 806469 - DNA, 15 bp, Homo sapiens
ccaattggtttttac

SEQ ID NO: 806470 - DNA, 15 bp, Homo sapiens
caattggtttttaca

SEQ ID NO: 806471 - DNA, 15 bp, Homo sapiens
aattggtttttacac

SEQ ID NO: 806472 - DNA, 15 bp, Homo sapiens
attggtttttacact

SEQ ID NO: 806473 - DNA, 15 bp, Homo sapiens
ttggtttttacactg

SEQ ID NO: 806474 - DNA, 15 bp, Homo sapiens
tggtttttacactgt

SEQ ID NO: 806475 - DNA, 15 bp, Homo sapiens
ggtttttacactgtt

SEQ ID NO: 806476 - DNA, 15 bp, Homo sapiens
gtttttacactgttg

SEQ ID NO: 806477 - DNA, 15 bp, Homo sapiens
tttttacactgttgc

SEQ ID NO: 806478 - DNA, 15 bp, Homo sapiens
ttttacactgttgcc

SEQ ID NO: 806479 - DNA, 15 bp, Homo sapiens
tttacactgttgcct

SEQ ID NO: 806480 - DNA, 15 bp, Homo sapiens
ttacactgttgcctt

SEQ ID NO: 806481 - DNA, 15 bp, Homo sapiens
tacactgttgccttt

SEQ ID NO: 806482 - DNA, 15 bp, Homo sapiens
acactgttgcctttt

SEQ ID NO: 806483 - DNA, 15 bp, Homo sapiens
cactgttgccttttt

SEQ ID NO: 806484 - DNA, 15 bp, Homo sapiens
actgttgcctttttt

SEQ ID NO: 806485 - DNA, 15 bp, Homo sapiens
ctgttgccttttttt

SEQ ID NO: 806486 - DNA, 15 bp, Homo sapiens
tgttgcctttttttg

SEQ ID NO: 806487 - DNA, 15 bp, Homo sapiens
gttgcctttttttgc

SEQ ID NO: 806488 - DNA, 15 bp, Homo sapiens
ttgcctttttttgca

SEQ ID NO: 806489 - DNA, 15 bp, Homo sapiens
tgcctttttttgcat

SEQ ID NO: 806490 - DNA, 15 bp, Homo sapiens
gcctttttttgcata

SEQ ID NO: 806491 - DNA, 15 bp, Homo sapiens
cctttttttgcatac

SEQ ID NO: 806492 - DNA, 15 bp, Homo sapiens
ctttttttgcatact

SEQ ID NO: 806493 - DNA, 15 bp, Homo sapiens
tttttttgcatactc

SEQ ID NO: 806494 - DNA, 15 bp, Homo sapiens
ttttttgcatactca

SEQ ID NO: 806495 - DNA, 15 bp, Homo sapiens
tttttgcatactcac

SEQ ID NO: 806496 - DNA, 15 bp, Homo sapiens
ttttgcatactcaca

SEQ ID NO: 806497 - DNA, 15 bp, Homo sapiens
tttgcatactcacag

SEQ ID NO: 806498 - DNA, 15 bp, Homo sapiens
ttgcatactcacaga

SEQ ID NO: 806499 - DNA, 15 bp, Homo sapiens
tgcatactcacagac

SEQ ID NO: 806500 - DNA, 15 bp, Homo sapiens
gcatactcacagacc

SEQ ID NO: 806501 - DNA, 15 bp, Homo sapiens
catactcacagacca

SEQ ID NO: 806502 - DNA, 15 bp, Homo sapiens
atactcacagaccaa

SEQ ID NO: 806503 - DNA, 15 bp, Homo sapiens
tactcacagaccaat

SEQ ID NO: 806504 - DNA, 15 bp, Homo sapiens
actcacagaccaatc

SEQ ID NO: 806505 - DNA, 15 bp, Homo sapiens
ctcacagaccaatca

SEQ ID NO: 806506 - DNA, 15 bp, Homo sapiens
tcacagaccaatcag

SEQ ID NO: 806507 - DNA, 15 bp, Homo sapiens
cacagaccaatcagt

SEQ ID NO: 806508 - DNA, 15 bp, Homo sapiens
acagaccaatcagta

SEQ ID NO: 806509 - DNA, 15 bp, Homo sapiens
cagaccaatcagtat

SEQ ID NO: 806510 - DNA, 15 bp, Homo sapiens
agaccaatcagtatc

SEQ ID NO: 806511 - DNA, 15 bp, Homo sapiens
gaccaatcagtatcc

SEQ ID NO: 806512 - DNA, 15 bp, Homo sapiens
accaatcagtatcca

SEQ ID NO: 806513 - DNA, 15 bp, Homo sapiens
ccaatcagtatccat

SEQ ID NO: 806514 - DNA, 15 bp, Homo sapiens
caatcagtatccatc

SEQ ID NO: 806515 - DNA, 15 bp, Homo sapiens
aatcagtatccatcc

SEQ ID NO: 806516 - DNA, 15 bp, Homo sapiens
atcagtatccatccc

SEQ ID NO: 806517 - DNA, 15 bp, Homo sapiens
tcagtatccatcccc

SEQ ID NO: 806518 - DNA, 15 bp, Homo sapiens
cagtatccatcccct

SEQ ID NO: 806519 - DNA, 15 bp, Homo sapiens
agtatccatcccctt

SEQ ID NO: 806520 - DNA, 15 bp, Homo sapiens
gtatccatccccttt

SEQ ID NO: 806521 - DNA, 15 bp, Homo sapiens
tatccatcccctttc

SEQ ID NO: 806522 - DNA, 15 bp, Homo sapiens
atccatcccctttct

SEQ ID NO: 806523 - DNA, 15 bp, Homo sapiens
tccatcccctttctg

SEQ ID NO: 806524 - DNA, 15 bp, Homo sapiens
ccatcccctttctga

SEQ ID NO: 806525 - DNA, 15 bp, Homo sapiens
catcccctttctgag

SEQ ID NO: 806526 - DNA, 15 bp, Homo sapiens
atcccctttctgagc

SEQ ID NO: 806527 - DNA, 15 bp, Homo sapiens
tcccctttctgagcc

SEQ ID NO: 806528 - DNA, 15 bp, Homo sapiens
cccctttctgagccc

SEQ ID NO: 806529 - DNA, 15 bp, Homo sapiens
ccctttctgagccca

SEQ ID NO: 806530 - DNA, 15 bp, Homo sapiens
cctttctgagcccat

SEQ ID NO: 806531 - DNA, 15 bp, Homo sapiens
ctttctgagcccata

SEQ ID NO: 806532 - DNA, 15 bp, Homo sapiens
tttctgagcccataa

SEQ ID NO: 806533 - DNA, 15 bp, Homo sapiens
ttctgagcccataaa

SEQ ID NO: 806534 - DNA, 15 bp, Homo sapiens
tctgagcccataaaa

SEQ ID NO: 806535 - DNA, 15 bp, Homo sapiens
ctgagcccataaaaa

SEQ ID NO: 806536 - DNA, 15 bp, Homo sapiens
tgagcccataaaaac

SEQ ID NO: 806537 - DNA, 15 bp, Homo sapiens
gagcccataaaaacc

SEQ ID NO: 806538 - DNA, 15 bp, Homo sapiens
agcccataaaaaccc

SEQ ID NO: 806539 - DNA, 15 bp, Homo sapiens
gcccataaaaaccct

SEQ ID NO: 806540 - DNA, 15 bp, Homo sapiens
cccataaaaaccctg

SEQ ID NO: 806541 - DNA, 15 bp, Homo sapiens
ccataaaaaccctgg

SEQ ID NO: 806542 - DNA, 15 bp, Homo sapiens
cataaaaaccctgga

SEQ ID NO: 806543 - DNA, 15 bp, Homo sapiens
ataaaaaccctggac

SEQ ID NO: 806544 - DNA, 15 bp, Homo sapiens
taaaaaccctggact

SEQ ID NO: 806545 - DNA, 15 bp, Homo sapiens
aaaaaccctggactc

SEQ ID NO: 806546 - DNA, 15 bp, Homo sapiens
aaaaccctggactca

SEQ ID NO: 806547 - DNA, 15 bp, Homo sapiens
aaaccctggactcag

SEQ ID NO: 806548 - DNA, 15 bp, Homo sapiens
aaccctggactcagc

SEQ ID NO: 806549 - DNA, 15 bp, Homo sapiens
accctggactcagcc

SEQ ID NO: 806550 - DNA, 15 bp, Homo sapiens
ccctggactcagcca

SEQ ID NO: 806551 - DNA, 15 bp, Homo sapiens
cctggactcagccac

SEQ ID NO: 806552 - DNA, 15 bp, Homo sapiens
ctggactcagccaca

SEQ ID NO: 806553 - DNA, 15 bp, Homo sapiens
tggactcagccacac

SEQ ID NO: 806554 - DNA, 15 bp, Homo sapiens
ggactcagccacact

SEQ ID NO: 806555 - DNA, 15 bp, Homo sapiens
gactcagccacactg

SEQ ID NO: 806556 - DNA, 15 bp, Homo sapiens
actcagccacactgg

SEQ ID NO: 806557 - DNA, 15 bp, Homo sapiens
ctcagccacactggg

SEQ ID NO: 806558 - DNA, 15 bp, Homo sapiens
tcagccacactggga

SEQ ID NO: 806559 - DNA, 15 bp, Homo sapiens
cagccacactgggac

SEQ ID NO: 806560 - DNA, 15 bp, Homo sapiens
agccacactgggaca

SEQ ID NO: 806561 - DNA, 15 bp, Homo sapiens
gccacactgggacac

SEQ ID NO: 806562 - DNA, 15 bp, Homo sapiens
ccacactgggacaca

SEQ ID NO: 806563 - DNA, 15 bp, Homo sapiens
cacactgggacacag

SEQ ID NO: 806564 - DNA, 15 bp, Homo sapiens
acactgggacacaga

SEQ ID NO: 806565 - DNA, 15 bp, Homo sapiens
cactgggacacagag

SEQ ID NO: 806566 - DNA, 15 bp, Homo sapiens
actgggacacagaga

SEQ ID NO: 806567 - DNA, 15 bp, Homo sapiens
ctgggacacagagac

SEQ ID NO: 806568 - DNA, 15 bp, Homo sapiens
tgggacacagagact

SEQ ID NO: 806569 - DNA, 15 bp, Homo sapiens
gggacacagagacta

SEQ ID NO: 806570 - DNA, 15 bp, Homo sapiens
ggacacagagactac

SEQ ID NO: 806571 - DNA, 15 bp, Homo sapiens
gacacagagactacc

SEQ ID NO: 806572 - DNA, 15 bp, Homo sapiens
acacagagactacct

SEQ ID NO: 806573 - DNA, 15 bp, Homo sapiens
cacagagactacctg

SEQ ID NO: 806574 - DNA, 15 bp, Homo sapiens
acagagactacctga

SEQ ID NO: 806575 - DNA, 15 bp, Homo sapiens
cagagactacctgac

SEQ ID NO: 806576 - DNA, 15 bp, Homo sapiens
agagactacctgact

SEQ ID NO: 806577 - DNA, 15 bp, Homo sapiens
gagactacctgactt

SEQ ID NO: 806578 - DNA, 15 bp, Homo sapiens
agactacctgacttt

SEQ ID NO: 806579 - DNA, 15 bp, Homo sapiens
gactacctgactttg

SEQ ID NO: 806580 - DNA, 15 bp, Homo sapiens
actacctgactttgg

SEQ ID NO: 806581 - DNA, 15 bp, Homo sapiens
ctacctgactttggg

SEQ ID NO: 806582 - DNA, 15 bp, Homo sapiens
tacctgactttgggt

SEQ ID NO: 806583 - DNA, 15 bp, Homo sapiens
acctgactttgggtg

SEQ ID NO: 806584 - DNA, 15 bp, Homo sapiens
cctgactttgggtgg

SEQ ID NO: 806585 - DNA, 15 bp, Homo sapiens
ctgactttgggtggt

SEQ ID NO: 806586 - DNA, 15 bp, Homo sapiens
tgactttgggtggta

SEQ ID NO: 806587 - DNA, 15 bp, Homo sapiens
gactttgggtggtag

SEQ ID NO: 806588 - DNA, 15 bp, Homo sapiens
actttgggtggtaga

SEQ ID NO: 806589 - DNA, 15 bp, Homo sapiens
ctttgggtggtagac

SEQ ID NO: 806590 - DNA, 15 bp, Homo sapiens
tttgggtggtagaca

SEQ ID NO: 806591 - DNA, 15 bp, Homo sapiens
ttgggtggtagacaa

SEQ ID NO: 806592 - DNA, 15 bp, Homo sapiens
tgggtggtagacaat

SEQ ID NO: 806593 - DNA, 15 bp, Homo sapiens
gggtggtagacaatt

SEQ ID NO: 806594 - DNA, 15 bp, Homo sapiens
ggtggtagacaattc

SEQ ID NO: 806595 - DNA, 15 bp, Homo sapiens
gtggtagacaattct

SEQ ID NO: 806596 - DNA, 15 bp, Homo sapiens
tggtagacaattctc

SEQ ID NO: 806597 - DNA, 15 bp, Homo sapiens
ggtagacaattctca

SEQ ID NO: 806598 - DNA, 15 bp, Homo sapiens
gtagacaattctcac

SEQ ID NO: 806599 - DNA, 15 bp, Homo sapiens
tagacaattctcacg

SEQ ID NO: 806600 - DNA, 15 bp, Homo sapiens
agacaattctcacgt

SEQ ID NO: 806601 - DNA, 15 bp, Homo sapiens
gacaattctcacgtc

SEQ ID NO: 806602 - DNA, 15 bp, Homo sapiens
acaattctcacgtcc

SEQ ID NO: 806603 - DNA, 15 bp, Homo sapiens
caattctcacgtccc

SEQ ID NO: 806604 - DNA, 15 bp, Homo sapiens
aattctcacgtcccc

SEQ ID NO: 806605 - DNA, 15 bp, Homo sapiens
attctcacgtcccct

SEQ ID NO: 806606 - DNA, 15 bp, Homo sapiens
ttctcacgtcccctc

SEQ ID NO: 806607 - DNA, 15 bp, Homo sapiens
tctcacgtcccctct

SEQ ID NO: 806608 - DNA, 15 bp, Homo sapiens
ctcacgtcccctctc

SEQ ID NO: 806609 - DNA, 15 bp, Homo sapiens
tcacgtcccctctct

SEQ ID NO: 806610 - DNA, 15 bp, Homo sapiens
cacgtcccctctctg

SEQ ID NO: 806611 - DNA, 15 bp, Homo sapiens
acgtcccctctctgc

SEQ ID NO: 806612 - DNA, 15 bp, Homo sapiens
cgtcccctctctgct

SEQ ID NO: 806613 - DNA, 15 bp, Homo sapiens
gtcccctctctgctg

SEQ ID NO: 806614 - DNA, 15 bp, Homo sapiens
tcccctctctgctga

SEQ ID NO: 806615 - DNA, 15 bp, Homo sapiens
cccctctctgctgac

SEQ ID NO: 806616 - DNA, 15 bp, Homo sapiens
ccctctctgctgaca

SEQ ID NO: 806617 - DNA, 15 bp, Homo sapiens
cctctctgctgacag

SEQ ID NO: 806618 - DNA, 15 bp, Homo sapiens
ctctctgctgacagc

SEQ ID NO: 806619 - DNA, 15 bp, Homo sapiens
tctctgctgacagct

SEQ ID NO: 806620 - DNA, 15 bp, Homo sapiens
ctctgctgacagctg

SEQ ID NO: 806621 - DNA, 15 bp, Homo sapiens
tctgctgacagctgt

SEQ ID NO: 806622 - DNA, 15 bp, Homo sapiens
ctgctgacagctgtt

SEQ ID NO: 806623 - DNA, 15 bp, Homo sapiens
tgctgacagctgttt

SEQ ID NO: 806624 - DNA, 15 bp, Homo sapiens
gctgacagctgtttc

SEQ ID NO: 806625 - DNA, 15 bp, Homo sapiens
ctgacagctgtttca

SEQ ID NO: 806626 - DNA, 15 bp, Homo sapiens
tgacagctgtttcat

SEQ ID NO: 806627 - DNA, 15 bp, Homo sapiens
gacagctgtttcatc

SEQ ID NO: 806628 - DNA, 15 bp, Homo sapiens
acagctgtttcatca

SEQ ID NO: 806629 - DNA, 15 bp, Homo sapiens
cagctgtttcatcag

SEQ ID NO: 806630 - DNA, 15 bp, Homo sapiens
agctgtttcatcagt

SEQ ID NO: 806631 - DNA, 15 bp, Homo sapiens
gctgtttcatcagtt

SEQ ID NO: 806632 - DNA, 15 bp, Homo sapiens
ctgtttcatcagtta

SEQ ID NO: 806633 - DNA, 15 bp, Homo sapiens
tgtttcatcagttaa

SEQ ID NO: 806634 - DNA, 15 bp, Homo sapiens
gtttcatcagttaat

SEQ ID NO: 806635 - DNA, 15 bp, Homo sapiens
tttcatcagttaata

SEQ ID NO: 806636 - DNA, 15 bp, Homo sapiens
ttcatcagttaataa

SEQ ID NO: 806637 - DNA, 15 bp, Homo sapiens
tcatcagttaataaa

SEQ ID NO: 806638 - DNA, 15 bp, Homo sapiens
catcagttaataaaa

SEQ ID NO: 806639 - DNA, 15 bp, Homo sapiens
atcagttaataaaac

SEQ ID NO: 806640 - DNA, 15 bp, Homo sapiens
tcagttaataaaact

SEQ ID NO: 806641 - DNA, 15 bp, Homo sapiens
cagttaataaaactt

SEQ ID NO: 806642 - DNA, 15 bp, Homo sapiens
agttaataaaacttt

SEQ ID NO: 806643 - DNA, 15 bp, Homo sapiens
gttaataaaactttt

SEQ ID NO: 806644 - DNA, 15 bp, Homo sapiens
ttaataaaacttttc

SEQ ID NO: 806645 - DNA, 15 bp, Homo sapiens
taataaaacttttca

SEQ ID NO: 806646 - DNA, 15 bp, Homo sapiens
aataaaacttttcac

SEQ ID NO: 806647 - DNA, 15 bp, Homo sapiens
ataaaacttttcacc

SEQ ID NO: 806648 - DNA, 15 bp, Homo sapiens
taaaacttttcacct

SEQ ID NO: 806649 - DNA, 15 bp, Homo sapiens
aaaacttttcacctt

SEQ ID NO: 806650 - DNA, 15 bp, Homo sapiens
aaacttttcaccttg

SEQ ID NO: 806651 - DNA, 15 bp, Homo sapiens
aacttttcaccttgc

SEQ ID NO: 806652 - DNA, 15 bp, Homo sapiens
acttttcaccttgct

SEQ ID NO: 806653 - DNA, 15 bp, Homo sapiens
cttttcaccttgctc

SEQ ID NO: 806654 - DNA, 15 bp, Homo sapiens
ttttcaccttgctca

SEQ ID NO: 806655 - DNA, 15 bp, Homo sapiens
tttcaccttgctcac

SEQ ID NO: 806656 - DNA, 15 bp, Homo sapiens
ttcaccttgctcacc

SEQ ID NO: 806657 - DNA, 15 bp, Homo sapiens
tcaccttgctcaccc

SEQ ID NO: 806658 - DNA, 15 bp, Homo sapiens
caccttgctcaccca

SEQ ID NO: 806659 - DNA, 15 bp, Homo sapiens
accttgctcacccac

SEQ ID NO: 806660 - DNA, 15 bp, Homo sapiens
ccttgctcacccact

SEQ ID NO: 806661 - DNA, 15 bp, Homo sapiens
cttgctcacccactg

SEQ ID NO: 806662 - DNA, 15 bp, Homo sapiens
ttgctcacccactgg

SEQ ID NO: 806663 - DNA, 15 bp, Homo sapiens
tgctcacccactggc

SEQ ID NO: 806664 - DNA, 15 bp, Homo sapiens
gctcacccactggct

SEQ ID NO: 806665 - DNA, 15 bp, Homo sapiens
ctcacccactggctg

SEQ ID NO: 806666 - DNA, 15 bp, Homo sapiens
tcacccactggctgg

SEQ ID NO: 806667 - DNA, 15 bp, Homo sapiens
cacccactggctggc

SEQ ID NO: 806668 - DNA, 15 bp, Homo sapiens
acccactggctggca

SEQ ID NO: 806669 - DNA, 15 bp, Homo sapiens
cccactggctggcag

SEQ ID NO: 806670 - DNA, 15 bp, Homo sapiens
ccactggctggcagc

SEQ ID NO: 806671 - DNA, 15 bp, Homo sapiens
cactggctggcagca

SEQ ID NO: 806672 - DNA, 15 bp, Homo sapiens
actggctggcagcat

SEQ ID NO: 806673 - DNA, 15 bp, Homo sapiens
ctggctggcagcata

SEQ ID NO: 806674 - DNA, 15 bp, Homo sapiens
tggctggcagcataa

SEQ ID NO: 806675 - DNA, 15 bp, Homo sapiens
ggctggcagcataac

SEQ ID NO: 806676 - DNA, 15 bp, Homo sapiens
gctggcagcataacc

SEQ ID NO: 806677 - DNA, 15 bp, Homo sapiens
ctggcagcataacct

SEQ ID NO: 806678 - DNA, 15 bp, Homo sapiens
tggcagcataacctc

SEQ ID NO: 806679 - DNA, 15 bp, Homo sapiens
ggcagcataacctca

SEQ ID NO: 806680 - DNA, 15 bp, Homo sapiens
gcagcataacctcat

SEQ ID NO: 806681 - DNA, 15 bp, Homo sapiens
cagcataacctcatt

SEQ ID NO: 806682 - DNA, 15 bp, Homo sapiens
agcataacctcattc

SEQ ID NO: 806683 - DNA, 15 bp, Homo sapiens
gcataacctcattct

SEQ ID NO: 806684 - DNA, 15 bp, Homo sapiens
cataacctcattctt

SEQ ID NO: 806685 - DNA, 15 bp, Homo sapiens
ataacctcattcttt

SEQ ID NO: 806686 - DNA, 15 bp, Homo sapiens
taacctcattctttt

SEQ ID NO: 806687 - DNA, 15 bp, Homo sapiens
aacctcattcttttt

SEQ ID NO: 806688 - DNA, 15 bp, Homo sapiens
acctcattctttttg

SEQ ID NO: 806689 - DNA, 15 bp, Homo sapiens
cctcattctttttga

SEQ ID NO: 806690 - DNA, 15 bp, Homo sapiens
ctcattctttttgaa

SEQ ID NO: 806691 - DNA, 15 bp, Homo sapiens
tcattctttttgaat

SEQ ID NO: 806692 - DNA, 15 bp, Homo sapiens
cattctttttgaatg

SEQ ID NO: 806693 - DNA, 15 bp, Homo sapiens
attctttttgaatgt

SEQ ID NO: 806694 - DNA, 15 bp, Homo sapiens
ttctttttgaatgtg

SEQ ID NO: 806695 - DNA, 15 bp, Homo sapiens
tctttttgaatgtgg

SEQ ID NO: 806696 - DNA, 15 bp, Homo sapiens
ctttttgaatgtggg

SEQ ID NO: 806697 - DNA, 15 bp, Homo sapiens
tttttgaatgtggga

SEQ ID NO: 806698 - DNA, 15 bp, Homo sapiens
ttttgaatgtgggac

SEQ ID NO: 806699 - DNA, 15 bp, Homo sapiens
tttgaatgtgggaca

SEQ ID NO: 806700 - DNA, 15 bp, Homo sapiens
ttgaatgtgggacaa

SEQ ID NO: 806701 - DNA, 15 bp, Homo sapiens
tgaatgtgggacaag

SEQ ID NO: 806702 - DNA, 15 bp, Homo sapiens
gaatgtgggacaaga

SEQ ID NO: 806703 - DNA, 15 bp, Homo sapiens
aatgtgggacaagaa

SEQ ID NO: 806704 - DNA, 15 bp, Homo sapiens
atgtgggacaagaaa

SEQ ID NO: 806705 - DNA, 15 bp, Homo sapiens
tgtgggacaagaaat

SEQ ID NO: 806706 - DNA, 15 bp, Homo sapiens
gtgggacaagaaatt

SEQ ID NO: 806707 - DNA, 15 bp, Homo sapiens
tgggacaagaaattg

SEQ ID NO: 806708 - DNA, 15 bp, Homo sapiens
gggacaagaaattgg

SEQ ID NO: 806709 - DNA, 15 bp, Homo sapiens
ggacaagaaattggg

SEQ ID NO: 806710 - DNA, 15 bp, Homo sapiens
gacaagaaattggga

SEQ ID NO: 806711 - DNA, 15 bp, Homo sapiens
acaagaaattgggac

SEQ ID NO: 806712 - DNA, 15 bp, Homo sapiens
caagaaattgggacc

SEQ ID NO: 806713 - DNA, 15 bp, Homo sapiens
aagaaattgggaccc

SEQ ID NO: 806714 - DNA, 15 bp, Homo sapiens
agaaattgggaccct

SEQ ID NO: 806715 - DNA, 15 bp, Homo sapiens
gaaattgggaccctg

SEQ ID NO: 806716 - DNA, 15 bp, Homo sapiens
aaattgggaccctgg

SEQ ID NO: 806717 - DNA, 15 bp, Homo sapiens
aattgggaccctgga

SEQ ID NO: 806718 - DNA, 15 bp, Homo sapiens
attgggaccctggag

SEQ ID NO: 806719 - DNA, 15 bp, Homo sapiens
ttgggaccctggaga

SEQ ID NO: 806720 - DNA, 15 bp, Homo sapiens
tgggaccctggagaa

SEQ ID NO: 806721 - DNA, 15 bp, Homo sapiens
gggaccctggagaat

SEQ ID NO: 806722 - DNA, 15 bp, Homo sapiens
ggaccctggagaatg

SEQ ID NO: 806723 - DNA, 15 bp, Homo sapiens
gaccctggagaatgt

SEQ ID NO: 806724 - DNA, 15 bp, Homo sapiens
accctggagaatgtg

SEQ ID NO: 806725 - DNA, 15 bp, Homo sapiens
ccctggagaatgtgg

SEQ ID NO: 806726 - DNA, 15 bp, Homo sapiens
cctggagaatgtggg

SEQ ID NO: 806727 - DNA, 15 bp, Homo sapiens
ctggagaatgtgggg

SEQ ID NO: 806728 - DNA, 15 bp, Homo sapiens
tggagaatgtggggg

SEQ ID NO: 806729 - DNA, 15 bp, Homo sapiens
ggagaatgtgggggc

SEQ ID NO: 806730 - DNA, 15 bp, Homo sapiens
gagaatgtgggggct

SEQ ID NO: 806731 - DNA, 15 bp, Homo sapiens
agaatgtgggggctg

SEQ ID NO: 806732 - DNA, 15 bp, Homo sapiens
gaatgtgggggctga

SEQ ID NO: 806733 - DNA, 15 bp, Homo sapiens
aatgtgggggctgaa

SEQ ID NO: 806734 - DNA, 15 bp, Homo sapiens
atgtgggggctgaac

SEQ ID NO: 806735 - DNA, 15 bp, Homo sapiens
tgtgggggctgaaca

SEQ ID NO: 806736 - DNA, 15 bp, Homo sapiens
gtgggggctgaacaa

SEQ ID NO: 806737 - DNA, 15 bp, Homo sapiens
tgggggctgaacaaa

SEQ ID NO: 806738 - DNA, 15 bp, Homo sapiens
gggggctgaacaaac

SEQ ID NO: 806739 - DNA, 15 bp, Homo sapiens
ggggctgaacaaaca

SEQ ID NO: 806740 - DNA, 15 bp, Homo sapiens
gggctgaacaaacag

SEQ ID NO: 806741 - DNA, 15 bp, Homo sapiens
ggctgaacaaacagt

SEQ ID NO: 806742 - DNA, 15 bp, Homo sapiens
gctgaacaaacagtc

SEQ ID NO: 806743 - DNA, 15 bp, Homo sapiens
ctgaacaaacagtca

SEQ ID NO: 806744 - DNA, 15 bp, Homo sapiens
tgaacaaacagtcat

SEQ ID NO: 806745 - DNA, 15 bp, Homo sapiens
gaacaaacagtcatg

SEQ ID NO: 806746 - DNA, 15 bp, Homo sapiens
aacaaacagtcatgg

SEQ ID NO: 806747 - DNA, 15 bp, Homo sapiens
acaaacagtcatggt

SEQ ID NO: 806748 - DNA, 15 bp, Homo sapiens
caaacagtcatggta

SEQ ID NO: 806749 - DNA, 15 bp, Homo sapiens
aaacagtcatggtag

SEQ ID NO: 806750 - DNA, 15 bp, Homo sapiens
aacagtcatggtagc

SEQ ID NO: 806751 - DNA, 15 bp, Homo sapiens
acagtcatggtagct

SEQ ID NO: 806752 - DNA, 15 bp, Homo sapiens
cagtcatggtagctg

SEQ ID NO: 806753 - DNA, 15 bp, Homo sapiens
agtcatggtagctgt

SEQ ID NO: 806754 - DNA, 15 bp, Homo sapiens
gtcatggtagctgtg

SEQ ID NO: 806755 - DNA, 15 bp, Homo sapiens
tcatggtagctgtga

SEQ ID NO: 806756 - DNA, 15 bp, Homo sapiens
catggtagctgtgag

SEQ ID NO: 806757 - DNA, 15 bp, Homo sapiens
atggtagctgtgaga

SEQ ID NO: 806758 - DNA, 15 bp, Homo sapiens
tggtagctgtgagat

SEQ ID NO: 806759 - DNA, 15 bp, Homo sapiens
ggtagctgtgagatc

SEQ ID NO: 806760 - DNA, 15 bp, Homo sapiens
gtagctgtgagatct

SEQ ID NO: 806761 - DNA, 15 bp, Homo sapiens
tagctgtgagatctg

SEQ ID NO: 806762 - DNA, 15 bp, Homo sapiens
agctgtgagatctgc

SEQ ID NO: 806763 - DNA, 15 bp, Homo sapiens
gctgtgagatctgca

SEQ ID NO: 806764 - DNA, 15 bp, Homo sapiens
ctgtgagatctgcac

SEQ ID NO: 806765 - DNA, 15 bp, Homo sapiens
tgtgagatctgcacc

SEQ ID NO: 806766 - DNA, 15 bp, Homo sapiens
gtgagatctgcaccg

SEQ ID NO: 806767 - DNA, 15 bp, Homo sapiens
tgagatctgcaccgg

SEQ ID NO: 806768 - DNA, 15 bp, Homo sapiens
gagatctgcaccgga

SEQ ID NO: 806769 - DNA, 15 bp, Homo sapiens
agatctgcaccggag

SEQ ID NO: 806770 - DNA, 15 bp, Homo sapiens
gatctgcaccggagt

SEQ ID NO: 806771 - DNA, 15 bp, Homo sapiens
atctgcaccggagta

SEQ ID NO: 806772 - DNA, 15 bp, Homo sapiens
tctgcaccggagtag

SEQ ID NO: 806773 - DNA, 15 bp, Homo sapiens
ctgcaccggagtagt

SEQ ID NO: 806774 - DNA, 15 bp, Homo sapiens
tgcaccggagtagtc

SEQ ID NO: 806775 - DNA, 15 bp, Homo sapiens
gcaccggagtagtca

SEQ ID NO: 806776 - DNA, 15 bp, Homo sapiens
caccggagtagtcag

SEQ ID NO: 806777 - DNA, 15 bp, Homo sapiens
accggagtagtcagg

SEQ ID NO: 806778 - DNA, 15 bp, Homo sapiens
ccggagtagtcaggg

SEQ ID NO: 806779 - DNA, 15 bp, Homo sapiens
cggagtagtcagggt

SEQ ID NO: 806780 - DNA, 15 bp, Homo sapiens
ggagtagtcagggtg

SEQ ID NO: 806781 - DNA, 15 bp, Homo sapiens
gagtagtcagggtgt

SEQ ID NO: 806782 - DNA, 15 bp, Homo sapiens
agtagtcagggtgtc

SEQ ID NO: 806783 - DNA, 15 bp, Homo sapiens
gtagtcagggtgtct

SEQ ID NO: 806784 - DNA, 15 bp, Homo sapiens
tagtcagggtgtctc

SEQ ID NO: 806785 - DNA, 15 bp, Homo sapiens
agtcagggtgtctcc

SEQ ID NO: 806786 - DNA, 15 bp, Homo sapiens
gtcagggtgtctcct

SEQ ID NO: 806787 - DNA, 15 bp, Homo sapiens
tcagggtgtctccta

SEQ ID NO: 806788 - DNA, 15 bp, Homo sapiens
cagggtgtctcctac

SEQ ID NO: 806789 - DNA, 15 bp, Homo sapiens
agggtgtctcctaca

SEQ ID NO: 806790 - DNA, 15 bp, Homo sapiens
gggtgtctcctacag

SEQ ID NO: 806791 - DNA, 15 bp, Homo sapiens
ggtgtctcctacagt

SEQ ID NO: 806792 - DNA, 15 bp, Homo sapiens
gtgtctcctacagtg

SEQ ID NO: 806793 - DNA, 15 bp, Homo sapiens
tgtctcctacagtgg

SEQ ID NO: 806794 - DNA, 15 bp, Homo sapiens
gtctcctacagtggg

SEQ ID NO: 806795 - DNA, 15 bp, Homo sapiens
tctcctacagtgggc

SEQ ID NO: 806796 - DNA, 15 bp, Homo sapiens
ctcctacagtgggcc

SEQ ID NO: 806797 - DNA, 15 bp, Homo sapiens
tcctacagtgggcct

SEQ ID NO: 806798 - DNA, 15 bp, Homo sapiens
cctacagtgggcctg

SEQ ID NO: 806799 - DNA, 15 bp, Homo sapiens
ctacagtgggcctgg

SEQ ID NO: 806800 - DNA, 15 bp, Homo sapiens
tacagtgggcctgga

SEQ ID NO: 806801 - DNA, 15 bp, Homo sapiens
acagtgggcctggac

SEQ ID NO: 806802 - DNA, 15 bp, Homo sapiens
cagtgggcctggacc

SEQ ID NO: 806803 - DNA, 15 bp, Homo sapiens
agtgggcctggaccc

SEQ ID NO: 806804 - DNA, 15 bp, Homo sapiens
gtgggcctggacccg

SEQ ID NO: 806805 - DNA, 15 bp, Homo sapiens
tgggcctggacccga

SEQ ID NO: 806806 - DNA, 15 bp, Homo sapiens
gggcctggacccgag

SEQ ID NO: 806807 - DNA, 15 bp, Homo sapiens
ggcctggacccgagc

SEQ ID NO: 806808 - DNA, 15 bp, Homo sapiens
gcctggacccgagca

SEQ ID NO: 806809 - DNA, 15 bp, Homo sapiens
cctggacccgagcaa

SEQ ID NO: 806810 - DNA, 15 bp, Homo sapiens
ctggacccgagcaat

SEQ ID NO: 806811 - DNA, 15 bp, Homo sapiens
tggacccgagcaatg

SEQ ID NO: 806812 - DNA, 15 bp, Homo sapiens
ggacccgagcaatgc

SEQ ID NO: 806813 - DNA, 15 bp, Homo sapiens
gacccgagcaatgct

SEQ ID NO: 806814 - DNA, 15 bp, Homo sapiens
acccgagcaatgctt

SEQ ID NO: 806815 - DNA, 15 bp, Homo sapiens
cccgagcaatgcttg

SEQ ID NO: 806816 - DNA, 15 bp, Homo sapiens
ccgagcaatgcttgt

SEQ ID NO: 806817 - DNA, 15 bp, Homo sapiens
cgagcaatgcttgta

SEQ ID NO: 806818 - DNA, 15 bp, Homo sapiens
gagcaatgcttgtag

SEQ ID NO: 806819 - DNA, 15 bp, Homo sapiens
agcaatgcttgtagg

SEQ ID NO: 806820 - DNA, 15 bp, Homo sapiens
gcaatgcttgtaggg

SEQ ID NO: 806821 - DNA, 15 bp, Homo sapiens
caatgcttgtagggg

SEQ ID NO: 806822 - DNA, 15 bp, Homo sapiens
aatgcttgtaggggg

SEQ ID NO: 806823 - DNA, 15 bp, Homo sapiens
atgcttgtaggggga

SEQ ID NO: 806824 - DNA, 15 bp, Homo sapiens
tgcttgtagggggaa

SEQ ID NO: 806825 - DNA, 15 bp, Homo sapiens
gcttgtagggggaat

SEQ ID NO: 806826 - DNA, 15 bp, Homo sapiens
cttgtagggggaatt

SEQ ID NO: 806827 - DNA, 15 bp, Homo sapiens
ttgtagggggaattg

SEQ ID NO: 806828 - DNA, 15 bp, Homo sapiens
tgtagggggaattgg

SEQ ID NO: 806829 - DNA, 15 bp, Homo sapiens
gtagggggaattggc

SEQ ID NO: 806830 - DNA, 15 bp, Homo sapiens
tagggggaattggca

SEQ ID NO: 806831 - DNA, 15 bp, Homo sapiens
agggggaattggcag

SEQ ID NO: 806832 - DNA, 15 bp, Homo sapiens
gggggaattggcagc

SEQ ID NO: 806833 - DNA, 15 bp, Homo sapiens
ggggaattggcagct

SEQ ID NO: 806834 - DNA, 15 bp, Homo sapiens
gggaattggcagctg

SEQ ID NO: 806835 - DNA, 15 bp, Homo sapiens
ggaattggcagctgc

SEQ ID NO: 806836 - DNA, 15 bp, Homo sapiens
gaattggcagctgca

SEQ ID NO: 806837 - DNA, 15 bp, Homo sapiens
aattggcagctgcaa

SEQ ID NO: 806838 - DNA, 15 bp, Homo sapiens
attggcagctgcaag

SEQ ID NO: 806839 - DNA, 15 bp, Homo sapiens
ttggcagctgcaagt

SEQ ID NO: 806840 - DNA, 15 bp, Homo sapiens
tggcagctgcaagtc

SEQ ID NO: 806841 - DNA, 15 bp, Homo sapiens
ggcagctgcaagtct

SEQ ID NO: 806842 - DNA, 15 bp, Homo sapiens
gcagctgcaagtctg

SEQ ID NO: 806843 - DNA, 15 bp, Homo sapiens
cagctgcaagtctgt

SEQ ID NO: 806844 - DNA, 15 bp, Homo sapiens
agctgcaagtctgtg

SEQ ID NO: 806845 - DNA, 15 bp, Homo sapiens
gctgcaagtctgtgg

SEQ ID NO: 806846 - DNA, 15 bp, Homo sapiens
ctgcaagtctgtggc

SEQ ID NO: 806847 - DNA, 15 bp, Homo sapiens
tgcaagtctgtggcc

SEQ ID NO: 806848 - DNA, 15 bp, Homo sapiens
gcaagtctgtggccc

SEQ ID NO: 806849 - DNA, 15 bp, Homo sapiens
caagtctgtggccca

SEQ ID NO: 806850 - DNA, 15 bp, Homo sapiens
aagtctgtggcccac

SEQ ID NO: 806851 - DNA, 15 bp, Homo sapiens
agtctgtggcccaca

SEQ ID NO: 806852 - DNA, 15 bp, Homo sapiens
gtctgtggcccacag

SEQ ID NO: 806853 - DNA, 15 bp, Homo sapiens
tctgtggcccacaga

SEQ ID NO: 806854 - DNA, 15 bp, Homo sapiens
ctgtggcccacagag

SEQ ID NO: 806855 - DNA, 15 bp, Homo sapiens
tgtggcccacagagt

SEQ ID NO: 806856 - DNA, 15 bp, Homo sapiens
gtggcccacagagtg

SEQ ID NO: 806857 - DNA, 15 bp, Homo sapiens
tggcccacagagtga

SEQ ID NO: 806858 - DNA, 15 bp, Homo sapiens
ggcccacagagtgac

SEQ ID NO: 806859 - DNA, 15 bp, Homo sapiens
gcccacagagtgacc

SEQ ID NO: 806860 - DNA, 15 bp, Homo sapiens
cccacagagtgacca

SEQ ID NO: 806861 - DNA, 15 bp, Homo sapiens
ccacagagtgaccaa

SEQ ID NO: 806862 - DNA, 15 bp, Homo sapiens
cacagagtgaccaag

SEQ ID NO: 806863 - DNA, 15 bp, Homo sapiens
acagagtgaccaaga

SEQ ID NO: 806864 - DNA, 15 bp, Homo sapiens
cagagtgaccaagaa

SEQ ID NO: 806865 - DNA, 15 bp, Homo sapiens
agagtgaccaagaaa

SEQ ID NO: 806866 - DNA, 15 bp, Homo sapiens
gagtgaccaagaaaa

SEQ ID NO: 806867 - DNA, 15 bp, Homo sapiens
agtgaccaagaaaaa

SEQ ID NO: 806868 - DNA, 15 bp, Homo sapiens
gtgaccaagaaaaac

SEQ ID NO: 806869 - DNA, 15 bp, Homo sapiens
tgaccaagaaaaact

SEQ ID NO: 806870 - DNA, 15 bp, Homo sapiens
gaccaagaaaaactg

SEQ ID NO: 806871 - DNA, 15 bp, Homo sapiens
accaagaaaaactgc

SEQ ID NO: 806872 - DNA, 15 bp, Homo sapiens
ccaagaaaaactgca

SEQ ID NO: 806873 - DNA, 15 bp, Homo sapiens
caagaaaaactgcat

SEQ ID NO: 806874 - DNA, 15 bp, Homo sapiens
aagaaaaactgcatc

SEQ ID NO: 806875 - DNA, 15 bp, Homo sapiens
agaaaaactgcatca

SEQ ID NO: 806876 - DNA, 15 bp, Homo sapiens
gaaaaactgcatcat

SEQ ID NO: 806877 - DNA, 15 bp, Homo sapiens
aaaaactgcatcatc

SEQ ID NO: 806878 - DNA, 15 bp, Homo sapiens
aaaactgcatcatca

SEQ ID NO: 806879 - DNA, 15 bp, Homo sapiens
aaactgcatcatcag

SEQ ID NO: 806880 - DNA, 15 bp, Homo sapiens
aactgcatcatcagg

SEQ ID NO: 806881 - DNA, 15 bp, Homo sapiens
actgcatcatcagga

SEQ ID NO: 806882 - DNA, 15 bp, Homo sapiens
ctgcatcatcaggac

SEQ ID NO: 806883 - DNA, 15 bp, Homo sapiens
tgcatcatcaggact

SEQ ID NO: 806884 - DNA, 15 bp, Homo sapiens
gcatcatcaggactg

SEQ ID NO: 806885 - DNA, 15 bp, Homo sapiens
catcatcaggactgg

SEQ ID NO: 806886 - DNA, 15 bp, Homo sapiens
atcatcaggactggc

SEQ ID NO: 806887 - DNA, 15 bp, Homo sapiens
tcatcaggactggcc

SEQ ID NO: 806888 - DNA, 15 bp, Homo sapiens
catcaggactggcca

SEQ ID NO: 806889 - DNA, 15 bp, Homo sapiens
atcaggactggccac

SEQ ID NO: 806890 - DNA, 15 bp, Homo sapiens
tcaggactggccaca

SEQ ID NO: 806891 - DNA, 15 bp, Homo sapiens
caggactggccacag

SEQ ID NO: 806892 - DNA, 15 bp, Homo sapiens
aggactggccacagg

SEQ ID NO: 806893 - DNA, 15 bp, Homo sapiens
ggactggccacagga

SEQ ID NO: 806894 - DNA, 15 bp, Homo sapiens
gactggccacaggac

SEQ ID NO: 806895 - DNA, 15 bp, Homo sapiens
actggccacaggaca

SEQ ID NO: 806896 - DNA, 15 bp, Homo sapiens
ctggccacaggacac

SEQ ID NO: 806897 - DNA, 15 bp, Homo sapiens
tggccacaggacacc

SEQ ID NO: 806898 - DNA, 15 bp, Homo sapiens
ggccacaggacacca

SEQ ID NO: 806899 - DNA, 15 bp, Homo sapiens
gccacaggacaccat

SEQ ID NO: 806900 - DNA, 15 bp, Homo sapiens
ccacaggacaccatt

SEQ ID NO: 806901 - DNA, 15 bp, Homo sapiens
cacaggacaccatta

SEQ ID NO: 806902 - DNA, 15 bp, Homo sapiens
acaggacaccattaa

SEQ ID NO: 806903 - DNA, 15 bp, Homo sapiens
caggacaccattaat

SEQ ID NO: 806904 - DNA, 15 bp, Homo sapiens
aggacaccattaatt

SEQ ID NO: 806905 - DNA, 15 bp, Homo sapiens
ggacaccattaatta

SEQ ID NO: 806906 - DNA, 15 bp, Homo sapiens
gacaccattaattaa

SEQ ID NO: 806907 - DNA, 15 bp, Homo sapiens
acaccattaattaag

SEQ ID NO: 806908 - DNA, 15 bp, Homo sapiens
caccattaattaagt

SEQ ID NO: 806909 - DNA, 15 bp, Homo sapiens
accattaattaagtg

SEQ ID NO: 806910 - DNA, 15 bp, Homo sapiens
ccattaattaagtgc

SEQ ID NO: 806911 - DNA, 15 bp, Homo sapiens
cattaattaagtgct

SEQ ID NO: 806912 - DNA, 15 bp, Homo sapiens
attaattaagtgctt

SEQ ID NO: 806913 - DNA, 15 bp, Homo sapiens
ttaattaagtgctta

SEQ ID NO: 806914 - DNA, 15 bp, Homo sapiens
taattaagtgcttaa

SEQ ID NO: 806915 - DNA, 15 bp, Homo sapiens
aattaagtgcttaag

SEQ ID NO: 806916 - DNA, 15 bp, Homo sapiens
attaagtgcttaagg

SEQ ID NO: 806917 - DNA, 15 bp, Homo sapiens
ttaagtgcttaagga

SEQ ID NO: 806918 - DNA, 15 bp, Homo sapiens
taagtgcttaaggag

SEQ ID NO: 806919 - DNA, 15 bp, Homo sapiens
aagtgcttaaggagc

SEQ ID NO: 806920 - DNA, 15 bp, Homo sapiens
agtgcttaaggagca

SEQ ID NO: 806921 - DNA, 15 bp, Homo sapiens
gtgcttaaggagcag

SEQ ID NO: 806922 - DNA, 15 bp, Homo sapiens
tgcttaaggagcagt

SEQ ID NO: 806923 - DNA, 15 bp, Homo sapiens
gcttaaggagcagta

SEQ ID NO: 806924 - DNA, 15 bp, Homo sapiens
cttaaggagcagtat

SEQ ID NO: 806925 - DNA, 15 bp, Homo sapiens
ttaaggagcagtatg

SEQ ID NO: 806926 - DNA, 15 bp, Homo sapiens
taaggagcagtatgg

SEQ ID NO: 806927 - DNA, 15 bp, Homo sapiens
aaggagcagtatggg

SEQ ID NO: 806928 - DNA, 15 bp, Homo sapiens
aggagcagtatgggg

SEQ ID NO: 806929 - DNA, 15 bp, Homo sapiens
ggagcagtatggggg

SEQ ID NO: 806930 - DNA, 15 bp, Homo sapiens
gagcagtatgggggt

SEQ ID NO: 806931 - DNA, 15 bp, Homo sapiens
agcagtatgggggtg

SEQ ID NO: 806932 - DNA, 15 bp, Homo sapiens
gcagtatgggggtgg

SEQ ID NO: 806933 - DNA, 15 bp, Homo sapiens
cagtatgggggtggg

SEQ ID NO: 806934 - DNA, 15 bp, Homo sapiens
agtatgggggtgggc

SEQ ID NO: 806935 - DNA, 15 bp, Homo sapiens
gtatgggggtgggca

SEQ ID NO: 806936 - DNA, 15 bp, Homo sapiens
tatgggggtgggcag

SEQ ID NO: 806937 - DNA, 15 bp, Homo sapiens
atgggggtgggcagc

SEQ ID NO: 806938 - DNA, 15 bp, Homo sapiens
tgggggtgggcagca

SEQ ID NO: 806939 - DNA, 15 bp, Homo sapiens
gggggtgggcagcaa

SEQ ID NO: 806940 - DNA, 15 bp, Homo sapiens
ggggtgggcagcaac

SEQ ID NO: 806941 - DNA, 15 bp, Homo sapiens
gggtgggcagcaacc

SEQ ID NO: 806942 - DNA, 15 bp, Homo sapiens
ggtgggcagcaaccc

SEQ ID NO: 806943 - DNA, 15 bp, Homo sapiens
gtgggcagcaaccca

SEQ ID NO: 806944 - DNA, 15 bp, Homo sapiens
tgggcagcaacccag

SEQ ID NO: 806945 - DNA, 15 bp, Homo sapiens
gggcagcaacccagg

SEQ ID NO: 806946 - DNA, 15 bp, Homo sapiens
ggcagcaacccaggg

SEQ ID NO: 806947 - DNA, 15 bp, Homo sapiens
gcagcaacccaggga

SEQ ID NO: 806948 - DNA, 15 bp, Homo sapiens
cagcaacccagggat

SEQ ID NO: 806949 - DNA, 15 bp, Homo sapiens
agcaacccagggatg

SEQ ID NO: 806950 - DNA, 15 bp, Homo sapiens
gcaacccagggatgc

SEQ ID NO: 806951 - DNA, 15 bp, Homo sapiens
caacccagggatgca

SEQ ID NO: 806952 - DNA, 15 bp, Homo sapiens
aacccagggatgcaa

SEQ ID NO: 806953 - DNA, 15 bp, Homo sapiens
acccagggatgcaaa

SEQ ID NO: 806954 - DNA, 15 bp, Homo sapiens
cccagggatgcaaaa

SEQ ID NO: 806955 - DNA, 15 bp, Homo sapiens
ccagggatgcaaaaa

SEQ ID NO: 806956 - DNA, 15 bp, Homo sapiens
cagggatgcaaaaaa

SEQ ID NO: 806957 - DNA, 15 bp, Homo sapiens
agggatgcaaaaaag

SEQ ID NO: 806958 - DNA, 15 bp, Homo sapiens
gggatgcaaaaaaga

SEQ ID NO: 806959 - DNA, 15 bp, Homo sapiens
ggatgcaaaaaagag

SEQ ID NO: 806960 - DNA, 15 bp, Homo sapiens
gatgcaaaaaagaga

SEQ ID NO: 806961 - DNA, 15 bp, Homo sapiens
atgcaaaaaagagag

SEQ ID NO: 806962 - DNA, 15 bp, Homo sapiens
tgcaaaaaagagagg

SEQ ID NO: 806963 - DNA, 15 bp, Homo sapiens
gcaaaaaagagagga

SEQ ID NO: 806964 - DNA, 15 bp, Homo sapiens
caaaaaagagaggat

SEQ ID NO: 806965 - DNA, 15 bp, Homo sapiens
aaaaaagagaggatt

SEQ ID NO: 806966 - DNA, 15 bp, Homo sapiens
aaaaagagaggattc

SEQ ID NO: 806967 - DNA, 15 bp, Homo sapiens
aaaagagaggattct

SEQ ID NO: 806968 - DNA, 15 bp, Homo sapiens
aaagagaggattctc

SEQ ID NO: 806969 - DNA, 15 bp, Homo sapiens
aagagaggattctca

SEQ ID NO: 806970 - DNA, 15 bp, Homo sapiens
agagaggattctcaa

SEQ ID NO: 806971 - DNA, 15 bp, Homo sapiens
gagaggattctcaac

SEQ ID NO: 806972 - DNA, 15 bp, Homo sapiens
agaggattctcaacc

SEQ ID NO: 806973 - DNA, 15 bp, Homo sapiens
gaggattctcaacca

SEQ ID NO: 806974 - DNA, 15 bp, Homo sapiens
aggattctcaaccaa

SEQ ID NO: 806975 - DNA, 15 bp, Homo sapiens
ggattctcaaccaat

SEQ ID NO: 806976 - DNA, 15 bp, Homo sapiens
gattctcaaccaata

SEQ ID NO: 806977 - DNA, 15 bp, Homo sapiens
attctcaaccaatag

SEQ ID NO: 806978 - DNA, 15 bp, Homo sapiens
ttctcaaccaatagc

SEQ ID NO: 806979 - DNA, 15 bp, Homo sapiens
tctcaaccaatagct

SEQ ID NO: 806980 - DNA, 15 bp, Homo sapiens
ctcaaccaatagctc

SEQ ID NO: 806981 - DNA, 15 bp, Homo sapiens
tcaaccaatagctcc

SEQ ID NO: 806982 - DNA, 15 bp, Homo sapiens
caaccaatagctcct

SEQ ID NO: 806983 - DNA, 15 bp, Homo sapiens
aaccaatagctcctg

SEQ ID NO: 806984 - DNA, 15 bp, Homo sapiens
accaatagctcctgg

SEQ ID NO: 806985 - DNA, 15 bp, Homo sapiens
ccaatagctcctgga

SEQ ID NO: 806986 - DNA, 15 bp, Homo sapiens
caatagctcctggag

SEQ ID NO: 806987 - DNA, 15 bp, Homo sapiens
aatagctcctggagc

SEQ ID NO: 806988 - DNA, 15 bp, Homo sapiens
atagctcctggagct

SEQ ID NO: 806989 - DNA, 15 bp, Homo sapiens
tagctcctggagctc

SEQ ID NO: 806990 - DNA, 15 bp, Homo sapiens
agctcctggagctca

SEQ ID NO: 806991 - DNA, 15 bp, Homo sapiens
gctcctggagctcag

SEQ ID NO: 806992 - DNA, 15 bp, Homo sapiens
ctcctggagctcaga

SEQ ID NO: 806993 - DNA, 15 bp, Homo sapiens
tcctggagctcagag

SEQ ID NO: 806994 - DNA, 15 bp, Homo sapiens
cctggagctcagaga

SEQ ID NO: 806995 - DNA, 15 bp, Homo sapiens
ctggagctcagagaa

SEQ ID NO: 806996 - DNA, 15 bp, Homo sapiens
tggagctcagagaag

SEQ ID NO: 806997 - DNA, 15 bp, Homo sapiens
ggagctcagagaagc

SEQ ID NO: 806998 - DNA, 15 bp, Homo sapiens
gagctcagagaagca

SEQ ID NO: 806999 - DNA, 15 bp, Homo sapiens
agctcagagaagcag

SEQ ID NO: 807000 - DNA, 15 bp, Homo sapiens
gctcagagaagcagc

SEQ ID NO: 807001 - DNA, 15 bp, Homo sapiens
ctcagagaagcagcc

SEQ ID NO: 807002 - DNA, 15 bp, Homo sapiens
tcagagaagcagccc

SEQ ID NO: 807003 - DNA, 15 bp, Homo sapiens
cagagaagcagcccc

SEQ ID NO: 807004 - DNA, 15 bp, Homo sapiens
agagaagcagcccct

SEQ ID NO: 807005 - DNA, 15 bp, Homo sapiens
gagaagcagcccctt

SEQ ID NO: 807006 - DNA, 15 bp, Homo sapiens
agaagcagccccttt

SEQ ID NO: 807007 - DNA, 15 bp, Homo sapiens
gaagcagcccctttc

SEQ ID NO: 807008 - DNA, 15 bp, Homo sapiens
aagcagcccctttcc

SEQ ID NO: 807009 - DNA, 15 bp, Homo sapiens
agcagcccctttccc

SEQ ID NO: 807010 - DNA, 15 bp, Homo sapiens
gcagcccctttccca

SEQ ID NO: 807011 - DNA, 15 bp, Homo sapiens
cagcccctttcccag

SEQ ID NO: 807012 - DNA, 15 bp, Homo sapiens
agcccctttcccagg

SEQ ID NO: 807013 - DNA, 15 bp, Homo sapiens
gcccctttcccaggt

SEQ ID NO: 807014 - DNA, 15 bp, Homo sapiens
cccctttcccaggtc

SEQ ID NO: 807015 - DNA, 15 bp, Homo sapiens
ccctttcccaggtct

SEQ ID NO: 807016 - DNA, 15 bp, Homo sapiens
cctttcccaggtctg

SEQ ID NO: 807017 - DNA, 15 bp, Homo sapiens
ctttcccaggtctgg

SEQ ID NO: 807018 - DNA, 15 bp, Homo sapiens
tttcccaggtctgga

SEQ ID NO: 807019 - DNA, 15 bp, Homo sapiens
ttcccaggtctggat

SEQ ID NO: 807020 - DNA, 15 bp, Homo sapiens
tcccaggtctggatc

SEQ ID NO: 807021 - DNA, 15 bp, Homo sapiens
cccaggtctggatcc

SEQ ID NO: 807022 - DNA, 15 bp, Homo sapiens
ccaggtctggatcca

SEQ ID NO: 807023 - DNA, 15 bp, Homo sapiens
caggtctggatccat

SEQ ID NO: 807024 - DNA, 15 bp, Homo sapiens
aggtctggatccatg

SEQ ID NO: 807025 - DNA, 15 bp, Homo sapiens
ggtctggatccatgg

SEQ ID NO: 807026 - DNA, 15 bp, Homo sapiens
gtctggatccatgga

SEQ ID NO: 807027 - DNA, 15 bp, Homo sapiens
tctggatccatggat

SEQ ID NO: 807028 - DNA, 15 bp, Homo sapiens
ctggatccatggatt

SEQ ID NO: 807029 - DNA, 15 bp, Homo sapiens
tggatccatggattg

SEQ ID NO: 807030 - DNA, 15 bp, Homo sapiens
ggatccatggattgg

SEQ ID NO: 807031 - DNA, 15 bp, Homo sapiens
gatccatggattggg

SEQ ID NO: 807032 - DNA, 15 bp, Homo sapiens
atccatggattggga

SEQ ID NO: 807033 - DNA, 15 bp, Homo sapiens
tccatggattgggag

SEQ ID NO: 807034 - DNA, 15 bp, Homo sapiens
ccatggattgggagc

SEQ ID NO: 807035 - DNA, 15 bp, Homo sapiens
catggattgggagca

SEQ ID NO: 807036 - DNA, 15 bp, Homo sapiens
atggattgggagcaa

SEQ ID NO: 807037 - DNA, 15 bp, Homo sapiens
tggattgggagcaag

SEQ ID NO: 807038 - DNA, 15 bp, Homo sapiens
ggattgggagcaagt

SEQ ID NO: 807039 - DNA, 15 bp, Homo sapiens
gattgggagcaagtt

SEQ ID NO: 807040 - DNA, 15 bp, Homo sapiens
attgggagcaagtta

SEQ ID NO: 807041 - DNA, 15 bp, Homo sapiens
ttgggagcaagttac

SEQ ID NO: 807042 - DNA, 15 bp, Homo sapiens
tgggagcaagttact

SEQ ID NO: 807043 - DNA, 15 bp, Homo sapiens
gggagcaagttactc

SEQ ID NO: 807044 - DNA, 15 bp, Homo sapiens
ggagcaagttactcc

SEQ ID NO: 807045 - DNA, 15 bp, Homo sapiens
gagcaagttactcca

SEQ ID NO: 807046 - DNA, 15 bp, Homo sapiens
agcaagttactccac

SEQ ID NO: 807047 - DNA, 15 bp, Homo sapiens
gcaagttactccacc

SEQ ID NO: 807048 - DNA, 15 bp, Homo sapiens
caagttactccacca

SEQ ID NO: 807049 - DNA, 15 bp, Homo sapiens
aagttactccaccat

SEQ ID NO: 807050 - DNA, 15 bp, Homo sapiens
agttactccaccatt

SEQ ID NO: 807051 - DNA, 15 bp, Homo sapiens
gttactccaccattt

SEQ ID NO: 807052 - DNA, 15 bp, Homo sapiens
ttactccaccatttg

SEQ ID NO: 807053 - DNA, 15 bp, Homo sapiens
tactccaccatttgg

SEQ ID NO: 807054 - DNA, 15 bp, Homo sapiens
actccaccatttggt

SEQ ID NO: 807055 - DNA, 15 bp, Homo sapiens
ctccaccatttggtg

SEQ ID NO: 807056 - DNA, 15 bp, Homo sapiens
tccaccatttggtgg

SEQ ID NO: 807057 - DNA, 15 bp, Homo sapiens
ccaccatttggtgga

SEQ ID NO: 807058 - DNA, 15 bp, Homo sapiens
caccatttggtggaa

SEQ ID NO: 807059 - DNA, 15 bp, Homo sapiens
accatttggtggaag

SEQ ID NO: 807060 - DNA, 15 bp, Homo sapiens
ccatttggtggaagg

SEQ ID NO: 807061 - DNA, 15 bp, Homo sapiens
catttggtggaagga

SEQ ID NO: 807062 - DNA, 15 bp, Homo sapiens
atttggtggaaggaa

SEQ ID NO: 807063 - DNA, 15 bp, Homo sapiens
tttggtggaaggaag

SEQ ID NO: 807064 - DNA, 15 bp, Homo sapiens
ttggtggaaggaagc

SEQ ID NO: 807065 - DNA, 15 bp, Homo sapiens
gtggaaggaagcttg

SEQ ID NO: 807066 - DNA, 15 bp, Homo sapiens
tggaaggaagcttgg

SEQ ID NO: 807067 - DNA, 15 bp, Homo sapiens
ggaaggaagcttgga

SEQ ID NO: 807068 - DNA, 15 bp, Homo sapiens
gaaggaagcttggaa

SEQ ID NO: 807069 - DNA, 15 bp, Homo sapiens
aaggaagcttggaaa

SEQ ID NO: 807070 - DNA, 15 bp, Homo sapiens
aggaagcttggaaat

SEQ ID NO: 807071 - DNA, 15 bp, Homo sapiens
ggaagcttggaaatc

SEQ ID NO: 807072 - DNA, 15 bp, Homo sapiens
gaagcttggaaatca

SEQ ID NO: 807073 - DNA, 15 bp, Homo sapiens
aagcttggaaatcag

SEQ ID NO: 807074 - DNA, 15 bp, Homo sapiens
agcttggaaatcaga

SEQ ID NO: 807075 - DNA, 15 bp, Homo sapiens
gcttggaaatcagag

SEQ ID NO: 807076 - DNA, 15 bp, Homo sapiens
cttggaaatcagagg

SEQ ID NO: 807077 - DNA, 15 bp, Homo sapiens
ttggaaatcagaggg

SEQ ID NO: 807078 - DNA, 15 bp, Homo sapiens
tggaaatcagaggga

SEQ ID NO: 807079 - DNA, 15 bp, Homo sapiens
ggaaatcagagggac

SEQ ID NO: 807080 - DNA, 15 bp, Homo sapiens
gaaatcagagggacc

SEQ ID NO: 807081 - DNA, 15 bp, Homo sapiens
aaatcagagggacca

SEQ ID NO: 807082 - DNA, 15 bp, Homo sapiens
aatcagagggaccag

SEQ ID NO: 807083 - DNA, 15 bp, Homo sapiens
atcagagggaccagg

SEQ ID NO: 807084 - DNA, 15 bp, Homo sapiens
tcagagggaccaggg

SEQ ID NO: 807085 - DNA, 15 bp, Homo sapiens
cagagggaccagggc

SEQ ID NO: 807086 - DNA, 15 bp, Homo sapiens
agagggaccagggct

SEQ ID NO: 807087 - DNA, 15 bp, Homo sapiens
gagggaccagggcta

SEQ ID NO: 807088 - DNA, 15 bp, Homo sapiens
agggaccagggctaa

SEQ ID NO: 807089 - DNA, 15 bp, Homo sapiens
gggaccagggctaag

SEQ ID NO: 807090 - DNA, 15 bp, Homo sapiens
ggaccagggctaagt

SEQ ID NO: 807091 - DNA, 15 bp, Homo sapiens
gaccagggctaagtc

SEQ ID NO: 807092 - DNA, 15 bp, Homo sapiens
accagggctaagtcc

SEQ ID NO: 807093 - DNA, 15 bp, Homo sapiens
ccagggctaagtcct

SEQ ID NO: 807094 - DNA, 15 bp, Homo sapiens
cagggctaagtccta

SEQ ID NO: 807095 - DNA, 15 bp, Homo sapiens
agggctaagtcctag

SEQ ID NO: 807096 - DNA, 15 bp, Homo sapiens
gggctaagtcctagg

SEQ ID NO: 807097 - DNA, 15 bp, Homo sapiens
ggctaagtcctaggt

SEQ ID NO: 807098 - DNA, 15 bp, Homo sapiens
gctaagtcctaggtc

SEQ ID NO: 807099 - DNA, 15 bp, Homo sapiens
ctaagtcctaggtct

SEQ ID NO: 807100 - DNA, 15 bp, Homo sapiens
taagtcctaggtctg

SEQ ID NO: 807101 - DNA, 15 bp, Homo sapiens
aagtcctaggtctgc

SEQ ID NO: 807102 - DNA, 15 bp, Homo sapiens
agtcctaggtctgct

SEQ ID NO: 807103 - DNA, 15 bp, Homo sapiens
gtcctaggtctgctg

SEQ ID NO: 807104 - DNA, 15 bp, Homo sapiens
tcctaggtctgctgt

SEQ ID NO: 807105 - DNA, 15 bp, Homo sapiens
cctaggtctgctgtt

SEQ ID NO: 807106 - DNA, 15 bp, Homo sapiens
ctaggtctgctgttt

SEQ ID NO: 807107 - DNA, 15 bp, Homo sapiens
taggtctgctgttta

SEQ ID NO: 807108 - DNA, 15 bp, Homo sapiens
aggtctgctgtttac

SEQ ID NO: 807109 - DNA, 15 bp, Homo sapiens
ggtctgctgtttact

SEQ ID NO: 807110 - DNA, 15 bp, Homo sapiens
gtctgctgtttacta

SEQ ID NO: 807111 - DNA, 15 bp, Homo sapiens
tctgctgtttactat

SEQ ID NO: 807112 - DNA, 15 bp, Homo sapiens
ctgctgtttactatc

SEQ ID NO: 807113 - DNA, 15 bp, Homo sapiens
tgctgtttactatct

SEQ ID NO: 807114 - DNA, 15 bp, Homo sapiens
gctgtttactatctt

SEQ ID NO: 807115 - DNA, 15 bp, Homo sapiens
ctgtttactatcttt

SEQ ID NO: 807116 - DNA, 15 bp, Homo sapiens
tgtttactatctttg

SEQ ID NO: 807117 - DNA, 15 bp, Homo sapiens
gtttactatctttgt

SEQ ID NO: 807118 - DNA, 15 bp, Homo sapiens
tttactatctttgtg

SEQ ID NO: 807119 - DNA, 15 bp, Homo sapiens
ttactatctttgtga

SEQ ID NO: 807120 - DNA, 15 bp, Homo sapiens
tactatctttgtgac

SEQ ID NO: 807121 - DNA, 15 bp, Homo sapiens
actatctttgtgacc

SEQ ID NO: 807122 - DNA, 15 bp, Homo sapiens
ctatctttgtgacct

SEQ ID NO: 807123 - DNA, 15 bp, Homo sapiens
tatctttgtgacctt

SEQ ID NO: 807124 - DNA, 15 bp, Homo sapiens
atctttgtgacctta

SEQ ID NO: 807125 - DNA, 15 bp, Homo sapiens
tctttgtgaccttat

SEQ ID NO: 807126 - DNA, 15 bp, Homo sapiens
ctttgtgaccttatg

SEQ ID NO: 807127 - DNA, 15 bp, Homo sapiens
tttgtgaccttatgc

SEQ ID NO: 807128 - DNA, 15 bp, Homo sapiens
ttgtgaccttatgcg

SEQ ID NO: 807129 - DNA, 15 bp, Homo sapiens
tgtgaccttatgcga

SEQ ID NO: 807130 - DNA, 15 bp, Homo sapiens
gtgaccttatgcgag

SEQ ID NO: 807131 - DNA, 15 bp, Homo sapiens
tgaccttatgcgagc

SEQ ID NO: 807132 - DNA, 15 bp, Homo sapiens
gaccttatgcgagcc

SEQ ID NO: 807133 - DNA, 15 bp, Homo sapiens
accttatgcgagcct

SEQ ID NO: 807134 - DNA, 15 bp, Homo sapiens
ccttatgcgagcctg

SEQ ID NO: 807135 - DNA, 15 bp, Homo sapiens
cttatgcgagcctga

SEQ ID NO: 807136 - DNA, 15 bp, Homo sapiens
ttatgcgagcctgat

SEQ ID NO: 807137 - DNA, 15 bp, Homo sapiens
tatgcgagcctgatt

SEQ ID NO: 807138 - DNA, 15 bp, Homo sapiens
atgcgagcctgattc

SEQ ID NO: 807139 - DNA, 15 bp, Homo sapiens
tgcgagcctgattct

SEQ ID NO: 807140 - DNA, 15 bp, Homo sapiens
gcgagcctgattcta

SEQ ID NO: 807141 - DNA, 15 bp, Homo sapiens
tcctgctccactttc

SEQ ID NO: 807142 - DNA, 15 bp, Homo sapiens
cctgctccactttca

SEQ ID NO: 807143 - DNA, 15 bp, Homo sapiens
ctgctccactttcac

SEQ ID NO: 807144 - DNA, 15 bp, Homo sapiens
tgctccactttcacc

SEQ ID NO: 807145 - DNA, 15 bp, Homo sapiens
gctccactttcacca

SEQ ID NO: 807146 - DNA, 15 bp, Homo sapiens
ctccactttcaccag

SEQ ID NO: 807147 - DNA, 15 bp, Homo sapiens
tccactttcaccagg

SEQ ID NO: 807148 - DNA, 15 bp, Homo sapiens
ccactttcaccaggg

SEQ ID NO: 807149 - DNA, 15 bp, Homo sapiens
cactttcaccaggga

SEQ ID NO: 807150 - DNA, 15 bp, Homo sapiens
actttcaccagggat

SEQ ID NO: 807151 - DNA, 15 bp, Homo sapiens
ctttcaccagggatc

SEQ ID NO: 807152 - DNA, 15 bp, Homo sapiens
tttcaccagggatcc

SEQ ID NO: 807153 - DNA, 15 bp, Homo sapiens
ttcaccagggatccc

SEQ ID NO: 807154 - DNA, 15 bp, Homo sapiens
tcaccagggatcccc

SEQ ID NO: 807155 - DNA, 15 bp, Homo sapiens
caccagggatcccct

SEQ ID NO: 807156 - DNA, 15 bp, Homo sapiens
accagggatcccctg

SEQ ID NO: 807157 - DNA, 15 bp, Homo sapiens
ccagggatcccctgg

SEQ ID NO: 807158 - DNA, 15 bp, Homo sapiens
cagggatcccctgga

SEQ ID NO: 807159 - DNA, 15 bp, Homo sapiens
agggatcccctggat

SEQ ID NO: 807160 - DNA, 15 bp, Homo sapiens
gggatcccctggatg

SEQ ID NO: 807161 - DNA, 15 bp, Homo sapiens
ggatcccctggatgc

SEQ ID NO: 807162 - DNA, 15 bp, Homo sapiens
gatcccctggatgct

SEQ ID NO: 807163 - DNA, 15 bp, Homo sapiens
atcccctggatgctg

SEQ ID NO: 807164 - DNA, 15 bp, Homo sapiens
tcccctggatgctgc

SEQ ID NO: 807165 - DNA, 15 bp, Homo sapiens
cccctggatgctgcc

SEQ ID NO: 807166 - DNA, 15 bp, Homo sapiens
ccctggatgctgcca

SEQ ID NO: 807167 - DNA, 15 bp, Homo sapiens
cctggatgctgccat

SEQ ID NO: 807168 - DNA, 15 bp, Homo sapiens
ctggatgctgccatt

SEQ ID NO: 807169 - DNA, 15 bp, Homo sapiens
tggatgctgccatta

SEQ ID NO: 807170 - DNA, 15 bp, Homo sapiens
ggatgctgccattac

SEQ ID NO: 807171 - DNA, 15 bp, Homo sapiens
gatgctgccattacc

SEQ ID NO: 807172 - DNA, 15 bp, Homo sapiens
atgctgccattacct

SEQ ID NO: 807173 - DNA, 15 bp, Homo sapiens
tgctgccattacctg

SEQ ID NO: 807174 - DNA, 15 bp, Homo sapiens
gctgccattacctgg

SEQ ID NO: 807175 - DNA, 15 bp, Homo sapiens
ctgccattacctgga

SEQ ID NO: 807176 - DNA, 15 bp, Homo sapiens
tgccattacctggaa

SEQ ID NO: 807177 - DNA, 15 bp, Homo sapiens
gccattacctggaac

SEQ ID NO: 807178 - DNA, 15 bp, Homo sapiens
ccattacctggaact

SEQ ID NO: 807179 - DNA, 15 bp, Homo sapiens
cattacctggaactg

SEQ ID NO: 807180 - DNA, 15 bp, Homo sapiens
attacctggaactgc

SEQ ID NO: 807181 - DNA, 15 bp, Homo sapiens
ttacctggaactgca

SEQ ID NO: 807182 - DNA, 15 bp, Homo sapiens
tacctggaactgcat

SEQ ID NO: 807183 - DNA, 15 bp, Homo sapiens
acctggaactgcatc

SEQ ID NO: 807184 - DNA, 15 bp, Homo sapiens
cctggaactgcatct

SEQ ID NO: 807185 - DNA, 15 bp, Homo sapiens
ctggaactgcatctc

SEQ ID NO: 807186 - DNA, 15 bp, Homo sapiens
tggaactgcatctca

SEQ ID NO: 807187 - DNA, 15 bp, Homo sapiens
ggaactgcatctcac

SEQ ID NO: 807188 - DNA, 15 bp, Homo sapiens
gaactgcatctcacc

SEQ ID NO: 807189 - DNA, 15 bp, Homo sapiens
aactgcatctcacct

SEQ ID NO: 807190 - DNA, 15 bp, Homo sapiens
actgcatctcacctt

SEQ ID NO: 807191 - DNA, 15 bp, Homo sapiens
ctgcatctcaccttt

SEQ ID NO: 807192 - DNA, 15 bp, Homo sapiens
tgcatctcaccttta

SEQ ID NO: 807193 - DNA, 15 bp, Homo sapiens
gcatctcacctttat

SEQ ID NO: 807194 - DNA, 15 bp, Homo sapiens
catctcacctttatt

SEQ ID NO: 807195 - DNA, 15 bp, Homo sapiens
atctcacctttattc

SEQ ID NO: 807196 - DNA, 15 bp, Homo sapiens
tctcacctttattcc

SEQ ID NO: 807197 - DNA, 15 bp, Homo sapiens
ctcacctttattccg

SEQ ID NO: 807198 - DNA, 15 bp, Homo sapiens
tcacctttattccgg

SEQ ID NO: 807199 - DNA, 15 bp, Homo sapiens
cacctttattccggg

SEQ ID NO: 807200 - DNA, 15 bp, Homo sapiens
acctttattccgggt

SEQ ID NO: 807201 - DNA, 15 bp, Homo sapiens
cctttattccgggtt

SEQ ID NO: 807202 - DNA, 15 bp, Homo sapiens
ctttattccgggtta

SEQ ID NO: 807203 - DNA, 15 bp, Homo sapiens
tttattccgggttat

SEQ ID NO: 807204 - DNA, 15 bp, Homo sapiens
ttattccgggttata

SEQ ID NO: 807205 - DNA, 15 bp, Homo sapiens
tattccgggttataa

SEQ ID NO: 807206 - DNA, 15 bp, Homo sapiens
attccgggttataaa

SEQ ID NO: 807207 - DNA, 15 bp, Homo sapiens
ttccgggttataaac

SEQ ID NO: 807208 - DNA, 15 bp, Homo sapiens
tccgggttataaact

SEQ ID NO: 807209 - DNA, 15 bp, Homo sapiens
ccgggttataaactt

SEQ ID NO: 807210 - DNA, 15 bp, Homo sapiens
cgggttataaacttc

SEQ ID NO: 807211 - DNA, 15 bp, Homo sapiens
gggttataaacttca

SEQ ID NO: 807212 - DNA, 15 bp, Homo sapiens
ggttataaacttcag

SEQ ID NO: 807213 - DNA, 15 bp, Homo sapiens
gttataaacttcagg

SEQ ID NO: 807214 - DNA, 15 bp, Homo sapiens
ttataaacttcaggg

SEQ ID NO: 807215 - DNA, 15 bp, Homo sapiens
tataaacttcagggt

SEQ ID NO: 807216 - DNA, 15 bp, Homo sapiens
ataaacttcagggtc

SEQ ID NO: 807217 - DNA, 15 bp, Homo sapiens
taaacttcagggtct

SEQ ID NO: 807218 - DNA, 15 bp, Homo sapiens
aaacttcagggtctc

SEQ ID NO: 807219 - DNA, 15 bp, Homo sapiens
aacttcagggtctca

SEQ ID NO: 807220 - DNA, 15 bp, Homo sapiens
acttcagggtctcac

SEQ ID NO: 807221 - DNA, 15 bp, Homo sapiens
cttcagggtctcact

SEQ ID NO: 807222 - DNA, 15 bp, Homo sapiens
ttcagggtctcactc

SEQ ID NO: 807223 - DNA, 15 bp, Homo sapiens
tcagggtctcactca

SEQ ID NO: 807224 - DNA, 15 bp, Homo sapiens
cagggtctcactcag

SEQ ID NO: 807225 - DNA, 15 bp, Homo sapiens
agggtctcactcagt

SEQ ID NO: 807226 - DNA, 15 bp, Homo sapiens
gggtctcactcagtg

SEQ ID NO: 807227 - DNA, 15 bp, Homo sapiens
ggtctcactcagtga

SEQ ID NO: 807228 - DNA, 15 bp, Homo sapiens
gtctcactcagtgag

SEQ ID NO: 807229 - DNA, 15 bp, Homo sapiens
tctcactcagtgagg

SEQ ID NO: 807230 - DNA, 15 bp, Homo sapiens
ctcactcagtgaggg

SEQ ID NO: 807231 - DNA, 15 bp, Homo sapiens
tcactcagtgagggt

SEQ ID NO: 807232 - DNA, 15 bp, Homo sapiens
cactcagtgagggta

SEQ ID NO: 807233 - DNA, 15 bp, Homo sapiens
actcagtgagggtaa

SEQ ID NO: 807234 - DNA, 15 bp, Homo sapiens
ctcagtgagggtaat

SEQ ID NO: 807235 - DNA, 15 bp, Homo sapiens
tcagtgagggtaatc

SEQ ID NO: 807236 - DNA, 15 bp, Homo sapiens
cagtgagggtaatcc

SEQ ID NO: 807237 - DNA, 15 bp, Homo sapiens
agtgagggtaatcca

SEQ ID NO: 807238 - DNA, 15 bp, Homo sapiens
gtgagggtaatccat

SEQ ID NO: 807239 - DNA, 15 bp, Homo sapiens
tgagggtaatccatg

SEQ ID NO: 807240 - DNA, 15 bp, Homo sapiens
gagggtaatccatgt

SEQ ID NO: 807241 - DNA, 15 bp, Homo sapiens
agggtaatccatgtt

SEQ ID NO: 807242 - DNA, 15 bp, Homo sapiens
gggtaatccatgttt

SEQ ID NO: 807243 - DNA, 15 bp, Homo sapiens
ggtaatccatgtttc

SEQ ID NO: 807244 - DNA, 15 bp, Homo sapiens
gtaatccatgtttct

SEQ ID NO: 807245 - DNA, 15 bp, Homo sapiens
taatccatgtttctc

SEQ ID NO: 807246 - DNA, 15 bp, Homo sapiens
aatccatgtttctcc

SEQ ID NO: 807247 - DNA, 15 bp, Homo sapiens
atccatgtttctccc

SEQ ID NO: 807248 - DNA, 15 bp, Homo sapiens
tccatgtttctccca

SEQ ID NO: 807249 - DNA, 15 bp, Homo sapiens
ccatgtttctcccac

SEQ ID NO: 807250 - DNA, 15 bp, Homo sapiens
catgtttctcccacc

SEQ ID NO: 807251 - DNA, 15 bp, Homo sapiens
atgtttctcccacct

SEQ ID NO: 807252 - DNA, 15 bp, Homo sapiens
tgtttctcccacctc

SEQ ID NO: 807253 - DNA, 15 bp, Homo sapiens
tttctcccacctctc

SEQ ID NO: 807254 - DNA, 15 bp, Homo sapiens
ttctcccacctctct

SEQ ID NO: 807255 - DNA, 15 bp, Homo sapiens
tctcccacctctctt

SEQ ID NO: 807256 - DNA, 15 bp, Homo sapiens
ctcccacctctcttt

SEQ ID NO: 807257 - DNA, 15 bp, Homo sapiens
tcccacctctctttt

SEQ ID NO: 807258 - DNA, 15 bp, Homo sapiens
cccacctctcttttg

SEQ ID NO: 807259 - DNA, 15 bp, Homo sapiens
ccacctctcttttgc

SEQ ID NO: 807260 - DNA, 15 bp, Homo sapiens
cacctctcttttgct

SEQ ID NO: 807261 - DNA, 15 bp, Homo sapiens
acctctcttttgctt

SEQ ID NO: 807262 - DNA, 15 bp, Homo sapiens
cctctcttttgcttc

SEQ ID NO: 807263 - DNA, 15 bp, Homo sapiens
ctctcttttgcttcc

SEQ ID NO: 807264 - DNA, 15 bp, Homo sapiens
tctcttttgcttcca

SEQ ID NO: 807265 - DNA, 15 bp, Homo sapiens
ctcttttgcttccac

SEQ ID NO: 807266 - DNA, 15 bp, Homo sapiens
tcttttgcttccact

SEQ ID NO: 807267 - DNA, 15 bp, Homo sapiens
cttttgcttccacta

SEQ ID NO: 807268 - DNA, 15 bp, Homo sapiens
ttttgcttccactac

SEQ ID NO: 807269 - DNA, 15 bp, Homo sapiens
tttgcttccactaca

SEQ ID NO: 807270 - DNA, 15 bp, Homo sapiens
ttgcttccactacac

SEQ ID NO: 807271 - DNA, 15 bp, Homo sapiens
tgcttccactacact

SEQ ID NO: 807272 - DNA, 15 bp, Homo sapiens
gcttccactacactc

SEQ ID NO: 807273 - DNA, 15 bp, Homo sapiens
cttccactacactca

SEQ ID NO: 807274 - DNA, 15 bp, Homo sapiens
ttccactacactcag

SEQ ID NO: 807275 - DNA, 15 bp, Homo sapiens
tccactacactcagt

SEQ ID NO: 807276 - DNA, 15 bp, Homo sapiens
ccactacactcagtc

SEQ ID NO: 807277 - DNA, 15 bp, Homo sapiens
cactacactcagtct

SEQ ID NO: 807278 - DNA, 15 bp, Homo sapiens
actacactcagtctt

SEQ ID NO: 807279 - DNA, 15 bp, Homo sapiens
ctacactcagtcttc

SEQ ID NO: 807280 - DNA, 15 bp, Homo sapiens
tacactcagtcttca

SEQ ID NO: 807281 - DNA, 15 bp, Homo sapiens
acactcagtcttcaa

SEQ ID NO: 807282 - DNA, 15 bp, Homo sapiens
cactcagtcttcaaa

SEQ ID NO: 807283 - DNA, 15 bp, Homo sapiens
actcagtcttcaaac

SEQ ID NO: 807284 - DNA, 15 bp, Homo sapiens
ctcagtcttcaaact

SEQ ID NO: 807285 - DNA, 15 bp, Homo sapiens
tcagtcttcaaacta

SEQ ID NO: 807286 - DNA, 15 bp, Homo sapiens
cagtcttcaaactaa

SEQ ID NO: 807287 - DNA, 15 bp, Homo sapiens
agtcttcaaactaat

SEQ ID NO: 807288 - DNA, 15 bp, Homo sapiens
gtcttcaaactaatt

SEQ ID NO: 807289 - DNA, 15 bp, Homo sapiens
tcttcaaactaattc

SEQ ID NO: 807290 - DNA, 15 bp, Homo sapiens
cttcaaactaattct

SEQ ID NO: 807291 - DNA, 15 bp, Homo sapiens
ttcaaactaattctc

SEQ ID NO: 807292 - DNA, 15 bp, Homo sapiens
tcaaactaattctcc

SEQ ID NO: 807293 - DNA, 15 bp, Homo sapiens
caaactaattctcca

SEQ ID NO: 807294 - DNA, 15 bp, Homo sapiens
aaactaattctccag

SEQ ID NO: 807295 - DNA, 15 bp, Homo sapiens
aactaattctccagc

SEQ ID NO: 807296 - DNA, 15 bp, Homo sapiens
actaattctccagcc

SEQ ID NO: 807297 - DNA, 15 bp, Homo sapiens
ctaattctccagcct

SEQ ID NO: 807298 - DNA, 15 bp, Homo sapiens
taattctccagcctt

SEQ ID NO: 807299 - DNA, 15 bp, Homo sapiens
aattctccagccttt

SEQ ID NO: 807300 - DNA, 15 bp, Homo sapiens
attctccagcctttt

SEQ ID NO: 807301 - DNA, 15 bp, Homo sapiens
ttctccagccttttc

SEQ ID NO: 807302 - DNA, 15 bp, Homo sapiens
tctccagccttttct

SEQ ID NO: 807303 - DNA, 15 bp, Homo sapiens
ctccagccttttctc

SEQ ID NO: 807304 - DNA, 15 bp, Homo sapiens
tccagccttttctcc

SEQ ID NO: 807305 - DNA, 15 bp, Homo sapiens
ccagccttttctcca

SEQ ID NO: 807306 - DNA, 15 bp, Homo sapiens
cagccttttctccac

SEQ ID NO: 807307 - DNA, 15 bp, Homo sapiens
agccttttctccaca

SEQ ID NO: 807308 - DNA, 15 bp, Homo sapiens
gccttttctccacat

SEQ ID NO: 807309 - DNA, 15 bp, Homo sapiens
ccttttctccacata

SEQ ID NO: 807310 - DNA, 15 bp, Homo sapiens
cttttctccacatat

SEQ ID NO: 807311 - DNA, 15 bp, Homo sapiens
ttttctccacatatt

SEQ ID NO: 807312 - DNA, 15 bp, Homo sapiens
tttctccacatattt

SEQ ID NO: 807313 - DNA, 15 bp, Homo sapiens
ttctccacatattta

SEQ ID NO: 807314 - DNA, 15 bp, Homo sapiens
tctccacatatttat

SEQ ID NO: 807315 - DNA, 15 bp, Homo sapiens
ctccacatatttatt

SEQ ID NO: 807316 - DNA, 15 bp, Homo sapiens
tccacatatttattt

SEQ ID NO: 807317 - DNA, 15 bp, Homo sapiens
ccacatatttattta

SEQ ID NO: 807318 - DNA, 15 bp, Homo sapiens
cacatatttatttat

SEQ ID NO: 807319 - DNA, 15 bp, Homo sapiens
acatatttatttatt

SEQ ID NO: 807320 - DNA, 15 bp, Homo sapiens
catatttatttattt

SEQ ID NO: 807321 - DNA, 15 bp, Homo sapiens
atatttatttattta

SEQ ID NO: 807322 - DNA, 15 bp, Homo sapiens
tatttatttatttaa

SEQ ID NO: 807323 - DNA, 15 bp, Homo sapiens
atttatttatttaac

SEQ ID NO: 807324 - DNA, 15 bp, Homo sapiens
ttatttatttaacaa

SEQ ID NO: 807325 - DNA, 15 bp, Homo sapiens
tatttatttaacaaa

SEQ ID NO: 807326 - DNA, 15 bp, Homo sapiens
atttatttaacaaat

SEQ ID NO: 807327 - DNA, 15 bp, Homo sapiens
tttatttaacaaata

SEQ ID NO: 807328 - DNA, 15 bp, Homo sapiens
ttatttaacaaatac

SEQ ID NO: 807329 - DNA, 15 bp, Homo sapiens
tatttaacaaatact

SEQ ID NO: 807330 - DNA, 15 bp, Homo sapiens
atttaacaaatactg

SEQ ID NO: 807331 - DNA, 15 bp, Homo sapiens
tttaacaaatactga

SEQ ID NO: 807332 - DNA, 15 bp, Homo sapiens
ttaacaaatactgat

SEQ ID NO: 807333 - DNA, 15 bp, Homo sapiens
taacaaatactgatt

SEQ ID NO: 807334 - DNA, 15 bp, Homo sapiens
aacaaatactgattg

SEQ ID NO: 807335 - DNA, 15 bp, Homo sapiens
acaaatactgattga

SEQ ID NO: 807336 - DNA, 15 bp, Homo sapiens
caaatactgattgag

SEQ ID NO: 807337 - DNA, 15 bp, Homo sapiens
aaatactgattgaga

SEQ ID NO: 807338 - DNA, 15 bp, Homo sapiens
aatactgattgagac

SEQ ID NO: 807339 - DNA, 15 bp, Homo sapiens
atactgattgagaca

SEQ ID NO: 807340 - DNA, 15 bp, Homo sapiens
tactgattgagacac

SEQ ID NO: 807341 - DNA, 15 bp, Homo sapiens
actgattgagacact

SEQ ID NO: 807342 - DNA, 15 bp, Homo sapiens
ctgattgagacactt

SEQ ID NO: 807343 - DNA, 15 bp, Homo sapiens
tgattgagacacttt

SEQ ID NO: 807344 - DNA, 15 bp, Homo sapiens
gattgagacactttg

SEQ ID NO: 807345 - DNA, 15 bp, Homo sapiens
attgagacactttgc

SEQ ID NO: 807346 - DNA, 15 bp, Homo sapiens
ttgagacactttgct

SEQ ID NO: 807347 - DNA, 15 bp, Homo sapiens
tgagacactttgcta

SEQ ID NO: 807348 - DNA, 15 bp, Homo sapiens
gagacactttgctac

SEQ ID NO: 807349 - DNA, 15 bp, Homo sapiens
agacactttgctact

SEQ ID NO: 807350 - DNA, 15 bp, Homo sapiens
gacactttgctactt

SEQ ID NO: 807351 - DNA, 15 bp, Homo sapiens
acactttgctacttt

SEQ ID NO: 807352 - DNA, 15 bp, Homo sapiens
cactttgctactttc

SEQ ID NO: 807353 - DNA, 15 bp, Homo sapiens
actttgctactttct

SEQ ID NO: 807354 - DNA, 15 bp, Homo sapiens
ctttgctactttctt

SEQ ID NO: 807355 - DNA, 15 bp, Homo sapiens
tttgctactttcttg

SEQ ID NO: 807356 - DNA, 15 bp, Homo sapiens
ttgctactttcttgg

SEQ ID NO: 807357 - DNA, 15 bp, Homo sapiens
tgctactttcttgga

SEQ ID NO: 807358 - DNA, 15 bp, Homo sapiens
gctactttcttggaa

SEQ ID NO: 807359 - DNA, 15 bp, Homo sapiens
ctactttcttggaat

SEQ ID NO: 807360 - DNA, 15 bp, Homo sapiens
tactttcttggaatt

SEQ ID NO: 807361 - DNA, 15 bp, Homo sapiens
actttcttggaattt

SEQ ID NO: 807362 - DNA, 15 bp, Homo sapiens
ctttcttggaatttc

SEQ ID NO: 807363 - DNA, 15 bp, Homo sapiens
tttcttggaatttcg

SEQ ID NO: 807364 - DNA, 15 bp, Homo sapiens
ttcttggaatttcgt

SEQ ID NO: 807365 - DNA, 15 bp, Homo sapiens
tcttggaatttcgtg

SEQ ID NO: 807366 - DNA, 15 bp, Homo sapiens
cttggaatttcgtga

SEQ ID NO: 807367 - DNA, 15 bp, Homo sapiens
ttggaatttcgtgat

SEQ ID NO: 807368 - DNA, 15 bp, Homo sapiens
tggaatttcgtgata

SEQ ID NO: 807369 - DNA, 15 bp, Homo sapiens
ggaatttcgtgataa

SEQ ID NO: 807370 - DNA, 15 bp, Homo sapiens
gaatttcgtgataac

SEQ ID NO: 807371 - DNA, 15 bp, Homo sapiens
aatttcgtgataact

SEQ ID NO: 807372 - DNA, 15 bp, Homo sapiens
atttcgtgataacta

SEQ ID NO: 807373 - DNA, 15 bp, Homo sapiens
tttcgtgataactaa

SEQ ID NO: 807374 - DNA, 15 bp, Homo sapiens
ttcgtgataactaaa

SEQ ID NO: 807375 - DNA, 15 bp, Homo sapiens
tcgtgataactaaaa

SEQ ID NO: 807376 - DNA, 15 bp, Homo sapiens
cgtgataactaaaaa

SEQ ID NO: 807377 - DNA, 15 bp, Homo sapiens
gtgataactaaaaat

SEQ ID NO: 807378 - DNA, 15 bp, Homo sapiens
tgataactaaaaatg

SEQ ID NO: 807379 - DNA, 15 bp, Homo sapiens
gataactaaaaatgg

SEQ ID NO: 807380 - DNA, 15 bp, Homo sapiens
ataactaaaaatgga

SEQ ID NO: 807381 - DNA, 15 bp, Homo sapiens
taactaaaaatggac

SEQ ID NO: 807382 - DNA, 15 bp, Homo sapiens
aactaaaaatggaca

SEQ ID NO: 807383 - DNA, 15 bp, Homo sapiens
actaaaaatggacac

SEQ ID NO: 807384 - DNA, 15 bp, Homo sapiens
ctaaaaatggacaca

SEQ ID NO: 807385 - DNA, 15 bp, Homo sapiens
taaaaatggacacac

SEQ ID NO: 807386 - DNA, 15 bp, Homo sapiens
aaaaatggacacaca

SEQ ID NO: 807387 - DNA, 15 bp, Homo sapiens
aaaatggacacacac

SEQ ID NO: 807388 - DNA, 15 bp, Homo sapiens
aaatggacacacacc

SEQ ID NO: 807389 - DNA, 15 bp, Homo sapiens
aatggacacacaccc

SEQ ID NO: 807390 - DNA, 15 bp, Homo sapiens
atggacacacacccg

SEQ ID NO: 807391 - DNA, 15 bp, Homo sapiens
tggacacacacccgg

SEQ ID NO: 807392 - DNA, 15 bp, Homo sapiens
ggacacacacccggc

SEQ ID NO: 807393 - DNA, 15 bp, Homo sapiens
gacacacacccggcc

SEQ ID NO: 807394 - DNA, 15 bp, Homo sapiens
acacacacccggcct

SEQ ID NO: 807395 - DNA, 15 bp, Homo sapiens
cacacacccggcctt

SEQ ID NO: 807396 - DNA, 15 bp, Homo sapiens
acacacccggccttc

SEQ ID NO: 807397 - DNA, 15 bp, Homo sapiens
cacacccggccttca

SEQ ID NO: 807398 - DNA, 15 bp, Homo sapiens
acacccggccttcat

SEQ ID NO: 807399 - DNA, 15 bp, Homo sapiens
cacccggccttcata

SEQ ID NO: 807400 - DNA, 15 bp, Homo sapiens
acccggccttcatag

SEQ ID NO: 807401 - DNA, 15 bp, Homo sapiens
cccggccttcataga

SEQ ID NO: 807402 - DNA, 15 bp, Homo sapiens
ccggccttcatagaa

SEQ ID NO: 807403 - DNA, 15 bp, Homo sapiens
cggccttcatagaac

SEQ ID NO: 807404 - DNA, 15 bp, Homo sapiens
ggccttcatagaact

SEQ ID NO: 807405 - DNA, 15 bp, Homo sapiens
gccttcatagaactt

SEQ ID NO: 807406 - DNA, 15 bp, Homo sapiens
ccttcatagaacttg

SEQ ID NO: 807407 - DNA, 15 bp, Homo sapiens
cttcatagaacttgc

SEQ ID NO: 807408 - DNA, 15 bp, Homo sapiens
ttcatagaacttgcc

SEQ ID NO: 807409 - DNA, 15 bp, Homo sapiens
tcatagaacttgcca

SEQ ID NO: 807410 - DNA, 15 bp, Homo sapiens
catagaacttgccat

SEQ ID NO: 807411 - DNA, 15 bp, Homo sapiens
atagaacttgccatc

SEQ ID NO: 807412 - DNA, 15 bp, Homo sapiens
tagaacttgccatcc

SEQ ID NO: 807413 - DNA, 15 bp, Homo sapiens
agaacttgccatcca

SEQ ID NO: 807414 - DNA, 15 bp, Homo sapiens
gaacttgccatccag

SEQ ID NO: 807415 - DNA, 15 bp, Homo sapiens
aacttgccatccagc

SEQ ID NO: 807416 - DNA, 15 bp, Homo sapiens
acttgccatccagca

SEQ ID NO: 807417 - DNA, 15 bp, Homo sapiens
cttgccatccagcaa

SEQ ID NO: 807418 - DNA, 15 bp, Homo sapiens
ttgccatccagcaaa

SEQ ID NO: 807419 - DNA, 15 bp, Homo sapiens
tgccatccagcaaag

SEQ ID NO: 807420 - DNA, 15 bp, Homo sapiens
gccatccagcaaagg

SEQ ID NO: 807421 - DNA, 15 bp, Homo sapiens
ccatccagcaaagga

SEQ ID NO: 807422 - DNA, 15 bp, Homo sapiens
catccagcaaaggaa

SEQ ID NO: 807423 - DNA, 15 bp, Homo sapiens
atccagcaaaggaaa

SEQ ID NO: 807424 - DNA, 15 bp, Homo sapiens
tccagcaaaggaaag

SEQ ID NO: 807425 - DNA, 15 bp, Homo sapiens
ccagcaaaggaaaga

SEQ ID NO: 807426 - DNA, 15 bp, Homo sapiens
cagcaaaggaaagag

SEQ ID NO: 807427 - DNA, 15 bp, Homo sapiens
agcaaaggaaagagg

SEQ ID NO: 807428 - DNA, 15 bp, Homo sapiens
gcaaaggaaagagga

SEQ ID NO: 807429 - DNA, 15 bp, Homo sapiens
caaaggaaagaggag

SEQ ID NO: 807430 - DNA, 15 bp, Homo sapiens
aaaggaaagaggaga

SEQ ID NO: 807431 - DNA, 15 bp, Homo sapiens
aaggaaagaggagag

SEQ ID NO: 807432 - DNA, 15 bp, Homo sapiens
aggaaagaggagagc

SEQ ID NO: 807433 - DNA, 15 bp, Homo sapiens
ggaaagaggagagca

SEQ ID NO: 807434 - DNA, 15 bp, Homo sapiens
gaaagaggagagcaa

SEQ ID NO: 807435 - DNA, 15 bp, Homo sapiens
aaagaggagagcaat

SEQ ID NO: 807436 - DNA, 15 bp, Homo sapiens
aagaggagagcaatt

SEQ ID NO: 807437 - DNA, 15 bp, Homo sapiens
agaggagagcaattg

SEQ ID NO: 807438 - DNA, 15 bp, Homo sapiens
gaggagagcaattga

SEQ ID NO: 807439 - DNA, 15 bp, Homo sapiens
aggagagcaattgat

SEQ ID NO: 807440 - DNA, 15 bp, Homo sapiens
ggagagcaattgatc

SEQ ID NO: 807441 - DNA, 15 bp, Homo sapiens
gagagcaattgatca

SEQ ID NO: 807442 - DNA, 15 bp, Homo sapiens
agagcaattgatcaa

SEQ ID NO: 807443 - DNA, 15 bp, Homo sapiens
gagcaattgatcaaa

SEQ ID NO: 807444 - DNA, 15 bp, Homo sapiens
agcaattgatcaaaa

SEQ ID NO: 807445 - DNA, 15 bp, Homo sapiens
gcaattgatcaaaat

SEQ ID NO: 807446 - DNA, 15 bp, Homo sapiens
caattgatcaaaatg

SEQ ID NO: 807447 - DNA, 15 bp, Homo sapiens
aattgatcaaaatga

SEQ ID NO: 807448 - DNA, 15 bp, Homo sapiens
attgatcaaaatgat

SEQ ID NO: 807449 - DNA, 15 bp, Homo sapiens
ttgatcaaaatgatt

SEQ ID NO: 807450 - DNA, 15 bp, Homo sapiens
tgatcaaaatgattg

SEQ ID NO: 807451 - DNA, 15 bp, Homo sapiens
gatcaaaatgattgc

SEQ ID NO: 807452 - DNA, 15 bp, Homo sapiens
atcaaaatgattgca

SEQ ID NO: 807453 - DNA, 15 bp, Homo sapiens
tcaaaatgattgcac

SEQ ID NO: 807454 - DNA, 15 bp, Homo sapiens
caaaatgattgcaca

SEQ ID NO: 807455 - DNA, 15 bp, Homo sapiens
aaaatgattgcacaa

SEQ ID NO: 807456 - DNA, 15 bp, Homo sapiens
aaatgattgcacaaa

SEQ ID NO: 807457 - DNA, 15 bp, Homo sapiens
aatgattgcacaaag

SEQ ID NO: 807458 - DNA, 15 bp, Homo sapiens
atgattgcacaaaga

SEQ ID NO: 807459 - DNA, 15 bp, Homo sapiens
tgattgcacaaagac

SEQ ID NO: 807460 - DNA, 15 bp, Homo sapiens
gattgcacaaagaca

SEQ ID NO: 807461 - DNA, 15 bp, Homo sapiens
attgcacaaagacat

SEQ ID NO: 807462 - DNA, 15 bp, Homo sapiens
ttgcacaaagacatg

SEQ ID NO: 807463 - DNA, 15 bp, Homo sapiens
tgcacaaagacatgt

SEQ ID NO: 807464 - DNA, 15 bp, Homo sapiens
gcacaaagacatgta

SEQ ID NO: 807465 - DNA, 15 bp, Homo sapiens
cacaaagacatgtaa

SEQ ID NO: 807466 - DNA, 15 bp, Homo sapiens
acaaagacatgtaaa

SEQ ID NO: 807467 - DNA, 15 bp, Homo sapiens
caaagacatgtaaaa

SEQ ID NO: 807468 - DNA, 15 bp, Homo sapiens
aaagacatgtaaaat

SEQ ID NO: 807469 - DNA, 15 bp, Homo sapiens
aagacatgtaaaatt

SEQ ID NO: 807470 - DNA, 15 bp, Homo sapiens
agacatgtaaaattg

SEQ ID NO: 807471 - DNA, 15 bp, Homo sapiens
gacatgtaaaattgc

SEQ ID NO: 807472 - DNA, 15 bp, Homo sapiens
acatgtaaaattgct

SEQ ID NO: 807473 - DNA, 15 bp, Homo sapiens
catgtaaaattgctg

SEQ ID NO: 807474 - DNA, 15 bp, Homo sapiens
atgtaaaattgctgc

SEQ ID NO: 807475 - DNA, 15 bp, Homo sapiens
tgtaaaattgctgct

SEQ ID NO: 807476 - DNA, 15 bp, Homo sapiens
gtaaaattgctgctt

SEQ ID NO: 807477 - DNA, 15 bp, Homo sapiens
taaaattgctgcttt

SEQ ID NO: 807478 - DNA, 15 bp, Homo sapiens
aaaattgctgctttg

SEQ ID NO: 807479 - DNA, 15 bp, Homo sapiens
aaattgctgctttgc

SEQ ID NO: 807480 - DNA, 15 bp, Homo sapiens
aattgctgctttgct

SEQ ID NO: 807481 - DNA, 15 bp, Homo sapiens
attgctgctttgcta

SEQ ID NO: 807482 - DNA, 15 bp, Homo sapiens
ttgctgctttgctaa

SEQ ID NO: 807483 - DNA, 15 bp, Homo sapiens
tgctgctttgctaac

SEQ ID NO: 807484 - DNA, 15 bp, Homo sapiens
gctgctttgctaact

SEQ ID NO: 807485 - DNA, 15 bp, Homo sapiens
ctgctttgctaactg

SEQ ID NO: 807486 - DNA, 15 bp, Homo sapiens
tgctttgctaactgc

SEQ ID NO: 807487 - DNA, 15 bp, Homo sapiens
gctttgctaactgct

SEQ ID NO: 807488 - DNA, 15 bp, Homo sapiens
ctttgctaactgcta

SEQ ID NO: 807489 - DNA, 15 bp, Homo sapiens
tttgctaactgctac

SEQ ID NO: 807490 - DNA, 15 bp, Homo sapiens
ttgctaactgctaca

SEQ ID NO: 807491 - DNA, 15 bp, Homo sapiens
tgctaactgctacac

SEQ ID NO: 807492 - DNA, 15 bp, Homo sapiens
gctaactgctacaca

SEQ ID NO: 807493 - DNA, 15 bp, Homo sapiens
ctaactgctacacaa

SEQ ID NO: 807494 - DNA, 15 bp, Homo sapiens
taactgctacacaaa

SEQ ID NO: 807495 - DNA, 15 bp, Homo sapiens
aactgctacacaaaa

SEQ ID NO: 807496 - DNA, 15 bp, Homo sapiens
actgctacacaaaac

SEQ ID NO: 807497 - DNA, 15 bp, Homo sapiens
ctgctacacaaaaca

SEQ ID NO: 807498 - DNA, 15 bp, Homo sapiens
tgctacacaaaacag

SEQ ID NO: 807499 - DNA, 15 bp, Homo sapiens
gctacacaaaacaga

SEQ ID NO: 807500 - DNA, 15 bp, Homo sapiens
ctacacaaaacagaa

SEQ ID NO: 807501 - DNA, 15 bp, Homo sapiens
tacacaaaacagaat

SEQ ID NO: 807502 - DNA, 15 bp, Homo sapiens
acacaaaacagaata

SEQ ID NO: 807503 - DNA, 15 bp, Homo sapiens
cacaaaacagaatac

SEQ ID NO: 807504 - DNA, 15 bp, Homo sapiens
acaaaacagaatacc

SEQ ID NO: 807505 - DNA, 15 bp, Homo sapiens
caaaacagaatacct

SEQ ID NO: 807506 - DNA, 15 bp, Homo sapiens
aaaacagaatacctg

SEQ ID NO: 807507 - DNA, 15 bp, Homo sapiens
aaacagaatacctgt

SEQ ID NO: 807508 - DNA, 15 bp, Homo sapiens
aacagaatacctgtg

SEQ ID NO: 807509 - DNA, 15 bp, Homo sapiens
acagaatacctgtgg

SEQ ID NO: 807510 - DNA, 15 bp, Homo sapiens
cagaatacctgtggg

SEQ ID NO: 807511 - DNA, 15 bp, Homo sapiens
agaatacctgtgggc

SEQ ID NO: 807512 - DNA, 15 bp, Homo sapiens
gaatacctgtgggca

SEQ ID NO: 807513 - DNA, 15 bp, Homo sapiens
aatacctgtgggcag

SEQ ID NO: 807514 - DNA, 15 bp, Homo sapiens
atacctgtgggcagg

SEQ ID NO: 807515 - DNA, 15 bp, Homo sapiens
tacctgtgggcaggg

SEQ ID NO: 807516 - DNA, 15 bp, Homo sapiens
acctgtgggcaggga

SEQ ID NO: 807517 - DNA, 15 bp, Homo sapiens
cctgtgggcagggaa

SEQ ID NO: 807518 - DNA, 15 bp, Homo sapiens
ctgtgggcagggaag

SEQ ID NO: 807519 - DNA, 15 bp, Homo sapiens
tgtgggcagggaagt

SEQ ID NO: 807520 - DNA, 15 bp, Homo sapiens
gtgggcagggaagtg

SEQ ID NO: 807521 - DNA, 15 bp, Homo sapiens
tgggcagggaagtga

SEQ ID NO: 807522 - DNA, 15 bp, Homo sapiens
gggcagggaagtgac

SEQ ID NO: 807523 - DNA, 15 bp, Homo sapiens
ggcagggaagtgaca

SEQ ID NO: 807524 - DNA, 15 bp, Homo sapiens
gcagggaagtgacag

SEQ ID NO: 807525 - DNA, 15 bp, Homo sapiens
cagggaagtgacagc

SEQ ID NO: 807526 - DNA, 15 bp, Homo sapiens
agggaagtgacagca

SEQ ID NO: 807527 - DNA, 15 bp, Homo sapiens
gggaagtgacagcag

SEQ ID NO: 807528 - DNA, 15 bp, Homo sapiens
ggaagtgacagcaga

SEQ ID NO: 807529 - DNA, 15 bp, Homo sapiens
gaagtgacagcagag

SEQ ID NO: 807530 - DNA, 15 bp, Homo sapiens
aagtgacagcagagc

SEQ ID NO: 807531 - DNA, 15 bp, Homo sapiens
agtgacagcagagct

SEQ ID NO: 807532 - DNA, 15 bp, Homo sapiens
gtgacagcagagctg

SEQ ID NO: 807533 - DNA, 15 bp, Homo sapiens
tgacagcagagctga

SEQ ID NO: 807534 - DNA, 15 bp, Homo sapiens
gacagcagagctgat

SEQ ID NO: 807535 - DNA, 15 bp, Homo sapiens
acagcagagctgatt

SEQ ID NO: 807536 - DNA, 15 bp, Homo sapiens
cagcagagctgattt

SEQ ID NO: 807537 - DNA, 15 bp, Homo sapiens
agcagagctgatttc

SEQ ID NO: 807538 - DNA, 15 bp, Homo sapiens
gcagagctgatttct

SEQ ID NO: 807539 - DNA, 15 bp, Homo sapiens
cagagctgatttctg

SEQ ID NO: 807540 - DNA, 15 bp, Homo sapiens
agagctgatttctga

SEQ ID NO: 807541 - DNA, 15 bp, Homo sapiens
gagctgatttctgaa

SEQ ID NO: 807542 - DNA, 15 bp, Homo sapiens
agctgatttctgaag

SEQ ID NO: 807543 - DNA, 15 bp, Homo sapiens
gctgatttctgaagg

SEQ ID NO: 807544 - DNA, 15 bp, Homo sapiens
ctgatttctgaagga

SEQ ID NO: 807545 - DNA, 15 bp, Homo sapiens
tgatttctgaaggat

SEQ ID NO: 807546 - DNA, 15 bp, Homo sapiens
gatttctgaaggatg

SEQ ID NO: 807547 - DNA, 15 bp, Homo sapiens
atttctgaaggatgg

SEQ ID NO: 807548 - DNA, 15 bp, Homo sapiens
tttctgaaggatggg

SEQ ID NO: 807549 - DNA, 15 bp, Homo sapiens
ttctgaaggatgggc

SEQ ID NO: 807550 - DNA, 15 bp, Homo sapiens
tctgaaggatgggca

SEQ ID NO: 807551 - DNA, 15 bp, Homo sapiens
ctgaaggatgggcat

SEQ ID NO: 807552 - DNA, 15 bp, Homo sapiens
tgaaggatgggcatc

SEQ ID NO: 807553 - DNA, 15 bp, Homo sapiens
gaaggatgggcatcc

SEQ ID NO: 807554 - DNA, 15 bp, Homo sapiens
aaggatgggcatccc

SEQ ID NO: 807555 - DNA, 15 bp, Homo sapiens
aggatgggcatccca

SEQ ID NO: 807556 - DNA, 15 bp, Homo sapiens
ggatgggcatcccat

SEQ ID NO: 807557 - DNA, 15 bp, Homo sapiens
gatgggcatcccatg

SEQ ID NO: 807558 - DNA, 15 bp, Homo sapiens
atgggcatcccatgt

SEQ ID NO: 807559 - DNA, 15 bp, Homo sapiens
tgggcatcccatgtg

SEQ ID NO: 807560 - DNA, 15 bp, Homo sapiens
gggcatcccatgtga

SEQ ID NO: 807561 - DNA, 15 bp, Homo sapiens
ggcatcccatgtgag

SEQ ID NO: 807562 - DNA, 15 bp, Homo sapiens
gcatcccatgtgagc

SEQ ID NO: 807563 - DNA, 15 bp, Homo sapiens
catcccatgtgagca

SEQ ID NO: 807564 - DNA, 15 bp, Homo sapiens
atcccatgtgagcag

SEQ ID NO: 807565 - DNA, 15 bp, Homo sapiens
tcccatgtgagcagg

SEQ ID NO: 807566 - DNA, 15 bp, Homo sapiens
cccatgtgagcaggt

SEQ ID NO: 807567 - DNA, 15 bp, Homo sapiens
ccatgtgagcaggtg

SEQ ID NO: 807568 - DNA, 15 bp, Homo sapiens
catgtgagcaggtga

SEQ ID NO: 807569 - DNA, 15 bp, Homo sapiens
atgtgagcaggtgag

SEQ ID NO: 807570 - DNA, 15 bp, Homo sapiens
tgtgagcaggtgagg

SEQ ID NO: 807571 - DNA, 15 bp, Homo sapiens
gtgagcaggtgaggc

SEQ ID NO: 807572 - DNA, 15 bp, Homo sapiens
tgagcaggtgaggct

SEQ ID NO: 807573 - DNA, 15 bp, Homo sapiens
gagcaggtgaggctt

SEQ ID NO: 807574 - DNA, 15 bp, Homo sapiens
agcaggtgaggcttc

SEQ ID NO: 807575 - DNA, 15 bp, Homo sapiens
gcaggtgaggcttct

SEQ ID NO: 807576 - DNA, 15 bp, Homo sapiens
caggtgaggcttctg

SEQ ID NO: 807577 - DNA, 15 bp, Homo sapiens
aggtgaggcttctgg

SEQ ID NO: 807578 - DNA, 15 bp, Homo sapiens
ggtgaggcttctggg

SEQ ID NO: 807579 - DNA, 15 bp, Homo sapiens
gtgaggcttctggga

SEQ ID NO: 807580 - DNA, 15 bp, Homo sapiens
tgaggcttctgggag

SEQ ID NO: 807581 - DNA, 15 bp, Homo sapiens
gaggcttctgggagg

SEQ ID NO: 807582 - DNA, 15 bp, Homo sapiens
aggcttctgggagga

SEQ ID NO: 807583 - DNA, 15 bp, Homo sapiens
ggcttctgggaggag

SEQ ID NO: 807584 - DNA, 15 bp, Homo sapiens
gcttctgggaggagg

SEQ ID NO: 807585 - DNA, 15 bp, Homo sapiens
cttctgggaggagga

SEQ ID NO: 807586 - DNA, 15 bp, Homo sapiens
ttctgggaggaggaa

SEQ ID NO: 807587 - DNA, 15 bp, Homo sapiens
tctgggaggaggaaa

SEQ ID NO: 807588 - DNA, 15 bp, Homo sapiens
ctgggaggaggaaag

SEQ ID NO: 807589 - DNA, 15 bp, Homo sapiens
tgggaggaggaaagt

SEQ ID NO: 807590 - DNA, 15 bp, Homo sapiens
gggaggaggaaagtg

SEQ ID NO: 807591 - DNA, 15 bp, Homo sapiens
ggaggaggaaagtgc

SEQ ID NO: 807592 - DNA, 15 bp, Homo sapiens
gaggaggaaagtgct

SEQ ID NO: 807593 - DNA, 15 bp, Homo sapiens
aggaggaaagtgctt

SEQ ID NO: 807594 - DNA, 15 bp, Homo sapiens
ggaggaaagtgcttg

SEQ ID NO: 807595 - DNA, 15 bp, Homo sapiens
gaggaaagtgcttgt

SEQ ID NO: 807596 - DNA, 15 bp, Homo sapiens
aggaaagtgcttgtg

SEQ ID NO: 807597 - DNA, 15 bp, Homo sapiens
ggaaagtgcttgtgc

SEQ ID NO: 807598 - DNA, 15 bp, Homo sapiens
gaaagtgcttgtgcg

SEQ ID NO: 807599 - DNA, 15 bp, Homo sapiens
aaagtgcttgtgcga

SEQ ID NO: 807600 - DNA, 15 bp, Homo sapiens
aagtgcttgtgcgaa

SEQ ID NO: 807601 - DNA, 15 bp, Homo sapiens
agtgcttgtgcgaag

SEQ ID NO: 807602 - DNA, 15 bp, Homo sapiens
gtgcttgtgcgaagg

SEQ ID NO: 807603 - DNA, 15 bp, Homo sapiens
tgcttgtgcgaaggc

SEQ ID NO: 807604 - DNA, 15 bp, Homo sapiens
gcttgtgcgaaggct

SEQ ID NO: 807605 - DNA, 15 bp, Homo sapiens
cttgtgcgaaggctc

SEQ ID NO: 807606 - DNA, 15 bp, Homo sapiens
ttgtgcgaaggctct

SEQ ID NO: 807607 - DNA, 15 bp, Homo sapiens
tgtgcgaaggctctg

SEQ ID NO: 807608 - DNA, 15 bp, Homo sapiens
gtgcgaaggctctgt

SEQ ID NO: 807609 - DNA, 15 bp, Homo sapiens
tgcgaaggctctgtg

SEQ ID NO: 807610 - DNA, 15 bp, Homo sapiens
gcgaaggctctgtgg

SEQ ID NO: 807611 - DNA, 15 bp, Homo sapiens
cgaaggctctgtggt

SEQ ID NO: 807612 - DNA, 15 bp, Homo sapiens
gaaggctctgtggtg

SEQ ID NO: 807613 - DNA, 15 bp, Homo sapiens
aaggctctgtggtgg

SEQ ID NO: 807614 - DNA, 15 bp, Homo sapiens
aggctctgtggtggt

SEQ ID NO: 807615 - DNA, 15 bp, Homo sapiens
ggctctgtggtggtt

SEQ ID NO: 807616 - DNA, 15 bp, Homo sapiens
gctctgtggtggttg

SEQ ID NO: 807617 - DNA, 15 bp, Homo sapiens
ctctgtggtggttgg

SEQ ID NO: 807618 - DNA, 15 bp, Homo sapiens
tctgtggtggttggg

SEQ ID NO: 807619 - DNA, 15 bp, Homo sapiens
ctgtggtggttgggg

SEQ ID NO: 807620 - DNA, 15 bp, Homo sapiens
tgtggtggttggggt

SEQ ID NO: 807621 - DNA, 15 bp, Homo sapiens
gtggtggttggggtg

SEQ ID NO: 807622 - DNA, 15 bp, Homo sapiens
tggtggttggggtgg

SEQ ID NO: 807623 - DNA, 15 bp, Homo sapiens
ggtggttggggtggg

SEQ ID NO: 807624 - DNA, 15 bp, Homo sapiens
gtggttggggtggga

SEQ ID NO: 807625 - DNA, 15 bp, Homo sapiens
tggttggggtgggag

SEQ ID NO: 807626 - DNA, 15 bp, Homo sapiens
ggttggggtgggagg

SEQ ID NO: 807627 - DNA, 15 bp, Homo sapiens
gttggggtgggagga

SEQ ID NO: 807628 - DNA, 15 bp, Homo sapiens
ttggggtgggaggag

SEQ ID NO: 807629 - DNA, 15 bp, Homo sapiens
tggggtgggaggagg

SEQ ID NO: 807630 - DNA, 15 bp, Homo sapiens
ggggtgggaggaggc

SEQ ID NO: 807631 - DNA, 15 bp, Homo sapiens
gggtgggaggaggca

SEQ ID NO: 807632 - DNA, 15 bp, Homo sapiens
ggtgggaggaggcaa

SEQ ID NO: 807633 - DNA, 15 bp, Homo sapiens
gtgggaggaggcaaa

SEQ ID NO: 807634 - DNA, 15 bp, Homo sapiens
tgggaggaggcaaat

SEQ ID NO: 807635 - DNA, 15 bp, Homo sapiens
gggaggaggcaaatg

SEQ ID NO: 807636 - DNA, 15 bp, Homo sapiens
ggaggaggcaaatgg

SEQ ID NO: 807637 - DNA, 15 bp, Homo sapiens
gaggaggcaaatgga

SEQ ID NO: 807638 - DNA, 15 bp, Homo sapiens
aggaggcaaatggag

SEQ ID NO: 807639 - DNA, 15 bp, Homo sapiens
ggaggcaaatggaga

SEQ ID NO: 807640 - DNA, 15 bp, Homo sapiens
gaggcaaatggagaa

SEQ ID NO: 807641 - DNA, 15 bp, Homo sapiens
aggcaaatggagaat

SEQ ID NO: 807642 - DNA, 15 bp, Homo sapiens
ggcaaatggagaatg

SEQ ID NO: 807643 - DNA, 15 bp, Homo sapiens
gcaaatggagaatga

SEQ ID NO: 807644 - DNA, 15 bp, Homo sapiens
caaatggagaatgag

SEQ ID NO: 807645 - DNA, 15 bp, Homo sapiens
aaatggagaatgaga

SEQ ID NO: 807646 - DNA, 15 bp, Homo sapiens
aatggagaatgagaa

SEQ ID NO: 807647 - DNA, 15 bp, Homo sapiens
atggagaatgagaat

SEQ ID NO: 807648 - DNA, 15 bp, Homo sapiens
tggagaatgagaata

SEQ ID NO: 807649 - DNA, 15 bp, Homo sapiens
ggagaatgagaataa

SEQ ID NO: 807650 - DNA, 15 bp, Homo sapiens
gagaatgagaataac

SEQ ID NO: 807651 - DNA, 15 bp, Homo sapiens
agaatgagaataact

SEQ ID NO: 807652 - DNA, 15 bp, Homo sapiens
gaatgagaataactg

SEQ ID NO: 807653 - DNA, 15 bp, Homo sapiens
aatgagaataactgc

SEQ ID NO: 807654 - DNA, 15 bp, Homo sapiens
atgagaataactgca

SEQ ID NO: 807655 - DNA, 15 bp, Homo sapiens
tgagaataactgcaa

SEQ ID NO: 807656 - DNA, 15 bp, Homo sapiens
gagaataactgcaag

SEQ ID NO: 807657 - DNA, 15 bp, Homo sapiens
agaataactgcaagt

SEQ ID NO: 807658 - DNA, 15 bp, Homo sapiens
gaataactgcaagtt

SEQ ID NO: 807659 - DNA, 15 bp, Homo sapiens
aataactgcaagtta

SEQ ID NO: 807660 - DNA, 15 bp, Homo sapiens
ataactgcaagttag

SEQ ID NO: 807661 - DNA, 15 bp, Homo sapiens
taactgcaagttaga

SEQ ID NO: 807662 - DNA, 15 bp, Homo sapiens
aactgcaagttagat

SEQ ID NO: 807663 - DNA, 15 bp, Homo sapiens
actgcaagttagatt

SEQ ID NO: 807664 - DNA, 15 bp, Homo sapiens
ctgcaagttagattc

SEQ ID NO: 807665 - DNA, 15 bp, Homo sapiens
tgcaagttagattcc

SEQ ID NO: 807666 - DNA, 15 bp, Homo sapiens
gcaagttagattcct

SEQ ID NO: 807667 - DNA, 15 bp, Homo sapiens
caagttagattcctg

SEQ ID NO: 807668 - DNA, 15 bp, Homo sapiens
aagttagattcctgg

SEQ ID NO: 807669 - DNA, 15 bp, Homo sapiens
agttagattcctgga

SEQ ID NO: 807670 - DNA, 15 bp, Homo sapiens
gttagattcctggag

SEQ ID NO: 807671 - DNA, 15 bp, Homo sapiens
ttagattcctggagt

SEQ ID NO: 807672 - DNA, 15 bp, Homo sapiens
tagattcctggagtc

SEQ ID NO: 807673 - DNA, 15 bp, Homo sapiens
agattcctggagtct

SEQ ID NO: 807674 - DNA, 15 bp, Homo sapiens
gattcctggagtcta

SEQ ID NO: 807675 - DNA, 15 bp, Homo sapiens
attcctggagtctag

SEQ ID NO: 807676 - DNA, 15 bp, Homo sapiens
ttcctggagtctaga

SEQ ID NO: 807677 - DNA, 15 bp, Homo sapiens
tcctggagtctagat

SEQ ID NO: 807678 - DNA, 15 bp, Homo sapiens
cctggagtctagatg

SEQ ID NO: 807679 - DNA, 15 bp, Homo sapiens
ctggagtctagatgt

SEQ ID NO: 807680 - DNA, 15 bp, Homo sapiens
tggagtctagatgtg

SEQ ID NO: 807681 - DNA, 15 bp, Homo sapiens
ggagtctagatgtgg

SEQ ID NO: 807682 - DNA, 15 bp, Homo sapiens
gagtctagatgtgga

SEQ ID NO: 807683 - DNA, 15 bp, Homo sapiens
agtctagatgtggaa

SEQ ID NO: 807684 - DNA, 15 bp, Homo sapiens
gtctagatgtggaag

SEQ ID NO: 807685 - DNA, 15 bp, Homo sapiens
tctagatgtggaagc

SEQ ID NO: 807686 - DNA, 15 bp, Homo sapiens
ctagatgtggaagca

SEQ ID NO: 807687 - DNA, 15 bp, Homo sapiens
tagatgtggaagcat

SEQ ID NO: 807688 - DNA, 15 bp, Homo sapiens
agatgtggaagcatg

SEQ ID NO: 807689 - DNA, 15 bp, Homo sapiens
gatgtggaagcatgt

SEQ ID NO: 807690 - DNA, 15 bp, Homo sapiens
atgtggaagcatgtg

SEQ ID NO: 807691 - DNA, 15 bp, Homo sapiens
tgtggaagcatgtga

SEQ ID NO: 807692 - DNA, 15 bp, Homo sapiens
gtggaagcatgtgaa

SEQ ID NO: 807693 - DNA, 15 bp, Homo sapiens
tggaagcatgtgaaa

SEQ ID NO: 807694 - DNA, 15 bp, Homo sapiens
ggaagcatgtgaaat

SEQ ID NO: 807695 - DNA, 15 bp, Homo sapiens
gaagcatgtgaaata

SEQ ID NO: 807696 - DNA, 15 bp, Homo sapiens
aagcatgtgaaataa

SEQ ID NO: 807697 - DNA, 15 bp, Homo sapiens
agcatgtgaaataaa

SEQ ID NO: 807698 - DNA, 15 bp, Homo sapiens
gcatgtgaaataaag

SEQ ID NO: 807699 - DNA, 15 bp, Homo sapiens
catgtgaaataaagc

SEQ ID NO: 807700 - DNA, 15 bp, Homo sapiens
atgtgaaataaagcc

SEQ ID NO: 807701 - DNA, 15 bp, Homo sapiens
tgtgaaataaagcca

SEQ ID NO: 807702 - DNA, 15 bp, Homo sapiens
gtgaaataaagccag

SEQ ID NO: 807703 - DNA, 15 bp, Homo sapiens
tgaaataaagccaga

SEQ ID NO: 807704 - DNA, 15 bp, Homo sapiens
gaaataaagccagag

SEQ ID NO: 807705 - DNA, 15 bp, Homo sapiens
aaataaagccagaga

SEQ ID NO: 807706 - DNA, 15 bp, Homo sapiens
aataaagccagagag

SEQ ID NO: 807707 - DNA, 15 bp, Homo sapiens
ataaagccagagagg

SEQ ID NO: 807708 - DNA, 15 bp, Homo sapiens
taaagccagagagga

SEQ ID NO: 807709 - DNA, 15 bp, Homo sapiens
aaagccagagaggag

SEQ ID NO: 807710 - DNA, 15 bp, Homo sapiens
aagccagagaggagg

SEQ ID NO: 807711 - DNA, 15 bp, Homo sapiens
agccagagaggagga

SEQ ID NO: 807712 - DNA, 15 bp, Homo sapiens
gccagagaggaggaa

SEQ ID NO: 807713 - DNA, 15 bp, Homo sapiens
ccagagaggaggaaa

SEQ ID NO: 807714 - DNA, 15 bp, Homo sapiens
cagagaggaggaaaa

SEQ ID NO: 807715 - DNA, 15 bp, Homo sapiens
agagaggaggaaaag

SEQ ID NO: 807716 - DNA, 15 bp, Homo sapiens
gagaggaggaaaaga

SEQ ID NO: 807717 - DNA, 15 bp, Homo sapiens
agaggaggaaaagac

SEQ ID NO: 807718 - DNA, 15 bp, Homo sapiens
gaggaggaaaagacc

SEQ ID NO: 807719 - DNA, 15 bp, Homo sapiens
aggaggaaaagacca

SEQ ID NO: 807720 - DNA, 15 bp, Homo sapiens
ggaggaaaagaccag

SEQ ID NO: 807721 - DNA, 15 bp, Homo sapiens
gaggaaaagaccaga

SEQ ID NO: 807722 - DNA, 15 bp, Homo sapiens
aggaaaagaccagag

SEQ ID NO: 807723 - DNA, 15 bp, Homo sapiens
ggaaaagaccagagc

SEQ ID NO: 807724 - DNA, 15 bp, Homo sapiens
gaaaagaccagagct

SEQ ID NO: 807725 - DNA, 15 bp, Homo sapiens
aaaagaccagagctt

SEQ ID NO: 807726 - DNA, 15 bp, Homo sapiens
aaagaccagagcttt

SEQ ID NO: 807727 - DNA, 15 bp, Homo sapiens
aagaccagagctttc

SEQ ID NO: 807728 - DNA, 15 bp, Homo sapiens
agaccagagctttca

SEQ ID NO: 807729 - DNA, 15 bp, Homo sapiens
gaccagagctttcag

SEQ ID NO: 807730 - DNA, 15 bp, Homo sapiens
accagagctttcagg

SEQ ID NO: 807731 - DNA, 15 bp, Homo sapiens
ccagagctttcaggg

SEQ ID NO: 807732 - DNA, 15 bp, Homo sapiens
cagagctttcagggc

SEQ ID NO: 807733 - DNA, 15 bp, Homo sapiens
agagctttcagggcc

SEQ ID NO: 807734 - DNA, 15 bp, Homo sapiens
gagctttcagggcct

SEQ ID NO: 807735 - DNA, 15 bp, Homo sapiens
agctttcagggcctt

SEQ ID NO: 807736 - DNA, 15 bp, Homo sapiens
gctttcagggccttg

SEQ ID NO: 807737 - DNA, 15 bp, Homo sapiens
ctttcagggccttgt

SEQ ID NO: 807738 - DNA, 15 bp, Homo sapiens
tttcagggccttgtg

SEQ ID NO: 807739 - DNA, 15 bp, Homo sapiens
ttcagggccttgtgg

SEQ ID NO: 807740 - DNA, 15 bp, Homo sapiens
tcagggccttgtgga

SEQ ID NO: 807741 - DNA, 15 bp, Homo sapiens
cagggccttgtggac

SEQ ID NO: 807742 - DNA, 15 bp, Homo sapiens
agggccttgtggact

SEQ ID NO: 807743 - DNA, 15 bp, Homo sapiens
gggccttgtggactc

SEQ ID NO: 807744 - DNA, 15 bp, Homo sapiens
ggccttgtggactct

SEQ ID NO: 807745 - DNA, 15 bp, Homo sapiens
gccttgtggactctg

SEQ ID NO: 807746 - DNA, 15 bp, Homo sapiens
ccttgtggactctgt

SEQ ID NO: 807747 - DNA, 15 bp, Homo sapiens
cttgtggactctgtc

SEQ ID NO: 807748 - DNA, 15 bp, Homo sapiens
ttgtggactctgtca

SEQ ID NO: 807749 - DNA, 15 bp, Homo sapiens
tgtggactctgtcaa

SEQ ID NO: 807750 - DNA, 15 bp, Homo sapiens
gtggactctgtcaag

SEQ ID NO: 807751 - DNA, 15 bp, Homo sapiens
tggactctgtcaagg

SEQ ID NO: 807752 - DNA, 15 bp, Homo sapiens
ggactctgtcaagga

SEQ ID NO: 807753 - DNA, 15 bp, Homo sapiens
gactctgtcaaggat

SEQ ID NO: 807754 - DNA, 15 bp, Homo sapiens
actctgtcaaggatt

SEQ ID NO: 807755 - DNA, 15 bp, Homo sapiens
ctctgtcaaggattt

SEQ ID NO: 807756 - DNA, 15 bp, Homo sapiens
tctgtcaaggatttt

SEQ ID NO: 807757 - DNA, 15 bp, Homo sapiens
ctgtcaaggattttt

SEQ ID NO: 807758 - DNA, 15 bp, Homo sapiens
tgtcaaggatttttt

SEQ ID NO: 807759 - DNA, 15 bp, Homo sapiens
gtcaaggattttttt

SEQ ID NO: 807760 - DNA, 15 bp, Homo sapiens
tcaaggatttttttt

SEQ ID NO: 807761 - DNA, 15 bp, Homo sapiens
caaggattttttttt

SEQ ID NO: 807762 - DNA, 15 bp, Homo sapiens
aaggatttttttttt

SEQ ID NO: 807763 - DNA, 15 bp, Homo sapiens
aggattttttttttc

SEQ ID NO: 807764 - DNA, 15 bp, Homo sapiens
ggattttttttttct

SEQ ID NO: 807765 - DNA, 15 bp, Homo sapiens
gattttttttttctt

SEQ ID NO: 807766 - DNA, 15 bp, Homo sapiens
attttttttttcttc

SEQ ID NO: 807767 - DNA, 15 bp, Homo sapiens
ttttttttttcttca

SEQ ID NO: 807768 - DNA, 15 bp, Homo sapiens
tttttttttcttcat

SEQ ID NO: 807769 - DNA, 15 bp, Homo sapiens
ttttttttcttcata

SEQ ID NO: 807770 - DNA, 15 bp, Homo sapiens
tttttttcttcatac

SEQ ID NO: 807771 - DNA, 15 bp, Homo sapiens
ttttttcttcatacc

SEQ ID NO: 807772 - DNA, 15 bp, Homo sapiens
tttttcttcatacca

SEQ ID NO: 807773 - DNA, 15 bp, Homo sapiens
ttttcttcataccaa

SEQ ID NO: 807774 - DNA, 15 bp, Homo sapiens
tttcttcataccaaa

SEQ ID NO: 807775 - DNA, 15 bp, Homo sapiens
ttcttcataccaaaa

SEQ ID NO: 807776 - DNA, 15 bp, Homo sapiens
tcttcataccaaaag

SEQ ID NO: 807777 - DNA, 15 bp, Homo sapiens
cttcataccaaaagt

SEQ ID NO: 807778 - DNA, 15 bp, Homo sapiens
ttcataccaaaagtt

SEQ ID NO: 807779 - DNA, 15 bp, Homo sapiens
tcataccaaaagtta

SEQ ID NO: 807780 - DNA, 15 bp, Homo sapiens
cataccaaaagttat

SEQ ID NO: 807781 - DNA, 15 bp, Homo sapiens
ataccaaaagttatg

SEQ ID NO: 807782 - DNA, 15 bp, Homo sapiens
taccaaaagttatgg

SEQ ID NO: 807783 - DNA, 15 bp, Homo sapiens
accaaaagttatgga

SEQ ID NO: 807784 - DNA, 15 bp, Homo sapiens
ccaaaagttatggag

SEQ ID NO: 807785 - DNA, 15 bp, Homo sapiens
caaaagttatggagg

SEQ ID NO: 807786 - DNA, 15 bp, Homo sapiens
aaaagttatggagga

SEQ ID NO: 807787 - DNA, 15 bp, Homo sapiens
aaagttatggaggac

SEQ ID NO: 807788 - DNA, 15 bp, Homo sapiens
aagttatggaggaca

SEQ ID NO: 807789 - DNA, 15 bp, Homo sapiens
agttatggaggacat

SEQ ID NO: 807790 - DNA, 15 bp, Homo sapiens
gttatggaggacatt

SEQ ID NO: 807791 - DNA, 15 bp, Homo sapiens
ttatggaggacattt

SEQ ID NO: 807792 - DNA, 15 bp, Homo sapiens
tatggaggacatttg

SEQ ID NO: 807793 - DNA, 15 bp, Homo sapiens
atggaggacatttga

SEQ ID NO: 807794 - DNA, 15 bp, Homo sapiens
tggaggacatttgag

SEQ ID NO: 807795 - DNA, 15 bp, Homo sapiens
ggaggacatttgagg

SEQ ID NO: 807796 - DNA, 15 bp, Homo sapiens
gaggacatttgaggt

SEQ ID NO: 807797 - DNA, 15 bp, Homo sapiens
aggacatttgaggtg

SEQ ID NO: 807798 - DNA, 15 bp, Homo sapiens
ggacatttgaggtga

SEQ ID NO: 807799 - DNA, 15 bp, Homo sapiens
gacatttgaggtgat

SEQ ID NO: 807800 - DNA, 15 bp, Homo sapiens
acatttgaggtgatt

SEQ ID NO: 807801 - DNA, 15 bp, Homo sapiens
catttgaggtgattt

SEQ ID NO: 807802 - DNA, 15 bp, Homo sapiens
atttgaggtgattta

SEQ ID NO: 807803 - DNA, 15 bp, Homo sapiens
tttgaggtgatttaa

SEQ ID NO: 807804 - DNA, 15 bp, Homo sapiens
ttgaggtgatttaag

SEQ ID NO: 807805 - DNA, 15 bp, Homo sapiens
tgaggtgatttaagg

SEQ ID NO: 807806 - DNA, 15 bp, Homo sapiens
gaggtgatttaagga

SEQ ID NO: 807807 - DNA, 15 bp, Homo sapiens
aggtgatttaaggag

SEQ ID NO: 807808 - DNA, 15 bp, Homo sapiens
ggtgatttaaggagg

SEQ ID NO: 807809 - DNA, 15 bp, Homo sapiens
gtgatttaaggaggg

SEQ ID NO: 807810 - DNA, 15 bp, Homo sapiens
tgatttaaggaggga

SEQ ID NO: 807811 - DNA, 15 bp, Homo sapiens
gatttaaggagggat

SEQ ID NO: 807812 - DNA, 15 bp, Homo sapiens
atttaaggagggatt

SEQ ID NO: 807813 - DNA, 15 bp, Homo sapiens
tttaaggagggattc

SEQ ID NO: 807814 - DNA, 15 bp, Homo sapiens
ttaaggagggattct

SEQ ID NO: 807815 - DNA, 15 bp, Homo sapiens
taaggagggattctc

SEQ ID NO: 807816 - DNA, 15 bp, Homo sapiens
aaggagggattctct

SEQ ID NO: 807817 - DNA, 15 bp, Homo sapiens
aggagggattctctc

SEQ ID NO: 807818 - DNA, 15 bp, Homo sapiens
ggagggattctctcc

SEQ ID NO: 807819 - DNA, 15 bp, Homo sapiens
gagggattctctccg

SEQ ID NO: 807820 - DNA, 15 bp, Homo sapiens
agggattctctccga

SEQ ID NO: 807821 - DNA, 15 bp, Homo sapiens
gggattctctccgat

SEQ ID NO: 807822 - DNA, 15 bp, Homo sapiens
ggattctctccgatt

SEQ ID NO: 807823 - DNA, 15 bp, Homo sapiens
gattctctccgattt

SEQ ID NO: 807824 - DNA, 15 bp, Homo sapiens
attctctccgattta

SEQ ID NO: 807825 - DNA, 15 bp, Homo sapiens
ttctctccgatttac

SEQ ID NO: 807826 - DNA, 15 bp, Homo sapiens
tctctccgatttaca

SEQ ID NO: 807827 - DNA, 15 bp, Homo sapiens
ctctccgatttacat

SEQ ID NO: 807828 - DNA, 15 bp, Homo sapiens
tctccgatttacatg

SEQ ID NO: 807829 - DNA, 15 bp, Homo sapiens
ctccgatttacatgt

SEQ ID NO: 807830 - DNA, 15 bp, Homo sapiens
tccgatttacatgtg

SEQ ID NO: 807831 - DNA, 15 bp, Homo sapiens
ccgatttacatgtgt

SEQ ID NO: 807832 - DNA, 15 bp, Homo sapiens
cgatttacatgtgtg

SEQ ID NO: 807833 - DNA, 15 bp, Homo sapiens
gatttacatgtgtgt

SEQ ID NO: 807834 - DNA, 15 bp, Homo sapiens
atttacatgtgtgtc

SEQ ID NO: 807835 - DNA, 15 bp, Homo sapiens
tttacatgtgtgtcc

SEQ ID NO: 807836 - DNA, 15 bp, Homo sapiens
ttacatgtgtgtcct

SEQ ID NO: 807837 - DNA, 15 bp, Homo sapiens
tacatgtgtgtccta

SEQ ID NO: 807838 - DNA, 15 bp, Homo sapiens
acatgtgtgtcctaa

SEQ ID NO: 807839 - DNA, 15 bp, Homo sapiens
catgtgtgtcctaag

SEQ ID NO: 807840 - DNA, 15 bp, Homo sapiens
atgtgtgtcctaaga

SEQ ID NO: 807841 - DNA, 15 bp, Homo sapiens
tgtgtgtcctaagaa

SEQ ID NO: 807842 - DNA, 15 bp, Homo sapiens
gtgtgtcctaagaat

SEQ ID NO: 807843 - DNA, 15 bp, Homo sapiens
tgtgtcctaagaatt

SEQ ID NO: 807844 - DNA, 15 bp, Homo sapiens
gtgtcctaagaattc

SEQ ID NO: 807845 - DNA, 15 bp, Homo sapiens
tgtcctaagaattca

SEQ ID NO: 807846 - DNA, 15 bp, Homo sapiens
gtcctaagaattcag

SEQ ID NO: 807847 - DNA, 15 bp, Homo sapiens
tcctaagaattcagt

SEQ ID NO: 807848 - DNA, 15 bp, Homo sapiens
cctaagaattcagtc

SEQ ID NO: 807849 - DNA, 15 bp, Homo sapiens
ctaagaattcagtcc

SEQ ID NO: 807850 - DNA, 15 bp, Homo sapiens
taagaattcagtcca

SEQ ID NO: 807851 - DNA, 15 bp, Homo sapiens
aagaattcagtccat

SEQ ID NO: 807852 - DNA, 15 bp, Homo sapiens
agaattcagtccatt

SEQ ID NO: 807853 - DNA, 15 bp, Homo sapiens
gaattcagtccattg

SEQ ID NO: 807854 - DNA, 15 bp, Homo sapiens
aattcagtccattgc

SEQ ID NO: 807855 - DNA, 15 bp, Homo sapiens
attcagtccattgca

SEQ ID NO: 807856 - DNA, 15 bp, Homo sapiens
ttcagtccattgcac

SEQ ID NO: 807857 - DNA, 15 bp, Homo sapiens
tcagtccattgcaca

SEQ ID NO: 807858 - DNA, 15 bp, Homo sapiens
cagtccattgcacac

SEQ ID NO: 807859 - DNA, 15 bp, Homo sapiens
agtccattgcacaca

SEQ ID NO: 807860 - DNA, 15 bp, Homo sapiens
gtccattgcacacag

SEQ ID NO: 807861 - DNA, 15 bp, Homo sapiens
tccattgcacacaga

SEQ ID NO: 807862 - DNA, 15 bp, Homo sapiens
ccattgcacacagag

SEQ ID NO: 807863 - DNA, 15 bp, Homo sapiens
cattgcacacagagt

SEQ ID NO: 807864 - DNA, 15 bp, Homo sapiens
attgcacacagagta

SEQ ID NO: 807865 - DNA, 15 bp, Homo sapiens
ttgcacacagagtat

SEQ ID NO: 807866 - DNA, 15 bp, Homo sapiens
tgcacacagagtatg

SEQ ID NO: 807867 - DNA, 15 bp, Homo sapiens
gcacacagagtatgg

SEQ ID NO: 807868 - DNA, 15 bp, Homo sapiens
cacacagagtatggc

SEQ ID NO: 807869 - DNA, 15 bp, Homo sapiens
acacagagtatggct

SEQ ID NO: 807870 - DNA, 15 bp, Homo sapiens
cacagagtatggctt

SEQ ID NO: 807871 - DNA, 15 bp, Homo sapiens
acagagtatggcttc

SEQ ID NO: 807872 - DNA, 15 bp, Homo sapiens
cagagtatggcttca

SEQ ID NO: 807873 - DNA, 15 bp, Homo sapiens
agagtatggcttcat

SEQ ID NO: 807874 - DNA, 15 bp, Homo sapiens
gagtatggcttcata

SEQ ID NO: 807875 - DNA, 15 bp, Homo sapiens
agtatggcttcatag

SEQ ID NO: 807876 - DNA, 15 bp, Homo sapiens
gtatggcttcatagt

SEQ ID NO: 807877 - DNA, 15 bp, Homo sapiens
tatggcttcatagta

SEQ ID NO: 807878 - DNA, 15 bp, Homo sapiens
atggcttcatagtat

SEQ ID NO: 807879 - DNA, 15 bp, Homo sapiens
tggcttcatagtatt

SEQ ID NO: 807880 - DNA, 15 bp, Homo sapiens
ggcttcatagtattg

SEQ ID NO: 807881 - DNA, 15 bp, Homo sapiens
gcttcatagtattgc

SEQ ID NO: 807882 - DNA, 15 bp, Homo sapiens
cttcatagtattgca

SEQ ID NO: 807883 - DNA, 15 bp, Homo sapiens
ttcatagtattgcac

SEQ ID NO: 807884 - DNA, 15 bp, Homo sapiens
tcatagtattgcact

SEQ ID NO: 807885 - DNA, 15 bp, Homo sapiens
catagtattgcactt

SEQ ID NO: 807886 - DNA, 15 bp, Homo sapiens
atagtattgcacttt

SEQ ID NO: 807887 - DNA, 15 bp, Homo sapiens
tagtattgcactttt

SEQ ID NO: 807888 - DNA, 15 bp, Homo sapiens
agtattgcacttttg

SEQ ID NO: 807889 - DNA, 15 bp, Homo sapiens
gtattgcacttttgg

SEQ ID NO: 807890 - DNA, 15 bp, Homo sapiens
tattgcacttttgga

SEQ ID NO: 807891 - DNA, 15 bp, Homo sapiens
attgcacttttggaa

SEQ ID NO: 807892 - DNA, 15 bp, Homo sapiens
ttgcacttttggaag

SEQ ID NO: 807893 - DNA, 15 bp, Homo sapiens
tgcacttttggaagc

SEQ ID NO: 807894 - DNA, 15 bp, Homo sapiens
gcacttttggaagca

SEQ ID NO: 807895 - DNA, 15 bp, Homo sapiens
cacttttggaagcac

SEQ ID NO: 807896 - DNA, 15 bp, Homo sapiens
acttttggaagcacc

SEQ ID NO: 807897 - DNA, 15 bp, Homo sapiens
cttttggaagcacca

SEQ ID NO: 807898 - DNA, 15 bp, Homo sapiens
ttttggaagcaccag

SEQ ID NO: 807899 - DNA, 15 bp, Homo sapiens
tttggaagcaccaga

SEQ ID NO: 807900 - DNA, 15 bp, Homo sapiens
ttggaagcaccagat

SEQ ID NO: 807901 - DNA, 15 bp, Homo sapiens
tggaagcaccagatc

SEQ ID NO: 807902 - DNA, 15 bp, Homo sapiens
ggaagcaccagatcc

SEQ ID NO: 807903 - DNA, 15 bp, Homo sapiens
gaagcaccagatcct

SEQ ID NO: 807904 - DNA, 15 bp, Homo sapiens
aagcaccagatccta

SEQ ID NO: 807905 - DNA, 15 bp, Homo sapiens
agcaccagatcctaa

SEQ ID NO: 807906 - DNA, 15 bp, Homo sapiens
gcaccagatcctaat

SEQ ID NO: 807907 - DNA, 15 bp, Homo sapiens
caccagatcctaatg

SEQ ID NO: 807908 - DNA, 15 bp, Homo sapiens
accagatcctaatgc

SEQ ID NO: 807909 - DNA, 15 bp, Homo sapiens
ccagatcctaatgcc

SEQ ID NO: 807910 - DNA, 15 bp, Homo sapiens
cagatcctaatgcct

SEQ ID NO: 807911 - DNA, 15 bp, Homo sapiens
agatcctaatgcctg

SEQ ID NO: 807912 - DNA, 15 bp, Homo sapiens
gatcctaatgcctgt

SEQ ID NO: 807913 - DNA, 15 bp, Homo sapiens
atcctaatgcctgta

SEQ ID NO: 807914 - DNA, 15 bp, Homo sapiens
tcctaatgcctgtaa

SEQ ID NO: 807915 - DNA, 15 bp, Homo sapiens
cctaatgcctgtaaa

SEQ ID NO: 807916 - DNA, 15 bp, Homo sapiens
ctaatgcctgtaaaa

SEQ ID NO: 807917 - DNA, 15 bp, Homo sapiens
taatgcctgtaaaat

SEQ ID NO: 807918 - DNA, 15 bp, Homo sapiens
aatgcctgtaaaatc

SEQ ID NO: 807919 - DNA, 15 bp, Homo sapiens
atgcctgtaaaatca

SEQ ID NO: 807920 - DNA, 15 bp, Homo sapiens
tgcctgtaaaatcat

SEQ ID NO: 807921 - DNA, 15 bp, Homo sapiens
gcctgtaaaatcata

SEQ ID NO: 807922 - DNA, 15 bp, Homo sapiens
cctgtaaaatcatag

SEQ ID NO: 807923 - DNA, 15 bp, Homo sapiens
ctgtaaaatcataga

SEQ ID NO: 807924 - DNA, 15 bp, Homo sapiens
tgtaaaatcatagag

SEQ ID NO: 807925 - DNA, 15 bp, Homo sapiens
gtaaaatcatagaga

SEQ ID NO: 807926 - DNA, 15 bp, Homo sapiens
taaaatcatagagat

SEQ ID NO: 807927 - DNA, 15 bp, Homo sapiens
aaaatcatagagatt

SEQ ID NO: 807928 - DNA, 15 bp, Homo sapiens
aaatcatagagattt

SEQ ID NO: 807929 - DNA, 15 bp, Homo sapiens
aatcatagagatttt

SEQ ID NO: 807930 - DNA, 15 bp, Homo sapiens
atcatagagattttt

SEQ ID NO: 807931 - DNA, 15 bp, Homo sapiens
tcatagagattttta

SEQ ID NO: 807932 - DNA, 15 bp, Homo sapiens
catagagatttttac

SEQ ID NO: 807933 - DNA, 15 bp, Homo sapiens
atagagatttttact

SEQ ID NO: 807934 - DNA, 15 bp, Homo sapiens
tagagatttttacta

SEQ ID NO: 807935 - DNA, 15 bp, Homo sapiens
agagatttttactag

SEQ ID NO: 807936 - DNA, 15 bp, Homo sapiens
gagatttttactagg

SEQ ID NO: 807937 - DNA, 15 bp, Homo sapiens
agatttttactaggt

SEQ ID NO: 807938 - DNA, 15 bp, Homo sapiens
gatttttactaggtt

SEQ ID NO: 807939 - DNA, 15 bp, Homo sapiens
atttttactaggttt

SEQ ID NO: 807940 - DNA, 15 bp, Homo sapiens
tttttactaggtttc

SEQ ID NO: 807941 - DNA, 15 bp, Homo sapiens
ttttactaggtttcc

SEQ ID NO: 807942 - DNA, 15 bp, Homo sapiens
tttactaggtttcct

SEQ ID NO: 807943 - DNA, 15 bp, Homo sapiens
ttactaggtttcctt

SEQ ID NO: 807944 - DNA, 15 bp, Homo sapiens
tactaggtttcctta

SEQ ID NO: 807945 - DNA, 15 bp, Homo sapiens
actaggtttccttac

SEQ ID NO: 807946 - DNA, 15 bp, Homo sapiens
ctaggtttccttaca

SEQ ID NO: 807947 - DNA, 15 bp, Homo sapiens
taggtttccttacat

SEQ ID NO: 807948 - DNA, 15 bp, Homo sapiens
aggtttccttacatg

SEQ ID NO: 807949 - DNA, 15 bp, Homo sapiens
ggtttccttacatgt

SEQ ID NO: 807950 - DNA, 15 bp, Homo sapiens
gtttccttacatgtg

SEQ ID NO: 807951 - DNA, 15 bp, Homo sapiens
tttccttacatgtga

SEQ ID NO: 807952 - DNA, 15 bp, Homo sapiens
ttccttacatgtgaa

SEQ ID NO: 807953 - DNA, 15 bp, Homo sapiens
tccttacatgtgaac

SEQ ID NO: 807954 - DNA, 15 bp, Homo sapiens
ccttacatgtgaaca

SEQ ID NO: 807955 - DNA, 15 bp, Homo sapiens
cttacatgtgaacaa

SEQ ID NO: 807956 - DNA, 15 bp, Homo sapiens
ttacatgtgaacaaa

SEQ ID NO: 807957 - DNA, 15 bp, Homo sapiens
tacatgtgaacaaat

SEQ ID NO: 807958 - DNA, 15 bp, Homo sapiens
acatgtgaacaaatc

SEQ ID NO: 807959 - DNA, 15 bp, Homo sapiens
catgtgaacaaatca

SEQ ID NO: 807960 - DNA, 15 bp, Homo sapiens
atgtgaacaaatcag

SEQ ID NO: 807961 - DNA, 15 bp, Homo sapiens
tgtgaacaaatcagt

SEQ ID NO: 807962 - DNA, 15 bp, Homo sapiens
gtgaacaaatcagtt

SEQ ID NO: 807963 - DNA, 15 bp, Homo sapiens
tgaacaaatcagttt

SEQ ID NO: 807964 - DNA, 15 bp, Homo sapiens
gaacaaatcagtttt

SEQ ID NO: 807965 - DNA, 15 bp, Homo sapiens
aacaaatcagtttta

SEQ ID NO: 807966 - DNA, 15 bp, Homo sapiens
acaaatcagttttac

SEQ ID NO: 807967 - DNA, 15 bp, Homo sapiens
caaatcagttttact

SEQ ID NO: 807968 - DNA, 15 bp, Homo sapiens
aaatcagttttactc

SEQ ID NO: 807969 - DNA, 15 bp, Homo sapiens
aatcagttttactct

SEQ ID NO: 807970 - DNA, 15 bp, Homo sapiens
atcagttttactctt

SEQ ID NO: 807971 - DNA, 15 bp, Homo sapiens
tcagttttactctta

SEQ ID NO: 807972 - DNA, 15 bp, Homo sapiens
cagttttactcttat

SEQ ID NO: 807973 - DNA, 15 bp, Homo sapiens
agttttactcttatc

SEQ ID NO: 807974 - DNA, 15 bp, Homo sapiens
gttttactcttatct

SEQ ID NO: 807975 - DNA, 15 bp, Homo sapiens
ttttactcttatctg

SEQ ID NO: 807976 - DNA, 15 bp, Homo sapiens
tttactcttatctgg

SEQ ID NO: 807977 - DNA, 15 bp, Homo sapiens
ttactcttatctggc

SEQ ID NO: 807978 - DNA, 15 bp, Homo sapiens
tactcttatctggca

SEQ ID NO: 807979 - DNA, 15 bp, Homo sapiens
actcttatctggcaa

SEQ ID NO: 807980 - DNA, 15 bp, Homo sapiens
ctcttatctggcaat

SEQ ID NO: 807981 - DNA, 15 bp, Homo sapiens
tcttatctggcaatc

SEQ ID NO: 807982 - DNA, 15 bp, Homo sapiens
cttatctggcaatcc

SEQ ID NO: 807983 - DNA, 15 bp, Homo sapiens
ttatctggcaatccc

SEQ ID NO: 807984 - DNA, 15 bp, Homo sapiens
tatctggcaatccca

SEQ ID NO: 807985 - DNA, 15 bp, Homo sapiens
atctggcaatcccat

SEQ ID NO: 807986 - DNA, 15 bp, Homo sapiens
tctggcaatcccatg

SEQ ID NO: 807987 - DNA, 15 bp, Homo sapiens
ctggcaatcccatgc

SEQ ID NO: 807988 - DNA, 15 bp, Homo sapiens
tggcaatcccatgca

SEQ ID NO: 807989 - DNA, 15 bp, Homo sapiens
ggcaatcccatgcat

SEQ ID NO: 807990 - DNA, 15 bp, Homo sapiens
gcaatcccatgcatt

SEQ ID NO: 807991 - DNA, 15 bp, Homo sapiens
caatcccatgcattt

SEQ ID NO: 807992 - DNA, 15 bp, Homo sapiens
aatcccatgcatttt

SEQ ID NO: 807993 - DNA, 15 bp, Homo sapiens
atcccatgcatttta

SEQ ID NO: 807994 - DNA, 15 bp, Homo sapiens
tcccatgcattttat

SEQ ID NO: 807995 - DNA, 15 bp, Homo sapiens
cccatgcattttatt

SEQ ID NO: 807996 - DNA, 15 bp, Homo sapiens
ccatgcattttattt

SEQ ID NO: 807997 - DNA, 15 bp, Homo sapiens
catgcattttatttt

SEQ ID NO: 807998 - DNA, 15 bp, Homo sapiens
atgcattttatttta

SEQ ID NO: 807999 - DNA, 15 bp, Homo sapiens
tgcattttattttaa

SEQ ID NO: 808000 - DNA, 15 bp, Homo sapiens
gcattttattttaat

SEQ ID NO: 808001 - DNA, 15 bp, Homo sapiens
cattttattttaatg

SEQ ID NO: 808002 - DNA, 15 bp, Homo sapiens
attttattttaatgc

SEQ ID NO: 808003 - DNA, 15 bp, Homo sapiens
ttttattttaatgct

SEQ ID NO: 808004 - DNA, 15 bp, Homo sapiens
tttattttaatgcta

SEQ ID NO: 808005 - DNA, 15 bp, Homo sapiens
ttattttaatgctat

SEQ ID NO: 808006 - DNA, 15 bp, Homo sapiens
tattttaatgctata

SEQ ID NO: 808007 - DNA, 15 bp, Homo sapiens
attttaatgctataa

SEQ ID NO: 808008 - DNA, 15 bp, Homo sapiens
ttttaatgctataat

SEQ ID NO: 808009 - DNA, 15 bp, Homo sapiens
tttaatgctataatc

SEQ ID NO: 808010 - DNA, 15 bp, Homo sapiens
ttaatgctataatcc

SEQ ID NO: 808011 - DNA, 15 bp, Homo sapiens
taatgctataatccc

SEQ ID NO: 808012 - DNA, 15 bp, Homo sapiens
aatgctataatccca

SEQ ID NO: 808013 - DNA, 15 bp, Homo sapiens
atgctataatcccaa

SEQ ID NO: 808014 - DNA, 15 bp, Homo sapiens
tgctataatcccaaa

SEQ ID NO: 808015 - DNA, 15 bp, Homo sapiens
gctataatcccaaat

SEQ ID NO: 808016 - DNA, 15 bp, Homo sapiens
ctataatcccaaata

SEQ ID NO: 808017 - DNA, 15 bp, Homo sapiens
tataatcccaaatac

SEQ ID NO: 808018 - DNA, 15 bp, Homo sapiens
ataatcccaaatacc

SEQ ID NO: 808019 - DNA, 15 bp, Homo sapiens
taatcccaaatacca

SEQ ID NO: 808020 - DNA, 15 bp, Homo sapiens
aatcccaaataccaa

SEQ ID NO: 808021 - DNA, 15 bp, Homo sapiens
atcccaaataccaac

SEQ ID NO: 808022 - DNA, 15 bp, Homo sapiens
tcccaaataccaact

SEQ ID NO: 808023 - DNA, 15 bp, Homo sapiens
cccaaataccaacta

SEQ ID NO: 808024 - DNA, 15 bp, Homo sapiens
ccaaataccaactac

SEQ ID NO: 808025 - DNA, 15 bp, Homo sapiens
caaataccaactaca

SEQ ID NO: 808026 - DNA, 15 bp, Homo sapiens
aaataccaactacaa

SEQ ID NO: 808027 - DNA, 15 bp, Homo sapiens
aataccaactacaaa

SEQ ID NO: 808028 - DNA, 15 bp, Homo sapiens
ataccaactacaaag

SEQ ID NO: 808029 - DNA, 15 bp, Homo sapiens
taccaactacaaagc

SEQ ID NO: 808030 - DNA, 15 bp, Homo sapiens
accaactacaaagcc

SEQ ID NO: 808031 - DNA, 15 bp, Homo sapiens
ccaactacaaagccc

SEQ ID NO: 808032 - DNA, 15 bp, Homo sapiens
caactacaaagcccc

SEQ ID NO: 808033 - DNA, 15 bp, Homo sapiens
aactacaaagcccct

SEQ ID NO: 808034 - DNA, 15 bp, Homo sapiens
actacaaagcccctc

SEQ ID NO: 808035 - DNA, 15 bp, Homo sapiens
ctacaaagcccctct

SEQ ID NO: 808036 - DNA, 15 bp, Homo sapiens
tacaaagcccctctt

SEQ ID NO: 808037 - DNA, 15 bp, Homo sapiens
acaaagcccctcttt

SEQ ID NO: 808038 - DNA, 15 bp, Homo sapiens
caaagcccctctttc

SEQ ID NO: 808039 - DNA, 15 bp, Homo sapiens
aaagcccctctttct

SEQ ID NO: 808040 - DNA, 15 bp, Homo sapiens
aagcccctctttctt

SEQ ID NO: 808041 - DNA, 15 bp, Homo sapiens
agcccctctttcttc

SEQ ID NO: 808042 - DNA, 15 bp, Homo sapiens
gcccctctttcttct

SEQ ID NO: 808043 - DNA, 15 bp, Homo sapiens
cccctctttcttctt

SEQ ID NO: 808044 - DNA, 15 bp, Homo sapiens
ccctctttcttcttc

SEQ ID NO: 808045 - DNA, 15 bp, Homo sapiens
cctctttcttcttcc

SEQ ID NO: 808046 - DNA, 15 bp, Homo sapiens
ctctttcttcttcct

SEQ ID NO: 808047 - DNA, 15 bp, Homo sapiens
tctttcttcttcctt

SEQ ID NO: 808048 - DNA, 15 bp, Homo sapiens
ctttcttcttccttt

SEQ ID NO: 808049 - DNA, 15 bp, Homo sapiens
tttcttcttcctttc

SEQ ID NO: 808050 - DNA, 15 bp, Homo sapiens
ttcttcttcctttct

SEQ ID NO: 808051 - DNA, 15 bp, Homo sapiens
tcttcttcctttctt

SEQ ID NO: 808052 - DNA, 15 bp, Homo sapiens
cttcttcctttcttt

SEQ ID NO: 808053 - DNA, 15 bp, Homo sapiens
ttcttcctttctttc

SEQ ID NO: 808054 - DNA, 15 bp, Homo sapiens
tcttcctttctttca

SEQ ID NO: 808055 - DNA, 15 bp, Homo sapiens
cttcctttctttcat

SEQ ID NO: 808056 - DNA, 15 bp, Homo sapiens
ttcctttctttcatc

SEQ ID NO: 808057 - DNA, 15 bp, Homo sapiens
tcctttctttcatct

SEQ ID NO: 808058 - DNA, 15 bp, Homo sapiens
cctttctttcatctt

SEQ ID NO: 808059 - DNA, 15 bp, Homo sapiens
ctttctttcatcttg

SEQ ID NO: 808060 - DNA, 15 bp, Homo sapiens
tttctttcatcttga

SEQ ID NO: 808061 - DNA, 15 bp, Homo sapiens
ttctttcatcttgaa

SEQ ID NO: 808062 - DNA, 15 bp, Homo sapiens
tctttcatcttgaat

SEQ ID NO: 808063 - DNA, 15 bp, Homo sapiens
ctttcatcttgaata

SEQ ID NO: 808064 - DNA, 15 bp, Homo sapiens
tttcatcttgaatac

SEQ ID NO: 808065 - DNA, 15 bp, Homo sapiens
ttcatcttgaataca

SEQ ID NO: 808066 - DNA, 15 bp, Homo sapiens
tcatcttgaatacat

SEQ ID NO: 808067 - DNA, 15 bp, Homo sapiens
catcttgaatacatc

SEQ ID NO: 808068 - DNA, 15 bp, Homo sapiens
atcttgaatacatct

SEQ ID NO: 808069 - DNA, 15 bp, Homo sapiens
tcttgaatacatctc

SEQ ID NO: 808070 - DNA, 15 bp, Homo sapiens
cttgaatacatctct

SEQ ID NO: 808071 - DNA, 15 bp, Homo sapiens
ttgaatacatctcta

SEQ ID NO: 808072 - DNA, 15 bp, Homo sapiens
tgaatacatctctac

SEQ ID NO: 808073 - DNA, 15 bp, Homo sapiens
gaatacatctctact

SEQ ID NO: 808074 - DNA, 15 bp, Homo sapiens
aatacatctctactt

SEQ ID NO: 808075 - DNA, 15 bp, Homo sapiens
atacatctctactta

SEQ ID NO: 808076 - DNA, 15 bp, Homo sapiens
tacatctctacttaa

SEQ ID NO: 808077 - DNA, 15 bp, Homo sapiens
acatctctacttaat

SEQ ID NO: 808078 - DNA, 15 bp, Homo sapiens
catctctacttaatc

SEQ ID NO: 808079 - DNA, 15 bp, Homo sapiens
atctctacttaatcc

SEQ ID NO: 808080 - DNA, 15 bp, Homo sapiens
tctctacttaatccg

SEQ ID NO: 808081 - DNA, 15 bp, Homo sapiens
ctctacttaatccgt

SEQ ID NO: 808082 - DNA, 15 bp, Homo sapiens
tctacttaatccgtt

SEQ ID NO: 808083 - DNA, 15 bp, Homo sapiens
ctacttaatccgttg

SEQ ID NO: 808084 - DNA, 15 bp, Homo sapiens
tacttaatccgttgt

SEQ ID NO: 808085 - DNA, 15 bp, Homo sapiens
acttaatccgttgtt

SEQ ID NO: 808086 - DNA, 15 bp, Homo sapiens
cttaatccgttgttt

SEQ ID NO: 808087 - DNA, 15 bp, Homo sapiens
ttaatccgttgtttg

SEQ ID NO: 808088 - DNA, 15 bp, Homo sapiens
taatccgttgtttgg

SEQ ID NO: 808089 - DNA, 15 bp, Homo sapiens
aatccgttgtttgga

SEQ ID NO: 808090 - DNA, 15 bp, Homo sapiens
atccgttgtttggag

SEQ ID NO: 808091 - DNA, 15 bp, Homo sapiens
tccgttgtttggagt

SEQ ID NO: 808092 - DNA, 15 bp, Homo sapiens
ccgttgtttggagtc

SEQ ID NO: 808093 - DNA, 15 bp, Homo sapiens
cgttgtttggagtct

SEQ ID NO: 808094 - DNA, 15 bp, Homo sapiens
gttgtttggagtctt

SEQ ID NO: 808095 - DNA, 15 bp, Homo sapiens
ttgtttggagtcttg

SEQ ID NO: 808096 - DNA, 15 bp, Homo sapiens
tgtttggagtcttgg

SEQ ID NO: 808097 - DNA, 15 bp, Homo sapiens
gtttggagtcttggt

SEQ ID NO: 808098 - DNA, 15 bp, Homo sapiens
tttggagtcttggtt

SEQ ID NO: 808099 - DNA, 15 bp, Homo sapiens
ttggagtcttggttt

SEQ ID NO: 808100 - DNA, 15 bp, Homo sapiens
tggagtcttggtttc

SEQ ID NO: 808101 - DNA, 15 bp, Homo sapiens
ggagtcttggtttcc

SEQ ID NO: 808102 - DNA, 15 bp, Homo sapiens
gagtcttggtttcca

SEQ ID NO: 808103 - DNA, 15 bp, Homo sapiens
agtcttggtttccag

SEQ ID NO: 808104 - DNA, 15 bp, Homo sapiens
gtcttggtttccagt

SEQ ID NO: 808105 - DNA, 15 bp, Homo sapiens
tcttggtttccagtg

SEQ ID NO: 808106 - DNA, 15 bp, Homo sapiens
cttggtttccagtga

SEQ ID NO: 808107 - DNA, 15 bp, Homo sapiens
ttggtttccagtgaa

SEQ ID NO: 808108 - DNA, 15 bp, Homo sapiens
tggtttccagtgaat

SEQ ID NO: 808109 - DNA, 15 bp, Homo sapiens
ggtttccagtgaatc

SEQ ID NO: 808110 - DNA, 15 bp, Homo sapiens
gtttccagtgaatca

SEQ ID NO: 808111 - DNA, 15 bp, Homo sapiens
tttccagtgaatcaa

SEQ ID NO: 808112 - DNA, 15 bp, Homo sapiens
ttccagtgaatcaat

SEQ ID NO: 808113 - DNA, 15 bp, Homo sapiens
tccagtgaatcaatt

SEQ ID NO: 808114 - DNA, 15 bp, Homo sapiens
ccagtgaatcaattt

SEQ ID NO: 808115 - DNA, 15 bp, Homo sapiens
cagtgaatcaattta

SEQ ID NO: 808116 - DNA, 15 bp, Homo sapiens
agtgaatcaatttac

SEQ ID NO: 808117 - DNA, 15 bp, Homo sapiens
gtgaatcaatttaca

SEQ ID NO: 808118 - DNA, 15 bp, Homo sapiens
tgaatcaatttacag

SEQ ID NO: 808119 - DNA, 15 bp, Homo sapiens
gaatcaatttacagc

SEQ ID NO: 808120 - DNA, 15 bp, Homo sapiens
aatcaatttacagca

SEQ ID NO: 808121 - DNA, 15 bp, Homo sapiens
atcaatttacagcat

SEQ ID NO: 808122 - DNA, 15 bp, Homo sapiens
tcaatttacagcatt

SEQ ID NO: 808123 - DNA, 15 bp, Homo sapiens
caatttacagcattt

SEQ ID NO: 808124 - DNA, 15 bp, Homo sapiens
aatttacagcatttt

SEQ ID NO: 808125 - DNA, 15 bp, Homo sapiens
atttacagcattttt

SEQ ID NO: 808126 - DNA, 15 bp, Homo sapiens
tttacagcatttttg

SEQ ID NO: 808127 - DNA, 15 bp, Homo sapiens
ttacagcatttttgt

SEQ ID NO: 808128 - DNA, 15 bp, Homo sapiens
tacagcatttttgtg

SEQ ID NO: 808129 - DNA, 15 bp, Homo sapiens
acagcatttttgtgc

SEQ ID NO: 808130 - DNA, 15 bp, Homo sapiens
cagcatttttgtgca

SEQ ID NO: 808131 - DNA, 15 bp, Homo sapiens
agcatttttgtgcat

SEQ ID NO: 808132 - DNA, 15 bp, Homo sapiens
gcatttttgtgcatg

SEQ ID NO: 808133 - DNA, 15 bp, Homo sapiens
catttttgtgcatgt

SEQ ID NO: 808134 - DNA, 15 bp, Homo sapiens
atttttgtgcatgtg

SEQ ID NO: 808135 - DNA, 15 bp, Homo sapiens
tttttgtgcatgtgc

SEQ ID NO: 808136 - DNA, 15 bp, Homo sapiens
ttttgtgcatgtgct

SEQ ID NO: 808137 - DNA, 15 bp, Homo sapiens
tttgtgcatgtgctt

SEQ ID NO: 808138 - DNA, 15 bp, Homo sapiens
ttgtgcatgtgcttc

SEQ ID NO: 808139 - DNA, 15 bp, Homo sapiens
tgtgcatgtgcttcc

SEQ ID NO: 808140 - DNA, 15 bp, Homo sapiens
gtgcatgtgcttcca

SEQ ID NO: 808141 - DNA, 15 bp, Homo sapiens
tgcatgtgcttccat

SEQ ID NO: 808142 - DNA, 15 bp, Homo sapiens
gcatgtgcttccata

SEQ ID NO: 808143 - DNA, 15 bp, Homo sapiens
catgtgcttccataa

SEQ ID NO: 808144 - DNA, 15 bp, Homo sapiens
atgtgcttccataag

SEQ ID NO: 808145 - DNA, 15 bp, Homo sapiens
tgtgcttccataagt

SEQ ID NO: 808146 - DNA, 15 bp, Homo sapiens
gtgcttccataagtc

SEQ ID NO: 808147 - DNA, 15 bp, Homo sapiens
tgcttccataagtca

SEQ ID NO: 808148 - DNA, 15 bp, Homo sapiens
gcttccataagtcaa

SEQ ID NO: 808149 - DNA, 15 bp, Homo sapiens
cttccataagtcaaa

SEQ ID NO: 808150 - DNA, 15 bp, Homo sapiens
ttccataagtcaaat

SEQ ID NO: 808151 - DNA, 15 bp, Homo sapiens
tccataagtcaaatg

SEQ ID NO: 808152 - DNA, 15 bp, Homo sapiens
ccataagtcaaatgt

SEQ ID NO: 808153 - DNA, 15 bp, Homo sapiens
cataagtcaaatgtg

SEQ ID NO: 808154 - DNA, 15 bp, Homo sapiens
ataagtcaaatgtga

SEQ ID NO: 808155 - DNA, 15 bp, Homo sapiens
taagtcaaatgtgat

SEQ ID NO: 808156 - DNA, 15 bp, Homo sapiens
aagtcaaatgtgatg

SEQ ID NO: 808157 - DNA, 15 bp, Homo sapiens
agtcaaatgtgatgt

SEQ ID NO: 808158 - DNA, 15 bp, Homo sapiens
gtcaaatgtgatgtt

SEQ ID NO: 808159 - DNA, 15 bp, Homo sapiens
tcaaatgtgatgttt

SEQ ID NO: 808160 - DNA, 15 bp, Homo sapiens
caaatgtgatgtttc

SEQ ID NO: 808161 - DNA, 15 bp, Homo sapiens
aaatgtgatgtttca

SEQ ID NO: 808162 - DNA, 15 bp, Homo sapiens
aatgtgatgtttcat

SEQ ID NO: 808163 - DNA, 15 bp, Homo sapiens
atgtgatgtttcata

SEQ ID NO: 808164 - DNA, 15 bp, Homo sapiens
tgtgatgtttcatag

SEQ ID NO: 808165 - DNA, 15 bp, Homo sapiens
gtgatgtttcatagt

SEQ ID NO: 808166 - DNA, 15 bp, Homo sapiens
tgatgtttcatagtg

SEQ ID NO: 808167 - DNA, 15 bp, Homo sapiens
gatgtttcatagtgc

SEQ ID NO: 808168 - DNA, 15 bp, Homo sapiens
atgtttcatagtgct

SEQ ID NO: 808169 - DNA, 15 bp, Homo sapiens
tgtttcatagtgcta

SEQ ID NO: 808170 - DNA, 15 bp, Homo sapiens
gtttcatagtgctag

SEQ ID NO: 808171 - DNA, 15 bp, Homo sapiens
tttcatagtgctagc

SEQ ID NO: 808172 - DNA, 15 bp, Homo sapiens
ttcatagtgctagct

SEQ ID NO: 808173 - DNA, 15 bp, Homo sapiens
tcatagtgctagctt

SEQ ID NO: 808174 - DNA, 15 bp, Homo sapiens
catagtgctagcttg

SEQ ID NO: 808175 - DNA, 15 bp, Homo sapiens
atagtgctagcttgg

SEQ ID NO: 808176 - DNA, 15 bp, Homo sapiens
tagtgctagcttggt

SEQ ID NO: 808177 - DNA, 15 bp, Homo sapiens
agtgctagcttggta

SEQ ID NO: 808178 - DNA, 15 bp, Homo sapiens
gtgctagcttggtaa

SEQ ID NO: 808179 - DNA, 15 bp, Homo sapiens
tgctagcttggtaat

SEQ ID NO: 808180 - DNA, 15 bp, Homo sapiens
gctagcttggtaatt

SEQ ID NO: 808181 - DNA, 15 bp, Homo sapiens
ctagcttggtaattt

SEQ ID NO: 808182 - DNA, 15 bp, Homo sapiens
tagcttggtaattta

SEQ ID NO: 808183 - DNA, 15 bp, Homo sapiens
agcttggtaatttag

SEQ ID NO: 808184 - DNA, 15 bp, Homo sapiens
gcttggtaatttagg

SEQ ID NO: 808185 - DNA, 15 bp, Homo sapiens
cttggtaatttaggg

SEQ ID NO: 808186 - DNA, 15 bp, Homo sapiens
ttggtaatttagggg

SEQ ID NO: 808187 - DNA, 15 bp, Homo sapiens
tggtaatttagggga

SEQ ID NO: 808188 - DNA, 15 bp, Homo sapiens
ggtaatttaggggac

SEQ ID NO: 808189 - DNA, 15 bp, Homo sapiens
gtaatttaggggacc

SEQ ID NO: 808190 - DNA, 15 bp, Homo sapiens
taatttaggggacct

SEQ ID NO: 808191 - DNA, 15 bp, Homo sapiens
aatttaggggaccta

SEQ ID NO: 808192 - DNA, 15 bp, Homo sapiens
atttaggggacctat

SEQ ID NO: 808193 - DNA, 15 bp, Homo sapiens
tttaggggacctatg

SEQ ID NO: 808194 - DNA, 15 bp, Homo sapiens
ttaggggacctatgg

SEQ ID NO: 808195 - DNA, 15 bp, Homo sapiens
taggggacctatgga

SEQ ID NO: 808196 - DNA, 15 bp, Homo sapiens
aggggacctatggat

SEQ ID NO: 808197 - DNA, 15 bp, Homo sapiens
ggggacctatggatg

SEQ ID NO: 808198 - DNA, 15 bp, Homo sapiens
gggacctatggatga

SEQ ID NO: 808199 - DNA, 15 bp, Homo sapiens
ggacctatggatgat

SEQ ID NO: 808200 - DNA, 15 bp, Homo sapiens
gacctatggatgatt

SEQ ID NO: 808201 - DNA, 15 bp, Homo sapiens
acctatggatgatta

SEQ ID NO: 808202 - DNA, 15 bp, Homo sapiens
cctatggatgattaa

SEQ ID NO: 808203 - DNA, 15 bp, Homo sapiens
ctatggatgattaaa

SEQ ID NO: 808204 - DNA, 15 bp, Homo sapiens
tatggatgattaaat

SEQ ID NO: 808205 - DNA, 15 bp, Homo sapiens
atggatgattaaatg

SEQ ID NO: 808206 - DNA, 15 bp, Homo sapiens
tggatgattaaatgg

SEQ ID NO: 808207 - DNA, 15 bp, Homo sapiens
ggatgattaaatggc

SEQ ID NO: 808208 - DNA, 15 bp, Homo sapiens
gatgattaaatggct

SEQ ID NO: 808209 - DNA, 15 bp, Homo sapiens
atgattaaatggctc

SEQ ID NO: 808210 - DNA, 15 bp, Homo sapiens
tgattaaatggctct

SEQ ID NO: 808211 - DNA, 15 bp, Homo sapiens
gattaaatggctctg

SEQ ID NO: 808212 - DNA, 15 bp, Homo sapiens
attaaatggctctgc

SEQ ID NO: 808213 - DNA, 15 bp, Homo sapiens
ttaaatggctctgca

SEQ ID NO: 808214 - DNA, 15 bp, Homo sapiens
taaatggctctgcag

SEQ ID NO: 808215 - DNA, 15 bp, Homo sapiens
aaatggctctgcaga

SEQ ID NO: 808216 - DNA, 15 bp, Homo sapiens
aatggctctgcagaa

SEQ ID NO: 808217 - DNA, 15 bp, Homo sapiens
atggctctgcagaaa

SEQ ID NO: 808218 - DNA, 15 bp, Homo sapiens
tggctctgcagaaat

SEQ ID NO: 808219 - DNA, 15 bp, Homo sapiens
ggctctgcagaaata

SEQ ID NO: 808220 - DNA, 15 bp, Homo sapiens
gctctgcagaaatat

SEQ ID NO: 808221 - DNA, 15 bp, Homo sapiens
ctctgcagaaatatt

SEQ ID NO: 808222 - DNA, 15 bp, Homo sapiens
tctgcagaaatatta

SEQ ID NO: 808223 - DNA, 15 bp, Homo sapiens
ctgcagaaatattac

SEQ ID NO: 808224 - DNA, 15 bp, Homo sapiens
tgcagaaatattaca

SEQ ID NO: 808225 - DNA, 15 bp, Homo sapiens
gcagaaatattacag

SEQ ID NO: 808226 - DNA, 15 bp, Homo sapiens
cagaaatattacaga

SEQ ID NO: 808227 - DNA, 15 bp, Homo sapiens
agaaatattacagat

SEQ ID NO: 808228 - DNA, 15 bp, Homo sapiens
gaaatattacagata

SEQ ID NO: 808229 - DNA, 15 bp, Homo sapiens
aaatattacagatat

SEQ ID NO: 808230 - DNA, 15 bp, Homo sapiens
aatattacagatatt

SEQ ID NO: 808231 - DNA, 15 bp, Homo sapiens
atattacagatattt

SEQ ID NO: 808232 - DNA, 15 bp, Homo sapiens
tattacagatatttt

SEQ ID NO: 808233 - DNA, 15 bp, Homo sapiens
attacagatattttt

SEQ ID NO: 808234 - DNA, 15 bp, Homo sapiens
ttacagatattttta

SEQ ID NO: 808235 - DNA, 15 bp, Homo sapiens
tacagatatttttaa

SEQ ID NO: 808236 - DNA, 15 bp, Homo sapiens
acagatatttttaaa

SEQ ID NO: 808237 - DNA, 15 bp, Homo sapiens
cagatatttttaaat

SEQ ID NO: 808238 - DNA, 15 bp, Homo sapiens
agatatttttaaatg

SEQ ID NO: 808239 - DNA, 15 bp, Homo sapiens
gatatttttaaatgt

SEQ ID NO: 808240 - DNA, 15 bp, Homo sapiens
atatttttaaatgta

SEQ ID NO: 808241 - DNA, 15 bp, Homo sapiens
tatttttaaatgtat

SEQ ID NO: 808242 - DNA, 15 bp, Homo sapiens
atttttaaatgtatg

SEQ ID NO: 808243 - DNA, 15 bp, Homo sapiens
tttttaaatgtatga

SEQ ID NO: 808244 - DNA, 15 bp, Homo sapiens
ttttaaatgtatgat

SEQ ID NO: 808245 - DNA, 15 bp, Homo sapiens
tttaaatgtatgata

SEQ ID NO: 808246 - DNA, 15 bp, Homo sapiens
ttaaatgtatgataa

SEQ ID NO: 808247 - DNA, 15 bp, Homo sapiens
taaatgtatgataac

SEQ ID NO: 808248 - DNA, 15 bp, Homo sapiens
aaatgtatgataaca

SEQ ID NO: 808249 - DNA, 15 bp, Homo sapiens
aatgtatgataacaa

SEQ ID NO: 808250 - DNA, 15 bp, Homo sapiens
atgtatgataacaaa

SEQ ID NO: 808251 - DNA, 15 bp, Homo sapiens
tgtatgataacaaaa

SEQ ID NO: 808252 - DNA, 15 bp, Homo sapiens
gtatgataacaaaaa

SEQ ID NO: 808253 - DNA, 15 bp, Homo sapiens
tatgataacaaaaat

SEQ ID NO: 808254 - DNA, 15 bp, Homo sapiens
atgataacaaaaatc

SEQ ID NO: 808255 - DNA, 15 bp, Homo sapiens
tgataacaaaaatcc

SEQ ID NO: 808256 - DNA, 15 bp, Homo sapiens
gataacaaaaatcct

SEQ ID NO: 808257 - DNA, 15 bp, Homo sapiens
ataacaaaaatcctt

SEQ ID NO: 808258 - DNA, 15 bp, Homo sapiens
taacaaaaatccttt

SEQ ID NO: 808259 - DNA, 15 bp, Homo sapiens
aacaaaaatcctttt

SEQ ID NO: 808260 - DNA, 15 bp, Homo sapiens
acaaaaatccttttt

SEQ ID NO: 808261 - DNA, 15 bp, Homo sapiens
caaaaatcctttttt

SEQ ID NO: 808262 - DNA, 15 bp, Homo sapiens
aaaaatccttttttg

SEQ ID NO: 808263 - DNA, 15 bp, Homo sapiens
aaaatccttttttgg

SEQ ID NO: 808264 - DNA, 15 bp, Homo sapiens
aaatccttttttggt

SEQ ID NO: 808265 - DNA, 15 bp, Homo sapiens
aatccttttttggtg

SEQ ID NO: 808266 - DNA, 15 bp, Homo sapiens
atccttttttggtgg

SEQ ID NO: 808267 - DNA, 15 bp, Homo sapiens
tccttttttggtggc

SEQ ID NO: 808268 - DNA, 15 bp, Homo sapiens
ccttttttggtggca

SEQ ID NO: 808269 - DNA, 15 bp, Homo sapiens
cttttttggtggcaa

SEQ ID NO: 808270 - DNA, 15 bp, Homo sapiens
ttttttggtggcaag

SEQ ID NO: 808271 - DNA, 15 bp, Homo sapiens
tttttggtggcaaga

SEQ ID NO: 808272 - DNA, 15 bp, Homo sapiens
ttttggtggcaagat

SEQ ID NO: 808273 - DNA, 15 bp, Homo sapiens
tttggtggcaagatt

SEQ ID NO: 808274 - DNA, 15 bp, Homo sapiens
ttggtggcaagatta

SEQ ID NO: 808275 - DNA, 15 bp, Homo sapiens
tggtggcaagattat

SEQ ID NO: 808276 - DNA, 15 bp, Homo sapiens
ggtggcaagattata

SEQ ID NO: 808277 - DNA, 15 bp, Homo sapiens
gtggcaagattatat

SEQ ID NO: 808278 - DNA, 15 bp, Homo sapiens
tggcaagattatata

SEQ ID NO: 808279 - DNA, 15 bp, Homo sapiens
ggcaagattatatat

SEQ ID NO: 808280 - DNA, 15 bp, Homo sapiens
gcaagattatatatt

SEQ ID NO: 808281 - DNA, 15 bp, Homo sapiens
caagattatatatta

SEQ ID NO: 808282 - DNA, 15 bp, Homo sapiens
aagattatatattat

SEQ ID NO: 808283 - DNA, 15 bp, Homo sapiens
agattatatattata

SEQ ID NO: 808284 - DNA, 15 bp, Homo sapiens
gattatatattatat

SEQ ID NO: 808285 - DNA, 15 bp, Homo sapiens
attatatattatata

SEQ ID NO: 808286 - DNA, 15 bp, Homo sapiens
ttatatattatatat

SEQ ID NO: 808287 - DNA, 15 bp, Homo sapiens
atatattatatatat

SEQ ID NO: 808288 - DNA, 15 bp, Homo sapiens
tatattatatatata

SEQ ID NO: 808289 - DNA, 15 bp, Homo sapiens
atattatatatatat

SEQ ID NO: 808290 - DNA, 15 bp, Homo sapiens
tattatatatatatt

SEQ ID NO: 808291 - DNA, 15 bp, Homo sapiens
attatatatatattt

SEQ ID NO: 808292 - DNA, 15 bp, Homo sapiens
ttatatatatatttt

SEQ ID NO: 808293 - DNA, 15 bp, Homo sapiens
atatatatttttttg

SEQ ID NO: 808294 - DNA, 15 bp, Homo sapiens
tatatatttttttga

SEQ ID NO: 808295 - DNA, 15 bp, Homo sapiens
atatatttttttgag

SEQ ID NO: 808296 - DNA, 15 bp, Homo sapiens
tatatttttttgaga

SEQ ID NO: 808297 - DNA, 15 bp, Homo sapiens
atatttttttgagac

SEQ ID NO: 808298 - DNA, 15 bp, Homo sapiens
tatttttttgagaca

SEQ ID NO: 808299 - DNA, 15 bp, Homo sapiens
atttttttgagacag

SEQ ID NO: 808300 - DNA, 15 bp, Homo sapiens
gttgcccaggctgca

SEQ ID NO: 808301 - DNA, 15 bp, Homo sapiens
ttgcccaggctgcag

SEQ ID NO: 808302 - DNA, 15 bp, Homo sapiens
tgcccaggctgcagt

SEQ ID NO: 808303 - DNA, 15 bp, Homo sapiens
gcccaggctgcagtg

SEQ ID NO: 808304 - DNA, 15 bp, Homo sapiens
gcagtgcagtggcgt

SEQ ID NO: 808305 - DNA, 15 bp, Homo sapiens
cagtgcagtggcgtt

SEQ ID NO: 808306 - DNA, 15 bp, Homo sapiens
agtgcagtggcgtta

SEQ ID NO: 808307 - DNA, 15 bp, Homo sapiens
gtgcagtggcgttat

SEQ ID NO: 808308 - DNA, 15 bp, Homo sapiens
tgcagtggcgttatc

SEQ ID NO: 808309 - DNA, 15 bp, Homo sapiens
gcagtggcgttatct

SEQ ID NO: 808310 - DNA, 15 bp, Homo sapiens
cagtggcgttatctc

SEQ ID NO: 808311 - DNA, 15 bp, Homo sapiens
agtggcgttatctcg

SEQ ID NO: 808312 - DNA, 15 bp, Homo sapiens
gtggcgttatctcgg

SEQ ID NO: 808313 - DNA, 15 bp, Homo sapiens
tggcgttatctcggc

SEQ ID NO: 808314 - DNA, 15 bp, Homo sapiens
ggcgttatctcggct

SEQ ID NO: 808315 - DNA, 15 bp, Homo sapiens
gcgttatctcggctt

SEQ ID NO: 808316 - DNA, 15 bp, Homo sapiens
cgttatctcggcttg

SEQ ID NO: 808317 - DNA, 15 bp, Homo sapiens
gttatctcggcttgc

SEQ ID NO: 808318 - DNA, 15 bp, Homo sapiens
ttatctcggcttgct

SEQ ID NO: 808319 - DNA, 15 bp, Homo sapiens
tatctcggcttgctg

SEQ ID NO: 808320 - DNA, 15 bp, Homo sapiens
atctcggcttgctga

SEQ ID NO: 808321 - DNA, 15 bp, Homo sapiens
tctcggcttgctgaa

SEQ ID NO: 808322 - DNA, 15 bp, Homo sapiens
ctcggcttgctgaaa

SEQ ID NO: 808323 - DNA, 15 bp, Homo sapiens
tcggcttgctgaaac

SEQ ID NO: 808324 - DNA, 15 bp, Homo sapiens
cggcttgctgaaacc

SEQ ID NO: 808325 - DNA, 15 bp, Homo sapiens
ggcttgctgaaacct

SEQ ID NO: 808326 - DNA, 15 bp, Homo sapiens
gcttgctgaaacctc

SEQ ID NO: 808327 - DNA, 15 bp, Homo sapiens
cttgctgaaacctcc

SEQ ID NO: 808328 - DNA, 15 bp, Homo sapiens
ttgctgaaacctccg

SEQ ID NO: 808329 - DNA, 15 bp, Homo sapiens
tgctgaaacctccgt

SEQ ID NO: 808330 - DNA, 15 bp, Homo sapiens
gctgaaacctccgtt

SEQ ID NO: 808331 - DNA, 15 bp, Homo sapiens
ctgaaacctccgttt

SEQ ID NO: 808332 - DNA, 15 bp, Homo sapiens
tgaaacctccgtttc

SEQ ID NO: 808333 - DNA, 15 bp, Homo sapiens
gaaacctccgtttcc

SEQ ID NO: 808334 - DNA, 15 bp, Homo sapiens
aaacctccgtttcct

SEQ ID NO: 808335 - DNA, 15 bp, Homo sapiens
aacctccgtttcctg

SEQ ID NO: 808336 - DNA, 15 bp, Homo sapiens
acctccgtttcctgg

SEQ ID NO: 808337 - DNA, 15 bp, Homo sapiens
cctccgtttcctggg

SEQ ID NO: 808338 - DNA, 15 bp, Homo sapiens
ctccgtttcctgggt

SEQ ID NO: 808339 - DNA, 15 bp, Homo sapiens
tccgtttcctgggtt

SEQ ID NO: 808340 - DNA, 15 bp, Homo sapiens
ccgtttcctgggttc

SEQ ID NO: 808341 - DNA, 15 bp, Homo sapiens
cgtttcctgggttca

SEQ ID NO: 808342 - DNA, 15 bp, Homo sapiens
gtttcctgggttcaa

SEQ ID NO: 808343 - DNA, 15 bp, Homo sapiens
tttcctgggttcaag

SEQ ID NO: 808344 - DNA, 15 bp, Homo sapiens
ttcctgggttcaagc

SEQ ID NO: 808345 - DNA, 15 bp, Homo sapiens
ggattacaggtgtgt

SEQ ID NO: 808346 - DNA, 15 bp, Homo sapiens
gattacaggtgtgtg

SEQ ID NO: 808347 - DNA, 15 bp, Homo sapiens
attacaggtgtgtgc

SEQ ID NO: 808348 - DNA, 15 bp, Homo sapiens
ttacaggtgtgtgcc

SEQ ID NO: 808349 - DNA, 15 bp, Homo sapiens
tacaggtgtgtgcca

SEQ ID NO: 808350 - DNA, 15 bp, Homo sapiens
acaggtgtgtgccac

SEQ ID NO: 808351 - DNA, 15 bp, Homo sapiens
caggtgtgtgccacc

SEQ ID NO: 808352 - DNA, 15 bp, Homo sapiens
aggtgtgtgccacca

SEQ ID NO: 808353 - DNA, 15 bp, Homo sapiens
tgtgccaccacaccc

SEQ ID NO: 808354 - DNA, 15 bp, Homo sapiens
gtgccaccacaccca

SEQ ID NO: 808355 - DNA, 15 bp, Homo sapiens
tgccaccacacccag

SEQ ID NO: 808356 - DNA, 15 bp, Homo sapiens
ccaccacacccagct

SEQ ID NO: 808357 - DNA, 15 bp, Homo sapiens
cacccagctaatttc

SEQ ID NO: 808358 - DNA, 15 bp, Homo sapiens
acccagctaatttct

SEQ ID NO: 808359 - DNA, 15 bp, Homo sapiens
cccagctaatttctg

SEQ ID NO: 808360 - DNA, 15 bp, Homo sapiens
ccagctaatttctgt

SEQ ID NO: 808361 - DNA, 15 bp, Homo sapiens
cagctaatttctgta

SEQ ID NO: 808362 - DNA, 15 bp, Homo sapiens
agctaatttctgtat

SEQ ID NO: 808363 - DNA, 15 bp, Homo sapiens
tggggtttcaccgta

SEQ ID NO: 808364 - DNA, 15 bp, Homo sapiens
ggggtttcaccgtat

SEQ ID NO: 808365 - DNA, 15 bp, Homo sapiens
gggtttcaccgtatt

SEQ ID NO: 808366 - DNA, 15 bp, Homo sapiens
ggtttcaccgtattg

SEQ ID NO: 808367 - DNA, 15 bp, Homo sapiens
gtttcaccgtattgg

SEQ ID NO: 808368 - DNA, 15 bp, Homo sapiens
tttcaccgtattggc

SEQ ID NO: 808369 - DNA, 15 bp, Homo sapiens
ttcaccgtattggcc

SEQ ID NO: 808370 - DNA, 15 bp, Homo sapiens
tcaccgtattggcca

SEQ ID NO: 808371 - DNA, 15 bp, Homo sapiens
caccgtattggccag

SEQ ID NO: 808372 - DNA, 15 bp, Homo sapiens
accgtattggccagg

SEQ ID NO: 808373 - DNA, 15 bp, Homo sapiens
ccgtattggccaggc

SEQ ID NO: 808374 - DNA, 15 bp, Homo sapiens
cgtattggccaggct

SEQ ID NO: 808375 - DNA, 15 bp, Homo sapiens
gtattggccaggctg

SEQ ID NO: 808376 - DNA, 15 bp, Homo sapiens
tattggccaggctgg

SEQ ID NO: 808377 - DNA, 15 bp, Homo sapiens
attggccaggctggt

SEQ ID NO: 808378 - DNA, 15 bp, Homo sapiens
caggctggtcttgag

SEQ ID NO: 808379 - DNA, 15 bp, Homo sapiens
aggctggtcttgagc

SEQ ID NO: 808380 - DNA, 15 bp, Homo sapiens
ggctggtcttgagct

SEQ ID NO: 808381 - DNA, 15 bp, Homo sapiens
gctggtcttgagctc

SEQ ID NO: 808382 - DNA, 15 bp, Homo sapiens
ctggtcttgagctcc

SEQ ID NO: 808383 - DNA, 15 bp, Homo sapiens
tggtcttgagctcct

SEQ ID NO: 808384 - DNA, 15 bp, Homo sapiens
ggtcttgagctcctg

SEQ ID NO: 808385 - DNA, 15 bp, Homo sapiens
gtcttgagctcctga

SEQ ID NO: 808386 - DNA, 15 bp, Homo sapiens
tcttgagctcctgat

SEQ ID NO: 808387 - DNA, 15 bp, Homo sapiens
cttgagctcctgatc

SEQ ID NO: 808388 - DNA, 15 bp, Homo sapiens
ttgagctcctgatct

SEQ ID NO: 808389 - DNA, 15 bp, Homo sapiens
tgagctcctgatctc

SEQ ID NO: 808390 - DNA, 15 bp, Homo sapiens
gagctcctgatctca

SEQ ID NO: 808391 - DNA, 15 bp, Homo sapiens
agctcctgatctcaa

SEQ ID NO: 808392 - DNA, 15 bp, Homo sapiens
gctcctgatctcaag

SEQ ID NO: 808393 - DNA, 15 bp, Homo sapiens
cctgatctcaagtaa

SEQ ID NO: 808394 - DNA, 15 bp, Homo sapiens
ctgatctcaagtaat

SEQ ID NO: 808395 - DNA, 15 bp, Homo sapiens
tgatctcaagtaatc

SEQ ID NO: 808396 - DNA, 15 bp, Homo sapiens
gatctcaagtaatcc

SEQ ID NO: 808397 - DNA, 15 bp, Homo sapiens
atctcaagtaatcca

SEQ ID NO: 808398 - DNA, 15 bp, Homo sapiens
tctcaagtaatccac

SEQ ID NO: 808399 - DNA, 15 bp, Homo sapiens
ctcaagtaatccacc

SEQ ID NO: 808400 - DNA, 15 bp, Homo sapiens
tcaagtaatccaccc

SEQ ID NO: 808401 - DNA, 15 bp, Homo sapiens
caagtaatccacccg

SEQ ID NO: 808402 - DNA, 15 bp, Homo sapiens
aagtaatccacccgc

SEQ ID NO: 808403 - DNA, 15 bp, Homo sapiens
agtaatccacccgcc

SEQ ID NO: 808404 - DNA, 15 bp, Homo sapiens
gtaatccacccgcct

SEQ ID NO: 808405 - DNA, 15 bp, Homo sapiens
taatccacccgcctc

SEQ ID NO: 808406 - DNA, 15 bp, Homo sapiens
aatccacccgcctca

SEQ ID NO: 808407 - DNA, 15 bp, Homo sapiens
aagtgttgggattat

SEQ ID NO: 808408 - DNA, 15 bp, Homo sapiens
agtgttgggattata

SEQ ID NO: 808409 - DNA, 15 bp, Homo sapiens
gtgttgggattatag

SEQ ID NO: 808410 - DNA, 15 bp, Homo sapiens
tgttgggattatagg

SEQ ID NO: 808411 - DNA, 15 bp, Homo sapiens
gttgggattataggc

SEQ ID NO: 808412 - DNA, 15 bp, Homo sapiens
ttgggattataggca

SEQ ID NO: 808413 - DNA, 15 bp, Homo sapiens
taggcatgagccacc

SEQ ID NO: 808414 - DNA, 15 bp, Homo sapiens
gcatgagccaccgca

SEQ ID NO: 808415 - DNA, 15 bp, Homo sapiens
catgagccaccgcac

SEQ ID NO: 808416 - DNA, 15 bp, Homo sapiens
atgagccaccgcacc

SEQ ID NO: 808417 - DNA, 15 bp, Homo sapiens
tgagccaccgcacct

SEQ ID NO: 808418 - DNA, 15 bp, Homo sapiens
gagccaccgcacctg

SEQ ID NO: 808419 - DNA, 15 bp, Homo sapiens
agccaccgcacctgg

SEQ ID NO: 808420 - DNA, 15 bp, Homo sapiens
gccaccgcacctggc

SEQ ID NO: 808421 - DNA, 15 bp, Homo sapiens
ccaccgcacctggcc

SEQ ID NO: 808422 - DNA, 15 bp, Homo sapiens
caccgcacctggcct

SEQ ID NO: 808423 - DNA, 15 bp, Homo sapiens
accgcacctggccta

SEQ ID NO: 808424 - DNA, 15 bp, Homo sapiens
ccgcacctggcctat

SEQ ID NO: 808425 - DNA, 15 bp, Homo sapiens
cgcacctggcctata

SEQ ID NO: 808426 - DNA, 15 bp, Homo sapiens
gcacctggcctatat

SEQ ID NO: 808427 - DNA, 15 bp, Homo sapiens
cacctggcctatatc

SEQ ID NO: 808428 - DNA, 15 bp, Homo sapiens
acctggcctatatct

SEQ ID NO: 808429 - DNA, 15 bp, Homo sapiens
cctggcctatatctt

SEQ ID NO: 808430 - DNA, 15 bp, Homo sapiens
ctggcctatatcttc

SEQ ID NO: 808431 - DNA, 15 bp, Homo sapiens
tggcctatatcttct

SEQ ID NO: 808432 - DNA, 15 bp, Homo sapiens
ggcctatatcttctt

SEQ ID NO: 808433 - DNA, 15 bp, Homo sapiens
gcctatatcttcttc

SEQ ID NO: 808434 - DNA, 15 bp, Homo sapiens
cctatatcttcttct

SEQ ID NO: 808435 - DNA, 15 bp, Homo sapiens
ctatatcttcttcta

SEQ ID NO: 808436 - DNA, 15 bp, Homo sapiens
tatatcttcttctat

SEQ ID NO: 808437 - DNA, 15 bp, Homo sapiens
atatcttcttctatt

SEQ ID NO: 808438 - DNA, 15 bp, Homo sapiens
tatcttcttctattg

SEQ ID NO: 808439 - DNA, 15 bp, Homo sapiens
atcttcttctattga

SEQ ID NO: 808440 - DNA, 15 bp, Homo sapiens
tcttcttctattgag

SEQ ID NO: 808441 - DNA, 15 bp, Homo sapiens
cttcttctattgaga

SEQ ID NO: 808442 - DNA, 15 bp, Homo sapiens
ttcttctattgagaa

SEQ ID NO: 808443 - DNA, 15 bp, Homo sapiens
tcttctattgagaac

SEQ ID NO: 808444 - DNA, 15 bp, Homo sapiens
cttctattgagaacc

SEQ ID NO: 808445 - DNA, 15 bp, Homo sapiens
ttctattgagaacca

SEQ ID NO: 808446 - DNA, 15 bp, Homo sapiens
tctattgagaaccat

SEQ ID NO: 808447 - DNA, 15 bp, Homo sapiens
ctattgagaaccatt

SEQ ID NO: 808448 - DNA, 15 bp, Homo sapiens
tattgagaaccattc

SEQ ID NO: 808449 - DNA, 15 bp, Homo sapiens
attgagaaccattca

SEQ ID NO: 808450 - DNA, 15 bp, Homo sapiens
ttgagaaccattcat

SEQ ID NO: 808451 - DNA, 15 bp, Homo sapiens
tgagaaccattcatg

SEQ ID NO: 808452 - DNA, 15 bp, Homo sapiens
gagaaccattcatga

SEQ ID NO: 808453 - DNA, 15 bp, Homo sapiens
agaaccattcatgac

SEQ ID NO: 808454 - DNA, 15 bp, Homo sapiens
gaaccattcatgact

SEQ ID NO: 808455 - DNA, 15 bp, Homo sapiens
aaccattcatgactt

SEQ ID NO: 808456 - DNA, 15 bp, Homo sapiens
accattcatgactta

SEQ ID NO: 808457 - DNA, 15 bp, Homo sapiens
ccattcatgacttag

SEQ ID NO: 808458 - DNA, 15 bp, Homo sapiens
cattcatgacttagg

SEQ ID NO: 808459 - DNA, 15 bp, Homo sapiens
attcatgacttagga

SEQ ID NO: 808460 - DNA, 15 bp, Homo sapiens
ttcatgacttaggaa

SEQ ID NO: 808461 - DNA, 15 bp, Homo sapiens
tcatgacttaggaat

SEQ ID NO: 808462 - DNA, 15 bp, Homo sapiens
catgacttaggaatg

SEQ ID NO: 808463 - DNA, 15 bp, Homo sapiens
atgacttaggaatga

SEQ ID NO: 808464 - DNA, 15 bp, Homo sapiens
tgacttaggaatgac

SEQ ID NO: 808465 - DNA, 15 bp, Homo sapiens
gacttaggaatgaca

SEQ ID NO: 808466 - DNA, 15 bp, Homo sapiens
acttaggaatgacaa

SEQ ID NO: 808467 - DNA, 15 bp, Homo sapiens
cttaggaatgacaag

SEQ ID NO: 808468 - DNA, 15 bp, Homo sapiens
ttaggaatgacaaga

SEQ ID NO: 808469 - DNA, 15 bp, Homo sapiens
taggaatgacaagaa

SEQ ID NO: 808470 - DNA, 15 bp, Homo sapiens
aggaatgacaagaac

SEQ ID NO: 808471 - DNA, 15 bp, Homo sapiens
ggaatgacaagaaca

SEQ ID NO: 808472 - DNA, 15 bp, Homo sapiens
gaatgacaagaacat

SEQ ID NO: 808473 - DNA, 15 bp, Homo sapiens
aatgacaagaacata

SEQ ID NO: 808474 - DNA, 15 bp, Homo sapiens
atgacaagaacatat

SEQ ID NO: 808475 - DNA, 15 bp, Homo sapiens
tgacaagaacatatc

SEQ ID NO: 808476 - DNA, 15 bp, Homo sapiens
gacaagaacatatca

SEQ ID NO: 808477 - DNA, 15 bp, Homo sapiens
acaagaacatatcaa

SEQ ID NO: 808478 - DNA, 15 bp, Homo sapiens
caagaacatatcaac

SEQ ID NO: 808479 - DNA, 15 bp, Homo sapiens
aagaacatatcaact

SEQ ID NO: 808480 - DNA, 15 bp, Homo sapiens
agaacatatcaacta

SEQ ID NO: 808481 - DNA, 15 bp, Homo sapiens
gaacatatcaactat

SEQ ID NO: 808482 - DNA, 15 bp, Homo sapiens
aacatatcaactata

SEQ ID NO: 808483 - DNA, 15 bp, Homo sapiens
acatatcaactatac

SEQ ID NO: 808484 - DNA, 15 bp, Homo sapiens
catatcaactatact

SEQ ID NO: 808485 - DNA, 15 bp, Homo sapiens
atatcaactatactt

SEQ ID NO: 808486 - DNA, 15 bp, Homo sapiens
tatcaactatacttg

SEQ ID NO: 808487 - DNA, 15 bp, Homo sapiens
atcaactatacttgc

SEQ ID NO: 808488 - DNA, 15 bp, Homo sapiens
tcaactatacttgct

SEQ ID NO: 808489 - DNA, 15 bp, Homo sapiens
caactatacttgcta

SEQ ID NO: 808490 - DNA, 15 bp, Homo sapiens
aactatacttgctaa

SEQ ID NO: 808491 - DNA, 15 bp, Homo sapiens
actatacttgctaaa

SEQ ID NO: 808492 - DNA, 15 bp, Homo sapiens
ctatacttgctaaac

SEQ ID NO: 808493 - DNA, 15 bp, Homo sapiens
tatacttgctaaaca

SEQ ID NO: 808494 - DNA, 15 bp, Homo sapiens
atacttgctaaacag

SEQ ID NO: 808495 - DNA, 15 bp, Homo sapiens
tacttgctaaacagt

SEQ ID NO: 808496 - DNA, 15 bp, Homo sapiens
acttgctaaacagta

SEQ ID NO: 808497 - DNA, 15 bp, Homo sapiens
cttgctaaacagtaa

SEQ ID NO: 808498 - DNA, 15 bp, Homo sapiens
ttgctaaacagtaaa

SEQ ID NO: 808499 - DNA, 15 bp, Homo sapiens
tgctaaacagtaaag

SEQ ID NO: 808500 - DNA, 15 bp, Homo sapiens
gctaaacagtaaaga

SEQ ID NO: 808501 - DNA, 15 bp, Homo sapiens
ctaaacagtaaagag

SEQ ID NO: 808502 - DNA, 15 bp, Homo sapiens
taaacagtaaagaga

SEQ ID NO: 808503 - DNA, 15 bp, Homo sapiens
aaacagtaaagagaa

SEQ ID NO: 808504 - DNA, 15 bp, Homo sapiens
aacagtaaagagaaa

SEQ ID NO: 808505 - DNA, 15 bp, Homo sapiens
acagtaaagagaaaa

SEQ ID NO: 808506 - DNA, 15 bp, Homo sapiens
cagtaaagagaaaaa

SEQ ID NO: 808507 - DNA, 15 bp, Homo sapiens
agtaaagagaaaaaa

SEQ ID NO: 808508 - DNA, 15 bp, Homo sapiens
gtaaagagaaaaaaa

SEQ ID NO: 808509 - DNA, 15 bp, Homo sapiens
taaagagaaaaaaat

SEQ ID NO: 808510 - DNA, 15 bp, Homo sapiens
aaagagaaaaaaatc

SEQ ID NO: 808511 - DNA, 15 bp, Homo sapiens
aagagaaaaaaatca

SEQ ID NO: 808512 - DNA, 15 bp, Homo sapiens
agagaaaaaaatcat

SEQ ID NO: 808513 - DNA, 15 bp, Homo sapiens
gagaaaaaaatcatt

SEQ ID NO: 808514 - DNA, 15 bp, Homo sapiens
agaaaaaaatcattt

SEQ ID NO: 808515 - DNA, 15 bp, Homo sapiens
gaaaaaaatcatttt

SEQ ID NO: 808516 - DNA, 15 bp, Homo sapiens
aaaaaaatcattttc

SEQ ID NO: 808517 - DNA, 15 bp, Homo sapiens
aaaaaatcattttct

SEQ ID NO: 808518 - DNA, 15 bp, Homo sapiens
aaaaatcattttctt

SEQ ID NO: 808519 - DNA, 15 bp, Homo sapiens
aaaatcattttcttt

SEQ ID NO: 808520 - DNA, 15 bp, Homo sapiens
aaatcattttctttt

SEQ ID NO: 808521 - DNA, 15 bp, Homo sapiens
aatcattttcttttt

SEQ ID NO: 808522 - DNA, 15 bp, Homo sapiens
atcattttctttttc

SEQ ID NO: 808523 - DNA, 15 bp, Homo sapiens
tcattttctttttcc

SEQ ID NO: 808524 - DNA, 15 bp, Homo sapiens
cattttctttttccc

SEQ ID NO: 808525 - DNA, 15 bp, Homo sapiens
attttctttttccct

SEQ ID NO: 808526 - DNA, 15 bp, Homo sapiens
ttttctttttccctt

SEQ ID NO: 808527 - DNA, 15 bp, Homo sapiens
tttctttttccctta

SEQ ID NO: 808528 - DNA, 15 bp, Homo sapiens
ttctttttcccttag

SEQ ID NO: 808529 - DNA, 15 bp, Homo sapiens
tctttttcccttagg

SEQ ID NO: 808530 - DNA, 15 bp, Homo sapiens
ctttttcccttagga

SEQ ID NO: 808531 - DNA, 15 bp, Homo sapiens
tttttcccttaggaa

SEQ ID NO: 808532 - DNA, 15 bp, Homo sapiens
ttttcccttaggaaa

SEQ ID NO: 808533 - DNA, 15 bp, Homo sapiens
tttcccttaggaaaa

SEQ ID NO: 808534 - DNA, 15 bp, Homo sapiens
ttcccttaggaaaac

SEQ ID NO: 808535 - DNA, 15 bp, Homo sapiens
tcccttaggaaaaca

SEQ ID NO: 808536 - DNA, 15 bp, Homo sapiens
cccttaggaaaacac

SEQ ID NO: 808537 - DNA, 15 bp, Homo sapiens
ccttaggaaaacact

SEQ ID NO: 808538 - DNA, 15 bp, Homo sapiens
cttaggaaaacactg

SEQ ID NO: 808539 - DNA, 15 bp, Homo sapiens
ttaggaaaacactga

SEQ ID NO: 808540 - DNA, 15 bp, Homo sapiens
taggaaaacactgag

SEQ ID NO: 808541 - DNA, 15 bp, Homo sapiens
aggaaaacactgaga

SEQ ID NO: 808542 - DNA, 15 bp, Homo sapiens
ggaaaacactgagac

SEQ ID NO: 808543 - DNA, 15 bp, Homo sapiens
gaaaacactgagact

SEQ ID NO: 808544 - DNA, 15 bp, Homo sapiens
aaaacactgagactc

SEQ ID NO: 808545 - DNA, 15 bp, Homo sapiens
aaacactgagactca

SEQ ID NO: 808546 - DNA, 15 bp, Homo sapiens
aacactgagactcag

SEQ ID NO: 808547 - DNA, 15 bp, Homo sapiens
acactgagactcagt

SEQ ID NO: 808548 - DNA, 15 bp, Homo sapiens
cactgagactcagtc

SEQ ID NO: 808549 - DNA, 15 bp, Homo sapiens
actgagactcagtct

SEQ ID NO: 808550 - DNA, 15 bp, Homo sapiens
ctgagactcagtctg

SEQ ID NO: 808551 - DNA, 15 bp, Homo sapiens
tgagactcagtctga

SEQ ID NO: 808552 - DNA, 15 bp, Homo sapiens
gagactcagtctgag

SEQ ID NO: 808553 - DNA, 15 bp, Homo sapiens
agactcagtctgagc

SEQ ID NO: 808554 - DNA, 15 bp, Homo sapiens
gactcagtctgagct

SEQ ID NO: 808555 - DNA, 15 bp, Homo sapiens
actcagtctgagctt

SEQ ID NO: 808556 - DNA, 15 bp, Homo sapiens
ctcagtctgagcttc

SEQ ID NO: 808557 - DNA, 15 bp, Homo sapiens
tcagtctgagcttct

SEQ ID NO: 808558 - DNA, 15 bp, Homo sapiens
cagtctgagcttctg

SEQ ID NO: 808559 - DNA, 15 bp, Homo sapiens
agtctgagcttctgg

SEQ ID NO: 808560 - DNA, 15 bp, Homo sapiens
gtctgagcttctgga

SEQ ID NO: 808561 - DNA, 15 bp, Homo sapiens
tctgagcttctggaa

SEQ ID NO: 808562 - DNA, 15 bp, Homo sapiens
ctgagcttctggaag

SEQ ID NO: 808563 - DNA, 15 bp, Homo sapiens
tgagcttctggaagg

SEQ ID NO: 808564 - DNA, 15 bp, Homo sapiens
gagcttctggaaggc

SEQ ID NO: 808565 - DNA, 15 bp, Homo sapiens
agcttctggaaggct

SEQ ID NO: 808566 - DNA, 15 bp, Homo sapiens
gcttctggaaggcta

SEQ ID NO: 808567 - DNA, 15 bp, Homo sapiens
cttctggaaggctaa

SEQ ID NO: 808568 - DNA, 15 bp, Homo sapiens
ttctggaaggctaaa

SEQ ID NO: 808569 - DNA, 15 bp, Homo sapiens
tctggaaggctaaag

SEQ ID NO: 808570 - DNA, 15 bp, Homo sapiens
ctggaaggctaaagc

SEQ ID NO: 808571 - DNA, 15 bp, Homo sapiens
tggaaggctaaagcc

SEQ ID NO: 808572 - DNA, 15 bp, Homo sapiens
ggaaggctaaagcct

SEQ ID NO: 808573 - DNA, 15 bp, Homo sapiens
gaaggctaaagcctg

SEQ ID NO: 808574 - DNA, 15 bp, Homo sapiens
aaggctaaagcctgc

SEQ ID NO: 808575 - DNA, 15 bp, Homo sapiens
aggctaaagcctgca

SEQ ID NO: 808576 - DNA, 15 bp, Homo sapiens
ggctaaagcctgcaa

SEQ ID NO: 808577 - DNA, 15 bp, Homo sapiens
gctaaagcctgcaaa

SEQ ID NO: 808578 - DNA, 15 bp, Homo sapiens
ctaaagcctgcaaaa

SEQ ID NO: 808579 - DNA, 15 bp, Homo sapiens
taaagcctgcaaaaa

SEQ ID NO: 808580 - DNA, 15 bp, Homo sapiens
aaagcctgcaaaaac

SEQ ID NO: 808581 - DNA, 15 bp, Homo sapiens
aagcctgcaaaaaca

SEQ ID NO: 808582 - DNA, 15 bp, Homo sapiens
agcctgcaaaaacat

SEQ ID NO: 808583 - DNA, 15 bp, Homo sapiens
gcctgcaaaaacatg

SEQ ID NO: 808584 - DNA, 15 bp, Homo sapiens
cctgcaaaaacatgg

SEQ ID NO: 808585 - DNA, 15 bp, Homo sapiens
ctgcaaaaacatggg

SEQ ID NO: 808586 - DNA, 15 bp, Homo sapiens
tgcaaaaacatgggc

SEQ ID NO: 808587 - DNA, 15 bp, Homo sapiens
gcaaaaacatgggct

SEQ ID NO: 808588 - DNA, 15 bp, Homo sapiens
caaaaacatgggctt

SEQ ID NO: 808589 - DNA, 15 bp, Homo sapiens
aaaaacatgggcttt

SEQ ID NO: 808590 - DNA, 15 bp, Homo sapiens
aaaacatgggctttt

SEQ ID NO: 808591 - DNA, 15 bp, Homo sapiens
aaacatgggcttttc

SEQ ID NO: 808592 - DNA, 15 bp, Homo sapiens
aacatgggcttttca

SEQ ID NO: 808593 - DNA, 15 bp, Homo sapiens
acatgggcttttcaa

SEQ ID NO: 808594 - DNA, 15 bp, Homo sapiens
catgggcttttcaaa

SEQ ID NO: 808595 - DNA, 15 bp, Homo sapiens
atgggcttttcaaag

SEQ ID NO: 808596 - DNA, 15 bp, Homo sapiens
tgggcttttcaaagc

SEQ ID NO: 808597 - DNA, 15 bp, Homo sapiens
gggcttttcaaagct

SEQ ID NO: 808598 - DNA, 15 bp, Homo sapiens
ggcttttcaaagctc

SEQ ID NO: 808599 - DNA, 15 bp, Homo sapiens
gcttttcaaagctca

SEQ ID NO: 808600 - DNA, 15 bp, Homo sapiens
cttttcaaagctcac

SEQ ID NO: 808601 - DNA, 15 bp, Homo sapiens
ttttcaaagctcaca

SEQ ID NO: 808602 - DNA, 15 bp, Homo sapiens
tttcaaagctcacag

SEQ ID NO: 808603 - DNA, 15 bp, Homo sapiens
ttcaaagctcacaga

SEQ ID NO: 808604 - DNA, 15 bp, Homo sapiens
tcaaagctcacagag

SEQ ID NO: 808605 - DNA, 15 bp, Homo sapiens
caaagctcacagagg

SEQ ID NO: 808606 - DNA, 15 bp, Homo sapiens
aaagctcacagaggc

SEQ ID NO: 808607 - DNA, 15 bp, Homo sapiens
aagctcacagaggca

SEQ ID NO: 808608 - DNA, 15 bp, Homo sapiens
agctcacagaggcaa

SEQ ID NO: 808609 - DNA, 15 bp, Homo sapiens
gctcacagaggcaag

SEQ ID NO: 808610 - DNA, 15 bp, Homo sapiens
ctcacagaggcaagg

SEQ ID NO: 808611 - DNA, 15 bp, Homo sapiens
tcacagaggcaagga

SEQ ID NO: 808612 - DNA, 15 bp, Homo sapiens
cacagaggcaaggag

SEQ ID NO: 808613 - DNA, 15 bp, Homo sapiens
acagaggcaaggaga

SEQ ID NO: 808614 - DNA, 15 bp, Homo sapiens
cagaggcaaggagag

SEQ ID NO: 808615 - DNA, 15 bp, Homo sapiens
agaggcaaggagagg

SEQ ID NO: 808616 - DNA, 15 bp, Homo sapiens
gaggcaaggagaggg

SEQ ID NO: 808617 - DNA, 15 bp, Homo sapiens
aggcaaggagaggga

SEQ ID NO: 808618 - DNA, 15 bp, Homo sapiens
ggcaaggagagggag

SEQ ID NO: 808619 - DNA, 15 bp, Homo sapiens
gcaaggagagggagg

SEQ ID NO: 808620 - DNA, 15 bp, Homo sapiens
caaggagagggaggc

SEQ ID NO: 808621 - DNA, 15 bp, Homo sapiens
aaggagagggaggcg

SEQ ID NO: 808622 - DNA, 15 bp, Homo sapiens
aggagagggaggcga

SEQ ID NO: 808623 - DNA, 15 bp, Homo sapiens
ggagagggaggcgat

SEQ ID NO: 808624 - DNA, 15 bp, Homo sapiens
gagagggaggcgatg

SEQ ID NO: 808625 - DNA, 15 bp, Homo sapiens
agagggaggcgatgg

SEQ ID NO: 808626 - DNA, 15 bp, Homo sapiens
gagggaggcgatggg

SEQ ID NO: 808627 - DNA, 15 bp, Homo sapiens
agggaggcgatgggt

SEQ ID NO: 808628 - DNA, 15 bp, Homo sapiens
gggaggcgatgggtc

SEQ ID NO: 808629 - DNA, 15 bp, Homo sapiens
ggaggcgatgggtca

SEQ ID NO: 808630 - DNA, 15 bp, Homo sapiens
gaggcgatgggtcag

SEQ ID NO: 808631 - DNA, 15 bp, Homo sapiens
aggcgatgggtcaga

SEQ ID NO: 808632 - DNA, 15 bp, Homo sapiens
ggcgatgggtcagac

SEQ ID NO: 808633 - DNA, 15 bp, Homo sapiens
gcgatgggtcagacc

SEQ ID NO: 808634 - DNA, 15 bp, Homo sapiens
cgatgggtcagacca

SEQ ID NO: 808635 - DNA, 15 bp, Homo sapiens
gatgggtcagaccac

SEQ ID NO: 808636 - DNA, 15 bp, Homo sapiens
atgggtcagaccacc

SEQ ID NO: 808637 - DNA, 15 bp, Homo sapiens
tgggtcagaccacca

SEQ ID NO: 808638 - DNA, 15 bp, Homo sapiens
gggtcagaccaccac

SEQ ID NO: 808639 - DNA, 15 bp, Homo sapiens
ggtcagaccaccact

SEQ ID NO: 808640 - DNA, 15 bp, Homo sapiens
gtcagaccaccactc

SEQ ID NO: 808641 - DNA, 15 bp, Homo sapiens
tcagaccaccactca

SEQ ID NO: 808642 - DNA, 15 bp, Homo sapiens
cagaccaccactcaa

SEQ ID NO: 808643 - DNA, 15 bp, Homo sapiens
agaccaccactcaat

SEQ ID NO: 808644 - DNA, 15 bp, Homo sapiens
gaccaccactcaatt

SEQ ID NO: 808645 - DNA, 15 bp, Homo sapiens
accaccactcaattt

SEQ ID NO: 808646 - DNA, 15 bp, Homo sapiens
ccaccactcaatttt

SEQ ID NO: 808647 - DNA, 15 bp, Homo sapiens
caccactcaattttc

SEQ ID NO: 808648 - DNA, 15 bp, Homo sapiens
accactcaattttct

SEQ ID NO: 808649 - DNA, 15 bp, Homo sapiens
ccactcaattttctg

SEQ ID NO: 808650 - DNA, 15 bp, Homo sapiens
cactcaattttctgt

SEQ ID NO: 808651 - DNA, 15 bp, Homo sapiens
actcaattttctgta

SEQ ID NO: 808652 - DNA, 15 bp, Homo sapiens
ctcaattttctgtag

SEQ ID NO: 808653 - DNA, 15 bp, Homo sapiens
tcaattttctgtagt

SEQ ID NO: 808654 - DNA, 15 bp, Homo sapiens
caattttctgtagtg

SEQ ID NO: 808655 - DNA, 15 bp, Homo sapiens
aattttctgtagtga

SEQ ID NO: 808656 - DNA, 15 bp, Homo sapiens
attttctgtagtgat

SEQ ID NO: 808657 - DNA, 15 bp, Homo sapiens
ttttctgtagtgatg

SEQ ID NO: 808658 - DNA, 15 bp, Homo sapiens
tttctgtagtgatgg

SEQ ID NO: 808659 - DNA, 15 bp, Homo sapiens
ttctgtagtgatggc

SEQ ID NO: 808660 - DNA, 15 bp, Homo sapiens
tctgtagtgatggca

SEQ ID NO: 808661 - DNA, 15 bp, Homo sapiens
ctgtagtgatggcag

SEQ ID NO: 808662 - DNA, 15 bp, Homo sapiens
tgtagtgatggcaga

SEQ ID NO: 808663 - DNA, 15 bp, Homo sapiens
gtagtgatggcagag

SEQ ID NO: 808664 - DNA, 15 bp, Homo sapiens
tagtgatggcagagc

SEQ ID NO: 808665 - DNA, 15 bp, Homo sapiens
agtgatggcagagct

SEQ ID NO: 808666 - DNA, 15 bp, Homo sapiens
gtgatggcagagctg

SEQ ID NO: 808667 - DNA, 15 bp, Homo sapiens
tgatggcagagctga

SEQ ID NO: 808668 - DNA, 15 bp, Homo sapiens
gatggcagagctgag

SEQ ID NO: 808669 - DNA, 15 bp, Homo sapiens
atggcagagctgaga

SEQ ID NO: 808670 - DNA, 15 bp, Homo sapiens
tggcagagctgagac

SEQ ID NO: 808671 - DNA, 15 bp, Homo sapiens
ggcagagctgagacc

SEQ ID NO: 808672 - DNA, 15 bp, Homo sapiens
gcagagctgagaccc

SEQ ID NO: 808673 - DNA, 15 bp, Homo sapiens
cagagctgagaccca

SEQ ID NO: 808674 - DNA, 15 bp, Homo sapiens
agagctgagacccag

SEQ ID NO: 808675 - DNA, 15 bp, Homo sapiens
gagctgagacccaga

SEQ ID NO: 808676 - DNA, 15 bp, Homo sapiens
agctgagacccagac

SEQ ID NO: 808677 - DNA, 15 bp, Homo sapiens
gctgagacccagact

SEQ ID NO: 808678 - DNA, 15 bp, Homo sapiens
ctgagacccagactc

SEQ ID NO: 808679 - DNA, 15 bp, Homo sapiens
tgagacccagactca

SEQ ID NO: 808680 - DNA, 15 bp, Homo sapiens
gagacccagactcag

SEQ ID NO: 808681 - DNA, 15 bp, Homo sapiens
agacccagactcagg

SEQ ID NO: 808682 - DNA, 15 bp, Homo sapiens
gacccagactcagga

SEQ ID NO: 808683 - DNA, 15 bp, Homo sapiens
acccagactcaggag

SEQ ID NO: 808684 - DNA, 15 bp, Homo sapiens
cccagactcaggaga

SEQ ID NO: 808685 - DNA, 15 bp, Homo sapiens
ccagactcaggagaa

SEQ ID NO: 808686 - DNA, 15 bp, Homo sapiens
cagactcaggagaaa

SEQ ID NO: 808687 - DNA, 15 bp, Homo sapiens
agactcaggagaaag

SEQ ID NO: 808688 - DNA, 15 bp, Homo sapiens
gactcaggagaaagc

SEQ ID NO: 808689 - DNA, 15 bp, Homo sapiens
actcaggagaaagct

SEQ ID NO: 808690 - DNA, 15 bp, Homo sapiens
ctcaggagaaagctg

SEQ ID NO: 808691 - DNA, 15 bp, Homo sapiens
tcaggagaaagctga

SEQ ID NO: 808692 - DNA, 15 bp, Homo sapiens
caggagaaagctgat

SEQ ID NO: 808693 - DNA, 15 bp, Homo sapiens
aggagaaagctgatc

SEQ ID NO: 808694 - DNA, 15 bp, Homo sapiens
ggagaaagctgatcc

SEQ ID NO: 808695 - DNA, 15 bp, Homo sapiens
gagaaagctgatcca

SEQ ID NO: 808696 - DNA, 15 bp, Homo sapiens
agaaagctgatccat

SEQ ID NO: 808697 - DNA, 15 bp, Homo sapiens
gaaagctgatccatg

SEQ ID NO: 808698 - DNA, 15 bp, Homo sapiens
aaagctgatccatgg

SEQ ID NO: 808699 - DNA, 15 bp, Homo sapiens
aagctgatccatggc

SEQ ID NO: 808700 - DNA, 15 bp, Homo sapiens
agctgatccatggcc

SEQ ID NO: 808701 - DNA, 15 bp, Homo sapiens
gctgatccatggccc

SEQ ID NO: 808702 - DNA, 15 bp, Homo sapiens
ctgatccatggccct

SEQ ID NO: 808703 - DNA, 15 bp, Homo sapiens
tgatccatggccctt

SEQ ID NO: 808704 - DNA, 15 bp, Homo sapiens
gatccatggcccttc

SEQ ID NO: 808705 - DNA, 15 bp, Homo sapiens
atccatggcccttct

SEQ ID NO: 808706 - DNA, 15 bp, Homo sapiens
tccatggcccttcta

SEQ ID NO: 808707 - DNA, 15 bp, Homo sapiens
ccatggcccttctat

SEQ ID NO: 808708 - DNA, 15 bp, Homo sapiens
catggcccttctatg

SEQ ID NO: 808709 - DNA, 15 bp, Homo sapiens
atggcccttctatgt

SEQ ID NO: 808710 - DNA, 15 bp, Homo sapiens
tggcccttctatgtc

SEQ ID NO: 808711 - DNA, 15 bp, Homo sapiens
ggcccttctatgtct

SEQ ID NO: 808712 - DNA, 15 bp, Homo sapiens
gcccttctatgtctt

SEQ ID NO: 808713 - DNA, 15 bp, Homo sapiens
cccttctatgtcttg

SEQ ID NO: 808714 - DNA, 15 bp, Homo sapiens
ccttctatgtcttgt

SEQ ID NO: 808715 - DNA, 15 bp, Homo sapiens
cttctatgtcttgtg

SEQ ID NO: 808716 - DNA, 15 bp, Homo sapiens
ttctatgtcttgtgt

SEQ ID NO: 808717 - DNA, 15 bp, Homo sapiens
tctatgtcttgtgtt

SEQ ID NO: 808718 - DNA, 15 bp, Homo sapiens
ctatgtcttgtgtta

SEQ ID NO: 808719 - DNA, 15 bp, Homo sapiens
tatgtcttgtgttag

SEQ ID NO: 808720 - DNA, 15 bp, Homo sapiens
atgtcttgtgttagt

SEQ ID NO: 808721 - DNA, 15 bp, Homo sapiens
tgtcttgtgttagtt

SEQ ID NO: 808722 - DNA, 15 bp, Homo sapiens
gtcttgtgttagttt

SEQ ID NO: 808723 - DNA, 15 bp, Homo sapiens
tcttgtgttagtttt

SEQ ID NO: 808724 - DNA, 15 bp, Homo sapiens
cttgtgttagttttg

SEQ ID NO: 808725 - DNA, 15 bp, Homo sapiens
ttgtgttagttttgt

SEQ ID NO: 808726 - DNA, 15 bp, Homo sapiens
tgtgttagttttgtg

SEQ ID NO: 808727 - DNA, 15 bp, Homo sapiens
gtgttagttttgtgg

SEQ ID NO: 808728 - DNA, 15 bp, Homo sapiens
tgttagttttgtggg

SEQ ID NO: 808729 - DNA, 15 bp, Homo sapiens
gttagttttgtggga

SEQ ID NO: 808730 - DNA, 15 bp, Homo sapiens
ttagttttgtgggat

SEQ ID NO: 808731 - DNA, 15 bp, Homo sapiens
tagttttgtgggatg

SEQ ID NO: 808732 - DNA, 15 bp, Homo sapiens
agttttgtgggatga

SEQ ID NO: 808733 - DNA, 15 bp, Homo sapiens
gttttgtgggatgac

SEQ ID NO: 808734 - DNA, 15 bp, Homo sapiens
ttttgtgggatgaca

SEQ ID NO: 808735 - DNA, 15 bp, Homo sapiens
tttgtgggatgacat

SEQ ID NO: 808736 - DNA, 15 bp, Homo sapiens
ttgtgggatgacatt

SEQ ID NO: 808737 - DNA, 15 bp, Homo sapiens
tgtgggatgacattc

SEQ ID NO: 808738 - DNA, 15 bp, Homo sapiens
gtgggatgacattct

SEQ ID NO: 808739 - DNA, 15 bp, Homo sapiens
tgggatgacattctg

SEQ ID NO: 808740 - DNA, 15 bp, Homo sapiens
gggatgacattctgc

SEQ ID NO: 808741 - DNA, 15 bp, Homo sapiens
ggatgacattctgca

SEQ ID NO: 808742 - DNA, 15 bp, Homo sapiens
gatgacattctgcat

SEQ ID NO: 808743 - DNA, 15 bp, Homo sapiens
atgacattctgcatg

SEQ ID NO: 808744 - DNA, 15 bp, Homo sapiens
tgacattctgcatga

SEQ ID NO: 808745 - DNA, 15 bp, Homo sapiens
gacattctgcatgag

SEQ ID NO: 808746 - DNA, 15 bp, Homo sapiens
acattctgcatgagc

SEQ ID NO: 808747 - DNA, 15 bp, Homo sapiens
cattctgcatgagca

SEQ ID NO: 808748 - DNA, 15 bp, Homo sapiens
attctgcatgagcaa

SEQ ID NO: 808749 - DNA, 15 bp, Homo sapiens
ttctgcatgagcaat

SEQ ID NO: 808750 - DNA, 15 bp, Homo sapiens
tctgcatgagcaatt

SEQ ID NO: 808751 - DNA, 15 bp, Homo sapiens
ctgcatgagcaattg

SEQ ID NO: 808752 - DNA, 15 bp, Homo sapiens
tgcatgagcaattga

SEQ ID NO: 808753 - DNA, 15 bp, Homo sapiens
gcatgagcaattgat

SEQ ID NO: 808754 - DNA, 15 bp, Homo sapiens
catgagcaattgatt

SEQ ID NO: 808755 - DNA, 15 bp, Homo sapiens
atgagcaattgattg

SEQ ID NO: 808756 - DNA, 15 bp, Homo sapiens
tgagcaattgattgt

SEQ ID NO: 808757 - DNA, 15 bp, Homo sapiens
gagcaattgattgtg

SEQ ID NO: 808758 - DNA, 15 bp, Homo sapiens
agcaattgattgtgc

SEQ ID NO: 808759 - DNA, 15 bp, Homo sapiens
gcaattgattgtgct

SEQ ID NO: 808760 - DNA, 15 bp, Homo sapiens
caattgattgtgctg

SEQ ID NO: 808761 - DNA, 15 bp, Homo sapiens
aattgattgtgctgc

SEQ ID NO: 808762 - DNA, 15 bp, Homo sapiens
attgattgtgctgct

SEQ ID NO: 808763 - DNA, 15 bp, Homo sapiens
ttgattgtgctgctg

SEQ ID NO: 808764 - DNA, 15 bp, Homo sapiens
tgattgtgctgctgg

SEQ ID NO: 808765 - DNA, 15 bp, Homo sapiens
gattgtgctgctgga

SEQ ID NO: 808766 - DNA, 15 bp, Homo sapiens
attgtgctgctggaa

SEQ ID NO: 808767 - DNA, 15 bp, Homo sapiens
ttgtgctgctggaaa

SEQ ID NO: 808768 - DNA, 15 bp, Homo sapiens
tgctgctggaaacac

SEQ ID NO: 808769 - DNA, 15 bp, Homo sapiens
gctgctggaaacaca

SEQ ID NO: 808770 - DNA, 15 bp, Homo sapiens
ctgctggaaacacaa

SEQ ID NO: 808771 - DNA, 15 bp, Homo sapiens
tgctggaaacacaaa

SEQ ID NO: 808772 - DNA, 15 bp, Homo sapiens
gctggaaacacaaac

SEQ ID NO: 808773 - DNA, 15 bp, Homo sapiens
ctggaaacacaaact

SEQ ID NO: 808774 - DNA, 15 bp, Homo sapiens
tggaaacacaaacta

SEQ ID NO: 808775 - DNA, 15 bp, Homo sapiens
ggaaacacaaactat

SEQ ID NO: 808776 - DNA, 15 bp, Homo sapiens
gaaacacaaactatg

SEQ ID NO: 808777 - DNA, 15 bp, Homo sapiens
aaacacaaactatga

SEQ ID NO: 808778 - DNA, 15 bp, Homo sapiens
aacacaaactatgaa

SEQ ID NO: 808779 - DNA, 15 bp, Homo sapiens
acacaaactatgaat

SEQ ID NO: 808780 - DNA, 15 bp, Homo sapiens
cacaaactatgaatc

SEQ ID NO: 808781 - DNA, 15 bp, Homo sapiens
acaaactatgaatct

SEQ ID NO: 808782 - DNA, 15 bp, Homo sapiens
caaactatgaatctg

SEQ ID NO: 808783 - DNA, 15 bp, Homo sapiens
aaactatgaatctga

SEQ ID NO: 808784 - DNA, 15 bp, Homo sapiens
aactatgaatctgag

SEQ ID NO: 808785 - DNA, 15 bp, Homo sapiens
actatgaatctgagt

SEQ ID NO: 808786 - DNA, 15 bp, Homo sapiens
ctatgaatctgagtg

SEQ ID NO: 808787 - DNA, 15 bp, Homo sapiens
tatgaatctgagtgt

SEQ ID NO: 808788 - DNA, 15 bp, Homo sapiens
atgaatctgagtgtc

SEQ ID NO: 808789 - DNA, 15 bp, Homo sapiens
tgaatctgagtgtct

SEQ ID NO: 808790 - DNA, 15 bp, Homo sapiens
gaatctgagtgtcta

SEQ ID NO: 808791 - DNA, 15 bp, Homo sapiens
aatctgagtgtctat

SEQ ID NO: 808792 - DNA, 15 bp, Homo sapiens
atctgagtgtctatg

SEQ ID NO: 808793 - DNA, 15 bp, Homo sapiens
tctgagtgtctatgg

SEQ ID NO: 808794 - DNA, 15 bp, Homo sapiens
ctgagtgtctatgga

SEQ ID NO: 808795 - DNA, 15 bp, Homo sapiens
tgagtgtctatggag

SEQ ID NO: 808796 - DNA, 15 bp, Homo sapiens
gagtgtctatggagt

SEQ ID NO: 808797 - DNA, 15 bp, Homo sapiens
agtgtctatggagtt

SEQ ID NO: 808798 - DNA, 15 bp, Homo sapiens
gtgtctatggagttt

SEQ ID NO: 808799 - DNA, 15 bp, Homo sapiens
tgtctatggagttta

SEQ ID NO: 808800 - DNA, 15 bp, Homo sapiens
gtctatggagtttat

SEQ ID NO: 808801 - DNA, 15 bp, Homo sapiens
tctatggagtttatt

SEQ ID NO: 808802 - DNA, 15 bp, Homo sapiens
ctatggagtttattc

SEQ ID NO: 808803 - DNA, 15 bp, Homo sapiens
tatggagtttattct

SEQ ID NO: 808804 - DNA, 15 bp, Homo sapiens
atggagtttattctt

SEQ ID NO: 808805 - DNA, 15 bp, Homo sapiens
tggagtttattcttg

SEQ ID NO: 808806 - DNA, 15 bp, Homo sapiens
ggagtttattcttgt

SEQ ID NO: 808807 - DNA, 15 bp, Homo sapiens
gagtttattcttgtg

SEQ ID NO: 808808 - DNA, 15 bp, Homo sapiens
agtttattcttgtga

SEQ ID NO: 808809 - DNA, 15 bp, Homo sapiens
gtttattcttgtgat

SEQ ID NO: 808810 - DNA, 15 bp, Homo sapiens
tttattcttgtgatc

SEQ ID NO: 808811 - DNA, 15 bp, Homo sapiens
ttattcttgtgatct

SEQ ID NO: 808812 - DNA, 15 bp, Homo sapiens
tattcttgtgatctt

SEQ ID NO: 808813 - DNA, 15 bp, Homo sapiens
attcttgtgatctta

SEQ ID NO: 808814 - DNA, 15 bp, Homo sapiens
ttcttgtgatcttat

SEQ ID NO: 808815 - DNA, 15 bp, Homo sapiens
tcttgtgatcttatg

SEQ ID NO: 808816 - DNA, 15 bp, Homo sapiens
cttgtgatcttatga

SEQ ID NO: 808817 - DNA, 15 bp, Homo sapiens
ttgtgatcttatgaa

SEQ ID NO: 808818 - DNA, 15 bp, Homo sapiens
tgtgatcttatgaaa

SEQ ID NO: 808819 - DNA, 15 bp, Homo sapiens
gtgatcttatgaaac

SEQ ID NO: 808820 - DNA, 15 bp, Homo sapiens
tgatcttatgaaaca

SEQ ID NO: 808821 - DNA, 15 bp, Homo sapiens
gatcttatgaaacaa

SEQ ID NO: 808822 - DNA, 15 bp, Homo sapiens
atcttatgaaacaag

SEQ ID NO: 808823 - DNA, 15 bp, Homo sapiens
tcttatgaaacaagt

SEQ ID NO: 808824 - DNA, 15 bp, Homo sapiens
cttatgaaacaagtc

SEQ ID NO: 808825 - DNA, 15 bp, Homo sapiens
ttatgaaacaagtct

SEQ ID NO: 808826 - DNA, 15 bp, Homo sapiens
tatgaaacaagtctc

SEQ ID NO: 808827 - DNA, 15 bp, Homo sapiens
atgaaacaagtctcc

SEQ ID NO: 808828 - DNA, 15 bp, Homo sapiens
tgaaacaagtctcct

SEQ ID NO: 808829 - DNA, 15 bp, Homo sapiens
gaaacaagtctcctg

SEQ ID NO: 808830 - DNA, 15 bp, Homo sapiens
aaacaagtctcctgc

SEQ ID NO: 808831 - DNA, 15 bp, Homo sapiens
aacaagtctcctgca

SEQ ID NO: 808832 - DNA, 15 bp, Homo sapiens
acaagtctcctgcat

SEQ ID NO: 808833 - DNA, 15 bp, Homo sapiens
caagtctcctgcata

SEQ ID NO: 808834 - DNA, 15 bp, Homo sapiens
aagtctcctgcatac

SEQ ID NO: 808835 - DNA, 15 bp, Homo sapiens
agtctcctgcataca

SEQ ID NO: 808836 - DNA, 15 bp, Homo sapiens
gtctcctgcatacag

SEQ ID NO: 808837 - DNA, 15 bp, Homo sapiens
tctcctgcatacaga

SEQ ID NO: 808838 - DNA, 15 bp, Homo sapiens
ctcctgcatacagat

SEQ ID NO: 808839 - DNA, 15 bp, Homo sapiens
tcctgcatacagatt

SEQ ID NO: 808840 - DNA, 15 bp, Homo sapiens
cctgcatacagattt

SEQ ID NO: 808841 - DNA, 15 bp, Homo sapiens
ctgcatacagattta

SEQ ID NO: 808842 - DNA, 15 bp, Homo sapiens
tgcatacagatttag

SEQ ID NO: 808843 - DNA, 15 bp, Homo sapiens
gcatacagatttagg

SEQ ID NO: 808844 - DNA, 15 bp, Homo sapiens
catacagatttaggg

SEQ ID NO: 808845 - DNA, 15 bp, Homo sapiens
atacagatttaggga

SEQ ID NO: 808846 - DNA, 15 bp, Homo sapiens
tacagatttagggac

SEQ ID NO: 808847 - DNA, 15 bp, Homo sapiens
acagatttagggaca

SEQ ID NO: 808848 - DNA, 15 bp, Homo sapiens
cagatttagggacag

SEQ ID NO: 808849 - DNA, 15 bp, Homo sapiens
agatttagggacagg

SEQ ID NO: 808850 - DNA, 15 bp, Homo sapiens
gatttagggacaggc

SEQ ID NO: 808851 - DNA, 15 bp, Homo sapiens
atttagggacaggca

SEQ ID NO: 808852 - DNA, 15 bp, Homo sapiens
tttagggacaggcat

SEQ ID NO: 808853 - DNA, 15 bp, Homo sapiens
ttagggacaggcata

SEQ ID NO: 808854 - DNA, 15 bp, Homo sapiens
tagggacaggcatat

SEQ ID NO: 808855 - DNA, 15 bp, Homo sapiens
agggacaggcatatt

SEQ ID NO: 808856 - DNA, 15 bp, Homo sapiens
gggacaggcatattg

SEQ ID NO: 808857 - DNA, 15 bp, Homo sapiens
ggacaggcatattgt

SEQ ID NO: 808858 - DNA, 15 bp, Homo sapiens
gacaggcatattgtc

SEQ ID NO: 808859 - DNA, 15 bp, Homo sapiens
acaggcatattgtca

SEQ ID NO: 808860 - DNA, 15 bp, Homo sapiens
caggcatattgtcag

SEQ ID NO: 808861 - DNA, 15 bp, Homo sapiens
aggcatattgtcagc

SEQ ID NO: 808862 - DNA, 15 bp, Homo sapiens
ggcatattgtcagca

SEQ ID NO: 808863 - DNA, 15 bp, Homo sapiens
gcatattgtcagcat

SEQ ID NO: 808864 - DNA, 15 bp, Homo sapiens
catattgtcagcatg

SEQ ID NO: 808865 - DNA, 15 bp, Homo sapiens
atattgtcagcatgt

SEQ ID NO: 808866 - DNA, 15 bp, Homo sapiens
tattgtcagcatgtt

SEQ ID NO: 808867 - DNA, 15 bp, Homo sapiens
attgtcagcatgttg

SEQ ID NO: 808868 - DNA, 15 bp, Homo sapiens
ttgtcagcatgttga

SEQ ID NO: 808869 - DNA, 15 bp, Homo sapiens
tgtcagcatgttgaa

SEQ ID NO: 808870 - DNA, 15 bp, Homo sapiens
gtcagcatgttgaat

SEQ ID NO: 808871 - DNA, 15 bp, Homo sapiens
tcagcatgttgaatc

SEQ ID NO: 808872 - DNA, 15 bp, Homo sapiens
cagcatgttgaatca

SEQ ID NO: 808873 - DNA, 15 bp, Homo sapiens
agcatgttgaatcag

SEQ ID NO: 808874 - DNA, 15 bp, Homo sapiens
gcatgttgaatcaga

SEQ ID NO: 808875 - DNA, 15 bp, Homo sapiens
catgttgaatcagac

SEQ ID NO: 808876 - DNA, 15 bp, Homo sapiens
atgttgaatcagact

SEQ ID NO: 808877 - DNA, 15 bp, Homo sapiens
tgttgaatcagactt

SEQ ID NO: 808878 - DNA, 15 bp, Homo sapiens
gttgaatcagactta

SEQ ID NO: 808879 - DNA, 15 bp, Homo sapiens
ttgaatcagacttat

SEQ ID NO: 808880 - DNA, 15 bp, Homo sapiens
tgaatcagacttatg

SEQ ID NO: 808881 - DNA, 15 bp, Homo sapiens
gaatcagacttatgt

SEQ ID NO: 808882 - DNA, 15 bp, Homo sapiens
aatcagacttatgta

SEQ ID NO: 808883 - DNA, 15 bp, Homo sapiens
atcagacttatgtat

SEQ ID NO: 808884 - DNA, 15 bp, Homo sapiens
tcagacttatgtata

SEQ ID NO: 808885 - DNA, 15 bp, Homo sapiens
cagacttatgtatac

SEQ ID NO: 808886 - DNA, 15 bp, Homo sapiens
agacttatgtataca

SEQ ID NO: 808887 - DNA, 15 bp, Homo sapiens
gacttatgtatacat

SEQ ID NO: 808888 - DNA, 15 bp, Homo sapiens
acttatgtatacatg

SEQ ID NO: 808889 - DNA, 15 bp, Homo sapiens
cttatgtatacatgg

SEQ ID NO: 808890 - DNA, 15 bp, Homo sapiens
ttatgtatacatggt

SEQ ID NO: 808891 - DNA, 15 bp, Homo sapiens
tatgtatacatggtt

SEQ ID NO: 808892 - DNA, 15 bp, Homo sapiens
atgtatacatggttt

SEQ ID NO: 808893 - DNA, 15 bp, Homo sapiens
tgtatacatggttta

SEQ ID NO: 808894 - DNA, 15 bp, Homo sapiens
gtatacatggtttac

SEQ ID NO: 808895 - DNA, 15 bp, Homo sapiens
tatacatggtttaca

SEQ ID NO: 808896 - DNA, 15 bp, Homo sapiens
atacatggtttacag

SEQ ID NO: 808897 - DNA, 15 bp, Homo sapiens
tacatggtttacagt

SEQ ID NO: 808898 - DNA, 15 bp, Homo sapiens
acatggtttacagtt

SEQ ID NO: 808899 - DNA, 15 bp, Homo sapiens
catggtttacagtta

SEQ ID NO: 808900 - DNA, 15 bp, Homo sapiens
atggtttacagttag

SEQ ID NO: 808901 - DNA, 15 bp, Homo sapiens
tggtttacagttagc

SEQ ID NO: 808902 - DNA, 15 bp, Homo sapiens
ggtttacagttagca

SEQ ID NO: 808903 - DNA, 15 bp, Homo sapiens
gtttacagttagcat

SEQ ID NO: 808904 - DNA, 15 bp, Homo sapiens
tttacagttagcata

SEQ ID NO: 808905 - DNA, 15 bp, Homo sapiens
ttacagttagcataa

SEQ ID NO: 808906 - DNA, 15 bp, Homo sapiens
tacagttagcataag

SEQ ID NO: 808907 - DNA, 15 bp, Homo sapiens
acagttagcataagt

SEQ ID NO: 808908 - DNA, 15 bp, Homo sapiens
cagttagcataagtg

SEQ ID NO: 808909 - DNA, 15 bp, Homo sapiens
agttagcataagtga

SEQ ID NO: 808910 - DNA, 15 bp, Homo sapiens
gttagcataagtgag

SEQ ID NO: 808911 - DNA, 15 bp, Homo sapiens
ttagcataagtgagg

SEQ ID NO: 808912 - DNA, 15 bp, Homo sapiens
tagcataagtgaggg

SEQ ID NO: 808913 - DNA, 15 bp, Homo sapiens
agcataagtgagggc

SEQ ID NO: 808914 - DNA, 15 bp, Homo sapiens
gcataagtgagggct

SEQ ID NO: 808915 - DNA, 15 bp, Homo sapiens
cataagtgagggcta

SEQ ID NO: 808916 - DNA, 15 bp, Homo sapiens
ataagtgagggctac

SEQ ID NO: 808917 - DNA, 15 bp, Homo sapiens
taagtgagggctacc

SEQ ID NO: 808918 - DNA, 15 bp, Homo sapiens
aagtgagggctacct

SEQ ID NO: 808919 - DNA, 15 bp, Homo sapiens
agtgagggctacctt

SEQ ID NO: 808920 - DNA, 15 bp, Homo sapiens
gtgagggctaccttt

SEQ ID NO: 808921 - DNA, 15 bp, Homo sapiens
tgagggctacctttt

SEQ ID NO: 808922 - DNA, 15 bp, Homo sapiens
gagggctaccttttc

SEQ ID NO: 808923 - DNA, 15 bp, Homo sapiens
agggctaccttttca

SEQ ID NO: 808924 - DNA, 15 bp, Homo sapiens
gggctaccttttcaa

SEQ ID NO: 808925 - DNA, 15 bp, Homo sapiens
ggctaccttttcaag

SEQ ID NO: 808926 - DNA, 15 bp, Homo sapiens
gctaccttttcaagc

SEQ ID NO: 808927 - DNA, 15 bp, Homo sapiens
ctaccttttcaagcc

SEQ ID NO: 808928 - DNA, 15 bp, Homo sapiens
taccttttcaagcca

SEQ ID NO: 808929 - DNA, 15 bp, Homo sapiens
accttttcaagccaa

SEQ ID NO: 808930 - DNA, 15 bp, Homo sapiens
ccttttcaagccaaa

SEQ ID NO: 808931 - DNA, 15 bp, Homo sapiens
cttttcaagccaaaa

SEQ ID NO: 808932 - DNA, 15 bp, Homo sapiens
ttttcaagccaaaag

SEQ ID NO: 808933 - DNA, 15 bp, Homo sapiens
tttcaagccaaaagt

SEQ ID NO: 808934 - DNA, 15 bp, Homo sapiens
ttcaagccaaaagtt

SEQ ID NO: 808935 - DNA, 15 bp, Homo sapiens
tcaagccaaaagttt

SEQ ID NO: 808936 - DNA, 15 bp, Homo sapiens
caagccaaaagtttt

SEQ ID NO: 808937 - DNA, 15 bp, Homo sapiens
aagccaaaagttttt

SEQ ID NO: 808938 - DNA, 15 bp, Homo sapiens
agccaaaagttttta

SEQ ID NO: 808939 - DNA, 15 bp, Homo sapiens
gccaaaagtttttag

SEQ ID NO: 808940 - DNA, 15 bp, Homo sapiens
ccaaaagtttttagt

SEQ ID NO: 808941 - DNA, 15 bp, Homo sapiens
caaaagtttttagtt

SEQ ID NO: 808942 - DNA, 15 bp, Homo sapiens
aaaagtttttagttc

SEQ ID NO: 808943 - DNA, 15 bp, Homo sapiens
aaagtttttagttcc

SEQ ID NO: 808944 - DNA, 15 bp, Homo sapiens
aagtttttagttcct

SEQ ID NO: 808945 - DNA, 15 bp, Homo sapiens
agtttttagttccta

SEQ ID NO: 808946 - DNA, 15 bp, Homo sapiens
gtttttagttcctac

SEQ ID NO: 808947 - DNA, 15 bp, Homo sapiens
tttttagttcctacc

SEQ ID NO: 808948 - DNA, 15 bp, Homo sapiens
ttttagttcctacca

SEQ ID NO: 808949 - DNA, 15 bp, Homo sapiens
tttagttcctaccaa

SEQ ID NO: 808950 - DNA, 15 bp, Homo sapiens
ttagttcctaccaag

SEQ ID NO: 808951 - DNA, 15 bp, Homo sapiens
tagttcctaccaagg

SEQ ID NO: 808952 - DNA, 15 bp, Homo sapiens
agttcctaccaaggt

SEQ ID NO: 808953 - DNA, 15 bp, Homo sapiens
gttcctaccaaggtc

SEQ ID NO: 808954 - DNA, 15 bp, Homo sapiens
ttcctaccaaggtcc

SEQ ID NO: 808955 - DNA, 15 bp, Homo sapiens
tcctaccaaggtccc

SEQ ID NO: 808956 - DNA, 15 bp, Homo sapiens
cctaccaaggtccca

SEQ ID NO: 808957 - DNA, 15 bp, Homo sapiens
ctaccaaggtcccat

SEQ ID NO: 808958 - DNA, 15 bp, Homo sapiens
taccaaggtcccatc

SEQ ID NO: 808959 - DNA, 15 bp, Homo sapiens
accaaggtcccatct

SEQ ID NO: 808960 - DNA, 15 bp, Homo sapiens
ccaaggtcccatctc

SEQ ID NO: 808961 - DNA, 15 bp, Homo sapiens
caaggtcccatctca

SEQ ID NO: 808962 - DNA, 15 bp, Homo sapiens
aaggtcccatctcat

SEQ ID NO: 808963 - DNA, 15 bp, Homo sapiens
aggtcccatctcata

SEQ ID NO: 808964 - DNA, 15 bp, Homo sapiens
ggtcccatctcataa

SEQ ID NO: 808965 - DNA, 15 bp, Homo sapiens
gtcccatctcataat

SEQ ID NO: 808966 - DNA, 15 bp, Homo sapiens
tcccatctcataatc

SEQ ID NO: 808967 - DNA, 15 bp, Homo sapiens
cccatctcataatca

SEQ ID NO: 808968 - DNA, 15 bp, Homo sapiens
ccatctcataatcat

SEQ ID NO: 808969 - DNA, 15 bp, Homo sapiens
catctcataatcatc

SEQ ID NO: 808970 - DNA, 15 bp, Homo sapiens
atctcataatcatct

SEQ ID NO: 808971 - DNA, 15 bp, Homo sapiens
tctcataatcatctg

SEQ ID NO: 808972 - DNA, 15 bp, Homo sapiens
ctcataatcatctgt

SEQ ID NO: 808973 - DNA, 15 bp, Homo sapiens
tcataatcatctgtt

SEQ ID NO: 808974 - DNA, 15 bp, Homo sapiens
cataatcatctgttt

SEQ ID NO: 808975 - DNA, 15 bp, Homo sapiens
ataatcatctgtttc

SEQ ID NO: 808976 - DNA, 15 bp, Homo sapiens
taatcatctgtttca

SEQ ID NO: 808977 - DNA, 15 bp, Homo sapiens
aatcatctgtttcaa

SEQ ID NO: 808978 - DNA, 15 bp, Homo sapiens
atcatctgtttcaat

SEQ ID NO: 808979 - DNA, 15 bp, Homo sapiens
tcatctgtttcaatc

SEQ ID NO: 808980 - DNA, 15 bp, Homo sapiens
catctgtttcaatct

SEQ ID NO: 808981 - DNA, 15 bp, Homo sapiens
atctgtttcaatctc

SEQ ID NO: 808982 - DNA, 15 bp, Homo sapiens
tctgtttcaatctca

SEQ ID NO: 808983 - DNA, 15 bp, Homo sapiens
ctgtttcaatctcat

SEQ ID NO: 808984 - DNA, 15 bp, Homo sapiens
tgtttcaatctcatt

SEQ ID NO: 808985 - DNA, 15 bp, Homo sapiens
gtttcaatctcatta

SEQ ID NO: 808986 - DNA, 15 bp, Homo sapiens
tttcaatctcattat

SEQ ID NO: 808987 - DNA, 15 bp, Homo sapiens
ttcaatctcattatt

SEQ ID NO: 808988 - DNA, 15 bp, Homo sapiens
tcaatctcattattt

SEQ ID NO: 808989 - DNA, 15 bp, Homo sapiens
caatctcattatttc

SEQ ID NO: 808990 - DNA, 15 bp, Homo sapiens
aatctcattatttca

SEQ ID NO: 808991 - DNA, 15 bp, Homo sapiens
atctcattatttcac

SEQ ID NO: 808992 - DNA, 15 bp, Homo sapiens
tctcattatttcaca

SEQ ID NO: 808993 - DNA, 15 bp, Homo sapiens
ctcattatttcacag

SEQ ID NO: 808994 - DNA, 15 bp, Homo sapiens
tcattatttcacaga

SEQ ID NO: 808995 - DNA, 15 bp, Homo sapiens
cattatttcacagat

SEQ ID NO: 808996 - DNA, 15 bp, Homo sapiens
attatttcacagatt

SEQ ID NO: 808997 - DNA, 15 bp, Homo sapiens
ttatttcacagattg

SEQ ID NO: 808998 - DNA, 15 bp, Homo sapiens
tatttcacagattgg

SEQ ID NO: 808999 - DNA, 15 bp, Homo sapiens
atttcacagattggg

SEQ ID NO: 809000 - DNA, 15 bp, Homo sapiens
tttcacagattggga

SEQ ID NO: 809001 - DNA, 15 bp, Homo sapiens
ttcacagattgggaa

SEQ ID NO: 809002 - DNA, 15 bp, Homo sapiens
tcacagattgggaaa

SEQ ID NO: 809003 - DNA, 15 bp, Homo sapiens
cacagattgggaaac

SEQ ID NO: 809004 - DNA, 15 bp, Homo sapiens
acagattgggaaact

SEQ ID NO: 809005 - DNA, 15 bp, Homo sapiens
cagattgggaaactt

SEQ ID NO: 809006 - DNA, 15 bp, Homo sapiens
agattgggaaactta

SEQ ID NO: 809007 - DNA, 15 bp, Homo sapiens
gattgggaaacttag

SEQ ID NO: 809008 - DNA, 15 bp, Homo sapiens
attgggaaacttaga

SEQ ID NO: 809009 - DNA, 15 bp, Homo sapiens
ttgggaaacttagac

SEQ ID NO: 809010 - DNA, 15 bp, Homo sapiens
tgggaaacttagacc

SEQ ID NO: 809011 - DNA, 15 bp, Homo sapiens
gggaaacttagaccc

SEQ ID NO: 809012 - DNA, 15 bp, Homo sapiens
ggaaacttagaccca

SEQ ID NO: 809013 - DNA, 15 bp, Homo sapiens
gaaacttagacccag

SEQ ID NO: 809014 - DNA, 15 bp, Homo sapiens
aaacttagacccaga

SEQ ID NO: 809015 - DNA, 15 bp, Homo sapiens
aacttagacccagag

SEQ ID NO: 809016 - DNA, 15 bp, Homo sapiens
acttagacccagaga

SEQ ID NO: 809017 - DNA, 15 bp, Homo sapiens
cttagacccagagag

SEQ ID NO: 809018 - DNA, 15 bp, Homo sapiens
ttagacccagagaga

SEQ ID NO: 809019 - DNA, 15 bp, Homo sapiens
tagacccagagagat

SEQ ID NO: 809020 - DNA, 15 bp, Homo sapiens
agacccagagagatt

SEQ ID NO: 809021 - DNA, 15 bp, Homo sapiens
gacccagagagatta

SEQ ID NO: 809022 - DNA, 15 bp, Homo sapiens
acccagagagattag

SEQ ID NO: 809023 - DNA, 15 bp, Homo sapiens
cccagagagattagg

SEQ ID NO: 809024 - DNA, 15 bp, Homo sapiens
ccagagagattaggt

SEQ ID NO: 809025 - DNA, 15 bp, Homo sapiens
cagagagattaggtg

SEQ ID NO: 809026 - DNA, 15 bp, Homo sapiens
agagagattaggtga

SEQ ID NO: 809027 - DNA, 15 bp, Homo sapiens
gagagattaggtgac

SEQ ID NO: 809028 - DNA, 15 bp, Homo sapiens
agagattaggtgacg

SEQ ID NO: 809029 - DNA, 15 bp, Homo sapiens
gagattaggtgacgt

SEQ ID NO: 809030 - DNA, 15 bp, Homo sapiens
agattaggtgacgtg

SEQ ID NO: 809031 - DNA, 15 bp, Homo sapiens
gattaggtgacgtgc

SEQ ID NO: 809032 - DNA, 15 bp, Homo sapiens
attaggtgacgtgct

SEQ ID NO: 809033 - DNA, 15 bp, Homo sapiens
ttaggtgacgtgctt

SEQ ID NO: 809034 - DNA, 15 bp, Homo sapiens
taggtgacgtgctta

SEQ ID NO: 809035 - DNA, 15 bp, Homo sapiens
aggtgacgtgcttaa

SEQ ID NO: 809036 - DNA, 15 bp, Homo sapiens
ggtgacgtgcttaag

SEQ ID NO: 809037 - DNA, 15 bp, Homo sapiens
gtgacgtgcttaaga

SEQ ID NO: 809038 - DNA, 15 bp, Homo sapiens
tgacgtgcttaagag

SEQ ID NO: 809039 - DNA, 15 bp, Homo sapiens
gacgtgcttaagagc

SEQ ID NO: 809040 - DNA, 15 bp, Homo sapiens
acgtgcttaagagca

SEQ ID NO: 809041 - DNA, 15 bp, Homo sapiens
cgtgcttaagagcat

SEQ ID NO: 809042 - DNA, 15 bp, Homo sapiens
gtgcttaagagcatg

SEQ ID NO: 809043 - DNA, 15 bp, Homo sapiens
tgcttaagagcatgt

SEQ ID NO: 809044 - DNA, 15 bp, Homo sapiens
gcttaagagcatgtt

SEQ ID NO: 809045 - DNA, 15 bp, Homo sapiens
cttaagagcatgttg

SEQ ID NO: 809046 - DNA, 15 bp, Homo sapiens
ttaagagcatgttgc

SEQ ID NO: 809047 - DNA, 15 bp, Homo sapiens
taagagcatgttgct

SEQ ID NO: 809048 - DNA, 15 bp, Homo sapiens
aagagcatgttgctt

SEQ ID NO: 809049 - DNA, 15 bp, Homo sapiens
agagcatgttgctta

SEQ ID NO: 809050 - DNA, 15 bp, Homo sapiens
gagcatgttgcttat

SEQ ID NO: 809051 - DNA, 15 bp, Homo sapiens
agcatgttgcttata

SEQ ID NO: 809052 - DNA, 15 bp, Homo sapiens
gcatgttgcttatag

SEQ ID NO: 809053 - DNA, 15 bp, Homo sapiens
catgttgcttatagg

SEQ ID NO: 809054 - DNA, 15 bp, Homo sapiens
atgttgcttataggg

SEQ ID NO: 809055 - DNA, 15 bp, Homo sapiens
tgttgcttatagggg

SEQ ID NO: 809056 - DNA, 15 bp, Homo sapiens
gttgcttataggggc

SEQ ID NO: 809057 - DNA, 15 bp, Homo sapiens
ttgcttataggggca

SEQ ID NO: 809058 - DNA, 15 bp, Homo sapiens
tgcttataggggcag

SEQ ID NO: 809059 - DNA, 15 bp, Homo sapiens
gcttataggggcaga

SEQ ID NO: 809060 - DNA, 15 bp, Homo sapiens
cttataggggcagag

SEQ ID NO: 809061 - DNA, 15 bp, Homo sapiens
ttataggggcagagt

SEQ ID NO: 809062 - DNA, 15 bp, Homo sapiens
tataggggcagagtg

SEQ ID NO: 809063 - DNA, 15 bp, Homo sapiens
ataggggcagagtgg

SEQ ID NO: 809064 - DNA, 15 bp, Homo sapiens
taggggcagagtgga

SEQ ID NO: 809065 - DNA, 15 bp, Homo sapiens
aggggcagagtggag

SEQ ID NO: 809066 - DNA, 15 bp, Homo sapiens
ggggcagagtggaga

SEQ ID NO: 809067 - DNA, 15 bp, Homo sapiens
gggcagagtggagat

SEQ ID NO: 809068 - DNA, 15 bp, Homo sapiens
ggcagagtggagatt

SEQ ID NO: 809069 - DNA, 15 bp, Homo sapiens
gcagagtggagattc

SEQ ID NO: 809070 - DNA, 15 bp, Homo sapiens
cagagtggagattca

SEQ ID NO: 809071 - DNA, 15 bp, Homo sapiens
agagtggagattcac

SEQ ID NO: 809072 - DNA, 15 bp, Homo sapiens
gagtggagattcaca

SEQ ID NO: 809073 - DNA, 15 bp, Homo sapiens
agtggagattcacac

SEQ ID NO: 809074 - DNA, 15 bp, Homo sapiens
gtggagattcacacc

SEQ ID NO: 809075 - DNA, 15 bp, Homo sapiens
tggagattcacaccc

SEQ ID NO: 809076 - DNA, 15 bp, Homo sapiens
ggagattcacaccca

SEQ ID NO: 809077 - DNA, 15 bp, Homo sapiens
gagattcacacccag

SEQ ID NO: 809078 - DNA, 15 bp, Homo sapiens
agattcacacccagg

SEQ ID NO: 809079 - DNA, 15 bp, Homo sapiens
gattcacacccaggt

SEQ ID NO: 809080 - DNA, 15 bp, Homo sapiens
attcacacccaggtc

SEQ ID NO: 809081 - DNA, 15 bp, Homo sapiens
ttcacacccaggtct

SEQ ID NO: 809082 - DNA, 15 bp, Homo sapiens
tcacacccaggtctt

SEQ ID NO: 809083 - DNA, 15 bp, Homo sapiens
cacacccaggtcttc

SEQ ID NO: 809084 - DNA, 15 bp, Homo sapiens
acacccaggtcttct

SEQ ID NO: 809085 - DNA, 15 bp, Homo sapiens
cacccaggtcttctg

SEQ ID NO: 809086 - DNA, 15 bp, Homo sapiens
acccaggtcttctgt

SEQ ID NO: 809087 - DNA, 15 bp, Homo sapiens
cccaggtcttctgtg

SEQ ID NO: 809088 - DNA, 15 bp, Homo sapiens
ccaggtcttctgtgt

SEQ ID NO: 809089 - DNA, 15 bp, Homo sapiens
caggtcttctgtgtc

SEQ ID NO: 809090 - DNA, 15 bp, Homo sapiens
aggtcttctgtgtcc

SEQ ID NO: 809091 - DNA, 15 bp, Homo sapiens
ggtcttctgtgtcct

SEQ ID NO: 809092 - DNA, 15 bp, Homo sapiens
gtcttctgtgtcctg

SEQ ID NO: 809093 - DNA, 15 bp, Homo sapiens
tcttctgtgtcctgt

SEQ ID NO: 809094 - DNA, 15 bp, Homo sapiens
cttctgtgtcctgtg

SEQ ID NO: 809095 - DNA, 15 bp, Homo sapiens
ttctgtgtcctgtgc

SEQ ID NO: 809096 - DNA, 15 bp, Homo sapiens
tctgtgtcctgtgct

SEQ ID NO: 809097 - DNA, 15 bp, Homo sapiens
ctgtgtcctgtgctc

SEQ ID NO: 809098 - DNA, 15 bp, Homo sapiens
tgtgtcctgtgctct

SEQ ID NO: 809099 - DNA, 15 bp, Homo sapiens
gtgtcctgtgctctt

SEQ ID NO: 809100 - DNA, 15 bp, Homo sapiens
tgtcctgtgctcttc

SEQ ID NO: 809101 - DNA, 15 bp, Homo sapiens
gtcctgtgctcttcc

SEQ ID NO: 809102 - DNA, 15 bp, Homo sapiens
tcctgtgctcttcct

SEQ ID NO: 809103 - DNA, 15 bp, Homo sapiens
cctgtgctcttcctt

SEQ ID NO: 809104 - DNA, 15 bp, Homo sapiens
ctgtgctcttccttc

SEQ ID NO: 809105 - DNA, 15 bp, Homo sapiens
tgtgctcttccttct

SEQ ID NO: 809106 - DNA, 15 bp, Homo sapiens
gtgctcttccttctc

SEQ ID NO: 809107 - DNA, 15 bp, Homo sapiens
tgctcttccttctcc

SEQ ID NO: 809108 - DNA, 15 bp, Homo sapiens
gctcttccttctcca

SEQ ID NO: 809109 - DNA, 15 bp, Homo sapiens
ctcttccttctccac

SEQ ID NO: 809110 - DNA, 15 bp, Homo sapiens
tcttccttctccaca

SEQ ID NO: 809111 - DNA, 15 bp, Homo sapiens
cttccttctccacat

SEQ ID NO: 809112 - DNA, 15 bp, Homo sapiens
ttccttctccacatc

SEQ ID NO: 809113 - DNA, 15 bp, Homo sapiens
tccttctccacatca

SEQ ID NO: 809114 - DNA, 15 bp, Homo sapiens
ccttctccacatcac

SEQ ID NO: 809115 - DNA, 15 bp, Homo sapiens
cttctccacatcact

SEQ ID NO: 809116 - DNA, 15 bp, Homo sapiens
ttctccacatcactc

SEQ ID NO: 809117 - DNA, 15 bp, Homo sapiens
tctccacatcactca

SEQ ID NO: 809118 - DNA, 15 bp, Homo sapiens
ctccacatcactcat

SEQ ID NO: 809119 - DNA, 15 bp, Homo sapiens
tccacatcactcatc

SEQ ID NO: 809120 - DNA, 15 bp, Homo sapiens
ccacatcactcatcc

SEQ ID NO: 809121 - DNA, 15 bp, Homo sapiens
cacatcactcatcct

SEQ ID NO: 809122 - DNA, 15 bp, Homo sapiens
acatcactcatcctg

SEQ ID NO: 809123 - DNA, 15 bp, Homo sapiens
catcactcatcctgt

SEQ ID NO: 809124 - DNA, 15 bp, Homo sapiens
atcactcatcctgtg

SEQ ID NO: 809125 - DNA, 15 bp, Homo sapiens
tcactcatcctgtgt

SEQ ID NO: 809126 - DNA, 15 bp, Homo sapiens
cactcatcctgtgtg

SEQ ID NO: 809127 - DNA, 15 bp, Homo sapiens
actcatcctgtgtgc

SEQ ID NO: 809128 - DNA, 15 bp, Homo sapiens
ctcatcctgtgtgcc

SEQ ID NO: 809129 - DNA, 15 bp, Homo sapiens
tcatcctgtgtgcct

SEQ ID NO: 809130 - DNA, 15 bp, Homo sapiens
catcctgtgtgcctg

SEQ ID NO: 809131 - DNA, 15 bp, Homo sapiens
atcctgtgtgcctgg

SEQ ID NO: 809132 - DNA, 15 bp, Homo sapiens
tcctgtgtgcctggt

SEQ ID NO: 809133 - DNA, 15 bp, Homo sapiens
cctgtgtgcctggtt

SEQ ID NO: 809134 - DNA, 15 bp, Homo sapiens
ctgtgtgcctggtta

SEQ ID NO: 809135 - DNA, 15 bp, Homo sapiens
tgtgtgcctggttat

SEQ ID NO: 809136 - DNA, 15 bp, Homo sapiens
gtgtgcctggttata

SEQ ID NO: 809137 - DNA, 15 bp, Homo sapiens
tgtgcctggttatat

SEQ ID NO: 809138 - DNA, 15 bp, Homo sapiens
gtgcctggttatatt

SEQ ID NO: 809139 - DNA, 15 bp, Homo sapiens
tgcctggttatatta

SEQ ID NO: 809140 - DNA, 15 bp, Homo sapiens
gcctggttatattag

SEQ ID NO: 809141 - DNA, 15 bp, Homo sapiens
cctggttatattagt

SEQ ID NO: 809142 - DNA, 15 bp, Homo sapiens
ctggttatattagtc

SEQ ID NO: 809143 - DNA, 15 bp, Homo sapiens
tggttatattagtcc

SEQ ID NO: 809144 - DNA, 15 bp, Homo sapiens
ggttatattagtccg

SEQ ID NO: 809145 - DNA, 15 bp, Homo sapiens
gttatattagtccgt

SEQ ID NO: 809146 - DNA, 15 bp, Homo sapiens
ttatattagtccgtt

SEQ ID NO: 809147 - DNA, 15 bp, Homo sapiens
gataaagacataccc

SEQ ID NO: 809148 - DNA, 15 bp, Homo sapiens
ataaagacataccca

SEQ ID NO: 809149 - DNA, 15 bp, Homo sapiens
taaagacatacccaa

SEQ ID NO: 809150 - DNA, 15 bp, Homo sapiens
aaagacatacccaat

SEQ ID NO: 809151 - DNA, 15 bp, Homo sapiens
aagacatacccaata

SEQ ID NO: 809152 - DNA, 15 bp, Homo sapiens
agacatacccaatac

SEQ ID NO: 809153 - DNA, 15 bp, Homo sapiens
gacatacccaatact

SEQ ID NO: 809154 - DNA, 15 bp, Homo sapiens
acatacccaatactg

SEQ ID NO: 809155 - DNA, 15 bp, Homo sapiens
catacccaatactgt

SEQ ID NO: 809156 - DNA, 15 bp, Homo sapiens
atacccaatactgtg

SEQ ID NO: 809157 - DNA, 15 bp, Homo sapiens
tacccaatactgtgt

SEQ ID NO: 809158 - DNA, 15 bp, Homo sapiens
acccaatactgtgta

SEQ ID NO: 809159 - DNA, 15 bp, Homo sapiens
cccaatactgtgtaa

SEQ ID NO: 809160 - DNA, 15 bp, Homo sapiens
ccaatactgtgtaat

SEQ ID NO: 809161 - DNA, 15 bp, Homo sapiens
caatactgtgtaatt

SEQ ID NO: 809162 - DNA, 15 bp, Homo sapiens
aatactgtgtaattt

SEQ ID NO: 809163 - DNA, 15 bp, Homo sapiens
atactgtgtaattta

SEQ ID NO: 809164 - DNA, 15 bp, Homo sapiens
tactgtgtaatttat

SEQ ID NO: 809165 - DNA, 15 bp, Homo sapiens
actgtgtaatttata

SEQ ID NO: 809166 - DNA, 15 bp, Homo sapiens
ctgtgtaatttataa

SEQ ID NO: 809167 - DNA, 15 bp, Homo sapiens
tgtgtaatttataaa

SEQ ID NO: 809168 - DNA, 15 bp, Homo sapiens
gtgtaatttataaag

SEQ ID NO: 809169 - DNA, 15 bp, Homo sapiens
tgtaatttataaaga

SEQ ID NO: 809170 - DNA, 15 bp, Homo sapiens
aaaaagaggtttaat

SEQ ID NO: 809171 - DNA, 15 bp, Homo sapiens
aaaagaggtttaatg

SEQ ID NO: 809172 - DNA, 15 bp, Homo sapiens
actcacagttccacg

SEQ ID NO: 809173 - DNA, 15 bp, Homo sapiens
ctcacagttccacgt

SEQ ID NO: 809174 - DNA, 15 bp, Homo sapiens
tcacagttccacgtg

SEQ ID NO: 809175 - DNA, 15 bp, Homo sapiens
cacagttccacgtgg

SEQ ID NO: 809176 - DNA, 15 bp, Homo sapiens
acagttccacgtggc

SEQ ID NO: 809177 - DNA, 15 bp, Homo sapiens
cagttccacgtggct

SEQ ID NO: 809178 - DNA, 15 bp, Homo sapiens
agttccacgtggctg

SEQ ID NO: 809179 - DNA, 15 bp, Homo sapiens
gttccacgtggctgg

SEQ ID NO: 809180 - DNA, 15 bp, Homo sapiens
ttccacgtggctggg

SEQ ID NO: 809181 - DNA, 15 bp, Homo sapiens
tccacgtggctgggg

SEQ ID NO: 809182 - DNA, 15 bp, Homo sapiens
ccacgtggctgggga

SEQ ID NO: 809183 - DNA, 15 bp, Homo sapiens
cacgtggctggggag

SEQ ID NO: 809184 - DNA, 15 bp, Homo sapiens
acgtggctggggagg

SEQ ID NO: 809185 - DNA, 15 bp, Homo sapiens
cgtggctggggaggc

SEQ ID NO: 809186 - DNA, 15 bp, Homo sapiens
ggctggggaggccta

SEQ ID NO: 809187 - DNA, 15 bp, Homo sapiens
gctggggaggcctaa

SEQ ID NO: 809188 - DNA, 15 bp, Homo sapiens
ctggggaggcctaac

SEQ ID NO: 809189 - DNA, 15 bp, Homo sapiens
tggggaggcctaaca

SEQ ID NO: 809190 - DNA, 15 bp, Homo sapiens
ggggaggcctaacaa

SEQ ID NO: 809191 - DNA, 15 bp, Homo sapiens
gggaggcctaacaat

SEQ ID NO: 809192 - DNA, 15 bp, Homo sapiens
ggaggcctaacaatc

SEQ ID NO: 809193 - DNA, 15 bp, Homo sapiens
gaggcctaacaatca

SEQ ID NO: 809194 - DNA, 15 bp, Homo sapiens
aggcctaacaatcat

SEQ ID NO: 809195 - DNA, 15 bp, Homo sapiens
ggcctaacaatcatg

SEQ ID NO: 809196 - DNA, 15 bp, Homo sapiens
gcctaacaatcatgg

SEQ ID NO: 809197 - DNA, 15 bp, Homo sapiens
cctaacaatcatggc

SEQ ID NO: 809198 - DNA, 15 bp, Homo sapiens
ctaacaatcatggcg

SEQ ID NO: 809199 - DNA, 15 bp, Homo sapiens
taacaatcatggcgg

SEQ ID NO: 809200 - DNA, 15 bp, Homo sapiens
aacaatcatggcgga

SEQ ID NO: 809201 - DNA, 15 bp, Homo sapiens
atggcggaaggcaag

SEQ ID NO: 809202 - DNA, 15 bp, Homo sapiens
tggcggaaggcaagg

SEQ ID NO: 809203 - DNA, 15 bp, Homo sapiens
ggcggaaggcaagga

SEQ ID NO: 809204 - DNA, 15 bp, Homo sapiens
gcggaaggcaaggag

SEQ ID NO: 809205 - DNA, 15 bp, Homo sapiens
cggaaggcaaggagg

SEQ ID NO: 809206 - DNA, 15 bp, Homo sapiens
ggaaggcaaggagga

SEQ ID NO: 809207 - DNA, 15 bp, Homo sapiens
gaaggcaaggaggag

SEQ ID NO: 809208 - DNA, 15 bp, Homo sapiens
aaggcaaggaggagc

SEQ ID NO: 809209 - DNA, 15 bp, Homo sapiens
aggcaaggaggagca

SEQ ID NO: 809210 - DNA, 15 bp, Homo sapiens
ggcaaggaggagcaa

SEQ ID NO: 809211 - DNA, 15 bp, Homo sapiens
gcaaggaggagcaag

SEQ ID NO: 809212 - DNA, 15 bp, Homo sapiens
caaggaggagcaagt

SEQ ID NO: 809213 - DNA, 15 bp, Homo sapiens
aaggaggagcaagtc

SEQ ID NO: 809214 - DNA, 15 bp, Homo sapiens
aggaggagcaagtca

SEQ ID NO: 809215 - DNA, 15 bp, Homo sapiens
ggaggagcaagtcac

SEQ ID NO: 809216 - DNA, 15 bp, Homo sapiens
gaggagcaagtcaca

SEQ ID NO: 809217 - DNA, 15 bp, Homo sapiens
aggagcaagtcacat

SEQ ID NO: 809218 - DNA, 15 bp, Homo sapiens
ggagcaagtcacatc

SEQ ID NO: 809219 - DNA, 15 bp, Homo sapiens
gagcaagtcacatct

SEQ ID NO: 809220 - DNA, 15 bp, Homo sapiens
agcaagtcacatctt

SEQ ID NO: 809221 - DNA, 15 bp, Homo sapiens
gcaagtcacatctta

SEQ ID NO: 809222 - DNA, 15 bp, Homo sapiens
caagtcacatcttac

SEQ ID NO: 809223 - DNA, 15 bp, Homo sapiens
tcacatcttacatgt

SEQ ID NO: 809224 - DNA, 15 bp, Homo sapiens
cacatcttacatgtt

SEQ ID NO: 809225 - DNA, 15 bp, Homo sapiens
acatcttacatgttg

SEQ ID NO: 809226 - DNA, 15 bp, Homo sapiens
catcttacatgttgg

SEQ ID NO: 809227 - DNA, 15 bp, Homo sapiens
atcttacatgttggc

SEQ ID NO: 809228 - DNA, 15 bp, Homo sapiens
tcttacatgttggca

SEQ ID NO: 809229 - DNA, 15 bp, Homo sapiens
cttacatgttggcag

SEQ ID NO: 809230 - DNA, 15 bp, Homo sapiens
ttacatgttggcagg

SEQ ID NO: 809231 - DNA, 15 bp, Homo sapiens
tacatgttggcaggg

SEQ ID NO: 809232 - DNA, 15 bp, Homo sapiens
acatgttggcaggga

SEQ ID NO: 809233 - DNA, 15 bp, Homo sapiens
catgttggcagggaa

SEQ ID NO: 809234 - DNA, 15 bp, Homo sapiens
atgttggcagggaag

SEQ ID NO: 809235 - DNA, 15 bp, Homo sapiens
tgttggcagggaaga

SEQ ID NO: 809236 - DNA, 15 bp, Homo sapiens
gttggcagggaagag

SEQ ID NO: 809237 - DNA, 15 bp, Homo sapiens
ttggcagggaagaga

SEQ ID NO: 809238 - DNA, 15 bp, Homo sapiens
tggcagggaagagag

SEQ ID NO: 809239 - DNA, 15 bp, Homo sapiens
ggcagggaagagaga

SEQ ID NO: 809240 - DNA, 15 bp, Homo sapiens
gcagggaagagagag

SEQ ID NO: 809241 - DNA, 15 bp, Homo sapiens
cagggaagagagaga

SEQ ID NO: 809242 - DNA, 15 bp, Homo sapiens
agggaagagagagag

SEQ ID NO: 809243 - DNA, 15 bp, Homo sapiens
gggaagagagagagc

SEQ ID NO: 809244 - DNA, 15 bp, Homo sapiens
ggaagagagagagct

SEQ ID NO: 809245 - DNA, 15 bp, Homo sapiens
gaagagagagagctt

SEQ ID NO: 809246 - DNA, 15 bp, Homo sapiens
aagagagagagcttg

SEQ ID NO: 809247 - DNA, 15 bp, Homo sapiens
agagagagagcttgt

SEQ ID NO: 809248 - DNA, 15 bp, Homo sapiens
gagagagagcttgtg

SEQ ID NO: 809249 - DNA, 15 bp, Homo sapiens
agagagagcttgtgc

SEQ ID NO: 809250 - DNA, 15 bp, Homo sapiens
gagagagcttgtgca

SEQ ID NO: 809251 - DNA, 15 bp, Homo sapiens
agagagcttgtgcag

SEQ ID NO: 809252 - DNA, 15 bp, Homo sapiens
gagagcttgtgcagg

SEQ ID NO: 809253 - DNA, 15 bp, Homo sapiens
agagcttgtgcaggg

SEQ ID NO: 809254 - DNA, 15 bp, Homo sapiens
gagcttgtgcaggga

SEQ ID NO: 809255 - DNA, 15 bp, Homo sapiens
agcttgtgcagggaa

SEQ ID NO: 809256 - DNA, 15 bp, Homo sapiens
gcttgtgcagggaaa

SEQ ID NO: 809257 - DNA, 15 bp, Homo sapiens
ttgtgcagggaaact

SEQ ID NO: 809258 - DNA, 15 bp, Homo sapiens
tgtgcagggaaactc

SEQ ID NO: 809259 - DNA, 15 bp, Homo sapiens
gtgcagggaaactcc

SEQ ID NO: 809260 - DNA, 15 bp, Homo sapiens
tgcagggaaactccc

SEQ ID NO: 809261 - DNA, 15 bp, Homo sapiens
gcagggaaactcccc

SEQ ID NO: 809262 - DNA, 15 bp, Homo sapiens
cagggaaactcccct

SEQ ID NO: 809263 - DNA, 15 bp, Homo sapiens
agggaaactcccctt

SEQ ID NO: 809264 - DNA, 15 bp, Homo sapiens
gggaaactccccttt

SEQ ID NO: 809265 - DNA, 15 bp, Homo sapiens
ggaaactccccttta

SEQ ID NO: 809266 - DNA, 15 bp, Homo sapiens
gaaactcccctttat

SEQ ID NO: 809267 - DNA, 15 bp, Homo sapiens
aaactcccctttata

SEQ ID NO: 809268 - DNA, 15 bp, Homo sapiens
tttataaaaccatct

SEQ ID NO: 809269 - DNA, 15 bp, Homo sapiens
ttataaaaccatctg

SEQ ID NO: 809270 - DNA, 15 bp, Homo sapiens
tataaaaccatctga

SEQ ID NO: 809271 - DNA, 15 bp, Homo sapiens
ataaaaccatctgat

SEQ ID NO: 809272 - DNA, 15 bp, Homo sapiens
taaaaccatctgatc

SEQ ID NO: 809273 - DNA, 15 bp, Homo sapiens
aaaaccatctgatct

SEQ ID NO: 809274 - DNA, 15 bp, Homo sapiens
aaaccatctgatctt

SEQ ID NO: 809275 - DNA, 15 bp, Homo sapiens
aaccatctgatcttg

SEQ ID NO: 809276 - DNA, 15 bp, Homo sapiens
accatctgatcttgt

SEQ ID NO: 809277 - DNA, 15 bp, Homo sapiens
ccatctgatcttgtg

SEQ ID NO: 809278 - DNA, 15 bp, Homo sapiens
catctgatcttgtga

SEQ ID NO: 809279 - DNA, 15 bp, Homo sapiens
atctgatcttgtgag

SEQ ID NO: 809280 - DNA, 15 bp, Homo sapiens
tctgatcttgtgaga

SEQ ID NO: 809281 - DNA, 15 bp, Homo sapiens
ctgatcttgtgagac

SEQ ID NO: 809282 - DNA, 15 bp, Homo sapiens
tgatcttgtgagact

SEQ ID NO: 809283 - DNA, 15 bp, Homo sapiens
gatcttgtgagactt

SEQ ID NO: 809284 - DNA, 15 bp, Homo sapiens
atcttgtgagactta

SEQ ID NO: 809285 - DNA, 15 bp, Homo sapiens
tcttgtgagacttat

SEQ ID NO: 809286 - DNA, 15 bp, Homo sapiens
cttgtgagacttatt

SEQ ID NO: 809287 - DNA, 15 bp, Homo sapiens
ttgtgagacttattc

SEQ ID NO: 809288 - DNA, 15 bp, Homo sapiens
tgtgagacttattca

SEQ ID NO: 809289 - DNA, 15 bp, Homo sapiens
gtgagacttattcac

SEQ ID NO: 809290 - DNA, 15 bp, Homo sapiens
tgagacttattcact

SEQ ID NO: 809291 - DNA, 15 bp, Homo sapiens
gagacttattcacta

SEQ ID NO: 809292 - DNA, 15 bp, Homo sapiens
agacttattcactat

SEQ ID NO: 809293 - DNA, 15 bp, Homo sapiens
gacttattcactatc

SEQ ID NO: 809294 - DNA, 15 bp, Homo sapiens
acttattcactatca

SEQ ID NO: 809295 - DNA, 15 bp, Homo sapiens
cttattcactatcac

SEQ ID NO: 809296 - DNA, 15 bp, Homo sapiens
ttattcactatcaca

SEQ ID NO: 809297 - DNA, 15 bp, Homo sapiens
tattcactatcacag

SEQ ID NO: 809298 - DNA, 15 bp, Homo sapiens
attcactatcacagg

SEQ ID NO: 809299 - DNA, 15 bp, Homo sapiens
ttcactatcacagga

SEQ ID NO: 809300 - DNA, 15 bp, Homo sapiens
tcactatcacaggaa

SEQ ID NO: 809301 - DNA, 15 bp, Homo sapiens
cactatcacaggaac

SEQ ID NO: 809302 - DNA, 15 bp, Homo sapiens
actatcacaggaaca

SEQ ID NO: 809303 - DNA, 15 bp, Homo sapiens
ctatcacaggaacag

SEQ ID NO: 809304 - DNA, 15 bp, Homo sapiens
tatcacaggaacagc

SEQ ID NO: 809305 - DNA, 15 bp, Homo sapiens
atcacaggaacagca

SEQ ID NO: 809306 - DNA, 15 bp, Homo sapiens
tcacaggaacagcat

SEQ ID NO: 809307 - DNA, 15 bp, Homo sapiens
cacaggaacagcatg

SEQ ID NO: 809308 - DNA, 15 bp, Homo sapiens
acaggaacagcatgg

SEQ ID NO: 809309 - DNA, 15 bp, Homo sapiens
caggaacagcatggg

SEQ ID NO: 809310 - DNA, 15 bp, Homo sapiens
aggaacagcatggga

SEQ ID NO: 809311 - DNA, 15 bp, Homo sapiens
ggaacagcatgggaa

SEQ ID NO: 809312 - DNA, 15 bp, Homo sapiens
gcatgggaaagaccc

SEQ ID NO: 809313 - DNA, 15 bp, Homo sapiens
catgggaaagacccg

SEQ ID NO: 809314 - DNA, 15 bp, Homo sapiens
atgggaaagacccgc

SEQ ID NO: 809315 - DNA, 15 bp, Homo sapiens
tgggaaagacccgcc

SEQ ID NO: 809316 - DNA, 15 bp, Homo sapiens
gggaaagacccgccc

SEQ ID NO: 809317 - DNA, 15 bp, Homo sapiens
ggaaagacccgcccc

SEQ ID NO: 809318 - DNA, 15 bp, Homo sapiens
gaaagacccgccccc

SEQ ID NO: 809319 - DNA, 15 bp, Homo sapiens
aaagacccgccccca

SEQ ID NO: 809320 - DNA, 15 bp, Homo sapiens
aagacccgcccccat

SEQ ID NO: 809321 - DNA, 15 bp, Homo sapiens
agacccgcccccatg

SEQ ID NO: 809322 - DNA, 15 bp, Homo sapiens
gacccgcccccatga

SEQ ID NO: 809323 - DNA, 15 bp, Homo sapiens
acccgcccccatgat

SEQ ID NO: 809324 - DNA, 15 bp, Homo sapiens
cccgcccccatgatt

SEQ ID NO: 809325 - DNA, 15 bp, Homo sapiens
ccgcccccatgattc

SEQ ID NO: 809326 - DNA, 15 bp, Homo sapiens
cgcccccatgattca

SEQ ID NO: 809327 - DNA, 15 bp, Homo sapiens
gcccccatgattcaa

SEQ ID NO: 809328 - DNA, 15 bp, Homo sapiens
cccccatgattcaat

SEQ ID NO: 809329 - DNA, 15 bp, Homo sapiens
ccccatgattcaatt

SEQ ID NO: 809330 - DNA, 15 bp, Homo sapiens
cccatgattcaatta

SEQ ID NO: 809331 - DNA, 15 bp, Homo sapiens
ccatgattcaattac

SEQ ID NO: 809332 - DNA, 15 bp, Homo sapiens
aattacctcccacca

SEQ ID NO: 809333 - DNA, 15 bp, Homo sapiens
attacctcccaccag

SEQ ID NO: 809334 - DNA, 15 bp, Homo sapiens
ttacctcccaccagg

SEQ ID NO: 809335 - DNA, 15 bp, Homo sapiens
tacctcccaccaggt

SEQ ID NO: 809336 - DNA, 15 bp, Homo sapiens
acctcccaccaggtc

SEQ ID NO: 809337 - DNA, 15 bp, Homo sapiens
cctcccaccaggtcc

SEQ ID NO: 809338 - DNA, 15 bp, Homo sapiens
ctcccaccaggtccc

SEQ ID NO: 809339 - DNA, 15 bp, Homo sapiens
tcccaccaggtccct

SEQ ID NO: 809340 - DNA, 15 bp, Homo sapiens
cccaccaggtccctc

SEQ ID NO: 809341 - DNA, 15 bp, Homo sapiens
ccaccaggtccctcc

SEQ ID NO: 809342 - DNA, 15 bp, Homo sapiens
caccaggtccctccc

SEQ ID NO: 809343 - DNA, 15 bp, Homo sapiens
accaggtccctccca

SEQ ID NO: 809344 - DNA, 15 bp, Homo sapiens
ccaggtccctcccac

SEQ ID NO: 809345 - DNA, 15 bp, Homo sapiens
caggtccctcccaca

SEQ ID NO: 809346 - DNA, 15 bp, Homo sapiens
aggtccctcccacaa

SEQ ID NO: 809347 - DNA, 15 bp, Homo sapiens
ggtccctcccacaac

SEQ ID NO: 809348 - DNA, 15 bp, Homo sapiens
gtccctcccacaaca

SEQ ID NO: 809349 - DNA, 15 bp, Homo sapiens
tccctcccacaacac

SEQ ID NO: 809350 - DNA, 15 bp, Homo sapiens
ccctcccacaacacg

SEQ ID NO: 809351 - DNA, 15 bp, Homo sapiens
cctcccacaacacgt

SEQ ID NO: 809352 - DNA, 15 bp, Homo sapiens
ctcccacaacacgtg

SEQ ID NO: 809353 - DNA, 15 bp, Homo sapiens
tcccacaacacgtgg

SEQ ID NO: 809354 - DNA, 15 bp, Homo sapiens
cccacaacacgtggg

SEQ ID NO: 809355 - DNA, 15 bp, Homo sapiens
ccacaacacgtggga

SEQ ID NO: 809356 - DNA, 15 bp, Homo sapiens
cacaacacgtgggaa

SEQ ID NO: 809357 - DNA, 15 bp, Homo sapiens
acaacacgtgggaat

SEQ ID NO: 809358 - DNA, 15 bp, Homo sapiens
caacacgtgggaatt

SEQ ID NO: 809359 - DNA, 15 bp, Homo sapiens
aacacgtgggaattg

SEQ ID NO: 809360 - DNA, 15 bp, Homo sapiens
acacgtgggaattgt

SEQ ID NO: 809361 - DNA, 15 bp, Homo sapiens
cacgtgggaattgtg

SEQ ID NO: 809362 - DNA, 15 bp, Homo sapiens
acgtgggaattgtga

SEQ ID NO: 809363 - DNA, 15 bp, Homo sapiens
cgtgggaattgtgag

SEQ ID NO: 809364 - DNA, 15 bp, Homo sapiens
gtgggaattgtgaga

SEQ ID NO: 809365 - DNA, 15 bp, Homo sapiens
tgggaattgtgagag

SEQ ID NO: 809366 - DNA, 15 bp, Homo sapiens
gggaattgtgagagc

SEQ ID NO: 809367 - DNA, 15 bp, Homo sapiens
ggaattgtgagagcg

SEQ ID NO: 809368 - DNA, 15 bp, Homo sapiens
gaattgtgagagcga

SEQ ID NO: 809369 - DNA, 15 bp, Homo sapiens
aattgtgagagcgac

SEQ ID NO: 809370 - DNA, 15 bp, Homo sapiens
attgtgagagcgaca

SEQ ID NO: 809371 - DNA, 15 bp, Homo sapiens
ttgtgagagcgacag

SEQ ID NO: 809372 - DNA, 15 bp, Homo sapiens
tgtgagagcgacagt

SEQ ID NO: 809373 - DNA, 15 bp, Homo sapiens
gtgagagcgacagtt

SEQ ID NO: 809374 - DNA, 15 bp, Homo sapiens
tgagagcgacagttc

SEQ ID NO: 809375 - DNA, 15 bp, Homo sapiens
gagagcgacagttca

SEQ ID NO: 809376 - DNA, 15 bp, Homo sapiens
agagcgacagttcaa

SEQ ID NO: 809377 - DNA, 15 bp, Homo sapiens
gagcgacagttcaag

SEQ ID NO: 809378 - DNA, 15 bp, Homo sapiens
agcgacagttcaaga

SEQ ID NO: 809379 - DNA, 15 bp, Homo sapiens
gcgacagttcaagat

SEQ ID NO: 809380 - DNA, 15 bp, Homo sapiens
cgacagttcaagata

SEQ ID NO: 809381 - DNA, 15 bp, Homo sapiens
gacagttcaagataa

SEQ ID NO: 809382 - DNA, 15 bp, Homo sapiens
acagttcaagataag

SEQ ID NO: 809383 - DNA, 15 bp, Homo sapiens
cagttcaagataaga

SEQ ID NO: 809384 - DNA, 15 bp, Homo sapiens
agttcaagataagat

SEQ ID NO: 809385 - DNA, 15 bp, Homo sapiens
gttcaagataagatt

SEQ ID NO: 809386 - DNA, 15 bp, Homo sapiens
ttcaagataagattt

SEQ ID NO: 809387 - DNA, 15 bp, Homo sapiens
tcaagataagatttg

SEQ ID NO: 809388 - DNA, 15 bp, Homo sapiens
caagataagatttgg

SEQ ID NO: 809389 - DNA, 15 bp, Homo sapiens
aagataagatttggg

SEQ ID NO: 809390 - DNA, 15 bp, Homo sapiens
agataagatttgggt

SEQ ID NO: 809391 - DNA, 15 bp, Homo sapiens
gataagatttgggtg

SEQ ID NO: 809392 - DNA, 15 bp, Homo sapiens
ataagatttgggtgg

SEQ ID NO: 809393 - DNA, 15 bp, Homo sapiens
taagatttgggtggg

SEQ ID NO: 809394 - DNA, 15 bp, Homo sapiens
aagatttgggtgggg

SEQ ID NO: 809395 - DNA, 15 bp, Homo sapiens
cagccaaaccatatc

SEQ ID NO: 809396 - DNA, 15 bp, Homo sapiens
gccaaaccatatcac

SEQ ID NO: 809397 - DNA, 15 bp, Homo sapiens
ccaaaccatatcact

SEQ ID NO: 809398 - DNA, 15 bp, Homo sapiens
caaaccatatcactg

SEQ ID NO: 809399 - DNA, 15 bp, Homo sapiens
aaaccatatcactgg

SEQ ID NO: 809400 - DNA, 15 bp, Homo sapiens
aaccatatcactggt

SEQ ID NO: 809401 - DNA, 15 bp, Homo sapiens
accatatcactggtg

SEQ ID NO: 809402 - DNA, 15 bp, Homo sapiens
ccatatcactggtgt

SEQ ID NO: 809403 - DNA, 15 bp, Homo sapiens
catatcactggtgtc

SEQ ID NO: 809404 - DNA, 15 bp, Homo sapiens
atatcactggtgtct

SEQ ID NO: 809405 - DNA, 15 bp, Homo sapiens
tatcactggtgtctg

SEQ ID NO: 809406 - DNA, 15 bp, Homo sapiens
atcactggtgtctgt

SEQ ID NO: 809407 - DNA, 15 bp, Homo sapiens
tcactggtgtctgtc

SEQ ID NO: 809408 - DNA, 15 bp, Homo sapiens
cactggtgtctgtcc

SEQ ID NO: 809409 - DNA, 15 bp, Homo sapiens
actggtgtctgtcct

SEQ ID NO: 809410 - DNA, 15 bp, Homo sapiens
ctggtgtctgtcctt

SEQ ID NO: 809411 - DNA, 15 bp, Homo sapiens
tggtgtctgtccttt

SEQ ID NO: 809412 - DNA, 15 bp, Homo sapiens
ggtgtctgtcctttc

SEQ ID NO: 809413 - DNA, 15 bp, Homo sapiens
gtgtctgtcctttcc

SEQ ID NO: 809414 - DNA, 15 bp, Homo sapiens
tgtctgtcctttcct

SEQ ID NO: 809415 - DNA, 15 bp, Homo sapiens
gtctgtcctttccta

SEQ ID NO: 809416 - DNA, 15 bp, Homo sapiens
tctgtcctttcctag

SEQ ID NO: 809417 - DNA, 15 bp, Homo sapiens
ctgtcctttcctaga

SEQ ID NO: 809418 - DNA, 15 bp, Homo sapiens
tgtcctttcctagaa

SEQ ID NO: 809419 - DNA, 15 bp, Homo sapiens
gtcctttcctagaac

SEQ ID NO: 809420 - DNA, 15 bp, Homo sapiens
tcctttcctagaaca

SEQ ID NO: 809421 - DNA, 15 bp, Homo sapiens
cctttcctagaacag

SEQ ID NO: 809422 - DNA, 15 bp, Homo sapiens
ctttcctagaacagc

SEQ ID NO: 809423 - DNA, 15 bp, Homo sapiens
tttcctagaacagcc

SEQ ID NO: 809424 - DNA, 15 bp, Homo sapiens
ttcctagaacagcca

SEQ ID NO: 809425 - DNA, 15 bp, Homo sapiens
tcctagaacagccag

SEQ ID NO: 809426 - DNA, 15 bp, Homo sapiens
cctagaacagccagg

SEQ ID NO: 809427 - DNA, 15 bp, Homo sapiens
ctagaacagccaggt

SEQ ID NO: 809428 - DNA, 15 bp, Homo sapiens
tagaacagccaggtg

SEQ ID NO: 809429 - DNA, 15 bp, Homo sapiens
agaacagccaggtgg

SEQ ID NO: 809430 - DNA, 15 bp, Homo sapiens
gaacagccaggtgga

SEQ ID NO: 809431 - DNA, 15 bp, Homo sapiens
aacagccaggtggac

SEQ ID NO: 809432 - DNA, 15 bp, Homo sapiens
acagccaggtggact

SEQ ID NO: 809433 - DNA, 15 bp, Homo sapiens
cagccaggtggactt

SEQ ID NO: 809434 - DNA, 15 bp, Homo sapiens
agccaggtggacttg

SEQ ID NO: 809435 - DNA, 15 bp, Homo sapiens
gccaggtggacttgg

SEQ ID NO: 809436 - DNA, 15 bp, Homo sapiens
ccaggtggacttgga

SEQ ID NO: 809437 - DNA, 15 bp, Homo sapiens
caggtggacttggaa

SEQ ID NO: 809438 - DNA, 15 bp, Homo sapiens
aggtggacttggaat

SEQ ID NO: 809439 - DNA, 15 bp, Homo sapiens
ggtggacttggaatg

SEQ ID NO: 809440 - DNA, 15 bp, Homo sapiens
gtggacttggaatgt

SEQ ID NO: 809441 - DNA, 15 bp, Homo sapiens
tggacttggaatgtc

SEQ ID NO: 809442 - DNA, 15 bp, Homo sapiens
ggacttggaatgtca

SEQ ID NO: 809443 - DNA, 15 bp, Homo sapiens
gacttggaatgtcaa

SEQ ID NO: 809444 - DNA, 15 bp, Homo sapiens
acttggaatgtcaaa

SEQ ID NO: 809445 - DNA, 15 bp, Homo sapiens
cttggaatgtcaaaa

SEQ ID NO: 809446 - DNA, 15 bp, Homo sapiens
ttggaatgtcaaaaa

SEQ ID NO: 809447 - DNA, 15 bp, Homo sapiens
tggaatgtcaaaaat

SEQ ID NO: 809448 - DNA, 15 bp, Homo sapiens
ggaatgtcaaaaatt

SEQ ID NO: 809449 - DNA, 15 bp, Homo sapiens
gaatgtcaaaaattc

SEQ ID NO: 809450 - DNA, 15 bp, Homo sapiens
aatgtcaaaaattct

SEQ ID NO: 809451 - DNA, 15 bp, Homo sapiens
atgtcaaaaattctt

SEQ ID NO: 809452 - DNA, 15 bp, Homo sapiens
tgtcaaaaattcttc

SEQ ID NO: 809453 - DNA, 15 bp, Homo sapiens
gtcaaaaattcttct

SEQ ID NO: 809454 - DNA, 15 bp, Homo sapiens
tcaaaaattcttctt

SEQ ID NO: 809455 - DNA, 15 bp, Homo sapiens
caaaaattcttcttc

SEQ ID NO: 809456 - DNA, 15 bp, Homo sapiens
aaaaattcttcttcc

SEQ ID NO: 809457 - DNA, 15 bp, Homo sapiens
aaaattcttcttcct

SEQ ID NO: 809458 - DNA, 15 bp, Homo sapiens
aaattcttcttcctt

SEQ ID NO: 809459 - DNA, 15 bp, Homo sapiens
aattcttcttccttt

SEQ ID NO: 809460 - DNA, 15 bp, Homo sapiens
attcttcttcctttt

SEQ ID NO: 809461 - DNA, 15 bp, Homo sapiens
ttcttcttccttttt

SEQ ID NO: 809462 - DNA, 15 bp, Homo sapiens
tcttcttcctttttc

SEQ ID NO: 809463 - DNA, 15 bp, Homo sapiens
cttcttcctttttcc

SEQ ID NO: 809464 - DNA, 15 bp, Homo sapiens
ttcttcctttttcct

SEQ ID NO: 809465 - DNA, 15 bp, Homo sapiens
tcttcctttttcctt

SEQ ID NO: 809466 - DNA, 15 bp, Homo sapiens
cttcctttttccttg

SEQ ID NO: 809467 - DNA, 15 bp, Homo sapiens
ttcctttttccttgg

SEQ ID NO: 809468 - DNA, 15 bp, Homo sapiens
tcctttttccttggt

SEQ ID NO: 809469 - DNA, 15 bp, Homo sapiens
cctttttccttggtt

SEQ ID NO: 809470 - DNA, 15 bp, Homo sapiens
ctttttccttggttt

SEQ ID NO: 809471 - DNA, 15 bp, Homo sapiens
tttttccttggtttt

SEQ ID NO: 809472 - DNA, 15 bp, Homo sapiens
ttttccttggttttc

SEQ ID NO: 809473 - DNA, 15 bp, Homo sapiens
tttccttggttttcc

SEQ ID NO: 809474 - DNA, 15 bp, Homo sapiens
ttccttggttttcca

SEQ ID NO: 809475 - DNA, 15 bp, Homo sapiens
tccttggttttccat

SEQ ID NO: 809476 - DNA, 15 bp, Homo sapiens
ccttggttttccatt

SEQ ID NO: 809477 - DNA, 15 bp, Homo sapiens
cttggttttccattt

SEQ ID NO: 809478 - DNA, 15 bp, Homo sapiens
ttggttttccatttc

SEQ ID NO: 809479 - DNA, 15 bp, Homo sapiens
tggttttccatttct

SEQ ID NO: 809480 - DNA, 15 bp, Homo sapiens
ggttttccatttctc

SEQ ID NO: 809481 - DNA, 15 bp, Homo sapiens
gttttccatttctca

SEQ ID NO: 809482 - DNA, 15 bp, Homo sapiens
ttttccatttctcac

SEQ ID NO: 809483 - DNA, 15 bp, Homo sapiens
tttccatttctcact

SEQ ID NO: 809484 - DNA, 15 bp, Homo sapiens
ttccatttctcactt

SEQ ID NO: 809485 - DNA, 15 bp, Homo sapiens
tccatttctcacttt

SEQ ID NO: 809486 - DNA, 15 bp, Homo sapiens
ccatttctcactttc

SEQ ID NO: 809487 - DNA, 15 bp, Homo sapiens
catttctcactttct

SEQ ID NO: 809488 - DNA, 15 bp, Homo sapiens
atttctcactttctc

SEQ ID NO: 809489 - DNA, 15 bp, Homo sapiens
tttctcactttctct

SEQ ID NO: 809490 - DNA, 15 bp, Homo sapiens
ttctcactttctctc

SEQ ID NO: 809491 - DNA, 15 bp, Homo sapiens
tctcactttctctcc

SEQ ID NO: 809492 - DNA, 15 bp, Homo sapiens
ctcactttctctccc

SEQ ID NO: 809493 - DNA, 15 bp, Homo sapiens
tcactttctctcccc

SEQ ID NO: 809494 - DNA, 15 bp, Homo sapiens
cactttctctccccg

SEQ ID NO: 809495 - DNA, 15 bp, Homo sapiens
actttctctccccgt

SEQ ID NO: 809496 - DNA, 15 bp, Homo sapiens
ctttctctccccgtt

SEQ ID NO: 809497 - DNA, 15 bp, Homo sapiens
tttctctccccgttc

SEQ ID NO: 809498 - DNA, 15 bp, Homo sapiens
ttctctccccgttcc

SEQ ID NO: 809499 - DNA, 15 bp, Homo sapiens
tctctccccgttcca

SEQ ID NO: 809500 - DNA, 15 bp, Homo sapiens
ctctccccgttccac

SEQ ID NO: 809501 - DNA, 15 bp, Homo sapiens
tctccccgttccact

SEQ ID NO: 809502 - DNA, 15 bp, Homo sapiens
ctccccgttccactt

SEQ ID NO: 809503 - DNA, 15 bp, Homo sapiens
tccccgttccacttt

SEQ ID NO: 809504 - DNA, 15 bp, Homo sapiens
ccccgttccactttg

SEQ ID NO: 809505 - DNA, 15 bp, Homo sapiens
cccgttccactttgg

SEQ ID NO: 809506 - DNA, 15 bp, Homo sapiens
ccgttccactttggg

SEQ ID NO: 809507 - DNA, 15 bp, Homo sapiens
cgttccactttggga

SEQ ID NO: 809508 - DNA, 15 bp, Homo sapiens
gttccactttgggag

SEQ ID NO: 809509 - DNA, 15 bp, Homo sapiens
ttccactttgggagt

SEQ ID NO: 809510 - DNA, 15 bp, Homo sapiens
tccactttgggagtc

SEQ ID NO: 809511 - DNA, 15 bp, Homo sapiens
ccactttgggagtct

SEQ ID NO: 809512 - DNA, 15 bp, Homo sapiens
cactttgggagtctg

SEQ ID NO: 809513 - DNA, 15 bp, Homo sapiens
actttgggagtctga

SEQ ID NO: 809514 - DNA, 15 bp, Homo sapiens
ctttgggagtctgaa

SEQ ID NO: 809515 - DNA, 15 bp, Homo sapiens
tttgggagtctgaaa

SEQ ID NO: 809516 - DNA, 15 bp, Homo sapiens
ttgggagtctgaaat

SEQ ID NO: 809517 - DNA, 15 bp, Homo sapiens
tgggagtctgaaatg

SEQ ID NO: 809518 - DNA, 15 bp, Homo sapiens
gggagtctgaaatga

SEQ ID NO: 809519 - DNA, 15 bp, Homo sapiens
ggagtctgaaatgag

SEQ ID NO: 809520 - DNA, 15 bp, Homo sapiens
gagtctgaaatgagg

SEQ ID NO: 809521 - DNA, 15 bp, Homo sapiens
agtctgaaatgaggg

SEQ ID NO: 809522 - DNA, 15 bp, Homo sapiens
gtctgaaatgagggt

SEQ ID NO: 809523 - DNA, 15 bp, Homo sapiens
tctgaaatgagggtg

SEQ ID NO: 809524 - DNA, 15 bp, Homo sapiens
ctgaaatgagggtgg

SEQ ID NO: 809525 - DNA, 15 bp, Homo sapiens
tgaaatgagggtggt

SEQ ID NO: 809526 - DNA, 15 bp, Homo sapiens
gaaatgagggtggtg

SEQ ID NO: 809527 - DNA, 15 bp, Homo sapiens
aaatgagggtggtgt

SEQ ID NO: 809528 - DNA, 15 bp, Homo sapiens
aatgagggtggtgtt

SEQ ID NO: 809529 - DNA, 15 bp, Homo sapiens
atgagggtggtgttg

SEQ ID NO: 809530 - DNA, 15 bp, Homo sapiens
tgagggtggtgttgc

SEQ ID NO: 809531 - DNA, 15 bp, Homo sapiens
gagggtggtgttgct

SEQ ID NO: 809532 - DNA, 15 bp, Homo sapiens
agggtggtgttgctt

SEQ ID NO: 809533 - DNA, 15 bp, Homo sapiens
gggtggtgttgcttc

SEQ ID NO: 809534 - DNA, 15 bp, Homo sapiens
ggtggtgttgcttct

SEQ ID NO: 809535 - DNA, 15 bp, Homo sapiens
gtggtgttgcttctc

SEQ ID NO: 809536 - DNA, 15 bp, Homo sapiens
tggtgttgcttctct

SEQ ID NO: 809537 - DNA, 15 bp, Homo sapiens
ggtgttgcttctctg

SEQ ID NO: 809538 - DNA, 15 bp, Homo sapiens
gtgttgcttctctgc

SEQ ID NO: 809539 - DNA, 15 bp, Homo sapiens
tgttgcttctctgcc

SEQ ID NO: 809540 - DNA, 15 bp, Homo sapiens
gttgcttctctgcct

SEQ ID NO: 809541 - DNA, 15 bp, Homo sapiens
ttgcttctctgcctg

SEQ ID NO: 809542 - DNA, 15 bp, Homo sapiens
tgcttctctgcctga

SEQ ID NO: 809543 - DNA, 15 bp, Homo sapiens
gcttctctgcctgat

SEQ ID NO: 809544 - DNA, 15 bp, Homo sapiens
cttctctgcctgatc

SEQ ID NO: 809545 - DNA, 15 bp, Homo sapiens
ttctctgcctgatct

SEQ ID NO: 809546 - DNA, 15 bp, Homo sapiens
tctctgcctgatctg

SEQ ID NO: 809547 - DNA, 15 bp, Homo sapiens
ctctgcctgatctga

SEQ ID NO: 809548 - DNA, 15 bp, Homo sapiens
tctgcctgatctgat

SEQ ID NO: 809549 - DNA, 15 bp, Homo sapiens
ctgcctgatctgatc

SEQ ID NO: 809550 - DNA, 15 bp, Homo sapiens
tgcctgatctgatcc

SEQ ID NO: 809551 - DNA, 15 bp, Homo sapiens
gcctgatctgatcct

SEQ ID NO: 809552 - DNA, 15 bp, Homo sapiens
cctgatctgatcctt

SEQ ID NO: 809553 - DNA, 15 bp, Homo sapiens
ctgatctgatccttc

SEQ ID NO: 809554 - DNA, 15 bp, Homo sapiens
tgatctgatccttcc

SEQ ID NO: 809555 - DNA, 15 bp, Homo sapiens
gatctgatccttcct

SEQ ID NO: 809556 - DNA, 15 bp, Homo sapiens
atctgatccttcctt

SEQ ID NO: 809557 - DNA, 15 bp, Homo sapiens
tctgatccttccttt

SEQ ID NO: 809558 - DNA, 15 bp, Homo sapiens
ctgatccttccttta

SEQ ID NO: 809559 - DNA, 15 bp, Homo sapiens
tgatccttcctttat

SEQ ID NO: 809560 - DNA, 15 bp, Homo sapiens
gatccttcctttata

SEQ ID NO: 809561 - DNA, 15 bp, Homo sapiens
atccttcctttatat

SEQ ID NO: 809562 - DNA, 15 bp, Homo sapiens
tccttcctttatatc

SEQ ID NO: 809563 - DNA, 15 bp, Homo sapiens
ccttcctttatatcc

SEQ ID NO: 809564 - DNA, 15 bp, Homo sapiens
cttcctttatatcct

SEQ ID NO: 809565 - DNA, 15 bp, Homo sapiens
ttcctttatatcctg

SEQ ID NO: 809566 - DNA, 15 bp, Homo sapiens
tcctttatatcctgg

SEQ ID NO: 809567 - DNA, 15 bp, Homo sapiens
cctttatatcctgga

SEQ ID NO: 809568 - DNA, 15 bp, Homo sapiens
ctttatatcctggag

SEQ ID NO: 809569 - DNA, 15 bp, Homo sapiens
tttatatcctggaga

SEQ ID NO: 809570 - DNA, 15 bp, Homo sapiens
ttatatcctggagat

SEQ ID NO: 809571 - DNA, 15 bp, Homo sapiens
tatatcctggagatg

SEQ ID NO: 809572 - DNA, 15 bp, Homo sapiens
atatcctggagatga

SEQ ID NO: 809573 - DNA, 15 bp, Homo sapiens
tatcctggagatgac

SEQ ID NO: 809574 - DNA, 15 bp, Homo sapiens
atcctggagatgact

SEQ ID NO: 809575 - DNA, 15 bp, Homo sapiens
tcctggagatgactg

SEQ ID NO: 809576 - DNA, 15 bp, Homo sapiens
cctggagatgactgt

SEQ ID NO: 809577 - DNA, 15 bp, Homo sapiens
ctggagatgactgtt

SEQ ID NO: 809578 - DNA, 15 bp, Homo sapiens
tggagatgactgttg

SEQ ID NO: 809579 - DNA, 15 bp, Homo sapiens
ggagatgactgttga

SEQ ID NO: 809580 - DNA, 15 bp, Homo sapiens
gagatgactgttgat

SEQ ID NO: 809581 - DNA, 15 bp, Homo sapiens
agatgactgttgata

SEQ ID NO: 809582 - DNA, 15 bp, Homo sapiens
gatgactgttgatat

SEQ ID NO: 809583 - DNA, 15 bp, Homo sapiens
atgactgttgatatg

SEQ ID NO: 809584 - DNA, 15 bp, Homo sapiens
tgactgttgatatgt

SEQ ID NO: 809585 - DNA, 15 bp, Homo sapiens
gactgttgatatgtg

SEQ ID NO: 809586 - DNA, 15 bp, Homo sapiens
actgttgatatgtgt

SEQ ID NO: 809587 - DNA, 15 bp, Homo sapiens
ctgttgatatgtgta

SEQ ID NO: 809588 - DNA, 15 bp, Homo sapiens
tgttgatatgtgtag

SEQ ID NO: 809589 - DNA, 15 bp, Homo sapiens
gttgatatgtgtagc

SEQ ID NO: 809590 - DNA, 15 bp, Homo sapiens
ttgatatgtgtagcg

SEQ ID NO: 809591 - DNA, 15 bp, Homo sapiens
tgatatgtgtagcgc

SEQ ID NO: 809592 - DNA, 15 bp, Homo sapiens
gatatgtgtagcgct

SEQ ID NO: 809593 - DNA, 15 bp, Homo sapiens
atatgtgtagcgctt

SEQ ID NO: 809594 - DNA, 15 bp, Homo sapiens
tatgtgtagcgcttc

SEQ ID NO: 809595 - DNA, 15 bp, Homo sapiens
atgtgtagcgcttct

SEQ ID NO: 809596 - DNA, 15 bp, Homo sapiens
tgtgtagcgcttctt

SEQ ID NO: 809597 - DNA, 15 bp, Homo sapiens
gtgtagcgcttctta

SEQ ID NO: 809598 - DNA, 15 bp, Homo sapiens
tgtagcgcttcttac

SEQ ID NO: 809599 - DNA, 15 bp, Homo sapiens
gtagcgcttcttaca

SEQ ID NO: 809600 - DNA, 15 bp, Homo sapiens
tagcgcttcttacat

SEQ ID NO: 809601 - DNA, 15 bp, Homo sapiens
agcgcttcttacatt

SEQ ID NO: 809602 - DNA, 15 bp, Homo sapiens
gcgcttcttacattc

SEQ ID NO: 809603 - DNA, 15 bp, Homo sapiens
cgcttcttacattca

SEQ ID NO: 809604 - DNA, 15 bp, Homo sapiens
gcttcttacattcag

SEQ ID NO: 809605 - DNA, 15 bp, Homo sapiens
cttcttacattcaga

SEQ ID NO: 809606 - DNA, 15 bp, Homo sapiens
ttcttacattcagaa

SEQ ID NO: 809607 - DNA, 15 bp, Homo sapiens
tcttacattcagaag

SEQ ID NO: 809608 - DNA, 15 bp, Homo sapiens
cttacattcagaagg

SEQ ID NO: 809609 - DNA, 15 bp, Homo sapiens
ttacattcagaaggg

SEQ ID NO: 809610 - DNA, 15 bp, Homo sapiens
tacattcagaaggga

SEQ ID NO: 809611 - DNA, 15 bp, Homo sapiens
acattcagaagggac

SEQ ID NO: 809612 - DNA, 15 bp, Homo sapiens
cattcagaagggact

SEQ ID NO: 809613 - DNA, 15 bp, Homo sapiens
attcagaagggactc

SEQ ID NO: 809614 - DNA, 15 bp, Homo sapiens
ttcagaagggactct

SEQ ID NO: 809615 - DNA, 15 bp, Homo sapiens
tcagaagggactctt

SEQ ID NO: 809616 - DNA, 15 bp, Homo sapiens
cagaagggactcttg

SEQ ID NO: 809617 - DNA, 15 bp, Homo sapiens
agaagggactcttga

SEQ ID NO: 809618 - DNA, 15 bp, Homo sapiens
gaagggactcttgag

SEQ ID NO: 809619 - DNA, 15 bp, Homo sapiens
aagggactcttgagt

SEQ ID NO: 809620 - DNA, 15 bp, Homo sapiens
agggactcttgagta

SEQ ID NO: 809621 - DNA, 15 bp, Homo sapiens
gggactcttgagtaa

SEQ ID NO: 809622 - DNA, 15 bp, Homo sapiens
ggactcttgagtaat

SEQ ID NO: 809623 - DNA, 15 bp, Homo sapiens
gactcttgagtaatt

SEQ ID NO: 809624 - DNA, 15 bp, Homo sapiens
actcttgagtaattt

SEQ ID NO: 809625 - DNA, 15 bp, Homo sapiens
ctcttgagtaattta

SEQ ID NO: 809626 - DNA, 15 bp, Homo sapiens
tcttgagtaatttaa

SEQ ID NO: 809627 - DNA, 15 bp, Homo sapiens
cttgagtaatttaaa

SEQ ID NO: 809628 - DNA, 15 bp, Homo sapiens
ttgagtaatttaaac

SEQ ID NO: 809629 - DNA, 15 bp, Homo sapiens
tgagtaatttaaact

SEQ ID NO: 809630 - DNA, 15 bp, Homo sapiens
gagtaatttaaactt

SEQ ID NO: 809631 - DNA, 15 bp, Homo sapiens
agtaatttaaacttc

SEQ ID NO: 809632 - DNA, 15 bp, Homo sapiens
gtaatttaaacttct

SEQ ID NO: 809633 - DNA, 15 bp, Homo sapiens
taatttaaacttcta

SEQ ID NO: 809634 - DNA, 15 bp, Homo sapiens
aatttaaacttctag

SEQ ID NO: 809635 - DNA, 15 bp, Homo sapiens
atttaaacttctaga

SEQ ID NO: 809636 - DNA, 15 bp, Homo sapiens
tttaaacttctagat

SEQ ID NO: 809637 - DNA, 15 bp, Homo sapiens
ttaaacttctagatc

SEQ ID NO: 809638 - DNA, 15 bp, Homo sapiens
taaacttctagatcc

SEQ ID NO: 809639 - DNA, 15 bp, Homo sapiens
aaacttctagatccc

SEQ ID NO: 809640 - DNA, 15 bp, Homo sapiens
aacttctagatccca

SEQ ID NO: 809641 - DNA, 15 bp, Homo sapiens
acttctagatcccat

SEQ ID NO: 809642 - DNA, 15 bp, Homo sapiens
cttctagatcccatg

SEQ ID NO: 809643 - DNA, 15 bp, Homo sapiens
ttctagatcccatgc

SEQ ID NO: 809644 - DNA, 15 bp, Homo sapiens
tctagatcccatgct

SEQ ID NO: 809645 - DNA, 15 bp, Homo sapiens
ctagatcccatgctc

SEQ ID NO: 809646 - DNA, 15 bp, Homo sapiens
tagatcccatgctcc

SEQ ID NO: 809647 - DNA, 15 bp, Homo sapiens
agatcccatgctccc

SEQ ID NO: 809648 - DNA, 15 bp, Homo sapiens
gatcccatgctccct

SEQ ID NO: 809649 - DNA, 15 bp, Homo sapiens
atcccatgctccctg

SEQ ID NO: 809650 - DNA, 15 bp, Homo sapiens
tcccatgctccctga

SEQ ID NO: 809651 - DNA, 15 bp, Homo sapiens
cccatgctccctgag

SEQ ID NO: 809652 - DNA, 15 bp, Homo sapiens
ccatgctccctgagg

SEQ ID NO: 809653 - DNA, 15 bp, Homo sapiens
catgctccctgaggg

SEQ ID NO: 809654 - DNA, 15 bp, Homo sapiens
atgctccctgagggc

SEQ ID NO: 809655 - DNA, 15 bp, Homo sapiens
tgctccctgagggca

SEQ ID NO: 809656 - DNA, 15 bp, Homo sapiens
gctccctgagggcaa

SEQ ID NO: 809657 - DNA, 15 bp, Homo sapiens
ctccctgagggcaaa

SEQ ID NO: 809658 - DNA, 15 bp, Homo sapiens
tccctgagggcaaag

SEQ ID NO: 809659 - DNA, 15 bp, Homo sapiens
ccctgagggcaaagg

SEQ ID NO: 809660 - DNA, 15 bp, Homo sapiens
cctgagggcaaaggc

SEQ ID NO: 809661 - DNA, 15 bp, Homo sapiens
ctgagggcaaaggcc

SEQ ID NO: 809662 - DNA, 15 bp, Homo sapiens
tgagggcaaaggcca

SEQ ID NO: 809663 - DNA, 15 bp, Homo sapiens
gagggcaaaggccag

SEQ ID NO: 809664 - DNA, 15 bp, Homo sapiens
agggcaaaggccagg

SEQ ID NO: 809665 - DNA, 15 bp, Homo sapiens
gggcaaaggccaggc

SEQ ID NO: 809666 - DNA, 15 bp, Homo sapiens
ggcaaaggccaggcc

SEQ ID NO: 809667 - DNA, 15 bp, Homo sapiens
gcaaaggccaggcca

SEQ ID NO: 809668 - DNA, 15 bp, Homo sapiens
caaaggccaggccag

SEQ ID NO: 809669 - DNA, 15 bp, Homo sapiens
aaaggccaggccaga

SEQ ID NO: 809670 - DNA, 15 bp, Homo sapiens
aaggccaggccagac

SEQ ID NO: 809671 - DNA, 15 bp, Homo sapiens
aggccaggccagact

SEQ ID NO: 809672 - DNA, 15 bp, Homo sapiens
ggccaggccagactt

SEQ ID NO: 809673 - DNA, 15 bp, Homo sapiens
gccaggccagactta

SEQ ID NO: 809674 - DNA, 15 bp, Homo sapiens
ccaggccagacttaa

SEQ ID NO: 809675 - DNA, 15 bp, Homo sapiens
caggccagacttaac

SEQ ID NO: 809676 - DNA, 15 bp, Homo sapiens
aggccagacttaact

SEQ ID NO: 809677 - DNA, 15 bp, Homo sapiens
ggccagacttaactg

SEQ ID NO: 809678 - DNA, 15 bp, Homo sapiens
gccagacttaactgt

SEQ ID NO: 809679 - DNA, 15 bp, Homo sapiens
ccagacttaactgtt

SEQ ID NO: 809680 - DNA, 15 bp, Homo sapiens
cagacttaactgttt

SEQ ID NO: 809681 - DNA, 15 bp, Homo sapiens
agacttaactgtttc

SEQ ID NO: 809682 - DNA, 15 bp, Homo sapiens
gacttaactgtttca

SEQ ID NO: 809683 - DNA, 15 bp, Homo sapiens
acttaactgtttcag

SEQ ID NO: 809684 - DNA, 15 bp, Homo sapiens
cttaactgtttcagt

SEQ ID NO: 809685 - DNA, 15 bp, Homo sapiens
ttaactgtttcagtt

SEQ ID NO: 809686 - DNA, 15 bp, Homo sapiens
taactgtttcagttt

SEQ ID NO: 809687 - DNA, 15 bp, Homo sapiens
aactgtttcagtttt

SEQ ID NO: 809688 - DNA, 15 bp, Homo sapiens
actgtttcagttttg

SEQ ID NO: 809689 - DNA, 15 bp, Homo sapiens
ctgtttcagttttgc

SEQ ID NO: 809690 - DNA, 15 bp, Homo sapiens
tgtttcagttttgca

SEQ ID NO: 809691 - DNA, 15 bp, Homo sapiens
gtttcagttttgcat

SEQ ID NO: 809692 - DNA, 15 bp, Homo sapiens
tttcagttttgcatt

SEQ ID NO: 809693 - DNA, 15 bp, Homo sapiens
ttcagttttgcattt

SEQ ID NO: 809694 - DNA, 15 bp, Homo sapiens
tcagttttgcatttc

SEQ ID NO: 809695 - DNA, 15 bp, Homo sapiens
cagttttgcatttct

SEQ ID NO: 809696 - DNA, 15 bp, Homo sapiens
agttttgcatttctc

SEQ ID NO: 809697 - DNA, 15 bp, Homo sapiens
gttttgcatttctct

SEQ ID NO: 809698 - DNA, 15 bp, Homo sapiens
ttttgcatttctctg

SEQ ID NO: 809699 - DNA, 15 bp, Homo sapiens
tttgcatttctctgt

SEQ ID NO: 809700 - DNA, 15 bp, Homo sapiens
ttgcatttctctgtc

SEQ ID NO: 809701 - DNA, 15 bp, Homo sapiens
tgcatttctctgtct

SEQ ID NO: 809702 - DNA, 15 bp, Homo sapiens
gcatttctctgtctc

SEQ ID NO: 809703 - DNA, 15 bp, Homo sapiens
catttctctgtctct

SEQ ID NO: 809704 - DNA, 15 bp, Homo sapiens
atttctctgtctctc

SEQ ID NO: 809705 - DNA, 15 bp, Homo sapiens
tttctctgtctctca

SEQ ID NO: 809706 - DNA, 15 bp, Homo sapiens
ttctctgtctctcac

SEQ ID NO: 809707 - DNA, 15 bp, Homo sapiens
tctctgtctctcact

SEQ ID NO: 809708 - DNA, 15 bp, Homo sapiens
ctctgtctctcactc

SEQ ID NO: 809709 - DNA, 15 bp, Homo sapiens
tctgtctctcactct

SEQ ID NO: 809710 - DNA, 15 bp, Homo sapiens
ctgtctctcactctg

SEQ ID NO: 809711 - DNA, 15 bp, Homo sapiens
tgtctctcactctgg

SEQ ID NO: 809712 - DNA, 15 bp, Homo sapiens
gtctctcactctggc

SEQ ID NO: 809713 - DNA, 15 bp, Homo sapiens
tctctcactctggcc

SEQ ID NO: 809714 - DNA, 15 bp, Homo sapiens
ctctcactctggccc

SEQ ID NO: 809715 - DNA, 15 bp, Homo sapiens
tctcactctggccct

SEQ ID NO: 809716 - DNA, 15 bp, Homo sapiens
ctcactctggccctt

SEQ ID NO: 809717 - DNA, 15 bp, Homo sapiens
tcactctggcccttg

SEQ ID NO: 809718 - DNA, 15 bp, Homo sapiens
cactctggcccttgt

SEQ ID NO: 809719 - DNA, 15 bp, Homo sapiens
actctggcccttgtg

SEQ ID NO: 809720 - DNA, 15 bp, Homo sapiens
ctctggcccttgtgc

SEQ ID NO: 809721 - DNA, 15 bp, Homo sapiens
tctggcccttgtgca

SEQ ID NO: 809722 - DNA, 15 bp, Homo sapiens
ctggcccttgtgcat

SEQ ID NO: 809723 - DNA, 15 bp, Homo sapiens
tggcccttgtgcata

SEQ ID NO: 809724 - DNA, 15 bp, Homo sapiens
ggcccttgtgcatag

SEQ ID NO: 809725 - DNA, 15 bp, Homo sapiens
gcccttgtgcatagg

SEQ ID NO: 809726 - DNA, 15 bp, Homo sapiens
cccttgtgcataggt

SEQ ID NO: 809727 - DNA, 15 bp, Homo sapiens
ccttgtgcataggtg

SEQ ID NO: 809728 - DNA, 15 bp, Homo sapiens
cttgtgcataggtgt

SEQ ID NO: 809729 - DNA, 15 bp, Homo sapiens
ttgtgcataggtgtt

SEQ ID NO: 809730 - DNA, 15 bp, Homo sapiens
tgtgcataggtgttc

SEQ ID NO: 809731 - DNA, 15 bp, Homo sapiens
gtgcataggtgttca

SEQ ID NO: 809732 - DNA, 15 bp, Homo sapiens
tgcataggtgttcaa

SEQ ID NO: 809733 - DNA, 15 bp, Homo sapiens
gcataggtgttcaat

SEQ ID NO: 809734 - DNA, 15 bp, Homo sapiens
cataggtgttcaata

SEQ ID NO: 809735 - DNA, 15 bp, Homo sapiens
ataggtgttcaataa

SEQ ID NO: 809736 - DNA, 15 bp, Homo sapiens
taggtgttcaataaa

SEQ ID NO: 809737 - DNA, 15 bp, Homo sapiens
aggtgttcaataaat

SEQ ID NO: 809738 - DNA, 15 bp, Homo sapiens
ggtgttcaataaatg

SEQ ID NO: 809739 - DNA, 15 bp, Homo sapiens
gtgttcaataaatgt

SEQ ID NO: 809740 - DNA, 15 bp, Homo sapiens
tgttcaataaatgtt

SEQ ID NO: 809741 - DNA, 15 bp, Homo sapiens
gttcaataaatgttt

SEQ ID NO: 809742 - DNA, 15 bp, Homo sapiens
ttcaataaatgtttg

SEQ ID NO: 809743 - DNA, 15 bp, Homo sapiens
tcaataaatgtttgt

SEQ ID NO: 809744 - DNA, 15 bp, Homo sapiens
caataaatgtttgtt

SEQ ID NO: 809745 - DNA, 15 bp, Homo sapiens
aataaatgtttgttg

SEQ ID NO: 809746 - DNA, 15 bp, Homo sapiens
ataaatgtttgttgg

SEQ ID NO: 809747 - DNA, 15 bp, Homo sapiens
taaatgtttgttggc

SEQ ID NO: 809748 - DNA, 15 bp, Homo sapiens
aaatgtttgttggca

SEQ ID NO: 809749 - DNA, 15 bp, Homo sapiens
aatgtttgttggcat

SEQ ID NO: 809750 - DNA, 15 bp, Homo sapiens
atgtttgttggcatt

SEQ ID NO: 809751 - DNA, 15 bp, Homo sapiens
tgtttgttggcattg

SEQ ID NO: 809752 - DNA, 15 bp, Homo sapiens
gtttgttggcattgt

SEQ ID NO: 809753 - DNA, 15 bp, Homo sapiens
tttgttggcattgtt

SEQ ID NO: 809754 - DNA, 15 bp, Homo sapiens
ttgttggcattgtta

SEQ ID NO: 809755 - DNA, 15 bp, Homo sapiens
tgttggcattgttat

SEQ ID NO: 809756 - DNA, 15 bp, Homo sapiens
gttggcattgttatt

SEQ ID NO: 809757 - DNA, 15 bp, Homo sapiens
ttggcattgttatta

SEQ ID NO: 809758 - DNA, 15 bp, Homo sapiens
tggcattgttattaa

SEQ ID NO: 809759 - DNA, 15 bp, Homo sapiens
ggcattgttattaat

SEQ ID NO: 809760 - DNA, 15 bp, Homo sapiens
gcattgttattaata

SEQ ID NO: 809761 - DNA, 15 bp, Homo sapiens
cattgttattaataa

SEQ ID NO: 809762 - DNA, 15 bp, Homo sapiens
attgttattaataaa

SEQ ID NO: 809763 - DNA, 15 bp, Homo sapiens
ttgttattaataaat

SEQ ID NO: 809764 - DNA, 15 bp, Homo sapiens
tgttattaataaatt

SEQ ID NO: 809765 - DNA, 15 bp, Homo sapiens
gttattaataaattc

SEQ ID NO: 809766 - DNA, 15 bp, Homo sapiens
ttattaataaattca

SEQ ID NO: 809767 - DNA, 15 bp, Homo sapiens
tattaataaattcac

SEQ ID NO: 809768 - DNA, 15 bp, Homo sapiens
attaataaattcacc

SEQ ID NO: 809769 - DNA, 15 bp, Homo sapiens
ttaataaattcacca

SEQ ID NO: 809770 - DNA, 15 bp, Homo sapiens
taataaattcaccag

SEQ ID NO: 809771 - DNA, 15 bp, Homo sapiens
aataaattcaccagg

SEQ ID NO: 809772 - DNA, 15 bp, Homo sapiens
ataaattcaccagga

SEQ ID NO: 809773 - DNA, 15 bp, Homo sapiens
taaattcaccaggac

SEQ ID NO: 809774 - DNA, 15 bp, Homo sapiens
aaattcaccaggaca

SEQ ID NO: 809775 - DNA, 15 bp, Homo sapiens
aattcaccaggacaa

SEQ ID NO: 809776 - DNA, 15 bp, Homo sapiens
attcaccaggacaaa

SEQ ID NO: 809777 - DNA, 15 bp, Homo sapiens
ttcaccaggacaaaa

SEQ ID NO: 809778 - DNA, 15 bp, Homo sapiens
tcaccaggacaaaaa

SEQ ID NO: 809779 - DNA, 15 bp, Homo sapiens
caccaggacaaaaac

SEQ ID NO: 809780 - DNA, 15 bp, Homo sapiens
accaggacaaaaaca

SEQ ID NO: 809781 - DNA, 15 bp, Homo sapiens
ccaggacaaaaacat

SEQ ID NO: 809782 - DNA, 15 bp, Homo sapiens
caggacaaaaacatt

SEQ ID NO: 809783 - DNA, 15 bp, Homo sapiens
aggacaaaaacatta

SEQ ID NO: 809784 - DNA, 15 bp, Homo sapiens
ggacaaaaacattat

SEQ ID NO: 809785 - DNA, 15 bp, Homo sapiens
gacaaaaacattata

SEQ ID NO: 809786 - DNA, 15 bp, Homo sapiens
acaaaaacattataa

SEQ ID NO: 809787 - DNA, 15 bp, Homo sapiens
caaaaacattataat

SEQ ID NO: 809788 - DNA, 15 bp, Homo sapiens
aaaaacattataatt

SEQ ID NO: 809789 - DNA, 15 bp, Homo sapiens
aaaacattataattt

SEQ ID NO: 809790 - DNA, 15 bp, Homo sapiens
aaacattataattta

SEQ ID NO: 809791 - DNA, 15 bp, Homo sapiens
aacattataatttag

SEQ ID NO: 809792 - DNA, 15 bp, Homo sapiens
acattataatttaga

SEQ ID NO: 809793 - DNA, 15 bp, Homo sapiens
cattataatttagat

SEQ ID NO: 809794 - DNA, 15 bp, Homo sapiens
attataatttagatg

SEQ ID NO: 809795 - DNA, 15 bp, Homo sapiens
ttataatttagatgt

SEQ ID NO: 809796 - DNA, 15 bp, Homo sapiens
tataatttagatgtt

SEQ ID NO: 809797 - DNA, 15 bp, Homo sapiens
ataatttagatgttg

SEQ ID NO: 809798 - DNA, 15 bp, Homo sapiens
taatttagatgttgg

SEQ ID NO: 809799 - DNA, 15 bp, Homo sapiens
aatttagatgttgga

SEQ ID NO: 809800 - DNA, 15 bp, Homo sapiens
atttagatgttggaa

SEQ ID NO: 809801 - DNA, 15 bp, Homo sapiens
tttagatgttggaat

SEQ ID NO: 809802 - DNA, 15 bp, Homo sapiens
ttagatgttggaatg

SEQ ID NO: 809803 - DNA, 15 bp, Homo sapiens
tagatgttggaatga

SEQ ID NO: 809804 - DNA, 15 bp, Homo sapiens
agatgttggaatgat

SEQ ID NO: 809805 - DNA, 15 bp, Homo sapiens
gatgttggaatgata

SEQ ID NO: 809806 - DNA, 15 bp, Homo sapiens
atgttggaatgatat

SEQ ID NO: 809807 - DNA, 15 bp, Homo sapiens
tgttggaatgatatt

SEQ ID NO: 809808 - DNA, 15 bp, Homo sapiens
gttggaatgatatta

SEQ ID NO: 809809 - DNA, 15 bp, Homo sapiens
ttggaatgatattat

SEQ ID NO: 809810 - DNA, 15 bp, Homo sapiens
tggaatgatattatc

SEQ ID NO: 809811 - DNA, 15 bp, Homo sapiens
ggaatgatattatct

SEQ ID NO: 809812 - DNA, 15 bp, Homo sapiens
gaatgatattatctc

SEQ ID NO: 809813 - DNA, 15 bp, Homo sapiens
aatgatattatctct

SEQ ID NO: 809814 - DNA, 15 bp, Homo sapiens
atgatattatctctc

SEQ ID NO: 809815 - DNA, 15 bp, Homo sapiens
tgatattatctctca

SEQ ID NO: 809816 - DNA, 15 bp, Homo sapiens
gatattatctctcaa

SEQ ID NO: 809817 - DNA, 15 bp, Homo sapiens
atattatctctcaaa

SEQ ID NO: 809818 - DNA, 15 bp, Homo sapiens
tattatctctcaaaa

SEQ ID NO: 809819 - DNA, 15 bp, Homo sapiens
attatctctcaaaaa

SEQ ID NO: 809820 - DNA, 15 bp, Homo sapiens
ttatctctcaaaaaa

SEQ ID NO: 809821 - DNA, 15 bp, Homo sapiens
tatctctcaaaaaac

SEQ ID NO: 809822 - DNA, 15 bp, Homo sapiens
atctctcaaaaaaca

SEQ ID NO: 809823 - DNA, 15 bp, Homo sapiens
tctctcaaaaaacaa

SEQ ID NO: 809824 - DNA, 15 bp, Homo sapiens
ctctcaaaaaacaaa

SEQ ID NO: 809825 - DNA, 15 bp, Homo sapiens
ctcaaaaaacaaaat

SEQ ID NO: 809826 - DNA, 15 bp, Homo sapiens
tcaaaaaacaaaatg

SEQ ID NO: 809827 - DNA, 15 bp, Homo sapiens
caaaaaacaaaatgt

SEQ ID NO: 809828 - DNA, 15 bp, Homo sapiens
aaaaaacaaaatgtc

SEQ ID NO: 809829 - DNA, 15 bp, Homo sapiens
aaaaacaaaatgtca

SEQ ID NO: 809830 - DNA, 15 bp, Homo sapiens
aaaacaaaatgtcac

SEQ ID NO: 809831 - DNA, 15 bp, Homo sapiens
aaacaaaatgtcacc

SEQ ID NO: 809832 - DNA, 15 bp, Homo sapiens
aacaaaatgtcacca

SEQ ID NO: 809833 - DNA, 15 bp, Homo sapiens
acaaaatgtcaccag

SEQ ID NO: 809834 - DNA, 15 bp, Homo sapiens
caaaatgtcaccaga

SEQ ID NO: 809835 - DNA, 15 bp, Homo sapiens
aaaatgtcaccagat

SEQ ID NO: 809836 - DNA, 15 bp, Homo sapiens
aaatgtcaccagatt

SEQ ID NO: 809837 - DNA, 15 bp, Homo sapiens
aatgtcaccagattg

SEQ ID NO: 809838 - DNA, 15 bp, Homo sapiens
atgtcaccagattgt

SEQ ID NO: 809839 - DNA, 15 bp, Homo sapiens
tgtcaccagattgtt

SEQ ID NO: 809840 - DNA, 15 bp, Homo sapiens
gtcaccagattgttt

SEQ ID NO: 809841 - DNA, 15 bp, Homo sapiens
tcaccagattgtttt

SEQ ID NO: 809842 - DNA, 15 bp, Homo sapiens
caccagattgttttg

SEQ ID NO: 809843 - DNA, 15 bp, Homo sapiens
accagattgttttgc

SEQ ID NO: 809844 - DNA, 15 bp, Homo sapiens
ccagattgttttgcc

SEQ ID NO: 809845 - DNA, 15 bp, Homo sapiens
cagattgttttgcct

SEQ ID NO: 809846 - DNA, 15 bp, Homo sapiens
agattgttttgcctt

SEQ ID NO: 809847 - DNA, 15 bp, Homo sapiens
gattgttttgccttg

SEQ ID NO: 809848 - DNA, 15 bp, Homo sapiens
attgttttgccttgg

SEQ ID NO: 809849 - DNA, 15 bp, Homo sapiens
ttgttttgccttggg

SEQ ID NO: 809850 - DNA, 15 bp, Homo sapiens
tgttttgccttggga

SEQ ID NO: 809851 - DNA, 15 bp, Homo sapiens
gttttgccttgggag

SEQ ID NO: 809852 - DNA, 15 bp, Homo sapiens
ttttgccttgggagt

SEQ ID NO: 809853 - DNA, 15 bp, Homo sapiens
tttgccttgggagtt

SEQ ID NO: 809854 - DNA, 15 bp, Homo sapiens
ttgccttgggagttc

SEQ ID NO: 809855 - DNA, 15 bp, Homo sapiens
tgccttgggagttct

SEQ ID NO: 809856 - DNA, 15 bp, Homo sapiens
gccttgggagttctc

SEQ ID NO: 809857 - DNA, 15 bp, Homo sapiens
ccttgggagttctca

SEQ ID NO: 809858 - DNA, 15 bp, Homo sapiens
cttgggagttctcac

SEQ ID NO: 809859 - DNA, 15 bp, Homo sapiens
ttgggagttctcaca

SEQ ID NO: 809860 - DNA, 15 bp, Homo sapiens
tgggagttctcacat

SEQ ID NO: 809861 - DNA, 15 bp, Homo sapiens
gggagttctcacatc

SEQ ID NO: 809862 - DNA, 15 bp, Homo sapiens
ggagttctcacatct

SEQ ID NO: 809863 - DNA, 15 bp, Homo sapiens
gagttctcacatcta

SEQ ID NO: 809864 - DNA, 15 bp, Homo sapiens
agttctcacatctat

SEQ ID NO: 809865 - DNA, 15 bp, Homo sapiens
gttctcacatctatt

SEQ ID NO: 809866 - DNA, 15 bp, Homo sapiens
ttctcacatctattt

SEQ ID NO: 809867 - DNA, 15 bp, Homo sapiens
tctcacatctatttt

SEQ ID NO: 809868 - DNA, 15 bp, Homo sapiens
ctcacatctattttt

SEQ ID NO: 809869 - DNA, 15 bp, Homo sapiens
tcacatctatttttt

SEQ ID NO: 809870 - DNA, 15 bp, Homo sapiens
cacatctattttttt

SEQ ID NO: 809871 - DNA, 15 bp, Homo sapiens
acatctatttttttc

SEQ ID NO: 809872 - DNA, 15 bp, Homo sapiens
catctatttttttct

SEQ ID NO: 809873 - DNA, 15 bp, Homo sapiens
atctatttttttctt

SEQ ID NO: 809874 - DNA, 15 bp, Homo sapiens
tctatttttttcttt

SEQ ID NO: 809875 - DNA, 15 bp, Homo sapiens
ctatttttttctttt

SEQ ID NO: 809876 - DNA, 15 bp, Homo sapiens
tatttttttcttttt

SEQ ID NO: 809877 - DNA, 15 bp, Homo sapiens
atttttttctttttt

SEQ ID NO: 809878 - DNA, 15 bp, Homo sapiens
tttttttcttttttg

SEQ ID NO: 809879 - DNA, 15 bp, Homo sapiens
ttttttcttttttgt

SEQ ID NO: 809880 - DNA, 15 bp, Homo sapiens
tttttcttttttgtg

SEQ ID NO: 809881 - DNA, 15 bp, Homo sapiens
ttttcttttttgtgt

SEQ ID NO: 809882 - DNA, 15 bp, Homo sapiens
tttcttttttgtgtg

SEQ ID NO: 809883 - DNA, 15 bp, Homo sapiens
ttcttttttgtgtgt

SEQ ID NO: 809884 - DNA, 15 bp, Homo sapiens
tcttttttgtgtgtg

SEQ ID NO: 809885 - DNA, 15 bp, Homo sapiens
cttttttgtgtgtgt

SEQ ID NO: 809886 - DNA, 15 bp, Homo sapiens
ttttttgtgtgtgtg

SEQ ID NO: 809887 - DNA, 15 bp, Homo sapiens
tttttgtgtgtgtga

SEQ ID NO: 809888 - DNA, 15 bp, Homo sapiens
ttttgtgtgtgtgag

SEQ ID NO: 809889 - DNA, 15 bp, Homo sapiens
tttgtgtgtgtgaga

SEQ ID NO: 809890 - DNA, 15 bp, Homo sapiens
ttgtgtgtgtgagac

SEQ ID NO: 809891 - DNA, 15 bp, Homo sapiens
tgtgtgtgtgagaca

SEQ ID NO: 809892 - DNA, 15 bp, Homo sapiens
gtgtgtgtgagacag

SEQ ID NO: 809893 - DNA, 15 bp, Homo sapiens
tgtgtgtgagacagg

SEQ ID NO: 809894 - DNA, 15 bp, Homo sapiens
gtgtgtgagacaggg

SEQ ID NO: 809895 - DNA, 15 bp, Homo sapiens
tgtgtgagacagggt

SEQ ID NO: 809896 - DNA, 15 bp, Homo sapiens
gtgtgagacagggtc

SEQ ID NO: 809897 - DNA, 15 bp, Homo sapiens
tgtgagacagggtct

SEQ ID NO: 809898 - DNA, 15 bp, Homo sapiens
gtgagacagggtctt

SEQ ID NO: 809899 - DNA, 15 bp, Homo sapiens
gacagggtcttgcct

SEQ ID NO: 809900 - DNA, 15 bp, Homo sapiens
acagggtcttgcctt

SEQ ID NO: 809901 - DNA, 15 bp, Homo sapiens
cagggtcttgccttg

SEQ ID NO: 809902 - DNA, 15 bp, Homo sapiens
agggtcttgccttgt

SEQ ID NO: 809903 - DNA, 15 bp, Homo sapiens
gggtcttgccttgtc

SEQ ID NO: 809904 - DNA, 15 bp, Homo sapiens
ggtcttgccttgtca

SEQ ID NO: 809905 - DNA, 15 bp, Homo sapiens
gtcttgccttgtcac

SEQ ID NO: 809906 - DNA, 15 bp, Homo sapiens
tcttgccttgtcacc

SEQ ID NO: 809907 - DNA, 15 bp, Homo sapiens
cttgccttgtcaccc

SEQ ID NO: 809908 - DNA, 15 bp, Homo sapiens
ttgccttgtcaccca

SEQ ID NO: 809909 - DNA, 15 bp, Homo sapiens
tgccttgtcacccac

SEQ ID NO: 809910 - DNA, 15 bp, Homo sapiens
gccttgtcacccacg

SEQ ID NO: 809911 - DNA, 15 bp, Homo sapiens
ccttgtcacccacgt

SEQ ID NO: 809912 - DNA, 15 bp, Homo sapiens
cttgtcacccacgtt

SEQ ID NO: 809913 - DNA, 15 bp, Homo sapiens
ttgtcacccacgttg

SEQ ID NO: 809914 - DNA, 15 bp, Homo sapiens
tgtcacccacgttgg

SEQ ID NO: 809915 - DNA, 15 bp, Homo sapiens
gtcacccacgttgga

SEQ ID NO: 809916 - DNA, 15 bp, Homo sapiens
tcacccacgttggag

SEQ ID NO: 809917 - DNA, 15 bp, Homo sapiens
cacccacgttggagt

SEQ ID NO: 809918 - DNA, 15 bp, Homo sapiens
acccacgttggagtg

SEQ ID NO: 809919 - DNA, 15 bp, Homo sapiens
cccacgttggagtgt

SEQ ID NO: 809920 - DNA, 15 bp, Homo sapiens
ccacgttggagtgta

SEQ ID NO: 809921 - DNA, 15 bp, Homo sapiens
cacgttggagtgtag

SEQ ID NO: 809922 - DNA, 15 bp, Homo sapiens
acgttggagtgtagt

SEQ ID NO: 809923 - DNA, 15 bp, Homo sapiens
cgttggagtgtagtg

SEQ ID NO: 809924 - DNA, 15 bp, Homo sapiens
gttggagtgtagtgg

SEQ ID NO: 809925 - DNA, 15 bp, Homo sapiens
ttggagtgtagtggt

SEQ ID NO: 809926 - DNA, 15 bp, Homo sapiens
tggagtgtagtggtt

SEQ ID NO: 809927 - DNA, 15 bp, Homo sapiens
ggagtgtagtggttt

SEQ ID NO: 809928 - DNA, 15 bp, Homo sapiens
gagtgtagtggtttg

SEQ ID NO: 809929 - DNA, 15 bp, Homo sapiens
agtgtagtggtttga

SEQ ID NO: 809930 - DNA, 15 bp, Homo sapiens
gtgtagtggtttgat

SEQ ID NO: 809931 - DNA, 15 bp, Homo sapiens
tgtagtggtttgatc

SEQ ID NO: 809932 - DNA, 15 bp, Homo sapiens
gtagtggtttgatca

SEQ ID NO: 809933 - DNA, 15 bp, Homo sapiens
tagtggtttgatcac

SEQ ID NO: 809934 - DNA, 15 bp, Homo sapiens
agtggtttgatcaca

SEQ ID NO: 809935 - DNA, 15 bp, Homo sapiens
gtggtttgatcacag

SEQ ID NO: 809936 - DNA, 15 bp, Homo sapiens
tggtttgatcacagc

SEQ ID NO: 809937 - DNA, 15 bp, Homo sapiens
ggtttgatcacagct

SEQ ID NO: 809938 - DNA, 15 bp, Homo sapiens
gtttgatcacagctc

SEQ ID NO: 809939 - DNA, 15 bp, Homo sapiens
tttgatcacagctca

SEQ ID NO: 809940 - DNA, 15 bp, Homo sapiens
ttgatcacagctcaa

SEQ ID NO: 809941 - DNA, 15 bp, Homo sapiens
tgatcacagctcaac

SEQ ID NO: 809942 - DNA, 15 bp, Homo sapiens
gatcacagctcaact

SEQ ID NO: 809943 - DNA, 15 bp, Homo sapiens
atcacagctcaactg

SEQ ID NO: 809944 - DNA, 15 bp, Homo sapiens
tcacagctcaactgc

SEQ ID NO: 809945 - DNA, 15 bp, Homo sapiens
cacagctcaactgca

SEQ ID NO: 809946 - DNA, 15 bp, Homo sapiens
acagctcaactgcag

SEQ ID NO: 809947 - DNA, 15 bp, Homo sapiens
cagctcaactgcagc

SEQ ID NO: 809948 - DNA, 15 bp, Homo sapiens
agctcaactgcagct

SEQ ID NO: 809949 - DNA, 15 bp, Homo sapiens
gctcaactgcagctt

SEQ ID NO: 809950 - DNA, 15 bp, Homo sapiens
ctcaactgcagcttc

SEQ ID NO: 809951 - DNA, 15 bp, Homo sapiens
tcaactgcagcttcc

SEQ ID NO: 809952 - DNA, 15 bp, Homo sapiens
caactgcagcttcca

SEQ ID NO: 809953 - DNA, 15 bp, Homo sapiens
aactgcagcttccac

SEQ ID NO: 809954 - DNA, 15 bp, Homo sapiens
actgcagcttccacc

SEQ ID NO: 809955 - DNA, 15 bp, Homo sapiens
ctgcagcttccacct

SEQ ID NO: 809956 - DNA, 15 bp, Homo sapiens
tgcagcttccacctc

SEQ ID NO: 809957 - DNA, 15 bp, Homo sapiens
gcagcttccacctcc

SEQ ID NO: 809958 - DNA, 15 bp, Homo sapiens
cagcttccacctccc

SEQ ID NO: 809959 - DNA, 15 bp, Homo sapiens
agcttccacctccca

SEQ ID NO: 809960 - DNA, 15 bp, Homo sapiens
gcttccacctcccag

SEQ ID NO: 809961 - DNA, 15 bp, Homo sapiens
cttccacctcccagg

SEQ ID NO: 809962 - DNA, 15 bp, Homo sapiens
ttccacctcccaggc

SEQ ID NO: 809963 - DNA, 15 bp, Homo sapiens
cacctcccaggctca

SEQ ID NO: 809964 - DNA, 15 bp, Homo sapiens
ctcccaggctcaagc

SEQ ID NO: 809965 - DNA, 15 bp, Homo sapiens
tcccaggctcaagcg

SEQ ID NO: 809966 - DNA, 15 bp, Homo sapiens
cccaggctcaagcga

SEQ ID NO: 809967 - DNA, 15 bp, Homo sapiens
ccaggctcaagcgat

SEQ ID NO: 809968 - DNA, 15 bp, Homo sapiens
caggctcaagcgatc

SEQ ID NO: 809969 - DNA, 15 bp, Homo sapiens
aggctcaagcgatcc

SEQ ID NO: 809970 - DNA, 15 bp, Homo sapiens
ggctcaagcgatcct

SEQ ID NO: 809971 - DNA, 15 bp, Homo sapiens
gctcaagcgatcctc

SEQ ID NO: 809972 - DNA, 15 bp, Homo sapiens
ctcaagcgatcctcc

SEQ ID NO: 809973 - DNA, 15 bp, Homo sapiens
tcaagcgatcctcct

SEQ ID NO: 809974 - DNA, 15 bp, Homo sapiens
caagcgatcctcctg

SEQ ID NO: 809975 - DNA, 15 bp, Homo sapiens
aagcgatcctcctga

SEQ ID NO: 809976 - DNA, 15 bp, Homo sapiens
agcgatcctcctgac

SEQ ID NO: 809977 - DNA, 15 bp, Homo sapiens
gcgatcctcctgact

SEQ ID NO: 809978 - DNA, 15 bp, Homo sapiens
cgatcctcctgactc

SEQ ID NO: 809979 - DNA, 15 bp, Homo sapiens
gatcctcctgactca

SEQ ID NO: 809980 - DNA, 15 bp, Homo sapiens
atcctcctgactcac

SEQ ID NO: 809981 - DNA, 15 bp, Homo sapiens
tcctcctgactcacc

SEQ ID NO: 809982 - DNA, 15 bp, Homo sapiens
cctcctgactcaccc

SEQ ID NO: 809983 - DNA, 15 bp, Homo sapiens
ctcctgactcaccct

SEQ ID NO: 809984 - DNA, 15 bp, Homo sapiens
tcctgactcaccctc

SEQ ID NO: 809985 - DNA, 15 bp, Homo sapiens
cctgactcaccctct

SEQ ID NO: 809986 - DNA, 15 bp, Homo sapiens
ctgactcaccctctg

SEQ ID NO: 809987 - DNA, 15 bp, Homo sapiens
tgactcaccctctgg

SEQ ID NO: 809988 - DNA, 15 bp, Homo sapiens
gactcaccctctgga

SEQ ID NO: 809989 - DNA, 15 bp, Homo sapiens
actcaccctctggag

SEQ ID NO: 809990 - DNA, 15 bp, Homo sapiens
ctcaccctctggagt

SEQ ID NO: 809991 - DNA, 15 bp, Homo sapiens
tcaccctctggagta

SEQ ID NO: 809992 - DNA, 15 bp, Homo sapiens
caccctctggagtag

SEQ ID NO: 809993 - DNA, 15 bp, Homo sapiens
accctctggagtagc

SEQ ID NO: 809994 - DNA, 15 bp, Homo sapiens
ccctctggagtagct

SEQ ID NO: 809995 - DNA, 15 bp, Homo sapiens
tgggattataggcac

SEQ ID NO: 809996 - DNA, 15 bp, Homo sapiens
gggattataggcaca

SEQ ID NO: 809997 - DNA, 15 bp, Homo sapiens
ggattataggcacat

SEQ ID NO: 809998 - DNA, 15 bp, Homo sapiens
gattataggcacatg

SEQ ID NO: 809999 - DNA, 15 bp, Homo sapiens
attataggcacatgc

SEQ ID NO: 810000 - DNA, 15 bp, Homo sapiens
ttataggcacatgct

SEQ ID NO: 810001 - DNA, 15 bp, Homo sapiens
tataggcacatgcta

SEQ ID NO: 810002 - DNA, 15 bp, Homo sapiens
ataggcacatgctat

SEQ ID NO: 810003 - DNA, 15 bp, Homo sapiens
taggcacatgctatc

SEQ ID NO: 810004 - DNA, 15 bp, Homo sapiens
aggcacatgctatca

SEQ ID NO: 810005 - DNA, 15 bp, Homo sapiens
ggcacatgctatcat

SEQ ID NO: 810006 - DNA, 15 bp, Homo sapiens
gcacatgctatcatg

SEQ ID NO: 810007 - DNA, 15 bp, Homo sapiens
cacatgctatcatgc

SEQ ID NO: 810008 - DNA, 15 bp, Homo sapiens
acatgctatcatgcc

SEQ ID NO: 810009 - DNA, 15 bp, Homo sapiens
catgctatcatgcct

SEQ ID NO: 810010 - DNA, 15 bp, Homo sapiens
atgctatcatgcctg

SEQ ID NO: 810011 - DNA, 15 bp, Homo sapiens
tgctatcatgcctgg

SEQ ID NO: 810012 - DNA, 15 bp, Homo sapiens
gctatcatgcctgga

SEQ ID NO: 810013 - DNA, 15 bp, Homo sapiens
ctatcatgcctggat

SEQ ID NO: 810014 - DNA, 15 bp, Homo sapiens
tatcatgcctggata

SEQ ID NO: 810015 - DNA, 15 bp, Homo sapiens
atcatgcctggataa

SEQ ID NO: 810016 - DNA, 15 bp, Homo sapiens
tcatgcctggataat

SEQ ID NO: 810017 - DNA, 15 bp, Homo sapiens
catgcctggataatt

SEQ ID NO: 810018 - DNA, 15 bp, Homo sapiens
atgcctggataattt

SEQ ID NO: 810019 - DNA, 15 bp, Homo sapiens
tgcctggataatttt

SEQ ID NO: 810020 - DNA, 15 bp, Homo sapiens
gcctggataattttt

SEQ ID NO: 810021 - DNA, 15 bp, Homo sapiens
cctggataatttttt

SEQ ID NO: 810022 - DNA, 15 bp, Homo sapiens
ctggataattttttt

SEQ ID NO: 810023 - DNA, 15 bp, Homo sapiens
tggataattttttta

SEQ ID NO: 810024 - DNA, 15 bp, Homo sapiens
ggataatttttttaa

SEQ ID NO: 810025 - DNA, 15 bp, Homo sapiens
gataatttttttaaa

SEQ ID NO: 810026 - DNA, 15 bp, Homo sapiens
ataatttttttaaag

SEQ ID NO: 810027 - DNA, 15 bp, Homo sapiens
taatttttttaaagt

SEQ ID NO: 810028 - DNA, 15 bp, Homo sapiens
aatttttttaaagtt

SEQ ID NO: 810029 - DNA, 15 bp, Homo sapiens
atttttttaaagttt

SEQ ID NO: 810030 - DNA, 15 bp, Homo sapiens
tttttttaaagtttt

SEQ ID NO: 810031 - DNA, 15 bp, Homo sapiens
ttttttaaagttttt

SEQ ID NO: 810032 - DNA, 15 bp, Homo sapiens
tttttaaagtttttt

SEQ ID NO: 810033 - DNA, 15 bp, Homo sapiens
ttttaaagttttttt

SEQ ID NO: 810034 - DNA, 15 bp, Homo sapiens
tttaaagtttttttt

SEQ ID NO: 810035 - DNA, 15 bp, Homo sapiens
ttaaagttttttttg

SEQ ID NO: 810036 - DNA, 15 bp, Homo sapiens
taaagttttttttgt

SEQ ID NO: 810037 - DNA, 15 bp, Homo sapiens
aaagttttttttgta

SEQ ID NO: 810038 - DNA, 15 bp, Homo sapiens
aagttttttttgtag

SEQ ID NO: 810039 - DNA, 15 bp, Homo sapiens
agttttttttgtaga

SEQ ID NO: 810040 - DNA, 15 bp, Homo sapiens
gttttttttgtagag

SEQ ID NO: 810041 - DNA, 15 bp, Homo sapiens
tttttttgtagagat

SEQ ID NO: 810042 - DNA, 15 bp, Homo sapiens
ttttttgtagagata

SEQ ID NO: 810043 - DNA, 15 bp, Homo sapiens
tttttgtagagatat

SEQ ID NO: 810044 - DNA, 15 bp, Homo sapiens
ttttgtagagatatg

SEQ ID NO: 810045 - DNA, 15 bp, Homo sapiens
tttgtagagatatgg

SEQ ID NO: 810046 - DNA, 15 bp, Homo sapiens
ttgtagagatatggt

SEQ ID NO: 810047 - DNA, 15 bp, Homo sapiens
tgtagagatatggtc

SEQ ID NO: 810048 - DNA, 15 bp, Homo sapiens
gtagagatatggtct

SEQ ID NO: 810049 - DNA, 15 bp, Homo sapiens
tagagatatggtctc

SEQ ID NO: 810050 - DNA, 15 bp, Homo sapiens
agagatatggtctct

SEQ ID NO: 810051 - DNA, 15 bp, Homo sapiens
gagatatggtctctc

SEQ ID NO: 810052 - DNA, 15 bp, Homo sapiens
agatatggtctctct

SEQ ID NO: 810053 - DNA, 15 bp, Homo sapiens
gatatggtctctcta

SEQ ID NO: 810054 - DNA, 15 bp, Homo sapiens
atatggtctctctat

SEQ ID NO: 810055 - DNA, 15 bp, Homo sapiens
tatggtctctctatg

SEQ ID NO: 810056 - DNA, 15 bp, Homo sapiens
atggtctctctatgt

SEQ ID NO: 810057 - DNA, 15 bp, Homo sapiens
tggtctctctatgtt

SEQ ID NO: 810058 - DNA, 15 bp, Homo sapiens
tctctctatgttgcc

SEQ ID NO: 810059 - DNA, 15 bp, Homo sapiens
ctctctatgttgccc

SEQ ID NO: 810060 - DNA, 15 bp, Homo sapiens
tctctatgttgccca

SEQ ID NO: 810061 - DNA, 15 bp, Homo sapiens
ctctatgttgcccag

SEQ ID NO: 810062 - DNA, 15 bp, Homo sapiens
tctatgttgcccagg

SEQ ID NO: 810063 - DNA, 15 bp, Homo sapiens
cccaggctggtctcg

SEQ ID NO: 810064 - DNA, 15 bp, Homo sapiens
tctcgaactcctgag

SEQ ID NO: 810065 - DNA, 15 bp, Homo sapiens
ctcgaactcctgagc

SEQ ID NO: 810066 - DNA, 15 bp, Homo sapiens
tcgaactcctgagct

SEQ ID NO: 810067 - DNA, 15 bp, Homo sapiens
cgaactcctgagctc

SEQ ID NO: 810068 - DNA, 15 bp, Homo sapiens
cctgagctcaagcaa

SEQ ID NO: 810069 - DNA, 15 bp, Homo sapiens
ctgagctcaagcaat

SEQ ID NO: 810070 - DNA, 15 bp, Homo sapiens
tgagctcaagcaatc

SEQ ID NO: 810071 - DNA, 15 bp, Homo sapiens
gagctcaagcaatct

SEQ ID NO: 810072 - DNA, 15 bp, Homo sapiens
agctcaagcaatctt

SEQ ID NO: 810073 - DNA, 15 bp, Homo sapiens
gctcaagcaatcttc

SEQ ID NO: 810074 - DNA, 15 bp, Homo sapiens
ctcaagcaatcttcc

SEQ ID NO: 810075 - DNA, 15 bp, Homo sapiens
tcaagcaatcttcct

SEQ ID NO: 810076 - DNA, 15 bp, Homo sapiens
caagcaatcttcctg

SEQ ID NO: 810077 - DNA, 15 bp, Homo sapiens
aagcaatcttcctgc

SEQ ID NO: 810078 - DNA, 15 bp, Homo sapiens
agcaatcttcctgcc

SEQ ID NO: 810079 - DNA, 15 bp, Homo sapiens
gcaatcttcctgcct

SEQ ID NO: 810080 - DNA, 15 bp, Homo sapiens
caatcttcctgcctt

SEQ ID NO: 810081 - DNA, 15 bp, Homo sapiens
tcctgccttggcctc

SEQ ID NO: 810082 - DNA, 15 bp, Homo sapiens
gcctcccaaagtgta

SEQ ID NO: 810083 - DNA, 15 bp, Homo sapiens
cctcccaaagtgtat

SEQ ID NO: 810084 - DNA, 15 bp, Homo sapiens
ctcccaaagtgtatt

SEQ ID NO: 810085 - DNA, 15 bp, Homo sapiens
tcccaaagtgtattt

SEQ ID NO: 810086 - DNA, 15 bp, Homo sapiens
cccaaagtgtatttt

SEQ ID NO: 810087 - DNA, 15 bp, Homo sapiens
ccaaagtgtattttt

SEQ ID NO: 810088 - DNA, 15 bp, Homo sapiens
caaagtgtatttttt

SEQ ID NO: 810089 - DNA, 15 bp, Homo sapiens
aaagtgtatttttta

SEQ ID NO: 810090 - DNA, 15 bp, Homo sapiens
aagtgtattttttaa

SEQ ID NO: 810091 - DNA, 15 bp, Homo sapiens
agtgtattttttaat

SEQ ID NO: 810092 - DNA, 15 bp, Homo sapiens
gtgtattttttaata

SEQ ID NO: 810093 - DNA, 15 bp, Homo sapiens
tgtattttttaatat

SEQ ID NO: 810094 - DNA, 15 bp, Homo sapiens
gtattttttaatata

SEQ ID NO: 810095 - DNA, 15 bp, Homo sapiens
tattttttaatatag

SEQ ID NO: 810096 - DNA, 15 bp, Homo sapiens
attttttaatatagt

SEQ ID NO: 810097 - DNA, 15 bp, Homo sapiens
ttttttaatatagtg

SEQ ID NO: 810098 - DNA, 15 bp, Homo sapiens
tttttaatatagtgg

SEQ ID NO: 810099 - DNA, 15 bp, Homo sapiens
ttttaatatagtgga

SEQ ID NO: 810100 - DNA, 15 bp, Homo sapiens
tttaatatagtggat

SEQ ID NO: 810101 - DNA, 15 bp, Homo sapiens
ttaatatagtggatt

SEQ ID NO: 810102 - DNA, 15 bp, Homo sapiens
taatatagtggattt

SEQ ID NO: 810103 - DNA, 15 bp, Homo sapiens
aatatagtggatttt

SEQ ID NO: 810104 - DNA, 15 bp, Homo sapiens
atatagtggatttta

SEQ ID NO: 810105 - DNA, 15 bp, Homo sapiens
tatagtggattttat

SEQ ID NO: 810106 - DNA, 15 bp, Homo sapiens
atagtggattttatt

SEQ ID NO: 810107 - DNA, 15 bp, Homo sapiens
tagtggattttatta

SEQ ID NO: 810108 - DNA, 15 bp, Homo sapiens
agtggattttattat

SEQ ID NO: 810109 - DNA, 15 bp, Homo sapiens
gtggattttattata

SEQ ID NO: 810110 - DNA, 15 bp, Homo sapiens
tggattttattatat

SEQ ID NO: 810111 - DNA, 15 bp, Homo sapiens
ggattttattatatg

SEQ ID NO: 810112 - DNA, 15 bp, Homo sapiens
gattttattatatgt

SEQ ID NO: 810113 - DNA, 15 bp, Homo sapiens
attttattatatgta

SEQ ID NO: 810114 - DNA, 15 bp, Homo sapiens
ttttattatatgtaa

SEQ ID NO: 810115 - DNA, 15 bp, Homo sapiens
tttattatatgtaaa

SEQ ID NO: 810116 - DNA, 15 bp, Homo sapiens
ttattatatgtaaat

SEQ ID NO: 810117 - DNA, 15 bp, Homo sapiens
tattatatgtaaatt

SEQ ID NO: 810118 - DNA, 15 bp, Homo sapiens
attatatgtaaatta

SEQ ID NO: 810119 - DNA, 15 bp, Homo sapiens
ttatatgtaaattat

SEQ ID NO: 810120 - DNA, 15 bp, Homo sapiens
tatatgtaaattata

SEQ ID NO: 810121 - DNA, 15 bp, Homo sapiens
atatgtaaattatat

SEQ ID NO: 810122 - DNA, 15 bp, Homo sapiens
tatgtaaattatata

SEQ ID NO: 810123 - DNA, 15 bp, Homo sapiens
atgtaaattatatac

SEQ ID NO: 810124 - DNA, 15 bp, Homo sapiens
tgtaaattatatact

SEQ ID NO: 810125 - DNA, 15 bp, Homo sapiens
gtaaattatatactt

SEQ ID NO: 810126 - DNA, 15 bp, Homo sapiens
taaattatatacttc

SEQ ID NO: 810127 - DNA, 15 bp, Homo sapiens
aaattatatacttca

SEQ ID NO: 810128 - DNA, 15 bp, Homo sapiens
aattatatacttcaa

SEQ ID NO: 810129 - DNA, 15 bp, Homo sapiens
attatatacttcaat

SEQ ID NO: 810130 - DNA, 15 bp, Homo sapiens
ttatatacttcaatt

SEQ ID NO: 810131 - DNA, 15 bp, Homo sapiens
tatatacttcaattt

SEQ ID NO: 810132 - DNA, 15 bp, Homo sapiens
atatacttcaattta

SEQ ID NO: 810133 - DNA, 15 bp, Homo sapiens
tatacttcaatttaa

SEQ ID NO: 810134 - DNA, 15 bp, Homo sapiens
atacttcaatttaaa

SEQ ID NO: 810135 - DNA, 15 bp, Homo sapiens
tacttcaatttaaaa

SEQ ID NO: 810136 - DNA, 15 bp, Homo sapiens
acttcaatttaaaaa

SEQ ID NO: 810137 - DNA, 15 bp, Homo sapiens
cttcaatttaaaaag

SEQ ID NO: 810138 - DNA, 15 bp, Homo sapiens
ttcaatttaaaaagt

SEQ ID NO: 810139 - DNA, 15 bp, Homo sapiens
tcaatttaaaaagtc

SEQ ID NO: 810140 - DNA, 15 bp, Homo sapiens
caatttaaaaagtcc

SEQ ID NO: 810141 - DNA, 15 bp, Homo sapiens
aatttaaaaagtcct

SEQ ID NO: 810142 - DNA, 15 bp, Homo sapiens
atttaaaaagtccta

SEQ ID NO: 810143 - DNA, 15 bp, Homo sapiens
tttaaaaagtcctat

SEQ ID NO: 810144 - DNA, 15 bp, Homo sapiens
ttaaaaagtcctatg

SEQ ID NO: 810145 - DNA, 15 bp, Homo sapiens
taaaaagtcctatgc

SEQ ID NO: 810146 - DNA, 15 bp, Homo sapiens
aaaaagtcctatgcc

SEQ ID NO: 810147 - DNA, 15 bp, Homo sapiens
aaaagtcctatgcct

SEQ ID NO: 810148 - DNA, 15 bp, Homo sapiens
aaagtcctatgcctt

SEQ ID NO: 810149 - DNA, 15 bp, Homo sapiens
aagtcctatgccttt

SEQ ID NO: 810150 - DNA, 15 bp, Homo sapiens
agtcctatgcctttg

SEQ ID NO: 810151 - DNA, 15 bp, Homo sapiens
gtcctatgcctttgg

SEQ ID NO: 810152 - DNA, 15 bp, Homo sapiens
tcctatgcctttggg

SEQ ID NO: 810153 - DNA, 15 bp, Homo sapiens
cctatgcctttggga

SEQ ID NO: 810154 - DNA, 15 bp, Homo sapiens
ctatgcctttgggat

SEQ ID NO: 810155 - DNA, 15 bp, Homo sapiens
tatgcctttgggatc

SEQ ID NO: 810156 - DNA, 15 bp, Homo sapiens
atgcctttgggatca

SEQ ID NO: 810157 - DNA, 15 bp, Homo sapiens
tgcctttgggatcat

SEQ ID NO: 810158 - DNA, 15 bp, Homo sapiens
gcctttgggatcata

SEQ ID NO: 810159 - DNA, 15 bp, Homo sapiens
cctttgggatcatat

SEQ ID NO: 810160 - DNA, 15 bp, Homo sapiens
ctttgggatcatata

SEQ ID NO: 810161 - DNA, 15 bp, Homo sapiens
tttgggatcatatat

SEQ ID NO: 810162 - DNA, 15 bp, Homo sapiens
ttgggatcatatata

SEQ ID NO: 810163 - DNA, 15 bp, Homo sapiens
tgggatcatatatag

SEQ ID NO: 810164 - DNA, 15 bp, Homo sapiens
gggatcatatataga

SEQ ID NO: 810165 - DNA, 15 bp, Homo sapiens
ggatcatatatagaa

SEQ ID NO: 810166 - DNA, 15 bp, Homo sapiens
gatcatatatagaaa

SEQ ID NO: 810167 - DNA, 15 bp, Homo sapiens
atcatatatagaaaa

SEQ ID NO: 810168 - DNA, 15 bp, Homo sapiens
tcatatatagaaaat

SEQ ID NO: 810169 - DNA, 15 bp, Homo sapiens
catatatagaaaatt

SEQ ID NO: 810170 - DNA, 15 bp, Homo sapiens
atatatagaaaattg

SEQ ID NO: 810171 - DNA, 15 bp, Homo sapiens
tatatagaaaattgt

SEQ ID NO: 810172 - DNA, 15 bp, Homo sapiens
atatagaaaattgtc

SEQ ID NO: 810173 - DNA, 15 bp, Homo sapiens
tatagaaaattgtcc

SEQ ID NO: 810174 - DNA, 15 bp, Homo sapiens
atagaaaattgtcca

SEQ ID NO: 810175 - DNA, 15 bp, Homo sapiens
tagaaaattgtccat

SEQ ID NO: 810176 - DNA, 15 bp, Homo sapiens
agaaaattgtccatt

SEQ ID NO: 810177 - DNA, 15 bp, Homo sapiens
gaaaattgtccattt

SEQ ID NO: 810178 - DNA, 15 bp, Homo sapiens
aaaattgtccatttt

SEQ ID NO: 810179 - DNA, 15 bp, Homo sapiens
aaattgtccattttc

SEQ ID NO: 810180 - DNA, 15 bp, Homo sapiens
aattgtccattttct

SEQ ID NO: 810181 - DNA, 15 bp, Homo sapiens
attgtccattttctg

SEQ ID NO: 810182 - DNA, 15 bp, Homo sapiens
ttgtccattttctga

SEQ ID NO: 810183 - DNA, 15 bp, Homo sapiens
tgtccattttctgag

SEQ ID NO: 810184 - DNA, 15 bp, Homo sapiens
gtccattttctgaga

SEQ ID NO: 810185 - DNA, 15 bp, Homo sapiens
tccattttctgagaa

SEQ ID NO: 810186 - DNA, 15 bp, Homo sapiens
ccattttctgagaag

SEQ ID NO: 810187 - DNA, 15 bp, Homo sapiens
cattttctgagaagg

SEQ ID NO: 810188 - DNA, 15 bp, Homo sapiens
attttctgagaaggg

SEQ ID NO: 810189 - DNA, 15 bp, Homo sapiens
ttttctgagaagggt

SEQ ID NO: 810190 - DNA, 15 bp, Homo sapiens
tttctgagaagggtc

SEQ ID NO: 810191 - DNA, 15 bp, Homo sapiens
ttctgagaagggtct

SEQ ID NO: 810192 - DNA, 15 bp, Homo sapiens
tctgagaagggtctc

SEQ ID NO: 810193 - DNA, 15 bp, Homo sapiens
ctgagaagggtctct

SEQ ID NO: 810194 - DNA, 15 bp, Homo sapiens
tgagaagggtctctg

SEQ ID NO: 810195 - DNA, 15 bp, Homo sapiens
gagaagggtctctgc

SEQ ID NO: 810196 - DNA, 15 bp, Homo sapiens
agaagggtctctgcc

SEQ ID NO: 810197 - DNA, 15 bp, Homo sapiens
gaagggtctctgcct

SEQ ID NO: 810198 - DNA, 15 bp, Homo sapiens
aagggtctctgcctt

SEQ ID NO: 810199 - DNA, 15 bp, Homo sapiens
agggtctctgccttc

SEQ ID NO: 810200 - DNA, 15 bp, Homo sapiens
gggtctctgccttca

SEQ ID NO: 810201 - DNA, 15 bp, Homo sapiens
ggtctctgccttcag

SEQ ID NO: 810202 - DNA, 15 bp, Homo sapiens
gtctctgccttcagt

SEQ ID NO: 810203 - DNA, 15 bp, Homo sapiens
tctctgccttcagta

SEQ ID NO: 810204 - DNA, 15 bp, Homo sapiens
ctctgccttcagtag

SEQ ID NO: 810205 - DNA, 15 bp, Homo sapiens
tctgccttcagtagg

SEQ ID NO: 810206 - DNA, 15 bp, Homo sapiens
ctgccttcagtaggc

SEQ ID NO: 810207 - DNA, 15 bp, Homo sapiens
tgccttcagtaggca

SEQ ID NO: 810208 - DNA, 15 bp, Homo sapiens
gccttcagtaggcag

SEQ ID NO: 810209 - DNA, 15 bp, Homo sapiens
ccttcagtaggcaga

SEQ ID NO: 810210 - DNA, 15 bp, Homo sapiens
cttcagtaggcagat

SEQ ID NO: 810211 - DNA, 15 bp, Homo sapiens
ttcagtaggcagata

SEQ ID NO: 810212 - DNA, 15 bp, Homo sapiens
tcagtaggcagataa

SEQ ID NO: 810213 - DNA, 15 bp, Homo sapiens
cagtaggcagataaa

SEQ ID NO: 810214 - DNA, 15 bp, Homo sapiens
agtaggcagataaac

SEQ ID NO: 810215 - DNA, 15 bp, Homo sapiens
gtaggcagataaacc

SEQ ID NO: 810216 - DNA, 15 bp, Homo sapiens
taggcagataaaccc

SEQ ID NO: 810217 - DNA, 15 bp, Homo sapiens
aggcagataaaccct

SEQ ID NO: 810218 - DNA, 15 bp, Homo sapiens
ggcagataaaccctg

SEQ ID NO: 810219 - DNA, 15 bp, Homo sapiens
gcagataaaccctga

SEQ ID NO: 810220 - DNA, 15 bp, Homo sapiens
cagataaaccctgat

SEQ ID NO: 810221 - DNA, 15 bp, Homo sapiens
agataaaccctgatc

SEQ ID NO: 810222 - DNA, 15 bp, Homo sapiens
gataaaccctgatca

SEQ ID NO: 810223 - DNA, 15 bp, Homo sapiens
ataaaccctgatcaa

SEQ ID NO: 810224 - DNA, 15 bp, Homo sapiens
taaaccctgatcaaa

SEQ ID NO: 810225 - DNA, 15 bp, Homo sapiens
aaaccctgatcaaac

SEQ ID NO: 810226 - DNA, 15 bp, Homo sapiens
aaccctgatcaaaca

SEQ ID NO: 810227 - DNA, 15 bp, Homo sapiens
accctgatcaaacat

SEQ ID NO: 810228 - DNA, 15 bp, Homo sapiens
ccctgatcaaacatg

SEQ ID NO: 810229 - DNA, 15 bp, Homo sapiens
cctgatcaaacatgc

SEQ ID NO: 810230 - DNA, 15 bp, Homo sapiens
ctgatcaaacatgca

SEQ ID NO: 810231 - DNA, 15 bp, Homo sapiens
tgatcaaacatgcag

SEQ ID NO: 810232 - DNA, 15 bp, Homo sapiens
gatcaaacatgcaga

SEQ ID NO: 810233 - DNA, 15 bp, Homo sapiens
atcaaacatgcagaa

SEQ ID NO: 810234 - DNA, 15 bp, Homo sapiens
tcaaacatgcagaat

SEQ ID NO: 810235 - DNA, 15 bp, Homo sapiens
caaacatgcagaatc

SEQ ID NO: 810236 - DNA, 15 bp, Homo sapiens
aaacatgcagaatca

SEQ ID NO: 810237 - DNA, 15 bp, Homo sapiens
aacatgcagaatcat

SEQ ID NO: 810238 - DNA, 15 bp, Homo sapiens
acatgcagaatcatt

SEQ ID NO: 810239 - DNA, 15 bp, Homo sapiens
catgcagaatcatta

SEQ ID NO: 810240 - DNA, 15 bp, Homo sapiens
atgcagaatcattaa

SEQ ID NO: 810241 - DNA, 15 bp, Homo sapiens
tgcagaatcattaat

SEQ ID NO: 810242 - DNA, 15 bp, Homo sapiens
gcagaatcattaatt

SEQ ID NO: 810243 - DNA, 15 bp, Homo sapiens
cagaatcattaatta

SEQ ID NO: 810244 - DNA, 15 bp, Homo sapiens
agaatcattaattag

SEQ ID NO: 810245 - DNA, 15 bp, Homo sapiens
gaatcattaattagg

SEQ ID NO: 810246 - DNA, 15 bp, Homo sapiens
aatcattaattaggg

SEQ ID NO: 810247 - DNA, 15 bp, Homo sapiens
atcattaattagggt

SEQ ID NO: 810248 - DNA, 15 bp, Homo sapiens
tcattaattagggtc

SEQ ID NO: 810249 - DNA, 15 bp, Homo sapiens
cattaattagggtca

SEQ ID NO: 810250 - DNA, 15 bp, Homo sapiens
attaattagggtcat

SEQ ID NO: 810251 - DNA, 15 bp, Homo sapiens
ttaattagggtcatt

SEQ ID NO: 810252 - DNA, 15 bp, Homo sapiens
taattagggtcattt

SEQ ID NO: 810253 - DNA, 15 bp, Homo sapiens
aattagggtcatttg

SEQ ID NO: 810254 - DNA, 15 bp, Homo sapiens
attagggtcatttgt

SEQ ID NO: 810255 - DNA, 15 bp, Homo sapiens
ttagggtcatttgtt

SEQ ID NO: 810256 - DNA, 15 bp, Homo sapiens
tagggtcatttgttc

SEQ ID NO: 810257 - DNA, 15 bp, Homo sapiens
agggtcatttgttct

SEQ ID NO: 810258 - DNA, 15 bp, Homo sapiens
gggtcatttgttctg

SEQ ID NO: 810259 - DNA, 15 bp, Homo sapiens
ggtcatttgttctgc

SEQ ID NO: 810260 - DNA, 15 bp, Homo sapiens
gtcatttgttctgct

SEQ ID NO: 810261 - DNA, 15 bp, Homo sapiens
tcatttgttctgctg

SEQ ID NO: 810262 - DNA, 15 bp, Homo sapiens
catttgttctgctgt

SEQ ID NO: 810263 - DNA, 15 bp, Homo sapiens
atttgttctgctgtg

SEQ ID NO: 810264 - DNA, 15 bp, Homo sapiens
tttgttctgctgtga

SEQ ID NO: 810265 - DNA, 15 bp, Homo sapiens
ttgttctgctgtgag

SEQ ID NO: 810266 - DNA, 15 bp, Homo sapiens
tgttctgctgtgagc

SEQ ID NO: 810267 - DNA, 15 bp, Homo sapiens
gttctgctgtgagct

SEQ ID NO: 810268 - DNA, 15 bp, Homo sapiens
ttctgctgtgagctg

SEQ ID NO: 810269 - DNA, 15 bp, Homo sapiens
tctgctgtgagctga

SEQ ID NO: 810270 - DNA, 15 bp, Homo sapiens
ctgctgtgagctgag

SEQ ID NO: 810271 - DNA, 15 bp, Homo sapiens
tgctgtgagctgaga

SEQ ID NO: 810272 - DNA, 15 bp, Homo sapiens
gctgtgagctgagaa

SEQ ID NO: 810273 - DNA, 15 bp, Homo sapiens
ctgtgagctgagaag

SEQ ID NO: 810274 - DNA, 15 bp, Homo sapiens
tgtgagctgagaaga

SEQ ID NO: 810275 - DNA, 15 bp, Homo sapiens
gtgagctgagaagaa

SEQ ID NO: 810276 - DNA, 15 bp, Homo sapiens
tgagctgagaagaat

SEQ ID NO: 810277 - DNA, 15 bp, Homo sapiens
gagctgagaagaatg

SEQ ID NO: 810278 - DNA, 15 bp, Homo sapiens
agctgagaagaatgt

SEQ ID NO: 810279 - DNA, 15 bp, Homo sapiens
gctgagaagaatgtg

SEQ ID NO: 810280 - DNA, 15 bp, Homo sapiens
ctgagaagaatgtgt

SEQ ID NO: 810281 - DNA, 15 bp, Homo sapiens
tgagaagaatgtgta

SEQ ID NO: 810282 - DNA, 15 bp, Homo sapiens
gagaagaatgtgtaa

SEQ ID NO: 810283 - DNA, 15 bp, Homo sapiens
agaagaatgtgtaaa

SEQ ID NO: 810284 - DNA, 15 bp, Homo sapiens
gaagaatgtgtaaaa

SEQ ID NO: 810285 - DNA, 15 bp, Homo sapiens
aagaatgtgtaaaac

SEQ ID NO: 810286 - DNA, 15 bp, Homo sapiens
agaatgtgtaaaacc

SEQ ID NO: 810287 - DNA, 15 bp, Homo sapiens
gaatgtgtaaaacct

SEQ ID NO: 810288 - DNA, 15 bp, Homo sapiens
aatgtgtaaaacctg

SEQ ID NO: 810289 - DNA, 15 bp, Homo sapiens
atgtgtaaaacctgc

SEQ ID NO: 810290 - DNA, 15 bp, Homo sapiens
tgtgtaaaacctgct

SEQ ID NO: 810291 - DNA, 15 bp, Homo sapiens
gtgtaaaacctgctc

SEQ ID NO: 810292 - DNA, 15 bp, Homo sapiens
tgtaaaacctgctca

SEQ ID NO: 810293 - DNA, 15 bp, Homo sapiens
gtaaaacctgctcag

SEQ ID NO: 810294 - DNA, 15 bp, Homo sapiens
taaaacctgctcagg

SEQ ID NO: 810295 - DNA, 15 bp, Homo sapiens
aaaacctgctcagga

SEQ ID NO: 810296 - DNA, 15 bp, Homo sapiens
aaacctgctcaggag

SEQ ID NO: 810297 - DNA, 15 bp, Homo sapiens
aacctgctcaggaga

SEQ ID NO: 810298 - DNA, 15 bp, Homo sapiens
acctgctcaggagag

SEQ ID NO: 810299 - DNA, 15 bp, Homo sapiens
cctgctcaggagaga

SEQ ID NO: 810300 - DNA, 15 bp, Homo sapiens
ctgctcaggagagaa

SEQ ID NO: 810301 - DNA, 15 bp, Homo sapiens
tgctcaggagagaat

SEQ ID NO: 810302 - DNA, 15 bp, Homo sapiens
gctcaggagagaatt

SEQ ID NO: 810303 - DNA, 15 bp, Homo sapiens
ctcaggagagaatta

SEQ ID NO: 810304 - DNA, 15 bp, Homo sapiens
tcaggagagaattaa

SEQ ID NO: 810305 - DNA, 15 bp, Homo sapiens
caggagagaattaat

SEQ ID NO: 810306 - DNA, 15 bp, Homo sapiens
aggagagaattaatt

SEQ ID NO: 810307 - DNA, 15 bp, Homo sapiens
ggagagaattaattc

SEQ ID NO: 810308 - DNA, 15 bp, Homo sapiens
gagagaattaattca

SEQ ID NO: 810309 - DNA, 15 bp, Homo sapiens
agagaattaattcat

SEQ ID NO: 810310 - DNA, 15 bp, Homo sapiens
gagaattaattcatc

SEQ ID NO: 810311 - DNA, 15 bp, Homo sapiens
agaattaattcatcc

SEQ ID NO: 810312 - DNA, 15 bp, Homo sapiens
gaattaattcatcct

SEQ ID NO: 810313 - DNA, 15 bp, Homo sapiens
aattaattcatcctc

SEQ ID NO: 810314 - DNA, 15 bp, Homo sapiens
attaattcatcctcc

SEQ ID NO: 810315 - DNA, 15 bp, Homo sapiens
ttaattcatcctcct

SEQ ID NO: 810316 - DNA, 15 bp, Homo sapiens
taattcatcctcctc

SEQ ID NO: 810317 - DNA, 15 bp, Homo sapiens
aattcatcctcctct

SEQ ID NO: 810318 - DNA, 15 bp, Homo sapiens
attcatcctcctctc

SEQ ID NO: 810319 - DNA, 15 bp, Homo sapiens
ttcatcctcctctct

SEQ ID NO: 810320 - DNA, 15 bp, Homo sapiens
tcatcctcctctctg

SEQ ID NO: 810321 - DNA, 15 bp, Homo sapiens
catcctcctctctgt

SEQ ID NO: 810322 - DNA, 15 bp, Homo sapiens
atcctcctctctgta

SEQ ID NO: 810323 - DNA, 15 bp, Homo sapiens
tcctcctctctgtac

SEQ ID NO: 810324 - DNA, 15 bp, Homo sapiens
cctcctctctgtact

SEQ ID NO: 810325 - DNA, 15 bp, Homo sapiens
ctcctctctgtactt

SEQ ID NO: 810326 - DNA, 15 bp, Homo sapiens
tcctctctgtacttt

SEQ ID NO: 810327 - DNA, 15 bp, Homo sapiens
cctctctgtactttt

SEQ ID NO: 810328 - DNA, 15 bp, Homo sapiens
ctctctgtacttttt

SEQ ID NO: 810329 - DNA, 15 bp, Homo sapiens
tctctgtactttttc

SEQ ID NO: 810330 - DNA, 15 bp, Homo sapiens
ctctgtactttttct

SEQ ID NO: 810331 - DNA, 15 bp, Homo sapiens
tctgtactttttcta

SEQ ID NO: 810332 - DNA, 15 bp, Homo sapiens
ctgtactttttctag

SEQ ID NO: 810333 - DNA, 15 bp, Homo sapiens
tgtactttttctagt

SEQ ID NO: 810334 - DNA, 15 bp, Homo sapiens
gtactttttctagta

SEQ ID NO: 810335 - DNA, 15 bp, Homo sapiens
tactttttctagtac

SEQ ID NO: 810336 - DNA, 15 bp, Homo sapiens
actttttctagtact

SEQ ID NO: 810337 - DNA, 15 bp, Homo sapiens
ctttttctagtactc

SEQ ID NO: 810338 - DNA, 15 bp, Homo sapiens
tttttctagtactcc

SEQ ID NO: 810339 - DNA, 15 bp, Homo sapiens
ttttctagtactcct

SEQ ID NO: 810340 - DNA, 15 bp, Homo sapiens
tttctagtactccta

SEQ ID NO: 810341 - DNA, 15 bp, Homo sapiens
ttctagtactcctag

SEQ ID NO: 810342 - DNA, 15 bp, Homo sapiens
tctagtactcctagc

SEQ ID NO: 810343 - DNA, 15 bp, Homo sapiens
ctagtactcctagca

SEQ ID NO: 810344 - DNA, 15 bp, Homo sapiens
tagtactcctagcac

SEQ ID NO: 810345 - DNA, 15 bp, Homo sapiens
agtactcctagcacg

SEQ ID NO: 810346 - DNA, 15 bp, Homo sapiens
gtactcctagcacga

SEQ ID NO: 810347 - DNA, 15 bp, Homo sapiens
tactcctagcacgat

SEQ ID NO: 810348 - DNA, 15 bp, Homo sapiens
actcctagcacgatt

SEQ ID NO: 810349 - DNA, 15 bp, Homo sapiens
ctcctagcacgattc

SEQ ID NO: 810350 - DNA, 15 bp, Homo sapiens
tcctagcacgattct

SEQ ID NO: 810351 - DNA, 15 bp, Homo sapiens
cctagcacgattctc

SEQ ID NO: 810352 - DNA, 15 bp, Homo sapiens
ctagcacgattctct

SEQ ID NO: 810353 - DNA, 15 bp, Homo sapiens
tagcacgattctcta

SEQ ID NO: 810354 - DNA, 15 bp, Homo sapiens
agcacgattctctaa

SEQ ID NO: 810355 - DNA, 15 bp, Homo sapiens
gcacgattctctaag

SEQ ID NO: 810356 - DNA, 15 bp, Homo sapiens
cacgattctctaagc

SEQ ID NO: 810357 - DNA, 15 bp, Homo sapiens
acgattctctaagcc

SEQ ID NO: 810358 - DNA, 15 bp, Homo sapiens
cgattctctaagcct

SEQ ID NO: 810359 - DNA, 15 bp, Homo sapiens
gattctctaagcctg

SEQ ID NO: 810360 - DNA, 15 bp, Homo sapiens
attctctaagcctgc

SEQ ID NO: 810361 - DNA, 15 bp, Homo sapiens
ttctctaagcctgca

SEQ ID NO: 810362 - DNA, 15 bp, Homo sapiens
tctctaagcctgcag

SEQ ID NO: 810363 - DNA, 15 bp, Homo sapiens
ctctaagcctgcagg

SEQ ID NO: 810364 - DNA, 15 bp, Homo sapiens
tctaagcctgcaggc

SEQ ID NO: 810365 - DNA, 15 bp, Homo sapiens
ctaagcctgcaggcc

SEQ ID NO: 810366 - DNA, 15 bp, Homo sapiens
taagcctgcaggcct

SEQ ID NO: 810367 - DNA, 15 bp, Homo sapiens
aagcctgcaggcctc

SEQ ID NO: 810368 - DNA, 15 bp, Homo sapiens
agcctgcaggcctca

SEQ ID NO: 810369 - DNA, 15 bp, Homo sapiens
gcctgcaggcctcat

SEQ ID NO: 810370 - DNA, 15 bp, Homo sapiens
cctgcaggcctcata

SEQ ID NO: 810371 - DNA, 15 bp, Homo sapiens
ctgcaggcctcatac

SEQ ID NO: 810372 - DNA, 15 bp, Homo sapiens
tgcaggcctcataca

SEQ ID NO: 810373 - DNA, 15 bp, Homo sapiens
gcaggcctcatacat

SEQ ID NO: 810374 - DNA, 15 bp, Homo sapiens
caggcctcatacata

SEQ ID NO: 810375 - DNA, 15 bp, Homo sapiens
aggcctcatacatat

SEQ ID NO: 810376 - DNA, 15 bp, Homo sapiens
ggcctcatacatatg

SEQ ID NO: 810377 - DNA, 15 bp, Homo sapiens
gcctcatacatatgt

SEQ ID NO: 810378 - DNA, 15 bp, Homo sapiens
cctcatacatatgtt

SEQ ID NO: 810379 - DNA, 15 bp, Homo sapiens
ctcatacatatgttc

SEQ ID NO: 810380 - DNA, 15 bp, Homo sapiens
tcatacatatgttct

SEQ ID NO: 810381 - DNA, 15 bp, Homo sapiens
catacatatgttcta

SEQ ID NO: 810382 - DNA, 15 bp, Homo sapiens
atacatatgttctaa

SEQ ID NO: 810383 - DNA, 15 bp, Homo sapiens
tacatatgttctaat

SEQ ID NO: 810384 - DNA, 15 bp, Homo sapiens
acatatgttctaatg

SEQ ID NO: 810385 - DNA, 15 bp, Homo sapiens
catatgttctaatgg

SEQ ID NO: 810386 - DNA, 15 bp, Homo sapiens
atatgttctaatggg

SEQ ID NO: 810387 - DNA, 15 bp, Homo sapiens
tatgttctaatgggc

SEQ ID NO: 810388 - DNA, 15 bp, Homo sapiens
atgttctaatgggct

SEQ ID NO: 810389 - DNA, 15 bp, Homo sapiens
tgttctaatgggcta

SEQ ID NO: 810390 - DNA, 15 bp, Homo sapiens
gttctaatgggctaa

SEQ ID NO: 810391 - DNA, 15 bp, Homo sapiens
ttctaatgggctaat

SEQ ID NO: 810392 - DNA, 15 bp, Homo sapiens
tctaatgggctaatt

SEQ ID NO: 810393 - DNA, 15 bp, Homo sapiens
ctaatgggctaattg

SEQ ID NO: 810394 - DNA, 15 bp, Homo sapiens
taatgggctaattgt

SEQ ID NO: 810395 - DNA, 15 bp, Homo sapiens
aatgggctaattgtt

SEQ ID NO: 810396 - DNA, 15 bp, Homo sapiens
atgggctaattgtta

SEQ ID NO: 810397 - DNA, 15 bp, Homo sapiens
tgggctaattgttaa

SEQ ID NO: 810398 - DNA, 15 bp, Homo sapiens
gggctaattgttaag

SEQ ID NO: 810399 - DNA, 15 bp, Homo sapiens
ggctaattgttaagg

SEQ ID NO: 810400 - DNA, 15 bp, Homo sapiens
gctaattgttaaggc

SEQ ID NO: 810401 - DNA, 15 bp, Homo sapiens
ctaattgttaaggcg

SEQ ID NO: 810402 - DNA, 15 bp, Homo sapiens
taattgttaaggcga

SEQ ID NO: 810403 - DNA, 15 bp, Homo sapiens
aattgttaaggcgac

SEQ ID NO: 810404 - DNA, 15 bp, Homo sapiens
attgttaaggcgaca

SEQ ID NO: 810405 - DNA, 15 bp, Homo sapiens
ttgttaaggcgacat

SEQ ID NO: 810406 - DNA, 15 bp, Homo sapiens
tgttaaggcgacatt

SEQ ID NO: 810407 - DNA, 15 bp, Homo sapiens
gttaaggcgacattt

SEQ ID NO: 810408 - DNA, 15 bp, Homo sapiens
ttaaggcgacatttg

SEQ ID NO: 810409 - DNA, 15 bp, Homo sapiens
taaggcgacatttgt

SEQ ID NO: 810410 - DNA, 15 bp, Homo sapiens
aaggcgacatttgta

SEQ ID NO: 810411 - DNA, 15 bp, Homo sapiens
aggcgacatttgtag

SEQ ID NO: 810412 - DNA, 15 bp, Homo sapiens
ggcgacatttgtaga

SEQ ID NO: 810413 - DNA, 15 bp, Homo sapiens
gcgacatttgtagat

SEQ ID NO: 810414 - DNA, 15 bp, Homo sapiens
cgacatttgtagatt

SEQ ID NO: 810415 - DNA, 15 bp, Homo sapiens
gacatttgtagatta

SEQ ID NO: 810416 - DNA, 15 bp, Homo sapiens
acatttgtagattaa

SEQ ID NO: 810417 - DNA, 15 bp, Homo sapiens
catttgtagattaat

SEQ ID NO: 810418 - DNA, 15 bp, Homo sapiens
atttgtagattaatc

SEQ ID NO: 810419 - DNA, 15 bp, Homo sapiens
tttgtagattaatct

SEQ ID NO: 810420 - DNA, 15 bp, Homo sapiens
ttgtagattaatctc

SEQ ID NO: 810421 - DNA, 15 bp, Homo sapiens
tgtagattaatctct

SEQ ID NO: 810422 - DNA, 15 bp, Homo sapiens
gtagattaatctctg

SEQ ID NO: 810423 - DNA, 15 bp, Homo sapiens
tagattaatctctga

SEQ ID NO: 810424 - DNA, 15 bp, Homo sapiens
agattaatctctgac

SEQ ID NO: 810425 - DNA, 15 bp, Homo sapiens
gattaatctctgact

SEQ ID NO: 810426 - DNA, 15 bp, Homo sapiens
attaatctctgactt

SEQ ID NO: 810427 - DNA, 15 bp, Homo sapiens
ttaatctctgacttg

SEQ ID NO: 810428 - DNA, 15 bp, Homo sapiens
taatctctgacttga

SEQ ID NO: 810429 - DNA, 15 bp, Homo sapiens
aatctctgacttgag

SEQ ID NO: 810430 - DNA, 15 bp, Homo sapiens
atctctgacttgagc

SEQ ID NO: 810431 - DNA, 15 bp, Homo sapiens
tctctgacttgagct

SEQ ID NO: 810432 - DNA, 15 bp, Homo sapiens
ctctgacttgagcta

SEQ ID NO: 810433 - DNA, 15 bp, Homo sapiens
tctgacttgagctaa

SEQ ID NO: 810434 - DNA, 15 bp, Homo sapiens
ctgacttgagctaag

SEQ ID NO: 810435 - DNA, 15 bp, Homo sapiens
tgacttgagctaagt

SEQ ID NO: 810436 - DNA, 15 bp, Homo sapiens
gacttgagctaagtg

SEQ ID NO: 810437 - DNA, 15 bp, Homo sapiens
acttgagctaagtgg

SEQ ID NO: 810438 - DNA, 15 bp, Homo sapiens
cttgagctaagtggt

SEQ ID NO: 810439 - DNA, 15 bp, Homo sapiens
ttgagctaagtggtt

SEQ ID NO: 810440 - DNA, 15 bp, Homo sapiens
tgagctaagtggttt

SEQ ID NO: 810441 - DNA, 15 bp, Homo sapiens
gagctaagtggtttc

SEQ ID NO: 810442 - DNA, 15 bp, Homo sapiens
agctaagtggtttct

SEQ ID NO: 810443 - DNA, 15 bp, Homo sapiens
gctaagtggtttctc

SEQ ID NO: 810444 - DNA, 15 bp, Homo sapiens
ctaagtggtttctcc

SEQ ID NO: 810445 - DNA, 15 bp, Homo sapiens
taagtggtttctcct

SEQ ID NO: 810446 - DNA, 15 bp, Homo sapiens
aagtggtttctccta

SEQ ID NO: 810447 - DNA, 15 bp, Homo sapiens
agtggtttctcctaa

SEQ ID NO: 810448 - DNA, 15 bp, Homo sapiens
gtggtttctcctaat

SEQ ID NO: 810449 - DNA, 15 bp, Homo sapiens
tggtttctcctaatg

SEQ ID NO: 810450 - DNA, 15 bp, Homo sapiens
ggtttctcctaatgg

SEQ ID NO: 810451 - DNA, 15 bp, Homo sapiens
gtttctcctaatggc

SEQ ID NO: 810452 - DNA, 15 bp, Homo sapiens
tttctcctaatggct

SEQ ID NO: 810453 - DNA, 15 bp, Homo sapiens
ttctcctaatggctt

SEQ ID NO: 810454 - DNA, 15 bp, Homo sapiens
tctcctaatggcttt

SEQ ID NO: 810455 - DNA, 15 bp, Homo sapiens
ctcctaatggcttta

SEQ ID NO: 810456 - DNA, 15 bp, Homo sapiens
tcctaatggctttaa

SEQ ID NO: 810457 - DNA, 15 bp, Homo sapiens
cctaatggctttaat

SEQ ID NO: 810458 - DNA, 15 bp, Homo sapiens
ctaatggctttaatt

SEQ ID NO: 810459 - DNA, 15 bp, Homo sapiens
taatggctttaattc

SEQ ID NO: 810460 - DNA, 15 bp, Homo sapiens
aatggctttaattca

SEQ ID NO: 810461 - DNA, 15 bp, Homo sapiens
atggctttaattcag

SEQ ID NO: 810462 - DNA, 15 bp, Homo sapiens
tggctttaattcagt

SEQ ID NO: 810463 - DNA, 15 bp, Homo sapiens
ggctttaattcagtg

SEQ ID NO: 810464 - DNA, 15 bp, Homo sapiens
gctttaattcagtga

SEQ ID NO: 810465 - DNA, 15 bp, Homo sapiens
ctttaattcagtgac

SEQ ID NO: 810466 - DNA, 15 bp, Homo sapiens
tttaattcagtgact

SEQ ID NO: 810467 - DNA, 15 bp, Homo sapiens
ttaattcagtgactc

SEQ ID NO: 810468 - DNA, 15 bp, Homo sapiens
taattcagtgactcc

SEQ ID NO: 810469 - DNA, 15 bp, Homo sapiens
aattcagtgactccc

SEQ ID NO: 810470 - DNA, 15 bp, Homo sapiens
attcagtgactccca

SEQ ID NO: 810471 - DNA, 15 bp, Homo sapiens
ttcagtgactcccat

SEQ ID NO: 810472 - DNA, 15 bp, Homo sapiens
tcagtgactcccatt

SEQ ID NO: 810473 - DNA, 15 bp, Homo sapiens
cagtgactcccattg

SEQ ID NO: 810474 - DNA, 15 bp, Homo sapiens
agtgactcccattgt

SEQ ID NO: 810475 - DNA, 15 bp, Homo sapiens
gtgactcccattgtc

SEQ ID NO: 810476 - DNA, 15 bp, Homo sapiens
tgactcccattgtca

SEQ ID NO: 810477 - DNA, 15 bp, Homo sapiens
gactcccattgtcag

SEQ ID NO: 810478 - DNA, 15 bp, Homo sapiens
actcccattgtcaga

SEQ ID NO: 810479 - DNA, 15 bp, Homo sapiens
ctcccattgtcagat

SEQ ID NO: 810480 - DNA, 15 bp, Homo sapiens
tcccattgtcagatt

SEQ ID NO: 810481 - DNA, 15 bp, Homo sapiens
cccattgtcagattc

SEQ ID NO: 810482 - DNA, 15 bp, Homo sapiens
ccattgtcagattca

SEQ ID NO: 810483 - DNA, 15 bp, Homo sapiens
cattgtcagattcac

SEQ ID NO: 810484 - DNA, 15 bp, Homo sapiens
attgtcagattcact

SEQ ID NO: 810485 - DNA, 15 bp, Homo sapiens
ttgtcagattcactg

SEQ ID NO: 810486 - DNA, 15 bp, Homo sapiens
tgtcagattcactgg

SEQ ID NO: 810487 - DNA, 15 bp, Homo sapiens
gtcagattcactgga

SEQ ID NO: 810488 - DNA, 15 bp, Homo sapiens
tcagattcactggag

SEQ ID NO: 810489 - DNA, 15 bp, Homo sapiens
cagattcactggagg

SEQ ID NO: 810490 - DNA, 15 bp, Homo sapiens
agattcactggagga

SEQ ID NO: 810491 - DNA, 15 bp, Homo sapiens
gattcactggaggag

SEQ ID NO: 810492 - DNA, 15 bp, Homo sapiens
attcactggaggagc

SEQ ID NO: 810493 - DNA, 15 bp, Homo sapiens
ttcactggaggagct

SEQ ID NO: 810494 - DNA, 15 bp, Homo sapiens
tcactggaggagctt

SEQ ID NO: 810495 - DNA, 15 bp, Homo sapiens
cactggaggagcttg

SEQ ID NO: 810496 - DNA, 15 bp, Homo sapiens
actggaggagcttgt

SEQ ID NO: 810497 - DNA, 15 bp, Homo sapiens
ctggaggagcttgtt

SEQ ID NO: 810498 - DNA, 15 bp, Homo sapiens
tggaggagcttgtta

SEQ ID NO: 810499 - DNA, 15 bp, Homo sapiens
ggaggagcttgttaa

SEQ ID NO: 810500 - DNA, 15 bp, Homo sapiens
gaggagcttgttaaa

SEQ ID NO: 810501 - DNA, 15 bp, Homo sapiens
aggagcttgttaaaa

SEQ ID NO: 810502 - DNA, 15 bp, Homo sapiens
ggagcttgttaaaaa

SEQ ID NO: 810503 - DNA, 15 bp, Homo sapiens
gagcttgttaaaaag

SEQ ID NO: 810504 - DNA, 15 bp, Homo sapiens
agcttgttaaaaaga

SEQ ID NO: 810505 - DNA, 15 bp, Homo sapiens
gcttgttaaaaagag

SEQ ID NO: 810506 - DNA, 15 bp, Homo sapiens
cttgttaaaaagagg

SEQ ID NO: 810507 - DNA, 15 bp, Homo sapiens
ttgttaaaaagaggt

SEQ ID NO: 810508 - DNA, 15 bp, Homo sapiens
tgttaaaaagaggtg

SEQ ID NO: 810509 - DNA, 15 bp, Homo sapiens
gttaaaaagaggtgc

SEQ ID NO: 810510 - DNA, 15 bp, Homo sapiens
ttaaaaagaggtgcc

SEQ ID NO: 810511 - DNA, 15 bp, Homo sapiens
taaaaagaggtgccc

SEQ ID NO: 810512 - DNA, 15 bp, Homo sapiens
aaaaagaggtgccca

SEQ ID NO: 810513 - DNA, 15 bp, Homo sapiens
aaaagaggtgcccag

SEQ ID NO: 810514 - DNA, 15 bp, Homo sapiens
aaagaggtgcccaga

SEQ ID NO: 810515 - DNA, 15 bp, Homo sapiens
aagaggtgcccagac

SEQ ID NO: 810516 - DNA, 15 bp, Homo sapiens
agaggtgcccagact

SEQ ID NO: 810517 - DNA, 15 bp, Homo sapiens
gaggtgcccagactt

SEQ ID NO: 810518 - DNA, 15 bp, Homo sapiens
aggtgcccagacttc

SEQ ID NO: 810519 - DNA, 15 bp, Homo sapiens
ggtgcccagacttcc

SEQ ID NO: 810520 - DNA, 15 bp, Homo sapiens
gtgcccagacttccc

SEQ ID NO: 810521 - DNA, 15 bp, Homo sapiens
tgcccagacttcccc

SEQ ID NO: 810522 - DNA, 15 bp, Homo sapiens
gcccagacttcccct

SEQ ID NO: 810523 - DNA, 15 bp, Homo sapiens
cccagacttcccctc

SEQ ID NO: 810524 - DNA, 15 bp, Homo sapiens
ccagacttcccctcc

SEQ ID NO: 810525 - DNA, 15 bp, Homo sapiens
cagacttcccctccc

SEQ ID NO: 810526 - DNA, 15 bp, Homo sapiens
agacttcccctcccc

SEQ ID NO: 810527 - DNA, 15 bp, Homo sapiens
gacttcccctccccc

SEQ ID NO: 810528 - DNA, 15 bp, Homo sapiens
acttcccctccccca

SEQ ID NO: 810529 - DNA, 15 bp, Homo sapiens
cttcccctcccccag

SEQ ID NO: 810530 - DNA, 15 bp, Homo sapiens
ttcccctcccccagc

SEQ ID NO: 810531 - DNA, 15 bp, Homo sapiens
tcccctcccccagct

SEQ ID NO: 810532 - DNA, 15 bp, Homo sapiens
cccctcccccagctc

SEQ ID NO: 810533 - DNA, 15 bp, Homo sapiens
ccctcccccagctca

SEQ ID NO: 810534 - DNA, 15 bp, Homo sapiens
cctcccccagctcat

SEQ ID NO: 810535 - DNA, 15 bp, Homo sapiens
ctcccccagctcatg

SEQ ID NO: 810536 - DNA, 15 bp, Homo sapiens
tcccccagctcatga

SEQ ID NO: 810537 - DNA, 15 bp, Homo sapiens
cccccagctcatgat

SEQ ID NO: 810538 - DNA, 15 bp, Homo sapiens
ccccagctcatgatt

SEQ ID NO: 810539 - DNA, 15 bp, Homo sapiens
cccagctcatgattt

SEQ ID NO: 810540 - DNA, 15 bp, Homo sapiens
ccagctcatgatttg

SEQ ID NO: 810541 - DNA, 15 bp, Homo sapiens
cagctcatgatttgc

SEQ ID NO: 810542 - DNA, 15 bp, Homo sapiens
agctcatgatttgct

SEQ ID NO: 810543 - DNA, 15 bp, Homo sapiens
gctcatgatttgctg

SEQ ID NO: 810544 - DNA, 15 bp, Homo sapiens
ctcatgatttgctgg

SEQ ID NO: 810545 - DNA, 15 bp, Homo sapiens
tcatgatttgctggc

SEQ ID NO: 810546 - DNA, 15 bp, Homo sapiens
catgatttgctggcc

SEQ ID NO: 810547 - DNA, 15 bp, Homo sapiens
atgatttgctggccc

SEQ ID NO: 810548 - DNA, 15 bp, Homo sapiens
tgatttgctggccct

SEQ ID NO: 810549 - DNA, 15 bp, Homo sapiens
gatttgctggcccta

SEQ ID NO: 810550 - DNA, 15 bp, Homo sapiens
atttgctggccctag

SEQ ID NO: 810551 - DNA, 15 bp, Homo sapiens
tttgctggccctagg

SEQ ID NO: 810552 - DNA, 15 bp, Homo sapiens
ttgctggccctaggg

SEQ ID NO: 810553 - DNA, 15 bp, Homo sapiens
tgctggccctagggt

SEQ ID NO: 810554 - DNA, 15 bp, Homo sapiens
gctggccctagggtg

SEQ ID NO: 810555 - DNA, 15 bp, Homo sapiens
ctggccctagggtgg

SEQ ID NO: 810556 - DNA, 15 bp, Homo sapiens
tggccctagggtggg

SEQ ID NO: 810557 - DNA, 15 bp, Homo sapiens
ggccctagggtggga

SEQ ID NO: 810558 - DNA, 15 bp, Homo sapiens
gccctagggtgggat

SEQ ID NO: 810559 - DNA, 15 bp, Homo sapiens
ccctagggtgggatg

SEQ ID NO: 810560 - DNA, 15 bp, Homo sapiens
cctagggtgggatga

SEQ ID NO: 810561 - DNA, 15 bp, Homo sapiens
ctagggtgggatgag

SEQ ID NO: 810562 - DNA, 15 bp, Homo sapiens
tagggtgggatgagg

SEQ ID NO: 810563 - DNA, 15 bp, Homo sapiens
agggtgggatgaggg

SEQ ID NO: 810564 - DNA, 15 bp, Homo sapiens
gggtgggatgagggc

SEQ ID NO: 810565 - DNA, 15 bp, Homo sapiens
ggtgggatgagggca

SEQ ID NO: 810566 - DNA, 15 bp, Homo sapiens
gtgggatgagggcat

SEQ ID NO: 810567 - DNA, 15 bp, Homo sapiens
tgggatgagggcatc

SEQ ID NO: 810568 - DNA, 15 bp, Homo sapiens
gggatgagggcatct

SEQ ID NO: 810569 - DNA, 15 bp, Homo sapiens
ggatgagggcatctc

SEQ ID NO: 810570 - DNA, 15 bp, Homo sapiens
gatgagggcatctct

SEQ ID NO: 810571 - DNA, 15 bp, Homo sapiens
atgagggcatctctg

SEQ ID NO: 810572 - DNA, 15 bp, Homo sapiens
tgagggcatctctgc

SEQ ID NO: 810573 - DNA, 15 bp, Homo sapiens
gagggcatctctgct

SEQ ID NO: 810574 - DNA, 15 bp, Homo sapiens
agggcatctctgctt

SEQ ID NO: 810575 - DNA, 15 bp, Homo sapiens
gggcatctctgcttt

SEQ ID NO: 810576 - DNA, 15 bp, Homo sapiens
ggcatctctgctttg

SEQ ID NO: 810577 - DNA, 15 bp, Homo sapiens
gcatctctgctttgg

SEQ ID NO: 810578 - DNA, 15 bp, Homo sapiens
catctctgctttgga

SEQ ID NO: 810579 - DNA, 15 bp, Homo sapiens
atctctgctttggaa

SEQ ID NO: 810580 - DNA, 15 bp, Homo sapiens
tctctgctttggaag

SEQ ID NO: 810581 - DNA, 15 bp, Homo sapiens
ctctgctttggaagg

SEQ ID NO: 810582 - DNA, 15 bp, Homo sapiens
tctgctttggaagga

SEQ ID NO: 810583 - DNA, 15 bp, Homo sapiens
ctgctttggaaggaa

SEQ ID NO: 810584 - DNA, 15 bp, Homo sapiens
tgctttggaaggaaa

SEQ ID NO: 810585 - DNA, 15 bp, Homo sapiens
gctttggaaggaaag

SEQ ID NO: 810586 - DNA, 15 bp, Homo sapiens
ctttggaaggaaagc

SEQ ID NO: 810587 - DNA, 15 bp, Homo sapiens
tttggaaggaaagct

SEQ ID NO: 810588 - DNA, 15 bp, Homo sapiens
ttggaaggaaagctc

SEQ ID NO: 810589 - DNA, 15 bp, Homo sapiens
tggaaggaaagctcc

SEQ ID NO: 810590 - DNA, 15 bp, Homo sapiens
ggaaggaaagctcct

SEQ ID NO: 810591 - DNA, 15 bp, Homo sapiens
gaaggaaagctcctc

SEQ ID NO: 810592 - DNA, 15 bp, Homo sapiens
aaggaaagctcctca

SEQ ID NO: 810593 - DNA, 15 bp, Homo sapiens
aggaaagctcctcag

SEQ ID NO: 810594 - DNA, 15 bp, Homo sapiens
ggaaagctcctcagg

SEQ ID NO: 810595 - DNA, 15 bp, Homo sapiens
gaaagctcctcaggt

SEQ ID NO: 810596 - DNA, 15 bp, Homo sapiens
aaagctcctcaggtg

SEQ ID NO: 810597 - DNA, 15 bp, Homo sapiens
aagctcctcaggtga

SEQ ID NO: 810598 - DNA, 15 bp, Homo sapiens
agctcctcaggtgac

SEQ ID NO: 810599 - DNA, 15 bp, Homo sapiens
gctcctcaggtgact

SEQ ID NO: 810600 - DNA, 15 bp, Homo sapiens
ctcctcaggtgactg

SEQ ID NO: 810601 - DNA, 15 bp, Homo sapiens
tcctcaggtgactgg

SEQ ID NO: 810602 - DNA, 15 bp, Homo sapiens
cctcaggtgactgga

SEQ ID NO: 810603 - DNA, 15 bp, Homo sapiens
ctcaggtgactggat

SEQ ID NO: 810604 - DNA, 15 bp, Homo sapiens
tcaggtgactggatt

SEQ ID NO: 810605 - DNA, 15 bp, Homo sapiens
caggtgactggattc

SEQ ID NO: 810606 - DNA, 15 bp, Homo sapiens
aggtgactggattct

SEQ ID NO: 810607 - DNA, 15 bp, Homo sapiens
ggtgactggattctg

SEQ ID NO: 810608 - DNA, 15 bp, Homo sapiens
gtgactggattctgg

SEQ ID NO: 810609 - DNA, 15 bp, Homo sapiens
tgactggattctggt

SEQ ID NO: 810610 - DNA, 15 bp, Homo sapiens
gactggattctggtg

SEQ ID NO: 810611 - DNA, 15 bp, Homo sapiens
actggattctggtgg

SEQ ID NO: 810612 - DNA, 15 bp, Homo sapiens
ctggattctggtggt

SEQ ID NO: 810613 - DNA, 15 bp, Homo sapiens
tggattctggtggta

SEQ ID NO: 810614 - DNA, 15 bp, Homo sapiens
ggattctggtggtag

SEQ ID NO: 810615 - DNA, 15 bp, Homo sapiens
gattctggtggtagc

SEQ ID NO: 810616 - DNA, 15 bp, Homo sapiens
attctggtggtagcc

SEQ ID NO: 810617 - DNA, 15 bp, Homo sapiens
ttctggtggtagcca

SEQ ID NO: 810618 - DNA, 15 bp, Homo sapiens
tctggtggtagccac

SEQ ID NO: 810619 - DNA, 15 bp, Homo sapiens
ctggtggtagccacc

SEQ ID NO: 810620 - DNA, 15 bp, Homo sapiens
tggtggtagccacct

SEQ ID NO: 810621 - DNA, 15 bp, Homo sapiens
ggtggtagccacctt

SEQ ID NO: 810622 - DNA, 15 bp, Homo sapiens
gtggtagccaccttt

SEQ ID NO: 810623 - DNA, 15 bp, Homo sapiens
tggtagccacctttg

SEQ ID NO: 810624 - DNA, 15 bp, Homo sapiens
ggtagccacctttgt

SEQ ID NO: 810625 - DNA, 15 bp, Homo sapiens
gtagccacctttgtg

SEQ ID NO: 810626 - DNA, 15 bp, Homo sapiens
tagccacctttgtga

SEQ ID NO: 810627 - DNA, 15 bp, Homo sapiens
agccacctttgtgag

SEQ ID NO: 810628 - DNA, 15 bp, Homo sapiens
gccacctttgtgagc

SEQ ID NO: 810629 - DNA, 15 bp, Homo sapiens
ccacctttgtgagcc

SEQ ID NO: 810630 - DNA, 15 bp, Homo sapiens
cacctttgtgagcct

SEQ ID NO: 810631 - DNA, 15 bp, Homo sapiens
acctttgtgagcctt

SEQ ID NO: 810632 - DNA, 15 bp, Homo sapiens
cctttgtgagccttg

SEQ ID NO: 810633 - DNA, 15 bp, Homo sapiens
ctttgtgagccttgg

SEQ ID NO: 810634 - DNA, 15 bp, Homo sapiens
tttgtgagccttggc

SEQ ID NO: 810635 - DNA, 15 bp, Homo sapiens
ttgtgagccttggct

SEQ ID NO: 810636 - DNA, 15 bp, Homo sapiens
tgtgagccttggctc

SEQ ID NO: 810637 - DNA, 15 bp, Homo sapiens
gtgagccttggctct

SEQ ID NO: 810638 - DNA, 15 bp, Homo sapiens
tgagccttggctctg

SEQ ID NO: 810639 - DNA, 15 bp, Homo sapiens
gagccttggctctga

SEQ ID NO: 810640 - DNA, 15 bp, Homo sapiens
agccttggctctgaa

SEQ ID NO: 810641 - DNA, 15 bp, Homo sapiens
gccttggctctgaat

SEQ ID NO: 810642 - DNA, 15 bp, Homo sapiens
ccttggctctgaatc

SEQ ID NO: 810643 - DNA, 15 bp, Homo sapiens
cttggctctgaatct

SEQ ID NO: 810644 - DNA, 15 bp, Homo sapiens
ttggctctgaatctg

SEQ ID NO: 810645 - DNA, 15 bp, Homo sapiens
tggctctgaatctgc

SEQ ID NO: 810646 - DNA, 15 bp, Homo sapiens
ggctctgaatctgcc

SEQ ID NO: 810647 - DNA, 15 bp, Homo sapiens
gctctgaatctgcct

SEQ ID NO: 810648 - DNA, 15 bp, Homo sapiens
ctctgaatctgcctc

SEQ ID NO: 810649 - DNA, 15 bp, Homo sapiens
tctgaatctgcctcc

SEQ ID NO: 810650 - DNA, 15 bp, Homo sapiens
ctgaatctgcctccc

SEQ ID NO: 810651 - DNA, 15 bp, Homo sapiens
tgaatctgcctccca

SEQ ID NO: 810652 - DNA, 15 bp, Homo sapiens
gaatctgcctcccaa

SEQ ID NO: 810653 - DNA, 15 bp, Homo sapiens
aatctgcctcccaag

SEQ ID NO: 810654 - DNA, 15 bp, Homo sapiens
atctgcctcccaagg

SEQ ID NO: 810655 - DNA, 15 bp, Homo sapiens
tctgcctcccaaggc

SEQ ID NO: 810656 - DNA, 15 bp, Homo sapiens
ctgcctcccaaggcc

SEQ ID NO: 810657 - DNA, 15 bp, Homo sapiens
tgcctcccaaggccg

SEQ ID NO: 810658 - DNA, 15 bp, Homo sapiens
gcctcccaaggccgt

SEQ ID NO: 810659 - DNA, 15 bp, Homo sapiens
cctcccaaggccgtg

SEQ ID NO: 810660 - DNA, 15 bp, Homo sapiens
ctcccaaggccgtga

SEQ ID NO: 810661 - DNA, 15 bp, Homo sapiens
tcccaaggccgtgaa

SEQ ID NO: 810662 - DNA, 15 bp, Homo sapiens
cccaaggccgtgaag

SEQ ID NO: 810663 - DNA, 15 bp, Homo sapiens
ccaaggccgtgaagc

SEQ ID NO: 810664 - DNA, 15 bp, Homo sapiens
caaggccgtgaagcc

SEQ ID NO: 810665 - DNA, 15 bp, Homo sapiens
aaggccgtgaagcct

SEQ ID NO: 810666 - DNA, 15 bp, Homo sapiens
aggccgtgaagcctc

SEQ ID NO: 810667 - DNA, 15 bp, Homo sapiens
ggccgtgaagcctca

SEQ ID NO: 810668 - DNA, 15 bp, Homo sapiens
gccgtgaagcctcac

SEQ ID NO: 810669 - DNA, 15 bp, Homo sapiens
ccgtgaagcctcaca

SEQ ID NO: 810670 - DNA, 15 bp, Homo sapiens
cgtgaagcctcacac

SEQ ID NO: 810671 - DNA, 15 bp, Homo sapiens
gtgaagcctcacaca

SEQ ID NO: 810672 - DNA, 15 bp, Homo sapiens
tgaagcctcacacac

SEQ ID NO: 810673 - DNA, 15 bp, Homo sapiens
gaagcctcacacacc

SEQ ID NO: 810674 - DNA, 15 bp, Homo sapiens
aagcctcacacaccc

SEQ ID NO: 810675 - DNA, 15 bp, Homo sapiens
agcctcacacacccg

SEQ ID NO: 810676 - DNA, 15 bp, Homo sapiens
gcctcacacacccgc

SEQ ID NO: 810677 - DNA, 15 bp, Homo sapiens
cctcacacacccgct

SEQ ID NO: 810678 - DNA, 15 bp, Homo sapiens
ctcacacacccgctg

SEQ ID NO: 810679 - DNA, 15 bp, Homo sapiens
tcacacacccgctga

SEQ ID NO: 810680 - DNA, 15 bp, Homo sapiens
cacacacccgctgaa

SEQ ID NO: 810681 - DNA, 15 bp, Homo sapiens
acacacccgctgaaa

SEQ ID NO: 810682 - DNA, 15 bp, Homo sapiens
cacacccgctgaaag

SEQ ID NO: 810683 - DNA, 15 bp, Homo sapiens
acacccgctgaaagc

SEQ ID NO: 810684 - DNA, 15 bp, Homo sapiens
cacccgctgaaagca

SEQ ID NO: 810685 - DNA, 15 bp, Homo sapiens
acccgctgaaagcat

SEQ ID NO: 810686 - DNA, 15 bp, Homo sapiens
cccgctgaaagcata

SEQ ID NO: 810687 - DNA, 15 bp, Homo sapiens
ccgctgaaagcatat

SEQ ID NO: 810688 - DNA, 15 bp, Homo sapiens
cgctgaaagcatatg

SEQ ID NO: 810689 - DNA, 15 bp, Homo sapiens
gctgaaagcatatgg

SEQ ID NO: 810690 - DNA, 15 bp, Homo sapiens
ctgaaagcatatggg

SEQ ID NO: 810691 - DNA, 15 bp, Homo sapiens
tgaaagcatatgggc

SEQ ID NO: 810692 - DNA, 15 bp, Homo sapiens
gaaagcatatgggcc

SEQ ID NO: 810693 - DNA, 15 bp, Homo sapiens
aaagcatatgggcct

SEQ ID NO: 810694 - DNA, 15 bp, Homo sapiens
aagcatatgggccta

SEQ ID NO: 810695 - DNA, 15 bp, Homo sapiens
agcatatgggcctaa

SEQ ID NO: 810696 - DNA, 15 bp, Homo sapiens
gcatatgggcctaat

SEQ ID NO: 810697 - DNA, 15 bp, Homo sapiens
catatgggcctaatt

SEQ ID NO: 810698 - DNA, 15 bp, Homo sapiens
atatgggcctaattg

SEQ ID NO: 810699 - DNA, 15 bp, Homo sapiens
tatgggcctaattgc

SEQ ID NO: 810700 - DNA, 15 bp, Homo sapiens
atgggcctaattgca

SEQ ID NO: 810701 - DNA, 15 bp, Homo sapiens
tgggcctaattgcag

SEQ ID NO: 810702 - DNA, 15 bp, Homo sapiens
gggcctaattgcagc

SEQ ID NO: 810703 - DNA, 15 bp, Homo sapiens
ggcctaattgcagca

SEQ ID NO: 810704 - DNA, 15 bp, Homo sapiens
gcctaattgcagcaa

SEQ ID NO: 810705 - DNA, 15 bp, Homo sapiens
cctaattgcagcaac

SEQ ID NO: 810706 - DNA, 15 bp, Homo sapiens
ctaattgcagcaact

SEQ ID NO: 810707 - DNA, 15 bp, Homo sapiens
taattgcagcaactc

SEQ ID NO: 810708 - DNA, 15 bp, Homo sapiens
aattgcagcaactcc

SEQ ID NO: 810709 - DNA, 15 bp, Homo sapiens
attgcagcaactcca

SEQ ID NO: 810710 - DNA, 15 bp, Homo sapiens
ttgcagcaactccag

SEQ ID NO: 810711 - DNA, 15 bp, Homo sapiens
tgcagcaactccagt

SEQ ID NO: 810712 - DNA, 15 bp, Homo sapiens
gcagcaactccagtc

SEQ ID NO: 810713 - DNA, 15 bp, Homo sapiens
cagcaactccagtcc

SEQ ID NO: 810714 - DNA, 15 bp, Homo sapiens
agcaactccagtcca

SEQ ID NO: 810715 - DNA, 15 bp, Homo sapiens
gcaactccagtccag

SEQ ID NO: 810716 - DNA, 15 bp, Homo sapiens
caactccagtccagg

SEQ ID NO: 810717 - DNA, 15 bp, Homo sapiens
aactccagtccaggt

SEQ ID NO: 810718 - DNA, 15 bp, Homo sapiens
actccagtccaggtt

SEQ ID NO: 810719 - DNA, 15 bp, Homo sapiens
ctccagtccaggttc

SEQ ID NO: 810720 - DNA, 15 bp, Homo sapiens
tccagtccaggttct

SEQ ID NO: 810721 - DNA, 15 bp, Homo sapiens
ccagtccaggttcta

SEQ ID NO: 810722 - DNA, 15 bp, Homo sapiens
cagtccaggttctag

SEQ ID NO: 810723 - DNA, 15 bp, Homo sapiens
agtccaggttctaga

SEQ ID NO: 810724 - DNA, 15 bp, Homo sapiens
gtccaggttctagaa

SEQ ID NO: 810725 - DNA, 15 bp, Homo sapiens
tccaggttctagaac

SEQ ID NO: 810726 - DNA, 15 bp, Homo sapiens
ccaggttctagaaca

SEQ ID NO: 810727 - DNA, 15 bp, Homo sapiens
caggttctagaacag

SEQ ID NO: 810728 - DNA, 15 bp, Homo sapiens
aggttctagaacagg

SEQ ID NO: 810729 - DNA, 15 bp, Homo sapiens
ggttctagaacagga

SEQ ID NO: 810730 - DNA, 15 bp, Homo sapiens
gttctagaacaggaa

SEQ ID NO: 810731 - DNA, 15 bp, Homo sapiens
ttctagaacaggaaa

SEQ ID NO: 810732 - DNA, 15 bp, Homo sapiens
tctagaacaggaaat

SEQ ID NO: 810733 - DNA, 15 bp, Homo sapiens
ctagaacaggaaata

SEQ ID NO: 810734 - DNA, 15 bp, Homo sapiens
tagaacaggaaatat

SEQ ID NO: 810735 - DNA, 15 bp, Homo sapiens
agaacaggaaatatt

SEQ ID NO: 810736 - DNA, 15 bp, Homo sapiens
gaacaggaaatattt

SEQ ID NO: 810737 - DNA, 15 bp, Homo sapiens
aacaggaaatatttc

SEQ ID NO: 810738 - DNA, 15 bp, Homo sapiens
acaggaaatatttct

SEQ ID NO: 810739 - DNA, 15 bp, Homo sapiens
caggaaatatttcta

SEQ ID NO: 810740 - DNA, 15 bp, Homo sapiens
aggaaatatttctaa

SEQ ID NO: 810741 - DNA, 15 bp, Homo sapiens
ggaaatatttctaag

SEQ ID NO: 810742 - DNA, 15 bp, Homo sapiens
gaaatatttctaaga

SEQ ID NO: 810743 - DNA, 15 bp, Homo sapiens
aaatatttctaagag

SEQ ID NO: 810744 - DNA, 15 bp, Homo sapiens
aatatttctaagagc

SEQ ID NO: 810745 - DNA, 15 bp, Homo sapiens
atatttctaagagcc

SEQ ID NO: 810746 - DNA, 15 bp, Homo sapiens
tatttctaagagcca

SEQ ID NO: 810747 - DNA, 15 bp, Homo sapiens
atttctaagagccag

SEQ ID NO: 810748 - DNA, 15 bp, Homo sapiens
tttctaagagccagc

SEQ ID NO: 810749 - DNA, 15 bp, Homo sapiens
ttctaagagccagct

SEQ ID NO: 810750 - DNA, 15 bp, Homo sapiens
tctaagagccagctt

SEQ ID NO: 810751 - DNA, 15 bp, Homo sapiens
ctaagagccagcttt

SEQ ID NO: 810752 - DNA, 15 bp, Homo sapiens
taagagccagctttc

SEQ ID NO: 810753 - DNA, 15 bp, Homo sapiens
aagagccagctttcc

SEQ ID NO: 810754 - DNA, 15 bp, Homo sapiens
agagccagctttccc

SEQ ID NO: 810755 - DNA, 15 bp, Homo sapiens
gagccagctttccca

SEQ ID NO: 810756 - DNA, 15 bp, Homo sapiens
agccagctttcccaa

SEQ ID NO: 810757 - DNA, 15 bp, Homo sapiens
gccagctttcccaac

SEQ ID NO: 810758 - DNA, 15 bp, Homo sapiens
ccagctttcccaact

SEQ ID NO: 810759 - DNA, 15 bp, Homo sapiens
cagctttcccaactc

SEQ ID NO: 810760 - DNA, 15 bp, Homo sapiens
agctttcccaactca

SEQ ID NO: 810761 - DNA, 15 bp, Homo sapiens
gctttcccaactcaa

SEQ ID NO: 810762 - DNA, 15 bp, Homo sapiens
ctttcccaactcaat

SEQ ID NO: 810763 - DNA, 15 bp, Homo sapiens
tttcccaactcaatc

SEQ ID NO: 810764 - DNA, 15 bp, Homo sapiens
ttcccaactcaatca

SEQ ID NO: 810765 - DNA, 15 bp, Homo sapiens
tcccaactcaatcac

SEQ ID NO: 810766 - DNA, 15 bp, Homo sapiens
cccaactcaatcacc

SEQ ID NO: 810767 - DNA, 15 bp, Homo sapiens
ccaactcaatcacct

SEQ ID NO: 810768 - DNA, 15 bp, Homo sapiens
caactcaatcacctc

SEQ ID NO: 810769 - DNA, 15 bp, Homo sapiens
aactcaatcacctct

SEQ ID NO: 810770 - DNA, 15 bp, Homo sapiens
actcaatcacctcta

SEQ ID NO: 810771 - DNA, 15 bp, Homo sapiens
ctcaatcacctctat

SEQ ID NO: 810772 - DNA, 15 bp, Homo sapiens
tcaatcacctctata

SEQ ID NO: 810773 - DNA, 15 bp, Homo sapiens
caatcacctctatac

SEQ ID NO: 810774 - DNA, 15 bp, Homo sapiens
aatcacctctatact

SEQ ID NO: 810775 - DNA, 15 bp, Homo sapiens
atcacctctatactc

SEQ ID NO: 810776 - DNA, 15 bp, Homo sapiens
tcacctctatactca

SEQ ID NO: 810777 - DNA, 15 bp, Homo sapiens
cacctctatactcac

SEQ ID NO: 810778 - DNA, 15 bp, Homo sapiens
acctctatactcaca

SEQ ID NO: 810779 - DNA, 15 bp, Homo sapiens
cctctatactcacat

SEQ ID NO: 810780 - DNA, 15 bp, Homo sapiens
ctctatactcacatc

SEQ ID NO: 810781 - DNA, 15 bp, Homo sapiens
tctatactcacatca

SEQ ID NO: 810782 - DNA, 15 bp, Homo sapiens
ctatactcacatcac

SEQ ID NO: 810783 - DNA, 15 bp, Homo sapiens
tatactcacatcact

SEQ ID NO: 810784 - DNA, 15 bp, Homo sapiens
atactcacatcactg

SEQ ID NO: 810785 - DNA, 15 bp, Homo sapiens
tactcacatcactga

SEQ ID NO: 810786 - DNA, 15 bp, Homo sapiens
actcacatcactgaa

SEQ ID NO: 810787 - DNA, 15 bp, Homo sapiens
ctcacatcactgaat

SEQ ID NO: 810788 - DNA, 15 bp, Homo sapiens
tcacatcactgaatc

SEQ ID NO: 810789 - DNA, 15 bp, Homo sapiens
cacatcactgaatct

SEQ ID NO: 810790 - DNA, 15 bp, Homo sapiens
acatcactgaatctg

SEQ ID NO: 810791 - DNA, 15 bp, Homo sapiens
catcactgaatctgc

SEQ ID NO: 810792 - DNA, 15 bp, Homo sapiens
atcactgaatctgcc

SEQ ID NO: 810793 - DNA, 15 bp, Homo sapiens
tcactgaatctgcct

SEQ ID NO: 810794 - DNA, 15 bp, Homo sapiens
cactgaatctgcctt

SEQ ID NO: 810795 - DNA, 15 bp, Homo sapiens
actgaatctgccttt

SEQ ID NO: 810796 - DNA, 15 bp, Homo sapiens
ctgaatctgcctttt

SEQ ID NO: 810797 - DNA, 15 bp, Homo sapiens
tgaatctgccttttt

SEQ ID NO: 810798 - DNA, 15 bp, Homo sapiens
gaatctgcctttttc

SEQ ID NO: 810799 - DNA, 15 bp, Homo sapiens
aatctgcctttttcc

SEQ ID NO: 810800 - DNA, 15 bp, Homo sapiens
atctgcctttttcct

SEQ ID NO: 810801 - DNA, 15 bp, Homo sapiens
tctgcctttttcctg

SEQ ID NO: 810802 - DNA, 15 bp, Homo sapiens
ctgcctttttcctga

SEQ ID NO: 810803 - DNA, 15 bp, Homo sapiens
tgcctttttcctgaa

SEQ ID NO: 810804 - DNA, 15 bp, Homo sapiens
gcctttttcctgaag

SEQ ID NO: 810805 - DNA, 15 bp, Homo sapiens
cctttttcctgaagt

SEQ ID NO: 810806 - DNA, 15 bp, Homo sapiens
ctttttcctgaagtg

SEQ ID NO: 810807 - DNA, 15 bp, Homo sapiens
tttttcctgaagtgc

SEQ ID NO: 810808 - DNA, 15 bp, Homo sapiens
ttttcctgaagtgct

SEQ ID NO: 810809 - DNA, 15 bp, Homo sapiens
tttcctgaagtgctc

SEQ ID NO: 810810 - DNA, 15 bp, Homo sapiens
ttcctgaagtgctcc

SEQ ID NO: 810811 - DNA, 15 bp, Homo sapiens
tcctgaagtgctcca

SEQ ID NO: 810812 - DNA, 15 bp, Homo sapiens
cctgaagtgctccat

SEQ ID NO: 810813 - DNA, 15 bp, Homo sapiens
ctgaagtgctccatc

SEQ ID NO: 810814 - DNA, 15 bp, Homo sapiens
tgaagtgctccatca

SEQ ID NO: 810815 - DNA, 15 bp, Homo sapiens
gaagtgctccatcac

SEQ ID NO: 810816 - DNA, 15 bp, Homo sapiens
aagtgctccatcacc

SEQ ID NO: 810817 - DNA, 15 bp, Homo sapiens
agtgctccatcacct

SEQ ID NO: 810818 - DNA, 15 bp, Homo sapiens
gtgctccatcacctg

SEQ ID NO: 810819 - DNA, 15 bp, Homo sapiens
tgctccatcacctga

SEQ ID NO: 810820 - DNA, 15 bp, Homo sapiens
gctccatcacctgag

SEQ ID NO: 810821 - DNA, 15 bp, Homo sapiens
ctccatcacctgagg

SEQ ID NO: 810822 - DNA, 15 bp, Homo sapiens
tccatcacctgaggg

SEQ ID NO: 810823 - DNA, 15 bp, Homo sapiens
ccatcacctgagggg

SEQ ID NO: 810824 - DNA, 15 bp, Homo sapiens
catcacctgaggggg

SEQ ID NO: 810825 - DNA, 15 bp, Homo sapiens
atcacctgaggggga

SEQ ID NO: 810826 - DNA, 15 bp, Homo sapiens
tcacctgagggggaa

SEQ ID NO: 810827 - DNA, 15 bp, Homo sapiens
cacctgagggggaat

SEQ ID NO: 810828 - DNA, 15 bp, Homo sapiens
acctgagggggaata

SEQ ID NO: 810829 - DNA, 15 bp, Homo sapiens
cctgagggggaatag

SEQ ID NO: 810830 - DNA, 15 bp, Homo sapiens
ctgagggggaatagt

SEQ ID NO: 810831 - DNA, 15 bp, Homo sapiens
tgagggggaatagtc

SEQ ID NO: 810832 - DNA, 15 bp, Homo sapiens
gagggggaatagtct

SEQ ID NO: 810833 - DNA, 15 bp, Homo sapiens
agggggaatagtcta

SEQ ID NO: 810834 - DNA, 15 bp, Homo sapiens
gggggaatagtctat

SEQ ID NO: 810835 - DNA, 15 bp, Homo sapiens
ggggaatagtctatg

SEQ ID NO: 810836 - DNA, 15 bp, Homo sapiens
gggaatagtctatgc

SEQ ID NO: 810837 - DNA, 15 bp, Homo sapiens
ggaatagtctatgct

SEQ ID NO: 810838 - DNA, 15 bp, Homo sapiens
gaatagtctatgctt

SEQ ID NO: 810839 - DNA, 15 bp, Homo sapiens
aatagtctatgcttg

SEQ ID NO: 810840 - DNA, 15 bp, Homo sapiens
atagtctatgcttgg

SEQ ID NO: 810841 - DNA, 15 bp, Homo sapiens
tagtctatgcttggc

SEQ ID NO: 810842 - DNA, 15 bp, Homo sapiens
agtctatgcttggct

SEQ ID NO: 810843 - DNA, 15 bp, Homo sapiens
gtctatgcttggctg

SEQ ID NO: 810844 - DNA, 15 bp, Homo sapiens
tctatgcttggctgt

SEQ ID NO: 810845 - DNA, 15 bp, Homo sapiens
ctatgcttggctgtg

SEQ ID NO: 810846 - DNA, 15 bp, Homo sapiens
tatgcttggctgtgc

SEQ ID NO: 810847 - DNA, 15 bp, Homo sapiens
atgcttggctgtgct

SEQ ID NO: 810848 - DNA, 15 bp, Homo sapiens
tgcttggctgtgcta

SEQ ID NO: 810849 - DNA, 15 bp, Homo sapiens
gcttggctgtgctat

SEQ ID NO: 810850 - DNA, 15 bp, Homo sapiens
cttggctgtgctatt

SEQ ID NO: 810851 - DNA, 15 bp, Homo sapiens
ttggctgtgctattg

SEQ ID NO: 810852 - DNA, 15 bp, Homo sapiens
tggctgtgctattgt

SEQ ID NO: 810853 - DNA, 15 bp, Homo sapiens
ggctgtgctattgtc

SEQ ID NO: 810854 - DNA, 15 bp, Homo sapiens
gctgtgctattgtcc

SEQ ID NO: 810855 - DNA, 15 bp, Homo sapiens
ctgtgctattgtcca

SEQ ID NO: 810856 - DNA, 15 bp, Homo sapiens
tgtgctattgtccat

SEQ ID NO: 810857 - DNA, 15 bp, Homo sapiens
gtgctattgtccatt

SEQ ID NO: 810858 - DNA, 15 bp, Homo sapiens
tgctattgtccattt

SEQ ID NO: 810859 - DNA, 15 bp, Homo sapiens
gctattgtccatttt

SEQ ID NO: 810860 - DNA, 15 bp, Homo sapiens
ctattgtccattttc

SEQ ID NO: 810861 - DNA, 15 bp, Homo sapiens
tattgtccattttca

SEQ ID NO: 810862 - DNA, 15 bp, Homo sapiens
attgtccattttcat

SEQ ID NO: 810863 - DNA, 15 bp, Homo sapiens
ttgtccattttcatg

SEQ ID NO: 810864 - DNA, 15 bp, Homo sapiens
tgtccattttcatga

SEQ ID NO: 810865 - DNA, 15 bp, Homo sapiens
gtccattttcatgaa

SEQ ID NO: 810866 - DNA, 15 bp, Homo sapiens
tccattttcatgaac

SEQ ID NO: 810867 - DNA, 15 bp, Homo sapiens
ccattttcatgaact

SEQ ID NO: 810868 - DNA, 15 bp, Homo sapiens
cattttcatgaactt

SEQ ID NO: 810869 - DNA, 15 bp, Homo sapiens
attttcatgaacttt

SEQ ID NO: 810870 - DNA, 15 bp, Homo sapiens
ttttcatgaactttc

SEQ ID NO: 810871 - DNA, 15 bp, Homo sapiens
tttcatgaactttca

SEQ ID NO: 810872 - DNA, 15 bp, Homo sapiens
ttcatgaactttcat

SEQ ID NO: 810873 - DNA, 15 bp, Homo sapiens
tcatgaactttcatg

SEQ ID NO: 810874 - DNA, 15 bp, Homo sapiens
catgaactttcatga

SEQ ID NO: 810875 - DNA, 15 bp, Homo sapiens
atgaactttcatgaa

SEQ ID NO: 810876 - DNA, 15 bp, Homo sapiens
actgaaacatgccac

SEQ ID NO: 810877 - DNA, 15 bp, Homo sapiens
ctgaaacatgccaca

SEQ ID NO: 810878 - DNA, 15 bp, Homo sapiens
tgaaacatgccacaa

SEQ ID NO: 810879 - DNA, 15 bp, Homo sapiens
gaaacatgccacaac

SEQ ID NO: 810880 - DNA, 15 bp, Homo sapiens
aaacatgccacaaca

SEQ ID NO: 810881 - DNA, 15 bp, Homo sapiens
aacatgccacaacat

SEQ ID NO: 810882 - DNA, 15 bp, Homo sapiens
acatgccacaacata

SEQ ID NO: 810883 - DNA, 15 bp, Homo sapiens
catgccacaacatat

SEQ ID NO: 810884 - DNA, 15 bp, Homo sapiens
atgccacaacatatg

SEQ ID NO: 810885 - DNA, 15 bp, Homo sapiens
tgccacaacatatgt

SEQ ID NO: 810886 - DNA, 15 bp, Homo sapiens
gccacaacatatgtg

SEQ ID NO: 810887 - DNA, 15 bp, Homo sapiens
ccacaacatatgtgt

SEQ ID NO: 810888 - DNA, 15 bp, Homo sapiens
cacaacatatgtgta

SEQ ID NO: 810889 - DNA, 15 bp, Homo sapiens
acaacatatgtgtac

SEQ ID NO: 810890 - DNA, 15 bp, Homo sapiens
caacatatgtgtacc

SEQ ID NO: 810891 - DNA, 15 bp, Homo sapiens
aacatatgtgtacct

SEQ ID NO: 810892 - DNA, 15 bp, Homo sapiens
acatatgtgtacctt

SEQ ID NO: 810893 - DNA, 15 bp, Homo sapiens
catatgtgtaccttg

SEQ ID NO: 810894 - DNA, 15 bp, Homo sapiens
atatgtgtaccttga

SEQ ID NO: 810895 - DNA, 15 bp, Homo sapiens
tatgtgtaccttgaa

SEQ ID NO: 810896 - DNA, 15 bp, Homo sapiens
atgtgtaccttgaaa

SEQ ID NO: 810897 - DNA, 15 bp, Homo sapiens
tgtgtaccttgaaag

SEQ ID NO: 810898 - DNA, 15 bp, Homo sapiens
gtgtaccttgaaagc

SEQ ID NO: 810899 - DNA, 15 bp, Homo sapiens
tgtaccttgaaagca

SEQ ID NO: 810900 - DNA, 15 bp, Homo sapiens
gtaccttgaaagcat

SEQ ID NO: 810901 - DNA, 15 bp, Homo sapiens
taccttgaaagcatt

SEQ ID NO: 810902 - DNA, 15 bp, Homo sapiens
accttgaaagcatta

SEQ ID NO: 810903 - DNA, 15 bp, Homo sapiens
ccttgaaagcattat

SEQ ID NO: 810904 - DNA, 15 bp, Homo sapiens
cttgaaagcattatg

SEQ ID NO: 810905 - DNA, 15 bp, Homo sapiens
ttgaaagcattatgc

SEQ ID NO: 810906 - DNA, 15 bp, Homo sapiens
tgaaagcattatgct

SEQ ID NO: 810907 - DNA, 15 bp, Homo sapiens
gaaagcattatgcta

SEQ ID NO: 810908 - DNA, 15 bp, Homo sapiens
aaagcattatgctaa

SEQ ID NO: 810909 - DNA, 15 bp, Homo sapiens
aagcattatgctaag

SEQ ID NO: 810910 - DNA, 15 bp, Homo sapiens
agcattatgctaagt

SEQ ID NO: 810911 - DNA, 15 bp, Homo sapiens
gcattatgctaagtg

SEQ ID NO: 810912 - DNA, 15 bp, Homo sapiens
tatgctaagtggaag

SEQ ID NO: 810913 - DNA, 15 bp, Homo sapiens
atgctaagtggaaga

SEQ ID NO: 810914 - DNA, 15 bp, Homo sapiens
tgctaagtggaagaa

SEQ ID NO: 810915 - DNA, 15 bp, Homo sapiens
gctaagtggaagaaa

SEQ ID NO: 810916 - DNA, 15 bp, Homo sapiens
ctaagtggaagaaac

SEQ ID NO: 810917 - DNA, 15 bp, Homo sapiens
taagtggaagaaact

SEQ ID NO: 810918 - DNA, 15 bp, Homo sapiens
aagtggaagaaacta

SEQ ID NO: 810919 - DNA, 15 bp, Homo sapiens
agtggaagaaactag

SEQ ID NO: 810920 - DNA, 15 bp, Homo sapiens
gtggaagaaactagt

SEQ ID NO: 810921 - DNA, 15 bp, Homo sapiens
tggaagaaactagtc

SEQ ID NO: 810922 - DNA, 15 bp, Homo sapiens
ggaagaaactagtca

SEQ ID NO: 810923 - DNA, 15 bp, Homo sapiens
gaagaaactagtcac

SEQ ID NO: 810924 - DNA, 15 bp, Homo sapiens
aagaaactagtcaca

SEQ ID NO: 810925 - DNA, 15 bp, Homo sapiens
agaaactagtcacaa

SEQ ID NO: 810926 - DNA, 15 bp, Homo sapiens
gaaactagtcacaaa

SEQ ID NO: 810927 - DNA, 15 bp, Homo sapiens
aaactagtcacaaaa

SEQ ID NO: 810928 - DNA, 15 bp, Homo sapiens
aactagtcacaaaag

SEQ ID NO: 810929 - DNA, 15 bp, Homo sapiens
actagtcacaaaaga

SEQ ID NO: 810930 - DNA, 15 bp, Homo sapiens
ctagtcacaaaagat

SEQ ID NO: 810931 - DNA, 15 bp, Homo sapiens
tagtcacaaaagatc

SEQ ID NO: 810932 - DNA, 15 bp, Homo sapiens
agtcacaaaagatca

SEQ ID NO: 810933 - DNA, 15 bp, Homo sapiens
gtcacaaaagatcac

SEQ ID NO: 810934 - DNA, 15 bp, Homo sapiens
tcacaaaagatcaca

SEQ ID NO: 810935 - DNA, 15 bp, Homo sapiens
cacaaaagatcacac

SEQ ID NO: 810936 - DNA, 15 bp, Homo sapiens
acaaaagatcacaca

SEQ ID NO: 810937 - DNA, 15 bp, Homo sapiens
caaaagatcacacag

SEQ ID NO: 810938 - DNA, 15 bp, Homo sapiens
aaaagatcacacagt

SEQ ID NO: 810939 - DNA, 15 bp, Homo sapiens
aaagatcacacagta

SEQ ID NO: 810940 - DNA, 15 bp, Homo sapiens
aagatcacacagtat

SEQ ID NO: 810941 - DNA, 15 bp, Homo sapiens
agatcacacagtata

SEQ ID NO: 810942 - DNA, 15 bp, Homo sapiens
gatcacacagtatat

SEQ ID NO: 810943 - DNA, 15 bp, Homo sapiens
atcacacagtatatg

SEQ ID NO: 810944 - DNA, 15 bp, Homo sapiens
tcacacagtatatga

SEQ ID NO: 810945 - DNA, 15 bp, Homo sapiens
cacacagtatatgac

SEQ ID NO: 810946 - DNA, 15 bp, Homo sapiens
acacagtatatgact

SEQ ID NO: 810947 - DNA, 15 bp, Homo sapiens
cacagtatatgactt

SEQ ID NO: 810948 - DNA, 15 bp, Homo sapiens
acagtatatgacttc

SEQ ID NO: 810949 - DNA, 15 bp, Homo sapiens
cagtatatgacttca

SEQ ID NO: 810950 - DNA, 15 bp, Homo sapiens
agtatatgacttcac

SEQ ID NO: 810951 - DNA, 15 bp, Homo sapiens
gtatatgacttcact

SEQ ID NO: 810952 - DNA, 15 bp, Homo sapiens
tatatgacttcactt

SEQ ID NO: 810953 - DNA, 15 bp, Homo sapiens
atatgacttcacttg

SEQ ID NO: 810954 - DNA, 15 bp, Homo sapiens
tatgacttcacttgt

SEQ ID NO: 810955 - DNA, 15 bp, Homo sapiens
atgacttcacttgtg

SEQ ID NO: 810956 - DNA, 15 bp, Homo sapiens
tgacttcacttgtgt

SEQ ID NO: 810957 - DNA, 15 bp, Homo sapiens
gacttcacttgtgta

SEQ ID NO: 810958 - DNA, 15 bp, Homo sapiens
acttcacttgtgtaa

SEQ ID NO: 810959 - DNA, 15 bp, Homo sapiens
cttcacttgtgtaaa

SEQ ID NO: 810960 - DNA, 15 bp, Homo sapiens
ttcacttgtgtaaaa

SEQ ID NO: 810961 - DNA, 15 bp, Homo sapiens
tcacttgtgtaaaat

SEQ ID NO: 810962 - DNA, 15 bp, Homo sapiens
cacttgtgtaaaatg

SEQ ID NO: 810963 - DNA, 15 bp, Homo sapiens
acttgtgtaaaatgt

SEQ ID NO: 810964 - DNA, 15 bp, Homo sapiens
cttgtgtaaaatgtc

SEQ ID NO: 810965 - DNA, 15 bp, Homo sapiens
ttgtgtaaaatgtca

SEQ ID NO: 810966 - DNA, 15 bp, Homo sapiens
tgtgtaaaatgtcaa

SEQ ID NO: 810967 - DNA, 15 bp, Homo sapiens
gtgtaaaatgtcaag

SEQ ID NO: 810968 - DNA, 15 bp, Homo sapiens
tgtaaaatgtcaaga

SEQ ID NO: 810969 - DNA, 15 bp, Homo sapiens
gtaaaatgtcaagaa

SEQ ID NO: 810970 - DNA, 15 bp, Homo sapiens
taaaatgtcaagaat

SEQ ID NO: 810971 - DNA, 15 bp, Homo sapiens
aaaatgtcaagaata

SEQ ID NO: 810972 - DNA, 15 bp, Homo sapiens
aaatgtcaagaatag

SEQ ID NO: 810973 - DNA, 15 bp, Homo sapiens
aatgtcaagaatagg

SEQ ID NO: 810974 - DNA, 15 bp, Homo sapiens
atgtcaagaataggc

SEQ ID NO: 810975 - DNA, 15 bp, Homo sapiens
tgtcaagaataggca

SEQ ID NO: 810976 - DNA, 15 bp, Homo sapiens
gtcaagaataggcaa

SEQ ID NO: 810977 - DNA, 15 bp, Homo sapiens
tcaagaataggcaaa

SEQ ID NO: 810978 - DNA, 15 bp, Homo sapiens
caagaataggcaaat

SEQ ID NO: 810979 - DNA, 15 bp, Homo sapiens
aagaataggcaaata

SEQ ID NO: 810980 - DNA, 15 bp, Homo sapiens
agaataggcaaatat

SEQ ID NO: 810981 - DNA, 15 bp, Homo sapiens
gaataggcaaatata

SEQ ID NO: 810982 - DNA, 15 bp, Homo sapiens
aataggcaaatatat

SEQ ID NO: 810983 - DNA, 15 bp, Homo sapiens
ataggcaaatatata

SEQ ID NO: 810984 - DNA, 15 bp, Homo sapiens
taggcaaatatatag

SEQ ID NO: 810985 - DNA, 15 bp, Homo sapiens
aggcaaatatataga

SEQ ID NO: 810986 - DNA, 15 bp, Homo sapiens
ggcaaatatatagag

SEQ ID NO: 810987 - DNA, 15 bp, Homo sapiens
gcaaatatatagagt

SEQ ID NO: 810988 - DNA, 15 bp, Homo sapiens
caaatatatagagtc

SEQ ID NO: 810989 - DNA, 15 bp, Homo sapiens
aaatatatagagtca

SEQ ID NO: 810990 - DNA, 15 bp, Homo sapiens
aatatatagagtcag

SEQ ID NO: 810991 - DNA, 15 bp, Homo sapiens
atatatagagtcaga

SEQ ID NO: 810992 - DNA, 15 bp, Homo sapiens
tatatagagtcagag

SEQ ID NO: 810993 - DNA, 15 bp, Homo sapiens
atatagagtcagaga

SEQ ID NO: 810994 - DNA, 15 bp, Homo sapiens
tatagagtcagagaa

SEQ ID NO: 810995 - DNA, 15 bp, Homo sapiens
atagagtcagagaat

SEQ ID NO: 810996 - DNA, 15 bp, Homo sapiens
tagagtcagagaata

SEQ ID NO: 810997 - DNA, 15 bp, Homo sapiens
agagtcagagaatag

SEQ ID NO: 810998 - DNA, 15 bp, Homo sapiens
gagtcagagaataga

SEQ ID NO: 810999 - DNA, 15 bp, Homo sapiens
agtcagagaatagat

SEQ ID NO: 811000 - DNA, 15 bp, Homo sapiens
gtcagagaatagatt

SEQ ID NO: 811001 - DNA, 15 bp, Homo sapiens
tcagagaatagatta

SEQ ID NO: 811002 - DNA, 15 bp, Homo sapiens
cagagaatagattac

SEQ ID NO: 811003 - DNA, 15 bp, Homo sapiens
agagaatagattact

SEQ ID NO: 811004 - DNA, 15 bp, Homo sapiens
gagaatagattactg

SEQ ID NO: 811005 - DNA, 15 bp, Homo sapiens
agaatagattactga

SEQ ID NO: 811006 - DNA, 15 bp, Homo sapiens
gaatagattactgac

SEQ ID NO: 811007 - DNA, 15 bp, Homo sapiens
aatagattactgact

SEQ ID NO: 811008 - DNA, 15 bp, Homo sapiens
atagattactgactc

SEQ ID NO: 811009 - DNA, 15 bp, Homo sapiens
tagattactgactcc

SEQ ID NO: 811010 - DNA, 15 bp, Homo sapiens
agattactgactcct

SEQ ID NO: 811011 - DNA, 15 bp, Homo sapiens
gattactgactcctt

SEQ ID NO: 811012 - DNA, 15 bp, Homo sapiens
attactgactccttg

SEQ ID NO: 811013 - DNA, 15 bp, Homo sapiens
ttactgactccttgc

SEQ ID NO: 811014 - DNA, 15 bp, Homo sapiens
tactgactccttgct

SEQ ID NO: 811015 - DNA, 15 bp, Homo sapiens
actgactccttgctt

SEQ ID NO: 811016 - DNA, 15 bp, Homo sapiens
ctgactccttgcttg

SEQ ID NO: 811017 - DNA, 15 bp, Homo sapiens
tgactccttgcttgt

SEQ ID NO: 811018 - DNA, 15 bp, Homo sapiens
gactccttgcttgtg

SEQ ID NO: 811019 - DNA, 15 bp, Homo sapiens
actccttgcttgtgg

SEQ ID NO: 811020 - DNA, 15 bp, Homo sapiens
ctccttgcttgtggg

SEQ ID NO: 811021 - DNA, 15 bp, Homo sapiens
tccttgcttgtgggg

SEQ ID NO: 811022 - DNA, 15 bp, Homo sapiens
ccttgcttgtgggga

SEQ ID NO: 811023 - DNA, 15 bp, Homo sapiens
cttgcttgtggggag

SEQ ID NO: 811024 - DNA, 15 bp, Homo sapiens
ttgcttgtggggaga

SEQ ID NO: 811025 - DNA, 15 bp, Homo sapiens
tgcttgtggggagat

SEQ ID NO: 811026 - DNA, 15 bp, Homo sapiens
gcttgtggggagatt

SEQ ID NO: 811027 - DNA, 15 bp, Homo sapiens
cttgtggggagattg

SEQ ID NO: 811028 - DNA, 15 bp, Homo sapiens
ttgtggggagattgg

SEQ ID NO: 811029 - DNA, 15 bp, Homo sapiens
tgtggggagattggg

SEQ ID NO: 811030 - DNA, 15 bp, Homo sapiens
gtggggagattgggg

SEQ ID NO: 811031 - DNA, 15 bp, Homo sapiens
tggggagattggggg

SEQ ID NO: 811032 - DNA, 15 bp, Homo sapiens
ggggagattgggggt

SEQ ID NO: 811033 - DNA, 15 bp, Homo sapiens
gggagattgggggtt

SEQ ID NO: 811034 - DNA, 15 bp, Homo sapiens
ggagattgggggttg

SEQ ID NO: 811035 - DNA, 15 bp, Homo sapiens
gagattgggggttga

SEQ ID NO: 811036 - DNA, 15 bp, Homo sapiens
agattgggggttgat

SEQ ID NO: 811037 - DNA, 15 bp, Homo sapiens
gattgggggttgata

SEQ ID NO: 811038 - DNA, 15 bp, Homo sapiens
attgggggttgatag

SEQ ID NO: 811039 - DNA, 15 bp, Homo sapiens
ttgggggttgatagc

SEQ ID NO: 811040 - DNA, 15 bp, Homo sapiens
tgggggttgatagct

SEQ ID NO: 811041 - DNA, 15 bp, Homo sapiens
gggggttgatagctg

SEQ ID NO: 811042 - DNA, 15 bp, Homo sapiens
ggggttgatagctga

SEQ ID NO: 811043 - DNA, 15 bp, Homo sapiens
gggttgatagctgaa

SEQ ID NO: 811044 - DNA, 15 bp, Homo sapiens
ggttgatagctgaag

SEQ ID NO: 811045 - DNA, 15 bp, Homo sapiens
gttgatagctgaagg

SEQ ID NO: 811046 - DNA, 15 bp, Homo sapiens
ttgatagctgaaggc

SEQ ID NO: 811047 - DNA, 15 bp, Homo sapiens
tgatagctgaaggct

SEQ ID NO: 811048 - DNA, 15 bp, Homo sapiens
gatagctgaaggcta

SEQ ID NO: 811049 - DNA, 15 bp, Homo sapiens
atagctgaaggctac

SEQ ID NO: 811050 - DNA, 15 bp, Homo sapiens
tagctgaaggctaca

SEQ ID NO: 811051 - DNA, 15 bp, Homo sapiens
agctgaaggctacag

SEQ ID NO: 811052 - DNA, 15 bp, Homo sapiens
gctgaaggctacagg

SEQ ID NO: 811053 - DNA, 15 bp, Homo sapiens
ctgaaggctacaggg

SEQ ID NO: 811054 - DNA, 15 bp, Homo sapiens
tgaaggctacagggc

SEQ ID NO: 811055 - DNA, 15 bp, Homo sapiens
gaaggctacagggct

SEQ ID NO: 811056 - DNA, 15 bp, Homo sapiens
aaggctacagggctt

SEQ ID NO: 811057 - DNA, 15 bp, Homo sapiens
aggctacagggcttc

SEQ ID NO: 811058 - DNA, 15 bp, Homo sapiens
ggctacagggcttct

SEQ ID NO: 811059 - DNA, 15 bp, Homo sapiens
gctacagggcttctt

SEQ ID NO: 811060 - DNA, 15 bp, Homo sapiens
ctacagggcttcttt

SEQ ID NO: 811061 - DNA, 15 bp, Homo sapiens
tacagggcttctttt

SEQ ID NO: 811062 - DNA, 15 bp, Homo sapiens
acagggcttcttttt

SEQ ID NO: 811063 - DNA, 15 bp, Homo sapiens
cagggcttctttttg

SEQ ID NO: 811064 - DNA, 15 bp, Homo sapiens
agggcttctttttga

SEQ ID NO: 811065 - DNA, 15 bp, Homo sapiens
gggcttctttttgag

SEQ ID NO: 811066 - DNA, 15 bp, Homo sapiens
ggcttctttttgagg

SEQ ID NO: 811067 - DNA, 15 bp, Homo sapiens
gcttctttttgaggt

SEQ ID NO: 811068 - DNA, 15 bp, Homo sapiens
cttctttttgaggtg

SEQ ID NO: 811069 - DNA, 15 bp, Homo sapiens
ttctttttgaggtga

SEQ ID NO: 811070 - DNA, 15 bp, Homo sapiens
tctttttgaggtgat

SEQ ID NO: 811071 - DNA, 15 bp, Homo sapiens
ctttttgaggtgatg

SEQ ID NO: 811072 - DNA, 15 bp, Homo sapiens
tttttgaggtgatga

SEQ ID NO: 811073 - DNA, 15 bp, Homo sapiens
ttttgaggtgatgaa

SEQ ID NO: 811074 - DNA, 15 bp, Homo sapiens
tttgaggtgatgaaa

SEQ ID NO: 811075 - DNA, 15 bp, Homo sapiens
ttgaggtgatgaaag

SEQ ID NO: 811076 - DNA, 15 bp, Homo sapiens
tgaggtgatgaaagt

SEQ ID NO: 811077 - DNA, 15 bp, Homo sapiens
gaggtgatgaaagtg

SEQ ID NO: 811078 - DNA, 15 bp, Homo sapiens
aggtgatgaaagtgt

SEQ ID NO: 811079 - DNA, 15 bp, Homo sapiens
ggtgatgaaagtgtt

SEQ ID NO: 811080 - DNA, 15 bp, Homo sapiens
gtgatgaaagtgttt

SEQ ID NO: 811081 - DNA, 15 bp, Homo sapiens
tgatgaaagtgtttt

SEQ ID NO: 811082 - DNA, 15 bp, Homo sapiens
gatgaaagtgtttta

SEQ ID NO: 811083 - DNA, 15 bp, Homo sapiens
atgaaagtgttttaa

SEQ ID NO: 811084 - DNA, 15 bp, Homo sapiens
tgaaagtgttttaaa

SEQ ID NO: 811085 - DNA, 15 bp, Homo sapiens
gaaagtgttttaaaa

SEQ ID NO: 811086 - DNA, 15 bp, Homo sapiens
aaagtgttttaaaat

SEQ ID NO: 811087 - DNA, 15 bp, Homo sapiens
aagtgttttaaaatt

SEQ ID NO: 811088 - DNA, 15 bp, Homo sapiens
agtgttttaaaattg

SEQ ID NO: 811089 - DNA, 15 bp, Homo sapiens
gtgttttaaaattga

SEQ ID NO: 811090 - DNA, 15 bp, Homo sapiens
tgttttaaaattgat

SEQ ID NO: 811091 - DNA, 15 bp, Homo sapiens
gttttaaaattgatt

SEQ ID NO: 811092 - DNA, 15 bp, Homo sapiens
ttttaaaattgattg

SEQ ID NO: 811093 - DNA, 15 bp, Homo sapiens
tttaaaattgattgt

SEQ ID NO: 811094 - DNA, 15 bp, Homo sapiens
ttaaaattgattgtc

SEQ ID NO: 811095 - DNA, 15 bp, Homo sapiens
taaaattgattgtcc

SEQ ID NO: 811096 - DNA, 15 bp, Homo sapiens
aaaattgattgtccc

SEQ ID NO: 811097 - DNA, 15 bp, Homo sapiens
aaattgattgtccca

SEQ ID NO: 811098 - DNA, 15 bp, Homo sapiens
aattgattgtcccat

SEQ ID NO: 811099 - DNA, 15 bp, Homo sapiens
attgattgtcccatt

SEQ ID NO: 811100 - DNA, 15 bp, Homo sapiens
ttgattgtcccattg

SEQ ID NO: 811101 - DNA, 15 bp, Homo sapiens
tgattgtcccattga

SEQ ID NO: 811102 - DNA, 15 bp, Homo sapiens
gattgtcccattgaa

SEQ ID NO: 811103 - DNA, 15 bp, Homo sapiens
attgtcccattgaat

SEQ ID NO: 811104 - DNA, 15 bp, Homo sapiens
ttgtcccattgaatt

SEQ ID NO: 811105 - DNA, 15 bp, Homo sapiens
tgtcccattgaattt

SEQ ID NO: 811106 - DNA, 15 bp, Homo sapiens
gtcccattgaatttt

SEQ ID NO: 811107 - DNA, 15 bp, Homo sapiens
tcccattgaatttta

SEQ ID NO: 811108 - DNA, 15 bp, Homo sapiens
cccattgaattttaa

SEQ ID NO: 811109 - DNA, 15 bp, Homo sapiens
ccattgaattttaaa

SEQ ID NO: 811110 - DNA, 15 bp, Homo sapiens
cattgaattttaaac

SEQ ID NO: 811111 - DNA, 15 bp, Homo sapiens
attgaattttaaacc

SEQ ID NO: 811112 - DNA, 15 bp, Homo sapiens
ttgaattttaaacct

SEQ ID NO: 811113 - DNA, 15 bp, Homo sapiens
tgaattttaaacctc

SEQ ID NO: 811114 - DNA, 15 bp, Homo sapiens
gaattttaaacctca

SEQ ID NO: 811115 - DNA, 15 bp, Homo sapiens
aattttaaacctcaa

SEQ ID NO: 811116 - DNA, 15 bp, Homo sapiens
attttaaacctcaaa

SEQ ID NO: 811117 - DNA, 15 bp, Homo sapiens
ttttaaacctcaaat

SEQ ID NO: 811118 - DNA, 15 bp, Homo sapiens
tttaaacctcaaatg

SEQ ID NO: 811119 - DNA, 15 bp, Homo sapiens
ttaaacctcaaatgg

SEQ ID NO: 811120 - DNA, 15 bp, Homo sapiens
taaacctcaaatggg

SEQ ID NO: 811121 - DNA, 15 bp, Homo sapiens
aaacctcaaatgggt

SEQ ID NO: 811122 - DNA, 15 bp, Homo sapiens
aacctcaaatgggtg

SEQ ID NO: 811123 - DNA, 15 bp, Homo sapiens
acctcaaatgggtga

SEQ ID NO: 811124 - DNA, 15 bp, Homo sapiens
cctcaaatgggtgaa

SEQ ID NO: 811125 - DNA, 15 bp, Homo sapiens
ctcaaatgggtgaat

SEQ ID NO: 811126 - DNA, 15 bp, Homo sapiens
tcaaatgggtgaatt

SEQ ID NO: 811127 - DNA, 15 bp, Homo sapiens
caaatgggtgaattg

SEQ ID NO: 811128 - DNA, 15 bp, Homo sapiens
aaatgggtgaattgt

SEQ ID NO: 811129 - DNA, 15 bp, Homo sapiens
aatgggtgaattgta

SEQ ID NO: 811130 - DNA, 15 bp, Homo sapiens
atgggtgaattgtat

SEQ ID NO: 811131 - DNA, 15 bp, Homo sapiens
tgggtgaattgtatg

SEQ ID NO: 811132 - DNA, 15 bp, Homo sapiens
gggtgaattgtatgg

SEQ ID NO: 811133 - DNA, 15 bp, Homo sapiens
ggtgaattgtatggt

SEQ ID NO: 811134 - DNA, 15 bp, Homo sapiens
gtgaattgtatggtg

SEQ ID NO: 811135 - DNA, 15 bp, Homo sapiens
tgaattgtatggtgt

SEQ ID NO: 811136 - DNA, 15 bp, Homo sapiens
gaattgtatggtgta

SEQ ID NO: 811137 - DNA, 15 bp, Homo sapiens
aattgtatggtgtag

SEQ ID NO: 811138 - DNA, 15 bp, Homo sapiens
attgtatggtgtaga

SEQ ID NO: 811139 - DNA, 15 bp, Homo sapiens
ttgtatggtgtagaa

SEQ ID NO: 811140 - DNA, 15 bp, Homo sapiens
tgtatggtgtagaaa

SEQ ID NO: 811141 - DNA, 15 bp, Homo sapiens
gtatggtgtagaaac

SEQ ID NO: 811142 - DNA, 15 bp, Homo sapiens
tatggtgtagaaact

SEQ ID NO: 811143 - DNA, 15 bp, Homo sapiens
atggtgtagaaacta

SEQ ID NO: 811144 - DNA, 15 bp, Homo sapiens
tggtgtagaaactag

SEQ ID NO: 811145 - DNA, 15 bp, Homo sapiens
ggtgtagaaactaga

SEQ ID NO: 811146 - DNA, 15 bp, Homo sapiens
gtgtagaaactagaa

SEQ ID NO: 811147 - DNA, 15 bp, Homo sapiens
tgtagaaactagaac

SEQ ID NO: 811148 - DNA, 15 bp, Homo sapiens
gtagaaactagaact

SEQ ID NO: 811149 - DNA, 15 bp, Homo sapiens
tagaaactagaactc

SEQ ID NO: 811150 - DNA, 15 bp, Homo sapiens
agaaactagaactca

SEQ ID NO: 811151 - DNA, 15 bp, Homo sapiens
gaaactagaactcaa

SEQ ID NO: 811152 - DNA, 15 bp, Homo sapiens
aaactagaactcaat

SEQ ID NO: 811153 - DNA, 15 bp, Homo sapiens
aactagaactcaata

SEQ ID NO: 811154 - DNA, 15 bp, Homo sapiens
actagaactcaataa

SEQ ID NO: 811155 - DNA, 15 bp, Homo sapiens
ctagaactcaataaa

SEQ ID NO: 811156 - DNA, 15 bp, Homo sapiens
tagaactcaataaag

SEQ ID NO: 811157 - DNA, 15 bp, Homo sapiens
agaactcaataaagc

SEQ ID NO: 811158 - DNA, 15 bp, Homo sapiens
gaactcaataaagcc

SEQ ID NO: 811159 - DNA, 15 bp, Homo sapiens
aactcaataaagcca

SEQ ID NO: 811160 - DNA, 15 bp, Homo sapiens
actcaataaagccat

SEQ ID NO: 811161 - DNA, 15 bp, Homo sapiens
ctcaataaagccatt

SEQ ID NO: 811162 - DNA, 15 bp, Homo sapiens
tcaataaagccatta

SEQ ID NO: 811163 - DNA, 15 bp, Homo sapiens
caataaagccattag

SEQ ID NO: 811164 - DNA, 15 bp, Homo sapiens
aataaagccattagc

SEQ ID NO: 811165 - DNA, 15 bp, Homo sapiens
ataaagccattagca

SEQ ID NO: 811166 - DNA, 15 bp, Homo sapiens
taaagccattagcaa

SEQ ID NO: 811167 - DNA, 15 bp, Homo sapiens
aaagccattagcaaa

SEQ ID NO: 811168 - DNA, 15 bp, Homo sapiens
aagccattagcaaat

SEQ ID NO: 811169 - DNA, 15 bp, Homo sapiens
agccattagcaaata

SEQ ID NO: 811170 - DNA, 15 bp, Homo sapiens
gccattagcaaataa

SEQ ID NO: 811171 - DNA, 15 bp, Homo sapiens
ccattagcaaataat

SEQ ID NO: 811172 - DNA, 15 bp, Homo sapiens
cattagcaaataatg

SEQ ID NO: 811173 - DNA, 15 bp, Homo sapiens
attagcaaataatga

SEQ ID NO: 811174 - DNA, 15 bp, Homo sapiens
ttagcaaataatgac

SEQ ID NO: 811175 - DNA, 15 bp, Homo sapiens
tagcaaataatgact

SEQ ID NO: 811176 - DNA, 15 bp, Homo sapiens
agcaaataatgactg

SEQ ID NO: 811177 - DNA, 15 bp, Homo sapiens
gcaaataatgactgt

SEQ ID NO: 811178 - DNA, 15 bp, Homo sapiens
caaataatgactgtg

SEQ ID NO: 811179 - DNA, 15 bp, Homo sapiens
aaataatgactgtga

SEQ ID NO: 811180 - DNA, 15 bp, Homo sapiens
aataatgactgtgat

SEQ ID NO: 811181 - DNA, 15 bp, Homo sapiens
ataatgactgtgatg

SEQ ID NO: 811182 - DNA, 15 bp, Homo sapiens
taatgactgtgatgt

SEQ ID NO: 811183 - DNA, 15 bp, Homo sapiens
aatgactgtgatgtg

SEQ ID NO: 811184 - DNA, 15 bp, Homo sapiens
atgactgtgatgtgg

SEQ ID NO: 811185 - DNA, 15 bp, Homo sapiens
tgactgtgatgtgga

SEQ ID NO: 811186 - DNA, 15 bp, Homo sapiens
gactgtgatgtggag

SEQ ID NO: 811187 - DNA, 15 bp, Homo sapiens
actgtgatgtggaga

SEQ ID NO: 811188 - DNA, 15 bp, Homo sapiens
ctgtgatgtggagaa

SEQ ID NO: 811189 - DNA, 15 bp, Homo sapiens
tgtgatgtggagaat

SEQ ID NO: 811190 - DNA, 15 bp, Homo sapiens
gtgatgtggagaata

SEQ ID NO: 811191 - DNA, 15 bp, Homo sapiens
tgatgtggagaatag

SEQ ID NO: 811192 - DNA, 15 bp, Homo sapiens
gatgtggagaataga

SEQ ID NO: 811193 - DNA, 15 bp, Homo sapiens
atgtggagaatagag

SEQ ID NO: 811194 - DNA, 15 bp, Homo sapiens
tgtggagaatagagt

SEQ ID NO: 811195 - DNA, 15 bp, Homo sapiens
gtggagaatagagtt

SEQ ID NO: 811196 - DNA, 15 bp, Homo sapiens
tggagaatagagttc

SEQ ID NO: 811197 - DNA, 15 bp, Homo sapiens
ggagaatagagttca

SEQ ID NO: 811198 - DNA, 15 bp, Homo sapiens
gagaatagagttcag

SEQ ID NO: 811199 - DNA, 15 bp, Homo sapiens
agaatagagttcagg

SEQ ID NO: 811200 - DNA, 15 bp, Homo sapiens
gaatagagttcaggg

SEQ ID NO: 811201 - DNA, 15 bp, Homo sapiens
aatagagttcaggga

SEQ ID NO: 811202 - DNA, 15 bp, Homo sapiens
atagagttcagggaa

SEQ ID NO: 811203 - DNA, 15 bp, Homo sapiens
tagagttcagggaaa

SEQ ID NO: 811204 - DNA, 15 bp, Homo sapiens
agagttcagggaaag

SEQ ID NO: 811205 - DNA, 15 bp, Homo sapiens
gagttcagggaaaga

SEQ ID NO: 811206 - DNA, 15 bp, Homo sapiens
agttcagggaaagac

SEQ ID NO: 811207 - DNA, 15 bp, Homo sapiens
gttcagggaaagaca

SEQ ID NO: 811208 - DNA, 15 bp, Homo sapiens
ttcagggaaagacaa

SEQ ID NO: 811209 - DNA, 15 bp, Homo sapiens
tcagggaaagacaaa

SEQ ID NO: 811210 - DNA, 15 bp, Homo sapiens
cagggaaagacaaaa

SEQ ID NO: 811211 - DNA, 15 bp, Homo sapiens
agggaaagacaaaag

SEQ ID NO: 811212 - DNA, 15 bp, Homo sapiens
gggaaagacaaaagc

SEQ ID NO: 811213 - DNA, 15 bp, Homo sapiens
ggaaagacaaaagca

SEQ ID NO: 811214 - DNA, 15 bp, Homo sapiens
gaaagacaaaagcaa

SEQ ID NO: 811215 - DNA, 15 bp, Homo sapiens
aaagacaaaagcaag

SEQ ID NO: 811216 - DNA, 15 bp, Homo sapiens
aagacaaaagcaagg

SEQ ID NO: 811217 - DNA, 15 bp, Homo sapiens
agacaaaagcaagga

SEQ ID NO: 811218 - DNA, 15 bp, Homo sapiens
gacaaaagcaaggaa

SEQ ID NO: 811219 - DNA, 15 bp, Homo sapiens
acaaaagcaaggaaa

SEQ ID NO: 811220 - DNA, 15 bp, Homo sapiens
caaaagcaaggaaaa

SEQ ID NO: 811221 - DNA, 15 bp, Homo sapiens
aaaagcaaggaaaat

SEQ ID NO: 811222 - DNA, 15 bp, Homo sapiens
aaagcaaggaaaata

SEQ ID NO: 811223 - DNA, 15 bp, Homo sapiens
aagcaaggaaaatat

SEQ ID NO: 811224 - DNA, 15 bp, Homo sapiens
agcaaggaaaatatt

SEQ ID NO: 811225 - DNA, 15 bp, Homo sapiens
gcaaggaaaatattt

SEQ ID NO: 811226 - DNA, 15 bp, Homo sapiens
caaggaaaatatttg

SEQ ID NO: 811227 - DNA, 15 bp, Homo sapiens
aaggaaaatatttgg

SEQ ID NO: 811228 - DNA, 15 bp, Homo sapiens
aggaaaatatttggg

SEQ ID NO: 811229 - DNA, 15 bp, Homo sapiens
ggaaaatatttggga

SEQ ID NO: 811230 - DNA, 15 bp, Homo sapiens
gaaaatatttgggag

SEQ ID NO: 811231 - DNA, 15 bp, Homo sapiens
aaaatatttgggagg

SEQ ID NO: 811232 - DNA, 15 bp, Homo sapiens
aaatatttgggaggc

SEQ ID NO: 811233 - DNA, 15 bp, Homo sapiens
aatatttgggaggca

SEQ ID NO: 811234 - DNA, 15 bp, Homo sapiens
atatttgggaggcag

SEQ ID NO: 811235 - DNA, 15 bp, Homo sapiens
tatttgggaggcagt

SEQ ID NO: 811236 - DNA, 15 bp, Homo sapiens
atttgggaggcagtt

SEQ ID NO: 811237 - DNA, 15 bp, Homo sapiens
tttgggaggcagttt

SEQ ID NO: 811238 - DNA, 15 bp, Homo sapiens
ttgggaggcagtttt

SEQ ID NO: 811239 - DNA, 15 bp, Homo sapiens
tgggaggcagttttc

SEQ ID NO: 811240 - DNA, 15 bp, Homo sapiens
gggaggcagttttct

SEQ ID NO: 811241 - DNA, 15 bp, Homo sapiens
ggaggcagttttctt

SEQ ID NO: 811242 - DNA, 15 bp, Homo sapiens
gaggcagttttctta

SEQ ID NO: 811243 - DNA, 15 bp, Homo sapiens
aggcagttttcttag

SEQ ID NO: 811244 - DNA, 15 bp, Homo sapiens
ggcagttttcttagg

SEQ ID NO: 811245 - DNA, 15 bp, Homo sapiens
gcagttttcttaggt

SEQ ID NO: 811246 - DNA, 15 bp, Homo sapiens
cagttttcttaggtc

SEQ ID NO: 811247 - DNA, 15 bp, Homo sapiens
agttttcttaggtct

SEQ ID NO: 811248 - DNA, 15 bp, Homo sapiens
gttttcttaggtctc

SEQ ID NO: 811249 - DNA, 15 bp, Homo sapiens
ttttcttaggtctca

SEQ ID NO: 811250 - DNA, 15 bp, Homo sapiens
tttcttaggtctcaa

SEQ ID NO: 811251 - DNA, 15 bp, Homo sapiens
ttcttaggtctcaac

SEQ ID NO: 811252 - DNA, 15 bp, Homo sapiens
tcttaggtctcaact

SEQ ID NO: 811253 - DNA, 15 bp, Homo sapiens
cttaggtctcaactg

SEQ ID NO: 811254 - DNA, 15 bp, Homo sapiens
ttaggtctcaactga

SEQ ID NO: 811255 - DNA, 15 bp, Homo sapiens
taggtctcaactgag

SEQ ID NO: 811256 - DNA, 15 bp, Homo sapiens
aggtctcaactgaga

SEQ ID NO: 811257 - DNA, 15 bp, Homo sapiens
ggtctcaactgagag

SEQ ID NO: 811258 - DNA, 15 bp, Homo sapiens
gtctcaactgagagg

SEQ ID NO: 811259 - DNA, 15 bp, Homo sapiens
tctcaactgagagga

SEQ ID NO: 811260 - DNA, 15 bp, Homo sapiens
ctcaactgagaggat

SEQ ID NO: 811261 - DNA, 15 bp, Homo sapiens
tcaactgagaggatg

SEQ ID NO: 811262 - DNA, 15 bp, Homo sapiens
caactgagaggatgc

SEQ ID NO: 811263 - DNA, 15 bp, Homo sapiens
aactgagaggatgct

SEQ ID NO: 811264 - DNA, 15 bp, Homo sapiens
actgagaggatgctg

SEQ ID NO: 811265 - DNA, 15 bp, Homo sapiens
ctgagaggatgctgc

SEQ ID NO: 811266 - DNA, 15 bp, Homo sapiens
tgagaggatgctgcc

SEQ ID NO: 811267 - DNA, 15 bp, Homo sapiens
gagaggatgctgcct

SEQ ID NO: 811268 - DNA, 15 bp, Homo sapiens
agaggatgctgcctt

SEQ ID NO: 811269 - DNA, 15 bp, Homo sapiens
gaggatgctgccttg

SEQ ID NO: 811270 - DNA, 15 bp, Homo sapiens
aggatgctgccttgg

SEQ ID NO: 811271 - DNA, 15 bp, Homo sapiens
ggatgctgccttggg

SEQ ID NO: 811272 - DNA, 15 bp, Homo sapiens
gatgctgccttggga

SEQ ID NO: 811273 - DNA, 15 bp, Homo sapiens
atgctgccttgggag

SEQ ID NO: 811274 - DNA, 15 bp, Homo sapiens
tgctgccttgggaga

SEQ ID NO: 811275 - DNA, 15 bp, Homo sapiens
gctgccttgggagag

SEQ ID NO: 811276 - DNA, 15 bp, Homo sapiens
ctgccttgggagagg

SEQ ID NO: 811277 - DNA, 15 bp, Homo sapiens
tgccttgggagaggt

SEQ ID NO: 811278 - DNA, 15 bp, Homo sapiens
gccttgggagaggtc

SEQ ID NO: 811279 - DNA, 15 bp, Homo sapiens
ccttgggagaggtcc

SEQ ID NO: 811280 - DNA, 15 bp, Homo sapiens
cttgggagaggtccg

SEQ ID NO: 811281 - DNA, 15 bp, Homo sapiens
ttgggagaggtccga

SEQ ID NO: 811282 - DNA, 15 bp, Homo sapiens
tgggagaggtccgag

SEQ ID NO: 811283 - DNA, 15 bp, Homo sapiens
gggagaggtccgagg

SEQ ID NO: 811284 - DNA, 15 bp, Homo sapiens
ggagaggtccgaggc

SEQ ID NO: 811285 - DNA, 15 bp, Homo sapiens
gagaggtccgaggcc

SEQ ID NO: 811286 - DNA, 15 bp, Homo sapiens
agaggtccgaggcca

SEQ ID NO: 811287 - DNA, 15 bp, Homo sapiens
gaggtccgaggccat

SEQ ID NO: 811288 - DNA, 15 bp, Homo sapiens
aggtccgaggccatt

SEQ ID NO: 811289 - DNA, 15 bp, Homo sapiens
ggtccgaggccattg

SEQ ID NO: 811290 - DNA, 15 bp, Homo sapiens
gtccgaggccattgg

SEQ ID NO: 811291 - DNA, 15 bp, Homo sapiens
tccgaggccattggg

SEQ ID NO: 811292 - DNA, 15 bp, Homo sapiens
ccgaggccattgggg

SEQ ID NO: 811293 - DNA, 15 bp, Homo sapiens
cgaggccattggggt

SEQ ID NO: 811294 - DNA, 15 bp, Homo sapiens
gaggccattggggtg

SEQ ID NO: 811295 - DNA, 15 bp, Homo sapiens
aggccattggggtgt

SEQ ID NO: 811296 - DNA, 15 bp, Homo sapiens
ggccattggggtgtg

SEQ ID NO: 811297 - DNA, 15 bp, Homo sapiens
gccattggggtgtga

SEQ ID NO: 811298 - DNA, 15 bp, Homo sapiens
ccattggggtgtgag

SEQ ID NO: 811299 - DNA, 15 bp, Homo sapiens
cattggggtgtgagc

SEQ ID NO: 811300 - DNA, 15 bp, Homo sapiens
attggggtgtgagca

SEQ ID NO: 811301 - DNA, 15 bp, Homo sapiens
ttggggtgtgagcac

SEQ ID NO: 811302 - DNA, 15 bp, Homo sapiens
tggggtgtgagcaca

SEQ ID NO: 811303 - DNA, 15 bp, Homo sapiens
ggggtgtgagcacat

SEQ ID NO: 811304 - DNA, 15 bp, Homo sapiens
gggtgtgagcacatg

SEQ ID NO: 811305 - DNA, 15 bp, Homo sapiens
ggtgtgagcacatgc

SEQ ID NO: 811306 - DNA, 15 bp, Homo sapiens
gtgtgagcacatgct

SEQ ID NO: 811307 - DNA, 15 bp, Homo sapiens
tgtgagcacatgctg

SEQ ID NO: 811308 - DNA, 15 bp, Homo sapiens
gtgagcacatgctgg

SEQ ID NO: 811309 - DNA, 15 bp, Homo sapiens
tgagcacatgctgga

SEQ ID NO: 811310 - DNA, 15 bp, Homo sapiens
gagcacatgctggag

SEQ ID NO: 811311 - DNA, 15 bp, Homo sapiens
agcacatgctggagg

SEQ ID NO: 811312 - DNA, 15 bp, Homo sapiens
gcacatgctggaggc

SEQ ID NO: 811313 - DNA, 15 bp, Homo sapiens
cacatgctggaggcg

SEQ ID NO: 811314 - DNA, 15 bp, Homo sapiens
acatgctggaggcgt

SEQ ID NO: 811315 - DNA, 15 bp, Homo sapiens
catgctggaggcgtc

SEQ ID NO: 811316 - DNA, 15 bp, Homo sapiens
atgctggaggcgtca

SEQ ID NO: 811317 - DNA, 15 bp, Homo sapiens
tgctggaggcgtcac

SEQ ID NO: 811318 - DNA, 15 bp, Homo sapiens
gctggaggcgtcaca

SEQ ID NO: 811319 - DNA, 15 bp, Homo sapiens
ctggaggcgtcacag

SEQ ID NO: 811320 - DNA, 15 bp, Homo sapiens
tggaggcgtcacaga

SEQ ID NO: 811321 - DNA, 15 bp, Homo sapiens
ggaggcgtcacagac

SEQ ID NO: 811322 - DNA, 15 bp, Homo sapiens
gaggcgtcacagaca

SEQ ID NO: 811323 - DNA, 15 bp, Homo sapiens
aggcgtcacagacag

SEQ ID NO: 811324 - DNA, 15 bp, Homo sapiens
ggcgtcacagacaga

SEQ ID NO: 811325 - DNA, 15 bp, Homo sapiens
gcgtcacagacagag

SEQ ID NO: 811326 - DNA, 15 bp, Homo sapiens
cgtcacagacagagc

SEQ ID NO: 811327 - DNA, 15 bp, Homo sapiens
gtcacagacagagca

SEQ ID NO: 811328 - DNA, 15 bp, Homo sapiens
tcacagacagagcag

SEQ ID NO: 811329 - DNA, 15 bp, Homo sapiens
cacagacagagcagc

SEQ ID NO: 811330 - DNA, 15 bp, Homo sapiens
acagacagagcagct

SEQ ID NO: 811331 - DNA, 15 bp, Homo sapiens
cagacagagcagctg

SEQ ID NO: 811332 - DNA, 15 bp, Homo sapiens
agacagagcagctgt

SEQ ID NO: 811333 - DNA, 15 bp, Homo sapiens
gacagagcagctgtt

SEQ ID NO: 811334 - DNA, 15 bp, Homo sapiens
acagagcagctgttt

SEQ ID NO: 811335 - DNA, 15 bp, Homo sapiens
cagagcagctgttta

SEQ ID NO: 811336 - DNA, 15 bp, Homo sapiens
agagcagctgtttag

SEQ ID NO: 811337 - DNA, 15 bp, Homo sapiens
gagcagctgtttagt

SEQ ID NO: 811338 - DNA, 15 bp, Homo sapiens
agcagctgtttagtt

SEQ ID NO: 811339 - DNA, 15 bp, Homo sapiens
gcagctgtttagttg

SEQ ID NO: 811340 - DNA, 15 bp, Homo sapiens
cagctgtttagttga

SEQ ID NO: 811341 - DNA, 15 bp, Homo sapiens
agctgtttagttgaa

SEQ ID NO: 811342 - DNA, 15 bp, Homo sapiens
gctgtttagttgaaa

SEQ ID NO: 811343 - DNA, 15 bp, Homo sapiens
ctgtttagttgaaaa

SEQ ID NO: 811344 - DNA, 15 bp, Homo sapiens
tgtttagttgaaaat

SEQ ID NO: 811345 - DNA, 15 bp, Homo sapiens
gtttagttgaaaatg

SEQ ID NO: 811346 - DNA, 15 bp, Homo sapiens
tttagttgaaaatgg

SEQ ID NO: 811347 - DNA, 15 bp, Homo sapiens
ttagttgaaaatgga

SEQ ID NO: 811348 - DNA, 15 bp, Homo sapiens
tagttgaaaatggag

SEQ ID NO: 811349 - DNA, 15 bp, Homo sapiens
agttgaaaatggaga

SEQ ID NO: 811350 - DNA, 15 bp, Homo sapiens
gttgaaaatggagag

SEQ ID NO: 811351 - DNA, 15 bp, Homo sapiens
ttgaaaatggagagg

SEQ ID NO: 811352 - DNA, 15 bp, Homo sapiens
tgaaaatggagagga

SEQ ID NO: 811353 - DNA, 15 bp, Homo sapiens
gaaaatggagaggaa

SEQ ID NO: 811354 - DNA, 15 bp, Homo sapiens
aaaatggagaggaat

SEQ ID NO: 811355 - DNA, 15 bp, Homo sapiens
aaatggagaggaatc

SEQ ID NO: 811356 - DNA, 15 bp, Homo sapiens
aatggagaggaatca

SEQ ID NO: 811357 - DNA, 15 bp, Homo sapiens
atggagaggaatcaa

SEQ ID NO: 811358 - DNA, 15 bp, Homo sapiens
tggagaggaatcaag

SEQ ID NO: 811359 - DNA, 15 bp, Homo sapiens
ggagaggaatcaaga

SEQ ID NO: 811360 - DNA, 15 bp, Homo sapiens
gagaggaatcaagag

SEQ ID NO: 811361 - DNA, 15 bp, Homo sapiens
agaggaatcaagagt

SEQ ID NO: 811362 - DNA, 15 bp, Homo sapiens
gaggaatcaagagtg

SEQ ID NO: 811363 - DNA, 15 bp, Homo sapiens
aggaatcaagagtga

SEQ ID NO: 811364 - DNA, 15 bp, Homo sapiens
ggaatcaagagtgac

SEQ ID NO: 811365 - DNA, 15 bp, Homo sapiens
gaatcaagagtgact

SEQ ID NO: 811366 - DNA, 15 bp, Homo sapiens
aatcaagagtgactc

SEQ ID NO: 811367 - DNA, 15 bp, Homo sapiens
atcaagagtgactct

SEQ ID NO: 811368 - DNA, 15 bp, Homo sapiens
tcaagagtgactctt

SEQ ID NO: 811369 - DNA, 15 bp, Homo sapiens
caagagtgactctta

SEQ ID NO: 811370 - DNA, 15 bp, Homo sapiens
aagagtgactcttag

SEQ ID NO: 811371 - DNA, 15 bp, Homo sapiens
agagtgactcttagg

SEQ ID NO: 811372 - DNA, 15 bp, Homo sapiens
gagtgactcttaggt

SEQ ID NO: 811373 - DNA, 15 bp, Homo sapiens
agtgactcttaggtt

SEQ ID NO: 811374 - DNA, 15 bp, Homo sapiens
gtgactcttaggttg

SEQ ID NO: 811375 - DNA, 15 bp, Homo sapiens
tgactcttaggttgt

SEQ ID NO: 811376 - DNA, 15 bp, Homo sapiens
gactcttaggttgtt

SEQ ID NO: 811377 - DNA, 15 bp, Homo sapiens
actcttaggttgttg

SEQ ID NO: 811378 - DNA, 15 bp, Homo sapiens
ctcttaggttgttga

SEQ ID NO: 811379 - DNA, 15 bp, Homo sapiens
tcttaggttgttgac

SEQ ID NO: 811380 - DNA, 15 bp, Homo sapiens
cttaggttgttgacc

SEQ ID NO: 811381 - DNA, 15 bp, Homo sapiens
ttaggttgttgacca

SEQ ID NO: 811382 - DNA, 15 bp, Homo sapiens
taggttgttgaccat

SEQ ID NO: 811383 - DNA, 15 bp, Homo sapiens
aggttgttgaccata

SEQ ID NO: 811384 - DNA, 15 bp, Homo sapiens
ggttgttgaccataa

SEQ ID NO: 811385 - DNA, 15 bp, Homo sapiens
gttgttgaccataac

SEQ ID NO: 811386 - DNA, 15 bp, Homo sapiens
ttgttgaccataaca

SEQ ID NO: 811387 - DNA, 15 bp, Homo sapiens
tgttgaccataacag

SEQ ID NO: 811388 - DNA, 15 bp, Homo sapiens
gttgaccataacagg

SEQ ID NO: 811389 - DNA, 15 bp, Homo sapiens
ttgaccataacaggt

SEQ ID NO: 811390 - DNA, 15 bp, Homo sapiens
tgaccataacaggta

SEQ ID NO: 811391 - DNA, 15 bp, Homo sapiens
gaccataacaggtat

SEQ ID NO: 811392 - DNA, 15 bp, Homo sapiens
accataacaggtatt

SEQ ID NO: 811393 - DNA, 15 bp, Homo sapiens
ccataacaggtattt

SEQ ID NO: 811394 - DNA, 15 bp, Homo sapiens
cataacaggtatttt

SEQ ID NO: 811395 - DNA, 15 bp, Homo sapiens
ataacaggtattttc

SEQ ID NO: 811396 - DNA, 15 bp, Homo sapiens
taacaggtattttcc

SEQ ID NO: 811397 - DNA, 15 bp, Homo sapiens
aacaggtattttcct

SEQ ID NO: 811398 - DNA, 15 bp, Homo sapiens
acaggtattttcctc

SEQ ID NO: 811399 - DNA, 15 bp, Homo sapiens
caggtattttcctcc

SEQ ID NO: 811400 - DNA, 15 bp, Homo sapiens
aggtattttcctcct

SEQ ID NO: 811401 - DNA, 15 bp, Homo sapiens
ggtattttcctccta

SEQ ID NO: 811402 - DNA, 15 bp, Homo sapiens
gtattttcctcctag

SEQ ID NO: 811403 - DNA, 15 bp, Homo sapiens
tattttcctcctaga

SEQ ID NO: 811404 - DNA, 15 bp, Homo sapiens
attttcctcctagaa

SEQ ID NO: 811405 - DNA, 15 bp, Homo sapiens
ttttcctcctagaaa

SEQ ID NO: 811406 - DNA, 15 bp, Homo sapiens
tttcctcctagaaaa

SEQ ID NO: 811407 - DNA, 15 bp, Homo sapiens
ttcctcctagaaaag

SEQ ID NO: 811408 - DNA, 15 bp, Homo sapiens
tcctcctagaaaagc

SEQ ID NO: 811409 - DNA, 15 bp, Homo sapiens
cctcctagaaaagct

SEQ ID NO: 811410 - DNA, 15 bp, Homo sapiens
ctcctagaaaagctg

SEQ ID NO: 811411 - DNA, 15 bp, Homo sapiens
tcctagaaaagctga

SEQ ID NO: 811412 - DNA, 15 bp, Homo sapiens
cctagaaaagctgag

SEQ ID NO: 811413 - DNA, 15 bp, Homo sapiens
ctagaaaagctgagc

SEQ ID NO: 811414 - DNA, 15 bp, Homo sapiens
tagaaaagctgagct

SEQ ID NO: 811415 - DNA, 15 bp, Homo sapiens
agaaaagctgagctt

SEQ ID NO: 811416 - DNA, 15 bp, Homo sapiens
gaaaagctgagcttc

SEQ ID NO: 811417 - DNA, 15 bp, Homo sapiens
aaaagctgagcttca

SEQ ID NO: 811418 - DNA, 15 bp, Homo sapiens
aaagctgagcttcag

SEQ ID NO: 811419 - DNA, 15 bp, Homo sapiens
aagctgagcttcagt

SEQ ID NO: 811420 - DNA, 15 bp, Homo sapiens
agctgagcttcagtt

SEQ ID NO: 811421 - DNA, 15 bp, Homo sapiens
gctgagcttcagtta

SEQ ID NO: 811422 - DNA, 15 bp, Homo sapiens
ctgagcttcagttac

SEQ ID NO: 811423 - DNA, 15 bp, Homo sapiens
tgagcttcagttaca

SEQ ID NO: 811424 - DNA, 15 bp, Homo sapiens
gagcttcagttacaa

SEQ ID NO: 811425 - DNA, 15 bp, Homo sapiens
agcttcagttacaat

SEQ ID NO: 811426 - DNA, 15 bp, Homo sapiens
gcttcagttacaatc

SEQ ID NO: 811427 - DNA, 15 bp, Homo sapiens
cttcagttacaatct

SEQ ID NO: 811428 - DNA, 15 bp, Homo sapiens
ttcagttacaatctg

SEQ ID NO: 811429 - DNA, 15 bp, Homo sapiens
tcagttacaatctgc

SEQ ID NO: 811430 - DNA, 15 bp, Homo sapiens
cagttacaatctgca

SEQ ID NO: 811431 - DNA, 15 bp, Homo sapiens
agttacaatctgcag

SEQ ID NO: 811432 - DNA, 15 bp, Homo sapiens
gttacaatctgcaga

SEQ ID NO: 811433 - DNA, 15 bp, Homo sapiens
ttacaatctgcagaa

SEQ ID NO: 811434 - DNA, 15 bp, Homo sapiens
tacaatctgcagaaa

SEQ ID NO: 811435 - DNA, 15 bp, Homo sapiens
acaatctgcagaaat

SEQ ID NO: 811436 - DNA, 15 bp, Homo sapiens
caatctgcagaaatg

SEQ ID NO: 811437 - DNA, 15 bp, Homo sapiens
aatctgcagaaatgc

SEQ ID NO: 811438 - DNA, 15 bp, Homo sapiens
atctgcagaaatgct

SEQ ID NO: 811439 - DNA, 15 bp, Homo sapiens
tctgcagaaatgctg

SEQ ID NO: 811440 - DNA, 15 bp, Homo sapiens
ctgcagaaatgctgg

SEQ ID NO: 811441 - DNA, 15 bp, Homo sapiens
tgcagaaatgctggg

SEQ ID NO: 811442 - DNA, 15 bp, Homo sapiens
gcagaaatgctggga

SEQ ID NO: 811443 - DNA, 15 bp, Homo sapiens
cagaaatgctgggag

SEQ ID NO: 811444 - DNA, 15 bp, Homo sapiens
agaaatgctgggagg

SEQ ID NO: 811445 - DNA, 15 bp, Homo sapiens
gaaatgctgggagga

SEQ ID NO: 811446 - DNA, 15 bp, Homo sapiens
aaatgctgggaggat

SEQ ID NO: 811447 - DNA, 15 bp, Homo sapiens
aatgctgggaggatt

SEQ ID NO: 811448 - DNA, 15 bp, Homo sapiens
atgctgggaggatta

SEQ ID NO: 811449 - DNA, 15 bp, Homo sapiens
ctgggaggattagtg

SEQ ID NO: 811450 - DNA, 15 bp, Homo sapiens
tgggaggattagtgg

SEQ ID NO: 811451 - DNA, 15 bp, Homo sapiens
gggaggattagtggc

SEQ ID NO: 811452 - DNA, 15 bp, Homo sapiens
ggaggattagtggca

SEQ ID NO: 811453 - DNA, 15 bp, Homo sapiens
gaggattagtggcaa

SEQ ID NO: 811454 - DNA, 15 bp, Homo sapiens
aggattagtggcaaa

SEQ ID NO: 811455 - DNA, 15 bp, Homo sapiens
ggattagtggcaaac

SEQ ID NO: 811456 - DNA, 15 bp, Homo sapiens
gattagtggcaaacc

SEQ ID NO: 811457 - DNA, 15 bp, Homo sapiens
attagtggcaaacct

SEQ ID NO: 811458 - DNA, 15 bp, Homo sapiens
ttagtggcaaaccta

SEQ ID NO: 811459 - DNA, 15 bp, Homo sapiens
tagtggcaaacctaa

SEQ ID NO: 811460 - DNA, 15 bp, Homo sapiens
agtggcaaacctaaa

SEQ ID NO: 811461 - DNA, 15 bp, Homo sapiens
gtggcaaacctaaaa

SEQ ID NO: 811462 - DNA, 15 bp, Homo sapiens
tggcaaacctaaaaa

SEQ ID NO: 811463 - DNA, 15 bp, Homo sapiens
ggcaaacctaaaaaa

SEQ ID NO: 811464 - DNA, 15 bp, Homo sapiens
gcaaacctaaaaaaa

SEQ ID NO: 811465 - DNA, 15 bp, Homo sapiens
caaacctaaaaaaaa

SEQ ID NO: 811466 - DNA, 15 bp, Homo sapiens
aaacctaaaaaaaag

SEQ ID NO: 811467 - DNA, 15 bp, Homo sapiens
aacctaaaaaaaaga

SEQ ID NO: 811468 - DNA, 15 bp, Homo sapiens
acctaaaaaaaagaa

SEQ ID NO: 811469 - DNA, 15 bp, Homo sapiens
cctaaaaaaaagaaa

SEQ ID NO: 811470 - DNA, 15 bp, Homo sapiens
ctaaaaaaaagaaaa

SEQ ID NO: 811471 - DNA, 15 bp, Homo sapiens
taaaaaaaagaaaaa

SEQ ID NO: 811472 - DNA, 15 bp, Homo sapiens
aaaaaaaagaaaaac

SEQ ID NO: 811473 - DNA, 15 bp, Homo sapiens
aaaaaaagaaaaaca

SEQ ID NO: 811474 - DNA, 15 bp, Homo sapiens
aaaaaagaaaaacac

SEQ ID NO: 811475 - DNA, 15 bp, Homo sapiens
aaaaagaaaaacact

SEQ ID NO: 811476 - DNA, 15 bp, Homo sapiens
aaaagaaaaacacta

SEQ ID NO: 811477 - DNA, 15 bp, Homo sapiens
aaagaaaaacactag

SEQ ID NO: 811478 - DNA, 15 bp, Homo sapiens
aagaaaaacactaga

SEQ ID NO: 811479 - DNA, 15 bp, Homo sapiens
agaaaaacactagaa

SEQ ID NO: 811480 - DNA, 15 bp, Homo sapiens
gaaaaacactagaag

SEQ ID NO: 811481 - DNA, 15 bp, Homo sapiens
aaaaacactagaagc

SEQ ID NO: 811482 - DNA, 15 bp, Homo sapiens
aaaacactagaagct

SEQ ID NO: 811483 - DNA, 15 bp, Homo sapiens
aaacactagaagctt

SEQ ID NO: 811484 - DNA, 15 bp, Homo sapiens
aacactagaagctta

SEQ ID NO: 811485 - DNA, 15 bp, Homo sapiens
acactagaagcttat

SEQ ID NO: 811486 - DNA, 15 bp, Homo sapiens
cactagaagcttatc

SEQ ID NO: 811487 - DNA, 15 bp, Homo sapiens
actagaagcttatcg

SEQ ID NO: 811488 - DNA, 15 bp, Homo sapiens
ctagaagcttatcgg

SEQ ID NO: 811489 - DNA, 15 bp, Homo sapiens
tagaagcttatcgga

SEQ ID NO: 811490 - DNA, 15 bp, Homo sapiens
agaagcttatcggag

SEQ ID NO: 811491 - DNA, 15 bp, Homo sapiens
gaagcttatcggaga

SEQ ID NO: 811492 - DNA, 15 bp, Homo sapiens
aagcttatcggagag

SEQ ID NO: 811493 - DNA, 15 bp, Homo sapiens
agcttatcggagagt

SEQ ID NO: 811494 - DNA, 15 bp, Homo sapiens
gcttatcggagagtt

SEQ ID NO: 811495 - DNA, 15 bp, Homo sapiens
cttatcggagagttg

SEQ ID NO: 811496 - DNA, 15 bp, Homo sapiens
ttatcggagagttgg

SEQ ID NO: 811497 - DNA, 15 bp, Homo sapiens
tatcggagagttggt

SEQ ID NO: 811498 - DNA, 15 bp, Homo sapiens
atcggagagttggtt

SEQ ID NO: 811499 - DNA, 15 bp, Homo sapiens
tcggagagttggttt

SEQ ID NO: 811500 - DNA, 15 bp, Homo sapiens
cggagagttggtttg

SEQ ID NO: 811501 - DNA, 15 bp, Homo sapiens
ggagagttggtttgc

SEQ ID NO: 811502 - DNA, 15 bp, Homo sapiens
gagagttggtttgca

SEQ ID NO: 811503 - DNA, 15 bp, Homo sapiens
agagttggtttgcaa

SEQ ID NO: 811504 - DNA, 15 bp, Homo sapiens
gagttggtttgcaaa

SEQ ID NO: 811505 - DNA, 15 bp, Homo sapiens
agttggtttgcaaag

SEQ ID NO: 811506 - DNA, 15 bp, Homo sapiens
gttggtttgcaaagt

SEQ ID NO: 811507 - DNA, 15 bp, Homo sapiens
ttggtttgcaaagtt

SEQ ID NO: 811508 - DNA, 15 bp, Homo sapiens
tggtttgcaaagttt

SEQ ID NO: 811509 - DNA, 15 bp, Homo sapiens
ggtttgcaaagtttc

SEQ ID NO: 811510 - DNA, 15 bp, Homo sapiens
gtttgcaaagtttca

SEQ ID NO: 811511 - DNA, 15 bp, Homo sapiens
tttgcaaagtttcac

SEQ ID NO: 811512 - DNA, 15 bp, Homo sapiens
ttgcaaagtttcact

SEQ ID NO: 811513 - DNA, 15 bp, Homo sapiens
tgcaaagtttcacta

SEQ ID NO: 811514 - DNA, 15 bp, Homo sapiens
gcaaagtttcactat

SEQ ID NO: 811515 - DNA, 15 bp, Homo sapiens
caaagtttcactatc

SEQ ID NO: 811516 - DNA, 15 bp, Homo sapiens
aaagtttcactatca

SEQ ID NO: 811517 - DNA, 15 bp, Homo sapiens
aagtttcactatcaa

SEQ ID NO: 811518 - DNA, 15 bp, Homo sapiens
agtttcactatcaat

SEQ ID NO: 811519 - DNA, 15 bp, Homo sapiens
gtttcactatcaatt

SEQ ID NO: 811520 - DNA, 15 bp, Homo sapiens
tttcactatcaattt

SEQ ID NO: 811521 - DNA, 15 bp, Homo sapiens
ttcactatcaatttc

SEQ ID NO: 811522 - DNA, 15 bp, Homo sapiens
tcactatcaatttca

SEQ ID NO: 811523 - DNA, 15 bp, Homo sapiens
cactatcaatttcat

SEQ ID NO: 811524 - DNA, 15 bp, Homo sapiens
actatcaatttcatt

SEQ ID NO: 811525 - DNA, 15 bp, Homo sapiens
ctatcaatttcattg

SEQ ID NO: 811526 - DNA, 15 bp, Homo sapiens
tatcaatttcattgt

SEQ ID NO: 811527 - DNA, 15 bp, Homo sapiens
atcaatttcattgta

SEQ ID NO: 811528 - DNA, 15 bp, Homo sapiens
tcaatttcattgtac

SEQ ID NO: 811529 - DNA, 15 bp, Homo sapiens
caatttcattgtacc

SEQ ID NO: 811530 - DNA, 15 bp, Homo sapiens
aatttcattgtacct

SEQ ID NO: 811531 - DNA, 15 bp, Homo sapiens
atttcattgtacctt

SEQ ID NO: 811532 - DNA, 15 bp, Homo sapiens
tttcattgtaccttt

SEQ ID NO: 811533 - DNA, 15 bp, Homo sapiens
ttcattgtacctttt

SEQ ID NO: 811534 - DNA, 15 bp, Homo sapiens
tcattgtacctttta

SEQ ID NO: 811535 - DNA, 15 bp, Homo sapiens
cattgtaccttttag

SEQ ID NO: 811536 - DNA, 15 bp, Homo sapiens
attgtaccttttagc

SEQ ID NO: 811537 - DNA, 15 bp, Homo sapiens
ttgtaccttttagca

SEQ ID NO: 811538 - DNA, 15 bp, Homo sapiens
tgtaccttttagcag

SEQ ID NO: 811539 - DNA, 15 bp, Homo sapiens
gtaccttttagcagg

SEQ ID NO: 811540 - DNA, 15 bp, Homo sapiens
taccttttagcaggg

SEQ ID NO: 811541 - DNA, 15 bp, Homo sapiens
accttttagcaggga

SEQ ID NO: 811542 - DNA, 15 bp, Homo sapiens
ccttttagcagggaa

SEQ ID NO: 811543 - DNA, 15 bp, Homo sapiens
cttttagcagggaaa

SEQ ID NO: 811544 - DNA, 15 bp, Homo sapiens
ttttagcagggaaaa

SEQ ID NO: 811545 - DNA, 15 bp, Homo sapiens
tttagcagggaaaaa

SEQ ID NO: 811546 - DNA, 15 bp, Homo sapiens
ttagcagggaaaaat

SEQ ID NO: 811547 - DNA, 15 bp, Homo sapiens
tagcagggaaaaata

SEQ ID NO: 811548 - DNA, 15 bp, Homo sapiens
agcagggaaaaatat

SEQ ID NO: 811549 - DNA, 15 bp, Homo sapiens
gcagggaaaaatatt

SEQ ID NO: 811550 - DNA, 15 bp, Homo sapiens
cagggaaaaatattc

SEQ ID NO: 811551 - DNA, 15 bp, Homo sapiens
agggaaaaatattca

SEQ ID NO: 811552 - DNA, 15 bp, Homo sapiens
gggaaaaatattcat

SEQ ID NO: 811553 - DNA, 15 bp, Homo sapiens
ggaaaaatattcatc

SEQ ID NO: 811554 - DNA, 15 bp, Homo sapiens
gaaaaatattcatca

SEQ ID NO: 811555 - DNA, 15 bp, Homo sapiens
aaaaatattcatcat

SEQ ID NO: 811556 - DNA, 15 bp, Homo sapiens
aaaatattcatcata

SEQ ID NO: 811557 - DNA, 15 bp, Homo sapiens
aaatattcatcatac

SEQ ID NO: 811558 - DNA, 15 bp, Homo sapiens
aatattcatcataca

SEQ ID NO: 811559 - DNA, 15 bp, Homo sapiens
atattcatcatacat

SEQ ID NO: 811560 - DNA, 15 bp, Homo sapiens
tattcatcatacatg

SEQ ID NO: 811561 - DNA, 15 bp, Homo sapiens
attcatcatacatgc

SEQ ID NO: 811562 - DNA, 15 bp, Homo sapiens
ttcatcatacatgca

SEQ ID NO: 811563 - DNA, 15 bp, Homo sapiens
tcatcatacatgcac

SEQ ID NO: 811564 - DNA, 15 bp, Homo sapiens
catcatacatgcaca

SEQ ID NO: 811565 - DNA, 15 bp, Homo sapiens
atcatacatgcacac

SEQ ID NO: 811566 - DNA, 15 bp, Homo sapiens
tcatacatgcacaca

SEQ ID NO: 811567 - DNA, 15 bp, Homo sapiens
catacatgcacacaa

SEQ ID NO: 811568 - DNA, 15 bp, Homo sapiens
atacatgcacacaaa

SEQ ID NO: 811569 - DNA, 15 bp, Homo sapiens
tacatgcacacaaat

SEQ ID NO: 811570 - DNA, 15 bp, Homo sapiens
acatgcacacaaatt

SEQ ID NO: 811571 - DNA, 15 bp, Homo sapiens
catgcacacaaattt

SEQ ID NO: 811572 - DNA, 15 bp, Homo sapiens
atgcacacaaattta

SEQ ID NO: 811573 - DNA, 15 bp, Homo sapiens
tgcacacaaatttac

SEQ ID NO: 811574 - DNA, 15 bp, Homo sapiens
gcacacaaatttaca

SEQ ID NO: 811575 - DNA, 15 bp, Homo sapiens
cacacaaatttacac

SEQ ID NO: 811576 - DNA, 15 bp, Homo sapiens
acacaaatttacaca

SEQ ID NO: 811577 - DNA, 15 bp, Homo sapiens
cacaaatttacacac

SEQ ID NO: 811578 - DNA, 15 bp, Homo sapiens
acaaatttacacaca

SEQ ID NO: 811579 - DNA, 15 bp, Homo sapiens
caaatttacacacaa

SEQ ID NO: 811580 - DNA, 15 bp, Homo sapiens
aaatttacacacaac

SEQ ID NO: 811581 - DNA, 15 bp, Homo sapiens
aatttacacacaact

SEQ ID NO: 811582 - DNA, 15 bp, Homo sapiens
atttacacacaactt

SEQ ID NO: 811583 - DNA, 15 bp, Homo sapiens
tttacacacaacttc

SEQ ID NO: 811584 - DNA, 15 bp, Homo sapiens
ttacacacaacttca

SEQ ID NO: 811585 - DNA, 15 bp, Homo sapiens
tacacacaacttcac

SEQ ID NO: 811586 - DNA, 15 bp, Homo sapiens
acacacaacttcaca

SEQ ID NO: 811587 - DNA, 15 bp, Homo sapiens
cacacaacttcacat

SEQ ID NO: 811588 - DNA, 15 bp, Homo sapiens
acacaacttcacatc

SEQ ID NO: 811589 - DNA, 15 bp, Homo sapiens
cacaacttcacatct

SEQ ID NO: 811590 - DNA, 15 bp, Homo sapiens
acaacttcacatctt

SEQ ID NO: 811591 - DNA, 15 bp, Homo sapiens
caacttcacatcttg

SEQ ID NO: 811592 - DNA, 15 bp, Homo sapiens
aacttcacatcttga

SEQ ID NO: 811593 - DNA, 15 bp, Homo sapiens
acttcacatcttgaa

SEQ ID NO: 811594 - DNA, 15 bp, Homo sapiens
cttcacatcttgaaa

SEQ ID NO: 811595 - DNA, 15 bp, Homo sapiens
ttcacatcttgaaaa

SEQ ID NO: 811596 - DNA, 15 bp, Homo sapiens
tcacatcttgaaaag

SEQ ID NO: 811597 - DNA, 15 bp, Homo sapiens
cacatcttgaaaagc

SEQ ID NO: 811598 - DNA, 15 bp, Homo sapiens
acatcttgaaaagca

SEQ ID NO: 811599 - DNA, 15 bp, Homo sapiens
catcttgaaaagcaa

SEQ ID NO: 811600 - DNA, 15 bp, Homo sapiens
atcttgaaaagcaac

SEQ ID NO: 811601 - DNA, 15 bp, Homo sapiens
tcttgaaaagcaaca

SEQ ID NO: 811602 - DNA, 15 bp, Homo sapiens
cttgaaaagcaacaa

SEQ ID NO: 811603 - DNA, 15 bp, Homo sapiens
ttgaaaagcaacaat

SEQ ID NO: 811604 - DNA, 15 bp, Homo sapiens
tgaaaagcaacaata

SEQ ID NO: 811605 - DNA, 15 bp, Homo sapiens
gaaaagcaacaatat

SEQ ID NO: 811606 - DNA, 15 bp, Homo sapiens
aaaagcaacaatata

SEQ ID NO: 811607 - DNA, 15 bp, Homo sapiens
aaagcaacaatataa

SEQ ID NO: 811608 - DNA, 15 bp, Homo sapiens
aagcaacaatataaa

SEQ ID NO: 811609 - DNA, 15 bp, Homo sapiens
agcaacaatataaaa

SEQ ID NO: 811610 - DNA, 15 bp, Homo sapiens
gcaacaatataaaac

SEQ ID NO: 811611 - DNA, 15 bp, Homo sapiens
caacaatataaaact

SEQ ID NO: 811612 - DNA, 15 bp, Homo sapiens
aacaatataaaactc

SEQ ID NO: 811613 - DNA, 15 bp, Homo sapiens
acaatataaaactca

SEQ ID NO: 811614 - DNA, 15 bp, Homo sapiens
caatataaaactcac

SEQ ID NO: 811615 - DNA, 15 bp, Homo sapiens
aatataaaactcaca

SEQ ID NO: 811616 - DNA, 15 bp, Homo sapiens
atataaaactcacac

SEQ ID NO: 811617 - DNA, 15 bp, Homo sapiens
tataaaactcacacg

SEQ ID NO: 811618 - DNA, 15 bp, Homo sapiens
ataaaactcacacgc

SEQ ID NO: 811619 - DNA, 15 bp, Homo sapiens
taaaactcacacgct

SEQ ID NO: 811620 - DNA, 15 bp, Homo sapiens
aaaactcacacgctt

SEQ ID NO: 811621 - DNA, 15 bp, Homo sapiens
aaactcacacgcttt

SEQ ID NO: 811622 - DNA, 15 bp, Homo sapiens
aactcacacgcttta

SEQ ID NO: 811623 - DNA, 15 bp, Homo sapiens
actcacacgctttag

SEQ ID NO: 811624 - DNA, 15 bp, Homo sapiens
ctcacacgctttaga

SEQ ID NO: 811625 - DNA, 15 bp, Homo sapiens
tcacacgctttagaa

SEQ ID NO: 811626 - DNA, 15 bp, Homo sapiens
cacacgctttagaaa

SEQ ID NO: 811627 - DNA, 15 bp, Homo sapiens
acacgctttagaaag

SEQ ID NO: 811628 - DNA, 15 bp, Homo sapiens
cacgctttagaaagc

SEQ ID NO: 811629 - DNA, 15 bp, Homo sapiens
acgctttagaaagcc

SEQ ID NO: 811630 - DNA, 15 bp, Homo sapiens
cgctttagaaagcca

SEQ ID NO: 811631 - DNA, 15 bp, Homo sapiens
gctttagaaagccaa

SEQ ID NO: 811632 - DNA, 15 bp, Homo sapiens
ctttagaaagccaag

SEQ ID NO: 811633 - DNA, 15 bp, Homo sapiens
tttagaaagccaagc

SEQ ID NO: 811634 - DNA, 15 bp, Homo sapiens
ttagaaagccaagcc

SEQ ID NO: 811635 - DNA, 15 bp, Homo sapiens
tagaaagccaagcca

SEQ ID NO: 811636 - DNA, 15 bp, Homo sapiens
agaaagccaagccag

SEQ ID NO: 811637 - DNA, 15 bp, Homo sapiens
gaaagccaagccagg

SEQ ID NO: 811638 - DNA, 15 bp, Homo sapiens
aaagccaagccaggg

SEQ ID NO: 811639 - DNA, 15 bp, Homo sapiens
aagccaagccaggga

SEQ ID NO: 811640 - DNA, 15 bp, Homo sapiens
agccaagccagggaa

SEQ ID NO: 811641 - DNA, 15 bp, Homo sapiens
gccaagccagggaag

SEQ ID NO: 811642 - DNA, 15 bp, Homo sapiens
ccaagccagggaaga

SEQ ID NO: 811643 - DNA, 15 bp, Homo sapiens
caagccagggaagaa

SEQ ID NO: 811644 - DNA, 15 bp, Homo sapiens
aagccagggaagaaa

SEQ ID NO: 811645 - DNA, 15 bp, Homo sapiens
agccagggaagaaag

SEQ ID NO: 811646 - DNA, 15 bp, Homo sapiens
gccagggaagaaaga

SEQ ID NO: 811647 - DNA, 15 bp, Homo sapiens
ccagggaagaaagaa

SEQ ID NO: 811648 - DNA, 15 bp, Homo sapiens
cagggaagaaagaat

SEQ ID NO: 811649 - DNA, 15 bp, Homo sapiens
agggaagaaagaatg

SEQ ID NO: 811650 - DNA, 15 bp, Homo sapiens
gggaagaaagaatga

SEQ ID NO: 811651 - DNA, 15 bp, Homo sapiens
ggaagaaagaatgaa

SEQ ID NO: 811652 - DNA, 15 bp, Homo sapiens
gaagaaagaatgaac

SEQ ID NO: 811653 - DNA, 15 bp, Homo sapiens
aagaaagaatgaacc

SEQ ID NO: 811654 - DNA, 15 bp, Homo sapiens
agaaagaatgaaccc

SEQ ID NO: 811655 - DNA, 15 bp, Homo sapiens
gaaagaatgaacccc

SEQ ID NO: 811656 - DNA, 15 bp, Homo sapiens
aaagaatgaaccccc

SEQ ID NO: 811657 - DNA, 15 bp, Homo sapiens
aagaatgaaccccct

SEQ ID NO: 811658 - DNA, 15 bp, Homo sapiens
agaatgaaccccctg

SEQ ID NO: 811659 - DNA, 15 bp, Homo sapiens
gaatgaaccccctgc

SEQ ID NO: 811660 - DNA, 15 bp, Homo sapiens
aatgaaccccctgcc

SEQ ID NO: 811661 - DNA, 15 bp, Homo sapiens
atgaaccccctgcct

SEQ ID NO: 811662 - DNA, 15 bp, Homo sapiens
tgaaccccctgcctt

SEQ ID NO: 811663 - DNA, 15 bp, Homo sapiens
gaaccccctgccttg

SEQ ID NO: 811664 - DNA, 15 bp, Homo sapiens
aaccccctgccttgt

SEQ ID NO: 811665 - DNA, 15 bp, Homo sapiens
accccctgccttgtg

SEQ ID NO: 811666 - DNA, 15 bp, Homo sapiens
ccccctgccttgtga

SEQ ID NO: 811667 - DNA, 15 bp, Homo sapiens
cccctgccttgtgac

SEQ ID NO: 811668 - DNA, 15 bp, Homo sapiens
ccctgccttgtgact

SEQ ID NO: 811669 - DNA, 15 bp, Homo sapiens
cctgccttgtgactt

SEQ ID NO: 811670 - DNA, 15 bp, Homo sapiens
ctgccttgtgacttc

SEQ ID NO: 811671 - DNA, 15 bp, Homo sapiens
tgccttgtgacttct

SEQ ID NO: 811672 - DNA, 15 bp, Homo sapiens
gccttgtgacttctc

SEQ ID NO: 811673 - DNA, 15 bp, Homo sapiens
ccttgtgacttctca

SEQ ID NO: 811674 - DNA, 15 bp, Homo sapiens
cttgtgacttctcat

SEQ ID NO: 811675 - DNA, 15 bp, Homo sapiens
ttgtgacttctcatg

SEQ ID NO: 811676 - DNA, 15 bp, Homo sapiens
tgtgacttctcatgc

SEQ ID NO: 811677 - DNA, 15 bp, Homo sapiens
gtgacttctcatgct

SEQ ID NO: 811678 - DNA, 15 bp, Homo sapiens
tgacttctcatgctg

SEQ ID NO: 811679 - DNA, 15 bp, Homo sapiens
gacttctcatgctga

SEQ ID NO: 811680 - DNA, 15 bp, Homo sapiens
acttctcatgctgat

SEQ ID NO: 811681 - DNA, 15 bp, Homo sapiens
cttctcatgctgata

SEQ ID NO: 811682 - DNA, 15 bp, Homo sapiens
ttctcatgctgatac

SEQ ID NO: 811683 - DNA, 15 bp, Homo sapiens
tctcatgctgatact

SEQ ID NO: 811684 - DNA, 15 bp, Homo sapiens
ctcatgctgatactc

SEQ ID NO: 811685 - DNA, 15 bp, Homo sapiens
tcatgctgatactca

SEQ ID NO: 811686 - DNA, 15 bp, Homo sapiens
catgctgatactcaa

SEQ ID NO: 811687 - DNA, 15 bp, Homo sapiens
atgctgatactcaat

SEQ ID NO: 811688 - DNA, 15 bp, Homo sapiens
tgctgatactcaatt

SEQ ID NO: 811689 - DNA, 15 bp, Homo sapiens
gctgatactcaattt

SEQ ID NO: 811690 - DNA, 15 bp, Homo sapiens
ctgatactcaatttg

SEQ ID NO: 811691 - DNA, 15 bp, Homo sapiens
tgatactcaatttgt

SEQ ID NO: 811692 - DNA, 15 bp, Homo sapiens
gatactcaatttgtt

SEQ ID NO: 811693 - DNA, 15 bp, Homo sapiens
atactcaatttgttc

SEQ ID NO: 811694 - DNA, 15 bp, Homo sapiens
tactcaatttgttca

SEQ ID NO: 811695 - DNA, 15 bp, Homo sapiens
actcaatttgttcag

SEQ ID NO: 811696 - DNA, 15 bp, Homo sapiens
ctcaatttgttcagt

SEQ ID NO: 811697 - DNA, 15 bp, Homo sapiens
tcaatttgttcagtg

SEQ ID NO: 811698 - DNA, 15 bp, Homo sapiens
caatttgttcagtgg

SEQ ID NO: 811699 - DNA, 15 bp, Homo sapiens
aatttgttcagtgga

SEQ ID NO: 811700 - DNA, 15 bp, Homo sapiens
atttgttcagtggaa

SEQ ID NO: 811701 - DNA, 15 bp, Homo sapiens
tttgttcagtggaaa

SEQ ID NO: 811702 - DNA, 15 bp, Homo sapiens
ttgttcagtggaaac

SEQ ID NO: 811703 - DNA, 15 bp, Homo sapiens
tgttcagtggaaacg

SEQ ID NO: 811704 - DNA, 15 bp, Homo sapiens
gttcagtggaaacgg

SEQ ID NO: 811705 - DNA, 15 bp, Homo sapiens
ttcagtggaaacgga

SEQ ID NO: 811706 - DNA, 15 bp, Homo sapiens
tcagtggaaacggat

SEQ ID NO: 811707 - DNA, 15 bp, Homo sapiens
cagtggaaacggatc

SEQ ID NO: 811708 - DNA, 15 bp, Homo sapiens
agtggaaacggatca

SEQ ID NO: 811709 - DNA, 15 bp, Homo sapiens
gtggaaacggatcag

SEQ ID NO: 811710 - DNA, 15 bp, Homo sapiens
tggaaacggatcagt

SEQ ID NO: 811711 - DNA, 15 bp, Homo sapiens
ggaaacggatcagtg

SEQ ID NO: 811712 - DNA, 15 bp, Homo sapiens
gaaacggatcagtga

SEQ ID NO: 811713 - DNA, 15 bp, Homo sapiens
aaacggatcagtgag

SEQ ID NO: 811714 - DNA, 15 bp, Homo sapiens
aacggatcagtgagt

SEQ ID NO: 811715 - DNA, 15 bp, Homo sapiens
acggatcagtgagta

SEQ ID NO: 811716 - DNA, 15 bp, Homo sapiens
cggatcagtgagtag

SEQ ID NO: 811717 - DNA, 15 bp, Homo sapiens
ggatcagtgagtaga

SEQ ID NO: 811718 - DNA, 15 bp, Homo sapiens
gatcagtgagtagag

SEQ ID NO: 811719 - DNA, 15 bp, Homo sapiens
atcagtgagtagagc

SEQ ID NO: 811720 - DNA, 15 bp, Homo sapiens
tcagtgagtagagca

SEQ ID NO: 811721 - DNA, 15 bp, Homo sapiens
cagtgagtagagcaa

SEQ ID NO: 811722 - DNA, 15 bp, Homo sapiens
agtgagtagagcaag

SEQ ID NO: 811723 - DNA, 15 bp, Homo sapiens
gtgagtagagcaagt

SEQ ID NO: 811724 - DNA, 15 bp, Homo sapiens
tgagtagagcaagta

SEQ ID NO: 811725 - DNA, 15 bp, Homo sapiens
gagtagagcaagtag

SEQ ID NO: 811726 - DNA, 15 bp, Homo sapiens
agtagagcaagtagg

SEQ ID NO: 811727 - DNA, 15 bp, Homo sapiens
gtagagcaagtagga

SEQ ID NO: 811728 - DNA, 15 bp, Homo sapiens
tagagcaagtaggaa

SEQ ID NO: 811729 - DNA, 15 bp, Homo sapiens
agagcaagtaggaaa

SEQ ID NO: 811730 - DNA, 15 bp, Homo sapiens
gagcaagtaggaaag

SEQ ID NO: 811731 - DNA, 15 bp, Homo sapiens
agcaagtaggaaaga

SEQ ID NO: 811732 - DNA, 15 bp, Homo sapiens
gcaagtaggaaagaa

SEQ ID NO: 811733 - DNA, 15 bp, Homo sapiens
caagtaggaaagaat

SEQ ID NO: 811734 - DNA, 15 bp, Homo sapiens
aagtaggaaagaatc

SEQ ID NO: 811735 - DNA, 15 bp, Homo sapiens
agtaggaaagaatct

SEQ ID NO: 811736 - DNA, 15 bp, Homo sapiens
gtaggaaagaatctc

SEQ ID NO: 811737 - DNA, 15 bp, Homo sapiens
taggaaagaatctct

SEQ ID NO: 811738 - DNA, 15 bp, Homo sapiens
aggaaagaatctctt

SEQ ID NO: 811739 - DNA, 15 bp, Homo sapiens
ggaaagaatctcttc

SEQ ID NO: 811740 - DNA, 15 bp, Homo sapiens
gaaagaatctcttca

SEQ ID NO: 811741 - DNA, 15 bp, Homo sapiens
aaagaatctcttcaa

SEQ ID NO: 811742 - DNA, 15 bp, Homo sapiens
aagaatctcttcaag

SEQ ID NO: 811743 - DNA, 15 bp, Homo sapiens
agaatctcttcaaga

SEQ ID NO: 811744 - DNA, 15 bp, Homo sapiens
gaatctcttcaagaa

SEQ ID NO: 811745 - DNA, 15 bp, Homo sapiens
aatctcttcaagaac

SEQ ID NO: 811746 - DNA, 15 bp, Homo sapiens
atctcttcaagaact

SEQ ID NO: 811747 - DNA, 15 bp, Homo sapiens
tctcttcaagaactt

SEQ ID NO: 811748 - DNA, 15 bp, Homo sapiens
ctcttcaagaactta

SEQ ID NO: 811749 - DNA, 15 bp, Homo sapiens
tcttcaagaacttat

SEQ ID NO: 811750 - DNA, 15 bp, Homo sapiens
cttcaagaacttatg

SEQ ID NO: 811751 - DNA, 15 bp, Homo sapiens
ttcaagaacttatgt

SEQ ID NO: 811752 - DNA, 15 bp, Homo sapiens
tcaagaacttatgta

SEQ ID NO: 811753 - DNA, 15 bp, Homo sapiens
caagaacttatgtat

SEQ ID NO: 811754 - DNA, 15 bp, Homo sapiens
aagaacttatgtatc

SEQ ID NO: 811755 - DNA, 15 bp, Homo sapiens
agaacttatgtatct

SEQ ID NO: 811756 - DNA, 15 bp, Homo sapiens
gaacttatgtatctt

SEQ ID NO: 811757 - DNA, 15 bp, Homo sapiens
aacttatgtatcttc

SEQ ID NO: 811758 - DNA, 15 bp, Homo sapiens
acttatgtatcttcg

SEQ ID NO: 811759 - DNA, 15 bp, Homo sapiens
cttatgtatcttcga

SEQ ID NO: 811760 - DNA, 15 bp, Homo sapiens
ttatgtatcttcgac

SEQ ID NO: 811761 - DNA, 15 bp, Homo sapiens
tatgtatcttcgaca

SEQ ID NO: 811762 - DNA, 15 bp, Homo sapiens
atgtatcttcgacat

SEQ ID NO: 811763 - DNA, 15 bp, Homo sapiens
tgtatcttcgacatg

SEQ ID NO: 811764 - DNA, 15 bp, Homo sapiens
gtatcttcgacatgt

SEQ ID NO: 811765 - DNA, 15 bp, Homo sapiens
tatcttcgacatgtc

SEQ ID NO: 811766 - DNA, 15 bp, Homo sapiens
atcttcgacatgtcc

SEQ ID NO: 811767 - DNA, 15 bp, Homo sapiens
tcttcgacatgtcca

SEQ ID NO: 811768 - DNA, 15 bp, Homo sapiens
cttcgacatgtccat

SEQ ID NO: 811769 - DNA, 15 bp, Homo sapiens
ttcgacatgtccatc

SEQ ID NO: 811770 - DNA, 15 bp, Homo sapiens
tcgacatgtccatca

SEQ ID NO: 811771 - DNA, 15 bp, Homo sapiens
cgacatgtccatcac

SEQ ID NO: 811772 - DNA, 15 bp, Homo sapiens
gacatgtccatcaca

SEQ ID NO: 811773 - DNA, 15 bp, Homo sapiens
acatgtccatcacac

SEQ ID NO: 811774 - DNA, 15 bp, Homo sapiens
catgtccatcacaca

SEQ ID NO: 811775 - DNA, 15 bp, Homo sapiens
atgtccatcacacat

SEQ ID NO: 811776 - DNA, 15 bp, Homo sapiens
tgtccatcacacata

SEQ ID NO: 811777 - DNA, 15 bp, Homo sapiens
gtccatcacacataa

SEQ ID NO: 811778 - DNA, 15 bp, Homo sapiens
tccatcacacataat

SEQ ID NO: 811779 - DNA, 15 bp, Homo sapiens
ccatcacacataatt

SEQ ID NO: 811780 - DNA, 15 bp, Homo sapiens
catcacacataattt

SEQ ID NO: 811781 - DNA, 15 bp, Homo sapiens
atcacacataatttt

SEQ ID NO: 811782 - DNA, 15 bp, Homo sapiens
tcacacataattttc

SEQ ID NO: 811783 - DNA, 15 bp, Homo sapiens
cacacataattttct

SEQ ID NO: 811784 - DNA, 15 bp, Homo sapiens
acacataattttctc

SEQ ID NO: 811785 - DNA, 15 bp, Homo sapiens
cacataattttctcc

SEQ ID NO: 811786 - DNA, 15 bp, Homo sapiens
acataattttctcct

SEQ ID NO: 811787 - DNA, 15 bp, Homo sapiens
cataattttctccta

SEQ ID NO: 811788 - DNA, 15 bp, Homo sapiens
ataattttctcctag

SEQ ID NO: 811789 - DNA, 15 bp, Homo sapiens
taattttctcctagt

SEQ ID NO: 811790 - DNA, 15 bp, Homo sapiens
aattttctcctagtc

SEQ ID NO: 811791 - DNA, 15 bp, Homo sapiens
attttctcctagtca

SEQ ID NO: 811792 - DNA, 15 bp, Homo sapiens
ttttctcctagtcac

SEQ ID NO: 811793 - DNA, 15 bp, Homo sapiens
tttctcctagtcaca

SEQ ID NO: 811794 - DNA, 15 bp, Homo sapiens
ttctcctagtcacat

SEQ ID NO: 811795 - DNA, 15 bp, Homo sapiens
tctcctagtcacatg

SEQ ID NO: 811796 - DNA, 15 bp, Homo sapiens
ctcctagtcacatgt

SEQ ID NO: 811797 - DNA, 15 bp, Homo sapiens
tcctagtcacatgta

SEQ ID NO: 811798 - DNA, 15 bp, Homo sapiens
cctagtcacatgtac

SEQ ID NO: 811799 - DNA, 15 bp, Homo sapiens
ctagtcacatgtaca

SEQ ID NO: 811800 - DNA, 15 bp, Homo sapiens
tagtcacatgtacaa

SEQ ID NO: 811801 - DNA, 15 bp, Homo sapiens
agtcacatgtacaaa

SEQ ID NO: 811802 - DNA, 15 bp, Homo sapiens
gtcacatgtacaaat

SEQ ID NO: 811803 - DNA, 15 bp, Homo sapiens
tcacatgtacaaatg

SEQ ID NO: 811804 - DNA, 15 bp, Homo sapiens
cacatgtacaaatga

SEQ ID NO: 811805 - DNA, 15 bp, Homo sapiens
acatgtacaaatgat

SEQ ID NO: 811806 - DNA, 15 bp, Homo sapiens
catgtacaaatgata

SEQ ID NO: 811807 - DNA, 15 bp, Homo sapiens
atgtacaaatgataa

SEQ ID NO: 811808 - DNA, 15 bp, Homo sapiens
tgtacaaatgataaa

SEQ ID NO: 811809 - DNA, 15 bp, Homo sapiens
gtacaaatgataaag

SEQ ID NO: 811810 - DNA, 15 bp, Homo sapiens
tacaaatgataaagg

SEQ ID NO: 811811 - DNA, 15 bp, Homo sapiens
acaaatgataaagga

SEQ ID NO: 811812 - DNA, 15 bp, Homo sapiens
caaatgataaaggag

SEQ ID NO: 811813 - DNA, 15 bp, Homo sapiens
aaatgataaaggaga

SEQ ID NO: 811814 - DNA, 15 bp, Homo sapiens
aatgataaaggagag

SEQ ID NO: 811815 - DNA, 15 bp, Homo sapiens
atgataaaggagagg

SEQ ID NO: 811816 - DNA, 15 bp, Homo sapiens
tgataaaggagagga

SEQ ID NO: 811817 - DNA, 15 bp, Homo sapiens
gataaaggagaggaa

SEQ ID NO: 811818 - DNA, 15 bp, Homo sapiens
ataaaggagaggaaa

SEQ ID NO: 811819 - DNA, 15 bp, Homo sapiens
taaaggagaggaaaa

SEQ ID NO: 811820 - DNA, 15 bp, Homo sapiens
aaaggagaggaaaat

SEQ ID NO: 811821 - DNA, 15 bp, Homo sapiens
aaggagaggaaaatg

SEQ ID NO: 811822 - DNA, 15 bp, Homo sapiens
aggagaggaaaatgt

SEQ ID NO: 811823 - DNA, 15 bp, Homo sapiens
ggagaggaaaatgtc

SEQ ID NO: 811824 - DNA, 15 bp, Homo sapiens
gagaggaaaatgtca

SEQ ID NO: 811825 - DNA, 15 bp, Homo sapiens
agaggaaaatgtcat

SEQ ID NO: 811826 - DNA, 15 bp, Homo sapiens
gaggaaaatgtcatt

SEQ ID NO: 811827 - DNA, 15 bp, Homo sapiens
aggaaaatgtcattt

SEQ ID NO: 811828 - DNA, 15 bp, Homo sapiens
ggaaaatgtcatttc

SEQ ID NO: 811829 - DNA, 15 bp, Homo sapiens
gaaaatgtcatttca

SEQ ID NO: 811830 - DNA, 15 bp, Homo sapiens
aaaatgtcatttcag

SEQ ID NO: 811831 - DNA, 15 bp, Homo sapiens
aaatgtcatttcagg

SEQ ID NO: 811832 - DNA, 15 bp, Homo sapiens
aatgtcatttcaggg

SEQ ID NO: 811833 - DNA, 15 bp, Homo sapiens
atgtcatttcagggc

SEQ ID NO: 811834 - DNA, 15 bp, Homo sapiens
tgtcatttcagggcc

SEQ ID NO: 811835 - DNA, 15 bp, Homo sapiens
gtcatttcagggcct

SEQ ID NO: 811836 - DNA, 15 bp, Homo sapiens
tcatttcagggcctt

SEQ ID NO: 811837 - DNA, 15 bp, Homo sapiens
catttcagggccttg

SEQ ID NO: 811838 - DNA, 15 bp, Homo sapiens
atttcagggccttga

SEQ ID NO: 811839 - DNA, 15 bp, Homo sapiens
tttcagggccttgag

SEQ ID NO: 811840 - DNA, 15 bp, Homo sapiens
ttcagggccttgagt

SEQ ID NO: 811841 - DNA, 15 bp, Homo sapiens
tcagggccttgagta

SEQ ID NO: 811842 - DNA, 15 bp, Homo sapiens
cagggccttgagtat

SEQ ID NO: 811843 - DNA, 15 bp, Homo sapiens
agggccttgagtatc

SEQ ID NO: 811844 - DNA, 15 bp, Homo sapiens
gggccttgagtatca

SEQ ID NO: 811845 - DNA, 15 bp, Homo sapiens
ggccttgagtatcac

SEQ ID NO: 811846 - DNA, 15 bp, Homo sapiens
gccttgagtatcaca

SEQ ID NO: 811847 - DNA, 15 bp, Homo sapiens
ccttgagtatcacag

SEQ ID NO: 811848 - DNA, 15 bp, Homo sapiens
cttgagtatcacagg

SEQ ID NO: 811849 - DNA, 15 bp, Homo sapiens
ttgagtatcacagga

SEQ ID NO: 811850 - DNA, 15 bp, Homo sapiens
tgagtatcacaggat

SEQ ID NO: 811851 - DNA, 15 bp, Homo sapiens
gagtatcacaggatt

SEQ ID NO: 811852 - DNA, 15 bp, Homo sapiens
agtatcacaggattt

SEQ ID NO: 811853 - DNA, 15 bp, Homo sapiens
gtatcacaggatttt

SEQ ID NO: 811854 - DNA, 15 bp, Homo sapiens
tatcacaggattttg

SEQ ID NO: 811855 - DNA, 15 bp, Homo sapiens
atcacaggattttga

SEQ ID NO: 811856 - DNA, 15 bp, Homo sapiens
tcacaggattttgat

SEQ ID NO: 811857 - DNA, 15 bp, Homo sapiens
cacaggattttgata

SEQ ID NO: 811858 - DNA, 15 bp, Homo sapiens
acaggattttgataa

SEQ ID NO: 811859 - DNA, 15 bp, Homo sapiens
caggattttgataat

SEQ ID NO: 811860 - DNA, 15 bp, Homo sapiens
aggattttgataatg

SEQ ID NO: 811861 - DNA, 15 bp, Homo sapiens
ggattttgataatgt

SEQ ID NO: 811862 - DNA, 15 bp, Homo sapiens
gattttgataatgtt

SEQ ID NO: 811863 - DNA, 15 bp, Homo sapiens
attttgataatgtta

SEQ ID NO: 811864 - DNA, 15 bp, Homo sapiens
ttttgataatgttag

SEQ ID NO: 811865 - DNA, 15 bp, Homo sapiens
tttgataatgttagc

SEQ ID NO: 811866 - DNA, 15 bp, Homo sapiens
ttgataatgttagca

SEQ ID NO: 811867 - DNA, 15 bp, Homo sapiens
tgataatgttagcaa

SEQ ID NO: 811868 - DNA, 15 bp, Homo sapiens
gataatgttagcaaa

SEQ ID NO: 811869 - DNA, 15 bp, Homo sapiens
ataatgttagcaaaa

SEQ ID NO: 811870 - DNA, 15 bp, Homo sapiens
taatgttagcaaaat

SEQ ID NO: 811871 - DNA, 15 bp, Homo sapiens
aatgttagcaaaata

SEQ ID NO: 811872 - DNA, 15 bp, Homo sapiens
atgttagcaaaataa

SEQ ID NO: 811873 - DNA, 15 bp, Homo sapiens
tgttagcaaaataat

SEQ ID NO: 811874 - DNA, 15 bp, Homo sapiens
gttagcaaaataatg

SEQ ID NO: 811875 - DNA, 15 bp, Homo sapiens
ttagcaaaataatgg

SEQ ID NO: 811876 - DNA, 15 bp, Homo sapiens
tagcaaaataatggg

SEQ ID NO: 811877 - DNA, 15 bp, Homo sapiens
agcaaaataatgggt

SEQ ID NO: 811878 - DNA, 15 bp, Homo sapiens
gcaaaataatgggta

SEQ ID NO: 811879 - DNA, 15 bp, Homo sapiens
caaaataatgggtaa

SEQ ID NO: 811880 - DNA, 15 bp, Homo sapiens
aaaataatgggtaaa

SEQ ID NO: 811881 - DNA, 15 bp, Homo sapiens
aaataatgggtaaaa

SEQ ID NO: 811882 - DNA, 15 bp, Homo sapiens
aataatgggtaaaat

SEQ ID NO: 811883 - DNA, 15 bp, Homo sapiens
ataatgggtaaaata

SEQ ID NO: 811884 - DNA, 15 bp, Homo sapiens
taatgggtaaaataa

SEQ ID NO: 811885 - DNA, 15 bp, Homo sapiens
aatgggtaaaataac

SEQ ID NO: 811886 - DNA, 15 bp, Homo sapiens
atgggtaaaataact

SEQ ID NO: 811887 - DNA, 15 bp, Homo sapiens
tgggtaaaataactg

SEQ ID NO: 811888 - DNA, 15 bp, Homo sapiens
gggtaaaataactga

SEQ ID NO: 811889 - DNA, 15 bp, Homo sapiens
ggtaaaataactgat

SEQ ID NO: 811890 - DNA, 15 bp, Homo sapiens
gtaaaataactgatt

SEQ ID NO: 811891 - DNA, 15 bp, Homo sapiens
taaaataactgattt

SEQ ID NO: 811892 - DNA, 15 bp, Homo sapiens
aaaataactgatttc

SEQ ID NO: 811893 - DNA, 15 bp, Homo sapiens
aaataactgatttct

SEQ ID NO: 811894 - DNA, 15 bp, Homo sapiens
aataactgatttctc

SEQ ID NO: 811895 - DNA, 15 bp, Homo sapiens
ataactgatttctca

SEQ ID NO: 811896 - DNA, 15 bp, Homo sapiens
taactgatttctcaa

SEQ ID NO: 811897 - DNA, 15 bp, Homo sapiens
aactgatttctcaat

SEQ ID NO: 811898 - DNA, 15 bp, Homo sapiens
actgatttctcaatt

SEQ ID NO: 811899 - DNA, 15 bp, Homo sapiens
ctgatttctcaatta

SEQ ID NO: 811900 - DNA, 15 bp, Homo sapiens
tgatttctcaattaa

SEQ ID NO: 811901 - DNA, 15 bp, Homo sapiens
gatttctcaattaaa

SEQ ID NO: 811902 - DNA, 15 bp, Homo sapiens
atttctcaattaaag

SEQ ID NO: 811903 - DNA, 15 bp, Homo sapiens
tttctcaattaaagc

SEQ ID NO: 811904 - DNA, 15 bp, Homo sapiens
ttctcaattaaagcc

SEQ ID NO: 811905 - DNA, 15 bp, Homo sapiens
tctcaattaaagccc

SEQ ID NO: 811906 - DNA, 15 bp, Homo sapiens
ctcaattaaagccca

SEQ ID NO: 811907 - DNA, 15 bp, Homo sapiens
tcaattaaagcccaa

SEQ ID NO: 811908 - DNA, 15 bp, Homo sapiens
caattaaagcccaag

SEQ ID NO: 811909 - DNA, 15 bp, Homo sapiens
aattaaagcccaagc

SEQ ID NO: 811910 - DNA, 15 bp, Homo sapiens
attaaagcccaagct

SEQ ID NO: 811911 - DNA, 15 bp, Homo sapiens
ttaaagcccaagcta

SEQ ID NO: 811912 - DNA, 15 bp, Homo sapiens
taaagcccaagctaa

SEQ ID NO: 811913 - DNA, 15 bp, Homo sapiens
aaagcccaagctaag

SEQ ID NO: 811914 - DNA, 15 bp, Homo sapiens
aagcccaagctaagt

SEQ ID NO: 811915 - DNA, 15 bp, Homo sapiens
agcccaagctaagta

SEQ ID NO: 811916 - DNA, 15 bp, Homo sapiens
gcccaagctaagtaa

SEQ ID NO: 811917 - DNA, 15 bp, Homo sapiens
cccaagctaagtaac

SEQ ID NO: 811918 - DNA, 15 bp, Homo sapiens
ccaagctaagtaact

SEQ ID NO: 811919 - DNA, 15 bp, Homo sapiens
caagctaagtaactt

SEQ ID NO: 811920 - DNA, 15 bp, Homo sapiens
aagctaagtaacttg

SEQ ID NO: 811921 - DNA, 15 bp, Homo sapiens
agctaagtaacttgt

SEQ ID NO: 811922 - DNA, 15 bp, Homo sapiens
gctaagtaacttgtc

SEQ ID NO: 811923 - DNA, 15 bp, Homo sapiens
ctaagtaacttgtca

SEQ ID NO: 811924 - DNA, 15 bp, Homo sapiens
taagtaacttgtcag

SEQ ID NO: 811925 - DNA, 15 bp, Homo sapiens
aagtaacttgtcagc

SEQ ID NO: 811926 - DNA, 15 bp, Homo sapiens
agtaacttgtcagcc

SEQ ID NO: 811927 - DNA, 15 bp, Homo sapiens
gtaacttgtcagccc

SEQ ID NO: 811928 - DNA, 15 bp, Homo sapiens
taacttgtcagccca

SEQ ID NO: 811929 - DNA, 15 bp, Homo sapiens
aacttgtcagcccag

SEQ ID NO: 811930 - DNA, 15 bp, Homo sapiens
acttgtcagcccagg

SEQ ID NO: 811931 - DNA, 15 bp, Homo sapiens
cttgtcagcccaggt

SEQ ID NO: 811932 - DNA, 15 bp, Homo sapiens
ttgtcagcccaggtg

SEQ ID NO: 811933 - DNA, 15 bp, Homo sapiens
tgtcagcccaggtgt

SEQ ID NO: 811934 - DNA, 15 bp, Homo sapiens
gtcagcccaggtgtg

SEQ ID NO: 811935 - DNA, 15 bp, Homo sapiens
tcagcccaggtgtgt

SEQ ID NO: 811936 - DNA, 15 bp, Homo sapiens
cagcccaggtgtgtt

SEQ ID NO: 811937 - DNA, 15 bp, Homo sapiens
agcccaggtgtgtta

SEQ ID NO: 811938 - DNA, 15 bp, Homo sapiens
gcccaggtgtgttaa

SEQ ID NO: 811939 - DNA, 15 bp, Homo sapiens
cccaggtgtgttaaa

SEQ ID NO: 811940 - DNA, 15 bp, Homo sapiens
ccaggtgtgttaaaa

SEQ ID NO: 811941 - DNA, 15 bp, Homo sapiens
caggtgtgttaaaat

SEQ ID NO: 811942 - DNA, 15 bp, Homo sapiens
aggtgtgttaaaatc

SEQ ID NO: 811943 - DNA, 15 bp, Homo sapiens
ggtgtgttaaaatct

SEQ ID NO: 811944 - DNA, 15 bp, Homo sapiens
gtgtgttaaaatctg

SEQ ID NO: 811945 - DNA, 15 bp, Homo sapiens
tgtgttaaaatctga

SEQ ID NO: 811946 - DNA, 15 bp, Homo sapiens
gtgttaaaatctgag

SEQ ID NO: 811947 - DNA, 15 bp, Homo sapiens
tgttaaaatctgagt

SEQ ID NO: 811948 - DNA, 15 bp, Homo sapiens
gttaaaatctgagtt

SEQ ID NO: 811949 - DNA, 15 bp, Homo sapiens
ttaaaatctgagtta

SEQ ID NO: 811950 - DNA, 15 bp, Homo sapiens
taaaatctgagttac

SEQ ID NO: 811951 - DNA, 15 bp, Homo sapiens
aaaatctgagttact

SEQ ID NO: 811952 - DNA, 15 bp, Homo sapiens
aaatctgagttactc

SEQ ID NO: 811953 - DNA, 15 bp, Homo sapiens
aatctgagttactct

SEQ ID NO: 811954 - DNA, 15 bp, Homo sapiens
atctgagttactcta

SEQ ID NO: 811955 - DNA, 15 bp, Homo sapiens
tctgagttactctag

SEQ ID NO: 811956 - DNA, 15 bp, Homo sapiens
ctgagttactctagg

SEQ ID NO: 811957 - DNA, 15 bp, Homo sapiens
tgagttactctaggt

SEQ ID NO: 811958 - DNA, 15 bp, Homo sapiens
gagttactctaggtc

SEQ ID NO: 811959 - DNA, 15 bp, Homo sapiens
agttactctaggtcc

SEQ ID NO: 811960 - DNA, 15 bp, Homo sapiens
gttactctaggtcct

SEQ ID NO: 811961 - DNA, 15 bp, Homo sapiens
ttactctaggtcctt

SEQ ID NO: 811962 - DNA, 15 bp, Homo sapiens
tactctaggtccttc

SEQ ID NO: 811963 - DNA, 15 bp, Homo sapiens
actctaggtccttct

SEQ ID NO: 811964 - DNA, 15 bp, Homo sapiens
ctctaggtccttctc

SEQ ID NO: 811965 - DNA, 15 bp, Homo sapiens
tctaggtccttctct

SEQ ID NO: 811966 - DNA, 15 bp, Homo sapiens
ctaggtccttctcta

SEQ ID NO: 811967 - DNA, 15 bp, Homo sapiens
taggtccttctctag

SEQ ID NO: 811968 - DNA, 15 bp, Homo sapiens
aggtccttctctaga

SEQ ID NO: 811969 - DNA, 15 bp, Homo sapiens
ggtccttctctagag

SEQ ID NO: 811970 - DNA, 15 bp, Homo sapiens
gtccttctctagaga

SEQ ID NO: 811971 - DNA, 15 bp, Homo sapiens
tccttctctagagac

SEQ ID NO: 811972 - DNA, 15 bp, Homo sapiens
ccttctctagagaca

SEQ ID NO: 811973 - DNA, 15 bp, Homo sapiens
cttctctagagacag

SEQ ID NO: 811974 - DNA, 15 bp, Homo sapiens
ttctctagagacagt

SEQ ID NO: 811975 - DNA, 15 bp, Homo sapiens
tctctagagacagtg

SEQ ID NO: 811976 - DNA, 15 bp, Homo sapiens
ctctagagacagtgt

SEQ ID NO: 811977 - DNA, 15 bp, Homo sapiens
tctagagacagtgtg

SEQ ID NO: 811978 - DNA, 15 bp, Homo sapiens
ctagagacagtgtgg

SEQ ID NO: 811979 - DNA, 15 bp, Homo sapiens
tagagacagtgtggc

SEQ ID NO: 811980 - DNA, 15 bp, Homo sapiens
agagacagtgtggct

SEQ ID NO: 811981 - DNA, 15 bp, Homo sapiens
gagacagtgtggctt

SEQ ID NO: 811982 - DNA, 15 bp, Homo sapiens
agacagtgtggcttc

SEQ ID NO: 811983 - DNA, 15 bp, Homo sapiens
gacagtgtggcttcg

SEQ ID NO: 811984 - DNA, 15 bp, Homo sapiens
acagtgtggcttcgg

SEQ ID NO: 811985 - DNA, 15 bp, Homo sapiens
cagtgtggcttcggt

SEQ ID NO: 811986 - DNA, 15 bp, Homo sapiens
agtgtggcttcggta

SEQ ID NO: 811987 - DNA, 15 bp, Homo sapiens
gtgtggcttcggtaa

SEQ ID NO: 811988 - DNA, 15 bp, Homo sapiens
tgtggcttcggtaat

SEQ ID NO: 811989 - DNA, 15 bp, Homo sapiens
gtggcttcggtaatg

SEQ ID NO: 811990 - DNA, 15 bp, Homo sapiens
tggcttcggtaatga

SEQ ID NO: 811991 - DNA, 15 bp, Homo sapiens
ggcttcggtaatgag

SEQ ID NO: 811992 - DNA, 15 bp, Homo sapiens
gcttcggtaatgagc

SEQ ID NO: 811993 - DNA, 15 bp, Homo sapiens
cttcggtaatgagca

SEQ ID NO: 811994 - DNA, 15 bp, Homo sapiens
ttcggtaatgagcaa

SEQ ID NO: 811995 - DNA, 15 bp, Homo sapiens
tcggtaatgagcaag

SEQ ID NO: 811996 - DNA, 15 bp, Homo sapiens
cggtaatgagcaagc

SEQ ID NO: 811997 - DNA, 15 bp, Homo sapiens
ggtaatgagcaagct

SEQ ID NO: 811998 - DNA, 15 bp, Homo sapiens
gtaatgagcaagctc

SEQ ID NO: 811999 - DNA, 15 bp, Homo sapiens
taatgagcaagctct

SEQ ID NO: 812000 - DNA, 15 bp, Homo sapiens
aatgagcaagctctg

SEQ ID NO: 812001 - DNA, 15 bp, Homo sapiens
atgagcaagctctgg

SEQ ID NO: 812002 - DNA, 15 bp, Homo sapiens
tgagcaagctctgga

SEQ ID NO: 812003 - DNA, 15 bp, Homo sapiens
gagcaagctctggaa

SEQ ID NO: 812004 - DNA, 15 bp, Homo sapiens
agcaagctctggaaa

SEQ ID NO: 812005 - DNA, 15 bp, Homo sapiens
gcaagctctggaaat

SEQ ID NO: 812006 - DNA, 15 bp, Homo sapiens
caagctctggaaatt

SEQ ID NO: 812007 - DNA, 15 bp, Homo sapiens
aagctctggaaatta

SEQ ID NO: 812008 - DNA, 15 bp, Homo sapiens
agctctggaaattaa

SEQ ID NO: 812009 - DNA, 15 bp, Homo sapiens
gctctggaaattaaa

SEQ ID NO: 812010 - DNA, 15 bp, Homo sapiens
ctctggaaattaaag

SEQ ID NO: 812011 - DNA, 15 bp, Homo sapiens
tctggaaattaaaga

SEQ ID NO: 812012 - DNA, 15 bp, Homo sapiens
ctggaaattaaagaa

SEQ ID NO: 812013 - DNA, 15 bp, Homo sapiens
tggaaattaaagaag

SEQ ID NO: 812014 - DNA, 15 bp, Homo sapiens
ggaaattaaagaagt

SEQ ID NO: 812015 - DNA, 15 bp, Homo sapiens
gaaattaaagaagta

SEQ ID NO: 812016 - DNA, 15 bp, Homo sapiens
aaattaaagaagtaa

SEQ ID NO: 812017 - DNA, 15 bp, Homo sapiens
aattaaagaagtaat

SEQ ID NO: 812018 - DNA, 15 bp, Homo sapiens
attaaagaagtaatc

SEQ ID NO: 812019 - DNA, 15 bp, Homo sapiens
ttaaagaagtaatca

SEQ ID NO: 812020 - DNA, 15 bp, Homo sapiens
taaagaagtaatcag

SEQ ID NO: 812021 - DNA, 15 bp, Homo sapiens
aaagaagtaatcaga

SEQ ID NO: 812022 - DNA, 15 bp, Homo sapiens
aagaagtaatcagat

SEQ ID NO: 812023 - DNA, 15 bp, Homo sapiens
agaagtaatcagatg

SEQ ID NO: 812024 - DNA, 15 bp, Homo sapiens
gaagtaatcagatgt

SEQ ID NO: 812025 - DNA, 15 bp, Homo sapiens
aagtaatcagatgtt

SEQ ID NO: 812026 - DNA, 15 bp, Homo sapiens
agtaatcagatgttg

SEQ ID NO: 812027 - DNA, 15 bp, Homo sapiens
gtaatcagatgttga

SEQ ID NO: 812028 - DNA, 15 bp, Homo sapiens
taatcagatgttgat

SEQ ID NO: 812029 - DNA, 15 bp, Homo sapiens
aatcagatgttgatt

SEQ ID NO: 812030 - DNA, 15 bp, Homo sapiens
atcagatgttgattg

SEQ ID NO: 812031 - DNA, 15 bp, Homo sapiens
tcagatgttgattga

SEQ ID NO: 812032 - DNA, 15 bp, Homo sapiens
cagatgttgattgag

SEQ ID NO: 812033 - DNA, 15 bp, Homo sapiens
agatgttgattgagg

SEQ ID NO: 812034 - DNA, 15 bp, Homo sapiens
gatgttgattgaggt

SEQ ID NO: 812035 - DNA, 15 bp, Homo sapiens
atgttgattgaggtt

SEQ ID NO: 812036 - DNA, 15 bp, Homo sapiens
tgttgattgaggtta

SEQ ID NO: 812037 - DNA, 15 bp, Homo sapiens
gttgattgaggttat

SEQ ID NO: 812038 - DNA, 15 bp, Homo sapiens
ttgattgaggttatc

SEQ ID NO: 812039 - DNA, 15 bp, Homo sapiens
tgattgaggttatct

SEQ ID NO: 812040 - DNA, 15 bp, Homo sapiens
gattgaggttatctg

SEQ ID NO: 812041 - DNA, 15 bp, Homo sapiens
attgaggttatctgc

SEQ ID NO: 812042 - DNA, 15 bp, Homo sapiens
ttgaggttatctgct

SEQ ID NO: 812043 - DNA, 15 bp, Homo sapiens
tgaggttatctgctt

SEQ ID NO: 812044 - DNA, 15 bp, Homo sapiens
gaggttatctgcttc

SEQ ID NO: 812045 - DNA, 15 bp, Homo sapiens
aggttatctgcttca

SEQ ID NO: 812046 - DNA, 15 bp, Homo sapiens
ggttatctgcttcac

SEQ ID NO: 812047 - DNA, 15 bp, Homo sapiens
gttatctgcttcact

SEQ ID NO: 812048 - DNA, 15 bp, Homo sapiens
ttatctgcttcactt

SEQ ID NO: 812049 - DNA, 15 bp, Homo sapiens
tatctgcttcacttc

SEQ ID NO: 812050 - DNA, 15 bp, Homo sapiens
atctgcttcacttca

SEQ ID NO: 812051 - DNA, 15 bp, Homo sapiens
tctgcttcacttcaa

SEQ ID NO: 812052 - DNA, 15 bp, Homo sapiens
ctgcttcacttcaag

SEQ ID NO: 812053 - DNA, 15 bp, Homo sapiens
tgcttcacttcaagc

SEQ ID NO: 812054 - DNA, 15 bp, Homo sapiens
gcttcacttcaagca

SEQ ID NO: 812055 - DNA, 15 bp, Homo sapiens
cttcacttcaagcag

SEQ ID NO: 812056 - DNA, 15 bp, Homo sapiens
ttcacttcaagcaga

SEQ ID NO: 812057 - DNA, 15 bp, Homo sapiens
tcacttcaagcagaa

SEQ ID NO: 812058 - DNA, 15 bp, Homo sapiens
cacttcaagcagaag

SEQ ID NO: 812059 - DNA, 15 bp, Homo sapiens
acttcaagcagaagc

SEQ ID NO: 812060 - DNA, 15 bp, Homo sapiens
cttcaagcagaagca

SEQ ID NO: 812061 - DNA, 15 bp, Homo sapiens
ttcaagcagaagcaa

SEQ ID NO: 812062 - DNA, 15 bp, Homo sapiens
tcaagcagaagcaaa

SEQ ID NO: 812063 - DNA, 15 bp, Homo sapiens
caagcagaagcaaat

SEQ ID NO: 812064 - DNA, 15 bp, Homo sapiens
aagcagaagcaaatc

SEQ ID NO: 812065 - DNA, 15 bp, Homo sapiens
agcagaagcaaatca

SEQ ID NO: 812066 - DNA, 15 bp, Homo sapiens
gcagaagcaaatcaa

SEQ ID NO: 812067 - DNA, 15 bp, Homo sapiens
cagaagcaaatcaag

SEQ ID NO: 812068 - DNA, 15 bp, Homo sapiens
agaagcaaatcaagt

SEQ ID NO: 812069 - DNA, 15 bp, Homo sapiens
gaagcaaatcaagtg

SEQ ID NO: 812070 - DNA, 15 bp, Homo sapiens
aagcaaatcaagtgg

SEQ ID NO: 812071 - DNA, 15 bp, Homo sapiens
agcaaatcaagtgga

SEQ ID NO: 812072 - DNA, 15 bp, Homo sapiens
gcaaatcaagtggac

SEQ ID NO: 812073 - DNA, 15 bp, Homo sapiens
caaatcaagtggact

SEQ ID NO: 812074 - DNA, 15 bp, Homo sapiens
aaatcaagtggactt

SEQ ID NO: 812075 - DNA, 15 bp, Homo sapiens
aatcaagtggacttc

SEQ ID NO: 812076 - DNA, 15 bp, Homo sapiens
atcaagtggacttcc

SEQ ID NO: 812077 - DNA, 15 bp, Homo sapiens
tcaagtggacttccc

SEQ ID NO: 812078 - DNA, 15 bp, Homo sapiens
caagtggacttccct

SEQ ID NO: 812079 - DNA, 15 bp, Homo sapiens
aagtggacttccctt

SEQ ID NO: 812080 - DNA, 15 bp, Homo sapiens
agtggacttcccttg

SEQ ID NO: 812081 - DNA, 15 bp, Homo sapiens
gtggacttcccttga

SEQ ID NO: 812082 - DNA, 15 bp, Homo sapiens
tggacttcccttgaa

SEQ ID NO: 812083 - DNA, 15 bp, Homo sapiens
ggacttcccttgaag

SEQ ID NO: 812084 - DNA, 15 bp, Homo sapiens
gacttcccttgaaga

SEQ ID NO: 812085 - DNA, 15 bp, Homo sapiens
acttcccttgaagac

SEQ ID NO: 812086 - DNA, 15 bp, Homo sapiens
cttcccttgaagaca

SEQ ID NO: 812087 - DNA, 15 bp, Homo sapiens
ttcccttgaagacag

SEQ ID NO: 812088 - DNA, 15 bp, Homo sapiens
tcccttgaagacaga

SEQ ID NO: 812089 - DNA, 15 bp, Homo sapiens
cccttgaagacagaa

SEQ ID NO: 812090 - DNA, 15 bp, Homo sapiens
ccttgaagacagaaa

SEQ ID NO: 812091 - DNA, 15 bp, Homo sapiens
cttgaagacagaaat

SEQ ID NO: 812092 - DNA, 15 bp, Homo sapiens
ttgaagacagaaatt

SEQ ID NO: 812093 - DNA, 15 bp, Homo sapiens
tgaagacagaaattt

SEQ ID NO: 812094 - DNA, 15 bp, Homo sapiens
gaagacagaaatttc

SEQ ID NO: 812095 - DNA, 15 bp, Homo sapiens
aagacagaaatttct

SEQ ID NO: 812096 - DNA, 15 bp, Homo sapiens
agacagaaatttctc

SEQ ID NO: 812097 - DNA, 15 bp, Homo sapiens
gacagaaatttctct

SEQ ID NO: 812098 - DNA, 15 bp, Homo sapiens
acagaaatttctcta

SEQ ID NO: 812099 - DNA, 15 bp, Homo sapiens
cagaaatttctctat

SEQ ID NO: 812100 - DNA, 15 bp, Homo sapiens
agaaatttctctatt

SEQ ID NO: 812101 - DNA, 15 bp, Homo sapiens
gaaatttctctattg

SEQ ID NO: 812102 - DNA, 15 bp, Homo sapiens
aaatttctctattga

SEQ ID NO: 812103 - DNA, 15 bp, Homo sapiens
aatttctctattgat

SEQ ID NO: 812104 - DNA, 15 bp, Homo sapiens
atttctctattgata

SEQ ID NO: 812105 - DNA, 15 bp, Homo sapiens
tttctctattgatag

SEQ ID NO: 812106 - DNA, 15 bp, Homo sapiens
ttctctattgataga

SEQ ID NO: 812107 - DNA, 15 bp, Homo sapiens
tctctattgatagag

SEQ ID NO: 812108 - DNA, 15 bp, Homo sapiens
ctctattgatagagc

SEQ ID NO: 812109 - DNA, 15 bp, Homo sapiens
tctattgatagagct

SEQ ID NO: 812110 - DNA, 15 bp, Homo sapiens
ctattgatagagcta

SEQ ID NO: 812111 - DNA, 15 bp, Homo sapiens
tattgatagagctaa

SEQ ID NO: 812112 - DNA, 15 bp, Homo sapiens
attgatagagctaag

SEQ ID NO: 812113 - DNA, 15 bp, Homo sapiens
ttgatagagctaagg

SEQ ID NO: 812114 - DNA, 15 bp, Homo sapiens
tgatagagctaaggg

SEQ ID NO: 812115 - DNA, 15 bp, Homo sapiens
gatagagctaagggt

SEQ ID NO: 812116 - DNA, 15 bp, Homo sapiens
atagagctaagggtg

SEQ ID NO: 812117 - DNA, 15 bp, Homo sapiens
tagagctaagggtgt

SEQ ID NO: 812118 - DNA, 15 bp, Homo sapiens
agagctaagggtgtt

SEQ ID NO: 812119 - DNA, 15 bp, Homo sapiens
gagctaagggtgttt

SEQ ID NO: 812120 - DNA, 15 bp, Homo sapiens
agctaagggtgtttc

SEQ ID NO: 812121 - DNA, 15 bp, Homo sapiens
gctaagggtgtttca

SEQ ID NO: 812122 - DNA, 15 bp, Homo sapiens
ctaagggtgtttcat

SEQ ID NO: 812123 - DNA, 15 bp, Homo sapiens
taagggtgtttcatg

SEQ ID NO: 812124 - DNA, 15 bp, Homo sapiens
aagggtgtttcatga

SEQ ID NO: 812125 - DNA, 15 bp, Homo sapiens
agggtgtttcatgat

SEQ ID NO: 812126 - DNA, 15 bp, Homo sapiens
gggtgtttcatgatg

SEQ ID NO: 812127 - DNA, 15 bp, Homo sapiens
ggtgtttcatgatgc

SEQ ID NO: 812128 - DNA, 15 bp, Homo sapiens
gtgtttcatgatgct

SEQ ID NO: 812129 - DNA, 15 bp, Homo sapiens
tgtttcatgatgctg

SEQ ID NO: 812130 - DNA, 15 bp, Homo sapiens
gtttcatgatgctga

SEQ ID NO: 812131 - DNA, 15 bp, Homo sapiens
tttcatgatgctgaa

SEQ ID NO: 812132 - DNA, 15 bp, Homo sapiens
ttcatgatgctgaat

SEQ ID NO: 812133 - DNA, 15 bp, Homo sapiens
tcatgatgctgaatt

SEQ ID NO: 812134 - DNA, 15 bp, Homo sapiens
catgatgctgaattc

SEQ ID NO: 812135 - DNA, 15 bp, Homo sapiens
atgatgctgaattct

SEQ ID NO: 812136 - DNA, 15 bp, Homo sapiens
tgatgctgaattctt

SEQ ID NO: 812137 - DNA, 15 bp, Homo sapiens
gatgctgaattcttt

SEQ ID NO: 812138 - DNA, 15 bp, Homo sapiens
atgctgaattctttg

SEQ ID NO: 812139 - DNA, 15 bp, Homo sapiens
tgctgaattctttgt

SEQ ID NO: 812140 - DNA, 15 bp, Homo sapiens
gctgaattctttgtg

SEQ ID NO: 812141 - DNA, 15 bp, Homo sapiens
ctgaattctttgtgg

SEQ ID NO: 812142 - DNA, 15 bp, Homo sapiens
tgaattctttgtggc

SEQ ID NO: 812143 - DNA, 15 bp, Homo sapiens
gaattctttgtggct

SEQ ID NO: 812144 - DNA, 15 bp, Homo sapiens
aattctttgtggctc

SEQ ID NO: 812145 - DNA, 15 bp, Homo sapiens
attctttgtggctcc

SEQ ID NO: 812146 - DNA, 15 bp, Homo sapiens
ttctttgtggctcct

SEQ ID NO: 812147 - DNA, 15 bp, Homo sapiens
tctttgtggctcctt

SEQ ID NO: 812148 - DNA, 15 bp, Homo sapiens
ctttgtggctccttt

SEQ ID NO: 812149 - DNA, 15 bp, Homo sapiens
tttgtggctcctttt

SEQ ID NO: 812150 - DNA, 15 bp, Homo sapiens
ttgtggctccttttc

SEQ ID NO: 812151 - DNA, 15 bp, Homo sapiens
tgtggctccttttca

SEQ ID NO: 812152 - DNA, 15 bp, Homo sapiens
gtggctccttttcac

SEQ ID NO: 812153 - DNA, 15 bp, Homo sapiens
tggctccttttcaca

SEQ ID NO: 812154 - DNA, 15 bp, Homo sapiens
ggctccttttcacat

SEQ ID NO: 812155 - DNA, 15 bp, Homo sapiens
gctccttttcacata

SEQ ID NO: 812156 - DNA, 15 bp, Homo sapiens
ctccttttcacataa

SEQ ID NO: 812157 - DNA, 15 bp, Homo sapiens
tccttttcacataaa

SEQ ID NO: 812158 - DNA, 15 bp, Homo sapiens
ccttttcacataaaa

SEQ ID NO: 812159 - DNA, 15 bp, Homo sapiens
cttttcacataaaag

SEQ ID NO: 812160 - DNA, 15 bp, Homo sapiens
ttttcacataaaagt

SEQ ID NO: 812161 - DNA, 15 bp, Homo sapiens
tttcacataaaagta

SEQ ID NO: 812162 - DNA, 15 bp, Homo sapiens
ttcacataaaagtag

SEQ ID NO: 812163 - DNA, 15 bp, Homo sapiens
tcacataaaagtagg

SEQ ID NO: 812164 - DNA, 15 bp, Homo sapiens
cacataaaagtagga

SEQ ID NO: 812165 - DNA, 15 bp, Homo sapiens
acataaaagtaggaa

SEQ ID NO: 812166 - DNA, 15 bp, Homo sapiens
cataaaagtaggaag

SEQ ID NO: 812167 - DNA, 15 bp, Homo sapiens
ataaaagtaggaagc

SEQ ID NO: 812168 - DNA, 15 bp, Homo sapiens
taaaagtaggaagcc

SEQ ID NO: 812169 - DNA, 15 bp, Homo sapiens
aaaagtaggaagcca

SEQ ID NO: 812170 - DNA, 15 bp, Homo sapiens
aaagtaggaagccat

SEQ ID NO: 812171 - DNA, 15 bp, Homo sapiens
aagtaggaagccatt

SEQ ID NO: 812172 - DNA, 15 bp, Homo sapiens
agtaggaagccattt

SEQ ID NO: 812173 - DNA, 15 bp, Homo sapiens
gtaggaagccatttt

SEQ ID NO: 812174 - DNA, 15 bp, Homo sapiens
taggaagccattttc

SEQ ID NO: 812175 - DNA, 15 bp, Homo sapiens
aggaagccattttcc

SEQ ID NO: 812176 - DNA, 15 bp, Homo sapiens
ggaagccattttccc

SEQ ID NO: 812177 - DNA, 15 bp, Homo sapiens
gaagccattttccct

SEQ ID NO: 812178 - DNA, 15 bp, Homo sapiens
aagccattttccctg

SEQ ID NO: 812179 - DNA, 15 bp, Homo sapiens
agccattttccctgg

SEQ ID NO: 812180 - DNA, 15 bp, Homo sapiens
gccattttccctgga

SEQ ID NO: 812181 - DNA, 15 bp, Homo sapiens
ccattttccctggag

SEQ ID NO: 812182 - DNA, 15 bp, Homo sapiens
cattttccctggagt

SEQ ID NO: 812183 - DNA, 15 bp, Homo sapiens
attttccctggagtg

SEQ ID NO: 812184 - DNA, 15 bp, Homo sapiens
ttttccctggagtgg

SEQ ID NO: 812185 - DNA, 15 bp, Homo sapiens
tttccctggagtgga

SEQ ID NO: 812186 - DNA, 15 bp, Homo sapiens
ttccctggagtggaa

SEQ ID NO: 812187 - DNA, 15 bp, Homo sapiens
tccctggagtggaag

SEQ ID NO: 812188 - DNA, 15 bp, Homo sapiens
ccctggagtggaagg

SEQ ID NO: 812189 - DNA, 15 bp, Homo sapiens
cctggagtggaaggg

SEQ ID NO: 812190 - DNA, 15 bp, Homo sapiens
ctggagtggaaggga

SEQ ID NO: 812191 - DNA, 15 bp, Homo sapiens
tggagtggaagggag

SEQ ID NO: 812192 - DNA, 15 bp, Homo sapiens
ggagtggaagggagg

SEQ ID NO: 812193 - DNA, 15 bp, Homo sapiens
gagtggaagggagga

SEQ ID NO: 812194 - DNA, 15 bp, Homo sapiens
agtggaagggaggat

SEQ ID NO: 812195 - DNA, 15 bp, Homo sapiens
gtggaagggaggatg

SEQ ID NO: 812196 - DNA, 15 bp, Homo sapiens
tggaagggaggatga

SEQ ID NO: 812197 - DNA, 15 bp, Homo sapiens
ggaagggaggatgac

SEQ ID NO: 812198 - DNA, 15 bp, Homo sapiens
gaagggaggatgact

SEQ ID NO: 812199 - DNA, 15 bp, Homo sapiens
aagggaggatgactt

SEQ ID NO: 812200 - DNA, 15 bp, Homo sapiens
agggaggatgacttc

SEQ ID NO: 812201 - DNA, 15 bp, Homo sapiens
gggaggatgacttcc

SEQ ID NO: 812202 - DNA, 15 bp, Homo sapiens
ggaggatgacttccc

SEQ ID NO: 812203 - DNA, 15 bp, Homo sapiens
gaggatgacttccca

SEQ ID NO: 812204 - DNA, 15 bp, Homo sapiens
aggatgacttcccag

SEQ ID NO: 812205 - DNA, 15 bp, Homo sapiens
ggatgacttcccagg

SEQ ID NO: 812206 - DNA, 15 bp, Homo sapiens
gatgacttcccagga

SEQ ID NO: 812207 - DNA, 15 bp, Homo sapiens
atgacttcccaggaa

SEQ ID NO: 812208 - DNA, 15 bp, Homo sapiens
tgacttcccaggaat

SEQ ID NO: 812209 - DNA, 15 bp, Homo sapiens
gacttcccaggaata

SEQ ID NO: 812210 - DNA, 15 bp, Homo sapiens
acttcccaggaatat

SEQ ID NO: 812211 - DNA, 15 bp, Homo sapiens
cttcccaggaatatg

SEQ ID NO: 812212 - DNA, 15 bp, Homo sapiens
ttcccaggaatatga

SEQ ID NO: 812213 - DNA, 15 bp, Homo sapiens
tcccaggaatatgag

SEQ ID NO: 812214 - DNA, 15 bp, Homo sapiens
cccaggaatatgagc

SEQ ID NO: 812215 - DNA, 15 bp, Homo sapiens
ccaggaatatgagct

SEQ ID NO: 812216 - DNA, 15 bp, Homo sapiens
caggaatatgagctt

SEQ ID NO: 812217 - DNA, 15 bp, Homo sapiens
aggaatatgagcttt

SEQ ID NO: 812218 - DNA, 15 bp, Homo sapiens
ggaatatgagctttg

SEQ ID NO: 812219 - DNA, 15 bp, Homo sapiens
gaatatgagctttga

SEQ ID NO: 812220 - DNA, 15 bp, Homo sapiens
aatatgagctttgag

SEQ ID NO: 812221 - DNA, 15 bp, Homo sapiens
atatgagctttgagc

SEQ ID NO: 812222 - DNA, 15 bp, Homo sapiens
tatgagctttgagcc

SEQ ID NO: 812223 - DNA, 15 bp, Homo sapiens
atgagctttgagcca

SEQ ID NO: 812224 - DNA, 15 bp, Homo sapiens
tgagctttgagccaa

SEQ ID NO: 812225 - DNA, 15 bp, Homo sapiens
gagctttgagccaaa

SEQ ID NO: 812226 - DNA, 15 bp, Homo sapiens
agctttgagccaaag

SEQ ID NO: 812227 - DNA, 15 bp, Homo sapiens
gctttgagccaaaga

SEQ ID NO: 812228 - DNA, 15 bp, Homo sapiens
ctttgagccaaagag

SEQ ID NO: 812229 - DNA, 15 bp, Homo sapiens
tttgagccaaagagg

SEQ ID NO: 812230 - DNA, 15 bp, Homo sapiens
ttgagccaaagaggc

SEQ ID NO: 812231 - DNA, 15 bp, Homo sapiens
tgagccaaagaggca

SEQ ID NO: 812232 - DNA, 15 bp, Homo sapiens
gagccaaagaggcag

SEQ ID NO: 812233 - DNA, 15 bp, Homo sapiens
agccaaagaggcagg

SEQ ID NO: 812234 - DNA, 15 bp, Homo sapiens
gccaaagaggcagga

SEQ ID NO: 812235 - DNA, 15 bp, Homo sapiens
ccaaagaggcaggaa

SEQ ID NO: 812236 - DNA, 15 bp, Homo sapiens
caaagaggcaggaac

SEQ ID NO: 812237 - DNA, 15 bp, Homo sapiens
aaagaggcaggaact

SEQ ID NO: 812238 - DNA, 15 bp, Homo sapiens
aagaggcaggaactg

SEQ ID NO: 812239 - DNA, 15 bp, Homo sapiens
agaggcaggaactgg

SEQ ID NO: 812240 - DNA, 15 bp, Homo sapiens
gaggcaggaactggg

SEQ ID NO: 812241 - DNA, 15 bp, Homo sapiens
aggcaggaactggga

SEQ ID NO: 812242 - DNA, 15 bp, Homo sapiens
ggcaggaactgggag

SEQ ID NO: 812243 - DNA, 15 bp, Homo sapiens
gcaggaactgggagg

SEQ ID NO: 812244 - DNA, 15 bp, Homo sapiens
caggaactgggaggc

SEQ ID NO: 812245 - DNA, 15 bp, Homo sapiens
aggaactgggaggct

SEQ ID NO: 812246 - DNA, 15 bp, Homo sapiens
ggaactgggaggctc

SEQ ID NO: 812247 - DNA, 15 bp, Homo sapiens
gaactgggaggctct

SEQ ID NO: 812248 - DNA, 15 bp, Homo sapiens
aactgggaggctctc

SEQ ID NO: 812249 - DNA, 15 bp, Homo sapiens
actgggaggctctca

SEQ ID NO: 812250 - DNA, 15 bp, Homo sapiens
ctgggaggctctcag

SEQ ID NO: 812251 - DNA, 15 bp, Homo sapiens
tgggaggctctcagt

SEQ ID NO: 812252 - DNA, 15 bp, Homo sapiens
gggaggctctcagtt

SEQ ID NO: 812253 - DNA, 15 bp, Homo sapiens
ggaggctctcagtta

SEQ ID NO: 812254 - DNA, 15 bp, Homo sapiens
gaggctctcagttac

SEQ ID NO: 812255 - DNA, 15 bp, Homo sapiens
aggctctcagttaca

SEQ ID NO: 812256 - DNA, 15 bp, Homo sapiens
ggctctcagttacac

SEQ ID NO: 812257 - DNA, 15 bp, Homo sapiens
gctctcagttacact

SEQ ID NO: 812258 - DNA, 15 bp, Homo sapiens
ctctcagttacactt

SEQ ID NO: 812259 - DNA, 15 bp, Homo sapiens
tctcagttacacttg

SEQ ID NO: 812260 - DNA, 15 bp, Homo sapiens
ctcagttacacttga

SEQ ID NO: 812261 - DNA, 15 bp, Homo sapiens
tcagttacacttgag

SEQ ID NO: 812262 - DNA, 15 bp, Homo sapiens
cagttacacttgaga

SEQ ID NO: 812263 - DNA, 15 bp, Homo sapiens
agttacacttgagaa

SEQ ID NO: 812264 - DNA, 15 bp, Homo sapiens
gttacacttgagaaa

SEQ ID NO: 812265 - DNA, 15 bp, Homo sapiens
ttacacttgagaaag

SEQ ID NO: 812266 - DNA, 15 bp, Homo sapiens
tacacttgagaaaga

SEQ ID NO: 812267 - DNA, 15 bp, Homo sapiens
acacttgagaaagaa

SEQ ID NO: 812268 - DNA, 15 bp, Homo sapiens
cacttgagaaagaat

SEQ ID NO: 812269 - DNA, 15 bp, Homo sapiens
acttgagaaagaatt

SEQ ID NO: 812270 - DNA, 15 bp, Homo sapiens
cttgagaaagaatta

SEQ ID NO: 812271 - DNA, 15 bp, Homo sapiens
ttgagaaagaattat

SEQ ID NO: 812272 - DNA, 15 bp, Homo sapiens
tgagaaagaattatt

SEQ ID NO: 812273 - DNA, 15 bp, Homo sapiens
gagaaagaattattt

SEQ ID NO: 812274 - DNA, 15 bp, Homo sapiens
agaaagaattatttc

SEQ ID NO: 812275 - DNA, 15 bp, Homo sapiens
gaaagaattatttct

SEQ ID NO: 812276 - DNA, 15 bp, Homo sapiens
aaagaattatttctc

SEQ ID NO: 812277 - DNA, 15 bp, Homo sapiens
aagaattatttctct

SEQ ID NO: 812278 - DNA, 15 bp, Homo sapiens
agaattatttctctc

SEQ ID NO: 812279 - DNA, 15 bp, Homo sapiens
gaattatttctctca

SEQ ID NO: 812280 - DNA, 15 bp, Homo sapiens
aattatttctctcaa

SEQ ID NO: 812281 - DNA, 15 bp, Homo sapiens
attatttctctcaat

SEQ ID NO: 812282 - DNA, 15 bp, Homo sapiens
ttatttctctcaata

SEQ ID NO: 812283 - DNA, 15 bp, Homo sapiens
tatttctctcaatat

SEQ ID NO: 812284 - DNA, 15 bp, Homo sapiens
atttctctcaatatt

SEQ ID NO: 812285 - DNA, 15 bp, Homo sapiens
tttctctcaatattg

SEQ ID NO: 812286 - DNA, 15 bp, Homo sapiens
ttctctcaatattgt

SEQ ID NO: 812287 - DNA, 15 bp, Homo sapiens
tctctcaatattgtt

SEQ ID NO: 812288 - DNA, 15 bp, Homo sapiens
ctctcaatattgttc

SEQ ID NO: 812289 - DNA, 15 bp, Homo sapiens
tctcaatattgttct

SEQ ID NO: 812290 - DNA, 15 bp, Homo sapiens
ctcaatattgttctt

SEQ ID NO: 812291 - DNA, 15 bp, Homo sapiens
tcaatattgttcttc

SEQ ID NO: 812292 - DNA, 15 bp, Homo sapiens
caatattgttcttct

SEQ ID NO: 812293 - DNA, 15 bp, Homo sapiens
aatattgttcttctt

SEQ ID NO: 812294 - DNA, 15 bp, Homo sapiens
atattgttcttcttt

SEQ ID NO: 812295 - DNA, 15 bp, Homo sapiens
tattgttcttctttt

SEQ ID NO: 812296 - DNA, 15 bp, Homo sapiens
attgttcttcttttc

SEQ ID NO: 812297 - DNA, 15 bp, Homo sapiens
ttgttcttcttttcc

SEQ ID NO: 812298 - DNA, 15 bp, Homo sapiens
tgttcttcttttcct

SEQ ID NO: 812299 - DNA, 15 bp, Homo sapiens
gttcttcttttcctc

SEQ ID NO: 812300 - DNA, 15 bp, Homo sapiens
ttcttcttttcctcc

SEQ ID NO: 812301 - DNA, 15 bp, Homo sapiens
tcttcttttcctcca

SEQ ID NO: 812302 - DNA, 15 bp, Homo sapiens
cttcttttcctccag

SEQ ID NO: 812303 - DNA, 15 bp, Homo sapiens
ttcttttcctccaga

SEQ ID NO: 812304 - DNA, 15 bp, Homo sapiens
tcttttcctccagag

SEQ ID NO: 812305 - DNA, 15 bp, Homo sapiens
cttttcctccagagc

SEQ ID NO: 812306 - DNA, 15 bp, Homo sapiens
ttttcctccagagcc

SEQ ID NO: 812307 - DNA, 15 bp, Homo sapiens
tttcctccagagccc

SEQ ID NO: 812308 - DNA, 15 bp, Homo sapiens
ttcctccagagcccc

SEQ ID NO: 812309 - DNA, 15 bp, Homo sapiens
tcctccagagcccca

SEQ ID NO: 812310 - DNA, 15 bp, Homo sapiens
cctccagagccccag

SEQ ID NO: 812311 - DNA, 15 bp, Homo sapiens
ctccagagccccagt

SEQ ID NO: 812312 - DNA, 15 bp, Homo sapiens
tccagagccccagtg

SEQ ID NO: 812313 - DNA, 15 bp, Homo sapiens
ccagagccccagtgt

SEQ ID NO: 812314 - DNA, 15 bp, Homo sapiens
cagagccccagtgtg

SEQ ID NO: 812315 - DNA, 15 bp, Homo sapiens
agagccccagtgtga

SEQ ID NO: 812316 - DNA, 15 bp, Homo sapiens
gagccccagtgtgag

SEQ ID NO: 812317 - DNA, 15 bp, Homo sapiens
agccccagtgtgagc

SEQ ID NO: 812318 - DNA, 15 bp, Homo sapiens
gccccagtgtgagcc

SEQ ID NO: 812319 - DNA, 15 bp, Homo sapiens
ccccagtgtgagcct

SEQ ID NO: 812320 - DNA, 15 bp, Homo sapiens
cccagtgtgagcctg

SEQ ID NO: 812321 - DNA, 15 bp, Homo sapiens
ccagtgtgagcctgg

SEQ ID NO: 812322 - DNA, 15 bp, Homo sapiens
cagtgtgagcctggg

SEQ ID NO: 812323 - DNA, 15 bp, Homo sapiens
agtgtgagcctgggt

SEQ ID NO: 812324 - DNA, 15 bp, Homo sapiens
gtgtgagcctgggtg

SEQ ID NO: 812325 - DNA, 15 bp, Homo sapiens
tgtgagcctgggtgc

SEQ ID NO: 812326 - DNA, 15 bp, Homo sapiens
gtgagcctgggtgca

SEQ ID NO: 812327 - DNA, 15 bp, Homo sapiens
tgagcctgggtgcaa

SEQ ID NO: 812328 - DNA, 15 bp, Homo sapiens
gagcctgggtgcaag

SEQ ID NO: 812329 - DNA, 15 bp, Homo sapiens
agcctgggtgcaagc

SEQ ID NO: 812330 - DNA, 15 bp, Homo sapiens
gcctgggtgcaagct

SEQ ID NO: 812331 - DNA, 15 bp, Homo sapiens
cctgggtgcaagctc

SEQ ID NO: 812332 - DNA, 15 bp, Homo sapiens
ctgggtgcaagctct

SEQ ID NO: 812333 - DNA, 15 bp, Homo sapiens
ggtgcaagctctgat

SEQ ID NO: 812334 - DNA, 15 bp, Homo sapiens
gtgcaagctctgata

SEQ ID NO: 812335 - DNA, 15 bp, Homo sapiens
tgcaagctctgataa

SEQ ID NO: 812336 - DNA, 15 bp, Homo sapiens
gcaagctctgataaa

SEQ ID NO: 812337 - DNA, 15 bp, Homo sapiens
caagctctgataaat

SEQ ID NO: 812338 - DNA, 15 bp, Homo sapiens
aagctctgataaatt

SEQ ID NO: 812339 - DNA, 15 bp, Homo sapiens
agctctgataaatta

SEQ ID NO: 812340 - DNA, 15 bp, Homo sapiens
gctctgataaattaa

SEQ ID NO: 812341 - DNA, 15 bp, Homo sapiens
ctctgataaattaat

SEQ ID NO: 812342 - DNA, 15 bp, Homo sapiens
tctgataaattaatt

SEQ ID NO: 812343 - DNA, 15 bp, Homo sapiens
ctgataaattaattg

SEQ ID NO: 812344 - DNA, 15 bp, Homo sapiens
tgataaattaattga

SEQ ID NO: 812345 - DNA, 15 bp, Homo sapiens
gataaattaattgac

SEQ ID NO: 812346 - DNA, 15 bp, Homo sapiens
ataaattaattgaca

SEQ ID NO: 812347 - DNA, 15 bp, Homo sapiens
taaattaattgacag

SEQ ID NO: 812348 - DNA, 15 bp, Homo sapiens
aaattaattgacaga

SEQ ID NO: 812349 - DNA, 15 bp, Homo sapiens
aattaattgacagag

SEQ ID NO: 812350 - DNA, 15 bp, Homo sapiens
attaattgacagagg

SEQ ID NO: 812351 - DNA, 15 bp, Homo sapiens
ttaattgacagaggg

SEQ ID NO: 812352 - DNA, 15 bp, Homo sapiens
taattgacagagggt

SEQ ID NO: 812353 - DNA, 15 bp, Homo sapiens
aattgacagagggtt

SEQ ID NO: 812354 - DNA, 15 bp, Homo sapiens
attgacagagggttg

SEQ ID NO: 812355 - DNA, 15 bp, Homo sapiens
ttgacagagggttga

SEQ ID NO: 812356 - DNA, 15 bp, Homo sapiens
tgacagagggttgac

SEQ ID NO: 812357 - DNA, 15 bp, Homo sapiens
gacagagggttgact

SEQ ID NO: 812358 - DNA, 15 bp, Homo sapiens
acagagggttgactt

SEQ ID NO: 812359 - DNA, 15 bp, Homo sapiens
cagagggttgacttc

SEQ ID NO: 812360 - DNA, 15 bp, Homo sapiens
agagggttgacttct

SEQ ID NO: 812361 - DNA, 15 bp, Homo sapiens
gagggttgacttcta

SEQ ID NO: 812362 - DNA, 15 bp, Homo sapiens
agggttgacttctaa

SEQ ID NO: 812363 - DNA, 15 bp, Homo sapiens
gggttgacttctaac

SEQ ID NO: 812364 - DNA, 15 bp, Homo sapiens
ggttgacttctaacc

SEQ ID NO: 812365 - DNA, 15 bp, Homo sapiens
gttgacttctaaccc

SEQ ID NO: 812366 - DNA, 15 bp, Homo sapiens
ttgacttctaacccc

SEQ ID NO: 812367 - DNA, 15 bp, Homo sapiens
tgacttctaacccca

SEQ ID NO: 812368 - DNA, 15 bp, Homo sapiens
gacttctaaccccaa

SEQ ID NO: 812369 - DNA, 15 bp, Homo sapiens
acttctaaccccaac

SEQ ID NO: 812370 - DNA, 15 bp, Homo sapiens
cttctaaccccaact

SEQ ID NO: 812371 - DNA, 15 bp, Homo sapiens
ttctaaccccaactt

SEQ ID NO: 812372 - DNA, 15 bp, Homo sapiens
tctaaccccaacttc

SEQ ID NO: 812373 - DNA, 15 bp, Homo sapiens
ctaaccccaacttca

SEQ ID NO: 812374 - DNA, 15 bp, Homo sapiens
taaccccaacttcac

SEQ ID NO: 812375 - DNA, 15 bp, Homo sapiens
aaccccaacttcacc

SEQ ID NO: 812376 - DNA, 15 bp, Homo sapiens
accccaacttcaccg

SEQ ID NO: 812377 - DNA, 15 bp, Homo sapiens
ccccaacttcaccgg

SEQ ID NO: 812378 - DNA, 15 bp, Homo sapiens
cccaacttcaccggc

SEQ ID NO: 812379 - DNA, 15 bp, Homo sapiens
ccaacttcaccggca

SEQ ID NO: 812380 - DNA, 15 bp, Homo sapiens
caacttcaccggcaa

SEQ ID NO: 812381 - DNA, 15 bp, Homo sapiens
aacttcaccggcaaa

SEQ ID NO: 812382 - DNA, 15 bp, Homo sapiens
acttcaccggcaaac

SEQ ID NO: 812383 - DNA, 15 bp, Homo sapiens
cttcaccggcaaact

SEQ ID NO: 812384 - DNA, 15 bp, Homo sapiens
ttcaccggcaaactt

SEQ ID NO: 812385 - DNA, 15 bp, Homo sapiens
tcaccggcaaacttt

SEQ ID NO: 812386 - DNA, 15 bp, Homo sapiens
caccggcaaacttta

SEQ ID NO: 812387 - DNA, 15 bp, Homo sapiens
accggcaaactttag

SEQ ID NO: 812388 - DNA, 15 bp, Homo sapiens
ccggcaaactttagc

SEQ ID NO: 812389 - DNA, 15 bp, Homo sapiens
cggcaaactttagct

SEQ ID NO: 812390 - DNA, 15 bp, Homo sapiens
ggcaaactttagcta

SEQ ID NO: 812391 - DNA, 15 bp, Homo sapiens
gcaaactttagctat

SEQ ID NO: 812392 - DNA, 15 bp, Homo sapiens
caaactttagctatg

SEQ ID NO: 812393 - DNA, 15 bp, Homo sapiens
aaactttagctatgt

SEQ ID NO: 812394 - DNA, 15 bp, Homo sapiens
aactttagctatgta

SEQ ID NO: 812395 - DNA, 15 bp, Homo sapiens
actttagctatgtaa

SEQ ID NO: 812396 - DNA, 15 bp, Homo sapiens
ctttagctatgtaat

SEQ ID NO: 812397 - DNA, 15 bp, Homo sapiens
tttagctatgtaatt

SEQ ID NO: 812398 - DNA, 15 bp, Homo sapiens
ttagctatgtaattc

SEQ ID NO: 812399 - DNA, 15 bp, Homo sapiens
tagctatgtaattcc

SEQ ID NO: 812400 - DNA, 15 bp, Homo sapiens
agctatgtaattccg

SEQ ID NO: 812401 - DNA, 15 bp, Homo sapiens
gctatgtaattccgc

SEQ ID NO: 812402 - DNA, 15 bp, Homo sapiens
ctatgtaattccgca

SEQ ID NO: 812403 - DNA, 15 bp, Homo sapiens
tatgtaattccgcac

SEQ ID NO: 812404 - DNA, 15 bp, Homo sapiens
atgtaattccgcact

SEQ ID NO: 812405 - DNA, 15 bp, Homo sapiens
tgtaattccgcactg

SEQ ID NO: 812406 - DNA, 15 bp, Homo sapiens
gtaattccgcactgg

SEQ ID NO: 812407 - DNA, 15 bp, Homo sapiens
taattccgcactgga

SEQ ID NO: 812408 - DNA, 15 bp, Homo sapiens
aattccgcactggac

SEQ ID NO: 812409 - DNA, 15 bp, Homo sapiens
attccgcactggaca

SEQ ID NO: 812410 - DNA, 15 bp, Homo sapiens
ttccgcactggacag

SEQ ID NO: 812411 - DNA, 15 bp, Homo sapiens
tccgcactggacaga

SEQ ID NO: 812412 - DNA, 15 bp, Homo sapiens
ccgcactggacagac

SEQ ID NO: 812413 - DNA, 15 bp, Homo sapiens
cgcactggacagact

SEQ ID NO: 812414 - DNA, 15 bp, Homo sapiens
gcactggacagactg

SEQ ID NO: 812415 - DNA, 15 bp, Homo sapiens
cactggacagactga

SEQ ID NO: 812416 - DNA, 15 bp, Homo sapiens
actggacagactgac

SEQ ID NO: 812417 - DNA, 15 bp, Homo sapiens
ctggacagactgaca

SEQ ID NO: 812418 - DNA, 15 bp, Homo sapiens
tggacagactgacag

SEQ ID NO: 812419 - DNA, 15 bp, Homo sapiens
ggacagactgacagc

SEQ ID NO: 812420 - DNA, 15 bp, Homo sapiens
gacagactgacagct

SEQ ID NO: 812421 - DNA, 15 bp, Homo sapiens
acagactgacagctc

SEQ ID NO: 812422 - DNA, 15 bp, Homo sapiens
cagactgacagctca

SEQ ID NO: 812423 - DNA, 15 bp, Homo sapiens
agactgacagctcat

SEQ ID NO: 812424 - DNA, 15 bp, Homo sapiens
gactgacagctcatt

SEQ ID NO: 812425 - DNA, 15 bp, Homo sapiens
actgacagctcattt

SEQ ID NO: 812426 - DNA, 15 bp, Homo sapiens
ctgacagctcatttt

SEQ ID NO: 812427 - DNA, 15 bp, Homo sapiens
tgacagctcattttc

SEQ ID NO: 812428 - DNA, 15 bp, Homo sapiens
gacagctcattttcc

SEQ ID NO: 812429 - DNA, 15 bp, Homo sapiens
acagctcattttcct

SEQ ID NO: 812430 - DNA, 15 bp, Homo sapiens
cagctcattttcctc

SEQ ID NO: 812431 - DNA, 15 bp, Homo sapiens
agctcattttcctca

SEQ ID NO: 812432 - DNA, 15 bp, Homo sapiens
gctcattttcctcat

SEQ ID NO: 812433 - DNA, 15 bp, Homo sapiens
ctcattttcctcatc

SEQ ID NO: 812434 - DNA, 15 bp, Homo sapiens
tcattttcctcatcc

SEQ ID NO: 812435 - DNA, 15 bp, Homo sapiens
cattttcctcatcca

SEQ ID NO: 812436 - DNA, 15 bp, Homo sapiens
attttcctcatccac

SEQ ID NO: 812437 - DNA, 15 bp, Homo sapiens
ttttcctcatccaca

SEQ ID NO: 812438 - DNA, 15 bp, Homo sapiens
tttcctcatccacaa

SEQ ID NO: 812439 - DNA, 15 bp, Homo sapiens
ttcctcatccacaaa

SEQ ID NO: 812440 - DNA, 15 bp, Homo sapiens
tcctcatccacaaag

SEQ ID NO: 812441 - DNA, 15 bp, Homo sapiens
cctcatccacaaaga

SEQ ID NO: 812442 - DNA, 15 bp, Homo sapiens
ctcatccacaaagaa

SEQ ID NO: 812443 - DNA, 15 bp, Homo sapiens
tcatccacaaagaat

SEQ ID NO: 812444 - DNA, 15 bp, Homo sapiens
catccacaaagaatg

SEQ ID NO: 812445 - DNA, 15 bp, Homo sapiens
atccacaaagaatgc

SEQ ID NO: 812446 - DNA, 15 bp, Homo sapiens
tccacaaagaatgca

SEQ ID NO: 812447 - DNA, 15 bp, Homo sapiens
ccacaaagaatgcag

SEQ ID NO: 812448 - DNA, 15 bp, Homo sapiens
cacaaagaatgcagt

SEQ ID NO: 812449 - DNA, 15 bp, Homo sapiens
acaaagaatgcagtg

SEQ ID NO: 812450 - DNA, 15 bp, Homo sapiens
caaagaatgcagtgc

SEQ ID NO: 812451 - DNA, 15 bp, Homo sapiens
aaagaatgcagtgca

SEQ ID NO: 812452 - DNA, 15 bp, Homo sapiens
aagaatgcagtgcaa

SEQ ID NO: 812453 - DNA, 15 bp, Homo sapiens
agaatgcagtgcaat

SEQ ID NO: 812454 - DNA, 15 bp, Homo sapiens
gaatgcagtgcaata

SEQ ID NO: 812455 - DNA, 15 bp, Homo sapiens
aatgcagtgcaatag

SEQ ID NO: 812456 - DNA, 15 bp, Homo sapiens
atgcagtgcaataga

SEQ ID NO: 812457 - DNA, 15 bp, Homo sapiens
tgcagtgcaatagag

SEQ ID NO: 812458 - DNA, 15 bp, Homo sapiens
gcagtgcaatagaga

SEQ ID NO: 812459 - DNA, 15 bp, Homo sapiens
cagtgcaatagagaa

SEQ ID NO: 812460 - DNA, 15 bp, Homo sapiens
agtgcaatagagaac

SEQ ID NO: 812461 - DNA, 15 bp, Homo sapiens
gtgcaatagagaact

SEQ ID NO: 812462 - DNA, 15 bp, Homo sapiens
tgcaatagagaactt

SEQ ID NO: 812463 - DNA, 15 bp, Homo sapiens
gcaatagagaacttg

SEQ ID NO: 812464 - DNA, 15 bp, Homo sapiens
caatagagaacttgt

SEQ ID NO: 812465 - DNA, 15 bp, Homo sapiens
aatagagaacttgtg

SEQ ID NO: 812466 - DNA, 15 bp, Homo sapiens
atagagaacttgtga

SEQ ID NO: 812467 - DNA, 15 bp, Homo sapiens
tagagaacttgtgaa

SEQ ID NO: 812468 - DNA, 15 bp, Homo sapiens
agagaacttgtgaaa

SEQ ID NO: 812469 - DNA, 15 bp, Homo sapiens
gagaacttgtgaaat

SEQ ID NO: 812470 - DNA, 15 bp, Homo sapiens
agaacttgtgaaata

SEQ ID NO: 812471 - DNA, 15 bp, Homo sapiens
gaacttgtgaaatat

SEQ ID NO: 812472 - DNA, 15 bp, Homo sapiens
aacttgtgaaatatc

SEQ ID NO: 812473 - DNA, 15 bp, Homo sapiens
acttgtgaaatatct

SEQ ID NO: 812474 - DNA, 15 bp, Homo sapiens
cttgtgaaatatctt

SEQ ID NO: 812475 - DNA, 15 bp, Homo sapiens
ttgtgaaatatcttc

SEQ ID NO: 812476 - DNA, 15 bp, Homo sapiens
tgtgaaatatcttct

SEQ ID NO: 812477 - DNA, 15 bp, Homo sapiens
gtgaaatatcttcta

SEQ ID NO: 812478 - DNA, 15 bp, Homo sapiens
tgaaatatcttctaa

SEQ ID NO: 812479 - DNA, 15 bp, Homo sapiens
gaaatatcttctaac

SEQ ID NO: 812480 - DNA, 15 bp, Homo sapiens
aaatatcttctaact

SEQ ID NO: 812481 - DNA, 15 bp, Homo sapiens
aatatcttctaactt

SEQ ID NO: 812482 - DNA, 15 bp, Homo sapiens
atatcttctaacttt

SEQ ID NO: 812483 - DNA, 15 bp, Homo sapiens
tatcttctaacttta

SEQ ID NO: 812484 - DNA, 15 bp, Homo sapiens
atcttctaactttac

SEQ ID NO: 812485 - DNA, 15 bp, Homo sapiens
tcttctaactttacc

SEQ ID NO: 812486 - DNA, 15 bp, Homo sapiens
cttctaactttacca

SEQ ID NO: 812487 - DNA, 15 bp, Homo sapiens
ttctaactttaccac

SEQ ID NO: 812488 - DNA, 15 bp, Homo sapiens
tctaactttaccact

SEQ ID NO: 812489 - DNA, 15 bp, Homo sapiens
ctaactttaccactc

SEQ ID NO: 812490 - DNA, 15 bp, Homo sapiens
taactttaccactct

SEQ ID NO: 812491 - DNA, 15 bp, Homo sapiens
aactttaccactctt

SEQ ID NO: 812492 - DNA, 15 bp, Homo sapiens
actttaccactcttt

SEQ ID NO: 812493 - DNA, 15 bp, Homo sapiens
ctttaccactctttt

SEQ ID NO: 812494 - DNA, 15 bp, Homo sapiens
tttaccactcttttg

SEQ ID NO: 812495 - DNA, 15 bp, Homo sapiens
ttaccactcttttgt

SEQ ID NO: 812496 - DNA, 15 bp, Homo sapiens
taccactcttttgtt

SEQ ID NO: 812497 - DNA, 15 bp, Homo sapiens
accactcttttgttt

SEQ ID NO: 812498 - DNA, 15 bp, Homo sapiens
ccactcttttgtttt

SEQ ID NO: 812499 - DNA, 15 bp, Homo sapiens
cactcttttgttttc

SEQ ID NO: 812500 - DNA, 15 bp, Homo sapiens
actcttttgttttct

SEQ ID NO: 812501 - DNA, 15 bp, Homo sapiens
ctcttttgttttctt

SEQ ID NO: 812502 - DNA, 15 bp, Homo sapiens
tcttttgttttctta

SEQ ID NO: 812503 - DNA, 15 bp, Homo sapiens
cttttgttttcttaa

SEQ ID NO: 812504 - DNA, 15 bp, Homo sapiens
ttttgttttcttaat

SEQ ID NO: 812505 - DNA, 15 bp, Homo sapiens
tttgttttcttaatc

SEQ ID NO: 812506 - DNA, 15 bp, Homo sapiens
ttgttttcttaatcc

SEQ ID NO: 812507 - DNA, 15 bp, Homo sapiens
tgttttcttaatcct

SEQ ID NO: 812508 - DNA, 15 bp, Homo sapiens
gttttcttaatcctg

SEQ ID NO: 812509 - DNA, 15 bp, Homo sapiens
ttttcttaatcctgg

SEQ ID NO: 812510 - DNA, 15 bp, Homo sapiens
tttcttaatcctggc

SEQ ID NO: 812511 - DNA, 15 bp, Homo sapiens
ttcttaatcctggca

SEQ ID NO: 812512 - DNA, 15 bp, Homo sapiens
tcttaatcctggcaa

SEQ ID NO: 812513 - DNA, 15 bp, Homo sapiens
cttaatcctggcaaa

SEQ ID NO: 812514 - DNA, 15 bp, Homo sapiens
ttaatcctggcaaaa

SEQ ID NO: 812515 - DNA, 15 bp, Homo sapiens
taatcctggcaaaat

SEQ ID NO: 812516 - DNA, 15 bp, Homo sapiens
aatcctggcaaaatt

SEQ ID NO: 812517 - DNA, 15 bp, Homo sapiens
atcctggcaaaattc

SEQ ID NO: 812518 - DNA, 15 bp, Homo sapiens
tcctggcaaaattca

SEQ ID NO: 812519 - DNA, 15 bp, Homo sapiens
cctggcaaaattcac

SEQ ID NO: 812520 - DNA, 15 bp, Homo sapiens
ctggcaaaattcaca

SEQ ID NO: 812521 - DNA, 15 bp, Homo sapiens
tggcaaaattcacag

SEQ ID NO: 812522 - DNA, 15 bp, Homo sapiens
ggcaaaattcacaga

SEQ ID NO: 812523 - DNA, 15 bp, Homo sapiens
gcaaaattcacagag

SEQ ID NO: 812524 - DNA, 15 bp, Homo sapiens
caaaattcacagagc

SEQ ID NO: 812525 - DNA, 15 bp, Homo sapiens
aaaattcacagagca

SEQ ID NO: 812526 - DNA, 15 bp, Homo sapiens
aaattcacagagcat

SEQ ID NO: 812527 - DNA, 15 bp, Homo sapiens
aattcacagagcata

SEQ ID NO: 812528 - DNA, 15 bp, Homo sapiens
attcacagagcataa

SEQ ID NO: 812529 - DNA, 15 bp, Homo sapiens
ttcacagagcataaa

SEQ ID NO: 812530 - DNA, 15 bp, Homo sapiens
tcacagagcataaaa

SEQ ID NO: 812531 - DNA, 15 bp, Homo sapiens
cacagagcataaaag

SEQ ID NO: 812532 - DNA, 15 bp, Homo sapiens
acagagcataaaagt

SEQ ID NO: 812533 - DNA, 15 bp, Homo sapiens
cagagcataaaagta

SEQ ID NO: 812534 - DNA, 15 bp, Homo sapiens
agagcataaaagtaa

SEQ ID NO: 812535 - DNA, 15 bp, Homo sapiens
gagcataaaagtaac

SEQ ID NO: 812536 - DNA, 15 bp, Homo sapiens
agcataaaagtaact

SEQ ID NO: 812537 - DNA, 15 bp, Homo sapiens
gcataaaagtaacta

SEQ ID NO: 812538 - DNA, 15 bp, Homo sapiens
cataaaagtaactat

SEQ ID NO: 812539 - DNA, 15 bp, Homo sapiens
ataaaagtaactatt

SEQ ID NO: 812540 - DNA, 15 bp, Homo sapiens
taaaagtaactatta

SEQ ID NO: 812541 - DNA, 15 bp, Homo sapiens
aaaagtaactattag

SEQ ID NO: 812542 - DNA, 15 bp, Homo sapiens
aaagtaactattagc

SEQ ID NO: 812543 - DNA, 15 bp, Homo sapiens
aagtaactattagcc

SEQ ID NO: 812544 - DNA, 15 bp, Homo sapiens
agtaactattagcca

SEQ ID NO: 812545 - DNA, 15 bp, Homo sapiens
gtaactattagccat

SEQ ID NO: 812546 - DNA, 15 bp, Homo sapiens
taactattagccatt

SEQ ID NO: 812547 - DNA, 15 bp, Homo sapiens
aactattagccattt

SEQ ID NO: 812548 - DNA, 15 bp, Homo sapiens
actattagccatttt

SEQ ID NO: 812549 - DNA, 15 bp, Homo sapiens
ctattagccatttta

SEQ ID NO: 812550 - DNA, 15 bp, Homo sapiens
tattagccattttaa

SEQ ID NO: 812551 - DNA, 15 bp, Homo sapiens
attagccattttaat

SEQ ID NO: 812552 - DNA, 15 bp, Homo sapiens
ttagccattttaatg

SEQ ID NO: 812553 - DNA, 15 bp, Homo sapiens
tagccattttaatgt

SEQ ID NO: 812554 - DNA, 15 bp, Homo sapiens
agccattttaatgtg

SEQ ID NO: 812555 - DNA, 15 bp, Homo sapiens
gccattttaatgtgt

SEQ ID NO: 812556 - DNA, 15 bp, Homo sapiens
ccattttaatgtgta

SEQ ID NO: 812557 - DNA, 15 bp, Homo sapiens
cattttaatgtgtac

SEQ ID NO: 812558 - DNA, 15 bp, Homo sapiens
attttaatgtgtacg

SEQ ID NO: 812559 - DNA, 15 bp, Homo sapiens
ttttaatgtgtacga

SEQ ID NO: 812560 - DNA, 15 bp, Homo sapiens
tttaatgtgtacgat

SEQ ID NO: 812561 - DNA, 15 bp, Homo sapiens
ttaatgtgtacgata

SEQ ID NO: 812562 - DNA, 15 bp, Homo sapiens
taatgtgtacgatac

SEQ ID NO: 812563 - DNA, 15 bp, Homo sapiens
aatgtgtacgataca

SEQ ID NO: 812564 - DNA, 15 bp, Homo sapiens
atgtgtacgatacag

SEQ ID NO: 812565 - DNA, 15 bp, Homo sapiens
tgtgtacgatacagt

SEQ ID NO: 812566 - DNA, 15 bp, Homo sapiens
gtgtacgatacagtg

SEQ ID NO: 812567 - DNA, 15 bp, Homo sapiens
tgtacgatacagtgg

SEQ ID NO: 812568 - DNA, 15 bp, Homo sapiens
gtacgatacagtggt

SEQ ID NO: 812569 - DNA, 15 bp, Homo sapiens
tacgatacagtggtg

SEQ ID NO: 812570 - DNA, 15 bp, Homo sapiens
acgatacagtggtga

SEQ ID NO: 812571 - DNA, 15 bp, Homo sapiens
cgatacagtggtgat

SEQ ID NO: 812572 - DNA, 15 bp, Homo sapiens
gatacagtggtgatt

SEQ ID NO: 812573 - DNA, 15 bp, Homo sapiens
atacagtggtgattc

SEQ ID NO: 812574 - DNA, 15 bp, Homo sapiens
tacagtggtgattcg

SEQ ID NO: 812575 - DNA, 15 bp, Homo sapiens
acagtggtgattcgt

SEQ ID NO: 812576 - DNA, 15 bp, Homo sapiens
cagtggtgattcgta

SEQ ID NO: 812577 - DNA, 15 bp, Homo sapiens
agtggtgattcgtac

SEQ ID NO: 812578 - DNA, 15 bp, Homo sapiens
gtggtgattcgtacc

SEQ ID NO: 812579 - DNA, 15 bp, Homo sapiens
tggtgattcgtacct

SEQ ID NO: 812580 - DNA, 15 bp, Homo sapiens
ggtgattcgtacctt

SEQ ID NO: 812581 - DNA, 15 bp, Homo sapiens
gtgattcgtaccttc

SEQ ID NO: 812582 - DNA, 15 bp, Homo sapiens
tgattcgtaccttca

SEQ ID NO: 812583 - DNA, 15 bp, Homo sapiens
gattcgtaccttcac

SEQ ID NO: 812584 - DNA, 15 bp, Homo sapiens
attcgtaccttcaca

SEQ ID NO: 812585 - DNA, 15 bp, Homo sapiens
ttcgtaccttcacaa

SEQ ID NO: 812586 - DNA, 15 bp, Homo sapiens
tcgtaccttcacaat

SEQ ID NO: 812587 - DNA, 15 bp, Homo sapiens
cgtaccttcacaatg

SEQ ID NO: 812588 - DNA, 15 bp, Homo sapiens
gtaccttcacaatgt

SEQ ID NO: 812589 - DNA, 15 bp, Homo sapiens
taccttcacaatgtt

SEQ ID NO: 812590 - DNA, 15 bp, Homo sapiens
accttcacaatgtta

SEQ ID NO: 812591 - DNA, 15 bp, Homo sapiens
ccttcacaatgttat

SEQ ID NO: 812592 - DNA, 15 bp, Homo sapiens
cttcacaatgttatg

SEQ ID NO: 812593 - DNA, 15 bp, Homo sapiens
ttcacaatgttatgc

SEQ ID NO: 812594 - DNA, 15 bp, Homo sapiens
tcacaatgttatgca

SEQ ID NO: 812595 - DNA, 15 bp, Homo sapiens
cacaatgttatgcaa

SEQ ID NO: 812596 - DNA, 15 bp, Homo sapiens
acaatgttatgcaac

SEQ ID NO: 812597 - DNA, 15 bp, Homo sapiens
caatgttatgcaacc

SEQ ID NO: 812598 - DNA, 15 bp, Homo sapiens
aatgttatgcaacca

SEQ ID NO: 812599 - DNA, 15 bp, Homo sapiens
atgttatgcaaccat

SEQ ID NO: 812600 - DNA, 15 bp, Homo sapiens
tgttatgcaaccatc

SEQ ID NO: 812601 - DNA, 15 bp, Homo sapiens
gttatgcaaccatca

SEQ ID NO: 812602 - DNA, 15 bp, Homo sapiens
ttatgcaaccatcac

SEQ ID NO: 812603 - DNA, 15 bp, Homo sapiens
tatgcaaccatcact

SEQ ID NO: 812604 - DNA, 15 bp, Homo sapiens
atgcaaccatcactt

SEQ ID NO: 812605 - DNA, 15 bp, Homo sapiens
tgcaaccatcacttc

SEQ ID NO: 812606 - DNA, 15 bp, Homo sapiens
gcaaccatcacttct

SEQ ID NO: 812607 - DNA, 15 bp, Homo sapiens
caaccatcacttcta

SEQ ID NO: 812608 - DNA, 15 bp, Homo sapiens
aaccatcacttctat

SEQ ID NO: 812609 - DNA, 15 bp, Homo sapiens
accatcacttctatt

SEQ ID NO: 812610 - DNA, 15 bp, Homo sapiens
ccatcacttctattt

SEQ ID NO: 812611 - DNA, 15 bp, Homo sapiens
catcacttctattta

SEQ ID NO: 812612 - DNA, 15 bp, Homo sapiens
atcacttctatttag

SEQ ID NO: 812613 - DNA, 15 bp, Homo sapiens
tcacttctatttagt

SEQ ID NO: 812614 - DNA, 15 bp, Homo sapiens
cacttctatttagtc

SEQ ID NO: 812615 - DNA, 15 bp, Homo sapiens
acttctatttagtca

SEQ ID NO: 812616 - DNA, 15 bp, Homo sapiens
cttctatttagtcaa

SEQ ID NO: 812617 - DNA, 15 bp, Homo sapiens
ttctatttagtcaag

SEQ ID NO: 812618 - DNA, 15 bp, Homo sapiens
tctatttagtcaaga

SEQ ID NO: 812619 - DNA, 15 bp, Homo sapiens
ctatttagtcaagac

SEQ ID NO: 812620 - DNA, 15 bp, Homo sapiens
tatttagtcaagaca

SEQ ID NO: 812621 - DNA, 15 bp, Homo sapiens
atttagtcaagacat

SEQ ID NO: 812622 - DNA, 15 bp, Homo sapiens
tttagtcaagacatt

SEQ ID NO: 812623 - DNA, 15 bp, Homo sapiens
ttagtcaagacattt

SEQ ID NO: 812624 - DNA, 15 bp, Homo sapiens
tagtcaagacatttc

SEQ ID NO: 812625 - DNA, 15 bp, Homo sapiens
agtcaagacatttct

SEQ ID NO: 812626 - DNA, 15 bp, Homo sapiens
gtcaagacatttctg

SEQ ID NO: 812627 - DNA, 15 bp, Homo sapiens
tcaagacatttctgt

SEQ ID NO: 812628 - DNA, 15 bp, Homo sapiens
caagacatttctgta

SEQ ID NO: 812629 - DNA, 15 bp, Homo sapiens
aagacatttctgtaa

SEQ ID NO: 812630 - DNA, 15 bp, Homo sapiens
agacatttctgtaaa

SEQ ID NO: 812631 - DNA, 15 bp, Homo sapiens
gacatttctgtaaac

SEQ ID NO: 812632 - DNA, 15 bp, Homo sapiens
acatttctgtaaacc

SEQ ID NO: 812633 - DNA, 15 bp, Homo sapiens
catttctgtaaaccc

SEQ ID NO: 812634 - DNA, 15 bp, Homo sapiens
atttctgtaaaccca

SEQ ID NO: 812635 - DNA, 15 bp, Homo sapiens
tttctgtaaacccaa

SEQ ID NO: 812636 - DNA, 15 bp, Homo sapiens
ttctgtaaacccaaa

SEQ ID NO: 812637 - DNA, 15 bp, Homo sapiens
tctgtaaacccaaaa

SEQ ID NO: 812638 - DNA, 15 bp, Homo sapiens
ctgtaaacccaaaag

SEQ ID NO: 812639 - DNA, 15 bp, Homo sapiens
tgtaaacccaaaagg

SEQ ID NO: 812640 - DNA, 15 bp, Homo sapiens
gtaaacccaaaagga

SEQ ID NO: 812641 - DNA, 15 bp, Homo sapiens
taaacccaaaaggaa

SEQ ID NO: 812642 - DNA, 15 bp, Homo sapiens
aaacccaaaaggaaa

SEQ ID NO: 812643 - DNA, 15 bp, Homo sapiens
aacccaaaaggaaac

SEQ ID NO: 812644 - DNA, 15 bp, Homo sapiens
acccaaaaggaaacc

SEQ ID NO: 812645 - DNA, 15 bp, Homo sapiens
cccaaaaggaaaccc

SEQ ID NO: 812646 - DNA, 15 bp, Homo sapiens
ccaaaaggaaacccc

SEQ ID NO: 812647 - DNA, 15 bp, Homo sapiens
caaaaggaaacccca

SEQ ID NO: 812648 - DNA, 15 bp, Homo sapiens
aaaaggaaaccccat

SEQ ID NO: 812649 - DNA, 15 bp, Homo sapiens
aaaggaaaccccata

SEQ ID NO: 812650 - DNA, 15 bp, Homo sapiens
aaggaaaccccatac

SEQ ID NO: 812651 - DNA, 15 bp, Homo sapiens
aggaaaccccatact

SEQ ID NO: 812652 - DNA, 15 bp, Homo sapiens
ggaaaccccatactc

SEQ ID NO: 812653 - DNA, 15 bp, Homo sapiens
gaaaccccatactca

SEQ ID NO: 812654 - DNA, 15 bp, Homo sapiens
aaaccccatactcat

SEQ ID NO: 812655 - DNA, 15 bp, Homo sapiens
aaccccatactcatc

SEQ ID NO: 812656 - DNA, 15 bp, Homo sapiens
accccatactcatca

SEQ ID NO: 812657 - DNA, 15 bp, Homo sapiens
ccccatactcatcag

SEQ ID NO: 812658 - DNA, 15 bp, Homo sapiens
cccatactcatcaga

SEQ ID NO: 812659 - DNA, 15 bp, Homo sapiens
ccatactcatcagag

SEQ ID NO: 812660 - DNA, 15 bp, Homo sapiens
catactcatcagagt

SEQ ID NO: 812661 - DNA, 15 bp, Homo sapiens
atactcatcagagtc

SEQ ID NO: 812662 - DNA, 15 bp, Homo sapiens
tactcatcagagtca

SEQ ID NO: 812663 - DNA, 15 bp, Homo sapiens
actcatcagagtcac

SEQ ID NO: 812664 - DNA, 15 bp, Homo sapiens
ctcatcagagtcact

SEQ ID NO: 812665 - DNA, 15 bp, Homo sapiens
catcagagtcactcc

SEQ ID NO: 812666 - DNA, 15 bp, Homo sapiens
atcagagtcactccc

SEQ ID NO: 812667 - DNA, 15 bp, Homo sapiens
tcagagtcactcccc

SEQ ID NO: 812668 - DNA, 15 bp, Homo sapiens
cagagtcactcccca

SEQ ID NO: 812669 - DNA, 15 bp, Homo sapiens
agagtcactccccat

SEQ ID NO: 812670 - DNA, 15 bp, Homo sapiens
gagtcactccccatt

SEQ ID NO: 812671 - DNA, 15 bp, Homo sapiens
agtcactccccattc

SEQ ID NO: 812672 - DNA, 15 bp, Homo sapiens
gtcactccccattcc

SEQ ID NO: 812673 - DNA, 15 bp, Homo sapiens
tcactccccattcct

SEQ ID NO: 812674 - DNA, 15 bp, Homo sapiens
cactccccattcctc

SEQ ID NO: 812675 - DNA, 15 bp, Homo sapiens
actccccattcctct

SEQ ID NO: 812676 - DNA, 15 bp, Homo sapiens
ctccccattcctctg

SEQ ID NO: 812677 - DNA, 15 bp, Homo sapiens
tccccattcctctgt

SEQ ID NO: 812678 - DNA, 15 bp, Homo sapiens
ccccattcctctgtc

SEQ ID NO: 812679 - DNA, 15 bp, Homo sapiens
cccattcctctgtcc

SEQ ID NO: 812680 - DNA, 15 bp, Homo sapiens
ccattcctctgtcct

SEQ ID NO: 812681 - DNA, 15 bp, Homo sapiens
cattcctctgtcctc

SEQ ID NO: 812682 - DNA, 15 bp, Homo sapiens
attcctctgtcctcc

SEQ ID NO: 812683 - DNA, 15 bp, Homo sapiens
ttcctctgtcctcct

SEQ ID NO: 812684 - DNA, 15 bp, Homo sapiens
tcctctgtcctccta

SEQ ID NO: 812685 - DNA, 15 bp, Homo sapiens
cctctgtcctcctag

SEQ ID NO: 812686 - DNA, 15 bp, Homo sapiens
ctctgtcctcctagg

SEQ ID NO: 812687 - DNA, 15 bp, Homo sapiens
tctgtcctcctaggc

SEQ ID NO: 812688 - DNA, 15 bp, Homo sapiens
ctgtcctcctaggcc

SEQ ID NO: 812689 - DNA, 15 bp, Homo sapiens
tgtcctcctaggccc

SEQ ID NO: 812690 - DNA, 15 bp, Homo sapiens
gtcctcctaggccct

SEQ ID NO: 812691 - DNA, 15 bp, Homo sapiens
tcctcctaggccctg

SEQ ID NO: 812692 - DNA, 15 bp, Homo sapiens
cctcctaggccctga

SEQ ID NO: 812693 - DNA, 15 bp, Homo sapiens
ctcctaggccctgac

SEQ ID NO: 812694 - DNA, 15 bp, Homo sapiens
tcctaggccctgaca

SEQ ID NO: 812695 - DNA, 15 bp, Homo sapiens
cctaggccctgacaa

SEQ ID NO: 812696 - DNA, 15 bp, Homo sapiens
ctaggccctgacaac

SEQ ID NO: 812697 - DNA, 15 bp, Homo sapiens
taggccctgacaacc

SEQ ID NO: 812698 - DNA, 15 bp, Homo sapiens
aggccctgacaacca

SEQ ID NO: 812699 - DNA, 15 bp, Homo sapiens
ggccctgacaaccac

SEQ ID NO: 812700 - DNA, 15 bp, Homo sapiens
gccctgacaaccact

SEQ ID NO: 812701 - DNA, 15 bp, Homo sapiens
ccctgacaaccactg

SEQ ID NO: 812702 - DNA, 15 bp, Homo sapiens
cctgacaaccactga

SEQ ID NO: 812703 - DNA, 15 bp, Homo sapiens
ctgacaaccactgat

SEQ ID NO: 812704 - DNA, 15 bp, Homo sapiens
tgacaaccactgatc

SEQ ID NO: 812705 - DNA, 15 bp, Homo sapiens
gacaaccactgatct

SEQ ID NO: 812706 - DNA, 15 bp, Homo sapiens
acaaccactgatctg

SEQ ID NO: 812707 - DNA, 15 bp, Homo sapiens
caaccactgatctgc

SEQ ID NO: 812708 - DNA, 15 bp, Homo sapiens
aaccactgatctgct

SEQ ID NO: 812709 - DNA, 15 bp, Homo sapiens
accactgatctgctt

SEQ ID NO: 812710 - DNA, 15 bp, Homo sapiens
ccactgatctgcttt

SEQ ID NO: 812711 - DNA, 15 bp, Homo sapiens
cactgatctgctttc

SEQ ID NO: 812712 - DNA, 15 bp, Homo sapiens
actgatctgctttct

SEQ ID NO: 812713 - DNA, 15 bp, Homo sapiens
ctgatctgctttctg

SEQ ID NO: 812714 - DNA, 15 bp, Homo sapiens
tgatctgctttctgt

SEQ ID NO: 812715 - DNA, 15 bp, Homo sapiens
gatctgctttctgtc

SEQ ID NO: 812716 - DNA, 15 bp, Homo sapiens
atctgctttctgtct

SEQ ID NO: 812717 - DNA, 15 bp, Homo sapiens
tctgctttctgtctc

SEQ ID NO: 812718 - DNA, 15 bp, Homo sapiens
ctgctttctgtctct

SEQ ID NO: 812719 - DNA, 15 bp, Homo sapiens
tgctttctgtctcta

SEQ ID NO: 812720 - DNA, 15 bp, Homo sapiens
gctttctgtctctat

SEQ ID NO: 812721 - DNA, 15 bp, Homo sapiens
ctttctgtctctatg

SEQ ID NO: 812722 - DNA, 15 bp, Homo sapiens
tttctgtctctatgg

SEQ ID NO: 812723 - DNA, 15 bp, Homo sapiens
ttctgtctctatgga

SEQ ID NO: 812724 - DNA, 15 bp, Homo sapiens
tctgtctctatggat

SEQ ID NO: 812725 - DNA, 15 bp, Homo sapiens
ctgtctctatggatt

SEQ ID NO: 812726 - DNA, 15 bp, Homo sapiens
tgtctctatggattt

SEQ ID NO: 812727 - DNA, 15 bp, Homo sapiens
gtctctatggattta

SEQ ID NO: 812728 - DNA, 15 bp, Homo sapiens
tctctatggatttac

SEQ ID NO: 812729 - DNA, 15 bp, Homo sapiens
ctctatggatttacc

SEQ ID NO: 812730 - DNA, 15 bp, Homo sapiens
tctatggatttacct

SEQ ID NO: 812731 - DNA, 15 bp, Homo sapiens
ctatggatttacctc

SEQ ID NO: 812732 - DNA, 15 bp, Homo sapiens
tatggatttacctct

SEQ ID NO: 812733 - DNA, 15 bp, Homo sapiens
atggatttacctctt

SEQ ID NO: 812734 - DNA, 15 bp, Homo sapiens
tggatttacctcttc

SEQ ID NO: 812735 - DNA, 15 bp, Homo sapiens
ggatttacctcttct

SEQ ID NO: 812736 - DNA, 15 bp, Homo sapiens
gatttacctcttcta

SEQ ID NO: 812737 - DNA, 15 bp, Homo sapiens
atttacctcttctag

SEQ ID NO: 812738 - DNA, 15 bp, Homo sapiens
tttacctcttctaga

SEQ ID NO: 812739 - DNA, 15 bp, Homo sapiens
ttacctcttctagat

SEQ ID NO: 812740 - DNA, 15 bp, Homo sapiens
tacctcttctagatg

SEQ ID NO: 812741 - DNA, 15 bp, Homo sapiens
acctcttctagatgt

SEQ ID NO: 812742 - DNA, 15 bp, Homo sapiens
cctcttctagatgtt

SEQ ID NO: 812743 - DNA, 15 bp, Homo sapiens
ctcttctagatgttt

SEQ ID NO: 812744 - DNA, 15 bp, Homo sapiens
tcttctagatgtttc

SEQ ID NO: 812745 - DNA, 15 bp, Homo sapiens
cttctagatgtttca

SEQ ID NO: 812746 - DNA, 15 bp, Homo sapiens
ttctagatgtttcat

SEQ ID NO: 812747 - DNA, 15 bp, Homo sapiens
tctagatgtttcatc

SEQ ID NO: 812748 - DNA, 15 bp, Homo sapiens
ctagatgtttcatct

SEQ ID NO: 812749 - DNA, 15 bp, Homo sapiens
tagatgtttcatcta

SEQ ID NO: 812750 - DNA, 15 bp, Homo sapiens
agatgtttcatctaa

SEQ ID NO: 812751 - DNA, 15 bp, Homo sapiens
gatgtttcatctaaa

SEQ ID NO: 812752 - DNA, 15 bp, Homo sapiens
atgtttcatctaaat

SEQ ID NO: 812753 - DNA, 15 bp, Homo sapiens
tgtttcatctaaatg

SEQ ID NO: 812754 - DNA, 15 bp, Homo sapiens
gtttcatctaaatgg

SEQ ID NO: 812755 - DNA, 15 bp, Homo sapiens
tttcatctaaatgga

SEQ ID NO: 812756 - DNA, 15 bp, Homo sapiens
ttcatctaaatggaa

SEQ ID NO: 812757 - DNA, 15 bp, Homo sapiens
tcatctaaatggaat

SEQ ID NO: 812758 - DNA, 15 bp, Homo sapiens
catctaaatggaatc

SEQ ID NO: 812759 - DNA, 15 bp, Homo sapiens
atctaaatggaatca

SEQ ID NO: 812760 - DNA, 15 bp, Homo sapiens
tctaaatggaatcat

SEQ ID NO: 812761 - DNA, 15 bp, Homo sapiens
ctaaatggaatcata

SEQ ID NO: 812762 - DNA, 15 bp, Homo sapiens
taaatggaatcatat

SEQ ID NO: 812763 - DNA, 15 bp, Homo sapiens
aaatggaatcatata

SEQ ID NO: 812764 - DNA, 15 bp, Homo sapiens
aatggaatcatatat

SEQ ID NO: 812765 - DNA, 15 bp, Homo sapiens
atggaatcatatatt

SEQ ID NO: 812766 - DNA, 15 bp, Homo sapiens
tggaatcatatattt

SEQ ID NO: 812767 - DNA, 15 bp, Homo sapiens
ggaatcatatatttg

SEQ ID NO: 812768 - DNA, 15 bp, Homo sapiens
gaatcatatatttgc

SEQ ID NO: 812769 - DNA, 15 bp, Homo sapiens
aatcatatatttgcg

SEQ ID NO: 812770 - DNA, 15 bp, Homo sapiens
atcatatatttgcga

SEQ ID NO: 812771 - DNA, 15 bp, Homo sapiens
tcatatatttgcgac

SEQ ID NO: 812772 - DNA, 15 bp, Homo sapiens
catatatttgcgacc

SEQ ID NO: 812773 - DNA, 15 bp, Homo sapiens
atatatttgcgacct

SEQ ID NO: 812774 - DNA, 15 bp, Homo sapiens
tatatttgcgacctt

SEQ ID NO: 812775 - DNA, 15 bp, Homo sapiens
atatttgcgaccttt

SEQ ID NO: 812776 - DNA, 15 bp, Homo sapiens
tatttgcgacctttg

SEQ ID NO: 812777 - DNA, 15 bp, Homo sapiens
atttgcgacctttgt

SEQ ID NO: 812778 - DNA, 15 bp, Homo sapiens
tttgcgacctttgtg

SEQ ID NO: 812779 - DNA, 15 bp, Homo sapiens
ttgcgacctttgtgt

SEQ ID NO: 812780 - DNA, 15 bp, Homo sapiens
tgcgacctttgtgtc

SEQ ID NO: 812781 - DNA, 15 bp, Homo sapiens
gcgacctttgtgtct

SEQ ID NO: 812782 - DNA, 15 bp, Homo sapiens
cgacctttgtgtctg

SEQ ID NO: 812783 - DNA, 15 bp, Homo sapiens
gacctttgtgtctgg

SEQ ID NO: 812784 - DNA, 15 bp, Homo sapiens
acctttgtgtctggc

SEQ ID NO: 812785 - DNA, 15 bp, Homo sapiens
cctttgtgtctggct

SEQ ID NO: 812786 - DNA, 15 bp, Homo sapiens
ctttgtgtctggctt

SEQ ID NO: 812787 - DNA, 15 bp, Homo sapiens
ttgtgtctggcttcc

SEQ ID NO: 812788 - DNA, 15 bp, Homo sapiens
tgtgtctggcttcct

SEQ ID NO: 812789 - DNA, 15 bp, Homo sapiens
gtgtctggcttcctt

SEQ ID NO: 812790 - DNA, 15 bp, Homo sapiens
tgtctggcttccttc

SEQ ID NO: 812791 - DNA, 15 bp, Homo sapiens
gtctggcttccttca

SEQ ID NO: 812792 - DNA, 15 bp, Homo sapiens
tctggcttccttcat

SEQ ID NO: 812793 - DNA, 15 bp, Homo sapiens
ctggcttccttcatt

SEQ ID NO: 812794 - DNA, 15 bp, Homo sapiens
tggcttccttcattg

SEQ ID NO: 812795 - DNA, 15 bp, Homo sapiens
ggcttccttcattga

SEQ ID NO: 812796 - DNA, 15 bp, Homo sapiens
gcttccttcattgac

SEQ ID NO: 812797 - DNA, 15 bp, Homo sapiens
cttccttcattgaca

SEQ ID NO: 812798 - DNA, 15 bp, Homo sapiens
ttccttcattgacat

SEQ ID NO: 812799 - DNA, 15 bp, Homo sapiens
tccttcattgacata

SEQ ID NO: 812800 - DNA, 15 bp, Homo sapiens
ccttcattgacataa

SEQ ID NO: 812801 - DNA, 15 bp, Homo sapiens
cttcattgacataat

SEQ ID NO: 812802 - DNA, 15 bp, Homo sapiens
ttcattgacataatg

SEQ ID NO: 812803 - DNA, 15 bp, Homo sapiens
tcattgacataatgc

SEQ ID NO: 812804 - DNA, 15 bp, Homo sapiens
cattgacataatgct

SEQ ID NO: 812805 - DNA, 15 bp, Homo sapiens
attgacataatgctt

SEQ ID NO: 812806 - DNA, 15 bp, Homo sapiens
ttgacataatgcttt

SEQ ID NO: 812807 - DNA, 15 bp, Homo sapiens
tgacataatgctttc

SEQ ID NO: 812808 - DNA, 15 bp, Homo sapiens
gacataatgctttca

SEQ ID NO: 812809 - DNA, 15 bp, Homo sapiens
acataatgctttcaa

SEQ ID NO: 812810 - DNA, 15 bp, Homo sapiens
cataatgctttcaag

SEQ ID NO: 812811 - DNA, 15 bp, Homo sapiens
ataatgctttcaagg

SEQ ID NO: 812812 - DNA, 15 bp, Homo sapiens
taatgctttcaaggt

SEQ ID NO: 812813 - DNA, 15 bp, Homo sapiens
aatgctttcaaggtt

SEQ ID NO: 812814 - DNA, 15 bp, Homo sapiens
atgctttcaaggttc

SEQ ID NO: 812815 - DNA, 15 bp, Homo sapiens
tgctttcaaggttca

SEQ ID NO: 812816 - DNA, 15 bp, Homo sapiens
gctttcaaggttcat

SEQ ID NO: 812817 - DNA, 15 bp, Homo sapiens
ctttcaaggttcatc

SEQ ID NO: 812818 - DNA, 15 bp, Homo sapiens
tttcaaggttcatcc

SEQ ID NO: 812819 - DNA, 15 bp, Homo sapiens
ttcaaggttcatcca

SEQ ID NO: 812820 - DNA, 15 bp, Homo sapiens
tcaaggttcatccac

SEQ ID NO: 812821 - DNA, 15 bp, Homo sapiens
caaggttcatccacg

SEQ ID NO: 812822 - DNA, 15 bp, Homo sapiens
aaggttcatccacgt

SEQ ID NO: 812823 - DNA, 15 bp, Homo sapiens
aggttcatccacgtt

SEQ ID NO: 812824 - DNA, 15 bp, Homo sapiens
ggttcatccacgttg

SEQ ID NO: 812825 - DNA, 15 bp, Homo sapiens
gttcatccacgttgt

SEQ ID NO: 812826 - DNA, 15 bp, Homo sapiens
ttcatccacgttgta

SEQ ID NO: 812827 - DNA, 15 bp, Homo sapiens
tcatccacgttgtag

SEQ ID NO: 812828 - DNA, 15 bp, Homo sapiens
catccacgttgtagc

SEQ ID NO: 812829 - DNA, 15 bp, Homo sapiens
atccacgttgtagca

SEQ ID NO: 812830 - DNA, 15 bp, Homo sapiens
tccacgttgtagcac

SEQ ID NO: 812831 - DNA, 15 bp, Homo sapiens
ccacgttgtagcacg

SEQ ID NO: 812832 - DNA, 15 bp, Homo sapiens
cacgttgtagcacgt

SEQ ID NO: 812833 - DNA, 15 bp, Homo sapiens
acgttgtagcacgta

SEQ ID NO: 812834 - DNA, 15 bp, Homo sapiens
cgttgtagcacgtat

SEQ ID NO: 812835 - DNA, 15 bp, Homo sapiens
gttgtagcacgtatc

SEQ ID NO: 812836 - DNA, 15 bp, Homo sapiens
ttgtagcacgtatca

SEQ ID NO: 812837 - DNA, 15 bp, Homo sapiens
tgtagcacgtatcag

SEQ ID NO: 812838 - DNA, 15 bp, Homo sapiens
gtagcacgtatcagt

SEQ ID NO: 812839 - DNA, 15 bp, Homo sapiens
tagcacgtatcagta

SEQ ID NO: 812840 - DNA, 15 bp, Homo sapiens
agcacgtatcagtac

SEQ ID NO: 812841 - DNA, 15 bp, Homo sapiens
gcacgtatcagtact

SEQ ID NO: 812842 - DNA, 15 bp, Homo sapiens
cacgtatcagtactt

SEQ ID NO: 812843 - DNA, 15 bp, Homo sapiens
acgtatcagtactta

SEQ ID NO: 812844 - DNA, 15 bp, Homo sapiens
cgtatcagtacttaa

SEQ ID NO: 812845 - DNA, 15 bp, Homo sapiens
gtatcagtacttaat

SEQ ID NO: 812846 - DNA, 15 bp, Homo sapiens
tatcagtacttaatt

SEQ ID NO: 812847 - DNA, 15 bp, Homo sapiens
atcagtacttaattc

SEQ ID NO: 812848 - DNA, 15 bp, Homo sapiens
tcagtacttaattcc

SEQ ID NO: 812849 - DNA, 15 bp, Homo sapiens
cagtacttaattccc

SEQ ID NO: 812850 - DNA, 15 bp, Homo sapiens
agtacttaattccct

SEQ ID NO: 812851 - DNA, 15 bp, Homo sapiens
gtacttaattccctt

SEQ ID NO: 812852 - DNA, 15 bp, Homo sapiens
tacttaattcccttt

SEQ ID NO: 812853 - DNA, 15 bp, Homo sapiens
acttaattccctttg

SEQ ID NO: 812854 - DNA, 15 bp, Homo sapiens
cttaattccctttga

SEQ ID NO: 812855 - DNA, 15 bp, Homo sapiens
ttaattccctttgat

SEQ ID NO: 812856 - DNA, 15 bp, Homo sapiens
taattccctttgatg

SEQ ID NO: 812857 - DNA, 15 bp, Homo sapiens
aattccctttgatgg

SEQ ID NO: 812858 - DNA, 15 bp, Homo sapiens
attccctttgatggc

SEQ ID NO: 812859 - DNA, 15 bp, Homo sapiens
ttccctttgatggct

SEQ ID NO: 812860 - DNA, 15 bp, Homo sapiens
tccctttgatggctg

SEQ ID NO: 812861 - DNA, 15 bp, Homo sapiens
ccctttgatggctga

SEQ ID NO: 812862 - DNA, 15 bp, Homo sapiens
cctttgatggctgaa

SEQ ID NO: 812863 - DNA, 15 bp, Homo sapiens
ctttgatggctgaat

SEQ ID NO: 812864 - DNA, 15 bp, Homo sapiens
tttgatggctgaata

SEQ ID NO: 812865 - DNA, 15 bp, Homo sapiens
ttgatggctgaataa

SEQ ID NO: 812866 - DNA, 15 bp, Homo sapiens
tgatggctgaataat

SEQ ID NO: 812867 - DNA, 15 bp, Homo sapiens
gatggctgaataata

SEQ ID NO: 812868 - DNA, 15 bp, Homo sapiens
atggctgaataatat

SEQ ID NO: 812869 - DNA, 15 bp, Homo sapiens
tggctgaataatatt

SEQ ID NO: 812870 - DNA, 15 bp, Homo sapiens
ggctgaataatattc

SEQ ID NO: 812871 - DNA, 15 bp, Homo sapiens
gctgaataatattcc

SEQ ID NO: 812872 - DNA, 15 bp, Homo sapiens
ctgaataatattcca

SEQ ID NO: 812873 - DNA, 15 bp, Homo sapiens
tgaataatattccat

SEQ ID NO: 812874 - DNA, 15 bp, Homo sapiens
gaataatattccatt

SEQ ID NO: 812875 - DNA, 15 bp, Homo sapiens
aataatattccattt

SEQ ID NO: 812876 - DNA, 15 bp, Homo sapiens
ataatattccatttt

SEQ ID NO: 812877 - DNA, 15 bp, Homo sapiens
taatattccatttta

SEQ ID NO: 812878 - DNA, 15 bp, Homo sapiens
aatattccattttat

SEQ ID NO: 812879 - DNA, 15 bp, Homo sapiens
atattccattttatg

SEQ ID NO: 812880 - DNA, 15 bp, Homo sapiens
tattccattttatgt

SEQ ID NO: 812881 - DNA, 15 bp, Homo sapiens
attccattttatgtc

SEQ ID NO: 812882 - DNA, 15 bp, Homo sapiens
ttccattttatgtct

SEQ ID NO: 812883 - DNA, 15 bp, Homo sapiens
tccattttatgtctg

SEQ ID NO: 812884 - DNA, 15 bp, Homo sapiens
ccattttatgtctgc

SEQ ID NO: 812885 - DNA, 15 bp, Homo sapiens
cattttatgtctgcc

SEQ ID NO: 812886 - DNA, 15 bp, Homo sapiens
attttatgtctgcca

SEQ ID NO: 812887 - DNA, 15 bp, Homo sapiens
ttttatgtctgccac

SEQ ID NO: 812888 - DNA, 15 bp, Homo sapiens
tttatgtctgccaca

SEQ ID NO: 812889 - DNA, 15 bp, Homo sapiens
ttatgtctgccacac

SEQ ID NO: 812890 - DNA, 15 bp, Homo sapiens
tatgtctgccacaca

SEQ ID NO: 812891 - DNA, 15 bp, Homo sapiens
atgtctgccacacat

SEQ ID NO: 812892 - DNA, 15 bp, Homo sapiens
tgtctgccacacatt

SEQ ID NO: 812893 - DNA, 15 bp, Homo sapiens
gtctgccacacattt

SEQ ID NO: 812894 - DNA, 15 bp, Homo sapiens
tctgccacacatttt

SEQ ID NO: 812895 - DNA, 15 bp, Homo sapiens
ctgccacacattttg

SEQ ID NO: 812896 - DNA, 15 bp, Homo sapiens
tgccacacattttgt

SEQ ID NO: 812897 - DNA, 15 bp, Homo sapiens
gccacacattttgtt

SEQ ID NO: 812898 - DNA, 15 bp, Homo sapiens
ccacacattttgttt

SEQ ID NO: 812899 - DNA, 15 bp, Homo sapiens
cacacattttgttta

SEQ ID NO: 812900 - DNA, 15 bp, Homo sapiens
acacattttgtttat

SEQ ID NO: 812901 - DNA, 15 bp, Homo sapiens
cacattttgtttatc

SEQ ID NO: 812902 - DNA, 15 bp, Homo sapiens
acattttgtttatcc

SEQ ID NO: 812903 - DNA, 15 bp, Homo sapiens
cattttgtttatcca

SEQ ID NO: 812904 - DNA, 15 bp, Homo sapiens
attttgtttatccat

SEQ ID NO: 812905 - DNA, 15 bp, Homo sapiens
ttttgtttatccatt

SEQ ID NO: 812906 - DNA, 15 bp, Homo sapiens
tttgtttatccattc

SEQ ID NO: 812907 - DNA, 15 bp, Homo sapiens
gtttatccattcatt

SEQ ID NO: 812908 - DNA, 15 bp, Homo sapiens
tttatccattcattt

SEQ ID NO: 812909 - DNA, 15 bp, Homo sapiens
ttatccattcatttg

SEQ ID NO: 812910 - DNA, 15 bp, Homo sapiens
tatccattcatttgt

SEQ ID NO: 812911 - DNA, 15 bp, Homo sapiens
atccattcatttgtc

SEQ ID NO: 812912 - DNA, 15 bp, Homo sapiens
tccattcatttgtca

SEQ ID NO: 812913 - DNA, 15 bp, Homo sapiens
ccattcatttgtcaa

SEQ ID NO: 812914 - DNA, 15 bp, Homo sapiens
cattcatttgtcaat

SEQ ID NO: 812915 - DNA, 15 bp, Homo sapiens
attcatttgtcaatg

SEQ ID NO: 812916 - DNA, 15 bp, Homo sapiens
ttcatttgtcaatga

SEQ ID NO: 812917 - DNA, 15 bp, Homo sapiens
tcatttgtcaatgaa

SEQ ID NO: 812918 - DNA, 15 bp, Homo sapiens
catttgtcaatgaac

SEQ ID NO: 812919 - DNA, 15 bp, Homo sapiens
atttgtcaatgaaca

SEQ ID NO: 812920 - DNA, 15 bp, Homo sapiens
tttgtcaatgaacat

SEQ ID NO: 812921 - DNA, 15 bp, Homo sapiens
ttgtcaatgaacatg

SEQ ID NO: 812922 - DNA, 15 bp, Homo sapiens
tgtcaatgaacatgt

SEQ ID NO: 812923 - DNA, 15 bp, Homo sapiens
gtcaatgaacatgta

SEQ ID NO: 812924 - DNA, 15 bp, Homo sapiens
tcaatgaacatgtag

SEQ ID NO: 812925 - DNA, 15 bp, Homo sapiens
caatgaacatgtaga

SEQ ID NO: 812926 - DNA, 15 bp, Homo sapiens
aatgaacatgtagat

SEQ ID NO: 812927 - DNA, 15 bp, Homo sapiens
atgaacatgtagatt

SEQ ID NO: 812928 - DNA, 15 bp, Homo sapiens
tgaacatgtagattg

SEQ ID NO: 812929 - DNA, 15 bp, Homo sapiens
gaacatgtagattgt

SEQ ID NO: 812930 - DNA, 15 bp, Homo sapiens
aacatgtagattgtt

SEQ ID NO: 812931 - DNA, 15 bp, Homo sapiens
acatgtagattgttt

SEQ ID NO: 812932 - DNA, 15 bp, Homo sapiens
catgtagattgtttc

SEQ ID NO: 812933 - DNA, 15 bp, Homo sapiens
atgtagattgtttct

SEQ ID NO: 812934 - DNA, 15 bp, Homo sapiens
tgtagattgtttcta

SEQ ID NO: 812935 - DNA, 15 bp, Homo sapiens
gtagattgtttctac

SEQ ID NO: 812936 - DNA, 15 bp, Homo sapiens
tagattgtttctacc

SEQ ID NO: 812937 - DNA, 15 bp, Homo sapiens
agattgtttctacct

SEQ ID NO: 812938 - DNA, 15 bp, Homo sapiens
gattgtttctacctt

SEQ ID NO: 812939 - DNA, 15 bp, Homo sapiens
attgtttctaccttt

SEQ ID NO: 812940 - DNA, 15 bp, Homo sapiens
ttgtttctacctttt

SEQ ID NO: 812941 - DNA, 15 bp, Homo sapiens
tgtttctaccttttg

SEQ ID NO: 812942 - DNA, 15 bp, Homo sapiens
gtttctaccttttgg

SEQ ID NO: 812943 - DNA, 15 bp, Homo sapiens
tttctaccttttggc

SEQ ID NO: 812944 - DNA, 15 bp, Homo sapiens
tctaccttttggcta

SEQ ID NO: 812945 - DNA, 15 bp, Homo sapiens
ctaccttttggctat

SEQ ID NO: 812946 - DNA, 15 bp, Homo sapiens
taccttttggctatt

SEQ ID NO: 812947 - DNA, 15 bp, Homo sapiens
accttttggctattg

SEQ ID NO: 812948 - DNA, 15 bp, Homo sapiens
ccttttggctattgt

SEQ ID NO: 812949 - DNA, 15 bp, Homo sapiens
cttttggctattgtg

SEQ ID NO: 812950 - DNA, 15 bp, Homo sapiens
ttttggctattgtga

SEQ ID NO: 812951 - DNA, 15 bp, Homo sapiens
ttgtgaataatgctc

SEQ ID NO: 812952 - DNA, 15 bp, Homo sapiens
tgtgaataatgctcc

SEQ ID NO: 812953 - DNA, 15 bp, Homo sapiens
gtgaataatgctcca

SEQ ID NO: 812954 - DNA, 15 bp, Homo sapiens
tgaataatgctccaa

SEQ ID NO: 812955 - DNA, 15 bp, Homo sapiens
gaataatgctccaat

SEQ ID NO: 812956 - DNA, 15 bp, Homo sapiens
aataatgctccaata

SEQ ID NO: 812957 - DNA, 15 bp, Homo sapiens
ataatgctccaataa

SEQ ID NO: 812958 - DNA, 15 bp, Homo sapiens
taatgctccaataaa

SEQ ID NO: 812959 - DNA, 15 bp, Homo sapiens
aatgctccaataaac

SEQ ID NO: 812960 - DNA, 15 bp, Homo sapiens
atgctccaataaaca

SEQ ID NO: 812961 - DNA, 15 bp, Homo sapiens
tgctccaataaacag

SEQ ID NO: 812962 - DNA, 15 bp, Homo sapiens
gctccaataaacagt

SEQ ID NO: 812963 - DNA, 15 bp, Homo sapiens
ctccaataaacagtt

SEQ ID NO: 812964 - DNA, 15 bp, Homo sapiens
ttataattttttaac

SEQ ID NO: 812965 - DNA, 15 bp, Homo sapiens
tataattttttaact

SEQ ID NO: 812966 - DNA, 15 bp, Homo sapiens
ataattttttaactg

SEQ ID NO: 812967 - DNA, 15 bp, Homo sapiens
taattttttaactga

SEQ ID NO: 812968 - DNA, 15 bp, Homo sapiens
aattttttaactgag

SEQ ID NO: 812969 - DNA, 15 bp, Homo sapiens
attttttaactgaga

SEQ ID NO: 812970 - DNA, 15 bp, Homo sapiens
ttttttaactgagaa

SEQ ID NO: 812971 - DNA, 15 bp, Homo sapiens
tttttaactgagaaa

SEQ ID NO: 812972 - DNA, 15 bp, Homo sapiens
ttttaactgagaaaa

SEQ ID NO: 812973 - DNA, 15 bp, Homo sapiens
tttaactgagaaaaa

SEQ ID NO: 812974 - DNA, 15 bp, Homo sapiens
ttaactgagaaaaag

SEQ ID NO: 812975 - DNA, 15 bp, Homo sapiens
taactgagaaaaagt

SEQ ID NO: 812976 - DNA, 15 bp, Homo sapiens
aactgagaaaaagta

SEQ ID NO: 812977 - DNA, 15 bp, Homo sapiens
actgagaaaaagtat

SEQ ID NO: 812978 - DNA, 15 bp, Homo sapiens
ctgagaaaaagtatt

SEQ ID NO: 812979 - DNA, 15 bp, Homo sapiens
tgagaaaaagtattt

SEQ ID NO: 812980 - DNA, 15 bp, Homo sapiens
gagaaaaagtatttt

SEQ ID NO: 812981 - DNA, 15 bp, Homo sapiens
agaaaaagtattttg

SEQ ID NO: 812982 - DNA, 15 bp, Homo sapiens
gaaaaagtattttgt

SEQ ID NO: 812983 - DNA, 15 bp, Homo sapiens
aaaaagtattttgta

SEQ ID NO: 812984 - DNA, 15 bp, Homo sapiens
aaaagtattttgtat

SEQ ID NO: 812985 - DNA, 15 bp, Homo sapiens
aaagtattttgtatg

SEQ ID NO: 812986 - DNA, 15 bp, Homo sapiens
aagtattttgtatgt

SEQ ID NO: 812987 - DNA, 15 bp, Homo sapiens
agtattttgtatgta

SEQ ID NO: 812988 - DNA, 15 bp, Homo sapiens
gtattttgtatgtaa

SEQ ID NO: 812989 - DNA, 15 bp, Homo sapiens
tattttgtatgtaaa

SEQ ID NO: 812990 - DNA, 15 bp, Homo sapiens
attttgtatgtaaag

SEQ ID NO: 812991 - DNA, 15 bp, Homo sapiens
ttttgtatgtaaaga

SEQ ID NO: 812992 - DNA, 15 bp, Homo sapiens
tttgtatgtaaagag

SEQ ID NO: 812993 - DNA, 15 bp, Homo sapiens
ttgtatgtaaagaga

SEQ ID NO: 812994 - DNA, 15 bp, Homo sapiens
tgtatgtaaagagat

SEQ ID NO: 812995 - DNA, 15 bp, Homo sapiens
gtatgtaaagagatt

SEQ ID NO: 812996 - DNA, 15 bp, Homo sapiens
tatgtaaagagattg

SEQ ID NO: 812997 - DNA, 15 bp, Homo sapiens
atgtaaagagattgt

SEQ ID NO: 812998 - DNA, 15 bp, Homo sapiens
tgtaaagagattgtt

SEQ ID NO: 812999 - DNA, 15 bp, Homo sapiens
gtaaagagattgttc

SEQ ID NO: 813000 - DNA, 15 bp, Homo sapiens
taaagagattgttct

SEQ ID NO: 813001 - DNA, 15 bp, Homo sapiens
aaagagattgttctt

SEQ ID NO: 813002 - DNA, 15 bp, Homo sapiens
aagagattgttctta

SEQ ID NO: 813003 - DNA, 15 bp, Homo sapiens
agagattgttcttaa

SEQ ID NO: 813004 - DNA, 15 bp, Homo sapiens
gagattgttcttaag

SEQ ID NO: 813005 - DNA, 15 bp, Homo sapiens
agattgttcttaagc

SEQ ID NO: 813006 - DNA, 15 bp, Homo sapiens
gattgttcttaagct

SEQ ID NO: 813007 - DNA, 15 bp, Homo sapiens
attgttcttaagctt

SEQ ID NO: 813008 - DNA, 15 bp, Homo sapiens
ttgttcttaagcttt

SEQ ID NO: 813009 - DNA, 15 bp, Homo sapiens
tgttcttaagcttta

SEQ ID NO: 813010 - DNA, 15 bp, Homo sapiens
gttcttaagctttaa

SEQ ID NO: 813011 - DNA, 15 bp, Homo sapiens
ttcttaagctttaaa

SEQ ID NO: 813012 - DNA, 15 bp, Homo sapiens
tcttaagctttaaat

SEQ ID NO: 813013 - DNA, 15 bp, Homo sapiens
cttaagctttaaatt

SEQ ID NO: 813014 - DNA, 15 bp, Homo sapiens
ttaagctttaaatta

SEQ ID NO: 813015 - DNA, 15 bp, Homo sapiens
taagctttaaattaa

SEQ ID NO: 813016 - DNA, 15 bp, Homo sapiens
aagctttaaattaaa

SEQ ID NO: 813017 - DNA, 15 bp, Homo sapiens
agctttaaattaaac

SEQ ID NO: 813018 - DNA, 15 bp, Homo sapiens
gctttaaattaaaca

SEQ ID NO: 813019 - DNA, 15 bp, Homo sapiens
ctttaaattaaacaa

SEQ ID NO: 813020 - DNA, 15 bp, Homo sapiens
tttaaattaaacaaa

SEQ ID NO: 813021 - DNA, 15 bp, Homo sapiens
ttaaattaaacaaat

SEQ ID NO: 813022 - DNA, 15 bp, Homo sapiens
taaattaaacaaatg

SEQ ID NO: 813023 - DNA, 15 bp, Homo sapiens
aaattaaacaaatgt

SEQ ID NO: 813024 - DNA, 15 bp, Homo sapiens
aattaaacaaatgtt

SEQ ID NO: 813025 - DNA, 15 bp, Homo sapiens
attaaacaaatgttc

SEQ ID NO: 813026 - DNA, 15 bp, Homo sapiens
ttaaacaaatgttct

SEQ ID NO: 813027 - DNA, 15 bp, Homo sapiens
taaacaaatgttctc

SEQ ID NO: 813028 - DNA, 15 bp, Homo sapiens
aaacaaatgttctct

SEQ ID NO: 813029 - DNA, 15 bp, Homo sapiens
aacaaatgttctctc

SEQ ID NO: 813030 - DNA, 15 bp, Homo sapiens
acaaatgttctctcg

SEQ ID NO: 813031 - DNA, 15 bp, Homo sapiens
caaatgttctctcgc

SEQ ID NO: 813032 - DNA, 15 bp, Homo sapiens
aaatgttctctcgcc

SEQ ID NO: 813033 - DNA, 15 bp, Homo sapiens
aatgttctctcgcct

SEQ ID NO: 813034 - DNA, 15 bp, Homo sapiens
atgttctctcgcctt

SEQ ID NO: 813035 - DNA, 15 bp, Homo sapiens
tgttctctcgcctta

SEQ ID NO: 813036 - DNA, 15 bp, Homo sapiens
gttctctcgccttat

SEQ ID NO: 813037 - DNA, 15 bp, Homo sapiens
ttctctcgccttatg

SEQ ID NO: 813038 - DNA, 15 bp, Homo sapiens
tctctcgccttatgg

SEQ ID NO: 813039 - DNA, 15 bp, Homo sapiens
ctctcgccttatggg

SEQ ID NO: 813040 - DNA, 15 bp, Homo sapiens
tctcgccttatgggg

SEQ ID NO: 813041 - DNA, 15 bp, Homo sapiens
ctcgccttatgggga

SEQ ID NO: 813042 - DNA, 15 bp, Homo sapiens
tcgccttatggggaa

SEQ ID NO: 813043 - DNA, 15 bp, Homo sapiens
cgccttatggggaaa

SEQ ID NO: 813044 - DNA, 15 bp, Homo sapiens
gccttatggggaaat

SEQ ID NO: 813045 - DNA, 15 bp, Homo sapiens
ccttatggggaaatg

SEQ ID NO: 813046 - DNA, 15 bp, Homo sapiens
cttatggggaaatgg

SEQ ID NO: 813047 - DNA, 15 bp, Homo sapiens
ttatggggaaatggg

SEQ ID NO: 813048 - DNA, 15 bp, Homo sapiens
tatggggaaatgggc

SEQ ID NO: 813049 - DNA, 15 bp, Homo sapiens
atggggaaatgggct

SEQ ID NO: 813050 - DNA, 15 bp, Homo sapiens
tggggaaatgggctt

SEQ ID NO: 813051 - DNA, 15 bp, Homo sapiens
ggggaaatgggctta

SEQ ID NO: 813052 - DNA, 15 bp, Homo sapiens
gggaaatgggcttat

SEQ ID NO: 813053 - DNA, 15 bp, Homo sapiens
ggaaatgggcttatt

SEQ ID NO: 813054 - DNA, 15 bp, Homo sapiens
gaaatgggcttattt

SEQ ID NO: 813055 - DNA, 15 bp, Homo sapiens
aaatgggcttatttg

SEQ ID NO: 813056 - DNA, 15 bp, Homo sapiens
aatgggcttatttgc

SEQ ID NO: 813057 - DNA, 15 bp, Homo sapiens
atgggcttatttgca

SEQ ID NO: 813058 - DNA, 15 bp, Homo sapiens
tgggcttatttgcaa

SEQ ID NO: 813059 - DNA, 15 bp, Homo sapiens
gggcttatttgcaaa

SEQ ID NO: 813060 - DNA, 15 bp, Homo sapiens
ggcttatttgcaaat

SEQ ID NO: 813061 - DNA, 15 bp, Homo sapiens
gcttatttgcaaatg

SEQ ID NO: 813062 - DNA, 15 bp, Homo sapiens
cttatttgcaaatgg

SEQ ID NO: 813063 - DNA, 15 bp, Homo sapiens
ttatttgcaaatgga

SEQ ID NO: 813064 - DNA, 15 bp, Homo sapiens
tatttgcaaatggac

SEQ ID NO: 813065 - DNA, 15 bp, Homo sapiens
atttgcaaatggacc

SEQ ID NO: 813066 - DNA, 15 bp, Homo sapiens
tttgcaaatggaccc

SEQ ID NO: 813067 - DNA, 15 bp, Homo sapiens
ttgcaaatggaccca

SEQ ID NO: 813068 - DNA, 15 bp, Homo sapiens
tgcaaatggacccac

SEQ ID NO: 813069 - DNA, 15 bp, Homo sapiens
gcaaatggacccact

SEQ ID NO: 813070 - DNA, 15 bp, Homo sapiens
caaatggacccactc

SEQ ID NO: 813071 - DNA, 15 bp, Homo sapiens
aaatggacccactca

SEQ ID NO: 813072 - DNA, 15 bp, Homo sapiens
aatggacccactcaa

SEQ ID NO: 813073 - DNA, 15 bp, Homo sapiens
atggacccactcaat

SEQ ID NO: 813074 - DNA, 15 bp, Homo sapiens
tggacccactcaatg

SEQ ID NO: 813075 - DNA, 15 bp, Homo sapiens
ggacccactcaatgg

SEQ ID NO: 813076 - DNA, 15 bp, Homo sapiens
gacccactcaatggt

SEQ ID NO: 813077 - DNA, 15 bp, Homo sapiens
acccactcaatggtt

SEQ ID NO: 813078 - DNA, 15 bp, Homo sapiens
cccactcaatggttt

SEQ ID NO: 813079 - DNA, 15 bp, Homo sapiens
ccactcaatggtttt

SEQ ID NO: 813080 - DNA, 15 bp, Homo sapiens
cactcaatggtttta

SEQ ID NO: 813081 - DNA, 15 bp, Homo sapiens
actcaatggttttat

SEQ ID NO: 813082 - DNA, 15 bp, Homo sapiens
ctcaatggttttatt

SEQ ID NO: 813083 - DNA, 15 bp, Homo sapiens
tcaatggttttattt

SEQ ID NO: 813084 - DNA, 15 bp, Homo sapiens
caatggttttatttt

SEQ ID NO: 813085 - DNA, 15 bp, Homo sapiens
aatggttttattttg

SEQ ID NO: 813086 - DNA, 15 bp, Homo sapiens
atggttttattttgt

SEQ ID NO: 813087 - DNA, 15 bp, Homo sapiens
tggttttattttgtt

SEQ ID NO: 813088 - DNA, 15 bp, Homo sapiens
ggttttattttgttc

SEQ ID NO: 813089 - DNA, 15 bp, Homo sapiens
gttttattttgttct

SEQ ID NO: 813090 - DNA, 15 bp, Homo sapiens
ttttattttgttctg

SEQ ID NO: 813091 - DNA, 15 bp, Homo sapiens
tttattttgttctgt

SEQ ID NO: 813092 - DNA, 15 bp, Homo sapiens
ttattttgttctgtt

SEQ ID NO: 813093 - DNA, 15 bp, Homo sapiens
tattttgttctgttc

SEQ ID NO: 813094 - DNA, 15 bp, Homo sapiens
attttgttctgttca

SEQ ID NO: 813095 - DNA, 15 bp, Homo sapiens
ttttgttctgttcac

SEQ ID NO: 813096 - DNA, 15 bp, Homo sapiens
tttgttctgttcaca

SEQ ID NO: 813097 - DNA, 15 bp, Homo sapiens
ttgttctgttcacac

SEQ ID NO: 813098 - DNA, 15 bp, Homo sapiens
tgttctgttcacacc

SEQ ID NO: 813099 - DNA, 15 bp, Homo sapiens
gttctgttcacacca

SEQ ID NO: 813100 - DNA, 15 bp, Homo sapiens
ttctgttcacaccat

SEQ ID NO: 813101 - DNA, 15 bp, Homo sapiens
tctgttcacaccata

SEQ ID NO: 813102 - DNA, 15 bp, Homo sapiens
ctgttcacaccatac

SEQ ID NO: 813103 - DNA, 15 bp, Homo sapiens
tgttcacaccatact

SEQ ID NO: 813104 - DNA, 15 bp, Homo sapiens
gttcacaccatactg

SEQ ID NO: 813105 - DNA, 15 bp, Homo sapiens
ttcacaccatactgt

SEQ ID NO: 813106 - DNA, 15 bp, Homo sapiens
tcacaccatactgtc

SEQ ID NO: 813107 - DNA, 15 bp, Homo sapiens
cacaccatactgtca

SEQ ID NO: 813108 - DNA, 15 bp, Homo sapiens
acaccatactgtcat

SEQ ID NO: 813109 - DNA, 15 bp, Homo sapiens
caccatactgtcatg

SEQ ID NO: 813110 - DNA, 15 bp, Homo sapiens
accatactgtcatgt

SEQ ID NO: 813111 - DNA, 15 bp, Homo sapiens
ccatactgtcatgtt

SEQ ID NO: 813112 - DNA, 15 bp, Homo sapiens
catactgtcatgttg

SEQ ID NO: 813113 - DNA, 15 bp, Homo sapiens
atactgtcatgttgt

SEQ ID NO: 813114 - DNA, 15 bp, Homo sapiens
tactgtcatgttgtc

SEQ ID NO: 813115 - DNA, 15 bp, Homo sapiens
actgtcatgttgtcc

SEQ ID NO: 813116 - DNA, 15 bp, Homo sapiens
ctgtcatgttgtcca

SEQ ID NO: 813117 - DNA, 15 bp, Homo sapiens
tgtcatgttgtccat

SEQ ID NO: 813118 - DNA, 15 bp, Homo sapiens
gtcatgttgtccata

SEQ ID NO: 813119 - DNA, 15 bp, Homo sapiens
tcatgttgtccatag

SEQ ID NO: 813120 - DNA, 15 bp, Homo sapiens
catgttgtccataga

SEQ ID NO: 813121 - DNA, 15 bp, Homo sapiens
atgttgtccatagat

SEQ ID NO: 813122 - DNA, 15 bp, Homo sapiens
tgttgtccatagatt

SEQ ID NO: 813123 - DNA, 15 bp, Homo sapiens
gttgtccatagattc

SEQ ID NO: 813124 - DNA, 15 bp, Homo sapiens
ttgtccatagattca

SEQ ID NO: 813125 - DNA, 15 bp, Homo sapiens
tgtccatagattcat

SEQ ID NO: 813126 - DNA, 15 bp, Homo sapiens
gtccatagattcatt

SEQ ID NO: 813127 - DNA, 15 bp, Homo sapiens
tccatagattcatta

SEQ ID NO: 813128 - DNA, 15 bp, Homo sapiens
ccatagattcattag

SEQ ID NO: 813129 - DNA, 15 bp, Homo sapiens
catagattcattaga

SEQ ID NO: 813130 - DNA, 15 bp, Homo sapiens
atagattcattagag

SEQ ID NO: 813131 - DNA, 15 bp, Homo sapiens
tagattcattagagc

SEQ ID NO: 813132 - DNA, 15 bp, Homo sapiens
agattcattagagcg

SEQ ID NO: 813133 - DNA, 15 bp, Homo sapiens
gattcattagagcga

SEQ ID NO: 813134 - DNA, 15 bp, Homo sapiens
attcattagagcgag

SEQ ID NO: 813135 - DNA, 15 bp, Homo sapiens
ttcattagagcgaga

SEQ ID NO: 813136 - DNA, 15 bp, Homo sapiens
tcattagagcgagat

SEQ ID NO: 813137 - DNA, 15 bp, Homo sapiens
cattagagcgagatt

SEQ ID NO: 813138 - DNA, 15 bp, Homo sapiens
attagagcgagattg

SEQ ID NO: 813139 - DNA, 15 bp, Homo sapiens
ttagagcgagattgg

SEQ ID NO: 813140 - DNA, 15 bp, Homo sapiens
tagagcgagattggt

SEQ ID NO: 813141 - DNA, 15 bp, Homo sapiens
agagcgagattggtg

SEQ ID NO: 813142 - DNA, 15 bp, Homo sapiens
gagcgagattggtgc

SEQ ID NO: 813143 - DNA, 15 bp, Homo sapiens
agcgagattggtgca

SEQ ID NO: 813144 - DNA, 15 bp, Homo sapiens
gcgagattggtgcat

SEQ ID NO: 813145 - DNA, 15 bp, Homo sapiens
cgagattggtgcatt

SEQ ID NO: 813146 - DNA, 15 bp, Homo sapiens
gagattggtgcatta

SEQ ID NO: 813147 - DNA, 15 bp, Homo sapiens
agattggtgcattaa

SEQ ID NO: 813148 - DNA, 15 bp, Homo sapiens
gattggtgcattaat

SEQ ID NO: 813149 - DNA, 15 bp, Homo sapiens
attggtgcattaatt

SEQ ID NO: 813150 - DNA, 15 bp, Homo sapiens
ttggtgcattaattc

SEQ ID NO: 813151 - DNA, 15 bp, Homo sapiens
tggtgcattaattca

SEQ ID NO: 813152 - DNA, 15 bp, Homo sapiens
ggtgcattaattcat

SEQ ID NO: 813153 - DNA, 15 bp, Homo sapiens
gtgcattaattcatt

SEQ ID NO: 813154 - DNA, 15 bp, Homo sapiens
tgcattaattcattc

SEQ ID NO: 813155 - DNA, 15 bp, Homo sapiens
gcattaattcattcc

SEQ ID NO: 813156 - DNA, 15 bp, Homo sapiens
cattaattcattcca

SEQ ID NO: 813157 - DNA, 15 bp, Homo sapiens
attaattcattccat

SEQ ID NO: 813158 - DNA, 15 bp, Homo sapiens
ttaattcattccatt

SEQ ID NO: 813159 - DNA, 15 bp, Homo sapiens
taattcattccatta

SEQ ID NO: 813160 - DNA, 15 bp, Homo sapiens
aattcattccattat

SEQ ID NO: 813161 - DNA, 15 bp, Homo sapiens
attcattccattatt

SEQ ID NO: 813162 - DNA, 15 bp, Homo sapiens
ttcattccattattc

SEQ ID NO: 813163 - DNA, 15 bp, Homo sapiens
tcattccattattct

SEQ ID NO: 813164 - DNA, 15 bp, Homo sapiens
cattccattattctg

SEQ ID NO: 813165 - DNA, 15 bp, Homo sapiens
attccattattctgt

SEQ ID NO: 813166 - DNA, 15 bp, Homo sapiens
ttccattattctgtt

SEQ ID NO: 813167 - DNA, 15 bp, Homo sapiens
tccattattctgttg

SEQ ID NO: 813168 - DNA, 15 bp, Homo sapiens
ccattattctgttgc

SEQ ID NO: 813169 - DNA, 15 bp, Homo sapiens
cattattctgttgct

SEQ ID NO: 813170 - DNA, 15 bp, Homo sapiens
attattctgttgctc

SEQ ID NO: 813171 - DNA, 15 bp, Homo sapiens
ttattctgttgctca

SEQ ID NO: 813172 - DNA, 15 bp, Homo sapiens
tattctgttgctcat

SEQ ID NO: 813173 - DNA, 15 bp, Homo sapiens
attctgttgctcata

SEQ ID NO: 813174 - DNA, 15 bp, Homo sapiens
ttctgttgctcataa

SEQ ID NO: 813175 - DNA, 15 bp, Homo sapiens
tctgttgctcataat

SEQ ID NO: 813176 - DNA, 15 bp, Homo sapiens
ctgttgctcataata

SEQ ID NO: 813177 - DNA, 15 bp, Homo sapiens
tgttgctcataataa

SEQ ID NO: 813178 - DNA, 15 bp, Homo sapiens
gttgctcataataaa

SEQ ID NO: 813179 - DNA, 15 bp, Homo sapiens
ttgctcataataaac

SEQ ID NO: 813180 - DNA, 15 bp, Homo sapiens
tgctcataataaaca

SEQ ID NO: 813181 - DNA, 15 bp, Homo sapiens
gctcataataaacaa

SEQ ID NO: 813182 - DNA, 15 bp, Homo sapiens
ctcataataaacaaa

SEQ ID NO: 813183 - DNA, 15 bp, Homo sapiens
tcataataaacaaat

SEQ ID NO: 813184 - DNA, 15 bp, Homo sapiens
cataataaacaaata

SEQ ID NO: 813185 - DNA, 15 bp, Homo sapiens
ataataaacaaataa

SEQ ID NO: 813186 - DNA, 15 bp, Homo sapiens
taataaacaaataat

SEQ ID NO: 813187 - DNA, 15 bp, Homo sapiens
aataaacaaataata

SEQ ID NO: 813188 - DNA, 15 bp, Homo sapiens
ataaacaaataatac

SEQ ID NO: 813189 - DNA, 15 bp, Homo sapiens
taaacaaataataca

SEQ ID NO: 813190 - DNA, 15 bp, Homo sapiens
aaacaaataatacag

SEQ ID NO: 813191 - DNA, 15 bp, Homo sapiens
aacaaataatacagt

SEQ ID NO: 813192 - DNA, 15 bp, Homo sapiens
acaaataatacagtt

SEQ ID NO: 813193 - DNA, 15 bp, Homo sapiens
caaataatacagttt

SEQ ID NO: 813194 - DNA, 15 bp, Homo sapiens
aaataatacagtttt

SEQ ID NO: 813195 - DNA, 15 bp, Homo sapiens
aataatacagtttta

SEQ ID NO: 813196 - DNA, 15 bp, Homo sapiens
ataatacagttttac

SEQ ID NO: 813197 - DNA, 15 bp, Homo sapiens
taatacagttttaca

SEQ ID NO: 813198 - DNA, 15 bp, Homo sapiens
aatacagttttacat

SEQ ID NO: 813199 - DNA, 15 bp, Homo sapiens
atacagttttacatc

SEQ ID NO: 813200 - DNA, 15 bp, Homo sapiens
tacagttttacatca

SEQ ID NO: 813201 - DNA, 15 bp, Homo sapiens
acagttttacatcac

SEQ ID NO: 813202 - DNA, 15 bp, Homo sapiens
cagttttacatcact

SEQ ID NO: 813203 - DNA, 15 bp, Homo sapiens
agttttacatcactg

SEQ ID NO: 813204 - DNA, 15 bp, Homo sapiens
gttttacatcactgc

SEQ ID NO: 813205 - DNA, 15 bp, Homo sapiens
ttttacatcactgct

SEQ ID NO: 813206 - DNA, 15 bp, Homo sapiens
tttacatcactgctt

SEQ ID NO: 813207 - DNA, 15 bp, Homo sapiens
ttacatcactgcttc

SEQ ID NO: 813208 - DNA, 15 bp, Homo sapiens
tacatcactgcttct

SEQ ID NO: 813209 - DNA, 15 bp, Homo sapiens
acatcactgcttcta

SEQ ID NO: 813210 - DNA, 15 bp, Homo sapiens
catcactgcttctat

SEQ ID NO: 813211 - DNA, 15 bp, Homo sapiens
atcactgcttctata

SEQ ID NO: 813212 - DNA, 15 bp, Homo sapiens
tcactgcttctatac

SEQ ID NO: 813213 - DNA, 15 bp, Homo sapiens
cactgcttctatact

SEQ ID NO: 813214 - DNA, 15 bp, Homo sapiens
actgcttctatacta

SEQ ID NO: 813215 - DNA, 15 bp, Homo sapiens
ctgcttctatactat

SEQ ID NO: 813216 - DNA, 15 bp, Homo sapiens
tgcttctatactatt

SEQ ID NO: 813217 - DNA, 15 bp, Homo sapiens
gcttctatactatta

SEQ ID NO: 813218 - DNA, 15 bp, Homo sapiens
cttctatactattag

SEQ ID NO: 813219 - DNA, 15 bp, Homo sapiens
ttctatactattagc

SEQ ID NO: 813220 - DNA, 15 bp, Homo sapiens
tctatactattagct

SEQ ID NO: 813221 - DNA, 15 bp, Homo sapiens
ctatactattagctc

SEQ ID NO: 813222 - DNA, 15 bp, Homo sapiens
tatactattagctca

SEQ ID NO: 813223 - DNA, 15 bp, Homo sapiens
atactattagctcat

SEQ ID NO: 813224 - DNA, 15 bp, Homo sapiens
tactattagctcata

SEQ ID NO: 813225 - DNA, 15 bp, Homo sapiens
actattagctcatat

SEQ ID NO: 813226 - DNA, 15 bp, Homo sapiens
ctattagctcatata

SEQ ID NO: 813227 - DNA, 15 bp, Homo sapiens
tattagctcatatag

SEQ ID NO: 813228 - DNA, 15 bp, Homo sapiens
attagctcatatagt

SEQ ID NO: 813229 - DNA, 15 bp, Homo sapiens
ttagctcatatagtt

SEQ ID NO: 813230 - DNA, 15 bp, Homo sapiens
tagctcatatagtta

SEQ ID NO: 813231 - DNA, 15 bp, Homo sapiens
agctcatatagttac

SEQ ID NO: 813232 - DNA, 15 bp, Homo sapiens
gctcatatagttaca

SEQ ID NO: 813233 - DNA, 15 bp, Homo sapiens
ctcatatagttacaa

SEQ ID NO: 813234 - DNA, 15 bp, Homo sapiens
tcatatagttacaaa

SEQ ID NO: 813235 - DNA, 15 bp, Homo sapiens
catatagttacaaat

SEQ ID NO: 813236 - DNA, 15 bp, Homo sapiens
atatagttacaaata

SEQ ID NO: 813237 - DNA, 15 bp, Homo sapiens
tatagttacaaatag

SEQ ID NO: 813238 - DNA, 15 bp, Homo sapiens
atagttacaaatagt

SEQ ID NO: 813239 - DNA, 15 bp, Homo sapiens
tagttacaaatagtc

SEQ ID NO: 813240 - DNA, 15 bp, Homo sapiens
agttacaaatagtct

SEQ ID NO: 813241 - DNA, 15 bp, Homo sapiens
gttacaaatagtctt

SEQ ID NO: 813242 - DNA, 15 bp, Homo sapiens
ttacaaatagtcttt

SEQ ID NO: 813243 - DNA, 15 bp, Homo sapiens
tacaaatagtctttg

SEQ ID NO: 813244 - DNA, 15 bp, Homo sapiens
acaaatagtctttgt

SEQ ID NO: 813245 - DNA, 15 bp, Homo sapiens
caaatagtctttgta

SEQ ID NO: 813246 - DNA, 15 bp, Homo sapiens
aaatagtctttgtag

SEQ ID NO: 813247 - DNA, 15 bp, Homo sapiens
aatagtctttgtaga

SEQ ID NO: 813248 - DNA, 15 bp, Homo sapiens
atagtctttgtagaa

SEQ ID NO: 813249 - DNA, 15 bp, Homo sapiens
tagtctttgtagaat

SEQ ID NO: 813250 - DNA, 15 bp, Homo sapiens
agtctttgtagaatt

SEQ ID NO: 813251 - DNA, 15 bp, Homo sapiens
gtctttgtagaattg

SEQ ID NO: 813252 - DNA, 15 bp, Homo sapiens
tctttgtagaattgc

SEQ ID NO: 813253 - DNA, 15 bp, Homo sapiens
ctttgtagaattgcc

SEQ ID NO: 813254 - DNA, 15 bp, Homo sapiens
tttgtagaattgcct

SEQ ID NO: 813255 - DNA, 15 bp, Homo sapiens
ttgtagaattgccta

SEQ ID NO: 813256 - DNA, 15 bp, Homo sapiens
tgtagaattgcctac

SEQ ID NO: 813257 - DNA, 15 bp, Homo sapiens
gtagaattgcctacc

SEQ ID NO: 813258 - DNA, 15 bp, Homo sapiens
tagaattgcctaccc

SEQ ID NO: 813259 - DNA, 15 bp, Homo sapiens
agaattgcctaccca

SEQ ID NO: 813260 - DNA, 15 bp, Homo sapiens
gaattgcctacccag

SEQ ID NO: 813261 - DNA, 15 bp, Homo sapiens
aattgcctacccaga

SEQ ID NO: 813262 - DNA, 15 bp, Homo sapiens
attgcctacccagag

SEQ ID NO: 813263 - DNA, 15 bp, Homo sapiens
ttgcctacccagagg

SEQ ID NO: 813264 - DNA, 15 bp, Homo sapiens
tgcctacccagaggt

SEQ ID NO: 813265 - DNA, 15 bp, Homo sapiens
gcctacccagaggtg

SEQ ID NO: 813266 - DNA, 15 bp, Homo sapiens
cctacccagaggtgt

SEQ ID NO: 813267 - DNA, 15 bp, Homo sapiens
ctacccagaggtgtc

SEQ ID NO: 813268 - DNA, 15 bp, Homo sapiens
tacccagaggtgtca

SEQ ID NO: 813269 - DNA, 15 bp, Homo sapiens
acccagaggtgtcac

SEQ ID NO: 813270 - DNA, 15 bp, Homo sapiens
cccagaggtgtcact

SEQ ID NO: 813271 - DNA, 15 bp, Homo sapiens
ccagaggtgtcactt

SEQ ID NO: 813272 - DNA, 15 bp, Homo sapiens
cagaggtgtcacttc

SEQ ID NO: 813273 - DNA, 15 bp, Homo sapiens
agaggtgtcacttca

SEQ ID NO: 813274 - DNA, 15 bp, Homo sapiens
gaggtgtcacttcag

SEQ ID NO: 813275 - DNA, 15 bp, Homo sapiens
aggtgtcacttcaga

SEQ ID NO: 813276 - DNA, 15 bp, Homo sapiens
ggtgtcacttcagaa

SEQ ID NO: 813277 - DNA, 15 bp, Homo sapiens
gtgtcacttcagaag

SEQ ID NO: 813278 - DNA, 15 bp, Homo sapiens
tgtcacttcagaagc

SEQ ID NO: 813279 - DNA, 15 bp, Homo sapiens
gtcacttcagaagct

SEQ ID NO: 813280 - DNA, 15 bp, Homo sapiens
tcacttcagaagcta

SEQ ID NO: 813281 - DNA, 15 bp, Homo sapiens
cacttcagaagctag

SEQ ID NO: 813282 - DNA, 15 bp, Homo sapiens
acttcagaagctagt

SEQ ID NO: 813283 - DNA, 15 bp, Homo sapiens
cttcagaagctagtg

SEQ ID NO: 813284 - DNA, 15 bp, Homo sapiens
ttcagaagctagtga

SEQ ID NO: 813285 - DNA, 15 bp, Homo sapiens
tcagaagctagtgat

SEQ ID NO: 813286 - DNA, 15 bp, Homo sapiens
cagaagctagtgata

SEQ ID NO: 813287 - DNA, 15 bp, Homo sapiens
agaagctagtgataa

SEQ ID NO: 813288 - DNA, 15 bp, Homo sapiens
gaagctagtgataac

SEQ ID NO: 813289 - DNA, 15 bp, Homo sapiens
aagctagtgataact

SEQ ID NO: 813290 - DNA, 15 bp, Homo sapiens
agctagtgataactc

SEQ ID NO: 813291 - DNA, 15 bp, Homo sapiens
gctagtgataactct

SEQ ID NO: 813292 - DNA, 15 bp, Homo sapiens
ctagtgataactcta

SEQ ID NO: 813293 - DNA, 15 bp, Homo sapiens
tagtgataactctac

SEQ ID NO: 813294 - DNA, 15 bp, Homo sapiens
agtgataactctaca

SEQ ID NO: 813295 - DNA, 15 bp, Homo sapiens
gtgataactctacaa

SEQ ID NO: 813296 - DNA, 15 bp, Homo sapiens
tgataactctacaaa

SEQ ID NO: 813297 - DNA, 15 bp, Homo sapiens
gataactctacaaat

SEQ ID NO: 813298 - DNA, 15 bp, Homo sapiens
ataactctacaaatt

SEQ ID NO: 813299 - DNA, 15 bp, Homo sapiens
taactctacaaattt

SEQ ID NO: 813300 - DNA, 15 bp, Homo sapiens
aactctacaaatttt

SEQ ID NO: 813301 - DNA, 15 bp, Homo sapiens
actctacaaattttt

SEQ ID NO: 813302 - DNA, 15 bp, Homo sapiens
ctctacaaattttta

SEQ ID NO: 813303 - DNA, 15 bp, Homo sapiens
tctacaaatttttac

SEQ ID NO: 813304 - DNA, 15 bp, Homo sapiens
ctacaaatttttaca

SEQ ID NO: 813305 - DNA, 15 bp, Homo sapiens
tacaaatttttacaa

SEQ ID NO: 813306 - DNA, 15 bp, Homo sapiens
acaaatttttacaat

SEQ ID NO: 813307 - DNA, 15 bp, Homo sapiens
caaatttttacaatt

SEQ ID NO: 813308 - DNA, 15 bp, Homo sapiens
aaatttttacaattt

SEQ ID NO: 813309 - DNA, 15 bp, Homo sapiens
aatttttacaatttc

SEQ ID NO: 813310 - DNA, 15 bp, Homo sapiens
atttttacaatttca

SEQ ID NO: 813311 - DNA, 15 bp, Homo sapiens
tttttacaatttcat

SEQ ID NO: 813312 - DNA, 15 bp, Homo sapiens
ttttacaatttcata

SEQ ID NO: 813313 - DNA, 15 bp, Homo sapiens
tttacaatttcatag

SEQ ID NO: 813314 - DNA, 15 bp, Homo sapiens
ttacaatttcataga

SEQ ID NO: 813315 - DNA, 15 bp, Homo sapiens
tacaatttcatagac

SEQ ID NO: 813316 - DNA, 15 bp, Homo sapiens
acaatttcatagact

SEQ ID NO: 813317 - DNA, 15 bp, Homo sapiens
caatttcatagactt

SEQ ID NO: 813318 - DNA, 15 bp, Homo sapiens
aatttcatagacttt

SEQ ID NO: 813319 - DNA, 15 bp, Homo sapiens
atttcatagactttt

SEQ ID NO: 813320 - DNA, 15 bp, Homo sapiens
tttcatagactttta

SEQ ID NO: 813321 - DNA, 15 bp, Homo sapiens
ttcatagacttttaa

SEQ ID NO: 813322 - DNA, 15 bp, Homo sapiens
tcatagacttttaaa

SEQ ID NO: 813323 - DNA, 15 bp, Homo sapiens
catagacttttaaaa

SEQ ID NO: 813324 - DNA, 15 bp, Homo sapiens
atagacttttaaaaa

SEQ ID NO: 813325 - DNA, 15 bp, Homo sapiens
tagacttttaaaaag

SEQ ID NO: 813326 - DNA, 15 bp, Homo sapiens
agacttttaaaaagt

SEQ ID NO: 813327 - DNA, 15 bp, Homo sapiens
gacttttaaaaagtc

SEQ ID NO: 813328 - DNA, 15 bp, Homo sapiens
acttttaaaaagtcg

SEQ ID NO: 813329 - DNA, 15 bp, Homo sapiens
cttttaaaaagtcgt

SEQ ID NO: 813330 - DNA, 15 bp, Homo sapiens
ttttaaaaagtcgtc

SEQ ID NO: 813331 - DNA, 15 bp, Homo sapiens
tttaaaaagtcgtcc

SEQ ID NO: 813332 - DNA, 15 bp, Homo sapiens
ttaaaaagtcgtcct

SEQ ID NO: 813333 - DNA, 15 bp, Homo sapiens
taaaaagtcgtcctg

SEQ ID NO: 813334 - DNA, 15 bp, Homo sapiens
aaaaagtcgtcctga

SEQ ID NO: 813335 - DNA, 15 bp, Homo sapiens
aaaagtcgtcctgat

SEQ ID NO: 813336 - DNA, 15 bp, Homo sapiens
aaagtcgtcctgatt

SEQ ID NO: 813337 - DNA, 15 bp, Homo sapiens
aagtcgtcctgattt

SEQ ID NO: 813338 - DNA, 15 bp, Homo sapiens
agtcgtcctgatttt

SEQ ID NO: 813339 - DNA, 15 bp, Homo sapiens
gtcgtcctgattttt

SEQ ID NO: 813340 - DNA, 15 bp, Homo sapiens
tcgtcctgatttttt

SEQ ID NO: 813341 - DNA, 15 bp, Homo sapiens
cgtcctgatttttta

SEQ ID NO: 813342 - DNA, 15 bp, Homo sapiens
gtcctgattttttaa

SEQ ID NO: 813343 - DNA, 15 bp, Homo sapiens
tcctgattttttaaa

SEQ ID NO: 813344 - DNA, 15 bp, Homo sapiens
cctgattttttaaaa

SEQ ID NO: 813345 - DNA, 15 bp, Homo sapiens
ctgattttttaaaaa

SEQ ID NO: 813346 - DNA, 15 bp, Homo sapiens
tgattttttaaaaaa

SEQ ID NO: 813347 - DNA, 15 bp, Homo sapiens
gattttttaaaaaat

SEQ ID NO: 813348 - DNA, 15 bp, Homo sapiens
attttttaaaaaatg

SEQ ID NO: 813349 - DNA, 15 bp, Homo sapiens
ttttttaaaaaatgg

SEQ ID NO: 813350 - DNA, 15 bp, Homo sapiens
tttttaaaaaatggt

SEQ ID NO: 813351 - DNA, 15 bp, Homo sapiens
ttttaaaaaatggtt

SEQ ID NO: 813352 - DNA, 15 bp, Homo sapiens
tttaaaaaatggttt

SEQ ID NO: 813353 - DNA, 15 bp, Homo sapiens
ttaaaaaatggtttt

SEQ ID NO: 813354 - DNA, 15 bp, Homo sapiens
taaaaaatggtttta

SEQ ID NO: 813355 - DNA, 15 bp, Homo sapiens
aaaaaatggttttat

SEQ ID NO: 813356 - DNA, 15 bp, Homo sapiens
aaaaatggttttata

SEQ ID NO: 813357 - DNA, 15 bp, Homo sapiens
aaaatggttttatat

SEQ ID NO: 813358 - DNA, 15 bp, Homo sapiens
aaatggttttatatt

SEQ ID NO: 813359 - DNA, 15 bp, Homo sapiens
aatggttttatattt

SEQ ID NO: 813360 - DNA, 15 bp, Homo sapiens
atggttttatattta

SEQ ID NO: 813361 - DNA, 15 bp, Homo sapiens
tggttttatatttag

SEQ ID NO: 813362 - DNA, 15 bp, Homo sapiens
ggttttatatttagg

SEQ ID NO: 813363 - DNA, 15 bp, Homo sapiens
gttttatatttaggg

SEQ ID NO: 813364 - DNA, 15 bp, Homo sapiens
ttttatatttaggga

SEQ ID NO: 813365 - DNA, 15 bp, Homo sapiens
tttatatttagggag

SEQ ID NO: 813366 - DNA, 15 bp, Homo sapiens
ttatatttagggaga

SEQ ID NO: 813367 - DNA, 15 bp, Homo sapiens
tatatttagggagag

SEQ ID NO: 813368 - DNA, 15 bp, Homo sapiens
atatttagggagagt

SEQ ID NO: 813369 - DNA, 15 bp, Homo sapiens
tatttagggagagtg

SEQ ID NO: 813370 - DNA, 15 bp, Homo sapiens
atttagggagagtga

SEQ ID NO: 813371 - DNA, 15 bp, Homo sapiens
tttagggagagtgat

SEQ ID NO: 813372 - DNA, 15 bp, Homo sapiens
ttagggagagtgatg

SEQ ID NO: 813373 - DNA, 15 bp, Homo sapiens
tagggagagtgatga

SEQ ID NO: 813374 - DNA, 15 bp, Homo sapiens
agggagagtgatgac

SEQ ID NO: 813375 - DNA, 15 bp, Homo sapiens
gggagagtgatgact

SEQ ID NO: 813376 - DNA, 15 bp, Homo sapiens
ggagagtgatgacta

SEQ ID NO: 813377 - DNA, 15 bp, Homo sapiens
gagagtgatgactag

SEQ ID NO: 813378 - DNA, 15 bp, Homo sapiens
agagtgatgactaga

SEQ ID NO: 813379 - DNA, 15 bp, Homo sapiens
gagtgatgactagaa

SEQ ID NO: 813380 - DNA, 15 bp, Homo sapiens
agtgatgactagaag

SEQ ID NO: 813381 - DNA, 15 bp, Homo sapiens
gtgatgactagaagg

SEQ ID NO: 813382 - DNA, 15 bp, Homo sapiens
tgatgactagaagga

SEQ ID NO: 813383 - DNA, 15 bp, Homo sapiens
gatgactagaaggag

SEQ ID NO: 813384 - DNA, 15 bp, Homo sapiens
atgactagaaggagc

SEQ ID NO: 813385 - DNA, 15 bp, Homo sapiens
tgactagaaggagca

SEQ ID NO: 813386 - DNA, 15 bp, Homo sapiens
gactagaaggagcag

SEQ ID NO: 813387 - DNA, 15 bp, Homo sapiens
actagaaggagcagg

SEQ ID NO: 813388 - DNA, 15 bp, Homo sapiens
ctagaaggagcaggt

SEQ ID NO: 813389 - DNA, 15 bp, Homo sapiens
tagaaggagcaggtt

SEQ ID NO: 813390 - DNA, 15 bp, Homo sapiens
agaaggagcaggtta

SEQ ID NO: 813391 - DNA, 15 bp, Homo sapiens
gaaggagcaggttat

SEQ ID NO: 813392 - DNA, 15 bp, Homo sapiens
aaggagcaggttatc

SEQ ID NO: 813393 - DNA, 15 bp, Homo sapiens
aggagcaggttatca

SEQ ID NO: 813394 - DNA, 15 bp, Homo sapiens
ggagcaggttatcaa

SEQ ID NO: 813395 - DNA, 15 bp, Homo sapiens
gagcaggttatcaaa

SEQ ID NO: 813396 - DNA, 15 bp, Homo sapiens
agcaggttatcaaaa

SEQ ID NO: 813397 - DNA, 15 bp, Homo sapiens
gcaggttatcaaaat

SEQ ID NO: 813398 - DNA, 15 bp, Homo sapiens
caggttatcaaaatc

SEQ ID NO: 813399 - DNA, 15 bp, Homo sapiens
aggttatcaaaatct

SEQ ID NO: 813400 - DNA, 15 bp, Homo sapiens
ggttatcaaaatcta

SEQ ID NO: 813401 - DNA, 15 bp, Homo sapiens
gttatcaaaatctag

SEQ ID NO: 813402 - DNA, 15 bp, Homo sapiens
ttatcaaaatctagg

SEQ ID NO: 813403 - DNA, 15 bp, Homo sapiens
tatcaaaatctaggc

SEQ ID NO: 813404 - DNA, 15 bp, Homo sapiens
atcaaaatctaggct

SEQ ID NO: 813405 - DNA, 15 bp, Homo sapiens
tcaaaatctaggctg

SEQ ID NO: 813406 - DNA, 15 bp, Homo sapiens
caaaatctaggctga

SEQ ID NO: 813407 - DNA, 15 bp, Homo sapiens
aaaatctaggctgat

SEQ ID NO: 813408 - DNA, 15 bp, Homo sapiens
aaatctaggctgata

SEQ ID NO: 813409 - DNA, 15 bp, Homo sapiens
aatctaggctgatat

SEQ ID NO: 813410 - DNA, 15 bp, Homo sapiens
atctaggctgatatg

SEQ ID NO: 813411 - DNA, 15 bp, Homo sapiens
tctaggctgatatga

SEQ ID NO: 813412 - DNA, 15 bp, Homo sapiens
ctaggctgatatgag

SEQ ID NO: 813413 - DNA, 15 bp, Homo sapiens
taggctgatatgaga

SEQ ID NO: 813414 - DNA, 15 bp, Homo sapiens
aggctgatatgagag

SEQ ID NO: 813415 - DNA, 15 bp, Homo sapiens
ggctgatatgagagg

SEQ ID NO: 813416 - DNA, 15 bp, Homo sapiens
gctgatatgagagga

SEQ ID NO: 813417 - DNA, 15 bp, Homo sapiens
ctgatatgagaggac

SEQ ID NO: 813418 - DNA, 15 bp, Homo sapiens
tgatatgagaggaca

SEQ ID NO: 813419 - DNA, 15 bp, Homo sapiens
gatatgagaggacaa

SEQ ID NO: 813420 - DNA, 15 bp, Homo sapiens
atatgagaggacaaa

SEQ ID NO: 813421 - DNA, 15 bp, Homo sapiens
tatgagaggacaaat

SEQ ID NO: 813422 - DNA, 15 bp, Homo sapiens
atgagaggacaaatt

SEQ ID NO: 813423 - DNA, 15 bp, Homo sapiens
tgagaggacaaattc

SEQ ID NO: 813424 - DNA, 15 bp, Homo sapiens
gagaggacaaattca

SEQ ID NO: 813425 - DNA, 15 bp, Homo sapiens
agaggacaaattcaa

SEQ ID NO: 813426 - DNA, 15 bp, Homo sapiens
gaggacaaattcaaa

SEQ ID NO: 813427 - DNA, 15 bp, Homo sapiens
aggacaaattcaaag

SEQ ID NO: 813428 - DNA, 15 bp, Homo sapiens
ggacaaattcaaagg

SEQ ID NO: 813429 - DNA, 15 bp, Homo sapiens
gacaaattcaaagga

SEQ ID NO: 813430 - DNA, 15 bp, Homo sapiens
acaaattcaaaggaa

SEQ ID NO: 813431 - DNA, 15 bp, Homo sapiens
caaattcaaaggaaa

SEQ ID NO: 813432 - DNA, 15 bp, Homo sapiens
aaattcaaaggaaag

SEQ ID NO: 813433 - DNA, 15 bp, Homo sapiens
aattcaaaggaaagt

SEQ ID NO: 813434 - DNA, 15 bp, Homo sapiens
attcaaaggaaagtt

SEQ ID NO: 813435 - DNA, 15 bp, Homo sapiens
ttcaaaggaaagtta

SEQ ID NO: 813436 - DNA, 15 bp, Homo sapiens
tcaaaggaaagttaa

SEQ ID NO: 813437 - DNA, 15 bp, Homo sapiens
caaaggaaagttaat

SEQ ID NO: 813438 - DNA, 15 bp, Homo sapiens
aaaggaaagttaatg

SEQ ID NO: 813439 - DNA, 15 bp, Homo sapiens
aaggaaagttaatgt

SEQ ID NO: 813440 - DNA, 15 bp, Homo sapiens
aggaaagttaatgtt

SEQ ID NO: 813441 - DNA, 15 bp, Homo sapiens
ggaaagttaatgtta

SEQ ID NO: 813442 - DNA, 15 bp, Homo sapiens
gaaagttaatgttaa

SEQ ID NO: 813443 - DNA, 15 bp, Homo sapiens
aaagttaatgttaag

SEQ ID NO: 813444 - DNA, 15 bp, Homo sapiens
aagttaatgttaagt

SEQ ID NO: 813445 - DNA, 15 bp, Homo sapiens
agttaatgttaagtg

SEQ ID NO: 813446 - DNA, 15 bp, Homo sapiens
gttaatgttaagtga

SEQ ID NO: 813447 - DNA, 15 bp, Homo sapiens
ttaatgttaagtgat

SEQ ID NO: 813448 - DNA, 15 bp, Homo sapiens
taatgttaagtgatt

SEQ ID NO: 813449 - DNA, 15 bp, Homo sapiens
aatgttaagtgattt

SEQ ID NO: 813450 - DNA, 15 bp, Homo sapiens
atgttaagtgattta

SEQ ID NO: 813451 - DNA, 15 bp, Homo sapiens
tgttaagtgatttaa

SEQ ID NO: 813452 - DNA, 15 bp, Homo sapiens
gttaagtgatttaaa

SEQ ID NO: 813453 - DNA, 15 bp, Homo sapiens
ttaagtgatttaaat

SEQ ID NO: 813454 - DNA, 15 bp, Homo sapiens
taagtgatttaaata

SEQ ID NO: 813455 - DNA, 15 bp, Homo sapiens
aagtgatttaaatac

SEQ ID NO: 813456 - DNA, 15 bp, Homo sapiens
agtgatttaaatact

SEQ ID NO: 813457 - DNA, 15 bp, Homo sapiens
gtgatttaaatactt

SEQ ID NO: 813458 - DNA, 15 bp, Homo sapiens
tgatttaaatacttg

SEQ ID NO: 813459 - DNA, 15 bp, Homo sapiens
gatttaaatacttgg

SEQ ID NO: 813460 - DNA, 15 bp, Homo sapiens
atttaaatacttggt

SEQ ID NO: 813461 - DNA, 15 bp, Homo sapiens
tttaaatacttggtt

SEQ ID NO: 813462 - DNA, 15 bp, Homo sapiens
ttaaatacttggttc

SEQ ID NO: 813463 - DNA, 15 bp, Homo sapiens
taaatacttggttca

SEQ ID NO: 813464 - DNA, 15 bp, Homo sapiens
aaatacttggttcag

SEQ ID NO: 813465 - DNA, 15 bp, Homo sapiens
aatacttggttcaga

SEQ ID NO: 813466 - DNA, 15 bp, Homo sapiens
atacttggttcagat

SEQ ID NO: 813467 - DNA, 15 bp, Homo sapiens
tacttggttcagatg

SEQ ID NO: 813468 - DNA, 15 bp, Homo sapiens
acttggttcagatgg

SEQ ID NO: 813469 - DNA, 15 bp, Homo sapiens
cttggttcagatgga

SEQ ID NO: 813470 - DNA, 15 bp, Homo sapiens
ttggttcagatggac

SEQ ID NO: 813471 - DNA, 15 bp, Homo sapiens
tggttcagatggact

SEQ ID NO: 813472 - DNA, 15 bp, Homo sapiens
ggttcagatggactt

SEQ ID NO: 813473 - DNA, 15 bp, Homo sapiens
gttcagatggacttc

SEQ ID NO: 813474 - DNA, 15 bp, Homo sapiens
ttcagatggacttcc

SEQ ID NO: 813475 - DNA, 15 bp, Homo sapiens
tcagatggacttcct

SEQ ID NO: 813476 - DNA, 15 bp, Homo sapiens
cagatggacttccta

SEQ ID NO: 813477 - DNA, 15 bp, Homo sapiens
agatggacttcctaa

SEQ ID NO: 813478 - DNA, 15 bp, Homo sapiens
gatggacttcctaat

SEQ ID NO: 813479 - DNA, 15 bp, Homo sapiens
atggacttcctaatg

SEQ ID NO: 813480 - DNA, 15 bp, Homo sapiens
tggacttcctaatgg

SEQ ID NO: 813481 - DNA, 15 bp, Homo sapiens
ggacttcctaatgga

SEQ ID NO: 813482 - DNA, 15 bp, Homo sapiens
gacttcctaatggaa

SEQ ID NO: 813483 - DNA, 15 bp, Homo sapiens
acttcctaatggaat

SEQ ID NO: 813484 - DNA, 15 bp, Homo sapiens
cttcctaatggaatc

SEQ ID NO: 813485 - DNA, 15 bp, Homo sapiens
ttcctaatggaatct

SEQ ID NO: 813486 - DNA, 15 bp, Homo sapiens
tcctaatggaatctt

SEQ ID NO: 813487 - DNA, 15 bp, Homo sapiens
cctaatggaatcttc

SEQ ID NO: 813488 - DNA, 15 bp, Homo sapiens
ctaatggaatcttca

SEQ ID NO: 813489 - DNA, 15 bp, Homo sapiens
taatggaatcttcat

SEQ ID NO: 813490 - DNA, 15 bp, Homo sapiens
aatggaatcttcatc

SEQ ID NO: 813491 - DNA, 15 bp, Homo sapiens
atggaatcttcatca

SEQ ID NO: 813492 - DNA, 15 bp, Homo sapiens
tggaatcttcatcat

SEQ ID NO: 813493 - DNA, 15 bp, Homo sapiens
ggaatcttcatcata

SEQ ID NO: 813494 - DNA, 15 bp, Homo sapiens
gaatcttcatcatat

SEQ ID NO: 813495 - DNA, 15 bp, Homo sapiens
aatcttcatcatata

SEQ ID NO: 813496 - DNA, 15 bp, Homo sapiens
atcttcatcatatat

SEQ ID NO: 813497 - DNA, 15 bp, Homo sapiens
tcttcatcatatatg

SEQ ID NO: 813498 - DNA, 15 bp, Homo sapiens
cttcatcatatatgc

SEQ ID NO: 813499 - DNA, 15 bp, Homo sapiens
ttcatcatatatgca

SEQ ID NO: 813500 - DNA, 15 bp, Homo sapiens
tcatcatatatgcag

SEQ ID NO: 813501 - DNA, 15 bp, Homo sapiens
catcatatatgcagc

SEQ ID NO: 813502 - DNA, 15 bp, Homo sapiens
atcatatatgcagca

SEQ ID NO: 813503 - DNA, 15 bp, Homo sapiens
tcatatatgcagcat

SEQ ID NO: 813504 - DNA, 15 bp, Homo sapiens
catatatgcagcatg

SEQ ID NO: 813505 - DNA, 15 bp, Homo sapiens
atatatgcagcatgg

SEQ ID NO: 813506 - DNA, 15 bp, Homo sapiens
tatatgcagcatgga

SEQ ID NO: 813507 - DNA, 15 bp, Homo sapiens
atatgcagcatggag

SEQ ID NO: 813508 - DNA, 15 bp, Homo sapiens
tatgcagcatggagt

SEQ ID NO: 813509 - DNA, 15 bp, Homo sapiens
atgcagcatggagta

SEQ ID NO: 813510 - DNA, 15 bp, Homo sapiens
tgcagcatggagtaa

SEQ ID NO: 813511 - DNA, 15 bp, Homo sapiens
gcagcatggagtaaa

SEQ ID NO: 813512 - DNA, 15 bp, Homo sapiens
cagcatggagtaaaa

SEQ ID NO: 813513 - DNA, 15 bp, Homo sapiens
agcatggagtaaaaa

SEQ ID NO: 813514 - DNA, 15 bp, Homo sapiens
gcatggagtaaaaac

SEQ ID NO: 813515 - DNA, 15 bp, Homo sapiens
catggagtaaaaact

SEQ ID NO: 813516 - DNA, 15 bp, Homo sapiens
atggagtaaaaacta

SEQ ID NO: 813517 - DNA, 15 bp, Homo sapiens
tggagtaaaaactat

SEQ ID NO: 813518 - DNA, 15 bp, Homo sapiens
ggagtaaaaactata

SEQ ID NO: 813519 - DNA, 15 bp, Homo sapiens
gagtaaaaactataa

SEQ ID NO: 813520 - DNA, 15 bp, Homo sapiens
agtaaaaactataag

SEQ ID NO: 813521 - DNA, 15 bp, Homo sapiens
gtaaaaactataaga

SEQ ID NO: 813522 - DNA, 15 bp, Homo sapiens
taaaaactataagaa

SEQ ID NO: 813523 - DNA, 15 bp, Homo sapiens
aaaaactataagaaa

SEQ ID NO: 813524 - DNA, 15 bp, Homo sapiens
aaaactataagaaac

SEQ ID NO: 813525 - DNA, 15 bp, Homo sapiens
aaactataagaaacc

SEQ ID NO: 813526 - DNA, 15 bp, Homo sapiens
aactataagaaacct

SEQ ID NO: 813527 - DNA, 15 bp, Homo sapiens
actataagaaacctt

SEQ ID NO: 813528 - DNA, 15 bp, Homo sapiens
ctataagaaaccttc

SEQ ID NO: 813529 - DNA, 15 bp, Homo sapiens
tataagaaaccttca

SEQ ID NO: 813530 - DNA, 15 bp, Homo sapiens
ataagaaaccttcat

SEQ ID NO: 813531 - DNA, 15 bp, Homo sapiens
taagaaaccttcatc

SEQ ID NO: 813532 - DNA, 15 bp, Homo sapiens
aagaaaccttcatca

SEQ ID NO: 813533 - DNA, 15 bp, Homo sapiens
agaaaccttcatcaa

SEQ ID NO: 813534 - DNA, 15 bp, Homo sapiens
gaaaccttcatcaat

SEQ ID NO: 813535 - DNA, 15 bp, Homo sapiens
aaaccttcatcaatc

SEQ ID NO: 813536 - DNA, 15 bp, Homo sapiens
aaccttcatcaatct

SEQ ID NO: 813537 - DNA, 15 bp, Homo sapiens
accttcatcaatcta

SEQ ID NO: 813538 - DNA, 15 bp, Homo sapiens
ccttcatcaatctaa

SEQ ID NO: 813539 - DNA, 15 bp, Homo sapiens
cttcatcaatctaag

SEQ ID NO: 813540 - DNA, 15 bp, Homo sapiens
ttcatcaatctaaga

SEQ ID NO: 813541 - DNA, 15 bp, Homo sapiens
tcatcaatctaagac

SEQ ID NO: 813542 - DNA, 15 bp, Homo sapiens
catcaatctaagact

SEQ ID NO: 813543 - DNA, 15 bp, Homo sapiens
atcaatctaagactg

SEQ ID NO: 813544 - DNA, 15 bp, Homo sapiens
tcaatctaagactgc

SEQ ID NO: 813545 - DNA, 15 bp, Homo sapiens
caatctaagactgca

SEQ ID NO: 813546 - DNA, 15 bp, Homo sapiens
aatctaagactgcat

SEQ ID NO: 813547 - DNA, 15 bp, Homo sapiens
atctaagactgcatt

SEQ ID NO: 813548 - DNA, 15 bp, Homo sapiens
tctaagactgcatta

SEQ ID NO: 813549 - DNA, 15 bp, Homo sapiens
ctaagactgcattaa

SEQ ID NO: 813550 - DNA, 15 bp, Homo sapiens
taagactgcattaaa

SEQ ID NO: 813551 - DNA, 15 bp, Homo sapiens
aagactgcattaaaa

SEQ ID NO: 813552 - DNA, 15 bp, Homo sapiens
agactgcattaaaaa

SEQ ID NO: 813553 - DNA, 15 bp, Homo sapiens
gactgcattaaaaat

SEQ ID NO: 813554 - DNA, 15 bp, Homo sapiens
actgcattaaaaatt

SEQ ID NO: 813555 - DNA, 15 bp, Homo sapiens
ctgcattaaaaatta

SEQ ID NO: 813556 - DNA, 15 bp, Homo sapiens
tgcattaaaaattac

SEQ ID NO: 813557 - DNA, 15 bp, Homo sapiens
gcattaaaaattact

SEQ ID NO: 813558 - DNA, 15 bp, Homo sapiens
cattaaaaattacta

SEQ ID NO: 813559 - DNA, 15 bp, Homo sapiens
attaaaaattactat

SEQ ID NO: 813560 - DNA, 15 bp, Homo sapiens
ttaaaaattactata

SEQ ID NO: 813561 - DNA, 15 bp, Homo sapiens
taaaaattactatat

SEQ ID NO: 813562 - DNA, 15 bp, Homo sapiens
aaaaattactatatt

SEQ ID NO: 813563 - DNA, 15 bp, Homo sapiens
aaaattactatattt

SEQ ID NO: 813564 - DNA, 15 bp, Homo sapiens
aaattactatatttt

SEQ ID NO: 813565 - DNA, 15 bp, Homo sapiens
aattactatattttt

SEQ ID NO: 813566 - DNA, 15 bp, Homo sapiens
attactatatttttt

SEQ ID NO: 813567 - DNA, 15 bp, Homo sapiens
ttactatattttttg

SEQ ID NO: 813568 - DNA, 15 bp, Homo sapiens
tactatattttttga

SEQ ID NO: 813569 - DNA, 15 bp, Homo sapiens
actatattttttgaa

SEQ ID NO: 813570 - DNA, 15 bp, Homo sapiens
ctatattttttgaag

SEQ ID NO: 813571 - DNA, 15 bp, Homo sapiens
tatattttttgaagg

SEQ ID NO: 813572 - DNA, 15 bp, Homo sapiens
atattttttgaaggt

SEQ ID NO: 813573 - DNA, 15 bp, Homo sapiens
tattttttgaaggtt

SEQ ID NO: 813574 - DNA, 15 bp, Homo sapiens
attttttgaaggttt

SEQ ID NO: 813575 - DNA, 15 bp, Homo sapiens
ttttttgaaggttta

SEQ ID NO: 813576 - DNA, 15 bp, Homo sapiens
tttttgaaggtttaa

SEQ ID NO: 813577 - DNA, 15 bp, Homo sapiens
ttttgaaggtttaaa

SEQ ID NO: 813578 - DNA, 15 bp, Homo sapiens
tttgaaggtttaaat

SEQ ID NO: 813579 - DNA, 15 bp, Homo sapiens
ttgaaggtttaaata

SEQ ID NO: 813580 - DNA, 15 bp, Homo sapiens
tgaaggtttaaatat

SEQ ID NO: 813581 - DNA, 15 bp, Homo sapiens
gaaggtttaaatata

SEQ ID NO: 813582 - DNA, 15 bp, Homo sapiens
aaggtttaaatatat

SEQ ID NO: 813583 - DNA, 15 bp, Homo sapiens
aggtttaaatatatt

SEQ ID NO: 813584 - DNA, 15 bp, Homo sapiens
ggtttaaatatattc

SEQ ID NO: 813585 - DNA, 15 bp, Homo sapiens
gtttaaatatattca

SEQ ID NO: 813586 - DNA, 15 bp, Homo sapiens
tttaaatatattcag

SEQ ID NO: 813587 - DNA, 15 bp, Homo sapiens
ttaaatatattcagc

SEQ ID NO: 813588 - DNA, 15 bp, Homo sapiens
taaatatattcagcc

SEQ ID NO: 813589 - DNA, 15 bp, Homo sapiens
aaatatattcagcct

SEQ ID NO: 813590 - DNA, 15 bp, Homo sapiens
aatatattcagcctt

SEQ ID NO: 813591 - DNA, 15 bp, Homo sapiens
atatattcagcctta

SEQ ID NO: 813592 - DNA, 15 bp, Homo sapiens
tatattcagccttac

SEQ ID NO: 813593 - DNA, 15 bp, Homo sapiens
atattcagccttact

SEQ ID NO: 813594 - DNA, 15 bp, Homo sapiens
tattcagccttactg

SEQ ID NO: 813595 - DNA, 15 bp, Homo sapiens
attcagccttactgg

SEQ ID NO: 813596 - DNA, 15 bp, Homo sapiens
ttcagccttactgga

SEQ ID NO: 813597 - DNA, 15 bp, Homo sapiens
tcagccttactggaa

SEQ ID NO: 813598 - DNA, 15 bp, Homo sapiens
cagccttactggaaa

SEQ ID NO: 813599 - DNA, 15 bp, Homo sapiens
agccttactggaaaa

SEQ ID NO: 813600 - DNA, 15 bp, Homo sapiens
gccttactggaaaaa

SEQ ID NO: 813601 - DNA, 15 bp, Homo sapiens
ccttactggaaaaat

SEQ ID NO: 813602 - DNA, 15 bp, Homo sapiens
cttactggaaaaatt

SEQ ID NO: 813603 - DNA, 15 bp, Homo sapiens
ttactggaaaaatta

SEQ ID NO: 813604 - DNA, 15 bp, Homo sapiens
tactggaaaaattag

SEQ ID NO: 813605 - DNA, 15 bp, Homo sapiens
actggaaaaattaga

SEQ ID NO: 813606 - DNA, 15 bp, Homo sapiens
ctggaaaaattagag

SEQ ID NO: 813607 - DNA, 15 bp, Homo sapiens
tggaaaaattagagc

SEQ ID NO: 813608 - DNA, 15 bp, Homo sapiens
ggaaaaattagagca

SEQ ID NO: 813609 - DNA, 15 bp, Homo sapiens
gaaaaattagagcat

SEQ ID NO: 813610 - DNA, 15 bp, Homo sapiens
aaaaattagagcatg

SEQ ID NO: 813611 - DNA, 15 bp, Homo sapiens
aaaattagagcatgt

SEQ ID NO: 813612 - DNA, 15 bp, Homo sapiens
aaattagagcatgtt

SEQ ID NO: 813613 - DNA, 15 bp, Homo sapiens
aattagagcatgttg

SEQ ID NO: 813614 - DNA, 15 bp, Homo sapiens
attagagcatgttga

SEQ ID NO: 813615 - DNA, 15 bp, Homo sapiens
ttagagcatgttgat

SEQ ID NO: 813616 - DNA, 15 bp, Homo sapiens
tagagcatgttgatt

SEQ ID NO: 813617 - DNA, 15 bp, Homo sapiens
agagcatgttgattt

SEQ ID NO: 813618 - DNA, 15 bp, Homo sapiens
gagcatgttgattta

SEQ ID NO: 813619 - DNA, 15 bp, Homo sapiens
agcatgttgatttat

SEQ ID NO: 813620 - DNA, 15 bp, Homo sapiens
gcatgttgatttata

SEQ ID NO: 813621 - DNA, 15 bp, Homo sapiens
catgttgatttatat

SEQ ID NO: 813622 - DNA, 15 bp, Homo sapiens
atgttgatttatatc

SEQ ID NO: 813623 - DNA, 15 bp, Homo sapiens
tgttgatttatatcc

SEQ ID NO: 813624 - DNA, 15 bp, Homo sapiens
gttgatttatatcca

SEQ ID NO: 813625 - DNA, 15 bp, Homo sapiens
ttgatttatatccag

SEQ ID NO: 813626 - DNA, 15 bp, Homo sapiens
tgatttatatccagt

SEQ ID NO: 813627 - DNA, 15 bp, Homo sapiens
gatttatatccagta

SEQ ID NO: 813628 - DNA, 15 bp, Homo sapiens
atttatatccagtaa

SEQ ID NO: 813629 - DNA, 15 bp, Homo sapiens
tttatatccagtaag

SEQ ID NO: 813630 - DNA, 15 bp, Homo sapiens
ttatatccagtaaga

SEQ ID NO: 813631 - DNA, 15 bp, Homo sapiens
tatatccagtaagat

SEQ ID NO: 813632 - DNA, 15 bp, Homo sapiens
atatccagtaagata

SEQ ID NO: 813633 - DNA, 15 bp, Homo sapiens
tatccagtaagataa

SEQ ID NO: 813634 - DNA, 15 bp, Homo sapiens
atccagtaagataag

SEQ ID NO: 813635 - DNA, 15 bp, Homo sapiens
tccagtaagataagt

SEQ ID NO: 813636 - DNA, 15 bp, Homo sapiens
ccagtaagataagtt

SEQ ID NO: 813637 - DNA, 15 bp, Homo sapiens
cagtaagataagtta

SEQ ID NO: 813638 - DNA, 15 bp, Homo sapiens
agtaagataagttac

SEQ ID NO: 813639 - DNA, 15 bp, Homo sapiens
gtaagataagttact

SEQ ID NO: 813640 - DNA, 15 bp, Homo sapiens
taagataagttactc

SEQ ID NO: 813641 - DNA, 15 bp, Homo sapiens
aagataagttactct

SEQ ID NO: 813642 - DNA, 15 bp, Homo sapiens
agataagttactctc

SEQ ID NO: 813643 - DNA, 15 bp, Homo sapiens
gataagttactctcc

SEQ ID NO: 813644 - DNA, 15 bp, Homo sapiens
ataagttactctcca

SEQ ID NO: 813645 - DNA, 15 bp, Homo sapiens
taagttactctccaa

SEQ ID NO: 813646 - DNA, 15 bp, Homo sapiens
aagttactctccaag

SEQ ID NO: 813647 - DNA, 15 bp, Homo sapiens
agttactctccaagg

SEQ ID NO: 813648 - DNA, 15 bp, Homo sapiens
gttactctccaagga

SEQ ID NO: 813649 - DNA, 15 bp, Homo sapiens
ttactctccaaggag

SEQ ID NO: 813650 - DNA, 15 bp, Homo sapiens
tactctccaaggaga

SEQ ID NO: 813651 - DNA, 15 bp, Homo sapiens
actctccaaggagac

SEQ ID NO: 813652 - DNA, 15 bp, Homo sapiens
ctctccaaggagacc

SEQ ID NO: 813653 - DNA, 15 bp, Homo sapiens
tctccaaggagaccc

SEQ ID NO: 813654 - DNA, 15 bp, Homo sapiens
ctccaaggagaccct

SEQ ID NO: 813655 - DNA, 15 bp, Homo sapiens
tccaaggagaccctt

SEQ ID NO: 813656 - DNA, 15 bp, Homo sapiens
ccaaggagacccttt

SEQ ID NO: 813657 - DNA, 15 bp, Homo sapiens
caaggagaccctttg

SEQ ID NO: 813658 - DNA, 15 bp, Homo sapiens
aaggagaccctttgg

SEQ ID NO: 813659 - DNA, 15 bp, Homo sapiens
aggagaccctttggg

SEQ ID NO: 813660 - DNA, 15 bp, Homo sapiens
ggagaccctttgggt

SEQ ID NO: 813661 - DNA, 15 bp, Homo sapiens
gagaccctttgggtt

SEQ ID NO: 813662 - DNA, 15 bp, Homo sapiens
agaccctttgggtta

SEQ ID NO: 813663 - DNA, 15 bp, Homo sapiens
gaccctttgggttaa

SEQ ID NO: 813664 - DNA, 15 bp, Homo sapiens
accctttgggttaaa

SEQ ID NO: 813665 - DNA, 15 bp, Homo sapiens
ccctttgggttaaaa

SEQ ID NO: 813666 - DNA, 15 bp, Homo sapiens
cctttgggttaaaat

SEQ ID NO: 813667 - DNA, 15 bp, Homo sapiens
ctttgggttaaaatc

SEQ ID NO: 813668 - DNA, 15 bp, Homo sapiens
tttgggttaaaatcc

SEQ ID NO: 813669 - DNA, 15 bp, Homo sapiens
ttgggttaaaatcct

SEQ ID NO: 813670 - DNA, 15 bp, Homo sapiens
tgggttaaaatcctc

SEQ ID NO: 813671 - DNA, 15 bp, Homo sapiens
gggttaaaatcctca

SEQ ID NO: 813672 - DNA, 15 bp, Homo sapiens
ggttaaaatcctcac

SEQ ID NO: 813673 - DNA, 15 bp, Homo sapiens
gttaaaatcctcacc

SEQ ID NO: 813674 - DNA, 15 bp, Homo sapiens
ttaaaatcctcaccc

SEQ ID NO: 813675 - DNA, 15 bp, Homo sapiens
taaaatcctcaccca

SEQ ID NO: 813676 - DNA, 15 bp, Homo sapiens
aaaatcctcacccac

SEQ ID NO: 813677 - DNA, 15 bp, Homo sapiens
aaatcctcacccaca

SEQ ID NO: 813678 - DNA, 15 bp, Homo sapiens
aatcctcacccacac

SEQ ID NO: 813679 - DNA, 15 bp, Homo sapiens
atcctcacccacact

SEQ ID NO: 813680 - DNA, 15 bp, Homo sapiens
tcctcacccacactc

SEQ ID NO: 813681 - DNA, 15 bp, Homo sapiens
cctcacccacactcc

SEQ ID NO: 813682 - DNA, 15 bp, Homo sapiens
ctcacccacactcct

SEQ ID NO: 813683 - DNA, 15 bp, Homo sapiens
tcacccacactcctc

SEQ ID NO: 813684 - DNA, 15 bp, Homo sapiens
cacccacactcctct

SEQ ID NO: 813685 - DNA, 15 bp, Homo sapiens
acccacactcctctt

SEQ ID NO: 813686 - DNA, 15 bp, Homo sapiens
cccacactcctcttc

SEQ ID NO: 813687 - DNA, 15 bp, Homo sapiens
ccacactcctcttca

SEQ ID NO: 813688 - DNA, 15 bp, Homo sapiens
cacactcctcttcat

SEQ ID NO: 813689 - DNA, 15 bp, Homo sapiens
acactcctcttcatc

SEQ ID NO: 813690 - DNA, 15 bp, Homo sapiens
cactcctcttcatct

SEQ ID NO: 813691 - DNA, 15 bp, Homo sapiens
actcctcttcatcta

SEQ ID NO: 813692 - DNA, 15 bp, Homo sapiens
ctcctcttcatctat

SEQ ID NO: 813693 - DNA, 15 bp, Homo sapiens
tcctcttcatctatg

SEQ ID NO: 813694 - DNA, 15 bp, Homo sapiens
cctcttcatctatgt

SEQ ID NO: 813695 - DNA, 15 bp, Homo sapiens
ctcttcatctatgta

SEQ ID NO: 813696 - DNA, 15 bp, Homo sapiens
tcttcatctatgtat

SEQ ID NO: 813697 - DNA, 15 bp, Homo sapiens
cttcatctatgtatt

SEQ ID NO: 813698 - DNA, 15 bp, Homo sapiens
ttcatctatgtattc

SEQ ID NO: 813699 - DNA, 15 bp, Homo sapiens
tcatctatgtattct

SEQ ID NO: 813700 - DNA, 15 bp, Homo sapiens
catctatgtattctt

SEQ ID NO: 813701 - DNA, 15 bp, Homo sapiens
atctatgtattctta

SEQ ID NO: 813702 - DNA, 15 bp, Homo sapiens
tctatgtattcttat

SEQ ID NO: 813703 - DNA, 15 bp, Homo sapiens
ctatgtattcttatg

SEQ ID NO: 813704 - DNA, 15 bp, Homo sapiens
tatgtattcttatgt

SEQ ID NO: 813705 - DNA, 15 bp, Homo sapiens
atgtattcttatgtg

SEQ ID NO: 813706 - DNA, 15 bp, Homo sapiens
tgtattcttatgtgg

SEQ ID NO: 813707 - DNA, 15 bp, Homo sapiens
gtattcttatgtgga

SEQ ID NO: 813708 - DNA, 15 bp, Homo sapiens
tattcttatgtggag

SEQ ID NO: 813709 - DNA, 15 bp, Homo sapiens
attcttatgtggaga

SEQ ID NO: 813710 - DNA, 15 bp, Homo sapiens
ttcttatgtggagat

SEQ ID NO: 813711 - DNA, 15 bp, Homo sapiens
tcttatgtggagatt

SEQ ID NO: 813712 - DNA, 15 bp, Homo sapiens
cttatgtggagattt

SEQ ID NO: 813713 - DNA, 15 bp, Homo sapiens
ttatgtggagatttt

SEQ ID NO: 813714 - DNA, 15 bp, Homo sapiens
tatgtggagatttta

SEQ ID NO: 813715 - DNA, 15 bp, Homo sapiens
atgtggagattttaa

SEQ ID NO: 813716 - DNA, 15 bp, Homo sapiens
tgtggagattttaat

SEQ ID NO: 813717 - DNA, 15 bp, Homo sapiens
gtggagattttaatt

SEQ ID NO: 813718 - DNA, 15 bp, Homo sapiens
tggagattttaattc

SEQ ID NO: 813719 - DNA, 15 bp, Homo sapiens
ggagattttaattca

SEQ ID NO: 813720 - DNA, 15 bp, Homo sapiens
gagattttaattcat

SEQ ID NO: 813721 - DNA, 15 bp, Homo sapiens
agattttaattcatc

SEQ ID NO: 813722 - DNA, 15 bp, Homo sapiens
gattttaattcatct

SEQ ID NO: 813723 - DNA, 15 bp, Homo sapiens
attttaattcatctt

SEQ ID NO: 813724 - DNA, 15 bp, Homo sapiens
ttttaattcatcttt

SEQ ID NO: 813725 - DNA, 15 bp, Homo sapiens
tttaattcatctttt

SEQ ID NO: 813726 - DNA, 15 bp, Homo sapiens
ttaattcatcttttt

SEQ ID NO: 813727 - DNA, 15 bp, Homo sapiens
taattcatctttttc

SEQ ID NO: 813728 - DNA, 15 bp, Homo sapiens
aattcatctttttcc

SEQ ID NO: 813729 - DNA, 15 bp, Homo sapiens
attcatctttttcca

SEQ ID NO: 813730 - DNA, 15 bp, Homo sapiens
ttcatctttttccat

SEQ ID NO: 813731 - DNA, 15 bp, Homo sapiens
tcatctttttccatt

SEQ ID NO: 813732 - DNA, 15 bp, Homo sapiens
catctttttccattg

SEQ ID NO: 813733 - DNA, 15 bp, Homo sapiens
atctttttccattgt

SEQ ID NO: 813734 - DNA, 15 bp, Homo sapiens
tctttttccattgtt

SEQ ID NO: 813735 - DNA, 15 bp, Homo sapiens
ctttttccattgttg

SEQ ID NO: 813736 - DNA, 15 bp, Homo sapiens
tttttccattgttgc

SEQ ID NO: 813737 - DNA, 15 bp, Homo sapiens
ttttccattgttgct

SEQ ID NO: 813738 - DNA, 15 bp, Homo sapiens
tttccattgttgctt

SEQ ID NO: 813739 - DNA, 15 bp, Homo sapiens
ttccattgttgcttg

SEQ ID NO: 813740 - DNA, 15 bp, Homo sapiens
tccattgttgcttga

SEQ ID NO: 813741 - DNA, 15 bp, Homo sapiens
ccattgttgcttgaa

SEQ ID NO: 813742 - DNA, 15 bp, Homo sapiens
cattgttgcttgaac

SEQ ID NO: 813743 - DNA, 15 bp, Homo sapiens
attgttgcttgaaca

SEQ ID NO: 813744 - DNA, 15 bp, Homo sapiens
ttgttgcttgaacac

SEQ ID NO: 813745 - DNA, 15 bp, Homo sapiens
tgttgcttgaacacc

SEQ ID NO: 813746 - DNA, 15 bp, Homo sapiens
gttgcttgaacacct

SEQ ID NO: 813747 - DNA, 15 bp, Homo sapiens
ttgcttgaacacctg

SEQ ID NO: 813748 - DNA, 15 bp, Homo sapiens
tgcttgaacacctga

SEQ ID NO: 813749 - DNA, 15 bp, Homo sapiens
gcttgaacacctgat

SEQ ID NO: 813750 - DNA, 15 bp, Homo sapiens
cttgaacacctgatt

SEQ ID NO: 813751 - DNA, 15 bp, Homo sapiens
ttgaacacctgattc

SEQ ID NO: 813752 - DNA, 15 bp, Homo sapiens
tgaacacctgattcc

SEQ ID NO: 813753 - DNA, 15 bp, Homo sapiens
gaacacctgattcct

SEQ ID NO: 813754 - DNA, 15 bp, Homo sapiens
aacacctgattcctt

SEQ ID NO: 813755 - DNA, 15 bp, Homo sapiens
acacctgattccttg

SEQ ID NO: 813756 - DNA, 15 bp, Homo sapiens
cacctgattccttgg

SEQ ID NO: 813757 - DNA, 15 bp, Homo sapiens
acctgattccttggg

SEQ ID NO: 813758 - DNA, 15 bp, Homo sapiens
cctgattccttgggt

SEQ ID NO: 813759 - DNA, 15 bp, Homo sapiens
ctgattccttgggtt

SEQ ID NO: 813760 - DNA, 15 bp, Homo sapiens
tgattccttgggttg

SEQ ID NO: 813761 - DNA, 15 bp, Homo sapiens
gattccttgggttgg

SEQ ID NO: 813762 - DNA, 15 bp, Homo sapiens
attccttgggttggc

SEQ ID NO: 813763 - DNA, 15 bp, Homo sapiens
ttccttgggttggct

SEQ ID NO: 813764 - DNA, 15 bp, Homo sapiens
tccttgggttggctt

SEQ ID NO: 813765 - DNA, 15 bp, Homo sapiens
ccttgggttggcttc

SEQ ID NO: 813766 - DNA, 15 bp, Homo sapiens
cttgggttggcttcc

SEQ ID NO: 813767 - DNA, 15 bp, Homo sapiens
ttgggttggcttcct

SEQ ID NO: 813768 - DNA, 15 bp, Homo sapiens
tgggttggcttcctg

SEQ ID NO: 813769 - DNA, 15 bp, Homo sapiens
gggttggcttcctgg

SEQ ID NO: 813770 - DNA, 15 bp, Homo sapiens
ggttggcttcctgga

SEQ ID NO: 813771 - DNA, 15 bp, Homo sapiens
gttggcttcctggag

SEQ ID NO: 813772 - DNA, 15 bp, Homo sapiens
ttggcttcctggaga

SEQ ID NO: 813773 - DNA, 15 bp, Homo sapiens
tggcttcctggagaa

SEQ ID NO: 813774 - DNA, 15 bp, Homo sapiens
ggcttcctggagaaa

SEQ ID NO: 813775 - DNA, 15 bp, Homo sapiens
gcttcctggagaaat

SEQ ID NO: 813776 - DNA, 15 bp, Homo sapiens
cttcctggagaaatg

SEQ ID NO: 813777 - DNA, 15 bp, Homo sapiens
ttcctggagaaatga

SEQ ID NO: 813778 - DNA, 15 bp, Homo sapiens
tcctggagaaatgaa

SEQ ID NO: 813779 - DNA, 15 bp, Homo sapiens
cctggagaaatgaat

SEQ ID NO: 813780 - DNA, 15 bp, Homo sapiens
ctggagaaatgaatc

SEQ ID NO: 813781 - DNA, 15 bp, Homo sapiens
tggagaaatgaatca

SEQ ID NO: 813782 - DNA, 15 bp, Homo sapiens
ggagaaatgaatcag

SEQ ID NO: 813783 - DNA, 15 bp, Homo sapiens
gagaaatgaatcagc

SEQ ID NO: 813784 - DNA, 15 bp, Homo sapiens
agaaatgaatcagca

SEQ ID NO: 813785 - DNA, 15 bp, Homo sapiens
gaaatgaatcagcaa

SEQ ID NO: 813786 - DNA, 15 bp, Homo sapiens
aaatgaatcagcaag

SEQ ID NO: 813787 - DNA, 15 bp, Homo sapiens
aatgaatcagcaaga

SEQ ID NO: 813788 - DNA, 15 bp, Homo sapiens
atgaatcagcaagag

SEQ ID NO: 813789 - DNA, 15 bp, Homo sapiens
tgaatcagcaagaga

SEQ ID NO: 813790 - DNA, 15 bp, Homo sapiens
gaatcagcaagagaa

SEQ ID NO: 813791 - DNA, 15 bp, Homo sapiens
aatcagcaagagaaa

SEQ ID NO: 813792 - DNA, 15 bp, Homo sapiens
atcagcaagagaaac

SEQ ID NO: 813793 - DNA, 15 bp, Homo sapiens
tcagcaagagaaaca

SEQ ID NO: 813794 - DNA, 15 bp, Homo sapiens
cagcaagagaaacat

SEQ ID NO: 813795 - DNA, 15 bp, Homo sapiens
agcaagagaaacatg

SEQ ID NO: 813796 - DNA, 15 bp, Homo sapiens
gcaagagaaacatga

SEQ ID NO: 813797 - DNA, 15 bp, Homo sapiens
caagagaaacatgag

SEQ ID NO: 813798 - DNA, 15 bp, Homo sapiens
aagagaaacatgagc

SEQ ID NO: 813799 - DNA, 15 bp, Homo sapiens
agagaaacatgagct

SEQ ID NO: 813800 - DNA, 15 bp, Homo sapiens
gagaaacatgagctg

SEQ ID NO: 813801 - DNA, 15 bp, Homo sapiens
agaaacatgagctga

SEQ ID NO: 813802 - DNA, 15 bp, Homo sapiens
gaaacatgagctgac

SEQ ID NO: 813803 - DNA, 15 bp, Homo sapiens
aaacatgagctgact

SEQ ID NO: 813804 - DNA, 15 bp, Homo sapiens
aacatgagctgactt

SEQ ID NO: 813805 - DNA, 15 bp, Homo sapiens
acatgagctgacttc

SEQ ID NO: 813806 - DNA, 15 bp, Homo sapiens
catgagctgacttcc

SEQ ID NO: 813807 - DNA, 15 bp, Homo sapiens
atgagctgacttcct

SEQ ID NO: 813808 - DNA, 15 bp, Homo sapiens
tgagctgacttcctc

SEQ ID NO: 813809 - DNA, 15 bp, Homo sapiens
gagctgacttcctcc

SEQ ID NO: 813810 - DNA, 15 bp, Homo sapiens
agctgacttcctcct

SEQ ID NO: 813811 - DNA, 15 bp, Homo sapiens
gctgacttcctccta

SEQ ID NO: 813812 - DNA, 15 bp, Homo sapiens
ctgacttcctcctat

SEQ ID NO: 813813 - DNA, 15 bp, Homo sapiens
tgacttcctcctatt

SEQ ID NO: 813814 - DNA, 15 bp, Homo sapiens
gacttcctcctattt

SEQ ID NO: 813815 - DNA, 15 bp, Homo sapiens
acttcctcctatttg

SEQ ID NO: 813816 - DNA, 15 bp, Homo sapiens
cttcctcctatttga

SEQ ID NO: 813817 - DNA, 15 bp, Homo sapiens
ttcctcctatttgat

SEQ ID NO: 813818 - DNA, 15 bp, Homo sapiens
tcctcctatttgata

SEQ ID NO: 813819 - DNA, 15 bp, Homo sapiens
cctcctatttgatat

SEQ ID NO: 813820 - DNA, 15 bp, Homo sapiens
ctcctatttgatatg

SEQ ID NO: 813821 - DNA, 15 bp, Homo sapiens
tcctatttgatatgc

SEQ ID NO: 813822 - DNA, 15 bp, Homo sapiens
cctatttgatatgca

SEQ ID NO: 813823 - DNA, 15 bp, Homo sapiens
ctatttgatatgcac

SEQ ID NO: 813824 - DNA, 15 bp, Homo sapiens
tatttgatatgcaca

SEQ ID NO: 813825 - DNA, 15 bp, Homo sapiens
atttgatatgcacac

SEQ ID NO: 813826 - DNA, 15 bp, Homo sapiens
tttgatatgcacaca

SEQ ID NO: 813827 - DNA, 15 bp, Homo sapiens
ttgatatgcacacat

SEQ ID NO: 813828 - DNA, 15 bp, Homo sapiens
tgatatgcacacatc

SEQ ID NO: 813829 - DNA, 15 bp, Homo sapiens
gatatgcacacatct

SEQ ID NO: 813830 - DNA, 15 bp, Homo sapiens
atatgcacacatctc

SEQ ID NO: 813831 - DNA, 15 bp, Homo sapiens
tatgcacacatctct

SEQ ID NO: 813832 - DNA, 15 bp, Homo sapiens
atgcacacatctcta

SEQ ID NO: 813833 - DNA, 15 bp, Homo sapiens
tgcacacatctctag

SEQ ID NO: 813834 - DNA, 15 bp, Homo sapiens
gcacacatctctaga

SEQ ID NO: 813835 - DNA, 15 bp, Homo sapiens
cacacatctctagat

SEQ ID NO: 813836 - DNA, 15 bp, Homo sapiens
acacatctctagatt

SEQ ID NO: 813837 - DNA, 15 bp, Homo sapiens
cacatctctagattt

SEQ ID NO: 813838 - DNA, 15 bp, Homo sapiens
acatctctagatttt

SEQ ID NO: 813839 - DNA, 15 bp, Homo sapiens
catctctagattttt

SEQ ID NO: 813840 - DNA, 15 bp, Homo sapiens
atctctagattttta

SEQ ID NO: 813841 - DNA, 15 bp, Homo sapiens
tctctagatttttag

SEQ ID NO: 813842 - DNA, 15 bp, Homo sapiens
ctctagatttttagc

SEQ ID NO: 813843 - DNA, 15 bp, Homo sapiens
tctagatttttagct

SEQ ID NO: 813844 - DNA, 15 bp, Homo sapiens
ctagatttttagctt

SEQ ID NO: 813845 - DNA, 15 bp, Homo sapiens
tagatttttagcttt

SEQ ID NO: 813846 - DNA, 15 bp, Homo sapiens
agatttttagctttg

SEQ ID NO: 813847 - DNA, 15 bp, Homo sapiens
gatttttagctttgc

SEQ ID NO: 813848 - DNA, 15 bp, Homo sapiens
atttttagctttgct

SEQ ID NO: 813849 - DNA, 15 bp, Homo sapiens
tttttagctttgctc

SEQ ID NO: 813850 - DNA, 15 bp, Homo sapiens
ttttagctttgctcc

SEQ ID NO: 813851 - DNA, 15 bp, Homo sapiens
tttagctttgctcct

SEQ ID NO: 813852 - DNA, 15 bp, Homo sapiens
ttagctttgctccta

SEQ ID NO: 813853 - DNA, 15 bp, Homo sapiens
tagctttgctcctag

SEQ ID NO: 813854 - DNA, 15 bp, Homo sapiens
agctttgctcctagt

SEQ ID NO: 813855 - DNA, 15 bp, Homo sapiens
gctttgctcctagta

SEQ ID NO: 813856 - DNA, 15 bp, Homo sapiens
ctttgctcctagtat

SEQ ID NO: 813857 - DNA, 15 bp, Homo sapiens
tttgctcctagtatg

SEQ ID NO: 813858 - DNA, 15 bp, Homo sapiens
ttgctcctagtatgc

SEQ ID NO: 813859 - DNA, 15 bp, Homo sapiens
tgctcctagtatgct

SEQ ID NO: 813860 - DNA, 15 bp, Homo sapiens
gctcctagtatgctt

SEQ ID NO: 813861 - DNA, 15 bp, Homo sapiens
ctcctagtatgcttc

SEQ ID NO: 813862 - DNA, 15 bp, Homo sapiens
tcctagtatgcttcg

SEQ ID NO: 813863 - DNA, 15 bp, Homo sapiens
cctagtatgcttcgt

SEQ ID NO: 813864 - DNA, 15 bp, Homo sapiens
ctagtatgcttcgtg

SEQ ID NO: 813865 - DNA, 15 bp, Homo sapiens
tagtatgcttcgtgt

SEQ ID NO: 813866 - DNA, 15 bp, Homo sapiens
agtatgcttcgtgtc

SEQ ID NO: 813867 - DNA, 15 bp, Homo sapiens
gtatgcttcgtgtca

SEQ ID NO: 813868 - DNA, 15 bp, Homo sapiens
tatgcttcgtgtcaa

SEQ ID NO: 813869 - DNA, 15 bp, Homo sapiens
atgcttcgtgtcaag

SEQ ID NO: 813870 - DNA, 15 bp, Homo sapiens
tgcttcgtgtcaagt

SEQ ID NO: 813871 - DNA, 15 bp, Homo sapiens
gcttcgtgtcaagtt

SEQ ID NO: 813872 - DNA, 15 bp, Homo sapiens
cttcgtgtcaagttt

SEQ ID NO: 813873 - DNA, 15 bp, Homo sapiens
ttcgtgtcaagttta

SEQ ID NO: 813874 - DNA, 15 bp, Homo sapiens
tcgtgtcaagtttag

SEQ ID NO: 813875 - DNA, 15 bp, Homo sapiens
cgtgtcaagtttagg

SEQ ID NO: 813876 - DNA, 15 bp, Homo sapiens
gtgtcaagtttaggt

SEQ ID NO: 813877 - DNA, 15 bp, Homo sapiens
tgtcaagtttaggtc

SEQ ID NO: 813878 - DNA, 15 bp, Homo sapiens
gtcaagtttaggtcc

SEQ ID NO: 813879 - DNA, 15 bp, Homo sapiens
tcaagtttaggtcca

SEQ ID NO: 813880 - DNA, 15 bp, Homo sapiens
caagtttaggtccag

SEQ ID NO: 813881 - DNA, 15 bp, Homo sapiens
aagtttaggtccagc

SEQ ID NO: 813882 - DNA, 15 bp, Homo sapiens
agtttaggtccagct

SEQ ID NO: 813883 - DNA, 15 bp, Homo sapiens
gtttaggtccagctt

SEQ ID NO: 813884 - DNA, 15 bp, Homo sapiens
tttaggtccagcttc

SEQ ID NO: 813885 - DNA, 15 bp, Homo sapiens
ttaggtccagcttcc

SEQ ID NO: 813886 - DNA, 15 bp, Homo sapiens
taggtccagcttcct

SEQ ID NO: 813887 - DNA, 15 bp, Homo sapiens
aggtccagcttcctg

SEQ ID NO: 813888 - DNA, 15 bp, Homo sapiens
ggtccagcttcctga

SEQ ID NO: 813889 - DNA, 15 bp, Homo sapiens
gtccagcttcctgag

SEQ ID NO: 813890 - DNA, 15 bp, Homo sapiens
tccagcttcctgagc

SEQ ID NO: 813891 - DNA, 15 bp, Homo sapiens
ccagcttcctgagct

SEQ ID NO: 813892 - DNA, 15 bp, Homo sapiens
cagcttcctgagcta

SEQ ID NO: 813893 - DNA, 15 bp, Homo sapiens
agcttcctgagctag

SEQ ID NO: 813894 - DNA, 15 bp, Homo sapiens
gcttcctgagctaga

SEQ ID NO: 813895 - DNA, 15 bp, Homo sapiens
cttcctgagctagag

SEQ ID NO: 813896 - DNA, 15 bp, Homo sapiens
ttcctgagctagagc

SEQ ID NO: 813897 - DNA, 15 bp, Homo sapiens
tcctgagctagagca

SEQ ID NO: 813898 - DNA, 15 bp, Homo sapiens
cctgagctagagcac

SEQ ID NO: 813899 - DNA, 15 bp, Homo sapiens
ctgagctagagcaca

SEQ ID NO: 813900 - DNA, 15 bp, Homo sapiens
tgagctagagcacaa

SEQ ID NO: 813901 - DNA, 15 bp, Homo sapiens
gagctagagcacaaa

SEQ ID NO: 813902 - DNA, 15 bp, Homo sapiens
agctagagcacaaaa

SEQ ID NO: 813903 - DNA, 15 bp, Homo sapiens
gctagagcacaaaaa

SEQ ID NO: 813904 - DNA, 15 bp, Homo sapiens
ctagagcacaaaaaa

SEQ ID NO: 813905 - DNA, 15 bp, Homo sapiens
tagagcacaaaaaaa

SEQ ID NO: 813906 - DNA, 15 bp, Homo sapiens
agagcacaaaaaaat

SEQ ID NO: 813907 - DNA, 15 bp, Homo sapiens
gagcacaaaaaaata

SEQ ID NO: 813908 - DNA, 15 bp, Homo sapiens
agcacaaaaaaatat

SEQ ID NO: 813909 - DNA, 15 bp, Homo sapiens
gcacaaaaaaatata

SEQ ID NO: 813910 - DNA, 15 bp, Homo sapiens
cacaaaaaaatatat

SEQ ID NO: 813911 - DNA, 15 bp, Homo sapiens
acaaaaaaatatatc

SEQ ID NO: 813912 - DNA, 15 bp, Homo sapiens
caaaaaaatatatca

SEQ ID NO: 813913 - DNA, 15 bp, Homo sapiens
aaaaaaatatatcat

SEQ ID NO: 813914 - DNA, 15 bp, Homo sapiens
aaaaaatatatcatt

SEQ ID NO: 813915 - DNA, 15 bp, Homo sapiens
aaaaatatatcattt

SEQ ID NO: 813916 - DNA, 15 bp, Homo sapiens
aaaatatatcatttg

SEQ ID NO: 813917 - DNA, 15 bp, Homo sapiens
aaatatatcatttga

SEQ ID NO: 813918 - DNA, 15 bp, Homo sapiens
aatatatcatttgaa

SEQ ID NO: 813919 - DNA, 15 bp, Homo sapiens
atatatcatttgaag

SEQ ID NO: 813920 - DNA, 15 bp, Homo sapiens
tatatcatttgaagc

SEQ ID NO: 813921 - DNA, 15 bp, Homo sapiens
atatcatttgaagca

SEQ ID NO: 813922 - DNA, 15 bp, Homo sapiens
tatcatttgaagcaa

SEQ ID NO: 813923 - DNA, 15 bp, Homo sapiens
atcatttgaagcaaa

SEQ ID NO: 813924 - DNA, 15 bp, Homo sapiens
tcatttgaagcaaag

SEQ ID NO: 813925 - DNA, 15 bp, Homo sapiens
catttgaagcaaaga

SEQ ID NO: 813926 - DNA, 15 bp, Homo sapiens
atttgaagcaaagag

SEQ ID NO: 813927 - DNA, 15 bp, Homo sapiens
tttgaagcaaagaga

SEQ ID NO: 813928 - DNA, 15 bp, Homo sapiens
ttgaagcaaagagag

SEQ ID NO: 813929 - DNA, 15 bp, Homo sapiens
tgaagcaaagagaga

SEQ ID NO: 813930 - DNA, 15 bp, Homo sapiens
gaagcaaagagagaa

SEQ ID NO: 813931 - DNA, 15 bp, Homo sapiens
aagcaaagagagaag

SEQ ID NO: 813932 - DNA, 15 bp, Homo sapiens
agcaaagagagaaga

SEQ ID NO: 813933 - DNA, 15 bp, Homo sapiens
gcaaagagagaagaa

SEQ ID NO: 813934 - DNA, 15 bp, Homo sapiens
caaagagagaagaac

SEQ ID NO: 813935 - DNA, 15 bp, Homo sapiens
aaagagagaagaacg

SEQ ID NO: 813936 - DNA, 15 bp, Homo sapiens
aagagagaagaacga

SEQ ID NO: 813937 - DNA, 15 bp, Homo sapiens
agagagaagaacgaa

SEQ ID NO: 813938 - DNA, 15 bp, Homo sapiens
gagagaagaacgaac

SEQ ID NO: 813939 - DNA, 15 bp, Homo sapiens
agagaagaacgaact

SEQ ID NO: 813940 - DNA, 15 bp, Homo sapiens
gagaagaacgaactg

SEQ ID NO: 813941 - DNA, 15 bp, Homo sapiens
agaagaacgaactgg

SEQ ID NO: 813942 - DNA, 15 bp, Homo sapiens
gaagaacgaactggg

SEQ ID NO: 813943 - DNA, 15 bp, Homo sapiens
aagaacgaactgggg

SEQ ID NO: 813944 - DNA, 15 bp, Homo sapiens
agaacgaactggggc

SEQ ID NO: 813945 - DNA, 15 bp, Homo sapiens
gaacgaactggggct

SEQ ID NO: 813946 - DNA, 15 bp, Homo sapiens
aacgaactggggctt

SEQ ID NO: 813947 - DNA, 15 bp, Homo sapiens
acgaactggggcttc

SEQ ID NO: 813948 - DNA, 15 bp, Homo sapiens
cgaactggggcttca

SEQ ID NO: 813949 - DNA, 15 bp, Homo sapiens
gaactggggcttcaa

SEQ ID NO: 813950 - DNA, 15 bp, Homo sapiens
aactggggcttcaat

SEQ ID NO: 813951 - DNA, 15 bp, Homo sapiens
actggggcttcaatc

SEQ ID NO: 813952 - DNA, 15 bp, Homo sapiens
ctggggcttcaatca

SEQ ID NO: 813953 - DNA, 15 bp, Homo sapiens
tggggcttcaatcac

SEQ ID NO: 813954 - DNA, 15 bp, Homo sapiens
ggggcttcaatcacc

SEQ ID NO: 813955 - DNA, 15 bp, Homo sapiens
gggcttcaatcacct

SEQ ID NO: 813956 - DNA, 15 bp, Homo sapiens
ggcttcaatcacctc

SEQ ID NO: 813957 - DNA, 15 bp, Homo sapiens
gcttcaatcacctct

SEQ ID NO: 813958 - DNA, 15 bp, Homo sapiens
cttcaatcacctctg

SEQ ID NO: 813959 - DNA, 15 bp, Homo sapiens
ttcaatcacctctgt

SEQ ID NO: 813960 - DNA, 15 bp, Homo sapiens
tcaatcacctctgtg

SEQ ID NO: 813961 - DNA, 15 bp, Homo sapiens
caatcacctctgtgt

SEQ ID NO: 813962 - DNA, 15 bp, Homo sapiens
aatcacctctgtgta

SEQ ID NO: 813963 - DNA, 15 bp, Homo sapiens
atcacctctgtgtat

SEQ ID NO: 813964 - DNA, 15 bp, Homo sapiens
tcacctctgtgtatt

SEQ ID NO: 813965 - DNA, 15 bp, Homo sapiens
cacctctgtgtatta

SEQ ID NO: 813966 - DNA, 15 bp, Homo sapiens
acctctgtgtattat

SEQ ID NO: 813967 - DNA, 15 bp, Homo sapiens
cctctgtgtattatt

SEQ ID NO: 813968 - DNA, 15 bp, Homo sapiens
ctctgtgtattattt

SEQ ID NO: 813969 - DNA, 15 bp, Homo sapiens
tctgtgtattatttc

SEQ ID NO: 813970 - DNA, 15 bp, Homo sapiens
ctgtgtattatttct

SEQ ID NO: 813971 - DNA, 15 bp, Homo sapiens
tgtgtattatttctg

SEQ ID NO: 813972 - DNA, 15 bp, Homo sapiens
gtgtattatttctga

SEQ ID NO: 813973 - DNA, 15 bp, Homo sapiens
tgtattatttctgat

SEQ ID NO: 813974 - DNA, 15 bp, Homo sapiens
gtattatttctgata

SEQ ID NO: 813975 - DNA, 15 bp, Homo sapiens
tattatttctgatat

SEQ ID NO: 813976 - DNA, 15 bp, Homo sapiens
attatttctgatata

SEQ ID NO: 813977 - DNA, 15 bp, Homo sapiens
ttatttctgatatag

SEQ ID NO: 813978 - DNA, 15 bp, Homo sapiens
tatttctgatataga

SEQ ID NO: 813979 - DNA, 15 bp, Homo sapiens
atttctgatatagaa

SEQ ID NO: 813980 - DNA, 15 bp, Homo sapiens
tttctgatatagaac

SEQ ID NO: 813981 - DNA, 15 bp, Homo sapiens
ttctgatatagaacc

SEQ ID NO: 813982 - DNA, 15 bp, Homo sapiens
tctgatatagaacca

SEQ ID NO: 813983 - DNA, 15 bp, Homo sapiens
ctgatatagaaccaa

SEQ ID NO: 813984 - DNA, 15 bp, Homo sapiens
tgatatagaaccaat

SEQ ID NO: 813985 - DNA, 15 bp, Homo sapiens
gatatagaaccaata

SEQ ID NO: 813986 - DNA, 15 bp, Homo sapiens
atatagaaccaataa

SEQ ID NO: 813987 - DNA, 15 bp, Homo sapiens
tatagaaccaataag

SEQ ID NO: 813988 - DNA, 15 bp, Homo sapiens
atagaaccaataagt

SEQ ID NO: 813989 - DNA, 15 bp, Homo sapiens
tagaaccaataagtt

SEQ ID NO: 813990 - DNA, 15 bp, Homo sapiens
agaaccaataagttt

SEQ ID NO: 813991 - DNA, 15 bp, Homo sapiens
gaaccaataagtttg

SEQ ID NO: 813992 - DNA, 15 bp, Homo sapiens
aaccaataagtttgt

SEQ ID NO: 813993 - DNA, 15 bp, Homo sapiens
accaataagtttgtg

SEQ ID NO: 813994 - DNA, 15 bp, Homo sapiens
ccaataagtttgtgt

SEQ ID NO: 813995 - DNA, 15 bp, Homo sapiens
caataagtttgtgtg

SEQ ID NO: 813996 - DNA, 15 bp, Homo sapiens
aataagtttgtgtgc

SEQ ID NO: 813997 - DNA, 15 bp, Homo sapiens
ataagtttgtgtgcc

SEQ ID NO: 813998 - DNA, 15 bp, Homo sapiens
taagtttgtgtgccc

SEQ ID NO: 813999 - DNA, 15 bp, Homo sapiens
aagtttgtgtgccca

SEQ ID NO: 814000 - DNA, 15 bp, Homo sapiens
agtttgtgtgcccac

SEQ ID NO: 814001 - DNA, 15 bp, Homo sapiens
gtttgtgtgcccact

SEQ ID NO: 814002 - DNA, 15 bp, Homo sapiens
tttgtgtgcccactg

SEQ ID NO: 814003 - DNA, 15 bp, Homo sapiens
ttgtgtgcccactgc

SEQ ID NO: 814004 - DNA, 15 bp, Homo sapiens
tgtgtgcccactgca

SEQ ID NO: 814005 - DNA, 15 bp, Homo sapiens
gtgtgcccactgcat

SEQ ID NO: 814006 - DNA, 15 bp, Homo sapiens
tgtgcccactgcata

SEQ ID NO: 814007 - DNA, 15 bp, Homo sapiens
gtgcccactgcatag

SEQ ID NO: 814008 - DNA, 15 bp, Homo sapiens
tgcccactgcatagt

SEQ ID NO: 814009 - DNA, 15 bp, Homo sapiens
gcccactgcatagta

SEQ ID NO: 814010 - DNA, 15 bp, Homo sapiens
cccactgcatagtaa

SEQ ID NO: 814011 - DNA, 15 bp, Homo sapiens
ccactgcatagtaac

SEQ ID NO: 814012 - DNA, 15 bp, Homo sapiens
cactgcatagtaaca

SEQ ID NO: 814013 - DNA, 15 bp, Homo sapiens
actgcatagtaacag

SEQ ID NO: 814014 - DNA, 15 bp, Homo sapiens
ctgcatagtaacaga

SEQ ID NO: 814015 - DNA, 15 bp, Homo sapiens
tgcatagtaacagac

SEQ ID NO: 814016 - DNA, 15 bp, Homo sapiens
gcatagtaacagacc

SEQ ID NO: 814017 - DNA, 15 bp, Homo sapiens
catagtaacagaccc

SEQ ID NO: 814018 - DNA, 15 bp, Homo sapiens
atagtaacagaccca

SEQ ID NO: 814019 - DNA, 15 bp, Homo sapiens
tagtaacagacccat

SEQ ID NO: 814020 - DNA, 15 bp, Homo sapiens
agtaacagacccatt

SEQ ID NO: 814021 - DNA, 15 bp, Homo sapiens
gtaacagacccatta

SEQ ID NO: 814022 - DNA, 15 bp, Homo sapiens
taacagacccattac

SEQ ID NO: 814023 - DNA, 15 bp, Homo sapiens
aacagacccattacc

SEQ ID NO: 814024 - DNA, 15 bp, Homo sapiens
acagacccattaccc

SEQ ID NO: 814025 - DNA, 15 bp, Homo sapiens
cagacccattaccct

SEQ ID NO: 814026 - DNA, 15 bp, Homo sapiens
agacccattaccctg

SEQ ID NO: 814027 - DNA, 15 bp, Homo sapiens
gacccattaccctga

SEQ ID NO: 814028 - DNA, 15 bp, Homo sapiens
acccattaccctgag

SEQ ID NO: 814029 - DNA, 15 bp, Homo sapiens
cccattaccctgaga

SEQ ID NO: 814030 - DNA, 15 bp, Homo sapiens
ccattaccctgagac

SEQ ID NO: 814031 - DNA, 15 bp, Homo sapiens
cattaccctgagaca

SEQ ID NO: 814032 - DNA, 15 bp, Homo sapiens
attaccctgagacag

SEQ ID NO: 814033 - DNA, 15 bp, Homo sapiens
ttaccctgagacagc

SEQ ID NO: 814034 - DNA, 15 bp, Homo sapiens
taccctgagacagca

SEQ ID NO: 814035 - DNA, 15 bp, Homo sapiens
accctgagacagcag

SEQ ID NO: 814036 - DNA, 15 bp, Homo sapiens
ccctgagacagcagg

SEQ ID NO: 814037 - DNA, 15 bp, Homo sapiens
cctgagacagcaggt

SEQ ID NO: 814038 - DNA, 15 bp, Homo sapiens
ctgagacagcaggtt

SEQ ID NO: 814039 - DNA, 15 bp, Homo sapiens
tgagacagcaggttt

SEQ ID NO: 814040 - DNA, 15 bp, Homo sapiens
gagacagcaggtttg

SEQ ID NO: 814041 - DNA, 15 bp, Homo sapiens
agacagcaggtttgc

SEQ ID NO: 814042 - DNA, 15 bp, Homo sapiens
gacagcaggtttgca

SEQ ID NO: 814043 - DNA, 15 bp, Homo sapiens
acagcaggtttgcag

SEQ ID NO: 814044 - DNA, 15 bp, Homo sapiens
cagcaggtttgcagc

SEQ ID NO: 814045 - DNA, 15 bp, Homo sapiens
agcaggtttgcagca

SEQ ID NO: 814046 - DNA, 15 bp, Homo sapiens
gcaggtttgcagcag

SEQ ID NO: 814047 - DNA, 15 bp, Homo sapiens
caggtttgcagcaga

SEQ ID NO: 814048 - DNA, 15 bp, Homo sapiens
aggtttgcagcagag

SEQ ID NO: 814049 - DNA, 15 bp, Homo sapiens
ggtttgcagcagaga

SEQ ID NO: 814050 - DNA, 15 bp, Homo sapiens
gtttgcagcagagaa

SEQ ID NO: 814051 - DNA, 15 bp, Homo sapiens
tttgcagcagagaag

SEQ ID NO: 814052 - DNA, 15 bp, Homo sapiens
ttgcagcagagaagg

SEQ ID NO: 814053 - DNA, 15 bp, Homo sapiens
tgcagcagagaaggg

SEQ ID NO: 814054 - DNA, 15 bp, Homo sapiens
gcagcagagaagggt

SEQ ID NO: 814055 - DNA, 15 bp, Homo sapiens
cagcagagaagggtt

SEQ ID NO: 814056 - DNA, 15 bp, Homo sapiens
agcagagaagggttt

SEQ ID NO: 814057 - DNA, 15 bp, Homo sapiens
gcagagaagggttta

SEQ ID NO: 814058 - DNA, 15 bp, Homo sapiens
cagagaagggtttaa

SEQ ID NO: 814059 - DNA, 15 bp, Homo sapiens
agagaagggtttaac

SEQ ID NO: 814060 - DNA, 15 bp, Homo sapiens
gagaagggtttaact

SEQ ID NO: 814061 - DNA, 15 bp, Homo sapiens
agaagggtttaacta

SEQ ID NO: 814062 - DNA, 15 bp, Homo sapiens
gaagggtttaactat

SEQ ID NO: 814063 - DNA, 15 bp, Homo sapiens
aagggtttaactatc

SEQ ID NO: 814064 - DNA, 15 bp, Homo sapiens
agggtttaactatct

SEQ ID NO: 814065 - DNA, 15 bp, Homo sapiens
gggtttaactatctc

SEQ ID NO: 814066 - DNA, 15 bp, Homo sapiens
ggtttaactatctca

SEQ ID NO: 814067 - DNA, 15 bp, Homo sapiens
gtttaactatctcag

SEQ ID NO: 814068 - DNA, 15 bp, Homo sapiens
tttaactatctcagg

SEQ ID NO: 814069 - DNA, 15 bp, Homo sapiens
ttaactatctcaggg

SEQ ID NO: 814070 - DNA, 15 bp, Homo sapiens
taactatctcagggc

SEQ ID NO: 814071 - DNA, 15 bp, Homo sapiens
aactatctcagggca

SEQ ID NO: 814072 - DNA, 15 bp, Homo sapiens
actatctcagggcac

SEQ ID NO: 814073 - DNA, 15 bp, Homo sapiens
ctatctcagggcacc

SEQ ID NO: 814074 - DNA, 15 bp, Homo sapiens
tatctcagggcacca

SEQ ID NO: 814075 - DNA, 15 bp, Homo sapiens
atctcagggcaccaa

SEQ ID NO: 814076 - DNA, 15 bp, Homo sapiens
tctcagggcaccaag

SEQ ID NO: 814077 - DNA, 15 bp, Homo sapiens
ctcagggcaccaagg

SEQ ID NO: 814078 - DNA, 15 bp, Homo sapiens
tcagggcaccaaggg

SEQ ID NO: 814079 - DNA, 15 bp, Homo sapiens
cagggcaccaaggga

SEQ ID NO: 814080 - DNA, 15 bp, Homo sapiens
agggcaccaagggag

SEQ ID NO: 814081 - DNA, 15 bp, Homo sapiens
gggcaccaagggagg

SEQ ID NO: 814082 - DNA, 15 bp, Homo sapiens
ggcaccaagggagga

SEQ ID NO: 814083 - DNA, 15 bp, Homo sapiens
gcaccaagggaggag

SEQ ID NO: 814084 - DNA, 15 bp, Homo sapiens
caccaagggaggaga

SEQ ID NO: 814085 - DNA, 15 bp, Homo sapiens
accaagggaggagat

SEQ ID NO: 814086 - DNA, 15 bp, Homo sapiens
ccaagggaggagatg

SEQ ID NO: 814087 - DNA, 15 bp, Homo sapiens
caagggaggagatgg

SEQ ID NO: 814088 - DNA, 15 bp, Homo sapiens
aagggaggagatggg

SEQ ID NO: 814089 - DNA, 15 bp, Homo sapiens
agggaggagatggga

SEQ ID NO: 814090 - DNA, 15 bp, Homo sapiens
gggaggagatgggag

SEQ ID NO: 814091 - DNA, 15 bp, Homo sapiens
ggaggagatgggagg

SEQ ID NO: 814092 - DNA, 15 bp, Homo sapiens
gaggagatgggagga

SEQ ID NO: 814093 - DNA, 15 bp, Homo sapiens
aggagatgggaggag

SEQ ID NO: 814094 - DNA, 15 bp, Homo sapiens
ggagatgggaggaga

SEQ ID NO: 814095 - DNA, 15 bp, Homo sapiens
gagatgggaggagag

SEQ ID NO: 814096 - DNA, 15 bp, Homo sapiens
agatgggaggagagc

SEQ ID NO: 814097 - DNA, 15 bp, Homo sapiens
gatgggaggagagcc

SEQ ID NO: 814098 - DNA, 15 bp, Homo sapiens
atgggaggagagcct

SEQ ID NO: 814099 - DNA, 15 bp, Homo sapiens
tgggaggagagcctc

SEQ ID NO: 814100 - DNA, 15 bp, Homo sapiens
gggaggagagcctca

SEQ ID NO: 814101 - DNA, 15 bp, Homo sapiens
ggaggagagcctcaa

SEQ ID NO: 814102 - DNA, 15 bp, Homo sapiens
gaggagagcctcaaa

SEQ ID NO: 814103 - DNA, 15 bp, Homo sapiens
aggagagcctcaaat

SEQ ID NO: 814104 - DNA, 15 bp, Homo sapiens
ggagagcctcaaatt

SEQ ID NO: 814105 - DNA, 15 bp, Homo sapiens
gagagcctcaaattc

SEQ ID NO: 814106 - DNA, 15 bp, Homo sapiens
agagcctcaaattca

SEQ ID NO: 814107 - DNA, 15 bp, Homo sapiens
gagcctcaaattcat

SEQ ID NO: 814108 - DNA, 15 bp, Homo sapiens
agcctcaaattcatc

SEQ ID NO: 814109 - DNA, 15 bp, Homo sapiens
gcctcaaattcatct

SEQ ID NO: 814110 - DNA, 15 bp, Homo sapiens
cctcaaattcatctt

SEQ ID NO: 814111 - DNA, 15 bp, Homo sapiens
ctcaaattcatcttt

SEQ ID NO: 814112 - DNA, 15 bp, Homo sapiens
tcaaattcatctttc

SEQ ID NO: 814113 - DNA, 15 bp, Homo sapiens
caaattcatctttct

SEQ ID NO: 814114 - DNA, 15 bp, Homo sapiens
aaattcatctttctg

SEQ ID NO: 814115 - DNA, 15 bp, Homo sapiens
aattcatctttctga

SEQ ID NO: 814116 - DNA, 15 bp, Homo sapiens
attcatctttctgag

SEQ ID NO: 814117 - DNA, 15 bp, Homo sapiens
ttcatctttctgagg

SEQ ID NO: 814118 - DNA, 15 bp, Homo sapiens
tcatctttctgagga

SEQ ID NO: 814119 - DNA, 15 bp, Homo sapiens
catctttctgaggag

SEQ ID NO: 814120 - DNA, 15 bp, Homo sapiens
atctttctgaggagc

SEQ ID NO: 814121 - DNA, 15 bp, Homo sapiens
tctttctgaggagct

SEQ ID NO: 814122 - DNA, 15 bp, Homo sapiens
ctttctgaggagctc

SEQ ID NO: 814123 - DNA, 15 bp, Homo sapiens
tttctgaggagctct

SEQ ID NO: 814124 - DNA, 15 bp, Homo sapiens
ttctgaggagctctg

SEQ ID NO: 814125 - DNA, 15 bp, Homo sapiens
tctgaggagctctgg

SEQ ID NO: 814126 - DNA, 15 bp, Homo sapiens
ctgaggagctctggg

SEQ ID NO: 814127 - DNA, 15 bp, Homo sapiens
tgaggagctctgggc

SEQ ID NO: 814128 - DNA, 15 bp, Homo sapiens
gaggagctctgggct

SEQ ID NO: 814129 - DNA, 15 bp, Homo sapiens
aggagctctgggctg

SEQ ID NO: 814130 - DNA, 15 bp, Homo sapiens
ggagctctgggctgt

SEQ ID NO: 814131 - DNA, 15 bp, Homo sapiens
gagctctgggctgtg

SEQ ID NO: 814132 - DNA, 15 bp, Homo sapiens
agctctgggctgtgg

SEQ ID NO: 814133 - DNA, 15 bp, Homo sapiens
gctctgggctgtggt

SEQ ID NO: 814134 - DNA, 15 bp, Homo sapiens
ctctgggctgtggtt

SEQ ID NO: 814135 - DNA, 15 bp, Homo sapiens
tctgggctgtggttt

SEQ ID NO: 814136 - DNA, 15 bp, Homo sapiens
ctgggctgtggtttt

SEQ ID NO: 814137 - DNA, 15 bp, Homo sapiens
tgggctgtggttttt

SEQ ID NO: 814138 - DNA, 15 bp, Homo sapiens
gggctgtggttttta

SEQ ID NO: 814139 - DNA, 15 bp, Homo sapiens
ggctgtggtttttaa

SEQ ID NO: 814140 - DNA, 15 bp, Homo sapiens
gctgtggtttttaag

SEQ ID NO: 814141 - DNA, 15 bp, Homo sapiens
ctgtggtttttaaga

SEQ ID NO: 814142 - DNA, 15 bp, Homo sapiens
tgtggtttttaagaa

SEQ ID NO: 814143 - DNA, 15 bp, Homo sapiens
gtggtttttaagaac

SEQ ID NO: 814144 - DNA, 15 bp, Homo sapiens
tggtttttaagaaca

SEQ ID NO: 814145 - DNA, 15 bp, Homo sapiens
ggtttttaagaacat

SEQ ID NO: 814146 - DNA, 15 bp, Homo sapiens
gtttttaagaacatc

SEQ ID NO: 814147 - DNA, 15 bp, Homo sapiens
tttttaagaacatca

SEQ ID NO: 814148 - DNA, 15 bp, Homo sapiens
ttttaagaacatcat

SEQ ID NO: 814149 - DNA, 15 bp, Homo sapiens
tttaagaacatcatg

SEQ ID NO: 814150 - DNA, 15 bp, Homo sapiens
ttaagaacatcatgg

SEQ ID NO: 814151 - DNA, 15 bp, Homo sapiens
taagaacatcatgga

SEQ ID NO: 814152 - DNA, 15 bp, Homo sapiens
aagaacatcatggag

SEQ ID NO: 814153 - DNA, 15 bp, Homo sapiens
agaacatcatggagc

SEQ ID NO: 814154 - DNA, 15 bp, Homo sapiens
gaacatcatggagcg

SEQ ID NO: 814155 - DNA, 15 bp, Homo sapiens
aacatcatggagcgt

SEQ ID NO: 814156 - DNA, 15 bp, Homo sapiens
acatcatggagcgtg

SEQ ID NO: 814157 - DNA, 15 bp, Homo sapiens
catcatggagcgtga

SEQ ID NO: 814158 - DNA, 15 bp, Homo sapiens
atcatggagcgtgat

SEQ ID NO: 814159 - DNA, 15 bp, Homo sapiens
tcatggagcgtgatg

SEQ ID NO: 814160 - DNA, 15 bp, Homo sapiens
catggagcgtgatgg

SEQ ID NO: 814161 - DNA, 15 bp, Homo sapiens
atggagcgtgatggg

SEQ ID NO: 814162 - DNA, 15 bp, Homo sapiens
tggagcgtgatgggc

SEQ ID NO: 814163 - DNA, 15 bp, Homo sapiens
ggagcgtgatgggct

SEQ ID NO: 814164 - DNA, 15 bp, Homo sapiens
gagcgtgatgggctg

SEQ ID NO: 814165 - DNA, 15 bp, Homo sapiens
agcgtgatgggctgg

SEQ ID NO: 814166 - DNA, 15 bp, Homo sapiens
gcgtgatgggctgga

SEQ ID NO: 814167 - DNA, 15 bp, Homo sapiens
cgtgatgggctggaa

SEQ ID NO: 814168 - DNA, 15 bp, Homo sapiens
gtgatgggctggaaa

SEQ ID NO: 814169 - DNA, 15 bp, Homo sapiens
tgatgggctggaaaa

SEQ ID NO: 814170 - DNA, 15 bp, Homo sapiens
gatgggctggaaaat

SEQ ID NO: 814171 - DNA, 15 bp, Homo sapiens
atgggctggaaaatt

SEQ ID NO: 814172 - DNA, 15 bp, Homo sapiens
tgggctggaaaattg

SEQ ID NO: 814173 - DNA, 15 bp, Homo sapiens
gggctggaaaattgg

SEQ ID NO: 814174 - DNA, 15 bp, Homo sapiens
ggctggaaaattggg

SEQ ID NO: 814175 - DNA, 15 bp, Homo sapiens
gctggaaaattgggg

SEQ ID NO: 814176 - DNA, 15 bp, Homo sapiens
ctggaaaattggggt

SEQ ID NO: 814177 - DNA, 15 bp, Homo sapiens
tggaaaattggggtt

SEQ ID NO: 814178 - DNA, 15 bp, Homo sapiens
ggaaaattggggttg

SEQ ID NO: 814179 - DNA, 15 bp, Homo sapiens
gaaaattggggttgt

SEQ ID NO: 814180 - DNA, 15 bp, Homo sapiens
aaaattggggttgtt

SEQ ID NO: 814181 - DNA, 15 bp, Homo sapiens
aaattggggttgttg

SEQ ID NO: 814182 - DNA, 15 bp, Homo sapiens
aattggggttgttga

SEQ ID NO: 814183 - DNA, 15 bp, Homo sapiens
attggggttgttgac

SEQ ID NO: 814184 - DNA, 15 bp, Homo sapiens
ttggggttgttgact

SEQ ID NO: 814185 - DNA, 15 bp, Homo sapiens
tggggttgttgactg

SEQ ID NO: 814186 - DNA, 15 bp, Homo sapiens
ggggttgttgactga

SEQ ID NO: 814187 - DNA, 15 bp, Homo sapiens
gggttgttgactgat

SEQ ID NO: 814188 - DNA, 15 bp, Homo sapiens
ggttgttgactgatc

SEQ ID NO: 814189 - DNA, 15 bp, Homo sapiens
gttgttgactgatca

SEQ ID NO: 814190 - DNA, 15 bp, Homo sapiens
ttgttgactgatcag

SEQ ID NO: 814191 - DNA, 15 bp, Homo sapiens
tgttgactgatcagg

SEQ ID NO: 814192 - DNA, 15 bp, Homo sapiens
gttgactgatcaggg

SEQ ID NO: 814193 - DNA, 15 bp, Homo sapiens
ttgactgatcagggg

SEQ ID NO: 814194 - DNA, 15 bp, Homo sapiens
tgactgatcagggga

SEQ ID NO: 814195 - DNA, 15 bp, Homo sapiens
gactgatcaggggaa

SEQ ID NO: 814196 - DNA, 15 bp, Homo sapiens
actgatcaggggaag

SEQ ID NO: 814197 - DNA, 15 bp, Homo sapiens
ctgatcaggggaagg

SEQ ID NO: 814198 - DNA, 15 bp, Homo sapiens
tgatcaggggaaggg

SEQ ID NO: 814199 - DNA, 15 bp, Homo sapiens
gatcaggggaagggg

SEQ ID NO: 814200 - DNA, 15 bp, Homo sapiens
atcaggggaaggggg

SEQ ID NO: 814201 - DNA, 15 bp, Homo sapiens
tcaggggaaggggga

SEQ ID NO: 814202 - DNA, 15 bp, Homo sapiens
caggggaagggggat

SEQ ID NO: 814203 - DNA, 15 bp, Homo sapiens
aggggaagggggatt

SEQ ID NO: 814204 - DNA, 15 bp, Homo sapiens
ggggaagggggatta

SEQ ID NO: 814205 - DNA, 15 bp, Homo sapiens
gggaagggggattaa

SEQ ID NO: 814206 - DNA, 15 bp, Homo sapiens
ggaagggggattaaa

SEQ ID NO: 814207 - DNA, 15 bp, Homo sapiens
gaagggggattaaat

SEQ ID NO: 814208 - DNA, 15 bp, Homo sapiens
aagggggattaaatc

SEQ ID NO: 814209 - DNA, 15 bp, Homo sapiens
agggggattaaatca

SEQ ID NO: 814210 - DNA, 15 bp, Homo sapiens
gggggattaaatcat

SEQ ID NO: 814211 - DNA, 15 bp, Homo sapiens
ggggattaaatcatc

SEQ ID NO: 814212 - DNA, 15 bp, Homo sapiens
gggattaaatcatca

SEQ ID NO: 814213 - DNA, 15 bp, Homo sapiens
ggattaaatcatcag

SEQ ID NO: 814214 - DNA, 15 bp, Homo sapiens
gattaaatcatcaga

SEQ ID NO: 814215 - DNA, 15 bp, Homo sapiens
attaaatcatcagaa

SEQ ID NO: 814216 - DNA, 15 bp, Homo sapiens
ttaaatcatcagaat

SEQ ID NO: 814217 - DNA, 15 bp, Homo sapiens
taaatcatcagaatg

SEQ ID NO: 814218 - DNA, 15 bp, Homo sapiens
aaatcatcagaatgt

SEQ ID NO: 814219 - DNA, 15 bp, Homo sapiens
aatcatcagaatgtg

SEQ ID NO: 814220 - DNA, 15 bp, Homo sapiens
atcatcagaatgtgg

SEQ ID NO: 814221 - DNA, 15 bp, Homo sapiens
tcatcagaatgtgga

SEQ ID NO: 814222 - DNA, 15 bp, Homo sapiens
catcagaatgtggaa

SEQ ID NO: 814223 - DNA, 15 bp, Homo sapiens
atcagaatgtggaaa

SEQ ID NO: 814224 - DNA, 15 bp, Homo sapiens
tcagaatgtggaaat

SEQ ID NO: 814225 - DNA, 15 bp, Homo sapiens
cagaatgtggaaatt

SEQ ID NO: 814226 - DNA, 15 bp, Homo sapiens
agaatgtggaaattg

SEQ ID NO: 814227 - DNA, 15 bp, Homo sapiens
gaatgtggaaattgt

SEQ ID NO: 814228 - DNA, 15 bp, Homo sapiens
aatgtggaaattgtg

SEQ ID NO: 814229 - DNA, 15 bp, Homo sapiens
atgtggaaattgtgt

SEQ ID NO: 814230 - DNA, 15 bp, Homo sapiens
tgtggaaattgtgtt

SEQ ID NO: 814231 - DNA, 15 bp, Homo sapiens
gtggaaattgtgttc

SEQ ID NO: 814232 - DNA, 15 bp, Homo sapiens
tggaaattgtgttct

SEQ ID NO: 814233 - DNA, 15 bp, Homo sapiens
ggaaattgtgttctt

SEQ ID NO: 814234 - DNA, 15 bp, Homo sapiens
gaaattgtgttcttt

SEQ ID NO: 814235 - DNA, 15 bp, Homo sapiens
aaattgtgttctttg

SEQ ID NO: 814236 - DNA, 15 bp, Homo sapiens
aattgtgttctttgg

SEQ ID NO: 814237 - DNA, 15 bp, Homo sapiens
attgtgttctttggt

SEQ ID NO: 814238 - DNA, 15 bp, Homo sapiens
ttgtgttctttggtg

SEQ ID NO: 814239 - DNA, 15 bp, Homo sapiens
tgtgttctttggtga

SEQ ID NO: 814240 - DNA, 15 bp, Homo sapiens
gtgttctttggtgag

SEQ ID NO: 814241 - DNA, 15 bp, Homo sapiens
tgttctttggtgagt

SEQ ID NO: 814242 - DNA, 15 bp, Homo sapiens
gttctttggtgagtc

SEQ ID NO: 814243 - DNA, 15 bp, Homo sapiens
ttctttggtgagtca

SEQ ID NO: 814244 - DNA, 15 bp, Homo sapiens
tctttggtgagtcag

SEQ ID NO: 814245 - DNA, 15 bp, Homo sapiens
ctttggtgagtcagc

SEQ ID NO: 814246 - DNA, 15 bp, Homo sapiens
tttggtgagtcagct

SEQ ID NO: 814247 - DNA, 15 bp, Homo sapiens
ttggtgagtcagctt

SEQ ID NO: 814248 - DNA, 15 bp, Homo sapiens
tggtgagtcagcttc

SEQ ID NO: 814249 - DNA, 15 bp, Homo sapiens
ggtgagtcagcttct

SEQ ID NO: 814250 - DNA, 15 bp, Homo sapiens
gtgagtcagcttctt

SEQ ID NO: 814251 - DNA, 15 bp, Homo sapiens
tgagtcagcttcttg

SEQ ID NO: 814252 - DNA, 15 bp, Homo sapiens
gagtcagcttcttgt

SEQ ID NO: 814253 - DNA, 15 bp, Homo sapiens
agtcagcttcttgtg

SEQ ID NO: 814254 - DNA, 15 bp, Homo sapiens
gtcagcttcttgtgg

SEQ ID NO: 814255 - DNA, 15 bp, Homo sapiens
tcagcttcttgtggt

SEQ ID NO: 814256 - DNA, 15 bp, Homo sapiens
cagcttcttgtggtg

SEQ ID NO: 814257 - DNA, 15 bp, Homo sapiens
agcttcttgtggtgt

SEQ ID NO: 814258 - DNA, 15 bp, Homo sapiens
gcttcttgtggtgtt

SEQ ID NO: 814259 - DNA, 15 bp, Homo sapiens
cttcttgtggtgttc

SEQ ID NO: 814260 - DNA, 15 bp, Homo sapiens
ttcttgtggtgttcc

SEQ ID NO: 814261 - DNA, 15 bp, Homo sapiens
tcttgtggtgttcct

SEQ ID NO: 814262 - DNA, 15 bp, Homo sapiens
cttgtggtgttcctc

SEQ ID NO: 814263 - DNA, 15 bp, Homo sapiens
ttgtggtgttcctca

SEQ ID NO: 814264 - DNA, 15 bp, Homo sapiens
tgtggtgttcctcag

SEQ ID NO: 814265 - DNA, 15 bp, Homo sapiens
gtggtgttcctcaga

SEQ ID NO: 814266 - DNA, 15 bp, Homo sapiens
tggtgttcctcagac

SEQ ID NO: 814267 - DNA, 15 bp, Homo sapiens
ggtgttcctcagacc

SEQ ID NO: 814268 - DNA, 15 bp, Homo sapiens
gtgttcctcagacct

SEQ ID NO: 814269 - DNA, 15 bp, Homo sapiens
tgttcctcagacctt

SEQ ID NO: 814270 - DNA, 15 bp, Homo sapiens
gttcctcagaccttc

SEQ ID NO: 814271 - DNA, 15 bp, Homo sapiens
ttcctcagaccttcc

SEQ ID NO: 814272 - DNA, 15 bp, Homo sapiens
tcctcagaccttcct

SEQ ID NO: 814273 - DNA, 15 bp, Homo sapiens
cctcagaccttcctg

SEQ ID NO: 814274 - DNA, 15 bp, Homo sapiens
ctcagaccttcctgg

SEQ ID NO: 814275 - DNA, 15 bp, Homo sapiens
tcagaccttcctggg

SEQ ID NO: 814276 - DNA, 15 bp, Homo sapiens
cagaccttcctgggg

SEQ ID NO: 814277 - DNA, 15 bp, Homo sapiens
agaccttcctggggt

SEQ ID NO: 814278 - DNA, 15 bp, Homo sapiens
gaccttcctggggtc

SEQ ID NO: 814279 - DNA, 15 bp, Homo sapiens
accttcctggggtca

SEQ ID NO: 814280 - DNA, 15 bp, Homo sapiens
ccttcctggggtcac

SEQ ID NO: 814281 - DNA, 15 bp, Homo sapiens
cttcctggggtcacc

SEQ ID NO: 814282 - DNA, 15 bp, Homo sapiens
ttcctggggtcaccc

SEQ ID NO: 814283 - DNA, 15 bp, Homo sapiens
tcctggggtcacccg

SEQ ID NO: 814284 - DNA, 15 bp, Homo sapiens
cctggggtcacccgt

SEQ ID NO: 814285 - DNA, 15 bp, Homo sapiens
ctggggtcacccgtg

SEQ ID NO: 814286 - DNA, 15 bp, Homo sapiens
tggggtcacccgtgg

SEQ ID NO: 814287 - DNA, 15 bp, Homo sapiens
ggggtcacccgtggg

SEQ ID NO: 814288 - DNA, 15 bp, Homo sapiens
gggtcacccgtgggg

SEQ ID NO: 814289 - DNA, 15 bp, Homo sapiens
ggtcacccgtggggt

SEQ ID NO: 814290 - DNA, 15 bp, Homo sapiens
gtcacccgtggggtc

SEQ ID NO: 814291 - DNA, 15 bp, Homo sapiens
tcacccgtggggtct

SEQ ID NO: 814292 - DNA, 15 bp, Homo sapiens
cacccgtggggtctt

SEQ ID NO: 814293 - DNA, 15 bp, Homo sapiens
acccgtggggtcttt

SEQ ID NO: 814294 - DNA, 15 bp, Homo sapiens
cccgtggggtctttc

SEQ ID NO: 814295 - DNA, 15 bp, Homo sapiens
ccgtggggtctttca

SEQ ID NO: 814296 - DNA, 15 bp, Homo sapiens
cgtggggtctttcat

SEQ ID NO: 814297 - DNA, 15 bp, Homo sapiens
gtggggtctttcatt

SEQ ID NO: 814298 - DNA, 15 bp, Homo sapiens
tggggtctttcattc

SEQ ID NO: 814299 - DNA, 15 bp, Homo sapiens
ggggtctttcattca

SEQ ID NO: 814300 - DNA, 15 bp, Homo sapiens
gggtctttcattcag

SEQ ID NO: 814301 - DNA, 15 bp, Homo sapiens
ggtctttcattcaga

SEQ ID NO: 814302 - DNA, 15 bp, Homo sapiens
gtctttcattcagat

SEQ ID NO: 814303 - DNA, 15 bp, Homo sapiens
tctttcattcagatc

SEQ ID NO: 814304 - DNA, 15 bp, Homo sapiens
ctttcattcagatca

SEQ ID NO: 814305 - DNA, 15 bp, Homo sapiens
tttcattcagatcag

SEQ ID NO: 814306 - DNA, 15 bp, Homo sapiens
ttcattcagatcagc

SEQ ID NO: 814307 - DNA, 15 bp, Homo sapiens
tcattcagatcagct

SEQ ID NO: 814308 - DNA, 15 bp, Homo sapiens
cattcagatcagctg

SEQ ID NO: 814309 - DNA, 15 bp, Homo sapiens
attcagatcagctga

SEQ ID NO: 814310 - DNA, 15 bp, Homo sapiens
ttcagatcagctgat

SEQ ID NO: 814311 - DNA, 15 bp, Homo sapiens
tcagatcagctgatg

SEQ ID NO: 814312 - DNA, 15 bp, Homo sapiens
cagatcagctgatgt

SEQ ID NO: 814313 - DNA, 15 bp, Homo sapiens
agatcagctgatgta

SEQ ID NO: 814314 - DNA, 15 bp, Homo sapiens
gatcagctgatgtag

SEQ ID NO: 814315 - DNA, 15 bp, Homo sapiens
atcagctgatgtagt

SEQ ID NO: 814316 - DNA, 15 bp, Homo sapiens
tcagctgatgtagta

SEQ ID NO: 814317 - DNA, 15 bp, Homo sapiens
cagctgatgtagtag

SEQ ID NO: 814318 - DNA, 15 bp, Homo sapiens
agctgatgtagtagt

SEQ ID NO: 814319 - DNA, 15 bp, Homo sapiens
gctgatgtagtagtt

SEQ ID NO: 814320 - DNA, 15 bp, Homo sapiens
ctgatgtagtagttt

SEQ ID NO: 814321 - DNA, 15 bp, Homo sapiens
tgatgtagtagtttc

SEQ ID NO: 814322 - DNA, 15 bp, Homo sapiens
gatgtagtagtttca

SEQ ID NO: 814323 - DNA, 15 bp, Homo sapiens
atgtagtagtttcac

SEQ ID NO: 814324 - DNA, 15 bp, Homo sapiens
tgtagtagtttcact

SEQ ID NO: 814325 - DNA, 15 bp, Homo sapiens
gtagtagtttcactc

SEQ ID NO: 814326 - DNA, 15 bp, Homo sapiens
tagtagtttcactcg

SEQ ID NO: 814327 - DNA, 15 bp, Homo sapiens
agtagtttcactcgt

SEQ ID NO: 814328 - DNA, 15 bp, Homo sapiens
gtagtttcactcgta

SEQ ID NO: 814329 - DNA, 15 bp, Homo sapiens
tagtttcactcgtat

SEQ ID NO: 814330 - DNA, 15 bp, Homo sapiens
agtttcactcgtatg

SEQ ID NO: 814331 - DNA, 15 bp, Homo sapiens
gtttcactcgtatgc

SEQ ID NO: 814332 - DNA, 15 bp, Homo sapiens
tttcactcgtatgca

SEQ ID NO: 814333 - DNA, 15 bp, Homo sapiens
ttcactcgtatgcag

SEQ ID NO: 814334 - DNA, 15 bp, Homo sapiens
tcactcgtatgcagg

SEQ ID NO: 814335 - DNA, 15 bp, Homo sapiens
cactcgtatgcagga

SEQ ID NO: 814336 - DNA, 15 bp, Homo sapiens
actcgtatgcaggac

SEQ ID NO: 814337 - DNA, 15 bp, Homo sapiens
ctcgtatgcaggacc

SEQ ID NO: 814338 - DNA, 15 bp, Homo sapiens
tcgtatgcaggacct

SEQ ID NO: 814339 - DNA, 15 bp, Homo sapiens
cgtatgcaggacctg

SEQ ID NO: 814340 - DNA, 15 bp, Homo sapiens
gtatgcaggacctga

SEQ ID NO: 814341 - DNA, 15 bp, Homo sapiens
tatgcaggacctgaa

SEQ ID NO: 814342 - DNA, 15 bp, Homo sapiens
atgcaggacctgaaa

SEQ ID NO: 814343 - DNA, 15 bp, Homo sapiens
tgcaggacctgaaag

SEQ ID NO: 814344 - DNA, 15 bp, Homo sapiens
gcaggacctgaaaga

SEQ ID NO: 814345 - DNA, 15 bp, Homo sapiens
caggacctgaaagac

SEQ ID NO: 814346 - DNA, 15 bp, Homo sapiens
aggacctgaaagact

SEQ ID NO: 814347 - DNA, 15 bp, Homo sapiens
ggacctgaaagacta

SEQ ID NO: 814348 - DNA, 15 bp, Homo sapiens
gacctgaaagactac

SEQ ID NO: 814349 - DNA, 15 bp, Homo sapiens
acctgaaagactacc

SEQ ID NO: 814350 - DNA, 15 bp, Homo sapiens
cctgaaagactacct

SEQ ID NO: 814351 - DNA, 15 bp, Homo sapiens
ctgaaagactacctc

SEQ ID NO: 814352 - DNA, 15 bp, Homo sapiens
tgaaagactacctca

SEQ ID NO: 814353 - DNA, 15 bp, Homo sapiens
gaaagactacctcac

SEQ ID NO: 814354 - DNA, 15 bp, Homo sapiens
aaagactacctcacg

SEQ ID NO: 814355 - DNA, 15 bp, Homo sapiens
aagactacctcacgg

SEQ ID NO: 814356 - DNA, 15 bp, Homo sapiens
agactacctcacggg

SEQ ID NO: 814357 - DNA, 15 bp, Homo sapiens
gactacctcacgggg

SEQ ID NO: 814358 - DNA, 15 bp, Homo sapiens
actacctcacgggga

SEQ ID NO: 814359 - DNA, 15 bp, Homo sapiens
ctacctcacggggaa

SEQ ID NO: 814360 - DNA, 15 bp, Homo sapiens
tacctcacggggaaa

SEQ ID NO: 814361 - DNA, 15 bp, Homo sapiens
acctcacggggaaag

SEQ ID NO: 814362 - DNA, 15 bp, Homo sapiens
cctcacggggaaagc

SEQ ID NO: 814363 - DNA, 15 bp, Homo sapiens
ctcacggggaaagct

SEQ ID NO: 814364 - DNA, 15 bp, Homo sapiens
tcacggggaaagctt

SEQ ID NO: 814365 - DNA, 15 bp, Homo sapiens
cacggggaaagctta

SEQ ID NO: 814366 - DNA, 15 bp, Homo sapiens
acggggaaagcttaa

SEQ ID NO: 814367 - DNA, 15 bp, Homo sapiens
cggggaaagcttaac

SEQ ID NO: 814368 - DNA, 15 bp, Homo sapiens
ggggaaagcttaaca

SEQ ID NO: 814369 - DNA, 15 bp, Homo sapiens
gggaaagcttaacat

SEQ ID NO: 814370 - DNA, 15 bp, Homo sapiens
ggaaagcttaacatt

SEQ ID NO: 814371 - DNA, 15 bp, Homo sapiens
gaaagcttaacattt

SEQ ID NO: 814372 - DNA, 15 bp, Homo sapiens
aaagcttaacatttc

SEQ ID NO: 814373 - DNA, 15 bp, Homo sapiens
aagcttaacatttct

SEQ ID NO: 814374 - DNA, 15 bp, Homo sapiens
agcttaacatttctt

SEQ ID NO: 814375 - DNA, 15 bp, Homo sapiens
gcttaacatttctta

SEQ ID NO: 814376 - DNA, 15 bp, Homo sapiens
cttaacatttcttaa

SEQ ID NO: 814377 - DNA, 15 bp, Homo sapiens
ttaacatttcttaat

SEQ ID NO: 814378 - DNA, 15 bp, Homo sapiens
taacatttcttaatg

SEQ ID NO: 814379 - DNA, 15 bp, Homo sapiens
aacatttcttaatgt

SEQ ID NO: 814380 - DNA, 15 bp, Homo sapiens
acatttcttaatgtt

SEQ ID NO: 814381 - DNA, 15 bp, Homo sapiens
catttcttaatgttc

SEQ ID NO: 814382 - DNA, 15 bp, Homo sapiens
atttcttaatgttca

SEQ ID NO: 814383 - DNA, 15 bp, Homo sapiens
tttcttaatgttcaa

SEQ ID NO: 814384 - DNA, 15 bp, Homo sapiens
ttcttaatgttcaag

SEQ ID NO: 814385 - DNA, 15 bp, Homo sapiens
tcttaatgttcaagt

SEQ ID NO: 814386 - DNA, 15 bp, Homo sapiens
cttaatgttcaagtt

SEQ ID NO: 814387 - DNA, 15 bp, Homo sapiens
ttaatgttcaagttg

SEQ ID NO: 814388 - DNA, 15 bp, Homo sapiens
taatgttcaagttgt

SEQ ID NO: 814389 - DNA, 15 bp, Homo sapiens
aatgttcaagttgtt

SEQ ID NO: 814390 - DNA, 15 bp, Homo sapiens
atgttcaagttgtta

SEQ ID NO: 814391 - DNA, 15 bp, Homo sapiens
tgttcaagttgttat

SEQ ID NO: 814392 - DNA, 15 bp, Homo sapiens
gttcaagttgttatc

SEQ ID NO: 814393 - DNA, 15 bp, Homo sapiens
ttcaagttgttatct

SEQ ID NO: 814394 - DNA, 15 bp, Homo sapiens
tcaagttgttatcta

SEQ ID NO: 814395 - DNA, 15 bp, Homo sapiens
caagttgttatctat

SEQ ID NO: 814396 - DNA, 15 bp, Homo sapiens
aagttgttatctata

SEQ ID NO: 814397 - DNA, 15 bp, Homo sapiens
agttgttatctatag

SEQ ID NO: 814398 - DNA, 15 bp, Homo sapiens
gttgttatctataga

SEQ ID NO: 814399 - DNA, 15 bp, Homo sapiens
ttgttatctatagag

SEQ ID NO: 814400 - DNA, 15 bp, Homo sapiens
tgttatctatagagc

SEQ ID NO: 814401 - DNA, 15 bp, Homo sapiens
gttatctatagagca

SEQ ID NO: 814402 - DNA, 15 bp, Homo sapiens
ttatctatagagcac

SEQ ID NO: 814403 - DNA, 15 bp, Homo sapiens
tatctatagagcact

SEQ ID NO: 814404 - DNA, 15 bp, Homo sapiens
atctatagagcactt

SEQ ID NO: 814405 - DNA, 15 bp, Homo sapiens
tctatagagcactta

SEQ ID NO: 814406 - DNA, 15 bp, Homo sapiens
ctatagagcacttaa

SEQ ID NO: 814407 - DNA, 15 bp, Homo sapiens
tatagagcacttaag

SEQ ID NO: 814408 - DNA, 15 bp, Homo sapiens
atagagcacttaagg

SEQ ID NO: 814409 - DNA, 15 bp, Homo sapiens
tagagcacttaaggg

SEQ ID NO: 814410 - DNA, 15 bp, Homo sapiens
agagcacttaagggg

SEQ ID NO: 814411 - DNA, 15 bp, Homo sapiens
gagcacttaagggga

SEQ ID NO: 814412 - DNA, 15 bp, Homo sapiens
agcacttaaggggaa

SEQ ID NO: 814413 - DNA, 15 bp, Homo sapiens
gcacttaaggggaac

SEQ ID NO: 814414 - DNA, 15 bp, Homo sapiens
cacttaaggggaact

SEQ ID NO: 814415 - DNA, 15 bp, Homo sapiens
acttaaggggaacta

SEQ ID NO: 814416 - DNA, 15 bp, Homo sapiens
cttaaggggaactat

SEQ ID NO: 814417 - DNA, 15 bp, Homo sapiens
ttaaggggaactatc

SEQ ID NO: 814418 - DNA, 15 bp, Homo sapiens
taaggggaactatca

SEQ ID NO: 814419 - DNA, 15 bp, Homo sapiens
aaggggaactatcat

SEQ ID NO: 814420 - DNA, 15 bp, Homo sapiens
aggggaactatcatc

SEQ ID NO: 814421 - DNA, 15 bp, Homo sapiens
ggggaactatcatct

SEQ ID NO: 814422 - DNA, 15 bp, Homo sapiens
gggaactatcatctt

SEQ ID NO: 814423 - DNA, 15 bp, Homo sapiens
ggaactatcatctta

SEQ ID NO: 814424 - DNA, 15 bp, Homo sapiens
gaactatcatcttat

SEQ ID NO: 814425 - DNA, 15 bp, Homo sapiens
aactatcatcttatc

SEQ ID NO: 814426 - DNA, 15 bp, Homo sapiens
actatcatcttatca

SEQ ID NO: 814427 - DNA, 15 bp, Homo sapiens
ctatcatcttatcac

SEQ ID NO: 814428 - DNA, 15 bp, Homo sapiens
tatcatcttatcaca

SEQ ID NO: 814429 - DNA, 15 bp, Homo sapiens
atcatcttatcacag

SEQ ID NO: 814430 - DNA, 15 bp, Homo sapiens
tcatcttatcacaga

SEQ ID NO: 814431 - DNA, 15 bp, Homo sapiens
catcttatcacagag

SEQ ID NO: 814432 - DNA, 15 bp, Homo sapiens
atcttatcacagagt

SEQ ID NO: 814433 - DNA, 15 bp, Homo sapiens
tcttatcacagagtc

SEQ ID NO: 814434 - DNA, 15 bp, Homo sapiens
cttatcacagagtct

SEQ ID NO: 814435 - DNA, 15 bp, Homo sapiens
ttatcacagagtcta

SEQ ID NO: 814436 - DNA, 15 bp, Homo sapiens
tatcacagagtctac

SEQ ID NO: 814437 - DNA, 15 bp, Homo sapiens
atcacagagtctaca

SEQ ID NO: 814438 - DNA, 15 bp, Homo sapiens
tcacagagtctacat

SEQ ID NO: 814439 - DNA, 15 bp, Homo sapiens
cacagagtctacatg

SEQ ID NO: 814440 - DNA, 15 bp, Homo sapiens
acagagtctacatga

SEQ ID NO: 814441 - DNA, 15 bp, Homo sapiens
cagagtctacatgat

SEQ ID NO: 814442 - DNA, 15 bp, Homo sapiens
agagtctacatgatt

SEQ ID NO: 814443 - DNA, 15 bp, Homo sapiens
gagtctacatgattc

SEQ ID NO: 814444 - DNA, 15 bp, Homo sapiens
agtctacatgattct

SEQ ID NO: 814445 - DNA, 15 bp, Homo sapiens
gtctacatgattcta

SEQ ID NO: 814446 - DNA, 15 bp, Homo sapiens
tctacatgattctag

SEQ ID NO: 814447 - DNA, 15 bp, Homo sapiens
ctacatgattctagg

SEQ ID NO: 814448 - DNA, 15 bp, Homo sapiens
tacatgattctagga

SEQ ID NO: 814449 - DNA, 15 bp, Homo sapiens
acatgattctaggac

SEQ ID NO: 814450 - DNA, 15 bp, Homo sapiens
catgattctaggaca

SEQ ID NO: 814451 - DNA, 15 bp, Homo sapiens
atgattctaggacaa

SEQ ID NO: 814452 - DNA, 15 bp, Homo sapiens
tgattctaggacaat

SEQ ID NO: 814453 - DNA, 15 bp, Homo sapiens
gattctaggacaata

SEQ ID NO: 814454 - DNA, 15 bp, Homo sapiens
attctaggacaatag

SEQ ID NO: 814455 - DNA, 15 bp, Homo sapiens
ttctaggacaatagg

SEQ ID NO: 814456 - DNA, 15 bp, Homo sapiens
tctaggacaataggc

SEQ ID NO: 814457 - DNA, 15 bp, Homo sapiens
ctaggacaataggca

SEQ ID NO: 814458 - DNA, 15 bp, Homo sapiens
taggacaataggcac

SEQ ID NO: 814459 - DNA, 15 bp, Homo sapiens
aggacaataggcacc

SEQ ID NO: 814460 - DNA, 15 bp, Homo sapiens
ggacaataggcacca

SEQ ID NO: 814461 - DNA, 15 bp, Homo sapiens
gacaataggcaccaa

SEQ ID NO: 814462 - DNA, 15 bp, Homo sapiens
acaataggcaccaaa

SEQ ID NO: 814463 - DNA, 15 bp, Homo sapiens
caataggcaccaaac

SEQ ID NO: 814464 - DNA, 15 bp, Homo sapiens
aataggcaccaaacc

SEQ ID NO: 814465 - DNA, 15 bp, Homo sapiens
ataggcaccaaacca

SEQ ID NO: 814466 - DNA, 15 bp, Homo sapiens
taggcaccaaaccat

SEQ ID NO: 814467 - DNA, 15 bp, Homo sapiens
aggcaccaaaccatg

SEQ ID NO: 814468 - DNA, 15 bp, Homo sapiens
ggcaccaaaccatgt

SEQ ID NO: 814469 - DNA, 15 bp, Homo sapiens
gcaccaaaccatgtc

SEQ ID NO: 814470 - DNA, 15 bp, Homo sapiens
caccaaaccatgtcg

SEQ ID NO: 814471 - DNA, 15 bp, Homo sapiens
accaaaccatgtcga

SEQ ID NO: 814472 - DNA, 15 bp, Homo sapiens
ccaaaccatgtcgag

SEQ ID NO: 814473 - DNA, 15 bp, Homo sapiens
caaaccatgtcgagg

SEQ ID NO: 814474 - DNA, 15 bp, Homo sapiens
aaaccatgtcgagga

SEQ ID NO: 814475 - DNA, 15 bp, Homo sapiens
aaccatgtcgaggaa

SEQ ID NO: 814476 - DNA, 15 bp, Homo sapiens
accatgtcgaggaag

SEQ ID NO: 814477 - DNA, 15 bp, Homo sapiens
ccatgtcgaggaagc

SEQ ID NO: 814478 - DNA, 15 bp, Homo sapiens
catgtcgaggaagca

SEQ ID NO: 814479 - DNA, 15 bp, Homo sapiens
atgtcgaggaagcag

SEQ ID NO: 814480 - DNA, 15 bp, Homo sapiens
tgtcgaggaagcagg

SEQ ID NO: 814481 - DNA, 15 bp, Homo sapiens
gtcgaggaagcaggt

SEQ ID NO: 814482 - DNA, 15 bp, Homo sapiens
tcgaggaagcaggtc

SEQ ID NO: 814483 - DNA, 15 bp, Homo sapiens
cgaggaagcaggtca

SEQ ID NO: 814484 - DNA, 15 bp, Homo sapiens
gaggaagcaggtcag

SEQ ID NO: 814485 - DNA, 15 bp, Homo sapiens
aggaagcaggtcaga

SEQ ID NO: 814486 - DNA, 15 bp, Homo sapiens
ggaagcaggtcagag

SEQ ID NO: 814487 - DNA, 15 bp, Homo sapiens
gaagcaggtcagaga

SEQ ID NO: 814488 - DNA, 15 bp, Homo sapiens
aagcaggtcagagaa

SEQ ID NO: 814489 - DNA, 15 bp, Homo sapiens
agcaggtcagagaat

SEQ ID NO: 814490 - DNA, 15 bp, Homo sapiens
gcaggtcagagaatg

SEQ ID NO: 814491 - DNA, 15 bp, Homo sapiens
caggtcagagaatga

SEQ ID NO: 814492 - DNA, 15 bp, Homo sapiens
aggtcagagaatgag

SEQ ID NO: 814493 - DNA, 15 bp, Homo sapiens
ggtcagagaatgagt

SEQ ID NO: 814494 - DNA, 15 bp, Homo sapiens
gtcagagaatgagtt

SEQ ID NO: 814495 - DNA, 15 bp, Homo sapiens
tcagagaatgagttg

SEQ ID NO: 814496 - DNA, 15 bp, Homo sapiens
cagagaatgagttga

SEQ ID NO: 814497 - DNA, 15 bp, Homo sapiens
agagaatgagttgac

SEQ ID NO: 814498 - DNA, 15 bp, Homo sapiens
gagaatgagttgacc

SEQ ID NO: 814499 - DNA, 15 bp, Homo sapiens
agaatgagttgacct

SEQ ID NO: 814500 - DNA, 15 bp, Homo sapiens
gaatgagttgacctc

SEQ ID NO: 814501 - DNA, 15 bp, Homo sapiens
aatgagttgacctca

SEQ ID NO: 814502 - DNA, 15 bp, Homo sapiens
atgagttgacctcat

SEQ ID NO: 814503 - DNA, 15 bp, Homo sapiens
tgagttgacctcatg

SEQ ID NO: 814504 - DNA, 15 bp, Homo sapiens
gagttgacctcatgc

SEQ ID NO: 814505 - DNA, 15 bp, Homo sapiens
agttgacctcatgct

SEQ ID NO: 814506 - DNA, 15 bp, Homo sapiens
gttgacctcatgctt

SEQ ID NO: 814507 - DNA, 15 bp, Homo sapiens
ttgacctcatgctta

SEQ ID NO: 814508 - DNA, 15 bp, Homo sapiens
tgacctcatgcttaa

SEQ ID NO: 814509 - DNA, 15 bp, Homo sapiens
gacctcatgcttaat

SEQ ID NO: 814510 - DNA, 15 bp, Homo sapiens
acctcatgcttaatg

SEQ ID NO: 814511 - DNA, 15 bp, Homo sapiens
cctcatgcttaatgc

SEQ ID NO: 814512 - DNA, 15 bp, Homo sapiens
ctcatgcttaatgct

SEQ ID NO: 814513 - DNA, 15 bp, Homo sapiens
tcatgcttaatgctg

SEQ ID NO: 814514 - DNA, 15 bp, Homo sapiens
catgcttaatgctga

SEQ ID NO: 814515 - DNA, 15 bp, Homo sapiens
atgcttaatgctgaa

SEQ ID NO: 814516 - DNA, 15 bp, Homo sapiens
tgcttaatgctgaat

SEQ ID NO: 814517 - DNA, 15 bp, Homo sapiens
gcttaatgctgaatg

SEQ ID NO: 814518 - DNA, 15 bp, Homo sapiens
cttaatgctgaatgt

SEQ ID NO: 814519 - DNA, 15 bp, Homo sapiens
ttaatgctgaatgtg

SEQ ID NO: 814520 - DNA, 15 bp, Homo sapiens
taatgctgaatgtgc

SEQ ID NO: 814521 - DNA, 15 bp, Homo sapiens
aatgctgaatgtgct

SEQ ID NO: 814522 - DNA, 15 bp, Homo sapiens
atgctgaatgtgctt

SEQ ID NO: 814523 - DNA, 15 bp, Homo sapiens
tgctgaatgtgcttc

SEQ ID NO: 814524 - DNA, 15 bp, Homo sapiens
gctgaatgtgcttca

SEQ ID NO: 814525 - DNA, 15 bp, Homo sapiens
ctgaatgtgcttcaa

SEQ ID NO: 814526 - DNA, 15 bp, Homo sapiens
tgaatgtgcttcaag

SEQ ID NO: 814527 - DNA, 15 bp, Homo sapiens
gaatgtgcttcaagc

SEQ ID NO: 814528 - DNA, 15 bp, Homo sapiens
aatgtgcttcaagct

SEQ ID NO: 814529 - DNA, 15 bp, Homo sapiens
atgtgcttcaagctt

SEQ ID NO: 814530 - DNA, 15 bp, Homo sapiens
tgtgcttcaagcttg

SEQ ID NO: 814531 - DNA, 15 bp, Homo sapiens
gtgcttcaagcttgg

SEQ ID NO: 814532 - DNA, 15 bp, Homo sapiens
tgcttcaagcttggt

SEQ ID NO: 814533 - DNA, 15 bp, Homo sapiens
gcttcaagcttggtt

SEQ ID NO: 814534 - DNA, 15 bp, Homo sapiens
cttcaagcttggttt

SEQ ID NO: 814535 - DNA, 15 bp, Homo sapiens
ttcaagcttggttta

SEQ ID NO: 814536 - DNA, 15 bp, Homo sapiens
tcaagcttggtttat

SEQ ID NO: 814537 - DNA, 15 bp, Homo sapiens
caagcttggtttatt

SEQ ID NO: 814538 - DNA, 15 bp, Homo sapiens
aagcttggtttatta

SEQ ID NO: 814539 - DNA, 15 bp, Homo sapiens
agcttggtttattaa

SEQ ID NO: 814540 - DNA, 15 bp, Homo sapiens
gcttggtttattaat

SEQ ID NO: 814541 - DNA, 15 bp, Homo sapiens
cttggtttattaatt

SEQ ID NO: 814542 - DNA, 15 bp, Homo sapiens
ttggtttattaattt

SEQ ID NO: 814543 - DNA, 15 bp, Homo sapiens
tggtttattaattta

SEQ ID NO: 814544 - DNA, 15 bp, Homo sapiens
ggtttattaatttat

SEQ ID NO: 814545 - DNA, 15 bp, Homo sapiens
gtttattaatttatt

SEQ ID NO: 814546 - DNA, 15 bp, Homo sapiens
tttattaatttattt

SEQ ID NO: 814547 - DNA, 15 bp, Homo sapiens
ttattaatttatttt

SEQ ID NO: 814548 - DNA, 15 bp, Homo sapiens
tattaatttattttt

SEQ ID NO: 814549 - DNA, 15 bp, Homo sapiens
attaatttatttttt

SEQ ID NO: 814550 - DNA, 15 bp, Homo sapiens
ttaatttattttttc

SEQ ID NO: 814551 - DNA, 15 bp, Homo sapiens
taatttattttttcc

SEQ ID NO: 814552 - DNA, 15 bp, Homo sapiens
aatttattttttccc

SEQ ID NO: 814553 - DNA, 15 bp, Homo sapiens
atttattttttcccc

SEQ ID NO: 814554 - DNA, 15 bp, Homo sapiens
tttattttttcccct

SEQ ID NO: 814555 - DNA, 15 bp, Homo sapiens
ttattttttcccctt

SEQ ID NO: 814556 - DNA, 15 bp, Homo sapiens
tattttttccccttt

SEQ ID NO: 814557 - DNA, 15 bp, Homo sapiens
attttttcccctttc

SEQ ID NO: 814558 - DNA, 15 bp, Homo sapiens
ttttttcccctttct

SEQ ID NO: 814559 - DNA, 15 bp, Homo sapiens
tttttcccctttctt

SEQ ID NO: 814560 - DNA, 15 bp, Homo sapiens
ttttcccctttcttc

SEQ ID NO: 814561 - DNA, 15 bp, Homo sapiens
tttcccctttcttct

SEQ ID NO: 814562 - DNA, 15 bp, Homo sapiens
ttcccctttcttctt

SEQ ID NO: 814563 - DNA, 15 bp, Homo sapiens
tcccctttcttcttc

SEQ ID NO: 814564 - DNA, 15 bp, Homo sapiens
cccctttcttcttcc

SEQ ID NO: 814565 - DNA, 15 bp, Homo sapiens
ccctttcttcttccc

SEQ ID NO: 814566 - DNA, 15 bp, Homo sapiens
cctttcttcttccct

SEQ ID NO: 814567 - DNA, 15 bp, Homo sapiens
ctttcttcttccctg

SEQ ID NO: 814568 - DNA, 15 bp, Homo sapiens
tttcttcttccctga

SEQ ID NO: 814569 - DNA, 15 bp, Homo sapiens
ttcttcttccctgat

SEQ ID NO: 814570 - DNA, 15 bp, Homo sapiens
tcttcttccctgatt

SEQ ID NO: 814571 - DNA, 15 bp, Homo sapiens
cttcttccctgatta

SEQ ID NO: 814572 - DNA, 15 bp, Homo sapiens
ttcttccctgattaa

SEQ ID NO: 814573 - DNA, 15 bp, Homo sapiens
tcttccctgattaat

SEQ ID NO: 814574 - DNA, 15 bp, Homo sapiens
cttccctgattaatt

SEQ ID NO: 814575 - DNA, 15 bp, Homo sapiens
ttccctgattaattt

SEQ ID NO: 814576 - DNA, 15 bp, Homo sapiens
tccctgattaatttt

SEQ ID NO: 814577 - DNA, 15 bp, Homo sapiens
ccctgattaatttta

SEQ ID NO: 814578 - DNA, 15 bp, Homo sapiens
cctgattaattttat

SEQ ID NO: 814579 - DNA, 15 bp, Homo sapiens
ctgattaattttata

SEQ ID NO: 814580 - DNA, 15 bp, Homo sapiens
tgattaattttataa

SEQ ID NO: 814581 - DNA, 15 bp, Homo sapiens
gattaattttataat

SEQ ID NO: 814582 - DNA, 15 bp, Homo sapiens
attaattttataatg

SEQ ID NO: 814583 - DNA, 15 bp, Homo sapiens
ttaattttataatgt

SEQ ID NO: 814584 - DNA, 15 bp, Homo sapiens
taattttataatgtt

SEQ ID NO: 814585 - DNA, 15 bp, Homo sapiens
aattttataatgttt

SEQ ID NO: 814586 - DNA, 15 bp, Homo sapiens
attttataatgttta

SEQ ID NO: 814587 - DNA, 15 bp, Homo sapiens
ttttataatgtttac

SEQ ID NO: 814588 - DNA, 15 bp, Homo sapiens
tttataatgtttaca

SEQ ID NO: 814589 - DNA, 15 bp, Homo sapiens
ttataatgtttacag

SEQ ID NO: 814590 - DNA, 15 bp, Homo sapiens
tataatgtttacagg

SEQ ID NO: 814591 - DNA, 15 bp, Homo sapiens
ataatgtttacaggg

SEQ ID NO: 814592 - DNA, 15 bp, Homo sapiens
taatgtttacagggg

SEQ ID NO: 814593 - DNA, 15 bp, Homo sapiens
aatgtttacaggggc

SEQ ID NO: 814594 - DNA, 15 bp, Homo sapiens
atgtttacaggggca

SEQ ID NO: 814595 - DNA, 15 bp, Homo sapiens
tgtttacaggggcaa

SEQ ID NO: 814596 - DNA, 15 bp, Homo sapiens
gtttacaggggcaac

SEQ ID NO: 814597 - DNA, 15 bp, Homo sapiens
tttacaggggcaact

SEQ ID NO: 814598 - DNA, 15 bp, Homo sapiens
ttacaggggcaactt

SEQ ID NO: 814599 - DNA, 15 bp, Homo sapiens
tacaggggcaacttc

SEQ ID NO: 814600 - DNA, 15 bp, Homo sapiens
acaggggcaacttca

SEQ ID NO: 814601 - DNA, 15 bp, Homo sapiens
caggggcaacttcat

SEQ ID NO: 814602 - DNA, 15 bp, Homo sapiens
aggggcaacttcatt

SEQ ID NO: 814603 - DNA, 15 bp, Homo sapiens
ggggcaacttcattt

SEQ ID NO: 814604 - DNA, 15 bp, Homo sapiens
gggcaacttcatttc

SEQ ID NO: 814605 - DNA, 15 bp, Homo sapiens
ggcaacttcatttca

SEQ ID NO: 814606 - DNA, 15 bp, Homo sapiens
gcaacttcatttcaa

SEQ ID NO: 814607 - DNA, 15 bp, Homo sapiens
caacttcatttcaat

SEQ ID NO: 814608 - DNA, 15 bp, Homo sapiens
aacttcatttcaatc

SEQ ID NO: 814609 - DNA, 15 bp, Homo sapiens
acttcatttcaatct

SEQ ID NO: 814610 - DNA, 15 bp, Homo sapiens
cttcatttcaatctt

SEQ ID NO: 814611 - DNA, 15 bp, Homo sapiens
ttcatttcaatcttg

SEQ ID NO: 814612 - DNA, 15 bp, Homo sapiens
tcatttcaatcttgg

SEQ ID NO: 814613 - DNA, 15 bp, Homo sapiens
catttcaatcttggt

SEQ ID NO: 814614 - DNA, 15 bp, Homo sapiens
atttcaatcttggtt

SEQ ID NO: 814615 - DNA, 15 bp, Homo sapiens
tttcaatcttggttt

SEQ ID NO: 814616 - DNA, 15 bp, Homo sapiens
ttcaatcttggtttc

SEQ ID NO: 814617 - DNA, 15 bp, Homo sapiens
tcaatcttggtttcc

SEQ ID NO: 814618 - DNA, 15 bp, Homo sapiens
caatcttggtttccc

SEQ ID NO: 814619 - DNA, 15 bp, Homo sapiens
aatcttggtttccca

SEQ ID NO: 814620 - DNA, 15 bp, Homo sapiens
atcttggtttcccag

SEQ ID NO: 814621 - DNA, 15 bp, Homo sapiens
tcttggtttcccagt

SEQ ID NO: 814622 - DNA, 15 bp, Homo sapiens
cttggtttcccagtt

SEQ ID NO: 814623 - DNA, 15 bp, Homo sapiens
ttggtttcccagtta

SEQ ID NO: 814624 - DNA, 15 bp, Homo sapiens
tggtttcccagttat

SEQ ID NO: 814625 - DNA, 15 bp, Homo sapiens
ggtttcccagttata

SEQ ID NO: 814626 - DNA, 15 bp, Homo sapiens
gtttcccagttatag

SEQ ID NO: 814627 - DNA, 15 bp, Homo sapiens
tttcccagttataga

SEQ ID NO: 814628 - DNA, 15 bp, Homo sapiens
ttcccagttatagaa

SEQ ID NO: 814629 - DNA, 15 bp, Homo sapiens
tcccagttatagaag

SEQ ID NO: 814630 - DNA, 15 bp, Homo sapiens
cccagttatagaaga

SEQ ID NO: 814631 - DNA, 15 bp, Homo sapiens
ccagttatagaagat

SEQ ID NO: 814632 - DNA, 15 bp, Homo sapiens
cagttatagaagata

SEQ ID NO: 814633 - DNA, 15 bp, Homo sapiens
agttatagaagataa

SEQ ID NO: 814634 - DNA, 15 bp, Homo sapiens
gttatagaagataac

SEQ ID NO: 814635 - DNA, 15 bp, Homo sapiens
ttatagaagataacc

SEQ ID NO: 814636 - DNA, 15 bp, Homo sapiens
tatagaagataaccc

SEQ ID NO: 814637 - DNA, 15 bp, Homo sapiens
atagaagataaccct

SEQ ID NO: 814638 - DNA, 15 bp, Homo sapiens
tagaagataaccctc

SEQ ID NO: 814639 - DNA, 15 bp, Homo sapiens
agaagataaccctca

SEQ ID NO: 814640 - DNA, 15 bp, Homo sapiens
gaagataaccctcat

SEQ ID NO: 814641 - DNA, 15 bp, Homo sapiens
aagataaccctcata

SEQ ID NO: 814642 - DNA, 15 bp, Homo sapiens
agataaccctcatag

SEQ ID NO: 814643 - DNA, 15 bp, Homo sapiens
gataaccctcataga

SEQ ID NO: 814644 - DNA, 15 bp, Homo sapiens
ataaccctcatagaa

SEQ ID NO: 814645 - DNA, 15 bp, Homo sapiens
taaccctcatagaag

SEQ ID NO: 814646 - DNA, 15 bp, Homo sapiens
aaccctcatagaagg

SEQ ID NO: 814647 - DNA, 15 bp, Homo sapiens
accctcatagaagga

SEQ ID NO: 814648 - DNA, 15 bp, Homo sapiens
ccctcatagaaggag

SEQ ID NO: 814649 - DNA, 15 bp, Homo sapiens
cctcatagaaggaga

SEQ ID NO: 814650 - DNA, 15 bp, Homo sapiens
ctcatagaaggagaa

SEQ ID NO: 814651 - DNA, 15 bp, Homo sapiens
tcatagaaggagaaa

SEQ ID NO: 814652 - DNA, 15 bp, Homo sapiens
catagaaggagaaaa

SEQ ID NO: 814653 - DNA, 15 bp, Homo sapiens
atagaaggagaaaag

SEQ ID NO: 814654 - DNA, 15 bp, Homo sapiens
tagaaggagaaaagt

SEQ ID NO: 814655 - DNA, 15 bp, Homo sapiens
agaaggagaaaagtg

SEQ ID NO: 814656 - DNA, 15 bp, Homo sapiens
gaaggagaaaagtgc

SEQ ID NO: 814657 - DNA, 15 bp, Homo sapiens
aaggagaaaagtgca

SEQ ID NO: 814658 - DNA, 15 bp, Homo sapiens
aggagaaaagtgcat

SEQ ID NO: 814659 - DNA, 15 bp, Homo sapiens
ggagaaaagtgcata

SEQ ID NO: 814660 - DNA, 15 bp, Homo sapiens
gagaaaagtgcatac

SEQ ID NO: 814661 - DNA, 15 bp, Homo sapiens
agaaaagtgcatact

SEQ ID NO: 814662 - DNA, 15 bp, Homo sapiens
gaaaagtgcatactc

SEQ ID NO: 814663 - DNA, 15 bp, Homo sapiens
aaaagtgcatactca

SEQ ID NO: 814664 - DNA, 15 bp, Homo sapiens
aaagtgcatactcat

SEQ ID NO: 814665 - DNA, 15 bp, Homo sapiens
aagtgcatactcatt

SEQ ID NO: 814666 - DNA, 15 bp, Homo sapiens
agtgcatactcatta

SEQ ID NO: 814667 - DNA, 15 bp, Homo sapiens
gtgcatactcattag

SEQ ID NO: 814668 - DNA, 15 bp, Homo sapiens
tgcatactcattagt

SEQ ID NO: 814669 - DNA, 15 bp, Homo sapiens
gcatactcattagtt

SEQ ID NO: 814670 - DNA, 15 bp, Homo sapiens
catactcattagttt

SEQ ID NO: 814671 - DNA, 15 bp, Homo sapiens
atactcattagtttc

SEQ ID NO: 814672 - DNA, 15 bp, Homo sapiens
tactcattagtttca

SEQ ID NO: 814673 - DNA, 15 bp, Homo sapiens
actcattagtttcag

SEQ ID NO: 814674 - DNA, 15 bp, Homo sapiens
ctcattagtttcaga

SEQ ID NO: 814675 - DNA, 15 bp, Homo sapiens
tcattagtttcagag

SEQ ID NO: 814676 - DNA, 15 bp, Homo sapiens
cattagtttcagagg

SEQ ID NO: 814677 - DNA, 15 bp, Homo sapiens
attagtttcagagga

SEQ ID NO: 814678 - DNA, 15 bp, Homo sapiens
ttagtttcagaggaa

SEQ ID NO: 814679 - DNA, 15 bp, Homo sapiens
tagtttcagaggaat

SEQ ID NO: 814680 - DNA, 15 bp, Homo sapiens
agtttcagaggaatg

SEQ ID NO: 814681 - DNA, 15 bp, Homo sapiens
gtttcagaggaatga

SEQ ID NO: 814682 - DNA, 15 bp, Homo sapiens
tttcagaggaatgac

SEQ ID NO: 814683 - DNA, 15 bp, Homo sapiens
ttcagaggaatgact

SEQ ID NO: 814684 - DNA, 15 bp, Homo sapiens
tcagaggaatgactt

SEQ ID NO: 814685 - DNA, 15 bp, Homo sapiens
cagaggaatgacttt

SEQ ID NO: 814686 - DNA, 15 bp, Homo sapiens
agaggaatgactttt

SEQ ID NO: 814687 - DNA, 15 bp, Homo sapiens
gaggaatgacttttt

SEQ ID NO: 814688 - DNA, 15 bp, Homo sapiens
aggaatgactttttt

SEQ ID NO: 814689 - DNA, 15 bp, Homo sapiens
ggaatgacttttttt

SEQ ID NO: 814690 - DNA, 15 bp, Homo sapiens
gaatgactttttttt

SEQ ID NO: 814691 - DNA, 15 bp, Homo sapiens
aatgactttttttta

SEQ ID NO: 814692 - DNA, 15 bp, Homo sapiens
atgacttttttttag

SEQ ID NO: 814693 - DNA, 15 bp, Homo sapiens
tgacttttttttagt

SEQ ID NO: 814694 - DNA, 15 bp, Homo sapiens
gacttttttttagtt

SEQ ID NO: 814695 - DNA, 15 bp, Homo sapiens
acttttttttagttt

SEQ ID NO: 814696 - DNA, 15 bp, Homo sapiens
cttttttttagtttt

SEQ ID NO: 814697 - DNA, 15 bp, Homo sapiens
ttttttttagtttta

SEQ ID NO: 814698 - DNA, 15 bp, Homo sapiens
tttttttagttttag

SEQ ID NO: 814699 - DNA, 15 bp, Homo sapiens
ttttttagttttagg

SEQ ID NO: 814700 - DNA, 15 bp, Homo sapiens
tttttagttttaggc

SEQ ID NO: 814701 - DNA, 15 bp, Homo sapiens
ttttagttttaggca

SEQ ID NO: 814702 - DNA, 15 bp, Homo sapiens
tttagttttaggcat

SEQ ID NO: 814703 - DNA, 15 bp, Homo sapiens
ttagttttaggcatt

SEQ ID NO: 814704 - DNA, 15 bp, Homo sapiens
tagttttaggcattt

SEQ ID NO: 814705 - DNA, 15 bp, Homo sapiens
agttttaggcattta

SEQ ID NO: 814706 - DNA, 15 bp, Homo sapiens
gttttaggcatttag

SEQ ID NO: 814707 - DNA, 15 bp, Homo sapiens
ttttaggcatttaga

SEQ ID NO: 814708 - DNA, 15 bp, Homo sapiens
tttaggcatttagat

SEQ ID NO: 814709 - DNA, 15 bp, Homo sapiens
ttaggcatttagatt

SEQ ID NO: 814710 - DNA, 15 bp, Homo sapiens
taggcatttagattt

SEQ ID NO: 814711 - DNA, 15 bp, Homo sapiens
aggcatttagatttt

SEQ ID NO: 814712 - DNA, 15 bp, Homo sapiens
ggcatttagattttg

SEQ ID NO: 814713 - DNA, 15 bp, Homo sapiens
gcatttagattttgt

SEQ ID NO: 814714 - DNA, 15 bp, Homo sapiens
catttagattttgtg

SEQ ID NO: 814715 - DNA, 15 bp, Homo sapiens
atttagattttgtga

SEQ ID NO: 814716 - DNA, 15 bp, Homo sapiens
tttagattttgtgat

SEQ ID NO: 814717 - DNA, 15 bp, Homo sapiens
ttagattttgtgatg

SEQ ID NO: 814718 - DNA, 15 bp, Homo sapiens
tagattttgtgatgc

SEQ ID NO: 814719 - DNA, 15 bp, Homo sapiens
agattttgtgatgcc

SEQ ID NO: 814720 - DNA, 15 bp, Homo sapiens
gattttgtgatgcct

SEQ ID NO: 814721 - DNA, 15 bp, Homo sapiens
attttgtgatgccta

SEQ ID NO: 814722 - DNA, 15 bp, Homo sapiens
ttttgtgatgcctaa

SEQ ID NO: 814723 - DNA, 15 bp, Homo sapiens
tttgtgatgcctaat

SEQ ID NO: 814724 - DNA, 15 bp, Homo sapiens
ttgtgatgcctaatg

SEQ ID NO: 814725 - DNA, 15 bp, Homo sapiens
tgtgatgcctaatga

SEQ ID NO: 814726 - DNA, 15 bp, Homo sapiens
gtgatgcctaatgac

SEQ ID NO: 814727 - DNA, 15 bp, Homo sapiens
tgatgcctaatgaca

SEQ ID NO: 814728 - DNA, 15 bp, Homo sapiens
gatgcctaatgacac

SEQ ID NO: 814729 - DNA, 15 bp, Homo sapiens
atgcctaatgacaca

SEQ ID NO: 814730 - DNA, 15 bp, Homo sapiens
tgcctaatgacacag

SEQ ID NO: 814731 - DNA, 15 bp, Homo sapiens
gcctaatgacacaga

SEQ ID NO: 814732 - DNA, 15 bp, Homo sapiens
cctaatgacacagaa

SEQ ID NO: 814733 - DNA, 15 bp, Homo sapiens
ctaatgacacagaaa

SEQ ID NO: 814734 - DNA, 15 bp, Homo sapiens
taatgacacagaaat

SEQ ID NO: 814735 - DNA, 15 bp, Homo sapiens
aatgacacagaaatt

SEQ ID NO: 814736 - DNA, 15 bp, Homo sapiens
atgacacagaaattg

SEQ ID NO: 814737 - DNA, 15 bp, Homo sapiens
tgacacagaaattga

SEQ ID NO: 814738 - DNA, 15 bp, Homo sapiens
gacacagaaattgaa

SEQ ID NO: 814739 - DNA, 15 bp, Homo sapiens
acacagaaattgaat

SEQ ID NO: 814740 - DNA, 15 bp, Homo sapiens
cacagaaattgaatg

SEQ ID NO: 814741 - DNA, 15 bp, Homo sapiens
acagaaattgaatgc

SEQ ID NO: 814742 - DNA, 15 bp, Homo sapiens
cagaaattgaatgcc

SEQ ID NO: 814743 - DNA, 15 bp, Homo sapiens
agaaattgaatgccc

SEQ ID NO: 814744 - DNA, 15 bp, Homo sapiens
gaaattgaatgccct

SEQ ID NO: 814745 - DNA, 15 bp, Homo sapiens
aaattgaatgccctc

SEQ ID NO: 814746 - DNA, 15 bp, Homo sapiens
aattgaatgccctcg

SEQ ID NO: 814747 - DNA, 15 bp, Homo sapiens
attgaatgccctcgg

SEQ ID NO: 814748 - DNA, 15 bp, Homo sapiens
ttgaatgccctcggg

SEQ ID NO: 814749 - DNA, 15 bp, Homo sapiens
tgaatgccctcgggg

SEQ ID NO: 814750 - DNA, 15 bp, Homo sapiens
gaatgccctcgggga

SEQ ID NO: 814751 - DNA, 15 bp, Homo sapiens
aatgccctcggggag

SEQ ID NO: 814752 - DNA, 15 bp, Homo sapiens
atgccctcggggaga

SEQ ID NO: 814753 - DNA, 15 bp, Homo sapiens
tgccctcggggagac

SEQ ID NO: 814754 - DNA, 15 bp, Homo sapiens
gccctcggggagact

SEQ ID NO: 814755 - DNA, 15 bp, Homo sapiens
ccctcggggagactc

SEQ ID NO: 814756 - DNA, 15 bp, Homo sapiens
cctcggggagactct

SEQ ID NO: 814757 - DNA, 15 bp, Homo sapiens
ctcggggagactctc

SEQ ID NO: 814758 - DNA, 15 bp, Homo sapiens
tcggggagactctcc

SEQ ID NO: 814759 - DNA, 15 bp, Homo sapiens
cggggagactctcct

SEQ ID NO: 814760 - DNA, 15 bp, Homo sapiens
ggggagactctcctg

SEQ ID NO: 814761 - DNA, 15 bp, Homo sapiens
gggagactctcctgt

SEQ ID NO: 814762 - DNA, 15 bp, Homo sapiens
ggagactctcctgtg

SEQ ID NO: 814763 - DNA, 15 bp, Homo sapiens
gagactctcctgtgg

SEQ ID NO: 814764 - DNA, 15 bp, Homo sapiens
agactctcctgtgga

SEQ ID NO: 814765 - DNA, 15 bp, Homo sapiens
gactctcctgtggaa

SEQ ID NO: 814766 - DNA, 15 bp, Homo sapiens
actctcctgtggaat

SEQ ID NO: 814767 - DNA, 15 bp, Homo sapiens
ctctcctgtggaatt

SEQ ID NO: 814768 - DNA, 15 bp, Homo sapiens
tctcctgtggaattt

SEQ ID NO: 814769 - DNA, 15 bp, Homo sapiens
ctcctgtggaatttt

SEQ ID NO: 814770 - DNA, 15 bp, Homo sapiens
tcctgtggaatttta

SEQ ID NO: 814771 - DNA, 15 bp, Homo sapiens
cctgtggaattttaa

SEQ ID NO: 814772 - DNA, 15 bp, Homo sapiens
ctgtggaattttaac

SEQ ID NO: 814773 - DNA, 15 bp, Homo sapiens
tgtggaattttaact

SEQ ID NO: 814774 - DNA, 15 bp, Homo sapiens
gtggaattttaacta

SEQ ID NO: 814775 - DNA, 15 bp, Homo sapiens
tggaattttaactat

SEQ ID NO: 814776 - DNA, 15 bp, Homo sapiens
ggaattttaactatc

SEQ ID NO: 814777 - DNA, 15 bp, Homo sapiens
gaattttaactatcc

SEQ ID NO: 814778 - DNA, 15 bp, Homo sapiens
aattttaactatccc

SEQ ID NO: 814779 - DNA, 15 bp, Homo sapiens
attttaactatccca

SEQ ID NO: 814780 - DNA, 15 bp, Homo sapiens
ttttaactatcccat

SEQ ID NO: 814781 - DNA, 15 bp, Homo sapiens
tttaactatcccata

SEQ ID NO: 814782 - DNA, 15 bp, Homo sapiens
ttaactatcccatag

SEQ ID NO: 814783 - DNA, 15 bp, Homo sapiens
taactatcccatagc

SEQ ID NO: 814784 - DNA, 15 bp, Homo sapiens
aactatcccatagcc

SEQ ID NO: 814785 - DNA, 15 bp, Homo sapiens
actatcccatagcct

SEQ ID NO: 814786 - DNA, 15 bp, Homo sapiens
ctatcccatagcctt

SEQ ID NO: 814787 - DNA, 15 bp, Homo sapiens
tatcccatagccttc

SEQ ID NO: 814788 - DNA, 15 bp, Homo sapiens
atcccatagccttct

SEQ ID NO: 814789 - DNA, 15 bp, Homo sapiens
tcccatagccttctc

SEQ ID NO: 814790 - DNA, 15 bp, Homo sapiens
cccatagccttctca

SEQ ID NO: 814791 - DNA, 15 bp, Homo sapiens
ccatagccttctcag

SEQ ID NO: 814792 - DNA, 15 bp, Homo sapiens
catagccttctcagg

SEQ ID NO: 814793 - DNA, 15 bp, Homo sapiens
atagccttctcaggt

SEQ ID NO: 814794 - DNA, 15 bp, Homo sapiens
tagccttctcaggtc

SEQ ID NO: 814795 - DNA, 15 bp, Homo sapiens
agccttctcaggtct

SEQ ID NO: 814796 - DNA, 15 bp, Homo sapiens
gccttctcaggtctt

SEQ ID NO: 814797 - DNA, 15 bp, Homo sapiens
ccttctcaggtcttg

SEQ ID NO: 814798 - DNA, 15 bp, Homo sapiens
cttctcaggtcttgg

SEQ ID NO: 814799 - DNA, 15 bp, Homo sapiens
ttctcaggtcttgga

SEQ ID NO: 814800 - DNA, 15 bp, Homo sapiens
tctcaggtcttggac

SEQ ID NO: 814801 - DNA, 15 bp, Homo sapiens
ctcaggtcttggacc

SEQ ID NO: 814802 - DNA, 15 bp, Homo sapiens
tcaggtcttggacct

SEQ ID NO: 814803 - DNA, 15 bp, Homo sapiens
caggtcttggacctc

SEQ ID NO: 814804 - DNA, 15 bp, Homo sapiens
aggtcttggacctct

SEQ ID NO: 814805 - DNA, 15 bp, Homo sapiens
ggtcttggacctctc

SEQ ID NO: 814806 - DNA, 15 bp, Homo sapiens
gtcttggacctctca

SEQ ID NO: 814807 - DNA, 15 bp, Homo sapiens
tcttggacctctcat

SEQ ID NO: 814808 - DNA, 15 bp, Homo sapiens
cttggacctctcatg

SEQ ID NO: 814809 - DNA, 15 bp, Homo sapiens
ttggacctctcatgg

SEQ ID NO: 814810 - DNA, 15 bp, Homo sapiens
tggacctctcatggc

SEQ ID NO: 814811 - DNA, 15 bp, Homo sapiens
ggacctctcatggct

SEQ ID NO: 814812 - DNA, 15 bp, Homo sapiens
gacctctcatggcta

SEQ ID NO: 814813 - DNA, 15 bp, Homo sapiens
acctctcatggctag

SEQ ID NO: 814814 - DNA, 15 bp, Homo sapiens
cctctcatggctagt

SEQ ID NO: 814815 - DNA, 15 bp, Homo sapiens
ctctcatggctagtg

SEQ ID NO: 814816 - DNA, 15 bp, Homo sapiens
tctcatggctagtga

SEQ ID NO: 814817 - DNA, 15 bp, Homo sapiens
ctcatggctagtgag

SEQ ID NO: 814818 - DNA, 15 bp, Homo sapiens
tcatggctagtgagg

SEQ ID NO: 814819 - DNA, 15 bp, Homo sapiens
catggctagtgaggt

SEQ ID NO: 814820 - DNA, 15 bp, Homo sapiens
atggctagtgaggtc

SEQ ID NO: 814821 - DNA, 15 bp, Homo sapiens
tggctagtgaggtca

SEQ ID NO: 814822 - DNA, 15 bp, Homo sapiens
ggctagtgaggtcaa

SEQ ID NO: 814823 - DNA, 15 bp, Homo sapiens
gctagtgaggtcaaa

SEQ ID NO: 814824 - DNA, 15 bp, Homo sapiens
ctagtgaggtcaaat

SEQ ID NO: 814825 - DNA, 15 bp, Homo sapiens
tagtgaggtcaaatg

SEQ ID NO: 814826 - DNA, 15 bp, Homo sapiens
agtgaggtcaaatgg

SEQ ID NO: 814827 - DNA, 15 bp, Homo sapiens
gtgaggtcaaatggc

SEQ ID NO: 814828 - DNA, 15 bp, Homo sapiens
tgaggtcaaatggct

SEQ ID NO: 814829 - DNA, 15 bp, Homo sapiens
gaggtcaaatggctt

SEQ ID NO: 814830 - DNA, 15 bp, Homo sapiens
aggtcaaatggcttt

SEQ ID NO: 814831 - DNA, 15 bp, Homo sapiens
ggtcaaatggctttg

SEQ ID NO: 814832 - DNA, 15 bp, Homo sapiens
gtcaaatggctttgc

SEQ ID NO: 814833 - DNA, 15 bp, Homo sapiens
tcaaatggctttgct

SEQ ID NO: 814834 - DNA, 15 bp, Homo sapiens
caaatggctttgctg

SEQ ID NO: 814835 - DNA, 15 bp, Homo sapiens
aaatggctttgctga

SEQ ID NO: 814836 - DNA, 15 bp, Homo sapiens
aatggctttgctgag

SEQ ID NO: 814837 - DNA, 15 bp, Homo sapiens
atggctttgctgagt

SEQ ID NO: 814838 - DNA, 15 bp, Homo sapiens
tggctttgctgagtg

SEQ ID NO: 814839 - DNA, 15 bp, Homo sapiens
ggctttgctgagtgg

SEQ ID NO: 814840 - DNA, 15 bp, Homo sapiens
gctttgctgagtggt

SEQ ID NO: 814841 - DNA, 15 bp, Homo sapiens
ctttgctgagtggtg

SEQ ID NO: 814842 - DNA, 15 bp, Homo sapiens
tttgctgagtggtga

SEQ ID NO: 814843 - DNA, 15 bp, Homo sapiens
ttgctgagtggtgaa

SEQ ID NO: 814844 - DNA, 15 bp, Homo sapiens
tgctgagtggtgaat

SEQ ID NO: 814845 - DNA, 15 bp, Homo sapiens
gctgagtggtgaatc

SEQ ID NO: 814846 - DNA, 15 bp, Homo sapiens
ctgagtggtgaatct

SEQ ID NO: 814847 - DNA, 15 bp, Homo sapiens
tgagtggtgaatctt

SEQ ID NO: 814848 - DNA, 15 bp, Homo sapiens
gagtggtgaatcttg

SEQ ID NO: 814849 - DNA, 15 bp, Homo sapiens
agtggtgaatcttgt

SEQ ID NO: 814850 - DNA, 15 bp, Homo sapiens
gtggtgaatcttgtt

SEQ ID NO: 814851 - DNA, 15 bp, Homo sapiens
tggtgaatcttgtta

SEQ ID NO: 814852 - DNA, 15 bp, Homo sapiens
ggtgaatcttgttac

SEQ ID NO: 814853 - DNA, 15 bp, Homo sapiens
gtgaatcttgttacc

SEQ ID NO: 814854 - DNA, 15 bp, Homo sapiens
tgaatcttgttacct

SEQ ID NO: 814855 - DNA, 15 bp, Homo sapiens
gaatcttgttacctc

SEQ ID NO: 814856 - DNA, 15 bp, Homo sapiens
aatcttgttacctcc

SEQ ID NO: 814857 - DNA, 15 bp, Homo sapiens
atcttgttacctcca

SEQ ID NO: 814858 - DNA, 15 bp, Homo sapiens
tcttgttacctccaa

SEQ ID NO: 814859 - DNA, 15 bp, Homo sapiens
cttgttacctccaag

SEQ ID NO: 814860 - DNA, 15 bp, Homo sapiens
ttgttacctccaagg

SEQ ID NO: 814861 - DNA, 15 bp, Homo sapiens
tgttacctccaaggt

SEQ ID NO: 814862 - DNA, 15 bp, Homo sapiens
gttacctccaaggtc

SEQ ID NO: 814863 - DNA, 15 bp, Homo sapiens
ttacctccaaggtca

SEQ ID NO: 814864 - DNA, 15 bp, Homo sapiens
tacctccaaggtcat

SEQ ID NO: 814865 - DNA, 15 bp, Homo sapiens
acctccaaggtcatt

SEQ ID NO: 814866 - DNA, 15 bp, Homo sapiens
cctccaaggtcattc

SEQ ID NO: 814867 - DNA, 15 bp, Homo sapiens
ctccaaggtcattcc

SEQ ID NO: 814868 - DNA, 15 bp, Homo sapiens
tccaaggtcattccc

SEQ ID NO: 814869 - DNA, 15 bp, Homo sapiens
ccaaggtcattccca

SEQ ID NO: 814870 - DNA, 15 bp, Homo sapiens
caaggtcattcccat

SEQ ID NO: 814871 - DNA, 15 bp, Homo sapiens
aaggtcattcccatt

SEQ ID NO: 814872 - DNA, 15 bp, Homo sapiens
aggtcattcccattc

SEQ ID NO: 814873 - DNA, 15 bp, Homo sapiens
ggtcattcccattct

SEQ ID NO: 814874 - DNA, 15 bp, Homo sapiens
gtcattcccattctt

SEQ ID NO: 814875 - DNA, 15 bp, Homo sapiens
tcattcccattcttc

SEQ ID NO: 814876 - DNA, 15 bp, Homo sapiens
cattcccattcttct

SEQ ID NO: 814877 - DNA, 15 bp, Homo sapiens
attcccattcttctt

SEQ ID NO: 814878 - DNA, 15 bp, Homo sapiens
ttcccattcttcttc

SEQ ID NO: 814879 - DNA, 15 bp, Homo sapiens
tcccattcttcttct

SEQ ID NO: 814880 - DNA, 15 bp, Homo sapiens
cccattcttcttctt

SEQ ID NO: 814881 - DNA, 15 bp, Homo sapiens
ccattcttcttcttg

SEQ ID NO: 814882 - DNA, 15 bp, Homo sapiens
cattcttcttcttgc

SEQ ID NO: 814883 - DNA, 15 bp, Homo sapiens
attcttcttcttgca

SEQ ID NO: 814884 - DNA, 15 bp, Homo sapiens
ttcttcttcttgcac

SEQ ID NO: 814885 - DNA, 15 bp, Homo sapiens
tcttcttcttgcaca

SEQ ID NO: 814886 - DNA, 15 bp, Homo sapiens
cttcttcttgcacac

SEQ ID NO: 814887 - DNA, 15 bp, Homo sapiens
ttcttcttgcacaca

SEQ ID NO: 814888 - DNA, 15 bp, Homo sapiens
tcttcttgcacacat

SEQ ID NO: 814889 - DNA, 15 bp, Homo sapiens
cttcttgcacacatg

SEQ ID NO: 814890 - DNA, 15 bp, Homo sapiens
ttcttgcacacatga

SEQ ID NO: 814891 - DNA, 15 bp, Homo sapiens
tcttgcacacatgag

SEQ ID NO: 814892 - DNA, 15 bp, Homo sapiens
cttgcacacatgagg

SEQ ID NO: 814893 - DNA, 15 bp, Homo sapiens
ttgcacacatgaggt

SEQ ID NO: 814894 - DNA, 15 bp, Homo sapiens
tgcacacatgaggtg

SEQ ID NO: 814895 - DNA, 15 bp, Homo sapiens
gcacacatgaggtga

SEQ ID NO: 814896 - DNA, 15 bp, Homo sapiens
cacacatgaggtgag

SEQ ID NO: 814897 - DNA, 15 bp, Homo sapiens
acacatgaggtgaga

SEQ ID NO: 814898 - DNA, 15 bp, Homo sapiens
cacatgaggtgagat

SEQ ID NO: 814899 - DNA, 15 bp, Homo sapiens
acatgaggtgagata

SEQ ID NO: 814900 - DNA, 15 bp, Homo sapiens
catgaggtgagataa

SEQ ID NO: 814901 - DNA, 15 bp, Homo sapiens
atgaggtgagataac

SEQ ID NO: 814902 - DNA, 15 bp, Homo sapiens
tgaggtgagataacc

SEQ ID NO: 814903 - DNA, 15 bp, Homo sapiens
gaggtgagataacct

SEQ ID NO: 814904 - DNA, 15 bp, Homo sapiens
aggtgagataacctg

SEQ ID NO: 814905 - DNA, 15 bp, Homo sapiens
ggtgagataacctga

SEQ ID NO: 814906 - DNA, 15 bp, Homo sapiens
gtgagataacctgaa

SEQ ID NO: 814907 - DNA, 15 bp, Homo sapiens
tgagataacctgaaa

SEQ ID NO: 814908 - DNA, 15 bp, Homo sapiens
gagataacctgaaac

SEQ ID NO: 814909 - DNA, 15 bp, Homo sapiens
agataacctgaaact

SEQ ID NO: 814910 - DNA, 15 bp, Homo sapiens
gataacctgaaactc

SEQ ID NO: 814911 - DNA, 15 bp, Homo sapiens
ataacctgaaactcc

SEQ ID NO: 814912 - DNA, 15 bp, Homo sapiens
taacctgaaactccc

SEQ ID NO: 814913 - DNA, 15 bp, Homo sapiens
aacctgaaactcccc

SEQ ID NO: 814914 - DNA, 15 bp, Homo sapiens
acctgaaactcccct

SEQ ID NO: 814915 - DNA, 15 bp, Homo sapiens
cctgaaactcccctg

SEQ ID NO: 814916 - DNA, 15 bp, Homo sapiens
ctgaaactcccctga

SEQ ID NO: 814917 - DNA, 15 bp, Homo sapiens
tgaaactcccctgaa

SEQ ID NO: 814918 - DNA, 15 bp, Homo sapiens
gaaactcccctgaaa

SEQ ID NO: 814919 - DNA, 15 bp, Homo sapiens
aaactcccctgaaac

SEQ ID NO: 814920 - DNA, 15 bp, Homo sapiens
aactcccctgaaaca

SEQ ID NO: 814921 - DNA, 15 bp, Homo sapiens
actcccctgaaacac

SEQ ID NO: 814922 - DNA, 15 bp, Homo sapiens
ctcccctgaaacacg

SEQ ID NO: 814923 - DNA, 15 bp, Homo sapiens
tcccctgaaacacgg

SEQ ID NO: 814924 - DNA, 15 bp, Homo sapiens
cccctgaaacacggg

SEQ ID NO: 814925 - DNA, 15 bp, Homo sapiens
ccctgaaacacggga

SEQ ID NO: 814926 - DNA, 15 bp, Homo sapiens
cctgaaacacgggaa

SEQ ID NO: 814927 - DNA, 15 bp, Homo sapiens
ctgaaacacgggaag

SEQ ID NO: 814928 - DNA, 15 bp, Homo sapiens
tgaaacacgggaaga

SEQ ID NO: 814929 - DNA, 15 bp, Homo sapiens
gaaacacgggaagag

SEQ ID NO: 814930 - DNA, 15 bp, Homo sapiens
aaacacgggaagagc

SEQ ID NO: 814931 - DNA, 15 bp, Homo sapiens
aacacgggaagagca

SEQ ID NO: 814932 - DNA, 15 bp, Homo sapiens
acacgggaagagcac

SEQ ID NO: 814933 - DNA, 15 bp, Homo sapiens
cacgggaagagcaca

SEQ ID NO: 814934 - DNA, 15 bp, Homo sapiens
acgggaagagcacac

SEQ ID NO: 814935 - DNA, 15 bp, Homo sapiens
cgggaagagcacaca

SEQ ID NO: 814936 - DNA, 15 bp, Homo sapiens
gggaagagcacacaa

SEQ ID NO: 814937 - DNA, 15 bp, Homo sapiens
ggaagagcacacaaa

SEQ ID NO: 814938 - DNA, 15 bp, Homo sapiens
gaagagcacacaaat

SEQ ID NO: 814939 - DNA, 15 bp, Homo sapiens
aagagcacacaaatc

SEQ ID NO: 814940 - DNA, 15 bp, Homo sapiens
agagcacacaaatca

SEQ ID NO: 814941 - DNA, 15 bp, Homo sapiens
gagcacacaaatcag

SEQ ID NO: 814942 - DNA, 15 bp, Homo sapiens
agcacacaaatcagt

SEQ ID NO: 814943 - DNA, 15 bp, Homo sapiens
gcacacaaatcagtc

SEQ ID NO: 814944 - DNA, 15 bp, Homo sapiens
cacacaaatcagtcc

SEQ ID NO: 814945 - DNA, 15 bp, Homo sapiens
acacaaatcagtcct

SEQ ID NO: 814946 - DNA, 15 bp, Homo sapiens
cacaaatcagtcctt

SEQ ID NO: 814947 - DNA, 15 bp, Homo sapiens
acaaatcagtccttt

SEQ ID NO: 814948 - DNA, 15 bp, Homo sapiens
caaatcagtcctttg

SEQ ID NO: 814949 - DNA, 15 bp, Homo sapiens
aaatcagtcctttga

SEQ ID NO: 814950 - DNA, 15 bp, Homo sapiens
aatcagtcctttgaa

SEQ ID NO: 814951 - DNA, 15 bp, Homo sapiens
atcagtcctttgaat

SEQ ID NO: 814952 - DNA, 15 bp, Homo sapiens
tcagtcctttgaatg

SEQ ID NO: 814953 - DNA, 15 bp, Homo sapiens
cagtcctttgaatgc

SEQ ID NO: 814954 - DNA, 15 bp, Homo sapiens
agtcctttgaatgca

SEQ ID NO: 814955 - DNA, 15 bp, Homo sapiens
gtcctttgaatgcac

SEQ ID NO: 814956 - DNA, 15 bp, Homo sapiens
tcctttgaatgcacc

SEQ ID NO: 814957 - DNA, 15 bp, Homo sapiens
cctttgaatgcacct

SEQ ID NO: 814958 - DNA, 15 bp, Homo sapiens
ctttgaatgcacctc

SEQ ID NO: 814959 - DNA, 15 bp, Homo sapiens
tttgaatgcacctca

SEQ ID NO: 814960 - DNA, 15 bp, Homo sapiens
ttgaatgcacctcat

SEQ ID NO: 814961 - DNA, 15 bp, Homo sapiens
tgaatgcacctcatc

SEQ ID NO: 814962 - DNA, 15 bp, Homo sapiens
gaatgcacctcatcc

SEQ ID NO: 814963 - DNA, 15 bp, Homo sapiens
aatgcacctcatcct

SEQ ID NO: 814964 - DNA, 15 bp, Homo sapiens
atgcacctcatcctc

SEQ ID NO: 814965 - DNA, 15 bp, Homo sapiens
tgcacctcatcctct

SEQ ID NO: 814966 - DNA, 15 bp, Homo sapiens
gcacctcatcctcta

SEQ ID NO: 814967 - DNA, 15 bp, Homo sapiens
cacctcatcctctag

SEQ ID NO: 814968 - DNA, 15 bp, Homo sapiens
acctcatcctctagg

SEQ ID NO: 814969 - DNA, 15 bp, Homo sapiens
cctcatcctctaggg

SEQ ID NO: 814970 - DNA, 15 bp, Homo sapiens
ctcatcctctaggga

SEQ ID NO: 814971 - DNA, 15 bp, Homo sapiens
tcatcctctagggat

SEQ ID NO: 814972 - DNA, 15 bp, Homo sapiens
catcctctagggatt

SEQ ID NO: 814973 - DNA, 15 bp, Homo sapiens
atcctctagggattg

SEQ ID NO: 814974 - DNA, 15 bp, Homo sapiens
tcctctagggattgt

SEQ ID NO: 814975 - DNA, 15 bp, Homo sapiens
cctctagggattgta

SEQ ID NO: 814976 - DNA, 15 bp, Homo sapiens
ctctagggattgtag

SEQ ID NO: 814977 - DNA, 15 bp, Homo sapiens
tctagggattgtagt

SEQ ID NO: 814978 - DNA, 15 bp, Homo sapiens
ctagggattgtagta

SEQ ID NO: 814979 - DNA, 15 bp, Homo sapiens
tagggattgtagtaa

SEQ ID NO: 814980 - DNA, 15 bp, Homo sapiens
agggattgtagtaat

SEQ ID NO: 814981 - DNA, 15 bp, Homo sapiens
gggattgtagtaata

SEQ ID NO: 814982 - DNA, 15 bp, Homo sapiens
ggattgtagtaatat

SEQ ID NO: 814983 - DNA, 15 bp, Homo sapiens
gattgtagtaatatt

SEQ ID NO: 814984 - DNA, 15 bp, Homo sapiens
attgtagtaatattg

SEQ ID NO: 814985 - DNA, 15 bp, Homo sapiens
ttgtagtaatattgt

SEQ ID NO: 814986 - DNA, 15 bp, Homo sapiens
tgtagtaatattgta

SEQ ID NO: 814987 - DNA, 15 bp, Homo sapiens
gtagtaatattgtaa

SEQ ID NO: 814988 - DNA, 15 bp, Homo sapiens
tagtaatattgtaac

SEQ ID NO: 814989 - DNA, 15 bp, Homo sapiens
agtaatattgtaact

SEQ ID NO: 814990 - DNA, 15 bp, Homo sapiens
gtaatattgtaactg

SEQ ID NO: 814991 - DNA, 15 bp, Homo sapiens
taatattgtaactga

SEQ ID NO: 814992 - DNA, 15 bp, Homo sapiens
aatattgtaactgat

SEQ ID NO: 814993 - DNA, 15 bp, Homo sapiens
atattgtaactgatg

SEQ ID NO: 814994 - DNA, 15 bp, Homo sapiens
tattgtaactgatgt

SEQ ID NO: 814995 - DNA, 15 bp, Homo sapiens
attgtaactgatgta

SEQ ID NO: 814996 - DNA, 15 bp, Homo sapiens
ttgtaactgatgtaa

SEQ ID NO: 814997 - DNA, 15 bp, Homo sapiens
tgtaactgatgtaat

SEQ ID NO: 814998 - DNA, 15 bp, Homo sapiens
gtaactgatgtaatt

SEQ ID NO: 814999 - DNA, 15 bp, Homo sapiens
taactgatgtaattg

SEQ ID NO: 815000 - DNA, 15 bp, Homo sapiens
aactgatgtaattgt

SEQ ID NO: 815001 - DNA, 15 bp, Homo sapiens
actgatgtaattgtc

SEQ ID NO: 815002 - DNA, 15 bp, Homo sapiens
ctgatgtaattgtca

SEQ ID NO: 815003 - DNA, 15 bp, Homo sapiens
tgatgtaattgtcat

SEQ ID NO: 815004 - DNA, 15 bp, Homo sapiens
gatgtaattgtcata

SEQ ID NO: 815005 - DNA, 15 bp, Homo sapiens
atgtaattgtcatat

SEQ ID NO: 815006 - DNA, 15 bp, Homo sapiens
tgtaattgtcatata

SEQ ID NO: 815007 - DNA, 15 bp, Homo sapiens
gtaattgtcatataa

SEQ ID NO: 815008 - DNA, 15 bp, Homo sapiens
taattgtcatataat

SEQ ID NO: 815009 - DNA, 15 bp, Homo sapiens
aattgtcatataatt

SEQ ID NO: 815010 - DNA, 15 bp, Homo sapiens
attgtcatataattt

SEQ ID NO: 815011 - DNA, 15 bp, Homo sapiens
ttgtcatataattta

SEQ ID NO: 815012 - DNA, 15 bp, Homo sapiens
tgtcatataatttaa

SEQ ID NO: 815013 - DNA, 15 bp, Homo sapiens
gtcatataatttaag

SEQ ID NO: 815014 - DNA, 15 bp, Homo sapiens
tcatataatttaagt

SEQ ID NO: 815015 - DNA, 15 bp, Homo sapiens
catataatttaagtt

SEQ ID NO: 815016 - DNA, 15 bp, Homo sapiens
atataatttaagttc

SEQ ID NO: 815017 - DNA, 15 bp, Homo sapiens
tataatttaagttct

SEQ ID NO: 815018 - DNA, 15 bp, Homo sapiens
ataatttaagttctt

SEQ ID NO: 815019 - DNA, 15 bp, Homo sapiens
taatttaagttcttt

SEQ ID NO: 815020 - DNA, 15 bp, Homo sapiens
aatttaagttctttt

SEQ ID NO: 815021 - DNA, 15 bp, Homo sapiens
atttaagttcttttt

SEQ ID NO: 815022 - DNA, 15 bp, Homo sapiens
tttaagttctttttt

SEQ ID NO: 815023 - DNA, 15 bp, Homo sapiens
ttaagttcttttttc

SEQ ID NO: 815024 - DNA, 15 bp, Homo sapiens
taagttcttttttct

SEQ ID NO: 815025 - DNA, 15 bp, Homo sapiens
aagttcttttttctt

SEQ ID NO: 815026 - DNA, 15 bp, Homo sapiens
agttcttttttcttt

SEQ ID NO: 815027 - DNA, 15 bp, Homo sapiens
gttcttttttctttc

SEQ ID NO: 815028 - DNA, 15 bp, Homo sapiens
tttttctttctttct

SEQ ID NO: 815029 - DNA, 15 bp, Homo sapiens
tttttttttttttcc

SEQ ID NO: 815030 - DNA, 15 bp, Homo sapiens
ttttttttttttcct

SEQ ID NO: 815031 - DNA, 15 bp, Homo sapiens
tttttttttttcctg

SEQ ID NO: 815032 - DNA, 15 bp, Homo sapiens
ttttttttttcctga

SEQ ID NO: 815033 - DNA, 15 bp, Homo sapiens
tttttttttcctgag

SEQ ID NO: 815034 - DNA, 15 bp, Homo sapiens
ttttttttcctgaga

SEQ ID NO: 815035 - DNA, 15 bp, Homo sapiens
tttttttcctgagag

SEQ ID NO: 815036 - DNA, 15 bp, Homo sapiens
ttttttcctgagagg

SEQ ID NO: 815037 - DNA, 15 bp, Homo sapiens
tttttcctgagaggg

SEQ ID NO: 815038 - DNA, 15 bp, Homo sapiens
ttttcctgagaggga

SEQ ID NO: 815039 - DNA, 15 bp, Homo sapiens
tttcctgagagggag

SEQ ID NO: 815040 - DNA, 15 bp, Homo sapiens
ttcctgagagggagt

SEQ ID NO: 815041 - DNA, 15 bp, Homo sapiens
tcctgagagggagtc

SEQ ID NO: 815042 - DNA, 15 bp, Homo sapiens
cctgagagggagtct

SEQ ID NO: 815043 - DNA, 15 bp, Homo sapiens
ctgagagggagtctc

SEQ ID NO: 815044 - DNA, 15 bp, Homo sapiens
tgagagggagtctca

SEQ ID NO: 815045 - DNA, 15 bp, Homo sapiens
gagagggagtctcac

SEQ ID NO: 815046 - DNA, 15 bp, Homo sapiens
agagggagtctcact

SEQ ID NO: 815047 - DNA, 15 bp, Homo sapiens
gagggagtctcactg

SEQ ID NO: 815048 - DNA, 15 bp, Homo sapiens
agggagtctcactgt

SEQ ID NO: 815049 - DNA, 15 bp, Homo sapiens
gggagtctcactgtg

SEQ ID NO: 815050 - DNA, 15 bp, Homo sapiens
ggagtctcactgtgt

SEQ ID NO: 815051 - DNA, 15 bp, Homo sapiens
gagtctcactgtgtc

SEQ ID NO: 815052 - DNA, 15 bp, Homo sapiens
agtctcactgtgtcc

SEQ ID NO: 815053 - DNA, 15 bp, Homo sapiens
gtctcactgtgtccc

SEQ ID NO: 815054 - DNA, 15 bp, Homo sapiens
tctcactgtgtcccc

SEQ ID NO: 815055 - DNA, 15 bp, Homo sapiens
ctcactgtgtccccc

SEQ ID NO: 815056 - DNA, 15 bp, Homo sapiens
tcactgtgtccccca

SEQ ID NO: 815057 - DNA, 15 bp, Homo sapiens
cactgtgtcccccag

SEQ ID NO: 815058 - DNA, 15 bp, Homo sapiens
actgtgtcccccagg

SEQ ID NO: 815059 - DNA, 15 bp, Homo sapiens
ctgtgtcccccaggc

SEQ ID NO: 815060 - DNA, 15 bp, Homo sapiens
tgtgtcccccaggct

SEQ ID NO: 815061 - DNA, 15 bp, Homo sapiens
gtgtcccccaggctg

SEQ ID NO: 815062 - DNA, 15 bp, Homo sapiens
tgtcccccaggctgg

SEQ ID NO: 815063 - DNA, 15 bp, Homo sapiens
gtcccccaggctgga

SEQ ID NO: 815064 - DNA, 15 bp, Homo sapiens
tcccccaggctggaa

SEQ ID NO: 815065 - DNA, 15 bp, Homo sapiens
cccccaggctggaat

SEQ ID NO: 815066 - DNA, 15 bp, Homo sapiens
ccccaggctggaatg

SEQ ID NO: 815067 - DNA, 15 bp, Homo sapiens
caggctggaatgcag

SEQ ID NO: 815068 - DNA, 15 bp, Homo sapiens
aggctggaatgcagt

SEQ ID NO: 815069 - DNA, 15 bp, Homo sapiens
ggctggaatgcagtg

SEQ ID NO: 815070 - DNA, 15 bp, Homo sapiens
gctggaatgcagtga

SEQ ID NO: 815071 - DNA, 15 bp, Homo sapiens
ctggaatgcagtgat

SEQ ID NO: 815072 - DNA, 15 bp, Homo sapiens
tggaatgcagtgatg

SEQ ID NO: 815073 - DNA, 15 bp, Homo sapiens
ggaatgcagtgatgt

SEQ ID NO: 815074 - DNA, 15 bp, Homo sapiens
gaatgcagtgatgtg

SEQ ID NO: 815075 - DNA, 15 bp, Homo sapiens
aatgcagtgatgtga

SEQ ID NO: 815076 - DNA, 15 bp, Homo sapiens
atgcagtgatgtgat

SEQ ID NO: 815077 - DNA, 15 bp, Homo sapiens
tgcagtgatgtgatc

SEQ ID NO: 815078 - DNA, 15 bp, Homo sapiens
gcagtgatgtgatct

SEQ ID NO: 815079 - DNA, 15 bp, Homo sapiens
cagtgatgtgatctt

SEQ ID NO: 815080 - DNA, 15 bp, Homo sapiens
agtgatgtgatcttg

SEQ ID NO: 815081 - DNA, 15 bp, Homo sapiens
gtgatgtgatcttgg

SEQ ID NO: 815082 - DNA, 15 bp, Homo sapiens
tgatgtgatcttggc

SEQ ID NO: 815083 - DNA, 15 bp, Homo sapiens
gatgtgatcttggct

SEQ ID NO: 815084 - DNA, 15 bp, Homo sapiens
atgtgatcttggctt

SEQ ID NO: 815085 - DNA, 15 bp, Homo sapiens
tgtgatcttggcttg

SEQ ID NO: 815086 - DNA, 15 bp, Homo sapiens
gtgatcttggcttgc

SEQ ID NO: 815087 - DNA, 15 bp, Homo sapiens
tgatcttggcttgct

SEQ ID NO: 815088 - DNA, 15 bp, Homo sapiens
gatcttggcttgctg

SEQ ID NO: 815089 - DNA, 15 bp, Homo sapiens
atcttggcttgctgc

SEQ ID NO: 815090 - DNA, 15 bp, Homo sapiens
tcttggcttgctgca

SEQ ID NO: 815091 - DNA, 15 bp, Homo sapiens
cttggcttgctgcaa

SEQ ID NO: 815092 - DNA, 15 bp, Homo sapiens
ttggcttgctgcaac

SEQ ID NO: 815093 - DNA, 15 bp, Homo sapiens
tggcttgctgcaact

SEQ ID NO: 815094 - DNA, 15 bp, Homo sapiens
ggcttgctgcaactt

SEQ ID NO: 815095 - DNA, 15 bp, Homo sapiens
gcttgctgcaacttc

SEQ ID NO: 815096 - DNA, 15 bp, Homo sapiens
cttgctgcaacttcc

SEQ ID NO: 815097 - DNA, 15 bp, Homo sapiens
ttgctgcaacttcca

SEQ ID NO: 815098 - DNA, 15 bp, Homo sapiens
tgctgcaacttccac

SEQ ID NO: 815099 - DNA, 15 bp, Homo sapiens
gctgcaacttccacc

SEQ ID NO: 815100 - DNA, 15 bp, Homo sapiens
ctgcaacttccacct

SEQ ID NO: 815101 - DNA, 15 bp, Homo sapiens
tgcaacttccacctc

SEQ ID NO: 815102 - DNA, 15 bp, Homo sapiens
gcaacttccacctca

SEQ ID NO: 815103 - DNA, 15 bp, Homo sapiens
caacttccacctcat

SEQ ID NO: 815104 - DNA, 15 bp, Homo sapiens
aacttccacctcatg

SEQ ID NO: 815105 - DNA, 15 bp, Homo sapiens
acttccacctcatgg

SEQ ID NO: 815106 - DNA, 15 bp, Homo sapiens
cttccacctcatgga

SEQ ID NO: 815107 - DNA, 15 bp, Homo sapiens
ttccacctcatggat

SEQ ID NO: 815108 - DNA, 15 bp, Homo sapiens
tccacctcatggatt

SEQ ID NO: 815109 - DNA, 15 bp, Homo sapiens
ccacctcatggattc

SEQ ID NO: 815110 - DNA, 15 bp, Homo sapiens
cacctcatggattca

SEQ ID NO: 815111 - DNA, 15 bp, Homo sapiens
acctcatggattcaa

SEQ ID NO: 815112 - DNA, 15 bp, Homo sapiens
cctcatggattcaag

SEQ ID NO: 815113 - DNA, 15 bp, Homo sapiens
ctcatggattcaagt

SEQ ID NO: 815114 - DNA, 15 bp, Homo sapiens
tcatggattcaagtg

SEQ ID NO: 815115 - DNA, 15 bp, Homo sapiens
catggattcaagtga

SEQ ID NO: 815116 - DNA, 15 bp, Homo sapiens
atggattcaagtgat

SEQ ID NO: 815117 - DNA, 15 bp, Homo sapiens
tggattcaagtgatt

SEQ ID NO: 815118 - DNA, 15 bp, Homo sapiens
aagtgattctcctga

SEQ ID NO: 815119 - DNA, 15 bp, Homo sapiens
agtgattctcctgac

SEQ ID NO: 815120 - DNA, 15 bp, Homo sapiens
gtgattctcctgact

SEQ ID NO: 815121 - DNA, 15 bp, Homo sapiens
tgattctcctgactc

SEQ ID NO: 815122 - DNA, 15 bp, Homo sapiens
gattctcctgactca

SEQ ID NO: 815123 - DNA, 15 bp, Homo sapiens
attctcctgactcag

SEQ ID NO: 815124 - DNA, 15 bp, Homo sapiens
ttctcctgactcagt

SEQ ID NO: 815125 - DNA, 15 bp, Homo sapiens
tctcctgactcagtc

SEQ ID NO: 815126 - DNA, 15 bp, Homo sapiens
ctcctgactcagtct

SEQ ID NO: 815127 - DNA, 15 bp, Homo sapiens
tcctgactcagtctc

SEQ ID NO: 815128 - DNA, 15 bp, Homo sapiens
cctgactcagtctcc

SEQ ID NO: 815129 - DNA, 15 bp, Homo sapiens
ctgactcagtctccc

SEQ ID NO: 815130 - DNA, 15 bp, Homo sapiens
tgactcagtctccca

SEQ ID NO: 815131 - DNA, 15 bp, Homo sapiens
gactcagtctcccaa

SEQ ID NO: 815132 - DNA, 15 bp, Homo sapiens
actcagtctcccaag

SEQ ID NO: 815133 - DNA, 15 bp, Homo sapiens
agtctcccaagtagc

SEQ ID NO: 815134 - DNA, 15 bp, Homo sapiens
gtctcccaagtagct

SEQ ID NO: 815135 - DNA, 15 bp, Homo sapiens
tctcccaagtagctg

SEQ ID NO: 815136 - DNA, 15 bp, Homo sapiens
gctgggattatagga

SEQ ID NO: 815137 - DNA, 15 bp, Homo sapiens
ctgggattataggaa

SEQ ID NO: 815138 - DNA, 15 bp, Homo sapiens
tgggattataggaac

SEQ ID NO: 815139 - DNA, 15 bp, Homo sapiens
gggattataggaacc

SEQ ID NO: 815140 - DNA, 15 bp, Homo sapiens
ggattataggaaccc

SEQ ID NO: 815141 - DNA, 15 bp, Homo sapiens
gattataggaacccg

SEQ ID NO: 815142 - DNA, 15 bp, Homo sapiens
attataggaacccgc

SEQ ID NO: 815143 - DNA, 15 bp, Homo sapiens
ttataggaacccgcc

SEQ ID NO: 815144 - DNA, 15 bp, Homo sapiens
tataggaacccgcca

SEQ ID NO: 815145 - DNA, 15 bp, Homo sapiens
ataggaacccgccac

SEQ ID NO: 815146 - DNA, 15 bp, Homo sapiens
taggaacccgccacc

SEQ ID NO: 815147 - DNA, 15 bp, Homo sapiens
aggaacccgccacca

SEQ ID NO: 815148 - DNA, 15 bp, Homo sapiens
ggaacccgccaccat

SEQ ID NO: 815149 - DNA, 15 bp, Homo sapiens
gaacccgccaccatg

SEQ ID NO: 815150 - DNA, 15 bp, Homo sapiens
aacccgccaccatgc

SEQ ID NO: 815151 - DNA, 15 bp, Homo sapiens
acccgccaccatgcc

SEQ ID NO: 815152 - DNA, 15 bp, Homo sapiens
cccgccaccatgccc

SEQ ID NO: 815153 - DNA, 15 bp, Homo sapiens
ccgccaccatgccca

SEQ ID NO: 815154 - DNA, 15 bp, Homo sapiens
cgccaccatgcccag

SEQ ID NO: 815155 - DNA, 15 bp, Homo sapiens
ctaatttttgtattc

SEQ ID NO: 815156 - DNA, 15 bp, Homo sapiens
taatttttgtattct

SEQ ID NO: 815157 - DNA, 15 bp, Homo sapiens
aatttttgtattcta

SEQ ID NO: 815158 - DNA, 15 bp, Homo sapiens
atttttgtattctat

SEQ ID NO: 815159 - DNA, 15 bp, Homo sapiens
tttttgtattctatt

SEQ ID NO: 815160 - DNA, 15 bp, Homo sapiens
ttttgtattctatta

SEQ ID NO: 815161 - DNA, 15 bp, Homo sapiens
tttgtattctattag

SEQ ID NO: 815162 - DNA, 15 bp, Homo sapiens
ttgtattctattaga

SEQ ID NO: 815163 - DNA, 15 bp, Homo sapiens
tgtattctattagag

SEQ ID NO: 815164 - DNA, 15 bp, Homo sapiens
gtattctattagaga

SEQ ID NO: 815165 - DNA, 15 bp, Homo sapiens
tattctattagagat

SEQ ID NO: 815166 - DNA, 15 bp, Homo sapiens
attctattagagatg

SEQ ID NO: 815167 - DNA, 15 bp, Homo sapiens
ttctattagagatga

SEQ ID NO: 815168 - DNA, 15 bp, Homo sapiens
tctattagagatgag

SEQ ID NO: 815169 - DNA, 15 bp, Homo sapiens
ctattagagatgagg

SEQ ID NO: 815170 - DNA, 15 bp, Homo sapiens
attagagatgaggtt

SEQ ID NO: 815171 - DNA, 15 bp, Homo sapiens
ttagagatgaggttt

SEQ ID NO: 815172 - DNA, 15 bp, Homo sapiens
tagagatgaggtttc

SEQ ID NO: 815173 - DNA, 15 bp, Homo sapiens
agagatgaggtttca

SEQ ID NO: 815174 - DNA, 15 bp, Homo sapiens
gagatgaggtttcac

SEQ ID NO: 815175 - DNA, 15 bp, Homo sapiens
agatgaggtttcact

SEQ ID NO: 815176 - DNA, 15 bp, Homo sapiens
gatgaggtttcacta

SEQ ID NO: 815177 - DNA, 15 bp, Homo sapiens
atgaggtttcactat

SEQ ID NO: 815178 - DNA, 15 bp, Homo sapiens
tgaggtttcactatg

SEQ ID NO: 815179 - DNA, 15 bp, Homo sapiens
gaggtttcactatgt

SEQ ID NO: 815180 - DNA, 15 bp, Homo sapiens
aggtttcactatgtt

SEQ ID NO: 815181 - DNA, 15 bp, Homo sapiens
gtttcactatgttgg

SEQ ID NO: 815182 - DNA, 15 bp, Homo sapiens
tttcactatgttggc

SEQ ID NO: 815183 - DNA, 15 bp, Homo sapiens
ttcactatgttggcc

SEQ ID NO: 815184 - DNA, 15 bp, Homo sapiens
tcactatgttggcca

SEQ ID NO: 815185 - DNA, 15 bp, Homo sapiens
cactatgttggccag

SEQ ID NO: 815186 - DNA, 15 bp, Homo sapiens
actatgttggccaga

SEQ ID NO: 815187 - DNA, 15 bp, Homo sapiens
ctatgttggccagac

SEQ ID NO: 815188 - DNA, 15 bp, Homo sapiens
tatgttggccagact

SEQ ID NO: 815189 - DNA, 15 bp, Homo sapiens
atgttggccagactg

SEQ ID NO: 815190 - DNA, 15 bp, Homo sapiens
tgttggccagactgg

SEQ ID NO: 815191 - DNA, 15 bp, Homo sapiens
gttggccagactggt

SEQ ID NO: 815192 - DNA, 15 bp, Homo sapiens
ttggccagactggtc

SEQ ID NO: 815193 - DNA, 15 bp, Homo sapiens
tggccagactggtct

SEQ ID NO: 815194 - DNA, 15 bp, Homo sapiens
ggccagactggtctc

SEQ ID NO: 815195 - DNA, 15 bp, Homo sapiens
gccagactggtctcg

SEQ ID NO: 815196 - DNA, 15 bp, Homo sapiens
ccagactggtctcgg

SEQ ID NO: 815197 - DNA, 15 bp, Homo sapiens
cagactggtctcgga

SEQ ID NO: 815198 - DNA, 15 bp, Homo sapiens
agactggtctcggat

SEQ ID NO: 815199 - DNA, 15 bp, Homo sapiens
gactggtctcggatt

SEQ ID NO: 815200 - DNA, 15 bp, Homo sapiens
actggtctcggattc

SEQ ID NO: 815201 - DNA, 15 bp, Homo sapiens
ctggtctcggattcc

SEQ ID NO: 815202 - DNA, 15 bp, Homo sapiens
tggtctcggattcct

SEQ ID NO: 815203 - DNA, 15 bp, Homo sapiens
ggtctcggattcctg

SEQ ID NO: 815204 - DNA, 15 bp, Homo sapiens
gtctcggattcctga

SEQ ID NO: 815205 - DNA, 15 bp, Homo sapiens
tctcggattcctgac

SEQ ID NO: 815206 - DNA, 15 bp, Homo sapiens
ctcggattcctgact

SEQ ID NO: 815207 - DNA, 15 bp, Homo sapiens
tcggattcctgactt

SEQ ID NO: 815208 - DNA, 15 bp, Homo sapiens
cggattcctgacttc

SEQ ID NO: 815209 - DNA, 15 bp, Homo sapiens
ggattcctgacttca

SEQ ID NO: 815210 - DNA, 15 bp, Homo sapiens
gattcctgacttcaa

SEQ ID NO: 815211 - DNA, 15 bp, Homo sapiens
attcctgacttcaag

SEQ ID NO: 815212 - DNA, 15 bp, Homo sapiens
ttcctgacttcaagt

SEQ ID NO: 815213 - DNA, 15 bp, Homo sapiens
tcctgacttcaagtg

SEQ ID NO: 815214 - DNA, 15 bp, Homo sapiens
cctgacttcaagtga

SEQ ID NO: 815215 - DNA, 15 bp, Homo sapiens
ctgacttcaagtgat

SEQ ID NO: 815216 - DNA, 15 bp, Homo sapiens
tgacttcaagtgatc

SEQ ID NO: 815217 - DNA, 15 bp, Homo sapiens
gacttcaagtgatct

SEQ ID NO: 815218 - DNA, 15 bp, Homo sapiens
acttcaagtgatctg

SEQ ID NO: 815219 - DNA, 15 bp, Homo sapiens
cttcaagtgatctgc

SEQ ID NO: 815220 - DNA, 15 bp, Homo sapiens
ttcaagtgatctgcc

SEQ ID NO: 815221 - DNA, 15 bp, Homo sapiens
tcaagtgatctgccc

SEQ ID NO: 815222 - DNA, 15 bp, Homo sapiens
caagtgatctgcccg

SEQ ID NO: 815223 - DNA, 15 bp, Homo sapiens
aagtgatctgcccgc

SEQ ID NO: 815224 - DNA, 15 bp, Homo sapiens
agtgatctgcccgcc

SEQ ID NO: 815225 - DNA, 15 bp, Homo sapiens
acaggtgtgagccat

SEQ ID NO: 815226 - DNA, 15 bp, Homo sapiens
caggtgtgagccatc

SEQ ID NO: 815227 - DNA, 15 bp, Homo sapiens
aggtgtgagccatca

SEQ ID NO: 815228 - DNA, 15 bp, Homo sapiens
ggtgtgagccatcac

SEQ ID NO: 815229 - DNA, 15 bp, Homo sapiens
gtgtgagccatcacg

SEQ ID NO: 815230 - DNA, 15 bp, Homo sapiens
tgtgagccatcacgc

SEQ ID NO: 815231 - DNA, 15 bp, Homo sapiens
gtgagccatcacgcc

SEQ ID NO: 815232 - DNA, 15 bp, Homo sapiens
tgagccatcacgcct

SEQ ID NO: 815233 - DNA, 15 bp, Homo sapiens
gagccatcacgccta

SEQ ID NO: 815234 - DNA, 15 bp, Homo sapiens
agccatcacgcctag

SEQ ID NO: 815235 - DNA, 15 bp, Homo sapiens
gccatcacgcctagc

SEQ ID NO: 815236 - DNA, 15 bp, Homo sapiens
ccatcacgcctagcc

SEQ ID NO: 815237 - DNA, 15 bp, Homo sapiens
catcacgcctagcct

SEQ ID NO: 815238 - DNA, 15 bp, Homo sapiens
atcacgcctagccta

SEQ ID NO: 815239 - DNA, 15 bp, Homo sapiens
tcacgcctagcctaa

SEQ ID NO: 815240 - DNA, 15 bp, Homo sapiens
cacgcctagcctaat

SEQ ID NO: 815241 - DNA, 15 bp, Homo sapiens
acgcctagcctaatt

SEQ ID NO: 815242 - DNA, 15 bp, Homo sapiens
cgcctagcctaattt

SEQ ID NO: 815243 - DNA, 15 bp, Homo sapiens
gcctagcctaattta

SEQ ID NO: 815244 - DNA, 15 bp, Homo sapiens
cctagcctaatttaa

SEQ ID NO: 815245 - DNA, 15 bp, Homo sapiens
ctagcctaatttaag

SEQ ID NO: 815246 - DNA, 15 bp, Homo sapiens
tagcctaatttaagt

SEQ ID NO: 815247 - DNA, 15 bp, Homo sapiens
agcctaatttaagtt

SEQ ID NO: 815248 - DNA, 15 bp, Homo sapiens
gcctaatttaagttc

SEQ ID NO: 815249 - DNA, 15 bp, Homo sapiens
cacttgcaggtaata

SEQ ID NO: 815250 - DNA, 15 bp, Homo sapiens
acttgcaggtaataa

SEQ ID NO: 815251 - DNA, 15 bp, Homo sapiens
cttgcaggtaataac

SEQ ID NO: 815252 - DNA, 15 bp, Homo sapiens
ttgcaggtaataacg

SEQ ID NO: 815253 - DNA, 15 bp, Homo sapiens
tgcaggtaataacgg

SEQ ID NO: 815254 - DNA, 15 bp, Homo sapiens
gcaggtaataacggt

SEQ ID NO: 815255 - DNA, 15 bp, Homo sapiens
caggtaataacggtg

SEQ ID NO: 815256 - DNA, 15 bp, Homo sapiens
aggtaataacggtgt

SEQ ID NO: 815257 - DNA, 15 bp, Homo sapiens
ggtaataacggtgtc

SEQ ID NO: 815258 - DNA, 15 bp, Homo sapiens
gtaataacggtgtca

SEQ ID NO: 815259 - DNA, 15 bp, Homo sapiens
taataacggtgtcag

SEQ ID NO: 815260 - DNA, 15 bp, Homo sapiens
aataacggtgtcagg

SEQ ID NO: 815261 - DNA, 15 bp, Homo sapiens
ataacggtgtcaggt

SEQ ID NO: 815262 - DNA, 15 bp, Homo sapiens
taacggtgtcaggtt

SEQ ID NO: 815263 - DNA, 15 bp, Homo sapiens
aacggtgtcaggtta

SEQ ID NO: 815264 - DNA, 15 bp, Homo sapiens
acggtgtcaggttaa

SEQ ID NO: 815265 - DNA, 15 bp, Homo sapiens
cggtgtcaggttaac

SEQ ID NO: 815266 - DNA, 15 bp, Homo sapiens
ggtgtcaggttaaca

SEQ ID NO: 815267 - DNA, 15 bp, Homo sapiens
gtgtcaggttaacag

SEQ ID NO: 815268 - DNA, 15 bp, Homo sapiens
tgtcaggttaacagc

SEQ ID NO: 815269 - DNA, 15 bp, Homo sapiens
gtcaggttaacagca

SEQ ID NO: 815270 - DNA, 15 bp, Homo sapiens
tcaggttaacagcag

SEQ ID NO: 815271 - DNA, 15 bp, Homo sapiens
caggttaacagcagt

SEQ ID NO: 815272 - DNA, 15 bp, Homo sapiens
aggttaacagcagtg

SEQ ID NO: 815273 - DNA, 15 bp, Homo sapiens
ggttaacagcagtga

SEQ ID NO: 815274 - DNA, 15 bp, Homo sapiens
gttaacagcagtgac

SEQ ID NO: 815275 - DNA, 15 bp, Homo sapiens
ttaacagcagtgaca

SEQ ID NO: 815276 - DNA, 15 bp, Homo sapiens
taacagcagtgacac

SEQ ID NO: 815277 - DNA, 15 bp, Homo sapiens
aacagcagtgacaca

SEQ ID NO: 815278 - DNA, 15 bp, Homo sapiens
acagcagtgacacat

SEQ ID NO: 815279 - DNA, 15 bp, Homo sapiens
cagcagtgacacatc

SEQ ID NO: 815280 - DNA, 15 bp, Homo sapiens
agcagtgacacatct

SEQ ID NO: 815281 - DNA, 15 bp, Homo sapiens
gcagtgacacatctt

SEQ ID NO: 815282 - DNA, 15 bp, Homo sapiens
cagtgacacatcttc

SEQ ID NO: 815283 - DNA, 15 bp, Homo sapiens
agtgacacatcttct

SEQ ID NO: 815284 - DNA, 15 bp, Homo sapiens
gtgacacatcttcta

SEQ ID NO: 815285 - DNA, 15 bp, Homo sapiens
tgacacatcttctat

SEQ ID NO: 815286 - DNA, 15 bp, Homo sapiens
gacacatcttctatt

SEQ ID NO: 815287 - DNA, 15 bp, Homo sapiens
acacatcttctattt

SEQ ID NO: 815288 - DNA, 15 bp, Homo sapiens
cacatcttctatttc

SEQ ID NO: 815289 - DNA, 15 bp, Homo sapiens
acatcttctatttca

SEQ ID NO: 815290 - DNA, 15 bp, Homo sapiens
catcttctatttcag

SEQ ID NO: 815291 - DNA, 15 bp, Homo sapiens
atcttctatttcagg

SEQ ID NO: 815292 - DNA, 15 bp, Homo sapiens
tcttctatttcagga

SEQ ID NO: 815293 - DNA, 15 bp, Homo sapiens
cttctatttcaggaa

SEQ ID NO: 815294 - DNA, 15 bp, Homo sapiens
ttctatttcaggaag

SEQ ID NO: 815295 - DNA, 15 bp, Homo sapiens
tctatttcaggaagg

SEQ ID NO: 815296 - DNA, 15 bp, Homo sapiens
ctatttcaggaagga

SEQ ID NO: 815297 - DNA, 15 bp, Homo sapiens
tatttcaggaaggat

SEQ ID NO: 815298 - DNA, 15 bp, Homo sapiens
atttcaggaaggatt

SEQ ID NO: 815299 - DNA, 15 bp, Homo sapiens
tttcaggaaggattg

SEQ ID NO: 815300 - DNA, 15 bp, Homo sapiens
ttcaggaaggattga

SEQ ID NO: 815301 - DNA, 15 bp, Homo sapiens
tcaggaaggattgaa

SEQ ID NO: 815302 - DNA, 15 bp, Homo sapiens
caggaaggattgaat

SEQ ID NO: 815303 - DNA, 15 bp, Homo sapiens
aggaaggattgaatt

SEQ ID NO: 815304 - DNA, 15 bp, Homo sapiens
ggaaggattgaattg

SEQ ID NO: 815305 - DNA, 15 bp, Homo sapiens
gaaggattgaattgg

SEQ ID NO: 815306 - DNA, 15 bp, Homo sapiens
aaggattgaattggc

SEQ ID NO: 815307 - DNA, 15 bp, Homo sapiens
aggattgaattggct

SEQ ID NO: 815308 - DNA, 15 bp, Homo sapiens
ggattgaattggctc

SEQ ID NO: 815309 - DNA, 15 bp, Homo sapiens
gattgaattggctct

SEQ ID NO: 815310 - DNA, 15 bp, Homo sapiens
attgaattggctctt

SEQ ID NO: 815311 - DNA, 15 bp, Homo sapiens
ttgaattggctcttc

SEQ ID NO: 815312 - DNA, 15 bp, Homo sapiens
tgaattggctcttcc

SEQ ID NO: 815313 - DNA, 15 bp, Homo sapiens
gaattggctcttcct

SEQ ID NO: 815314 - DNA, 15 bp, Homo sapiens
aattggctcttcctg

SEQ ID NO: 815315 - DNA, 15 bp, Homo sapiens
attggctcttcctgg

SEQ ID NO: 815316 - DNA, 15 bp, Homo sapiens
ttggctcttcctgga

SEQ ID NO: 815317 - DNA, 15 bp, Homo sapiens
tggctcttcctggat

SEQ ID NO: 815318 - DNA, 15 bp, Homo sapiens
ggctcttcctggata

SEQ ID NO: 815319 - DNA, 15 bp, Homo sapiens
gctcttcctggatat

SEQ ID NO: 815320 - DNA, 15 bp, Homo sapiens
ctcttcctggatatt

SEQ ID NO: 815321 - DNA, 15 bp, Homo sapiens
tcttcctggatattc

SEQ ID NO: 815322 - DNA, 15 bp, Homo sapiens
cttcctggatattca

SEQ ID NO: 815323 - DNA, 15 bp, Homo sapiens
ttcctggatattcat

SEQ ID NO: 815324 - DNA, 15 bp, Homo sapiens
tcctggatattcatt

SEQ ID NO: 815325 - DNA, 15 bp, Homo sapiens
cctggatattcattt

SEQ ID NO: 815326 - DNA, 15 bp, Homo sapiens
ctggatattcatttg

SEQ ID NO: 815327 - DNA, 15 bp, Homo sapiens
tggatattcatttgc

SEQ ID NO: 815328 - DNA, 15 bp, Homo sapiens
ggatattcatttgct

SEQ ID NO: 815329 - DNA, 15 bp, Homo sapiens
gatattcatttgctg

SEQ ID NO: 815330 - DNA, 15 bp, Homo sapiens
atattcatttgctga

SEQ ID NO: 815331 - DNA, 15 bp, Homo sapiens
tattcatttgctgag

SEQ ID NO: 815332 - DNA, 15 bp, Homo sapiens
attcatttgctgagg

SEQ ID NO: 815333 - DNA, 15 bp, Homo sapiens
ttcatttgctgaggc

SEQ ID NO: 815334 - DNA, 15 bp, Homo sapiens
tcatttgctgaggct

SEQ ID NO: 815335 - DNA, 15 bp, Homo sapiens
catttgctgaggctt

SEQ ID NO: 815336 - DNA, 15 bp, Homo sapiens
atttgctgaggcttc

SEQ ID NO: 815337 - DNA, 15 bp, Homo sapiens
tttgctgaggcttca

SEQ ID NO: 815338 - DNA, 15 bp, Homo sapiens
ttgctgaggcttcaa

SEQ ID NO: 815339 - DNA, 15 bp, Homo sapiens
tgctgaggcttcaat

SEQ ID NO: 815340 - DNA, 15 bp, Homo sapiens
gctgaggcttcaatt

SEQ ID NO: 815341 - DNA, 15 bp, Homo sapiens
ctgaggcttcaattc

SEQ ID NO: 815342 - DNA, 15 bp, Homo sapiens
tgaggcttcaattcc

SEQ ID NO: 815343 - DNA, 15 bp, Homo sapiens
gaggcttcaattcca

SEQ ID NO: 815344 - DNA, 15 bp, Homo sapiens
aggcttcaattccag

SEQ ID NO: 815345 - DNA, 15 bp, Homo sapiens
ggcttcaattccagg

SEQ ID NO: 815346 - DNA, 15 bp, Homo sapiens
gcttcaattccagga

SEQ ID NO: 815347 - DNA, 15 bp, Homo sapiens
cttcaattccaggag

SEQ ID NO: 815348 - DNA, 15 bp, Homo sapiens
ttcaattccaggaga

SEQ ID NO: 815349 - DNA, 15 bp, Homo sapiens
tcaattccaggagat

SEQ ID NO: 815350 - DNA, 15 bp, Homo sapiens
caattccaggagatt

SEQ ID NO: 815351 - DNA, 15 bp, Homo sapiens
aattccaggagattt

SEQ ID NO: 815352 - DNA, 15 bp, Homo sapiens
attccaggagatttt

SEQ ID NO: 815353 - DNA, 15 bp, Homo sapiens
ttccaggagatttta

SEQ ID NO: 815354 - DNA, 15 bp, Homo sapiens
tccaggagattttat

SEQ ID NO: 815355 - DNA, 15 bp, Homo sapiens
ccaggagattttatt

SEQ ID NO: 815356 - DNA, 15 bp, Homo sapiens
caggagattttattc

SEQ ID NO: 815357 - DNA, 15 bp, Homo sapiens
aggagattttattct

SEQ ID NO: 815358 - DNA, 15 bp, Homo sapiens
ggagattttattctt

SEQ ID NO: 815359 - DNA, 15 bp, Homo sapiens
gagattttattcttt

SEQ ID NO: 815360 - DNA, 15 bp, Homo sapiens
agattttattctttg

SEQ ID NO: 815361 - DNA, 15 bp, Homo sapiens
gattttattctttgc

SEQ ID NO: 815362 - DNA, 15 bp, Homo sapiens
attttattctttgca

SEQ ID NO: 815363 - DNA, 15 bp, Homo sapiens
ttttattctttgcac

SEQ ID NO: 815364 - DNA, 15 bp, Homo sapiens
tttattctttgcaca

SEQ ID NO: 815365 - DNA, 15 bp, Homo sapiens
ttattctttgcacat

SEQ ID NO: 815366 - DNA, 15 bp, Homo sapiens
tattctttgcacatt

SEQ ID NO: 815367 - DNA, 15 bp, Homo sapiens
attctttgcacattt

SEQ ID NO: 815368 - DNA, 15 bp, Homo sapiens
ttctttgcacatttc

SEQ ID NO: 815369 - DNA, 15 bp, Homo sapiens
tctttgcacatttct

SEQ ID NO: 815370 - DNA, 15 bp, Homo sapiens
ctttgcacatttctc

SEQ ID NO: 815371 - DNA, 15 bp, Homo sapiens
tttgcacatttctct

SEQ ID NO: 815372 - DNA, 15 bp, Homo sapiens
ttgcacatttctctg

SEQ ID NO: 815373 - DNA, 15 bp, Homo sapiens
tgcacatttctctgt

SEQ ID NO: 815374 - DNA, 15 bp, Homo sapiens
gcacatttctctgtt

SEQ ID NO: 815375 - DNA, 15 bp, Homo sapiens
cacatttctctgttt

SEQ ID NO: 815376 - DNA, 15 bp, Homo sapiens
acatttctctgtttt

SEQ ID NO: 815377 - DNA, 15 bp, Homo sapiens
catttctctgttttc

SEQ ID NO: 815378 - DNA, 15 bp, Homo sapiens
atttctctgttttct

SEQ ID NO: 815379 - DNA, 15 bp, Homo sapiens
tttctctgttttctt

SEQ ID NO: 815380 - DNA, 15 bp, Homo sapiens
ttctctgttttcttt

SEQ ID NO: 815381 - DNA, 15 bp, Homo sapiens
tctctgttttctttt

SEQ ID NO: 815382 - DNA, 15 bp, Homo sapiens
ctctgttttcttttt

SEQ ID NO: 815383 - DNA, 15 bp, Homo sapiens
tctgttttctttttg

SEQ ID NO: 815384 - DNA, 15 bp, Homo sapiens
ctgttttctttttgt

SEQ ID NO: 815385 - DNA, 15 bp, Homo sapiens
tgttttctttttgtt

SEQ ID NO: 815386 - DNA, 15 bp, Homo sapiens
gttttctttttgttc

SEQ ID NO: 815387 - DNA, 15 bp, Homo sapiens
ttttctttttgttcc

SEQ ID NO: 815388 - DNA, 15 bp, Homo sapiens
tttctttttgttcct

SEQ ID NO: 815389 - DNA, 15 bp, Homo sapiens
ttctttttgttcctg

SEQ ID NO: 815390 - DNA, 15 bp, Homo sapiens
tctttttgttcctgt

SEQ ID NO: 815391 - DNA, 15 bp, Homo sapiens
ctttttgttcctgtt

SEQ ID NO: 815392 - DNA, 15 bp, Homo sapiens
tttttgttcctgtta

SEQ ID NO: 815393 - DNA, 15 bp, Homo sapiens
ttttgttcctgttag

SEQ ID NO: 815394 - DNA, 15 bp, Homo sapiens
tttgttcctgttaga

SEQ ID NO: 815395 - DNA, 15 bp, Homo sapiens
ttgttcctgttagag

SEQ ID NO: 815396 - DNA, 15 bp, Homo sapiens
tgttcctgttagagg

SEQ ID NO: 815397 - DNA, 15 bp, Homo sapiens
gttcctgttagaggc

SEQ ID NO: 815398 - DNA, 15 bp, Homo sapiens
ttcctgttagaggca

SEQ ID NO: 815399 - DNA, 15 bp, Homo sapiens
tcctgttagaggcag

SEQ ID NO: 815400 - DNA, 15 bp, Homo sapiens
cctgttagaggcagc

SEQ ID NO: 815401 - DNA, 15 bp, Homo sapiens
ctgttagaggcagct

SEQ ID NO: 815402 - DNA, 15 bp, Homo sapiens
tgttagaggcagctt

SEQ ID NO: 815403 - DNA, 15 bp, Homo sapiens
gttagaggcagcttc

SEQ ID NO: 815404 - DNA, 15 bp, Homo sapiens
ttagaggcagcttct

SEQ ID NO: 815405 - DNA, 15 bp, Homo sapiens
tagaggcagcttctc

SEQ ID NO: 815406 - DNA, 15 bp, Homo sapiens
agaggcagcttctca

SEQ ID NO: 815407 - DNA, 15 bp, Homo sapiens
gaggcagcttctcag

SEQ ID NO: 815408 - DNA, 15 bp, Homo sapiens
aggcagcttctcaga

SEQ ID NO: 815409 - DNA, 15 bp, Homo sapiens
ggcagcttctcagaa

SEQ ID NO: 815410 - DNA, 15 bp, Homo sapiens
gcagcttctcagaat

SEQ ID NO: 815411 - DNA, 15 bp, Homo sapiens
cagcttctcagaatg

SEQ ID NO: 815412 - DNA, 15 bp, Homo sapiens
agcttctcagaatga

SEQ ID NO: 815413 - DNA, 15 bp, Homo sapiens
gcttctcagaatgat

SEQ ID NO: 815414 - DNA, 15 bp, Homo sapiens
cttctcagaatgata

SEQ ID NO: 815415 - DNA, 15 bp, Homo sapiens
ttctcagaatgataa

SEQ ID NO: 815416 - DNA, 15 bp, Homo sapiens
tctcagaatgataaa

SEQ ID NO: 815417 - DNA, 15 bp, Homo sapiens
ctcagaatgataaaa

SEQ ID NO: 815418 - DNA, 15 bp, Homo sapiens
tcagaatgataaaaa

SEQ ID NO: 815419 - DNA, 15 bp, Homo sapiens
cagaatgataaaaac

SEQ ID NO: 815420 - DNA, 15 bp, Homo sapiens
agaatgataaaaact

SEQ ID NO: 815421 - DNA, 15 bp, Homo sapiens
gaatgataaaaactg

SEQ ID NO: 815422 - DNA, 15 bp, Homo sapiens
aatgataaaaactgt

SEQ ID NO: 815423 - DNA, 15 bp, Homo sapiens
atgataaaaactgtt

SEQ ID NO: 815424 - DNA, 15 bp, Homo sapiens
tgataaaaactgttg

SEQ ID NO: 815425 - DNA, 15 bp, Homo sapiens
gataaaaactgttga

SEQ ID NO: 815426 - DNA, 15 bp, Homo sapiens
ataaaaactgttgac

SEQ ID NO: 815427 - DNA, 15 bp, Homo sapiens
taaaaactgttgaca

SEQ ID NO: 815428 - DNA, 15 bp, Homo sapiens
aaaaactgttgacat

SEQ ID NO: 815429 - DNA, 15 bp, Homo sapiens
aaaactgttgacatg

SEQ ID NO: 815430 - DNA, 15 bp, Homo sapiens
aaactgttgacatgt

SEQ ID NO: 815431 - DNA, 15 bp, Homo sapiens
aactgttgacatgtt

SEQ ID NO: 815432 - DNA, 15 bp, Homo sapiens
actgttgacatgttc

SEQ ID NO: 815433 - DNA, 15 bp, Homo sapiens
ctgttgacatgttcc

SEQ ID NO: 815434 - DNA, 15 bp, Homo sapiens
tgttgacatgttcct

SEQ ID NO: 815435 - DNA, 15 bp, Homo sapiens
gttgacatgttcctt

SEQ ID NO: 815436 - DNA, 15 bp, Homo sapiens
ttgacatgttccttg

SEQ ID NO: 815437 - DNA, 15 bp, Homo sapiens
tgacatgttccttgc

SEQ ID NO: 815438 - DNA, 15 bp, Homo sapiens
gacatgttccttgca

SEQ ID NO: 815439 - DNA, 15 bp, Homo sapiens
acatgttccttgcaa

SEQ ID NO: 815440 - DNA, 15 bp, Homo sapiens
catgttccttgcaaa

SEQ ID NO: 815441 - DNA, 15 bp, Homo sapiens
atgttccttgcaaag

SEQ ID NO: 815442 - DNA, 15 bp, Homo sapiens
tgttccttgcaaagt

SEQ ID NO: 815443 - DNA, 15 bp, Homo sapiens
gttccttgcaaagtc

SEQ ID NO: 815444 - DNA, 15 bp, Homo sapiens
ttccttgcaaagtct

SEQ ID NO: 815445 - DNA, 15 bp, Homo sapiens
tccttgcaaagtctt

SEQ ID NO: 815446 - DNA, 15 bp, Homo sapiens
ccttgcaaagtcttt

SEQ ID NO: 815447 - DNA, 15 bp, Homo sapiens
cttgcaaagtctttg

SEQ ID NO: 815448 - DNA, 15 bp, Homo sapiens
ttgcaaagtctttgg

SEQ ID NO: 815449 - DNA, 15 bp, Homo sapiens
tgcaaagtctttggc

SEQ ID NO: 815450 - DNA, 15 bp, Homo sapiens
gcaaagtctttggca

SEQ ID NO: 815451 - DNA, 15 bp, Homo sapiens
caaagtctttggcat

SEQ ID NO: 815452 - DNA, 15 bp, Homo sapiens
aaagtctttggcatt

SEQ ID NO: 815453 - DNA, 15 bp, Homo sapiens
aagtctttggcattc

SEQ ID NO: 815454 - DNA, 15 bp, Homo sapiens
agtctttggcattct

SEQ ID NO: 815455 - DNA, 15 bp, Homo sapiens
gtctttggcattcta

SEQ ID NO: 815456 - DNA, 15 bp, Homo sapiens
tctttggcattctaa

SEQ ID NO: 815457 - DNA, 15 bp, Homo sapiens
ctttggcattctaag

SEQ ID NO: 815458 - DNA, 15 bp, Homo sapiens
tttggcattctaagg

SEQ ID NO: 815459 - DNA, 15 bp, Homo sapiens
ttggcattctaagga

SEQ ID NO: 815460 - DNA, 15 bp, Homo sapiens
tggcattctaaggat

SEQ ID NO: 815461 - DNA, 15 bp, Homo sapiens
ggcattctaaggatc

SEQ ID NO: 815462 - DNA, 15 bp, Homo sapiens
gcattctaaggatcc

SEQ ID NO: 815463 - DNA, 15 bp, Homo sapiens
cattctaaggatcca

SEQ ID NO: 815464 - DNA, 15 bp, Homo sapiens
attctaaggatccat

SEQ ID NO: 815465 - DNA, 15 bp, Homo sapiens
ttctaaggatccatc

SEQ ID NO: 815466 - DNA, 15 bp, Homo sapiens
tctaaggatccatcc

SEQ ID NO: 815467 - DNA, 15 bp, Homo sapiens
ctaaggatccatcct

SEQ ID NO: 815468 - DNA, 15 bp, Homo sapiens
taaggatccatcctt

SEQ ID NO: 815469 - DNA, 15 bp, Homo sapiens
aaggatccatcctta

SEQ ID NO: 815470 - DNA, 15 bp, Homo sapiens
aggatccatccttat

SEQ ID NO: 815471 - DNA, 15 bp, Homo sapiens
ggatccatccttatt

SEQ ID NO: 815472 - DNA, 15 bp, Homo sapiens
gatccatccttattg

SEQ ID NO: 815473 - DNA, 15 bp, Homo sapiens
atccatccttattgc

SEQ ID NO: 815474 - DNA, 15 bp, Homo sapiens
tccatccttattgcc

SEQ ID NO: 815475 - DNA, 15 bp, Homo sapiens
ccatccttattgcct

SEQ ID NO: 815476 - DNA, 15 bp, Homo sapiens
catccttattgcctc

SEQ ID NO: 815477 - DNA, 15 bp, Homo sapiens
atccttattgcctca

SEQ ID NO: 815478 - DNA, 15 bp, Homo sapiens
tccttattgcctcat

SEQ ID NO: 815479 - DNA, 15 bp, Homo sapiens
ccttattgcctcatt

SEQ ID NO: 815480 - DNA, 15 bp, Homo sapiens
cttattgcctcattt

SEQ ID NO: 815481 - DNA, 15 bp, Homo sapiens
ttattgcctcatttg

SEQ ID NO: 815482 - DNA, 15 bp, Homo sapiens
tattgcctcatttgg

SEQ ID NO: 815483 - DNA, 15 bp, Homo sapiens
attgcctcatttggc

SEQ ID NO: 815484 - DNA, 15 bp, Homo sapiens
ttgcctcatttggcc

SEQ ID NO: 815485 - DNA, 15 bp, Homo sapiens
tgcctcatttggcct

SEQ ID NO: 815486 - DNA, 15 bp, Homo sapiens
gcctcatttggcctt

SEQ ID NO: 815487 - DNA, 15 bp, Homo sapiens
cctcatttggccttg

SEQ ID NO: 815488 - DNA, 15 bp, Homo sapiens
ctcatttggccttga

SEQ ID NO: 815489 - DNA, 15 bp, Homo sapiens
tcatttggccttgac

SEQ ID NO: 815490 - DNA, 15 bp, Homo sapiens
catttggccttgact

SEQ ID NO: 815491 - DNA, 15 bp, Homo sapiens
atttggccttgactt

SEQ ID NO: 815492 - DNA, 15 bp, Homo sapiens
tttggccttgacttt

SEQ ID NO: 815493 - DNA, 15 bp, Homo sapiens
ttggccttgacttta

SEQ ID NO: 815494 - DNA, 15 bp, Homo sapiens
tggccttgactttac

SEQ ID NO: 815495 - DNA, 15 bp, Homo sapiens
ggccttgactttact

SEQ ID NO: 815496 - DNA, 15 bp, Homo sapiens
gccttgactttactt

SEQ ID NO: 815497 - DNA, 15 bp, Homo sapiens
ccttgactttacttc

SEQ ID NO: 815498 - DNA, 15 bp, Homo sapiens
cttgactttacttcc

SEQ ID NO: 815499 - DNA, 15 bp, Homo sapiens
ttgactttacttcca

SEQ ID NO: 815500 - DNA, 15 bp, Homo sapiens
tgactttacttccaa

SEQ ID NO: 815501 - DNA, 15 bp, Homo sapiens
gactttacttccaat

SEQ ID NO: 815502 - DNA, 15 bp, Homo sapiens
actttacttccaata

SEQ ID NO: 815503 - DNA, 15 bp, Homo sapiens
ctttacttccaatat

SEQ ID NO: 815504 - DNA, 15 bp, Homo sapiens
tttacttccaatata

SEQ ID NO: 815505 - DNA, 15 bp, Homo sapiens
ttacttccaatataa

SEQ ID NO: 815506 - DNA, 15 bp, Homo sapiens
tacttccaatataat

SEQ ID NO: 815507 - DNA, 15 bp, Homo sapiens
acttccaatataatt

SEQ ID NO: 815508 - DNA, 15 bp, Homo sapiens
cttccaatataattg

SEQ ID NO: 815509 - DNA, 15 bp, Homo sapiens
ttccaatataattgc

SEQ ID NO: 815510 - DNA, 15 bp, Homo sapiens
tccaatataattgcc

SEQ ID NO: 815511 - DNA, 15 bp, Homo sapiens
ccaatataattgccc

SEQ ID NO: 815512 - DNA, 15 bp, Homo sapiens
caatataattgccca

SEQ ID NO: 815513 - DNA, 15 bp, Homo sapiens
aatataattgcccat

SEQ ID NO: 815514 - DNA, 15 bp, Homo sapiens
atataattgcccatg

SEQ ID NO: 815515 - DNA, 15 bp, Homo sapiens
tataattgcccatga

SEQ ID NO: 815516 - DNA, 15 bp, Homo sapiens
ataattgcccatgac

SEQ ID NO: 815517 - DNA, 15 bp, Homo sapiens
taattgcccatgaca

SEQ ID NO: 815518 - DNA, 15 bp, Homo sapiens
attgcccatgacaac

SEQ ID NO: 815519 - DNA, 15 bp, Homo sapiens
ttgcccatgacaact

SEQ ID NO: 815520 - DNA, 15 bp, Homo sapiens
tgcccatgacaactt

SEQ ID NO: 815521 - DNA, 15 bp, Homo sapiens
gcccatgacaactta

SEQ ID NO: 815522 - DNA, 15 bp, Homo sapiens
cccatgacaacttat

SEQ ID NO: 815523 - DNA, 15 bp, Homo sapiens
ccatgacaacttatt

SEQ ID NO: 815524 - DNA, 15 bp, Homo sapiens
catgacaacttattt

SEQ ID NO: 815525 - DNA, 15 bp, Homo sapiens
atgacaacttatttt

SEQ ID NO: 815526 - DNA, 15 bp, Homo sapiens
tgacaacttatttta

SEQ ID NO: 815527 - DNA, 15 bp, Homo sapiens
gacaacttattttag

SEQ ID NO: 815528 - DNA, 15 bp, Homo sapiens
acaacttattttagt

SEQ ID NO: 815529 - DNA, 15 bp, Homo sapiens
caacttattttagta

SEQ ID NO: 815530 - DNA, 15 bp, Homo sapiens
aacttattttagtag

SEQ ID NO: 815531 - DNA, 15 bp, Homo sapiens
acttattttagtaga

SEQ ID NO: 815532 - DNA, 15 bp, Homo sapiens
cttattttagtagag

SEQ ID NO: 815533 - DNA, 15 bp, Homo sapiens
ttattttagtagaga

SEQ ID NO: 815534 - DNA, 15 bp, Homo sapiens
attttagtagagagt

SEQ ID NO: 815535 - DNA, 15 bp, Homo sapiens
ttttagtagagagtg

SEQ ID NO: 815536 - DNA, 15 bp, Homo sapiens
tttagtagagagtgt

SEQ ID NO: 815537 - DNA, 15 bp, Homo sapiens
ttagtagagagtgtg

SEQ ID NO: 815538 - DNA, 15 bp, Homo sapiens
tagtagagagtgtgg

SEQ ID NO: 815539 - DNA, 15 bp, Homo sapiens
agtagagagtgtggt

SEQ ID NO: 815540 - DNA, 15 bp, Homo sapiens
gtagagagtgtggta

SEQ ID NO: 815541 - DNA, 15 bp, Homo sapiens
tagagagtgtggtag

SEQ ID NO: 815542 - DNA, 15 bp, Homo sapiens
agagagtgtggtaga

SEQ ID NO: 815543 - DNA, 15 bp, Homo sapiens
gagagtgtggtagat

SEQ ID NO: 815544 - DNA, 15 bp, Homo sapiens
agagtgtggtagatg

SEQ ID NO: 815545 - DNA, 15 bp, Homo sapiens
gagtgtggtagatgg

SEQ ID NO: 815546 - DNA, 15 bp, Homo sapiens
agtgtggtagatggc

SEQ ID NO: 815547 - DNA, 15 bp, Homo sapiens
gtgtggtagatggcc

SEQ ID NO: 815548 - DNA, 15 bp, Homo sapiens
tgtggtagatggcca

SEQ ID NO: 815549 - DNA, 15 bp, Homo sapiens
gtggtagatggccat

SEQ ID NO: 815550 - DNA, 15 bp, Homo sapiens
tggtagatggccatc

SEQ ID NO: 815551 - DNA, 15 bp, Homo sapiens
ggtagatggccatcc

SEQ ID NO: 815552 - DNA, 15 bp, Homo sapiens
gtagatggccatcct

SEQ ID NO: 815553 - DNA, 15 bp, Homo sapiens
tagatggccatcctt

SEQ ID NO: 815554 - DNA, 15 bp, Homo sapiens
agatggccatccttg

SEQ ID NO: 815555 - DNA, 15 bp, Homo sapiens
gatggccatccttgg

SEQ ID NO: 815556 - DNA, 15 bp, Homo sapiens
atggccatccttggg

SEQ ID NO: 815557 - DNA, 15 bp, Homo sapiens
tggccatccttgggt

SEQ ID NO: 815558 - DNA, 15 bp, Homo sapiens
ggccatccttgggtg

SEQ ID NO: 815559 - DNA, 15 bp, Homo sapiens
gccatccttgggtga

SEQ ID NO: 815560 - DNA, 15 bp, Homo sapiens
ccatccttgggtgag

SEQ ID NO: 815561 - DNA, 15 bp, Homo sapiens
catccttgggtgagt

SEQ ID NO: 815562 - DNA, 15 bp, Homo sapiens
atccttgggtgagtt

SEQ ID NO: 815563 - DNA, 15 bp, Homo sapiens
tccttgggtgagttt

SEQ ID NO: 815564 - DNA, 15 bp, Homo sapiens
ccttgggtgagtttg

SEQ ID NO: 815565 - DNA, 15 bp, Homo sapiens
cttgggtgagtttga

SEQ ID NO: 815566 - DNA, 15 bp, Homo sapiens
ttgggtgagtttgag

SEQ ID NO: 815567 - DNA, 15 bp, Homo sapiens
tgggtgagtttgagg

SEQ ID NO: 815568 - DNA, 15 bp, Homo sapiens
gggtgagtttgaggg

SEQ ID NO: 815569 - DNA, 15 bp, Homo sapiens
ggtgagtttgagggt

SEQ ID NO: 815570 - DNA, 15 bp, Homo sapiens
gtgagtttgagggtg

SEQ ID NO: 815571 - DNA, 15 bp, Homo sapiens
tgagtttgagggtgc

SEQ ID NO: 815572 - DNA, 15 bp, Homo sapiens
gagtttgagggtgct

SEQ ID NO: 815573 - DNA, 15 bp, Homo sapiens
agtttgagggtgctg

SEQ ID NO: 815574 - DNA, 15 bp, Homo sapiens
gtttgagggtgctgt

SEQ ID NO: 815575 - DNA, 15 bp, Homo sapiens
tttgagggtgctgta

SEQ ID NO: 815576 - DNA, 15 bp, Homo sapiens
ttgagggtgctgtaa

SEQ ID NO: 815577 - DNA, 15 bp, Homo sapiens
tgagggtgctgtaaa

SEQ ID NO: 815578 - DNA, 15 bp, Homo sapiens
gagggtgctgtaaat

SEQ ID NO: 815579 - DNA, 15 bp, Homo sapiens
agggtgctgtaaata

SEQ ID NO: 815580 - DNA, 15 bp, Homo sapiens
gggtgctgtaaatac

SEQ ID NO: 815581 - DNA, 15 bp, Homo sapiens
ggtgctgtaaatact

SEQ ID NO: 815582 - DNA, 15 bp, Homo sapiens
gtgctgtaaatactc

SEQ ID NO: 815583 - DNA, 15 bp, Homo sapiens
tgctgtaaatactcc

SEQ ID NO: 815584 - DNA, 15 bp, Homo sapiens
gctgtaaatactcct

SEQ ID NO: 815585 - DNA, 15 bp, Homo sapiens
ctgtaaatactccta

SEQ ID NO: 815586 - DNA, 15 bp, Homo sapiens
tgtaaatactcctat

SEQ ID NO: 815587 - DNA, 15 bp, Homo sapiens
gtaaatactcctata

SEQ ID NO: 815588 - DNA, 15 bp, Homo sapiens
taaatactcctatac

SEQ ID NO: 815589 - DNA, 15 bp, Homo sapiens
aaatactcctatact

SEQ ID NO: 815590 - DNA, 15 bp, Homo sapiens
aatactcctatactc

SEQ ID NO: 815591 - DNA, 15 bp, Homo sapiens
atactcctatactcc

SEQ ID NO: 815592 - DNA, 15 bp, Homo sapiens
tactcctatactcca

SEQ ID NO: 815593 - DNA, 15 bp, Homo sapiens
actcctatactccaa

SEQ ID NO: 815594 - DNA, 15 bp, Homo sapiens
ctcctatactccaaa

SEQ ID NO: 815595 - DNA, 15 bp, Homo sapiens
tcctatactccaaaa

SEQ ID NO: 815596 - DNA, 15 bp, Homo sapiens
cctatactccaaaac

SEQ ID NO: 815597 - DNA, 15 bp, Homo sapiens
ctatactccaaaaca

SEQ ID NO: 815598 - DNA, 15 bp, Homo sapiens
tatactccaaaacat

SEQ ID NO: 815599 - DNA, 15 bp, Homo sapiens
atactccaaaacatc

SEQ ID NO: 815600 - DNA, 15 bp, Homo sapiens
tactccaaaacatct

SEQ ID NO: 815601 - DNA, 15 bp, Homo sapiens
actccaaaacatctc

SEQ ID NO: 815602 - DNA, 15 bp, Homo sapiens
ctccaaaacatctct

SEQ ID NO: 815603 - DNA, 15 bp, Homo sapiens
tccaaaacatctctt

SEQ ID NO: 815604 - DNA, 15 bp, Homo sapiens
ccaaaacatctcttc

SEQ ID NO: 815605 - DNA, 15 bp, Homo sapiens
caaaacatctcttct

SEQ ID NO: 815606 - DNA, 15 bp, Homo sapiens
aaaacatctcttcta

SEQ ID NO: 815607 - DNA, 15 bp, Homo sapiens
aaacatctcttctaa

SEQ ID NO: 815608 - DNA, 15 bp, Homo sapiens
aacatctcttctaac

SEQ ID NO: 815609 - DNA, 15 bp, Homo sapiens
acatctcttctaact

SEQ ID NO: 815610 - DNA, 15 bp, Homo sapiens
catctcttctaactt

SEQ ID NO: 815611 - DNA, 15 bp, Homo sapiens
atctcttctaacttg

SEQ ID NO: 815612 - DNA, 15 bp, Homo sapiens
tctcttctaacttgc

SEQ ID NO: 815613 - DNA, 15 bp, Homo sapiens
ctcttctaacttgca

SEQ ID NO: 815614 - DNA, 15 bp, Homo sapiens
tcttctaacttgcaa

SEQ ID NO: 815615 - DNA, 15 bp, Homo sapiens
cttctaacttgcaaa

SEQ ID NO: 815616 - DNA, 15 bp, Homo sapiens
ttctaacttgcaaag

SEQ ID NO: 815617 - DNA, 15 bp, Homo sapiens
tctaacttgcaaagt

SEQ ID NO: 815618 - DNA, 15 bp, Homo sapiens
ctaacttgcaaagta

SEQ ID NO: 815619 - DNA, 15 bp, Homo sapiens
taacttgcaaagtac

SEQ ID NO: 815620 - DNA, 15 bp, Homo sapiens
aacttgcaaagtacc

SEQ ID NO: 815621 - DNA, 15 bp, Homo sapiens
acttgcaaagtacct

SEQ ID NO: 815622 - DNA, 15 bp, Homo sapiens
cttgcaaagtacctg

SEQ ID NO: 815623 - DNA, 15 bp, Homo sapiens
ttgcaaagtacctga

SEQ ID NO: 815624 - DNA, 15 bp, Homo sapiens
tgcaaagtacctgaa

SEQ ID NO: 815625 - DNA, 15 bp, Homo sapiens
gcaaagtacctgaaa

SEQ ID NO: 815626 - DNA, 15 bp, Homo sapiens
caaagtacctgaaat

SEQ ID NO: 815627 - DNA, 15 bp, Homo sapiens
aaagtacctgaaatt

SEQ ID NO: 815628 - DNA, 15 bp, Homo sapiens
aagtacctgaaattc

SEQ ID NO: 815629 - DNA, 15 bp, Homo sapiens
agtacctgaaattcc

SEQ ID NO: 815630 - DNA, 15 bp, Homo sapiens
gtacctgaaattcca

SEQ ID NO: 815631 - DNA, 15 bp, Homo sapiens
tacctgaaattccac

SEQ ID NO: 815632 - DNA, 15 bp, Homo sapiens
acctgaaattccacc

SEQ ID NO: 815633 - DNA, 15 bp, Homo sapiens
cctgaaattccacca

SEQ ID NO: 815634 - DNA, 15 bp, Homo sapiens
ctgaaattccaccaa

SEQ ID NO: 815635 - DNA, 15 bp, Homo sapiens
tgaaattccaccaat

SEQ ID NO: 815636 - DNA, 15 bp, Homo sapiens
gaaattccaccaatt

SEQ ID NO: 815637 - DNA, 15 bp, Homo sapiens
aaattccaccaatta

SEQ ID NO: 815638 - DNA, 15 bp, Homo sapiens
aattccaccaattag

SEQ ID NO: 815639 - DNA, 15 bp, Homo sapiens
attccaccaattaga

SEQ ID NO: 815640 - DNA, 15 bp, Homo sapiens
ttccaccaattagac

SEQ ID NO: 815641 - DNA, 15 bp, Homo sapiens
tccaccaattagaca

SEQ ID NO: 815642 - DNA, 15 bp, Homo sapiens
ccaccaattagacat

SEQ ID NO: 815643 - DNA, 15 bp, Homo sapiens
caccaattagacatt

SEQ ID NO: 815644 - DNA, 15 bp, Homo sapiens
accaattagacattc

SEQ ID NO: 815645 - DNA, 15 bp, Homo sapiens
ccaattagacattca

SEQ ID NO: 815646 - DNA, 15 bp, Homo sapiens
caattagacattcat

SEQ ID NO: 815647 - DNA, 15 bp, Homo sapiens
aattagacattcatt

SEQ ID NO: 815648 - DNA, 15 bp, Homo sapiens
attagacattcattc

SEQ ID NO: 815649 - DNA, 15 bp, Homo sapiens
ttagacattcattct

SEQ ID NO: 815650 - DNA, 15 bp, Homo sapiens
tagacattcattctt

SEQ ID NO: 815651 - DNA, 15 bp, Homo sapiens
agacattcattcttg

SEQ ID NO: 815652 - DNA, 15 bp, Homo sapiens
gacattcattcttga

SEQ ID NO: 815653 - DNA, 15 bp, Homo sapiens
acattcattcttgaa

SEQ ID NO: 815654 - DNA, 15 bp, Homo sapiens
cattcattcttgaag

SEQ ID NO: 815655 - DNA, 15 bp, Homo sapiens
attcattcttgaagc

SEQ ID NO: 815656 - DNA, 15 bp, Homo sapiens
ttcattcttgaagcc

SEQ ID NO: 815657 - DNA, 15 bp, Homo sapiens
tcattcttgaagcct

SEQ ID NO: 815658 - DNA, 15 bp, Homo sapiens
cattcttgaagcctt

SEQ ID NO: 815659 - DNA, 15 bp, Homo sapiens
attcttgaagccttt

SEQ ID NO: 815660 - DNA, 15 bp, Homo sapiens
ttcttgaagcctttt

SEQ ID NO: 815661 - DNA, 15 bp, Homo sapiens
tcttgaagccttttc

SEQ ID NO: 815662 - DNA, 15 bp, Homo sapiens
cttgaagccttttca

SEQ ID NO: 815663 - DNA, 15 bp, Homo sapiens
ttgaagccttttcag

SEQ ID NO: 815664 - DNA, 15 bp, Homo sapiens
tgaagccttttcagt

SEQ ID NO: 815665 - DNA, 15 bp, Homo sapiens
gaagccttttcagtt

SEQ ID NO: 815666 - DNA, 15 bp, Homo sapiens
aagccttttcagttg

SEQ ID NO: 815667 - DNA, 15 bp, Homo sapiens
agccttttcagttgt

SEQ ID NO: 815668 - DNA, 15 bp, Homo sapiens
gccttttcagttgtt

SEQ ID NO: 815669 - DNA, 15 bp, Homo sapiens
ccttttcagttgttt

SEQ ID NO: 815670 - DNA, 15 bp, Homo sapiens
cttttcagttgtttc

SEQ ID NO: 815671 - DNA, 15 bp, Homo sapiens
ttttcagttgtttct

SEQ ID NO: 815672 - DNA, 15 bp, Homo sapiens
tttcagttgtttctt

SEQ ID NO: 815673 - DNA, 15 bp, Homo sapiens
ttcagttgtttctta

SEQ ID NO: 815674 - DNA, 15 bp, Homo sapiens
tcagttgtttcttaa

SEQ ID NO: 815675 - DNA, 15 bp, Homo sapiens
cagttgtttcttaaa

SEQ ID NO: 815676 - DNA, 15 bp, Homo sapiens
agttgtttcttaaaa

SEQ ID NO: 815677 - DNA, 15 bp, Homo sapiens
gttgtttcttaaaat

SEQ ID NO: 815678 - DNA, 15 bp, Homo sapiens
ttgtttcttaaaatc

SEQ ID NO: 815679 - DNA, 15 bp, Homo sapiens
tgtttcttaaaatct

SEQ ID NO: 815680 - DNA, 15 bp, Homo sapiens
gtttcttaaaatcta

SEQ ID NO: 815681 - DNA, 15 bp, Homo sapiens
tttcttaaaatctaa

SEQ ID NO: 815682 - DNA, 15 bp, Homo sapiens
ttcttaaaatctaag

SEQ ID NO: 815683 - DNA, 15 bp, Homo sapiens
tcttaaaatctaagt

SEQ ID NO: 815684 - DNA, 15 bp, Homo sapiens
cttaaaatctaagta

SEQ ID NO: 815685 - DNA, 15 bp, Homo sapiens
ttaaaatctaagtag

SEQ ID NO: 815686 - DNA, 15 bp, Homo sapiens
taaaatctaagtagc

SEQ ID NO: 815687 - DNA, 15 bp, Homo sapiens
aaaatctaagtagct

SEQ ID NO: 815688 - DNA, 15 bp, Homo sapiens
aaatctaagtagctc

SEQ ID NO: 815689 - DNA, 15 bp, Homo sapiens
aatctaagtagctct

SEQ ID NO: 815690 - DNA, 15 bp, Homo sapiens
atctaagtagctctt

SEQ ID NO: 815691 - DNA, 15 bp, Homo sapiens
tctaagtagctctta

SEQ ID NO: 815692 - DNA, 15 bp, Homo sapiens
ctaagtagctcttag

SEQ ID NO: 815693 - DNA, 15 bp, Homo sapiens
taagtagctcttagt

SEQ ID NO: 815694 - DNA, 15 bp, Homo sapiens
aagtagctcttagtg

SEQ ID NO: 815695 - DNA, 15 bp, Homo sapiens
agtagctcttagtgt

SEQ ID NO: 815696 - DNA, 15 bp, Homo sapiens
gtagctcttagtgtc

SEQ ID NO: 815697 - DNA, 15 bp, Homo sapiens
tagctcttagtgtca

SEQ ID NO: 815698 - DNA, 15 bp, Homo sapiens
agctcttagtgtcac

SEQ ID NO: 815699 - DNA, 15 bp, Homo sapiens
gctcttagtgtcacc

SEQ ID NO: 815700 - DNA, 15 bp, Homo sapiens
ctcttagtgtcaccc

SEQ ID NO: 815701 - DNA, 15 bp, Homo sapiens
tcttagtgtcaccct

SEQ ID NO: 815702 - DNA, 15 bp, Homo sapiens
cttagtgtcaccctg

SEQ ID NO: 815703 - DNA, 15 bp, Homo sapiens
ttagtgtcaccctgc

SEQ ID NO: 815704 - DNA, 15 bp, Homo sapiens
tagtgtcaccctgca

SEQ ID NO: 815705 - DNA, 15 bp, Homo sapiens
agtgtcaccctgcac

SEQ ID NO: 815706 - DNA, 15 bp, Homo sapiens
gtgtcaccctgcacc

SEQ ID NO: 815707 - DNA, 15 bp, Homo sapiens
tgtcaccctgcacct

SEQ ID NO: 815708 - DNA, 15 bp, Homo sapiens
gtcaccctgcacctt

SEQ ID NO: 815709 - DNA, 15 bp, Homo sapiens
tcaccctgcaccttc

SEQ ID NO: 815710 - DNA, 15 bp, Homo sapiens
caccctgcaccttca

SEQ ID NO: 815711 - DNA, 15 bp, Homo sapiens
accctgcaccttcat

SEQ ID NO: 815712 - DNA, 15 bp, Homo sapiens
ccctgcaccttcatt

SEQ ID NO: 815713 - DNA, 15 bp, Homo sapiens
cctgcaccttcatta

SEQ ID NO: 815714 - DNA, 15 bp, Homo sapiens
ctgcaccttcattaa

SEQ ID NO: 815715 - DNA, 15 bp, Homo sapiens
tgcaccttcattaag

SEQ ID NO: 815716 - DNA, 15 bp, Homo sapiens
gcaccttcattaagc

SEQ ID NO: 815717 - DNA, 15 bp, Homo sapiens
caccttcattaagca

SEQ ID NO: 815718 - DNA, 15 bp, Homo sapiens
accttcattaagcag

SEQ ID NO: 815719 - DNA, 15 bp, Homo sapiens
ccttcattaagcagg

SEQ ID NO: 815720 - DNA, 15 bp, Homo sapiens
cttcattaagcaggt

SEQ ID NO: 815721 - DNA, 15 bp, Homo sapiens
ttcattaagcaggta

SEQ ID NO: 815722 - DNA, 15 bp, Homo sapiens
tcattaagcaggtat

SEQ ID NO: 815723 - DNA, 15 bp, Homo sapiens
cattaagcaggtatc

SEQ ID NO: 815724 - DNA, 15 bp, Homo sapiens
attaagcaggtatca

SEQ ID NO: 815725 - DNA, 15 bp, Homo sapiens
ttaagcaggtatcac

SEQ ID NO: 815726 - DNA, 15 bp, Homo sapiens
taagcaggtatcact

SEQ ID NO: 815727 - DNA, 15 bp, Homo sapiens
aagcaggtatcactt

SEQ ID NO: 815728 - DNA, 15 bp, Homo sapiens
agcaggtatcacttg

SEQ ID NO: 815729 - DNA, 15 bp, Homo sapiens
gcaggtatcacttgt

SEQ ID NO: 815730 - DNA, 15 bp, Homo sapiens
caggtatcacttgtt

SEQ ID NO: 815731 - DNA, 15 bp, Homo sapiens
aggtatcacttgttg

SEQ ID NO: 815732 - DNA, 15 bp, Homo sapiens
ggtatcacttgttgg

SEQ ID NO: 815733 - DNA, 15 bp, Homo sapiens
gtatcacttgttggc

SEQ ID NO: 815734 - DNA, 15 bp, Homo sapiens
tatcacttgttggct

SEQ ID NO: 815735 - DNA, 15 bp, Homo sapiens
atcacttgttggctc

SEQ ID NO: 815736 - DNA, 15 bp, Homo sapiens
tcacttgttggctcc

SEQ ID NO: 815737 - DNA, 15 bp, Homo sapiens
cacttgttggctcct

SEQ ID NO: 815738 - DNA, 15 bp, Homo sapiens
acttgttggctcctc

SEQ ID NO: 815739 - DNA, 15 bp, Homo sapiens
cttgttggctcctca

SEQ ID NO: 815740 - DNA, 15 bp, Homo sapiens
ttgttggctcctcag

SEQ ID NO: 815741 - DNA, 15 bp, Homo sapiens
tgttggctcctcagt

SEQ ID NO: 815742 - DNA, 15 bp, Homo sapiens
gttggctcctcagtg

SEQ ID NO: 815743 - DNA, 15 bp, Homo sapiens
ttggctcctcagtgt

SEQ ID NO: 815744 - DNA, 15 bp, Homo sapiens
tggctcctcagtgtg

SEQ ID NO: 815745 - DNA, 15 bp, Homo sapiens
ggctcctcagtgtgg

SEQ ID NO: 815746 - DNA, 15 bp, Homo sapiens
gctcctcagtgtggt

SEQ ID NO: 815747 - DNA, 15 bp, Homo sapiens
ctcctcagtgtggtg

SEQ ID NO: 815748 - DNA, 15 bp, Homo sapiens
tcctcagtgtggtga

SEQ ID NO: 815749 - DNA, 15 bp, Homo sapiens
cctcagtgtggtgag

SEQ ID NO: 815750 - DNA, 15 bp, Homo sapiens
ctcagtgtggtgagc

SEQ ID NO: 815751 - DNA, 15 bp, Homo sapiens
tcagtgtggtgagca

SEQ ID NO: 815752 - DNA, 15 bp, Homo sapiens
cagtgtggtgagcac

SEQ ID NO: 815753 - DNA, 15 bp, Homo sapiens
agtgtggtgagcact

SEQ ID NO: 815754 - DNA, 15 bp, Homo sapiens
gtgtggtgagcactg

SEQ ID NO: 815755 - DNA, 15 bp, Homo sapiens
tgtggtgagcactga

SEQ ID NO: 815756 - DNA, 15 bp, Homo sapiens
gtggtgagcactgag

SEQ ID NO: 815757 - DNA, 15 bp, Homo sapiens
tggtgagcactgagt

SEQ ID NO: 815758 - DNA, 15 bp, Homo sapiens
ggtgagcactgagtt

SEQ ID NO: 815759 - DNA, 15 bp, Homo sapiens
gtgagcactgagttc

SEQ ID NO: 815760 - DNA, 15 bp, Homo sapiens
tgagcactgagttct

SEQ ID NO: 815761 - DNA, 15 bp, Homo sapiens
gagcactgagttctg

SEQ ID NO: 815762 - DNA, 15 bp, Homo sapiens
agcactgagttctgg

SEQ ID NO: 815763 - DNA, 15 bp, Homo sapiens
gcactgagttctggg

SEQ ID NO: 815764 - DNA, 15 bp, Homo sapiens
cactgagttctggga

SEQ ID NO: 815765 - DNA, 15 bp, Homo sapiens
actgagttctgggaa

SEQ ID NO: 815766 - DNA, 15 bp, Homo sapiens
ctgagttctgggaag

SEQ ID NO: 815767 - DNA, 15 bp, Homo sapiens
tgagttctgggaagg

SEQ ID NO: 815768 - DNA, 15 bp, Homo sapiens
gagttctgggaagga

SEQ ID NO: 815769 - DNA, 15 bp, Homo sapiens
agttctgggaaggac

SEQ ID NO: 815770 - DNA, 15 bp, Homo sapiens
gttctgggaaggaca

SEQ ID NO: 815771 - DNA, 15 bp, Homo sapiens
ttctgggaaggacaa

SEQ ID NO: 815772 - DNA, 15 bp, Homo sapiens
tctgggaaggacaaa

SEQ ID NO: 815773 - DNA, 15 bp, Homo sapiens
ctgggaaggacaaaa

SEQ ID NO: 815774 - DNA, 15 bp, Homo sapiens
tgggaaggacaaaac

SEQ ID NO: 815775 - DNA, 15 bp, Homo sapiens
gggaaggacaaaaca

SEQ ID NO: 815776 - DNA, 15 bp, Homo sapiens
ggaaggacaaaacag

SEQ ID NO: 815777 - DNA, 15 bp, Homo sapiens
gaaggacaaaacagg

SEQ ID NO: 815778 - DNA, 15 bp, Homo sapiens
aaggacaaaacaggg

SEQ ID NO: 815779 - DNA, 15 bp, Homo sapiens
aggacaaaacaggga

SEQ ID NO: 815780 - DNA, 15 bp, Homo sapiens
ggacaaaacagggac

SEQ ID NO: 815781 - DNA, 15 bp, Homo sapiens
gacaaaacagggact

SEQ ID NO: 815782 - DNA, 15 bp, Homo sapiens
acaaaacagggactg

SEQ ID NO: 815783 - DNA, 15 bp, Homo sapiens
caaaacagggactga

SEQ ID NO: 815784 - DNA, 15 bp, Homo sapiens
aaaacagggactgaa

SEQ ID NO: 815785 - DNA, 15 bp, Homo sapiens
aaacagggactgaaa

SEQ ID NO: 815786 - DNA, 15 bp, Homo sapiens
aacagggactgaaaa

SEQ ID NO: 815787 - DNA, 15 bp, Homo sapiens
acagggactgaaaaa

SEQ ID NO: 815788 - DNA, 15 bp, Homo sapiens
cagggactgaaaaac

SEQ ID NO: 815789 - DNA, 15 bp, Homo sapiens
agggactgaaaaact

SEQ ID NO: 815790 - DNA, 15 bp, Homo sapiens
gggactgaaaaacta

SEQ ID NO: 815791 - DNA, 15 bp, Homo sapiens
ggactgaaaaactaa

SEQ ID NO: 815792 - DNA, 15 bp, Homo sapiens
gactgaaaaactaag

SEQ ID NO: 815793 - DNA, 15 bp, Homo sapiens
actgaaaaactaagg

SEQ ID NO: 815794 - DNA, 15 bp, Homo sapiens
ctgaaaaactaagga

SEQ ID NO: 815795 - DNA, 15 bp, Homo sapiens
tgaaaaactaaggaa

SEQ ID NO: 815796 - DNA, 15 bp, Homo sapiens
gaaaaactaaggaaa

SEQ ID NO: 815797 - DNA, 15 bp, Homo sapiens
aaaaactaaggaaaa

SEQ ID NO: 815798 - DNA, 15 bp, Homo sapiens
aaaactaaggaaaag

SEQ ID NO: 815799 - DNA, 15 bp, Homo sapiens
aaactaaggaaaagg

SEQ ID NO: 815800 - DNA, 15 bp, Homo sapiens
aactaaggaaaagga

SEQ ID NO: 815801 - DNA, 15 bp, Homo sapiens
actaaggaaaaggat

SEQ ID NO: 815802 - DNA, 15 bp, Homo sapiens
ctaaggaaaaggatg

SEQ ID NO: 815803 - DNA, 15 bp, Homo sapiens
taaggaaaaggatgg

SEQ ID NO: 815804 - DNA, 15 bp, Homo sapiens
aaggaaaaggatggc

SEQ ID NO: 815805 - DNA, 15 bp, Homo sapiens
aggaaaaggatggct

SEQ ID NO: 815806 - DNA, 15 bp, Homo sapiens
ggaaaaggatggctt

SEQ ID NO: 815807 - DNA, 15 bp, Homo sapiens
gaaaaggatggctta

SEQ ID NO: 815808 - DNA, 15 bp, Homo sapiens
aaaaggatggcttag

SEQ ID NO: 815809 - DNA, 15 bp, Homo sapiens
aaaggatggcttagc

SEQ ID NO: 815810 - DNA, 15 bp, Homo sapiens
aaggatggcttagcc

SEQ ID NO: 815811 - DNA, 15 bp, Homo sapiens
aggatggcttagcct

SEQ ID NO: 815812 - DNA, 15 bp, Homo sapiens
ggatggcttagcctg

SEQ ID NO: 815813 - DNA, 15 bp, Homo sapiens
gatggcttagcctgc

SEQ ID NO: 815814 - DNA, 15 bp, Homo sapiens
atggcttagcctgca

SEQ ID NO: 815815 - DNA, 15 bp, Homo sapiens
tggcttagcctgcac

SEQ ID NO: 815816 - DNA, 15 bp, Homo sapiens
ggcttagcctgcacc

SEQ ID NO: 815817 - DNA, 15 bp, Homo sapiens
gcttagcctgcacca

SEQ ID NO: 815818 - DNA, 15 bp, Homo sapiens
cttagcctgcaccaa

SEQ ID NO: 815819 - DNA, 15 bp, Homo sapiens
ttagcctgcaccaac

SEQ ID NO: 815820 - DNA, 15 bp, Homo sapiens
tagcctgcaccaact

SEQ ID NO: 815821 - DNA, 15 bp, Homo sapiens
agcctgcaccaactg

SEQ ID NO: 815822 - DNA, 15 bp, Homo sapiens
gcctgcaccaactgt

SEQ ID NO: 815823 - DNA, 15 bp, Homo sapiens
cctgcaccaactgta

SEQ ID NO: 815824 - DNA, 15 bp, Homo sapiens
ctgcaccaactgtac

SEQ ID NO: 815825 - DNA, 15 bp, Homo sapiens
tgcaccaactgtacg

SEQ ID NO: 815826 - DNA, 15 bp, Homo sapiens
gcaccaactgtacgt

SEQ ID NO: 815827 - DNA, 15 bp, Homo sapiens
caccaactgtacgtg

SEQ ID NO: 815828 - DNA, 15 bp, Homo sapiens
accaactgtacgtga

SEQ ID NO: 815829 - DNA, 15 bp, Homo sapiens
ccaactgtacgtgaa

SEQ ID NO: 815830 - DNA, 15 bp, Homo sapiens
caactgtacgtgaag

SEQ ID NO: 815831 - DNA, 15 bp, Homo sapiens
aactgtacgtgaagg

SEQ ID NO: 815832 - DNA, 15 bp, Homo sapiens
actgtacgtgaagga

SEQ ID NO: 815833 - DNA, 15 bp, Homo sapiens
ctgtacgtgaaggaa

SEQ ID NO: 815834 - DNA, 15 bp, Homo sapiens
tgtacgtgaaggaag

SEQ ID NO: 815835 - DNA, 15 bp, Homo sapiens
gtacgtgaaggaaga

SEQ ID NO: 815836 - DNA, 15 bp, Homo sapiens
tacgtgaaggaagag

SEQ ID NO: 815837 - DNA, 15 bp, Homo sapiens
acgtgaaggaagaga

SEQ ID NO: 815838 - DNA, 15 bp, Homo sapiens
cgtgaaggaagagag

SEQ ID NO: 815839 - DNA, 15 bp, Homo sapiens
gtgaaggaagagagt

SEQ ID NO: 815840 - DNA, 15 bp, Homo sapiens
tgaaggaagagagtc

SEQ ID NO: 815841 - DNA, 15 bp, Homo sapiens
gaaggaagagagtca

SEQ ID NO: 815842 - DNA, 15 bp, Homo sapiens
aaggaagagagtcat

SEQ ID NO: 815843 - DNA, 15 bp, Homo sapiens
aggaagagagtcatt

SEQ ID NO: 815844 - DNA, 15 bp, Homo sapiens
ggaagagagtcatta

SEQ ID NO: 815845 - DNA, 15 bp, Homo sapiens
gaagagagtcattat

SEQ ID NO: 815846 - DNA, 15 bp, Homo sapiens
aagagagtcattatc

SEQ ID NO: 815847 - DNA, 15 bp, Homo sapiens
agagagtcattatca

SEQ ID NO: 815848 - DNA, 15 bp, Homo sapiens
gagagtcattatcac

SEQ ID NO: 815849 - DNA, 15 bp, Homo sapiens
agagtcattatcaca

SEQ ID NO: 815850 - DNA, 15 bp, Homo sapiens
gagtcattatcacat

SEQ ID NO: 815851 - DNA, 15 bp, Homo sapiens
agtcattatcacatc

SEQ ID NO: 815852 - DNA, 15 bp, Homo sapiens
gtcattatcacatca

SEQ ID NO: 815853 - DNA, 15 bp, Homo sapiens
tcattatcacatcag

SEQ ID NO: 815854 - DNA, 15 bp, Homo sapiens
cattatcacatcagt

SEQ ID NO: 815855 - DNA, 15 bp, Homo sapiens
attatcacatcagtt

SEQ ID NO: 815856 - DNA, 15 bp, Homo sapiens
ttatcacatcagttg

SEQ ID NO: 815857 - DNA, 15 bp, Homo sapiens
tatcacatcagttgc

SEQ ID NO: 815858 - DNA, 15 bp, Homo sapiens
atcacatcagttgca

SEQ ID NO: 815859 - DNA, 15 bp, Homo sapiens
tcacatcagttgcat

SEQ ID NO: 815860 - DNA, 15 bp, Homo sapiens
cacatcagttgcatt

SEQ ID NO: 815861 - DNA, 15 bp, Homo sapiens
acatcagttgcatta

SEQ ID NO: 815862 - DNA, 15 bp, Homo sapiens
catcagttgcattat

SEQ ID NO: 815863 - DNA, 15 bp, Homo sapiens
atcagttgcattatt

SEQ ID NO: 815864 - DNA, 15 bp, Homo sapiens
tcagttgcattattc

SEQ ID NO: 815865 - DNA, 15 bp, Homo sapiens
cagttgcattattca

SEQ ID NO: 815866 - DNA, 15 bp, Homo sapiens
agttgcattattcag

SEQ ID NO: 815867 - DNA, 15 bp, Homo sapiens
gttgcattattcagc

SEQ ID NO: 815868 - DNA, 15 bp, Homo sapiens
ttgcattattcagca

SEQ ID NO: 815869 - DNA, 15 bp, Homo sapiens
tgcattattcagcac

SEQ ID NO: 815870 - DNA, 15 bp, Homo sapiens
gcattattcagcaca

SEQ ID NO: 815871 - DNA, 15 bp, Homo sapiens
cattattcagcacag

SEQ ID NO: 815872 - DNA, 15 bp, Homo sapiens
attattcagcacagc

SEQ ID NO: 815873 - DNA, 15 bp, Homo sapiens
ttattcagcacagct

SEQ ID NO: 815874 - DNA, 15 bp, Homo sapiens
tattcagcacagctt

SEQ ID NO: 815875 - DNA, 15 bp, Homo sapiens
attcagcacagcttg

SEQ ID NO: 815876 - DNA, 15 bp, Homo sapiens
ttcagcacagcttgt

SEQ ID NO: 815877 - DNA, 15 bp, Homo sapiens
tcagcacagcttgtt

SEQ ID NO: 815878 - DNA, 15 bp, Homo sapiens
cagcacagcttgtta

SEQ ID NO: 815879 - DNA, 15 bp, Homo sapiens
agcacagcttgttac

SEQ ID NO: 815880 - DNA, 15 bp, Homo sapiens
gcacagcttgttacc

SEQ ID NO: 815881 - DNA, 15 bp, Homo sapiens
cacagcttgttacct

SEQ ID NO: 815882 - DNA, 15 bp, Homo sapiens
acagcttgttacctg

SEQ ID NO: 815883 - DNA, 15 bp, Homo sapiens
cagcttgttacctga

SEQ ID NO: 815884 - DNA, 15 bp, Homo sapiens
agcttgttacctgat

SEQ ID NO: 815885 - DNA, 15 bp, Homo sapiens
gcttgttacctgata

SEQ ID NO: 815886 - DNA, 15 bp, Homo sapiens
cttgttacctgatat

SEQ ID NO: 815887 - DNA, 15 bp, Homo sapiens
ttgttacctgatatc

SEQ ID NO: 815888 - DNA, 15 bp, Homo sapiens
tgttacctgatatct

SEQ ID NO: 815889 - DNA, 15 bp, Homo sapiens
gttacctgatatctg

SEQ ID NO: 815890 - DNA, 15 bp, Homo sapiens
ttacctgatatctgc

SEQ ID NO: 815891 - DNA, 15 bp, Homo sapiens
tacctgatatctgct

SEQ ID NO: 815892 - DNA, 15 bp, Homo sapiens
acctgatatctgctt

SEQ ID NO: 815893 - DNA, 15 bp, Homo sapiens
cctgatatctgctta

SEQ ID NO: 815894 - DNA, 15 bp, Homo sapiens
ctgatatctgcttac

SEQ ID NO: 815895 - DNA, 15 bp, Homo sapiens
tgatatctgcttacc

SEQ ID NO: 815896 - DNA, 15 bp, Homo sapiens
gatatctgcttacct

SEQ ID NO: 815897 - DNA, 15 bp, Homo sapiens
atatctgcttacctg

SEQ ID NO: 815898 - DNA, 15 bp, Homo sapiens
tatctgcttacctga

SEQ ID NO: 815899 - DNA, 15 bp, Homo sapiens
atctgcttacctgaa

SEQ ID NO: 815900 - DNA, 15 bp, Homo sapiens
tctgcttacctgaag

SEQ ID NO: 815901 - DNA, 15 bp, Homo sapiens
ctgcttacctgaaga

SEQ ID NO: 815902 - DNA, 15 bp, Homo sapiens
tgcttacctgaagag

SEQ ID NO: 815903 - DNA, 15 bp, Homo sapiens
gcttacctgaagaga

SEQ ID NO: 815904 - DNA, 15 bp, Homo sapiens
cttacctgaagagat

SEQ ID NO: 815905 - DNA, 15 bp, Homo sapiens
ttacctgaagagatt

SEQ ID NO: 815906 - DNA, 15 bp, Homo sapiens
tacctgaagagatta

SEQ ID NO: 815907 - DNA, 15 bp, Homo sapiens
acctgaagagattac

SEQ ID NO: 815908 - DNA, 15 bp, Homo sapiens
cctgaagagattact

SEQ ID NO: 815909 - DNA, 15 bp, Homo sapiens
ctgaagagattactg

SEQ ID NO: 815910 - DNA, 15 bp, Homo sapiens
tgaagagattactgt

SEQ ID NO: 815911 - DNA, 15 bp, Homo sapiens
gaagagattactgtg

SEQ ID NO: 815912 - DNA, 15 bp, Homo sapiens
aagagattactgtgg

SEQ ID NO: 815913 - DNA, 15 bp, Homo sapiens
agagattactgtggg

SEQ ID NO: 815914 - DNA, 15 bp, Homo sapiens
agattactgtgggtt

SEQ ID NO: 815915 - DNA, 15 bp, Homo sapiens
gattactgtgggtta

SEQ ID NO: 815916 - DNA, 15 bp, Homo sapiens
attactgtgggttaa

SEQ ID NO: 815917 - DNA, 15 bp, Homo sapiens
ttactgtgggttaat

SEQ ID NO: 815918 - DNA, 15 bp, Homo sapiens
tactgtgggttaatt

SEQ ID NO: 815919 - DNA, 15 bp, Homo sapiens
actgtgggttaattc

SEQ ID NO: 815920 - DNA, 15 bp, Homo sapiens
ctgtgggttaattct

SEQ ID NO: 815921 - DNA, 15 bp, Homo sapiens
tgtgggttaattcta

SEQ ID NO: 815922 - DNA, 15 bp, Homo sapiens
gtgggttaattctag

SEQ ID NO: 815923 - DNA, 15 bp, Homo sapiens
tgggttaattctaga

SEQ ID NO: 815924 - DNA, 15 bp, Homo sapiens
gggttaattctagaa

SEQ ID NO: 815925 - DNA, 15 bp, Homo sapiens
ggttaattctagaag

SEQ ID NO: 815926 - DNA, 15 bp, Homo sapiens
gttaattctagaagc

SEQ ID NO: 815927 - DNA, 15 bp, Homo sapiens
ttaattctagaagct

SEQ ID NO: 815928 - DNA, 15 bp, Homo sapiens
taattctagaagctt

SEQ ID NO: 815929 - DNA, 15 bp, Homo sapiens
aattctagaagcttg

SEQ ID NO: 815930 - DNA, 15 bp, Homo sapiens
attctagaagcttgc

SEQ ID NO: 815931 - DNA, 15 bp, Homo sapiens
ttctagaagcttgct

SEQ ID NO: 815932 - DNA, 15 bp, Homo sapiens
tctagaagcttgctt

SEQ ID NO: 815933 - DNA, 15 bp, Homo sapiens
ctagaagcttgctta

SEQ ID NO: 815934 - DNA, 15 bp, Homo sapiens
tagaagcttgcttat

SEQ ID NO: 815935 - DNA, 15 bp, Homo sapiens
agaagcttgcttatt

SEQ ID NO: 815936 - DNA, 15 bp, Homo sapiens
gaagcttgcttatta

SEQ ID NO: 815937 - DNA, 15 bp, Homo sapiens
aagcttgcttattac

SEQ ID NO: 815938 - DNA, 15 bp, Homo sapiens
agcttgcttattaca

SEQ ID NO: 815939 - DNA, 15 bp, Homo sapiens
gcttgcttattacat

SEQ ID NO: 815940 - DNA, 15 bp, Homo sapiens
cttgcttattacatt

SEQ ID NO: 815941 - DNA, 15 bp, Homo sapiens
ttgcttattacatta

SEQ ID NO: 815942 - DNA, 15 bp, Homo sapiens
tgcttattacattaa

SEQ ID NO: 815943 - DNA, 15 bp, Homo sapiens
gcttattacattaac

SEQ ID NO: 815944 - DNA, 15 bp, Homo sapiens
cttattacattaacg

SEQ ID NO: 815945 - DNA, 15 bp, Homo sapiens
ttattacattaacga

SEQ ID NO: 815946 - DNA, 15 bp, Homo sapiens
tattacattaacgac

SEQ ID NO: 815947 - DNA, 15 bp, Homo sapiens
attacattaacgacc

SEQ ID NO: 815948 - DNA, 15 bp, Homo sapiens
ttacattaacgacct

SEQ ID NO: 815949 - DNA, 15 bp, Homo sapiens
tacattaacgaccta

SEQ ID NO: 815950 - DNA, 15 bp, Homo sapiens
acattaacgacctac

SEQ ID NO: 815951 - DNA, 15 bp, Homo sapiens
cattaacgacctaca

SEQ ID NO: 815952 - DNA, 15 bp, Homo sapiens
attaacgacctacat

SEQ ID NO: 815953 - DNA, 15 bp, Homo sapiens
ttaacgacctacatt

SEQ ID NO: 815954 - DNA, 15 bp, Homo sapiens
taacgacctacattt

SEQ ID NO: 815955 - DNA, 15 bp, Homo sapiens
aacgacctacattta

SEQ ID NO: 815956 - DNA, 15 bp, Homo sapiens
acgacctacatttat

SEQ ID NO: 815957 - DNA, 15 bp, Homo sapiens
cgacctacatttatt

SEQ ID NO: 815958 - DNA, 15 bp, Homo sapiens
gacctacatttattg

SEQ ID NO: 815959 - DNA, 15 bp, Homo sapiens
acctacatttattga

SEQ ID NO: 815960 - DNA, 15 bp, Homo sapiens
cctacatttattgac

SEQ ID NO: 815961 - DNA, 15 bp, Homo sapiens
ctacatttattgaca

SEQ ID NO: 815962 - DNA, 15 bp, Homo sapiens
tacatttattgacag

SEQ ID NO: 815963 - DNA, 15 bp, Homo sapiens
acatttattgacagc

SEQ ID NO: 815964 - DNA, 15 bp, Homo sapiens
catttattgacagct

SEQ ID NO: 815965 - DNA, 15 bp, Homo sapiens
atttattgacagctg

SEQ ID NO: 815966 - DNA, 15 bp, Homo sapiens
tttattgacagctga

SEQ ID NO: 815967 - DNA, 15 bp, Homo sapiens
ttattgacagctgat

SEQ ID NO: 815968 - DNA, 15 bp, Homo sapiens
tattgacagctgatt

SEQ ID NO: 815969 - DNA, 15 bp, Homo sapiens
attgacagctgatta

SEQ ID NO: 815970 - DNA, 15 bp, Homo sapiens
ttgacagctgattat

SEQ ID NO: 815971 - DNA, 15 bp, Homo sapiens
tgacagctgattatc

SEQ ID NO: 815972 - DNA, 15 bp, Homo sapiens
gacagctgattatct

SEQ ID NO: 815973 - DNA, 15 bp, Homo sapiens
acagctgattatctt

SEQ ID NO: 815974 - DNA, 15 bp, Homo sapiens
cagctgattatcttg

SEQ ID NO: 815975 - DNA, 15 bp, Homo sapiens
agctgattatcttgg

SEQ ID NO: 815976 - DNA, 15 bp, Homo sapiens
gctgattatcttggg

SEQ ID NO: 815977 - DNA, 15 bp, Homo sapiens
ctgattatcttgggg

SEQ ID NO: 815978 - DNA, 15 bp, Homo sapiens
tgattatcttggggg

SEQ ID NO: 815979 - DNA, 15 bp, Homo sapiens
gattatcttggggga

SEQ ID NO: 815980 - DNA, 15 bp, Homo sapiens
attatcttgggggat

SEQ ID NO: 815981 - DNA, 15 bp, Homo sapiens
ttatcttgggggatt

SEQ ID NO: 815982 - DNA, 15 bp, Homo sapiens
tatcttgggggattg

SEQ ID NO: 815983 - DNA, 15 bp, Homo sapiens
atcttgggggattgt

SEQ ID NO: 815984 - DNA, 15 bp, Homo sapiens
tcttgggggattgtc

SEQ ID NO: 815985 - DNA, 15 bp, Homo sapiens
cttgggggattgtct

SEQ ID NO: 815986 - DNA, 15 bp, Homo sapiens
ttgggggattgtctc

SEQ ID NO: 815987 - DNA, 15 bp, Homo sapiens
tgggggattgtctct

SEQ ID NO: 815988 - DNA, 15 bp, Homo sapiens
gggggattgtctctg

SEQ ID NO: 815989 - DNA, 15 bp, Homo sapiens
ggggattgtctctga

SEQ ID NO: 815990 - DNA, 15 bp, Homo sapiens
gggattgtctctgag

SEQ ID NO: 815991 - DNA, 15 bp, Homo sapiens
ggattgtctctgaga

SEQ ID NO: 815992 - DNA, 15 bp, Homo sapiens
gattgtctctgagaa

SEQ ID NO: 815993 - DNA, 15 bp, Homo sapiens
attgtctctgagaat

SEQ ID NO: 815994 - DNA, 15 bp, Homo sapiens
ttgtctctgagaatt

SEQ ID NO: 815995 - DNA, 15 bp, Homo sapiens
tgtctctgagaattt

SEQ ID NO: 815996 - DNA, 15 bp, Homo sapiens
gtctctgagaatttg

SEQ ID NO: 815997 - DNA, 15 bp, Homo sapiens
tctctgagaatttgt

SEQ ID NO: 815998 - DNA, 15 bp, Homo sapiens
ctctgagaatttgtg

SEQ ID NO: 815999 - DNA, 15 bp, Homo sapiens
tctgagaatttgtgc

SEQ ID NO: 816000 - DNA, 15 bp, Homo sapiens
ctgagaatttgtgca

SEQ ID NO: 816001 - DNA, 15 bp, Homo sapiens
tgagaatttgtgcag

SEQ ID NO: 816002 - DNA, 15 bp, Homo sapiens
gagaatttgtgcagt

SEQ ID NO: 816003 - DNA, 15 bp, Homo sapiens
agaatttgtgcagta

SEQ ID NO: 816004 - DNA, 15 bp, Homo sapiens
gaatttgtgcagtag

SEQ ID NO: 816005 - DNA, 15 bp, Homo sapiens
aatttgtgcagtagg

SEQ ID NO: 816006 - DNA, 15 bp, Homo sapiens
atttgtgcagtaggt

SEQ ID NO: 816007 - DNA, 15 bp, Homo sapiens
tttgtgcagtaggta

SEQ ID NO: 816008 - DNA, 15 bp, Homo sapiens
ttgtgcagtaggtaa

SEQ ID NO: 816009 - DNA, 15 bp, Homo sapiens
tgtgcagtaggtaaa

SEQ ID NO: 816010 - DNA, 15 bp, Homo sapiens
gtgcagtaggtaaat

SEQ ID NO: 816011 - DNA, 15 bp, Homo sapiens
tgcagtaggtaaatg

SEQ ID NO: 816012 - DNA, 15 bp, Homo sapiens
gcagtaggtaaatga

SEQ ID NO: 816013 - DNA, 15 bp, Homo sapiens
cagtaggtaaatgat

SEQ ID NO: 816014 - DNA, 15 bp, Homo sapiens
agtaggtaaatgatg

SEQ ID NO: 816015 - DNA, 15 bp, Homo sapiens
gtaggtaaatgatgt

SEQ ID NO: 816016 - DNA, 15 bp, Homo sapiens
taggtaaatgatgtc

SEQ ID NO: 816017 - DNA, 15 bp, Homo sapiens
aggtaaatgatgtct

SEQ ID NO: 816018 - DNA, 15 bp, Homo sapiens
ggtaaatgatgtctt

SEQ ID NO: 816019 - DNA, 15 bp, Homo sapiens
gtaaatgatgtcttt

SEQ ID NO: 816020 - DNA, 15 bp, Homo sapiens
taaatgatgtctttg

SEQ ID NO: 816021 - DNA, 15 bp, Homo sapiens
aaatgatgtctttgc

SEQ ID NO: 816022 - DNA, 15 bp, Homo sapiens
aatgatgtctttgcc

SEQ ID NO: 816023 - DNA, 15 bp, Homo sapiens
atgatgtctttgcct

SEQ ID NO: 816024 - DNA, 15 bp, Homo sapiens
tgatgtctttgcctc

SEQ ID NO: 816025 - DNA, 15 bp, Homo sapiens
gatgtctttgcctca

SEQ ID NO: 816026 - DNA, 15 bp, Homo sapiens
atgtctttgcctcaa

SEQ ID NO: 816027 - DNA, 15 bp, Homo sapiens
tgtctttgcctcaat

SEQ ID NO: 816028 - DNA, 15 bp, Homo sapiens
gtctttgcctcaatt

SEQ ID NO: 816029 - DNA, 15 bp, Homo sapiens
tctttgcctcaatta

SEQ ID NO: 816030 - DNA, 15 bp, Homo sapiens
ctttgcctcaattag

SEQ ID NO: 816031 - DNA, 15 bp, Homo sapiens
tttgcctcaattagc

SEQ ID NO: 816032 - DNA, 15 bp, Homo sapiens
ttgcctcaattagca

SEQ ID NO: 816033 - DNA, 15 bp, Homo sapiens
tgcctcaattagcac

SEQ ID NO: 816034 - DNA, 15 bp, Homo sapiens
gcctcaattagcact

SEQ ID NO: 816035 - DNA, 15 bp, Homo sapiens
cctcaattagcactc

SEQ ID NO: 816036 - DNA, 15 bp, Homo sapiens
ctcaattagcactcc

SEQ ID NO: 816037 - DNA, 15 bp, Homo sapiens
tcaattagcactcct

SEQ ID NO: 816038 - DNA, 15 bp, Homo sapiens
caattagcactcctt

SEQ ID NO: 816039 - DNA, 15 bp, Homo sapiens
aattagcactccttt

SEQ ID NO: 816040 - DNA, 15 bp, Homo sapiens
attagcactcctttg

SEQ ID NO: 816041 - DNA, 15 bp, Homo sapiens
ttagcactcctttga

SEQ ID NO: 816042 - DNA, 15 bp, Homo sapiens
tagcactcctttgag

SEQ ID NO: 816043 - DNA, 15 bp, Homo sapiens
agcactcctttgaga

SEQ ID NO: 816044 - DNA, 15 bp, Homo sapiens
gcactcctttgagaa

SEQ ID NO: 816045 - DNA, 15 bp, Homo sapiens
cactcctttgagaaa

SEQ ID NO: 816046 - DNA, 15 bp, Homo sapiens
actcctttgagaaag

SEQ ID NO: 816047 - DNA, 15 bp, Homo sapiens
ctcctttgagaaagg

SEQ ID NO: 816048 - DNA, 15 bp, Homo sapiens
tcctttgagaaagga

SEQ ID NO: 816049 - DNA, 15 bp, Homo sapiens
cctttgagaaaggaa

SEQ ID NO: 816050 - DNA, 15 bp, Homo sapiens
ctttgagaaaggaac

SEQ ID NO: 816051 - DNA, 15 bp, Homo sapiens
tttgagaaaggaact

SEQ ID NO: 816052 - DNA, 15 bp, Homo sapiens
ttgagaaaggaacta

SEQ ID NO: 816053 - DNA, 15 bp, Homo sapiens
tgagaaaggaactaa

SEQ ID NO: 816054 - DNA, 15 bp, Homo sapiens
gagaaaggaactaag

SEQ ID NO: 816055 - DNA, 15 bp, Homo sapiens
agaaaggaactaaga

SEQ ID NO: 816056 - DNA, 15 bp, Homo sapiens
gaaaggaactaagat

SEQ ID NO: 816057 - DNA, 15 bp, Homo sapiens
aaaggaactaagata

SEQ ID NO: 816058 - DNA, 15 bp, Homo sapiens
aaggaactaagatag

SEQ ID NO: 816059 - DNA, 15 bp, Homo sapiens
aggaactaagatagt

SEQ ID NO: 816060 - DNA, 15 bp, Homo sapiens
ggaactaagatagtt

SEQ ID NO: 816061 - DNA, 15 bp, Homo sapiens
gaactaagatagtta

SEQ ID NO: 816062 - DNA, 15 bp, Homo sapiens
aactaagatagttaa

SEQ ID NO: 816063 - DNA, 15 bp, Homo sapiens
actaagatagttaat

SEQ ID NO: 816064 - DNA, 15 bp, Homo sapiens
ctaagatagttaatg

SEQ ID NO: 816065 - DNA, 15 bp, Homo sapiens
taagatagttaatgt

SEQ ID NO: 816066 - DNA, 15 bp, Homo sapiens
aagatagttaatgtt

SEQ ID NO: 816067 - DNA, 15 bp, Homo sapiens
agatagttaatgttg

SEQ ID NO: 816068 - DNA, 15 bp, Homo sapiens
gatagttaatgttga

SEQ ID NO: 816069 - DNA, 15 bp, Homo sapiens
atagttaatgttgat

SEQ ID NO: 816070 - DNA, 15 bp, Homo sapiens
tagttaatgttgatt

SEQ ID NO: 816071 - DNA, 15 bp, Homo sapiens
agttaatgttgattt

SEQ ID NO: 816072 - DNA, 15 bp, Homo sapiens
gttaatgttgatttg

SEQ ID NO: 816073 - DNA, 15 bp, Homo sapiens
ttaatgttgatttgt

SEQ ID NO: 816074 - DNA, 15 bp, Homo sapiens
taatgttgatttgta

SEQ ID NO: 816075 - DNA, 15 bp, Homo sapiens
aatgttgatttgtat

SEQ ID NO: 816076 - DNA, 15 bp, Homo sapiens
atgttgatttgtatc

SEQ ID NO: 816077 - DNA, 15 bp, Homo sapiens
tgttgatttgtatca

SEQ ID NO: 816078 - DNA, 15 bp, Homo sapiens
gttgatttgtatcac

SEQ ID NO: 816079 - DNA, 15 bp, Homo sapiens
ttgatttgtatcact

SEQ ID NO: 816080 - DNA, 15 bp, Homo sapiens
tgatttgtatcactg

SEQ ID NO: 816081 - DNA, 15 bp, Homo sapiens
gatttgtatcactgt

SEQ ID NO: 816082 - DNA, 15 bp, Homo sapiens
atttgtatcactgtg

SEQ ID NO: 816083 - DNA, 15 bp, Homo sapiens
tttgtatcactgtgg

SEQ ID NO: 816084 - DNA, 15 bp, Homo sapiens
ttgtatcactgtggt

SEQ ID NO: 816085 - DNA, 15 bp, Homo sapiens
tgtatcactgtggtt

SEQ ID NO: 816086 - DNA, 15 bp, Homo sapiens
gtatcactgtggttt

SEQ ID NO: 816087 - DNA, 15 bp, Homo sapiens
tatcactgtggtttc

SEQ ID NO: 816088 - DNA, 15 bp, Homo sapiens
atcactgtggtttct

SEQ ID NO: 816089 - DNA, 15 bp, Homo sapiens
tcactgtggtttctt

SEQ ID NO: 816090 - DNA, 15 bp, Homo sapiens
cactgtggtttctta

SEQ ID NO: 816091 - DNA, 15 bp, Homo sapiens
actgtggtttcttat

SEQ ID NO: 816092 - DNA, 15 bp, Homo sapiens
ctgtggtttcttatc

SEQ ID NO: 816093 - DNA, 15 bp, Homo sapiens
tgtggtttcttatcc

SEQ ID NO: 816094 - DNA, 15 bp, Homo sapiens
gtggtttcttatccc

SEQ ID NO: 816095 - DNA, 15 bp, Homo sapiens
tggtttcttatccct

SEQ ID NO: 816096 - DNA, 15 bp, Homo sapiens
ggtttcttatccctc

SEQ ID NO: 816097 - DNA, 15 bp, Homo sapiens
gtttcttatccctct

SEQ ID NO: 816098 - DNA, 15 bp, Homo sapiens
tttcttatccctctt

SEQ ID NO: 816099 - DNA, 15 bp, Homo sapiens
ttcttatccctcttt

SEQ ID NO: 816100 - DNA, 15 bp, Homo sapiens
tcttatccctctttt

SEQ ID NO: 816101 - DNA, 15 bp, Homo sapiens
cttatccctctttta

SEQ ID NO: 816102 - DNA, 15 bp, Homo sapiens
ttatccctcttttat

SEQ ID NO: 816103 - DNA, 15 bp, Homo sapiens
tatccctcttttata

SEQ ID NO: 816104 - DNA, 15 bp, Homo sapiens
atccctcttttatat

SEQ ID NO: 816105 - DNA, 15 bp, Homo sapiens
tccctcttttatatc

SEQ ID NO: 816106 - DNA, 15 bp, Homo sapiens
ccctcttttatatct

SEQ ID NO: 816107 - DNA, 15 bp, Homo sapiens
cctcttttatatctt

SEQ ID NO: 816108 - DNA, 15 bp, Homo sapiens
ctcttttatatcttt

SEQ ID NO: 816109 - DNA, 15 bp, Homo sapiens
tcttttatatctttt

SEQ ID NO: 816110 - DNA, 15 bp, Homo sapiens
cttttatatcttttg

SEQ ID NO: 816111 - DNA, 15 bp, Homo sapiens
ttttatatcttttgg

SEQ ID NO: 816112 - DNA, 15 bp, Homo sapiens
tttatatcttttgga

SEQ ID NO: 816113 - DNA, 15 bp, Homo sapiens
ttatatcttttggaa

SEQ ID NO: 816114 - DNA, 15 bp, Homo sapiens
tatatcttttggaat

SEQ ID NO: 816115 - DNA, 15 bp, Homo sapiens
atatcttttggaatt

SEQ ID NO: 816116 - DNA, 15 bp, Homo sapiens
tatcttttggaattg

SEQ ID NO: 816117 - DNA, 15 bp, Homo sapiens
atcttttggaattga

SEQ ID NO: 816118 - DNA, 15 bp, Homo sapiens
tcttttggaattgaa

SEQ ID NO: 816119 - DNA, 15 bp, Homo sapiens
cttttggaattgaac

SEQ ID NO: 816120 - DNA, 15 bp, Homo sapiens
ttttggaattgaaca

SEQ ID NO: 816121 - DNA, 15 bp, Homo sapiens
tttggaattgaacac

SEQ ID NO: 816122 - DNA, 15 bp, Homo sapiens
ttggaattgaacaca

SEQ ID NO: 816123 - DNA, 15 bp, Homo sapiens
tggaattgaacacag

SEQ ID NO: 816124 - DNA, 15 bp, Homo sapiens
ggaattgaacacagt

SEQ ID NO: 816125 - DNA, 15 bp, Homo sapiens
gaattgaacacagta

SEQ ID NO: 816126 - DNA, 15 bp, Homo sapiens
aattgaacacagtat

SEQ ID NO: 816127 - DNA, 15 bp, Homo sapiens
attgaacacagtatt

SEQ ID NO: 816128 - DNA, 15 bp, Homo sapiens
ttgaacacagtatta

SEQ ID NO: 816129 - DNA, 15 bp, Homo sapiens
tgaacacagtattat

SEQ ID NO: 816130 - DNA, 15 bp, Homo sapiens
gaacacagtattata

SEQ ID NO: 816131 - DNA, 15 bp, Homo sapiens
aacacagtattatac

SEQ ID NO: 816132 - DNA, 15 bp, Homo sapiens
acacagtattatacc

SEQ ID NO: 816133 - DNA, 15 bp, Homo sapiens
cacagtattatacct

SEQ ID NO: 816134 - DNA, 15 bp, Homo sapiens
acagtattataccta

SEQ ID NO: 816135 - DNA, 15 bp, Homo sapiens
cagtattatacctat

SEQ ID NO: 816136 - DNA, 15 bp, Homo sapiens
agtattatacctata

SEQ ID NO: 816137 - DNA, 15 bp, Homo sapiens
gtattatacctataa

SEQ ID NO: 816138 - DNA, 15 bp, Homo sapiens
tattatacctataac

SEQ ID NO: 816139 - DNA, 15 bp, Homo sapiens
attatacctataaca

SEQ ID NO: 816140 - DNA, 15 bp, Homo sapiens
ttatacctataacag

SEQ ID NO: 816141 - DNA, 15 bp, Homo sapiens
tatacctataacagg

SEQ ID NO: 816142 - DNA, 15 bp, Homo sapiens
atacctataacaggt

SEQ ID NO: 816143 - DNA, 15 bp, Homo sapiens
tacctataacaggtg

SEQ ID NO: 816144 - DNA, 15 bp, Homo sapiens
acctataacaggtgc

SEQ ID NO: 816145 - DNA, 15 bp, Homo sapiens
cctataacaggtgct

SEQ ID NO: 816146 - DNA, 15 bp, Homo sapiens
ctataacaggtgctg

SEQ ID NO: 816147 - DNA, 15 bp, Homo sapiens
tataacaggtgctga

SEQ ID NO: 816148 - DNA, 15 bp, Homo sapiens
ataacaggtgctgag

SEQ ID NO: 816149 - DNA, 15 bp, Homo sapiens
taacaggtgctgagt

SEQ ID NO: 816150 - DNA, 15 bp, Homo sapiens
aacaggtgctgagta

SEQ ID NO: 816151 - DNA, 15 bp, Homo sapiens
acaggtgctgagtaa

SEQ ID NO: 816152 - DNA, 15 bp, Homo sapiens
caggtgctgagtaaa

SEQ ID NO: 816153 - DNA, 15 bp, Homo sapiens
aggtgctgagtaaat

SEQ ID NO: 816154 - DNA, 15 bp, Homo sapiens
ggtgctgagtaaatg

SEQ ID NO: 816155 - DNA, 15 bp, Homo sapiens
gtgctgagtaaatgt

SEQ ID NO: 816156 - DNA, 15 bp, Homo sapiens
tgctgagtaaatgtt

SEQ ID NO: 816157 - DNA, 15 bp, Homo sapiens
gctgagtaaatgttt

SEQ ID NO: 816158 - DNA, 15 bp, Homo sapiens
ctgagtaaatgtttg

SEQ ID NO: 816159 - DNA, 15 bp, Homo sapiens
tgagtaaatgtttgt

SEQ ID NO: 816160 - DNA, 15 bp, Homo sapiens
gagtaaatgtttgtt

SEQ ID NO: 816161 - DNA, 15 bp, Homo sapiens
agtaaatgtttgtta

SEQ ID NO: 816162 - DNA, 15 bp, Homo sapiens
gtaaatgtttgttaa

SEQ ID NO: 816163 - DNA, 15 bp, Homo sapiens
taaatgtttgttaaa

SEQ ID NO: 816164 - DNA, 15 bp, Homo sapiens
aaatgtttgttaaag

SEQ ID NO: 816165 - DNA, 15 bp, Homo sapiens
aatgtttgttaaaga

SEQ ID NO: 816166 - DNA, 15 bp, Homo sapiens
atgtttgttaaagaa

SEQ ID NO: 816167 - DNA, 15 bp, Homo sapiens
tgtttgttaaagaaa

SEQ ID NO: 816168 - DNA, 15 bp, Homo sapiens
gtttgttaaagaaat

SEQ ID NO: 816169 - DNA, 15 bp, Homo sapiens
tttgttaaagaaatc

SEQ ID NO: 816170 - DNA, 15 bp, Homo sapiens
ttgttaaagaaatca

SEQ ID NO: 816171 - DNA, 15 bp, Homo sapiens
tgttaaagaaatcag

SEQ ID NO: 816172 - DNA, 15 bp, Homo sapiens
gttaaagaaatcagt

SEQ ID NO: 816173 - DNA, 15 bp, Homo sapiens
ttaaagaaatcagtc

SEQ ID NO: 816174 - DNA, 15 bp, Homo sapiens
taaagaaatcagtct

SEQ ID NO: 816175 - DNA, 15 bp, Homo sapiens
aaagaaatcagtctg

SEQ ID NO: 816176 - DNA, 15 bp, Homo sapiens
aagaaatcagtctgt

SEQ ID NO: 816177 - DNA, 15 bp, Homo sapiens
agaaatcagtctgta

SEQ ID NO: 816178 - DNA, 15 bp, Homo sapiens
gaaatcagtctgtag

SEQ ID NO: 816179 - DNA, 15 bp, Homo sapiens
aaatcagtctgtaga

SEQ ID NO: 816180 - DNA, 15 bp, Homo sapiens
aatcagtctgtagac

SEQ ID NO: 816181 - DNA, 15 bp, Homo sapiens
atcagtctgtagaca

SEQ ID NO: 816182 - DNA, 15 bp, Homo sapiens
tcagtctgtagacat

SEQ ID NO: 816183 - DNA, 15 bp, Homo sapiens
cagtctgtagacatt

SEQ ID NO: 816184 - DNA, 15 bp, Homo sapiens
agtctgtagacattt

SEQ ID NO: 816185 - DNA, 15 bp, Homo sapiens
gtctgtagacattta

SEQ ID NO: 816186 - DNA, 15 bp, Homo sapiens
tctgtagacatttag

SEQ ID NO: 816187 - DNA, 15 bp, Homo sapiens
ctgtagacatttaga

SEQ ID NO: 816188 - DNA, 15 bp, Homo sapiens
tgtagacatttagag

SEQ ID NO: 816189 - DNA, 15 bp, Homo sapiens
gtagacatttagagg

SEQ ID NO: 816190 - DNA, 15 bp, Homo sapiens
tagacatttagaggc

SEQ ID NO: 816191 - DNA, 15 bp, Homo sapiens
agacatttagaggca

SEQ ID NO: 816192 - DNA, 15 bp, Homo sapiens
gacatttagaggcac

SEQ ID NO: 816193 - DNA, 15 bp, Homo sapiens
acatttagaggcaca

SEQ ID NO: 816194 - DNA, 15 bp, Homo sapiens
catttagaggcacat

SEQ ID NO: 816195 - DNA, 15 bp, Homo sapiens
atttagaggcacata

SEQ ID NO: 816196 - DNA, 15 bp, Homo sapiens
tttagaggcacatat

SEQ ID NO: 816197 - DNA, 15 bp, Homo sapiens
ttagaggcacatatc

SEQ ID NO: 816198 - DNA, 15 bp, Homo sapiens
tagaggcacatatca

SEQ ID NO: 816199 - DNA, 15 bp, Homo sapiens
agaggcacatatcac

SEQ ID NO: 816200 - DNA, 15 bp, Homo sapiens
gaggcacatatcacc

SEQ ID NO: 816201 - DNA, 15 bp, Homo sapiens
aggcacatatcacca

SEQ ID NO: 816202 - DNA, 15 bp, Homo sapiens
ggcacatatcaccag

SEQ ID NO: 816203 - DNA, 15 bp, Homo sapiens
gcacatatcaccaga

SEQ ID NO: 816204 - DNA, 15 bp, Homo sapiens
cacatatcaccagaa

SEQ ID NO: 816205 - DNA, 15 bp, Homo sapiens
acatatcaccagaaa

SEQ ID NO: 816206 - DNA, 15 bp, Homo sapiens
catatcaccagaaat

SEQ ID NO: 816207 - DNA, 15 bp, Homo sapiens
atatcaccagaaata

SEQ ID NO: 816208 - DNA, 15 bp, Homo sapiens
tatcaccagaaatag

SEQ ID NO: 816209 - DNA, 15 bp, Homo sapiens
atcaccagaaataga

SEQ ID NO: 816210 - DNA, 15 bp, Homo sapiens
tcaccagaaatagac

SEQ ID NO: 816211 - DNA, 15 bp, Homo sapiens
caccagaaatagacc

SEQ ID NO: 816212 - DNA, 15 bp, Homo sapiens
accagaaatagacca

SEQ ID NO: 816213 - DNA, 15 bp, Homo sapiens
ccagaaatagaccac

SEQ ID NO: 816214 - DNA, 15 bp, Homo sapiens
cagaaatagaccact

SEQ ID NO: 816215 - DNA, 15 bp, Homo sapiens
agaaatagaccacta

SEQ ID NO: 816216 - DNA, 15 bp, Homo sapiens
gaaatagaccactag

SEQ ID NO: 816217 - DNA, 15 bp, Homo sapiens
aaatagaccactagc

SEQ ID NO: 816218 - DNA, 15 bp, Homo sapiens
aatagaccactagcc

SEQ ID NO: 816219 - DNA, 15 bp, Homo sapiens
atagaccactagcct

SEQ ID NO: 816220 - DNA, 15 bp, Homo sapiens
tagaccactagcctg

SEQ ID NO: 816221 - DNA, 15 bp, Homo sapiens
agaccactagcctga

SEQ ID NO: 816222 - DNA, 15 bp, Homo sapiens
gaccactagcctgat

SEQ ID NO: 816223 - DNA, 15 bp, Homo sapiens
accactagcctgatg

SEQ ID NO: 816224 - DNA, 15 bp, Homo sapiens
ccactagcctgatgt

SEQ ID NO: 816225 - DNA, 15 bp, Homo sapiens
cactagcctgatgtc

SEQ ID NO: 816226 - DNA, 15 bp, Homo sapiens
actagcctgatgtct

SEQ ID NO: 816227 - DNA, 15 bp, Homo sapiens
ctagcctgatgtctg

SEQ ID NO: 816228 - DNA, 15 bp, Homo sapiens
tagcctgatgtctgg

SEQ ID NO: 816229 - DNA, 15 bp, Homo sapiens
agcctgatgtctggc

SEQ ID NO: 816230 - DNA, 15 bp, Homo sapiens
gcctgatgtctggct

SEQ ID NO: 816231 - DNA, 15 bp, Homo sapiens
cctgatgtctggcta

SEQ ID NO: 816232 - DNA, 15 bp, Homo sapiens
ctgatgtctggctac

SEQ ID NO: 816233 - DNA, 15 bp, Homo sapiens
tgatgtctggctaca

SEQ ID NO: 816234 - DNA, 15 bp, Homo sapiens
gatgtctggctacag

SEQ ID NO: 816235 - DNA, 15 bp, Homo sapiens
atgtctggctacagt

SEQ ID NO: 816236 - DNA, 15 bp, Homo sapiens
tgtctggctacagta

SEQ ID NO: 816237 - DNA, 15 bp, Homo sapiens
gtctggctacagtaa

SEQ ID NO: 816238 - DNA, 15 bp, Homo sapiens
tctggctacagtaaa

SEQ ID NO: 816239 - DNA, 15 bp, Homo sapiens
ctggctacagtaaaa

SEQ ID NO: 816240 - DNA, 15 bp, Homo sapiens
tggctacagtaaaac

SEQ ID NO: 816241 - DNA, 15 bp, Homo sapiens
ggctacagtaaaacc

SEQ ID NO: 816242 - DNA, 15 bp, Homo sapiens
gctacagtaaaacca

SEQ ID NO: 816243 - DNA, 15 bp, Homo sapiens
ctacagtaaaaccaa

SEQ ID NO: 816244 - DNA, 15 bp, Homo sapiens
tacagtaaaaccaaa

SEQ ID NO: 816245 - DNA, 15 bp, Homo sapiens
acagtaaaaccaaac

SEQ ID NO: 816246 - DNA, 15 bp, Homo sapiens
cagtaaaaccaaaca

SEQ ID NO: 816247 - DNA, 15 bp, Homo sapiens
agtaaaaccaaacag

SEQ ID NO: 816248 - DNA, 15 bp, Homo sapiens
gtaaaaccaaacagg

SEQ ID NO: 816249 - DNA, 15 bp, Homo sapiens
taaaaccaaacagga

SEQ ID NO: 816250 - DNA, 15 bp, Homo sapiens
aaaaccaaacaggag

SEQ ID NO: 816251 - DNA, 15 bp, Homo sapiens
aaaccaaacaggaga

SEQ ID NO: 816252 - DNA, 15 bp, Homo sapiens
aaccaaacaggagaa

SEQ ID NO: 816253 - DNA, 15 bp, Homo sapiens
accaaacaggagaat

SEQ ID NO: 816254 - DNA, 15 bp, Homo sapiens
ccaaacaggagaata

SEQ ID NO: 816255 - DNA, 15 bp, Homo sapiens
caaacaggagaataa

SEQ ID NO: 816256 - DNA, 15 bp, Homo sapiens
aaacaggagaataac

SEQ ID NO: 816257 - DNA, 15 bp, Homo sapiens
aacaggagaataact

SEQ ID NO: 816258 - DNA, 15 bp, Homo sapiens
acaggagaataactg

SEQ ID NO: 816259 - DNA, 15 bp, Homo sapiens
caggagaataactgt

SEQ ID NO: 816260 - DNA, 15 bp, Homo sapiens
aggagaataactgtt

SEQ ID NO: 816261 - DNA, 15 bp, Homo sapiens
ggagaataactgttt

SEQ ID NO: 816262 - DNA, 15 bp, Homo sapiens
gagaataactgtttt

SEQ ID NO: 816263 - DNA, 15 bp, Homo sapiens
agaataactgttttt

SEQ ID NO: 816264 - DNA, 15 bp, Homo sapiens
gaataactgtttttt

SEQ ID NO: 816265 - DNA, 15 bp, Homo sapiens
aataactgtttttta

SEQ ID NO: 816266 - DNA, 15 bp, Homo sapiens
ataactgttttttaa

SEQ ID NO: 816267 - DNA, 15 bp, Homo sapiens
taactgttttttaaa

SEQ ID NO: 816268 - DNA, 15 bp, Homo sapiens
aactgttttttaaaa

SEQ ID NO: 816269 - DNA, 15 bp, Homo sapiens
actgttttttaaaat

SEQ ID NO: 816270 - DNA, 15 bp, Homo sapiens
ctgttttttaaaatt

SEQ ID NO: 816271 - DNA, 15 bp, Homo sapiens
tgttttttaaaatta

SEQ ID NO: 816272 - DNA, 15 bp, Homo sapiens
gttttttaaaattag

SEQ ID NO: 816273 - DNA, 15 bp, Homo sapiens
ttttttaaaattaga

SEQ ID NO: 816274 - DNA, 15 bp, Homo sapiens
tttttaaaattagaa

SEQ ID NO: 816275 - DNA, 15 bp, Homo sapiens
ttttaaaattagaac

SEQ ID NO: 816276 - DNA, 15 bp, Homo sapiens
tttaaaattagaact

SEQ ID NO: 816277 - DNA, 15 bp, Homo sapiens
ttaaaattagaactt

SEQ ID NO: 816278 - DNA, 15 bp, Homo sapiens
taaaattagaacttc

SEQ ID NO: 816279 - DNA, 15 bp, Homo sapiens
aaaattagaacttca

SEQ ID NO: 816280 - DNA, 15 bp, Homo sapiens
aaattagaacttcat

SEQ ID NO: 816281 - DNA, 15 bp, Homo sapiens
aattagaacttcatt

SEQ ID NO: 816282 - DNA, 15 bp, Homo sapiens
attagaacttcattt

SEQ ID NO: 816283 - DNA, 15 bp, Homo sapiens
ttagaacttcatttt

SEQ ID NO: 816284 - DNA, 15 bp, Homo sapiens
tagaacttcattttg

SEQ ID NO: 816285 - DNA, 15 bp, Homo sapiens
agaacttcattttga

SEQ ID NO: 816286 - DNA, 15 bp, Homo sapiens
gaacttcattttgaa

SEQ ID NO: 816287 - DNA, 15 bp, Homo sapiens
aacttcattttgaaa

SEQ ID NO: 816288 - DNA, 15 bp, Homo sapiens
acttcattttgaaat

SEQ ID NO: 816289 - DNA, 15 bp, Homo sapiens
cttcattttgaaata

SEQ ID NO: 816290 - DNA, 15 bp, Homo sapiens
ttcattttgaaatag

SEQ ID NO: 816291 - DNA, 15 bp, Homo sapiens
tcattttgaaatagt

SEQ ID NO: 816292 - DNA, 15 bp, Homo sapiens
cattttgaaatagtt

SEQ ID NO: 816293 - DNA, 15 bp, Homo sapiens
attttgaaatagttt

SEQ ID NO: 816294 - DNA, 15 bp, Homo sapiens
ttttgaaatagttta

SEQ ID NO: 816295 - DNA, 15 bp, Homo sapiens
tttgaaatagtttaa

SEQ ID NO: 816296 - DNA, 15 bp, Homo sapiens
ttgaaatagtttaag

SEQ ID NO: 816297 - DNA, 15 bp, Homo sapiens
tgaaatagtttaaga

SEQ ID NO: 816298 - DNA, 15 bp, Homo sapiens
gaaatagtttaagat

SEQ ID NO: 816299 - DNA, 15 bp, Homo sapiens
aaatagtttaagatt

SEQ ID NO: 816300 - DNA, 15 bp, Homo sapiens
aatagtttaagattc

SEQ ID NO: 816301 - DNA, 15 bp, Homo sapiens
atagtttaagattca

SEQ ID NO: 816302 - DNA, 15 bp, Homo sapiens
tagtttaagattcac

SEQ ID NO: 816303 - DNA, 15 bp, Homo sapiens
agtttaagattcaca

SEQ ID NO: 816304 - DNA, 15 bp, Homo sapiens
gtttaagattcacaa

SEQ ID NO: 816305 - DNA, 15 bp, Homo sapiens
tttaagattcacaag

SEQ ID NO: 816306 - DNA, 15 bp, Homo sapiens
ttaagattcacaaga

SEQ ID NO: 816307 - DNA, 15 bp, Homo sapiens
taagattcacaagaa

SEQ ID NO: 816308 - DNA, 15 bp, Homo sapiens
aagattcacaagaag

SEQ ID NO: 816309 - DNA, 15 bp, Homo sapiens
agattcacaagaagt

SEQ ID NO: 816310 - DNA, 15 bp, Homo sapiens
gattcacaagaagtt

SEQ ID NO: 816311 - DNA, 15 bp, Homo sapiens
attcacaagaagttg

SEQ ID NO: 816312 - DNA, 15 bp, Homo sapiens
ttcacaagaagttgc

SEQ ID NO: 816313 - DNA, 15 bp, Homo sapiens
tcacaagaagttgca

SEQ ID NO: 816314 - DNA, 15 bp, Homo sapiens
cacaagaagttgcaa

SEQ ID NO: 816315 - DNA, 15 bp, Homo sapiens
acaagaagttgcaaa

SEQ ID NO: 816316 - DNA, 15 bp, Homo sapiens
caagaagttgcaaaa

SEQ ID NO: 816317 - DNA, 15 bp, Homo sapiens
aagaagttgcaaaaa

SEQ ID NO: 816318 - DNA, 15 bp, Homo sapiens
agaagttgcaaaaac

SEQ ID NO: 816319 - DNA, 15 bp, Homo sapiens
gaagttgcaaaaaca

SEQ ID NO: 816320 - DNA, 15 bp, Homo sapiens
aagttgcaaaaacag

SEQ ID NO: 816321 - DNA, 15 bp, Homo sapiens
agttgcaaaaacagg

SEQ ID NO: 816322 - DNA, 15 bp, Homo sapiens
gttgcaaaaacagga

SEQ ID NO: 816323 - DNA, 15 bp, Homo sapiens
ttgcaaaaacaggac

SEQ ID NO: 816324 - DNA, 15 bp, Homo sapiens
tgcaaaaacaggaca

SEQ ID NO: 816325 - DNA, 15 bp, Homo sapiens
gcaaaaacaggacag

SEQ ID NO: 816326 - DNA, 15 bp, Homo sapiens
caaaaacaggacaga

SEQ ID NO: 816327 - DNA, 15 bp, Homo sapiens
aaaaacaggacagag

SEQ ID NO: 816328 - DNA, 15 bp, Homo sapiens
aaaacaggacagagt

SEQ ID NO: 816329 - DNA, 15 bp, Homo sapiens
aaacaggacagagtt

SEQ ID NO: 816330 - DNA, 15 bp, Homo sapiens
aacaggacagagttt

SEQ ID NO: 816331 - DNA, 15 bp, Homo sapiens
acaggacagagtttc

SEQ ID NO: 816332 - DNA, 15 bp, Homo sapiens
caggacagagtttct

SEQ ID NO: 816333 - DNA, 15 bp, Homo sapiens
aggacagagtttctg

SEQ ID NO: 816334 - DNA, 15 bp, Homo sapiens
ggacagagtttctgt

SEQ ID NO: 816335 - DNA, 15 bp, Homo sapiens
gacagagtttctgta

SEQ ID NO: 816336 - DNA, 15 bp, Homo sapiens
acagagtttctgtat

SEQ ID NO: 816337 - DNA, 15 bp, Homo sapiens
cagagtttctgtatc

SEQ ID NO: 816338 - DNA, 15 bp, Homo sapiens
agagtttctgtatcc

SEQ ID NO: 816339 - DNA, 15 bp, Homo sapiens
gagtttctgtatcct

SEQ ID NO: 816340 - DNA, 15 bp, Homo sapiens
agtttctgtatcctt

SEQ ID NO: 816341 - DNA, 15 bp, Homo sapiens
gtttctgtatccttt

SEQ ID NO: 816342 - DNA, 15 bp, Homo sapiens
tttctgtatcctttc

SEQ ID NO: 816343 - DNA, 15 bp, Homo sapiens
ttctgtatcctttcc

SEQ ID NO: 816344 - DNA, 15 bp, Homo sapiens
tctgtatcctttcca

SEQ ID NO: 816345 - DNA, 15 bp, Homo sapiens
ctgtatcctttccaa

SEQ ID NO: 816346 - DNA, 15 bp, Homo sapiens
tgtatcctttccaag

SEQ ID NO: 816347 - DNA, 15 bp, Homo sapiens
gtatcctttccaagc

SEQ ID NO: 816348 - DNA, 15 bp, Homo sapiens
tatcctttccaagct

SEQ ID NO: 816349 - DNA, 15 bp, Homo sapiens
atcctttccaagctt

SEQ ID NO: 816350 - DNA, 15 bp, Homo sapiens
tcctttccaagcttt

SEQ ID NO: 816351 - DNA, 15 bp, Homo sapiens
cctttccaagctttc

SEQ ID NO: 816352 - DNA, 15 bp, Homo sapiens
ctttccaagctttcc

SEQ ID NO: 816353 - DNA, 15 bp, Homo sapiens
tttccaagctttccc

SEQ ID NO: 816354 - DNA, 15 bp, Homo sapiens
ttccaagctttcccc

SEQ ID NO: 816355 - DNA, 15 bp, Homo sapiens
tccaagctttcccca

SEQ ID NO: 816356 - DNA, 15 bp, Homo sapiens
ccaagctttccccat

SEQ ID NO: 816357 - DNA, 15 bp, Homo sapiens
caagctttccccatg

SEQ ID NO: 816358 - DNA, 15 bp, Homo sapiens
aagctttccccatga

SEQ ID NO: 816359 - DNA, 15 bp, Homo sapiens
agctttccccatgat

SEQ ID NO: 816360 - DNA, 15 bp, Homo sapiens
gctttccccatgata

SEQ ID NO: 816361 - DNA, 15 bp, Homo sapiens
ctttccccatgatag

SEQ ID NO: 816362 - DNA, 15 bp, Homo sapiens
tttccccatgatagt

SEQ ID NO: 816363 - DNA, 15 bp, Homo sapiens
ttccccatgatagtg

SEQ ID NO: 816364 - DNA, 15 bp, Homo sapiens
tccccatgatagtgc

SEQ ID NO: 816365 - DNA, 15 bp, Homo sapiens
ccccatgatagtgct

SEQ ID NO: 816366 - DNA, 15 bp, Homo sapiens
cccatgatagtgcta

SEQ ID NO: 816367 - DNA, 15 bp, Homo sapiens
ccatgatagtgctat

SEQ ID NO: 816368 - DNA, 15 bp, Homo sapiens
catgatagtgctata

SEQ ID NO: 816369 - DNA, 15 bp, Homo sapiens
atgatagtgctatat

SEQ ID NO: 816370 - DNA, 15 bp, Homo sapiens
tgatagtgctatatg

SEQ ID NO: 816371 - DNA, 15 bp, Homo sapiens
gatagtgctatatgc

SEQ ID NO: 816372 - DNA, 15 bp, Homo sapiens
atagtgctatatgct

SEQ ID NO: 816373 - DNA, 15 bp, Homo sapiens
tagtgctatatgcta

SEQ ID NO: 816374 - DNA, 15 bp, Homo sapiens
agtgctatatgctac

SEQ ID NO: 816375 - DNA, 15 bp, Homo sapiens
gtgctatatgctaca

SEQ ID NO: 816376 - DNA, 15 bp, Homo sapiens
tgctatatgctacat

SEQ ID NO: 816377 - DNA, 15 bp, Homo sapiens
gctatatgctacata

SEQ ID NO: 816378 - DNA, 15 bp, Homo sapiens
ctatatgctacatag

SEQ ID NO: 816379 - DNA, 15 bp, Homo sapiens
tatatgctacatagg

SEQ ID NO: 816380 - DNA, 15 bp, Homo sapiens
atatgctacataggc

SEQ ID NO: 816381 - DNA, 15 bp, Homo sapiens
tatgctacataggca

SEQ ID NO: 816382 - DNA, 15 bp, Homo sapiens
atgctacataggcat

SEQ ID NO: 816383 - DNA, 15 bp, Homo sapiens
tgctacataggcatg

SEQ ID NO: 816384 - DNA, 15 bp, Homo sapiens
gctacataggcatgc

SEQ ID NO: 816385 - DNA, 15 bp, Homo sapiens
ctacataggcatgca

SEQ ID NO: 816386 - DNA, 15 bp, Homo sapiens
tacataggcatgcat

SEQ ID NO: 816387 - DNA, 15 bp, Homo sapiens
acataggcatgcatg

SEQ ID NO: 816388 - DNA, 15 bp, Homo sapiens
cataggcatgcatgg

SEQ ID NO: 816389 - DNA, 15 bp, Homo sapiens
ataggcatgcatggt

SEQ ID NO: 816390 - DNA, 15 bp, Homo sapiens
taggcatgcatggta

SEQ ID NO: 816391 - DNA, 15 bp, Homo sapiens
aggcatgcatggtat

SEQ ID NO: 816392 - DNA, 15 bp, Homo sapiens
ggcatgcatggtatg

SEQ ID NO: 816393 - DNA, 15 bp, Homo sapiens
gcatgcatggtatgt

SEQ ID NO: 816394 - DNA, 15 bp, Homo sapiens
catgcatggtatgtt

SEQ ID NO: 816395 - DNA, 15 bp, Homo sapiens
atgcatggtatgtta

SEQ ID NO: 816396 - DNA, 15 bp, Homo sapiens
tgcatggtatgttat

SEQ ID NO: 816397 - DNA, 15 bp, Homo sapiens
gcatggtatgttatc

SEQ ID NO: 816398 - DNA, 15 bp, Homo sapiens
catggtatgttatca

SEQ ID NO: 816399 - DNA, 15 bp, Homo sapiens
atggtatgttatcaa

SEQ ID NO: 816400 - DNA, 15 bp, Homo sapiens
tggtatgttatcaaa

SEQ ID NO: 816401 - DNA, 15 bp, Homo sapiens
ggtatgttatcaaaa

SEQ ID NO: 816402 - DNA, 15 bp, Homo sapiens
gtatgttatcaaaac

SEQ ID NO: 816403 - DNA, 15 bp, Homo sapiens
tatgttatcaaaacc

SEQ ID NO: 816404 - DNA, 15 bp, Homo sapiens
atgttatcaaaacca

SEQ ID NO: 816405 - DNA, 15 bp, Homo sapiens
tgttatcaaaaccag

SEQ ID NO: 816406 - DNA, 15 bp, Homo sapiens
gttatcaaaaccagg

SEQ ID NO: 816407 - DNA, 15 bp, Homo sapiens
ttatcaaaaccagga

SEQ ID NO: 816408 - DNA, 15 bp, Homo sapiens
tatcaaaaccaggaa

SEQ ID NO: 816409 - DNA, 15 bp, Homo sapiens
atcaaaaccaggaaa

SEQ ID NO: 816410 - DNA, 15 bp, Homo sapiens
tcaaaaccaggaaat

SEQ ID NO: 816411 - DNA, 15 bp, Homo sapiens
caaaaccaggaaatt

SEQ ID NO: 816412 - DNA, 15 bp, Homo sapiens
aaaaccaggaaattg

SEQ ID NO: 816413 - DNA, 15 bp, Homo sapiens
aaaccaggaaattga

SEQ ID NO: 816414 - DNA, 15 bp, Homo sapiens
aaccaggaaattgat

SEQ ID NO: 816415 - DNA, 15 bp, Homo sapiens
accaggaaattgata

SEQ ID NO: 816416 - DNA, 15 bp, Homo sapiens
ccaggaaattgatat

SEQ ID NO: 816417 - DNA, 15 bp, Homo sapiens
caggaaattgatatt

SEQ ID NO: 816418 - DNA, 15 bp, Homo sapiens
aggaaattgatattg

SEQ ID NO: 816419 - DNA, 15 bp, Homo sapiens
ggaaattgatattgg

SEQ ID NO: 816420 - DNA, 15 bp, Homo sapiens
gaaattgatattggc

SEQ ID NO: 816421 - DNA, 15 bp, Homo sapiens
aaattgatattggcg

SEQ ID NO: 816422 - DNA, 15 bp, Homo sapiens
aattgatattggcgt

SEQ ID NO: 816423 - DNA, 15 bp, Homo sapiens
attgatattggcgta

SEQ ID NO: 816424 - DNA, 15 bp, Homo sapiens
ttgatattggcgtac

SEQ ID NO: 816425 - DNA, 15 bp, Homo sapiens
tgatattggcgtact

SEQ ID NO: 816426 - DNA, 15 bp, Homo sapiens
gatattggcgtactg

SEQ ID NO: 816427 - DNA, 15 bp, Homo sapiens
atattggcgtactgc

SEQ ID NO: 816428 - DNA, 15 bp, Homo sapiens
tattggcgtactgct

SEQ ID NO: 816429 - DNA, 15 bp, Homo sapiens
attggcgtactgctg

SEQ ID NO: 816430 - DNA, 15 bp, Homo sapiens
ttggcgtactgctgt

SEQ ID NO: 816431 - DNA, 15 bp, Homo sapiens
tggcgtactgctgta

SEQ ID NO: 816432 - DNA, 15 bp, Homo sapiens
ggcgtactgctgtaa

SEQ ID NO: 816433 - DNA, 15 bp, Homo sapiens
gcgtactgctgtaaa

SEQ ID NO: 816434 - DNA, 15 bp, Homo sapiens
cgtactgctgtaaac

SEQ ID NO: 816435 - DNA, 15 bp, Homo sapiens
gtactgctgtaaact

SEQ ID NO: 816436 - DNA, 15 bp, Homo sapiens
tactgctgtaaactc

SEQ ID NO: 816437 - DNA, 15 bp, Homo sapiens
actgctgtaaactca

SEQ ID NO: 816438 - DNA, 15 bp, Homo sapiens
ctgctgtaaactcaa

SEQ ID NO: 816439 - DNA, 15 bp, Homo sapiens
tgctgtaaactcaag

SEQ ID NO: 816440 - DNA, 15 bp, Homo sapiens
gctgtaaactcaagt

SEQ ID NO: 816441 - DNA, 15 bp, Homo sapiens
ctgtaaactcaagta

SEQ ID NO: 816442 - DNA, 15 bp, Homo sapiens
tgtaaactcaagtac

SEQ ID NO: 816443 - DNA, 15 bp, Homo sapiens
gtaaactcaagtaca

SEQ ID NO: 816444 - DNA, 15 bp, Homo sapiens
taaactcaagtacag

SEQ ID NO: 816445 - DNA, 15 bp, Homo sapiens
aaactcaagtacaga

SEQ ID NO: 816446 - DNA, 15 bp, Homo sapiens
aactcaagtacagat

SEQ ID NO: 816447 - DNA, 15 bp, Homo sapiens
actcaagtacagatg

SEQ ID NO: 816448 - DNA, 15 bp, Homo sapiens
ctcaagtacagatgt

SEQ ID NO: 816449 - DNA, 15 bp, Homo sapiens
tcaagtacagatgtt

SEQ ID NO: 816450 - DNA, 15 bp, Homo sapiens
caagtacagatgttt

SEQ ID NO: 816451 - DNA, 15 bp, Homo sapiens
aagtacagatgtttt

SEQ ID NO: 816452 - DNA, 15 bp, Homo sapiens
agtacagatgttttg

SEQ ID NO: 816453 - DNA, 15 bp, Homo sapiens
gtacagatgttttgc

SEQ ID NO: 816454 - DNA, 15 bp, Homo sapiens
tacagatgttttgcc

SEQ ID NO: 816455 - DNA, 15 bp, Homo sapiens
acagatgttttgcca

SEQ ID NO: 816456 - DNA, 15 bp, Homo sapiens
cagatgttttgccag

SEQ ID NO: 816457 - DNA, 15 bp, Homo sapiens
agatgttttgccagt

SEQ ID NO: 816458 - DNA, 15 bp, Homo sapiens
gatgttttgccagtt

SEQ ID NO: 816459 - DNA, 15 bp, Homo sapiens
atgttttgccagttt

SEQ ID NO: 816460 - DNA, 15 bp, Homo sapiens
tgttttgccagtttt

SEQ ID NO: 816461 - DNA, 15 bp, Homo sapiens
gttttgccagttttt

SEQ ID NO: 816462 - DNA, 15 bp, Homo sapiens
ttttgccagttttta

SEQ ID NO: 816463 - DNA, 15 bp, Homo sapiens
tttgccagtttttac

SEQ ID NO: 816464 - DNA, 15 bp, Homo sapiens
ttgccagtttttaca

SEQ ID NO: 816465 - DNA, 15 bp, Homo sapiens
tgccagtttttacaa

SEQ ID NO: 816466 - DNA, 15 bp, Homo sapiens
gccagtttttacaag

SEQ ID NO: 816467 - DNA, 15 bp, Homo sapiens
ccagtttttacaagc

SEQ ID NO: 816468 - DNA, 15 bp, Homo sapiens
cagtttttacaagca

SEQ ID NO: 816469 - DNA, 15 bp, Homo sapiens
agtttttacaagcac

SEQ ID NO: 816470 - DNA, 15 bp, Homo sapiens
gtttttacaagcact

SEQ ID NO: 816471 - DNA, 15 bp, Homo sapiens
tttttacaagcactt

SEQ ID NO: 816472 - DNA, 15 bp, Homo sapiens
ttttacaagcacttt

SEQ ID NO: 816473 - DNA, 15 bp, Homo sapiens
tttacaagcactttt

SEQ ID NO: 816474 - DNA, 15 bp, Homo sapiens
ttacaagcacttttt

SEQ ID NO: 816475 - DNA, 15 bp, Homo sapiens
tacaagcactttttt

SEQ ID NO: 816476 - DNA, 15 bp, Homo sapiens
acaagcacttttttt

SEQ ID NO: 816477 - DNA, 15 bp, Homo sapiens
caagcactttttttt

SEQ ID NO: 816478 - DNA, 15 bp, Homo sapiens
aagcacttttttttt

SEQ ID NO: 816479 - DNA, 15 bp, Homo sapiens
agcactttttttttt

SEQ ID NO: 816480 - DNA, 15 bp, Homo sapiens
gcacttttttttttt

SEQ ID NO: 816481 - DNA, 15 bp, Homo sapiens
cactttttttttttt

SEQ ID NO: 816482 - DNA, 15 bp, Homo sapiens
tttttttttttgctg

SEQ ID NO: 816483 - DNA, 15 bp, Homo sapiens
ttttttttttgctgt

SEQ ID NO: 816484 - DNA, 15 bp, Homo sapiens
tttttttttgctgtg

SEQ ID NO: 816485 - DNA, 15 bp, Homo sapiens
ttttttttgctgtgt

SEQ ID NO: 816486 - DNA, 15 bp, Homo sapiens
tttttttgctgtgta

SEQ ID NO: 816487 - DNA, 15 bp, Homo sapiens
ttttttgctgtgtag

SEQ ID NO: 816488 - DNA, 15 bp, Homo sapiens
tttttgctgtgtaga

SEQ ID NO: 816489 - DNA, 15 bp, Homo sapiens
ttttgctgtgtagat

SEQ ID NO: 816490 - DNA, 15 bp, Homo sapiens
tttgctgtgtagatc

SEQ ID NO: 816491 - DNA, 15 bp, Homo sapiens
ttgctgtgtagatcc

SEQ ID NO: 816492 - DNA, 15 bp, Homo sapiens
tgctgtgtagatcca

SEQ ID NO: 816493 - DNA, 15 bp, Homo sapiens
gctgtgtagatccaa

SEQ ID NO: 816494 - DNA, 15 bp, Homo sapiens
ctgtgtagatccaag

SEQ ID NO: 816495 - DNA, 15 bp, Homo sapiens
tgtgtagatccaaga

SEQ ID NO: 816496 - DNA, 15 bp, Homo sapiens
gtgtagatccaagac

SEQ ID NO: 816497 - DNA, 15 bp, Homo sapiens
tgtagatccaagaca

SEQ ID NO: 816498 - DNA, 15 bp, Homo sapiens
gtagatccaagacat

SEQ ID NO: 816499 - DNA, 15 bp, Homo sapiens
tagatccaagacatt

SEQ ID NO: 816500 - DNA, 15 bp, Homo sapiens
agatccaagacattt

SEQ ID NO: 816501 - DNA, 15 bp, Homo sapiens
gatccaagacatttt

SEQ ID NO: 816502 - DNA, 15 bp, Homo sapiens
atccaagacatttta

SEQ ID NO: 816503 - DNA, 15 bp, Homo sapiens
tccaagacattttat

SEQ ID NO: 816504 - DNA, 15 bp, Homo sapiens
ccaagacattttatc

SEQ ID NO: 816505 - DNA, 15 bp, Homo sapiens
caagacattttatcc

SEQ ID NO: 816506 - DNA, 15 bp, Homo sapiens
aagacattttatccc

SEQ ID NO: 816507 - DNA, 15 bp, Homo sapiens
agacattttatccca

SEQ ID NO: 816508 - DNA, 15 bp, Homo sapiens
gacattttatcccac

SEQ ID NO: 816509 - DNA, 15 bp, Homo sapiens
acattttatcccaca

SEQ ID NO: 816510 - DNA, 15 bp, Homo sapiens
cattttatcccacat

SEQ ID NO: 816511 - DNA, 15 bp, Homo sapiens
attttatcccacata

SEQ ID NO: 816512 - DNA, 15 bp, Homo sapiens
ttttatcccacataa

SEQ ID NO: 816513 - DNA, 15 bp, Homo sapiens
tttatcccacataaa

SEQ ID NO: 816514 - DNA, 15 bp, Homo sapiens
ttatcccacataaat

SEQ ID NO: 816515 - DNA, 15 bp, Homo sapiens
tatcccacataaatt

SEQ ID NO: 816516 - DNA, 15 bp, Homo sapiens
atcccacataaattt

SEQ ID NO: 816517 - DNA, 15 bp, Homo sapiens
tcccacataaatttg

SEQ ID NO: 816518 - DNA, 15 bp, Homo sapiens
cccacataaatttgt

SEQ ID NO: 816519 - DNA, 15 bp, Homo sapiens
ccacataaatttgtt

SEQ ID NO: 816520 - DNA, 15 bp, Homo sapiens
cacataaatttgttt

SEQ ID NO: 816521 - DNA, 15 bp, Homo sapiens
acataaatttgtttt

SEQ ID NO: 816522 - DNA, 15 bp, Homo sapiens
cataaatttgtttta

SEQ ID NO: 816523 - DNA, 15 bp, Homo sapiens
ataaatttgttttat

SEQ ID NO: 816524 - DNA, 15 bp, Homo sapiens
taaatttgttttatt

SEQ ID NO: 816525 - DNA, 15 bp, Homo sapiens
aaatttgttttatta

SEQ ID NO: 816526 - DNA, 15 bp, Homo sapiens
aatttgttttattac

SEQ ID NO: 816527 - DNA, 15 bp, Homo sapiens
atttgttttattacc

SEQ ID NO: 816528 - DNA, 15 bp, Homo sapiens
tttgttttattacct

SEQ ID NO: 816529 - DNA, 15 bp, Homo sapiens
ttgttttattacctc

SEQ ID NO: 816530 - DNA, 15 bp, Homo sapiens
tgttttattacctct

SEQ ID NO: 816531 - DNA, 15 bp, Homo sapiens
gttttattacctctc

SEQ ID NO: 816532 - DNA, 15 bp, Homo sapiens
ttttattacctctcc

SEQ ID NO: 816533 - DNA, 15 bp, Homo sapiens
tttattacctctcca

SEQ ID NO: 816534 - DNA, 15 bp, Homo sapiens
ttattacctctccag

SEQ ID NO: 816535 - DNA, 15 bp, Homo sapiens
tattacctctccagt

SEQ ID NO: 816536 - DNA, 15 bp, Homo sapiens
attacctctccagtc

SEQ ID NO: 816537 - DNA, 15 bp, Homo sapiens
ttacctctccagtca

SEQ ID NO: 816538 - DNA, 15 bp, Homo sapiens
tacctctccagtcag

SEQ ID NO: 816539 - DNA, 15 bp, Homo sapiens
acctctccagtcagt

SEQ ID NO: 816540 - DNA, 15 bp, Homo sapiens
cctctccagtcagta

SEQ ID NO: 816541 - DNA, 15 bp, Homo sapiens
ctctccagtcagtat

SEQ ID NO: 816542 - DNA, 15 bp, Homo sapiens
tctccagtcagtata

SEQ ID NO: 816543 - DNA, 15 bp, Homo sapiens
ctccagtcagtatac

SEQ ID NO: 816544 - DNA, 15 bp, Homo sapiens
tccagtcagtataca

SEQ ID NO: 816545 - DNA, 15 bp, Homo sapiens
ccagtcagtatacag

SEQ ID NO: 816546 - DNA, 15 bp, Homo sapiens
cagtcagtatacaga

SEQ ID NO: 816547 - DNA, 15 bp, Homo sapiens
agtcagtatacagaa

SEQ ID NO: 816548 - DNA, 15 bp, Homo sapiens
gtcagtatacagaac

SEQ ID NO: 816549 - DNA, 15 bp, Homo sapiens
tcagtatacagaact

SEQ ID NO: 816550 - DNA, 15 bp, Homo sapiens
cagtatacagaactc

SEQ ID NO: 816551 - DNA, 15 bp, Homo sapiens
agtatacagaactct

SEQ ID NO: 816552 - DNA, 15 bp, Homo sapiens
gtatacagaactctt

SEQ ID NO: 816553 - DNA, 15 bp, Homo sapiens
tatacagaactcttc

SEQ ID NO: 816554 - DNA, 15 bp, Homo sapiens
atacagaactcttcc

SEQ ID NO: 816555 - DNA, 15 bp, Homo sapiens
tacagaactcttcca

SEQ ID NO: 816556 - DNA, 15 bp, Homo sapiens
acagaactcttccat

SEQ ID NO: 816557 - DNA, 15 bp, Homo sapiens
cagaactcttccatc

SEQ ID NO: 816558 - DNA, 15 bp, Homo sapiens
agaactcttccatca

SEQ ID NO: 816559 - DNA, 15 bp, Homo sapiens
gaactcttccatcag

SEQ ID NO: 816560 - DNA, 15 bp, Homo sapiens
aactcttccatcagc

SEQ ID NO: 816561 - DNA, 15 bp, Homo sapiens
actcttccatcagca

SEQ ID NO: 816562 - DNA, 15 bp, Homo sapiens
ctcttccatcagcac

SEQ ID NO: 816563 - DNA, 15 bp, Homo sapiens
tcttccatcagcaca

SEQ ID NO: 816564 - DNA, 15 bp, Homo sapiens
cttccatcagcacaa

SEQ ID NO: 816565 - DNA, 15 bp, Homo sapiens
ttccatcagcacaat

SEQ ID NO: 816566 - DNA, 15 bp, Homo sapiens
tccatcagcacaatg

SEQ ID NO: 816567 - DNA, 15 bp, Homo sapiens
ccatcagcacaatga

SEQ ID NO: 816568 - DNA, 15 bp, Homo sapiens
catcagcacaatgaa

SEQ ID NO: 816569 - DNA, 15 bp, Homo sapiens
atcagcacaatgaaa

SEQ ID NO: 816570 - DNA, 15 bp, Homo sapiens
tcagcacaatgaaat

SEQ ID NO: 816571 - DNA, 15 bp, Homo sapiens
cagcacaatgaaatt

SEQ ID NO: 816572 - DNA, 15 bp, Homo sapiens
agcacaatgaaattc

SEQ ID NO: 816573 - DNA, 15 bp, Homo sapiens
gcacaatgaaattct

SEQ ID NO: 816574 - DNA, 15 bp, Homo sapiens
cacaatgaaattctc

SEQ ID NO: 816575 - DNA, 15 bp, Homo sapiens
acaatgaaattctct

SEQ ID NO: 816576 - DNA, 15 bp, Homo sapiens
caatgaaattctctt

SEQ ID NO: 816577 - DNA, 15 bp, Homo sapiens
aatgaaattctcttg

SEQ ID NO: 816578 - DNA, 15 bp, Homo sapiens
atgaaattctcttgt

SEQ ID NO: 816579 - DNA, 15 bp, Homo sapiens
tgaaattctcttgtg

SEQ ID NO: 816580 - DNA, 15 bp, Homo sapiens
gaaattctcttgtga

SEQ ID NO: 816581 - DNA, 15 bp, Homo sapiens
aaattctcttgtgag

SEQ ID NO: 816582 - DNA, 15 bp, Homo sapiens
aattctcttgtgaga

SEQ ID NO: 816583 - DNA, 15 bp, Homo sapiens
attctcttgtgagaa

SEQ ID NO: 816584 - DNA, 15 bp, Homo sapiens
ttctcttgtgagaaa

SEQ ID NO: 816585 - DNA, 15 bp, Homo sapiens
tctcttgtgagaaac

SEQ ID NO: 816586 - DNA, 15 bp, Homo sapiens
ctcttgtgagaaacc

SEQ ID NO: 816587 - DNA, 15 bp, Homo sapiens
tcttgtgagaaacca

SEQ ID NO: 816588 - DNA, 15 bp, Homo sapiens
cttgtgagaaaccaa

SEQ ID NO: 816589 - DNA, 15 bp, Homo sapiens
ttgtgagaaaccaaa

SEQ ID NO: 816590 - DNA, 15 bp, Homo sapiens
tgtgagaaaccaaat

SEQ ID NO: 816591 - DNA, 15 bp, Homo sapiens
gtgagaaaccaaatt

SEQ ID NO: 816592 - DNA, 15 bp, Homo sapiens
tgagaaaccaaattt

SEQ ID NO: 816593 - DNA, 15 bp, Homo sapiens
gagaaaccaaatttt

SEQ ID NO: 816594 - DNA, 15 bp, Homo sapiens
agaaaccaaatttta

SEQ ID NO: 816595 - DNA, 15 bp, Homo sapiens
gaaaccaaattttaa

SEQ ID NO: 816596 - DNA, 15 bp, Homo sapiens
aaaccaaattttaaa

SEQ ID NO: 816597 - DNA, 15 bp, Homo sapiens
aaccaaattttaaaa

SEQ ID NO: 816598 - DNA, 15 bp, Homo sapiens
accaaattttaaaaa

SEQ ID NO: 816599 - DNA, 15 bp, Homo sapiens
ccaaattttaaaaag

SEQ ID NO: 816600 - DNA, 15 bp, Homo sapiens
caaattttaaaaaga

SEQ ID NO: 816601 - DNA, 15 bp, Homo sapiens
aaattttaaaaagaa

SEQ ID NO: 816602 - DNA, 15 bp, Homo sapiens
aattttaaaaagaaa

SEQ ID NO: 816603 - DNA, 15 bp, Homo sapiens
attttaaaaagaaaa

SEQ ID NO: 816604 - DNA, 15 bp, Homo sapiens
ttttaaaaagaaaaa

SEQ ID NO: 816605 - DNA, 15 bp, Homo sapiens
tttaaaaagaaaaag

SEQ ID NO: 816606 - DNA, 15 bp, Homo sapiens
ttaaaaagaaaaaga

SEQ ID NO: 816607 - DNA, 15 bp, Homo sapiens
taaaaagaaaaagaa

SEQ ID NO: 816608 - DNA, 15 bp, Homo sapiens
aaaaagaaaaagaaa

SEQ ID NO: 816609 - DNA, 15 bp, Homo sapiens
aaaagaaaaagaaat

SEQ ID NO: 816610 - DNA, 15 bp, Homo sapiens
aaagaaaaagaaata

SEQ ID NO: 816611 - DNA, 15 bp, Homo sapiens
aagaaaaagaaataa

SEQ ID NO: 816612 - DNA, 15 bp, Homo sapiens
agaaaaagaaataac

SEQ ID NO: 816613 - DNA, 15 bp, Homo sapiens
gaaaaagaaataact

SEQ ID NO: 816614 - DNA, 15 bp, Homo sapiens
aaaaagaaataactt

SEQ ID NO: 816615 - DNA, 15 bp, Homo sapiens
aaaagaaataactta

SEQ ID NO: 816616 - DNA, 15 bp, Homo sapiens
aaagaaataacttaa

SEQ ID NO: 816617 - DNA, 15 bp, Homo sapiens
aagaaataacttaaa

SEQ ID NO: 816618 - DNA, 15 bp, Homo sapiens
agaaataacttaaaa

SEQ ID NO: 816619 - DNA, 15 bp, Homo sapiens
gaaataacttaaaaa

SEQ ID NO: 816620 - DNA, 15 bp, Homo sapiens
aaataacttaaaaat

SEQ ID NO: 816621 - DNA, 15 bp, Homo sapiens
aataacttaaaaata

SEQ ID NO: 816622 - DNA, 15 bp, Homo sapiens
ataacttaaaaataa

SEQ ID NO: 816623 - DNA, 15 bp, Homo sapiens
taacttaaaaataag

SEQ ID NO: 816624 - DNA, 15 bp, Homo sapiens
aacttaaaaataagc

SEQ ID NO: 816625 - DNA, 15 bp, Homo sapiens
acttaaaaataagca

SEQ ID NO: 816626 - DNA, 15 bp, Homo sapiens
cttaaaaataagcac

SEQ ID NO: 816627 - DNA, 15 bp, Homo sapiens
ttaaaaataagcacc

SEQ ID NO: 816628 - DNA, 15 bp, Homo sapiens
taaaaataagcacca

SEQ ID NO: 816629 - DNA, 15 bp, Homo sapiens
aaaaataagcaccaa

SEQ ID NO: 816630 - DNA, 15 bp, Homo sapiens
aaaataagcaccaac

SEQ ID NO: 816631 - DNA, 15 bp, Homo sapiens
aaataagcaccaaca

SEQ ID NO: 816632 - DNA, 15 bp, Homo sapiens
aataagcaccaacat

SEQ ID NO: 816633 - DNA, 15 bp, Homo sapiens
ataagcaccaacatt

SEQ ID NO: 816634 - DNA, 15 bp, Homo sapiens
taagcaccaacattt

SEQ ID NO: 816635 - DNA, 15 bp, Homo sapiens
aagcaccaacatttt

SEQ ID NO: 816636 - DNA, 15 bp, Homo sapiens
agcaccaacattttt

SEQ ID NO: 816637 - DNA, 15 bp, Homo sapiens
gcaccaacattttta

SEQ ID NO: 816638 - DNA, 15 bp, Homo sapiens
caccaacatttttat

SEQ ID NO: 816639 - DNA, 15 bp, Homo sapiens
accaacatttttata

SEQ ID NO: 816640 - DNA, 15 bp, Homo sapiens
ccaacatttttataa

SEQ ID NO: 816641 - DNA, 15 bp, Homo sapiens
caacatttttataag

SEQ ID NO: 816642 - DNA, 15 bp, Homo sapiens
aacatttttataagg

SEQ ID NO: 816643 - DNA, 15 bp, Homo sapiens
acatttttataaggt

SEQ ID NO: 816644 - DNA, 15 bp, Homo sapiens
catttttataaggtc

SEQ ID NO: 816645 - DNA, 15 bp, Homo sapiens
atttttataaggtca

SEQ ID NO: 816646 - DNA, 15 bp, Homo sapiens
tttttataaggtcac

SEQ ID NO: 816647 - DNA, 15 bp, Homo sapiens
ttttataaggtcaca

SEQ ID NO: 816648 - DNA, 15 bp, Homo sapiens
tttataaggtcacat

SEQ ID NO: 816649 - DNA, 15 bp, Homo sapiens
ttataaggtcacatg

SEQ ID NO: 816650 - DNA, 15 bp, Homo sapiens
tataaggtcacatgc

SEQ ID NO: 816651 - DNA, 15 bp, Homo sapiens
ataaggtcacatgcg

SEQ ID NO: 816652 - DNA, 15 bp, Homo sapiens
taaggtcacatgcgt

SEQ ID NO: 816653 - DNA, 15 bp, Homo sapiens
aaggtcacatgcgtg

SEQ ID NO: 816654 - DNA, 15 bp, Homo sapiens
aggtcacatgcgtga

SEQ ID NO: 816655 - DNA, 15 bp, Homo sapiens
ggtcacatgcgtgaa

SEQ ID NO: 816656 - DNA, 15 bp, Homo sapiens
gtcacatgcgtgaac

SEQ ID NO: 816657 - DNA, 15 bp, Homo sapiens
tcacatgcgtgaact

SEQ ID NO: 816658 - DNA, 15 bp, Homo sapiens
cacatgcgtgaactt

SEQ ID NO: 816659 - DNA, 15 bp, Homo sapiens
acatgcgtgaacttt

SEQ ID NO: 816660 - DNA, 15 bp, Homo sapiens
catgcgtgaacttta

SEQ ID NO: 816661 - DNA, 15 bp, Homo sapiens
atgcgtgaactttaa

SEQ ID NO: 816662 - DNA, 15 bp, Homo sapiens
tgcgtgaactttaaa

SEQ ID NO: 816663 - DNA, 15 bp, Homo sapiens
gcgtgaactttaaaa

SEQ ID NO: 816664 - DNA, 15 bp, Homo sapiens
cgtgaactttaaaat

SEQ ID NO: 816665 - DNA, 15 bp, Homo sapiens
gtgaactttaaaata

SEQ ID NO: 816666 - DNA, 15 bp, Homo sapiens
tgaactttaaaataa

SEQ ID NO: 816667 - DNA, 15 bp, Homo sapiens
gaactttaaaataat

SEQ ID NO: 816668 - DNA, 15 bp, Homo sapiens
aactttaaaataata

SEQ ID NO: 816669 - DNA, 15 bp, Homo sapiens
actttaaaataatac

SEQ ID NO: 816670 - DNA, 15 bp, Homo sapiens
ctttaaaataatact

SEQ ID NO: 816671 - DNA, 15 bp, Homo sapiens
tttaaaataatacta

SEQ ID NO: 816672 - DNA, 15 bp, Homo sapiens
ttaaaataatactaa

SEQ ID NO: 816673 - DNA, 15 bp, Homo sapiens
taaaataatactaat

SEQ ID NO: 816674 - DNA, 15 bp, Homo sapiens
aaaataatactaatt

SEQ ID NO: 816675 - DNA, 15 bp, Homo sapiens
aaataatactaattt

SEQ ID NO: 816676 - DNA, 15 bp, Homo sapiens
aataatactaatttc

SEQ ID NO: 816677 - DNA, 15 bp, Homo sapiens
ataatactaatttca

SEQ ID NO: 816678 - DNA, 15 bp, Homo sapiens
taatactaatttcag

SEQ ID NO: 816679 - DNA, 15 bp, Homo sapiens
aatactaatttcagg

SEQ ID NO: 816680 - DNA, 15 bp, Homo sapiens
atactaatttcaggc

SEQ ID NO: 816681 - DNA, 15 bp, Homo sapiens
tactaatttcaggct

SEQ ID NO: 816682 - DNA, 15 bp, Homo sapiens
actaatttcaggctg

SEQ ID NO: 816683 - DNA, 15 bp, Homo sapiens
ctaatttcaggctgg

SEQ ID NO: 816684 - DNA, 15 bp, Homo sapiens
taatttcaggctggg

SEQ ID NO: 816685 - DNA, 15 bp, Homo sapiens
aatttcaggctgggt

SEQ ID NO: 816686 - DNA, 15 bp, Homo sapiens
atttcaggctgggtg

SEQ ID NO: 816687 - DNA, 15 bp, Homo sapiens
tttcaggctgggtgc

SEQ ID NO: 816688 - DNA, 15 bp, Homo sapiens
ttcaggctgggtgcg

SEQ ID NO: 816689 - DNA, 15 bp, Homo sapiens
tcaggctgggtgcgg

SEQ ID NO: 816690 - DNA, 15 bp, Homo sapiens
caggctgggtgcggt

SEQ ID NO: 816691 - DNA, 15 bp, Homo sapiens
aggctgggtgcggtg

SEQ ID NO: 816692 - DNA, 15 bp, Homo sapiens
ctgggtgcggtgcct

SEQ ID NO: 816693 - DNA, 15 bp, Homo sapiens
tgggtgcggtgcctc

SEQ ID NO: 816694 - DNA, 15 bp, Homo sapiens
gggtgcggtgcctca

SEQ ID NO: 816695 - DNA, 15 bp, Homo sapiens
ggtgcggtgcctcac

SEQ ID NO: 816696 - DNA, 15 bp, Homo sapiens
gtgcggtgcctcacg

SEQ ID NO: 816697 - DNA, 15 bp, Homo sapiens
tgcggtgcctcacgc

SEQ ID NO: 816698 - DNA, 15 bp, Homo sapiens
gcggtgcctcacgcc

SEQ ID NO: 816699 - DNA, 15 bp, Homo sapiens
cggtgcctcacgcct

SEQ ID NO: 816700 - DNA, 15 bp, Homo sapiens
ggtgcctcacgcctg

SEQ ID NO: 816701 - DNA, 15 bp, Homo sapiens
gtgcctcacgcctgt

SEQ ID NO: 816702 - DNA, 15 bp, Homo sapiens
tgcctcacgcctgta

SEQ ID NO: 816703 - DNA, 15 bp, Homo sapiens
gcctcacgcctgtaa

SEQ ID NO: 816704 - DNA, 15 bp, Homo sapiens
cctcacgcctgtaat

SEQ ID NO: 816705 - DNA, 15 bp, Homo sapiens
taatcccagcactta

SEQ ID NO: 816706 - DNA, 15 bp, Homo sapiens
aatcccagcacttag

SEQ ID NO: 816707 - DNA, 15 bp, Homo sapiens
atcccagcacttagg

SEQ ID NO: 816708 - DNA, 15 bp, Homo sapiens
tcccagcacttaggc

SEQ ID NO: 816709 - DNA, 15 bp, Homo sapiens
cccagcacttaggcc

SEQ ID NO: 816710 - DNA, 15 bp, Homo sapiens
ccagcacttaggcct

SEQ ID NO: 816711 - DNA, 15 bp, Homo sapiens
cagcacttaggcctg

SEQ ID NO: 816712 - DNA, 15 bp, Homo sapiens
agcacttaggcctgt

SEQ ID NO: 816713 - DNA, 15 bp, Homo sapiens
gcacttaggcctgtt

SEQ ID NO: 816714 - DNA, 15 bp, Homo sapiens
cacttaggcctgttc

SEQ ID NO: 816715 - DNA, 15 bp, Homo sapiens
acttaggcctgttct

SEQ ID NO: 816716 - DNA, 15 bp, Homo sapiens
cttaggcctgttcta

SEQ ID NO: 816717 - DNA, 15 bp, Homo sapiens
ttaggcctgttctac

SEQ ID NO: 816718 - DNA, 15 bp, Homo sapiens
taggcctgttctact

SEQ ID NO: 816719 - DNA, 15 bp, Homo sapiens
aggcctgttctactc

SEQ ID NO: 816720 - DNA, 15 bp, Homo sapiens
ggcctgttctactct

SEQ ID NO: 816721 - DNA, 15 bp, Homo sapiens
gcctgttctactctc

SEQ ID NO: 816722 - DNA, 15 bp, Homo sapiens
cctgttctactctcc

SEQ ID NO: 816723 - DNA, 15 bp, Homo sapiens
ctgttctactctcct

SEQ ID NO: 816724 - DNA, 15 bp, Homo sapiens
tgttctactctcctt

SEQ ID NO: 816725 - DNA, 15 bp, Homo sapiens
gttctactctccttt

SEQ ID NO: 816726 - DNA, 15 bp, Homo sapiens
ttctactctcctttg

SEQ ID NO: 816727 - DNA, 15 bp, Homo sapiens
tctactctcctttga

SEQ ID NO: 816728 - DNA, 15 bp, Homo sapiens
ctactctcctttgaa

SEQ ID NO: 816729 - DNA, 15 bp, Homo sapiens
tactctcctttgaaa

SEQ ID NO: 816730 - DNA, 15 bp, Homo sapiens
actctcctttgaaat

SEQ ID NO: 816731 - DNA, 15 bp, Homo sapiens
ctctcctttgaaatg

SEQ ID NO: 816732 - DNA, 15 bp, Homo sapiens
tctcctttgaaatga

SEQ ID NO: 816733 - DNA, 15 bp, Homo sapiens
ctcctttgaaatgag

SEQ ID NO: 816734 - DNA, 15 bp, Homo sapiens
tcctttgaaatgagg

SEQ ID NO: 816735 - DNA, 15 bp, Homo sapiens
cctttgaaatgaggt

SEQ ID NO: 816736 - DNA, 15 bp, Homo sapiens
ctttgaaatgaggtc

SEQ ID NO: 816737 - DNA, 15 bp, Homo sapiens
tttgaaatgaggtcc

SEQ ID NO: 816738 - DNA, 15 bp, Homo sapiens
ttgaaatgaggtcct

SEQ ID NO: 816739 - DNA, 15 bp, Homo sapiens
tgaaatgaggtcctt

SEQ ID NO: 816740 - DNA, 15 bp, Homo sapiens
gaaatgaggtccttc

SEQ ID NO: 816741 - DNA, 15 bp, Homo sapiens
aaatgaggtccttcc

SEQ ID NO: 816742 - DNA, 15 bp, Homo sapiens
aatgaggtccttccc

SEQ ID NO: 816743 - DNA, 15 bp, Homo sapiens
atgaggtccttcccc

SEQ ID NO: 816744 - DNA, 15 bp, Homo sapiens
tgaggtccttcccca

SEQ ID NO: 816745 - DNA, 15 bp, Homo sapiens
gaggtccttccccag

SEQ ID NO: 816746 - DNA, 15 bp, Homo sapiens
ggtccttccccagca

SEQ ID NO: 816747 - DNA, 15 bp, Homo sapiens
gtccttccccagcat

SEQ ID NO: 816748 - DNA, 15 bp, Homo sapiens
tccttccccagcatg

SEQ ID NO: 816749 - DNA, 15 bp, Homo sapiens
ccttccccagcatgc

SEQ ID NO: 816750 - DNA, 15 bp, Homo sapiens
cttccccagcatgcc

SEQ ID NO: 816751 - DNA, 15 bp, Homo sapiens
ttccccagcatgcct

SEQ ID NO: 816752 - DNA, 15 bp, Homo sapiens
tccccagcatgcctt

SEQ ID NO: 816753 - DNA, 15 bp, Homo sapiens
ccccagcatgccttc

SEQ ID NO: 816754 - DNA, 15 bp, Homo sapiens
cccagcatgccttcc

SEQ ID NO: 816755 - DNA, 15 bp, Homo sapiens
ccagcatgccttcct

SEQ ID NO: 816756 - DNA, 15 bp, Homo sapiens
cagcatgccttcctg

SEQ ID NO: 816757 - DNA, 15 bp, Homo sapiens
agcatgccttcctgc

SEQ ID NO: 816758 - DNA, 15 bp, Homo sapiens
gcatgccttcctgct

SEQ ID NO: 816759 - DNA, 15 bp, Homo sapiens
catgccttcctgctg

SEQ ID NO: 816760 - DNA, 15 bp, Homo sapiens
atgccttcctgctga

SEQ ID NO: 816761 - DNA, 15 bp, Homo sapiens
tgccttcctgctgag

SEQ ID NO: 816762 - DNA, 15 bp, Homo sapiens
gccttcctgctgagc

SEQ ID NO: 816763 - DNA, 15 bp, Homo sapiens
ccttcctgctgagca

SEQ ID NO: 816764 - DNA, 15 bp, Homo sapiens
cttcctgctgagcaa

SEQ ID NO: 816765 - DNA, 15 bp, Homo sapiens
ttcctgctgagcaat

SEQ ID NO: 816766 - DNA, 15 bp, Homo sapiens
tcctgctgagcaatt

SEQ ID NO: 816767 - DNA, 15 bp, Homo sapiens
cctgctgagcaattg

SEQ ID NO: 816768 - DNA, 15 bp, Homo sapiens
ctgctgagcaattgc

SEQ ID NO: 816769 - DNA, 15 bp, Homo sapiens
tgctgagcaattgct

SEQ ID NO: 816770 - DNA, 15 bp, Homo sapiens
gctgagcaattgctg

SEQ ID NO: 816771 - DNA, 15 bp, Homo sapiens
ctgagcaattgctgc

SEQ ID NO: 816772 - DNA, 15 bp, Homo sapiens
tgagcaattgctgcc

SEQ ID NO: 816773 - DNA, 15 bp, Homo sapiens
gagcaattgctgcct

SEQ ID NO: 816774 - DNA, 15 bp, Homo sapiens
agcaattgctgcctg

SEQ ID NO: 816775 - DNA, 15 bp, Homo sapiens
gcaattgctgcctgg

SEQ ID NO: 816776 - DNA, 15 bp, Homo sapiens
caattgctgcctgga

SEQ ID NO: 816777 - DNA, 15 bp, Homo sapiens
aattgctgcctggag

SEQ ID NO: 816778 - DNA, 15 bp, Homo sapiens
attgctgcctggagc

SEQ ID NO: 816779 - DNA, 15 bp, Homo sapiens
ttgctgcctggagca

SEQ ID NO: 816780 - DNA, 15 bp, Homo sapiens
tgctgcctggagcat

SEQ ID NO: 816781 - DNA, 15 bp, Homo sapiens
gctgcctggagcatc

SEQ ID NO: 816782 - DNA, 15 bp, Homo sapiens
ctgcctggagcatct

SEQ ID NO: 816783 - DNA, 15 bp, Homo sapiens
tgcctggagcatctc

SEQ ID NO: 816784 - DNA, 15 bp, Homo sapiens
gcctggagcatctcc

SEQ ID NO: 816785 - DNA, 15 bp, Homo sapiens
cctggagcatctccc

SEQ ID NO: 816786 - DNA, 15 bp, Homo sapiens
ctggagcatctccct

SEQ ID NO: 816787 - DNA, 15 bp, Homo sapiens
tggagcatctccctg

SEQ ID NO: 816788 - DNA, 15 bp, Homo sapiens
ggagcatctccctga

SEQ ID NO: 816789 - DNA, 15 bp, Homo sapiens
gagcatctccctgag

SEQ ID NO: 816790 - DNA, 15 bp, Homo sapiens
agcatctccctgagt

SEQ ID NO: 816791 - DNA, 15 bp, Homo sapiens
gcatctccctgagtg

SEQ ID NO: 816792 - DNA, 15 bp, Homo sapiens
catctccctgagtgt

SEQ ID NO: 816793 - DNA, 15 bp, Homo sapiens
atctccctgagtgtc

SEQ ID NO: 816794 - DNA, 15 bp, Homo sapiens
tctccctgagtgtct

SEQ ID NO: 816795 - DNA, 15 bp, Homo sapiens
ctccctgagtgtctg

SEQ ID NO: 816796 - DNA, 15 bp, Homo sapiens
tccctgagtgtctgc

SEQ ID NO: 816797 - DNA, 15 bp, Homo sapiens
ccctgagtgtctgct

SEQ ID NO: 816798 - DNA, 15 bp, Homo sapiens
cctgagtgtctgctg

SEQ ID NO: 816799 - DNA, 15 bp, Homo sapiens
ctgagtgtctgctgt

SEQ ID NO: 816800 - DNA, 15 bp, Homo sapiens
tgagtgtctgctgtg

SEQ ID NO: 816801 - DNA, 15 bp, Homo sapiens
gagtgtctgctgtgc

SEQ ID NO: 816802 - DNA, 15 bp, Homo sapiens
agtgtctgctgtgca

SEQ ID NO: 816803 - DNA, 15 bp, Homo sapiens
gtgtctgctgtgcag

SEQ ID NO: 816804 - DNA, 15 bp, Homo sapiens
tgtctgctgtgcagc

SEQ ID NO: 816805 - DNA, 15 bp, Homo sapiens
gtctgctgtgcagca

SEQ ID NO: 816806 - DNA, 15 bp, Homo sapiens
tctgctgtgcagcaa

SEQ ID NO: 816807 - DNA, 15 bp, Homo sapiens
ctgctgtgcagcaag

SEQ ID NO: 816808 - DNA, 15 bp, Homo sapiens
tgctgtgcagcaagg

SEQ ID NO: 816809 - DNA, 15 bp, Homo sapiens
gctgtgcagcaaggt

SEQ ID NO: 816810 - DNA, 15 bp, Homo sapiens
ctgtgcagcaaggtg

SEQ ID NO: 816811 - DNA, 15 bp, Homo sapiens
tgtgcagcaaggtgg

SEQ ID NO: 816812 - DNA, 15 bp, Homo sapiens
gtgcagcaaggtggc

SEQ ID NO: 816813 - DNA, 15 bp, Homo sapiens
tgcagcaaggtggct

SEQ ID NO: 816814 - DNA, 15 bp, Homo sapiens
gcagcaaggtggctg

SEQ ID NO: 816815 - DNA, 15 bp, Homo sapiens
cagcaaggtggctgc

SEQ ID NO: 816816 - DNA, 15 bp, Homo sapiens
agcaaggtggctgcc

SEQ ID NO: 816817 - DNA, 15 bp, Homo sapiens
gcaaggtggctgcca

SEQ ID NO: 816818 - DNA, 15 bp, Homo sapiens
caaggtggctgccac

SEQ ID NO: 816819 - DNA, 15 bp, Homo sapiens
aaggtggctgccact

SEQ ID NO: 816820 - DNA, 15 bp, Homo sapiens
aggtggctgccactt

SEQ ID NO: 816821 - DNA, 15 bp, Homo sapiens
ggtggctgccacttt

SEQ ID NO: 816822 - DNA, 15 bp, Homo sapiens
gtggctgccacttta

SEQ ID NO: 816823 - DNA, 15 bp, Homo sapiens
tggctgccactttag

SEQ ID NO: 816824 - DNA, 15 bp, Homo sapiens
ggctgccactttagg

SEQ ID NO: 816825 - DNA, 15 bp, Homo sapiens
gctgccactttaggg

SEQ ID NO: 816826 - DNA, 15 bp, Homo sapiens
ctgccactttaggga

SEQ ID NO: 816827 - DNA, 15 bp, Homo sapiens
tgccactttagggaa

SEQ ID NO: 816828 - DNA, 15 bp, Homo sapiens
gccactttagggaat

SEQ ID NO: 816829 - DNA, 15 bp, Homo sapiens
ccactttagggaatc

SEQ ID NO: 816830 - DNA, 15 bp, Homo sapiens
cactttagggaatct

SEQ ID NO: 816831 - DNA, 15 bp, Homo sapiens
actttagggaatctc

SEQ ID NO: 816832 - DNA, 15 bp, Homo sapiens
ctttagggaatctca

SEQ ID NO: 816833 - DNA, 15 bp, Homo sapiens
tttagggaatctcag

SEQ ID NO: 816834 - DNA, 15 bp, Homo sapiens
ttagggaatctcagc

SEQ ID NO: 816835 - DNA, 15 bp, Homo sapiens
tagggaatctcagcc

SEQ ID NO: 816836 - DNA, 15 bp, Homo sapiens
agggaatctcagcct

SEQ ID NO: 816837 - DNA, 15 bp, Homo sapiens
gggaatctcagcctg

SEQ ID NO: 816838 - DNA, 15 bp, Homo sapiens
ggaatctcagcctgt

SEQ ID NO: 816839 - DNA, 15 bp, Homo sapiens
gaatctcagcctgtg

SEQ ID NO: 816840 - DNA, 15 bp, Homo sapiens
aatctcagcctgtgc

SEQ ID NO: 816841 - DNA, 15 bp, Homo sapiens
atctcagcctgtgct

SEQ ID NO: 816842 - DNA, 15 bp, Homo sapiens
tctcagcctgtgctc

SEQ ID NO: 816843 - DNA, 15 bp, Homo sapiens
ctcagcctgtgctcc

SEQ ID NO: 816844 - DNA, 15 bp, Homo sapiens
tcagcctgtgctcct

SEQ ID NO: 816845 - DNA, 15 bp, Homo sapiens
cagcctgtgctcctt

SEQ ID NO: 816846 - DNA, 15 bp, Homo sapiens
agcctgtgctccttt

SEQ ID NO: 816847 - DNA, 15 bp, Homo sapiens
gcctgtgctcctttt

SEQ ID NO: 816848 - DNA, 15 bp, Homo sapiens
cctgtgctccttttc

SEQ ID NO: 816849 - DNA, 15 bp, Homo sapiens
ctgtgctccttttcc

SEQ ID NO: 816850 - DNA, 15 bp, Homo sapiens
tgtgctccttttcca

SEQ ID NO: 816851 - DNA, 15 bp, Homo sapiens
gtgctccttttccaa

SEQ ID NO: 816852 - DNA, 15 bp, Homo sapiens
tgctccttttccaag

SEQ ID NO: 816853 - DNA, 15 bp, Homo sapiens
gctccttttccaagt

SEQ ID NO: 816854 - DNA, 15 bp, Homo sapiens
ctccttttccaagtt

SEQ ID NO: 816855 - DNA, 15 bp, Homo sapiens
tccttttccaagttc

SEQ ID NO: 816856 - DNA, 15 bp, Homo sapiens
ccttttccaagttca

SEQ ID NO: 816857 - DNA, 15 bp, Homo sapiens
cttttccaagttcag

SEQ ID NO: 816858 - DNA, 15 bp, Homo sapiens
ttttccaagttcagt

SEQ ID NO: 816859 - DNA, 15 bp, Homo sapiens
tttccaagttcagtg

SEQ ID NO: 816860 - DNA, 15 bp, Homo sapiens
ttccaagttcagtgt

SEQ ID NO: 816861 - DNA, 15 bp, Homo sapiens
tccaagttcagtgtg

SEQ ID NO: 816862 - DNA, 15 bp, Homo sapiens
ccaagttcagtgtgt

SEQ ID NO: 816863 - DNA, 15 bp, Homo sapiens
caagttcagtgtgta

SEQ ID NO: 816864 - DNA, 15 bp, Homo sapiens
aagttcagtgtgtat

SEQ ID NO: 816865 - DNA, 15 bp, Homo sapiens
agttcagtgtgtatt

SEQ ID NO: 816866 - DNA, 15 bp, Homo sapiens
gttcagtgtgtattg

SEQ ID NO: 816867 - DNA, 15 bp, Homo sapiens
ttcagtgtgtattgt

SEQ ID NO: 816868 - DNA, 15 bp, Homo sapiens
tcagtgtgtattgtc

SEQ ID NO: 816869 - DNA, 15 bp, Homo sapiens
cagtgtgtattgtct

SEQ ID NO: 816870 - DNA, 15 bp, Homo sapiens
agtgtgtattgtctt

SEQ ID NO: 816871 - DNA, 15 bp, Homo sapiens
gtgtgtattgtcttc

SEQ ID NO: 816872 - DNA, 15 bp, Homo sapiens
tgtgtattgtcttct

SEQ ID NO: 816873 - DNA, 15 bp, Homo sapiens
gtgtattgtcttctc

SEQ ID NO: 816874 - DNA, 15 bp, Homo sapiens
tgtattgtcttctcc

SEQ ID NO: 816875 - DNA, 15 bp, Homo sapiens
gtattgtcttctccg

SEQ ID NO: 816876 - DNA, 15 bp, Homo sapiens
tattgtcttctccgt

SEQ ID NO: 816877 - DNA, 15 bp, Homo sapiens
attgtcttctccgta

SEQ ID NO: 816878 - DNA, 15 bp, Homo sapiens
ttgtcttctccgtaa

SEQ ID NO: 816879 - DNA, 15 bp, Homo sapiens
tgtcttctccgtaag

SEQ ID NO: 816880 - DNA, 15 bp, Homo sapiens
gtcttctccgtaagt

SEQ ID NO: 816881 - DNA, 15 bp, Homo sapiens
tcttctccgtaagtc

SEQ ID NO: 816882 - DNA, 15 bp, Homo sapiens
cttctccgtaagtcc

SEQ ID NO: 816883 - DNA, 15 bp, Homo sapiens
ttctccgtaagtcca

SEQ ID NO: 816884 - DNA, 15 bp, Homo sapiens
tctccgtaagtccat

SEQ ID NO: 816885 - DNA, 15 bp, Homo sapiens
ctccgtaagtccatg

SEQ ID NO: 816886 - DNA, 15 bp, Homo sapiens
tccgtaagtccatgt

SEQ ID NO: 816887 - DNA, 15 bp, Homo sapiens
ccgtaagtccatgta

SEQ ID NO: 816888 - DNA, 15 bp, Homo sapiens
cgtaagtccatgtat

SEQ ID NO: 816889 - DNA, 15 bp, Homo sapiens
gtaagtccatgtata

SEQ ID NO: 816890 - DNA, 15 bp, Homo sapiens
taagtccatgtatag

SEQ ID NO: 816891 - DNA, 15 bp, Homo sapiens
aagtccatgtataga

SEQ ID NO: 816892 - DNA, 15 bp, Homo sapiens
agtccatgtatagag

SEQ ID NO: 816893 - DNA, 15 bp, Homo sapiens
gtccatgtatagagg

SEQ ID NO: 816894 - DNA, 15 bp, Homo sapiens
tccatgtatagaggg

SEQ ID NO: 816895 - DNA, 15 bp, Homo sapiens
ccatgtatagagggt

SEQ ID NO: 816896 - DNA, 15 bp, Homo sapiens
catgtatagagggtt

SEQ ID NO: 816897 - DNA, 15 bp, Homo sapiens
atgtatagagggttc

SEQ ID NO: 816898 - DNA, 15 bp, Homo sapiens
tgtatagagggttct

SEQ ID NO: 816899 - DNA, 15 bp, Homo sapiens
gtatagagggttctt

SEQ ID NO: 816900 - DNA, 15 bp, Homo sapiens
tatagagggttcttt

SEQ ID NO: 816901 - DNA, 15 bp, Homo sapiens
atagagggttctttt

SEQ ID NO: 816902 - DNA, 15 bp, Homo sapiens
tagagggttcttttt

SEQ ID NO: 816903 - DNA, 15 bp, Homo sapiens
agagggttctttttc

SEQ ID NO: 816904 - DNA, 15 bp, Homo sapiens
gagggttctttttcc

SEQ ID NO: 816905 - DNA, 15 bp, Homo sapiens
agggttctttttccc

SEQ ID NO: 816906 - DNA, 15 bp, Homo sapiens
gggttctttttccct

SEQ ID NO: 816907 - DNA, 15 bp, Homo sapiens
ggttctttttccctg

SEQ ID NO: 816908 - DNA, 15 bp, Homo sapiens
gttctttttccctgt

SEQ ID NO: 816909 - DNA, 15 bp, Homo sapiens
ttctttttccctgtg

SEQ ID NO: 816910 - DNA, 15 bp, Homo sapiens
tctttttccctgtgt

SEQ ID NO: 816911 - DNA, 15 bp, Homo sapiens
ctttttccctgtgtt

SEQ ID NO: 816912 - DNA, 15 bp, Homo sapiens
tttttccctgtgtta

SEQ ID NO: 816913 - DNA, 15 bp, Homo sapiens
ttttccctgtgttag

SEQ ID NO: 816914 - DNA, 15 bp, Homo sapiens
tttccctgtgttagc

SEQ ID NO: 816915 - DNA, 15 bp, Homo sapiens
ttccctgtgttagca

SEQ ID NO: 816916 - DNA, 15 bp, Homo sapiens
tccctgtgttagcat

SEQ ID NO: 816917 - DNA, 15 bp, Homo sapiens
ccctgtgttagcatt

SEQ ID NO: 816918 - DNA, 15 bp, Homo sapiens
cctgtgttagcattt

SEQ ID NO: 816919 - DNA, 15 bp, Homo sapiens
ctgtgttagcatttg

SEQ ID NO: 816920 - DNA, 15 bp, Homo sapiens
tgtgttagcatttgt

SEQ ID NO: 816921 - DNA, 15 bp, Homo sapiens
gtgttagcatttgta

SEQ ID NO: 816922 - DNA, 15 bp, Homo sapiens
tgttagcatttgtac

SEQ ID NO: 816923 - DNA, 15 bp, Homo sapiens
gttagcatttgtaca

SEQ ID NO: 816924 - DNA, 15 bp, Homo sapiens
ttagcatttgtacac

SEQ ID NO: 816925 - DNA, 15 bp, Homo sapiens
tagcatttgtacact

SEQ ID NO: 816926 - DNA, 15 bp, Homo sapiens
agcatttgtacactt

SEQ ID NO: 816927 - DNA, 15 bp, Homo sapiens
gcatttgtacacttg

SEQ ID NO: 816928 - DNA, 15 bp, Homo sapiens
catttgtacacttgg

SEQ ID NO: 816929 - DNA, 15 bp, Homo sapiens
atttgtacacttggc

SEQ ID NO: 816930 - DNA, 15 bp, Homo sapiens
tttgtacacttggcc

SEQ ID NO: 816931 - DNA, 15 bp, Homo sapiens
ttgtacacttggcct

SEQ ID NO: 816932 - DNA, 15 bp, Homo sapiens
tgtacacttggcctg

SEQ ID NO: 816933 - DNA, 15 bp, Homo sapiens
gtacacttggcctgg

SEQ ID NO: 816934 - DNA, 15 bp, Homo sapiens
tacacttggcctggc

SEQ ID NO: 816935 - DNA, 15 bp, Homo sapiens
acacttggcctggct

SEQ ID NO: 816936 - DNA, 15 bp, Homo sapiens
cacttggcctggctt

SEQ ID NO: 816937 - DNA, 15 bp, Homo sapiens
acttggcctggcttc

SEQ ID NO: 816938 - DNA, 15 bp, Homo sapiens
cttggcctggcttca

SEQ ID NO: 816939 - DNA, 15 bp, Homo sapiens
ttggcctggcttcat

SEQ ID NO: 816940 - DNA, 15 bp, Homo sapiens
tggcctggcttcatg

SEQ ID NO: 816941 - DNA, 15 bp, Homo sapiens
ggcctggcttcatgg

SEQ ID NO: 816942 - DNA, 15 bp, Homo sapiens
gcctggcttcatgga

SEQ ID NO: 816943 - DNA, 15 bp, Homo sapiens
cctggcttcatggaa

SEQ ID NO: 816944 - DNA, 15 bp, Homo sapiens
ctggcttcatggaaa

SEQ ID NO: 816945 - DNA, 15 bp, Homo sapiens
tggcttcatggaaac

SEQ ID NO: 816946 - DNA, 15 bp, Homo sapiens
ggcttcatggaaact

SEQ ID NO: 816947 - DNA, 15 bp, Homo sapiens
gcttcatggaaactc

SEQ ID NO: 816948 - DNA, 15 bp, Homo sapiens
cttcatggaaactcc

SEQ ID NO: 816949 - DNA, 15 bp, Homo sapiens
ttcatggaaactcca

SEQ ID NO: 816950 - DNA, 15 bp, Homo sapiens
tcatggaaactccaa

SEQ ID NO: 816951 - DNA, 15 bp, Homo sapiens
catggaaactccaaa

SEQ ID NO: 816952 - DNA, 15 bp, Homo sapiens
atggaaactccaaac

SEQ ID NO: 816953 - DNA, 15 bp, Homo sapiens
tggaaactccaaact

SEQ ID NO: 816954 - DNA, 15 bp, Homo sapiens
ggaaactccaaacta

SEQ ID NO: 816955 - DNA, 15 bp, Homo sapiens
gaaactccaaactag

SEQ ID NO: 816956 - DNA, 15 bp, Homo sapiens
aaactccaaactaga

SEQ ID NO: 816957 - DNA, 15 bp, Homo sapiens
aactccaaactagaa

SEQ ID NO: 816958 - DNA, 15 bp, Homo sapiens
actccaaactagaat

SEQ ID NO: 816959 - DNA, 15 bp, Homo sapiens
ctccaaactagaatg

SEQ ID NO: 816960 - DNA, 15 bp, Homo sapiens
tccaaactagaatgg

SEQ ID NO: 816961 - DNA, 15 bp, Homo sapiens
ccaaactagaatgga

SEQ ID NO: 816962 - DNA, 15 bp, Homo sapiens
caaactagaatggac

SEQ ID NO: 816963 - DNA, 15 bp, Homo sapiens
aaactagaatggact

SEQ ID NO: 816964 - DNA, 15 bp, Homo sapiens
aactagaatggactt

SEQ ID NO: 816965 - DNA, 15 bp, Homo sapiens
actagaatggacttg

SEQ ID NO: 816966 - DNA, 15 bp, Homo sapiens
ctagaatggacttgg

SEQ ID NO: 816967 - DNA, 15 bp, Homo sapiens
tagaatggacttgga

SEQ ID NO: 816968 - DNA, 15 bp, Homo sapiens
agaatggacttggaa

SEQ ID NO: 816969 - DNA, 15 bp, Homo sapiens
gaatggacttggaac

SEQ ID NO: 816970 - DNA, 15 bp, Homo sapiens
aatggacttggaaca

SEQ ID NO: 816971 - DNA, 15 bp, Homo sapiens
atggacttggaacaa

SEQ ID NO: 816972 - DNA, 15 bp, Homo sapiens
tggacttggaacaaa

SEQ ID NO: 816973 - DNA, 15 bp, Homo sapiens
ggacttggaacaaat

SEQ ID NO: 816974 - DNA, 15 bp, Homo sapiens
gacttggaacaaatg

SEQ ID NO: 816975 - DNA, 15 bp, Homo sapiens
acttggaacaaatgg

SEQ ID NO: 816976 - DNA, 15 bp, Homo sapiens
cttggaacaaatgga

SEQ ID NO: 816977 - DNA, 15 bp, Homo sapiens
ttggaacaaatggaa

SEQ ID NO: 816978 - DNA, 15 bp, Homo sapiens
tggaacaaatggaaa

SEQ ID NO: 816979 - DNA, 15 bp, Homo sapiens
ggaacaaatggaaat

SEQ ID NO: 816980 - DNA, 15 bp, Homo sapiens
gaacaaatggaaatc

SEQ ID NO: 816981 - DNA, 15 bp, Homo sapiens
aacaaatggaaatcc

SEQ ID NO: 816982 - DNA, 15 bp, Homo sapiens
acaaatggaaatcca

SEQ ID NO: 816983 - DNA, 15 bp, Homo sapiens
caaatggaaatccac

SEQ ID NO: 816984 - DNA, 15 bp, Homo sapiens
aaatggaaatccacc

SEQ ID NO: 816985 - DNA, 15 bp, Homo sapiens
aatggaaatccacca

SEQ ID NO: 816986 - DNA, 15 bp, Homo sapiens
atggaaatccaccaa

SEQ ID NO: 816987 - DNA, 15 bp, Homo sapiens
tggaaatccaccaaa

SEQ ID NO: 816988 - DNA, 15 bp, Homo sapiens
ggaaatccaccaaac

SEQ ID NO: 816989 - DNA, 15 bp, Homo sapiens
gaaatccaccaaaca

SEQ ID NO: 816990 - DNA, 15 bp, Homo sapiens
aaatccaccaaacaa

SEQ ID NO: 816991 - DNA, 15 bp, Homo sapiens
aatccaccaaacaaa

SEQ ID NO: 816992 - DNA, 15 bp, Homo sapiens
atccaccaaacaaat

SEQ ID NO: 816993 - DNA, 15 bp, Homo sapiens
tccaccaaacaaata

SEQ ID NO: 816994 - DNA, 15 bp, Homo sapiens
ccaccaaacaaatat

SEQ ID NO: 816995 - DNA, 15 bp, Homo sapiens
caccaaacaaatatg

SEQ ID NO: 816996 - DNA, 15 bp, Homo sapiens
accaaacaaatatga

SEQ ID NO: 816997 - DNA, 15 bp, Homo sapiens
ccaaacaaatatgac

SEQ ID NO: 816998 - DNA, 15 bp, Homo sapiens
caaacaaatatgacc

SEQ ID NO: 816999 - DNA, 15 bp, Homo sapiens
aaacaaatatgaccg

SEQ ID NO: 817000 - DNA, 15 bp, Homo sapiens
aacaaatatgaccgc

SEQ ID NO: 817001 - DNA, 15 bp, Homo sapiens
acaaatatgaccgca

SEQ ID NO: 817002 - DNA, 15 bp, Homo sapiens
caaatatgaccgcat

SEQ ID NO: 817003 - DNA, 15 bp, Homo sapiens
aaatatgaccgcatg

SEQ ID NO: 817004 - DNA, 15 bp, Homo sapiens
aatatgaccgcatgg

SEQ ID NO: 817005 - DNA, 15 bp, Homo sapiens
atatgaccgcatggt

SEQ ID NO: 817006 - DNA, 15 bp, Homo sapiens
tatgaccgcatggtc

SEQ ID NO: 817007 - DNA, 15 bp, Homo sapiens
atgaccgcatggtca

SEQ ID NO: 817008 - DNA, 15 bp, Homo sapiens
tgaccgcatggtcac

SEQ ID NO: 817009 - DNA, 15 bp, Homo sapiens
gaccgcatggtcaca

SEQ ID NO: 817010 - DNA, 15 bp, Homo sapiens
accgcatggtcacag

SEQ ID NO: 817011 - DNA, 15 bp, Homo sapiens
ccgcatggtcacagc

SEQ ID NO: 817012 - DNA, 15 bp, Homo sapiens
cgcatggtcacagca

SEQ ID NO: 817013 - DNA, 15 bp, Homo sapiens
gcatggtcacagcag

SEQ ID NO: 817014 - DNA, 15 bp, Homo sapiens
catggtcacagcagc

SEQ ID NO: 817015 - DNA, 15 bp, Homo sapiens
atggtcacagcagca

SEQ ID NO: 817016 - DNA, 15 bp, Homo sapiens
tggtcacagcagcac

SEQ ID NO: 817017 - DNA, 15 bp, Homo sapiens
ggtcacagcagcaca

SEQ ID NO: 817018 - DNA, 15 bp, Homo sapiens
gtcacagcagcacac

SEQ ID NO: 817019 - DNA, 15 bp, Homo sapiens
tcacagcagcacaca

SEQ ID NO: 817020 - DNA, 15 bp, Homo sapiens
cacagcagcacacag

SEQ ID NO: 817021 - DNA, 15 bp, Homo sapiens
acagcagcacacaga

SEQ ID NO: 817022 - DNA, 15 bp, Homo sapiens
cagcagcacacagac

SEQ ID NO: 817023 - DNA, 15 bp, Homo sapiens
agcagcacacagaca

SEQ ID NO: 817024 - DNA, 15 bp, Homo sapiens
gcagcacacagacag

SEQ ID NO: 817025 - DNA, 15 bp, Homo sapiens
cagcacacagacaga

SEQ ID NO: 817026 - DNA, 15 bp, Homo sapiens
agcacacagacagaa

SEQ ID NO: 817027 - DNA, 15 bp, Homo sapiens
gcacacagacagaac

SEQ ID NO: 817028 - DNA, 15 bp, Homo sapiens
cacacagacagaact

SEQ ID NO: 817029 - DNA, 15 bp, Homo sapiens
acacagacagaactt

SEQ ID NO: 817030 - DNA, 15 bp, Homo sapiens
cacagacagaacttt

SEQ ID NO: 817031 - DNA, 15 bp, Homo sapiens
acagacagaactttc

SEQ ID NO: 817032 - DNA, 15 bp, Homo sapiens
cagacagaactttcc

SEQ ID NO: 817033 - DNA, 15 bp, Homo sapiens
agacagaactttcct

SEQ ID NO: 817034 - DNA, 15 bp, Homo sapiens
gacagaactttcctg

SEQ ID NO: 817035 - DNA, 15 bp, Homo sapiens
acagaactttcctgt

SEQ ID NO: 817036 - DNA, 15 bp, Homo sapiens
cagaactttcctgtt

SEQ ID NO: 817037 - DNA, 15 bp, Homo sapiens
agaactttcctgttt

SEQ ID NO: 817038 - DNA, 15 bp, Homo sapiens
gaactttcctgtttc

SEQ ID NO: 817039 - DNA, 15 bp, Homo sapiens
aactttcctgtttct

SEQ ID NO: 817040 - DNA, 15 bp, Homo sapiens
actttcctgtttctg

SEQ ID NO: 817041 - DNA, 15 bp, Homo sapiens
ctttcctgtttctga

SEQ ID NO: 817042 - DNA, 15 bp, Homo sapiens
tttcctgtttctgat

SEQ ID NO: 817043 - DNA, 15 bp, Homo sapiens
ttcctgtttctgatt

SEQ ID NO: 817044 - DNA, 15 bp, Homo sapiens
tcctgtttctgattt

SEQ ID NO: 817045 - DNA, 15 bp, Homo sapiens
cctgtttctgattta

SEQ ID NO: 817046 - DNA, 15 bp, Homo sapiens
ctgtttctgatttac

SEQ ID NO: 817047 - DNA, 15 bp, Homo sapiens
tgtttctgatttacc

SEQ ID NO: 817048 - DNA, 15 bp, Homo sapiens
gtttctgatttacca

SEQ ID NO: 817049 - DNA, 15 bp, Homo sapiens
tttctgatttaccaa

SEQ ID NO: 817050 - DNA, 15 bp, Homo sapiens
ttctgatttaccaac

SEQ ID NO: 817051 - DNA, 15 bp, Homo sapiens
tctgatttaccaaca

SEQ ID NO: 817052 - DNA, 15 bp, Homo sapiens
ctgatttaccaacat

SEQ ID NO: 817053 - DNA, 15 bp, Homo sapiens
tgatttaccaacata

SEQ ID NO: 817054 - DNA, 15 bp, Homo sapiens
gatttaccaacatag

SEQ ID NO: 817055 - DNA, 15 bp, Homo sapiens
atttaccaacatagg

SEQ ID NO: 817056 - DNA, 15 bp, Homo sapiens
tttaccaacataggg

SEQ ID NO: 817057 - DNA, 15 bp, Homo sapiens
ttaccaacatagggt

SEQ ID NO: 817058 - DNA, 15 bp, Homo sapiens
taccaacatagggta

SEQ ID NO: 817059 - DNA, 15 bp, Homo sapiens
accaacatagggtac

SEQ ID NO: 817060 - DNA, 15 bp, Homo sapiens
ccaacatagggtaca

SEQ ID NO: 817061 - DNA, 15 bp, Homo sapiens
caacatagggtacag

SEQ ID NO: 817062 - DNA, 15 bp, Homo sapiens
aacatagggtacaga

SEQ ID NO: 817063 - DNA, 15 bp, Homo sapiens
acatagggtacagag

SEQ ID NO: 817064 - DNA, 15 bp, Homo sapiens
catagggtacagagc

SEQ ID NO: 817065 - DNA, 15 bp, Homo sapiens
atagggtacagagct

SEQ ID NO: 817066 - DNA, 15 bp, Homo sapiens
tagggtacagagctc

SEQ ID NO: 817067 - DNA, 15 bp, Homo sapiens
agggtacagagctcc

SEQ ID NO: 817068 - DNA, 15 bp, Homo sapiens
gggtacagagctccc

SEQ ID NO: 817069 - DNA, 15 bp, Homo sapiens
ggtacagagctccca

SEQ ID NO: 817070 - DNA, 15 bp, Homo sapiens
gtacagagctcccac

SEQ ID NO: 817071 - DNA, 15 bp, Homo sapiens
tacagagctcccacc

SEQ ID NO: 817072 - DNA, 15 bp, Homo sapiens
acagagctcccacca

SEQ ID NO: 817073 - DNA, 15 bp, Homo sapiens
cagagctcccaccac

SEQ ID NO: 817074 - DNA, 15 bp, Homo sapiens
agagctcccaccacg

SEQ ID NO: 817075 - DNA, 15 bp, Homo sapiens
gagctcccaccacgg

SEQ ID NO: 817076 - DNA, 15 bp, Homo sapiens
agctcccaccacggt

SEQ ID NO: 817077 - DNA, 15 bp, Homo sapiens
gctcccaccacggtt

SEQ ID NO: 817078 - DNA, 15 bp, Homo sapiens
ctcccaccacggtta

SEQ ID NO: 817079 - DNA, 15 bp, Homo sapiens
tcccaccacggttaa

SEQ ID NO: 817080 - DNA, 15 bp, Homo sapiens
cccaccacggttaaa

SEQ ID NO: 817081 - DNA, 15 bp, Homo sapiens
ccaccacggttaaaa

SEQ ID NO: 817082 - DNA, 15 bp, Homo sapiens
caccacggttaaaat

SEQ ID NO: 817083 - DNA, 15 bp, Homo sapiens
accacggttaaaatt

SEQ ID NO: 817084 - DNA, 15 bp, Homo sapiens
ccacggttaaaattg

SEQ ID NO: 817085 - DNA, 15 bp, Homo sapiens
cacggttaaaattga

SEQ ID NO: 817086 - DNA, 15 bp, Homo sapiens
acggttaaaattgag

SEQ ID NO: 817087 - DNA, 15 bp, Homo sapiens
cggttaaaattgagc

SEQ ID NO: 817088 - DNA, 15 bp, Homo sapiens
ggttaaaattgagct

SEQ ID NO: 817089 - DNA, 15 bp, Homo sapiens
gttaaaattgagcta

SEQ ID NO: 817090 - DNA, 15 bp, Homo sapiens
ttaaaattgagctaa

SEQ ID NO: 817091 - DNA, 15 bp, Homo sapiens
taaaattgagctaag

SEQ ID NO: 817092 - DNA, 15 bp, Homo sapiens
aaaattgagctaagt

SEQ ID NO: 817093 - DNA, 15 bp, Homo sapiens
aaattgagctaagtg

SEQ ID NO: 817094 - DNA, 15 bp, Homo sapiens
aattgagctaagtga

SEQ ID NO: 817095 - DNA, 15 bp, Homo sapiens
attgagctaagtgag

SEQ ID NO: 817096 - DNA, 15 bp, Homo sapiens
ttgagctaagtgagt

SEQ ID NO: 817097 - DNA, 15 bp, Homo sapiens
tgagctaagtgagta

SEQ ID NO: 817098 - DNA, 15 bp, Homo sapiens
gagctaagtgagtat

SEQ ID NO: 817099 - DNA, 15 bp, Homo sapiens
agctaagtgagtatc

SEQ ID NO: 817100 - DNA, 15 bp, Homo sapiens
gctaagtgagtatca

SEQ ID NO: 817101 - DNA, 15 bp, Homo sapiens
ctaagtgagtatcaa

SEQ ID NO: 817102 - DNA, 15 bp, Homo sapiens
taagtgagtatcaaa

SEQ ID NO: 817103 - DNA, 15 bp, Homo sapiens
aagtgagtatcaaac

SEQ ID NO: 817104 - DNA, 15 bp, Homo sapiens
agtgagtatcaaaca

SEQ ID NO: 817105 - DNA, 15 bp, Homo sapiens
gtgagtatcaaacac

SEQ ID NO: 817106 - DNA, 15 bp, Homo sapiens
tgagtatcaaacaca

SEQ ID NO: 817107 - DNA, 15 bp, Homo sapiens
gagtatcaaacacac

SEQ ID NO: 817108 - DNA, 15 bp, Homo sapiens
agtatcaaacacact

SEQ ID NO: 817109 - DNA, 15 bp, Homo sapiens
gtatcaaacacactt

SEQ ID NO: 817110 - DNA, 15 bp, Homo sapiens
tatcaaacacacttg

SEQ ID NO: 817111 - DNA, 15 bp, Homo sapiens
atcaaacacacttgg

SEQ ID NO: 817112 - DNA, 15 bp, Homo sapiens
tcaaacacacttggt

SEQ ID NO: 817113 - DNA, 15 bp, Homo sapiens
caaacacacttggtc

SEQ ID NO: 817114 - DNA, 15 bp, Homo sapiens
aaacacacttggtca

SEQ ID NO: 817115 - DNA, 15 bp, Homo sapiens
aacacacttggtcac

SEQ ID NO: 817116 - DNA, 15 bp, Homo sapiens
acacacttggtcact

SEQ ID NO: 817117 - DNA, 15 bp, Homo sapiens
cacacttggtcactt

SEQ ID NO: 817118 - DNA, 15 bp, Homo sapiens
acacttggtcacttt

SEQ ID NO: 817119 - DNA, 15 bp, Homo sapiens
cacttggtcactttt

SEQ ID NO: 817120 - DNA, 15 bp, Homo sapiens
acttggtcacttttt

SEQ ID NO: 817121 - DNA, 15 bp, Homo sapiens
cttggtcacttttta

SEQ ID NO: 817122 - DNA, 15 bp, Homo sapiens
ttggtcactttttaa

SEQ ID NO: 817123 - DNA, 15 bp, Homo sapiens
tggtcactttttaaa

SEQ ID NO: 817124 - DNA, 15 bp, Homo sapiens
ggtcactttttaaag

SEQ ID NO: 817125 - DNA, 15 bp, Homo sapiens
gtcactttttaaaga

SEQ ID NO: 817126 - DNA, 15 bp, Homo sapiens
tcactttttaaagag

SEQ ID NO: 817127 - DNA, 15 bp, Homo sapiens
cactttttaaagaga

SEQ ID NO: 817128 - DNA, 15 bp, Homo sapiens
actttttaaagagaa

SEQ ID NO: 817129 - DNA, 15 bp, Homo sapiens
ctttttaaagagaaa

SEQ ID NO: 817130 - DNA, 15 bp, Homo sapiens
tttttaaagagaaag

SEQ ID NO: 817131 - DNA, 15 bp, Homo sapiens
ttttaaagagaaagc

SEQ ID NO: 817132 - DNA, 15 bp, Homo sapiens
tttaaagagaaagca

SEQ ID NO: 817133 - DNA, 15 bp, Homo sapiens
ttaaagagaaagcac

SEQ ID NO: 817134 - DNA, 15 bp, Homo sapiens
taaagagaaagcaca

SEQ ID NO: 817135 - DNA, 15 bp, Homo sapiens
aaagagaaagcacat

SEQ ID NO: 817136 - DNA, 15 bp, Homo sapiens
aagagaaagcacatt

SEQ ID NO: 817137 - DNA, 15 bp, Homo sapiens
agagaaagcacatta

SEQ ID NO: 817138 - DNA, 15 bp, Homo sapiens
gagaaagcacattac

SEQ ID NO: 817139 - DNA, 15 bp, Homo sapiens
agaaagcacattacc

SEQ ID NO: 817140 - DNA, 15 bp, Homo sapiens
gaaagcacattacct

SEQ ID NO: 817141 - DNA, 15 bp, Homo sapiens
aaagcacattacctg

SEQ ID NO: 817142 - DNA, 15 bp, Homo sapiens
aagcacattacctga

SEQ ID NO: 817143 - DNA, 15 bp, Homo sapiens
agcacattacctgaa

SEQ ID NO: 817144 - DNA, 15 bp, Homo sapiens
gcacattacctgaaa

SEQ ID NO: 817145 - DNA, 15 bp, Homo sapiens
cacattacctgaaaa

SEQ ID NO: 817146 - DNA, 15 bp, Homo sapiens
acattacctgaaaat

SEQ ID NO: 817147 - DNA, 15 bp, Homo sapiens
cattacctgaaaatg

SEQ ID NO: 817148 - DNA, 15 bp, Homo sapiens
attacctgaaaatgg

SEQ ID NO: 817149 - DNA, 15 bp, Homo sapiens
ttacctgaaaatggc

SEQ ID NO: 817150 - DNA, 15 bp, Homo sapiens
tacctgaaaatggca

SEQ ID NO: 817151 - DNA, 15 bp, Homo sapiens
acctgaaaatggcat

SEQ ID NO: 817152 - DNA, 15 bp, Homo sapiens
cctgaaaatggcatc

SEQ ID NO: 817153 - DNA, 15 bp, Homo sapiens
ctgaaaatggcatct

SEQ ID NO: 817154 - DNA, 15 bp, Homo sapiens
tgaaaatggcatctt

SEQ ID NO: 817155 - DNA, 15 bp, Homo sapiens
gaaaatggcatcttt

SEQ ID NO: 817156 - DNA, 15 bp, Homo sapiens
aaaatggcatctttc

SEQ ID NO: 817157 - DNA, 15 bp, Homo sapiens
aaatggcatctttcc

SEQ ID NO: 817158 - DNA, 15 bp, Homo sapiens
aatggcatctttcct

SEQ ID NO: 817159 - DNA, 15 bp, Homo sapiens
atggcatctttcctc

SEQ ID NO: 817160 - DNA, 15 bp, Homo sapiens
tggcatctttcctct

SEQ ID NO: 817161 - DNA, 15 bp, Homo sapiens
ggcatctttcctctt

SEQ ID NO: 817162 - DNA, 15 bp, Homo sapiens
gcatctttcctcttg

SEQ ID NO: 817163 - DNA, 15 bp, Homo sapiens
catctttcctcttgt

SEQ ID NO: 817164 - DNA, 15 bp, Homo sapiens
atctttcctcttgtc

SEQ ID NO: 817165 - DNA, 15 bp, Homo sapiens
tctttcctcttgtca

SEQ ID NO: 817166 - DNA, 15 bp, Homo sapiens
ctttcctcttgtcaa

SEQ ID NO: 817167 - DNA, 15 bp, Homo sapiens
tttcctcttgtcaac

SEQ ID NO: 817168 - DNA, 15 bp, Homo sapiens
ttcctcttgtcaact

SEQ ID NO: 817169 - DNA, 15 bp, Homo sapiens
tcctcttgtcaactc

SEQ ID NO: 817170 - DNA, 15 bp, Homo sapiens
cctcttgtcaactcc

SEQ ID NO: 817171 - DNA, 15 bp, Homo sapiens
ctcttgtcaactcct

SEQ ID NO: 817172 - DNA, 15 bp, Homo sapiens
tcttgtcaactcctg

SEQ ID NO: 817173 - DNA, 15 bp, Homo sapiens
cttgtcaactcctgc

SEQ ID NO: 817174 - DNA, 15 bp, Homo sapiens
ttgtcaactcctgcc

SEQ ID NO: 817175 - DNA, 15 bp, Homo sapiens
tgtcaactcctgcca

SEQ ID NO: 817176 - DNA, 15 bp, Homo sapiens
gtcaactcctgccaa

SEQ ID NO: 817177 - DNA, 15 bp, Homo sapiens
tcaactcctgccaaa

SEQ ID NO: 817178 - DNA, 15 bp, Homo sapiens
caactcctgccaaaa

SEQ ID NO: 817179 - DNA, 15 bp, Homo sapiens
aactcctgccaaaag

SEQ ID NO: 817180 - DNA, 15 bp, Homo sapiens
actcctgccaaaaga

SEQ ID NO: 817181 - DNA, 15 bp, Homo sapiens
ctcctgccaaaagaa

SEQ ID NO: 817182 - DNA, 15 bp, Homo sapiens
tcctgccaaaagaaa

SEQ ID NO: 817183 - DNA, 15 bp, Homo sapiens
cctgccaaaagaaag

SEQ ID NO: 817184 - DNA, 15 bp, Homo sapiens
ctgccaaaagaaagc

SEQ ID NO: 817185 - DNA, 15 bp, Homo sapiens
tgccaaaagaaagcc

SEQ ID NO: 817186 - DNA, 15 bp, Homo sapiens
gccaaaagaaagcct

SEQ ID NO: 817187 - DNA, 15 bp, Homo sapiens
ccaaaagaaagcctc

SEQ ID NO: 817188 - DNA, 15 bp, Homo sapiens
caaaagaaagcctca

SEQ ID NO: 817189 - DNA, 15 bp, Homo sapiens
aaaagaaagcctcac

SEQ ID NO: 817190 - DNA, 15 bp, Homo sapiens
aaagaaagcctcacc

SEQ ID NO: 817191 - DNA, 15 bp, Homo sapiens
aagaaagcctcaccc

SEQ ID NO: 817192 - DNA, 15 bp, Homo sapiens
agaaagcctcacccc

SEQ ID NO: 817193 - DNA, 15 bp, Homo sapiens
gaaagcctcaccccc

SEQ ID NO: 817194 - DNA, 15 bp, Homo sapiens
aaagcctcaccccct

SEQ ID NO: 817195 - DNA, 15 bp, Homo sapiens
aagcctcacccccta

SEQ ID NO: 817196 - DNA, 15 bp, Homo sapiens
agcctcaccccctac

SEQ ID NO: 817197 - DNA, 15 bp, Homo sapiens
gcctcaccccctacc

SEQ ID NO: 817198 - DNA, 15 bp, Homo sapiens
cctcaccccctaccc

SEQ ID NO: 817199 - DNA, 15 bp, Homo sapiens
ctcaccccctacccc

SEQ ID NO: 817200 - DNA, 15 bp, Homo sapiens
tcaccccctaccccc

SEQ ID NO: 817201 - DNA, 15 bp, Homo sapiens
caccccctaccccct

SEQ ID NO: 817202 - DNA, 15 bp, Homo sapiens
accccctaccccctg

SEQ ID NO: 817203 - DNA, 15 bp, Homo sapiens
ccccctaccccctgc

SEQ ID NO: 817204 - DNA, 15 bp, Homo sapiens
cccctaccccctgca

SEQ ID NO: 817205 - DNA, 15 bp, Homo sapiens
ccctaccccctgcac

SEQ ID NO: 817206 - DNA, 15 bp, Homo sapiens
cctaccccctgcaca

SEQ ID NO: 817207 - DNA, 15 bp, Homo sapiens
ctaccccctgcacac

SEQ ID NO: 817208 - DNA, 15 bp, Homo sapiens
taccccctgcacacc

SEQ ID NO: 817209 - DNA, 15 bp, Homo sapiens
accccctgcacaccc

SEQ ID NO: 817210 - DNA, 15 bp, Homo sapiens
ccccctgcacacccc

SEQ ID NO: 817211 - DNA, 15 bp, Homo sapiens
cccctgcacacccca

SEQ ID NO: 817212 - DNA, 15 bp, Homo sapiens
ccctgcacaccccag

SEQ ID NO: 817213 - DNA, 15 bp, Homo sapiens
cctgcacaccccaga

SEQ ID NO: 817214 - DNA, 15 bp, Homo sapiens
ctgcacaccccagaa

SEQ ID NO: 817215 - DNA, 15 bp, Homo sapiens
tgcacaccccagaat

SEQ ID NO: 817216 - DNA, 15 bp, Homo sapiens
gcacaccccagaatt

SEQ ID NO: 817217 - DNA, 15 bp, Homo sapiens
cacaccccagaattc

SEQ ID NO: 817218 - DNA, 15 bp, Homo sapiens
acaccccagaattca

SEQ ID NO: 817219 - DNA, 15 bp, Homo sapiens
caccccagaattcat

SEQ ID NO: 817220 - DNA, 15 bp, Homo sapiens
accccagaattcata

SEQ ID NO: 817221 - DNA, 15 bp, Homo sapiens
ccccagaattcatac

SEQ ID NO: 817222 - DNA, 15 bp, Homo sapiens
cccagaattcatact

SEQ ID NO: 817223 - DNA, 15 bp, Homo sapiens
ccagaattcatactt

SEQ ID NO: 817224 - DNA, 15 bp, Homo sapiens
cagaattcatacttt

SEQ ID NO: 817225 - DNA, 15 bp, Homo sapiens
agaattcatactttc

SEQ ID NO: 817226 - DNA, 15 bp, Homo sapiens
gaattcatactttca

SEQ ID NO: 817227 - DNA, 15 bp, Homo sapiens
aattcatactttcag

SEQ ID NO: 817228 - DNA, 15 bp, Homo sapiens
attcatactttcagg

SEQ ID NO: 817229 - DNA, 15 bp, Homo sapiens
ttcatactttcaggc

SEQ ID NO: 817230 - DNA, 15 bp, Homo sapiens
tcatactttcaggca

SEQ ID NO: 817231 - DNA, 15 bp, Homo sapiens
catactttcaggcag

SEQ ID NO: 817232 - DNA, 15 bp, Homo sapiens
atactttcaggcagc

SEQ ID NO: 817233 - DNA, 15 bp, Homo sapiens
tactttcaggcagcc

SEQ ID NO: 817234 - DNA, 15 bp, Homo sapiens
actttcaggcagccc

SEQ ID NO: 817235 - DNA, 15 bp, Homo sapiens
ctttcaggcagccct

SEQ ID NO: 817236 - DNA, 15 bp, Homo sapiens
tttcaggcagccctc

SEQ ID NO: 817237 - DNA, 15 bp, Homo sapiens
ttcaggcagccctct

SEQ ID NO: 817238 - DNA, 15 bp, Homo sapiens
tcaggcagccctctg

SEQ ID NO: 817239 - DNA, 15 bp, Homo sapiens
caggcagccctctgg

SEQ ID NO: 817240 - DNA, 15 bp, Homo sapiens
aggcagccctctgga

SEQ ID NO: 817241 - DNA, 15 bp, Homo sapiens
ggcagccctctggaa

SEQ ID NO: 817242 - DNA, 15 bp, Homo sapiens
gcagccctctggaaa

SEQ ID NO: 817243 - DNA, 15 bp, Homo sapiens
cagccctctggaaac

SEQ ID NO: 817244 - DNA, 15 bp, Homo sapiens
agccctctggaaact

SEQ ID NO: 817245 - DNA, 15 bp, Homo sapiens
gccctctggaaacta

SEQ ID NO: 817246 - DNA, 15 bp, Homo sapiens
ccctctggaaactaa

SEQ ID NO: 817247 - DNA, 15 bp, Homo sapiens
cctctggaaactaag

SEQ ID NO: 817248 - DNA, 15 bp, Homo sapiens
ctctggaaactaagg

SEQ ID NO: 817249 - DNA, 15 bp, Homo sapiens
tctggaaactaagga

SEQ ID NO: 817250 - DNA, 15 bp, Homo sapiens
ctggaaactaaggac

SEQ ID NO: 817251 - DNA, 15 bp, Homo sapiens
tggaaactaaggaca

SEQ ID NO: 817252 - DNA, 15 bp, Homo sapiens
ggaaactaaggacat

SEQ ID NO: 817253 - DNA, 15 bp, Homo sapiens
gaaactaaggacatc

SEQ ID NO: 817254 - DNA, 15 bp, Homo sapiens
aaactaaggacatct

SEQ ID NO: 817255 - DNA, 15 bp, Homo sapiens
aactaaggacatcta

SEQ ID NO: 817256 - DNA, 15 bp, Homo sapiens
actaaggacatctaa

SEQ ID NO: 817257 - DNA, 15 bp, Homo sapiens
ctaaggacatctaaa

SEQ ID NO: 817258 - DNA, 15 bp, Homo sapiens
taaggacatctaaat

SEQ ID NO: 817259 - DNA, 15 bp, Homo sapiens
aaggacatctaaatc

SEQ ID NO: 817260 - DNA, 15 bp, Homo sapiens
aggacatctaaatct

SEQ ID NO: 817261 - DNA, 15 bp, Homo sapiens
ggacatctaaatcta

SEQ ID NO: 817262 - DNA, 15 bp, Homo sapiens
gacatctaaatctaa

SEQ ID NO: 817263 - DNA, 15 bp, Homo sapiens
acatctaaatctaaa

SEQ ID NO: 817264 - DNA, 15 bp, Homo sapiens
catctaaatctaaag

SEQ ID NO: 817265 - DNA, 15 bp, Homo sapiens
atctaaatctaaagg

SEQ ID NO: 817266 - DNA, 15 bp, Homo sapiens
tctaaatctaaaggt

SEQ ID NO: 817267 - DNA, 15 bp, Homo sapiens
ctaaatctaaaggtc

SEQ ID NO: 817268 - DNA, 15 bp, Homo sapiens
taaatctaaaggtca

SEQ ID NO: 817269 - DNA, 15 bp, Homo sapiens
aaatctaaaggtcag

SEQ ID NO: 817270 - DNA, 15 bp, Homo sapiens
aatctaaaggtcagg

SEQ ID NO: 817271 - DNA, 15 bp, Homo sapiens
atctaaaggtcagga

SEQ ID NO: 817272 - DNA, 15 bp, Homo sapiens
tctaaaggtcaggat

SEQ ID NO: 817273 - DNA, 15 bp, Homo sapiens
ctaaaggtcaggatt

SEQ ID NO: 817274 - DNA, 15 bp, Homo sapiens
taaaggtcaggattc

SEQ ID NO: 817275 - DNA, 15 bp, Homo sapiens
aaaggtcaggattct

SEQ ID NO: 817276 - DNA, 15 bp, Homo sapiens
aaggtcaggattctg

SEQ ID NO: 817277 - DNA, 15 bp, Homo sapiens
aggtcaggattctgt

SEQ ID NO: 817278 - DNA, 15 bp, Homo sapiens
ggtcaggattctgtg

SEQ ID NO: 817279 - DNA, 15 bp, Homo sapiens
gtcaggattctgtga

SEQ ID NO: 817280 - DNA, 15 bp, Homo sapiens
tcaggattctgtgag

SEQ ID NO: 817281 - DNA, 15 bp, Homo sapiens
caggattctgtgaga

SEQ ID NO: 817282 - DNA, 15 bp, Homo sapiens
aggattctgtgagag

SEQ ID NO: 817283 - DNA, 15 bp, Homo sapiens
ggattctgtgagaga

SEQ ID NO: 817284 - DNA, 15 bp, Homo sapiens
gattctgtgagagaa

SEQ ID NO: 817285 - DNA, 15 bp, Homo sapiens
attctgtgagagaaa

SEQ ID NO: 817286 - DNA, 15 bp, Homo sapiens
ttctgtgagagaaaa

SEQ ID NO: 817287 - DNA, 15 bp, Homo sapiens
tctgtgagagaaaac

SEQ ID NO: 817288 - DNA, 15 bp, Homo sapiens
ctgtgagagaaaacc

SEQ ID NO: 817289 - DNA, 15 bp, Homo sapiens
tgtgagagaaaacca

SEQ ID NO: 817290 - DNA, 15 bp, Homo sapiens
gtgagagaaaaccag

SEQ ID NO: 817291 - DNA, 15 bp, Homo sapiens
tgagagaaaaccagt

SEQ ID NO: 817292 - DNA, 15 bp, Homo sapiens
gagagaaaaccagtc

SEQ ID NO: 817293 - DNA, 15 bp, Homo sapiens
agagaaaaccagtcc

SEQ ID NO: 817294 - DNA, 15 bp, Homo sapiens
gagaaaaccagtcca

SEQ ID NO: 817295 - DNA, 15 bp, Homo sapiens
agaaaaccagtccaa

SEQ ID NO: 817296 - DNA, 15 bp, Homo sapiens
gaaaaccagtccaac

SEQ ID NO: 817297 - DNA, 15 bp, Homo sapiens
aaaaccagtccaaca

SEQ ID NO: 817298 - DNA, 15 bp, Homo sapiens
aaaccagtccaacat

SEQ ID NO: 817299 - DNA, 15 bp, Homo sapiens
aaccagtccaacatg

SEQ ID NO: 817300 - DNA, 15 bp, Homo sapiens
accagtccaacatgc

SEQ ID NO: 817301 - DNA, 15 bp, Homo sapiens
ccagtccaacatgct

SEQ ID NO: 817302 - DNA, 15 bp, Homo sapiens
cagtccaacatgctc

SEQ ID NO: 817303 - DNA, 15 bp, Homo sapiens
agtccaacatgctca

SEQ ID NO: 817304 - DNA, 15 bp, Homo sapiens
gtccaacatgctcat

SEQ ID NO: 817305 - DNA, 15 bp, Homo sapiens
tccaacatgctcatg

SEQ ID NO: 817306 - DNA, 15 bp, Homo sapiens
ccaacatgctcatga

SEQ ID NO: 817307 - DNA, 15 bp, Homo sapiens
caacatgctcatgaa

SEQ ID NO: 817308 - DNA, 15 bp, Homo sapiens
aacatgctcatgaaa

SEQ ID NO: 817309 - DNA, 15 bp, Homo sapiens
acatgctcatgaaat

SEQ ID NO: 817310 - DNA, 15 bp, Homo sapiens
catgctcatgaaatc

SEQ ID NO: 817311 - DNA, 15 bp, Homo sapiens
atgctcatgaaatcc

SEQ ID NO: 817312 - DNA, 15 bp, Homo sapiens
tgctcatgaaatcct

SEQ ID NO: 817313 - DNA, 15 bp, Homo sapiens
gctcatgaaatccta

SEQ ID NO: 817314 - DNA, 15 bp, Homo sapiens
ctcatgaaatcctaa

SEQ ID NO: 817315 - DNA, 15 bp, Homo sapiens
tcatgaaatcctaac

SEQ ID NO: 817316 - DNA, 15 bp, Homo sapiens
catgaaatcctaact

SEQ ID NO: 817317 - DNA, 15 bp, Homo sapiens
atgaaatcctaactg

SEQ ID NO: 817318 - DNA, 15 bp, Homo sapiens
tgaaatcctaactgt

SEQ ID NO: 817319 - DNA, 15 bp, Homo sapiens
gaaatcctaactgtg

SEQ ID NO: 817320 - DNA, 15 bp, Homo sapiens
aaatcctaactgtgc

SEQ ID NO: 817321 - DNA, 15 bp, Homo sapiens
aatcctaactgtgca

SEQ ID NO: 817322 - DNA, 15 bp, Homo sapiens
atcctaactgtgcac

SEQ ID NO: 817323 - DNA, 15 bp, Homo sapiens
tcctaactgtgcaca

SEQ ID NO: 817324 - DNA, 15 bp, Homo sapiens
cctaactgtgcacag

SEQ ID NO: 817325 - DNA, 15 bp, Homo sapiens
ctaactgtgcacagg

SEQ ID NO: 817326 - DNA, 15 bp, Homo sapiens
taactgtgcacaggg

SEQ ID NO: 817327 - DNA, 15 bp, Homo sapiens
aactgtgcacagggt

SEQ ID NO: 817328 - DNA, 15 bp, Homo sapiens
actgtgcacagggtt

SEQ ID NO: 817329 - DNA, 15 bp, Homo sapiens
ctgtgcacagggttg

SEQ ID NO: 817330 - DNA, 15 bp, Homo sapiens
tgtgcacagggttgg

SEQ ID NO: 817331 - DNA, 15 bp, Homo sapiens
gtgcacagggttgga

SEQ ID NO: 817332 - DNA, 15 bp, Homo sapiens
tgcacagggttggat

SEQ ID NO: 817333 - DNA, 15 bp, Homo sapiens
gcacagggttggatg

SEQ ID NO: 817334 - DNA, 15 bp, Homo sapiens
cacagggttggatgg

SEQ ID NO: 817335 - DNA, 15 bp, Homo sapiens
acagggttggatgga

SEQ ID NO: 817336 - DNA, 15 bp, Homo sapiens
cagggttggatggac

SEQ ID NO: 817337 - DNA, 15 bp, Homo sapiens
agggttggatggaca

SEQ ID NO: 817338 - DNA, 15 bp, Homo sapiens
gggttggatggacac

SEQ ID NO: 817339 - DNA, 15 bp, Homo sapiens
ggttggatggacact

SEQ ID NO: 817340 - DNA, 15 bp, Homo sapiens
gttggatggacactt

SEQ ID NO: 817341 - DNA, 15 bp, Homo sapiens
ttggatggacactta

SEQ ID NO: 817342 - DNA, 15 bp, Homo sapiens
tggatggacacttaa

SEQ ID NO: 817343 - DNA, 15 bp, Homo sapiens
ggatggacacttaaa

SEQ ID NO: 817344 - DNA, 15 bp, Homo sapiens
gatggacacttaaaa

SEQ ID NO: 817345 - DNA, 15 bp, Homo sapiens
atggacacttaaaag

SEQ ID NO: 817346 - DNA, 15 bp, Homo sapiens
tggacacttaaaagg

SEQ ID NO: 817347 - DNA, 15 bp, Homo sapiens
ggacacttaaaaggc

SEQ ID NO: 817348 - DNA, 15 bp, Homo sapiens
gacacttaaaaggca

SEQ ID NO: 817349 - DNA, 15 bp, Homo sapiens
acacttaaaaggcag

SEQ ID NO: 817350 - DNA, 15 bp, Homo sapiens
cacttaaaaggcagt

SEQ ID NO: 817351 - DNA, 15 bp, Homo sapiens
acttaaaaggcagtt

SEQ ID NO: 817352 - DNA, 15 bp, Homo sapiens
cttaaaaggcagtta

SEQ ID NO: 817353 - DNA, 15 bp, Homo sapiens
ttaaaaggcagttaa

SEQ ID NO: 817354 - DNA, 15 bp, Homo sapiens
taaaaggcagttaag

SEQ ID NO: 817355 - DNA, 15 bp, Homo sapiens
aaaaggcagttaagt

SEQ ID NO: 817356 - DNA, 15 bp, Homo sapiens
aaaggcagttaagtt

SEQ ID NO: 817357 - DNA, 15 bp, Homo sapiens
aaggcagttaagttg

SEQ ID NO: 817358 - DNA, 15 bp, Homo sapiens
aggcagttaagttga

SEQ ID NO: 817359 - DNA, 15 bp, Homo sapiens
ggcagttaagttgat

SEQ ID NO: 817360 - DNA, 15 bp, Homo sapiens
gcagttaagttgatg

SEQ ID NO: 817361 - DNA, 15 bp, Homo sapiens
cagttaagttgatgg

SEQ ID NO: 817362 - DNA, 15 bp, Homo sapiens
agttaagttgatggc

SEQ ID NO: 817363 - DNA, 15 bp, Homo sapiens
gttaagttgatggct

SEQ ID NO: 817364 - DNA, 15 bp, Homo sapiens
ttaagttgatggctt

SEQ ID NO: 817365 - DNA, 15 bp, Homo sapiens
taagttgatggcttg

SEQ ID NO: 817366 - DNA, 15 bp, Homo sapiens
aagttgatggcttga

SEQ ID NO: 817367 - DNA, 15 bp, Homo sapiens
agttgatggcttgac

SEQ ID NO: 817368 - DNA, 15 bp, Homo sapiens
gttgatggcttgacg

SEQ ID NO: 817369 - DNA, 15 bp, Homo sapiens
ttgatggcttgacgg

SEQ ID NO: 817370 - DNA, 15 bp, Homo sapiens
tgatggcttgacggt

SEQ ID NO: 817371 - DNA, 15 bp, Homo sapiens
gatggcttgacggta

SEQ ID NO: 817372 - DNA, 15 bp, Homo sapiens
atggcttgacggtat

SEQ ID NO: 817373 - DNA, 15 bp, Homo sapiens
tggcttgacggtatg

SEQ ID NO: 817374 - DNA, 15 bp, Homo sapiens
ggcttgacggtatga

SEQ ID NO: 817375 - DNA, 15 bp, Homo sapiens
gcttgacggtatgac

SEQ ID NO: 817376 - DNA, 15 bp, Homo sapiens
cttgacggtatgact

SEQ ID NO: 817377 - DNA, 15 bp, Homo sapiens
ttgacggtatgacta

SEQ ID NO: 817378 - DNA, 15 bp, Homo sapiens
tgacggtatgactaa

SEQ ID NO: 817379 - DNA, 15 bp, Homo sapiens
gacggtatgactaac

SEQ ID NO: 817380 - DNA, 15 bp, Homo sapiens
acggtatgactaacc

SEQ ID NO: 817381 - DNA, 15 bp, Homo sapiens
cggtatgactaacca

SEQ ID NO: 817382 - DNA, 15 bp, Homo sapiens
ggtatgactaaccaa

SEQ ID NO: 817383 - DNA, 15 bp, Homo sapiens
gtatgactaaccaag

SEQ ID NO: 817384 - DNA, 15 bp, Homo sapiens
tatgactaaccaagt

SEQ ID NO: 817385 - DNA, 15 bp, Homo sapiens
atgactaaccaagtt

SEQ ID NO: 817386 - DNA, 15 bp, Homo sapiens
tgactaaccaagttc

SEQ ID NO: 817387 - DNA, 15 bp, Homo sapiens
gactaaccaagttct

SEQ ID NO: 817388 - DNA, 15 bp, Homo sapiens
actaaccaagttctt

SEQ ID NO: 817389 - DNA, 15 bp, Homo sapiens
ctaaccaagttcttt

SEQ ID NO: 817390 - DNA, 15 bp, Homo sapiens
taaccaagttcttta

SEQ ID NO: 817391 - DNA, 15 bp, Homo sapiens
aaccaagttctttag

SEQ ID NO: 817392 - DNA, 15 bp, Homo sapiens
accaagttctttagg

SEQ ID NO: 817393 - DNA, 15 bp, Homo sapiens
ccaagttctttaggt

SEQ ID NO: 817394 - DNA, 15 bp, Homo sapiens
caagttctttaggta

SEQ ID NO: 817395 - DNA, 15 bp, Homo sapiens
aagttctttaggtaa

SEQ ID NO: 817396 - DNA, 15 bp, Homo sapiens
agttctttaggtaat

SEQ ID NO: 817397 - DNA, 15 bp, Homo sapiens
gttctttaggtaatt

SEQ ID NO: 817398 - DNA, 15 bp, Homo sapiens
ttctttaggtaatta

SEQ ID NO: 817399 - DNA, 15 bp, Homo sapiens
tctttaggtaattaa

SEQ ID NO: 817400 - DNA, 15 bp, Homo sapiens
ctttaggtaattaat

SEQ ID NO: 817401 - DNA, 15 bp, Homo sapiens
tttaggtaattaata

SEQ ID NO: 817402 - DNA, 15 bp, Homo sapiens
ttaggtaattaatag

SEQ ID NO: 817403 - DNA, 15 bp, Homo sapiens
taggtaattaatagt

SEQ ID NO: 817404 - DNA, 15 bp, Homo sapiens
aggtaattaatagtg

SEQ ID NO: 817405 - DNA, 15 bp, Homo sapiens
ggtaattaatagtgg

SEQ ID NO: 817406 - DNA, 15 bp, Homo sapiens
gtaattaatagtgga

SEQ ID NO: 817407 - DNA, 15 bp, Homo sapiens
taattaatagtggat

SEQ ID NO: 817408 - DNA, 15 bp, Homo sapiens
aattaatagtggatg

SEQ ID NO: 817409 - DNA, 15 bp, Homo sapiens
attaatagtggatgc

SEQ ID NO: 817410 - DNA, 15 bp, Homo sapiens
ttaatagtggatgca

SEQ ID NO: 817411 - DNA, 15 bp, Homo sapiens
taatagtggatgcag

SEQ ID NO: 817412 - DNA, 15 bp, Homo sapiens
aatagtggatgcagc

SEQ ID NO: 817413 - DNA, 15 bp, Homo sapiens
atagtggatgcagca

SEQ ID NO: 817414 - DNA, 15 bp, Homo sapiens
tagtggatgcagcag

SEQ ID NO: 817415 - DNA, 15 bp, Homo sapiens
agtggatgcagcaga

SEQ ID NO: 817416 - DNA, 15 bp, Homo sapiens
gtggatgcagcagaa

SEQ ID NO: 817417 - DNA, 15 bp, Homo sapiens
tggatgcagcagaag

SEQ ID NO: 817418 - DNA, 15 bp, Homo sapiens
ggatgcagcagaagt

SEQ ID NO: 817419 - DNA, 15 bp, Homo sapiens
gatgcagcagaagtg

SEQ ID NO: 817420 - DNA, 15 bp, Homo sapiens
atgcagcagaagtgt

SEQ ID NO: 817421 - DNA, 15 bp, Homo sapiens
tgcagcagaagtgtt

SEQ ID NO: 817422 - DNA, 15 bp, Homo sapiens
gcagcagaagtgttc

SEQ ID NO: 817423 - DNA, 15 bp, Homo sapiens
cagcagaagtgttca

SEQ ID NO: 817424 - DNA, 15 bp, Homo sapiens
agcagaagtgttcac

SEQ ID NO: 817425 - DNA, 15 bp, Homo sapiens
gcagaagtgttcact

SEQ ID NO: 817426 - DNA, 15 bp, Homo sapiens
cagaagtgttcactg

SEQ ID NO: 817427 - DNA, 15 bp, Homo sapiens
agaagtgttcactgt

SEQ ID NO: 817428 - DNA, 15 bp, Homo sapiens
gaagtgttcactgta

SEQ ID NO: 817429 - DNA, 15 bp, Homo sapiens
aagtgttcactgtaa

SEQ ID NO: 817430 - DNA, 15 bp, Homo sapiens
agtgttcactgtaat

SEQ ID NO: 817431 - DNA, 15 bp, Homo sapiens
gtgttcactgtaatt

SEQ ID NO: 817432 - DNA, 15 bp, Homo sapiens
tgttcactgtaattt

SEQ ID NO: 817433 - DNA, 15 bp, Homo sapiens
gttcactgtaatttt

SEQ ID NO: 817434 - DNA, 15 bp, Homo sapiens
ttcactgtaattttt

SEQ ID NO: 817435 - DNA, 15 bp, Homo sapiens
tcactgtaatttttc

SEQ ID NO: 817436 - DNA, 15 bp, Homo sapiens
cactgtaatttttct

SEQ ID NO: 817437 - DNA, 15 bp, Homo sapiens
actgtaatttttcta

SEQ ID NO: 817438 - DNA, 15 bp, Homo sapiens
ctgtaatttttctat

SEQ ID NO: 817439 - DNA, 15 bp, Homo sapiens
tgtaatttttctatg

SEQ ID NO: 817440 - DNA, 15 bp, Homo sapiens
gtaatttttctatgt

SEQ ID NO: 817441 - DNA, 15 bp, Homo sapiens
taatttttctatgtg

SEQ ID NO: 817442 - DNA, 15 bp, Homo sapiens
aatttttctatgtgc

SEQ ID NO: 817443 - DNA, 15 bp, Homo sapiens
atttttctatgtgcc

SEQ ID NO: 817444 - DNA, 15 bp, Homo sapiens
tttttctatgtgcct

SEQ ID NO: 817445 - DNA, 15 bp, Homo sapiens
ttttctatgtgcctg

SEQ ID NO: 817446 - DNA, 15 bp, Homo sapiens
tttctatgtgcctgg

SEQ ID NO: 817447 - DNA, 15 bp, Homo sapiens
ttctatgtgcctggg

SEQ ID NO: 817448 - DNA, 15 bp, Homo sapiens
tctatgtgcctgggt

SEQ ID NO: 817449 - DNA, 15 bp, Homo sapiens
ctatgtgcctgggtg

SEQ ID NO: 817450 - DNA, 15 bp, Homo sapiens
tatgtgcctgggtgt

SEQ ID NO: 817451 - DNA, 15 bp, Homo sapiens
atgtgcctgggtgtg

SEQ ID NO: 817452 - DNA, 15 bp, Homo sapiens
tgtgcctgggtgtga

SEQ ID NO: 817453 - DNA, 15 bp, Homo sapiens
gtgcctgggtgtgat

SEQ ID NO: 817454 - DNA, 15 bp, Homo sapiens
tgcctgggtgtgatc

SEQ ID NO: 817455 - DNA, 15 bp, Homo sapiens
gcctgggtgtgatca

SEQ ID NO: 817456 - DNA, 15 bp, Homo sapiens
cctgggtgtgatcac

SEQ ID NO: 817457 - DNA, 15 bp, Homo sapiens
ctgggtgtgatcaca

SEQ ID NO: 817458 - DNA, 15 bp, Homo sapiens
tgggtgtgatcacat

SEQ ID NO: 817459 - DNA, 15 bp, Homo sapiens
gggtgtgatcacatg

SEQ ID NO: 817460 - DNA, 15 bp, Homo sapiens
ggtgtgatcacatgt

SEQ ID NO: 817461 - DNA, 15 bp, Homo sapiens
gtgtgatcacatgta

SEQ ID NO: 817462 - DNA, 15 bp, Homo sapiens
tgtgatcacatgtat

SEQ ID NO: 817463 - DNA, 15 bp, Homo sapiens
gtgatcacatgtata

SEQ ID NO: 817464 - DNA, 15 bp, Homo sapiens
tgatcacatgtatac

SEQ ID NO: 817465 - DNA, 15 bp, Homo sapiens
gatcacatgtataca

SEQ ID NO: 817466 - DNA, 15 bp, Homo sapiens
atcacatgtatacaa

SEQ ID NO: 817467 - DNA, 15 bp, Homo sapiens
tcacatgtatacaat

SEQ ID NO: 817468 - DNA, 15 bp, Homo sapiens
cacatgtatacaatt

SEQ ID NO: 817469 - DNA, 15 bp, Homo sapiens
acatgtatacaattt

SEQ ID NO: 817470 - DNA, 15 bp, Homo sapiens
catgtatacaatttg

SEQ ID NO: 817471 - DNA, 15 bp, Homo sapiens
atgtatacaatttgt

SEQ ID NO: 817472 - DNA, 15 bp, Homo sapiens
tgtatacaatttgtc

SEQ ID NO: 817473 - DNA, 15 bp, Homo sapiens
gtatacaatttgtct

SEQ ID NO: 817474 - DNA, 15 bp, Homo sapiens
tatacaatttgtcta

SEQ ID NO: 817475 - DNA, 15 bp, Homo sapiens
atacaatttgtctat

SEQ ID NO: 817476 - DNA, 15 bp, Homo sapiens
tacaatttgtctata

SEQ ID NO: 817477 - DNA, 15 bp, Homo sapiens
acaatttgtctataa

SEQ ID NO: 817478 - DNA, 15 bp, Homo sapiens
caatttgtctataat

SEQ ID NO: 817479 - DNA, 15 bp, Homo sapiens
aatttgtctataatc

SEQ ID NO: 817480 - DNA, 15 bp, Homo sapiens
atttgtctataatct

SEQ ID NO: 817481 - DNA, 15 bp, Homo sapiens
tttgtctataatctg

SEQ ID NO: 817482 - DNA, 15 bp, Homo sapiens
ttgtctataatctgt

SEQ ID NO: 817483 - DNA, 15 bp, Homo sapiens
tgtctataatctgtt

SEQ ID NO: 817484 - DNA, 15 bp, Homo sapiens
gtctataatctgtta

SEQ ID NO: 817485 - DNA, 15 bp, Homo sapiens
tctataatctgttat

SEQ ID NO: 817486 - DNA, 15 bp, Homo sapiens
ctataatctgttatc

SEQ ID NO: 817487 - DNA, 15 bp, Homo sapiens
tataatctgttatct

SEQ ID NO: 817488 - DNA, 15 bp, Homo sapiens
ataatctgttatctg

SEQ ID NO: 817489 - DNA, 15 bp, Homo sapiens
taatctgttatctgt

SEQ ID NO: 817490 - DNA, 15 bp, Homo sapiens
aatctgttatctgta

SEQ ID NO: 817491 - DNA, 15 bp, Homo sapiens
atctgttatctgtaa

SEQ ID NO: 817492 - DNA, 15 bp, Homo sapiens
tctgttatctgtaat

SEQ ID NO: 817493 - DNA, 15 bp, Homo sapiens
ctgttatctgtaatt

SEQ ID NO: 817494 - DNA, 15 bp, Homo sapiens
tgttatctgtaattt

SEQ ID NO: 817495 - DNA, 15 bp, Homo sapiens
gttatctgtaatttg

SEQ ID NO: 817496 - DNA, 15 bp, Homo sapiens
ttatctgtaatttgt

SEQ ID NO: 817497 - DNA, 15 bp, Homo sapiens
tatctgtaatttgtc

SEQ ID NO: 817498 - DNA, 15 bp, Homo sapiens
atctgtaatttgtct

SEQ ID NO: 817499 - DNA, 15 bp, Homo sapiens
tctgtaatttgtcta

SEQ ID NO: 817500 - DNA, 15 bp, Homo sapiens
ctgtaatttgtctat

SEQ ID NO: 817501 - DNA, 15 bp, Homo sapiens
tgtaatttgtctata

SEQ ID NO: 817502 - DNA, 15 bp, Homo sapiens
gtaatttgtctataa

SEQ ID NO: 817503 - DNA, 15 bp, Homo sapiens
taatttgtctataat

SEQ ID NO: 817504 - DNA, 15 bp, Homo sapiens
aatttgtctataatt

SEQ ID NO: 817505 - DNA, 15 bp, Homo sapiens
atttgtctataattg

SEQ ID NO: 817506 - DNA, 15 bp, Homo sapiens
tttgtctataattgt

SEQ ID NO: 817507 - DNA, 15 bp, Homo sapiens
ttgtctataattgtt

SEQ ID NO: 817508 - DNA, 15 bp, Homo sapiens
tgtctataattgttg

SEQ ID NO: 817509 - DNA, 15 bp, Homo sapiens
gtctataattgttgg

SEQ ID NO: 817510 - DNA, 15 bp, Homo sapiens
tctataattgttggc

SEQ ID NO: 817511 - DNA, 15 bp, Homo sapiens
ctataattgttggca

SEQ ID NO: 817512 - DNA, 15 bp, Homo sapiens
tataattgttggcat

SEQ ID NO: 817513 - DNA, 15 bp, Homo sapiens
ataattgttggcatg

SEQ ID NO: 817514 - DNA, 15 bp, Homo sapiens
taattgttggcatgt

SEQ ID NO: 817515 - DNA, 15 bp, Homo sapiens
aattgttggcatgtg

SEQ ID NO: 817516 - DNA, 15 bp, Homo sapiens
attgttggcatgtgt

SEQ ID NO: 817517 - DNA, 15 bp, Homo sapiens
ttgttggcatgtgtc

SEQ ID NO: 817518 - DNA, 15 bp, Homo sapiens
tgttggcatgtgtct

SEQ ID NO: 817519 - DNA, 15 bp, Homo sapiens
gttggcatgtgtcta

SEQ ID NO: 817520 - DNA, 15 bp, Homo sapiens
ttggcatgtgtctac

SEQ ID NO: 817521 - DNA, 15 bp, Homo sapiens
tggcatgtgtctact

SEQ ID NO: 817522 - DNA, 15 bp, Homo sapiens
ggcatgtgtctacta

SEQ ID NO: 817523 - DNA, 15 bp, Homo sapiens
gcatgtgtctactat

SEQ ID NO: 817524 - DNA, 15 bp, Homo sapiens
catgtgtctactatg

SEQ ID NO: 817525 - DNA, 15 bp, Homo sapiens
atgtgtctactatgt

SEQ ID NO: 817526 - DNA, 15 bp, Homo sapiens
tgtgtctactatgtc

SEQ ID NO: 817527 - DNA, 15 bp, Homo sapiens
gtgtctactatgtcc

SEQ ID NO: 817528 - DNA, 15 bp, Homo sapiens
tgtctactatgtcca

SEQ ID NO: 817529 - DNA, 15 bp, Homo sapiens
gtctactatgtccag

SEQ ID NO: 817530 - DNA, 15 bp, Homo sapiens
tctactatgtccagg

SEQ ID NO: 817531 - DNA, 15 bp, Homo sapiens
ctactatgtccaggt

SEQ ID NO: 817532 - DNA, 15 bp, Homo sapiens
tactatgtccaggta

SEQ ID NO: 817533 - DNA, 15 bp, Homo sapiens
actatgtccaggtac

SEQ ID NO: 817534 - DNA, 15 bp, Homo sapiens
ctatgtccaggtacc

SEQ ID NO: 817535 - DNA, 15 bp, Homo sapiens
tatgtccaggtaccc

SEQ ID NO: 817536 - DNA, 15 bp, Homo sapiens
atgtccaggtacccc

SEQ ID NO: 817537 - DNA, 15 bp, Homo sapiens
tgtccaggtacccct

SEQ ID NO: 817538 - DNA, 15 bp, Homo sapiens
gtccaggtaccccta

SEQ ID NO: 817539 - DNA, 15 bp, Homo sapiens
tccaggtacccctat

SEQ ID NO: 817540 - DNA, 15 bp, Homo sapiens
ccaggtacccctatt

SEQ ID NO: 817541 - DNA, 15 bp, Homo sapiens
caggtacccctattt

SEQ ID NO: 817542 - DNA, 15 bp, Homo sapiens
aggtacccctatttg

SEQ ID NO: 817543 - DNA, 15 bp, Homo sapiens
ggtacccctatttga

SEQ ID NO: 817544 - DNA, 15 bp, Homo sapiens
gtacccctatttgag

SEQ ID NO: 817545 - DNA, 15 bp, Homo sapiens
tacccctatttgagg

SEQ ID NO: 817546 - DNA, 15 bp, Homo sapiens
acccctatttgaggt

SEQ ID NO: 817547 - DNA, 15 bp, Homo sapiens
cccctatttgaggta

SEQ ID NO: 817548 - DNA, 15 bp, Homo sapiens
ccctatttgaggtac

SEQ ID NO: 817549 - DNA, 15 bp, Homo sapiens
cctatttgaggtact

SEQ ID NO: 817550 - DNA, 15 bp, Homo sapiens
ctatttgaggtactg

SEQ ID NO: 817551 - DNA, 15 bp, Homo sapiens
tatttgaggtactga

SEQ ID NO: 817552 - DNA, 15 bp, Homo sapiens
atttgaggtactgaa

SEQ ID NO: 817553 - DNA, 15 bp, Homo sapiens
tttgaggtactgaaa

SEQ ID NO: 817554 - DNA, 15 bp, Homo sapiens
ttgaggtactgaaat

SEQ ID NO: 817555 - DNA, 15 bp, Homo sapiens
tgaggtactgaaata

SEQ ID NO: 817556 - DNA, 15 bp, Homo sapiens
gaggtactgaaatat

SEQ ID NO: 817557 - DNA, 15 bp, Homo sapiens
aggtactgaaatatg

SEQ ID NO: 817558 - DNA, 15 bp, Homo sapiens
ggtactgaaatatgt

SEQ ID NO: 817559 - DNA, 15 bp, Homo sapiens
gtactgaaatatgtt

SEQ ID NO: 817560 - DNA, 15 bp, Homo sapiens
tactgaaatatgttc

SEQ ID NO: 817561 - DNA, 15 bp, Homo sapiens
actgaaatatgttca

SEQ ID NO: 817562 - DNA, 15 bp, Homo sapiens
ctgaaatatgttcat

SEQ ID NO: 817563 - DNA, 15 bp, Homo sapiens
tgaaatatgttcatt

SEQ ID NO: 817564 - DNA, 15 bp, Homo sapiens
gaaatatgttcattt

SEQ ID NO: 817565 - DNA, 15 bp, Homo sapiens
aaatatgttcatttt

SEQ ID NO: 817566 - DNA, 15 bp, Homo sapiens
aatatgttcatttta

SEQ ID NO: 817567 - DNA, 15 bp, Homo sapiens
atatgttcattttat

SEQ ID NO: 817568 - DNA, 15 bp, Homo sapiens
tatgttcattttatg

SEQ ID NO: 817569 - DNA, 15 bp, Homo sapiens
atgttcattttatgt

SEQ ID NO: 817570 - DNA, 15 bp, Homo sapiens
tgttcattttatgtc

SEQ ID NO: 817571 - DNA, 15 bp, Homo sapiens
gttcattttatgtcg

SEQ ID NO: 817572 - DNA, 15 bp, Homo sapiens
ttcattttatgtcga

SEQ ID NO: 817573 - DNA, 15 bp, Homo sapiens
tcattttatgtcgat

SEQ ID NO: 817574 - DNA, 15 bp, Homo sapiens
cattttatgtcgatt

SEQ ID NO: 817575 - DNA, 15 bp, Homo sapiens
attttatgtcgattc

SEQ ID NO: 817576 - DNA, 15 bp, Homo sapiens
ttttatgtcgattct

SEQ ID NO: 817577 - DNA, 15 bp, Homo sapiens
tttatgtcgattcta

SEQ ID NO: 817578 - DNA, 15 bp, Homo sapiens
ttatgtcgattctaa

SEQ ID NO: 817579 - DNA, 15 bp, Homo sapiens
tatgtcgattctaac

SEQ ID NO: 817580 - DNA, 15 bp, Homo sapiens
atgtcgattctaact

SEQ ID NO: 817581 - DNA, 15 bp, Homo sapiens
tgtcgattctaacta

SEQ ID NO: 817582 - DNA, 15 bp, Homo sapiens
gtcgattctaactat

SEQ ID NO: 817583 - DNA, 15 bp, Homo sapiens
tcgattctaactata

SEQ ID NO: 817584 - DNA, 15 bp, Homo sapiens
cgattctaactataa

SEQ ID NO: 817585 - DNA, 15 bp, Homo sapiens
gattctaactataat

SEQ ID NO: 817586 - DNA, 15 bp, Homo sapiens
attctaactataatt

SEQ ID NO: 817587 - DNA, 15 bp, Homo sapiens
ttctaactataattt

SEQ ID NO: 817588 - DNA, 15 bp, Homo sapiens
tctaactataattta

SEQ ID NO: 817589 - DNA, 15 bp, Homo sapiens
ctaactataatttag

SEQ ID NO: 817590 - DNA, 15 bp, Homo sapiens
taactataatttaga

SEQ ID NO: 817591 - DNA, 15 bp, Homo sapiens
aactataatttagag

SEQ ID NO: 817592 - DNA, 15 bp, Homo sapiens
actataatttagaga

SEQ ID NO: 817593 - DNA, 15 bp, Homo sapiens
ctataatttagagac

SEQ ID NO: 817594 - DNA, 15 bp, Homo sapiens
tataatttagagact

SEQ ID NO: 817595 - DNA, 15 bp, Homo sapiens
ataatttagagactg

SEQ ID NO: 817596 - DNA, 15 bp, Homo sapiens
taatttagagactgc

SEQ ID NO: 817597 - DNA, 15 bp, Homo sapiens
aatttagagactgct

SEQ ID NO: 817598 - DNA, 15 bp, Homo sapiens
atttagagactgctc

SEQ ID NO: 817599 - DNA, 15 bp, Homo sapiens
tttagagactgctct

SEQ ID NO: 817600 - DNA, 15 bp, Homo sapiens
ttagagactgctctc

SEQ ID NO: 817601 - DNA, 15 bp, Homo sapiens
tagagactgctctcc

SEQ ID NO: 817602 - DNA, 15 bp, Homo sapiens
agagactgctctcca

SEQ ID NO: 817603 - DNA, 15 bp, Homo sapiens
gagactgctctccaa

SEQ ID NO: 817604 - DNA, 15 bp, Homo sapiens
agactgctctccaaa

SEQ ID NO: 817605 - DNA, 15 bp, Homo sapiens
gactgctctccaaat

SEQ ID NO: 817606 - DNA, 15 bp, Homo sapiens
actgctctccaaata

SEQ ID NO: 817607 - DNA, 15 bp, Homo sapiens
ctgctctccaaatag

SEQ ID NO: 817608 - DNA, 15 bp, Homo sapiens
tgctctccaaatagc

SEQ ID NO: 817609 - DNA, 15 bp, Homo sapiens
gctctccaaatagca

SEQ ID NO: 817610 - DNA, 15 bp, Homo sapiens
ctctccaaatagcag

SEQ ID NO: 817611 - DNA, 15 bp, Homo sapiens
tctccaaatagcaga

SEQ ID NO: 817612 - DNA, 15 bp, Homo sapiens
ctccaaatagcagaa

SEQ ID NO: 817613 - DNA, 15 bp, Homo sapiens
tccaaatagcagaaa

SEQ ID NO: 817614 - DNA, 15 bp, Homo sapiens
ccaaatagcagaaag

SEQ ID NO: 817615 - DNA, 15 bp, Homo sapiens
caaatagcagaaaga

SEQ ID NO: 817616 - DNA, 15 bp, Homo sapiens
aaatagcagaaagaa

SEQ ID NO: 817617 - DNA, 15 bp, Homo sapiens
aatagcagaaagaac

SEQ ID NO: 817618 - DNA, 15 bp, Homo sapiens
atagcagaaagaaca

SEQ ID NO: 817619 - DNA, 15 bp, Homo sapiens
tagcagaaagaacag

SEQ ID NO: 817620 - DNA, 15 bp, Homo sapiens
agcagaaagaacagc

SEQ ID NO: 817621 - DNA, 15 bp, Homo sapiens
gcagaaagaacagct

SEQ ID NO: 817622 - DNA, 15 bp, Homo sapiens
cagaaagaacagctt

SEQ ID NO: 817623 - DNA, 15 bp, Homo sapiens
agaaagaacagcttc

SEQ ID NO: 817624 - DNA, 15 bp, Homo sapiens
gaaagaacagcttct

SEQ ID NO: 817625 - DNA, 15 bp, Homo sapiens
aaagaacagcttctt

SEQ ID NO: 817626 - DNA, 15 bp, Homo sapiens
aagaacagcttctta

SEQ ID NO: 817627 - DNA, 15 bp, Homo sapiens
agaacagcttcttac

SEQ ID NO: 817628 - DNA, 15 bp, Homo sapiens
gaacagcttcttact

SEQ ID NO: 817629 - DNA, 15 bp, Homo sapiens
aacagcttcttacta

SEQ ID NO: 817630 - DNA, 15 bp, Homo sapiens
acagcttcttactag

SEQ ID NO: 817631 - DNA, 15 bp, Homo sapiens
cagcttcttactagg

SEQ ID NO: 817632 - DNA, 15 bp, Homo sapiens
agcttcttactaggg

SEQ ID NO: 817633 - DNA, 15 bp, Homo sapiens
gcttcttactagggt

SEQ ID NO: 817634 - DNA, 15 bp, Homo sapiens
cttcttactagggtg

SEQ ID NO: 817635 - DNA, 15 bp, Homo sapiens
ttcttactagggtgg

SEQ ID NO: 817636 - DNA, 15 bp, Homo sapiens
tcttactagggtggg

SEQ ID NO: 817637 - DNA, 15 bp, Homo sapiens
cttactagggtgggt

SEQ ID NO: 817638 - DNA, 15 bp, Homo sapiens
ttactagggtgggtt

SEQ ID NO: 817639 - DNA, 15 bp, Homo sapiens
tactagggtgggttt

SEQ ID NO: 817640 - DNA, 15 bp, Homo sapiens
actagggtgggtttt

SEQ ID NO: 817641 - DNA, 15 bp, Homo sapiens
ctagggtgggttttt

SEQ ID NO: 817642 - DNA, 15 bp, Homo sapiens
tagggtgggtttttt

SEQ ID NO: 817643 - DNA, 15 bp, Homo sapiens
agggtgggttttttt

SEQ ID NO: 817644 - DNA, 15 bp, Homo sapiens
gggtgggtttttttt

SEQ ID NO: 817645 - DNA, 15 bp, Homo sapiens
ggtgggttttttttt

SEQ ID NO: 817646 - DNA, 15 bp, Homo sapiens
gtgggtttttttttt

SEQ ID NO: 817647 - DNA, 15 bp, Homo sapiens
tgggttttttttttt

SEQ ID NO: 817648 - DNA, 15 bp, Homo sapiens
gggtttttttttttc

SEQ ID NO: 817649 - DNA, 15 bp, Homo sapiens
ggtttttttttttcc

SEQ ID NO: 817650 - DNA, 15 bp, Homo sapiens
gtttttttttttcca

SEQ ID NO: 817651 - DNA, 15 bp, Homo sapiens
tttttttttttccag

SEQ ID NO: 817652 - DNA, 15 bp, Homo sapiens
ttttttttttccaga

SEQ ID NO: 817653 - DNA, 15 bp, Homo sapiens
tttttttttccagaa

SEQ ID NO: 817654 - DNA, 15 bp, Homo sapiens
ttttttttccagaag

SEQ ID NO: 817655 - DNA, 15 bp, Homo sapiens
tttttttccagaaga

SEQ ID NO: 817656 - DNA, 15 bp, Homo sapiens
ttttttccagaagat

SEQ ID NO: 817657 - DNA, 15 bp, Homo sapiens
tttttccagaagatt

SEQ ID NO: 817658 - DNA, 15 bp, Homo sapiens
ttttccagaagatta

SEQ ID NO: 817659 - DNA, 15 bp, Homo sapiens
tttccagaagattaa

SEQ ID NO: 817660 - DNA, 15 bp, Homo sapiens
ttccagaagattaag

SEQ ID NO: 817661 - DNA, 15 bp, Homo sapiens
ccagtgtagccttga

SEQ ID NO: 817662 - DNA, 15 bp, Homo sapiens
cagtgtagccttgac

SEQ ID NO: 817663 - DNA, 15 bp, Homo sapiens
agtgtagccttgaca

SEQ ID NO: 817664 - DNA, 15 bp, Homo sapiens
gtgtagccttgacat

SEQ ID NO: 817665 - DNA, 15 bp, Homo sapiens
tgtagccttgacatt

SEQ ID NO: 817666 - DNA, 15 bp, Homo sapiens
gtagccttgacatta

SEQ ID NO: 817667 - DNA, 15 bp, Homo sapiens
tagccttgacattag

SEQ ID NO: 817668 - DNA, 15 bp, Homo sapiens
agccttgacattaga

SEQ ID NO: 817669 - DNA, 15 bp, Homo sapiens
gccttgacattagag

SEQ ID NO: 817670 - DNA, 15 bp, Homo sapiens
ccttgacattagagc

SEQ ID NO: 817671 - DNA, 15 bp, Homo sapiens
cttgacattagagcg

SEQ ID NO: 817672 - DNA, 15 bp, Homo sapiens
ttgacattagagcga

SEQ ID NO: 817673 - DNA, 15 bp, Homo sapiens
tgacattagagcgaa

SEQ ID NO: 817674 - DNA, 15 bp, Homo sapiens
gacattagagcgaag

SEQ ID NO: 817675 - DNA, 15 bp, Homo sapiens
acattagagcgaagc

SEQ ID NO: 817676 - DNA, 15 bp, Homo sapiens
cattagagcgaagct

SEQ ID NO: 817677 - DNA, 15 bp, Homo sapiens
attagagcgaagctt

SEQ ID NO: 817678 - DNA, 15 bp, Homo sapiens
ttagagcgaagcttg

SEQ ID NO: 817679 - DNA, 15 bp, Homo sapiens
tagagcgaagcttga

SEQ ID NO: 817680 - DNA, 15 bp, Homo sapiens
agagcgaagcttgat

SEQ ID NO: 817681 - DNA, 15 bp, Homo sapiens
gagcgaagcttgatg

SEQ ID NO: 817682 - DNA, 15 bp, Homo sapiens
agcgaagcttgatga

SEQ ID NO: 817683 - DNA, 15 bp, Homo sapiens
gcgaagcttgatgaa

SEQ ID NO: 817684 - DNA, 15 bp, Homo sapiens
cgaagcttgatgaat

SEQ ID NO: 817685 - DNA, 15 bp, Homo sapiens
gaagcttgatgaatc

SEQ ID NO: 817686 - DNA, 15 bp, Homo sapiens
aagcttgatgaatct

SEQ ID NO: 817687 - DNA, 15 bp, Homo sapiens
agcttgatgaatctc

SEQ ID NO: 817688 - DNA, 15 bp, Homo sapiens
gcttgatgaatctct

SEQ ID NO: 817689 - DNA, 15 bp, Homo sapiens
cttgatgaatctcta

SEQ ID NO: 817690 - DNA, 15 bp, Homo sapiens
ttgatgaatctctac

SEQ ID NO: 817691 - DNA, 15 bp, Homo sapiens
tgatgaatctctact

SEQ ID NO: 817692 - DNA, 15 bp, Homo sapiens
gatgaatctctactg

SEQ ID NO: 817693 - DNA, 15 bp, Homo sapiens
atgaatctctactga

SEQ ID NO: 817694 - DNA, 15 bp, Homo sapiens
tgaatctctactgaa

SEQ ID NO: 817695 - DNA, 15 bp, Homo sapiens
gaatctctactgaat

SEQ ID NO: 817696 - DNA, 15 bp, Homo sapiens
aatctctactgaatt

SEQ ID NO: 817697 - DNA, 15 bp, Homo sapiens
atctctactgaattt

SEQ ID NO: 817698 - DNA, 15 bp, Homo sapiens
tctctactgaattta

SEQ ID NO: 817699 - DNA, 15 bp, Homo sapiens
ctctactgaatttaa

SEQ ID NO: 817700 - DNA, 15 bp, Homo sapiens
tctactgaatttaaa

SEQ ID NO: 817701 - DNA, 15 bp, Homo sapiens
ctactgaatttaaaa

SEQ ID NO: 817702 - DNA, 15 bp, Homo sapiens
tactgaatttaaaac

SEQ ID NO: 817703 - DNA, 15 bp, Homo sapiens
actgaatttaaaaca

SEQ ID NO: 817704 - DNA, 15 bp, Homo sapiens
ctgaatttaaaacag

SEQ ID NO: 817705 - DNA, 15 bp, Homo sapiens
tgaatttaaaacagt

SEQ ID NO: 817706 - DNA, 15 bp, Homo sapiens
gaatttaaaacagta

SEQ ID NO: 817707 - DNA, 15 bp, Homo sapiens
aatttaaaacagtat

SEQ ID NO: 817708 - DNA, 15 bp, Homo sapiens
atttaaaacagtatt

SEQ ID NO: 817709 - DNA, 15 bp, Homo sapiens
tttaaaacagtatta

SEQ ID NO: 817710 - DNA, 15 bp, Homo sapiens
ttaaaacagtattat

SEQ ID NO: 817711 - DNA, 15 bp, Homo sapiens
taaaacagtattatt

SEQ ID NO: 817712 - DNA, 15 bp, Homo sapiens
aaaacagtattatta

SEQ ID NO: 817713 - DNA, 15 bp, Homo sapiens
aaacagtattattac

SEQ ID NO: 817714 - DNA, 15 bp, Homo sapiens
aacagtattattact

SEQ ID NO: 817715 - DNA, 15 bp, Homo sapiens
acagtattattactc

SEQ ID NO: 817716 - DNA, 15 bp, Homo sapiens
cagtattattactcc

SEQ ID NO: 817717 - DNA, 15 bp, Homo sapiens
agtattattactcct

SEQ ID NO: 817718 - DNA, 15 bp, Homo sapiens
gtattattactcctt

SEQ ID NO: 817719 - DNA, 15 bp, Homo sapiens
tattattactccttt

SEQ ID NO: 817720 - DNA, 15 bp, Homo sapiens
attattactccttta

SEQ ID NO: 817721 - DNA, 15 bp, Homo sapiens
ttattactcctttaa

SEQ ID NO: 817722 - DNA, 15 bp, Homo sapiens
tattactcctttaag

SEQ ID NO: 817723 - DNA, 15 bp, Homo sapiens
attactcctttaaga

SEQ ID NO: 817724 - DNA, 15 bp, Homo sapiens
ttactcctttaagag

SEQ ID NO: 817725 - DNA, 15 bp, Homo sapiens
tactcctttaagaga

SEQ ID NO: 817726 - DNA, 15 bp, Homo sapiens
actcctttaagagaa

SEQ ID NO: 817727 - DNA, 15 bp, Homo sapiens
ctcctttaagagaaa

SEQ ID NO: 817728 - DNA, 15 bp, Homo sapiens
tcctttaagagaaat

SEQ ID NO: 817729 - DNA, 15 bp, Homo sapiens
cctttaagagaaatg

SEQ ID NO: 817730 - DNA, 15 bp, Homo sapiens
ctttaagagaaatgt

SEQ ID NO: 817731 - DNA, 15 bp, Homo sapiens
tttaagagaaatgtt

SEQ ID NO: 817732 - DNA, 15 bp, Homo sapiens
ttaagagaaatgtta

SEQ ID NO: 817733 - DNA, 15 bp, Homo sapiens
taagagaaatgttaa

SEQ ID NO: 817734 - DNA, 15 bp, Homo sapiens
aagagaaatgttaag

SEQ ID NO: 817735 - DNA, 15 bp, Homo sapiens
agagaaatgttaaga

SEQ ID NO: 817736 - DNA, 15 bp, Homo sapiens
gagaaatgttaagaa

SEQ ID NO: 817737 - DNA, 15 bp, Homo sapiens
agaaatgttaagaaa

SEQ ID NO: 817738 - DNA, 15 bp, Homo sapiens
gaaatgttaagaaat

SEQ ID NO: 817739 - DNA, 15 bp, Homo sapiens
aaatgttaagaaata

SEQ ID NO: 817740 - DNA, 15 bp, Homo sapiens
aatgttaagaaatat

SEQ ID NO: 817741 - DNA, 15 bp, Homo sapiens
atgttaagaaatata

SEQ ID NO: 817742 - DNA, 15 bp, Homo sapiens
tgttaagaaatatat

SEQ ID NO: 817743 - DNA, 15 bp, Homo sapiens
gttaagaaatatata

SEQ ID NO: 817744 - DNA, 15 bp, Homo sapiens
ttaagaaatatatat

SEQ ID NO: 817745 - DNA, 15 bp, Homo sapiens
taagaaatatatata

SEQ ID NO: 817746 - DNA, 15 bp, Homo sapiens
aagaaatatatatat

SEQ ID NO: 817747 - DNA, 15 bp, Homo sapiens
agaaatatatatata

SEQ ID NO: 817748 - DNA, 15 bp, Homo sapiens
gaaatatatatatat

SEQ ID NO: 817749 - DNA, 15 bp, Homo sapiens
aaatatatatatata

SEQ ID NO: 817750 - DNA, 15 bp, Homo sapiens
atatatatatatatc

SEQ ID NO: 817751 - DNA, 15 bp, Homo sapiens
tatatatatatatca

SEQ ID NO: 817752 - DNA, 15 bp, Homo sapiens
atatatatatatcac

SEQ ID NO: 817753 - DNA, 15 bp, Homo sapiens
tatatatatatcaca

SEQ ID NO: 817754 - DNA, 15 bp, Homo sapiens
atatatatatcacat

SEQ ID NO: 817755 - DNA, 15 bp, Homo sapiens
tatatatatcacata

SEQ ID NO: 817756 - DNA, 15 bp, Homo sapiens
atatatatcacatat

SEQ ID NO: 817757 - DNA, 15 bp, Homo sapiens
tatatatcacatata

SEQ ID NO: 817758 - DNA, 15 bp, Homo sapiens
atatatcacatatat

SEQ ID NO: 817759 - DNA, 15 bp, Homo sapiens
tatatcacatatata

SEQ ID NO: 817760 - DNA, 15 bp, Homo sapiens
atatcacatatatat

SEQ ID NO: 817761 - DNA, 15 bp, Homo sapiens
tatcacatatatatg

SEQ ID NO: 817762 - DNA, 15 bp, Homo sapiens
atcacatatatatgc

SEQ ID NO: 817763 - DNA, 15 bp, Homo sapiens
tcacatatatatgct

SEQ ID NO: 817764 - DNA, 15 bp, Homo sapiens
cacatatatatgctt

SEQ ID NO: 817765 - DNA, 15 bp, Homo sapiens
acatatatatgcttt

SEQ ID NO: 817766 - DNA, 15 bp, Homo sapiens
catatatatgctttt

SEQ ID NO: 817767 - DNA, 15 bp, Homo sapiens
atatatatgcttttt

SEQ ID NO: 817768 - DNA, 15 bp, Homo sapiens
tatatatgctttttg

SEQ ID NO: 817769 - DNA, 15 bp, Homo sapiens
atatatgctttttgc

SEQ ID NO: 817770 - DNA, 15 bp, Homo sapiens
tatatgctttttgct

SEQ ID NO: 817771 - DNA, 15 bp, Homo sapiens
atatgctttttgctg

SEQ ID NO: 817772 - DNA, 15 bp, Homo sapiens
tatgctttttgctga

SEQ ID NO: 817773 - DNA, 15 bp, Homo sapiens
atgctttttgctgat

SEQ ID NO: 817774 - DNA, 15 bp, Homo sapiens
tgctttttgctgatg

SEQ ID NO: 817775 - DNA, 15 bp, Homo sapiens
gctttttgctgatga

SEQ ID NO: 817776 - DNA, 15 bp, Homo sapiens
ctttttgctgatgaa

SEQ ID NO: 817777 - DNA, 15 bp, Homo sapiens
tttttgctgatgaat

SEQ ID NO: 817778 - DNA, 15 bp, Homo sapiens
ttttgctgatgaatt

SEQ ID NO: 817779 - DNA, 15 bp, Homo sapiens
tttgctgatgaattg

SEQ ID NO: 817780 - DNA, 15 bp, Homo sapiens
tgctgatgaattgat

SEQ ID NO: 817781 - DNA, 15 bp, Homo sapiens
gctgatgaattgatt

SEQ ID NO: 817782 - DNA, 15 bp, Homo sapiens
ctgatgaattgattt

SEQ ID NO: 817783 - DNA, 15 bp, Homo sapiens
tgatgaattgatttt

SEQ ID NO: 817784 - DNA, 15 bp, Homo sapiens
gatgaattgattttg

SEQ ID NO: 817785 - DNA, 15 bp, Homo sapiens
atgaattgattttga

SEQ ID NO: 817786 - DNA, 15 bp, Homo sapiens
tgaattgattttgat

SEQ ID NO: 817787 - DNA, 15 bp, Homo sapiens
gaattgattttgata

SEQ ID NO: 817788 - DNA, 15 bp, Homo sapiens
aattgattttgataa

SEQ ID NO: 817789 - DNA, 15 bp, Homo sapiens
attgattttgataag

SEQ ID NO: 817790 - DNA, 15 bp, Homo sapiens
ttgattttgataaga

SEQ ID NO: 817791 - DNA, 15 bp, Homo sapiens
tgattttgataagaa

SEQ ID NO: 817792 - DNA, 15 bp, Homo sapiens
gattttgataagaaa

SEQ ID NO: 817793 - DNA, 15 bp, Homo sapiens
attttgataagaaat

SEQ ID NO: 817794 - DNA, 15 bp, Homo sapiens
ttttgataagaaata

SEQ ID NO: 817795 - DNA, 15 bp, Homo sapiens
tttgataagaaatac

SEQ ID NO: 817796 - DNA, 15 bp, Homo sapiens
ttgataagaaatacc

SEQ ID NO: 817797 - DNA, 15 bp, Homo sapiens
tgataagaaatacct

SEQ ID NO: 817798 - DNA, 15 bp, Homo sapiens
gataagaaatacctt

SEQ ID NO: 817799 - DNA, 15 bp, Homo sapiens
taagaaatacctttg

SEQ ID NO: 817800 - DNA, 15 bp, Homo sapiens
aagaaatacctttga

SEQ ID NO: 817801 - DNA, 15 bp, Homo sapiens
agaaatacctttgag

SEQ ID NO: 817802 - DNA, 15 bp, Homo sapiens
gaaatacctttgaga

SEQ ID NO: 817803 - DNA, 15 bp, Homo sapiens
aaatacctttgagaa

SEQ ID NO: 817804 - DNA, 15 bp, Homo sapiens
aatacctttgagaat

SEQ ID NO: 817805 - DNA, 15 bp, Homo sapiens
atacctttgagaatc

SEQ ID NO: 817806 - DNA, 15 bp, Homo sapiens
tacctttgagaatct

SEQ ID NO: 817807 - DNA, 15 bp, Homo sapiens
acctttgagaatctt

SEQ ID NO: 817808 - DNA, 15 bp, Homo sapiens
cctttgagaatcttg

SEQ ID NO: 817809 - DNA, 15 bp, Homo sapiens
ctttgagaatcttgc

SEQ ID NO: 817810 - DNA, 15 bp, Homo sapiens
tttgagaatcttgct

SEQ ID NO: 817811 - DNA, 15 bp, Homo sapiens
ttgagaatcttgctc

SEQ ID NO: 817812 - DNA, 15 bp, Homo sapiens
tgagaatcttgctcg

SEQ ID NO: 817813 - DNA, 15 bp, Homo sapiens
gagaatcttgctcgt

SEQ ID NO: 817814 - DNA, 15 bp, Homo sapiens
agaatcttgctcgta

SEQ ID NO: 817815 - DNA, 15 bp, Homo sapiens
gaatcttgctcgtaa

SEQ ID NO: 817816 - DNA, 15 bp, Homo sapiens
aatcttgctcgtaac

SEQ ID NO: 817817 - DNA, 15 bp, Homo sapiens
atcttgctcgtaact

SEQ ID NO: 817818 - DNA, 15 bp, Homo sapiens
tcttgctcgtaacta

SEQ ID NO: 817819 - DNA, 15 bp, Homo sapiens
cttgctcgtaactag

SEQ ID NO: 817820 - DNA, 15 bp, Homo sapiens
ttgctcgtaactagg

SEQ ID NO: 817821 - DNA, 15 bp, Homo sapiens
tgctcgtaactaggg

SEQ ID NO: 817822 - DNA, 15 bp, Homo sapiens
gctcgtaactagggt

SEQ ID NO: 817823 - DNA, 15 bp, Homo sapiens
ctcgtaactagggtt

SEQ ID NO: 817824 - DNA, 15 bp, Homo sapiens
tcgtaactagggttc

SEQ ID NO: 817825 - DNA, 15 bp, Homo sapiens
cgtaactagggttct

SEQ ID NO: 817826 - DNA, 15 bp, Homo sapiens
gtaactagggttctg

SEQ ID NO: 817827 - DNA, 15 bp, Homo sapiens
taactagggttctgc

SEQ ID NO: 817828 - DNA, 15 bp, Homo sapiens
aactagggttctgct

SEQ ID NO: 817829 - DNA, 15 bp, Homo sapiens
actagggttctgcta

SEQ ID NO: 817830 - DNA, 15 bp, Homo sapiens
ctagggttctgctaa

SEQ ID NO: 817831 - DNA, 15 bp, Homo sapiens
tagggttctgctaaa

SEQ ID NO: 817832 - DNA, 15 bp, Homo sapiens
agggttctgctaaat

SEQ ID NO: 817833 - DNA, 15 bp, Homo sapiens
gggttctgctaaatg

SEQ ID NO: 817834 - DNA, 15 bp, Homo sapiens
ggttctgctaaatgg

SEQ ID NO: 817835 - DNA, 15 bp, Homo sapiens
gttctgctaaatggt

SEQ ID NO: 817836 - DNA, 15 bp, Homo sapiens
ttctgctaaatggtc

SEQ ID NO: 817837 - DNA, 15 bp, Homo sapiens
tctgctaaatggtca

SEQ ID NO: 817838 - DNA, 15 bp, Homo sapiens
ctgctaaatggtcaa

SEQ ID NO: 817839 - DNA, 15 bp, Homo sapiens
tgctaaatggtcaat

SEQ ID NO: 817840 - DNA, 15 bp, Homo sapiens
gctaaatggtcaata

SEQ ID NO: 817841 - DNA, 15 bp, Homo sapiens
ctaaatggtcaatat

SEQ ID NO: 817842 - DNA, 15 bp, Homo sapiens
taaatggtcaatatg

SEQ ID NO: 817843 - DNA, 15 bp, Homo sapiens
aaatggtcaatatgt

SEQ ID NO: 817844 - DNA, 15 bp, Homo sapiens
aatggtcaatatgta

SEQ ID NO: 817845 - DNA, 15 bp, Homo sapiens
atggtcaatatgtat

SEQ ID NO: 817846 - DNA, 15 bp, Homo sapiens
tggtcaatatgtatg

SEQ ID NO: 817847 - DNA, 15 bp, Homo sapiens
ggtcaatatgtatga

SEQ ID NO: 817848 - DNA, 15 bp, Homo sapiens
gtcaatatgtatgag

SEQ ID NO: 817849 - DNA, 15 bp, Homo sapiens
tcaatatgtatgagg

SEQ ID NO: 817850 - DNA, 15 bp, Homo sapiens
caatatgtatgaggt

SEQ ID NO: 817851 - DNA, 15 bp, Homo sapiens
aatatgtatgaggtg

SEQ ID NO: 817852 - DNA, 15 bp, Homo sapiens
atatgtatgaggtga

SEQ ID NO: 817853 - DNA, 15 bp, Homo sapiens
tatgtatgaggtgag

SEQ ID NO: 817854 - DNA, 15 bp, Homo sapiens
atgtatgaggtgagc

SEQ ID NO: 817855 - DNA, 15 bp, Homo sapiens
tgtatgaggtgagct

SEQ ID NO: 817856 - DNA, 15 bp, Homo sapiens
gtatgaggtgagctc

SEQ ID NO: 817857 - DNA, 15 bp, Homo sapiens
tatgaggtgagctca

SEQ ID NO: 817858 - DNA, 15 bp, Homo sapiens
atgaggtgagctcac

SEQ ID NO: 817859 - DNA, 15 bp, Homo sapiens
tgaggtgagctcact

SEQ ID NO: 817860 - DNA, 15 bp, Homo sapiens
gaggtgagctcactg

SEQ ID NO: 817861 - DNA, 15 bp, Homo sapiens
aggtgagctcactgt

SEQ ID NO: 817862 - DNA, 15 bp, Homo sapiens
ggtgagctcactgtt

SEQ ID NO: 817863 - DNA, 15 bp, Homo sapiens
gtgagctcactgttc

SEQ ID NO: 817864 - DNA, 15 bp, Homo sapiens
tgagctcactgttca

SEQ ID NO: 817865 - DNA, 15 bp, Homo sapiens
gagctcactgttcac

SEQ ID NO: 817866 - DNA, 15 bp, Homo sapiens
agctcactgttcacc

SEQ ID NO: 817867 - DNA, 15 bp, Homo sapiens
gctcactgttcacct

SEQ ID NO: 817868 - DNA, 15 bp, Homo sapiens
ctcactgttcacctg

SEQ ID NO: 817869 - DNA, 15 bp, Homo sapiens
tcactgttcacctgt

SEQ ID NO: 817870 - DNA, 15 bp, Homo sapiens
cactgttcacctgtc

SEQ ID NO: 817871 - DNA, 15 bp, Homo sapiens
actgttcacctgtca

SEQ ID NO: 817872 - DNA, 15 bp, Homo sapiens
ctgttcacctgtcat

SEQ ID NO: 817873 - DNA, 15 bp, Homo sapiens
tgttcacctgtcatt

SEQ ID NO: 817874 - DNA, 15 bp, Homo sapiens
gttcacctgtcattc

SEQ ID NO: 817875 - DNA, 15 bp, Homo sapiens
ttcacctgtcattca

SEQ ID NO: 817876 - DNA, 15 bp, Homo sapiens
tcacctgtcattcat

SEQ ID NO: 817877 - DNA, 15 bp, Homo sapiens
acctgtcattcatgc

SEQ ID NO: 817878 - DNA, 15 bp, Homo sapiens
cctgtcattcatgct

SEQ ID NO: 817879 - DNA, 15 bp, Homo sapiens
ctgtcattcatgctg

SEQ ID NO: 817880 - DNA, 15 bp, Homo sapiens
tgtcattcatgctga

SEQ ID NO: 817881 - DNA, 15 bp, Homo sapiens
gtcattcatgctgag

SEQ ID NO: 817882 - DNA, 15 bp, Homo sapiens
tcattcatgctgaga

SEQ ID NO: 817883 - DNA, 15 bp, Homo sapiens
cattcatgctgagat

SEQ ID NO: 817884 - DNA, 15 bp, Homo sapiens
attcatgctgagatg

SEQ ID NO: 817885 - DNA, 15 bp, Homo sapiens
ttcatgctgagatga

SEQ ID NO: 817886 - DNA, 15 bp, Homo sapiens
tcatgctgagatgaa

SEQ ID NO: 817887 - DNA, 15 bp, Homo sapiens
catgctgagatgaag

SEQ ID NO: 817888 - DNA, 15 bp, Homo sapiens
atgctgagatgaaga

SEQ ID NO: 817889 - DNA, 15 bp, Homo sapiens
tgctgagatgaagaa

SEQ ID NO: 817890 - DNA, 15 bp, Homo sapiens
gctgagatgaagaaa

SEQ ID NO: 817891 - DNA, 15 bp, Homo sapiens
ctgagatgaagaaaa

SEQ ID NO: 817892 - DNA, 15 bp, Homo sapiens
tgagatgaagaaaag

SEQ ID NO: 817893 - DNA, 15 bp, Homo sapiens
gagatgaagaaaaga

SEQ ID NO: 817894 - DNA, 15 bp, Homo sapiens
agatgaagaaaagat

SEQ ID NO: 817895 - DNA, 15 bp, Homo sapiens
gatgaagaaaagatg

SEQ ID NO: 817896 - DNA, 15 bp, Homo sapiens
atgaagaaaagatgg

SEQ ID NO: 817897 - DNA, 15 bp, Homo sapiens
tgaagaaaagatggc

SEQ ID NO: 817898 - DNA, 15 bp, Homo sapiens
gaagaaaagatggct

SEQ ID NO: 817899 - DNA, 15 bp, Homo sapiens
aagaaaagatggctt

SEQ ID NO: 817900 - DNA, 15 bp, Homo sapiens
agaaaagatggcttc

SEQ ID NO: 817901 - DNA, 15 bp, Homo sapiens
gaaaagatggcttca

SEQ ID NO: 817902 - DNA, 15 bp, Homo sapiens
aaaagatggcttcac

SEQ ID NO: 817903 - DNA, 15 bp, Homo sapiens
aaagatggcttcact

SEQ ID NO: 817904 - DNA, 15 bp, Homo sapiens
aagatggcttcactt

SEQ ID NO: 817905 - DNA, 15 bp, Homo sapiens
agatggcttcacttg

SEQ ID NO: 817906 - DNA, 15 bp, Homo sapiens
gatggcttcacttga

SEQ ID NO: 817907 - DNA, 15 bp, Homo sapiens
atggcttcacttgag

SEQ ID NO: 817908 - DNA, 15 bp, Homo sapiens
tggcttcacttgaga

SEQ ID NO: 817909 - DNA, 15 bp, Homo sapiens
ggcttcacttgagag

SEQ ID NO: 817910 - DNA, 15 bp, Homo sapiens
gcttcacttgagagc

SEQ ID NO: 817911 - DNA, 15 bp, Homo sapiens
cttcacttgagagcg

SEQ ID NO: 817912 - DNA, 15 bp, Homo sapiens
ttcacttgagagcgt

SEQ ID NO: 817913 - DNA, 15 bp, Homo sapiens
tcacttgagagcgtg

SEQ ID NO: 817914 - DNA, 15 bp, Homo sapiens
cacttgagagcgtgg

SEQ ID NO: 817915 - DNA, 15 bp, Homo sapiens
acttgagagcgtggt

SEQ ID NO: 817916 - DNA, 15 bp, Homo sapiens
cttgagagcgtggtt

SEQ ID NO: 817917 - DNA, 15 bp, Homo sapiens
ttgagagcgtggtta

SEQ ID NO: 817918 - DNA, 15 bp, Homo sapiens
tgagagcgtggttaa

SEQ ID NO: 817919 - DNA, 15 bp, Homo sapiens
gagagcgtggttaac

SEQ ID NO: 817920 - DNA, 15 bp, Homo sapiens
agagcgtggttaact

SEQ ID NO: 817921 - DNA, 15 bp, Homo sapiens
gagcgtggttaactt

SEQ ID NO: 817922 - DNA, 15 bp, Homo sapiens
agcgtggttaacttc

SEQ ID NO: 817923 - DNA, 15 bp, Homo sapiens
gcgtggttaacttca

SEQ ID NO: 817924 - DNA, 15 bp, Homo sapiens
cgtggttaacttcag

SEQ ID NO: 817925 - DNA, 15 bp, Homo sapiens
gtggttaacttcagg

SEQ ID NO: 817926 - DNA, 15 bp, Homo sapiens
tggttaacttcaggg

SEQ ID NO: 817927 - DNA, 15 bp, Homo sapiens
ggttaacttcagggt

SEQ ID NO: 817928 - DNA, 15 bp, Homo sapiens
gttaacttcagggtt

SEQ ID NO: 817929 - DNA, 15 bp, Homo sapiens
ttaacttcagggtta

SEQ ID NO: 817930 - DNA, 15 bp, Homo sapiens
taacttcagggttat

SEQ ID NO: 817931 - DNA, 15 bp, Homo sapiens
aacttcagggttata

SEQ ID NO: 817932 - DNA, 15 bp, Homo sapiens
acttcagggttataa

SEQ ID NO: 817933 - DNA, 15 bp, Homo sapiens
cttcagggttataaa

SEQ ID NO: 817934 - DNA, 15 bp, Homo sapiens
ttcagggttataaat

SEQ ID NO: 817935 - DNA, 15 bp, Homo sapiens
tcagggttataaatg

SEQ ID NO: 817936 - DNA, 15 bp, Homo sapiens
cagggttataaatgg

SEQ ID NO: 817937 - DNA, 15 bp, Homo sapiens
agggttataaatggc

SEQ ID NO: 817938 - DNA, 15 bp, Homo sapiens
gggttataaatggct

SEQ ID NO: 817939 - DNA, 15 bp, Homo sapiens
ggttataaatggctt

SEQ ID NO: 817940 - DNA, 15 bp, Homo sapiens
gttataaatggcttt

SEQ ID NO: 817941 - DNA, 15 bp, Homo sapiens
ttataaatggctttc

SEQ ID NO: 817942 - DNA, 15 bp, Homo sapiens
tataaatggctttca

SEQ ID NO: 817943 - DNA, 15 bp, Homo sapiens
ataaatggctttcag

SEQ ID NO: 817944 - DNA, 15 bp, Homo sapiens
taaatggctttcagg

SEQ ID NO: 817945 - DNA, 15 bp, Homo sapiens
aaatggctttcaggg

SEQ ID NO: 817946 - DNA, 15 bp, Homo sapiens
aatggctttcagggg

SEQ ID NO: 817947 - DNA, 15 bp, Homo sapiens
atggctttcaggggt

SEQ ID NO: 817948 - DNA, 15 bp, Homo sapiens
tggctttcaggggta

SEQ ID NO: 817949 - DNA, 15 bp, Homo sapiens
ggctttcaggggtat

SEQ ID NO: 817950 - DNA, 15 bp, Homo sapiens
gctttcaggggtata

SEQ ID NO: 817951 - DNA, 15 bp, Homo sapiens
ctttcaggggtatag

SEQ ID NO: 817952 - DNA, 15 bp, Homo sapiens
tttcaggggtataga

SEQ ID NO: 817953 - DNA, 15 bp, Homo sapiens
ttcaggggtatagat

SEQ ID NO: 817954 - DNA, 15 bp, Homo sapiens
tcaggggtatagatg

SEQ ID NO: 817955 - DNA, 15 bp, Homo sapiens
caggggtatagatgc

SEQ ID NO: 817956 - DNA, 15 bp, Homo sapiens
aggggtatagatgca

SEQ ID NO: 817957 - DNA, 15 bp, Homo sapiens
ggggtatagatgcat

SEQ ID NO: 817958 - DNA, 15 bp, Homo sapiens
gggtatagatgcata

SEQ ID NO: 817959 - DNA, 15 bp, Homo sapiens
ggtatagatgcatag

SEQ ID NO: 817960 - DNA, 15 bp, Homo sapiens
gtatagatgcataga

SEQ ID NO: 817961 - DNA, 15 bp, Homo sapiens
tatagatgcatagag

SEQ ID NO: 817962 - DNA, 15 bp, Homo sapiens
atagatgcatagagt

SEQ ID NO: 817963 - DNA, 15 bp, Homo sapiens
tagatgcatagagtc

SEQ ID NO: 817964 - DNA, 15 bp, Homo sapiens
agatgcatagagtcc

SEQ ID NO: 817965 - DNA, 15 bp, Homo sapiens
gatgcatagagtccc

SEQ ID NO: 817966 - DNA, 15 bp, Homo sapiens
atgcatagagtccct

SEQ ID NO: 817967 - DNA, 15 bp, Homo sapiens
tgcatagagtcccta

SEQ ID NO: 817968 - DNA, 15 bp, Homo sapiens
gcatagagtccctac

SEQ ID NO: 817969 - DNA, 15 bp, Homo sapiens
catagagtccctacc

SEQ ID NO: 817970 - DNA, 15 bp, Homo sapiens
atagagtccctaccc

SEQ ID NO: 817971 - DNA, 15 bp, Homo sapiens
tagagtccctaccct

SEQ ID NO: 817972 - DNA, 15 bp, Homo sapiens
agagtccctaccctt

SEQ ID NO: 817973 - DNA, 15 bp, Homo sapiens
gagtccctacccttg

SEQ ID NO: 817974 - DNA, 15 bp, Homo sapiens
agtccctacccttgc

SEQ ID NO: 817975 - DNA, 15 bp, Homo sapiens
gtccctacccttgca

SEQ ID NO: 817976 - DNA, 15 bp, Homo sapiens
tccctacccttgcac

SEQ ID NO: 817977 - DNA, 15 bp, Homo sapiens
ccctacccttgcacc

SEQ ID NO: 817978 - DNA, 15 bp, Homo sapiens
cctacccttgcacca

SEQ ID NO: 817979 - DNA, 15 bp, Homo sapiens
ctacccttgcaccac

SEQ ID NO: 817980 - DNA, 15 bp, Homo sapiens
tacccttgcaccacc

SEQ ID NO: 817981 - DNA, 15 bp, Homo sapiens
acccttgcaccaccc

SEQ ID NO: 817982 - DNA, 15 bp, Homo sapiens
cccttgcaccacccg

SEQ ID NO: 817983 - DNA, 15 bp, Homo sapiens
ccttgcaccacccga

SEQ ID NO: 817984 - DNA, 15 bp, Homo sapiens
cttgcaccacccgag

SEQ ID NO: 817985 - DNA, 15 bp, Homo sapiens
ttgcaccacccgagc

SEQ ID NO: 817986 - DNA, 15 bp, Homo sapiens
tgcaccacccgagct

SEQ ID NO: 817987 - DNA, 15 bp, Homo sapiens
gcaccacccgagctt

SEQ ID NO: 817988 - DNA, 15 bp, Homo sapiens
caccacccgagcttt

SEQ ID NO: 817989 - DNA, 15 bp, Homo sapiens
accacccgagctttc

SEQ ID NO: 817990 - DNA, 15 bp, Homo sapiens
ccacccgagctttca

SEQ ID NO: 817991 - DNA, 15 bp, Homo sapiens
cacccgagctttcac

SEQ ID NO: 817992 - DNA, 15 bp, Homo sapiens
acccgagctttcacg

SEQ ID NO: 817993 - DNA, 15 bp, Homo sapiens
cccgagctttcacga

SEQ ID NO: 817994 - DNA, 15 bp, Homo sapiens
ccgagctttcacgac

SEQ ID NO: 817995 - DNA, 15 bp, Homo sapiens
cgagctttcacgact

SEQ ID NO: 817996 - DNA, 15 bp, Homo sapiens
gagctttcacgactg

SEQ ID NO: 817997 - DNA, 15 bp, Homo sapiens
agctttcacgactgt

SEQ ID NO: 817998 - DNA, 15 bp, Homo sapiens
gctttcacgactgtt

SEQ ID NO: 817999 - DNA, 15 bp, Homo sapiens
ctttcacgactgttg

SEQ ID NO: 818000 - DNA, 15 bp, Homo sapiens
tttcacgactgttgg

SEQ ID NO: 818001 - DNA, 15 bp, Homo sapiens
ttcacgactgttggg

SEQ ID NO: 818002 - DNA, 15 bp, Homo sapiens
tcacgactgttgggt

SEQ ID NO: 818003 - DNA, 15 bp, Homo sapiens
cacgactgttgggtt

SEQ ID NO: 818004 - DNA, 15 bp, Homo sapiens
acgactgttgggttc

SEQ ID NO: 818005 - DNA, 15 bp, Homo sapiens
cgactgttgggttcc

SEQ ID NO: 818006 - DNA, 15 bp, Homo sapiens
gactgttgggttcct

SEQ ID NO: 818007 - DNA, 15 bp, Homo sapiens
actgttgggttcctt

SEQ ID NO: 818008 - DNA, 15 bp, Homo sapiens
ctgttgggttccttc

SEQ ID NO: 818009 - DNA, 15 bp, Homo sapiens
tgttgggttccttca

SEQ ID NO: 818010 - DNA, 15 bp, Homo sapiens
gttgggttccttcaa

SEQ ID NO: 818011 - DNA, 15 bp, Homo sapiens
ttgggttccttcaac

SEQ ID NO: 818012 - DNA, 15 bp, Homo sapiens
tgggttccttcaaca

SEQ ID NO: 818013 - DNA, 15 bp, Homo sapiens
gggttccttcaacac

SEQ ID NO: 818014 - DNA, 15 bp, Homo sapiens
ggttccttcaacact

SEQ ID NO: 818015 - DNA, 15 bp, Homo sapiens
gttccttcaacacta

SEQ ID NO: 818016 - DNA, 15 bp, Homo sapiens
ttccttcaacactac

SEQ ID NO: 818017 - DNA, 15 bp, Homo sapiens
tccttcaacactaca

SEQ ID NO: 818018 - DNA, 15 bp, Homo sapiens
ccttcaacactacat

SEQ ID NO: 818019 - DNA, 15 bp, Homo sapiens
cttcaacactacatt

SEQ ID NO: 818020 - DNA, 15 bp, Homo sapiens
ttcaacactacatta

SEQ ID NO: 818021 - DNA, 15 bp, Homo sapiens
tcaacactacattac

SEQ ID NO: 818022 - DNA, 15 bp, Homo sapiens
caacactacattacg

SEQ ID NO: 818023 - DNA, 15 bp, Homo sapiens
aacactacattacgc

SEQ ID NO: 818024 - DNA, 15 bp, Homo sapiens
acactacattacgcc

SEQ ID NO: 818025 - DNA, 15 bp, Homo sapiens
cactacattacgcct

SEQ ID NO: 818026 - DNA, 15 bp, Homo sapiens
actacattacgcctt

SEQ ID NO: 818027 - DNA, 15 bp, Homo sapiens
ctacattacgccttg

SEQ ID NO: 818028 - DNA, 15 bp, Homo sapiens
tacattacgccttga

SEQ ID NO: 818029 - DNA, 15 bp, Homo sapiens
acattacgccttgag

SEQ ID NO: 818030 - DNA, 15 bp, Homo sapiens
cattacgccttgaga

SEQ ID NO: 818031 - DNA, 15 bp, Homo sapiens
attacgccttgagag

SEQ ID NO: 818032 - DNA, 15 bp, Homo sapiens
ttacgccttgagagt

SEQ ID NO: 818033 - DNA, 15 bp, Homo sapiens
tacgccttgagagtc

SEQ ID NO: 818034 - DNA, 15 bp, Homo sapiens
acgccttgagagtca

SEQ ID NO: 818035 - DNA, 15 bp, Homo sapiens
cgccttgagagtcat

SEQ ID NO: 818036 - DNA, 15 bp, Homo sapiens
gccttgagagtcatc

SEQ ID NO: 818037 - DNA, 15 bp, Homo sapiens
ccttgagagtcatca

SEQ ID NO: 818038 - DNA, 15 bp, Homo sapiens
cttgagagtcatcat

SEQ ID NO: 818039 - DNA, 15 bp, Homo sapiens
ttgagagtcatcatg

SEQ ID NO: 818040 - DNA, 15 bp, Homo sapiens
tgagagtcatcatga

SEQ ID NO: 818041 - DNA, 15 bp, Homo sapiens
gagagtcatcatgag

SEQ ID NO: 818042 - DNA, 15 bp, Homo sapiens
agagtcatcatgagc

SEQ ID NO: 818043 - DNA, 15 bp, Homo sapiens
gagtcatcatgagct

SEQ ID NO: 818044 - DNA, 15 bp, Homo sapiens
agtcatcatgagctc

SEQ ID NO: 818045 - DNA, 15 bp, Homo sapiens
gtcatcatgagctct

SEQ ID NO: 818046 - DNA, 15 bp, Homo sapiens
tcatcatgagctctg

SEQ ID NO: 818047 - DNA, 15 bp, Homo sapiens
catcatgagctctgt

SEQ ID NO: 818048 - DNA, 15 bp, Homo sapiens
atcatgagctctgta

SEQ ID NO: 818049 - DNA, 15 bp, Homo sapiens
tcatgagctctgtaa

SEQ ID NO: 818050 - DNA, 15 bp, Homo sapiens
catgagctctgtaac

SEQ ID NO: 818051 - DNA, 15 bp, Homo sapiens
atgagctctgtaacc

SEQ ID NO: 818052 - DNA, 15 bp, Homo sapiens
tgagctctgtaacca

SEQ ID NO: 818053 - DNA, 15 bp, Homo sapiens
gagctctgtaaccaa

SEQ ID NO: 818054 - DNA, 15 bp, Homo sapiens
agctctgtaaccaaa

SEQ ID NO: 818055 - DNA, 15 bp, Homo sapiens
gctctgtaaccaaag

SEQ ID NO: 818056 - DNA, 15 bp, Homo sapiens
ctctgtaaccaaagt

SEQ ID NO: 818057 - DNA, 15 bp, Homo sapiens
tctgtaaccaaagtg

SEQ ID NO: 818058 - DNA, 15 bp, Homo sapiens
ctgtaaccaaagtgt

SEQ ID NO: 818059 - DNA, 15 bp, Homo sapiens
tgtaaccaaagtgtt

SEQ ID NO: 818060 - DNA, 15 bp, Homo sapiens
gtaaccaaagtgtta

SEQ ID NO: 818061 - DNA, 15 bp, Homo sapiens
taaccaaagtgttaa

SEQ ID NO: 818062 - DNA, 15 bp, Homo sapiens
aaccaaagtgttaag

SEQ ID NO: 818063 - DNA, 15 bp, Homo sapiens
accaaagtgttaagg

SEQ ID NO: 818064 - DNA, 15 bp, Homo sapiens
ccaaagtgttaagga

SEQ ID NO: 818065 - DNA, 15 bp, Homo sapiens
caaagtgttaaggat

SEQ ID NO: 818066 - DNA, 15 bp, Homo sapiens
aaagtgttaaggatg

SEQ ID NO: 818067 - DNA, 15 bp, Homo sapiens
aagtgttaaggatgt

SEQ ID NO: 818068 - DNA, 15 bp, Homo sapiens
agtgttaaggatgtt

SEQ ID NO: 818069 - DNA, 15 bp, Homo sapiens
gtgttaaggatgttg

SEQ ID NO: 818070 - DNA, 15 bp, Homo sapiens
tgttaaggatgttgg

SEQ ID NO: 818071 - DNA, 15 bp, Homo sapiens
gttaaggatgttggc

SEQ ID NO: 818072 - DNA, 15 bp, Homo sapiens
ttaaggatgttggca

SEQ ID NO: 818073 - DNA, 15 bp, Homo sapiens
taaggatgttggcac

SEQ ID NO: 818074 - DNA, 15 bp, Homo sapiens
aaggatgttggcact

SEQ ID NO: 818075 - DNA, 15 bp, Homo sapiens
aggatgttggcactt

SEQ ID NO: 818076 - DNA, 15 bp, Homo sapiens
ggatgttggcactta

SEQ ID NO: 818077 - DNA, 15 bp, Homo sapiens
gatgttggcacttaa

SEQ ID NO: 818078 - DNA, 15 bp, Homo sapiens
atgttggcacttaac

SEQ ID NO: 818079 - DNA, 15 bp, Homo sapiens
tgttggcacttaact

SEQ ID NO: 818080 - DNA, 15 bp, Homo sapiens
gttggcacttaactg

SEQ ID NO: 818081 - DNA, 15 bp, Homo sapiens
ttggcacttaactgt

SEQ ID NO: 818082 - DNA, 15 bp, Homo sapiens
tggcacttaactgtc

SEQ ID NO: 818083 - DNA, 15 bp, Homo sapiens
ggcacttaactgtct

SEQ ID NO: 818084 - DNA, 15 bp, Homo sapiens
gcacttaactgtctc

SEQ ID NO: 818085 - DNA, 15 bp, Homo sapiens
cacttaactgtctct

SEQ ID NO: 818086 - DNA, 15 bp, Homo sapiens
acttaactgtctctt

SEQ ID NO: 818087 - DNA, 15 bp, Homo sapiens
cttaactgtctctta

SEQ ID NO: 818088 - DNA, 15 bp, Homo sapiens
ttaactgtctcttat

SEQ ID NO: 818089 - DNA, 15 bp, Homo sapiens
taactgtctcttatt

SEQ ID NO: 818090 - DNA, 15 bp, Homo sapiens
aactgtctcttattt

SEQ ID NO: 818091 - DNA, 15 bp, Homo sapiens
actgtctcttattta

SEQ ID NO: 818092 - DNA, 15 bp, Homo sapiens
ctgtctcttatttat

SEQ ID NO: 818093 - DNA, 15 bp, Homo sapiens
tgtctcttatttatc

SEQ ID NO: 818094 - DNA, 15 bp, Homo sapiens
gtctcttatttatct

SEQ ID NO: 818095 - DNA, 15 bp, Homo sapiens
tctcttatttatctg

SEQ ID NO: 818096 - DNA, 15 bp, Homo sapiens
ctcttatttatctga

SEQ ID NO: 818097 - DNA, 15 bp, Homo sapiens
tcttatttatctgac

SEQ ID NO: 818098 - DNA, 15 bp, Homo sapiens
cttatttatctgacc

SEQ ID NO: 818099 - DNA, 15 bp, Homo sapiens
ttatttatctgaccc

SEQ ID NO: 818100 - DNA, 15 bp, Homo sapiens
tatttatctgacccg

SEQ ID NO: 818101 - DNA, 15 bp, Homo sapiens
atttatctgacccgc

SEQ ID NO: 818102 - DNA, 15 bp, Homo sapiens
tttatctgacccgct

SEQ ID NO: 818103 - DNA, 15 bp, Homo sapiens
ttatctgacccgctt

SEQ ID NO: 818104 - DNA, 15 bp, Homo sapiens
tatctgacccgcttc

SEQ ID NO: 818105 - DNA, 15 bp, Homo sapiens
atctgacccgcttca

SEQ ID NO: 818106 - DNA, 15 bp, Homo sapiens
tctgacccgcttcag

SEQ ID NO: 818107 - DNA, 15 bp, Homo sapiens
ctgacccgcttcagc

SEQ ID NO: 818108 - DNA, 15 bp, Homo sapiens
tgacccgcttcagct

SEQ ID NO: 818109 - DNA, 15 bp, Homo sapiens
gacccgcttcagctc

SEQ ID NO: 818110 - DNA, 15 bp, Homo sapiens
acccgcttcagctct

SEQ ID NO: 818111 - DNA, 15 bp, Homo sapiens
cccgcttcagctctg

SEQ ID NO: 818112 - DNA, 15 bp, Homo sapiens
ccgcttcagctctgc

SEQ ID NO: 818113 - DNA, 15 bp, Homo sapiens
cgcttcagctctgct

SEQ ID NO: 818114 - DNA, 15 bp, Homo sapiens
gcttcagctctgctt

SEQ ID NO: 818115 - DNA, 15 bp, Homo sapiens
cttcagctctgcttc

SEQ ID NO: 818116 - DNA, 15 bp, Homo sapiens
ttcagctctgcttct

SEQ ID NO: 818117 - DNA, 15 bp, Homo sapiens
tcagctctgcttcta

SEQ ID NO: 818118 - DNA, 15 bp, Homo sapiens
cagctctgcttctat

SEQ ID NO: 818119 - DNA, 15 bp, Homo sapiens
agctctgcttctata

SEQ ID NO: 818120 - DNA, 15 bp, Homo sapiens
gctctgcttctataa

SEQ ID NO: 818121 - DNA, 15 bp, Homo sapiens
ctctgcttctataat

SEQ ID NO: 818122 - DNA, 15 bp, Homo sapiens
tctgcttctataatg

SEQ ID NO: 818123 - DNA, 15 bp, Homo sapiens
ctgcttctataatga

SEQ ID NO: 818124 - DNA, 15 bp, Homo sapiens
tgcttctataatgaa

SEQ ID NO: 818125 - DNA, 15 bp, Homo sapiens
gcttctataatgaac

SEQ ID NO: 818126 - DNA, 15 bp, Homo sapiens
cttctataatgaact

SEQ ID NO: 818127 - DNA, 15 bp, Homo sapiens
ttctataatgaactg

SEQ ID NO: 818128 - DNA, 15 bp, Homo sapiens
tctataatgaactgt

SEQ ID NO: 818129 - DNA, 15 bp, Homo sapiens
ctataatgaactgta

SEQ ID NO: 818130 - DNA, 15 bp, Homo sapiens
tataatgaactgtaa

SEQ ID NO: 818131 - DNA, 15 bp, Homo sapiens
ataatgaactgtaac

SEQ ID NO: 818132 - DNA, 15 bp, Homo sapiens
taatgaactgtaact

SEQ ID NO: 818133 - DNA, 15 bp, Homo sapiens
aatgaactgtaacta

SEQ ID NO: 818134 - DNA, 15 bp, Homo sapiens
atgaactgtaactac

SEQ ID NO: 818135 - DNA, 15 bp, Homo sapiens
tgaactgtaactaca

SEQ ID NO: 818136 - DNA, 15 bp, Homo sapiens
gaactgtaactacag

SEQ ID NO: 818137 - DNA, 15 bp, Homo sapiens
aactgtaactacagg

SEQ ID NO: 818138 - DNA, 15 bp, Homo sapiens
actgtaactacagga

SEQ ID NO: 818139 - DNA, 15 bp, Homo sapiens
ctgtaactacaggaa

SEQ ID NO: 818140 - DNA, 15 bp, Homo sapiens
tgtaactacaggaaa

SEQ ID NO: 818141 - DNA, 15 bp, Homo sapiens
gtaactacaggaaac

SEQ ID NO: 818142 - DNA, 15 bp, Homo sapiens
taactacaggaaacc

SEQ ID NO: 818143 - DNA, 15 bp, Homo sapiens
aactacaggaaacca

SEQ ID NO: 818144 - DNA, 15 bp, Homo sapiens
actacaggaaaccat

SEQ ID NO: 818145 - DNA, 15 bp, Homo sapiens
ctacaggaaaccatg

SEQ ID NO: 818146 - DNA, 15 bp, Homo sapiens
tacaggaaaccatgg

SEQ ID NO: 818147 - DNA, 15 bp, Homo sapiens
acaggaaaccatggt

SEQ ID NO: 818148 - DNA, 15 bp, Homo sapiens
caggaaaccatggtg

SEQ ID NO: 818149 - DNA, 15 bp, Homo sapiens
aggaaaccatggtgt

SEQ ID NO: 818150 - DNA, 15 bp, Homo sapiens
ggaaaccatggtgtg

SEQ ID NO: 818151 - DNA, 15 bp, Homo sapiens
gaaaccatggtgtgt

SEQ ID NO: 818152 - DNA, 15 bp, Homo sapiens
aaaccatggtgtgta

SEQ ID NO: 818153 - DNA, 15 bp, Homo sapiens
aaccatggtgtgtat

SEQ ID NO: 818154 - DNA, 15 bp, Homo sapiens
accatggtgtgtatc

SEQ ID NO: 818155 - DNA, 15 bp, Homo sapiens
ccatggtgtgtatct

SEQ ID NO: 818156 - DNA, 15 bp, Homo sapiens
catggtgtgtatctt

SEQ ID NO: 818157 - DNA, 15 bp, Homo sapiens
atggtgtgtatcttt

SEQ ID NO: 818158 - DNA, 15 bp, Homo sapiens
tggtgtgtatcttta

SEQ ID NO: 818159 - DNA, 15 bp, Homo sapiens
ggtgtgtatctttat

SEQ ID NO: 818160 - DNA, 15 bp, Homo sapiens
gtgtgtatctttatg

SEQ ID NO: 818161 - DNA, 15 bp, Homo sapiens
tgtgtatctttatgt

SEQ ID NO: 818162 - DNA, 15 bp, Homo sapiens
gtgtatctttatgta

SEQ ID NO: 818163 - DNA, 15 bp, Homo sapiens
tgtatctttatgtaa

SEQ ID NO: 818164 - DNA, 15 bp, Homo sapiens
gtatctttatgtaac

SEQ ID NO: 818165 - DNA, 15 bp, Homo sapiens
tatctttatgtaact

SEQ ID NO: 818166 - DNA, 15 bp, Homo sapiens
atctttatgtaactg

SEQ ID NO: 818167 - DNA, 15 bp, Homo sapiens
tctttatgtaactga

SEQ ID NO: 818168 - DNA, 15 bp, Homo sapiens
ctttatgtaactgat

SEQ ID NO: 818169 - DNA, 15 bp, Homo sapiens
tttatgtaactgatg

SEQ ID NO: 818170 - DNA, 15 bp, Homo sapiens
ttatgtaactgatgc

SEQ ID NO: 818171 - DNA, 15 bp, Homo sapiens
tatgtaactgatgcc

SEQ ID NO: 818172 - DNA, 15 bp, Homo sapiens
atgtaactgatgcct

SEQ ID NO: 818173 - DNA, 15 bp, Homo sapiens
tgtaactgatgcctt

SEQ ID NO: 818174 - DNA, 15 bp, Homo sapiens
gtaactgatgccttg

SEQ ID NO: 818175 - DNA, 15 bp, Homo sapiens
taactgatgccttgt

SEQ ID NO: 818176 - DNA, 15 bp, Homo sapiens
aactgatgccttgtt

SEQ ID NO: 818177 - DNA, 15 bp, Homo sapiens
actgatgccttgttt

SEQ ID NO: 818178 - DNA, 15 bp, Homo sapiens
ctgatgccttgtttc

SEQ ID NO: 818179 - DNA, 15 bp, Homo sapiens
tgatgccttgtttct

SEQ ID NO: 818180 - DNA, 15 bp, Homo sapiens
gatgccttgtttctc

SEQ ID NO: 818181 - DNA, 15 bp, Homo sapiens
atgccttgtttctcc

SEQ ID NO: 818182 - DNA, 15 bp, Homo sapiens
tgccttgtttctcct

SEQ ID NO: 818183 - DNA, 15 bp, Homo sapiens
gccttgtttctcctg

SEQ ID NO: 818184 - DNA, 15 bp, Homo sapiens
ccttgtttctcctga

SEQ ID NO: 818185 - DNA, 15 bp, Homo sapiens
cttgtttctcctgaa

SEQ ID NO: 818186 - DNA, 15 bp, Homo sapiens
ttgtttctcctgaat

SEQ ID NO: 818187 - DNA, 15 bp, Homo sapiens
tgtttctcctgaatt

SEQ ID NO: 818188 - DNA, 15 bp, Homo sapiens
gtttctcctgaattt

SEQ ID NO: 818189 - DNA, 15 bp, Homo sapiens
tttctcctgaatttt

SEQ ID NO: 818190 - DNA, 15 bp, Homo sapiens
ttctcctgaattttc

SEQ ID NO: 818191 - DNA, 15 bp, Homo sapiens
tctcctgaattttca

SEQ ID NO: 818192 - DNA, 15 bp, Homo sapiens
ctcctgaattttcac

SEQ ID NO: 818193 - DNA, 15 bp, Homo sapiens
tcctgaattttcaca

SEQ ID NO: 818194 - DNA, 15 bp, Homo sapiens
cctgaattttcacaa

SEQ ID NO: 818195 - DNA, 15 bp, Homo sapiens
ctgaattttcacaac

SEQ ID NO: 818196 - DNA, 15 bp, Homo sapiens
tgaattttcacaaca

SEQ ID NO: 818197 - DNA, 15 bp, Homo sapiens
gaattttcacaacat

SEQ ID NO: 818198 - DNA, 15 bp, Homo sapiens
aattttcacaacatc

SEQ ID NO: 818199 - DNA, 15 bp, Homo sapiens
attttcacaacatct

SEQ ID NO: 818200 - DNA, 15 bp, Homo sapiens
ttttcacaacatctt

SEQ ID NO: 818201 - DNA, 15 bp, Homo sapiens
tttcacaacatctta

SEQ ID NO: 818202 - DNA, 15 bp, Homo sapiens
ttcacaacatcttaa

SEQ ID NO: 818203 - DNA, 15 bp, Homo sapiens
tcacaacatcttaac

SEQ ID NO: 818204 - DNA, 15 bp, Homo sapiens
cacaacatcttaaca

SEQ ID NO: 818205 - DNA, 15 bp, Homo sapiens
acaacatcttaacaa

SEQ ID NO: 818206 - DNA, 15 bp, Homo sapiens
caacatcttaacaat

SEQ ID NO: 818207 - DNA, 15 bp, Homo sapiens
aacatcttaacaatt

SEQ ID NO: 818208 - DNA, 15 bp, Homo sapiens
acatcttaacaatta

SEQ ID NO: 818209 - DNA, 15 bp, Homo sapiens
catcttaacaattat

SEQ ID NO: 818210 - DNA, 15 bp, Homo sapiens
atcttaacaattatg

SEQ ID NO: 818211 - DNA, 15 bp, Homo sapiens
tcttaacaattatgg

SEQ ID NO: 818212 - DNA, 15 bp, Homo sapiens
cttaacaattatggt

SEQ ID NO: 818213 - DNA, 15 bp, Homo sapiens
ttaacaattatggtt

SEQ ID NO: 818214 - DNA, 15 bp, Homo sapiens
taacaattatggttg

SEQ ID NO: 818215 - DNA, 15 bp, Homo sapiens
aacaattatggttga

SEQ ID NO: 818216 - DNA, 15 bp, Homo sapiens
acaattatggttgat

SEQ ID NO: 818217 - DNA, 15 bp, Homo sapiens
caattatggttgatg

SEQ ID NO: 818218 - DNA, 15 bp, Homo sapiens
aattatggttgatgt

SEQ ID NO: 818219 - DNA, 15 bp, Homo sapiens
attatggttgatgtt

SEQ ID NO: 818220 - DNA, 15 bp, Homo sapiens
ttatggttgatgtta

SEQ ID NO: 818221 - DNA, 15 bp, Homo sapiens
tatggttgatgttaa

SEQ ID NO: 818222 - DNA, 15 bp, Homo sapiens
atggttgatgttaaa

SEQ ID NO: 818223 - DNA, 15 bp, Homo sapiens
tggttgatgttaaaa

SEQ ID NO: 818224 - DNA, 15 bp, Homo sapiens
ggttgatgttaaaaa

SEQ ID NO: 818225 - DNA, 15 bp, Homo sapiens
gttgatgttaaaaac

SEQ ID NO: 818226 - DNA, 15 bp, Homo sapiens
ttgatgttaaaaact

SEQ ID NO: 818227 - DNA, 15 bp, Homo sapiens
tgatgttaaaaactc

SEQ ID NO: 818228 - DNA, 15 bp, Homo sapiens
gatgttaaaaactct

SEQ ID NO: 818229 - DNA, 15 bp, Homo sapiens
atgttaaaaactctc

SEQ ID NO: 818230 - DNA, 15 bp, Homo sapiens
tgttaaaaactctca

SEQ ID NO: 818231 - DNA, 15 bp, Homo sapiens
gttaaaaactctcat

SEQ ID NO: 818232 - DNA, 15 bp, Homo sapiens
ttaaaaactctcatg

SEQ ID NO: 818233 - DNA, 15 bp, Homo sapiens
taaaaactctcatga

SEQ ID NO: 818234 - DNA, 15 bp, Homo sapiens
aaaaactctcatgag

SEQ ID NO: 818235 - DNA, 15 bp, Homo sapiens
aaaactctcatgagg

SEQ ID NO: 818236 - DNA, 15 bp, Homo sapiens
aaactctcatgaggt

SEQ ID NO: 818237 - DNA, 15 bp, Homo sapiens
aactctcatgaggtt

SEQ ID NO: 818238 - DNA, 15 bp, Homo sapiens
actctcatgaggtta

SEQ ID NO: 818239 - DNA, 15 bp, Homo sapiens
ctctcatgaggttat

SEQ ID NO: 818240 - DNA, 15 bp, Homo sapiens
tctcatgaggttatt

SEQ ID NO: 818241 - DNA, 15 bp, Homo sapiens
ctcatgaggttattt

SEQ ID NO: 818242 - DNA, 15 bp, Homo sapiens
tcatgaggttatttg

SEQ ID NO: 818243 - DNA, 15 bp, Homo sapiens
catgaggttatttgt

SEQ ID NO: 818244 - DNA, 15 bp, Homo sapiens
atgaggttatttgtt

SEQ ID NO: 818245 - DNA, 15 bp, Homo sapiens
tgaggttatttgttg

SEQ ID NO: 818246 - DNA, 15 bp, Homo sapiens
gaggttatttgttga

SEQ ID NO: 818247 - DNA, 15 bp, Homo sapiens
aggttatttgttgaa

SEQ ID NO: 818248 - DNA, 15 bp, Homo sapiens
ggttatttgttgaag

SEQ ID NO: 818249 - DNA, 15 bp, Homo sapiens
gttatttgttgaagt

SEQ ID NO: 818250 - DNA, 15 bp, Homo sapiens
ttatttgttgaagtg

SEQ ID NO: 818251 - DNA, 15 bp, Homo sapiens
tatttgttgaagtga

SEQ ID NO: 818252 - DNA, 15 bp, Homo sapiens
atttgttgaagtgaa

SEQ ID NO: 818253 - DNA, 15 bp, Homo sapiens
tttgttgaagtgaaa

SEQ ID NO: 818254 - DNA, 15 bp, Homo sapiens
ttgttgaagtgaaat

SEQ ID NO: 818255 - DNA, 15 bp, Homo sapiens
tgttgaagtgaaata

SEQ ID NO: 818256 - DNA, 15 bp, Homo sapiens
gttgaagtgaaatac

SEQ ID NO: 818257 - DNA, 15 bp, Homo sapiens
ttgaagtgaaataca

SEQ ID NO: 818258 - DNA, 15 bp, Homo sapiens
tgaagtgaaatacat

SEQ ID NO: 818259 - DNA, 15 bp, Homo sapiens
gaagtgaaatacatt

SEQ ID NO: 818260 - DNA, 15 bp, Homo sapiens
aagtgaaatacatta

SEQ ID NO: 818261 - DNA, 15 bp, Homo sapiens
agtgaaatacattat

SEQ ID NO: 818262 - DNA, 15 bp, Homo sapiens
gtgaaatacattata

SEQ ID NO: 818263 - DNA, 15 bp, Homo sapiens
tgaaatacattataa

SEQ ID NO: 818264 - DNA, 15 bp, Homo sapiens
gaaatacattataaa

SEQ ID NO: 818265 - DNA, 15 bp, Homo sapiens
aaatacattataaaa

SEQ ID NO: 818266 - DNA, 15 bp, Homo sapiens
aatacattataaaaa

SEQ ID NO: 818267 - DNA, 15 bp, Homo sapiens
atacattataaaaat

SEQ ID NO: 818268 - DNA, 15 bp, Homo sapiens
tacattataaaaata

SEQ ID NO: 818269 - DNA, 15 bp, Homo sapiens
acattataaaaatac

SEQ ID NO: 818270 - DNA, 15 bp, Homo sapiens
cattataaaaataca

SEQ ID NO: 818271 - DNA, 15 bp, Homo sapiens
attataaaaatacat

SEQ ID NO: 818272 - DNA, 15 bp, Homo sapiens
ttataaaaatacatg

SEQ ID NO: 818273 - DNA, 15 bp, Homo sapiens
tataaaaatacatgc

SEQ ID NO: 818274 - DNA, 15 bp, Homo sapiens
ataaaaatacatgca

SEQ ID NO: 818275 - DNA, 15 bp, Homo sapiens
taaaaatacatgcat

SEQ ID NO: 818276 - DNA, 15 bp, Homo sapiens
aaaaatacatgcata

SEQ ID NO: 818277 - DNA, 15 bp, Homo sapiens
aaaatacatgcatat

SEQ ID NO: 818278 - DNA, 15 bp, Homo sapiens
aaatacatgcatatg

SEQ ID NO: 818279 - DNA, 15 bp, Homo sapiens
aatacatgcatatga

SEQ ID NO: 818280 - DNA, 15 bp, Homo sapiens
atacatgcatatgaa

SEQ ID NO: 818281 - DNA, 15 bp, Homo sapiens
tacatgcatatgaaa

SEQ ID NO: 818282 - DNA, 15 bp, Homo sapiens
acatgcatatgaaag

SEQ ID NO: 818283 - DNA, 15 bp, Homo sapiens
catgcatatgaaagg

SEQ ID NO: 818284 - DNA, 15 bp, Homo sapiens
atgcatatgaaagga

SEQ ID NO: 818285 - DNA, 15 bp, Homo sapiens
tgcatatgaaaggat

SEQ ID NO: 818286 - DNA, 15 bp, Homo sapiens
gcatatgaaaggatg

SEQ ID NO: 818287 - DNA, 15 bp, Homo sapiens
catatgaaaggatgg

SEQ ID NO: 818288 - DNA, 15 bp, Homo sapiens
atatgaaaggatggc

SEQ ID NO: 818289 - DNA, 15 bp, Homo sapiens
tatgaaaggatggcc

SEQ ID NO: 818290 - DNA, 15 bp, Homo sapiens
atgaaaggatggcca

SEQ ID NO: 818291 - DNA, 15 bp, Homo sapiens
tgaaaggatggccag

SEQ ID NO: 818292 - DNA, 15 bp, Homo sapiens
gaaaggatggccagg

SEQ ID NO: 818293 - DNA, 15 bp, Homo sapiens
aaaggatggccaggg

SEQ ID NO: 818294 - DNA, 15 bp, Homo sapiens
aaggatggccaggga

SEQ ID NO: 818295 - DNA, 15 bp, Homo sapiens
aggatggccagggaa

SEQ ID NO: 818296 - DNA, 15 bp, Homo sapiens
ggatggccagggaag

SEQ ID NO: 818297 - DNA, 15 bp, Homo sapiens
gatggccagggaagc

SEQ ID NO: 818298 - DNA, 15 bp, Homo sapiens
atggccagggaagcc

SEQ ID NO: 818299 - DNA, 15 bp, Homo sapiens
tggccagggaagcca

SEQ ID NO: 818300 - DNA, 15 bp, Homo sapiens
ggccagggaagccat

SEQ ID NO: 818301 - DNA, 15 bp, Homo sapiens
gccagggaagccatt

SEQ ID NO: 818302 - DNA, 15 bp, Homo sapiens
ccagggaagccattt

SEQ ID NO: 818303 - DNA, 15 bp, Homo sapiens
cagggaagccatttc

SEQ ID NO: 818304 - DNA, 15 bp, Homo sapiens
agggaagccatttca

SEQ ID NO: 818305 - DNA, 15 bp, Homo sapiens
gggaagccatttcat

SEQ ID NO: 818306 - DNA, 15 bp, Homo sapiens
ggaagccatttcatt

SEQ ID NO: 818307 - DNA, 15 bp, Homo sapiens
gaagccatttcattg

SEQ ID NO: 818308 - DNA, 15 bp, Homo sapiens
aagccatttcattga

SEQ ID NO: 818309 - DNA, 15 bp, Homo sapiens
agccatttcattgag

SEQ ID NO: 818310 - DNA, 15 bp, Homo sapiens
gccatttcattgagt

SEQ ID NO: 818311 - DNA, 15 bp, Homo sapiens
ccatttcattgagta

SEQ ID NO: 818312 - DNA, 15 bp, Homo sapiens
catttcattgagtaa

SEQ ID NO: 818313 - DNA, 15 bp, Homo sapiens
atttcattgagtaac

SEQ ID NO: 818314 - DNA, 15 bp, Homo sapiens
tttcattgagtaacg

SEQ ID NO: 818315 - DNA, 15 bp, Homo sapiens
ttcattgagtaacgg

SEQ ID NO: 818316 - DNA, 15 bp, Homo sapiens
tcattgagtaacggc

SEQ ID NO: 818317 - DNA, 15 bp, Homo sapiens
cattgagtaacggcc

SEQ ID NO: 818318 - DNA, 15 bp, Homo sapiens
attgagtaacggcca

SEQ ID NO: 818319 - DNA, 15 bp, Homo sapiens
ttgagtaacggccag

SEQ ID NO: 818320 - DNA, 15 bp, Homo sapiens
tgagtaacggccagt

SEQ ID NO: 818321 - DNA, 15 bp, Homo sapiens
gagtaacggccagtt

SEQ ID NO: 818322 - DNA, 15 bp, Homo sapiens
agtaacggccagttc

SEQ ID NO: 818323 - DNA, 15 bp, Homo sapiens
gtaacggccagttct

SEQ ID NO: 818324 - DNA, 15 bp, Homo sapiens
taacggccagttctg

SEQ ID NO: 818325 - DNA, 15 bp, Homo sapiens
aacggccagttctgt

SEQ ID NO: 818326 - DNA, 15 bp, Homo sapiens
acggccagttctgtc

SEQ ID NO: 818327 - DNA, 15 bp, Homo sapiens
cggccagttctgtcc

SEQ ID NO: 818328 - DNA, 15 bp, Homo sapiens
ggccagttctgtcct

SEQ ID NO: 818329 - DNA, 15 bp, Homo sapiens
gccagttctgtcctc

SEQ ID NO: 818330 - DNA, 15 bp, Homo sapiens
ccagttctgtcctca

SEQ ID NO: 818331 - DNA, 15 bp, Homo sapiens
cagttctgtcctcac

SEQ ID NO: 818332 - DNA, 15 bp, Homo sapiens
agttctgtcctcacc

SEQ ID NO: 818333 - DNA, 15 bp, Homo sapiens
gttctgtcctcacct

SEQ ID NO: 818334 - DNA, 15 bp, Homo sapiens
tctgtcctcaccttc

SEQ ID NO: 818335 - DNA, 15 bp, Homo sapiens
ctgtcctcaccttcc

SEQ ID NO: 818336 - DNA, 15 bp, Homo sapiens
tgtcctcaccttccc

SEQ ID NO: 818337 - DNA, 15 bp, Homo sapiens
gtcctcaccttccct

SEQ ID NO: 818338 - DNA, 15 bp, Homo sapiens
tcctcaccttccctc

SEQ ID NO: 818339 - DNA, 15 bp, Homo sapiens
cctcaccttccctct

SEQ ID NO: 818340 - DNA, 15 bp, Homo sapiens
ctcaccttccctctg

SEQ ID NO: 818341 - DNA, 15 bp, Homo sapiens
tcaccttccctctgt

SEQ ID NO: 818342 - DNA, 15 bp, Homo sapiens
caccttccctctgtc

SEQ ID NO: 818343 - DNA, 15 bp, Homo sapiens
accttccctctgtct

SEQ ID NO: 818344 - DNA, 15 bp, Homo sapiens
ccttccctctgtctc

SEQ ID NO: 818345 - DNA, 15 bp, Homo sapiens
cttccctctgtctcg

SEQ ID NO: 818346 - DNA, 15 bp, Homo sapiens
ttccctctgtctcgc

SEQ ID NO: 818347 - DNA, 15 bp, Homo sapiens
tccctctgtctcgcc

SEQ ID NO: 818348 - DNA, 15 bp, Homo sapiens
ccctctgtctcgccc

SEQ ID NO: 818349 - DNA, 15 bp, Homo sapiens
cctctgtctcgcccc

SEQ ID NO: 818350 - DNA, 15 bp, Homo sapiens
ctctgtctcgcccct

SEQ ID NO: 818351 - DNA, 15 bp, Homo sapiens
tctgtctcgcccctc

SEQ ID NO: 818352 - DNA, 15 bp, Homo sapiens
ctgtctcgcccctcc

SEQ ID NO: 818353 - DNA, 15 bp, Homo sapiens
tgtctcgcccctcct

SEQ ID NO: 818354 - DNA, 15 bp, Homo sapiens
gtctcgcccctcctc

SEQ ID NO: 818355 - DNA, 15 bp, Homo sapiens
tctcgcccctcctcg

SEQ ID NO: 818356 - DNA, 15 bp, Homo sapiens
ctcgcccctcctcgt

SEQ ID NO: 818357 - DNA, 15 bp, Homo sapiens
tcgcccctcctcgtc

SEQ ID NO: 818358 - DNA, 15 bp, Homo sapiens
cgcccctcctcgtcc

SEQ ID NO: 818359 - DNA, 15 bp, Homo sapiens
gcccctcctcgtccc

SEQ ID NO: 818360 - DNA, 15 bp, Homo sapiens
cccctcctcgtcccc

SEQ ID NO: 818361 - DNA, 15 bp, Homo sapiens
ccctcctcgtcccca

SEQ ID NO: 818362 - DNA, 15 bp, Homo sapiens
cctcctcgtccccaa

SEQ ID NO: 818363 - DNA, 15 bp, Homo sapiens
ctcctcgtccccaaa

SEQ ID NO: 818364 - DNA, 15 bp, Homo sapiens
tcctcgtccccaaag

SEQ ID NO: 818365 - DNA, 15 bp, Homo sapiens
cctcgtccccaaagc

SEQ ID NO: 818366 - DNA, 15 bp, Homo sapiens
ctcgtccccaaagct

SEQ ID NO: 818367 - DNA, 15 bp, Homo sapiens
tcgtccccaaagctg

SEQ ID NO: 818368 - DNA, 15 bp, Homo sapiens
cgtccccaaagctgc

SEQ ID NO: 818369 - DNA, 15 bp, Homo sapiens
gtccccaaagctgcc

SEQ ID NO: 818370 - DNA, 15 bp, Homo sapiens
tccccaaagctgcct

SEQ ID NO: 818371 - DNA, 15 bp, Homo sapiens
ccccaaagctgcctc

SEQ ID NO: 818372 - DNA, 15 bp, Homo sapiens
cccaaagctgcctct

SEQ ID NO: 818373 - DNA, 15 bp, Homo sapiens
ccaaagctgcctctt

SEQ ID NO: 818374 - DNA, 15 bp, Homo sapiens
caaagctgcctcttc

SEQ ID NO: 818375 - DNA, 15 bp, Homo sapiens
aaagctgcctcttct

SEQ ID NO: 818376 - DNA, 15 bp, Homo sapiens
aagctgcctcttctc

SEQ ID NO: 818377 - DNA, 15 bp, Homo sapiens
agctgcctcttctcg

SEQ ID NO: 818378 - DNA, 15 bp, Homo sapiens
gctgcctcttctcgc

SEQ ID NO: 818379 - DNA, 15 bp, Homo sapiens
ctgcctcttctcgcg

SEQ ID NO: 818380 - DNA, 15 bp, Homo sapiens
tgcctcttctcgcgt

SEQ ID NO: 818381 - DNA, 15 bp, Homo sapiens
gcctcttctcgcgtg

SEQ ID NO: 818382 - DNA, 15 bp, Homo sapiens
cctcttctcgcgtgt

SEQ ID NO: 818383 - DNA, 15 bp, Homo sapiens
ctcttctcgcgtgta

SEQ ID NO: 818384 - DNA, 15 bp, Homo sapiens
tcttctcgcgtgtaa

SEQ ID NO: 818385 - DNA, 15 bp, Homo sapiens
cttctcgcgtgtaat

SEQ ID NO: 818386 - DNA, 15 bp, Homo sapiens
ttctcgcgtgtaatg

SEQ ID NO: 818387 - DNA, 15 bp, Homo sapiens
tctcgcgtgtaatgc

SEQ ID NO: 818388 - DNA, 15 bp, Homo sapiens
ctcgcgtgtaatgcc

SEQ ID NO: 818389 - DNA, 15 bp, Homo sapiens
tcgcgtgtaatgcca

SEQ ID NO: 818390 - DNA, 15 bp, Homo sapiens
cgcgtgtaatgccag

SEQ ID NO: 818391 - DNA, 15 bp, Homo sapiens
gcgtgtaatgccagc

SEQ ID NO: 818392 - DNA, 15 bp, Homo sapiens
cgtgtaatgccagcg

SEQ ID NO: 818393 - DNA, 15 bp, Homo sapiens
gtgtaatgccagcgc

SEQ ID NO: 818394 - DNA, 15 bp, Homo sapiens
tgtaatgccagcgct

SEQ ID NO: 818395 - DNA, 15 bp, Homo sapiens
gtaatgccagcgctc

SEQ ID NO: 818396 - DNA, 15 bp, Homo sapiens
taatgccagcgctct

SEQ ID NO: 818397 - DNA, 15 bp, Homo sapiens
aatgccagcgctctg

SEQ ID NO: 818398 - DNA, 15 bp, Homo sapiens
atgccagcgctctgt

SEQ ID NO: 818399 - DNA, 15 bp, Homo sapiens
tgccagcgctctgta

SEQ ID NO: 818400 - DNA, 15 bp, Homo sapiens
gccagcgctctgtac

SEQ ID NO: 818401 - DNA, 15 bp, Homo sapiens
ccagcgctctgtaca

SEQ ID NO: 818402 - DNA, 15 bp, Homo sapiens
cagcgctctgtacag

SEQ ID NO: 818403 - DNA, 15 bp, Homo sapiens
agcgctctgtacagt

SEQ ID NO: 818404 - DNA, 15 bp, Homo sapiens
gcgctctgtacagtg

SEQ ID NO: 818405 - DNA, 15 bp, Homo sapiens
cgctctgtacagtgt

SEQ ID NO: 818406 - DNA, 15 bp, Homo sapiens
gctctgtacagtgtt

SEQ ID NO: 818407 - DNA, 15 bp, Homo sapiens
ctctgtacagtgttc

SEQ ID NO: 818408 - DNA, 15 bp, Homo sapiens
tctgtacagtgttct

SEQ ID NO: 818409 - DNA, 15 bp, Homo sapiens
ctgtacagtgttctg

SEQ ID NO: 818410 - DNA, 15 bp, Homo sapiens
tgtacagtgttctgt

SEQ ID NO: 818411 - DNA, 15 bp, Homo sapiens
gtacagtgttctgtt

SEQ ID NO: 818412 - DNA, 15 bp, Homo sapiens
tacagtgttctgttt

SEQ ID NO: 818413 - DNA, 15 bp, Homo sapiens
acagtgttctgttta

SEQ ID NO: 818414 - DNA, 15 bp, Homo sapiens
cagtgttctgtttag

SEQ ID NO: 818415 - DNA, 15 bp, Homo sapiens
agtgttctgtttaga

SEQ ID NO: 818416 - DNA, 15 bp, Homo sapiens
gtgttctgtttagag

SEQ ID NO: 818417 - DNA, 15 bp, Homo sapiens
tgttctgtttagagt

SEQ ID NO: 818418 - DNA, 15 bp, Homo sapiens
gttctgtttagagtg

SEQ ID NO: 818419 - DNA, 15 bp, Homo sapiens
tctgtttagagtggt

SEQ ID NO: 818420 - DNA, 15 bp, Homo sapiens
ctgtttagagtggtt

SEQ ID NO: 818421 - DNA, 15 bp, Homo sapiens
tgtttagagtggttt

SEQ ID NO: 818422 - DNA, 15 bp, Homo sapiens
gtttagagtggtttg

SEQ ID NO: 818423 - DNA, 15 bp, Homo sapiens
tttagagtggtttga

SEQ ID NO: 818424 - DNA, 15 bp, Homo sapiens
ttagagtggtttgaa

SEQ ID NO: 818425 - DNA, 15 bp, Homo sapiens
tagagtggtttgaac

SEQ ID NO: 818426 - DNA, 15 bp, Homo sapiens
agagtggtttgaaca

SEQ ID NO: 818427 - DNA, 15 bp, Homo sapiens
gagtggtttgaacat

SEQ ID NO: 818428 - DNA, 15 bp, Homo sapiens
agtggtttgaacatt

SEQ ID NO: 818429 - DNA, 15 bp, Homo sapiens
gtggtttgaacattt

SEQ ID NO: 818430 - DNA, 15 bp, Homo sapiens
tggtttgaacatttt

SEQ ID NO: 818431 - DNA, 15 bp, Homo sapiens
ggtttgaacattttt

SEQ ID NO: 818432 - DNA, 15 bp, Homo sapiens
gtttgaacatttttc

SEQ ID NO: 818433 - DNA, 15 bp, Homo sapiens
tttgaacatttttct

SEQ ID NO: 818434 - DNA, 15 bp, Homo sapiens
ttgaacatttttctg

SEQ ID NO: 818435 - DNA, 15 bp, Homo sapiens
tgaacatttttctgc

SEQ ID NO: 818436 - DNA, 15 bp, Homo sapiens
gaacatttttctgcc

SEQ ID NO: 818437 - DNA, 15 bp, Homo sapiens
aacatttttctgcct

SEQ ID NO: 818438 - DNA, 15 bp, Homo sapiens
acatttttctgcctg

SEQ ID NO: 818439 - DNA, 15 bp, Homo sapiens
catttttctgcctgt

SEQ ID NO: 818440 - DNA, 15 bp, Homo sapiens
atttttctgcctgtg

SEQ ID NO: 818441 - DNA, 15 bp, Homo sapiens
tttttctgcctgtgt

SEQ ID NO: 818442 - DNA, 15 bp, Homo sapiens
ttttctgcctgtgtc

SEQ ID NO: 818443 - DNA, 15 bp, Homo sapiens
tttctgcctgtgtct

SEQ ID NO: 818444 - DNA, 15 bp, Homo sapiens
ttctgcctgtgtctc

SEQ ID NO: 818445 - DNA, 15 bp, Homo sapiens
tctgcctgtgtctct

SEQ ID NO: 818446 - DNA, 15 bp, Homo sapiens
ctgcctgtgtctctc

SEQ ID NO: 818447 - DNA, 15 bp, Homo sapiens
tgcctgtgtctctca

SEQ ID NO: 818448 - DNA, 15 bp, Homo sapiens
gcctgtgtctctcat

SEQ ID NO: 818449 - DNA, 15 bp, Homo sapiens
cctgtgtctctcatt

SEQ ID NO: 818450 - DNA, 15 bp, Homo sapiens
ctgtgtctctcattg

SEQ ID NO: 818451 - DNA, 15 bp, Homo sapiens
tgtgtctctcattgc

SEQ ID NO: 818452 - DNA, 15 bp, Homo sapiens
gtgtctctcattgct

SEQ ID NO: 818453 - DNA, 15 bp, Homo sapiens
tgtctctcattgctg

SEQ ID NO: 818454 - DNA, 15 bp, Homo sapiens
gtctctcattgctga

SEQ ID NO: 818455 - DNA, 15 bp, Homo sapiens
tctctcattgctgaa

SEQ ID NO: 818456 - DNA, 15 bp, Homo sapiens
ctctcattgctgaag

SEQ ID NO: 818457 - DNA, 15 bp, Homo sapiens
tctcattgctgaagt

SEQ ID NO: 818458 - DNA, 15 bp, Homo sapiens
ctcattgctgaagta

SEQ ID NO: 818459 - DNA, 15 bp, Homo sapiens
tcattgctgaagtaa

SEQ ID NO: 818460 - DNA, 15 bp, Homo sapiens
cattgctgaagtaac

SEQ ID NO: 818461 - DNA, 15 bp, Homo sapiens
attgctgaagtaact

SEQ ID NO: 818462 - DNA, 15 bp, Homo sapiens
ttgctgaagtaactc

SEQ ID NO: 818463 - DNA, 15 bp, Homo sapiens
tgctgaagtaactca

SEQ ID NO: 818464 - DNA, 15 bp, Homo sapiens
gctgaagtaactcac

SEQ ID NO: 818465 - DNA, 15 bp, Homo sapiens
ctgaagtaactcacc

SEQ ID NO: 818466 - DNA, 15 bp, Homo sapiens
tgaagtaactcacct

SEQ ID NO: 818467 - DNA, 15 bp, Homo sapiens
gaagtaactcacctc

SEQ ID NO: 818468 - DNA, 15 bp, Homo sapiens
aagtaactcacctct

SEQ ID NO: 818469 - DNA, 15 bp, Homo sapiens
agtaactcacctctc

SEQ ID NO: 818470 - DNA, 15 bp, Homo sapiens
gtaactcacctctct

SEQ ID NO: 818471 - DNA, 15 bp, Homo sapiens
taactcacctctctc

SEQ ID NO: 818472 - DNA, 15 bp, Homo sapiens
aactcacctctctca

SEQ ID NO: 818473 - DNA, 15 bp, Homo sapiens
actcacctctctcat

SEQ ID NO: 818474 - DNA, 15 bp, Homo sapiens
ctcacctctctcata

SEQ ID NO: 818475 - DNA, 15 bp, Homo sapiens
tcacctctctcatat

SEQ ID NO: 818476 - DNA, 15 bp, Homo sapiens
cacctctctcatatc

SEQ ID NO: 818477 - DNA, 15 bp, Homo sapiens
acctctctcatatcg

SEQ ID NO: 818478 - DNA, 15 bp, Homo sapiens
cctctctcatatcga

SEQ ID NO: 818479 - DNA, 15 bp, Homo sapiens
ctctctcatatcgac

SEQ ID NO: 818480 - DNA, 15 bp, Homo sapiens
tctctcatatcgact

SEQ ID NO: 818481 - DNA, 15 bp, Homo sapiens
ctctcatatcgactc

SEQ ID NO: 818482 - DNA, 15 bp, Homo sapiens
tctcatatcgactct

SEQ ID NO: 818483 - DNA, 15 bp, Homo sapiens
ctcatatcgactctt

SEQ ID NO: 818484 - DNA, 15 bp, Homo sapiens
tcatatcgactctta

SEQ ID NO: 818485 - DNA, 15 bp, Homo sapiens
catatcgactcttac

SEQ ID NO: 818486 - DNA, 15 bp, Homo sapiens
atatcgactcttacc

SEQ ID NO: 818487 - DNA, 15 bp, Homo sapiens
tatcgactcttaccc

SEQ ID NO: 818488 - DNA, 15 bp, Homo sapiens
atcgactcttaccca

SEQ ID NO: 818489 - DNA, 15 bp, Homo sapiens
tcgactcttacccag

SEQ ID NO: 818490 - DNA, 15 bp, Homo sapiens
cgactcttacccagg

SEQ ID NO: 818491 - DNA, 15 bp, Homo sapiens
gactcttacccagga

SEQ ID NO: 818492 - DNA, 15 bp, Homo sapiens
actcttacccaggag

SEQ ID NO: 818493 - DNA, 15 bp, Homo sapiens
ctcttacccaggagc

SEQ ID NO: 818494 - DNA, 15 bp, Homo sapiens
tcttacccaggagcc

SEQ ID NO: 818495 - DNA, 15 bp, Homo sapiens
cttacccaggagccg

SEQ ID NO: 818496 - DNA, 15 bp, Homo sapiens
ttacccaggagccgc

SEQ ID NO: 818497 - DNA, 15 bp, Homo sapiens
tacccaggagccgca

SEQ ID NO: 818498 - DNA, 15 bp, Homo sapiens
acccaggagccgcac

SEQ ID NO: 818499 - DNA, 15 bp, Homo sapiens
cccaggagccgcact

SEQ ID NO: 818500 - DNA, 15 bp, Homo sapiens
ccaggagccgcactg

SEQ ID NO: 818501 - DNA, 15 bp, Homo sapiens
caggagccgcactgc

SEQ ID NO: 818502 - DNA, 15 bp, Homo sapiens
aggagccgcactgca

SEQ ID NO: 818503 - DNA, 15 bp, Homo sapiens
ggagccgcactgcag

SEQ ID NO: 818504 - DNA, 15 bp, Homo sapiens
gagccgcactgcaga

SEQ ID NO: 818505 - DNA, 15 bp, Homo sapiens
agccgcactgcagac

SEQ ID NO: 818506 - DNA, 15 bp, Homo sapiens
gccgcactgcagact

SEQ ID NO: 818507 - DNA, 15 bp, Homo sapiens
ccgcactgcagactc

SEQ ID NO: 818508 - DNA, 15 bp, Homo sapiens
cgcactgcagactct

SEQ ID NO: 818509 - DNA, 15 bp, Homo sapiens
gcactgcagactctt

SEQ ID NO: 818510 - DNA, 15 bp, Homo sapiens
cactgcagactcttt

SEQ ID NO: 818511 - DNA, 15 bp, Homo sapiens
actgcagactctttg

SEQ ID NO: 818512 - DNA, 15 bp, Homo sapiens
ctgcagactctttga

SEQ ID NO: 818513 - DNA, 15 bp, Homo sapiens
tgcagactctttgat

SEQ ID NO: 818514 - DNA, 15 bp, Homo sapiens
gcagactctttgatg

SEQ ID NO: 818515 - DNA, 15 bp, Homo sapiens
cagactctttgatgt

SEQ ID NO: 818516 - DNA, 15 bp, Homo sapiens
agactctttgatgta

SEQ ID NO: 818517 - DNA, 15 bp, Homo sapiens
gactctttgatgtag

SEQ ID NO: 818518 - DNA, 15 bp, Homo sapiens
actctttgatgtagg

SEQ ID NO: 818519 - DNA, 15 bp, Homo sapiens
ctctttgatgtaggt

SEQ ID NO: 818520 - DNA, 15 bp, Homo sapiens
tctttgatgtaggtc

SEQ ID NO: 818521 - DNA, 15 bp, Homo sapiens
ctttgatgtaggtcc

SEQ ID NO: 818522 - DNA, 15 bp, Homo sapiens
tttgatgtaggtcct

SEQ ID NO: 818523 - DNA, 15 bp, Homo sapiens
ttgatgtaggtcctt

SEQ ID NO: 818524 - DNA, 15 bp, Homo sapiens
tgatgtaggtccttt

SEQ ID NO: 818525 - DNA, 15 bp, Homo sapiens
gatgtaggtcctttc

SEQ ID NO: 818526 - DNA, 15 bp, Homo sapiens
atgtaggtcctttct

SEQ ID NO: 818527 - DNA, 15 bp, Homo sapiens
tgtaggtcctttctg

SEQ ID NO: 818528 - DNA, 15 bp, Homo sapiens
gtaggtcctttctgc

SEQ ID NO: 818529 - DNA, 15 bp, Homo sapiens
taggtcctttctgca

SEQ ID NO: 818530 - DNA, 15 bp, Homo sapiens
aggtcctttctgcat

SEQ ID NO: 818531 - DNA, 15 bp, Homo sapiens
ggtcctttctgcatg

SEQ ID NO: 818532 - DNA, 15 bp, Homo sapiens
gtcctttctgcatgg

SEQ ID NO: 818533 - DNA, 15 bp, Homo sapiens
tcctttctgcatggc

SEQ ID NO: 818534 - DNA, 15 bp, Homo sapiens
cctttctgcatggca

SEQ ID NO: 818535 - DNA, 15 bp, Homo sapiens
ctttctgcatggcag

SEQ ID NO: 818536 - DNA, 15 bp, Homo sapiens
tttctgcatggcagc

SEQ ID NO: 818537 - DNA, 15 bp, Homo sapiens
ttctgcatggcagct

SEQ ID NO: 818538 - DNA, 15 bp, Homo sapiens
tctgcatggcagcta

SEQ ID NO: 818539 - DNA, 15 bp, Homo sapiens
ctgcatggcagctaa

SEQ ID NO: 818540 - DNA, 15 bp, Homo sapiens
tgcatggcagctaag

SEQ ID NO: 818541 - DNA, 15 bp, Homo sapiens
gcatggcagctaagg

SEQ ID NO: 818542 - DNA, 15 bp, Homo sapiens
catggcagctaaggc

SEQ ID NO: 818543 - DNA, 15 bp, Homo sapiens
atggcagctaaggcc

SEQ ID NO: 818544 - DNA, 15 bp, Homo sapiens
tggcagctaaggcca

SEQ ID NO: 818545 - DNA, 15 bp, Homo sapiens
ggcagctaaggccaa

SEQ ID NO: 818546 - DNA, 15 bp, Homo sapiens
gcagctaaggccaag

SEQ ID NO: 818547 - DNA, 15 bp, Homo sapiens
cagctaaggccaagc

SEQ ID NO: 818548 - DNA, 15 bp, Homo sapiens
agctaaggccaagct

SEQ ID NO: 818549 - DNA, 15 bp, Homo sapiens
gctaaggccaagctg

SEQ ID NO: 818550 - DNA, 15 bp, Homo sapiens
ctaaggccaagctgt

SEQ ID NO: 818551 - DNA, 15 bp, Homo sapiens
taaggccaagctgtg

SEQ ID NO: 818552 - DNA, 15 bp, Homo sapiens
aaggccaagctgtgg

SEQ ID NO: 818553 - DNA, 15 bp, Homo sapiens
aggccaagctgtggt

SEQ ID NO: 818554 - DNA, 15 bp, Homo sapiens
ggccaagctgtggtt

SEQ ID NO: 818555 - DNA, 15 bp, Homo sapiens
gccaagctgtggttt

SEQ ID NO: 818556 - DNA, 15 bp, Homo sapiens
ccaagctgtggtttt

SEQ ID NO: 818557 - DNA, 15 bp, Homo sapiens
caagctgtggttttc

SEQ ID NO: 818558 - DNA, 15 bp, Homo sapiens
aagctgtggttttca

SEQ ID NO: 818559 - DNA, 15 bp, Homo sapiens
agctgtggttttcat

SEQ ID NO: 818560 - DNA, 15 bp, Homo sapiens
gctgtggttttcatt

SEQ ID NO: 818561 - DNA, 15 bp, Homo sapiens
ctgtggttttcattt

SEQ ID NO: 818562 - DNA, 15 bp, Homo sapiens
tgtggttttcatttg

SEQ ID NO: 818563 - DNA, 15 bp, Homo sapiens
gtggttttcatttgc

SEQ ID NO: 818564 - DNA, 15 bp, Homo sapiens
tggttttcatttgca

SEQ ID NO: 818565 - DNA, 15 bp, Homo sapiens
ggttttcatttgcat

SEQ ID NO: 818566 - DNA, 15 bp, Homo sapiens
gttttcatttgcatg

SEQ ID NO: 818567 - DNA, 15 bp, Homo sapiens
ttttcatttgcatga

SEQ ID NO: 818568 - DNA, 15 bp, Homo sapiens
tttcatttgcatgat

SEQ ID NO: 818569 - DNA, 15 bp, Homo sapiens
ttcatttgcatgatg

SEQ ID NO: 818570 - DNA, 15 bp, Homo sapiens
tcatttgcatgatgc

SEQ ID NO: 818571 - DNA, 15 bp, Homo sapiens
catttgcatgatgca

SEQ ID NO: 818572 - DNA, 15 bp, Homo sapiens
atttgcatgatgcaa

SEQ ID NO: 818573 - DNA, 15 bp, Homo sapiens
tttgcatgatgcaac

SEQ ID NO: 818574 - DNA, 15 bp, Homo sapiens
ttgcatgatgcaacc

SEQ ID NO: 818575 - DNA, 15 bp, Homo sapiens
tgcatgatgcaacct

SEQ ID NO: 818576 - DNA, 15 bp, Homo sapiens
gcatgatgcaacctc

SEQ ID NO: 818577 - DNA, 15 bp, Homo sapiens
catgatgcaacctcc

SEQ ID NO: 818578 - DNA, 15 bp, Homo sapiens
atgatgcaacctccc

SEQ ID NO: 818579 - DNA, 15 bp, Homo sapiens
tgatgcaacctcccc

SEQ ID NO: 818580 - DNA, 15 bp, Homo sapiens
gatgcaacctccccc

SEQ ID NO: 818581 - DNA, 15 bp, Homo sapiens
atgcaacctccccct

SEQ ID NO: 818582 - DNA, 15 bp, Homo sapiens
tgcaacctccccctt

SEQ ID NO: 818583 - DNA, 15 bp, Homo sapiens
gcaacctcccccttt

SEQ ID NO: 818584 - DNA, 15 bp, Homo sapiens
caacctccccctttc

SEQ ID NO: 818585 - DNA, 15 bp, Homo sapiens
aacctccccctttcg

SEQ ID NO: 818586 - DNA, 15 bp, Homo sapiens
acctccccctttcgg

SEQ ID NO: 818587 - DNA, 15 bp, Homo sapiens
cctccccctttcggt

SEQ ID NO: 818588 - DNA, 15 bp, Homo sapiens
ctccccctttcggtt

SEQ ID NO: 818589 - DNA, 15 bp, Homo sapiens
tccccctttcggttg

SEQ ID NO: 818590 - DNA, 15 bp, Homo sapiens
ccccctttcggttgt

SEQ ID NO: 818591 - DNA, 15 bp, Homo sapiens
cccctttcggttgtc

SEQ ID NO: 818592 - DNA, 15 bp, Homo sapiens
ccctttcggttgtcg

SEQ ID NO: 818593 - DNA, 15 bp, Homo sapiens
cctttcggttgtcgc

SEQ ID NO: 818594 - DNA, 15 bp, Homo sapiens
ctttcggttgtcgcc

SEQ ID NO: 818595 - DNA, 15 bp, Homo sapiens
tttcggttgtcgcct

SEQ ID NO: 818596 - DNA, 15 bp, Homo sapiens
ttcggttgtcgcctc

SEQ ID NO: 818597 - DNA, 15 bp, Homo sapiens
tcggttgtcgcctcc

SEQ ID NO: 818598 - DNA, 15 bp, Homo sapiens
cggttgtcgcctcca

SEQ ID NO: 818599 - DNA, 15 bp, Homo sapiens
ggttgtcgcctccag

SEQ ID NO: 818600 - DNA, 15 bp, Homo sapiens
gttgtcgcctccagg

SEQ ID NO: 818601 - DNA, 15 bp, Homo sapiens
ttgtcgcctccaggt

SEQ ID NO: 818602 - DNA, 15 bp, Homo sapiens
tgtcgcctccaggtt

SEQ ID NO: 818603 - DNA, 15 bp, Homo sapiens
gtcgcctccaggtta

SEQ ID NO: 818604 - DNA, 15 bp, Homo sapiens
tcgcctccaggttaa

SEQ ID NO: 818605 - DNA, 15 bp, Homo sapiens
cgcctccaggttaac

SEQ ID NO: 818606 - DNA, 15 bp, Homo sapiens
gcctccaggttaacc

SEQ ID NO: 818607 - DNA, 15 bp, Homo sapiens
cctccaggttaacca

SEQ ID NO: 818608 - DNA, 15 bp, Homo sapiens
ctccaggttaaccag

SEQ ID NO: 818609 - DNA, 15 bp, Homo sapiens
tccaggttaaccaga

SEQ ID NO: 818610 - DNA, 15 bp, Homo sapiens
ccaggttaaccagat

SEQ ID NO: 818611 - DNA, 15 bp, Homo sapiens
caggttaaccagatt

SEQ ID NO: 818612 - DNA, 15 bp, Homo sapiens
aggttaaccagattc

SEQ ID NO: 818613 - DNA, 15 bp, Homo sapiens
ggttaaccagattct

SEQ ID NO: 818614 - DNA, 15 bp, Homo sapiens
gttaaccagattctt

SEQ ID NO: 818615 - DNA, 15 bp, Homo sapiens
ttaaccagattcttt

SEQ ID NO: 818616 - DNA, 15 bp, Homo sapiens
taaccagattctttt

SEQ ID NO: 818617 - DNA, 15 bp, Homo sapiens
aaccagattcttttc

SEQ ID NO: 818618 - DNA, 15 bp, Homo sapiens
accagattcttttcc

SEQ ID NO: 818619 - DNA, 15 bp, Homo sapiens
ccagattcttttcct

SEQ ID NO: 818620 - DNA, 15 bp, Homo sapiens
cagattcttttcctg

SEQ ID NO: 818621 - DNA, 15 bp, Homo sapiens
agattcttttcctgc

SEQ ID NO: 818622 - DNA, 15 bp, Homo sapiens
gattcttttcctgca

SEQ ID NO: 818623 - DNA, 15 bp, Homo sapiens
attcttttcctgcac

SEQ ID NO: 818624 - DNA, 15 bp, Homo sapiens
ttcttttcctgcact

SEQ ID NO: 818625 - DNA, 15 bp, Homo sapiens
tcttttcctgcactg

SEQ ID NO: 818626 - DNA, 15 bp, Homo sapiens
cttttcctgcactgc

SEQ ID NO: 818627 - DNA, 15 bp, Homo sapiens
ttttcctgcactgcc

SEQ ID NO: 818628 - DNA, 15 bp, Homo sapiens
tttcctgcactgccc

SEQ ID NO: 818629 - DNA, 15 bp, Homo sapiens
ttcctgcactgccca

SEQ ID NO: 818630 - DNA, 15 bp, Homo sapiens
tcctgcactgcccaa

SEQ ID NO: 818631 - DNA, 15 bp, Homo sapiens
cctgcactgcccaag

SEQ ID NO: 818632 - DNA, 15 bp, Homo sapiens
ctgcactgcccaagc

SEQ ID NO: 818633 - DNA, 15 bp, Homo sapiens
tgcactgcccaagca

SEQ ID NO: 818634 - DNA, 15 bp, Homo sapiens
gcactgcccaagcat

SEQ ID NO: 818635 - DNA, 15 bp, Homo sapiens
cactgcccaagcatg

SEQ ID NO: 818636 - DNA, 15 bp, Homo sapiens
actgcccaagcatgt

SEQ ID NO: 818637 - DNA, 15 bp, Homo sapiens
ctgcccaagcatgtt

SEQ ID NO: 818638 - DNA, 15 bp, Homo sapiens
tgcccaagcatgttg

SEQ ID NO: 818639 - DNA, 15 bp, Homo sapiens
gcccaagcatgttga

SEQ ID NO: 818640 - DNA, 15 bp, Homo sapiens
cccaagcatgttgac

SEQ ID NO: 818641 - DNA, 15 bp, Homo sapiens
ccaagcatgttgacg

SEQ ID NO: 818642 - DNA, 15 bp, Homo sapiens
caagcatgttgacgt

SEQ ID NO: 818643 - DNA, 15 bp, Homo sapiens
aagcatgttgacgtg

SEQ ID NO: 818644 - DNA, 15 bp, Homo sapiens
agcatgttgacgtgc

SEQ ID NO: 818645 - DNA, 15 bp, Homo sapiens
gcatgttgacgtgct

SEQ ID NO: 818646 - DNA, 15 bp, Homo sapiens
catgttgacgtgctt

SEQ ID NO: 818647 - DNA, 15 bp, Homo sapiens
atgttgacgtgcttt

SEQ ID NO: 818648 - DNA, 15 bp, Homo sapiens
tgttgacgtgctttc

SEQ ID NO: 818649 - DNA, 15 bp, Homo sapiens
gttgacgtgctttcc

SEQ ID NO: 818650 - DNA, 15 bp, Homo sapiens
ttgacgtgctttccc

SEQ ID NO: 818651 - DNA, 15 bp, Homo sapiens
tgacgtgctttcccc

SEQ ID NO: 818652 - DNA, 15 bp, Homo sapiens
gacgtgctttccccg

SEQ ID NO: 818653 - DNA, 15 bp, Homo sapiens
acgtgctttccccga

SEQ ID NO: 818654 - DNA, 15 bp, Homo sapiens
cgtgctttccccgat

SEQ ID NO: 818655 - DNA, 15 bp, Homo sapiens
gtgctttccccgatg

SEQ ID NO: 818656 - DNA, 15 bp, Homo sapiens
tgctttccccgatgg

SEQ ID NO: 818657 - DNA, 15 bp, Homo sapiens
gctttccccgatggc

SEQ ID NO: 818658 - DNA, 15 bp, Homo sapiens
ctttccccgatggcc

SEQ ID NO: 818659 - DNA, 15 bp, Homo sapiens
tttccccgatggccc

SEQ ID NO: 818660 - DNA, 15 bp, Homo sapiens
ttccccgatggccct

SEQ ID NO: 818661 - DNA, 15 bp, Homo sapiens
tccccgatggccctg

SEQ ID NO: 818662 - DNA, 15 bp, Homo sapiens
ccccgatggccctga

SEQ ID NO: 818663 - DNA, 15 bp, Homo sapiens
cccgatggccctgaa

SEQ ID NO: 818664 - DNA, 15 bp, Homo sapiens
ccgatggccctgaac

SEQ ID NO: 818665 - DNA, 15 bp, Homo sapiens
cgatggccctgaacg

SEQ ID NO: 818666 - DNA, 15 bp, Homo sapiens
gatggccctgaacgt

SEQ ID NO: 818667 - DNA, 15 bp, Homo sapiens
atggccctgaacgtg

SEQ ID NO: 818668 - DNA, 15 bp, Homo sapiens
tggccctgaacgtgg

SEQ ID NO: 818669 - DNA, 15 bp, Homo sapiens
ggccctgaacgtggt

SEQ ID NO: 818670 - DNA, 15 bp, Homo sapiens
gccctgaacgtggtg

SEQ ID NO: 818671 - DNA, 15 bp, Homo sapiens
ccctgaacgtggtga

SEQ ID NO: 818672 - DNA, 15 bp, Homo sapiens
cctgaacgtggtgag

SEQ ID NO: 818673 - DNA, 15 bp, Homo sapiens
ctgaacgtggtgagc

SEQ ID NO: 818674 - DNA, 15 bp, Homo sapiens
tgaacgtggtgagca

SEQ ID NO: 818675 - DNA, 15 bp, Homo sapiens
gaacgtggtgagcac

SEQ ID NO: 818676 - DNA, 15 bp, Homo sapiens
aacgtggtgagcact

SEQ ID NO: 818677 - DNA, 15 bp, Homo sapiens
acgtggtgagcactg

SEQ ID NO: 818678 - DNA, 15 bp, Homo sapiens
cgtggtgagcactgg

SEQ ID NO: 818679 - DNA, 15 bp, Homo sapiens
gtggtgagcactgga

SEQ ID NO: 818680 - DNA, 15 bp, Homo sapiens
tggtgagcactggac

SEQ ID NO: 818681 - DNA, 15 bp, Homo sapiens
ggtgagcactggacg

SEQ ID NO: 818682 - DNA, 15 bp, Homo sapiens
gtgagcactggacgc

SEQ ID NO: 818683 - DNA, 15 bp, Homo sapiens
tgagcactggacgca

SEQ ID NO: 818684 - DNA, 15 bp, Homo sapiens
gagcactggacgcat

SEQ ID NO: 818685 - DNA, 15 bp, Homo sapiens
agcactggacgcatg

SEQ ID NO: 818686 - DNA, 15 bp, Homo sapiens
gcactggacgcatgc

SEQ ID NO: 818687 - DNA, 15 bp, Homo sapiens
cactggacgcatgca

SEQ ID NO: 818688 - DNA, 15 bp, Homo sapiens
actggacgcatgcat

SEQ ID NO: 818689 - DNA, 15 bp, Homo sapiens
ctggacgcatgcatg

SEQ ID NO: 818690 - DNA, 15 bp, Homo sapiens
tggacgcatgcatga

SEQ ID NO: 818691 - DNA, 15 bp, Homo sapiens
ggacgcatgcatgaa

SEQ ID NO: 818692 - DNA, 15 bp, Homo sapiens
gacgcatgcatgaat

SEQ ID NO: 818693 - DNA, 15 bp, Homo sapiens
acgcatgcatgaatt

SEQ ID NO: 818694 - DNA, 15 bp, Homo sapiens
cgcatgcatgaatta

SEQ ID NO: 818695 - DNA, 15 bp, Homo sapiens
gcatgcatgaattaa

SEQ ID NO: 818696 - DNA, 15 bp, Homo sapiens
catgcatgaattaaa

SEQ ID NO: 818697 - DNA, 15 bp, Homo sapiens
atgcatgaattaaag

SEQ ID NO: 818698 - DNA, 15 bp, Homo sapiens
tgcatgaattaaagc

SEQ ID NO: 818699 - DNA, 15 bp, Homo sapiens
gcatgaattaaagca

SEQ ID NO: 818700 - DNA, 15 bp, Homo sapiens
catgaattaaagcag

SEQ ID NO: 818701 - DNA, 15 bp, Homo sapiens
atgaattaaagcagc

SEQ ID NO: 818702 - DNA, 15 bp, Homo sapiens
tgaattaaagcagcg

SEQ ID NO: 818703 - DNA, 15 bp, Homo sapiens
gaattaaagcagcga

SEQ ID NO: 818704 - DNA, 15 bp, Homo sapiens
aattaaagcagcgag

SEQ ID NO: 818705 - DNA, 15 bp, Homo sapiens
attaaagcagcgagc

SEQ ID NO: 818706 - DNA, 15 bp, Homo sapiens
ttaaagcagcgagca

SEQ ID NO: 818707 - DNA, 15 bp, Homo sapiens
taaagcagcgagcat

SEQ ID NO: 818708 - DNA, 15 bp, Homo sapiens
aaagcagcgagcatt

SEQ ID NO: 818709 - DNA, 15 bp, Homo sapiens
aagcagcgagcattc

SEQ ID NO: 818710 - DNA, 15 bp, Homo sapiens
agcagcgagcattcc

SEQ ID NO: 818711 - DNA, 15 bp, Homo sapiens
gcagcgagcattcca

SEQ ID NO: 818712 - DNA, 15 bp, Homo sapiens
cagcgagcattccaa

SEQ ID NO: 818713 - DNA, 15 bp, Homo sapiens
agcgagcattccaat

SEQ ID NO: 818714 - DNA, 15 bp, Homo sapiens
gcgagcattccaata

SEQ ID NO: 818715 - DNA, 15 bp, Homo sapiens
cgagcattccaatac

SEQ ID NO: 818716 - DNA, 15 bp, Homo sapiens
gagcattccaataca

SEQ ID NO: 818717 - DNA, 15 bp, Homo sapiens
agcattccaatacac

SEQ ID NO: 818718 - DNA, 15 bp, Homo sapiens
gcattccaatacact

SEQ ID NO: 818719 - DNA, 15 bp, Homo sapiens
cattccaatacactg

SEQ ID NO: 818720 - DNA, 15 bp, Homo sapiens
attccaatacactga

SEQ ID NO: 818721 - DNA, 15 bp, Homo sapiens
ttccaatacactgaa

SEQ ID NO: 818722 - DNA, 15 bp, Homo sapiens
tccaatacactgaag

SEQ ID NO: 818723 - DNA, 15 bp, Homo sapiens
ccaatacactgaagc

SEQ ID NO: 818724 - DNA, 15 bp, Homo sapiens
caatacactgaagca

SEQ ID NO: 818725 - DNA, 15 bp, Homo sapiens
aatacactgaagcac

SEQ ID NO: 818726 - DNA, 15 bp, Homo sapiens
atacactgaagcact

SEQ ID NO: 818727 - DNA, 15 bp, Homo sapiens
tacactgaagcactg

SEQ ID NO: 818728 - DNA, 15 bp, Homo sapiens
acactgaagcactgg

SEQ ID NO: 818729 - DNA, 15 bp, Homo sapiens
cactgaagcactggg

SEQ ID NO: 818730 - DNA, 15 bp, Homo sapiens
actgaagcactgggc

SEQ ID NO: 818731 - DNA, 15 bp, Homo sapiens
ctgaagcactgggcc

SEQ ID NO: 818732 - DNA, 15 bp, Homo sapiens
tgaagcactgggcct

SEQ ID NO: 818733 - DNA, 15 bp, Homo sapiens
gaagcactgggcctg

SEQ ID NO: 818734 - DNA, 15 bp, Homo sapiens
aagcactgggcctga

SEQ ID NO: 818735 - DNA, 15 bp, Homo sapiens
agcactgggcctgag

SEQ ID NO: 818736 - DNA, 15 bp, Homo sapiens
gcactgggcctgagg

SEQ ID NO: 818737 - DNA, 15 bp, Homo sapiens
cactgggcctgaggc

SEQ ID NO: 818738 - DNA, 15 bp, Homo sapiens
actgggcctgaggct

SEQ ID NO: 818739 - DNA, 15 bp, Homo sapiens
ctgggcctgaggctt

SEQ ID NO: 818740 - DNA, 15 bp, Homo sapiens
tgggcctgaggcttc

SEQ ID NO: 818741 - DNA, 15 bp, Homo sapiens
gggcctgaggcttct

SEQ ID NO: 818742 - DNA, 15 bp, Homo sapiens
ggcctgaggcttctc

SEQ ID NO: 818743 - DNA, 15 bp, Homo sapiens
gcctgaggcttctcc

SEQ ID NO: 818744 - DNA, 15 bp, Homo sapiens
cctgaggcttctcct

SEQ ID NO: 818745 - DNA, 15 bp, Homo sapiens
ctgaggcttctcctg

SEQ ID NO: 818746 - DNA, 15 bp, Homo sapiens
tgaggcttctcctgg

SEQ ID NO: 818747 - DNA, 15 bp, Homo sapiens
gaggcttctcctgga

SEQ ID NO: 818748 - DNA, 15 bp, Homo sapiens
aggcttctcctggat

SEQ ID NO: 818749 - DNA, 15 bp, Homo sapiens
ggcttctcctggatc

SEQ ID NO: 818750 - DNA, 15 bp, Homo sapiens
gcttctcctggatca

SEQ ID NO: 818751 - DNA, 15 bp, Homo sapiens
cttctcctggatcat

SEQ ID NO: 818752 - DNA, 15 bp, Homo sapiens
ttctcctggatcatc

SEQ ID NO: 818753 - DNA, 15 bp, Homo sapiens
tctcctggatcatcc

SEQ ID NO: 818754 - DNA, 15 bp, Homo sapiens
ctcctggatcatccc

SEQ ID NO: 818755 - DNA, 15 bp, Homo sapiens
tcctggatcatccct

SEQ ID NO: 818756 - DNA, 15 bp, Homo sapiens
cctggatcatccctg

SEQ ID NO: 818757 - DNA, 15 bp, Homo sapiens
ctggatcatccctgt

SEQ ID NO: 818758 - DNA, 15 bp, Homo sapiens
tggatcatccctgtg

SEQ ID NO: 818759 - DNA, 15 bp, Homo sapiens
ggatcatccctgtgg

SEQ ID NO: 818760 - DNA, 15 bp, Homo sapiens
gatcatccctgtggg

SEQ ID NO: 818761 - DNA, 15 bp, Homo sapiens
atcatccctgtgggc

SEQ ID NO: 818762 - DNA, 15 bp, Homo sapiens
tcatccctgtgggcc

SEQ ID NO: 818763 - DNA, 15 bp, Homo sapiens
catccctgtgggccc

SEQ ID NO: 818764 - DNA, 15 bp, Homo sapiens
atccctgtgggccct

SEQ ID NO: 818765 - DNA, 15 bp, Homo sapiens
tccctgtgggccctc

SEQ ID NO: 818766 - DNA, 15 bp, Homo sapiens
ccctgtgggccctca

SEQ ID NO: 818767 - DNA, 15 bp, Homo sapiens
cctgtgggccctcag

SEQ ID NO: 818768 - DNA, 15 bp, Homo sapiens
ctgtgggccctcagt

SEQ ID NO: 818769 - DNA, 15 bp, Homo sapiens
tgtgggccctcagtt

SEQ ID NO: 818770 - DNA, 15 bp, Homo sapiens
gtgggccctcagttt

SEQ ID NO: 818771 - DNA, 15 bp, Homo sapiens
tgggccctcagtttg

SEQ ID NO: 818772 - DNA, 15 bp, Homo sapiens
gggccctcagtttgc

SEQ ID NO: 818773 - DNA, 15 bp, Homo sapiens
ggccctcagtttgct

SEQ ID NO: 818774 - DNA, 15 bp, Homo sapiens
gccctcagtttgctg

SEQ ID NO: 818775 - DNA, 15 bp, Homo sapiens
ccctcagtttgctgt

SEQ ID NO: 818776 - DNA, 15 bp, Homo sapiens
cctcagtttgctgtg

SEQ ID NO: 818777 - DNA, 15 bp, Homo sapiens
ctcagtttgctgtga

SEQ ID NO: 818778 - DNA, 15 bp, Homo sapiens
tcagtttgctgtgat

SEQ ID NO: 818779 - DNA, 15 bp, Homo sapiens
cagtttgctgtgata

SEQ ID NO: 818780 - DNA, 15 bp, Homo sapiens
agtttgctgtgatat

SEQ ID NO: 818781 - DNA, 15 bp, Homo sapiens
gtttgctgtgatatc

SEQ ID NO: 818782 - DNA, 15 bp, Homo sapiens
tttgctgtgatatca

SEQ ID NO: 818783 - DNA, 15 bp, Homo sapiens
ttgctgtgatatcac

SEQ ID NO: 818784 - DNA, 15 bp, Homo sapiens
tgctgtgatatcaca

SEQ ID NO: 818785 - DNA, 15 bp, Homo sapiens
gctgtgatatcacaa

SEQ ID NO: 818786 - DNA, 15 bp, Homo sapiens
ctgtgatatcacaaa

SEQ ID NO: 818787 - DNA, 15 bp, Homo sapiens
tgtgatatcacaaag

SEQ ID NO: 818788 - DNA, 15 bp, Homo sapiens
gtgatatcacaaagg

SEQ ID NO: 818789 - DNA, 15 bp, Homo sapiens
tgatatcacaaaggc

SEQ ID NO: 818790 - DNA, 15 bp, Homo sapiens
gatatcacaaaggcc

SEQ ID NO: 818791 - DNA, 15 bp, Homo sapiens
atatcacaaaggcca

SEQ ID NO: 818792 - DNA, 15 bp, Homo sapiens
tatcacaaaggccac

SEQ ID NO: 818793 - DNA, 15 bp, Homo sapiens
atcacaaaggccacc

SEQ ID NO: 818794 - DNA, 15 bp, Homo sapiens
tcacaaaggccacca

SEQ ID NO: 818795 - DNA, 15 bp, Homo sapiens
cacaaaggccaccat

SEQ ID NO: 818796 - DNA, 15 bp, Homo sapiens
acaaaggccaccatg

SEQ ID NO: 818797 - DNA, 15 bp, Homo sapiens
caaaggccaccatgt

SEQ ID NO: 818798 - DNA, 15 bp, Homo sapiens
aaaggccaccatgtc

SEQ ID NO: 818799 - DNA, 15 bp, Homo sapiens
aaggccaccatgtcc

SEQ ID NO: 818800 - DNA, 15 bp, Homo sapiens
aggccaccatgtccc

SEQ ID NO: 818801 - DNA, 15 bp, Homo sapiens
ggccaccatgtccct

SEQ ID NO: 818802 - DNA, 15 bp, Homo sapiens
gccaccatgtccctt

SEQ ID NO: 818803 - DNA, 15 bp, Homo sapiens
ccaccatgtcccttg

SEQ ID NO: 818804 - DNA, 15 bp, Homo sapiens
caccatgtcccttga

SEQ ID NO: 818805 - DNA, 15 bp, Homo sapiens
accatgtcccttgaa

SEQ ID NO: 818806 - DNA, 15 bp, Homo sapiens
ccatgtcccttgaaa

SEQ ID NO: 818807 - DNA, 15 bp, Homo sapiens
catgtcccttgaaaa

SEQ ID NO: 818808 - DNA, 15 bp, Homo sapiens
atgtcccttgaaaat

SEQ ID NO: 818809 - DNA, 15 bp, Homo sapiens
tgtcccttgaaaatt

SEQ ID NO: 818810 - DNA, 15 bp, Homo sapiens
gtcccttgaaaattc

SEQ ID NO: 818811 - DNA, 15 bp, Homo sapiens
tcccttgaaaattca

SEQ ID NO: 818812 - DNA, 15 bp, Homo sapiens
cccttgaaaattcaa

SEQ ID NO: 818813 - DNA, 15 bp, Homo sapiens
ccttgaaaattcaag

SEQ ID NO: 818814 - DNA, 15 bp, Homo sapiens
cttgaaaattcaaga

SEQ ID NO: 818815 - DNA, 15 bp, Homo sapiens
ttgaaaattcaagac

SEQ ID NO: 818816 - DNA, 15 bp, Homo sapiens
tgaaaattcaagact

SEQ ID NO: 818817 - DNA, 15 bp, Homo sapiens
gaaaattcaagacta

SEQ ID NO: 818818 - DNA, 15 bp, Homo sapiens
aaaattcaagactag

SEQ ID NO: 818819 - DNA, 15 bp, Homo sapiens
aaattcaagactagg

SEQ ID NO: 818820 - DNA, 15 bp, Homo sapiens
aattcaagactagga

SEQ ID NO: 818821 - DNA, 15 bp, Homo sapiens
attcaagactaggac

SEQ ID NO: 818822 - DNA, 15 bp, Homo sapiens
ttcaagactaggaca

SEQ ID NO: 818823 - DNA, 15 bp, Homo sapiens
tcaagactaggacat

SEQ ID NO: 818824 - DNA, 15 bp, Homo sapiens
caagactaggacatt

SEQ ID NO: 818825 - DNA, 15 bp, Homo sapiens
aagactaggacattg

SEQ ID NO: 818826 - DNA, 15 bp, Homo sapiens
agactaggacattgg

SEQ ID NO: 818827 - DNA, 15 bp, Homo sapiens
gactaggacattgga

SEQ ID NO: 818828 - DNA, 15 bp, Homo sapiens
actaggacattggaa

SEQ ID NO: 818829 - DNA, 15 bp, Homo sapiens
ctaggacattggaaa

SEQ ID NO: 818830 - DNA, 15 bp, Homo sapiens
taggacattggaaaa

SEQ ID NO: 818831 - DNA, 15 bp, Homo sapiens
aggacattggaaaag

SEQ ID NO: 818832 - DNA, 15 bp, Homo sapiens
ggacattggaaaaga

SEQ ID NO: 818833 - DNA, 15 bp, Homo sapiens
gacattggaaaagag

SEQ ID NO: 818834 - DNA, 15 bp, Homo sapiens
acattggaaaagaga

SEQ ID NO: 818835 - DNA, 15 bp, Homo sapiens
cattggaaaagagag

SEQ ID NO: 818836 - DNA, 15 bp, Homo sapiens
attggaaaagagaga

SEQ ID NO: 818837 - DNA, 15 bp, Homo sapiens
ttggaaaagagagag

SEQ ID NO: 818838 - DNA, 15 bp, Homo sapiens
tggaaaagagagaga

SEQ ID NO: 818839 - DNA, 15 bp, Homo sapiens
ggaaaagagagagat

SEQ ID NO: 818840 - DNA, 15 bp, Homo sapiens
gaaaagagagagata

SEQ ID NO: 818841 - DNA, 15 bp, Homo sapiens
aaaagagagagataa

SEQ ID NO: 818842 - DNA, 15 bp, Homo sapiens
aaagagagagataaa

SEQ ID NO: 818843 - DNA, 15 bp, Homo sapiens
aagagagagataaat

SEQ ID NO: 818844 - DNA, 15 bp, Homo sapiens
agagagagataaatc

SEQ ID NO: 818845 - DNA, 15 bp, Homo sapiens
gagagagataaatct

SEQ ID NO: 818846 - DNA, 15 bp, Homo sapiens
agagagataaatctc

SEQ ID NO: 818847 - DNA, 15 bp, Homo sapiens
gagagataaatctcc

SEQ ID NO: 818848 - DNA, 15 bp, Homo sapiens
agagataaatctccc

SEQ ID NO: 818849 - DNA, 15 bp, Homo sapiens
gagataaatctcccg

SEQ ID NO: 818850 - DNA, 15 bp, Homo sapiens
agataaatctcccgt

SEQ ID NO: 818851 - DNA, 15 bp, Homo sapiens
gataaatctcccgtt

SEQ ID NO: 818852 - DNA, 15 bp, Homo sapiens
ataaatctcccgttt

SEQ ID NO: 818853 - DNA, 15 bp, Homo sapiens
taaatctcccgtttt

SEQ ID NO: 818854 - DNA, 15 bp, Homo sapiens
aaatctcccgttttt

SEQ ID NO: 818855 - DNA, 15 bp, Homo sapiens
aatctcccgttttta

SEQ ID NO: 818856 - DNA, 15 bp, Homo sapiens
atctcccgtttttag

SEQ ID NO: 818857 - DNA, 15 bp, Homo sapiens
tctcccgtttttagg

SEQ ID NO: 818858 - DNA, 15 bp, Homo sapiens
ctcccgtttttaggt

SEQ ID NO: 818859 - DNA, 15 bp, Homo sapiens
tcccgtttttaggtt

SEQ ID NO: 818860 - DNA, 15 bp, Homo sapiens
cccgtttttaggttt

SEQ ID NO: 818861 - DNA, 15 bp, Homo sapiens
ccgtttttaggttta

SEQ ID NO: 818862 - DNA, 15 bp, Homo sapiens
cgtttttaggtttat

SEQ ID NO: 818863 - DNA, 15 bp, Homo sapiens
gtttttaggtttatg

SEQ ID NO: 818864 - DNA, 15 bp, Homo sapiens
tttttaggtttatgc

SEQ ID NO: 818865 - DNA, 15 bp, Homo sapiens
ttttaggtttatgct

SEQ ID NO: 818866 - DNA, 15 bp, Homo sapiens
tttaggtttatgctg

SEQ ID NO: 818867 - DNA, 15 bp, Homo sapiens
ttaggtttatgctga

SEQ ID NO: 818868 - DNA, 15 bp, Homo sapiens
taggtttatgctgag

SEQ ID NO: 818869 - DNA, 15 bp, Homo sapiens
aggtttatgctgagc

SEQ ID NO: 818870 - DNA, 15 bp, Homo sapiens
ggtttatgctgagca

SEQ ID NO: 818871 - DNA, 15 bp, Homo sapiens
gtttatgctgagcaa

SEQ ID NO: 818872 - DNA, 15 bp, Homo sapiens
tttatgctgagcaaa

SEQ ID NO: 818873 - DNA, 15 bp, Homo sapiens
ttatgctgagcaaag

SEQ ID NO: 818874 - DNA, 15 bp, Homo sapiens
tatgctgagcaaaga

SEQ ID NO: 818875 - DNA, 15 bp, Homo sapiens
atgctgagcaaagac

SEQ ID NO: 818876 - DNA, 15 bp, Homo sapiens
tgctgagcaaagact

SEQ ID NO: 818877 - DNA, 15 bp, Homo sapiens
gctgagcaaagacta

SEQ ID NO: 818878 - DNA, 15 bp, Homo sapiens
ctgagcaaagactaa

SEQ ID NO: 818879 - DNA, 15 bp, Homo sapiens
tgagcaaagactaat

SEQ ID NO: 818880 - DNA, 15 bp, Homo sapiens
gagcaaagactaatg

SEQ ID NO: 818881 - DNA, 15 bp, Homo sapiens
agcaaagactaatga

SEQ ID NO: 818882 - DNA, 15 bp, Homo sapiens
gcaaagactaatgac

SEQ ID NO: 818883 - DNA, 15 bp, Homo sapiens
caaagactaatgaca

SEQ ID NO: 818884 - DNA, 15 bp, Homo sapiens
aaagactaatgacaa

SEQ ID NO: 818885 - DNA, 15 bp, Homo sapiens
aagactaatgacaaa

SEQ ID NO: 818886 - DNA, 15 bp, Homo sapiens
agactaatgacaaat

SEQ ID NO: 818887 - DNA, 15 bp, Homo sapiens
gactaatgacaaata

SEQ ID NO: 818888 - DNA, 15 bp, Homo sapiens
actaatgacaaataa

SEQ ID NO: 818889 - DNA, 15 bp, Homo sapiens
ctaatgacaaataat

SEQ ID NO: 818890 - DNA, 15 bp, Homo sapiens
taatgacaaataatt

SEQ ID NO: 818891 - DNA, 15 bp, Homo sapiens
aatgacaaataatta

SEQ ID NO: 818892 - DNA, 15 bp, Homo sapiens
atgacaaataattag

SEQ ID NO: 818893 - DNA, 15 bp, Homo sapiens
tgacaaataattaga

SEQ ID NO: 818894 - DNA, 15 bp, Homo sapiens
gacaaataattagaa

SEQ ID NO: 818895 - DNA, 15 bp, Homo sapiens
acaaataattagaag

SEQ ID NO: 818896 - DNA, 15 bp, Homo sapiens
caaataattagaagc

SEQ ID NO: 818897 - DNA, 15 bp, Homo sapiens
aaataattagaagct

SEQ ID NO: 818898 - DNA, 15 bp, Homo sapiens
aataattagaagcta

SEQ ID NO: 818899 - DNA, 15 bp, Homo sapiens
ataattagaagctag

SEQ ID NO: 818900 - DNA, 15 bp, Homo sapiens
taattagaagctagg

SEQ ID NO: 818901 - DNA, 15 bp, Homo sapiens
aattagaagctagga

SEQ ID NO: 818902 - DNA, 15 bp, Homo sapiens
attagaagctaggac

SEQ ID NO: 818903 - DNA, 15 bp, Homo sapiens
ttagaagctaggacc

SEQ ID NO: 818904 - DNA, 15 bp, Homo sapiens
tagaagctaggacca

SEQ ID NO: 818905 - DNA, 15 bp, Homo sapiens
agaagctaggaccag

SEQ ID NO: 818906 - DNA, 15 bp, Homo sapiens
gaagctaggaccagt

SEQ ID NO: 818907 - DNA, 15 bp, Homo sapiens
aagctaggaccagtt

SEQ ID NO: 818908 - DNA, 15 bp, Homo sapiens
agctaggaccagttt

SEQ ID NO: 818909 - DNA, 15 bp, Homo sapiens
gctaggaccagtttt

SEQ ID NO: 818910 - DNA, 15 bp, Homo sapiens
ctaggaccagttttc

SEQ ID NO: 818911 - DNA, 15 bp, Homo sapiens
taggaccagttttcc

SEQ ID NO: 818912 - DNA, 15 bp, Homo sapiens
aggaccagttttcca

SEQ ID NO: 818913 - DNA, 15 bp, Homo sapiens
ggaccagttttccaa

SEQ ID NO: 818914 - DNA, 15 bp, Homo sapiens
gaccagttttccaag

SEQ ID NO: 818915 - DNA, 15 bp, Homo sapiens
accagttttccaagt

SEQ ID NO: 818916 - DNA, 15 bp, Homo sapiens
ccagttttccaagta

SEQ ID NO: 818917 - DNA, 15 bp, Homo sapiens
cagttttccaagtaa

SEQ ID NO: 818918 - DNA, 15 bp, Homo sapiens
agttttccaagtaac

SEQ ID NO: 818919 - DNA, 15 bp, Homo sapiens
gttttccaagtaaca

SEQ ID NO: 818920 - DNA, 15 bp, Homo sapiens
ttttccaagtaacaa

SEQ ID NO: 818921 - DNA, 15 bp, Homo sapiens
tttccaagtaacaac

SEQ ID NO: 818922 - DNA, 15 bp, Homo sapiens
ttccaagtaacaacc

SEQ ID NO: 818923 - DNA, 15 bp, Homo sapiens
tccaagtaacaacct

SEQ ID NO: 818924 - DNA, 15 bp, Homo sapiens
ccaagtaacaaccta

SEQ ID NO: 818925 - DNA, 15 bp, Homo sapiens
caagtaacaacctac

SEQ ID NO: 818926 - DNA, 15 bp, Homo sapiens
aagtaacaacctacc

SEQ ID NO: 818927 - DNA, 15 bp, Homo sapiens
agtaacaacctacct

SEQ ID NO: 818928 - DNA, 15 bp, Homo sapiens
gtaacaacctacctg

SEQ ID NO: 818929 - DNA, 15 bp, Homo sapiens
taacaacctacctga

SEQ ID NO: 818930 - DNA, 15 bp, Homo sapiens
aacaacctacctgat

SEQ ID NO: 818931 - DNA, 15 bp, Homo sapiens
acaacctacctgatc

SEQ ID NO: 818932 - DNA, 15 bp, Homo sapiens
caacctacctgatca

SEQ ID NO: 818933 - DNA, 15 bp, Homo sapiens
aacctacctgatcat

SEQ ID NO: 818934 - DNA, 15 bp, Homo sapiens
acctacctgatcatc

SEQ ID NO: 818935 - DNA, 15 bp, Homo sapiens
cctacctgatcatca

SEQ ID NO: 818936 - DNA, 15 bp, Homo sapiens
ctacctgatcatcag

SEQ ID NO: 818937 - DNA, 15 bp, Homo sapiens
tacctgatcatcagt

SEQ ID NO: 818938 - DNA, 15 bp, Homo sapiens
acctgatcatcagtc

SEQ ID NO: 818939 - DNA, 15 bp, Homo sapiens
cctgatcatcagtcc

SEQ ID NO: 818940 - DNA, 15 bp, Homo sapiens
ctgatcatcagtcct

SEQ ID NO: 818941 - DNA, 15 bp, Homo sapiens
tgatcatcagtccta

SEQ ID NO: 818942 - DNA, 15 bp, Homo sapiens
gatcatcagtcctac

SEQ ID NO: 818943 - DNA, 15 bp, Homo sapiens
atcatcagtcctaca

SEQ ID NO: 818944 - DNA, 15 bp, Homo sapiens
tcatcagtcctacat

SEQ ID NO: 818945 - DNA, 15 bp, Homo sapiens
catcagtcctacatg

SEQ ID NO: 818946 - DNA, 15 bp, Homo sapiens
atcagtcctacatgt

SEQ ID NO: 818947 - DNA, 15 bp, Homo sapiens
tcagtcctacatgtt

SEQ ID NO: 818948 - DNA, 15 bp, Homo sapiens
cagtcctacatgttc

SEQ ID NO: 818949 - DNA, 15 bp, Homo sapiens
agtcctacatgttcc

SEQ ID NO: 818950 - DNA, 15 bp, Homo sapiens
gtcctacatgttcct

SEQ ID NO: 818951 - DNA, 15 bp, Homo sapiens
tcctacatgttcctg

SEQ ID NO: 818952 - DNA, 15 bp, Homo sapiens
cctacatgttcctga

SEQ ID NO: 818953 - DNA, 15 bp, Homo sapiens
ctacatgttcctgac

SEQ ID NO: 818954 - DNA, 15 bp, Homo sapiens
tacatgttcctgact

SEQ ID NO: 818955 - DNA, 15 bp, Homo sapiens
acatgttcctgactc

SEQ ID NO: 818956 - DNA, 15 bp, Homo sapiens
catgttcctgactcc

SEQ ID NO: 818957 - DNA, 15 bp, Homo sapiens
atgttcctgactcca

SEQ ID NO: 818958 - DNA, 15 bp, Homo sapiens
tgttcctgactccac

SEQ ID NO: 818959 - DNA, 15 bp, Homo sapiens
gttcctgactccacc

SEQ ID NO: 818960 - DNA, 15 bp, Homo sapiens
ttcctgactccacct

SEQ ID NO: 818961 - DNA, 15 bp, Homo sapiens
tcctgactccacctg

SEQ ID NO: 818962 - DNA, 15 bp, Homo sapiens
cctgactccacctgg

SEQ ID NO: 818963 - DNA, 15 bp, Homo sapiens
ctgactccacctggg

SEQ ID NO: 818964 - DNA, 15 bp, Homo sapiens
tgactccacctgggt

SEQ ID NO: 818965 - DNA, 15 bp, Homo sapiens
gactccacctgggtg

SEQ ID NO: 818966 - DNA, 15 bp, Homo sapiens
actccacctgggtgt

SEQ ID NO: 818967 - DNA, 15 bp, Homo sapiens
ctccacctgggtgtg

SEQ ID NO: 818968 - DNA, 15 bp, Homo sapiens
tccacctgggtgtgc

SEQ ID NO: 818969 - DNA, 15 bp, Homo sapiens
ccacctgggtgtgca

SEQ ID NO: 818970 - DNA, 15 bp, Homo sapiens
cacctgggtgtgcac

SEQ ID NO: 818971 - DNA, 15 bp, Homo sapiens
acctgggtgtgcacc

SEQ ID NO: 818972 - DNA, 15 bp, Homo sapiens
cctgggtgtgcacca

SEQ ID NO: 818973 - DNA, 15 bp, Homo sapiens
ctgggtgtgcaccaa

SEQ ID NO: 818974 - DNA, 15 bp, Homo sapiens
tgggtgtgcaccaag

SEQ ID NO: 818975 - DNA, 15 bp, Homo sapiens
gggtgtgcaccaagt

SEQ ID NO: 818976 - DNA, 15 bp, Homo sapiens
ggtgtgcaccaagtg

SEQ ID NO: 818977 - DNA, 15 bp, Homo sapiens
gtgtgcaccaagtga

SEQ ID NO: 818978 - DNA, 15 bp, Homo sapiens
tgtgcaccaagtgac

SEQ ID NO: 818979 - DNA, 15 bp, Homo sapiens
gtgcaccaagtgacc

SEQ ID NO: 818980 - DNA, 15 bp, Homo sapiens
tgcaccaagtgacca

SEQ ID NO: 818981 - DNA, 15 bp, Homo sapiens
gcaccaagtgaccag

SEQ ID NO: 818982 - DNA, 15 bp, Homo sapiens
caccaagtgaccagg

SEQ ID NO: 818983 - DNA, 15 bp, Homo sapiens
accaagtgaccagga

SEQ ID NO: 818984 - DNA, 15 bp, Homo sapiens
ccaagtgaccaggat

SEQ ID NO: 818985 - DNA, 15 bp, Homo sapiens
caagtgaccaggatg

SEQ ID NO: 818986 - DNA, 15 bp, Homo sapiens
aagtgaccaggatga

SEQ ID NO: 818987 - DNA, 15 bp, Homo sapiens
agtgaccaggatgat

SEQ ID NO: 818988 - DNA, 15 bp, Homo sapiens
gtgaccaggatgatg

SEQ ID NO: 818989 - DNA, 15 bp, Homo sapiens
tgaccaggatgatga

SEQ ID NO: 818990 - DNA, 15 bp, Homo sapiens
gaccaggatgatgat

SEQ ID NO: 818991 - DNA, 15 bp, Homo sapiens
accaggatgatgata

SEQ ID NO: 818992 - DNA, 15 bp, Homo sapiens
ccaggatgatgatac

SEQ ID NO: 818993 - DNA, 15 bp, Homo sapiens
caggatgatgatacc

SEQ ID NO: 818994 - DNA, 15 bp, Homo sapiens
aggatgatgataccc

SEQ ID NO: 818995 - DNA, 15 bp, Homo sapiens
ggatgatgataccct

SEQ ID NO: 818996 - DNA, 15 bp, Homo sapiens
gatgatgataccctt

SEQ ID NO: 818997 - DNA, 15 bp, Homo sapiens
atgatgatacccttt

SEQ ID NO: 818998 - DNA, 15 bp, Homo sapiens
tgatgataccctttc

SEQ ID NO: 818999 - DNA, 15 bp, Homo sapiens
gatgataccctttca

SEQ ID NO: 819000 - DNA, 15 bp, Homo sapiens
atgataccctttcat

SEQ ID NO: 819001 - DNA, 15 bp, Homo sapiens
tgataccctttcatg

SEQ ID NO: 819002 - DNA, 15 bp, Homo sapiens
gataccctttcatgt

SEQ ID NO: 819003 - DNA, 15 bp, Homo sapiens
ataccctttcatgtc

SEQ ID NO: 819004 - DNA, 15 bp, Homo sapiens
taccctttcatgtct

SEQ ID NO: 819005 - DNA, 15 bp, Homo sapiens
accctttcatgtctt

SEQ ID NO: 819006 - DNA, 15 bp, Homo sapiens
ccctttcatgtcttt

SEQ ID NO: 819007 - DNA, 15 bp, Homo sapiens
cctttcatgtctttc

SEQ ID NO: 819008 - DNA, 15 bp, Homo sapiens
ctttcatgtctttct

SEQ ID NO: 819009 - DNA, 15 bp, Homo sapiens
tttcatgtctttctg

SEQ ID NO: 819010 - DNA, 15 bp, Homo sapiens
ttcatgtctttctga

SEQ ID NO: 819011 - DNA, 15 bp, Homo sapiens
tcatgtctttctgaa

SEQ ID NO: 819012 - DNA, 15 bp, Homo sapiens
catgtctttctgaat

SEQ ID NO: 819013 - DNA, 15 bp, Homo sapiens
atgtctttctgaata

SEQ ID NO: 819014 - DNA, 15 bp, Homo sapiens
tgtctttctgaataa

SEQ ID NO: 819015 - DNA, 15 bp, Homo sapiens
gtctttctgaataat

SEQ ID NO: 819016 - DNA, 15 bp, Homo sapiens
tctttctgaataatg

SEQ ID NO: 819017 - DNA, 15 bp, Homo sapiens
ctttctgaataatgt

SEQ ID NO: 819018 - DNA, 15 bp, Homo sapiens
tttctgaataatgtt

SEQ ID NO: 819019 - DNA, 15 bp, Homo sapiens
ttctgaataatgtta

SEQ ID NO: 819020 - DNA, 15 bp, Homo sapiens
tctgaataatgttac

SEQ ID NO: 819021 - DNA, 15 bp, Homo sapiens
ctgaataatgttacc

SEQ ID NO: 819022 - DNA, 15 bp, Homo sapiens
tgaataatgttacct

SEQ ID NO: 819023 - DNA, 15 bp, Homo sapiens
gaataatgttacctg

SEQ ID NO: 819024 - DNA, 15 bp, Homo sapiens
aataatgttacctga

SEQ ID NO: 819025 - DNA, 15 bp, Homo sapiens
ataatgttacctgat

SEQ ID NO: 819026 - DNA, 15 bp, Homo sapiens
taatgttacctgatt

SEQ ID NO: 819027 - DNA, 15 bp, Homo sapiens
aatgttacctgattt

SEQ ID NO: 819028 - DNA, 15 bp, Homo sapiens
atgttacctgatttg

SEQ ID NO: 819029 - DNA, 15 bp, Homo sapiens
tgttacctgatttga

SEQ ID NO: 819030 - DNA, 15 bp, Homo sapiens
gttacctgatttgat

SEQ ID NO: 819031 - DNA, 15 bp, Homo sapiens
ttacctgatttgatt

SEQ ID NO: 819032 - DNA, 15 bp, Homo sapiens
tacctgatttgattt

SEQ ID NO: 819033 - DNA, 15 bp, Homo sapiens
acctgatttgatttt

SEQ ID NO: 819034 - DNA, 15 bp, Homo sapiens
cctgatttgattttg

SEQ ID NO: 819035 - DNA, 15 bp, Homo sapiens
ctgatttgattttgc

SEQ ID NO: 819036 - DNA, 15 bp, Homo sapiens
tgatttgattttgct

SEQ ID NO: 819037 - DNA, 15 bp, Homo sapiens
gatttgattttgctt

SEQ ID NO: 819038 - DNA, 15 bp, Homo sapiens
atttgattttgctta

SEQ ID NO: 819039 - DNA, 15 bp, Homo sapiens
tttgattttgcttag

SEQ ID NO: 819040 - DNA, 15 bp, Homo sapiens
ttgattttgcttaga

SEQ ID NO: 819041 - DNA, 15 bp, Homo sapiens
tgattttgcttagat

SEQ ID NO: 819042 - DNA, 15 bp, Homo sapiens
gattttgcttagatc

SEQ ID NO: 819043 - DNA, 15 bp, Homo sapiens
attttgcttagatct

SEQ ID NO: 819044 - DNA, 15 bp, Homo sapiens
ttttgcttagatcta

SEQ ID NO: 819045 - DNA, 15 bp, Homo sapiens
tttgcttagatctaa

SEQ ID NO: 819046 - DNA, 15 bp, Homo sapiens
ttgcttagatctaac

SEQ ID NO: 819047 - DNA, 15 bp, Homo sapiens
tgcttagatctaaca

SEQ ID NO: 819048 - DNA, 15 bp, Homo sapiens
gcttagatctaacaa

SEQ ID NO: 819049 - DNA, 15 bp, Homo sapiens
cttagatctaacaaa

SEQ ID NO: 819050 - DNA, 15 bp, Homo sapiens
ttagatctaacaaat

SEQ ID NO: 819051 - DNA, 15 bp, Homo sapiens
tagatctaacaaata

SEQ ID NO: 819052 - DNA, 15 bp, Homo sapiens
agatctaacaaatat

SEQ ID NO: 819053 - DNA, 15 bp, Homo sapiens
gatctaacaaatatc

SEQ ID NO: 819054 - DNA, 15 bp, Homo sapiens
atctaacaaatatct

SEQ ID NO: 819055 - DNA, 15 bp, Homo sapiens
tctaacaaatatcta

SEQ ID NO: 819056 - DNA, 15 bp, Homo sapiens
ctaacaaatatctaa

SEQ ID NO: 819057 - DNA, 15 bp, Homo sapiens
taacaaatatctaaa

SEQ ID NO: 819058 - DNA, 15 bp, Homo sapiens
aacaaatatctaaat

SEQ ID NO: 819059 - DNA, 15 bp, Homo sapiens
acaaatatctaaata

SEQ ID NO: 819060 - DNA, 15 bp, Homo sapiens
caaatatctaaataa

SEQ ID NO: 819061 - DNA, 15 bp, Homo sapiens
aaatatctaaataaa

SEQ ID NO: 819062 - DNA, 15 bp, Homo sapiens
aatatctaaataaaa

SEQ ID NO: 819063 - DNA, 15 bp, Homo sapiens
atatctaaataaaaa

SEQ ID NO: 819064 - DNA, 15 bp, Homo sapiens
tatctaaataaaaag

SEQ ID NO: 819065 - DNA, 15 bp, Homo sapiens
atctaaataaaaaga

SEQ ID NO: 819066 - DNA, 15 bp, Homo sapiens
tctaaataaaaagat

SEQ ID NO: 819067 - DNA, 15 bp, Homo sapiens
ctaaataaaaagata

SEQ ID NO: 819068 - DNA, 15 bp, Homo sapiens
taaataaaaagatat

SEQ ID NO: 819069 - DNA, 15 bp, Homo sapiens
aaataaaaagatata

SEQ ID NO: 819070 - DNA, 15 bp, Homo sapiens
aataaaaagatatac

SEQ ID NO: 819071 - DNA, 15 bp, Homo sapiens
ataaaaagatatacc

SEQ ID NO: 819072 - DNA, 15 bp, Homo sapiens
taaaaagatatacct

SEQ ID NO: 819073 - DNA, 15 bp, Homo sapiens
aaaaagatatacctt

SEQ ID NO: 819074 - DNA, 15 bp, Homo sapiens
aaaagatataccttt

SEQ ID NO: 819075 - DNA, 15 bp, Homo sapiens
aaagatatacctttt

SEQ ID NO: 819076 - DNA, 15 bp, Homo sapiens
aagatatacctttta

SEQ ID NO: 819077 - DNA, 15 bp, Homo sapiens
agatataccttttaa

SEQ ID NO: 819078 - DNA, 15 bp, Homo sapiens
gatataccttttaaa

SEQ ID NO: 819079 - DNA, 15 bp, Homo sapiens
atataccttttaaaa

SEQ ID NO: 819080 - DNA, 15 bp, Homo sapiens
tataccttttaaaag

SEQ ID NO: 819081 - DNA, 15 bp, Homo sapiens
ataccttttaaaagc

SEQ ID NO: 819082 - DNA, 15 bp, Homo sapiens
taccttttaaaagca

SEQ ID NO: 819083 - DNA, 15 bp, Homo sapiens
accttttaaaagcac

SEQ ID NO: 819084 - DNA, 15 bp, Homo sapiens
ccttttaaaagcact

SEQ ID NO: 819085 - DNA, 15 bp, Homo sapiens
cttttaaaagcactt

SEQ ID NO: 819086 - DNA, 15 bp, Homo sapiens
ttttaaaagcacttc

SEQ ID NO: 819087 - DNA, 15 bp, Homo sapiens
tttaaaagcacttct

SEQ ID NO: 819088 - DNA, 15 bp, Homo sapiens
ttaaaagcacttctt

SEQ ID NO: 819089 - DNA, 15 bp, Homo sapiens
taaaagcacttcttg

SEQ ID NO: 819090 - DNA, 15 bp, Homo sapiens
aaaagcacttcttgg

SEQ ID NO: 819091 - DNA, 15 bp, Homo sapiens
aaagcacttcttggg

SEQ ID NO: 819092 - DNA, 15 bp, Homo sapiens
aagcacttcttgggc

SEQ ID NO: 819093 - DNA, 15 bp, Homo sapiens
agcacttcttgggct

SEQ ID NO: 819094 - DNA, 15 bp, Homo sapiens
gcacttcttgggcta

SEQ ID NO: 819095 - DNA, 15 bp, Homo sapiens
cacttcttgggctaa

SEQ ID NO: 819096 - DNA, 15 bp, Homo sapiens
acttcttgggctaaa

SEQ ID NO: 819097 - DNA, 15 bp, Homo sapiens
cttcttgggctaaat

SEQ ID NO: 819098 - DNA, 15 bp, Homo sapiens
ttcttgggctaaatg

SEQ ID NO: 819099 - DNA, 15 bp, Homo sapiens
tcttgggctaaatgc

SEQ ID NO: 819100 - DNA, 15 bp, Homo sapiens
cttgggctaaatgcc

SEQ ID NO: 819101 - DNA, 15 bp, Homo sapiens
ttgggctaaatgcct

SEQ ID NO: 819102 - DNA, 15 bp, Homo sapiens
tgggctaaatgcctc

SEQ ID NO: 819103 - DNA, 15 bp, Homo sapiens
gggctaaatgcctca

SEQ ID NO: 819104 - DNA, 15 bp, Homo sapiens
ggctaaatgcctcag

SEQ ID NO: 819105 - DNA, 15 bp, Homo sapiens
gctaaatgcctcagg

SEQ ID NO: 819106 - DNA, 15 bp, Homo sapiens
ctaaatgcctcagga

SEQ ID NO: 819107 - DNA, 15 bp, Homo sapiens
taaatgcctcaggaa

SEQ ID NO: 819108 - DNA, 15 bp, Homo sapiens
aaatgcctcaggaaa

SEQ ID NO: 819109 - DNA, 15 bp, Homo sapiens
aatgcctcaggaaat

SEQ ID NO: 819110 - DNA, 15 bp, Homo sapiens
atgcctcaggaaatg

SEQ ID NO: 819111 - DNA, 15 bp, Homo sapiens
tgcctcaggaaatgc

SEQ ID NO: 819112 - DNA, 15 bp, Homo sapiens
gcctcaggaaatgca

SEQ ID NO: 819113 - DNA, 15 bp, Homo sapiens
cctcaggaaatgcaa

SEQ ID NO: 819114 - DNA, 15 bp, Homo sapiens
ctcaggaaatgcaat

SEQ ID NO: 819115 - DNA, 15 bp, Homo sapiens
tcaggaaatgcaatt

SEQ ID NO: 819116 - DNA, 15 bp, Homo sapiens
caggaaatgcaatta

SEQ ID NO: 819117 - DNA, 15 bp, Homo sapiens
aggaaatgcaattat

SEQ ID NO: 819118 - DNA, 15 bp, Homo sapiens
ggaaatgcaattatt

SEQ ID NO: 819119 - DNA, 15 bp, Homo sapiens
gaaatgcaattattg

SEQ ID NO: 819120 - DNA, 15 bp, Homo sapiens
aaatgcaattattga

SEQ ID NO: 819121 - DNA, 15 bp, Homo sapiens
aatgcaattattgat

SEQ ID NO: 819122 - DNA, 15 bp, Homo sapiens
atgcaattattgatc

SEQ ID NO: 819123 - DNA, 15 bp, Homo sapiens
tgcaattattgatcg

SEQ ID NO: 819124 - DNA, 15 bp, Homo sapiens
gcaattattgatcgt

SEQ ID NO: 819125 - DNA, 15 bp, Homo sapiens
caattattgatcgtt

SEQ ID NO: 819126 - DNA, 15 bp, Homo sapiens
aattattgatcgttt

SEQ ID NO: 819127 - DNA, 15 bp, Homo sapiens
attattgatcgtttt

SEQ ID NO: 819128 - DNA, 15 bp, Homo sapiens
ttattgatcgttttc

SEQ ID NO: 819129 - DNA, 15 bp, Homo sapiens
tattgatcgttttca

SEQ ID NO: 819130 - DNA, 15 bp, Homo sapiens
attgatcgttttcat

SEQ ID NO: 819131 - DNA, 15 bp, Homo sapiens
ttgatcgttttcata

SEQ ID NO: 819132 - DNA, 15 bp, Homo sapiens
tgatcgttttcatag

SEQ ID NO: 819133 - DNA, 15 bp, Homo sapiens
gatcgttttcatagt

SEQ ID NO: 819134 - DNA, 15 bp, Homo sapiens
atcgttttcatagtg

SEQ ID NO: 819135 - DNA, 15 bp, Homo sapiens
tcgttttcatagtgt

SEQ ID NO: 819136 - DNA, 15 bp, Homo sapiens
cgttttcatagtgtt

SEQ ID NO: 819137 - DNA, 15 bp, Homo sapiens
gttttcatagtgttt

SEQ ID NO: 819138 - DNA, 15 bp, Homo sapiens
ttttcatagtgttta

SEQ ID NO: 819139 - DNA, 15 bp, Homo sapiens
tttcatagtgtttag

SEQ ID NO: 819140 - DNA, 15 bp, Homo sapiens
ttcatagtgtttagt

SEQ ID NO: 819141 - DNA, 15 bp, Homo sapiens
tcatagtgtttagta

SEQ ID NO: 819142 - DNA, 15 bp, Homo sapiens
catagtgtttagtaa

SEQ ID NO: 819143 - DNA, 15 bp, Homo sapiens
atagtgtttagtaaa

SEQ ID NO: 819144 - DNA, 15 bp, Homo sapiens
tagtgtttagtaaaa

SEQ ID NO: 819145 - DNA, 15 bp, Homo sapiens
agtgtttagtaaaac

SEQ ID NO: 819146 - DNA, 15 bp, Homo sapiens
gtgtttagtaaaact

SEQ ID NO: 819147 - DNA, 15 bp, Homo sapiens
tgtttagtaaaacta

SEQ ID NO: 819148 - DNA, 15 bp, Homo sapiens
gtttagtaaaactat

SEQ ID NO: 819149 - DNA, 15 bp, Homo sapiens
tttagtaaaactatt

SEQ ID NO: 819150 - DNA, 15 bp, Homo sapiens
ttagtaaaactatta

SEQ ID NO: 819151 - DNA, 15 bp, Homo sapiens
tagtaaaactattaa

SEQ ID NO: 819152 - DNA, 15 bp, Homo sapiens
agtaaaactattaat

SEQ ID NO: 819153 - DNA, 15 bp, Homo sapiens
gtaaaactattaatt

SEQ ID NO: 819154 - DNA, 15 bp, Homo sapiens
taaaactattaattc

SEQ ID NO: 819155 - DNA, 15 bp, Homo sapiens
aaaactattaattca

SEQ ID NO: 819156 - DNA, 15 bp, Homo sapiens
aaactattaattcaa

SEQ ID NO: 819157 - DNA, 15 bp, Homo sapiens
aactattaattcaac

SEQ ID NO: 819158 - DNA, 15 bp, Homo sapiens
actattaattcaact

SEQ ID NO: 819159 - DNA, 15 bp, Homo sapiens
ctattaattcaactt

SEQ ID NO: 819160 - DNA, 15 bp, Homo sapiens
tattaattcaacttt

SEQ ID NO: 819161 - DNA, 15 bp, Homo sapiens
attaattcaacttta

SEQ ID NO: 819162 - DNA, 15 bp, Homo sapiens
ttaattcaactttaa

SEQ ID NO: 819163 - DNA, 15 bp, Homo sapiens
taattcaactttaaa

SEQ ID NO: 819164 - DNA, 15 bp, Homo sapiens
aattcaactttaaaa

SEQ ID NO: 819165 - DNA, 15 bp, Homo sapiens
attcaactttaaaag

SEQ ID NO: 819166 - DNA, 15 bp, Homo sapiens
ttcaactttaaaaga

SEQ ID NO: 819167 - DNA, 15 bp, Homo sapiens
tcaactttaaaagaa

SEQ ID NO: 819168 - DNA, 15 bp, Homo sapiens
caactttaaaagaaa

SEQ ID NO: 819169 - DNA, 15 bp, Homo sapiens
aactttaaaagaaat

SEQ ID NO: 819170 - DNA, 15 bp, Homo sapiens
actttaaaagaaatg

SEQ ID NO: 819171 - DNA, 15 bp, Homo sapiens
ctttaaaagaaatga

SEQ ID NO: 819172 - DNA, 15 bp, Homo sapiens
tttaaaagaaatgaa

SEQ ID NO: 819173 - DNA, 15 bp, Homo sapiens
ttaaaagaaatgaaa

SEQ ID NO: 819174 - DNA, 15 bp, Homo sapiens
taaaagaaatgaaat

SEQ ID NO: 819175 - DNA, 15 bp, Homo sapiens
aaaagaaatgaaatg

SEQ ID NO: 819176 - DNA, 15 bp, Homo sapiens
aaagaaatgaaatgg

SEQ ID NO: 819177 - DNA, 15 bp, Homo sapiens
aagaaatgaaatggt

SEQ ID NO: 819178 - DNA, 15 bp, Homo sapiens
agaaatgaaatggta

SEQ ID NO: 819179 - DNA, 15 bp, Homo sapiens
gaaatgaaatggtac

SEQ ID NO: 819180 - DNA, 15 bp, Homo sapiens
aaatgaaatggtact

SEQ ID NO: 819181 - DNA, 15 bp, Homo sapiens
aatgaaatggtacta

SEQ ID NO: 819182 - DNA, 15 bp, Homo sapiens
atgaaatggtactac

SEQ ID NO: 819183 - DNA, 15 bp, Homo sapiens
tgaaatggtactact

SEQ ID NO: 819184 - DNA, 15 bp, Homo sapiens
gaaatggtactacta

SEQ ID NO: 819185 - DNA, 15 bp, Homo sapiens
aaatggtactactag

SEQ ID NO: 819186 - DNA, 15 bp, Homo sapiens
aatggtactactagg

SEQ ID NO: 819187 - DNA, 15 bp, Homo sapiens
atggtactactagga

SEQ ID NO: 819188 - DNA, 15 bp, Homo sapiens
tggtactactaggaa

SEQ ID NO: 819189 - DNA, 15 bp, Homo sapiens
ggtactactaggaag

SEQ ID NO: 819190 - DNA, 15 bp, Homo sapiens
gtactactaggaaga

SEQ ID NO: 819191 - DNA, 15 bp, Homo sapiens
tactactaggaagaa

SEQ ID NO: 819192 - DNA, 15 bp, Homo sapiens
actactaggaagaaa

SEQ ID NO: 819193 - DNA, 15 bp, Homo sapiens
ctactaggaagaaat

SEQ ID NO: 819194 - DNA, 15 bp, Homo sapiens
tactaggaagaaata

SEQ ID NO: 819195 - DNA, 15 bp, Homo sapiens
actaggaagaaatat

SEQ ID NO: 819196 - DNA, 15 bp, Homo sapiens
ctaggaagaaatatc

SEQ ID NO: 819197 - DNA, 15 bp, Homo sapiens
taggaagaaatatcg

SEQ ID NO: 819198 - DNA, 15 bp, Homo sapiens
aggaagaaatatcgc

SEQ ID NO: 819199 - DNA, 15 bp, Homo sapiens
ggaagaaatatcgca

SEQ ID NO: 819200 - DNA, 15 bp, Homo sapiens
gaagaaatatcgcat

SEQ ID NO: 819201 - DNA, 15 bp, Homo sapiens
aagaaatatcgcatt

SEQ ID NO: 819202 - DNA, 15 bp, Homo sapiens
agaaatatcgcattt

SEQ ID NO: 819203 - DNA, 15 bp, Homo sapiens
gaaatatcgcatttg

SEQ ID NO: 819204 - DNA, 15 bp, Homo sapiens
aaatatcgcatttgt

SEQ ID NO: 819205 - DNA, 15 bp, Homo sapiens
aatatcgcatttgtt

SEQ ID NO: 819206 - DNA, 15 bp, Homo sapiens
atatcgcatttgtta

SEQ ID NO: 819207 - DNA, 15 bp, Homo sapiens
tatcgcatttgttaa

SEQ ID NO: 819208 - DNA, 15 bp, Homo sapiens
atcgcatttgttaaa

SEQ ID NO: 819209 - DNA, 15 bp, Homo sapiens
tcgcatttgttaaag

SEQ ID NO: 819210 - DNA, 15 bp, Homo sapiens
cgcatttgttaaagc

SEQ ID NO: 819211 - DNA, 15 bp, Homo sapiens
gcatttgttaaagca

SEQ ID NO: 819212 - DNA, 15 bp, Homo sapiens
catttgttaaagcat

SEQ ID NO: 819213 - DNA, 15 bp, Homo sapiens
atttgttaaagcatg

SEQ ID NO: 819214 - DNA, 15 bp, Homo sapiens
tttgttaaagcatgt

SEQ ID NO: 819215 - DNA, 15 bp, Homo sapiens
ttgttaaagcatgtt

SEQ ID NO: 819216 - DNA, 15 bp, Homo sapiens
tgttaaagcatgttg

SEQ ID NO: 819217 - DNA, 15 bp, Homo sapiens
gttaaagcatgttgg

SEQ ID NO: 819218 - DNA, 15 bp, Homo sapiens
ttaaagcatgttggc

SEQ ID NO: 819219 - DNA, 15 bp, Homo sapiens
taaagcatgttggca

SEQ ID NO: 819220 - DNA, 15 bp, Homo sapiens
aaagcatgttggcac

SEQ ID NO: 819221 - DNA, 15 bp, Homo sapiens
aagcatgttggcact

SEQ ID NO: 819222 - DNA, 15 bp, Homo sapiens
agcatgttggcactg

SEQ ID NO: 819223 - DNA, 15 bp, Homo sapiens
gcatgttggcactgc

SEQ ID NO: 819224 - DNA, 15 bp, Homo sapiens
catgttggcactgca

SEQ ID NO: 819225 - DNA, 15 bp, Homo sapiens
atgttggcactgcat

SEQ ID NO: 819226 - DNA, 15 bp, Homo sapiens
tgttggcactgcatt

SEQ ID NO: 819227 - DNA, 15 bp, Homo sapiens
gttggcactgcattc

SEQ ID NO: 819228 - DNA, 15 bp, Homo sapiens
ttggcactgcattca

SEQ ID NO: 819229 - DNA, 15 bp, Homo sapiens
tggcactgcattcaa

SEQ ID NO: 819230 - DNA, 15 bp, Homo sapiens
ggcactgcattcaac

SEQ ID NO: 819231 - DNA, 15 bp, Homo sapiens
gcactgcattcaaca

SEQ ID NO: 819232 - DNA, 15 bp, Homo sapiens
cactgcattcaacat

SEQ ID NO: 819233 - DNA, 15 bp, Homo sapiens
actgcattcaacatc

SEQ ID NO: 819234 - DNA, 15 bp, Homo sapiens
ctgcattcaacatca

SEQ ID NO: 819235 - DNA, 15 bp, Homo sapiens
tgcattcaacatcat

SEQ ID NO: 819236 - DNA, 15 bp, Homo sapiens
gcattcaacatcatt

SEQ ID NO: 819237 - DNA, 15 bp, Homo sapiens
cattcaacatcattg

SEQ ID NO: 819238 - DNA, 15 bp, Homo sapiens
attcaacatcattga

SEQ ID NO: 819239 - DNA, 15 bp, Homo sapiens
ttcaacatcattgat

SEQ ID NO: 819240 - DNA, 15 bp, Homo sapiens
tcaacatcattgatt

SEQ ID NO: 819241 - DNA, 15 bp, Homo sapiens
caacatcattgatta

SEQ ID NO: 819242 - DNA, 15 bp, Homo sapiens
aacatcattgattag

SEQ ID NO: 819243 - DNA, 15 bp, Homo sapiens
acatcattgattagt

SEQ ID NO: 819244 - DNA, 15 bp, Homo sapiens
catcattgattagta

SEQ ID NO: 819245 - DNA, 15 bp, Homo sapiens
atcattgattagtaa

SEQ ID NO: 819246 - DNA, 15 bp, Homo sapiens
tcattgattagtaaa

SEQ ID NO: 819247 - DNA, 15 bp, Homo sapiens
cattgattagtaaat

SEQ ID NO: 819248 - DNA, 15 bp, Homo sapiens
attgattagtaaatt

SEQ ID NO: 819249 - DNA, 15 bp, Homo sapiens
ttgattagtaaattg

SEQ ID NO: 819250 - DNA, 15 bp, Homo sapiens
tgattagtaaattgt

SEQ ID NO: 819251 - DNA, 15 bp, Homo sapiens
gattagtaaattgtg

SEQ ID NO: 819252 - DNA, 15 bp, Homo sapiens
attagtaaattgtga

SEQ ID NO: 819253 - DNA, 15 bp, Homo sapiens
ttagtaaattgtgat

SEQ ID NO: 819254 - DNA, 15 bp, Homo sapiens
tagtaaattgtgatc

SEQ ID NO: 819255 - DNA, 15 bp, Homo sapiens
agtaaattgtgatca

SEQ ID NO: 819256 - DNA, 15 bp, Homo sapiens
gtaaattgtgatcat

SEQ ID NO: 819257 - DNA, 15 bp, Homo sapiens
taaattgtgatcatt

SEQ ID NO: 819258 - DNA, 15 bp, Homo sapiens
aaattgtgatcattt

SEQ ID NO: 819259 - DNA, 15 bp, Homo sapiens
aattgtgatcatttt

SEQ ID NO: 819260 - DNA, 15 bp, Homo sapiens
attgtgatcattttc

SEQ ID NO: 819261 - DNA, 15 bp, Homo sapiens
ttgtgatcattttct

SEQ ID NO: 819262 - DNA, 15 bp, Homo sapiens
tgtgatcattttctc

SEQ ID NO: 819263 - DNA, 15 bp, Homo sapiens
gtgatcattttctct

SEQ ID NO: 819264 - DNA, 15 bp, Homo sapiens
tgatcattttctctc

SEQ ID NO: 819265 - DNA, 15 bp, Homo sapiens
gatcattttctctcc

SEQ ID NO: 819266 - DNA, 15 bp, Homo sapiens
atcattttctctcct

SEQ ID NO: 819267 - DNA, 15 bp, Homo sapiens
tcattttctctcctt

SEQ ID NO: 819268 - DNA, 15 bp, Homo sapiens
cattttctctccttg

SEQ ID NO: 819269 - DNA, 15 bp, Homo sapiens
attttctctccttga

SEQ ID NO: 819270 - DNA, 15 bp, Homo sapiens
ttttctctccttgaa

SEQ ID NO: 819271 - DNA, 15 bp, Homo sapiens
tttctctccttgaaa

SEQ ID NO: 819272 - DNA, 15 bp, Homo sapiens
ttctctccttgaaat

SEQ ID NO: 819273 - DNA, 15 bp, Homo sapiens
tctctccttgaaata

SEQ ID NO: 819274 - DNA, 15 bp, Homo sapiens
ctctccttgaaatat

SEQ ID NO: 819275 - DNA, 15 bp, Homo sapiens
tctccttgaaatatt

SEQ ID NO: 819276 - DNA, 15 bp, Homo sapiens
ctccttgaaatattt

SEQ ID NO: 819277 - DNA, 15 bp, Homo sapiens
tccttgaaatatttt

SEQ ID NO: 819278 - DNA, 15 bp, Homo sapiens
ccttgaaatattttt

SEQ ID NO: 819279 - DNA, 15 bp, Homo sapiens
cttgaaatatttttt

SEQ ID NO: 819280 - DNA, 15 bp, Homo sapiens
ttgaaatattttttt

SEQ ID NO: 819281 - DNA, 15 bp, Homo sapiens
tgaaatatttttttt

SEQ ID NO: 819282 - DNA, 15 bp, Homo sapiens
gaaatattttttttt

SEQ ID NO: 819283 - DNA, 15 bp, Homo sapiens
aaatatttttttttt

SEQ ID NO: 819284 - DNA, 15 bp, Homo sapiens
aatattttttttttg

SEQ ID NO: 819285 - DNA, 15 bp, Homo sapiens
atattttttttttgc

SEQ ID NO: 819286 - DNA, 15 bp, Homo sapiens
tattttttttttgcc

SEQ ID NO: 819287 - DNA, 15 bp, Homo sapiens
attttttttttgcct

SEQ ID NO: 819288 - DNA, 15 bp, Homo sapiens
ttttttttttgcctt

SEQ ID NO: 819289 - DNA, 15 bp, Homo sapiens
tttttttttgcctta

SEQ ID NO: 819290 - DNA, 15 bp, Homo sapiens
ttttttttgccttag

SEQ ID NO: 819291 - DNA, 15 bp, Homo sapiens
tttttttgccttagg

SEQ ID NO: 819292 - DNA, 15 bp, Homo sapiens
ttttttgccttaggg

SEQ ID NO: 819293 - DNA, 15 bp, Homo sapiens
tttttgccttagggc

SEQ ID NO: 819294 - DNA, 15 bp, Homo sapiens
ttttgccttagggct

SEQ ID NO: 819295 - DNA, 15 bp, Homo sapiens
tttgccttagggctg

SEQ ID NO: 819296 - DNA, 15 bp, Homo sapiens
ttgccttagggctgt

SEQ ID NO: 819297 - DNA, 15 bp, Homo sapiens
tgccttagggctgtc

SEQ ID NO: 819298 - DNA, 15 bp, Homo sapiens
gccttagggctgtct

SEQ ID NO: 819299 - DNA, 15 bp, Homo sapiens
ccttagggctgtcta

SEQ ID NO: 819300 - DNA, 15 bp, Homo sapiens
cttagggctgtctaa

SEQ ID NO: 819301 - DNA, 15 bp, Homo sapiens
ttagggctgtctaat

SEQ ID NO: 819302 - DNA, 15 bp, Homo sapiens
tagggctgtctaatg

SEQ ID NO: 819303 - DNA, 15 bp, Homo sapiens
agggctgtctaatga

SEQ ID NO: 819304 - DNA, 15 bp, Homo sapiens
gggctgtctaatgac

SEQ ID NO: 819305 - DNA, 15 bp, Homo sapiens
ggctgtctaatgact

SEQ ID NO: 819306 - DNA, 15 bp, Homo sapiens
gctgtctaatgactt

SEQ ID NO: 819307 - DNA, 15 bp, Homo sapiens
ctgtctaatgactta

SEQ ID NO: 819308 - DNA, 15 bp, Homo sapiens
tgtctaatgacttac

SEQ ID NO: 819309 - DNA, 15 bp, Homo sapiens
gtctaatgacttact

SEQ ID NO: 819310 - DNA, 15 bp, Homo sapiens
tctaatgacttactt

SEQ ID NO: 819311 - DNA, 15 bp, Homo sapiens
ctaatgacttacttt

SEQ ID NO: 819312 - DNA, 15 bp, Homo sapiens
taatgacttacttta

SEQ ID NO: 819313 - DNA, 15 bp, Homo sapiens
aatgacttactttaa

SEQ ID NO: 819314 - DNA, 15 bp, Homo sapiens
atgacttactttaaa

SEQ ID NO: 819315 - DNA, 15 bp, Homo sapiens
tgacttactttaaaa

SEQ ID NO: 819316 - DNA, 15 bp, Homo sapiens
gacttactttaaaac

SEQ ID NO: 819317 - DNA, 15 bp, Homo sapiens
acttactttaaaact

SEQ ID NO: 819318 - DNA, 15 bp, Homo sapiens
cttactttaaaactg

SEQ ID NO: 819319 - DNA, 15 bp, Homo sapiens
ttactttaaaactgc

SEQ ID NO: 819320 - DNA, 15 bp, Homo sapiens
tactttaaaactgct

SEQ ID NO: 819321 - DNA, 15 bp, Homo sapiens
actttaaaactgctt

SEQ ID NO: 819322 - DNA, 15 bp, Homo sapiens
ctttaaaactgcttt

SEQ ID NO: 819323 - DNA, 15 bp, Homo sapiens
tttaaaactgctttc

SEQ ID NO: 819324 - DNA, 15 bp, Homo sapiens
ttaaaactgctttct

SEQ ID NO: 819325 - DNA, 15 bp, Homo sapiens
taaaactgctttctt

SEQ ID NO: 819326 - DNA, 15 bp, Homo sapiens
aaaactgctttcttt

SEQ ID NO: 819327 - DNA, 15 bp, Homo sapiens
aaactgctttctttt

SEQ ID NO: 819328 - DNA, 15 bp, Homo sapiens
aactgctttcttttc

SEQ ID NO: 819329 - DNA, 15 bp, Homo sapiens
actgctttcttttcc

SEQ ID NO: 819330 - DNA, 15 bp, Homo sapiens
ctgctttcttttcct

SEQ ID NO: 819331 - DNA, 15 bp, Homo sapiens
tgctttcttttcctt

SEQ ID NO: 819332 - DNA, 15 bp, Homo sapiens
gctttcttttcctta

SEQ ID NO: 819333 - DNA, 15 bp, Homo sapiens
ctttcttttccttat

SEQ ID NO: 819334 - DNA, 15 bp, Homo sapiens
tttcttttccttatt

SEQ ID NO: 819335 - DNA, 15 bp, Homo sapiens
ttcttttccttattt

SEQ ID NO: 819336 - DNA, 15 bp, Homo sapiens
tcttttccttatttt

SEQ ID NO: 819337 - DNA, 15 bp, Homo sapiens
cttttccttattttt

SEQ ID NO: 819338 - DNA, 15 bp, Homo sapiens
ttttccttatttttt

SEQ ID NO: 819339 - DNA, 15 bp, Homo sapiens
tttccttattttttt

SEQ ID NO: 819340 - DNA, 15 bp, Homo sapiens
ttccttatttttttt

SEQ ID NO: 819341 - DNA, 15 bp, Homo sapiens
tccttatttttttta

SEQ ID NO: 819342 - DNA, 15 bp, Homo sapiens
ccttattttttttaa

SEQ ID NO: 819343 - DNA, 15 bp, Homo sapiens
cttattttttttaaa

SEQ ID NO: 819344 - DNA, 15 bp, Homo sapiens
ttattttttttaaac

SEQ ID NO: 819345 - DNA, 15 bp, Homo sapiens
tattttttttaaact

SEQ ID NO: 819346 - DNA, 15 bp, Homo sapiens
attttttttaaactt

SEQ ID NO: 819347 - DNA, 15 bp, Homo sapiens
ttttttttaaacttg

SEQ ID NO: 819348 - DNA, 15 bp, Homo sapiens
tttttttaaacttgt

SEQ ID NO: 819349 - DNA, 15 bp, Homo sapiens
ttttttaaacttgta

SEQ ID NO: 819350 - DNA, 15 bp, Homo sapiens
tttttaaacttgtat

SEQ ID NO: 819351 - DNA, 15 bp, Homo sapiens
ttttaaacttgtata

SEQ ID NO: 819352 - DNA, 15 bp, Homo sapiens
tttaaacttgtatac

SEQ ID NO: 819353 - DNA, 15 bp, Homo sapiens
ttaaacttgtatact

SEQ ID NO: 819354 - DNA, 15 bp, Homo sapiens
taaacttgtatactt

SEQ ID NO: 819355 - DNA, 15 bp, Homo sapiens
aaacttgtatacttc

SEQ ID NO: 819356 - DNA, 15 bp, Homo sapiens
aacttgtatacttct

SEQ ID NO: 819357 - DNA, 15 bp, Homo sapiens
acttgtatacttctt

SEQ ID NO: 819358 - DNA, 15 bp, Homo sapiens
cttgtatacttcttt

SEQ ID NO: 819359 - DNA, 15 bp, Homo sapiens
ttgtatacttctttc

SEQ ID NO: 819360 - DNA, 15 bp, Homo sapiens
tgtatacttctttct

SEQ ID NO: 819361 - DNA, 15 bp, Homo sapiens
gtatacttctttctt

SEQ ID NO: 819362 - DNA, 15 bp, Homo sapiens
tatacttctttcttg

SEQ ID NO: 819363 - DNA, 15 bp, Homo sapiens
atacttctttcttgt

SEQ ID NO: 819364 - DNA, 15 bp, Homo sapiens
tacttctttcttgta

SEQ ID NO: 819365 - DNA, 15 bp, Homo sapiens
acttctttcttgtat

SEQ ID NO: 819366 - DNA, 15 bp, Homo sapiens
cttctttcttgtatt

SEQ ID NO: 819367 - DNA, 15 bp, Homo sapiens
ttctttcttgtattc

SEQ ID NO: 819368 - DNA, 15 bp, Homo sapiens
tctttcttgtattct

SEQ ID NO: 819369 - DNA, 15 bp, Homo sapiens
ctttcttgtattctc

SEQ ID NO: 819370 - DNA, 15 bp, Homo sapiens
tttcttgtattctca

SEQ ID NO: 819371 - DNA, 15 bp, Homo sapiens
ttcttgtattctcag

SEQ ID NO: 819372 - DNA, 15 bp, Homo sapiens
tcttgtattctcaga

SEQ ID NO: 819373 - DNA, 15 bp, Homo sapiens
cttgtattctcagaa

SEQ ID NO: 819374 - DNA, 15 bp, Homo sapiens
ttgtattctcagaat

SEQ ID NO: 819375 - DNA, 15 bp, Homo sapiens
tgtattctcagaatg

SEQ ID NO: 819376 - DNA, 15 bp, Homo sapiens
gtattctcagaatgg

SEQ ID NO: 819377 - DNA, 15 bp, Homo sapiens
tattctcagaatgga

SEQ ID NO: 819378 - DNA, 15 bp, Homo sapiens
attctcagaatggac

SEQ ID NO: 819379 - DNA, 15 bp, Homo sapiens
ttctcagaatggact

SEQ ID NO: 819380 - DNA, 15 bp, Homo sapiens
tctcagaatggactt

SEQ ID NO: 819381 - DNA, 15 bp, Homo sapiens
ctcagaatggacttt

SEQ ID NO: 819382 - DNA, 15 bp, Homo sapiens
tcagaatggactttt

SEQ ID NO: 819383 - DNA, 15 bp, Homo sapiens
cagaatggactttta

SEQ ID NO: 819384 - DNA, 15 bp, Homo sapiens
agaatggacttttat

SEQ ID NO: 819385 - DNA, 15 bp, Homo sapiens
gaatggacttttata

SEQ ID NO: 819386 - DNA, 15 bp, Homo sapiens
aatggacttttataa

SEQ ID NO: 819387 - DNA, 15 bp, Homo sapiens
atggacttttataaa

SEQ ID NO: 819388 - DNA, 15 bp, Homo sapiens
tggacttttataaaa

SEQ ID NO: 819389 - DNA, 15 bp, Homo sapiens
ggacttttataaaac

SEQ ID NO: 819390 - DNA, 15 bp, Homo sapiens
gacttttataaaaca

SEQ ID NO: 819391 - DNA, 15 bp, Homo sapiens
acttttataaaacac

SEQ ID NO: 819392 - DNA, 15 bp, Homo sapiens
cttttataaaacaca

SEQ ID NO: 819393 - DNA, 15 bp, Homo sapiens
ttttataaaacacaa

SEQ ID NO: 819394 - DNA, 15 bp, Homo sapiens
tttataaaacacaac

SEQ ID NO: 819395 - DNA, 15 bp, Homo sapiens
ttataaaacacaact

SEQ ID NO: 819396 - DNA, 15 bp, Homo sapiens
tataaaacacaactg

SEQ ID NO: 819397 - DNA, 15 bp, Homo sapiens
ataaaacacaactgt

SEQ ID NO: 819398 - DNA, 15 bp, Homo sapiens
taaaacacaactgtc

SEQ ID NO: 819399 - DNA, 15 bp, Homo sapiens
aaaacacaactgtca

SEQ ID NO: 819400 - DNA, 15 bp, Homo sapiens
aaacacaactgtcag

SEQ ID NO: 819401 - DNA, 15 bp, Homo sapiens
aacacaactgtcagg

SEQ ID NO: 819402 - DNA, 15 bp, Homo sapiens
acacaactgtcagga

SEQ ID NO: 819403 - DNA, 15 bp, Homo sapiens
cacaactgtcaggat

SEQ ID NO: 819404 - DNA, 15 bp, Homo sapiens
acaactgtcaggatc

SEQ ID NO: 819405 - DNA, 15 bp, Homo sapiens
caactgtcaggatct

SEQ ID NO: 819406 - DNA, 15 bp, Homo sapiens
aactgtcaggatctg

SEQ ID NO: 819407 - DNA, 15 bp, Homo sapiens
actgtcaggatctgt

SEQ ID NO: 819408 - DNA, 15 bp, Homo sapiens
ctgtcaggatctgtt

SEQ ID NO: 819409 - DNA, 15 bp, Homo sapiens
tgtcaggatctgttt

SEQ ID NO: 819410 - DNA, 15 bp, Homo sapiens
gtcaggatctgtttt

SEQ ID NO: 819411 - DNA, 15 bp, Homo sapiens
tcaggatctgttttc

SEQ ID NO: 819412 - DNA, 15 bp, Homo sapiens
caggatctgttttct

SEQ ID NO: 819413 - DNA, 15 bp, Homo sapiens
aggatctgttttctc

SEQ ID NO: 819414 - DNA, 15 bp, Homo sapiens
ggatctgttttctca

SEQ ID NO: 819415 - DNA, 15 bp, Homo sapiens
gatctgttttctcac

SEQ ID NO: 819416 - DNA, 15 bp, Homo sapiens
atctgttttctcact

SEQ ID NO: 819417 - DNA, 15 bp, Homo sapiens
tctgttttctcactg

SEQ ID NO: 819418 - DNA, 15 bp, Homo sapiens
ctgttttctcactgc

SEQ ID NO: 819419 - DNA, 15 bp, Homo sapiens
tgttttctcactgca

SEQ ID NO: 819420 - DNA, 15 bp, Homo sapiens
gttttctcactgcat

SEQ ID NO: 819421 - DNA, 15 bp, Homo sapiens
ttttctcactgcatt

SEQ ID NO: 819422 - DNA, 15 bp, Homo sapiens
tttctcactgcattt

SEQ ID NO: 819423 - DNA, 15 bp, Homo sapiens
ttctcactgcatttc

SEQ ID NO: 819424 - DNA, 15 bp, Homo sapiens
tctcactgcatttct

SEQ ID NO: 819425 - DNA, 15 bp, Homo sapiens
ctcactgcatttctt

SEQ ID NO: 819426 - DNA, 15 bp, Homo sapiens
tcactgcatttcttt

SEQ ID NO: 819427 - DNA, 15 bp, Homo sapiens
cactgcatttctttt

SEQ ID NO: 819428 - DNA, 15 bp, Homo sapiens
actgcatttcttttt

SEQ ID NO: 819429 - DNA, 15 bp, Homo sapiens
ctgcatttctttttt

SEQ ID NO: 819430 - DNA, 15 bp, Homo sapiens
tgcatttcttttttt

SEQ ID NO: 819431 - DNA, 15 bp, Homo sapiens
gcatttctttttttg

SEQ ID NO: 819432 - DNA, 15 bp, Homo sapiens
catttctttttttgt

SEQ ID NO: 819433 - DNA, 15 bp, Homo sapiens
atttctttttttgtc

SEQ ID NO: 819434 - DNA, 15 bp, Homo sapiens
tttctttttttgtca

SEQ ID NO: 819435 - DNA, 15 bp, Homo sapiens
ttctttttttgtcat

SEQ ID NO: 819436 - DNA, 15 bp, Homo sapiens
tctttttttgtcatt

SEQ ID NO: 819437 - DNA, 15 bp, Homo sapiens
ctttttttgtcattt

SEQ ID NO: 819438 - DNA, 15 bp, Homo sapiens
tttttttgtcatttc

SEQ ID NO: 819439 - DNA, 15 bp, Homo sapiens
ttttttgtcatttca

SEQ ID NO: 819440 - DNA, 15 bp, Homo sapiens
tttttgtcatttcaa

SEQ ID NO: 819441 - DNA, 15 bp, Homo sapiens
ttttgtcatttcaaa

SEQ ID NO: 819442 - DNA, 15 bp, Homo sapiens
tttgtcatttcaaat

SEQ ID NO: 819443 - DNA, 15 bp, Homo sapiens
ttgtcatttcaaata

SEQ ID NO: 819444 - DNA, 15 bp, Homo sapiens
tgtcatttcaaatag

SEQ ID NO: 819445 - DNA, 15 bp, Homo sapiens
gtcatttcaaataga

SEQ ID NO: 819446 - DNA, 15 bp, Homo sapiens
tcatttcaaatagat

SEQ ID NO: 819447 - DNA, 15 bp, Homo sapiens
catttcaaatagata

SEQ ID NO: 819448 - DNA, 15 bp, Homo sapiens
atttcaaatagatac

SEQ ID NO: 819449 - DNA, 15 bp, Homo sapiens
tttcaaatagatact

SEQ ID NO: 819450 - DNA, 15 bp, Homo sapiens
ttcaaatagatactt

SEQ ID NO: 819451 - DNA, 15 bp, Homo sapiens
tcaaatagatacttt

SEQ ID NO: 819452 - DNA, 15 bp, Homo sapiens
caaatagatactttg

SEQ ID NO: 819453 - DNA, 15 bp, Homo sapiens
aaatagatactttgc

SEQ ID NO: 819454 - DNA, 15 bp, Homo sapiens
aatagatactttgca

SEQ ID NO: 819455 - DNA, 15 bp, Homo sapiens
atagatactttgcat

SEQ ID NO: 819456 - DNA, 15 bp, Homo sapiens
tagatactttgcatt

SEQ ID NO: 819457 - DNA, 15 bp, Homo sapiens
agatactttgcattt

SEQ ID NO: 819458 - DNA, 15 bp, Homo sapiens
gatactttgcatttt

SEQ ID NO: 819459 - DNA, 15 bp, Homo sapiens
atactttgcatttta

SEQ ID NO: 819460 - DNA, 15 bp, Homo sapiens
tactttgcattttag

SEQ ID NO: 819461 - DNA, 15 bp, Homo sapiens
actttgcattttaga

SEQ ID NO: 819462 - DNA, 15 bp, Homo sapiens
ctttgcattttagac

SEQ ID NO: 819463 - DNA, 15 bp, Homo sapiens
tttgcattttagaca

SEQ ID NO: 819464 - DNA, 15 bp, Homo sapiens
ttgcattttagacat

SEQ ID NO: 819465 - DNA, 15 bp, Homo sapiens
tgcattttagacatg

SEQ ID NO: 819466 - DNA, 15 bp, Homo sapiens
gcattttagacatgc

SEQ ID NO: 819467 - DNA, 15 bp, Homo sapiens
cattttagacatgcc

SEQ ID NO: 819468 - DNA, 15 bp, Homo sapiens
attttagacatgcct

SEQ ID NO: 819469 - DNA, 15 bp, Homo sapiens
ttttagacatgcctt

SEQ ID NO: 819470 - DNA, 15 bp, Homo sapiens
tttagacatgccttg

SEQ ID NO: 819471 - DNA, 15 bp, Homo sapiens
ttagacatgccttgg

SEQ ID NO: 819472 - DNA, 15 bp, Homo sapiens
tagacatgccttggt

SEQ ID NO: 819473 - DNA, 15 bp, Homo sapiens
agacatgccttggtt

SEQ ID NO: 819474 - DNA, 15 bp, Homo sapiens
gacatgccttggttg

SEQ ID NO: 819475 - DNA, 15 bp, Homo sapiens
acatgccttggttgt

SEQ ID NO: 819476 - DNA, 15 bp, Homo sapiens
catgccttggttgta

SEQ ID NO: 819477 - DNA, 15 bp, Homo sapiens
atgccttggttgtaa

SEQ ID NO: 819478 - DNA, 15 bp, Homo sapiens
tgccttggttgtaag

SEQ ID NO: 819479 - DNA, 15 bp, Homo sapiens
gccttggttgtaagc

SEQ ID NO: 819480 - DNA, 15 bp, Homo sapiens
ccttggttgtaagct

SEQ ID NO: 819481 - DNA, 15 bp, Homo sapiens
cttggttgtaagctg

SEQ ID NO: 819482 - DNA, 15 bp, Homo sapiens
ttggttgtaagctga

SEQ ID NO: 819483 - DNA, 15 bp, Homo sapiens
tggttgtaagctgag

SEQ ID NO: 819484 - DNA, 15 bp, Homo sapiens
ggttgtaagctgaga

SEQ ID NO: 819485 - DNA, 15 bp, Homo sapiens
gttgtaagctgagaa

SEQ ID NO: 819486 - DNA, 15 bp, Homo sapiens
ttgtaagctgagaaa

SEQ ID NO: 819487 - DNA, 15 bp, Homo sapiens
tgtaagctgagaaaa

SEQ ID NO: 819488 - DNA, 15 bp, Homo sapiens
gtaagctgagaaaaa

SEQ ID NO: 819489 - DNA, 15 bp, Homo sapiens
taagctgagaaaaat

SEQ ID NO: 819490 - DNA, 15 bp, Homo sapiens
aagctgagaaaaatg

SEQ ID NO: 819491 - DNA, 15 bp, Homo sapiens
agctgagaaaaatga

SEQ ID NO: 819492 - DNA, 15 bp, Homo sapiens
gctgagaaaaatgaa

SEQ ID NO: 819493 - DNA, 15 bp, Homo sapiens
ctgagaaaaatgaaa

SEQ ID NO: 819494 - DNA, 15 bp, Homo sapiens
tgagaaaaatgaaag

SEQ ID NO: 819495 - DNA, 15 bp, Homo sapiens
gagaaaaatgaaagg

SEQ ID NO: 819496 - DNA, 15 bp, Homo sapiens
aatgaaaggcgaggc

SEQ ID NO: 819497 - DNA, 15 bp, Homo sapiens
atgaaaggcgaggca

SEQ ID NO: 819498 - DNA, 15 bp, Homo sapiens
tgaaaggcgaggcat

SEQ ID NO: 819499 - DNA, 15 bp, Homo sapiens
gaaaggcgaggcatt

SEQ ID NO: 819500 - DNA, 15 bp, Homo sapiens
aaaggcgaggcattc

SEQ ID NO: 819501 - DNA, 15 bp, Homo sapiens
aaggcgaggcattcc

SEQ ID NO: 819502 - DNA, 15 bp, Homo sapiens
aggcgaggcattcca

SEQ ID NO: 819503 - DNA, 15 bp, Homo sapiens
ggcgaggcattccaa

SEQ ID NO: 819504 - DNA, 15 bp, Homo sapiens
gcgaggcattccaag

SEQ ID NO: 819505 - DNA, 15 bp, Homo sapiens
cgaggcattccaagc

SEQ ID NO: 819506 - DNA, 15 bp, Homo sapiens
gaggcattccaagct

SEQ ID NO: 819507 - DNA, 15 bp, Homo sapiens
aggcattccaagctg

SEQ ID NO: 819508 - DNA, 15 bp, Homo sapiens
ggcattccaagctgt

SEQ ID NO: 819509 - DNA, 15 bp, Homo sapiens
gcattccaagctgtg

SEQ ID NO: 819510 - DNA, 15 bp, Homo sapiens
cattccaagctgtga

SEQ ID NO: 819511 - DNA, 15 bp, Homo sapiens
attccaagctgtgat

SEQ ID NO: 819512 - DNA, 15 bp, Homo sapiens
ttccaagctgtgata

SEQ ID NO: 819513 - DNA, 15 bp, Homo sapiens
tccaagctgtgataa

SEQ ID NO: 819514 - DNA, 15 bp, Homo sapiens
ccaagctgtgataat

SEQ ID NO: 819515 - DNA, 15 bp, Homo sapiens
caagctgtgataatc

SEQ ID NO: 819516 - DNA, 15 bp, Homo sapiens
aagctgtgataatcc

SEQ ID NO: 819517 - DNA, 15 bp, Homo sapiens
agctgtgataatcct

SEQ ID NO: 819518 - DNA, 15 bp, Homo sapiens
gctgtgataatccta

SEQ ID NO: 819519 - DNA, 15 bp, Homo sapiens
ctgtgataatcctag

SEQ ID NO: 819520 - DNA, 15 bp, Homo sapiens
tgtgataatcctagg

SEQ ID NO: 819521 - DNA, 15 bp, Homo sapiens
gtgataatcctaggg

SEQ ID NO: 819522 - DNA, 15 bp, Homo sapiens
tgataatcctagggt

SEQ ID NO: 819523 - DNA, 15 bp, Homo sapiens
gataatcctagggta

SEQ ID NO: 819524 - DNA, 15 bp, Homo sapiens
ataatcctagggtag

SEQ ID NO: 819525 - DNA, 15 bp, Homo sapiens
taatcctagggtagg

SEQ ID NO: 819526 - DNA, 15 bp, Homo sapiens
aatcctagggtagga

SEQ ID NO: 819527 - DNA, 15 bp, Homo sapiens
atcctagggtaggaa

SEQ ID NO: 819528 - DNA, 15 bp, Homo sapiens
tcctagggtaggaat

SEQ ID NO: 819529 - DNA, 15 bp, Homo sapiens
cctagggtaggaata

SEQ ID NO: 819530 - DNA, 15 bp, Homo sapiens
ctagggtaggaataa

SEQ ID NO: 819531 - DNA, 15 bp, Homo sapiens
tagggtaggaataac

SEQ ID NO: 819532 - DNA, 15 bp, Homo sapiens
agggtaggaataaca

SEQ ID NO: 819533 - DNA, 15 bp, Homo sapiens
gggtaggaataacag

SEQ ID NO: 819534 - DNA, 15 bp, Homo sapiens
ggtaggaataacagt

SEQ ID NO: 819535 - DNA, 15 bp, Homo sapiens
gtaggaataacagtt

SEQ ID NO: 819536 - DNA, 15 bp, Homo sapiens
taggaataacagttc

SEQ ID NO: 819537 - DNA, 15 bp, Homo sapiens
aggaataacagttcc

SEQ ID NO: 819538 - DNA, 15 bp, Homo sapiens
ggaataacagttcct

SEQ ID NO: 819539 - DNA, 15 bp, Homo sapiens
gaataacagttccta

SEQ ID NO: 819540 - DNA, 15 bp, Homo sapiens
aataacagttcctag

SEQ ID NO: 819541 - DNA, 15 bp, Homo sapiens
ataacagttcctaga

SEQ ID NO: 819542 - DNA, 15 bp, Homo sapiens
taacagttcctagac

SEQ ID NO: 819543 - DNA, 15 bp, Homo sapiens
aacagttcctagaca

SEQ ID NO: 819544 - DNA, 15 bp, Homo sapiens
acagttcctagacaa

SEQ ID NO: 819545 - DNA, 15 bp, Homo sapiens
cagttcctagacaat

SEQ ID NO: 819546 - DNA, 15 bp, Homo sapiens
agttcctagacaatt

SEQ ID NO: 819547 - DNA, 15 bp, Homo sapiens
gttcctagacaattc

SEQ ID NO: 819548 - DNA, 15 bp, Homo sapiens
ttcctagacaattct

SEQ ID NO: 819549 - DNA, 15 bp, Homo sapiens
tcctagacaattctt

SEQ ID NO: 819550 - DNA, 15 bp, Homo sapiens
cctagacaattcttg

SEQ ID NO: 819551 - DNA, 15 bp, Homo sapiens
ctagacaattcttga

SEQ ID NO: 819552 - DNA, 15 bp, Homo sapiens
tagacaattcttgat

SEQ ID NO: 819553 - DNA, 15 bp, Homo sapiens
agacaattcttgatg

SEQ ID NO: 819554 - DNA, 15 bp, Homo sapiens
gacaattcttgatga

SEQ ID NO: 819555 - DNA, 15 bp, Homo sapiens
acaattcttgatgat

SEQ ID NO: 819556 - DNA, 15 bp, Homo sapiens
caattcttgatgata

SEQ ID NO: 819557 - DNA, 15 bp, Homo sapiens
aattcttgatgatac

SEQ ID NO: 819558 - DNA, 15 bp, Homo sapiens
attcttgatgatact

SEQ ID NO: 819559 - DNA, 15 bp, Homo sapiens
ttcttgatgatacta

SEQ ID NO: 819560 - DNA, 15 bp, Homo sapiens
tcttgatgatactag

SEQ ID NO: 819561 - DNA, 15 bp, Homo sapiens
cttgatgatactagc

SEQ ID NO: 819562 - DNA, 15 bp, Homo sapiens
ttgatgatactagct

SEQ ID NO: 819563 - DNA, 15 bp, Homo sapiens
tgatgatactagctt

SEQ ID NO: 819564 - DNA, 15 bp, Homo sapiens
gatgatactagcttg

SEQ ID NO: 819565 - DNA, 15 bp, Homo sapiens
atgatactagcttgt

SEQ ID NO: 819566 - DNA, 15 bp, Homo sapiens
tgatactagcttgtc

SEQ ID NO: 819567 - DNA, 15 bp, Homo sapiens
gatactagcttgtca

SEQ ID NO: 819568 - DNA, 15 bp, Homo sapiens
atactagcttgtcag

SEQ ID NO: 819569 - DNA, 15 bp, Homo sapiens
tactagcttgtcagc

SEQ ID NO: 819570 - DNA, 15 bp, Homo sapiens
actagcttgtcagca

SEQ ID NO: 819571 - DNA, 15 bp, Homo sapiens
ctagcttgtcagcat

SEQ ID NO: 819572 - DNA, 15 bp, Homo sapiens
tagcttgtcagcatc

SEQ ID NO: 819573 - DNA, 15 bp, Homo sapiens
agcttgtcagcatcc

SEQ ID NO: 819574 - DNA, 15 bp, Homo sapiens
gcttgtcagcatccc

SEQ ID NO: 819575 - DNA, 15 bp, Homo sapiens
cttgtcagcatccct

SEQ ID NO: 819576 - DNA, 15 bp, Homo sapiens
ttgtcagcatccctt

SEQ ID NO: 819577 - DNA, 15 bp, Homo sapiens
tgtcagcatccctta

SEQ ID NO: 819578 - DNA, 15 bp, Homo sapiens
gtcagcatcccttag

SEQ ID NO: 819579 - DNA, 15 bp, Homo sapiens
tcagcatcccttagc

SEQ ID NO: 819580 - DNA, 15 bp, Homo sapiens
cagcatcccttagcc

SEQ ID NO: 819581 - DNA, 15 bp, Homo sapiens
agcatcccttagccc

SEQ ID NO: 819582 - DNA, 15 bp, Homo sapiens
gcatcccttagccca

SEQ ID NO: 819583 - DNA, 15 bp, Homo sapiens
catcccttagcccaa

SEQ ID NO: 819584 - DNA, 15 bp, Homo sapiens
atcccttagcccaag

SEQ ID NO: 819585 - DNA, 15 bp, Homo sapiens
tcccttagcccaaga

SEQ ID NO: 819586 - DNA, 15 bp, Homo sapiens
cccttagcccaagag

SEQ ID NO: 819587 - DNA, 15 bp, Homo sapiens
ccttagcccaagagt

SEQ ID NO: 819588 - DNA, 15 bp, Homo sapiens
cttagcccaagagta

SEQ ID NO: 819589 - DNA, 15 bp, Homo sapiens
ttagcccaagagtag

SEQ ID NO: 819590 - DNA, 15 bp, Homo sapiens
tagcccaagagtagg

SEQ ID NO: 819591 - DNA, 15 bp, Homo sapiens
agcccaagagtaggc

SEQ ID NO: 819592 - DNA, 15 bp, Homo sapiens
gcccaagagtaggca

SEQ ID NO: 819593 - DNA, 15 bp, Homo sapiens
cccaagagtaggcac

SEQ ID NO: 819594 - DNA, 15 bp, Homo sapiens
ccaagagtaggcact

SEQ ID NO: 819595 - DNA, 15 bp, Homo sapiens
caagagtaggcacta

SEQ ID NO: 819596 - DNA, 15 bp, Homo sapiens
aagagtaggcactaa

SEQ ID NO: 819597 - DNA, 15 bp, Homo sapiens
agagtaggcactaag

SEQ ID NO: 819598 - DNA, 15 bp, Homo sapiens
gagtaggcactaagc

SEQ ID NO: 819599 - DNA, 15 bp, Homo sapiens
agtaggcactaagca

SEQ ID NO: 819600 - DNA, 15 bp, Homo sapiens
gtaggcactaagcag

SEQ ID NO: 819601 - DNA, 15 bp, Homo sapiens
taggcactaagcagt

SEQ ID NO: 819602 - DNA, 15 bp, Homo sapiens
aggcactaagcagtc

SEQ ID NO: 819603 - DNA, 15 bp, Homo sapiens
ggcactaagcagtca

SEQ ID NO: 819604 - DNA, 15 bp, Homo sapiens
gcactaagcagtcag

SEQ ID NO: 819605 - DNA, 15 bp, Homo sapiens
cactaagcagtcaga

SEQ ID NO: 819606 - DNA, 15 bp, Homo sapiens
actaagcagtcagaa

SEQ ID NO: 819607 - DNA, 15 bp, Homo sapiens
ctaagcagtcagaat

SEQ ID NO: 819608 - DNA, 15 bp, Homo sapiens
taagcagtcagaatg

SEQ ID NO: 819609 - DNA, 15 bp, Homo sapiens
aagcagtcagaatga

SEQ ID NO: 819610 - DNA, 15 bp, Homo sapiens
agcagtcagaatgaa

SEQ ID NO: 819611 - DNA, 15 bp, Homo sapiens
gcagtcagaatgaaa

SEQ ID NO: 819612 - DNA, 15 bp, Homo sapiens
cagtcagaatgaaac

SEQ ID NO: 819613 - DNA, 15 bp, Homo sapiens
agtcagaatgaaaca

SEQ ID NO: 819614 - DNA, 15 bp, Homo sapiens
gtcagaatgaaacaa

SEQ ID NO: 819615 - DNA, 15 bp, Homo sapiens
tcagaatgaaacaaa

SEQ ID NO: 819616 - DNA, 15 bp, Homo sapiens
cagaatgaaacaaag

SEQ ID NO: 819617 - DNA, 15 bp, Homo sapiens
agaatgaaacaaagc

SEQ ID NO: 819618 - DNA, 15 bp, Homo sapiens
gaatgaaacaaagcc

SEQ ID NO: 819619 - DNA, 15 bp, Homo sapiens
aatgaaacaaagccg

SEQ ID NO: 819620 - DNA, 15 bp, Homo sapiens
atgaaacaaagccga

SEQ ID NO: 819621 - DNA, 15 bp, Homo sapiens
tgaaacaaagccgaa

SEQ ID NO: 819622 - DNA, 15 bp, Homo sapiens
gaaacaaagccgaat

SEQ ID NO: 819623 - DNA, 15 bp, Homo sapiens
aaacaaagccgaatg

SEQ ID NO: 819624 - DNA, 15 bp, Homo sapiens
aacaaagccgaatgc

SEQ ID NO: 819625 - DNA, 15 bp, Homo sapiens
acaaagccgaatgct

SEQ ID NO: 819626 - DNA, 15 bp, Homo sapiens
caaagccgaatgctt

SEQ ID NO: 819627 - DNA, 15 bp, Homo sapiens
aaagccgaatgcttc

SEQ ID NO: 819628 - DNA, 15 bp, Homo sapiens
aagccgaatgcttct

SEQ ID NO: 819629 - DNA, 15 bp, Homo sapiens
agccgaatgcttctt

SEQ ID NO: 819630 - DNA, 15 bp, Homo sapiens
gccgaatgcttctta

SEQ ID NO: 819631 - DNA, 15 bp, Homo sapiens
ccgaatgcttcttat

SEQ ID NO: 819632 - DNA, 15 bp, Homo sapiens
cgaatgcttcttatc

SEQ ID NO: 819633 - DNA, 15 bp, Homo sapiens
gaatgcttcttatct

SEQ ID NO: 819634 - DNA, 15 bp, Homo sapiens
aatgcttcttatctt

SEQ ID NO: 819635 - DNA, 15 bp, Homo sapiens
atgcttcttatctta

SEQ ID NO: 819636 - DNA, 15 bp, Homo sapiens
tgcttcttatcttat

SEQ ID NO: 819637 - DNA, 15 bp, Homo sapiens
gcttcttatcttatt

SEQ ID NO: 819638 - DNA, 15 bp, Homo sapiens
cttcttatcttattt

SEQ ID NO: 819639 - DNA, 15 bp, Homo sapiens
ttcttatcttatttt

SEQ ID NO: 819640 - DNA, 15 bp, Homo sapiens
tcttatcttattttt

SEQ ID NO: 819641 - DNA, 15 bp, Homo sapiens
cttatcttattttta

SEQ ID NO: 819642 - DNA, 15 bp, Homo sapiens
ttatcttatttttag

SEQ ID NO: 819643 - DNA, 15 bp, Homo sapiens
tatcttatttttagg

SEQ ID NO: 819644 - DNA, 15 bp, Homo sapiens
atcttatttttaggt

SEQ ID NO: 819645 - DNA, 15 bp, Homo sapiens
tcttatttttaggtt

SEQ ID NO: 819646 - DNA, 15 bp, Homo sapiens
cttatttttaggttt

SEQ ID NO: 819647 - DNA, 15 bp, Homo sapiens
ttatttttaggtttt

SEQ ID NO: 819648 - DNA, 15 bp, Homo sapiens
tatttttaggttttc

SEQ ID NO: 819649 - DNA, 15 bp, Homo sapiens
atttttaggttttct

SEQ ID NO: 819650 - DNA, 15 bp, Homo sapiens
tttttaggttttctt

SEQ ID NO: 819651 - DNA, 15 bp, Homo sapiens
ttttaggttttcttc

SEQ ID NO: 819652 - DNA, 15 bp, Homo sapiens
tttaggttttcttca

SEQ ID NO: 819653 - DNA, 15 bp, Homo sapiens
ttaggttttcttcat

SEQ ID NO: 819654 - DNA, 15 bp, Homo sapiens
taggttttcttcatg

SEQ ID NO: 819655 - DNA, 15 bp, Homo sapiens
aggttttcttcatga

SEQ ID NO: 819656 - DNA, 15 bp, Homo sapiens
ggttttcttcatgaa

SEQ ID NO: 819657 - DNA, 15 bp, Homo sapiens
gttttcttcatgaaa

SEQ ID NO: 819658 - DNA, 15 bp, Homo sapiens
ttttcttcatgaaat

SEQ ID NO: 819659 - DNA, 15 bp, Homo sapiens
tttcttcatgaaatc

SEQ ID NO: 819660 - DNA, 15 bp, Homo sapiens
ttcttcatgaaatct

SEQ ID NO: 819661 - DNA, 15 bp, Homo sapiens
tcttcatgaaatctg

SEQ ID NO: 819662 - DNA, 15 bp, Homo sapiens
cttcatgaaatctga

SEQ ID NO: 819663 - DNA, 15 bp, Homo sapiens
ttcatgaaatctgat

SEQ ID NO: 819664 - DNA, 15 bp, Homo sapiens
tcatgaaatctgatc

SEQ ID NO: 819665 - DNA, 15 bp, Homo sapiens
catgaaatctgatct

SEQ ID NO: 819666 - DNA, 15 bp, Homo sapiens
atgaaatctgatctt

SEQ ID NO: 819667 - DNA, 15 bp, Homo sapiens
tgaaatctgatcttc

SEQ ID NO: 819668 - DNA, 15 bp, Homo sapiens
gaaatctgatcttct

SEQ ID NO: 819669 - DNA, 15 bp, Homo sapiens
aaatctgatcttcta

SEQ ID NO: 819670 - DNA, 15 bp, Homo sapiens
aatctgatcttctac

SEQ ID NO: 819671 - DNA, 15 bp, Homo sapiens
atctgatcttctaca

SEQ ID NO: 819672 - DNA, 15 bp, Homo sapiens
tctgatcttctacaa

SEQ ID NO: 819673 - DNA, 15 bp, Homo sapiens
ctgatcttctacaat

SEQ ID NO: 819674 - DNA, 15 bp, Homo sapiens
tgatcttctacaatc

SEQ ID NO: 819675 - DNA, 15 bp, Homo sapiens
gatcttctacaatct

SEQ ID NO: 819676 - DNA, 15 bp, Homo sapiens
atcttctacaatctg

SEQ ID NO: 819677 - DNA, 15 bp, Homo sapiens
tcttctacaatctgg

SEQ ID NO: 819678 - DNA, 15 bp, Homo sapiens
cttctacaatctggg

SEQ ID NO: 819679 - DNA, 15 bp, Homo sapiens
ttctacaatctgggg

SEQ ID NO: 819680 - DNA, 15 bp, Homo sapiens
tctacaatctggggg

SEQ ID NO: 819681 - DNA, 15 bp, Homo sapiens
ctacaatctgggggc

SEQ ID NO: 819682 - DNA, 15 bp, Homo sapiens
tacaatctgggggct

SEQ ID NO: 819683 - DNA, 15 bp, Homo sapiens
acaatctgggggctt

SEQ ID NO: 819684 - DNA, 15 bp, Homo sapiens
caatctgggggctta

SEQ ID NO: 819685 - DNA, 15 bp, Homo sapiens
aatctgggggcttag

SEQ ID NO: 819686 - DNA, 15 bp, Homo sapiens
atctgggggcttagt

SEQ ID NO: 819687 - DNA, 15 bp, Homo sapiens
tctgggggcttagta

SEQ ID NO: 819688 - DNA, 15 bp, Homo sapiens
ctgggggcttagtag

SEQ ID NO: 819689 - DNA, 15 bp, Homo sapiens
tgggggcttagtaga

SEQ ID NO: 819690 - DNA, 15 bp, Homo sapiens
gggggcttagtagat

SEQ ID NO: 819691 - DNA, 15 bp, Homo sapiens
ggggcttagtagatt

SEQ ID NO: 819692 - DNA, 15 bp, Homo sapiens
gggcttagtagattg

SEQ ID NO: 819693 - DNA, 15 bp, Homo sapiens
ggcttagtagattga

SEQ ID NO: 819694 - DNA, 15 bp, Homo sapiens
gcttagtagattgaa

SEQ ID NO: 819695 - DNA, 15 bp, Homo sapiens
cttagtagattgaag

SEQ ID NO: 819696 - DNA, 15 bp, Homo sapiens
ttagtagattgaagc

SEQ ID NO: 819697 - DNA, 15 bp, Homo sapiens
tagtagattgaagct

SEQ ID NO: 819698 - DNA, 15 bp, Homo sapiens
agtagattgaagctc

SEQ ID NO: 819699 - DNA, 15 bp, Homo sapiens
gtagattgaagctct

SEQ ID NO: 819700 - DNA, 15 bp, Homo sapiens
tagattgaagctctt

SEQ ID NO: 819701 - DNA, 15 bp, Homo sapiens
agattgaagctcttc

SEQ ID NO: 819702 - DNA, 15 bp, Homo sapiens
gattgaagctcttcc

SEQ ID NO: 819703 - DNA, 15 bp, Homo sapiens
attgaagctcttccc

SEQ ID NO: 819704 - DNA, 15 bp, Homo sapiens
ttgaagctcttccca

SEQ ID NO: 819705 - DNA, 15 bp, Homo sapiens
tgaagctcttcccac

SEQ ID NO: 819706 - DNA, 15 bp, Homo sapiens
gaagctcttcccaca

SEQ ID NO: 819707 - DNA, 15 bp, Homo sapiens
aagctcttcccacag

SEQ ID NO: 819708 - DNA, 15 bp, Homo sapiens
agctcttcccacagt

SEQ ID NO: 819709 - DNA, 15 bp, Homo sapiens
gctcttcccacagtc

SEQ ID NO: 819710 - DNA, 15 bp, Homo sapiens
ctcttcccacagtcc

SEQ ID NO: 819711 - DNA, 15 bp, Homo sapiens
tcttcccacagtcct

SEQ ID NO: 819712 - DNA, 15 bp, Homo sapiens
cttcccacagtcctt

SEQ ID NO: 819713 - DNA, 15 bp, Homo sapiens
ttcccacagtccttt

SEQ ID NO: 819714 - DNA, 15 bp, Homo sapiens
tcccacagtcctttt

SEQ ID NO: 819715 - DNA, 15 bp, Homo sapiens
cccacagtccttttt

SEQ ID NO: 819716 - DNA, 15 bp, Homo sapiens
ccacagtcctttttc

SEQ ID NO: 819717 - DNA, 15 bp, Homo sapiens
cacagtcctttttcc

SEQ ID NO: 819718 - DNA, 15 bp, Homo sapiens
acagtcctttttcct

SEQ ID NO: 819719 - DNA, 15 bp, Homo sapiens
cagtcctttttcctc

SEQ ID NO: 819720 - DNA, 15 bp, Homo sapiens
agtcctttttcctcc

SEQ ID NO: 819721 - DNA, 15 bp, Homo sapiens
gtcctttttcctcct

SEQ ID NO: 819722 - DNA, 15 bp, Homo sapiens
tcctttttcctccta

SEQ ID NO: 819723 - DNA, 15 bp, Homo sapiens
cctttttcctcctat

SEQ ID NO: 819724 - DNA, 15 bp, Homo sapiens
ctttttcctcctatt

SEQ ID NO: 819725 - DNA, 15 bp, Homo sapiens
tttttcctcctattc

SEQ ID NO: 819726 - DNA, 15 bp, Homo sapiens
ttttcctcctattct

SEQ ID NO: 819727 - DNA, 15 bp, Homo sapiens
tttcctcctattcta

SEQ ID NO: 819728 - DNA, 15 bp, Homo sapiens
ttcctcctattctat

SEQ ID NO: 819729 - DNA, 15 bp, Homo sapiens
tcctcctattctatt

SEQ ID NO: 819730 - DNA, 15 bp, Homo sapiens
cctcctattctatta

SEQ ID NO: 819731 - DNA, 15 bp, Homo sapiens
ctcctattctattaa

SEQ ID NO: 819732 - DNA, 15 bp, Homo sapiens
tcctattctattaac

SEQ ID NO: 819733 - DNA, 15 bp, Homo sapiens
cctattctattaacc

SEQ ID NO: 819734 - DNA, 15 bp, Homo sapiens
ctattctattaacca

SEQ ID NO: 819735 - DNA, 15 bp, Homo sapiens
tattctattaaccat

SEQ ID NO: 819736 - DNA, 15 bp, Homo sapiens
attctattaaccata

SEQ ID NO: 819737 - DNA, 15 bp, Homo sapiens
ttctattaaccatat

SEQ ID NO: 819738 - DNA, 15 bp, Homo sapiens
tctattaaccatatc

SEQ ID NO: 819739 - DNA, 15 bp, Homo sapiens
ctattaaccatatcc

SEQ ID NO: 819740 - DNA, 15 bp, Homo sapiens
tattaaccatatccc

SEQ ID NO: 819741 - DNA, 15 bp, Homo sapiens
attaaccatatccca

SEQ ID NO: 819742 - DNA, 15 bp, Homo sapiens
ttaaccatatcccat

SEQ ID NO: 819743 - DNA, 15 bp, Homo sapiens
taaccatatcccatg

SEQ ID NO: 819744 - DNA, 15 bp, Homo sapiens
aaccatatcccatgt

SEQ ID NO: 819745 - DNA, 15 bp, Homo sapiens
accatatcccatgta

SEQ ID NO: 819746 - DNA, 15 bp, Homo sapiens
ccatatcccatgtat

SEQ ID NO: 819747 - DNA, 15 bp, Homo sapiens
catatcccatgtatt

SEQ ID NO: 819748 - DNA, 15 bp, Homo sapiens
atatcccatgtatta

SEQ ID NO: 819749 - DNA, 15 bp, Homo sapiens
tatcccatgtattat

SEQ ID NO: 819750 - DNA, 15 bp, Homo sapiens
atcccatgtattata

SEQ ID NO: 819751 - DNA, 15 bp, Homo sapiens
tcccatgtattatat

SEQ ID NO: 819752 - DNA, 15 bp, Homo sapiens
cccatgtattatatt

SEQ ID NO: 819753 - DNA, 15 bp, Homo sapiens
ccatgtattatattg

SEQ ID NO: 819754 - DNA, 15 bp, Homo sapiens
catgtattatattga

SEQ ID NO: 819755 - DNA, 15 bp, Homo sapiens
atgtattatattgaa

SEQ ID NO: 819756 - DNA, 15 bp, Homo sapiens
tgtattatattgaaa

SEQ ID NO: 819757 - DNA, 15 bp, Homo sapiens
gtattatattgaaat

SEQ ID NO: 819758 - DNA, 15 bp, Homo sapiens
tattatattgaaatg

SEQ ID NO: 819759 - DNA, 15 bp, Homo sapiens
attatattgaaatgg

SEQ ID NO: 819760 - DNA, 15 bp, Homo sapiens
ttatattgaaatgga

SEQ ID NO: 819761 - DNA, 15 bp, Homo sapiens
tatattgaaatggac

SEQ ID NO: 819762 - DNA, 15 bp, Homo sapiens
atattgaaatggact

SEQ ID NO: 819763 - DNA, 15 bp, Homo sapiens
tattgaaatggactt

SEQ ID NO: 819764 - DNA, 15 bp, Homo sapiens
attgaaatggacttt

SEQ ID NO: 819765 - DNA, 15 bp, Homo sapiens
ttgaaatggactttg

SEQ ID NO: 819766 - DNA, 15 bp, Homo sapiens
tgaaatggactttgc

SEQ ID NO: 819767 - DNA, 15 bp, Homo sapiens
gaaatggactttgct

SEQ ID NO: 819768 - DNA, 15 bp, Homo sapiens
aaatggactttgctt

SEQ ID NO: 819769 - DNA, 15 bp, Homo sapiens
aatggactttgctta

SEQ ID NO: 819770 - DNA, 15 bp, Homo sapiens
atggactttgcttag

SEQ ID NO: 819771 - DNA, 15 bp, Homo sapiens
tggactttgcttaga

SEQ ID NO: 819772 - DNA, 15 bp, Homo sapiens
ggactttgcttagaa

SEQ ID NO: 819773 - DNA, 15 bp, Homo sapiens
gactttgcttagaat

SEQ ID NO: 819774 - DNA, 15 bp, Homo sapiens
actttgcttagaatt

SEQ ID NO: 819775 - DNA, 15 bp, Homo sapiens
ctttgcttagaattt

SEQ ID NO: 819776 - DNA, 15 bp, Homo sapiens
tttgcttagaatttc

SEQ ID NO: 819777 - DNA, 15 bp, Homo sapiens
ttgcttagaatttca

SEQ ID NO: 819778 - DNA, 15 bp, Homo sapiens
tgcttagaatttcat

SEQ ID NO: 819779 - DNA, 15 bp, Homo sapiens
gcttagaatttcata

SEQ ID NO: 819780 - DNA, 15 bp, Homo sapiens
cttagaatttcataa

SEQ ID NO: 819781 - DNA, 15 bp, Homo sapiens
ttagaatttcataac

SEQ ID NO: 819782 - DNA, 15 bp, Homo sapiens
tagaatttcataaca

SEQ ID NO: 819783 - DNA, 15 bp, Homo sapiens
agaatttcataacat

SEQ ID NO: 819784 - DNA, 15 bp, Homo sapiens
gaatttcataacatg

SEQ ID NO: 819785 - DNA, 15 bp, Homo sapiens
aatttcataacatgt

SEQ ID NO: 819786 - DNA, 15 bp, Homo sapiens
atttcataacatgtt

SEQ ID NO: 819787 - DNA, 15 bp, Homo sapiens
tttcataacatgttc

SEQ ID NO: 819788 - DNA, 15 bp, Homo sapiens
ttcataacatgttct

SEQ ID NO: 819789 - DNA, 15 bp, Homo sapiens
tcataacatgttctt

SEQ ID NO: 819790 - DNA, 15 bp, Homo sapiens
cataacatgttcttt

SEQ ID NO: 819791 - DNA, 15 bp, Homo sapiens
ataacatgttctttt

SEQ ID NO: 819792 - DNA, 15 bp, Homo sapiens
taacatgttcttttg

SEQ ID NO: 819793 - DNA, 15 bp, Homo sapiens
aacatgttcttttgg

SEQ ID NO: 819794 - DNA, 15 bp, Homo sapiens
acatgttcttttggt

SEQ ID NO: 819795 - DNA, 15 bp, Homo sapiens
catgttcttttggta

SEQ ID NO: 819796 - DNA, 15 bp, Homo sapiens
atgttcttttggtaa

SEQ ID NO: 819797 - DNA, 15 bp, Homo sapiens
tgttcttttggtaac

SEQ ID NO: 819798 - DNA, 15 bp, Homo sapiens
gttcttttggtaacc

SEQ ID NO: 819799 - DNA, 15 bp, Homo sapiens
ttcttttggtaacca

SEQ ID NO: 819800 - DNA, 15 bp, Homo sapiens
tcttttggtaaccag

SEQ ID NO: 819801 - DNA, 15 bp, Homo sapiens
cttttggtaaccagt

SEQ ID NO: 819802 - DNA, 15 bp, Homo sapiens
ttttggtaaccagta

SEQ ID NO: 819803 - DNA, 15 bp, Homo sapiens
tttggtaaccagtaa

SEQ ID NO: 819804 - DNA, 15 bp, Homo sapiens
ttggtaaccagtaaa

SEQ ID NO: 819805 - DNA, 15 bp, Homo sapiens
tggtaaccagtaaaa

SEQ ID NO: 819806 - DNA, 15 bp, Homo sapiens
ggtaaccagtaaaaa

SEQ ID NO: 819807 - DNA, 15 bp, Homo sapiens
gtaaccagtaaaaag

SEQ ID NO: 819808 - DNA, 15 bp, Homo sapiens
taaccagtaaaaaga

SEQ ID NO: 819809 - DNA, 15 bp, Homo sapiens
aaccagtaaaaagat

SEQ ID NO: 819810 - DNA, 15 bp, Homo sapiens
accagtaaaaagatc

SEQ ID NO: 819811 - DNA, 15 bp, Homo sapiens
ccagtaaaaagatcc

SEQ ID NO: 819812 - DNA, 15 bp, Homo sapiens
cagtaaaaagatcct

SEQ ID NO: 819813 - DNA, 15 bp, Homo sapiens
agtaaaaagatcctt

SEQ ID NO: 819814 - DNA, 15 bp, Homo sapiens
gtaaaaagatccttt

SEQ ID NO: 819815 - DNA, 15 bp, Homo sapiens
taaaaagatcctttg

SEQ ID NO: 819816 - DNA, 15 bp, Homo sapiens
aaaaagatcctttga

SEQ ID NO: 819817 - DNA, 15 bp, Homo sapiens
aaaagatcctttgaa

SEQ ID NO: 819818 - DNA, 15 bp, Homo sapiens
aaagatcctttgaat

SEQ ID NO: 819819 - DNA, 15 bp, Homo sapiens
aagatcctttgaatg

SEQ ID NO: 819820 - DNA, 15 bp, Homo sapiens
agatcctttgaatgg

SEQ ID NO: 819821 - DNA, 15 bp, Homo sapiens
gatcctttgaatggg

SEQ ID NO: 819822 - DNA, 15 bp, Homo sapiens
atcctttgaatggga

SEQ ID NO: 819823 - DNA, 15 bp, Homo sapiens
tcctttgaatgggag

SEQ ID NO: 819824 - DNA, 15 bp, Homo sapiens
cctttgaatgggagc

SEQ ID NO: 819825 - DNA, 15 bp, Homo sapiens
ctttgaatgggagca

SEQ ID NO: 819826 - DNA, 15 bp, Homo sapiens
tttgaatgggagcat

SEQ ID NO: 819827 - DNA, 15 bp, Homo sapiens
ttgaatgggagcatt

SEQ ID NO: 819828 - DNA, 15 bp, Homo sapiens
tgaatgggagcattt

SEQ ID NO: 819829 - DNA, 15 bp, Homo sapiens
gaatgggagcatttc

SEQ ID NO: 819830 - DNA, 15 bp, Homo sapiens
aatgggagcatttcg

SEQ ID NO: 819831 - DNA, 15 bp, Homo sapiens
atgggagcatttcgc

SEQ ID NO: 819832 - DNA, 15 bp, Homo sapiens
tgggagcatttcgct

SEQ ID NO: 819833 - DNA, 15 bp, Homo sapiens
gggagcatttcgctt

SEQ ID NO: 819834 - DNA, 15 bp, Homo sapiens
ggagcatttcgcttt

SEQ ID NO: 819835 - DNA, 15 bp, Homo sapiens
gagcatttcgctttt

SEQ ID NO: 819836 - DNA, 15 bp, Homo sapiens
agcatttcgcttttt

SEQ ID NO: 819837 - DNA, 15 bp, Homo sapiens
gcatttcgctttttg

SEQ ID NO: 819838 - DNA, 15 bp, Homo sapiens
catttcgctttttga

SEQ ID NO: 819839 - DNA, 15 bp, Homo sapiens
atttcgctttttgaa

SEQ ID NO: 819840 - DNA, 15 bp, Homo sapiens
tttcgctttttgaaa

SEQ ID NO: 819841 - DNA, 15 bp, Homo sapiens
ttcgctttttgaaag

SEQ ID NO: 819842 - DNA, 15 bp, Homo sapiens
tcgctttttgaaagg

SEQ ID NO: 819843 - DNA, 15 bp, Homo sapiens
cgctttttgaaagga

SEQ ID NO: 819844 - DNA, 15 bp, Homo sapiens
gctttttgaaaggag

SEQ ID NO: 819845 - DNA, 15 bp, Homo sapiens
ctttttgaaaggagc

SEQ ID NO: 819846 - DNA, 15 bp, Homo sapiens
tttttgaaaggagct

SEQ ID NO: 819847 - DNA, 15 bp, Homo sapiens
ttttgaaaggagctt

SEQ ID NO: 819848 - DNA, 15 bp, Homo sapiens
tttgaaaggagctta

SEQ ID NO: 819849 - DNA, 15 bp, Homo sapiens
ttgaaaggagcttaa

SEQ ID NO: 819850 - DNA, 15 bp, Homo sapiens
tgaaaggagcttaaa

SEQ ID NO: 819851 - DNA, 15 bp, Homo sapiens
gaaaggagcttaaat

SEQ ID NO: 819852 - DNA, 15 bp, Homo sapiens
aaaggagcttaaatg

SEQ ID NO: 819853 - DNA, 15 bp, Homo sapiens
aaggagcttaaatgt

SEQ ID NO: 819854 - DNA, 15 bp, Homo sapiens
aggagcttaaatgta

SEQ ID NO: 819855 - DNA, 15 bp, Homo sapiens
ggagcttaaatgtaa

SEQ ID NO: 819856 - DNA, 15 bp, Homo sapiens
gagcttaaatgtaat

SEQ ID NO: 819857 - DNA, 15 bp, Homo sapiens
agcttaaatgtaatt

SEQ ID NO: 819858 - DNA, 15 bp, Homo sapiens
gcttaaatgtaatta

SEQ ID NO: 819859 - DNA, 15 bp, Homo sapiens
cttaaatgtaattac

SEQ ID NO: 819860 - DNA, 15 bp, Homo sapiens
ttaaatgtaattaca

SEQ ID NO: 819861 - DNA, 15 bp, Homo sapiens
taaatgtaattacag

SEQ ID NO: 819862 - DNA, 15 bp, Homo sapiens
aaatgtaattacagt

SEQ ID NO: 819863 - DNA, 15 bp, Homo sapiens
aatgtaattacagta

SEQ ID NO: 819864 - DNA, 15 bp, Homo sapiens
atgtaattacagtac

SEQ ID NO: 819865 - DNA, 15 bp, Homo sapiens
tgtaattacagtaca

SEQ ID NO: 819866 - DNA, 15 bp, Homo sapiens
gtaattacagtacag

SEQ ID NO: 819867 - DNA, 15 bp, Homo sapiens
taattacagtacaga

SEQ ID NO: 819868 - DNA, 15 bp, Homo sapiens
aattacagtacagac

SEQ ID NO: 819869 - DNA, 15 bp, Homo sapiens
attacagtacagacc

SEQ ID NO: 819870 - DNA, 15 bp, Homo sapiens
ttacagtacagacct

SEQ ID NO: 819871 - DNA, 15 bp, Homo sapiens
tacagtacagacctg

SEQ ID NO: 819872 - DNA, 15 bp, Homo sapiens
acagtacagacctgt

SEQ ID NO: 819873 - DNA, 15 bp, Homo sapiens
cagtacagacctgtg

SEQ ID NO: 819874 - DNA, 15 bp, Homo sapiens
agtacagacctgtgc

SEQ ID NO: 819875 - DNA, 15 bp, Homo sapiens
gtacagacctgtgca

SEQ ID NO: 819876 - DNA, 15 bp, Homo sapiens
tacagacctgtgcag

SEQ ID NO: 819877 - DNA, 15 bp, Homo sapiens
acagacctgtgcagg

SEQ ID NO: 819878 - DNA, 15 bp, Homo sapiens
cagacctgtgcaggc

SEQ ID NO: 819879 - DNA, 15 bp, Homo sapiens
agacctgtgcaggca

SEQ ID NO: 819880 - DNA, 15 bp, Homo sapiens
gacctgtgcaggcag

SEQ ID NO: 819881 - DNA, 15 bp, Homo sapiens
acctgtgcaggcagg

SEQ ID NO: 819882 - DNA, 15 bp, Homo sapiens
cctgtgcaggcaggc

SEQ ID NO: 819883 - DNA, 15 bp, Homo sapiens
ctgtgcaggcaggcg

SEQ ID NO: 819884 - DNA, 15 bp, Homo sapiens
tgtgcaggcaggcga

SEQ ID NO: 819885 - DNA, 15 bp, Homo sapiens
gtgcaggcaggcgat

SEQ ID NO: 819886 - DNA, 15 bp, Homo sapiens
tgcaggcaggcgatc

SEQ ID NO: 819887 - DNA, 15 bp, Homo sapiens
gcaggcaggcgatcc

SEQ ID NO: 819888 - DNA, 15 bp, Homo sapiens
caggcaggcgatcct

SEQ ID NO: 819889 - DNA, 15 bp, Homo sapiens
aggcaggcgatcctg

SEQ ID NO: 819890 - DNA, 15 bp, Homo sapiens
ggcaggcgatcctgc

SEQ ID NO: 819891 - DNA, 15 bp, Homo sapiens
gcaggcgatcctgcc

SEQ ID NO: 819892 - DNA, 15 bp, Homo sapiens
caggcgatcctgccc

SEQ ID NO: 819893 - DNA, 15 bp, Homo sapiens
aggcgatcctgccca

SEQ ID NO: 819894 - DNA, 15 bp, Homo sapiens
ggcgatcctgcccag

SEQ ID NO: 819895 - DNA, 15 bp, Homo sapiens
gcgatcctgcccagc

SEQ ID NO: 819896 - DNA, 15 bp, Homo sapiens
cgatcctgcccagca

SEQ ID NO: 819897 - DNA, 15 bp, Homo sapiens
gatcctgcccagcac

SEQ ID NO: 819898 - DNA, 15 bp, Homo sapiens
atcctgcccagcacg

SEQ ID NO: 819899 - DNA, 15 bp, Homo sapiens
tcctgcccagcacgt

SEQ ID NO: 819900 - DNA, 15 bp, Homo sapiens
cctgcccagcacgtt

SEQ ID NO: 819901 - DNA, 15 bp, Homo sapiens
ctgcccagcacgttg

SEQ ID NO: 819902 - DNA, 15 bp, Homo sapiens
tgcccagcacgttgg

SEQ ID NO: 819903 - DNA, 15 bp, Homo sapiens
gcccagcacgttggc

SEQ ID NO: 819904 - DNA, 15 bp, Homo sapiens
cccagcacgttggca

SEQ ID NO: 819905 - DNA, 15 bp, Homo sapiens
ccagcacgttggcat

SEQ ID NO: 819906 - DNA, 15 bp, Homo sapiens
cagcacgttggcata

SEQ ID NO: 819907 - DNA, 15 bp, Homo sapiens
agcacgttggcatat

SEQ ID NO: 819908 - DNA, 15 bp, Homo sapiens
gcacgttggcatatt

SEQ ID NO: 819909 - DNA, 15 bp, Homo sapiens
cacgttggcatattc

SEQ ID NO: 819910 - DNA, 15 bp, Homo sapiens
acgttggcatattct

SEQ ID NO: 819911 - DNA, 15 bp, Homo sapiens
cgttggcatattctc

SEQ ID NO: 819912 - DNA, 15 bp, Homo sapiens
gttggcatattctca

SEQ ID NO: 819913 - DNA, 15 bp, Homo sapiens
ttggcatattctcac

SEQ ID NO: 819914 - DNA, 15 bp, Homo sapiens
tggcatattctcact

SEQ ID NO: 819915 - DNA, 15 bp, Homo sapiens
ggcatattctcactt

SEQ ID NO: 819916 - DNA, 15 bp, Homo sapiens
gcatattctcacttt

SEQ ID NO: 819917 - DNA, 15 bp, Homo sapiens
catattctcacttta

SEQ ID NO: 819918 - DNA, 15 bp, Homo sapiens
atattctcactttat

SEQ ID NO: 819919 - DNA, 15 bp, Homo sapiens
tattctcactttatg

SEQ ID NO: 819920 - DNA, 15 bp, Homo sapiens
attctcactttatga

SEQ ID NO: 819921 - DNA, 15 bp, Homo sapiens
ttctcactttatgaa

SEQ ID NO: 819922 - DNA, 15 bp, Homo sapiens
tctcactttatgaac

SEQ ID NO: 819923 - DNA, 15 bp, Homo sapiens
ctcactttatgaacg

SEQ ID NO: 819924 - DNA, 15 bp, Homo sapiens
tcactttatgaacgt

SEQ ID NO: 819925 - DNA, 15 bp, Homo sapiens
cactttatgaacgtt

SEQ ID NO: 819926 - DNA, 15 bp, Homo sapiens
actttatgaacgttt

SEQ ID NO: 819927 - DNA, 15 bp, Homo sapiens
ctttatgaacgtttt

SEQ ID NO: 819928 - DNA, 15 bp, Homo sapiens
tttatgaacgttttc

SEQ ID NO: 819929 - DNA, 15 bp, Homo sapiens
ttatgaacgttttca

SEQ ID NO: 819930 - DNA, 15 bp, Homo sapiens
tatgaacgttttcat

SEQ ID NO: 819931 - DNA, 15 bp, Homo sapiens
atgaacgttttcatc

SEQ ID NO: 819932 - DNA, 15 bp, Homo sapiens
tgaacgttttcatct

SEQ ID NO: 819933 - DNA, 15 bp, Homo sapiens
gaacgttttcatctg

SEQ ID NO: 819934 - DNA, 15 bp, Homo sapiens
aacgttttcatctgg

SEQ ID NO: 819935 - DNA, 15 bp, Homo sapiens
acgttttcatctggg

SEQ ID NO: 819936 - DNA, 15 bp, Homo sapiens
cgttttcatctgggg

SEQ ID NO: 819937 - DNA, 15 bp, Homo sapiens
gttttcatctggggg

SEQ ID NO: 819938 - DNA, 15 bp, Homo sapiens
ttttcatctgggggc

SEQ ID NO: 819939 - DNA, 15 bp, Homo sapiens
tttcatctgggggct

SEQ ID NO: 819940 - DNA, 15 bp, Homo sapiens
ttcatctgggggctt

SEQ ID NO: 819941 - DNA, 15 bp, Homo sapiens
tcatctgggggcttg

SEQ ID NO: 819942 - DNA, 15 bp, Homo sapiens
catctgggggcttgg

SEQ ID NO: 819943 - DNA, 15 bp, Homo sapiens
atctgggggcttggc

SEQ ID NO: 819944 - DNA, 15 bp, Homo sapiens
tctgggggcttggcg

SEQ ID NO: 819945 - DNA, 15 bp, Homo sapiens
ctgggggcttggcga

SEQ ID NO: 819946 - DNA, 15 bp, Homo sapiens
tgggggcttggcgaa

SEQ ID NO: 819947 - DNA, 15 bp, Homo sapiens
gggggcttggcgaag

SEQ ID NO: 819948 - DNA, 15 bp, Homo sapiens
ggggcttggcgaagg

SEQ ID NO: 819949 - DNA, 15 bp, Homo sapiens
gggcttggcgaagga

SEQ ID NO: 819950 - DNA, 15 bp, Homo sapiens
ggcttggcgaaggaa

SEQ ID NO: 819951 - DNA, 15 bp, Homo sapiens
gcttggcgaaggaaa

SEQ ID NO: 819952 - DNA, 15 bp, Homo sapiens
cttggcgaaggaaac

SEQ ID NO: 819953 - DNA, 15 bp, Homo sapiens
ttggcgaaggaaaca

SEQ ID NO: 819954 - DNA, 15 bp, Homo sapiens
tggcgaaggaaacat

SEQ ID NO: 819955 - DNA, 15 bp, Homo sapiens
ggcgaaggaaacatc

SEQ ID NO: 819956 - DNA, 15 bp, Homo sapiens
gcgaaggaaacatct

SEQ ID NO: 819957 - DNA, 15 bp, Homo sapiens
cgaaggaaacatctg

SEQ ID NO: 819958 - DNA, 15 bp, Homo sapiens
gaaggaaacatctga

SEQ ID NO: 819959 - DNA, 15 bp, Homo sapiens
aaggaaacatctgat

SEQ ID NO: 819960 - DNA, 15 bp, Homo sapiens
aggaaacatctgatt

SEQ ID NO: 819961 - DNA, 15 bp, Homo sapiens
ggaaacatctgattc

SEQ ID NO: 819962 - DNA, 15 bp, Homo sapiens
gaaacatctgattct

SEQ ID NO: 819963 - DNA, 15 bp, Homo sapiens
aaacatctgattctc

SEQ ID NO: 819964 - DNA, 15 bp, Homo sapiens
aacatctgattctct

SEQ ID NO: 819965 - DNA, 15 bp, Homo sapiens
acatctgattctctt

SEQ ID NO: 819966 - DNA, 15 bp, Homo sapiens
catctgattctcttt

SEQ ID NO: 819967 - DNA, 15 bp, Homo sapiens
atctgattctctttt

SEQ ID NO: 819968 - DNA, 15 bp, Homo sapiens
tctgattctcttttg

SEQ ID NO: 819969 - DNA, 15 bp, Homo sapiens
ctgattctcttttgt

SEQ ID NO: 819970 - DNA, 15 bp, Homo sapiens
tgattctcttttgtg

SEQ ID NO: 819971 - DNA, 15 bp, Homo sapiens
gattctcttttgtga

SEQ ID NO: 819972 - DNA, 15 bp, Homo sapiens
attctcttttgtgag

SEQ ID NO: 819973 - DNA, 15 bp, Homo sapiens
ttctcttttgtgaga

SEQ ID NO: 819974 - DNA, 15 bp, Homo sapiens
tctcttttgtgagat

SEQ ID NO: 819975 - DNA, 15 bp, Homo sapiens
ctcttttgtgagatt

SEQ ID NO: 819976 - DNA, 15 bp, Homo sapiens
tcttttgtgagattc

SEQ ID NO: 819977 - DNA, 15 bp, Homo sapiens
cttttgtgagattct

SEQ ID NO: 819978 - DNA, 15 bp, Homo sapiens
ttttgtgagattctt

SEQ ID NO: 819979 - DNA, 15 bp, Homo sapiens
tttgtgagattcttc

SEQ ID NO: 819980 - DNA, 15 bp, Homo sapiens
ttgtgagattcttca

SEQ ID NO: 819981 - DNA, 15 bp, Homo sapiens
tgtgagattcttcag

SEQ ID NO: 819982 - DNA, 15 bp, Homo sapiens
gtgagattcttcagt

SEQ ID NO: 819983 - DNA, 15 bp, Homo sapiens
tgagattcttcagta

SEQ ID NO: 819984 - DNA, 15 bp, Homo sapiens
gagattcttcagtac

SEQ ID NO: 819985 - DNA, 15 bp, Homo sapiens
agattcttcagtaca

SEQ ID NO: 819986 - DNA, 15 bp, Homo sapiens
gattcttcagtacag

SEQ ID NO: 819987 - DNA, 15 bp, Homo sapiens
attcttcagtacaga

SEQ ID NO: 819988 - DNA, 15 bp, Homo sapiens
ttcttcagtacagag

SEQ ID NO: 819989 - DNA, 15 bp, Homo sapiens
tcttcagtacagaga

SEQ ID NO: 819990 - DNA, 15 bp, Homo sapiens
cttcagtacagagac

SEQ ID NO: 819991 - DNA, 15 bp, Homo sapiens
ttcagtacagagacc

SEQ ID NO: 819992 - DNA, 15 bp, Homo sapiens
tcagtacagagaccc

SEQ ID NO: 819993 - DNA, 15 bp, Homo sapiens
cagtacagagaccca

SEQ ID NO: 819994 - DNA, 15 bp, Homo sapiens
agtacagagacccat

SEQ ID NO: 819995 - DNA, 15 bp, Homo sapiens
gtacagagacccatt

SEQ ID NO: 819996 - DNA, 15 bp, Homo sapiens
tacagagacccattc

SEQ ID NO: 819997 - DNA, 15 bp, Homo sapiens
acagagacccattcc

SEQ ID NO: 819998 - DNA, 15 bp, Homo sapiens
cagagacccattcct

SEQ ID NO: 819999 - DNA, 15 bp, Homo sapiens
agagacccattcctc

SEQ ID NO: 820000 - DNA, 15 bp, Homo sapiens
agacccattcctctt

SEQ ID NO: 820001 - DNA, 15 bp, Homo sapiens
gacccattcctcttt

SEQ ID NO: 820002 - DNA, 15 bp, Homo sapiens
acccattcctctttc

SEQ ID NO: 820003 - DNA, 15 bp, Homo sapiens
cccattcctctttcc

SEQ ID NO: 820004 - DNA, 15 bp, Homo sapiens
ccattcctctttccc

SEQ ID NO: 820005 - DNA, 15 bp, Homo sapiens
cattcctctttccca

SEQ ID NO: 820006 - DNA, 15 bp, Homo sapiens
attcctctttcccag

SEQ ID NO: 820007 - DNA, 15 bp, Homo sapiens
ttcctctttcccaga

SEQ ID NO: 820008 - DNA, 15 bp, Homo sapiens
tcctctttcccagaa

SEQ ID NO: 820009 - DNA, 15 bp, Homo sapiens
cctctttcccagaaa

SEQ ID NO: 820010 - DNA, 15 bp, Homo sapiens
ctctttcccagaaaa

SEQ ID NO: 820011 - DNA, 15 bp, Homo sapiens
tctttcccagaaaaa

SEQ ID NO: 820012 - DNA, 15 bp, Homo sapiens
ctttcccagaaaaac

SEQ ID NO: 820013 - DNA, 15 bp, Homo sapiens
tttcccagaaaaaca

SEQ ID NO: 820014 - DNA, 15 bp, Homo sapiens
ttcccagaaaaacac

SEQ ID NO: 820015 - DNA, 15 bp, Homo sapiens
tcccagaaaaacaca

SEQ ID NO: 820016 - DNA, 15 bp, Homo sapiens
cccagaaaaacacag

SEQ ID NO: 820017 - DNA, 15 bp, Homo sapiens
ccagaaaaacacagt

SEQ ID NO: 820018 - DNA, 15 bp, Homo sapiens
cagaaaaacacagtg

SEQ ID NO: 820019 - DNA, 15 bp, Homo sapiens
agaaaaacacagtga

SEQ ID NO: 820020 - DNA, 15 bp, Homo sapiens
gaaaaacacagtgat

SEQ ID NO: 820021 - DNA, 15 bp, Homo sapiens
aaaaacacagtgatt

SEQ ID NO: 820022 - DNA, 15 bp, Homo sapiens
aaaacacagtgattc

SEQ ID NO: 820023 - DNA, 15 bp, Homo sapiens
aaacacagtgattcc

SEQ ID NO: 820024 - DNA, 15 bp, Homo sapiens
aacacagtgattcct

SEQ ID NO: 820025 - DNA, 15 bp, Homo sapiens
acacagtgattcctc

SEQ ID NO: 820026 - DNA, 15 bp, Homo sapiens
cacagtgattcctca

SEQ ID NO: 820027 - DNA, 15 bp, Homo sapiens
acagtgattcctcat

SEQ ID NO: 820028 - DNA, 15 bp, Homo sapiens
cagtgattcctcata

SEQ ID NO: 820029 - DNA, 15 bp, Homo sapiens
agtgattcctcataa

SEQ ID NO: 820030 - DNA, 15 bp, Homo sapiens
gtgattcctcataaa

SEQ ID NO: 820031 - DNA, 15 bp, Homo sapiens
tgattcctcataaaa

SEQ ID NO: 820032 - DNA, 15 bp, Homo sapiens
gattcctcataaaat

SEQ ID NO: 820033 - DNA, 15 bp, Homo sapiens
attcctcataaaatg

SEQ ID NO: 820034 - DNA, 15 bp, Homo sapiens
ttcctcataaaatga

SEQ ID NO: 820035 - DNA, 15 bp, Homo sapiens
tcctcataaaatgaa

SEQ ID NO: 820036 - DNA, 15 bp, Homo sapiens
cctcataaaatgaaa

SEQ ID NO: 820037 - DNA, 15 bp, Homo sapiens
ctcataaaatgaaag

SEQ ID NO: 820038 - DNA, 15 bp, Homo sapiens
tcataaaatgaaagg

SEQ ID NO: 820039 - DNA, 15 bp, Homo sapiens
cataaaatgaaagga

SEQ ID NO: 820040 - DNA, 15 bp, Homo sapiens
ataaaatgaaaggat

SEQ ID NO: 820041 - DNA, 15 bp, Homo sapiens
taaaatgaaaggatt

SEQ ID NO: 820042 - DNA, 15 bp, Homo sapiens
aaaatgaaaggattt

SEQ ID NO: 820043 - DNA, 15 bp, Homo sapiens
aaatgaaaggatttc

SEQ ID NO: 820044 - DNA, 15 bp, Homo sapiens
aatgaaaggatttct

SEQ ID NO: 820045 - DNA, 15 bp, Homo sapiens
atgaaaggatttctg

SEQ ID NO: 820046 - DNA, 15 bp, Homo sapiens
tgaaaggatttctga

SEQ ID NO: 820047 - DNA, 15 bp, Homo sapiens
gaaaggatttctgaa

SEQ ID NO: 820048 - DNA, 15 bp, Homo sapiens
aaaggatttctgaag

SEQ ID NO: 820049 - DNA, 15 bp, Homo sapiens
aaggatttctgaagc

SEQ ID NO: 820050 - DNA, 15 bp, Homo sapiens
aggatttctgaagcc

SEQ ID NO: 820051 - DNA, 15 bp, Homo sapiens
ggatttctgaagccc

SEQ ID NO: 820052 - DNA, 15 bp, Homo sapiens
gatttctgaagccca

SEQ ID NO: 820053 - DNA, 15 bp, Homo sapiens
atttctgaagcccaa

SEQ ID NO: 820054 - DNA, 15 bp, Homo sapiens
tttctgaagcccaac

SEQ ID NO: 820055 - DNA, 15 bp, Homo sapiens
ttctgaagcccaaca

SEQ ID NO: 820056 - DNA, 15 bp, Homo sapiens
tctgaagcccaacag

SEQ ID NO: 820057 - DNA, 15 bp, Homo sapiens
ctgaagcccaacaga

SEQ ID NO: 820058 - DNA, 15 bp, Homo sapiens
tgaagcccaacagaa

SEQ ID NO: 820059 - DNA, 15 bp, Homo sapiens
gaagcccaacagaaa

SEQ ID NO: 820060 - DNA, 15 bp, Homo sapiens
aagcccaacagaaag

SEQ ID NO: 820061 - DNA, 15 bp, Homo sapiens
agcccaacagaaagt

SEQ ID NO: 820062 - DNA, 15 bp, Homo sapiens
gcccaacagaaagtg

SEQ ID NO: 820063 - DNA, 15 bp, Homo sapiens
cccaacagaaagtgg

SEQ ID NO: 820064 - DNA, 15 bp, Homo sapiens
ccaacagaaagtggg

SEQ ID NO: 820065 - DNA, 15 bp, Homo sapiens
caacagaaagtgggg

SEQ ID NO: 820066 - DNA, 15 bp, Homo sapiens
aacagaaagtgggga

SEQ ID NO: 820067 - DNA, 15 bp, Homo sapiens
acagaaagtggggat

SEQ ID NO: 820068 - DNA, 15 bp, Homo sapiens
cagaaagtggggata

SEQ ID NO: 820069 - DNA, 15 bp, Homo sapiens
agaaagtggggatac

SEQ ID NO: 820070 - DNA, 15 bp, Homo sapiens
gaaagtggggataca

SEQ ID NO: 820071 - DNA, 15 bp, Homo sapiens
aaagtggggatacag

SEQ ID NO: 820072 - DNA, 15 bp, Homo sapiens
aagtggggatacaga

SEQ ID NO: 820073 - DNA, 15 bp, Homo sapiens
agtggggatacagag

SEQ ID NO: 820074 - DNA, 15 bp, Homo sapiens
gtggggatacagaga

SEQ ID NO: 820075 - DNA, 15 bp, Homo sapiens
tggggatacagagat

SEQ ID NO: 820076 - DNA, 15 bp, Homo sapiens
ggggatacagagatc

SEQ ID NO: 820077 - DNA, 15 bp, Homo sapiens
gggatacagagatcc

SEQ ID NO: 820078 - DNA, 15 bp, Homo sapiens
ggatacagagatcca

SEQ ID NO: 820079 - DNA, 15 bp, Homo sapiens
gatacagagatccat

SEQ ID NO: 820080 - DNA, 15 bp, Homo sapiens
atacagagatccatt

SEQ ID NO: 820081 - DNA, 15 bp, Homo sapiens
tacagagatccattc

SEQ ID NO: 820082 - DNA, 15 bp, Homo sapiens
acagagatccattca

SEQ ID NO: 820083 - DNA, 15 bp, Homo sapiens
cagagatccattcac

SEQ ID NO: 820084 - DNA, 15 bp, Homo sapiens
agagatccattcaca

SEQ ID NO: 820085 - DNA, 15 bp, Homo sapiens
gagatccattcacag

SEQ ID NO: 820086 - DNA, 15 bp, Homo sapiens
agatccattcacaga

SEQ ID NO: 820087 - DNA, 15 bp, Homo sapiens
gatccattcacagag

SEQ ID NO: 820088 - DNA, 15 bp, Homo sapiens
atccattcacagaga

SEQ ID NO: 820089 - DNA, 15 bp, Homo sapiens
tccattcacagagac

SEQ ID NO: 820090 - DNA, 15 bp, Homo sapiens
ccattcacagagaca

SEQ ID NO: 820091 - DNA, 15 bp, Homo sapiens
cattcacagagacag

SEQ ID NO: 820092 - DNA, 15 bp, Homo sapiens
attcacagagacaga

SEQ ID NO: 820093 - DNA, 15 bp, Homo sapiens
ttcacagagacagaa

SEQ ID NO: 820094 - DNA, 15 bp, Homo sapiens
tcacagagacagaag

SEQ ID NO: 820095 - DNA, 15 bp, Homo sapiens
cacagagacagaaga

SEQ ID NO: 820096 - DNA, 15 bp, Homo sapiens
acagagacagaagag

SEQ ID NO: 820097 - DNA, 15 bp, Homo sapiens
cagagacagaagaga

SEQ ID NO: 820098 - DNA, 15 bp, Homo sapiens
agagacagaagagaa

SEQ ID NO: 820099 - DNA, 15 bp, Homo sapiens
gagacagaagagaaa

SEQ ID NO: 820100 - DNA, 15 bp, Homo sapiens
agacagaagagaaaa

SEQ ID NO: 820101 - DNA, 15 bp, Homo sapiens
gacagaagagaaaat

SEQ ID NO: 820102 - DNA, 15 bp, Homo sapiens
acagaagagaaaatc

SEQ ID NO: 820103 - DNA, 15 bp, Homo sapiens
cagaagagaaaatcc

SEQ ID NO: 820104 - DNA, 15 bp, Homo sapiens
agaagagaaaatcct

SEQ ID NO: 820105 - DNA, 15 bp, Homo sapiens
gaagagaaaatccta

SEQ ID NO: 820106 - DNA, 15 bp, Homo sapiens
aagagaaaatcctaa

SEQ ID NO: 820107 - DNA, 15 bp, Homo sapiens
agagaaaatcctaag

SEQ ID NO: 820108 - DNA, 15 bp, Homo sapiens
gagaaaatcctaaga

SEQ ID NO: 820109 - DNA, 15 bp, Homo sapiens
agaaaatcctaagaa

SEQ ID NO: 820110 - DNA, 15 bp, Homo sapiens
gaaaatcctaagaaa

SEQ ID NO: 820111 - DNA, 15 bp, Homo sapiens
aaaatcctaagaaat

SEQ ID NO: 820112 - DNA, 15 bp, Homo sapiens
aaatcctaagaaatc

SEQ ID NO: 820113 - DNA, 15 bp, Homo sapiens
aatcctaagaaatcg

SEQ ID NO: 820114 - DNA, 15 bp, Homo sapiens
atcctaagaaatcgg

SEQ ID NO: 820115 - DNA, 15 bp, Homo sapiens
tcctaagaaatcggc

SEQ ID NO: 820116 - DNA, 15 bp, Homo sapiens
cctaagaaatcggct

SEQ ID NO: 820117 - DNA, 15 bp, Homo sapiens
ctaagaaatcggctt

SEQ ID NO: 820118 - DNA, 15 bp, Homo sapiens
taagaaatcggcttc

SEQ ID NO: 820119 - DNA, 15 bp, Homo sapiens
aagaaatcggcttcc

SEQ ID NO: 820120 - DNA, 15 bp, Homo sapiens
agaaatcggcttcct

SEQ ID NO: 820121 - DNA, 15 bp, Homo sapiens
gaaatcggcttcctg

SEQ ID NO: 820122 - DNA, 15 bp, Homo sapiens
aaatcggcttcctgg

SEQ ID NO: 820123 - DNA, 15 bp, Homo sapiens
aatcggcttcctggg

SEQ ID NO: 820124 - DNA, 15 bp, Homo sapiens
atcggcttcctgggg

SEQ ID NO: 820125 - DNA, 15 bp, Homo sapiens
tcggcttcctggggc

SEQ ID NO: 820126 - DNA, 15 bp, Homo sapiens
cggcttcctggggcc

SEQ ID NO: 820127 - DNA, 15 bp, Homo sapiens
ggcttcctggggcca

SEQ ID NO: 820128 - DNA, 15 bp, Homo sapiens
gcttcctggggccat

SEQ ID NO: 820129 - DNA, 15 bp, Homo sapiens
cttcctggggccatc

SEQ ID NO: 820130 - DNA, 15 bp, Homo sapiens
ttcctggggccatcc

SEQ ID NO: 820131 - DNA, 15 bp, Homo sapiens
tcctggggccatcct

SEQ ID NO: 820132 - DNA, 15 bp, Homo sapiens
cctggggccatccta

SEQ ID NO: 820133 - DNA, 15 bp, Homo sapiens
ctggggccatcctag

SEQ ID NO: 820134 - DNA, 15 bp, Homo sapiens
tggggccatcctagg

SEQ ID NO: 820135 - DNA, 15 bp, Homo sapiens
ggggccatcctaggc

SEQ ID NO: 820136 - DNA, 15 bp, Homo sapiens
gggccatcctaggcc

SEQ ID NO: 820137 - DNA, 15 bp, Homo sapiens
ggccatcctaggcct

SEQ ID NO: 820138 - DNA, 15 bp, Homo sapiens
gccatcctaggcctc

SEQ ID NO: 820139 - DNA, 15 bp, Homo sapiens
ccatcctaggcctct

SEQ ID NO: 820140 - DNA, 15 bp, Homo sapiens
catcctaggcctctc

SEQ ID NO: 820141 - DNA, 15 bp, Homo sapiens
atcctaggcctctca

SEQ ID NO: 820142 - DNA, 15 bp, Homo sapiens
tcctaggcctctcac

SEQ ID NO: 820143 - DNA, 15 bp, Homo sapiens
cctaggcctctcaca

SEQ ID NO: 820144 - DNA, 15 bp, Homo sapiens
ctaggcctctcacag

SEQ ID NO: 820145 - DNA, 15 bp, Homo sapiens
taggcctctcacaga

SEQ ID NO: 820146 - DNA, 15 bp, Homo sapiens
aggcctctcacagag

SEQ ID NO: 820147 - DNA, 15 bp, Homo sapiens
ggcctctcacagaga

SEQ ID NO: 820148 - DNA, 15 bp, Homo sapiens
gcctctcacagagat

SEQ ID NO: 820149 - DNA, 15 bp, Homo sapiens
cctctcacagagatg

SEQ ID NO: 820150 - DNA, 15 bp, Homo sapiens
ctctcacagagatgt

SEQ ID NO: 820151 - DNA, 15 bp, Homo sapiens
tctcacagagatgtt

SEQ ID NO: 820152 - DNA, 15 bp, Homo sapiens
ctcacagagatgttt

SEQ ID NO: 820153 - DNA, 15 bp, Homo sapiens
tcacagagatgtttt

SEQ ID NO: 820154 - DNA, 15 bp, Homo sapiens
cacagagatgttttt

SEQ ID NO: 820155 - DNA, 15 bp, Homo sapiens
acagagatgttttta

SEQ ID NO: 820156 - DNA, 15 bp, Homo sapiens
cagagatgtttttat

SEQ ID NO: 820157 - DNA, 15 bp, Homo sapiens
agagatgtttttata

SEQ ID NO: 820158 - DNA, 15 bp, Homo sapiens
gagatgtttttataa

SEQ ID NO: 820159 - DNA, 15 bp, Homo sapiens
agatgtttttataat

SEQ ID NO: 820160 - DNA, 15 bp, Homo sapiens
gatgtttttataatg

SEQ ID NO: 820161 - DNA, 15 bp, Homo sapiens
atgtttttataatga

SEQ ID NO: 820162 - DNA, 15 bp, Homo sapiens
tgtttttataatgat

SEQ ID NO: 820163 - DNA, 15 bp, Homo sapiens
gtttttataatgata

SEQ ID NO: 820164 - DNA, 15 bp, Homo sapiens
tttttataatgatag

SEQ ID NO: 820165 - DNA, 15 bp, Homo sapiens
ttttataatgatagg

SEQ ID NO: 820166 - DNA, 15 bp, Homo sapiens
tttataatgatagga

SEQ ID NO: 820167 - DNA, 15 bp, Homo sapiens
ttataatgataggaa

SEQ ID NO: 820168 - DNA, 15 bp, Homo sapiens
tataatgataggaat

SEQ ID NO: 820169 - DNA, 15 bp, Homo sapiens
ataatgataggaata

SEQ ID NO: 820170 - DNA, 15 bp, Homo sapiens
taatgataggaataa

SEQ ID NO: 820171 - DNA, 15 bp, Homo sapiens
aatgataggaataac

SEQ ID NO: 820172 - DNA, 15 bp, Homo sapiens
atgataggaataaca

SEQ ID NO: 820173 - DNA, 15 bp, Homo sapiens
tgataggaataacat

SEQ ID NO: 820174 - DNA, 15 bp, Homo sapiens
gataggaataacatc

SEQ ID NO: 820175 - DNA, 15 bp, Homo sapiens
ataggaataacatct

SEQ ID NO: 820176 - DNA, 15 bp, Homo sapiens
taggaataacatctc

SEQ ID NO: 820177 - DNA, 15 bp, Homo sapiens
aggaataacatctct

SEQ ID NO: 820178 - DNA, 15 bp, Homo sapiens
ggaataacatctcta

SEQ ID NO: 820179 - DNA, 15 bp, Homo sapiens
gaataacatctctag

SEQ ID NO: 820180 - DNA, 15 bp, Homo sapiens
aataacatctctaga

SEQ ID NO: 820181 - DNA, 15 bp, Homo sapiens
ataacatctctagag

SEQ ID NO: 820182 - DNA, 15 bp, Homo sapiens
taacatctctagaga

SEQ ID NO: 820183 - DNA, 15 bp, Homo sapiens
aacatctctagagaa

SEQ ID NO: 820184 - DNA, 15 bp, Homo sapiens
acatctctagagaag

SEQ ID NO: 820185 - DNA, 15 bp, Homo sapiens
catctctagagaagt

SEQ ID NO: 820186 - DNA, 15 bp, Homo sapiens
atctctagagaagtt

SEQ ID NO: 820187 - DNA, 15 bp, Homo sapiens
tctctagagaagttc

SEQ ID NO: 820188 - DNA, 15 bp, Homo sapiens
ctctagagaagttca

SEQ ID NO: 820189 - DNA, 15 bp, Homo sapiens
tctagagaagttcaa

SEQ ID NO: 820190 - DNA, 15 bp, Homo sapiens
ctagagaagttcaaa

SEQ ID NO: 820191 - DNA, 15 bp, Homo sapiens
tagagaagttcaaag

SEQ ID NO: 820192 - DNA, 15 bp, Homo sapiens
agagaagttcaaaga

SEQ ID NO: 820193 - DNA, 15 bp, Homo sapiens
gagaagttcaaagat

SEQ ID NO: 820194 - DNA, 15 bp, Homo sapiens
agaagttcaaagata

SEQ ID NO: 820195 - DNA, 15 bp, Homo sapiens
gaagttcaaagatag

SEQ ID NO: 820196 - DNA, 15 bp, Homo sapiens
aagttcaaagatagg

SEQ ID NO: 820197 - DNA, 15 bp, Homo sapiens
agttcaaagatagga

SEQ ID NO: 820198 - DNA, 15 bp, Homo sapiens
gttcaaagataggac

SEQ ID NO: 820199 - DNA, 15 bp, Homo sapiens
ttcaaagataggaca

SEQ ID NO: 820200 - DNA, 15 bp, Homo sapiens
tcaaagataggacaa

SEQ ID NO: 820201 - DNA, 15 bp, Homo sapiens
caaagataggacaat

SEQ ID NO: 820202 - DNA, 15 bp, Homo sapiens
aaagataggacaata

SEQ ID NO: 820203 - DNA, 15 bp, Homo sapiens
aagataggacaataa

SEQ ID NO: 820204 - DNA, 15 bp, Homo sapiens
agataggacaataaa

SEQ ID NO: 820205 - DNA, 15 bp, Homo sapiens
gataggacaataaaa

SEQ ID NO: 820206 - DNA, 15 bp, Homo sapiens
ataggacaataaaat

SEQ ID NO: 820207 - DNA, 15 bp, Homo sapiens
taggacaataaaatt

SEQ ID NO: 820208 - DNA, 15 bp, Homo sapiens
aggacaataaaatta

SEQ ID NO: 820209 - DNA, 15 bp, Homo sapiens
ggacaataaaattaa

SEQ ID NO: 820210 - DNA, 15 bp, Homo sapiens
gacaataaaattaaa

SEQ ID NO: 820211 - DNA, 15 bp, Homo sapiens
acaataaaattaaaa

SEQ ID NO: 820212 - DNA, 15 bp, Homo sapiens
caataaaattaaaag

SEQ ID NO: 820213 - DNA, 15 bp, Homo sapiens
aataaaattaaaaga

SEQ ID NO: 820214 - DNA, 15 bp, Homo sapiens
ataaaattaaaagaa

SEQ ID NO: 820215 - DNA, 15 bp, Homo sapiens
taaaattaaaagaag

SEQ ID NO: 820216 - DNA, 15 bp, Homo sapiens
aaaattaaaagaagg

SEQ ID NO: 820217 - DNA, 15 bp, Homo sapiens
aaattaaaagaaggg

SEQ ID NO: 820218 - DNA, 15 bp, Homo sapiens
aattaaaagaagggc

SEQ ID NO: 820219 - DNA, 15 bp, Homo sapiens
attaaaagaagggcc

SEQ ID NO: 820220 - DNA, 15 bp, Homo sapiens
ttaaaagaagggcct

SEQ ID NO: 820221 - DNA, 15 bp, Homo sapiens
taaaagaagggcctg

SEQ ID NO: 820222 - DNA, 15 bp, Homo sapiens
aaaagaagggcctgc

SEQ ID NO: 820223 - DNA, 15 bp, Homo sapiens
aaagaagggcctgca

SEQ ID NO: 820224 - DNA, 15 bp, Homo sapiens
aagaagggcctgcag

SEQ ID NO: 820225 - DNA, 15 bp, Homo sapiens
agaagggcctgcagg

SEQ ID NO: 820226 - DNA, 15 bp, Homo sapiens
gaagggcctgcagga

SEQ ID NO: 820227 - DNA, 15 bp, Homo sapiens
aagggcctgcaggag

SEQ ID NO: 820228 - DNA, 15 bp, Homo sapiens
agggcctgcaggagg

SEQ ID NO: 820229 - DNA, 15 bp, Homo sapiens
gggcctgcaggagga

SEQ ID NO: 820230 - DNA, 15 bp, Homo sapiens
ggcctgcaggaggaa

SEQ ID NO: 820231 - DNA, 15 bp, Homo sapiens
gcctgcaggaggaag

SEQ ID NO: 820232 - DNA, 15 bp, Homo sapiens
cctgcaggaggaagc

SEQ ID NO: 820233 - DNA, 15 bp, Homo sapiens
ctgcaggaggaagca

SEQ ID NO: 820234 - DNA, 15 bp, Homo sapiens
tgcaggaggaagcaa

SEQ ID NO: 820235 - DNA, 15 bp, Homo sapiens
gcaggaggaagcaag

SEQ ID NO: 820236 - DNA, 15 bp, Homo sapiens
caggaggaagcaagg

SEQ ID NO: 820237 - DNA, 15 bp, Homo sapiens
aggaggaagcaagga

SEQ ID NO: 820238 - DNA, 15 bp, Homo sapiens
ggaggaagcaaggag

SEQ ID NO: 820239 - DNA, 15 bp, Homo sapiens
gaggaagcaaggaga

SEQ ID NO: 820240 - DNA, 15 bp, Homo sapiens
aggaagcaaggagaa

SEQ ID NO: 820241 - DNA, 15 bp, Homo sapiens
ggaagcaaggagaaa

SEQ ID NO: 820242 - DNA, 15 bp, Homo sapiens
gaagcaaggagaaag

SEQ ID NO: 820243 - DNA, 15 bp, Homo sapiens
aagcaaggagaaaga

SEQ ID NO: 820244 - DNA, 15 bp, Homo sapiens
agcaaggagaaagac

SEQ ID NO: 820245 - DNA, 15 bp, Homo sapiens
gcaaggagaaagaca

SEQ ID NO: 820246 - DNA, 15 bp, Homo sapiens
caaggagaaagacac

SEQ ID NO: 820247 - DNA, 15 bp, Homo sapiens
aaggagaaagacact

SEQ ID NO: 820248 - DNA, 15 bp, Homo sapiens
aggagaaagacactt

SEQ ID NO: 820249 - DNA, 15 bp, Homo sapiens
ggagaaagacacttc

SEQ ID NO: 820250 - DNA, 15 bp, Homo sapiens
gagaaagacacttca

SEQ ID NO: 820251 - DNA, 15 bp, Homo sapiens
agaaagacacttcac

SEQ ID NO: 820252 - DNA, 15 bp, Homo sapiens
gaaagacacttcacc

SEQ ID NO: 820253 - DNA, 15 bp, Homo sapiens
aaagacacttcaccc

SEQ ID NO: 820254 - DNA, 15 bp, Homo sapiens
aagacacttcacccc

SEQ ID NO: 820255 - DNA, 15 bp, Homo sapiens
agacacttcacccca

SEQ ID NO: 820256 - DNA, 15 bp, Homo sapiens
gacacttcaccccac

SEQ ID NO: 820257 - DNA, 15 bp, Homo sapiens
acacttcaccccact

SEQ ID NO: 820258 - DNA, 15 bp, Homo sapiens
cacttcaccccactg

SEQ ID NO: 820259 - DNA, 15 bp, Homo sapiens
acttcaccccactga

SEQ ID NO: 820260 - DNA, 15 bp, Homo sapiens
cttcaccccactgag

SEQ ID NO: 820261 - DNA, 15 bp, Homo sapiens
ttcaccccactgagc

SEQ ID NO: 820262 - DNA, 15 bp, Homo sapiens
tcaccccactgagca

SEQ ID NO: 820263 - DNA, 15 bp, Homo sapiens
caccccactgagcag

SEQ ID NO: 820264 - DNA, 15 bp, Homo sapiens
accccactgagcagg

SEQ ID NO: 820265 - DNA, 15 bp, Homo sapiens
ccccactgagcaggt

SEQ ID NO: 820266 - DNA, 15 bp, Homo sapiens
cccactgagcaggta

SEQ ID NO: 820267 - DNA, 15 bp, Homo sapiens
ccactgagcaggtaa

SEQ ID NO: 820268 - DNA, 15 bp, Homo sapiens
cactgagcaggtaat

SEQ ID NO: 820269 - DNA, 15 bp, Homo sapiens
actgagcaggtaatt

SEQ ID NO: 820270 - DNA, 15 bp, Homo sapiens
ctgagcaggtaattc

SEQ ID NO: 820271 - DNA, 15 bp, Homo sapiens
tgagcaggtaattca

SEQ ID NO: 820272 - DNA, 15 bp, Homo sapiens
gagcaggtaattcat

SEQ ID NO: 820273 - DNA, 15 bp, Homo sapiens
agcaggtaattcatc

SEQ ID NO: 820274 - DNA, 15 bp, Homo sapiens
gcaggtaattcatca

SEQ ID NO: 820275 - DNA, 15 bp, Homo sapiens
caggtaattcatcat

SEQ ID NO: 820276 - DNA, 15 bp, Homo sapiens
aggtaattcatcata

SEQ ID NO: 820277 - DNA, 15 bp, Homo sapiens
ggtaattcatcatat

SEQ ID NO: 820278 - DNA, 15 bp, Homo sapiens
gtaattcatcatatt

SEQ ID NO: 820279 - DNA, 15 bp, Homo sapiens
taattcatcatattt

SEQ ID NO: 820280 - DNA, 15 bp, Homo sapiens
aattcatcatatttc

SEQ ID NO: 820281 - DNA, 15 bp, Homo sapiens
attcatcatatttct

SEQ ID NO: 820282 - DNA, 15 bp, Homo sapiens
ttcatcatatttctt

SEQ ID NO: 820283 - DNA, 15 bp, Homo sapiens
tcatcatatttcttt

SEQ ID NO: 820284 - DNA, 15 bp, Homo sapiens
catcatatttctttc

SEQ ID NO: 820285 - DNA, 15 bp, Homo sapiens
atcatatttctttcc

SEQ ID NO: 820286 - DNA, 15 bp, Homo sapiens
tcatatttctttcca

SEQ ID NO: 820287 - DNA, 15 bp, Homo sapiens
catatttctttccaa

SEQ ID NO: 820288 - DNA, 15 bp, Homo sapiens
atatttctttccaaa

SEQ ID NO: 820289 - DNA, 15 bp, Homo sapiens
tatttctttccaaat

SEQ ID NO: 820290 - DNA, 15 bp, Homo sapiens
atttctttccaaatt

SEQ ID NO: 820291 - DNA, 15 bp, Homo sapiens
tttctttccaaattt

SEQ ID NO: 820292 - DNA, 15 bp, Homo sapiens
ttctttccaaattta

SEQ ID NO: 820293 - DNA, 15 bp, Homo sapiens
tctttccaaatttat

SEQ ID NO: 820294 - DNA, 15 bp, Homo sapiens
ctttccaaatttata

SEQ ID NO: 820295 - DNA, 15 bp, Homo sapiens
tttccaaatttatac

SEQ ID NO: 820296 - DNA, 15 bp, Homo sapiens
ttccaaatttatacc

SEQ ID NO: 820297 - DNA, 15 bp, Homo sapiens
tccaaatttataccc

SEQ ID NO: 820298 - DNA, 15 bp, Homo sapiens
ccaaatttataccca

SEQ ID NO: 820299 - DNA, 15 bp, Homo sapiens
caaatttatacccaa

SEQ ID NO: 820300 - DNA, 15 bp, Homo sapiens
aaatttatacccaaa

SEQ ID NO: 820301 - DNA, 15 bp, Homo sapiens
aatttatacccaaaa

SEQ ID NO: 820302 - DNA, 15 bp, Homo sapiens
atttatacccaaaaa

SEQ ID NO: 820303 - DNA, 15 bp, Homo sapiens
tttatacccaaaaat

SEQ ID NO: 820304 - DNA, 15 bp, Homo sapiens
ttatacccaaaaatc

SEQ ID NO: 820305 - DNA, 15 bp, Homo sapiens
tatacccaaaaatct

SEQ ID NO: 820306 - DNA, 15 bp, Homo sapiens
atacccaaaaatcta

SEQ ID NO: 820307 - DNA, 15 bp, Homo sapiens
tacccaaaaatctag

SEQ ID NO: 820308 - DNA, 15 bp, Homo sapiens
acccaaaaatctagt

SEQ ID NO: 820309 - DNA, 15 bp, Homo sapiens
cccaaaaatctagtg

SEQ ID NO: 820310 - DNA, 15 bp, Homo sapiens
ccaaaaatctagtgg

SEQ ID NO: 820311 - DNA, 15 bp, Homo sapiens
caaaaatctagtgga

SEQ ID NO: 820312 - DNA, 15 bp, Homo sapiens
aaaaatctagtggat

SEQ ID NO: 820313 - DNA, 15 bp, Homo sapiens
aaaatctagtggatg

SEQ ID NO: 820314 - DNA, 15 bp, Homo sapiens
aaatctagtggatgt

SEQ ID NO: 820315 - DNA, 15 bp, Homo sapiens
aatctagtggatgtc

SEQ ID NO: 820316 - DNA, 15 bp, Homo sapiens
atctagtggatgtca

SEQ ID NO: 820317 - DNA, 15 bp, Homo sapiens
tctagtggatgtcat

SEQ ID NO: 820318 - DNA, 15 bp, Homo sapiens
ctagtggatgtcatt

SEQ ID NO: 820319 - DNA, 15 bp, Homo sapiens
tagtggatgtcattg

SEQ ID NO: 820320 - DNA, 15 bp, Homo sapiens
agtggatgtcattga

SEQ ID NO: 820321 - DNA, 15 bp, Homo sapiens
gtggatgtcattgat

SEQ ID NO: 820322 - DNA, 15 bp, Homo sapiens
tggatgtcattgata

SEQ ID NO: 820323 - DNA, 15 bp, Homo sapiens
ggatgtcattgatat

SEQ ID NO: 820324 - DNA, 15 bp, Homo sapiens
gatgtcattgatatg

SEQ ID NO: 820325 - DNA, 15 bp, Homo sapiens
atgtcattgatatgg

SEQ ID NO: 820326 - DNA, 15 bp, Homo sapiens
tgtcattgatatggt

SEQ ID NO: 820327 - DNA, 15 bp, Homo sapiens
gtcattgatatggtg

SEQ ID NO: 820328 - DNA, 15 bp, Homo sapiens
tcattgatatggtgg

SEQ ID NO: 820329 - DNA, 15 bp, Homo sapiens
cattgatatggtgga

SEQ ID NO: 820330 - DNA, 15 bp, Homo sapiens
attgatatggtggaa

SEQ ID NO: 820331 - DNA, 15 bp, Homo sapiens
ttgatatggtggaaa

SEQ ID NO: 820332 - DNA, 15 bp, Homo sapiens
tgatatggtggaaat

SEQ ID NO: 820333 - DNA, 15 bp, Homo sapiens
gatatggtggaaata

SEQ ID NO: 820334 - DNA, 15 bp, Homo sapiens
atatggtggaaatag

SEQ ID NO: 820335 - DNA, 15 bp, Homo sapiens
tatggtggaaatagc

SEQ ID NO: 820336 - DNA, 15 bp, Homo sapiens
atggtggaaatagct

SEQ ID NO: 820337 - DNA, 15 bp, Homo sapiens
tggtggaaatagcta

SEQ ID NO: 820338 - DNA, 15 bp, Homo sapiens
ggtggaaatagctat

SEQ ID NO: 820339 - DNA, 15 bp, Homo sapiens
gtggaaatagctatt

SEQ ID NO: 820340 - DNA, 15 bp, Homo sapiens
tggaaatagctattt

SEQ ID NO: 820341 - DNA, 15 bp, Homo sapiens
ggaaatagctattta

SEQ ID NO: 820342 - DNA, 15 bp, Homo sapiens
gaaatagctatttat

SEQ ID NO: 820343 - DNA, 15 bp, Homo sapiens
aaatagctatttatt

SEQ ID NO: 820344 - DNA, 15 bp, Homo sapiens
aatagctatttatta

SEQ ID NO: 820345 - DNA, 15 bp, Homo sapiens
atagctatttattat

SEQ ID NO: 820346 - DNA, 15 bp, Homo sapiens
tagctatttattatt

SEQ ID NO: 820347 - DNA, 15 bp, Homo sapiens
agctatttattatta

SEQ ID NO: 820348 - DNA, 15 bp, Homo sapiens
gctatttattattat

SEQ ID NO: 820349 - DNA, 15 bp, Homo sapiens
ctatttattattatt

SEQ ID NO: 820350 - DNA, 15 bp, Homo sapiens
tatttattattattt

SEQ ID NO: 820351 - DNA, 15 bp, Homo sapiens
atttattattatttt

SEQ ID NO: 820352 - DNA, 15 bp, Homo sapiens
tttattattattttt

SEQ ID NO: 820353 - DNA, 15 bp, Homo sapiens
ttattattatttttc

SEQ ID NO: 820354 - DNA, 15 bp, Homo sapiens
tattattatttttct

SEQ ID NO: 820355 - DNA, 15 bp, Homo sapiens
attattatttttctt

SEQ ID NO: 820356 - DNA, 15 bp, Homo sapiens
ttattatttttcttt

SEQ ID NO: 820357 - DNA, 15 bp, Homo sapiens
tattatttttctttt

SEQ ID NO: 820358 - DNA, 15 bp, Homo sapiens
attatttttcttttt

SEQ ID NO: 820359 - DNA, 15 bp, Homo sapiens
ttatttttctttttt

SEQ ID NO: 820360 - DNA, 15 bp, Homo sapiens
tatttttcttttttt

SEQ ID NO: 820361 - DNA, 15 bp, Homo sapiens
atttttctttttttg

SEQ ID NO: 820362 - DNA, 15 bp, Homo sapiens
tttttctttttttga

SEQ ID NO: 820363 - DNA, 15 bp, Homo sapiens
ttttctttttttgag

SEQ ID NO: 820364 - DNA, 15 bp, Homo sapiens
ttctttttttgagac

SEQ ID NO: 820365 - DNA, 15 bp, Homo sapiens
tctttttttgagaca

SEQ ID NO: 820366 - DNA, 15 bp, Homo sapiens
ctttttttgagacag

SEQ ID NO: 820367 - DNA, 15 bp, Homo sapiens
ttttttgagacagtc

SEQ ID NO: 820368 - DNA, 15 bp, Homo sapiens
tttttgagacagtct

SEQ ID NO: 820369 - DNA, 15 bp, Homo sapiens
ttttgagacagtctc

SEQ ID NO: 820370 - DNA, 15 bp, Homo sapiens
tttgagacagtctca

SEQ ID NO: 820371 - DNA, 15 bp, Homo sapiens
ttgagacagtctcac

SEQ ID NO: 820372 - DNA, 15 bp, Homo sapiens
tgagacagtctcact

SEQ ID NO: 820373 - DNA, 15 bp, Homo sapiens
gagacagtctcactc

SEQ ID NO: 820374 - DNA, 15 bp, Homo sapiens
agacagtctcactcc

SEQ ID NO: 820375 - DNA, 15 bp, Homo sapiens
gacagtctcactccg

SEQ ID NO: 820376 - DNA, 15 bp, Homo sapiens
acagtctcactccgt

SEQ ID NO: 820377 - DNA, 15 bp, Homo sapiens
cagtctcactccgtt

SEQ ID NO: 820378 - DNA, 15 bp, Homo sapiens
agtctcactccgttg

SEQ ID NO: 820379 - DNA, 15 bp, Homo sapiens
gtctcactccgttgc

SEQ ID NO: 820380 - DNA, 15 bp, Homo sapiens
tctcactccgttgcc

SEQ ID NO: 820381 - DNA, 15 bp, Homo sapiens
ctcactccgttgccc

SEQ ID NO: 820382 - DNA, 15 bp, Homo sapiens
tcactccgttgccca

SEQ ID NO: 820383 - DNA, 15 bp, Homo sapiens
cactccgttgcccag

SEQ ID NO: 820384 - DNA, 15 bp, Homo sapiens
actccgttgcccagg

SEQ ID NO: 820385 - DNA, 15 bp, Homo sapiens
ctccgttgcccaggc

SEQ ID NO: 820386 - DNA, 15 bp, Homo sapiens
tccgttgcccaggct

SEQ ID NO: 820387 - DNA, 15 bp, Homo sapiens
ccgttgcccaggctg

SEQ ID NO: 820388 - DNA, 15 bp, Homo sapiens
cgttgcccaggctgg

SEQ ID NO: 820389 - DNA, 15 bp, Homo sapiens
tggagtgcagtggta

SEQ ID NO: 820390 - DNA, 15 bp, Homo sapiens
ggagtgcagtggtat

SEQ ID NO: 820391 - DNA, 15 bp, Homo sapiens
gagtgcagtggtatg

SEQ ID NO: 820392 - DNA, 15 bp, Homo sapiens
agtgcagtggtatga

SEQ ID NO: 820393 - DNA, 15 bp, Homo sapiens
gtgcagtggtatgat

SEQ ID NO: 820394 - DNA, 15 bp, Homo sapiens
tgcagtggtatgatc

SEQ ID NO: 820395 - DNA, 15 bp, Homo sapiens
gcagtggtatgatct

SEQ ID NO: 820396 - DNA, 15 bp, Homo sapiens
cagtggtatgatctt

SEQ ID NO: 820397 - DNA, 15 bp, Homo sapiens
agtggtatgatcttg

SEQ ID NO: 820398 - DNA, 15 bp, Homo sapiens
gtggtatgatcttgg

SEQ ID NO: 820399 - DNA, 15 bp, Homo sapiens
tggtatgatcttggc

SEQ ID NO: 820400 - DNA, 15 bp, Homo sapiens
ggtatgatcttggct

SEQ ID NO: 820401 - DNA, 15 bp, Homo sapiens
gtatgatcttggctc

SEQ ID NO: 820402 - DNA, 15 bp, Homo sapiens
tatgatcttggctca

SEQ ID NO: 820403 - DNA, 15 bp, Homo sapiens
tcactgcaacctcta

SEQ ID NO: 820404 - DNA, 15 bp, Homo sapiens
cactgcaacctctac

SEQ ID NO: 820405 - DNA, 15 bp, Homo sapiens
actgcaacctctacc

SEQ ID NO: 820406 - DNA, 15 bp, Homo sapiens
ctgcaacctctacca

SEQ ID NO: 820407 - DNA, 15 bp, Homo sapiens
tgcaacctctaccac

SEQ ID NO: 820408 - DNA, 15 bp, Homo sapiens
gcaacctctaccacc

SEQ ID NO: 820409 - DNA, 15 bp, Homo sapiens
caacctctaccaccc

SEQ ID NO: 820410 - DNA, 15 bp, Homo sapiens
aacctctaccacccg

SEQ ID NO: 820411 - DNA, 15 bp, Homo sapiens
acctctaccacccga

SEQ ID NO: 820412 - DNA, 15 bp, Homo sapiens
cctctaccacccgag

SEQ ID NO: 820413 - DNA, 15 bp, Homo sapiens
ctctaccacccgagt

SEQ ID NO: 820414 - DNA, 15 bp, Homo sapiens
tctaccacccgagtt

SEQ ID NO: 820415 - DNA, 15 bp, Homo sapiens
ctaccacccgagttc

SEQ ID NO: 820416 - DNA, 15 bp, Homo sapiens
taccacccgagttca

SEQ ID NO: 820417 - DNA, 15 bp, Homo sapiens
accacccgagttcaa

SEQ ID NO: 820418 - DNA, 15 bp, Homo sapiens
ccacccgagttcaaa

SEQ ID NO: 820419 - DNA, 15 bp, Homo sapiens
cacccgagttcaaac

SEQ ID NO: 820420 - DNA, 15 bp, Homo sapiens
acccgagttcaaacc

SEQ ID NO: 820421 - DNA, 15 bp, Homo sapiens
cccgagttcaaacca

SEQ ID NO: 820422 - DNA, 15 bp, Homo sapiens
ccgagttcaaaccat

SEQ ID NO: 820423 - DNA, 15 bp, Homo sapiens
cgagttcaaaccatt

SEQ ID NO: 820424 - DNA, 15 bp, Homo sapiens
gagttcaaaccattc

SEQ ID NO: 820425 - DNA, 15 bp, Homo sapiens
agttcaaaccattct

SEQ ID NO: 820426 - DNA, 15 bp, Homo sapiens
gttcaaaccattctc

SEQ ID NO: 820427 - DNA, 15 bp, Homo sapiens
ttcaaaccattctcc

SEQ ID NO: 820428 - DNA, 15 bp, Homo sapiens
tcaaaccattctcct

SEQ ID NO: 820429 - DNA, 15 bp, Homo sapiens
caaaccattctcctg

SEQ ID NO: 820430 - DNA, 15 bp, Homo sapiens
aaaccattctcctgc

SEQ ID NO: 820431 - DNA, 15 bp, Homo sapiens
aaccattctcctgcc

SEQ ID NO: 820432 - DNA, 15 bp, Homo sapiens
gggactacaggtgtt

SEQ ID NO: 820433 - DNA, 15 bp, Homo sapiens
ggactacaggtgttc

SEQ ID NO: 820434 - DNA, 15 bp, Homo sapiens
gactacaggtgttca

SEQ ID NO: 820435 - DNA, 15 bp, Homo sapiens
actacaggtgttcac

SEQ ID NO: 820436 - DNA, 15 bp, Homo sapiens
ctacaggtgttcacc

SEQ ID NO: 820437 - DNA, 15 bp, Homo sapiens
tacaggtgttcacca

SEQ ID NO: 820438 - DNA, 15 bp, Homo sapiens
acaggtgttcaccac

SEQ ID NO: 820439 - DNA, 15 bp, Homo sapiens
caggtgttcaccacc

SEQ ID NO: 820440 - DNA, 15 bp, Homo sapiens
aggtgttcaccacca

SEQ ID NO: 820441 - DNA, 15 bp, Homo sapiens
ggtgttcaccaccac

SEQ ID NO: 820442 - DNA, 15 bp, Homo sapiens
gtgttcaccaccact

SEQ ID NO: 820443 - DNA, 15 bp, Homo sapiens
tgttcaccaccactc

SEQ ID NO: 820444 - DNA, 15 bp, Homo sapiens
gttcaccaccactcc

SEQ ID NO: 820445 - DNA, 15 bp, Homo sapiens
ttcaccaccactccc

SEQ ID NO: 820446 - DNA, 15 bp, Homo sapiens
tcaccaccactccca

SEQ ID NO: 820447 - DNA, 15 bp, Homo sapiens
caccaccactcccag

SEQ ID NO: 820448 - DNA, 15 bp, Homo sapiens
accaccactcccagc

SEQ ID NO: 820449 - DNA, 15 bp, Homo sapiens
ccaccactcccagct

SEQ ID NO: 820450 - DNA, 15 bp, Homo sapiens
caccactcccagcta

SEQ ID NO: 820451 - DNA, 15 bp, Homo sapiens
accactcccagctaa

SEQ ID NO: 820452 - DNA, 15 bp, Homo sapiens
ccactcccagctaat

SEQ ID NO: 820453 - DNA, 15 bp, Homo sapiens
cactcccagctaatt

SEQ ID NO: 820454 - DNA, 15 bp, Homo sapiens
actcccagctaattt

SEQ ID NO: 820455 - DNA, 15 bp, Homo sapiens
ctcccagctaatttt

SEQ ID NO: 820456 - DNA, 15 bp, Homo sapiens
tcccagctaattttt

SEQ ID NO: 820457 - DNA, 15 bp, Homo sapiens
aatttttgtattttc

SEQ ID NO: 820458 - DNA, 15 bp, Homo sapiens
atttttgtattttca

SEQ ID NO: 820459 - DNA, 15 bp, Homo sapiens
ttttgtattttcagt

SEQ ID NO: 820460 - DNA, 15 bp, Homo sapiens
tttgtattttcagtg

SEQ ID NO: 820461 - DNA, 15 bp, Homo sapiens
ttgtattttcagtgg

SEQ ID NO: 820462 - DNA, 15 bp, Homo sapiens
tgtattttcagtgga

SEQ ID NO: 820463 - DNA, 15 bp, Homo sapiens
gtattttcagtggag

SEQ ID NO: 820464 - DNA, 15 bp, Homo sapiens
tattttcagtggagg

SEQ ID NO: 820465 - DNA, 15 bp, Homo sapiens
attttcagtggaggt

SEQ ID NO: 820466 - DNA, 15 bp, Homo sapiens
ttttcagtggaggtg

SEQ ID NO: 820467 - DNA, 15 bp, Homo sapiens
tttcagtggaggtgg

SEQ ID NO: 820468 - DNA, 15 bp, Homo sapiens
ttcagtggaggtggg

SEQ ID NO: 820469 - DNA, 15 bp, Homo sapiens
tcagtggaggtgggg

SEQ ID NO: 820470 - DNA, 15 bp, Homo sapiens
cagtggaggtggggt

SEQ ID NO: 820471 - DNA, 15 bp, Homo sapiens
agtggaggtggggtt

SEQ ID NO: 820472 - DNA, 15 bp, Homo sapiens
gtggaggtggggttt

SEQ ID NO: 820473 - DNA, 15 bp, Homo sapiens
tggaggtggggtttc

SEQ ID NO: 820474 - DNA, 15 bp, Homo sapiens
ggaggtggggtttca

SEQ ID NO: 820475 - DNA, 15 bp, Homo sapiens
gaggtggggtttcac

SEQ ID NO: 820476 - DNA, 15 bp, Homo sapiens
aggtggggtttcacc

SEQ ID NO: 820477 - DNA, 15 bp, Homo sapiens
ggtggggtttcacca

SEQ ID NO: 820478 - DNA, 15 bp, Homo sapiens
gtggggtttcaccat

SEQ ID NO: 820479 - DNA, 15 bp, Homo sapiens
ctcgaactcctgact

SEQ ID NO: 820480 - DNA, 15 bp, Homo sapiens
tcgaactcctgactt

SEQ ID NO: 820481 - DNA, 15 bp, Homo sapiens
cgaactcctgacttt

SEQ ID NO: 820482 - DNA, 15 bp, Homo sapiens
gaactcctgacttta

SEQ ID NO: 820483 - DNA, 15 bp, Homo sapiens
aactcctgactttaa

SEQ ID NO: 820484 - DNA, 15 bp, Homo sapiens
actcctgactttaag

SEQ ID NO: 820485 - DNA, 15 bp, Homo sapiens
ctcctgactttaagt

SEQ ID NO: 820486 - DNA, 15 bp, Homo sapiens
tcctgactttaagtg

SEQ ID NO: 820487 - DNA, 15 bp, Homo sapiens
cctgactttaagtga

SEQ ID NO: 820488 - DNA, 15 bp, Homo sapiens
ctgactttaagtgat

SEQ ID NO: 820489 - DNA, 15 bp, Homo sapiens
tgactttaagtgatc

SEQ ID NO: 820490 - DNA, 15 bp, Homo sapiens
gactttaagtgatcc

SEQ ID NO: 820491 - DNA, 15 bp, Homo sapiens
actttaagtgatcca

SEQ ID NO: 820492 - DNA, 15 bp, Homo sapiens
ctttaagtgatccac

SEQ ID NO: 820493 - DNA, 15 bp, Homo sapiens
tttaagtgatccacc

SEQ ID NO: 820494 - DNA, 15 bp, Homo sapiens
ttaagtgatccacct

SEQ ID NO: 820495 - DNA, 15 bp, Homo sapiens
taagtgatccacctg

SEQ ID NO: 820496 - DNA, 15 bp, Homo sapiens
aagtgatccacctgc

SEQ ID NO: 820497 - DNA, 15 bp, Homo sapiens
agtgatccacctgcc

SEQ ID NO: 820498 - DNA, 15 bp, Homo sapiens
gattacaggcttgag

SEQ ID NO: 820499 - DNA, 15 bp, Homo sapiens
attacaggcttgagc

SEQ ID NO: 820500 - DNA, 15 bp, Homo sapiens
ttacaggcttgagcc

SEQ ID NO: 820501 - DNA, 15 bp, Homo sapiens
tacaggcttgagcca

SEQ ID NO: 820502 - DNA, 15 bp, Homo sapiens
acaggcttgagccac

SEQ ID NO: 820503 - DNA, 15 bp, Homo sapiens
caggcttgagccacc

SEQ ID NO: 820504 - DNA, 15 bp, Homo sapiens
aggcttgagccacca

SEQ ID NO: 820505 - DNA, 15 bp, Homo sapiens
ggcttgagccaccat

SEQ ID NO: 820506 - DNA, 15 bp, Homo sapiens
gcttgagccaccata

SEQ ID NO: 820507 - DNA, 15 bp, Homo sapiens
cttgagccaccatac

SEQ ID NO: 820508 - DNA, 15 bp, Homo sapiens
ttgagccaccatact

SEQ ID NO: 820509 - DNA, 15 bp, Homo sapiens
tgagccaccatactc

SEQ ID NO: 820510 - DNA, 15 bp, Homo sapiens
gagccaccatactca

SEQ ID NO: 820511 - DNA, 15 bp, Homo sapiens
agccaccatactcag

SEQ ID NO: 820512 - DNA, 15 bp, Homo sapiens
gccaccatactcagc

SEQ ID NO: 820513 - DNA, 15 bp, Homo sapiens
ccaccatactcagcc

SEQ ID NO: 820514 - DNA, 15 bp, Homo sapiens
caccatactcagcca

SEQ ID NO: 820515 - DNA, 15 bp, Homo sapiens
accatactcagccag

SEQ ID NO: 820516 - DNA, 15 bp, Homo sapiens
ccatactcagccagc

SEQ ID NO: 820517 - DNA, 15 bp, Homo sapiens
catactcagccagct

SEQ ID NO: 820518 - DNA, 15 bp, Homo sapiens
atactcagccagcta

SEQ ID NO: 820519 - DNA, 15 bp, Homo sapiens
tactcagccagctat

SEQ ID NO: 820520 - DNA, 15 bp, Homo sapiens
actcagccagctatt

SEQ ID NO: 820521 - DNA, 15 bp, Homo sapiens
ctcagccagctattt

SEQ ID NO: 820522 - DNA, 15 bp, Homo sapiens
tcagccagctattta

SEQ ID NO: 820523 - DNA, 15 bp, Homo sapiens
cagccagctatttat

SEQ ID NO: 820524 - DNA, 15 bp, Homo sapiens
agccagctatttatt

SEQ ID NO: 820525 - DNA, 15 bp, Homo sapiens
gccagctatttatta

SEQ ID NO: 820526 - DNA, 15 bp, Homo sapiens
ccagctatttattat

SEQ ID NO: 820527 - DNA, 15 bp, Homo sapiens
cagctatttattatt

SEQ ID NO: 820528 - DNA, 15 bp, Homo sapiens
agctatttattattt

SEQ ID NO: 820529 - DNA, 15 bp, Homo sapiens
gctatttattatttc

SEQ ID NO: 820530 - DNA, 15 bp, Homo sapiens
ctatttattatttct

SEQ ID NO: 820531 - DNA, 15 bp, Homo sapiens
tatttattatttctg

SEQ ID NO: 820532 - DNA, 15 bp, Homo sapiens
atttattatttctga

SEQ ID NO: 820533 - DNA, 15 bp, Homo sapiens
tttattatttctgaa

SEQ ID NO: 820534 - DNA, 15 bp, Homo sapiens
ttattatttctgaaa

SEQ ID NO: 820535 - DNA, 15 bp, Homo sapiens
tattatttctgaaac

SEQ ID NO: 820536 - DNA, 15 bp, Homo sapiens
attatttctgaaaca

SEQ ID NO: 820537 - DNA, 15 bp, Homo sapiens
ttatttctgaaacat

SEQ ID NO: 820538 - DNA, 15 bp, Homo sapiens
tatttctgaaacatg

SEQ ID NO: 820539 - DNA, 15 bp, Homo sapiens
atttctgaaacatgg

SEQ ID NO: 820540 - DNA, 15 bp, Homo sapiens
tttctgaaacatggg

SEQ ID NO: 820541 - DNA, 15 bp, Homo sapiens
ttctgaaacatgggc

SEQ ID NO: 820542 - DNA, 15 bp, Homo sapiens
tctgaaacatgggca

SEQ ID NO: 820543 - DNA, 15 bp, Homo sapiens
ctgaaacatgggcag

SEQ ID NO: 820544 - DNA, 15 bp, Homo sapiens
tgaaacatgggcagg

SEQ ID NO: 820545 - DNA, 15 bp, Homo sapiens
gaaacatgggcaggg

SEQ ID NO: 820546 - DNA, 15 bp, Homo sapiens
aaacatgggcagggg

SEQ ID NO: 820547 - DNA, 15 bp, Homo sapiens
aacatgggcagggga

SEQ ID NO: 820548 - DNA, 15 bp, Homo sapiens
acatgggcaggggaa

SEQ ID NO: 820549 - DNA, 15 bp, Homo sapiens
catgggcaggggaaa

SEQ ID NO: 820550 - DNA, 15 bp, Homo sapiens
atgggcaggggaaac

SEQ ID NO: 820551 - DNA, 15 bp, Homo sapiens
tgggcaggggaaacc

SEQ ID NO: 820552 - DNA, 15 bp, Homo sapiens
gggcaggggaaacct

SEQ ID NO: 820553 - DNA, 15 bp, Homo sapiens
ggcaggggaaaccta

SEQ ID NO: 820554 - DNA, 15 bp, Homo sapiens
gcaggggaaacctaa

SEQ ID NO: 820555 - DNA, 15 bp, Homo sapiens
caggggaaacctaat

SEQ ID NO: 820556 - DNA, 15 bp, Homo sapiens
aggggaaacctaatt

SEQ ID NO: 820557 - DNA, 15 bp, Homo sapiens
ggggaaacctaattt

SEQ ID NO: 820558 - DNA, 15 bp, Homo sapiens
gggaaacctaatttt

SEQ ID NO: 820559 - DNA, 15 bp, Homo sapiens
ggaaacctaattttg

SEQ ID NO: 820560 - DNA, 15 bp, Homo sapiens
gaaacctaattttga

SEQ ID NO: 820561 - DNA, 15 bp, Homo sapiens
aaacctaattttgat

SEQ ID NO: 820562 - DNA, 15 bp, Homo sapiens
aacctaattttgata

SEQ ID NO: 820563 - DNA, 15 bp, Homo sapiens
acctaattttgataa

SEQ ID NO: 820564 - DNA, 15 bp, Homo sapiens
cctaattttgataaa

SEQ ID NO: 820565 - DNA, 15 bp, Homo sapiens
ctaattttgataaat

SEQ ID NO: 820566 - DNA, 15 bp, Homo sapiens
taattttgataaata

SEQ ID NO: 820567 - DNA, 15 bp, Homo sapiens
aattttgataaataa

SEQ ID NO: 820568 - DNA, 15 bp, Homo sapiens
attttgataaataaa

SEQ ID NO: 820569 - DNA, 15 bp, Homo sapiens
ttttgataaataaat

SEQ ID NO: 820570 - DNA, 15 bp, Homo sapiens
tttgataaataaatg

SEQ ID NO: 820571 - DNA, 15 bp, Homo sapiens
ttgataaataaatga

SEQ ID NO: 820572 - DNA, 15 bp, Homo sapiens
ggatttaaacaaaca

SEQ ID NO: 820573 - DNA, 15 bp, Homo sapiens
gatttaaacaaacac

SEQ ID NO: 820574 - DNA, 15 bp, Homo sapiens
atttaaacaaacaca

SEQ ID NO: 820575 - DNA, 15 bp, Homo sapiens
tttaaacaaacacaa

SEQ ID NO: 820576 - DNA, 15 bp, Homo sapiens
ttaaacaaacacaaa

SEQ ID NO: 820577 - DNA, 15 bp, Homo sapiens
taaacaaacacaaat

SEQ ID NO: 820578 - DNA, 15 bp, Homo sapiens
aaacaaacacaaata

SEQ ID NO: 820579 - DNA, 15 bp, Homo sapiens
aacaaacacaaatag

SEQ ID NO: 820580 - DNA, 15 bp, Homo sapiens
acaaacacaaatagt

SEQ ID NO: 820581 - DNA, 15 bp, Homo sapiens
caaacacaaatagta

SEQ ID NO: 820582 - DNA, 15 bp, Homo sapiens
aaacacaaatagtat

SEQ ID NO: 820583 - DNA, 15 bp, Homo sapiens
aacacaaatagtatg

SEQ ID NO: 820584 - DNA, 15 bp, Homo sapiens
acacaaatagtatgg

SEQ ID NO: 820585 - DNA, 15 bp, Homo sapiens
cacaaatagtatggt

SEQ ID NO: 820586 - DNA, 15 bp, Homo sapiens
acaaatagtatggtt

SEQ ID NO: 820587 - DNA, 15 bp, Homo sapiens
caaatagtatggttt

SEQ ID NO: 820588 - DNA, 15 bp, Homo sapiens
aaatagtatggtttg

SEQ ID NO: 820589 - DNA, 15 bp, Homo sapiens
aatagtatggtttgg

SEQ ID NO: 820590 - DNA, 15 bp, Homo sapiens
atagtatggtttggc

SEQ ID NO: 820591 - DNA, 15 bp, Homo sapiens
tagtatggtttggcc

SEQ ID NO: 820592 - DNA, 15 bp, Homo sapiens
agtatggtttggcca

SEQ ID NO: 820593 - DNA, 15 bp, Homo sapiens
gtatggtttggccag

SEQ ID NO: 820594 - DNA, 15 bp, Homo sapiens
tatggtttggccaga

SEQ ID NO: 820595 - DNA, 15 bp, Homo sapiens
atggtttggccagag

SEQ ID NO: 820596 - DNA, 15 bp, Homo sapiens
tggtttggccagaga

SEQ ID NO: 820597 - DNA, 15 bp, Homo sapiens
ggtttggccagagag

SEQ ID NO: 820598 - DNA, 15 bp, Homo sapiens
gtttggccagagagt

SEQ ID NO: 820599 - DNA, 15 bp, Homo sapiens
tttggccagagagtg

SEQ ID NO: 820600 - DNA, 15 bp, Homo sapiens
ttggccagagagtgg

SEQ ID NO: 820601 - DNA, 15 bp, Homo sapiens
tggccagagagtgga

SEQ ID NO: 820602 - DNA, 15 bp, Homo sapiens
ggccagagagtggag

SEQ ID NO: 820603 - DNA, 15 bp, Homo sapiens
gccagagagtggagg

SEQ ID NO: 820604 - DNA, 15 bp, Homo sapiens
ccagagagtggaggc

SEQ ID NO: 820605 - DNA, 15 bp, Homo sapiens
cagagagtggaggca

SEQ ID NO: 820606 - DNA, 15 bp, Homo sapiens
agagagtggaggcag

SEQ ID NO: 820607 - DNA, 15 bp, Homo sapiens
gagagtggaggcaga

SEQ ID NO: 820608 - DNA, 15 bp, Homo sapiens
agagtggaggcagac

SEQ ID NO: 820609 - DNA, 15 bp, Homo sapiens
gagtggaggcagacc

SEQ ID NO: 820610 - DNA, 15 bp, Homo sapiens
agtggaggcagaccc

SEQ ID NO: 820611 - DNA, 15 bp, Homo sapiens
gtggaggcagaccct

SEQ ID NO: 820612 - DNA, 15 bp, Homo sapiens
tggaggcagaccctg

SEQ ID NO: 820613 - DNA, 15 bp, Homo sapiens
ggaggcagaccctgg

SEQ ID NO: 820614 - DNA, 15 bp, Homo sapiens
gaggcagaccctggt

SEQ ID NO: 820615 - DNA, 15 bp, Homo sapiens
aggcagaccctggtt

SEQ ID NO: 820616 - DNA, 15 bp, Homo sapiens
ggcagaccctggttg

SEQ ID NO: 820617 - DNA, 15 bp, Homo sapiens
gcagaccctggttgg

SEQ ID NO: 820618 - DNA, 15 bp, Homo sapiens
cagaccctggttggc

SEQ ID NO: 820619 - DNA, 15 bp, Homo sapiens
agaccctggttggca

SEQ ID NO: 820620 - DNA, 15 bp, Homo sapiens
gaccctggttggcat

SEQ ID NO: 820621 - DNA, 15 bp, Homo sapiens
accctggttggcatc

SEQ ID NO: 820622 - DNA, 15 bp, Homo sapiens
ccctggttggcatcc

SEQ ID NO: 820623 - DNA, 15 bp, Homo sapiens
cctggttggcatccc

SEQ ID NO: 820624 - DNA, 15 bp, Homo sapiens
ctggttggcatcccc

SEQ ID NO: 820625 - DNA, 15 bp, Homo sapiens
tggttggcatcccca

SEQ ID NO: 820626 - DNA, 15 bp, Homo sapiens
ggttggcatccccat

SEQ ID NO: 820627 - DNA, 15 bp, Homo sapiens
gttggcatccccata

SEQ ID NO: 820628 - DNA, 15 bp, Homo sapiens
ttggcatccccatat

SEQ ID NO: 820629 - DNA, 15 bp, Homo sapiens
tggcatccccatatg

SEQ ID NO: 820630 - DNA, 15 bp, Homo sapiens
ggcatccccatatgc

SEQ ID NO: 820631 - DNA, 15 bp, Homo sapiens
gcatccccatatgca

SEQ ID NO: 820632 - DNA, 15 bp, Homo sapiens
catccccatatgcac

SEQ ID NO: 820633 - DNA, 15 bp, Homo sapiens
atccccatatgcaca

SEQ ID NO: 820634 - DNA, 15 bp, Homo sapiens
tccccatatgcacag

SEQ ID NO: 820635 - DNA, 15 bp, Homo sapiens
ccccatatgcacagc

SEQ ID NO: 820636 - DNA, 15 bp, Homo sapiens
cccatatgcacagcc

SEQ ID NO: 820637 - DNA, 15 bp, Homo sapiens
ccatatgcacagccc

SEQ ID NO: 820638 - DNA, 15 bp, Homo sapiens
catatgcacagccct

SEQ ID NO: 820639 - DNA, 15 bp, Homo sapiens
atatgcacagccctg

SEQ ID NO: 820640 - DNA, 15 bp, Homo sapiens
tatgcacagccctgc

SEQ ID NO: 820641 - DNA, 15 bp, Homo sapiens
atgcacagccctgcc

SEQ ID NO: 820642 - DNA, 15 bp, Homo sapiens
tgcacagccctgcct

SEQ ID NO: 820643 - DNA, 15 bp, Homo sapiens
gcacagccctgcctc

SEQ ID NO: 820644 - DNA, 15 bp, Homo sapiens
cacagccctgcctcc

SEQ ID NO: 820645 - DNA, 15 bp, Homo sapiens
acagccctgcctcct

SEQ ID NO: 820646 - DNA, 15 bp, Homo sapiens
cagccctgcctcctg

SEQ ID NO: 820647 - DNA, 15 bp, Homo sapiens
agccctgcctcctgc

SEQ ID NO: 820648 - DNA, 15 bp, Homo sapiens
gccctgcctcctgcc

SEQ ID NO: 820649 - DNA, 15 bp, Homo sapiens
ccctgcctcctgcct

SEQ ID NO: 820650 - DNA, 15 bp, Homo sapiens
cctgcctcctgcctc

SEQ ID NO: 820651 - DNA, 15 bp, Homo sapiens
ctgcctcctgcctcc

SEQ ID NO: 820652 - DNA, 15 bp, Homo sapiens
tgcctcctgcctccc

SEQ ID NO: 820653 - DNA, 15 bp, Homo sapiens
gcctcctgcctcccc

SEQ ID NO: 820654 - DNA, 15 bp, Homo sapiens
cctcctgcctcccct

SEQ ID NO: 820655 - DNA, 15 bp, Homo sapiens
ctcctgcctcccctt

SEQ ID NO: 820656 - DNA, 15 bp, Homo sapiens
tcctgcctccccttt

SEQ ID NO: 820657 - DNA, 15 bp, Homo sapiens
cctgcctcccctttc

SEQ ID NO: 820658 - DNA, 15 bp, Homo sapiens
ctgcctcccctttcc

SEQ ID NO: 820659 - DNA, 15 bp, Homo sapiens
tgcctcccctttccc

SEQ ID NO: 820660 - DNA, 15 bp, Homo sapiens
gcctcccctttccct

SEQ ID NO: 820661 - DNA, 15 bp, Homo sapiens
cctcccctttccctg

SEQ ID NO: 820662 - DNA, 15 bp, Homo sapiens
ctcccctttccctgt

SEQ ID NO: 820663 - DNA, 15 bp, Homo sapiens
tcccctttccctgta

SEQ ID NO: 820664 - DNA, 15 bp, Homo sapiens
cccctttccctgtac

SEQ ID NO: 820665 - DNA, 15 bp, Homo sapiens
ccctttccctgtact

SEQ ID NO: 820666 - DNA, 15 bp, Homo sapiens
cctttccctgtactt

SEQ ID NO: 820667 - DNA, 15 bp, Homo sapiens
ctttccctgtacttc

SEQ ID NO: 820668 - DNA, 15 bp, Homo sapiens
tttccctgtacttcc

SEQ ID NO: 820669 - DNA, 15 bp, Homo sapiens
ttccctgtacttcct

SEQ ID NO: 820670 - DNA, 15 bp, Homo sapiens
tccctgtacttcctg

SEQ ID NO: 820671 - DNA, 15 bp, Homo sapiens
ccctgtacttcctgc

SEQ ID NO: 820672 - DNA, 15 bp, Homo sapiens
cctgtacttcctgcc

SEQ ID NO: 820673 - DNA, 15 bp, Homo sapiens
ctgtacttcctgccc

SEQ ID NO: 820674 - DNA, 15 bp, Homo sapiens
tgtacttcctgcccc

SEQ ID NO: 820675 - DNA, 15 bp, Homo sapiens
gtacttcctgcccca

SEQ ID NO: 820676 - DNA, 15 bp, Homo sapiens
tacttcctgccccag

SEQ ID NO: 820677 - DNA, 15 bp, Homo sapiens
acttcctgccccagc

SEQ ID NO: 820678 - DNA, 15 bp, Homo sapiens
cttcctgccccagct

SEQ ID NO: 820679 - DNA, 15 bp, Homo sapiens
ttcctgccccagctc

SEQ ID NO: 820680 - DNA, 15 bp, Homo sapiens
tcctgccccagctcc

SEQ ID NO: 820681 - DNA, 15 bp, Homo sapiens
cctgccccagctcca

SEQ ID NO: 820682 - DNA, 15 bp, Homo sapiens
ctgccccagctccac

SEQ ID NO: 820683 - DNA, 15 bp, Homo sapiens
tgccccagctccact

SEQ ID NO: 820684 - DNA, 15 bp, Homo sapiens
gccccagctccacta

SEQ ID NO: 820685 - DNA, 15 bp, Homo sapiens
ccccagctccactag

SEQ ID NO: 820686 - DNA, 15 bp, Homo sapiens
cccagctccactagg

SEQ ID NO: 820687 - DNA, 15 bp, Homo sapiens
ccagctccactaggc

SEQ ID NO: 820688 - DNA, 15 bp, Homo sapiens
cagctccactaggct

SEQ ID NO: 820689 - DNA, 15 bp, Homo sapiens
agctccactaggctg

SEQ ID NO: 820690 - DNA, 15 bp, Homo sapiens
gctccactaggctgc

SEQ ID NO: 820691 - DNA, 15 bp, Homo sapiens
ctccactaggctgct

SEQ ID NO: 820692 - DNA, 15 bp, Homo sapiens
tccactaggctgcta

SEQ ID NO: 820693 - DNA, 15 bp, Homo sapiens
ccactaggctgctag

SEQ ID NO: 820694 - DNA, 15 bp, Homo sapiens
cactaggctgctagc

SEQ ID NO: 820695 - DNA, 15 bp, Homo sapiens
actaggctgctagct

SEQ ID NO: 820696 - DNA, 15 bp, Homo sapiens
ctaggctgctagctg

SEQ ID NO: 820697 - DNA, 15 bp, Homo sapiens
taggctgctagctgc

SEQ ID NO: 820698 - DNA, 15 bp, Homo sapiens
aggctgctagctgca

SEQ ID NO: 820699 - DNA, 15 bp, Homo sapiens
ggctgctagctgcat

SEQ ID NO: 820700 - DNA, 15 bp, Homo sapiens
gctgctagctgcatc

SEQ ID NO: 820701 - DNA, 15 bp, Homo sapiens
ctgctagctgcatct

SEQ ID NO: 820702 - DNA, 15 bp, Homo sapiens
tgctagctgcatctt

SEQ ID NO: 820703 - DNA, 15 bp, Homo sapiens
gctagctgcatcttc

SEQ ID NO: 820704 - DNA, 15 bp, Homo sapiens
ctagctgcatcttct

SEQ ID NO: 820705 - DNA, 15 bp, Homo sapiens
tagctgcatcttctt

SEQ ID NO: 820706 - DNA, 15 bp, Homo sapiens
agctgcatcttcttg

SEQ ID NO: 820707 - DNA, 15 bp, Homo sapiens
gctgcatcttcttgc

SEQ ID NO: 820708 - DNA, 15 bp, Homo sapiens
ctgcatcttcttgct

SEQ ID NO: 820709 - DNA, 15 bp, Homo sapiens
tgcatcttcttgctg

SEQ ID NO: 820710 - DNA, 15 bp, Homo sapiens
gcatcttcttgctgt

SEQ ID NO: 820711 - DNA, 15 bp, Homo sapiens
catcttcttgctgtc

SEQ ID NO: 820712 - DNA, 15 bp, Homo sapiens
atcttcttgctgtct

SEQ ID NO: 820713 - DNA, 15 bp, Homo sapiens
tcttcttgctgtctc

SEQ ID NO: 820714 - DNA, 15 bp, Homo sapiens
cttcttgctgtctct

SEQ ID NO: 820715 - DNA, 15 bp, Homo sapiens
ttcttgctgtctctg

SEQ ID NO: 820716 - DNA, 15 bp, Homo sapiens
tcttgctgtctctgc

SEQ ID NO: 820717 - DNA, 15 bp, Homo sapiens
cttgctgtctctgcc

SEQ ID NO: 820718 - DNA, 15 bp, Homo sapiens
ttgctgtctctgccc

SEQ ID NO: 820719 - DNA, 15 bp, Homo sapiens
tgctgtctctgccct

SEQ ID NO: 820720 - DNA, 15 bp, Homo sapiens
gctgtctctgccctg

SEQ ID NO: 820721 - DNA, 15 bp, Homo sapiens
ctgtctctgccctgt

SEQ ID NO: 820722 - DNA, 15 bp, Homo sapiens
tgtctctgccctgtg

SEQ ID NO: 820723 - DNA, 15 bp, Homo sapiens
gtctctgccctgtgc

SEQ ID NO: 820724 - DNA, 15 bp, Homo sapiens
tctctgccctgtgcc

SEQ ID NO: 820725 - DNA, 15 bp, Homo sapiens
ctctgccctgtgcct

SEQ ID NO: 820726 - DNA, 15 bp, Homo sapiens
tctgccctgtgcctg

SEQ ID NO: 820727 - DNA, 15 bp, Homo sapiens
ctgccctgtgcctgg

SEQ ID NO: 820728 - DNA, 15 bp, Homo sapiens
tgccctgtgcctggt

SEQ ID NO: 820729 - DNA, 15 bp, Homo sapiens
gccctgtgcctggtc

SEQ ID NO: 820730 - DNA, 15 bp, Homo sapiens
ccctgtgcctggtca

SEQ ID NO: 820731 - DNA, 15 bp, Homo sapiens
cctgtgcctggtcat

SEQ ID NO: 820732 - DNA, 15 bp, Homo sapiens
ctgtgcctggtcatg

SEQ ID NO: 820733 - DNA, 15 bp, Homo sapiens
tgtgcctggtcatga

SEQ ID NO: 820734 - DNA, 15 bp, Homo sapiens
gtgcctggtcatgag

SEQ ID NO: 820735 - DNA, 15 bp, Homo sapiens
tgcctggtcatgagt

SEQ ID NO: 820736 - DNA, 15 bp, Homo sapiens
gcctggtcatgagta

SEQ ID NO: 820737 - DNA, 15 bp, Homo sapiens
cctggtcatgagtaa

SEQ ID NO: 820738 - DNA, 15 bp, Homo sapiens
ctggtcatgagtaag

SEQ ID NO: 820739 - DNA, 15 bp, Homo sapiens
tggtcatgagtaagt

SEQ ID NO: 820740 - DNA, 15 bp, Homo sapiens
ggtcatgagtaagtt

SEQ ID NO: 820741 - DNA, 15 bp, Homo sapiens
gtcatgagtaagttc

SEQ ID NO: 820742 - DNA, 15 bp, Homo sapiens
tcatgagtaagttcc

SEQ ID NO: 820743 - DNA, 15 bp, Homo sapiens
catgagtaagttcct

SEQ ID NO: 820744 - DNA, 15 bp, Homo sapiens
atgagtaagttcctg

SEQ ID NO: 820745 - DNA, 15 bp, Homo sapiens
tgagtaagttcctgc

SEQ ID NO: 820746 - DNA, 15 bp, Homo sapiens
gagtaagttcctgcc

SEQ ID NO: 820747 - DNA, 15 bp, Homo sapiens
agtaagttcctgccc

SEQ ID NO: 820748 - DNA, 15 bp, Homo sapiens
gtaagttcctgccct

SEQ ID NO: 820749 - DNA, 15 bp, Homo sapiens
taagttcctgccctg

SEQ ID NO: 820750 - DNA, 15 bp, Homo sapiens
aagttcctgccctga

SEQ ID NO: 820751 - DNA, 15 bp, Homo sapiens
agttcctgccctgac

SEQ ID NO: 820752 - DNA, 15 bp, Homo sapiens
gttcctgccctgact

SEQ ID NO: 820753 - DNA, 15 bp, Homo sapiens
ttcctgccctgactc

SEQ ID NO: 820754 - DNA, 15 bp, Homo sapiens
tcctgccctgactct

SEQ ID NO: 820755 - DNA, 15 bp, Homo sapiens
cctgccctgactctg

SEQ ID NO: 820756 - DNA, 15 bp, Homo sapiens
ctgccctgactctgc

SEQ ID NO: 820757 - DNA, 15 bp, Homo sapiens
tgccctgactctgca

SEQ ID NO: 820758 - DNA, 15 bp, Homo sapiens
gccctgactctgcag

SEQ ID NO: 820759 - DNA, 15 bp, Homo sapiens
ccctgactctgcagg

SEQ ID NO: 820760 - DNA, 15 bp, Homo sapiens
cctgactctgcaggt

SEQ ID NO: 820761 - DNA, 15 bp, Homo sapiens
ctgactctgcaggtt

SEQ ID NO: 820762 - DNA, 15 bp, Homo sapiens
tgactctgcaggttg

SEQ ID NO: 820763 - DNA, 15 bp, Homo sapiens
gactctgcaggttgt

SEQ ID NO: 820764 - DNA, 15 bp, Homo sapiens
actctgcaggttgta

SEQ ID NO: 820765 - DNA, 15 bp, Homo sapiens
ctctgcaggttgtaa

SEQ ID NO: 820766 - DNA, 15 bp, Homo sapiens
tctgcaggttgtaat

SEQ ID NO: 820767 - DNA, 15 bp, Homo sapiens
ctgcaggttgtaatc

SEQ ID NO: 820768 - DNA, 15 bp, Homo sapiens
tgcaggttgtaatcc

SEQ ID NO: 820769 - DNA, 15 bp, Homo sapiens
gcaggttgtaatcct

SEQ ID NO: 820770 - DNA, 15 bp, Homo sapiens
caggttgtaatcctt

SEQ ID NO: 820771 - DNA, 15 bp, Homo sapiens
aggttgtaatccttc

SEQ ID NO: 820772 - DNA, 15 bp, Homo sapiens
ggttgtaatccttct

SEQ ID NO: 820773 - DNA, 15 bp, Homo sapiens
gttgtaatccttctc

SEQ ID NO: 820774 - DNA, 15 bp, Homo sapiens
ttgtaatccttctcc

SEQ ID NO: 820775 - DNA, 15 bp, Homo sapiens
tgtaatccttctccc

SEQ ID NO: 820776 - DNA, 15 bp, Homo sapiens
gtaatccttctcccc

SEQ ID NO: 820777 - DNA, 15 bp, Homo sapiens
taatccttctcccca

SEQ ID NO: 820778 - DNA, 15 bp, Homo sapiens
aatccttctccccat

SEQ ID NO: 820779 - DNA, 15 bp, Homo sapiens
atccttctccccatt

SEQ ID NO: 820780 - DNA, 15 bp, Homo sapiens
tccttctccccatta

SEQ ID NO: 820781 - DNA, 15 bp, Homo sapiens
ccttctccccattaa

SEQ ID NO: 820782 - DNA, 15 bp, Homo sapiens
cttctccccattaag

SEQ ID NO: 820783 - DNA, 15 bp, Homo sapiens
ttctccccattaagg

SEQ ID NO: 820784 - DNA, 15 bp, Homo sapiens
tctccccattaaggc

SEQ ID NO: 820785 - DNA, 15 bp, Homo sapiens
ctccccattaaggca

SEQ ID NO: 820786 - DNA, 15 bp, Homo sapiens
tccccattaaggcac

SEQ ID NO: 820787 - DNA, 15 bp, Homo sapiens
ccccattaaggcaca

SEQ ID NO: 820788 - DNA, 15 bp, Homo sapiens
cccattaaggcacag

SEQ ID NO: 820789 - DNA, 15 bp, Homo sapiens
ccattaaggcacagc

SEQ ID NO: 820790 - DNA, 15 bp, Homo sapiens
cattaaggcacagct

SEQ ID NO: 820791 - DNA, 15 bp, Homo sapiens
attaaggcacagctc

SEQ ID NO: 820792 - DNA, 15 bp, Homo sapiens
ttaaggcacagctct

SEQ ID NO: 820793 - DNA, 15 bp, Homo sapiens
taaggcacagctctg

SEQ ID NO: 820794 - DNA, 15 bp, Homo sapiens
aaggcacagctctga

SEQ ID NO: 820795 - DNA, 15 bp, Homo sapiens
aggcacagctctgac

SEQ ID NO: 820796 - DNA, 15 bp, Homo sapiens
ggcacagctctgact

SEQ ID NO: 820797 - DNA, 15 bp, Homo sapiens
gcacagctctgactc

SEQ ID NO: 820798 - DNA, 15 bp, Homo sapiens
cacagctctgactcc

SEQ ID NO: 820799 - DNA, 15 bp, Homo sapiens
acagctctgactcca

SEQ ID NO: 820800 - DNA, 15 bp, Homo sapiens
cagctctgactccag

SEQ ID NO: 820801 - DNA, 15 bp, Homo sapiens
agctctgactccagc

SEQ ID NO: 820802 - DNA, 15 bp, Homo sapiens
gctctgactccagct

SEQ ID NO: 820803 - DNA, 15 bp, Homo sapiens
ctctgactccagctc

SEQ ID NO: 820804 - DNA, 15 bp, Homo sapiens
tctgactccagctcc

SEQ ID NO: 820805 - DNA, 15 bp, Homo sapiens
ctgactccagctcct

SEQ ID NO: 820806 - DNA, 15 bp, Homo sapiens
tgactccagctcctg

SEQ ID NO: 820807 - DNA, 15 bp, Homo sapiens
gactccagctcctgt

SEQ ID NO: 820808 - DNA, 15 bp, Homo sapiens
actccagctcctgtg

SEQ ID NO: 820809 - DNA, 15 bp, Homo sapiens
ctccagctcctgtgt

SEQ ID NO: 820810 - DNA, 15 bp, Homo sapiens
tccagctcctgtgtg

SEQ ID NO: 820811 - DNA, 15 bp, Homo sapiens
ccagctcctgtgtgc

SEQ ID NO: 820812 - DNA, 15 bp, Homo sapiens
cagctcctgtgtgca

SEQ ID NO: 820813 - DNA, 15 bp, Homo sapiens
agctcctgtgtgcag

SEQ ID NO: 820814 - DNA, 15 bp, Homo sapiens
gctcctgtgtgcagc

SEQ ID NO: 820815 - DNA, 15 bp, Homo sapiens
ctcctgtgtgcagct

SEQ ID NO: 820816 - DNA, 15 bp, Homo sapiens
tcctgtgtgcagctt

SEQ ID NO: 820817 - DNA, 15 bp, Homo sapiens
cctgtgtgcagcttt

SEQ ID NO: 820818 - DNA, 15 bp, Homo sapiens
ctgtgtgcagctttc

SEQ ID NO: 820819 - DNA, 15 bp, Homo sapiens
tgtgtgcagctttcc

SEQ ID NO: 820820 - DNA, 15 bp, Homo sapiens
gtgtgcagctttccc

SEQ ID NO: 820821 - DNA, 15 bp, Homo sapiens
tgtgcagctttccca

SEQ ID NO: 820822 - DNA, 15 bp, Homo sapiens
gtgcagctttcccat

SEQ ID NO: 820823 - DNA, 15 bp, Homo sapiens
tgcagctttcccatt

SEQ ID NO: 820824 - DNA, 15 bp, Homo sapiens
gcagctttcccattc

SEQ ID NO: 820825 - DNA, 15 bp, Homo sapiens
cagctttcccattct

SEQ ID NO: 820826 - DNA, 15 bp, Homo sapiens
agctttcccattctc

SEQ ID NO: 820827 - DNA, 15 bp, Homo sapiens
gctttcccattctca

SEQ ID NO: 820828 - DNA, 15 bp, Homo sapiens
ctttcccattctcat

SEQ ID NO: 820829 - DNA, 15 bp, Homo sapiens
tttcccattctcatc

SEQ ID NO: 820830 - DNA, 15 bp, Homo sapiens
ttcccattctcatcc

SEQ ID NO: 820831 - DNA, 15 bp, Homo sapiens
tcccattctcatcca

SEQ ID NO: 820832 - DNA, 15 bp, Homo sapiens
cccattctcatccat

SEQ ID NO: 820833 - DNA, 15 bp, Homo sapiens
ccattctcatccatt

SEQ ID NO: 820834 - DNA, 15 bp, Homo sapiens
cattctcatccattg

SEQ ID NO: 820835 - DNA, 15 bp, Homo sapiens
attctcatccattgg

SEQ ID NO: 820836 - DNA, 15 bp, Homo sapiens
ttctcatccattgga

SEQ ID NO: 820837 - DNA, 15 bp, Homo sapiens
tctcatccattggaa

SEQ ID NO: 820838 - DNA, 15 bp, Homo sapiens
ctcatccattggaat

SEQ ID NO: 820839 - DNA, 15 bp, Homo sapiens
tcatccattggaatg

SEQ ID NO: 820840 - DNA, 15 bp, Homo sapiens
catccattggaatga

SEQ ID NO: 820841 - DNA, 15 bp, Homo sapiens
atccattggaatgaa

SEQ ID NO: 820842 - DNA, 15 bp, Homo sapiens
tccattggaatgaat

SEQ ID NO: 820843 - DNA, 15 bp, Homo sapiens
ccattggaatgaatt

SEQ ID NO: 820844 - DNA, 15 bp, Homo sapiens
cattggaatgaattc

SEQ ID NO: 820845 - DNA, 15 bp, Homo sapiens
attggaatgaattcc

SEQ ID NO: 820846 - DNA, 15 bp, Homo sapiens
ttggaatgaattcct

SEQ ID NO: 820847 - DNA, 15 bp, Homo sapiens
tggaatgaattcctc

SEQ ID NO: 820848 - DNA, 15 bp, Homo sapiens
ggaatgaattcctct

SEQ ID NO: 820849 - DNA, 15 bp, Homo sapiens
gaatgaattcctctc

SEQ ID NO: 820850 - DNA, 15 bp, Homo sapiens
aatgaattcctctct

SEQ ID NO: 820851 - DNA, 15 bp, Homo sapiens
atgaattcctctctg

SEQ ID NO: 820852 - DNA, 15 bp, Homo sapiens
tgaattcctctctga

SEQ ID NO: 820853 - DNA, 15 bp, Homo sapiens
gaattcctctctgac

SEQ ID NO: 820854 - DNA, 15 bp, Homo sapiens
aattcctctctgacc

SEQ ID NO: 820855 - DNA, 15 bp, Homo sapiens
attcctctctgacct

SEQ ID NO: 820856 - DNA, 15 bp, Homo sapiens
ttcctctctgacctt

SEQ ID NO: 820857 - DNA, 15 bp, Homo sapiens
tcctctctgaccttt

SEQ ID NO: 820858 - DNA, 15 bp, Homo sapiens
cctctctgacctttg

SEQ ID NO: 820859 - DNA, 15 bp, Homo sapiens
ctctctgacctttgt

SEQ ID NO: 820860 - DNA, 15 bp, Homo sapiens
tctctgacctttgta

SEQ ID NO: 820861 - DNA, 15 bp, Homo sapiens
ctctgacctttgtat

SEQ ID NO: 820862 - DNA, 15 bp, Homo sapiens
tctgacctttgtatt

SEQ ID NO: 820863 - DNA, 15 bp, Homo sapiens
ctgacctttgtattg

SEQ ID NO: 820864 - DNA, 15 bp, Homo sapiens
tgacctttgtattgt

SEQ ID NO: 820865 - DNA, 15 bp, Homo sapiens
gacctttgtattgtg

SEQ ID NO: 820866 - DNA, 15 bp, Homo sapiens
acctttgtattgtgc

SEQ ID NO: 820867 - DNA, 15 bp, Homo sapiens
cctttgtattgtgct

SEQ ID NO: 820868 - DNA, 15 bp, Homo sapiens
ctttgtattgtgctg

SEQ ID NO: 820869 - DNA, 15 bp, Homo sapiens
tttgtattgtgctgt

SEQ ID NO: 820870 - DNA, 15 bp, Homo sapiens
ttgtattgtgctgtt

SEQ ID NO: 820871 - DNA, 15 bp, Homo sapiens
tgtattgtgctgtta

SEQ ID NO: 820872 - DNA, 15 bp, Homo sapiens
gtattgtgctgttag

SEQ ID NO: 820873 - DNA, 15 bp, Homo sapiens
tattgtgctgttagg

SEQ ID NO: 820874 - DNA, 15 bp, Homo sapiens
attgtgctgttagga

SEQ ID NO: 820875 - DNA, 15 bp, Homo sapiens
ttgtgctgttaggat

SEQ ID NO: 820876 - DNA, 15 bp, Homo sapiens
tgtgctgttaggatt

SEQ ID NO: 820877 - DNA, 15 bp, Homo sapiens
gtgctgttaggattc

SEQ ID NO: 820878 - DNA, 15 bp, Homo sapiens
tgctgttaggattcg

SEQ ID NO: 820879 - DNA, 15 bp, Homo sapiens
gctgttaggattcgt

SEQ ID NO: 820880 - DNA, 15 bp, Homo sapiens
ctgttaggattcgtg

SEQ ID NO: 820881 - DNA, 15 bp, Homo sapiens
tgttaggattcgtgc

SEQ ID NO: 820882 - DNA, 15 bp, Homo sapiens
gttaggattcgtgct

SEQ ID NO: 820883 - DNA, 15 bp, Homo sapiens
ttaggattcgtgcta

SEQ ID NO: 820884 - DNA, 15 bp, Homo sapiens
taggattcgtgctat

SEQ ID NO: 820885 - DNA, 15 bp, Homo sapiens
aggattcgtgctata

SEQ ID NO: 820886 - DNA, 15 bp, Homo sapiens
ggattcgtgctatag

SEQ ID NO: 820887 - DNA, 15 bp, Homo sapiens
gattcgtgctatagg

SEQ ID NO: 820888 - DNA, 15 bp, Homo sapiens
attcgtgctatagga

SEQ ID NO: 820889 - DNA, 15 bp, Homo sapiens
ttcgtgctataggag

SEQ ID NO: 820890 - DNA, 15 bp, Homo sapiens
tcgtgctataggagc

SEQ ID NO: 820891 - DNA, 15 bp, Homo sapiens
cgtgctataggagca

SEQ ID NO: 820892 - DNA, 15 bp, Homo sapiens
gtgctataggagcac

SEQ ID NO: 820893 - DNA, 15 bp, Homo sapiens
tgctataggagcacc

SEQ ID NO: 820894 - DNA, 15 bp, Homo sapiens
gctataggagcacca

SEQ ID NO: 820895 - DNA, 15 bp, Homo sapiens
ctataggagcaccat

SEQ ID NO: 820896 - DNA, 15 bp, Homo sapiens
tataggagcaccata

SEQ ID NO: 820897 - DNA, 15 bp, Homo sapiens
ataggagcaccatac

SEQ ID NO: 820898 - DNA, 15 bp, Homo sapiens
taggagcaccatacg

SEQ ID NO: 820899 - DNA, 15 bp, Homo sapiens
aggagcaccatacgc

SEQ ID NO: 820900 - DNA, 15 bp, Homo sapiens
ggagcaccatacgca

SEQ ID NO: 820901 - DNA, 15 bp, Homo sapiens
gagcaccatacgcag

SEQ ID NO: 820902 - DNA, 15 bp, Homo sapiens
agcaccatacgcagc

SEQ ID NO: 820903 - DNA, 15 bp, Homo sapiens
gcaccatacgcagcc

SEQ ID NO: 820904 - DNA, 15 bp, Homo sapiens
caccatacgcagcct

SEQ ID NO: 820905 - DNA, 15 bp, Homo sapiens
accatacgcagcctg

SEQ ID NO: 820906 - DNA, 15 bp, Homo sapiens
ccatacgcagcctgc

SEQ ID NO: 820907 - DNA, 15 bp, Homo sapiens
catacgcagcctgct

SEQ ID NO: 820908 - DNA, 15 bp, Homo sapiens
atacgcagcctgctt

SEQ ID NO: 820909 - DNA, 15 bp, Homo sapiens
tacgcagcctgcttt

SEQ ID NO: 820910 - DNA, 15 bp, Homo sapiens
acgcagcctgctttg

SEQ ID NO: 820911 - DNA, 15 bp, Homo sapiens
cgcagcctgctttgt

SEQ ID NO: 820912 - DNA, 15 bp, Homo sapiens
gcagcctgctttgta

SEQ ID NO: 820913 - DNA, 15 bp, Homo sapiens
cagcctgctttgtac

SEQ ID NO: 820914 - DNA, 15 bp, Homo sapiens
agcctgctttgtact

SEQ ID NO: 820915 - DNA, 15 bp, Homo sapiens
gcctgctttgtactg

SEQ ID NO: 820916 - DNA, 15 bp, Homo sapiens
cctgctttgtactga

SEQ ID NO: 820917 - DNA, 15 bp, Homo sapiens
ctgctttgtactgac

SEQ ID NO: 820918 - DNA, 15 bp, Homo sapiens
tgctttgtactgaca

SEQ ID NO: 820919 - DNA, 15 bp, Homo sapiens
gctttgtactgacag

SEQ ID NO: 820920 - DNA, 15 bp, Homo sapiens
ctttgtactgacagg

SEQ ID NO: 820921 - DNA, 15 bp, Homo sapiens
tttgtactgacaggt

SEQ ID NO: 820922 - DNA, 15 bp, Homo sapiens
ttgtactgacaggta

SEQ ID NO: 820923 - DNA, 15 bp, Homo sapiens
tgtactgacaggtag

SEQ ID NO: 820924 - DNA, 15 bp, Homo sapiens
gtactgacaggtagg

SEQ ID NO: 820925 - DNA, 15 bp, Homo sapiens
tactgacaggtagga

SEQ ID NO: 820926 - DNA, 15 bp, Homo sapiens
actgacaggtaggac

SEQ ID NO: 820927 - DNA, 15 bp, Homo sapiens
ctgacaggtaggact

SEQ ID NO: 820928 - DNA, 15 bp, Homo sapiens
tgacaggtaggactg

SEQ ID NO: 820929 - DNA, 15 bp, Homo sapiens
gacaggtaggactgc

SEQ ID NO: 820930 - DNA, 15 bp, Homo sapiens
acaggtaggactgca

SEQ ID NO: 820931 - DNA, 15 bp, Homo sapiens
caggtaggactgcag

SEQ ID NO: 820932 - DNA, 15 bp, Homo sapiens
aggtaggactgcagc

SEQ ID NO: 820933 - DNA, 15 bp, Homo sapiens
ggtaggactgcagct

SEQ ID NO: 820934 - DNA, 15 bp, Homo sapiens
gtaggactgcagctt

SEQ ID NO: 820935 - DNA, 15 bp, Homo sapiens
taggactgcagcttc

SEQ ID NO: 820936 - DNA, 15 bp, Homo sapiens
aggactgcagcttcc

SEQ ID NO: 820937 - DNA, 15 bp, Homo sapiens
ggactgcagcttcca

SEQ ID NO: 820938 - DNA, 15 bp, Homo sapiens
gactgcagcttccat

SEQ ID NO: 820939 - DNA, 15 bp, Homo sapiens
actgcagcttccatg

SEQ ID NO: 820940 - DNA, 15 bp, Homo sapiens
ctgcagcttccatga

SEQ ID NO: 820941 - DNA, 15 bp, Homo sapiens
tgcagcttccatgat

SEQ ID NO: 820942 - DNA, 15 bp, Homo sapiens
gcagcttccatgata

SEQ ID NO: 820943 - DNA, 15 bp, Homo sapiens
cagcttccatgatag

SEQ ID NO: 820944 - DNA, 15 bp, Homo sapiens
agcttccatgatagc

SEQ ID NO: 820945 - DNA, 15 bp, Homo sapiens
gcttccatgatagca

SEQ ID NO: 820946 - DNA, 15 bp, Homo sapiens
cttccatgatagcaa

SEQ ID NO: 820947 - DNA, 15 bp, Homo sapiens
ttccatgatagcaat

SEQ ID NO: 820948 - DNA, 15 bp, Homo sapiens
tccatgatagcaatg

SEQ ID NO: 820949 - DNA, 15 bp, Homo sapiens
ccatgatagcaatgt

SEQ ID NO: 820950 - DNA, 15 bp, Homo sapiens
catgatagcaatgtg

SEQ ID NO: 820951 - DNA, 15 bp, Homo sapiens
atgatagcaatgtgg

SEQ ID NO: 820952 - DNA, 15 bp, Homo sapiens
tgatagcaatgtggc

SEQ ID NO: 820953 - DNA, 15 bp, Homo sapiens
gatagcaatgtggca

SEQ ID NO: 820954 - DNA, 15 bp, Homo sapiens
atagcaatgtggcag

SEQ ID NO: 820955 - DNA, 15 bp, Homo sapiens
tagcaatgtggcagg

SEQ ID NO: 820956 - DNA, 15 bp, Homo sapiens
agcaatgtggcaggg

SEQ ID NO: 820957 - DNA, 15 bp, Homo sapiens
gcaatgtggcaggga

SEQ ID NO: 820958 - DNA, 15 bp, Homo sapiens
caatgtggcagggac

SEQ ID NO: 820959 - DNA, 15 bp, Homo sapiens
aatgtggcagggact

SEQ ID NO: 820960 - DNA, 15 bp, Homo sapiens
atgtggcagggactg

SEQ ID NO: 820961 - DNA, 15 bp, Homo sapiens
tgtggcagggactgt

SEQ ID NO: 820962 - DNA, 15 bp, Homo sapiens
gtggcagggactgtg

SEQ ID NO: 820963 - DNA, 15 bp, Homo sapiens
tggcagggactgtgg

SEQ ID NO: 820964 - DNA, 15 bp, Homo sapiens
ggcagggactgtggc

SEQ ID NO: 820965 - DNA, 15 bp, Homo sapiens
gcagggactgtggcc

SEQ ID NO: 820966 - DNA, 15 bp, Homo sapiens
cagggactgtggccc

SEQ ID NO: 820967 - DNA, 15 bp, Homo sapiens
agggactgtggcccc

SEQ ID NO: 820968 - DNA, 15 bp, Homo sapiens
gggactgtggccccc

SEQ ID NO: 820969 - DNA, 15 bp, Homo sapiens
ggactgtggccccct

SEQ ID NO: 820970 - DNA, 15 bp, Homo sapiens
gactgtggccccctt

SEQ ID NO: 820971 - DNA, 15 bp, Homo sapiens
actgtggcccccttg

SEQ ID NO: 820972 - DNA, 15 bp, Homo sapiens
ctgtggcccccttgt

SEQ ID NO: 820973 - DNA, 15 bp, Homo sapiens
tgtggcccccttgtt

SEQ ID NO: 820974 - DNA, 15 bp, Homo sapiens
gtggcccccttgttt

SEQ ID NO: 820975 - DNA, 15 bp, Homo sapiens
tggcccccttgtttt

SEQ ID NO: 820976 - DNA, 15 bp, Homo sapiens
ggcccccttgttttt

SEQ ID NO: 820977 - DNA, 15 bp, Homo sapiens
gcccccttgtttttc

SEQ ID NO: 820978 - DNA, 15 bp, Homo sapiens
cccccttgtttttcg

SEQ ID NO: 820979 - DNA, 15 bp, Homo sapiens
ccccttgtttttcgc

SEQ ID NO: 820980 - DNA, 15 bp, Homo sapiens
cccttgtttttcgct

SEQ ID NO: 820981 - DNA, 15 bp, Homo sapiens
ccttgtttttcgcta

SEQ ID NO: 820982 - DNA, 15 bp, Homo sapiens
cttgtttttcgctat

SEQ ID NO: 820983 - DNA, 15 bp, Homo sapiens
ttgtttttcgctatg

SEQ ID NO: 820984 - DNA, 15 bp, Homo sapiens
tgtttttcgctatgt

SEQ ID NO: 820985 - DNA, 15 bp, Homo sapiens
gtttttcgctatgtc

SEQ ID NO: 820986 - DNA, 15 bp, Homo sapiens
tttttcgctatgtcc

SEQ ID NO: 820987 - DNA, 15 bp, Homo sapiens
ttttcgctatgtccc

SEQ ID NO: 820988 - DNA, 15 bp, Homo sapiens
tttcgctatgtccct

SEQ ID NO: 820989 - DNA, 15 bp, Homo sapiens
ttcgctatgtcccta

SEQ ID NO: 820990 - DNA, 15 bp, Homo sapiens
tcgctatgtccctag

SEQ ID NO: 820991 - DNA, 15 bp, Homo sapiens
cgctatgtccctagt

SEQ ID NO: 820992 - DNA, 15 bp, Homo sapiens
gctatgtccctagta

SEQ ID NO: 820993 - DNA, 15 bp, Homo sapiens
ctatgtccctagtac

SEQ ID NO: 820994 - DNA, 15 bp, Homo sapiens
tatgtccctagtacc

SEQ ID NO: 820995 - DNA, 15 bp, Homo sapiens
atgtccctagtacct

SEQ ID NO: 820996 - DNA, 15 bp, Homo sapiens
tgtccctagtacctg

SEQ ID NO: 820997 - DNA, 15 bp, Homo sapiens
gtccctagtacctgg

SEQ ID NO: 820998 - DNA, 15 bp, Homo sapiens
tccctagtacctgga

SEQ ID NO: 820999 - DNA, 15 bp, Homo sapiens
ccctagtacctggaa

SEQ ID NO: 821000 - DNA, 15 bp, Homo sapiens
cctagtacctggaac

SEQ ID NO: 821001 - DNA, 15 bp, Homo sapiens
ctagtacctggaaca

SEQ ID NO: 821002 - DNA, 15 bp, Homo sapiens
tagtacctggaacag

SEQ ID NO: 821003 - DNA, 15 bp, Homo sapiens
agtacctggaacagt

SEQ ID NO: 821004 - DNA, 15 bp, Homo sapiens
gtacctggaacagtg

SEQ ID NO: 821005 - DNA, 15 bp, Homo sapiens
tacctggaacagtgc

SEQ ID NO: 821006 - DNA, 15 bp, Homo sapiens
acctggaacagtgcc

SEQ ID NO: 821007 - DNA, 15 bp, Homo sapiens
cctggaacagtgcct

SEQ ID NO: 821008 - DNA, 15 bp, Homo sapiens
ctggaacagtgcctg

SEQ ID NO: 821009 - DNA, 15 bp, Homo sapiens
tggaacagtgcctga

SEQ ID NO: 821010 - DNA, 15 bp, Homo sapiens
ggaacagtgcctgac

SEQ ID NO: 821011 - DNA, 15 bp, Homo sapiens
gaacagtgcctgaca

SEQ ID NO: 821012 - DNA, 15 bp, Homo sapiens
aacagtgcctgacac

SEQ ID NO: 821013 - DNA, 15 bp, Homo sapiens
acagtgcctgacaca

SEQ ID NO: 821014 - DNA, 15 bp, Homo sapiens
cagtgcctgacacat

SEQ ID NO: 821015 - DNA, 15 bp, Homo sapiens
agtgcctgacacata

SEQ ID NO: 821016 - DNA, 15 bp, Homo sapiens
gtgcctgacacatag

SEQ ID NO: 821017 - DNA, 15 bp, Homo sapiens
tgcctgacacatagt

SEQ ID NO: 821018 - DNA, 15 bp, Homo sapiens
gcctgacacatagtt

SEQ ID NO: 821019 - DNA, 15 bp, Homo sapiens
cctgacacatagttc

SEQ ID NO: 821020 - DNA, 15 bp, Homo sapiens
ctgacacatagttca

SEQ ID NO: 821021 - DNA, 15 bp, Homo sapiens
tgacacatagttcat

SEQ ID NO: 821022 - DNA, 15 bp, Homo sapiens
gacacatagttcata

SEQ ID NO: 821023 - DNA, 15 bp, Homo sapiens
acacatagttcatac

SEQ ID NO: 821024 - DNA, 15 bp, Homo sapiens
cacatagttcatact

SEQ ID NO: 821025 - DNA, 15 bp, Homo sapiens
acatagttcatactt

SEQ ID NO: 821026 - DNA, 15 bp, Homo sapiens
catagttcatacttg

SEQ ID NO: 821027 - DNA, 15 bp, Homo sapiens
atagttcatacttgt

SEQ ID NO: 821028 - DNA, 15 bp, Homo sapiens
tagttcatacttgtt

SEQ ID NO: 821029 - DNA, 15 bp, Homo sapiens
agttcatacttgttg

SEQ ID NO: 821030 - DNA, 15 bp, Homo sapiens
gttcatacttgttga

SEQ ID NO: 821031 - DNA, 15 bp, Homo sapiens
ttcatacttgttgaa

SEQ ID NO: 821032 - DNA, 15 bp, Homo sapiens
tcatacttgttgaat

SEQ ID NO: 821033 - DNA, 15 bp, Homo sapiens
catacttgttgaatg

SEQ ID NO: 821034 - DNA, 15 bp, Homo sapiens
atacttgttgaatga

SEQ ID NO: 821035 - DNA, 15 bp, Homo sapiens
tacttgttgaatgaa

SEQ ID NO: 821036 - DNA, 15 bp, Homo sapiens
acttgttgaatgaat

SEQ ID NO: 821037 - DNA, 15 bp, Homo sapiens
cttgttgaatgaatg

SEQ ID NO: 821038 - DNA, 15 bp, Homo sapiens
gaatgaatgaatgag

SEQ ID NO: 821039 - DNA, 15 bp, Homo sapiens
aatgaatgaatgagt

SEQ ID NO: 821040 - DNA, 15 bp, Homo sapiens
atgaatgaatgagtg

SEQ ID NO: 821041 - DNA, 15 bp, Homo sapiens
tgaatgaatgagtga

SEQ ID NO: 821042 - DNA, 15 bp, Homo sapiens
gaatgaatgagtgag

SEQ ID NO: 821043 - DNA, 15 bp, Homo sapiens
aatgaatgagtgagt

SEQ ID NO: 821044 - DNA, 15 bp, Homo sapiens
atgaatgagtgagtc

SEQ ID NO: 821045 - DNA, 15 bp, Homo sapiens
tgaatgagtgagtct

SEQ ID NO: 821046 - DNA, 15 bp, Homo sapiens
gaatgagtgagtctt

SEQ ID NO: 821047 - DNA, 15 bp, Homo sapiens
aatgagtgagtcttc

SEQ ID NO: 821048 - DNA, 15 bp, Homo sapiens
atgagtgagtcttct

SEQ ID NO: 821049 - DNA, 15 bp, Homo sapiens
tgagtgagtcttctt

SEQ ID NO: 821050 - DNA, 15 bp, Homo sapiens
gagtgagtcttctta

SEQ ID NO: 821051 - DNA, 15 bp, Homo sapiens
agtgagtcttcttag

SEQ ID NO: 821052 - DNA, 15 bp, Homo sapiens
gtgagtcttcttagg

SEQ ID NO: 821053 - DNA, 15 bp, Homo sapiens
tgagtcttcttagga

SEQ ID NO: 821054 - DNA, 15 bp, Homo sapiens
gagtcttcttaggat

SEQ ID NO: 821055 - DNA, 15 bp, Homo sapiens
agtcttcttaggatc

SEQ ID NO: 821056 - DNA, 15 bp, Homo sapiens
gtcttcttaggatca

SEQ ID NO: 821057 - DNA, 15 bp, Homo sapiens
tcttcttaggatcat

SEQ ID NO: 821058 - DNA, 15 bp, Homo sapiens
cttcttaggatcatg

SEQ ID NO: 821059 - DNA, 15 bp, Homo sapiens
ttcttaggatcatga

SEQ ID NO: 821060 - DNA, 15 bp, Homo sapiens
tcttaggatcatgat

SEQ ID NO: 821061 - DNA, 15 bp, Homo sapiens
cttaggatcatgata

SEQ ID NO: 821062 - DNA, 15 bp, Homo sapiens
ttaggatcatgatag

SEQ ID NO: 821063 - DNA, 15 bp, Homo sapiens
taggatcatgatagt

SEQ ID NO: 821064 - DNA, 15 bp, Homo sapiens
aggatcatgatagta

SEQ ID NO: 821065 - DNA, 15 bp, Homo sapiens
ggatcatgatagtaa

SEQ ID NO: 821066 - DNA, 15 bp, Homo sapiens
gatcatgatagtaag

SEQ ID NO: 821067 - DNA, 15 bp, Homo sapiens
atcatgatagtaagg

SEQ ID NO: 821068 - DNA, 15 bp, Homo sapiens
tcatgatagtaagga

SEQ ID NO: 821069 - DNA, 15 bp, Homo sapiens
catgatagtaaggaa

SEQ ID NO: 821070 - DNA, 15 bp, Homo sapiens
atgatagtaaggaac

SEQ ID NO: 821071 - DNA, 15 bp, Homo sapiens
tgatagtaaggaaca

SEQ ID NO: 821072 - DNA, 15 bp, Homo sapiens
gatagtaaggaacag

SEQ ID NO: 821073 - DNA, 15 bp, Homo sapiens
atagtaaggaacagt

SEQ ID NO: 821074 - DNA, 15 bp, Homo sapiens
tagtaaggaacagtt

SEQ ID NO: 821075 - DNA, 15 bp, Homo sapiens
agtaaggaacagtta

SEQ ID NO: 821076 - DNA, 15 bp, Homo sapiens
gtaaggaacagttat

SEQ ID NO: 821077 - DNA, 15 bp, Homo sapiens
taaggaacagttatt

SEQ ID NO: 821078 - DNA, 15 bp, Homo sapiens
aaggaacagttattg

SEQ ID NO: 821079 - DNA, 15 bp, Homo sapiens
aggaacagttattga

SEQ ID NO: 821080 - DNA, 15 bp, Homo sapiens
ggaacagttattgat

SEQ ID NO: 821081 - DNA, 15 bp, Homo sapiens
gaacagttattgatt

SEQ ID NO: 821082 - DNA, 15 bp, Homo sapiens
aacagttattgattg

SEQ ID NO: 821083 - DNA, 15 bp, Homo sapiens
acagttattgattgc

SEQ ID NO: 821084 - DNA, 15 bp, Homo sapiens
cagttattgattgct

SEQ ID NO: 821085 - DNA, 15 bp, Homo sapiens
agttattgattgctt

SEQ ID NO: 821086 - DNA, 15 bp, Homo sapiens
gttattgattgctta

SEQ ID NO: 821087 - DNA, 15 bp, Homo sapiens
ttattgattgcttat

SEQ ID NO: 821088 - DNA, 15 bp, Homo sapiens
tattgattgcttatt

SEQ ID NO: 821089 - DNA, 15 bp, Homo sapiens
attgattgcttatta

SEQ ID NO: 821090 - DNA, 15 bp, Homo sapiens
ttgattgcttattaa

SEQ ID NO: 821091 - DNA, 15 bp, Homo sapiens
tgattgcttattaaa

SEQ ID NO: 821092 - DNA, 15 bp, Homo sapiens
gattgcttattaaaa

SEQ ID NO: 821093 - DNA, 15 bp, Homo sapiens
attgcttattaaaag

SEQ ID NO: 821094 - DNA, 15 bp, Homo sapiens
ttgcttattaaaagt

SEQ ID NO: 821095 - DNA, 15 bp, Homo sapiens
tgcttattaaaagta

SEQ ID NO: 821096 - DNA, 15 bp, Homo sapiens
gcttattaaaagtag

SEQ ID NO: 821097 - DNA, 15 bp, Homo sapiens
cttattaaaagtagg

SEQ ID NO: 821098 - DNA, 15 bp, Homo sapiens
ttattaaaagtaggc

SEQ ID NO: 821099 - DNA, 15 bp, Homo sapiens
tattaaaagtaggca

SEQ ID NO: 821100 - DNA, 15 bp, Homo sapiens
attaaaagtaggcac

SEQ ID NO: 821101 - DNA, 15 bp, Homo sapiens
ttaaaagtaggcact

SEQ ID NO: 821102 - DNA, 15 bp, Homo sapiens
taaaagtaggcacta

SEQ ID NO: 821103 - DNA, 15 bp, Homo sapiens
aaaagtaggcactat

SEQ ID NO: 821104 - DNA, 15 bp, Homo sapiens
aaagtaggcactatg

SEQ ID NO: 821105 - DNA, 15 bp, Homo sapiens
aagtaggcactatgc

SEQ ID NO: 821106 - DNA, 15 bp, Homo sapiens
agtaggcactatgcc

SEQ ID NO: 821107 - DNA, 15 bp, Homo sapiens
gtaggcactatgccc

SEQ ID NO: 821108 - DNA, 15 bp, Homo sapiens
taggcactatgccca

SEQ ID NO: 821109 - DNA, 15 bp, Homo sapiens
aggcactatgcccag

SEQ ID NO: 821110 - DNA, 15 bp, Homo sapiens
ggcactatgcccagc

SEQ ID NO: 821111 - DNA, 15 bp, Homo sapiens
gcactatgcccagca

SEQ ID NO: 821112 - DNA, 15 bp, Homo sapiens
cactatgcccagcat

SEQ ID NO: 821113 - DNA, 15 bp, Homo sapiens
actatgcccagcatc

SEQ ID NO: 821114 - DNA, 15 bp, Homo sapiens
ctatgcccagcatct

SEQ ID NO: 821115 - DNA, 15 bp, Homo sapiens
tatgcccagcatctc

SEQ ID NO: 821116 - DNA, 15 bp, Homo sapiens
atgcccagcatctca

SEQ ID NO: 821117 - DNA, 15 bp, Homo sapiens
tgcccagcatctcac

SEQ ID NO: 821118 - DNA, 15 bp, Homo sapiens
gcccagcatctcaca

SEQ ID NO: 821119 - DNA, 15 bp, Homo sapiens
cccagcatctcacag

SEQ ID NO: 821120 - DNA, 15 bp, Homo sapiens
ccagcatctcacagt

SEQ ID NO: 821121 - DNA, 15 bp, Homo sapiens
cagcatctcacagtc

SEQ ID NO: 821122 - DNA, 15 bp, Homo sapiens
agcatctcacagtca

SEQ ID NO: 821123 - DNA, 15 bp, Homo sapiens
gcatctcacagtcat

SEQ ID NO: 821124 - DNA, 15 bp, Homo sapiens
catctcacagtcatt

SEQ ID NO: 821125 - DNA, 15 bp, Homo sapiens
atctcacagtcattc

SEQ ID NO: 821126 - DNA, 15 bp, Homo sapiens
tctcacagtcattct

SEQ ID NO: 821127 - DNA, 15 bp, Homo sapiens
ctcacagtcattctc

SEQ ID NO: 821128 - DNA, 15 bp, Homo sapiens
tcacagtcattctct

SEQ ID NO: 821129 - DNA, 15 bp, Homo sapiens
cacagtcattctctg

SEQ ID NO: 821130 - DNA, 15 bp, Homo sapiens
acagtcattctctga

SEQ ID NO: 821131 - DNA, 15 bp, Homo sapiens
cagtcattctctgag

SEQ ID NO: 821132 - DNA, 15 bp, Homo sapiens
agtcattctctgagt

SEQ ID NO: 821133 - DNA, 15 bp, Homo sapiens
gtcattctctgagtt

SEQ ID NO: 821134 - DNA, 15 bp, Homo sapiens
tcattctctgagtta

SEQ ID NO: 821135 - DNA, 15 bp, Homo sapiens
cattctctgagttaa

SEQ ID NO: 821136 - DNA, 15 bp, Homo sapiens
attctctgagttaat

SEQ ID NO: 821137 - DNA, 15 bp, Homo sapiens
ttctctgagttaata

SEQ ID NO: 821138 - DNA, 15 bp, Homo sapiens
tctctgagttaatat

SEQ ID NO: 821139 - DNA, 15 bp, Homo sapiens
ctctgagttaatatt

SEQ ID NO: 821140 - DNA, 15 bp, Homo sapiens
tctgagttaatattc

SEQ ID NO: 821141 - DNA, 15 bp, Homo sapiens
ctgagttaatattca

SEQ ID NO: 821142 - DNA, 15 bp, Homo sapiens
tgagttaatattcac

SEQ ID NO: 821143 - DNA, 15 bp, Homo sapiens
gagttaatattcaca

SEQ ID NO: 821144 - DNA, 15 bp, Homo sapiens
agttaatattcacaa

SEQ ID NO: 821145 - DNA, 15 bp, Homo sapiens
gttaatattcacaat

SEQ ID NO: 821146 - DNA, 15 bp, Homo sapiens
ttaatattcacaata

SEQ ID NO: 821147 - DNA, 15 bp, Homo sapiens
taatattcacaataa

SEQ ID NO: 821148 - DNA, 15 bp, Homo sapiens
aatattcacaataac

SEQ ID NO: 821149 - DNA, 15 bp, Homo sapiens
atattcacaataact

SEQ ID NO: 821150 - DNA, 15 bp, Homo sapiens
tattcacaataactc

SEQ ID NO: 821151 - DNA, 15 bp, Homo sapiens
attcacaataactcg

SEQ ID NO: 821152 - DNA, 15 bp, Homo sapiens
ttcacaataactcga

SEQ ID NO: 821153 - DNA, 15 bp, Homo sapiens
tcacaataactcgat

SEQ ID NO: 821154 - DNA, 15 bp, Homo sapiens
cacaataactcgatg

SEQ ID NO: 821155 - DNA, 15 bp, Homo sapiens
acaataactcgatga

SEQ ID NO: 821156 - DNA, 15 bp, Homo sapiens
caataactcgatgag

SEQ ID NO: 821157 - DNA, 15 bp, Homo sapiens
aataactcgatgagt

SEQ ID NO: 821158 - DNA, 15 bp, Homo sapiens
ataactcgatgagta

SEQ ID NO: 821159 - DNA, 15 bp, Homo sapiens
taactcgatgagtaa

SEQ ID NO: 821160 - DNA, 15 bp, Homo sapiens
aactcgatgagtaaa

SEQ ID NO: 821161 - DNA, 15 bp, Homo sapiens
actcgatgagtaaat

SEQ ID NO: 821162 - DNA, 15 bp, Homo sapiens
ctcgatgagtaaata

SEQ ID NO: 821163 - DNA, 15 bp, Homo sapiens
tcgatgagtaaatat

SEQ ID NO: 821164 - DNA, 15 bp, Homo sapiens
cgatgagtaaatatt

SEQ ID NO: 821165 - DNA, 15 bp, Homo sapiens
gatgagtaaatattc

SEQ ID NO: 821166 - DNA, 15 bp, Homo sapiens
atgagtaaatattca

SEQ ID NO: 821167 - DNA, 15 bp, Homo sapiens
tgagtaaatattcat

SEQ ID NO: 821168 - DNA, 15 bp, Homo sapiens
gagtaaatattcata

SEQ ID NO: 821169 - DNA, 15 bp, Homo sapiens
agtaaatattcatag

SEQ ID NO: 821170 - DNA, 15 bp, Homo sapiens
gtaaatattcatagc

SEQ ID NO: 821171 - DNA, 15 bp, Homo sapiens
taaatattcatagcc

SEQ ID NO: 821172 - DNA, 15 bp, Homo sapiens
aaatattcatagccc

SEQ ID NO: 821173 - DNA, 15 bp, Homo sapiens
aatattcatagccca

SEQ ID NO: 821174 - DNA, 15 bp, Homo sapiens
atattcatagcccaa

SEQ ID NO: 821175 - DNA, 15 bp, Homo sapiens
tattcatagcccaag

SEQ ID NO: 821176 - DNA, 15 bp, Homo sapiens
attcatagcccaagt

SEQ ID NO: 821177 - DNA, 15 bp, Homo sapiens
ttcatagcccaagtt

SEQ ID NO: 821178 - DNA, 15 bp, Homo sapiens
tcatagcccaagttt

SEQ ID NO: 821179 - DNA, 15 bp, Homo sapiens
catagcccaagttta

SEQ ID NO: 821180 - DNA, 15 bp, Homo sapiens
atagcccaagtttac

SEQ ID NO: 821181 - DNA, 15 bp, Homo sapiens
tagcccaagtttaca

SEQ ID NO: 821182 - DNA, 15 bp, Homo sapiens
agcccaagtttacag

SEQ ID NO: 821183 - DNA, 15 bp, Homo sapiens
gcccaagtttacagt

SEQ ID NO: 821184 - DNA, 15 bp, Homo sapiens
cccaagtttacagtt

SEQ ID NO: 821185 - DNA, 15 bp, Homo sapiens
ccaagtttacagttt

SEQ ID NO: 821186 - DNA, 15 bp, Homo sapiens
caagtttacagtttg

SEQ ID NO: 821187 - DNA, 15 bp, Homo sapiens
aagtttacagtttgg

SEQ ID NO: 821188 - DNA, 15 bp, Homo sapiens
agtttacagtttggg

SEQ ID NO: 821189 - DNA, 15 bp, Homo sapiens
gtttacagtttggga

SEQ ID NO: 821190 - DNA, 15 bp, Homo sapiens
tttacagtttgggaa

SEQ ID NO: 821191 - DNA, 15 bp, Homo sapiens
ttacagtttgggaaa

SEQ ID NO: 821192 - DNA, 15 bp, Homo sapiens
tacagtttgggaaac

SEQ ID NO: 821193 - DNA, 15 bp, Homo sapiens
acagtttgggaaact

SEQ ID NO: 821194 - DNA, 15 bp, Homo sapiens
cagtttgggaaactg

SEQ ID NO: 821195 - DNA, 15 bp, Homo sapiens
agtttgggaaactga

SEQ ID NO: 821196 - DNA, 15 bp, Homo sapiens
gtttgggaaactgag

SEQ ID NO: 821197 - DNA, 15 bp, Homo sapiens
tttgggaaactgagg

SEQ ID NO: 821198 - DNA, 15 bp, Homo sapiens
ttgggaaactgaggt

SEQ ID NO: 821199 - DNA, 15 bp, Homo sapiens
tgggaaactgaggtt

SEQ ID NO: 821200 - DNA, 15 bp, Homo sapiens
gggaaactgaggttc

SEQ ID NO: 821201 - DNA, 15 bp, Homo sapiens
ggaaactgaggttca

SEQ ID NO: 821202 - DNA, 15 bp, Homo sapiens
gaaactgaggttcag

SEQ ID NO: 821203 - DNA, 15 bp, Homo sapiens
aaactgaggttcagg

SEQ ID NO: 821204 - DNA, 15 bp, Homo sapiens
aactgaggttcaggg

SEQ ID NO: 821205 - DNA, 15 bp, Homo sapiens
actgaggttcagggt

SEQ ID NO: 821206 - DNA, 15 bp, Homo sapiens
ctgaggttcagggtc

SEQ ID NO: 821207 - DNA, 15 bp, Homo sapiens
tgaggttcagggtct

SEQ ID NO: 821208 - DNA, 15 bp, Homo sapiens
gaggttcagggtcta

SEQ ID NO: 821209 - DNA, 15 bp, Homo sapiens
aggttcagggtctaa

SEQ ID NO: 821210 - DNA, 15 bp, Homo sapiens
ggttcagggtctaag

SEQ ID NO: 821211 - DNA, 15 bp, Homo sapiens
gttcagggtctaagt

SEQ ID NO: 821212 - DNA, 15 bp, Homo sapiens
ttcagggtctaagta

SEQ ID NO: 821213 - DNA, 15 bp, Homo sapiens
tcagggtctaagtaa

SEQ ID NO: 821214 - DNA, 15 bp, Homo sapiens
cagggtctaagtaag

SEQ ID NO: 821215 - DNA, 15 bp, Homo sapiens
agggtctaagtaagt

SEQ ID NO: 821216 - DNA, 15 bp, Homo sapiens
gggtctaagtaagtg

SEQ ID NO: 821217 - DNA, 15 bp, Homo sapiens
ggtctaagtaagtgg

SEQ ID NO: 821218 - DNA, 15 bp, Homo sapiens
gtctaagtaagtggc

SEQ ID NO: 821219 - DNA, 15 bp, Homo sapiens
tctaagtaagtggca

SEQ ID NO: 821220 - DNA, 15 bp, Homo sapiens
ctaagtaagtggcag

SEQ ID NO: 821221 - DNA, 15 bp, Homo sapiens
taagtaagtggcagg

SEQ ID NO: 821222 - DNA, 15 bp, Homo sapiens
aagtaagtggcaggt

SEQ ID NO: 821223 - DNA, 15 bp, Homo sapiens
agtaagtggcaggtc

SEQ ID NO: 821224 - DNA, 15 bp, Homo sapiens
gtaagtggcaggtcc

SEQ ID NO: 821225 - DNA, 15 bp, Homo sapiens
taagtggcaggtcca

SEQ ID NO: 821226 - DNA, 15 bp, Homo sapiens
aagtggcaggtccaa

SEQ ID NO: 821227 - DNA, 15 bp, Homo sapiens
agtggcaggtccaag

SEQ ID NO: 821228 - DNA, 15 bp, Homo sapiens
gtggcaggtccaaga

SEQ ID NO: 821229 - DNA, 15 bp, Homo sapiens
tggcaggtccaagac

SEQ ID NO: 821230 - DNA, 15 bp, Homo sapiens
ggcaggtccaagact

SEQ ID NO: 821231 - DNA, 15 bp, Homo sapiens
gcaggtccaagactc

SEQ ID NO: 821232 - DNA, 15 bp, Homo sapiens
caggtccaagactca

SEQ ID NO: 821233 - DNA, 15 bp, Homo sapiens
aggtccaagactcag

SEQ ID NO: 821234 - DNA, 15 bp, Homo sapiens
ggtccaagactcagg

SEQ ID NO: 821235 - DNA, 15 bp, Homo sapiens
gtccaagactcaggt

SEQ ID NO: 821236 - DNA, 15 bp, Homo sapiens
tccaagactcaggtt

SEQ ID NO: 821237 - DNA, 15 bp, Homo sapiens
ccaagactcaggtta

SEQ ID NO: 821238 - DNA, 15 bp, Homo sapiens
caagactcaggttag

SEQ ID NO: 821239 - DNA, 15 bp, Homo sapiens
aagactcaggttagt

SEQ ID NO: 821240 - DNA, 15 bp, Homo sapiens
agactcaggttagtc

SEQ ID NO: 821241 - DNA, 15 bp, Homo sapiens
gactcaggttagtcc

SEQ ID NO: 821242 - DNA, 15 bp, Homo sapiens
actcaggttagtcca

SEQ ID NO: 821243 - DNA, 15 bp, Homo sapiens
ctcaggttagtccaa

SEQ ID NO: 821244 - DNA, 15 bp, Homo sapiens
tcaggttagtccaat

SEQ ID NO: 821245 - DNA, 15 bp, Homo sapiens
caggttagtccaatt

SEQ ID NO: 821246 - DNA, 15 bp, Homo sapiens
aggttagtccaattc

SEQ ID NO: 821247 - DNA, 15 bp, Homo sapiens
ggttagtccaattct

SEQ ID NO: 821248 - DNA, 15 bp, Homo sapiens
gttagtccaattctg

SEQ ID NO: 821249 - DNA, 15 bp, Homo sapiens
ttagtccaattctgg

SEQ ID NO: 821250 - DNA, 15 bp, Homo sapiens
tagtccaattctgga

SEQ ID NO: 821251 - DNA, 15 bp, Homo sapiens
agtccaattctggag

SEQ ID NO: 821252 - DNA, 15 bp, Homo sapiens
gtccaattctggagc

SEQ ID NO: 821253 - DNA, 15 bp, Homo sapiens
tccaattctggagcc

SEQ ID NO: 821254 - DNA, 15 bp, Homo sapiens
ccaattctggagccc

SEQ ID NO: 821255 - DNA, 15 bp, Homo sapiens
caattctggagccca

SEQ ID NO: 821256 - DNA, 15 bp, Homo sapiens
aattctggagcccat

SEQ ID NO: 821257 - DNA, 15 bp, Homo sapiens
attctggagcccatc

SEQ ID NO: 821258 - DNA, 15 bp, Homo sapiens
ttctggagcccatct

SEQ ID NO: 821259 - DNA, 15 bp, Homo sapiens
tctggagcccatctt

SEQ ID NO: 821260 - DNA, 15 bp, Homo sapiens
ctggagcccatcttt

SEQ ID NO: 821261 - DNA, 15 bp, Homo sapiens
tggagcccatctttt

SEQ ID NO: 821262 - DNA, 15 bp, Homo sapiens
ggagcccatctttta

SEQ ID NO: 821263 - DNA, 15 bp, Homo sapiens
gagcccatcttttaa

SEQ ID NO: 821264 - DNA, 15 bp, Homo sapiens
agcccatcttttaaa

SEQ ID NO: 821265 - DNA, 15 bp, Homo sapiens
gcccatcttttaaaa

SEQ ID NO: 821266 - DNA, 15 bp, Homo sapiens
cccatcttttaaaat

SEQ ID NO: 821267 - DNA, 15 bp, Homo sapiens
ccatcttttaaaatg

SEQ ID NO: 821268 - DNA, 15 bp, Homo sapiens
catcttttaaaatga

SEQ ID NO: 821269 - DNA, 15 bp, Homo sapiens
atcttttaaaatgat

SEQ ID NO: 821270 - DNA, 15 bp, Homo sapiens
tcttttaaaatgatt

SEQ ID NO: 821271 - DNA, 15 bp, Homo sapiens
cttttaaaatgatta

SEQ ID NO: 821272 - DNA, 15 bp, Homo sapiens
ttttaaaatgattag

SEQ ID NO: 821273 - DNA, 15 bp, Homo sapiens
tttaaaatgattaga

SEQ ID NO: 821274 - DNA, 15 bp, Homo sapiens
ttaaaatgattagac

SEQ ID NO: 821275 - DNA, 15 bp, Homo sapiens
taaaatgattagacc

SEQ ID NO: 821276 - DNA, 15 bp, Homo sapiens
aaaatgattagacca

SEQ ID NO: 821277 - DNA, 15 bp, Homo sapiens
aaatgattagaccag

SEQ ID NO: 821278 - DNA, 15 bp, Homo sapiens
aatgattagaccagt

SEQ ID NO: 821279 - DNA, 15 bp, Homo sapiens
atgattagaccagtg

SEQ ID NO: 821280 - DNA, 15 bp, Homo sapiens
tgattagaccagtgg

SEQ ID NO: 821281 - DNA, 15 bp, Homo sapiens
gattagaccagtggt

SEQ ID NO: 821282 - DNA, 15 bp, Homo sapiens
attagaccagtggtt

SEQ ID NO: 821283 - DNA, 15 bp, Homo sapiens
ttagaccagtggttc

SEQ ID NO: 821284 - DNA, 15 bp, Homo sapiens
tagaccagtggttct

SEQ ID NO: 821285 - DNA, 15 bp, Homo sapiens
agaccagtggttctc

SEQ ID NO: 821286 - DNA, 15 bp, Homo sapiens
gaccagtggttctca

SEQ ID NO: 821287 - DNA, 15 bp, Homo sapiens
accagtggttctcaa

SEQ ID NO: 821288 - DNA, 15 bp, Homo sapiens
ccagtggttctcaaa

SEQ ID NO: 821289 - DNA, 15 bp, Homo sapiens
cagtggttctcaaag

SEQ ID NO: 821290 - DNA, 15 bp, Homo sapiens
agtggttctcaaagt

SEQ ID NO: 821291 - DNA, 15 bp, Homo sapiens
gtggttctcaaagtg

SEQ ID NO: 821292 - DNA, 15 bp, Homo sapiens
tggttctcaaagtgt

SEQ ID NO: 821293 - DNA, 15 bp, Homo sapiens
ggttctcaaagtgtg

SEQ ID NO: 821294 - DNA, 15 bp, Homo sapiens
gttctcaaagtgtgg

SEQ ID NO: 821295 - DNA, 15 bp, Homo sapiens
ttctcaaagtgtggt

SEQ ID NO: 821296 - DNA, 15 bp, Homo sapiens
tctcaaagtgtggtt

SEQ ID NO: 821297 - DNA, 15 bp, Homo sapiens
ctcaaagtgtggttc

SEQ ID NO: 821298 - DNA, 15 bp, Homo sapiens
tcaaagtgtggttcc

SEQ ID NO: 821299 - DNA, 15 bp, Homo sapiens
caaagtgtggttcct

SEQ ID NO: 821300 - DNA, 15 bp, Homo sapiens
aaagtgtggttcctg

SEQ ID NO: 821301 - DNA, 15 bp, Homo sapiens
aagtgtggttcctgg

SEQ ID NO: 821302 - DNA, 15 bp, Homo sapiens
agtgtggttcctgga

SEQ ID NO: 821303 - DNA, 15 bp, Homo sapiens
gtgtggttcctggat

SEQ ID NO: 821304 - DNA, 15 bp, Homo sapiens
tgtggttcctggatc

SEQ ID NO: 821305 - DNA, 15 bp, Homo sapiens
gtggttcctggatca

SEQ ID NO: 821306 - DNA, 15 bp, Homo sapiens
tggttcctggatcag

SEQ ID NO: 821307 - DNA, 15 bp, Homo sapiens
ggttcctggatcagc

SEQ ID NO: 821308 - DNA, 15 bp, Homo sapiens
gttcctggatcagca

SEQ ID NO: 821309 - DNA, 15 bp, Homo sapiens
ttcctggatcagcag

SEQ ID NO: 821310 - DNA, 15 bp, Homo sapiens
tcctggatcagcagc

SEQ ID NO: 821311 - DNA, 15 bp, Homo sapiens
cctggatcagcagca

SEQ ID NO: 821312 - DNA, 15 bp, Homo sapiens
ctggatcagcagcat

SEQ ID NO: 821313 - DNA, 15 bp, Homo sapiens
tggatcagcagcatc

SEQ ID NO: 821314 - DNA, 15 bp, Homo sapiens
ggatcagcagcatca

SEQ ID NO: 821315 - DNA, 15 bp, Homo sapiens
gatcagcagcatcag

SEQ ID NO: 821316 - DNA, 15 bp, Homo sapiens
atcagcagcatcagc

SEQ ID NO: 821317 - DNA, 15 bp, Homo sapiens
tcagcagcatcagcg

SEQ ID NO: 821318 - DNA, 15 bp, Homo sapiens
cagcagcatcagcgt

SEQ ID NO: 821319 - DNA, 15 bp, Homo sapiens
agcagcatcagcgtt

SEQ ID NO: 821320 - DNA, 15 bp, Homo sapiens
gcagcatcagcgtta

SEQ ID NO: 821321 - DNA, 15 bp, Homo sapiens
cagcatcagcgttac

SEQ ID NO: 821322 - DNA, 15 bp, Homo sapiens
agcatcagcgttact

SEQ ID NO: 821323 - DNA, 15 bp, Homo sapiens
gcatcagcgttactg

SEQ ID NO: 821324 - DNA, 15 bp, Homo sapiens
catcagcgttactgg

SEQ ID NO: 821325 - DNA, 15 bp, Homo sapiens
atcagcgttactggg

SEQ ID NO: 821326 - DNA, 15 bp, Homo sapiens
tcagcgttactgggg

SEQ ID NO: 821327 - DNA, 15 bp, Homo sapiens
cagcgttactgggga

SEQ ID NO: 821328 - DNA, 15 bp, Homo sapiens
agcgttactggggac

SEQ ID NO: 821329 - DNA, 15 bp, Homo sapiens
gcgttactggggact

SEQ ID NO: 821330 - DNA, 15 bp, Homo sapiens
cgttactggggactt

SEQ ID NO: 821331 - DNA, 15 bp, Homo sapiens
gttactggggacttg

SEQ ID NO: 821332 - DNA, 15 bp, Homo sapiens
ttactggggacttgt

SEQ ID NO: 821333 - DNA, 15 bp, Homo sapiens
tactggggacttgtt

SEQ ID NO: 821334 - DNA, 15 bp, Homo sapiens
actggggacttgtta

SEQ ID NO: 821335 - DNA, 15 bp, Homo sapiens
ctggggacttgttac

SEQ ID NO: 821336 - DNA, 15 bp, Homo sapiens
tggggacttgttaca

SEQ ID NO: 821337 - DNA, 15 bp, Homo sapiens
ggggacttgttacac

SEQ ID NO: 821338 - DNA, 15 bp, Homo sapiens
gggacttgttacaca

SEQ ID NO: 821339 - DNA, 15 bp, Homo sapiens
ggacttgttacacat

SEQ ID NO: 821340 - DNA, 15 bp, Homo sapiens
gacttgttacacatg

SEQ ID NO: 821341 - DNA, 15 bp, Homo sapiens
acttgttacacatga

SEQ ID NO: 821342 - DNA, 15 bp, Homo sapiens
cttgttacacatgag

SEQ ID NO: 821343 - DNA, 15 bp, Homo sapiens
ttgttacacatgagg

SEQ ID NO: 821344 - DNA, 15 bp, Homo sapiens
tgttacacatgaggg

SEQ ID NO: 821345 - DNA, 15 bp, Homo sapiens
gttacacatgagggt

SEQ ID NO: 821346 - DNA, 15 bp, Homo sapiens
ttacacatgagggtt

SEQ ID NO: 821347 - DNA, 15 bp, Homo sapiens
tacacatgagggttc

SEQ ID NO: 821348 - DNA, 15 bp, Homo sapiens
acacatgagggttct

SEQ ID NO: 821349 - DNA, 15 bp, Homo sapiens
cacatgagggttctt

SEQ ID NO: 821350 - DNA, 15 bp, Homo sapiens
acatgagggttctta

SEQ ID NO: 821351 - DNA, 15 bp, Homo sapiens
catgagggttcttag

SEQ ID NO: 821352 - DNA, 15 bp, Homo sapiens
atgagggttcttaga

SEQ ID NO: 821353 - DNA, 15 bp, Homo sapiens
tgagggttcttagag

SEQ ID NO: 821354 - DNA, 15 bp, Homo sapiens
gagggttcttagagc

SEQ ID NO: 821355 - DNA, 15 bp, Homo sapiens
agggttcttagagct

SEQ ID NO: 821356 - DNA, 15 bp, Homo sapiens
gggttcttagagctc

SEQ ID NO: 821357 - DNA, 15 bp, Homo sapiens
ggttcttagagctca

SEQ ID NO: 821358 - DNA, 15 bp, Homo sapiens
gttcttagagctcaa

SEQ ID NO: 821359 - DNA, 15 bp, Homo sapiens
ttcttagagctcaac

SEQ ID NO: 821360 - DNA, 15 bp, Homo sapiens
tcttagagctcaacc

SEQ ID NO: 821361 - DNA, 15 bp, Homo sapiens
cttagagctcaaccg

SEQ ID NO: 821362 - DNA, 15 bp, Homo sapiens
ttagagctcaaccga

SEQ ID NO: 821363 - DNA, 15 bp, Homo sapiens
tagagctcaaccgag

SEQ ID NO: 821364 - DNA, 15 bp, Homo sapiens
agagctcaaccgaga

SEQ ID NO: 821365 - DNA, 15 bp, Homo sapiens
gagctcaaccgagac

SEQ ID NO: 821366 - DNA, 15 bp, Homo sapiens
agctcaaccgagacc

SEQ ID NO: 821367 - DNA, 15 bp, Homo sapiens
gctcaaccgagaccc

SEQ ID NO: 821368 - DNA, 15 bp, Homo sapiens
ctcaaccgagaccca

SEQ ID NO: 821369 - DNA, 15 bp, Homo sapiens
tcaaccgagacccag

SEQ ID NO: 821370 - DNA, 15 bp, Homo sapiens
caaccgagacccagg

SEQ ID NO: 821371 - DNA, 15 bp, Homo sapiens
aaccgagacccaggg

SEQ ID NO: 821372 - DNA, 15 bp, Homo sapiens
accgagacccaggga

SEQ ID NO: 821373 - DNA, 15 bp, Homo sapiens
ccgagacccagggat

SEQ ID NO: 821374 - DNA, 15 bp, Homo sapiens
cgagacccagggatc

SEQ ID NO: 821375 - DNA, 15 bp, Homo sapiens
gagacccagggatca

SEQ ID NO: 821376 - DNA, 15 bp, Homo sapiens
agacccagggatcag

SEQ ID NO: 821377 - DNA, 15 bp, Homo sapiens
gacccagggatcaga

SEQ ID NO: 821378 - DNA, 15 bp, Homo sapiens
acccagggatcagaa

SEQ ID NO: 821379 - DNA, 15 bp, Homo sapiens
cccagggatcagaaa

SEQ ID NO: 821380 - DNA, 15 bp, Homo sapiens
ccagggatcagaaac

SEQ ID NO: 821381 - DNA, 15 bp, Homo sapiens
cagggatcagaaacc

SEQ ID NO: 821382 - DNA, 15 bp, Homo sapiens
agggatcagaaaccg

SEQ ID NO: 821383 - DNA, 15 bp, Homo sapiens
gggatcagaaaccgc

SEQ ID NO: 821384 - DNA, 15 bp, Homo sapiens
ggatcagaaaccgcg

SEQ ID NO: 821385 - DNA, 15 bp, Homo sapiens
gatcagaaaccgcga

SEQ ID NO: 821386 - DNA, 15 bp, Homo sapiens
atcagaaaccgcgag

SEQ ID NO: 821387 - DNA, 15 bp, Homo sapiens
tcagaaaccgcgagt

SEQ ID NO: 821388 - DNA, 15 bp, Homo sapiens
cagaaaccgcgagtt

SEQ ID NO: 821389 - DNA, 15 bp, Homo sapiens
agaaaccgcgagttg

SEQ ID NO: 821390 - DNA, 15 bp, Homo sapiens
gaaaccgcgagttgg

SEQ ID NO: 821391 - DNA, 15 bp, Homo sapiens
aaaccgcgagttgga

SEQ ID NO: 821392 - DNA, 15 bp, Homo sapiens
aaccgcgagttggag

SEQ ID NO: 821393 - DNA, 15 bp, Homo sapiens
accgcgagttggagc

SEQ ID NO: 821394 - DNA, 15 bp, Homo sapiens
ccgcgagttggagcc

SEQ ID NO: 821395 - DNA, 15 bp, Homo sapiens
cgcgagttggagcca

SEQ ID NO: 821396 - DNA, 15 bp, Homo sapiens
gcgagttggagccag

SEQ ID NO: 821397 - DNA, 15 bp, Homo sapiens
cgagttggagccagc

SEQ ID NO: 821398 - DNA, 15 bp, Homo sapiens
gagttggagccagca

SEQ ID NO: 821399 - DNA, 15 bp, Homo sapiens
agttggagccagcag

SEQ ID NO: 821400 - DNA, 15 bp, Homo sapiens
gttggagccagcagt

SEQ ID NO: 821401 - DNA, 15 bp, Homo sapiens
ttggagccagcagtc

SEQ ID NO: 821402 - DNA, 15 bp, Homo sapiens
tggagccagcagtct

SEQ ID NO: 821403 - DNA, 15 bp, Homo sapiens
ggagccagcagtctg

SEQ ID NO: 821404 - DNA, 15 bp, Homo sapiens
gagccagcagtctgt

SEQ ID NO: 821405 - DNA, 15 bp, Homo sapiens
agccagcagtctgtg

SEQ ID NO: 821406 - DNA, 15 bp, Homo sapiens
gccagcagtctgtgt

SEQ ID NO: 821407 - DNA, 15 bp, Homo sapiens
ccagcagtctgtgtt

SEQ ID NO: 821408 - DNA, 15 bp, Homo sapiens
cagcagtctgtgttt

SEQ ID NO: 821409 - DNA, 15 bp, Homo sapiens
agcagtctgtgtttt

SEQ ID NO: 821410 - DNA, 15 bp, Homo sapiens
gcagtctgtgtttta

SEQ ID NO: 821411 - DNA, 15 bp, Homo sapiens
cagtctgtgttttaa

SEQ ID NO: 821412 - DNA, 15 bp, Homo sapiens
agtctgtgttttaac

SEQ ID NO: 821413 - DNA, 15 bp, Homo sapiens
gtctgtgttttaaca

SEQ ID NO: 821414 - DNA, 15 bp, Homo sapiens
tctgtgttttaacaa

SEQ ID NO: 821415 - DNA, 15 bp, Homo sapiens
ctgtgttttaacaag

SEQ ID NO: 821416 - DNA, 15 bp, Homo sapiens
tgtgttttaacaagc

SEQ ID NO: 821417 - DNA, 15 bp, Homo sapiens
gtgttttaacaagca

SEQ ID NO: 821418 - DNA, 15 bp, Homo sapiens
tgttttaacaagcac

SEQ ID NO: 821419 - DNA, 15 bp, Homo sapiens
gttttaacaagcact

SEQ ID NO: 821420 - DNA, 15 bp, Homo sapiens
ttttaacaagcactc

SEQ ID NO: 821421 - DNA, 15 bp, Homo sapiens
tttaacaagcactcc

SEQ ID NO: 821422 - DNA, 15 bp, Homo sapiens
ttaacaagcactcct

SEQ ID NO: 821423 - DNA, 15 bp, Homo sapiens
taacaagcactcctg

SEQ ID NO: 821424 - DNA, 15 bp, Homo sapiens
aacaagcactcctgg

SEQ ID NO: 821425 - DNA, 15 bp, Homo sapiens
acaagcactcctggt

SEQ ID NO: 821426 - DNA, 15 bp, Homo sapiens
caagcactcctggtg

SEQ ID NO: 821427 - DNA, 15 bp, Homo sapiens
aagcactcctggtga

SEQ ID NO: 821428 - DNA, 15 bp, Homo sapiens
agcactcctggtgat

SEQ ID NO: 821429 - DNA, 15 bp, Homo sapiens
gcactcctggtgatc

SEQ ID NO: 821430 - DNA, 15 bp, Homo sapiens
cactcctggtgatct

SEQ ID NO: 821431 - DNA, 15 bp, Homo sapiens
actcctggtgatctc

SEQ ID NO: 821432 - DNA, 15 bp, Homo sapiens
ctcctggtgatctcc

SEQ ID NO: 821433 - DNA, 15 bp, Homo sapiens
tcctggtgatctcca

SEQ ID NO: 821434 - DNA, 15 bp, Homo sapiens
cctggtgatctccag

SEQ ID NO: 821435 - DNA, 15 bp, Homo sapiens
ctggtgatctccagt

SEQ ID NO: 821436 - DNA, 15 bp, Homo sapiens
tggtgatctccagtt

SEQ ID NO: 821437 - DNA, 15 bp, Homo sapiens
ggtgatctccagttt

SEQ ID NO: 821438 - DNA, 15 bp, Homo sapiens
gtgatctccagtttt

SEQ ID NO: 821439 - DNA, 15 bp, Homo sapiens
tgatctccagttttg

SEQ ID NO: 821440 - DNA, 15 bp, Homo sapiens
gatctccagttttgg

SEQ ID NO: 821441 - DNA, 15 bp, Homo sapiens
atctccagttttgga

SEQ ID NO: 821442 - DNA, 15 bp, Homo sapiens
tctccagttttggag

SEQ ID NO: 821443 - DNA, 15 bp, Homo sapiens
ctccagttttggagc

SEQ ID NO: 821444 - DNA, 15 bp, Homo sapiens
tccagttttggagcc

SEQ ID NO: 821445 - DNA, 15 bp, Homo sapiens
ccagttttggagcca

SEQ ID NO: 821446 - DNA, 15 bp, Homo sapiens
cagttttggagccac

SEQ ID NO: 821447 - DNA, 15 bp, Homo sapiens
agttttggagccacc

SEQ ID NO: 821448 - DNA, 15 bp, Homo sapiens
gttttggagccaccg

SEQ ID NO: 821449 - DNA, 15 bp, Homo sapiens
ttttggagccaccgt

SEQ ID NO: 821450 - DNA, 15 bp, Homo sapiens
tttggagccaccgta

SEQ ID NO: 821451 - DNA, 15 bp, Homo sapiens
ttggagccaccgtac

SEQ ID NO: 821452 - DNA, 15 bp, Homo sapiens
tggagccaccgtact

SEQ ID NO: 821453 - DNA, 15 bp, Homo sapiens
ggagccaccgtactg

SEQ ID NO: 821454 - DNA, 15 bp, Homo sapiens
gagccaccgtactga

SEQ ID NO: 821455 - DNA, 15 bp, Homo sapiens
agccaccgtactgac

SEQ ID NO: 821456 - DNA, 15 bp, Homo sapiens
gccaccgtactgact

SEQ ID NO: 821457 - DNA, 15 bp, Homo sapiens
ccaccgtactgactt

SEQ ID NO: 821458 - DNA, 15 bp, Homo sapiens
caccgtactgactta

SEQ ID NO: 821459 - DNA, 15 bp, Homo sapiens
accgtactgacttat

SEQ ID NO: 821460 - DNA, 15 bp, Homo sapiens
ccgtactgacttatg

SEQ ID NO: 821461 - DNA, 15 bp, Homo sapiens
cgtactgacttatgc

SEQ ID NO: 821462 - DNA, 15 bp, Homo sapiens
gtactgacttatgct

SEQ ID NO: 821463 - DNA, 15 bp, Homo sapiens
tactgacttatgctg

SEQ ID NO: 821464 - DNA, 15 bp, Homo sapiens
actgacttatgctgg

SEQ ID NO: 821465 - DNA, 15 bp, Homo sapiens
ctgacttatgctggg

SEQ ID NO: 821466 - DNA, 15 bp, Homo sapiens
tgacttatgctggga

SEQ ID NO: 821467 - DNA, 15 bp, Homo sapiens
gacttatgctgggat

SEQ ID NO: 821468 - DNA, 15 bp, Homo sapiens
acttatgctgggatg

SEQ ID NO: 821469 - DNA, 15 bp, Homo sapiens
cttatgctgggatgg

SEQ ID NO: 821470 - DNA, 15 bp, Homo sapiens
ttatgctgggatggt

SEQ ID NO: 821471 - DNA, 15 bp, Homo sapiens
tatgctgggatggtt

SEQ ID NO: 821472 - DNA, 15 bp, Homo sapiens
atgctgggatggttc

SEQ ID NO: 821473 - DNA, 15 bp, Homo sapiens
tgctgggatggttct

SEQ ID NO: 821474 - DNA, 15 bp, Homo sapiens
gctgggatggttctc

SEQ ID NO: 821475 - DNA, 15 bp, Homo sapiens
ctgggatggttctcg

SEQ ID NO: 821476 - DNA, 15 bp, Homo sapiens
tgggatggttctcga

SEQ ID NO: 821477 - DNA, 15 bp, Homo sapiens
gggatggttctcgaa

SEQ ID NO: 821478 - DNA, 15 bp, Homo sapiens
ggatggttctcgaat

SEQ ID NO: 821479 - DNA, 15 bp, Homo sapiens
gatggttctcgaatt

SEQ ID NO: 821480 - DNA, 15 bp, Homo sapiens
atggttctcgaattt

SEQ ID NO: 821481 - DNA, 15 bp, Homo sapiens
tggttctcgaatttt

SEQ ID NO: 821482 - DNA, 15 bp, Homo sapiens
ggttctcgaattttt

SEQ ID NO: 821483 - DNA, 15 bp, Homo sapiens
gttctcgaattttta

SEQ ID NO: 821484 - DNA, 15 bp, Homo sapiens
ttctcgaatttttat

SEQ ID NO: 821485 - DNA, 15 bp, Homo sapiens
tctcgaatttttatt

SEQ ID NO: 821486 - DNA, 15 bp, Homo sapiens
ctcgaatttttatta

SEQ ID NO: 821487 - DNA, 15 bp, Homo sapiens
tcgaatttttattag

SEQ ID NO: 821488 - DNA, 15 bp, Homo sapiens
cgaatttttattaga

SEQ ID NO: 821489 - DNA, 15 bp, Homo sapiens
gaatttttattagaa

SEQ ID NO: 821490 - DNA, 15 bp, Homo sapiens
aatttttattagaat

SEQ ID NO: 821491 - DNA, 15 bp, Homo sapiens
atttttattagaatc

SEQ ID NO: 821492 - DNA, 15 bp, Homo sapiens
tttttattagaatcc

SEQ ID NO: 821493 - DNA, 15 bp, Homo sapiens
ttttattagaatccc

SEQ ID NO: 821494 - DNA, 15 bp, Homo sapiens
tttattagaatcccc

SEQ ID NO: 821495 - DNA, 15 bp, Homo sapiens
ttattagaatccccc

SEQ ID NO: 821496 - DNA, 15 bp, Homo sapiens
tattagaatccccca

SEQ ID NO: 821497 - DNA, 15 bp, Homo sapiens
attagaatcccccag

SEQ ID NO: 821498 - DNA, 15 bp, Homo sapiens
ttagaatcccccaga

SEQ ID NO: 821499 - DNA, 15 bp, Homo sapiens
tagaatcccccagag

SEQ ID NO: 821500 - DNA, 15 bp, Homo sapiens
agaatcccccagagt

SEQ ID NO: 821501 - DNA, 15 bp, Homo sapiens
gaatcccccagagtg

SEQ ID NO: 821502 - DNA, 15 bp, Homo sapiens
aatcccccagagtgc

SEQ ID NO: 821503 - DNA, 15 bp, Homo sapiens
atcccccagagtgct

SEQ ID NO: 821504 - DNA, 15 bp, Homo sapiens
tcccccagagtgctt

SEQ ID NO: 821505 - DNA, 15 bp, Homo sapiens
cccccagagtgcttt

SEQ ID NO: 821506 - DNA, 15 bp, Homo sapiens
ccccagagtgctttt

SEQ ID NO: 821507 - DNA, 15 bp, Homo sapiens
cccagagtgctttta

SEQ ID NO: 821508 - DNA, 15 bp, Homo sapiens
ccagagtgcttttaa

SEQ ID NO: 821509 - DNA, 15 bp, Homo sapiens
cagagtgcttttaaa

SEQ ID NO: 821510 - DNA, 15 bp, Homo sapiens
agagtgcttttaaaa

SEQ ID NO: 821511 - DNA, 15 bp, Homo sapiens
gagtgcttttaaaac

SEQ ID NO: 821512 - DNA, 15 bp, Homo sapiens
agtgcttttaaaact

SEQ ID NO: 821513 - DNA, 15 bp, Homo sapiens
gtgcttttaaaactc

SEQ ID NO: 821514 - DNA, 15 bp, Homo sapiens
tgcttttaaaactct

SEQ ID NO: 821515 - DNA, 15 bp, Homo sapiens
gcttttaaaactctt

SEQ ID NO: 821516 - DNA, 15 bp, Homo sapiens
cttttaaaactcttc

SEQ ID NO: 821517 - DNA, 15 bp, Homo sapiens
ttttaaaactcttca

SEQ ID NO: 821518 - DNA, 15 bp, Homo sapiens
tttaaaactcttcat

SEQ ID NO: 821519 - DNA, 15 bp, Homo sapiens
ttaaaactcttcatg

SEQ ID NO: 821520 - DNA, 15 bp, Homo sapiens
taaaactcttcatgt

SEQ ID NO: 821521 - DNA, 15 bp, Homo sapiens
aaaactcttcatgtt

SEQ ID NO: 821522 - DNA, 15 bp, Homo sapiens
aaactcttcatgttc

SEQ ID NO: 821523 - DNA, 15 bp, Homo sapiens
aactcttcatgttca

SEQ ID NO: 821524 - DNA, 15 bp, Homo sapiens
actcttcatgttcag

SEQ ID NO: 821525 - DNA, 15 bp, Homo sapiens
ctcttcatgttcagg

SEQ ID NO: 821526 - DNA, 15 bp, Homo sapiens
tcttcatgttcaggc

SEQ ID NO: 821527 - DNA, 15 bp, Homo sapiens
cttcatgttcaggcc

SEQ ID NO: 821528 - DNA, 15 bp, Homo sapiens
ttcatgttcaggcca

SEQ ID NO: 821529 - DNA, 15 bp, Homo sapiens
tcatgttcaggccaa

SEQ ID NO: 821530 - DNA, 15 bp, Homo sapiens
catgttcaggccaag

SEQ ID NO: 821531 - DNA, 15 bp, Homo sapiens
atgttcaggccaagc

SEQ ID NO: 821532 - DNA, 15 bp, Homo sapiens
tgttcaggccaagcc

SEQ ID NO: 821533 - DNA, 15 bp, Homo sapiens
gttcaggccaagcct

SEQ ID NO: 821534 - DNA, 15 bp, Homo sapiens
ttcaggccaagcctt

SEQ ID NO: 821535 - DNA, 15 bp, Homo sapiens
tcaggccaagccttt

SEQ ID NO: 821536 - DNA, 15 bp, Homo sapiens
caggccaagccttta

SEQ ID NO: 821537 - DNA, 15 bp, Homo sapiens
aggccaagcctttaa

SEQ ID NO: 821538 - DNA, 15 bp, Homo sapiens
ggccaagcctttaaa

SEQ ID NO: 821539 - DNA, 15 bp, Homo sapiens
gccaagcctttaaac

SEQ ID NO: 821540 - DNA, 15 bp, Homo sapiens
ccaagcctttaaacc

SEQ ID NO: 821541 - DNA, 15 bp, Homo sapiens
caagcctttaaacca

SEQ ID NO: 821542 - DNA, 15 bp, Homo sapiens
aagcctttaaaccat

SEQ ID NO: 821543 - DNA, 15 bp, Homo sapiens
agcctttaaaccatt

SEQ ID NO: 821544 - DNA, 15 bp, Homo sapiens
gcctttaaaccatta

SEQ ID NO: 821545 - DNA, 15 bp, Homo sapiens
cctttaaaccattaa

SEQ ID NO: 821546 - DNA, 15 bp, Homo sapiens
ctttaaaccattaac

SEQ ID NO: 821547 - DNA, 15 bp, Homo sapiens
tttaaaccattaacc

SEQ ID NO: 821548 - DNA, 15 bp, Homo sapiens
ttaaaccattaacct

SEQ ID NO: 821549 - DNA, 15 bp, Homo sapiens
taaaccattaaccta

SEQ ID NO: 821550 - DNA, 15 bp, Homo sapiens
aaaccattaacctaa

SEQ ID NO: 821551 - DNA, 15 bp, Homo sapiens
aaccattaacctaag

SEQ ID NO: 821552 - DNA, 15 bp, Homo sapiens
accattaacctaaga

SEQ ID NO: 821553 - DNA, 15 bp, Homo sapiens
ccattaacctaagaa

SEQ ID NO: 821554 - DNA, 15 bp, Homo sapiens
cattaacctaagaat

SEQ ID NO: 821555 - DNA, 15 bp, Homo sapiens
attaacctaagaatc

SEQ ID NO: 821556 - DNA, 15 bp, Homo sapiens
ttaacctaagaatct

SEQ ID NO: 821557 - DNA, 15 bp, Homo sapiens
taacctaagaatctc

SEQ ID NO: 821558 - DNA, 15 bp, Homo sapiens
aacctaagaatctct

SEQ ID NO: 821559 - DNA, 15 bp, Homo sapiens
acctaagaatctctg

SEQ ID NO: 821560 - DNA, 15 bp, Homo sapiens
cctaagaatctctgg

SEQ ID NO: 821561 - DNA, 15 bp, Homo sapiens
ctaagaatctctggg

SEQ ID NO: 821562 - DNA, 15 bp, Homo sapiens
taagaatctctgggt

SEQ ID NO: 821563 - DNA, 15 bp, Homo sapiens
aagaatctctgggtg

SEQ ID NO: 821564 - DNA, 15 bp, Homo sapiens
agaatctctgggtgg

SEQ ID NO: 821565 - DNA, 15 bp, Homo sapiens
gaatctctgggtgga

SEQ ID NO: 821566 - DNA, 15 bp, Homo sapiens
aatctctgggtggag

SEQ ID NO: 821567 - DNA, 15 bp, Homo sapiens
atctctgggtggagg

SEQ ID NO: 821568 - DNA, 15 bp, Homo sapiens
tctctgggtggaggg

SEQ ID NO: 821569 - DNA, 15 bp, Homo sapiens
ctctgggtggagggt

SEQ ID NO: 821570 - DNA, 15 bp, Homo sapiens
tctgggtggagggtg

SEQ ID NO: 821571 - DNA, 15 bp, Homo sapiens
ctgggtggagggtgt

SEQ ID NO: 821572 - DNA, 15 bp, Homo sapiens
tgggtggagggtgtg

SEQ ID NO: 821573 - DNA, 15 bp, Homo sapiens
gggtggagggtgtga

SEQ ID NO: 821574 - DNA, 15 bp, Homo sapiens
ggtggagggtgtgac

SEQ ID NO: 821575 - DNA, 15 bp, Homo sapiens
gtggagggtgtgacc

SEQ ID NO: 821576 - DNA, 15 bp, Homo sapiens
tggagggtgtgacct

SEQ ID NO: 821577 - DNA, 15 bp, Homo sapiens
ggagggtgtgaccta

SEQ ID NO: 821578 - DNA, 15 bp, Homo sapiens
gagggtgtgacctag

SEQ ID NO: 821579 - DNA, 15 bp, Homo sapiens
agggtgtgacctagg

SEQ ID NO: 821580 - DNA, 15 bp, Homo sapiens
gggtgtgacctaggc

SEQ ID NO: 821581 - DNA, 15 bp, Homo sapiens
ggtgtgacctaggct

SEQ ID NO: 821582 - DNA, 15 bp, Homo sapiens
gtgtgacctaggctc

SEQ ID NO: 821583 - DNA, 15 bp, Homo sapiens
tgtgacctaggctca

SEQ ID NO: 821584 - DNA, 15 bp, Homo sapiens
gtgacctaggctcag

SEQ ID NO: 821585 - DNA, 15 bp, Homo sapiens
tgacctaggctcagc

SEQ ID NO: 821586 - DNA, 15 bp, Homo sapiens
gacctaggctcagct

SEQ ID NO: 821587 - DNA, 15 bp, Homo sapiens
acctaggctcagctt

SEQ ID NO: 821588 - DNA, 15 bp, Homo sapiens
cctaggctcagcttc

SEQ ID NO: 821589 - DNA, 15 bp, Homo sapiens
ctaggctcagcttct

SEQ ID NO: 821590 - DNA, 15 bp, Homo sapiens
taggctcagcttctt

SEQ ID NO: 821591 - DNA, 15 bp, Homo sapiens
aggctcagcttcttt

SEQ ID NO: 821592 - DNA, 15 bp, Homo sapiens
ggctcagcttctttt

SEQ ID NO: 821593 - DNA, 15 bp, Homo sapiens
gctcagcttctttta

SEQ ID NO: 821594 - DNA, 15 bp, Homo sapiens
ctcagcttcttttaa

SEQ ID NO: 821595 - DNA, 15 bp, Homo sapiens
tcagcttcttttaat

SEQ ID NO: 821596 - DNA, 15 bp, Homo sapiens
cagcttcttttaatg

SEQ ID NO: 821597 - DNA, 15 bp, Homo sapiens
agcttcttttaatgt

SEQ ID NO: 821598 - DNA, 15 bp, Homo sapiens
gcttcttttaatgtt

SEQ ID NO: 821599 - DNA, 15 bp, Homo sapiens
cttcttttaatgttt

SEQ ID NO: 821600 - DNA, 15 bp, Homo sapiens
ttcttttaatgtttc

SEQ ID NO: 821601 - DNA, 15 bp, Homo sapiens
tcttttaatgtttct

SEQ ID NO: 821602 - DNA, 15 bp, Homo sapiens
cttttaatgtttctc

SEQ ID NO: 821603 - DNA, 15 bp, Homo sapiens
ttttaatgtttctca

SEQ ID NO: 821604 - DNA, 15 bp, Homo sapiens
tttaatgtttctcag

SEQ ID NO: 821605 - DNA, 15 bp, Homo sapiens
ttaatgtttctcagt

SEQ ID NO: 821606 - DNA, 15 bp, Homo sapiens
taatgtttctcagtt

SEQ ID NO: 821607 - DNA, 15 bp, Homo sapiens
aatgtttctcagttg

SEQ ID NO: 821608 - DNA, 15 bp, Homo sapiens
atgtttctcagttgt

SEQ ID NO: 821609 - DNA, 15 bp, Homo sapiens
tgtttctcagttgtg

SEQ ID NO: 821610 - DNA, 15 bp, Homo sapiens
gtttctcagttgtgt

SEQ ID NO: 821611 - DNA, 15 bp, Homo sapiens
tttctcagttgtgtc

SEQ ID NO: 821612 - DNA, 15 bp, Homo sapiens
ttctcagttgtgtct

SEQ ID NO: 821613 - DNA, 15 bp, Homo sapiens
tctcagttgtgtctg

SEQ ID NO: 821614 - DNA, 15 bp, Homo sapiens
ctcagttgtgtctga

SEQ ID NO: 821615 - DNA, 15 bp, Homo sapiens
tcagttgtgtctgaa

SEQ ID NO: 821616 - DNA, 15 bp, Homo sapiens
cagttgtgtctgaag

SEQ ID NO: 821617 - DNA, 15 bp, Homo sapiens
agttgtgtctgaagt

SEQ ID NO: 821618 - DNA, 15 bp, Homo sapiens
gttgtgtctgaagtg

SEQ ID NO: 821619 - DNA, 15 bp, Homo sapiens
ttgtgtctgaagtgc

SEQ ID NO: 821620 - DNA, 15 bp, Homo sapiens
tgtgtctgaagtgca

SEQ ID NO: 821621 - DNA, 15 bp, Homo sapiens
gtgtctgaagtgcag

SEQ ID NO: 821622 - DNA, 15 bp, Homo sapiens
tgtctgaagtgcagt

SEQ ID NO: 821623 - DNA, 15 bp, Homo sapiens
gtctgaagtgcagtc

SEQ ID NO: 821624 - DNA, 15 bp, Homo sapiens
tctgaagtgcagtca

SEQ ID NO: 821625 - DNA, 15 bp, Homo sapiens
ctgaagtgcagtcag

SEQ ID NO: 821626 - DNA, 15 bp, Homo sapiens
tgaagtgcagtcagg

SEQ ID NO: 821627 - DNA, 15 bp, Homo sapiens
gaagtgcagtcagga

SEQ ID NO: 821628 - DNA, 15 bp, Homo sapiens
aagtgcagtcaggat

SEQ ID NO: 821629 - DNA, 15 bp, Homo sapiens
agtgcagtcaggatg

SEQ ID NO: 821630 - DNA, 15 bp, Homo sapiens
gtgcagtcaggatga

SEQ ID NO: 821631 - DNA, 15 bp, Homo sapiens
tgcagtcaggatgag

SEQ ID NO: 821632 - DNA, 15 bp, Homo sapiens
gcagtcaggatgaga

SEQ ID NO: 821633 - DNA, 15 bp, Homo sapiens
cagtcaggatgagaa

SEQ ID NO: 821634 - DNA, 15 bp, Homo sapiens
agtcaggatgagaac

SEQ ID NO: 821635 - DNA, 15 bp, Homo sapiens
gtcaggatgagaacc

SEQ ID NO: 821636 - DNA, 15 bp, Homo sapiens
tcaggatgagaacca

SEQ ID NO: 821637 - DNA, 15 bp, Homo sapiens
caggatgagaaccac

SEQ ID NO: 821638 - DNA, 15 bp, Homo sapiens
aggatgagaaccact

SEQ ID NO: 821639 - DNA, 15 bp, Homo sapiens
ggatgagaaccactt

SEQ ID NO: 821640 - DNA, 15 bp, Homo sapiens
gatgagaaccacttg

SEQ ID NO: 821641 - DNA, 15 bp, Homo sapiens
atgagaaccacttgt

SEQ ID NO: 821642 - DNA, 15 bp, Homo sapiens
tgagaaccacttgta

SEQ ID NO: 821643 - DNA, 15 bp, Homo sapiens
gagaaccacttgtat

SEQ ID NO: 821644 - DNA, 15 bp, Homo sapiens
agaaccacttgtatg

SEQ ID NO: 821645 - DNA, 15 bp, Homo sapiens
gaaccacttgtatgc

SEQ ID NO: 821646 - DNA, 15 bp, Homo sapiens
aaccacttgtatgca

SEQ ID NO: 821647 - DNA, 15 bp, Homo sapiens
accacttgtatgcat

SEQ ID NO: 821648 - DNA, 15 bp, Homo sapiens
ccacttgtatgcatc

SEQ ID NO: 821649 - DNA, 15 bp, Homo sapiens
cacttgtatgcatct

SEQ ID NO: 821650 - DNA, 15 bp, Homo sapiens
acttgtatgcatctc

SEQ ID NO: 821651 - DNA, 15 bp, Homo sapiens
cttgtatgcatctcc

SEQ ID NO: 821652 - DNA, 15 bp, Homo sapiens
ttgtatgcatctcct

SEQ ID NO: 821653 - DNA, 15 bp, Homo sapiens
tgtatgcatctccta

SEQ ID NO: 821654 - DNA, 15 bp, Homo sapiens
gtatgcatctcctaa

SEQ ID NO: 821655 - DNA, 15 bp, Homo sapiens
tatgcatctcctaac

SEQ ID NO: 821656 - DNA, 15 bp, Homo sapiens
atgcatctcctaact

SEQ ID NO: 821657 - DNA, 15 bp, Homo sapiens
tgcatctcctaactt

SEQ ID NO: 821658 - DNA, 15 bp, Homo sapiens
gcatctcctaacttt

SEQ ID NO: 821659 - DNA, 15 bp, Homo sapiens
catctcctaactttc

SEQ ID NO: 821660 - DNA, 15 bp, Homo sapiens
atctcctaactttct

SEQ ID NO: 821661 - DNA, 15 bp, Homo sapiens
tctcctaactttcta

SEQ ID NO: 821662 - DNA, 15 bp, Homo sapiens
ctcctaactttctaa

SEQ ID NO: 821663 - DNA, 15 bp, Homo sapiens
tcctaactttctaaa

SEQ ID NO: 821664 - DNA, 15 bp, Homo sapiens
cctaactttctaaac

SEQ ID NO: 821665 - DNA, 15 bp, Homo sapiens
ctaactttctaaact

SEQ ID NO: 821666 - DNA, 15 bp, Homo sapiens
taactttctaaactt

SEQ ID NO: 821667 - DNA, 15 bp, Homo sapiens
aactttctaaacttt

SEQ ID NO: 821668 - DNA, 15 bp, Homo sapiens
actttctaaacttta

SEQ ID NO: 821669 - DNA, 15 bp, Homo sapiens
ctttctaaactttac

SEQ ID NO: 821670 - DNA, 15 bp, Homo sapiens
tttctaaactttact

SEQ ID NO: 821671 - DNA, 15 bp, Homo sapiens
ttctaaactttactg

SEQ ID NO: 821672 - DNA, 15 bp, Homo sapiens
tctaaactttactgt

SEQ ID NO: 821673 - DNA, 15 bp, Homo sapiens
ctaaactttactgtg

SEQ ID NO: 821674 - DNA, 15 bp, Homo sapiens
taaactttactgtgc

SEQ ID NO: 821675 - DNA, 15 bp, Homo sapiens
aaactttactgtgca

SEQ ID NO: 821676 - DNA, 15 bp, Homo sapiens
aactttactgtgcat

SEQ ID NO: 821677 - DNA, 15 bp, Homo sapiens
actttactgtgcatg

SEQ ID NO: 821678 - DNA, 15 bp, Homo sapiens
ctttactgtgcatga

SEQ ID NO: 821679 - DNA, 15 bp, Homo sapiens
tttactgtgcatgag

SEQ ID NO: 821680 - DNA, 15 bp, Homo sapiens
ttactgtgcatgaga

SEQ ID NO: 821681 - DNA, 15 bp, Homo sapiens
tactgtgcatgagaa

SEQ ID NO: 821682 - DNA, 15 bp, Homo sapiens
actgtgcatgagaag

SEQ ID NO: 821683 - DNA, 15 bp, Homo sapiens
ctgtgcatgagaagc

SEQ ID NO: 821684 - DNA, 15 bp, Homo sapiens
tgtgcatgagaagca

SEQ ID NO: 821685 - DNA, 15 bp, Homo sapiens
gtgcatgagaagcac

SEQ ID NO: 821686 - DNA, 15 bp, Homo sapiens
tgcatgagaagcacc

SEQ ID NO: 821687 - DNA, 15 bp, Homo sapiens
gcatgagaagcacca

SEQ ID NO: 821688 - DNA, 15 bp, Homo sapiens
catgagaagcaccag

SEQ ID NO: 821689 - DNA, 15 bp, Homo sapiens
atgagaagcaccagg

SEQ ID NO: 821690 - DNA, 15 bp, Homo sapiens
tgagaagcaccagga

SEQ ID NO: 821691 - DNA, 15 bp, Homo sapiens
gagaagcaccaggag

SEQ ID NO: 821692 - DNA, 15 bp, Homo sapiens
agaagcaccaggaga

SEQ ID NO: 821693 - DNA, 15 bp, Homo sapiens
gaagcaccaggagat

SEQ ID NO: 821694 - DNA, 15 bp, Homo sapiens
aagcaccaggagatc

SEQ ID NO: 821695 - DNA, 15 bp, Homo sapiens
agcaccaggagatct

SEQ ID NO: 821696 - DNA, 15 bp, Homo sapiens
gcaccaggagatctt

SEQ ID NO: 821697 - DNA, 15 bp, Homo sapiens
caccaggagatcttg

SEQ ID NO: 821698 - DNA, 15 bp, Homo sapiens
accaggagatcttgt

SEQ ID NO: 821699 - DNA, 15 bp, Homo sapiens
ccaggagatcttgtt

SEQ ID NO: 821700 - DNA, 15 bp, Homo sapiens
caggagatcttgtta

SEQ ID NO: 821701 - DNA, 15 bp, Homo sapiens
aggagatcttgttag

SEQ ID NO: 821702 - DNA, 15 bp, Homo sapiens
ggagatcttgttaga

SEQ ID NO: 821703 - DNA, 15 bp, Homo sapiens
gagatcttgttagaa

SEQ ID NO: 821704 - DNA, 15 bp, Homo sapiens
agatcttgttagaat

SEQ ID NO: 821705 - DNA, 15 bp, Homo sapiens
gatcttgttagaatg

SEQ ID NO: 821706 - DNA, 15 bp, Homo sapiens
atcttgttagaatgc

SEQ ID NO: 821707 - DNA, 15 bp, Homo sapiens
tcttgttagaatgca

SEQ ID NO: 821708 - DNA, 15 bp, Homo sapiens
cttgttagaatgcag

SEQ ID NO: 821709 - DNA, 15 bp, Homo sapiens
ttgttagaatgcagt

SEQ ID NO: 821710 - DNA, 15 bp, Homo sapiens
tgttagaatgcagtt

SEQ ID NO: 821711 - DNA, 15 bp, Homo sapiens
gttagaatgcagttt

SEQ ID NO: 821712 - DNA, 15 bp, Homo sapiens
ttagaatgcagtttc

SEQ ID NO: 821713 - DNA, 15 bp, Homo sapiens
tagaatgcagtttct

SEQ ID NO: 821714 - DNA, 15 bp, Homo sapiens
agaatgcagtttctg

SEQ ID NO: 821715 - DNA, 15 bp, Homo sapiens
gaatgcagtttctga

SEQ ID NO: 821716 - DNA, 15 bp, Homo sapiens
aatgcagtttctgat

SEQ ID NO: 821717 - DNA, 15 bp, Homo sapiens
atgcagtttctgatt

SEQ ID NO: 821718 - DNA, 15 bp, Homo sapiens
tgcagtttctgattt

SEQ ID NO: 821719 - DNA, 15 bp, Homo sapiens
gcagtttctgattta

SEQ ID NO: 821720 - DNA, 15 bp, Homo sapiens
cagtttctgatttag

SEQ ID NO: 821721 - DNA, 15 bp, Homo sapiens
agtttctgatttagg

SEQ ID NO: 821722 - DNA, 15 bp, Homo sapiens
gtttctgatttagga

SEQ ID NO: 821723 - DNA, 15 bp, Homo sapiens
tttctgatttaggaa

SEQ ID NO: 821724 - DNA, 15 bp, Homo sapiens
ttctgatttaggaag

SEQ ID NO: 821725 - DNA, 15 bp, Homo sapiens
tctgatttaggaagc

SEQ ID NO: 821726 - DNA, 15 bp, Homo sapiens
ctgatttaggaagcc

SEQ ID NO: 821727 - DNA, 15 bp, Homo sapiens
tgatttaggaagcct

SEQ ID NO: 821728 - DNA, 15 bp, Homo sapiens
gatttaggaagccta

SEQ ID NO: 821729 - DNA, 15 bp, Homo sapiens
atttaggaagcctat

SEQ ID NO: 821730 - DNA, 15 bp, Homo sapiens
tttaggaagcctatg

SEQ ID NO: 821731 - DNA, 15 bp, Homo sapiens
ttaggaagcctatgc

SEQ ID NO: 821732 - DNA, 15 bp, Homo sapiens
taggaagcctatgct

SEQ ID NO: 821733 - DNA, 15 bp, Homo sapiens
aggaagcctatgcta

SEQ ID NO: 821734 - DNA, 15 bp, Homo sapiens
ggaagcctatgctaa

SEQ ID NO: 821735 - DNA, 15 bp, Homo sapiens
gaagcctatgctaac

SEQ ID NO: 821736 - DNA, 15 bp, Homo sapiens
aagcctatgctaacg

SEQ ID NO: 821737 - DNA, 15 bp, Homo sapiens
agcctatgctaacgt

SEQ ID NO: 821738 - DNA, 15 bp, Homo sapiens
gcctatgctaacgtc

SEQ ID NO: 821739 - DNA, 15 bp, Homo sapiens
cctatgctaacgtca

SEQ ID NO: 821740 - DNA, 15 bp, Homo sapiens
ctatgctaacgtcag

SEQ ID NO: 821741 - DNA, 15 bp, Homo sapiens
tatgctaacgtcaga

SEQ ID NO: 821742 - DNA, 15 bp, Homo sapiens
atgctaacgtcagag

SEQ ID NO: 821743 - DNA, 15 bp, Homo sapiens
tgctaacgtcagaga

SEQ ID NO: 821744 - DNA, 15 bp, Homo sapiens
gctaacgtcagagat

SEQ ID NO: 821745 - DNA, 15 bp, Homo sapiens
ctaacgtcagagatc

SEQ ID NO: 821746 - DNA, 15 bp, Homo sapiens
taacgtcagagatct

SEQ ID NO: 821747 - DNA, 15 bp, Homo sapiens
aacgtcagagatcta

SEQ ID NO: 821748 - DNA, 15 bp, Homo sapiens
acgtcagagatctac

SEQ ID NO: 821749 - DNA, 15 bp, Homo sapiens
cgtcagagatctaca

SEQ ID NO: 821750 - DNA, 15 bp, Homo sapiens
gtcagagatctacat

SEQ ID NO: 821751 - DNA, 15 bp, Homo sapiens
tcagagatctacatt

SEQ ID NO: 821752 - DNA, 15 bp, Homo sapiens
cagagatctacattt

SEQ ID NO: 821753 - DNA, 15 bp, Homo sapiens
agagatctacatttc

SEQ ID NO: 821754 - DNA, 15 bp, Homo sapiens
gagatctacatttcc

SEQ ID NO: 821755 - DNA, 15 bp, Homo sapiens
agatctacatttcca

SEQ ID NO: 821756 - DNA, 15 bp, Homo sapiens
gatctacatttccac

SEQ ID NO: 821757 - DNA, 15 bp, Homo sapiens
atctacatttccacc

SEQ ID NO: 821758 - DNA, 15 bp, Homo sapiens
tctacatttccacca

SEQ ID NO: 821759 - DNA, 15 bp, Homo sapiens
ctacatttccaccag

SEQ ID NO: 821760 - DNA, 15 bp, Homo sapiens
tacatttccaccagc

SEQ ID NO: 821761 - DNA, 15 bp, Homo sapiens
acatttccaccagct

SEQ ID NO: 821762 - DNA, 15 bp, Homo sapiens
catttccaccagctc

SEQ ID NO: 821763 - DNA, 15 bp, Homo sapiens
atttccaccagctct

SEQ ID NO: 821764 - DNA, 15 bp, Homo sapiens
tttccaccagctctc

SEQ ID NO: 821765 - DNA, 15 bp, Homo sapiens
ttccaccagctctca

SEQ ID NO: 821766 - DNA, 15 bp, Homo sapiens
tccaccagctctcag

SEQ ID NO: 821767 - DNA, 15 bp, Homo sapiens
ccaccagctctcagg

SEQ ID NO: 821768 - DNA, 15 bp, Homo sapiens
caccagctctcaggt

SEQ ID NO: 821769 - DNA, 15 bp, Homo sapiens
accagctctcaggtg

SEQ ID NO: 821770 - DNA, 15 bp, Homo sapiens
ccagctctcaggtgt

SEQ ID NO: 821771 - DNA, 15 bp, Homo sapiens
cagctctcaggtgta

SEQ ID NO: 821772 - DNA, 15 bp, Homo sapiens
agctctcaggtgtag

SEQ ID NO: 821773 - DNA, 15 bp, Homo sapiens
gctctcaggtgtagt

SEQ ID NO: 821774 - DNA, 15 bp, Homo sapiens
ctctcaggtgtagtg

SEQ ID NO: 821775 - DNA, 15 bp, Homo sapiens
tctcaggtgtagtga

SEQ ID NO: 821776 - DNA, 15 bp, Homo sapiens
ctcaggtgtagtgat

SEQ ID NO: 821777 - DNA, 15 bp, Homo sapiens
tcaggtgtagtgatt

SEQ ID NO: 821778 - DNA, 15 bp, Homo sapiens
caggtgtagtgattc

SEQ ID NO: 821779 - DNA, 15 bp, Homo sapiens
aggtgtagtgattct

SEQ ID NO: 821780 - DNA, 15 bp, Homo sapiens
ggtgtagtgattctc

SEQ ID NO: 821781 - DNA, 15 bp, Homo sapiens
gtgtagtgattctcc

SEQ ID NO: 821782 - DNA, 15 bp, Homo sapiens
tgtagtgattctcct

SEQ ID NO: 821783 - DNA, 15 bp, Homo sapiens
gtagtgattctcctg

SEQ ID NO: 821784 - DNA, 15 bp, Homo sapiens
tagtgattctcctgc

SEQ ID NO: 821785 - DNA, 15 bp, Homo sapiens
gtgattctcctgctc

SEQ ID NO: 821786 - DNA, 15 bp, Homo sapiens
tgattctcctgctct

SEQ ID NO: 821787 - DNA, 15 bp, Homo sapiens
gattctcctgctctg

SEQ ID NO: 821788 - DNA, 15 bp, Homo sapiens
attctcctgctctgt

SEQ ID NO: 821789 - DNA, 15 bp, Homo sapiens
ttctcctgctctgtg

SEQ ID NO: 821790 - DNA, 15 bp, Homo sapiens
tctcctgctctgtgg

SEQ ID NO: 821791 - DNA, 15 bp, Homo sapiens
ctcctgctctgtgga

SEQ ID NO: 821792 - DNA, 15 bp, Homo sapiens
tcctgctctgtggac

SEQ ID NO: 821793 - DNA, 15 bp, Homo sapiens
cctgctctgtggacc

SEQ ID NO: 821794 - DNA, 15 bp, Homo sapiens
ctgctctgtggacca

SEQ ID NO: 821795 - DNA, 15 bp, Homo sapiens
tgctctgtggaccac

SEQ ID NO: 821796 - DNA, 15 bp, Homo sapiens
gctctgtggaccaca

SEQ ID NO: 821797 - DNA, 15 bp, Homo sapiens
ctctgtggaccacac

SEQ ID NO: 821798 - DNA, 15 bp, Homo sapiens
tctgtggaccacact

SEQ ID NO: 821799 - DNA, 15 bp, Homo sapiens
ctgtggaccacactt

SEQ ID NO: 821800 - DNA, 15 bp, Homo sapiens
tgtggaccacacttt

SEQ ID NO: 821801 - DNA, 15 bp, Homo sapiens
gtggaccacacttta

SEQ ID NO: 821802 - DNA, 15 bp, Homo sapiens
tggaccacactttaa

SEQ ID NO: 821803 - DNA, 15 bp, Homo sapiens
ggaccacactttaaa

SEQ ID NO: 821804 - DNA, 15 bp, Homo sapiens
gaccacactttaaat

SEQ ID NO: 821805 - DNA, 15 bp, Homo sapiens
accacactttaaata

SEQ ID NO: 821806 - DNA, 15 bp, Homo sapiens
ccacactttaaatag

SEQ ID NO: 821807 - DNA, 15 bp, Homo sapiens
cacactttaaatagc

SEQ ID NO: 821808 - DNA, 15 bp, Homo sapiens
acactttaaatagcc

SEQ ID NO: 821809 - DNA, 15 bp, Homo sapiens
cactttaaatagcca

SEQ ID NO: 821810 - DNA, 15 bp, Homo sapiens
actttaaatagccag

SEQ ID NO: 821811 - DNA, 15 bp, Homo sapiens
ctttaaatagccagg

SEQ ID NO: 821812 - DNA, 15 bp, Homo sapiens
tttaaatagccaggc

SEQ ID NO: 821813 - DNA, 15 bp, Homo sapiens
ttaaatagccaggct

SEQ ID NO: 821814 - DNA, 15 bp, Homo sapiens
taaatagccaggctt

SEQ ID NO: 821815 - DNA, 15 bp, Homo sapiens
aaatagccaggctta

SEQ ID NO: 821816 - DNA, 15 bp, Homo sapiens
aatagccaggcttac

SEQ ID NO: 821817 - DNA, 15 bp, Homo sapiens
atagccaggcttacc

SEQ ID NO: 821818 - DNA, 15 bp, Homo sapiens
tagccaggcttacca

SEQ ID NO: 821819 - DNA, 15 bp, Homo sapiens
agccaggcttaccaa

SEQ ID NO: 821820 - DNA, 15 bp, Homo sapiens
gccaggcttaccaat

SEQ ID NO: 821821 - DNA, 15 bp, Homo sapiens
ccaggcttaccaatc

SEQ ID NO: 821822 - DNA, 15 bp, Homo sapiens
caggcttaccaatcc

SEQ ID NO: 821823 - DNA, 15 bp, Homo sapiens
aggcttaccaatcca

SEQ ID NO: 821824 - DNA, 15 bp, Homo sapiens
ggcttaccaatccac

SEQ ID NO: 821825 - DNA, 15 bp, Homo sapiens
gcttaccaatccact

SEQ ID NO: 821826 - DNA, 15 bp, Homo sapiens
cttaccaatccactt

SEQ ID NO: 821827 - DNA, 15 bp, Homo sapiens
ttaccaatccactta

SEQ ID NO: 821828 - DNA, 15 bp, Homo sapiens
taccaatccacttaa

SEQ ID NO: 821829 - DNA, 15 bp, Homo sapiens
accaatccacttaaa

SEQ ID NO: 821830 - DNA, 15 bp, Homo sapiens
ccaatccacttaaaa

SEQ ID NO: 821831 - DNA, 15 bp, Homo sapiens
caatccacttaaaaa

SEQ ID NO: 821832 - DNA, 15 bp, Homo sapiens
aatccacttaaaaat

SEQ ID NO: 821833 - DNA, 15 bp, Homo sapiens
atccacttaaaaatg

SEQ ID NO: 821834 - DNA, 15 bp, Homo sapiens
tccacttaaaaatgg

SEQ ID NO: 821835 - DNA, 15 bp, Homo sapiens
ccacttaaaaatggc

SEQ ID NO: 821836 - DNA, 15 bp, Homo sapiens
cacttaaaaatggcc

SEQ ID NO: 821837 - DNA, 15 bp, Homo sapiens
acttaaaaatggcca

SEQ ID NO: 821838 - DNA, 15 bp, Homo sapiens
cttaaaaatggccaa

SEQ ID NO: 821839 - DNA, 15 bp, Homo sapiens
ttaaaaatggccaaa

SEQ ID NO: 821840 - DNA, 15 bp, Homo sapiens
taaaaatggccaaaa

SEQ ID NO: 821841 - DNA, 15 bp, Homo sapiens
aaaaatggccaaaac

SEQ ID NO: 821842 - DNA, 15 bp, Homo sapiens
aaaatggccaaaacc

SEQ ID NO: 821843 - DNA, 15 bp, Homo sapiens
aaatggccaaaacca

SEQ ID NO: 821844 - DNA, 15 bp, Homo sapiens
aatggccaaaaccac

SEQ ID NO: 821845 - DNA, 15 bp, Homo sapiens
atggccaaaaccaca

SEQ ID NO: 821846 - DNA, 15 bp, Homo sapiens
tggccaaaaccacaa

SEQ ID NO: 821847 - DNA, 15 bp, Homo sapiens
ggccaaaaccacaat

SEQ ID NO: 821848 - DNA, 15 bp, Homo sapiens
gccaaaaccacaatt

SEQ ID NO: 821849 - DNA, 15 bp, Homo sapiens
ccaaaaccacaatta

SEQ ID NO: 821850 - DNA, 15 bp, Homo sapiens
caaaaccacaattac

SEQ ID NO: 821851 - DNA, 15 bp, Homo sapiens
aaaaccacaattact

SEQ ID NO: 821852 - DNA, 15 bp, Homo sapiens
aaaccacaattactt

SEQ ID NO: 821853 - DNA, 15 bp, Homo sapiens
aaccacaattacttt

SEQ ID NO: 821854 - DNA, 15 bp, Homo sapiens
accacaattactttt

SEQ ID NO: 821855 - DNA, 15 bp, Homo sapiens
ccacaattacttttg

SEQ ID NO: 821856 - DNA, 15 bp, Homo sapiens
cacaattacttttgc

SEQ ID NO: 821857 - DNA, 15 bp, Homo sapiens
acaattacttttgca

SEQ ID NO: 821858 - DNA, 15 bp, Homo sapiens
caattacttttgcac

SEQ ID NO: 821859 - DNA, 15 bp, Homo sapiens
aattacttttgcacc

SEQ ID NO: 821860 - DNA, 15 bp, Homo sapiens
attacttttgcacca

SEQ ID NO: 821861 - DNA, 15 bp, Homo sapiens
ttacttttgcaccaa

SEQ ID NO: 821862 - DNA, 15 bp, Homo sapiens
tacttttgcaccaaa

SEQ ID NO: 821863 - DNA, 15 bp, Homo sapiens
acttttgcaccaaac

SEQ ID NO: 821864 - DNA, 15 bp, Homo sapiens
cttttgcaccaaact

SEQ ID NO: 821865 - DNA, 15 bp, Homo sapiens
ttttgcaccaaacta

SEQ ID NO: 821866 - DNA, 15 bp, Homo sapiens
tttgcaccaaactaa

SEQ ID NO: 821867 - DNA, 15 bp, Homo sapiens
ttgcaccaaactaat

SEQ ID NO: 821868 - DNA, 15 bp, Homo sapiens
tgcaccaaactaata

SEQ ID NO: 821869 - DNA, 15 bp, Homo sapiens
gcaccaaactaatac

SEQ ID NO: 821870 - DNA, 15 bp, Homo sapiens
caccaaactaataca

SEQ ID NO: 821871 - DNA, 15 bp, Homo sapiens
accaaactaatacac

SEQ ID NO: 821872 - DNA, 15 bp, Homo sapiens
ccaaactaatacact

SEQ ID NO: 821873 - DNA, 15 bp, Homo sapiens
caaactaatacactg

SEQ ID NO: 821874 - DNA, 15 bp, Homo sapiens
aaactaatacactgt

SEQ ID NO: 821875 - DNA, 15 bp, Homo sapiens
aactaatacactgtg

SEQ ID NO: 821876 - DNA, 15 bp, Homo sapiens
actaatacactgtgc

SEQ ID NO: 821877 - DNA, 15 bp, Homo sapiens
ctaatacactgtgct

SEQ ID NO: 821878 - DNA, 15 bp, Homo sapiens
taatacactgtgctg

SEQ ID NO: 821879 - DNA, 15 bp, Homo sapiens
aatacactgtgctgt

SEQ ID NO: 821880 - DNA, 15 bp, Homo sapiens
atacactgtgctgtc

SEQ ID NO: 821881 - DNA, 15 bp, Homo sapiens
tacactgtgctgtcc

SEQ ID NO: 821882 - DNA, 15 bp, Homo sapiens
acactgtgctgtcca

SEQ ID NO: 821883 - DNA, 15 bp, Homo sapiens
cactgtgctgtccag

SEQ ID NO: 821884 - DNA, 15 bp, Homo sapiens
actgtgctgtccagt

SEQ ID NO: 821885 - DNA, 15 bp, Homo sapiens
ctgtgctgtccagta

SEQ ID NO: 821886 - DNA, 15 bp, Homo sapiens
tgtgctgtccagtat

SEQ ID NO: 821887 - DNA, 15 bp, Homo sapiens
gtgctgtccagtatg

SEQ ID NO: 821888 - DNA, 15 bp, Homo sapiens
tgctgtccagtatgg

SEQ ID NO: 821889 - DNA, 15 bp, Homo sapiens
gctgtccagtatggt

SEQ ID NO: 821890 - DNA, 15 bp, Homo sapiens
ctgtccagtatggta

SEQ ID NO: 821891 - DNA, 15 bp, Homo sapiens
tgtccagtatggtag

SEQ ID NO: 821892 - DNA, 15 bp, Homo sapiens
gtccagtatggtagc

SEQ ID NO: 821893 - DNA, 15 bp, Homo sapiens
tccagtatggtagct

SEQ ID NO: 821894 - DNA, 15 bp, Homo sapiens
ccagtatggtagctc

SEQ ID NO: 821895 - DNA, 15 bp, Homo sapiens
cagtatggtagctcc

SEQ ID NO: 821896 - DNA, 15 bp, Homo sapiens
agtatggtagctcct

SEQ ID NO: 821897 - DNA, 15 bp, Homo sapiens
gtatggtagctccta

SEQ ID NO: 821898 - DNA, 15 bp, Homo sapiens
tatggtagctcctag

SEQ ID NO: 821899 - DNA, 15 bp, Homo sapiens
atggtagctcctagc

SEQ ID NO: 821900 - DNA, 15 bp, Homo sapiens
tggtagctcctagcc

SEQ ID NO: 821901 - DNA, 15 bp, Homo sapiens
ggtagctcctagcca

SEQ ID NO: 821902 - DNA, 15 bp, Homo sapiens
gtagctcctagccac

SEQ ID NO: 821903 - DNA, 15 bp, Homo sapiens
tagctcctagccaca

SEQ ID NO: 821904 - DNA, 15 bp, Homo sapiens
agctcctagccacat

SEQ ID NO: 821905 - DNA, 15 bp, Homo sapiens
gctcctagccacatt

SEQ ID NO: 821906 - DNA, 15 bp, Homo sapiens
ctcctagccacattt

SEQ ID NO: 821907 - DNA, 15 bp, Homo sapiens
tcctagccacatttg

SEQ ID NO: 821908 - DNA, 15 bp, Homo sapiens
cctagccacatttgc

SEQ ID NO: 821909 - DNA, 15 bp, Homo sapiens
ctagccacatttgcc

SEQ ID NO: 821910 - DNA, 15 bp, Homo sapiens
tagccacatttgcct

SEQ ID NO: 821911 - DNA, 15 bp, Homo sapiens
agccacatttgccta

SEQ ID NO: 821912 - DNA, 15 bp, Homo sapiens
gccacatttgcctat

SEQ ID NO: 821913 - DNA, 15 bp, Homo sapiens
ccacatttgcctatt

SEQ ID NO: 821914 - DNA, 15 bp, Homo sapiens
cacatttgcctattt

SEQ ID NO: 821915 - DNA, 15 bp, Homo sapiens
acatttgcctattta

SEQ ID NO: 821916 - DNA, 15 bp, Homo sapiens
catttgcctatttaa

SEQ ID NO: 821917 - DNA, 15 bp, Homo sapiens
atttgcctatttaaa

SEQ ID NO: 821918 - DNA, 15 bp, Homo sapiens
tttgcctatttaaaa

SEQ ID NO: 821919 - DNA, 15 bp, Homo sapiens
ttgcctatttaaaag

SEQ ID NO: 821920 - DNA, 15 bp, Homo sapiens
tgcctatttaaaagc

SEQ ID NO: 821921 - DNA, 15 bp, Homo sapiens
gcctatttaaaagct

SEQ ID NO: 821922 - DNA, 15 bp, Homo sapiens
cctatttaaaagctc

SEQ ID NO: 821923 - DNA, 15 bp, Homo sapiens
ctatttaaaagctca

SEQ ID NO: 821924 - DNA, 15 bp, Homo sapiens
tatttaaaagctcag

SEQ ID NO: 821925 - DNA, 15 bp, Homo sapiens
atttaaaagctcagt

SEQ ID NO: 821926 - DNA, 15 bp, Homo sapiens
tttaaaagctcagtt

SEQ ID NO: 821927 - DNA, 15 bp, Homo sapiens
ttaaaagctcagttc

SEQ ID NO: 821928 - DNA, 15 bp, Homo sapiens
taaaagctcagttcc

SEQ ID NO: 821929 - DNA, 15 bp, Homo sapiens
aaaagctcagttcct

SEQ ID NO: 821930 - DNA, 15 bp, Homo sapiens
aaagctcagttcctc

SEQ ID NO: 821931 - DNA, 15 bp, Homo sapiens
aagctcagttcctcc

SEQ ID NO: 821932 - DNA, 15 bp, Homo sapiens
agctcagttcctcca

SEQ ID NO: 821933 - DNA, 15 bp, Homo sapiens
gctcagttcctccat

SEQ ID NO: 821934 - DNA, 15 bp, Homo sapiens
ctcagttcctccatc

SEQ ID NO: 821935 - DNA, 15 bp, Homo sapiens
tcagttcctccatcc

SEQ ID NO: 821936 - DNA, 15 bp, Homo sapiens
cagttcctccatcct

SEQ ID NO: 821937 - DNA, 15 bp, Homo sapiens
agttcctccatccta

SEQ ID NO: 821938 - DNA, 15 bp, Homo sapiens
gttcctccatcctac

SEQ ID NO: 821939 - DNA, 15 bp, Homo sapiens
ttcctccatcctacc

SEQ ID NO: 821940 - DNA, 15 bp, Homo sapiens
tcctccatcctacca

SEQ ID NO: 821941 - DNA, 15 bp, Homo sapiens
cctccatcctaccag

SEQ ID NO: 821942 - DNA, 15 bp, Homo sapiens
ctccatcctaccagc

SEQ ID NO: 821943 - DNA, 15 bp, Homo sapiens
tccatcctaccagct

SEQ ID NO: 821944 - DNA, 15 bp, Homo sapiens
ccatcctaccagctg

SEQ ID NO: 821945 - DNA, 15 bp, Homo sapiens
catcctaccagctgt

SEQ ID NO: 821946 - DNA, 15 bp, Homo sapiens
atcctaccagctgtt

SEQ ID NO: 821947 - DNA, 15 bp, Homo sapiens
tcctaccagctgttt

SEQ ID NO: 821948 - DNA, 15 bp, Homo sapiens
cctaccagctgtttt

SEQ ID NO: 821949 - DNA, 15 bp, Homo sapiens
ctaccagctgttttt

SEQ ID NO: 821950 - DNA, 15 bp, Homo sapiens
taccagctgtttttc

SEQ ID NO: 821951 - DNA, 15 bp, Homo sapiens
accagctgtttttca

SEQ ID NO: 821952 - DNA, 15 bp, Homo sapiens
ccagctgtttttcag

SEQ ID NO: 821953 - DNA, 15 bp, Homo sapiens
cagctgtttttcagg

SEQ ID NO: 821954 - DNA, 15 bp, Homo sapiens
agctgtttttcaggt

SEQ ID NO: 821955 - DNA, 15 bp, Homo sapiens
gctgtttttcaggta

SEQ ID NO: 821956 - DNA, 15 bp, Homo sapiens
ctgtttttcaggtac

SEQ ID NO: 821957 - DNA, 15 bp, Homo sapiens
tgtttttcaggtact

SEQ ID NO: 821958 - DNA, 15 bp, Homo sapiens
gtttttcaggtactc

SEQ ID NO: 821959 - DNA, 15 bp, Homo sapiens
tttttcaggtactca

SEQ ID NO: 821960 - DNA, 15 bp, Homo sapiens
ttttcaggtactcaa

SEQ ID NO: 821961 - DNA, 15 bp, Homo sapiens
tttcaggtactcaag

SEQ ID NO: 821962 - DNA, 15 bp, Homo sapiens
ttcaggtactcaaga

SEQ ID NO: 821963 - DNA, 15 bp, Homo sapiens
tcaggtactcaagag

SEQ ID NO: 821964 - DNA, 15 bp, Homo sapiens
caggtactcaagagc

SEQ ID NO: 821965 - DNA, 15 bp, Homo sapiens
aggtactcaagagcc

SEQ ID NO: 821966 - DNA, 15 bp, Homo sapiens
ggtactcaagagccc

SEQ ID NO: 821967 - DNA, 15 bp, Homo sapiens
gtactcaagagcccc

SEQ ID NO: 821968 - DNA, 15 bp, Homo sapiens
tactcaagagcccca

SEQ ID NO: 821969 - DNA, 15 bp, Homo sapiens
actcaagagccccat

SEQ ID NO: 821970 - DNA, 15 bp, Homo sapiens
ctcaagagccccatg

SEQ ID NO: 821971 - DNA, 15 bp, Homo sapiens
tcaagagccccatgt

SEQ ID NO: 821972 - DNA, 15 bp, Homo sapiens
caagagccccatgtg

SEQ ID NO: 821973 - DNA, 15 bp, Homo sapiens
aagagccccatgtgg

SEQ ID NO: 821974 - DNA, 15 bp, Homo sapiens
agagccccatgtggc

SEQ ID NO: 821975 - DNA, 15 bp, Homo sapiens
gagccccatgtggct

SEQ ID NO: 821976 - DNA, 15 bp, Homo sapiens
agccccatgtggctc

SEQ ID NO: 821977 - DNA, 15 bp, Homo sapiens
gccccatgtggctca

SEQ ID NO: 821978 - DNA, 15 bp, Homo sapiens
ccccatgtggctcat

SEQ ID NO: 821979 - DNA, 15 bp, Homo sapiens
cccatgtggctcatt

SEQ ID NO: 821980 - DNA, 15 bp, Homo sapiens
ccatgtggctcattg

SEQ ID NO: 821981 - DNA, 15 bp, Homo sapiens
catgtggctcattgg

SEQ ID NO: 821982 - DNA, 15 bp, Homo sapiens
atgtggctcattggc

SEQ ID NO: 821983 - DNA, 15 bp, Homo sapiens
tgtggctcattggct

SEQ ID NO: 821984 - DNA, 15 bp, Homo sapiens
gtggctcattggctg

SEQ ID NO: 821985 - DNA, 15 bp, Homo sapiens
tggctcattggctgc

SEQ ID NO: 821986 - DNA, 15 bp, Homo sapiens
ggctcattggctgcg

SEQ ID NO: 821987 - DNA, 15 bp, Homo sapiens
gctcattggctgcgg

SEQ ID NO: 821988 - DNA, 15 bp, Homo sapiens
ctcattggctgcgga

SEQ ID NO: 821989 - DNA, 15 bp, Homo sapiens
tcattggctgcggag

SEQ ID NO: 821990 - DNA, 15 bp, Homo sapiens
cattggctgcggagc

SEQ ID NO: 821991 - DNA, 15 bp, Homo sapiens
attggctgcggagct

SEQ ID NO: 821992 - DNA, 15 bp, Homo sapiens
ttggctgcggagctg

SEQ ID NO: 821993 - DNA, 15 bp, Homo sapiens
tggctgcggagctgg

SEQ ID NO: 821994 - DNA, 15 bp, Homo sapiens
ggctgcggagctgga

SEQ ID NO: 821995 - DNA, 15 bp, Homo sapiens
gctgcggagctggac

SEQ ID NO: 821996 - DNA, 15 bp, Homo sapiens
ctgcggagctggaca

SEQ ID NO: 821997 - DNA, 15 bp, Homo sapiens
tgcggagctggacag

SEQ ID NO: 821998 - DNA, 15 bp, Homo sapiens
gcggagctggacagc

SEQ ID NO: 821999 - DNA, 15 bp, Homo sapiens
cggagctggacagca

SEQ ID NO: 822000 - DNA, 15 bp, Homo sapiens
ggagctggacagcac

SEQ ID NO: 822001 - DNA, 15 bp, Homo sapiens
gagctggacagcaca

SEQ ID NO: 822002 - DNA, 15 bp, Homo sapiens
agctggacagcacag

SEQ ID NO: 822003 - DNA, 15 bp, Homo sapiens
gctggacagcacaga

SEQ ID NO: 822004 - DNA, 15 bp, Homo sapiens
ctggacagcacagat

SEQ ID NO: 822005 - DNA, 15 bp, Homo sapiens
tggacagcacagatg

SEQ ID NO: 822006 - DNA, 15 bp, Homo sapiens
ggacagcacagatgt

SEQ ID NO: 822007 - DNA, 15 bp, Homo sapiens
gacagcacagatgtg

SEQ ID NO: 822008 - DNA, 15 bp, Homo sapiens
acagcacagatgtgg

SEQ ID NO: 822009 - DNA, 15 bp, Homo sapiens
cagcacagatgtgga

SEQ ID NO: 822010 - DNA, 15 bp, Homo sapiens
agcacagatgtggaa

SEQ ID NO: 822011 - DNA, 15 bp, Homo sapiens
gcacagatgtggaac

SEQ ID NO: 822012 - DNA, 15 bp, Homo sapiens
cacagatgtggaaca

SEQ ID NO: 822013 - DNA, 15 bp, Homo sapiens
acagatgtggaacat

SEQ ID NO: 822014 - DNA, 15 bp, Homo sapiens
cagatgtggaacatt

SEQ ID NO: 822015 - DNA, 15 bp, Homo sapiens
agatgtggaacattc

SEQ ID NO: 822016 - DNA, 15 bp, Homo sapiens
gatgtggaacattcc

SEQ ID NO: 822017 - DNA, 15 bp, Homo sapiens
atgtggaacattcca

SEQ ID NO: 822018 - DNA, 15 bp, Homo sapiens
tgtggaacattccat

SEQ ID NO: 822019 - DNA, 15 bp, Homo sapiens
gtggaacattccatc

SEQ ID NO: 822020 - DNA, 15 bp, Homo sapiens
tggaacattccatca

SEQ ID NO: 822021 - DNA, 15 bp, Homo sapiens
ggaacattccatcat

SEQ ID NO: 822022 - DNA, 15 bp, Homo sapiens
gaacattccatcatc

SEQ ID NO: 822023 - DNA, 15 bp, Homo sapiens
aacattccatcatca

SEQ ID NO: 822024 - DNA, 15 bp, Homo sapiens
acattccatcatcat

SEQ ID NO: 822025 - DNA, 15 bp, Homo sapiens
cattccatcatcata

SEQ ID NO: 822026 - DNA, 15 bp, Homo sapiens
attccatcatcatag

SEQ ID NO: 822027 - DNA, 15 bp, Homo sapiens
ttccatcatcataga

SEQ ID NO: 822028 - DNA, 15 bp, Homo sapiens
tccatcatcatagac

SEQ ID NO: 822029 - DNA, 15 bp, Homo sapiens
ccatcatcatagaca

SEQ ID NO: 822030 - DNA, 15 bp, Homo sapiens
catcatcatagacag

SEQ ID NO: 822031 - DNA, 15 bp, Homo sapiens
atcatcatagacagt

SEQ ID NO: 822032 - DNA, 15 bp, Homo sapiens
tcatcatagacagtt

SEQ ID NO: 822033 - DNA, 15 bp, Homo sapiens
catcatagacagttc

SEQ ID NO: 822034 - DNA, 15 bp, Homo sapiens
atcatagacagttct

SEQ ID NO: 822035 - DNA, 15 bp, Homo sapiens
tcatagacagttctg

SEQ ID NO: 822036 - DNA, 15 bp, Homo sapiens
catagacagttctgt

SEQ ID NO: 822037 - DNA, 15 bp, Homo sapiens
atagacagttctgtg

SEQ ID NO: 822038 - DNA, 15 bp, Homo sapiens
tagacagttctgtgg

SEQ ID NO: 822039 - DNA, 15 bp, Homo sapiens
agacagttctgtggg

SEQ ID NO: 822040 - DNA, 15 bp, Homo sapiens
gacagttctgtggga

SEQ ID NO: 822041 - DNA, 15 bp, Homo sapiens
acagttctgtgggac

SEQ ID NO: 822042 - DNA, 15 bp, Homo sapiens
cagttctgtgggacc

SEQ ID NO: 822043 - DNA, 15 bp, Homo sapiens
agttctgtgggacca

SEQ ID NO: 822044 - DNA, 15 bp, Homo sapiens
gttctgtgggaccac

SEQ ID NO: 822045 - DNA, 15 bp, Homo sapiens
ttctgtgggaccacg

SEQ ID NO: 822046 - DNA, 15 bp, Homo sapiens
tctgtgggaccacgc

SEQ ID NO: 822047 - DNA, 15 bp, Homo sapiens
ctgtgggaccacgct

SEQ ID NO: 822048 - DNA, 15 bp, Homo sapiens
tgtgggaccacgctg

SEQ ID NO: 822049 - DNA, 15 bp, Homo sapiens
gtgggaccacgctgc

SEQ ID NO: 822050 - DNA, 15 bp, Homo sapiens
tgggaccacgctgct

SEQ ID NO: 822051 - DNA, 15 bp, Homo sapiens
gggaccacgctgctc

SEQ ID NO: 822052 - DNA, 15 bp, Homo sapiens
ggaccacgctgctct

SEQ ID NO: 822053 - DNA, 15 bp, Homo sapiens
gaccacgctgctcta

SEQ ID NO: 822054 - DNA, 15 bp, Homo sapiens
accacgctgctctag

SEQ ID NO: 822055 - DNA, 15 bp, Homo sapiens
ccacgctgctctaga

SEQ ID NO: 822056 - DNA, 15 bp, Homo sapiens
cacgctgctctagaa

SEQ ID NO: 822057 - DNA, 15 bp, Homo sapiens
acgctgctctagaat

SEQ ID NO: 822058 - DNA, 15 bp, Homo sapiens
cgctgctctagaatg

SEQ ID NO: 822059 - DNA, 15 bp, Homo sapiens
gctgctctagaatga

SEQ ID NO: 822060 - DNA, 15 bp, Homo sapiens
ctgctctagaatgag

SEQ ID NO: 822061 - DNA, 15 bp, Homo sapiens
tgctctagaatgagt

SEQ ID NO: 822062 - DNA, 15 bp, Homo sapiens
gctctagaatgagtc

SEQ ID NO: 822063 - DNA, 15 bp, Homo sapiens
ctctagaatgagtct

SEQ ID NO: 822064 - DNA, 15 bp, Homo sapiens
tctagaatgagtctg

SEQ ID NO: 822065 - DNA, 15 bp, Homo sapiens
ctagaatgagtctgt

SEQ ID NO: 822066 - DNA, 15 bp, Homo sapiens
tagaatgagtctgtg

SEQ ID NO: 822067 - DNA, 15 bp, Homo sapiens
agaatgagtctgtga

SEQ ID NO: 822068 - DNA, 15 bp, Homo sapiens
gaatgagtctgtgac

SEQ ID NO: 822069 - DNA, 15 bp, Homo sapiens
aatgagtctgtgaca

SEQ ID NO: 822070 - DNA, 15 bp, Homo sapiens
atgagtctgtgacag

SEQ ID NO: 822071 - DNA, 15 bp, Homo sapiens
tgagtctgtgacagc

SEQ ID NO: 822072 - DNA, 15 bp, Homo sapiens
gagtctgtgacagca

SEQ ID NO: 822073 - DNA, 15 bp, Homo sapiens
agtctgtgacagcac

SEQ ID NO: 822074 - DNA, 15 bp, Homo sapiens
gtctgtgacagcaca

SEQ ID NO: 822075 - DNA, 15 bp, Homo sapiens
tctgtgacagcacac

SEQ ID NO: 822076 - DNA, 15 bp, Homo sapiens
ctgtgacagcacaca

SEQ ID NO: 822077 - DNA, 15 bp, Homo sapiens
tgtgacagcacacac

SEQ ID NO: 822078 - DNA, 15 bp, Homo sapiens
gtgacagcacacacc

SEQ ID NO: 822079 - DNA, 15 bp, Homo sapiens
tgacagcacacacca

SEQ ID NO: 822080 - DNA, 15 bp, Homo sapiens
gacagcacacaccat

SEQ ID NO: 822081 - DNA, 15 bp, Homo sapiens
acagcacacaccatg

SEQ ID NO: 822082 - DNA, 15 bp, Homo sapiens
cagcacacaccatgg

SEQ ID NO: 822083 - DNA, 15 bp, Homo sapiens
agcacacaccatggc

SEQ ID NO: 822084 - DNA, 15 bp, Homo sapiens
gcacacaccatggct

SEQ ID NO: 822085 - DNA, 15 bp, Homo sapiens
cacacaccatggctt

SEQ ID NO: 822086 - DNA, 15 bp, Homo sapiens
acacaccatggcttt

SEQ ID NO: 822087 - DNA, 15 bp, Homo sapiens
cacaccatggctttt

SEQ ID NO: 822088 - DNA, 15 bp, Homo sapiens
acaccatggcttttt

SEQ ID NO: 822089 - DNA, 15 bp, Homo sapiens
caccatggcttttta

SEQ ID NO: 822090 - DNA, 15 bp, Homo sapiens
accatggctttttac

SEQ ID NO: 822091 - DNA, 15 bp, Homo sapiens
ccatggctttttact

SEQ ID NO: 822092 - DNA, 15 bp, Homo sapiens
catggctttttactt

SEQ ID NO: 822093 - DNA, 15 bp, Homo sapiens
atggctttttacttt

SEQ ID NO: 822094 - DNA, 15 bp, Homo sapiens
tggctttttactttt

SEQ ID NO: 822095 - DNA, 15 bp, Homo sapiens
ggctttttacttttt

SEQ ID NO: 822096 - DNA, 15 bp, Homo sapiens
gctttttactttttg

SEQ ID NO: 822097 - DNA, 15 bp, Homo sapiens
ctttttactttttgt

SEQ ID NO: 822098 - DNA, 15 bp, Homo sapiens
tttttactttttgta

SEQ ID NO: 822099 - DNA, 15 bp, Homo sapiens
ttttactttttgtat

SEQ ID NO: 822100 - DNA, 15 bp, Homo sapiens
tttactttttgtatg

SEQ ID NO: 822101 - DNA, 15 bp, Homo sapiens
ttactttttgtatgc

SEQ ID NO: 822102 - DNA, 15 bp, Homo sapiens
tactttttgtatgcc

SEQ ID NO: 822103 - DNA, 15 bp, Homo sapiens
actttttgtatgccc

SEQ ID NO: 822104 - DNA, 15 bp, Homo sapiens
ctttttgtatgccca

SEQ ID NO: 822105 - DNA, 15 bp, Homo sapiens
tttttgtatgcccag

SEQ ID NO: 822106 - DNA, 15 bp, Homo sapiens
ttttgtatgcccagg

SEQ ID NO: 822107 - DNA, 15 bp, Homo sapiens
tttgtatgcccagga

SEQ ID NO: 822108 - DNA, 15 bp, Homo sapiens
ttgtatgcccaggac

SEQ ID NO: 822109 - DNA, 15 bp, Homo sapiens
tgtatgcccaggaca

SEQ ID NO: 822110 - DNA, 15 bp, Homo sapiens
gtatgcccaggacac

SEQ ID NO: 822111 - DNA, 15 bp, Homo sapiens
tatgcccaggacact

SEQ ID NO: 822112 - DNA, 15 bp, Homo sapiens
atgcccaggacactc

SEQ ID NO: 822113 - DNA, 15 bp, Homo sapiens
tgcccaggacactct

SEQ ID NO: 822114 - DNA, 15 bp, Homo sapiens
gcccaggacactctt

SEQ ID NO: 822115 - DNA, 15 bp, Homo sapiens
cccaggacactcttg

SEQ ID NO: 822116 - DNA, 15 bp, Homo sapiens
ccaggacactcttgc

SEQ ID NO: 822117 - DNA, 15 bp, Homo sapiens
caggacactcttgca

SEQ ID NO: 822118 - DNA, 15 bp, Homo sapiens
aggacactcttgcac

SEQ ID NO: 822119 - DNA, 15 bp, Homo sapiens
ggacactcttgcaca

SEQ ID NO: 822120 - DNA, 15 bp, Homo sapiens
gacactcttgcacat

SEQ ID NO: 822121 - DNA, 15 bp, Homo sapiens
acactcttgcacata

SEQ ID NO: 822122 - DNA, 15 bp, Homo sapiens
cactcttgcacatag

SEQ ID NO: 822123 - DNA, 15 bp, Homo sapiens
actcttgcacatagt

SEQ ID NO: 822124 - DNA, 15 bp, Homo sapiens
ctcttgcacatagtg

SEQ ID NO: 822125 - DNA, 15 bp, Homo sapiens
tcttgcacatagtgg

SEQ ID NO: 822126 - DNA, 15 bp, Homo sapiens
cttgcacatagtgga

SEQ ID NO: 822127 - DNA, 15 bp, Homo sapiens
ttgcacatagtggaa

SEQ ID NO: 822128 - DNA, 15 bp, Homo sapiens
tgcacatagtggaag

SEQ ID NO: 822129 - DNA, 15 bp, Homo sapiens
gcacatagtggaagc

SEQ ID NO: 822130 - DNA, 15 bp, Homo sapiens
cacatagtggaagct

SEQ ID NO: 822131 - DNA, 15 bp, Homo sapiens
acatagtggaagctt

SEQ ID NO: 822132 - DNA, 15 bp, Homo sapiens
catagtggaagctta

SEQ ID NO: 822133 - DNA, 15 bp, Homo sapiens
atagtggaagcttag

SEQ ID NO: 822134 - DNA, 15 bp, Homo sapiens
tagtggaagcttagc

SEQ ID NO: 822135 - DNA, 15 bp, Homo sapiens
agtggaagcttagca

SEQ ID NO: 822136 - DNA, 15 bp, Homo sapiens
gtggaagcttagcaa

SEQ ID NO: 822137 - DNA, 15 bp, Homo sapiens
tggaagcttagcaaa

SEQ ID NO: 822138 - DNA, 15 bp, Homo sapiens
ggaagcttagcaaat

SEQ ID NO: 822139 - DNA, 15 bp, Homo sapiens
gaagcttagcaaatg

SEQ ID NO: 822140 - DNA, 15 bp, Homo sapiens
aagcttagcaaatgt

SEQ ID NO: 822141 - DNA, 15 bp, Homo sapiens
agcttagcaaatgtt

SEQ ID NO: 822142 - DNA, 15 bp, Homo sapiens
gcttagcaaatgttt

SEQ ID NO: 822143 - DNA, 15 bp, Homo sapiens
cttagcaaatgtttt

SEQ ID NO: 822144 - DNA, 15 bp, Homo sapiens
ttagcaaatgttttt

SEQ ID NO: 822145 - DNA, 15 bp, Homo sapiens
tagcaaatgtttttt

SEQ ID NO: 822146 - DNA, 15 bp, Homo sapiens
agcaaatgttttttg

SEQ ID NO: 822147 - DNA, 15 bp, Homo sapiens
gcaaatgttttttga

SEQ ID NO: 822148 - DNA, 15 bp, Homo sapiens
caaatgttttttgaa

SEQ ID NO: 822149 - DNA, 15 bp, Homo sapiens
aaatgttttttgaag

SEQ ID NO: 822150 - DNA, 15 bp, Homo sapiens
aatgttttttgaagt

SEQ ID NO: 822151 - DNA, 15 bp, Homo sapiens
atgttttttgaagtg

SEQ ID NO: 822152 - DNA, 15 bp, Homo sapiens
tgttttttgaagtga

SEQ ID NO: 822153 - DNA, 15 bp, Homo sapiens
gttttttgaagtgat

SEQ ID NO: 822154 - DNA, 15 bp, Homo sapiens
ttttttgaagtgatt

SEQ ID NO: 822155 - DNA, 15 bp, Homo sapiens
tttttgaagtgattt

SEQ ID NO: 822156 - DNA, 15 bp, Homo sapiens
ttttgaagtgatttt

SEQ ID NO: 822157 - DNA, 15 bp, Homo sapiens
tttgaagtgattttg

SEQ ID NO: 822158 - DNA, 15 bp, Homo sapiens
ttgaagtgattttga

SEQ ID NO: 822159 - DNA, 15 bp, Homo sapiens
tgaagtgattttgag

SEQ ID NO: 822160 - DNA, 15 bp, Homo sapiens
gaagtgattttgagt

SEQ ID NO: 822161 - DNA, 15 bp, Homo sapiens
aagtgattttgagtg

SEQ ID NO: 822162 - DNA, 15 bp, Homo sapiens
agtgattttgagtga

SEQ ID NO: 822163 - DNA, 15 bp, Homo sapiens
gtgattttgagtgaa

SEQ ID NO: 822164 - DNA, 15 bp, Homo sapiens
tgattttgagtgaat

SEQ ID NO: 822165 - DNA, 15 bp, Homo sapiens
gattttgagtgaatg

SEQ ID NO: 822166 - DNA, 15 bp, Homo sapiens
attttgagtgaatgg

SEQ ID NO: 822167 - DNA, 15 bp, Homo sapiens
ttttgagtgaatgga

SEQ ID NO: 822168 - DNA, 15 bp, Homo sapiens
tttgagtgaatggac

SEQ ID NO: 822169 - DNA, 15 bp, Homo sapiens
ttgagtgaatggacc

SEQ ID NO: 822170 - DNA, 15 bp, Homo sapiens
tgagtgaatggacca

SEQ ID NO: 822171 - DNA, 15 bp, Homo sapiens
gagtgaatggaccaa

SEQ ID NO: 822172 - DNA, 15 bp, Homo sapiens
agtgaatggaccaat

SEQ ID NO: 822173 - DNA, 15 bp, Homo sapiens
gtgaatggaccaatg

SEQ ID NO: 822174 - DNA, 15 bp, Homo sapiens
tgaatggaccaatgg

SEQ ID NO: 822175 - DNA, 15 bp, Homo sapiens
gaatggaccaatggt

SEQ ID NO: 822176 - DNA, 15 bp, Homo sapiens
aatggaccaatggta

SEQ ID NO: 822177 - DNA, 15 bp, Homo sapiens
atggaccaatggtaa

SEQ ID NO: 822178 - DNA, 15 bp, Homo sapiens
tggaccaatggtaaa

SEQ ID NO: 822179 - DNA, 15 bp, Homo sapiens
ggaccaatggtaaaa

SEQ ID NO: 822180 - DNA, 15 bp, Homo sapiens
gaccaatggtaaaaa

SEQ ID NO: 822181 - DNA, 15 bp, Homo sapiens
accaatggtaaaaat

SEQ ID NO: 822182 - DNA, 15 bp, Homo sapiens
ccaatggtaaaaatt

SEQ ID NO: 822183 - DNA, 15 bp, Homo sapiens
caatggtaaaaattc

SEQ ID NO: 822184 - DNA, 15 bp, Homo sapiens
aatggtaaaaattct

SEQ ID NO: 822185 - DNA, 15 bp, Homo sapiens
atggtaaaaattcta

SEQ ID NO: 822186 - DNA, 15 bp, Homo sapiens
tggtaaaaattctat

SEQ ID NO: 822187 - DNA, 15 bp, Homo sapiens
ggtaaaaattctata

SEQ ID NO: 822188 - DNA, 15 bp, Homo sapiens
gtaaaaattctatat

SEQ ID NO: 822189 - DNA, 15 bp, Homo sapiens
taaaaattctatatc

SEQ ID NO: 822190 - DNA, 15 bp, Homo sapiens
aaaaattctatatct

SEQ ID NO: 822191 - DNA, 15 bp, Homo sapiens
aaaattctatatcta

SEQ ID NO: 822192 - DNA, 15 bp, Homo sapiens
aaattctatatctaa

SEQ ID NO: 822193 - DNA, 15 bp, Homo sapiens
aattctatatctaaa

SEQ ID NO: 822194 - DNA, 15 bp, Homo sapiens
attctatatctaaaa

SEQ ID NO: 822195 - DNA, 15 bp, Homo sapiens
ttctatatctaaaag

SEQ ID NO: 822196 - DNA, 15 bp, Homo sapiens
tctatatctaaaaga

SEQ ID NO: 822197 - DNA, 15 bp, Homo sapiens
ctatatctaaaagaa

SEQ ID NO: 822198 - DNA, 15 bp, Homo sapiens
tatatctaaaagaaa

SEQ ID NO: 822199 - DNA, 15 bp, Homo sapiens
atatctaaaagaaat

SEQ ID NO: 822200 - DNA, 15 bp, Homo sapiens
tatctaaaagaaata

SEQ ID NO: 822201 - DNA, 15 bp, Homo sapiens
atctaaaagaaataa

SEQ ID NO: 822202 - DNA, 15 bp, Homo sapiens
tctaaaagaaataaa

SEQ ID NO: 822203 - DNA, 15 bp, Homo sapiens
ctaaaagaaataaat

SEQ ID NO: 822204 - DNA, 15 bp, Homo sapiens
taaaagaaataaata

SEQ ID NO: 822205 - DNA, 15 bp, Homo sapiens
aaagaaataaataac

SEQ ID NO: 822206 - DNA, 15 bp, Homo sapiens
aagaaataaataact

SEQ ID NO: 822207 - DNA, 15 bp, Homo sapiens
agaaataaataactt

SEQ ID NO: 822208 - DNA, 15 bp, Homo sapiens
gaaataaataacttt

SEQ ID NO: 822209 - DNA, 15 bp, Homo sapiens
aaataaataactttc

SEQ ID NO: 822210 - DNA, 15 bp, Homo sapiens
aataaataactttcc

SEQ ID NO: 822211 - DNA, 15 bp, Homo sapiens
ataaataactttcct

SEQ ID NO: 822212 - DNA, 15 bp, Homo sapiens
taaataactttcctg

SEQ ID NO: 822213 - DNA, 15 bp, Homo sapiens
aaataactttcctga

SEQ ID NO: 822214 - DNA, 15 bp, Homo sapiens
aataactttcctgaa

SEQ ID NO: 822215 - DNA, 15 bp, Homo sapiens
ataactttcctgaag

SEQ ID NO: 822216 - DNA, 15 bp, Homo sapiens
taactttcctgaaga

SEQ ID NO: 822217 - DNA, 15 bp, Homo sapiens
aactttcctgaagaa

SEQ ID NO: 822218 - DNA, 15 bp, Homo sapiens
actttcctgaagaaa

SEQ ID NO: 822219 - DNA, 15 bp, Homo sapiens
ctttcctgaagaaat

SEQ ID NO: 822220 - DNA, 15 bp, Homo sapiens
tttcctgaagaaatg

SEQ ID NO: 822221 - DNA, 15 bp, Homo sapiens
ttcctgaagaaatgc

SEQ ID NO: 822222 - DNA, 15 bp, Homo sapiens
tcctgaagaaatgct

SEQ ID NO: 822223 - DNA, 15 bp, Homo sapiens
cctgaagaaatgcta

SEQ ID NO: 822224 - DNA, 15 bp, Homo sapiens
ctgaagaaatgctag

SEQ ID NO: 822225 - DNA, 15 bp, Homo sapiens
tgaagaaatgctaga

SEQ ID NO: 822226 - DNA, 15 bp, Homo sapiens
gaagaaatgctagag

SEQ ID NO: 822227 - DNA, 15 bp, Homo sapiens
aagaaatgctagaga

SEQ ID NO: 822228 - DNA, 15 bp, Homo sapiens
agaaatgctagagaa

SEQ ID NO: 822229 - DNA, 15 bp, Homo sapiens
gaaatgctagagaaa

SEQ ID NO: 822230 - DNA, 15 bp, Homo sapiens
aaatgctagagaaat

SEQ ID NO: 822231 - DNA, 15 bp, Homo sapiens
aatgctagagaaatc

SEQ ID NO: 822232 - DNA, 15 bp, Homo sapiens
atgctagagaaatca

SEQ ID NO: 822233 - DNA, 15 bp, Homo sapiens
tgctagagaaatcat

SEQ ID NO: 822234 - DNA, 15 bp, Homo sapiens
gctagagaaatcatg

SEQ ID NO: 822235 - DNA, 15 bp, Homo sapiens
ctagagaaatcatga

SEQ ID NO: 822236 - DNA, 15 bp, Homo sapiens
tagagaaatcatgaa

SEQ ID NO: 822237 - DNA, 15 bp, Homo sapiens
agagaaatcatgaat

SEQ ID NO: 822238 - DNA, 15 bp, Homo sapiens
gagaaatcatgaata

SEQ ID NO: 822239 - DNA, 15 bp, Homo sapiens
agaaatcatgaatac

SEQ ID NO: 822240 - DNA, 15 bp, Homo sapiens
gaaatcatgaataca

SEQ ID NO: 822241 - DNA, 15 bp, Homo sapiens
aaatcatgaatacac

SEQ ID NO: 822242 - DNA, 15 bp, Homo sapiens
aatcatgaatacact

SEQ ID NO: 822243 - DNA, 15 bp, Homo sapiens
atcatgaatacactg

SEQ ID NO: 822244 - DNA, 15 bp, Homo sapiens
tcatgaatacactgt

SEQ ID NO: 822245 - DNA, 15 bp, Homo sapiens
catgaatacactgtt

SEQ ID NO: 822246 - DNA, 15 bp, Homo sapiens
atgaatacactgtta

SEQ ID NO: 822247 - DNA, 15 bp, Homo sapiens
tgaatacactgttaa

SEQ ID NO: 822248 - DNA, 15 bp, Homo sapiens
gaatacactgttaaa

SEQ ID NO: 822249 - DNA, 15 bp, Homo sapiens
aatacactgttaaaa

SEQ ID NO: 822250 - DNA, 15 bp, Homo sapiens
atacactgttaaaag

SEQ ID NO: 822251 - DNA, 15 bp, Homo sapiens
tacactgttaaaagg

SEQ ID NO: 822252 - DNA, 15 bp, Homo sapiens
acactgttaaaagga

SEQ ID NO: 822253 - DNA, 15 bp, Homo sapiens
cactgttaaaaggaa

SEQ ID NO: 822254 - DNA, 15 bp, Homo sapiens
actgttaaaaggaac

SEQ ID NO: 822255 - DNA, 15 bp, Homo sapiens
ctgttaaaaggaacc

SEQ ID NO: 822256 - DNA, 15 bp, Homo sapiens
tgttaaaaggaaccc

SEQ ID NO: 822257 - DNA, 15 bp, Homo sapiens
gttaaaaggaaccct

SEQ ID NO: 822258 - DNA, 15 bp, Homo sapiens
ttaaaaggaaccctc

SEQ ID NO: 822259 - DNA, 15 bp, Homo sapiens
taaaaggaaccctct

SEQ ID NO: 822260 - DNA, 15 bp, Homo sapiens
aaaaggaaccctcta

SEQ ID NO: 822261 - DNA, 15 bp, Homo sapiens
aaaggaaccctctac

SEQ ID NO: 822262 - DNA, 15 bp, Homo sapiens
aaggaaccctctacc

SEQ ID NO: 822263 - DNA, 15 bp, Homo sapiens
aggaaccctctacca

SEQ ID NO: 822264 - DNA, 15 bp, Homo sapiens
ggaaccctctaccac

SEQ ID NO: 822265 - DNA, 15 bp, Homo sapiens
gaaccctctaccacc

SEQ ID NO: 822266 - DNA, 15 bp, Homo sapiens
aaccctctaccaccc

SEQ ID NO: 822267 - DNA, 15 bp, Homo sapiens
accctctaccaccct

SEQ ID NO: 822268 - DNA, 15 bp, Homo sapiens
ccctctaccacccta

SEQ ID NO: 822269 - DNA, 15 bp, Homo sapiens
cctctaccaccctac

SEQ ID NO: 822270 - DNA, 15 bp, Homo sapiens
ctctaccaccctacc

SEQ ID NO: 822271 - DNA, 15 bp, Homo sapiens
tctaccaccctaccc

SEQ ID NO: 822272 - DNA, 15 bp, Homo sapiens
ctaccaccctaccca

SEQ ID NO: 822273 - DNA, 15 bp, Homo sapiens
taccaccctacccaa

SEQ ID NO: 822274 - DNA, 15 bp, Homo sapiens
accaccctacccaaa

SEQ ID NO: 822275 - DNA, 15 bp, Homo sapiens
ccaccctacccaaat

SEQ ID NO: 822276 - DNA, 15 bp, Homo sapiens
caccctacccaaatt

SEQ ID NO: 822277 - DNA, 15 bp, Homo sapiens
accctacccaaatta

SEQ ID NO: 822278 - DNA, 15 bp, Homo sapiens
ccctacccaaattaa

SEQ ID NO: 822279 - DNA, 15 bp, Homo sapiens
cctacccaaattaaa

SEQ ID NO: 822280 - DNA, 15 bp, Homo sapiens
ctacccaaattaaat

SEQ ID NO: 822281 - DNA, 15 bp, Homo sapiens
tacccaaattaaatt

SEQ ID NO: 822282 - DNA, 15 bp, Homo sapiens
acccaaattaaatta

SEQ ID NO: 822283 - DNA, 15 bp, Homo sapiens
cccaaattaaattaa

SEQ ID NO: 822284 - DNA, 15 bp, Homo sapiens
ccaaattaaattaaa

SEQ ID NO: 822285 - DNA, 15 bp, Homo sapiens
caaattaaattaaat

SEQ ID NO: 822286 - DNA, 15 bp, Homo sapiens
aaattaaattaaata

SEQ ID NO: 822287 - DNA, 15 bp, Homo sapiens
aattaaattaaatat

SEQ ID NO: 822288 - DNA, 15 bp, Homo sapiens
attaaattaaatata

SEQ ID NO: 822289 - DNA, 15 bp, Homo sapiens
ttaaattaaatatac

SEQ ID NO: 822290 - DNA, 15 bp, Homo sapiens
taaattaaatatact

SEQ ID NO: 822291 - DNA, 15 bp, Homo sapiens
aaattaaatatactt

SEQ ID NO: 822292 - DNA, 15 bp, Homo sapiens
aattaaatatactta

SEQ ID NO: 822293 - DNA, 15 bp, Homo sapiens
attaaatatacttaa

SEQ ID NO: 822294 - DNA, 15 bp, Homo sapiens
ttaaatatacttaag

SEQ ID NO: 822295 - DNA, 15 bp, Homo sapiens
taaatatacttaagg

SEQ ID NO: 822296 - DNA, 15 bp, Homo sapiens
aaatatacttaagga

SEQ ID NO: 822297 - DNA, 15 bp, Homo sapiens
aatatacttaaggac

SEQ ID NO: 822298 - DNA, 15 bp, Homo sapiens
atatacttaaggact

SEQ ID NO: 822299 - DNA, 15 bp, Homo sapiens
tatacttaaggactc

SEQ ID NO: 822300 - DNA, 15 bp, Homo sapiens
atacttaaggactca

SEQ ID NO: 822301 - DNA, 15 bp, Homo sapiens
tacttaaggactcag

SEQ ID NO: 822302 - DNA, 15 bp, Homo sapiens
acttaaggactcagt

SEQ ID NO: 822303 - DNA, 15 bp, Homo sapiens
cttaaggactcagta

SEQ ID NO: 822304 - DNA, 15 bp, Homo sapiens
ttaaggactcagtag

SEQ ID NO: 822305 - DNA, 15 bp, Homo sapiens
taaggactcagtagg

SEQ ID NO: 822306 - DNA, 15 bp, Homo sapiens
aaggactcagtaggc

SEQ ID NO: 822307 - DNA, 15 bp, Homo sapiens
aggactcagtaggcc

SEQ ID NO: 822308 - DNA, 15 bp, Homo sapiens
ggactcagtaggcca

SEQ ID NO: 822309 - DNA, 15 bp, Homo sapiens
gactcagtaggccaa

SEQ ID NO: 822310 - DNA, 15 bp, Homo sapiens
actcagtaggccaaa

SEQ ID NO: 822311 - DNA, 15 bp, Homo sapiens
ctcagtaggccaaaa

SEQ ID NO: 822312 - DNA, 15 bp, Homo sapiens
tcagtaggccaaaaa

SEQ ID NO: 822313 - DNA, 15 bp, Homo sapiens
cagtaggccaaaaag

SEQ ID NO: 822314 - DNA, 15 bp, Homo sapiens
agtaggccaaaaagc

SEQ ID NO: 822315 - DNA, 15 bp, Homo sapiens
gtaggccaaaaagca

SEQ ID NO: 822316 - DNA, 15 bp, Homo sapiens
taggccaaaaagcac

SEQ ID NO: 822317 - DNA, 15 bp, Homo sapiens
aggccaaaaagcaca

SEQ ID NO: 822318 - DNA, 15 bp, Homo sapiens
ggccaaaaagcacaa

SEQ ID NO: 822319 - DNA, 15 bp, Homo sapiens
gccaaaaagcacaag

SEQ ID NO: 822320 - DNA, 15 bp, Homo sapiens
ccaaaaagcacaaga

SEQ ID NO: 822321 - DNA, 15 bp, Homo sapiens
caaaaagcacaagag

SEQ ID NO: 822322 - DNA, 15 bp, Homo sapiens
aaaaagcacaagaga

SEQ ID NO: 822323 - DNA, 15 bp, Homo sapiens
aaaagcacaagagac

SEQ ID NO: 822324 - DNA, 15 bp, Homo sapiens
aaagcacaagagaca

SEQ ID NO: 822325 - DNA, 15 bp, Homo sapiens
aagcacaagagacac

SEQ ID NO: 822326 - DNA, 15 bp, Homo sapiens
agcacaagagacact

SEQ ID NO: 822327 - DNA, 15 bp, Homo sapiens
gcacaagagacactg

SEQ ID NO: 822328 - DNA, 15 bp, Homo sapiens
cacaagagacactgg

SEQ ID NO: 822329 - DNA, 15 bp, Homo sapiens
acaagagacactgga

SEQ ID NO: 822330 - DNA, 15 bp, Homo sapiens
caagagacactggac

SEQ ID NO: 822331 - DNA, 15 bp, Homo sapiens
aagagacactggacc

SEQ ID NO: 822332 - DNA, 15 bp, Homo sapiens
agagacactggacca

SEQ ID NO: 822333 - DNA, 15 bp, Homo sapiens
gagacactggaccat

SEQ ID NO: 822334 - DNA, 15 bp, Homo sapiens
agacactggaccatg

SEQ ID NO: 822335 - DNA, 15 bp, Homo sapiens
gacactggaccatgc

SEQ ID NO: 822336 - DNA, 15 bp, Homo sapiens
acactggaccatgct

SEQ ID NO: 822337 - DNA, 15 bp, Homo sapiens
cactggaccatgctc

SEQ ID NO: 822338 - DNA, 15 bp, Homo sapiens
actggaccatgctcc

SEQ ID NO: 822339 - DNA, 15 bp, Homo sapiens
ctggaccatgctcca

SEQ ID NO: 822340 - DNA, 15 bp, Homo sapiens
tggaccatgctccag

SEQ ID NO: 822341 - DNA, 15 bp, Homo sapiens
ggaccatgctccagc

SEQ ID NO: 822342 - DNA, 15 bp, Homo sapiens
gaccatgctccagct

SEQ ID NO: 822343 - DNA, 15 bp, Homo sapiens
accatgctccagctc

SEQ ID NO: 822344 - DNA, 15 bp, Homo sapiens
ccatgctccagctcc

SEQ ID NO: 822345 - DNA, 15 bp, Homo sapiens
catgctccagctcca

SEQ ID NO: 822346 - DNA, 15 bp, Homo sapiens
atgctccagctccag

SEQ ID NO: 822347 - DNA, 15 bp, Homo sapiens
tgctccagctccagg

SEQ ID NO: 822348 - DNA, 15 bp, Homo sapiens
gctccagctccagga

SEQ ID NO: 822349 - DNA, 15 bp, Homo sapiens
ctccagctccaggac

SEQ ID NO: 822350 - DNA, 15 bp, Homo sapiens
tccagctccaggaca

SEQ ID NO: 822351 - DNA, 15 bp, Homo sapiens
ccagctccaggacac

SEQ ID NO: 822352 - DNA, 15 bp, Homo sapiens
cagctccaggacaca

SEQ ID NO: 822353 - DNA, 15 bp, Homo sapiens
agctccaggacacac

SEQ ID NO: 822354 - DNA, 15 bp, Homo sapiens
gctccaggacacact

SEQ ID NO: 822355 - DNA, 15 bp, Homo sapiens
ctccaggacacacta

SEQ ID NO: 822356 - DNA, 15 bp, Homo sapiens
tccaggacacactac

SEQ ID NO: 822357 - DNA, 15 bp, Homo sapiens
ccaggacacactact

SEQ ID NO: 822358 - DNA, 15 bp, Homo sapiens
caggacacactactc

SEQ ID NO: 822359 - DNA, 15 bp, Homo sapiens
aggacacactactct

SEQ ID NO: 822360 - DNA, 15 bp, Homo sapiens
ggacacactactctg

SEQ ID NO: 822361 - DNA, 15 bp, Homo sapiens
gacacactactctgc

SEQ ID NO: 822362 - DNA, 15 bp, Homo sapiens
acacactactctgct

SEQ ID NO: 822363 - DNA, 15 bp, Homo sapiens
cacactactctgctg

SEQ ID NO: 822364 - DNA, 15 bp, Homo sapiens
acactactctgctgc

SEQ ID NO: 822365 - DNA, 15 bp, Homo sapiens
cactactctgctgct

SEQ ID NO: 822366 - DNA, 15 bp, Homo sapiens
actactctgctgcta

SEQ ID NO: 822367 - DNA, 15 bp, Homo sapiens
ctactctgctgctac

SEQ ID NO: 822368 - DNA, 15 bp, Homo sapiens
tactctgctgctact

SEQ ID NO: 822369 - DNA, 15 bp, Homo sapiens
actctgctgctactg

SEQ ID NO: 822370 - DNA, 15 bp, Homo sapiens
ctctgctgctactga

SEQ ID NO: 822371 - DNA, 15 bp, Homo sapiens
tctgctgctactgaa

SEQ ID NO: 822372 - DNA, 15 bp, Homo sapiens
ctgctgctactgaaa

SEQ ID NO: 822373 - DNA, 15 bp, Homo sapiens
tgctgctactgaaat

SEQ ID NO: 822374 - DNA, 15 bp, Homo sapiens
gctgctactgaaatg

SEQ ID NO: 822375 - DNA, 15 bp, Homo sapiens
ctgctactgaaatgg

SEQ ID NO: 822376 - DNA, 15 bp, Homo sapiens
tgctactgaaatggc

SEQ ID NO: 822377 - DNA, 15 bp, Homo sapiens
gctactgaaatggca

SEQ ID NO: 822378 - DNA, 15 bp, Homo sapiens
ctactgaaatggcat

SEQ ID NO: 822379 - DNA, 15 bp, Homo sapiens
tactgaaatggcatt

SEQ ID NO: 822380 - DNA, 15 bp, Homo sapiens
actgaaatggcattt

SEQ ID NO: 822381 - DNA, 15 bp, Homo sapiens
ctgaaatggcatttt

SEQ ID NO: 822382 - DNA, 15 bp, Homo sapiens
tgaaatggcattttg

SEQ ID NO: 822383 - DNA, 15 bp, Homo sapiens
gaaatggcattttgg

SEQ ID NO: 822384 - DNA, 15 bp, Homo sapiens
aaatggcattttggg

SEQ ID NO: 822385 - DNA, 15 bp, Homo sapiens
aatggcattttgggc

SEQ ID NO: 822386 - DNA, 15 bp, Homo sapiens
atggcattttgggct

SEQ ID NO: 822387 - DNA, 15 bp, Homo sapiens
tggcattttgggctc

SEQ ID NO: 822388 - DNA, 15 bp, Homo sapiens
ggcattttgggctct

SEQ ID NO: 822389 - DNA, 15 bp, Homo sapiens
gcattttgggctctg

SEQ ID NO: 822390 - DNA, 15 bp, Homo sapiens
cattttgggctctga

SEQ ID NO: 822391 - DNA, 15 bp, Homo sapiens
attttgggctctgaa

SEQ ID NO: 822392 - DNA, 15 bp, Homo sapiens
ttttgggctctgaaa

SEQ ID NO: 822393 - DNA, 15 bp, Homo sapiens
tttgggctctgaaag

SEQ ID NO: 822394 - DNA, 15 bp, Homo sapiens
ttgggctctgaaagg

SEQ ID NO: 822395 - DNA, 15 bp, Homo sapiens
tgggctctgaaagga

SEQ ID NO: 822396 - DNA, 15 bp, Homo sapiens
gggctctgaaaggaa

SEQ ID NO: 822397 - DNA, 15 bp, Homo sapiens
ggctctgaaaggaaa

SEQ ID NO: 822398 - DNA, 15 bp, Homo sapiens
gctctgaaaggaaag

SEQ ID NO: 822399 - DNA, 15 bp, Homo sapiens
ctctgaaaggaaagg

SEQ ID NO: 822400 - DNA, 15 bp, Homo sapiens
tctgaaaggaaaggt

SEQ ID NO: 822401 - DNA, 15 bp, Homo sapiens
ctgaaaggaaaggtc

SEQ ID NO: 822402 - DNA, 15 bp, Homo sapiens
tgaaaggaaaggtct

SEQ ID NO: 822403 - DNA, 15 bp, Homo sapiens
gaaaggaaaggtctc

SEQ ID NO: 822404 - DNA, 15 bp, Homo sapiens
aaaggaaaggtctct

SEQ ID NO: 822405 - DNA, 15 bp, Homo sapiens
aaggaaaggtctctg

SEQ ID NO: 822406 - DNA, 15 bp, Homo sapiens
aggaaaggtctctgg

SEQ ID NO: 822407 - DNA, 15 bp, Homo sapiens
ggaaaggtctctggt

SEQ ID NO: 822408 - DNA, 15 bp, Homo sapiens
gaaaggtctctggtg

SEQ ID NO: 822409 - DNA, 15 bp, Homo sapiens
aaaggtctctggtgc

SEQ ID NO: 822410 - DNA, 15 bp, Homo sapiens
aaggtctctggtgcc

SEQ ID NO: 822411 - DNA, 15 bp, Homo sapiens
aggtctctggtgccc

SEQ ID NO: 822412 - DNA, 15 bp, Homo sapiens
ggtctctggtgcccc

SEQ ID NO: 822413 - DNA, 15 bp, Homo sapiens
gtctctggtgccccc

SEQ ID NO: 822414 - DNA, 15 bp, Homo sapiens
tctctggtgccccct

SEQ ID NO: 822415 - DNA, 15 bp, Homo sapiens
ctctggtgcccccta

SEQ ID NO: 822416 - DNA, 15 bp, Homo sapiens
tctggtgccccctag

SEQ ID NO: 822417 - DNA, 15 bp, Homo sapiens
ctggtgccccctaga

SEQ ID NO: 822418 - DNA, 15 bp, Homo sapiens
tggtgccccctagag

SEQ ID NO: 822419 - DNA, 15 bp, Homo sapiens
ggtgccccctagagg

SEQ ID NO: 822420 - DNA, 15 bp, Homo sapiens
gtgccccctagaggc

SEQ ID NO: 822421 - DNA, 15 bp, Homo sapiens
tgccccctagaggct

SEQ ID NO: 822422 - DNA, 15 bp, Homo sapiens
gccccctagaggctg

SEQ ID NO: 822423 - DNA, 15 bp, Homo sapiens
ccccctagaggctgg

SEQ ID NO: 822424 - DNA, 15 bp, Homo sapiens
cccctagaggctggt

SEQ ID NO: 822425 - DNA, 15 bp, Homo sapiens
ccctagaggctggtc

SEQ ID NO: 822426 - DNA, 15 bp, Homo sapiens
cctagaggctggtcc

SEQ ID NO: 822427 - DNA, 15 bp, Homo sapiens
ctagaggctggtcct

SEQ ID NO: 822428 - DNA, 15 bp, Homo sapiens
tagaggctggtcctg

SEQ ID NO: 822429 - DNA, 15 bp, Homo sapiens
agaggctggtcctgc

SEQ ID NO: 822430 - DNA, 15 bp, Homo sapiens
gaggctggtcctgca

SEQ ID NO: 822431 - DNA, 15 bp, Homo sapiens
aggctggtcctgcaa

SEQ ID NO: 822432 - DNA, 15 bp, Homo sapiens
ggctggtcctgcaat

SEQ ID NO: 822433 - DNA, 15 bp, Homo sapiens
gctggtcctgcaatt

SEQ ID NO: 822434 - DNA, 15 bp, Homo sapiens
ctggtcctgcaattt

SEQ ID NO: 822435 - DNA, 15 bp, Homo sapiens
tggtcctgcaatttg

SEQ ID NO: 822436 - DNA, 15 bp, Homo sapiens
ggtcctgcaatttgc

SEQ ID NO: 822437 - DNA, 15 bp, Homo sapiens
gtcctgcaatttgct

SEQ ID NO: 822438 - DNA, 15 bp, Homo sapiens
tcctgcaatttgctg

SEQ ID NO: 822439 - DNA, 15 bp, Homo sapiens
cctgcaatttgctgg

SEQ ID NO: 822440 - DNA, 15 bp, Homo sapiens
ctgcaatttgctgga

SEQ ID NO: 822441 - DNA, 15 bp, Homo sapiens
tgcaatttgctggat

SEQ ID NO: 822442 - DNA, 15 bp, Homo sapiens
gcaatttgctggatt

SEQ ID NO: 822443 - DNA, 15 bp, Homo sapiens
caatttgctggattt

SEQ ID NO: 822444 - DNA, 15 bp, Homo sapiens
aatttgctggatttg

SEQ ID NO: 822445 - DNA, 15 bp, Homo sapiens
atttgctggatttgt

SEQ ID NO: 822446 - DNA, 15 bp, Homo sapiens
tttgctggatttgtg

SEQ ID NO: 822447 - DNA, 15 bp, Homo sapiens
ttgctggatttgtga

SEQ ID NO: 822448 - DNA, 15 bp, Homo sapiens
tgctggatttgtgag

SEQ ID NO: 822449 - DNA, 15 bp, Homo sapiens
gctggatttgtgagc

SEQ ID NO: 822450 - DNA, 15 bp, Homo sapiens
ctggatttgtgagca

SEQ ID NO: 822451 - DNA, 15 bp, Homo sapiens
tggatttgtgagcaa

SEQ ID NO: 822452 - DNA, 15 bp, Homo sapiens
ggatttgtgagcaat

SEQ ID NO: 822453 - DNA, 15 bp, Homo sapiens
gatttgtgagcaatt

SEQ ID NO: 822454 - DNA, 15 bp, Homo sapiens
atttgtgagcaatta

SEQ ID NO: 822455 - DNA, 15 bp, Homo sapiens
tttgtgagcaattaa

SEQ ID NO: 822456 - DNA, 15 bp, Homo sapiens
ttgtgagcaattaag

SEQ ID NO: 822457 - DNA, 15 bp, Homo sapiens
tgtgagcaattaagt

SEQ ID NO: 822458 - DNA, 15 bp, Homo sapiens
gtgagcaattaagta

SEQ ID NO: 822459 - DNA, 15 bp, Homo sapiens
tgagcaattaagtag

SEQ ID NO: 822460 - DNA, 15 bp, Homo sapiens
gagcaattaagtagc

SEQ ID NO: 822461 - DNA, 15 bp, Homo sapiens
agcaattaagtagca

SEQ ID NO: 822462 - DNA, 15 bp, Homo sapiens
gcaattaagtagcaa

SEQ ID NO: 822463 - DNA, 15 bp, Homo sapiens
caattaagtagcaag

SEQ ID NO: 822464 - DNA, 15 bp, Homo sapiens
aattaagtagcaagg

SEQ ID NO: 822465 - DNA, 15 bp, Homo sapiens
attaagtagcaaggg

SEQ ID NO: 822466 - DNA, 15 bp, Homo sapiens
ttaagtagcaagggg

SEQ ID NO: 822467 - DNA, 15 bp, Homo sapiens
taagtagcaagggga

SEQ ID NO: 822468 - DNA, 15 bp, Homo sapiens
aagtagcaaggggag

SEQ ID NO: 822469 - DNA, 15 bp, Homo sapiens
agtagcaaggggaga

SEQ ID NO: 822470 - DNA, 15 bp, Homo sapiens
gtagcaaggggagag

SEQ ID NO: 822471 - DNA, 15 bp, Homo sapiens
tagcaaggggagagg

SEQ ID NO: 822472 - DNA, 15 bp, Homo sapiens
agcaaggggagaggg

SEQ ID NO: 822473 - DNA, 15 bp, Homo sapiens
gcaaggggagagggg

SEQ ID NO: 822474 - DNA, 15 bp, Homo sapiens
caaggggagagggga

SEQ ID NO: 822475 - DNA, 15 bp, Homo sapiens
aaggggagaggggaa

SEQ ID NO: 822476 - DNA, 15 bp, Homo sapiens
aggggagaggggaag

SEQ ID NO: 822477 - DNA, 15 bp, Homo sapiens
ggggagaggggaagg

SEQ ID NO: 822478 - DNA, 15 bp, Homo sapiens
gggagaggggaaggg

SEQ ID NO: 822479 - DNA, 15 bp, Homo sapiens
ggagaggggaagggg

SEQ ID NO: 822480 - DNA, 15 bp, Homo sapiens
gagaggggaaggggg

SEQ ID NO: 822481 - DNA, 15 bp, Homo sapiens
agaggggaagggggc

SEQ ID NO: 822482 - DNA, 15 bp, Homo sapiens
gaggggaagggggcc

SEQ ID NO: 822483 - DNA, 15 bp, Homo sapiens
aggggaagggggcca

SEQ ID NO: 822484 - DNA, 15 bp, Homo sapiens
ggggaagggggccaa

SEQ ID NO: 822485 - DNA, 15 bp, Homo sapiens
gggaagggggccaat

SEQ ID NO: 822486 - DNA, 15 bp, Homo sapiens
ggaagggggccaatt

SEQ ID NO: 822487 - DNA, 15 bp, Homo sapiens
gaagggggccaattt

SEQ ID NO: 822488 - DNA, 15 bp, Homo sapiens
aagggggccaatttc

SEQ ID NO: 822489 - DNA, 15 bp, Homo sapiens
agggggccaatttca

SEQ ID NO: 822490 - DNA, 15 bp, Homo sapiens
gggggccaatttcat

SEQ ID NO: 822491 - DNA, 15 bp, Homo sapiens
ggggccaatttcatc

SEQ ID NO: 822492 - DNA, 15 bp, Homo sapiens
gggccaatttcatca

SEQ ID NO: 822493 - DNA, 15 bp, Homo sapiens
ggccaatttcatcat

SEQ ID NO: 822494 - DNA, 15 bp, Homo sapiens
gccaatttcatcatg

SEQ ID NO: 822495 - DNA, 15 bp, Homo sapiens
ccaatttcatcatgc

SEQ ID NO: 822496 - DNA, 15 bp, Homo sapiens
caatttcatcatgct

SEQ ID NO: 822497 - DNA, 15 bp, Homo sapiens
aatttcatcatgctc

SEQ ID NO: 822498 - DNA, 15 bp, Homo sapiens
atttcatcatgctca

SEQ ID NO: 822499 - DNA, 15 bp, Homo sapiens
tttcatcatgctcag

SEQ ID NO: 822500 - DNA, 15 bp, Homo sapiens
ttcatcatgctcaga

SEQ ID NO: 822501 - DNA, 15 bp, Homo sapiens
tcatcatgctcagat

SEQ ID NO: 822502 - DNA, 15 bp, Homo sapiens
catcatgctcagatg

SEQ ID NO: 822503 - DNA, 15 bp, Homo sapiens
atcatgctcagatgg

SEQ ID NO: 822504 - DNA, 15 bp, Homo sapiens
tcatgctcagatggg

SEQ ID NO: 822505 - DNA, 15 bp, Homo sapiens
catgctcagatgggc

SEQ ID NO: 822506 - DNA, 15 bp, Homo sapiens
atgctcagatgggca

SEQ ID NO: 822507 - DNA, 15 bp, Homo sapiens
tgctcagatgggcag

SEQ ID NO: 822508 - DNA, 15 bp, Homo sapiens
gctcagatgggcagt

SEQ ID NO: 822509 - DNA, 15 bp, Homo sapiens
ctcagatgggcagtt

SEQ ID NO: 822510 - DNA, 15 bp, Homo sapiens
tcagatgggcagttc

SEQ ID NO: 822511 - DNA, 15 bp, Homo sapiens
cagatgggcagttcg

SEQ ID NO: 822512 - DNA, 15 bp, Homo sapiens
agatgggcagttcgt

SEQ ID NO: 822513 - DNA, 15 bp, Homo sapiens
gatgggcagttcgtg

SEQ ID NO: 822514 - DNA, 15 bp, Homo sapiens
atgggcagttcgtgg

SEQ ID NO: 822515 - DNA, 15 bp, Homo sapiens
tgggcagttcgtggt

SEQ ID NO: 822516 - DNA, 15 bp, Homo sapiens
gggcagttcgtggtt

SEQ ID NO: 822517 - DNA, 15 bp, Homo sapiens
ggcagttcgtggtta

SEQ ID NO: 822518 - DNA, 15 bp, Homo sapiens
gcagttcgtggttag

SEQ ID NO: 822519 - DNA, 15 bp, Homo sapiens
cagttcgtggttagc

SEQ ID NO: 822520 - DNA, 15 bp, Homo sapiens
agttcgtggttagca

SEQ ID NO: 822521 - DNA, 15 bp, Homo sapiens
gttcgtggttagcag

SEQ ID NO: 822522 - DNA, 15 bp, Homo sapiens
ttcgtggttagcagt

SEQ ID NO: 822523 - DNA, 15 bp, Homo sapiens
tcgtggttagcagtg

SEQ ID NO: 822524 - DNA, 15 bp, Homo sapiens
cgtggttagcagtgg

SEQ ID NO: 822525 - DNA, 15 bp, Homo sapiens
gtggttagcagtggt

SEQ ID NO: 822526 - DNA, 15 bp, Homo sapiens
tggttagcagtggtg

SEQ ID NO: 822527 - DNA, 15 bp, Homo sapiens
ggttagcagtggtgg

SEQ ID NO: 822528 - DNA, 15 bp, Homo sapiens
gttagcagtggtgga

SEQ ID NO: 822529 - DNA, 15 bp, Homo sapiens
ttagcagtggtggag

SEQ ID NO: 822530 - DNA, 15 bp, Homo sapiens
tagcagtggtggaga

SEQ ID NO: 822531 - DNA, 15 bp, Homo sapiens
agcagtggtggagat

SEQ ID NO: 822532 - DNA, 15 bp, Homo sapiens
gcagtggtggagata

SEQ ID NO: 822533 - DNA, 15 bp, Homo sapiens
cagtggtggagatag

SEQ ID NO: 822534 - DNA, 15 bp, Homo sapiens
agtggtggagatagg

SEQ ID NO: 822535 - DNA, 15 bp, Homo sapiens
gtggtggagataggc

SEQ ID NO: 822536 - DNA, 15 bp, Homo sapiens
tggtggagataggct

SEQ ID NO: 822537 - DNA, 15 bp, Homo sapiens
ggtggagataggctc

SEQ ID NO: 822538 - DNA, 15 bp, Homo sapiens
gtggagataggctca

SEQ ID NO: 822539 - DNA, 15 bp, Homo sapiens
tggagataggctcac

SEQ ID NO: 822540 - DNA, 15 bp, Homo sapiens
ggagataggctcact

SEQ ID NO: 822541 - DNA, 15 bp, Homo sapiens
gagataggctcactt

SEQ ID NO: 822542 - DNA, 15 bp, Homo sapiens
agataggctcacttt

SEQ ID NO: 822543 - DNA, 15 bp, Homo sapiens
gataggctcactttg

SEQ ID NO: 822544 - DNA, 15 bp, Homo sapiens
ataggctcactttga

SEQ ID NO: 822545 - DNA, 15 bp, Homo sapiens
taggctcactttgaa

SEQ ID NO: 822546 - DNA, 15 bp, Homo sapiens
aggctcactttgaac

SEQ ID NO: 822547 - DNA, 15 bp, Homo sapiens
ggctcactttgaact

SEQ ID NO: 822548 - DNA, 15 bp, Homo sapiens
gctcactttgaactc

SEQ ID NO: 822549 - DNA, 15 bp, Homo sapiens
ctcactttgaactcc

SEQ ID NO: 822550 - DNA, 15 bp, Homo sapiens
tcactttgaactcct

SEQ ID NO: 822551 - DNA, 15 bp, Homo sapiens
cactttgaactccta

SEQ ID NO: 822552 - DNA, 15 bp, Homo sapiens
actttgaactcctat

SEQ ID NO: 822553 - DNA, 15 bp, Homo sapiens
ctttgaactcctata

SEQ ID NO: 822554 - DNA, 15 bp, Homo sapiens
tttgaactcctataa

SEQ ID NO: 822555 - DNA, 15 bp, Homo sapiens
ttgaactcctataag

SEQ ID NO: 822556 - DNA, 15 bp, Homo sapiens
tgaactcctataagc

SEQ ID NO: 822557 - DNA, 15 bp, Homo sapiens
gaactcctataagct

SEQ ID NO: 822558 - DNA, 15 bp, Homo sapiens
aactcctataagcta

SEQ ID NO: 822559 - DNA, 15 bp, Homo sapiens
actcctataagctat

SEQ ID NO: 822560 - DNA, 15 bp, Homo sapiens
ctcctataagctatt

SEQ ID NO: 822561 - DNA, 15 bp, Homo sapiens
tcctataagctattt

SEQ ID NO: 822562 - DNA, 15 bp, Homo sapiens
cctataagctatttg

SEQ ID NO: 822563 - DNA, 15 bp, Homo sapiens
ctataagctatttga

SEQ ID NO: 822564 - DNA, 15 bp, Homo sapiens
tataagctatttgac

SEQ ID NO: 822565 - DNA, 15 bp, Homo sapiens
ataagctatttgaca

SEQ ID NO: 822566 - DNA, 15 bp, Homo sapiens
taagctatttgacat

SEQ ID NO: 822567 - DNA, 15 bp, Homo sapiens
aagctatttgacatc

SEQ ID NO: 822568 - DNA, 15 bp, Homo sapiens
agctatttgacatct

SEQ ID NO: 822569 - DNA, 15 bp, Homo sapiens
gctatttgacatctg

SEQ ID NO: 822570 - DNA, 15 bp, Homo sapiens
ctatttgacatctga

SEQ ID NO: 822571 - DNA, 15 bp, Homo sapiens
tatttgacatctgat

SEQ ID NO: 822572 - DNA, 15 bp, Homo sapiens
atttgacatctgata

SEQ ID NO: 822573 - DNA, 15 bp, Homo sapiens
tttgacatctgataa

SEQ ID NO: 822574 - DNA, 15 bp, Homo sapiens
ttgacatctgataac

SEQ ID NO: 822575 - DNA, 15 bp, Homo sapiens
tgacatctgataact

SEQ ID NO: 822576 - DNA, 15 bp, Homo sapiens
gacatctgataactt

SEQ ID NO: 822577 - DNA, 15 bp, Homo sapiens
acatctgataacttg

SEQ ID NO: 822578 - DNA, 15 bp, Homo sapiens
catctgataacttga

SEQ ID NO: 822579 - DNA, 15 bp, Homo sapiens
atctgataacttgac

SEQ ID NO: 822580 - DNA, 15 bp, Homo sapiens
tctgataacttgact

SEQ ID NO: 822581 - DNA, 15 bp, Homo sapiens
ctgataacttgactc

SEQ ID NO: 822582 - DNA, 15 bp, Homo sapiens
tgataacttgactca

SEQ ID NO: 822583 - DNA, 15 bp, Homo sapiens
gataacttgactcaa

SEQ ID NO: 822584 - DNA, 15 bp, Homo sapiens
ataacttgactcaac

SEQ ID NO: 822585 - DNA, 15 bp, Homo sapiens
taacttgactcaacc

SEQ ID NO: 822586 - DNA, 15 bp, Homo sapiens
aacttgactcaaccg

SEQ ID NO: 822587 - DNA, 15 bp, Homo sapiens
acttgactcaaccgc

SEQ ID NO: 822588 - DNA, 15 bp, Homo sapiens
cttgactcaaccgct

SEQ ID NO: 822589 - DNA, 15 bp, Homo sapiens
ttgactcaaccgcta

SEQ ID NO: 822590 - DNA, 15 bp, Homo sapiens
tgactcaaccgctat

SEQ ID NO: 822591 - DNA, 15 bp, Homo sapiens
gactcaaccgctatg

SEQ ID NO: 822592 - DNA, 15 bp, Homo sapiens
actcaaccgctatga

SEQ ID NO: 822593 - DNA, 15 bp, Homo sapiens
ctcaaccgctatgac

SEQ ID NO: 822594 - DNA, 15 bp, Homo sapiens
tcaaccgctatgacc

SEQ ID NO: 822595 - DNA, 15 bp, Homo sapiens
caaccgctatgacca

SEQ ID NO: 822596 - DNA, 15 bp, Homo sapiens
aaccgctatgaccaa

SEQ ID NO: 822597 - DNA, 15 bp, Homo sapiens
accgctatgaccaaa

SEQ ID NO: 822598 - DNA, 15 bp, Homo sapiens
ccgctatgaccaaaa

SEQ ID NO: 822599 - DNA, 15 bp, Homo sapiens
cgctatgaccaaaag

SEQ ID NO: 822600 - DNA, 15 bp, Homo sapiens
gctatgaccaaaagc

SEQ ID NO: 822601 - DNA, 15 bp, Homo sapiens
ctatgaccaaaagca

SEQ ID NO: 822602 - DNA, 15 bp, Homo sapiens
tatgaccaaaagcac

SEQ ID NO: 822603 - DNA, 15 bp, Homo sapiens
atgaccaaaagcacc

SEQ ID NO: 822604 - DNA, 15 bp, Homo sapiens
tgaccaaaagcaccc

SEQ ID NO: 822605 - DNA, 15 bp, Homo sapiens
gaccaaaagcacccc

SEQ ID NO: 822606 - DNA, 15 bp, Homo sapiens
accaaaagcacccct

SEQ ID NO: 822607 - DNA, 15 bp, Homo sapiens
ccaaaagcacccctc

SEQ ID NO: 822608 - DNA, 15 bp, Homo sapiens
caaaagcacccctcc

SEQ ID NO: 822609 - DNA, 15 bp, Homo sapiens
aaaagcacccctccc

SEQ ID NO: 822610 - DNA, 15 bp, Homo sapiens
aaagcacccctcccc

SEQ ID NO: 822611 - DNA, 15 bp, Homo sapiens
aagcacccctccccc

SEQ ID NO: 822612 - DNA, 15 bp, Homo sapiens
agcacccctccccca

SEQ ID NO: 822613 - DNA, 15 bp, Homo sapiens
gcacccctcccccaa

SEQ ID NO: 822614 - DNA, 15 bp, Homo sapiens
cacccctcccccaag

SEQ ID NO: 822615 - DNA, 15 bp, Homo sapiens
acccctcccccaagg

SEQ ID NO: 822616 - DNA, 15 bp, Homo sapiens
cccctcccccaaggg

SEQ ID NO: 822617 - DNA, 15 bp, Homo sapiens
ccctcccccaaggga

SEQ ID NO: 822618 - DNA, 15 bp, Homo sapiens
cctcccccaagggag

SEQ ID NO: 822619 - DNA, 15 bp, Homo sapiens
ctcccccaagggagt

SEQ ID NO: 822620 - DNA, 15 bp, Homo sapiens
tcccccaagggagtt

SEQ ID NO: 822621 - DNA, 15 bp, Homo sapiens
cccccaagggagttg

SEQ ID NO: 822622 - DNA, 15 bp, Homo sapiens
ccccaagggagttgc

SEQ ID NO: 822623 - DNA, 15 bp, Homo sapiens
cccaagggagttgct

SEQ ID NO: 822624 - DNA, 15 bp, Homo sapiens
ccaagggagttgctt

SEQ ID NO: 822625 - DNA, 15 bp, Homo sapiens
caagggagttgcttc

SEQ ID NO: 822626 - DNA, 15 bp, Homo sapiens
aagggagttgcttct

SEQ ID NO: 822627 - DNA, 15 bp, Homo sapiens
agggagttgcttctc

SEQ ID NO: 822628 - DNA, 15 bp, Homo sapiens
gggagttgcttctca

SEQ ID NO: 822629 - DNA, 15 bp, Homo sapiens
ggagttgcttctcag

SEQ ID NO: 822630 - DNA, 15 bp, Homo sapiens
gagttgcttctcagt

SEQ ID NO: 822631 - DNA, 15 bp, Homo sapiens
agttgcttctcagtg

SEQ ID NO: 822632 - DNA, 15 bp, Homo sapiens
gttgcttctcagtga

SEQ ID NO: 822633 - DNA, 15 bp, Homo sapiens
ttgcttctcagtgac

SEQ ID NO: 822634 - DNA, 15 bp, Homo sapiens
tgcttctcagtgaca

SEQ ID NO: 822635 - DNA, 15 bp, Homo sapiens
gcttctcagtgacag

SEQ ID NO: 822636 - DNA, 15 bp, Homo sapiens
cttctcagtgacagt

SEQ ID NO: 822637 - DNA, 15 bp, Homo sapiens
ttctcagtgacagtg

SEQ ID NO: 822638 - DNA, 15 bp, Homo sapiens
tctcagtgacagtgc

SEQ ID NO: 822639 - DNA, 15 bp, Homo sapiens
ctcagtgacagtgcc

SEQ ID NO: 822640 - DNA, 15 bp, Homo sapiens
tcagtgacagtgccc

SEQ ID NO: 822641 - DNA, 15 bp, Homo sapiens
cagtgacagtgcccg

SEQ ID NO: 822642 - DNA, 15 bp, Homo sapiens
agtgacagtgcccga

SEQ ID NO: 822643 - DNA, 15 bp, Homo sapiens
gtgacagtgcccgaa

SEQ ID NO: 822644 - DNA, 15 bp, Homo sapiens
tgacagtgcccgaag

SEQ ID NO: 822645 - DNA, 15 bp, Homo sapiens
gacagtgcccgaagc

SEQ ID NO: 822646 - DNA, 15 bp, Homo sapiens
acagtgcccgaagcc

SEQ ID NO: 822647 - DNA, 15 bp, Homo sapiens
cagtgcccgaagcct

SEQ ID NO: 822648 - DNA, 15 bp, Homo sapiens
agtgcccgaagcctg

SEQ ID NO: 822649 - DNA, 15 bp, Homo sapiens
gtgcccgaagcctgg

SEQ ID NO: 822650 - DNA, 15 bp, Homo sapiens
tgcccgaagcctgga

SEQ ID NO: 822651 - DNA, 15 bp, Homo sapiens
gcccgaagcctggaa

SEQ ID NO: 822652 - DNA, 15 bp, Homo sapiens
cccgaagcctggaag

SEQ ID NO: 822653 - DNA, 15 bp, Homo sapiens
ccgaagcctggaagg

SEQ ID NO: 822654 - DNA, 15 bp, Homo sapiens
cgaagcctggaagga

SEQ ID NO: 822655 - DNA, 15 bp, Homo sapiens
gaagcctggaaggaa

SEQ ID NO: 822656 - DNA, 15 bp, Homo sapiens
aagcctggaaggaag

SEQ ID NO: 822657 - DNA, 15 bp, Homo sapiens
agcctggaaggaagg

SEQ ID NO: 822658 - DNA, 15 bp, Homo sapiens
gcctggaaggaaggg

SEQ ID NO: 822659 - DNA, 15 bp, Homo sapiens
cctggaaggaagggc

SEQ ID NO: 822660 - DNA, 15 bp, Homo sapiens
ctggaaggaagggcc

SEQ ID NO: 822661 - DNA, 15 bp, Homo sapiens
tggaaggaagggccc

SEQ ID NO: 822662 - DNA, 15 bp, Homo sapiens
ggaaggaagggcccc

SEQ ID NO: 822663 - DNA, 15 bp, Homo sapiens
gaaggaagggcccct

SEQ ID NO: 822664 - DNA, 15 bp, Homo sapiens
aaggaagggcccctg

SEQ ID NO: 822665 - DNA, 15 bp, Homo sapiens
aggaagggcccctga

SEQ ID NO: 822666 - DNA, 15 bp, Homo sapiens
ggaagggcccctgag

SEQ ID NO: 822667 - DNA, 15 bp, Homo sapiens
gaagggcccctgagt

SEQ ID NO: 822668 - DNA, 15 bp, Homo sapiens
aagggcccctgagtg

SEQ ID NO: 822669 - DNA, 15 bp, Homo sapiens
agggcccctgagtgc

SEQ ID NO: 822670 - DNA, 15 bp, Homo sapiens
gggcccctgagtgcc

SEQ ID NO: 822671 - DNA, 15 bp, Homo sapiens
ggcccctgagtgccc

SEQ ID NO: 822672 - DNA, 15 bp, Homo sapiens
gcccctgagtgcccc

SEQ ID NO: 822673 - DNA, 15 bp, Homo sapiens
cccctgagtgccccc

SEQ ID NO: 822674 - DNA, 15 bp, Homo sapiens
ccctgagtgccccca

SEQ ID NO: 822675 - DNA, 15 bp, Homo sapiens
cctgagtgcccccag

SEQ ID NO: 822676 - DNA, 15 bp, Homo sapiens
ctgagtgcccccaga

SEQ ID NO: 822677 - DNA, 15 bp, Homo sapiens
tgagtgcccccagag

SEQ ID NO: 822678 - DNA, 15 bp, Homo sapiens
gagtgcccccagagg

SEQ ID NO: 822679 - DNA, 15 bp, Homo sapiens
agtgcccccagaggt

SEQ ID NO: 822680 - DNA, 15 bp, Homo sapiens
gtgcccccagaggtc

SEQ ID NO: 822681 - DNA, 15 bp, Homo sapiens
tgcccccagaggtca

SEQ ID NO: 822682 - DNA, 15 bp, Homo sapiens
gcccccagaggtcac

SEQ ID NO: 822683 - DNA, 15 bp, Homo sapiens
cccccagaggtcacc

SEQ ID NO: 822684 - DNA, 15 bp, Homo sapiens
ccccagaggtcaccc

SEQ ID NO: 822685 - DNA, 15 bp, Homo sapiens
cccagaggtcaccca

SEQ ID NO: 822686 - DNA, 15 bp, Homo sapiens
ccagaggtcacccac

SEQ ID NO: 822687 - DNA, 15 bp, Homo sapiens
cagaggtcacccact

SEQ ID NO: 822688 - DNA, 15 bp, Homo sapiens
agaggtcacccactc

SEQ ID NO: 822689 - DNA, 15 bp, Homo sapiens
gaggtcacccactcc

SEQ ID NO: 822690 - DNA, 15 bp, Homo sapiens
aggtcacccactcca

SEQ ID NO: 822691 - DNA, 15 bp, Homo sapiens
ggtcacccactccat

SEQ ID NO: 822692 - DNA, 15 bp, Homo sapiens
gtcacccactccatg

SEQ ID NO: 822693 - DNA, 15 bp, Homo sapiens
tcacccactccatgt

SEQ ID NO: 822694 - DNA, 15 bp, Homo sapiens
cacccactccatgtt

SEQ ID NO: 822695 - DNA, 15 bp, Homo sapiens
acccactccatgttc

SEQ ID NO: 822696 - DNA, 15 bp, Homo sapiens
cccactccatgttcc

SEQ ID NO: 822697 - DNA, 15 bp, Homo sapiens
ccactccatgttcca

SEQ ID NO: 822698 - DNA, 15 bp, Homo sapiens
cactccatgttccag

SEQ ID NO: 822699 - DNA, 15 bp, Homo sapiens
actccatgttccagg

SEQ ID NO: 822700 - DNA, 15 bp, Homo sapiens
ctccatgttccaggc

SEQ ID NO: 822701 - DNA, 15 bp, Homo sapiens
tccatgttccaggca

SEQ ID NO: 822702 - DNA, 15 bp, Homo sapiens
ccatgttccaggcag

SEQ ID NO: 822703 - DNA, 15 bp, Homo sapiens
catgttccaggcagc

SEQ ID NO: 822704 - DNA, 15 bp, Homo sapiens
atgttccaggcagct

SEQ ID NO: 822705 - DNA, 15 bp, Homo sapiens
tgttccaggcagctg

SEQ ID NO: 822706 - DNA, 15 bp, Homo sapiens
gttccaggcagctga

SEQ ID NO: 822707 - DNA, 15 bp, Homo sapiens
ttccaggcagctgac

SEQ ID NO: 822708 - DNA, 15 bp, Homo sapiens
tccaggcagctgact

SEQ ID NO: 822709 - DNA, 15 bp, Homo sapiens
ccaggcagctgactt

SEQ ID NO: 822710 - DNA, 15 bp, Homo sapiens
caggcagctgacttt

SEQ ID NO: 822711 - DNA, 15 bp, Homo sapiens
aggcagctgactttc

SEQ ID NO: 822712 - DNA, 15 bp, Homo sapiens
ggcagctgactttca

SEQ ID NO: 822713 - DNA, 15 bp, Homo sapiens
gcagctgactttcaa

SEQ ID NO: 822714 - DNA, 15 bp, Homo sapiens
cagctgactttcaac

SEQ ID NO: 822715 - DNA, 15 bp, Homo sapiens
agctgactttcaact

SEQ ID NO: 822716 - DNA, 15 bp, Homo sapiens
gctgactttcaactt

SEQ ID NO: 822717 - DNA, 15 bp, Homo sapiens
ctgactttcaacttg

SEQ ID NO: 822718 - DNA, 15 bp, Homo sapiens
tgactttcaacttgg

SEQ ID NO: 822719 - DNA, 15 bp, Homo sapiens
gactttcaacttgga

SEQ ID NO: 822720 - DNA, 15 bp, Homo sapiens
actttcaacttggac

SEQ ID NO: 822721 - DNA, 15 bp, Homo sapiens
ctttcaacttggaca

SEQ ID NO: 822722 - DNA, 15 bp, Homo sapiens
tttcaacttggacat

SEQ ID NO: 822723 - DNA, 15 bp, Homo sapiens
ttcaacttggacatc

SEQ ID NO: 822724 - DNA, 15 bp, Homo sapiens
tcaacttggacatct

SEQ ID NO: 822725 - DNA, 15 bp, Homo sapiens
caacttggacatcta

SEQ ID NO: 822726 - DNA, 15 bp, Homo sapiens
aacttggacatctag

SEQ ID NO: 822727 - DNA, 15 bp, Homo sapiens
acttggacatctaga

SEQ ID NO: 822728 - DNA, 15 bp, Homo sapiens
cttggacatctagat

SEQ ID NO: 822729 - DNA, 15 bp, Homo sapiens
ttggacatctagatt

SEQ ID NO: 822730 - DNA, 15 bp, Homo sapiens
tggacatctagattc

SEQ ID NO: 822731 - DNA, 15 bp, Homo sapiens
ggacatctagattcc

SEQ ID NO: 822732 - DNA, 15 bp, Homo sapiens
gacatctagattccc

SEQ ID NO: 822733 - DNA, 15 bp, Homo sapiens
acatctagattccct

SEQ ID NO: 822734 - DNA, 15 bp, Homo sapiens
catctagattccctg

SEQ ID NO: 822735 - DNA, 15 bp, Homo sapiens
atctagattccctga

SEQ ID NO: 822736 - DNA, 15 bp, Homo sapiens
tctagattccctgaa

SEQ ID NO: 822737 - DNA, 15 bp, Homo sapiens
ctagattccctgaag

SEQ ID NO: 822738 - DNA, 15 bp, Homo sapiens
tagattccctgaagc

SEQ ID NO: 822739 - DNA, 15 bp, Homo sapiens
agattccctgaagcc

SEQ ID NO: 822740 - DNA, 15 bp, Homo sapiens
gattccctgaagccc

SEQ ID NO: 822741 - DNA, 15 bp, Homo sapiens
attccctgaagccca

SEQ ID NO: 822742 - DNA, 15 bp, Homo sapiens
ttccctgaagcccag

SEQ ID NO: 822743 - DNA, 15 bp, Homo sapiens
tccctgaagcccaga

SEQ ID NO: 822744 - DNA, 15 bp, Homo sapiens
ccctgaagcccagag

SEQ ID NO: 822745 - DNA, 15 bp, Homo sapiens
cctgaagcccagagc

SEQ ID NO: 822746 - DNA, 15 bp, Homo sapiens
ctgaagcccagagcc

SEQ ID NO: 822747 - DNA, 15 bp, Homo sapiens
tgaagcccagagcct

SEQ ID NO: 822748 - DNA, 15 bp, Homo sapiens
gaagcccagagcctt

SEQ ID NO: 822749 - DNA, 15 bp, Homo sapiens
aagcccagagccttc

SEQ ID NO: 822750 - DNA, 15 bp, Homo sapiens
agcccagagccttct

SEQ ID NO: 822751 - DNA, 15 bp, Homo sapiens
gcccagagccttcta

SEQ ID NO: 822752 - DNA, 15 bp, Homo sapiens
cccagagccttctaa

SEQ ID NO: 822753 - DNA, 15 bp, Homo sapiens
ccagagccttctaag

SEQ ID NO: 822754 - DNA, 15 bp, Homo sapiens
cagagccttctaagt

SEQ ID NO: 822755 - DNA, 15 bp, Homo sapiens
agagccttctaagta

SEQ ID NO: 822756 - DNA, 15 bp, Homo sapiens
gagccttctaagtaa

SEQ ID NO: 822757 - DNA, 15 bp, Homo sapiens
agccttctaagtaaa

SEQ ID NO: 822758 - DNA, 15 bp, Homo sapiens
gccttctaagtaaac

SEQ ID NO: 822759 - DNA, 15 bp, Homo sapiens
ccttctaagtaaact

SEQ ID NO: 822760 - DNA, 15 bp, Homo sapiens
cttctaagtaaactg

SEQ ID NO: 822761 - DNA, 15 bp, Homo sapiens
ttctaagtaaactgc

SEQ ID NO: 822762 - DNA, 15 bp, Homo sapiens
tctaagtaaactgct

SEQ ID NO: 822763 - DNA, 15 bp, Homo sapiens
ctaagtaaactgctg

SEQ ID NO: 822764 - DNA, 15 bp, Homo sapiens
taagtaaactgctgt

SEQ ID NO: 822765 - DNA, 15 bp, Homo sapiens
aagtaaactgctgtc

SEQ ID NO: 822766 - DNA, 15 bp, Homo sapiens
agtaaactgctgtct

SEQ ID NO: 822767 - DNA, 15 bp, Homo sapiens
gtaaactgctgtctg

SEQ ID NO: 822768 - DNA, 15 bp, Homo sapiens
taaactgctgtctgt

SEQ ID NO: 822769 - DNA, 15 bp, Homo sapiens
aaactgctgtctgta

SEQ ID NO: 822770 - DNA, 15 bp, Homo sapiens
aactgctgtctgtag

SEQ ID NO: 822771 - DNA, 15 bp, Homo sapiens
actgctgtctgtagt

SEQ ID NO: 822772 - DNA, 15 bp, Homo sapiens
ctgctgtctgtagtc

SEQ ID NO: 822773 - DNA, 15 bp, Homo sapiens
tgctgtctgtagtct

SEQ ID NO: 822774 - DNA, 15 bp, Homo sapiens
gctgtctgtagtctg

SEQ ID NO: 822775 - DNA, 15 bp, Homo sapiens
ctgtctgtagtctgt

SEQ ID NO: 822776 - DNA, 15 bp, Homo sapiens
tgtctgtagtctgtg

SEQ ID NO: 822777 - DNA, 15 bp, Homo sapiens
gtctgtagtctgtgg

SEQ ID NO: 822778 - DNA, 15 bp, Homo sapiens
tctgtagtctgtggg

SEQ ID NO: 822779 - DNA, 15 bp, Homo sapiens
ctgtagtctgtgggt

SEQ ID NO: 822780 - DNA, 15 bp, Homo sapiens
tgtagtctgtgggtt

SEQ ID NO: 822781 - DNA, 15 bp, Homo sapiens
gtagtctgtgggttt

SEQ ID NO: 822782 - DNA, 15 bp, Homo sapiens
tagtctgtgggtttc

SEQ ID NO: 822783 - DNA, 15 bp, Homo sapiens
agtctgtgggtttct

SEQ ID NO: 822784 - DNA, 15 bp, Homo sapiens
gtctgtgggtttctt

SEQ ID NO: 822785 - DNA, 15 bp, Homo sapiens
tctgtgggtttcttt

SEQ ID NO: 822786 - DNA, 15 bp, Homo sapiens
ctgtgggtttcttta

SEQ ID NO: 822787 - DNA, 15 bp, Homo sapiens
tgtgggtttctttag

SEQ ID NO: 822788 - DNA, 15 bp, Homo sapiens
gtgggtttctttaga

SEQ ID NO: 822789 - DNA, 15 bp, Homo sapiens
tgggtttctttagaa

SEQ ID NO: 822790 - DNA, 15 bp, Homo sapiens
gggtttctttagaat

SEQ ID NO: 822791 - DNA, 15 bp, Homo sapiens
ggtttctttagaata

SEQ ID NO: 822792 - DNA, 15 bp, Homo sapiens
gtttctttagaataa

SEQ ID NO: 822793 - DNA, 15 bp, Homo sapiens
tttctttagaataag

SEQ ID NO: 822794 - DNA, 15 bp, Homo sapiens
ttctttagaataaga

SEQ ID NO: 822795 - DNA, 15 bp, Homo sapiens
tctttagaataagaa

SEQ ID NO: 822796 - DNA, 15 bp, Homo sapiens
ctttagaataagaat

SEQ ID NO: 822797 - DNA, 15 bp, Homo sapiens
tttagaataagaata

SEQ ID NO: 822798 - DNA, 15 bp, Homo sapiens
ttagaataagaatag

SEQ ID NO: 822799 - DNA, 15 bp, Homo sapiens
tagaataagaatagt

SEQ ID NO: 822800 - DNA, 15 bp, Homo sapiens
agaataagaatagtg

SEQ ID NO: 822801 - DNA, 15 bp, Homo sapiens
gaataagaatagtga

SEQ ID NO: 822802 - DNA, 15 bp, Homo sapiens
aataagaatagtgaa

SEQ ID NO: 822803 - DNA, 15 bp, Homo sapiens
ataagaatagtgaaa

SEQ ID NO: 822804 - DNA, 15 bp, Homo sapiens
taagaatagtgaaat

SEQ ID NO: 822805 - DNA, 15 bp, Homo sapiens
aagaatagtgaaata

SEQ ID NO: 822806 - DNA, 15 bp, Homo sapiens
agaatagtgaaataa

SEQ ID NO: 822807 - DNA, 15 bp, Homo sapiens
gaatagtgaaataaa

SEQ ID NO: 822808 - DNA, 15 bp, Homo sapiens
aatagtgaaataaag

SEQ ID NO: 822809 - DNA, 15 bp, Homo sapiens
atagtgaaataaaga

SEQ ID NO: 822810 - DNA, 15 bp, Homo sapiens
tagtgaaataaagaa

SEQ ID NO: 822811 - DNA, 15 bp, Homo sapiens
agtgaaataaagaaa

SEQ ID NO: 822812 - DNA, 15 bp, Homo sapiens
gtgaaataaagaaaa

SEQ ID NO: 822813 - DNA, 15 bp, Homo sapiens
tgaaataaagaaaag

SEQ ID NO: 822814 - DNA, 15 bp, Homo sapiens
gaaataaagaaaaga

SEQ ID NO: 822815 - DNA, 15 bp, Homo sapiens
aaataaagaaaagaa

SEQ ID NO: 822816 - DNA, 15 bp, Homo sapiens
aataaagaaaagaaa

SEQ ID NO: 822817 - DNA, 15 bp, Homo sapiens
ataaagaaaagaaaa

SEQ ID NO: 822818 - DNA, 15 bp, Homo sapiens
aagaaaagaaaaagt

SEQ ID NO: 822819 - DNA, 15 bp, Homo sapiens
agaaaagaaaaagta

SEQ ID NO: 822820 - DNA, 15 bp, Homo sapiens
gaaaagaaaaagtat

SEQ ID NO: 822821 - DNA, 15 bp, Homo sapiens
aaaagaaaaagtatg

SEQ ID NO: 822822 - DNA, 15 bp, Homo sapiens
aaagaaaaagtatga

SEQ ID NO: 822823 - DNA, 15 bp, Homo sapiens
aagaaaaagtatgat

SEQ ID NO: 822824 - DNA, 15 bp, Homo sapiens
agaaaaagtatgatt

SEQ ID NO: 822825 - DNA, 15 bp, Homo sapiens
gaaaaagtatgattt

SEQ ID NO: 822826 - DNA, 15 bp, Homo sapiens
aaaaagtatgatttc

SEQ ID NO: 822827 - DNA, 15 bp, Homo sapiens
aaaagtatgatttcc

SEQ ID NO: 822828 - DNA, 15 bp, Homo sapiens
aaagtatgatttccc

SEQ ID NO: 822829 - DNA, 15 bp, Homo sapiens
aagtatgatttccct

SEQ ID NO: 822830 - DNA, 15 bp, Homo sapiens
agtatgatttccctt

SEQ ID NO: 822831 - DNA, 15 bp, Homo sapiens
gtatgatttcccttt

SEQ ID NO: 822832 - DNA, 15 bp, Homo sapiens
tatgatttccctttt

SEQ ID NO: 822833 - DNA, 15 bp, Homo sapiens
atgatttcccttttt

SEQ ID NO: 822834 - DNA, 15 bp, Homo sapiens
tgatttccctttttg

SEQ ID NO: 822835 - DNA, 15 bp, Homo sapiens
gatttccctttttgg

SEQ ID NO: 822836 - DNA, 15 bp, Homo sapiens
atttccctttttggg

SEQ ID NO: 822837 - DNA, 15 bp, Homo sapiens
tttccctttttgggc

SEQ ID NO: 822838 - DNA, 15 bp, Homo sapiens
ttccctttttgggcc

SEQ ID NO: 822839 - DNA, 15 bp, Homo sapiens
tccctttttgggcca

SEQ ID NO: 822840 - DNA, 15 bp, Homo sapiens
ccctttttgggccag

SEQ ID NO: 822841 - DNA, 15 bp, Homo sapiens
cctttttgggccagg

SEQ ID NO: 822842 - DNA, 15 bp, Homo sapiens
ctttttgggccaggt

SEQ ID NO: 822843 - DNA, 15 bp, Homo sapiens
tttttgggccaggtg

SEQ ID NO: 822844 - DNA, 15 bp, Homo sapiens
ttttgggccaggtgt

SEQ ID NO: 822845 - DNA, 15 bp, Homo sapiens
tttgggccaggtgtc

SEQ ID NO: 822846 - DNA, 15 bp, Homo sapiens
ttgggccaggtgtcc

SEQ ID NO: 822847 - DNA, 15 bp, Homo sapiens
tgggccaggtgtcct

SEQ ID NO: 822848 - DNA, 15 bp, Homo sapiens
gggccaggtgtcctt

SEQ ID NO: 822849 - DNA, 15 bp, Homo sapiens
ggccaggtgtcctta

SEQ ID NO: 822850 - DNA, 15 bp, Homo sapiens
gccaggtgtccttag

SEQ ID NO: 822851 - DNA, 15 bp, Homo sapiens
ccaggtgtccttagg

SEQ ID NO: 822852 - DNA, 15 bp, Homo sapiens
caggtgtccttagga

SEQ ID NO: 822853 - DNA, 15 bp, Homo sapiens
aggtgtccttaggag

SEQ ID NO: 822854 - DNA, 15 bp, Homo sapiens
ggtgtccttaggaga

SEQ ID NO: 822855 - DNA, 15 bp, Homo sapiens
gtgtccttaggagag

SEQ ID NO: 822856 - DNA, 15 bp, Homo sapiens
tgtccttaggagagt

SEQ ID NO: 822857 - DNA, 15 bp, Homo sapiens
gtccttaggagagtg

SEQ ID NO: 822858 - DNA, 15 bp, Homo sapiens
tccttaggagagtgg

SEQ ID NO: 822859 - DNA, 15 bp, Homo sapiens
ccttaggagagtggg

SEQ ID NO: 822860 - DNA, 15 bp, Homo sapiens
cttaggagagtgggg

SEQ ID NO: 822861 - DNA, 15 bp, Homo sapiens
ttaggagagtggggg

SEQ ID NO: 822862 - DNA, 15 bp, Homo sapiens
taggagagtgggggt

SEQ ID NO: 822863 - DNA, 15 bp, Homo sapiens
aggagagtgggggtt

SEQ ID NO: 822864 - DNA, 15 bp, Homo sapiens
ggagagtgggggttg

SEQ ID NO: 822865 - DNA, 15 bp, Homo sapiens
gagagtgggggttgg

SEQ ID NO: 822866 - DNA, 15 bp, Homo sapiens
agagtgggggttggg

SEQ ID NO: 822867 - DNA, 15 bp, Homo sapiens
gagtgggggttgggg

SEQ ID NO: 822868 - DNA, 15 bp, Homo sapiens
agtgggggttggggg

SEQ ID NO: 822869 - DNA, 15 bp, Homo sapiens
gtgggggttgggggg

SEQ ID NO: 822870 - DNA, 15 bp, Homo sapiens
tgggggttggggggt

SEQ ID NO: 822871 - DNA, 15 bp, Homo sapiens
gggggttggggggtt

SEQ ID NO: 822872 - DNA, 15 bp, Homo sapiens
ggggttggggggttt

SEQ ID NO: 822873 - DNA, 15 bp, Homo sapiens
gggttggggggtttg

SEQ ID NO: 822874 - DNA, 15 bp, Homo sapiens
ggttggggggtttga

SEQ ID NO: 822875 - DNA, 15 bp, Homo sapiens
gttggggggtttgag

SEQ ID NO: 822876 - DNA, 15 bp, Homo sapiens
ttggggggtttgaga

SEQ ID NO: 822877 - DNA, 15 bp, Homo sapiens
tggggggtttgagag

SEQ ID NO: 822878 - DNA, 15 bp, Homo sapiens
ggggggtttgagaga

SEQ ID NO: 822879 - DNA, 15 bp, Homo sapiens
gggggtttgagagaa

SEQ ID NO: 822880 - DNA, 15 bp, Homo sapiens
ggggtttgagagaaa

SEQ ID NO: 822881 - DNA, 15 bp, Homo sapiens
gggtttgagagaaag

SEQ ID NO: 822882 - DNA, 15 bp, Homo sapiens
ggtttgagagaaaga

SEQ ID NO: 822883 - DNA, 15 bp, Homo sapiens
gtttgagagaaagag

SEQ ID NO: 822884 - DNA, 15 bp, Homo sapiens
tttgagagaaagaga

SEQ ID NO: 822885 - DNA, 15 bp, Homo sapiens
ttgagagaaagagaa

SEQ ID NO: 822886 - DNA, 15 bp, Homo sapiens
tgagagaaagagaaa

SEQ ID NO: 822887 - DNA, 15 bp, Homo sapiens
gagagaaagagaaat

SEQ ID NO: 822888 - DNA, 15 bp, Homo sapiens
agagaaagagaaatc

SEQ ID NO: 822889 - DNA, 15 bp, Homo sapiens
gagaaagagaaatcc

SEQ ID NO: 822890 - DNA, 15 bp, Homo sapiens
agaaagagaaatcca

SEQ ID NO: 822891 - DNA, 15 bp, Homo sapiens
gaaagagaaatccaa

SEQ ID NO: 822892 - DNA, 15 bp, Homo sapiens
aaagagaaatccaaa

SEQ ID NO: 822893 - DNA, 15 bp, Homo sapiens
aagagaaatccaaaa

SEQ ID NO: 822894 - DNA, 15 bp, Homo sapiens
agagaaatccaaaag

SEQ ID NO: 822895 - DNA, 15 bp, Homo sapiens
gagaaatccaaaaga

SEQ ID NO: 822896 - DNA, 15 bp, Homo sapiens
agaaatccaaaagaa

SEQ ID NO: 822897 - DNA, 15 bp, Homo sapiens
gaaatccaaaagaaa

SEQ ID NO: 822898 - DNA, 15 bp, Homo sapiens
aaatccaaaagaaaa

SEQ ID NO: 822899 - DNA, 15 bp, Homo sapiens
aatccaaaagaaaag

SEQ ID NO: 822900 - DNA, 15 bp, Homo sapiens
atccaaaagaaaagt

SEQ ID NO: 822901 - DNA, 15 bp, Homo sapiens
tccaaaagaaaagtg

SEQ ID NO: 822902 - DNA, 15 bp, Homo sapiens
ccaaaagaaaagtgc

SEQ ID NO: 822903 - DNA, 15 bp, Homo sapiens
caaaagaaaagtgct

SEQ ID NO: 822904 - DNA, 15 bp, Homo sapiens
aaaagaaaagtgctt

SEQ ID NO: 822905 - DNA, 15 bp, Homo sapiens
aaagaaaagtgcttc

SEQ ID NO: 822906 - DNA, 15 bp, Homo sapiens
aagaaaagtgcttcc

SEQ ID NO: 822907 - DNA, 15 bp, Homo sapiens
agaaaagtgcttcca

SEQ ID NO: 822908 - DNA, 15 bp, Homo sapiens
gaaaagtgcttccat

SEQ ID NO: 822909 - DNA, 15 bp, Homo sapiens
aaaagtgcttccata

SEQ ID NO: 822910 - DNA, 15 bp, Homo sapiens
aaagtgcttccataa

SEQ ID NO: 822911 - DNA, 15 bp, Homo sapiens
aagtgcttccataac

SEQ ID NO: 822912 - DNA, 15 bp, Homo sapiens
agtgcttccataact

SEQ ID NO: 822913 - DNA, 15 bp, Homo sapiens
gtgcttccataacta

SEQ ID NO: 822914 - DNA, 15 bp, Homo sapiens
tgcttccataactag

SEQ ID NO: 822915 - DNA, 15 bp, Homo sapiens
gcttccataactaga

SEQ ID NO: 822916 - DNA, 15 bp, Homo sapiens
cttccataactagaa

SEQ ID NO: 822917 - DNA, 15 bp, Homo sapiens
ttccataactagaat

SEQ ID NO: 822918 - DNA, 15 bp, Homo sapiens
tccataactagaata

SEQ ID NO: 822919 - DNA, 15 bp, Homo sapiens
ccataactagaataa

SEQ ID NO: 822920 - DNA, 15 bp, Homo sapiens
cataactagaataaa

SEQ ID NO: 822921 - DNA, 15 bp, Homo sapiens
ataactagaataaag

SEQ ID NO: 822922 - DNA, 15 bp, Homo sapiens
taactagaataaagt

SEQ ID NO: 822923 - DNA, 15 bp, Homo sapiens
aactagaataaagtt

SEQ ID NO: 822924 - DNA, 15 bp, Homo sapiens
actagaataaagtta

SEQ ID NO: 822925 - DNA, 15 bp, Homo sapiens
ctagaataaagttag

SEQ ID NO: 822926 - DNA, 15 bp, Homo sapiens
tagaataaagttaga

SEQ ID NO: 822927 - DNA, 15 bp, Homo sapiens
agaataaagttagat

SEQ ID NO: 822928 - DNA, 15 bp, Homo sapiens
gaataaagttagatg

SEQ ID NO: 822929 - DNA, 15 bp, Homo sapiens
aataaagttagatgt

SEQ ID NO: 822930 - DNA, 15 bp, Homo sapiens
ataaagttagatgtg

SEQ ID NO: 822931 - DNA, 15 bp, Homo sapiens
taaagttagatgtgt

SEQ ID NO: 822932 - DNA, 15 bp, Homo sapiens
aaagttagatgtgtt

SEQ ID NO: 822933 - DNA, 15 bp, Homo sapiens
aagttagatgtgttc

SEQ ID NO: 822934 - DNA, 15 bp, Homo sapiens
agttagatgtgttca

SEQ ID NO: 822935 - DNA, 15 bp, Homo sapiens
gttagatgtgttcat

SEQ ID NO: 822936 - DNA, 15 bp, Homo sapiens
ttagatgtgttcata

SEQ ID NO: 822937 - DNA, 15 bp, Homo sapiens
tagatgtgttcatat

SEQ ID NO: 822938 - DNA, 15 bp, Homo sapiens
agatgtgttcatatt

SEQ ID NO: 822939 - DNA, 15 bp, Homo sapiens
gatgtgttcatatta

SEQ ID NO: 822940 - DNA, 15 bp, Homo sapiens
atgtgttcatattac

SEQ ID NO: 822941 - DNA, 15 bp, Homo sapiens
tgtgttcatattaca

SEQ ID NO: 822942 - DNA, 15 bp, Homo sapiens
gtgttcatattacac

SEQ ID NO: 822943 - DNA, 15 bp, Homo sapiens
tgttcatattacaca

SEQ ID NO: 822944 - DNA, 15 bp, Homo sapiens
gttcatattacacat

SEQ ID NO: 822945 - DNA, 15 bp, Homo sapiens
ttcatattacacata

SEQ ID NO: 822946 - DNA, 15 bp, Homo sapiens
tcatattacacatat

SEQ ID NO: 822947 - DNA, 15 bp, Homo sapiens
catattacacatatt

SEQ ID NO: 822948 - DNA, 15 bp, Homo sapiens
atattacacatatta

SEQ ID NO: 822949 - DNA, 15 bp, Homo sapiens
tattacacatattac

SEQ ID NO: 822950 - DNA, 15 bp, Homo sapiens
attacacatattaca

SEQ ID NO: 822951 - DNA, 15 bp, Homo sapiens
ttacacatattacat

SEQ ID NO: 822952 - DNA, 15 bp, Homo sapiens
tacacatattacata

SEQ ID NO: 822953 - DNA, 15 bp, Homo sapiens
acacatattacatat

SEQ ID NO: 822954 - DNA, 15 bp, Homo sapiens
cacatattacatata

SEQ ID NO: 822955 - DNA, 15 bp, Homo sapiens
acatattacatatat

SEQ ID NO: 822956 - DNA, 15 bp, Homo sapiens
catattacatatatg

SEQ ID NO: 822957 - DNA, 15 bp, Homo sapiens
atattacatatatgt

SEQ ID NO: 822958 - DNA, 15 bp, Homo sapiens
tattacatatatgtg

SEQ ID NO: 822959 - DNA, 15 bp, Homo sapiens
attacatatatgtgt

SEQ ID NO: 822960 - DNA, 15 bp, Homo sapiens
ttacatatatgtgta

SEQ ID NO: 822961 - DNA, 15 bp, Homo sapiens
tacatatatgtgtat

SEQ ID NO: 822962 - DNA, 15 bp, Homo sapiens
acatatatgtgtata

SEQ ID NO: 822963 - DNA, 15 bp, Homo sapiens
catatatgtgtatat

SEQ ID NO: 822964 - DNA, 15 bp, Homo sapiens
atatatgtgtatata

SEQ ID NO: 822965 - DNA, 15 bp, Homo sapiens
atatgtgtatatata

SEQ ID NO: 822966 - DNA, 15 bp, Homo sapiens
atgtgtatatatatg

SEQ ID NO: 822967 - DNA, 15 bp, Homo sapiens
tgtgtatatatatgt

SEQ ID NO: 822968 - DNA, 15 bp, Homo sapiens
gtgtatatatatgta

SEQ ID NO: 822969 - DNA, 15 bp, Homo sapiens
atatatatgtatgta

SEQ ID NO: 822970 - DNA, 15 bp, Homo sapiens
tatatatgtatgtat

SEQ ID NO: 822971 - DNA, 15 bp, Homo sapiens
gtatgtatgtgtatg

SEQ ID NO: 822972 - DNA, 15 bp, Homo sapiens
tatgtatgtgtatgt

SEQ ID NO: 822973 - DNA, 15 bp, Homo sapiens
atgtatgtgtatgta

SEQ ID NO: 822974 - DNA, 15 bp, Homo sapiens
tgtatgtgtatgtac

SEQ ID NO: 822975 - DNA, 15 bp, Homo sapiens
gtatgtgtatgtaca

SEQ ID NO: 822976 - DNA, 15 bp, Homo sapiens
tatgtgtatgtacat

SEQ ID NO: 822977 - DNA, 15 bp, Homo sapiens
atgtgtatgtacata

SEQ ID NO: 822978 - DNA, 15 bp, Homo sapiens
tgtgtatgtacatac

SEQ ID NO: 822979 - DNA, 15 bp, Homo sapiens
gtgtatgtacataca

SEQ ID NO: 822980 - DNA, 15 bp, Homo sapiens
tgtatgtacatacag

SEQ ID NO: 822981 - DNA, 15 bp, Homo sapiens
gtatgtacatacagt

SEQ ID NO: 822982 - DNA, 15 bp, Homo sapiens
tatgtacatacagta

SEQ ID NO: 822983 - DNA, 15 bp, Homo sapiens
atgtacatacagtat

SEQ ID NO: 822984 - DNA, 15 bp, Homo sapiens
tgtacatacagtata

SEQ ID NO: 822985 - DNA, 15 bp, Homo sapiens
gtacatacagtatat

SEQ ID NO: 822986 - DNA, 15 bp, Homo sapiens
tacatacagtatata

SEQ ID NO: 822987 - DNA, 15 bp, Homo sapiens
acatacagtatataa

SEQ ID NO: 822988 - DNA, 15 bp, Homo sapiens
catacagtatataat

SEQ ID NO: 822989 - DNA, 15 bp, Homo sapiens
atacagtatataatt

SEQ ID NO: 822990 - DNA, 15 bp, Homo sapiens
tacagtatataattg

SEQ ID NO: 822991 - DNA, 15 bp, Homo sapiens
acagtatataattgt

SEQ ID NO: 822992 - DNA, 15 bp, Homo sapiens
cagtatataattgtc

SEQ ID NO: 822993 - DNA, 15 bp, Homo sapiens
agtatataattgtct

SEQ ID NO: 822994 - DNA, 15 bp, Homo sapiens
gtatataattgtctc

SEQ ID NO: 822995 - DNA, 15 bp, Homo sapiens
tatataattgtctca

SEQ ID NO: 822996 - DNA, 15 bp, Homo sapiens
atataattgtctcaa

SEQ ID NO: 822997 - DNA, 15 bp, Homo sapiens
tataattgtctcaag

SEQ ID NO: 822998 - DNA, 15 bp, Homo sapiens
ataattgtctcaagt

SEQ ID NO: 822999 - DNA, 15 bp, Homo sapiens
taattgtctcaagtg

SEQ ID NO: 823000 - DNA, 15 bp, Homo sapiens
aattgtctcaagtgc

SEQ ID NO: 823001 - DNA, 15 bp, Homo sapiens
attgtctcaagtgct

SEQ ID NO: 823002 - DNA, 15 bp, Homo sapiens
ttgtctcaagtgctc

SEQ ID NO: 823003 - DNA, 15 bp, Homo sapiens
tgtctcaagtgctct

SEQ ID NO: 823004 - DNA, 15 bp, Homo sapiens
gtctcaagtgctctt

SEQ ID NO: 823005 - DNA, 15 bp, Homo sapiens
tctcaagtgctcttc

SEQ ID NO: 823006 - DNA, 15 bp, Homo sapiens
ctcaagtgctcttcc

SEQ ID NO: 823007 - DNA, 15 bp, Homo sapiens
tcaagtgctcttcca

SEQ ID NO: 823008 - DNA, 15 bp, Homo sapiens
caagtgctcttccaa

SEQ ID NO: 823009 - DNA, 15 bp, Homo sapiens
aagtgctcttccaaa

SEQ ID NO: 823010 - DNA, 15 bp, Homo sapiens
agtgctcttccaaac

SEQ ID NO: 823011 - DNA, 15 bp, Homo sapiens
gtgctcttccaaaca

SEQ ID NO: 823012 - DNA, 15 bp, Homo sapiens
tgctcttccaaacag

SEQ ID NO: 823013 - DNA, 15 bp, Homo sapiens
gctcttccaaacagt

SEQ ID NO: 823014 - DNA, 15 bp, Homo sapiens
ctcttccaaacagta

SEQ ID NO: 823015 - DNA, 15 bp, Homo sapiens
tcttccaaacagtac

SEQ ID NO: 823016 - DNA, 15 bp, Homo sapiens
cttccaaacagtact

SEQ ID NO: 823017 - DNA, 15 bp, Homo sapiens
ttccaaacagtacta

SEQ ID NO: 823018 - DNA, 15 bp, Homo sapiens
tccaaacagtactat

SEQ ID NO: 823019 - DNA, 15 bp, Homo sapiens
ccaaacagtactatg

SEQ ID NO: 823020 - DNA, 15 bp, Homo sapiens
caaacagtactatga

SEQ ID NO: 823021 - DNA, 15 bp, Homo sapiens
aaacagtactatgaa

SEQ ID NO: 823022 - DNA, 15 bp, Homo sapiens
aacagtactatgaaa

SEQ ID NO: 823023 - DNA, 15 bp, Homo sapiens
acagtactatgaaat

SEQ ID NO: 823024 - DNA, 15 bp, Homo sapiens
cagtactatgaaata

SEQ ID NO: 823025 - DNA, 15 bp, Homo sapiens
agtactatgaaatag

SEQ ID NO: 823026 - DNA, 15 bp, Homo sapiens
gtactatgaaatagg

SEQ ID NO: 823027 - DNA, 15 bp, Homo sapiens
tactatgaaataggt

SEQ ID NO: 823028 - DNA, 15 bp, Homo sapiens
actatgaaataggtg

SEQ ID NO: 823029 - DNA, 15 bp, Homo sapiens
ctatgaaataggtgt

SEQ ID NO: 823030 - DNA, 15 bp, Homo sapiens
tatgaaataggtgtc

SEQ ID NO: 823031 - DNA, 15 bp, Homo sapiens
atgaaataggtgtca

SEQ ID NO: 823032 - DNA, 15 bp, Homo sapiens
tgaaataggtgtcat

SEQ ID NO: 823033 - DNA, 15 bp, Homo sapiens
gaaataggtgtcatt

SEQ ID NO: 823034 - DNA, 15 bp, Homo sapiens
aaataggtgtcattt

SEQ ID NO: 823035 - DNA, 15 bp, Homo sapiens
aataggtgtcatttg

SEQ ID NO: 823036 - DNA, 15 bp, Homo sapiens
ataggtgtcatttgg

SEQ ID NO: 823037 - DNA, 15 bp, Homo sapiens
taggtgtcatttggg

SEQ ID NO: 823038 - DNA, 15 bp, Homo sapiens
aggtgtcatttgggg

SEQ ID NO: 823039 - DNA, 15 bp, Homo sapiens
ggtgtcatttggggg

SEQ ID NO: 823040 - DNA, 15 bp, Homo sapiens
gtgtcatttgggggc

SEQ ID NO: 823041 - DNA, 15 bp, Homo sapiens
tgtcatttgggggcc

SEQ ID NO: 823042 - DNA, 15 bp, Homo sapiens
gtcatttgggggccc

SEQ ID NO: 823043 - DNA, 15 bp, Homo sapiens
tcatttgggggccca

SEQ ID NO: 823044 - DNA, 15 bp, Homo sapiens
catttgggggcccat

SEQ ID NO: 823045 - DNA, 15 bp, Homo sapiens
atttgggggcccata

SEQ ID NO: 823046 - DNA, 15 bp, Homo sapiens
tttgggggcccatat

SEQ ID NO: 823047 - DNA, 15 bp, Homo sapiens
ttgggggcccatatt

SEQ ID NO: 823048 - DNA, 15 bp, Homo sapiens
tgggggcccatatta

SEQ ID NO: 823049 - DNA, 15 bp, Homo sapiens
gggggcccatattac

SEQ ID NO: 823050 - DNA, 15 bp, Homo sapiens
ggggcccatattaca

SEQ ID NO: 823051 - DNA, 15 bp, Homo sapiens
gggcccatattacag

SEQ ID NO: 823052 - DNA, 15 bp, Homo sapiens
ggcccatattacaga

SEQ ID NO: 823053 - DNA, 15 bp, Homo sapiens
gcccatattacagat

SEQ ID NO: 823054 - DNA, 15 bp, Homo sapiens
cccatattacagatg

SEQ ID NO: 823055 - DNA, 15 bp, Homo sapiens
ccatattacagatgg

SEQ ID NO: 823056 - DNA, 15 bp, Homo sapiens
catattacagatggg

SEQ ID NO: 823057 - DNA, 15 bp, Homo sapiens
atattacagatgggg

SEQ ID NO: 823058 - DNA, 15 bp, Homo sapiens
tattacagatgggga

SEQ ID NO: 823059 - DNA, 15 bp, Homo sapiens
attacagatggggaa

SEQ ID NO: 823060 - DNA, 15 bp, Homo sapiens
gggaaactgaggctt

SEQ ID NO: 823061 - DNA, 15 bp, Homo sapiens
ggaaactgaggcttc

SEQ ID NO: 823062 - DNA, 15 bp, Homo sapiens
gaaactgaggcttca

SEQ ID NO: 823063 - DNA, 15 bp, Homo sapiens
aaactgaggcttcag

SEQ ID NO: 823064 - DNA, 15 bp, Homo sapiens
aactgaggcttcaga

SEQ ID NO: 823065 - DNA, 15 bp, Homo sapiens
actgaggcttcagaa

SEQ ID NO: 823066 - DNA, 15 bp, Homo sapiens
ctgaggcttcagaag

SEQ ID NO: 823067 - DNA, 15 bp, Homo sapiens
tgaggcttcagaagg

SEQ ID NO: 823068 - DNA, 15 bp, Homo sapiens
gaggcttcagaaggt

SEQ ID NO: 823069 - DNA, 15 bp, Homo sapiens
aggcttcagaaggtt

SEQ ID NO: 823070 - DNA, 15 bp, Homo sapiens
ggcttcagaaggtta

SEQ ID NO: 823071 - DNA, 15 bp, Homo sapiens
gcttcagaaggttaa

SEQ ID NO: 823072 - DNA, 15 bp, Homo sapiens
cttcagaaggttaaa

SEQ ID NO: 823073 - DNA, 15 bp, Homo sapiens
ttcagaaggttaaat

SEQ ID NO: 823074 - DNA, 15 bp, Homo sapiens
tcagaaggttaaata

SEQ ID NO: 823075 - DNA, 15 bp, Homo sapiens
cagaaggttaaataa

SEQ ID NO: 823076 - DNA, 15 bp, Homo sapiens
agaaggttaaataaa

SEQ ID NO: 823077 - DNA, 15 bp, Homo sapiens
gaaggttaaataaat

SEQ ID NO: 823078 - DNA, 15 bp, Homo sapiens
aaggttaaataaatt

SEQ ID NO: 823079 - DNA, 15 bp, Homo sapiens
aggttaaataaattg

SEQ ID NO: 823080 - DNA, 15 bp, Homo sapiens
ggttaaataaattgc

SEQ ID NO: 823081 - DNA, 15 bp, Homo sapiens
gttaaataaattgct

SEQ ID NO: 823082 - DNA, 15 bp, Homo sapiens
ttaaataaattgctg

SEQ ID NO: 823083 - DNA, 15 bp, Homo sapiens
taaataaattgctga

SEQ ID NO: 823084 - DNA, 15 bp, Homo sapiens
aaataaattgctgag

SEQ ID NO: 823085 - DNA, 15 bp, Homo sapiens
aataaattgctgaga

SEQ ID NO: 823086 - DNA, 15 bp, Homo sapiens
ataaattgctgagag

SEQ ID NO: 823087 - DNA, 15 bp, Homo sapiens
taaattgctgagagt

SEQ ID NO: 823088 - DNA, 15 bp, Homo sapiens
aaattgctgagagtc

SEQ ID NO: 823089 - DNA, 15 bp, Homo sapiens
aattgctgagagtca

SEQ ID NO: 823090 - DNA, 15 bp, Homo sapiens
attgctgagagtcac

SEQ ID NO: 823091 - DNA, 15 bp, Homo sapiens
ttgctgagagtcacc

SEQ ID NO: 823092 - DNA, 15 bp, Homo sapiens
tgctgagagtcacct

SEQ ID NO: 823093 - DNA, 15 bp, Homo sapiens
gctgagagtcaccta

SEQ ID NO: 823094 - DNA, 15 bp, Homo sapiens
ctgagagtcacctag

SEQ ID NO: 823095 - DNA, 15 bp, Homo sapiens
tgagagtcacctagt

SEQ ID NO: 823096 - DNA, 15 bp, Homo sapiens
gagagtcacctagtg

SEQ ID NO: 823097 - DNA, 15 bp, Homo sapiens
agagtcacctagtga

SEQ ID NO: 823098 - DNA, 15 bp, Homo sapiens
gagtcacctagtgag

SEQ ID NO: 823099 - DNA, 15 bp, Homo sapiens
agtcacctagtgagt

SEQ ID NO: 823100 - DNA, 15 bp, Homo sapiens
gtcacctagtgagta

SEQ ID NO: 823101 - DNA, 15 bp, Homo sapiens
tcacctagtgagtaa

SEQ ID NO: 823102 - DNA, 15 bp, Homo sapiens
cacctagtgagtaaa

SEQ ID NO: 823103 - DNA, 15 bp, Homo sapiens
acctagtgagtaaat

SEQ ID NO: 823104 - DNA, 15 bp, Homo sapiens
cctagtgagtaaatg

SEQ ID NO: 823105 - DNA, 15 bp, Homo sapiens
ctagtgagtaaatgg

SEQ ID NO: 823106 - DNA, 15 bp, Homo sapiens
tagtgagtaaatggt

SEQ ID NO: 823107 - DNA, 15 bp, Homo sapiens
agtgagtaaatggta

SEQ ID NO: 823108 - DNA, 15 bp, Homo sapiens
gtgagtaaatggtag

SEQ ID NO: 823109 - DNA, 15 bp, Homo sapiens
tgagtaaatggtaga

SEQ ID NO: 823110 - DNA, 15 bp, Homo sapiens
gagtaaatggtagag

SEQ ID NO: 823111 - DNA, 15 bp, Homo sapiens
agtaaatggtagagc

SEQ ID NO: 823112 - DNA, 15 bp, Homo sapiens
gtaaatggtagagct

SEQ ID NO: 823113 - DNA, 15 bp, Homo sapiens
taaatggtagagctc

SEQ ID NO: 823114 - DNA, 15 bp, Homo sapiens
aaatggtagagctca

SEQ ID NO: 823115 - DNA, 15 bp, Homo sapiens
aatggtagagctcag

SEQ ID NO: 823116 - DNA, 15 bp, Homo sapiens
atggtagagctcagc

SEQ ID NO: 823117 - DNA, 15 bp, Homo sapiens
tggtagagctcagct

SEQ ID NO: 823118 - DNA, 15 bp, Homo sapiens
ggtagagctcagctt

SEQ ID NO: 823119 - DNA, 15 bp, Homo sapiens
gtagagctcagcttt

SEQ ID NO: 823120 - DNA, 15 bp, Homo sapiens
tagagctcagctttg

SEQ ID NO: 823121 - DNA, 15 bp, Homo sapiens
agagctcagctttga

SEQ ID NO: 823122 - DNA, 15 bp, Homo sapiens
gagctcagctttgat

SEQ ID NO: 823123 - DNA, 15 bp, Homo sapiens
agctcagctttgatc

SEQ ID NO: 823124 - DNA, 15 bp, Homo sapiens
gctcagctttgatct

SEQ ID NO: 823125 - DNA, 15 bp, Homo sapiens
ctcagctttgatctc

SEQ ID NO: 823126 - DNA, 15 bp, Homo sapiens
tcagctttgatctca

SEQ ID NO: 823127 - DNA, 15 bp, Homo sapiens
cagctttgatctcag

SEQ ID NO: 823128 - DNA, 15 bp, Homo sapiens
agctttgatctcagg

SEQ ID NO: 823129 - DNA, 15 bp, Homo sapiens
gctttgatctcaggc

SEQ ID NO: 823130 - DNA, 15 bp, Homo sapiens
ctttgatctcaggca

SEQ ID NO: 823131 - DNA, 15 bp, Homo sapiens
tttgatctcaggcaa

SEQ ID NO: 823132 - DNA, 15 bp, Homo sapiens
ttgatctcaggcaat

SEQ ID NO: 823133 - DNA, 15 bp, Homo sapiens
tgatctcaggcaatc

SEQ ID NO: 823134 - DNA, 15 bp, Homo sapiens
gatctcaggcaatct

SEQ ID NO: 823135 - DNA, 15 bp, Homo sapiens
atctcaggcaatcta

SEQ ID NO: 823136 - DNA, 15 bp, Homo sapiens
tctcaggcaatctac

SEQ ID NO: 823137 - DNA, 15 bp, Homo sapiens
ctcaggcaatctacc

SEQ ID NO: 823138 - DNA, 15 bp, Homo sapiens
tcaggcaatctacct

SEQ ID NO: 823139 - DNA, 15 bp, Homo sapiens
caggcaatctacctc

SEQ ID NO: 823140 - DNA, 15 bp, Homo sapiens
aggcaatctacctcc

SEQ ID NO: 823141 - DNA, 15 bp, Homo sapiens
ggcaatctacctcca

SEQ ID NO: 823142 - DNA, 15 bp, Homo sapiens
gcaatctacctccaa

SEQ ID NO: 823143 - DNA, 15 bp, Homo sapiens
caatctacctccaaa

SEQ ID NO: 823144 - DNA, 15 bp, Homo sapiens
aatctacctccaaag

SEQ ID NO: 823145 - DNA, 15 bp, Homo sapiens
atctacctccaaagt

SEQ ID NO: 823146 - DNA, 15 bp, Homo sapiens
tctacctccaaagtc

SEQ ID NO: 823147 - DNA, 15 bp, Homo sapiens
ctacctccaaagtcc

SEQ ID NO: 823148 - DNA, 15 bp, Homo sapiens
tacctccaaagtcca

SEQ ID NO: 823149 - DNA, 15 bp, Homo sapiens
acctccaaagtccat

SEQ ID NO: 823150 - DNA, 15 bp, Homo sapiens
cctccaaagtccatg

SEQ ID NO: 823151 - DNA, 15 bp, Homo sapiens
ctccaaagtccatgt

SEQ ID NO: 823152 - DNA, 15 bp, Homo sapiens
tccaaagtccatgtt

SEQ ID NO: 823153 - DNA, 15 bp, Homo sapiens
ccaaagtccatgtta

SEQ ID NO: 823154 - DNA, 15 bp, Homo sapiens
caaagtccatgttac

SEQ ID NO: 823155 - DNA, 15 bp, Homo sapiens
aaagtccatgttact

SEQ ID NO: 823156 - DNA, 15 bp, Homo sapiens
aagtccatgttactt

SEQ ID NO: 823157 - DNA, 15 bp, Homo sapiens
agtccatgttacttg

SEQ ID NO: 823158 - DNA, 15 bp, Homo sapiens
gtccatgttacttga

SEQ ID NO: 823159 - DNA, 15 bp, Homo sapiens
tccatgttacttgat

SEQ ID NO: 823160 - DNA, 15 bp, Homo sapiens
ccatgttacttgata

SEQ ID NO: 823161 - DNA, 15 bp, Homo sapiens
catgttacttgatat

SEQ ID NO: 823162 - DNA, 15 bp, Homo sapiens
atgttacttgatatg

SEQ ID NO: 823163 - DNA, 15 bp, Homo sapiens
tgttacttgatatga

SEQ ID NO: 823164 - DNA, 15 bp, Homo sapiens
gttacttgatatgat

SEQ ID NO: 823165 - DNA, 15 bp, Homo sapiens
ttacttgatatgata

SEQ ID NO: 823166 - DNA, 15 bp, Homo sapiens
tacttgatatgatac

SEQ ID NO: 823167 - DNA, 15 bp, Homo sapiens
acttgatatgatact

SEQ ID NO: 823168 - DNA, 15 bp, Homo sapiens
cttgatatgatacta

SEQ ID NO: 823169 - DNA, 15 bp, Homo sapiens
ttgatatgatactat

SEQ ID NO: 823170 - DNA, 15 bp, Homo sapiens
tgatatgatactatg

SEQ ID NO: 823171 - DNA, 15 bp, Homo sapiens
gatatgatactatgc

SEQ ID NO: 823172 - DNA, 15 bp, Homo sapiens
atatgatactatgct

SEQ ID NO: 823173 - DNA, 15 bp, Homo sapiens
tatgatactatgctg

SEQ ID NO: 823174 - DNA, 15 bp, Homo sapiens
atgatactatgctgt

SEQ ID NO: 823175 - DNA, 15 bp, Homo sapiens
tgatactatgctgtc

SEQ ID NO: 823176 - DNA, 15 bp, Homo sapiens
gatactatgctgtct

SEQ ID NO: 823177 - DNA, 15 bp, Homo sapiens
atactatgctgtctc

SEQ ID NO: 823178 - DNA, 15 bp, Homo sapiens
tactatgctgtctct

SEQ ID NO: 823179 - DNA, 15 bp, Homo sapiens
actatgctgtctctc

SEQ ID NO: 823180 - DNA, 15 bp, Homo sapiens
ctatgctgtctctca

SEQ ID NO: 823181 - DNA, 15 bp, Homo sapiens
tatgctgtctctcaa

SEQ ID NO: 823182 - DNA, 15 bp, Homo sapiens
atgctgtctctcaag

SEQ ID NO: 823183 - DNA, 15 bp, Homo sapiens
tgctgtctctcaagc

SEQ ID NO: 823184 - DNA, 15 bp, Homo sapiens
gctgtctctcaagct

SEQ ID NO: 823185 - DNA, 15 bp, Homo sapiens
ctgtctctcaagcta

SEQ ID NO: 823186 - DNA, 15 bp, Homo sapiens
tgtctctcaagctac

SEQ ID NO: 823187 - DNA, 15 bp, Homo sapiens
gtctctcaagctaca

SEQ ID NO: 823188 - DNA, 15 bp, Homo sapiens
tctctcaagctacaa

SEQ ID NO: 823189 - DNA, 15 bp, Homo sapiens
ctctcaagctacaag

SEQ ID NO: 823190 - DNA, 15 bp, Homo sapiens
tctcaagctacaagt

SEQ ID NO: 823191 - DNA, 15 bp, Homo sapiens
ctcaagctacaagtt

SEQ ID NO: 823192 - DNA, 15 bp, Homo sapiens
tcaagctacaagtta

SEQ ID NO: 823193 - DNA, 15 bp, Homo sapiens
caagctacaagttaa

SEQ ID NO: 823194 - DNA, 15 bp, Homo sapiens
aagctacaagttaac

SEQ ID NO: 823195 - DNA, 15 bp, Homo sapiens
agctacaagttaaca

SEQ ID NO: 823196 - DNA, 15 bp, Homo sapiens
gctacaagttaacac

SEQ ID NO: 823197 - DNA, 15 bp, Homo sapiens
ctacaagttaacaca

SEQ ID NO: 823198 - DNA, 15 bp, Homo sapiens
tacaagttaacacat

SEQ ID NO: 823199 - DNA, 15 bp, Homo sapiens
acaagttaacacatt

SEQ ID NO: 823200 - DNA, 15 bp, Homo sapiens
caagttaacacattt

SEQ ID NO: 823201 - DNA, 15 bp, Homo sapiens
aagttaacacatttt

SEQ ID NO: 823202 - DNA, 15 bp, Homo sapiens
agttaacacattttt

SEQ ID NO: 823203 - DNA, 15 bp, Homo sapiens
gttaacacattttta

SEQ ID NO: 823204 - DNA, 15 bp, Homo sapiens
ttaacacatttttaa

SEQ ID NO: 823205 - DNA, 15 bp, Homo sapiens
taacacatttttaat

SEQ ID NO: 823206 - DNA, 15 bp, Homo sapiens
aacacatttttaata

SEQ ID NO: 823207 - DNA, 15 bp, Homo sapiens
acacatttttaataa

SEQ ID NO: 823208 - DNA, 15 bp, Homo sapiens
cacatttttaataac

SEQ ID NO: 823209 - DNA, 15 bp, Homo sapiens
acatttttaataact

SEQ ID NO: 823210 - DNA, 15 bp, Homo sapiens
catttttaataactt

SEQ ID NO: 823211 - DNA, 15 bp, Homo sapiens
atttttaataactta

SEQ ID NO: 823212 - DNA, 15 bp, Homo sapiens
tttttaataacttac

SEQ ID NO: 823213 - DNA, 15 bp, Homo sapiens
ttttaataacttacc

SEQ ID NO: 823214 - DNA, 15 bp, Homo sapiens
tttaataacttacca

SEQ ID NO: 823215 - DNA, 15 bp, Homo sapiens
ttaataacttaccag

SEQ ID NO: 823216 - DNA, 15 bp, Homo sapiens
taataacttaccagc

SEQ ID NO: 823217 - DNA, 15 bp, Homo sapiens
aataacttaccagcc

SEQ ID NO: 823218 - DNA, 15 bp, Homo sapiens
ataacttaccagcct

SEQ ID NO: 823219 - DNA, 15 bp, Homo sapiens
taacttaccagcctc

SEQ ID NO: 823220 - DNA, 15 bp, Homo sapiens
aacttaccagcctcc

SEQ ID NO: 823221 - DNA, 15 bp, Homo sapiens
acttaccagcctcca

SEQ ID NO: 823222 - DNA, 15 bp, Homo sapiens
cttaccagcctccaa

SEQ ID NO: 823223 - DNA, 15 bp, Homo sapiens
ttaccagcctccaaa

SEQ ID NO: 823224 - DNA, 15 bp, Homo sapiens
taccagcctccaaac

SEQ ID NO: 823225 - DNA, 15 bp, Homo sapiens
accagcctccaaact

SEQ ID NO: 823226 - DNA, 15 bp, Homo sapiens
ccagcctccaaacta

SEQ ID NO: 823227 - DNA, 15 bp, Homo sapiens
cagcctccaaactac

SEQ ID NO: 823228 - DNA, 15 bp, Homo sapiens
agcctccaaactact

SEQ ID NO: 823229 - DNA, 15 bp, Homo sapiens
gcctccaaactactt

SEQ ID NO: 823230 - DNA, 15 bp, Homo sapiens
cctccaaactacttt

SEQ ID NO: 823231 - DNA, 15 bp, Homo sapiens
ctccaaactactttt

SEQ ID NO: 823232 - DNA, 15 bp, Homo sapiens
tccaaactacttttt

SEQ ID NO: 823233 - DNA, 15 bp, Homo sapiens
ccaaactactttttt

SEQ ID NO: 823234 - DNA, 15 bp, Homo sapiens
caaactacttttttc

SEQ ID NO: 823235 - DNA, 15 bp, Homo sapiens
aaactacttttttcc

SEQ ID NO: 823236 - DNA, 15 bp, Homo sapiens
aactacttttttccc

SEQ ID NO: 823237 - DNA, 15 bp, Homo sapiens
actacttttttcccc

SEQ ID NO: 823238 - DNA, 15 bp, Homo sapiens
ctacttttttccccc

SEQ ID NO: 823239 - DNA, 15 bp, Homo sapiens
tacttttttccccca

SEQ ID NO: 823240 - DNA, 15 bp, Homo sapiens
acttttttcccccat

SEQ ID NO: 823241 - DNA, 15 bp, Homo sapiens
cttttttcccccatg

SEQ ID NO: 823242 - DNA, 15 bp, Homo sapiens
ttttttcccccatgt

SEQ ID NO: 823243 - DNA, 15 bp, Homo sapiens
tttttcccccatgtt

SEQ ID NO: 823244 - DNA, 15 bp, Homo sapiens
ttttcccccatgttc

SEQ ID NO: 823245 - DNA, 15 bp, Homo sapiens
tttcccccatgttca

SEQ ID NO: 823246 - DNA, 15 bp, Homo sapiens
ttcccccatgttcac

SEQ ID NO: 823247 - DNA, 15 bp, Homo sapiens
tcccccatgttcacc

SEQ ID NO: 823248 - DNA, 15 bp, Homo sapiens
cccccatgttcacca

SEQ ID NO: 823249 - DNA, 15 bp, Homo sapiens
ccccatgttcaccag

SEQ ID NO: 823250 - DNA, 15 bp, Homo sapiens
cccatgttcaccagt

SEQ ID NO: 823251 - DNA, 15 bp, Homo sapiens
ccatgttcaccagtc

SEQ ID NO: 823252 - DNA, 15 bp, Homo sapiens
catgttcaccagtcc

SEQ ID NO: 823253 - DNA, 15 bp, Homo sapiens
atgttcaccagtccc

SEQ ID NO: 823254 - DNA, 15 bp, Homo sapiens
tgttcaccagtcccc

SEQ ID NO: 823255 - DNA, 15 bp, Homo sapiens
gttcaccagtcccct

SEQ ID NO: 823256 - DNA, 15 bp, Homo sapiens
ttcaccagtcccctc

SEQ ID NO: 823257 - DNA, 15 bp, Homo sapiens
tcaccagtcccctct

SEQ ID NO: 823258 - DNA, 15 bp, Homo sapiens
caccagtcccctctt

SEQ ID NO: 823259 - DNA, 15 bp, Homo sapiens
accagtcccctcttc

SEQ ID NO: 823260 - DNA, 15 bp, Homo sapiens
ccagtcccctcttct

SEQ ID NO: 823261 - DNA, 15 bp, Homo sapiens
cagtcccctcttctg

SEQ ID NO: 823262 - DNA, 15 bp, Homo sapiens
agtcccctcttctga

SEQ ID NO: 823263 - DNA, 15 bp, Homo sapiens
gtcccctcttctgag

SEQ ID NO: 823264 - DNA, 15 bp, Homo sapiens
tcccctcttctgagc

SEQ ID NO: 823265 - DNA, 15 bp, Homo sapiens
cccctcttctgagct

SEQ ID NO: 823266 - DNA, 15 bp, Homo sapiens
ccctcttctgagctt

SEQ ID NO: 823267 - DNA, 15 bp, Homo sapiens
cctcttctgagcttc

SEQ ID NO: 823268 - DNA, 15 bp, Homo sapiens
ctcttctgagcttct

SEQ ID NO: 823269 - DNA, 15 bp, Homo sapiens
tcttctgagcttctt

SEQ ID NO: 823270 - DNA, 15 bp, Homo sapiens
cttctgagcttcttg

SEQ ID NO: 823271 - DNA, 15 bp, Homo sapiens
ttctgagcttcttga

SEQ ID NO: 823272 - DNA, 15 bp, Homo sapiens
tctgagcttcttgac

SEQ ID NO: 823273 - DNA, 15 bp, Homo sapiens
ctgagcttcttgacc

SEQ ID NO: 823274 - DNA, 15 bp, Homo sapiens
tgagcttcttgaccc

SEQ ID NO: 823275 - DNA, 15 bp, Homo sapiens
gagcttcttgaccca

SEQ ID NO: 823276 - DNA, 15 bp, Homo sapiens
agcttcttgacccat

SEQ ID NO: 823277 - DNA, 15 bp, Homo sapiens
gcttcttgacccatt

SEQ ID NO: 823278 - DNA, 15 bp, Homo sapiens
cttcttgacccattc

SEQ ID NO: 823279 - DNA, 15 bp, Homo sapiens
ttcttgacccattct

SEQ ID NO: 823280 - DNA, 15 bp, Homo sapiens
tcttgacccattcta

SEQ ID NO: 823281 - DNA, 15 bp, Homo sapiens
cttgacccattctat

SEQ ID NO: 823282 - DNA, 15 bp, Homo sapiens
ttgacccattctata

SEQ ID NO: 823283 - DNA, 15 bp, Homo sapiens
tgacccattctatac

SEQ ID NO: 823284 - DNA, 15 bp, Homo sapiens
gacccattctataca

SEQ ID NO: 823285 - DNA, 15 bp, Homo sapiens
acccattctatacaa

SEQ ID NO: 823286 - DNA, 15 bp, Homo sapiens
cccattctatacaag

SEQ ID NO: 823287 - DNA, 15 bp, Homo sapiens
ccattctatacaagt

SEQ ID NO: 823288 - DNA, 15 bp, Homo sapiens
cattctatacaagta

SEQ ID NO: 823289 - DNA, 15 bp, Homo sapiens
attctatacaagtag

SEQ ID NO: 823290 - DNA, 15 bp, Homo sapiens
ttctatacaagtagc

SEQ ID NO: 823291 - DNA, 15 bp, Homo sapiens
tctatacaagtagcc

SEQ ID NO: 823292 - DNA, 15 bp, Homo sapiens
ctatacaagtagcca

SEQ ID NO: 823293 - DNA, 15 bp, Homo sapiens
tatacaagtagccaa

SEQ ID NO: 823294 - DNA, 15 bp, Homo sapiens
atacaagtagccaaa

SEQ ID NO: 823295 - DNA, 15 bp, Homo sapiens
tacaagtagccaaat

SEQ ID NO: 823296 - DNA, 15 bp, Homo sapiens
acaagtagccaaata

SEQ ID NO: 823297 - DNA, 15 bp, Homo sapiens
caagtagccaaataa

SEQ ID NO: 823298 - DNA, 15 bp, Homo sapiens
aagtagccaaataaa

SEQ ID NO: 823299 - DNA, 15 bp, Homo sapiens
agtagccaaataaat

SEQ ID NO: 823300 - DNA, 15 bp, Homo sapiens
gtagccaaataaata

SEQ ID NO: 823301 - DNA, 15 bp, Homo sapiens
tagccaaataaataa

SEQ ID NO: 823302 - DNA, 15 bp, Homo sapiens
agccaaataaataaa

SEQ ID NO: 823303 - DNA, 15 bp, Homo sapiens
gccaaataaataaaa

SEQ ID NO: 823304 - DNA, 15 bp, Homo sapiens
ccaaataaataaaaa

SEQ ID NO: 823305 - DNA, 15 bp, Homo sapiens
caaataaataaaaac

SEQ ID NO: 823306 - DNA, 15 bp, Homo sapiens
aaataaataaaaaca

SEQ ID NO: 823307 - DNA, 15 bp, Homo sapiens
aataaataaaaacaa

SEQ ID NO: 823308 - DNA, 15 bp, Homo sapiens
ataaataaaaacaat

SEQ ID NO: 823309 - DNA, 15 bp, Homo sapiens
taaataaaaacaatc

SEQ ID NO: 823310 - DNA, 15 bp, Homo sapiens
aaataaaaacaatcc

SEQ ID NO: 823311 - DNA, 15 bp, Homo sapiens
aataaaaacaatcca

SEQ ID NO: 823312 - DNA, 15 bp, Homo sapiens
ataaaaacaatccat

SEQ ID NO: 823313 - DNA, 15 bp, Homo sapiens
taaaaacaatccatg

SEQ ID NO: 823314 - DNA, 15 bp, Homo sapiens
aaaaacaatccatgt

SEQ ID NO: 823315 - DNA, 15 bp, Homo sapiens
aaaacaatccatgtt

SEQ ID NO: 823316 - DNA, 15 bp, Homo sapiens
aaacaatccatgttt

SEQ ID NO: 823317 - DNA, 15 bp, Homo sapiens
aacaatccatgtttt

SEQ ID NO: 823318 - DNA, 15 bp, Homo sapiens
acaatccatgttttt

SEQ ID NO: 823319 - DNA, 15 bp, Homo sapiens
caatccatgttttta

SEQ ID NO: 823320 - DNA, 15 bp, Homo sapiens
aatccatgtttttac

SEQ ID NO: 823321 - DNA, 15 bp, Homo sapiens
atccatgtttttacc

SEQ ID NO: 823322 - DNA, 15 bp, Homo sapiens
tccatgtttttacca

SEQ ID NO: 823323 - DNA, 15 bp, Homo sapiens
ccatgtttttaccat

SEQ ID NO: 823324 - DNA, 15 bp, Homo sapiens
catgtttttaccatt

SEQ ID NO: 823325 - DNA, 15 bp, Homo sapiens
atgtttttaccatta

SEQ ID NO: 823326 - DNA, 15 bp, Homo sapiens
tgtttttaccattag

SEQ ID NO: 823327 - DNA, 15 bp, Homo sapiens
gtttttaccattagt

SEQ ID NO: 823328 - DNA, 15 bp, Homo sapiens
tttttaccattagtc

SEQ ID NO: 823329 - DNA, 15 bp, Homo sapiens
ttttaccattagtcc

SEQ ID NO: 823330 - DNA, 15 bp, Homo sapiens
tttaccattagtcca

SEQ ID NO: 823331 - DNA, 15 bp, Homo sapiens
ttaccattagtccat

SEQ ID NO: 823332 - DNA, 15 bp, Homo sapiens
taccattagtccatg

SEQ ID NO: 823333 - DNA, 15 bp, Homo sapiens
accattagtccatgt

SEQ ID NO: 823334 - DNA, 15 bp, Homo sapiens
ccattagtccatgtt

SEQ ID NO: 823335 - DNA, 15 bp, Homo sapiens
cattagtccatgttg

SEQ ID NO: 823336 - DNA, 15 bp, Homo sapiens
attagtccatgttga

SEQ ID NO: 823337 - DNA, 15 bp, Homo sapiens
ttagtccatgttgaa

SEQ ID NO: 823338 - DNA, 15 bp, Homo sapiens
tagtccatgttgaaa

SEQ ID NO: 823339 - DNA, 15 bp, Homo sapiens
agtccatgttgaaat

SEQ ID NO: 823340 - DNA, 15 bp, Homo sapiens
gtccatgttgaaata

SEQ ID NO: 823341 - DNA, 15 bp, Homo sapiens
tccatgttgaaatag

SEQ ID NO: 823342 - DNA, 15 bp, Homo sapiens
ccatgttgaaatagt

SEQ ID NO: 823343 - DNA, 15 bp, Homo sapiens
catgttgaaatagta

SEQ ID NO: 823344 - DNA, 15 bp, Homo sapiens
atgttgaaatagtat

SEQ ID NO: 823345 - DNA, 15 bp, Homo sapiens
tgttgaaatagtatc

SEQ ID NO: 823346 - DNA, 15 bp, Homo sapiens
gttgaaatagtatca

SEQ ID NO: 823347 - DNA, 15 bp, Homo sapiens
ttgaaatagtatcat

SEQ ID NO: 823348 - DNA, 15 bp, Homo sapiens
tgaaatagtatcatg

SEQ ID NO: 823349 - DNA, 15 bp, Homo sapiens
gaaatagtatcatgc

SEQ ID NO: 823350 - DNA, 15 bp, Homo sapiens
aaatagtatcatgct

SEQ ID NO: 823351 - DNA, 15 bp, Homo sapiens
aatagtatcatgcta

SEQ ID NO: 823352 - DNA, 15 bp, Homo sapiens
atagtatcatgctag

SEQ ID NO: 823353 - DNA, 15 bp, Homo sapiens
tagtatcatgctaga

SEQ ID NO: 823354 - DNA, 15 bp, Homo sapiens
agtatcatgctagat

SEQ ID NO: 823355 - DNA, 15 bp, Homo sapiens
gtatcatgctagatg

SEQ ID NO: 823356 - DNA, 15 bp, Homo sapiens
tatcatgctagatgt

SEQ ID NO: 823357 - DNA, 15 bp, Homo sapiens
atcatgctagatgtt

SEQ ID NO: 823358 - DNA, 15 bp, Homo sapiens
tcatgctagatgtta

SEQ ID NO: 823359 - DNA, 15 bp, Homo sapiens
catgctagatgttat

SEQ ID NO: 823360 - DNA, 15 bp, Homo sapiens
atgctagatgttatg

SEQ ID NO: 823361 - DNA, 15 bp, Homo sapiens
tgctagatgttatgg

SEQ ID NO: 823362 - DNA, 15 bp, Homo sapiens
gctagatgttatggg

SEQ ID NO: 823363 - DNA, 15 bp, Homo sapiens
ctagatgttatgggc

SEQ ID NO: 823364 - DNA, 15 bp, Homo sapiens
tagatgttatgggct

SEQ ID NO: 823365 - DNA, 15 bp, Homo sapiens
agatgttatgggctg

SEQ ID NO: 823366 - DNA, 15 bp, Homo sapiens
gatgttatgggctgc

SEQ ID NO: 823367 - DNA, 15 bp, Homo sapiens
atgttatgggctgct

SEQ ID NO: 823368 - DNA, 15 bp, Homo sapiens
tgttatgggctgcta

SEQ ID NO: 823369 - DNA, 15 bp, Homo sapiens
gttatgggctgctat

SEQ ID NO: 823370 - DNA, 15 bp, Homo sapiens
ttatgggctgctatg

SEQ ID NO: 823371 - DNA, 15 bp, Homo sapiens
tatgggctgctatgg

SEQ ID NO: 823372 - DNA, 15 bp, Homo sapiens
atgggctgctatggt

SEQ ID NO: 823373 - DNA, 15 bp, Homo sapiens
tgggctgctatggtc

SEQ ID NO: 823374 - DNA, 15 bp, Homo sapiens
gggctgctatggtct

SEQ ID NO: 823375 - DNA, 15 bp, Homo sapiens
ggctgctatggtctg

SEQ ID NO: 823376 - DNA, 15 bp, Homo sapiens
gctgctatggtctga

SEQ ID NO: 823377 - DNA, 15 bp, Homo sapiens
ctgctatggtctgaa

SEQ ID NO: 823378 - DNA, 15 bp, Homo sapiens
tgctatggtctgaat

SEQ ID NO: 823379 - DNA, 15 bp, Homo sapiens
gctatggtctgaatg

SEQ ID NO: 823380 - DNA, 15 bp, Homo sapiens
ctatggtctgaatgt

SEQ ID NO: 823381 - DNA, 15 bp, Homo sapiens
tatggtctgaatgtt

SEQ ID NO: 823382 - DNA, 15 bp, Homo sapiens
atggtctgaatgttt

SEQ ID NO: 823383 - DNA, 15 bp, Homo sapiens
tggtctgaatgtttg

SEQ ID NO: 823384 - DNA, 15 bp, Homo sapiens
ggtctgaatgtttgt

SEQ ID NO: 823385 - DNA, 15 bp, Homo sapiens
gtctgaatgtttgta

SEQ ID NO: 823386 - DNA, 15 bp, Homo sapiens
tctgaatgtttgtat

SEQ ID NO: 823387 - DNA, 15 bp, Homo sapiens
ctgaatgtttgtatc

SEQ ID NO: 823388 - DNA, 15 bp, Homo sapiens
tgaatgtttgtatct

SEQ ID NO: 823389 - DNA, 15 bp, Homo sapiens
gaatgtttgtatctg

SEQ ID NO: 823390 - DNA, 15 bp, Homo sapiens
aatgtttgtatctgc

SEQ ID NO: 823391 - DNA, 15 bp, Homo sapiens
atgtttgtatctgcc

SEQ ID NO: 823392 - DNA, 15 bp, Homo sapiens
tgtttgtatctgccc

SEQ ID NO: 823393 - DNA, 15 bp, Homo sapiens
gtttgtatctgcccc

SEQ ID NO: 823394 - DNA, 15 bp, Homo sapiens
tttgtatctgcccca

SEQ ID NO: 823395 - DNA, 15 bp, Homo sapiens
ttgtatctgccccaa

SEQ ID NO: 823396 - DNA, 15 bp, Homo sapiens
tgtatctgccccaaa

SEQ ID NO: 823397 - DNA, 15 bp, Homo sapiens
gtatctgccccaaat

SEQ ID NO: 823398 - DNA, 15 bp, Homo sapiens
tatctgccccaaatg

SEQ ID NO: 823399 - DNA, 15 bp, Homo sapiens
atctgccccaaatgt

SEQ ID NO: 823400 - DNA, 15 bp, Homo sapiens
tctgccccaaatgta

SEQ ID NO: 823401 - DNA, 15 bp, Homo sapiens
ctgccccaaatgtat

SEQ ID NO: 823402 - DNA, 15 bp, Homo sapiens
tgccccaaatgtatg

SEQ ID NO: 823403 - DNA, 15 bp, Homo sapiens
gccccaaatgtatgt

SEQ ID NO: 823404 - DNA, 15 bp, Homo sapiens
ccccaaatgtatgtg

SEQ ID NO: 823405 - DNA, 15 bp, Homo sapiens
cccaaatgtatgtgt

SEQ ID NO: 823406 - DNA, 15 bp, Homo sapiens
ccaaatgtatgtgtt

SEQ ID NO: 823407 - DNA, 15 bp, Homo sapiens
caaatgtatgtgttg

SEQ ID NO: 823408 - DNA, 15 bp, Homo sapiens
aaatgtatgtgttga

SEQ ID NO: 823409 - DNA, 15 bp, Homo sapiens
aatgtatgtgttgaa

SEQ ID NO: 823410 - DNA, 15 bp, Homo sapiens
atgtatgtgttgaaa

SEQ ID NO: 823411 - DNA, 15 bp, Homo sapiens
tgtatgtgttgaaat

SEQ ID NO: 823412 - DNA, 15 bp, Homo sapiens
gtatgtgttgaaatg

SEQ ID NO: 823413 - DNA, 15 bp, Homo sapiens
tatgtgttgaaatga

SEQ ID NO: 823414 - DNA, 15 bp, Homo sapiens
atgtgttgaaatgaa

SEQ ID NO: 823415 - DNA, 15 bp, Homo sapiens
tgtgttgaaatgaaa

SEQ ID NO: 823416 - DNA, 15 bp, Homo sapiens
gtgttgaaatgaaat

SEQ ID NO: 823417 - DNA, 15 bp, Homo sapiens
tgttgaaatgaaatc

SEQ ID NO: 823418 - DNA, 15 bp, Homo sapiens
gttgaaatgaaatcc

SEQ ID NO: 823419 - DNA, 15 bp, Homo sapiens
ttgaaatgaaatccc

SEQ ID NO: 823420 - DNA, 15 bp, Homo sapiens
tgaaatgaaatccca

SEQ ID NO: 823421 - DNA, 15 bp, Homo sapiens
gaaatgaaatcccaa

SEQ ID NO: 823422 - DNA, 15 bp, Homo sapiens
aaatgaaatcccaat

SEQ ID NO: 823423 - DNA, 15 bp, Homo sapiens
aatgaaatcccaatg

SEQ ID NO: 823424 - DNA, 15 bp, Homo sapiens
atgaaatcccaatgc

SEQ ID NO: 823425 - DNA, 15 bp, Homo sapiens
tgaaatcccaatgcc

SEQ ID NO: 823426 - DNA, 15 bp, Homo sapiens
gaaatcccaatgccg

SEQ ID NO: 823427 - DNA, 15 bp, Homo sapiens
aaatcccaatgccgt

SEQ ID NO: 823428 - DNA, 15 bp, Homo sapiens
aatcccaatgccgtc

SEQ ID NO: 823429 - DNA, 15 bp, Homo sapiens
atcccaatgccgtcg

SEQ ID NO: 823430 - DNA, 15 bp, Homo sapiens
tcccaatgccgtcgt

SEQ ID NO: 823431 - DNA, 15 bp, Homo sapiens
cccaatgccgtcgtg

SEQ ID NO: 823432 - DNA, 15 bp, Homo sapiens
ccaatgccgtcgtgt

SEQ ID NO: 823433 - DNA, 15 bp, Homo sapiens
caatgccgtcgtgtt

SEQ ID NO: 823434 - DNA, 15 bp, Homo sapiens
aatgccgtcgtgttg

SEQ ID NO: 823435 - DNA, 15 bp, Homo sapiens
atgccgtcgtgttgg

SEQ ID NO: 823436 - DNA, 15 bp, Homo sapiens
tgccgtcgtgttgga

SEQ ID NO: 823437 - DNA, 15 bp, Homo sapiens
gccgtcgtgttggag

SEQ ID NO: 823438 - DNA, 15 bp, Homo sapiens
ccgtcgtgttggaga

SEQ ID NO: 823439 - DNA, 15 bp, Homo sapiens
cgtcgtgttggagat

SEQ ID NO: 823440 - DNA, 15 bp, Homo sapiens
gtcgtgttggagatg

SEQ ID NO: 823441 - DNA, 15 bp, Homo sapiens
tcgtgttggagatgg

SEQ ID NO: 823442 - DNA, 15 bp, Homo sapiens
cgtgttggagatggg

SEQ ID NO: 823443 - DNA, 15 bp, Homo sapiens
gtgttggagatgggg

SEQ ID NO: 823444 - DNA, 15 bp, Homo sapiens
tgttggagatggggc

SEQ ID NO: 823445 - DNA, 15 bp, Homo sapiens
gttggagatggggcc

SEQ ID NO: 823446 - DNA, 15 bp, Homo sapiens
ttggagatggggcct

SEQ ID NO: 823447 - DNA, 15 bp, Homo sapiens
tggagatggggcctc

SEQ ID NO: 823448 - DNA, 15 bp, Homo sapiens
ggagatggggcctct

SEQ ID NO: 823449 - DNA, 15 bp, Homo sapiens
gagatggggcctctg

SEQ ID NO: 823450 - DNA, 15 bp, Homo sapiens
agatggggcctctgg

SEQ ID NO: 823451 - DNA, 15 bp, Homo sapiens
gatggggcctctggg

SEQ ID NO: 823452 - DNA, 15 bp, Homo sapiens
atggggcctctggga

SEQ ID NO: 823453 - DNA, 15 bp, Homo sapiens
tggggcctctgggag

SEQ ID NO: 823454 - DNA, 15 bp, Homo sapiens
ggggcctctgggaga

SEQ ID NO: 823455 - DNA, 15 bp, Homo sapiens
gggcctctgggagat

SEQ ID NO: 823456 - DNA, 15 bp, Homo sapiens
ggcctctgggagatg

SEQ ID NO: 823457 - DNA, 15 bp, Homo sapiens
gcctctgggagatga

SEQ ID NO: 823458 - DNA, 15 bp, Homo sapiens
cctctgggagatgat

SEQ ID NO: 823459 - DNA, 15 bp, Homo sapiens
ctctgggagatgatt

SEQ ID NO: 823460 - DNA, 15 bp, Homo sapiens
tctgggagatgatta

SEQ ID NO: 823461 - DNA, 15 bp, Homo sapiens
ctgggagatgattag

SEQ ID NO: 823462 - DNA, 15 bp, Homo sapiens
tgggagatgattaga

SEQ ID NO: 823463 - DNA, 15 bp, Homo sapiens
gggagatgattagat

SEQ ID NO: 823464 - DNA, 15 bp, Homo sapiens
ggagatgattagatc

SEQ ID NO: 823465 - DNA, 15 bp, Homo sapiens
gagatgattagatca

SEQ ID NO: 823466 - DNA, 15 bp, Homo sapiens
agatgattagatcat

SEQ ID NO: 823467 - DNA, 15 bp, Homo sapiens
gatgattagatcatg

SEQ ID NO: 823468 - DNA, 15 bp, Homo sapiens
atgattagatcatga

SEQ ID NO: 823469 - DNA, 15 bp, Homo sapiens
tgattagatcatgag

SEQ ID NO: 823470 - DNA, 15 bp, Homo sapiens
gattagatcatgagg

SEQ ID NO: 823471 - DNA, 15 bp, Homo sapiens
attagatcatgaggg

SEQ ID NO: 823472 - DNA, 15 bp, Homo sapiens
ttagatcatgagggt

SEQ ID NO: 823473 - DNA, 15 bp, Homo sapiens
tagatcatgagggtg

SEQ ID NO: 823474 - DNA, 15 bp, Homo sapiens
agatcatgagggtgg

SEQ ID NO: 823475 - DNA, 15 bp, Homo sapiens
gatcatgagggtgga

SEQ ID NO: 823476 - DNA, 15 bp, Homo sapiens
atcatgagggtggag

SEQ ID NO: 823477 - DNA, 15 bp, Homo sapiens
tcatgagggtggagc

SEQ ID NO: 823478 - DNA, 15 bp, Homo sapiens
catgagggtggagcc

SEQ ID NO: 823479 - DNA, 15 bp, Homo sapiens
atgagggtggagccc

SEQ ID NO: 823480 - DNA, 15 bp, Homo sapiens
tgagggtggagccct

SEQ ID NO: 823481 - DNA, 15 bp, Homo sapiens
gagggtggagccctc

SEQ ID NO: 823482 - DNA, 15 bp, Homo sapiens
agggtggagccctca

SEQ ID NO: 823483 - DNA, 15 bp, Homo sapiens
gggtggagccctcag

SEQ ID NO: 823484 - DNA, 15 bp, Homo sapiens
ggtggagccctcagg

SEQ ID NO: 823485 - DNA, 15 bp, Homo sapiens
gtggagccctcagga

SEQ ID NO: 823486 - DNA, 15 bp, Homo sapiens
tggagccctcaggaa

SEQ ID NO: 823487 - DNA, 15 bp, Homo sapiens
ggagccctcaggaat

SEQ ID NO: 823488 - DNA, 15 bp, Homo sapiens
gagccctcaggaatg

SEQ ID NO: 823489 - DNA, 15 bp, Homo sapiens
agccctcaggaatgg

SEQ ID NO: 823490 - DNA, 15 bp, Homo sapiens
gccctcaggaatggt

SEQ ID NO: 823491 - DNA, 15 bp, Homo sapiens
ccctcaggaatggta

SEQ ID NO: 823492 - DNA, 15 bp, Homo sapiens
cctcaggaatggtat

SEQ ID NO: 823493 - DNA, 15 bp, Homo sapiens
ctcaggaatggtatt

SEQ ID NO: 823494 - DNA, 15 bp, Homo sapiens
tcaggaatggtattg

SEQ ID NO: 823495 - DNA, 15 bp, Homo sapiens
caggaatggtattgg

SEQ ID NO: 823496 - DNA, 15 bp, Homo sapiens
aggaatggtattggt

SEQ ID NO: 823497 - DNA, 15 bp, Homo sapiens
ggaatggtattggtg

SEQ ID NO: 823498 - DNA, 15 bp, Homo sapiens
gaatggtattggtgc

SEQ ID NO: 823499 - DNA, 15 bp, Homo sapiens
aatggtattggtgcc

SEQ ID NO: 823500 - DNA, 15 bp, Homo sapiens
atggtattggtgccc

SEQ ID NO: 823501 - DNA, 15 bp, Homo sapiens
tggtattggtgccct

SEQ ID NO: 823502 - DNA, 15 bp, Homo sapiens
ggtattggtgccctt

SEQ ID NO: 823503 - DNA, 15 bp, Homo sapiens
gtattggtgccctta

SEQ ID NO: 823504 - DNA, 15 bp, Homo sapiens
tattggtgcccttat

SEQ ID NO: 823505 - DNA, 15 bp, Homo sapiens
attggtgcccttatg

SEQ ID NO: 823506 - DNA, 15 bp, Homo sapiens
ttggtgcccttatga

SEQ ID NO: 823507 - DNA, 15 bp, Homo sapiens
tggtgcccttatgaa

SEQ ID NO: 823508 - DNA, 15 bp, Homo sapiens
ggtgcccttatgaaa

SEQ ID NO: 823509 - DNA, 15 bp, Homo sapiens
gtgcccttatgaaag

SEQ ID NO: 823510 - DNA, 15 bp, Homo sapiens
tgcccttatgaaaga

SEQ ID NO: 823511 - DNA, 15 bp, Homo sapiens
gcccttatgaaagaa

SEQ ID NO: 823512 - DNA, 15 bp, Homo sapiens
cccttatgaaagaag

SEQ ID NO: 823513 - DNA, 15 bp, Homo sapiens
ccttatgaaagaagc

SEQ ID NO: 823514 - DNA, 15 bp, Homo sapiens
cttatgaaagaagcc

SEQ ID NO: 823515 - DNA, 15 bp, Homo sapiens
ttatgaaagaagccc

SEQ ID NO: 823516 - DNA, 15 bp, Homo sapiens
tatgaaagaagccct

SEQ ID NO: 823517 - DNA, 15 bp, Homo sapiens
atgaaagaagccctt

SEQ ID NO: 823518 - DNA, 15 bp, Homo sapiens
tgaaagaagcccttg

SEQ ID NO: 823519 - DNA, 15 bp, Homo sapiens
gaaagaagcccttgg

SEQ ID NO: 823520 - DNA, 15 bp, Homo sapiens
aaagaagcccttggg

SEQ ID NO: 823521 - DNA, 15 bp, Homo sapiens
aagaagcccttggga

SEQ ID NO: 823522 - DNA, 15 bp, Homo sapiens
agaagcccttgggag

SEQ ID NO: 823523 - DNA, 15 bp, Homo sapiens
gaagcccttgggagg

SEQ ID NO: 823524 - DNA, 15 bp, Homo sapiens
aagcccttgggaggc

SEQ ID NO: 823525 - DNA, 15 bp, Homo sapiens
agcccttgggaggct

SEQ ID NO: 823526 - DNA, 15 bp, Homo sapiens
gcccttgggaggctg

SEQ ID NO: 823527 - DNA, 15 bp, Homo sapiens
cccttgggaggctgt

SEQ ID NO: 823528 - DNA, 15 bp, Homo sapiens
ccttgggaggctgtt

SEQ ID NO: 823529 - DNA, 15 bp, Homo sapiens
cttgggaggctgttt

SEQ ID NO: 823530 - DNA, 15 bp, Homo sapiens
ttgggaggctgtttg

SEQ ID NO: 823531 - DNA, 15 bp, Homo sapiens
tgggaggctgtttgt

SEQ ID NO: 823532 - DNA, 15 bp, Homo sapiens
gggaggctgtttgtc

SEQ ID NO: 823533 - DNA, 15 bp, Homo sapiens
ggaggctgtttgtcc

SEQ ID NO: 823534 - DNA, 15 bp, Homo sapiens
gaggctgtttgtccc

SEQ ID NO: 823535 - DNA, 15 bp, Homo sapiens
aggctgtttgtccct

SEQ ID NO: 823536 - DNA, 15 bp, Homo sapiens
ggctgtttgtccctc

SEQ ID NO: 823537 - DNA, 15 bp, Homo sapiens
gctgtttgtccctcc

SEQ ID NO: 823538 - DNA, 15 bp, Homo sapiens
ctgtttgtccctccc

SEQ ID NO: 823539 - DNA, 15 bp, Homo sapiens
tgtttgtccctccca

SEQ ID NO: 823540 - DNA, 15 bp, Homo sapiens
gtttgtccctcccac

SEQ ID NO: 823541 - DNA, 15 bp, Homo sapiens
tttgtccctcccacc

SEQ ID NO: 823542 - DNA, 15 bp, Homo sapiens
ttgtccctcccacca

SEQ ID NO: 823543 - DNA, 15 bp, Homo sapiens
tgtccctcccaccat

SEQ ID NO: 823544 - DNA, 15 bp, Homo sapiens
gtccctcccaccatg

SEQ ID NO: 823545 - DNA, 15 bp, Homo sapiens
tccctcccaccatgc

SEQ ID NO: 823546 - DNA, 15 bp, Homo sapiens
ccctcccaccatgca

SEQ ID NO: 823547 - DNA, 15 bp, Homo sapiens
cctcccaccatgcag

SEQ ID NO: 823548 - DNA, 15 bp, Homo sapiens
ctcccaccatgcagg

SEQ ID NO: 823549 - DNA, 15 bp, Homo sapiens
tcccaccatgcaggg

SEQ ID NO: 823550 - DNA, 15 bp, Homo sapiens
cccaccatgcaggga

SEQ ID NO: 823551 - DNA, 15 bp, Homo sapiens
ccaccatgcagggaa

SEQ ID NO: 823552 - DNA, 15 bp, Homo sapiens
caccatgcagggaaa

SEQ ID NO: 823553 - DNA, 15 bp, Homo sapiens
accatgcagggaaac

SEQ ID NO: 823554 - DNA, 15 bp, Homo sapiens
ccatgcagggaaaca

SEQ ID NO: 823555 - DNA, 15 bp, Homo sapiens
catgcagggaaacaa

SEQ ID NO: 823556 - DNA, 15 bp, Homo sapiens
atgcagggaaacaag

SEQ ID NO: 823557 - DNA, 15 bp, Homo sapiens
tgcagggaaacaaga

SEQ ID NO: 823558 - DNA, 15 bp, Homo sapiens
gcagggaaacaagaa

SEQ ID NO: 823559 - DNA, 15 bp, Homo sapiens
cagggaaacaagaaa

SEQ ID NO: 823560 - DNA, 15 bp, Homo sapiens
agggaaacaagaaag

SEQ ID NO: 823561 - DNA, 15 bp, Homo sapiens
gggaaacaagaaagt

SEQ ID NO: 823562 - DNA, 15 bp, Homo sapiens
ggaaacaagaaagtg

SEQ ID NO: 823563 - DNA, 15 bp, Homo sapiens
gaaacaagaaagtgc

SEQ ID NO: 823564 - DNA, 15 bp, Homo sapiens
aaacaagaaagtgcc

SEQ ID NO: 823565 - DNA, 15 bp, Homo sapiens
aacaagaaagtgcca

SEQ ID NO: 823566 - DNA, 15 bp, Homo sapiens
acaagaaagtgccat

SEQ ID NO: 823567 - DNA, 15 bp, Homo sapiens
caagaaagtgccatc

SEQ ID NO: 823568 - DNA, 15 bp, Homo sapiens
aagaaagtgccatct

SEQ ID NO: 823569 - DNA, 15 bp, Homo sapiens
agaaagtgccatcta

SEQ ID NO: 823570 - DNA, 15 bp, Homo sapiens
gaaagtgccatctat

SEQ ID NO: 823571 - DNA, 15 bp, Homo sapiens
aaagtgccatctatg

SEQ ID NO: 823572 - DNA, 15 bp, Homo sapiens
aagtgccatctatgg

SEQ ID NO: 823573 - DNA, 15 bp, Homo sapiens
agtgccatctatgga

SEQ ID NO: 823574 - DNA, 15 bp, Homo sapiens
gtgccatctatggag

SEQ ID NO: 823575 - DNA, 15 bp, Homo sapiens
tgccatctatggagc

SEQ ID NO: 823576 - DNA, 15 bp, Homo sapiens
gccatctatggagca

SEQ ID NO: 823577 - DNA, 15 bp, Homo sapiens
ccatctatggagcag

SEQ ID NO: 823578 - DNA, 15 bp, Homo sapiens
catctatggagcaga

SEQ ID NO: 823579 - DNA, 15 bp, Homo sapiens
atctatggagcagag

SEQ ID NO: 823580 - DNA, 15 bp, Homo sapiens
tctatggagcagaga

SEQ ID NO: 823581 - DNA, 15 bp, Homo sapiens
ctatggagcagagaa

SEQ ID NO: 823582 - DNA, 15 bp, Homo sapiens
tatggagcagagaaa

SEQ ID NO: 823583 - DNA, 15 bp, Homo sapiens
atggagcagagaaaa

SEQ ID NO: 823584 - DNA, 15 bp, Homo sapiens
tggagcagagaaaaa

SEQ ID NO: 823585 - DNA, 15 bp, Homo sapiens
ggagcagagaaaaaa

SEQ ID NO: 823586 - DNA, 15 bp, Homo sapiens
gagcagagaaaaaac

SEQ ID NO: 823587 - DNA, 15 bp, Homo sapiens
agcagagaaaaaacc

SEQ ID NO: 823588 - DNA, 15 bp, Homo sapiens
gcagagaaaaaaccc

SEQ ID NO: 823589 - DNA, 15 bp, Homo sapiens
cagagaaaaaaccct

SEQ ID NO: 823590 - DNA, 15 bp, Homo sapiens
agagaaaaaaccctc

SEQ ID NO: 823591 - DNA, 15 bp, Homo sapiens
gagaaaaaaccctcc

SEQ ID NO: 823592 - DNA, 15 bp, Homo sapiens
agaaaaaaccctccc

SEQ ID NO: 823593 - DNA, 15 bp, Homo sapiens
gaaaaaaccctcccc

SEQ ID NO: 823594 - DNA, 15 bp, Homo sapiens
aaaaaaccctcccca

SEQ ID NO: 823595 - DNA, 15 bp, Homo sapiens
aaaaaccctccccag

SEQ ID NO: 823596 - DNA, 15 bp, Homo sapiens
aaaaccctccccaga

SEQ ID NO: 823597 - DNA, 15 bp, Homo sapiens
aaaccctccccagat

SEQ ID NO: 823598 - DNA, 15 bp, Homo sapiens
aaccctccccagatg

SEQ ID NO: 823599 - DNA, 15 bp, Homo sapiens
accctccccagatgc

SEQ ID NO: 823600 - DNA, 15 bp, Homo sapiens
ccctccccagatgct

SEQ ID NO: 823601 - DNA, 15 bp, Homo sapiens
cctccccagatgctg

SEQ ID NO: 823602 - DNA, 15 bp, Homo sapiens
ctccccagatgctga

SEQ ID NO: 823603 - DNA, 15 bp, Homo sapiens
tccccagatgctgaa

SEQ ID NO: 823604 - DNA, 15 bp, Homo sapiens
ccccagatgctgaat

SEQ ID NO: 823605 - DNA, 15 bp, Homo sapiens
cccagatgctgaatc

SEQ ID NO: 823606 - DNA, 15 bp, Homo sapiens
ccagatgctgaatct

SEQ ID NO: 823607 - DNA, 15 bp, Homo sapiens
cagatgctgaatctg

SEQ ID NO: 823608 - DNA, 15 bp, Homo sapiens
agatgctgaatctgt

SEQ ID NO: 823609 - DNA, 15 bp, Homo sapiens
gatgctgaatctgtt

SEQ ID NO: 823610 - DNA, 15 bp, Homo sapiens
atgctgaatctgttg

SEQ ID NO: 823611 - DNA, 15 bp, Homo sapiens
tgctgaatctgttgt

SEQ ID NO: 823612 - DNA, 15 bp, Homo sapiens
gctgaatctgttgtc

SEQ ID NO: 823613 - DNA, 15 bp, Homo sapiens
ctgaatctgttgtcg

SEQ ID NO: 823614 - DNA, 15 bp, Homo sapiens
tgaatctgttgtcgc

SEQ ID NO: 823615 - DNA, 15 bp, Homo sapiens
gaatctgttgtcgcc

SEQ ID NO: 823616 - DNA, 15 bp, Homo sapiens
aatctgttgtcgcct

SEQ ID NO: 823617 - DNA, 15 bp, Homo sapiens
atctgttgtcgcctt

SEQ ID NO: 823618 - DNA, 15 bp, Homo sapiens
tctgttgtcgccttg

SEQ ID NO: 823619 - DNA, 15 bp, Homo sapiens
ctgttgtcgccttga

SEQ ID NO: 823620 - DNA, 15 bp, Homo sapiens
tgttgtcgccttgat

SEQ ID NO: 823621 - DNA, 15 bp, Homo sapiens
gttgtcgccttgatc

SEQ ID NO: 823622 - DNA, 15 bp, Homo sapiens
ttgtcgccttgatct

SEQ ID NO: 823623 - DNA, 15 bp, Homo sapiens
tgtcgccttgatctg

SEQ ID NO: 823624 - DNA, 15 bp, Homo sapiens
gtcgccttgatctgg

SEQ ID NO: 823625 - DNA, 15 bp, Homo sapiens
tcgccttgatctggg

SEQ ID NO: 823626 - DNA, 15 bp, Homo sapiens
cgccttgatctggga

SEQ ID NO: 823627 - DNA, 15 bp, Homo sapiens
gccttgatctgggac

SEQ ID NO: 823628 - DNA, 15 bp, Homo sapiens
ccttgatctgggaca

SEQ ID NO: 823629 - DNA, 15 bp, Homo sapiens
cttgatctgggacat

SEQ ID NO: 823630 - DNA, 15 bp, Homo sapiens
ttgatctgggacatt

SEQ ID NO: 823631 - DNA, 15 bp, Homo sapiens
tgatctgggacattc

SEQ ID NO: 823632 - DNA, 15 bp, Homo sapiens
gatctgggacattcc

SEQ ID NO: 823633 - DNA, 15 bp, Homo sapiens
atctgggacattccg

SEQ ID NO: 823634 - DNA, 15 bp, Homo sapiens
tctgggacattccgg

SEQ ID NO: 823635 - DNA, 15 bp, Homo sapiens
ctgggacattccggc

SEQ ID NO: 823636 - DNA, 15 bp, Homo sapiens
tgggacattccggcc

SEQ ID NO: 823637 - DNA, 15 bp, Homo sapiens
gggacattccggcct

SEQ ID NO: 823638 - DNA, 15 bp, Homo sapiens
ggacattccggcctt

SEQ ID NO: 823639 - DNA, 15 bp, Homo sapiens
gacattccggccttt

SEQ ID NO: 823640 - DNA, 15 bp, Homo sapiens
acattccggccttta

SEQ ID NO: 823641 - DNA, 15 bp, Homo sapiens
cattccggcctttag

SEQ ID NO: 823642 - DNA, 15 bp, Homo sapiens
attccggcctttaga

SEQ ID NO: 823643 - DNA, 15 bp, Homo sapiens
ttccggcctttagaa

SEQ ID NO: 823644 - DNA, 15 bp, Homo sapiens
tccggcctttagaac

SEQ ID NO: 823645 - DNA, 15 bp, Homo sapiens
ccggcctttagaact

SEQ ID NO: 823646 - DNA, 15 bp, Homo sapiens
cggcctttagaactg

SEQ ID NO: 823647 - DNA, 15 bp, Homo sapiens
ggcctttagaactgt

SEQ ID NO: 823648 - DNA, 15 bp, Homo sapiens
gcctttagaactgtg

SEQ ID NO: 823649 - DNA, 15 bp, Homo sapiens
cctttagaactgtga

SEQ ID NO: 823650 - DNA, 15 bp, Homo sapiens
ctttagaactgtgag

SEQ ID NO: 823651 - DNA, 15 bp, Homo sapiens
tttagaactgtgagc

SEQ ID NO: 823652 - DNA, 15 bp, Homo sapiens
ttagaactgtgagca

SEQ ID NO: 823653 - DNA, 15 bp, Homo sapiens
tagaactgtgagcaa

SEQ ID NO: 823654 - DNA, 15 bp, Homo sapiens
agaactgtgagcaat

SEQ ID NO: 823655 - DNA, 15 bp, Homo sapiens
gaactgtgagcaatc

SEQ ID NO: 823656 - DNA, 15 bp, Homo sapiens
aactgtgagcaatca

SEQ ID NO: 823657 - DNA, 15 bp, Homo sapiens
actgtgagcaatcaa

SEQ ID NO: 823658 - DNA, 15 bp, Homo sapiens
ctgtgagcaatcaat

SEQ ID NO: 823659 - DNA, 15 bp, Homo sapiens
tgtgagcaatcaatt

SEQ ID NO: 823660 - DNA, 15 bp, Homo sapiens
gtgagcaatcaattg

SEQ ID NO: 823661 - DNA, 15 bp, Homo sapiens
tgagcaatcaattgc

SEQ ID NO: 823662 - DNA, 15 bp, Homo sapiens
gagcaatcaattgct

SEQ ID NO: 823663 - DNA, 15 bp, Homo sapiens
agcaatcaattgctg

SEQ ID NO: 823664 - DNA, 15 bp, Homo sapiens
gcaatcaattgctgt

SEQ ID NO: 823665 - DNA, 15 bp, Homo sapiens
caatcaattgctgtt

SEQ ID NO: 823666 - DNA, 15 bp, Homo sapiens
aatcaattgctgttg

SEQ ID NO: 823667 - DNA, 15 bp, Homo sapiens
atcaattgctgttgt

SEQ ID NO: 823668 - DNA, 15 bp, Homo sapiens
tcaattgctgttgtt

SEQ ID NO: 823669 - DNA, 15 bp, Homo sapiens
caattgctgttgttt

SEQ ID NO: 823670 - DNA, 15 bp, Homo sapiens
aattgctgttgttta

SEQ ID NO: 823671 - DNA, 15 bp, Homo sapiens
attgctgttgtttat

SEQ ID NO: 823672 - DNA, 15 bp, Homo sapiens
ttgctgttgtttata

SEQ ID NO: 823673 - DNA, 15 bp, Homo sapiens
tgctgttgtttataa

SEQ ID NO: 823674 - DNA, 15 bp, Homo sapiens
gctgttgtttataaa

SEQ ID NO: 823675 - DNA, 15 bp, Homo sapiens
ctgttgtttataaat

SEQ ID NO: 823676 - DNA, 15 bp, Homo sapiens
tgttgtttataaatt

SEQ ID NO: 823677 - DNA, 15 bp, Homo sapiens
gttgtttataaatta

SEQ ID NO: 823678 - DNA, 15 bp, Homo sapiens
ttgtttataaattac

SEQ ID NO: 823679 - DNA, 15 bp, Homo sapiens
tgtttataaattacc

SEQ ID NO: 823680 - DNA, 15 bp, Homo sapiens
gtttataaattaccc

SEQ ID NO: 823681 - DNA, 15 bp, Homo sapiens
tttataaattaccca

SEQ ID NO: 823682 - DNA, 15 bp, Homo sapiens
ttataaattacccag

SEQ ID NO: 823683 - DNA, 15 bp, Homo sapiens
tataaattacccagt

SEQ ID NO: 823684 - DNA, 15 bp, Homo sapiens
ataaattacccagtc

SEQ ID NO: 823685 - DNA, 15 bp, Homo sapiens
taaattacccagtct

SEQ ID NO: 823686 - DNA, 15 bp, Homo sapiens
aaattacccagtcta

SEQ ID NO: 823687 - DNA, 15 bp, Homo sapiens
aattacccagtctaa

SEQ ID NO: 823688 - DNA, 15 bp, Homo sapiens
attacccagtctaag

SEQ ID NO: 823689 - DNA, 15 bp, Homo sapiens
ttacccagtctaagg

SEQ ID NO: 823690 - DNA, 15 bp, Homo sapiens
tacccagtctaaggt

SEQ ID NO: 823691 - DNA, 15 bp, Homo sapiens
acccagtctaaggta

SEQ ID NO: 823692 - DNA, 15 bp, Homo sapiens
cccagtctaaggtat

SEQ ID NO: 823693 - DNA, 15 bp, Homo sapiens
ccagtctaaggtatt

SEQ ID NO: 823694 - DNA, 15 bp, Homo sapiens
cagtctaaggtattt

SEQ ID NO: 823695 - DNA, 15 bp, Homo sapiens
agtctaaggtatttt

SEQ ID NO: 823696 - DNA, 15 bp, Homo sapiens
gtctaaggtattttg

SEQ ID NO: 823697 - DNA, 15 bp, Homo sapiens
tctaaggtattttgt

SEQ ID NO: 823698 - DNA, 15 bp, Homo sapiens
ctaaggtattttgtt

SEQ ID NO: 823699 - DNA, 15 bp, Homo sapiens
taaggtattttgtta

SEQ ID NO: 823700 - DNA, 15 bp, Homo sapiens
aaggtattttgttag

SEQ ID NO: 823701 - DNA, 15 bp, Homo sapiens
aggtattttgttagc

SEQ ID NO: 823702 - DNA, 15 bp, Homo sapiens
ggtattttgttagcg

SEQ ID NO: 823703 - DNA, 15 bp, Homo sapiens
gtattttgttagcgc

SEQ ID NO: 823704 - DNA, 15 bp, Homo sapiens
tattttgttagcgca

SEQ ID NO: 823705 - DNA, 15 bp, Homo sapiens
attttgttagcgcat

SEQ ID NO: 823706 - DNA, 15 bp, Homo sapiens
ttttgttagcgcata

SEQ ID NO: 823707 - DNA, 15 bp, Homo sapiens
tttgttagcgcatat

SEQ ID NO: 823708 - DNA, 15 bp, Homo sapiens
ttgttagcgcatata

SEQ ID NO: 823709 - DNA, 15 bp, Homo sapiens
tgttagcgcatatag

SEQ ID NO: 823710 - DNA, 15 bp, Homo sapiens
gttagcgcatataga

SEQ ID NO: 823711 - DNA, 15 bp, Homo sapiens
ttagcgcatatagac

SEQ ID NO: 823712 - DNA, 15 bp, Homo sapiens
tagcgcatatagact

SEQ ID NO: 823713 - DNA, 15 bp, Homo sapiens
agcgcatatagactg

SEQ ID NO: 823714 - DNA, 15 bp, Homo sapiens
gcgcatatagactga

SEQ ID NO: 823715 - DNA, 15 bp, Homo sapiens
cgcatatagactgac

SEQ ID NO: 823716 - DNA, 15 bp, Homo sapiens
gctgaggaatctgtt

SEQ ID NO: 823717 - DNA, 15 bp, Homo sapiens
ctgaggaatctgttt

SEQ ID NO: 823718 - DNA, 15 bp, Homo sapiens
tgaggaatctgtttt

SEQ ID NO: 823719 - DNA, 15 bp, Homo sapiens
gaggaatctgtttta

SEQ ID NO: 823720 - DNA, 15 bp, Homo sapiens
aggaatctgttttaa

SEQ ID NO: 823721 - DNA, 15 bp, Homo sapiens
ggaatctgttttaac

SEQ ID NO: 823722 - DNA, 15 bp, Homo sapiens
gaatctgttttaaca

SEQ ID NO: 823723 - DNA, 15 bp, Homo sapiens
aatctgttttaacaa

SEQ ID NO: 823724 - DNA, 15 bp, Homo sapiens
atctgttttaacaaa

SEQ ID NO: 823725 - DNA, 15 bp, Homo sapiens
tctgttttaacaaat

SEQ ID NO: 823726 - DNA, 15 bp, Homo sapiens
ctgttttaacaaatt

SEQ ID NO: 823727 - DNA, 15 bp, Homo sapiens
tgttttaacaaattc

SEQ ID NO: 823728 - DNA, 15 bp, Homo sapiens
gttttaacaaattct

SEQ ID NO: 823729 - DNA, 15 bp, Homo sapiens
ttttaacaaattctc

SEQ ID NO: 823730 - DNA, 15 bp, Homo sapiens
tttaacaaattctcc

SEQ ID NO: 823731 - DNA, 15 bp, Homo sapiens
ttaacaaattctcct

SEQ ID NO: 823732 - DNA, 15 bp, Homo sapiens
taacaaattctcctg

SEQ ID NO: 823733 - DNA, 15 bp, Homo sapiens
aacaaattctcctgg

SEQ ID NO: 823734 - DNA, 15 bp, Homo sapiens
acaaattctcctggt

SEQ ID NO: 823735 - DNA, 15 bp, Homo sapiens
caaattctcctggtg

SEQ ID NO: 823736 - DNA, 15 bp, Homo sapiens
aaattctcctggtga

SEQ ID NO: 823737 - DNA, 15 bp, Homo sapiens
aattctcctggtgat

SEQ ID NO: 823738 - DNA, 15 bp, Homo sapiens
attctcctggtgatt

SEQ ID NO: 823739 - DNA, 15 bp, Homo sapiens
ttctcctggtgattc

SEQ ID NO: 823740 - DNA, 15 bp, Homo sapiens
tctcctggtgattct

SEQ ID NO: 823741 - DNA, 15 bp, Homo sapiens
ctcctggtgattctt

SEQ ID NO: 823742 - DNA, 15 bp, Homo sapiens
tcctggtgattcttc

SEQ ID NO: 823743 - DNA, 15 bp, Homo sapiens
cctggtgattcttct

SEQ ID NO: 823744 - DNA, 15 bp, Homo sapiens
ctggtgattcttcta

SEQ ID NO: 823745 - DNA, 15 bp, Homo sapiens
tggtgattcttctat

SEQ ID NO: 823746 - DNA, 15 bp, Homo sapiens
ggtgattcttctatg

SEQ ID NO: 823747 - DNA, 15 bp, Homo sapiens
gtgattcttctatgg

SEQ ID NO: 823748 - DNA, 15 bp, Homo sapiens
tgattcttctatggg

SEQ ID NO: 823749 - DNA, 15 bp, Homo sapiens
gattcttctatgggc

SEQ ID NO: 823750 - DNA, 15 bp, Homo sapiens
attcttctatgggct

SEQ ID NO: 823751 - DNA, 15 bp, Homo sapiens
ttcttctatgggcta

SEQ ID NO: 823752 - DNA, 15 bp, Homo sapiens
tcttctatgggctaa

SEQ ID NO: 823753 - DNA, 15 bp, Homo sapiens
cttctatgggctaaa

SEQ ID NO: 823754 - DNA, 15 bp, Homo sapiens
ttctatgggctaaat

SEQ ID NO: 823755 - DNA, 15 bp, Homo sapiens
tctatgggctaaatg

SEQ ID NO: 823756 - DNA, 15 bp, Homo sapiens
ctatgggctaaatga

SEQ ID NO: 823757 - DNA, 15 bp, Homo sapiens
tatgggctaaatgat

SEQ ID NO: 823758 - DNA, 15 bp, Homo sapiens
atgggctaaatgatc

SEQ ID NO: 823759 - DNA, 15 bp, Homo sapiens
tgggctaaatgatct

SEQ ID NO: 823760 - DNA, 15 bp, Homo sapiens
gggctaaatgatctt

SEQ ID NO: 823761 - DNA, 15 bp, Homo sapiens
ggctaaatgatcttg

SEQ ID NO: 823762 - DNA, 15 bp, Homo sapiens
gctaaatgatcttgg

SEQ ID NO: 823763 - DNA, 15 bp, Homo sapiens
ctaaatgatcttggc

SEQ ID NO: 823764 - DNA, 15 bp, Homo sapiens
taaatgatcttggca

SEQ ID NO: 823765 - DNA, 15 bp, Homo sapiens
aaatgatcttggcag

SEQ ID NO: 823766 - DNA, 15 bp, Homo sapiens
aatgatcttggcagt

SEQ ID NO: 823767 - DNA, 15 bp, Homo sapiens
atgatcttggcagta

SEQ ID NO: 823768 - DNA, 15 bp, Homo sapiens
tgatcttggcagtat

SEQ ID NO: 823769 - DNA, 15 bp, Homo sapiens
gatcttggcagtatg

SEQ ID NO: 823770 - DNA, 15 bp, Homo sapiens
atcttggcagtatgt

SEQ ID NO: 823771 - DNA, 15 bp, Homo sapiens
tcttggcagtatgtt

SEQ ID NO: 823772 - DNA, 15 bp, Homo sapiens
cttggcagtatgtta

SEQ ID NO: 823773 - DNA, 15 bp, Homo sapiens
ttggcagtatgttag

SEQ ID NO: 823774 - DNA, 15 bp, Homo sapiens
tggcagtatgttaga

SEQ ID NO: 823775 - DNA, 15 bp, Homo sapiens
ggcagtatgttagaa

SEQ ID NO: 823776 - DNA, 15 bp, Homo sapiens
gcagtatgttagaat

SEQ ID NO: 823777 - DNA, 15 bp, Homo sapiens
cagtatgttagaatc

SEQ ID NO: 823778 - DNA, 15 bp, Homo sapiens
agtatgttagaatca

SEQ ID NO: 823779 - DNA, 15 bp, Homo sapiens
gtatgttagaatcac

SEQ ID NO: 823780 - DNA, 15 bp, Homo sapiens
tatgttagaatcacc

SEQ ID NO: 823781 - DNA, 15 bp, Homo sapiens
atgttagaatcaccc

SEQ ID NO: 823782 - DNA, 15 bp, Homo sapiens
tgttagaatcaccca

SEQ ID NO: 823783 - DNA, 15 bp, Homo sapiens
gttagaatcacccag

SEQ ID NO: 823784 - DNA, 15 bp, Homo sapiens
ttagaatcacccagg

SEQ ID NO: 823785 - DNA, 15 bp, Homo sapiens
tagaatcacccagga

SEQ ID NO: 823786 - DNA, 15 bp, Homo sapiens
agaatcacccaggaa

SEQ ID NO: 823787 - DNA, 15 bp, Homo sapiens
gaatcacccaggaac

SEQ ID NO: 823788 - DNA, 15 bp, Homo sapiens
aatcacccaggaact

SEQ ID NO: 823789 - DNA, 15 bp, Homo sapiens
atcacccaggaactc

SEQ ID NO: 823790 - DNA, 15 bp, Homo sapiens
tcacccaggaactct

SEQ ID NO: 823791 - DNA, 15 bp, Homo sapiens
cacccaggaactctg

SEQ ID NO: 823792 - DNA, 15 bp, Homo sapiens
acccaggaactctga

SEQ ID NO: 823793 - DNA, 15 bp, Homo sapiens
cccaggaactctgac

SEQ ID NO: 823794 - DNA, 15 bp, Homo sapiens
ccaggaactctgaca

SEQ ID NO: 823795 - DNA, 15 bp, Homo sapiens
caggaactctgacac

SEQ ID NO: 823796 - DNA, 15 bp, Homo sapiens
aggaactctgacacg

SEQ ID NO: 823797 - DNA, 15 bp, Homo sapiens
ggaactctgacacgt

SEQ ID NO: 823798 - DNA, 15 bp, Homo sapiens
gaactctgacacgtc

SEQ ID NO: 823799 - DNA, 15 bp, Homo sapiens
aactctgacacgtcc

SEQ ID NO: 823800 - DNA, 15 bp, Homo sapiens
actctgacacgtcct

SEQ ID NO: 823801 - DNA, 15 bp, Homo sapiens
ctctgacacgtcctc

SEQ ID NO: 823802 - DNA, 15 bp, Homo sapiens
tctgacacgtcctcc

SEQ ID NO: 823803 - DNA, 15 bp, Homo sapiens
ctgacacgtcctcct

SEQ ID NO: 823804 - DNA, 15 bp, Homo sapiens
tgacacgtcctcctg

SEQ ID NO: 823805 - DNA, 15 bp, Homo sapiens
gacacgtcctcctgg

SEQ ID NO: 823806 - DNA, 15 bp, Homo sapiens
acacgtcctcctggc

SEQ ID NO: 823807 - DNA, 15 bp, Homo sapiens
cacgtcctcctggcc

SEQ ID NO: 823808 - DNA, 15 bp, Homo sapiens
acgtcctcctggcca

SEQ ID NO: 823809 - DNA, 15 bp, Homo sapiens
cgtcctcctggccag

SEQ ID NO: 823810 - DNA, 15 bp, Homo sapiens
gtcctcctggccaga

SEQ ID NO: 823811 - DNA, 15 bp, Homo sapiens
tcctcctggccagac

SEQ ID NO: 823812 - DNA, 15 bp, Homo sapiens
cctcctggccagact

SEQ ID NO: 823813 - DNA, 15 bp, Homo sapiens
ctcctggccagactg

SEQ ID NO: 823814 - DNA, 15 bp, Homo sapiens
tcctggccagactgt

SEQ ID NO: 823815 - DNA, 15 bp, Homo sapiens
cctggccagactgta

SEQ ID NO: 823816 - DNA, 15 bp, Homo sapiens
ctggccagactgtat

SEQ ID NO: 823817 - DNA, 15 bp, Homo sapiens
tggccagactgtatt

SEQ ID NO: 823818 - DNA, 15 bp, Homo sapiens
ggccagactgtattt

SEQ ID NO: 823819 - DNA, 15 bp, Homo sapiens
gccagactgtatttc

SEQ ID NO: 823820 - DNA, 15 bp, Homo sapiens
ccagactgtatttct

SEQ ID NO: 823821 - DNA, 15 bp, Homo sapiens
cagactgtatttcta

SEQ ID NO: 823822 - DNA, 15 bp, Homo sapiens
agactgtatttctaa

SEQ ID NO: 823823 - DNA, 15 bp, Homo sapiens
gactgtatttctaac

SEQ ID NO: 823824 - DNA, 15 bp, Homo sapiens
actgtatttctaacc

SEQ ID NO: 823825 - DNA, 15 bp, Homo sapiens
ctgtatttctaacca

SEQ ID NO: 823826 - DNA, 15 bp, Homo sapiens
tgtatttctaaccaa

SEQ ID NO: 823827 - DNA, 15 bp, Homo sapiens
gtatttctaaccaag

SEQ ID NO: 823828 - DNA, 15 bp, Homo sapiens
tatttctaaccaagc

SEQ ID NO: 823829 - DNA, 15 bp, Homo sapiens
atttctaaccaagca

SEQ ID NO: 823830 - DNA, 15 bp, Homo sapiens
tttctaaccaagcat

SEQ ID NO: 823831 - DNA, 15 bp, Homo sapiens
ttctaaccaagcata

SEQ ID NO: 823832 - DNA, 15 bp, Homo sapiens
tctaaccaagcatat

SEQ ID NO: 823833 - DNA, 15 bp, Homo sapiens
ctaaccaagcatatg

SEQ ID NO: 823834 - DNA, 15 bp, Homo sapiens
taaccaagcatatga

SEQ ID NO: 823835 - DNA, 15 bp, Homo sapiens
aaccaagcatatgag

SEQ ID NO: 823836 - DNA, 15 bp, Homo sapiens
accaagcatatgaga

SEQ ID NO: 823837 - DNA, 15 bp, Homo sapiens
ccaagcatatgagaa

SEQ ID NO: 823838 - DNA, 15 bp, Homo sapiens
caagcatatgagaat

SEQ ID NO: 823839 - DNA, 15 bp, Homo sapiens
aagcatatgagaatt

SEQ ID NO: 823840 - DNA, 15 bp, Homo sapiens
agcatatgagaattg

SEQ ID NO: 823841 - DNA, 15 bp, Homo sapiens
gcatatgagaattgg

SEQ ID NO: 823842 - DNA, 15 bp, Homo sapiens
catatgagaattggg

SEQ ID NO: 823843 - DNA, 15 bp, Homo sapiens
atatgagaattgggg

SEQ ID NO: 823844 - DNA, 15 bp, Homo sapiens
tatgagaattgggga

SEQ ID NO: 823845 - DNA, 15 bp, Homo sapiens
atgagaattggggat

SEQ ID NO: 823846 - DNA, 15 bp, Homo sapiens
tgagaattggggatg

SEQ ID NO: 823847 - DNA, 15 bp, Homo sapiens
gagaattggggatga

SEQ ID NO: 823848 - DNA, 15 bp, Homo sapiens
agaattggggatgaa

SEQ ID NO: 823849 - DNA, 15 bp, Homo sapiens
gaattggggatgaac

SEQ ID NO: 823850 - DNA, 15 bp, Homo sapiens
aattggggatgaact

SEQ ID NO: 823851 - DNA, 15 bp, Homo sapiens
attggggatgaactc

SEQ ID NO: 823852 - DNA, 15 bp, Homo sapiens
ttggggatgaactca

SEQ ID NO: 823853 - DNA, 15 bp, Homo sapiens
tggggatgaactcag

SEQ ID NO: 823854 - DNA, 15 bp, Homo sapiens
ggggatgaactcagt

SEQ ID NO: 823855 - DNA, 15 bp, Homo sapiens
gggatgaactcagtc

SEQ ID NO: 823856 - DNA, 15 bp, Homo sapiens
ggatgaactcagtca

SEQ ID NO: 823857 - DNA, 15 bp, Homo sapiens
gatgaactcagtcac

SEQ ID NO: 823858 - DNA, 15 bp, Homo sapiens
atgaactcagtcacc

SEQ ID NO: 823859 - DNA, 15 bp, Homo sapiens
tgaactcagtcacca

SEQ ID NO: 823860 - DNA, 15 bp, Homo sapiens
gaactcagtcaccag

SEQ ID NO: 823861 - DNA, 15 bp, Homo sapiens
aactcagtcaccaga

SEQ ID NO: 823862 - DNA, 15 bp, Homo sapiens
actcagtcaccagaa

SEQ ID NO: 823863 - DNA, 15 bp, Homo sapiens
ctcagtcaccagaat

SEQ ID NO: 823864 - DNA, 15 bp, Homo sapiens
tcagtcaccagaatg

SEQ ID NO: 823865 - DNA, 15 bp, Homo sapiens
cagtcaccagaatgt

SEQ ID NO: 823866 - DNA, 15 bp, Homo sapiens
agtcaccagaatgtt

SEQ ID NO: 823867 - DNA, 15 bp, Homo sapiens
gtcaccagaatgttt

SEQ ID NO: 823868 - DNA, 15 bp, Homo sapiens
tcaccagaatgtttt

SEQ ID NO: 823869 - DNA, 15 bp, Homo sapiens
caccagaatgttttc

SEQ ID NO: 823870 - DNA, 15 bp, Homo sapiens
accagaatgttttca

SEQ ID NO: 823871 - DNA, 15 bp, Homo sapiens
ccagaatgttttcaa

SEQ ID NO: 823872 - DNA, 15 bp, Homo sapiens
cagaatgttttcaag

SEQ ID NO: 823873 - DNA, 15 bp, Homo sapiens
agaatgttttcaagt

SEQ ID NO: 823874 - DNA, 15 bp, Homo sapiens
gaatgttttcaagtt

SEQ ID NO: 823875 - DNA, 15 bp, Homo sapiens
aatgttttcaagttc

SEQ ID NO: 823876 - DNA, 15 bp, Homo sapiens
atgttttcaagttct

SEQ ID NO: 823877 - DNA, 15 bp, Homo sapiens
tgttttcaagttctc

SEQ ID NO: 823878 - DNA, 15 bp, Homo sapiens
gttttcaagttctct

SEQ ID NO: 823879 - DNA, 15 bp, Homo sapiens
ttttcaagttctctg

SEQ ID NO: 823880 - DNA, 15 bp, Homo sapiens
tttcaagttctctga

SEQ ID NO: 823881 - DNA, 15 bp, Homo sapiens
ttcaagttctctgaa

SEQ ID NO: 823882 - DNA, 15 bp, Homo sapiens
tcaagttctctgaat

SEQ ID NO: 823883 - DNA, 15 bp, Homo sapiens
caagttctctgaata

SEQ ID NO: 823884 - DNA, 15 bp, Homo sapiens
aagttctctgaataa

SEQ ID NO: 823885 - DNA, 15 bp, Homo sapiens
agttctctgaataat

SEQ ID NO: 823886 - DNA, 15 bp, Homo sapiens
gttctctgaataatt

SEQ ID NO: 823887 - DNA, 15 bp, Homo sapiens
ttctctgaataattt

SEQ ID NO: 823888 - DNA, 15 bp, Homo sapiens
tctctgaataatttc

SEQ ID NO: 823889 - DNA, 15 bp, Homo sapiens
ctctgaataatttca

SEQ ID NO: 823890 - DNA, 15 bp, Homo sapiens
tctgaataatttcac

SEQ ID NO: 823891 - DNA, 15 bp, Homo sapiens
ctgaataatttcact

SEQ ID NO: 823892 - DNA, 15 bp, Homo sapiens
tgaataatttcactt

SEQ ID NO: 823893 - DNA, 15 bp, Homo sapiens
gaataatttcacttg

SEQ ID NO: 823894 - DNA, 15 bp, Homo sapiens
aataatttcacttgt

SEQ ID NO: 823895 - DNA, 15 bp, Homo sapiens
ataatttcacttgtg

SEQ ID NO: 823896 - DNA, 15 bp, Homo sapiens
taatttcacttgtgc

SEQ ID NO: 823897 - DNA, 15 bp, Homo sapiens
aatttcacttgtgca

SEQ ID NO: 823898 - DNA, 15 bp, Homo sapiens
atttcacttgtgcag

SEQ ID NO: 823899 - DNA, 15 bp, Homo sapiens
tttcacttgtgcagc

SEQ ID NO: 823900 - DNA, 15 bp, Homo sapiens
ttcacttgtgcagcc

SEQ ID NO: 823901 - DNA, 15 bp, Homo sapiens
tcacttgtgcagcca

SEQ ID NO: 823902 - DNA, 15 bp, Homo sapiens
cacttgtgcagccac

SEQ ID NO: 823903 - DNA, 15 bp, Homo sapiens
acttgtgcagccact

SEQ ID NO: 823904 - DNA, 15 bp, Homo sapiens
cttgtgcagccactg

SEQ ID NO: 823905 - DNA, 15 bp, Homo sapiens
ttgtgcagccactgt

SEQ ID NO: 823906 - DNA, 15 bp, Homo sapiens
tgtgcagccactgtt

SEQ ID NO: 823907 - DNA, 15 bp, Homo sapiens
gtgcagccactgttg

SEQ ID NO: 823908 - DNA, 15 bp, Homo sapiens
tgcagccactgttga

SEQ ID NO: 823909 - DNA, 15 bp, Homo sapiens
gcagccactgttgag

SEQ ID NO: 823910 - DNA, 15 bp, Homo sapiens
cagccactgttgaga

SEQ ID NO: 823911 - DNA, 15 bp, Homo sapiens
agccactgttgagag

SEQ ID NO: 823912 - DNA, 15 bp, Homo sapiens
gccactgttgagagg

SEQ ID NO: 823913 - DNA, 15 bp, Homo sapiens
ccactgttgagaggc

SEQ ID NO: 823914 - DNA, 15 bp, Homo sapiens
cactgttgagaggcc

SEQ ID NO: 823915 - DNA, 15 bp, Homo sapiens
actgttgagaggcct

SEQ ID NO: 823916 - DNA, 15 bp, Homo sapiens
ctgttgagaggcctg

SEQ ID NO: 823917 - DNA, 15 bp, Homo sapiens
tgttgagaggcctgg

SEQ ID NO: 823918 - DNA, 15 bp, Homo sapiens
gttgagaggcctggc

SEQ ID NO: 823919 - DNA, 15 bp, Homo sapiens
ttgagaggcctggca

SEQ ID NO: 823920 - DNA, 15 bp, Homo sapiens
tgagaggcctggcac

SEQ ID NO: 823921 - DNA, 15 bp, Homo sapiens
gagaggcctggcaca

SEQ ID NO: 823922 - DNA, 15 bp, Homo sapiens
agaggcctggcacag

SEQ ID NO: 823923 - DNA, 15 bp, Homo sapiens
gaggcctggcacagt

SEQ ID NO: 823924 - DNA, 15 bp, Homo sapiens
aggcctggcacagtg

SEQ ID NO: 823925 - DNA, 15 bp, Homo sapiens
ggcctggcacagtgg

SEQ ID NO: 823926 - DNA, 15 bp, Homo sapiens
gcctggcacagtggt

SEQ ID NO: 823927 - DNA, 15 bp, Homo sapiens
cctggcacagtggtg

SEQ ID NO: 823928 - DNA, 15 bp, Homo sapiens
ctggcacagtggtgg

SEQ ID NO: 823929 - DNA, 15 bp, Homo sapiens
tggcacagtggtggt

SEQ ID NO: 823930 - DNA, 15 bp, Homo sapiens
ggcacagtggtggtt

SEQ ID NO: 823931 - DNA, 15 bp, Homo sapiens
gcacagtggtggttc

SEQ ID NO: 823932 - DNA, 15 bp, Homo sapiens
cacagtggtggttct

SEQ ID NO: 823933 - DNA, 15 bp, Homo sapiens
acagtggtggttctt

SEQ ID NO: 823934 - DNA, 15 bp, Homo sapiens
cagtggtggttctta

SEQ ID NO: 823935 - DNA, 15 bp, Homo sapiens
agtggtggttcttaa

SEQ ID NO: 823936 - DNA, 15 bp, Homo sapiens
gtggtggttcttaaa

SEQ ID NO: 823937 - DNA, 15 bp, Homo sapiens
tggtggttcttaaac

SEQ ID NO: 823938 - DNA, 15 bp, Homo sapiens
ggtggttcttaaacc

SEQ ID NO: 823939 - DNA, 15 bp, Homo sapiens
gtggttcttaaacca

SEQ ID NO: 823940 - DNA, 15 bp, Homo sapiens
tggttcttaaaccag

SEQ ID NO: 823941 - DNA, 15 bp, Homo sapiens
ggttcttaaaccaga

SEQ ID NO: 823942 - DNA, 15 bp, Homo sapiens
gttcttaaaccagag

SEQ ID NO: 823943 - DNA, 15 bp, Homo sapiens
ttcttaaaccagagg

SEQ ID NO: 823944 - DNA, 15 bp, Homo sapiens
tcttaaaccagagga

SEQ ID NO: 823945 - DNA, 15 bp, Homo sapiens
cttaaaccagaggaa

SEQ ID NO: 823946 - DNA, 15 bp, Homo sapiens
ttaaaccagaggaac

SEQ ID NO: 823947 - DNA, 15 bp, Homo sapiens
taaaccagaggaaca

SEQ ID NO: 823948 - DNA, 15 bp, Homo sapiens
aaaccagaggaacat

SEQ ID NO: 823949 - DNA, 15 bp, Homo sapiens
aaccagaggaacata

SEQ ID NO: 823950 - DNA, 15 bp, Homo sapiens
accagaggaacatac

SEQ ID NO: 823951 - DNA, 15 bp, Homo sapiens
ccagaggaacatacc

SEQ ID NO: 823952 - DNA, 15 bp, Homo sapiens
cagaggaacatacct

SEQ ID NO: 823953 - DNA, 15 bp, Homo sapiens
agaggaacatacctg

SEQ ID NO: 823954 - DNA, 15 bp, Homo sapiens
gaggaacatacctga

SEQ ID NO: 823955 - DNA, 15 bp, Homo sapiens
aggaacatacctgaa

SEQ ID NO: 823956 - DNA, 15 bp, Homo sapiens
ggaacatacctgaat

SEQ ID NO: 823957 - DNA, 15 bp, Homo sapiens
gaacatacctgaata

SEQ ID NO: 823958 - DNA, 15 bp, Homo sapiens
aacatacctgaatac

SEQ ID NO: 823959 - DNA, 15 bp, Homo sapiens
acatacctgaatacc

SEQ ID NO: 823960 - DNA, 15 bp, Homo sapiens
catacctgaatacct

SEQ ID NO: 823961 - DNA, 15 bp, Homo sapiens
atacctgaatacctg

SEQ ID NO: 823962 - DNA, 15 bp, Homo sapiens
tacctgaatacctga

SEQ ID NO: 823963 - DNA, 15 bp, Homo sapiens
acctgaatacctgag

SEQ ID NO: 823964 - DNA, 15 bp, Homo sapiens
cctgaatacctgaga

SEQ ID NO: 823965 - DNA, 15 bp, Homo sapiens
ctgaatacctgagaa

SEQ ID NO: 823966 - DNA, 15 bp, Homo sapiens
tgaatacctgagaaa

SEQ ID NO: 823967 - DNA, 15 bp, Homo sapiens
gaatacctgagaaac

SEQ ID NO: 823968 - DNA, 15 bp, Homo sapiens
aatacctgagaaact

SEQ ID NO: 823969 - DNA, 15 bp, Homo sapiens
atacctgagaaactt

SEQ ID NO: 823970 - DNA, 15 bp, Homo sapiens
tacctgagaaacttc

SEQ ID NO: 823971 - DNA, 15 bp, Homo sapiens
acctgagaaacttca

SEQ ID NO: 823972 - DNA, 15 bp, Homo sapiens
cctgagaaacttcaa

SEQ ID NO: 823973 - DNA, 15 bp, Homo sapiens
ctgagaaacttcaac

SEQ ID NO: 823974 - DNA, 15 bp, Homo sapiens
tgagaaacttcaaca

SEQ ID NO: 823975 - DNA, 15 bp, Homo sapiens
gagaaacttcaacac

SEQ ID NO: 823976 - DNA, 15 bp, Homo sapiens
agaaacttcaacaca

SEQ ID NO: 823977 - DNA, 15 bp, Homo sapiens
gaaacttcaacacac

SEQ ID NO: 823978 - DNA, 15 bp, Homo sapiens
aaacttcaacacaca

SEQ ID NO: 823979 - DNA, 15 bp, Homo sapiens
aacttcaacacacac

SEQ ID NO: 823980 - DNA, 15 bp, Homo sapiens
acttcaacacacaca

SEQ ID NO: 823981 - DNA, 15 bp, Homo sapiens
cttcaacacacacac

SEQ ID NO: 823982 - DNA, 15 bp, Homo sapiens
ttcaacacacacaca

SEQ ID NO: 823983 - DNA, 15 bp, Homo sapiens
tcaacacacacacac

SEQ ID NO: 823984 - DNA, 15 bp, Homo sapiens
caacacacacacaca

SEQ ID NO: 823985 - DNA, 15 bp, Homo sapiens
cacacacacacacgc

SEQ ID NO: 823986 - DNA, 15 bp, Homo sapiens
acacacacacacgca

SEQ ID NO: 823987 - DNA, 15 bp, Homo sapiens
cacacacacacgcac

SEQ ID NO: 823988 - DNA, 15 bp, Homo sapiens
acacacacacgcaca

SEQ ID NO: 823989 - DNA, 15 bp, Homo sapiens
cacacacacgcacac

SEQ ID NO: 823990 - DNA, 15 bp, Homo sapiens
acacacacgcacaca

SEQ ID NO: 823991 - DNA, 15 bp, Homo sapiens
cacacacgcacacac

SEQ ID NO: 823992 - DNA, 15 bp, Homo sapiens
acacacgcacacaca

SEQ ID NO: 823993 - DNA, 15 bp, Homo sapiens
cacacgcacacacac

SEQ ID NO: 823994 - DNA, 15 bp, Homo sapiens
acacgcacacacaca

SEQ ID NO: 823995 - DNA, 15 bp, Homo sapiens
cacgcacacacacac

SEQ ID NO: 823996 - DNA, 15 bp, Homo sapiens
acgcacacacacaca

SEQ ID NO: 823997 - DNA, 15 bp, Homo sapiens
gcacacacacacacg

SEQ ID NO: 823998 - DNA, 15 bp, Homo sapiens
acacacacgcacacg

SEQ ID NO: 823999 - DNA, 15 bp, Homo sapiens
cacacacgcacacgt

SEQ ID NO: 824000 - DNA, 15 bp, Homo sapiens
acacacgcacacgta

SEQ ID NO: 824001 - DNA, 15 bp, Homo sapiens
cacacgcacacgtac

SEQ ID NO: 824002 - DNA, 15 bp, Homo sapiens
acacgcacacgtact

SEQ ID NO: 824003 - DNA, 15 bp, Homo sapiens
cacgcacacgtactt

SEQ ID NO: 824004 - DNA, 15 bp, Homo sapiens
acgcacacgtacttt

SEQ ID NO: 824005 - DNA, 15 bp, Homo sapiens
cgcacacgtactttc

SEQ ID NO: 824006 - DNA, 15 bp, Homo sapiens
gcacacgtactttcc

SEQ ID NO: 824007 - DNA, 15 bp, Homo sapiens
cacacgtactttccg

SEQ ID NO: 824008 - DNA, 15 bp, Homo sapiens
acacgtactttccga

SEQ ID NO: 824009 - DNA, 15 bp, Homo sapiens
cacgtactttccgaa

SEQ ID NO: 824010 - DNA, 15 bp, Homo sapiens
acgtactttccgaaa

SEQ ID NO: 824011 - DNA, 15 bp, Homo sapiens
cgtactttccgaaat

SEQ ID NO: 824012 - DNA, 15 bp, Homo sapiens
gtactttccgaaatc

SEQ ID NO: 824013 - DNA, 15 bp, Homo sapiens
tactttccgaaatct

SEQ ID NO: 824014 - DNA, 15 bp, Homo sapiens
actttccgaaatcta

SEQ ID NO: 824015 - DNA, 15 bp, Homo sapiens
ctttccgaaatctat

SEQ ID NO: 824016 - DNA, 15 bp, Homo sapiens
tttccgaaatctatt

SEQ ID NO: 824017 - DNA, 15 bp, Homo sapiens
ttccgaaatctattc

SEQ ID NO: 824018 - DNA, 15 bp, Homo sapiens
tccgaaatctattct

SEQ ID NO: 824019 - DNA, 15 bp, Homo sapiens
ccgaaatctattctg

SEQ ID NO: 824020 - DNA, 15 bp, Homo sapiens
cgaaatctattctgt

SEQ ID NO: 824021 - DNA, 15 bp, Homo sapiens
gaaatctattctgtg

SEQ ID NO: 824022 - DNA, 15 bp, Homo sapiens
aaatctattctgtga

SEQ ID NO: 824023 - DNA, 15 bp, Homo sapiens
aatctattctgtgag

SEQ ID NO: 824024 - DNA, 15 bp, Homo sapiens
atctattctgtgagg

SEQ ID NO: 824025 - DNA, 15 bp, Homo sapiens
tctattctgtgaggc

SEQ ID NO: 824026 - DNA, 15 bp, Homo sapiens
ctattctgtgaggct

SEQ ID NO: 824027 - DNA, 15 bp, Homo sapiens
tattctgtgaggctc

SEQ ID NO: 824028 - DNA, 15 bp, Homo sapiens
attctgtgaggctct

SEQ ID NO: 824029 - DNA, 15 bp, Homo sapiens
ttctgtgaggctctt

SEQ ID NO: 824030 - DNA, 15 bp, Homo sapiens
tctgtgaggctcttt

SEQ ID NO: 824031 - DNA, 15 bp, Homo sapiens
ctgtgaggctctttg

SEQ ID NO: 824032 - DNA, 15 bp, Homo sapiens
tgtgaggctctttgg

SEQ ID NO: 824033 - DNA, 15 bp, Homo sapiens
gtgaggctctttggg

SEQ ID NO: 824034 - DNA, 15 bp, Homo sapiens
tgaggctctttgggt

SEQ ID NO: 824035 - DNA, 15 bp, Homo sapiens
gaggctctttgggtc

SEQ ID NO: 824036 - DNA, 15 bp, Homo sapiens
aggctctttgggtcg

SEQ ID NO: 824037 - DNA, 15 bp, Homo sapiens
ggctctttgggtcgt

SEQ ID NO: 824038 - DNA, 15 bp, Homo sapiens
gctctttgggtcgtg

SEQ ID NO: 824039 - DNA, 15 bp, Homo sapiens
ctctttgggtcgtgg

SEQ ID NO: 824040 - DNA, 15 bp, Homo sapiens
tctttgggtcgtggt

SEQ ID NO: 824041 - DNA, 15 bp, Homo sapiens
ctttgggtcgtggta

SEQ ID NO: 824042 - DNA, 15 bp, Homo sapiens
tttgggtcgtggtaa

SEQ ID NO: 824043 - DNA, 15 bp, Homo sapiens
ttgggtcgtggtaag

SEQ ID NO: 824044 - DNA, 15 bp, Homo sapiens
tgggtcgtggtaagg

SEQ ID NO: 824045 - DNA, 15 bp, Homo sapiens
gggtcgtggtaagga

SEQ ID NO: 824046 - DNA, 15 bp, Homo sapiens
ggtcgtggtaaggac

SEQ ID NO: 824047 - DNA, 15 bp, Homo sapiens
gtcgtggtaaggaca

SEQ ID NO: 824048 - DNA, 15 bp, Homo sapiens
tcgtggtaaggacaa

SEQ ID NO: 824049 - DNA, 15 bp, Homo sapiens
cgtggtaaggacaat

SEQ ID NO: 824050 - DNA, 15 bp, Homo sapiens
gtggtaaggacaatt

SEQ ID NO: 824051 - DNA, 15 bp, Homo sapiens
tggtaaggacaattg

SEQ ID NO: 824052 - DNA, 15 bp, Homo sapiens
ggtaaggacaattgc

SEQ ID NO: 824053 - DNA, 15 bp, Homo sapiens
gtaaggacaattgct

SEQ ID NO: 824054 - DNA, 15 bp, Homo sapiens
taaggacaattgctt

SEQ ID NO: 824055 - DNA, 15 bp, Homo sapiens
aaggacaattgcttt

SEQ ID NO: 824056 - DNA, 15 bp, Homo sapiens
aggacaattgctttg

SEQ ID NO: 824057 - DNA, 15 bp, Homo sapiens
ggacaattgctttgg

SEQ ID NO: 824058 - DNA, 15 bp, Homo sapiens
gacaattgctttgga

SEQ ID NO: 824059 - DNA, 15 bp, Homo sapiens
acaattgctttggaa

SEQ ID NO: 824060 - DNA, 15 bp, Homo sapiens
caattgctttggaac

SEQ ID NO: 824061 - DNA, 15 bp, Homo sapiens
aattgctttggaaca

SEQ ID NO: 824062 - DNA, 15 bp, Homo sapiens
attgctttggaacaa

SEQ ID NO: 824063 - DNA, 15 bp, Homo sapiens
ttgctttggaacaag

SEQ ID NO: 824064 - DNA, 15 bp, Homo sapiens
tgctttggaacaagc

SEQ ID NO: 824065 - DNA, 15 bp, Homo sapiens
gctttggaacaagca

SEQ ID NO: 824066 - DNA, 15 bp, Homo sapiens
ctttggaacaagcac

SEQ ID NO: 824067 - DNA, 15 bp, Homo sapiens
tttggaacaagcaca

SEQ ID NO: 824068 - DNA, 15 bp, Homo sapiens
ttggaacaagcacac

SEQ ID NO: 824069 - DNA, 15 bp, Homo sapiens
tggaacaagcacact

SEQ ID NO: 824070 - DNA, 15 bp, Homo sapiens
ggaacaagcacacta

SEQ ID NO: 824071 - DNA, 15 bp, Homo sapiens
gaacaagcacactat

SEQ ID NO: 824072 - DNA, 15 bp, Homo sapiens
aacaagcacactatg

SEQ ID NO: 824073 - DNA, 15 bp, Homo sapiens
acaagcacactatgt

SEQ ID NO: 824074 - DNA, 15 bp, Homo sapiens
caagcacactatgta

SEQ ID NO: 824075 - DNA, 15 bp, Homo sapiens
aagcacactatgtat

SEQ ID NO: 824076 - DNA, 15 bp, Homo sapiens
agcacactatgtatt

SEQ ID NO: 824077 - DNA, 15 bp, Homo sapiens
gcacactatgtattc

SEQ ID NO: 824078 - DNA, 15 bp, Homo sapiens
cacactatgtattct

SEQ ID NO: 824079 - DNA, 15 bp, Homo sapiens
acactatgtattcta

SEQ ID NO: 824080 - DNA, 15 bp, Homo sapiens
cactatgtattctag

SEQ ID NO: 824081 - DNA, 15 bp, Homo sapiens
actatgtattctaga

SEQ ID NO: 824082 - DNA, 15 bp, Homo sapiens
ctatgtattctagat

SEQ ID NO: 824083 - DNA, 15 bp, Homo sapiens
tatgtattctagata

SEQ ID NO: 824084 - DNA, 15 bp, Homo sapiens
atgtattctagatag

SEQ ID NO: 824085 - DNA, 15 bp, Homo sapiens
tgtattctagataga

SEQ ID NO: 824086 - DNA, 15 bp, Homo sapiens
gtattctagatagac

SEQ ID NO: 824087 - DNA, 15 bp, Homo sapiens
tattctagatagacc

SEQ ID NO: 824088 - DNA, 15 bp, Homo sapiens
attctagatagacca

SEQ ID NO: 824089 - DNA, 15 bp, Homo sapiens
ttctagatagaccag

SEQ ID NO: 824090 - DNA, 15 bp, Homo sapiens
tctagatagaccagt

SEQ ID NO: 824091 - DNA, 15 bp, Homo sapiens
ctagatagaccagtg

SEQ ID NO: 824092 - DNA, 15 bp, Homo sapiens
tagatagaccagtgg

SEQ ID NO: 824093 - DNA, 15 bp, Homo sapiens
agatagaccagtggt

SEQ ID NO: 824094 - DNA, 15 bp, Homo sapiens
gatagaccagtggtt

SEQ ID NO: 824095 - DNA, 15 bp, Homo sapiens
atagaccagtggttc

SEQ ID NO: 824096 - DNA, 15 bp, Homo sapiens
cagtggttctcaaac

SEQ ID NO: 824097 - DNA, 15 bp, Homo sapiens
agtggttctcaaact

SEQ ID NO: 824098 - DNA, 15 bp, Homo sapiens
gtggttctcaaactt

SEQ ID NO: 824099 - DNA, 15 bp, Homo sapiens
tggttctcaaacttt

SEQ ID NO: 824100 - DNA, 15 bp, Homo sapiens
ggttctcaaactttg

SEQ ID NO: 824101 - DNA, 15 bp, Homo sapiens
gttctcaaactttga

SEQ ID NO: 824102 - DNA, 15 bp, Homo sapiens
ttctcaaactttgag

SEQ ID NO: 824103 - DNA, 15 bp, Homo sapiens
tctcaaactttgagt

SEQ ID NO: 824104 - DNA, 15 bp, Homo sapiens
ctcaaactttgagtg

SEQ ID NO: 824105 - DNA, 15 bp, Homo sapiens
tcaaactttgagtgc

SEQ ID NO: 824106 - DNA, 15 bp, Homo sapiens
caaactttgagtgca

SEQ ID NO: 824107 - DNA, 15 bp, Homo sapiens
aaactttgagtgcac

SEQ ID NO: 824108 - DNA, 15 bp, Homo sapiens
aactttgagtgcacc

SEQ ID NO: 824109 - DNA, 15 bp, Homo sapiens
actttgagtgcacca

SEQ ID NO: 824110 - DNA, 15 bp, Homo sapiens
ctttgagtgcaccag

SEQ ID NO: 824111 - DNA, 15 bp, Homo sapiens
tttgagtgcaccaga

SEQ ID NO: 824112 - DNA, 15 bp, Homo sapiens
ttgagtgcaccagag

SEQ ID NO: 824113 - DNA, 15 bp, Homo sapiens
tgagtgcaccagagt

SEQ ID NO: 824114 - DNA, 15 bp, Homo sapiens
gagtgcaccagagtc

SEQ ID NO: 824115 - DNA, 15 bp, Homo sapiens
agtgcaccagagtca

SEQ ID NO: 824116 - DNA, 15 bp, Homo sapiens
gtgcaccagagtcac

SEQ ID NO: 824117 - DNA, 15 bp, Homo sapiens
tgcaccagagtcacc

SEQ ID NO: 824118 - DNA, 15 bp, Homo sapiens
gcaccagagtcacct

SEQ ID NO: 824119 - DNA, 15 bp, Homo sapiens
caccagagtcaccta

SEQ ID NO: 824120 - DNA, 15 bp, Homo sapiens
accagagtcacctag

SEQ ID NO: 824121 - DNA, 15 bp, Homo sapiens
ccagagtcacctaga

SEQ ID NO: 824122 - DNA, 15 bp, Homo sapiens
cagagtcacctagag

SEQ ID NO: 824123 - DNA, 15 bp, Homo sapiens
agagtcacctagagg

SEQ ID NO: 824124 - DNA, 15 bp, Homo sapiens
gagtcacctagaggt

SEQ ID NO: 824125 - DNA, 15 bp, Homo sapiens
agtcacctagaggtc

SEQ ID NO: 824126 - DNA, 15 bp, Homo sapiens
gtcacctagaggtct

SEQ ID NO: 824127 - DNA, 15 bp, Homo sapiens
tcacctagaggtctg

SEQ ID NO: 824128 - DNA, 15 bp, Homo sapiens
cacctagaggtctgg

SEQ ID NO: 824129 - DNA, 15 bp, Homo sapiens
acctagaggtctggt

SEQ ID NO: 824130 - DNA, 15 bp, Homo sapiens
cctagaggtctggtt

SEQ ID NO: 824131 - DNA, 15 bp, Homo sapiens
ctagaggtctggtta

SEQ ID NO: 824132 - DNA, 15 bp, Homo sapiens
tagaggtctggttaa

SEQ ID NO: 824133 - DNA, 15 bp, Homo sapiens
agaggtctggttaaa

SEQ ID NO: 824134 - DNA, 15 bp, Homo sapiens
gaggtctggttaaat

SEQ ID NO: 824135 - DNA, 15 bp, Homo sapiens
aggtctggttaaatt

SEQ ID NO: 824136 - DNA, 15 bp, Homo sapiens
ggtctggttaaatta

SEQ ID NO: 824137 - DNA, 15 bp, Homo sapiens
gtctggttaaattac

SEQ ID NO: 824138 - DNA, 15 bp, Homo sapiens
tctggttaaattaca

SEQ ID NO: 824139 - DNA, 15 bp, Homo sapiens
ctggttaaattacag

SEQ ID NO: 824140 - DNA, 15 bp, Homo sapiens
tggttaaattacaga

SEQ ID NO: 824141 - DNA, 15 bp, Homo sapiens
ggttaaattacagat

SEQ ID NO: 824142 - DNA, 15 bp, Homo sapiens
gttaaattacagatt

SEQ ID NO: 824143 - DNA, 15 bp, Homo sapiens
ttaaattacagattt

SEQ ID NO: 824144 - DNA, 15 bp, Homo sapiens
taaattacagatttg

SEQ ID NO: 824145 - DNA, 15 bp, Homo sapiens
aaattacagatttgg

SEQ ID NO: 824146 - DNA, 15 bp, Homo sapiens
aattacagatttggg

SEQ ID NO: 824147 - DNA, 15 bp, Homo sapiens
attacagatttgggg

SEQ ID NO: 824148 - DNA, 15 bp, Homo sapiens
ttacagatttggggt

SEQ ID NO: 824149 - DNA, 15 bp, Homo sapiens
tacagatttggggtg

SEQ ID NO: 824150 - DNA, 15 bp, Homo sapiens
acagatttggggtgt

SEQ ID NO: 824151 - DNA, 15 bp, Homo sapiens
cagatttggggtgtt

SEQ ID NO: 824152 - DNA, 15 bp, Homo sapiens
agatttggggtgttc

SEQ ID NO: 824153 - DNA, 15 bp, Homo sapiens
gatttggggtgttcc

SEQ ID NO: 824154 - DNA, 15 bp, Homo sapiens
atttggggtgttcca

SEQ ID NO: 824155 - DNA, 15 bp, Homo sapiens
tttggggtgttccat

SEQ ID NO: 824156 - DNA, 15 bp, Homo sapiens
ttggggtgttccatc

SEQ ID NO: 824157 - DNA, 15 bp, Homo sapiens
tggggtgttccatcc

SEQ ID NO: 824158 - DNA, 15 bp, Homo sapiens
ggggtgttccatccc

SEQ ID NO: 824159 - DNA, 15 bp, Homo sapiens
gggtgttccatcccc

SEQ ID NO: 824160 - DNA, 15 bp, Homo sapiens
ggtgttccatcccca

SEQ ID NO: 824161 - DNA, 15 bp, Homo sapiens
gtgttccatccccag

SEQ ID NO: 824162 - DNA, 15 bp, Homo sapiens
tgttccatccccaga

SEQ ID NO: 824163 - DNA, 15 bp, Homo sapiens
gttccatccccagag

SEQ ID NO: 824164 - DNA, 15 bp, Homo sapiens
ttccatccccagagt

SEQ ID NO: 824165 - DNA, 15 bp, Homo sapiens
tccatccccagagtt

SEQ ID NO: 824166 - DNA, 15 bp, Homo sapiens
ccatccccagagttt

SEQ ID NO: 824167 - DNA, 15 bp, Homo sapiens
catccccagagtttc

SEQ ID NO: 824168 - DNA, 15 bp, Homo sapiens
atccccagagtttca

SEQ ID NO: 824169 - DNA, 15 bp, Homo sapiens
tccccagagtttcag

SEQ ID NO: 824170 - DNA, 15 bp, Homo sapiens
ccccagagtttcaga

SEQ ID NO: 824171 - DNA, 15 bp, Homo sapiens
cccagagtttcagat

SEQ ID NO: 824172 - DNA, 15 bp, Homo sapiens
ccagagtttcagatt

SEQ ID NO: 824173 - DNA, 15 bp, Homo sapiens
cagagtttcagattc

SEQ ID NO: 824174 - DNA, 15 bp, Homo sapiens
agagtttcagattca

SEQ ID NO: 824175 - DNA, 15 bp, Homo sapiens
gagtttcagattcag

SEQ ID NO: 824176 - DNA, 15 bp, Homo sapiens
agtttcagattcagt

SEQ ID NO: 824177 - DNA, 15 bp, Homo sapiens
gtttcagattcagta

SEQ ID NO: 824178 - DNA, 15 bp, Homo sapiens
tttcagattcagtac

SEQ ID NO: 824179 - DNA, 15 bp, Homo sapiens
ttcagattcagtaca

SEQ ID NO: 824180 - DNA, 15 bp, Homo sapiens
tcagattcagtacac

SEQ ID NO: 824181 - DNA, 15 bp, Homo sapiens
cagattcagtacacc

SEQ ID NO: 824182 - DNA, 15 bp, Homo sapiens
agattcagtacacct

SEQ ID NO: 824183 - DNA, 15 bp, Homo sapiens
gattcagtacacctg

SEQ ID NO: 824184 - DNA, 15 bp, Homo sapiens
attcagtacacctgg

SEQ ID NO: 824185 - DNA, 15 bp, Homo sapiens
ttcagtacacctggg

SEQ ID NO: 824186 - DNA, 15 bp, Homo sapiens
tcagtacacctggga

SEQ ID NO: 824187 - DNA, 15 bp, Homo sapiens
cagtacacctgggat

SEQ ID NO: 824188 - DNA, 15 bp, Homo sapiens
agtacacctgggatg

SEQ ID NO: 824189 - DNA, 15 bp, Homo sapiens
gtacacctgggatgg

SEQ ID NO: 824190 - DNA, 15 bp, Homo sapiens
tacacctgggatggg

SEQ ID NO: 824191 - DNA, 15 bp, Homo sapiens
acacctgggatgggg

SEQ ID NO: 824192 - DNA, 15 bp, Homo sapiens
cacctgggatggggc

SEQ ID NO: 824193 - DNA, 15 bp, Homo sapiens
acctgggatggggcc

SEQ ID NO: 824194 - DNA, 15 bp, Homo sapiens
cctgggatggggcct

SEQ ID NO: 824195 - DNA, 15 bp, Homo sapiens
ctgggatggggcctg

SEQ ID NO: 824196 - DNA, 15 bp, Homo sapiens
tgggatggggcctga

SEQ ID NO: 824197 - DNA, 15 bp, Homo sapiens
gggatggggcctgag

SEQ ID NO: 824198 - DNA, 15 bp, Homo sapiens
ggatggggcctgagg

SEQ ID NO: 824199 - DNA, 15 bp, Homo sapiens
gatggggcctgagga

SEQ ID NO: 824200 - DNA, 15 bp, Homo sapiens
atggggcctgaggat

SEQ ID NO: 824201 - DNA, 15 bp, Homo sapiens
tggggcctgaggatc

SEQ ID NO: 824202 - DNA, 15 bp, Homo sapiens
ggggcctgaggatct

SEQ ID NO: 824203 - DNA, 15 bp, Homo sapiens
gggcctgaggatctg

SEQ ID NO: 824204 - DNA, 15 bp, Homo sapiens
ggcctgaggatctgc

SEQ ID NO: 824205 - DNA, 15 bp, Homo sapiens
gcctgaggatctgca

SEQ ID NO: 824206 - DNA, 15 bp, Homo sapiens
cctgaggatctgcat

SEQ ID NO: 824207 - DNA, 15 bp, Homo sapiens
ctgaggatctgcatg

SEQ ID NO: 824208 - DNA, 15 bp, Homo sapiens
tgaggatctgcatgg

SEQ ID NO: 824209 - DNA, 15 bp, Homo sapiens
gaggatctgcatggc

SEQ ID NO: 824210 - DNA, 15 bp, Homo sapiens
aggatctgcatggct

SEQ ID NO: 824211 - DNA, 15 bp, Homo sapiens
ggatctgcatggcta

SEQ ID NO: 824212 - DNA, 15 bp, Homo sapiens
gatctgcatggctaa

SEQ ID NO: 824213 - DNA, 15 bp, Homo sapiens
atctgcatggctaac

SEQ ID NO: 824214 - DNA, 15 bp, Homo sapiens
tctgcatggctaaca

SEQ ID NO: 824215 - DNA, 15 bp, Homo sapiens
ctgcatggctaacac

SEQ ID NO: 824216 - DNA, 15 bp, Homo sapiens
tgcatggctaacaca

SEQ ID NO: 824217 - DNA, 15 bp, Homo sapiens
gcatggctaacacat

SEQ ID NO: 824218 - DNA, 15 bp, Homo sapiens
catggctaacacatt

SEQ ID NO: 824219 - DNA, 15 bp, Homo sapiens
atggctaacacattc

SEQ ID NO: 824220 - DNA, 15 bp, Homo sapiens
tggctaacacattcc

SEQ ID NO: 824221 - DNA, 15 bp, Homo sapiens
ggctaacacattccc

SEQ ID NO: 824222 - DNA, 15 bp, Homo sapiens
gctaacacattccca

SEQ ID NO: 824223 - DNA, 15 bp, Homo sapiens
ctaacacattcccaa

SEQ ID NO: 824224 - DNA, 15 bp, Homo sapiens
taacacattcccaag

SEQ ID NO: 824225 - DNA, 15 bp, Homo sapiens
aacacattcccaagt

SEQ ID NO: 824226 - DNA, 15 bp, Homo sapiens
acacattcccaagtg

SEQ ID NO: 824227 - DNA, 15 bp, Homo sapiens
cacattcccaagtga

SEQ ID NO: 824228 - DNA, 15 bp, Homo sapiens
acattcccaagtgat

SEQ ID NO: 824229 - DNA, 15 bp, Homo sapiens
cattcccaagtgatg

SEQ ID NO: 824230 - DNA, 15 bp, Homo sapiens
attcccaagtgatgc

SEQ ID NO: 824231 - DNA, 15 bp, Homo sapiens
ttcccaagtgatgct

SEQ ID NO: 824232 - DNA, 15 bp, Homo sapiens
tcccaagtgatgctg

SEQ ID NO: 824233 - DNA, 15 bp, Homo sapiens
cccaagtgatgctgc

SEQ ID NO: 824234 - DNA, 15 bp, Homo sapiens
ccaagtgatgctgct

SEQ ID NO: 824235 - DNA, 15 bp, Homo sapiens
caagtgatgctgctg

SEQ ID NO: 824236 - DNA, 15 bp, Homo sapiens
aagtgatgctgctgc

SEQ ID NO: 824237 - DNA, 15 bp, Homo sapiens
agtgatgctgctgct

SEQ ID NO: 824238 - DNA, 15 bp, Homo sapiens
gtgatgctgctgctg

SEQ ID NO: 824239 - DNA, 15 bp, Homo sapiens
tgatgctgctgctgc

SEQ ID NO: 824240 - DNA, 15 bp, Homo sapiens
gatgctgctgctgct

SEQ ID NO: 824241 - DNA, 15 bp, Homo sapiens
atgctgctgctgctg

SEQ ID NO: 824242 - DNA, 15 bp, Homo sapiens
gctgctgctgctgat

SEQ ID NO: 824243 - DNA, 15 bp, Homo sapiens
ctgctgctgctgatc

SEQ ID NO: 824244 - DNA, 15 bp, Homo sapiens
tgctgctgctgatct

SEQ ID NO: 824245 - DNA, 15 bp, Homo sapiens
gctgctgctgatctg

SEQ ID NO: 824246 - DNA, 15 bp, Homo sapiens
ctgctgctgatctgg

SEQ ID NO: 824247 - DNA, 15 bp, Homo sapiens
tgctgctgatctggg

SEQ ID NO: 824248 - DNA, 15 bp, Homo sapiens
gctgctgatctgggg

SEQ ID NO: 824249 - DNA, 15 bp, Homo sapiens
ctgctgatctggggg

SEQ ID NO: 824250 - DNA, 15 bp, Homo sapiens
tgctgatctgggggc

SEQ ID NO: 824251 - DNA, 15 bp, Homo sapiens
gctgatctgggggcc

SEQ ID NO: 824252 - DNA, 15 bp, Homo sapiens
ctgatctgggggcca

SEQ ID NO: 824253 - DNA, 15 bp, Homo sapiens
tgatctgggggccac

SEQ ID NO: 824254 - DNA, 15 bp, Homo sapiens
gatctgggggccaca

SEQ ID NO: 824255 - DNA, 15 bp, Homo sapiens
atctgggggccacac

SEQ ID NO: 824256 - DNA, 15 bp, Homo sapiens
tctgggggccacact

SEQ ID NO: 824257 - DNA, 15 bp, Homo sapiens
ctgggggccacactt

SEQ ID NO: 824258 - DNA, 15 bp, Homo sapiens
tgggggccacacttt

SEQ ID NO: 824259 - DNA, 15 bp, Homo sapiens
gggggccacactttg

SEQ ID NO: 824260 - DNA, 15 bp, Homo sapiens
ggggccacactttga

SEQ ID NO: 824261 - DNA, 15 bp, Homo sapiens
gggccacactttgag

SEQ ID NO: 824262 - DNA, 15 bp, Homo sapiens
ggccacactttgaga

SEQ ID NO: 824263 - DNA, 15 bp, Homo sapiens
gccacactttgagat

SEQ ID NO: 824264 - DNA, 15 bp, Homo sapiens
ccacactttgagatc

SEQ ID NO: 824265 - DNA, 15 bp, Homo sapiens
cacactttgagatct

SEQ ID NO: 824266 - DNA, 15 bp, Homo sapiens
acactttgagatctg

SEQ ID NO: 824267 - DNA, 15 bp, Homo sapiens
cactttgagatctgc

SEQ ID NO: 824268 - DNA, 15 bp, Homo sapiens
actttgagatctgct

SEQ ID NO: 824269 - DNA, 15 bp, Homo sapiens
ctttgagatctgctg

SEQ ID NO: 824270 - DNA, 15 bp, Homo sapiens
tttgagatctgctgg

SEQ ID NO: 824271 - DNA, 15 bp, Homo sapiens
ttgagatctgctggt

SEQ ID NO: 824272 - DNA, 15 bp, Homo sapiens
tgagatctgctggtc

SEQ ID NO: 824273 - DNA, 15 bp, Homo sapiens
gagatctgctggtcc

SEQ ID NO: 824274 - DNA, 15 bp, Homo sapiens
agatctgctggtcca

SEQ ID NO: 824275 - DNA, 15 bp, Homo sapiens
gatctgctggtccag

SEQ ID NO: 824276 - DNA, 15 bp, Homo sapiens
atctgctggtccagc

SEQ ID NO: 824277 - DNA, 15 bp, Homo sapiens
tctgctggtccagcc

SEQ ID NO: 824278 - DNA, 15 bp, Homo sapiens
ctgctggtccagccc

SEQ ID NO: 824279 - DNA, 15 bp, Homo sapiens
tgctggtccagccca

SEQ ID NO: 824280 - DNA, 15 bp, Homo sapiens
gctggtccagcccac

SEQ ID NO: 824281 - DNA, 15 bp, Homo sapiens
ctggtccagcccacg

SEQ ID NO: 824282 - DNA, 15 bp, Homo sapiens
tggtccagcccacgg

SEQ ID NO: 824283 - DNA, 15 bp, Homo sapiens
ggtccagcccacggt

SEQ ID NO: 824284 - DNA, 15 bp, Homo sapiens
gtccagcccacggtg

SEQ ID NO: 824285 - DNA, 15 bp, Homo sapiens
tccagcccacggtga

SEQ ID NO: 824286 - DNA, 15 bp, Homo sapiens
ccagcccacggtgag

SEQ ID NO: 824287 - DNA, 15 bp, Homo sapiens
cagcccacggtgagg

SEQ ID NO: 824288 - DNA, 15 bp, Homo sapiens
agcccacggtgaggc

SEQ ID NO: 824289 - DNA, 15 bp, Homo sapiens
gcccacggtgaggct

SEQ ID NO: 824290 - DNA, 15 bp, Homo sapiens
cccacggtgaggctg

SEQ ID NO: 824291 - DNA, 15 bp, Homo sapiens
ccacggtgaggctga

SEQ ID NO: 824292 - DNA, 15 bp, Homo sapiens
cacggtgaggctgaa

SEQ ID NO: 824293 - DNA, 15 bp, Homo sapiens
acggtgaggctgaac

SEQ ID NO: 824294 - DNA, 15 bp, Homo sapiens
cggtgaggctgaact

SEQ ID NO: 824295 - DNA, 15 bp, Homo sapiens
ggtgaggctgaactt

SEQ ID NO: 824296 - DNA, 15 bp, Homo sapiens
gtgaggctgaacttg

SEQ ID NO: 824297 - DNA, 15 bp, Homo sapiens
tgaggctgaacttga

SEQ ID NO: 824298 - DNA, 15 bp, Homo sapiens
gaggctgaacttgaa

SEQ ID NO: 824299 - DNA, 15 bp, Homo sapiens
aggctgaacttgaat

SEQ ID NO: 824300 - DNA, 15 bp, Homo sapiens
ggctgaacttgaatt

SEQ ID NO: 824301 - DNA, 15 bp, Homo sapiens
gctgaacttgaattc

SEQ ID NO: 824302 - DNA, 15 bp, Homo sapiens
ctgaacttgaattct

SEQ ID NO: 824303 - DNA, 15 bp, Homo sapiens
tgaacttgaattcta

SEQ ID NO: 824304 - DNA, 15 bp, Homo sapiens
gaacttgaattctag

SEQ ID NO: 824305 - DNA, 15 bp, Homo sapiens
aacttgaattctagt

SEQ ID NO: 824306 - DNA, 15 bp, Homo sapiens
acttgaattctagtt

SEQ ID NO: 824307 - DNA, 15 bp, Homo sapiens
cttgaattctagttg

SEQ ID NO: 824308 - DNA, 15 bp, Homo sapiens
ttgaattctagttgt

SEQ ID NO: 824309 - DNA, 15 bp, Homo sapiens
tgaattctagttgta

SEQ ID NO: 824310 - DNA, 15 bp, Homo sapiens
gaattctagttgtag

SEQ ID NO: 824311 - DNA, 15 bp, Homo sapiens
aattctagttgtagc

SEQ ID NO: 824312 - DNA, 15 bp, Homo sapiens
attctagttgtagct

SEQ ID NO: 824313 - DNA, 15 bp, Homo sapiens
ttctagttgtagctg

SEQ ID NO: 824314 - DNA, 15 bp, Homo sapiens
tctagttgtagctgc

SEQ ID NO: 824315 - DNA, 15 bp, Homo sapiens
ctagttgtagctgct

SEQ ID NO: 824316 - DNA, 15 bp, Homo sapiens
tagttgtagctgcta

SEQ ID NO: 824317 - DNA, 15 bp, Homo sapiens
agttgtagctgctat

SEQ ID NO: 824318 - DNA, 15 bp, Homo sapiens
gttgtagctgctatg

SEQ ID NO: 824319 - DNA, 15 bp, Homo sapiens
ttgtagctgctatgc

SEQ ID NO: 824320 - DNA, 15 bp, Homo sapiens
tgtagctgctatgca

SEQ ID NO: 824321 - DNA, 15 bp, Homo sapiens
gtagctgctatgcaa

SEQ ID NO: 824322 - DNA, 15 bp, Homo sapiens
tagctgctatgcaag

SEQ ID NO: 824323 - DNA, 15 bp, Homo sapiens
agctgctatgcaagt

SEQ ID NO: 824324 - DNA, 15 bp, Homo sapiens
gctgctatgcaagtt

SEQ ID NO: 824325 - DNA, 15 bp, Homo sapiens
ctgctatgcaagttt

SEQ ID NO: 824326 - DNA, 15 bp, Homo sapiens
tgctatgcaagtttc

SEQ ID NO: 824327 - DNA, 15 bp, Homo sapiens
gctatgcaagtttcc

SEQ ID NO: 824328 - DNA, 15 bp, Homo sapiens
ctatgcaagtttcca

SEQ ID NO: 824329 - DNA, 15 bp, Homo sapiens
tatgcaagtttccag

SEQ ID NO: 824330 - DNA, 15 bp, Homo sapiens
atgcaagtttccagg

SEQ ID NO: 824331 - DNA, 15 bp, Homo sapiens
tgcaagtttccagga

SEQ ID NO: 824332 - DNA, 15 bp, Homo sapiens
gcaagtttccaggat

SEQ ID NO: 824333 - DNA, 15 bp, Homo sapiens
caagtttccaggatt

SEQ ID NO: 824334 - DNA, 15 bp, Homo sapiens
aagtttccaggattc

SEQ ID NO: 824335 - DNA, 15 bp, Homo sapiens
agtttccaggattct

SEQ ID NO: 824336 - DNA, 15 bp, Homo sapiens
gtttccaggattctg

SEQ ID NO: 824337 - DNA, 15 bp, Homo sapiens
tttccaggattctgg

SEQ ID NO: 824338 - DNA, 15 bp, Homo sapiens
ttccaggattctggt

SEQ ID NO: 824339 - DNA, 15 bp, Homo sapiens
tccaggattctggta

SEQ ID NO: 824340 - DNA, 15 bp, Homo sapiens
ccaggattctggtat

SEQ ID NO: 824341 - DNA, 15 bp, Homo sapiens
caggattctggtatt

SEQ ID NO: 824342 - DNA, 15 bp, Homo sapiens
aggattctggtatta

SEQ ID NO: 824343 - DNA, 15 bp, Homo sapiens
ggattctggtattag

SEQ ID NO: 824344 - DNA, 15 bp, Homo sapiens
gattctggtattaga

SEQ ID NO: 824345 - DNA, 15 bp, Homo sapiens
attctggtattagag

SEQ ID NO: 824346 - DNA, 15 bp, Homo sapiens
ttctggtattagagt

SEQ ID NO: 824347 - DNA, 15 bp, Homo sapiens
tctggtattagagta

SEQ ID NO: 824348 - DNA, 15 bp, Homo sapiens
ctggtattagagtaa

SEQ ID NO: 824349 - DNA, 15 bp, Homo sapiens
tggtattagagtaaa

SEQ ID NO: 824350 - DNA, 15 bp, Homo sapiens
ggtattagagtaaac

SEQ ID NO: 824351 - DNA, 15 bp, Homo sapiens
gtattagagtaaacc

SEQ ID NO: 824352 - DNA, 15 bp, Homo sapiens
tattagagtaaacct

SEQ ID NO: 824353 - DNA, 15 bp, Homo sapiens
attagagtaaacctt

SEQ ID NO: 824354 - DNA, 15 bp, Homo sapiens
ttagagtaaaccttg

SEQ ID NO: 824355 - DNA, 15 bp, Homo sapiens
tagagtaaaccttgc

SEQ ID NO: 824356 - DNA, 15 bp, Homo sapiens
agagtaaaccttgct

SEQ ID NO: 824357 - DNA, 15 bp, Homo sapiens
gagtaaaccttgcta

SEQ ID NO: 824358 - DNA, 15 bp, Homo sapiens
agtaaaccttgctat

SEQ ID NO: 824359 - DNA, 15 bp, Homo sapiens
gtaaaccttgctatt

SEQ ID NO: 824360 - DNA, 15 bp, Homo sapiens
taaaccttgctattt

SEQ ID NO: 824361 - DNA, 15 bp, Homo sapiens
aaaccttgctatttt

SEQ ID NO: 824362 - DNA, 15 bp, Homo sapiens
aaccttgctattttg

SEQ ID NO: 824363 - DNA, 15 bp, Homo sapiens
accttgctattttgt

SEQ ID NO: 824364 - DNA, 15 bp, Homo sapiens
ccttgctattttgtg

SEQ ID NO: 824365 - DNA, 15 bp, Homo sapiens
cttgctattttgtgc

SEQ ID NO: 824366 - DNA, 15 bp, Homo sapiens
ttgctattttgtgct

SEQ ID NO: 824367 - DNA, 15 bp, Homo sapiens
tgctattttgtgctc

SEQ ID NO: 824368 - DNA, 15 bp, Homo sapiens
gctattttgtgctcc

SEQ ID NO: 824369 - DNA, 15 bp, Homo sapiens
ctattttgtgctcct

SEQ ID NO: 824370 - DNA, 15 bp, Homo sapiens
tattttgtgctccta

SEQ ID NO: 824371 - DNA, 15 bp, Homo sapiens
attttgtgctcctaa

SEQ ID NO: 824372 - DNA, 15 bp, Homo sapiens
ttttgtgctcctaaa

SEQ ID NO: 824373 - DNA, 15 bp, Homo sapiens
tttgtgctcctaaat

SEQ ID NO: 824374 - DNA, 15 bp, Homo sapiens
ttgtgctcctaaata

SEQ ID NO: 824375 - DNA, 15 bp, Homo sapiens
tgtgctcctaaatat

SEQ ID NO: 824376 - DNA, 15 bp, Homo sapiens
gtgctcctaaatatc

SEQ ID NO: 824377 - DNA, 15 bp, Homo sapiens
tgctcctaaatatca

SEQ ID NO: 824378 - DNA, 15 bp, Homo sapiens
gctcctaaatatcag

SEQ ID NO: 824379 - DNA, 15 bp, Homo sapiens
ctcctaaatatcagt

SEQ ID NO: 824380 - DNA, 15 bp, Homo sapiens
tcctaaatatcagta

SEQ ID NO: 824381 - DNA, 15 bp, Homo sapiens
cctaaatatcagtat

SEQ ID NO: 824382 - DNA, 15 bp, Homo sapiens
ctaaatatcagtatt

SEQ ID NO: 824383 - DNA, 15 bp, Homo sapiens
taaatatcagtattc

SEQ ID NO: 824384 - DNA, 15 bp, Homo sapiens
aaatatcagtattct

SEQ ID NO: 824385 - DNA, 15 bp, Homo sapiens
aatatcagtattctt

SEQ ID NO: 824386 - DNA, 15 bp, Homo sapiens
atatcagtattctta

SEQ ID NO: 824387 - DNA, 15 bp, Homo sapiens
tatcagtattcttat

SEQ ID NO: 824388 - DNA, 15 bp, Homo sapiens
atcagtattcttatt

SEQ ID NO: 824389 - DNA, 15 bp, Homo sapiens
tcagtattcttatta

SEQ ID NO: 824390 - DNA, 15 bp, Homo sapiens
cagtattcttattaa

SEQ ID NO: 824391 - DNA, 15 bp, Homo sapiens
agtattcttattaat

SEQ ID NO: 824392 - DNA, 15 bp, Homo sapiens
gtattcttattaatg

SEQ ID NO: 824393 - DNA, 15 bp, Homo sapiens
tattcttattaatgt

SEQ ID NO: 824394 - DNA, 15 bp, Homo sapiens
attcttattaatgta

SEQ ID NO: 824395 - DNA, 15 bp, Homo sapiens
ttcttattaatgtaa

SEQ ID NO: 824396 - DNA, 15 bp, Homo sapiens
tcttattaatgtaat

SEQ ID NO: 824397 - DNA, 15 bp, Homo sapiens
cttattaatgtaatc

SEQ ID NO: 824398 - DNA, 15 bp, Homo sapiens
ttattaatgtaatcc

SEQ ID NO: 824399 - DNA, 15 bp, Homo sapiens
tattaatgtaatcct

SEQ ID NO: 824400 - DNA, 15 bp, Homo sapiens
attaatgtaatcctt

SEQ ID NO: 824401 - DNA, 15 bp, Homo sapiens
ttaatgtaatccttt

SEQ ID NO: 824402 - DNA, 15 bp, Homo sapiens
taatgtaatccttta

SEQ ID NO: 824403 - DNA, 15 bp, Homo sapiens
aatgtaatcctttat

SEQ ID NO: 824404 - DNA, 15 bp, Homo sapiens
atgtaatcctttatt

SEQ ID NO: 824405 - DNA, 15 bp, Homo sapiens
tgtaatcctttattt

SEQ ID NO: 824406 - DNA, 15 bp, Homo sapiens
gtaatcctttatttc

SEQ ID NO: 824407 - DNA, 15 bp, Homo sapiens
taatcctttatttca

SEQ ID NO: 824408 - DNA, 15 bp, Homo sapiens
aatcctttatttcat

SEQ ID NO: 824409 - DNA, 15 bp, Homo sapiens
atcctttatttcata

SEQ ID NO: 824410 - DNA, 15 bp, Homo sapiens
tcctttatttcatat

SEQ ID NO: 824411 - DNA, 15 bp, Homo sapiens
cctttatttcatatg

SEQ ID NO: 824412 - DNA, 15 bp, Homo sapiens
ctttatttcatatgt

SEQ ID NO: 824413 - DNA, 15 bp, Homo sapiens
tttatttcatatgtt

SEQ ID NO: 824414 - DNA, 15 bp, Homo sapiens
ttatttcatatgttt

SEQ ID NO: 824415 - DNA, 15 bp, Homo sapiens
tatttcatatgtttt

SEQ ID NO: 824416 - DNA, 15 bp, Homo sapiens
atttcatatgttttt

SEQ ID NO: 824417 - DNA, 15 bp, Homo sapiens
tttcatatgtttttg

SEQ ID NO: 824418 - DNA, 15 bp, Homo sapiens
ttcatatgtttttga

SEQ ID NO: 824419 - DNA, 15 bp, Homo sapiens
tcatatgtttttgag

SEQ ID NO: 824420 - DNA, 15 bp, Homo sapiens
catatgtttttgaga

SEQ ID NO: 824421 - DNA, 15 bp, Homo sapiens
atatgtttttgagat

SEQ ID NO: 824422 - DNA, 15 bp, Homo sapiens
tatgtttttgagatt

SEQ ID NO: 824423 - DNA, 15 bp, Homo sapiens
atgtttttgagatta

SEQ ID NO: 824424 - DNA, 15 bp, Homo sapiens
tgtttttgagattaa

SEQ ID NO: 824425 - DNA, 15 bp, Homo sapiens
gtttttgagattaaa

SEQ ID NO: 824426 - DNA, 15 bp, Homo sapiens
tttttgagattaaaa

SEQ ID NO: 824427 - DNA, 15 bp, Homo sapiens
ttttgagattaaaat

SEQ ID NO: 824428 - DNA, 15 bp, Homo sapiens
tttgagattaaaatc

SEQ ID NO: 824429 - DNA, 15 bp, Homo sapiens
ttgagattaaaatct

SEQ ID NO: 824430 - DNA, 15 bp, Homo sapiens
tgagattaaaatctg

SEQ ID NO: 824431 - DNA, 15 bp, Homo sapiens
gagattaaaatctga

SEQ ID NO: 824432 - DNA, 15 bp, Homo sapiens
agattaaaatctgag

SEQ ID NO: 824433 - DNA, 15 bp, Homo sapiens
gattaaaatctgagt

SEQ ID NO: 824434 - DNA, 15 bp, Homo sapiens
attaaaatctgagtc

SEQ ID NO: 824435 - DNA, 15 bp, Homo sapiens
ttaaaatctgagtca

SEQ ID NO: 824436 - DNA, 15 bp, Homo sapiens
taaaatctgagtcat

SEQ ID NO: 824437 - DNA, 15 bp, Homo sapiens
aaaatctgagtcatt

SEQ ID NO: 824438 - DNA, 15 bp, Homo sapiens
aaatctgagtcattt

SEQ ID NO: 824439 - DNA, 15 bp, Homo sapiens
aatctgagtcattta

SEQ ID NO: 824440 - DNA, 15 bp, Homo sapiens
atctgagtcatttac

SEQ ID NO: 824441 - DNA, 15 bp, Homo sapiens
tctgagtcatttaca

SEQ ID NO: 824442 - DNA, 15 bp, Homo sapiens
ctgagtcatttacat

SEQ ID NO: 824443 - DNA, 15 bp, Homo sapiens
tgagtcatttacatc

SEQ ID NO: 824444 - DNA, 15 bp, Homo sapiens
gagtcatttacatct

SEQ ID NO: 824445 - DNA, 15 bp, Homo sapiens
agtcatttacatctt

SEQ ID NO: 824446 - DNA, 15 bp, Homo sapiens
gtcatttacatcttg

SEQ ID NO: 824447 - DNA, 15 bp, Homo sapiens
tcatttacatcttga

SEQ ID NO: 824448 - DNA, 15 bp, Homo sapiens
catttacatcttgag

SEQ ID NO: 824449 - DNA, 15 bp, Homo sapiens
atttacatcttgaga

SEQ ID NO: 824450 - DNA, 15 bp, Homo sapiens
tttacatcttgagat

SEQ ID NO: 824451 - DNA, 15 bp, Homo sapiens
ttacatcttgagata

SEQ ID NO: 824452 - DNA, 15 bp, Homo sapiens
tacatcttgagatat

SEQ ID NO: 824453 - DNA, 15 bp, Homo sapiens
acatcttgagatata

SEQ ID NO: 824454 - DNA, 15 bp, Homo sapiens
catcttgagatatac

SEQ ID NO: 824455 - DNA, 15 bp, Homo sapiens
atcttgagatatact

SEQ ID NO: 824456 - DNA, 15 bp, Homo sapiens
tcttgagatatactc

SEQ ID NO: 824457 - DNA, 15 bp, Homo sapiens
cttgagatatactca

SEQ ID NO: 824458 - DNA, 15 bp, Homo sapiens
ttgagatatactcat

SEQ ID NO: 824459 - DNA, 15 bp, Homo sapiens
tgagatatactcatc

SEQ ID NO: 824460 - DNA, 15 bp, Homo sapiens
gagatatactcatcc

SEQ ID NO: 824461 - DNA, 15 bp, Homo sapiens
agatatactcatcct

SEQ ID NO: 824462 - DNA, 15 bp, Homo sapiens
gatatactcatccta

SEQ ID NO: 824463 - DNA, 15 bp, Homo sapiens
atatactcatcctat

SEQ ID NO: 824464 - DNA, 15 bp, Homo sapiens
tatactcatcctatg

SEQ ID NO: 824465 - DNA, 15 bp, Homo sapiens
atactcatcctatga

SEQ ID NO: 824466 - DNA, 15 bp, Homo sapiens
tactcatcctatgat

SEQ ID NO: 824467 - DNA, 15 bp, Homo sapiens
actcatcctatgata

SEQ ID NO: 824468 - DNA, 15 bp, Homo sapiens
ctcatcctatgatat

SEQ ID NO: 824469 - DNA, 15 bp, Homo sapiens
tcatcctatgatatt

SEQ ID NO: 824470 - DNA, 15 bp, Homo sapiens
catcctatgatattc

SEQ ID NO: 824471 - DNA, 15 bp, Homo sapiens
atcctatgatattcc

SEQ ID NO: 824472 - DNA, 15 bp, Homo sapiens
tcctatgatattcca

SEQ ID NO: 824473 - DNA, 15 bp, Homo sapiens
cctatgatattccat

SEQ ID NO: 824474 - DNA, 15 bp, Homo sapiens
ctatgatattccata

SEQ ID NO: 824475 - DNA, 15 bp, Homo sapiens
tatgatattccatat

SEQ ID NO: 824476 - DNA, 15 bp, Homo sapiens
atgatattccatatt

SEQ ID NO: 824477 - DNA, 15 bp, Homo sapiens
tgatattccatatta

SEQ ID NO: 824478 - DNA, 15 bp, Homo sapiens
gatattccatattac

SEQ ID NO: 824479 - DNA, 15 bp, Homo sapiens
atattccatattaca

SEQ ID NO: 824480 - DNA, 15 bp, Homo sapiens
tattccatattacaa

SEQ ID NO: 824481 - DNA, 15 bp, Homo sapiens
attccatattacaat

SEQ ID NO: 824482 - DNA, 15 bp, Homo sapiens
ttccatattacaatt

SEQ ID NO: 824483 - DNA, 15 bp, Homo sapiens
tccatattacaattt

SEQ ID NO: 824484 - DNA, 15 bp, Homo sapiens
ccatattacaatttc

SEQ ID NO: 824485 - DNA, 15 bp, Homo sapiens
catattacaatttca

SEQ ID NO: 824486 - DNA, 15 bp, Homo sapiens
atattacaatttcaa

SEQ ID NO: 824487 - DNA, 15 bp, Homo sapiens
tattacaatttcaac

SEQ ID NO: 824488 - DNA, 15 bp, Homo sapiens
attacaatttcaact

SEQ ID NO: 824489 - DNA, 15 bp, Homo sapiens
ttacaatttcaactt

SEQ ID NO: 824490 - DNA, 15 bp, Homo sapiens
tacaatttcaacttg

SEQ ID NO: 824491 - DNA, 15 bp, Homo sapiens
acaatttcaacttga

SEQ ID NO: 824492 - DNA, 15 bp, Homo sapiens
caatttcaacttgaa

SEQ ID NO: 824493 - DNA, 15 bp, Homo sapiens
aatttcaacttgaac

SEQ ID NO: 824494 - DNA, 15 bp, Homo sapiens
atttcaacttgaaca

SEQ ID NO: 824495 - DNA, 15 bp, Homo sapiens
tttcaacttgaacag

SEQ ID NO: 824496 - DNA, 15 bp, Homo sapiens
ttcaacttgaacagc

SEQ ID NO: 824497 - DNA, 15 bp, Homo sapiens
tcaacttgaacagca

SEQ ID NO: 824498 - DNA, 15 bp, Homo sapiens
caacttgaacagcag

SEQ ID NO: 824499 - DNA, 15 bp, Homo sapiens
aacttgaacagcaga

SEQ ID NO: 824500 - DNA, 15 bp, Homo sapiens
acttgaacagcagaa

SEQ ID NO: 824501 - DNA, 15 bp, Homo sapiens
cttgaacagcagaac

SEQ ID NO: 824502 - DNA, 15 bp, Homo sapiens
ttgaacagcagaacc

SEQ ID NO: 824503 - DNA, 15 bp, Homo sapiens
tgaacagcagaaccc

SEQ ID NO: 824504 - DNA, 15 bp, Homo sapiens
gaacagcagaaccct

SEQ ID NO: 824505 - DNA, 15 bp, Homo sapiens
aacagcagaaccctt

SEQ ID NO: 824506 - DNA, 15 bp, Homo sapiens
acagcagaacccttt

SEQ ID NO: 824507 - DNA, 15 bp, Homo sapiens
cagcagaaccctttt

SEQ ID NO: 824508 - DNA, 15 bp, Homo sapiens
agcagaacccttttc

SEQ ID NO: 824509 - DNA, 15 bp, Homo sapiens
gcagaacccttttcc

SEQ ID NO: 824510 - DNA, 15 bp, Homo sapiens
cagaacccttttccc

SEQ ID NO: 824511 - DNA, 15 bp, Homo sapiens
agaacccttttccca

SEQ ID NO: 824512 - DNA, 15 bp, Homo sapiens
gaacccttttcccat

SEQ ID NO: 824513 - DNA, 15 bp, Homo sapiens
aacccttttcccata

SEQ ID NO: 824514 - DNA, 15 bp, Homo sapiens
acccttttcccatag

SEQ ID NO: 824515 - DNA, 15 bp, Homo sapiens
cccttttcccatagc

SEQ ID NO: 824516 - DNA, 15 bp, Homo sapiens
ccttttcccatagct

SEQ ID NO: 824517 - DNA, 15 bp, Homo sapiens
cttttcccatagctc

SEQ ID NO: 824518 - DNA, 15 bp, Homo sapiens
ttttcccatagctct

SEQ ID NO: 824519 - DNA, 15 bp, Homo sapiens
tttcccatagctctt

SEQ ID NO: 824520 - DNA, 15 bp, Homo sapiens
ttcccatagctcttg

SEQ ID NO: 824521 - DNA, 15 bp, Homo sapiens
tcccatagctcttgg

SEQ ID NO: 824522 - DNA, 15 bp, Homo sapiens
cccatagctcttgga

SEQ ID NO: 824523 - DNA, 15 bp, Homo sapiens
ccatagctcttggat

SEQ ID NO: 824524 - DNA, 15 bp, Homo sapiens
catagctcttggatc

SEQ ID NO: 824525 - DNA, 15 bp, Homo sapiens
atagctcttggatct

SEQ ID NO: 824526 - DNA, 15 bp, Homo sapiens
tagctcttggatctt

SEQ ID NO: 824527 - DNA, 15 bp, Homo sapiens
agctcttggatcttc

SEQ ID NO: 824528 - DNA, 15 bp, Homo sapiens
gctcttggatcttcc

SEQ ID NO: 824529 - DNA, 15 bp, Homo sapiens
ctcttggatcttcca

SEQ ID NO: 824530 - DNA, 15 bp, Homo sapiens
tcttggatcttccac

SEQ ID NO: 824531 - DNA, 15 bp, Homo sapiens
cttggatcttccact

SEQ ID NO: 824532 - DNA, 15 bp, Homo sapiens
ttggatcttccactt

SEQ ID NO: 824533 - DNA, 15 bp, Homo sapiens
tggatcttccacttg

SEQ ID NO: 824534 - DNA, 15 bp, Homo sapiens
ggatcttccacttgt

SEQ ID NO: 824535 - DNA, 15 bp, Homo sapiens
gatcttccacttgta

SEQ ID NO: 824536 - DNA, 15 bp, Homo sapiens
atcttccacttgtaa

SEQ ID NO: 824537 - DNA, 15 bp, Homo sapiens
tcttccacttgtaat

SEQ ID NO: 824538 - DNA, 15 bp, Homo sapiens
cttccacttgtaatc

SEQ ID NO: 824539 - DNA, 15 bp, Homo sapiens
ttccacttgtaatcc

SEQ ID NO: 824540 - DNA, 15 bp, Homo sapiens
tccacttgtaatccc

SEQ ID NO: 824541 - DNA, 15 bp, Homo sapiens
ccacttgtaatcccc

SEQ ID NO: 824542 - DNA, 15 bp, Homo sapiens
cacttgtaatcccct

SEQ ID NO: 824543 - DNA, 15 bp, Homo sapiens
acttgtaatcccctt

SEQ ID NO: 824544 - DNA, 15 bp, Homo sapiens
cttgtaatccccttc

SEQ ID NO: 824545 - DNA, 15 bp, Homo sapiens
ttgtaatccccttct

SEQ ID NO: 824546 - DNA, 15 bp, Homo sapiens
tgtaatccccttcta

SEQ ID NO: 824547 - DNA, 15 bp, Homo sapiens
gtaatccccttctaa

SEQ ID NO: 824548 - DNA, 15 bp, Homo sapiens
taatccccttctaag

SEQ ID NO: 824549 - DNA, 15 bp, Homo sapiens
aatccccttctaagg

SEQ ID NO: 824550 - DNA, 15 bp, Homo sapiens
atccccttctaaggt

SEQ ID NO: 824551 - DNA, 15 bp, Homo sapiens
tccccttctaaggta

SEQ ID NO: 824552 - DNA, 15 bp, Homo sapiens
ccccttctaaggtat

SEQ ID NO: 824553 - DNA, 15 bp, Homo sapiens
cccttctaaggtatt

SEQ ID NO: 824554 - DNA, 15 bp, Homo sapiens
ccttctaaggtattc

SEQ ID NO: 824555 - DNA, 15 bp, Homo sapiens
cttctaaggtattcc

SEQ ID NO: 824556 - DNA, 15 bp, Homo sapiens
ttctaaggtattcca

SEQ ID NO: 824557 - DNA, 15 bp, Homo sapiens
tctaaggtattccaa

SEQ ID NO: 824558 - DNA, 15 bp, Homo sapiens
ctaaggtattccaag

SEQ ID NO: 824559 - DNA, 15 bp, Homo sapiens
taaggtattccaagt

SEQ ID NO: 824560 - DNA, 15 bp, Homo sapiens
aaggtattccaagtc

SEQ ID NO: 824561 - DNA, 15 bp, Homo sapiens
aggtattccaagtcc

SEQ ID NO: 824562 - DNA, 15 bp, Homo sapiens
ggtattccaagtcct

SEQ ID NO: 824563 - DNA, 15 bp, Homo sapiens
gtattccaagtcctt

SEQ ID NO: 824564 - DNA, 15 bp, Homo sapiens
tattccaagtccttg

SEQ ID NO: 824565 - DNA, 15 bp, Homo sapiens
attccaagtccttgg

SEQ ID NO: 824566 - DNA, 15 bp, Homo sapiens
ttccaagtccttggt

SEQ ID NO: 824567 - DNA, 15 bp, Homo sapiens
tccaagtccttggtt

SEQ ID NO: 824568 - DNA, 15 bp, Homo sapiens
ccaagtccttggtta

SEQ ID NO: 824569 - DNA, 15 bp, Homo sapiens
caagtccttggttac

SEQ ID NO: 824570 - DNA, 15 bp, Homo sapiens
aagtccttggttact

SEQ ID NO: 824571 - DNA, 15 bp, Homo sapiens
agtccttggttacta

SEQ ID NO: 824572 - DNA, 15 bp, Homo sapiens
gtccttggttactag

SEQ ID NO: 824573 - DNA, 15 bp, Homo sapiens
tccttggttactagt

SEQ ID NO: 824574 - DNA, 15 bp, Homo sapiens
ccttggttactagta

SEQ ID NO: 824575 - DNA, 15 bp, Homo sapiens
cttggttactagtaa

SEQ ID NO: 824576 - DNA, 15 bp, Homo sapiens
ttggttactagtaag

SEQ ID NO: 824577 - DNA, 15 bp, Homo sapiens
tggttactagtaaga

SEQ ID NO: 824578 - DNA, 15 bp, Homo sapiens
ggttactagtaagaa

SEQ ID NO: 824579 - DNA, 15 bp, Homo sapiens
gttactagtaagaat

SEQ ID NO: 824580 - DNA, 15 bp, Homo sapiens
ttactagtaagaatg

SEQ ID NO: 824581 - DNA, 15 bp, Homo sapiens
tactagtaagaatga

SEQ ID NO: 824582 - DNA, 15 bp, Homo sapiens
actagtaagaatgag

SEQ ID NO: 824583 - DNA, 15 bp, Homo sapiens
ctagtaagaatgagc

SEQ ID NO: 824584 - DNA, 15 bp, Homo sapiens
tagtaagaatgagca

SEQ ID NO: 824585 - DNA, 15 bp, Homo sapiens
agtaagaatgagcac

SEQ ID NO: 824586 - DNA, 15 bp, Homo sapiens
gtaagaatgagcacc

SEQ ID NO: 824587 - DNA, 15 bp, Homo sapiens
taagaatgagcacct

SEQ ID NO: 824588 - DNA, 15 bp, Homo sapiens
aagaatgagcacctt

SEQ ID NO: 824589 - DNA, 15 bp, Homo sapiens
agaatgagcaccttt

SEQ ID NO: 824590 - DNA, 15 bp, Homo sapiens
gaatgagcacctttg

SEQ ID NO: 824591 - DNA, 15 bp, Homo sapiens
aatgagcacctttgc

SEQ ID NO: 824592 - DNA, 15 bp, Homo sapiens
atgagcacctttgct

SEQ ID NO: 824593 - DNA, 15 bp, Homo sapiens
tgagcacctttgctt

SEQ ID NO: 824594 - DNA, 15 bp, Homo sapiens
gagcacctttgcttg

SEQ ID NO: 824595 - DNA, 15 bp, Homo sapiens
agcacctttgcttga

SEQ ID NO: 824596 - DNA, 15 bp, Homo sapiens
gcacctttgcttgac

SEQ ID NO: 824597 - DNA, 15 bp, Homo sapiens
cacctttgcttgact

SEQ ID NO: 824598 - DNA, 15 bp, Homo sapiens
acctttgcttgactt

SEQ ID NO: 824599 - DNA, 15 bp, Homo sapiens
cctttgcttgacttt

SEQ ID NO: 824600 - DNA, 15 bp, Homo sapiens
ctttgcttgacttta

SEQ ID NO: 824601 - DNA, 15 bp, Homo sapiens
tttgcttgactttat

SEQ ID NO: 824602 - DNA, 15 bp, Homo sapiens
ttgcttgactttatt

SEQ ID NO: 824603 - DNA, 15 bp, Homo sapiens
tgcttgactttatta

SEQ ID NO: 824604 - DNA, 15 bp, Homo sapiens
gcttgactttattag

SEQ ID NO: 824605 - DNA, 15 bp, Homo sapiens
cttgactttattagt

SEQ ID NO: 824606 - DNA, 15 bp, Homo sapiens
ttgactttattagtc

SEQ ID NO: 824607 - DNA, 15 bp, Homo sapiens
tgactttattagtca

SEQ ID NO: 824608 - DNA, 15 bp, Homo sapiens
gactttattagtcac

SEQ ID NO: 824609 - DNA, 15 bp, Homo sapiens
actttattagtcact

SEQ ID NO: 824610 - DNA, 15 bp, Homo sapiens
ctttattagtcacta

SEQ ID NO: 824611 - DNA, 15 bp, Homo sapiens
tttattagtcactag

SEQ ID NO: 824612 - DNA, 15 bp, Homo sapiens
ttattagtcactagt

SEQ ID NO: 824613 - DNA, 15 bp, Homo sapiens
tattagtcactagta

SEQ ID NO: 824614 - DNA, 15 bp, Homo sapiens
attagtcactagtat

SEQ ID NO: 824615 - DNA, 15 bp, Homo sapiens
ttagtcactagtatt

SEQ ID NO: 824616 - DNA, 15 bp, Homo sapiens
tagtcactagtattt

SEQ ID NO: 824617 - DNA, 15 bp, Homo sapiens
agtcactagtatttt

SEQ ID NO: 824618 - DNA, 15 bp, Homo sapiens
gtcactagtattttg

SEQ ID NO: 824619 - DNA, 15 bp, Homo sapiens
tcactagtattttgt

SEQ ID NO: 824620 - DNA, 15 bp, Homo sapiens
cactagtattttgtc

SEQ ID NO: 824621 - DNA, 15 bp, Homo sapiens
actagtattttgtct

SEQ ID NO: 824622 - DNA, 15 bp, Homo sapiens
ctagtattttgtcta

SEQ ID NO: 824623 - DNA, 15 bp, Homo sapiens
tagtattttgtctag

SEQ ID NO: 824624 - DNA, 15 bp, Homo sapiens
agtattttgtctaga

SEQ ID NO: 824625 - DNA, 15 bp, Homo sapiens
gtattttgtctagag

SEQ ID NO: 824626 - DNA, 15 bp, Homo sapiens
tattttgtctagagc

SEQ ID NO: 824627 - DNA, 15 bp, Homo sapiens
attttgtctagagcc

SEQ ID NO: 824628 - DNA, 15 bp, Homo sapiens
ttttgtctagagcca

SEQ ID NO: 824629 - DNA, 15 bp, Homo sapiens
tttgtctagagccaa

SEQ ID NO: 824630 - DNA, 15 bp, Homo sapiens
ttgtctagagccaat

SEQ ID NO: 824631 - DNA, 15 bp, Homo sapiens
tgtctagagccaatt

SEQ ID NO: 824632 - DNA, 15 bp, Homo sapiens
gtctagagccaattt

SEQ ID NO: 824633 - DNA, 15 bp, Homo sapiens
tctagagccaatttg

SEQ ID NO: 824634 - DNA, 15 bp, Homo sapiens
ctagagccaatttgg

SEQ ID NO: 824635 - DNA, 15 bp, Homo sapiens
tagagccaatttggt

SEQ ID NO: 824636 - DNA, 15 bp, Homo sapiens
agagccaatttggtt

SEQ ID NO: 824637 - DNA, 15 bp, Homo sapiens
gagccaatttggttg

SEQ ID NO: 824638 - DNA, 15 bp, Homo sapiens
agccaatttggttga

SEQ ID NO: 824639 - DNA, 15 bp, Homo sapiens
gccaatttggttgat

SEQ ID NO: 824640 - DNA, 15 bp, Homo sapiens
ccaatttggttgata

SEQ ID NO: 824641 - DNA, 15 bp, Homo sapiens
caatttggttgatat

SEQ ID NO: 824642 - DNA, 15 bp, Homo sapiens
aatttggttgatatc

SEQ ID NO: 824643 - DNA, 15 bp, Homo sapiens
atttggttgatatcg

SEQ ID NO: 824644 - DNA, 15 bp, Homo sapiens
tttggttgatatcgc

SEQ ID NO: 824645 - DNA, 15 bp, Homo sapiens
ttggttgatatcgct

SEQ ID NO: 824646 - DNA, 15 bp, Homo sapiens
tggttgatatcgctt

SEQ ID NO: 824647 - DNA, 15 bp, Homo sapiens
ggttgatatcgcttc

SEQ ID NO: 824648 - DNA, 15 bp, Homo sapiens
gttgatatcgcttcc

SEQ ID NO: 824649 - DNA, 15 bp, Homo sapiens
ttgatatcgcttcct

SEQ ID NO: 824650 - DNA, 15 bp, Homo sapiens
tgatatcgcttccta

SEQ ID NO: 824651 - DNA, 15 bp, Homo sapiens
gatatcgcttcctaa

SEQ ID NO: 824652 - DNA, 15 bp, Homo sapiens
atatcgcttcctaaa

SEQ ID NO: 824653 - DNA, 15 bp, Homo sapiens
tatcgcttcctaaac

SEQ ID NO: 824654 - DNA, 15 bp, Homo sapiens
atcgcttcctaaact

SEQ ID NO: 824655 - DNA, 15 bp, Homo sapiens
tcgcttcctaaactc

SEQ ID NO: 824656 - DNA, 15 bp, Homo sapiens
cgcttcctaaactct

SEQ ID NO: 824657 - DNA, 15 bp, Homo sapiens
gcttcctaaactctc

SEQ ID NO: 824658 - DNA, 15 bp, Homo sapiens
cttcctaaactctct

SEQ ID NO: 824659 - DNA, 15 bp, Homo sapiens
ttcctaaactctctg

SEQ ID NO: 824660 - DNA, 15 bp, Homo sapiens
tcctaaactctctga

SEQ ID NO: 824661 - DNA, 15 bp, Homo sapiens
cctaaactctctgaa

SEQ ID NO: 824662 - DNA, 15 bp, Homo sapiens
ctaaactctctgaaa

SEQ ID NO: 824663 - DNA, 15 bp, Homo sapiens
taaactctctgaaat

SEQ ID NO: 824664 - DNA, 15 bp, Homo sapiens
aaactctctgaaatt

SEQ ID NO: 824665 - DNA, 15 bp, Homo sapiens
aactctctgaaatta

SEQ ID NO: 824666 - DNA, 15 bp, Homo sapiens
actctctgaaattag

SEQ ID NO: 824667 - DNA, 15 bp, Homo sapiens
ctctctgaaattagg

SEQ ID NO: 824668 - DNA, 15 bp, Homo sapiens
tctctgaaattagga

SEQ ID NO: 824669 - DNA, 15 bp, Homo sapiens
ctctgaaattaggat

SEQ ID NO: 824670 - DNA, 15 bp, Homo sapiens
tctgaaattaggata

SEQ ID NO: 824671 - DNA, 15 bp, Homo sapiens
ctgaaattaggatag

SEQ ID NO: 824672 - DNA, 15 bp, Homo sapiens
tgaaattaggatagg

SEQ ID NO: 824673 - DNA, 15 bp, Homo sapiens
gaaattaggataggg

SEQ ID NO: 824674 - DNA, 15 bp, Homo sapiens
aaattaggatagggt

SEQ ID NO: 824675 - DNA, 15 bp, Homo sapiens
aattaggatagggtc

SEQ ID NO: 824676 - DNA, 15 bp, Homo sapiens
attaggatagggtca

SEQ ID NO: 824677 - DNA, 15 bp, Homo sapiens
ttaggatagggtcaa

SEQ ID NO: 824678 - DNA, 15 bp, Homo sapiens
taggatagggtcaac

SEQ ID NO: 824679 - DNA, 15 bp, Homo sapiens
aggatagggtcaact

SEQ ID NO: 824680 - DNA, 15 bp, Homo sapiens
ggatagggtcaactc

SEQ ID NO: 824681 - DNA, 15 bp, Homo sapiens
gatagggtcaactca

SEQ ID NO: 824682 - DNA, 15 bp, Homo sapiens
atagggtcaactcat

SEQ ID NO: 824683 - DNA, 15 bp, Homo sapiens
tagggtcaactcatt

SEQ ID NO: 824684 - DNA, 15 bp, Homo sapiens
agggtcaactcattc

SEQ ID NO: 824685 - DNA, 15 bp, Homo sapiens
gggtcaactcattca

SEQ ID NO: 824686 - DNA, 15 bp, Homo sapiens
ggtcaactcattcag

SEQ ID NO: 824687 - DNA, 15 bp, Homo sapiens
gtcaactcattcagg

SEQ ID NO: 824688 - DNA, 15 bp, Homo sapiens
tcaactcattcagga

SEQ ID NO: 824689 - DNA, 15 bp, Homo sapiens
caactcattcaggaa

SEQ ID NO: 824690 - DNA, 15 bp, Homo sapiens
aactcattcaggaaa

SEQ ID NO: 824691 - DNA, 15 bp, Homo sapiens
actcattcaggaaaa

SEQ ID NO: 824692 - DNA, 15 bp, Homo sapiens
ctcattcaggaaaat

SEQ ID NO: 824693 - DNA, 15 bp, Homo sapiens
tcattcaggaaaata

SEQ ID NO: 824694 - DNA, 15 bp, Homo sapiens
cattcaggaaaatag

SEQ ID NO: 824695 - DNA, 15 bp, Homo sapiens
attcaggaaaataga

SEQ ID NO: 824696 - DNA, 15 bp, Homo sapiens
ttcaggaaaatagat

SEQ ID NO: 824697 - DNA, 15 bp, Homo sapiens
tcaggaaaatagata

SEQ ID NO: 824698 - DNA, 15 bp, Homo sapiens
caggaaaatagatac

SEQ ID NO: 824699 - DNA, 15 bp, Homo sapiens
aggaaaatagataca

SEQ ID NO: 824700 - DNA, 15 bp, Homo sapiens
ggaaaatagatacag

SEQ ID NO: 824701 - DNA, 15 bp, Homo sapiens
gaaaatagatacagg

SEQ ID NO: 824702 - DNA, 15 bp, Homo sapiens
aaaatagatacaggg

SEQ ID NO: 824703 - DNA, 15 bp, Homo sapiens
aaatagatacagggt

SEQ ID NO: 824704 - DNA, 15 bp, Homo sapiens
aatagatacagggtg

SEQ ID NO: 824705 - DNA, 15 bp, Homo sapiens
atagatacagggtgt

SEQ ID NO: 824706 - DNA, 15 bp, Homo sapiens
tagatacagggtgtg

SEQ ID NO: 824707 - DNA, 15 bp, Homo sapiens
agatacagggtgtgt

SEQ ID NO: 824708 - DNA, 15 bp, Homo sapiens
gatacagggtgtgtt

SEQ ID NO: 824709 - DNA, 15 bp, Homo sapiens
atacagggtgtgttg

SEQ ID NO: 824710 - DNA, 15 bp, Homo sapiens
tacagggtgtgttgg

SEQ ID NO: 824711 - DNA, 15 bp, Homo sapiens
acagggtgtgttgga

SEQ ID NO: 824712 - DNA, 15 bp, Homo sapiens
cagggtgtgttggag

SEQ ID NO: 824713 - DNA, 15 bp, Homo sapiens
agggtgtgttggaga

SEQ ID NO: 824714 - DNA, 15 bp, Homo sapiens
gggtgtgttggagat

SEQ ID NO: 824715 - DNA, 15 bp, Homo sapiens
ggtgtgttggagatt

SEQ ID NO: 824716 - DNA, 15 bp, Homo sapiens
gtgtgttggagatta

SEQ ID NO: 824717 - DNA, 15 bp, Homo sapiens
tgtgttggagattag

SEQ ID NO: 824718 - DNA, 15 bp, Homo sapiens
gtgttggagattagg

SEQ ID NO: 824719 - DNA, 15 bp, Homo sapiens
tgttggagattaggg

SEQ ID NO: 824720 - DNA, 15 bp, Homo sapiens
gttggagattaggga

SEQ ID NO: 824721 - DNA, 15 bp, Homo sapiens
ttggagattagggaa

SEQ ID NO: 824722 - DNA, 15 bp, Homo sapiens
tggagattagggaag

SEQ ID NO: 824723 - DNA, 15 bp, Homo sapiens
ggagattagggaagg

SEQ ID NO: 824724 - DNA, 15 bp, Homo sapiens
gagattagggaagga

SEQ ID NO: 824725 - DNA, 15 bp, Homo sapiens
agattagggaaggag

SEQ ID NO: 824726 - DNA, 15 bp, Homo sapiens
gattagggaaggaga

SEQ ID NO: 824727 - DNA, 15 bp, Homo sapiens
attagggaaggagag

SEQ ID NO: 824728 - DNA, 15 bp, Homo sapiens
gggaaggagaggggc

SEQ ID NO: 824729 - DNA, 15 bp, Homo sapiens
ggaaggagaggggcg

SEQ ID NO: 824730 - DNA, 15 bp, Homo sapiens
gaaggagaggggcgg

SEQ ID NO: 824731 - DNA, 15 bp, Homo sapiens
aaggagaggggcgga

SEQ ID NO: 824732 - DNA, 15 bp, Homo sapiens
aggagaggggcggag

SEQ ID NO: 824733 - DNA, 15 bp, Homo sapiens
ggagaggggcggagg

SEQ ID NO: 824734 - DNA, 15 bp, Homo sapiens
gagaggggcggaggg

SEQ ID NO: 824735 - DNA, 15 bp, Homo sapiens
agaggggcggaggga

SEQ ID NO: 824736 - DNA, 15 bp, Homo sapiens
gaggggcggagggag

SEQ ID NO: 824737 - DNA, 15 bp, Homo sapiens
aggggcggagggagg

SEQ ID NO: 824738 - DNA, 15 bp, Homo sapiens
ggggcggagggaggt

SEQ ID NO: 824739 - DNA, 15 bp, Homo sapiens
gggcggagggaggtc

SEQ ID NO: 824740 - DNA, 15 bp, Homo sapiens
ggcggagggaggtcc

SEQ ID NO: 824741 - DNA, 15 bp, Homo sapiens
gcggagggaggtccc

SEQ ID NO: 824742 - DNA, 15 bp, Homo sapiens
cggagggaggtccca

SEQ ID NO: 824743 - DNA, 15 bp, Homo sapiens
ggagggaggtcccag

SEQ ID NO: 824744 - DNA, 15 bp, Homo sapiens
gagggaggtcccagg

SEQ ID NO: 824745 - DNA, 15 bp, Homo sapiens
agggaggtcccaggc

SEQ ID NO: 824746 - DNA, 15 bp, Homo sapiens
gggaggtcccaggcc

SEQ ID NO: 824747 - DNA, 15 bp, Homo sapiens
ggaggtcccaggcca

SEQ ID NO: 824748 - DNA, 15 bp, Homo sapiens
gaggtcccaggccaa

SEQ ID NO: 824749 - DNA, 15 bp, Homo sapiens
aggtcccaggccaaa

SEQ ID NO: 824750 - DNA, 15 bp, Homo sapiens
ggtcccaggccaaat

SEQ ID NO: 824751 - DNA, 15 bp, Homo sapiens
gtcccaggccaaatt

SEQ ID NO: 824752 - DNA, 15 bp, Homo sapiens
tcccaggccaaattt

SEQ ID NO: 824753 - DNA, 15 bp, Homo sapiens
cccaggccaaatttc

SEQ ID NO: 824754 - DNA, 15 bp, Homo sapiens
ccaggccaaatttct

SEQ ID NO: 824755 - DNA, 15 bp, Homo sapiens
caggccaaatttcta

SEQ ID NO: 824756 - DNA, 15 bp, Homo sapiens
aggccaaatttctaa

SEQ ID NO: 824757 - DNA, 15 bp, Homo sapiens
ggccaaatttctaac

SEQ ID NO: 824758 - DNA, 15 bp, Homo sapiens
gccaaatttctaact

SEQ ID NO: 824759 - DNA, 15 bp, Homo sapiens
ccaaatttctaactc

SEQ ID NO: 824760 - DNA, 15 bp, Homo sapiens
caaatttctaactca

SEQ ID NO: 824761 - DNA, 15 bp, Homo sapiens
aaatttctaactcat

SEQ ID NO: 824762 - DNA, 15 bp, Homo sapiens
aatttctaactcatc

SEQ ID NO: 824763 - DNA, 15 bp, Homo sapiens
atttctaactcatcc

SEQ ID NO: 824764 - DNA, 15 bp, Homo sapiens
tttctaactcatccc

SEQ ID NO: 824765 - DNA, 15 bp, Homo sapiens
ttctaactcatccct

SEQ ID NO: 824766 - DNA, 15 bp, Homo sapiens
tctaactcatcccta

SEQ ID NO: 824767 - DNA, 15 bp, Homo sapiens
ctaactcatccctag

SEQ ID NO: 824768 - DNA, 15 bp, Homo sapiens
taactcatccctaga

SEQ ID NO: 824769 - DNA, 15 bp, Homo sapiens
aactcatccctagag

SEQ ID NO: 824770 - DNA, 15 bp, Homo sapiens
actcatccctagagt

SEQ ID NO: 824771 - DNA, 15 bp, Homo sapiens
ctcatccctagagtc

SEQ ID NO: 824772 - DNA, 15 bp, Homo sapiens
tcatccctagagtct

SEQ ID NO: 824773 - DNA, 15 bp, Homo sapiens
catccctagagtctc

SEQ ID NO: 824774 - DNA, 15 bp, Homo sapiens
atccctagagtctca

SEQ ID NO: 824775 - DNA, 15 bp, Homo sapiens
tccctagagtctcac

SEQ ID NO: 824776 - DNA, 15 bp, Homo sapiens
ccctagagtctcacc

SEQ ID NO: 824777 - DNA, 15 bp, Homo sapiens
cctagagtctcacct

SEQ ID NO: 824778 - DNA, 15 bp, Homo sapiens
ctagagtctcacctc

SEQ ID NO: 824779 - DNA, 15 bp, Homo sapiens
tagagtctcacctcc

SEQ ID NO: 824780 - DNA, 15 bp, Homo sapiens
agagtctcacctccg

SEQ ID NO: 824781 - DNA, 15 bp, Homo sapiens
gagtctcacctccga

SEQ ID NO: 824782 - DNA, 15 bp, Homo sapiens
agtctcacctccgat

SEQ ID NO: 824783 - DNA, 15 bp, Homo sapiens
gtctcacctccgatg

SEQ ID NO: 824784 - DNA, 15 bp, Homo sapiens
tctcacctccgatgt

SEQ ID NO: 824785 - DNA, 15 bp, Homo sapiens
ctcacctccgatgtt

SEQ ID NO: 824786 - DNA, 15 bp, Homo sapiens
tcacctccgatgttc

SEQ ID NO: 824787 - DNA, 15 bp, Homo sapiens
cacctccgatgttct

SEQ ID NO: 824788 - DNA, 15 bp, Homo sapiens
acctccgatgttctc

SEQ ID NO: 824789 - DNA, 15 bp, Homo sapiens
cctccgatgttctcc

SEQ ID NO: 824790 - DNA, 15 bp, Homo sapiens
ctccgatgttctccc

SEQ ID NO: 824791 - DNA, 15 bp, Homo sapiens
tccgatgttctccca

SEQ ID NO: 824792 - DNA, 15 bp, Homo sapiens
ccgatgttctcccag

SEQ ID NO: 824793 - DNA, 15 bp, Homo sapiens
cgatgttctcccagg

SEQ ID NO: 824794 - DNA, 15 bp, Homo sapiens
gatgttctcccaggg

SEQ ID NO: 824795 - DNA, 15 bp, Homo sapiens
atgttctcccaggga

SEQ ID NO: 824796 - DNA, 15 bp, Homo sapiens
tgttctcccagggat

SEQ ID NO: 824797 - DNA, 15 bp, Homo sapiens
gttctcccagggatg

SEQ ID NO: 824798 - DNA, 15 bp, Homo sapiens
ttctcccagggatgg

SEQ ID NO: 824799 - DNA, 15 bp, Homo sapiens
tctcccagggatgga

SEQ ID NO: 824800 - DNA, 15 bp, Homo sapiens
ctcccagggatggag

SEQ ID NO: 824801 - DNA, 15 bp, Homo sapiens
tcccagggatggagc

SEQ ID NO: 824802 - DNA, 15 bp, Homo sapiens
cccagggatggagcc

SEQ ID NO: 824803 - DNA, 15 bp, Homo sapiens
ccagggatggagcct

SEQ ID NO: 824804 - DNA, 15 bp, Homo sapiens
cagggatggagcctc

SEQ ID NO: 824805 - DNA, 15 bp, Homo sapiens
agggatggagcctca

SEQ ID NO: 824806 - DNA, 15 bp, Homo sapiens
gggatggagcctcac

SEQ ID NO: 824807 - DNA, 15 bp, Homo sapiens
ggatggagcctcacc

SEQ ID NO: 824808 - DNA, 15 bp, Homo sapiens
gatggagcctcacct

SEQ ID NO: 824809 - DNA, 15 bp, Homo sapiens
atggagcctcacctc

SEQ ID NO: 824810 - DNA, 15 bp, Homo sapiens
tggagcctcacctct

SEQ ID NO: 824811 - DNA, 15 bp, Homo sapiens
ggagcctcacctctg

SEQ ID NO: 824812 - DNA, 15 bp, Homo sapiens
gagcctcacctctga

SEQ ID NO: 824813 - DNA, 15 bp, Homo sapiens
agcctcacctctgac

SEQ ID NO: 824814 - DNA, 15 bp, Homo sapiens
gcctcacctctgacc

SEQ ID NO: 824815 - DNA, 15 bp, Homo sapiens
cctcacctctgacct

SEQ ID NO: 824816 - DNA, 15 bp, Homo sapiens
ctcacctctgacctt

SEQ ID NO: 824817 - DNA, 15 bp, Homo sapiens
tcacctctgaccttc

SEQ ID NO: 824818 - DNA, 15 bp, Homo sapiens
cacctctgaccttct

SEQ ID NO: 824819 - DNA, 15 bp, Homo sapiens
acctctgaccttctc

SEQ ID NO: 824820 - DNA, 15 bp, Homo sapiens
cctctgaccttctcc

SEQ ID NO: 824821 - DNA, 15 bp, Homo sapiens
ctctgaccttctccc

SEQ ID NO: 824822 - DNA, 15 bp, Homo sapiens
tctgaccttctccca

SEQ ID NO: 824823 - DNA, 15 bp, Homo sapiens
ctgaccttctcccag

SEQ ID NO: 824824 - DNA, 15 bp, Homo sapiens
tgaccttctcccagg

SEQ ID NO: 824825 - DNA, 15 bp, Homo sapiens
gaccttctcccaggg

SEQ ID NO: 824826 - DNA, 15 bp, Homo sapiens
accttctcccaggga

SEQ ID NO: 824827 - DNA, 15 bp, Homo sapiens
ccttctcccagggat

SEQ ID NO: 824828 - DNA, 15 bp, Homo sapiens
cttctcccagggatg

SEQ ID NO: 824829 - DNA, 15 bp, Homo sapiens
tggagcctcacctcc

SEQ ID NO: 824830 - DNA, 15 bp, Homo sapiens
ggagcctcacctccg

SEQ ID NO: 824831 - DNA, 15 bp, Homo sapiens
gagcctcacctccga

SEQ ID NO: 824832 - DNA, 15 bp, Homo sapiens
agcctcacctccgac

SEQ ID NO: 824833 - DNA, 15 bp, Homo sapiens
gcctcacctccgacc

SEQ ID NO: 824834 - DNA, 15 bp, Homo sapiens
cctcacctccgacct

SEQ ID NO: 824835 - DNA, 15 bp, Homo sapiens
ctcacctccgacctt

SEQ ID NO: 824836 - DNA, 15 bp, Homo sapiens
tcacctccgaccttc

SEQ ID NO: 824837 - DNA, 15 bp, Homo sapiens
cacctccgaccttct

SEQ ID NO: 824838 - DNA, 15 bp, Homo sapiens
acctccgaccttctc

SEQ ID NO: 824839 - DNA, 15 bp, Homo sapiens
cctccgaccttctcc

SEQ ID NO: 824840 - DNA, 15 bp, Homo sapiens
ctccgaccttctccc

SEQ ID NO: 824841 - DNA, 15 bp, Homo sapiens
tccgaccttctccca

SEQ ID NO: 824842 - DNA, 15 bp, Homo sapiens
ccgaccttctcccag

SEQ ID NO: 824843 - DNA, 15 bp, Homo sapiens
cgaccttctcccagg

SEQ ID NO: 824844 - DNA, 15 bp, Homo sapiens
ggagcctcacctcca

SEQ ID NO: 824845 - DNA, 15 bp, Homo sapiens
gagcctcacctccaa

SEQ ID NO: 824846 - DNA, 15 bp, Homo sapiens
agcctcacctccaac

SEQ ID NO: 824847 - DNA, 15 bp, Homo sapiens
gcctcacctccaacc

SEQ ID NO: 824848 - DNA, 15 bp, Homo sapiens
cctcacctccaacct

SEQ ID NO: 824849 - DNA, 15 bp, Homo sapiens
ctcacctccaacctt

SEQ ID NO: 824850 - DNA, 15 bp, Homo sapiens
tcacctccaaccttc

SEQ ID NO: 824851 - DNA, 15 bp, Homo sapiens
cacctccaaccttct

SEQ ID NO: 824852 - DNA, 15 bp, Homo sapiens
acctccaaccttctc

SEQ ID NO: 824853 - DNA, 15 bp, Homo sapiens
cctccaaccttctcc

SEQ ID NO: 824854 - DNA, 15 bp, Homo sapiens
ctccaaccttctccc

SEQ ID NO: 824855 - DNA, 15 bp, Homo sapiens
tccaaccttctccca

SEQ ID NO: 824856 - DNA, 15 bp, Homo sapiens
ccaaccttctcccag

SEQ ID NO: 824857 - DNA, 15 bp, Homo sapiens
caaccttctcccagg

SEQ ID NO: 824858 - DNA, 15 bp, Homo sapiens
aaccttctcccaggg

SEQ ID NO: 824859 - DNA, 15 bp, Homo sapiens
cttctcccagggata

SEQ ID NO: 824860 - DNA, 15 bp, Homo sapiens
ttctcccagggatac

SEQ ID NO: 824861 - DNA, 15 bp, Homo sapiens
tctcccagggataca

SEQ ID NO: 824862 - DNA, 15 bp, Homo sapiens
ctcccagggatacag

SEQ ID NO: 824863 - DNA, 15 bp, Homo sapiens
tcccagggatacagt

SEQ ID NO: 824864 - DNA, 15 bp, Homo sapiens
cccagggatacagta

SEQ ID NO: 824865 - DNA, 15 bp, Homo sapiens
ccagggatacagtat

SEQ ID NO: 824866 - DNA, 15 bp, Homo sapiens
cagggatacagtatc

SEQ ID NO: 824867 - DNA, 15 bp, Homo sapiens
agggatacagtatct

SEQ ID NO: 824868 - DNA, 15 bp, Homo sapiens
gggatacagtatctc

SEQ ID NO: 824869 - DNA, 15 bp, Homo sapiens
ggatacagtatctca

SEQ ID NO: 824870 - DNA, 15 bp, Homo sapiens
gatacagtatctcag

SEQ ID NO: 824871 - DNA, 15 bp, Homo sapiens
atacagtatctcagc

SEQ ID NO: 824872 - DNA, 15 bp, Homo sapiens
tacagtatctcagcc

SEQ ID NO: 824873 - DNA, 15 bp, Homo sapiens
acagtatctcagccc

SEQ ID NO: 824874 - DNA, 15 bp, Homo sapiens
cagtatctcagcccg

SEQ ID NO: 824875 - DNA, 15 bp, Homo sapiens
agtatctcagcccgc

SEQ ID NO: 824876 - DNA, 15 bp, Homo sapiens
gtatctcagcccgct

SEQ ID NO: 824877 - DNA, 15 bp, Homo sapiens
tatctcagcccgctc

SEQ ID NO: 824878 - DNA, 15 bp, Homo sapiens
atctcagcccgctcc

SEQ ID NO: 824879 - DNA, 15 bp, Homo sapiens
tctcagcccgctcct

SEQ ID NO: 824880 - DNA, 15 bp, Homo sapiens
ctcagcccgctcctc

SEQ ID NO: 824881 - DNA, 15 bp, Homo sapiens
tcagcccgctcctcg

SEQ ID NO: 824882 - DNA, 15 bp, Homo sapiens
cagcccgctcctcga

SEQ ID NO: 824883 - DNA, 15 bp, Homo sapiens
agcccgctcctcgag

SEQ ID NO: 824884 - DNA, 15 bp, Homo sapiens
gcccgctcctcgagg

SEQ ID NO: 824885 - DNA, 15 bp, Homo sapiens
cccgctcctcgaggg

SEQ ID NO: 824886 - DNA, 15 bp, Homo sapiens
ccgctcctcgaggga

SEQ ID NO: 824887 - DNA, 15 bp, Homo sapiens
cgctcctcgagggaa

SEQ ID NO: 824888 - DNA, 15 bp, Homo sapiens
gctcctcgagggaag

SEQ ID NO: 824889 - DNA, 15 bp, Homo sapiens
ctcctcgagggaagg

SEQ ID NO: 824890 - DNA, 15 bp, Homo sapiens
tcctcgagggaaggg

SEQ ID NO: 824891 - DNA, 15 bp, Homo sapiens
cctcgagggaagggc

SEQ ID NO: 824892 - DNA, 15 bp, Homo sapiens
ctcgagggaagggct

SEQ ID NO: 824893 - DNA, 15 bp, Homo sapiens
tcgagggaagggctc

SEQ ID NO: 824894 - DNA, 15 bp, Homo sapiens
cgagggaagggctct

SEQ ID NO: 824895 - DNA, 15 bp, Homo sapiens
gagggaagggctctc

SEQ ID NO: 824896 - DNA, 15 bp, Homo sapiens
agggaagggctctct

SEQ ID NO: 824897 - DNA, 15 bp, Homo sapiens
gggaagggctctctt

SEQ ID NO: 824898 - DNA, 15 bp, Homo sapiens
ggaagggctctctta

SEQ ID NO: 824899 - DNA, 15 bp, Homo sapiens
gaagggctctcttag

SEQ ID NO: 824900 - DNA, 15 bp, Homo sapiens
aagggctctcttagg

SEQ ID NO: 824901 - DNA, 15 bp, Homo sapiens
agggctctcttaggg

SEQ ID NO: 824902 - DNA, 15 bp, Homo sapiens
gggctctcttagggt

SEQ ID NO: 824903 - DNA, 15 bp, Homo sapiens
ggctctcttagggtc

SEQ ID NO: 824904 - DNA, 15 bp, Homo sapiens
gctctcttagggtcc

SEQ ID NO: 824905 - DNA, 15 bp, Homo sapiens
ctctcttagggtcca

SEQ ID NO: 824906 - DNA, 15 bp, Homo sapiens
tctcttagggtccag

SEQ ID NO: 824907 - DNA, 15 bp, Homo sapiens
ctcttagggtccagc

SEQ ID NO: 824908 - DNA, 15 bp, Homo sapiens
tcttagggtccagcc

SEQ ID NO: 824909 - DNA, 15 bp, Homo sapiens
cttagggtccagcct

SEQ ID NO: 824910 - DNA, 15 bp, Homo sapiens
ttagggtccagcctc

SEQ ID NO: 824911 - DNA, 15 bp, Homo sapiens
tagggtccagcctct

SEQ ID NO: 824912 - DNA, 15 bp, Homo sapiens
agggtccagcctctc

SEQ ID NO: 824913 - DNA, 15 bp, Homo sapiens
gggtccagcctctct

SEQ ID NO: 824914 - DNA, 15 bp, Homo sapiens
ggtccagcctctctc

SEQ ID NO: 824915 - DNA, 15 bp, Homo sapiens
gtccagcctctctcc

SEQ ID NO: 824916 - DNA, 15 bp, Homo sapiens
tccagcctctctcca

SEQ ID NO: 824917 - DNA, 15 bp, Homo sapiens
ccagcctctctccaa

SEQ ID NO: 824918 - DNA, 15 bp, Homo sapiens
cagcctctctccaat

SEQ ID NO: 824919 - DNA, 15 bp, Homo sapiens
agcctctctccaata

SEQ ID NO: 824920 - DNA, 15 bp, Homo sapiens
gcctctctccaatag

SEQ ID NO: 824921 - DNA, 15 bp, Homo sapiens
cctctctccaatagc

SEQ ID NO: 824922 - DNA, 15 bp, Homo sapiens
ctctctccaatagca

SEQ ID NO: 824923 - DNA, 15 bp, Homo sapiens
tctctccaatagcag

SEQ ID NO: 824924 - DNA, 15 bp, Homo sapiens
ctctccaatagcagg

SEQ ID NO: 824925 - DNA, 15 bp, Homo sapiens
tctccaatagcaggg

SEQ ID NO: 824926 - DNA, 15 bp, Homo sapiens
ctccaatagcagggt

SEQ ID NO: 824927 - DNA, 15 bp, Homo sapiens
tccaatagcagggtg

SEQ ID NO: 824928 - DNA, 15 bp, Homo sapiens
ccaatagcagggtga

SEQ ID NO: 824929 - DNA, 15 bp, Homo sapiens
caatagcagggtgac

SEQ ID NO: 824930 - DNA, 15 bp, Homo sapiens
aatagcagggtgact

SEQ ID NO: 824931 - DNA, 15 bp, Homo sapiens
atagcagggtgactt

SEQ ID NO: 824932 - DNA, 15 bp, Homo sapiens
tagcagggtgactta

SEQ ID NO: 824933 - DNA, 15 bp, Homo sapiens
agcagggtgacttat

SEQ ID NO: 824934 - DNA, 15 bp, Homo sapiens
gcagggtgacttatt

SEQ ID NO: 824935 - DNA, 15 bp, Homo sapiens
cagggtgacttattt

SEQ ID NO: 824936 - DNA, 15 bp, Homo sapiens
agggtgacttatttg

SEQ ID NO: 824937 - DNA, 15 bp, Homo sapiens
gggtgacttatttga

SEQ ID NO: 824938 - DNA, 15 bp, Homo sapiens
ggtgacttatttgaa

SEQ ID NO: 824939 - DNA, 15 bp, Homo sapiens
gtgacttatttgaac

SEQ ID NO: 824940 - DNA, 15 bp, Homo sapiens
tgacttatttgaaca

SEQ ID NO: 824941 - DNA, 15 bp, Homo sapiens
gacttatttgaacaa

SEQ ID NO: 824942 - DNA, 15 bp, Homo sapiens
acttatttgaacaaa

SEQ ID NO: 824943 - DNA, 15 bp, Homo sapiens
cttatttgaacaaat

SEQ ID NO: 824944 - DNA, 15 bp, Homo sapiens
ttatttgaacaaatc

SEQ ID NO: 824945 - DNA, 15 bp, Homo sapiens
tatttgaacaaatct

SEQ ID NO: 824946 - DNA, 15 bp, Homo sapiens
atttgaacaaatctt

SEQ ID NO: 824947 - DNA, 15 bp, Homo sapiens
tttgaacaaatcttc

SEQ ID NO: 824948 - DNA, 15 bp, Homo sapiens
ttgaacaaatcttct

SEQ ID NO: 824949 - DNA, 15 bp, Homo sapiens
tgaacaaatcttctt

SEQ ID NO: 824950 - DNA, 15 bp, Homo sapiens
gaacaaatcttcttt

SEQ ID NO: 824951 - DNA, 15 bp, Homo sapiens
aacaaatcttctttc

SEQ ID NO: 824952 - DNA, 15 bp, Homo sapiens
acaaatcttctttcc

SEQ ID NO: 824953 - DNA, 15 bp, Homo sapiens
caaatcttctttccc

SEQ ID NO: 824954 - DNA, 15 bp, Homo sapiens
aaatcttctttccca

SEQ ID NO: 824955 - DNA, 15 bp, Homo sapiens
aatcttctttcccag

SEQ ID NO: 824956 - DNA, 15 bp, Homo sapiens
atcttctttcccagt

SEQ ID NO: 824957 - DNA, 15 bp, Homo sapiens
tcttctttcccagtc

SEQ ID NO: 824958 - DNA, 15 bp, Homo sapiens
cttctttcccagtca

SEQ ID NO: 824959 - DNA, 15 bp, Homo sapiens
ttctttcccagtcat

SEQ ID NO: 824960 - DNA, 15 bp, Homo sapiens
tctttcccagtcatc

SEQ ID NO: 824961 - DNA, 15 bp, Homo sapiens
ctttcccagtcatct

SEQ ID NO: 824962 - DNA, 15 bp, Homo sapiens
tttcccagtcatctc

SEQ ID NO: 824963 - DNA, 15 bp, Homo sapiens
ttcccagtcatctca

SEQ ID NO: 824964 - DNA, 15 bp, Homo sapiens
tcccagtcatctcac

SEQ ID NO: 824965 - DNA, 15 bp, Homo sapiens
cccagtcatctcact

SEQ ID NO: 824966 - DNA, 15 bp, Homo sapiens
ccagtcatctcactt

SEQ ID NO: 824967 - DNA, 15 bp, Homo sapiens
cagtcatctcacttg

SEQ ID NO: 824968 - DNA, 15 bp, Homo sapiens
agtcatctcacttgc

SEQ ID NO: 824969 - DNA, 15 bp, Homo sapiens
gtcatctcacttgca

SEQ ID NO: 824970 - DNA, 15 bp, Homo sapiens
tcatctcacttgcag

SEQ ID NO: 824971 - DNA, 15 bp, Homo sapiens
catctcacttgcaga

SEQ ID NO: 824972 - DNA, 15 bp, Homo sapiens
atctcacttgcagac

SEQ ID NO: 824973 - DNA, 15 bp, Homo sapiens
tctcacttgcagaca

SEQ ID NO: 824974 - DNA, 15 bp, Homo sapiens
ctcacttgcagacac

SEQ ID NO: 824975 - DNA, 15 bp, Homo sapiens
tcacttgcagacact

SEQ ID NO: 824976 - DNA, 15 bp, Homo sapiens
cacttgcagacactg

SEQ ID NO: 824977 - DNA, 15 bp, Homo sapiens
acttgcagacactga

SEQ ID NO: 824978 - DNA, 15 bp, Homo sapiens
cttgcagacactgag

SEQ ID NO: 824979 - DNA, 15 bp, Homo sapiens
ttgcagacactgaga

SEQ ID NO: 824980 - DNA, 15 bp, Homo sapiens
tgcagacactgagat

SEQ ID NO: 824981 - DNA, 15 bp, Homo sapiens
gcagacactgagatg

SEQ ID NO: 824982 - DNA, 15 bp, Homo sapiens
cagacactgagatgc

SEQ ID NO: 824983 - DNA, 15 bp, Homo sapiens
agacactgagatgcc

SEQ ID NO: 824984 - DNA, 15 bp, Homo sapiens
gacactgagatgccc

SEQ ID NO: 824985 - DNA, 15 bp, Homo sapiens
acactgagatgccca

SEQ ID NO: 824986 - DNA, 15 bp, Homo sapiens
cactgagatgcccag

SEQ ID NO: 824987 - DNA, 15 bp, Homo sapiens
actgagatgcccagg

SEQ ID NO: 824988 - DNA, 15 bp, Homo sapiens
ctgagatgcccaggc

SEQ ID NO: 824989 - DNA, 15 bp, Homo sapiens
tgagatgcccaggcc

SEQ ID NO: 824990 - DNA, 15 bp, Homo sapiens
gagatgcccaggcct

SEQ ID NO: 824991 - DNA, 15 bp, Homo sapiens
agatgcccaggcctg

SEQ ID NO: 824992 - DNA, 15 bp, Homo sapiens
gatgcccaggcctgg

SEQ ID NO: 824993 - DNA, 15 bp, Homo sapiens
atgcccaggcctggg

SEQ ID NO: 824994 - DNA, 15 bp, Homo sapiens
tgcccaggcctgggc

SEQ ID NO: 824995 - DNA, 15 bp, Homo sapiens
gcccaggcctgggcc

SEQ ID NO: 824996 - DNA, 15 bp, Homo sapiens
cccaggcctgggccc

SEQ ID NO: 824997 - DNA, 15 bp, Homo sapiens
ccaggcctgggccca

SEQ ID NO: 824998 - DNA, 15 bp, Homo sapiens
caggcctgggcccaa

SEQ ID NO: 824999 - DNA, 15 bp, Homo sapiens
aggcctgggcccaag

SEQ ID NO: 825000 - DNA, 15 bp, Homo sapiens
ggcctgggcccaagc

SEQ ID NO: 825001 - DNA, 15 bp, Homo sapiens
gcctgggcccaagcc

SEQ ID NO: 825002 - DNA, 15 bp, Homo sapiens
cctgggcccaagcct

SEQ ID NO: 825003 - DNA, 15 bp, Homo sapiens
ctgggcccaagcctg

SEQ ID NO: 825004 - DNA, 15 bp, Homo sapiens
tgggcccaagcctgc

SEQ ID NO: 825005 - DNA, 15 bp, Homo sapiens
gggcccaagcctgct

SEQ ID NO: 825006 - DNA, 15 bp, Homo sapiens
ggcccaagcctgctc

SEQ ID NO: 825007 - DNA, 15 bp, Homo sapiens
gcccaagcctgctca

SEQ ID NO: 825008 - DNA, 15 bp, Homo sapiens
cccaagcctgctcat

SEQ ID NO: 825009 - DNA, 15 bp, Homo sapiens
ccaagcctgctcatg

SEQ ID NO: 825010 - DNA, 15 bp, Homo sapiens
caagcctgctcatga

SEQ ID NO: 825011 - DNA, 15 bp, Homo sapiens
aagcctgctcatgag

SEQ ID NO: 825012 - DNA, 15 bp, Homo sapiens
agcctgctcatgaga

SEQ ID NO: 825013 - DNA, 15 bp, Homo sapiens
gcctgctcatgagag

SEQ ID NO: 825014 - DNA, 15 bp, Homo sapiens
cctgctcatgagagt

SEQ ID NO: 825015 - DNA, 15 bp, Homo sapiens
ctgctcatgagagta

SEQ ID NO: 825016 - DNA, 15 bp, Homo sapiens
tgctcatgagagtaa

SEQ ID NO: 825017 - DNA, 15 bp, Homo sapiens
gctcatgagagtaag

SEQ ID NO: 825018 - DNA, 15 bp, Homo sapiens
ctcatgagagtaaga

SEQ ID NO: 825019 - DNA, 15 bp, Homo sapiens
tcatgagagtaagaa

SEQ ID NO: 825020 - DNA, 15 bp, Homo sapiens
catgagagtaagaac

SEQ ID NO: 825021 - DNA, 15 bp, Homo sapiens
atgagagtaagaaca

SEQ ID NO: 825022 - DNA, 15 bp, Homo sapiens
tgagagtaagaacag

SEQ ID NO: 825023 - DNA, 15 bp, Homo sapiens
gagagtaagaacaga

SEQ ID NO: 825024 - DNA, 15 bp, Homo sapiens
agagtaagaacagat

SEQ ID NO: 825025 - DNA, 15 bp, Homo sapiens
gagtaagaacagatg

SEQ ID NO: 825026 - DNA, 15 bp, Homo sapiens
agtaagaacagatga

SEQ ID NO: 825027 - DNA, 15 bp, Homo sapiens
gtaagaacagatgat

SEQ ID NO: 825028 - DNA, 15 bp, Homo sapiens
taagaacagatgata

SEQ ID NO: 825029 - DNA, 15 bp, Homo sapiens
aagaacagatgatag

SEQ ID NO: 825030 - DNA, 15 bp, Homo sapiens
agaacagatgatagg

SEQ ID NO: 825031 - DNA, 15 bp, Homo sapiens
gaacagatgataggt

SEQ ID NO: 825032 - DNA, 15 bp, Homo sapiens
aacagatgataggtg

SEQ ID NO: 825033 - DNA, 15 bp, Homo sapiens
acagatgataggtgg

SEQ ID NO: 825034 - DNA, 15 bp, Homo sapiens
cagatgataggtggt

SEQ ID NO: 825035 - DNA, 15 bp, Homo sapiens
agatgataggtggtg

SEQ ID NO: 825036 - DNA, 15 bp, Homo sapiens
gatgataggtggtga

SEQ ID NO: 825037 - DNA, 15 bp, Homo sapiens
atgataggtggtgag

SEQ ID NO: 825038 - DNA, 15 bp, Homo sapiens
tgataggtggtgagc

SEQ ID NO: 825039 - DNA, 15 bp, Homo sapiens
gataggtggtgagca

SEQ ID NO: 825040 - DNA, 15 bp, Homo sapiens
ataggtggtgagcag

SEQ ID NO: 825041 - DNA, 15 bp, Homo sapiens
taggtggtgagcaga

SEQ ID NO: 825042 - DNA, 15 bp, Homo sapiens
aggtggtgagcagag

SEQ ID NO: 825043 - DNA, 15 bp, Homo sapiens
ggtggtgagcagagc

SEQ ID NO: 825044 - DNA, 15 bp, Homo sapiens
gtggtgagcagagct

SEQ ID NO: 825045 - DNA, 15 bp, Homo sapiens
tggtgagcagagctc

SEQ ID NO: 825046 - DNA, 15 bp, Homo sapiens
ggtgagcagagctcc

SEQ ID NO: 825047 - DNA, 15 bp, Homo sapiens
gtgagcagagctcca

SEQ ID NO: 825048 - DNA, 15 bp, Homo sapiens
tgagcagagctccat

SEQ ID NO: 825049 - DNA, 15 bp, Homo sapiens
gagcagagctccatt

SEQ ID NO: 825050 - DNA, 15 bp, Homo sapiens
agcagagctccattt

SEQ ID NO: 825051 - DNA, 15 bp, Homo sapiens
gcagagctccatttt

SEQ ID NO: 825052 - DNA, 15 bp, Homo sapiens
cagagctccattttt

SEQ ID NO: 825053 - DNA, 15 bp, Homo sapiens
agagctccatttttc

SEQ ID NO: 825054 - DNA, 15 bp, Homo sapiens
gagctccatttttct

SEQ ID NO: 825055 - DNA, 15 bp, Homo sapiens
agctccatttttctt

SEQ ID NO: 825056 - DNA, 15 bp, Homo sapiens
gctccatttttcttt

SEQ ID NO: 825057 - DNA, 15 bp, Homo sapiens
ctccatttttctttt

SEQ ID NO: 825058 - DNA, 15 bp, Homo sapiens
tccatttttcttttt

SEQ ID NO: 825059 - DNA, 15 bp, Homo sapiens
ccatttttctttttt

SEQ ID NO: 825060 - DNA, 15 bp, Homo sapiens
catttttcttttttt

SEQ ID NO: 825061 - DNA, 15 bp, Homo sapiens
tttttctttttttta

SEQ ID NO: 825062 - DNA, 15 bp, Homo sapiens
ttttcttttttttaa

SEQ ID NO: 825063 - DNA, 15 bp, Homo sapiens
tttcttttttttaaa

SEQ ID NO: 825064 - DNA, 15 bp, Homo sapiens
ttcttttttttaaat

SEQ ID NO: 825065 - DNA, 15 bp, Homo sapiens
tcttttttttaaatt

SEQ ID NO: 825066 - DNA, 15 bp, Homo sapiens
cttttttttaaattt

SEQ ID NO: 825067 - DNA, 15 bp, Homo sapiens
ttttttttaaattta

SEQ ID NO: 825068 - DNA, 15 bp, Homo sapiens
tttttttaaatttat

SEQ ID NO: 825069 - DNA, 15 bp, Homo sapiens
ttttttaaatttatt

SEQ ID NO: 825070 - DNA, 15 bp, Homo sapiens
tttttaaatttattt

SEQ ID NO: 825071 - DNA, 15 bp, Homo sapiens
ttttaaatttatttt

SEQ ID NO: 825072 - DNA, 15 bp, Homo sapiens
ttaaatttattttta

SEQ ID NO: 825073 - DNA, 15 bp, Homo sapiens
taaatttatttttat

SEQ ID NO: 825074 - DNA, 15 bp, Homo sapiens
aaatttatttttatt

SEQ ID NO: 825075 - DNA, 15 bp, Homo sapiens
aatttatttttatta

SEQ ID NO: 825076 - DNA, 15 bp, Homo sapiens
atttatttttattat

SEQ ID NO: 825077 - DNA, 15 bp, Homo sapiens
tttatttttattatt

SEQ ID NO: 825078 - DNA, 15 bp, Homo sapiens
ttatttttattatta

SEQ ID NO: 825079 - DNA, 15 bp, Homo sapiens
tatttttattattat

SEQ ID NO: 825080 - DNA, 15 bp, Homo sapiens
atttttattattatt

SEQ ID NO: 825081 - DNA, 15 bp, Homo sapiens
tttttattattattt

SEQ ID NO: 825082 - DNA, 15 bp, Homo sapiens
ttttattattatttt

SEQ ID NO: 825083 - DNA, 15 bp, Homo sapiens
ttattattatttttt

SEQ ID NO: 825084 - DNA, 15 bp, Homo sapiens
tattattatttttta

SEQ ID NO: 825085 - DNA, 15 bp, Homo sapiens
attattattttttag

SEQ ID NO: 825086 - DNA, 15 bp, Homo sapiens
ttattattttttaga

SEQ ID NO: 825087 - DNA, 15 bp, Homo sapiens
tattattttttagat

SEQ ID NO: 825088 - DNA, 15 bp, Homo sapiens
attattttttagatt

SEQ ID NO: 825089 - DNA, 15 bp, Homo sapiens
ttattttttagattg

SEQ ID NO: 825090 - DNA, 15 bp, Homo sapiens
tattttttagattgg

SEQ ID NO: 825091 - DNA, 15 bp, Homo sapiens
attttttagattggg

SEQ ID NO: 825092 - DNA, 15 bp, Homo sapiens
ttttttagattgggt

SEQ ID NO: 825093 - DNA, 15 bp, Homo sapiens
tttttagattgggtc

SEQ ID NO: 825094 - DNA, 15 bp, Homo sapiens
ttttagattgggtct

SEQ ID NO: 825095 - DNA, 15 bp, Homo sapiens
tttagattgggtctt

SEQ ID NO: 825096 - DNA, 15 bp, Homo sapiens
ttagattgggtcttg

SEQ ID NO: 825097 - DNA, 15 bp, Homo sapiens
tagattgggtcttgc

SEQ ID NO: 825098 - DNA, 15 bp, Homo sapiens
agattgggtcttgca

SEQ ID NO: 825099 - DNA, 15 bp, Homo sapiens
gattgggtcttgcat

SEQ ID NO: 825100 - DNA, 15 bp, Homo sapiens
attgggtcttgcatt

SEQ ID NO: 825101 - DNA, 15 bp, Homo sapiens
ttgggtcttgcattg

SEQ ID NO: 825102 - DNA, 15 bp, Homo sapiens
tgggtcttgcattgt

SEQ ID NO: 825103 - DNA, 15 bp, Homo sapiens
gggtcttgcattgtt

SEQ ID NO: 825104 - DNA, 15 bp, Homo sapiens
ggtcttgcattgttg

SEQ ID NO: 825105 - DNA, 15 bp, Homo sapiens
gtcttgcattgttgc

SEQ ID NO: 825106 - DNA, 15 bp, Homo sapiens
tcttgcattgttgcc

SEQ ID NO: 825107 - DNA, 15 bp, Homo sapiens
cttgcattgttgccc

SEQ ID NO: 825108 - DNA, 15 bp, Homo sapiens
ttgcattgttgccca

SEQ ID NO: 825109 - DNA, 15 bp, Homo sapiens
tgcattgttgcccag

SEQ ID NO: 825110 - DNA, 15 bp, Homo sapiens
gcattgttgcccagg

SEQ ID NO: 825111 - DNA, 15 bp, Homo sapiens
cattgttgcccaggc

SEQ ID NO: 825112 - DNA, 15 bp, Homo sapiens
attgttgcccaggct

SEQ ID NO: 825113 - DNA, 15 bp, Homo sapiens
cagtggcacaatctt

SEQ ID NO: 825114 - DNA, 15 bp, Homo sapiens
agtggcacaatcttg

SEQ ID NO: 825115 - DNA, 15 bp, Homo sapiens
gtggcacaatcttgg

SEQ ID NO: 825116 - DNA, 15 bp, Homo sapiens
tggcacaatcttggc

SEQ ID NO: 825117 - DNA, 15 bp, Homo sapiens
ggcacaatcttggct

SEQ ID NO: 825118 - DNA, 15 bp, Homo sapiens
gcacaatcttggctc

SEQ ID NO: 825119 - DNA, 15 bp, Homo sapiens
cacaatcttggctca

SEQ ID NO: 825120 - DNA, 15 bp, Homo sapiens
acaatcttggctcac

SEQ ID NO: 825121 - DNA, 15 bp, Homo sapiens
caggtgcccaccacc

SEQ ID NO: 825122 - DNA, 15 bp, Homo sapiens
aggtgcccaccacca

SEQ ID NO: 825123 - DNA, 15 bp, Homo sapiens
ggtgcccaccaccac

SEQ ID NO: 825124 - DNA, 15 bp, Homo sapiens
gtgcccaccaccacg

SEQ ID NO: 825125 - DNA, 15 bp, Homo sapiens
tgcccaccaccacgc

SEQ ID NO: 825126 - DNA, 15 bp, Homo sapiens
tttcaccatgttgga

SEQ ID NO: 825127 - DNA, 15 bp, Homo sapiens
ttcaccatgttggac

SEQ ID NO: 825128 - DNA, 15 bp, Homo sapiens
tcaccatgttggaca

SEQ ID NO: 825129 - DNA, 15 bp, Homo sapiens
caccatgttggacag

SEQ ID NO: 825130 - DNA, 15 bp, Homo sapiens
accatgttggacagg

SEQ ID NO: 825131 - DNA, 15 bp, Homo sapiens
ccatgttggacaggc

SEQ ID NO: 825132 - DNA, 15 bp, Homo sapiens
catgttggacaggct

SEQ ID NO: 825133 - DNA, 15 bp, Homo sapiens
atgttggacaggctg

SEQ ID NO: 825134 - DNA, 15 bp, Homo sapiens
ggacaggctggtctt

SEQ ID NO: 825135 - DNA, 15 bp, Homo sapiens
gacaggctggtcttg

SEQ ID NO: 825136 - DNA, 15 bp, Homo sapiens
acaggctggtcttga

SEQ ID NO: 825137 - DNA, 15 bp, Homo sapiens
ggctggtcttgaaca

SEQ ID NO: 825138 - DNA, 15 bp, Homo sapiens
gctggtcttgaacac

SEQ ID NO: 825139 - DNA, 15 bp, Homo sapiens
ctggtcttgaacacc

SEQ ID NO: 825140 - DNA, 15 bp, Homo sapiens
tggtcttgaacacct

SEQ ID NO: 825141 - DNA, 15 bp, Homo sapiens
ggtcttgaacacctg

SEQ ID NO: 825142 - DNA, 15 bp, Homo sapiens
gtcttgaacacctga

SEQ ID NO: 825143 - DNA, 15 bp, Homo sapiens
tcttgaacacctgac

SEQ ID NO: 825144 - DNA, 15 bp, Homo sapiens
cttgaacacctgacc

SEQ ID NO: 825145 - DNA, 15 bp, Homo sapiens
ttgaacacctgacct

SEQ ID NO: 825146 - DNA, 15 bp, Homo sapiens
tgaacacctgacctc

SEQ ID NO: 825147 - DNA, 15 bp, Homo sapiens
gaacacctgacctca

SEQ ID NO: 825148 - DNA, 15 bp, Homo sapiens
aacacctgacctcaa

SEQ ID NO: 825149 - DNA, 15 bp, Homo sapiens
acacctgacctcaag

SEQ ID NO: 825150 - DNA, 15 bp, Homo sapiens
cacctgacctcaagt

SEQ ID NO: 825151 - DNA, 15 bp, Homo sapiens
acctgacctcaagtg

SEQ ID NO: 825152 - DNA, 15 bp, Homo sapiens
cctcaagtgatctgc

SEQ ID NO: 825153 - DNA, 15 bp, Homo sapiens
ctcaagtgatctgcc

SEQ ID NO: 825154 - DNA, 15 bp, Homo sapiens
caagtgatctgccca

SEQ ID NO: 825155 - DNA, 15 bp, Homo sapiens
aagtgatctgcccac

SEQ ID NO: 825156 - DNA, 15 bp, Homo sapiens
agtgatctgcccacc

SEQ ID NO: 825157 - DNA, 15 bp, Homo sapiens
gatctgcccacctcg

SEQ ID NO: 825158 - DNA, 15 bp, Homo sapiens
atctgcccacctcgg

SEQ ID NO: 825159 - DNA, 15 bp, Homo sapiens
tctgcccacctcggt

SEQ ID NO: 825160 - DNA, 15 bp, Homo sapiens
ctgcccacctcggtc

SEQ ID NO: 825161 - DNA, 15 bp, Homo sapiens
tgcccacctcggtct

SEQ ID NO: 825162 - DNA, 15 bp, Homo sapiens
gcccacctcggtctc

SEQ ID NO: 825163 - DNA, 15 bp, Homo sapiens
cccacctcggtctcc

SEQ ID NO: 825164 - DNA, 15 bp, Homo sapiens
ccacctcggtctccc

SEQ ID NO: 825165 - DNA, 15 bp, Homo sapiens
cacctcggtctccca

SEQ ID NO: 825166 - DNA, 15 bp, Homo sapiens
acctcggtctcccaa

SEQ ID NO: 825167 - DNA, 15 bp, Homo sapiens
cctcggtctcccaaa

SEQ ID NO: 825168 - DNA, 15 bp, Homo sapiens
ctcggtctcccaaag

SEQ ID NO: 825169 - DNA, 15 bp, Homo sapiens
tcggtctcccaaagt

SEQ ID NO: 825170 - DNA, 15 bp, Homo sapiens
cggtctcccaaagta

SEQ ID NO: 825171 - DNA, 15 bp, Homo sapiens
ggtctcccaaagtac

SEQ ID NO: 825172 - DNA, 15 bp, Homo sapiens
gtctcccaaagtact

SEQ ID NO: 825173 - DNA, 15 bp, Homo sapiens
tctcccaaagtactg

SEQ ID NO: 825174 - DNA, 15 bp, Homo sapiens
caaagtactgggata

SEQ ID NO: 825175 - DNA, 15 bp, Homo sapiens
aaagtactgggatac

SEQ ID NO: 825176 - DNA, 15 bp, Homo sapiens
aagtactgggataca

SEQ ID NO: 825177 - DNA, 15 bp, Homo sapiens
agtactgggatacag

SEQ ID NO: 825178 - DNA, 15 bp, Homo sapiens
gtactgggatacagg

SEQ ID NO: 825179 - DNA, 15 bp, Homo sapiens
tactgggatacaggt

SEQ ID NO: 825180 - DNA, 15 bp, Homo sapiens
actgggatacaggtg

SEQ ID NO: 825181 - DNA, 15 bp, Homo sapiens
ctgggatacaggtgt

SEQ ID NO: 825182 - DNA, 15 bp, Homo sapiens
tgggatacaggtgtg

SEQ ID NO: 825183 - DNA, 15 bp, Homo sapiens
gggatacaggtgtga

SEQ ID NO: 825184 - DNA, 15 bp, Homo sapiens
ggatacaggtgtgag

SEQ ID NO: 825185 - DNA, 15 bp, Homo sapiens
gatacaggtgtgagc

SEQ ID NO: 825186 - DNA, 15 bp, Homo sapiens
atacaggtgtgagcc

SEQ ID NO: 825187 - DNA, 15 bp, Homo sapiens
gtgcctggcccattt

SEQ ID NO: 825188 - DNA, 15 bp, Homo sapiens
tgcctggcccatttt

SEQ ID NO: 825189 - DNA, 15 bp, Homo sapiens
gcctggcccattttt

SEQ ID NO: 825190 - DNA, 15 bp, Homo sapiens
cctggcccatttttc

SEQ ID NO: 825191 - DNA, 15 bp, Homo sapiens
ctggcccatttttca

SEQ ID NO: 825192 - DNA, 15 bp, Homo sapiens
tggcccatttttcat

SEQ ID NO: 825193 - DNA, 15 bp, Homo sapiens
ggcccatttttcata

SEQ ID NO: 825194 - DNA, 15 bp, Homo sapiens
gcccatttttcataa

SEQ ID NO: 825195 - DNA, 15 bp, Homo sapiens
cccatttttcataag

SEQ ID NO: 825196 - DNA, 15 bp, Homo sapiens
ccatttttcataaga

SEQ ID NO: 825197 - DNA, 15 bp, Homo sapiens
catttttcataagac

SEQ ID NO: 825198 - DNA, 15 bp, Homo sapiens
atttttcataagaca

SEQ ID NO: 825199 - DNA, 15 bp, Homo sapiens
tttttcataagacac

SEQ ID NO: 825200 - DNA, 15 bp, Homo sapiens
ttttcataagacaca

SEQ ID NO: 825201 - DNA, 15 bp, Homo sapiens
tttcataagacacac

SEQ ID NO: 825202 - DNA, 15 bp, Homo sapiens
ttcataagacacact

SEQ ID NO: 825203 - DNA, 15 bp, Homo sapiens
tcataagacacacta

SEQ ID NO: 825204 - DNA, 15 bp, Homo sapiens
cataagacacactat

SEQ ID NO: 825205 - DNA, 15 bp, Homo sapiens
ataagacacactata

SEQ ID NO: 825206 - DNA, 15 bp, Homo sapiens
taagacacactatat

SEQ ID NO: 825207 - DNA, 15 bp, Homo sapiens
aagacacactatatc

SEQ ID NO: 825208 - DNA, 15 bp, Homo sapiens
agacacactatatca

SEQ ID NO: 825209 - DNA, 15 bp, Homo sapiens
gacacactatatcac

SEQ ID NO: 825210 - DNA, 15 bp, Homo sapiens
acacactatatcact

SEQ ID NO: 825211 - DNA, 15 bp, Homo sapiens
cacactatatcactc

SEQ ID NO: 825212 - DNA, 15 bp, Homo sapiens
acactatatcactcg

SEQ ID NO: 825213 - DNA, 15 bp, Homo sapiens
cactatatcactcga

SEQ ID NO: 825214 - DNA, 15 bp, Homo sapiens
actatatcactcgaa

SEQ ID NO: 825215 - DNA, 15 bp, Homo sapiens
ctatatcactcgaaa

SEQ ID NO: 825216 - DNA, 15 bp, Homo sapiens
tatatcactcgaaat

SEQ ID NO: 825217 - DNA, 15 bp, Homo sapiens
atatcactcgaaata

SEQ ID NO: 825218 - DNA, 15 bp, Homo sapiens
tatcactcgaaataa

SEQ ID NO: 825219 - DNA, 15 bp, Homo sapiens
atcactcgaaataaa

SEQ ID NO: 825220 - DNA, 15 bp, Homo sapiens
tcactcgaaataaat

SEQ ID NO: 825221 - DNA, 15 bp, Homo sapiens
cactcgaaataaatg

SEQ ID NO: 825222 - DNA, 15 bp, Homo sapiens
actcgaaataaatgc

SEQ ID NO: 825223 - DNA, 15 bp, Homo sapiens
ctcgaaataaatgcc

SEQ ID NO: 825224 - DNA, 15 bp, Homo sapiens
tcgaaataaatgcca

SEQ ID NO: 825225 - DNA, 15 bp, Homo sapiens
cgaaataaatgccaa

SEQ ID NO: 825226 - DNA, 15 bp, Homo sapiens
gaaataaatgccaaa

SEQ ID NO: 825227 - DNA, 15 bp, Homo sapiens
aaataaatgccaaac

SEQ ID NO: 825228 - DNA, 15 bp, Homo sapiens
aataaatgccaaaca

SEQ ID NO: 825229 - DNA, 15 bp, Homo sapiens
ataaatgccaaacac

SEQ ID NO: 825230 - DNA, 15 bp, Homo sapiens
taaatgccaaacact

SEQ ID NO: 825231 - DNA, 15 bp, Homo sapiens
aaatgccaaacacta

SEQ ID NO: 825232 - DNA, 15 bp, Homo sapiens
aatgccaaacactag

SEQ ID NO: 825233 - DNA, 15 bp, Homo sapiens
atgccaaacactagt

SEQ ID NO: 825234 - DNA, 15 bp, Homo sapiens
tgccaaacactagtg

SEQ ID NO: 825235 - DNA, 15 bp, Homo sapiens
gccaaacactagtgt

SEQ ID NO: 825236 - DNA, 15 bp, Homo sapiens
ccaaacactagtgtg

SEQ ID NO: 825237 - DNA, 15 bp, Homo sapiens
caaacactagtgtgg

SEQ ID NO: 825238 - DNA, 15 bp, Homo sapiens
aaacactagtgtggt

SEQ ID NO: 825239 - DNA, 15 bp, Homo sapiens
aacactagtgtggtg

SEQ ID NO: 825240 - DNA, 15 bp, Homo sapiens
acactagtgtggtga

SEQ ID NO: 825241 - DNA, 15 bp, Homo sapiens
cactagtgtggtgac

SEQ ID NO: 825242 - DNA, 15 bp, Homo sapiens
actagtgtggtgaca

SEQ ID NO: 825243 - DNA, 15 bp, Homo sapiens
ctagtgtggtgacac

SEQ ID NO: 825244 - DNA, 15 bp, Homo sapiens
tagtgtggtgacact

SEQ ID NO: 825245 - DNA, 15 bp, Homo sapiens
agtgtggtgacactt

SEQ ID NO: 825246 - DNA, 15 bp, Homo sapiens
gtgtggtgacacttt

SEQ ID NO: 825247 - DNA, 15 bp, Homo sapiens
tgtggtgacactttg

SEQ ID NO: 825248 - DNA, 15 bp, Homo sapiens
gtggtgacactttgc

SEQ ID NO: 825249 - DNA, 15 bp, Homo sapiens
tggtgacactttgct

SEQ ID NO: 825250 - DNA, 15 bp, Homo sapiens
ggtgacactttgctc

SEQ ID NO: 825251 - DNA, 15 bp, Homo sapiens
gtgacactttgctcc

SEQ ID NO: 825252 - DNA, 15 bp, Homo sapiens
tgacactttgctccc

SEQ ID NO: 825253 - DNA, 15 bp, Homo sapiens
gacactttgctccca

SEQ ID NO: 825254 - DNA, 15 bp, Homo sapiens
acactttgctcccat

SEQ ID NO: 825255 - DNA, 15 bp, Homo sapiens
cactttgctcccata

SEQ ID NO: 825256 - DNA, 15 bp, Homo sapiens
actttgctcccatat

SEQ ID NO: 825257 - DNA, 15 bp, Homo sapiens
ctttgctcccatatc

SEQ ID NO: 825258 - DNA, 15 bp, Homo sapiens
tttgctcccatatca

SEQ ID NO: 825259 - DNA, 15 bp, Homo sapiens
ttgctcccatatcac

SEQ ID NO: 825260 - DNA, 15 bp, Homo sapiens
tgctcccatatcaca

SEQ ID NO: 825261 - DNA, 15 bp, Homo sapiens
gctcccatatcacaa

SEQ ID NO: 825262 - DNA, 15 bp, Homo sapiens
ctcccatatcacaat

SEQ ID NO: 825263 - DNA, 15 bp, Homo sapiens
tcccatatcacaatc

SEQ ID NO: 825264 - DNA, 15 bp, Homo sapiens
cccatatcacaatca

SEQ ID NO: 825265 - DNA, 15 bp, Homo sapiens
ccatatcacaatcac

SEQ ID NO: 825266 - DNA, 15 bp, Homo sapiens
catatcacaatcact

SEQ ID NO: 825267 - DNA, 15 bp, Homo sapiens
atatcacaatcacta

SEQ ID NO: 825268 - DNA, 15 bp, Homo sapiens
tatcacaatcactaa

SEQ ID NO: 825269 - DNA, 15 bp, Homo sapiens
atcacaatcactaaa

SEQ ID NO: 825270 - DNA, 15 bp, Homo sapiens
tcacaatcactaaat

SEQ ID NO: 825271 - DNA, 15 bp, Homo sapiens
cacaatcactaaatt

SEQ ID NO: 825272 - DNA, 15 bp, Homo sapiens
acaatcactaaattc

SEQ ID NO: 825273 - DNA, 15 bp, Homo sapiens
caatcactaaattcg

SEQ ID NO: 825274 - DNA, 15 bp, Homo sapiens
aatcactaaattcga

SEQ ID NO: 825275 - DNA, 15 bp, Homo sapiens
atcactaaattcgac

SEQ ID NO: 825276 - DNA, 15 bp, Homo sapiens
tcactaaattcgact

SEQ ID NO: 825277 - DNA, 15 bp, Homo sapiens
cactaaattcgactt

SEQ ID NO: 825278 - DNA, 15 bp, Homo sapiens
actaaattcgactta

SEQ ID NO: 825279 - DNA, 15 bp, Homo sapiens
ctaaattcgacttac

SEQ ID NO: 825280 - DNA, 15 bp, Homo sapiens
taaattcgacttacc

SEQ ID NO: 825281 - DNA, 15 bp, Homo sapiens
aaattcgacttaccc

SEQ ID NO: 825282 - DNA, 15 bp, Homo sapiens
aattcgacttacccc

SEQ ID NO: 825283 - DNA, 15 bp, Homo sapiens
attcgacttacccct

SEQ ID NO: 825284 - DNA, 15 bp, Homo sapiens
ttcgacttacccctt

SEQ ID NO: 825285 - DNA, 15 bp, Homo sapiens
tcgacttaccccttt

SEQ ID NO: 825286 - DNA, 15 bp, Homo sapiens
cgacttaccccttta

SEQ ID NO: 825287 - DNA, 15 bp, Homo sapiens
gacttacccctttaa

SEQ ID NO: 825288 - DNA, 15 bp, Homo sapiens
acttacccctttaag

SEQ ID NO: 825289 - DNA, 15 bp, Homo sapiens
cttacccctttaagg

SEQ ID NO: 825290 - DNA, 15 bp, Homo sapiens
ttacccctttaaggc

SEQ ID NO: 825291 - DNA, 15 bp, Homo sapiens
tacccctttaaggcc

SEQ ID NO: 825292 - DNA, 15 bp, Homo sapiens
acccctttaaggcca

SEQ ID NO: 825293 - DNA, 15 bp, Homo sapiens
cccctttaaggccag

SEQ ID NO: 825294 - DNA, 15 bp, Homo sapiens
ccctttaaggccagg

SEQ ID NO: 825295 - DNA, 15 bp, Homo sapiens
cctttaaggccaggt

SEQ ID NO: 825296 - DNA, 15 bp, Homo sapiens
ctttaaggccaggta

SEQ ID NO: 825297 - DNA, 15 bp, Homo sapiens
tttaaggccaggtag

SEQ ID NO: 825298 - DNA, 15 bp, Homo sapiens
ttaaggccaggtagg

SEQ ID NO: 825299 - DNA, 15 bp, Homo sapiens
taaggccaggtagga

SEQ ID NO: 825300 - DNA, 15 bp, Homo sapiens
aaggccaggtaggaa

SEQ ID NO: 825301 - DNA, 15 bp, Homo sapiens
aggccaggtaggaat

SEQ ID NO: 825302 - DNA, 15 bp, Homo sapiens
ggccaggtaggaatt

SEQ ID NO: 825303 - DNA, 15 bp, Homo sapiens
gccaggtaggaattt

SEQ ID NO: 825304 - DNA, 15 bp, Homo sapiens
ccaggtaggaattta

SEQ ID NO: 825305 - DNA, 15 bp, Homo sapiens
caggtaggaatttag

SEQ ID NO: 825306 - DNA, 15 bp, Homo sapiens
aggtaggaatttagc

SEQ ID NO: 825307 - DNA, 15 bp, Homo sapiens
ggtaggaatttagca

SEQ ID NO: 825308 - DNA, 15 bp, Homo sapiens
gtaggaatttagcaa

SEQ ID NO: 825309 - DNA, 15 bp, Homo sapiens
taggaatttagcaac

SEQ ID NO: 825310 - DNA, 15 bp, Homo sapiens
aggaatttagcaacc

SEQ ID NO: 825311 - DNA, 15 bp, Homo sapiens
ggaatttagcaaccc

SEQ ID NO: 825312 - DNA, 15 bp, Homo sapiens
gaatttagcaaccca

SEQ ID NO: 825313 - DNA, 15 bp, Homo sapiens
aatttagcaacccag

SEQ ID NO: 825314 - DNA, 15 bp, Homo sapiens
atttagcaacccagc

SEQ ID NO: 825315 - DNA, 15 bp, Homo sapiens
tttagcaacccagct

SEQ ID NO: 825316 - DNA, 15 bp, Homo sapiens
ttagcaacccagctc

SEQ ID NO: 825317 - DNA, 15 bp, Homo sapiens
tagcaacccagctca

SEQ ID NO: 825318 - DNA, 15 bp, Homo sapiens
agcaacccagctcat

SEQ ID NO: 825319 - DNA, 15 bp, Homo sapiens
gcaacccagctcata

SEQ ID NO: 825320 - DNA, 15 bp, Homo sapiens
caacccagctcataa

SEQ ID NO: 825321 - DNA, 15 bp, Homo sapiens
aacccagctcataaa

SEQ ID NO: 825322 - DNA, 15 bp, Homo sapiens
acccagctcataaag

SEQ ID NO: 825323 - DNA, 15 bp, Homo sapiens
cccagctcataaagg

SEQ ID NO: 825324 - DNA, 15 bp, Homo sapiens
ccagctcataaaggg

SEQ ID NO: 825325 - DNA, 15 bp, Homo sapiens
cagctcataaagggt

SEQ ID NO: 825326 - DNA, 15 bp, Homo sapiens
agctcataaagggta

SEQ ID NO: 825327 - DNA, 15 bp, Homo sapiens
gctcataaagggtaa

SEQ ID NO: 825328 - DNA, 15 bp, Homo sapiens
ctcataaagggtaaa

SEQ ID NO: 825329 - DNA, 15 bp, Homo sapiens
tcataaagggtaaaa

SEQ ID NO: 825330 - DNA, 15 bp, Homo sapiens
cataaagggtaaaat

SEQ ID NO: 825331 - DNA, 15 bp, Homo sapiens
ataaagggtaaaatt

SEQ ID NO: 825332 - DNA, 15 bp, Homo sapiens
taaagggtaaaatta

SEQ ID NO: 825333 - DNA, 15 bp, Homo sapiens
aaagggtaaaattag

SEQ ID NO: 825334 - DNA, 15 bp, Homo sapiens
aagggtaaaattagc

SEQ ID NO: 825335 - DNA, 15 bp, Homo sapiens
agggtaaaattagct

SEQ ID NO: 825336 - DNA, 15 bp, Homo sapiens
gggtaaaattagctt

SEQ ID NO: 825337 - DNA, 15 bp, Homo sapiens
ggtaaaattagctta

SEQ ID NO: 825338 - DNA, 15 bp, Homo sapiens
gtaaaattagcttat

SEQ ID NO: 825339 - DNA, 15 bp, Homo sapiens
taaaattagcttatt

SEQ ID NO: 825340 - DNA, 15 bp, Homo sapiens
aaaattagcttatta

SEQ ID NO: 825341 - DNA, 15 bp, Homo sapiens
aaattagcttattat

SEQ ID NO: 825342 - DNA, 15 bp, Homo sapiens
aattagcttattatt

SEQ ID NO: 825343 - DNA, 15 bp, Homo sapiens
attagcttattattt

SEQ ID NO: 825344 - DNA, 15 bp, Homo sapiens
ttagcttattatttc

SEQ ID NO: 825345 - DNA, 15 bp, Homo sapiens
tagcttattatttcc

SEQ ID NO: 825346 - DNA, 15 bp, Homo sapiens
agcttattatttcct

SEQ ID NO: 825347 - DNA, 15 bp, Homo sapiens
gcttattatttcctg

SEQ ID NO: 825348 - DNA, 15 bp, Homo sapiens
cttattatttcctga

SEQ ID NO: 825349 - DNA, 15 bp, Homo sapiens
ttattatttcctgag

SEQ ID NO: 825350 - DNA, 15 bp, Homo sapiens
tattatttcctgagt

SEQ ID NO: 825351 - DNA, 15 bp, Homo sapiens
attatttcctgagtg

SEQ ID NO: 825352 - DNA, 15 bp, Homo sapiens
ttatttcctgagtgg

SEQ ID NO: 825353 - DNA, 15 bp, Homo sapiens
tatttcctgagtgga

SEQ ID NO: 825354 - DNA, 15 bp, Homo sapiens
atttcctgagtggat

SEQ ID NO: 825355 - DNA, 15 bp, Homo sapiens
tttcctgagtggatt

SEQ ID NO: 825356 - DNA, 15 bp, Homo sapiens
ttcctgagtggattg

SEQ ID NO: 825357 - DNA, 15 bp, Homo sapiens
tcctgagtggattgc

SEQ ID NO: 825358 - DNA, 15 bp, Homo sapiens
cctgagtggattgca

SEQ ID NO: 825359 - DNA, 15 bp, Homo sapiens
ctgagtggattgcaa

SEQ ID NO: 825360 - DNA, 15 bp, Homo sapiens
tgagtggattgcaaa

SEQ ID NO: 825361 - DNA, 15 bp, Homo sapiens
gagtggattgcaaac

SEQ ID NO: 825362 - DNA, 15 bp, Homo sapiens
agtggattgcaaacc

SEQ ID NO: 825363 - DNA, 15 bp, Homo sapiens
gtggattgcaaacct

SEQ ID NO: 825364 - DNA, 15 bp, Homo sapiens
tggattgcaaacctc

SEQ ID NO: 825365 - DNA, 15 bp, Homo sapiens
ggattgcaaacctca

SEQ ID NO: 825366 - DNA, 15 bp, Homo sapiens
gattgcaaacctcac

SEQ ID NO: 825367 - DNA, 15 bp, Homo sapiens
attgcaaacctcact

SEQ ID NO: 825368 - DNA, 15 bp, Homo sapiens
ttgcaaacctcactg

SEQ ID NO: 825369 - DNA, 15 bp, Homo sapiens
tgcaaacctcactgg

SEQ ID NO: 825370 - DNA, 15 bp, Homo sapiens
gcaaacctcactggc

SEQ ID NO: 825371 - DNA, 15 bp, Homo sapiens
caaacctcactggcc

SEQ ID NO: 825372 - DNA, 15 bp, Homo sapiens
aaacctcactggcca

SEQ ID NO: 825373 - DNA, 15 bp, Homo sapiens
aacctcactggccag

SEQ ID NO: 825374 - DNA, 15 bp, Homo sapiens
acctcactggccaga

SEQ ID NO: 825375 - DNA, 15 bp, Homo sapiens
cctcactggccagat

SEQ ID NO: 825376 - DNA, 15 bp, Homo sapiens
ctcactggccagatt

SEQ ID NO: 825377 - DNA, 15 bp, Homo sapiens
tcactggccagattg

SEQ ID NO: 825378 - DNA, 15 bp, Homo sapiens
cactggccagattgg

SEQ ID NO: 825379 - DNA, 15 bp, Homo sapiens
actggccagattggg

SEQ ID NO: 825380 - DNA, 15 bp, Homo sapiens
ctggccagattggga

SEQ ID NO: 825381 - DNA, 15 bp, Homo sapiens
tggccagattgggag

SEQ ID NO: 825382 - DNA, 15 bp, Homo sapiens
ggccagattgggagc

SEQ ID NO: 825383 - DNA, 15 bp, Homo sapiens
gccagattgggagca

SEQ ID NO: 825384 - DNA, 15 bp, Homo sapiens
ccagattgggagcac

SEQ ID NO: 825385 - DNA, 15 bp, Homo sapiens
cagattgggagcaca

SEQ ID NO: 825386 - DNA, 15 bp, Homo sapiens
agattgggagcacag

SEQ ID NO: 825387 - DNA, 15 bp, Homo sapiens
gattgggagcacagc

SEQ ID NO: 825388 - DNA, 15 bp, Homo sapiens
attgggagcacagca

SEQ ID NO: 825389 - DNA, 15 bp, Homo sapiens
ttgggagcacagcag

SEQ ID NO: 825390 - DNA, 15 bp, Homo sapiens
tgggagcacagcaga

SEQ ID NO: 825391 - DNA, 15 bp, Homo sapiens
gggagcacagcagat

SEQ ID NO: 825392 - DNA, 15 bp, Homo sapiens
ggagcacagcagata

SEQ ID NO: 825393 - DNA, 15 bp, Homo sapiens
gagcacagcagatac

SEQ ID NO: 825394 - DNA, 15 bp, Homo sapiens
agcacagcagatact

SEQ ID NO: 825395 - DNA, 15 bp, Homo sapiens
gcacagcagatactt

SEQ ID NO: 825396 - DNA, 15 bp, Homo sapiens
cacagcagatacttc

SEQ ID NO: 825397 - DNA, 15 bp, Homo sapiens
acagcagatacttcc

SEQ ID NO: 825398 - DNA, 15 bp, Homo sapiens
cagcagatacttcct

SEQ ID NO: 825399 - DNA, 15 bp, Homo sapiens
agcagatacttcctt

SEQ ID NO: 825400 - DNA, 15 bp, Homo sapiens
gcagatacttccttt

SEQ ID NO: 825401 - DNA, 15 bp, Homo sapiens
cagatacttcctttt

SEQ ID NO: 825402 - DNA, 15 bp, Homo sapiens
agatacttccttttt

SEQ ID NO: 825403 - DNA, 15 bp, Homo sapiens
gatacttcctttttg

SEQ ID NO: 825404 - DNA, 15 bp, Homo sapiens
atacttcctttttgt

SEQ ID NO: 825405 - DNA, 15 bp, Homo sapiens
tacttcctttttgta

SEQ ID NO: 825406 - DNA, 15 bp, Homo sapiens
acttcctttttgtaa

SEQ ID NO: 825407 - DNA, 15 bp, Homo sapiens
cttcctttttgtaaa

SEQ ID NO: 825408 - DNA, 15 bp, Homo sapiens
ttcctttttgtaaaa

SEQ ID NO: 825409 - DNA, 15 bp, Homo sapiens
tcctttttgtaaaaa

SEQ ID NO: 825410 - DNA, 15 bp, Homo sapiens
cctttttgtaaaaac

SEQ ID NO: 825411 - DNA, 15 bp, Homo sapiens
ctttttgtaaaaact

SEQ ID NO: 825412 - DNA, 15 bp, Homo sapiens
tttttgtaaaaactt

SEQ ID NO: 825413 - DNA, 15 bp, Homo sapiens
ttttgtaaaaacttg

SEQ ID NO: 825414 - DNA, 15 bp, Homo sapiens
tttgtaaaaacttgg

SEQ ID NO: 825415 - DNA, 15 bp, Homo sapiens
ttgtaaaaacttggc

SEQ ID NO: 825416 - DNA, 15 bp, Homo sapiens
tgtaaaaacttggct

SEQ ID NO: 825417 - DNA, 15 bp, Homo sapiens
gtaaaaacttggctg

SEQ ID NO: 825418 - DNA, 15 bp, Homo sapiens
taaaaacttggctga

SEQ ID NO: 825419 - DNA, 15 bp, Homo sapiens
aaaaacttggctgag

SEQ ID NO: 825420 - DNA, 15 bp, Homo sapiens
aaaacttggctgagt

SEQ ID NO: 825421 - DNA, 15 bp, Homo sapiens
aaacttggctgagtg

SEQ ID NO: 825422 - DNA, 15 bp, Homo sapiens
aacttggctgagtgt

SEQ ID NO: 825423 - DNA, 15 bp, Homo sapiens
acttggctgagtgtg

SEQ ID NO: 825424 - DNA, 15 bp, Homo sapiens
cttggctgagtgtgg

SEQ ID NO: 825425 - DNA, 15 bp, Homo sapiens
ttggctgagtgtggt

SEQ ID NO: 825426 - DNA, 15 bp, Homo sapiens
tggctgagtgtggtg

SEQ ID NO: 825427 - DNA, 15 bp, Homo sapiens
gtgtggtggctcact

SEQ ID NO: 825428 - DNA, 15 bp, Homo sapiens
tgtggtggctcactc

SEQ ID NO: 825429 - DNA, 15 bp, Homo sapiens
gtggtggctcactcc

SEQ ID NO: 825430 - DNA, 15 bp, Homo sapiens
tggtggctcactcct

SEQ ID NO: 825431 - DNA, 15 bp, Homo sapiens
gctcactcctgtaat

SEQ ID NO: 825432 - DNA, 15 bp, Homo sapiens
ctcactcctgtaatc

SEQ ID NO: 825433 - DNA, 15 bp, Homo sapiens
tcactcctgtaatcc

SEQ ID NO: 825434 - DNA, 15 bp, Homo sapiens
cactcctgtaatccc

SEQ ID NO: 825435 - DNA, 15 bp, Homo sapiens
actcctgtaatccca

SEQ ID NO: 825436 - DNA, 15 bp, Homo sapiens
ctcctgtaatcccag

SEQ ID NO: 825437 - DNA, 15 bp, Homo sapiens
tcctgtaatcccagc

SEQ ID NO: 825438 - DNA, 15 bp, Homo sapiens
atcccagcactttga

SEQ ID NO: 825439 - DNA, 15 bp, Homo sapiens
tcccagcactttgag

SEQ ID NO: 825440 - DNA, 15 bp, Homo sapiens
cccagcactttgaga

SEQ ID NO: 825441 - DNA, 15 bp, Homo sapiens
ccagcactttgagag

SEQ ID NO: 825442 - DNA, 15 bp, Homo sapiens
cagcactttgagagc

SEQ ID NO: 825443 - DNA, 15 bp, Homo sapiens
agcactttgagagcc

SEQ ID NO: 825444 - DNA, 15 bp, Homo sapiens
gcactttgagagccc

SEQ ID NO: 825445 - DNA, 15 bp, Homo sapiens
cactttgagagccca

SEQ ID NO: 825446 - DNA, 15 bp, Homo sapiens
actttgagagcccaa

SEQ ID NO: 825447 - DNA, 15 bp, Homo sapiens
ctttgagagcccaag

SEQ ID NO: 825448 - DNA, 15 bp, Homo sapiens
tttgagagcccaagg

SEQ ID NO: 825449 - DNA, 15 bp, Homo sapiens
ttgagagcccaaggc

SEQ ID NO: 825450 - DNA, 15 bp, Homo sapiens
tgagagcccaaggca

SEQ ID NO: 825451 - DNA, 15 bp, Homo sapiens
gagagcccaaggcaa

SEQ ID NO: 825452 - DNA, 15 bp, Homo sapiens
agagcccaaggcaag

SEQ ID NO: 825453 - DNA, 15 bp, Homo sapiens
gagcccaaggcaaga

SEQ ID NO: 825454 - DNA, 15 bp, Homo sapiens
agcccaaggcaagag

SEQ ID NO: 825455 - DNA, 15 bp, Homo sapiens
gcccaaggcaagagg

SEQ ID NO: 825456 - DNA, 15 bp, Homo sapiens
cccaaggcaagagga

SEQ ID NO: 825457 - DNA, 15 bp, Homo sapiens
ccaaggcaagaggat

SEQ ID NO: 825458 - DNA, 15 bp, Homo sapiens
caaggcaagaggatc

SEQ ID NO: 825459 - DNA, 15 bp, Homo sapiens
aaggcaagaggatcg

SEQ ID NO: 825460 - DNA, 15 bp, Homo sapiens
aggcaagaggatcgt

SEQ ID NO: 825461 - DNA, 15 bp, Homo sapiens
ggcaagaggatcgtt

SEQ ID NO: 825462 - DNA, 15 bp, Homo sapiens
gcaagaggatcgttt

SEQ ID NO: 825463 - DNA, 15 bp, Homo sapiens
caagaggatcgtttg

SEQ ID NO: 825464 - DNA, 15 bp, Homo sapiens
aagaggatcgtttga

SEQ ID NO: 825465 - DNA, 15 bp, Homo sapiens
agaggatcgtttgag

SEQ ID NO: 825466 - DNA, 15 bp, Homo sapiens
gaggatcgtttgagg

SEQ ID NO: 825467 - DNA, 15 bp, Homo sapiens
aggatcgtttgaggc

SEQ ID NO: 825468 - DNA, 15 bp, Homo sapiens
ggatcgtttgaggcc

SEQ ID NO: 825469 - DNA, 15 bp, Homo sapiens
gatcgtttgaggcca

SEQ ID NO: 825470 - DNA, 15 bp, Homo sapiens
atcgtttgaggccag

SEQ ID NO: 825471 - DNA, 15 bp, Homo sapiens
tcgtttgaggccagc

SEQ ID NO: 825472 - DNA, 15 bp, Homo sapiens
cgtttgaggccagcc

SEQ ID NO: 825473 - DNA, 15 bp, Homo sapiens
cagcctaggcaacac

SEQ ID NO: 825474 - DNA, 15 bp, Homo sapiens
agcctaggcaacaca

SEQ ID NO: 825475 - DNA, 15 bp, Homo sapiens
gcctaggcaacacag

SEQ ID NO: 825476 - DNA, 15 bp, Homo sapiens
cctaggcaacacagt

SEQ ID NO: 825477 - DNA, 15 bp, Homo sapiens
taggcaacacagtga

SEQ ID NO: 825478 - DNA, 15 bp, Homo sapiens
aggcaacacagtgag

SEQ ID NO: 825479 - DNA, 15 bp, Homo sapiens
ggcaacacagtgaga

SEQ ID NO: 825480 - DNA, 15 bp, Homo sapiens
gcaacacagtgagac

SEQ ID NO: 825481 - DNA, 15 bp, Homo sapiens
caacacagtgagacc

SEQ ID NO: 825482 - DNA, 15 bp, Homo sapiens
aacacagtgagaccc

SEQ ID NO: 825483 - DNA, 15 bp, Homo sapiens
acacagtgagaccct

SEQ ID NO: 825484 - DNA, 15 bp, Homo sapiens
cacagtgagaccctg

SEQ ID NO: 825485 - DNA, 15 bp, Homo sapiens
acagtgagaccctgt

SEQ ID NO: 825486 - DNA, 15 bp, Homo sapiens
cagtgagaccctgtc

SEQ ID NO: 825487 - DNA, 15 bp, Homo sapiens
agaccctgtctctac

SEQ ID NO: 825488 - DNA, 15 bp, Homo sapiens
gaccctgtctctaca

SEQ ID NO: 825489 - DNA, 15 bp, Homo sapiens
accctgtctctacaa

SEQ ID NO: 825490 - DNA, 15 bp, Homo sapiens
ccctgtctctacaaa

SEQ ID NO: 825491 - DNA, 15 bp, Homo sapiens
cctgtctctacaaaa

SEQ ID NO: 825492 - DNA, 15 bp, Homo sapiens
ctgtctctacaaaaa

SEQ ID NO: 825493 - DNA, 15 bp, Homo sapiens
tgtctctacaaaaat

SEQ ID NO: 825494 - DNA, 15 bp, Homo sapiens
gtctctacaaaaatt

SEQ ID NO: 825495 - DNA, 15 bp, Homo sapiens
tctctacaaaaattt

SEQ ID NO: 825496 - DNA, 15 bp, Homo sapiens
ctctacaaaaatttt

SEQ ID NO: 825497 - DNA, 15 bp, Homo sapiens
tctacaaaaattttt

SEQ ID NO: 825498 - DNA, 15 bp, Homo sapiens
ctacaaaaatttttt

SEQ ID NO: 825499 - DNA, 15 bp, Homo sapiens
tacaaaaattttttt

SEQ ID NO: 825500 - DNA, 15 bp, Homo sapiens
acaaaaattttttta

SEQ ID NO: 825501 - DNA, 15 bp, Homo sapiens
caaaaatttttttaa

SEQ ID NO: 825502 - DNA, 15 bp, Homo sapiens
aaaaatttttttaaa

SEQ ID NO: 825503 - DNA, 15 bp, Homo sapiens
aaaatttttttaaaa

SEQ ID NO: 825504 - DNA, 15 bp, Homo sapiens
aaatttttttaaaaa

SEQ ID NO: 825505 - DNA, 15 bp, Homo sapiens
aatttttttaaaaaa

SEQ ID NO: 825506 - DNA, 15 bp, Homo sapiens
tttttttaaaaaatt

SEQ ID NO: 825507 - DNA, 15 bp, Homo sapiens
ttttttaaaaaatta

SEQ ID NO: 825508 - DNA, 15 bp, Homo sapiens
tttttaaaaaattag

SEQ ID NO: 825509 - DNA, 15 bp, Homo sapiens
ttttaaaaaattagc

SEQ ID NO: 825510 - DNA, 15 bp, Homo sapiens
tttaaaaaattagcc

SEQ ID NO: 825511 - DNA, 15 bp, Homo sapiens
ttaaaaaattagccc

SEQ ID NO: 825512 - DNA, 15 bp, Homo sapiens
taaaaaattagcccg

SEQ ID NO: 825513 - DNA, 15 bp, Homo sapiens
aaaaaattagcccgg

SEQ ID NO: 825514 - DNA, 15 bp, Homo sapiens
aaaaattagcccggc

SEQ ID NO: 825515 - DNA, 15 bp, Homo sapiens
aaaattagcccggca

SEQ ID NO: 825516 - DNA, 15 bp, Homo sapiens
aaattagcccggcat

SEQ ID NO: 825517 - DNA, 15 bp, Homo sapiens
aattagcccggcatg

SEQ ID NO: 825518 - DNA, 15 bp, Homo sapiens
attagcccggcatgg

SEQ ID NO: 825519 - DNA, 15 bp, Homo sapiens
ttagcccggcatggt

SEQ ID NO: 825520 - DNA, 15 bp, Homo sapiens
tagcccggcatggtg

SEQ ID NO: 825521 - DNA, 15 bp, Homo sapiens
agcccggcatggtgg

SEQ ID NO: 825522 - DNA, 15 bp, Homo sapiens
gcccggcatggtggc

SEQ ID NO: 825523 - DNA, 15 bp, Homo sapiens
cccggcatggtggca

SEQ ID NO: 825524 - DNA, 15 bp, Homo sapiens
ccggcatggtggcac

SEQ ID NO: 825525 - DNA, 15 bp, Homo sapiens
cggcatggtggcaca

SEQ ID NO: 825526 - DNA, 15 bp, Homo sapiens
ggcatggtggcacat

SEQ ID NO: 825527 - DNA, 15 bp, Homo sapiens
gcatggtggcacata

SEQ ID NO: 825528 - DNA, 15 bp, Homo sapiens
catggtggcacatac

SEQ ID NO: 825529 - DNA, 15 bp, Homo sapiens
atggtggcacatacc

SEQ ID NO: 825530 - DNA, 15 bp, Homo sapiens
tggtggcacatacct

SEQ ID NO: 825531 - DNA, 15 bp, Homo sapiens
ggtggcacatacctg

SEQ ID NO: 825532 - DNA, 15 bp, Homo sapiens
gtggcacatacctgt

SEQ ID NO: 825533 - DNA, 15 bp, Homo sapiens
tggcacatacctgtg

SEQ ID NO: 825534 - DNA, 15 bp, Homo sapiens
ggcacatacctgtgg

SEQ ID NO: 825535 - DNA, 15 bp, Homo sapiens
gcacatacctgtggt

SEQ ID NO: 825536 - DNA, 15 bp, Homo sapiens
cacatacctgtggtc

SEQ ID NO: 825537 - DNA, 15 bp, Homo sapiens
acatacctgtggtcc

SEQ ID NO: 825538 - DNA, 15 bp, Homo sapiens
catacctgtggtccc

SEQ ID NO: 825539 - DNA, 15 bp, Homo sapiens
atacctgtggtccca

SEQ ID NO: 825540 - DNA, 15 bp, Homo sapiens
tacctgtggtcccag

SEQ ID NO: 825541 - DNA, 15 bp, Homo sapiens
acctgtggtcccagc

SEQ ID NO: 825542 - DNA, 15 bp, Homo sapiens
cctgtggtcccagct

SEQ ID NO: 825543 - DNA, 15 bp, Homo sapiens
ctgtggtcccagcta

SEQ ID NO: 825544 - DNA, 15 bp, Homo sapiens
tgtggtcccagctac

SEQ ID NO: 825545 - DNA, 15 bp, Homo sapiens
gtggtcccagctact

SEQ ID NO: 825546 - DNA, 15 bp, Homo sapiens
tggtcccagctactc

SEQ ID NO: 825547 - DNA, 15 bp, Homo sapiens
ggtcccagctactca

SEQ ID NO: 825548 - DNA, 15 bp, Homo sapiens
ctgaggtgggaggat

SEQ ID NO: 825549 - DNA, 15 bp, Homo sapiens
ggattgcttgagcct

SEQ ID NO: 825550 - DNA, 15 bp, Homo sapiens
gattgcttgagcctt

SEQ ID NO: 825551 - DNA, 15 bp, Homo sapiens
attgcttgagccttg

SEQ ID NO: 825552 - DNA, 15 bp, Homo sapiens
ttgcttgagccttgg

SEQ ID NO: 825553 - DNA, 15 bp, Homo sapiens
tgcttgagccttgga

SEQ ID NO: 825554 - DNA, 15 bp, Homo sapiens
gcttgagccttggag

SEQ ID NO: 825555 - DNA, 15 bp, Homo sapiens
cttgagccttggagg

SEQ ID NO: 825556 - DNA, 15 bp, Homo sapiens
ttgagccttggaggt

SEQ ID NO: 825557 - DNA, 15 bp, Homo sapiens
tgagccttggaggtt

SEQ ID NO: 825558 - DNA, 15 bp, Homo sapiens
gagccttggaggttg

SEQ ID NO: 825559 - DNA, 15 bp, Homo sapiens
agccttggaggttga

SEQ ID NO: 825560 - DNA, 15 bp, Homo sapiens
gccttggaggttgaa

SEQ ID NO: 825561 - DNA, 15 bp, Homo sapiens
ccttggaggttgaag

SEQ ID NO: 825562 - DNA, 15 bp, Homo sapiens
cttggaggttgaagc

SEQ ID NO: 825563 - DNA, 15 bp, Homo sapiens
ttggaggttgaagct

SEQ ID NO: 825564 - DNA, 15 bp, Homo sapiens
tggaggttgaagcta

SEQ ID NO: 825565 - DNA, 15 bp, Homo sapiens
ggaggttgaagctac

SEQ ID NO: 825566 - DNA, 15 bp, Homo sapiens
gaggttgaagctaca

SEQ ID NO: 825567 - DNA, 15 bp, Homo sapiens
aggttgaagctacag

SEQ ID NO: 825568 - DNA, 15 bp, Homo sapiens
ggttgaagctacagt

SEQ ID NO: 825569 - DNA, 15 bp, Homo sapiens
gttgaagctacagtg

SEQ ID NO: 825570 - DNA, 15 bp, Homo sapiens
ttgaagctacagtga

SEQ ID NO: 825571 - DNA, 15 bp, Homo sapiens
tgaagctacagtgag

SEQ ID NO: 825572 - DNA, 15 bp, Homo sapiens
gaagctacagtgagc

SEQ ID NO: 825573 - DNA, 15 bp, Homo sapiens
aagctacagtgagct

SEQ ID NO: 825574 - DNA, 15 bp, Homo sapiens
agctacagtgagctg

SEQ ID NO: 825575 - DNA, 15 bp, Homo sapiens
gctacagtgagctgt

SEQ ID NO: 825576 - DNA, 15 bp, Homo sapiens
ctacagtgagctgtg

SEQ ID NO: 825577 - DNA, 15 bp, Homo sapiens
tacagtgagctgtgg

SEQ ID NO: 825578 - DNA, 15 bp, Homo sapiens
acagtgagctgtggt

SEQ ID NO: 825579 - DNA, 15 bp, Homo sapiens
cagtgagctgtggtt

SEQ ID NO: 825580 - DNA, 15 bp, Homo sapiens
agtgagctgtggttg

SEQ ID NO: 825581 - DNA, 15 bp, Homo sapiens
gtgagctgtggttgt

SEQ ID NO: 825582 - DNA, 15 bp, Homo sapiens
tgagctgtggttgtg

SEQ ID NO: 825583 - DNA, 15 bp, Homo sapiens
gagctgtggttgtgc

SEQ ID NO: 825584 - DNA, 15 bp, Homo sapiens
agctgtggttgtgct

SEQ ID NO: 825585 - DNA, 15 bp, Homo sapiens
gctgtggttgtgcta

SEQ ID NO: 825586 - DNA, 15 bp, Homo sapiens
ctgtggttgtgctac

SEQ ID NO: 825587 - DNA, 15 bp, Homo sapiens
tgtggttgtgctact

SEQ ID NO: 825588 - DNA, 15 bp, Homo sapiens
gtggttgtgctactg

SEQ ID NO: 825589 - DNA, 15 bp, Homo sapiens
tggttgtgctactgt

SEQ ID NO: 825590 - DNA, 15 bp, Homo sapiens
ggttgtgctactgta

SEQ ID NO: 825591 - DNA, 15 bp, Homo sapiens
gttgtgctactgtac

SEQ ID NO: 825592 - DNA, 15 bp, Homo sapiens
ttgtgctactgtact

SEQ ID NO: 825593 - DNA, 15 bp, Homo sapiens
tgtgctactgtactc

SEQ ID NO: 825594 - DNA, 15 bp, Homo sapiens
gtgctactgtactcc

SEQ ID NO: 825595 - DNA, 15 bp, Homo sapiens
tgctactgtactcca

SEQ ID NO: 825596 - DNA, 15 bp, Homo sapiens
gctactgtactccag

SEQ ID NO: 825597 - DNA, 15 bp, Homo sapiens
ctactgtactccagc

SEQ ID NO: 825598 - DNA, 15 bp, Homo sapiens
tactgtactccagcc

SEQ ID NO: 825599 - DNA, 15 bp, Homo sapiens
tccagcctgggcaat

SEQ ID NO: 825600 - DNA, 15 bp, Homo sapiens
ccagcctgggcaata

SEQ ID NO: 825601 - DNA, 15 bp, Homo sapiens
cagcctgggcaatac

SEQ ID NO: 825602 - DNA, 15 bp, Homo sapiens
agcctgggcaataca

SEQ ID NO: 825603 - DNA, 15 bp, Homo sapiens
gcctgggcaatacag

SEQ ID NO: 825604 - DNA, 15 bp, Homo sapiens
cctgggcaatacagt

SEQ ID NO: 825605 - DNA, 15 bp, Homo sapiens
ctgggcaatacagtg

SEQ ID NO: 825606 - DNA, 15 bp, Homo sapiens
tgggcaatacagtga

SEQ ID NO: 825607 - DNA, 15 bp, Homo sapiens
gggcaatacagtgaa

SEQ ID NO: 825608 - DNA, 15 bp, Homo sapiens
ggcaatacagtgaaa

SEQ ID NO: 825609 - DNA, 15 bp, Homo sapiens
gcaatacagtgaaat

SEQ ID NO: 825610 - DNA, 15 bp, Homo sapiens
caatacagtgaaatc

SEQ ID NO: 825611 - DNA, 15 bp, Homo sapiens
aatacagtgaaatcc

SEQ ID NO: 825612 - DNA, 15 bp, Homo sapiens
atacagtgaaatccc

SEQ ID NO: 825613 - DNA, 15 bp, Homo sapiens
tacagtgaaatccca

SEQ ID NO: 825614 - DNA, 15 bp, Homo sapiens
acagtgaaatcccat

SEQ ID NO: 825615 - DNA, 15 bp, Homo sapiens
cagtgaaatcccatc

SEQ ID NO: 825616 - DNA, 15 bp, Homo sapiens
agtgaaatcccatct

SEQ ID NO: 825617 - DNA, 15 bp, Homo sapiens
tgaaatcccatctta

SEQ ID NO: 825618 - DNA, 15 bp, Homo sapiens
gaaatcccatcttaa

SEQ ID NO: 825619 - DNA, 15 bp, Homo sapiens
aaatcccatcttaaa

SEQ ID NO: 825620 - DNA, 15 bp, Homo sapiens
aatcccatcttaaaa

SEQ ID NO: 825621 - DNA, 15 bp, Homo sapiens
atcccatcttaaaaa

SEQ ID NO: 825622 - DNA, 15 bp, Homo sapiens
tcccatcttaaaaaa

SEQ ID NO: 825623 - DNA, 15 bp, Homo sapiens
cccatcttaaaaaaa

SEQ ID NO: 825624 - DNA, 15 bp, Homo sapiens
ccatcttaaaaaaaa

SEQ ID NO: 825625 - DNA, 15 bp, Homo sapiens
catcttaaaaaaaaa

SEQ ID NO: 825626 - DNA, 15 bp, Homo sapiens
atcttaaaaaaaaaa

SEQ ID NO: 825627 - DNA, 15 bp, Homo sapiens
tcttaaaaaaaaaat

SEQ ID NO: 825628 - DNA, 15 bp, Homo sapiens
cttaaaaaaaaaata

SEQ ID NO: 825629 - DNA, 15 bp, Homo sapiens
ttaaaaaaaaaataa

SEQ ID NO: 825630 - DNA, 15 bp, Homo sapiens
taaaaaaaaaataaa

SEQ ID NO: 825631 - DNA, 15 bp, Homo sapiens
aaaaaaaaaataaaa

SEQ ID NO: 825632 - DNA, 15 bp, Homo sapiens
aaaaaaaaataaaaa

SEQ ID NO: 825633 - DNA, 15 bp, Homo sapiens
aaaaaaaataaaaat

SEQ ID NO: 825634 - DNA, 15 bp, Homo sapiens
aaaaaaataaaaata

SEQ ID NO: 825635 - DNA, 15 bp, Homo sapiens
aaaaaataaaaataa

SEQ ID NO: 825636 - DNA, 15 bp, Homo sapiens
taaaaaattaaatta

SEQ ID NO: 825637 - DNA, 15 bp, Homo sapiens
aaattaaattaaatt

SEQ ID NO: 825638 - DNA, 15 bp, Homo sapiens
aattaaattaaatta

SEQ ID NO: 825639 - DNA, 15 bp, Homo sapiens
attaaattaaattaa

SEQ ID NO: 825640 - DNA, 15 bp, Homo sapiens
ttaaattaaattaaa

SEQ ID NO: 825641 - DNA, 15 bp, Homo sapiens
taaattaaattaaac

SEQ ID NO: 825642 - DNA, 15 bp, Homo sapiens
aaattaaattaaaca

SEQ ID NO: 825643 - DNA, 15 bp, Homo sapiens
aattaaattaaacaa

SEQ ID NO: 825644 - DNA, 15 bp, Homo sapiens
attaaattaaacaaa

SEQ ID NO: 825645 - DNA, 15 bp, Homo sapiens
ttaaattaaacaaac

SEQ ID NO: 825646 - DNA, 15 bp, Homo sapiens
taaattaaacaaaca

SEQ ID NO: 825647 - DNA, 15 bp, Homo sapiens
aaattaaacaaacaa

SEQ ID NO: 825648 - DNA, 15 bp, Homo sapiens
aattaaacaaacaaa

SEQ ID NO: 825649 - DNA, 15 bp, Homo sapiens
attaaacaaacaaaa

SEQ ID NO: 825650 - DNA, 15 bp, Homo sapiens
ttaaacaaacaaaaa

SEQ ID NO: 825651 - DNA, 15 bp, Homo sapiens
taaacaaacaaaaaa

SEQ ID NO: 825652 - DNA, 15 bp, Homo sapiens
aacaaacaaaaaact

SEQ ID NO: 825653 - DNA, 15 bp, Homo sapiens
acaaacaaaaaactc

SEQ ID NO: 825654 - DNA, 15 bp, Homo sapiens
caaacaaaaaactca

SEQ ID NO: 825655 - DNA, 15 bp, Homo sapiens
aaacaaaaaactcag

SEQ ID NO: 825656 - DNA, 15 bp, Homo sapiens
aacaaaaaactcagt

SEQ ID NO: 825657 - DNA, 15 bp, Homo sapiens
acaaaaaactcagtc

SEQ ID NO: 825658 - DNA, 15 bp, Homo sapiens
caaaaaactcagtct

SEQ ID NO: 825659 - DNA, 15 bp, Homo sapiens
aaaaaactcagtctc

SEQ ID NO: 825660 - DNA, 15 bp, Homo sapiens
aaaaactcagtctca

SEQ ID NO: 825661 - DNA, 15 bp, Homo sapiens
aaaactcagtctcat

SEQ ID NO: 825662 - DNA, 15 bp, Homo sapiens
aaactcagtctcatg

SEQ ID NO: 825663 - DNA, 15 bp, Homo sapiens
aactcagtctcatgg

SEQ ID NO: 825664 - DNA, 15 bp, Homo sapiens
actcagtctcatggt

SEQ ID NO: 825665 - DNA, 15 bp, Homo sapiens
ctcagtctcatggtc

SEQ ID NO: 825666 - DNA, 15 bp, Homo sapiens
tcagtctcatggtct

SEQ ID NO: 825667 - DNA, 15 bp, Homo sapiens
cagtctcatggtctt

SEQ ID NO: 825668 - DNA, 15 bp, Homo sapiens
agtctcatggtcttc

SEQ ID NO: 825669 - DNA, 15 bp, Homo sapiens
gtctcatggtcttcc

SEQ ID NO: 825670 - DNA, 15 bp, Homo sapiens
tctcatggtcttcct

SEQ ID NO: 825671 - DNA, 15 bp, Homo sapiens
ctcatggtcttcctt

SEQ ID NO: 825672 - DNA, 15 bp, Homo sapiens
tcatggtcttccttc

SEQ ID NO: 825673 - DNA, 15 bp, Homo sapiens
catggtcttccttct

SEQ ID NO: 825674 - DNA, 15 bp, Homo sapiens
atggtcttccttctt

SEQ ID NO: 825675 - DNA, 15 bp, Homo sapiens
tggtcttccttcttt

SEQ ID NO: 825676 - DNA, 15 bp, Homo sapiens
ggtcttccttcttta

SEQ ID NO: 825677 - DNA, 15 bp, Homo sapiens
gtcttccttctttat

SEQ ID NO: 825678 - DNA, 15 bp, Homo sapiens
tcttccttctttata

SEQ ID NO: 825679 - DNA, 15 bp, Homo sapiens
cttccttctttatat

SEQ ID NO: 825680 - DNA, 15 bp, Homo sapiens
ttccttctttatatt

SEQ ID NO: 825681 - DNA, 15 bp, Homo sapiens
tccttctttatattc

SEQ ID NO: 825682 - DNA, 15 bp, Homo sapiens
ccttctttatattct

SEQ ID NO: 825683 - DNA, 15 bp, Homo sapiens
cttctttatattctc

SEQ ID NO: 825684 - DNA, 15 bp, Homo sapiens
ttctttatattctca

SEQ ID NO: 825685 - DNA, 15 bp, Homo sapiens
tctttatattctcac

SEQ ID NO: 825686 - DNA, 15 bp, Homo sapiens
ctttatattctcacc

SEQ ID NO: 825687 - DNA, 15 bp, Homo sapiens
tttatattctcacct

SEQ ID NO: 825688 - DNA, 15 bp, Homo sapiens
ttatattctcaccta

SEQ ID NO: 825689 - DNA, 15 bp, Homo sapiens
tatattctcacctag

SEQ ID NO: 825690 - DNA, 15 bp, Homo sapiens
atattctcacctagc

SEQ ID NO: 825691 - DNA, 15 bp, Homo sapiens
tattctcacctagcc

SEQ ID NO: 825692 - DNA, 15 bp, Homo sapiens
attctcacctagcct

SEQ ID NO: 825693 - DNA, 15 bp, Homo sapiens
ttctcacctagcctt

SEQ ID NO: 825694 - DNA, 15 bp, Homo sapiens
tctcacctagccttc

SEQ ID NO: 825695 - DNA, 15 bp, Homo sapiens
ctcacctagccttct

SEQ ID NO: 825696 - DNA, 15 bp, Homo sapiens
tcacctagccttctt

SEQ ID NO: 825697 - DNA, 15 bp, Homo sapiens
cacctagccttcttc

SEQ ID NO: 825698 - DNA, 15 bp, Homo sapiens
acctagccttcttct

SEQ ID NO: 825699 - DNA, 15 bp, Homo sapiens
cctagccttcttctc

SEQ ID NO: 825700 - DNA, 15 bp, Homo sapiens
ctagccttcttctcc

SEQ ID NO: 825701 - DNA, 15 bp, Homo sapiens
tagccttcttctcca

SEQ ID NO: 825702 - DNA, 15 bp, Homo sapiens
agccttcttctccag

SEQ ID NO: 825703 - DNA, 15 bp, Homo sapiens
gccttcttctccagc

SEQ ID NO: 825704 - DNA, 15 bp, Homo sapiens
ccttcttctccagcc

SEQ ID NO: 825705 - DNA, 15 bp, Homo sapiens
cttcttctccagccc

SEQ ID NO: 825706 - DNA, 15 bp, Homo sapiens
ttcttctccagccct

SEQ ID NO: 825707 - DNA, 15 bp, Homo sapiens
tcttctccagccctg

SEQ ID NO: 825708 - DNA, 15 bp, Homo sapiens
cttctccagccctgt

SEQ ID NO: 825709 - DNA, 15 bp, Homo sapiens
ttctccagccctgtt

SEQ ID NO: 825710 - DNA, 15 bp, Homo sapiens
tctccagccctgttt

SEQ ID NO: 825711 - DNA, 15 bp, Homo sapiens
ctccagccctgtttg

SEQ ID NO: 825712 - DNA, 15 bp, Homo sapiens
tccagccctgtttgc

SEQ ID NO: 825713 - DNA, 15 bp, Homo sapiens
ccagccctgtttgca

SEQ ID NO: 825714 - DNA, 15 bp, Homo sapiens
cagccctgtttgcat

SEQ ID NO: 825715 - DNA, 15 bp, Homo sapiens
agccctgtttgcatt

SEQ ID NO: 825716 - DNA, 15 bp, Homo sapiens
gccctgtttgcattt

SEQ ID NO: 825717 - DNA, 15 bp, Homo sapiens
ccctgtttgcatttt

SEQ ID NO: 825718 - DNA, 15 bp, Homo sapiens
cctgtttgcattttt

SEQ ID NO: 825719 - DNA, 15 bp, Homo sapiens
ctgtttgcatttttg

SEQ ID NO: 825720 - DNA, 15 bp, Homo sapiens
tgtttgcatttttgt

SEQ ID NO: 825721 - DNA, 15 bp, Homo sapiens
gtttgcatttttgtg

SEQ ID NO: 825722 - DNA, 15 bp, Homo sapiens
tttgcatttttgtga

SEQ ID NO: 825723 - DNA, 15 bp, Homo sapiens
ttgcatttttgtgaa

SEQ ID NO: 825724 - DNA, 15 bp, Homo sapiens
tgcatttttgtgaat

SEQ ID NO: 825725 - DNA, 15 bp, Homo sapiens
gcatttttgtgaatt

SEQ ID NO: 825726 - DNA, 15 bp, Homo sapiens
catttttgtgaattt

SEQ ID NO: 825727 - DNA, 15 bp, Homo sapiens
atttttgtgaatttc

SEQ ID NO: 825728 - DNA, 15 bp, Homo sapiens
tttttgtgaatttct

SEQ ID NO: 825729 - DNA, 15 bp, Homo sapiens
ttttgtgaatttctc

SEQ ID NO: 825730 - DNA, 15 bp, Homo sapiens
tttgtgaatttctcc

SEQ ID NO: 825731 - DNA, 15 bp, Homo sapiens
ttgtgaatttctccc

SEQ ID NO: 825732 - DNA, 15 bp, Homo sapiens
tgtgaatttctccca

SEQ ID NO: 825733 - DNA, 15 bp, Homo sapiens
gtgaatttctcccat

SEQ ID NO: 825734 - DNA, 15 bp, Homo sapiens
tgaatttctcccatt

SEQ ID NO: 825735 - DNA, 15 bp, Homo sapiens
gaatttctcccattt

SEQ ID NO: 825736 - DNA, 15 bp, Homo sapiens
aatttctcccatttt

SEQ ID NO: 825737 - DNA, 15 bp, Homo sapiens
atttctcccattttc

SEQ ID NO: 825738 - DNA, 15 bp, Homo sapiens
tttctcccattttca

SEQ ID NO: 825739 - DNA, 15 bp, Homo sapiens
ttctcccattttcac

SEQ ID NO: 825740 - DNA, 15 bp, Homo sapiens
tctcccattttcact

SEQ ID NO: 825741 - DNA, 15 bp, Homo sapiens
ctcccattttcactc

SEQ ID NO: 825742 - DNA, 15 bp, Homo sapiens
tcccattttcactct

SEQ ID NO: 825743 - DNA, 15 bp, Homo sapiens
cccattttcactcta

SEQ ID NO: 825744 - DNA, 15 bp, Homo sapiens
ccattttcactctag

SEQ ID NO: 825745 - DNA, 15 bp, Homo sapiens
cattttcactctagc

SEQ ID NO: 825746 - DNA, 15 bp, Homo sapiens
attttcactctagcc

SEQ ID NO: 825747 - DNA, 15 bp, Homo sapiens
ttttcactctagcca

SEQ ID NO: 825748 - DNA, 15 bp, Homo sapiens
tttcactctagccag

SEQ ID NO: 825749 - DNA, 15 bp, Homo sapiens
ttcactctagccagc

SEQ ID NO: 825750 - DNA, 15 bp, Homo sapiens
tcactctagccagcc

SEQ ID NO: 825751 - DNA, 15 bp, Homo sapiens
cactctagccagcct

SEQ ID NO: 825752 - DNA, 15 bp, Homo sapiens
actctagccagccta

SEQ ID NO: 825753 - DNA, 15 bp, Homo sapiens
ctctagccagcctac

SEQ ID NO: 825754 - DNA, 15 bp, Homo sapiens
tctagccagcctact

SEQ ID NO: 825755 - DNA, 15 bp, Homo sapiens
ctagccagcctactt

SEQ ID NO: 825756 - DNA, 15 bp, Homo sapiens
tagccagcctactta

SEQ ID NO: 825757 - DNA, 15 bp, Homo sapiens
agccagcctacttac

SEQ ID NO: 825758 - DNA, 15 bp, Homo sapiens
gccagcctacttacc

SEQ ID NO: 825759 - DNA, 15 bp, Homo sapiens
ccagcctacttacca

SEQ ID NO: 825760 - DNA, 15 bp, Homo sapiens
cagcctacttaccaa

SEQ ID NO: 825761 - DNA, 15 bp, Homo sapiens
agcctacttaccaac

SEQ ID NO: 825762 - DNA, 15 bp, Homo sapiens
gcctacttaccaacc

SEQ ID NO: 825763 - DNA, 15 bp, Homo sapiens
cctacttaccaacca

SEQ ID NO: 825764 - DNA, 15 bp, Homo sapiens
ctacttaccaaccac

SEQ ID NO: 825765 - DNA, 15 bp, Homo sapiens
tacttaccaaccact

SEQ ID NO: 825766 - DNA, 15 bp, Homo sapiens
acttaccaaccactc

SEQ ID NO: 825767 - DNA, 15 bp, Homo sapiens
cttaccaaccactcc

SEQ ID NO: 825768 - DNA, 15 bp, Homo sapiens
ttaccaaccactcct

SEQ ID NO: 825769 - DNA, 15 bp, Homo sapiens
taccaaccactccta

SEQ ID NO: 825770 - DNA, 15 bp, Homo sapiens
accaaccactcctac

SEQ ID NO: 825771 - DNA, 15 bp, Homo sapiens
ccaaccactcctacc

SEQ ID NO: 825772 - DNA, 15 bp, Homo sapiens
caaccactcctaccc

SEQ ID NO: 825773 - DNA, 15 bp, Homo sapiens
aaccactcctaccca

SEQ ID NO: 825774 - DNA, 15 bp, Homo sapiens
accactcctacccaa

SEQ ID NO: 825775 - DNA, 15 bp, Homo sapiens
ccactcctacccaat

SEQ ID NO: 825776 - DNA, 15 bp, Homo sapiens
cactcctacccaatc

SEQ ID NO: 825777 - DNA, 15 bp, Homo sapiens
actcctacccaatct

SEQ ID NO: 825778 - DNA, 15 bp, Homo sapiens
ctcctacccaatctc

SEQ ID NO: 825779 - DNA, 15 bp, Homo sapiens
tcctacccaatctca

SEQ ID NO: 825780 - DNA, 15 bp, Homo sapiens
cctacccaatctcag

SEQ ID NO: 825781 - DNA, 15 bp, Homo sapiens
ctacccaatctcaga

SEQ ID NO: 825782 - DNA, 15 bp, Homo sapiens
tacccaatctcagat

SEQ ID NO: 825783 - DNA, 15 bp, Homo sapiens
acccaatctcagata

SEQ ID NO: 825784 - DNA, 15 bp, Homo sapiens
cccaatctcagatat

SEQ ID NO: 825785 - DNA, 15 bp, Homo sapiens
ccaatctcagatatg

SEQ ID NO: 825786 - DNA, 15 bp, Homo sapiens
caatctcagatatgt

SEQ ID NO: 825787 - DNA, 15 bp, Homo sapiens
aatctcagatatgtt

SEQ ID NO: 825788 - DNA, 15 bp, Homo sapiens
atctcagatatgttc

SEQ ID NO: 825789 - DNA, 15 bp, Homo sapiens
tctcagatatgttcc

SEQ ID NO: 825790 - DNA, 15 bp, Homo sapiens
ctcagatatgttcca

SEQ ID NO: 825791 - DNA, 15 bp, Homo sapiens
tcagatatgttccat

SEQ ID NO: 825792 - DNA, 15 bp, Homo sapiens
cagatatgttccatc

SEQ ID NO: 825793 - DNA, 15 bp, Homo sapiens
agatatgttccatcg

SEQ ID NO: 825794 - DNA, 15 bp, Homo sapiens
gatatgttccatcgc

SEQ ID NO: 825795 - DNA, 15 bp, Homo sapiens
atatgttccatcgcc

SEQ ID NO: 825796 - DNA, 15 bp, Homo sapiens
tatgttccatcgcca

SEQ ID NO: 825797 - DNA, 15 bp, Homo sapiens
atgttccatcgccat

SEQ ID NO: 825798 - DNA, 15 bp, Homo sapiens
tgttccatcgccatg

SEQ ID NO: 825799 - DNA, 15 bp, Homo sapiens
gttccatcgccatgg

SEQ ID NO: 825800 - DNA, 15 bp, Homo sapiens
ttccatcgccatggt

SEQ ID NO: 825801 - DNA, 15 bp, Homo sapiens
tccatcgccatggtt

SEQ ID NO: 825802 - DNA, 15 bp, Homo sapiens
ccatcgccatggttt

SEQ ID NO: 825803 - DNA, 15 bp, Homo sapiens
catcgccatggtttt

SEQ ID NO: 825804 - DNA, 15 bp, Homo sapiens
atcgccatggttttg

SEQ ID NO: 825805 - DNA, 15 bp, Homo sapiens
tcgccatggttttgg

SEQ ID NO: 825806 - DNA, 15 bp, Homo sapiens
cgccatggttttggt

SEQ ID NO: 825807 - DNA, 15 bp, Homo sapiens
gccatggttttggta

SEQ ID NO: 825808 - DNA, 15 bp, Homo sapiens
ccatggttttggtag

SEQ ID NO: 825809 - DNA, 15 bp, Homo sapiens
catggttttggtagt

SEQ ID NO: 825810 - DNA, 15 bp, Homo sapiens
atggttttggtagtt

SEQ ID NO: 825811 - DNA, 15 bp, Homo sapiens
tggttttggtagttt

SEQ ID NO: 825812 - DNA, 15 bp, Homo sapiens
ggttttggtagtttc

SEQ ID NO: 825813 - DNA, 15 bp, Homo sapiens
gttttggtagtttct

SEQ ID NO: 825814 - DNA, 15 bp, Homo sapiens
ttttggtagtttctt

SEQ ID NO: 825815 - DNA, 15 bp, Homo sapiens
tttggtagtttcttg

SEQ ID NO: 825816 - DNA, 15 bp, Homo sapiens
ttggtagtttcttgt

SEQ ID NO: 825817 - DNA, 15 bp, Homo sapiens
tggtagtttcttgtc

SEQ ID NO: 825818 - DNA, 15 bp, Homo sapiens
ggtagtttcttgtct

SEQ ID NO: 825819 - DNA, 15 bp, Homo sapiens
gtagtttcttgtcta

SEQ ID NO: 825820 - DNA, 15 bp, Homo sapiens
tagtttcttgtctag

SEQ ID NO: 825821 - DNA, 15 bp, Homo sapiens
agtttcttgtctagc

SEQ ID NO: 825822 - DNA, 15 bp, Homo sapiens
gtttcttgtctagca

SEQ ID NO: 825823 - DNA, 15 bp, Homo sapiens
tttcttgtctagcag

SEQ ID NO: 825824 - DNA, 15 bp, Homo sapiens
ttcttgtctagcagc

SEQ ID NO: 825825 - DNA, 15 bp, Homo sapiens
tcttgtctagcagct

SEQ ID NO: 825826 - DNA, 15 bp, Homo sapiens
cttgtctagcagctg

SEQ ID NO: 825827 - DNA, 15 bp, Homo sapiens
ttgtctagcagctgc

SEQ ID NO: 825828 - DNA, 15 bp, Homo sapiens
tgtctagcagctgct

SEQ ID NO: 825829 - DNA, 15 bp, Homo sapiens
gtctagcagctgctt

SEQ ID NO: 825830 - DNA, 15 bp, Homo sapiens
tctagcagctgcttt

SEQ ID NO: 825831 - DNA, 15 bp, Homo sapiens
ctagcagctgctttc

SEQ ID NO: 825832 - DNA, 15 bp, Homo sapiens
tagcagctgctttct

SEQ ID NO: 825833 - DNA, 15 bp, Homo sapiens
agcagctgctttctt

SEQ ID NO: 825834 - DNA, 15 bp, Homo sapiens
gcagctgctttcttg

SEQ ID NO: 825835 - DNA, 15 bp, Homo sapiens
cagctgctttcttgt

SEQ ID NO: 825836 - DNA, 15 bp, Homo sapiens
agctgctttcttgtc

SEQ ID NO: 825837 - DNA, 15 bp, Homo sapiens
gctgctttcttgtct

SEQ ID NO: 825838 - DNA, 15 bp, Homo sapiens
ctgctttcttgtctt

SEQ ID NO: 825839 - DNA, 15 bp, Homo sapiens
tgctttcttgtcttc

SEQ ID NO: 825840 - DNA, 15 bp, Homo sapiens
gctttcttgtcttct

SEQ ID NO: 825841 - DNA, 15 bp, Homo sapiens
ctttcttgtcttctc

SEQ ID NO: 825842 - DNA, 15 bp, Homo sapiens
tttcttgtcttctct

SEQ ID NO: 825843 - DNA, 15 bp, Homo sapiens
ttcttgtcttctctg

SEQ ID NO: 825844 - DNA, 15 bp, Homo sapiens
tcttgtcttctctgc

SEQ ID NO: 825845 - DNA, 15 bp, Homo sapiens
cttgtcttctctgct

SEQ ID NO: 825846 - DNA, 15 bp, Homo sapiens
ttgtcttctctgctt

SEQ ID NO: 825847 - DNA, 15 bp, Homo sapiens
tgtcttctctgctta

SEQ ID NO: 825848 - DNA, 15 bp, Homo sapiens
gtcttctctgcttac

SEQ ID NO: 825849 - DNA, 15 bp, Homo sapiens
tcttctctgcttacc

SEQ ID NO: 825850 - DNA, 15 bp, Homo sapiens
cttctctgcttacct

SEQ ID NO: 825851 - DNA, 15 bp, Homo sapiens
ttctctgcttacctg

SEQ ID NO: 825852 - DNA, 15 bp, Homo sapiens
tctctgcttacctgc

SEQ ID NO: 825853 - DNA, 15 bp, Homo sapiens
ctctgcttacctgca

SEQ ID NO: 825854 - DNA, 15 bp, Homo sapiens
tctgcttacctgcac

SEQ ID NO: 825855 - DNA, 15 bp, Homo sapiens
ctgcttacctgcact

SEQ ID NO: 825856 - DNA, 15 bp, Homo sapiens
tgcttacctgcactc

SEQ ID NO: 825857 - DNA, 15 bp, Homo sapiens
gcttacctgcactca

SEQ ID NO: 825858 - DNA, 15 bp, Homo sapiens
cttacctgcactcaa

SEQ ID NO: 825859 - DNA, 15 bp, Homo sapiens
ttacctgcactcaac

SEQ ID NO: 825860 - DNA, 15 bp, Homo sapiens
tacctgcactcaacc

SEQ ID NO: 825861 - DNA, 15 bp, Homo sapiens
acctgcactcaacca

SEQ ID NO: 825862 - DNA, 15 bp, Homo sapiens
cctgcactcaaccag

SEQ ID NO: 825863 - DNA, 15 bp, Homo sapiens
ctgcactcaaccagt

SEQ ID NO: 825864 - DNA, 15 bp, Homo sapiens
tgcactcaaccagtt

SEQ ID NO: 825865 - DNA, 15 bp, Homo sapiens
gcactcaaccagtta

SEQ ID NO: 825866 - DNA, 15 bp, Homo sapiens
cactcaaccagttat

SEQ ID NO: 825867 - DNA, 15 bp, Homo sapiens
actcaaccagttatt

SEQ ID NO: 825868 - DNA, 15 bp, Homo sapiens
ctcaaccagttatta

SEQ ID NO: 825869 - DNA, 15 bp, Homo sapiens
tcaaccagttattat

SEQ ID NO: 825870 - DNA, 15 bp, Homo sapiens
caaccagttattatc

SEQ ID NO: 825871 - DNA, 15 bp, Homo sapiens
aaccagttattatcc

SEQ ID NO: 825872 - DNA, 15 bp, Homo sapiens
accagttattatcct

SEQ ID NO: 825873 - DNA, 15 bp, Homo sapiens
ccagttattatcctg

SEQ ID NO: 825874 - DNA, 15 bp, Homo sapiens
cagttattatcctgt

SEQ ID NO: 825875 - DNA, 15 bp, Homo sapiens
agttattatcctgtt

SEQ ID NO: 825876 - DNA, 15 bp, Homo sapiens
gttattatcctgtta

SEQ ID NO: 825877 - DNA, 15 bp, Homo sapiens
ttattatcctgttac

SEQ ID NO: 825878 - DNA, 15 bp, Homo sapiens
tattatcctgttact

SEQ ID NO: 825879 - DNA, 15 bp, Homo sapiens
attatcctgttactt

SEQ ID NO: 825880 - DNA, 15 bp, Homo sapiens
ttatcctgttacttg

SEQ ID NO: 825881 - DNA, 15 bp, Homo sapiens
tatcctgttacttgc

SEQ ID NO: 825882 - DNA, 15 bp, Homo sapiens
atcctgttacttgcc

SEQ ID NO: 825883 - DNA, 15 bp, Homo sapiens
tcctgttacttgcct

SEQ ID NO: 825884 - DNA, 15 bp, Homo sapiens
cctgttacttgcctc

SEQ ID NO: 825885 - DNA, 15 bp, Homo sapiens
ctgttacttgcctct

SEQ ID NO: 825886 - DNA, 15 bp, Homo sapiens
tgttacttgcctctt

SEQ ID NO: 825887 - DNA, 15 bp, Homo sapiens
gttacttgcctcttc

SEQ ID NO: 825888 - DNA, 15 bp, Homo sapiens
ttacttgcctcttcc

SEQ ID NO: 825889 - DNA, 15 bp, Homo sapiens
tacttgcctcttcca

SEQ ID NO: 825890 - DNA, 15 bp, Homo sapiens
acttgcctcttccaa

SEQ ID NO: 825891 - DNA, 15 bp, Homo sapiens
cttgcctcttccaaa

SEQ ID NO: 825892 - DNA, 15 bp, Homo sapiens
ttgcctcttccaaaa

SEQ ID NO: 825893 - DNA, 15 bp, Homo sapiens
tgcctcttccaaaac

SEQ ID NO: 825894 - DNA, 15 bp, Homo sapiens
gcctcttccaaaacc

SEQ ID NO: 825895 - DNA, 15 bp, Homo sapiens
cctcttccaaaacca

SEQ ID NO: 825896 - DNA, 15 bp, Homo sapiens
ctcttccaaaaccac

SEQ ID NO: 825897 - DNA, 15 bp, Homo sapiens
tcttccaaaaccact

SEQ ID NO: 825898 - DNA, 15 bp, Homo sapiens
cttccaaaaccacta

SEQ ID NO: 825899 - DNA, 15 bp, Homo sapiens
ttccaaaaccactat

SEQ ID NO: 825900 - DNA, 15 bp, Homo sapiens
tccaaaaccactata

SEQ ID NO: 825901 - DNA, 15 bp, Homo sapiens
ccaaaaccactatag

SEQ ID NO: 825902 - DNA, 15 bp, Homo sapiens
caaaaccactatagt

SEQ ID NO: 825903 - DNA, 15 bp, Homo sapiens
aaaaccactatagtc

SEQ ID NO: 825904 - DNA, 15 bp, Homo sapiens
aaaccactatagtct

SEQ ID NO: 825905 - DNA, 15 bp, Homo sapiens
aaccactatagtctg

SEQ ID NO: 825906 - DNA, 15 bp, Homo sapiens
accactatagtctga

SEQ ID NO: 825907 - DNA, 15 bp, Homo sapiens
ccactatagtctgag

SEQ ID NO: 825908 - DNA, 15 bp, Homo sapiens
cactatagtctgagc

SEQ ID NO: 825909 - DNA, 15 bp, Homo sapiens
actatagtctgagcc

SEQ ID NO: 825910 - DNA, 15 bp, Homo sapiens
ctatagtctgagcca

SEQ ID NO: 825911 - DNA, 15 bp, Homo sapiens
tatagtctgagccac

SEQ ID NO: 825912 - DNA, 15 bp, Homo sapiens
atagtctgagccact

SEQ ID NO: 825913 - DNA, 15 bp, Homo sapiens
tagtctgagccactc

SEQ ID NO: 825914 - DNA, 15 bp, Homo sapiens
agtctgagccactct

SEQ ID NO: 825915 - DNA, 15 bp, Homo sapiens
gtctgagccactctt

SEQ ID NO: 825916 - DNA, 15 bp, Homo sapiens
tctgagccactcttt

SEQ ID NO: 825917 - DNA, 15 bp, Homo sapiens
ctgagccactctttt

SEQ ID NO: 825918 - DNA, 15 bp, Homo sapiens
tgagccactcttttg

SEQ ID NO: 825919 - DNA, 15 bp, Homo sapiens
gagccactcttttga

SEQ ID NO: 825920 - DNA, 15 bp, Homo sapiens
agccactcttttgat

SEQ ID NO: 825921 - DNA, 15 bp, Homo sapiens
gccactcttttgatc

SEQ ID NO: 825922 - DNA, 15 bp, Homo sapiens
ccactcttttgatca

SEQ ID NO: 825923 - DNA, 15 bp, Homo sapiens
cactcttttgatcat

SEQ ID NO: 825924 - DNA, 15 bp, Homo sapiens
actcttttgatcatg

SEQ ID NO: 825925 - DNA, 15 bp, Homo sapiens
ctcttttgatcatgg

SEQ ID NO: 825926 - DNA, 15 bp, Homo sapiens
tcttttgatcatggg

SEQ ID NO: 825927 - DNA, 15 bp, Homo sapiens
cttttgatcatgggt

SEQ ID NO: 825928 - DNA, 15 bp, Homo sapiens
ttttgatcatgggtg

SEQ ID NO: 825929 - DNA, 15 bp, Homo sapiens
tttgatcatgggtga

SEQ ID NO: 825930 - DNA, 15 bp, Homo sapiens
ttgatcatgggtgat

SEQ ID NO: 825931 - DNA, 15 bp, Homo sapiens
tgatcatgggtgatc

SEQ ID NO: 825932 - DNA, 15 bp, Homo sapiens
gatcatgggtgatct

SEQ ID NO: 825933 - DNA, 15 bp, Homo sapiens
atcatgggtgatctt

SEQ ID NO: 825934 - DNA, 15 bp, Homo sapiens
tcatgggtgatcttc

SEQ ID NO: 825935 - DNA, 15 bp, Homo sapiens
catgggtgatcttct

SEQ ID NO: 825936 - DNA, 15 bp, Homo sapiens
atgggtgatcttctg

SEQ ID NO: 825937 - DNA, 15 bp, Homo sapiens
tgggtgatcttctga

SEQ ID NO: 825938 - DNA, 15 bp, Homo sapiens
gggtgatcttctgat

SEQ ID NO: 825939 - DNA, 15 bp, Homo sapiens
ggtgatcttctgatg

SEQ ID NO: 825940 - DNA, 15 bp, Homo sapiens
gtgatcttctgatgt

SEQ ID NO: 825941 - DNA, 15 bp, Homo sapiens
tgatcttctgatgtg

SEQ ID NO: 825942 - DNA, 15 bp, Homo sapiens
gatcttctgatgtgg

SEQ ID NO: 825943 - DNA, 15 bp, Homo sapiens
atcttctgatgtggt

SEQ ID NO: 825944 - DNA, 15 bp, Homo sapiens
tcttctgatgtggtt

SEQ ID NO: 825945 - DNA, 15 bp, Homo sapiens
cttctgatgtggttg

SEQ ID NO: 825946 - DNA, 15 bp, Homo sapiens
ttctgatgtggttgt

SEQ ID NO: 825947 - DNA, 15 bp, Homo sapiens
tctgatgtggttgtg

SEQ ID NO: 825948 - DNA, 15 bp, Homo sapiens
ctgatgtggttgtgt

SEQ ID NO: 825949 - DNA, 15 bp, Homo sapiens
tgatgtggttgtgtt

SEQ ID NO: 825950 - DNA, 15 bp, Homo sapiens
gatgtggttgtgttt

SEQ ID NO: 825951 - DNA, 15 bp, Homo sapiens
atgtggttgtgtttt

SEQ ID NO: 825952 - DNA, 15 bp, Homo sapiens
tgtggttgtgttttt

SEQ ID NO: 825953 - DNA, 15 bp, Homo sapiens
gtggttgtgttttta

SEQ ID NO: 825954 - DNA, 15 bp, Homo sapiens
tggttgtgtttttat

SEQ ID NO: 825955 - DNA, 15 bp, Homo sapiens
ggttgtgtttttata

SEQ ID NO: 825956 - DNA, 15 bp, Homo sapiens
gttgtgtttttataa

SEQ ID NO: 825957 - DNA, 15 bp, Homo sapiens
ttgtgtttttataag

SEQ ID NO: 825958 - DNA, 15 bp, Homo sapiens
tgtgtttttataagt

SEQ ID NO: 825959 - DNA, 15 bp, Homo sapiens
gtgtttttataagta

SEQ ID NO: 825960 - DNA, 15 bp, Homo sapiens
tgtttttataagtaa

SEQ ID NO: 825961 - DNA, 15 bp, Homo sapiens
gtttttataagtaac

SEQ ID NO: 825962 - DNA, 15 bp, Homo sapiens
tttttataagtaaca

SEQ ID NO: 825963 - DNA, 15 bp, Homo sapiens
ttttataagtaacat

SEQ ID NO: 825964 - DNA, 15 bp, Homo sapiens
tttataagtaacatg

SEQ ID NO: 825965 - DNA, 15 bp, Homo sapiens
ttataagtaacatgt

SEQ ID NO: 825966 - DNA, 15 bp, Homo sapiens
tataagtaacatgta

SEQ ID NO: 825967 - DNA, 15 bp, Homo sapiens
ataagtaacatgtac

SEQ ID NO: 825968 - DNA, 15 bp, Homo sapiens
taagtaacatgtacc

SEQ ID NO: 825969 - DNA, 15 bp, Homo sapiens
aagtaacatgtacct

SEQ ID NO: 825970 - DNA, 15 bp, Homo sapiens
agtaacatgtacctg

SEQ ID NO: 825971 - DNA, 15 bp, Homo sapiens
gtaacatgtacctgt

SEQ ID NO: 825972 - DNA, 15 bp, Homo sapiens
taacatgtacctgtc

SEQ ID NO: 825973 - DNA, 15 bp, Homo sapiens
aacatgtacctgtcc

SEQ ID NO: 825974 - DNA, 15 bp, Homo sapiens
acatgtacctgtcct

SEQ ID NO: 825975 - DNA, 15 bp, Homo sapiens
catgtacctgtcctg

SEQ ID NO: 825976 - DNA, 15 bp, Homo sapiens
atgtacctgtcctga

SEQ ID NO: 825977 - DNA, 15 bp, Homo sapiens
tgtacctgtcctgac

SEQ ID NO: 825978 - DNA, 15 bp, Homo sapiens
gtacctgtcctgact

SEQ ID NO: 825979 - DNA, 15 bp, Homo sapiens
tacctgtcctgactc

SEQ ID NO: 825980 - DNA, 15 bp, Homo sapiens
acctgtcctgactca

SEQ ID NO: 825981 - DNA, 15 bp, Homo sapiens
cctgtcctgactcat

SEQ ID NO: 825982 - DNA, 15 bp, Homo sapiens
ctgtcctgactcatc

SEQ ID NO: 825983 - DNA, 15 bp, Homo sapiens
tgtcctgactcatca

SEQ ID NO: 825984 - DNA, 15 bp, Homo sapiens
gtcctgactcatcaa

SEQ ID NO: 825985 - DNA, 15 bp, Homo sapiens
tcctgactcatcaac

SEQ ID NO: 825986 - DNA, 15 bp, Homo sapiens
cctgactcatcaact

SEQ ID NO: 825987 - DNA, 15 bp, Homo sapiens
ctgactcatcaacta

SEQ ID NO: 825988 - DNA, 15 bp, Homo sapiens
tgactcatcaactag

SEQ ID NO: 825989 - DNA, 15 bp, Homo sapiens
gactcatcaactaga

SEQ ID NO: 825990 - DNA, 15 bp, Homo sapiens
actcatcaactagat

SEQ ID NO: 825991 - DNA, 15 bp, Homo sapiens
ctcatcaactagatc

SEQ ID NO: 825992 - DNA, 15 bp, Homo sapiens
tcatcaactagatca

SEQ ID NO: 825993 - DNA, 15 bp, Homo sapiens
catcaactagatcag

SEQ ID NO: 825994 - DNA, 15 bp, Homo sapiens
atcaactagatcagg

SEQ ID NO: 825995 - DNA, 15 bp, Homo sapiens
tcaactagatcagga

SEQ ID NO: 825996 - DNA, 15 bp, Homo sapiens
caactagatcaggag

SEQ ID NO: 825997 - DNA, 15 bp, Homo sapiens
aactagatcaggagt

SEQ ID NO: 825998 - DNA, 15 bp, Homo sapiens
actagatcaggagtt

SEQ ID NO: 825999 - DNA, 15 bp, Homo sapiens
ctagatcaggagtta

SEQ ID NO: 826000 - DNA, 15 bp, Homo sapiens
tagatcaggagttag

SEQ ID NO: 826001 - DNA, 15 bp, Homo sapiens
agatcaggagttagc

SEQ ID NO: 826002 - DNA, 15 bp, Homo sapiens
gatcaggagttagcc

SEQ ID NO: 826003 - DNA, 15 bp, Homo sapiens
caggagttagccact

SEQ ID NO: 826004 - DNA, 15 bp, Homo sapiens
aggagttagccactc

SEQ ID NO: 826005 - DNA, 15 bp, Homo sapiens
ggagttagccactct

SEQ ID NO: 826006 - DNA, 15 bp, Homo sapiens
gagttagccactctg

SEQ ID NO: 826007 - DNA, 15 bp, Homo sapiens
agttagccactctgg

SEQ ID NO: 826008 - DNA, 15 bp, Homo sapiens
gttagccactctggc

SEQ ID NO: 826009 - DNA, 15 bp, Homo sapiens
ttagccactctggcc

SEQ ID NO: 826010 - DNA, 15 bp, Homo sapiens
tagccactctggcct

SEQ ID NO: 826011 - DNA, 15 bp, Homo sapiens
agccactctggccta

SEQ ID NO: 826012 - DNA, 15 bp, Homo sapiens
gccactctggcctac

SEQ ID NO: 826013 - DNA, 15 bp, Homo sapiens
ccactctggcctact

SEQ ID NO: 826014 - DNA, 15 bp, Homo sapiens
cactctggcctactg

SEQ ID NO: 826015 - DNA, 15 bp, Homo sapiens
actctggcctactgc

SEQ ID NO: 826016 - DNA, 15 bp, Homo sapiens
ctctggcctactgcc

SEQ ID NO: 826017 - DNA, 15 bp, Homo sapiens
tctggcctactgcct

SEQ ID NO: 826018 - DNA, 15 bp, Homo sapiens
ctggcctactgcctg

SEQ ID NO: 826019 - DNA, 15 bp, Homo sapiens
tggcctactgcctgt

SEQ ID NO: 826020 - DNA, 15 bp, Homo sapiens
ggcctactgcctgtt

SEQ ID NO: 826021 - DNA, 15 bp, Homo sapiens
gcctactgcctgttt

SEQ ID NO: 826022 - DNA, 15 bp, Homo sapiens
cctactgcctgtttt

SEQ ID NO: 826023 - DNA, 15 bp, Homo sapiens
ctactgcctgttttt

SEQ ID NO: 826024 - DNA, 15 bp, Homo sapiens
tactgcctgtttttg

SEQ ID NO: 826025 - DNA, 15 bp, Homo sapiens
actgcctgtttttgt

SEQ ID NO: 826026 - DNA, 15 bp, Homo sapiens
ctgcctgtttttgta

SEQ ID NO: 826027 - DNA, 15 bp, Homo sapiens
tgcctgtttttgtaa

SEQ ID NO: 826028 - DNA, 15 bp, Homo sapiens
gcctgtttttgtaaa

SEQ ID NO: 826029 - DNA, 15 bp, Homo sapiens
cctgtttttgtaaat

SEQ ID NO: 826030 - DNA, 15 bp, Homo sapiens
ctgtttttgtaaata

SEQ ID NO: 826031 - DNA, 15 bp, Homo sapiens
tgtttttgtaaataa

SEQ ID NO: 826032 - DNA, 15 bp, Homo sapiens
gtttttgtaaataaa

SEQ ID NO: 826033 - DNA, 15 bp, Homo sapiens
tttttgtaaataaag

SEQ ID NO: 826034 - DNA, 15 bp, Homo sapiens
gtaaataaagttttc

SEQ ID NO: 826035 - DNA, 15 bp, Homo sapiens
taaataaagttttct

SEQ ID NO: 826036 - DNA, 15 bp, Homo sapiens
aaataaagttttctt

SEQ ID NO: 826037 - DNA, 15 bp, Homo sapiens
aataaagttttcttg

SEQ ID NO: 826038 - DNA, 15 bp, Homo sapiens
ataaagttttcttgg

SEQ ID NO: 826039 - DNA, 15 bp, Homo sapiens
taaagttttcttgga

SEQ ID NO: 826040 - DNA, 15 bp, Homo sapiens
aaagttttcttggaa

SEQ ID NO: 826041 - DNA, 15 bp, Homo sapiens
aagttttcttggaac

SEQ ID NO: 826042 - DNA, 15 bp, Homo sapiens
agttttcttggaaca

SEQ ID NO: 826043 - DNA, 15 bp, Homo sapiens
gttttcttggaacat

SEQ ID NO: 826044 - DNA, 15 bp, Homo sapiens
ttttcttggaacata

SEQ ID NO: 826045 - DNA, 15 bp, Homo sapiens
tttcttggaacatag

SEQ ID NO: 826046 - DNA, 15 bp, Homo sapiens
ttcttggaacatagc

SEQ ID NO: 826047 - DNA, 15 bp, Homo sapiens
tcttggaacatagcc

SEQ ID NO: 826048 - DNA, 15 bp, Homo sapiens
cttggaacatagcca

SEQ ID NO: 826049 - DNA, 15 bp, Homo sapiens
ttggaacatagccat

SEQ ID NO: 826050 - DNA, 15 bp, Homo sapiens
tggaacatagccatg

SEQ ID NO: 826051 - DNA, 15 bp, Homo sapiens
ggaacatagccatgt

SEQ ID NO: 826052 - DNA, 15 bp, Homo sapiens
gaacatagccatgtt

SEQ ID NO: 826053 - DNA, 15 bp, Homo sapiens
aacatagccatgttc

SEQ ID NO: 826054 - DNA, 15 bp, Homo sapiens
acatagccatgttca

SEQ ID NO: 826055 - DNA, 15 bp, Homo sapiens
catagccatgttcat

SEQ ID NO: 826056 - DNA, 15 bp, Homo sapiens
atagccatgttcatt

SEQ ID NO: 826057 - DNA, 15 bp, Homo sapiens
tagccatgttcattc

SEQ ID NO: 826058 - DNA, 15 bp, Homo sapiens
agccatgttcattcg

SEQ ID NO: 826059 - DNA, 15 bp, Homo sapiens
gccatgttcattcgt

SEQ ID NO: 826060 - DNA, 15 bp, Homo sapiens
ccatgttcattcgtt

SEQ ID NO: 826061 - DNA, 15 bp, Homo sapiens
catgttcattcgttc

SEQ ID NO: 826062 - DNA, 15 bp, Homo sapiens
atgttcattcgttca

SEQ ID NO: 826063 - DNA, 15 bp, Homo sapiens
tgttcattcgttcac

SEQ ID NO: 826064 - DNA, 15 bp, Homo sapiens
gttcattcgttcaca

SEQ ID NO: 826065 - DNA, 15 bp, Homo sapiens
ttcattcgttcacat

SEQ ID NO: 826066 - DNA, 15 bp, Homo sapiens
tcattcgttcacata

SEQ ID NO: 826067 - DNA, 15 bp, Homo sapiens
cattcgttcacatat

SEQ ID NO: 826068 - DNA, 15 bp, Homo sapiens
attcgttcacatatt

SEQ ID NO: 826069 - DNA, 15 bp, Homo sapiens
ttcgttcacatattg

SEQ ID NO: 826070 - DNA, 15 bp, Homo sapiens
tcgttcacatattgt

SEQ ID NO: 826071 - DNA, 15 bp, Homo sapiens
cgttcacatattgtt

SEQ ID NO: 826072 - DNA, 15 bp, Homo sapiens
gttcacatattgttt

SEQ ID NO: 826073 - DNA, 15 bp, Homo sapiens
ttcacatattgttta

SEQ ID NO: 826074 - DNA, 15 bp, Homo sapiens
tcacatattgtttat

SEQ ID NO: 826075 - DNA, 15 bp, Homo sapiens
cacatattgtttatg

SEQ ID NO: 826076 - DNA, 15 bp, Homo sapiens
acatattgtttatgg

SEQ ID NO: 826077 - DNA, 15 bp, Homo sapiens
catattgtttatggc

SEQ ID NO: 826078 - DNA, 15 bp, Homo sapiens
atattgtttatggca

SEQ ID NO: 826079 - DNA, 15 bp, Homo sapiens
tattgtttatggcaa

SEQ ID NO: 826080 - DNA, 15 bp, Homo sapiens
attgtttatggcaat

SEQ ID NO: 826081 - DNA, 15 bp, Homo sapiens
ttgtttatggcaatg

SEQ ID NO: 826082 - DNA, 15 bp, Homo sapiens
tgtttatggcaatga

SEQ ID NO: 826083 - DNA, 15 bp, Homo sapiens
gtttatggcaatgac

SEQ ID NO: 826084 - DNA, 15 bp, Homo sapiens
tttatggcaatgaca

SEQ ID NO: 826085 - DNA, 15 bp, Homo sapiens
ttatggcaatgacat

SEQ ID NO: 826086 - DNA, 15 bp, Homo sapiens
tatggcaatgacatg

SEQ ID NO: 826087 - DNA, 15 bp, Homo sapiens
atggcaatgacatga

SEQ ID NO: 826088 - DNA, 15 bp, Homo sapiens
tggcaatgacatgaa

SEQ ID NO: 826089 - DNA, 15 bp, Homo sapiens
ggcaatgacatgaag

SEQ ID NO: 826090 - DNA, 15 bp, Homo sapiens
gcaatgacatgaaga

SEQ ID NO: 826091 - DNA, 15 bp, Homo sapiens
caatgacatgaagaa

SEQ ID NO: 826092 - DNA, 15 bp, Homo sapiens
aatgacatgaagaag

SEQ ID NO: 826093 - DNA, 15 bp, Homo sapiens
atgacatgaagaaga

SEQ ID NO: 826094 - DNA, 15 bp, Homo sapiens
tgacatgaagaagat

SEQ ID NO: 826095 - DNA, 15 bp, Homo sapiens
gacatgaagaagata

SEQ ID NO: 826096 - DNA, 15 bp, Homo sapiens
acatgaagaagatag

SEQ ID NO: 826097 - DNA, 15 bp, Homo sapiens
catgaagaagatagg

SEQ ID NO: 826098 - DNA, 15 bp, Homo sapiens
atgaagaagatagga

SEQ ID NO: 826099 - DNA, 15 bp, Homo sapiens
tgaagaagataggac

SEQ ID NO: 826100 - DNA, 15 bp, Homo sapiens
gaagaagataggacc

SEQ ID NO: 826101 - DNA, 15 bp, Homo sapiens
aagaagataggaccc

SEQ ID NO: 826102 - DNA, 15 bp, Homo sapiens
agaagataggaccca

SEQ ID NO: 826103 - DNA, 15 bp, Homo sapiens
gaagataggacccaa

SEQ ID NO: 826104 - DNA, 15 bp, Homo sapiens
aagataggacccaaa

SEQ ID NO: 826105 - DNA, 15 bp, Homo sapiens
agataggacccaaaa

SEQ ID NO: 826106 - DNA, 15 bp, Homo sapiens
gataggacccaaaaa

SEQ ID NO: 826107 - DNA, 15 bp, Homo sapiens
ataggacccaaaaaa

SEQ ID NO: 826108 - DNA, 15 bp, Homo sapiens
taggacccaaaaaag

SEQ ID NO: 826109 - DNA, 15 bp, Homo sapiens
aggacccaaaaaagc

SEQ ID NO: 826110 - DNA, 15 bp, Homo sapiens
ggacccaaaaaagcc

SEQ ID NO: 826111 - DNA, 15 bp, Homo sapiens
gacccaaaaaagcct

SEQ ID NO: 826112 - DNA, 15 bp, Homo sapiens
acccaaaaaagcctt

SEQ ID NO: 826113 - DNA, 15 bp, Homo sapiens
cccaaaaaagcctta

SEQ ID NO: 826114 - DNA, 15 bp, Homo sapiens
ccaaaaaagccttaa

SEQ ID NO: 826115 - DNA, 15 bp, Homo sapiens
caaaaaagccttaaa

SEQ ID NO: 826116 - DNA, 15 bp, Homo sapiens
aaaaaagccttaaaa

SEQ ID NO: 826117 - DNA, 15 bp, Homo sapiens
aaaaagccttaaaaa

SEQ ID NO: 826118 - DNA, 15 bp, Homo sapiens
aaaagccttaaaaaa

SEQ ID NO: 826119 - DNA, 15 bp, Homo sapiens
aaagccttaaaaaat

SEQ ID NO: 826120 - DNA, 15 bp, Homo sapiens
aagccttaaaaaatt

SEQ ID NO: 826121 - DNA, 15 bp, Homo sapiens
agccttaaaaaatta

SEQ ID NO: 826122 - DNA, 15 bp, Homo sapiens
gccttaaaaaattat

SEQ ID NO: 826123 - DNA, 15 bp, Homo sapiens
ccttaaaaaattatt

SEQ ID NO: 826124 - DNA, 15 bp, Homo sapiens
cttaaaaaattatta

SEQ ID NO: 826125 - DNA, 15 bp, Homo sapiens
ttaaaaaattattat

SEQ ID NO: 826126 - DNA, 15 bp, Homo sapiens
taaaaaattattatc

SEQ ID NO: 826127 - DNA, 15 bp, Homo sapiens
aaaaaattattatct

SEQ ID NO: 826128 - DNA, 15 bp, Homo sapiens
aaaaattattatctt

SEQ ID NO: 826129 - DNA, 15 bp, Homo sapiens
aaaattattatcttt

SEQ ID NO: 826130 - DNA, 15 bp, Homo sapiens
aaattattatctttc

SEQ ID NO: 826131 - DNA, 15 bp, Homo sapiens
aattattatctttct

SEQ ID NO: 826132 - DNA, 15 bp, Homo sapiens
attattatctttctt

SEQ ID NO: 826133 - DNA, 15 bp, Homo sapiens
ttattatctttcttt

SEQ ID NO: 826134 - DNA, 15 bp, Homo sapiens
tattatctttctttt

SEQ ID NO: 826135 - DNA, 15 bp, Homo sapiens
attatctttcttttt

SEQ ID NO: 826136 - DNA, 15 bp, Homo sapiens
ttatctttcttttta

SEQ ID NO: 826137 - DNA, 15 bp, Homo sapiens
tatctttctttttag

SEQ ID NO: 826138 - DNA, 15 bp, Homo sapiens
atctttctttttaga

SEQ ID NO: 826139 - DNA, 15 bp, Homo sapiens
tctttctttttagag

SEQ ID NO: 826140 - DNA, 15 bp, Homo sapiens
ctttctttttagaga

SEQ ID NO: 826141 - DNA, 15 bp, Homo sapiens
tttctttttagagaa

SEQ ID NO: 826142 - DNA, 15 bp, Homo sapiens
ttctttttagagaaa

SEQ ID NO: 826143 - DNA, 15 bp, Homo sapiens
tctttttagagaaag

SEQ ID NO: 826144 - DNA, 15 bp, Homo sapiens
ctttttagagaaagt

SEQ ID NO: 826145 - DNA, 15 bp, Homo sapiens
tttttagagaaagtt

SEQ ID NO: 826146 - DNA, 15 bp, Homo sapiens
ttttagagaaagttt

SEQ ID NO: 826147 - DNA, 15 bp, Homo sapiens
tttagagaaagtttg

SEQ ID NO: 826148 - DNA, 15 bp, Homo sapiens
ttagagaaagtttgc

SEQ ID NO: 826149 - DNA, 15 bp, Homo sapiens
tagagaaagtttgct

SEQ ID NO: 826150 - DNA, 15 bp, Homo sapiens
agagaaagtttgctg

SEQ ID NO: 826151 - DNA, 15 bp, Homo sapiens
gagaaagtttgctga

SEQ ID NO: 826152 - DNA, 15 bp, Homo sapiens
agaaagtttgctgat

SEQ ID NO: 826153 - DNA, 15 bp, Homo sapiens
gaaagtttgctgatc

SEQ ID NO: 826154 - DNA, 15 bp, Homo sapiens
aaagtttgctgatcc

SEQ ID NO: 826155 - DNA, 15 bp, Homo sapiens
aagtttgctgatccc

SEQ ID NO: 826156 - DNA, 15 bp, Homo sapiens
agtttgctgatccct

SEQ ID NO: 826157 - DNA, 15 bp, Homo sapiens
gtttgctgatccctg

SEQ ID NO: 826158 - DNA, 15 bp, Homo sapiens
tttgctgatccctgg

SEQ ID NO: 826159 - DNA, 15 bp, Homo sapiens
ttgctgatccctggt

SEQ ID NO: 826160 - DNA, 15 bp, Homo sapiens
tgctgatccctggtc

SEQ ID NO: 826161 - DNA, 15 bp, Homo sapiens
gctgatccctggtct

SEQ ID NO: 826162 - DNA, 15 bp, Homo sapiens
ctgatccctggtcta

SEQ ID NO: 826163 - DNA, 15 bp, Homo sapiens
tgatccctggtctag

SEQ ID NO: 826164 - DNA, 15 bp, Homo sapiens
gatccctggtctaga

SEQ ID NO: 826165 - DNA, 15 bp, Homo sapiens
atccctggtctagat

SEQ ID NO: 826166 - DNA, 15 bp, Homo sapiens
tccctggtctagatt

SEQ ID NO: 826167 - DNA, 15 bp, Homo sapiens
ccctggtctagattt

SEQ ID NO: 826168 - DNA, 15 bp, Homo sapiens
cctggtctagatttg

SEQ ID NO: 826169 - DNA, 15 bp, Homo sapiens
ctggtctagatttgc

SEQ ID NO: 826170 - DNA, 15 bp, Homo sapiens
tggtctagatttgca

SEQ ID NO: 826171 - DNA, 15 bp, Homo sapiens
ggtctagatttgcag

SEQ ID NO: 826172 - DNA, 15 bp, Homo sapiens
gtctagatttgcagc

SEQ ID NO: 826173 - DNA, 15 bp, Homo sapiens
tctagatttgcagct

SEQ ID NO: 826174 - DNA, 15 bp, Homo sapiens
ctagatttgcagcta

SEQ ID NO: 826175 - DNA, 15 bp, Homo sapiens
tagatttgcagctat

SEQ ID NO: 826176 - DNA, 15 bp, Homo sapiens
agatttgcagctatg

SEQ ID NO: 826177 - DNA, 15 bp, Homo sapiens
gatttgcagctatgt

SEQ ID NO: 826178 - DNA, 15 bp, Homo sapiens
atttgcagctatgtt

SEQ ID NO: 826179 - DNA, 15 bp, Homo sapiens
tttgcagctatgtta

SEQ ID NO: 826180 - DNA, 15 bp, Homo sapiens
ttgcagctatgttat

SEQ ID NO: 826181 - DNA, 15 bp, Homo sapiens
tgcagctatgttata

SEQ ID NO: 826182 - DNA, 15 bp, Homo sapiens
gcagctatgttatat

SEQ ID NO: 826183 - DNA, 15 bp, Homo sapiens
cagctatgttatata

SEQ ID NO: 826184 - DNA, 15 bp, Homo sapiens
agctatgttatatat

SEQ ID NO: 826185 - DNA, 15 bp, Homo sapiens
gctatgttatatatt

SEQ ID NO: 826186 - DNA, 15 bp, Homo sapiens
ctatgttatatattc

SEQ ID NO: 826187 - DNA, 15 bp, Homo sapiens
tatgttatatattct

SEQ ID NO: 826188 - DNA, 15 bp, Homo sapiens
atgttatatattctt

SEQ ID NO: 826189 - DNA, 15 bp, Homo sapiens
tgttatatattcttt

SEQ ID NO: 826190 - DNA, 15 bp, Homo sapiens
gttatatattctttt

SEQ ID NO: 826191 - DNA, 15 bp, Homo sapiens
ttatatattctttta

SEQ ID NO: 826192 - DNA, 15 bp, Homo sapiens
tatatattcttttat

SEQ ID NO: 826193 - DNA, 15 bp, Homo sapiens
atatattcttttata

SEQ ID NO: 826194 - DNA, 15 bp, Homo sapiens
tatattcttttatat

SEQ ID NO: 826195 - DNA, 15 bp, Homo sapiens
atattcttttatatt

SEQ ID NO: 826196 - DNA, 15 bp, Homo sapiens
tattcttttatattc

SEQ ID NO: 826197 - DNA, 15 bp, Homo sapiens
attcttttatattcc

SEQ ID NO: 826198 - DNA, 15 bp, Homo sapiens
ttcttttatattcct

SEQ ID NO: 826199 - DNA, 15 bp, Homo sapiens
tcttttatattcctc

SEQ ID NO: 826200 - DNA, 15 bp, Homo sapiens
cttttatattcctct

SEQ ID NO: 826201 - DNA, 15 bp, Homo sapiens
ttttatattcctcta

SEQ ID NO: 826202 - DNA, 15 bp, Homo sapiens
tttatattcctctaa

SEQ ID NO: 826203 - DNA, 15 bp, Homo sapiens
ttatattcctctaaa

SEQ ID NO: 826204 - DNA, 15 bp, Homo sapiens
tatattcctctaaat

SEQ ID NO: 826205 - DNA, 15 bp, Homo sapiens
atattcctctaaatg

SEQ ID NO: 826206 - DNA, 15 bp, Homo sapiens
tattcctctaaatgt

SEQ ID NO: 826207 - DNA, 15 bp, Homo sapiens
attcctctaaatgtc

SEQ ID NO: 826208 - DNA, 15 bp, Homo sapiens
ttcctctaaatgtct

SEQ ID NO: 826209 - DNA, 15 bp, Homo sapiens
tcctctaaatgtctg

SEQ ID NO: 826210 - DNA, 15 bp, Homo sapiens
cctctaaatgtctgg

SEQ ID NO: 826211 - DNA, 15 bp, Homo sapiens
ctctaaatgtctggc

SEQ ID NO: 826212 - DNA, 15 bp, Homo sapiens
tctaaatgtctggca

SEQ ID NO: 826213 - DNA, 15 bp, Homo sapiens
ctaaatgtctggcac

SEQ ID NO: 826214 - DNA, 15 bp, Homo sapiens
taaatgtctggcact

SEQ ID NO: 826215 - DNA, 15 bp, Homo sapiens
aaatgtctggcacta

SEQ ID NO: 826216 - DNA, 15 bp, Homo sapiens
aatgtctggcactat

SEQ ID NO: 826217 - DNA, 15 bp, Homo sapiens
atgtctggcactatg

SEQ ID NO: 826218 - DNA, 15 bp, Homo sapiens
tgtctggcactatgt

SEQ ID NO: 826219 - DNA, 15 bp, Homo sapiens
gtctggcactatgtt

SEQ ID NO: 826220 - DNA, 15 bp, Homo sapiens
tctggcactatgttt

SEQ ID NO: 826221 - DNA, 15 bp, Homo sapiens
ctggcactatgtttt

SEQ ID NO: 826222 - DNA, 15 bp, Homo sapiens
tggcactatgttttg

SEQ ID NO: 826223 - DNA, 15 bp, Homo sapiens
ggcactatgttttgc

SEQ ID NO: 826224 - DNA, 15 bp, Homo sapiens
gcactatgttttgca

SEQ ID NO: 826225 - DNA, 15 bp, Homo sapiens
cactatgttttgcat

SEQ ID NO: 826226 - DNA, 15 bp, Homo sapiens
actatgttttgcata

SEQ ID NO: 826227 - DNA, 15 bp, Homo sapiens
ctatgttttgcatac

SEQ ID NO: 826228 - DNA, 15 bp, Homo sapiens
tatgttttgcataca

SEQ ID NO: 826229 - DNA, 15 bp, Homo sapiens
atgttttgcatacaa

SEQ ID NO: 826230 - DNA, 15 bp, Homo sapiens
tgttttgcatacaat

SEQ ID NO: 826231 - DNA, 15 bp, Homo sapiens
gttttgcatacaata

SEQ ID NO: 826232 - DNA, 15 bp, Homo sapiens
ttttgcatacaatag

SEQ ID NO: 826233 - DNA, 15 bp, Homo sapiens
tttgcatacaatagc

SEQ ID NO: 826234 - DNA, 15 bp, Homo sapiens
ttgcatacaatagct

SEQ ID NO: 826235 - DNA, 15 bp, Homo sapiens
tgcatacaatagcta

SEQ ID NO: 826236 - DNA, 15 bp, Homo sapiens
gcatacaatagctac

SEQ ID NO: 826237 - DNA, 15 bp, Homo sapiens
catacaatagctact

SEQ ID NO: 826238 - DNA, 15 bp, Homo sapiens
atacaatagctacta

SEQ ID NO: 826239 - DNA, 15 bp, Homo sapiens
tacaatagctactaa

SEQ ID NO: 826240 - DNA, 15 bp, Homo sapiens
acaatagctactaat

SEQ ID NO: 826241 - DNA, 15 bp, Homo sapiens
caatagctactaatc

SEQ ID NO: 826242 - DNA, 15 bp, Homo sapiens
aatagctactaatca

SEQ ID NO: 826243 - DNA, 15 bp, Homo sapiens
atagctactaatcaa

SEQ ID NO: 826244 - DNA, 15 bp, Homo sapiens
tagctactaatcaat

SEQ ID NO: 826245 - DNA, 15 bp, Homo sapiens
agctactaatcaatt

SEQ ID NO: 826246 - DNA, 15 bp, Homo sapiens
gctactaatcaattt

SEQ ID NO: 826247 - DNA, 15 bp, Homo sapiens
ctactaatcaatttt

SEQ ID NO: 826248 - DNA, 15 bp, Homo sapiens
tactaatcaattttg

SEQ ID NO: 826249 - DNA, 15 bp, Homo sapiens
actaatcaattttga

SEQ ID NO: 826250 - DNA, 15 bp, Homo sapiens
ctaatcaattttgat

SEQ ID NO: 826251 - DNA, 15 bp, Homo sapiens
taatcaattttgatg

SEQ ID NO: 826252 - DNA, 15 bp, Homo sapiens
aatcaattttgatga

SEQ ID NO: 826253 - DNA, 15 bp, Homo sapiens
atcaattttgatgac

SEQ ID NO: 826254 - DNA, 15 bp, Homo sapiens
tcaattttgatgacc

SEQ ID NO: 826255 - DNA, 15 bp, Homo sapiens
caattttgatgacct

SEQ ID NO: 826256 - DNA, 15 bp, Homo sapiens
aattttgatgacctg

SEQ ID NO: 826257 - DNA, 15 bp, Homo sapiens
attttgatgacctga

SEQ ID NO: 826258 - DNA, 15 bp, Homo sapiens
ttttgatgacctgaa

SEQ ID NO: 826259 - DNA, 15 bp, Homo sapiens
tttgatgacctgaac

SEQ ID NO: 826260 - DNA, 15 bp, Homo sapiens
ttgatgacctgaaca

SEQ ID NO: 826261 - DNA, 15 bp, Homo sapiens
tgatgacctgaacat

SEQ ID NO: 826262 - DNA, 15 bp, Homo sapiens
gatgacctgaacatg

SEQ ID NO: 826263 - DNA, 15 bp, Homo sapiens
atgacctgaacatga

SEQ ID NO: 826264 - DNA, 15 bp, Homo sapiens
tgacctgaacatgaa

SEQ ID NO: 826265 - DNA, 15 bp, Homo sapiens
gacctgaacatgaat

SEQ ID NO: 826266 - DNA, 15 bp, Homo sapiens
acctgaacatgaatt

SEQ ID NO: 826267 - DNA, 15 bp, Homo sapiens
cctgaacatgaattt

SEQ ID NO: 826268 - DNA, 15 bp, Homo sapiens
ctgaacatgaatttt

SEQ ID NO: 826269 - DNA, 15 bp, Homo sapiens
tgaacatgaattttt

SEQ ID NO: 826270 - DNA, 15 bp, Homo sapiens
gaacatgaatttttc

SEQ ID NO: 826271 - DNA, 15 bp, Homo sapiens
aacatgaatttttct

SEQ ID NO: 826272 - DNA, 15 bp, Homo sapiens
acatgaatttttctc

SEQ ID NO: 826273 - DNA, 15 bp, Homo sapiens
catgaatttttctct

SEQ ID NO: 826274 - DNA, 15 bp, Homo sapiens
atgaatttttctctg

SEQ ID NO: 826275 - DNA, 15 bp, Homo sapiens
tgaatttttctctga

SEQ ID NO: 826276 - DNA, 15 bp, Homo sapiens
gaatttttctctgaa

SEQ ID NO: 826277 - DNA, 15 bp, Homo sapiens
aatttttctctgaaa

SEQ ID NO: 826278 - DNA, 15 bp, Homo sapiens
atttttctctgaaat

SEQ ID NO: 826279 - DNA, 15 bp, Homo sapiens
tttttctctgaaatc

SEQ ID NO: 826280 - DNA, 15 bp, Homo sapiens
ttttctctgaaatcc

SEQ ID NO: 826281 - DNA, 15 bp, Homo sapiens
tttctctgaaatcct

SEQ ID NO: 826282 - DNA, 15 bp, Homo sapiens
ttctctgaaatcctt

SEQ ID NO: 826283 - DNA, 15 bp, Homo sapiens
tctctgaaatcctta

SEQ ID NO: 826284 - DNA, 15 bp, Homo sapiens
ctctgaaatccttat

SEQ ID NO: 826285 - DNA, 15 bp, Homo sapiens
tctgaaatccttata

SEQ ID NO: 826286 - DNA, 15 bp, Homo sapiens
ctgaaatccttataa

SEQ ID NO: 826287 - DNA, 15 bp, Homo sapiens
tgaaatccttataaa

SEQ ID NO: 826288 - DNA, 15 bp, Homo sapiens
gaaatccttataaat

SEQ ID NO: 826289 - DNA, 15 bp, Homo sapiens
aaatccttataaatg

SEQ ID NO: 826290 - DNA, 15 bp, Homo sapiens
aatccttataaatgt

SEQ ID NO: 826291 - DNA, 15 bp, Homo sapiens
atccttataaatgta

SEQ ID NO: 826292 - DNA, 15 bp, Homo sapiens
tccttataaatgtaa

SEQ ID NO: 826293 - DNA, 15 bp, Homo sapiens
ccttataaatgtaat

SEQ ID NO: 826294 - DNA, 15 bp, Homo sapiens
cttataaatgtaata

SEQ ID NO: 826295 - DNA, 15 bp, Homo sapiens
ttataaatgtaatag

SEQ ID NO: 826296 - DNA, 15 bp, Homo sapiens
tataaatgtaatagg

SEQ ID NO: 826297 - DNA, 15 bp, Homo sapiens
ataaatgtaatagga

SEQ ID NO: 826298 - DNA, 15 bp, Homo sapiens
taaatgtaataggaa

SEQ ID NO: 826299 - DNA, 15 bp, Homo sapiens
aaatgtaataggaat

SEQ ID NO: 826300 - DNA, 15 bp, Homo sapiens
aatgtaataggaata

SEQ ID NO: 826301 - DNA, 15 bp, Homo sapiens
atgtaataggaataa

SEQ ID NO: 826302 - DNA, 15 bp, Homo sapiens
tgtaataggaataaa

SEQ ID NO: 826303 - DNA, 15 bp, Homo sapiens
gtaataggaataaaa

SEQ ID NO: 826304 - DNA, 15 bp, Homo sapiens
taataggaataaaat

SEQ ID NO: 826305 - DNA, 15 bp, Homo sapiens
aataggaataaaata

SEQ ID NO: 826306 - DNA, 15 bp, Homo sapiens
ataggaataaaataa

SEQ ID NO: 826307 - DNA, 15 bp, Homo sapiens
taggaataaaataag

SEQ ID NO: 826308 - DNA, 15 bp, Homo sapiens
aggaataaaataagt

SEQ ID NO: 826309 - DNA, 15 bp, Homo sapiens
ggaataaaataagtt

SEQ ID NO: 826310 - DNA, 15 bp, Homo sapiens
gaataaaataagtta

SEQ ID NO: 826311 - DNA, 15 bp, Homo sapiens
aataaaataagttat

SEQ ID NO: 826312 - DNA, 15 bp, Homo sapiens
ataaaataagttatt

SEQ ID NO: 826313 - DNA, 15 bp, Homo sapiens
taaaataagttattt

SEQ ID NO: 826314 - DNA, 15 bp, Homo sapiens
aaaataagttatttt

SEQ ID NO: 826315 - DNA, 15 bp, Homo sapiens
aaataagttattttt

SEQ ID NO: 826316 - DNA, 15 bp, Homo sapiens
aataagttatttttg

SEQ ID NO: 826317 - DNA, 15 bp, Homo sapiens
ataagttatttttgc

SEQ ID NO: 826318 - DNA, 15 bp, Homo sapiens
taagttatttttgct

SEQ ID NO: 826319 - DNA, 15 bp, Homo sapiens
aagttatttttgctc

SEQ ID NO: 826320 - DNA, 15 bp, Homo sapiens
agttatttttgctct

SEQ ID NO: 826321 - DNA, 15 bp, Homo sapiens
gttatttttgctctt

SEQ ID NO: 826322 - DNA, 15 bp, Homo sapiens
ttatttttgctcttg

SEQ ID NO: 826323 - DNA, 15 bp, Homo sapiens
tatttttgctcttgt

SEQ ID NO: 826324 - DNA, 15 bp, Homo sapiens
atttttgctcttgtt

SEQ ID NO: 826325 - DNA, 15 bp, Homo sapiens
tttttgctcttgtta

SEQ ID NO: 826326 - DNA, 15 bp, Homo sapiens
tcattattgcctgtc

SEQ ID NO: 826327 - DNA, 15 bp, Homo sapiens
cattattgcctgtca

SEQ ID NO: 826328 - DNA, 15 bp, Homo sapiens
attattgcctgtcac

SEQ ID NO: 826329 - DNA, 15 bp, Homo sapiens
ttattgcctgtcacc

SEQ ID NO: 826330 - DNA, 15 bp, Homo sapiens
tattgcctgtcaccc

SEQ ID NO: 826331 - DNA, 15 bp, Homo sapiens
attgcctgtcacccc

SEQ ID NO: 826332 - DNA, 15 bp, Homo sapiens
ttgcctgtcaccccc

SEQ ID NO: 826333 - DNA, 15 bp, Homo sapiens
tgcctgtcaccccct

SEQ ID NO: 826334 - DNA, 15 bp, Homo sapiens
gcctgtcacccccta

SEQ ID NO: 826335 - DNA, 15 bp, Homo sapiens
cctgtcaccccctag

SEQ ID NO: 826336 - DNA, 15 bp, Homo sapiens
ctgtcaccccctagt

SEQ ID NO: 826337 - DNA, 15 bp, Homo sapiens
tgtcaccccctagtc

SEQ ID NO: 826338 - DNA, 15 bp, Homo sapiens
gtcaccccctagtcc

SEQ ID NO: 826339 - DNA, 15 bp, Homo sapiens
tcaccccctagtccc

SEQ ID NO: 826340 - DNA, 15 bp, Homo sapiens
caccccctagtccct

SEQ ID NO: 826341 - DNA, 15 bp, Homo sapiens
accccctagtccctt

SEQ ID NO: 826342 - DNA, 15 bp, Homo sapiens
ccccctagtcccttc

SEQ ID NO: 826343 - DNA, 15 bp, Homo sapiens
cccctagtcccttct

SEQ ID NO: 826344 - DNA, 15 bp, Homo sapiens
ccctagtcccttctc

SEQ ID NO: 826345 - DNA, 15 bp, Homo sapiens
cctagtcccttctcc

SEQ ID NO: 826346 - DNA, 15 bp, Homo sapiens
ctagtcccttctcct

SEQ ID NO: 826347 - DNA, 15 bp, Homo sapiens
tagtcccttctcctg

SEQ ID NO: 826348 - DNA, 15 bp, Homo sapiens
agtcccttctcctgg

SEQ ID NO: 826349 - DNA, 15 bp, Homo sapiens
gtcccttctcctggc

SEQ ID NO: 826350 - DNA, 15 bp, Homo sapiens
tcccttctcctggca

SEQ ID NO: 826351 - DNA, 15 bp, Homo sapiens
cccttctcctggcaa

SEQ ID NO: 826352 - DNA, 15 bp, Homo sapiens
ccttctcctggcaac

SEQ ID NO: 826353 - DNA, 15 bp, Homo sapiens
cttctcctggcaacc

SEQ ID NO: 826354 - DNA, 15 bp, Homo sapiens
ttctcctggcaacct

SEQ ID NO: 826355 - DNA, 15 bp, Homo sapiens
tctcctggcaacctt

SEQ ID NO: 826356 - DNA, 15 bp, Homo sapiens
ctcctggcaaccttc

SEQ ID NO: 826357 - DNA, 15 bp, Homo sapiens
tcctggcaaccttct

SEQ ID NO: 826358 - DNA, 15 bp, Homo sapiens
cctggcaaccttcta

SEQ ID NO: 826359 - DNA, 15 bp, Homo sapiens
ctggcaaccttctag

SEQ ID NO: 826360 - DNA, 15 bp, Homo sapiens
tggcaaccttctagt

SEQ ID NO: 826361 - DNA, 15 bp, Homo sapiens
ggcaaccttctagtc

SEQ ID NO: 826362 - DNA, 15 bp, Homo sapiens
gcaaccttctagtca

SEQ ID NO: 826363 - DNA, 15 bp, Homo sapiens
caaccttctagtcac

SEQ ID NO: 826364 - DNA, 15 bp, Homo sapiens
aaccttctagtcact

SEQ ID NO: 826365 - DNA, 15 bp, Homo sapiens
accttctagtcacta

SEQ ID NO: 826366 - DNA, 15 bp, Homo sapiens
ccttctagtcactac

SEQ ID NO: 826367 - DNA, 15 bp, Homo sapiens
cttctagtcactaca

SEQ ID NO: 826368 - DNA, 15 bp, Homo sapiens
ttctagtcactacac

SEQ ID NO: 826369 - DNA, 15 bp, Homo sapiens
tctagtcactacacc

SEQ ID NO: 826370 - DNA, 15 bp, Homo sapiens
ctagtcactacaccc

SEQ ID NO: 826371 - DNA, 15 bp, Homo sapiens
tagtcactacacccc

SEQ ID NO: 826372 - DNA, 15 bp, Homo sapiens
agtcactacacccca

SEQ ID NO: 826373 - DNA, 15 bp, Homo sapiens
gtcactacaccccac

SEQ ID NO: 826374 - DNA, 15 bp, Homo sapiens
tcactacaccccaca

SEQ ID NO: 826375 - DNA, 15 bp, Homo sapiens
cactacaccccacaa

SEQ ID NO: 826376 - DNA, 15 bp, Homo sapiens
actacaccccacaaa

SEQ ID NO: 826377 - DNA, 15 bp, Homo sapiens
ctacaccccacaaag

SEQ ID NO: 826378 - DNA, 15 bp, Homo sapiens
tacaccccacaaagg

SEQ ID NO: 826379 - DNA, 15 bp, Homo sapiens
acaccccacaaaggt

SEQ ID NO: 826380 - DNA, 15 bp, Homo sapiens
caccccacaaaggta

SEQ ID NO: 826381 - DNA, 15 bp, Homo sapiens
accccacaaaggtaa

SEQ ID NO: 826382 - DNA, 15 bp, Homo sapiens
ccccacaaaggtaac

SEQ ID NO: 826383 - DNA, 15 bp, Homo sapiens
cccacaaaggtaacc

SEQ ID NO: 826384 - DNA, 15 bp, Homo sapiens
ccacaaaggtaacca

SEQ ID NO: 826385 - DNA, 15 bp, Homo sapiens
cacaaaggtaaccac

SEQ ID NO: 826386 - DNA, 15 bp, Homo sapiens
acaaaggtaaccact

SEQ ID NO: 826387 - DNA, 15 bp, Homo sapiens
caaaggtaaccactc

SEQ ID NO: 826388 - DNA, 15 bp, Homo sapiens
aaaggtaaccactct

SEQ ID NO: 826389 - DNA, 15 bp, Homo sapiens
aaggtaaccactctc

SEQ ID NO: 826390 - DNA, 15 bp, Homo sapiens
aggtaaccactctcc

SEQ ID NO: 826391 - DNA, 15 bp, Homo sapiens
ggtaaccactctcct

SEQ ID NO: 826392 - DNA, 15 bp, Homo sapiens
gtaaccactctcctg

SEQ ID NO: 826393 - DNA, 15 bp, Homo sapiens
taaccactctcctga

SEQ ID NO: 826394 - DNA, 15 bp, Homo sapiens
aaccactctcctgac

SEQ ID NO: 826395 - DNA, 15 bp, Homo sapiens
accactctcctgacc

SEQ ID NO: 826396 - DNA, 15 bp, Homo sapiens
ccactctcctgacca

SEQ ID NO: 826397 - DNA, 15 bp, Homo sapiens
cactctcctgaccat

SEQ ID NO: 826398 - DNA, 15 bp, Homo sapiens
actctcctgaccata

SEQ ID NO: 826399 - DNA, 15 bp, Homo sapiens
ctctcctgaccatat

SEQ ID NO: 826400 - DNA, 15 bp, Homo sapiens
tctcctgaccatata

SEQ ID NO: 826401 - DNA, 15 bp, Homo sapiens
ctcctgaccatatat

SEQ ID NO: 826402 - DNA, 15 bp, Homo sapiens
tcctgaccatatatc

SEQ ID NO: 826403 - DNA, 15 bp, Homo sapiens
cctgaccatatatca

SEQ ID NO: 826404 - DNA, 15 bp, Homo sapiens
ctgaccatatatcag

SEQ ID NO: 826405 - DNA, 15 bp, Homo sapiens
tgaccatatatcagt

SEQ ID NO: 826406 - DNA, 15 bp, Homo sapiens
gaccatatatcagtt

SEQ ID NO: 826407 - DNA, 15 bp, Homo sapiens
accatatatcagttt

SEQ ID NO: 826408 - DNA, 15 bp, Homo sapiens
ccatatatcagtttt

SEQ ID NO: 826409 - DNA, 15 bp, Homo sapiens
catatatcagttttg

SEQ ID NO: 826410 - DNA, 15 bp, Homo sapiens
atatatcagttttgc

SEQ ID NO: 826411 - DNA, 15 bp, Homo sapiens
tatatcagttttgcc

SEQ ID NO: 826412 - DNA, 15 bp, Homo sapiens
atatcagttttgccc

SEQ ID NO: 826413 - DNA, 15 bp, Homo sapiens
tatcagttttgccca

SEQ ID NO: 826414 - DNA, 15 bp, Homo sapiens
atcagttttgcccag

SEQ ID NO: 826415 - DNA, 15 bp, Homo sapiens
tcagttttgcccagt

SEQ ID NO: 826416 - DNA, 15 bp, Homo sapiens
cagttttgcccagtt

SEQ ID NO: 826417 - DNA, 15 bp, Homo sapiens
agttttgcccagttt

SEQ ID NO: 826418 - DNA, 15 bp, Homo sapiens
gttttgcccagtttt

SEQ ID NO: 826419 - DNA, 15 bp, Homo sapiens
ttttgcccagttttg

SEQ ID NO: 826420 - DNA, 15 bp, Homo sapiens
tttgcccagttttga

SEQ ID NO: 826421 - DNA, 15 bp, Homo sapiens
ttgcccagttttgaa

SEQ ID NO: 826422 - DNA, 15 bp, Homo sapiens
tgcccagttttgaac

SEQ ID NO: 826423 - DNA, 15 bp, Homo sapiens
gcccagttttgaact

SEQ ID NO: 826424 - DNA, 15 bp, Homo sapiens
cccagttttgaactt

SEQ ID NO: 826425 - DNA, 15 bp, Homo sapiens
ccagttttgaacttc

SEQ ID NO: 826426 - DNA, 15 bp, Homo sapiens
cagttttgaacttca

SEQ ID NO: 826427 - DNA, 15 bp, Homo sapiens
agttttgaacttcat

SEQ ID NO: 826428 - DNA, 15 bp, Homo sapiens
gttttgaacttcata

SEQ ID NO: 826429 - DNA, 15 bp, Homo sapiens
ttttgaacttcatat

SEQ ID NO: 826430 - DNA, 15 bp, Homo sapiens
tttgaacttcatata

SEQ ID NO: 826431 - DNA, 15 bp, Homo sapiens
ttgaacttcatataa

SEQ ID NO: 826432 - DNA, 15 bp, Homo sapiens
tgaacttcatataac

SEQ ID NO: 826433 - DNA, 15 bp, Homo sapiens
gaacttcatataact

SEQ ID NO: 826434 - DNA, 15 bp, Homo sapiens
aacttcatataactg

SEQ ID NO: 826435 - DNA, 15 bp, Homo sapiens
acttcatataactgg

SEQ ID NO: 826436 - DNA, 15 bp, Homo sapiens
cttcatataactggg

SEQ ID NO: 826437 - DNA, 15 bp, Homo sapiens
ttcatataactgggt

SEQ ID NO: 826438 - DNA, 15 bp, Homo sapiens
tcatataactgggtt

SEQ ID NO: 826439 - DNA, 15 bp, Homo sapiens
catataactgggtta

SEQ ID NO: 826440 - DNA, 15 bp, Homo sapiens
atataactgggttat

SEQ ID NO: 826441 - DNA, 15 bp, Homo sapiens
tataactgggttata

SEQ ID NO: 826442 - DNA, 15 bp, Homo sapiens
ataactgggttatat

SEQ ID NO: 826443 - DNA, 15 bp, Homo sapiens
taactgggttatata

SEQ ID NO: 826444 - DNA, 15 bp, Homo sapiens
aactgggttatatag

SEQ ID NO: 826445 - DNA, 15 bp, Homo sapiens
actgggttatataga

SEQ ID NO: 826446 - DNA, 15 bp, Homo sapiens
ctgggttatatagaa

SEQ ID NO: 826447 - DNA, 15 bp, Homo sapiens
tgggttatatagaat

SEQ ID NO: 826448 - DNA, 15 bp, Homo sapiens
gggttatatagaatg

SEQ ID NO: 826449 - DNA, 15 bp, Homo sapiens
ggttatatagaatga

SEQ ID NO: 826450 - DNA, 15 bp, Homo sapiens
gttatatagaatgac

SEQ ID NO: 826451 - DNA, 15 bp, Homo sapiens
ttatatagaatgact

SEQ ID NO: 826452 - DNA, 15 bp, Homo sapiens
tatatagaatgactc

SEQ ID NO: 826453 - DNA, 15 bp, Homo sapiens
atatagaatgactct

SEQ ID NO: 826454 - DNA, 15 bp, Homo sapiens
tatagaatgactctg

SEQ ID NO: 826455 - DNA, 15 bp, Homo sapiens
atagaatgactctgt

SEQ ID NO: 826456 - DNA, 15 bp, Homo sapiens
tagaatgactctgtg

SEQ ID NO: 826457 - DNA, 15 bp, Homo sapiens
agaatgactctgtgt

SEQ ID NO: 826458 - DNA, 15 bp, Homo sapiens
gaatgactctgtgtc

SEQ ID NO: 826459 - DNA, 15 bp, Homo sapiens
aatgactctgtgtca

SEQ ID NO: 826460 - DNA, 15 bp, Homo sapiens
atgactctgtgtcag

SEQ ID NO: 826461 - DNA, 15 bp, Homo sapiens
tgactctgtgtcagg

SEQ ID NO: 826462 - DNA, 15 bp, Homo sapiens
gactctgtgtcaggc

SEQ ID NO: 826463 - DNA, 15 bp, Homo sapiens
actctgtgtcaggcc

SEQ ID NO: 826464 - DNA, 15 bp, Homo sapiens
ctctgtgtcaggcct

SEQ ID NO: 826465 - DNA, 15 bp, Homo sapiens
tctgtgtcaggcctt

SEQ ID NO: 826466 - DNA, 15 bp, Homo sapiens
ctgtgtcaggccttg

SEQ ID NO: 826467 - DNA, 15 bp, Homo sapiens
tgtgtcaggccttgt

SEQ ID NO: 826468 - DNA, 15 bp, Homo sapiens
gtgtcaggccttgtt

SEQ ID NO: 826469 - DNA, 15 bp, Homo sapiens
tgtcaggccttgttc

SEQ ID NO: 826470 - DNA, 15 bp, Homo sapiens
gtcaggccttgttct

SEQ ID NO: 826471 - DNA, 15 bp, Homo sapiens
tcaggccttgttctc

SEQ ID NO: 826472 - DNA, 15 bp, Homo sapiens
caggccttgttctct

SEQ ID NO: 826473 - DNA, 15 bp, Homo sapiens
aggccttgttctctc

SEQ ID NO: 826474 - DNA, 15 bp, Homo sapiens
ggccttgttctctca

SEQ ID NO: 826475 - DNA, 15 bp, Homo sapiens
gccttgttctctcag

SEQ ID NO: 826476 - DNA, 15 bp, Homo sapiens
ccttgttctctcagt

SEQ ID NO: 826477 - DNA, 15 bp, Homo sapiens
cttgttctctcagtg

SEQ ID NO: 826478 - DNA, 15 bp, Homo sapiens
ttgttctctcagtgt

SEQ ID NO: 826479 - DNA, 15 bp, Homo sapiens
tgttctctcagtgtt

SEQ ID NO: 826480 - DNA, 15 bp, Homo sapiens
gttctctcagtgtta

SEQ ID NO: 826481 - DNA, 15 bp, Homo sapiens
ttctctcagtgttac

SEQ ID NO: 826482 - DNA, 15 bp, Homo sapiens
tctctcagtgttacg

SEQ ID NO: 826483 - DNA, 15 bp, Homo sapiens
ctctcagtgttacgc

SEQ ID NO: 826484 - DNA, 15 bp, Homo sapiens
tctcagtgttacgcc

SEQ ID NO: 826485 - DNA, 15 bp, Homo sapiens
ctcagtgttacgcct

SEQ ID NO: 826486 - DNA, 15 bp, Homo sapiens
tcagtgttacgcctg

SEQ ID NO: 826487 - DNA, 15 bp, Homo sapiens
cagtgttacgcctgt

SEQ ID NO: 826488 - DNA, 15 bp, Homo sapiens
agtgttacgcctgtg

SEQ ID NO: 826489 - DNA, 15 bp, Homo sapiens
gtgttacgcctgtgt

SEQ ID NO: 826490 - DNA, 15 bp, Homo sapiens
tgttacgcctgtgtg

SEQ ID NO: 826491 - DNA, 15 bp, Homo sapiens
gttacgcctgtgtga

SEQ ID NO: 826492 - DNA, 15 bp, Homo sapiens
ttacgcctgtgtgat

SEQ ID NO: 826493 - DNA, 15 bp, Homo sapiens
tacgcctgtgtgatt

SEQ ID NO: 826494 - DNA, 15 bp, Homo sapiens
acgcctgtgtgattc

SEQ ID NO: 826495 - DNA, 15 bp, Homo sapiens
cgcctgtgtgattca

SEQ ID NO: 826496 - DNA, 15 bp, Homo sapiens
gcctgtgtgattcat

SEQ ID NO: 826497 - DNA, 15 bp, Homo sapiens
cctgtgtgattcatc

SEQ ID NO: 826498 - DNA, 15 bp, Homo sapiens
ctgtgtgattcatcc

SEQ ID NO: 826499 - DNA, 15 bp, Homo sapiens
tgtgtgattcatcca

SEQ ID NO: 826500 - DNA, 15 bp, Homo sapiens
gtgtgattcatccat

SEQ ID NO: 826501 - DNA, 15 bp, Homo sapiens
tgtgattcatccatg

SEQ ID NO: 826502 - DNA, 15 bp, Homo sapiens
gtgattcatccatgt

SEQ ID NO: 826503 - DNA, 15 bp, Homo sapiens
tgattcatccatgtg

SEQ ID NO: 826504 - DNA, 15 bp, Homo sapiens
gattcatccatgtgg

SEQ ID NO: 826505 - DNA, 15 bp, Homo sapiens
attcatccatgtggt

SEQ ID NO: 826506 - DNA, 15 bp, Homo sapiens
ttcatccatgtggtt

SEQ ID NO: 826507 - DNA, 15 bp, Homo sapiens
tcatccatgtggtta

SEQ ID NO: 826508 - DNA, 15 bp, Homo sapiens
catccatgtggttat

SEQ ID NO: 826509 - DNA, 15 bp, Homo sapiens
atccatgtggttata

SEQ ID NO: 826510 - DNA, 15 bp, Homo sapiens
tccatgtggttatat

SEQ ID NO: 826511 - DNA, 15 bp, Homo sapiens
ccatgtggttatatg

SEQ ID NO: 826512 - DNA, 15 bp, Homo sapiens
catgtggttatatgt

SEQ ID NO: 826513 - DNA, 15 bp, Homo sapiens
atgtggttatatgta

SEQ ID NO: 826514 - DNA, 15 bp, Homo sapiens
tgtggttatatgtag

SEQ ID NO: 826515 - DNA, 15 bp, Homo sapiens
gtggttatatgtaga

SEQ ID NO: 826516 - DNA, 15 bp, Homo sapiens
tggttatatgtagat

SEQ ID NO: 826517 - DNA, 15 bp, Homo sapiens
ggttatatgtagatg

SEQ ID NO: 826518 - DNA, 15 bp, Homo sapiens
gttatatgtagatgt

SEQ ID NO: 826519 - DNA, 15 bp, Homo sapiens
ttatatgtagatgta

SEQ ID NO: 826520 - DNA, 15 bp, Homo sapiens
tatatgtagatgtac

SEQ ID NO: 826521 - DNA, 15 bp, Homo sapiens
atatgtagatgtact

SEQ ID NO: 826522 - DNA, 15 bp, Homo sapiens
tatgtagatgtactt

SEQ ID NO: 826523 - DNA, 15 bp, Homo sapiens
atgtagatgtacttg

SEQ ID NO: 826524 - DNA, 15 bp, Homo sapiens
tgtagatgtacttga

SEQ ID NO: 826525 - DNA, 15 bp, Homo sapiens
gtagatgtacttgac

SEQ ID NO: 826526 - DNA, 15 bp, Homo sapiens
tagatgtacttgaca

SEQ ID NO: 826527 - DNA, 15 bp, Homo sapiens
agatgtacttgacag

SEQ ID NO: 826528 - DNA, 15 bp, Homo sapiens
gatgtacttgacagt

SEQ ID NO: 826529 - DNA, 15 bp, Homo sapiens
atgtacttgacagtg

SEQ ID NO: 826530 - DNA, 15 bp, Homo sapiens
tgtacttgacagtgt

SEQ ID NO: 826531 - DNA, 15 bp, Homo sapiens
gtacttgacagtgtt

SEQ ID NO: 826532 - DNA, 15 bp, Homo sapiens
tacttgacagtgttt

SEQ ID NO: 826533 - DNA, 15 bp, Homo sapiens
acttgacagtgtttt

SEQ ID NO: 826534 - DNA, 15 bp, Homo sapiens
cttgacagtgttttt

SEQ ID NO: 826535 - DNA, 15 bp, Homo sapiens
ttgacagtgtttttt

SEQ ID NO: 826536 - DNA, 15 bp, Homo sapiens
tgacagtgttttttt

SEQ ID NO: 826537 - DNA, 15 bp, Homo sapiens
gacagtgtttttttg

SEQ ID NO: 826538 - DNA, 15 bp, Homo sapiens
acagtgtttttttgt

SEQ ID NO: 826539 - DNA, 15 bp, Homo sapiens
cagtgtttttttgtt

SEQ ID NO: 826540 - DNA, 15 bp, Homo sapiens
agtgtttttttgttt

SEQ ID NO: 826541 - DNA, 15 bp, Homo sapiens
gtgtttttttgtttg

SEQ ID NO: 826542 - DNA, 15 bp, Homo sapiens
tgtttttttgtttgg

SEQ ID NO: 826543 - DNA, 15 bp, Homo sapiens
gtttttttgtttgga

SEQ ID NO: 826544 - DNA, 15 bp, Homo sapiens
tttttttgtttggag

SEQ ID NO: 826545 - DNA, 15 bp, Homo sapiens
ttttttgtttggaga

SEQ ID NO: 826546 - DNA, 15 bp, Homo sapiens
tttttgtttggagat

SEQ ID NO: 826547 - DNA, 15 bp, Homo sapiens
ttttgtttggagatg

SEQ ID NO: 826548 - DNA, 15 bp, Homo sapiens
tttgtttggagatgg

SEQ ID NO: 826549 - DNA, 15 bp, Homo sapiens
ttgtttggagatgga

SEQ ID NO: 826550 - DNA, 15 bp, Homo sapiens
tgtttggagatggag

SEQ ID NO: 826551 - DNA, 15 bp, Homo sapiens
gtttggagatggagt

SEQ ID NO: 826552 - DNA, 15 bp, Homo sapiens
tttggagatggagtc

SEQ ID NO: 826553 - DNA, 15 bp, Homo sapiens
ttggagatggagtct

SEQ ID NO: 826554 - DNA, 15 bp, Homo sapiens
tggagatggagtctt

SEQ ID NO: 826555 - DNA, 15 bp, Homo sapiens
ggagatggagtcttg

SEQ ID NO: 826556 - DNA, 15 bp, Homo sapiens
atggagtcttgctca

SEQ ID NO: 826557 - DNA, 15 bp, Homo sapiens
tggagtcttgctcag

SEQ ID NO: 826558 - DNA, 15 bp, Homo sapiens
ggagtcttgctcagc

SEQ ID NO: 826559 - DNA, 15 bp, Homo sapiens
gagtcttgctcagcc

SEQ ID NO: 826560 - DNA, 15 bp, Homo sapiens
agtcttgctcagcct

SEQ ID NO: 826561 - DNA, 15 bp, Homo sapiens
gtcttgctcagcctc

SEQ ID NO: 826562 - DNA, 15 bp, Homo sapiens
tcttgctcagcctcc

SEQ ID NO: 826563 - DNA, 15 bp, Homo sapiens
cttgctcagcctccc

SEQ ID NO: 826564 - DNA, 15 bp, Homo sapiens
ttgctcagcctccca

SEQ ID NO: 826565 - DNA, 15 bp, Homo sapiens
tgctcagcctcccaa

SEQ ID NO: 826566 - DNA, 15 bp, Homo sapiens
gctcagcctcccaaa

SEQ ID NO: 826567 - DNA, 15 bp, Homo sapiens
cagcctcccaaagtt

SEQ ID NO: 826568 - DNA, 15 bp, Homo sapiens
agcctcccaaagttc

SEQ ID NO: 826569 - DNA, 15 bp, Homo sapiens
gcctcccaaagttct

SEQ ID NO: 826570 - DNA, 15 bp, Homo sapiens
cctcccaaagttctg

SEQ ID NO: 826571 - DNA, 15 bp, Homo sapiens
ctcccaaagttctga

SEQ ID NO: 826572 - DNA, 15 bp, Homo sapiens
tcccaaagttctgag

SEQ ID NO: 826573 - DNA, 15 bp, Homo sapiens
cccaaagttctgaga

SEQ ID NO: 826574 - DNA, 15 bp, Homo sapiens
ccaaagttctgagat

SEQ ID NO: 826575 - DNA, 15 bp, Homo sapiens
caaagttctgagatg

SEQ ID NO: 826576 - DNA, 15 bp, Homo sapiens
aaagttctgagatga

SEQ ID NO: 826577 - DNA, 15 bp, Homo sapiens
aagttctgagatgac

SEQ ID NO: 826578 - DNA, 15 bp, Homo sapiens
agttctgagatgacg

SEQ ID NO: 826579 - DNA, 15 bp, Homo sapiens
gttctgagatgacgg

SEQ ID NO: 826580 - DNA, 15 bp, Homo sapiens
ttctgagatgacggg

SEQ ID NO: 826581 - DNA, 15 bp, Homo sapiens
tctgagatgacgggc

SEQ ID NO: 826582 - DNA, 15 bp, Homo sapiens
ctgagatgacgggca

SEQ ID NO: 826583 - DNA, 15 bp, Homo sapiens
tgagatgacgggcat

SEQ ID NO: 826584 - DNA, 15 bp, Homo sapiens
gagatgacgggcatg

SEQ ID NO: 826585 - DNA, 15 bp, Homo sapiens
agatgacgggcatga

SEQ ID NO: 826586 - DNA, 15 bp, Homo sapiens
gatgacgggcatgag

SEQ ID NO: 826587 - DNA, 15 bp, Homo sapiens
atgacgggcatgagc

SEQ ID NO: 826588 - DNA, 15 bp, Homo sapiens
tgacgggcatgagcc

SEQ ID NO: 826589 - DNA, 15 bp, Homo sapiens
gacgggcatgagcca

SEQ ID NO: 826590 - DNA, 15 bp, Homo sapiens
atgagccaccgtgct

SEQ ID NO: 826591 - DNA, 15 bp, Homo sapiens
tgagccaccgtgctt

SEQ ID NO: 826592 - DNA, 15 bp, Homo sapiens
gagccaccgtgcttg

SEQ ID NO: 826593 - DNA, 15 bp, Homo sapiens
agccaccgtgcttgg

SEQ ID NO: 826594 - DNA, 15 bp, Homo sapiens
gccaccgtgcttggc

SEQ ID NO: 826595 - DNA, 15 bp, Homo sapiens
ccaccgtgcttggcc

SEQ ID NO: 826596 - DNA, 15 bp, Homo sapiens
caccgtgcttggcct

SEQ ID NO: 826597 - DNA, 15 bp, Homo sapiens
accgtgcttggcctg

SEQ ID NO: 826598 - DNA, 15 bp, Homo sapiens
ccgtgcttggcctgt

SEQ ID NO: 826599 - DNA, 15 bp, Homo sapiens
cgtgcttggcctgtt

SEQ ID NO: 826600 - DNA, 15 bp, Homo sapiens
gtgcttggcctgttt

SEQ ID NO: 826601 - DNA, 15 bp, Homo sapiens
tgcttggcctgtttt

SEQ ID NO: 826602 - DNA, 15 bp, Homo sapiens
gcttggcctgttttg

SEQ ID NO: 826603 - DNA, 15 bp, Homo sapiens
cttggcctgttttgt

SEQ ID NO: 826604 - DNA, 15 bp, Homo sapiens
ttggcctgttttgtg

SEQ ID NO: 826605 - DNA, 15 bp, Homo sapiens
tggcctgttttgtgc

SEQ ID NO: 826606 - DNA, 15 bp, Homo sapiens
ggcctgttttgtgct

SEQ ID NO: 826607 - DNA, 15 bp, Homo sapiens
gcctgttttgtgctt

SEQ ID NO: 826608 - DNA, 15 bp, Homo sapiens
cctgttttgtgctta

SEQ ID NO: 826609 - DNA, 15 bp, Homo sapiens
ctgttttgtgcttat

SEQ ID NO: 826610 - DNA, 15 bp, Homo sapiens
tgttttgtgcttatc

SEQ ID NO: 826611 - DNA, 15 bp, Homo sapiens
gttttgtgcttatct

SEQ ID NO: 826612 - DNA, 15 bp, Homo sapiens
ttttgtgcttatctt

SEQ ID NO: 826613 - DNA, 15 bp, Homo sapiens
tttgtgcttatcttt

SEQ ID NO: 826614 - DNA, 15 bp, Homo sapiens
ttgtgcttatctttg

SEQ ID NO: 826615 - DNA, 15 bp, Homo sapiens
tgtgcttatctttgc

SEQ ID NO: 826616 - DNA, 15 bp, Homo sapiens
gtgcttatctttgca

SEQ ID NO: 826617 - DNA, 15 bp, Homo sapiens
tgcttatctttgcat

SEQ ID NO: 826618 - DNA, 15 bp, Homo sapiens
gcttatctttgcatt

SEQ ID NO: 826619 - DNA, 15 bp, Homo sapiens
cttatctttgcattt

SEQ ID NO: 826620 - DNA, 15 bp, Homo sapiens
ttatctttgcatttg

SEQ ID NO: 826621 - DNA, 15 bp, Homo sapiens
tatctttgcatttga

SEQ ID NO: 826622 - DNA, 15 bp, Homo sapiens
atctttgcatttgag

SEQ ID NO: 826623 - DNA, 15 bp, Homo sapiens
tctttgcatttgaga

SEQ ID NO: 826624 - DNA, 15 bp, Homo sapiens
ctttgcatttgagat

SEQ ID NO: 826625 - DNA, 15 bp, Homo sapiens
tttgcatttgagatc

SEQ ID NO: 826626 - DNA, 15 bp, Homo sapiens
ttgcatttgagatct

SEQ ID NO: 826627 - DNA, 15 bp, Homo sapiens
tgcatttgagatctt

SEQ ID NO: 826628 - DNA, 15 bp, Homo sapiens
gcatttgagatcttc

SEQ ID NO: 826629 - DNA, 15 bp, Homo sapiens
catttgagatcttct

SEQ ID NO: 826630 - DNA, 15 bp, Homo sapiens
atttgagatcttctg

SEQ ID NO: 826631 - DNA, 15 bp, Homo sapiens
tttgagatcttctgt

SEQ ID NO: 826632 - DNA, 15 bp, Homo sapiens
ttgagatcttctgtt

SEQ ID NO: 826633 - DNA, 15 bp, Homo sapiens
tgagatcttctgtta

SEQ ID NO: 826634 - DNA, 15 bp, Homo sapiens
gagatcttctgttag

SEQ ID NO: 826635 - DNA, 15 bp, Homo sapiens
agatcttctgttagc

SEQ ID NO: 826636 - DNA, 15 bp, Homo sapiens
gatcttctgttagcc

SEQ ID NO: 826637 - DNA, 15 bp, Homo sapiens
atcttctgttagcct

SEQ ID NO: 826638 - DNA, 15 bp, Homo sapiens
tcttctgttagccta

SEQ ID NO: 826639 - DNA, 15 bp, Homo sapiens
cttctgttagcctat

SEQ ID NO: 826640 - DNA, 15 bp, Homo sapiens
ttctgttagcctata

SEQ ID NO: 826641 - DNA, 15 bp, Homo sapiens
tctgttagcctatat

SEQ ID NO: 826642 - DNA, 15 bp, Homo sapiens
ctgttagcctatatg

SEQ ID NO: 826643 - DNA, 15 bp, Homo sapiens
tgttagcctatatgt

SEQ ID NO: 826644 - DNA, 15 bp, Homo sapiens
gttagcctatatgtg

SEQ ID NO: 826645 - DNA, 15 bp, Homo sapiens
ttagcctatatgtga

SEQ ID NO: 826646 - DNA, 15 bp, Homo sapiens
tagcctatatgtgaa

SEQ ID NO: 826647 - DNA, 15 bp, Homo sapiens
agcctatatgtgaat

SEQ ID NO: 826648 - DNA, 15 bp, Homo sapiens
gcctatatgtgaatg

SEQ ID NO: 826649 - DNA, 15 bp, Homo sapiens
cctatatgtgaatgc

SEQ ID NO: 826650 - DNA, 15 bp, Homo sapiens
ctatatgtgaatgct

SEQ ID NO: 826651 - DNA, 15 bp, Homo sapiens
tatatgtgaatgctg

SEQ ID NO: 826652 - DNA, 15 bp, Homo sapiens
atatgtgaatgctgt

SEQ ID NO: 826653 - DNA, 15 bp, Homo sapiens
tatgtgaatgctgtc

SEQ ID NO: 826654 - DNA, 15 bp, Homo sapiens
atgtgaatgctgtct

SEQ ID NO: 826655 - DNA, 15 bp, Homo sapiens
tgtgaatgctgtctt

SEQ ID NO: 826656 - DNA, 15 bp, Homo sapiens
gtgaatgctgtcttt

SEQ ID NO: 826657 - DNA, 15 bp, Homo sapiens
tgaatgctgtctttg

SEQ ID NO: 826658 - DNA, 15 bp, Homo sapiens
gaatgctgtctttgt

SEQ ID NO: 826659 - DNA, 15 bp, Homo sapiens
aatgctgtctttgtg

SEQ ID NO: 826660 - DNA, 15 bp, Homo sapiens
atgctgtctttgtgt

SEQ ID NO: 826661 - DNA, 15 bp, Homo sapiens
tgctgtctttgtgtg

SEQ ID NO: 826662 - DNA, 15 bp, Homo sapiens
gctgtctttgtgtgt

SEQ ID NO: 826663 - DNA, 15 bp, Homo sapiens
ctgtctttgtgtgtt

SEQ ID NO: 826664 - DNA, 15 bp, Homo sapiens
tgtctttgtgtgttg

SEQ ID NO: 826665 - DNA, 15 bp, Homo sapiens
gtctttgtgtgttgc

SEQ ID NO: 826666 - DNA, 15 bp, Homo sapiens
tctttgtgtgttgca

SEQ ID NO: 826667 - DNA, 15 bp, Homo sapiens
ctttgtgtgttgcag

SEQ ID NO: 826668 - DNA, 15 bp, Homo sapiens
tttgtgtgttgcagt

SEQ ID NO: 826669 - DNA, 15 bp, Homo sapiens
ttgtgtgttgcagtt

SEQ ID NO: 826670 - DNA, 15 bp, Homo sapiens
tgtgtgttgcagttt

SEQ ID NO: 826671 - DNA, 15 bp, Homo sapiens
gtgtgttgcagtttg

SEQ ID NO: 826672 - DNA, 15 bp, Homo sapiens
tgtgttgcagtttgt

SEQ ID NO: 826673 - DNA, 15 bp, Homo sapiens
gtgttgcagtttgtc

SEQ ID NO: 826674 - DNA, 15 bp, Homo sapiens
tgttgcagtttgtct

SEQ ID NO: 826675 - DNA, 15 bp, Homo sapiens
gttgcagtttgtctg

SEQ ID NO: 826676 - DNA, 15 bp, Homo sapiens
ttgcagtttgtctgg

SEQ ID NO: 826677 - DNA, 15 bp, Homo sapiens
tgcagtttgtctggg

SEQ ID NO: 826678 - DNA, 15 bp, Homo sapiens
gcagtttgtctgggg

SEQ ID NO: 826679 - DNA, 15 bp, Homo sapiens
cagtttgtctgggga

SEQ ID NO: 826680 - DNA, 15 bp, Homo sapiens
agtttgtctggggag

SEQ ID NO: 826681 - DNA, 15 bp, Homo sapiens
gtttgtctggggagt

SEQ ID NO: 826682 - DNA, 15 bp, Homo sapiens
tttgtctggggagta

SEQ ID NO: 826683 - DNA, 15 bp, Homo sapiens
ttgtctggggagtac

SEQ ID NO: 826684 - DNA, 15 bp, Homo sapiens
tgtctggggagtact

SEQ ID NO: 826685 - DNA, 15 bp, Homo sapiens
gtctggggagtactg

SEQ ID NO: 826686 - DNA, 15 bp, Homo sapiens
tctggggagtactga

SEQ ID NO: 826687 - DNA, 15 bp, Homo sapiens
ctggggagtactgag

SEQ ID NO: 826688 - DNA, 15 bp, Homo sapiens
tggggagtactgaga

SEQ ID NO: 826689 - DNA, 15 bp, Homo sapiens
ggggagtactgagat

SEQ ID NO: 826690 - DNA, 15 bp, Homo sapiens
gggagtactgagata

SEQ ID NO: 826691 - DNA, 15 bp, Homo sapiens
ggagtactgagatat

SEQ ID NO: 826692 - DNA, 15 bp, Homo sapiens
gagtactgagatatg

SEQ ID NO: 826693 - DNA, 15 bp, Homo sapiens
agtactgagatatgc

SEQ ID NO: 826694 - DNA, 15 bp, Homo sapiens
gtactgagatatgct

SEQ ID NO: 826695 - DNA, 15 bp, Homo sapiens
tactgagatatgcta

SEQ ID NO: 826696 - DNA, 15 bp, Homo sapiens
actgagatatgctac

SEQ ID NO: 826697 - DNA, 15 bp, Homo sapiens
ctgagatatgctact

SEQ ID NO: 826698 - DNA, 15 bp, Homo sapiens
tgagatatgctactg

SEQ ID NO: 826699 - DNA, 15 bp, Homo sapiens
gagatatgctactgt

SEQ ID NO: 826700 - DNA, 15 bp, Homo sapiens
agatatgctactgtg

SEQ ID NO: 826701 - DNA, 15 bp, Homo sapiens
gatatgctactgtgt

SEQ ID NO: 826702 - DNA, 15 bp, Homo sapiens
atatgctactgtgtg

SEQ ID NO: 826703 - DNA, 15 bp, Homo sapiens
tatgctactgtgtgt

SEQ ID NO: 826704 - DNA, 15 bp, Homo sapiens
atgctactgtgtgtt

SEQ ID NO: 826705 - DNA, 15 bp, Homo sapiens
tgctactgtgtgttt

SEQ ID NO: 826706 - DNA, 15 bp, Homo sapiens
gctactgtgtgtttc

SEQ ID NO: 826707 - DNA, 15 bp, Homo sapiens
ctactgtgtgtttct

SEQ ID NO: 826708 - DNA, 15 bp, Homo sapiens
tactgtgtgtttcta

SEQ ID NO: 826709 - DNA, 15 bp, Homo sapiens
actgtgtgtttctat

SEQ ID NO: 826710 - DNA, 15 bp, Homo sapiens
ctgtgtgtttctatt

SEQ ID NO: 826711 - DNA, 15 bp, Homo sapiens
tgtgtgtttctattc

SEQ ID NO: 826712 - DNA, 15 bp, Homo sapiens
gtgtgtttctattcg

SEQ ID NO: 826713 - DNA, 15 bp, Homo sapiens
tgtgtttctattcgg

SEQ ID NO: 826714 - DNA, 15 bp, Homo sapiens
gtgtttctattcggt

SEQ ID NO: 826715 - DNA, 15 bp, Homo sapiens
tgtttctattcggta

SEQ ID NO: 826716 - DNA, 15 bp, Homo sapiens
gtttctattcggtaa

SEQ ID NO: 826717 - DNA, 15 bp, Homo sapiens
tttctattcggtaac

SEQ ID NO: 826718 - DNA, 15 bp, Homo sapiens
ttctattcggtaact

SEQ ID NO: 826719 - DNA, 15 bp, Homo sapiens
tctattcggtaactg

SEQ ID NO: 826720 - DNA, 15 bp, Homo sapiens
ctattcggtaactgg

SEQ ID NO: 826721 - DNA, 15 bp, Homo sapiens
tattcggtaactggt

SEQ ID NO: 826722 - DNA, 15 bp, Homo sapiens
attcggtaactggtc

SEQ ID NO: 826723 - DNA, 15 bp, Homo sapiens
ttcggtaactggtct

SEQ ID NO: 826724 - DNA, 15 bp, Homo sapiens
tcggtaactggtctt

SEQ ID NO: 826725 - DNA, 15 bp, Homo sapiens
cggtaactggtctta

SEQ ID NO: 826726 - DNA, 15 bp, Homo sapiens
ggtaactggtcttac

SEQ ID NO: 826727 - DNA, 15 bp, Homo sapiens
gtaactggtcttaca

SEQ ID NO: 826728 - DNA, 15 bp, Homo sapiens
taactggtcttacag

SEQ ID NO: 826729 - DNA, 15 bp, Homo sapiens
aactggtcttacagc

SEQ ID NO: 826730 - DNA, 15 bp, Homo sapiens
actggtcttacagct

SEQ ID NO: 826731 - DNA, 15 bp, Homo sapiens
ctggtcttacagctg

SEQ ID NO: 826732 - DNA, 15 bp, Homo sapiens
tggtcttacagctgt

SEQ ID NO: 826733 - DNA, 15 bp, Homo sapiens
ggtcttacagctgta

SEQ ID NO: 826734 - DNA, 15 bp, Homo sapiens
gtcttacagctgtag

SEQ ID NO: 826735 - DNA, 15 bp, Homo sapiens
tcttacagctgtaga

SEQ ID NO: 826736 - DNA, 15 bp, Homo sapiens
cttacagctgtagag

SEQ ID NO: 826737 - DNA, 15 bp, Homo sapiens
ttacagctgtagaga

SEQ ID NO: 826738 - DNA, 15 bp, Homo sapiens
tacagctgtagagac

SEQ ID NO: 826739 - DNA, 15 bp, Homo sapiens
acagctgtagagaca

SEQ ID NO: 826740 - DNA, 15 bp, Homo sapiens
cagctgtagagacag

SEQ ID NO: 826741 - DNA, 15 bp, Homo sapiens
agctgtagagacagt

SEQ ID NO: 826742 - DNA, 15 bp, Homo sapiens
gctgtagagacagtg

SEQ ID NO: 826743 - DNA, 15 bp, Homo sapiens
ctgtagagacagtgt

SEQ ID NO: 826744 - DNA, 15 bp, Homo sapiens
tgtagagacagtgtg

SEQ ID NO: 826745 - DNA, 15 bp, Homo sapiens
gtagagacagtgtgt

SEQ ID NO: 826746 - DNA, 15 bp, Homo sapiens
tagagacagtgtgtt

SEQ ID NO: 826747 - DNA, 15 bp, Homo sapiens
agagacagtgtgttt

SEQ ID NO: 826748 - DNA, 15 bp, Homo sapiens
gagacagtgtgtttc

SEQ ID NO: 826749 - DNA, 15 bp, Homo sapiens
acagtgtgtttcttc

SEQ ID NO: 826750 - DNA, 15 bp, Homo sapiens
cagtgtgtttcttcc

SEQ ID NO: 826751 - DNA, 15 bp, Homo sapiens
agtgtgtttcttcca

SEQ ID NO: 826752 - DNA, 15 bp, Homo sapiens
gtgtgtttcttccaa

SEQ ID NO: 826753 - DNA, 15 bp, Homo sapiens
tgtgtttcttccaag

SEQ ID NO: 826754 - DNA, 15 bp, Homo sapiens
gtgtttcttccaaga

SEQ ID NO: 826755 - DNA, 15 bp, Homo sapiens
tgtttcttccaagag

SEQ ID NO: 826756 - DNA, 15 bp, Homo sapiens
gtttcttccaagagt

SEQ ID NO: 826757 - DNA, 15 bp, Homo sapiens
tttcttccaagagtt

SEQ ID NO: 826758 - DNA, 15 bp, Homo sapiens
ttcttccaagagtta

SEQ ID NO: 826759 - DNA, 15 bp, Homo sapiens
tcttccaagagttac

SEQ ID NO: 826760 - DNA, 15 bp, Homo sapiens
cttccaagagttaca

SEQ ID NO: 826761 - DNA, 15 bp, Homo sapiens
ttccaagagttacag

SEQ ID NO: 826762 - DNA, 15 bp, Homo sapiens
tccaagagttacagt

SEQ ID NO: 826763 - DNA, 15 bp, Homo sapiens
ccaagagttacagtt

SEQ ID NO: 826764 - DNA, 15 bp, Homo sapiens
caagagttacagttt

SEQ ID NO: 826765 - DNA, 15 bp, Homo sapiens
aagagttacagttta

SEQ ID NO: 826766 - DNA, 15 bp, Homo sapiens
agagttacagtttac

SEQ ID NO: 826767 - DNA, 15 bp, Homo sapiens
gagttacagtttact

SEQ ID NO: 826768 - DNA, 15 bp, Homo sapiens
agttacagtttactc

SEQ ID NO: 826769 - DNA, 15 bp, Homo sapiens
gttacagtttactca

SEQ ID NO: 826770 - DNA, 15 bp, Homo sapiens
ttacagtttactcag

SEQ ID NO: 826771 - DNA, 15 bp, Homo sapiens
tacagtttactcagg

SEQ ID NO: 826772 - DNA, 15 bp, Homo sapiens
acagtttactcagga

SEQ ID NO: 826773 - DNA, 15 bp, Homo sapiens
cagtttactcaggat

SEQ ID NO: 826774 - DNA, 15 bp, Homo sapiens
agtttactcaggata

SEQ ID NO: 826775 - DNA, 15 bp, Homo sapiens
gtttactcaggatat

SEQ ID NO: 826776 - DNA, 15 bp, Homo sapiens
tttactcaggatatt

SEQ ID NO: 826777 - DNA, 15 bp, Homo sapiens
ttactcaggatattg

SEQ ID NO: 826778 - DNA, 15 bp, Homo sapiens
tactcaggatattgc

SEQ ID NO: 826779 - DNA, 15 bp, Homo sapiens
actcaggatattgct

SEQ ID NO: 826780 - DNA, 15 bp, Homo sapiens
ctcaggatattgctc

SEQ ID NO: 826781 - DNA, 15 bp, Homo sapiens
tcaggatattgctct

SEQ ID NO: 826782 - DNA, 15 bp, Homo sapiens
caggatattgctcta

SEQ ID NO: 826783 - DNA, 15 bp, Homo sapiens
aggatattgctctat

SEQ ID NO: 826784 - DNA, 15 bp, Homo sapiens
ggatattgctctatt

SEQ ID NO: 826785 - DNA, 15 bp, Homo sapiens
gatattgctctattt

SEQ ID NO: 826786 - DNA, 15 bp, Homo sapiens
atattgctctatttt

SEQ ID NO: 826787 - DNA, 15 bp, Homo sapiens
tattgctctatttta

SEQ ID NO: 826788 - DNA, 15 bp, Homo sapiens
attgctctattttaa

SEQ ID NO: 826789 - DNA, 15 bp, Homo sapiens
ttgctctattttaac

SEQ ID NO: 826790 - DNA, 15 bp, Homo sapiens
tgctctattttaaca

SEQ ID NO: 826791 - DNA, 15 bp, Homo sapiens
gctctattttaacac

SEQ ID NO: 826792 - DNA, 15 bp, Homo sapiens
ctctattttaacacc

SEQ ID NO: 826793 - DNA, 15 bp, Homo sapiens
tctattttaacacct

SEQ ID NO: 826794 - DNA, 15 bp, Homo sapiens
ctattttaacacctc

SEQ ID NO: 826795 - DNA, 15 bp, Homo sapiens
tattttaacacctca

SEQ ID NO: 826796 - DNA, 15 bp, Homo sapiens
attttaacacctcaa

SEQ ID NO: 826797 - DNA, 15 bp, Homo sapiens
ttttaacacctcaag

SEQ ID NO: 826798 - DNA, 15 bp, Homo sapiens
tttaacacctcaagt

SEQ ID NO: 826799 - DNA, 15 bp, Homo sapiens
ttaacacctcaagtg

SEQ ID NO: 826800 - DNA, 15 bp, Homo sapiens
taacacctcaagtgt

SEQ ID NO: 826801 - DNA, 15 bp, Homo sapiens
aacacctcaagtgta

SEQ ID NO: 826802 - DNA, 15 bp, Homo sapiens
acacctcaagtgtat

SEQ ID NO: 826803 - DNA, 15 bp, Homo sapiens
cacctcaagtgtatg

SEQ ID NO: 826804 - DNA, 15 bp, Homo sapiens
acctcaagtgtatgc

SEQ ID NO: 826805 - DNA, 15 bp, Homo sapiens
cctcaagtgtatgca

SEQ ID NO: 826806 - DNA, 15 bp, Homo sapiens
ctcaagtgtatgcac

SEQ ID NO: 826807 - DNA, 15 bp, Homo sapiens
tcaagtgtatgcact

SEQ ID NO: 826808 - DNA, 15 bp, Homo sapiens
caagtgtatgcactt

SEQ ID NO: 826809 - DNA, 15 bp, Homo sapiens
aagtgtatgcacttg

SEQ ID NO: 826810 - DNA, 15 bp, Homo sapiens
agtgtatgcacttgc

SEQ ID NO: 826811 - DNA, 15 bp, Homo sapiens
gtgtatgcacttgct

SEQ ID NO: 826812 - DNA, 15 bp, Homo sapiens
tgtatgcacttgctg

SEQ ID NO: 826813 - DNA, 15 bp, Homo sapiens
gtatgcacttgctgc

SEQ ID NO: 826814 - DNA, 15 bp, Homo sapiens
tatgcacttgctgcc

SEQ ID NO: 826815 - DNA, 15 bp, Homo sapiens
atgcacttgctgcca

SEQ ID NO: 826816 - DNA, 15 bp, Homo sapiens
tgcacttgctgccat

SEQ ID NO: 826817 - DNA, 15 bp, Homo sapiens
gcacttgctgccatg

SEQ ID NO: 826818 - DNA, 15 bp, Homo sapiens
cacttgctgccatgt

SEQ ID NO: 826819 - DNA, 15 bp, Homo sapiens
acttgctgccatgta

SEQ ID NO: 826820 - DNA, 15 bp, Homo sapiens
cttgctgccatgtag

SEQ ID NO: 826821 - DNA, 15 bp, Homo sapiens
ttgctgccatgtagt

SEQ ID NO: 826822 - DNA, 15 bp, Homo sapiens
tgctgccatgtagtg

SEQ ID NO: 826823 - DNA, 15 bp, Homo sapiens
gctgccatgtagtga

SEQ ID NO: 826824 - DNA, 15 bp, Homo sapiens
ctgccatgtagtgac

SEQ ID NO: 826825 - DNA, 15 bp, Homo sapiens
tgccatgtagtgact

SEQ ID NO: 826826 - DNA, 15 bp, Homo sapiens
gccatgtagtgacta

SEQ ID NO: 826827 - DNA, 15 bp, Homo sapiens
ccatgtagtgactac

SEQ ID NO: 826828 - DNA, 15 bp, Homo sapiens
catgtagtgactact

SEQ ID NO: 826829 - DNA, 15 bp, Homo sapiens
atgtagtgactactc

SEQ ID NO: 826830 - DNA, 15 bp, Homo sapiens
tgtagtgactactcc

SEQ ID NO: 826831 - DNA, 15 bp, Homo sapiens
gtagtgactactcct

SEQ ID NO: 826832 - DNA, 15 bp, Homo sapiens
tagtgactactcctg

SEQ ID NO: 826833 - DNA, 15 bp, Homo sapiens
agtgactactcctgt

SEQ ID NO: 826834 - DNA, 15 bp, Homo sapiens
gtgactactcctgtt

SEQ ID NO: 826835 - DNA, 15 bp, Homo sapiens
tgactactcctgttt

SEQ ID NO: 826836 - DNA, 15 bp, Homo sapiens
gactactcctgtttg

SEQ ID NO: 826837 - DNA, 15 bp, Homo sapiens
actactcctgtttgg

SEQ ID NO: 826838 - DNA, 15 bp, Homo sapiens
ctactcctgtttggc

SEQ ID NO: 826839 - DNA, 15 bp, Homo sapiens
tactcctgtttggca

SEQ ID NO: 826840 - DNA, 15 bp, Homo sapiens
actcctgtttggcac

SEQ ID NO: 826841 - DNA, 15 bp, Homo sapiens
ctcctgtttggcacc

SEQ ID NO: 826842 - DNA, 15 bp, Homo sapiens
tcctgtttggcaccc

SEQ ID NO: 826843 - DNA, 15 bp, Homo sapiens
cctgtttggcacccc

SEQ ID NO: 826844 - DNA, 15 bp, Homo sapiens
ctgtttggcacccca

SEQ ID NO: 826845 - DNA, 15 bp, Homo sapiens
tgtttggcaccccag

SEQ ID NO: 826846 - DNA, 15 bp, Homo sapiens
gtttggcaccccagt

SEQ ID NO: 826847 - DNA, 15 bp, Homo sapiens
tttggcaccccagtc

SEQ ID NO: 826848 - DNA, 15 bp, Homo sapiens
ttggcaccccagtca

SEQ ID NO: 826849 - DNA, 15 bp, Homo sapiens
tggcaccccagtcaa

SEQ ID NO: 826850 - DNA, 15 bp, Homo sapiens
ggcaccccagtcaat

SEQ ID NO: 826851 - DNA, 15 bp, Homo sapiens
gcaccccagtcaatc

SEQ ID NO: 826852 - DNA, 15 bp, Homo sapiens
caccccagtcaatca

SEQ ID NO: 826853 - DNA, 15 bp, Homo sapiens
accccagtcaatcag

SEQ ID NO: 826854 - DNA, 15 bp, Homo sapiens
ccccagtcaatcagt

SEQ ID NO: 826855 - DNA, 15 bp, Homo sapiens
cccagtcaatcagtg

SEQ ID NO: 826856 - DNA, 15 bp, Homo sapiens
ccagtcaatcagtgt

SEQ ID NO: 826857 - DNA, 15 bp, Homo sapiens
cagtcaatcagtgtt

SEQ ID NO: 826858 - DNA, 15 bp, Homo sapiens
agtcaatcagtgtta

SEQ ID NO: 826859 - DNA, 15 bp, Homo sapiens
gtcaatcagtgttat

SEQ ID NO: 826860 - DNA, 15 bp, Homo sapiens
tcaatcagtgttatt

SEQ ID NO: 826861 - DNA, 15 bp, Homo sapiens
caatcagtgttattg

SEQ ID NO: 826862 - DNA, 15 bp, Homo sapiens
aatcagtgttattgt

SEQ ID NO: 826863 - DNA, 15 bp, Homo sapiens
atcagtgttattgtc

SEQ ID NO: 826864 - DNA, 15 bp, Homo sapiens
tcagtgttattgtca

SEQ ID NO: 826865 - DNA, 15 bp, Homo sapiens
cagtgttattgtcac

SEQ ID NO: 826866 - DNA, 15 bp, Homo sapiens
agtgttattgtcaca

SEQ ID NO: 826867 - DNA, 15 bp, Homo sapiens
gtgttattgtcacag

SEQ ID NO: 826868 - DNA, 15 bp, Homo sapiens
tgttattgtcacagc

SEQ ID NO: 826869 - DNA, 15 bp, Homo sapiens
gttattgtcacagcc

SEQ ID NO: 826870 - DNA, 15 bp, Homo sapiens
ttattgtcacagcct

SEQ ID NO: 826871 - DNA, 15 bp, Homo sapiens
tattgtcacagcctc

SEQ ID NO: 826872 - DNA, 15 bp, Homo sapiens
attgtcacagcctcc

SEQ ID NO: 826873 - DNA, 15 bp, Homo sapiens
ttgtcacagcctcct

SEQ ID NO: 826874 - DNA, 15 bp, Homo sapiens
tgtcacagcctcctt

SEQ ID NO: 826875 - DNA, 15 bp, Homo sapiens
gtcacagcctccttc

SEQ ID NO: 826876 - DNA, 15 bp, Homo sapiens
tcacagcctccttct

SEQ ID NO: 826877 - DNA, 15 bp, Homo sapiens
cacagcctccttctt

SEQ ID NO: 826878 - DNA, 15 bp, Homo sapiens
acagcctccttcttc

SEQ ID NO: 826879 - DNA, 15 bp, Homo sapiens
cagcctccttcttcc

SEQ ID NO: 826880 - DNA, 15 bp, Homo sapiens
agcctccttcttccc

SEQ ID NO: 826881 - DNA, 15 bp, Homo sapiens
gcctccttcttccca

SEQ ID NO: 826882 - DNA, 15 bp, Homo sapiens
cctccttcttcccag

SEQ ID NO: 826883 - DNA, 15 bp, Homo sapiens
ctccttcttcccagg

SEQ ID NO: 826884 - DNA, 15 bp, Homo sapiens
tccttcttcccaggg

SEQ ID NO: 826885 - DNA, 15 bp, Homo sapiens
ccttcttcccagggt

SEQ ID NO: 826886 - DNA, 15 bp, Homo sapiens
cttcttcccagggtc

SEQ ID NO: 826887 - DNA, 15 bp, Homo sapiens
ttcttcccagggtca

SEQ ID NO: 826888 - DNA, 15 bp, Homo sapiens
tcttcccagggtcag

SEQ ID NO: 826889 - DNA, 15 bp, Homo sapiens
cttcccagggtcagc

SEQ ID NO: 826890 - DNA, 15 bp, Homo sapiens
ttcccagggtcagcc

SEQ ID NO: 826891 - DNA, 15 bp, Homo sapiens
tcccagggtcagcca

SEQ ID NO: 826892 - DNA, 15 bp, Homo sapiens
cccagggtcagccac

SEQ ID NO: 826893 - DNA, 15 bp, Homo sapiens
ccagggtcagccact

SEQ ID NO: 826894 - DNA, 15 bp, Homo sapiens
cagggtcagccactt

SEQ ID NO: 826895 - DNA, 15 bp, Homo sapiens
agggtcagccacttc

SEQ ID NO: 826896 - DNA, 15 bp, Homo sapiens
gggtcagccacttca

SEQ ID NO: 826897 - DNA, 15 bp, Homo sapiens
ggtcagccacttcat

SEQ ID NO: 826898 - DNA, 15 bp, Homo sapiens
gtcagccacttcatt

SEQ ID NO: 826899 - DNA, 15 bp, Homo sapiens
tcagccacttcattt

SEQ ID NO: 826900 - DNA, 15 bp, Homo sapiens
cagccacttcatttc

SEQ ID NO: 826901 - DNA, 15 bp, Homo sapiens
agccacttcatttca

SEQ ID NO: 826902 - DNA, 15 bp, Homo sapiens
gccacttcatttcac

SEQ ID NO: 826903 - DNA, 15 bp, Homo sapiens
ccacttcatttcacc

SEQ ID NO: 826904 - DNA, 15 bp, Homo sapiens
cacttcatttcacct

SEQ ID NO: 826905 - DNA, 15 bp, Homo sapiens
acttcatttcacctt

SEQ ID NO: 826906 - DNA, 15 bp, Homo sapiens
cttcatttcaccttt

SEQ ID NO: 826907 - DNA, 15 bp, Homo sapiens
ttcatttcacctttt

SEQ ID NO: 826908 - DNA, 15 bp, Homo sapiens
tcatttcaccttttg

SEQ ID NO: 826909 - DNA, 15 bp, Homo sapiens
catttcaccttttgg

SEQ ID NO: 826910 - DNA, 15 bp, Homo sapiens
atttcaccttttgga

SEQ ID NO: 826911 - DNA, 15 bp, Homo sapiens
tttcaccttttggat

SEQ ID NO: 826912 - DNA, 15 bp, Homo sapiens
ttcaccttttggatg

SEQ ID NO: 826913 - DNA, 15 bp, Homo sapiens
tcaccttttggatgg

SEQ ID NO: 826914 - DNA, 15 bp, Homo sapiens
caccttttggatggt

SEQ ID NO: 826915 - DNA, 15 bp, Homo sapiens
accttttggatggtt

SEQ ID NO: 826916 - DNA, 15 bp, Homo sapiens
ccttttggatggttg

SEQ ID NO: 826917 - DNA, 15 bp, Homo sapiens
cttttggatggttgt

SEQ ID NO: 826918 - DNA, 15 bp, Homo sapiens
ttttggatggttgtt

SEQ ID NO: 826919 - DNA, 15 bp, Homo sapiens
tttggatggttgttt

SEQ ID NO: 826920 - DNA, 15 bp, Homo sapiens
ttggatggttgtttt

SEQ ID NO: 826921 - DNA, 15 bp, Homo sapiens
tggatggttgttttc

SEQ ID NO: 826922 - DNA, 15 bp, Homo sapiens
ggatggttgttttct

SEQ ID NO: 826923 - DNA, 15 bp, Homo sapiens
gatggttgttttctt

SEQ ID NO: 826924 - DNA, 15 bp, Homo sapiens
atggttgttttcttc

SEQ ID NO: 826925 - DNA, 15 bp, Homo sapiens
tggttgttttcttct

SEQ ID NO: 826926 - DNA, 15 bp, Homo sapiens
ggttgttttcttctt

SEQ ID NO: 826927 - DNA, 15 bp, Homo sapiens
gttgttttcttcttc

SEQ ID NO: 826928 - DNA, 15 bp, Homo sapiens
ttgttttcttcttca

SEQ ID NO: 826929 - DNA, 15 bp, Homo sapiens
tgttttcttcttcac

SEQ ID NO: 826930 - DNA, 15 bp, Homo sapiens
gttttcttcttcact

SEQ ID NO: 826931 - DNA, 15 bp, Homo sapiens
ttttcttcttcactg

SEQ ID NO: 826932 - DNA, 15 bp, Homo sapiens
tttcttcttcactgt

SEQ ID NO: 826933 - DNA, 15 bp, Homo sapiens
ttcttcttcactgtg

SEQ ID NO: 826934 - DNA, 15 bp, Homo sapiens
tcttcttcactgtga

SEQ ID NO: 826935 - DNA, 15 bp, Homo sapiens
cttcttcactgtgat

SEQ ID NO: 826936 - DNA, 15 bp, Homo sapiens
ttcttcactgtgatc

SEQ ID NO: 826937 - DNA, 15 bp, Homo sapiens
tcttcactgtgatct

SEQ ID NO: 826938 - DNA, 15 bp, Homo sapiens
cttcactgtgatctc

SEQ ID NO: 826939 - DNA, 15 bp, Homo sapiens
ttcactgtgatctct

SEQ ID NO: 826940 - DNA, 15 bp, Homo sapiens
tcactgtgatctctg

SEQ ID NO: 826941 - DNA, 15 bp, Homo sapiens
cactgtgatctctgc

SEQ ID NO: 826942 - DNA, 15 bp, Homo sapiens
actgtgatctctgca

SEQ ID NO: 826943 - DNA, 15 bp, Homo sapiens
ctgtgatctctgcat

SEQ ID NO: 826944 - DNA, 15 bp, Homo sapiens
tgtgatctctgcatc

SEQ ID NO: 826945 - DNA, 15 bp, Homo sapiens
gtgatctctgcatcc

SEQ ID NO: 826946 - DNA, 15 bp, Homo sapiens
tgatctctgcatccc

SEQ ID NO: 826947 - DNA, 15 bp, Homo sapiens
gatctctgcatccca

SEQ ID NO: 826948 - DNA, 15 bp, Homo sapiens
atctctgcatcccaa

SEQ ID NO: 826949 - DNA, 15 bp, Homo sapiens
tctctgcatcccaac

SEQ ID NO: 826950 - DNA, 15 bp, Homo sapiens
ctctgcatcccaacc

SEQ ID NO: 826951 - DNA, 15 bp, Homo sapiens
tctgcatcccaacca

SEQ ID NO: 826952 - DNA, 15 bp, Homo sapiens
ctgcatcccaaccac

SEQ ID NO: 826953 - DNA, 15 bp, Homo sapiens
tgcatcccaaccacc

SEQ ID NO: 826954 - DNA, 15 bp, Homo sapiens
gcatcccaaccaccc

SEQ ID NO: 826955 - DNA, 15 bp, Homo sapiens
catcccaaccacccc

SEQ ID NO: 826956 - DNA, 15 bp, Homo sapiens
atcccaaccaccccc

SEQ ID NO: 826957 - DNA, 15 bp, Homo sapiens
tcccaaccacccccc

SEQ ID NO: 826958 - DNA, 15 bp, Homo sapiens
cccaaccaccccccc

SEQ ID NO: 826959 - DNA, 15 bp, Homo sapiens
ccaaccaccccccca

SEQ ID NO: 826960 - DNA, 15 bp, Homo sapiens
caaccacccccccat

SEQ ID NO: 826961 - DNA, 15 bp, Homo sapiens
aaccacccccccatc

SEQ ID NO: 826962 - DNA, 15 bp, Homo sapiens
accacccccccatca

SEQ ID NO: 826963 - DNA, 15 bp, Homo sapiens
ccacccccccatcaa

SEQ ID NO: 826964 - DNA, 15 bp, Homo sapiens
cacccccccatcaac

SEQ ID NO: 826965 - DNA, 15 bp, Homo sapiens
acccccccatcaacc

SEQ ID NO: 826966 - DNA, 15 bp, Homo sapiens
cccccccatcaacct

SEQ ID NO: 826967 - DNA, 15 bp, Homo sapiens
ccccccatcaacctc

SEQ ID NO: 826968 - DNA, 15 bp, Homo sapiens
cccccatcaacctca

SEQ ID NO: 826969 - DNA, 15 bp, Homo sapiens
ccccatcaacctcag

SEQ ID NO: 826970 - DNA, 15 bp, Homo sapiens
cccatcaacctcagt

SEQ ID NO: 826971 - DNA, 15 bp, Homo sapiens
ccatcaacctcagtc

SEQ ID NO: 826972 - DNA, 15 bp, Homo sapiens
catcaacctcagtct

SEQ ID NO: 826973 - DNA, 15 bp, Homo sapiens
atcaacctcagtctt

SEQ ID NO: 826974 - DNA, 15 bp, Homo sapiens
tcaacctcagtcttt

SEQ ID NO: 826975 - DNA, 15 bp, Homo sapiens
caacctcagtcttta

SEQ ID NO: 826976 - DNA, 15 bp, Homo sapiens
aacctcagtctttat

SEQ ID NO: 826977 - DNA, 15 bp, Homo sapiens
acctcagtctttatg

SEQ ID NO: 826978 - DNA, 15 bp, Homo sapiens
cctcagtctttatgt

SEQ ID NO: 826979 - DNA, 15 bp, Homo sapiens
ctcagtctttatgta

SEQ ID NO: 826980 - DNA, 15 bp, Homo sapiens
tcagtctttatgtat

SEQ ID NO: 826981 - DNA, 15 bp, Homo sapiens
cagtctttatgtatt

SEQ ID NO: 826982 - DNA, 15 bp, Homo sapiens
agtctttatgtattg

SEQ ID NO: 826983 - DNA, 15 bp, Homo sapiens
gtctttatgtattga

SEQ ID NO: 826984 - DNA, 15 bp, Homo sapiens
tctttatgtattgac

SEQ ID NO: 826985 - DNA, 15 bp, Homo sapiens
ctttatgtattgacc

SEQ ID NO: 826986 - DNA, 15 bp, Homo sapiens
tttatgtattgacca

SEQ ID NO: 826987 - DNA, 15 bp, Homo sapiens
ttatgtattgaccaa

SEQ ID NO: 826988 - DNA, 15 bp, Homo sapiens
tatgtattgaccaaa

SEQ ID NO: 826989 - DNA, 15 bp, Homo sapiens
atgtattgaccaaag

SEQ ID NO: 826990 - DNA, 15 bp, Homo sapiens
tgtattgaccaaaga

SEQ ID NO: 826991 - DNA, 15 bp, Homo sapiens
gtattgaccaaagac

SEQ ID NO: 826992 - DNA, 15 bp, Homo sapiens
tattgaccaaagaca

SEQ ID NO: 826993 - DNA, 15 bp, Homo sapiens
attgaccaaagacat

SEQ ID NO: 826994 - DNA, 15 bp, Homo sapiens
ttgaccaaagacatt

SEQ ID NO: 826995 - DNA, 15 bp, Homo sapiens
tgaccaaagacattt

SEQ ID NO: 826996 - DNA, 15 bp, Homo sapiens
gaccaaagacatttt

SEQ ID NO: 826997 - DNA, 15 bp, Homo sapiens
accaaagacattttt

SEQ ID NO: 826998 - DNA, 15 bp, Homo sapiens
ccaaagacattttta

SEQ ID NO: 826999 - DNA, 15 bp, Homo sapiens
caaagacatttttaa

SEQ ID NO: 827000 - DNA, 15 bp, Homo sapiens
aaagacatttttaat

SEQ ID NO: 827001 - DNA, 15 bp, Homo sapiens
aagacatttttaata

SEQ ID NO: 827002 - DNA, 15 bp, Homo sapiens
agacatttttaatat

SEQ ID NO: 827003 - DNA, 15 bp, Homo sapiens
gacatttttaatatt

SEQ ID NO: 827004 - DNA, 15 bp, Homo sapiens
acatttttaatattc

SEQ ID NO: 827005 - DNA, 15 bp, Homo sapiens
catttttaatattct

SEQ ID NO: 827006 - DNA, 15 bp, Homo sapiens
atttttaatattctg

SEQ ID NO: 827007 - DNA, 15 bp, Homo sapiens
tttttaatattctgt

SEQ ID NO: 827008 - DNA, 15 bp, Homo sapiens
ttttaatattctgtt

SEQ ID NO: 827009 - DNA, 15 bp, Homo sapiens
tttaatattctgttt

SEQ ID NO: 827010 - DNA, 15 bp, Homo sapiens
ttaatattctgttta

SEQ ID NO: 827011 - DNA, 15 bp, Homo sapiens
taatattctgtttat

SEQ ID NO: 827012 - DNA, 15 bp, Homo sapiens
aatattctgtttatc

SEQ ID NO: 827013 - DNA, 15 bp, Homo sapiens
atattctgtttatca

SEQ ID NO: 827014 - DNA, 15 bp, Homo sapiens
tattctgtttatcat

SEQ ID NO: 827015 - DNA, 15 bp, Homo sapiens
attctgtttatcatt

SEQ ID NO: 827016 - DNA, 15 bp, Homo sapiens
ttctgtttatcattg

SEQ ID NO: 827017 - DNA, 15 bp, Homo sapiens
tctgtttatcattgt

SEQ ID NO: 827018 - DNA, 15 bp, Homo sapiens
ctgtttatcattgtg

SEQ ID NO: 827019 - DNA, 15 bp, Homo sapiens
tgtttatcattgtgg

SEQ ID NO: 827020 - DNA, 15 bp, Homo sapiens
gtttatcattgtgga

SEQ ID NO: 827021 - DNA, 15 bp, Homo sapiens
tttatcattgtggag

SEQ ID NO: 827022 - DNA, 15 bp, Homo sapiens
ttatcattgtggaga

SEQ ID NO: 827023 - DNA, 15 bp, Homo sapiens
tatcattgtggagat

SEQ ID NO: 827024 - DNA, 15 bp, Homo sapiens
atcattgtggagata

SEQ ID NO: 827025 - DNA, 15 bp, Homo sapiens
tcattgtggagatag

SEQ ID NO: 827026 - DNA, 15 bp, Homo sapiens
cattgtggagataga

SEQ ID NO: 827027 - DNA, 15 bp, Homo sapiens
attgtggagatagac

SEQ ID NO: 827028 - DNA, 15 bp, Homo sapiens
ttgtggagatagaca

SEQ ID NO: 827029 - DNA, 15 bp, Homo sapiens
tgtggagatagacat

SEQ ID NO: 827030 - DNA, 15 bp, Homo sapiens
gtggagatagacata

SEQ ID NO: 827031 - DNA, 15 bp, Homo sapiens
tggagatagacatat

SEQ ID NO: 827032 - DNA, 15 bp, Homo sapiens
ggagatagacatatg

SEQ ID NO: 827033 - DNA, 15 bp, Homo sapiens
gagatagacatatgt

SEQ ID NO: 827034 - DNA, 15 bp, Homo sapiens
agatagacatatgtg

SEQ ID NO: 827035 - DNA, 15 bp, Homo sapiens
gatagacatatgtgt

SEQ ID NO: 827036 - DNA, 15 bp, Homo sapiens
atagacatatgtgtg

SEQ ID NO: 827037 - DNA, 15 bp, Homo sapiens
tagacatatgtgtgt

SEQ ID NO: 827038 - DNA, 15 bp, Homo sapiens
agacatatgtgtgtg

SEQ ID NO: 827039 - DNA, 15 bp, Homo sapiens
gacatatgtgtgtgt

SEQ ID NO: 827040 - DNA, 15 bp, Homo sapiens
acatatgtgtgtgta

SEQ ID NO: 827041 - DNA, 15 bp, Homo sapiens
catatgtgtgtgtat

SEQ ID NO: 827042 - DNA, 15 bp, Homo sapiens
atatgtgtgtgtata

SEQ ID NO: 827043 - DNA, 15 bp, Homo sapiens
atgtgtgtgtatatg

SEQ ID NO: 827044 - DNA, 15 bp, Homo sapiens
tgtgtgtgtatatgt

SEQ ID NO: 827045 - DNA, 15 bp, Homo sapiens
gtgtgtgtatatgtc

SEQ ID NO: 827046 - DNA, 15 bp, Homo sapiens
tgtgtgtatatgtct

SEQ ID NO: 827047 - DNA, 15 bp, Homo sapiens
gtgtgtatatgtctt

SEQ ID NO: 827048 - DNA, 15 bp, Homo sapiens
tgtgtatatgtcttt

SEQ ID NO: 827049 - DNA, 15 bp, Homo sapiens
gtgtatatgtctttc

SEQ ID NO: 827050 - DNA, 15 bp, Homo sapiens
tgtatatgtctttct

SEQ ID NO: 827051 - DNA, 15 bp, Homo sapiens
gtatatgtctttctt

SEQ ID NO: 827052 - DNA, 15 bp, Homo sapiens
tatatgtctttcttt

SEQ ID NO: 827053 - DNA, 15 bp, Homo sapiens
atatgtctttctttc

SEQ ID NO: 827054 - DNA, 15 bp, Homo sapiens
tatgtctttctttct

SEQ ID NO: 827055 - DNA, 15 bp, Homo sapiens
atgtctttctttctc

SEQ ID NO: 827056 - DNA, 15 bp, Homo sapiens
tgtctttctttctca

SEQ ID NO: 827057 - DNA, 15 bp, Homo sapiens
gtctttctttctcat

SEQ ID NO: 827058 - DNA, 15 bp, Homo sapiens
tctttctttctcatt

SEQ ID NO: 827059 - DNA, 15 bp, Homo sapiens
ctttctttctcatta

SEQ ID NO: 827060 - DNA, 15 bp, Homo sapiens
tttctttctcattat

SEQ ID NO: 827061 - DNA, 15 bp, Homo sapiens
ttctttctcattatg

SEQ ID NO: 827062 - DNA, 15 bp, Homo sapiens
tctttctcattatgg

SEQ ID NO: 827063 - DNA, 15 bp, Homo sapiens
ctttctcattatgga

SEQ ID NO: 827064 - DNA, 15 bp, Homo sapiens
tttctcattatggaa

SEQ ID NO: 827065 - DNA, 15 bp, Homo sapiens
ttctcattatggaaa

SEQ ID NO: 827066 - DNA, 15 bp, Homo sapiens
tctcattatggaaat

SEQ ID NO: 827067 - DNA, 15 bp, Homo sapiens
ctcattatggaaata

SEQ ID NO: 827068 - DNA, 15 bp, Homo sapiens
tcattatggaaatat

SEQ ID NO: 827069 - DNA, 15 bp, Homo sapiens
cattatggaaatata

SEQ ID NO: 827070 - DNA, 15 bp, Homo sapiens
attatggaaatatat

SEQ ID NO: 827071 - DNA, 15 bp, Homo sapiens
ttatggaaatatata

SEQ ID NO: 827072 - DNA, 15 bp, Homo sapiens
tatggaaatatatac

SEQ ID NO: 827073 - DNA, 15 bp, Homo sapiens
atggaaatatataca

SEQ ID NO: 827074 - DNA, 15 bp, Homo sapiens
tggaaatatatacat

SEQ ID NO: 827075 - DNA, 15 bp, Homo sapiens
ggaaatatatacatg

SEQ ID NO: 827076 - DNA, 15 bp, Homo sapiens
gaaatatatacatgg

SEQ ID NO: 827077 - DNA, 15 bp, Homo sapiens
aaatatatacatgga

SEQ ID NO: 827078 - DNA, 15 bp, Homo sapiens
aatatatacatggaa

SEQ ID NO: 827079 - DNA, 15 bp, Homo sapiens
atatatacatggaaa

SEQ ID NO: 827080 - DNA, 15 bp, Homo sapiens
tatatacatggaaaa

SEQ ID NO: 827081 - DNA, 15 bp, Homo sapiens
atatacatggaaaat

SEQ ID NO: 827082 - DNA, 15 bp, Homo sapiens
tatacatggaaaata

SEQ ID NO: 827083 - DNA, 15 bp, Homo sapiens
atacatggaaaatat

SEQ ID NO: 827084 - DNA, 15 bp, Homo sapiens
tacatggaaaatata

SEQ ID NO: 827085 - DNA, 15 bp, Homo sapiens
acatggaaaatatat

SEQ ID NO: 827086 - DNA, 15 bp, Homo sapiens
catggaaaatatatg

SEQ ID NO: 827087 - DNA, 15 bp, Homo sapiens
atggaaaatatatgt

SEQ ID NO: 827088 - DNA, 15 bp, Homo sapiens
tggaaaatatatgta

SEQ ID NO: 827089 - DNA, 15 bp, Homo sapiens
ggaaaatatatgtat

SEQ ID NO: 827090 - DNA, 15 bp, Homo sapiens
gaaaatatatgtata

SEQ ID NO: 827091 - DNA, 15 bp, Homo sapiens
aaaatatatgtatat

SEQ ID NO: 827092 - DNA, 15 bp, Homo sapiens
aaatatatgtatatg

SEQ ID NO: 827093 - DNA, 15 bp, Homo sapiens
aatatatgtatatgt

SEQ ID NO: 827094 - DNA, 15 bp, Homo sapiens
atatatgtatatgtt

SEQ ID NO: 827095 - DNA, 15 bp, Homo sapiens
tatatgtatatgttt

SEQ ID NO: 827096 - DNA, 15 bp, Homo sapiens
atatgtatatgttta

SEQ ID NO: 827097 - DNA, 15 bp, Homo sapiens
tatgtatatgtttat

SEQ ID NO: 827098 - DNA, 15 bp, Homo sapiens
atgtatatgtttata

SEQ ID NO: 827099 - DNA, 15 bp, Homo sapiens
tgtatatgtttatat

SEQ ID NO: 827100 - DNA, 15 bp, Homo sapiens
gtatatgtttatata

SEQ ID NO: 827101 - DNA, 15 bp, Homo sapiens
tatatgtttatataa

SEQ ID NO: 827102 - DNA, 15 bp, Homo sapiens
atatgtttatataaa

SEQ ID NO: 827103 - DNA, 15 bp, Homo sapiens
tatgtttatataaat

SEQ ID NO: 827104 - DNA, 15 bp, Homo sapiens
atgtttatataaata

SEQ ID NO: 827105 - DNA, 15 bp, Homo sapiens
tgtttatataaatat

SEQ ID NO: 827106 - DNA, 15 bp, Homo sapiens
gtttatataaatata

SEQ ID NO: 827107 - DNA, 15 bp, Homo sapiens
tttatataaatataa

SEQ ID NO: 827108 - DNA, 15 bp, Homo sapiens
ttatataaatataaa

SEQ ID NO: 827109 - DNA, 15 bp, Homo sapiens
tatataaatataaat

SEQ ID NO: 827110 - DNA, 15 bp, Homo sapiens
atataaatataaata

SEQ ID NO: 827111 - DNA, 15 bp, Homo sapiens
tataaatataaataa

SEQ ID NO: 827112 - DNA, 15 bp, Homo sapiens
ataaatataaataaa

SEQ ID NO: 827113 - DNA, 15 bp, Homo sapiens
taaatataaataaat

SEQ ID NO: 827114 - DNA, 15 bp, Homo sapiens
aaatataaataaata

SEQ ID NO: 827115 - DNA, 15 bp, Homo sapiens
aatataaataaatac

SEQ ID NO: 827116 - DNA, 15 bp, Homo sapiens
atataaataaataca

SEQ ID NO: 827117 - DNA, 15 bp, Homo sapiens
tataaataaatacat

SEQ ID NO: 827118 - DNA, 15 bp, Homo sapiens
ataaataaatacata

SEQ ID NO: 827119 - DNA, 15 bp, Homo sapiens
taaataaatacatat

SEQ ID NO: 827120 - DNA, 15 bp, Homo sapiens
aaataaatacatata

SEQ ID NO: 827121 - DNA, 15 bp, Homo sapiens
aataaatacatatat

SEQ ID NO: 827122 - DNA, 15 bp, Homo sapiens
ataaatacatatata

SEQ ID NO: 827123 - DNA, 15 bp, Homo sapiens
taaatacatatatat

SEQ ID NO: 827124 - DNA, 15 bp, Homo sapiens
aaatacatatatatg

SEQ ID NO: 827125 - DNA, 15 bp, Homo sapiens
aatacatatatatgt

SEQ ID NO: 827126 - DNA, 15 bp, Homo sapiens
atacatatatatgta

SEQ ID NO: 827127 - DNA, 15 bp, Homo sapiens
tacatatatatgtat

SEQ ID NO: 827128 - DNA, 15 bp, Homo sapiens
acatatatatgtatg

SEQ ID NO: 827129 - DNA, 15 bp, Homo sapiens
catatatatgtatgc

SEQ ID NO: 827130 - DNA, 15 bp, Homo sapiens
atatatatgtatgcc

SEQ ID NO: 827131 - DNA, 15 bp, Homo sapiens
tatatatgtatgcca

SEQ ID NO: 827132 - DNA, 15 bp, Homo sapiens
atatatgtatgccaa

SEQ ID NO: 827133 - DNA, 15 bp, Homo sapiens
tatatgtatgccaag

SEQ ID NO: 827134 - DNA, 15 bp, Homo sapiens
atatgtatgccaagt

SEQ ID NO: 827135 - DNA, 15 bp, Homo sapiens
tatgtatgccaagtc

SEQ ID NO: 827136 - DNA, 15 bp, Homo sapiens
atgtatgccaagtca

SEQ ID NO: 827137 - DNA, 15 bp, Homo sapiens
tgtatgccaagtcag

SEQ ID NO: 827138 - DNA, 15 bp, Homo sapiens
gtatgccaagtcagt

SEQ ID NO: 827139 - DNA, 15 bp, Homo sapiens
tatgccaagtcagtt

SEQ ID NO: 827140 - DNA, 15 bp, Homo sapiens
atgccaagtcagttt

SEQ ID NO: 827141 - DNA, 15 bp, Homo sapiens
tgccaagtcagtttc

SEQ ID NO: 827142 - DNA, 15 bp, Homo sapiens
gccaagtcagtttct

SEQ ID NO: 827143 - DNA, 15 bp, Homo sapiens
ccaagtcagtttcta

SEQ ID NO: 827144 - DNA, 15 bp, Homo sapiens
caagtcagtttctaa

SEQ ID NO: 827145 - DNA, 15 bp, Homo sapiens
aagtcagtttctaac

SEQ ID NO: 827146 - DNA, 15 bp, Homo sapiens
agtcagtttctaaca

SEQ ID NO: 827147 - DNA, 15 bp, Homo sapiens
gtcagtttctaacag

SEQ ID NO: 827148 - DNA, 15 bp, Homo sapiens
tcagtttctaacaga

SEQ ID NO: 827149 - DNA, 15 bp, Homo sapiens
cagtttctaacagag

SEQ ID NO: 827150 - DNA, 15 bp, Homo sapiens
agtttctaacagagt

SEQ ID NO: 827151 - DNA, 15 bp, Homo sapiens
gtttctaacagagta

SEQ ID NO: 827152 - DNA, 15 bp, Homo sapiens
tttctaacagagtat

SEQ ID NO: 827153 - DNA, 15 bp, Homo sapiens
ttctaacagagtatc

SEQ ID NO: 827154 - DNA, 15 bp, Homo sapiens
tctaacagagtatct

SEQ ID NO: 827155 - DNA, 15 bp, Homo sapiens
ctaacagagtatcta

SEQ ID NO: 827156 - DNA, 15 bp, Homo sapiens
taacagagtatctac

SEQ ID NO: 827157 - DNA, 15 bp, Homo sapiens
aacagagtatctacc

SEQ ID NO: 827158 - DNA, 15 bp, Homo sapiens
acagagtatctaccc

SEQ ID NO: 827159 - DNA, 15 bp, Homo sapiens
cagagtatctaccca

SEQ ID NO: 827160 - DNA, 15 bp, Homo sapiens
agagtatctacccac

SEQ ID NO: 827161 - DNA, 15 bp, Homo sapiens
gagtatctacccaca

SEQ ID NO: 827162 - DNA, 15 bp, Homo sapiens
agtatctacccacat

SEQ ID NO: 827163 - DNA, 15 bp, Homo sapiens
gtatctacccacatt

SEQ ID NO: 827164 - DNA, 15 bp, Homo sapiens
tatctacccacattt

SEQ ID NO: 827165 - DNA, 15 bp, Homo sapiens
atctacccacatttt

SEQ ID NO: 827166 - DNA, 15 bp, Homo sapiens
tctacccacattttg

SEQ ID NO: 827167 - DNA, 15 bp, Homo sapiens
ctacccacattttgt

SEQ ID NO: 827168 - DNA, 15 bp, Homo sapiens
tacccacattttgtg

SEQ ID NO: 827169 - DNA, 15 bp, Homo sapiens
acccacattttgtgt

SEQ ID NO: 827170 - DNA, 15 bp, Homo sapiens
cccacattttgtgtt

SEQ ID NO: 827171 - DNA, 15 bp, Homo sapiens
ccacattttgtgttc

SEQ ID NO: 827172 - DNA, 15 bp, Homo sapiens
cacattttgtgttcg

SEQ ID NO: 827173 - DNA, 15 bp, Homo sapiens
acattttgtgttcgt

SEQ ID NO: 827174 - DNA, 15 bp, Homo sapiens
cattttgtgttcgtc

SEQ ID NO: 827175 - DNA, 15 bp, Homo sapiens
attttgtgttcgtct

SEQ ID NO: 827176 - DNA, 15 bp, Homo sapiens
ttttgtgttcgtctg

SEQ ID NO: 827177 - DNA, 15 bp, Homo sapiens
tttgtgttcgtctgt

SEQ ID NO: 827178 - DNA, 15 bp, Homo sapiens
ttgtgttcgtctgtt

SEQ ID NO: 827179 - DNA, 15 bp, Homo sapiens
tgtgttcgtctgttc

SEQ ID NO: 827180 - DNA, 15 bp, Homo sapiens
gtgttcgtctgttct

SEQ ID NO: 827181 - DNA, 15 bp, Homo sapiens
tgttcgtctgttctg

SEQ ID NO: 827182 - DNA, 15 bp, Homo sapiens
gttcgtctgttctgt

SEQ ID NO: 827183 - DNA, 15 bp, Homo sapiens
ttcgtctgttctgtg

SEQ ID NO: 827184 - DNA, 15 bp, Homo sapiens
tcgtctgttctgtgt

SEQ ID NO: 827185 - DNA, 15 bp, Homo sapiens
cgtctgttctgtgtt

SEQ ID NO: 827186 - DNA, 15 bp, Homo sapiens
gtctgttctgtgttg

SEQ ID NO: 827187 - DNA, 15 bp, Homo sapiens
tctgttctgtgttgt

SEQ ID NO: 827188 - DNA, 15 bp, Homo sapiens
ctgttctgtgttgta

SEQ ID NO: 827189 - DNA, 15 bp, Homo sapiens
tgttctgtgttgtaa

SEQ ID NO: 827190 - DNA, 15 bp, Homo sapiens
gttctgtgttgtaat

SEQ ID NO: 827191 - DNA, 15 bp, Homo sapiens
ttctgtgttgtaatc

SEQ ID NO: 827192 - DNA, 15 bp, Homo sapiens
tctgtgttgtaatct

SEQ ID NO: 827193 - DNA, 15 bp, Homo sapiens
ctgtgttgtaatctc

SEQ ID NO: 827194 - DNA, 15 bp, Homo sapiens
tgtgttgtaatctcc

SEQ ID NO: 827195 - DNA, 15 bp, Homo sapiens
gtgttgtaatctcct

SEQ ID NO: 827196 - DNA, 15 bp, Homo sapiens
tgttgtaatctcctc

SEQ ID NO: 827197 - DNA, 15 bp, Homo sapiens
gttgtaatctcctct

SEQ ID NO: 827198 - DNA, 15 bp, Homo sapiens
ttgtaatctcctctt

SEQ ID NO: 827199 - DNA, 15 bp, Homo sapiens
tgtaatctcctcttc

SEQ ID NO: 827200 - DNA, 15 bp, Homo sapiens
gtaatctcctcttcc

SEQ ID NO: 827201 - DNA, 15 bp, Homo sapiens
taatctcctcttcca

SEQ ID NO: 827202 - DNA, 15 bp, Homo sapiens
aatctcctcttccat

SEQ ID NO: 827203 - DNA, 15 bp, Homo sapiens
atctcctcttccatt

SEQ ID NO: 827204 - DNA, 15 bp, Homo sapiens
tctcctcttccattc

SEQ ID NO: 827205 - DNA, 15 bp, Homo sapiens
ctcctcttccattct

SEQ ID NO: 827206 - DNA, 15 bp, Homo sapiens
tcctcttccattctt

SEQ ID NO: 827207 - DNA, 15 bp, Homo sapiens
cctcttccattcttt

SEQ ID NO: 827208 - DNA, 15 bp, Homo sapiens
ctcttccattctttt

SEQ ID NO: 827209 - DNA, 15 bp, Homo sapiens
tcttccattcttttt

SEQ ID NO: 827210 - DNA, 15 bp, Homo sapiens
cttccattctttttg

SEQ ID NO: 827211 - DNA, 15 bp, Homo sapiens
ttccattctttttgt

SEQ ID NO: 827212 - DNA, 15 bp, Homo sapiens
tccattctttttgtt

SEQ ID NO: 827213 - DNA, 15 bp, Homo sapiens
ccattctttttgttc

SEQ ID NO: 827214 - DNA, 15 bp, Homo sapiens
cattctttttgttct

SEQ ID NO: 827215 - DNA, 15 bp, Homo sapiens
attctttttgttctt

SEQ ID NO: 827216 - DNA, 15 bp, Homo sapiens
ttctttttgttcttg

SEQ ID NO: 827217 - DNA, 15 bp, Homo sapiens
tctttttgttcttgt

SEQ ID NO: 827218 - DNA, 15 bp, Homo sapiens
ctttttgttcttgtg

SEQ ID NO: 827219 - DNA, 15 bp, Homo sapiens
tttttgttcttgtgg

SEQ ID NO: 827220 - DNA, 15 bp, Homo sapiens
ttttgttcttgtggg

SEQ ID NO: 827221 - DNA, 15 bp, Homo sapiens
tttgttcttgtggga

SEQ ID NO: 827222 - DNA, 15 bp, Homo sapiens
ttgttcttgtgggat

SEQ ID NO: 827223 - DNA, 15 bp, Homo sapiens
tgttcttgtgggatt

SEQ ID NO: 827224 - DNA, 15 bp, Homo sapiens
gttcttgtgggattc

SEQ ID NO: 827225 - DNA, 15 bp, Homo sapiens
ttcttgtgggattct

SEQ ID NO: 827226 - DNA, 15 bp, Homo sapiens
tcttgtgggattctg

SEQ ID NO: 827227 - DNA, 15 bp, Homo sapiens
cttgtgggattctgc

SEQ ID NO: 827228 - DNA, 15 bp, Homo sapiens
ttgtgggattctgct

SEQ ID NO: 827229 - DNA, 15 bp, Homo sapiens
tgtgggattctgctg

SEQ ID NO: 827230 - DNA, 15 bp, Homo sapiens
gtgggattctgctgt

SEQ ID NO: 827231 - DNA, 15 bp, Homo sapiens
tgggattctgctgtt

SEQ ID NO: 827232 - DNA, 15 bp, Homo sapiens
gggattctgctgttt

SEQ ID NO: 827233 - DNA, 15 bp, Homo sapiens
ggattctgctgtttc

SEQ ID NO: 827234 - DNA, 15 bp, Homo sapiens
gattctgctgtttcc

SEQ ID NO: 827235 - DNA, 15 bp, Homo sapiens
attctgctgtttcct

SEQ ID NO: 827236 - DNA, 15 bp, Homo sapiens
ttctgctgtttccta

SEQ ID NO: 827237 - DNA, 15 bp, Homo sapiens
tctgctgtttcctac

SEQ ID NO: 827238 - DNA, 15 bp, Homo sapiens
ctgctgtttcctacc

SEQ ID NO: 827239 - DNA, 15 bp, Homo sapiens
tgctgtttcctaccc

SEQ ID NO: 827240 - DNA, 15 bp, Homo sapiens
gctgtttcctacccc

SEQ ID NO: 827241 - DNA, 15 bp, Homo sapiens
ctgtttcctaccccc

SEQ ID NO: 827242 - DNA, 15 bp, Homo sapiens
tgtttcctaccccct

SEQ ID NO: 827243 - DNA, 15 bp, Homo sapiens
gtttcctaccccctc

SEQ ID NO: 827244 - DNA, 15 bp, Homo sapiens
tttcctaccccctca

SEQ ID NO: 827245 - DNA, 15 bp, Homo sapiens
ttcctaccccctcaa

SEQ ID NO: 827246 - DNA, 15 bp, Homo sapiens
tcctaccccctcaac

SEQ ID NO: 827247 - DNA, 15 bp, Homo sapiens
cctaccccctcaaca

SEQ ID NO: 827248 - DNA, 15 bp, Homo sapiens
ctaccccctcaacat

SEQ ID NO: 827249 - DNA, 15 bp, Homo sapiens
taccccctcaacatt

SEQ ID NO: 827250 - DNA, 15 bp, Homo sapiens
accccctcaacattt

SEQ ID NO: 827251 - DNA, 15 bp, Homo sapiens
ccccctcaacatttg

SEQ ID NO: 827252 - DNA, 15 bp, Homo sapiens
cccctcaacatttgt

SEQ ID NO: 827253 - DNA, 15 bp, Homo sapiens
ccctcaacatttgta

SEQ ID NO: 827254 - DNA, 15 bp, Homo sapiens
cctcaacatttgtat

SEQ ID NO: 827255 - DNA, 15 bp, Homo sapiens
ctcaacatttgtatt

SEQ ID NO: 827256 - DNA, 15 bp, Homo sapiens
tcaacatttgtatta

SEQ ID NO: 827257 - DNA, 15 bp, Homo sapiens
caacatttgtattag

SEQ ID NO: 827258 - DNA, 15 bp, Homo sapiens
aacatttgtattagt

SEQ ID NO: 827259 - DNA, 15 bp, Homo sapiens
acatttgtattagtt

SEQ ID NO: 827260 - DNA, 15 bp, Homo sapiens
catttgtattagttt

SEQ ID NO: 827261 - DNA, 15 bp, Homo sapiens
atttgtattagttta

SEQ ID NO: 827262 - DNA, 15 bp, Homo sapiens
tttgtattagtttag

SEQ ID NO: 827263 - DNA, 15 bp, Homo sapiens
ttgtattagtttagt

SEQ ID NO: 827264 - DNA, 15 bp, Homo sapiens
tgtattagtttagtg

SEQ ID NO: 827265 - DNA, 15 bp, Homo sapiens
gtattagtttagtga

SEQ ID NO: 827266 - DNA, 15 bp, Homo sapiens
tattagtttagtgaa

SEQ ID NO: 827267 - DNA, 15 bp, Homo sapiens
attagtttagtgaag

SEQ ID NO: 827268 - DNA, 15 bp, Homo sapiens
ttagtttagtgaagt

SEQ ID NO: 827269 - DNA, 15 bp, Homo sapiens
tagtttagtgaagtt

SEQ ID NO: 827270 - DNA, 15 bp, Homo sapiens
agtttagtgaagttt

SEQ ID NO: 827271 - DNA, 15 bp, Homo sapiens
gtttagtgaagtttt

SEQ ID NO: 827272 - DNA, 15 bp, Homo sapiens
tttagtgaagttttg

SEQ ID NO: 827273 - DNA, 15 bp, Homo sapiens
ttagtgaagttttga

SEQ ID NO: 827274 - DNA, 15 bp, Homo sapiens
tagtgaagttttgag

SEQ ID NO: 827275 - DNA, 15 bp, Homo sapiens
agtgaagttttgaga

SEQ ID NO: 827276 - DNA, 15 bp, Homo sapiens
gtgaagttttgagag

SEQ ID NO: 827277 - DNA, 15 bp, Homo sapiens
tgaagttttgagagg

SEQ ID NO: 827278 - DNA, 15 bp, Homo sapiens
gaagttttgagaggg

SEQ ID NO: 827279 - DNA, 15 bp, Homo sapiens
aagttttgagagggg

SEQ ID NO: 827280 - DNA, 15 bp, Homo sapiens
agttttgagaggggg

SEQ ID NO: 827281 - DNA, 15 bp, Homo sapiens
gttttgagagggggc

SEQ ID NO: 827282 - DNA, 15 bp, Homo sapiens
ttttgagagggggca

SEQ ID NO: 827283 - DNA, 15 bp, Homo sapiens
tttgagagggggcag

SEQ ID NO: 827284 - DNA, 15 bp, Homo sapiens
ttgagagggggcaga

SEQ ID NO: 827285 - DNA, 15 bp, Homo sapiens
tgagagggggcagac

SEQ ID NO: 827286 - DNA, 15 bp, Homo sapiens
gagagggggcagaca

SEQ ID NO: 827287 - DNA, 15 bp, Homo sapiens
agagggggcagacat

SEQ ID NO: 827288 - DNA, 15 bp, Homo sapiens
gagggggcagacata

SEQ ID NO: 827289 - DNA, 15 bp, Homo sapiens
agggggcagacataa

SEQ ID NO: 827290 - DNA, 15 bp, Homo sapiens
gggggcagacataaa

SEQ ID NO: 827291 - DNA, 15 bp, Homo sapiens
ggggcagacataaac

SEQ ID NO: 827292 - DNA, 15 bp, Homo sapiens
gggcagacataaacc

SEQ ID NO: 827293 - DNA, 15 bp, Homo sapiens
ggcagacataaacca

SEQ ID NO: 827294 - DNA, 15 bp, Homo sapiens
gcagacataaaccat

SEQ ID NO: 827295 - DNA, 15 bp, Homo sapiens
cagacataaaccatt

SEQ ID NO: 827296 - DNA, 15 bp, Homo sapiens
agacataaaccattg

SEQ ID NO: 827297 - DNA, 15 bp, Homo sapiens
gacataaaccattgt

SEQ ID NO: 827298 - DNA, 15 bp, Homo sapiens
acataaaccattgtg

SEQ ID NO: 827299 - DNA, 15 bp, Homo sapiens
cataaaccattgtga

SEQ ID NO: 827300 - DNA, 15 bp, Homo sapiens
ataaaccattgtgat

SEQ ID NO: 827301 - DNA, 15 bp, Homo sapiens
taaaccattgtgatc

SEQ ID NO: 827302 - DNA, 15 bp, Homo sapiens
aaaccattgtgatcc

SEQ ID NO: 827303 - DNA, 15 bp, Homo sapiens
aaccattgtgatcca

SEQ ID NO: 827304 - DNA, 15 bp, Homo sapiens
accattgtgatccat

SEQ ID NO: 827305 - DNA, 15 bp, Homo sapiens
ccattgtgatccatc

SEQ ID NO: 827306 - DNA, 15 bp, Homo sapiens
cattgtgatccatct

SEQ ID NO: 827307 - DNA, 15 bp, Homo sapiens
attgtgatccatctg

SEQ ID NO: 827308 - DNA, 15 bp, Homo sapiens
ttgtgatccatctgc

SEQ ID NO: 827309 - DNA, 15 bp, Homo sapiens
tgtgatccatctgct

SEQ ID NO: 827310 - DNA, 15 bp, Homo sapiens
gtgatccatctgcta

SEQ ID NO: 827311 - DNA, 15 bp, Homo sapiens
tgatccatctgctat

SEQ ID NO: 827312 - DNA, 15 bp, Homo sapiens
gatccatctgctatg

SEQ ID NO: 827313 - DNA, 15 bp, Homo sapiens
atccatctgctatgt

SEQ ID NO: 827314 - DNA, 15 bp, Homo sapiens
tccatctgctatgtt

SEQ ID NO: 827315 - DNA, 15 bp, Homo sapiens
ccatctgctatgttt

SEQ ID NO: 827316 - DNA, 15 bp, Homo sapiens
catctgctatgttta

SEQ ID NO: 827317 - DNA, 15 bp, Homo sapiens
atctgctatgtttaa

SEQ ID NO: 827318 - DNA, 15 bp, Homo sapiens
tctgctatgtttaac

SEQ ID NO: 827319 - DNA, 15 bp, Homo sapiens
ctgctatgtttaact

SEQ ID NO: 827320 - DNA, 15 bp, Homo sapiens
tgctatgtttaacta

SEQ ID NO: 827321 - DNA, 15 bp, Homo sapiens
gctatgtttaactag

SEQ ID NO: 827322 - DNA, 15 bp, Homo sapiens
ctatgtttaactaga

SEQ ID NO: 827323 - DNA, 15 bp, Homo sapiens
tatgtttaactagaa

SEQ ID NO: 827324 - DNA, 15 bp, Homo sapiens
atgtttaactagaat

SEQ ID NO: 827325 - DNA, 15 bp, Homo sapiens
tgtttaactagaatg

SEQ ID NO: 827326 - DNA, 15 bp, Homo sapiens
gtttaactagaatgc

SEQ ID NO: 827327 - DNA, 15 bp, Homo sapiens
tttaactagaatgct

SEQ ID NO: 827328 - DNA, 15 bp, Homo sapiens
ttaactagaatgctc

SEQ ID NO: 827329 - DNA, 15 bp, Homo sapiens
taactagaatgctct

SEQ ID NO: 827330 - DNA, 15 bp, Homo sapiens
aactagaatgctctg

SEQ ID NO: 827331 - DNA, 15 bp, Homo sapiens
actagaatgctctgg

SEQ ID NO: 827332 - DNA, 15 bp, Homo sapiens
ctagaatgctctgga

SEQ ID NO: 827333 - DNA, 15 bp, Homo sapiens
tagaatgctctggat

SEQ ID NO: 827334 - DNA, 15 bp, Homo sapiens
agaatgctctggatt

SEQ ID NO: 827335 - DNA, 15 bp, Homo sapiens
gaatgctctggatta

SEQ ID NO: 827336 - DNA, 15 bp, Homo sapiens
aatgctctggattat

SEQ ID NO: 827337 - DNA, 15 bp, Homo sapiens
atgctctggattatc

SEQ ID NO: 827338 - DNA, 15 bp, Homo sapiens
tgctctggattatca

SEQ ID NO: 827339 - DNA, 15 bp, Homo sapiens
gctctggattatcat

SEQ ID NO: 827340 - DNA, 15 bp, Homo sapiens
ctctggattatcatt

SEQ ID NO: 827341 - DNA, 15 bp, Homo sapiens
tctggattatcattt

SEQ ID NO: 827342 - DNA, 15 bp, Homo sapiens
ctggattatcatttt

SEQ ID NO: 827343 - DNA, 15 bp, Homo sapiens
tggattatcatttta

SEQ ID NO: 827344 - DNA, 15 bp, Homo sapiens
ggattatcattttaa

SEQ ID NO: 827345 - DNA, 15 bp, Homo sapiens
gattatcattttaat

SEQ ID NO: 827346 - DNA, 15 bp, Homo sapiens
attatcattttaatt

SEQ ID NO: 827347 - DNA, 15 bp, Homo sapiens
ttatcattttaattc

SEQ ID NO: 827348 - DNA, 15 bp, Homo sapiens
tatcattttaattca

SEQ ID NO: 827349 - DNA, 15 bp, Homo sapiens
atcattttaattcat

SEQ ID NO: 827350 - DNA, 15 bp, Homo sapiens
tcattttaattcatt

SEQ ID NO: 827351 - DNA, 15 bp, Homo sapiens
cattttaattcattg

SEQ ID NO: 827352 - DNA, 15 bp, Homo sapiens
attttaattcattga

SEQ ID NO: 827353 - DNA, 15 bp, Homo sapiens
ttttaattcattgat

SEQ ID NO: 827354 - DNA, 15 bp, Homo sapiens
tttaattcattgatg

SEQ ID NO: 827355 - DNA, 15 bp, Homo sapiens
ttaattcattgatga

SEQ ID NO: 827356 - DNA, 15 bp, Homo sapiens
taattcattgatgaa

SEQ ID NO: 827357 - DNA, 15 bp, Homo sapiens
aattcattgatgaat

SEQ ID NO: 827358 - DNA, 15 bp, Homo sapiens
attcattgatgaata

SEQ ID NO: 827359 - DNA, 15 bp, Homo sapiens
ttcattgatgaataa

SEQ ID NO: 827360 - DNA, 15 bp, Homo sapiens
tcattgatgaataat

SEQ ID NO: 827361 - DNA, 15 bp, Homo sapiens
cattgatgaataatt

SEQ ID NO: 827362 - DNA, 15 bp, Homo sapiens
attgatgaataattt

SEQ ID NO: 827363 - DNA, 15 bp, Homo sapiens
ttgatgaataattta

SEQ ID NO: 827364 - DNA, 15 bp, Homo sapiens
tgatgaataatttat

SEQ ID NO: 827365 - DNA, 15 bp, Homo sapiens
gatgaataatttatg

SEQ ID NO: 827366 - DNA, 15 bp, Homo sapiens
atgaataatttatgt

SEQ ID NO: 827367 - DNA, 15 bp, Homo sapiens
tgaataatttatgtt

SEQ ID NO: 827368 - DNA, 15 bp, Homo sapiens
gaataatttatgttg

SEQ ID NO: 827369 - DNA, 15 bp, Homo sapiens
aataatttatgttgg

SEQ ID NO: 827370 - DNA, 15 bp, Homo sapiens
ataatttatgttggt

SEQ ID NO: 827371 - DNA, 15 bp, Homo sapiens
taatttatgttggta

SEQ ID NO: 827372 - DNA, 15 bp, Homo sapiens
aatttatgttggtat

SEQ ID NO: 827373 - DNA, 15 bp, Homo sapiens
atttatgttggtatt

SEQ ID NO: 827374 - DNA, 15 bp, Homo sapiens
tttatgttggtatta

SEQ ID NO: 827375 - DNA, 15 bp, Homo sapiens
ttatgttggtattat

SEQ ID NO: 827376 - DNA, 15 bp, Homo sapiens
tatgttggtattata

SEQ ID NO: 827377 - DNA, 15 bp, Homo sapiens
atgttggtattatat

SEQ ID NO: 827378 - DNA, 15 bp, Homo sapiens
tgttggtattatata

SEQ ID NO: 827379 - DNA, 15 bp, Homo sapiens
gttggtattatatac

SEQ ID NO: 827380 - DNA, 15 bp, Homo sapiens
ttggtattatataca

SEQ ID NO: 827381 - DNA, 15 bp, Homo sapiens
tggtattatatacag

SEQ ID NO: 827382 - DNA, 15 bp, Homo sapiens
ggtattatatacaga

SEQ ID NO: 827383 - DNA, 15 bp, Homo sapiens
gtattatatacagaa

SEQ ID NO: 827384 - DNA, 15 bp, Homo sapiens
tattatatacagaat

SEQ ID NO: 827385 - DNA, 15 bp, Homo sapiens
attatatacagaatt

SEQ ID NO: 827386 - DNA, 15 bp, Homo sapiens
ttatatacagaattt

SEQ ID NO: 827387 - DNA, 15 bp, Homo sapiens
tatatacagaatttt

SEQ ID NO: 827388 - DNA, 15 bp, Homo sapiens
atatacagaattttg

SEQ ID NO: 827389 - DNA, 15 bp, Homo sapiens
tatacagaattttgg

SEQ ID NO: 827390 - DNA, 15 bp, Homo sapiens
atacagaattttggc

SEQ ID NO: 827391 - DNA, 15 bp, Homo sapiens
tacagaattttggca

SEQ ID NO: 827392 - DNA, 15 bp, Homo sapiens
acagaattttggcat

SEQ ID NO: 827393 - DNA, 15 bp, Homo sapiens
cagaattttggcatc

SEQ ID NO: 827394 - DNA, 15 bp, Homo sapiens
agaattttggcatct

SEQ ID NO: 827395 - DNA, 15 bp, Homo sapiens
gaattttggcatcta

SEQ ID NO: 827396 - DNA, 15 bp, Homo sapiens
aattttggcatctat

SEQ ID NO: 827397 - DNA, 15 bp, Homo sapiens
attttggcatctatg

SEQ ID NO: 827398 - DNA, 15 bp, Homo sapiens
ttttggcatctatga

SEQ ID NO: 827399 - DNA, 15 bp, Homo sapiens
tttggcatctatgat

SEQ ID NO: 827400 - DNA, 15 bp, Homo sapiens
ttggcatctatgatc

SEQ ID NO: 827401 - DNA, 15 bp, Homo sapiens
tggcatctatgatct

SEQ ID NO: 827402 - DNA, 15 bp, Homo sapiens
ggcatctatgatctt

SEQ ID NO: 827403 - DNA, 15 bp, Homo sapiens
gcatctatgatctta

SEQ ID NO: 827404 - DNA, 15 bp, Homo sapiens
catctatgatcttag

SEQ ID NO: 827405 - DNA, 15 bp, Homo sapiens
atctatgatcttagt

SEQ ID NO: 827406 - DNA, 15 bp, Homo sapiens
tctatgatcttagtg

SEQ ID NO: 827407 - DNA, 15 bp, Homo sapiens
ctatgatcttagtga

SEQ ID NO: 827408 - DNA, 15 bp, Homo sapiens
tatgatcttagtgat

SEQ ID NO: 827409 - DNA, 15 bp, Homo sapiens
atgatcttagtgata

SEQ ID NO: 827410 - DNA, 15 bp, Homo sapiens
tgatcttagtgatat

SEQ ID NO: 827411 - DNA, 15 bp, Homo sapiens
gatcttagtgatatt

SEQ ID NO: 827412 - DNA, 15 bp, Homo sapiens
atcttagtgatatta

SEQ ID NO: 827413 - DNA, 15 bp, Homo sapiens
tcttagtgatattag

SEQ ID NO: 827414 - DNA, 15 bp, Homo sapiens
cttagtgatattaga

SEQ ID NO: 827415 - DNA, 15 bp, Homo sapiens
ttagtgatattagaa

SEQ ID NO: 827416 - DNA, 15 bp, Homo sapiens
tagtgatattagaat

SEQ ID NO: 827417 - DNA, 15 bp, Homo sapiens
agtgatattagaata

SEQ ID NO: 827418 - DNA, 15 bp, Homo sapiens
gtgatattagaatac

SEQ ID NO: 827419 - DNA, 15 bp, Homo sapiens
tgatattagaataca

SEQ ID NO: 827420 - DNA, 15 bp, Homo sapiens
gatattagaatacag

SEQ ID NO: 827421 - DNA, 15 bp, Homo sapiens
atattagaatacaga

SEQ ID NO: 827422 - DNA, 15 bp, Homo sapiens
tattagaatacagat

SEQ ID NO: 827423 - DNA, 15 bp, Homo sapiens
attagaatacagatg

SEQ ID NO: 827424 - DNA, 15 bp, Homo sapiens
ttagaatacagatgc

SEQ ID NO: 827425 - DNA, 15 bp, Homo sapiens
tagaatacagatgct

SEQ ID NO: 827426 - DNA, 15 bp, Homo sapiens
agaatacagatgctt

SEQ ID NO: 827427 - DNA, 15 bp, Homo sapiens
gaatacagatgcttc

SEQ ID NO: 827428 - DNA, 15 bp, Homo sapiens
aatacagatgcttct

SEQ ID NO: 827429 - DNA, 15 bp, Homo sapiens
atacagatgcttctc

SEQ ID NO: 827430 - DNA, 15 bp, Homo sapiens
tacagatgcttctca

SEQ ID NO: 827431 - DNA, 15 bp, Homo sapiens
acagatgcttctcaa

SEQ ID NO: 827432 - DNA, 15 bp, Homo sapiens
cagatgcttctcaat

SEQ ID NO: 827433 - DNA, 15 bp, Homo sapiens
agatgcttctcaatt

SEQ ID NO: 827434 - DNA, 15 bp, Homo sapiens
gatgcttctcaattt

SEQ ID NO: 827435 - DNA, 15 bp, Homo sapiens
atgcttctcaattta

SEQ ID NO: 827436 - DNA, 15 bp, Homo sapiens
tgcttctcaatttaa

SEQ ID NO: 827437 - DNA, 15 bp, Homo sapiens
gcttctcaatttaac

SEQ ID NO: 827438 - DNA, 15 bp, Homo sapiens
cttctcaatttaacc

SEQ ID NO: 827439 - DNA, 15 bp, Homo sapiens
ttctcaatttaacca

SEQ ID NO: 827440 - DNA, 15 bp, Homo sapiens
tctcaatttaaccat

SEQ ID NO: 827441 - DNA, 15 bp, Homo sapiens
ctcaatttaaccatg

SEQ ID NO: 827442 - DNA, 15 bp, Homo sapiens
tcaatttaaccatgg

SEQ ID NO: 827443 - DNA, 15 bp, Homo sapiens
caatttaaccatgga

SEQ ID NO: 827444 - DNA, 15 bp, Homo sapiens
aatttaaccatggag

SEQ ID NO: 827445 - DNA, 15 bp, Homo sapiens
atttaaccatggagt

SEQ ID NO: 827446 - DNA, 15 bp, Homo sapiens
tttaaccatggagtt

SEQ ID NO: 827447 - DNA, 15 bp, Homo sapiens
ttaaccatggagtta

SEQ ID NO: 827448 - DNA, 15 bp, Homo sapiens
taaccatggagttac

SEQ ID NO: 827449 - DNA, 15 bp, Homo sapiens
aaccatggagttaca

SEQ ID NO: 827450 - DNA, 15 bp, Homo sapiens
accatggagttacat

SEQ ID NO: 827451 - DNA, 15 bp, Homo sapiens
ccatggagttacatc

SEQ ID NO: 827452 - DNA, 15 bp, Homo sapiens
catggagttacatcc

SEQ ID NO: 827453 - DNA, 15 bp, Homo sapiens
atggagttacatcct

SEQ ID NO: 827454 - DNA, 15 bp, Homo sapiens
tggagttacatcctc

SEQ ID NO: 827455 - DNA, 15 bp, Homo sapiens
ggagttacatcctca

SEQ ID NO: 827456 - DNA, 15 bp, Homo sapiens
gagttacatcctcac

SEQ ID NO: 827457 - DNA, 15 bp, Homo sapiens
agttacatcctcaca

SEQ ID NO: 827458 - DNA, 15 bp, Homo sapiens
gttacatcctcacaa

SEQ ID NO: 827459 - DNA, 15 bp, Homo sapiens
ttacatcctcacaaa

SEQ ID NO: 827460 - DNA, 15 bp, Homo sapiens
tacatcctcacaaac

SEQ ID NO: 827461 - DNA, 15 bp, Homo sapiens
acatcctcacaaacc

SEQ ID NO: 827462 - DNA, 15 bp, Homo sapiens
catcctcacaaaccc

SEQ ID NO: 827463 - DNA, 15 bp, Homo sapiens
atcctcacaaaccca

SEQ ID NO: 827464 - DNA, 15 bp, Homo sapiens
tcctcacaaacccat

SEQ ID NO: 827465 - DNA, 15 bp, Homo sapiens
cctcacaaacccatc

SEQ ID NO: 827466 - DNA, 15 bp, Homo sapiens
ctcacaaacccatca

SEQ ID NO: 827467 - DNA, 15 bp, Homo sapiens
tcacaaacccatcat

SEQ ID NO: 827468 - DNA, 15 bp, Homo sapiens
cacaaacccatcata

SEQ ID NO: 827469 - DNA, 15 bp, Homo sapiens
acaaacccatcataa

SEQ ID NO: 827470 - DNA, 15 bp, Homo sapiens
caaacccatcataaa

SEQ ID NO: 827471 - DNA, 15 bp, Homo sapiens
aaacccatcataaac

SEQ ID NO: 827472 - DNA, 15 bp, Homo sapiens
aacccatcataaact

SEQ ID NO: 827473 - DNA, 15 bp, Homo sapiens
acccatcataaactg

SEQ ID NO: 827474 - DNA, 15 bp, Homo sapiens
cccatcataaactga

SEQ ID NO: 827475 - DNA, 15 bp, Homo sapiens
ccatcataaactgaa

SEQ ID NO: 827476 - DNA, 15 bp, Homo sapiens
catcataaactgaaa

SEQ ID NO: 827477 - DNA, 15 bp, Homo sapiens
atcataaactgaaaa

SEQ ID NO: 827478 - DNA, 15 bp, Homo sapiens
tcataaactgaaaat

SEQ ID NO: 827479 - DNA, 15 bp, Homo sapiens
cataaactgaaaata

SEQ ID NO: 827480 - DNA, 15 bp, Homo sapiens
ataaactgaaaatat

SEQ ID NO: 827481 - DNA, 15 bp, Homo sapiens
taaactgaaaatatt

SEQ ID NO: 827482 - DNA, 15 bp, Homo sapiens
aaactgaaaatattt

SEQ ID NO: 827483 - DNA, 15 bp, Homo sapiens
aactgaaaatatttt

SEQ ID NO: 827484 - DNA, 15 bp, Homo sapiens
actgaaaatatttta

SEQ ID NO: 827485 - DNA, 15 bp, Homo sapiens
ctgaaaatattttaa

SEQ ID NO: 827486 - DNA, 15 bp, Homo sapiens
tgaaaatattttaag

SEQ ID NO: 827487 - DNA, 15 bp, Homo sapiens
gaaaatattttaagt

SEQ ID NO: 827488 - DNA, 15 bp, Homo sapiens
aaaatattttaagtt

SEQ ID NO: 827489 - DNA, 15 bp, Homo sapiens
aaatattttaagttt

SEQ ID NO: 827490 - DNA, 15 bp, Homo sapiens
aatattttaagtttg

SEQ ID NO: 827491 - DNA, 15 bp, Homo sapiens
atattttaagtttga

SEQ ID NO: 827492 - DNA, 15 bp, Homo sapiens
tattttaagtttgag

SEQ ID NO: 827493 - DNA, 15 bp, Homo sapiens
attttaagtttgaga

SEQ ID NO: 827494 - DNA, 15 bp, Homo sapiens
ttttaagtttgagaa

SEQ ID NO: 827495 - DNA, 15 bp, Homo sapiens
tttaagtttgagaat

SEQ ID NO: 827496 - DNA, 15 bp, Homo sapiens
ttaagtttgagaatg

SEQ ID NO: 827497 - DNA, 15 bp, Homo sapiens
taagtttgagaatgc

SEQ ID NO: 827498 - DNA, 15 bp, Homo sapiens
aagtttgagaatgca

SEQ ID NO: 827499 - DNA, 15 bp, Homo sapiens
agtttgagaatgcat

SEQ ID NO: 827500 - DNA, 15 bp, Homo sapiens
gtttgagaatgcatt

SEQ ID NO: 827501 - DNA, 15 bp, Homo sapiens
tttgagaatgcattt

SEQ ID NO: 827502 - DNA, 15 bp, Homo sapiens
ttgagaatgcattta

SEQ ID NO: 827503 - DNA, 15 bp, Homo sapiens
tgagaatgcatttaa

SEQ ID NO: 827504 - DNA, 15 bp, Homo sapiens
gagaatgcatttaat

SEQ ID NO: 827505 - DNA, 15 bp, Homo sapiens
agaatgcatttaata

SEQ ID NO: 827506 - DNA, 15 bp, Homo sapiens
gaatgcatttaatac

SEQ ID NO: 827507 - DNA, 15 bp, Homo sapiens
aatgcatttaatacc

SEQ ID NO: 827508 - DNA, 15 bp, Homo sapiens
atgcatttaataccc

SEQ ID NO: 827509 - DNA, 15 bp, Homo sapiens
tgcatttaatacccc

SEQ ID NO: 827510 - DNA, 15 bp, Homo sapiens
gcatttaatacccct

SEQ ID NO: 827511 - DNA, 15 bp, Homo sapiens
catttaatacccctc

SEQ ID NO: 827512 - DNA, 15 bp, Homo sapiens
atttaatacccctca

SEQ ID NO: 827513 - DNA, 15 bp, Homo sapiens
tttaatacccctcac

SEQ ID NO: 827514 - DNA, 15 bp, Homo sapiens
ttaatacccctcacc

SEQ ID NO: 827515 - DNA, 15 bp, Homo sapiens
taatacccctcacct

SEQ ID NO: 827516 - DNA, 15 bp, Homo sapiens
aatacccctcaccta

SEQ ID NO: 827517 - DNA, 15 bp, Homo sapiens
atacccctcacctac

SEQ ID NO: 827518 - DNA, 15 bp, Homo sapiens
tacccctcacctacc

SEQ ID NO: 827519 - DNA, 15 bp, Homo sapiens
acccctcacctacca

SEQ ID NO: 827520 - DNA, 15 bp, Homo sapiens
cccctcacctaccaa

SEQ ID NO: 827521 - DNA, 15 bp, Homo sapiens
ccctcacctaccaaa

SEQ ID NO: 827522 - DNA, 15 bp, Homo sapiens
cctcacctaccaaac

SEQ ID NO: 827523 - DNA, 15 bp, Homo sapiens
ctcacctaccaaaca

SEQ ID NO: 827524 - DNA, 15 bp, Homo sapiens
tcacctaccaaacat

SEQ ID NO: 827525 - DNA, 15 bp, Homo sapiens
cacctaccaaacatc

SEQ ID NO: 827526 - DNA, 15 bp, Homo sapiens
acctaccaaacatca

SEQ ID NO: 827527 - DNA, 15 bp, Homo sapiens
cctaccaaacatcac

SEQ ID NO: 827528 - DNA, 15 bp, Homo sapiens
ctaccaaacatcaca

SEQ ID NO: 827529 - DNA, 15 bp, Homo sapiens
taccaaacatcacag

SEQ ID NO: 827530 - DNA, 15 bp, Homo sapiens
accaaacatcacagc

SEQ ID NO: 827531 - DNA, 15 bp, Homo sapiens
ccaaacatcacagct

SEQ ID NO: 827532 - DNA, 15 bp, Homo sapiens
caaacatcacagctg

SEQ ID NO: 827533 - DNA, 15 bp, Homo sapiens
aaacatcacagctga

SEQ ID NO: 827534 - DNA, 15 bp, Homo sapiens
aacatcacagctgag

SEQ ID NO: 827535 - DNA, 15 bp, Homo sapiens
acatcacagctgagc

SEQ ID NO: 827536 - DNA, 15 bp, Homo sapiens
catcacagctgagcc

SEQ ID NO: 827537 - DNA, 15 bp, Homo sapiens
atcacagctgagcct

SEQ ID NO: 827538 - DNA, 15 bp, Homo sapiens
tcacagctgagccta

SEQ ID NO: 827539 - DNA, 15 bp, Homo sapiens
cacagctgagcctac

SEQ ID NO: 827540 - DNA, 15 bp, Homo sapiens
acagctgagcctacc

SEQ ID NO: 827541 - DNA, 15 bp, Homo sapiens
cagctgagcctaccc

SEQ ID NO: 827542 - DNA, 15 bp, Homo sapiens
agctgagcctaccct

SEQ ID NO: 827543 - DNA, 15 bp, Homo sapiens
gctgagcctacccta

SEQ ID NO: 827544 - DNA, 15 bp, Homo sapiens
ctgagcctaccctat

SEQ ID NO: 827545 - DNA, 15 bp, Homo sapiens
tgagcctaccctatc

SEQ ID NO: 827546 - DNA, 15 bp, Homo sapiens
gagcctaccctatct

SEQ ID NO: 827547 - DNA, 15 bp, Homo sapiens
agcctaccctatctt

SEQ ID NO: 827548 - DNA, 15 bp, Homo sapiens
gcctaccctatctta

SEQ ID NO: 827549 - DNA, 15 bp, Homo sapiens
cctaccctatcttaa

SEQ ID NO: 827550 - DNA, 15 bp, Homo sapiens
ctaccctatcttaaa

SEQ ID NO: 827551 - DNA, 15 bp, Homo sapiens
taccctatcttaaac

SEQ ID NO: 827552 - DNA, 15 bp, Homo sapiens
accctatcttaaaca

SEQ ID NO: 827553 - DNA, 15 bp, Homo sapiens
ccctatcttaaacat

SEQ ID NO: 827554 - DNA, 15 bp, Homo sapiens
cctatcttaaacatg

SEQ ID NO: 827555 - DNA, 15 bp, Homo sapiens
ctatcttaaacatgc

SEQ ID NO: 827556 - DNA, 15 bp, Homo sapiens
tatcttaaacatgct

SEQ ID NO: 827557 - DNA, 15 bp, Homo sapiens
atcttaaacatgctc

SEQ ID NO: 827558 - DNA, 15 bp, Homo sapiens
tcttaaacatgctca

SEQ ID NO: 827559 - DNA, 15 bp, Homo sapiens
cttaaacatgctcag

SEQ ID NO: 827560 - DNA, 15 bp, Homo sapiens
ttaaacatgctcaga

SEQ ID NO: 827561 - DNA, 15 bp, Homo sapiens
taaacatgctcagaa

SEQ ID NO: 827562 - DNA, 15 bp, Homo sapiens
aaacatgctcagaac

SEQ ID NO: 827563 - DNA, 15 bp, Homo sapiens
aacatgctcagaaca

SEQ ID NO: 827564 - DNA, 15 bp, Homo sapiens
acatgctcagaacac

SEQ ID NO: 827565 - DNA, 15 bp, Homo sapiens
catgctcagaacact

SEQ ID NO: 827566 - DNA, 15 bp, Homo sapiens
atgctcagaacactt

SEQ ID NO: 827567 - DNA, 15 bp, Homo sapiens
gaacacttacattac

SEQ ID NO: 827568 - DNA, 15 bp, Homo sapiens
aacacttacattacc

SEQ ID NO: 827569 - DNA, 15 bp, Homo sapiens
acacttacattacct

SEQ ID NO: 827570 - DNA, 15 bp, Homo sapiens
cacttacattaccta

SEQ ID NO: 827571 - DNA, 15 bp, Homo sapiens
acttacattacctac

SEQ ID NO: 827572 - DNA, 15 bp, Homo sapiens
cttacattacctact

SEQ ID NO: 827573 - DNA, 15 bp, Homo sapiens
ttacattacctactg

SEQ ID NO: 827574 - DNA, 15 bp, Homo sapiens
tacattacctactgt

SEQ ID NO: 827575 - DNA, 15 bp, Homo sapiens
acattacctactgtt

SEQ ID NO: 827576 - DNA, 15 bp, Homo sapiens
cattacctactgttg

SEQ ID NO: 827577 - DNA, 15 bp, Homo sapiens
attacctactgttgg

SEQ ID NO: 827578 - DNA, 15 bp, Homo sapiens
ttacctactgttggg

SEQ ID NO: 827579 - DNA, 15 bp, Homo sapiens
tacctactgttgggc

SEQ ID NO: 827580 - DNA, 15 bp, Homo sapiens
acctactgttgggca

SEQ ID NO: 827581 - DNA, 15 bp, Homo sapiens
cctactgttgggcaa

SEQ ID NO: 827582 - DNA, 15 bp, Homo sapiens
ctactgttgggcaaa

SEQ ID NO: 827583 - DNA, 15 bp, Homo sapiens
tactgttgggcaaaa

SEQ ID NO: 827584 - DNA, 15 bp, Homo sapiens
actgttgggcaaaat

SEQ ID NO: 827585 - DNA, 15 bp, Homo sapiens
ctgttgggcaaaatc

SEQ ID NO: 827586 - DNA, 15 bp, Homo sapiens
tgttgggcaaaatca

SEQ ID NO: 827587 - DNA, 15 bp, Homo sapiens
gttgggcaaaatcat

SEQ ID NO: 827588 - DNA, 15 bp, Homo sapiens
ttgggcaaaatcatc

SEQ ID NO: 827589 - DNA, 15 bp, Homo sapiens
tgggcaaaatcatct

SEQ ID NO: 827590 - DNA, 15 bp, Homo sapiens
gggcaaaatcatcta

SEQ ID NO: 827591 - DNA, 15 bp, Homo sapiens
ggcaaaatcatctaa

SEQ ID NO: 827592 - DNA, 15 bp, Homo sapiens
gcaaaatcatctaac

SEQ ID NO: 827593 - DNA, 15 bp, Homo sapiens
caaaatcatctaacg

SEQ ID NO: 827594 - DNA, 15 bp, Homo sapiens
aaaatcatctaacgc

SEQ ID NO: 827595 - DNA, 15 bp, Homo sapiens
aaatcatctaacgca

SEQ ID NO: 827596 - DNA, 15 bp, Homo sapiens
aatcatctaacgcaa

SEQ ID NO: 827597 - DNA, 15 bp, Homo sapiens
atcatctaacgcaaa

SEQ ID NO: 827598 - DNA, 15 bp, Homo sapiens
tcatctaacgcaaag

SEQ ID NO: 827599 - DNA, 15 bp, Homo sapiens
catctaacgcaaagc

SEQ ID NO: 827600 - DNA, 15 bp, Homo sapiens
atctaacgcaaagca

SEQ ID NO: 827601 - DNA, 15 bp, Homo sapiens
tctaacgcaaagcat

SEQ ID NO: 827602 - DNA, 15 bp, Homo sapiens
ctaacgcaaagcata

SEQ ID NO: 827603 - DNA, 15 bp, Homo sapiens
taacgcaaagcatat

SEQ ID NO: 827604 - DNA, 15 bp, Homo sapiens
aacgcaaagcatatt

SEQ ID NO: 827605 - DNA, 15 bp, Homo sapiens
acgcaaagcatattt

SEQ ID NO: 827606 - DNA, 15 bp, Homo sapiens
cgcaaagcatatttt

SEQ ID NO: 827607 - DNA, 15 bp, Homo sapiens
gcaaagcatatttta

SEQ ID NO: 827608 - DNA, 15 bp, Homo sapiens
caaagcatattttat

SEQ ID NO: 827609 - DNA, 15 bp, Homo sapiens
aaagcatattttata

SEQ ID NO: 827610 - DNA, 15 bp, Homo sapiens
aagcatattttataa

SEQ ID NO: 827611 - DNA, 15 bp, Homo sapiens
agcatattttataat

SEQ ID NO: 827612 - DNA, 15 bp, Homo sapiens
gcatattttataata

SEQ ID NO: 827613 - DNA, 15 bp, Homo sapiens
catattttataataa

SEQ ID NO: 827614 - DNA, 15 bp, Homo sapiens
atattttataataaa

SEQ ID NO: 827615 - DNA, 15 bp, Homo sapiens
tattttataataaag

SEQ ID NO: 827616 - DNA, 15 bp, Homo sapiens
attttataataaagt

SEQ ID NO: 827617 - DNA, 15 bp, Homo sapiens
ttttataataaagtg

SEQ ID NO: 827618 - DNA, 15 bp, Homo sapiens
tttataataaagtgc

SEQ ID NO: 827619 - DNA, 15 bp, Homo sapiens
ttataataaagtgct

SEQ ID NO: 827620 - DNA, 15 bp, Homo sapiens
tataataaagtgctg

SEQ ID NO: 827621 - DNA, 15 bp, Homo sapiens
ataataaagtgctga

SEQ ID NO: 827622 - DNA, 15 bp, Homo sapiens
taataaagtgctgaa

SEQ ID NO: 827623 - DNA, 15 bp, Homo sapiens
aataaagtgctgaaa

SEQ ID NO: 827624 - DNA, 15 bp, Homo sapiens
ataaagtgctgaaaa

SEQ ID NO: 827625 - DNA, 15 bp, Homo sapiens
taaagtgctgaaaat

SEQ ID NO: 827626 - DNA, 15 bp, Homo sapiens
aaagtgctgaaaatt

SEQ ID NO: 827627 - DNA, 15 bp, Homo sapiens
aagtgctgaaaattt

SEQ ID NO: 827628 - DNA, 15 bp, Homo sapiens
agtgctgaaaattta

SEQ ID NO: 827629 - DNA, 15 bp, Homo sapiens
gtgctgaaaatttag

SEQ ID NO: 827630 - DNA, 15 bp, Homo sapiens
tgctgaaaatttagt

SEQ ID NO: 827631 - DNA, 15 bp, Homo sapiens
gctgaaaatttagtg

SEQ ID NO: 827632 - DNA, 15 bp, Homo sapiens
ctgaaaatttagtgt

SEQ ID NO: 827633 - DNA, 15 bp, Homo sapiens
tgaaaatttagtgta

SEQ ID NO: 827634 - DNA, 15 bp, Homo sapiens
gaaaatttagtgtaa

SEQ ID NO: 827635 - DNA, 15 bp, Homo sapiens
aaaatttagtgtaat

SEQ ID NO: 827636 - DNA, 15 bp, Homo sapiens
aaatttagtgtaatg

SEQ ID NO: 827637 - DNA, 15 bp, Homo sapiens
aatttagtgtaatgt

SEQ ID NO: 827638 - DNA, 15 bp, Homo sapiens
atttagtgtaatgta

SEQ ID NO: 827639 - DNA, 15 bp, Homo sapiens
tttagtgtaatgtat

SEQ ID NO: 827640 - DNA, 15 bp, Homo sapiens
ttagtgtaatgtatt

SEQ ID NO: 827641 - DNA, 15 bp, Homo sapiens
tagtgtaatgtattg

SEQ ID NO: 827642 - DNA, 15 bp, Homo sapiens
agtgtaatgtattga

SEQ ID NO: 827643 - DNA, 15 bp, Homo sapiens
gtgtaatgtattgaa

SEQ ID NO: 827644 - DNA, 15 bp, Homo sapiens
tgtaatgtattgaat

SEQ ID NO: 827645 - DNA, 15 bp, Homo sapiens
gtaatgtattgaata

SEQ ID NO: 827646 - DNA, 15 bp, Homo sapiens
taatgtattgaatac

SEQ ID NO: 827647 - DNA, 15 bp, Homo sapiens
aatgtattgaatact

SEQ ID NO: 827648 - DNA, 15 bp, Homo sapiens
atgtattgaatactg

SEQ ID NO: 827649 - DNA, 15 bp, Homo sapiens
tgtattgaatactgt

SEQ ID NO: 827650 - DNA, 15 bp, Homo sapiens
gtattgaatactgta

SEQ ID NO: 827651 - DNA, 15 bp, Homo sapiens
tattgaatactgtac

SEQ ID NO: 827652 - DNA, 15 bp, Homo sapiens
attgaatactgtact

SEQ ID NO: 827653 - DNA, 15 bp, Homo sapiens
ttgaatactgtactg

SEQ ID NO: 827654 - DNA, 15 bp, Homo sapiens
tgaatactgtactga

SEQ ID NO: 827655 - DNA, 15 bp, Homo sapiens
gaatactgtactgaa

SEQ ID NO: 827656 - DNA, 15 bp, Homo sapiens
aatactgtactgaaa

SEQ ID NO: 827657 - DNA, 15 bp, Homo sapiens
atactgtactgaaag

SEQ ID NO: 827658 - DNA, 15 bp, Homo sapiens
tactgtactgaaagt

SEQ ID NO: 827659 - DNA, 15 bp, Homo sapiens
actgtactgaaagtg

SEQ ID NO: 827660 - DNA, 15 bp, Homo sapiens
ctgtactgaaagtga

SEQ ID NO: 827661 - DNA, 15 bp, Homo sapiens
tgtactgaaagtgaa

SEQ ID NO: 827662 - DNA, 15 bp, Homo sapiens
gtactgaaagtgaaa

SEQ ID NO: 827663 - DNA, 15 bp, Homo sapiens
tactgaaagtgaaaa

SEQ ID NO: 827664 - DNA, 15 bp, Homo sapiens
actgaaagtgaaaaa

SEQ ID NO: 827665 - DNA, 15 bp, Homo sapiens
ctgaaagtgaaaaac

SEQ ID NO: 827666 - DNA, 15 bp, Homo sapiens
tgaaagtgaaaaaca

SEQ ID NO: 827667 - DNA, 15 bp, Homo sapiens
gaaagtgaaaaacag

SEQ ID NO: 827668 - DNA, 15 bp, Homo sapiens
aaagtgaaaaacaga

SEQ ID NO: 827669 - DNA, 15 bp, Homo sapiens
aagtgaaaaacagaa

SEQ ID NO: 827670 - DNA, 15 bp, Homo sapiens
agtgaaaaacagaat

SEQ ID NO: 827671 - DNA, 15 bp, Homo sapiens
gtgaaaaacagaatg

SEQ ID NO: 827672 - DNA, 15 bp, Homo sapiens
tgaaaaacagaatgg

SEQ ID NO: 827673 - DNA, 15 bp, Homo sapiens
gaaaaacagaatggt

SEQ ID NO: 827674 - DNA, 15 bp, Homo sapiens
aaaaacagaatggtt

SEQ ID NO: 827675 - DNA, 15 bp, Homo sapiens
aaaacagaatggttg

SEQ ID NO: 827676 - DNA, 15 bp, Homo sapiens
aaacagaatggttgt

SEQ ID NO: 827677 - DNA, 15 bp, Homo sapiens
aacagaatggttgtg

SEQ ID NO: 827678 - DNA, 15 bp, Homo sapiens
acagaatggttgtgt

SEQ ID NO: 827679 - DNA, 15 bp, Homo sapiens
cagaatggttgtgtg

SEQ ID NO: 827680 - DNA, 15 bp, Homo sapiens
agaatggttgtgtga

SEQ ID NO: 827681 - DNA, 15 bp, Homo sapiens
gaatggttgtgtgaa

SEQ ID NO: 827682 - DNA, 15 bp, Homo sapiens
aatggttgtgtgaat

SEQ ID NO: 827683 - DNA, 15 bp, Homo sapiens
atggttgtgtgaata

SEQ ID NO: 827684 - DNA, 15 bp, Homo sapiens
tggttgtgtgaatac

SEQ ID NO: 827685 - DNA, 15 bp, Homo sapiens
ggttgtgtgaatact

SEQ ID NO: 827686 - DNA, 15 bp, Homo sapiens
gttgtgtgaatactt

SEQ ID NO: 827687 - DNA, 15 bp, Homo sapiens
ttgtgtgaatactta

SEQ ID NO: 827688 - DNA, 15 bp, Homo sapiens
gtgtgaatacttaga

SEQ ID NO: 827689 - DNA, 15 bp, Homo sapiens
tgtgaatacttagag

SEQ ID NO: 827690 - DNA, 15 bp, Homo sapiens
gtgaatacttagagt

SEQ ID NO: 827691 - DNA, 15 bp, Homo sapiens
tgaatacttagagta

SEQ ID NO: 827692 - DNA, 15 bp, Homo sapiens
gaatacttagagtat

SEQ ID NO: 827693 - DNA, 15 bp, Homo sapiens
aatacttagagtatg

SEQ ID NO: 827694 - DNA, 15 bp, Homo sapiens
atacttagagtatgg

SEQ ID NO: 827695 - DNA, 15 bp, Homo sapiens
tacttagagtatggt

SEQ ID NO: 827696 - DNA, 15 bp, Homo sapiens
acttagagtatggtt

SEQ ID NO: 827697 - DNA, 15 bp, Homo sapiens
cttagagtatggttt

SEQ ID NO: 827698 - DNA, 15 bp, Homo sapiens
ttagagtatggttta

SEQ ID NO: 827699 - DNA, 15 bp, Homo sapiens
tagagtatggtttaa

SEQ ID NO: 827700 - DNA, 15 bp, Homo sapiens
agagtatggtttaag

SEQ ID NO: 827701 - DNA, 15 bp, Homo sapiens
gagtatggtttaagg

SEQ ID NO: 827702 - DNA, 15 bp, Homo sapiens
agtatggtttaaggt

SEQ ID NO: 827703 - DNA, 15 bp, Homo sapiens
gtatggtttaaggtg

SEQ ID NO: 827704 - DNA, 15 bp, Homo sapiens
tatggtttaaggtga

SEQ ID NO: 827705 - DNA, 15 bp, Homo sapiens
atggtttaaggtgaa

SEQ ID NO: 827706 - DNA, 15 bp, Homo sapiens
tggtttaaggtgaat

SEQ ID NO: 827707 - DNA, 15 bp, Homo sapiens
ggtttaaggtgaata

SEQ ID NO: 827708 - DNA, 15 bp, Homo sapiens
gtttaaggtgaatag

SEQ ID NO: 827709 - DNA, 15 bp, Homo sapiens
tttaaggtgaatagg

SEQ ID NO: 827710 - DNA, 15 bp, Homo sapiens
ttaaggtgaataggt

SEQ ID NO: 827711 - DNA, 15 bp, Homo sapiens
taaggtgaataggta

SEQ ID NO: 827712 - DNA, 15 bp, Homo sapiens
aaggtgaataggtat

SEQ ID NO: 827713 - DNA, 15 bp, Homo sapiens
aggtgaataggtatc

SEQ ID NO: 827714 - DNA, 15 bp, Homo sapiens
ggtgaataggtatca

SEQ ID NO: 827715 - DNA, 15 bp, Homo sapiens
gtgaataggtatcac

SEQ ID NO: 827716 - DNA, 15 bp, Homo sapiens
tgaataggtatcact

SEQ ID NO: 827717 - DNA, 15 bp, Homo sapiens
gaataggtatcactt

SEQ ID NO: 827718 - DNA, 15 bp, Homo sapiens
aataggtatcacttt

SEQ ID NO: 827719 - DNA, 15 bp, Homo sapiens
ataggtatcactttt

SEQ ID NO: 827720 - DNA, 15 bp, Homo sapiens
taggtatcacttttg

SEQ ID NO: 827721 - DNA, 15 bp, Homo sapiens
aggtatcacttttgc

SEQ ID NO: 827722 - DNA, 15 bp, Homo sapiens
ggtatcacttttgca

SEQ ID NO: 827723 - DNA, 15 bp, Homo sapiens
gtatcacttttgcac

SEQ ID NO: 827724 - DNA, 15 bp, Homo sapiens
tatcacttttgcacc

SEQ ID NO: 827725 - DNA, 15 bp, Homo sapiens
atcacttttgcacca

SEQ ID NO: 827726 - DNA, 15 bp, Homo sapiens
tcacttttgcaccac

SEQ ID NO: 827727 - DNA, 15 bp, Homo sapiens
cacttttgcaccact

SEQ ID NO: 827728 - DNA, 15 bp, Homo sapiens
acttttgcaccactg

SEQ ID NO: 827729 - DNA, 15 bp, Homo sapiens
cttttgcaccactga

SEQ ID NO: 827730 - DNA, 15 bp, Homo sapiens
ttttgcaccactgaa

SEQ ID NO: 827731 - DNA, 15 bp, Homo sapiens
tttgcaccactgaaa

SEQ ID NO: 827732 - DNA, 15 bp, Homo sapiens
ttgcaccactgaaaa

SEQ ID NO: 827733 - DNA, 15 bp, Homo sapiens
tgcaccactgaaaag

SEQ ID NO: 827734 - DNA, 15 bp, Homo sapiens
gcaccactgaaaagt

SEQ ID NO: 827735 - DNA, 15 bp, Homo sapiens
caccactgaaaagtc

SEQ ID NO: 827736 - DNA, 15 bp, Homo sapiens
accactgaaaagtca

SEQ ID NO: 827737 - DNA, 15 bp, Homo sapiens
ccactgaaaagtcag

SEQ ID NO: 827738 - DNA, 15 bp, Homo sapiens
cactgaaaagtcaga

SEQ ID NO: 827739 - DNA, 15 bp, Homo sapiens
actgaaaagtcagaa

SEQ ID NO: 827740 - DNA, 15 bp, Homo sapiens
ctgaaaagtcagaaa

SEQ ID NO: 827741 - DNA, 15 bp, Homo sapiens
tgaaaagtcagaaaa

SEQ ID NO: 827742 - DNA, 15 bp, Homo sapiens
gaaaagtcagaaaat

SEQ ID NO: 827743 - DNA, 15 bp, Homo sapiens
aaaagtcagaaaatc

SEQ ID NO: 827744 - DNA, 15 bp, Homo sapiens
aaagtcagaaaatca

SEQ ID NO: 827745 - DNA, 15 bp, Homo sapiens
aagtcagaaaatcat

SEQ ID NO: 827746 - DNA, 15 bp, Homo sapiens
agtcagaaaatcatt

SEQ ID NO: 827747 - DNA, 15 bp, Homo sapiens
gtcagaaaatcatta

SEQ ID NO: 827748 - DNA, 15 bp, Homo sapiens
tcagaaaatcattaa

SEQ ID NO: 827749 - DNA, 15 bp, Homo sapiens
cagaaaatcattaag

SEQ ID NO: 827750 - DNA, 15 bp, Homo sapiens
agaaaatcattaagt

SEQ ID NO: 827751 - DNA, 15 bp, Homo sapiens
gaaaatcattaagtt

SEQ ID NO: 827752 - DNA, 15 bp, Homo sapiens
aaaatcattaagttg

SEQ ID NO: 827753 - DNA, 15 bp, Homo sapiens
aaatcattaagttga

SEQ ID NO: 827754 - DNA, 15 bp, Homo sapiens
aatcattaagttgaa

SEQ ID NO: 827755 - DNA, 15 bp, Homo sapiens
atcattaagttgaac

SEQ ID NO: 827756 - DNA, 15 bp, Homo sapiens
tcattaagttgaacc

SEQ ID NO: 827757 - DNA, 15 bp, Homo sapiens
cattaagttgaacca

SEQ ID NO: 827758 - DNA, 15 bp, Homo sapiens
attaagttgaaccat

SEQ ID NO: 827759 - DNA, 15 bp, Homo sapiens
ttaagttgaaccatt

SEQ ID NO: 827760 - DNA, 15 bp, Homo sapiens
taagttgaaccattg

SEQ ID NO: 827761 - DNA, 15 bp, Homo sapiens
aagttgaaccattgt

SEQ ID NO: 827762 - DNA, 15 bp, Homo sapiens
agttgaaccattgta

SEQ ID NO: 827763 - DNA, 15 bp, Homo sapiens
gttgaaccattgtaa

SEQ ID NO: 827764 - DNA, 15 bp, Homo sapiens
ttgaaccattgtaag

SEQ ID NO: 827765 - DNA, 15 bp, Homo sapiens
tgaaccattgtaagt

SEQ ID NO: 827766 - DNA, 15 bp, Homo sapiens
gaaccattgtaagtt

SEQ ID NO: 827767 - DNA, 15 bp, Homo sapiens
aaccattgtaagttg

SEQ ID NO: 827768 - DNA, 15 bp, Homo sapiens
accattgtaagttga

SEQ ID NO: 827769 - DNA, 15 bp, Homo sapiens
ccattgtaagttgag

SEQ ID NO: 827770 - DNA, 15 bp, Homo sapiens
cattgtaagttgagg

SEQ ID NO: 827771 - DNA, 15 bp, Homo sapiens
attgtaagttgaggg

SEQ ID NO: 827772 - DNA, 15 bp, Homo sapiens
ttgtaagttgagggc

SEQ ID NO: 827773 - DNA, 15 bp, Homo sapiens
tgtaagttgagggcc

SEQ ID NO: 827774 - DNA, 15 bp, Homo sapiens
gtaagttgagggcca

SEQ ID NO: 827775 - DNA, 15 bp, Homo sapiens
taagttgagggccat

SEQ ID NO: 827776 - DNA, 15 bp, Homo sapiens
aagttgagggccatt

SEQ ID NO: 827777 - DNA, 15 bp, Homo sapiens
agttgagggccattt

SEQ ID NO: 827778 - DNA, 15 bp, Homo sapiens
gttgagggccatttc

SEQ ID NO: 827779 - DNA, 15 bp, Homo sapiens
ttgagggccatttct

SEQ ID NO: 827780 - DNA, 15 bp, Homo sapiens
tgagggccatttcta

SEQ ID NO: 827781 - DNA, 15 bp, Homo sapiens
gagggccatttctac

SEQ ID NO: 827782 - DNA, 15 bp, Homo sapiens
agggccatttctact

SEQ ID NO: 827783 - DNA, 15 bp, Homo sapiens
gggccatttctactt

SEQ ID NO: 827784 - DNA, 15 bp, Homo sapiens
ggccatttctacttt

SEQ ID NO: 827785 - DNA, 15 bp, Homo sapiens
gccatttctacttta

SEQ ID NO: 827786 - DNA, 15 bp, Homo sapiens
ccatttctactttat

SEQ ID NO: 827787 - DNA, 15 bp, Homo sapiens
catttctactttatt

SEQ ID NO: 827788 - DNA, 15 bp, Homo sapiens
atttctactttattt

SEQ ID NO: 827789 - DNA, 15 bp, Homo sapiens
tttctactttatttt

SEQ ID NO: 827790 - DNA, 15 bp, Homo sapiens
ttctactttattttt

SEQ ID NO: 827791 - DNA, 15 bp, Homo sapiens
tctactttatttttg

SEQ ID NO: 827792 - DNA, 15 bp, Homo sapiens
ctactttatttttgt

SEQ ID NO: 827793 - DNA, 15 bp, Homo sapiens
tactttatttttgtg

SEQ ID NO: 827794 - DNA, 15 bp, Homo sapiens
actttatttttgtgc

SEQ ID NO: 827795 - DNA, 15 bp, Homo sapiens
ctttatttttgtgct

SEQ ID NO: 827796 - DNA, 15 bp, Homo sapiens
tttatttttgtgctt

SEQ ID NO: 827797 - DNA, 15 bp, Homo sapiens
ttatttttgtgcttt

SEQ ID NO: 827798 - DNA, 15 bp, Homo sapiens
tatttttgtgctttg

SEQ ID NO: 827799 - DNA, 15 bp, Homo sapiens
atttttgtgctttga

SEQ ID NO: 827800 - DNA, 15 bp, Homo sapiens
tttttgtgctttgag

SEQ ID NO: 827801 - DNA, 15 bp, Homo sapiens
ttttgtgctttgaga

SEQ ID NO: 827802 - DNA, 15 bp, Homo sapiens
tttgtgctttgagag

SEQ ID NO: 827803 - DNA, 15 bp, Homo sapiens
ttgtgctttgagagt

SEQ ID NO: 827804 - DNA, 15 bp, Homo sapiens
tgtgctttgagagtc

SEQ ID NO: 827805 - DNA, 15 bp, Homo sapiens
gtgctttgagagtca

SEQ ID NO: 827806 - DNA, 15 bp, Homo sapiens
tgctttgagagtcag

SEQ ID NO: 827807 - DNA, 15 bp, Homo sapiens
gctttgagagtcagt

SEQ ID NO: 827808 - DNA, 15 bp, Homo sapiens
ctttgagagtcagtt

SEQ ID NO: 827809 - DNA, 15 bp, Homo sapiens
tttgagagtcagttt

SEQ ID NO: 827810 - DNA, 15 bp, Homo sapiens
ttgagagtcagtttt

SEQ ID NO: 827811 - DNA, 15 bp, Homo sapiens
tgagagtcagttttt

SEQ ID NO: 827812 - DNA, 15 bp, Homo sapiens
gagagtcagtttttg

SEQ ID NO: 827813 - DNA, 15 bp, Homo sapiens
agagtcagtttttgg

SEQ ID NO: 827814 - DNA, 15 bp, Homo sapiens
gagtcagtttttggt

SEQ ID NO: 827815 - DNA, 15 bp, Homo sapiens
agtcagtttttggtc

SEQ ID NO: 827816 - DNA, 15 bp, Homo sapiens
gtcagtttttggtcc

SEQ ID NO: 827817 - DNA, 15 bp, Homo sapiens
tcagtttttggtcct

SEQ ID NO: 827818 - DNA, 15 bp, Homo sapiens
cagtttttggtcctc

SEQ ID NO: 827819 - DNA, 15 bp, Homo sapiens
agtttttggtcctca

SEQ ID NO: 827820 - DNA, 15 bp, Homo sapiens
gtttttggtcctcag

SEQ ID NO: 827821 - DNA, 15 bp, Homo sapiens
tttttggtcctcagt

SEQ ID NO: 827822 - DNA, 15 bp, Homo sapiens
ttttggtcctcagtt

SEQ ID NO: 827823 - DNA, 15 bp, Homo sapiens
tttggtcctcagttt

SEQ ID NO: 827824 - DNA, 15 bp, Homo sapiens
ttggtcctcagttta

SEQ ID NO: 827825 - DNA, 15 bp, Homo sapiens
tggtcctcagtttat

SEQ ID NO: 827826 - DNA, 15 bp, Homo sapiens
ggtcctcagtttatg

SEQ ID NO: 827827 - DNA, 15 bp, Homo sapiens
gtcctcagtttatgt

SEQ ID NO: 827828 - DNA, 15 bp, Homo sapiens
tcctcagtttatgtt

SEQ ID NO: 827829 - DNA, 15 bp, Homo sapiens
cctcagtttatgttt

SEQ ID NO: 827830 - DNA, 15 bp, Homo sapiens
ctcagtttatgttta

SEQ ID NO: 827831 - DNA, 15 bp, Homo sapiens
tcagtttatgtttat

SEQ ID NO: 827832 - DNA, 15 bp, Homo sapiens
cagtttatgtttatt

SEQ ID NO: 827833 - DNA, 15 bp, Homo sapiens
agtttatgtttattt

SEQ ID NO: 827834 - DNA, 15 bp, Homo sapiens
gtttatgtttatttt

SEQ ID NO: 827835 - DNA, 15 bp, Homo sapiens
tttatgtttatttta

SEQ ID NO: 827836 - DNA, 15 bp, Homo sapiens
ttatgtttattttat

SEQ ID NO: 827837 - DNA, 15 bp, Homo sapiens
tatgtttattttata

SEQ ID NO: 827838 - DNA, 15 bp, Homo sapiens
atgtttattttataa

SEQ ID NO: 827839 - DNA, 15 bp, Homo sapiens
tgtttattttataat

SEQ ID NO: 827840 - DNA, 15 bp, Homo sapiens
gtttattttataata

SEQ ID NO: 827841 - DNA, 15 bp, Homo sapiens
tttattttataatat

SEQ ID NO: 827842 - DNA, 15 bp, Homo sapiens
ttattttataatata

SEQ ID NO: 827843 - DNA, 15 bp, Homo sapiens
tattttataatataa

SEQ ID NO: 827844 - DNA, 15 bp, Homo sapiens
attttataatataag

SEQ ID NO: 827845 - DNA, 15 bp, Homo sapiens
ttttataatataagt

SEQ ID NO: 827846 - DNA, 15 bp, Homo sapiens
tttataatataagtt

SEQ ID NO: 827847 - DNA, 15 bp, Homo sapiens
ttataatataagtta

SEQ ID NO: 827848 - DNA, 15 bp, Homo sapiens
tataatataagttag

SEQ ID NO: 827849 - DNA, 15 bp, Homo sapiens
ataatataagttagt

SEQ ID NO: 827850 - DNA, 15 bp, Homo sapiens
taatataagttagta

SEQ ID NO: 827851 - DNA, 15 bp, Homo sapiens
aatataagttagtag

SEQ ID NO: 827852 - DNA, 15 bp, Homo sapiens
atataagttagtagc

SEQ ID NO: 827853 - DNA, 15 bp, Homo sapiens
tataagttagtagct

SEQ ID NO: 827854 - DNA, 15 bp, Homo sapiens
ataagttagtagctt

SEQ ID NO: 827855 - DNA, 15 bp, Homo sapiens
taagttagtagcttt

SEQ ID NO: 827856 - DNA, 15 bp, Homo sapiens
aagttagtagcttta

SEQ ID NO: 827857 - DNA, 15 bp, Homo sapiens
agttagtagctttag

SEQ ID NO: 827858 - DNA, 15 bp, Homo sapiens
gttagtagctttaga

SEQ ID NO: 827859 - DNA, 15 bp, Homo sapiens
ttagtagctttagat

SEQ ID NO: 827860 - DNA, 15 bp, Homo sapiens
tagtagctttagatc

SEQ ID NO: 827861 - DNA, 15 bp, Homo sapiens
agtagctttagatct

SEQ ID NO: 827862 - DNA, 15 bp, Homo sapiens
gtagctttagatctc

SEQ ID NO: 827863 - DNA, 15 bp, Homo sapiens
tagctttagatctcg

SEQ ID NO: 827864 - DNA, 15 bp, Homo sapiens
agctttagatctcgt

SEQ ID NO: 827865 - DNA, 15 bp, Homo sapiens
gctttagatctcgtt

SEQ ID NO: 827866 - DNA, 15 bp, Homo sapiens
ctttagatctcgttt

SEQ ID NO: 827867 - DNA, 15 bp, Homo sapiens
tttagatctcgtttt

SEQ ID NO: 827868 - DNA, 15 bp, Homo sapiens
ttagatctcgttttg

SEQ ID NO: 827869 - DNA, 15 bp, Homo sapiens
tagatctcgttttgt

SEQ ID NO: 827870 - DNA, 15 bp, Homo sapiens
agatctcgttttgta

SEQ ID NO: 827871 - DNA, 15 bp, Homo sapiens
gatctcgttttgtat

SEQ ID NO: 827872 - DNA, 15 bp, Homo sapiens
atctcgttttgtatt

SEQ ID NO: 827873 - DNA, 15 bp, Homo sapiens
tctcgttttgtatta

SEQ ID NO: 827874 - DNA, 15 bp, Homo sapiens
ctcgttttgtattat

SEQ ID NO: 827875 - DNA, 15 bp, Homo sapiens
tcgttttgtattatg

SEQ ID NO: 827876 - DNA, 15 bp, Homo sapiens
cgttttgtattatgg

SEQ ID NO: 827877 - DNA, 15 bp, Homo sapiens
gttttgtattatgga

SEQ ID NO: 827878 - DNA, 15 bp, Homo sapiens
ttttgtattatggaa

SEQ ID NO: 827879 - DNA, 15 bp, Homo sapiens
tttgtattatggaac

SEQ ID NO: 827880 - DNA, 15 bp, Homo sapiens
ttgtattatggaaca

SEQ ID NO: 827881 - DNA, 15 bp, Homo sapiens
tgtattatggaacag

SEQ ID NO: 827882 - DNA, 15 bp, Homo sapiens
gtattatggaacagt

SEQ ID NO: 827883 - DNA, 15 bp, Homo sapiens
tattatggaacagtt

SEQ ID NO: 827884 - DNA, 15 bp, Homo sapiens
attatggaacagttt

SEQ ID NO: 827885 - DNA, 15 bp, Homo sapiens
ttatggaacagttta

SEQ ID NO: 827886 - DNA, 15 bp, Homo sapiens
tatggaacagtttag

SEQ ID NO: 827887 - DNA, 15 bp, Homo sapiens
atggaacagtttaga

SEQ ID NO: 827888 - DNA, 15 bp, Homo sapiens
tggaacagtttagaa

SEQ ID NO: 827889 - DNA, 15 bp, Homo sapiens
ggaacagtttagaat

SEQ ID NO: 827890 - DNA, 15 bp, Homo sapiens
gaacagtttagaatt

SEQ ID NO: 827891 - DNA, 15 bp, Homo sapiens
aacagtttagaattt

SEQ ID NO: 827892 - DNA, 15 bp, Homo sapiens
acagtttagaatttt

SEQ ID NO: 827893 - DNA, 15 bp, Homo sapiens
cagtttagaatttta

SEQ ID NO: 827894 - DNA, 15 bp, Homo sapiens
agtttagaattttaa

SEQ ID NO: 827895 - DNA, 15 bp, Homo sapiens
gtttagaattttaat

SEQ ID NO: 827896 - DNA, 15 bp, Homo sapiens
tttagaattttaata

SEQ ID NO: 827897 - DNA, 15 bp, Homo sapiens
ttagaattttaataa

SEQ ID NO: 827898 - DNA, 15 bp, Homo sapiens
tagaattttaataaa

SEQ ID NO: 827899 - DNA, 15 bp, Homo sapiens
agaattttaataaaa

SEQ ID NO: 827900 - DNA, 15 bp, Homo sapiens
gaattttaataaaat

SEQ ID NO: 827901 - DNA, 15 bp, Homo sapiens
aattttaataaaatg

SEQ ID NO: 827902 - DNA, 15 bp, Homo sapiens
attttaataaaatgt

SEQ ID NO: 827903 - DNA, 15 bp, Homo sapiens
ttttaataaaatgta

SEQ ID NO: 827904 - DNA, 15 bp, Homo sapiens
tttaataaaatgtat

SEQ ID NO: 827905 - DNA, 15 bp, Homo sapiens
ttaataaaatgtatg

SEQ ID NO: 827906 - DNA, 15 bp, Homo sapiens
taataaaatgtatgt

SEQ ID NO: 827907 - DNA, 15 bp, Homo sapiens
aataaaatgtatgtg

SEQ ID NO: 827908 - DNA, 15 bp, Homo sapiens
ataaaatgtatgtgc

SEQ ID NO: 827909 - DNA, 15 bp, Homo sapiens
taaaatgtatgtgca

SEQ ID NO: 827910 - DNA, 15 bp, Homo sapiens
aaaatgtatgtgcaa

SEQ ID NO: 827911 - DNA, 15 bp, Homo sapiens
aaatgtatgtgcaat

SEQ ID NO: 827912 - DNA, 15 bp, Homo sapiens
aatgtatgtgcaata

SEQ ID NO: 827913 - DNA, 15 bp, Homo sapiens
atgtatgtgcaataa

SEQ ID NO: 827914 - DNA, 15 bp, Homo sapiens
tgtatgtgcaataat

SEQ ID NO: 827915 - DNA, 15 bp, Homo sapiens
gtatgtgcaataatt

SEQ ID NO: 827916 - DNA, 15 bp, Homo sapiens
tatgtgcaataattt

SEQ ID NO: 827917 - DNA, 15 bp, Homo sapiens
atgtgcaataattta

SEQ ID NO: 827918 - DNA, 15 bp, Homo sapiens
tgtgcaataatttaa

SEQ ID NO: 827919 - DNA, 15 bp, Homo sapiens
gtgcaataatttaat

SEQ ID NO: 827920 - DNA, 15 bp, Homo sapiens
tgcaataatttaatc

SEQ ID NO: 827921 - DNA, 15 bp, Homo sapiens
gcaataatttaatca

SEQ ID NO: 827922 - DNA, 15 bp, Homo sapiens
caataatttaatcat

SEQ ID NO: 827923 - DNA, 15 bp, Homo sapiens
aataatttaatcata

SEQ ID NO: 827924 - DNA, 15 bp, Homo sapiens
ataatttaatcataa

SEQ ID NO: 827925 - DNA, 15 bp, Homo sapiens
taatttaatcataaa

SEQ ID NO: 827926 - DNA, 15 bp, Homo sapiens
aatttaatcataaat

SEQ ID NO: 827927 - DNA, 15 bp, Homo sapiens
atttaatcataaatt

SEQ ID NO: 827928 - DNA, 15 bp, Homo sapiens
tttaatcataaatta

SEQ ID NO: 827929 - DNA, 15 bp, Homo sapiens
ttaatcataaattat

SEQ ID NO: 827930 - DNA, 15 bp, Homo sapiens
taatcataaattata

SEQ ID NO: 827931 - DNA, 15 bp, Homo sapiens
aatcataaattatat

SEQ ID NO: 827932 - DNA, 15 bp, Homo sapiens
atcataaattatata

SEQ ID NO: 827933 - DNA, 15 bp, Homo sapiens
tcataaattatatat

SEQ ID NO: 827934 - DNA, 15 bp, Homo sapiens
cataaattatatatg

SEQ ID NO: 827935 - DNA, 15 bp, Homo sapiens
ataaattatatatgg

SEQ ID NO: 827936 - DNA, 15 bp, Homo sapiens
taaattatatatggg

SEQ ID NO: 827937 - DNA, 15 bp, Homo sapiens
aaattatatatgggt

SEQ ID NO: 827938 - DNA, 15 bp, Homo sapiens
aattatatatgggtg

SEQ ID NO: 827939 - DNA, 15 bp, Homo sapiens
attatatatgggtgc

SEQ ID NO: 827940 - DNA, 15 bp, Homo sapiens
ttatatatgggtgca

SEQ ID NO: 827941 - DNA, 15 bp, Homo sapiens
tatatatgggtgcag

SEQ ID NO: 827942 - DNA, 15 bp, Homo sapiens
atatatgggtgcaga

SEQ ID NO: 827943 - DNA, 15 bp, Homo sapiens
tatatgggtgcagag

SEQ ID NO: 827944 - DNA, 15 bp, Homo sapiens
atatgggtgcagagt

SEQ ID NO: 827945 - DNA, 15 bp, Homo sapiens
tatgggtgcagagtc

SEQ ID NO: 827946 - DNA, 15 bp, Homo sapiens
atgggtgcagagtct

SEQ ID NO: 827947 - DNA, 15 bp, Homo sapiens
tgggtgcagagtctg

SEQ ID NO: 827948 - DNA, 15 bp, Homo sapiens
gggtgcagagtctgt

SEQ ID NO: 827949 - DNA, 15 bp, Homo sapiens
ggtgcagagtctgta

SEQ ID NO: 827950 - DNA, 15 bp, Homo sapiens
gtgcagagtctgtaa

SEQ ID NO: 827951 - DNA, 15 bp, Homo sapiens
tgcagagtctgtaag

SEQ ID NO: 827952 - DNA, 15 bp, Homo sapiens
gcagagtctgtaagg

SEQ ID NO: 827953 - DNA, 15 bp, Homo sapiens
cagagtctgtaaggg

SEQ ID NO: 827954 - DNA, 15 bp, Homo sapiens
agagtctgtaaggga

SEQ ID NO: 827955 - DNA, 15 bp, Homo sapiens
gagtctgtaagggaa

SEQ ID NO: 827956 - DNA, 15 bp, Homo sapiens
agtctgtaagggaag

SEQ ID NO: 827957 - DNA, 15 bp, Homo sapiens
gtctgtaagggaagc

SEQ ID NO: 827958 - DNA, 15 bp, Homo sapiens
tctgtaagggaagct

SEQ ID NO: 827959 - DNA, 15 bp, Homo sapiens
ctgtaagggaagctg

SEQ ID NO: 827960 - DNA, 15 bp, Homo sapiens
tgtaagggaagctgt

SEQ ID NO: 827961 - DNA, 15 bp, Homo sapiens
gtaagggaagctgtt

SEQ ID NO: 827962 - DNA, 15 bp, Homo sapiens
taagggaagctgtta

SEQ ID NO: 827963 - DNA, 15 bp, Homo sapiens
aagggaagctgttac

SEQ ID NO: 827964 - DNA, 15 bp, Homo sapiens
agggaagctgttact

SEQ ID NO: 827965 - DNA, 15 bp, Homo sapiens
gggaagctgttacta

SEQ ID NO: 827966 - DNA, 15 bp, Homo sapiens
ggaagctgttactat

SEQ ID NO: 827967 - DNA, 15 bp, Homo sapiens
gaagctgttactata

SEQ ID NO: 827968 - DNA, 15 bp, Homo sapiens
aagctgttactatat

SEQ ID NO: 827969 - DNA, 15 bp, Homo sapiens
agctgttactatata

SEQ ID NO: 827970 - DNA, 15 bp, Homo sapiens
gctgttactatatat

SEQ ID NO: 827971 - DNA, 15 bp, Homo sapiens
ctgttactatatatt

SEQ ID NO: 827972 - DNA, 15 bp, Homo sapiens
tgttactatatattt

SEQ ID NO: 827973 - DNA, 15 bp, Homo sapiens
gttactatatatttc

SEQ ID NO: 827974 - DNA, 15 bp, Homo sapiens
ttactatatatttca

SEQ ID NO: 827975 - DNA, 15 bp, Homo sapiens
tactatatatttcaa

SEQ ID NO: 827976 - DNA, 15 bp, Homo sapiens
actatatatttcaat

SEQ ID NO: 827977 - DNA, 15 bp, Homo sapiens
ctatatatttcaatg

SEQ ID NO: 827978 - DNA, 15 bp, Homo sapiens
tatatatttcaatgt

SEQ ID NO: 827979 - DNA, 15 bp, Homo sapiens
atatatttcaatgta

SEQ ID NO: 827980 - DNA, 15 bp, Homo sapiens
tatatttcaatgtat

SEQ ID NO: 827981 - DNA, 15 bp, Homo sapiens
atatttcaatgtata

SEQ ID NO: 827982 - DNA, 15 bp, Homo sapiens
tatttcaatgtatat

SEQ ID NO: 827983 - DNA, 15 bp, Homo sapiens
atttcaatgtatatc

SEQ ID NO: 827984 - DNA, 15 bp, Homo sapiens
tttcaatgtatatct

SEQ ID NO: 827985 - DNA, 15 bp, Homo sapiens
ttcaatgtatatctc

SEQ ID NO: 827986 - DNA, 15 bp, Homo sapiens
tcaatgtatatctca

SEQ ID NO: 827987 - DNA, 15 bp, Homo sapiens
caatgtatatctcaa

SEQ ID NO: 827988 - DNA, 15 bp, Homo sapiens
aatgtatatctcaat

SEQ ID NO: 827989 - DNA, 15 bp, Homo sapiens
atgtatatctcaatt

SEQ ID NO: 827990 - DNA, 15 bp, Homo sapiens
tgtatatctcaattg

SEQ ID NO: 827991 - DNA, 15 bp, Homo sapiens
gtatatctcaattgt

SEQ ID NO: 827992 - DNA, 15 bp, Homo sapiens
tatatctcaattgtt

SEQ ID NO: 827993 - DNA, 15 bp, Homo sapiens
atatctcaattgtta

SEQ ID NO: 827994 - DNA, 15 bp, Homo sapiens
tatctcaattgttat

SEQ ID NO: 827995 - DNA, 15 bp, Homo sapiens
atctcaattgttatc

SEQ ID NO: 827996 - DNA, 15 bp, Homo sapiens
tctcaattgttatcc

SEQ ID NO: 827997 - DNA, 15 bp, Homo sapiens
ctcaattgttatcct

SEQ ID NO: 827998 - DNA, 15 bp, Homo sapiens
tcaattgttatccta

SEQ ID NO: 827999 - DNA, 15 bp, Homo sapiens
caattgttatcctat

SEQ ID NO: 828000 - DNA, 15 bp, Homo sapiens
aattgttatcctata

SEQ ID NO: 828001 - DNA, 15 bp, Homo sapiens
attgttatcctataa

SEQ ID NO: 828002 - DNA, 15 bp, Homo sapiens
ttgttatcctataat

SEQ ID NO: 828003 - DNA, 15 bp, Homo sapiens
tgttatcctataatg

SEQ ID NO: 828004 - DNA, 15 bp, Homo sapiens
gttatcctataatgg

SEQ ID NO: 828005 - DNA, 15 bp, Homo sapiens
ttatcctataatgga

SEQ ID NO: 828006 - DNA, 15 bp, Homo sapiens
tatcctataatggat

SEQ ID NO: 828007 - DNA, 15 bp, Homo sapiens
atcctataatggatt

SEQ ID NO: 828008 - DNA, 15 bp, Homo sapiens
tcctataatggattt

SEQ ID NO: 828009 - DNA, 15 bp, Homo sapiens
cctataatggatttc

SEQ ID NO: 828010 - DNA, 15 bp, Homo sapiens
ctataatggatttct

SEQ ID NO: 828011 - DNA, 15 bp, Homo sapiens
tataatggatttctt

SEQ ID NO: 828012 - DNA, 15 bp, Homo sapiens
ataatggatttcttt

SEQ ID NO: 828013 - DNA, 15 bp, Homo sapiens
taatggatttctttt

SEQ ID NO: 828014 - DNA, 15 bp, Homo sapiens
aatggatttcttttt

SEQ ID NO: 828015 - DNA, 15 bp, Homo sapiens
atggatttctttttt

SEQ ID NO: 828016 - DNA, 15 bp, Homo sapiens
tggatttcttttttg

SEQ ID NO: 828017 - DNA, 15 bp, Homo sapiens
ggatttcttttttgt

SEQ ID NO: 828018 - DNA, 15 bp, Homo sapiens
gatttcttttttgtg

SEQ ID NO: 828019 - DNA, 15 bp, Homo sapiens
atttcttttttgtgt

SEQ ID NO: 828020 - DNA, 15 bp, Homo sapiens
tcttttttgtgtgta

SEQ ID NO: 828021 - DNA, 15 bp, Homo sapiens
cttttttgtgtgtat

SEQ ID NO: 828022 - DNA, 15 bp, Homo sapiens
ttttttgtgtgtatc

SEQ ID NO: 828023 - DNA, 15 bp, Homo sapiens
tttttgtgtgtatca

SEQ ID NO: 828024 - DNA, 15 bp, Homo sapiens
ttttgtgtgtatcaa

SEQ ID NO: 828025 - DNA, 15 bp, Homo sapiens
tttgtgtgtatcaag

SEQ ID NO: 828026 - DNA, 15 bp, Homo sapiens
ttgtgtgtatcaagt

SEQ ID NO: 828027 - DNA, 15 bp, Homo sapiens
tgtgtgtatcaagtt

SEQ ID NO: 828028 - DNA, 15 bp, Homo sapiens
gtgtgtatcaagttt

SEQ ID NO: 828029 - DNA, 15 bp, Homo sapiens
tgtgtatcaagtttc

SEQ ID NO: 828030 - DNA, 15 bp, Homo sapiens
gtgtatcaagtttcg

SEQ ID NO: 828031 - DNA, 15 bp, Homo sapiens
tgtatcaagtttcga

SEQ ID NO: 828032 - DNA, 15 bp, Homo sapiens
gtatcaagtttcgaa

SEQ ID NO: 828033 - DNA, 15 bp, Homo sapiens
tatcaagtttcgaag

SEQ ID NO: 828034 - DNA, 15 bp, Homo sapiens
atcaagtttcgaagt

SEQ ID NO: 828035 - DNA, 15 bp, Homo sapiens
tcaagtttcgaagtt

SEQ ID NO: 828036 - DNA, 15 bp, Homo sapiens
caagtttcgaagttt

SEQ ID NO: 828037 - DNA, 15 bp, Homo sapiens
aagtttcgaagttta

SEQ ID NO: 828038 - DNA, 15 bp, Homo sapiens
agtttcgaagtttat

SEQ ID NO: 828039 - DNA, 15 bp, Homo sapiens
gtttcgaagtttata

SEQ ID NO: 828040 - DNA, 15 bp, Homo sapiens
tttcgaagtttatat

SEQ ID NO: 828041 - DNA, 15 bp, Homo sapiens
ttcgaagtttatatt

SEQ ID NO: 828042 - DNA, 15 bp, Homo sapiens
tcgaagtttatattt

SEQ ID NO: 828043 - DNA, 15 bp, Homo sapiens
cgaagtttatatttt

SEQ ID NO: 828044 - DNA, 15 bp, Homo sapiens
gaagtttatattttt

SEQ ID NO: 828045 - DNA, 15 bp, Homo sapiens
aagtttatatttttc

SEQ ID NO: 828046 - DNA, 15 bp, Homo sapiens
agtttatatttttca

SEQ ID NO: 828047 - DNA, 15 bp, Homo sapiens
gtttatatttttcag

SEQ ID NO: 828048 - DNA, 15 bp, Homo sapiens
tttatatttttcaga

SEQ ID NO: 828049 - DNA, 15 bp, Homo sapiens
ttatatttttcagaa

SEQ ID NO: 828050 - DNA, 15 bp, Homo sapiens
tatatttttcagaaa

SEQ ID NO: 828051 - DNA, 15 bp, Homo sapiens
atatttttcagaaag

SEQ ID NO: 828052 - DNA, 15 bp, Homo sapiens
tatttttcagaaagt

SEQ ID NO: 828053 - DNA, 15 bp, Homo sapiens
atttttcagaaagtc

SEQ ID NO: 828054 - DNA, 15 bp, Homo sapiens
tttttcagaaagtca

SEQ ID NO: 828055 - DNA, 15 bp, Homo sapiens
ttttcagaaagtcat

SEQ ID NO: 828056 - DNA, 15 bp, Homo sapiens
tttcagaaagtcatc

SEQ ID NO: 828057 - DNA, 15 bp, Homo sapiens
ttcagaaagtcatcc

SEQ ID NO: 828058 - DNA, 15 bp, Homo sapiens
tcagaaagtcatccc

SEQ ID NO: 828059 - DNA, 15 bp, Homo sapiens
cagaaagtcatccct

SEQ ID NO: 828060 - DNA, 15 bp, Homo sapiens
agaaagtcatccctc

SEQ ID NO: 828061 - DNA, 15 bp, Homo sapiens
gaaagtcatccctct

SEQ ID NO: 828062 - DNA, 15 bp, Homo sapiens
aaagtcatccctctc

SEQ ID NO: 828063 - DNA, 15 bp, Homo sapiens
aagtcatccctctca

SEQ ID NO: 828064 - DNA, 15 bp, Homo sapiens
agtcatccctctcac

SEQ ID NO: 828065 - DNA, 15 bp, Homo sapiens
gtcatccctctcact

SEQ ID NO: 828066 - DNA, 15 bp, Homo sapiens
tcatccctctcactg

SEQ ID NO: 828067 - DNA, 15 bp, Homo sapiens
catccctctcactga

SEQ ID NO: 828068 - DNA, 15 bp, Homo sapiens
atccctctcactgag

SEQ ID NO: 828069 - DNA, 15 bp, Homo sapiens
tccctctcactgagg

SEQ ID NO: 828070 - DNA, 15 bp, Homo sapiens
ccctctcactgaggt

SEQ ID NO: 828071 - DNA, 15 bp, Homo sapiens
cctctcactgaggtt

SEQ ID NO: 828072 - DNA, 15 bp, Homo sapiens
ctctcactgaggttt

SEQ ID NO: 828073 - DNA, 15 bp, Homo sapiens
tctcactgaggtttt

SEQ ID NO: 828074 - DNA, 15 bp, Homo sapiens
ctcactgaggttttt

SEQ ID NO: 828075 - DNA, 15 bp, Homo sapiens
tcactgaggtttttc

SEQ ID NO: 828076 - DNA, 15 bp, Homo sapiens
cactgaggtttttca

SEQ ID NO: 828077 - DNA, 15 bp, Homo sapiens
actgaggtttttcac

SEQ ID NO: 828078 - DNA, 15 bp, Homo sapiens
ctgaggtttttcaca

SEQ ID NO: 828079 - DNA, 15 bp, Homo sapiens
tgaggtttttcacag

SEQ ID NO: 828080 - DNA, 15 bp, Homo sapiens
gaggtttttcacaga

SEQ ID NO: 828081 - DNA, 15 bp, Homo sapiens
aggtttttcacagat

SEQ ID NO: 828082 - DNA, 15 bp, Homo sapiens
ggtttttcacagatt

SEQ ID NO: 828083 - DNA, 15 bp, Homo sapiens
gtttttcacagattt

SEQ ID NO: 828084 - DNA, 15 bp, Homo sapiens
tttttcacagattta

SEQ ID NO: 828085 - DNA, 15 bp, Homo sapiens
ttttcacagatttat

SEQ ID NO: 828086 - DNA, 15 bp, Homo sapiens
tttcacagatttatt

SEQ ID NO: 828087 - DNA, 15 bp, Homo sapiens
ttcacagatttatta

SEQ ID NO: 828088 - DNA, 15 bp, Homo sapiens
tcacagatttattag

SEQ ID NO: 828089 - DNA, 15 bp, Homo sapiens
cacagatttattaga

SEQ ID NO: 828090 - DNA, 15 bp, Homo sapiens
acagatttattagaa

SEQ ID NO: 828091 - DNA, 15 bp, Homo sapiens
cagatttattagaat

SEQ ID NO: 828092 - DNA, 15 bp, Homo sapiens
agatttattagaata

SEQ ID NO: 828093 - DNA, 15 bp, Homo sapiens
gatttattagaatat

SEQ ID NO: 828094 - DNA, 15 bp, Homo sapiens
atttattagaatatc

SEQ ID NO: 828095 - DNA, 15 bp, Homo sapiens
tttattagaatatca

SEQ ID NO: 828096 - DNA, 15 bp, Homo sapiens
ttattagaatatcat

SEQ ID NO: 828097 - DNA, 15 bp, Homo sapiens
tattagaatatcatt

SEQ ID NO: 828098 - DNA, 15 bp, Homo sapiens
attagaatatcattg

SEQ ID NO: 828099 - DNA, 15 bp, Homo sapiens
ttagaatatcattgt

SEQ ID NO: 828100 - DNA, 15 bp, Homo sapiens
tagaatatcattgtg

SEQ ID NO: 828101 - DNA, 15 bp, Homo sapiens
agaatatcattgtgg

SEQ ID NO: 828102 - DNA, 15 bp, Homo sapiens
gaatatcattgtgga

SEQ ID NO: 828103 - DNA, 15 bp, Homo sapiens
aatatcattgtggat

SEQ ID NO: 828104 - DNA, 15 bp, Homo sapiens
atatcattgtggata

SEQ ID NO: 828105 - DNA, 15 bp, Homo sapiens
tatcattgtggataa

SEQ ID NO: 828106 - DNA, 15 bp, Homo sapiens
atcattgtggataat

SEQ ID NO: 828107 - DNA, 15 bp, Homo sapiens
tcattgtggataatt

SEQ ID NO: 828108 - DNA, 15 bp, Homo sapiens
cattgtggataattt

SEQ ID NO: 828109 - DNA, 15 bp, Homo sapiens
attgtggataatttt

SEQ ID NO: 828110 - DNA, 15 bp, Homo sapiens
ttgtggataattttt

SEQ ID NO: 828111 - DNA, 15 bp, Homo sapiens
tgtggataatttttt

SEQ ID NO: 828112 - DNA, 15 bp, Homo sapiens
gtggataattttttt

SEQ ID NO: 828113 - DNA, 15 bp, Homo sapiens
tggataatttttttc

SEQ ID NO: 828114 - DNA, 15 bp, Homo sapiens
ggataatttttttct

SEQ ID NO: 828115 - DNA, 15 bp, Homo sapiens
gataatttttttctt

SEQ ID NO: 828116 - DNA, 15 bp, Homo sapiens
ataatttttttcttt

SEQ ID NO: 828117 - DNA, 15 bp, Homo sapiens
taatttttttctttt

SEQ ID NO: 828118 - DNA, 15 bp, Homo sapiens
aatttttttcttttt

SEQ ID NO: 828119 - DNA, 15 bp, Homo sapiens
tttttttcttttttt

SEQ ID NO: 828120 - DNA, 15 bp, Homo sapiens
ttttttcttttttta

SEQ ID NO: 828121 - DNA, 15 bp, Homo sapiens
tttttctttttttat

SEQ ID NO: 828122 - DNA, 15 bp, Homo sapiens
ttttctttttttatt

SEQ ID NO: 828123 - DNA, 15 bp, Homo sapiens
tttctttttttattg

SEQ ID NO: 828124 - DNA, 15 bp, Homo sapiens
ttctttttttattgg

SEQ ID NO: 828125 - DNA, 15 bp, Homo sapiens
tctttttttattgga

SEQ ID NO: 828126 - DNA, 15 bp, Homo sapiens
ctttttttattggat

SEQ ID NO: 828127 - DNA, 15 bp, Homo sapiens
tttttttattggatc

SEQ ID NO: 828128 - DNA, 15 bp, Homo sapiens
ttttttattggatca

SEQ ID NO: 828129 - DNA, 15 bp, Homo sapiens
tttttattggatcag

SEQ ID NO: 828130 - DNA, 15 bp, Homo sapiens
ttttattggatcagc

SEQ ID NO: 828131 - DNA, 15 bp, Homo sapiens
tttattggatcagcc

SEQ ID NO: 828132 - DNA, 15 bp, Homo sapiens
ttattggatcagcca

SEQ ID NO: 828133 - DNA, 15 bp, Homo sapiens
tattggatcagccag

SEQ ID NO: 828134 - DNA, 15 bp, Homo sapiens
attggatcagccaga

SEQ ID NO: 828135 - DNA, 15 bp, Homo sapiens
ttggatcagccagaa

SEQ ID NO: 828136 - DNA, 15 bp, Homo sapiens
tggatcagccagaac

SEQ ID NO: 828137 - DNA, 15 bp, Homo sapiens
ggatcagccagaact

SEQ ID NO: 828138 - DNA, 15 bp, Homo sapiens
gatcagccagaactt

SEQ ID NO: 828139 - DNA, 15 bp, Homo sapiens
atcagccagaacttt

SEQ ID NO: 828140 - DNA, 15 bp, Homo sapiens
tcagccagaacttta

SEQ ID NO: 828141 - DNA, 15 bp, Homo sapiens
cagccagaactttat

SEQ ID NO: 828142 - DNA, 15 bp, Homo sapiens
agccagaactttatt

SEQ ID NO: 828143 - DNA, 15 bp, Homo sapiens
gccagaactttattt

SEQ ID NO: 828144 - DNA, 15 bp, Homo sapiens
ccagaactttatttt

SEQ ID NO: 828145 - DNA, 15 bp, Homo sapiens
cagaactttattttg

SEQ ID NO: 828146 - DNA, 15 bp, Homo sapiens
agaactttattttgt

SEQ ID NO: 828147 - DNA, 15 bp, Homo sapiens
gaactttattttgtt

SEQ ID NO: 828148 - DNA, 15 bp, Homo sapiens
aactttattttgttt

SEQ ID NO: 828149 - DNA, 15 bp, Homo sapiens
actttattttgtttg

SEQ ID NO: 828150 - DNA, 15 bp, Homo sapiens
ctttattttgtttgt

SEQ ID NO: 828151 - DNA, 15 bp, Homo sapiens
tttattttgtttgtt

SEQ ID NO: 828152 - DNA, 15 bp, Homo sapiens
ttattttgtttgttt

SEQ ID NO: 828153 - DNA, 15 bp, Homo sapiens
tattttgtttgtttt

SEQ ID NO: 828154 - DNA, 15 bp, Homo sapiens
attttgtttgttttc

SEQ ID NO: 828155 - DNA, 15 bp, Homo sapiens
tttgtttgttttctt

SEQ ID NO: 828156 - DNA, 15 bp, Homo sapiens
ttgtttgttttcttg

SEQ ID NO: 828157 - DNA, 15 bp, Homo sapiens
tgtttgttttcttgt

SEQ ID NO: 828158 - DNA, 15 bp, Homo sapiens
gtttgttttcttgtt

SEQ ID NO: 828159 - DNA, 15 bp, Homo sapiens
tttgttttcttgttg

SEQ ID NO: 828160 - DNA, 15 bp, Homo sapiens
ttgttttcttgttgc

SEQ ID NO: 828161 - DNA, 15 bp, Homo sapiens
tgttttcttgttgcc

SEQ ID NO: 828162 - DNA, 15 bp, Homo sapiens
gttttcttgttgcca

SEQ ID NO: 828163 - DNA, 15 bp, Homo sapiens
ttttcttgttgccat

SEQ ID NO: 828164 - DNA, 15 bp, Homo sapiens
tttcttgttgccatt

SEQ ID NO: 828165 - DNA, 15 bp, Homo sapiens
ttcttgttgccattg

SEQ ID NO: 828166 - DNA, 15 bp, Homo sapiens
tcttgttgccattgt

SEQ ID NO: 828167 - DNA, 15 bp, Homo sapiens
cttgttgccattgtt

SEQ ID NO: 828168 - DNA, 15 bp, Homo sapiens
ttgttgccattgttt

SEQ ID NO: 828169 - DNA, 15 bp, Homo sapiens
tgttgccattgtttg

SEQ ID NO: 828170 - DNA, 15 bp, Homo sapiens
gttgccattgtttgc

SEQ ID NO: 828171 - DNA, 15 bp, Homo sapiens
ttgccattgtttgct

SEQ ID NO: 828172 - DNA, 15 bp, Homo sapiens
tgccattgtttgctc

SEQ ID NO: 828173 - DNA, 15 bp, Homo sapiens
gccattgtttgctcc

SEQ ID NO: 828174 - DNA, 15 bp, Homo sapiens
ccattgtttgctccc

SEQ ID NO: 828175 - DNA, 15 bp, Homo sapiens
cattgtttgctccca

SEQ ID NO: 828176 - DNA, 15 bp, Homo sapiens
attgtttgctcccat

SEQ ID NO: 828177 - DNA, 15 bp, Homo sapiens
ttgtttgctcccata

SEQ ID NO: 828178 - DNA, 15 bp, Homo sapiens
tgtttgctcccataa

SEQ ID NO: 828179 - DNA, 15 bp, Homo sapiens
gtttgctcccataaa

SEQ ID NO: 828180 - DNA, 15 bp, Homo sapiens
tttgctcccataaaa

SEQ ID NO: 828181 - DNA, 15 bp, Homo sapiens
ttgctcccataaaat

SEQ ID NO: 828182 - DNA, 15 bp, Homo sapiens
tgctcccataaaatt

SEQ ID NO: 828183 - DNA, 15 bp, Homo sapiens
gctcccataaaattc

SEQ ID NO: 828184 - DNA, 15 bp, Homo sapiens
ctcccataaaattct

SEQ ID NO: 828185 - DNA, 15 bp, Homo sapiens
tcccataaaattcta

SEQ ID NO: 828186 - DNA, 15 bp, Homo sapiens
cccataaaattctac

SEQ ID NO: 828187 - DNA, 15 bp, Homo sapiens
ccataaaattctaca

SEQ ID NO: 828188 - DNA, 15 bp, Homo sapiens
cataaaattctacag

SEQ ID NO: 828189 - DNA, 15 bp, Homo sapiens
ataaaattctacaga

SEQ ID NO: 828190 - DNA, 15 bp, Homo sapiens
taaaattctacagat

SEQ ID NO: 828191 - DNA, 15 bp, Homo sapiens
aaaattctacagatt

SEQ ID NO: 828192 - DNA, 15 bp, Homo sapiens
aaattctacagattt

SEQ ID NO: 828193 - DNA, 15 bp, Homo sapiens
aattctacagatttt

SEQ ID NO: 828194 - DNA, 15 bp, Homo sapiens
attctacagattttt

SEQ ID NO: 828195 - DNA, 15 bp, Homo sapiens
ttctacagattttta

SEQ ID NO: 828196 - DNA, 15 bp, Homo sapiens
tctacagatttttaa

SEQ ID NO: 828197 - DNA, 15 bp, Homo sapiens
ctacagatttttaaa

SEQ ID NO: 828198 - DNA, 15 bp, Homo sapiens
tacagatttttaaaa

SEQ ID NO: 828199 - DNA, 15 bp, Homo sapiens
acagatttttaaaat

SEQ ID NO: 828200 - DNA, 15 bp, Homo sapiens
cagatttttaaaatt

SEQ ID NO: 828201 - DNA, 15 bp, Homo sapiens
agatttttaaaattt

SEQ ID NO: 828202 - DNA, 15 bp, Homo sapiens
gatttttaaaatttt

SEQ ID NO: 828203 - DNA, 15 bp, Homo sapiens
atttttaaaattttt

SEQ ID NO: 828204 - DNA, 15 bp, Homo sapiens
tttttaaaatttttt

SEQ ID NO: 828205 - DNA, 15 bp, Homo sapiens
ttttaaaattttttt

SEQ ID NO: 828206 - DNA, 15 bp, Homo sapiens
ttaaaattttttttc

SEQ ID NO: 828207 - DNA, 15 bp, Homo sapiens
taaaattttttttca

SEQ ID NO: 828208 - DNA, 15 bp, Homo sapiens
aaaattttttttcat

SEQ ID NO: 828209 - DNA, 15 bp, Homo sapiens
aaattttttttcata

SEQ ID NO: 828210 - DNA, 15 bp, Homo sapiens
aattttttttcatat

SEQ ID NO: 828211 - DNA, 15 bp, Homo sapiens
attttttttcatatt

SEQ ID NO: 828212 - DNA, 15 bp, Homo sapiens
ttttttttcatattt

SEQ ID NO: 828213 - DNA, 15 bp, Homo sapiens
tttttttcatattta

SEQ ID NO: 828214 - DNA, 15 bp, Homo sapiens
ttttttcatatttat

SEQ ID NO: 828215 - DNA, 15 bp, Homo sapiens
tttttcatatttatt

SEQ ID NO: 828216 - DNA, 15 bp, Homo sapiens
ttttcatatttattg

SEQ ID NO: 828217 - DNA, 15 bp, Homo sapiens
tttcatatttattgg

SEQ ID NO: 828218 - DNA, 15 bp, Homo sapiens
ttcatatttattggt

SEQ ID NO: 828219 - DNA, 15 bp, Homo sapiens
tcatatttattggtt

SEQ ID NO: 828220 - DNA, 15 bp, Homo sapiens
catatttattggttt

SEQ ID NO: 828221 - DNA, 15 bp, Homo sapiens
atatttattggtttt

SEQ ID NO: 828222 - DNA, 15 bp, Homo sapiens
tatttattggttttc

SEQ ID NO: 828223 - DNA, 15 bp, Homo sapiens
atttattggttttct

SEQ ID NO: 828224 - DNA, 15 bp, Homo sapiens
tttattggttttctg

SEQ ID NO: 828225 - DNA, 15 bp, Homo sapiens
ttattggttttctgg

SEQ ID NO: 828226 - DNA, 15 bp, Homo sapiens
tattggttttctggt

SEQ ID NO: 828227 - DNA, 15 bp, Homo sapiens
attggttttctggtt

SEQ ID NO: 828228 - DNA, 15 bp, Homo sapiens
ttggttttctggtta

SEQ ID NO: 828229 - DNA, 15 bp, Homo sapiens
tggttttctggttat

SEQ ID NO: 828230 - DNA, 15 bp, Homo sapiens
ggttttctggttatt

SEQ ID NO: 828231 - DNA, 15 bp, Homo sapiens
gttttctggttattt

SEQ ID NO: 828232 - DNA, 15 bp, Homo sapiens
ttttctggttattta

SEQ ID NO: 828233 - DNA, 15 bp, Homo sapiens
tttctggttatttag

SEQ ID NO: 828234 - DNA, 15 bp, Homo sapiens
ttctggttatttagt

SEQ ID NO: 828235 - DNA, 15 bp, Homo sapiens
tctggttatttagtc

SEQ ID NO: 828236 - DNA, 15 bp, Homo sapiens
ctggttatttagtca

SEQ ID NO: 828237 - DNA, 15 bp, Homo sapiens
tggttatttagtcat

SEQ ID NO: 828238 - DNA, 15 bp, Homo sapiens
ggttatttagtcata

SEQ ID NO: 828239 - DNA, 15 bp, Homo sapiens
gttatttagtcataa

SEQ ID NO: 828240 - DNA, 15 bp, Homo sapiens
ttatttagtcataaa

SEQ ID NO: 828241 - DNA, 15 bp, Homo sapiens
tatttagtcataaac

SEQ ID NO: 828242 - DNA, 15 bp, Homo sapiens
atttagtcataaaca

SEQ ID NO: 828243 - DNA, 15 bp, Homo sapiens
tttagtcataaacac

SEQ ID NO: 828244 - DNA, 15 bp, Homo sapiens
ttagtcataaacact

SEQ ID NO: 828245 - DNA, 15 bp, Homo sapiens
tagtcataaacactg

SEQ ID NO: 828246 - DNA, 15 bp, Homo sapiens
agtcataaacactga

SEQ ID NO: 828247 - DNA, 15 bp, Homo sapiens
gtcataaacactgaa

SEQ ID NO: 828248 - DNA, 15 bp, Homo sapiens
tcataaacactgaac

SEQ ID NO: 828249 - DNA, 15 bp, Homo sapiens
cataaacactgaact

SEQ ID NO: 828250 - DNA, 15 bp, Homo sapiens
ataaacactgaacta

SEQ ID NO: 828251 - DNA, 15 bp, Homo sapiens
taaacactgaactaa

SEQ ID NO: 828252 - DNA, 15 bp, Homo sapiens
aaacactgaactaaa

SEQ ID NO: 828253 - DNA, 15 bp, Homo sapiens
aacactgaactaaaa

SEQ ID NO: 828254 - DNA, 15 bp, Homo sapiens
acactgaactaaaaa

SEQ ID NO: 828255 - DNA, 15 bp, Homo sapiens
cactgaactaaaaaa

SEQ ID NO: 828256 - DNA, 15 bp, Homo sapiens
actgaactaaaaaat

SEQ ID NO: 828257 - DNA, 15 bp, Homo sapiens
ctgaactaaaaaatc

SEQ ID NO: 828258 - DNA, 15 bp, Homo sapiens
tgaactaaaaaatca

SEQ ID NO: 828259 - DNA, 15 bp, Homo sapiens
gaactaaaaaatcag

SEQ ID NO: 828260 - DNA, 15 bp, Homo sapiens
aactaaaaaatcagc

SEQ ID NO: 828261 - DNA, 15 bp, Homo sapiens
actaaaaaatcagct

SEQ ID NO: 828262 - DNA, 15 bp, Homo sapiens
ctaaaaaatcagctt

SEQ ID NO: 828263 - DNA, 15 bp, Homo sapiens
taaaaaatcagcttt

SEQ ID NO: 828264 - DNA, 15 bp, Homo sapiens
aaaaaatcagctttc

SEQ ID NO: 828265 - DNA, 15 bp, Homo sapiens
aaaaatcagctttct

SEQ ID NO: 828266 - DNA, 15 bp, Homo sapiens
aaaatcagctttctc

SEQ ID NO: 828267 - DNA, 15 bp, Homo sapiens
aaatcagctttctcc

SEQ ID NO: 828268 - DNA, 15 bp, Homo sapiens
aatcagctttctcct

SEQ ID NO: 828269 - DNA, 15 bp, Homo sapiens
atcagctttctccta

SEQ ID NO: 828270 - DNA, 15 bp, Homo sapiens
tcagctttctcctat

SEQ ID NO: 828271 - DNA, 15 bp, Homo sapiens
cagctttctcctatt

SEQ ID NO: 828272 - DNA, 15 bp, Homo sapiens
agctttctcctattg

SEQ ID NO: 828273 - DNA, 15 bp, Homo sapiens
gctttctcctattgt

SEQ ID NO: 828274 - DNA, 15 bp, Homo sapiens
ctttctcctattgtc

SEQ ID NO: 828275 - DNA, 15 bp, Homo sapiens
tttctcctattgtca

SEQ ID NO: 828276 - DNA, 15 bp, Homo sapiens
ttctcctattgtcaa

SEQ ID NO: 828277 - DNA, 15 bp, Homo sapiens
tctcctattgtcaag

SEQ ID NO: 828278 - DNA, 15 bp, Homo sapiens
ctcctattgtcaaga

SEQ ID NO: 828279 - DNA, 15 bp, Homo sapiens
tcctattgtcaagac

SEQ ID NO: 828280 - DNA, 15 bp, Homo sapiens
cctattgtcaagact

SEQ ID NO: 828281 - DNA, 15 bp, Homo sapiens
ctattgtcaagacta

SEQ ID NO: 828282 - DNA, 15 bp, Homo sapiens
tattgtcaagactac

SEQ ID NO: 828283 - DNA, 15 bp, Homo sapiens
attgtcaagactact

SEQ ID NO: 828284 - DNA, 15 bp, Homo sapiens
ttgtcaagactactt

SEQ ID NO: 828285 - DNA, 15 bp, Homo sapiens
tgtcaagactacttt

SEQ ID NO: 828286 - DNA, 15 bp, Homo sapiens
gtcaagactactttt

SEQ ID NO: 828287 - DNA, 15 bp, Homo sapiens
tcaagactacttttc

SEQ ID NO: 828288 - DNA, 15 bp, Homo sapiens
caagactacttttcc

SEQ ID NO: 828289 - DNA, 15 bp, Homo sapiens
aagactacttttccc

SEQ ID NO: 828290 - DNA, 15 bp, Homo sapiens
agactacttttcccc

SEQ ID NO: 828291 - DNA, 15 bp, Homo sapiens
gactacttttccccc

SEQ ID NO: 828292 - DNA, 15 bp, Homo sapiens
actacttttccccca

SEQ ID NO: 828293 - DNA, 15 bp, Homo sapiens
ctacttttcccccaa

SEQ ID NO: 828294 - DNA, 15 bp, Homo sapiens
tacttttcccccaaa

SEQ ID NO: 828295 - DNA, 15 bp, Homo sapiens
acttttcccccaaaa

SEQ ID NO: 828296 - DNA, 15 bp, Homo sapiens
cttttcccccaaaat

SEQ ID NO: 828297 - DNA, 15 bp, Homo sapiens
ttttcccccaaaatc

SEQ ID NO: 828298 - DNA, 15 bp, Homo sapiens
tttcccccaaaatct

SEQ ID NO: 828299 - DNA, 15 bp, Homo sapiens
ttcccccaaaatctt

SEQ ID NO: 828300 - DNA, 15 bp, Homo sapiens
tcccccaaaatctta

SEQ ID NO: 828301 - DNA, 15 bp, Homo sapiens
cccccaaaatcttaa

SEQ ID NO: 828302 - DNA, 15 bp, Homo sapiens
ccccaaaatcttaag

SEQ ID NO: 828303 - DNA, 15 bp, Homo sapiens
cccaaaatcttaagc

SEQ ID NO: 828304 - DNA, 15 bp, Homo sapiens
ccaaaatcttaagct

SEQ ID NO: 828305 - DNA, 15 bp, Homo sapiens
caaaatcttaagctg

SEQ ID NO: 828306 - DNA, 15 bp, Homo sapiens
aaaatcttaagctga

SEQ ID NO: 828307 - DNA, 15 bp, Homo sapiens
aaatcttaagctgaa

SEQ ID NO: 828308 - DNA, 15 bp, Homo sapiens
aatcttaagctgaat

SEQ ID NO: 828309 - DNA, 15 bp, Homo sapiens
atcttaagctgaatg

SEQ ID NO: 828310 - DNA, 15 bp, Homo sapiens
tcttaagctgaatgc

SEQ ID NO: 828311 - DNA, 15 bp, Homo sapiens
cttaagctgaatgct

SEQ ID NO: 828312 - DNA, 15 bp, Homo sapiens
ttaagctgaatgctt

SEQ ID NO: 828313 - DNA, 15 bp, Homo sapiens
taagctgaatgcttt

SEQ ID NO: 828314 - DNA, 15 bp, Homo sapiens
aagctgaatgctttg

SEQ ID NO: 828315 - DNA, 15 bp, Homo sapiens
agctgaatgctttgt

SEQ ID NO: 828316 - DNA, 15 bp, Homo sapiens
gctgaatgctttgtt

SEQ ID NO: 828317 - DNA, 15 bp, Homo sapiens
ctgaatgctttgttt

SEQ ID NO: 828318 - DNA, 15 bp, Homo sapiens
tgaatgctttgtttt

SEQ ID NO: 828319 - DNA, 15 bp, Homo sapiens
gaatgctttgtttta

SEQ ID NO: 828320 - DNA, 15 bp, Homo sapiens
aatgctttgttttat

SEQ ID NO: 828321 - DNA, 15 bp, Homo sapiens
atgctttgttttata

SEQ ID NO: 828322 - DNA, 15 bp, Homo sapiens
tgctttgttttataa

SEQ ID NO: 828323 - DNA, 15 bp, Homo sapiens
gctttgttttataaa

SEQ ID NO: 828324 - DNA, 15 bp, Homo sapiens
ctttgttttataaat

SEQ ID NO: 828325 - DNA, 15 bp, Homo sapiens
tttgttttataaata

SEQ ID NO: 828326 - DNA, 15 bp, Homo sapiens
ttgttttataaataa

SEQ ID NO: 828327 - DNA, 15 bp, Homo sapiens
tgttttataaataat

SEQ ID NO: 828328 - DNA, 15 bp, Homo sapiens
gttttataaataatc

SEQ ID NO: 828329 - DNA, 15 bp, Homo sapiens
ttttataaataatct

SEQ ID NO: 828330 - DNA, 15 bp, Homo sapiens
tttataaataatctt

SEQ ID NO: 828331 - DNA, 15 bp, Homo sapiens
ttataaataatcttt

SEQ ID NO: 828332 - DNA, 15 bp, Homo sapiens
tataaataatctttt

SEQ ID NO: 828333 - DNA, 15 bp, Homo sapiens
ataaataatctttta

SEQ ID NO: 828334 - DNA, 15 bp, Homo sapiens
taaataatcttttat

SEQ ID NO: 828335 - DNA, 15 bp, Homo sapiens
aaataatcttttatt

SEQ ID NO: 828336 - DNA, 15 bp, Homo sapiens
aataatcttttattg

SEQ ID NO: 828337 - DNA, 15 bp, Homo sapiens
ataatcttttattgt

SEQ ID NO: 828338 - DNA, 15 bp, Homo sapiens
taatcttttattgta

SEQ ID NO: 828339 - DNA, 15 bp, Homo sapiens
aatcttttattgtat

SEQ ID NO: 828340 - DNA, 15 bp, Homo sapiens
atcttttattgtatt

SEQ ID NO: 828341 - DNA, 15 bp, Homo sapiens
tcttttattgtatta

SEQ ID NO: 828342 - DNA, 15 bp, Homo sapiens
cttttattgtattat

SEQ ID NO: 828343 - DNA, 15 bp, Homo sapiens
ttttattgtattatt

SEQ ID NO: 828344 - DNA, 15 bp, Homo sapiens
tttattgtattattg

SEQ ID NO: 828345 - DNA, 15 bp, Homo sapiens
ttattgtattattga

SEQ ID NO: 828346 - DNA, 15 bp, Homo sapiens
tattgtattattgat

SEQ ID NO: 828347 - DNA, 15 bp, Homo sapiens
attgtattattgatt

SEQ ID NO: 828348 - DNA, 15 bp, Homo sapiens
ttgtattattgattt

SEQ ID NO: 828349 - DNA, 15 bp, Homo sapiens
tgtattattgattta

SEQ ID NO: 828350 - DNA, 15 bp, Homo sapiens
gtattattgatttaa

SEQ ID NO: 828351 - DNA, 15 bp, Homo sapiens
tattattgatttaac

SEQ ID NO: 828352 - DNA, 15 bp, Homo sapiens
attattgatttaact

SEQ ID NO: 828353 - DNA, 15 bp, Homo sapiens
ttattgatttaactt

SEQ ID NO: 828354 - DNA, 15 bp, Homo sapiens
tattgatttaacttc

SEQ ID NO: 828355 - DNA, 15 bp, Homo sapiens
attgatttaacttct

SEQ ID NO: 828356 - DNA, 15 bp, Homo sapiens
ttgatttaacttcta

SEQ ID NO: 828357 - DNA, 15 bp, Homo sapiens
tgatttaacttctag

SEQ ID NO: 828358 - DNA, 15 bp, Homo sapiens
gatttaacttctagt

SEQ ID NO: 828359 - DNA, 15 bp, Homo sapiens
atttaacttctagtt

SEQ ID NO: 828360 - DNA, 15 bp, Homo sapiens
tttaacttctagtta

SEQ ID NO: 828361 - DNA, 15 bp, Homo sapiens
ttaacttctagttag

SEQ ID NO: 828362 - DNA, 15 bp, Homo sapiens
taacttctagttagc

SEQ ID NO: 828363 - DNA, 15 bp, Homo sapiens
aacttctagttagcc

SEQ ID NO: 828364 - DNA, 15 bp, Homo sapiens
acttctagttagcca

SEQ ID NO: 828365 - DNA, 15 bp, Homo sapiens
cttctagttagccag

SEQ ID NO: 828366 - DNA, 15 bp, Homo sapiens
ttctagttagccagt

SEQ ID NO: 828367 - DNA, 15 bp, Homo sapiens
tctagttagccagta

SEQ ID NO: 828368 - DNA, 15 bp, Homo sapiens
ctagttagccagtat

SEQ ID NO: 828369 - DNA, 15 bp, Homo sapiens
tagttagccagtatg

SEQ ID NO: 828370 - DNA, 15 bp, Homo sapiens
agttagccagtatgt

SEQ ID NO: 828371 - DNA, 15 bp, Homo sapiens
gttagccagtatgtt

SEQ ID NO: 828372 - DNA, 15 bp, Homo sapiens
ttagccagtatgttc

SEQ ID NO: 828373 - DNA, 15 bp, Homo sapiens
tagccagtatgttct

SEQ ID NO: 828374 - DNA, 15 bp, Homo sapiens
agccagtatgttctt

SEQ ID NO: 828375 - DNA, 15 bp, Homo sapiens
gccagtatgttcttt

SEQ ID NO: 828376 - DNA, 15 bp, Homo sapiens
ccagtatgttcttta

SEQ ID NO: 828377 - DNA, 15 bp, Homo sapiens
cagtatgttctttaa

SEQ ID NO: 828378 - DNA, 15 bp, Homo sapiens
agtatgttctttaaa

SEQ ID NO: 828379 - DNA, 15 bp, Homo sapiens
gtatgttctttaaaa

SEQ ID NO: 828380 - DNA, 15 bp, Homo sapiens
tatgttctttaaaat

SEQ ID NO: 828381 - DNA, 15 bp, Homo sapiens
atgttctttaaaatt

SEQ ID NO: 828382 - DNA, 15 bp, Homo sapiens
tgttctttaaaattg

SEQ ID NO: 828383 - DNA, 15 bp, Homo sapiens
gttctttaaaattga

SEQ ID NO: 828384 - DNA, 15 bp, Homo sapiens
ttctttaaaattgat

SEQ ID NO: 828385 - DNA, 15 bp, Homo sapiens
tctttaaaattgatt

SEQ ID NO: 828386 - DNA, 15 bp, Homo sapiens
ctttaaaattgattt

SEQ ID NO: 828387 - DNA, 15 bp, Homo sapiens
tttaaaattgattta

SEQ ID NO: 828388 - DNA, 15 bp, Homo sapiens
ttaaaattgatttaa

SEQ ID NO: 828389 - DNA, 15 bp, Homo sapiens
taaaattgatttaaa

SEQ ID NO: 828390 - DNA, 15 bp, Homo sapiens
aaaattgatttaaat

SEQ ID NO: 828391 - DNA, 15 bp, Homo sapiens
aaattgatttaaata

SEQ ID NO: 828392 - DNA, 15 bp, Homo sapiens
aattgatttaaatag

SEQ ID NO: 828393 - DNA, 15 bp, Homo sapiens
attgatttaaataga

SEQ ID NO: 828394 - DNA, 15 bp, Homo sapiens
ttgatttaaatagac

SEQ ID NO: 828395 - DNA, 15 bp, Homo sapiens
tgatttaaatagact

SEQ ID NO: 828396 - DNA, 15 bp, Homo sapiens
gatttaaatagactg

SEQ ID NO: 828397 - DNA, 15 bp, Homo sapiens
atttaaatagactgg

SEQ ID NO: 828398 - DNA, 15 bp, Homo sapiens
tttaaatagactggt

SEQ ID NO: 828399 - DNA, 15 bp, Homo sapiens
ttaaatagactggta

SEQ ID NO: 828400 - DNA, 15 bp, Homo sapiens
taaatagactggtag

SEQ ID NO: 828401 - DNA, 15 bp, Homo sapiens
aaatagactggtagt

SEQ ID NO: 828402 - DNA, 15 bp, Homo sapiens
aatagactggtagtg

SEQ ID NO: 828403 - DNA, 15 bp, Homo sapiens
atagactggtagtgt

SEQ ID NO: 828404 - DNA, 15 bp, Homo sapiens
tagactggtagtgtg

SEQ ID NO: 828405 - DNA, 15 bp, Homo sapiens
agactggtagtgtgc

SEQ ID NO: 828406 - DNA, 15 bp, Homo sapiens
gactggtagtgtgct

SEQ ID NO: 828407 - DNA, 15 bp, Homo sapiens
actggtagtgtgctt

SEQ ID NO: 828408 - DNA, 15 bp, Homo sapiens
ctggtagtgtgctta

SEQ ID NO: 828409 - DNA, 15 bp, Homo sapiens
tggtagtgtgcttag

SEQ ID NO: 828410 - DNA, 15 bp, Homo sapiens
ggtagtgtgcttaga

SEQ ID NO: 828411 - DNA, 15 bp, Homo sapiens
gtagtgtgcttagag

SEQ ID NO: 828412 - DNA, 15 bp, Homo sapiens
tagtgtgcttagagg

SEQ ID NO: 828413 - DNA, 15 bp, Homo sapiens
agtgtgcttagaggg

SEQ ID NO: 828414 - DNA, 15 bp, Homo sapiens
gtgtgcttagagggt

SEQ ID NO: 828415 - DNA, 15 bp, Homo sapiens
tgtgcttagagggta

SEQ ID NO: 828416 - DNA, 15 bp, Homo sapiens
gtgcttagagggtag

SEQ ID NO: 828417 - DNA, 15 bp, Homo sapiens
tgcttagagggtaga

SEQ ID NO: 828418 - DNA, 15 bp, Homo sapiens
gcttagagggtagat

SEQ ID NO: 828419 - DNA, 15 bp, Homo sapiens
cttagagggtagatt

SEQ ID NO: 828420 - DNA, 15 bp, Homo sapiens
ttagagggtagatta

SEQ ID NO: 828421 - DNA, 15 bp, Homo sapiens
tagagggtagattac

SEQ ID NO: 828422 - DNA, 15 bp, Homo sapiens
agagggtagattact

SEQ ID NO: 828423 - DNA, 15 bp, Homo sapiens
gagggtagattactg

SEQ ID NO: 828424 - DNA, 15 bp, Homo sapiens
agggtagattactgg

SEQ ID NO: 828425 - DNA, 15 bp, Homo sapiens
gggtagattactggt

SEQ ID NO: 828426 - DNA, 15 bp, Homo sapiens
ggtagattactggtt

SEQ ID NO: 828427 - DNA, 15 bp, Homo sapiens
gtagattactggttt

SEQ ID NO: 828428 - DNA, 15 bp, Homo sapiens
tagattactggtttt

SEQ ID NO: 828429 - DNA, 15 bp, Homo sapiens
agattactggtttta

SEQ ID NO: 828430 - DNA, 15 bp, Homo sapiens
gattactggttttaa

SEQ ID NO: 828431 - DNA, 15 bp, Homo sapiens
attactggttttaaa

SEQ ID NO: 828432 - DNA, 15 bp, Homo sapiens
ttactggttttaaat

SEQ ID NO: 828433 - DNA, 15 bp, Homo sapiens
tactggttttaaatt

SEQ ID NO: 828434 - DNA, 15 bp, Homo sapiens
actggttttaaatta

SEQ ID NO: 828435 - DNA, 15 bp, Homo sapiens
ctggttttaaattac

SEQ ID NO: 828436 - DNA, 15 bp, Homo sapiens
tggttttaaattact

SEQ ID NO: 828437 - DNA, 15 bp, Homo sapiens
ggttttaaattactc

SEQ ID NO: 828438 - DNA, 15 bp, Homo sapiens
gttttaaattactca

SEQ ID NO: 828439 - DNA, 15 bp, Homo sapiens
ttttaaattactcaa

SEQ ID NO: 828440 - DNA, 15 bp, Homo sapiens
tttaaattactcaag

SEQ ID NO: 828441 - DNA, 15 bp, Homo sapiens
ttaaattactcaagt

SEQ ID NO: 828442 - DNA, 15 bp, Homo sapiens
taaattactcaagtg

SEQ ID NO: 828443 - DNA, 15 bp, Homo sapiens
aaattactcaagtga

SEQ ID NO: 828444 - DNA, 15 bp, Homo sapiens
aattactcaagtgat

SEQ ID NO: 828445 - DNA, 15 bp, Homo sapiens
attactcaagtgatt

SEQ ID NO: 828446 - DNA, 15 bp, Homo sapiens
ttactcaagtgatta

SEQ ID NO: 828447 - DNA, 15 bp, Homo sapiens
tactcaagtgattac

SEQ ID NO: 828448 - DNA, 15 bp, Homo sapiens
actcaagtgattact

SEQ ID NO: 828449 - DNA, 15 bp, Homo sapiens
ctcaagtgattactc

SEQ ID NO: 828450 - DNA, 15 bp, Homo sapiens
tcaagtgattactcg

SEQ ID NO: 828451 - DNA, 15 bp, Homo sapiens
caagtgattactcgg

SEQ ID NO: 828452 - DNA, 15 bp, Homo sapiens
aagtgattactcgga

SEQ ID NO: 828453 - DNA, 15 bp, Homo sapiens
agtgattactcggat

SEQ ID NO: 828454 - DNA, 15 bp, Homo sapiens
gtgattactcggatt

SEQ ID NO: 828455 - DNA, 15 bp, Homo sapiens
tgattactcggatta

SEQ ID NO: 828456 - DNA, 15 bp, Homo sapiens
gattactcggattaa

SEQ ID NO: 828457 - DNA, 15 bp, Homo sapiens
attactcggattaac

SEQ ID NO: 828458 - DNA, 15 bp, Homo sapiens
ttactcggattaacg

SEQ ID NO: 828459 - DNA, 15 bp, Homo sapiens
tactcggattaacgg

SEQ ID NO: 828460 - DNA, 15 bp, Homo sapiens
actcggattaacgga

SEQ ID NO: 828461 - DNA, 15 bp, Homo sapiens
ctcggattaacggaa

SEQ ID NO: 828462 - DNA, 15 bp, Homo sapiens
tcggattaacggaaa

SEQ ID NO: 828463 - DNA, 15 bp, Homo sapiens
cggattaacggaaat

SEQ ID NO: 828464 - DNA, 15 bp, Homo sapiens
ggattaacggaaatt

SEQ ID NO: 828465 - DNA, 15 bp, Homo sapiens
gattaacggaaattt

SEQ ID NO: 828466 - DNA, 15 bp, Homo sapiens
attaacggaaatttg

SEQ ID NO: 828467 - DNA, 15 bp, Homo sapiens
ttaacggaaatttgc

SEQ ID NO: 828468 - DNA, 15 bp, Homo sapiens
taacggaaatttgct

SEQ ID NO: 828469 - DNA, 15 bp, Homo sapiens
aacggaaatttgcta

SEQ ID NO: 828470 - DNA, 15 bp, Homo sapiens
acggaaatttgctat

SEQ ID NO: 828471 - DNA, 15 bp, Homo sapiens
cggaaatttgctatt

SEQ ID NO: 828472 - DNA, 15 bp, Homo sapiens
ggaaatttgctattt

SEQ ID NO: 828473 - DNA, 15 bp, Homo sapiens
gaaatttgctatttg

SEQ ID NO: 828474 - DNA, 15 bp, Homo sapiens
aaatttgctatttgg

SEQ ID NO: 828475 - DNA, 15 bp, Homo sapiens
aatttgctatttgga

SEQ ID NO: 828476 - DNA, 15 bp, Homo sapiens
atttgctatttggag

SEQ ID NO: 828477 - DNA, 15 bp, Homo sapiens
tttgctatttggaga

SEQ ID NO: 828478 - DNA, 15 bp, Homo sapiens
ttgctatttggagaa

SEQ ID NO: 828479 - DNA, 15 bp, Homo sapiens
tgctatttggagaaa

SEQ ID NO: 828480 - DNA, 15 bp, Homo sapiens
gctatttggagaaaa

SEQ ID NO: 828481 - DNA, 15 bp, Homo sapiens
ctatttggagaaaaa

SEQ ID NO: 828482 - DNA, 15 bp, Homo sapiens
tatttggagaaaaaa

SEQ ID NO: 828483 - DNA, 15 bp, Homo sapiens
atttggagaaaaaat

SEQ ID NO: 828484 - DNA, 15 bp, Homo sapiens
tttggagaaaaaata

SEQ ID NO: 828485 - DNA, 15 bp, Homo sapiens
ttggagaaaaaataa

SEQ ID NO: 828486 - DNA, 15 bp, Homo sapiens
tggagaaaaaataaa

SEQ ID NO: 828487 - DNA, 15 bp, Homo sapiens
ggagaaaaaataaag

SEQ ID NO: 828488 - DNA, 15 bp, Homo sapiens
gagaaaaaataaagc

SEQ ID NO: 828489 - DNA, 15 bp, Homo sapiens
agaaaaaataaagca

SEQ ID NO: 828490 - DNA, 15 bp, Homo sapiens
gaaaaaataaagcat

SEQ ID NO: 828491 - DNA, 15 bp, Homo sapiens
aaaaaataaagcatt

SEQ ID NO: 828492 - DNA, 15 bp, Homo sapiens
aaaaataaagcattc

SEQ ID NO: 828493 - DNA, 15 bp, Homo sapiens
aaaataaagcattct

SEQ ID NO: 828494 - DNA, 15 bp, Homo sapiens
aaataaagcattctc

SEQ ID NO: 828495 - DNA, 15 bp, Homo sapiens
aataaagcattctcc

SEQ ID NO: 828496 - DNA, 15 bp, Homo sapiens
ataaagcattctcct

SEQ ID NO: 828497 - DNA, 15 bp, Homo sapiens
taaagcattctcctt

SEQ ID NO: 828498 - DNA, 15 bp, Homo sapiens
aaagcattctccttt

SEQ ID NO: 828499 - DNA, 15 bp, Homo sapiens
aagcattctcctttt

SEQ ID NO: 828500 - DNA, 15 bp, Homo sapiens
agcattctccttttg

SEQ ID NO: 828501 - DNA, 15 bp, Homo sapiens
gcattctccttttgg

SEQ ID NO: 828502 - DNA, 15 bp, Homo sapiens
cattctccttttggc

SEQ ID NO: 828503 - DNA, 15 bp, Homo sapiens
attctccttttggca

SEQ ID NO: 828504 - DNA, 15 bp, Homo sapiens
ttctccttttggcat

SEQ ID NO: 828505 - DNA, 15 bp, Homo sapiens
tctccttttggcata

SEQ ID NO: 828506 - DNA, 15 bp, Homo sapiens
ctccttttggcatac

SEQ ID NO: 828507 - DNA, 15 bp, Homo sapiens
tccttttggcatact

SEQ ID NO: 828508 - DNA, 15 bp, Homo sapiens
ccttttggcatacta

SEQ ID NO: 828509 - DNA, 15 bp, Homo sapiens
cttttggcatactac

SEQ ID NO: 828510 - DNA, 15 bp, Homo sapiens
ttttggcatactact

SEQ ID NO: 828511 - DNA, 15 bp, Homo sapiens
tttggcatactacta

SEQ ID NO: 828512 - DNA, 15 bp, Homo sapiens
ttggcatactactag

SEQ ID NO: 828513 - DNA, 15 bp, Homo sapiens
tggcatactactagc

SEQ ID NO: 828514 - DNA, 15 bp, Homo sapiens
ggcatactactagcc

SEQ ID NO: 828515 - DNA, 15 bp, Homo sapiens
gcatactactagcca

SEQ ID NO: 828516 - DNA, 15 bp, Homo sapiens
catactactagccaa

SEQ ID NO: 828517 - DNA, 15 bp, Homo sapiens
atactactagccaaa

SEQ ID NO: 828518 - DNA, 15 bp, Homo sapiens
tactactagccaaaa

SEQ ID NO: 828519 - DNA, 15 bp, Homo sapiens
actactagccaaaat

SEQ ID NO: 828520 - DNA, 15 bp, Homo sapiens
ctactagccaaaata

SEQ ID NO: 828521 - DNA, 15 bp, Homo sapiens
tactagccaaaataa

SEQ ID NO: 828522 - DNA, 15 bp, Homo sapiens
actagccaaaataaa

SEQ ID NO: 828523 - DNA, 15 bp, Homo sapiens
ctagccaaaataaat

SEQ ID NO: 828524 - DNA, 15 bp, Homo sapiens
tagccaaaataaata

SEQ ID NO: 828525 - DNA, 15 bp, Homo sapiens
agccaaaataaataa

SEQ ID NO: 828526 - DNA, 15 bp, Homo sapiens
gccaaaataaataaa

SEQ ID NO: 828527 - DNA, 15 bp, Homo sapiens
ccaaaataaataaat

SEQ ID NO: 828528 - DNA, 15 bp, Homo sapiens
aaaataaataaatac

SEQ ID NO: 828529 - DNA, 15 bp, Homo sapiens
aaataaataaataca

SEQ ID NO: 828530 - DNA, 15 bp, Homo sapiens
aataaataaatacat

SEQ ID NO: 828531 - DNA, 15 bp, Homo sapiens
ataaataaatacatc

SEQ ID NO: 828532 - DNA, 15 bp, Homo sapiens
taaataaatacatcc

SEQ ID NO: 828533 - DNA, 15 bp, Homo sapiens
aaataaatacatcct

SEQ ID NO: 828534 - DNA, 15 bp, Homo sapiens
aataaatacatcctg

SEQ ID NO: 828535 - DNA, 15 bp, Homo sapiens
ataaatacatcctga

SEQ ID NO: 828536 - DNA, 15 bp, Homo sapiens
taaatacatcctgat

SEQ ID NO: 828537 - DNA, 15 bp, Homo sapiens
aaatacatcctgatg

SEQ ID NO: 828538 - DNA, 15 bp, Homo sapiens
aatacatcctgatgg

SEQ ID NO: 828539 - DNA, 15 bp, Homo sapiens
atacatcctgatgga

SEQ ID NO: 828540 - DNA, 15 bp, Homo sapiens
tacatcctgatggat

SEQ ID NO: 828541 - DNA, 15 bp, Homo sapiens
acatcctgatggatt

SEQ ID NO: 828542 - DNA, 15 bp, Homo sapiens
catcctgatggatta

SEQ ID NO: 828543 - DNA, 15 bp, Homo sapiens
atcctgatggattaa

SEQ ID NO: 828544 - DNA, 15 bp, Homo sapiens
tcctgatggattaac

SEQ ID NO: 828545 - DNA, 15 bp, Homo sapiens
cctgatggattaaca

SEQ ID NO: 828546 - DNA, 15 bp, Homo sapiens
ctgatggattaacaa

SEQ ID NO: 828547 - DNA, 15 bp, Homo sapiens
tgatggattaacaag

SEQ ID NO: 828548 - DNA, 15 bp, Homo sapiens
gatggattaacaagt

SEQ ID NO: 828549 - DNA, 15 bp, Homo sapiens
atggattaacaagtt

SEQ ID NO: 828550 - DNA, 15 bp, Homo sapiens
tggattaacaagtta

SEQ ID NO: 828551 - DNA, 15 bp, Homo sapiens
ggattaacaagttag

SEQ ID NO: 828552 - DNA, 15 bp, Homo sapiens
gattaacaagttaga

SEQ ID NO: 828553 - DNA, 15 bp, Homo sapiens
attaacaagttagag

SEQ ID NO: 828554 - DNA, 15 bp, Homo sapiens
ttaacaagttagagg

SEQ ID NO: 828555 - DNA, 15 bp, Homo sapiens
taacaagttagaggt

SEQ ID NO: 828556 - DNA, 15 bp, Homo sapiens
aacaagttagaggtt

SEQ ID NO: 828557 - DNA, 15 bp, Homo sapiens
acaagttagaggtta

SEQ ID NO: 828558 - DNA, 15 bp, Homo sapiens
caagttagaggttaa

SEQ ID NO: 828559 - DNA, 15 bp, Homo sapiens
aagttagaggttaaa

SEQ ID NO: 828560 - DNA, 15 bp, Homo sapiens
agttagaggttaaaa

SEQ ID NO: 828561 - DNA, 15 bp, Homo sapiens
gttagaggttaaaaa

SEQ ID NO: 828562 - DNA, 15 bp, Homo sapiens
ttagaggttaaaaaa

SEQ ID NO: 828563 - DNA, 15 bp, Homo sapiens
tagaggttaaaaaaa

SEQ ID NO: 828564 - DNA, 15 bp, Homo sapiens
agaggttaaaaaaag

SEQ ID NO: 828565 - DNA, 15 bp, Homo sapiens
gaggttaaaaaaaga

SEQ ID NO: 828566 - DNA, 15 bp, Homo sapiens
aggttaaaaaaagaa

SEQ ID NO: 828567 - DNA, 15 bp, Homo sapiens
ggttaaaaaaagaaa

SEQ ID NO: 828568 - DNA, 15 bp, Homo sapiens
gttaaaaaaagaaaa

SEQ ID NO: 828569 - DNA, 15 bp, Homo sapiens
ttaaaaaaagaaaat

SEQ ID NO: 828570 - DNA, 15 bp, Homo sapiens
taaaaaaagaaaata

SEQ ID NO: 828571 - DNA, 15 bp, Homo sapiens
aaaaaaagaaaataa

SEQ ID NO: 828572 - DNA, 15 bp, Homo sapiens
aaaaaagaaaataaa

SEQ ID NO: 828573 - DNA, 15 bp, Homo sapiens
aaaaagaaaataaaa

SEQ ID NO: 828574 - DNA, 15 bp, Homo sapiens
aaaagaaaataaaag

SEQ ID NO: 828575 - DNA, 15 bp, Homo sapiens
aaagaaaataaaaga

SEQ ID NO: 828576 - DNA, 15 bp, Homo sapiens
aagaaaataaaagat

SEQ ID NO: 828577 - DNA, 15 bp, Homo sapiens
agaaaataaaagata

SEQ ID NO: 828578 - DNA, 15 bp, Homo sapiens
gaaaataaaagatac

SEQ ID NO: 828579 - DNA, 15 bp, Homo sapiens
aaaataaaagatact

SEQ ID NO: 828580 - DNA, 15 bp, Homo sapiens
aaataaaagatactc

SEQ ID NO: 828581 - DNA, 15 bp, Homo sapiens
aataaaagatactct

SEQ ID NO: 828582 - DNA, 15 bp, Homo sapiens
ataaaagatactcta

SEQ ID NO: 828583 - DNA, 15 bp, Homo sapiens
taaaagatactctaa

SEQ ID NO: 828584 - DNA, 15 bp, Homo sapiens
aaaagatactctaaa

SEQ ID NO: 828585 - DNA, 15 bp, Homo sapiens
aaagatactctaaag

SEQ ID NO: 828586 - DNA, 15 bp, Homo sapiens
aagatactctaaagc

SEQ ID NO: 828587 - DNA, 15 bp, Homo sapiens
agatactctaaagca

SEQ ID NO: 828588 - DNA, 15 bp, Homo sapiens
gatactctaaagcag

SEQ ID NO: 828589 - DNA, 15 bp, Homo sapiens
atactctaaagcagt

SEQ ID NO: 828590 - DNA, 15 bp, Homo sapiens
tactctaaagcagtg

SEQ ID NO: 828591 - DNA, 15 bp, Homo sapiens
actctaaagcagtga

SEQ ID NO: 828592 - DNA, 15 bp, Homo sapiens
ctctaaagcagtgat

SEQ ID NO: 828593 - DNA, 15 bp, Homo sapiens
tctaaagcagtgatt

SEQ ID NO: 828594 - DNA, 15 bp, Homo sapiens
ctaaagcagtgattc

SEQ ID NO: 828595 - DNA, 15 bp, Homo sapiens
taaagcagtgattcc

SEQ ID NO: 828596 - DNA, 15 bp, Homo sapiens
aaagcagtgattccc

SEQ ID NO: 828597 - DNA, 15 bp, Homo sapiens
aagcagtgattccca

SEQ ID NO: 828598 - DNA, 15 bp, Homo sapiens
agcagtgattcccaa

SEQ ID NO: 828599 - DNA, 15 bp, Homo sapiens
gcagtgattcccaaa

SEQ ID NO: 828600 - DNA, 15 bp, Homo sapiens
cagtgattcccaaac

SEQ ID NO: 828601 - DNA, 15 bp, Homo sapiens
agtgattcccaaact

SEQ ID NO: 828602 - DNA, 15 bp, Homo sapiens
gtgattcccaaactt

SEQ ID NO: 828603 - DNA, 15 bp, Homo sapiens
tgattcccaaacttg

SEQ ID NO: 828604 - DNA, 15 bp, Homo sapiens
gattcccaaacttgg

SEQ ID NO: 828605 - DNA, 15 bp, Homo sapiens
attcccaaacttggc

SEQ ID NO: 828606 - DNA, 15 bp, Homo sapiens
ttcccaaacttggct

SEQ ID NO: 828607 - DNA, 15 bp, Homo sapiens
tcccaaacttggctg

SEQ ID NO: 828608 - DNA, 15 bp, Homo sapiens
cccaaacttggctgt

SEQ ID NO: 828609 - DNA, 15 bp, Homo sapiens
ccaaacttggctgta

SEQ ID NO: 828610 - DNA, 15 bp, Homo sapiens
caaacttggctgtac

SEQ ID NO: 828611 - DNA, 15 bp, Homo sapiens
aaacttggctgtaca

SEQ ID NO: 828612 - DNA, 15 bp, Homo sapiens
aacttggctgtacac

SEQ ID NO: 828613 - DNA, 15 bp, Homo sapiens
acttggctgtacact

SEQ ID NO: 828614 - DNA, 15 bp, Homo sapiens
cttggctgtacactg

SEQ ID NO: 828615 - DNA, 15 bp, Homo sapiens
ttggctgtacactgg

SEQ ID NO: 828616 - DNA, 15 bp, Homo sapiens
tggctgtacactgga

SEQ ID NO: 828617 - DNA, 15 bp, Homo sapiens
ggctgtacactggac

SEQ ID NO: 828618 - DNA, 15 bp, Homo sapiens
gctgtacactggact

SEQ ID NO: 828619 - DNA, 15 bp, Homo sapiens
ctgtacactggactc

SEQ ID NO: 828620 - DNA, 15 bp, Homo sapiens
tgtacactggactca

SEQ ID NO: 828621 - DNA, 15 bp, Homo sapiens
gtacactggactcat

SEQ ID NO: 828622 - DNA, 15 bp, Homo sapiens
tacactggactcatc

SEQ ID NO: 828623 - DNA, 15 bp, Homo sapiens
acactggactcatcc

SEQ ID NO: 828624 - DNA, 15 bp, Homo sapiens
cactggactcatcct

SEQ ID NO: 828625 - DNA, 15 bp, Homo sapiens
actggactcatcctc

SEQ ID NO: 828626 - DNA, 15 bp, Homo sapiens
ctggactcatcctca

SEQ ID NO: 828627 - DNA, 15 bp, Homo sapiens
tggactcatcctcat

SEQ ID NO: 828628 - DNA, 15 bp, Homo sapiens
ggactcatcctcatc

SEQ ID NO: 828629 - DNA, 15 bp, Homo sapiens
gactcatcctcatcc

SEQ ID NO: 828630 - DNA, 15 bp, Homo sapiens
actcatcctcatcca

SEQ ID NO: 828631 - DNA, 15 bp, Homo sapiens
ctcatcctcatccat

SEQ ID NO: 828632 - DNA, 15 bp, Homo sapiens
tcatcctcatccatc

SEQ ID NO: 828633 - DNA, 15 bp, Homo sapiens
catcctcatccatca

SEQ ID NO: 828634 - DNA, 15 bp, Homo sapiens
atcctcatccatcat

SEQ ID NO: 828635 - DNA, 15 bp, Homo sapiens
tcctcatccatcatc

SEQ ID NO: 828636 - DNA, 15 bp, Homo sapiens
cctcatccatcatct

SEQ ID NO: 828637 - DNA, 15 bp, Homo sapiens
ctcatccatcatctg

SEQ ID NO: 828638 - DNA, 15 bp, Homo sapiens
tcatccatcatctgg

SEQ ID NO: 828639 - DNA, 15 bp, Homo sapiens
catccatcatctggc

SEQ ID NO: 828640 - DNA, 15 bp, Homo sapiens
atccatcatctggct

SEQ ID NO: 828641 - DNA, 15 bp, Homo sapiens
tccatcatctggctg

SEQ ID NO: 828642 - DNA, 15 bp, Homo sapiens
ccatcatctggctgt

SEQ ID NO: 828643 - DNA, 15 bp, Homo sapiens
catcatctggctgta

SEQ ID NO: 828644 - DNA, 15 bp, Homo sapiens
atcatctggctgtac

SEQ ID NO: 828645 - DNA, 15 bp, Homo sapiens
tcatctggctgtaca

SEQ ID NO: 828646 - DNA, 15 bp, Homo sapiens
catctggctgtacat

SEQ ID NO: 828647 - DNA, 15 bp, Homo sapiens
atctggctgtacatt

SEQ ID NO: 828648 - DNA, 15 bp, Homo sapiens
tctggctgtacatta

SEQ ID NO: 828649 - DNA, 15 bp, Homo sapiens
ctggctgtacattag

SEQ ID NO: 828650 - DNA, 15 bp, Homo sapiens
tggctgtacattaga

SEQ ID NO: 828651 - DNA, 15 bp, Homo sapiens
ggctgtacattagaa

SEQ ID NO: 828652 - DNA, 15 bp, Homo sapiens
gctgtacattagaat

SEQ ID NO: 828653 - DNA, 15 bp, Homo sapiens
ctgtacattagaatc

SEQ ID NO: 828654 - DNA, 15 bp, Homo sapiens
tgtacattagaatct

SEQ ID NO: 828655 - DNA, 15 bp, Homo sapiens
gtacattagaatctt

SEQ ID NO: 828656 - DNA, 15 bp, Homo sapiens
tacattagaatcttc

SEQ ID NO: 828657 - DNA, 15 bp, Homo sapiens
acattagaatcttct

SEQ ID NO: 828658 - DNA, 15 bp, Homo sapiens
cattagaatcttctt

SEQ ID NO: 828659 - DNA, 15 bp, Homo sapiens
attagaatcttcttg

SEQ ID NO: 828660 - DNA, 15 bp, Homo sapiens
ttagaatcttcttga

SEQ ID NO: 828661 - DNA, 15 bp, Homo sapiens
tagaatcttcttgat

SEQ ID NO: 828662 - DNA, 15 bp, Homo sapiens
agaatcttcttgatt

SEQ ID NO: 828663 - DNA, 15 bp, Homo sapiens
gaatcttcttgatta

SEQ ID NO: 828664 - DNA, 15 bp, Homo sapiens
aatcttcttgattag

SEQ ID NO: 828665 - DNA, 15 bp, Homo sapiens
atcttcttgattaga

SEQ ID NO: 828666 - DNA, 15 bp, Homo sapiens
tcttcttgattagaa

SEQ ID NO: 828667 - DNA, 15 bp, Homo sapiens
cttcttgattagaaa

SEQ ID NO: 828668 - DNA, 15 bp, Homo sapiens
ttcttgattagaaaa

SEQ ID NO: 828669 - DNA, 15 bp, Homo sapiens
tcttgattagaaaaa

SEQ ID NO: 828670 - DNA, 15 bp, Homo sapiens
cttgattagaaaaat

SEQ ID NO: 828671 - DNA, 15 bp, Homo sapiens
ttgattagaaaaata

SEQ ID NO: 828672 - DNA, 15 bp, Homo sapiens
tgattagaaaaataa

SEQ ID NO: 828673 - DNA, 15 bp, Homo sapiens
gattagaaaaataaa

SEQ ID NO: 828674 - DNA, 15 bp, Homo sapiens
attagaaaaataaag

SEQ ID NO: 828675 - DNA, 15 bp, Homo sapiens
ttagaaaaataaagc

SEQ ID NO: 828676 - DNA, 15 bp, Homo sapiens
tagaaaaataaagct

SEQ ID NO: 828677 - DNA, 15 bp, Homo sapiens
agaaaaataaagctt

SEQ ID NO: 828678 - DNA, 15 bp, Homo sapiens
gaaaaataaagcttg

SEQ ID NO: 828679 - DNA, 15 bp, Homo sapiens
aaaaataaagcttgg

SEQ ID NO: 828680 - DNA, 15 bp, Homo sapiens
aaaataaagcttggt

SEQ ID NO: 828681 - DNA, 15 bp, Homo sapiens
aaataaagcttggtc

SEQ ID NO: 828682 - DNA, 15 bp, Homo sapiens
aataaagcttggtcc

SEQ ID NO: 828683 - DNA, 15 bp, Homo sapiens
ataaagcttggtcct

SEQ ID NO: 828684 - DNA, 15 bp, Homo sapiens
taaagcttggtcctt

SEQ ID NO: 828685 - DNA, 15 bp, Homo sapiens
aaagcttggtccttt

SEQ ID NO: 828686 - DNA, 15 bp, Homo sapiens
aagcttggtcctttt

SEQ ID NO: 828687 - DNA, 15 bp, Homo sapiens
agcttggtccttttg

SEQ ID NO: 828688 - DNA, 15 bp, Homo sapiens
gcttggtccttttgg

SEQ ID NO: 828689 - DNA, 15 bp, Homo sapiens
cttggtccttttggt

SEQ ID NO: 828690 - DNA, 15 bp, Homo sapiens
ttggtccttttggtg

SEQ ID NO: 828691 - DNA, 15 bp, Homo sapiens
tggtccttttggtgc

SEQ ID NO: 828692 - DNA, 15 bp, Homo sapiens
ggtccttttggtgca

SEQ ID NO: 828693 - DNA, 15 bp, Homo sapiens
gtccttttggtgcac

SEQ ID NO: 828694 - DNA, 15 bp, Homo sapiens
tccttttggtgcact

SEQ ID NO: 828695 - DNA, 15 bp, Homo sapiens
ccttttggtgcactg

SEQ ID NO: 828696 - DNA, 15 bp, Homo sapiens
cttttggtgcactgt

SEQ ID NO: 828697 - DNA, 15 bp, Homo sapiens
ttttggtgcactgtt

SEQ ID NO: 828698 - DNA, 15 bp, Homo sapiens
tttggtgcactgtta

SEQ ID NO: 828699 - DNA, 15 bp, Homo sapiens
ttggtgcactgttaa

SEQ ID NO: 828700 - DNA, 15 bp, Homo sapiens
tggtgcactgttaac

SEQ ID NO: 828701 - DNA, 15 bp, Homo sapiens
ggtgcactgttaacc

SEQ ID NO: 828702 - DNA, 15 bp, Homo sapiens
gtgcactgttaacca

SEQ ID NO: 828703 - DNA, 15 bp, Homo sapiens
tgcactgttaaccaa

SEQ ID NO: 828704 - DNA, 15 bp, Homo sapiens
gcactgttaaccaaa

SEQ ID NO: 828705 - DNA, 15 bp, Homo sapiens
cactgttaaccaaaa

SEQ ID NO: 828706 - DNA, 15 bp, Homo sapiens
actgttaaccaaaat

SEQ ID NO: 828707 - DNA, 15 bp, Homo sapiens
ctgttaaccaaaata

SEQ ID NO: 828708 - DNA, 15 bp, Homo sapiens
tgttaaccaaaataa

SEQ ID NO: 828709 - DNA, 15 bp, Homo sapiens
gttaaccaaaataaa

SEQ ID NO: 828710 - DNA, 15 bp, Homo sapiens
ttaaccaaaataaat

SEQ ID NO: 828711 - DNA, 15 bp, Homo sapiens
taaccaaaataaata

SEQ ID NO: 828712 - DNA, 15 bp, Homo sapiens
aaccaaaataaataa

SEQ ID NO: 828713 - DNA, 15 bp, Homo sapiens
accaaaataaataaa

SEQ ID NO: 828714 - DNA, 15 bp, Homo sapiens
taaataaatacatca

SEQ ID NO: 828715 - DNA, 15 bp, Homo sapiens
aaataaatacatcaa

SEQ ID NO: 828716 - DNA, 15 bp, Homo sapiens
aataaatacatcaaa

SEQ ID NO: 828717 - DNA, 15 bp, Homo sapiens
ataaatacatcaaaa

SEQ ID NO: 828718 - DNA, 15 bp, Homo sapiens
taaatacatcaaaac

SEQ ID NO: 828719 - DNA, 15 bp, Homo sapiens
aaatacatcaaaaca

SEQ ID NO: 828720 - DNA, 15 bp, Homo sapiens
aatacatcaaaacag

SEQ ID NO: 828721 - DNA, 15 bp, Homo sapiens
atacatcaaaacaga

SEQ ID NO: 828722 - DNA, 15 bp, Homo sapiens
tacatcaaaacagat

SEQ ID NO: 828723 - DNA, 15 bp, Homo sapiens
acatcaaaacagatt

SEQ ID NO: 828724 - DNA, 15 bp, Homo sapiens
catcaaaacagatta

SEQ ID NO: 828725 - DNA, 15 bp, Homo sapiens
atcaaaacagattaa

SEQ ID NO: 828726 - DNA, 15 bp, Homo sapiens
tcaaaacagattaac

SEQ ID NO: 828727 - DNA, 15 bp, Homo sapiens
caaaacagattaaca

SEQ ID NO: 828728 - DNA, 15 bp, Homo sapiens
aaaacagattaacaa

SEQ ID NO: 828729 - DNA, 15 bp, Homo sapiens
aaacagattaacaaa

SEQ ID NO: 828730 - DNA, 15 bp, Homo sapiens
aacagattaacaaat

SEQ ID NO: 828731 - DNA, 15 bp, Homo sapiens
acagattaacaaatt

SEQ ID NO: 828732 - DNA, 15 bp, Homo sapiens
cagattaacaaatta

SEQ ID NO: 828733 - DNA, 15 bp, Homo sapiens
agattaacaaattaa

SEQ ID NO: 828734 - DNA, 15 bp, Homo sapiens
gattaacaaattaaa

SEQ ID NO: 828735 - DNA, 15 bp, Homo sapiens
attaacaaattaaag

SEQ ID NO: 828736 - DNA, 15 bp, Homo sapiens
ttaacaaattaaagg

SEQ ID NO: 828737 - DNA, 15 bp, Homo sapiens
taacaaattaaaggt

SEQ ID NO: 828738 - DNA, 15 bp, Homo sapiens
aacaaattaaaggtt

SEQ ID NO: 828739 - DNA, 15 bp, Homo sapiens
acaaattaaaggtta

SEQ ID NO: 828740 - DNA, 15 bp, Homo sapiens
caaattaaaggttag

SEQ ID NO: 828741 - DNA, 15 bp, Homo sapiens
aaattaaaggttaga

SEQ ID NO: 828742 - DNA, 15 bp, Homo sapiens
aattaaaggttagag

SEQ ID NO: 828743 - DNA, 15 bp, Homo sapiens
attaaaggttagaga

SEQ ID NO: 828744 - DNA, 15 bp, Homo sapiens
ttaaaggttagagaa

SEQ ID NO: 828745 - DNA, 15 bp, Homo sapiens
taaaggttagagaaa

SEQ ID NO: 828746 - DNA, 15 bp, Homo sapiens
aaaggttagagaaaa

SEQ ID NO: 828747 - DNA, 15 bp, Homo sapiens
aaggttagagaaaag

SEQ ID NO: 828748 - DNA, 15 bp, Homo sapiens
aggttagagaaaaga

SEQ ID NO: 828749 - DNA, 15 bp, Homo sapiens
ggttagagaaaagaa

SEQ ID NO: 828750 - DNA, 15 bp, Homo sapiens
gttagagaaaagaaa

SEQ ID NO: 828751 - DNA, 15 bp, Homo sapiens
ttagagaaaagaaaa

SEQ ID NO: 828752 - DNA, 15 bp, Homo sapiens
tagagaaaagaaaat

SEQ ID NO: 828753 - DNA, 15 bp, Homo sapiens
agagaaaagaaaata

SEQ ID NO: 828754 - DNA, 15 bp, Homo sapiens
gagaaaagaaaatat

SEQ ID NO: 828755 - DNA, 15 bp, Homo sapiens
agaaaagaaaatata

SEQ ID NO: 828756 - DNA, 15 bp, Homo sapiens
gaaaagaaaatatat

SEQ ID NO: 828757 - DNA, 15 bp, Homo sapiens
aaaagaaaatatatt

SEQ ID NO: 828758 - DNA, 15 bp, Homo sapiens
aaagaaaatatattc

SEQ ID NO: 828759 - DNA, 15 bp, Homo sapiens
aagaaaatatattct

SEQ ID NO: 828760 - DNA, 15 bp, Homo sapiens
agaaaatatattctg

SEQ ID NO: 828761 - DNA, 15 bp, Homo sapiens
gaaaatatattctga

SEQ ID NO: 828762 - DNA, 15 bp, Homo sapiens
aaaatatattctgaa

SEQ ID NO: 828763 - DNA, 15 bp, Homo sapiens
aaatatattctgaac

SEQ ID NO: 828764 - DNA, 15 bp, Homo sapiens
aatatattctgaacc

SEQ ID NO: 828765 - DNA, 15 bp, Homo sapiens
atatattctgaacca

SEQ ID NO: 828766 - DNA, 15 bp, Homo sapiens
tatattctgaaccac

SEQ ID NO: 828767 - DNA, 15 bp, Homo sapiens
atattctgaaccact

SEQ ID NO: 828768 - DNA, 15 bp, Homo sapiens
tattctgaaccactg

SEQ ID NO: 828769 - DNA, 15 bp, Homo sapiens
attctgaaccactgg

SEQ ID NO: 828770 - DNA, 15 bp, Homo sapiens
ttctgaaccactggt

SEQ ID NO: 828771 - DNA, 15 bp, Homo sapiens
tctgaaccactggtt

SEQ ID NO: 828772 - DNA, 15 bp, Homo sapiens
ctgaaccactggttc

SEQ ID NO: 828773 - DNA, 15 bp, Homo sapiens
tgaaccactggttcc

SEQ ID NO: 828774 - DNA, 15 bp, Homo sapiens
gaaccactggttccc

SEQ ID NO: 828775 - DNA, 15 bp, Homo sapiens
aaccactggttccca

SEQ ID NO: 828776 - DNA, 15 bp, Homo sapiens
accactggttcccaa

SEQ ID NO: 828777 - DNA, 15 bp, Homo sapiens
ccactggttcccaaa

SEQ ID NO: 828778 - DNA, 15 bp, Homo sapiens
cactggttcccaaac

SEQ ID NO: 828779 - DNA, 15 bp, Homo sapiens
actggttcccaaact

SEQ ID NO: 828780 - DNA, 15 bp, Homo sapiens
ctggttcccaaactt

SEQ ID NO: 828781 - DNA, 15 bp, Homo sapiens
tggttcccaaacttg

SEQ ID NO: 828782 - DNA, 15 bp, Homo sapiens
ggttcccaaacttgg

SEQ ID NO: 828783 - DNA, 15 bp, Homo sapiens
gttcccaaacttggc

SEQ ID NO: 828784 - DNA, 15 bp, Homo sapiens
cccaaacttggctgc

SEQ ID NO: 828785 - DNA, 15 bp, Homo sapiens
ccaaacttggctgca

SEQ ID NO: 828786 - DNA, 15 bp, Homo sapiens
caaacttggctgcac

SEQ ID NO: 828787 - DNA, 15 bp, Homo sapiens
aaacttggctgcaca

SEQ ID NO: 828788 - DNA, 15 bp, Homo sapiens
aacttggctgcacac

SEQ ID NO: 828789 - DNA, 15 bp, Homo sapiens
acttggctgcacact

SEQ ID NO: 828790 - DNA, 15 bp, Homo sapiens
cttggctgcacactc

SEQ ID NO: 828791 - DNA, 15 bp, Homo sapiens
ttggctgcacactcg

SEQ ID NO: 828792 - DNA, 15 bp, Homo sapiens
tggctgcacactcga

SEQ ID NO: 828793 - DNA, 15 bp, Homo sapiens
ggctgcacactcgaa

SEQ ID NO: 828794 - DNA, 15 bp, Homo sapiens
gctgcacactcgaat

SEQ ID NO: 828795 - DNA, 15 bp, Homo sapiens
ctgcacactcgaatc

SEQ ID NO: 828796 - DNA, 15 bp, Homo sapiens
tgcacactcgaatca

SEQ ID NO: 828797 - DNA, 15 bp, Homo sapiens
gcacactcgaatcag

SEQ ID NO: 828798 - DNA, 15 bp, Homo sapiens
cacactcgaatcaga

SEQ ID NO: 828799 - DNA, 15 bp, Homo sapiens
acactcgaatcagaa

SEQ ID NO: 828800 - DNA, 15 bp, Homo sapiens
cactcgaatcagaat

SEQ ID NO: 828801 - DNA, 15 bp, Homo sapiens
actcgaatcagaatt

SEQ ID NO: 828802 - DNA, 15 bp, Homo sapiens
ctcgaatcagaattt

SEQ ID NO: 828803 - DNA, 15 bp, Homo sapiens
tcgaatcagaattta

SEQ ID NO: 828804 - DNA, 15 bp, Homo sapiens
cgaatcagaatttat

SEQ ID NO: 828805 - DNA, 15 bp, Homo sapiens
gaatcagaatttata

SEQ ID NO: 828806 - DNA, 15 bp, Homo sapiens
aatcagaatttataa

SEQ ID NO: 828807 - DNA, 15 bp, Homo sapiens
atcagaatttataaa

SEQ ID NO: 828808 - DNA, 15 bp, Homo sapiens
tcagaatttataaaa

SEQ ID NO: 828809 - DNA, 15 bp, Homo sapiens
cagaatttataaaaa

SEQ ID NO: 828810 - DNA, 15 bp, Homo sapiens
agaatttataaaaat

SEQ ID NO: 828811 - DNA, 15 bp, Homo sapiens
gaatttataaaaatt

SEQ ID NO: 828812 - DNA, 15 bp, Homo sapiens
aatttataaaaattc

SEQ ID NO: 828813 - DNA, 15 bp, Homo sapiens
atttataaaaattct

SEQ ID NO: 828814 - DNA, 15 bp, Homo sapiens
tttataaaaattctg

SEQ ID NO: 828815 - DNA, 15 bp, Homo sapiens
ttataaaaattctga

SEQ ID NO: 828816 - DNA, 15 bp, Homo sapiens
tataaaaattctgat

SEQ ID NO: 828817 - DNA, 15 bp, Homo sapiens
ataaaaattctgatg

SEQ ID NO: 828818 - DNA, 15 bp, Homo sapiens
taaaaattctgatgc

SEQ ID NO: 828819 - DNA, 15 bp, Homo sapiens
aaaaattctgatgcc

SEQ ID NO: 828820 - DNA, 15 bp, Homo sapiens
aaaattctgatgccc

SEQ ID NO: 828821 - DNA, 15 bp, Homo sapiens
aaattctgatgccca

SEQ ID NO: 828822 - DNA, 15 bp, Homo sapiens
aattctgatgcccag

SEQ ID NO: 828823 - DNA, 15 bp, Homo sapiens
attctgatgcccagc

SEQ ID NO: 828824 - DNA, 15 bp, Homo sapiens
ttctgatgcccagct

SEQ ID NO: 828825 - DNA, 15 bp, Homo sapiens
tctgatgcccagctt

SEQ ID NO: 828826 - DNA, 15 bp, Homo sapiens
ctgatgcccagcttg

SEQ ID NO: 828827 - DNA, 15 bp, Homo sapiens
tgatgcccagcttgt

SEQ ID NO: 828828 - DNA, 15 bp, Homo sapiens
gatgcccagcttgta

SEQ ID NO: 828829 - DNA, 15 bp, Homo sapiens
atgcccagcttgtat

SEQ ID NO: 828830 - DNA, 15 bp, Homo sapiens
tgcccagcttgtatc

SEQ ID NO: 828831 - DNA, 15 bp, Homo sapiens
gcccagcttgtatcc

SEQ ID NO: 828832 - DNA, 15 bp, Homo sapiens
cccagcttgtatccc

SEQ ID NO: 828833 - DNA, 15 bp, Homo sapiens
ccagcttgtatccca

SEQ ID NO: 828834 - DNA, 15 bp, Homo sapiens
cagcttgtatcccag

SEQ ID NO: 828835 - DNA, 15 bp, Homo sapiens
agcttgtatcccaga

SEQ ID NO: 828836 - DNA, 15 bp, Homo sapiens
gcttgtatcccagac

SEQ ID NO: 828837 - DNA, 15 bp, Homo sapiens
cttgtatcccagacc

SEQ ID NO: 828838 - DNA, 15 bp, Homo sapiens
ttgtatcccagaccc

SEQ ID NO: 828839 - DNA, 15 bp, Homo sapiens
tgtatcccagacccg

SEQ ID NO: 828840 - DNA, 15 bp, Homo sapiens
gtatcccagacccgt

SEQ ID NO: 828841 - DNA, 15 bp, Homo sapiens
tatcccagacccgtt

SEQ ID NO: 828842 - DNA, 15 bp, Homo sapiens
atcccagacccgttg

SEQ ID NO: 828843 - DNA, 15 bp, Homo sapiens
tcccagacccgttga

SEQ ID NO: 828844 - DNA, 15 bp, Homo sapiens
cccagacccgttgaa

SEQ ID NO: 828845 - DNA, 15 bp, Homo sapiens
ccagacccgttgaat

SEQ ID NO: 828846 - DNA, 15 bp, Homo sapiens
cagacccgttgaatc

SEQ ID NO: 828847 - DNA, 15 bp, Homo sapiens
agacccgttgaatct

SEQ ID NO: 828848 - DNA, 15 bp, Homo sapiens
gacccgttgaatctg

SEQ ID NO: 828849 - DNA, 15 bp, Homo sapiens
acccgttgaatctgg

SEQ ID NO: 828850 - DNA, 15 bp, Homo sapiens
cccgttgaatctggt

SEQ ID NO: 828851 - DNA, 15 bp, Homo sapiens
ccgttgaatctggtg

SEQ ID NO: 828852 - DNA, 15 bp, Homo sapiens
cgttgaatctggtgg

SEQ ID NO: 828853 - DNA, 15 bp, Homo sapiens
gttgaatctggtggg

SEQ ID NO: 828854 - DNA, 15 bp, Homo sapiens
ttgaatctggtggga

SEQ ID NO: 828855 - DNA, 15 bp, Homo sapiens
tgaatctggtgggaa

SEQ ID NO: 828856 - DNA, 15 bp, Homo sapiens
gaatctggtgggaag

SEQ ID NO: 828857 - DNA, 15 bp, Homo sapiens
aatctggtgggaagc

SEQ ID NO: 828858 - DNA, 15 bp, Homo sapiens
atctggtgggaagca

SEQ ID NO: 828859 - DNA, 15 bp, Homo sapiens
tctggtgggaagcag

SEQ ID NO: 828860 - DNA, 15 bp, Homo sapiens
ctggtgggaagcagg

SEQ ID NO: 828861 - DNA, 15 bp, Homo sapiens
tggtgggaagcaggc

SEQ ID NO: 828862 - DNA, 15 bp, Homo sapiens
ggtgggaagcaggcc

SEQ ID NO: 828863 - DNA, 15 bp, Homo sapiens
gtgggaagcaggcct

SEQ ID NO: 828864 - DNA, 15 bp, Homo sapiens
tgggaagcaggcctc

SEQ ID NO: 828865 - DNA, 15 bp, Homo sapiens
gggaagcaggcctca

SEQ ID NO: 828866 - DNA, 15 bp, Homo sapiens
ggaagcaggcctcag

SEQ ID NO: 828867 - DNA, 15 bp, Homo sapiens
gaagcaggcctcagt

SEQ ID NO: 828868 - DNA, 15 bp, Homo sapiens
aagcaggcctcagta

SEQ ID NO: 828869 - DNA, 15 bp, Homo sapiens
agcaggcctcagtat

SEQ ID NO: 828870 - DNA, 15 bp, Homo sapiens
gcaggcctcagtatt

SEQ ID NO: 828871 - DNA, 15 bp, Homo sapiens
caggcctcagtattg

SEQ ID NO: 828872 - DNA, 15 bp, Homo sapiens
aggcctcagtattgc

SEQ ID NO: 828873 - DNA, 15 bp, Homo sapiens
ggcctcagtattgct

SEQ ID NO: 828874 - DNA, 15 bp, Homo sapiens
gcctcagtattgctt

SEQ ID NO: 828875 - DNA, 15 bp, Homo sapiens
cctcagtattgcttt

SEQ ID NO: 828876 - DNA, 15 bp, Homo sapiens
ctcagtattgcttta

SEQ ID NO: 828877 - DNA, 15 bp, Homo sapiens
tcagtattgctttaa

SEQ ID NO: 828878 - DNA, 15 bp, Homo sapiens
cagtattgctttaaa

SEQ ID NO: 828879 - DNA, 15 bp, Homo sapiens
agtattgctttaaaa

SEQ ID NO: 828880 - DNA, 15 bp, Homo sapiens
gtattgctttaaaat

SEQ ID NO: 828881 - DNA, 15 bp, Homo sapiens
tattgctttaaaatc

SEQ ID NO: 828882 - DNA, 15 bp, Homo sapiens
attgctttaaaatcc

SEQ ID NO: 828883 - DNA, 15 bp, Homo sapiens
ttgctttaaaatcct

SEQ ID NO: 828884 - DNA, 15 bp, Homo sapiens
tgctttaaaatcctc

SEQ ID NO: 828885 - DNA, 15 bp, Homo sapiens
gctttaaaatcctcg

SEQ ID NO: 828886 - DNA, 15 bp, Homo sapiens
ctttaaaatcctcgg

SEQ ID NO: 828887 - DNA, 15 bp, Homo sapiens
tttaaaatcctcggg

SEQ ID NO: 828888 - DNA, 15 bp, Homo sapiens
ttaaaatcctcgggt

SEQ ID NO: 828889 - DNA, 15 bp, Homo sapiens
taaaatcctcgggtg

SEQ ID NO: 828890 - DNA, 15 bp, Homo sapiens
aaaatcctcgggtga

SEQ ID NO: 828891 - DNA, 15 bp, Homo sapiens
aaatcctcgggtgat

SEQ ID NO: 828892 - DNA, 15 bp, Homo sapiens
aatcctcgggtgatt

SEQ ID NO: 828893 - DNA, 15 bp, Homo sapiens
atcctcgggtgattg

SEQ ID NO: 828894 - DNA, 15 bp, Homo sapiens
tcctcgggtgattgc

SEQ ID NO: 828895 - DNA, 15 bp, Homo sapiens
cctcgggtgattgca

SEQ ID NO: 828896 - DNA, 15 bp, Homo sapiens
ctcgggtgattgcaa

SEQ ID NO: 828897 - DNA, 15 bp, Homo sapiens
tcgggtgattgcaat

SEQ ID NO: 828898 - DNA, 15 bp, Homo sapiens
cgggtgattgcaatg

SEQ ID NO: 828899 - DNA, 15 bp, Homo sapiens
gggtgattgcaatgg

SEQ ID NO: 828900 - DNA, 15 bp, Homo sapiens
ggtgattgcaatggc

SEQ ID NO: 828901 - DNA, 15 bp, Homo sapiens
gtgattgcaatggca

SEQ ID NO: 828902 - DNA, 15 bp, Homo sapiens
tgattgcaatggcag

SEQ ID NO: 828903 - DNA, 15 bp, Homo sapiens
gattgcaatggcaga

SEQ ID NO: 828904 - DNA, 15 bp, Homo sapiens
attgcaatggcagag

SEQ ID NO: 828905 - DNA, 15 bp, Homo sapiens
ttgcaatggcagaga

SEQ ID NO: 828906 - DNA, 15 bp, Homo sapiens
tgcaatggcagagaa

SEQ ID NO: 828907 - DNA, 15 bp, Homo sapiens
gcaatggcagagaaa

SEQ ID NO: 828908 - DNA, 15 bp, Homo sapiens
caatggcagagaaat

SEQ ID NO: 828909 - DNA, 15 bp, Homo sapiens
aatggcagagaaatc

SEQ ID NO: 828910 - DNA, 15 bp, Homo sapiens
atggcagagaaatct

SEQ ID NO: 828911 - DNA, 15 bp, Homo sapiens
tggcagagaaatctg

SEQ ID NO: 828912 - DNA, 15 bp, Homo sapiens
ggcagagaaatctgg

SEQ ID NO: 828913 - DNA, 15 bp, Homo sapiens
gcagagaaatctggg

SEQ ID NO: 828914 - DNA, 15 bp, Homo sapiens
cagagaaatctgggg

SEQ ID NO: 828915 - DNA, 15 bp, Homo sapiens
agagaaatctgggga

SEQ ID NO: 828916 - DNA, 15 bp, Homo sapiens
gagaaatctggggac

SEQ ID NO: 828917 - DNA, 15 bp, Homo sapiens
agaaatctggggacc

SEQ ID NO: 828918 - DNA, 15 bp, Homo sapiens
gaaatctggggacca

SEQ ID NO: 828919 - DNA, 15 bp, Homo sapiens
aaatctggggaccac

SEQ ID NO: 828920 - DNA, 15 bp, Homo sapiens
aatctggggaccact

SEQ ID NO: 828921 - DNA, 15 bp, Homo sapiens
atctggggaccactg

SEQ ID NO: 828922 - DNA, 15 bp, Homo sapiens
tctggggaccactgc

SEQ ID NO: 828923 - DNA, 15 bp, Homo sapiens
ctggggaccactgcc

SEQ ID NO: 828924 - DNA, 15 bp, Homo sapiens
tggggaccactgcct

SEQ ID NO: 828925 - DNA, 15 bp, Homo sapiens
ggggaccactgcctt

SEQ ID NO: 828926 - DNA, 15 bp, Homo sapiens
gggaccactgccttg

SEQ ID NO: 828927 - DNA, 15 bp, Homo sapiens
ggaccactgccttgc

SEQ ID NO: 828928 - DNA, 15 bp, Homo sapiens
gaccactgccttgca

SEQ ID NO: 828929 - DNA, 15 bp, Homo sapiens
accactgccttgcag

SEQ ID NO: 828930 - DNA, 15 bp, Homo sapiens
ccactgccttgcagc

SEQ ID NO: 828931 - DNA, 15 bp, Homo sapiens
cactgccttgcagcc

SEQ ID NO: 828932 - DNA, 15 bp, Homo sapiens
actgccttgcagcct

SEQ ID NO: 828933 - DNA, 15 bp, Homo sapiens
ctgccttgcagcctt

SEQ ID NO: 828934 - DNA, 15 bp, Homo sapiens
tgccttgcagccttg

SEQ ID NO: 828935 - DNA, 15 bp, Homo sapiens
gccttgcagccttgt

SEQ ID NO: 828936 - DNA, 15 bp, Homo sapiens
ccttgcagccttgtt

SEQ ID NO: 828937 - DNA, 15 bp, Homo sapiens
cttgcagccttgttt

SEQ ID NO: 828938 - DNA, 15 bp, Homo sapiens
ttgcagccttgtttt

SEQ ID NO: 828939 - DNA, 15 bp, Homo sapiens
tgcagccttgttttc

SEQ ID NO: 828940 - DNA, 15 bp, Homo sapiens
gcagccttgttttcc

SEQ ID NO: 828941 - DNA, 15 bp, Homo sapiens
cagccttgttttccc

SEQ ID NO: 828942 - DNA, 15 bp, Homo sapiens
agccttgttttccca

SEQ ID NO: 828943 - DNA, 15 bp, Homo sapiens
gccttgttttcccaa

SEQ ID NO: 828944 - DNA, 15 bp, Homo sapiens
ccttgttttcccaaa

SEQ ID NO: 828945 - DNA, 15 bp, Homo sapiens
cttgttttcccaaag

SEQ ID NO: 828946 - DNA, 15 bp, Homo sapiens
ttgttttcccaaagt

SEQ ID NO: 828947 - DNA, 15 bp, Homo sapiens
tgttttcccaaagtg

SEQ ID NO: 828948 - DNA, 15 bp, Homo sapiens
gttttcccaaagtgt

SEQ ID NO: 828949 - DNA, 15 bp, Homo sapiens
ttttcccaaagtgtg

SEQ ID NO: 828950 - DNA, 15 bp, Homo sapiens
tttcccaaagtgtgg

SEQ ID NO: 828951 - DNA, 15 bp, Homo sapiens
ttcccaaagtgtggt

SEQ ID NO: 828952 - DNA, 15 bp, Homo sapiens
tcccaaagtgtggtc

SEQ ID NO: 828953 - DNA, 15 bp, Homo sapiens
cccaaagtgtggtct

SEQ ID NO: 828954 - DNA, 15 bp, Homo sapiens
ccaaagtgtggtctt

SEQ ID NO: 828955 - DNA, 15 bp, Homo sapiens
caaagtgtggtcttc

SEQ ID NO: 828956 - DNA, 15 bp, Homo sapiens
aaagtgtggtcttct

SEQ ID NO: 828957 - DNA, 15 bp, Homo sapiens
aagtgtggtcttctg

SEQ ID NO: 828958 - DNA, 15 bp, Homo sapiens
agtgtggtcttctga

SEQ ID NO: 828959 - DNA, 15 bp, Homo sapiens
gtgtggtcttctgac

SEQ ID NO: 828960 - DNA, 15 bp, Homo sapiens
tgtggtcttctgacc

SEQ ID NO: 828961 - DNA, 15 bp, Homo sapiens
gtggtcttctgacca

SEQ ID NO: 828962 - DNA, 15 bp, Homo sapiens
tggtcttctgaccaa

SEQ ID NO: 828963 - DNA, 15 bp, Homo sapiens
ggtcttctgaccaac

SEQ ID NO: 828964 - DNA, 15 bp, Homo sapiens
gtcttctgaccaaca

SEQ ID NO: 828965 - DNA, 15 bp, Homo sapiens
tcttctgaccaacag

SEQ ID NO: 828966 - DNA, 15 bp, Homo sapiens
cttctgaccaacagc

SEQ ID NO: 828967 - DNA, 15 bp, Homo sapiens
ttctgaccaacagca

SEQ ID NO: 828968 - DNA, 15 bp, Homo sapiens
tctgaccaacagcat

SEQ ID NO: 828969 - DNA, 15 bp, Homo sapiens
ctgaccaacagcatt

SEQ ID NO: 828970 - DNA, 15 bp, Homo sapiens
tgaccaacagcattg

SEQ ID NO: 828971 - DNA, 15 bp, Homo sapiens
gaccaacagcattga

SEQ ID NO: 828972 - DNA, 15 bp, Homo sapiens
accaacagcattgac

SEQ ID NO: 828973 - DNA, 15 bp, Homo sapiens
ccaacagcattgacg

SEQ ID NO: 828974 - DNA, 15 bp, Homo sapiens
caacagcattgacga

SEQ ID NO: 828975 - DNA, 15 bp, Homo sapiens
aacagcattgacgat

SEQ ID NO: 828976 - DNA, 15 bp, Homo sapiens
acagcattgacgata

SEQ ID NO: 828977 - DNA, 15 bp, Homo sapiens
cagcattgacgatag

SEQ ID NO: 828978 - DNA, 15 bp, Homo sapiens
agcattgacgatagc

SEQ ID NO: 828979 - DNA, 15 bp, Homo sapiens
gcattgacgatagct

SEQ ID NO: 828980 - DNA, 15 bp, Homo sapiens
cattgacgatagctt

SEQ ID NO: 828981 - DNA, 15 bp, Homo sapiens
attgacgatagctta

SEQ ID NO: 828982 - DNA, 15 bp, Homo sapiens
ttgacgatagcttag

SEQ ID NO: 828983 - DNA, 15 bp, Homo sapiens
tgacgatagcttaga

SEQ ID NO: 828984 - DNA, 15 bp, Homo sapiens
gacgatagcttagag

SEQ ID NO: 828985 - DNA, 15 bp, Homo sapiens
acgatagcttagagc

SEQ ID NO: 828986 - DNA, 15 bp, Homo sapiens
cgatagcttagagct

SEQ ID NO: 828987 - DNA, 15 bp, Homo sapiens
gatagcttagagctt

SEQ ID NO: 828988 - DNA, 15 bp, Homo sapiens
atagcttagagcttg

SEQ ID NO: 828989 - DNA, 15 bp, Homo sapiens
tagcttagagcttgt

SEQ ID NO: 828990 - DNA, 15 bp, Homo sapiens
agcttagagcttgtt

SEQ ID NO: 828991 - DNA, 15 bp, Homo sapiens
gcttagagcttgtta

SEQ ID NO: 828992 - DNA, 15 bp, Homo sapiens
cttagagcttgttag

SEQ ID NO: 828993 - DNA, 15 bp, Homo sapiens
ttagagcttgttaga

SEQ ID NO: 828994 - DNA, 15 bp, Homo sapiens
tagagcttgttagaa

SEQ ID NO: 828995 - DNA, 15 bp, Homo sapiens
agagcttgttagaaa

SEQ ID NO: 828996 - DNA, 15 bp, Homo sapiens
gagcttgttagaaat

SEQ ID NO: 828997 - DNA, 15 bp, Homo sapiens
agcttgttagaaatg

SEQ ID NO: 828998 - DNA, 15 bp, Homo sapiens
gcttgttagaaatgc

SEQ ID NO: 828999 - DNA, 15 bp, Homo sapiens
cttgttagaaatgca

SEQ ID NO: 829000 - DNA, 15 bp, Homo sapiens
gttagaaatgcacag

SEQ ID NO: 829001 - DNA, 15 bp, Homo sapiens
ttagaaatgcacagt

SEQ ID NO: 829002 - DNA, 15 bp, Homo sapiens
tagaaatgcacagta

SEQ ID NO: 829003 - DNA, 15 bp, Homo sapiens
agaaatgcacagtat

SEQ ID NO: 829004 - DNA, 15 bp, Homo sapiens
gaaatgcacagtatc

SEQ ID NO: 829005 - DNA, 15 bp, Homo sapiens
aaatgcacagtatca

SEQ ID NO: 829006 - DNA, 15 bp, Homo sapiens
aatgcacagtatcag

SEQ ID NO: 829007 - DNA, 15 bp, Homo sapiens
atgcacagtatcagg

SEQ ID NO: 829008 - DNA, 15 bp, Homo sapiens
tgcacagtatcaggc

SEQ ID NO: 829009 - DNA, 15 bp, Homo sapiens
gcacagtatcaggcc

SEQ ID NO: 829010 - DNA, 15 bp, Homo sapiens
cacagtatcaggccc

SEQ ID NO: 829011 - DNA, 15 bp, Homo sapiens
acagtatcaggcccc

SEQ ID NO: 829012 - DNA, 15 bp, Homo sapiens
cagtatcaggcccca

SEQ ID NO: 829013 - DNA, 15 bp, Homo sapiens
agtatcaggccccat

SEQ ID NO: 829014 - DNA, 15 bp, Homo sapiens
gtatcaggccccatc

SEQ ID NO: 829015 - DNA, 15 bp, Homo sapiens
tatcaggccccatcg

SEQ ID NO: 829016 - DNA, 15 bp, Homo sapiens
atcaggccccatcgg

SEQ ID NO: 829017 - DNA, 15 bp, Homo sapiens
tcaggccccatcgga

SEQ ID NO: 829018 - DNA, 15 bp, Homo sapiens
caggccccatcggag

SEQ ID NO: 829019 - DNA, 15 bp, Homo sapiens
aggccccatcggaga

SEQ ID NO: 829020 - DNA, 15 bp, Homo sapiens
ggccccatcggagac

SEQ ID NO: 829021 - DNA, 15 bp, Homo sapiens
gccccatcggagacc

SEQ ID NO: 829022 - DNA, 15 bp, Homo sapiens
ccccatcggagaccc

SEQ ID NO: 829023 - DNA, 15 bp, Homo sapiens
cccatcggagaccca

SEQ ID NO: 829024 - DNA, 15 bp, Homo sapiens
ccatcggagacccac

SEQ ID NO: 829025 - DNA, 15 bp, Homo sapiens
catcggagacccact

SEQ ID NO: 829026 - DNA, 15 bp, Homo sapiens
atcggagacccactg

SEQ ID NO: 829027 - DNA, 15 bp, Homo sapiens
tcggagacccactga

SEQ ID NO: 829028 - DNA, 15 bp, Homo sapiens
cggagacccactgag

SEQ ID NO: 829029 - DNA, 15 bp, Homo sapiens
ggagacccactgagt

SEQ ID NO: 829030 - DNA, 15 bp, Homo sapiens
gagacccactgagtc

SEQ ID NO: 829031 - DNA, 15 bp, Homo sapiens
agacccactgagtca

SEQ ID NO: 829032 - DNA, 15 bp, Homo sapiens
gacccactgagtcag

SEQ ID NO: 829033 - DNA, 15 bp, Homo sapiens
acccactgagtcaga

SEQ ID NO: 829034 - DNA, 15 bp, Homo sapiens
cccactgagtcagaa

SEQ ID NO: 829035 - DNA, 15 bp, Homo sapiens
ccactgagtcagaat

SEQ ID NO: 829036 - DNA, 15 bp, Homo sapiens
cactgagtcagaatc

SEQ ID NO: 829037 - DNA, 15 bp, Homo sapiens
actgagtcagaatct

SEQ ID NO: 829038 - DNA, 15 bp, Homo sapiens
ctgagtcagaatctg

SEQ ID NO: 829039 - DNA, 15 bp, Homo sapiens
tgagtcagaatctgg

SEQ ID NO: 829040 - DNA, 15 bp, Homo sapiens
gagtcagaatctgga

SEQ ID NO: 829041 - DNA, 15 bp, Homo sapiens
agtcagaatctggat

SEQ ID NO: 829042 - DNA, 15 bp, Homo sapiens
gtcagaatctggatg

SEQ ID NO: 829043 - DNA, 15 bp, Homo sapiens
tcagaatctggatgt

SEQ ID NO: 829044 - DNA, 15 bp, Homo sapiens
cagaatctggatgtt

SEQ ID NO: 829045 - DNA, 15 bp, Homo sapiens
agaatctggatgttt

SEQ ID NO: 829046 - DNA, 15 bp, Homo sapiens
gaatctggatgttta

SEQ ID NO: 829047 - DNA, 15 bp, Homo sapiens
aatctggatgtttac

SEQ ID NO: 829048 - DNA, 15 bp, Homo sapiens
atctggatgtttaca

SEQ ID NO: 829049 - DNA, 15 bp, Homo sapiens
tctggatgtttacaa

SEQ ID NO: 829050 - DNA, 15 bp, Homo sapiens
ctggatgtttacaaa

SEQ ID NO: 829051 - DNA, 15 bp, Homo sapiens
tggatgtttacaaat

SEQ ID NO: 829052 - DNA, 15 bp, Homo sapiens
ggatgtttacaaatg

SEQ ID NO: 829053 - DNA, 15 bp, Homo sapiens
gatgtttacaaatgc

SEQ ID NO: 829054 - DNA, 15 bp, Homo sapiens
atgtttacaaatgcc

SEQ ID NO: 829055 - DNA, 15 bp, Homo sapiens
tgtttacaaatgcca

SEQ ID NO: 829056 - DNA, 15 bp, Homo sapiens
gtttacaaatgccag

SEQ ID NO: 829057 - DNA, 15 bp, Homo sapiens
tttacaaatgccagg

SEQ ID NO: 829058 - DNA, 15 bp, Homo sapiens
ttacaaatgccaggt

SEQ ID NO: 829059 - DNA, 15 bp, Homo sapiens
tacaaatgccaggtg

SEQ ID NO: 829060 - DNA, 15 bp, Homo sapiens
acaaatgccaggtga

SEQ ID NO: 829061 - DNA, 15 bp, Homo sapiens
caaatgccaggtgat

SEQ ID NO: 829062 - DNA, 15 bp, Homo sapiens
aaatgccaggtgatt

SEQ ID NO: 829063 - DNA, 15 bp, Homo sapiens
aatgccaggtgattc

SEQ ID NO: 829064 - DNA, 15 bp, Homo sapiens
atgccaggtgattca

SEQ ID NO: 829065 - DNA, 15 bp, Homo sapiens
tgccaggtgattcat

SEQ ID NO: 829066 - DNA, 15 bp, Homo sapiens
gccaggtgattcatg

SEQ ID NO: 829067 - DNA, 15 bp, Homo sapiens
ccaggtgattcatgt

SEQ ID NO: 829068 - DNA, 15 bp, Homo sapiens
caggtgattcatgtg

SEQ ID NO: 829069 - DNA, 15 bp, Homo sapiens
aggtgattcatgtgc

SEQ ID NO: 829070 - DNA, 15 bp, Homo sapiens
ggtgattcatgtgca

SEQ ID NO: 829071 - DNA, 15 bp, Homo sapiens
gtgattcatgtgcac

SEQ ID NO: 829072 - DNA, 15 bp, Homo sapiens
tgattcatgtgcaca

SEQ ID NO: 829073 - DNA, 15 bp, Homo sapiens
gattcatgtgcacaa

SEQ ID NO: 829074 - DNA, 15 bp, Homo sapiens
attcatgtgcacaat

SEQ ID NO: 829075 - DNA, 15 bp, Homo sapiens
ttcatgtgcacaatg

SEQ ID NO: 829076 - DNA, 15 bp, Homo sapiens
tcatgtgcacaatgg

SEQ ID NO: 829077 - DNA, 15 bp, Homo sapiens
catgtgcacaatgga

SEQ ID NO: 829078 - DNA, 15 bp, Homo sapiens
atgtgcacaatggat

SEQ ID NO: 829079 - DNA, 15 bp, Homo sapiens
tgtgcacaatggatt

SEQ ID NO: 829080 - DNA, 15 bp, Homo sapiens
gtgcacaatggattt

SEQ ID NO: 829081 - DNA, 15 bp, Homo sapiens
tgcacaatggatttg

SEQ ID NO: 829082 - DNA, 15 bp, Homo sapiens
gcacaatggatttga

SEQ ID NO: 829083 - DNA, 15 bp, Homo sapiens
cacaatggatttgaa

SEQ ID NO: 829084 - DNA, 15 bp, Homo sapiens
acaatggatttgaat

SEQ ID NO: 829085 - DNA, 15 bp, Homo sapiens
caatggatttgaatc

SEQ ID NO: 829086 - DNA, 15 bp, Homo sapiens
aatggatttgaatcc

SEQ ID NO: 829087 - DNA, 15 bp, Homo sapiens
atggatttgaatccc

SEQ ID NO: 829088 - DNA, 15 bp, Homo sapiens
tggatttgaatccca

SEQ ID NO: 829089 - DNA, 15 bp, Homo sapiens
ggatttgaatcccat

SEQ ID NO: 829090 - DNA, 15 bp, Homo sapiens
gatttgaatcccatg

SEQ ID NO: 829091 - DNA, 15 bp, Homo sapiens
atttgaatcccatgc

SEQ ID NO: 829092 - DNA, 15 bp, Homo sapiens
tttgaatcccatgcc

SEQ ID NO: 829093 - DNA, 15 bp, Homo sapiens
ttgaatcccatgcct

SEQ ID NO: 829094 - DNA, 15 bp, Homo sapiens
tgaatcccatgcctc

SEQ ID NO: 829095 - DNA, 15 bp, Homo sapiens
gaatcccatgcctcc

SEQ ID NO: 829096 - DNA, 15 bp, Homo sapiens
aatcccatgcctcca

SEQ ID NO: 829097 - DNA, 15 bp, Homo sapiens
atcccatgcctccaa

SEQ ID NO: 829098 - DNA, 15 bp, Homo sapiens
tcccatgcctccaaa

SEQ ID NO: 829099 - DNA, 15 bp, Homo sapiens
cccatgcctccaaag

SEQ ID NO: 829100 - DNA, 15 bp, Homo sapiens
ccatgcctccaaagc

SEQ ID NO: 829101 - DNA, 15 bp, Homo sapiens
catgcctccaaagca

SEQ ID NO: 829102 - DNA, 15 bp, Homo sapiens
atgcctccaaagcaa

SEQ ID NO: 829103 - DNA, 15 bp, Homo sapiens
tgcctccaaagcaag

SEQ ID NO: 829104 - DNA, 15 bp, Homo sapiens
gcctccaaagcaagt

SEQ ID NO: 829105 - DNA, 15 bp, Homo sapiens
cctccaaagcaagtg

SEQ ID NO: 829106 - DNA, 15 bp, Homo sapiens
ctccaaagcaagtgt

SEQ ID NO: 829107 - DNA, 15 bp, Homo sapiens
tccaaagcaagtgta

SEQ ID NO: 829108 - DNA, 15 bp, Homo sapiens
ccaaagcaagtgtag

SEQ ID NO: 829109 - DNA, 15 bp, Homo sapiens
caaagcaagtgtaga

SEQ ID NO: 829110 - DNA, 15 bp, Homo sapiens
aaagcaagtgtagaa

SEQ ID NO: 829111 - DNA, 15 bp, Homo sapiens
aagcaagtgtagaaa

SEQ ID NO: 829112 - DNA, 15 bp, Homo sapiens
agcaagtgtagaaaa

SEQ ID NO: 829113 - DNA, 15 bp, Homo sapiens
gcaagtgtagaaaat

SEQ ID NO: 829114 - DNA, 15 bp, Homo sapiens
caagtgtagaaaatt

SEQ ID NO: 829115 - DNA, 15 bp, Homo sapiens
aagtgtagaaaatta

SEQ ID NO: 829116 - DNA, 15 bp, Homo sapiens
agtgtagaaaattag

SEQ ID NO: 829117 - DNA, 15 bp, Homo sapiens
gtgtagaaaattagt

SEQ ID NO: 829118 - DNA, 15 bp, Homo sapiens
tgtagaaaattagtg

SEQ ID NO: 829119 - DNA, 15 bp, Homo sapiens
gtagaaaattagtgt

SEQ ID NO: 829120 - DNA, 15 bp, Homo sapiens
tagaaaattagtgtc

SEQ ID NO: 829121 - DNA, 15 bp, Homo sapiens
agaaaattagtgtcc

SEQ ID NO: 829122 - DNA, 15 bp, Homo sapiens
gaaaattagtgtcca

SEQ ID NO: 829123 - DNA, 15 bp, Homo sapiens
aaaattagtgtccat

SEQ ID NO: 829124 - DNA, 15 bp, Homo sapiens
aaattagtgtccatg

SEQ ID NO: 829125 - DNA, 15 bp, Homo sapiens
aattagtgtccatgg

SEQ ID NO: 829126 - DNA, 15 bp, Homo sapiens
attagtgtccatggc

SEQ ID NO: 829127 - DNA, 15 bp, Homo sapiens
ttagtgtccatggcc

SEQ ID NO: 829128 - DNA, 15 bp, Homo sapiens
tagtgtccatggcct

SEQ ID NO: 829129 - DNA, 15 bp, Homo sapiens
agtgtccatggccta

SEQ ID NO: 829130 - DNA, 15 bp, Homo sapiens
gtgtccatggcctat

SEQ ID NO: 829131 - DNA, 15 bp, Homo sapiens
tgtccatggcctatt

SEQ ID NO: 829132 - DNA, 15 bp, Homo sapiens
gtccatggcctattt

SEQ ID NO: 829133 - DNA, 15 bp, Homo sapiens
tccatggcctattta

SEQ ID NO: 829134 - DNA, 15 bp, Homo sapiens
ccatggcctatttat

SEQ ID NO: 829135 - DNA, 15 bp, Homo sapiens
catggcctatttata

SEQ ID NO: 829136 - DNA, 15 bp, Homo sapiens
atggcctatttatat

SEQ ID NO: 829137 - DNA, 15 bp, Homo sapiens
tggcctatttatatg

SEQ ID NO: 829138 - DNA, 15 bp, Homo sapiens
ggcctatttatatga

SEQ ID NO: 829139 - DNA, 15 bp, Homo sapiens
gcctatttatatgaa

SEQ ID NO: 829140 - DNA, 15 bp, Homo sapiens
cctatttatatgaat

SEQ ID NO: 829141 - DNA, 15 bp, Homo sapiens
ctatttatatgaata

SEQ ID NO: 829142 - DNA, 15 bp, Homo sapiens
tatttatatgaataa

SEQ ID NO: 829143 - DNA, 15 bp, Homo sapiens
atttatatgaataac

SEQ ID NO: 829144 - DNA, 15 bp, Homo sapiens
tttatatgaataaca

SEQ ID NO: 829145 - DNA, 15 bp, Homo sapiens
ttatatgaataacat

SEQ ID NO: 829146 - DNA, 15 bp, Homo sapiens
tatatgaataacatt

SEQ ID NO: 829147 - DNA, 15 bp, Homo sapiens
atatgaataacattt

SEQ ID NO: 829148 - DNA, 15 bp, Homo sapiens
tatgaataacatttt

SEQ ID NO: 829149 - DNA, 15 bp, Homo sapiens
atgaataacatttta

SEQ ID NO: 829150 - DNA, 15 bp, Homo sapiens
tgaataacattttac

SEQ ID NO: 829151 - DNA, 15 bp, Homo sapiens
gaataacattttact

SEQ ID NO: 829152 - DNA, 15 bp, Homo sapiens
aataacattttactg

SEQ ID NO: 829153 - DNA, 15 bp, Homo sapiens
ataacattttactgg

SEQ ID NO: 829154 - DNA, 15 bp, Homo sapiens
taacattttactgga

SEQ ID NO: 829155 - DNA, 15 bp, Homo sapiens
aacattttactggaa

SEQ ID NO: 829156 - DNA, 15 bp, Homo sapiens
acattttactggaat

SEQ ID NO: 829157 - DNA, 15 bp, Homo sapiens
cattttactggaata

SEQ ID NO: 829158 - DNA, 15 bp, Homo sapiens
attttactggaatat

SEQ ID NO: 829159 - DNA, 15 bp, Homo sapiens
ttttactggaatatg

SEQ ID NO: 829160 - DNA, 15 bp, Homo sapiens
tttactggaatatgg

SEQ ID NO: 829161 - DNA, 15 bp, Homo sapiens
ttactggaatatggt

SEQ ID NO: 829162 - DNA, 15 bp, Homo sapiens
tactggaatatggtc

SEQ ID NO: 829163 - DNA, 15 bp, Homo sapiens
actggaatatggtca

SEQ ID NO: 829164 - DNA, 15 bp, Homo sapiens
ctggaatatggtcac

SEQ ID NO: 829165 - DNA, 15 bp, Homo sapiens
tggaatatggtcaca

SEQ ID NO: 829166 - DNA, 15 bp, Homo sapiens
ggaatatggtcacac

SEQ ID NO: 829167 - DNA, 15 bp, Homo sapiens
gaatatggtcacacc

SEQ ID NO: 829168 - DNA, 15 bp, Homo sapiens
aatatggtcacacct

SEQ ID NO: 829169 - DNA, 15 bp, Homo sapiens
atatggtcacaccta

SEQ ID NO: 829170 - DNA, 15 bp, Homo sapiens
tatggtcacacctat

SEQ ID NO: 829171 - DNA, 15 bp, Homo sapiens
atggtcacacctatt

SEQ ID NO: 829172 - DNA, 15 bp, Homo sapiens
tggtcacacctattt

SEQ ID NO: 829173 - DNA, 15 bp, Homo sapiens
ggtcacacctatttg

SEQ ID NO: 829174 - DNA, 15 bp, Homo sapiens
gtcacacctatttgt

SEQ ID NO: 829175 - DNA, 15 bp, Homo sapiens
tcacacctatttgtt

SEQ ID NO: 829176 - DNA, 15 bp, Homo sapiens
cacacctatttgttt

SEQ ID NO: 829177 - DNA, 15 bp, Homo sapiens
acacctatttgtttt

SEQ ID NO: 829178 - DNA, 15 bp, Homo sapiens
cacctatttgttttc

SEQ ID NO: 829179 - DNA, 15 bp, Homo sapiens
acctatttgttttcc

SEQ ID NO: 829180 - DNA, 15 bp, Homo sapiens
cctatttgttttcct

SEQ ID NO: 829181 - DNA, 15 bp, Homo sapiens
ctatttgttttccta

SEQ ID NO: 829182 - DNA, 15 bp, Homo sapiens
tatttgttttcctat

SEQ ID NO: 829183 - DNA, 15 bp, Homo sapiens
atttgttttcctatt

SEQ ID NO: 829184 - DNA, 15 bp, Homo sapiens
tttgttttcctatta

SEQ ID NO: 829185 - DNA, 15 bp, Homo sapiens
ttgttttcctattat

SEQ ID NO: 829186 - DNA, 15 bp, Homo sapiens
tgttttcctattatt

SEQ ID NO: 829187 - DNA, 15 bp, Homo sapiens
gttttcctattattt

SEQ ID NO: 829188 - DNA, 15 bp, Homo sapiens
ttttcctattattta

SEQ ID NO: 829189 - DNA, 15 bp, Homo sapiens
tttcctattatttac

SEQ ID NO: 829190 - DNA, 15 bp, Homo sapiens
ttcctattatttaca

SEQ ID NO: 829191 - DNA, 15 bp, Homo sapiens
tcctattatttacag

SEQ ID NO: 829192 - DNA, 15 bp, Homo sapiens
cctattatttacagc

SEQ ID NO: 829193 - DNA, 15 bp, Homo sapiens
ctattatttacagca

SEQ ID NO: 829194 - DNA, 15 bp, Homo sapiens
tattatttacagcaa

SEQ ID NO: 829195 - DNA, 15 bp, Homo sapiens
attatttacagcaaa

SEQ ID NO: 829196 - DNA, 15 bp, Homo sapiens
ttatttacagcaaag

SEQ ID NO: 829197 - DNA, 15 bp, Homo sapiens
tatttacagcaaagt

SEQ ID NO: 829198 - DNA, 15 bp, Homo sapiens
atttacagcaaagtt

SEQ ID NO: 829199 - DNA, 15 bp, Homo sapiens
tttacagcaaagttg

SEQ ID NO: 829200 - DNA, 15 bp, Homo sapiens
ttacagcaaagttga

SEQ ID NO: 829201 - DNA, 15 bp, Homo sapiens
tacagcaaagttgag

SEQ ID NO: 829202 - DNA, 15 bp, Homo sapiens
acagcaaagttgagt

SEQ ID NO: 829203 - DNA, 15 bp, Homo sapiens
cagcaaagttgagtc

SEQ ID NO: 829204 - DNA, 15 bp, Homo sapiens
agcaaagttgagtcg

SEQ ID NO: 829205 - DNA, 15 bp, Homo sapiens
gcaaagttgagtcgt

SEQ ID NO: 829206 - DNA, 15 bp, Homo sapiens
caaagttgagtcgtt

SEQ ID NO: 829207 - DNA, 15 bp, Homo sapiens
aaagttgagtcgttg

SEQ ID NO: 829208 - DNA, 15 bp, Homo sapiens
aagttgagtcgttgt

SEQ ID NO: 829209 - DNA, 15 bp, Homo sapiens
agttgagtcgttgtg

SEQ ID NO: 829210 - DNA, 15 bp, Homo sapiens
gttgagtcgttgtga

SEQ ID NO: 829211 - DNA, 15 bp, Homo sapiens
ttgagtcgttgtgac

SEQ ID NO: 829212 - DNA, 15 bp, Homo sapiens
tgagtcgttgtgaca

SEQ ID NO: 829213 - DNA, 15 bp, Homo sapiens
gagtcgttgtgacag

SEQ ID NO: 829214 - DNA, 15 bp, Homo sapiens
agtcgttgtgacagc

SEQ ID NO: 829215 - DNA, 15 bp, Homo sapiens
gtcgttgtgacagcc

SEQ ID NO: 829216 - DNA, 15 bp, Homo sapiens
tcgttgtgacagcct

SEQ ID NO: 829217 - DNA, 15 bp, Homo sapiens
cgttgtgacagccta

SEQ ID NO: 829218 - DNA, 15 bp, Homo sapiens
gttgtgacagcctaa

SEQ ID NO: 829219 - DNA, 15 bp, Homo sapiens
ttgtgacagcctaaa

SEQ ID NO: 829220 - DNA, 15 bp, Homo sapiens
tgtgacagcctaaaa

SEQ ID NO: 829221 - DNA, 15 bp, Homo sapiens
gtgacagcctaaaat

SEQ ID NO: 829222 - DNA, 15 bp, Homo sapiens
tgacagcctaaaata

SEQ ID NO: 829223 - DNA, 15 bp, Homo sapiens
gacagcctaaaatat

SEQ ID NO: 829224 - DNA, 15 bp, Homo sapiens
acagcctaaaatatt

SEQ ID NO: 829225 - DNA, 15 bp, Homo sapiens
cagcctaaaatattt

SEQ ID NO: 829226 - DNA, 15 bp, Homo sapiens
agcctaaaatattta

SEQ ID NO: 829227 - DNA, 15 bp, Homo sapiens
gcctaaaatatttat

SEQ ID NO: 829228 - DNA, 15 bp, Homo sapiens
cctaaaatatttatt

SEQ ID NO: 829229 - DNA, 15 bp, Homo sapiens
ctaaaatatttatta

SEQ ID NO: 829230 - DNA, 15 bp, Homo sapiens
taaaatatttattaa

SEQ ID NO: 829231 - DNA, 15 bp, Homo sapiens
aaaatatttattaat

SEQ ID NO: 829232 - DNA, 15 bp, Homo sapiens
aaatatttattaata

SEQ ID NO: 829233 - DNA, 15 bp, Homo sapiens
aatatttattaatat

SEQ ID NO: 829234 - DNA, 15 bp, Homo sapiens
atatttattaatatt

SEQ ID NO: 829235 - DNA, 15 bp, Homo sapiens
tatttattaatattt

SEQ ID NO: 829236 - DNA, 15 bp, Homo sapiens
atttattaatattta

SEQ ID NO: 829237 - DNA, 15 bp, Homo sapiens
tttattaatatttac

SEQ ID NO: 829238 - DNA, 15 bp, Homo sapiens
ttattaatatttact

SEQ ID NO: 829239 - DNA, 15 bp, Homo sapiens
tattaatatttacta

SEQ ID NO: 829240 - DNA, 15 bp, Homo sapiens
attaatatttactat

SEQ ID NO: 829241 - DNA, 15 bp, Homo sapiens
ttaatatttactata

SEQ ID NO: 829242 - DNA, 15 bp, Homo sapiens
taatatttactatat

SEQ ID NO: 829243 - DNA, 15 bp, Homo sapiens
aatatttactatatg

SEQ ID NO: 829244 - DNA, 15 bp, Homo sapiens
atatttactatatgt

SEQ ID NO: 829245 - DNA, 15 bp, Homo sapiens
tatttactatatgtt

SEQ ID NO: 829246 - DNA, 15 bp, Homo sapiens
atttactatatgttc

SEQ ID NO: 829247 - DNA, 15 bp, Homo sapiens
tttactatatgttca

SEQ ID NO: 829248 - DNA, 15 bp, Homo sapiens
ttactatatgttcat

SEQ ID NO: 829249 - DNA, 15 bp, Homo sapiens
tactatatgttcatt

SEQ ID NO: 829250 - DNA, 15 bp, Homo sapiens
actatatgttcattt

SEQ ID NO: 829251 - DNA, 15 bp, Homo sapiens
ctatatgttcattta

SEQ ID NO: 829252 - DNA, 15 bp, Homo sapiens
tatatgttcatttat

SEQ ID NO: 829253 - DNA, 15 bp, Homo sapiens
atatgttcatttata

SEQ ID NO: 829254 - DNA, 15 bp, Homo sapiens
tatgttcatttatag

SEQ ID NO: 829255 - DNA, 15 bp, Homo sapiens
atgttcatttataga

SEQ ID NO: 829256 - DNA, 15 bp, Homo sapiens
tgttcatttatagaa

SEQ ID NO: 829257 - DNA, 15 bp, Homo sapiens
gttcatttatagaaa

SEQ ID NO: 829258 - DNA, 15 bp, Homo sapiens
ttcatttatagaaaa

SEQ ID NO: 829259 - DNA, 15 bp, Homo sapiens
tcatttatagaaaaa

SEQ ID NO: 829260 - DNA, 15 bp, Homo sapiens
catttatagaaaaag

SEQ ID NO: 829261 - DNA, 15 bp, Homo sapiens
atttatagaaaaagt

SEQ ID NO: 829262 - DNA, 15 bp, Homo sapiens
tttatagaaaaagtt

SEQ ID NO: 829263 - DNA, 15 bp, Homo sapiens
ttatagaaaaagttt

SEQ ID NO: 829264 - DNA, 15 bp, Homo sapiens
tatagaaaaagtttg

SEQ ID NO: 829265 - DNA, 15 bp, Homo sapiens
atagaaaaagtttgc

SEQ ID NO: 829266 - DNA, 15 bp, Homo sapiens
tagaaaaagtttgca

SEQ ID NO: 829267 - DNA, 15 bp, Homo sapiens
agaaaaagtttgcaa

SEQ ID NO: 829268 - DNA, 15 bp, Homo sapiens
gaaaaagtttgcaat

SEQ ID NO: 829269 - DNA, 15 bp, Homo sapiens
aaaaagtttgcaatg

SEQ ID NO: 829270 - DNA, 15 bp, Homo sapiens
aaaagtttgcaatgc

SEQ ID NO: 829271 - DNA, 15 bp, Homo sapiens
aaagtttgcaatgct

SEQ ID NO: 829272 - DNA, 15 bp, Homo sapiens
aagtttgcaatgctt

SEQ ID NO: 829273 - DNA, 15 bp, Homo sapiens
agtttgcaatgcttc

SEQ ID NO: 829274 - DNA, 15 bp, Homo sapiens
gtttgcaatgcttct

SEQ ID NO: 829275 - DNA, 15 bp, Homo sapiens
tttgcaatgcttctt

SEQ ID NO: 829276 - DNA, 15 bp, Homo sapiens
ttgcaatgcttctta

SEQ ID NO: 829277 - DNA, 15 bp, Homo sapiens
tgcaatgcttcttaa

SEQ ID NO: 829278 - DNA, 15 bp, Homo sapiens
gcaatgcttcttaac

SEQ ID NO: 829279 - DNA, 15 bp, Homo sapiens
caatgcttcttaacc

SEQ ID NO: 829280 - DNA, 15 bp, Homo sapiens
aatgcttcttaacct

SEQ ID NO: 829281 - DNA, 15 bp, Homo sapiens
atgcttcttaacctg

SEQ ID NO: 829282 - DNA, 15 bp, Homo sapiens
tgcttcttaacctgg

SEQ ID NO: 829283 - DNA, 15 bp, Homo sapiens
gcttcttaacctgga

SEQ ID NO: 829284 - DNA, 15 bp, Homo sapiens
cttcttaacctggat

SEQ ID NO: 829285 - DNA, 15 bp, Homo sapiens
ttcttaacctggatg

SEQ ID NO: 829286 - DNA, 15 bp, Homo sapiens
tcttaacctggatgg

SEQ ID NO: 829287 - DNA, 15 bp, Homo sapiens
cttaacctggatggc

SEQ ID NO: 829288 - DNA, 15 bp, Homo sapiens
ttaacctggatggct

SEQ ID NO: 829289 - DNA, 15 bp, Homo sapiens
taacctggatggctc

SEQ ID NO: 829290 - DNA, 15 bp, Homo sapiens
aacctggatggctca

SEQ ID NO: 829291 - DNA, 15 bp, Homo sapiens
acctggatggctcat

SEQ ID NO: 829292 - DNA, 15 bp, Homo sapiens
cctggatggctcatt

SEQ ID NO: 829293 - DNA, 15 bp, Homo sapiens
ctggatggctcatta

SEQ ID NO: 829294 - DNA, 15 bp, Homo sapiens
tggatggctcattag

SEQ ID NO: 829295 - DNA, 15 bp, Homo sapiens
ggatggctcattaga

SEQ ID NO: 829296 - DNA, 15 bp, Homo sapiens
gatggctcattagaa

SEQ ID NO: 829297 - DNA, 15 bp, Homo sapiens
atggctcattagaat

SEQ ID NO: 829298 - DNA, 15 bp, Homo sapiens
tggctcattagaatc

SEQ ID NO: 829299 - DNA, 15 bp, Homo sapiens
ggctcattagaatca

SEQ ID NO: 829300 - DNA, 15 bp, Homo sapiens
gctcattagaatcac

SEQ ID NO: 829301 - DNA, 15 bp, Homo sapiens
ctcattagaatcact

SEQ ID NO: 829302 - DNA, 15 bp, Homo sapiens
tcattagaatcactc

SEQ ID NO: 829303 - DNA, 15 bp, Homo sapiens
cattagaatcactct

SEQ ID NO: 829304 - DNA, 15 bp, Homo sapiens
attagaatcactctg

SEQ ID NO: 829305 - DNA, 15 bp, Homo sapiens
ttagaatcactctgg

SEQ ID NO: 829306 - DNA, 15 bp, Homo sapiens
tagaatcactctgga

SEQ ID NO: 829307 - DNA, 15 bp, Homo sapiens
agaatcactctggag

SEQ ID NO: 829308 - DNA, 15 bp, Homo sapiens
gaatcactctggagc

SEQ ID NO: 829309 - DNA, 15 bp, Homo sapiens
aatcactctggagcc

SEQ ID NO: 829310 - DNA, 15 bp, Homo sapiens
atcactctggagcct

SEQ ID NO: 829311 - DNA, 15 bp, Homo sapiens
tcactctggagcctt

SEQ ID NO: 829312 - DNA, 15 bp, Homo sapiens
cactctggagcctta

SEQ ID NO: 829313 - DNA, 15 bp, Homo sapiens
actctggagccttaa

SEQ ID NO: 829314 - DNA, 15 bp, Homo sapiens
ctctggagccttaat

SEQ ID NO: 829315 - DNA, 15 bp, Homo sapiens
tctggagccttaata

SEQ ID NO: 829316 - DNA, 15 bp, Homo sapiens
ctggagccttaatac

SEQ ID NO: 829317 - DNA, 15 bp, Homo sapiens
tggagccttaatact

SEQ ID NO: 829318 - DNA, 15 bp, Homo sapiens
ggagccttaatactc

SEQ ID NO: 829319 - DNA, 15 bp, Homo sapiens
gagccttaatactcc

SEQ ID NO: 829320 - DNA, 15 bp, Homo sapiens
agccttaatactccc

SEQ ID NO: 829321 - DNA, 15 bp, Homo sapiens
gccttaatactccct

SEQ ID NO: 829322 - DNA, 15 bp, Homo sapiens
ccttaatactccctc

SEQ ID NO: 829323 - DNA, 15 bp, Homo sapiens
cttaatactccctct

SEQ ID NO: 829324 - DNA, 15 bp, Homo sapiens
ttaatactccctctg

SEQ ID NO: 829325 - DNA, 15 bp, Homo sapiens
taatactccctctgc

SEQ ID NO: 829326 - DNA, 15 bp, Homo sapiens
aatactccctctgcc

SEQ ID NO: 829327 - DNA, 15 bp, Homo sapiens
atactccctctgcct

SEQ ID NO: 829328 - DNA, 15 bp, Homo sapiens
tactccctctgcctg

SEQ ID NO: 829329 - DNA, 15 bp, Homo sapiens
actccctctgcctga

SEQ ID NO: 829330 - DNA, 15 bp, Homo sapiens
ctccctctgcctgaa

SEQ ID NO: 829331 - DNA, 15 bp, Homo sapiens
tccctctgcctgaat

SEQ ID NO: 829332 - DNA, 15 bp, Homo sapiens
ccctctgcctgaatg

SEQ ID NO: 829333 - DNA, 15 bp, Homo sapiens
cctctgcctgaatgt

SEQ ID NO: 829334 - DNA, 15 bp, Homo sapiens
ctctgcctgaatgta

SEQ ID NO: 829335 - DNA, 15 bp, Homo sapiens
tctgcctgaatgtac

SEQ ID NO: 829336 - DNA, 15 bp, Homo sapiens
ctgcctgaatgtacc

SEQ ID NO: 829337 - DNA, 15 bp, Homo sapiens
tgcctgaatgtaccc

SEQ ID NO: 829338 - DNA, 15 bp, Homo sapiens
gcctgaatgtacccc

SEQ ID NO: 829339 - DNA, 15 bp, Homo sapiens
cctgaatgtacccca

SEQ ID NO: 829340 - DNA, 15 bp, Homo sapiens
ctgaatgtaccccac

SEQ ID NO: 829341 - DNA, 15 bp, Homo sapiens
tgaatgtaccccacg

SEQ ID NO: 829342 - DNA, 15 bp, Homo sapiens
gaatgtaccccacgc

SEQ ID NO: 829343 - DNA, 15 bp, Homo sapiens
aatgtaccccacgcc

SEQ ID NO: 829344 - DNA, 15 bp, Homo sapiens
atgtaccccacgccc

SEQ ID NO: 829345 - DNA, 15 bp, Homo sapiens
tgtaccccacgccca

SEQ ID NO: 829346 - DNA, 15 bp, Homo sapiens
gtaccccacgcccat

SEQ ID NO: 829347 - DNA, 15 bp, Homo sapiens
taccccacgcccatt

SEQ ID NO: 829348 - DNA, 15 bp, Homo sapiens
accccacgcccatta

SEQ ID NO: 829349 - DNA, 15 bp, Homo sapiens
ccccacgcccattaa

SEQ ID NO: 829350 - DNA, 15 bp, Homo sapiens
cccacgcccattaaa

SEQ ID NO: 829351 - DNA, 15 bp, Homo sapiens
ccacgcccattaaat

SEQ ID NO: 829352 - DNA, 15 bp, Homo sapiens
cacgcccattaaatc

SEQ ID NO: 829353 - DNA, 15 bp, Homo sapiens
acgcccattaaatca

SEQ ID NO: 829354 - DNA, 15 bp, Homo sapiens
cgcccattaaatcag

SEQ ID NO: 829355 - DNA, 15 bp, Homo sapiens
gcccattaaatcaga

SEQ ID NO: 829356 - DNA, 15 bp, Homo sapiens
cccattaaatcagaa

SEQ ID NO: 829357 - DNA, 15 bp, Homo sapiens
ccattaaatcagaat

SEQ ID NO: 829358 - DNA, 15 bp, Homo sapiens
cattaaatcagaatg

SEQ ID NO: 829359 - DNA, 15 bp, Homo sapiens
attaaatcagaatgc

SEQ ID NO: 829360 - DNA, 15 bp, Homo sapiens
ttaaatcagaatgca

SEQ ID NO: 829361 - DNA, 15 bp, Homo sapiens
taaatcagaatgcag

SEQ ID NO: 829362 - DNA, 15 bp, Homo sapiens
aaatcagaatgcagg

SEQ ID NO: 829363 - DNA, 15 bp, Homo sapiens
aatcagaatgcaggt

SEQ ID NO: 829364 - DNA, 15 bp, Homo sapiens
atcagaatgcaggta

SEQ ID NO: 829365 - DNA, 15 bp, Homo sapiens
tcagaatgcaggtag

SEQ ID NO: 829366 - DNA, 15 bp, Homo sapiens
cagaatgcaggtagg

SEQ ID NO: 829367 - DNA, 15 bp, Homo sapiens
agaatgcaggtaggg

SEQ ID NO: 829368 - DNA, 15 bp, Homo sapiens
gaatgcaggtagggg

SEQ ID NO: 829369 - DNA, 15 bp, Homo sapiens
aatgcaggtaggggg

SEQ ID NO: 829370 - DNA, 15 bp, Homo sapiens
atgcaggtagggggt

SEQ ID NO: 829371 - DNA, 15 bp, Homo sapiens
tgcaggtagggggtg

SEQ ID NO: 829372 - DNA, 15 bp, Homo sapiens
gcaggtagggggtgc

SEQ ID NO: 829373 - DNA, 15 bp, Homo sapiens
caggtagggggtgct

SEQ ID NO: 829374 - DNA, 15 bp, Homo sapiens
aggtagggggtgctg

SEQ ID NO: 829375 - DNA, 15 bp, Homo sapiens
ggtagggggtgctga

SEQ ID NO: 829376 - DNA, 15 bp, Homo sapiens
gtagggggtgctgag

SEQ ID NO: 829377 - DNA, 15 bp, Homo sapiens
tagggggtgctgaga

SEQ ID NO: 829378 - DNA, 15 bp, Homo sapiens
agggggtgctgagac

SEQ ID NO: 829379 - DNA, 15 bp, Homo sapiens
gggggtgctgagacc

SEQ ID NO: 829380 - DNA, 15 bp, Homo sapiens
ggggtgctgagaccc

SEQ ID NO: 829381 - DNA, 15 bp, Homo sapiens
gggtgctgagaccca

SEQ ID NO: 829382 - DNA, 15 bp, Homo sapiens
ggtgctgagacccag

SEQ ID NO: 829383 - DNA, 15 bp, Homo sapiens
gtgctgagacccagg

SEQ ID NO: 829384 - DNA, 15 bp, Homo sapiens
tgctgagacccaggt

SEQ ID NO: 829385 - DNA, 15 bp, Homo sapiens
gctgagacccaggtg

SEQ ID NO: 829386 - DNA, 15 bp, Homo sapiens
ctgagacccaggtgt

SEQ ID NO: 829387 - DNA, 15 bp, Homo sapiens
tgagacccaggtgtc

SEQ ID NO: 829388 - DNA, 15 bp, Homo sapiens
gagacccaggtgtca

SEQ ID NO: 829389 - DNA, 15 bp, Homo sapiens
agacccaggtgtcaa

SEQ ID NO: 829390 - DNA, 15 bp, Homo sapiens
gacccaggtgtcaac

SEQ ID NO: 829391 - DNA, 15 bp, Homo sapiens
acccaggtgtcaaca

SEQ ID NO: 829392 - DNA, 15 bp, Homo sapiens
cccaggtgtcaacaa

SEQ ID NO: 829393 - DNA, 15 bp, Homo sapiens
ccaggtgtcaacaat

SEQ ID NO: 829394 - DNA, 15 bp, Homo sapiens
caggtgtcaacaatt

SEQ ID NO: 829395 - DNA, 15 bp, Homo sapiens
aggtgtcaacaattc

SEQ ID NO: 829396 - DNA, 15 bp, Homo sapiens
ggtgtcaacaattct

SEQ ID NO: 829397 - DNA, 15 bp, Homo sapiens
gtgtcaacaattcta

SEQ ID NO: 829398 - DNA, 15 bp, Homo sapiens
tgtcaacaattctaa

SEQ ID NO: 829399 - DNA, 15 bp, Homo sapiens
gtcaacaattctaaa

SEQ ID NO: 829400 - DNA, 15 bp, Homo sapiens
tcaacaattctaaaa

SEQ ID NO: 829401 - DNA, 15 bp, Homo sapiens
caacaattctaaaag

SEQ ID NO: 829402 - DNA, 15 bp, Homo sapiens
aacaattctaaaagt

SEQ ID NO: 829403 - DNA, 15 bp, Homo sapiens
acaattctaaaagtt

SEQ ID NO: 829404 - DNA, 15 bp, Homo sapiens
caattctaaaagttt

SEQ ID NO: 829405 - DNA, 15 bp, Homo sapiens
aattctaaaagtttc

SEQ ID NO: 829406 - DNA, 15 bp, Homo sapiens
attctaaaagtttcc

SEQ ID NO: 829407 - DNA, 15 bp, Homo sapiens
ttctaaaagtttccc

SEQ ID NO: 829408 - DNA, 15 bp, Homo sapiens
tctaaaagtttccca

SEQ ID NO: 829409 - DNA, 15 bp, Homo sapiens
ctaaaagtttcccag

SEQ ID NO: 829410 - DNA, 15 bp, Homo sapiens
taaaagtttcccagg

SEQ ID NO: 829411 - DNA, 15 bp, Homo sapiens
aaaagtttcccaggt

SEQ ID NO: 829412 - DNA, 15 bp, Homo sapiens
aaagtttcccaggtg

SEQ ID NO: 829413 - DNA, 15 bp, Homo sapiens
aagtttcccaggtga

SEQ ID NO: 829414 - DNA, 15 bp, Homo sapiens
agtttcccaggtgat

SEQ ID NO: 829415 - DNA, 15 bp, Homo sapiens
gtttcccaggtgatt

SEQ ID NO: 829416 - DNA, 15 bp, Homo sapiens
tttcccaggtgattt

SEQ ID NO: 829417 - DNA, 15 bp, Homo sapiens
ttcccaggtgattta

SEQ ID NO: 829418 - DNA, 15 bp, Homo sapiens
tcccaggtgatttaa

SEQ ID NO: 829419 - DNA, 15 bp, Homo sapiens
cccaggtgatttaaa

SEQ ID NO: 829420 - DNA, 15 bp, Homo sapiens
ccaggtgatttaaat

SEQ ID NO: 829421 - DNA, 15 bp, Homo sapiens
caggtgatttaaatg

SEQ ID NO: 829422 - DNA, 15 bp, Homo sapiens
aggtgatttaaatgt

SEQ ID NO: 829423 - DNA, 15 bp, Homo sapiens
ggtgatttaaatgta

SEQ ID NO: 829424 - DNA, 15 bp, Homo sapiens
gtgatttaaatgtac

SEQ ID NO: 829425 - DNA, 15 bp, Homo sapiens
tgatttaaatgtaca

SEQ ID NO: 829426 - DNA, 15 bp, Homo sapiens
gatttaaatgtacag

SEQ ID NO: 829427 - DNA, 15 bp, Homo sapiens
atttaaatgtacagt

SEQ ID NO: 829428 - DNA, 15 bp, Homo sapiens
tttaaatgtacagtc

SEQ ID NO: 829429 - DNA, 15 bp, Homo sapiens
ttaaatgtacagtca

SEQ ID NO: 829430 - DNA, 15 bp, Homo sapiens
taaatgtacagtcaa

SEQ ID NO: 829431 - DNA, 15 bp, Homo sapiens
aaatgtacagtcaaa

SEQ ID NO: 829432 - DNA, 15 bp, Homo sapiens
aatgtacagtcaaag

SEQ ID NO: 829433 - DNA, 15 bp, Homo sapiens
atgtacagtcaaagt

SEQ ID NO: 829434 - DNA, 15 bp, Homo sapiens
tgtacagtcaaagtc

SEQ ID NO: 829435 - DNA, 15 bp, Homo sapiens
gtacagtcaaagtcc

SEQ ID NO: 829436 - DNA, 15 bp, Homo sapiens
tacagtcaaagtcca

SEQ ID NO: 829437 - DNA, 15 bp, Homo sapiens
acagtcaaagtccag

SEQ ID NO: 829438 - DNA, 15 bp, Homo sapiens
cagtcaaagtccaga

SEQ ID NO: 829439 - DNA, 15 bp, Homo sapiens
agtcaaagtccagaa

SEQ ID NO: 829440 - DNA, 15 bp, Homo sapiens
gtcaaagtccagaac

SEQ ID NO: 829441 - DNA, 15 bp, Homo sapiens
tcaaagtccagaacc

SEQ ID NO: 829442 - DNA, 15 bp, Homo sapiens
caaagtccagaacca

SEQ ID NO: 829443 - DNA, 15 bp, Homo sapiens
aaagtccagaaccag

SEQ ID NO: 829444 - DNA, 15 bp, Homo sapiens
aagtccagaaccagt

SEQ ID NO: 829445 - DNA, 15 bp, Homo sapiens
agtccagaaccagtg

SEQ ID NO: 829446 - DNA, 15 bp, Homo sapiens
gtccagaaccagtgc

SEQ ID NO: 829447 - DNA, 15 bp, Homo sapiens
tccagaaccagtgcc

SEQ ID NO: 829448 - DNA, 15 bp, Homo sapiens
ccagaaccagtgccc

SEQ ID NO: 829449 - DNA, 15 bp, Homo sapiens
cagaaccagtgcccc

SEQ ID NO: 829450 - DNA, 15 bp, Homo sapiens
agaaccagtgcccca

SEQ ID NO: 829451 - DNA, 15 bp, Homo sapiens
gaaccagtgccccaa

SEQ ID NO: 829452 - DNA, 15 bp, Homo sapiens
aaccagtgccccaaa

SEQ ID NO: 829453 - DNA, 15 bp, Homo sapiens
accagtgccccaaaa

SEQ ID NO: 829454 - DNA, 15 bp, Homo sapiens
ccagtgccccaaaag

SEQ ID NO: 829455 - DNA, 15 bp, Homo sapiens
cagtgccccaaaagt

SEQ ID NO: 829456 - DNA, 15 bp, Homo sapiens
agtgccccaaaagta

SEQ ID NO: 829457 - DNA, 15 bp, Homo sapiens
gtgccccaaaagtac

SEQ ID NO: 829458 - DNA, 15 bp, Homo sapiens
tgccccaaaagtaca

SEQ ID NO: 829459 - DNA, 15 bp, Homo sapiens
gccccaaaagtacaa

SEQ ID NO: 829460 - DNA, 15 bp, Homo sapiens
ccccaaaagtacaaa

SEQ ID NO: 829461 - DNA, 15 bp, Homo sapiens
cccaaaagtacaaag

SEQ ID NO: 829462 - DNA, 15 bp, Homo sapiens
ccaaaagtacaaaga

SEQ ID NO: 829463 - DNA, 15 bp, Homo sapiens
caaaagtacaaagaa

SEQ ID NO: 829464 - DNA, 15 bp, Homo sapiens
aaaagtacaaagaaa

SEQ ID NO: 829465 - DNA, 15 bp, Homo sapiens
aaagtacaaagaaaa

SEQ ID NO: 829466 - DNA, 15 bp, Homo sapiens
aagtacaaagaaaaa

SEQ ID NO: 829467 - DNA, 15 bp, Homo sapiens
agtacaaagaaaaaa

SEQ ID NO: 829468 - DNA, 15 bp, Homo sapiens
gtacaaagaaaaaaa

SEQ ID NO: 829469 - DNA, 15 bp, Homo sapiens
tacaaagaaaaaaaa

SEQ ID NO: 829470 - DNA, 15 bp, Homo sapiens
acaaagaaaaaaaaa

SEQ ID NO: 829471 - DNA, 15 bp, Homo sapiens
caaagaaaaaaaaat

SEQ ID NO: 829472 - DNA, 15 bp, Homo sapiens
aaagaaaaaaaaata

SEQ ID NO: 829473 - DNA, 15 bp, Homo sapiens
aagaaaaaaaaatag

SEQ ID NO: 829474 - DNA, 15 bp, Homo sapiens
agaaaaaaaaataga

SEQ ID NO: 829475 - DNA, 15 bp, Homo sapiens
gaaaaaaaaatagat

SEQ ID NO: 829476 - DNA, 15 bp, Homo sapiens
aaaaaaaaatagatg

SEQ ID NO: 829477 - DNA, 15 bp, Homo sapiens
aaaaaaaatagatgc

SEQ ID NO: 829478 - DNA, 15 bp, Homo sapiens
aaaaaaatagatgca

SEQ ID NO: 829479 - DNA, 15 bp, Homo sapiens
aaaaaatagatgcag

SEQ ID NO: 829480 - DNA, 15 bp, Homo sapiens
aaaaatagatgcagt

SEQ ID NO: 829481 - DNA, 15 bp, Homo sapiens
aaaatagatgcagta

SEQ ID NO: 829482 - DNA, 15 bp, Homo sapiens
aaatagatgcagtaa

SEQ ID NO: 829483 - DNA, 15 bp, Homo sapiens
aatagatgcagtaaa

SEQ ID NO: 829484 - DNA, 15 bp, Homo sapiens
atagatgcagtaaaa

SEQ ID NO: 829485 - DNA, 15 bp, Homo sapiens
tagatgcagtaaaaa

SEQ ID NO: 829486 - DNA, 15 bp, Homo sapiens
agatgcagtaaaaaa

SEQ ID NO: 829487 - DNA, 15 bp, Homo sapiens
gatgcagtaaaaaaa

SEQ ID NO: 829488 - DNA, 15 bp, Homo sapiens
atgcagtaaaaaaaa

SEQ ID NO: 829489 - DNA, 15 bp, Homo sapiens
tgcagtaaaaaaaaa

SEQ ID NO: 829490 - DNA, 15 bp, Homo sapiens
gcagtaaaaaaaaaa

SEQ ID NO: 829491 - DNA, 15 bp, Homo sapiens
cagtaaaaaaaaaaa

SEQ ID NO: 829492 - DNA, 15 bp, Homo sapiens
agtaaaaaaaaaaaa

SEQ ID NO: 829493 - DNA, 15 bp, Homo sapiens
aaaaaaaaaaattat

SEQ ID NO: 829494 - DNA, 15 bp, Homo sapiens
aaaaaaaaaattatc

SEQ ID NO: 829495 - DNA, 15 bp, Homo sapiens
aaaaaaaaattatct

SEQ ID NO: 829496 - DNA, 15 bp, Homo sapiens
aaaaaaaattatcta

SEQ ID NO: 829497 - DNA, 15 bp, Homo sapiens
aaaaaaattatctat

SEQ ID NO: 829498 - DNA, 15 bp, Homo sapiens
aaaaaattatctata

SEQ ID NO: 829499 - DNA, 15 bp, Homo sapiens
aaaaattatctatat

SEQ ID NO: 829500 - DNA, 15 bp, Homo sapiens
aaaattatctatatg

SEQ ID NO: 829501 - DNA, 15 bp, Homo sapiens
aaattatctatatga

SEQ ID NO: 829502 - DNA, 15 bp, Homo sapiens
aattatctatatgat

SEQ ID NO: 829503 - DNA, 15 bp, Homo sapiens
attatctatatgatg

SEQ ID NO: 829504 - DNA, 15 bp, Homo sapiens
ttatctatatgatgg

SEQ ID NO: 829505 - DNA, 15 bp, Homo sapiens
tatctatatgatggg

SEQ ID NO: 829506 - DNA, 15 bp, Homo sapiens
atctatatgatgggg

SEQ ID NO: 829507 - DNA, 15 bp, Homo sapiens
tctatatgatgggga

SEQ ID NO: 829508 - DNA, 15 bp, Homo sapiens
ctatatgatggggat

SEQ ID NO: 829509 - DNA, 15 bp, Homo sapiens
tatatgatggggatg

SEQ ID NO: 829510 - DNA, 15 bp, Homo sapiens
atatgatggggatgg

SEQ ID NO: 829511 - DNA, 15 bp, Homo sapiens
tatgatggggatggc

SEQ ID NO: 829512 - DNA, 15 bp, Homo sapiens
atgatggggatggcc

SEQ ID NO: 829513 - DNA, 15 bp, Homo sapiens
tgatggggatggcca

SEQ ID NO: 829514 - DNA, 15 bp, Homo sapiens
gatggggatggccaa

SEQ ID NO: 829515 - DNA, 15 bp, Homo sapiens
atggggatggccaaa

SEQ ID NO: 829516 - DNA, 15 bp, Homo sapiens
tggggatggccaaaa

SEQ ID NO: 829517 - DNA, 15 bp, Homo sapiens
ggggatggccaaaaa

SEQ ID NO: 829518 - DNA, 15 bp, Homo sapiens
gggatggccaaaaaa

SEQ ID NO: 829519 - DNA, 15 bp, Homo sapiens
ggatggccaaaaaaa

SEQ ID NO: 829520 - DNA, 15 bp, Homo sapiens
gatggccaaaaaaat

SEQ ID NO: 829521 - DNA, 15 bp, Homo sapiens
atggccaaaaaaatt

SEQ ID NO: 829522 - DNA, 15 bp, Homo sapiens
tggccaaaaaaattt

SEQ ID NO: 829523 - DNA, 15 bp, Homo sapiens
ggccaaaaaaatttt

SEQ ID NO: 829524 - DNA, 15 bp, Homo sapiens
gccaaaaaaatttta

SEQ ID NO: 829525 - DNA, 15 bp, Homo sapiens
ccaaaaaaattttaa

SEQ ID NO: 829526 - DNA, 15 bp, Homo sapiens
caaaaaaattttaaa

SEQ ID NO: 829527 - DNA, 15 bp, Homo sapiens
aaaaaaattttaaaa

SEQ ID NO: 829528 - DNA, 15 bp, Homo sapiens
aaaaaattttaaaaa

SEQ ID NO: 829529 - DNA, 15 bp, Homo sapiens
aaaaattttaaaaaa

SEQ ID NO: 829530 - DNA, 15 bp, Homo sapiens
aaaattttaaaaaaa

SEQ ID NO: 829531 - DNA, 15 bp, Homo sapiens
aaattttaaaaaaag

SEQ ID NO: 829532 - DNA, 15 bp, Homo sapiens
aattttaaaaaaagg

SEQ ID NO: 829533 - DNA, 15 bp, Homo sapiens
attttaaaaaaaggg

SEQ ID NO: 829534 - DNA, 15 bp, Homo sapiens
ttttaaaaaaaggga

SEQ ID NO: 829535 - DNA, 15 bp, Homo sapiens
tttaaaaaaagggaa

SEQ ID NO: 829536 - DNA, 15 bp, Homo sapiens
ttaaaaaaagggaac

SEQ ID NO: 829537 - DNA, 15 bp, Homo sapiens
taaaaaaagggaaca

SEQ ID NO: 829538 - DNA, 15 bp, Homo sapiens
aaaaaaagggaacat

SEQ ID NO: 829539 - DNA, 15 bp, Homo sapiens
aaaaaagggaacatg

SEQ ID NO: 829540 - DNA, 15 bp, Homo sapiens
aaaaagggaacatgg

SEQ ID NO: 829541 - DNA, 15 bp, Homo sapiens
aaaagggaacatggt

SEQ ID NO: 829542 - DNA, 15 bp, Homo sapiens
aaagggaacatggta

SEQ ID NO: 829543 - DNA, 15 bp, Homo sapiens
aagggaacatggtag

SEQ ID NO: 829544 - DNA, 15 bp, Homo sapiens
agggaacatggtaga

SEQ ID NO: 829545 - DNA, 15 bp, Homo sapiens
gggaacatggtagaa

SEQ ID NO: 829546 - DNA, 15 bp, Homo sapiens
ggaacatggtagaaa

SEQ ID NO: 829547 - DNA, 15 bp, Homo sapiens
gaacatggtagaaag

SEQ ID NO: 829548 - DNA, 15 bp, Homo sapiens
aacatggtagaaaga

SEQ ID NO: 829549 - DNA, 15 bp, Homo sapiens
acatggtagaaagat

SEQ ID NO: 829550 - DNA, 15 bp, Homo sapiens
catggtagaaagatt

SEQ ID NO: 829551 - DNA, 15 bp, Homo sapiens
atggtagaaagattg

SEQ ID NO: 829552 - DNA, 15 bp, Homo sapiens
tggtagaaagattga

SEQ ID NO: 829553 - DNA, 15 bp, Homo sapiens
ggtagaaagattgat

SEQ ID NO: 829554 - DNA, 15 bp, Homo sapiens
gtagaaagattgata

SEQ ID NO: 829555 - DNA, 15 bp, Homo sapiens
tagaaagattgatat

SEQ ID NO: 829556 - DNA, 15 bp, Homo sapiens
agaaagattgatata

SEQ ID NO: 829557 - DNA, 15 bp, Homo sapiens
gaaagattgatatat

SEQ ID NO: 829558 - DNA, 15 bp, Homo sapiens
aaagattgatatatt

SEQ ID NO: 829559 - DNA, 15 bp, Homo sapiens
aagattgatatattt

SEQ ID NO: 829560 - DNA, 15 bp, Homo sapiens
agattgatatatttt

SEQ ID NO: 829561 - DNA, 15 bp, Homo sapiens
gattgatatatttta

SEQ ID NO: 829562 - DNA, 15 bp, Homo sapiens
attgatatattttag

SEQ ID NO: 829563 - DNA, 15 bp, Homo sapiens
ttgatatattttaga

SEQ ID NO: 829564 - DNA, 15 bp, Homo sapiens
tgatatattttagaa

SEQ ID NO: 829565 - DNA, 15 bp, Homo sapiens
gatatattttagaat

SEQ ID NO: 829566 - DNA, 15 bp, Homo sapiens
atatattttagaatt

SEQ ID NO: 829567 - DNA, 15 bp, Homo sapiens
tatattttagaattc

SEQ ID NO: 829568 - DNA, 15 bp, Homo sapiens
atattttagaattca

SEQ ID NO: 829569 - DNA, 15 bp, Homo sapiens
tattttagaattcat

SEQ ID NO: 829570 - DNA, 15 bp, Homo sapiens
attttagaattcatg

SEQ ID NO: 829571 - DNA, 15 bp, Homo sapiens
ttttagaattcatgg

SEQ ID NO: 829572 - DNA, 15 bp, Homo sapiens
tttagaattcatggg

SEQ ID NO: 829573 - DNA, 15 bp, Homo sapiens
ttagaattcatgggg

SEQ ID NO: 829574 - DNA, 15 bp, Homo sapiens
tagaattcatgggga

SEQ ID NO: 829575 - DNA, 15 bp, Homo sapiens
agaattcatggggaa

SEQ ID NO: 829576 - DNA, 15 bp, Homo sapiens
gaattcatggggaaa

SEQ ID NO: 829577 - DNA, 15 bp, Homo sapiens
aattcatggggaaag

SEQ ID NO: 829578 - DNA, 15 bp, Homo sapiens
attcatggggaaaga

SEQ ID NO: 829579 - DNA, 15 bp, Homo sapiens
ttcatggggaaagaa

SEQ ID NO: 829580 - DNA, 15 bp, Homo sapiens
tcatggggaaagaaa

SEQ ID NO: 829581 - DNA, 15 bp, Homo sapiens
catggggaaagaaac

SEQ ID NO: 829582 - DNA, 15 bp, Homo sapiens
atggggaaagaaacc

SEQ ID NO: 829583 - DNA, 15 bp, Homo sapiens
tggggaaagaaaccc

SEQ ID NO: 829584 - DNA, 15 bp, Homo sapiens
ggggaaagaaaccca

SEQ ID NO: 829585 - DNA, 15 bp, Homo sapiens
gggaaagaaacccac

SEQ ID NO: 829586 - DNA, 15 bp, Homo sapiens
ggaaagaaacccacc

SEQ ID NO: 829587 - DNA, 15 bp, Homo sapiens
gaaagaaacccacct

SEQ ID NO: 829588 - DNA, 15 bp, Homo sapiens
aaagaaacccacctt

SEQ ID NO: 829589 - DNA, 15 bp, Homo sapiens
aagaaacccacctta

SEQ ID NO: 829590 - DNA, 15 bp, Homo sapiens
agaaacccaccttaa

SEQ ID NO: 829591 - DNA, 15 bp, Homo sapiens
gaaacccaccttaag

SEQ ID NO: 829592 - DNA, 15 bp, Homo sapiens
aaacccaccttaagt

SEQ ID NO: 829593 - DNA, 15 bp, Homo sapiens
aacccaccttaagta

SEQ ID NO: 829594 - DNA, 15 bp, Homo sapiens
acccaccttaagtaa

SEQ ID NO: 829595 - DNA, 15 bp, Homo sapiens
cccaccttaagtaaa

SEQ ID NO: 829596 - DNA, 15 bp, Homo sapiens
ccaccttaagtaaaa

SEQ ID NO: 829597 - DNA, 15 bp, Homo sapiens
caccttaagtaaaat

SEQ ID NO: 829598 - DNA, 15 bp, Homo sapiens
accttaagtaaaatt

SEQ ID NO: 829599 - DNA, 15 bp, Homo sapiens
ccttaagtaaaattt

SEQ ID NO: 829600 - DNA, 15 bp, Homo sapiens
cttaagtaaaatttg

SEQ ID NO: 829601 - DNA, 15 bp, Homo sapiens
ttaagtaaaatttga

SEQ ID NO: 829602 - DNA, 15 bp, Homo sapiens
taagtaaaatttgac

SEQ ID NO: 829603 - DNA, 15 bp, Homo sapiens
aagtaaaatttgaca

SEQ ID NO: 829604 - DNA, 15 bp, Homo sapiens
agtaaaatttgacag

SEQ ID NO: 829605 - DNA, 15 bp, Homo sapiens
gtaaaatttgacagt

SEQ ID NO: 829606 - DNA, 15 bp, Homo sapiens
taaaatttgacagta

SEQ ID NO: 829607 - DNA, 15 bp, Homo sapiens
aaaatttgacagtag

SEQ ID NO: 829608 - DNA, 15 bp, Homo sapiens
aaatttgacagtagg

SEQ ID NO: 829609 - DNA, 15 bp, Homo sapiens
aatttgacagtagga

SEQ ID NO: 829610 - DNA, 15 bp, Homo sapiens
atttgacagtaggaa

SEQ ID NO: 829611 - DNA, 15 bp, Homo sapiens
tttgacagtaggaaa

SEQ ID NO: 829612 - DNA, 15 bp, Homo sapiens
ttgacagtaggaaaa

SEQ ID NO: 829613 - DNA, 15 bp, Homo sapiens
tgacagtaggaaaaa

SEQ ID NO: 829614 - DNA, 15 bp, Homo sapiens
gacagtaggaaaaat

SEQ ID NO: 829615 - DNA, 15 bp, Homo sapiens
acagtaggaaaaata

SEQ ID NO: 829616 - DNA, 15 bp, Homo sapiens
cagtaggaaaaatac

SEQ ID NO: 829617 - DNA, 15 bp, Homo sapiens
agtaggaaaaatact

SEQ ID NO: 829618 - DNA, 15 bp, Homo sapiens
gtaggaaaaatactt

SEQ ID NO: 829619 - DNA, 15 bp, Homo sapiens
taggaaaaatacttt

SEQ ID NO: 829620 - DNA, 15 bp, Homo sapiens
aggaaaaatacttta

SEQ ID NO: 829621 - DNA, 15 bp, Homo sapiens
ggaaaaatactttaa

SEQ ID NO: 829622 - DNA, 15 bp, Homo sapiens
gaaaaatactttaag

SEQ ID NO: 829623 - DNA, 15 bp, Homo sapiens
aaaaatactttaagc

SEQ ID NO: 829624 - DNA, 15 bp, Homo sapiens
aaaatactttaagcc

SEQ ID NO: 829625 - DNA, 15 bp, Homo sapiens
aaatactttaagcca

SEQ ID NO: 829626 - DNA, 15 bp, Homo sapiens
aatactttaagccaa

SEQ ID NO: 829627 - DNA, 15 bp, Homo sapiens
atactttaagccaaa

SEQ ID NO: 829628 - DNA, 15 bp, Homo sapiens
tactttaagccaaat

SEQ ID NO: 829629 - DNA, 15 bp, Homo sapiens
actttaagccaaatt

SEQ ID NO: 829630 - DNA, 15 bp, Homo sapiens
ctttaagccaaattg

SEQ ID NO: 829631 - DNA, 15 bp, Homo sapiens
tttaagccaaattga

SEQ ID NO: 829632 - DNA, 15 bp, Homo sapiens
ttaagccaaattgag

SEQ ID NO: 829633 - DNA, 15 bp, Homo sapiens
taagccaaattgaga

SEQ ID NO: 829634 - DNA, 15 bp, Homo sapiens
aagccaaattgagaa

SEQ ID NO: 829635 - DNA, 15 bp, Homo sapiens
agccaaattgagaag

SEQ ID NO: 829636 - DNA, 15 bp, Homo sapiens
gccaaattgagaaga

SEQ ID NO: 829637 - DNA, 15 bp, Homo sapiens
ccaaattgagaagaa

SEQ ID NO: 829638 - DNA, 15 bp, Homo sapiens
caaattgagaagaat

SEQ ID NO: 829639 - DNA, 15 bp, Homo sapiens
aaattgagaagaatg

SEQ ID NO: 829640 - DNA, 15 bp, Homo sapiens
aattgagaagaatga

SEQ ID NO: 829641 - DNA, 15 bp, Homo sapiens
attgagaagaatgac

SEQ ID NO: 829642 - DNA, 15 bp, Homo sapiens
ttgagaagaatgacg

SEQ ID NO: 829643 - DNA, 15 bp, Homo sapiens
tgagaagaatgacga

SEQ ID NO: 829644 - DNA, 15 bp, Homo sapiens
gagaagaatgacgaa

SEQ ID NO: 829645 - DNA, 15 bp, Homo sapiens
agaagaatgacgaac

SEQ ID NO: 829646 - DNA, 15 bp, Homo sapiens
gaagaatgacgaacg

SEQ ID NO: 829647 - DNA, 15 bp, Homo sapiens
aagaatgacgaacgg

SEQ ID NO: 829648 - DNA, 15 bp, Homo sapiens
agaatgacgaacggt

SEQ ID NO: 829649 - DNA, 15 bp, Homo sapiens
gaatgacgaacggtg

SEQ ID NO: 829650 - DNA, 15 bp, Homo sapiens
aatgacgaacggtgg

SEQ ID NO: 829651 - DNA, 15 bp, Homo sapiens
atgacgaacggtggg

SEQ ID NO: 829652 - DNA, 15 bp, Homo sapiens
tgacgaacggtggga

SEQ ID NO: 829653 - DNA, 15 bp, Homo sapiens
gacgaacggtgggag

SEQ ID NO: 829654 - DNA, 15 bp, Homo sapiens
acgaacggtgggaga

SEQ ID NO: 829655 - DNA, 15 bp, Homo sapiens
cgaacggtgggagat

SEQ ID NO: 829656 - DNA, 15 bp, Homo sapiens
gaacggtgggagata

SEQ ID NO: 829657 - DNA, 15 bp, Homo sapiens
aacggtgggagataa

SEQ ID NO: 829658 - DNA, 15 bp, Homo sapiens
acggtgggagataat

SEQ ID NO: 829659 - DNA, 15 bp, Homo sapiens
cggtgggagataata

SEQ ID NO: 829660 - DNA, 15 bp, Homo sapiens
ggtgggagataatat

SEQ ID NO: 829661 - DNA, 15 bp, Homo sapiens
gtgggagataatata

SEQ ID NO: 829662 - DNA, 15 bp, Homo sapiens
tgggagataatatat

SEQ ID NO: 829663 - DNA, 15 bp, Homo sapiens
gggagataatatatg

SEQ ID NO: 829664 - DNA, 15 bp, Homo sapiens
ggagataatatatgg

SEQ ID NO: 829665 - DNA, 15 bp, Homo sapiens
gagataatatatggt

SEQ ID NO: 829666 - DNA, 15 bp, Homo sapiens
agataatatatggta

SEQ ID NO: 829667 - DNA, 15 bp, Homo sapiens
gataatatatggtat

SEQ ID NO: 829668 - DNA, 15 bp, Homo sapiens
ataatatatggtata

SEQ ID NO: 829669 - DNA, 15 bp, Homo sapiens
taatatatggtatac

SEQ ID NO: 829670 - DNA, 15 bp, Homo sapiens
aatatatggtataca

SEQ ID NO: 829671 - DNA, 15 bp, Homo sapiens
atatatggtatacaa

SEQ ID NO: 829672 - DNA, 15 bp, Homo sapiens
tatatggtatacaaa

SEQ ID NO: 829673 - DNA, 15 bp, Homo sapiens
atatggtatacaaaa

SEQ ID NO: 829674 - DNA, 15 bp, Homo sapiens
tatggtatacaaaat

SEQ ID NO: 829675 - DNA, 15 bp, Homo sapiens
atggtatacaaaatc

SEQ ID NO: 829676 - DNA, 15 bp, Homo sapiens
tggtatacaaaatct

SEQ ID NO: 829677 - DNA, 15 bp, Homo sapiens
ggtatacaaaatctt

SEQ ID NO: 829678 - DNA, 15 bp, Homo sapiens
gtatacaaaatcttc

SEQ ID NO: 829679 - DNA, 15 bp, Homo sapiens
tatacaaaatcttct

SEQ ID NO: 829680 - DNA, 15 bp, Homo sapiens
atacaaaatcttctt

SEQ ID NO: 829681 - DNA, 15 bp, Homo sapiens
tacaaaatcttcttt

SEQ ID NO: 829682 - DNA, 15 bp, Homo sapiens
acaaaatcttcttta

SEQ ID NO: 829683 - DNA, 15 bp, Homo sapiens
caaaatcttctttat

SEQ ID NO: 829684 - DNA, 15 bp, Homo sapiens
aaaatcttctttata

SEQ ID NO: 829685 - DNA, 15 bp, Homo sapiens
aaatcttctttatat

SEQ ID NO: 829686 - DNA, 15 bp, Homo sapiens
aatcttctttatatg

SEQ ID NO: 829687 - DNA, 15 bp, Homo sapiens
atcttctttatatga

SEQ ID NO: 829688 - DNA, 15 bp, Homo sapiens
tcttctttatatgag

SEQ ID NO: 829689 - DNA, 15 bp, Homo sapiens
cttctttatatgaga

SEQ ID NO: 829690 - DNA, 15 bp, Homo sapiens
ttctttatatgagaa

SEQ ID NO: 829691 - DNA, 15 bp, Homo sapiens
tctttatatgagaac

SEQ ID NO: 829692 - DNA, 15 bp, Homo sapiens
ctttatatgagaaca

SEQ ID NO: 829693 - DNA, 15 bp, Homo sapiens
tttatatgagaacat

SEQ ID NO: 829694 - DNA, 15 bp, Homo sapiens
ttatatgagaacata

SEQ ID NO: 829695 - DNA, 15 bp, Homo sapiens
tatatgagaacataa

SEQ ID NO: 829696 - DNA, 15 bp, Homo sapiens
atatgagaacataat

SEQ ID NO: 829697 - DNA, 15 bp, Homo sapiens
tatgagaacataatt

SEQ ID NO: 829698 - DNA, 15 bp, Homo sapiens
atgagaacataattg

SEQ ID NO: 829699 - DNA, 15 bp, Homo sapiens
tgagaacataattgt

SEQ ID NO: 829700 - DNA, 15 bp, Homo sapiens
gagaacataattgta

SEQ ID NO: 829701 - DNA, 15 bp, Homo sapiens
agaacataattgtat

SEQ ID NO: 829702 - DNA, 15 bp, Homo sapiens
gaacataattgtatt

SEQ ID NO: 829703 - DNA, 15 bp, Homo sapiens
aacataattgtatta

SEQ ID NO: 829704 - DNA, 15 bp, Homo sapiens
acataattgtattac

SEQ ID NO: 829705 - DNA, 15 bp, Homo sapiens
cataattgtattact

SEQ ID NO: 829706 - DNA, 15 bp, Homo sapiens
ataattgtattacta

SEQ ID NO: 829707 - DNA, 15 bp, Homo sapiens
taattgtattactac

SEQ ID NO: 829708 - DNA, 15 bp, Homo sapiens
aattgtattactaca

SEQ ID NO: 829709 - DNA, 15 bp, Homo sapiens
attgtattactacaa

SEQ ID NO: 829710 - DNA, 15 bp, Homo sapiens
ttgtattactacaat

SEQ ID NO: 829711 - DNA, 15 bp, Homo sapiens
tgtattactacaatt

SEQ ID NO: 829712 - DNA, 15 bp, Homo sapiens
gtattactacaatta

SEQ ID NO: 829713 - DNA, 15 bp, Homo sapiens
tattactacaattaa

SEQ ID NO: 829714 - DNA, 15 bp, Homo sapiens
attactacaattaag

SEQ ID NO: 829715 - DNA, 15 bp, Homo sapiens
ttactacaattaaga

SEQ ID NO: 829716 - DNA, 15 bp, Homo sapiens
tactacaattaagat

SEQ ID NO: 829717 - DNA, 15 bp, Homo sapiens
actacaattaagata

SEQ ID NO: 829718 - DNA, 15 bp, Homo sapiens
ctacaattaagataa

SEQ ID NO: 829719 - DNA, 15 bp, Homo sapiens
tacaattaagataaa

SEQ ID NO: 829720 - DNA, 15 bp, Homo sapiens
acaattaagataaat

SEQ ID NO: 829721 - DNA, 15 bp, Homo sapiens
caattaagataaata

SEQ ID NO: 829722 - DNA, 15 bp, Homo sapiens
aattaagataaatac

SEQ ID NO: 829723 - DNA, 15 bp, Homo sapiens
attaagataaataca

SEQ ID NO: 829724 - DNA, 15 bp, Homo sapiens
ttaagataaatacac

SEQ ID NO: 829725 - DNA, 15 bp, Homo sapiens
taagataaatacaca

SEQ ID NO: 829726 - DNA, 15 bp, Homo sapiens
aagataaatacacag

SEQ ID NO: 829727 - DNA, 15 bp, Homo sapiens
agataaatacacagg

SEQ ID NO: 829728 - DNA, 15 bp, Homo sapiens
gataaatacacaggc

SEQ ID NO: 829729 - DNA, 15 bp, Homo sapiens
ataaatacacaggca

SEQ ID NO: 829730 - DNA, 15 bp, Homo sapiens
taaatacacaggcag

SEQ ID NO: 829731 - DNA, 15 bp, Homo sapiens
aaatacacaggcaga

SEQ ID NO: 829732 - DNA, 15 bp, Homo sapiens
aatacacaggcagac

SEQ ID NO: 829733 - DNA, 15 bp, Homo sapiens
atacacaggcagact

SEQ ID NO: 829734 - DNA, 15 bp, Homo sapiens
tacacaggcagactg

SEQ ID NO: 829735 - DNA, 15 bp, Homo sapiens
acacaggcagactgg

SEQ ID NO: 829736 - DNA, 15 bp, Homo sapiens
cacaggcagactggc

SEQ ID NO: 829737 - DNA, 15 bp, Homo sapiens
acaggcagactggca

SEQ ID NO: 829738 - DNA, 15 bp, Homo sapiens
caggcagactggcaa

SEQ ID NO: 829739 - DNA, 15 bp, Homo sapiens
aggcagactggcaaa

SEQ ID NO: 829740 - DNA, 15 bp, Homo sapiens
ggcagactggcaaag

SEQ ID NO: 829741 - DNA, 15 bp, Homo sapiens
gcagactggcaaagg

SEQ ID NO: 829742 - DNA, 15 bp, Homo sapiens
cagactggcaaaggc

SEQ ID NO: 829743 - DNA, 15 bp, Homo sapiens
agactggcaaaggcc

SEQ ID NO: 829744 - DNA, 15 bp, Homo sapiens
gactggcaaaggcca

SEQ ID NO: 829745 - DNA, 15 bp, Homo sapiens
actggcaaaggccac

SEQ ID NO: 829746 - DNA, 15 bp, Homo sapiens
ctggcaaaggccact

SEQ ID NO: 829747 - DNA, 15 bp, Homo sapiens
tggcaaaggccactc

SEQ ID NO: 829748 - DNA, 15 bp, Homo sapiens
ggcaaaggccactct

SEQ ID NO: 829749 - DNA, 15 bp, Homo sapiens
gcaaaggccactcta

SEQ ID NO: 829750 - DNA, 15 bp, Homo sapiens
caaaggccactctaa

SEQ ID NO: 829751 - DNA, 15 bp, Homo sapiens
aaaggccactctaaa

SEQ ID NO: 829752 - DNA, 15 bp, Homo sapiens
aaggccactctaaag

SEQ ID NO: 829753 - DNA, 15 bp, Homo sapiens
aggccactctaaagc

SEQ ID NO: 829754 - DNA, 15 bp, Homo sapiens
ggccactctaaagca

SEQ ID NO: 829755 - DNA, 15 bp, Homo sapiens
gccactctaaagcac

SEQ ID NO: 829756 - DNA, 15 bp, Homo sapiens
ccactctaaagcact

SEQ ID NO: 829757 - DNA, 15 bp, Homo sapiens
cactctaaagcactt

SEQ ID NO: 829758 - DNA, 15 bp, Homo sapiens
actctaaagcacttt

SEQ ID NO: 829759 - DNA, 15 bp, Homo sapiens
ctctaaagcacttta

SEQ ID NO: 829760 - DNA, 15 bp, Homo sapiens
tctaaagcactttag

SEQ ID NO: 829761 - DNA, 15 bp, Homo sapiens
ctaaagcactttaga

SEQ ID NO: 829762 - DNA, 15 bp, Homo sapiens
taaagcactttagag

SEQ ID NO: 829763 - DNA, 15 bp, Homo sapiens
aaagcactttagaga

SEQ ID NO: 829764 - DNA, 15 bp, Homo sapiens
aagcactttagagaa

SEQ ID NO: 829765 - DNA, 15 bp, Homo sapiens
agcactttagagaag

SEQ ID NO: 829766 - DNA, 15 bp, Homo sapiens
gcactttagagaaga

SEQ ID NO: 829767 - DNA, 15 bp, Homo sapiens
cactttagagaagaa

SEQ ID NO: 829768 - DNA, 15 bp, Homo sapiens
actttagagaagaaa

SEQ ID NO: 829769 - DNA, 15 bp, Homo sapiens
ctttagagaagaaaa

SEQ ID NO: 829770 - DNA, 15 bp, Homo sapiens
tttagagaagaaaat

SEQ ID NO: 829771 - DNA, 15 bp, Homo sapiens
ttagagaagaaaata

SEQ ID NO: 829772 - DNA, 15 bp, Homo sapiens
tagagaagaaaataa

SEQ ID NO: 829773 - DNA, 15 bp, Homo sapiens
agagaagaaaataaa

SEQ ID NO: 829774 - DNA, 15 bp, Homo sapiens
gagaagaaaataaaa

SEQ ID NO: 829775 - DNA, 15 bp, Homo sapiens
agaagaaaataaaat

SEQ ID NO: 829776 - DNA, 15 bp, Homo sapiens
gaagaaaataaaatg

SEQ ID NO: 829777 - DNA, 15 bp, Homo sapiens
aagaaaataaaatga

SEQ ID NO: 829778 - DNA, 15 bp, Homo sapiens
agaaaataaaatgac

SEQ ID NO: 829779 - DNA, 15 bp, Homo sapiens
gaaaataaaatgact

SEQ ID NO: 829780 - DNA, 15 bp, Homo sapiens
aaaataaaatgacta

SEQ ID NO: 829781 - DNA, 15 bp, Homo sapiens
aaataaaatgactaa

SEQ ID NO: 829782 - DNA, 15 bp, Homo sapiens
aataaaatgactaat

SEQ ID NO: 829783 - DNA, 15 bp, Homo sapiens
ataaaatgactaata

SEQ ID NO: 829784 - DNA, 15 bp, Homo sapiens
taaaatgactaataa

SEQ ID NO: 829785 - DNA, 15 bp, Homo sapiens
aaaatgactaataat

SEQ ID NO: 829786 - DNA, 15 bp, Homo sapiens
aaatgactaataatt

SEQ ID NO: 829787 - DNA, 15 bp, Homo sapiens
aatgactaataatta

SEQ ID NO: 829788 - DNA, 15 bp, Homo sapiens
atgactaataattat

SEQ ID NO: 829789 - DNA, 15 bp, Homo sapiens
tgactaataattata

SEQ ID NO: 829790 - DNA, 15 bp, Homo sapiens
gactaataattatat

SEQ ID NO: 829791 - DNA, 15 bp, Homo sapiens
actaataattatatg

SEQ ID NO: 829792 - DNA, 15 bp, Homo sapiens
ctaataattatatga

SEQ ID NO: 829793 - DNA, 15 bp, Homo sapiens
taataattatatgaa

SEQ ID NO: 829794 - DNA, 15 bp, Homo sapiens
aataattatatgaaa

SEQ ID NO: 829795 - DNA, 15 bp, Homo sapiens
ataattatatgaaaa

SEQ ID NO: 829796 - DNA, 15 bp, Homo sapiens
taattatatgaaaaa

SEQ ID NO: 829797 - DNA, 15 bp, Homo sapiens
aattatatgaaaaaa

SEQ ID NO: 829798 - DNA, 15 bp, Homo sapiens
attatatgaaaaaat

SEQ ID NO: 829799 - DNA, 15 bp, Homo sapiens
ttatatgaaaaaata

SEQ ID NO: 829800 - DNA, 15 bp, Homo sapiens
tatatgaaaaaataa

SEQ ID NO: 829801 - DNA, 15 bp, Homo sapiens
atatgaaaaaataat

SEQ ID NO: 829802 - DNA, 15 bp, Homo sapiens
tatgaaaaaataatt

SEQ ID NO: 829803 - DNA, 15 bp, Homo sapiens
atgaaaaaataatta

SEQ ID NO: 829804 - DNA, 15 bp, Homo sapiens
tgaaaaaataattag

SEQ ID NO: 829805 - DNA, 15 bp, Homo sapiens
gaaaaaataattagc

SEQ ID NO: 829806 - DNA, 15 bp, Homo sapiens
aaaaaataattagct

SEQ ID NO: 829807 - DNA, 15 bp, Homo sapiens
aaaaataattagctt

SEQ ID NO: 829808 - DNA, 15 bp, Homo sapiens
aaaataattagcttc

SEQ ID NO: 829809 - DNA, 15 bp, Homo sapiens
aaataattagcttca

SEQ ID NO: 829810 - DNA, 15 bp, Homo sapiens
aataattagcttcat

SEQ ID NO: 829811 - DNA, 15 bp, Homo sapiens
ataattagcttcatt

SEQ ID NO: 829812 - DNA, 15 bp, Homo sapiens
taattagcttcattt

SEQ ID NO: 829813 - DNA, 15 bp, Homo sapiens
aattagcttcatttg

SEQ ID NO: 829814 - DNA, 15 bp, Homo sapiens
attagcttcatttgt

SEQ ID NO: 829815 - DNA, 15 bp, Homo sapiens
ttagcttcatttgtt

SEQ ID NO: 829816 - DNA, 15 bp, Homo sapiens
tagcttcatttgtta

SEQ ID NO: 829817 - DNA, 15 bp, Homo sapiens
agcttcatttgttaa

SEQ ID NO: 829818 - DNA, 15 bp, Homo sapiens
gcttcatttgttaag

SEQ ID NO: 829819 - DNA, 15 bp, Homo sapiens
cttcatttgttaaga

SEQ ID NO: 829820 - DNA, 15 bp, Homo sapiens
ttcatttgttaagat

SEQ ID NO: 829821 - DNA, 15 bp, Homo sapiens
tcatttgttaagata

SEQ ID NO: 829822 - DNA, 15 bp, Homo sapiens
catttgttaagatag

SEQ ID NO: 829823 - DNA, 15 bp, Homo sapiens
atttgttaagataga

SEQ ID NO: 829824 - DNA, 15 bp, Homo sapiens
tttgttaagatagaa

SEQ ID NO: 829825 - DNA, 15 bp, Homo sapiens
ttgttaagatagaaa

SEQ ID NO: 829826 - DNA, 15 bp, Homo sapiens
tgttaagatagaaaa

SEQ ID NO: 829827 - DNA, 15 bp, Homo sapiens
gttaagatagaaaag

SEQ ID NO: 829828 - DNA, 15 bp, Homo sapiens
ttaagatagaaaagc

SEQ ID NO: 829829 - DNA, 15 bp, Homo sapiens
taagatagaaaagca

SEQ ID NO: 829830 - DNA, 15 bp, Homo sapiens
aagatagaaaagcaa

SEQ ID NO: 829831 - DNA, 15 bp, Homo sapiens
agatagaaaagcaaa

SEQ ID NO: 829832 - DNA, 15 bp, Homo sapiens
gatagaaaagcaaaa

SEQ ID NO: 829833 - DNA, 15 bp, Homo sapiens
atagaaaagcaaaat

SEQ ID NO: 829834 - DNA, 15 bp, Homo sapiens
tagaaaagcaaaata

SEQ ID NO: 829835 - DNA, 15 bp, Homo sapiens
agaaaagcaaaataa

SEQ ID NO: 829836 - DNA, 15 bp, Homo sapiens
gaaaagcaaaataaa

SEQ ID NO: 829837 - DNA, 15 bp, Homo sapiens
aaaagcaaaataaaa

SEQ ID NO: 829838 - DNA, 15 bp, Homo sapiens
aaagcaaaataaaac

SEQ ID NO: 829839 - DNA, 15 bp, Homo sapiens
aagcaaaataaaaca

SEQ ID NO: 829840 - DNA, 15 bp, Homo sapiens
agcaaaataaaacag

SEQ ID NO: 829841 - DNA, 15 bp, Homo sapiens
gcaaaataaaacagc

SEQ ID NO: 829842 - DNA, 15 bp, Homo sapiens
caaaataaaacagcc

SEQ ID NO: 829843 - DNA, 15 bp, Homo sapiens
aaaataaaacagcca

SEQ ID NO: 829844 - DNA, 15 bp, Homo sapiens
aaataaaacagccat

SEQ ID NO: 829845 - DNA, 15 bp, Homo sapiens
aataaaacagccatg

SEQ ID NO: 829846 - DNA, 15 bp, Homo sapiens
ataaaacagccatga

SEQ ID NO: 829847 - DNA, 15 bp, Homo sapiens
taaaacagccatgag

SEQ ID NO: 829848 - DNA, 15 bp, Homo sapiens
aaaacagccatgagc

SEQ ID NO: 829849 - DNA, 15 bp, Homo sapiens
aaacagccatgagct

SEQ ID NO: 829850 - DNA, 15 bp, Homo sapiens
aacagccatgagctc

SEQ ID NO: 829851 - DNA, 15 bp, Homo sapiens
acagccatgagctct

SEQ ID NO: 829852 - DNA, 15 bp, Homo sapiens
cagccatgagctctt

SEQ ID NO: 829853 - DNA, 15 bp, Homo sapiens
agccatgagctctta

SEQ ID NO: 829854 - DNA, 15 bp, Homo sapiens
gccatgagctcttat

SEQ ID NO: 829855 - DNA, 15 bp, Homo sapiens
ccatgagctcttatt

SEQ ID NO: 829856 - DNA, 15 bp, Homo sapiens
catgagctcttattt

SEQ ID NO: 829857 - DNA, 15 bp, Homo sapiens
atgagctcttatttg

SEQ ID NO: 829858 - DNA, 15 bp, Homo sapiens
tgagctcttatttgg

SEQ ID NO: 829859 - DNA, 15 bp, Homo sapiens
gagctcttatttggg

SEQ ID NO: 829860 - DNA, 15 bp, Homo sapiens
agctcttatttgggg

SEQ ID NO: 829861 - DNA, 15 bp, Homo sapiens
gctcttatttggggt

SEQ ID NO: 829862 - DNA, 15 bp, Homo sapiens
ctcttatttggggtc

SEQ ID NO: 829863 - DNA, 15 bp, Homo sapiens
tcttatttggggtct

SEQ ID NO: 829864 - DNA, 15 bp, Homo sapiens
cttatttggggtcta

SEQ ID NO: 829865 - DNA, 15 bp, Homo sapiens
ttatttggggtctat

SEQ ID NO: 829866 - DNA, 15 bp, Homo sapiens
tatttggggtctatc

SEQ ID NO: 829867 - DNA, 15 bp, Homo sapiens
atttggggtctatca

SEQ ID NO: 829868 - DNA, 15 bp, Homo sapiens
tttggggtctatcaa

SEQ ID NO: 829869 - DNA, 15 bp, Homo sapiens
ttggggtctatcaaa

SEQ ID NO: 829870 - DNA, 15 bp, Homo sapiens
tggggtctatcaaat

SEQ ID NO: 829871 - DNA, 15 bp, Homo sapiens
ggggtctatcaaatt

SEQ ID NO: 829872 - DNA, 15 bp, Homo sapiens
gggtctatcaaatta

SEQ ID NO: 829873 - DNA, 15 bp, Homo sapiens
ggtctatcaaattag

SEQ ID NO: 829874 - DNA, 15 bp, Homo sapiens
gtctatcaaattagg

SEQ ID NO: 829875 - DNA, 15 bp, Homo sapiens
tctatcaaattagga

SEQ ID NO: 829876 - DNA, 15 bp, Homo sapiens
ctatcaaattaggat

SEQ ID NO: 829877 - DNA, 15 bp, Homo sapiens
tatcaaattaggatt

SEQ ID NO: 829878 - DNA, 15 bp, Homo sapiens
atcaaattaggattt

SEQ ID NO: 829879 - DNA, 15 bp, Homo sapiens
tcaaattaggatttt

SEQ ID NO: 829880 - DNA, 15 bp, Homo sapiens
caaattaggattttt

SEQ ID NO: 829881 - DNA, 15 bp, Homo sapiens
aaattaggatttttt

SEQ ID NO: 829882 - DNA, 15 bp, Homo sapiens
aattaggattttttt

SEQ ID NO: 829883 - DNA, 15 bp, Homo sapiens
attaggatttttttt

SEQ ID NO: 829884 - DNA, 15 bp, Homo sapiens
ttaggattttttttt

SEQ ID NO: 829885 - DNA, 15 bp, Homo sapiens
taggatttttttttt

SEQ ID NO: 829886 - DNA, 15 bp, Homo sapiens
aggatttttttttta

SEQ ID NO: 829887 - DNA, 15 bp, Homo sapiens
ggattttttttttaa

SEQ ID NO: 829888 - DNA, 15 bp, Homo sapiens
gattttttttttaat

SEQ ID NO: 829889 - DNA, 15 bp, Homo sapiens
attttttttttaatt

SEQ ID NO: 829890 - DNA, 15 bp, Homo sapiens
tttttttttaatttt

SEQ ID NO: 829891 - DNA, 15 bp, Homo sapiens
ttttttttaattttt

SEQ ID NO: 829892 - DNA, 15 bp, Homo sapiens
tttttttaattttta

SEQ ID NO: 829893 - DNA, 15 bp, Homo sapiens
ttttttaatttttaa

SEQ ID NO: 829894 - DNA, 15 bp, Homo sapiens
tttttaatttttaaa

SEQ ID NO: 829895 - DNA, 15 bp, Homo sapiens
ttttaatttttaaat

SEQ ID NO: 829896 - DNA, 15 bp, Homo sapiens
tttaatttttaaatt

SEQ ID NO: 829897 - DNA, 15 bp, Homo sapiens
ttaatttttaaattt

SEQ ID NO: 829898 - DNA, 15 bp, Homo sapiens
taatttttaaatttt

SEQ ID NO: 829899 - DNA, 15 bp, Homo sapiens
aatttttaaattttt

SEQ ID NO: 829900 - DNA, 15 bp, Homo sapiens
atttttaaattttta

SEQ ID NO: 829901 - DNA, 15 bp, Homo sapiens
tttttaaatttttaa

SEQ ID NO: 829902 - DNA, 15 bp, Homo sapiens
tttaaatttttaatt

SEQ ID NO: 829903 - DNA, 15 bp, Homo sapiens
ttaaatttttaattt

SEQ ID NO: 829904 - DNA, 15 bp, Homo sapiens
taaatttttaatttt

SEQ ID NO: 829905 - DNA, 15 bp, Homo sapiens
aaatttttaattttt

SEQ ID NO: 829906 - DNA, 15 bp, Homo sapiens
aatttttaatttttt

SEQ ID NO: 829907 - DNA, 15 bp, Homo sapiens
atttttaattttttt

SEQ ID NO: 829908 - DNA, 15 bp, Homo sapiens
tttttaatttttttg

SEQ ID NO: 829909 - DNA, 15 bp, Homo sapiens
ttttaatttttttga

SEQ ID NO: 829910 - DNA, 15 bp, Homo sapiens
tttaatttttttgag

SEQ ID NO: 829911 - DNA, 15 bp, Homo sapiens
ttaatttttttgaga

SEQ ID NO: 829912 - DNA, 15 bp, Homo sapiens
taatttttttgagat

SEQ ID NO: 829913 - DNA, 15 bp, Homo sapiens
aatttttttgagatg

SEQ ID NO: 829914 - DNA, 15 bp, Homo sapiens
atttttttgagatgg

SEQ ID NO: 829915 - DNA, 15 bp, Homo sapiens
ttttttgagatggac

SEQ ID NO: 829916 - DNA, 15 bp, Homo sapiens
tttttgagatggact

SEQ ID NO: 829917 - DNA, 15 bp, Homo sapiens
ttttgagatggactc

SEQ ID NO: 829918 - DNA, 15 bp, Homo sapiens
tttgagatggactct

SEQ ID NO: 829919 - DNA, 15 bp, Homo sapiens
ttgagatggactctc

SEQ ID NO: 829920 - DNA, 15 bp, Homo sapiens
tgagatggactctca

SEQ ID NO: 829921 - DNA, 15 bp, Homo sapiens
gagatggactctcac

SEQ ID NO: 829922 - DNA, 15 bp, Homo sapiens
agatggactctcact

SEQ ID NO: 829923 - DNA, 15 bp, Homo sapiens
gatggactctcactc

SEQ ID NO: 829924 - DNA, 15 bp, Homo sapiens
atggactctcactct

SEQ ID NO: 829925 - DNA, 15 bp, Homo sapiens
tggactctcactctg

SEQ ID NO: 829926 - DNA, 15 bp, Homo sapiens
ggactctcactctgt

SEQ ID NO: 829927 - DNA, 15 bp, Homo sapiens
gactctcactctgta

SEQ ID NO: 829928 - DNA, 15 bp, Homo sapiens
actctcactctgtag

SEQ ID NO: 829929 - DNA, 15 bp, Homo sapiens
ctctcactctgtagc

SEQ ID NO: 829930 - DNA, 15 bp, Homo sapiens
tctcactctgtagcc

SEQ ID NO: 829931 - DNA, 15 bp, Homo sapiens
ctcactctgtagccc

SEQ ID NO: 829932 - DNA, 15 bp, Homo sapiens
tcactctgtagccca

SEQ ID NO: 829933 - DNA, 15 bp, Homo sapiens
cactctgtagcccag

SEQ ID NO: 829934 - DNA, 15 bp, Homo sapiens
actctgtagcccagg

SEQ ID NO: 829935 - DNA, 15 bp, Homo sapiens
ctctgtagcccaggc

SEQ ID NO: 829936 - DNA, 15 bp, Homo sapiens
tctgtagcccaggct

SEQ ID NO: 829937 - DNA, 15 bp, Homo sapiens
ctgtagcccaggctg

SEQ ID NO: 829938 - DNA, 15 bp, Homo sapiens
tgtagcccaggctgg

SEQ ID NO: 829939 - DNA, 15 bp, Homo sapiens
gtagcccaggctgga

SEQ ID NO: 829940 - DNA, 15 bp, Homo sapiens
tagcccaggctggag

SEQ ID NO: 829941 - DNA, 15 bp, Homo sapiens
agcccaggctggagt

SEQ ID NO: 829942 - DNA, 15 bp, Homo sapiens
ggagtgcagtggcga

SEQ ID NO: 829943 - DNA, 15 bp, Homo sapiens
gagtgcagtggcgag

SEQ ID NO: 829944 - DNA, 15 bp, Homo sapiens
agtgcagtggcgaga

SEQ ID NO: 829945 - DNA, 15 bp, Homo sapiens
gtgcagtggcgagat

SEQ ID NO: 829946 - DNA, 15 bp, Homo sapiens
tgcagtggcgagatc

SEQ ID NO: 829947 - DNA, 15 bp, Homo sapiens
gcagtggcgagatct

SEQ ID NO: 829948 - DNA, 15 bp, Homo sapiens
cagtggcgagatctc

SEQ ID NO: 829949 - DNA, 15 bp, Homo sapiens
agtggcgagatctcg

SEQ ID NO: 829950 - DNA, 15 bp, Homo sapiens
gtggcgagatctcgg

SEQ ID NO: 829951 - DNA, 15 bp, Homo sapiens
tggcgagatctcggc

SEQ ID NO: 829952 - DNA, 15 bp, Homo sapiens
ggcgagatctcggct

SEQ ID NO: 829953 - DNA, 15 bp, Homo sapiens
gcgagatctcggctc

SEQ ID NO: 829954 - DNA, 15 bp, Homo sapiens
cgagatctcggctca

SEQ ID NO: 829955 - DNA, 15 bp, Homo sapiens
gagatctcggctcac

SEQ ID NO: 829956 - DNA, 15 bp, Homo sapiens
agatctcggctcact

SEQ ID NO: 829957 - DNA, 15 bp, Homo sapiens
cggctcactgcaact

SEQ ID NO: 829958 - DNA, 15 bp, Homo sapiens
ggctcactgcaactt

SEQ ID NO: 829959 - DNA, 15 bp, Homo sapiens
gctcactgcaacttc

SEQ ID NO: 829960 - DNA, 15 bp, Homo sapiens
ctcactgcaacttcc

SEQ ID NO: 829961 - DNA, 15 bp, Homo sapiens
tcactgcaacttcca

SEQ ID NO: 829962 - DNA, 15 bp, Homo sapiens
cactgcaacttccac

SEQ ID NO: 829963 - DNA, 15 bp, Homo sapiens
actgcaacttccacc

SEQ ID NO: 829964 - DNA, 15 bp, Homo sapiens
gcaacttccacctcc

SEQ ID NO: 829965 - DNA, 15 bp, Homo sapiens
caacttccacctccc

SEQ ID NO: 829966 - DNA, 15 bp, Homo sapiens
aacttccacctccca

SEQ ID NO: 829967 - DNA, 15 bp, Homo sapiens
acttccacctcccag

SEQ ID NO: 829968 - DNA, 15 bp, Homo sapiens
ttccacctcccaggt

SEQ ID NO: 829969 - DNA, 15 bp, Homo sapiens
acctcccaggttcaa

SEQ ID NO: 829970 - DNA, 15 bp, Homo sapiens
gggattacaggcaca

SEQ ID NO: 829971 - DNA, 15 bp, Homo sapiens
gattacaggcacata

SEQ ID NO: 829972 - DNA, 15 bp, Homo sapiens
attacaggcacatac

SEQ ID NO: 829973 - DNA, 15 bp, Homo sapiens
ttacaggcacatacc

SEQ ID NO: 829974 - DNA, 15 bp, Homo sapiens
tacaggcacatacca

SEQ ID NO: 829975 - DNA, 15 bp, Homo sapiens
acaggcacataccac

SEQ ID NO: 829976 - DNA, 15 bp, Homo sapiens
caggcacataccacc

SEQ ID NO: 829977 - DNA, 15 bp, Homo sapiens
aggcacataccacca

SEQ ID NO: 829978 - DNA, 15 bp, Homo sapiens
ggcacataccaccac

SEQ ID NO: 829979 - DNA, 15 bp, Homo sapiens
gcacataccaccaca

SEQ ID NO: 829980 - DNA, 15 bp, Homo sapiens
cacataccaccacac

SEQ ID NO: 829981 - DNA, 15 bp, Homo sapiens
acataccaccacact

SEQ ID NO: 829982 - DNA, 15 bp, Homo sapiens
cataccaccacactt

SEQ ID NO: 829983 - DNA, 15 bp, Homo sapiens
ataccaccacacttg

SEQ ID NO: 829984 - DNA, 15 bp, Homo sapiens
taccaccacacttgg

SEQ ID NO: 829985 - DNA, 15 bp, Homo sapiens
accaccacacttggt

SEQ ID NO: 829986 - DNA, 15 bp, Homo sapiens
ccaccacacttggtt

SEQ ID NO: 829987 - DNA, 15 bp, Homo sapiens
caccacacttggtta

SEQ ID NO: 829988 - DNA, 15 bp, Homo sapiens
accacacttggttaa

SEQ ID NO: 829989 - DNA, 15 bp, Homo sapiens
ccacacttggttaat

SEQ ID NO: 829990 - DNA, 15 bp, Homo sapiens
cacacttggttaatt

SEQ ID NO: 829991 - DNA, 15 bp, Homo sapiens
acacttggttaattt

SEQ ID NO: 829992 - DNA, 15 bp, Homo sapiens
cacttggttaatttt

SEQ ID NO: 829993 - DNA, 15 bp, Homo sapiens
acttggttaattttt

SEQ ID NO: 829994 - DNA, 15 bp, Homo sapiens
cttggttaatttttt

SEQ ID NO: 829995 - DNA, 15 bp, Homo sapiens
ttggttaattttttg

SEQ ID NO: 829996 - DNA, 15 bp, Homo sapiens
tggttaattttttgt

SEQ ID NO: 829997 - DNA, 15 bp, Homo sapiens
ggttaattttttgta

SEQ ID NO: 829998 - DNA, 15 bp, Homo sapiens
gttaattttttgtat

SEQ ID NO: 829999 - DNA, 15 bp, Homo sapiens
ttaattttttgtatt

SEQ ID NO: 830000 - DNA, 15 bp, Homo sapiens
tttgtatttttggta

SEQ ID NO: 830001 - DNA, 15 bp, Homo sapiens
ttgtatttttggtag

SEQ ID NO: 830002 - DNA, 15 bp, Homo sapiens
tgtatttttggtaga

SEQ ID NO: 830003 - DNA, 15 bp, Homo sapiens
gtatttttggtagag

SEQ ID NO: 830004 - DNA, 15 bp, Homo sapiens
tatttttggtagagg

SEQ ID NO: 830005 - DNA, 15 bp, Homo sapiens
atttttggtagaggc

SEQ ID NO: 830006 - DNA, 15 bp, Homo sapiens
tttttggtagaggcg

SEQ ID NO: 830007 - DNA, 15 bp, Homo sapiens
ttttggtagaggcgg

SEQ ID NO: 830008 - DNA, 15 bp, Homo sapiens
tttggtagaggcggg

SEQ ID NO: 830009 - DNA, 15 bp, Homo sapiens
ttggtagaggcgggg

SEQ ID NO: 830010 - DNA, 15 bp, Homo sapiens
tggtagaggcggggt

SEQ ID NO: 830011 - DNA, 15 bp, Homo sapiens
ggtagaggcggggtt

SEQ ID NO: 830012 - DNA, 15 bp, Homo sapiens
gtagaggcggggttt

SEQ ID NO: 830013 - DNA, 15 bp, Homo sapiens
tagaggcggggtttt

SEQ ID NO: 830014 - DNA, 15 bp, Homo sapiens
agaggcggggtttta

SEQ ID NO: 830015 - DNA, 15 bp, Homo sapiens
gaggcggggttttac

SEQ ID NO: 830016 - DNA, 15 bp, Homo sapiens
aggcggggttttacc

SEQ ID NO: 830017 - DNA, 15 bp, Homo sapiens
ggcggggttttacca

SEQ ID NO: 830018 - DNA, 15 bp, Homo sapiens
gcggggttttaccat

SEQ ID NO: 830019 - DNA, 15 bp, Homo sapiens
cggggttttaccatg

SEQ ID NO: 830020 - DNA, 15 bp, Homo sapiens
ggggttttaccatgt

SEQ ID NO: 830021 - DNA, 15 bp, Homo sapiens
gacctcaagtgatca

SEQ ID NO: 830022 - DNA, 15 bp, Homo sapiens
acctcaagtgatcag

SEQ ID NO: 830023 - DNA, 15 bp, Homo sapiens
cctcaagtgatcagt

SEQ ID NO: 830024 - DNA, 15 bp, Homo sapiens
ctcaagtgatcagtc

SEQ ID NO: 830025 - DNA, 15 bp, Homo sapiens
tcaagtgatcagtcc

SEQ ID NO: 830026 - DNA, 15 bp, Homo sapiens
caagtgatcagtcca

SEQ ID NO: 830027 - DNA, 15 bp, Homo sapiens
aagtgatcagtccac

SEQ ID NO: 830028 - DNA, 15 bp, Homo sapiens
agtgatcagtccacc

SEQ ID NO: 830029 - DNA, 15 bp, Homo sapiens
gtgatcagtccacct

SEQ ID NO: 830030 - DNA, 15 bp, Homo sapiens
tgatcagtccacctc

SEQ ID NO: 830031 - DNA, 15 bp, Homo sapiens
gatcagtccacctca

SEQ ID NO: 830032 - DNA, 15 bp, Homo sapiens
atcagtccacctcag

SEQ ID NO: 830033 - DNA, 15 bp, Homo sapiens
tcagtccacctcagc

SEQ ID NO: 830034 - DNA, 15 bp, Homo sapiens
cagtccacctcagcc

SEQ ID NO: 830035 - DNA, 15 bp, Homo sapiens
agtccacctcagcct

SEQ ID NO: 830036 - DNA, 15 bp, Homo sapiens
gtccacctcagcctc

SEQ ID NO: 830037 - DNA, 15 bp, Homo sapiens
tccacctcagcctcc

SEQ ID NO: 830038 - DNA, 15 bp, Homo sapiens
ccacctcagcctccc

SEQ ID NO: 830039 - DNA, 15 bp, Homo sapiens
cacctcagcctccca

SEQ ID NO: 830040 - DNA, 15 bp, Homo sapiens
acctcagcctcccaa

SEQ ID NO: 830041 - DNA, 15 bp, Homo sapiens
caaagtgctgggata

SEQ ID NO: 830042 - DNA, 15 bp, Homo sapiens
aaagtgctgggataa

SEQ ID NO: 830043 - DNA, 15 bp, Homo sapiens
aagtgctgggataac

SEQ ID NO: 830044 - DNA, 15 bp, Homo sapiens
agtgctgggataaca

SEQ ID NO: 830045 - DNA, 15 bp, Homo sapiens
gtgctgggataacag

SEQ ID NO: 830046 - DNA, 15 bp, Homo sapiens
tgctgggataacagg

SEQ ID NO: 830047 - DNA, 15 bp, Homo sapiens
gctgggataacaggc

SEQ ID NO: 830048 - DNA, 15 bp, Homo sapiens
ctgggataacaggca

SEQ ID NO: 830049 - DNA, 15 bp, Homo sapiens
tgggataacaggcat

SEQ ID NO: 830050 - DNA, 15 bp, Homo sapiens
gggataacaggcatg

SEQ ID NO: 830051 - DNA, 15 bp, Homo sapiens
ggataacaggcatga

SEQ ID NO: 830052 - DNA, 15 bp, Homo sapiens
gataacaggcatgag

SEQ ID NO: 830053 - DNA, 15 bp, Homo sapiens
ataacaggcatgagc

SEQ ID NO: 830054 - DNA, 15 bp, Homo sapiens
taacaggcatgagcc

SEQ ID NO: 830055 - DNA, 15 bp, Homo sapiens
aacaggcatgagcca

SEQ ID NO: 830056 - DNA, 15 bp, Homo sapiens
agccaccatgcccga

SEQ ID NO: 830057 - DNA, 15 bp, Homo sapiens
gccaccatgcccgac

SEQ ID NO: 830058 - DNA, 15 bp, Homo sapiens
ccaccatgcccgacc

SEQ ID NO: 830059 - DNA, 15 bp, Homo sapiens
caccatgcccgacct

SEQ ID NO: 830060 - DNA, 15 bp, Homo sapiens
accatgcccgacctc

SEQ ID NO: 830061 - DNA, 15 bp, Homo sapiens
ccatgcccgacctca

SEQ ID NO: 830062 - DNA, 15 bp, Homo sapiens
catgcccgacctcaa

SEQ ID NO: 830063 - DNA, 15 bp, Homo sapiens
atgcccgacctcaaa

SEQ ID NO: 830064 - DNA, 15 bp, Homo sapiens
tgcccgacctcaaat

SEQ ID NO: 830065 - DNA, 15 bp, Homo sapiens
gcccgacctcaaatt

SEQ ID NO: 830066 - DNA, 15 bp, Homo sapiens
cccgacctcaaattg

SEQ ID NO: 830067 - DNA, 15 bp, Homo sapiens
ccgacctcaaattgg

SEQ ID NO: 830068 - DNA, 15 bp, Homo sapiens
cgacctcaaattggg

SEQ ID NO: 830069 - DNA, 15 bp, Homo sapiens
gacctcaaattggga

SEQ ID NO: 830070 - DNA, 15 bp, Homo sapiens
acctcaaattgggat

SEQ ID NO: 830071 - DNA, 15 bp, Homo sapiens
cctcaaattgggatt

SEQ ID NO: 830072 - DNA, 15 bp, Homo sapiens
ctcaaattgggattc

SEQ ID NO: 830073 - DNA, 15 bp, Homo sapiens
tcaaattgggattct

SEQ ID NO: 830074 - DNA, 15 bp, Homo sapiens
caaattgggattctt

SEQ ID NO: 830075 - DNA, 15 bp, Homo sapiens
aaattgggattctta

SEQ ID NO: 830076 - DNA, 15 bp, Homo sapiens
aattgggattcttac

SEQ ID NO: 830077 - DNA, 15 bp, Homo sapiens
attgggattcttacc

SEQ ID NO: 830078 - DNA, 15 bp, Homo sapiens
ttgggattcttaccc

SEQ ID NO: 830079 - DNA, 15 bp, Homo sapiens
tgggattcttaccct

SEQ ID NO: 830080 - DNA, 15 bp, Homo sapiens
gggattcttaccctc

SEQ ID NO: 830081 - DNA, 15 bp, Homo sapiens
ggattcttaccctcg

SEQ ID NO: 830082 - DNA, 15 bp, Homo sapiens
gattcttaccctcgt

SEQ ID NO: 830083 - DNA, 15 bp, Homo sapiens
attcttaccctcgtt

SEQ ID NO: 830084 - DNA, 15 bp, Homo sapiens
ttcttaccctcgttc

SEQ ID NO: 830085 - DNA, 15 bp, Homo sapiens
tcttaccctcgttct

SEQ ID NO: 830086 - DNA, 15 bp, Homo sapiens
cttaccctcgttctc

SEQ ID NO: 830087 - DNA, 15 bp, Homo sapiens
ttaccctcgttctct

SEQ ID NO: 830088 - DNA, 15 bp, Homo sapiens
taccctcgttctctc

SEQ ID NO: 830089 - DNA, 15 bp, Homo sapiens
accctcgttctctcc

SEQ ID NO: 830090 - DNA, 15 bp, Homo sapiens
ccctcgttctctccc

SEQ ID NO: 830091 - DNA, 15 bp, Homo sapiens
cctcgttctctccct

SEQ ID NO: 830092 - DNA, 15 bp, Homo sapiens
ctcgttctctccctt

SEQ ID NO: 830093 - DNA, 15 bp, Homo sapiens
tcgttctctcccttt

SEQ ID NO: 830094 - DNA, 15 bp, Homo sapiens
cgttctctccctttc

SEQ ID NO: 830095 - DNA, 15 bp, Homo sapiens
gttctctccctttcc

SEQ ID NO: 830096 - DNA, 15 bp, Homo sapiens
ttctctccctttccc

SEQ ID NO: 830097 - DNA, 15 bp, Homo sapiens
tctctccctttcccc

SEQ ID NO: 830098 - DNA, 15 bp, Homo sapiens
ctctccctttcccct

SEQ ID NO: 830099 - DNA, 15 bp, Homo sapiens
tctccctttcccctc

SEQ ID NO: 830100 - DNA, 15 bp, Homo sapiens
ctccctttcccctcc

SEQ ID NO: 830101 - DNA, 15 bp, Homo sapiens
tccctttcccctcct

SEQ ID NO: 830102 - DNA, 15 bp, Homo sapiens
ccctttcccctcctg

SEQ ID NO: 830103 - DNA, 15 bp, Homo sapiens
cctttcccctcctgc

SEQ ID NO: 830104 - DNA, 15 bp, Homo sapiens
ctttcccctcctgcc

SEQ ID NO: 830105 - DNA, 15 bp, Homo sapiens
tttcccctcctgcct

SEQ ID NO: 830106 - DNA, 15 bp, Homo sapiens
ttcccctcctgcctt

SEQ ID NO: 830107 - DNA, 15 bp, Homo sapiens
tcccctcctgccttc

SEQ ID NO: 830108 - DNA, 15 bp, Homo sapiens
cccctcctgccttcc

SEQ ID NO: 830109 - DNA, 15 bp, Homo sapiens
ccctcctgccttcct

SEQ ID NO: 830110 - DNA, 15 bp, Homo sapiens
cctcctgccttcctg

SEQ ID NO: 830111 - DNA, 15 bp, Homo sapiens
ctcctgccttcctgc

SEQ ID NO: 830112 - DNA, 15 bp, Homo sapiens
tcctgccttcctgcc

SEQ ID NO: 830113 - DNA, 15 bp, Homo sapiens
cctgccttcctgcct

SEQ ID NO: 830114 - DNA, 15 bp, Homo sapiens
ctgccttcctgcctt

SEQ ID NO: 830115 - DNA, 15 bp, Homo sapiens
tgccttcctgccttc

SEQ ID NO: 830116 - DNA, 15 bp, Homo sapiens
gccttcctgccttcc

SEQ ID NO: 830117 - DNA, 15 bp, Homo sapiens
ccttcctgccttcct

SEQ ID NO: 830118 - DNA, 15 bp, Homo sapiens
cttcctgccttcctg

SEQ ID NO: 830119 - DNA, 15 bp, Homo sapiens
ttcctgccttcctgc

SEQ ID NO: 830120 - DNA, 15 bp, Homo sapiens
gccttcctgccttct

SEQ ID NO: 830121 - DNA, 15 bp, Homo sapiens
ccttcctgccttctc

SEQ ID NO: 830122 - DNA, 15 bp, Homo sapiens
cttcctgccttctct

SEQ ID NO: 830123 - DNA, 15 bp, Homo sapiens
ttcctgccttctctc

SEQ ID NO: 830124 - DNA, 15 bp, Homo sapiens
tcctgccttctctcc

SEQ ID NO: 830125 - DNA, 15 bp, Homo sapiens
cctgccttctctcct

SEQ ID NO: 830126 - DNA, 15 bp, Homo sapiens
ctgccttctctcctt

SEQ ID NO: 830127 - DNA, 15 bp, Homo sapiens
tgccttctctccttc

SEQ ID NO: 830128 - DNA, 15 bp, Homo sapiens
gccttctctccttct

SEQ ID NO: 830129 - DNA, 15 bp, Homo sapiens
ccttctctccttctc

SEQ ID NO: 830130 - DNA, 15 bp, Homo sapiens
cttctctccttctct

SEQ ID NO: 830131 - DNA, 15 bp, Homo sapiens
ttctctccttctctc

SEQ ID NO: 830132 - DNA, 15 bp, Homo sapiens
tctctccttctctcc

SEQ ID NO: 830133 - DNA, 15 bp, Homo sapiens
ctctccttctctccc

SEQ ID NO: 830134 - DNA, 15 bp, Homo sapiens
tctccttctctccct

SEQ ID NO: 830135 - DNA, 15 bp, Homo sapiens
ctccttctctccctt

SEQ ID NO: 830136 - DNA, 15 bp, Homo sapiens
tccttctctcccttc

SEQ ID NO: 830137 - DNA, 15 bp, Homo sapiens
ccttctctcccttct

SEQ ID NO: 830138 - DNA, 15 bp, Homo sapiens
cttctctcccttctt

SEQ ID NO: 830139 - DNA, 15 bp, Homo sapiens
ttctctcccttcttg

SEQ ID NO: 830140 - DNA, 15 bp, Homo sapiens
tctctcccttcttgc

SEQ ID NO: 830141 - DNA, 15 bp, Homo sapiens
ctctcccttcttgcc

SEQ ID NO: 830142 - DNA, 15 bp, Homo sapiens
tctcccttcttgcct

SEQ ID NO: 830143 - DNA, 15 bp, Homo sapiens
ctcccttcttgcctt

SEQ ID NO: 830144 - DNA, 15 bp, Homo sapiens
tcccttcttgccttc

SEQ ID NO: 830145 - DNA, 15 bp, Homo sapiens
cccttcttgccttca

SEQ ID NO: 830146 - DNA, 15 bp, Homo sapiens
ccttcttgccttcat

SEQ ID NO: 830147 - DNA, 15 bp, Homo sapiens
cttcttgccttcatg

SEQ ID NO: 830148 - DNA, 15 bp, Homo sapiens
ttcttgccttcatgc

SEQ ID NO: 830149 - DNA, 15 bp, Homo sapiens
tcttgccttcatgcc

SEQ ID NO: 830150 - DNA, 15 bp, Homo sapiens
cttgccttcatgcct

SEQ ID NO: 830151 - DNA, 15 bp, Homo sapiens
ttgccttcatgcctt

SEQ ID NO: 830152 - DNA, 15 bp, Homo sapiens
tgccttcatgccttc

SEQ ID NO: 830153 - DNA, 15 bp, Homo sapiens
gccttcatgccttct

SEQ ID NO: 830154 - DNA, 15 bp, Homo sapiens
ccttcatgccttctt

SEQ ID NO: 830155 - DNA, 15 bp, Homo sapiens
cttcatgccttcttt

SEQ ID NO: 830156 - DNA, 15 bp, Homo sapiens
ttcatgccttctttc

SEQ ID NO: 830157 - DNA, 15 bp, Homo sapiens
tcatgccttctttcc

SEQ ID NO: 830158 - DNA, 15 bp, Homo sapiens
catgccttctttcct

SEQ ID NO: 830159 - DNA, 15 bp, Homo sapiens
atgccttctttcctt

SEQ ID NO: 830160 - DNA, 15 bp, Homo sapiens
tgccttctttccttc

SEQ ID NO: 830161 - DNA, 15 bp, Homo sapiens
gccttctttccttcc

SEQ ID NO: 830162 - DNA, 15 bp, Homo sapiens
ttctttccttccttc

SEQ ID NO: 830163 - DNA, 15 bp, Homo sapiens
tctttccttccttcc

SEQ ID NO: 830164 - DNA, 15 bp, Homo sapiens
ctttccttccttcct

SEQ ID NO: 830165 - DNA, 15 bp, Homo sapiens
ttccttccttccttc

SEQ ID NO: 830166 - DNA, 15 bp, Homo sapiens
tccttccttccttcc

SEQ ID NO: 830167 - DNA, 15 bp, Homo sapiens
cttccttccttcctt

SEQ ID NO: 830168 - DNA, 15 bp, Homo sapiens
cttccttccttccta

SEQ ID NO: 830169 - DNA, 15 bp, Homo sapiens
ttccttccttcctat

SEQ ID NO: 830170 - DNA, 15 bp, Homo sapiens
tccttccttcctatt

SEQ ID NO: 830171 - DNA, 15 bp, Homo sapiens
ccttccttcctattt

SEQ ID NO: 830172 - DNA, 15 bp, Homo sapiens
cttccttcctatttt

SEQ ID NO: 830173 - DNA, 15 bp, Homo sapiens
ttccttcctattttc

SEQ ID NO: 830174 - DNA, 15 bp, Homo sapiens
tccttcctattttct

SEQ ID NO: 830175 - DNA, 15 bp, Homo sapiens
ccttcctattttctc

SEQ ID NO: 830176 - DNA, 15 bp, Homo sapiens
cttcctattttctct

SEQ ID NO: 830177 - DNA, 15 bp, Homo sapiens
ttcctattttctcta

SEQ ID NO: 830178 - DNA, 15 bp, Homo sapiens
tcctattttctctat

SEQ ID NO: 830179 - DNA, 15 bp, Homo sapiens
cctattttctctatc

SEQ ID NO: 830180 - DNA, 15 bp, Homo sapiens
ctattttctctatca

SEQ ID NO: 830181 - DNA, 15 bp, Homo sapiens
tattttctctatcac

SEQ ID NO: 830182 - DNA, 15 bp, Homo sapiens
attttctctatcact

SEQ ID NO: 830183 - DNA, 15 bp, Homo sapiens
ttttctctatcactg

SEQ ID NO: 830184 - DNA, 15 bp, Homo sapiens
tttctctatcactgt

SEQ ID NO: 830185 - DNA, 15 bp, Homo sapiens
ttctctatcactgta

SEQ ID NO: 830186 - DNA, 15 bp, Homo sapiens
tctctatcactgtac

SEQ ID NO: 830187 - DNA, 15 bp, Homo sapiens
ctctatcactgtact

SEQ ID NO: 830188 - DNA, 15 bp, Homo sapiens
tctatcactgtactc

SEQ ID NO: 830189 - DNA, 15 bp, Homo sapiens
atagtagatggccca

SEQ ID NO: 830190 - DNA, 15 bp, Homo sapiens
tagtagatggcccag

SEQ ID NO: 830191 - DNA, 15 bp, Homo sapiens
agtagatggcccagt

SEQ ID NO: 830192 - DNA, 15 bp, Homo sapiens
gtagatggcccagtt

SEQ ID NO: 830193 - DNA, 15 bp, Homo sapiens
tagatggcccagtta

SEQ ID NO: 830194 - DNA, 15 bp, Homo sapiens
agatggcccagttaa

SEQ ID NO: 830195 - DNA, 15 bp, Homo sapiens
gatggcccagttaat

SEQ ID NO: 830196 - DNA, 15 bp, Homo sapiens
atggcccagttaatt

SEQ ID NO: 830197 - DNA, 15 bp, Homo sapiens
tggcccagttaatta

SEQ ID NO: 830198 - DNA, 15 bp, Homo sapiens
ggcccagttaattaa

SEQ ID NO: 830199 - DNA, 15 bp, Homo sapiens
gcccagttaattaac

SEQ ID NO: 830200 - DNA, 15 bp, Homo sapiens
cccagttaattaacc

SEQ ID NO: 830201 - DNA, 15 bp, Homo sapiens
ccagttaattaacct

SEQ ID NO: 830202 - DNA, 15 bp, Homo sapiens
cagttaattaacctc

SEQ ID NO: 830203 - DNA, 15 bp, Homo sapiens
agttaattaacctct

SEQ ID NO: 830204 - DNA, 15 bp, Homo sapiens
gttaattaacctctt

SEQ ID NO: 830205 - DNA, 15 bp, Homo sapiens
ttaattaacctcttg

SEQ ID NO: 830206 - DNA, 15 bp, Homo sapiens
taattaacctcttga

SEQ ID NO: 830207 - DNA, 15 bp, Homo sapiens
aattaacctcttgaa

SEQ ID NO: 830208 - DNA, 15 bp, Homo sapiens
attaacctcttgaag

SEQ ID NO: 830209 - DNA, 15 bp, Homo sapiens
ttaacctcttgaagc

SEQ ID NO: 830210 - DNA, 15 bp, Homo sapiens
taacctcttgaagct

SEQ ID NO: 830211 - DNA, 15 bp, Homo sapiens
aacctcttgaagctc

SEQ ID NO: 830212 - DNA, 15 bp, Homo sapiens
acctcttgaagctct

SEQ ID NO: 830213 - DNA, 15 bp, Homo sapiens
cctcttgaagctctg

SEQ ID NO: 830214 - DNA, 15 bp, Homo sapiens
ctcttgaagctctgg

SEQ ID NO: 830215 - DNA, 15 bp, Homo sapiens
tcttgaagctctggg

SEQ ID NO: 830216 - DNA, 15 bp, Homo sapiens
cttgaagctctgggt

SEQ ID NO: 830217 - DNA, 15 bp, Homo sapiens
ttgaagctctgggtt

SEQ ID NO: 830218 - DNA, 15 bp, Homo sapiens
tgaagctctgggtta

SEQ ID NO: 830219 - DNA, 15 bp, Homo sapiens
gaagctctgggttaa

SEQ ID NO: 830220 - DNA, 15 bp, Homo sapiens
aagctctgggttaat

SEQ ID NO: 830221 - DNA, 15 bp, Homo sapiens
agctctgggttaata

SEQ ID NO: 830222 - DNA, 15 bp, Homo sapiens
gctctgggttaataa

SEQ ID NO: 830223 - DNA, 15 bp, Homo sapiens
ctctgggttaataac

SEQ ID NO: 830224 - DNA, 15 bp, Homo sapiens
tctgggttaataaca

SEQ ID NO: 830225 - DNA, 15 bp, Homo sapiens
ctgggttaataacat

SEQ ID NO: 830226 - DNA, 15 bp, Homo sapiens
tgggttaataacata

SEQ ID NO: 830227 - DNA, 15 bp, Homo sapiens
gggttaataacatac

SEQ ID NO: 830228 - DNA, 15 bp, Homo sapiens
ggttaataacatacc

SEQ ID NO: 830229 - DNA, 15 bp, Homo sapiens
gttaataacatacct

SEQ ID NO: 830230 - DNA, 15 bp, Homo sapiens
ttaataacatacctg

SEQ ID NO: 830231 - DNA, 15 bp, Homo sapiens
taataacatacctgc

SEQ ID NO: 830232 - DNA, 15 bp, Homo sapiens
aataacatacctgcc

SEQ ID NO: 830233 - DNA, 15 bp, Homo sapiens
ataacatacctgcct

SEQ ID NO: 830234 - DNA, 15 bp, Homo sapiens
taacatacctgccta

SEQ ID NO: 830235 - DNA, 15 bp, Homo sapiens
aacatacctgcctat

SEQ ID NO: 830236 - DNA, 15 bp, Homo sapiens
acatacctgcctata

SEQ ID NO: 830237 - DNA, 15 bp, Homo sapiens
catacctgcctatag

SEQ ID NO: 830238 - DNA, 15 bp, Homo sapiens
atacctgcctatagg

SEQ ID NO: 830239 - DNA, 15 bp, Homo sapiens
tacctgcctataggg

SEQ ID NO: 830240 - DNA, 15 bp, Homo sapiens
acctgcctatagggt

SEQ ID NO: 830241 - DNA, 15 bp, Homo sapiens
cctgcctatagggtt

SEQ ID NO: 830242 - DNA, 15 bp, Homo sapiens
ctgcctatagggttg

SEQ ID NO: 830243 - DNA, 15 bp, Homo sapiens
tgcctatagggttgt

SEQ ID NO: 830244 - DNA, 15 bp, Homo sapiens
gcctatagggttgtt

SEQ ID NO: 830245 - DNA, 15 bp, Homo sapiens
cctatagggttgttt

SEQ ID NO: 830246 - DNA, 15 bp, Homo sapiens
ctatagggttgtttt

SEQ ID NO: 830247 - DNA, 15 bp, Homo sapiens
tatagggttgttttg

SEQ ID NO: 830248 - DNA, 15 bp, Homo sapiens
atagggttgttttga

SEQ ID NO: 830249 - DNA, 15 bp, Homo sapiens
tagggttgttttgag

SEQ ID NO: 830250 - DNA, 15 bp, Homo sapiens
agggttgttttgaga

SEQ ID NO: 830251 - DNA, 15 bp, Homo sapiens
gggttgttttgagat

SEQ ID NO: 830252 - DNA, 15 bp, Homo sapiens
ggttgttttgagatt

SEQ ID NO: 830253 - DNA, 15 bp, Homo sapiens
gttgttttgagattt

SEQ ID NO: 830254 - DNA, 15 bp, Homo sapiens
ttgttttgagattta

SEQ ID NO: 830255 - DNA, 15 bp, Homo sapiens
tgttttgagatttaa

SEQ ID NO: 830256 - DNA, 15 bp, Homo sapiens
gttttgagatttaaa

SEQ ID NO: 830257 - DNA, 15 bp, Homo sapiens
ttttgagatttaaat

SEQ ID NO: 830258 - DNA, 15 bp, Homo sapiens
tttgagatttaaatg

SEQ ID NO: 830259 - DNA, 15 bp, Homo sapiens
ttgagatttaaatga

SEQ ID NO: 830260 - DNA, 15 bp, Homo sapiens
tgagatttaaatgaa

SEQ ID NO: 830261 - DNA, 15 bp, Homo sapiens
gagatttaaatgaat

SEQ ID NO: 830262 - DNA, 15 bp, Homo sapiens
agatttaaatgaatt

SEQ ID NO: 830263 - DNA, 15 bp, Homo sapiens
gatttaaatgaatta

SEQ ID NO: 830264 - DNA, 15 bp, Homo sapiens
atttaaatgaattaa

SEQ ID NO: 830265 - DNA, 15 bp, Homo sapiens
tttaaatgaattaat

SEQ ID NO: 830266 - DNA, 15 bp, Homo sapiens
ttaaatgaattaatg

SEQ ID NO: 830267 - DNA, 15 bp, Homo sapiens
taaatgaattaatgc

SEQ ID NO: 830268 - DNA, 15 bp, Homo sapiens
aaatgaattaatgct

SEQ ID NO: 830269 - DNA, 15 bp, Homo sapiens
aatgaattaatgctc

SEQ ID NO: 830270 - DNA, 15 bp, Homo sapiens
atgaattaatgctca

SEQ ID NO: 830271 - DNA, 15 bp, Homo sapiens
tgaattaatgctcat

SEQ ID NO: 830272 - DNA, 15 bp, Homo sapiens
gaattaatgctcatc

SEQ ID NO: 830273 - DNA, 15 bp, Homo sapiens
aattaatgctcatca

SEQ ID NO: 830274 - DNA, 15 bp, Homo sapiens
attaatgctcatcat

SEQ ID NO: 830275 - DNA, 15 bp, Homo sapiens
ttaatgctcatcatg

SEQ ID NO: 830276 - DNA, 15 bp, Homo sapiens
taatgctcatcatgg

SEQ ID NO: 830277 - DNA, 15 bp, Homo sapiens
aatgctcatcatggc

SEQ ID NO: 830278 - DNA, 15 bp, Homo sapiens
atgctcatcatggcc

SEQ ID NO: 830279 - DNA, 15 bp, Homo sapiens
tgctcatcatggcca

SEQ ID NO: 830280 - DNA, 15 bp, Homo sapiens
gctcatcatggccag

SEQ ID NO: 830281 - DNA, 15 bp, Homo sapiens
ctcatcatggccagg

SEQ ID NO: 830282 - DNA, 15 bp, Homo sapiens
tcatcatggccaggc

SEQ ID NO: 830283 - DNA, 15 bp, Homo sapiens
catcatggccaggca

SEQ ID NO: 830284 - DNA, 15 bp, Homo sapiens
atcatggccaggcat

SEQ ID NO: 830285 - DNA, 15 bp, Homo sapiens
tcatggccaggcatg

SEQ ID NO: 830286 - DNA, 15 bp, Homo sapiens
catggccaggcatgg

SEQ ID NO: 830287 - DNA, 15 bp, Homo sapiens
atggccaggcatggt

SEQ ID NO: 830288 - DNA, 15 bp, Homo sapiens
tggccaggcatggtg

SEQ ID NO: 830289 - DNA, 15 bp, Homo sapiens
ggccaggcatggtgg

SEQ ID NO: 830290 - DNA, 15 bp, Homo sapiens
agcactttgggaggg

SEQ ID NO: 830291 - DNA, 15 bp, Homo sapiens
gcactttgggagggc

SEQ ID NO: 830292 - DNA, 15 bp, Homo sapiens
cactttgggagggca

SEQ ID NO: 830293 - DNA, 15 bp, Homo sapiens
actttgggagggcaa

SEQ ID NO: 830294 - DNA, 15 bp, Homo sapiens
ctttgggagggcaag

SEQ ID NO: 830295 - DNA, 15 bp, Homo sapiens
tttgggagggcaagg

SEQ ID NO: 830296 - DNA, 15 bp, Homo sapiens
ttgggagggcaaggt

SEQ ID NO: 830297 - DNA, 15 bp, Homo sapiens
tgggagggcaaggtg

SEQ ID NO: 830298 - DNA, 15 bp, Homo sapiens
gggagggcaaggtgg

SEQ ID NO: 830299 - DNA, 15 bp, Homo sapiens
ggagggcaaggtggg

SEQ ID NO: 830300 - DNA, 15 bp, Homo sapiens
gagggcaaggtgggt

SEQ ID NO: 830301 - DNA, 15 bp, Homo sapiens
agggcaaggtgggtg

SEQ ID NO: 830302 - DNA, 15 bp, Homo sapiens
gggcaaggtgggtgg

SEQ ID NO: 830303 - DNA, 15 bp, Homo sapiens
ggcaaggtgggtggc

SEQ ID NO: 830304 - DNA, 15 bp, Homo sapiens
gcaaggtgggtggct

SEQ ID NO: 830305 - DNA, 15 bp, Homo sapiens
caaggtgggtggctc

SEQ ID NO: 830306 - DNA, 15 bp, Homo sapiens
aaggtgggtggctca

SEQ ID NO: 830307 - DNA, 15 bp, Homo sapiens
aggtgggtggctcac

SEQ ID NO: 830308 - DNA, 15 bp, Homo sapiens
ggtgggtggctcact

SEQ ID NO: 830309 - DNA, 15 bp, Homo sapiens
gtgggtggctcactt

SEQ ID NO: 830310 - DNA, 15 bp, Homo sapiens
tgggtggctcacttg

SEQ ID NO: 830311 - DNA, 15 bp, Homo sapiens
gggtggctcacttga

SEQ ID NO: 830312 - DNA, 15 bp, Homo sapiens
ggtggctcacttgag

SEQ ID NO: 830313 - DNA, 15 bp, Homo sapiens
gtggctcacttgagg

SEQ ID NO: 830314 - DNA, 15 bp, Homo sapiens
tggctcacttgaggc

SEQ ID NO: 830315 - DNA, 15 bp, Homo sapiens
ggctcacttgaggcc

SEQ ID NO: 830316 - DNA, 15 bp, Homo sapiens
gctcacttgaggcca

SEQ ID NO: 830317 - DNA, 15 bp, Homo sapiens
ctcacttgaggccag

SEQ ID NO: 830318 - DNA, 15 bp, Homo sapiens
tcacttgaggccagg

SEQ ID NO: 830319 - DNA, 15 bp, Homo sapiens
cacttgaggccagga

SEQ ID NO: 830320 - DNA, 15 bp, Homo sapiens
acttgaggccaggag

SEQ ID NO: 830321 - DNA, 15 bp, Homo sapiens
gccaggagttcaaga

SEQ ID NO: 830322 - DNA, 15 bp, Homo sapiens
cctggccaatgtggc

SEQ ID NO: 830323 - DNA, 15 bp, Homo sapiens
ctggccaatgtggca

SEQ ID NO: 830324 - DNA, 15 bp, Homo sapiens
tggccaatgtggcaa

SEQ ID NO: 830325 - DNA, 15 bp, Homo sapiens
ggccaatgtggcaaa

SEQ ID NO: 830326 - DNA, 15 bp, Homo sapiens
gccaatgtggcaaaa

SEQ ID NO: 830327 - DNA, 15 bp, Homo sapiens
ccaatgtggcaaaac

SEQ ID NO: 830328 - DNA, 15 bp, Homo sapiens
caatgtggcaaaacc

SEQ ID NO: 830329 - DNA, 15 bp, Homo sapiens
aatgtggcaaaaccc

SEQ ID NO: 830330 - DNA, 15 bp, Homo sapiens
atgtggcaaaaccct

SEQ ID NO: 830331 - DNA, 15 bp, Homo sapiens
tgtggcaaaaccctg

SEQ ID NO: 830332 - DNA, 15 bp, Homo sapiens
gtggcaaaaccctgt

SEQ ID NO: 830333 - DNA, 15 bp, Homo sapiens
tggcaaaaccctgtg

SEQ ID NO: 830334 - DNA, 15 bp, Homo sapiens
ggcaaaaccctgtgt

SEQ ID NO: 830335 - DNA, 15 bp, Homo sapiens
gcaaaaccctgtgtc

SEQ ID NO: 830336 - DNA, 15 bp, Homo sapiens
caaaaccctgtgtct

SEQ ID NO: 830337 - DNA, 15 bp, Homo sapiens
aaaaccctgtgtcta

SEQ ID NO: 830338 - DNA, 15 bp, Homo sapiens
aaaccctgtgtctac

SEQ ID NO: 830339 - DNA, 15 bp, Homo sapiens
aaccctgtgtctact

SEQ ID NO: 830340 - DNA, 15 bp, Homo sapiens
accctgtgtctactg

SEQ ID NO: 830341 - DNA, 15 bp, Homo sapiens
ccctgtgtctactga

SEQ ID NO: 830342 - DNA, 15 bp, Homo sapiens
cctgtgtctactgaa

SEQ ID NO: 830343 - DNA, 15 bp, Homo sapiens
ctgtgtctactgaaa

SEQ ID NO: 830344 - DNA, 15 bp, Homo sapiens
tgtgtctactgaaaa

SEQ ID NO: 830345 - DNA, 15 bp, Homo sapiens
gtgtctactgaaaac

SEQ ID NO: 830346 - DNA, 15 bp, Homo sapiens
tgtctactgaaaaca

SEQ ID NO: 830347 - DNA, 15 bp, Homo sapiens
gtctactgaaaacac

SEQ ID NO: 830348 - DNA, 15 bp, Homo sapiens
tctactgaaaacaca

SEQ ID NO: 830349 - DNA, 15 bp, Homo sapiens
ctactgaaaacacaa

SEQ ID NO: 830350 - DNA, 15 bp, Homo sapiens
tactgaaaacacaaa

SEQ ID NO: 830351 - DNA, 15 bp, Homo sapiens
actgaaaacacaaaa

SEQ ID NO: 830352 - DNA, 15 bp, Homo sapiens
ctgaaaacacaaaaa

SEQ ID NO: 830353 - DNA, 15 bp, Homo sapiens
tgaaaacacaaaaat

SEQ ID NO: 830354 - DNA, 15 bp, Homo sapiens
gaaaacacaaaaatt

SEQ ID NO: 830355 - DNA, 15 bp, Homo sapiens
aaaacacaaaaatta

SEQ ID NO: 830356 - DNA, 15 bp, Homo sapiens
aaacacaaaaattag

SEQ ID NO: 830357 - DNA, 15 bp, Homo sapiens
aacacaaaaattagc

SEQ ID NO: 830358 - DNA, 15 bp, Homo sapiens
acacaaaaattagcc

SEQ ID NO: 830359 - DNA, 15 bp, Homo sapiens
cacaaaaattagccg

SEQ ID NO: 830360 - DNA, 15 bp, Homo sapiens
cgggcatggtggcac

SEQ ID NO: 830361 - DNA, 15 bp, Homo sapiens
gggcatggtggcaca

SEQ ID NO: 830362 - DNA, 15 bp, Homo sapiens
gcatggtggcacatg

SEQ ID NO: 830363 - DNA, 15 bp, Homo sapiens
catggtggcacatgc

SEQ ID NO: 830364 - DNA, 15 bp, Homo sapiens
atggtggcacatgcc

SEQ ID NO: 830365 - DNA, 15 bp, Homo sapiens
ggcacatgcctataa

SEQ ID NO: 830366 - DNA, 15 bp, Homo sapiens
gcacatgcctataat

SEQ ID NO: 830367 - DNA, 15 bp, Homo sapiens
cacatgcctataatc

SEQ ID NO: 830368 - DNA, 15 bp, Homo sapiens
acatgcctataatcc

SEQ ID NO: 830369 - DNA, 15 bp, Homo sapiens
catgcctataatccc

SEQ ID NO: 830370 - DNA, 15 bp, Homo sapiens
aatcccagctactct

SEQ ID NO: 830371 - DNA, 15 bp, Homo sapiens
atcccagctactctg

SEQ ID NO: 830372 - DNA, 15 bp, Homo sapiens
tcccagctactctga

SEQ ID NO: 830373 - DNA, 15 bp, Homo sapiens
cccagctactctgaa

SEQ ID NO: 830374 - DNA, 15 bp, Homo sapiens
ccagctactctgaag

SEQ ID NO: 830375 - DNA, 15 bp, Homo sapiens
cagctactctgaagg

SEQ ID NO: 830376 - DNA, 15 bp, Homo sapiens
agctactctgaaggc

SEQ ID NO: 830377 - DNA, 15 bp, Homo sapiens
gctactctgaaggct

SEQ ID NO: 830378 - DNA, 15 bp, Homo sapiens
ctactctgaaggctg

SEQ ID NO: 830379 - DNA, 15 bp, Homo sapiens
tactctgaaggctga

SEQ ID NO: 830380 - DNA, 15 bp, Homo sapiens
actctgaaggctgag

SEQ ID NO: 830381 - DNA, 15 bp, Homo sapiens
ctctgaaggctgagg

SEQ ID NO: 830382 - DNA, 15 bp, Homo sapiens
tctgaaggctgaggc

SEQ ID NO: 830383 - DNA, 15 bp, Homo sapiens
ctgaaggctgaggca

SEQ ID NO: 830384 - DNA, 15 bp, Homo sapiens
tgaaggctgaggcac

SEQ ID NO: 830385 - DNA, 15 bp, Homo sapiens
gaaggctgaggcaca

SEQ ID NO: 830386 - DNA, 15 bp, Homo sapiens
aaggctgaggcacaa

SEQ ID NO: 830387 - DNA, 15 bp, Homo sapiens
aggctgaggcacaaa

SEQ ID NO: 830388 - DNA, 15 bp, Homo sapiens
ggctgaggcacaaaa

SEQ ID NO: 830389 - DNA, 15 bp, Homo sapiens
gctgaggcacaaaaa

SEQ ID NO: 830390 - DNA, 15 bp, Homo sapiens
ctgaggcacaaaaat

SEQ ID NO: 830391 - DNA, 15 bp, Homo sapiens
tgaggcacaaaaatc

SEQ ID NO: 830392 - DNA, 15 bp, Homo sapiens
gaggcacaaaaatca

SEQ ID NO: 830393 - DNA, 15 bp, Homo sapiens
aggcacaaaaatcac

SEQ ID NO: 830394 - DNA, 15 bp, Homo sapiens
ggcacaaaaatcact

SEQ ID NO: 830395 - DNA, 15 bp, Homo sapiens
gcacaaaaatcactt

SEQ ID NO: 830396 - DNA, 15 bp, Homo sapiens
cacaaaaatcacttg

SEQ ID NO: 830397 - DNA, 15 bp, Homo sapiens
acaaaaatcacttga

SEQ ID NO: 830398 - DNA, 15 bp, Homo sapiens
caaaaatcacttgaa

SEQ ID NO: 830399 - DNA, 15 bp, Homo sapiens
aaaaatcacttgaac

SEQ ID NO: 830400 - DNA, 15 bp, Homo sapiens
aaaatcacttgaacc

SEQ ID NO: 830401 - DNA, 15 bp, Homo sapiens
aaatcacttgaacct

SEQ ID NO: 830402 - DNA, 15 bp, Homo sapiens
acttgaacctgggaa

SEQ ID NO: 830403 - DNA, 15 bp, Homo sapiens
cttgaacctgggaag

SEQ ID NO: 830404 - DNA, 15 bp, Homo sapiens
ttgaacctgggaagt

SEQ ID NO: 830405 - DNA, 15 bp, Homo sapiens
tgaacctgggaagtt

SEQ ID NO: 830406 - DNA, 15 bp, Homo sapiens
gaacctgggaagttg

SEQ ID NO: 830407 - DNA, 15 bp, Homo sapiens
aacctgggaagttgc

SEQ ID NO: 830408 - DNA, 15 bp, Homo sapiens
acctgggaagttgca

SEQ ID NO: 830409 - DNA, 15 bp, Homo sapiens
cctgggaagttgcag

SEQ ID NO: 830410 - DNA, 15 bp, Homo sapiens
ctgggaagttgcagt

SEQ ID NO: 830411 - DNA, 15 bp, Homo sapiens
tgggaagttgcagtg

SEQ ID NO: 830412 - DNA, 15 bp, Homo sapiens
gggaagttgcagtga

SEQ ID NO: 830413 - DNA, 15 bp, Homo sapiens
aagttgcagtgagca

SEQ ID NO: 830414 - DNA, 15 bp, Homo sapiens
agttgcagtgagcag

SEQ ID NO: 830415 - DNA, 15 bp, Homo sapiens
gttgcagtgagcaga

SEQ ID NO: 830416 - DNA, 15 bp, Homo sapiens
ttgcagtgagcagag

SEQ ID NO: 830417 - DNA, 15 bp, Homo sapiens
tgcagtgagcagaga

SEQ ID NO: 830418 - DNA, 15 bp, Homo sapiens
gcagtgagcagagat

SEQ ID NO: 830419 - DNA, 15 bp, Homo sapiens
cagtgagcagagatc

SEQ ID NO: 830420 - DNA, 15 bp, Homo sapiens
agtgagcagagatcc

SEQ ID NO: 830421 - DNA, 15 bp, Homo sapiens
gtgagcagagatcct

SEQ ID NO: 830422 - DNA, 15 bp, Homo sapiens
tgagcagagatcctg

SEQ ID NO: 830423 - DNA, 15 bp, Homo sapiens
gagcagagatcctgc

SEQ ID NO: 830424 - DNA, 15 bp, Homo sapiens
agcagagatcctgcc

SEQ ID NO: 830425 - DNA, 15 bp, Homo sapiens
gcagagatcctgcca

SEQ ID NO: 830426 - DNA, 15 bp, Homo sapiens
cagagatcctgccac

SEQ ID NO: 830427 - DNA, 15 bp, Homo sapiens
agagatcctgccact

SEQ ID NO: 830428 - DNA, 15 bp, Homo sapiens
gagatcctgccactg

SEQ ID NO: 830429 - DNA, 15 bp, Homo sapiens
agatcctgccactgc

SEQ ID NO: 830430 - DNA, 15 bp, Homo sapiens
gatcctgccactgca

SEQ ID NO: 830431 - DNA, 15 bp, Homo sapiens
atcctgccactgcac

SEQ ID NO: 830432 - DNA, 15 bp, Homo sapiens
tcctgccactgcact

SEQ ID NO: 830433 - DNA, 15 bp, Homo sapiens
cctgccactgcactg

SEQ ID NO: 830434 - DNA, 15 bp, Homo sapiens
ctgccactgcactgc

SEQ ID NO: 830435 - DNA, 15 bp, Homo sapiens
tgccactgcactgca

SEQ ID NO: 830436 - DNA, 15 bp, Homo sapiens
gccactgcactgcag

SEQ ID NO: 830437 - DNA, 15 bp, Homo sapiens
ccactgcactgcagt

SEQ ID NO: 830438 - DNA, 15 bp, Homo sapiens
cactgcactgcagtc

SEQ ID NO: 830439 - DNA, 15 bp, Homo sapiens
actgcactgcagtct

SEQ ID NO: 830440 - DNA, 15 bp, Homo sapiens
ctgcactgcagtctg

SEQ ID NO: 830441 - DNA, 15 bp, Homo sapiens
tgcactgcagtctgt

SEQ ID NO: 830442 - DNA, 15 bp, Homo sapiens
gcactgcagtctgtg

SEQ ID NO: 830443 - DNA, 15 bp, Homo sapiens
cactgcagtctgtgt

SEQ ID NO: 830444 - DNA, 15 bp, Homo sapiens
actgcagtctgtgtg

SEQ ID NO: 830445 - DNA, 15 bp, Homo sapiens
ctgcagtctgtgtga

SEQ ID NO: 830446 - DNA, 15 bp, Homo sapiens
tgcagtctgtgtgac

SEQ ID NO: 830447 - DNA, 15 bp, Homo sapiens
gcagtctgtgtgaca

SEQ ID NO: 830448 - DNA, 15 bp, Homo sapiens
cagtctgtgtgacag

SEQ ID NO: 830449 - DNA, 15 bp, Homo sapiens
agtctgtgtgacaga

SEQ ID NO: 830450 - DNA, 15 bp, Homo sapiens
gtctgtgtgacagag

SEQ ID NO: 830451 - DNA, 15 bp, Homo sapiens
tctgtgtgacagaga

SEQ ID NO: 830452 - DNA, 15 bp, Homo sapiens
ctgtgtgacagagat

SEQ ID NO: 830453 - DNA, 15 bp, Homo sapiens
tgtgtgacagagata

SEQ ID NO: 830454 - DNA, 15 bp, Homo sapiens
gtgtgacagagataa

SEQ ID NO: 830455 - DNA, 15 bp, Homo sapiens
tgtgacagagataaa

SEQ ID NO: 830456 - DNA, 15 bp, Homo sapiens
gtgacagagataaac

SEQ ID NO: 830457 - DNA, 15 bp, Homo sapiens
tgacagagataaact

SEQ ID NO: 830458 - DNA, 15 bp, Homo sapiens
gacagagataaactc

SEQ ID NO: 830459 - DNA, 15 bp, Homo sapiens
acagagataaactct

SEQ ID NO: 830460 - DNA, 15 bp, Homo sapiens
cagagataaactcta

SEQ ID NO: 830461 - DNA, 15 bp, Homo sapiens
agagataaactctaa

SEQ ID NO: 830462 - DNA, 15 bp, Homo sapiens
gagataaactctaag

SEQ ID NO: 830463 - DNA, 15 bp, Homo sapiens
agataaactctaagt

SEQ ID NO: 830464 - DNA, 15 bp, Homo sapiens
gataaactctaagta

SEQ ID NO: 830465 - DNA, 15 bp, Homo sapiens
ataaactctaagtaa

SEQ ID NO: 830466 - DNA, 15 bp, Homo sapiens
taaactctaagtaaa

SEQ ID NO: 830467 - DNA, 15 bp, Homo sapiens
aaactctaagtaaaa

SEQ ID NO: 830468 - DNA, 15 bp, Homo sapiens
aactctaagtaaaat

SEQ ID NO: 830469 - DNA, 15 bp, Homo sapiens
actctaagtaaaata

SEQ ID NO: 830470 - DNA, 15 bp, Homo sapiens
ctctaagtaaaataa

SEQ ID NO: 830471 - DNA, 15 bp, Homo sapiens
tctaagtaaaataaa

SEQ ID NO: 830472 - DNA, 15 bp, Homo sapiens
ctaagtaaaataaaa

SEQ ID NO: 830473 - DNA, 15 bp, Homo sapiens
taagtaaaataaaat

SEQ ID NO: 830474 - DNA, 15 bp, Homo sapiens
aagtaaaataaaata

SEQ ID NO: 830475 - DNA, 15 bp, Homo sapiens
agtaaaataaaataa

SEQ ID NO: 830476 - DNA, 15 bp, Homo sapiens
gtaaaataaaataaa

SEQ ID NO: 830477 - DNA, 15 bp, Homo sapiens
taaaataaaataaat

SEQ ID NO: 830478 - DNA, 15 bp, Homo sapiens
aaaataaaataaata

SEQ ID NO: 830479 - DNA, 15 bp, Homo sapiens
aaataaaataaataa

SEQ ID NO: 830480 - DNA, 15 bp, Homo sapiens
aataaaataaataaa

SEQ ID NO: 830481 - DNA, 15 bp, Homo sapiens
ataaaataaataaat

SEQ ID NO: 830482 - DNA, 15 bp, Homo sapiens
taaaataaataaata

SEQ ID NO: 830483 - DNA, 15 bp, Homo sapiens
aaaataaataaatat

SEQ ID NO: 830484 - DNA, 15 bp, Homo sapiens
aaataaataaatatt

SEQ ID NO: 830485 - DNA, 15 bp, Homo sapiens
aataaataaatatta

SEQ ID NO: 830486 - DNA, 15 bp, Homo sapiens
ataaataaatattat

SEQ ID NO: 830487 - DNA, 15 bp, Homo sapiens
taaataaatattatt

SEQ ID NO: 830488 - DNA, 15 bp, Homo sapiens
aaataaatattattt

SEQ ID NO: 830489 - DNA, 15 bp, Homo sapiens
aataaatattattta

SEQ ID NO: 830490 - DNA, 15 bp, Homo sapiens
ataaatattatttat

SEQ ID NO: 830491 - DNA, 15 bp, Homo sapiens
taaatattatttatt

SEQ ID NO: 830492 - DNA, 15 bp, Homo sapiens
aaatattatttattt

SEQ ID NO: 830493 - DNA, 15 bp, Homo sapiens
aatattatttatttt

SEQ ID NO: 830494 - DNA, 15 bp, Homo sapiens
atattatttatttta

SEQ ID NO: 830495 - DNA, 15 bp, Homo sapiens
tattatttattttac

SEQ ID NO: 830496 - DNA, 15 bp, Homo sapiens
attatttattttact

SEQ ID NO: 830497 - DNA, 15 bp, Homo sapiens
tttattttacttatt

SEQ ID NO: 830498 - DNA, 15 bp, Homo sapiens
ttattttacttattt

SEQ ID NO: 830499 - DNA, 15 bp, Homo sapiens
tattttacttattta

SEQ ID NO: 830500 - DNA, 15 bp, Homo sapiens
attttacttatttat

SEQ ID NO: 830501 - DNA, 15 bp, Homo sapiens
ttttacttatttatt

SEQ ID NO: 830502 - DNA, 15 bp, Homo sapiens
tttacttatttattt

SEQ ID NO: 830503 - DNA, 15 bp, Homo sapiens
ttacttatttattta

SEQ ID NO: 830504 - DNA, 15 bp, Homo sapiens
tacttatttatttat

SEQ ID NO: 830505 - DNA, 15 bp, Homo sapiens
acttatttatttata

SEQ ID NO: 830506 - DNA, 15 bp, Homo sapiens
cttatttatttataa

SEQ ID NO: 830507 - DNA, 15 bp, Homo sapiens
ttatttatttataat

SEQ ID NO: 830508 - DNA, 15 bp, Homo sapiens
tatttatttataata

SEQ ID NO: 830509 - DNA, 15 bp, Homo sapiens
atttatttataatac

SEQ ID NO: 830510 - DNA, 15 bp, Homo sapiens
tttatttataatact

SEQ ID NO: 830511 - DNA, 15 bp, Homo sapiens
ttatttataatacta

SEQ ID NO: 830512 - DNA, 15 bp, Homo sapiens
tatttataatactat

SEQ ID NO: 830513 - DNA, 15 bp, Homo sapiens
atttataatactatt

SEQ ID NO: 830514 - DNA, 15 bp, Homo sapiens
tttataatactattt

SEQ ID NO: 830515 - DNA, 15 bp, Homo sapiens
ttataatactatttt

SEQ ID NO: 830516 - DNA, 15 bp, Homo sapiens
tataatactatttta

SEQ ID NO: 830517 - DNA, 15 bp, Homo sapiens
ataatactattttac

SEQ ID NO: 830518 - DNA, 15 bp, Homo sapiens
taatactattttact

SEQ ID NO: 830519 - DNA, 15 bp, Homo sapiens
aatactattttacta

SEQ ID NO: 830520 - DNA, 15 bp, Homo sapiens
atactattttactat

SEQ ID NO: 830521 - DNA, 15 bp, Homo sapiens
tactattttactatt

SEQ ID NO: 830522 - DNA, 15 bp, Homo sapiens
actattttactatta

SEQ ID NO: 830523 - DNA, 15 bp, Homo sapiens
ctattttactattat

SEQ ID NO: 830524 - DNA, 15 bp, Homo sapiens
tattttactattatt

SEQ ID NO: 830525 - DNA, 15 bp, Homo sapiens
attttactattattt

SEQ ID NO: 830526 - DNA, 15 bp, Homo sapiens
ttttactattattta

SEQ ID NO: 830527 - DNA, 15 bp, Homo sapiens
tttactattatttat

SEQ ID NO: 830528 - DNA, 15 bp, Homo sapiens
ttactattatttatt

SEQ ID NO: 830529 - DNA, 15 bp, Homo sapiens
tactattatttattt

SEQ ID NO: 830530 - DNA, 15 bp, Homo sapiens
actattatttattta

SEQ ID NO: 830531 - DNA, 15 bp, Homo sapiens
ctattatttatttaa

SEQ ID NO: 830532 - DNA, 15 bp, Homo sapiens
tattatttatttaaa

SEQ ID NO: 830533 - DNA, 15 bp, Homo sapiens
attatttatttaaaa

SEQ ID NO: 830534 - DNA, 15 bp, Homo sapiens
ttatttatttaaaat

SEQ ID NO: 830535 - DNA, 15 bp, Homo sapiens
tatttatttaaaatg

SEQ ID NO: 830536 - DNA, 15 bp, Homo sapiens
atttatttaaaatgt

SEQ ID NO: 830537 - DNA, 15 bp, Homo sapiens
tttatttaaaatgtt

SEQ ID NO: 830538 - DNA, 15 bp, Homo sapiens
ttatttaaaatgtta

SEQ ID NO: 830539 - DNA, 15 bp, Homo sapiens
tatttaaaatgttat

SEQ ID NO: 830540 - DNA, 15 bp, Homo sapiens
atttaaaatgttatc

SEQ ID NO: 830541 - DNA, 15 bp, Homo sapiens
tttaaaatgttatct

SEQ ID NO: 830542 - DNA, 15 bp, Homo sapiens
ttaaaatgttatctg

SEQ ID NO: 830543 - DNA, 15 bp, Homo sapiens
taaaatgttatctgc

SEQ ID NO: 830544 - DNA, 15 bp, Homo sapiens
aaaatgttatctgcc

SEQ ID NO: 830545 - DNA, 15 bp, Homo sapiens
aaatgttatctgcca

SEQ ID NO: 830546 - DNA, 15 bp, Homo sapiens
aatgttatctgccat

SEQ ID NO: 830547 - DNA, 15 bp, Homo sapiens
atgttatctgccata

SEQ ID NO: 830548 - DNA, 15 bp, Homo sapiens
tgttatctgccatat

SEQ ID NO: 830549 - DNA, 15 bp, Homo sapiens
gttatctgccatata

SEQ ID NO: 830550 - DNA, 15 bp, Homo sapiens
ttatctgccatatag

SEQ ID NO: 830551 - DNA, 15 bp, Homo sapiens
tatctgccatatagt

SEQ ID NO: 830552 - DNA, 15 bp, Homo sapiens
atctgccatatagta

SEQ ID NO: 830553 - DNA, 15 bp, Homo sapiens
tctgccatatagtaa

SEQ ID NO: 830554 - DNA, 15 bp, Homo sapiens
ctgccatatagtaaa

SEQ ID NO: 830555 - DNA, 15 bp, Homo sapiens
tgccatatagtaaat

SEQ ID NO: 830556 - DNA, 15 bp, Homo sapiens
gccatatagtaaatg

SEQ ID NO: 830557 - DNA, 15 bp, Homo sapiens
ccatatagtaaatgt

SEQ ID NO: 830558 - DNA, 15 bp, Homo sapiens
catatagtaaatgtt

SEQ ID NO: 830559 - DNA, 15 bp, Homo sapiens
atatagtaaatgtta

SEQ ID NO: 830560 - DNA, 15 bp, Homo sapiens
tatagtaaatgttac

SEQ ID NO: 830561 - DNA, 15 bp, Homo sapiens
atagtaaatgttaca

SEQ ID NO: 830562 - DNA, 15 bp, Homo sapiens
tagtaaatgttacaa

SEQ ID NO: 830563 - DNA, 15 bp, Homo sapiens
agtaaatgttacaaa

SEQ ID NO: 830564 - DNA, 15 bp, Homo sapiens
gtaaatgttacaaaa

SEQ ID NO: 830565 - DNA, 15 bp, Homo sapiens
taaatgttacaaaac

SEQ ID NO: 830566 - DNA, 15 bp, Homo sapiens
aaatgttacaaaaca

SEQ ID NO: 830567 - DNA, 15 bp, Homo sapiens
aatgttacaaaacat

SEQ ID NO: 830568 - DNA, 15 bp, Homo sapiens
atgttacaaaacatg

SEQ ID NO: 830569 - DNA, 15 bp, Homo sapiens
tgttacaaaacatga

SEQ ID NO: 830570 - DNA, 15 bp, Homo sapiens
gttacaaaacatgaa

SEQ ID NO: 830571 - DNA, 15 bp, Homo sapiens
ttacaaaacatgaac

SEQ ID NO: 830572 - DNA, 15 bp, Homo sapiens
tacaaaacatgaact

SEQ ID NO: 830573 - DNA, 15 bp, Homo sapiens
acaaaacatgaacta

SEQ ID NO: 830574 - DNA, 15 bp, Homo sapiens
caaaacatgaactat

SEQ ID NO: 830575 - DNA, 15 bp, Homo sapiens
aaaacatgaactatt

SEQ ID NO: 830576 - DNA, 15 bp, Homo sapiens
aaacatgaactatta

SEQ ID NO: 830577 - DNA, 15 bp, Homo sapiens
aacatgaactattat

SEQ ID NO: 830578 - DNA, 15 bp, Homo sapiens
acatgaactattatt

SEQ ID NO: 830579 - DNA, 15 bp, Homo sapiens
catgaactattatta

SEQ ID NO: 830580 - DNA, 15 bp, Homo sapiens
atgaactattattat

SEQ ID NO: 830581 - DNA, 15 bp, Homo sapiens
tgaactattattatt

SEQ ID NO: 830582 - DNA, 15 bp, Homo sapiens
gaactattattatta

SEQ ID NO: 830583 - DNA, 15 bp, Homo sapiens
aactattattattat

SEQ ID NO: 830584 - DNA, 15 bp, Homo sapiens
actattattattatt

SEQ ID NO: 830585 - DNA, 15 bp, Homo sapiens
ctattattattattg

SEQ ID NO: 830586 - DNA, 15 bp, Homo sapiens
tattattattattgt

SEQ ID NO: 830587 - DNA, 15 bp, Homo sapiens
attattattattgtc

SEQ ID NO: 830588 - DNA, 15 bp, Homo sapiens
ttattattattgtca

SEQ ID NO: 830589 - DNA, 15 bp, Homo sapiens
tattattattgtcat

SEQ ID NO: 830590 - DNA, 15 bp, Homo sapiens
attattattgtcatt

SEQ ID NO: 830591 - DNA, 15 bp, Homo sapiens
ttattattgtcatta

SEQ ID NO: 830592 - DNA, 15 bp, Homo sapiens
tattattgtcattat

SEQ ID NO: 830593 - DNA, 15 bp, Homo sapiens
attattgtcattatg

SEQ ID NO: 830594 - DNA, 15 bp, Homo sapiens
ttattgtcattatgg

SEQ ID NO: 830595 - DNA, 15 bp, Homo sapiens
tattgtcattatgga

SEQ ID NO: 830596 - DNA, 15 bp, Homo sapiens
attgtcattatggac

SEQ ID NO: 830597 - DNA, 15 bp, Homo sapiens
ttgtcattatggact

SEQ ID NO: 830598 - DNA, 15 bp, Homo sapiens
tgtcattatggactt

SEQ ID NO: 830599 - DNA, 15 bp, Homo sapiens
gtcattatggacttc

SEQ ID NO: 830600 - DNA, 15 bp, Homo sapiens
tcattatggacttca

SEQ ID NO: 830601 - DNA, 15 bp, Homo sapiens
cattatggacttcac

SEQ ID NO: 830602 - DNA, 15 bp, Homo sapiens
attatggacttcaca

SEQ ID NO: 830603 - DNA, 15 bp, Homo sapiens
ttatggacttcacaa

SEQ ID NO: 830604 - DNA, 15 bp, Homo sapiens
tatggacttcacaaa

SEQ ID NO: 830605 - DNA, 15 bp, Homo sapiens
atggacttcacaaat

SEQ ID NO: 830606 - DNA, 15 bp, Homo sapiens
tggacttcacaaatg

SEQ ID NO: 830607 - DNA, 15 bp, Homo sapiens
ggacttcacaaatgt

SEQ ID NO: 830608 - DNA, 15 bp, Homo sapiens
gacttcacaaatgtt

SEQ ID NO: 830609 - DNA, 15 bp, Homo sapiens
acttcacaaatgtta

SEQ ID NO: 830610 - DNA, 15 bp, Homo sapiens
cttcacaaatgttag

SEQ ID NO: 830611 - DNA, 15 bp, Homo sapiens
ttcacaaatgttagg

SEQ ID NO: 830612 - DNA, 15 bp, Homo sapiens
tcacaaatgttaggc

SEQ ID NO: 830613 - DNA, 15 bp, Homo sapiens
cacaaatgttaggca

SEQ ID NO: 830614 - DNA, 15 bp, Homo sapiens
acaaatgttaggcaa

SEQ ID NO: 830615 - DNA, 15 bp, Homo sapiens
caaatgttaggcaag

SEQ ID NO: 830616 - DNA, 15 bp, Homo sapiens
aaatgttaggcaagt

SEQ ID NO: 830617 - DNA, 15 bp, Homo sapiens
aatgttaggcaagtg

SEQ ID NO: 830618 - DNA, 15 bp, Homo sapiens
atgttaggcaagtgt

SEQ ID NO: 830619 - DNA, 15 bp, Homo sapiens
tgttaggcaagtgtt

SEQ ID NO: 830620 - DNA, 15 bp, Homo sapiens
gttaggcaagtgttg

SEQ ID NO: 830621 - DNA, 15 bp, Homo sapiens
ttaggcaagtgttga

SEQ ID NO: 830622 - DNA, 15 bp, Homo sapiens
taggcaagtgttgac

SEQ ID NO: 830623 - DNA, 15 bp, Homo sapiens
aggcaagtgttgact

SEQ ID NO: 830624 - DNA, 15 bp, Homo sapiens
ggcaagtgttgactt

SEQ ID NO: 830625 - DNA, 15 bp, Homo sapiens
gcaagtgttgactta

SEQ ID NO: 830626 - DNA, 15 bp, Homo sapiens
caagtgttgacttat

SEQ ID NO: 830627 - DNA, 15 bp, Homo sapiens
aagtgttgacttatc

SEQ ID NO: 830628 - DNA, 15 bp, Homo sapiens
agtgttgacttatca

SEQ ID NO: 830629 - DNA, 15 bp, Homo sapiens
gtgttgacttatcac

SEQ ID NO: 830630 - DNA, 15 bp, Homo sapiens
tgttgacttatcacg

SEQ ID NO: 830631 - DNA, 15 bp, Homo sapiens
gttgacttatcacgg

SEQ ID NO: 830632 - DNA, 15 bp, Homo sapiens
ttgacttatcacggt

SEQ ID NO: 830633 - DNA, 15 bp, Homo sapiens
tgacttatcacggta

SEQ ID NO: 830634 - DNA, 15 bp, Homo sapiens
gacttatcacggtac

SEQ ID NO: 830635 - DNA, 15 bp, Homo sapiens
acttatcacggtacc

SEQ ID NO: 830636 - DNA, 15 bp, Homo sapiens
cttatcacggtacct

SEQ ID NO: 830637 - DNA, 15 bp, Homo sapiens
ttatcacggtacctg

SEQ ID NO: 830638 - DNA, 15 bp, Homo sapiens
tatcacggtacctgg

SEQ ID NO: 830639 - DNA, 15 bp, Homo sapiens
atcacggtacctggc

SEQ ID NO: 830640 - DNA, 15 bp, Homo sapiens
tcacggtacctggcg

SEQ ID NO: 830641 - DNA, 15 bp, Homo sapiens
cacggtacctggcgt

SEQ ID NO: 830642 - DNA, 15 bp, Homo sapiens
acggtacctggcgta

SEQ ID NO: 830643 - DNA, 15 bp, Homo sapiens
cggtacctggcgtat

SEQ ID NO: 830644 - DNA, 15 bp, Homo sapiens
ggtacctggcgtata

SEQ ID NO: 830645 - DNA, 15 bp, Homo sapiens
gtacctggcgtatag

SEQ ID NO: 830646 - DNA, 15 bp, Homo sapiens
tacctggcgtatagt

SEQ ID NO: 830647 - DNA, 15 bp, Homo sapiens
acctggcgtatagta

SEQ ID NO: 830648 - DNA, 15 bp, Homo sapiens
cctggcgtatagtag

SEQ ID NO: 830649 - DNA, 15 bp, Homo sapiens
ctggcgtatagtagg

SEQ ID NO: 830650 - DNA, 15 bp, Homo sapiens
tggcgtatagtaggt

SEQ ID NO: 830651 - DNA, 15 bp, Homo sapiens
ggcgtatagtaggtt

SEQ ID NO: 830652 - DNA, 15 bp, Homo sapiens
gcgtatagtaggttc

SEQ ID NO: 830653 - DNA, 15 bp, Homo sapiens
cgtatagtaggttct

SEQ ID NO: 830654 - DNA, 15 bp, Homo sapiens
gtatagtaggttcta

SEQ ID NO: 830655 - DNA, 15 bp, Homo sapiens
tatagtaggttctaa

SEQ ID NO: 830656 - DNA, 15 bp, Homo sapiens
atagtaggttctaac

SEQ ID NO: 830657 - DNA, 15 bp, Homo sapiens
tagtaggttctaact

SEQ ID NO: 830658 - DNA, 15 bp, Homo sapiens
agtaggttctaacta

SEQ ID NO: 830659 - DNA, 15 bp, Homo sapiens
gtaggttctaactaa

SEQ ID NO: 830660 - DNA, 15 bp, Homo sapiens
taggttctaactaaa

SEQ ID NO: 830661 - DNA, 15 bp, Homo sapiens
aggttctaactaaat

SEQ ID NO: 830662 - DNA, 15 bp, Homo sapiens
ggttctaactaaata

SEQ ID NO: 830663 - DNA, 15 bp, Homo sapiens
gttctaactaaatat

SEQ ID NO: 830664 - DNA, 15 bp, Homo sapiens
ttctaactaaatatc

SEQ ID NO: 830665 - DNA, 15 bp, Homo sapiens
tctaactaaatatca

SEQ ID NO: 830666 - DNA, 15 bp, Homo sapiens
ctaactaaatatcat

SEQ ID NO: 830667 - DNA, 15 bp, Homo sapiens
taactaaatatcatc

SEQ ID NO: 830668 - DNA, 15 bp, Homo sapiens
aactaaatatcatct

SEQ ID NO: 830669 - DNA, 15 bp, Homo sapiens
actaaatatcatctc

SEQ ID NO: 830670 - DNA, 15 bp, Homo sapiens
ctaaatatcatctcc

SEQ ID NO: 830671 - DNA, 15 bp, Homo sapiens
taaatatcatctccc

SEQ ID NO: 830672 - DNA, 15 bp, Homo sapiens
aaatatcatctccca

SEQ ID NO: 830673 - DNA, 15 bp, Homo sapiens
aatatcatctcccag

SEQ ID NO: 830674 - DNA, 15 bp, Homo sapiens
atatcatctcccagt

SEQ ID NO: 830675 - DNA, 15 bp, Homo sapiens
tatcatctcccagtg

SEQ ID NO: 830676 - DNA, 15 bp, Homo sapiens
atcatctcccagtgc

SEQ ID NO: 830677 - DNA, 15 bp, Homo sapiens
tcatctcccagtgcc

SEQ ID NO: 830678 - DNA, 15 bp, Homo sapiens
catctcccagtgcct

SEQ ID NO: 830679 - DNA, 15 bp, Homo sapiens
atctcccagtgccta

SEQ ID NO: 830680 - DNA, 15 bp, Homo sapiens
tctcccagtgcctag

SEQ ID NO: 830681 - DNA, 15 bp, Homo sapiens
ctcccagtgcctagc

SEQ ID NO: 830682 - DNA, 15 bp, Homo sapiens
tcccagtgcctagca

SEQ ID NO: 830683 - DNA, 15 bp, Homo sapiens
cccagtgcctagcac

SEQ ID NO: 830684 - DNA, 15 bp, Homo sapiens
ccagtgcctagcacg

SEQ ID NO: 830685 - DNA, 15 bp, Homo sapiens
cagtgcctagcacgg

SEQ ID NO: 830686 - DNA, 15 bp, Homo sapiens
agtgcctagcacggt

SEQ ID NO: 830687 - DNA, 15 bp, Homo sapiens
gtgcctagcacggta

SEQ ID NO: 830688 - DNA, 15 bp, Homo sapiens
tgcctagcacggtac

SEQ ID NO: 830689 - DNA, 15 bp, Homo sapiens
gcctagcacggtacc

SEQ ID NO: 830690 - DNA, 15 bp, Homo sapiens
cctagcacggtacct

SEQ ID NO: 830691 - DNA, 15 bp, Homo sapiens
ctagcacggtacctt

SEQ ID NO: 830692 - DNA, 15 bp, Homo sapiens
tagcacggtacctta

SEQ ID NO: 830693 - DNA, 15 bp, Homo sapiens
agcacggtaccttat

SEQ ID NO: 830694 - DNA, 15 bp, Homo sapiens
gcacggtaccttatc

SEQ ID NO: 830695 - DNA, 15 bp, Homo sapiens
cacggtaccttatcg

SEQ ID NO: 830696 - DNA, 15 bp, Homo sapiens
acggtaccttatcga

SEQ ID NO: 830697 - DNA, 15 bp, Homo sapiens
cggtaccttatcgac

SEQ ID NO: 830698 - DNA, 15 bp, Homo sapiens
ggtaccttatcgaca

SEQ ID NO: 830699 - DNA, 15 bp, Homo sapiens
gtaccttatcgacag

SEQ ID NO: 830700 - DNA, 15 bp, Homo sapiens
taccttatcgacagt

SEQ ID NO: 830701 - DNA, 15 bp, Homo sapiens
accttatcgacagtc

SEQ ID NO: 830702 - DNA, 15 bp, Homo sapiens
ccttatcgacagtct

SEQ ID NO: 830703 - DNA, 15 bp, Homo sapiens
cttatcgacagtctt

SEQ ID NO: 830704 - DNA, 15 bp, Homo sapiens
ttatcgacagtcttt

SEQ ID NO: 830705 - DNA, 15 bp, Homo sapiens
tatcgacagtctttt

SEQ ID NO: 830706 - DNA, 15 bp, Homo sapiens
atcgacagtcttttt

SEQ ID NO: 830707 - DNA, 15 bp, Homo sapiens
tcgacagtctttttc

SEQ ID NO: 830708 - DNA, 15 bp, Homo sapiens
cgacagtctttttca

SEQ ID NO: 830709 - DNA, 15 bp, Homo sapiens
gacagtctttttcat

SEQ ID NO: 830710 - DNA, 15 bp, Homo sapiens
acagtctttttcatc

SEQ ID NO: 830711 - DNA, 15 bp, Homo sapiens
cagtctttttcatct

SEQ ID NO: 830712 - DNA, 15 bp, Homo sapiens
agtctttttcatctc

SEQ ID NO: 830713 - DNA, 15 bp, Homo sapiens
gtctttttcatctct

SEQ ID NO: 830714 - DNA, 15 bp, Homo sapiens
tctttttcatctctg

SEQ ID NO: 830715 - DNA, 15 bp, Homo sapiens
ctttttcatctctgc

SEQ ID NO: 830716 - DNA, 15 bp, Homo sapiens
tttttcatctctgca

SEQ ID NO: 830717 - DNA, 15 bp, Homo sapiens
ttttcatctctgcag

SEQ ID NO: 830718 - DNA, 15 bp, Homo sapiens
tttcatctctgcaga

SEQ ID NO: 830719 - DNA, 15 bp, Homo sapiens
ttcatctctgcagaa

SEQ ID NO: 830720 - DNA, 15 bp, Homo sapiens
tcatctctgcagaat

SEQ ID NO: 830721 - DNA, 15 bp, Homo sapiens
catctctgcagaatt

SEQ ID NO: 830722 - DNA, 15 bp, Homo sapiens
atctctgcagaatta

SEQ ID NO: 830723 - DNA, 15 bp, Homo sapiens
tctctgcagaattaa

SEQ ID NO: 830724 - DNA, 15 bp, Homo sapiens
ctctgcagaattaac

SEQ ID NO: 830725 - DNA, 15 bp, Homo sapiens
tctgcagaattaaca

SEQ ID NO: 830726 - DNA, 15 bp, Homo sapiens
ctgcagaattaacaa

SEQ ID NO: 830727 - DNA, 15 bp, Homo sapiens
tgcagaattaacaaa

SEQ ID NO: 830728 - DNA, 15 bp, Homo sapiens
gcagaattaacaaat

SEQ ID NO: 830729 - DNA, 15 bp, Homo sapiens
cagaattaacaaatg

SEQ ID NO: 830730 - DNA, 15 bp, Homo sapiens
agaattaacaaatga

SEQ ID NO: 830731 - DNA, 15 bp, Homo sapiens
gaattaacaaatgaa

SEQ ID NO: 830732 - DNA, 15 bp, Homo sapiens
aattaacaaatgaat

SEQ ID NO: 830733 - DNA, 15 bp, Homo sapiens
attaacaaatgaata

SEQ ID NO: 830734 - DNA, 15 bp, Homo sapiens
ttaacaaatgaataa

SEQ ID NO: 830735 - DNA, 15 bp, Homo sapiens
taacaaatgaataaa

SEQ ID NO: 830736 - DNA, 15 bp, Homo sapiens
aacaaatgaataaat

SEQ ID NO: 830737 - DNA, 15 bp, Homo sapiens
acaaatgaataaata

SEQ ID NO: 830738 - DNA, 15 bp, Homo sapiens
caaatgaataaatag

SEQ ID NO: 830739 - DNA, 15 bp, Homo sapiens
aaatgaataaatagg

SEQ ID NO: 830740 - DNA, 15 bp, Homo sapiens
aatgaataaataggt

SEQ ID NO: 830741 - DNA, 15 bp, Homo sapiens
atgaataaataggtc

SEQ ID NO: 830742 - DNA, 15 bp, Homo sapiens
tgaataaataggtca

SEQ ID NO: 830743 - DNA, 15 bp, Homo sapiens
gaataaataggtcac

SEQ ID NO: 830744 - DNA, 15 bp, Homo sapiens
aataaataggtcact

SEQ ID NO: 830745 - DNA, 15 bp, Homo sapiens
ataaataggtcactt

SEQ ID NO: 830746 - DNA, 15 bp, Homo sapiens
taaataggtcacttg

SEQ ID NO: 830747 - DNA, 15 bp, Homo sapiens
aaataggtcacttgt

SEQ ID NO: 830748 - DNA, 15 bp, Homo sapiens
aataggtcacttgtt

SEQ ID NO: 830749 - DNA, 15 bp, Homo sapiens
ataggtcacttgttt

SEQ ID NO: 830750 - DNA, 15 bp, Homo sapiens
taggtcacttgttta

SEQ ID NO: 830751 - DNA, 15 bp, Homo sapiens
aggtcacttgtttaa

SEQ ID NO: 830752 - DNA, 15 bp, Homo sapiens
ggtcacttgtttaat

SEQ ID NO: 830753 - DNA, 15 bp, Homo sapiens
gtcacttgtttaatc

SEQ ID NO: 830754 - DNA, 15 bp, Homo sapiens
tcacttgtttaatcc

SEQ ID NO: 830755 - DNA, 15 bp, Homo sapiens
cacttgtttaatcct

SEQ ID NO: 830756 - DNA, 15 bp, Homo sapiens
acttgtttaatcctt

SEQ ID NO: 830757 - DNA, 15 bp, Homo sapiens
cttgtttaatccttg

SEQ ID NO: 830758 - DNA, 15 bp, Homo sapiens
ttgtttaatccttgt

SEQ ID NO: 830759 - DNA, 15 bp, Homo sapiens
tgtttaatccttgtc

SEQ ID NO: 830760 - DNA, 15 bp, Homo sapiens
gtttaatccttgtcc

SEQ ID NO: 830761 - DNA, 15 bp, Homo sapiens
tttaatccttgtcct

SEQ ID NO: 830762 - DNA, 15 bp, Homo sapiens
ttaatccttgtcctc

SEQ ID NO: 830763 - DNA, 15 bp, Homo sapiens
taatccttgtcctcc

SEQ ID NO: 830764 - DNA, 15 bp, Homo sapiens
aatccttgtcctcca

SEQ ID NO: 830765 - DNA, 15 bp, Homo sapiens
atccttgtcctccaa

SEQ ID NO: 830766 - DNA, 15 bp, Homo sapiens
tccttgtcctccaaa

SEQ ID NO: 830767 - DNA, 15 bp, Homo sapiens
ccttgtcctccaaag

SEQ ID NO: 830768 - DNA, 15 bp, Homo sapiens
cttgtcctccaaaga

SEQ ID NO: 830769 - DNA, 15 bp, Homo sapiens
ttgtcctccaaagag

SEQ ID NO: 830770 - DNA, 15 bp, Homo sapiens
tgtcctccaaagaga

SEQ ID NO: 830771 - DNA, 15 bp, Homo sapiens
gtcctccaaagagaa

SEQ ID NO: 830772 - DNA, 15 bp, Homo sapiens
tcctccaaagagaaa

SEQ ID NO: 830773 - DNA, 15 bp, Homo sapiens
cctccaaagagaaag

SEQ ID NO: 830774 - DNA, 15 bp, Homo sapiens
ctccaaagagaaaga
